United States Patent Application Publication US 2007/0072175 A1 - sequence listing, part 6

SEQ ID NO: 15364 - DNA, 1666 bp, Macaca Fascicularis
  misc_feature (1)...(1666): n = A,T,C or G
tcctgggcaggagagaatttttccttatcacataactgtaatgtttggttgctcagcattagtgatggaagcaaacactaatttctaataaaattgtgctaaactcaatggtacagagccatgtttacagtgagcaggccttggccagcttgcggccatgggctgagttcctgtgtttccgttatcacctgaccttgtgttctagctaggtcataagcgcgactgtactgttgccctgcaaccccggctccccctggaggactaaggacaacactaacaagggctggaactgtgatttaatattaattcaaggaaatgacctctaacaatcactgcagtggcaaaggagaagaaatcctaagaattggggcaagttgcagcacaattcatctctggctcttggaaatctgagagaagctcaggaagtagcttggcttagtcgtcatccatacctaaagctgctcctcggccaaattcctgcatttgtggtctggatgcttggcagagtcatgctcagggctggcgcacccattgctccaggaaacccgactggcttgcctccctcctctcctgggcctagcgaggccagaaatggcaatggttggtcagtgctaagagccaggccactctgactctgacactggtctccctctctgcatttggcaaaaggtaaagtgaacaagagtccagtccagcaaccctgccaactagctgagaggcacattgaccgtaggagatgtccagccagcctccaggctgagagggaaacaggcacatgccctaccggggggcagctccctggaagggcagcagagaaagcaatcaagggcacacactgggtcagaagggaagtctgagactctgggagcagaaatggcaagggtggccaagcgtgcactggtttactgatcaaacctcacgtgacaggccaggaaactcctccaggcctgtggcagctgaaaacagttcctaggtggagaggtttactggaacatggtataggcagggcttatgaggaggccagccttggaggtgtcccacatgggtcttctgaagaaaagttataccaccctcaccacaaaaagaaccccacaatcaaattaagagacccactgtggcccatgatggggagagaagagttctgcagcaattgtgggatgacagttgttcttcctggtgaccaaggaagcacttggggcctcagctggnnnnnnnnnnnnnnnnnnnnnnnnnnnnnnnnnnnntcttnnnnnnnnnnnnnnnnnnngggagggatccgaacatcaaagtgggagccatcaggtctttcaaagcggaatgtaccccacatgtgcccactggaagcctgcagcgagacgtggctgctatactggaacgcgggctgctccttggataacacaggttccctgcccactacccctcggcctcgcactgtctccaaggtgccggagagactgaatatcctccagtgccgctcccggagctnnnnnnnnnnnnnnnnnnnnnnnnnnnnnnnnnnnnnnnnnnnnnnnnnnnnnnnnngggnnnnnnnnnnttccctcatgcccatgtagaaggggatgacagtgacacgtatgttctcagttgtttnnngatnnncatcnnnnngctccagccagggatgattcttctcttgccaggccct

SEQ ID NO: 15365 - DNA, 1154 bp, Macaca Fascicularis
  misc_feature (1)...(1154): n = A,T,C or G
cacttnnnnnnnnnnnnnnnnnnnnnnnnnnnnnnnnnnnnnnnnnnnnnnnnnnnnnnnnnnnnnnnnnnnnnnnnnnnnnnnnnnnnnnnnnnnnnnnnnnnnnnnnnnnnnnctgggtgtgggtgagtcccagaaaagccagtggcctgggtgcccaggagacccacagcctctcactcaccccttcttggctctcagatcctgacgacctccctgtgactcgtgccctgcttcaccaaacgctctaccatccagaccagccaccacagtgtgcntcctcaagcctccaggatcccacctagccgtacttgcctcagagctggtgaaggattcttccgaacccccaccctaccccctaaaggtatctgtgatattggcaggatagggaatatgcattacagaaatgcaggctttgactctggacatgaaagatggcagcagcgctagggtgaccatgaactatagaccttgcagtctttttggtgaaagaagagacaagttgaccctctgcccatttccttgtggacctcatccatcacgccagcagggtcctaggaccctggccttgttccagatcatctgggacacgtcccacttcccactttgactgtgttgaaaacagagacttgtttgcgtggccccaacacccataaggaaaccaggctttaggcccagggggcagtggaggtaagggctccaccccatcttaagctctgtcttccatggcataattccaagttcttgacgttggtaattgttaaaggaatggcaaactgttttgttttgagggatctttctacagtctggtctcacccatgttcctagcaaccctgagatgattttcctccatttaccaaagcagctgggtcagtgctttctcgtgttgccatattcttcaggtattagtgagcttcagaagccctgctcccatttttccacccacccattcccccataaaaaagcttattgtctctaagacaatagtcatttaaaatgtgatgcaggtttatgatccagaccacaatcagaattatatcttgggtcatttatgtgccgtctgttcttgattctcagtgctctaagtcggtgtttttcaannntgtggttgcagtctttggtggattatggccagcannnngaataggtagaat

SEQ ID NO: 15366 - DNA, 715 bp, Macaca Fascicularis
  misc_feature (1)...(715): n = A,T,C or G
tcaggaggcctggctgcggaaactgaagtggcnnnnnnnnnnnnnnnncagtcagctgaagtggaaggccctgcacagtgaccctaaatctttggaaacgtctgcttttgttnnnnnnnnnnnnnnnnnnnctttctactggatnnnnnnnnnnnnnnnnnnnnnnnnnnnnnnnnnaggggacatggctctgaagatgatgagactggtgactcagcaagaatagggtgaatggggctggagatgagctggtttctttggccttggggcacagagctgagctgaggccgctgaagctgtaggaagctgaagctttaggaagcgccattcttccctgtatctnnnnnnnnnnnnnnnnnnnnnnnnnnnnnnnnnngccgaggataaaaatnnnnnnnnnnngaggcaatttggaaattatttctgctgcttaaaaaacctaagatttttttaaaaaatggatttgttttcatcaaaatgaaggatgataatagattattactttttcttatgacagaagcaaatgatgtgatttatagaaaaactgggaaatacaggtacacaaagaataaatcaacacctgtatacccccttcccagggttaccaatttagcatatgtccttgcagattttttttttttttgctatatatacatatatattttttaccaaaatgaatcattactgtatgttgtttcactatttgtttaacaat

SEQ ID NO: 15367 - DNA, 624 bp, Macaca Fascicularis
cagggtcctctgtaccgctgttgccatcttcacggtccttcaagtatacaccactgctgtcagaggaacagggggcatcactgtcatatccttctttgaagttctccacgctttcgatatggtccagatttgcaaagtactcatcacccatttccagaccctccttgtgtgcaaagtcatctgtcaggattttgcctgcataaatacagacaaaagagcctttggcaatgtcatccaagcagcggataccccagcccttgttatgtgtcttgaatagctgtagccgaacttgtagttcatgttgtaccaaccggtttgtgcacatgtttgggtcacatttgcagcgtttgttacactcatataccacctgtgggtagacacttttttagtctcttgtattggtagccagagttagggttgatttggcctcctggggtacaggctgtagcctggatagttagttgatggcaggcacacttggacttgtcccgacacccatcctagcagtcacagccaaccagaaattcagggcttgtgttaatgaaaacacccttgcccgggatacgttccttgctgtaggccacctggggtggagggggtgtgtcaatttcacgacacaggata

SEQ ID NO: 15368 - DNA, 673 bp, Macaca Fascicularis
cccccatagaaatttgcagtttcttggtgatcatttagcagggatccaaagaagttcttctacaaataagtaataagaaatatgagtactaaaatatagctttgtgccttttaaccctatgccaactcctaaacataaaagtagattacagtatacttacctgatcagagcatgatctgtttggccatatgcaagtgtgagcagaaatagagcagcaggtagaacagtaacttaaagcaagtcatcctttaaaaattctgagctaaaatctattcaccattgagtaattgaattaatcctataagaataagctccttgtaagtaaatccataatatgaattagaaaaaagaaaacagctggaaattgaagtttttggtgcctgtatactggatatgaaactatttgatttctagtcttctgtggttagcagttgtaatattttaatgattttgcttcatacttggttagtggaacataaacatatctttggtacttctttgtgagtgagagaatgctagatagggtggctttgttctttgtttaaattttttttctgaatgtagttaatttatggcatctgttgaataaaactgctaaaatgagctcttaaaaatgttctgttgtatccccttttccaggtgaatcaatagaaatgcctgaccgaattagtag

SEQ ID NO: 15369 - DNA, 571 bp, Macaca Fascicularis
  misc_feature (1)...(571): n = A,T,C or G
agcctcccccaccaggactgggcctacccagcagcaagccccccggcactccccgccaggcccagggtggggtggacgggcccaagggcccagccccacactcctttcccgtccacttgtcacctacctaccccctttcggtttgttgggttttnnnnnnnnnnnnnnnnnnnnngacacagcccccgatctcgagccccggcccccggcttctgtatggacattgcatcgtcctagttttctttctttaaaaaaaaaaaaaaaaattccaacagaagccacaggccggagcccctgggagccctcgcaccgctccccaccagcctcagtggccccatcggaactgagaattgcaaaaccccgacttatagctatagttaagttgccttcccccggtgtnnnnnnnnnnnnnntctnnnnnnnnnnnnnnnnnnnnnnntgtccagctctctctcccccacccctcccggtgttgttattaaacgtctgtgnnnnnnnnnnnnnnnggaacaaaaacgaaaaaaaaatcaaaaaagcgacaaaaaaacacaaacagaagaggaaaaaaaaa

SEQ ID NO: 15370 - DNA, 744 bp, Macaca Fascicularis
  misc_feature (1)...(744): n = A,T,C or G
gctgccacatgccggccaacggcgagacggtgacgctgnnnacgagcccnnnnnnnnnnnnnnnnnnnnnnnnnnnnnnnnnnnnnnnnnaaannnnnnnnnnnnnnnnnnccgaggccaagaagcctcggctcctgcacggcaccctgatcatgaaggacagcaacttccggctggtatcctcagagcaagccctcaaagagctgggtctggccgagcaccagctgcgcttcacctgccgcgtgcacctgcacgacacgcgcaaggagcaggagatggcgttgcgcgtctacagccacctcaagagagtcctgaaggaccactgtgtgcagcacctcccggacggctccgtgactgtggagtccatcctcatccaggccgccgccccttctgaggacccgggcaccaaggtgctgctggtctcctggacctaccaggacgaggagctgggtagcttcctcacatctctgctgaagaagggcctcccccaggcccccagctgaggccggcatctcacccagccaccacctctgccctctcccagctggacagagccgggcctgcacttcaggactgtgggtgccctgagtgaacagaccctcaggtcccatccctggggacagagaccgtgtgtcatgtgcccacccaggcagctgtttccagctaaagaaaannnnnnnnnnnnnnngtcttgcctttattcctgctcctgggcccccaaacgatggttaggacagggatccc

SEQ ID NO: 15371 - DNA, 727 bp, Macaca Fascicularis
  misc_feature (1)...(727): n = A,T,C or G
tcacgacaaggtggtggtagatgaaggccaagaccgagaggtgccagaagagaacaaacctccatcccagacacgtgggcggaaaggctccaggggtccaaggccagatggcaccgcctctgcccgactcagaaagagagaaacgggagccggagcagggagaggttgggaagaggccnnnnnnnnnnnnnnnnnnnnnnnnnnnnnnnnnnnnnnnnnnnnnnncccagaaagttccagaagcagatggccagccagctgtccagcctgcaaaggaagacctggggccaggagacagggacctgcatcctcggccccaggcagtgctgtctgagcagcagaatgccctggcagtgggtgaaggggaaaaggccgatggggtgccgccaccaggcaacgccgccggggatacagggcagcccgcagaggacagtgaccatggtgggaagcctcccttcccagcagagaagccggctccgggggctgggctgccgcctgagcctcgcgagcagagggacgtggagcgagcgggcggagaccaggcannnnnnnnnnnnnnnnnnnnnnncccgaggggacccggcttgcgggtggctgcacccaccctggtcctagcagagccccagcccagagcgctgctcgcactccctcggccctcggagctcggctgtgttcatcggcagggatctgtcacctgttcctccaggaaggctcctcatgcctttgc

SEQ ID NO: 15372 - DNA, 679 bp, Macaca Fascicularis
  misc_feature (1)...(679): n = A,T,C or G
tttgttgagtacttagtatattgacatatatttttataaggtgaggnnnnnnnnnnnnnnnnnnnnnnnnnnnnnnnnnnnnnatacaatttagctgtcttctctaccttaccatagccagttgctttcactttaaactagagcaagtaacgtattagtggcttgcatcttcataagttaaagaaaaaaacagcaaaaaagctagatctttgtcttttagaacacagaccattttcannnnnnnnnnnnnnnnngtgtttaattcatgaatattgcatactgcctcccctaccacaatttacacaatcctgtggatagtcctacctcaccctggtcaacctacatgatccttatgctaatggcaactcacaatgaccnnnnnnnnnnnnnnnnnnnnnnnnnnnnnnncaacagatcataatannnnnnnnnnnnnnnnnnnnttacatgcctaatcctactgattggggcactgctcatatagtctcnnnnnnnnnnnnnnnnnnnnnnntttctaaggtcctcatttttacaaactatacaaagcctaagtgacaagggaaaaggaattagtctaagagtaannnnnnnnnnnnnnnnnnnnnnnnnnnnnnncaaagtggctcaggcttaaaaaaaaaaaaaaacactgtggataatgacaaaaagcataagtaaa

SEQ ID NO: 15373 - DNA, 709 bp, Macaca Fascicularis
  misc_feature (1)...(709): n = A,T,C or G
ttcctgtatttatttggtaaggtccactaatctgttatagggaagtattttctcttgccttatagttgagctatttggtttgacaaagctcagcagaaacttgatgtgaaaaatctaagattttctcctacattcattgatgcccctcgtaacatttgcatacactagaaaatgccttcaatttgtgttttaccagaattttgatactgatcagaaattttatactgccaacaaagaagactcaacttctcagatctatagtggaatacattgtcaccctttagctattgctatatagannnnnnnnnnnnnnnnngttacatataagaattaaattcttctcaaataattcttaacctcagtaatgagcctaaatttactctgcttggctctctacacatggcatttcagggtacaagatgtagcatttcaatgtgtaagatatatgtactaaacatatgtgttgctatcttcatcattaacattcttttctattgcttggctgtaatttttgtaaagataaattatattgtttttttagatgtatgtttgtggtatatgttcagaagacaagcatcttcattttgctagctttgcaaaannnnnnnnnnnnnnnncgttatttctaatgacataaaaaaaaaatccccagtcctatttagcatttgacttttttatatgttttaaatgttgctggatttttgtgctg

SEQ ID NO: 15374 - DNA, 728 bp, Macaca Fascicularis
  misc_feature (1)...(728): n = A,T,C or G
gtaataatcaaatattgacaagaannntagttcttgaaagacttttgtaagtctagatgacgtttgccttagggataaagtaaaagaacaattggcaccttaagtttctannnnnnnnnnnnnnngtgacatgagatctcctgatatttgattgctctctcaatatgnnnnnnnnnnnnnnnnnnnnnnnnnnnnnnnnnnnnnnnnnnnnnnnnnnactcagaggacaactacccatattccagactctgagctgtttccttttttaaaaaccatatagacaattagctgtttgaagtgagtattaaatatttcagaagtgtgaatttcatgtctttgagctcctctagctgctgtcagtttttcttctgctgccaatctgtgactcacaaatgactaggatctcttgttctttaattttagggtcttgttccaggactcaaatcagtaacttggtgattacaaggtgctgaatatgttgnnnnnnnnnnnnnnnnncacctcaaggaaaaggttcagatttttatttttaaaatattttcattttttcttgaattttatatccatttgttcactcatacatgcctagcctacagaaggggatatatattatgaaatggtcatttttctgaagagaatattttgcttgaaatgcaaagaactgaaagagatttgtaggttgttgattttgttacttcatactggaactttaaaaaagttcatcaaaa

SEQ ID NO: 15375 - DNA, 846 bp, Macaca Fascicularis
  misc_feature (1)...(846): n = A,T,C or G
agaaagtgtcactgcatgctgcgtgctcttcctgttttcatctcctgtactccagcttcggnnnnngagacgctggaactgtgtnnngatgagaaaccatgacgtcacggagcaacccatggttctggagaaaacagcgagtcttatgctaaaggaagctgtttcctatattgaaagacacaagcatgggccatttctnnnnnnnnnnnnnnnnnnnnnnnnnnnnnntccccttgtgaccacgagtgcattcctggggaaaagtcagcatggcttatacggtgataatgtggaggagatggactggctcataggtaagattcttaatgccatcgaagacaatggcttaaagaactcaacattcacgtatttcacctctgaccatggagggcatttagaggcaagagatggacacagccagttagggggatggaacggaatttacaaaggtgggaagggcatgggaggatgggaaggtgggatccgcgtgcccgggatcttccactggcccggggtgctcccggctggccgagtgattggagagcccacgagcccgatggacgtgttccctactgtggttcagctggcaggtggcgaggtgccccacgacaggtatgtggagataaggccgcccgttccccgattttttttaatagtttttattttttattttttttatgtcaataggattttggggaacagggggggtttggttacataaataagcttttttattcaccactgtctcctttacccatgtgaccatgtatcttggggtcnnnnnnnnnnnnnnnnnnnnnnnnnnnnnnnnnnnnnnnnnnnnnnnnnagtgattctcctgtgtca

SEQ ID NO: 15376 - DNA, 737 bp, Macaca Fascicularis
  misc_feature (1)...(737): n = A,T,C or G
ttatagtgaagtggttggactagcatttgtttagcaccaacaaataaaaggtgggatgggggatctgnnngaagcagggatgggacacaaagtccctccagcttacctcccacaacaaccctttccctgcagagcatggtttgtgtaccacaagtcctcttagcacacaaaagccaaaatataaaggtcaaccatttatcctgaacaccagcatttgagaaagaggtaaccatctttggttctacatgatttggagattatagtggtggggggtgctccctgattcccctaaagctatgcacaccacaaggggctctgctctctgtctgggatcttcttataaagtgttcctatgattgttccctgaagtcacaaggaagctttactcatcatactaagtgtacccaagggggagttcactcattaccgtgaccttccagctcagccctcaccccacgggagcctgtgttgctcctctcactccatgtgtctaagccatgtcttttacatcgtgtcctttgacctgttggcccccagggtctggttggttatgtgagttgaatcaagaggctctaggccagatgtttacataattttaacctatatgattttatttttaactttgtatttctccctagaaatctcaataagacaattgtagcatcagacaatgttaagaagaatgatccttggagatcccataatcccactacccttgtttggctcagagaggataa

SEQ ID NO: 15377 - DNA, 743 bp, Macaca Fascicularis
  misc_feature (1)...(743): n = A,T,C or G
acgttggctgtggnnntnngctgntaacngnnnnnnnagggcggcttggggcttcagttattggaatcgatcctgtggatgagaacattaaaacagcacagtgccataaatcatttgannnnnnnnnnnnnnngagaatagagtacagagtgtgttccctggaagagattgtggaagagactgcagaaacatttgatgctgtggtagcttctgaagttgtagaacatgtgattgatctagaaacatttttacagtgctgctgtcaagtgttaaaacccagtggttctttattcattactacaatcaacaaaacacagctttcctnnnnnnnnnnnnnnnnnnnttnnnnnnnnnnnnnnnntattgtaccaaaaggtactcatacatgggagaagtttgtttcacctgaaacactagagagcattctggaatcnnnnnnnnnnnnnnntcaaacagtggtaggaatgctctataaccccttctcaggttactggcattggagtgaaaataccannnnnnnnnnnnnnnnnnnnnnnnnnnnnnnnnnnnnnnnggaacaccnnnnnnnnnnnnnnnttgctttcaagggagaagcagaagagctccaagctaatgcctgcaccaatccagctgtgcatgaagagctgaagaaatgaattgtttctgaggactatagtaatgtggcttagatatctgatgttttcaaatataagaaatatataatttatcctttgagagagaat

SEQ ID NO: 15378 - DNA, 548 bp, Macaca Fascicularis
agagagatgcaggtgtaatgtttcaacaacctggatgttttctttctcatctttgcttccattcatctctgttggctgctgttgatggaatcagaccgtaaacatgtggcttggataacacccgtcatcctgtgaagaatgtcggcagtacttttctctgttgatcaacttttatgtctccagtaacattgcacttacaaaggtacctgtatttgtgtggactctgaataaagaagaattcatttgtttagcaagtattaattgagcacccactgagaaataagcactgaggaagattcagagacatgtaaaacagagttcctactgcacaggcacccagcaggtggcccagggaggcagatacacagcacacttgaccacagaactggaccatctgagatgtttttcagcaaacagaaggcatgtagctgaaatgatcagcccatgtagtgttggtcacttgggcctttcacctgccatggtaccttttgttcccagctcctccaggtgccaaccagcaggcttggtgacagcaactggaatgaaaa

SEQ ID NO: 15379 - DNA, 777 bp, Macaca Fascicularis
  misc_feature (1)...(777): n = A,T,C or G
tgagcnnnnnnnnnnnnnnnnnnnnnnnnnnnncggcatgctcctcccatctccacctttggtttgggggcttccagctcattggcaaaatctctctctctcgtnnnnnnnnnnnnnnnnnnnnnnnnnnnntttccccaatatacatttttttttttctacacaaagagttacttctannnnnnnnnnnnnnngtattaaatgcactttaaagaaaggggcagggtggattttcaagaggcggggagctctaaggcttgaccctgagggctcttctcccatccattctcagcccgtatgcatcaccccccacaccgaaaaggactattgttttagtttcacataggtcctttccttnnnnnnnnnnctaaggtggttttctaggtaaccgcagggatggaggtcactagccagtccaaaccaggagagaaagtctggtgtnnnnnnnnnnnnnnnnnnnnnnnnnnaagaccaannnnnnnnnnnnnnnnnnnnnnnnnnnnnncagcttctaagtcaggaaaggaagctgagtgggaatgccagccggtaagcgcaggctgtactggcccatgactccttcaagggaaagaggccctgctccctttacctgctgagctccttttagcagttagggagaactgcagggggaaaaataccagtggagtgtggaatgaatccaaagcagtgattatttttaaacgcttttcnnnacaaatcttacgtnnnaccccaatatnaaaaataaagtaatgcnnncctnnncagtttgcactt

SEQ ID NO: 15380 - DNA, 763 bp, Macaca Fascicularis
  misc_feature (1)...(763): n = A,T,C or G
caaagtaaaagaaatacgccagataatttcaacatgaactaaattttgcagattttgaatataagaaagacaacaaagttgctgcatagtctacaaacaagtctctgaaaataggtgaatttctagctcttcatggtcctgaaaattgatttcagtctttgcgaagaatgaagaagtgaattcgctgtacatttgtcaccagcactgggtttttgttttttgtttgtttttccgcttaatttcaaagataaaatgcagttacttttgggggtggaaggctcatcttaaaacatgagcattaaatctatttggaatagcagaaggttaagtaatttcttatgtatagttaaactaaagcagtacttcagtgggacttaccagtattttttcatcactgaaaggtttttttttaatcactaaattgtatttggcaattgcaagttgcctgcagatagggccgtgatactgtgttttgagccacagaaggtaatgtgtgtgcgtgtgtgcgtgtgtgtgtgtgcgcgcgcgtgtatctctttcctcctttcttttggggaatcctgtaatatgaggtagcttatttcgtcaattaattagggtgctggatgnnnnnnnnnnnnnnnngtcaactatgtacacacagtaaatactgtttcttaggcaaaggtaacttttttatatagttgtaaaattccattatattccattgccaaagaaacattaagaactttgtatagnntataaaaagcgactnnnnnnnaag

SEQ ID NO: 15381 - DNA, 748 bp, Macaca Fascicularis
gccgagtcagaactttgcccgcggcgagcagagaagccgcctggagctggagctgcagagccgcgagcaggacctggaacgcgcgggcctgcggcagcgggagttagaacagcagctgcaggcccgggctgcggagcacctggaggcgcaggcccagaactcccagctgtggcgggcgcacgaggcgctgcgaacgcagctggaaggggcgaaggagcagatccgcaggctggagagcgaagcgcgaggccgccaggagcaaacccaacgagaggtggtcgccgtctccaggaacatgcagaaagagaaagacagcctgctacggcaactggagctgctcagggaactgaacacacggctgcgggatgacagggacgcctgcgaggccaggcgggcaagtggcagccgcaggaaggctctgacgactgcccacctgcctgggcccacctgctgctgctgctgctgctgggctcggccccatagacgaggctctggccaccttcccagtgcccggtgaccagctccgagtgactcagagcatcagctagaagctgctcttctgggaggcttgtcatgggtagggggtgcccactcaggatgtgggctctccccagggggccccaggatcgcctgactgaagaactgaagacatgaaggacctagcctgggagtggtcagggtcccgtgtgccctctgccagccttcgctctgtccccaagcaaccccaactcagtcagcagaaaacccc

SEQ ID NO: 15382 - DNA, 573 bp, Macaca Fascicularis
caagatgcccaagatctcctgccaaaacaagggagtagtggtcaattattcggtgatggtgaaattcttctttccacgcccagaccagcaacactatgtagcttacacatctgaagaggatatcatgaccaccgtccaggcgtcctattataagaaaaagctgttcttaagcatcttggatttccagattacaccaaagactgtttccaacttgactgagagcagctccgagtccgtccagagcttcttgcagtcaatgatcaccactgtgggcatccttgaggtcatgtcttgtcttgaggcagcgtttacagccctcatgaacagcaaaggcgtcagcctcttcgatatcatcaatcatgagattatcactcaagatggcttcttgctgctgcagatggactttggcttccttcagcacctcctggtggatttcctccagagcttgagctagaagtcttcaaggacgtcaggatggggcttgaaccagaaggcaagcaccaggctcacagctggaaccatggtgtctcctcctgcatggtggaagttgggttaggagtacagagatgggga

SEQ ID NO: 15383 - DNA, 669 bp, Macaca Fascicularis
cccatgtatactaccagttgtgtctttagatggcatacaagtccaaataagtggtcatacttctttattcagggtctcagctgcctgtacacctgctgcctacatcttcttggcaacaaagttacctgcagcaggctgtgctgggcctagtccctggtcagtaataactgaacagtgcattttggctttggatgtgtctgtggacaagcttgctgagtttctctaccatattctgagcacacagtctcttttgtcctaactgcagcctcactgacactgggatgagcactactgtatgtggagggtttggtgattgggaatggatgcaggacagtgaggaggacacaccagcccatgaattgttaatcatcaatcacatttgattgttgaaggttattaaattaaaagaaagatcatttgtaacatactctttgtatatatttattatatgaaaggtgcaatattttattttgtacagtatgtaataaagacatgggacatatatttttcttattaacaaaatttcttattaaattgcttcactttgtatttaaagttaaaagttactatttttcatttgctattgtactttcattgttgtcattcagttgacattcctgtgtactgtattttactactgtttttataacatgagagttaatgtttctg

SEQ ID NO: 15384 - DNA, 643 bp, Macaca Fascicularis
ggtgatataattttgagttttgccaaatgtctaattaaaggagctctggtaccatgttcttggaaacttatccagtcacctgttacaaggaaaaagcattcagaatatctaatccttgaagctgaaagaatggaacccaggctttgtttaatcacagctctcaacagaaaacagttaatatttttcttgctgtcaaatataacaactggcttgatcaacctaatggtagatacattacacagcagtaccttgtgggccttatttgtggtcaatctctatatgttttccaactgtttaattgtatatgtactatatttgcaagataagactatacaattttggtgatcagcaggggtaggatatataagtacttgggcaatatttaatgaggaatattaattgtaaagaaattgtgctttttggccggattacaggtgtaagccaccacagtgggccaatgcttaatattttaatgtatctcaacaataaaaccaagaagaaacaaagccttgtgacttgttagaatgtattaaataagaaacaaagccttgtgacttgttagaatgtattaagtagtattttaaagaaactttatagttgtgacattgaaagactgttggggggggagatttttactttccac

SEQ ID NO: 15385 - DNA, 687 bp, Macaca Fascicularis
  misc_feature (1)...(687): n = A,T,C or G
acctataaaacaggtcaatacagtacaggcagcacagagacccccggaacaagcctaaaaattgtttcaaaannnnnnnnnnnnnnnngtcttcacatattgtatttatatatttatatttatatatatatttatataatggtacaaaatggctaggggtatggccatggatggagggaagagtaggctggcctgtggcgcgggtgggaggagaggggacagagagggcactcggcccgctgcgatctgacccctctctcctcagggcaggaaacacagagtcagacagtttggggggtcttgggccaggggtggagggctcaagggcacagggcccaggctgaggcagggcgggcaaaacgcctggcaggatgaagggcaagtgaccccccaaacacagaggccnnnnnnnnnncccctgggaggtggccagggggagtcaggggcctgttgtcagccccagaggnnnnnnnnnnnnnnnnngatggtgggccgagaggacagcaccaggctgggagaagtggggcaagttccctttgtattacagctgccagtgcgagaccaggccctccaggccaggaaggcnnnnnnnnnnnnnnngtagaagacaccctgtctagaatggcccttggccctggaggcgggggcgcaaaggcctcagccaggggactgccctgccacctcccg

SEQ ID NO: 15386 - DNA, 753 bp, Macaca Fascicularis
  misc_feature (1)...(753): n = A,T,C or G
gtgagctccattaccatcaccgccggggaacgctctgccatggatgtggacagcccatcactggccgttgtatcagtgccatggggcacaagttccatcctgagcactttgtgtgtgctttctgcctgacacagttgtcgaagggcattttcagggagcagaatgacaagacctattgtcaaccttgcttcaataagctcttcccactgtaatgccaactgatccacagcctcttcaggttccttatacaatttaaaccaagagaggagaggaaagggtaactttgctgttctgaccttctgcttaatagtcttatagaaaaaggtgatgagcaaataaacgaacttctagactttacatgactaggctgataatcttatttttgaggcttctatacagttaattctatacattctctttctctcttctccaatcaagtacttggagttagatttaggtccttctatctagtccctctacagatgtattttccacttgcataattcatacnnnnnnnnnnnnnnnnnnnnnnntccattttcacctctactgatggccctactcagatcttctctaatttggtcctgatacttgtctcttttcaagttttcccatgtccctgtggctcgctgtcttacaatcactgctgtgaaatcatgataccactcctacctctttgcatcttccttcagtgtatttttgtttttcaagaggaagtagattttaactggacaactttaagtactgacatca

SEQ ID NO: 15387 - DNA, 629 bp, Macaca Fascicularis
tgcagccgttcaaggagctctgcacgcacatcatggtggagaacaacatgatcgtgtatgtggaaaagaaagtgttggaagaccctgccatcgccagcgatgaaagctttggggcagtgaagaagaaattctgtacctttcgagaagattatgatgacatttccaatcagatagacttcatcatctgcctgggcggagacgggacgctgctgtacgcttcctcgctttttcagggcagcgtccctccggtcatggccttccacctgggctccctgggcttcctgaccccgttcagctttgagaactttcagtcccaagttactcaggtgatagagggaaacgcagctgttgttctccggagccggctgaaggtcagggtggtgaaggagctccgggggaagaagacagcggtacacaacgggctgggtgaaaatggctcacgggctgcgggcctggacatggatgtcgggaagcaggccatgcagtaccaggtcttgaatgaggtggtgattgacagaggcccctcctcctacctgtccaacgtggacgtctacctggacggacacctcatcaccacggtgcagggcgacggagtgatcgtgtccaccccgacgggcagcacggcgtat

SEQ ID NO: 15388 - DNA, 910 bp, Macaca Fascicularis
  misc_feature (1)...(910): n = A,T,C or G
cacacacacacacgtgttgctagaacgctgaacatggaccacacacccacccaacatccccaatcccaaatgcagagtagccaggctccagacataaattaaaaaataaaataaaataaaataaaaaagagttggtctctgggaaggagagctcatgcagagatgaagacagaagcccttgggagccaggaccaagaagannnnnnnnnnnnnnncccttccttcaggatccccactccctggtggcctctgccctaagacaggatcattaacactaaccatcaggcctctagtccctttaatgtccagtctcccaagctatttgattttggcttcagccctcatttccccaccacagcccaagggaatggcatcctagggggtaggagggggaggaggtgggtgcagcctgcaggtctttagctggtttctcctggctctaggtctgggtcaggaggccccacgcactccttgctgagccgcacaatttcctgggacagaacttccatgtccttgtgcaagtgcatattcttggtgagctgctcctccagcatgttctgcagcttcttgttcatctcccgaaggttctcgtcgcctggcttcactaggtctctcaggacgctgcccagcccgctgcggtctgtgtggcctgctgccacagacacatcgatccggctgtccatgacgtaggtctcaatgatggcgctcttccggcnnnnnnncctctgcannnnnnnnnnnctcacctccaggtgcttcaccttctcctccagcatccatttctcctgctgtgnnnnnnnnnnnnnnnnaaagagctcagccacttcctcatctgacagctctgctggccgagggggctgggcctgagggctgctggataaggacctggctggaacagccgagctctcct

SEQ ID NO: 15389 - DNA, 762 bp, Macaca Fascicularis
agaggttggaccaggctaggttcagggtgacgcccaggagaggtggtggccttcacacatgcacatggagtgaggaccagggagctgtggggaaagcaacagctgtaggtgccttgctcttctgttggaggctgctgggggcaaaagcagctgcacaaggccagggcaagtgctagggcccctcccctatcacatggtcacactgggacgtggcgtgcagctcactgaactccaagcgagccagccctctcttggactagaaggcctactgtcagcccttcgcttacaaactgcaggctcaatccagaaggggacggccggcgggggctctcctagtgcccagagacaggcccagaggtttacaagttttctaagcttttgataatgtgaagctccaggccaagaggatgctgttgagcacattgcagctatgtaatttttggtgtatgtatgtaatatttaaggttggaaaaaaactcaaaagcaaagatattaactcttattagaaaaaaagacaaaaaaaagccaaagcatgatgcgtcttgtcagccttaagtgggctccacacctgtgctgtgctgtgaccgcccagccagcagagctgccggaggacggagctggaacacacaccatggcatttggagccgagtcagtatcttgtttgagaaacacccggagtgactggtggggctgtgcttcccagtgcattgtacatgtggagatgtgaatgcctactgcttacaatatctgtataaagtgctg

SEQ ID NO: 15390 - DNA, 749 bp, Macaca Fascicularis
  misc_feature (1)...(749): n = A,T,C or G
cgaagggatgcagctgttacagacaaaggactccatggccaagggagcaaggcccagggccagccgctgcagggctcgctggggnnnnnnnnnnnnnnnnntgcacaacccaaccctgcaggtcttccgcaagacggccctgttgggtgccaatggtgcccagtcctgagggcagggaaggccagcccacctgcccatctgtgttgaggcaagttcctgcctaccatcctcctccctccccggctctcccagcatcaccccagccatgcagccggcaggtcctctggatcaccatggttgggtggaggtctgtgtgcactgggagcctcaggagagctctgctccgcccacctggccatgggagagccagcaggggttttgaagaaagaaactggcgggttagggccttggtccaggagccagtcgagccagggcggccacatccaggcctctccctaccctggctttgccaccagccttgaagggcctcgatgaagccttctctggnnnnnnnnnnnnnnnnnnnnnnnnnnnncttggccttcatgctgtggaagcagccgaggcacttcctcaccccctcagctccacggacctctctggggagtggctggaaggctcccaggttgctggcttgaagggcagcccaagtcacgactcagaccaggtcccacaccaagctgcccacacttgagagccagnnnatttttgtagtttttatgcctttggctattatgaaagaggttagt

SEQ ID NO: 15391 - DNA, 271 bp, Macaca Fascicularis
  misc_feature (1)...(271): n = A,T,C or G
cagagagttcctctacccagcaaaaaagagtgtctcagaagnnagctcctcaggcctcagttatcccnnngagggacaacataaaacaaaatcccacagggccagatgtggagnnanngtctgcccccgtcttctattcatcttcaaagcccccacttctctccaggctgtttctttttttatgactgtaaacatagatagtgctttattttgttaataataagataatgatgagtaacttaaccagcacatttctcctgtttacacttgg

SEQ ID NO: 15392 - DNA, 761 bp, Macaca Fascicularis
  misc_feature (1)...(761): n = A,T,C or G
annncttccttttcacaaatcannnnngaggcctnnntgtaattctttagcttgctccacttctgtctcccagatatactaaaattcttaggtactaggctgtgtgtcttgggatcttaagatcagtgaccctttccccaatatctagtctttgnnnnnnnnnnnnnnnnnnnnnnnnnnnnaatcagtgagccagaccaactctacatctcctgcgtaacctactgcctaagtcattagggctgagggctgggctgtaggggcttccttaggctgagagggtccccaggctgacatctgtgttggcttttgttcagaaccattactctggcacatgctcaatggtatattgcagggaggagaggagtagatttagattagagtaaatgccaatcactttacatatgaaggtgggtgagactttccttccattcatcccttactctcctggatctgacttcttctgnnnnnnnnnntcaggacagctgctggccactcctgtcctgtggattgtgcaggtggcctttcctcccaaaataaaaggcatcaggctccccaagccccacagctctcctttccaccaaagccaggtttcctggtaaggttactggaagacaagggatggggatgggggctgactgacaaaaaattttagccctaggtctcagtccctggctggggagggggatatttttccttccttaagtagttttacattgccacagtgtgtatgtgttcataatataaaatgttcctctgct

SEQ ID NO: 15393 - DNA, 792 bp, Macaca Fascicularis
  misc_feature (1)...(792): n = A,T,C or G
ctgtatggccactgagcacgtgagataccctgcaaaatgatgtgaaaggaccagttctgaaagtccagtgttccacggctggatacctttgtgtccaaagtcccgtcaccaaggacattaaagatatttcattccagcatcttctagagagcttggtgtgtacagatgagggtgtccactgctgctttccttcagannnnnnnnnnnncacagagattagcctgcagcttgtatttgacattcttcgctgtctgttgtttacctaccgtagctttttactgttcacttccccttccaactgtccagatgtgcaggcccttcctctctggactttctccaaaggcactgaccctcggcctccactttgtcccctcacctccacccctcctgtcaccgaccctgtgacgttcactcagagaagaccacaccaaggaggcggcctctggcccaggagagaacacagggaggtttgtttgtgtgaaaggaaagtagtccaggctgtccctgaaactgagtctgtggacactgtggagcgctttgaacaattgtgttttcttcacgagtctctgtaatgcttgtacagttggtgttgatgcccacagcttctgcttttgctttttcttttaaatctgaaggttctggtaacctgcggtgtatttttatttttctgtgacttttcctttttcctcctctttgaccctattcatgtctctacccactatgcacagattaaacttcacctgcaaactccttaatatgatctgtggagaatgtacacagttaaacacatca

SEQ ID NO: 15394 - DNA, 540 bp, Macaca Fascicularis
  misc_feature (1)...(540): n = A,T,C or G
cagcagccgccgaggcagcatgnncagcacagggattgccactgacgtcaagaaactgatgnnnnnnnnnnagtacccgccacaggagctcttcccaaggggcacaaatccttttgctnnnnnnnnnnnncgtcccaccatcaccnnnnnnnnnnnnnnnnncatcatccgctgaggcggggtccgaggtcataccccccagcacacctgcccagggnnnnnnnnnnnnnnnnnnnnnnnnnnnnnnnnnnnnnnnnagcggataccagaagcagggcgctgagaccaggggtggctgcccttccccagaccaccnnnnnnnnnnnnnnnnnnnnaaagcactggcttggggtctaagaccttcgaagtaaagcaggcggaatggggggacgggacgatttctccccctccaggggccccaggactctccctggggggcctacctcttgccccccaacctcttttccccttttctgcccccgtggggaggagccccttgtacctgctccgtgtcccacacatgccctctctgtacgtctt

SEQ ID NO: 15395 - DNA, 682 bp, Macaca Fascicularis
  misc_feature (1)...(682): n = A,T,C or G
gtgcccatttagatttttgctnnnnnnnnnnnggccacctctatagacgagagttgcaaagttgctttgagcagagagggaaagattaatctacactgctggccaccgaaggccggtgnnnnnnnnnnnnnnnnnnnnnnnnnnnnnntctggaaacttcagagtacaaattggtggacggtggaagtcaggacatggatctctgtccgatggaaaacagacctcgggnnnnnnnnnnnnnnngctgccaggccctctccccactgccccaaaccggcccagacnnnnnnnnnnnnnnnnnnnnnncagggcaaggcccctgcggaatcnnnnnnnnnnnnnnnnnnnnnnnnnnnnnnnntgactgtttgcattggaaacacagtacactgccccgttctctcagnnnnnnnnnnnnnnnnnnncattcatcattgaggcttgtcgtttaccactgttatgtccaaactgcattgtaaaaagagaagaaaannnnnnnnnnnnnnnnnnnnnnnnnnnnnnnnnnnnnnnnnnnnnnnnnnnnnnnnnncttacgtgacaatgattgtattcctcaatagcactttaaatgccgaagacggtcccgcaccaagcctgcgcacgggcttgggtgggttcctttggagaannnngtggctggaacacaaacaatcttgaagaa

SEQ ID NO: 15396 - DNA, 785 bp, Macaca Fascicularis
  misc_feature (1)...(785): n = A,T,C or G
acaaccggaccccagagcaggtgcagaggnnnnnnnnnnnnnnnnnnnnnnnnngcaagatcgaggcccggaagaaggagcgnnngaaacgcagccaggannnnnnnnnnnngatcacagcggcagacaccactgcagagcagcggcgcacggaacgcaaggcccccaagaagaagctaccccagaaaaaggaggctgagaagccggctgttcctgagactgcaggcatcaagtnnnnnnncttcaagtctgcaggtgtcacnnngcggagccannnnnnnnnnnnnnnnnnnnnnnnnnnnnnnnnnnnnnnnnnnnnnnnnnnnnnnnnnnnnnnnnnnnnnnnnnnnnnnnnnnnnnnnnnnnnnnnnnnnnnnnnnnnnnnnnnnnnnnnnnnnnnnnnnnnnnnnnnnnnnnnnnnnnnnnnnnnnnnnnnnnnnnnnnnnnnnnnnnnnnnnnnnnnnnnnnnnnnnnnnnnnnnnnnnnnnnnnnnnnnnnnggcaggtgtgctggggggccctgccacaccagcatcaggcccaggcccggcctctgctgagccagcagtgactgaaccaggacttggccctgaccnnnnnnnnnnnnnnnnnnnnnnnnngggcgcacccctcacacccaattcgagaaagcgacgggagtcggcctccagctcatcttctgtgaagaaagccaagaagccatgagagaccccacggggtgtgggggacgctgttatgtaaatagagctgctgaattggaaaaaaaaaaaaaaaaaaaaaaaaagg

SEQ ID NO: 15397 - DNA, 791 bp, Macaca Fascicularis
  misc_feature (1)...(791): n = A,T,C or G
aagaagacatttcattgtgagattcggtactgctnnnnnnnnnnnnnnnnnnnnnnnnnngaggaggagccggccctcatgccctcccagagccacgctgtcagacgggctccggcaggcgaaaccagagggtgtttccgaggtgctcgacagtaggtgtttttggaagctcaaatttcaccatttgattgtataatcttttacctatacaatatttatttgaactaaaggataaatcggcggtaagaacagtgaacacagtggttgagataaactaaggtgacaaataaacaccacaccaaagatgagggtagtgagcaactggcttgagcagacagaacggggaggactccaccgtgtcccgaggtcctcgtgcagccgccctggcttggcagccctgcccacgctacccccgcaaacaatggtgtgtgcatnnnnnnnnnnnnnnnnnnnnncccaatatgggcataaatgtaatacctgtatggggggcagattctctgtatgttcagttaacaaattatttgtaatgtatttttttagaaatcttaaaattgcctttgcactgaagtattttcatagctgtttatatatcttttattcatttatttaacatattgtctaattttaaaaannnnnnnnnnnnnnnnnnnnnnnnnnnnnnnnnnnnnnnnnnnnnnnnnnnnnnnngattctggtgagagttttgactgaatgttccaatctctgatgaatnnnnnnnnnnnnnnnnnnnnnnnnnnnctacacacacctcttcctttcttggtatt

SEQ ID NO: 15398 - DNA, 761 bp, Macaca Fascicularis
gaacacacatgcaggacttgaaagatgttactaataatgtccactatgagaactacagaagcagaaaacttgcagctgtgacttataatggagttgataacaacaagaataaagggcagctgactaagagccctctggcacaaatggaagaagaaagaagggagcatgtagctaaaatgaagaagatggagatggagatggagcaggtgtttgagatgaaggtcaaagaaaaagttcaaaaactgaaggactctgaagctgagctccagcggcgccatgaacaaatgaaaaagaatttggaagcacagcacaaagaattagaggaaaaacgtcgtcagtttgaggatgagaaagcaaactgggaagctcaacaacgtattttagaacaacagaactcttcgagaaccttggaaaagaacaagaagaaagggaagatcttttaaactctctattgaccaccagttacgtattagttgccaatatgccagcttggacatcagtgtttgttggatccgtttgaccaatttgcaccagttttatccataatgatggatttaacagcatgacaaaaattattatttttgttgttgttcttgatggagattaagatgccttgaattgtctagggtgttgtgtacttagaaagtaacagctctaagtacctttcctacattttctttttctttttttattaaacagatatcttcagtttaatgcaagagaacattttactgttgtacaatcatgttctggtggtttga

SEQ ID NO: 15399 - DNA, 720 bp, Macaca Fascicularis
  misc_feature (1)...(720): n = A,T,C or G
acagcttcacagnnnnnnnnnnnnnnnnnnnnnnnnnnnnnnnnnnnnnnnnnnnnnnnnnnnnnnnnnnnnnnnnnnnnnnnnnnnnnnnngaggaggccctgtacacgctctggcagcacaacaaggagtcactcctgaatttcgtggagacggtgcaccggggcatcaaaggtgtggtgatggacaaattcggcaagcnnnnnnnnaacgcccggatcttagtcaaaggcattcgccacgacatcaccacagcccctgatggcgactactggagattgctgcccccaggtacccacattgtcattgcccaagcccctggctacaccaaggtcatcaagaaagtcatcctccccgcccggatgaagagggctggccgtgtcgacttcattctgcagcctctgggggtgggacccaggaactttcttcacgggnngcaggaggactgggccccacgacccgctgggaggtgccagctctttgggggaggccacggagcccgacccactccgggcacgcaggcagccctcggccgacgggagcaagccctggtggtggtcctacttcacgtcgctgagcacgcacaggccacgctggcttctcaagtactagccgcagccccagcacccgcccggatgtggagacctaggcccttctccgcgtcccgggcccctggctcttgattttgtctgccacggacatcccacaaagccgctgccg

SEQ ID NO: 15400 - DNA, 747 bp, Macaca Fascicularis
  misc_feature (1)...(747): n = A,T,C or G
cagacgatgaagggtccnnnnncagccgatgnnnncccggctgcgcctggacggcagtgctnngnncttnccagggttccagggcccggttgcctgggggctgctttctccccactaggtgggctgcatctggccctggctggaggccttacnnngaggggccatgaccctcttcccccaggccctccccagctgaccacagccaccggagaggagatcagaacacgattgtctcggggtgcagggcgctgagcaggacgaagcctcaaggactctcgtattgggtccttgggactcgggaagtgccagaaggggcggctgctctgggactcggtgttcactggcttttgtttcacctgattctgctcaaatccgagagcaggaaatccggccctggcctggcagctctgcctcctatgcccgcacgctggggtctgtcttgtcgggagcagtggggcagacctctgaggaggcgggggtcaggnnnnnnnnnnnnnnnnnnnnnnnnnnnnnnnnnnnnnnnncaagaagcagccagtaccaccgcctgaggaggggctcagcagcattgcgtgtatgggcctcgtgctgtctcgtggaaaatccccccagccgccctccatggtgggttcctgagggtaggacatgtcaccacggttttgtgggaaccacgcctccccctgctggaatttttctgctgttgtgaagtagttttatcctatttgtttctctgctgaccttgccaag

SEQ ID NO: 15401 - DNA, 732 bp, Macaca Fascicularis
  misc_feature (1)...(732): n = A,T,C or G
tttagatttatagnnngtggtgatgctgatgtgatggtggctggaggtacagattcttgtattagccctttatctcttgctgggttttccagagcccgggctctgagcacaaactcagatcccaagttggcctgtcgaccatttcatccaaagagagatggttttgtaatgggagaaggtgcagctgtgctggtgctggaagaatatgaacatgctgttcaaagannnnnnnnnnnnnnnnnnnnagttttgggctatggactctcaggtgatgctggtcacataactgccccagatcctgaaggagaaggtgccttaaggtgtatggctgctgctttaaaagatgcaggtgnnnnnnnnnnnnnnnnnnnctatataaatgcacatgctacttccacaccattgggagatgctgctgaaaacaaggcaatcaaacatctcttcaaagaccatgcatatgcccttgcagtttcctcaactaagggagcaacaggacatctgctgggagctgcaggggcggccgaggcagcttttaccacattagcttgttattatcaaaaactaccacctactttaaannnnnnnnnnnnnnnnccannnnnnnnnnnnnnntatgttccactaannnnnnnnnnnnnnnnnnnngagaaaagatttattggcctcaccaattcctttggttttggtggtactaatgcaacactttgtattgctggaatgtagaacaaatca

SEQ ID NO: 15402 - DNA, 750 bp, Macaca Fascicularis
  misc_feature (1)...(750): n = A,T,C or G
ctcccttgagggaccttttttgggggggaatcccaggcaggatgcccagtctttgagctgagattggaaggcagtgaggctgagggtgccaagatttccccagggttcacccagaggggaaggggctacacacccccnnnnnnnnnnnnngaggacacatcagcccactaccgctgccaacaccaatgcctaaaacttgtttcatacattggggttttctatatatttcagttgggaaaagcttacatttaaccttttaaaaaaataaatacgtgattagcctcaactaaacattgccaactataaagacagagtatattcacnnnnnnnnnnnnnnnnnnnnnnngcataacaccaaataacccccagaagtagccagaggtcagtttgaacatcacaattgtaagtgttttagtagctatttctggtgtgagtcaagggatcatgtagatagagtcaattattgtttgtggagtttttcagctataggggaggggaactattaaaatccatttgtttctattcaataggtaataaaaattattagttgtcactgggtttgggaaacttaaatgcccattacagccctggggaagggttttctgtcttatggagtgagtcttagcatttaagttatagttgctgccttaaaatagtagcctgctacaatgacttctttgggtagccattttcgtaagaaataaaatacaagatatgagtaatgaaaaaaaaaaaaaaaaaaaaaaaagg

SEQ ID NO: 15403 - DNA, 754 bp, Macaca Fascicularis
  misc_feature (1)...(754): n = A,T,C or G
gacaattgacattggggttgtaacagcagaagaagcacttaactatggttttagtggagtgatgcttcggggctcaggcatccagtgggacctgcggaagacccagccctatgatgtttacgaccaggttgactttgatgttcctgttggttctcgaggggactgctatgataggtacctgtgccgggtggaggagatgcgccagtccctgagaattatcgtacagtgtctaaacaagatgcctcctggggagatcaaggttgatgannnnnnnnnnnnnnnnnnnaagggagcagagatgaagacttccatggagtcactgattcatcactttaagttgtatactgagggctaccaagttcctccaggagctacatatactgccattgaggctcccaagggagagtttggggtatacctggtatttgaaggcagcagccgcccttattgatgcaagatcaaggctcctggttttgcccatctggctggtttggacaagatgtctaagggacacatgttggcagatgtcgttgccatcataggtacccaagatattgtatttggagaagtagatcggtgagcaggggagcagcgtttgatcccccctgcgtatcagcttcttctgtggagcctgtccctcactggaaattggcctctgtgtgtgtgtgtgtgtgtgtgtgtgtgtacatgttcacgtacacttggctgtcaggctttctgtgnntgtactaaaaaaggagaaattataataaat

SEQ ID NO: 15404 - DNA, 727 bp, Macaca Fascicularis
  misc_feature (1)...(727): n = A,T,C or G
gagttggagcagcgctgnnnaanctcaccagggcctccaggcaggactgggttggcctccatcacctccaggtgatgggctgtggagccagtggccagggccttcctctgggtacccagaggggagggctgggctgggctggcctctgccacctccctgcctttggagtagccttcgaagggcctgtgggtacctggagaggccacgggtgtgggggtggaatcccatctgctgctgaatcctcatttgggcctgaggggctgtgcctgctgtgcactcacagctgggtcttcgcaaggatgctgttctnnnnnnnnnngggtctccggccccnnnnnnnnnnnnnnnngatggaggtgtgggcggactcgtccaggccgatcaaggcacagcggtgagcagtggaggcctgtcgtggggaatggactcnnnnnnnnnncttctgcagaggatgccccaggcctgaactccctagtggatccacagtttgtggagactggcactctgccagcccnnnnnnnnnnnnnnnnnnnnnnnntttttcagttggcccctggttggctgccccaccccaggaggggaggagtcatctgaatccgcagggatggcatgtgccatgactgtgtgcattgcctgcccatggcatccactggggctgctggcacttgtataggatggaagcccctaagaagggccggggtttctgtctgctctgttcaatgaatca

SEQ ID NO: 15405 - DNA, 732 bp, Macaca Fascicularis
  misc_feature (1)...(732): n = A,T,C or G
gggnnnnnnnnnnnnnnnnnggacnnggaggagctcatggactttgaacgnnnnnnnnnnnnnnnnnccaacggcggctccgaatctgacggggaggagaacatcggctggagcacagtgaacctggacgaggagaagcannnnnnnnnnnnnncagcctcctccaccaccatcctggacgaggaaccgatcgtgaatagggggctggcggctgccctgctcctgtgtcagaacaaagggctgctggagaccacagtgcagaaggtggcccgggtgaaggcccccaacaagtcgctgccttcagccgtgtannnnnnnnnnnnnnnnnnnnnnnnnnnnnnnnnnnnnagccggcgggaggagtaccgaggcttcacacaggacttcaaggagaaggacggctacaaacctgatgttaagatcgaatacgtnnnnnnnnnnnnnnnnnnnnnnnnnnnnnnnnnnnnnnnnnngcagctgtcccannnnnnnnnnnnnnnnnnnnnnnnnnngatgaagacagagcggcggatgaagaagctggatgaggaggcgcnnnnnnnnnnnnnnnnnnnnnnngacacgcccctgggcactgtggccctgctccaggagaagcagaaggctcagaagaccccctacnnnnnnnnnnnnnnnnnnggcaagagcannnnnnnnnnnnccatcaccaagtgacagcgccctccctccccagccccgccgcaaccttca

SEQ ID NO: 15406 - DNA, 856 bp, Macaca Fascicularis
  misc_feature (1)...(856): n = A,T,C or G
tttaggacnnctngaaaacacaggccctccaccagctgacaaggaaaagatcacannncttccaacagtgacagtaactcaggaacaagttgatatgggtttagagtgtccagtatgcaaagaagattacacagttgaagnnnnnnnnnnnnnnnnaccttgcaatcacttctttcacagcagttgtattgtgccatggctggaactgcatgacacatgtcctgtatgtaggaagagcttaaatggtgaggactctactcggcaaagccagagctctgaggcctctgcaagcaacagatttagcaatgacagtcagttacatgaccgatggactttctgaagctaaagaccacacctgaatctgggctgtggtaatcatcttaccatagctgtacattgtatcaaaacaaaaaattagtagatggatttaggaatcatgtaagaaactcaacacataatattaatgcaatgaatgtttttcttctctaaatttaaagttagtatctacagatggaattgtgtctacaaccaaatgcctcttatccctgaattcagagtgataattttataagtgtgaaacttaattatgtagggctcctcccacctgaatagaattaattcctgaaagtctagttagggtcctgctatctgtcatgttgccttgtaacgggtgtttccacctccttctccaacctctaccctaccattagtgtattttactataaaaacagtggaaccacagccctaaagtcctgctgatataannnnnnnnnnnnnnnnnnnnnnnnnnnnnnnnnnnnnnnnaaaaaaactacttttgctcacattagctatgaggcgaggtcaaattcaggaa

SEQ ID NO: 15407 - DNA, 734 bp, Macaca Fascicularis
  misc_feature (1)...(734): n = A,T,C or G
gagccagaatcnnnnnnnnnnnnnctacaaccannntaatgaacttcctgtacctgctgggagaagttctgaacaactatatctgggatacacagagaagtatggaagaagagaaagaaaagcctaaattggaatgagatccaagcctaaatgcaagagctagattgagccgccattgaagactcattcccctccggcattggcagtgggggagaaaaggcttcannnnnnnnnnnnnnnnnnnnnnnncccgcccccaatgaggacaccttttatatataaatatgtataaacacagaatacagttgtttccaaaagaactcaccctcactgtgttttaaagaattcttcccaaagtcattattgataataacattttttccttctctagttttaaaaccaaaattggaacttggatttttattnnnnnnnnnnnnnnnnnnnnnnnnnnnnnnnnnnnnnnnnnnnnnnnnnnttctttttgagaactatgttaaagtcaaaggggcagatgtagagtaaggcttttgtgtatttagtcctaaaggtggctgtaatcatgaacctaagccaccatagggacatgagaggaaaggggacagatgtttctcattgcaataatgttacagttgcctcagatgagcactatttgtaataatgatgtcaatttcatgaaaagcctgagtgtattgcatctcttgatttaatcatgtgaaacttttcttagatgcaaa

SEQ ID NO: 15408 - DNA, 734 bp, Macaca Fascicularis
  misc_feature (1)...(734): n = A,T,C or G
tcccgaatcaaagatatggagaagcagaagaaggagggcattgtttgcaaagaggacaaaaagcagtccctggagaacttcctgtccaggttccggtggaggaggaggttgctggtgatctctgctcctaacgatgaagactgggcctattcacagcagctctctgccctcagtggtcaggcatgcaattttggtctgcgccacataaccattctgaagcttttaggcgttggagaggaagttgggggagtgttagaactgttcccaattaatgggagctccgttgttgagcgagaagatgtaccagcccatttggtgaaagacattcgtaactattttcannnnnnnnnnnnnnnnnnnnccatgcttctagttggaaaagacggaaatgtcaaatcctggtatccttccccaatgtggtccatggtgattgtgtacgatttaattgattcgatgcaacttcggagacaggaaatggcaatnnnnnnnnnnnnnnnnnnnnnnnnnnnnnnnnnnnnntatgcaggctacggttaccatagttaccaccaaggataccaggatggttaccaggatgactaccgtcatcatgagagttatcaccatggatacccttactgaacagaaatatgtaaccttagactcagccagtttcctctgcagctgctaaaaccacatgtggccagctccattcttccacactgcctactacattccctgccttttctttcagt

SEQ ID NO: 15409 - DNA, 770 bp, Macaca Fascicularis
  misc_feature (1)...(770): n = A,T,C or G
cannnnnnnnnnnnnnnnnnnnnnnnnnntcctnnnnnnnnnnnnnnnnnnnnnatatagtgatnnngaagatgattcagaatttgatgaagtagattggttggagtaagaaaaatgcattgataaatattacaaaactgaatgcaaatgtcctttgtggtgcttgttccttgaaaatgttggtcattctagtgttttgctttcttttccttataataaatgacccttttcctccataacttttgatttctaaggaaaatnnnnnnnnnnnnnncaaactaaatgttttacagtggcttatctttttnnnnnnnnnnnnnnnactaatttggtcaaataaaccactaagtattaagcatggannnnnnnnnnnnnnnnagcagattcagttttttgatatatcttaattgtgtactttgtgaattttaatttaaagaaagcaactgaattgaaatcttgagggcagctgtatctattaatgagccttattccatttcctgatgttttaaaagaagaaacactgccttgattatatgaatacactcagaaagtacatttagcttgtagtgttgaattctcttaaaggaatgcttgaattttttcattattgttttattgtttttatatacttgccttatttgaatgtttagcagtatccccttcccacttatatattgtgtgatatgattttgcttgcctataggagttaaaaacttttccatgtgaaatactctgacttaaacatacatgtaacttacataactgtaaga

SEQ ID NO: 15410 - DNA, 755 bp, Macaca Fascicularis
  misc_feature (1)...(755): n = A,T,C or G
agtgaagtggtacagaacactgaaannnngaaagatgaaatataccatatttaaaaggtactctttctctttgagtttgatgaacaaggaagggaattacagaaggccttnnnnnnnnnnnnnnngttgatagaagggtcacttccagaaatttggactcttacctcccagcagaattcagctacccctgttctaggtcccaattctactgcaaatagtatcatggcatcttatcaacaacagaagacttcgctnnnnnnnnnnnnnnnnnnnnnnnnnataccaccaaagatcaacaaaagnnnnnnnnnnnnnnnnnnnnnnnnagactgagtgaccacagttaggagggatccaacagagaagaccattgccactaattcctgttgtcctaccaccccttgctctttaaggcctgtctgttgagaactggaaagagtaaaatgataacttaccttagcgttgccaagaacttcagcagacaacaagcaattctgttttattttgtgtatacatcttaatcattagcaagacattaagctttaaccattatggcatcattatgtgagaatgattattctttcacttgggctgtttgagattatggtaatcatgagattaatgtttcatggtttctacctcaaaagtgtgaagacaagtaaaataatgtttctaaattgtcttattggaggagaagattacaatggctattagtgctacatttggtcaaatgtaatcacttaaatggcttctgt

SEQ ID NO: 15411 - DNA, 742 bp, Macaca Fascicularis
  misc_feature (1)...(742): n = A,T,C or G
tgtagggagannnnnnnnnnnnnnnnnnnctctccccgtggggcactgacagagaaatgaaattgttttatctggaaaattccagatttattatttaccccttaccaagggaagttacttcttgtaaaaacttttaagccatttatcaacaagttcttgttgactcagggcataatgagttcctgagacatcctctttcggggggtgggggtttagctggaagaatttcaaggaaaagaattctcagcacagctcnnnnnnnnnnnnnnnnngcagaagctggtaaaaacatggggagcccggaggacaggctgctgtccagggcaggggccannnnnnnnnnnnnnnnnnnnnnnnnnnnnnnnnnnnnnnnnnnnnnnnnnnnnnnnnnnnnnnnnnnnnnnnnnnnnnnnnnnnnnnnnnacttttacagaaaacaaggtccagtaatagcaagtcttagtacatcctcacttttattataaatgggtgtttttttataatttttactgacgctcagtaaccatgcaaaattgtgcatagcattaatgtatctatatacctatctatatctatatatgagctcatggtagaaaaccatagctaggtagcatcgcagacttacnnnnnnnnnnnnnnnnnnnnnnnnnnnnntctgttgacagtgccaataaatgataaaaaaaaaattaacatgtcacaatgtaactgttgaccatatgcacaattccatgaattaaat

SEQ ID NO: 15412 - DNA, 705 bp, Macaca Fascicularis
  misc_feature (1)...(705): n = A,T,C or G
tgctccatcagccttactcctggccccatgatctttctcctgcacaaggacatttgccctttacctacctccctgcctccccgggtccctccaccttatcttccaatctacaccagagtgaggaacctagaatcctcatgtaaccttatcactctgctttaaaaccctttcaagggttttaagggcaggcctgcccctacagcctggagataagataaaatagcttgtgaagcccacctcagcaatctggggggcctnnnnnnnnnnnnnnnnnnnnnnnnnnnnnnnccccatggcatcctatgtatacctcaaacctagcaactatcacactggattgtcatcactacttatttaactcttcccccaccagactataatctgggagagagaacggagatcttcttcatagcaggtactgaaaagttgaatggataaacannnnnnnnnnnnnnnnnnnnnnnnnnnnnnctcttcctcttcaaccctgcctgctnnnnnnnnnnnnnnngctggaatctatgattcttacagaagaaaacaaacatgtaacaagaagctgtctcctcttttcttgtggcaaaggctatcttccattttaccatctgtaagccattttaaccttcctctatccatgcagggtaatagtttaacagtgttaacagtgtatcagtgcaagccagnnntaattctacagnncataca

SEQ ID NO: 15413 - DNA, 399 bp, Macaca Fascicularis
  misc_feature (1)...(399): n = A,T,C or G
caggaggggtgtcctgggcatggaaggttngnatcagtgttgttttgctgttngnnngccactggcagggctgccgtgcatatggctgtgagggctgcacagaccctgccaaggggcttcctccccgtcaccccgaaccttgtaatcatgtgctggtgtggcagccccagctaagttaatccccactgctttcagtggtagaaagaattccctgagtgggccaggctggtgtcctcctcccacccttgcttttctgagtgagctgcctggagccctcatcccctctctcaggctgggctggccctgggcggggcccctgtgtgcttgtccactgtgacctgacccgaccttgtgcagccccctgccctggtgtcccaggtttttgtgatgatctttgct

SEQ ID NO: 15414 - DNA, 710 bp, Macaca Fascicularis
  misc_feature (1)...(710): n = A,T,C or G
gagtccttgggcttctgcagtgtgatgcccctggcagcggttggctannnnnnnnnnnnnnnnnnnnnnnnnnnnnnnnnnnnnnnnnnnnnnaggnnnnnnnnnnnnnnnnnnnnnnnnnnnnnnnnnnnnnnnnnnnnnnnnnnnnnnnnnnnnnnnnnnnnnnnnnnnnnnnnnnnnnnnnnnnncctctgggacgcccggaccggccgcctgcttactgactaccggggccacacggctgagatcctggactttgccctcagcaaagatgcctcnnnnnnnnnnnnnnnnnnnnnnnnnnnnnnnnnnnnnnnnnnntgtgtccagaggcctgaccgttaatggctgcagcccctgcctgtgtgtctggtgttgaggggacggagggacccctgcccccgccnnnnnnnnnnnnnnnnagggcacagagggaagaggagggtggggccctnnnnnnnnnnnnnnnctcttcaactgacttgctcccctctccttttcttctctttagagacccagcccagggccctcccccccttgcccagacttggtgggcccttcagagggaggggcggacctgtttctctttnnnnnnnnnnnnnnnnnntgagccatggggtgtgtatttgtatgtggggagtaggtgtttgaggttcccgttctttcccttcccaagtctctgggggtggaaaggaggaagagatactagt

SEQ ID NO: 15415 - DNA, 851 bp, Macaca Fascicularis
  misc_feature (1)...(851): n = A,T,C or G
agtggaagacagnnnnnnaaataaaagcagattaaactgtatcagatacattccagcctgttggcaactccataaaaacatttcaggttttaatcagaatttagctaatgagactggatttttgtttttttatgttgtgtgtcacagagctaaaaactcagttcctaaatcctcagtttatgcggcgccatctagtattttaagccaaacttcttcacccctgagagcatgtcagctggagaaaagcactccttccttgcccacttgagaagtgcacgcccactcacccaacatcctggtctctaggaaagcctcatgtgaggttcctctctctctcagctcagtgcccatgggcaaggatcatcatttccattcagtgttacaatgacaatatttaatgagtataaccttctcagtctcctgctctcaaatttaggacagagccgctaaggacaaaacaatccctcctgtgctttatgatggcagcaggggctggggaacctctgagggactcgttcattctgcagttgtctagaagcctgggtggcgtcgtgagctgaaggatcgtgctttcctgtcctggctccataggttataggctggctggtgaaaggttcacgtggcccgagctgaacttcattgcctagctttggatgtgctttctgccatgaagactgatttttgttcgttctgagccttcaaggaatttgctttttacaactggaatatgctcctgtgtgtataacagatcatgtatgttttatgttttcattgatcattaaagagtttgacctcagagctccaggatcatcaataaatttgtcatgttatatatttatttttttataaat

SEQ ID NO: 15416 - DNA, 779 bp, Macaca Fascicularis
  misc_feature (1)...(779): n = A,T,C or G
annnnnnnnnnnnnnnnnnnnnnnnnnnnnnnnnnnnnnnnnnnnnnnnnnnnnnnnnnnnnnnnnnnnnnnnnnaggtgctgagaaccaaagtgcctagagaagggcaggaggaggatgacgacgatgaggaagagnnnnnnnnnnnnnnnnnnnnnnnnnnnnnnnnnnnnnnggaccctgcagtgctgagagagaaagcagaagccaggnnnnnnnnnnnnnnnnnnnngaaggggtaccggcatgacagctcaacagcagtggccggcagcccccggggccatgggcagagccgcgagacaacccaggaacgcaggaagaaggaagccaacaaggcaacaagagccaaccacaaccggagaacgatggctgaccgcaagaggagcaaaggcatgatcccatcctgaggcctggtgcagggccagcggggaggcagcggcaccagattcaccaggctgcgctcccatcgcctggggcctcctcaccagggtccccaagttcaactcgacccctcaacagcctcagctttgcagcccctgagannnnnnnnnnnnnnnnaccagccagccatgagcgccttcctgcagaacacacagtgccttatgccacagccgaagaatccatggggccggcaatcaggcaccttcccccagctgtgctggtgggaaagggacgggcatggaatcccaaggcaagcgccgcaaacctcgggccacaagacaccacttcccctttaccctggacagcaggaaacctgtatatcaaaaacagaaaaa

SEQ ID NO: 15417 - DNA, 708 bp, Macaca Fascicularis
  misc_feature (1)...(708): n = A,T,C or G
gtgttttgagaccnnnnnnnnnnnnnnnnnnnnnnnnnnnnnnnnnacatctaagaaggtttagaaatgttgagaccaaaacaataactgttaatgatggacagcattattaggaaccctgtagtatgatatttaacaatttagacttcaagaagggctggtcctaagagggggcagagatgaacaaccgggttaaatccctctacatgtggtttctgtttgaaaaaaagaaaactgacatttgaacagacttttaatttgtttaaacctctggtaattacttgtaacagtagaaaatagaagtcattcttattttagaaaaagtgacagaagcagtctcgtaagattatatgtttctgtttctggtaaatgtcatatatgatcctcaaaatgataatatctccannnnnnnnnnnnnnnncaaatttgagtaggtattttaaacacctaacaaagtaaagggctaaaagccattcggatagcagtaaacattctgtatgatgtgcaataaaacatccaagatcttttttgaaagttttatttataatatacatttttgtatgagaaaggtgattggtacagggtgcctattttagtcatggatcaaaattaaatttatgtaatttgcagggctttctttctattccttcaaatttacaaaggttcgttttggaaactacattttaaactttggaatcnaaattgttt

SEQ ID NO: 15418 - DNA, 1003 bp, Macaca Fascicularis
  misc_feature (1)...(1003): n = A,T,C or G
tgcacacctggccagcgtgacannnaaaggacagccccgaacccagcccacaccctggctccctgttcagcaacgtccgcttcctgctcctggtcctcctggagctgcccctgctcctgagnnnnnnnnnnnnnnnnctctgggtgaacagacctcagagaagctctagaagcaggcagagttggcccgagggtgagaaccagtnnnnnnnnnnnnncatcaaggccctgcgctgcgacagagccctgctgcgggactggaatgacctcctgaccgctccctcccgggctgctctccccacatctcctggaatcctctgtgagcctccttcagccttttccctgtgcccgatcctcatgtgtnnnnnnnnnnnnnnnnnnnnnngacgccctgagctgtgactccacgtctcacgtacacgccctggacagctaagcctcaagcnnnnnnnnncacatttgagtgcccgtatgccctccctgcatccttccnnnnnnnnnnnnnnnnnnnnnnnnnntcctccaccgtttttacagggagaggcaggtccaggactcccctgcacctttgccaccataatcgcccacactccctgggtccaggagnnnnnnnnnngtggctgcttccatttactgnnnnnnnnnnnnnnnnnnnnnnnnnnnnnnnnnnnnnnnnnnnnnnnnnnnnnnnnnnnnntatcaggcctactaagtcagacctgagtnnnnnnnnnnnnnnnccctnnntccacaggnnnnnnnnnnnnnnnagtggaccaagccccatgttaggcctctcagaatggggagtccctgcagaaaaggatccaggatttcccccaaagcctgactattccctccttcaggtagacgcnnnnnnnccagtgtctctaggtccctctgggagagctggtagaagatnnnnnnnnnnnnnnnnnnnnnnnnngccaggcctaccctttctccttcttcaaggggacctgacccctccttcattccagggc

SEQ ID NO: 15419 - DNA, 938 bp, Macaca Fascicularis
  misc_feature (1)...(938): n = A,T,C or G
ttaaggtaccccccgcttccgcncnnngatgnnntgtgcccagggaaaccctaggtagagtggggcaaggggagtcactagtcaactaggatgagaccaggactgggaatactcacgaatggggagaagagtgggaacgggaaggtcattaagacaagttaggccataccagtaaaatagttttatttgattacaaaatattcatcaatgtgaaaatttcccaaagcttggagtaacagtctagagccaaggttgggagtagaggccaggcctcacccagagcgcagcttgaggcccctgagccccacctcctttccagagagagggaagagacagctgaggggccctgagtcagtcctctctctggtccccaaggccagctgtgccaggcccccagagggcaacagctcatgcggaggattgggggggaaagcaaacaggtaggaaacagaaatgaagttaacgattacaccaccacccccccaaaaaaacaaaataacaaaaacttgtgactatgaaaggaggatggaagatgaatactgataaactcctcagctccccagaacagcccagtctgggctgggttgggctgattggagaaaaggtcttgagacccaactgcatgttatctgtggagaataaaatattctaagaaaaggggaaaaccatgaggcaagctgccgcggtcagtcaacgcagctaacaggcctggcatggcccaccacctgaccccacccacacagggaacagctgtgcaggtatggattggggagaggtcaaggcctcggactggggaccctgagctgccaaggtatggggcctccttgcagtcccagtgcagcaatggcaggaaggccaccagnggccctagttgagcaggttgccctgctcnnnnnnnnnnnnnnnnnnnnnnnnnnnnnnnnnnnnnnnnnnnnnca

SEQ ID NO: 15420 - DNA, 859 bp, Macaca Fascicularis
  misc_feature (1)...(859): n = A,T,C or G
atcaagannnnnnnnnnnnnnnnnnnnnnnnnnnnnnnnnnngagtgttgannnnnnnnnnnnnnnnnnnnnnnnnnccccccannncagagacagctgaactttgggggtggagactagaggcaggagctgagggactgattcctgtggtggaaaactgaggcagccacctaaggtggaggtgggggaacagtgtttcccaggaagttcattgagttgtgtgcaggtggctgtgcactggggacacatacccctcagtactgtagcatgaaacaaaggcttaggggccnnnnnnnnnnnnnnnnnnnnnnnnnnnnnnnnnnnnnnnnnnnnnnnttgttactgacagttaacagtggtgtgacagccagagagcagctgggctgctcaggcctcggcctggcccagggtgaaagggcacgtgctcctcagagcagccagagggaggggggaggtcgtggaggtggtttgtgtatcttactggtctgaagggaccaagtgtgttgtttgtttgttttgtatcttttgtctttctgatcggagcannnnnnnnnnnnnnnnnnnnnnnnnnnnnnnnnagacgcatgaatgtaagagtaggaaggggtgggtgtcagggatcacttgggatctttgacacttgaaaaaatacacctgggagctgcattcaacccttcccccaccgtgtgctgtggagttgagctgggagggaggggccgagagggtgggggctggaacccctccctgggaggagtgccatccgggtcttccatctagaactgtttacatgaagataagatactcactgttcatgaatacacttgatgttcaagtattaagacctatgcaatatttttat

SEQ ID NO: 15421 - DNA, 792 bp, Macaca Fascicularis
  misc_feature (1)...(792): n = A,T,C or G
ctagtttagggaagtagcacagggcagagccactggtcactttgttcccttggccctccaaagctcattgttgcaaacatccccaagcccttgctctaggccagatcttgnnnggtacaggctatgaacacagatgactcgggcatggggcttggagatcttctgttcaaagtacagtgcccacgttagccctgggctgtttctcctagagaggtaggaggcccattcttggtcactgttccgttgcagaccagacttgctggcctgatcacaagggagtggctggaactcctcacagccagcatagggccatcctccccagcctgctgacctggaatcaaggctggggaggggtttgcaggcaggaatacgctgacctttcaccctgccatctcatcccaaccccagctcactagccttcattggagtcacaggggccaaaggcctgagaccctaccctacccccaaactggctaagacagctcccagttcctggctccccaacttggtctctgccctgaggcagggcactgaactctgggctgcttttccatgtgtaaaatgggcacatcttcctaatctgttaatggtcaatggtgtccccaaggatagtgctggcttccatggaaaccctaactcctggagattccattccattctcaagtgtacagccacagcaaggagcctgacactgattttattgattccatgagacaaaccccaccaactgttaatgcaagtttttatttggctgtatatacaatttaagctattaaaatttnncaatataca

SEQ ID NO: 15422 - DNA, 1036 bp, Macaca Fascicularis
  misc_feature (1)...(1036): n = A,T,C or G
gacctgctggagctgggctgcggaaccggagccaactttcagttctacccaccgggctgcagggttannnnnnnnnncccannnnnnnnnnnnnnnnagttcctgacaaagagcatggctgagaacaggcnnnnnnnnnnnnnnnnnnnnnnnnnnnnnnnnnnnnnnnnnnnnnnnnnnnnnnnnnatggctccatggatgtggtggtctgcaccctggtgctgtgctctgtgcagagcccgaggaaggtcctgcaggaggtccagagagtactgaggccgggaggtgtgctctttttctgggagcatgtgacggaaccacatggaagctgggccttcatgtggcagcaagttttagagcccacctggaaacacattggggacggctgctgcctcaccagagagacctggaaggatcttgagaatgcccagttctccgaagtccaaatggaacgacagccccctcccttcaagtggctacctgttgggccccacatcatgggaaaggctgtcaaataacttttcccaagccccaaggcactcatttgctccttccccagcctccaattagaacaagtcacccaccagcctacgtatcttccactgagagggaactagcagaatgagaaaagccattcctgtcccatctcctagtccctgtctccccaacctctgccagggcaatctctaacttcaatccctccttcgacagtgataaagtctacttctaccctgaccacagggagtaaacatttgtaccctgttgtatccttaactgcaagtttctggactagtctcccaatgtttgcctcccgacgttgtccctttcctttgttctcatggtaaagctccccttgctgtcctcctgaggcgacacccatgtgtctctaggaactggtcacgaaagtcatggtgcttgcgtccctgccaagcccccctgactctctcttccccctaccaccttcatcctgagctgggggcgccacggagaatcagagacgctggggatgagggagcaagactctaagaggcagag

SEQ ID NO: 15423 - DNA, 588 bp, Macaca Fascicularis
  misc_feature (1)...(588): n = A,T,C or G
cgcggcttnnnnnnnnnnnnnnnnnnnnnnnnnnnnnnnnnnnnngggctcttcatcccgcccgtgttcgtggtgagctacgccaaggacctgggcgtgccggacaccaaggccgccttcctgctcaccgtcctgggcttcattgacatcttcgcgcggccggctgcgggctttgtggcagggcttgggaaggtgcggccctactccgtctacctcttcagcttctccatnnnnnnnnnnnnnnnnnnnnnnctggcgggctccacggccggcgactacggcggcctggtggtcttctgcatcttcttcggcatctcctacggcatggtgggggccctgcagttcgaggtnnnnnnnnnnnnnnnnnnnncccacaagttctccnnnnnnnnnnnnctggtgctgctgatggaggccgtggccgtactcatcgggcccccatcaggaggcaagctcgnnnnnnnnnnnnnnntctacaagtacgtgttcatcctggcgggggccgaggtgctcacctcctccctgnnnnnnnnnnnnnnnnnnnnnnnnnnnnnnnnnnnnnnnnnnnaggagccacagcccgaggtg

SEQ ID NO: 15424 - DNA, 747 bp, Macaca Fascicularis
  misc_feature (1)...(747): n = A,T,C or G
tgaccaccagggcgccgcgannnnnaccatctgnnncacccggaaagagtgtgaagacttaggggtggagggcacagacctatggctggctgccagtggggaccagcgggtcagcgtctgggcctccgactggctgcggaaccgctgtgagctcgtggactggttgagtttcccaatgcctgccaccacggagactcagggccacctgccgccctcccttgctgccttctgcccctgggatggggcgctgctgatnnnnnnnnnnnnnnnnnttgacaaggaggtgatcatctacgacctctcccagaagcaggtggtggagaagataccactgcccttttttgccatgtccctgagcctgtccccggggacccgcctcctggctcttggctttgctgagtgcatgctgaggctggtagactgtgccacggggactgcgcaggactttgctggccacaacaatgcagtgcacctgtgcaggtttacaccgtctgccaggctgctcttcacggccgcctgcaacgagatcctggtgtgggaggtctccggctgctgagatgcagcagggactatggtgctgcgtgtcacggctggtacctggacataagcttggcagagaagccaggtggtcaatggcctcatgctgggacaggccaggattcatgtaaatcgtctggacaaagctgttgtgaattggcgatctgaaaatactttaatctgttgcccttttgcctaagcaatttttaa

SEQ ID NO: 15425 - DNA, 771 bp, Macaca Fascicularis
  misc_feature (1)...(771): n = A,T,C or G
gatagagtcagtgaccacaggatagcatatgannntngtgatattaaggaatttttgtgtggtgggaaggnnnnnnnnnnnnnnnnnnngagantgcttcaatcagcagatgaagaagccgttgttgaacttttggatgaacaccttaaatcagcaaaataaatactgacttattattaattatgattatataaatgaaatggacctatatcaagaggcagactgaggtttggaaatctttatgaatatttgtaaattacagctataagaacacattacacataaatatgtgttttttaatgaatcgaggtnnnnnnnnnnnnnnnnnngnnnnnnnnnnnnnnnnnnnnnnnnnacgatccaactcatcaagtagaaaataagcatgcatcactgaaaagggaaagtattgagaagtgattgtgtgatttaggacaggtcacttgttttctttatatgcctttnnnnnnnnnnnnnnnnnnnnnnnnnnnnnnnnnnnnnnnnnnnnnnnnnnnnnnnnnntatggtaaaatttagtgaaatatgnnnnnnnnnnntacttataaatcttttatttaaagacaaagtacttnnnnnnnnnnnnnnnnnnnnnnnnnntaatcccagcactttgaagggccaaaaggggaagatttcttgaggcaagaatttgatactagcctgggcaaaatagaccccatgtctacaaaaaaattcaaaacataaagaaaaaacataatactgttaatcatgttaaagttaagacttaga

SEQ ID NO: 15426 - DNA, 744 bp, Macaca Fascicularis
  misc_feature (1)...(744): n = A,T,C or G
aatgaatgaatgaatgaatgaatgaatgatnnaatgaggaagnnnactgtgggtnnnnnnnnnnnnnnnnnnnnnnnnntgctccctaggaaatccaggaggtagtctggcttctctgagtaagaaataatggaagagaaggagcttggatgannnnnnnnnnnnnnnnnnggaagggcttctcacactttcatgtgcttgtggatcacctgaggatcttgtgaaaatatagatactgatttggtcggtctgcatagagcctgagactgccattctaacatgctcccaggggatgctgatgctgctggtcctgggaccacagtgcatgcatgtgaggccctgtaggtctcagcagaggcccatggagaggcagtgtgtggctctggctgcccagggcctaactcagttcacacggannnnnnnnnnnnnnnnnnnnnnnnnnnnnnnnnnnnnnnnnnnnnnngttgctgagagagcttctccgtgacatgttggctttcatcagccaccctgggaagaggaaagtagctgccactatctttgtttccccacctcaggcctcacactttcccatgaaaagagtgaatgtagacaacccaagccctctccannnnnnnnnnnnnnnnnnnnnnnnnnnnnnnnnnnnnnnnnnnnnnnnnnnnnnnnntccatcacatcttatcttgatctttgctcccagtggattgtacagtgatcaattctaagccnnnntggccctgaaat

SEQ ID NO: 15427 - DNA, 780 bp, Macaca Fascicularis
  misc_feature (1)...(780): n = A,T,C or G
agatgccagaccacagccaaaccagnnnnnnnnnnnnnnnnnnnnnnnnccacatgattccagggagcctggagtccttggctcagannnnnnnnnnnnnnnnnnnnnntcntnnntctgactccagtcaagcgaatggttaaattggacaggacagttggattcatcctattttaaaatnnnnnnnnnnnnnnnnnnnnnnnnnnnnnnnnnnnnnnnnnnnnnnnnnnnnnnnnnnnnnnnnnnnnnnnntctgcagggagcacctcctcatgtccaaccnnnnnnnnnnnnnnnnnctgtggcccattgccttccattctgcccactggggccacactgcctcttgtcttccctgttctccactcccccaggccagcttatttcctaggctgggaccattagtatcattggcctttgcagatgctgcatcttaatgacccagatcaacggcagaggtgccacctgggctccacccccaagcctggtctggtggaaagagatcagactgagtcagggccatggcacattccacatggcacccaaaaggatgtgagtctgcccttgagtgcctcaaaggttgcttagtctccgagagtcctgtgcagtgacagtgcccaggcagaagggcgcccagaggagcagccctgtgtgtttactggatcagtcagacacatttaaggacttggtttatgccatgtgctgtgcctcatgctgagagccatcagtgactaaattgtagttcctgccttcatgaagctctgtcacaaggcagaaaca

SEQ ID NO: 15428 - DNA, 1005 bp, Macaca Fascicularis
  misc_feature (1)...(1005): n = A,T,C or G
aacaggtactgctgggccggaaggtggtggtcgtacgctgcgaaggcatcnnnnnnnnnnnnnnnnnnnnnnnnnnnnnnnnnnnnnnnnnnnnnnnnctccgcaagcggatgaacaccaacccttccagaggcccctaccacttccgggcccccagccgcatcttctggcggaccgtgcgaggcatgctgcctcacaagaccaagcgaggccaggctgccctggaccgcctcaaggtgttgacggcatcccaccgccctacgacaagaaaaagcggatggtggttcctgctgccctcaagnncgtnnnctgaagcctacgagaaagtttgcctatctggggcgcctggctcacgaggttgnnnnnaagtaccaggcagtgacagccaccttggaggagaagaggaaggagaaagccaagatccactacaggaagaagaagcagctcatgaggttacggaaacaggccgagaagaacgtggagaagaaaattgacaaatacacacaggtcctcaagacccacggactcctggtctgagcccaataaagactgttaattcctcatgcgtggcctgcccttcctccatcgtcgccctggaatgtgcgggacccaggggcagcagtagttcaggtgccacaggcggccggggacataggaagctgggagcaaggaaagggtcttagtcactgcctcccgaggttgcttgaaagcactcagagaattgtgcagctgtcatttatctatgaccaataggaagagcaaccagttactgttagcaaaagggaaccagaagatgggctgcagggccctaccttgtgagtggggcatctgttggactttccannnnnnnnnnnnnnnnnnnnnnnnnnnnatgtgcaagcacttgggaacagcatgagcttgctgttgtatacagggtatttctagaagcagaaatagactgggaagatgcgcaaccaaggggttacaggcatggccgtgctcctcacctgtgtattttgtaat

SEQ ID NO: 15429 - DNA, 759 bp, Macaca Fascicularis
  misc_feature (1)...(759): n = A,T,C or G
cactggtcgctttttataccacctccaaagggggctgagctctgggaccaggaaccgagacgcctcnnnnnnnnnnnnnnnnnnnnnnggtgcagtgagggctggctagcttctccccagtctccttaaacacccagccacggccaggggcttgtnnnnnnnnnnnnnnnnnnnnnnnnnntgcttccagtctcgtgtattttctctggagtgttgtttttgcagtgcagggtgagtcggtgtgggtgtttgaatgctgctgtttgctgttttttaaaggccttctagccctcccatggggnnnnnnnnnnnnnnnnnnnnnnctgtgcttcagcccagcatacagactgctgacaggcaccacacggtaactcgaggcatcaccaaaggcgtgaaggaggactttcgcctggccatggagcgccaggtctcccgctgtggagagaatctgatggtggttctgcacagattctgcattaacgagnnnnnnnnnnnnnnnnagactctgacctgagtggagacctgtccaccagacacagctcgggactgtgtaatttgaggagaagacacccagcagtgattgacgtggcgctcagccgcggtcattgttgctgttacaaagaagaaaaccagctgagttctaagtccttggttgcttaaaagtagttcccaagagtctgagaagctatctctatttttaagagtcattttttgtaatttttgtaaaacaaagacnnnnnatctgttttgtaaataaaa

SEQ ID NO: 15430 - DNA, 761 bp, Macaca Fascicularis
  misc_feature (1)...(761): n = A,T,C or G
gacaatgaacatatgcatgcatgtgtcttatgacagaataatgatatcctttgggcacatacccaataatggcattgctgggttgaatgatagttctgttntaagttacttaagaaacctccaaactgctttccacaatggctaaaataatttacattcccaccagcagtgtataagcattcccttttctctgcaaccttgtcagcatctactattttttgactttttaacataacaatagccattctgaccgctgtgagatggtatctcattgtggttttgatttgcatttgtcttatgattagtaatgttgagcatgttttcatatgcttattgactgcatgttgtcttcctctgaaaagtgcctgtccatgtcctttgcccactttttaatggaattaccattcttatttaacaaaaatctagtgaatcttcaatggtggaccttataagatcaatgaaaactcctctttcggctgaagtgttgtccttgtcttttgaggcataccattattgtgtcaaattgaaatgttgtatgtctttgatggtcagctttatttaatacatgtgagattacactgggaaactagagttgttctagattcatgttgaagccatgttagctcacatattcttgaaataataataattattgggaaagtttacaagtaatgtcacctttgtattaaaaaagnattgctcagattactcttttaaaattggaaatgattttaatataaaatattctaagaagtgcacat

SEQ ID NO: 15431 - DNA, 1134 bp, Macaca Fascicularis
  misc_feature (1)...(1134): n = A,T,C or G
ggctgcnnnggcttaagacaggacactgcggaaagtcgccatgtgccgccgcacactgtctgagatctgctcagctgacttgctccggccgtagtaatcggtgannnnnnnnnnnnnnnnnnnnnnnnnnnnnnnnnnnnnnnnnnnnnnnnnnnnnnnntggtcctcatccttggggccggcactgtagtacacacggtaactgtgagtagcctgggcaatctgttcggtggagcnnnnnnnnnnnnnnnntcttgggtggaagtcctgnnnnnnnnnnnnnnnnnnnnnnnnnnnnnnnnnnnnnnnnnnnnnnnnnatgaagacgggctgcactggaggcaannnnnnnnnnnnnnnnnnnttccgcaccacctgcaccagcttctccagctcgtctgggcagatgtcagggcagtgagtgaaaccaaagtacatcagcacccactggccccggaagtcagccttgcggcgaccctggcctttgtggtccagcaggtggaagtcgccctggcccacagctgcctggcgcagggcttctattcgcttttgctgctgcagcctctctttctcagccctcagggccagccaggccnnnnnnnnnnnnnnnnnnnnnnnggctgtgatcaacagcctggttcgaagcccagggccctgaggctggccctnnnnnnnnnnnnnnncagggccctgccttgacaaaaaccaggacctcagatgcagggcctggcctcccacggtcccaaggaggactgggggcttgaggtgagagagcctgtgccaagctgtggggctcnnnnnnnnnnnnnnnnnnnnnnnnnnnnnnnnnnnnnnnnnnnnnnnnnnnnnnngccagaagggaaggcccaggacggtgcctgggctgcccctgcgactggagagaccagtcaacccatccgaaggacccaggccacgttcaggcttnnnnnnnnnnnnnnnnnnnnnncctgagctcagaacacctccaccaaacatccacacctgtcactcctgtcctccacctgggatcaccagcctgccacaccttgccctgcacctcagcaaggtgaccctcttgctgactgaaagcattccaagtgcatgccttgcctggactcctaaccacgtatcatc

SEQ ID NO: 15432 - DNA, 773 bp, Macaca Fascicularis
  misc_feature (1)...(773): n = A,T,C or G
ttatttttgtaattttgtcatgctaagcacnnntgtatctgcgcaattcagtaggttaagaatcaatcttttnnttaatagtacagcagactttagtttcaagtttcataggcttagtacttatgtctagacatttgtgtctaaagcttttcattaactttttattttaaggacagtatcttttcatgaaagagtatttggctgaatgtttgctatatatgttacttgaaatgttaaatttaatatgcagcataccataggtgtatatataggtatgtaattttaagattaaaatattcagtctacaagtttggttcttatttaagcttttgggctaatactgcatatggcacaatgtttaatattggcaagatcatctcagagaaaggggattcagatataattttaaaatagagataatttactgacgcgtctctgacaatctattagacagcaagcaatatataatactgaaaaagtattcagaaatggaaaatttagatccatataggttatttaacttgtgttcagcctttttgtaacttttttgaaagtgcaaacaattctttggattattaaataaggtatagaatatgcatggtttctcaaatctagttttaaagtctaaaaaaagtctataaagaatcagatgcatagatactatgttaagtttacttggaggctaaaaatctccaatgaaaacaaaacaaaaacctttaagagaatgtagagtttatataaacacaaagtacgcatgaagatctgttctacca

SEQ ID NO: 15433 - DNA, 537 bp, Macaca Fascicularis
  misc_feature (1)...(537): n = A,T,C or G
caagccccagcnnncatnannncatnnntgtgtacgtaggagtgaatataaaaggacttcatctcctcaacatggaaactaaggctttactcatcagtcttaactatggttgttttatgtggcagttgggagatgctgatacttgtttnnnnnnnnnnnnnnnnnnnnnnnnnnnnnnnnnnnnnnnnnnnnnnnnnnnnnnnnnnnnnnnnnnnnnnnaggaaaacctgtaatattccatgaaattaaaatatttaagaccaaggaaaaaagccaggccttctgagcaaggaagaatcagaaacttatctgaatagtttgtttcagttttataacaaactcttttgccatgtcttttcattctggctggtctcgtggtaaaactgttaatgaagctaaatggacagttaatgcccactgaaagaaattcataaaagagaagtaactgttactcaagccaccacattttgtaatgcagaatttttttccgtgaaagacttcttaaaagattactttggccaagcatggtagctcgcc

SEQ ID NO: 15434 - DNA, 762 bp, Macaca Fascicularis
  misc_feature (1)...(762): n = A,T,C or G
tagctggaacaggctcnaactgcaggcttatcaannnnnnnggctctgagagtggctgcggtggctggggccatatgatgggtgatgagggttcagcctactggatcgcacaccaagcggtgaaaatagtgtttgactccatcgacaacctagaggcggctcctcannnnnnnnnnnnnnnnnnnnnnnnnnnnnnnnnnnnnnnnnnnnnnnnnnnncggctagggatactcactcacctgtatagggactttgatannnnnnnnnnngctgggttttgccggaaaattgcagaaggtgctcagcagggagaccccctttcccgctatatcttcaggaaggctggggagatgctgggcagacacatcgtagcagtgttgcccgagattgacccggtcttgttccagggcgagattggactccccatcctttgcgtgggttccgtgtggaagagctgnnnnnnnnnnnaggaaggttttctttgggcgttgacccagggcagagaaatccaggttcagaactttttctccagcttcaccctgatgaagctgaggcactcctccgctctgggaggggccagcctaggggccaggcacatcgggcacctcttccccatggactatagcgccaatgccgttgccttctattcctacaccttctcctagggggctggtccctactccacccactccaagctcagtggacactgggtctggaaggaaggagtcttttgcttcctttctccttttacaaaaacaaaca

SEQ ID NO: 15435 - DNA, 759 bp, Macaca Fascicularis
  misc_feature (1)...(759): n = A,T,C or G
tacattctaataataaatggctgaagtatatactgaaagtataatttttgaaattagttaccaaaaatcatttactaaacaatagttttactaaaaatactaggattgggaaaaataaacactaatagaaagtactccaaaatnnnnnnnnnnnnnnnnnnnnnnnnnngattgggggtgatttacactttctcattttctgtattaccaacacttaattcgcaatcaggagaaaaacctattaaatgatatttaaaacattaaatcnnnnnnnnnnnnnnnnnnnnnnnnnnnnnnnnnnnnnnnnnnnnnnnnnnnnntnnnnnnnnnnnnnnnnnnnnnnnnnnnnnnnnncaacctctagacacaaaaaggctgaattgtccccccaatttcacctcccctattacgcacnnnnnnnnnnnnnnnnnnnnnnnnnntgtccccacccaaatctccaattgtaatccccaggtgttgagggaaggtcctggannnnnnnnnnnnnnnnnnnnnnnnnnnnnnnnnnnnnnnnnttctcatgatnnnnnnnnnnnnnnnnnnnnnnnnnnnnnnnnnnnnnnnngcatttctcctgcactctctctctcgccacnnnnnnnnnnnnnnnnnnnnnnnnccttcgnnnnnnnnnnnnnnnnaagtgtcctgaggcctccccagccctacagaactgtgagtcaattaaacctcttttgcnnnntnatacccagtctcagtagtatcttnnngnactgt

SEQ ID NO: 15436 - DNA, 886 bp, Macaca Fascicularis
  misc_feature (1)...(886): n = A,T,C or G
gacttctcaatatggaaacacacttgacatgnnnnnnnnnnnnnnnnnnnnnnnnnnnnnnnntcaatctagtactatatttagcggtgaaaccaaatacatcctctaaaagaagttcattatcnnnnnnnnnnnnnnnnnnnnnnnaatgctgtatctactttcttatgtcttgtttctcctttcatgtaattnnnnnnnnnnnnnnnnnnnnnnnnnnnnngttggcattggaaacatttttatttgcagttattttgtctacttttactactgtgccttgcttgtgtttgttaggnnnnnnnnnnnnnnnnnnnnnnnnnnnnnnnnnnnnnnnnngagtttcatccatatgggagaatagtctccagatgactacaatttctagttttgtaggagcatggcttggagcacttcctattccgctgnnnnnnnnnnnnnnnnnnnnnnnnnnnnnnnnnnnnnnnnnnnnnnnnnnnnncctttggctacgtggctggccttgttatttcaccactctggatatactggaatagaaagcaacttacgtacaagaacaattaactggagcaaagggagatacttctttgtgcagattctgtaagggctgtgcagaaatgtgtatggtcaaagccaagcagttccatttacagcactgttttttatgtagttacaacatgatgtgattgtagctttttaaactatgaaacccctgagagattgtaccttctagttgaaataaagtatttataatagattgtggcttcagatgctgcttactgcttcttaaacctttaaggaacattcttaataacctttatagaattctgaggacaggttttgttttctttcaagttttgaactgcttcattacctataaaaggtc

SEQ ID NO: 15437 - DNA, 760 bp, Macaca Fascicularis
  misc_feature (1)...(760): n = A,T,C or G
acacagcccatggaggtgtttgtggacgacgagaccaagctcacgctgcacnnnnnnnnnnnnnnnnncgtcaaactcaaagacagtgagaagaaccgcaagactctttgatccctggacctccactccttccttcaggtgataannntcgtcaagtcagtgcagcgctgcatggccctggcccagctcctcgtggagcagaacttcccggccatcgccatccaccggggcatggcccaggaggagcggtgagtgcgagccacccgccaaggctgcagggagcgccacccaggagcccagtgtctgacggcctccacttgtttctcctgcaccccagnnnnnnnnnnnnnnnnnnnnnnnnnnnnnnnnnnnnnnggatcctggtggccaccaatctgtttggccgggggatggacatcgagcgagtcaacatcgtctttaactatgacatgcctgaggactcggacacttacttgcaccgggtggcccgggcgggtcgctttggcaccaaaggcctagccataacttttgtgtctgacgagaatgatgccaaaatcctcaatgacgtcnnnnnnnnnnnnnnnnnnnnnnnngcagaacttccagaggaaattgacatatccacatacattgannnnnnnnnnnnnnnnccacgtgccccgccagtccagagccgcccacccggagctgcccacctggagccgcccgcatgcagcttcacctcccctttccaggnnnnnnnnnnnngaagctagaaatg

SEQ ID NO: 15438 - DNA, 734 bp, Macaca Fascicularis
  misc_feature (1)...(734): n = A,T,C or G
aggccatgcgganggatattcaagagaagcttatgtggagttagttcaccatatcagagaatctattccaggtgtgagcctcagcagcgacttcattgctggcttttgtggtgagacggaggaagatcacgtccagacagtctctttgctccgggaagttcagtacaacatgggcttcctctttgcctacagcatgagacagaagacacgggcatatcataggctgaaggatgatgtcccggaagaagtaaaattaaggcgtttggaggaacttatcactgtcttccgtgaagaagcaacaaaagccaatcagatctctgtgggctgtacccagctggtgctagtggaagggctcagtaaacgctctgccactgacctgtgcggcaggaatgatggaaaccttaaggtgatcttccctgatgcagagatggaggatgtcaataaccctgggctcagggtcagagcccagcctggggactatgtgctggtgaagatcacctcggccagctctcagacacttaggggacatgttctctgcaggaccaccctgaaggactcctctgaaaattgctgacctgagaggatggcctcagagctgacttgggcagtcctccccaacaggaaggggagacattgccggccgctgaggagagaggtcatgaagctgtggagataagctgcaaggggtgaagcaactttatgtcagtggaaaacgtgtctctttaaagctgcta

SEQ ID NO: 15439 - DNA, 749 bp, Macaca Fascicularis
  misc_feature (1)...(749): n = A,T,C or G
caccnnnnnnnnnnnnnnnnnnnnnnngaagacaccctcctccttcatcaggcctttgannnnnnnnnnnnnnnnctgccttcccacaggcctatgattgagctctgcatcccttctgcgctggaccccaccctggctccctccggctgccacgtagtctctctcttcactcagtacacgccctacacactggctggaggcaaggcctgggacgagcaggagagagacgcttacgcagacagagtgtttgatnnnnnnnnnnnnnnnnnnnnnnnnnnnnnnnnnnnnnnnnncggcagagacatcctcacaccaccagatttggagagaatcttcggnnnnnnnnnnnnnnnnnnnnnnnnnnnnnnnatgtccctggatcagctctactttgcccgccctgtgcccctgnnnnnnnnnnnnnnnnnnnnnnnnnnnnnnnnnnnnnnnnnnnnnnnnnnnnnnnnncctggaggaggtgtgatgggagctgctgggcgaaatgcagcgcatgcggcctttagggacctcaagagcaagtgaccccgaatcagctctgacccagnnnnnnnnnnnnnnnnnnnnnnnnnnnnnnnnnnnnnnnnnnnnnnnnnnnnnnnnnnnngcttcgggttagtacttaaggccaccaaatcctcaatgctcaagctattattttagaaaaaatgtacgagttacgtttagtgcaagttaaccttatgcccgtgcctccatacgggactggttct

SEQ ID NO: 15440 - DNA, 766 bp, Macaca Fascicularis
  misc_feature (1)...(766): n = A,T,C or G
gaaaaaannnnnnnnnnnnnnngtagagtgcaaagacccttagagttggcagattctgggatagggagacagcgacttgtccaaggtcaagcacgcagagagagagaggttcaggagccaggtcttctgccttctgagttggctcatcctgggcaggcacagactgtcctgcctgcacagctcctgatccacctgggggtgtcgcagttgaggggctaattcccaggggactgacgttagttcctcactccatccttccctgatgattcttgatctttgaagcctcggggatcccaggtttccccatgtaaccaagagcccctgcctgttagccctgggggacccctaaccttggcccaagacccctctgattctctaaggagcacgaaagggggaatgcccctcccaggagtttatgggataagggactgggccagctgcctcccagcgatgcacttgacctgacactccccatgccctggtacgcacagcccttgtcagtgccctggcccctcccgcagcgttactgcctgtgtatagtataaatatatatattttctatatataagatgtataatataaggctccacaaatatatctgtgtgtgtgtgtgcgtgtgtgtgcggtgaagggcggtccccatcctgggcccccactctaggccccccaccacctggttaagtctcgagtgaatccagtggccctgtggcaccctcctttatgacatccatccatctgtggtgaaccaagtgaaggtggtgacttc

SEQ ID NO: 15441 - DNA, 775 bp, Macaca Fascicularis
  misc_feature (1)...(775): n = A,T,C or G
gcaggccatatacaaacagtttgacnnngaccgatcagggaccatttgcagtagcgaactcccaggggcctttgaggcggcagggttccacctgaatgagcatctctataacatgatcatccgacgctactcagatgaaagtgnnnncatggnnnnngacaacttcatcagctgcttggtcaggctggacgccatgttccgtgccttcaaatctcttgacaaagatggcactggacaaatccaggtgaacatccaggagtggctgcagctgactatgtattcctgaactggagccccagacccaccccctcaccgcctcgctataggagtcacctggagcctcggtctctcccagggcccatcctgtctgcagtcacatctttgtggggcctgccgacccacagcttttgttctcccagcacttgttacccagcttctcaacatccagggcccaatatgcctgcctggagtttcccttaactctagaacactctaacaagctctgtccaagggtctccccactcccaccaggccctgcacacacccgctccgtaacctctcccctgtatctgtgccaagcctaccatttgtgatgcctccatgcccagagggccctctctcggttctgggaggatgactccagtccctgcacgccctggcacacccttcatagttgccacccaggcggccaagctccagaccgtgccagacccaggcgccccagtgcctttgtctatattctgctcccagactgccaggcccaggaggaaataaa

SEQ ID NO: 15442 - DNA, 687 bp, Macaca Fascicularis
  misc_feature (1)...(687): n = A,T,C or G
cccaagtaacacttgaagagttgggagaggactcgagggcagggtgaggaggaggagacagtggtggccatttgggctaggacagtaaaggcaggtgagggtgtgggccctagctggctggaggagattctataaaagaaaacacgtgacacgaggggagaaggcaggcattttaagaaaggttcggtccaggcaggaaggtggaatgtttattccagagcaaaatggccttcttccgtctgttctaacccccacacccacttcttccacagaactacaactataaccagcatgcgtatcccactgccnnnnnnnnnnnnnnnnnnnnnnngacccctgcaaaggggggagtctcgccttcttcctcggcttcccgggtgcaacctggcctgctgcagtgggtgaagttttggtaggcaatttcttccaaccaccaccgaggccccgaaaaacactggtagtcagggagctcctccccttggctcccagcctgtaccagccctggcccggctgctgcacctctgtttcctaggctggggacccagcttgtgtctccttatttcctcccactgcactgtggggcctcagtgaccaccagcctcatcggatacaccagcatctttctctacctgctcccttttgtgacctgaagtcactgtgacagttctccgggaaggaggagcttcc

SEQ ID NO: 15443 - DNA, 752 bp, Macaca Fascicularis
  misc_feature (1)...(752): n = A,T,C or G
tcatagttattgtgtgggtttttttgtttgtttttnnnaatgaaaagtatagtatgtggcactttttaaagaannnnnnnnnnnnnnnnnnatgagtactttaattgtgactcttaggatctttcaggtaaatgatgctcttgcactagtgaaattgtctaaagaaactaaagggcaatgttgccctgtttgcagtaatttttctttttatcattttgtttgtcctggctaaacttggagtttgagtatagtaaattatgatccttaaatctttgagannnnnnnnnnnnnnnntctgctgtagacttttcagatgaaacgcattgttcattctcataacctccatattttcaggatttttgaagctgttgaccttttcatgttgattattttaaattgtgtgaaatggtataaaaatcattggtgttcattatttgctttgcttgagctcagatcaaaatgtttgaagaaaggaactttatttttgcaagttacgtacagtttttatgcttgagatatttcaacatgttatgtatattggaacttctacagtttgatgcttcctgcttttatagcagtttnnnnnnnnnnnnnnnnnnnnnnnnnnnnnatgtatttttttcctaggcaaacattgaatgcaaacgtgtatttttttaatataaatatataactgtccnnnnnnnnnnnnnnnnnnnnnnnnnnntatttcatatgtgtggttatactcataataatgggccttgtaagtc

SEQ ID NO: 15444 - DNA, 746 bp, Macaca Fascicularis
  misc_feature (1)...(746): n = A,T,C or G
cggttggaaggctgtgggtccgnnnnnnnnnnnnnnnngagtgggggccgttccggagcgaggctcacattccctgccctgcagatgactgtccacaacctgtacctgtttgaccggaatggagtgtgtctgcactacagcgaatggcaccgcaagaagcaagcagggattcccaaggaggaggagtataagctgatgtacgggatgctcttctctatccgctcgtttgtcagcaagatgtccccgctagacatgaaggatggcttcctggccttccaaactagccgttacaaactccattactacgagacgcccacnnnnnnnnnnnnnnnnnnnnnnnnnnnnnnnnnnnnnngacccatccgannnnnnnnnnnnnnnnnnnnnagtgcgctgtatgtggagctggtggtgaagaatcccctgnnnnnnnnnnnnnnnnnnnnnnnnnnnnnnntcttccgctcccgactggactcctatgttcgctctctgcccttcttctccgcccgggctggctgaagcaaccttcctcatgtctcaggagaattcatgtctgcctggggcccttctgaacctgtgccacttaagggcccccactgtaagnnncccgcacnnnccacccnnncannncagagcaacagcgtaaaggccnnnnnnnntgctctcctcctaccagaatgaagcccacagagtccctccacctccacaccaggcccgctctccagtttatccccgacctgatg

SEQ ID NO: 15445 - DNA, 735 bp, Macaca Fascicularis
  misc_feature (1)...(735): n = A,T,C or G
tgcagtatnnnnnnnnnnnnnnnnnnnnnnnnnnnnnnnnnnttataagttagtctttagtgggttttaaatagtnnnnctgacccttctgaaaaataactacataagtacttcttgttgctgggtgagaagtactactttatagacagttttggttttctattcgcagatatgattgatgtattacaccaaaataaaatatttttatgtttataaagtgtaatttttaggttcacttagaatatattttatttaataagttaaaattcttttggcacactattaaatgcaaaaactcctttcaaaacaaaaaagaactaccttatattcaccatttaatgttcttggtctctgcttttatgtctatacagtatactgagctcagtgtggtgtccacaagtgccctgtgtggatagacacgtgctctccttccaggagtgggtactgactccagactccagatgcctattattaggcttctgagcttgcaatcatattgaatgtatgaagagcgaaataaaatcaaattcttatttttgtacagttttgaagtttatacttagaactgaccacctccccggccacgtggagagctgtacagtgtgtaaatctgcctttatcttggattgattagtacagtatttttgcatctgtgggacctaccttttcgttccgtagtttgaactatatataaactgtacaatctgtaaagtttttatagaataaatattcagc

SEQ ID NO: 15446 - DNA, 710 bp, Macaca Fascicularis
acagttccctggaccacaggggggtcctgtctcaacacaggccacccattgggtgtgaactcggatcccttccttatggcggccggttctcttggtggaaatctggccccatttccaaggaacccatctccttttccagcttcgtcaggctcattggcttcaaatccagcacctttcccagctggtgctcgtgacccgagtatggcttcttttccaagagggatgaatcccactggcacagggatacattggcctgcaggtcccagttcacatgtagtcccctgctcaccattggagaatcagctcactgctctctagaaacgtggcgttggtgaacggaccatgcttccgtagctctgaactgggcagcttggacctggtcatcctctactgccatacctttcgctgggggcttgaacacagaacagggagatggacaaccacttcaaagacctactgaatgcagcttctgcttgactgactgggcctgcagctcccttctcctgggacttagaggtggccagatttaaggctcctctactcatccaactccctcttcactggtactcccaatcaaagaacctcaaaatttaaactgatgtggatgggaatatgcgaattggggtgggggtgggggatgaagggaagaaatcactgtgctttgttcagcctggtgtgcaaggatggttggtggttttcctgcattgtat

SEQ ID NO: 15447 - DNA, 712 bp, Macaca Fascicularis
  misc_feature (1)...(712): n = A,T,C or G
tgccaggatgccaagagccaacagaaggaacagatgttgcnnnnnnnnnnnnnnnnnnnnnnnnnnnnnnnnnnnnnnnnnnnnnnnnnnnnnnnnnnnnnnnnnnnnnnnnaggaacaccggctgaagacnnnnnnnnnnnnnnnnnnnnnnnnnnnncagtacctggaagtcaaatgcagtgctatgatccttaagctgaggatggaggagctaaagannnnnnnnnnnnnnnnnnnngttgagaaagtggaagttcatcgtctgattagggaccgtttggagggagccattcacctacaggagcaggacatggagaagtcaagacaggtcctgaactcctatgaggtccttggggaagagtttgacaggctggtgaaagagtacaccgtactcaagcaggnnnnnnnnnnnnnnnnnnnnnnnnnnnnnnnnnnnnnnnnnnnnnnnnnnnnnnnnnnnnnnnnnnnnnnnnnnnnnnnnnnnnnnnnnctgctgcctcctaatcttcctgctagtaggaccaccttcacctggnnnnnnnnnnnnnnnnnnnnnnnnnnnnnnnnnnnnnnnntacttgaaacactgcagtcatttaggcaccctcgtggtttccctttattttttataatgactgggcctcttctggaaaatctagcaagcagatttatataatttttatgcatagctgtgtnnnnnnnnnnnncct

SEQ ID NO: 15448 - DNA, 754 bp, Macaca Fascicularis
  misc_feature (1)...(754): n = A,T,C or G
agagcgcgtcccagtcgagctgcgtgactaccatgcacactgtagagttctgtgcctctcctggaactcggctagcggcgccacagcncctgctaactaatcgcgacatcacaactgaattgtaagatgttcatcgctgtgttatccttgagtaaagaaacgggcttttaccatgttgtccaggctggtatcgnnnnnnnnnnnnnnnnnnnnnnnnnnnnnnnnnnnnnnnnnnnnnnnnnnnnnnnnngaatgtgagctctggaagcccagccagggacaatgctccttcacagagattctgcactaacctgagtgaaggcctaaggtttggaacctccccctcgtggaaagaagctttgtatggctgtcatgcttagacaatgattcctgcgacttgaccttcaggctgggagaggtggagagccatgcctgttctccttcgttgctatggtgactatcctttgttttggctcagttggagtggtaatgatgatctggttggactagagtctgagcttttctctgaggatctttgaacccacctgatccaccctcatgctgcctagaatctccggaatttgctgacacaaagaatatcttctgcctggtgctgggcatatcctaagaactgacaactttcctgtattaccctgtgtgagcagctgtcaccttattgggggaagaatgcctgaaaattagggggcacttcaagtagagagcttctatttcctgtatttgtcttatatacaag

SEQ ID NO: 15449 - DNA, 665 bp, Macaca Fascicularis
  misc_feature (1)...(665): n = A,T,C or G
gacatgggcccactggtgtggggggccgtgggggggacactgctggtgctgctacttctggctggggggtccttggccttcattctgatgagggtgaggaggaggaggaagagcctcggaggaacaggaagaggagccagcggcgacgggggattctacgatcnnnnnnnnnnnnnnnnnnnnnnnngggaccctgtcttctggacaccagtagtccatggtcccatggaaccagatggtgaggaggaggaggaggaggaggaggaagagaaggcagagaaaggcctcatgttgcctccannnnnnnnnnnnnnnnnnnnnnnnnnnncccagctggacggctccctcatctcacggcgggcagtttatgtgtgacctggacacagacagagacagagccgggcccagccctcccgcccccaactgggccacgccggcctagggttccagactggttggactnnnnnnnnnnnnnnnnnnnngagtggaacactgcctcccactttcctgggacttggagggaggtggaatggcacactggacttctcccgtctctagggctgcatggggagcccggggagctgagttgtggggatccagagaggaccctcgcccccagagacttggtttgactccagcctgcccctggccccggacactcagga

SEQ ID NO: 15450 - DNA, 719 bp, Macaca Fascicularis
  misc_feature (1)...(719): n = A,T,C or G
accgaactcannnnctcactccttagctnnncagcaaagtccagtgtgtacaattatgttgggtgtgggtggtctccaaggccacgctgctctctgaattgattttgagttttatttgtaagatgatcacagtcatactacactgatctaaaggatatatatatatccctttaaaaaaaatcactgcctcattcttatttcaagatgaatttctatacggactgtttttctgaagatcgtatcaactagacattttgaaaatgatttaaaatgttttccttaatgttctcnnnnnnnnnnnnnnnnnngtagttttaaccaaaaaagtgccctttttgtcactggattctcctagcattcataattttttttttctcatacaatgaattaaaattgctaaaannnnnnnnnnnnnnnnnggttggatttcaggtgagatgtgtttaaggccagagcttttctcatatttttttttccccacatatttgatttttaatcaatatacacactaggtgctgcatttatatctgctggtttaaattctgtcatatttcacttctagccttttagtatggcaaatcgtattttacttttacttaagcatttgtaatttggagtatctggtactagctaagaaataattctataattgagttttgtactcaccatatatggatcattcctcatgnnnnnnnnnnnncnnaatgcagcttcatttt

SEQ ID NO: 15451 - DNA, 764 bp, Macaca Fascicularis
  misc_feature (1)...(764): n = A,T,C or G
cagccaagtgcccaaaatgatanctgtgcccactccaccatcatggtgtgcctgaggaaggctgctcagggatgtcggacctcggccaggacccaccacactgcttcctaatacccacccttcctcacgacctcatttctaggcatctttgtggacatgatgtcacccctcatcaagcattgcctgtgattgcccaacccagattcatctgtgccttggacatggtggtggtgatgggttagcatccaagtgaaggtcttttccttgaccaagggagacagtcagttttgcaaaaggactctaatacctgtttaatgttgtcttcctaattgggataatttagttaacaagattgactagaagtgaagctgcaacactaacttccccatgctgtggtgtgacctgagttggtgacacagaccacagaccccagagcttggcttttgaaacacaactcagggcttttgtgaaggttccctcggctgagatctttcctcctggttactgtgaagcccgctggtttgctgctgtcatttctgaggagggcctatgggggtaggagcagttgaacctgggaacaaacctcacttgagctgtgcctagacgatgtgaattcctgtgttgctaacagaagtggcctgtaagctcctgtgctctggagagaagcatttcctggtaggctttgatttttctgtgtgttaaagaaattcaatctactgatgatgtattatacataaaacatttctggaacatgtatttgtgtt

SEQ ID NO: 15452 - DNA, 728 bp, Macaca Fascicularis
  misc_feature (1)...(728): n = A,T,C or G
accgggatgggcacgcnnnnntnnnacccagcaccctcccccgacatcacccacctgccagagcccaaggccccggctcgcactctgtacagcccaccttccctgcctcacagataccaatcgagaggctttcttaattaacaaaaggacgtatgccgtggagaaacacacccgtgcacacagccactctccacagaggctgcaggctccgctgagccccccttcagtgttatttatgacttacaacgctccagtctgcccatgcaccggcatgcagtgttcattattttagaaatattgttccttggtgtcagcgtagctgtctgtcttaggagctgggtcggcgttccgacagcacttcctgtctactattctcctccgccatccagaactgtccagaactgttgcctgagacccctcctgtctcacacagccctgctgtgctgnnnnnnnnnnnnnnnnnnnnnnnnnnnnnnnnnnnnnccaggttgtgtgctggaatcagaggtggctctcctgccacccacggggagcaccacccacggggagcaccaggagaggagggttgtggaggatgttggggctctgacctcaagagtggggtggagggcagagcctgctgggggccctgcctccacagagatgccgcgtgctgggaaggcatcggggtcccctgagcgtcttccagggtggctggagagcacagacgcgccagggagcccctctgt

SEQ ID NO: 15453 - DNA, 595 bp, Macaca Fascicularis
  misc_feature (1)...(595): n = A,T,C or G
atggactgcaaccgttccntcagagttgatnnnnnnnnnnnnnnnnnnnnnnnnnnnnnnnnnnnnnnnnntgtccacccagattnnntnnnnnnnnnnnnnnnnnnnnnnnnnnnnnnnnnnnnnnnnnnttcgaccctggtgaatgacgcctataagaccctcctcgcccccctgagcagaggactgtaccttctaaagcnnnatggaatagagannnctgaaagnnnnnattatgaaatggacnnnnnnnnnnnnnnnnnnntaatggaaatcaatgaaaaactnnnnnnnnnnnnnnnnnnnnnnnnnatgaaagagattgaatccattgtcaaagcctccctcattagactggaagttctgcagaaggagaaatcatgtttactttttgcttccctcacatcctcagctcacagaaaagtacttatagtttaaaaggaacttgctaaacagaaagaatttactgannnnnnnnnnnnnnnntttgaacaagatgactttgaagaagccaaggaaattttgacaaagatgagatacttttcaaatatagaagaaaagatcaagttaaagaagattcccctttaattgttga

SEQ ID NO: 15454 - DNA, 1107 bp, Macaca Fascicularis
  misc_feature (1)...(1107): n = A,T,C or G
ggnnnnnnnnnnnnnnnnnnatcttccatctcgaanngaacnnggaattaaatattttattgtaaagatatgtataatgctnnnnnnnnnnnnnnnnnnnnnnnnnaagttnnncttttgttagtatgtttacgcacataatccatatttgctgttcaaattaatctagaaatttattcaattctgtgtgaacaccttggaagcaaaatcatagtgcaaaaatacatttaaggtgtggtcaaaaatatgtctttaattggtaaataataagcgttaattttttatagcctgtattcacaattttgcaatactttattgtacctaagggattctaaaggtgttgtcactgtataaaatagaaaggacgaggatacaaatgaaacttaattactaaaatgtaattcttgacactctttctataattagagtccctcacccccatccccacccccacccccccccttattttccttttatctcctgatgattaggccaaaggctgggagtaaggagaggattaggtacttaggagcaaagaagtagcttggaacttttgagatgatccctaacatactgtactacttgcttttacaatgtgttagcagaaaccagtgggttataatgtagaatgatgtgctttctgcccaagtggtaattcatcttggtttgctatgttaaaactgtaaatacaacagaacattaataaatatctcttgtgtagcaccttttactgtagattagtgcttaatttcttggcttgcatttgttgattgctgaggcaattttttctaatcttagggaataattcagtagatgtgattaaaaagctaatgttggatcaggttttttttcttcattttcagcacaagaagtcctcttctttcatatcctactaaatacattcctaaaaatgtatatgaacattggttctgtaaaagataatggactaaaaaagtagagaagagttgtagagatcttaaatcattctggaattcctaattatgcttcaatttttagacataattttagatgatttatttccagtgttttctgcatgttctcatttgttctttttctcagttgaatgcaccaactggtttgagtcct

SEQ ID NO: 15455 - DNA, 762 bp, Macaca Fascicularis
  misc_feature (1)...(762): n = A,T,C or G
agccgnnnnngccctccttnnggagacaggagtcaccagggcacagccctccaggcccgcgtcaggaaggaacgaaaggaatgccatcatctctagtccccagggcccagccttccccttctcccccgaggctgggaccgtgtggcgtattcagattcagacctcttcgggccgagccacctnnnnnnnnnnnnnnnnnnctttatgtggccgtgacctgtactcgtttgcttttaatttgccaacctatcgctgctggcagcacttttcgagcaggccaagtgcacnnnnnnnnnnnnggggttcaaatcgatggccttgtccatggcgtcctttctggcttccctaacggtgtcatgtttcagagcatgtgccccagcctttcccatgtgcnnnnnnnnnnnnnnnnnnnnnnnnnnnnnnnnnnnntaggcctgcgccctccctggagnnnnnnnnnnnnnnnnngagagctggcctagtggtgctgagggctcctttctgctgctctgcccacctgctgagttgccactcacagcgttgtcagttcctgtgttctgagaagaggtcacgcctgggaggaagggaccgtcatgctgcatcgaatcctctctccgctgtgtggccccgggagcgtagctgcctgttgcacctgctccacacctctccacggcctccctgcaggtgctgtgtggtgtgatgtgcagagagcagcgagggaggctttaggaaccaggtggatcctcttaaaaaaaaaaaatc

SEQ ID NO: 15456 - DNA, 1049 bp, Macaca Fascicularis
  misc_feature (1)...(1049): n = A,T,C or G
ccaaagtgctnnnattataggcatgagctactgcgcctggcaaagatagaacttttataattttatgccagttgaactaaaggaaccacccattagcccagttcttaggagaggtacttcaaacttgaaagagtatgtatttcagtaacttatatgtggctaaccatcaaatacatagtcatctaagcttctaaatgttctgtatttatacagttatatttataaaccaaaaattttaatgaggttaattttaaatataagtatattttagaaatcacagtttgtatctgtttcttagtaggtgtggcttttaaaatatatgcttgttcattgttaaattccagaataatagagtaatacttaatactgtacattcccacttatgtatattttattaaaatttataagcaagaaattatacataagtggtcatgatattagggaaacaaagaatttctcttaggaaagagaagtgatggtaatgtaaataaaaatactgtttatattcacatgattttaagaaaactgtaaaagcaaagactgtagtaatgacacaaatatgacaaacatgttttcttaaaattggcagtcaatataattatgtttctgcctatgatattgaggaagttctatcagtctgattcttaagttttctcatctgttaagtagaagatactattacttaccttaaagggtggctttaagaattttgtaaggaacaaacatgtttttggttctggaatataggaggtgctcaataaaagttgatgctgaatggcaaataatattctaattgttttggaaatgcatgatgattatttttggccatatttgacttagtttcattaggctaatattaattggtactgtatgaaagtgtgtcagctaattannnnnnnnnnnnnnnnnnnnnnnnnnngatgggggagaaaacttaaaatctttgcctaaattatgggtagatannnnnnnnnnnnnnnnnnnnnnnnnnnngtattcccatgttgtgttttgcgaatacttaatttaaaataatacagatgaaaata

SEQ ID NO: 15457 - DNA, 656 bp, Macaca Fascicularis
aacatgatgaagctgaacattcacaagctctatacattgattacctatgtgctggtcaccacgttcaaaaatctattgataaagtcattgtggacaagaactaaccactgattgtcaaataaagtgagcaaatcatacacacacaaatagaataattatggccctctactttgagtaacacatatactatttggattggaagaccgattattagcaaaatactgattcacctcaaattgatctatacattgaatgccattccactccaaatctcagtagaaactgaaaagttgattctaaaagttatatgaaaacataaaggacctagaatagccaaaataaccttgaaaaagaggaacagagttagaatacccatagtacctgatttcaagacttactatgaaagctaccataatcaatggagtgtggtaatgtataaagacaggcaaaggctgggtacagtggctcacgcctgtaatcccaacactttgagaggatcacttgagcccaggagttggagaccagccttggcaacaaagtgagacctcacgtctcaacaaaaattcaaaaaattagccaggcgtgtatgtagcatgtgcctgtggtcccagctacttgggaggctaaggcaggcggattacttgagcacagggggt

SEQ ID NO: 15458 - DNA, 726 bp, Macaca Fascicularis
  misc_feature (1)...(726): n = A,T,C or G
tcctcatcactcaccggannnnnntccccttnnnnnnnnnnnnnnnnnnnnnnnnnnnnnnnnnnnnnnnnnnnnnnnnnnnnnnnnnnnnnnnnnnnntcaccttccgctgcctggaggagggcctgggtgtagaccgccgcatcaccaggttcgtcctgccnnnnnnnnnnnnnnnnnnnnnnnnnnnnnnnnnnnnnnnnnnnnnnnnnnnnnnnnnnnnnattgctcaagtnnnnnnnnnnnnnnncaacctgggtcagatcacaaccatcagcatcacagccacagcggccagtgttggggctgctggnnnnnnnnnnnnnnnnnnnnnnnnnnnnnnnnttgtgctcacgtcggtcggcttgcccacggagnnnnnnnnnnnnatnnnnnnnnnnnnctggttccttgaccggcttcgcacannnnnnnnnnnnnnnnnnnnnnnnnnnnnagcagccgtcatcgagcacttgtctcagcgggagctggagcttcaggaagctgagctcaccctccccagcctggggaaaccctacaagtccctcatggcacaggagaagggggcatcccggggacggggaggcaatgaaagtgctatgtgaggggcctccagctctgccccccaagagaggagggaaggggcctggggaggggagtcctggggacacatctgccacccagctgaccgtgggctgaacacacatgttctgcttgactcgt

SEQ ID NO: 15459 - DNA, 197 bp, Macaca Fascicularis
ggacttcagaaaatacaaaacagcccgttttgccccctcacagaaatggttcagagtatataaaacttgagacatttttgtaggatgcctgaggatgtgtagccttttatattgtttccggatgagtatttattagagagtactctggttaatactatgaaaagttatatgctgtagtttagtattttgtctttgta

SEQ ID NO: 15460 - DNA, 745 bp, Macaca Fascicularis
  misc_feature (1)...(745): n = A,T,C or G
tgtactgctgagaaacagaatacattgctgatnnnnncatgcaggaatcacctcctcatgtagaaaattactgtctaccagaagctatttcannnnttcagaataataaggaacttgggactggattatcacaaaagaggaaagctcctacagaaaaaaataaaatgaaacgacctagagtacactaatcgcatctactctttagttaccaaacattaaatgtttttaaaaattgaaagcctgaatgtgactgtggcggatttgggtcgtagtttaaggatgagtgcctgaagacttctgcctcagagtataatgataacccttcttgagttttgaacacctgaaattttaatcactgcaatattaactgtttcttaataaaaagttacctgaaataacaacaaagtacagctcctcagctagcttgctgttaaaccacattgaagtatgttagaaggtatttatttttcttgtaaatatctgaagctatagcttagtggaaattttagcaaggtgatggattttgctttagaaagtctgccttacaaattcataacaacaagatttgtcaatcagcatttattcatgttttccctgatttttatcttctcaccattttacctcttttaacaggagcctgagcnnnnnnnnnnnnnnnnnagctggggctataaatgtgtgtgtatatatgtatatgtatgtttgtacaaatctccatgatgtttgccaagtttgggtgccaaaa

SEQ ID NO: 15461 - DNA, 708 bp, Macaca Fascicularis
  misc_feature (1)...(708): n = A,T,C or G
ctgggagaataaaatgagaacnctggagtgagctaaattgatcccaattaagttcttctgcttagcagacagtaagtataattttttgacacccttccccgcctgctgcctatgctaggcttgtcctgagagcatccctcagtaatttgatattcatgtggcctacaggatgtctcatctggagggcgagtcagttggggaacaccacaggctacacagtagctcttcctgctgctgggttaatgagtttggcaggttctttgtctcactcaattcttnnnnnnnnnnnnnnngcagnnnnnnnnnnnnnnnnnnnnagtgtagtgtctgtgctaacccaatggtaaatcccttagatcccctcctgttctctggcagtctccttgattttgggtaccatgtatattttcagctttgactttaatgctttctaggatagggtgagcacccttaatccaggcactgtccattagcttcctttgcaaaggctacttactgccggtcacaatccagcactcagacagagccaaggggaggtcctcttgcccatggctatgatgtcagacagtggatgggctccagccacaagagacaaaatcactaaaggcctttgctctcctcttacattgaggcctggggcttacagtttggaatatgacatgtgaaggtttttgttgttatttgtatttttaaaatgtaaacttgatt

SEQ ID NO: 15462 - DNA, 726 bp, Macaca Fascicularis
  misc_feature (1)...(726): n = A,T,C or G
aagccctggannntcagcttcgcttaacctgggtgagctaagaaaagtggggnnnnnnnnnnnnnnnnnnnnnnnnnnnnnnnnnnnnnnnnnnnnnnnnnngggctccaagaggttcagagtcacatctcaggtcagaaaaggggtctcagtttccccacctgtccagggttgtgctgggctcggggagccccggccaggcagccccgactgttgacctcctctcacaggttccactacgctgcccggatctgggatggggtgaaaaagtcctctgctttggcagagtacagccgtctgctggcctgaggccaaggagagnnnnnnnnnnnnnnnnncatcctgggtccccagtggacggcgagggagcacaaacgtccgtcccccaccggggtggagagcggcaacaggcctgatggatgagggatcgtggcttcccggcccagagacatgaggtgtccagggacaggtcccccaccctcagttgggggctgttcagggggtgactgtgagcgattcccccgaccccagcctgagatggggcggtccatcctacgtcctccacagggacaagnnnnnnnnggagtctgaatgggcaccaggaagccctggctccatcttgacttcctttttcagggacaggagcaacaggtccctcttccctgactctaagcccttccctgtaaggtgaggcagggtctggagagctctttatggagcagatct

SEQ ID NO: 15463 - DNA, 718 bp, Macaca Fascicularis
  misc_feature (1)...(718): n = A,T,C or G
atggacgctgcatatagagaagnnnnaagtgtnnnnnnnnnnnnnnnnnnnnngctattaaccctttaatgactgaaatgacccctccactctatttttgtgttgtttttgcacagactccggaaaactgaaggctgccaatctgagtagtgctcaaatgtgaggaactgctggtcttggattttttttccattaaattcannnnnnnnnnnnnnnnagtagataaacgtaaatagcttcaaattttaaaagtggaattgcagtgttttttcactgtatcaaaaaatgtcagtgctttatttaataattctcttctgtatcatggcatttgtctacttatatattacattgtcaattatgcatttgtaattttacatgtaatatgcattatttgccagttttattatataggctatggacctcatgtgcatatagaaagacagaaatctagctctaccacaagttgcacaaatgttatctaagcattaagtaattgtagaacataggactgctaatctcagttcgctctgtgatgtcaagtgcagaatgtacaattaactggtgatttcctcatacttttgatactacttgtacctgtatgtcttttagaaagacattggtggagtctgtatcccttttgtatttttaatacaataattgtacatattggttatatttttgttgaagatggtagaaatgtactatgtttatgcttcta

SEQ ID NO: 15464 - DNA, 711 bp, Macaca Fascicularis
  misc_feature (1)...(711): n = A,T,C or G
gacgcatcacctagttnnnnngctgcagtttttacatnnnnnnnnnnnnnccagattgacaagtcatctttcagttatttcctctgtcacttcaaaactccagcttgcctaataaggatttagaaccagagtgattgatatatatatatatttttaattcagagttacatacatacagctaccattttatatgaaaaaatccatttcttcctggaactcaccttttatataatgttttatatatatttttcctctcaaatcagacgatgagactnnnnnnnnnnnnnnnnnnnnnnnnnnnnnnnnnnnnnnnnnnttggtctttacaagacttggatacattacagcagacatggaaatacaattttaaaaaattcctctccaacctccttcaaattcagtaaccactgttatatcaccttctccaggaaccctgcagtggggaaggctgcgatattagatttctttgtatgcaaagtttttgttgaaagctgtgctcagaggaggtgagaggaaaggaaagagaaaactgcatcatagctttacagaaatgaatctagagtcttctcctaaaagttcagaaatttctctgcagtatctgagctgtccatccagtctaaggtggctgcttcttccccagccatgagtcagtctgtgcccatgaataatacaagacttgttatttccatgactgctgtactgtatttttaa

SEQ ID NO: 15465 - DNA, 710 bp, Macaca Fascicularis
  misc_feature (1)...(710): n = A,T,C or G
acaacgtctgtaattagtgnnncacnnnagaagtccttttgtgggtcgtaaattatttctacttatccagtaaataacaatgacaaaataaacaccaatgacagaaaaatttctactttactgtccctataggtgtgcattttaaatatttttctttccaagttaaaattttgaaagttcaattgtgtattgtgtaattaatttgatagtgtaccctcttaataaatgcccactttattttatatccaagttagtgcactatatatatatttttgctttggctatatttacacgtgactttaattgcccaactgtgactagccactgcagatactcagatactgtatttatggagatggtgtgtcccgaacagtgtagctcaggtcagcttgaactttccatttctgctctcatagtaggtgtaaatactagtcctaatgtcaaatgatccatgatttctactgtcaatataagtgaacactgttttaaatatccttaactaacttaaagaattttaaaattgtactgtnnnnnnnnnnnnnnnttgcctttttggtaccagagatacgtggtttgaattctggctacatgttttaagtaagaaaaaaaaaagacgtatttttgcttactcagataaaacccgtaaaaatataaggaaataattaaattttacatgtgctgtacaaggggtnnntaaaaagcattgtcaa

SEQ ID NO: 15466 - DNA, 720 bp, Macaca Fascicularis
  misc_feature (1)...(720): n = A,T,C or G
cagatcactataaatgtaacataaaggcatctgtacatgtttctgatttcagtacagataatagtgcatctcaaccaaaacaaaagtcagatattatgcnnnnnnnnnnnnnnnnnnnnnnggaaaaggaccttcattcaatatttactcatgattctggtctgataacaataaacagttcacaagagcacctaactgttcaggcaaaggctccatcccatactcctcctgaggaacccaatgaatgtgacatcaagaatatggatagtttaccttctggtaaaatacatcgaaaagtgaaaatattattaggaagaaatagaaaagaaaatctggaaccaaatgctgaatttgataaaagaactgaatttattacacaagaagaaaacagaatttgtagttcaccagtacaatctttactagacttgtttcagactagtgaagagaaatcagaatttttgggtttcacaagctacacggaaaaccgtggtatatgcagtgttttagatatttgggaagaggaaaattcaaataatctgttaacagcgtttttctcgtccccttcaacttctacatttactggcttttagactttaaaaaatgcatacttttcagaagtgataaggatcatattcttgaaatttttataaatatgtatggaaattttttttaccagctttgtttacagaaccaaatnnnaaatattaaaaataaatgttt

SEQ ID NO: 15467 - DNA, 771 bp, Macaca Fascicularis
  misc_feature (1)...(771): n = A,T,C or G
gcacagccagtcaaggcggcnnncgtcctggcggcaggagaagatcacccggaccaaggaggaggccctggagctgatcaacggctacatccagaagatcaagtcgggagaggaggactttgagtctctgnnnnnnnnnnnnnnnnnnnnnnnntcagccaaggccaggggagacctgggtgccttcagcagaggtcagatgcagaagccatttgaagacgcctcgtttgcgctgcggacgggggagatgagnnnnnnnnnnnnnnnnnnnnnnnnnnnnnnnnnnnnnnnnnnnnnnnnnnnagggtggggagcccaggcctggcctcggggcggggcagggcagctgggcccgtcagctcccctctnnnnnnnnnnnnnnnnnnnnnnnnnnnnnctccctgccaccgtcacacagtatttnnnnnnnnnnnnnnnnctgggagggggcccttccagattaggggccctggggtccccactccctgtccatccccagttggggctgcgnnnnnnnnnnnnnnncttaaggaattgacttcagcaggggtgggaggctcccagacccagggcagtgtggtgggaggggtgttccaaagagaagacctggtcagcagagctgccccgtgttcccccaggtcctggaggtagacttgaggaccgagttatttctagttaggccatgctcctctgttcagtcgcaaaagcaaacactcgtgcggcccagccatgggccctctgagcaactgtgcagcacccttcacccccaat

SEQ ID NO: 15468 - DNA, 406 bp, Macaca Fascicularis
  misc_feature (1)...(406): n = A,T,C or G
agcacaggggtgagagannnnntcctggaatgggcactcgatgcagcttnnnnnnnnnnnnnnnnnncaagaacgtagaacatgctcatctnnnnnnnnnnnnntcctttccttggctccctaccaaccttgctctcccctggacaggtcctattcatccttcaactttcagtttaaatgtcacctcttcannnnnnnnnnnnnnnnnnnnnnnnnctaaattaagtccccaagttatgcaatctcttaacattgtctatttgtttaatatatggatcccccactgcagggaccaggaaactgaggcccaatcaaggaaagagacttatcnnnnnnnnnnnnnnnacagaccagcatttccaaaaccactctgagttagacccaatttcaaccactnnncncngnt

SEQ ID NO: 15469 - DNA, 697 bp, Macaca Fascicularis
  misc_feature (1)...(697): n = A,T,C or G
cnnnagcagnnnnnnnnnnnnnnnnngtcccggggaacaccggcgcagatgtgctccttgtgggctcagagggcttcgtgctgttggacgggcaggagctgacaccccgctggacgcccaaggcagcccatgtcctgagaaaacccatcttcggccactacaaaccagannnnnnnnnnnnnnnnnntgaaaacggaactggcaccaacagacagatcctgttcctggacctnnnnnnnnnnnnnnnnntgtgtagcctagccctcccgagcctccctgggggtccactgtccgccagcctgccgaccgcagaccaccgctcagccttcttcttctggggcctccatgagctgggcagcaccagcgagacggaaaccggggaggcccggcatagcctgtatatgttccaccctaccctgccacgtgtgctgctggagctggccaatgtctctacnnnnnnnnnnnnnnnnnnnnnnnnnnnnnnnnnnnnnnnnnnncatgctgcctacatcctcctgacaggcccagcagactcagaggcacccggcctggtctctgtgatcaagcacaaggtctcacctctgtgccttgctgctcctgaggcccaagggcagccgtggggctctgtgctgctcggaccgcccaggccacagagcctgagcttcgtagcnnnnnnnnnnnnnnnacccacccacca

SEQ ID NO: 15470 - DNA, 775 bp, Macaca Fascicularis
  misc_feature (1)...(775): n = A,T,C or G
ggacaaactgtgtgaatatttagtaacaactantnnnnnnnnnnnnnnnnnnnnnnnnnnnnnnnnnnnnnnattaggaattgtatttcctatagaaaatatttacagtgcaactaaaataggaaaagaaagctgtttcgagaggataattcaaaggtttggaagaaaagtggtgtatgttgttataggagatggtgtagaagaagaacaaggagcaaaaaagcacgcgatgcccttctggaggatctccagccactcagacctcatggccctgcaccacgccttggaactggagtacctgtaacagcgctcggcactttgacaccacacagctgctctgtgaccagggacagttccagcaggccccagtctcacatcagcgccggcctccagaacttagcaatttccacctgctgatgcgcagctgctgtcagtcttgacctctgcccttgtggtgaatggaggaccacgtctatttcttcagaacagctgttgactctagtactgtgaatccaatgaaaataagccatgagaatgttctagcacagcgtaatgtgtctgccacattaactacacggttcaaacctgtgaagaaaggacctgcaaacgcttcagttgttagcattttcaatgtgatataaacagcttctccaatacagcaaacccaattgcacaacagagactgaaatgtgtttcctgaatactagtggaggaattttcttgtaaagaaggtttactttttggtgtctcatacnnnngggtaatctgtacatct

SEQ ID NO: 15471 - DNA, 710 bp, Macaca Fascicularis
  misc_feature (1)...(710): n = A,T,C or G
caccctcatnnnnnncnnnctcaaaaagagaattggnnnnnnnnnnnnnnnnnncaagcttagaactttaagcaacgcnnnnnnnnnnnnnnnnnnnnnnnnnnnnnaatgtgtggcctgcacagnnnnnnnnnnnnnnnnnnnnnnnnnncaaactggggccgccagcactcactggggcctacagcttccatccctgaactcagtctgtnnnnnnnnnnnnnnngagaccagggagcctttggttctggccggaacgctgcaagacttgagaagacatcacctagaagttgacacaagtggacctcgggccttcctctctccagatgtttccagacttccttgagacatggagcctggccctccccatggagccagccccctctatttatgtttgcacttgtgattatttattatttattatttatttatttatttaccgatgaatgtatttatttgggaggtcgggggatcccaggggacccaatgtgggagctgccttggctcagacatgttttctgtgaaaannnnnnnnaacaannnnnnnnnnnnnnntagcctcctggcctctgtgccttcttttgattatgttttttaaaatatttatctgattaagttgtccgaacaatgcagatttggtgactgactgtcactcattgctgagcctctgctccccaggggagttgtgtctnnnnnnnnnnnnnnnnnna

SEQ ID NO: 15472 - DNA, 707 bp, Macaca Fascicularis
  misc_feature (1)...(707): n = A,T,C or G
ttggcatggtatagatacaacttatcccttaccaccaaacacataatatagctagtcaaaatgattatttttaaaggaaactatttaaaataaagccactagtacatataagttaggaaagaaaagtcaagctggaaccatcttgatattctaatgagcaggcctatttagttctacatcttttttttttgnnnnnnnnnnnnnnnnnnnnnnnnnnnnnnnnnnnnnnnnnnnnnnnnnnnnnnnnnnnnnnnnnnnnnnnnnnnnnnnnnnnnnnnnnnnnnnnnnnnnnnnnnnnnnnnnnnnnnnnnnnnnnnnnnnnnnnnnnnnnnnnnagccaatttttttgtgtatatttttagtagaggcggcgtgtcaccacgttcgacgggctggtcttttaaatcagagagaagcttttaactttggtgtgtttttgttttcgttttgttttgtttaaacacagggtctcatgnnnnnnnnnnnnnnnnnnnnnnnnnnnnnnnnnnnnnnnnnnnnnnnnnnnnnnnnnnnnnnnnnnnnnnnnnnnnnnnnnnnnnnnnnnnnnnnnnnnnnnnnnnnnnnnnnnnnnnnnnnnnnnnnnnnnnnnnnttacattttttgcagagacagggtctccccatgctgcccaggcttgcctcgaactgagctcaaatgatccccctgcctaggcccccaaagcgcta

SEQ ID NO: 15473 - DNA, 721 bp, Macaca Fascicularis
  misc_feature (1)...(721): n = A,T,C or G
ccgggacctggactnnnctgagtttgtcannnagccacagaatgagtcgaatccggagctgtacaaatatgacctcatcgcggtttccaaccattatgggggcatgcgtgatggacactacacaacatttgcctgcaataaggacagcggccagtggcactactttgatgacaacagcgtctcccctgtgaatgagaatcagattgagtccaaggcagcctatgtcctcttctaccaacgccaggatgtggcgcgacgcctgctgtccccggccggctcatctggcgccccagcctcccctgcctgcaactccccacccagctctgagttcatggatgttaattgagagccctgggtcctgccacagacaaaaaaaaaaaaagctctctctgcaatcttgcttttcgtgtccacccctcttctcttattcgtgttaggtgcccccgccagacattgcaggcttagttgtggctactgttttcctgtgccgctgcatcgctctctcccaggaaagaacaagtcgtgtctcctcctggcagtgcgcgccccgcctgtgtttgcccttccagcagttgaccctcccttgtagtctttatttatggtcgtgcccttccctctcctcagcccggagtgttctgcgtgggtggtgatgggggttcacctgaacacagagtgtattttcttattgaggccctgtaccttctgctgtctgtgtgtaaat

SEQ ID NO: 15474 - DNA, 680 bp, Macaca Fascicularis
  misc_feature (1)...(680): n = A,T,C or G
ctccagtcgtcagagcaactctacctggtattatcatccccattttacagataatgacactgaggctcagaaannnnnnnnnnnnnnnnnnnnnnnnnnnnnnnnnngcagccccagatccagacctagacctcctggcacccagtccactggcagtggaattgctnnnnnnnnnnnnnnnnnnnnnnnnnnnnnnnnnnnnnnncttgcttcaaagactctagcagtgggggataggattttgcaaaaaaaaagctgacccaggggccatactgaaataactgagcaggaatgtcccattgccccctcctccactgggttcagagggcaagaaagtaccctccaataaacccaggctgcaggccatggggactgctgaaggctcttccccaatgagggccgggtgttgacaccttaaggctggctgcgcccccagccccactcttggctgtgctggccaggcgactcctagctctcggccacatcgtcagaaagtcaaagttctcactccaggtttggggctccttccttccactcccctccctgccagagtctgtcttggccagtcccagcctcgatgctttgcttttgaccccacctgatcttcctttcctcatgcagcgcaagtgctcactggggccagggtgagggcatggacatgacaagcagggcagcctgga

SEQ ID NO: 15475 - DNA, 693 bp, Macaca Fascicularis
  misc_feature (1)...(693): n = A,T,C or G
aatgctcagcggtgactgggcctccgctcacacgttnnnnnaggagaaactctacagagcatcttttaaagcaagagattcacacaggccaagtgatgagaggtggagtcactaaggcttcagccccaagggcannnnnnnnnnnnnnnnnnnnnnnnnnnnnnnnnnnnnnnnnnnnnnnnnnnnnnnnnnnntccctagtgatgctgcgagtgctgttgnnnnnnnnnnnnnnnnnnnngccctgccccacgaagggccaccagccgagggccctgnnnnnnnnnnnnnnnccttattttggaagtctctggcttgtgtgcnnnnnnnnnnnnnnnnaacttgttgggccggcgtcgctgctagtacatatatgaaccatgaggtgttaaacttttcttttgaaggtttggccagtttctaaaaaatgcacatttaaagagaagcatctaccactgctttaaaacaaaacaactctgagatgaacaatatgtgttatactcagagattagcaatctcaatcatacatactgattctttcagacatttaataaccactacatttttttttgcattaatgaagtttgaatatatgtgtaaagggactaaatatttttgnnnnnnnnnnnnnnnnnnnnnnnnttttctggatagtgtnnnntctgtgttgcggtagatttatacattctgttg

SEQ ID NO: 15476 - DNA, 1397 bp, Macaca Fascicularis
  misc_feature (1)...(1397): n = A,T,C or G
ctggacaagaatgaccgggccaaggcctcggcagaaagctgcagttgctgagggggcagtgagagttgagcacagagtccttcacaaaccaagaacacannnnnnnnnnnnnnacaattcccctctcctcttccaaacaaaacatacattgatctctcacatccagctgccaaaagaaaaccccatcaaacatagttacaccccacatgtcacacacacacacacacacacacacacacacacacacacacccctgacgtaatcaaactccagcccctgcccgtgatggctcttggggtctgcctgcccacccacatgagcccgcgtgtatggcagcaggacaggccagcggtggatgtcattctgatatggagttggcattggaagcttattctttttgtccactggagagagagagaactgtttacagttaatctgtgtctaatttttttttaacggtcttgtggtctttttacctcccctttcccctccctccttgaaggctaccccttgggaaggctggtgccccatgccccattacaggctcacacccagtctgatcaggctgagttttgtatgtatctatctgttaatgcttgttacttttaactaatcagatctttttacagtatccatttattatgtaatgcttcttagaaaagaatcttatagtacatgttaatatatgcaaccaattaaaatgtataaattagtgtaagaaattcttggattatgtgtttaagtcctgtaatgcaggcatgtaagatggagggttgaaccctgtttggattgcagagtgttactcagaattgggaaatccagctagcggcagtattctgtacagtagacacaagaattatgtacgccttttatcaaagacttaagagccaaaaagcttttcatctctccagggggaaaactgtctagttcccttctgtgtctaaattttccaaaaggttgatttgcataatacagtggtatgtgcaatggataaattgccgttatttcaaaaattaaaattctcattttctttcttttttgcccccctgctccacacttcaaaactcccctgttagatcaacatcctactatgagagcgaaaggaaaaccctcacagatctgtcctagtgatttttacctttgttctagaaggcgctcctttcagggttgtggtatccttaggttagcggagctttttctccttttccccatccatctccccaatattgcccattattaattaacctgtttctttggttggaaccctggcagttctgctcccttcctaggatctgcccccgcattgtagcttgcttaatggagcactnnnnntttttccaaaggtctacattctagggtgtgggctgagttcttctgtaaagatgtgatcgcaagcc

SEQ ID NO: 15477 - DNA, 1374 bp, Macaca Fascicularis
  misc_feature (1)...(1374): n = A,T,C or G
cttaaaaaggtggacaagatcgaggaacttnancaagaaaacgaagcagcgttggaaaatggaatannnnntgaggnnnncacagaacnnnnnnnnnnnnnnnctgagaacgctgatgatcccaacaaagatacaagtgaaaacgcagatggtcaaagtgatgagaacaaggaggactatacaatcccagatgagtatagaattggaccatatcagcccannnnnnnnnnnnnnnnnnnnnnnnngatacctaaaacagggttttactgtaagctgtgttccctcttttatacaaatgaagaagttgcaaagaatactcattgcagcagccttcctcattatcagaaattaaagaaatttctgaataaattggcagaagaacgcagacagaagaaggaaacttaagatgtgcaagaagatttaatgatttcaaagaaaataatggttcttcgtttttaatgttaaccttttttaaatacaatactgatagttagaagaaaactattgtactcttttgttttagtggagaaataatagatgtctgttcatgtgttaagtgttatagcaaaaaaaaaatacacatatggttaagttaatgaatagtttttgttttatcaaaatggcaacggacagaaatactttgtagagattgacttcctaagctacttaagacaacttgcaccactaagaaagaaatatagaaccatttggaaaaatgaaatttagtagttccaagtttcaaagaaatgtcaacattttattccattcaataaagaacaaaaccaatagtatttttattactttcatttgaaacattccatgttttaannngagccttgcagactttgatttggagtttgaacctgttttggttgcatttcatttnnnnnnnnnnnnnnnnnnnnnnnnnnnnnnnnnnnnatgcaggtgcagttttctgttaatgtcatgctgttgtttaggtaataagaaatattaagtaattggctttagattttgtaattttttccctgagttcctgctagatttcgtattctagtagtcaatgtattttcagtgaaatgtaaaaatattcccgttctctttgaccagtattaatttttgagattttactgcttgtcacttgaatcnnntaattgtcatacatctctggtataagcaacatttgatttttgaagtgtgtagaccatctcttcatattttcaagatgtaattttacatttctgcatttttaannnnnnnnnnnnnnnnnnnnnnnnnnnnnnnnnnnnnnnnnnnnnntgcacatgtgacctttgtgaacannnaatttgcatgtataatttgtgtttacttgtaactttctggttatatactgcttatatctgtggattc

SEQ ID NO: 15478 - DNA, 727 bp, Macaca Fascicularis
  misc_feature (1)...(727): n = A,T,C or G
cagagtgcatacagaccannnnntgcatcagtgtatctcgaccagaggctaggactggagagggctctacggtatttaatggggcccagaatggtgtgtctcagctaatccaaagggagtttcagacnnnnnnnnnnnnnnnngacattgatactgctgccaaatttattggtgcaggtgctgcaacagtaggagtggctggttctggtgctggtattggaacnnnnnnnnnnnnnnnnnnnnnnngttatgccagaaacccttcgctgannnnnnnnnnnnnnncatatgctatcctgggatttgccttgtctgaagctatgggtctcttttgtttgnnnnnnnnnnnnnnnnnnnnnnnnnnnnnnnnnnnnnnnnnnnnnnnnnnnnnnnnnnnnnnnnnnnnnnnnnnnnnnnnnnnnnnnnnnnnnnnnnngactccgaaaactgtagtattggtgtcatggaaatgtacgttatttccaaagtcatttcattaaagatgaaaactttaatttcttctgtgatttgtacttacactaaggttagattatcacaaagaagaatgtgcattcagacagatgctgtccaattcagaggaagctacagctgaaaatatcccaatgtaatttttatcggaattcttttatatagtgttctgcatattggaattcatagggcttttgtttattcatataaaggataaatattcgggtgttttgagctt

SEQ ID NO: 15479 - DNA, 743 bp, Macaca Fascicularis
aggagcaatgaacagcagctactacagtagtggaagccgtgcatctatggacgtgaatggaatgggagggatatctagcatgtccagtatgcgtggtggatggggaatgtaattgatcgatcctgatcactgactcttggtcaactttttttttttaaaagaaaaaaaaacttcagtttaacagtttctgcaatacaagcttgtgatttacgcttactctgtaagtggaaatcaggattgttatgaggacttaaggcccagtatttttgaatatagtactatctaggatgtaacagtgaagctgagtaaacggtaactgttaaacttaagttccagcttttctcaagttagttataggatatacttaagcagtaagcgtatttaggtaaaagcagttggattatgttaaatgttgccctttgtcacgttacattgaacactggatgcatgttgaaagacatgcttttatttttttgtaaaactcaatataggagctgtgtctacaattaaaaatgaaacattttggcatgtttattaattttagtttcatttagtaacctgtgaggcacataagtttaagccttttttttttttttttaagttaatgggaaaaatttgagatgcaataccaatactttaggattttggtcttggtgattttggtcttggtgtttgtatgaaattctgaggccttgatgtaaatctttcattgtagtgtgatttccttttaggtatattgctca

SEQ ID NO: 15480 - DNA, 726 bp, Macaca Fascicularis
  misc_feature (1)...(726): n = A,T,C or G
ctgtggcaagagctgcgacagtccnnncaacctcaagacccacttccgcacgcatggcatggcgttcatcagggctcggcagggggctattggggataactaggccctaagcctgggactgaccagccccttcctcttggagcctggttttccctgctgctgcctgatcccctggctggggagtttcattgacattaacattttgttaattcctctctcaaacctgaagaaaagcttttgaggattattctagttatctgcaacctccctttgggtttggccctggagtcctagtagagtggaccctccattcctcttttctgagcccaacactaattatgctcctgctgcagaacccccagtgtgggcctggggttgggaggatgggacttaggtattcctgctagacaggtttagggaaggactgatgggggtgtcacggatggacacatccctccacaattccttcaggcatggactggaaatttcctcctctgggccaggccctaccctagtgccccctcccccccaactcactggcactcaagccccctacccctgcagtgcctttcacttctttttttccccagaaatccagggggggtggttggtggggatgagtcctgtcaagggggccataggagaggaggggacaggctctcaggaatcctttattcttgtagtaataatactaacagtgggggaactagggagaaaaccagacca

SEQ ID NO: 15481 - DNA, 725 bp, Macaca Fascicularis
  misc_feature (1)...(725): n = A,T,C or G
cagtcaggtggtgattgagtcttgtacagcactgaaatgaaatcaaagatgaagaagcattgattgtattcaaannnnnnngcacgctcatactttgtatgtgctttagggaaggggtgggtgggcacttgggccttgcgggtgcattcatgtaatctgagactcttgaactttatnnnnnnnnnnnnnnnattttgatgtatatgaaacttttgttaatatgttgtatacttcgctggctgtgtgaagtaaactaaaactctaatgaacactttggagtccgctttagtgaaggagaccaaagtgggaagggctttagggcactgatagaggccctgggtgtacttttcaatcctgtgtgatgtttaattcttgcaactgaatcaaaacagtgttaaattatggcaatatttgcaccttgggaatgagtacataactgtatgatcacactctgcaaatgccacttttaaagctgttaatagactttgcaccttttctttgacaaggatgtgtcatatttaaatttttacattcatcatggctacaggtagaactggggaggggggaatgtaattttttatgggaattttgatatgaaaagaaactagtcatttatttatacaataggcttggctcaaaaagtgtttttcagacctcggtattcctaatgtgggatgtgactttattttatttttagtagcaaatttggatgtagactgacagac

SEQ ID NO: 15482 - DNA, 675 bp, Macaca Fascicularis
  misc_feature (1)...(675): n = A,T,C or G
acacaagactaccattgtacacttgatgggatgtatttttggctttttttgttgttgttanaagaaagagtttaacaggtgtcatgaagaacaaactggaatttcattctgaagcttgctttaatgaaatggatgtgcctaaaagctcccctcaaaaaactgcagattttgccttgcactttttgaatctctctttttatgtaaaatagcgtagatgcatctctgcatattttcaagttttttatcttgctgtgagagcatatgttgtgactgtcgttgacagttttatttactggtttctttgtgaagctgaaaaggaacattaaacgggacgaaaaatgccgattttatttataaaagtgggtacttaataaatgagtcgttacactatgcataaagaaaaatcctagcagtactgtcaggtgggtggtgcaccggcattgactttagggcagataaaagaattctgtgtgagagctttatgtttctcttttcattcagagtttttccaaggtctacttttgagttgcaaacttaagactttgaaatattcctgttggtcatgatcaaggatatttgaaatcactactgtgttttgctgcgtatctggggcgggggcgggttgagggggacaaagttaacatattcttggttaacccatggttaaatatgcta

SEQ ID NO: 15483 - DNA, 740 bp, Macaca Fascicularis
  misc_feature (1)...(740): n = A,T,C or G
gcagtgatccggctgggactcannnnnnnnnnnnnnnnnnnnnnnnnnnnnnnnnnnnnnnnnnnnnnnnnnnncaccttcttggagagctgtggnnnnnnnnnnnnnnnnnnnnnnnnnnnnngagggcggaaccggaaagtggctgaggcctttgcgcgtacaggaaagtccattgagcagctggagaaagagatgctgaatgggcagaaactgcaggggcccgagacagcccgggagctacatagcatcctccagcacaagggcctggtggacaaagtagcacctacgaacacattcatggacccaaattgannnnnnnnnnnnnnnnnnnnnnnnnnnnnnnnnnnnnnagcagctagctgaccttggctataagaccttctctgcctccatgatgctccttactgtgtatggggggtacctctgcagtgtcggaatctaccactatttccagcagcgcagggcccagcgccaggcggcagaagaacagaagacctcaggaatcctgtagatctggggggctttttctcctgagcagagaggcccaaggcatgctgtggagagacttcacctgccaccatttccaggtcaacnnnnnnnnnnnnnnnatggttttcaaactctgttggannnnnnnnnnnnnnntttctctggttctgccagnnnnnnnnnnnnnnnncagtttatggaggctgttgaatcataatagcaatgtgagtgtgaggtacacctannna

SEQ ID NO: 15484 - DNA, 712 bp, Macaca Fascicularis
  misc_feature (1)...(712): n = A,T,C or G
cgcagnnncccacccccaaagccnnnnnnnnnnnnnnnnnnncctggagggggtggggtgggcatgatgctgggccctgaccctcctnnnnnnnnnnnnnnnaggagagnnnnnnnnnnnnnnnnnnnnnnnnnnnnnnnnnnnnnnnnnnnnnnnntcccagaagtaatactgcctgctgcggtgagttccacatgtgggaacttagggcacattttttcctctacagtgagtccccacatgaggcttggaggcaccaaacacccaaggtgggcagggtgggcaagcggggaggagaagactccaggcaacacccagggccaatgttgcctggcaccctgttcccctccccagcaggtgaagttcaggtgaaatcacagcaaggcccacctaggagggaaagggaagtcgtacaggttcagcccatcacagggaagtagccannnnnnnnnnnnnnngggatctgaggggggcctccagcccagcctcccacctgcacaggcttccccttctgcagtgccagggccgtgggtgggaggagtcccaagtgtcctgatttacatggaccccactcactggctcctctccagccagccaccaaatctccacaagtgggggctgtggggtggtcccatagccgcatgatttgtaactcacatctgcaacagtggaacactgtgcaaacgtcatggaggannaatggttannnnnt

SEQ ID NO: 15485 - DNA, 706 bp, Macaca Fascicularis
  misc_feature (1)...(706): n = A,T,C or G
ccagcactttggaggccaaggcgggtggatcnnnngaggtcaggagttcgagaccagcctggcccaacanngtnnnancctgtctctactgaaaatacaaaaattagctggacgtggtggcgcnnnnnnnnnnnnnnnnnnnnncgggaaactgaggcaggagnnnnnnnnnnnnnnnnnnnnnnnnnnnnnnnnnnnnnngagatcgcgccactgctctccagcctgggtaacagagcaagactccgtctcaaaaaaacaaaacagagaaagtagaaaaacaactcagctgactaaggttgggggaagacttctaactcctcattttccttcagtgttatgtgactagatctccctaggtgatgcacagtccaactacctgctaaccactgccgagaacgagctgggagtagtggtagcccacagtgagtcaggtatccagatggttcccatcagctggnnnnnnnnnnnnnnnnnnnnnnnccacactaaagaattccggaaagtagcccgagtacaacctgaattcttgcagacctaagaagccactttttaccccatggaagggggtaagctgttcctgagtataacaccaagatgctgctnnnnnnnnnnnnnnnnnnnnnnnnnnnnnnnnnnnnnnnnnnnnaatctgccagaaacttaggctatagatggaacatgtttcttgtgaacctatcagtgg

SEQ ID NO: 15486 - DNA, 710 bp, Macaca Fascicularis
  misc_feature (1)...(710): n = A,T,C or G
gtgtctgtcatttggcccagcccctggtttgctcgcagaaaacgtggtnnnnnnnnnnnnggcatctgcagggaactttggcagcttggggcaccctgaattagcaaaaatggggggtgacgaggtgctgaaggaggatacttatggcttagtaaggaggcaagagcnnnnnnnnnnnnnnnnnnnnnnnnnnngagggcctgtgggcttgcttttggaaggcctcaggcagacacgtgccctctgggtgatgtctgtctgccgccaggatggagcagaggagcgctacacatggaggaaagcgcctgtaacgttatctaccttaaactccactcatcaaagctgagaaaagtgtccactggtccccagggtttcagtcatgcttttgggggtcattgggtattagagaagtaagtaccttttctgagnnnnnnnnnnnnnnnnnnnnnnnnnnnnnnnnnnnnngctttattcagtcccagcccagaccctgacctttgattgtgggcctccctaatgcccaggnnnnnnnnnnnnnnngaggagttgttgaattgaagcccagggtccttgttgatgtttcttctcctagccacacttggaggagagttgcaggtgggttgggcagggagcaggaatggttctgctttgctgtttgtcttcctagttgtaaggctctttataaagagcttgttcttcatgttttaagc

SEQ ID NO: 15487 - DNA, 724 bp, Macaca Fascicularis
  misc_feature (1)...(724): n = A,T,C or G
gccatactgctggagctcattcagataaaactgnnnaatactgagaggtgnnntctacatccagctagaggagcacactccattttcccatgtctgacttcctggtgtgagccctgggcactactgaccatggcacaggacagctgtccttcagaaagcgtgaggtccatccacgcagaccgtctccctcgcaggaattccgcaccctcgtccctctctgcattcccgccttctgcaggagccttgattaatggggaagcctgggtgaggatgggccaggtcccaattcccaaagctcctgggagagcctgaagacactgggagaggctgggcctggggaggaggcagccctaggcccgctgcccatgcctctggtcctgggtggagcaggaatagttccactgtattgtcacagtgtgtttgcactttctgaggttctagctagtacagattgtatattgatagtacatattgctttgtttatgtctttgagatgagaaaggcttaaaacttgagaatatatatttggaatacagccttagaatggtttctgtacacatccacgtgcacttcacgggtgatcagttctagtacctacttgaaacagtgtctatgtttgctactttattttcccaatttgatacataccctgatttgatgttttggtatttaagatgaactctgagtatgaagctgtaccataatgcaagatgtcagttttggt

SEQ ID NO: 15488 - DNA, 727 bp, Macaca Fascicularis
gactaccccttgattaagagactcttacctgtgttcttcctcgtgcaagccagtggaattaatgtctacatgtcccgaaatattgaatccattaaggggattgcggtcatggacaaggaaggcaatgtcctgggccattccacaattgctgggacaaaggctgttagagaaacggcagtatccaggacagtgctgtttgggacctctgctctgattcctgaaatcttcacctacttttttaaaaggacccagtttttcctgaaaaacccagggtcattgtggatcctgaaactgtcttgtactttcctgacaatgggactgatggtgccagtttcttttagtatatttccacagattggacagatacagtgccgtagtcatgaagagaaaattcagccttcaacagaagaaacagaaatcttttatcacagaggggtgtaggcatgagtttcaggtgaatttatgtgcttcctgcttgaaaaccttcacctctccagcttcggtttagagaactctgccagaggtcttctggggaccccagaggtgtctgtgctgacaaggtgacttaaagttccacactgagatcactcccaggctggcatgtctggggtttttaaggctggctggagaagacggtgggagggtgccccgtctgacatccttggggttgctaaggagatggttggagtggggatcggcctgcgaaaggatactatgaagtcactta

SEQ ID NO: 15489 - DNA, 712 bp, Macaca Fascicularis
  misc_feature (1)...(712): n = A,T,C or G
cacccgcccagcacccgaatcacnnnaagccagccnnnnnnnnnnnnngcaggcccaccnnnnnnnnnnnnnnnncctgttagtaacggcaaagaaacccggaggagcagcaaaagatagcatgacattctttcttcctgccaccaaccacatcccaagtgtctcctggagagcaagatagccttccactggctggctggtgtagcagtgttttagccactgaacttcagtggaggggtggtgagcagtgttcttatccaccctaatctcatactccctcgttgtccagctgaactagctgtcccctgggagtcaggaccctctgcctgctctctttcctctttagaaatggcagttactggcnnnnnnnnnnnnnnnnnnnnnnnnnnnnnnnnnnnnnnnnnnnnnnnnnnnnnnnnnnnnnnnnnnnnnnnnnnnnnnnnnnnnnnnnnnnnnnnnnnnnnnnnnnnnnnnnnnnnnnnnnnnnnnnnnnnnnnnnnnnnnnnnnnnnnnnnnnnnnnnnnnnnnnnnnnnnnnnnnnnnnnnnnnnnnnnnnnnnnnnnnnnnnnnnnnnnnnnnnnnnnnnnnnnnnnnnnnnnnnnnnnnnnnnnnnnnnnnnnnnnnagagagaaattcccatctcaaaaaaaaaaagaaaagaaagaaagaaatggcagctaccatctgtttcttatgtgtgagacatgggagt

SEQ ID NO: 15490 - DNA, 684 bp, Macaca Fascicularis
  misc_feature (1)...(684): n = A,T,C or G
gacagctgctttaatacccagctgcttagtatcttgggctttctgtattctgaagacagtgccccagcatttgccatcttcaagtttgttcagtctatttgcgnnnnnnnnnnnnnnntctacagcaactaccttcttcttcactggcaactcctggtcatggtgatatttgggttttttggaacaatttcattcttcactgtggaatgggaagctgccgcctttgtagcccgcggcnnnnnnnnnnnnnnnnnnnnnnnnnnnnnnnnnnnnnggacacgtgtgacctcagaaacacagctggacacagagcttggtggaagaagtcgcctttgatcttcactatatattgggtgatgttcagtatggaaaatcaagggattaagactgttcaatcagccagagttgctgttcaagtttacagatatgagttatttaaagcaagtggaataagggaaagctgttctgtcaactgtaattgttcaaagatgttgtttttcatttcatctatctcaattcttataatcatgttatagaatgtacatgttttcttttccctcctgctcgtgttggaagatcctgccttgatttagaatactaggccgtatgtcatataaatattttttctggctatggagtatgttttgctatgtaatcatgggaagcatatgtcactcctgnnat

SEQ ID NO: 15491 - DNA, 780 bp, Macaca Fascicularis
  misc_feature (1)...(780): n = A,T,C or G
atggggagcannnnnnntatgccagtgactgtgccagcttnnnncccnnnnnnnnnnggatggggctgctgacctccctgttcatgctcttcatcttcacctacggcctgcacatgatcctcagtctcaagaccatggatcgcttngatgatcacaagggccccaccatttctttgacccagatcgtctgaccctgtgccagtgggggattgagggtgggacagtgtccgtgttgttgctttcccacccnnnnnnnnnnnnnnnnnnnnnnnnnnnnntcctaccgcagcatgaaccccaagctcccctcagcccatcttgctccctcttcagcctgctgaggagctttcctgggctgcccccatctctcccaacaaggtgtacatattgtgcgtagatgctagaccaaccagctttccaggcttagtcgctgtgaggcgtaagggacatgaattctagggtcccctttctccttatttattcttgtgtctacatcatccctggctgtggatagtgtttttgtgtagcaaatgctccctccttaaggttatagggctccctgagtttggggtgtggaagttctacttaactgtcctgcttggctgtcgttatcgttttctggtgatgttgtgctaacaataagcagtacactggggtttatttctgtggcctgagaaggaaggcacctccacaggtgggctgggtgcgatcgtcggctgtctggcatgttcccaccggaagtgcctggcaggagcagggggtgctcggtttgtttcctcc

SEQ ID NO: 15492 - DNA, 751 bp, Macaca Fascicularis
  misc_feature (1)...(751): n = A,T,C or G
gagaacctacagagtannnctgctgaaaaagtcattccagccacagatctgtcagagcagatttccactgcaggcaccgaagcctcggggacaggcaatatgaagttcatgctaaatggggccctaaccatcgggaccatggatggggccaacgtggaaatggcagaggaagccggggaagagaacctgttcatctttggcatgagggtagatgatgtggctgctttggacaagaaagggtatgaggcaaaagaatattatgaggcacttccagannnnnnnnnnnnnnnngatcaaattgacaatggctttttttctcccaagcagcctgacctcttcaaagatatcatcaacatgctattttatcatgacaggtttaaagtnnnnnnnnnnnnnnnnnnnnnnnncaagtgtcaagataaagtgagtcagctgtacatgaatccaaaggcctggaacacgatggtactcaaaaatannnnnnnnnnnnnnnnnnnnnccagtgatcgaacaattannnnnnnnnnnnnnnnnnnnnnnnnnnnnnnnccttcagatctaaagatttcactatccaatgaatctaacaaagtcaatggaaattgaattctaaaatgtctctagaaaacatagcttcttactgaacttgaacatttttacaacattcactggtttttgttttgttagctaataatctataatagttgagtatctctgggaatggggagggaaattatattaatagagttaa

SEQ ID NO: 15493 - DNA, 856 bp, Macaca Fascicularis
  misc_feature (1)...(856): n = A,T,C or G
tgtcagctgnnnnncagaagccagnnnnnncatctgtcagcatatattttgtgaagagtgcattaccttatggtttaacagagagaaaacatgtccactctgcagaactgtgatttcagaccatataaacaaatggaaagatggagccacttcatcacaccttcaaatatattaagttgtataaactattaaggccacaaaatactaatgtcatttggtcataactcctgataaggcatcagaatgattttcagggctgcaagaaaaatgtttccagatggttttagaatgtaagacttatggtccaattcaccaaaagattaaatgaaagaaccctattttaaaatatatataatgttcaacctaatgtatgtgcaacatttattctattctaattatttgacaggtaactgcagtgttaaattgtaaatgtgttttcttaatgttacccaaaacagcaatttgaaattagaactagtggatttagagaactcaggtattctttcctgacattgttttcagaataaagaatatttttcataatattttaagatacatactatctaatagtagaattttgttcagcattgacttttataattcccatcctaaaaattaatattttcataaaatttgtatttttaaatgaaaattctaaatgttatattttatcagtaacagattttctaagtgaagattaatttactgaggatgatacattttagtattgtattattctctgtagtaagactagtaatcagtgaaaataaatggattcattttgtctgtggacgtcataaattcttcctgccatcagctttaatgttcatgatcatgctttttgtatagtaccatg

SEQ ID NO: 15494 - DNA, 754 bp, Macaca Fascicularis
  misc_feature (1)...(754): n = A,T,C or G
agccccgtgcaaagaggcgcgtggcggagctgagccgcgncnnncgaggcgggagcacgcggaggccttgctgctagcctcctgctacctgccccctggcttcctgtcggcgcccgggcagcgcgtgggcatgctggctgaggcggcgcgcacgctcgagaagcttggcgatcgccggctgctgcacgactgtcagcagatgctcatgcgcctgggcggtgggaccactgtcacttccagctagaacccgtatccccggcctcagcacccctgtctctagccacttctgtcccgtgcagcttctgtcctgtgtcgaagccctgaaggccgaaggcagtgcgagagaccctggcctccacggttcacccgcggctgcgctgtcccttcggggtggaaggccagaggggcgcaaacccgaccctaataccggcggcnnnnnnnnnnnnnnnntctggtggccgatcggggcactgcaggagccgagctgttcggggcgggggggccctccttgctctgcaggcaccttagtggcttttttcctcctgtttagagggaagagatgggtacatttccctgcgctgacggaagccaacttggctttcccggactgcaagcggggctctagccccagaggcctctctctccctcgtgggaagacgtgtacatagtgtaggtcagcgtgctcagcctcctgacctgaggctcccgtgctactttgccttttgcaaactttattttcatagattgagaagtt

SEQ ID NO: 15495 - DNA, 725 bp, Macaca Fascicularis
  misc_feature (1)...(725): n = A,T,C or G
cattcccatnnncagttgttcttttgtctaaccggaggccactgtgccgnnnnnnnnnnnnnnnnnnncactgctgccatcttcgctnnnnnnnnnnnnnnnnnnctctttcccctctcccagttccccaccacgttggatcccatttgtcacccatgctagggtccccaaagcactggggcaggggccagagcagcagcacccagtgctcccctctcccaccccgacctggagtcagaagcagatgctccacgcacacacaccccagccctgtcccaggggcccggcctcctcagccatctcagggtgaggagctgtcagtcatgtccagacggannnnnnnnnnnnnnncgcatcctctcctcacctccccttnnnnnnnnnnnnnnnnnnnnnnntcatcaaagggccattgccaacttccgtatgtggttctgggtcccagggagccttggaacctggccccctggggtggtttaattcnnnnnnnnnattcctgcttctctggggacacggtgggccagcatggtccctggnnnnnnnnnnnnnnnnnnncatctcttccacctcagacggtgtggctctggatatcaggagggactgacctcaggnnnnnnnnnnnnnnnaagaggccaggcccgatgctgccacctcgccttgcccctgaagtgagagcaggccagccgggcaggaagcacgctgtttacttttgcatgaaaagaaat

SEQ ID NO: 15496 - DNA, 209 bp, Macaca Fascicularis
tgaggtggaggttgcagtgatcctatgattgcggcagtgcactccagtgttggtgatagagcaagagtgtttcaaaaaaaagaagggaacattttaaatgattttcacctttattatgcatctattttcatggggtttcgtgatatctccctgtccagccccttcatttggggaatgtcttggattagcgaacagagttggttgaagat

SEQ ID NO: 15497 - DNA, 703 bp, Macaca Fascicularis
  misc_feature (1)...(703): n = A,T,C or G
gcctgctggctggtggtgagcccacagtgcagctgcagggctctggcaggggtggccggaaccaggaactggccctgcgtgttggagcagagttgagaaggtggccgctggggcaaatagatgtgctgtttttgagcggtggcactgatgggcaggatgggcccacagaggctgctggggcctgggtcacacctgagcttgccagccaggctgcagctgagggcctggacatggccaccttcctagcccacaatgactcacatacctttttctgccgcctccagggtggggcacacctgctgcacacagggatgacaggtaccaatgtcatggacacccacctcttgttcctgcggcctcggtgatggcataggtcacattttgagagttcagaggaggcctacaagggcaaggtcagatggcagagcaaggtnnnnnnnnnnnnnnnnnctaagccttagggcccctcctctccttggccttggctgtttggttagctgtcacctcccactcagggcctctgctctatgtctattcnnnnnnnnnnnnnnnnnnnnatggggcctcccccctacccctactttctgcatggcagcaggtacccctgaggacaaggacaagccccttggccagttcagtgttcccatgcttctcccttgggcagcctctctcttgagcccctcaccctgtttctttctgtgaa

SEQ ID NO: 15498 - DNA, 719 bp, Macaca Fascicularis
  misc_feature (1)...(719): n = A,T,C or G
ctataaagctgntgagaacagatggggcacggatgaagacaaattcactgagatcctgtgtnnnnggagctttnntcaactaaaactaacatttgatgaatacagaaatatcagccaaaaggacattgnnnnnnnnnnnnnnnnnnnnnnnnnnnnnnnnnnnnnnnnnnnnnnnnnnnnnnnagtgcattgtgtgagnnnnnnnnnnnnnnnnnnnnnnnnnnnnnnnnnnnnagctttgaagggtgctggaactgatgagtttactctgaaccgaataatggnnnnnnnnnnnnnnnnnnnnnnnnnnnnnnttcgaatagagttcaagaagcattatggctattccctgtattcagcaattaaatcggatacttctggagactatgaaatcacactcttaaaaannnnnnnnnnnnnnnnnnnnnccaagaagataatctccaaagnnnnnnnnnnnnnnnnnnnnnnnnntccaccttacttctttctcatactatttaagagaacaagcaaatgtaaacagtaacctgtgttcctaacaggaattctcattgttctataacaacaacaaaaacgattattattttagagcatctcatttataatgtagcgggtcataaatgaaatttaaaatggtattaaggatctgcaaatactatccaacttatatttctgcttacaaagtaagaatctttttatagttctaatccattaaa

SEQ ID NO: 15499 - DNA, 362 bp, Macaca Fascicularis
  misc_feature (1)...(362): n = A,T,C or G
gacaaaatggagcttttggatatagtccctgctagcaaacactagacataatagtaccaccnnnnnnnnnnnnnnnnnnnnnnnnnnntggcccctaggatgttactttcttattctgctgtcttggatcttattactatttatttataacttgacatttcctaaaattattctgtggatttgattttttttactgcttaaaaatgttaaaatagttcaaatgtagacagaaagattagttagaaaattatcaaaacaacatagctcaagtttgtctaagaacaggtacttctggccacttaccttgacccttattttacttcagttgctcttnnncagggatngnnngggatagtgtatgt

SEQ ID NO: 15500 - DNA, 758 bp, Macaca Fascicularis
  misc_feature (1)...(758): n = A,T,C or G
gagggttatgactccatcgacagccccaaggccatcacannnnngaagtannnnnnnctgtgcaaaatcatgctcaacaccccagaagatgtccaggctttggtgagcgggaagcttgcacttcggtatgcagggaggcagacagaagcatnnnnnnnnnnnnnncaggctagcaagaacagnnnnnnnnnnnnnnnngaaaaggctttgacagattaccgggcagagctccgggatgacccaatcatcagcacacacttggccaagttgtatgataacnnnnnnnnnnnnnnnttgatccgagtcannnnnnnnnnnnnnnnnnnnnngattgaacacatatctagtctcatcaaactctccaaggccgatgtggaaaggaaattatcacagatgattcttgacaagaaatttcatgggattttggaccagggggagggtgtccnnnnnnnnnnnnnnnnnnncccagtagataaaacttatgaagctgctctggaaacaattcagaacatgagtaaagtagtggattccctttacaacaaagccaagaaactgacatagagttggatctgtagcggtcctttggagagtgtgtgtggcgggagagtgaaaccttgggggaaaatgctaggagattcttttttctttttgttctacttttcgctcggaaagtttttaaatcttcatttggtgcatctgtattccagccaataggtgtgccagttttcatgtaatctnnnnnnnnnnnnnnnnnnagt

SEQ ID NO: 15501 - DNA, 696 bp, Macaca Fascicularis
  misc_feature (1)...(696): n = A,T,C or G
cagcgtccagtagccagcaccaggcggtgttccttcatctctggtggacgatctaccagaannnnnnnnnnnnnnnnnnnnnnnnnnnnnnnnnnnnnnnnnnnnnnnnnnnnnctggtcacacactttgcctcagtgatgtgggggnnnnnnnnnnnnnnnnnnnnnnnngtgttggagagccgtgtgcagattcaacacccagtgccggcgtgctgtgtgcaaattcgccactgggttctaaccagcctgctcagggccttccggagccgacccagatggtggatgagaccctgtcccnannngaaggacgccgttcagaagatatgatagattgtcctgaaattgagactcctgccgtgataacctgtgacccactgtcccagccttcccctcagcttgcagacttcacagagacggaaaccaccttggtattcctcatctatatgacctacacatggccagctctcttattgcttgttgttttctcacagtgtctatcaccattacataccagtgggggccatatgcttttaaaaattcctcccattttcttttttgaatgggttctcccacctggaataagttgtgttgtaattagtctatttctctattatgcagctggataaggaatctggctgtcttttcgaacttactgcgggcgtttctttttggtcattttgttattctcttcca

SEQ ID NO: 15502 - DNA, 741 bp, Macaca Fascicularis
  misc_feature (1)...(741): n = A,T,C or G
aatggtgtcnnnnnacatgatcggaagctcttcactgactttgttaatgatgttaaagattatcttagaaacatgaaggaatatcaagtagataatgatggagtatttgagaagttggatgaatatatatatagacacttctttggtcacactttttcccctccatatggacccagtcgacctgataaaaagcaacgtatggtaaatattgaaaactccaggcatcgaaaacaagaacagaagcaccttcagccacagccttataaaagggaagagcctgctgacttgtgaagaatttgctgccctcttaagagcttgctgacttgttttcttgtgnnnnnnnnnnnnnnnnnnnnnnnnnncgaagaaacaataaaacgacaccatgaggaaaactaaaggtctttatttaaaatctggcattgtattaacatgtgattttatactatgtggtattttatacatttcctcagtagtgatatttggtaaagcagttcatatagtttttttctannnnnnnnnnnnnttacccagtgtttactgaagtatttaagnnnnnnnnnnnnnnntccacccagcaatgttagtttatctcagaaagttcagaattcatctttgtgttgaatttcccttttaacttcnnnnnnnnnnnnnnnnnnnnnnnnnnnnnnnnnccctccggcaagtgagtgtggaagaaaacagcagttttgttataattgcttgaaattaggaaagcac

SEQ ID NO: 15503 - DNA, 739 bp, Macaca Fascicularis
  misc_feature (1)...(739): n = A,T,C or G
agctggagtatctggacctgtacctgatgcactggccttatgcctttgagcggggagacaaccccttcccgaagaatgctgatgggaccatatgctacgactccacccactataaggagacttggaaggctctggaggnnnnnnnnnnnnaggggctggtgcgggcactggnnnnnnnnnnnnnnnnnnnnnnnnngatcgatgacatacttagtgtggcctccgtgcgtccnnnnnnnnnnnnnnnnnnnnnnnnnnnnnnnnnnnnnnngaacgagataatnnnnnnnnnnnnnnnnnnnnnnnnnnnnnnnnnnnnnnnnnnnnnnnnnggctnnnnnnnnnnnnnnnnnnnngatcctgatgagcctgtcctgctggaggaaccagtagtcctggcattgnnnnnnnnnnnnnnncgatctccagctcagatcttgctcaggtggcaggtccagcggaaagtgatctgcatccccaaaagtatcactccttctcgaatccttcagaacatcaaggtgtttgannnnnnnnnnnnnnnnnnnnnnnnnnnnnnnnnnnntgccctgaacaaaaattggcgatatattgtgcctatgcttatggtggatgggaagagagtcccaagggatgcagggcatcctctgtacccctttaatgacccgtactgagaccacagcttcttggcctcccttccagctctccagctaatgaagtcctgccacagtgaaagagggag

SEQ ID NO: 15504 - DNA, 700 bp, Macaca Fascicularis
gaggaaggaaggacccgcttcctgttgttggtgctaactcctttgtaattccagccccccgttgcctgtccagggcctgtccaccccttggaggccggtggagaagccccacctagcttacaccccggggagcgtttagtgggctgggtggacaagggtcgccagtggccccttgcctcctcccccagggcctacgccggggacacgtttccactgccaccctcgttcctgtctgccacctgaagggaatttgaggaccgccgccagggcaccccctacatacacacagctgcttttgtgggggtggacgcaaggctgtggccagcagacacggaggtgcaggtcagggtggggatgtgggtgggtccaaggggtgtatggggtcggggtgggctctaggagttagccctcatccccactgaccaggcgggagccgccaggcctgcaggctgggccagcgcccaggagccatcctggtgcagggccaggagcttgtccaaggccacaggcccacagcaccccctgccggcaggctgcgcggggccctggagctgatgccggggggaggcctgtccgctggcccaccaacccacccaccttgactgcccccagaagtgtgtcttgagacctcctgggcgtgcttagaggggtgagttgatgtttggatttttagttattttctcttcagttttatcagact

SEQ ID NO: 15505 - DNA, 698 bp, Macaca Fascicularis
  misc_feature (1)...(698): n = A,T,C or G
gcnnggantcttttgtgnnnnggagtgtnnnnnnnnnncaatagatataaaaaatccatccccaaattgtaacctggatgtaatagtccagcatccagaaatcctatggaatgtattagcacaacatcttaccattgtcccatctaggaaatattttcttgttatgaagtagggaagtgaggaggaaagccatgcagaagcaaatgttagaatcttaggcatcctatttgttcatgctgtgggtatttgctttggacttggagtctgtactttgaaagaggcctttgaaaaacaaataattcagtgtgaattttctagtagcgtgcttcatgaaaatattacttatccaggtttgcaaatgtacatgttcatttgaatgtaaatcaccgtttcttggaaccccacgttttttcttaaaaattattctgaatctaagtatgtattactttagccttccctacacagtacttataaaagacttttctttctgttcgtgnnnnnnnnnnnnnnnntgatatagagtcatgtgtgtatgtgtagctnnnnnnnnnnnntcagaaatgcattagatgaatgacattttataaagcggtcacaattgatatatacaggctattatgtctcatgtcatgatctgggaagttttatgtatttttnnnnnnnnnnnnnnnnttatatttttccaattttggagaaga

SEQ ID NO: 15506 - DNA, 704 bp, Macaca Fascicularis
  misc_feature (1)...(704): n = A,T,C or G
gaagaccaccttcctcaggactcccaggacctnntcctcgnnnnnnatgtgcccatcagnnnnnnnnnnnnnnnnnnnnnnnnnnnnnnnnnnnnnnnnnggaggaggattggagccccgagatggggnnttcaggcactggaggctcctcnttagnntggggagcatcagcctcccagagtctaccccaatcccatcttcctccccgccccccctttcctccccgctgcctgaggctccccagcctaaggaggagccgccagtgcctgaagcccccagctcggggcccccctcctcctccctggagctgctggcctccttgaccccagaggccttctccctggatagctccctgcggggcaagcagcggatgagcaagcagaactttctgcaggcccataacgggcaagggctacgggccacccagccctctgacgaccccctcagccttctggatccactgtggacactcaacaagacctgaacaggtttcgcctacctggtccttacactacatcatctctcatgcccacctgcccacacccagcagagcttctcagtgggcacagtctcttactcccatttctgctgcctttggcctgcctggcccagtccgcacccctgtggggtggagatgtactgcaggctctgggtcaggttctgctcctttatgagacctgacattnncagctctttgctatgaa

SEQ ID NO: 15507 - DNA, 734 bp, Macaca Fascicularis
accaagaacctcaaaaactgggcagagaaggccaagaaaatctctgctgcagataagctgatctatgtgttcgaggctgaagtactcacaggctccttttgccagggacatccgttaaatattgttcccccaccactgagtcctggagctgtatatggtcatgacagtgtggttgacaatgtctccagccctgaaacctttgttatttttagtggtatgcaggctatacctcagtatttgtggatatgcacccaggattatgtacagtcacaagatgactcattaggaccaatgagaccctttgcacagcatccctggaggggattaacaagtggcagccccgttgattaatctctatatcgttttaacagctggtatgcccttaccttgggtgaactaaccaaataatgaccatcgatggctcagagagtggcttgaatatatcccatggattatctgtatggactgactgggttattgaaaggcctagccacatactagcatcttagtgcctttatctgtctttatgtcttggggttggggtaggtagataccaaatgaaaaactttcaggaccttccttcctcttgcagtttttctttattctcctttactagaggagataaatattttgcatacaatgaagaaacttttctagtatataacccaggccttttattttctaaaatgatgacagtataaaaatattaggaaaacagcatgattttagatttt

SEQ ID NO: 15508 - DNA, 715 bp, Macaca Fascicularis
  misc_feature (1)...(715): n = A,T,C or G
agccatgcccggtagcccagcctggcgcnnnnnntaggggaggggtgagacgctcgctgccgtgcccgnnnnnnnnnnnnnnnngggctgcctggcgcccgctggagacagacggacagatgcctgtccccggcactgaggcctgtgctgtccccacccgccccaacatggtgctcatccttgccgagacccccgtggtccgtgcccgcgcccagcccagctgccccggctgcacgcctgctgctccaagctcgcccggctgccacaagccctctgcgggtccgtcctcctccccactggagtccgtcctcgcaggccctgcccggcctctctgcagaccctcaagcgccgtctgcatgagtgagcaggcgtgggtggactctggccgcagacacacttggtgctcaccggccgcttcgtccttcaggtgaccttcctccccacggcatcctgttctcgggcggaggagcagctttgtctcccnnnnnnnnnnnnnnntccctcttgagcagatcggagcccctgggaggtttggaagccacctccaagcctaggacacggcctggtggccggnnnnnnnnnnnnnnnnnnnnnnnnnntgagacaggcctgtggggcagggtttcggggtgtgaacgaggctggcagtgagtggacaagctgttcccctggctcaggccccgccctgccctcagccggaggcacctggctgtgc

SEQ ID NO: 15509 - DNA, 755 bp, Macaca Fascicularis
  misc_feature (1)...(755): n = A,T,C or G
aacggctacctcgccagcctctgcatgtgcttcgggcccaagaaagtgaagccggctgaggcggagaccgcaggagccatcatggccttcttcctgtgtctgggtctggcactgggggctgttttctccttcnnnnnnnnnnnnnnnntgtgacaaaggatggatggacagaaggactgcctgcctccctccctgtctgccttctgcccttccttctgccaggnnnnnnnnnnnnnnnnnnnnaggtttttcttctaactgacttctgctttccacggcgtgtgctgggcccagatctccaggccctggagagggagcctttggacagacagtggggacattgtgggcttggggctcagagtggagggacggggtgtagcctcggcatctgcttgagtttctccactcttggctctgactgatccctgctcgtgcaggccagcggaggctcttgggcttggagaacatgtgtgtctctgtgtgtgtgtctgtgtgtctgtgtcagtgtctgccagactgtccgcctgtcccggggtggctaggagctgggtctgaccgttgtatggtttgacctgatataccccctccctccgttctcccctgcgccgcctcctctgtgttctctccatgtccccctcccagctccccatgcccagttcctacccatcatgtaccctgtacagttgccacgttactgccttttttaaaaatatattgacagaaaccaggtgccttcagaggctctctgatcaaaa

SEQ ID NO: 15510 - DNA, 714 bp, Macaca Fascicularis
  misc_feature (1)...(714): n = A,T,C or G
tgtgatgttgctgaccagggnntggaatgacccagatatggtaaaaacttgagctctccttgttcaagaccctgcagtaggcttgcttcctattttgacattcaaggtaaatagaagtaaagttcctgggaggaggctttatgtgagagtacttagagcaggatgctgtggaaagtggtttctccatatgggtcatctaggtaactttaagaatgcttcctcttctgttgtttgaattatttcattctttgtctcagttagnnnnnnnnnnnnnnnnnnnnnnnnnnnnnnnnnnnnnnnnnnnnnnnnnnntctgggctatcatggctgctcctttattcatgtctaatgacctccgacacatcagccctcaagccaaagctctccttcaggataaggatgtaannnnnnnnaatcaggaccccttgggcaagcaggggtaccagcttagacagggagacaactttgaagtatgggaacgacctctctcagacttagcctgggctgtagctatgataaaccggcaggagatcggtggacctcgctcttataccatcgcggttgcttccctgggtaaaggagtggcctgtaatcnnnnnnnnnnnnnnnnnnnnntcctccctgtgaaaaggaagctagggttctatgaatggacttcaaggttaagaagtcacatnnnnnnnnnnnnnnnnnnnnnnnnnnnnnnnnnnnnna

SEQ ID NO: 15511 - DNA, 773 bp, Macaca Fascicularis
  misc_feature (1)...(773): n = A,T,C or G
tcaacaacaacctcaccgtggtggggaacgccaagcacaacgtgnatnnnnnnnnnnnnnnnacgggcaagaaagtgaaggggggctccagcaagctgacgggccgtgtccttgctctgtcctttgatgcccctggccggctgctctgggcgggtgatgaccggggcagtgtcttctctttcctctnnnnnnnngccacggggaagctgactaaagcnnnnnnnnnnnnnnngcatgaggggagccctgtgaccagcatctcagcccggtcctgggtcagccgcgaggcccgggatccctcactgctcatcaatgcttgccnnnnnnnnnnnnnnnnnnnnnnnntggtagacaacgaggggaccctgcagctgaagagaagcttccccatcgagcagagctcacatcctgtgcgcagcatcttctgtcccctcatgtcgttccgccagggggcctnnnnnnnnnnnnnnnnnnnggacatgtgcgtgcacttctttgatgtggagcgggnnnnnnnnnnnnnnnnnnnnnagctgcagggccacagtgcacctgtgcttgannnnnnnnnnnnnnnnnnnnnnnnncnnnnnnnnnnnnnnnnnnnnnnnnncatggtcattgtctggaggnnnnnnnnnnnnnnnnnnnnnnnnnnncctgctgctgtcctccatcccacccctcttactccagcctcgtgtgtaaataaagtttcggtggtcgtgctgagggccagctcccaactctgccagggacgggcagggcagcgg

SEQ ID NO: 15512 - DNA, 368 bp, Macaca Fascicularis
  misc_feature (1)...(368): n = A,T,C or G
aaaaaaaaaaaaaaaaaaaaaaaaaannaaaaaaaaaaaaaaaaaataaaaaaaaaaaaaaaaaaaaaaaaaaaaaaaaaaaaaaaaaaaaaaaaaaaaaaaaaaaaaaaaaaaaaaaaaaaaaaaaaaaaaaaaaaaaaaaaaaaaaaaaaaaaaaaaaaaaaaaaaaaaaaaaaaaaaaaaaaacaacatcaatcccaccccccgggaaggacacccgcacatcagcagaggggccctgcccctccgcctgcagccatgaaaggaagccgggtcatcagcccagccccgcccgccccaacccctatgtctgtttccctcagtaaggagatggcttattcttttcaccatgcgaataacatgcccag

SEQ ID NO: 15513 - DNA, 771 bp, Macaca Fascicularis
  misc_feature (1)...(771): n = A,T,C or G
ttgtaaagagaaactatgtaaagnnncctcctgaccatatatttttaaatactggtanngcttttaannnnnnncataagtacagactgtgnncnnttctgtttagtagctgaaaacccagtagatgctacccttcagagccttctcccgtgtgctgcacagcacccacgtgggttaaaatctgaaagcaagtacccctttgacttgtcnnnnnnnnaagcttctgcagcttctactgccctggcagctcacctgggcccaactcagaaacacgaaccagcagatcactctcatgctgatccagccaggctccctgcttaagtcannnnnnnnnnnnnnnnnnnnnnnnntcctccttttcnnnnnnnnnnnnnnncttcgtagtaagtaatggcccctgtgcctttttagtccagcagagtcaaaacttttgggagacctgaaaatggggaattcacactgggtttctggactgtagtattggaagccttagttacaccatattaagcctataattatactccgatttgatgggatttttgacatttgacacttgttaaaatgcagggttttttgtgttttttttttttttggtgcagnnnnnnnnnnnnnnnnnnnnnnnnnnnnnnnnnnnnnnnnnnnnnnnnnnnnnnnnnnnnnnnnnnnnnnnnnnnnnnnnnnnnnnnnnnnnnntatatatttggaattgttaaaactggttttnnngaaacatttcannnnnnnnnnnnnnnnnnnncaaataggaagact

SEQ ID NO: 15514 - DNA, 757 bp, Macaca Fascicularis
  misc_feature (1)...(757): n = A,T,C or G
atacaagcttagaagactatactttatttgggtatgcagagatatccagtccttccgttggtttgcagacttactctgtatgttgcataacaagttttggcaagagaacagacctgactatgttaacatccagctgtacctcagtcaaacagatgggatacagaagataattggagaaaaatatcatgcactgaattcaagactgtttattggacgtcctcggtggaaacttttgtttgatgaaatagcaaagtataacagagggaaaacagttggtgttttctgttgtggacccaattctctatccaagactctttataaacnaannnaccagaacaactcgtatgggacaagatttgaatacaataaagagtctttcagttgaaaactttngaccataaagcaggacttaaagaaggaatgagtgcaatttctaagactttgaaannnagcggaatcaaacagctgtgttatgccaaagaatagtaaggttttcttatttatgattatttaaaatggaaatgtgagaatgtggcaagatgacaggtcacattacatgtttaatctggaaacaaaagagaccctgaagaatatttgatgtgatgattcacttttcagttctcaaattaaaagaaaactattagatgcacactgttgatttttatggtggattcaaaaacnccctagtgaggagnnnnnnnnnnnnaatctaaggctgatcgtcgtgttcctctttaaattgtttttggttgaacaa

SEQ ID NO: 15515 - DNA, 841 bp, Macaca Fascicularis
  misc_feature (1)...(841): n = A,T,C or G
ggtagactgnncngngcctcaaggcaatgagggctgcaatgggggcctaatggattatgccttccagtatgttgccgacaatggaggcctggactctgaggaatcctatccatatgaggcaacagaagaatcctgtaagtacaatcnnnnnnnnnnnnnnnnnnnnnnnnnnnnnnntgtggacatccctaagcaggagaaggccctgatgaaggcagttgcaactgtggggcccatttctgttgctattgatgcaggtcatgagtccttcatgttctataaagaaggcatttattttgagccagactgtagcagtgaagacatggatcatggtgtgctggtggttggctatgnnnnnnnnnnnnngattctttcnnnnagtaaatattggctggtgaagaacagctggggtgaagaatggggcatgggtggctacataaagatggccaaggaccggagaaaccattgtggaattgcctcagcagccagctaccccactgtgtgagctggtggacagtgatgaggaaggacttgactggggatggcgcatgcatgggaggaattcatcttcagtctaccagcccctgctgtgtcggatacacactcgaatcattgaagatccaagtgtgatttgaattctgtgatattttcacactggtaaatgttacctctattttaattactgctataaataggtttatattattgattcacttactgactttgcatttttgtttttaaaaggatgtataaatttttacctgtttaaataaaattttaatttcaaatgtagtggtggggcttctatttttgatgcactgaatttttgtntaataaagaa

SEQ ID NO: 15516 - DNA, 733 bp, Macaca Fascicularis
atcagcaaaggctgcagctcaaactgcgtggatgactcacaggactactacgtgggcaagaagaacatcacctgctgtgacaccgacttgtgcaacgccagcggggcccatgcactgcagccggctgctgccatcctggcactgctccctgcactcagcctgctgctttggagccccagacagctgtaggcttccgggggccctgctgcagcccacactgggtgtggtgccccaggtccccgtgccactcctcacacacccggcccagtgggagcctgtcctggttcctgaggcatgtcctaacacaggtctgaccatgtccctctgcgcctctgccctccaccctgaccctcccatggccctctccaggactcccacccggcagatcggctctagtgacacagatcggcctgcagacggcccctccaaccctctctgctgctgtttccatggcccagcattctccacccttaaccctgtgctcaggcacctcttcctccaggaagccttccctgcctaccccatctatgacctgagccaggtccatggtgtcccccacacccagcaggggacaggcactcaggagggcccagcaaaggctgagatgaagtggactgagtagaactggaggaccggggtagcatgagttcctgggaggctccagagatggggcctggaggcctgaagggaggggccagacctcacattcatggggctccctgaacagcagcct

SEQ ID NO: 15517 - DNA, 691 bp, Macaca Fascicularis
  misc_feature (1)...(691): n = A,T,C or G
tcagcagagagannnngagctgtgtaagaanntgcccccaaacactctggagtccctgggacaccccctatccaagaagacccaggggtgnnnnnnnnnnnnnnnctcccggcctcaccagcctccaaactcaaccacaaccagctgcctctacagttggacaagacttggcttgcagctgggcccggggagcagtgagtgaaaatcccccaagagggtctagctcctactgcattcagtcggccccgggaggccagcctgccctgagnnnnnnnnnnnnntggcccgaagtagtggctgagctgtgatcgctgtgatgtggacccagctccagggggcagagtgtcggggagggaggggcccaggctggactgactgctccttcctgtgtctgtttccatatcacccagagagagacaagatgggacatggcctggcccagggaggcaggcctcccactcagagtctgggtctcactggccccaggtctgtcacccagaactctggccaaaaatggctctctaggtgggctgtgcaggcaaagcaaacctcaggctggttcgcagctgtcctgagcaaagggcctgccaccagacccacccacgctctgacgagaggcgtttccacctccagcaagtgttcccagcaaccagctccatcctggctgcttgccttccatttctgtgtagat

SEQ ID NO: 15518 - DNA, 726 bp, Macaca Fascicularis
  misc_feature (1)...(726): n = A,T,C or G
gcnnnntctgctggggtaatactcnnnnnnnnnnnnnnnnngatgattccttcaagagactgctatatattcacaatgtaaattgcagccacctttagtgatacttttgggggaaaaaaaaagggatatggctgttgtagaaagatagcgtatttgcatttacagtaacnnnnnnnnnnnnnnnnnnnnnnnnnntacacaaaaggctccttgctgcccggagcagnnnnnnnnnnnnnnncaaagggaaccacttttgttttgcatgaatttggtaattgattactctctccccaaannnnnnnnnnnnnnnnnnnnctcaacgacctcttccatccatcaagctcggtatgaatacttcacttaccagtgccattacaggacccaaattcacagttcataaagatgtgaccactacatgtaaaaatagcattccacttgatcttacagtaggtatgtatgtannnnnnnnnnnnnntgtgtgtggatctctacatggttaatgtaaagcactgtgctctgaagtggatcagtctcaagtgtctggtaacagaagcagtgcttagaaaattcttttgttgaaaacagttactgttattttattatnnnnnnnnnnnnnnnnaaagaatgaattttaaaattcataacttggtcatgttcacaacaaaactgtcaaataagcatatttccatttttattactgaaagaaacatgggnnnnnnnatc

SEQ ID NO: 15519 - DNA, 504 bp, Macaca Fascicularis
tgatggtgttcaacgtcaagtagcgccggcgccgggcctggcaccgcccctcccgcgcgagcccgcacccagggtgcgcgcccccggggcctgcgggggccctcgcgcgtagcccccaggcccaggctggagaggggcccaggggccttggagccgttccgtggtaggtgctgggttgtgtcttgcaagggaccctgtgtctgcctccaagccggggaggagggggggtccagcccccaaggggaggtgccggggaggagggctggggggaagcagtgcctgtgtagacgtggctgtacatagaaagctctattgtgggaaagcaggaggggtgacccagcctcagctgctagtgtgagggctgggaagggagggggcgttctctctggacccctgggaggggagggggtgctgcttgctgactagcccatctctgggctacgatgtcacagggctggtggctgggacagctctggggactagggggtaatgtgatacagccga

SEQ ID NO: 15520 - DNA, 700 bp, Macaca Fascicularis
  misc_feature (1)...(700): n = A,T,C or G
ggcaaggtagtggaagnnnnnnnnnnnnnnntgaaggccaagtnntgtgaggcccccggcagctgcgtggctgtgcactgcgtggcgggcctgggccgggctccagtccttgtggcgctggccctcatcgagagtgggatgaagtacgaggacgccatcnnnnnnnnnnnnnnnnnnnnnnnnnnnnnnnnnnnnnnnnnnnnnctcacctatctggagaaataccggcccaaacagaggctgcggttcaaagacccacacacgcacnnnnnnnnnnnnnnnnnnnnnnnnnnnnnnnnnttgaccgggcctggtggccctgcccagccctgctctgcccagcccagcaggggctccaggccttggctggccccacatcgccttttcctccccgacgcctccgcgcacttgtgtccgaggaggcccctggcccgtgtggcctccgggccttctcctgtctctgccgctccctctggcagcgctggccgtggctctgtctttccgaggtgggtcgggcgccctcttccctggacccccgcccgccccctcccacaccagcccaggccggtctcctctggcctgtttgttgcagggcgggggtacattttgtaaccactgggcccccccagcccatcttctgcgaccccttgccctgacctgttctcggcaccttaaattattagacccnnngggcagtcag

SEQ ID NO: 15521 - DNA, 733 bp, Macaca Fascicularis
  misc_feature (1)...(733): n = A,T,C or G
gagcagaccaaggtgaatttccagaagcccggatctttnnnnnnnnnnnnnnnnnnnnnnnnnacgagactccccggggcccagacccagccnncctggaggccacagggggagcagctggagctggtggggctggccgcggggaggatgaagagaaccgagagcaccgtgtccggaggatacaagtccggcggcacatcactcacgatgagcgtcctcatgnnnnnnnnnnnnnnnnnnnnggaatgacctctgaccctccccctgccttcctcttgccttggggcccagtccccctctctttccctccccttcccagacctttgccccggctctgctggccaagtcgtgggtcctcctctgtcccttcattgcatggcacagctcactttggcccttctccatccatcccgaccccattgctaacaacatggtacattccggccccgccactcagagtcttctgaagccaacacttgtccctatcctggccctgcgtccttccctctccagctggttaagagggatttagaattccctttctcttttttcagtgcatcgtccatgccaaagtgtgcggcccttcctaacaccaccgcagtctgagccgcctcccacatcgtgcagggtagtccgcaccctcctccccaccatcctccctacctccttaactttgtactagactggcctgggcctgcccagctcagcgttctcagtctgtttcatattattt

SEQ ID NO: 15522 - DNA, 717 bp, Macaca Fascicularis
  misc_feature (1)...(717): n = A,T,C or G
gnnnnnnnnnnnnngatgnnnnnnnnnnnnnnnnnnaggagacgaccgtggatactgggccgggccctctttccctgcgaggcacacannnnnnnnnnnnnngcaggcaccgccacgccccagcatccctggagcaggagccccgccacannnnnnnnnnnnnnnnnnnnnnnnnnnnnnnnnnnnnccccttcgtcttctcccacatgaggccatctcagtagatggggnnnnnnnnnnnnnnnnnnnntgaacagggtacctcaagctccattttctcacactaagagggcagaccgtgaacttgactgggcgannnnnnnnnnnnnnnnnnnccctctagtgccttctttagacactcgggccccgtcctcatccctgactggccaaacccttgctttcctgggcctttgcaagatgcttggttgtgttgaggtttttaaatatatattttgtactttgtggagagaatgtgtgtgtgtggcaggggctcccgtcagggctcgggacagagggtggcctgtgtcaaacattcctgagctggggacccgggggccgnnnnnnnnnnnnnnnnnnnnnnnnnccccagttggccccatctctcatccctgtagatagcaggttctattctgtnnnnnnnnnnnnnnntgttttgttgaaaatttttttcgaatcttaatttattattttttttatattttatgaatcatctgcaac

SEQ ID NO: 15523 - DNA, 1186 bp, Macaca Fascicularis
  misc_feature (1)...(1186): n = A,T,C or G
tgagtacacaggggccaacaagtatgatgaggcagccagctacatccagagtaagtttgaggacctgaataagcgcaaagacaccaaggagatctacacgcacttcacgtgcgccaccgacaccaagaacgtgcagttcgtgtttgacgccgtcaccgatgtcannnnnnnnnnnnnnnnnaaggactgcggcctcttctgaggggcagcggggcctggcgggatgggccaccgccaactcnnnnnnnnnnnnnnnnnnnnnnnnnnnngggcaagaagaccacgctccccgcctgttccccggccgcttttctcctctttcctctctttgttctcagctccccctgtccctcagctccagatgtaggggaggggttgccacgggccnnnnnnnnnnnngcctgcccttgtctgaggtgctggtaatggccatggtaccccnnnnnngggcatctgnnctggtttttaaccattgtcttgttctgtgatggggggaggggggcacatgctgagtctcccaaggctatgtccggaggggcgcctgcttctccagcctggacccccagctttgcccaacaccagcccctgccccagcccaagtccaaatgtttacagggagcctcctgcccagtcccctaccccccagccgctcggaggccccaaaggaaaaagcacaagaagcgtgagacaccaccattcctggagaccacagtccacctactcattctcgtagctttttaaaaaaaatatgaaagtaaaggaaaaaaaaaaaaaactgcaaatctagaaaactttttagagaaaaactatttaaaactgtcagatcctgacgnncnnacccctccagccccatttcaagtgactccgtgccttgagtgtgtctgcgtgtttacacccatccctctgctggccgcccctgtgcgagccgcaaccctgccctgccctccacagaattgggttccaaggnnngttccagacaactgccaacgtcaangagggccctgccccagcggccctgggcccaggctccattaacctaaaatgtagctccctagcgctaacctaggaaccgccgctgcctgctggggggccacacccctcattcccttgtcccaggcccggggccttnnnngttgaacacttccttgcttttttcacatgttttatggaattgttcacctggttg

SEQ ID NO: 15524 - DNA, 828 bp, Macaca Fascicularis
  misc_feature (1)...(828): n = A,T,C or G
aagcgggaggtgnnnaggccctggngaagtcatggtcagccggccccgagagtgagctttccttcctagaagtctcccgagagacatacttgtgtggcctagaagtcccctgtggtctccccttctcatctgaagactgcctctggcctgcagcggacctggcaaccactcaggcacatgaaagtggagtgtgaccttgatcccactctgactgcatccnnnnnnnnnnnnnnnttgtttgttctgcttttcttcatataactgagctggccttatccttggcatccccctaaacaaacaagaggtgaccaccttattgtgaggttccatccagccaagtttatgtggcctattgtctcaagactgtcatcactcagaagcctgcctctggtttaccctacagcttcaggcccagctgcccccggtctttgggtggtgctgttcttttctggtggatttaatgctgagtcactggtacaaagttgttgaagctcagagctggaggtgagcttctgaggcctttgccattatccaacccannnnnnnnnnnnnnnnncctcttgtctggttgaggacttggggcagnnnnnnnnnnnnnnnnnncttgaatttccctttacaaggggaagaaataaaggaaaggagttgctgccgacctgtcactgtttggagattgatgggagtgttggaactgttctcagtcttgatttgctttattcagttttctagcagcttttgataatcccctcatccccactaaatggatcttgtttgcagtcttgctgacggtgtttgctatttgaggatcatgggattcctttcccccaa

SEQ ID NO: 15525 - DNA, 854 bp, Macaca Fascicularis
  misc_feature (1)...(854): n = A,T,C or G
ccaacnnnnnnctcattggtgccatcaacattgaaaatggcaaggccaactccgtgcgcaatgccgtcactcaggagtttggccccgtcccngacactgcccgctactacaagaaacatggcatcaggtgggtggtgatcggagacgagaactacggcgagggctcgagccgggagcatgcagctctggagcctcgccaccttggggcccgggccatcatcaccaagagctttgccaggatccacgagaccaacctgaagaaacagggcctgctgcccctgnnnnnnnnnnnnnnnnnnnnnnnnnnnnnnnnnnnccctgtggacaagctgaccattcaaggcctaaaggacttcacccctggcaagcccctgaagtgcatcatcaagcaccccaacgggacccaggagaccatcctcctgaaccannnnnnnnnnnnnnnnnagatcgagtggttccgcgccggcagtgccctcaacagaatgaaggagctgcagcagtgagggcaatgccgccccgccccagcgctggcgtcaagttnnnnnnnnnnnnnnnnnnnnnnnnnnncgatgcatccagtcatggcttcttattccaagatggtgtgaccagacatgcttcctgctccctgctcagcccacggagtgactgtggttgtggtggggggggttcttaaaataactttttagcccctgtcttcctatttttagtttggttcagatcttaagcagnnnnnnncaactgtatttatttttgatgacaacactcccatctaaagtttttctcctgcctgatcatttcgttggctgaaggattctagagaaccttttgttctgcaaggaaaacaagaatcc

SEQ ID NO: 15526 - DNA, 762 bp, Macaca Fascicularis
  misc_feature (1)...(762): n = A,T,C or G
agtacagaggtggatgacccctcaaaggacagggagctancaggctgtccagaagggaagaaaatggagtttatcaccagcctactggatgctctcaccactgacatggttcaggccattaactcagcagcgcccactggaggtgggaggttctcagagcccgaccccagccacaccctggaggagcgggtggtgcactggtatttcagccagctggacagcaatagcagcaatgacattaacaagcgggagatgaagcccttcaagcgctatgtgaagaagaaagccaagcccaagaaatgtgcccggcgtttcactgactactgtgacctgaacaaagacaaggtgatttcactgcccgagctgaagggctgcctgggtgttagcaaagaagtaggacgcctcgtctaaggagcagaaagcccaagagcaggtggagagtccagggaggcaggatggaccaccagacacccaactttcagcattgcccatggcctggccacgtcccatgtaacataagtggtgcccaccatgtttgcacttttaataactcttatttgcgtgttttgtttttggtttcattttaaaacaccaatatctaataccacagtgggaaaaggaaagggaagaaagactttattctctctcttattgtaagtttttggatctgctactgacaacttttagggggttttggggggggtggggagggtgttgttggggctgagaagaaagagatttatatgctgtatataaatatat

SEQ ID NO: 15527 - DNA, 730 bp, Macaca Fascicularis
  misc_feature (1)...(730): n = A,T,C or G
gtgccagatggaccgcatgannnnncgagagatgtgcaaggaattcccggtgctgggggaggctcccagctagcaccttgctgtcctcccttccctgcagctccagtcagtgtgcaggggactcaggggcttggccctaagaatgttttgcactgacagtgggaggggataaggtggcagaaggaacctgagcaggaccccccacctgaagtagaacttacgagaggggccaagtgtaggattggggaccatggtctgggagctgttctggggcagggggaatatgcaagctaaaactcctctataccccggtaggcttccttttcagcatgcccccctcttcaccccacacccacgtgtacactcagagtcctgctgctgctccaggctggaccagacccccgtccccacccctcctggtctgtatcctgggcctcagcaagccatgcccctggggnnnnnnnnnnnnnnnnnnnnnnnnnctattctttgccttagctttgcagnnnnnnnnnnnnnnnnnnnnnnnnnnnnncccacgtgggggtcgctgcccttcactcctacccccagaggccttggccaagctgctgctttgaaagcgggatcttggagacaggccatctatcccagagccttatggaacaggatgatggcactgagaaagccannnnnnnnnnctcttttctctgtgaaaatgtagagtgaaaagcnnatgtgtattttccta

SEQ ID NO: 15528 - DNA, 747 bp, Macaca Fascicularis
agcttcatagtttggtatccagaggttctgaagttatctgtttggttcagatatcagccttctcatgtggcaaatgaagcactggaatttctaaggcccgttccgactctaaaattccacaagtttgggaaagattcccttttactctactgcaacttctcacctgggtagtaagtataaattctgaaagctttcctggagactcagaagttaaaattaatttagaatacctcattaacttgagaatattcaatgcaaacatcccactaaccagattcataagcatgctaaatgattaactgattttaaagcactctatgatctagtttcttcttaagaaaacatcctctgcacacatatacaaatacatatgtgtgtgtgtgtgggggggtatccattcacctttactgtaatatacacaacttgagaagaggaatcagtctctagaataaagctgcacagaccttgattgagttaatcattaaaatatatgtcctacctcaaaacttttttgcttattctgatttattcttcttaaccagaaatccaggaaggagaatgagagaagaggaaaagcaaataaaagctctctttctttattctgtcaataagaaaggtgagggaatcgtttcttaagaaaaaggtattggaatagagacccaggaagttcttggttcaagatactaatcaaggtaagtaagaatagatagaagaaagtaccaaaaagagagtaccagaaatcctggg

SEQ ID NO: 15529 - DNA, 724 bp, Macaca Fascicularis
  misc_feature (1)...(724): n = A,T,C or G
acagggccagccgccaccaggatggccctgaagcaggacatctgtttttgtccctcaccctgggcaggccctgtcacaatcatgatcctcctcctccccgccccgatgtctgagcacagggctcgaattgttagtcccaactctggccaaagacactttcttccagagacagaggccaggaggcagcgacgggagcccggcggggaggcggcggctgccacagcccttccagcctgtcttgctgggccctggttcacatttgagtttaattggactggccctggacccagataagcagcagtgtctttggggtcacagaacattttggggcagtttaatgtggtaccaaactgagtgaaactaggagctgtttatagatggagcagcacttagtgcttcatagaaagcaatgcctacttttaaagttacaaatgcagctatctacatagatgtnnnnnnnnnnnnnnnnaggtctgtggtagaccagaaaccacaaattgactttttttttttcttagaaaatatttctatttgcggaaaatacagtaatagtaatgtaaataatgtacatctattgatttctggagtgtttgttattcaatgtatatactgccatggctcgcatgaagaaacagcctccctctctctctctcgatatttggttgtaaagtgaacagtaagattggagggtggatggctgtcagtgctcttgcaaatactgtgt

SEQ ID NO: 15530 - DNA, 756 bp, Macaca Fascicularis
  misc_feature (1)...(756): n = A,T,C or G
aagggtcnnnnnttgcagacnnnnnnnnnnnnnnactgacacacgtgaaggagcagttggaaactnnccggaagctgcagaggagggaggtggccgagcagtggctgccgagggctgaggaggggctgtggtctgcagaggaggaccacctggaggattctctggaagacctgggggcagcagatgactttctagaacctgaggagtatgtggagcctgagggagcagaccccagggaagctactgaccttgacacagtgccggtgtccctgagctacgaggagctggttcgaaggaacgtggagctcttcatcgccacctcccagaagtttgtccaggagacagagctgagccagcgcatcagggactgggaggacacagtgcagcctctgctccaggagcaggagcagcatgtaccctttgacatccacacctatggggaccaggtggtctcgcggttcccccagctcaatgagtggtgtccttttgcggagctggtggccggccagccggccttcgaggtgtgccgttctatgctggcctccctgcagctggccaatgactacacagtggagatcacccagcagcctgggctggagacggccgtggacaccatgtccctgagactgctcacacaccagcgagcccacaagcgcttccagacctacactgccccctccatggcnnnnnnnnnnnnnnnnagcaccaaggcaggggtgggggatgtgtactgaggagccgtgcatctgctcctgg

SEQ ID NO: 15531 - DNA, 732 bp, Macaca Fascicularis
  misc_feature (1)...(732): n = A,T,C or G
ccatcaaacatnnnnnnnnnnnnnccatggggggacctgcnnnnnnntctccagctgggactggcgttttcnnnnnnctggagtgtgatggttttcacgggtaggatgagacctttggcagagaggtctccagtggtgctctgagcctgcgctgcataggactgagcagacccacctcctccagcttgggtggccccgccactcctggttccaagtatctcctctcctggcaggtcttaagggaagattgtacccctcaccctttacatacccagaatcatcagtatgtcacttcctaatttctatcagtgtatctcattagtttcatactgttttactaatcgtaaatctaaacagatttgctcaaaaggagaccattctattttttaaagtacttagtgatatacgtataagctttgcatggacgaattaaataagcacatgaccctttcttgtacattcagaacctgaacatccatgtgaaaactggatccatttttgagagatgtgcaagtttatttgtaataaataattagaatctatccgtatatgcatatatctatatgctgtgttaagtggcaatggtacattacagtctgtggagatggttcgctccctctgtaaggaacaagacgttctcatctgatgtcacggtaggtttagattctgaagtgttccccaacctgtaccgttctgtacctctcacaccactgcttgcccaggcagtagtgg

SEQ ID NO: 15532 - DNA, 764 bp, Macaca Fascicularis
  misc_feature (1)...(764): n = A,T,C or G
agcagcagtgtnnnnnnnnnggcacacctggactggtgnccccagcactgaccctggcccagcccctggggaccttgccccaggctgtcatggctgcccaggcacctggagtcatcacaggtgtgaccccagcccgtcctcctattccggtcaccatcccctcagtgnnngtggtgaaccccatcctggccagccctccgacgctgggtctcctggagcccaagaaggagaaggaagaagaggagttgtttcccgagtcagagcggccagagatgcnnnnnnnnnaggagcacatgagcantncgggcagcagcgcccgccacatggtgatgcagaagctgctccgcaaacaggagtccacagtgatggtnnnnnnnnnnnnnnnnnaccccaaggacatcgatgatgacctggaaggggaggtgacagaggagtgtggcaagttcggggccgtgaaccgcgtcatcatctaccaagagaaacaaggcgaggaggaaggtgcggaaatccctgtcaagatctttgtggagttttccatagcctccgagactcataaggccatccaggccctcaatgggcgctggtttgctggccgcaaggtggtggctgaagtgtacgaccaggagcgttttgataacagtgacctctctgcgtgacattggcccctctccctggacttgcacttgttccttgtttcctctgggttttatagtgatacagtggtgtccccggggccaggcgcactgtgcccagcccggcctata

SEQ ID NO: 15533 - DNA, 758 bp, Macaca Fascicularis
  misc_feature (1)...(758): n = A,T,C or G
aacgaatgagctgnnnaatagaagtccatgagtgagtgggtattttttatttgaaagtgcttttcttaatcaaaagtccttagaacgagagaaacaaaatatttctgttttggaatcccacttatcaaatcattcaaaactttcagctggagtggggtttgcttttgttttgtttgtgtccataagaaacatggtagaagannnnnnnnnnnnnnnnnnnnnnnnntgaggttatgagaaaaaacagcaggggcattagtttcaggcaaggcagctcccaggtttagagattaatttttaccccctaaggaatatccagtcaaagacgctgagtgggagctgtcaggcagtagcagctgtgttnnnnnnnnnnnnnnnnnatggtgaagaatggacttaattatgctaacagactgaaaatctagacatacatcctctgatatacaattagagatatttttatatagaccccaagcattctgtgtataaaagttaacattnnnnnnnnnnnnnnnnnnnnnnnnnnnnnnnnnnnnnnnnnnnnnnnnnnnctacaaatgttaatgtatgtggctgtcatcttaagatactagtagagcaaagacttaatcatatcaacttaattctgttatacaatttttttacatactaaccatttcttatggaaagatcctgtagggagcccatcctctcaccaagccatcacaagctctgcatacacatgcattcagtgtggactgggaagcattactttgtag

SEQ ID NO: 15534 - DNA, 691 bp, Macaca Fascicularis
  misc_feature (1)...(691): n = A,T,C or G
aacgggcacagatcatctgggaatgtgcaggggannnnnnnnnnnnnnnnnnnnnnnnnnnnntgcgcaggaagaggcccccaaggcagaaacccctgggccactcgctacaccactgcagccggctcagaatcctggagccccactctccactggccgacccacagagtgccacggagacagcctccagtgagcagtatctgcactctaggaggacaagtgccaggatccgccggaactggaggaagccagaccccacaagctacctccaccagatcagacactgatccagggaaagaaccaggaatggcagtgtcttccctcttgccaaagggcctggggaggtgaagaaggaagagagactttaggcaagcagcccaaaggggtaaatgaaagcaagaggccgctgccactggtctgctccattcagaacaggnnnnnnnnnnnnnnnnnngctctccnnnnnnnnnnnnnnnntcctcaccaaaatgaggagagacagtgactgttcctgccagtctttnnnnnnnnnnnnnnnnnnnnnnnntgcatgatattcccctgggagccaagtgacaggcactcagacannnnnnnnnnnnnnnnnnnctactaatctacctgctactactgtaaaccatggttccagcagcctgttccacactcccgcaccatcagggtccacagggaa

SEQ ID NO: 15535 - DNA, 743 bp, Macaca Fascicularis
  misc_feature (1)...(743): n = A,T,C or G
ggctagcagaagctgaggtagaacttannnnnnnnnnnnnnnnnnnnnnnnnnnnnacttttgtcccctcctgttgaccctggtttagagccgttaaccacttggtgagttgtgtgggtgttgttgccctggatggcctgtggctcggtccacaagtcatgctgagttctgcagcctctgtgacatggagatgtcccctcacccctcccctttcaccatcatcctcttttcctcatggaaatgtctgctctatgaaactatgcacatattgaaagtgaactgaaacaaatgagggttgggtgggagcttccaggcctgggacttacaccatgcctagcctagcagaggccttagtcccatttggggcttgggagtgacatttacttgaggcttatacactggtgtggttgcctggtttgcaggaaatgaccaagctcacacctgctggctgaagtgtaagcagacaactggggtactcttttgaaggatgaaggtggtggattctcagccctgggggtcttcctcacccgaggacccttcagagccaccctttctagtttatgtttcctggtgcacacatttaaggcataacagcacattcatccctttggtttgggatctcaggaatacagtcccatgcaaagattctctggttttacggctttttttccctttctttacaccatcctctcccataagcacccacatgtctttgaatatgaatgtattggtaaaataccacg

SEQ ID NO: 15536 - DNA, 726 bp, Macaca Fascicularis
  misc_feature (1)...(726): n = A,T,C or G
acagggccagagagtanncnnnnnnnnnnnnnnnnnnnnnnnnnnnnnnnntatggtggtaacttacaggaaaacccgagtggccccagnnncatgcatggacagacctggannnnncctgcccaaggacctggatattcacaaggatacaggggacatattagcacnnnnnnnnnnnnnnnnnnnnnnnnnnnnnnnnnnnnnnnnnnnnnnnnntttcctcaggcacatcatttttatctggaaagacttttctagctgcaatttaaggcagcaatccaagagacttgaataataataattcaacaacagctttatttttatgtggagaagggtcttgcatacaatagtttaaaaagacaaaaaaaaaaaaacctttgcttaaattcatgctgttctaaaaactagatctatcaattgtacatcttcacaaattctagttaacaattttattttgtattcttgcagttttaagtggatgctaattttagggacataagccttttatggccctcttgcagatcttctgaactatgcacatttgtgctttttttgtaagtttggaccaacttttatgtaacaaacagcccctccccacctccagttttacaacaatcagaaagggcactgatttatttggtatttttctttttacaaagctacctttagtcaaaggtcactgtcnnnnnnngcacctgctttcagtgttattgtgaaaggtgtact

SEQ ID NO: 15537 - DNA, 737 bp, Macaca Fascicularis
  misc_feature (1)...(737): n = A,T,C or G
ttgtgtgtatgagtgtatggggttagtgtggaacttaagagctggaacacagctgtagagcaaagcacatccaggagccccagttgtcactggagtctgggcaaccccagcaatgaaaaggggtgagataatgctcattgctcttcagagagagtggttggagtcccccccaccccgcccccccagtatgcttacattattgctcttttagtttgatatggtgtttgggttttgttttgtttttttgaaaggtctgaaaaggtgaagccccccacccaatggcaatatgaaaccttttgtgcttctcttcagccccttccctgtgtccatctttctctcctcttccgaagcctttttcctactacctttacccagtttgtgtgtttgagctctgcattcaggcagcnnnnnnnnnnnnnnntttgaactgtcactgannnnnnnnnnnnnnnnnnnnnnnnnnnnnnnnnnntctcactcccagtaatacccagctcccatctaaagccccattctgcatgagaatttggtgtttggaatgttttctgactcttggggcgggattcctcgccttatcatcctcactgtggagtaatgaggagggggaggagaatatcagaaactggttttgtgtagtaaactttctttcctggttttttgttttgttttgttttctggattttgttttttgtttttgtctgtctgtgcaagacctgcaggctgctgaaaatcagcnt

SEQ ID NO: 15538 - DNA, 656 bp, Macaca Fascicularis
  misc_feature (1)...(656): n = A,T,C or G
tgtaaagtgatgtactacaccgaggtgatcggctcggaggatttcagaggttccatgacgagcctggagtccagccacagcggcttttcccagctgagtgccgccaccacctcctccagccagtcccactccagctccatgatctccagatggnnnnnnnnnnnnnnnntgccaagaannnnnnnnnnnnnnnnnnnntcatgtgcccagagatgtttatagaactgnnnnnnnnnnnnnnnnnccctgccccctcccagnnnnnnnnnnnnnnnnttttaagttgattcgggagtggcattcttttcnnnnnnnnnnnnnnnnnncatcgtgaagagctcaaagcacatgacggcacaaatgcnnnnnnnnnnnnnnnnnnnnnnnnnnnnnnnnnctccccttgtaagggaattctggggcagctatggtttgaggatgcagttggcatcgtgtctctacttttagtacctnnnnnnnnnnnnnnnnnnnnnnnntcatttcccgtttcttagtactaatgattctttgattttccctctattacttgtcttaattcactttccttcctaaatttgttatttgcatatcaaattctgtaaatgttttgtaaacatattaccnnacttggtaatacaatactgatagtctttaaa

SEQ ID NO: 15539 - DNA, 765 bp, Macaca Fascicularis
  misc_feature (1)...(765): n = A,T,C or G
atgacagagangnnntccaaaaacacattcaagcatttagcaattcgtcgactagacaaaccaaagaagctatctgcagagtgtgctaaatattggggagaaatcatctcccagcaatatcattttgacagagataacactgaagttgcatatttaaagacacttaccaaggaagatatcatcaaattctacaaggaaatgttggcagtagatgccccaaggagacataaggtatccgtccannnnnnnnnnnnnnnnnnnnnnncttgtcctgttgttggagagttnnnnnnnnnnnnnnnnntaaatttgtcacaagcaccagccttgccacaacctgaagtgattcagaacatgaccgaattcaagcgtggtttgccactgtttccccttgtgaaaccacatnnnnnnnnnnnnnnnnnnnnactctgaagattccccatgcgtgggaaagtgcaagtggatgcattcctgagtcttccagagcctaggaagatcatcttggccactttaatagtttctgattcattattagagaaacaaactgaaaagttgtcaaatgtcattatgtagaaatattataaatccaaagtaattaaattacaaaatcttatagatgtagaatattttttaaatacatgcctcttaaatattttaaaatttttcttttcnnnnnnnnnnnnnnnnnnnnnnnnnnnnnnnnnnnnnaaatgaatgatattcctgtagaatcttccttccctattctgtaaaatagtcattgtc

SEQ ID NO: 15540 - DNA, 681 bp, Macaca Fascicularis
  misc_feature (1)...(681): n = A,T,C or G
tcgagcacccggaggacaagctcttcaacacgtctgtggaggtgctgcctttcgacaaccctcagtcggacaaggaggccctgcaggagggccgcactgccaccctccggtaccctcggagccccgacggctacctccagattggctccttcnncaagggagtggcagagggagaggtggacccagccttcggccctctggaagcgctgcgcctctcgatccagacggactcccctgtgtgnnnnnnnnnnnnnnnnnnnttcgtgaaaaaggcagactaagatgcgggcttctcccagtggccagccctgaagcccacgtttctggggatgtcactgccgtccccggagggccagatacggccccgcccgaagggttctgcctggcgccgggcttgggccagcctggggtccgccgctggcccggaggccctaggagctggtgctgcccccgcccgccgggccgcggaggaggcaggcggcccccacactgtgcctgaggcccggaaccgttcgcacccggcctgccccagtcaggccgttttagaagagctttttcttgggcgcccgctgtctcnnnnnnnnnnnnnnnaatgcatatactactttatgtgctgtgttttttattcttggatacatttgattttttcacgtaagtccacatatacttctataagagcgg

SEQ ID NO: 15541 - DNA, 757 bp, Macaca Fascicularis
  misc_feature (1)...(757): n = A,T,C or G
gagccggtgcacatgtcgcccctggagccccggggagggcacggcgacggcctcgccctcgtgctgatcctggcattctgtgtggccggcgtggctgccctctccgtagcctcncnctgctggtgcaggctgcagcgtgagatccgcctgacccagaagactgactacaccgctgcaaagtcccctggctcacctgcagcgccccggatctcgcctggggaccagcggnnnnnnnnnnnnnnnnnnnnnnaccatnnnnnnnnnnnnnnnnnnnnnnnnnnnnnnnnnnnnnnnnataaagagccacccaaggagctggacacggcctcctcggatgaggagaatgaggacggagacttcacggtgtacgagtgcccgggcctggccccaaccggggaaatggaggtgcgcaaccctctattcgaccacgccgcactgtccgcgcccctgccggcccccggctcaccgcctgcgctgccatgacctggaggcagacagacgcccacctgctccctgacctcgagacccccggggaggggcagggcccggagcttcccactaaaaacatgttttgatgctgtgtgcttgtgactgggccttgggcttcaggccctgggatcccttgccagggagacccccaaacatttgtgccaggagacctcctggtcccctgcacctctcctgttcggtttggacccccaaactggaggggcagggagaaccgtggagcgcaggaatgggtggggaattctagaga

SEQ ID NO: 15542 - DNA, 581 bp, Macaca Fascicularis
  misc_feature (1)...(581): n = A,T,C or G
atgagacagggtgtgatgctgcgaacgggaacacagagnnncgtgggcgggtctcatgcttccgccgggtggctggagtttaggggccggtgttctgtgggctcgcgcgggctttggcgccaccatcctttgctcggttccttgggggaggggccacggcgtgccggtctctcgggcgccagcaggaggcgctgctgcggggacagttgtccctggtgtgatggaggccgcgagcgaggaccccggggaaggagcttgtttcagaagcaaaactgcatccgagacacacatgctgtggcacacccggccccgccccgccccgccccgcccctcccagggaagagggagggcagggaaatccctcagttgcatctggttgtacccgaatgccagagaaggtcacgtggatgatttagagttgtcatttctctttactggatgtttatttataaagatctggcctgttcccgcgtctgcggaagggccctcgtctcccagctatctataaccttagctagagtgtcgccttgtgggttcctgttgctgagacttcctggatggagccgccctcaccgccgggc

SEQ ID NO: 15543 - DNA, 781 bp, Macaca Fascicularis
  misc_feature (1)...(781): n = A,T,C or G
tgaacggcacagaccccgaggatgtgattcgcaacgcttttnnnnnnnnngacgaggaagcctcaggtttcatccatgaggaccacctccgggagctgctcaccaccatgggtgaccgcttcacggacgaggaagtggatgagatgtaccgggaggcgcccattgataagaaaggaaacttcaactacgtggagttcacccgcatcctcaaacatggcgccaaggataaagacgactaggccaccccagccccccgacactccagcccccgccagtcacccctccccgcacacactcgtccataccagctccctgcccatgaccttcgctcagggatcccccctttgagggattagggtcccagctcccagtggaagaaacaggccaggaaaacggtatgccgagctgaggcaggtattcccatggtgaccccagagccctgggctggagtctctgacacctccaaggaaagaccaccttctggggacatgggctggagggcaagacctagaggcaccaagggaagaccccattcccggcctgctccccgaggaggaaagggctctgtgtgcccccaaggagaaagaggccctgggtcctgggatcctacaccccttcacgtgcatccccacacaaatgcaagctcaccaaggtctcctctcagtcccctcctctacaccctgaccagccactgccacacacccacccagagcgcgccacctgccacgagagtgtgctcaggagttgcgggcagcatggacatctgtcccagaggaggcag

SEQ ID NO: 15544 - DNA, 722 bp, Macaca Fascicularis
  misc_feature (1)...(722): n = A,T,C or G
actgaggctgcctggcagggggctgctccagtagcagggcacagcaggcctcaagagnncctaattgtnncagggttcaaaggaagtcactgacctttcccatccggtagcttcagggaagaaagnnnnnnnnnnnnnnnnnnnnnnnnttttgtttccttgtggcttcttgtctgtctgagtcaaccaatacacagactcactggattatagaaaagaaaattcacatctgccttgttaatctaataaatacaattacagacccnnnnnnnnnnnnnnnnnnnnctaagttgagaaattcagtggcagcccagccatctcctatcagggaagaaatgcaggggagactggggccctcagtgaggggctgcctggcgtgctgctgcccccagagcaggcagggggtgtgggagggccagtttcctgccactgggtccaaggagcctttgttcaaaggaggaagtgggccacaggaagaacgggcctgcttctttcgtacctgtgcatctgaccttccgggaagtgtaaacaggaacacctattggcaactgaaggcgtgagacatctggaccacatctgtacagaaagcatcccagcgcccacgtgggcatgagacagttggcactgcgcctggtgaagtgcgtgtgtgtacagacagtccactgggcagcaccggtatcctcgtgttctttatttgcacagagtgaaatgtcagaagttac

SEQ ID NO: 15545 - DNA, 731 bp, Macaca Fascicularis
  misc_feature (1)...(731): n = A,T,C or G
cataaatggnnnnnnnnnnnnnnngcatttgctagcaatgaagaccaaagaactgattggaagcatgaaaattaatggaagggttgcagcatccacattctcttcagatagtaagaaagtgtatgcctcttcgggggatggagaagtttatgtttgggatgtgaactcaaggaagtgccttaacagatnnnnnnnnnnnngcagtttatatnnnnnnnnnnnnnnnncatctaggaatggacagtatgttgcttgtggttccaattgtggagtggtaaatatatacaatnnnnnnnnnnnnnnnnaagaaacaaacccaaagccaataaaagctataatgaacttggttacaggtgttacttctctgaccttcaatcctacttcannnnnnnnggcaattgcttcagaaaaaatgaaagaagcagtcagattggttcatcttccttcctgtacagtattttcaaacttcccagtggttaaaaagaagaatatttctcatgttcataccatggatttttctccaagaagtggatactttgccttggggaatgaaaagggcaaggccctgatgtataggttgcaccattactcagacttctaaagagactatttgaagtccagttgannnnnnnnnnnnnnnnnnnntgatatatcgtctcagaaactttcccgaatgtgtgataatatatggaaaatgatttatagagtcaggtgtgcttaagagccggtaa

SEQ ID NO: 15546 - DNA, 755 bp, Macaca Fascicularis
  misc_feature (1)...(755): n = A,T,C or G
cagtatgacgatggcagcggtatgaagcgagaggccactgcagacgacctcatcaaggttgtggaggagctaactcggatccattagccaagggcagggggccccctttctgaccctccccaaaggctttgccctgctgccctccccctcctctccactattgtcttcttggccatgggaggcctttccctaagccagctgcccccagagccgtagttcccctacgtggaagtggggcgggcttcatagagacctgggaatgagctgaaggtgaaacattttctccctggatttttaccagtctnnnnnnnnnnnnnnnnncaccttggaccaccnnnnnnngattggtgttgccagttgtcctcnnnnnnnnnnnnnnnnnnnnnnnnnnnnnnnnnnnnngaagctnnnnnnnnnnnnnnnnnnnnnnnnnnnnnnnnnnnnnnnnnnnnnnnnnnnnnnnnatatctcacacccatgcattgtcctctttttatttagattggcagtgtagggagttgtgggtagtggggaagagggttgggagggtttcattgtctgtgaagtgagaccttccttttacttttcttctattgcctctgagagcatcaggcctagaggcctgccaggccatgggcagcctgtgtgtaaaacctggagatggtggatgatccccacaccacagcccttttgtctctgcaaactgccttcttcggaaagaaggaggtgggaggatgtgaatgntnnnnntctga

SEQ ID NO: 15547 - DNA, 714 bp, Macaca Fascicularis
  misc_feature (1)...(714): n = A,T,C or G
gaccagagtggacagctggatggcctggagctgttgtccatgttgacagcnnnnnnnnnnnnnnnngctgccaactctcctaccaccaacccggtgatcttgatagtggacaaagtgctcgagacccaggacctgaatggggatgggctcatgacccctgctgagctcatcaacttcccgggagaggcccccagtcacgtggagcctggagagccccttgctccatctcctcaggagccacaagctgttgggaggcagtctctgttagctaaaagcccattaagacaagaaacacaggaagccccaggtcccagagaagaagcagagggccaggtagaggccagaagggagtctttggatcctgtccaagagcctgggggccaggcagaggctgaaggagatgttccggggcccagaggggaagctgggggccaggcagaggccagggagaatggagaggaggccaaggaacttccaggggaaacactggagtctaagaacatctcaaatgagtttgaggtgcacattgttcaactggagaatgatgagatctagatcttgaagatacaggtaccccacgatgtctcagtttcagaacataagccctgaagcgggcaggggaatgtacgctgggacatggaccacctctctgccccctgtctggtcccagtaggtatcaggtctttctgtgcaactcagggagaccctaagtaa

SEQ ID NO: 15548 - DNA, 778 bp, Macaca Fascicularis
  misc_feature (1)...(778): n = A,T,C or G
gagatgcgtggctgcnnnnnnnnnnnnnnnnagttgagaggttggagcaggatgagggaatcctgtcaccatcaataatcacttgtggagcgccagttctgcccaaggccccacccgggcggacagccaggacctctccatggccaggctgcctgtgtgcgtgttccctgtctggtgcccctttgccagccccctgcaaacctcacagggcccccacacaacagtgccctccagaagcagcccttcaggaacagaggaaggaaaatggggatgtccggggctctttccagcctccttttctccttgccttggcatggctggccttcccctccaaaacacccatttccctgnnnnnnnnnnnnnnnnnnnnnnnnnnnnnnngggagggggaaggggcgatttgagggagacggggagaaagcttatggctgggtctggtttctttcctccccaaagggtcttactgttccagggtggcctcagggcgggcaggggccacactgtgcctgcactctggtaaaggtgacccctnnnnnnnnnnnnnnnccttggcatgttactgccccacagggatagaatggagggagctccagaagttttccgtcccaaaggcagtctccgtggttgaagcagactggatttttgctctgcccctgaccccttgtccctctttgagggaggggagctatgctaggactccaacctcagggactcgggtggcctgtgctagcttcttttgatactgagaactgtttaaggtgggagggtggcaagggac

SEQ ID NO: 15549 - DNA, 757 bp, Macaca Fascicularis
  misc_feature (1)...(757): n = A,T,C or G
cccagcccaccagtggaagaagagaaagcgggtgagcgatgatgtcccggactgcaaagtcctgaagcctngtttgagnnnnnnnnnnnnnnnnnnnnnnnnnnnnnngaccctggagaagcnnnnnnnnagtgatattaaggtggaggacacagccaagggccatatcgtcctgctccaggaagctgagacgctcatcnnnnnnnnnnnnnnnnnnncccatatcatctgcgacaatgacgagatgctcagagtgcgactgcgggacctggtcctcaaattcttacagaagttctgagtggnnnnnnnnnnnnnnnnncctgaaatcctgcaggccctcannnnnnnnnnnnnnnnnnnnnnnnnnnnnnnnnntgagagnnnnnnnnnnnnnnnnnnntggtgtcctctggcttaaggagtgaagaggtggctcttnnnnnnnnnnnnnnnnnnnnnnnnnnnnnnnnnnnnnnnnnnnnnnnnttccctttcaacttcaggctaatttcttctcaactctggctctcccgaggagctgaaggatggcagaagtggaacggaagcagtnnnnnnnnnnnnnnnnnnnnnnnnnnnnnnnnnnnnnnnnnnnnnnnnnnnnttacatgggtcccaggcctcgggcaggggagcnnngccttnnnnnnnnnntttacttgcctacagtgctgcacccaataagatgatcccaaaatatggtaaannnnnnnnnnnnnnnnncattttctactctgag

SEQ ID NO: 15550 - DNA, 269 bp, Macaca Fascicularis
ccgaggccgccgggtgtgaccatgaggggggacagcacacgctctggctcttgaggccaaggggaggagacagcacctgaggcagtttcctcaccccaggcctcctctcccaccaagaaaccatgcagtctgattcccaggggccgccaaaactctctatggggaaggaagggggtccgggcatccacagtccccaaggcctctgtggatgaggcccccatcacaaccaaaactatggccaagagaagcaagaaatgattctctgtcaa

SEQ ID NO: 15551 - DNA, 710 bp, Macaca Fascicularis
  misc_feature (1)...(710): n = A,T,C or G
gacctggatgagcccatagacttgcgctgcgtcaagacgcgcagcgaggccnnngagccgcccagctccctccaggtgaagcccgagacacccgcgtcagcggcggtggcggccgtggcagtggcagcggcgcccaccacggcggcggcgaagcctccagccgaggcccaggacgaacctgcagagtcgctgagcnnnnnnnnnnnnnnnnnnnnnnnnnnnnnnnnnnnnnnnnnnnnnnnnnnntgcctcaccgttactttcaaggagtacgtgaccgtgtagctggagggcgtcggaaggggaagcaccattcccgcggaggggggcggggggctgagcacctggggcctcggggcagactcccctctcgccaacccgccaaccgcgagagacccgggctggcccccagggtgaggacgcccagagcggaggtaaccatgctccccctgcagcggctcagactcgggcagaggcccgttccacgcggtgccggcggggctcgccctctcctgcccttccctnnnnnnnnnnnnnnnccggaaccaacagggcagctctgcgcccggcctcagagttctagtattatattttaaccgtgctaacttgtcaagtgctgactctgctcccatttgtacgtggtgttattattgaaatgtattgtttgagctcaaaaggcccgaccacccctcttcgggctgctatatata

SEQ ID NO: 15552 - DNA, 732 bp, Macaca Fascicularis
  misc_feature (1)...(732): n = A,T,C or G
gggccagctatgagtttgactctnnnnnntgggatgacatctcagaatcagccaaagacttcatccggcaccttctggagcgagacccccagaagaggttcacctgccaacaggccttgcagcatctttggatctctggggacacagccttcgacagggacatcttaggctctgtcagtgagcagatccagaagaactttgctcggatgcactggaagcgagcctnnnnnnnnacctcattcctgcgccacatccggaagctggggcagagcccagaggccgagggggcctctgagcagggcctggcccgccacagccactcaggcctccatactggccagccccccaagtggtgatccccaggcagatgccaaggccaagtggactgacccccagatttccttcccttggatgcttttggtcccctcccccaacccttcacccctggggctggcctcnnnnnnnnnnnnnnnnttgagggtgtggcgcatggtgctggggttggaatggagcaccctcaagtctgtccccaggctctgccctgcctgggggcagtggatcccctcccctgttgcctctcccgcccctgccccccaccccaccaaaagccgaggaggtgctggcaggcgggcctcaggggctgtctttcctgcatggctgttctgtgcttcgctgagtgtgggtggtcctgcttgtgccatggtcatggccttccagccccctccagttccc

SEQ ID NO: 15553 - DNA, 686 bp, Macaca Fascicularis
  misc_feature (1)...(686): n = A,T,C or G
caaagctaaaattttaacatgattaataatagagaagttgggtttggttctgttgttacgattgttttgtcgtggtgcttgtgttcagttatattctctctctctctcattttaaataatgcttgacaattcgaaaatgaaccaatgatgtgctgtggaatgtgatggttgtcttcatatagagtcacatggtttctctttttatgcagatatttataatcttcatcctatatcagtaggaataactatacggtgcactacaaaaaagatgtatgcaaacaaacatgttttaaatcaggtcagatatttgatgaaaaatatacgaactaatgttaggagcaagtagtttcaacatactccaggaactgagaaacaaaacaaagcaattgtgggttttgagctccatatactcttagcaagtaagggggcgtcttgcccctatatatcattttcccggattccactccccgttgtgggaatcgtgcccacccccatccgtgtgttgtagccactcacggtttgcatcaagagtgttttttgtaactgcctctggacttgggacagtgagtagaatcaaaaataaataatgtacgtggcggggaagggaaaaacctgttggagttgcttccagccagccannnnnnnnnnnnnnnnnnnnnnntccagcgggagcaaatgcagaaaaa

SEQ ID NO: 15554 - DNA, 716 bp, Macaca Fascicularis
  misc_feature (1)...(716): n = A,T,C or G
aagatagagccacttcccaaggaagtgaaagtctacnncctgactacttccaatgcnnnnnnnnnnatgcatcacagcctcgtggagtttcacttgaagcaactgagaagaaaggacaccaacatcgaggttactttccttagcagtaacgtcaccttctcatctaagatcaccatacctaagcagcaacttcacgggaaaggaatcatagctcatgccaccccacagtgccagataaagcaagtgaaattcaagtttcnnnnnnnnnnnnnngtttggaaaaaagaccgnnnnnnnnnnnnnnnnnnnnnnnnnnnnnnnnnnttgcctgtcaatcacagagaaaaggnnnnnnnnnnnnnnnnnccggtgaacttacaagcaagtgtgactgcttctcatgacctgaagatagcctgcgtatagtttaacctgggcaggacacatctccctgcatttttttttttggagggaggtgtgatgagggatgtgtgtgtgcagcttattgtagaccattannnnnnnnnnnnnnnnnnnnnnnnnnnnnnnnnnnnnnnnnnnncaccctggaggggagggagaactcattttacagagcttggtttctgctgctgatcttatgtacatacccattttagctctcnnnnnnnnnnnnnnnnnnnnnnnnnnnnnnnnnntgtatatctgtacttaggattcaatagaaacatgtacag

SEQ ID NO: 15555 - DNA, 667 bp, Macaca Fascicularis
  misc_feature (1)...(667): n = A,T,C or G
annngcaggnannnnnngcccgctgacatgcttgctccagggtaactgtggaccctgnnntcgccctgcgcacggtaccctatgtctggatgcctggccccggccccggcccacgtgggctgcccctggcagggtcacttaccaatggacacccaccccagatgcatgggccagggggccggcccccgtcatagacgtnnnnnnnnnnnnnnnngtgtgaacaaaagatgacgaaacctagaaaccgttggttccgtgtaagtagtcgactacgtgttttagaactgtgctgaagacatctgtaagattattttgtgggaaaaaaagtagtttcctttaaggtaaaagtcattttatatgatccttagcacatttttaagttttatcttaagggagacgtgcacaaaagcggctgccaaaccgtttcgtcatcctcacagcaaggaccggacgattgctagccaccccggagcaccgctctccttttaaccatgtgttcatctattttacattgccagcgacgacttttgtctatttatggagaaaccttgagaacaaagttgcagcttatcctaccgtgtgcgtggttttggggtttggtttgggtttgggttcttgacgtcgtttgcagctgnannntggccctggcgagtgtctgtcttggtgc

SEQ ID NO: 15556 - DNA, 683 bp, Macaca Fascicularis
ctggatagaaaacctagaagtagaccgccttcaaagagaaattcagtatattttcccaaatgcaagccgtcaggaaagtttttcttctattttggcttataaaattcctaaggaagatgttcagtccctttcacaatctttttttaagctggaagaagctaaacatgcttttgccattgaagaatatagcttttctcaagcaacactggagcaggtttttgtagagcttactaaagaacaagaggaggaagataatagttgtggaactttaaacagtacactttggtgggaacgaacacaagaagacagagtagtattttgaatgtgtgttgttcagtctgcttactgggacttatttcttcttcacttaattttaactttggtttaaaaagttttttcttggaatggtaactggagaaccatgaacgcacttgaaatttttctaagctccttcactgaaatgctgtggttgtgtgttttgcttttctttaaataaaacttatgtataattaagtgaaactgcatgtttgtattgaagcatattgaactatatagtttttatgtcatctttttcacttttcaaaaacagtgcttctgaatttatgatttaaaggaatagtaatagaatagttttgttttgaagttattttaagtttatgccatcttcttaaataagtatgtaa

SEQ ID NO: 15557 - DNA, 672 bp, Macaca Fascicularis
  misc_feature (1)...(672): n = A,T,C or G
gcagcttgagatgttcactattagannnnnnnnnnnnnngttcaaaacgttggtacctacgtagatgttccctgggaggagtgtttctttctgagtaaggggctttgttgaaagggggggttagagagagcaagacggccctcgagtgcactggcaggaagcaaagataagacttgaatttaagtttgatgggcctcctcctttagcagcccaacctgtagcaaatctagtttagcctgcatgacagggagacggttctcttcccaccctcaccgtttgcaagtggccggagctgggaatggcagtacaagagtgtagccaaagggaggctgagaaaaggaggcctttttttcagttttgagttgagtatccagagagaggcaaatcattttaactttttattaaagtgtaactatagaaacacatcaatgatttttcacaaatggaacacgtgcatacaatcagcaccccagaagccccccatcagattcccttccagttaactacctctccaagggaaaccactatcctgagttctaagagcatagattagttctgtctggtttgggatgatacataaatggaattatgcattctttgtatctggtttcatttcacccatattatgtttgtgagatttttgttgcatgtatttgtacnnnntttttcatt

SEQ ID NO: 15558 - DNA, 592 bp, Macaca Fascicularis
  misc_feature (1)...(592): n = A,T,C or G
cgggactcagacagacaagncnnngaaagagaacnnnnnntggcgatggggaantnnnccggagctccagcaggaggaatggaattcaaagcccctcagctgaggcactgggggtgccaactgcttcctgctggttctctctcacagcttctacctcttccaccctctggcttacgggatggttggtcctctggcccaggacccccaaagtccgatggcaggactaaggtggctagactcatgggacttttgaggccactgcaaagattccatcctgggtccaggacttcccaggagagccagctggggagcagtactggacccttccagctgtgaggaagctgcctaaggagcctgaagaattctgcccaccaggacccagctctggcagtgcagcgggaatggaacccagcattggagagagccgggagagagccgcagctccgtccacagcaccacagaaccacaacaccacagaaccacagagaggatggcacctctcaggctgctccctcgtgcacagcgtgggggaggacgggtgccagagggtgggtgtgggggggtgtgtgtgtatgtgagggcacattgtcca

SEQ ID NO: 15559 - DNA, 753 bp, Macaca Fascicularis
gggccgcagacacgtaggctggggtgaggagtgtctgctgtcactctctactccccagctttagttttatacatgtagtgataggattccttgttgcttggtccccaaagccttatactttttgcattggctttaattgggctcagcagaagcctcctgtgccccccctgcaggcaggcccaagtaggactgccggaggctgtgctttgacattttaacagacatttccgaaccaaaggctgctgggtttgcatgtttacagactcccctcttgggcgagggtcagagctggctgtggggagctgggctaggaagaggagatgcagctcagacttcctagcctttctaaaccaaagttctttgccattcctacaagcccagccttgctgctggtttttttctttcctttgggtatttgcactattttgggagcaagttttctatgtgggagccactttttttgtacaggggtaagttgggggttttcagggagccctgttaggtgcctccttgtttctttcctcaatctatgcaagcggctctggccgccatcatctcctgggatgccagagggctgcctctctagcggcttgggccggggaggggacactccagttctctagcatggcctgaggtatgggtgggcacatgtggaggccagggtaaggtgaatggggaggctgggaggactggtgtcgccctttggagcttggtgaggagggtgggcctagggcttggcgagtgccacttctg

SEQ ID NO: 15560 - DNA, 451 bp, Macaca Fascicularis
gaatatttcatgcgactgacatgtgagatctccacaaggggtagatcagggatggtgagagaaggtcaggtaaacggctcatctgcagcacacagtgaaataagaggctgtagtacatgagcgagatagagaaatcaccaccgttagaccaagctgtaaggccctaccacggacagtgtgtatcaaataaacttacaagaacccaacacaactcccagaaagtaacaatagtcagtggttgtaaggcgcggggtagaagaggggggaatggtccagcgtaatccttcataccacctggtttttgatattctgctgcctgttcaagaataaaagtgacagcaggacccaaatgcagctcccgacccactccccaggctggacatgcttgtgtccgcacagcacaccaatgtgatacctccactgactgggtgcagctctgcatggatctcgg

SEQ ID NO: 15561 - DNA, 681 bp, Macaca Fascicularis
  misc_feature (1)...(681): n = A,T,C or G
taacaaaatgacggaagactattgctttattttacattatttgtgaatcatcttgcactgcattttttgattatgcctattcaaaaggcagttgatttagagtgaaaaagccttccaaaattcaaagcagatttctctggtattatattatatccttcttaaaaaccagagcttttaagtaacaatatttgaatggcaccaaaacattttcattttaatgtatttctttaacaagtgatttaaaaaagtgtctaagtggccgggcatgnnnnnnnnnnnnnnnnnnnnnnnnnnnnnnnnnnnnnnnnnnnnnnnnnnnnnnnnnnnnnnnnnnnnnnnnnnnnnnnnnnnnnnnnnnnnnnnnnnnnnnnnnnnnnnnnnnnnnnnnnnnnnnnnnnnnnnnnnnnnnnggcgtgtgtaatcccagccaccttggaggctgagacaggagaattgcttgaaccccggcggcggaggttgcagtgagctgagatcatgccatcacactctagcctgggcaacaagagcgacactccgtctcaaaaaaacaaacaaaaaaaaaggtccaagcaatgtgacatcagtatttcatagtatttctggtgtaccggttttgcatgttacatttccattttgggattctgctttaggatactttactttcttacattttgcattttt

SEQ ID NO: 15562 - DNA, 669 bp, Macaca Fascicularis
  misc_feature (1)...(669): n = A,T,C or G
aataaaaaaagcatatgatgtacagtgtccaaagagagaaaaaccaagtaatgagcacactgctgagatggaacacatgaaatccttggctcatagagtatttacaatcttgcatttagaagagtctctgaaaaagagagagcaccatttactggagaaaattgaccacctgaaggaacagctgcagccccttgaagaggtgaaagctggnnnnnnnnnnnnnnnnnnnnccaaaaccagcggactcctgtgggctggattggcactgctgtccattcagggtggggcactagcctggctcacgtggtgggtgtactcctgggatatcatggaaccagttacatacttcatcacgtttgcaaattctatggtcttttttgcatactttttagtcactcgacaggattatacttactcagctgttaagagtaggcaatttcttnnnnnnnnnnnnnnnnnnnnnnnnnnnnnnnnnnnnnnnntggagcaatacaacaagttaaaagaagaccttgctaaggctaaagaatccctgaaacaggtgcgccatnnnnnnnnnnnncaaatgcaagtagaagaactcaatgaaaagaattaatcttacgtttttaaatgtcatcggnnnnnnnnnnnnnnnnnnnnnnnnnnnnnnnggatgtttttgagtcc

SEQ ID NO: 15563 - DNA, 744 bp, Macaca Fascicularis
  misc_feature (1)...(744): n = A,T,C or G
tgacannnnnnnnnnnnnnnnnngggccatcgctgagnnncntttgccgggggctcgagtggggcctcttctggcttgtctgttcgagaaccagttcagaagagcccgagnnnnnnnnnnnnnnnnnnnnnagaaacgaggtgttttcaccaaaagacagcgcgaggccctgagcagaatttccttgtctcgaattatatgtgacaataccggtatcaccatggtttcaagggacatcttcagagccaacatctatccccggggctttgtgagctgcagccgtatccccaggtnnnnnnnnnnnnnnnggcgggggaaatgaggcttctgcaggagtctatcccaagcctccaacttttggannnnnnnnnnnnnnnnnnnnnnnnnnnnnnnnnnnnnnnnnnnnnnnnnnnnnnnnacgcttctgctggctacagctcagagctgggttccccagctgggagtgagagctgggggctcctnnnnnnnnnnnnnnnnnnnnnnnnnggagtctcttaggtattaggttatgaatcagtgccacgtgcaaaggcttgggagccaagctatgtggtcttgcaccccaggcaagaaaagtcagctggagggtttacagcactttctactgtttcccagccctccctcccctccctcaccgtgactgagagaccactcagtcctagcctgcagagaccccacagtcctcctctgagcctgaggctgggcagcatgctctgctctacc

SEQ ID NO: 15564 - DNA, 790 bp, Macaca Fascicularis
  misc_feature (1)...(790): n = A,T,C or G
gacactcagccggagttgtaccacccaatgaaaaaaggatctggagtgggagagcaggatgggggactgatcggtgccgaagagaaggtgattaacagtaagaataaagtggatgaaaacatggtcattgacgagactctggatgttaaggaaatgattttcaatgccgagagagttggaggccttgaggaagagcgggaatccgtgggcccactgcgggaggacttcagtctgagtagtagtnnnnnnnnnnnnnnnnnnnnnnnnnnngnnnnnnnnnnnnnnnnnnnnnnnnnnnnnnnnnnnnnnnnnnnnnnnnnnnnnnnnnnnaccataagccacgggatcgtggaggttgatccaatgctcaccccagaagagcgtcacnnnnnnnnnnnnnnnnnnnnnnnnnntgagaaccctacctacaaannnnnnnnnnnnntgcagatttaggtggcagggagcacggcagccctggtggaggggtgcaggcaggccagaannnnnnnnnnnnccgatcgactgccgaccagcggctgctgccaggggctgcgtctgacatcctgacctcctggactgtaggactatataaagtactactgtagaactgcaatttccattcttttaaatgggtgaaaatgttaatataacaatatatgatatataaaccttaaaagaaaaaaatgatctattgcagatatttgatgtagttttcttttttaaattaatcagaaaccccacttcgattgtattgtctgannnntgctnnnnnngtataataaacggg

SEQ ID NO: 15565 - DNA, 679 bp, Macaca Fascicularis
  misc_feature (1)...(679): n = A,T,C or G
gaagcagcnnnnnntactcacggacannatgtngccaattatcgcaaagctggcccgagaggagatggatcgggctgtgactgagggaaagcgtgtgtgcgtgattgatgcggctgtgctgcttgaagccggctggcagaacctggtccatgaggtgtggactgttgtcatccccgagactgaggctgtaagacgcattgtggagagggatggcctgagtgaagctgcagctcaaagccggctgcagagccagatgagcgggcagcagcttgtggaacagagccacgtggtgctcagcaccctgtgggagccacatatctcccaacgccaggtggagaaagcctgggccctcctgcagaagcgcattcccaagactcaccaggcccttgactgagaagttctcagtggggccagactggcccccggagaggacaagcgaccccgtggtgaggagaaatgggggccttgatgcgtatcctggttcaggcccagaggtctaagctatgctgtgtaggacatggccaggcctggtggactcaggaagcctacccaacactggtatttggccaacactgaggatgtggttcatggatgagcaggcccctccccactcttgcccatgggtgactcttacccacagctgactagggccagcgcaaatactggaacctgtaacaga

SEQ ID NO: 15566 - DNA, 650 bp, Macaca Fascicularis
aaatcaagcatgtttgtttacattaaaaagtccagactcactgtattgtgaaaactgctgaatatgtggcagcaatttggtgtttttactttggagacggctaatggtgggaatgttaatgtaaatagtggtggtaatgtaaaatcatttcatttatcattcatgcaaaaaaaaagtatcgagtgcctattaattgtcaccgtagatataaaacgaatgagctgtaaccccttcatttaaggcattgacagcttagctgtgggggtggacacacatatgtgtatttacagtgcagtgtaaatagttctctagtagaggtagctccatatttttatgaggtcactgaggccttatggaccaactctgtggagataggagttatatattcttataaaataaaacaaaacaggacaatgttacaagagtaagaggttcttacttgtacataggctttcctgtgaaaacaggcccctgctgtacagactttggtacataatttagctcttttagtcaatccaaaagatttaagtgaccccctctttttttttgaatgctgtgtaaaggctttttggttaagacctcacttttaaaactgccttaagtataaatagtacctttggaatgtatttagttcatcatttcagctgcct

SEQ ID NO: 15567 - DNA, 660 bp, Macaca Fascicularis
  misc_feature (1)...(660): n = A,T,C or G
gcccnnnnnngagctcctcgccccccaccccatnntcatctggcctccccgctggctcccacttcctgcttatgcccttcctggccctttgcttcctccctttgtcccctcgtcaccatatccccactgctaccttgctggcccaggggaccgccctgcccaaccaaaccactcaggtaacaccactaatcaggcaggggcaccgtggcctaggtctgggctggctgcaggccctgcctcatggcccctgagccctccactgccccagaaccctgggccctctgcagatctcatcctggatnnnnnnnnnnnnnnnnnnnngacggaggnnnnnnnnnnnnnnnnnnnnnnnnnnnngcacccaggttagaaatgggggtaccagcacttagctcctctctgagtgctggctcccgaggaagggacctggggcctgggccacagtggggactcgcccttatctcttcagaaggaagcatcttccgcagcccccacccagctttcttaggagtggtctggtggccagaacagggttttgcactgccccttctatcctgcgcatgtggccgagggtcatccccagcccatccctgtgtcagccctgnnnnnnnnnnnnnnnnnnnnnnnnntgaggaagaggagagagagaagagatggaca

SEQ ID NO: 15568 - DNA, 755 bp, Macaca Fascicularis
  misc_feature (1)...(755): n = A,T,C or G
cacatgtagggagagagggggagaccaaccccctttgtgncttttgaaatacgaagaaaaatgtgtgttcaggcgctcttgggcccagttcagtccgtcttgtctcaaatctaggcatttttgcttcaattttattttttttaagaaaacaaaaacagaaatctgcactaatttacctggtttcgtaggaaaacttttttttattttttacattttttggtgtccgtttgtattgaataatttgctacatttgtaaaatgtaagaggtatatataatatatgtatatttctaacgtaaaaaacataatttttttcttttcaagattttttcttaagatgagagaaacatattttttcaggaaaaacaaactttaaaaaaaagaggagaataaaaccttttctcccctttccccatcctctatccctctttcccaggaacaaatcaaaaggtggattatcttgtgaagaatggaaaccgttagtccagaatgatgtctttttctcaatgcagtgagttatagattctctagttttctccctagggatgggaagggggcattgaggcaagcctggagaggagcccggggagcagggtcatgaacttttttctttagtgaaggaggaatacaatcaagggttttgtattcagaatgttgtgcaatattttggaatgggacattggtgtgtttagagattttagtttaaaaacaaaacaaaaagattgatcaaatctgtacagtttctattgttccaga

SEQ ID NO: 15569 - DNA, 710 bp, Macaca Fascicularis
  misc_feature (1)...(710): n = A,T,C or G
gcctgaatgacagggtatatataggaaaaagatatcactatgatattcggctacccaacttcnatcaaatgtcaagtccagaaatacgcagatcacccctgacacaacattttcnnnnnnnnnnnnnnnnnnnnnnnnnnnnacatcaaagtctgaaatttataggtataaaaaaagactctctcttcatcattccccaaatgaaataggaaaatacaaaaaaaaagagctccctaatatttttataaatcaaattcagaagtcagataccattgctaactgttttattcctttcaacaactgcattgtaaataaattttacaaatttttcttgtatttcttattgttataattgaggagggggtggataactatgggcagtttgcccttttctgcatcaaaactgggagaatgaaattccacattctcaattcttttctcacatttactcaaatgcattgtcttgccctatagactcagcggttgcttctcaagaagcagccagcaagtattctcagcttcagggtgggttgctactgtccacataagcatttccagaattcacttttttgctacaacctccagtgaaagcaagatgtattactgtggtgggcagcaattatttattttaaatgtgcagttacttgatatgactaaaaagtagaataaatgcaagagataatatgtgaatcttgaagcctattttattg

SEQ ID NO: 15570 - DNA, 731 bp, Macaca Fascicularis
  misc_feature (1)...(731): n = A,T,C or G
aaagagaatagaaaacacgcatgagatattcagaaaatactagcctagaaatatagagcattaacaaagtaaaattaatatattaagttataattggaatatgtcagaagtttctttttacattcatatcttaaaaattaaagaaactgattttagctcatgtatattttatatgaaagaaaacacccttatgaattgatgactatatataaaattatattcactacttttgaacacattctgctatgaattatttatataagccaaagctatatgttgtaacttttttttagagaatagctttatcttggtttaactttttagttttattttaagaggggaaaacaaaaatatcttgcaagcagaaccttggaaaaaaaaagccatgaacacttattctatatgtaaattaaaagttgagccaaactctttgtgtatatagcatcttaaatatattatcacctttgatgtaagtacctatgtattgtatggtcaccagattaaaaagtatatttttgtggannnnnnnnnnnnnnnngggaaaaggcgaggtcctttattaagtattcactgtttaatatttactattttgttaaatatactgtactttggattttaattattagcccagttttttcagaggattgtataaaggggtttctcccctcactggtggtgaatgtgtgatgttacattgtaatctttgtgctgtatgggttgagcatcattat

SEQ ID NO: 15571 - DNA, 722 bp, Macaca Fascicularis
  misc_feature (1)...(722): n = A,T,C or G
gaagacaataaaaagggtccattgacaattgcacagaaaaaagcccagaacatcatggagtcctttgaaaatccatttagaatgtttctgccctcactaggacaccgtgccgtctctcaggcagcgaagttcgatccatcaacaaaaatctatgaaatcagcaaccgttggaagctggcccaggtgcaagtacaaaaagactctaaagaaactgtcaagaagaaggcagctgagcaaacagctgcccgggaacaggcaaaggaggcgtgcaaagctgcagcagaacaggccatctccgtccgacagcaggtcgcgctagaaaatgctgcaaagaagagagagcgagcaacaagtgacccaaggaccacagaacagaaacaagagaagaaacgactcaaaatttccaagaagccaannnnnnnnnnnnnnnnnnnnnnnnnnnnnnnnnnnnnnnnnnnnnnnnnnnnnnnnnnnnnnnnnnnnnnnnnnnnnnnnaaatccaaagctgcttctcagtttgatccaaataaannnnnnnnnnnnnnnnnnnnnnnnnnnnnnnnnnnnaaaattaaacagtcggtgggaaacannnnnnnnncctttccgacgggaaagtcagacagaggcttcaggtacaactggccacagagatagtcctggaagacacgcagcacccgtggaccagaagcaccaaatgccagtgctgcttttgtacagac

SEQ ID NO: 15572 - DNA, 525 bp, Macaca Fascicularis
  misc_feature (1)...(525): n = A,T,C or G
ccttttttttttttttatacttgaaatgaaatcctttgcttcttttttaagcgaatgattgcttttaatgtttgcactgatttagttgcatgattagtcagaaactgccatttgaaaaaagaagttatttttatagcagcaaaaaaaaaaatgaatacagttaaatgtattatacataattttggaaccaaagaggccaacagatcagttttaattttattagacggtgaggccatctgagatgaggtagacgttctgaacagtcccttgagtggcctgccaatgtttcagggtatgaatggattttgtttattcggtttgatgtgtcttttccatccttacgcacccagaaggtagagtaaaaatgactatgatagaatgcaggtgtgtatccttaaatcccatctttatgtttatttaataaagctccccttaggttctgtttcataataatttaaaaccaaacaattttcccatagacttgctgttaaagtattttacgtttngtacagttaagaaaataaa

SEQ ID NO: 15573 - DNA, 163 bp, Macaca Fascicularis
caaagaccgctacatctctcaagatgttcctgcgtggggactcggtacatcgtaggtcctgcaggaacccgctcatcgccggcaagtaggggctgcctatccatcgacagaactcactctctcgtcctatgaagaccattgccattggtgtgagaataataaa

SEQ ID NO: 15574 - DNA, 1056 bp, Macaca Fascicularis
  misc_feature (1)...(1056): n = A,T,C or G
acaagtgtgcgttttgctgtgaccgggaggcccggctggacagactcntnnnccagatgtgatggagcnnnnnnnnnnnnnnnnnnnnnnnggcagtgtgctctccctccagaagttctggcagcaccgcatcaaggactatcacagttacatgctacagattagtaagcaactctctgaagaatatgaaaggattgtcaatcctgagaaggccacagaggnnnnnnnnnnnnnnnnnnncaaggannnnnnnnnnnnnnnnnnnnnnnnnnnnnnnnnnnnnnnnnnnnnnnnnnnnnnnnnttctggagaccagtcactgcctatgggagtgcttggggctcagagtgaacgcttcccatctaacctggaggttgaagcttcaccacaggcttcaagtgcagaggtaaatgcttctcctctttggaatctggcccatgtgaaaatggagcctcaagagagtgaagaaggcaatgtctctggacatggtgtgctgggcagcgatgtcttcgaggagcccatgtcaggcatgagtgaagctgggattcctcagagccctgatgactcagatagcagctatggttcccactccactgacagcctcatggggtcctcccctgttttcaaccagcgctgcaagaagaggatgaggaaaatataaaaggaaaagagggagattttttgtccagacctactagacccaacagaaaacgtttttgtattagaatctgtttccataaaaattgatttgactcctgttcttaaacacaagtggtttttccttattccagaggacctggacatcaccaaacaaggttgcattttacttttgcatccagtttttatagttttccacaaccaagccacctttcacagatgaaatatgatgctggcatggcaatcaaagcaaagcaccgtcctcgactgttgtcttaactatgactagacatgttacttagcttctctacagccatttctcttgtacaactgagaatcatacttctttgacctaccttacagagatgtgaggatttaggtgtttgctaacttcaaaac

SEQ ID NO: 15575 - DNA, 772 bp, Macaca Fascicularis
  misc_feature (1)...(772): n = A,T,C or G
cagatgatgtnnnnatnagagtcattttcagnngacaaccaacataaattcaacnnnntaatcttatattcaactaccagaaaggaaagagatagagcaagagaagagcatacaagtgcagttaacaagatattcagtcgacagaatgaaggtgatgatcaacaaggaagccggtacagtgtgattccacaaattcaaaaagtgtgtgaagttgtagatgggttcatctatgttgcaaatgctgaagctcataaaagacatgaatggcaagatgaattttctcatattatggcaatgacagatccagcctttgggtcttcgggaagaccattgttggttttatcttgtatttctcaaggggatgtaaaaagaatgccctgtttttatttggctcatgagctgcatctgaatcttctaaatcacccatggctggtccaggacacagaggctgaaactctaactggttttttgaacggcattgagtggattcttgaagaagtagaatctaagcgtgcaagatgattctcctttcagatcttgggaactgaaaccgtttgaaatttattactaaggtcatgatgtgaatatttgctcagttaacctaccttgtcctgcctttttgcagatgggctttaaattggacagctataactgctgtgtttttgatattatttttactctttaccataaatcaattgcaagaaaagagtttcaatcctagtatttagccnnnnaaatgaacctttaaacattttttttggtaatttttata

SEQ ID NO: 15576 - DNA, 764 bp, Macaca Fascicularis
  misc_feature (1)...(764): n = A,T,C or G
cacnnnnnngcagaaatcagtcttacnnnnncagagagannnaaagggattcttagaaggagcttgctgcaagaaacacggcnnnnnnnnnnnnnnnnnnnnnnnnnnnnnnnnnnnnnnnnnnnnnnnnnnnntgtggnnnnnnnnnnnnnnnnnnnnnnnnnnnnnnnnnnnnnnnnnnnnnnnnnnnnnnnnnnnnnnnnnnnnnnnnnnnnnngtacctcttgccttttctgggcttgtgtttctctcttctagtgggtggggatgactttcaatacttccccggaaggaagaatgataaggagaaatgtctgttttgaggaaagggctttgaattccctagggccagatactgaacaatttgtgtttgtgactgatggagaatttcaggaatgaatgagacagcctttgcgaaactatgcaacagtttacatcagtcatgtgaagtatttgtctaaaacagagcaaactgaagaccaaattagtctcctgttgaggtccatggatggcagatttaaagggaagaaccacaaaggcttgcaaagataggagaagctccatctctaaagcatgtagaagctccttacgggtgcccatcaagagcagagcttgggagccaccatgctgtgnnnnnnnnnnnnnnnnnnnnnnnnnnnnnnnnngatttccccagcccagttccatcatcacagacacagctgcaggggaggcctgttcactgttttggcgactctgctcctttggcannnnntagatcctta

SEQ ID NO: 15577 - DNA, 953 bp, Macaca Fascicularis
  misc_feature (1)...(953): n = A,T,C or G
taaatgccattgaacatgtcatcatcccccggattgaacgtactcttgcttatatcatcacagagctggatgagagagagcgagaagagttctataggttaaagaaaatacaggagaagaaaaaaattctaaaggaaaaatctgagaaggatttggaacaaaggagagcagctggagaggtnnnnnnnnnnnnnnntcttctagctgaagagaaggatgaggatcttctgtttgaataatctttcctgttctggttcttttagaaaccctaacactggcttcatcttaattcatagtgtgtaggtttgatttgtctggctatttattttttggcctaagaatttcactggttgtaacatttacctggatgtctgtttatgggattacttttgcagaatcataatttagcaaccatttatcatggatgaaagagatctgtaaaacctgcccaggaacttaaagaatttactctgaagtgttatcctactccatttacatctgtgttacacgtgctgtgcttaccaagcatattaggaaatacctcttaggaagcattagtggtctcaggccaattactgtggagcagctttcattcctaccctcttgcaaaccttggcgctgttgtctgaaattgctgcagccattcttgtgttaccatggtacttctcaaactttgtgaaaacctgcacttttccttgcatgacaggtccctgtcttgtctgtcatgggagcagttcccccaatttaaatgtgactgtggtataaacagagtaaaatgatttaaaaataagtcattcaatttttattaatttactgttgtcatgttctcatgctcagatcagtagtgtcagccagagctttctctgcagacatgtaggaagtgagtggccatttttccccctccatgtattagagttttacaaaaaggcttactttgagacaactgttgcgtt

SEQ ID NO: 15578 - DNA, 717 bp, Macaca Fascicularis
  misc_feature (1)...(717): n = A,T,C or G
tccaggatctcacggtatccgatcccannnacgtgtaccacnggtagtcactgctacaatgtgggctgtccttgagctaggtgctgagacaggtgtgcaaagttctgaccttcagtggatgagaaatgtgatcagagtgatgccnnnnnnnnncnnnnnnnnnnnnnnnnnnnnnnnnnnnnnagtgtttatatactggctctccnnnnnnnnnnnnnnnnnnnnnnnnntatcctgtctccggattccagcagtacgcactgtacttaaannnnnnnnnnnnnnnntacatgaccctgacaaattacctccacgggaaggcttcctagagagcttcaaaaaaggctggaaaaatgctgaaatggcgcgtcagctgcgagagcgtgaacaacgcannnnnnnnnnnnnnnnnnnnnnnnnnnnnngtcccttacgacagacctttacccacaaccctnnnnnnnnnnnnnnnaataataaccctcccaatatcnnnnnnnnnnnnnnnnnnnnnnnnnaaccaaagtcaaagtatccctggnnnnnnnnnnnnnnnnnnnnnnnnnnnnnnnnnnnnnnnnnnnnnnnnnnnntctcttcaaagactcatcctcaaaacaagacttgacactgtgtccttgcctcagtcctaggaactgtggcannnnnnnnnnnnnnnnttaaaaacaatttcacgaaacactcttatactcatgt

SEQ ID NO: 15579 - DNA, 725 bp, Macaca Fascicularis
  misc_feature (1)...(725): n = A,T,C or G
gagtcatatttaaaactatttattagtgactacagtacatgagacaacaaggttactgagattacaattcttcaaaggttaatgataatgtggtttatactgtgccttaatagtaatgctatttaagatatttatttttaagttttacnnnnnnnnnnnnnnnnnnnnnnnnnnttagatgtgacactgtaaaattatgtattcatctcatggcataaattatttagtaggtctagatgtagcgtattaaatattaacctattcaactaaagatgttgacttggatttatttaaattcatatgtgcactgtataagagagtactcttacattaacacattttagtttagtttttagattttttttcaaacagnnnnnnnnnnnnnnnnnatgcttcctcctctgattttgcctgtgtagatcnnnnnnnnnnnnnnnnnnnnnnnnnnnnnnnnnnnnnnnnnnnnnnnnnnnnnnnnnnnnnnnnnnntcttctgaaactgcaatacttgcaatttttattcttaaactaaattgaatactattttacactgtattggatttttatacttgaacaatttcatacaagggaagacaggttagcatttttatggactttctccattatcactggatttactttnnnnnnnnnnnnnnnnnnnnnnnttatgtagacatgactctcctgtgcaaattaattattcgttgtgtatattgctttataac

SEQ ID NO: 15580 - DNA, 358 bp, Macaca Fascicularis
  misc_feature (1)...(358): n = A,T,C or G
ccggctgcgcctggtccgcaagggcaacgagcagcacgcctttacccgctgcttccatgcctggagtgccttccgcaagaccctggcctaagacaggctggcacagccccaggcttggtaaggaagaggaaggggccctcatccactgtctgctagcaaagaatatactgaggtgannnnnnnnnnnnnnnnnnnnnnnnntgtcacagtccccagtagcctcaagcagcnnnnnnnnnnnnnnnnnnnacaggtgcccttaggggtctgggaaatccgactccctccacagtgtgagcacgtgtgaaaccccctcacttttctgccagggataaagcagatngnctgcccttaagag

SEQ ID NO: 15581 - DNA, 696 bp, Macaca Fascicularis
  misc_feature (1)...(696): n = A,T,C or G
tgaaaatggagaaaggggaaatgtatggaaattctccaagatttttaggtgccacaaatttgactatgtattctaagatctcaaactgtcagatannnnnnnnnnnnnnnncttatactaacactgatgttccaatacaagtgaatagttccaaattggnnnnnnnnnnnnnnnnnnnnnnnnnnnnnnataatatgaatacagaaattgctacttacaagaagaaactgagtactaagcagctannnnnnnnnnnnnnnnnnnnnnnnnnnnnnnnnnnnnnnnnnnnnnnnnnnnnnnnnnnnaagtttacatttacaaggatgaaaaattctcagattctttctcagtttaatcaaaattatatannnnnnnnnnnnnnnnnnnnnnnnnnnnnnnngggtgtggagaaaaagaaaagtgtcaacccattgctagaggaagctgnnnnnnnnnnnnnnnnnnnnnnnnnnnnnnnnnctttgaaacaatcttcaaaagaggaagaagagaaaaatagaaagtgttctcctgaagaaattcagagaaaaagacaagaagcgctggttcggagaatggctaaagcacgagcctcatctgtaaatgcagctcccacttcatttctttaatgaaatattggaagacttcacaaagactgctgataactatctgtgataggacatgtttttttcttga

SEQ ID NO: 15582 - DNA, 756 bp, Macaca Fascicularis
  misc_feature (1)...(756): n = A,T,C or G
tactacatgcatagcaaaaggttaagtaagttttgttctccactgaagtaatacttaacatctcagaaaaaatcttgcatgttctgtagttttgtattaaatcagtcattttatatgcactatatcaagtacaaacaggtagtttacctgtttatagtagtgtactaacaaagtctcccttgcagcttcagactggtatctataggcttatcgttcaaatacagcacttgaatatctcaagtagttcttctacgcatagctcacctttctaaacccagttaagcatggaagagaggtagtaggtaggtgcagtgtgtggaagctgcagacaagtaggccttttattcattgatttcttttcccaagtactggattttaaatctatatgtatctatttgattttttttctaatatttcaattgagctgnnnnnnnnnnnnnnnnnnnnnnnnntactcaattgtgtatagaagaagctggtgagagtgccctcctacataaataagcaattgcagtgttttgcatgcaaaatataaaaaatttaaattgtcctgattctattttgtaaatggagaaacaatcatatctttctaagcagtaatggaggaagactagtgctttgtgcattttgatatatttgagttcattttttccacaatgtcatacttttgacacaattgggtttctcataagtatcctagttcatgtacatccgaatgctaaataatactgtgtttaagttttgtgtgcaagaaca

SEQ ID NO: 15583 - DNA, 721 bp, Macaca Fascicularis
  misc_feature (1)...(721): n = A,T,C or G
ccagaatgttacttnnnnnnttgccaaaagagttagaagtaaaaagagatcggatggtacatttacttgaaagtgttggcctaaaacccatagttcnnnnnnnnnnnnnnnnnnnnnnnnnngatgtgtctttgctagatccagacctctctgatatgaagaataatgagccgtatgactannnnnnnnnnnnnnnnnnnnnnnnnnnnnnnnnnnnnnnnnnnnnnnnnnnnnnnnnnnnnnntaactcagagactaaatcacagtttgagaagtttgtgcgattttgcttcattaaaaaggacagcacannnnnnnnnnnnnnngaaatcatcaaggcatggagtgtacagaagtcttgatatgtgcagaatggattaatgtttgttagatgacctagtatggaattgttacttagtgctgccacctgctggatgttaaaaggtatttcggtacaactggaatttaaatatttacattgtttttccaaagcagttaacccaactcctaacaatattcaggggatctgaccttttttttcagttgaaatgtattaacacatcttccatgatcattttttaagagagtcagcataacatagtggataagaactgtgagatgtttaacctctcagtaacttggttccttcattataaaatgggaataaaatcagtacctgtttcatatgaaggtcatttctgagaattaaatggactaatgt

SEQ ID NO: 15584 - DNA, 825 bp, Macaca Fascicularis
  misc_feature (1)...(825): n = A,T,C or G
cccacacagacgtcaagnnnnnngacttctnttactacnnnnnnnnnnaagttttagatagtacgaagtcttccagagagagcagcgaggctaggaaaggtttctcctatttggtaactgcagtaactactgtgagtgttgcatatgctgccaagaatgttgtcacccagttcatttccaccatgagtgcttctgctgatgtgttggctatggcgaaaatcgaaatcaatttatccnnnnnnnnnnnnnnnnnnnnnnngactttcaaatggagaggcaaacccctgtttgtgcgtcatagaacccagaaggaaatnnnnnnnnnnnnnnnnnttgttttgtcccagttgagggacccacagcatgatctagatcgagtaaagaagcctgaatgggttatcatgataggtgtttgcactcatcttggttgtgtacccattgcaaatgcaggagattttggtggtttttactgcccttgccatgggtcacattatgatgcatctggcaggatcagattgggccctgctcctctnnnnnnnnnnnnncccccatnnnnnnnnnnnnnnnnnnatatggtggttgttggttagagacttggactcaagtcataggcttctttcagtctttacgtcaccttagaagacttatttgagagcaagccttctgtacctgaagttgatttgaaatatgtaagaattgatgatgtgtttgcaacattaatgtgaagtaaattgaatttaatgttgaatactttcaagcattcacttaataaagccgctgttaagcattgttgtgctcagtcatacatttgaaaggtacaatgtc

SEQ ID NO: 15585 - DNA, 679 bp, Macaca Fascicularis
gatattaaagttaaaccatccactccctcaccttcagccttcagtgaatgtgctttctagttgtcaggaatgctgaagaattaacactttgactcttaaatatgatactggtttgcagattcccttagagcagaaaggagaggggcacatattaatttgtattgcttttgcttctctttggtcttttgtgtcttaggatttggaagtggttcatttctattgctggtatgaggatttcgaatacttagtaatcaaaaccatatcctataatttaattaaaaaaactaaggaagaaaaaaccctccaattttcccaaatgcaatcagtgtaactagaggctgtgtttctgcattaaaacaaatgtttcaggctttgtggtcctgatcaaggtcctcattaaaaaattgcagttcaccctaggtgcttttcccctctgtgactggcagataacacatacttttgaaagtaactttgggatttttttcttaggtgcagctcgattctaatgttttcatgctgcacacgattcctctaatgtagtgtccttatctgaaaaaaaaaaccatcttctcgacatgacctgcttaacccaaataagaacagtgatcttataacctcattgttccctaatcattttatatgatctcctgctagtactgtgccgcttccccttcccccc

SEQ ID NO: 15586 - DNA, 743 bp, Macaca Fascicularis
  misc_feature (1)...(743): n = A,T,C or G
gcatggagctgactagggaggggagggattcctcatagaggaatacagcctgggggtaaggtacctctttacttctagaatgggccctgaggttttacttatagggccctgggtgctggtgtctgggaactctcaccagcctgtataccagtcttgctttagggtgacctggccctggaacatgggtagctggcatagaggggtatgggttgcctgccccannnnnnnnnnnnnnnnnnncagtcctttccccttccctcgctgggcagcttggaggtaccctaacccaaaactcttgtcctctcctcccgccagtggctgacagtagctgtaggtgtagttgagaacttttctgcctctgctgtgttcttgctgctcagggtggggaggggcactaacagctggtgggaggggagctaggggcagggagaactggtcagactcaaggtggctcctctgcaaactgaccccagggttggttgctgtgggcatgttccctcttatgctacctttgcagtcttgtagtcccctggcccttggtgtacccctccacagccctgttccctggctcattccaccttnnnnnnnnnnnnnnntcgtccgcatggtgctgaatggctgaggaccctcccagtctcccgactccgtgcctttccctgtgtgaattttgtatctagcctgaagtttccctaggctctcttgtctcagcacctttcccatcttgtctcttggatgatgtttgc

SEQ ID NO: 15587 - DNA, 737 bp, Macaca Fascicularis
  misc_feature (1)...(737): n = A,T,C or G
actcaaagaagaagctgnnntgcnnngcagtgctcatccacccgtcctgggtgctgacagcggcccactgcatggaggagtccaagaagctcctcgtcaggcttggagagtatgacctgcggcgctgggagaagtgggagctggacctggacatcgaggaggtcttcatccaccccaactacaccaagagnnnnnnnnnnnnnnnnnnnnnnnnnnnnnncctggcccagcccgccaccctctcgcagaccatcgtgcccatctgtctccnnnnnnnnnnnnnnnnnnnnngcgannnnnnnnnnnnnnnncaggagaccctcgtgacgggctggggctaccacagcagccgagagaaggaggccaggagaaaccgcaccttcatcctcaacttcatcaagattcccgtggtcnnnnnnnnnnnnnnnnnnnnnnnnnnnnnnnnnnnnnnnnctgagaacatgctgtgtgcgggcatcctcggggaccggcaggacgcctgcgagggcgacagtggggggcccatggtcgcctccttccatggcacctggttcctggtggnnnnnnnnnnnnnnnnnnnnnnnnnnnnnnnnnnnnnnnnnnnnnnnnnnnnnaccaaagtcagccgctacctggactggatccacgggcacatcagagacaaggaagccctcgccaagagccgggcaccttagcgaccctccctgcagggctgggcttttgcatggcgatggatg

SEQ ID NO: 15588 - DNA, 757 bp, Macaca Fascicularis
  misc_feature (1)...(757): n = A,T,C or G
gatgaggcatgttatatcttgctttacaaagttatgaagttcacagctttataccaaaannnnnnnnnnnnnnnnnttataaacatttttgcagtcatctgatttcattcttgtaatccatattcaatattaaaaaaatcagaaaccaagggtgctggagcagctctagggcatatatttctcttaaataggagaaagattttcaacagcttttcctccttgacacgctcctctcccagtttatttgggtcactacctcgagtttagagtgaatctgggaaattcagtcaccaggtaacccagcagggctgtacacttgggcttggaggaggtgaggttagaggttactgtctaacacagtaggtctggtttctatgaggagctcacatccacttgcatagggaactcagtctatcccaaatcacctccaccacaacttctattcccgtctgtgagaccgcttctcttaaacccgaggaacctgatgatttgggggcaggaataaaaccattattttataaatgtggcaggtatggccttcataattctagaagctcccgtttaggtaacagaaacaaaattgagaagcaagcataaactgcagttatttgagcaaaccagagcatatgtgctgttcaaatcccacttcacaatatacttcaatctcacctccaatgaattctcttccataaaatataccattccactaagtatatacctactnnnancaatcattcacatgcctcatcactaaagt

SEQ ID NO: 15589 - DNA, 659 bp, Macaca Fascicularis
  misc_feature (1)...(659): n = A,T,C or G
accacgggcccgcncagcnncacgcgcaccngcatccacacccacaccagcaccaccacgcgctcccgcacccgccgcctccgcacctgtcggtgccgccacggccctggagctacccgcgccaagcggaatcggacatgtccaagccaccgtgttacgaagaggcggtgctgatggccgagccgccgccgccctacagcgaggtgctcacggacacgcgcggcctctaccgcaagatcgtcacgcccttcctgagccgccgcgacagcgcggaaaaacaggagcagccgcctcccagctacaagccgctcttcctggaccggggctacaactccgcgctgcacctgcccagcgcccctcggcccgcgccgccctgcccagccctctgcctgcaggccgaccgtggccgccgggtcttccccagctggaccgactcagagctcagcagccgcgagccactggagcacggagcttggcgtctgccggtctccatccccttgttcgggaggactacagccgtatagaggggcgcccggcgccccgggccccaccggcggactcctggcctgactgcggggctttttaaatgcttccctggactgcggggaggggcggggggagggagggatttcttatcccgtnnngttacatttgaggat

SEQ ID NO: 15590 - DNA, 764 bp, Macaca Fascicularis
  misc_feature (1)...(764): n = A,T,C or G
cagacagtacannnnanaaaggacttcagnnnnnnnnnnncagcatgggcaaagttatggagacatgcaaacatctccctcttctctcccttactttccaagcaagttaggtgcgctttccttggggattctggcctgtgtggtaggaagggatctcccttgctcccatgttgctgactgtccttgcatcaccctgtcccctgcaggagggggctacaggccatctccctcctgtaggcctctgactaccctccacttttgggcccccagcttctctcaggtaggagaccattgcagcatccttccctccttgggttcagggtgctgaggtataagccctgggccccagatccctggtgacaccttcctggagaagactctcgaaagcgactnnnnnnnnnnnnnnnnnagcaataactccccacactcgaagcaggtccaaacccaggatcccagggtccttgggctccttggcactgtcttccccagatccctcctgttgcacaatgggaaacctaagaggaaaaagacaggggcctgcctgcctgcccacccgctctctgcctgnnnnnnnnnnnnnnnnnnnnncgctctgggttgggttgtgctgtctctgacctatgtttacatccccaaggagttactgcctcctccccacccaggtcagggtgtggtccagcagcttgttgtggggtgctgacctgtgtcaccactgccctccttgcccccaggggggtcatggtctcctcctggatactgctgct

SEQ ID NO: 15591 - DNA, 519 bp, Macaca Fascicularis
agaacagcgtcgtggctgctggccatgactgctgcccaatgctcttcaactacgatgaccgcggctgcctgaccttcgtctccaagttagacattccaaaacagagcatccagcgcaacatgtctgccatggaacgcttccgcaacatggacaagagagccacgactgaggaccgcaacacggccttggagacgctgcaccagaatagcatcactcaagtctctatttatgaggtggacaagcaagactgtcgcaaattttgcactactggcatcgatggagccatgacaatttgggatttcaagactctcgagtcttccatccagggcctccggataatgtgaagctgagtgagcctccgccatccagcatgacaaactgtggccgaccgcagctgtgccgtggcacgatggcgaggaagccagccccaaggaaacactgaaaacatatcacgcccaatgccgtgtggttttgtttgaatataaaattggtgaaagatgttggttttttaaaagccag

SEQ ID NO: 15592 - DNA, 763 bp, Macaca Fascicularis
  misc_feature (1)...(763): n = A,T,C or G
caggtgacattcactgtgaactacatttctttctagaattngagcagaacagtgttgggaggcagttttcactttctgtcccacccgctggttgacaagctggctagtgtgttcttggagttccgagtcacagtgagaaggatctctgtgtgcccttattctgctccacttgtgccctagtcagtttattgatagtgaatgcacagatcacagccttttacaaaggctagtgtggcatagtgtttttaggcgagtcggatagacttgctgttttaatcaatactgacatttattagctgtatggtcataagcaaattacctaacctctctgaagctcagttttctcaaagtaagattggactaaaaataggattattagtttaattgatttatgtgtgtcatgaggatttaatgaggtaatagatacataaaatatcagtattaatatttggtgtttattgttgaagctgctcagccatcactgtctttggttgaagggaaacagcttttgcgttctactctcaactcagctcatgagtatgcacagattgcttgtttgtttttcttttaaggaagacaatggtgtaaaattggttgatcctttgggtgaaatgttggcaccatcctgggaggaacatgccacctgtttagcaaatgctgaggaacaagatatgcagagagtgcttattgacatcagcgagaaagaagctgtgactctcagacaagatgcctttgtagttactggtagagcaaccaatttaca

SEQ ID NO: 15593 - DNA, 803 bp, Macaca Fascicularis
  misc_feature (1)...(803): n = A,T,C or G
tgactgagcannnngcatgtcagaagagagcagtgccagctatgatctgtatgnnntnnncaccactatgaggcatgattnnngccactacactgcctgtgcacgccngnnnaatgnnnnnnnnnnnnnnnnnnnnnnnnngggctnnnnnnnnnnnnnnnnnnnnnncggtgacaacggtagacgagagccaggttgtgacgcgttatgcctatgtactcttctaccgccggcggaactctcctgtggagaggccccccagggcaggtcactctgagcaccacccagacctaggccctgcagctgaggctgctgccagccaggcttcccggatttggcaggagctggaggctgaggaggagccggtgcctgaggggcctgggcccctgggtccctgggggccccaagactgggtgggccccccgccacgtggccctaccacaccagatgagggctgcctccggtactttgtcctgggcaccgtggcggctttggtggccctcgtgctcaacgtgttctatcctctggtatcccagagtcgctggagatgagctcgcctgcaggcagctgctgtgagctggcctacctgcctgccccaggccatgcctgcctttgttgtggggaacacctctgggctttgggcctcagcttgtgcatctggtgggagaggatggggaggctgtggcccctgcacgggcagagcatcgtagggtgtgtatccatccagctgtttgtccattcatcctgctgctctgacccttggcctcgggcttggccttgcccaagctacttcctgtactaaa

SEQ ID NO: 15594 - DNA, 409 bp, Macaca Fascicularis
  misc_feature (1)...(409): n = A,T,C or G
agcgagtcgaggaataggggcaaagctgggcctgcgtgagattcgcatccacttatgtcagcgctcgcccggcagccagggcgtcagggacttcattgagaaacgctatgtggagctaaagaaggcgaatcccgacctacccatcctaatccgcgaatgctccgatgtgcagcccaagctctgggcccgctacgcatttggccaagagaagaatgtccctttgaacaacttcagtgctgatcaggtaaccagagccctggagaacgtgctaagtggtaaagcctgaagcctccactgaggattaagagcaacagccccagagcctgggctctgctggacttagtataatgtgaaaaaaatgtgttcccctatttcctcantaaagcttgtgctgtaaaatactttctca

SEQ ID NO: 15595 - DNA, 747 bp, Macaca Fascicularis
  misc_feature (1)...(747): n = A,T,C or G
acagccagatgaggaactggtggtgccttcnctatttttgtccggaatgccatcctgggccagaaacagcccaagaggcccaggtcagagtcctgtcgcagcaaagatgtggtaaggacaggcttcgatgggctcggtggccggacaaaattcatccagcctactgacacagccatgatccgcccattgcctgttaagcccaagaccaaggctaagcagagagtgagggtgaagacagtgccttctctctcccaggccaagctggacaccttcctgtggtcgtgagaacagtgagtctgaccagtggccagacacatgcctccaacttgtaggatttaaggactgtccaggcagggggttttgtgggcagagccccactttcgggaccagcctgaggagtaagggcagacaaacaggtgagggggagtgtgacacccagaggctgctcttcctgccctcaccctgccccactcccatgactggaagctgacatgannnnnnnnnnnnnnnnnnnnnnnnnnnnnnnnnnnnnnnnnnggcttctgtttatagccatgatcagatgtggtcagactctttctgggcctggagaccacggtcgcttgttgactgtctctgtggaccagagtacttgaggcatctcaggcagcctcagcctgagcttctacctgcctttgacttgctgctaggcatagcctgggccaagcaggttggggaatggaggatagaatgggatgtatggagagg

SEQ ID NO: 15596 - DNA, 580 bp, Macaca Fascicularis
  misc_feature (1)...(580): n = A,T,C or G
tctagcccccnnnnnnnnnnnnnnnnctccatgtccctcccggccgctgcccccaccaccagcgtcttctccttctcgcctgtcaacatgatctccgccgtcaaacagaggagcgccttcgcccccgtgctgcgccccccgagctccccaccccaggcctgccccagagcccacggagaggggcttccagaccagtcttttgaggattctgacaagttccactctccagcccgggggcttacaggacttggcaatactcgtaattacgcgaaagggcggcgccccgaagcctggggaggcctgcccaggctcccatggagcttccaacagctgcttcgccccgcagctgcccccacttcctttgagacctgcactctcatgcttgccgcatcatgcctccctgtgggggctttgggcatggaggaggcagaagacggggtgccaggcctcctgtatttggatgtctcatggattctggcccacacactcacaatgactctggctggccccatgcagtgggcccagctgccccccaggtggcctcacattctgctctgctaagtttggagaaaacagaaca

SEQ ID NO: 15597 - DNA, 721 bp, Macaca Fascicularis
  misc_feature (1)...(721): n = A,T,C or G
gctttgtttgttctgnnncntcttgggttgcatgaagcagcaagcttttaccaacgtgctttgctggcaaatgctcttaccagtgctctgaggctgcaccaaagattaccacacttccagttaagcagagcattcctggcccaggctttgttagaggacagctgtcactacctgttgtattcactcatctttgtaaactcctacccagttacaatgagtatcttcccagtcttgttattctctttgcttcatgctgccacatatacgaaaaaggtccttgatgcaaggggctcaaatagtttacctctgttgagannnnnnnnnnnnnnnntaagtgctaatcaacaaaatattctgaaattcattgcttnnnnnnnnnnnnnnnnnnnnnnnnnnnnnnnnnnnnnnnnnnnnnnnnnnnnnnnnnnnnngctccaaccttttatatactatagatttcttactcttcgannnnnnnnnnnnnnnnnnnnnnnnnnnnnnttgtggtgccccaaaacagttataatagtaacaccaaagagcatgatcacagatcaccatgatagatacagtaataatgaaaacatttgaaatagtgggagaattggcaaagtgtgacgcagagacatgaagtgagcacatgctgttggaaggtggcgctgatagtcttgctgtatgcggtgttgcaacaaaccttcaatttgtaaaaaatgaaatatct

SEQ ID NO: 15598 - DNA, 563 bp, Macaca Fascicularis
  misc_feature (1)...(563): n = A,T,C or G
gcggcctgaggtaatctgtgaaaatggttcgctattcacttgacccggagaaccccacgaaatcatgcaaatcaagaggttccaatcttcgtgttcactttaagaacactcgtgaaactgcccaggccatcaagggtatgcatattcgaaaagccacgaagtatctgaaagatgtcactttacagaaacagtgcgtaccattccgacgttacaatggtggagttggcaggtgtgcccaggccaagcagtggggctggacacagggtcggtggcccaagaagagtnnnnnnnnnnnnnnnnnnnnnnnnnnaaatgcagagagtaatgctgaacttaagggtttagatgtagattctatggnnnnnnnnnnnnnnnnnnnnaacaaagcacataagatgcgccgacgaacctacagagctcatggtcncattaacccatacatgagctctccctgccacattgagatgatccttactgaaaaggaacagattgttcctannnnnnnnnnnnnnnnnnnnnnnnagaaaaagatatcccagaagaaactgaagaaacaaaaactt

SEQ ID NO: 15599 - DNA, 1562 bp, Macaca Fascicularis
  misc_feature (1)...(1562): n = A,T,C or G
ggaatatgtcacannnnnngatagggacctgtgacatgccagcatcaaggggtaacaccataaattcatatatatgccatctgtcctcaaataagtgttatctacataggaaataaaatggaattgatgtaaagttccatttctgacagctgacatttattaagctttggatcaaagataatgtgattcttatgactgacttttcaaattagcttttccctcccaagtccaggaccctttaatttcctgagtcaatcagaaatatatttttcaataatgctaaaattagctacaattctgctgaccctactattaaacaatctggattctggactcattgacaagnnnnnnagaagcaattttgtaatagatttcatgttaacaaaatactgattcaattttcattattcttgggaaatgtcagctctgccttaatgagtatttgctttaaatttctaagaatttatatcataactagagacccaaatatctttcacagaattttgttccataaatgtttttaattaagaagtgttaccttattaaaatgaccaccattctaaaccatttttcagtggtctggatactaagtttacagtttcataccaactatctaaaacctaattgcaaattgaccacagacctctaacctcctgcttttacagacttgaatacttaagtaatttaaattagggttggtattacattttttcttatctaaaccttagtttcctggaataaagtttgatgttcagcaagaaaactgcttgagtttaagccattttcaaaagaaacttgccttctacattattgtgttccagaacattaagtgactgtaggtaccgggtattagtgatggtaaactttgtgttgttctttatgaaatgattcatattaactgttgggtgcatcagtgcttttcaaaggggctgcttactatagggttaactatgtatattcattgttaagagttaacttgtggtttggctgtttcctggattttataacatatacatgtgcagaaatgnnnnnnnntgaaaggaagcatacctttattaagatgctattaaaattgaacatcaagtataatatttcatttggattctttttttggttaatgcctaaaaatgcctatttgggattttttttttttaattaagagaagctctcttctgtgtagaacagttgttcnnnnnnnnnnnnnnnttttgttttcctgttgcatgacagatttaactattatttccagcagtggaggtgctgtcagagtccagtgttctagaagaggcagtgtctaaagcctaattttacttttctaattctggtagctactaccaggaatttttggaagttttgtttannnnnnntaatattttttatgtaaagagcattaaattttgctatgtataaatttttgtaacctaacagtgaatcaatattttctatcagtgccaagggcttcctgtagttctattcaagtgttacaataaatatttgtagataatagtcgatacttgtgtatgcttattttaaatatctatttaggtggaaatagttgtgga

SEQ ID NO: 15600 - DNA, 725 bp, Macaca Fascicularis
  misc_feature (1)...(725): n = A,T,C or G
tcaatgctaacatgattcagctccaactttcatcaactnnnnnnnnnnagggaaacccaaacggggtgatacatatgagttacaggtgcggggttnnnnagctgagcagattgcccggtggatcgccgacagaactgatgtcaatattagagtgattagacccccaaattatgctggtccccttatgttgggattgcttttggctgttatnnnnnnnnnnnnnnnnnnnnnnnnnnnnnntatggaatttctctttaataaaactggatgggcttttgcagctttgtgttttgtgcttgctatgacatctggtcaaatgtggaaccatataagaggaccaccatatgcccataagaatccccacacaggacatgtgaattatatccatggaagcagtcaagcccagtttgtagctgaaacacacattgttcttctgtttaatggtggagttaccttaggaatggtgcttttatgtgaagctgctacctctgacatggatattggaaagcgaaagataatgtgtgtggctggtattggactcgttgtattattcttcagttggatgctctctatttttagatctaaatatcatggctacccatacagctttctgatgagttaaaaaggtcccagagatatgttgacactggagtactggaaattgaaaaatgaaaactgtgtgtgtttgaaaagaagaatgcaacttgtgtattttgtattacctc

SEQ ID NO: 15601 - DNA, 723 bp, Macaca Fascicularis
  misc_feature (1)...(723): n = A,T,C or G
annnnnnncaaaacacaagagaattactcattgtgaaaaggaatacattctttcatcattaagaaatcagctttcttcacagaagtcagtgccgtgggtacccattttaaaatccctgccactttgggctattgtagttgcacacttttcttacaactggactttttatactttattgacattattgcctacgtatatgaaggagatcctaaggttcaatattcaagagaatgggtttttatcttcattgccttatttaggctcttggttatgtatgatcctgtctggtcaagctgctgacaacttaagggcaaaatggaatttttcaactttatgtgttcgcagaatttttagccttataggaatgattggacctgcagtattcctggtagctgctggcttcattggctgtgattattctttggccgttgctttcctaactatatcaacaacactgggaggcttttgctcnnnnnnnnnnnnnnnnnnnnnnnnnnnnnnnnctccttcgtatgctggtatcctcctgggcatcacaaatacatttgccactattccaggaatgattgggcccgtcattgctaaaagtctgacccctgataacactgttggagaatggcaaaccgtgttctatattgctgctgctattaacgtttttggtgccattttctttacactattcgccaaaggtgaagtacaaaactgggctctcgatgatcacca

SEQ ID NO: 15602 - DNA, 754 bp, Macaca Fascicularis
  misc_feature (1)...(754): n = A,T,C or G
gagnnnnnnnnnnnnnnnnnnnnnnnnnnnnnnacacacacgtacatatctagaatgtgtatccacggggcccagaagactcggttcggcccccacctgtgagtggggcagggagcggttccggttgtgcagagaacagagtgttctggcaaagaggaaatcccgcagcagcgcagaggacctgggcctggaggggcagggctggggcaacccagcttggcggcaaagcccagcccttctcagaccagctccccacattcctgaattccacttccaggcagaaaggagtgggctccccctactccctcagaggaactgactcactgactgccctagaatgggcaaggtcagagcgaagttctggatgggatgactgcactaggggaggggcctccgtccagaaacctcgaccgccagctccacctgccttggccaccagggtagccccggggaatccgggctgctgggcagcaggttggcgggaccacatgcctgggtctcaccctcagccccgagggccgagggctttccccacccccttctcctcctggccggcagtcggccctgtctatttatgtgcgccagccgtgctggggggcccccatgtgtgccccttggtcacatgtatcgtctccaaggatgttttgctgctgtggctactatgcctgtgtcccctcctggcccatcctcatcttcatctgtgtaactgcctgttctccttttctagtttctgatgttgtaaccagacccagct

SEQ ID NO: 15603 - DNA, 735 bp, Macaca Fascicularis
  misc_feature (1)...(735): n = A,T,C or G
caaagtatctattccatgcaccctatgcccagagacagctgggatgttctactccaagctctgttgtcttttctctttggagtaactggggaggtgtttctctgggtcttccttctgcccccaggatcctgtgctctctgggtgtcccagccccctgnnnnnnntaccnnnnnnnnnnnnnntgccttcctgccctgctccttcaatgccagccaagggagactggccattggctccgtcacatggttccgagatgaggtggctccagggaaggaggtgaggaatggannnnnnnnnnnnnnnggccgcctggccccactttcttcttcccgtttcctccgtgaccaccaggctgagctgcatatctgggacgtgcgaggccatgacgccggcatctacgtgtgcagggtggaggtgctgggcctgggtgtcgggacagggaatgnnnnnnnnnnnnnnnnnnnnnnnnnnnnnnnnnnnnnnnnnnnnnnnnnnnnnnnnnnnnnnaccccaagaggcaatgtccttgggagtcagggatgctcctctgaggcccctaccctccctgagcctgtgtgcacttcttccccaacccccttctacattgccccatgcagaatatcctcagctaggggctggtacagtcctcctccttcgggctggattctatgctgtcagctttctctctgtggccgtgggcagcnnnnnnnnnnnnnnnnnnnnnnnnnnnatgga

SEQ ID NO: 15604 - DNA, 783 bp, Macaca Fascicularis
  misc_feature (1)...(783): n = A,T,C or G
atcagagctcggcaaactctnnnnnnnnnnnnnnnnncgggaacgggnntcnnnnnnnnnnnnnattgtggannnnnnnnnnnnnnnnnnnnnctgctggggtatccgctgcctccgttatgagatcaaggatatccatgtgccaccccgggtgnnnnnnnnnnnnnnnnnnnnnnnnnnnnnngagcggcggaaacgggccacagttctagagtctgaggggacccgagagtcggccatcaatgtggcagaggggaagaaacaggcccagatcctggcctccgaagcagaaaaggctgaacagataaatcaggcagcaggagaggccagtgcagttctagccaaggccaaggctaaagctgaagctattcgaatcctggctgcagcnnnnnnnnnnnnnnnnnnnnnnnnnnnnnnnnnnnnnnnnnnggccgagcagtatgtcagcgcgttctccaaactggccaaggactccaacactatcctactgccctccaatcnnnnnnnnnnnnnnnnnnnnnnnnctcaggccatgggtgtctatggagccctcaccaaacccccagtgnnnnnnnnnnnnnnnnnnnnnnnnnnnnnnnnnnnnnnnnnnnnnnnnnnnnnnnnnnnnnnnnttgatgaggaacttgannnnnnnnnnnnnnnntagtggagctgggcttggccagggagtctggggataaggaagnnnnnnnnnnnnnntctggctctagcttccctgccaagattttgttttttatttttttattgaactttagtcatgta

SEQ ID NO: 15605 - DNA, 770 bp, Macaca Fascicularis
  misc_feature (1)...(770): n = A,T,C or G
tcaagacgacggtgtnaaatgataatgnnnnnagccctancngggctccacacagggagaaggtgacatttgaaatttatgacccaaacctggcatttctgcgctttgtggtttacgaagaagatatgttcagtgatcccaactttcttgctcatgccacttaccccattaaagcaatcaaatcaggattcaggtctgttcctctgaagaacgggtacagcgaggacatagagctggcttccctcctggtcttctgtgagatgcggccagtcctggagagcgaagaggaactttactcctcctgtcgccagctaaggaggcggcaagaagaactgannnnnnnnnnnnnnnnnnnnnncacacaccagaacttgcgcaatgccaaccgggatgccctggttaaagagttcaatgttaatgannnnnnnnnnnnnnnnnaccaggagaaatgcaacaagaggttaagagagaagagagtcagcaacagcaagttttactcatagaagctggattatgtgtgtaagggtactgtgtgtgtgcacatgtgtgtttgcatgtaagagaatgtgccctcttcacactccaggaagacgctaatctgtgacatcttttcttcaagcctgccatcaannnnnnnnntctgaagacccaactggcatgagctggggtnnnnnnnnnncactattttcatcttggacaacttccttaacttatattctttatagaggattccccaaaatgtgctcctcatttttggcctctcatgtcca

SEQ ID NO: 15606 - DNA, 723 bp, Macaca Fascicularis
  misc_feature (1)...(723): n = A,T,C or G
atcagtagattatctttaatctttgtactacatgcagatccacagtatcctttgtagtgttgtaaatacttttactttgaaaactttttcattaccctaaatcaccgtaactctgaccagtctttcagttctccaaaagcctaatttaattgtgtagttttgtcatggcttcatataataaagagcctattttaagttgaaagtagtagtcagaaaattgttaatttcctaaagctcaggaaactagagtgtcactttttttgcactgcaacatatacactagcttattaaaatttacaaaatgtctttttgaatgtatcaaggatgtatttagtttgagtggaatttgtcagcaaatatcagtaacttattgccgcttatattgtacaatgttaaacttcaattcctgtaactctggttagtattaatgtcaataactaaaaaacttagagttagttttagggcactttttattttgagagcatgaagtgtggaatgtgtcactgcgattggtgataaaacctgaggccacttgtagcttgatttttaaaatgaaatagataaagtctttttgaataatatagtatgcactgctgtttgcttgattatgtaatgtcaaaagtttaactatattccaagtacgaaaannnactggattacgttgaggatgttgaatagcattcatgatggctttgttttgttttggggcagccgtcaccagct

SEQ ID NO: 15607 - DNA, 791 bp, Macaca Fascicularis
  misc_feature (1)...(791): n = A,T,C or G
caatgtcaggtnnncagatactnnnngcattcttacatgtgacccatctcagaataaacaaaaaggagttggatattttaacagnnnnnnnnnnnnnnnnnnnnnnnnngaaggttttcagtgctctccctatcctgaagttgatcattttgttctttctttggtgaataaagatggcattaaaggaggaattcggcgttggaactactttttcccagaagaattactggtttatgatatttgtaaatatcggtggtgtgaaaacattggaagagcccataagagtaataatataatgattctggttgatctgaaaaatgaagtttggtatcaaaaatgtcatgnnnnnnnnnnnnnagcagaaaacttcaaatctgactgtttcccattgcctgctgaagtatgtctcctgtttcttttcaaagaggaagaagagttgacaacagatgaagcagatgaaactaggagcaatgaaacccagaatcctcataaaccatcacctagcaagctgtcaacaggtgcatctgctgatgctgtctgggataannnnnnnnnnnnnnnnnattttttagaagctacnnnnnnnnnnnnnnnnnnnnnnnnnnnnnnnnnnnnnnnnnnnnnnnnnnnnnnnnnnnnnnnnnnnnnnnnnnnnnnnnnnnnnatagaagtattacaagagtagctaattcactatggacacttttgtcaccaggctataatttgcctgatgtctgtgagatttgataaatatatcnnnnnnnnnnnnnnnnnnttatcactttgctttc

SEQ ID NO: 15608 - DNA, 758 bp, Macaca Fascicularis
  misc_feature (1)...(758): n = A,T,C or G
cagcctcagcaagaggnacataaggacnnnaatggcagcagcagcgnnnncagagaagtgatcatgacagttggtagacaacatcgggtactccaggtctctccaagctgactatatatttatttgttatttaaaaaatacaactatattttggggttttgttttttgtttttttataagtaggtataaggctatgtgacttgatctaaacagatgcagggcctctaaataaaagggatcatctgaaattaatgttgtttgaaattactatcttgattttgagggttccaannnnnnnnnnnnnnnnnnnnnnnnnnnnnnnnnnnnnnnnnnnngatattcaatctccttaaggtagaattttcaagcttttcatacattggaactccacctgactttggaccaaccccagaacagagcagagccacctcctatagacacccattgccctgctgctgtacacttcaacagcttgcacaagggagctcacttaaaaggagaaattgtgtagttgtaaaatattttttgtgtaaaataccttactctgctataaaccaccattaaaaaccagtgttttgatttggtacttaaatatttttgtagtgaaaaatnnnnnnnnnnnnnnnnnnnctccaacaaaagtatggtttcattataaaagagtactgtattgatttgccaaagttttgtgacttagtaaaggtattaacttccttggatttgtactttgtgatttagtatgctgtgtcgtgggctgg

SEQ ID NO: 15609 - DNA, 188 bp, Macaca Fascicularis
  misc_feature (1)...(188): n = A,T,C or G
acaccccccattacttgcttttcctcctacctcataactctgtctttcccagcctctactgcggccttgtctgagttcttcccagggtcccaggctctgatacagtgtagctcaaccctgctacacaaagaatctnnnnnnnnnnnnnnnnnnnnnnnnnnnnnnnnnnntgaggacctaccaagaga

SEQ ID NO: 15610 - DNA, 828 bp, Macaca Fascicularis
  misc_feature (1)...(828): n = A,T,C or G
actgcggctgcctggcacagtgttgtcnngtccccgagtcgctcggctccagctccctgaatcctggacaccaccacgtgtgctctgaggcaccagggccttaccactgacggaggcagggaagagcccctacccccgccctgtgctggccacggttcatcctggggccccaggtgggtggctgcggccccggcacagagatggctgcctgcataccagccacttaccatgactgcccagttgcacacgnnnnnnnnnnnnnnnnnnnnnnnnnnnnnnnnnnnnnnnnnnnnnnnnnnnnnnnnnnnnnnnnnnnnnnnnnnnnnnnnnnnnnnnnnnnnnnnnnnnnnnnnnnnnnnnnnnnnnnnnnnnnnnnnngctgcaggggtgcacctggggccaacagtgaaggacagggaggggctggcctgggaaggctgaggcttcaggggtctaatgggccgagaaccacagtgggcagtcactgtggaccacgtgctcaagcctacagcggccccaggccttgctaggacaggcagcaggcacctgagccatcctctgccctcagactcacgggcaacggaagaaatggaggctcgggagnnnnnnnnnnnnnnnnnnnnnnnnnnnnnnnnnnnnnnnnnnnnnnnnnnnnnnnnnnnnnnnnnnnnnnnnnnnnacctgggacgtgtgggctgggacttgtgtgtgggtctccccagtactcgctactacgtaaacatttacaaatacgacacaaacttgtttcattacaaaagcaatatcatcccatgcccaaaaaaagcgggaannnnngaggaatagcat

SEQ ID NO: 15611 - DNA, 1216 bp, Macaca Fascicularis
  misc_feature (1)...(1216): n = A,T,C or G
tctagttcnnntaggcattaaatttgtttctgttactctgtgcaaaataactttgagattggacaagaagatattgctaaagagaagttcctttaaaaggtcttgttcttgtgnnnnnnnnnngaaagtttggtttgttcttgtgtgtgatcatgaatgcacaatgaagaagaccctagatgctgcattttttnnnnnnnnnnnntccttaggtatccctgaagacagctcgctcagatgaccagcatttagattgaaaacaagggcccttcgtgggggagcatgagaaagagccagggttcaaagctggcgaatggtggtgcatcctagccactggcctctctgtgtttccnnnnnnnnnnnnnnnnnnnnnnnnnnnnnnntgattttttgtaagtcaggtttctgagtgagctccctgacgtgccaaggccatggtgtccgccctgctgcgtctgttcatttcagctgagttgcttgtgaatctctgttttagggtttggggctagcgtgtttgtgtttccattctaagattgagtctggcagtccctgtttttttgcnnnnnnnnnnnnnnnctttgattttttttaattgcagtatttgtatgattgcaataataaagtttggtttggtttttacagtcatgcgcagggaggatccttgttctctgctgtcaactgtaaaaagtttatggagacttaaagtcttgatgttgtgaagcagaggttattttgtggaaagattaaaaggattttgttggtacctggttttgtgttgtgtatatatacatgaggttgaacagtgaaaggaaagttcagtagtgatgttagaaggnnnnnnnnnnnnnnnnnnnnnnnnngataacatttaaaagtactttatattttacataatagcatgtttcatnnnnnnnnnnnnnnnncaaaggaattttgatcatggcctaagtgtttaaagcaatattttctggaatataccgagtttatataatttgattttgtgctaaattattaaaagagtctnnnnnnnnnnnnnnnnnnnnnnnnnnnnnnnnnnnnncctcactctttaatagtcatttctatctttgagaattttcatttatgagttccatgatatgtggtctaagaaagaccaaacagatttctatttttatttcttatattttaagttcgttgtgtctagagattgttaatattgtaatttaatgtagac

SEQ ID NO: 15612 - DNA, 683 bp, Macaca Fascicularis
  misc_feature (1)...(683): n = A,T,C or G
gggcagccctcgctgnctgccnntnnnnnccnnnnnnnnnnnnngatgccccgggtcttccggcacaggcacctggcccagtgcctgcaggagagggtggtgtcctgagtcaaggcctgccccaccacccagcttcccccagaggccaccttgctcctccctctgggacctctctggatggggagtccttggccggggtctctgactctgtgtcacctgacatttgcccatgagagccgctgggccttagggaggccttggcccagctgaccagttctaaggtatgggcctctggggttagtagacgccagcagtgcctgcccgtgtccctgtgtccaggcatggaggacactgctagagagttaccatgcacaccaatggtttcctgtatcacagcccaagggggttctctggcagccacagctgtgtgctcagtcagtgcactgggcaagctggaagtgtcggggggttaatgtctccaggagcaaccctgagtcaataaggagcaggacctcagcttcactgtccttgagcaggacaattctgaagtgtattctacataaactctcagaggatgcccagcaggatggcgtcccaattgctcacagcagtaacccactcattcatgtacttcttgcaggggctcctcccttccctctcttccccactccccacttgggctt

SEQ ID NO: 15613 - DNA, 1224 bp, Macaca Fascicularis
  misc_feature (1)...(1224): n = A,T,C or G
ataaaagtgcccatgatgaatagcaagaagtaccctgtggcccatttcatgaccaaactttgaaggccaaggtggggcaactgcagctctcccataatctgagtttggtgatcctgtaccccnnnnnnngnaacatcgtcttgaagacatagaacaggctctcagcccttctgttttcaaggnnnnnnnnnnnnnnnnngagatgtccaagttccagcccactctcctagtactgccccgcatcaaagtgacgacnnnnnnnnnnnnnnnnnnnnnnnnggagaaactggaattcttcgacnnnnnnnnnnnnnnnnnnctgtgtgggctgacagaggacnnnnnnnnnnnnnnnnctnnnnnnnnnnnnnnnnnnnnnnnnnnnnnnnnnnnnnnnnnnnnnnnnnnnnntgcagcctctgccatctctgtggcccgcgccctgctcatctttgaagtgcagcagcccttcctgttcctcctctgggaccagcagcacaagttccctgtcttcatggggcgagtatatgcacccagggcttgagacctgcggggtcaggttagggcgagcgctacctctccagcctcagctctcagttgcagccctgctgctgcctgcctggacttggccgctgccacctcctgcctcaggtgtctgctctccaccaaaagggctccctgagggtctggccacccttggcttctattagcccttctccatggccctgccatggtctccaaaccactttttgcatttctcttgttcaagttcaccagactctacaaataaaacctggcagacnnnnnnnnnnnnnnnnntgcctttgttgtttattttttatttttttattattttttaggcagggtctcgctctgtcacnnnnnnnnnagtacagtggtgagatcatggttcactgcagccttaacctcnnnnnnnnnnnnnnnnnnnnnnnnnnnnnnnnnnnnnnnnnnnnnnnnnnnnnnnnnnnnnnnnnnnnnnnnnnnnnnnnnnnnnnnnnnnnnnnnnnnnnnnnnnnnnnnnnnnnnnnnnnnnnnnnnnnnnnnnnnnnnnnnnnnnnnnnnnnnnnnnnnnnnnnnnnnnnnnnnnnnnnnnnnnnnnnnnnnnnnnnnnnnnnnnnnnnnnnnnnnnnnnnnnnnnnnnnnnnnncaatattaaagnnnnnnnnnnnnnnnngttcctgcatcagccagctattgctgtat

SEQ ID NO: 15614 - DNA, 705 bp, Macaca Fascicularis
  misc_feature (1)...(705): n = A,T,C or G
accttgcacccgcgagtaaagccgnnnnntgtagaaaaccccctccaccctccattccccgctaggtcaaaccccactgtagacaggaaagccaggccaggagagtccgaatgaaaatttattgtgaatcgattcccaagctcccttccgggacaagtggtctgggacagggaggagcaatggccccagcgctcaaagctctacgcgttcctccgaatcccgtcggcttctcgacccacgcggaggagccccgggcctggcggctgcagccccagcgctaaaggagaccggcctcagggccgggctttgcctcctgcttcatgggcnnnnnnnnnnnnnnnngcggctggtgcgtgcgcgcgcttctggggaacagtcccgcgtgcaaaggaaagaggcaaaatcgcacctaagcatcagatggaagcttactctctgcttcccctcctccccctgctcccctacttctcaatccccttcaattcgtagactcttgctcctgcttcnnnnnnnnnnnnnnngggacattccagtagaagttttttgctttgnnnnnnnnnnnnnnnnnnttgtgcttgtgtttcgtgatttctttgggggtgattgtctcgcctgttttcagttgtcgattatatgggagggttctgggtgggagtggggaggggtaggggcctagagctctaattgtttgtttggaagaaaaaa

SEQ ID NO: 15615 - DNA, 757 bp, Macaca Fascicularis
  misc_feature (1)...(757): n = A,T,C or G
atgaacatcaaccccttcccagtgccccgggnnnnnncccaggacccggtggagctggccacgtttggcctgaggcacatggagcctgaccnnnnnnnnnnnnnnnnnnnnnnccaggttcctttgcccaaagactcaacaggtgcagcagatcccccccagccccacatcgtaggaatccagagtcccgatcagcaggctgccctggcccgccacaaccctgcccggcccatctttgtcgagggccccttctccctgtggctccgaaacaagtgtgtgtattaccacatcctcagagctgacttgctgcccccggaggagagggaagtggaagagaccccggaggagtggaacctctattaccagaagcannnnnnnnnnnnnnnntcgaggagtggctgggatgactacgannnnnnnnnnnnnnnagtggaggaaggccctgtcttcgccatgtgcatggcgggtgcccatgaccaggcgacgctggccaagtggatccagggcctgcaggagaccaatccaactctggcccagatccccgtggtcttccgcctgacccgggccaccggggagctccacacatcctctgcagggctggaggaaccgcccccgcccgaggaccacgaggaagacgacagnnnnnnnnnnnnnnagcagggccagagctgagtctgagcgggcgtgagggcacaggctgtggcccgaggcggcggtggactgaaggcatgagatgcccttgagtgacagcaaataa

SEQ ID NO: 15616 - DNA, 645 bp, Macaca Fascicularis
  misc_feature (1)...(645): n = A,T,C or G
gaggtggcctggggcctgtgcacaccaaggctgacctcgtgctgcctgctgggacccagccctccctgccgctcccctgcgagcccagtccactgtgggcggccagggacgggccagtgcccagctgcgcctcaaggttgggagtctcagtggctgtgggcctggaccggcacagccagagcagaggcccatgggaagggcaagggatggggaagcctgggccggccccttcgctgctcccaaggcaggtgtccaggtggcaggagcagccaagctcacctggtgggaggagcagagcaggtggcagggaggagctcctggcaaggcagggagcactgaagtagggaagcagcaaaaaatacaggctcccgacgtgactccactgtctcatgaaacgtcaaaaatttaaaaatacacctcactttctnnnnnnnnnnnnnnnnnnaagctatcgaaatggaattctccttttctattcccgttgtacatagccccacgccctgcctctggctttgtcctctgtacagagcccccgtcccctctgctgttccggacccttttcttgcagcagctcaaccccctgactcagatccccaggactgcagccgagccccgggcttcctttcttaccattctgtatgcttc

SEQ ID NO: 15617 - DNA, 685 bp, Macaca Fascicularis
caagacgagacagcatgatgcctcccacagtccaccccagaccctggggcagcccctctggccctgccagctacctgtgccgttgggcccagggtggctggcaggagtcccagccgctttctttaggacctggcagcttctctagccgtccctcccgtgcctccagaatcacagcccttctccccaagggaggctgaggagccttctccactggtggcagccccaccccgtccccagccattcttggcctccaccctgcacaggtgggctcggccccccactcgggcctccccagaagtagcctcccctcagtgcctcacctccccctgcctcccagcctccgcagatgaggctcctgccccttcctcctcataaccaaaaccctcgctgctcccaggacggtcttatttataaaccagacacgtgttcttagtctggtcccagaccaaggagctggtcagatggccctttctaatcctacgtgttgagtttatgtaaaaaacatggtttcctcctgtttttggttcctttctcacccacaaaccattactacttgaaacctaaaaaaaaaaaaaaactcgccgagtataaaggctaaaaagaagcagtttgacaaaccttgtgatttgtactgtttactgcagagctatttaaagattttggaataaatatacaaaactacagt

SEQ ID NO: 15618 - DNA, 847 bp, Macaca Fascicularis
  misc_feature (1)...(847): n = A,T,C or G
gccnnnnnnnnnnnngctgctgaaagcattattattatctagctacggaaaactcttgctgattccagctgtcatttgggaacatgactacacacctctgtgcctcaaactcatcaaagtatttgttctaacatcaaattttcaggcaattagagtgaccctaaacatcaaccgaaagctctccttcttggccatggtgagtggcttactgctggaaagcatcatggtctacttcttccagagtatggaatgggatgttggaagtgattgtgccatctataaatcnnnnnnnnnnngaagagttttattcatctttactatctgtggcatgaccagctgtatctgaaagagaaaagacatgaaatataaaccaacctcctcatttctgttgagtaaaatgaagcaaagattggaaacactttctgaaaaagaaagcaatgataatagcagtggatacccacccccacagatgcacccaagagacaagccatttacatacagatattcacagtcacatatagaaacacccacacggacacaaagaatgnnnnnnnnnnnnnnnaatgacatgcaacaggtgaagatgtatatgttatacacaagcccaggtaagcactcataattcacacataataaaacatctaggtttcattcctttgacatgtttgtatctttttaatttaaatgttgttactggcttaaaatattttgtgttcttacagtagaaacgcttttaataaagtatttcagaataaaccgagtttttataaattttcaattcagtaattaaggtaatctttaaaattgggtgatccaaaaataaatgataatgaaaaccactgagtta

SEQ ID NO: 15619 - DNA, 697 bp, Macaca Fascicularis
  misc_feature (1)...(697): n = A,T,C or G
cgagaaccagaagatannnnnnnnnnnnnnnnnnnnnnnnnnnnnnnnaatgagaaannntctaaagaagaagtcatggcagctactcaagctgaaggacctaaacgagtttcggatagtgccattatccacaccagcatgggagacattcacaccaaactctttcctgttgagtgccctaagacagtggannnnnnnnnnnnnnnnnnnnnnnnnnnntattataatgggcatacatttcaccgtataattaagggcttcatgattcagacaggagatccaacaggtactggtatgggaggagaaagcatatggggaggagaatttgaagatgaatttcattcaacattacgacatgacagaccatacacactcagcatggctaacgcgggatcaaatactaatggatcccagtttttcataacagtagtaccaacaccttnnnnnnnnnnnnnnnacacagtatttggacgagtgactaaaggaatggaagttgtacagaggatctccaacgtcaaagtcaatcccaaaacagataagccctatgaggatgtcagcatcataaatattactgtcaagtaaataagatttgttttaatgtacttgcaaataaaaatgcaaattaaacagattattttacattagggagcttaggacttgnnnnnnnnnnnnnnnatgtttcaaagatacaatatta

SEQ ID NO: 15620 - DNA, 695 bp, Macaca Fascicularis
  misc_feature (1)...(695): n = A,T,C or G
agaccaccccccagcagggctccacacacagccccaggagcccgggctctaccaggacttgccgccctgagatctcccaggctgggcccannnnnnnnnnnnnnnnnccaacaggctcgtccaaacctacgggtgaccagctgcccgcggctctgtggaccagcagtgcggtgctgggactgctgctcctggctttgcccacctaccaccnnnnnnnnnnnnnnnngcacctggctgaggacggcgcccacccaccagcttctctgaggctcctgccccaggtgccgacctgggctggattaagggggaccgaccaggtcgggagtagccccttctgagtagccagcccttccccctgtgaagggaaaataggttggaccccttcaagctgagaactggtcggggcaaacctgcctcccattctattcaaagtcatccctctggtcacagagagggacgcacattctgattgcctccttnnnnnnnnnnnnnnnnnnnnnnnnnngaaggtgaccgtttgtcccgcctacccgtgacctggaagccccccccccgctcgagtgacccccgactttctggacggaaccaacgtacttcttacaaatattgattcatgtgtcatatnnnnnnnnnnnnnnnnnnnnnngctgtgccccgaccaccttgggcccctgccatcaggacctcctgaggct

SEQ ID NO: 15621 - DNA, 751 bp, Macaca Fascicularis
  misc_feature (1)...(751): n = A,T,C or G
agnnngagcgagagaaacgtcgggagcacagtcgggagagggacagggagagagagagagaaagagagcgggacaggggggaccgagatcgggatagggaaagggaccgagaacgaggcagggaaagggatcgcagggacaccaagcggcacagcagaagccggagtcggagcacacctgtgcgggaccggggtgggcgccgctagcggggaaaacactagagctgcaggtaccagccactcggccccagggggttacggccacagagggataggcacagtctccaccaccctggagccaagggtctttcacatcacctgcccctacatacataccaaatggaacggtggctatcctttccccccaaacacacccccttaacctatctcttgggacagccctcccctccctctcatttcccattaagtctgagaggcaagagctaggttaggcaaggaggcggttggccagagatggggaacagccaggtgccctagtcctctgatttttcctccatcctgcttaccacctccctgggtacttacagccttctcttgggaacagccggggccaggactgggtcacctatgagctgaatcagcatctcctcctgagtcccagggcccctgcagttcccagtctcttctgtcctgcagcccttgtctctttcccacaggttccactttatatccaccttttccttttgttcaatttttatttttattttttttattattaaatgatgtggtct

SEQ ID NO: 15622 - DNA, 769 bp, Macaca Fascicularis
  misc_feature (1)...(769): n = A,T,C or G
gagcagagnnnnttcncgacagccatgcannnnnnnnnnnnnnnnnnnnnnnnnnnnntgaggcagtccccnnnnnnnnnnnntctgcctgcaaagatagcagaggtcatggagganntgaaagnnntggaggtcttcctgaagagnnnnnnnnnnnnnnnnnnnnnagggcggcgcttccgggcacagcccaccctgccctcggcccacctcctggccatgnnnnnnnnnnnnnnnnnnnnnnnnngcttcaccatgaccaacggggcccacaggtggagcaagcnnnnnnnnnnnnnnnnnnnnnnnngccaggtgcacgcattccaggagaacccctacaccttcagccccgaccccaagctccagtcgtacctcaagcnnnnnnnnnnnnnnttcagcggtgcnnnnnnnnnnnnnnnnnnnnnnnncagcagggccaacttccaccaggnnnnnnnngagaagcactcacggaagatccaggacaagctacggaggatgaaggccacattccagtagccgagcttggnnnnnnnnnnnnnnnnnnnnnnnnaacccaactgcggggggcgggccgggaggcagaagccacatctnnnnnnnnnnnnnnnnnnnggcccctttgcccccaagccctggggagctgggccgggaggtggaggctcaggagaccccatagggacaggcagagctggtctcctcccagcagacggagccaggacgggcacaagagtcttggaggtttgcgtgttctgctaaaataaag

SEQ ID NO: 15623 - DNA, 703 bp, Macaca Fascicularis
  misc_feature (1)...(703): n = A,T,C or G
ctgtgtccctcagtactatgcaggatgacatttttatnnnnnnnnnnnnnnnnnnnnnnnnnnnnnnnnnntctgtcttcaannnnnnnnnnnnnnnnnnnnnnnnnnnncgttacgaggagaaaacccagaagcaactacctctgaaannnnnnnnnnnnnnnnnnctgaagttgaaaaaggagaactggggtccctggagtgcggggggctcccggcaagtgcagttccaccaaggctttggggacctggctgtcctcaagccnnnnnnnnnnnnnnnnnnnnnnnnnnnnngacctggactgcccaagaactcccgtcctaccagaaggaacactacccaaaatagaggttattccggtgggactcaaaatgccaactacccaatgagagcggcccctcctcccccaggataccatcagaacggannnnnnnnnnnnnnnttcgtgccacatcccgacgctcctggaagccagagggccagtcagannnnnnnnnnnnnnnnnnnnnnccgcccgcctttgccacagcagcagtctactgcttcagaccgagtgtcacagacgccagagagcctggatttcctcaaggtcccggaccagggagctgcaggggtcaggagacaaacgaccagtaggcctcccccagcagggggcagacccaagccccagcccaagcccaagcctcagtgtgccatagagga

SEQ ID NO: 15624 - DNA, 684 bp, Macaca Fascicularis
  misc_feature (1)...(684): n = A,T,C or G
agcccctgccccnnnngtnnncgccggttcagcccnntangcctcccgcctctacttgagccgataccaggatactcacccagaacggctggccaagcacaccccagggggcccacggatccgagggaatgtgtacatccacccgactgccaaggtggccccctcggctgtgctgggccccaacgtctccatcgggaagggggtgaccgtgggtgagggtgtgcggctccgggagagcattgtcctccatggagccacgttacaggagcacacgtgtgttctgcatagcattgtgggttgggggagcaccgtgggacgctgggcccgcgtggagggtacccccaatgaccccaaccccaatgatccccgagcccgcatggacagtgagagcctcttcaaggatgggaagttgctgcctgccatcaccatcctgggctgccgagtccggatccctgccgaggtgctcatcctgaactcgattgttctgccacacaaggagctgagccgaagcttcaccaaccagannnnnnnnnnnnnnggnnnnnnnnnnnnnnnnnnnnnnctacccgctccccttgaggctgcctcctgcttggccagcctctgtctagaaaggaccagagaaagccaggcaggatcgtcacacgccggggagcaatgtgggtggcctggggactcctgggc

SEQ ID NO: 15625 - DNA, 769 bp, Macaca Fascicularis
  misc_feature (1)...(769): n = A,T,C or G
tcaacatgtgcttgcttctgnngacatgtagtttgcnnnnnnnnnnnnnnnnnnnnnnnnnnnnnatcctttcaaaccctcatgactgacaaaaactccatggggccaaatctgcctgaagatcattaccaaaaatagcaggtacttctaccattannnnnnnnnnnnnnnnnnnnnattccttacatttttcnnnnnnnnnnnnnnnnnnnnnnttcaacaaaaaaagagagaactatactaannnnnnnnnnnnnnnnnnnnnnnnnnnnnnnntttcagtggtttattgttcacaaaaaaatcttcaaaacgagtattgactttcacaaaatttaaatcataaacaggcaaaccaaacagcnnnnnnnnnnnnnnnntgttatgtgattgttttttaattgctgtaggatcctgttctttcagcaggtgaaaannnnnnnnnnnnnnnnntttcacggttttaattttcaactcagaagcactcaaaaatgcaaaatgtgataatgggcacttgttaaaagaattagtgtatccagccttcactccagctggttaatnnnnnnnnnnnnnnnnnnaaccctaccactttcatctgctgaaaggacaaatgtgcttggttttactattatgtnnnnnnnnnnnnnnnnnnnnnnnnnnnnnnnnnaaattatgtattttgtcttgggctgcaatttgttttatgcttattttattattactgcggtagttgactttgctgtatggaaaaataaagtgaaatgcccta

SEQ ID NO: 15626 - DNA, 665 bp, Macaca Fascicularis
  misc_feature (1)...(665): n = A,T,C or G
ccaagtnncctctctaggcggcccggacccacccgtggggacagccccatttagctctgctctgggtacagcaaaaaccaggatggtgggaggggccgagtctcatcttttcatcgtcatgactgttgagttcttggctgtgctcatcatgccacagcacgacgccnnnnnnnntgcccccaacctactgcctgatgcaggtgccattgccatgaacannnnnnnnnnnnnnnnnnnnnnnctttccaacgggtgccccgtgggacacnnnnnnnnnnnnnnnnnnnnnnnnnnaagggttttgtggttcaataactttgggaagtgctgcaccctctgtccccaagttggacattcacannnnnnnnnnnnnnnnnnnnnnnnnnnnnnnnnnnnnnngaaaagcttcttgctaaaccttctttaacccatgttttctaaacttatttgaccacagaacccttttcttgggnnnnnnnnnnnnnnnnnnnnnnnnnnnnnnnntcctcaattgcattttgggagctgctgtcagagagctaaggggcctggggtgtgagctgactctccactggggaggccagttgcaccaccacagcccaagggaagcgctggccaccgcccgtgggcatcgatgaggctttggcccccaggggccggactcc

SEQ ID NO: 15627 - DNA, 728 bp, Macaca Fascicularis
  misc_feature (1)...(728): n = A,T,C or G
tacacttcatcacttcnnnnnnnnnnnnnnnnnnnnnnnnnnnnnnnnnnnnnnnnnnnnnnnnnnnnnnnnnnnnnnnnnnnnnnngcaaatttcacaaatcagaagaacatcagcaacccacctgatatgtcagggtggaatccttttggagaggataatttttctaagttaactgaagaggaactattggacagagaatttgaccttctaagatcaagtaannnnnnnnngaaggcttattttgcttcacagtaaaataacagctctattattattcagcaaggccaaagacttttgagaatgtatatgggaaattctttttgtgcatttgannnnnnnnnnnnnnncatcttcttatactatcaaattatgttgtgtgcattagaaatcagttacctgatagtagctattaaacccaatattgctgatagtatgctaatatcctaaaacttaaatattgcatatctataaatgttaaattcagaatatctccaaaacatggaacattgatgtttcaataaaaagggagacattatttgccttagtaatgattgtgcaactctgtttttctgcacactcaatagaaaatattgtgggtctgagatgccctttgaaaatgcctgaaagaaaacatgggctactacattatgttaatgttttgtaatgcccttttaatgagtggtgacataaaagggctgctttgntgtcctgatatggcaaaaata

SEQ ID NO: 15628 - DNA, 730 bp, Macaca Fascicularis
  misc_feature (1)...(730): n = A,T,C or G
cgctgatggnatnntcnnnnnnnnnnnnnnnnnnnnnnnnactcgggnnnnnnntnnnnnnnnntactctggagttgaggtgcgagttacaccaaccaggacagaaatcattatcttagccaccagaacacagaatgttcttggtgagaagggccggcggattcgggaactgactgctgtagttcagaagaggtttgnnnnnnnnnnnnnnnnnnnnnnnnnnnnnnnnnnnnnnnnnnnnnnnnnnnnnnnnnnnnnnnnnnnnnnnnnagagtctctgcgttacaaactcctaggagggcttgctgtgcggagggcctgctatggtgtgctgcggttcatcatggnnnnnnnnnnnnnnnnntgtgaggtcgtggtgtctgggaaactccgaggacagagggctaaatccatgaagtttgtggatggcctnnnnnnnnnnnnnnnagaccctgttaactactacgttgacactgctgtgcgccatgtgttgctcagacagggtgtgctgggcatcaaggtgaagatcatgctgcnnnnnnnnnnnnnnnntaagattggccctaagaagcccctgcctgaccacgtgagcatcgtggaacccaaagatgaaatactgcctaccactcccatctcagaacagaagggtgnnnnnnnnnnnnnnnnnnnnatgccccagccagtccccacagcataacagggtctccttggcagctgtattctggagtct

SEQ ID NO: 15629 - DNA, 775 bp, Macaca Fascicularis
  misc_feature (1)...(775): n = A,T,C or G
tgcagatgcaagagctnnnnnnnngnnnngcctgggnccnagggtgtggcaggnnnnnnnnnnnnnnnnnnnnnnnngcctgccctgatcctctgcttcctcctcacaaccccaagagcccccacccagtccacccacgtgtggagtctggggagaggagcagggtcttaggcttctcagccctgagcatccctggcagggtctccaacttctaatctcttcccttaagccctgtggccacacagccaggagagacttgccactggctcccgcctcatttcagcccagggtgcnnnnncaggagcccagaacagtcccacctgtgctgctatgcccacagcacnnnnnnnnnnnnnnnnnnnnnnnnnnnnnnnnnccccagagggtgatcccgccagcaactctacagccccacaccctccccacccatcagcatccacggcagcccctctgctgttccccagggacctctcatacactggccaggaggctgcagaacatgtgtctccccctccctccaagaggtcctgctccctctgccagaaccgtgtgggcggtgggaaggctctcggcgcccggcccctccctctccctgctggttttagatggtccctatgttggaagtaaaaagtgaagcactttattttggttgtgtttgctcacgttctgcttggaagtggggacccctcactgcgtccacgtgtctgcgacctgtgtggagtgtcaccgtgtgtacatactgtaaattatttattaatggctaaatgcaagtaaa

SEQ ID NO: 15630 - DNA, 734 bp, Macaca Fascicularis
  misc_feature (1)...(734): n = A,T,C or G
tggtcatatgggaggcagnnactgggctgaagagtaaggtggttgctgtggggacttcagtacacatggacttgtagggtcactggcaacatactcctcttggcccttcccatatctacccttctgtgactgggggactacaagnnnnnnnnnnnnnnnnnnnnngcgaatattttcactttgaaagaaaacgctgccgttttgtatttaatagcctccaagttctttcagtaatgttatttgctctgtttttgtgtgtttgttcatgtgcatttgtgcatannnnnnnnnnnnnnnnnnnnnnntggggcacaattctggactggagccatgaggccttccctagtcccnnnnnnnnnnnnnnnnnnnnnnnnnnnnnnnnnnnnntgaattatactgactccagactgtctcctccctttttgcccttggctcttgaggctctaaacccctgggccatctgaatggagcagccaagttcagtcccagatttctgcactgttcctctttcacagctagaatacgttgcatgatgaagttgtatagaaacagaaccatggatggatggccaggattactgtggtccctagctagatccccttcctatcacctgatagcaacagggacagctgccaataccctactctttactcaatggtacccagggagggggcatgggaagagggtgagctgagggctggaggaggacaacagccactgggtgagctgttcac

SEQ ID NO: 15631 - DNA, 729 bp, Macaca Fascicularis
  misc_feature (1)...(729): n = A,T,C or G
ttttggtatcctnnnngaaatgtggannnnnnnnnnngctgctgcctccagctctgcgcccccactcccggctcctcnnnnnnnnnnnnnnnnnnnnnnnnnnnnnnnnnnnnnnnnnnagcaggcaccctgttctggtggtgtctggggaagccctgggatgaactgtatttagcatgctttgaatcacttctctacatgaagtcagagttgtgtcatccacgggaaggggaaggagtgcgtggcaggcaaagcagcatccgtagcatctcctcctgcgttgtcccacattgatacatgctcagtgttgatgctgggatgggccctccccgactccacaagttcccccactgcccaccactccaccaggcgatgtcatctgtccctgccgtggtacaggtcatttcagctggttgtcaataagactcagggtccggccagcctgtgactgaatgttaccttgaatcctctcagcacccttcctagtcaggaggggagataactgccgttaagaatagccgtttggaaagggggtgtnnnnnnnnnnnnnnnnntcagcccattctccgtgggcacggcaggatgagttgcgccgaggctgcggccttatacaaccccctgctgcaggaggtggcctgcggtggctcaggactgatcaggctcggccatctttggttnnnnnnnnnnnnnnnnnnnnnnnnnnnnnnnnnnnnnnnnnnnnnntgggtc

SEQ ID NO: 15632 - DNA, 758 bp, Macaca Fascicularis
  misc_feature (1)...(758): n = A,T,C or G
agatcaagaaaaagtttcagccaatgaacaagatcgagaggagcatactacatgatgtagtggaagtagctggcctgacatccttctcttttggggaagatgatgactgtcgctatgtcatgatcttcaaaaaggagnnnnnnnnnnnnnnnnnnnnnnnagactcctaccgtcgtggagaggaatgggatccccagaaggctgaggagaagcggaagctgaaggagctggctcagaggcaggaggaggaggcagcccagcaggggcccgtggtggtgagccctgctagcgactacaaggacaagtacagccacctcatcggcaagggagcagcgaaagacgcagcccacatgctgcaggccaataaaacctacggctgtgtgcccgtggccaataagagggacacacgctccattgaagaggctatgaatgagatcnnnnnnnnnnnnnnnnnnnnnnnnnnnngggaagagttgccaccaacctcctaggcgccccgcccagctccctttgacccctggggcagggcagggggcagggagggactaggctgctgctattagaacccatcctggagccccacctctgaaccgcctcctaccagctgtcccgcgggctgggggacaacaggtgtttgatttgtcactgttggagcgtggatatgtgcgtggtgtgtgtgtgtgtgagagtgtgaatgcannnnnnnnnnnnnnnnnnnnnnnnnnnnnnttcttggaatttnttccccatggggctgg

SEQ ID NO: 15633 - DNA, 726 bp, Macaca Fascicularis
  misc_feature (1)...(726): n = A,T,C or G
agagcaggcccctnnccccacacttcaccccacagagctctgttcttagcctcttgcgctgcacgtccaccatcagctggccnnnnnnnnnnnnnnnncatcttggctcccagaggagcagcagcaacaggctggagggagaggaaagcaagacaaagatgaggaggggggaaggctgggtttcttagattccagagattctcctctgtgggaaagaaggtgggtttcctggtgtccctcagagtaagcctgaggagtcccagcttagggagtcactaccgcaggcagagaggcaggcagcggggtcctaggagccgctgcttctccaggcctctnnnnnnnnnnnnnnnnnnnnnnnnnnnnnntcccattaggagtgggaggagaataacccaggtctaaggaccccaaagtcaggatgttatttgatcttctcagacatctagttccctgcttgatggagggatcctaatgaaatacctgaaacatacattggcatttatcaatggcccaaatcttccctttaacccaagaccctgcctcttccactccacccttctccagagactcttannnnnnnnnnnnnnnnnnnnnnnnnnccccaggttaggagtggtggtgggaggaagggaaagggctgggcctcactgctcccagcgactgaaaggacaacactatctggagccacccactgaaagggctgcaggcatgggctgtacccaagct

SEQ ID NO: 15634 - DNA, 700 bp, Macaca Fascicularis
  misc_feature (1)...(700): n = A,T,C or G
ggcttccttttctttgagccttcagagttnannnggaccttctttgaccctcaggacttactagctcctagtcagctgcctggaaaactcatagaaccatcccctggatcccatttgtccgagaggctttggtgctcagttaaggtgcattttcttactctaggtttatagagtgatgtaattcaactgaagaaaacacacacatgcttttggtgcttattcttcagttaaaaggaagtatgcattgattcttttatatgaaattaaatcaaacttatttttatagctctttacatattaaaaagagctttcctgtacatttacgtgcttaatttgcccaacaatcttgtgaagttgatataattaatatcattcctgttttaaaggtagagaactgaagttcagatacattgaaactttcttaggacatgtagcaagtaaacagtggagcccaggtaccctgactccatatcttacattcttttactaataacatgtcatgctgagattcagaaggcccatgcttataatttaaaaatgagactacttcagtatttctttgtgtttattttctactattcctttctgagctatgttttagagaaaacaatttgatatgcttcaatcttgtaaaaacaaattacatatatatataaaaattatctgtattagacaaaaactgtttnnnnanttctgtaag

SEQ ID NO: 15635 - DNA, 758 bp, Macaca Fascicularis
  misc_feature (1)...(758): n = A,T,C or G
ggcagagattactcgannnnnnnnnnntgcactgagagtacgtcgggagaataaaggggctactgctgctccccagagaaagtcagaggatgattctgctgtgcctcttgccaaannnnnnnnnnnnnnnnnnncttctgttcctgtctcagtacaaactaaggatgatgtctatgaggctttcatgaaagagatggaagggctactgtgacannnnnnnnnnnnnnnnnnnnnnnnnnnnnnnnnnnnnngcccatggagaaagaagctcttattaaacttagatgaaagagctgcttccattgtcagggtattttctaatttcagttcaaggaatatcctaaaatttagccttgttcagaatttactgcacataaaagagggtatttcatccagaatagatcagnnnnnnnnnnnnnnnnnnnnnnnnnnattccctttcacnnnnnnnnnnnnnnnctgtttcttcccctcctccagttcttcggaaatttgtgatcacagggggatcttagttgcttacttgttttgactctcttgtgtgctgtgggcactggagtagagatttttgaaaacagtttatttcatcttgccttttgtgtttgagttatttttaatattttcctgtaaatattttgtaatattttacttgtaatgaaatggatcacaatgtcatttcctaatacaaggcaggatatgtgggaagaaaatgtataattatttgattaaaattatttcccactgacctaaactttcag

SEQ ID NO: 15636 - DNA, 625 bp, Macaca Fascicularis
  misc_feature (1)...(625): n = A,T,C or G
tccccaccccagcctgctcagncaccacagagaatctgcatctctggctccccatacctggacccacataggtgggtgcctgttgcatgtttaagagacaggggctgtgaggtgacagggcactaggaccttcgctccttttccccttccatcctttctttgccagtgccacccatgtccctaactccnnnnnnnnnnnnnnnnnnnnnnnnnggcctgtctccctgtcagcgtgagggcaacaccccagagcctcagccgagcaagcccagaggggcagcgtggcctctccctccccttttcctaccccgtcccatgcctcagcttgctgcttgtgccagttgcctgtttcgcttcagtgtttgattctagcacttacatgtgtcgtccccactgagccctctatctcctaatccctcaacccctgaccccctccccataacagtgacttctccatggaggaagagggagcaggagctgttggtcttggtttgcacagagcgggtagggctgtggggaaagcgggtgagctgttgtgctgctgggcctccctttggccctcgcttcctgccctatgatgtatgaaatgtatgtacannnnnnngatnnnnnacagccaataaag

SEQ ID NO: 15637 - DNA, 692 bp, Macaca Fascicularis
cagacaattactagacactactgacatccaaggagaagaatttgccaaagttatagttcaaaagttgaaagataataaacaaatgggtcttcagccttacccggaaatacttgtggtttctagatcaccatctttaaatttacttcaaaataaaagcgtgtaagtgactgtttttcaagaagaaaagtcgttttataaaaggatatttatatctctgttgctttgactttttttttaatataaaatccgtgagtattaaaagctttattgaaagttcttctttgggtaaatattagtctccctccatgacactgcagtattttttattaattaatacaagtaaaaagtttgaattttgctacatagttcaattttttatgtctcttgttaacagaaaccacttttaaagggtaataattattattctttttcataacagtgccttaaggtatgatgtatttctgatagaagccattttcacattcatgttcttcgtggattatttgttactcgtctaagatgcaatttgattttatgaagtatataccgttttacccaccagaaacagtacagaatctctgccctaaaatcccaggcttaattgctctacaaaggcttattaatttaaaactccattaataggattacattttaaagttttatttataaattccctttaaaaaagatatttc

SEQ ID NO: 15638 - DNA, 765 bp, Macaca Fascicularis
  misc_feature (1)...(765): n = A,T,C or G
caaatagatggaaannactccgggagnnnnnnnnnnnnnnnggaccatgagacttacatnnngaatctgacccaggctaacacaccgggagctataccgcactggcagctnnnnnnnnnnnnnnnnnnnnnnnnnnnnnnnnnnnnnnnnnnnnnnnnnnnnnnnnnnnnnnnnnnnnntcgcatgcggggcgacatgcaactcttccagaccttctggtttctctaccataagggccacccgccctcagagccctgtggcacgccctgccgtctggctactctttgtgcccagctctcnnnnnnnnnnnnnnnccctgctctgtgccgcnnnnnnnnnnnnnnnnnnnnnnncccagaggcccagagcctgtggccaaggccactgttttgctagggccccagggcccacatttgggaaagttcttgatgtaggaaaggannnnnnnnnnnnnnnnnnnnnnnnnttcaaccaagcaaggtcatccagtggaagaaccagtccctgggccccaaggatgccggggaaacaggaccttatcctttcttggagctggtttagctggatatgggagggggtttggctgcctgtgcccaggagctaaactgccttgaggctgctgtcctttcacagccatggaatagaggcctaagttgacaccgccctggcagacaagacaggagctgttgccccaggcctgtgctgcccagccaggaaccctgtactgctgctgcgacctgatcccgccangtctgtaaaataaag

SEQ ID NO: 15639 - DNA, 743 bp, Macaca Fascicularis
  misc_feature (1)...(743): n = A,T,C or G
tcaacttctgtagttctaaaatacacctttatcatacaatcaaaccaggtagttcatatatgacagtgtcataaaagttttctataaagtcattactgttgcttaaacatacgtcatgcctattaaaatatattttctactggtgatttcaacattatttctcatactgacttttatnnnnnnnnnnnnnnntnnnnnnnnnnnnnnnnnataaagatttttgaatgtttgaatgccctctgccttgatttggttggaatttttgctaaattggtaatgttgcttgaactttatgactacattttcttttaacttttttcatggacttccttatatgtacataataattaaatgttgaaatttatgaaatacttttatgaatttagataatttttaaatattgttaaaatttattgaactaaaaagtaatgtaaataaaataattcatgttaaaaatggaacaaaataattaactttacatgtttggtgatacagatgcaaatgtttttgatatatggagatgttgagtcttttgactttactaaaggtgctgaatagcattaaattcactattttccttttctgttttacttgtgaaaataaaaatgcactaaggttgggtataagttctgtttgcactcactaattgtgacagacagaggtttttgtaagtatttattgtacaattgatgcatgtttatttttagcgttgtgttattgcctctgggnnaataaatgaacaa

SEQ ID NO: 15640 - DNA, 687 bp, Macaca Fascicularis
  misc_feature (1)...(687): n = A,T,C or G
acagaatatgnnntataggtgagggacttgatcaggcnctgccctgtctgacagaactcattctcaccaataatagtctcgtggaactgggtgatctggaccctctggcatctctcaaatcactgacttacctaagtattctaagaaatccggtaaccaataagaagcattacagattgtatgtgatttataaagttccgcaagtcagagtactnnnnnnnnnnnnnnnnnaactaaaagagcgtcaggaagcagagaaaatgttcaagggcaaacggggtgcacagcttgcaaaggatattgccaggagaagcaaaacttttaatnnnnnnnnnnnnnnnccaactgacaaaaagaaaggnnnnnnnnnnnnnnnnnnnnnnnnnnnnnnnaagaatgctatagcaaatgcttcaactctggctgaagtggagaggctgaaggggttgctgcagtctgnnnnnnnnnnnnnnagagaacgcagatcggggcccactgatgatggtgaagaagagatggaagaagacacagtcacaaacgggtcctgagcagtgacgcagatgtataataatagacccttttggaacaagtcttgcttttcgaacatggtataatagccttgtttgtgttagcaaagtgaaatnnnnnnnnnnnnnnnnnnnnnnnnnnnnnnnnnnnnnnnnnnnt

SEQ ID NO: 15641 - DNA, 726 bp, Macaca Fascicularis
  misc_feature (1)...(726): n = A,T,C or G
ttttgactttataaaaagcaatgcagtaccccatagactggtgttaaatgttgtctacagtgcaaaatccatgttctaacatatgtaatnnnnnnnnnnnntacagtgctcttgttgatcttgtattcagtcaggttaaaacaatggacaataaaagaatgaacacattcctcatgtgtgtgattcactcttgtctaaatgtcccaacctgtgacttctttactttccacaccactaattatccaagatcttgaagaagtattgaacctctaataggccatccnnnnnnnnnnnnnnnnnnnnnncagcattctggatcttagttttaccaaagattgctctgagagttccagggcgtannnnnnnnnnnnnnnnnnnatcaacaggtccacaaaattctctaaatgtctttgtagcattattctgttgaatctccattgctacgcaagggccagaatacatttnnnnnnnnnnnnnnnnnnnnnnnnncactactcctttataaacttcatagaattcttcaacattaacccgatccatattgaacatctgcatagctgannnnnnnnnnnnnnnnnnnnnnnnnnnnnnnnnnnnnctttcccaacagtccttcactgacagcatggggtttaacaatgcaacaggtacaattggtaaatttagcagtgtttgccggcccacaacctccacttgaaggannnacaactccatttctctggccgc

SEQ ID NO: 15642 - DNA, 706 bp, Macaca Fascicularis
agaaaggcaaaaaaacaaacaaaaaaacaagaccttggagtgttaggaggagagtgaaggtagaggggcgaggaagggtaaggggcagggctggttgggagctgggcactctcaccacccctcctttcagcctctgcaacagagcagcttcccagacttctccaggaacccagaaatgggatggttgtcgacaaaggttgggagtggcttttcctctggtagccatgcacctgagcactacgaacaaggaggcaggtgccaccctgacacccctcctccatagcaatgggaaagtgatgagtaggggagtcctgaggagatgtggcctgcagaagacacgcagccatgcaagcaaccagggctttaacctggggaggacgcaggtccctgcaaggaagtgtagatttggagaggaaggaaatgaacaaaactgggccctttccataggaactgcccttggagattgcagagggtggctgcccctccttgctccagcagctgtgggagaggcactgctctggggcctgcactgcctctgcctcccctgctgaggggcccctcactcttgcccaagactctggattgttgcatggcaaccactcctcccatggcattgctcagcaactactcctcccatcctggccaccctgtgcccccttcctggtcccaacgccagcccttagtccttcctccctcagcagccagg

SEQ ID NO: 15643 - DNA, 706 bp, Macaca Fascicularis
tcaaactgtgttatttatgaaatctgatatctctttcactgaaatcttgtgatccattctttaccttttcattttaataatggttaaaaatatttgaaacatttactagtattttttattttatacacactttcttatactacccatcaatatgtaatacaatgagctaaacccgtttaactggcttgactcatactcttaagcactttgctaaaatactgtttgtgagtattacattaaatctgtgggccaggtgtagtgactgacacctgtaatcctagcatttggggaagccaaggcaggagaatcgcttgagctcagaagtttgagaacagccaggacaacatagtgagaacccctcctctacaaaaaatagaaaaattagccgggcatggttgtgctcacttatagtaccagctactggagagactgagctgggaggatggcttgagcccaggaggtcaaggctgcagggagctgtgatcgcaccactgccctccagcctgggtgatagagcaagaccccatatcaaaacaaaaaaactgtgatcataaaaagcgccataaacactaatatcaaaccatgctactctgtcttaaactttcaaatagcttgcaacctgaaatacaaaattaagtttggaaaagcagtttttaactctgtgttgctcacatgctaattaactgtatgacttatgccatgggaa

SEQ ID NO: 15644 - DNA, 738 bp, Macaca Fascicularis
  misc_feature (1)...(738): n = A,T,C or G
aaataaataaataaataaaatannnnagacagacacatgataannnnnnnnnnnnnnncaaacatagctacgcttcatgaaaatnnnnnnnnnnnnnnnannnnnnnnnnnnnnnnggagctgtnnnnnnnnnnnnnnnnncagaattatattgtaacttcccctcaccccagttgcaattgtgtcatagtcnnnnnnnnnnnnnnnnattttattcccataactccaccggcttggatgcctaagtgtatgatgcttgaagcctcagaaaagaaataagcatattnnnnnnnnnnnnnaaggtttttcactgcctnnnnnnnnnnnnnnnnnnnnnnnnnnnnnnnnnnnnnnnnnnnnnnnnnnnnnnnnnnnnnnnnnnnnnnnnnnnnnnnnnnntttctatgtcaagaggcaatattaaaaaacaatttgcaagaaaatgtgtttcaagagagcaacctaagctaagtcactctgcaatatttcttgaaaatnnnnnnnnnnnnnnnnnnnnntggaagatgtaaattgcttagaaagggaaaagtcaaatcnnnnnnnaactgctaaaaatcattttaaaaactcgtgatttagtttggaattatgattgtagtctgttgaatagtatttaccatggcatttcatacccatggtattttataccttctgactatcaattttagtattattagatgtttgtgtaaccacttgcttatttaaatgaattttgag

SEQ ID NO: 15645 - DNA, 759 bp, Macaca Fascicularis
  misc_feature (1)...(759): n = A,T,C or G
cagggacgctgtgtgannngtggaggccctgnnnnnnnngatgcgtattattgtaaggagtgcaccatccaggagaaggatagagatggctgcccaaagattgtcaatctggggagctctaaaacagannncttctatgaacgcaaaaaatacggcttcaagaagaggtgattggtgggtggccccttcctcccccannnnnnnnnnnnnnnnnnnnnnnnnnnnnnnnnnnnnnnnnnnnnnnnnngaaagggagcagagaccatagcatcaccaggagtgcctgctagtgtactggcagcttgccaccccctcctctcccttcacccagacgtggtagggatggaaaannnnnnnnnnnagagcactctggcacaccgtatcagagaaaagttgatagattagttaatgatttttcttgaattcgagaagcagagatctgttctccatattgatatgttctccctcaaccaagatcttctaaaaagaagtaatattttagtcttctgctcgaggagtnnnnnnnnnnnnnnnnnnnnnnnnnaaccannnnnnnnnnnnnnnnnnnnnnnnnnnnnnnnnnnnnnnnnnnnnnnnnnnnnnnnnnnnnnnatcagaacaagaaatgtaggcatttactgttttggggggagagggaggggtgctccgccatcttgaaaggcatttattcatttaacacttgtgctgttgtcatgttattttccttttgagaaattggaaactcnnnnntattatgta

SEQ ID NO: 15646 - DNA, 802 bp, Macaca Fascicularis
  misc_feature (1)...(802): n = A,T,C or G
agggggcgtgcccccaccttgtggtctggactatgaggcctacaacagctccagcaataccacntgtgtcaactgaaccagtactataccaactgctcagcgggggagcacaaccccttcaagggcgccatcaactttgacaacattggctatgcctggatcgccatcttccaggtcatcacactggagggctgggtcgacatcatgtactttgtgatggatgctcattccttctacaatttcatctacttcatcctcctcatcatcgtgagtgactcctcagatccctgtggggatgggcgatcctggggacacctgtgggagcagtccagagaggggatagtttgttctgtctgaagttttcagctctcagggcaagtcctgtacagagggtatctgtcatgtagtaggagggacaccagatgcggagtcaggaagaaatccaaggtcaagaagggacttactgctactggaaccttaggcaagtcattcctcttgaggcccccagcactgctctggacctctgtttcttcatgggtgaaatggatggttctcaccctgagatgatatcacctcccctagagggcacttgggaatgggaaagggtgattctggttttgattttttttaatagctttattgagacataactcgcatatcattcaattcatccctttgaatgaatccagtggtttttttttagcatgttcgcagagttctgtttttcataaggacaaggggagtgcaattggcaacttgttactgggggaggggagagaagctaaacatcctgaaatgctgc

SEQ ID NO: 15647 - DNA, 798 bp, Macaca Fascicularis
  misc_feature (1)...(798): n = A,T,C or G
gtttgannnntnnngttttatttgccaaatgttaccaatcagtgagcaagcaagcacagccaaaatcggacctcagctttagtccgtcttcacacacaaataagaaaacggcaaacccaccccatttttaaattttattattattaaatatttttttttttgtttggcaaaagaatctcaggaacggccctgggccacctactatattaatcatgctagtaacatgaaaaatgatgggctcctcctaataggaaggcgaggagaggagaaggccaggggaatgaattcaagagagatgtccatggacgaaacatacggtgaataattcacgctcacgtcgttcttccacagtatcttgttttgatcatttccactgcacatttctcctcaagaaaagcgaaaggacggactgttggctttgtgtttggaggacaggagggagagagggaaggggctgaggaaatctctggggtaagagtnnnnnnnnnnnnnnnacaggctgctatggtcactgaggggttagctttatctgctgttgttgatgcatccgtccaagttcactgcctttaattttccctcctccctcttgttttagctgttacacacacagtaatacctgaatatcnnnnnnnnnnnnnnncaagggggggacgttaaatgttaatctaaaatatagctaaaaaaagattttgacataaaagagccttgatttaaaaaaaaaaaaaaaagagagagagagatgtaatttaaaaagtttattataaattaaattcagcaaaaaaagatttgctacaaagt

SEQ ID NO: 15648 - DNA, 734 bp, Macaca Fascicularis
  misc_feature (1)...(734): n = A,T,C or G
acgtgnnnnnnnnnnnnnnnncnngcggtcccagaaatcctgaccaagctggggcaggtccagagtccaagccctggtgggtagaggccaagtagannnnnnnnnnnnnnnnnnnnnnnnnnnnnnnnnnnnnnnnnnnnngctgaacctgcaggctggagttggggagaggcctggaacaggcccatctgggatttctacagcctgggnnnnnnnnnnnnnnnnnnnnnnnnnnggagatnnnnnnnnnnnnnnnctccaggctgttcccaaatagctccctgcctccccactgcccctaaaaccacagtggaagagccattcatctcataaacaaaaagcaagaggaaagaatgaggaaggaccctgtgcaaggttattttcaagcagtgatgggcttgcacctgacagcagggaggctatacctttcctggtagcacccgcccctgtgtggcccctaggcccccattaccctcagaccccgcctaagcagttccctcattgctccttggcctgggctaacagcaggaagagcagggcccaggacccagcgggagttcagtgatggtgtctgcttcaagagggtgttttgcactctgactgcaggacaagcattctaagggggattggggagagaaaccctggctcttcacccaggtttcactcacatgtaaatgaaacactatgttagtatttaacacattcctggatactgaacacaagtctggaacata

SEQ ID NO: 15649 - DNA, 113 bp, Macaca Fascicularis
atgggttaaatccgttaaaacaaggagtggggggggaagggtgtcgtgcactcctagagaaaggtacacagttccccggatgggaacggggttggcgcagaccttgcgggcat

SEQ ID NO: 15650 - DNA, 694 bp, Macaca Fascicularis
  misc_feature (1)...(694): n = A,T,C or G
aagaccccgattgcgatatggcaaacccaaagcttccatccaggacatctggtaccacgaggatcagattagagcgaagttttattcagtgtatgggtctggtcaaagagcttttgatctgttcaatccaaactacaagtctacctgtcaacggtttgtggagaagtacactgagctgcagaaacttggagaaacagatgaagagaagttatttgtggaaacagggaaggctttattggcagaaggtgtcattttaagacgagttggcgaagcaaggactcaacatgaaggtagtcacgattcctggaaatcnnnnnnnnnnnnnnnnnnnnnannnnnnnnnnnnnnnnnnnnngagactcagaaagaagttccacaggaccagcatttggaggcacctgcagaccagttgaaaggtctctcgcctccctgaaggacctgtatactgtgtannnnnnnnnnnnnnntactcactggctgaatgtnnnnnnnnnnnnnnnnnnttgaactgtgtaaatgtttcctgatctctaaggtattatgtttgccttctcttagttatttctgggttgtcannnnnnnnnnnnnnnnnnnnnnnnnnnngcagttatgcgaacttttatgttaggacattactaaataaagaattccctagctgcttataaagtaaatttactttgaattgtaaataaca

SEQ ID NO: 15651 - DNA, 733 bp, Macaca Fascicularis
  misc_feature (1)...(733): n = A,T,C or G
aggtcacnnnnnnnnnnnnnnnnnctgggttnnnnncagagtagccggattctgcnngtnnncggagaagnnnnnnnnnnnnnnnnnnnnnnnnnnnnnnnnnnnnaggacacgcgcgccgccgccaccgcgggtgtgggaaagcgcggacgtgctgggcgtctgcttccctaggcgaccaccgcccctggccgcgctccgggctttcacggaaactcccgagacggagccccgggttcctcctctcccacttggctctgctgtcctactcaagcgggtggctctgggatcctgggggcctgggttgggggctagggagacgccatgtgatgggcactccagggacacacagcctagcacagcannnnnnnnnnnnnnnnnnnnnnnnnnnnnnnnnnnnnnnnnnnnnnnnnnnnnnnnnnnnnttgatttcctccctctgcccctcccccagccatgccagctggcctttgtaagtgcaggaaaccgagtagaaaatgtgaccctccaaatggagaagctgcaggnnnnnnnnnnnnnnnccatggtgaagtgcttggaacatactgttcactcactctaaaggcgctgagactgtgctgttgttctcgtttttatagtcaatggcnnnnnnnnnnnnnnnnnnnnnnnnnnnnnnnnnnnnnacttcgcaccggagtgtctggannnnnnnnnnnnnnnnnnnnnnnattttaacttaactgaaatgcct

SEQ ID NO: 15652 - DNA, 682 bp, Macaca Fascicularis
  misc_feature (1)...(682): n = A,T,C or G
ctgtgttcaaagaagggtgctgaccacagtagtgctcccccagcagatggagacgatgaagaaatgatggccacagaggtcaccccctcagctatggcagagcttacagacctgggcaaatgtctgatgaagcatgaggatgtttgtacagcgctattaattacagccttcaattccctnnnnnnnnnnnnnnnnnnntcctgccagaggacgacctcacagctctgctggcctctcctcaaacaagnnnnnnnnnnnnnnnnnnnnnnnnntgcagttacgtggcttttcaccagtgtgctgaaaggcttacagatgcacgggcagcacgacgggtgcatggcttccctggtccatctggccttccagatatacgaggcgttgcgccccaggtacctggagataagagctgtaatggagcaaatccctgaaatacagaaggactcactggaccagtttgactgcaagcttttaaacccctccctgnnnnnnnnnnnnnnnaagcgccgaaaggacnnnnnnnnnnnnnnnnnnnnnnnnnnnnnnnnnnnnnccttgggagagcagttccgaaaagaagttcacattaagaatcttccctcacttttcaaaaaaacaaagccaatgnnaagacagaggtgctggacaatgatgggggtggcctggccaccatcttgaaccc

SEQ ID NO: 15653 - DNA, 741 bp, Macaca Fascicularis
  misc_feature (1)...(741): n = A,T,C or G
ttcagtacaattttgaacagcaactttttaattaannnnnnnnnnnnnnnaggaagatgagaaatgttcataggcgagtctgctgttctatgtcaccatcttttgtctcccctagtcccccaggagctctttcctttcccctctagttttgagtgtgcatgtttggagtttgtagtgggtggtttnnnnnnnnnnnnnnnnnnnnnnnnnnnnnngttgttcatgaaagcctcattcttttctctgaccctttagcttttgcattcaccctccttcccacctacctctcctggaactattgagcagcataataatcccgggagaatgattcccctcatagaaagactaaagcatccatccccttatagttaagtagccnnnnnnnnnnnnnnnnnnnnnnnnnagatttggtgccctgaacttttttattaagaannnnnnnnnnnnnnnnnnnnnnnnnnnnnnnnnnnnnnnnnnnnnnnnnnnntttcttttgaactctgaaaagannnnnnnnnnnnnnncattttagaaagaagagannnnnnnnnnnnnnnnnnnnttgttctgttttctgctacaaaaatgtgaatannnnnnnnnnnnnnnnttttgtgatggttgatgtctcaggaataagctggatctccaatgttttggggatgctttgagtctcaaaaaaattgataatcagaaaagtattttttgtttgtttgtttagtgtatccctgttctgtttaa

SEQ ID NO: 15654 - DNA, 736 bp, Macaca Fascicularis
  misc_feature (1)...(736): n = A,T,C or G
cattcccatcagggcctcatcacacgaaaagaagcgcctggaaaggacagtgctnnaagcgatgagacttcaggggtgggatctagaggggatgggggcgggaccaaaggcccacctctcacttccctgccatcctgggaggtggtggggannnnnnnnnnnnnnncaggggagggaaaggggctgnnnnnnnnnnnnagggcaggaatgctgagggctcttcagcctgggcannnnnnnnnnnngcctccctctttaggagttacaggagtatatggagctccccacccaaggaaggagaaagcgggggcgcccaggaagtagcagatgatgaagacacccagacagaggagcccttggatcagagggcagcacagatagcggaagaggccctgtcnnnnnnnnnnnnnnnnggggctggagctgctatctcagcctcagccccagctctgccatcttgagagccagcagctccagaggggaactggggaccaccactctggccaccttttgtcctcagcctccagcagcttgttcctcaggagccagcacctcccctgggctcacagggtacactgcggcctcctcagccctcccagttctcctgttcctaaacccacagcccagccttcccttcctctgagcagagcagccctggcttgggggctatttccttatgggattctctagccacagaaaggagtagctgactgagcctgggggacaggctacaaac

SEQ ID NO: 15655 - DNA, 675 bp, Macaca Fascicularis
  misc_feature (1)...(675): n = A,T,C or G
caaccccccaaaaaaagagaaagaaaaaaaagtttgcactaattgnnnnnnnnntgcaaatgagactttttgttgggaaaaggcaacatgccaggtctcctcaggacgatggaggcctcatatggtgtgttaccttgaaaactgaatatcaacgttcannnnnnnnnnnnnnnnnnnnnnnnnnnnnnnnnnnnnnnnnncatgagagcaaaggattactgcttaaaaatactgaatttacgttcacaaaagatttctaaggatttatgtaatgnnnnnnnnnnnnnnnnnnnnnnnnnnnnnnnnnnnnnnnnnnnnnnnnntcttcagcctttgttatctagctgaaaacaaatgagaactttcaaaacattggcagtagttgttgaaaaagacatctattgttcagagtttctttctccttaaaggacggtgttcaaatgaattcggtggagcccactttcctccattgtgaaggaagaaaccccaagagatactcagatgattaaattaaaagtggatcatcaaactcaagagaggcataaacttagacatagtcttgcatttttgtctttccnnnnnnnnnnnnnnnntttcctccttcacttgtcctgaannnnnnnnnnntacataataaaattttagatatttgtctgacaaannngtaatactcaa

SEQ ID NO: 15656 - DNA, 743 bp, Macaca Fascicularis
  misc_feature (1)...(743): n = A,T,C or G
atgtgtgtgcacacaccaantttaagaggtgcaaaatatcaggagttaatatannnnnnnnnnnnnnnnnatctgggaatgaatttaatcacaatgctagaatacgttacagatgtttagacatccgtggatnnnnnnnnnnnnnctgcataaacgggaaatggaatcctgaactagactgcacagaaaaaaaggaacaannnnnnnnnnnnnnnnnnnnnnnnnctaatgctcagaatatgacaaccacaatgaattatcaggatggagaaaaagtagctgttctctgtaaagaaaactatctnnnnnnnnnnnnaaaagaaattgtatgtaaaaatggacgatggcaatcattaccacactgtgttgagtctacagcatattgnnnnnnnnnnnnnnnnnnnnnnnntggagatatcacctcattcccattatcagtgtatcctccatggtcaacagtgacgtaccgttgccagtccttctatgaactccagggctctgtaactgtaacatgcagaaacaaannnnnnnnnnnnnnnnnnnnnnnnctagatccatgtgtgatatctgaagaaaacatgaacaaaaataacatacagttaagatggagaaacaatgaaaaagtttacgtaaaaacaggggatgctgttgaatttcagtgtaaattcctatataaagcgaagatatcatcaccatcatttcgagcaatctgtcaagaagggaaatttgaatatcccatatgt

SEQ ID NO: 15657 - DNA, 862 bp, Macaca Fascicularis
  misc_feature (1)...(862): n = A,T,C or G
ctaatatactgcgtatcctggtgtctagtttgcatactttcctggattttctttctatgtagaactgttcatttccaccaagggtatctgctgcctctgaaaatatttttttctagctataacaactctattttttactacataattaaattttaatgtaaaattcatagcatcttgattattgaatgtcatatcatcaatacttttgtgtattctgtggattctatatttcatattgagatcagcattcaaaatagttctatttctatctgcaaatagtttcaaatgagtttaaaaaataacatctgaaaagaaatgctaacgtaatcatttatcttatctagcaagaagattctaaaacattctttaacacacatctaagtcacagtttcacatatttgtagctagaatatcctatactggttatagttgacatgtaacagttggtgattttagatttctttgattgtgaaacagggagctatgaaagatgtgtccatgtgaaatttacagttactgcctaagagttaatgatcgttccgggtcagcttgaatgtccctgttctataaatacaacacttattttctgaattcataaaaataacaaaaaaaaatgtgaactataatgtttccctcaagaacaaacagaaacaagatccgccaaaaactaaaattcatcaaatgatgttgagtaggagattggctttgcctttagcgtgtaaatggaagcactgccattagannnnnnnnnnnnnntaagaataannnnnnnnnnnnnnnnnnnnnnnntcttgtatttgtttttttcttcaaaatgtcannnnnnnnnnnnnnnnnnnnnnnnccaggtggaaatgtagga

SEQ ID NO: 15658 - DNA, 728 bp, Macaca Fascicularis
  misc_feature (1)...(728): n = A,T,C or G
gcagacagcaaagacnnctcaggaggcctttgagtccgtnnngaatacttcggagagaaccccnngaccacatccccaggcctgttcttctccctctttagccgcttcgttaaggcctacaagaaagctgagcaggaggtggaacagtggaaaaaagaagctgctgcccaggaggcaggcgttgannnnnnnnnnnaaggggagcccccagcacacaagtcaccgccaaaggcccggcgggcacagatggacctaatctctgagctgaaacggaagcagcagaaggagccactcatttatgagagcgaccgtgacggggccannnnnnnnnnnnnnnnnnnnnnnnnnnnnnnnnnnnnnnnnagagcagacacaggccgccgcagtgcccgccggcgtcccccaggccccccactgcaggtcacatccgacctctcgctgtagccgctatttctgcaggtggattctgcaagggtgtggggccgtggacaggctgaggctcaaggaaggtggtcctcagctcggctggccgggcagcccctcctccgctgtggcccgccnnnnnnnnnnnnnnncatcctcctcttgccacagagggcaaatgctgcttgcagcacccaccccaaagccccctccaaatagccatacttagcctcagcaggagcctggcctgtaacttataaagtgcacctcgcccccgcaagccccagccccgaggaccgtccatg

SEQ ID NO: 15659 - DNA, 723 bp, Macaca Fascicularis
  misc_feature (1)...(723): n = A,T,C or G
gannnnnnnnnnnnnnnnnnnnnnnnnnnnnnnnnnnnnnnnnnnnnnnnnnnnnnncgccctggccggcagccccaggctgggctctctcaggccaacttccccctgggccctgtgagccgctcctacgggggccagtacagatgctccggtgcacacaacctctcctcccagtggtcggcccccagtgatcccctggacatcctgatctcaggacagatccgtgccagacccttcctctcagtgcagccgggctccacggtggnnnnnnnnnnnnnnnnnnnnnnnnnnnnnnnntcacagggatggatgcacactttccttctgaccaaggagggagcagctgatgcccccctgcgtctaaaatcaaagcgccaatctcataagtaccaggctgaattcccnnnnnnnnnnnngacctcagcccatgcggggacctacaggtgctacggctcactcagctctaacccctacctgctgactcaccccagtgaccccctggagctcgtggtctcaggagcagctgagaccttcagcccaccacaaaccaagtcccactccaaggccggcgagtgaggagacgctcgcggtgaagacgctgggcgcagagggtcaggtcctgtcaaggggagctgggtgtcctgggcggacatttgaagaattatgttcattccaacttaaagaattattcaacacctttaacaatttataagtgaagtactt

SEQ ID NO: 15660 - DNA, 738 bp, Macaca Fascicularis
  misc_feature (1)...(738): n = A,T,C or G
tgcaggtgacagcaggactgncaaaagcactttgcacttaatggctgttgagggccactttttttttatactgcacagtggcacaaaaaaatatcagacaagcactattttatatttaaaaattgtttcttgacaagctgacttggcacttaagtgcacttttttatgaagannnnnnnnnnnnnnnnnnttttcctcaagcaataattgtttccaacttgtctgggaattgtgtgtctggtaacttgaaggccttccactgtggcaaatggaggcttttcannnnnnnnnnnnnnnatacagtaagcatagttaaggggtgggtccgaacatgttaagataacttactgtatatgtattcccttgtattttgttaannnnnnnnnnnnnnntatttttccatttatttatgaaaaaatatgaacctattttcatttgtacaaggtaattgttttttaaagcaagtcaccttagggtggctttaattgtataagtcaagcacatgtaataaattcaaaacctgcagttaacaggatatcagacatcaatcctggtaaccaaatattaaagattctctttaaaataaaaagacnnnnnnnnnnnnnnnnnnnnnnnnnggctaaaaggtcttgcagtggcttttcatgccccttcaaattggaatggaactactgtactttgccatttttctataaatcagtatttttttttaattttgatataatacnnnnnggaaaa

SEQ ID NO: 15661 - DNA, 743 bp, Macaca Fascicularis
  misc_feature (1)...(743): n = A,T,C or G
cacacagagnnnnacgcagcgccaggatgagannnnnnnggggaagggtntggagacgtccacaccggaagggtnnnnnaggcccgnnnnnnnnnnnnnnnnnnnnnnnggcacaggtggnnnaggcctcaacagagctcgtggtgccgggtcaccacaggcatggaccacagcgcaagacgcttcctctggaacagccttttggccgtggtgcgggagggccgttcannnnnnnnnnnnncatctcaagggcagattcgcggccggccacacactgaccctgcgggttcccgccgagaggtcccagccggcagcagccttcgtggcggccgagttccctggggcggagctgcgcgaggcacacggatnnnnnnnnnnnnnnnnnntgccgccgggagggcgctgcgccctggcgcgcgtctttggagnnnnnnnnnnnnnnngcgcagagcacggcgtggaggacttttctgtgagccagacgatgctggaggaggtattcttgtacttctccgaggaccaggggaaggatgaggacgcagaggagcacaaggaggcaggagtgggagtggaccccgcgccaggcctgcagcgccccannnnnnnnnnnnnnnnnnnnnnngaccctagcactgannnnnnnnnnnnnnnnnnnnnnnnnnnctgcagggccgcggggaggccctgggaatggcaagggcagggtagagtgcccaggcgccctggacttaggctggcagagg

SEQ ID NO: 15662 - DNA, 686 bp, Macaca Fascicularis
agggcaggcacctggccatgctggctgggtggccccagcacagccttgactaggatgagagcagcacaaaagaccacctttctcccctgagaggagcttctgctactctgcatcaccgatggcactcagcagggtgatgcgaagcagtctgcctcccctatgggactcccttctaccaagcacacgagctctctaacagggtgggggttacccccagacctgctcctgcgctgatattgaagaacctggagaggatccttcagttctggccattccagggaccctccagaaacacagtgttccaagagaccctaaaaaacctgcctgtcccaggacactatggtaatgaacaccaaacatctaaacaaccatatgctaacatgccgctcctggaaactccactctgaagttgccactttgaacaccaacactcccctctcccagggtcgtgcagggatctgctccctcctgcttcccttaccagacatgcaccactgactcccaggaagtctttcctgaagtctgaccaccttccttcttgcttcagttggggcagactgtgatcccttctgccctgggagaatggtaggggtaatctgagccttgttcactcctttaccctagctgaccccttgacctctccccctcccttttcttttgttttgggattcagaaaactgcttgtc

SEQ ID NO: 15663 - DNA, 728 bp, Macaca Fascicularis
  misc_feature (1)...(728): n = A,T,C or G
gggccaggcannnngaaggaccgagtcctgcagatgcagagggaaatccgaggcgcccggcccaagcccagattcggctctgtggtgcnnnnnnnnnnnnnnnnnnnnnnnnnnnnnnnnnnngcctggctcagcgtgcccgtggtcctcaacttgctgagctccagacaggtcatgaacacccatttcaactctcttcacattgtcaacacttacggggccttcggaannnnnnnnnnggagcggacggaggtgatcctgcagggcacggccagccccaacgccagcgcccccgacgccgtgtgggaggactacgagttcaagtgcaagccaggcgaccccagcagacggccctgcctcatctccccgtaccactaccgcctggactggctgatgtggttcgccgccttccagacctacgagcacaatgactggatcctccacctggctggnnnnnnnnnnnnnnnnnnnnnnnaggccctgtccctgctggcacacaaccccttcgcaagcaggcccccgcccaggtgggtccgcggagagcactacaggtacaagttcagccgtcctgggggcaggcacgccgccgagggcaagtggtgggtgcggaagaggatcggagcctactttcctcctctcagcctggaggagctgaggccctacttcagggaccgtgggtggcctctgccccagcccctctagatgtgcaccagaaataaaggcaaaga

SEQ ID NO: 15664 - DNA, 712 bp, Macaca Fascicularis
  misc_feature (1)...(712): n = A,T,C or G
agagcccctcnnnnnnnnnnnnnnnnnnagagagacgctcttcaccctggatgaccaggcgctggggcctgagctcacagctccagcaccagagcctccctccgaggagccacgcctggattccgcgggcccagcctgcccggagggagggcgagaggaggtggacgcggaaccgcccagcgtggggccctagccggcgtccccagcctccagaacgcgggctggaccccaatggagaacaggtggcgtggcaggcgagcgggtgggcagcccgcatcatccagcacgagatggaccacctgcagggctgcctgtttattgacaaaatggacagcaggacattcacaaacgtctattggatggaggtgaatgactaaagctttgctactggggctgaggatttcggataccaagacgcacacacttccactttgacctgggcacgtcttacttcgcatcaacttggatggcttgcatatgacaggaaactggactgccaaggcatggcagactgagctggaggaagatgtcagaaatgtttgccctgaaatcagctatgaacggaatgttgtttacaacttgaggagaaaaatcacccccaaaggagtggacgtttcctgacaattctgtatggaggaaggtggggtaactgcattcgtctgcagtagacacgagttcctcggacctgtataatctcccaaagccaaggttt

SEQ ID NO: 15665 - DNA, 767 bp, Macaca Fascicularis
  misc_feature (1)...(767): n = A,T,C or G
tgctaaaatgagaaanngtccaccannnttcagtaataatcccaaggagcttactatggaaacgaaatatgataatannnnnnnnnnnnnnnnnnnnnnnnnnnnnnnnnnnnnnnnnnnnnnnnnnnnnnnnnttcaacacaatgggaaaaaaatggaatttgttgcctcggagtctgtcactccagaagataatgatggatttaaaccaccccgagagcatctgaactctaaaaccaagggagcacaaaaggactcaagnnnnnnnnnnnnnnnnnnnnntgaagataatctgctgactgaatcagatgtgatagatataactaaatgtagagaagaaactccaccaaggagcagatgnnnnnnnnnnnnnnnnnnnnnnnntcagaatattaaaaaggcagttgaggttcaaatacagaaaccccaagagggacgatctacagcatgtcaaaaacagcaggtcttttgtgatgaagaattgctaagtgaaaccaagaacacttcatctgattctctaacaaagttcaacaaagggaatgtgtttttattggatgccacaaaagaaggaaatgtcggccgcttccttaatcatagttgttgcccaaatctcttggtacagaatgtttttgtagaaacacacaacaggaattttccactggnnnnnnnnnnnnnnnnnnnnnnnnnnnnnnnnnnnnnnnnnnnnacatgggattatggttatgaagctgggactgtgcctgagaaggaaatcttctgccaatgtg

SEQ ID NO: 15666 - DNA, 705 bp, Macaca Fascicularis
  misc_feature (1)...(705): n = A,T,C or G
ggccccagtgggtggaatgtgtgagcgcgagagaagttgcnnnnnnnnnnnnnnnnnnnnnnnnnnnnnnnnnnnnnnnnnnnnnnnnnnnnnnnnncacacattcggcatgaaccatgacggcgtgggaaacagctgtggggcccgtggtcaggacccagccaagctcatggctgcccacattaccatgaagaccaacccattcgtgtggtcatcctgcagccgtgactacatcaccagctttctagactcgggcctggggctctgcctgaacaaccggcccccgagacaggactttgtgtacccgacagtggcaccgggccaagcctacgatgnnnnnnnnnnnnnnnnnnnnnnnnntggagtcaaatcgcgaggtctgcagcgagctgtggtgtctgagcaagagcaaccggtgcatcaccaacagcatcccggccgccgagggcacnnnnnnnnnnnnnnncaccatcgacaaggggtggtgctacaaacgggtctgtgtccccttcgggtcgcgcccggaaggcgtggacggagcctgggggccgtggactccttggggcgactgcagccggacgtgtggcggcggcgtgtcctcttccagccgtcactgcgacagccccaggccaaccatcgggggcaagtactgtctgggtgagagaaggcggcaccgctcnnnnnnnnnnnnngtgagttccccca

SEQ ID NO: 15667 - DNA, 720 bp, Macaca Fascicularis
  misc_feature (1)...(720): n = A,T,C or G
caccattgacnnnnaggagctgtacaggaagagggcaagatgttagcgtttagaatctccgccccagcccttcactaagcctgtgagccgcaggcagagcctcgtgtgtcagcgtagccccgggttgctgtgctgttgtgggcattgctgccgcacgtggtaatgcagctcagtgtcaggcgtggggttcaggatgtttcagactcggaacttgggctcttattcggccgcctcatttgctttgtggtcttaggtgggatacttttgagtttctcctagaaaatgtggttgagaaactcacctgaagcgtttttgggggttaaggtgataccctcaaaccctggactcacatgaggctcataggatcaggagcgcccttcccacagtgcctccgtgtctgtggccatggcagcctcatggggtgggtgaagaggagagagtggtgcctgagctggggttagcatccgtttctcctccagtccacttcactttgtcgcctcttccagggtccgcaagcaggtggtgaatatcccgtcgttcattgtccgcctggattcccagaagcacattgacttctccctgcgctctccctatgggggtggccgcccgggccgcgtgaagaggaagaacgccaagaagggccagggtggggccggggctggagacgacgaggaggaggattaagcccagctttccctcctgggctgctggattgtctag

SEQ ID NO: 15668 - DNA, 683 bp, Macaca Fascicularis
  misc_feature (1)...(683): n = A,T,C or G
ttactgtggccttctttccttgannnncacaacaggctctgggcagtgggcggtgattgggtgtagggccaccagtcgcctcacannnnnnnnnnnnnnnnnnnntgttgctatcggggactacaatggccacgtcggcctgggtgttaagtgctccaaggaggtggccactgccatccgtggggccatcatcctggccaaactctccattgtcccggtgcgcagaggctactgggggaacaagatcggcaagccccacactgtcccttgcaaggtaggctggtggcaggttatgggcctgctgtggggcgggctcccttgggcccttgcctcctgacttcttccctcaccaggtgacaggccgctgcggctctgtgctcgtgcgcctcatccctgcacccaggggcactggcatcgtctcagcgccnnnnnnnnngaagctnnnnnnnnnnnnnnnnnnnnnnnnnnnnnnnnnnnnnnnnnnnnnnnnnnnnnnnnnnnnnnnnnnnnnnnnnnnnnccaccttcgnnnnnnnctctaagacctacagctacctgacccctgacctctgnnnnnnnnnnnnnnnnnnnnnnnnnnnnnnnnnnnnnnnnnnnnaccaccttgtcaagacccacaccagagtctccgtgcagcggacccaggctccagctgtggctacaaca

SEQ ID NO: 15669 - DNA, 762 bp, Macaca Fascicularis
  misc_feature (1)...(762): n = A,T,C or G
aagagacggtgcggaagcttcaggccaggttatggngggaagagtcttccaagagggctgaactagaaaagtggcacttggagcagcagcaggccattcagacaactgaggcggagaagcaggagttggagaatcagcgtgtcctgaaggaacaggccctgcaggaggccatggagcagctggagcagcttgagttagaacggaaacaagcacttgagcagtacgaggaagttaaaaagaagctggagatggcaactgataagaccaagagctggaaggacaaagtagcccatcatgaaggattaattcgactgatagaaccaggttcaaagaaccctcacctgatcactaactggggacctgcagctttcactgaggcagaacttgaagagagagagaagaactggaaagagaaaaagaccacggagtgactgagcttgctggcagtcacatcagttatgtagatactgcatggcaggagagctttacgctaaagacaaaagaaatggctttgggggcnnnnnnnnnnnnnnnnnnnnnnnnnnnnnnnnnnnnnnnnnnnnnnnnnnnnnnnnnnnnnnnnnnnnnnnnnnnnnnnnnnnnnnnnnnnnnnnnnnnnnnnnnnnnnnnnnnnnnnnnnnnnnnnnnnnnnnnnnnnnnnnnnnnnnnnnnnnnnnnnnnnnnncagctacttgggaggctgaggcaggagaatcacttgaacctgggaggcgcaggttgcagtgagctgagatcatgcca

SEQ ID NO: 15670 - DNA, 729 bp, Macaca Fascicularis
  misc_feature (1)...(729): n = A,T,C or G
tagagagcggccagacgccaaaggnnnnntcgcgggcgtcggtgggtgtcgcggggccagagnnnnnnnnnnnnnnnnnnnnngtgtacctgatcatcgccatctgcgcggtgtccagcctgctggtgctcacactgctgctgtacacggcgctgcggtgctcagcgccgcccaccgagggtgcgtgtgcgccgggcaagcccactctggtgtgctccagcgcggtggggagctggtcgaactcacagcagaggcagcagagggtatgctctagcgagggcccacccaaaaccgacctcatggccttcagcccaggcctacctccaagtcttaacacgtcagaaagaaatgaacaaccagaagcaaatttggatctttctggtaatcnnnnnnnnnnnnnnnnnnnnnnnnnnnnnnnnnnnnnnnnnnnnnnnnnnnnncacagctctgtgcacctagaggaggctggcattctacgggctggtccaggagggccnnnnnnnnnnnnnnnnnnnnnnnncagtgcaacaccagaaccagaggcaggagaagtgtcccctcnnnnnnnnnnnnnnnnnnnnnnnnnnnnnnnnnnnnnnnaatacggaccaggcaaccccaaacaatnnnnnnnnnnnnnnnnnnnnnnnnnnnnnnnnnnnncaggatctcctgcaatcatctccatccggcaggagcctactaacaaccaaatgacaaaagtgactc

SEQ ID NO: 15671 - DNA, 742 bp, Macaca Fascicularis
  misc_feature (1)...(742): n = A,T,C or G
gcctcgagacagcaatgagctggtgnnnctttcagaagacaacatgaaggatgcctgggnnnnnnnnnaaaactactgnnnnnnnnnnnggtgtgagaacacagtgggtgaccaaggctttccagatgaacccaaggaaagtgaaaaagctgannnnnnnnnnnnnnnnnnnnnnnnnnnnnnnnnnnnnnnnnnccaagtggaggcactcttcagttatgaggctacccaaccagaggacctggagtttcaggaaggggatataatcctggtgctatcaaaggtgaatgacgaatggctagaaggggagtgcaaagggaaggtgggcattttccccaaagttttcgttgaagnnnnnnnnnnnacagatttgnnnnnnnnnnnnnnnnnnnnnnnnnnnnnnnnnnnnnnnnnnnnnnnnnnnnnnnnnnnnnnnctattacctgtttgtaagatttagcacccttctgctgtacactatactgggacattacagtttggaagtgttaactattctctgttaaaatttaacctactagacaatgatgtgagtacctaggatgatttcctggggcacagcgggtgaggggatggggacaggtgaatggaggagttaggtgagaggaggagcagatggaagtgtctggaaagggcaccagagggtnnnnnnnnnnnnnnnnctgtttcttgatctgagagctggctacccagctgcgttcccactgtaaacattcatcaagct

SEQ ID NO: 15672 - DNA, 750 bp, Macaca Fascicularis
  misc_feature (1)...(750): n = A,T,C or G
cacaaccaaccaatactgcgatccatgaggggctcnnnntgtggaaaaggagagctgttccagaacacagaacttatctcaggtttttgaaaaaaacaaacaaacaaacaacaacaacaaaaaaacctcacatgatggggaacaaacaaacaacaaagaagccacagcacaccttccccgccaggcacagcaccgcccagaacggcgcaccacggacagcaccacacatgttccagaatctgaaatcgcaaacaaaagccatttactattttaaaacaactaaacagagccatgaaacaaatgccctgatgaaaataagacaactgcatgttacatcattggcactttatatgttactgttaccatgaaaaataaatgaacagcagcacgtctgataccatcagccggttagatgcattaaggttaaatctaagtgtcaggaaaaccctatttctttataatatttatgcagctgttaagcgtaacatggtggcagcttcacaacaagaaccgtgatcgtgcatgcagtcatgtctccagtattctgtgaagagccaggatacattaggatgtgagtttagaaactgagtccattcggtgcatggaaagccccctcggcgtcacacaatgcccctcactgtagtctaagcgatttgtgggctgccagcaccctgcgggcttcccagggacgcgtgcttgttctccaagccccgcaacccttactgtgtcacacaacactcgcacacacct

SEQ ID NO: 15673 - DNA, 764 bp, Macaca Fascicularis
  misc_feature (1)...(764): n = A,T,C or G
actgatatttcccaccttgtcagaaagaagaggaaaccagaggaagagagtccccggaaagatgatgcaaagaaagccaaaccagagccggaggtgaacggaggcagtggggatgctgtccccagtggaaatgaagtttcggaaaacatggaggaggaggtgggcagttaagcagggcttagcttcttgcctcattcgttgttctcaggacctggggaaatcagtcctcccaagtgcatgctccccaccttgagcctgttnnnnnnnnnnnnnnnnnnnnnnnnnnnnnnnnnnnnnnnnnnnnnnnnnnnnnnnnnnnnnnnnnnnnnnnnnnnnnnnnnnnnnnaaaaggaacctgtatatcataggtccctcaatgaacataggagaaggnnnnnnnnnnnnnnnaccattaggtcacttccttnnnnnnnnnnnnnnnnnnggctctgtcaaccccattatcacagagcattcaagaaatactgccctcttaatatagggagcaaagcagagtttgggtgacttgtatatgctnnnnnnnnnnnnnncctcannnnnnnnnnnnnnaacggctnnnnnnnnnnnnnnnnntgcccaggctctgtcttccaggctgagaatcgggctgaaagccgggcggcagtggaggcgacagtggaggcnnnnnnnnnnnnnnaaagcactgcatgttaagaggcggcacagccccccacccaagggaaagtgtttttgtatataatgtattttttcactttggaggc

SEQ ID NO: 15674 - DNA, 712 bp, Macaca Fascicularis
  misc_feature (1)...(712): n = A,T,C or G
tctttagccaccgctgcnngacnntccagtgaacatgatnnngacnnntactcaggattccccctgctccaaactttgcccatcctctttgccccctcaggagtgctgagggccagcgttgacccacaccaccctccctagaccagctgtctgggaccagaaaccagctttgtctccgggtggagacaacttcttgtgattgccaggcagaagggacagggcccaggtcagcctcgtctgctgtgcccccagaatgcagagctcnnnnnnnnnnnnnnngaaaaggctacctctcctacccaagttaagtgttcagagaggatatgagggcctccactgaagcagggaggcagctgtgtaatcctannnnnnntctcttaggaagcaccagtacttacattgggcatgcacttgcccttaaaaacaatagtctgtgagtccatattttgctgcttctgttctgggtctgaattcccttttgtgccagatgccagtacnnnccgnnnattggcttcaggggctgtgtgggcagattcagtatccagagggcattcagatcatttgcttttttgaaggagtaaatgtgttttgttcctagggccagaggagcttgtcttccttgtcctctgttcccaccctcccctgaacagaacccagcccatgagagacattctcagatgaaactctgttttcttgcctcagtcaggctcaa

SEQ ID NO: 15675 - DNA, 794 bp, Macaca Fascicularis
  misc_feature (1)...(794): n = A,T,C or G
gcgggctacccnnntgccacccatgacctggagggaccacctctagatgcctactcgattcaaggacaacacaccatttctccgctcgatctggccaagctgaaccaggtggcaagacaacagtctcactttgccatgatgcacggcgggannnnnnnnnnnnnnnnnnnnnnnnnnnnnnnnnnnnnnnnnnnnnnnnnnnngggcaagttaggatgcatctagctcaaaccacccatgaactcaccattccaaataacttaattggctgcataatcgggcgccaaggcgccaacattaatgagatccgccagatgtccggggcccagatcaaaattgccaacccagtggaaggctcctctggtaggcaggttactatcactggctctgctgccagtattagtctggcccagtatctaatcaatgccaggctttcctctgagaagggcatggggtgcagctagaacagtgtaggttccctcaataacccctttctgctgttttcccatgatccaactgtgtaatttctggtcagtgattccaggttttaaataatttgtaagtgttcagtttctacacaactttatcatccgctaagaatttaaaaatcacattctctgttcagctgttaatgctgggatccatatttagttttataagcttttccctgtttttagttttgttttgggttttttggctcatgaattttatttctgtttgtcgataagaaatgtaagagcggaacgttaataaatttcagtttagctctgtacattcatatcgacaaacagaaa

SEQ ID NO: 15676 - DNA, 959 bp, Macaca Fascicularis
acaggtcccagaagaggaggccagtcagaatggacagagccggggcctccccaaggccgtgtgtatgaacggcacggaggcggcgcagctgagcaccaaatccaaggcggagggcagggcccccaaccctgcccgcaaggcctgctccgccagcagcaagatccgccggctgtcggcctgcaagcagcagtgagggtggccacctgcagcccgtgtccaggagccccgccaggtgcccgcgccaggacctcagtcttcctgccggtcccgcccgccctcccggagaggtggctgccgtgcctctgtgccgaccacgccccaggacctccggagcaccctgcagggccgggcagggggacagcagggaccgggcacagccctcccctcggccgcccggcagtgcacgcttgttgactttgcagcccggggcagagccttcccgggcaggcgagggaggagggaggcggcctcgatgcactttaagtggagactactggccccgcccgtggcctcgtgctccgcagggcgcccagcgcagtccccgccgcagaccagcgggcgggtgtggagaccaggctcctggccctgccatgcatgcagcaccgcccggaagccgtgcggccactttggttttgtttggttggttccattttctttttcttttttttttttaagaaaaaataaaaggtggatttgagctgtggctgtgaggggtgtttgggagctgctgggtggccggggtggggggggccgtggggttgggctcacgtcgcagctgcctttgcgcgctcgggtcaccctgcttcggccgcccggtctgagggcaggacccctcacctcccccaaggccactgcgctcctgggaccccagagaaaactcggagcgagcaggagtgtgcagtcagtatgtataatcatccagaaaacaaacacgagaaacgccatcgcgggatggtgca

SEQ ID NO: 15677 - DNA, 963 bp, Macaca Fascicularis
  misc_feature (1)...(963): n = A,T,C or G
gcctggagaagcaactgttagtgttcccgggacacaagtgtgggagtctgcaacttgtggacctggcgagcacaaagcctggcacctcgtctgctccattcaccatcaatgcacatcagagtgacatagcctgtgtgtctctaaaccagccaggcactgtagtggcctcagcctcccagaagggtacccttatccgcctctttgacacacaatccaaggagaaactggtggagctgcgccgaggcactgaccctgccactctctactgcattaacttcagtcacgactcctccttcctctgcgcttccagtgataagggcaccgtccatatctttgctctcaaggatacccgcctcaaccgccgctccgcgctggctcgcgtgggcaaggtggggcctatgattgggcagtacgtggactctcagtggagcctggcgagcttcactgtgnnnnnnnnnnnnnnnngcatctgcgccttcggtcgcaatacttccaagaacgtcaactctgtcattgccatctgcgtagatgggaccttccacaaatatgtcttcactcctgatggaaactgcaacagagaggctttcgacgtgtaccttgacatctgtgatgatgatgacttttaaggaccctgggggctgtgctagggacctgcagtggcagactgcagagctgagccttggcagtggggcgtgcttggaagccaccagccagcaagcattaatggggccggtgcccactttctactcagcagggctatgtctaaataaagagctcaattccccccagcacttcttgatgactgtgtgccccaagggctaggccagagacccaggaaggcagcgaccccttgggatccctaacttggaggaaattgccagggacccagagggagnnnnnnnnnnnnnnnnngagattttttaaaagcttcctaggaagagatgatttccgatgtgagaatac

SEQ ID NO: 15678 - DNA, 750 bp, Macaca Fascicularis
  misc_feature (1)...(750): n = A,T,C or G
tcaagcatcctcccnnnngagcctcccaagtagctgggactataggcacctgtcaccaannncagctaatatttttttaaattttttagaggcaggatcttgctatccaatgtttttaaaaaactaaaattgccaactttagaatcttgacagaaaaaattaattttaggagagtctacttatgcagtgttcaaaagtactgaattagaaaccaggaaattttagttccttctacctgtgtgatcttggggaaattatttaacctctcagtcctaattttccccttctgtataatgggagtcctggatcacaatatgtctgggctctcattacccaaacatccgagattccatttttgccacgtgtcatcgagtctctccccaacagatgtttgtgatgcttttgtggctctcaccatggtgggcttctttcagaattagactcctggtaagtcactgagtcagcagccttcacactatctacccttaaatattcaaccccagcaatttattcaatgctgtcatatttttataaaaacaaaagtaagccatcctcatataaggaaccccttggtagatattaaccttaaaaagggttttcattctcaaacaagatgctttgttctccagcaagatattcatctcatcccttgcacttttgtttaatttgtggattcagattagactgaggaaaacggaaaatatgaccttggtattttcttaaagttgtgccaccttagagccctttttt

SEQ ID NO: 15679 - DNA, 730 bp, Macaca Fascicularis
  misc_feature (1)...(730): n = A,T,C or G
cgctnnnnnnnnnnnnnnnnnnnnnnactggagagaaaccatatcgatgtgaggaatgtgggatatcntttggccaaagttcagctcttattcaacatcgaaggatnnnnnnnnnagaaaaaccttttaaatgtaatacatgtggaaaaacttttagannnnnnnnnnnnnnnnnnnnnnnnnnnnnnattcatactggagagaaaccctatgaatgtaatacatgcgggaaacttttcaaccataggtcatccctcacgaatcattataaaattcacattgaagaggactcctagaaagtagatttgtgtgtgtgaaagccttaaaccaaagctcatcaaagaatgcatccttgagagagatnnnnnnnnnnnnnnnnnnnnnnnnnnnnnnnnnnnnnnnnnnnattaggtatttaattccatggataaacctcaactatataatagatatgaggaaagtgtttgtgcttgtcagacacttaaaaaaataacctgagatgaagannnnnnnnnnnnnnnnnnnnnnntcagccatttgtgaaatgggtttgctttttcccttttcctacagacatacatgctagatgtcatgtgatcatcagaaacagatccaagtgggtggggaggcgtgctttagatttctcattagaagaccaccaaactggtaatatttttatagcattttaataacatacaaatgaattgatcaaattgtacctttttagaga

SEQ ID NO: 15680 - DNA, 701 bp, Macaca Fascicularis
  misc_feature (1)...(701): n = A,T,C or G
gagatgagactnnacgccgccgggcgctgggctggagctnnggcagcccagggttgtggggacacaggagggccagggaggggggagccggggagggcagggggtttcccgaagatcgcactggaagattttataaaagaatttttgtgggtgggggggatagtaaacttcctggaccacttgggtccttcaggagtttttcaggcaagtttttcctctgtttttaatatataactataatatatatgaatatataaatataactaatgtgcgtgagaatgggcctggcacacctgcggtgctcggggctagggctgccatgctgcagagccgatggagtgatgttgtggcacaaggtgtctcagctgcctcgtttaacagccatgccttctggaatctggaagcggaccccactcccacagtcaccggggcagccacatagcggctgcaggtcccaggagggcctgaagccaaagttgtggaaggccctcttggtatcagggctctctctccccatggcctcttccccacctctgattgctggttgtggccccatagctcttgtcacctgtctcctgctgaatgcagggctgatgtggcactgaggagctgacttaggtcaaaggtcaggctctgcccagcaggggacttgactgccccgggcgccctgcccctaccactgcctatagccttacttccca

SEQ ID NO: 15681 - DNA, 735 bp, Macaca Fascicularis
  misc_feature (1)...(735): n = A,T,C or G
gcaactgcagccgcccggcctgcccagcaggcgagctccgnnnnnnnnnnnnnnnnnnnnnnnntccactcacgtggcgctgcgacggccacccagactgtcctgactccagcgatgagctcggctgtggaaccaacgagaccctcctgaaaggggatgccacaaccacggggccccctgcgaccccggagagtgtcacctctgtcgggaatgtcacgtcctcctctgccggggaccagtctggaagctcaggtgtctatggggttattgcagctgctgcggtgctcagtgcnnnnnnnnnnnnnnncaccctcctccttttgtcctggctccgagcccaggagcgcctccgcccgctggggctactggtggccatgaaggagtccctgctgctgtcnnacggaagacctcgctgccctgaggacaagcacttgncgcaccgtcacccagccatgggcacagccgggcaggaggagagcagtgatgcggatgggtacgcaggcacaccagccctcagagacctgagttcttctggccacgtggaacctcgaacccgagctcctgcagaagtggccctggagactgagggtccctggacactccctatggagacccggggagccaggatgggnnnnnnnnnnnnnncagaactgaggggctggccccaggcagctcccagggggtggaacagccccgtgcttgagacactcctgctgccctgtctgagggggcgat

SEQ ID NO: 15682 - DNA, 579 bp, Macaca Fascicularis
gttaccaacacgtgagcaggatggtgggactcaaaatccagtgtcttctcccgggatgtctcaggaattgagaacaatgacgaccaatagttcagatcctttccttaacagtggcacctatcactctcgcgatgagagtacagacagtggactaagcatgagcagctacagtgtccctcgcaccccagatgacttcctgaacagcgttgatgagatggatacaggtgatactatcaaccaaagcaccctgccctcacagcagaaccgtttcccagactaccttgaagccattcctgggacaaatgtggaccttggaacactggaaggagatggaatgaacatagaaggagaggagttgatgccaagtctgcaggaagctttgagttctgacatccttaatgacatggagtctgttttggctgccaccaagctagataaagaaagctttcttacatggttatagagccctcaggcagactgaattctaaatctgtgaaggatctaaggagacatacgcacctgaaatttccataagccagttgcaattttctggctaatacagaaaaagatgaacaaacg

SEQ ID NO: 15683 - DNA, 745 bp, Macaca Fascicularis
  misc_feature (1)...(745): n = A,T,C or G
annnnnnnnnnnnnnnnnnnnnnnnntnnnnnnnnnnnnnnnnnnnnnnnnnnnnnnnnnnncccgcnnnnnnnnnnnnnnnnnnnnnnnnnnnnnnnnnnnnnnnnnnnnnnnnnnnnnnnnnnnnnnnnnnnnnnnnnnnnnnnnnnnnnnnnnnnnnnnnnnnnnnnnnnnnnnncctgccctcggccacgtccggcatggaaacctaccacatgcaccatgaaaccacagcnnnnnnnnnnnnnnnnnnnnnnnnnnnnnncacttccgcacgccgcagcttctcccagcagtaatggcgattgcactggcgtttgggcaggcggcagaagtcacccgtgagctcaaagacatcacgtacaagggggcacccgcatacctcgtcagctggcacctgcagggaggccgggttggagggatgaataatggtgataagggagaataagaatgggggctcaaggagggagaagggaaggaatggagggttcagggaacggtgaggaggcatggaaaagggaggaatggagggtgaagcagcagggaaggtgagaggaaaaagtgaaggaaaggtgaggtgagggaggcagggatgaatgtgggacagtgaggcagggaggaggggcaaaatgggaggagctgagggaaaaccttactttggggtcccgtgagtgctcggggcacagcacctggagccgcttacagtatgttttgctctgaggattatacacatcacagaagagtc

SEQ ID NO: 15684 - DNA, 708 bp, Macaca Fascicularis
  misc_feature (1)...(708): n = A,T,C or G
gagagcagggtttctcagattcctttttcatctctatttatctggttgtttctgacaggatgctgcctgcttggctctacaagctggannnnnnnnnnnnnnnnnnntaattaatgaaagatgaaaataggaagtgccctggaggaggccagcaggtcacggggcagaatctcgcaggttgctgggggatctcagtgtgcccctacctgttctcccctccaggccagctgtctctgtaaaggatgtctgctctgttcaaaaggcagctgggatcccagcccacaaatgatcagcagagttgcatttccaaagaaaaaggctatgagatgggctgagttatagagagaaagggagaggcatgtacactgtggggaagtggaagagaagctggcggggggagaaggaggctaacctnnnnnnnnnnnnnnnnggactagtgagaatcagctgtcgataatggccggagacatccacagcttggaggagcccagaaactctttgctttatacccacacagcaactggtccactgctttcctgtctgttggataatggctgtaaactgcttaaaaacaaannnnnnnnnnnnnnnnnnnnnnnnctatctgcnnnnnnnnnnnnnnnnnnnnnnnnnggaaacagactatgattaatccgtttattcttcccacacactgaccttactaattcttccctttaataaatgagc

SEQ ID NO: 15685 - DNA, 709 bp, Macaca Fascicularis
  misc_feature (1)...(709): n = A,T,C or G
ggtgctaccaaaatgcatccccatgacccacagcacccccccccccccactcccgtccttgggtagggtacagtgaggtggggtgttgggtggcctgctgctcctgctgctttcgcctagagtcccggcctgggcaatcacgtgnnnnnnnntcctggatgtgctgtcctatccagcctctcacagctgccacccgggtatagacacctgggaagtggggccggccgcagccatagccccannnnnnnnnnnnnnnnnnnnnnnnnnnnnnnnnnnnnnnnnnnnaggccaggggtcccccagcgtcacccgagcagctgtccacgccgccctgcgggaagccggcacacagcatgcggnnnnnnnnnnnnnnnnnnnnnnngcggcggcaggtctgctcgctgaggaggcgcacggccgccttctgcagctgccgcgccatggagcctccttcgcgcaccgagccccagccggtgatgacgcagcgcgcaccgtctgggggtcgcggcacaggctcgggcaggcagatgggacgcaccaggtggctgcggcgcaccggccccgccagctccnnnnnnnnnnnnnnnnnnnnnnnnnnnnnnngatnnnnnnnnnnnnnnntgtnnatgcgcgccacgcgctccagctgcccctccgcgccgctcnnnaacggcgtgcctagnnnnnnnnnnactgcttggggtccccg

SEQ ID NO: 15686 - DNA, 713 bp, Macaca Fascicularis
  misc_feature (1)...(713): n = A,T,C or G
tgctccagannnagggcagaggagcagctcccagcccccaccagccatctgctcagcccctgcccccctgatccccaggtccccacaccccagccaaacccctagctccccactccagagctgcactcccaatctctcaccccgtggccatgtccccagtccacaccaggctcttgtgaccaggccccagaaacctagcctggagtttaaggagtttgtagggttgccctgcaagaatcagcggccttctcccaggaccggagctaccaaaggagcccaggagccctgccgtgtctgggtgagtgtagcccctctgcagctggagggtggaatgaggaaggcctgaggtggagctgggagggagcatgggtagccttggatggggttggggtccttgttagctcttccccagacaccatacccctttcaggaacccccaaagaggcatcgtgatggttctgccttccaatatgagtatgagccaccctgcacgtccctctgtgctcgggtccaagctgccaggtgagttcctgggtctgccnnnnnnnnnnnnnnnnnnncccaggctccattgacctgcagccgtggtttctttccaggcttcctccccagctcatggcctgggccttgnnnnnnnnnnnnnnnnnnnngtctgagccaactccaatgtgagaggtcacgcaggacagataccgctccacactctgcttcct

SEQ ID NO: 15687 - DNA, 725 bp, Macaca Fascicularis
  misc_feature (1)...(725): n = A,T,C or G
gagagcggcaannnnnggggccagttcaggtggtccctgaccatgagctaggnnngaaagttacacagccaagtttgagtnnttaaaagtttgtgaacagccctcatttccccagcttccctgatttcttccagatgggacgttttgtttgtgtgctctcccttgcctgtnnnnnnnaggtaagagcagttctctccctttcctctcgaggaggaggtgtgaagtcctggagtattgtttgggtctaggaatgggcacataacctgcgctgaccagtttaggggcttaacagatgcccgccaactgacctcgttggcaggaggattgggtggagatgtttttnnnnnnnnnnnnnnnnnnnnnnnnnnnnnnnnnnnnnnnagaaggtgggtggcatattggggacctggggctgtgtgaaggaggagatcagatttcagtggctttgggcagaaaagcaggctctggatttaagcgagtggtcnnnnnnnnnnnnnnnnntaccttgggactgttatttaactgaatcagttatttccttgaaatttcacagtagtgggtgggcnnnnnnnnnnnnnnnnnnngatactatgaaacatgaagcacgtggaaaatacaagacccccagggtctttctgagtgcaaggctgaaatggacaagggctcctcgtaggggcggagggagccggagcctgccttgtgttccttttttgacttgtaacatt

SEQ ID NO: 15688 - DNA, 1069 bp, Macaca Fascicularis
  misc_feature (1)...(1069): n = A,T,C or G
tccagcagcccgacctggnnnntgnnntncagattgccagagcagagatcataaccaaggagagagaggtctcagaatggaaagataaatacgaagaaagcaggcgggaagtgatggaaatgaggaaaatagtggccgagtatgagaagaccatcgctcagatgatagaggacgaacagagagagaagtcagtctcccaccagnnnnnnnnnnnnnnnnnnnnnnnnnnnnnnnnnnnnnnnnnnnnnnngaactccgtggagaagtctctggccgacctcttcaggagatatgagaagatgaaggaggtcctgnnnnnnnnnnnnnnnnnnnnagaggtgctgaagaggtgtgcacaggagtacctgtcccgagtgaagaaggaggagcagaggtaccaggccctgaaggtgcatgcagaagagnaactggacagggccaatgctgagattgctcaggttcgaggcaaggcccagcaggagcaagccgcccaccaggccagcctacggaaggagcagctgcgagtggatgccctggaaaggacgctggagcagaagaacaaagaaatagaagaactcaccaagatttgtgatgaagtgattgccaaaatggggaagagctaactcngaaccgaatgttttggacttaactnnnnnnnnnnnnnnnnnnnnnnnnnnnnnnntgttcctccagnnnnnnnnnnnnnnnnnnnnnnnnctttttcgtatgcactactgtatttcctttctaaataaagttgatttgattgtatgcagtactaaggagactatcagaatttcttgctattggtttgcattttcctagtataattcatagcaagttgacctcagagttcctgtatcagggagattgtctgatcctctaataaaagacacattnnnnnnnnnnnnnnnnnnnnnnnnnnncaagttcccagggtgagcagcttttggatttaatatgaacatgtacagcgtgcgtagggactcttgccttaaggagtgtaaacttgatcagcatttgctgatttgttttttaaaacacaagaaatgcatgtttcaaagaaaat

SEQ ID NO: 15689 - DNA, 640 bp, Macaca Fascicularis
  misc_feature (1)...(640): n = A,T,C or G
gtggancnnnaggccaaagctggatcagataaactttaatannncctccaaatcatcattcatcaaccataccagagaaacatttccagttttccacaaatacttgatccaagatttaatttcattatgcacttttcaatttcctattttgggtttagttttgtcaatggtagtgagttactgaacatgggcaccaactaattttgttgttgttgtaccagaaaacctcagcagacgttttgatttgctgctttagttgtaataattcaatttttatatgtagttttaagaacttagtcttatttgacttttttattttatgttaatgttttcagttctcactatgaggcacatttacatcaatgcttttgttcctctcacatnnnnnnnnnnnnnnnnnnnnnnnnnnnnnnnnnnnnnnnnnnnnnnnnnntgtcttttcacagctgtaatggagatcaggttgtctctaaatcaaggatcatgtgtgcacacaacttnnnnnnnnnnnnnnnnnnnnntgactgctgagtaatcattctttttgcctgtaaaagataacaaagnnnnnnnnnnnnnnnnnnnngtaattactgcttgtcttctcaaggctgctgtttatcagcactaactaaataaa

SEQ ID NO: 15690 - DNA, 759 bp, Macaca Fascicularis
  misc_feature (1)...(759): n = A,T,C or G
cagcaggggtgagnnnntnnnnntctggaacctctataaagctccaatactgttggcactagtggcaggagaagctgctggtatcatggaaannnnnnnnnnnnnnnnnnnnnnnnnnnnnnnnnnggcnnnnnnnnnnnnnnnnnnnggtagcagnnnnnnnnnnnnnnnnnnnnnnnnnnnnnnnnnnnnnnnnnnnnnnnnnnnnnnngcccggggctcttannnnnnnnnnnnnnnnnnnnnnnnnnnnnnnnactatgatttaatggctcagcccatcactccaggcccctnnnnnnnnnnnnnnnnnnnnnnnnnnnnncgactcttctttgcgggagaacatacaatccgtaactacccagccacagtgcatggtgctnnnnnnnnnnnnnnnnnnnnnnnnnnnnnnnnnnnngaccagtttttgggggccatgtatacgctgcctcgccaggccacaccaggtgttcnnnnnnnnnnnnnnccaagcatgtgagacagataacattctaagagaagaggcccatgtgcctgtttctgccgtattagcnnnnnnnnnnnnnnnnnnnnnnnnnnnnnnnnnnnnntccnnnnnnnnnnnnnnnnnnnnnnnnnagctcctgatttgacaagggagcctccctcctttgaatgacctagagcacagggaggaacttgtctattagtttggaattgtgttcttcataaagactgtgaggcaagtgctgtgaagtaacatcttagtctcgtttt

SEQ ID NO: 15691 - DNA, 721 bp, Macaca Fascicularis
  misc_feature (1)...(721): n = A,T,C or G
ctcactgcaacctcaccctgctgnnnnnnnnnnnnnnnnnnnnctcagcctccctagtagctggaactacaggcatgagccaccatgcctggctaattttttgtatttttagtagaggcagggtttccccatgttggacaggctggtcttgaactcctggcctcaagtgatccacccactctgcctcccaaagttctgagatcacacacatgagccaccgcacctggctgaaacatggaaagtattttaaggtggagaatggagagagttaagcaagacaggaatgagcataactctaacagaggctataccaccgctgggaagaatgggctaggttttggaaggccttgaaaatcagacccaagatcaatttgatgcaatagatggtgaataagtcattccaaatgggaagaagtttagaaaatagtagaaattcataataaagggtttctgaagcttgtccaagggaacttggattatctccagaggtaattggggatgttgagcttctttttctttcctcctcaaattcctttttactggtgggcttggaagatatacaattttctaaaaagaaattcctttttaccagtatgtggagtatctaagcaaggaaaggccatggaccacaaagaagttgctgtagcatgaaaactgacaagtggtttctttctaggaagctatgnnngaccctgtgagtagccagtacagctcctttctt

SEQ ID NO: 15692 - DNA, 760 bp, Macaca Fascicularis
  misc_feature (1)...(760): n = A,T,C or G
ttttgcaggagctatccctgtattttttcattttttattgtactctcctatgccattataataattgggatcctgtgatggtgggaatcagaagaatatttgcttttatatgcagaaaacatcgaattcagagagttccagaagacagcgaacagtgtgagagtctcatttctatgcacagtgtttctcaggaggatggagctagttagctgttnnnnnnnnnccagcacgataatggaactatacagcgaagagacaatctctggcaagtttttgtagaaaannnnnnnnnnnnnnnnnnnnnnnnnnnnnnnnnnnnnnnnnnntgaaactctaaaatatatttttctcatacctgttttcttcattttcataatgaagcactttgctatgtagctgtgtacatatcactacagttctaggaagttccagtctacagtccatccaaaggaccaacctgccttacacatctcaaggagttcagctgttgaaatcatttgaactaatcaaggaataaatccnnnnnnnnnnnnnnnntattttcacatacttgttaaatgctggaatatattataaaaatgttttcaagaaatcacttaagnnnnnnnnnnnnnnnnnnnnnnnnnnnnaaaatgctaaaataagctacctgtagtaagtatggatgatatttttgggttttgttgaatattgcaaattaaccacacaacaaaatgtttaatttatgcannnnnnnnnnnnnnnnnnnnnnncgtggaac

SEQ ID NO: 15693 - DNA, 1114 bp, Macaca Fascicularis
  misc_feature (1)...(1114): n = A,T,C or G
ccaagaacatcatgtgnnnnnnncaagaatgancgggaggactgttggaattgttggcnncaccaaccaannngcctcaggatgcttggatattaattcatctgtgaaaggggctcgttttgtcagattctgtgatgcattcaatattccactcatcacttttgttgatgtccctggctttctacctggcacnnnnnnnnnnnnnnnnnnnnncatccggcatggcgccaagcttctctacgcatttgctgaggcaactgtacccaaagtcacggtcatcacgaggaaggcctatggaggtgcctatgatgtcatgagctctaagcnnnnnnnnnnnnnnnnnnnctatgccnnnnnnnnnnnnnnnnttgcagtcatgggagcaaagggtnnnnnnnnnnnnnnnntcaaagggcatgagaatgtggaagctgctcaggcagagtacatnnnnnnnnnnnnnnnccctttccctgcggcagtgagagggtttgnnnnnnnnnnnnnnnaaccttcttccacacgtgcccgaatctgctgtgacctggatgtgttggccagcaagaaggtacaacgtccttggagaaaacatgcaaatattccattgtaaacaattcaaaggaaaagaaaccaagaactgaattattgtctgcccattcacatcccattcctgccttttgaaatcatgaaacatgggaattcaaatacttggataacttagaataacaaagtttattaaattctagaaagatctcttttgtgccttactataaaattatttactttattaaaaattttaagttgtattttttgagcataaattcagttttttatggtggaaatctgaaaaatcaatagaactagaaagaaaaatagtacacagtgttatcacctagagctaatttttatttcacatctctgggtattgttctttttctcttaggaattagttttttatccataggtgagatatataataagcttttaaggcacagtatttcttaggcttcagtttccttattttaaaaatagggataatataatatgccctttctatctcctaattcccccatgaattgaggattaaatgtgatgtttgcacattgtggaatat

SEQ ID NO: 15694 - DNA, 802 bp, Macaca Fascicularis
  misc_feature (1)...(802): n = A,T,C or G
tgtgttttcctggttacaaataattaaattctctccataatgtctcaaacagtatcaaacaccatttcatatctctaacacagagcagtcggcattcagtatgagaaccgagtgagaagtgttacatttcaagcatctgcacatcacatggtgaccaggtaaagcttagatgtcattttcccacattatccaactgtgcatctcaaacatatcctcgtctcagtaaagacgagtttctatttcatactgttaagtgcgggaagttgagagagatacaaatccagtgaaaacacattaatctcaattcaactcagttaaaaaaaaaagcaaatttaaattagtttttttcagagaagaaagggaaaggagttcatggggttaagagtcaaaactgtgacaatggttggcagctatacctggcatgttgtagctctggaaactatctgtcatatgatattttaaaataaagtggcttttgtggattttttctttttggtattgtaaacatgtactgtttaatattacccgaatttaatttaaaacatgtttgcaaacaaaacaaaattaaaagcctttaaggcaaacctccccctaaggaaaaaagtcatttgttataaaattgtgaggatacccacgcaagaccccacttaagattcgtcagcatgaacttgagagcttttgtccactgctcctcagagttaaactgggttttgatggaataggagccgccgctgcctcctgtgtcttcaatcttgcctttctccacatccatcctgtaggannnnnaaacgtgtctcgcctt

SEQ ID NO: 15695 - DNA, 768 bp, Macaca Fascicularis
tgggagcagtagatagacatctcatatgcttgcacaaccgggtggggcagatcctgcaccctgaggaatgcatgtatgctgtgggccagggggccttgggcgtggaagtccgagccaaggaccaggacatcttggatctggtgggtgtgctgcacgatcccgagactctgcttcgctgcatcgctgaaagggccttcctgaggcacctggaaggaggctgcagtgtgccagtagccgtgcatacagctatgaaggatgggcaactgtacttgactggaggagtctggagtctagatggctcagatagcatacaagacaccatgcaggctaccatccatgtccctgcccagcatgaagatggccctgaggatgacccacagctggtaggcatcactgctcgtaacattccacgagggccccagttggctgcccagaacttgggcatcagcctggccaacttgttgctgagcaaaggagccaaaaacatcctggatgttgcacggcagcttaacgatgcccattaactggtctgtggggcacagatgcctcggttgctgctgtccagtgcctacatcccggccctcagtgccccattctcactgctgtctggggagtgattacctcagaagactgaactgcagggttcaagccttccggggatttgcctcagtttggggccttgatgactgccttgcctcctcagtatgtgggggcttcatctctttagagaagtccaagccacagcctttgaatgtaaccaactctact

SEQ ID NO: 15696 - DNA, 755 bp, Macaca Fascicularis
  misc_feature (1)...(755): n = A,T,C or G
taggggacctgggctcctgctgggccagcagctgcatctttcctgtctgtgcccctcggggcatctcctggtgctcccgggctcacccccttccagcggctggtcccgctttcctggnnnnnnnnnnnnnnnnnnnnnnnnnnnnnnnnacagcccccaccccttcggcctttgctcacgggtggccctgctcagcccagacacaaccaaaatnnnnnnnnnnnnnnnnnnnnnnnnnnnnnnnnnnnnnnnnnnnnnnnnnnnnnnnnnnncattcctggaagacactcccatcagaaccnnnnnnnnnnnnnnnnnnnnnnnnnnnnnnggcaggagtcccactcctcctggggtgctgcccaccgtcgagagctcccgagggctcctctnnntaccaagcaggaatacaggcaccatctgttctccacagggaaaaggagacttggtgaataccagnnnnnnnnnnnnnnnnnnnnnnnnnnnnnnnnnnnnnnnnnnnnnnnnnnnnnnnnnnnnttccacccctaccctagccttgctctcagccaccttgacagtcactgggctccctnnnnnnnnnnnnnnngacacccctcccttggactctgcctaggctagagtctacggctggggccacannnnnnnnnnnnnnnnnnnnnnnnnnggggagggggtgaaggtggcttggggtggcctatgttgccactctcagcaccccacatttgcacctgctggggacctgccacnnncac

SEQ ID NO: 15697 - DNA, 747 bp, Macaca Fascicularis
  misc_feature (1)...(747): n = A,T,C or G
cagccnnnnnnnnnnnnnnnnnnnnnnnnnnnnnnacaagaagttgaagatctccaatgatggattgcagatggagaaggatgaaagctctctaaagaagagccataccccagagaggtttagtggcacagggtgctatggggcagcaggaaatatattcattgacagtggctgccactactgggaggtggtcatgggttcctcaacatggtatgcaattggcattgcctacaaatcagctccaaagaatgaatggattggcaagaatgcctcctcatgggtcttctctcgctgcaatagtaacttcgtggtgagacataacaacaaggaaatgctggtggatgtgcccccacagttgaagcgtctgggtgtcctcctggattatgacaacaatatgctgtctttctatgacccagctaactctctccatcttcatacttttgatgtgaccttcattcttccagtttgtccaacatttacaatctggaacaaatccctaatgatcttgtctggcttgcctgccccagattttattgattaccctgagcggcaggaatgcaactgcaggcctcaagaatccccttatgtttnnnnnnnnnnnnnnnntcattaagtttcaggagagcatataattcaccggctctctagttcagcagttcttccctcctacacctaagttagcgttcaatatatgagatacaaaataaagtttgtttgaagcatccaaaataactagatactgcagat

SEQ ID NO: 15698 - DNA, 728 bp, Macaca Fascicularis
  misc_feature (1)...(728): n = A,T,C or G
tactgataagaacaaaccaaatatcaaaatctgtacgcaggtgaaaggaccagaggctggctatgtggctacccccatagctatggtccaggcagccatgactcttctaaatgatgcttctgatctgcctaaggcgggcggggtcttcacacctggagcagctttttccaaaacaaagttgattgacagactcaacaaacacggtattgagtttagtgnnnnnnnnnnnnnnnnnntctgaacactagaagaattaactgaagtcataacatgcgcgaattaacagcttctctatttgatatttgaaactcttctgtaagcctgagtatatgtggaaacgattgtcaaatctaaaatatctatatattaaaaagcaggaaattgtcctagcttaccctaaatttcaaatctcagctgattttgtgattttattgcttctaagagagaactcatatttgacgtatttttcactgatgtgttcctggtaggtgttcatgaatgagctggcaggtctaaggggaggcggtgcccgccgtgtgctgcagcggcgtnnnnnnnnnnnnnnnnnnnnnnnnnnngtgtccgacaggagctgccgcttgccttaccgcagcgggaagggaatctcaccttccagtgagtgtctccacgtgctgtcttgagcctttgctaaatgaaactgcactctttgctatttttgcctagtttttcacccatctacactgatt

SEQ ID NO: 15699 - DNA, 721 bp, Macaca Fascicularis
  misc_feature (1)...(721): n = A,T,C or G
tcaccagcccgaacagctttgacaangtctttaaccggtggtacccagaagtgaatcatttctgcaagaaggnnnnnnnnnnnnnnnngggctgcaagaccgacctgcgcaaggannnnnnnnnnnnnnnnnnnntnnnnnnnnnnnnnnnnnnnnnnnnnnnnnnnnnnaggggccaggagatggcgaggtccgttggcgcggtggcctaccttgagtgctcggctcggctccnnnnnnnnnnnnnnnnnnnnnnnnnnnnnnnnnnngaagtggccctcagcagcnnnnnnnnnnnnnnnnnnnnnnnnnnnnnnnnnnnnnnnnncgtggtgacctgagcatctcggggcgtcccagcagcgcgggaaggggcagggtgctgacctactgctgagctggctgggctggacccggcccctaggctnnnnnnnnnnnnnnnnnnnncaacagatgggggccaccaaggccaagccctggggcctgggagtcttggactgagaaagggggttcctgggcccacctgccctatgtagggctcatcctgctgtgccagagaatcacncnctgaccccttagcccggtcccggacagacatcctggagccgcctgtgcagcatgatgccccctcgtggctgctcccagggctgcacctgccgggacctaaagttcttaggtccctcctgccaggacccacacccggccccatcccacctgtcat

SEQ ID NO: 15700 - DNA, 1333 bp, Macaca Fascicularis
  misc_feature (1)...(1333): n = A,T,C or G
cctagccttttggnnnnnnnnnnnnnnnnnnnnnnngaggaggggacagagcccagcctttctcctgtgactgagcaggcctctgtgnnnnnnnnnnnnnnnnnnnnnnnnnnnnnnnntgggtgtatgtcctccctgctggctcccctggcccctgctgcgtgacgctcttggaactcttccccaaggagtcagtcccccaggcttatcagggaatccttttgtatctgcactttgggttttagtttcaaagcnnnnnnnnnnnnnnnnnnnntttcaggatgtgtagaaagctcaggtgagggctgccctggtttgtcatagctccaccttcctcggagggagagggctgttggagaccccccatccatggcacactagctcagcactgcatgtcccgagatgattcccaagatagctggtgcctcctggctttcctgcggcaggccaaggggcaccccagaggacgctggatccttcatggttgaaggatctctatgtatgtgtgtatataaatatagtttttatatatatatataaaaaatagagatctatttttttctggaattatgttagaaaagtaaagaaaaannnnnnnnnnnnnnnttatctcagggtgcccaaagagttgtagtcaatttttggtactaggaaaggcannnaannnnnnnnnnnnnnnnnncagttccttgttggaagcagcagagggccaagccaagttgctgacagtgactttacaggttaaataaagagaccctcggaggggaagcnnnnnnnnnnnnnnnnncatgtttattcactgggcatgtcgctcccgcaccagccttgagccaggccctggagaggaggggctgttgcaggaggagggaggccagagaagtcatcgaagccaagacctgggcccagctgaggagggatgtggggaaggaaggacgagagggaggaccctctgggaaaatgtgggtttgagctggtgagaatgttgccagttgaggctgggctaaagcctggagggggtaggaggaagcaannnnnnnnnnnnnnnnnnnnnnnnnnnnnnnnnnnnnntccagggggccaccccggaagcccctgctgcctctgggcattgctgggagaggccaaggcagtactcgtatctgaacagagagcccctcaggtattgctgatgggccaccttcagctgcagggaagaagactaggagaggaggcatgggagagacctgggccttgttcagattggccacctctgctgagaagtccataccagtacacccctaataagtaatgccacataccaatgtaccgtggatgttataacctgcatcaacat

SEQ ID NO: 15701 - DNA, 695 bp, Macaca Fascicularis
  misc_feature (1)...(695): n = A,T,C or G
gctggagggtnnnnnnnnnnnnnnnnnnnnnnnnaaggggctgccccactgtatggtcattgtcagggcctgccccaaagagtctatggactggtggatgtaactactccacctgtccctgggagccatcctagctttcatcgttgagccccagaccctctgagcagcactttgaagagggtagataatcagacttgaggaaattgaaagccccaggttgacagaacagaggcctagggacctccagaccattggaatcactgtttgccagctgtgtggccttggtcatatcatcaacctctgggaagcctagttcccacatctggaaataaggatgatcatagctacctcatggttacattgcaaagccttactcaaaaagctcccagcctccagaggctctcgatgaagagtcaccttcacggtcgtcctcagnnnacagnnnnngnnngaagaagggtgaggttaagacttaggggcacccgaggggctgagcccccttatgagtacccaagaaggactgtctatgcatgcacacccacaagcctatatcccatttgtatacctacacgcacgcaagagacgcggagagatagnnnnnnnnnnnnnnnnnnnnnnnnattgatatgctcataaaagctctcaattctattttctgtattttgtatgctgtattttccaagacatattatttg

SEQ ID NO: 15702 - DNA, 1214 bp, Macaca Fascicularis
  misc_feature (1)...(1214): n = A,T,C or G
gtgcactgaggaaggacagtgnnncccagggattcctgtctgtgctcccatcacctgccctccaccatccgtacctatgtttgcaacacttcgtgttataagccatcagctggaaacaattcgttctnnnnnnnnnnnnnnnnnnnnnnnnnnnnnnnnnnnnntgcgatgtttggaaatnnnnnnnnnnnnnnnacaacccatggaaattggactaaattaccagaatgcagggaagtaannnnnnnnnnnnnnnnaagaccnnnnnnnnnnntnnnnnnnnnnnnnnnnnnnnnnnnnnnntattannnnnnnnnnnnnnnnnnnnnnnnnnnnnatggatattccctggatggcccagaagaaatagaatgtaccaaactgggaaactggtctgccatgccaagttgtaaagcatcttgtaaagnnnnnnnnnnnnnnnnnnnnnnnnnnnnnnnnnnnnagagagtaaagattcaggaaaaatttaagaatggaatgctgcatggtgataaagtttctttcttctgcaaaaataaggaaaagaagtgtagctatacagaggatgcccagtgtatagacggcactattgaagtccccaaatgcttcaaggaacacagttctctggctttttggaaaactgatgcatccgatgtaaagccatgctaaagtggttttcagattccacataaaatgtcacacttgtatcttgttcatccaaggaacctaatggaaattaaaaaataaagctactgaatttattgcctcagccattgcagtgttactcttcacggtagcgtacttttagttatgtcatctggttaagaaatgcaaatatttggaacatcatcattttatggctgtgaaattgacagtataaacgattgtctaggtatcccacttttcctgtgtgtagtcctgttctcggcnnnnnnnnnnnnnnnnnnnnnnnnnnnnnnnnnnnnnnnnnnnnnnnnnnnnnnnnnnnnnnnnnnnnnnnnnnnnnnnnnnnnnnnnnnnnnnnnnnnnnnnnnnnnnnnnnnnnnnnnnnnnnnnnnnnnnnnnnnnnnnnnnnnnnnnnnnnnnnnnnnnnnnnnnnnnnnnnnnnnnnnnnnnnnnnnnnnnnnnnnnnnnnnnnnnnnnnnnnnnnnnnnnnnnnnnnnnnnnnnnnnnnnnnnnnnnnnnnnnnnnnnnnnnnnnnnnnnnncaataaa

SEQ ID NO: 15703 - DNA, 740 bp, Macaca Fascicularis
  misc_feature (1)...(740): n = A,T,C or G
agcagacgcatgcgatgtannnnncacgggnncccttnnnnnnnnnnnnnnnnnnnnnnnnnnnnnnnnnnnnnnnnnnnnnnnnnnnnnnnnnnnnnnnnnnnnnnnnnctggacagcagcaaagccnnnnnnnnnnnnnnnnnnctgcacccagccctgttcagcaccatcagcaccaggccgcccaggctctccatctggccagtccacagcagnnnnnnnnnnnnnnnnncgcggggcttgcaccaactccaccctccatgacacctgcctccaacacgcagtcgccacnnaatagtttcccagcagcacaacagaccgtctttacgatccatccttctcacgttcagccggcgtataccaacccaccccacatggcccacgtacctcagtacaagcccaccaccaacagcagttgtaaggctgccctggaggaaacgaaaggccaaattccctcctcccttctactgcttctaccaactggaagcacagaaaactagaatttcatttattttgtttttaaaatatatatgttgatttcttgtaacatccaataggaatgctaacagttcacttgcagtggaagatatttggaccgagtagaggcatttaggaacttgggggctattccataattccatacgctgtttcagagtcccacaggtaccccagctctgcttgccgaaactggaagttatttattttttaataacccttgaaagtcatgaacacatcagc

SEQ ID NO: 15704 - DNA, 692 bp, Macaca Fascicularis
ctgggctgacaaattaaaacctagagtagtgcttatgctgaaatgatacttttcattttttggttgattgttttgccttcccttcaattttaaactgaagcattttaatgtgggtagaaactctacaccaaatacactaaacattttggtgcttagtggatttctttttaggtaactggtaattacttccaaagactgaatacaagccacactccaccatatcccttaaacttcatgaaaaaccattcaagatccccttgatgcaacactgttctcttcttctctactaaattctatttccaaaattggtaatagagccagaaggatccccagtacccagccatctgcttggcacaaagtggtagcacaattaaattcagtatgggtagagcatgatacagtcttggtgccatagaaggagtagttgcatagtcacacatcatttgataagttggatgttccattacatagaggtaccaaaattccagggtttttggaggaagggattagatggtgactaagctgccagaattgaggcagccattcctttttatataggctaagaaacaggttatcagtgaaaagttaattatggctttggcactagaatagctctgttgcaaaatatttaagcacccctcatctcagccctttattttatctttcatgtgggctaatgtgaggataatctt

SEQ ID NO: 15705 - DNA, 752 bp, Macaca Fascicularis
  misc_feature (1)...(752): n = A,T,C or G
aaagatacagttacggtacgagcgtggatgatataatcaactnnnctgcctgggttacacgaaacgcatctgacttaaataacatgttttgtggatatataaatagaatatatgttcattatgattactgcatttatagaaaaaaaatgatatgtgagaagatggccaatccagtgcagcttggttttatacattttagggaggcatgagtcatcaatcaaatacgtttaaggagagtggggggttggggttccaggctataggtaaatttaaatattttctggttgaccacaattggttgagtttgtctaagnnnnnnnnnnnnnnnnnnnnngatgaagcatccaggtagcaagcttcagagagaacagattgtgaatgttaatgctggagaggtagaatgaagcatgtccctcctcccacttcccatcatcgcctgaaccctggagaagaggaagtccattcagatggttgcggggggccttcgaattttatttttcatttacattcttccccttctggccaagatttgccagaggcaacatccaagaccagcagattttaattttgtcccatagcattgccagggtggcatggctcgccatctccggtccatcctatactctgtgggactccctatagctgaaggccttatgagtcaaaggacttttagccaattgattgttctaggccagataagaatggatgtggacatgcatttattacctcttaaaattattatttaagtaaaa

SEQ ID NO: 15706 - DNA, 672 bp, Macaca Fascicularis
  misc_feature (1)...(672): n = A,T,C or G
tagttacagcatntnctggtaccaacagaagccaggcagtcaagccagagcaggcccctgtgttggtcatatatgcagaaagcgaacggccctcagggatcaccagacagattctctggatccaaaatcagggaatacagccacccttactcatcacaggtgtccagaccggggatgaggctgactattactgtcagatatggcacagcagcagtgatcatgacatattcggagcagggacccggctctccgtcttaggtcagcccaaggcttcccccacggtcactctgttcccgccctcttctgaggagctccaagcaaacaaggccacactagtgtgtctgatcagtgacttctacccgggagccgtggaagtggcctggaaggcagatggcagcgctgtcaacgcgggagtggagaccaccacgccctccaaacagagcaacaacaagtatgcagccagcagctacctgagcctgacgtctgaccagtggaagtcccacaagagctacagctgtcaggtcacgcacgaagggagcactgtggagaagacagtggcccctgcagaatgttcataggttcccacccctaccccacccacgggggcnnnnnnnnnnnnnntcccaggggaggggtctctctctctccatcacaaggcatcaagcccttctc

SEQ ID NO: 15707 - DNA, 687 bp, Macaca Fascicularis
  misc_feature (1)...(687): n = A,T,C or G
tccccacccttaccttcccccacatactgccccctgcttgggttcccaccccnnnnnnnnnnnnnnntcccgctcctgcccccacagcctcctcctcccattccccttcaccagggaatgccccggttcccacagggtcccccagatgcctgtttttcatcagaccatnnnnnnnnnnnnnnnnnnnnnnnnnnnnnnnnnnatgtcccctcatcagcccatacaggtttcttcttccaagacaactttgcgattggtccccagctgcctatgcccttcttccccacaccccgttatcagcggcctgcccctgtggtccataggggttttggcaggtatcgtccccgtggcnnnnnnnnnnnnnnnnnnnnnnnnnnnnnnnnnnnnnnnnnnnnnnncctagccaaccccgagccaaggcctcaatannnnnnnnnnnnnnnnnnnnnctctttatgaacatggattggacagnnnnnnnnnttcctttccattgcttggcctgaacagactgaccttgttaacttaagcctggagtccatgcctggtcttctttttgttcattgctgttaccaagaaagccaaggaggagcagtctgactcattcttcttggctgcagcctcttccccacttcctggggttgacccagcattattcctgcctccccactccctattctctttgcc

SEQ ID NO: 15708 - DNA, 425 bp, Macaca Fascicularis
tggttttagtatttatttctggtgacatttgaaaatgtgcactgctcgtatgtttatatgcttattggccatgtcttccattttttaatcagttgataaggaatacaaatcggtaacaaaaccaaagccactaagtcaacctgaaatgagtcctgctgcatctgcagccgtcagaaatgatgtcacaaagcaacgtgctgcaccaaaagtctctcctcatgttaagcctgagcagaaacagagggtggcccagcaggaatctatcagagaagagtttcggaaagactgtttgccagttatggtactgaaagcaacaaagcccttcacgtttgagacccaagaaggcaagcaagagatgtttcatgctacggtggctacagagaaggaattcttctttgtaaaagtttttaatacactgctgaaag

SEQ ID NO: 15709 - DNA, 1076 bp, Macaca Fascicularis
  misc_feature (1)...(1076): n = A,T,C or G
tttgggnnnnnnnnnnnnnnnnnnnnnnnnnnnnnnnnnnnnnnnnnnnnnnnnnnnnnnnnnnntcttgaatttatttttctctgcacttggaggcacctcatatttcatgctgatggttaaaattgttcaacatgaattgaaatcacttgcactgggtttccactcaatgnnnnnnnnnnnnnnnnnnnnnnnnnnnnnnccaatatattttggggctctgattgatacaacatgtatgaagtggtccaccaacaactgtggcacacgtgggtcatgtaggatatataattccacattattttcaaaggtctacttgggcttgtcttcagtgttaagagtctcatcacttgttttatatattatattaatttatgccatgaagaaaaaatttcaagagaaagatgccaatgcatcagaaaatggaagtgtcatggatgaagcaaacttagaatccttaaataacaataaacattttgtcccttctgctggggcagatagtgaaacacattattaaggggagaaaaaaagccacttctgcttctgtgttnnnnnnnnnnnnnnnattgattcagtaagatgttatttttgaggagttcctggtcttttnnnngaaaatttccacatcttttatggtgaaagtannnnnnnnnnnnnnnntttataataaaacaaactatatgtagaaaaaatgagagtattcattgttgtgttatagctatgtatttgtggttaaggctagactataagatccatacaaatataaagtaagaggcatggttattgtgtaataaaagaaaaaatacttgttcaagtaattgtaattcttaataaaataaattagtagaatacaggtagaagttaaaaagaaggagctagattagtatcctaagtaaagagaaatgcctaatgtctattttttgttaaacaaacaaacatgcagtttgaactgtaatactgaggcctgaagtctagcctggatgaatgctacaataatatctgttactcacaaaaaattatatatttcacagactttcttaatgtataattaattattttggtcaagtaaatttaga

SEQ ID NO: 15710 - DNA, 708 bp, Macaca Fascicularis
  misc_feature (1)...(708): n = A,T,C or G
cctggcgcatgcactnnntcacgggcatccagatcatctgcctggcagtgctgtgggtggtgaagtccacgccggcctccctggccctgcccttcgtcctcatcctcactgtgccgctgcggcgcgtcctgctgccgnnnnnnnnnnnnnnnnnnnnnnnnnnnnnnnnnnnnnnnnnnnnnnnnnnnnnnncctttgatgaggaggaaggtcgggatgtatacgacgaagtggcgatgcctatgtgaggggcgggcccaggccctagaccctcccccaccattccacgtccccactttcccaggaaaagcagaagttcatgggcacctcatggactccaggctnnnnnnnnnnnnnnnnnnnnnnnnnnnnnnnnnnnnnnnnggaaggaaggggtgtccaggagaccttccacaaagggtagcctggcttttctggctgaagacggccgacagggcccacattagggggtttgctccacagtcccttctgttgccannnnnnnnnnnnngacnnnnnnnnnnnnnnnnnagatctcagccctccctcttcccagctcaggcaggggtagaagcaaaggcaggaggtgggtaggcgggtggggtgcttgctgtgtgaccttgggcaagtcccttgacctttccggcttatacttccttttctgtaaaatgggtatatagatgataatacccacattacaggatgata

SEQ ID NO: 15711 - DNA, 752 bp, Macaca Fascicularis
  misc_feature (1)...(752): n = A,T,C or G
tagcccacacctgggagcggctgccacacaaagtccggaagctgtactctgccctcgagaggctgctggatccctcatggaaccaccgggtgtaccgactggccctcgccaagctctcccctcctgtcatccccttcatgccccttcttcnnnnnnnnnnnnnnnnnnnnnnnnnnnnnnnnnacacactagtggagaacctcatcaactttgagaagatgagaatgatggccagagccgcgcggatgctgcaccactgccgaagccacaaccctgtgcctctctcaccactcagaagccgagtttcccatctccacgaggacagccaggtggcgaggatttccacatgctcggagcagtccctgagcacccggagtccagccagcacctgggcttatgnnnnnnnnnnnnnnnnnnnnnnnnnccagcgggaactctcccgcctctcccgagagctggagccatgaggaggggctgggactagagctggagcaggcacttgtggtctggaaagccagggcgagccgggccaagatacccacaggctggccacagctgagcagggctctctgtggagtggnnnnnnnnnnnnnnnnnnnnnnnnntggaggcagccgtcccctgtgatgactggcggctaaggaggacctnnnnnnnnnnnnnnnnnnnnnnnnnnnnnnnnnnnnnggccaaggaaagggggacagagaggccccaggagtgggtggagagtggagcgcgctgggatgttg

SEQ ID NO: 15712 - DNA, 763 bp, Macaca Fascicularis
  misc_feature (1)...(763): n = A,T,C or G
ataggtttacatttttctgtattacactcaaggataaaggcaaaatcaattttgtaatttgtttagaagtcagagtttatcttttctataagtttacagcctttttcttatatatacagttattgccacctttgtgaatgtggcaagggactttttttaaaattttgttttattttctagtaccagcctcaggatttggttagtannnnnnnnnnnnnnnnnnnnnnnnnnnnnnnnttctaattataaatgaccaaaatcaagattgctcaaaagggtaaatgatagcacagtattgttccctaaaatatgcataaagtagaaattcacttccttcccctcctgtccnnnnnnnnnnnnnnnnnnnnnnnnnnntgtcacagatgtcccgttttgtgannnnnnnnnnnnnnnnttgcacatgactggaacaaagtatgagtgcaactcaaatgtgttgaagatactgcagtcnnnnnnnnnnnnnnnntgctgaatgtttccaatagactaaatattgtttaggccacaggagagtttggaatccggaataaatactacctggaggttcgtcctctccatttgtctctttctcccnnnnnnnnnnnnnnnnnnnnngctactctaaatatagcatatttcatccaagtgcaataatgtaagctgcatcttttttggacttctgctggcctgttttatttcttttctgtaaatgtgatttctcagaagttgatattaaacactattctggtccttatcttct

SEQ ID NO: 15713 - DNA, 911 bp, Macaca Fascicularis
  misc_feature (1)...(911): n = A,T,C or G
agggcaggcanncgggaagggaagatggatgtaaagtgtgggagaccgaggacacagtggagcccacgagcacgagctggaacccacgaggatggcctggaacccatgtcagtctctcaccacctccagcttcgatgatgtgggtgtcctgcagaagaagctggtgcccttcctnnnnnnnnnnnnnnnnnnnnnnnnccaggaattagagaagctgaagagatgatcctggggaaggtggagcagctgcaggcctggctgctgcccannnnnnnnnnnnnnnnnnnnnnnnnnnnnnnaatgtgtgaactgcaacagcgccnnnnnncccagcaccagccttccaagtgtaaaaacaatatgctgctgcttnnnnnnnnnnnnnnnnnnnnnnnnnnnnnnnnntcttgtggcccatcttactggaagagnnnnnnnnnnnnnnnnnnnnnnnnggtgacacattacaaannnnnnnnnnnnnnnnnccgctcccaagggtctcactactcacctgaggataactcaatannnnnnnnnnnnnnnnnnnnnnnnnntgaagaccatgaatttcatggtgattccagcaagtgcagagattctatgaagcccacccagaaaaaacttgctggtcctggctatttttgtgtcattcaagtattgagaaccaggcctgtggtaggcactatacttaatactaggatacagaaatgcaaaagatacggccacatgcaattttattaaatgcatcaatatgtattacaaatggtgaatggatttccaactttatcatggaatttaatgctgaatatatagaattcagnnnaattattgggaggacagcccttttgtgaaccttgtttggggcannngtaggaattggaannnnaatttagtttctatctctaagc

SEQ ID NO: 15714 - DNA, 722 bp, Macaca Fascicularis
  misc_feature (1)...(722): n = A,T,C or G
gtggtccccagatnnnntccctgacctggagagaaggaagcattccaccttccccctttctcccccactgccaccaccaggggtgtgtacgctgggatccctgcctggaccggagggaggcatttcctggggatggttaatcctgtgccccagccaaacccaggagctgcaatagggtgcgacggccagaggctccaggagagtgagcaggcacctggaatggagactgtgtttctctcagatcctggggcagggtttccctaatgtatccaagaaatagggctgcccctcagagatggtggggagggtctcttttcctcaggcattccagaggtgaactgtccattgcttatcaccctcaaacatacagcagatgtgggatcaccccacctctagggatggttctttccccctttcaaaaaggagcatcgctatgtgccctgataggatgaatcactccaggttcacagaggtgtcctctctttcctcccatatgtaataagtgtggtttttaggaatttatcatttggcatcctctgagtttcccacaggttctggaggagcccaggatgcatgattgagagcataggctgcagagacaatcttcttggattcagatcctgactctacttagctatgtannnnnnnnnnnttacttcnnnnnnnnnnnnnnntttcctcatctataaattggggatagtaatgccaactcatcgggctgt

SEQ ID NO: 15715 - DNA, 777 bp, Macaca Fascicularis
  misc_feature (1)...(777): n = A,T,C or G
ggacatgagcatttactagggcttggaagagctgacatgatgaccattattgtatgtttgtatatacattgtaatagagggctagagtttgacctagacagagtttaaggaagtgaaatatttaattcagaacccaatgcttttgtaaaactttttggattttnnnnnnnnnnnnnnnnnnnnntagaaattcaaatattttcaaggggagtcatttgagatatatttattttactaggagatcttatattctagagaaatgctttaaatggtcaggctccaatctgaatttttttattaagaaaaaagtagtttttaatgaattggttaggactcagaggaaatacggaaaacacgtagatggttaatttacaggtaaaaatcccaagagccttttaaacaacaaggtacctaaaatagggtataattatactgcttaaaatacaattagtgtctatgaatagctttttattttctgtgggaagatgctttaggtcttctgactaaagatgcaggcatatctctctgctcatttcagtgttttcctgaggtggagccttcattggaaaggggaaagagggattctagggtttcatcagggaccaggaatgcattcctctctcaggttccaatcaagagaagaccttttatgagatctgattctgtatagatgttgtcagttaggaaactgaagccatagatcaggcagacaaacagcccattgggcaatttcctgtattttaaannnnnnnnnnnnnnnannnnnnnnnnnnatca

SEQ ID NO: 15716 - DNA, 740 bp, Macaca Fascicularis
  misc_feature (1)...(740): n = A,T,C or G
gcaccatggcatgctggtantgcagggtgcagccgcggccnnnccgnncannntnntnnnnntcctcactgtccccagcaggcctgtgaaagagnnnnnnnnntttgcagacagttacttgttggttctctgtaaggggctgtgtgtggagcctggtgggggctgcagaggtaaggagaccatgagacttcaaggagtttacatccagacatgcagaggtgaacctgacatactaactactgctctgnnnnnnnnnnnnnnnnnnnnnnnnnnnnnnnnnnnnnnnnnnnnnnnnnnnnnnnnnnnnnnnnnnnnnnnnnggtgtctactttgtgtaaacctctccccttgagtgtgggctggacctagtttctttcgtccaatgaaaaagttagggcaaaagtgattggatggtcactttcttggctagacttgaaaagcctgtgacttctgtcttgcttgtgttttctttccttggttctttgcacttgctcactctgatgaagcgagctgcatgctgtgagccaagctgtagagatttccagccagctagaaactgagagtgaactctggccagcaccagcgaggaaatgagaccagccagcacccgcgcgagtgagcctgcacgtagatccttccccacgtgagccttgagacgggaccccaggcccactgacacctgggctgcagcctgtaagagcccctgctcagaagacccagctcagccatgcctggattcc

SEQ ID NO: 15717 - DNA, 753 bp, Macaca Fascicularis
  misc_feature (1)...(753): n = A,T,C or G
agaactgtagcgcttttctgaatctagcaaatcctctttttacccgttgaatgtttttgaatgccctgactctaccagcgcccataaatgatctctggaaggactgttagtaacaatctgtttttcaactttgaagctaaaaaccctgatatggtaatattatggtgcatagctgaggtctcgggaaaaaatatttctgttcacnnnnnnnnnnnnnnnnnnnnnnnnnnnnnnnnnnngcagcttcccttatggcattagtcttgttgagggagagagacagaatccaggactttccaaagtatttaaccgaaagcagggcctgctctgacagggcccacgtcctacagggctgcctgggctcagtgggtgcttggctgtgctggataatatgttgatctgtattggatgaggaccaatgacagcaaagcaaaaatggctttaaagcttggtgttacttttcttaagttgtttaattatagttaagcaatttcaaaaatgctccaaagaaatgtgaaaggannnnnnnnnnnnnnnnnnnnnnnnnnnnnnnnnnnnnnnntctgcccccgcacagaaatgctgcagagtatataaaacttgagacatttttgtaggatgcctgacgaggtgtagccttttatcttgtttccggatgcgtatttattacgagtactctggttaaatattgaaaagttatatgctgtagtttagtattttgtctttgtaatttacagaagttatggagaaaat

SEQ ID NO: 15718 - DNA, 631 bp, Macaca Fascicularis
  misc_feature (1)...(631): n = A,T,C or G
agggagcctgcgntttctgccaagaaggcaggtgtgtcgcnnttcgagcctatacagttctcttggagacattgtctttcaggcaccactgttaccactgagactgattctgatgcaaagcagggaagacagaggcagaaaccaggagagtggtagatcagtgcagccgaggtatcagaatggaggagcgaagtttcattcacggatgtttgttggatgctgctgcccaactcttnnnnnnnnnnnnnnnggctattctactaagttacttataaactggtggctttaactgagggctgtgtaaaggtactatctggcatatgaaatcaggataaatttatcnnnnnnnnnnnnnnnnnnnnnnnnnnnnntatagaagtattaaaattggaaaaatcatgtttatggtgttgccactgatggaaacacacaaacaccaagctaataataaatatataatttaaaaagctaattatatgcacttaaatggtgggaattttagtgatgcagtaattgaggagtctggagttttgtatttggaccaagaattatgagataaggatctttttctgagtgttctaaagggcttcttggacgggagtggtttcaagcannnnnnnnnnnnnnnnna

SEQ ID NO: 15719 - DNA, 760 bp, Macaca Fascicularis
  misc_feature (1)...(760): n = A,T,C or G
gtatgctgaagatgacaacatctatcacacagaagatcaaggacctccacaaaaagtacnnnnnnnnnnnnnnnnnnnnnnnnnnnnncaactgtttctatcgggctttcggattctcccacttggaggnnnnnnnnnnnnnnnnnaaggagttgcagcggtttaannnnnnnnnnnnnnagagcaaggaggacctggtgtcccagggcttcactgaattcacaatagnnnnnnnncnnnnnnnnnnnnnnnnnnnnnnnnnnnnnnnnnngaagcagacctctgtcgccgacctgctggcctccttcaatgaccagagcacctnnnnnnnnnnnnnnnnnnacctgcggctgctcacctcaggctacctgcagcgcgagagcaagttcttcgagcacttcatcgagggtgggcggactgtcaagnnnnnnnnnnnnnaggaggtggagcccatgtgcaaggannnnnnnnnnnnnnnnnnnnnnnnnnnnncccaggccctcagtgtgtccatccaggtggagtacatggaccgcggcgagggcggcaccaccaacccgcacatcttccctgagggctccgagcccaaggtctaccttctcnnnnnnnnnnnnnnnnnnnnnntcctctacaaatagggctggccccggcccgctgctgccctgctgcccccctctgccaggcgctagacatgtacagaggtttttctgtggttgtaaatggtcctatttcacccccttcttcctgtcacacgaccccc

SEQ ID NO: 15720 - DNA, 736 bp, Macaca Fascicularis
  misc_feature (1)...(736): n = A,T,C or G
gtttgtagcctgtcccccaggctcagtcagctactcctttctgtggctagagaatcccataaggaaatagcccccaagccagggctgctctgctcagaggaagggaaggctgggctgtgggtttaggaacaggagaactgggagggctgaggaggccgcagtgtaccctgtgagcccaggggaggtgctggctcctgaggaacaagctgctggaggctgaggacaaaaggtggccagagtggtggtccccagttcccctctggagctgctggctctcaagatggcagagctggggctgaggctgagatagcagctccagccccnnnnnnnnnnnnnnnngacagggcctcttccgctatctgtgctgccctctgatccaagggctcctctgtctgggtgtcttcatcatctgctacttcctgggcgcccccgctttctccttccttgggtggggagctccatatactcctgtaactcctaaagagggaggcnnnnnnnnnnnntgcccaggctgaagagccctcagcattcctgccctnnnnnnnnnnnncagcccctttccctcccctgnnnnnnnnnnnnnnntccccaccacctcccaggatggcagggaagtgagaggtgggcctttggtcccgcccccatcccctctagatcccacccctgaagtctcatcgcttnnagcactgtcctttccaggcgcttcttttcgtgtgatgaggccctgatgggaatg

SEQ ID NO: 15721 - DNA, 699 bp, Macaca Fascicularis
  misc_feature (1)...(699): n = A,T,C or G
gtagcttggcttctggctgtcatggatgcactggtagaagatgatatctgtannnnnnnnnnnnnnnnnnnnnntaagagagatacagtgactccagtttcaatatattcaggagatgaatctgttgcttcccattttgctcttgtcactgcatatgaagacatcaaaaaacgacttaaggattcagagaaagagaactctttgttaaagaagagaataagatttttggaagaaaagctaatagctcgatttgatgaagaaacaagttccgtgggacgagaacaagtaaataaggcctatcatgcatatcgagaggtttgcattgatagagataatttgaagagcaannnnnnnnnnnnnnnnaaagacaactctgaatctttgaaagtattgaatgagcagctacaatctaaagaagtagaactcctccagctgaggacagaggtggaaactcagcaggtgatgaggaatttaaatacaccttcatcaaactgggaggtggaaaagttgagctgtgacctgaagatccatggcttggaacaagagctggaactaatgagaaaagaatgtagcgatctcaaaatagaactacagaaagccaaacagannnnnnnnnnnnnnnactaaatcgagaaattcagtgttctttgtacatcatatgtaggatttataactaagtagnannaaccatagcgtaaa

SEQ ID NO: 15722 - DNA, 420 bp, Macaca Fascicularis
agggtgaggcgcgtgcagctactcgtgctgatgtagcaggagcgcgccgagctggagcgccagctccaggcttaccagcatgacctggagcggatgcgcgaggcccagctcgcggtggagcgcgagcgggagcgcctggagatgatgcgccgcctcaagaagcagaacaccgcgccgggcgcgctgccgcccgacacgctgaccgaggtgagcactcagcagccagtgtgcgcaggtgggggtgaccggcttgcgcgtgcatttgcacgagtgcatgcaagtgacagggttcgcaggtgcatgcgtgcaggagtgtaagagcaaatggcacaagatatcctggcattaacagctcatgccacaatgcagaacctttctcagagctggctaaatgcttaacagaacactgttgctcaaaac

SEQ ID NO: 15723 - DNA, 770 bp, Macaca Fascicularis
  misc_feature (1)...(770): n = A,T,C or G
tacagatctcannnccagannncaaagaccacatggtggagcagttcaaggagctccatcacatctggcagtcccagcagcggttgcagcntgtggcccaggcccctcttggggcaggcctcggtgctggccaggggccctggcccatgcacccagctggcatgcagtaacaggctgcagatggtgactggccctggcttcctgggtggctgtgtggactgatgtggaggtgtgacagccccagtgagcacctggttggctgcagggtcctacctctgggtttcctggaagtggatgtgggccaggaagaagagggagaaaggcccgagcccctgccttcccaggcctatctgtccttgtctcaattgtttctggtctggtcagcctggctctcgagaaactcggccatgagcagggaaggaactccctcaaccttggtgcctagttgtataggaggaattgcctaagggtggcccactcttgtgattgccccatttcttttggcagaaaaagcctgagtgttgtgggccaagtcccccgcacagggcctctgcagggcatggccctgatttccctggtttgagcctcacttcctcatctccctctcctctgagataatatgagtgagcacttaggtatcacatcagatgctcaaggctggcagctaccccccttcttgagagcccaagaacctgagtagaaagaatttttatgtatttttggattaataaatgttaaaaacaaaaaaaaaaaaaaaaaaaaaaaaaagg

SEQ ID NO: 15724 - DNA, 452 bp, Macaca Fascicularis
  misc_feature (1)...(452): n = A,T,C or G
gnnnnnnnnnnnnnntcatcgccggctttgcggtgggctgggggcccatcccctggctgctcatgtcagagatcttccctctgcatgtcaagggtgtggcgacaggcatctgtgtcctcaccaactggctcatggcctttctcgtgaccaaggagttcagcagcctcatgtcagacaacacagatggcctctccccnnnnnnnnnnnnnnnaacgtggtccttgagcctaaggtctatgtgggaagagttgacaggactggnnngcagccccaccctggctacttccttgttgtgtgaccttgggtatgacgcttacgttctctaagcgctgcttccttagctgaaannnnnnnnnnnnnnnnnnagcttgctgttaaggctgatgggagcattaactcagttcnnnnnnnnnnnnnnnnnnnnnnnnnnnnnctggcacaggcgtggaccc

SEQ ID NO: 15725 - DNA, 735 bp, Macaca Fascicularis
  misc_feature (1)...(735): n = A,T,C or G
gagcttttcagttaatgtgccgttgccaatctctnnctncttnnnanntgactttgaaatcctatctactctgggaaaggtatcnnnnnnnnnnnnnnnnnnnnatatttaaacccatacgtccctctcactcagcagttacccttttacttgttcatgtttttatttgatttattatgcagctatctggtgatgtggtatttatccagattcttttatatnnnnnnnnnnnnnnntttcttaggttgtgagggagctgggagtctctcatccacacttagtaaagcagagcctaagtggctgttcatttggtgctttaaatagtagttgtgctggttcaatctaagaaggaggggccagctttagctctttgccttacttgggcacctcattgagttttgatgcccacaatactgagtatctcccttgccctttaggtcaggctgccagatgggacctcactgacccagacgttccgggcccgggaacagctggcagccgtgaggctctatgtggagctccaccgtggggaggaaccaggaggaggccaggaccctgtgcagttgctcagtggcttccccagacgggccttctcagaagctgacatggagcggcctctgcaggagctgggactcgtgccttctgctgttctcattgtggccaagaaatgtcccagctgagggcctttgtcccatcgtccctctgtgaccccttcatctttgataagcactgaca

SEQ ID NO: 15726 - DNA, 644 bp, Macaca Fascicularis
gtagtttgagtgttatgaatattataaatcgtaagataagaaacagtttcttagaggagatagaaaaatgtttatttaaatctttgcatgatttaaaaacagattttccattttcttacaactttaggagaaaagaactgggtttaatggttaaaaaaaaaaagcacagccttttcagcttcatcttgtataatttcatagattggctgacttagggtctttcaatagtttggaaattgaaagattcttgttatatatagctagtttgggtttgtttttaactattttgaaggttaattgagatgggcaaataggcttaattaactgttttgaaggttggatgaaaagacatgggtcagtattcctacagaattcgtattaactaaatttcagaaaattaagaagctgactttatatttgggggtttgaactatctagttgttagcatttgtaataatgcttaaaaaaggcctaataaaatgcccaagaaaattttcagtgcatttacagagaaggatattttgtagtagtaatgtgttatgtagtacagttttaaagctataaatggaattttgtgtaaattcacaaaaatgtgatataaacaggatctaagactggattctctgtcactaaactgcaccact

SEQ ID NO: 15727 - DNA, 729 bp, Macaca Fascicularis
  misc_feature (1)...(729): n = A,T,C or G
gtaacccaccaacnncccntgnatttcacccaaaatgtgggagtctgcctgtcacctttataagccacagaaacagccacacatattcacagctgacacgccctctccattcatcgaacttctcagtgtccttgtctctggtgcctggcacagggaacatcatgccccctcctgagccatgccacagagagaccgtcactgtctatggccctgacacatgctccctctcgtggctacaccactctcccagcctgtgaccaccgatgtccacatacccccaaccacttgtccacacagctacccacatatgacatcgtcctggcttcccggagtatcttcccacttagacacgccgctcccacggaggcacagtccccagccaccttcgcaagtgcagccctcagtcacccctttttaagcaccctgattctcccaaatgcagagacgtctgggtctgcaattatgcacggagaccttggacatacgaggaccctcagaccagagggacacctgccccaccccaacacgtgcttatgtaaccaagcggctcctgctacacctccacacacacatacgtcctcactgatctacagcccctattcggcatcagagtccccactagacccagtggaaggggttagagaccaagtaggggccaggttccaattcaccctgtcagggattgagccagatctgacgtccttgtgatttaagggtccggttggaata

SEQ ID NO: 15728 - DNA, 515 bp, Macaca Fascicularis
  misc_feature (1)...(515): n = A,T,C or G
ctcacaaggaggccgaagtgnnnnnnctgcgaccctcactggtnnggagtagccgggtctacagtcagacttcctgctctgtgaaannnnnnnnnnnnnnnntggcatcccaccacacaaatctgaggaggaggagagttggcctgattcgggattatggcagaaaagccaagatgtcagtcctgaagtagaagaggtggtgtttctctcttggatactaaatgaaatgaggtgtgtgggcttgtcaacacagaattcaagcctcatttgctatcccagcagctcttaaaactttgtggtcttggaactcatgacagaggcaaatgacttccgcttaacttacgaagaaaaaaatatgaatcttgggagtctacattttcttatcaccaagagctggactgccatctccttaaaaatgcctaacacaggccggctgtgnnnnnnnnnnnnnnnnnnnnnnnnnnnnnnnnnnnnnnnnnnnnnnnnnnnnnnnnnnnnnnnnnnnnnngagacta

SEQ ID NO: 15729 - DNA, 758 bp, Macaca Fascicularis
  misc_feature (1)...(758): n = A,T,C or G
gtcatgagacagtgctnncgtgcacaataaaccgacgttagccagaccattgccctcttgaacatttaccgtaaccctcaaaactcttcccagtctgctgacggnnngcgctgtgccgtgagcgatgttgagatgcaggaacactatgatgaattttttgaggaggtttttacagaaatggaggagaagtatggggaagttgaggagatgaacgtctgtgacaacctgggagaccacctggtggggaacgtgtacgtcaagtttcgccgtgaggaagatgcggaaaaggctgtgattgacttgaataaccgttggtttaatggacagccgatccatgccgagctgtcacccgtgannngacttcagagaagcctgctgccgtcagttatgagatgggtgaatgcannnnaggcggcttctgcaatcttcatgctttnnnnnnnnnnnnnnnnnnnnnngcggcgggagctgtatgggcgccgtcgcaagaagcatagatcaagatcccgatcccgggagcgtcgttctcggtctagagaccgtggtcgtggcggtggcggtggcggtggtggaggcggcggcggacgggagcgtgacaggaggcggtcgagagatcgcgaaagatctgggcgattctgagccatgccatttttaccttatgtctgctagaaagtgttgtagttgattgaccaaacnnnnnnnnnnnnnnnnntttttttaaaaaacaacaaaaaaaaaaacatacaaagatgggttct

SEQ ID NO: 15730 - DNA, 1287 bp, Macaca Fascicularis
  misc_feature (1)...(1287): n = A,T,C or G
ggaaannnnntaaagactgagggagaagagccaaggacaaggtcaggttgagtgagtaggaggtattcacgcacnntcttgtgtgctaggtactggcgtgcgtctgattagagaggcagtaaagcaatgatgcagaccagtgcagnnnnnnnnnnaaatcctgattgcagcagtggctctgcaaccttggataaattatttgaatcttcattttgtaaaatnnnnnnnnnnnnnnnnnnnnntgtcaaggttgaatattttaaaagagctaagaatagtgcctggcaaatgagaaaacaataaatactnnnnnnnnnnnnnnnnnnnnnnnnnnnnnnnnnnnnnnnnnnnnnnnnnnnnnnnnnnnnnnnnnnnnnnnnnnnnnnnnntgtactgtaaattccctttagtttgttacagtagccaagtgaaaatgtatatcccaaaattnnaannnnnnnnnnnnnnnnnnnnnnnnnnnnactagttttatctggtacatagaaaaacagccatttaaaatctaacgattctgtggaattggtgtccctgttagtggcagagaccaacctggagcctagatctgatgnctcttctgtgctgtggtttaccccaaacctttaggttgtttattcattcagattagatagagtggagccataaagttaatttacacctagctttttggagaatagccatgattaacttcctattcgtggggggaaaaaccctatgatttactatgcagatgaagagggtaggaactaaataaaggactttgtaagccaaannnnnnnnnnnngtttgtcaaattccaccctttgcttggttccaacatggaatgtttcctttaaagattttaatattccattaaaagtacagttagagaatacctagtagaatttattgaatataatgctaagaatcaaaagacttgtttacctcgggctttggtaggtaagtgtggctttaataactgagctgtttccccacatataaannnnnnnnnnnnnnnntgacagcgtcttgctcagttctttagcgtctgccctggttgcctcattggctcataggtattttggaattgacgttttccgtctggaatatgtgttacagtacatgacattgcctatgtcttttttttcacggtatacaaaaactgggatggttatgcccagctgatcattgactcaggtaatgctttaggtnnnnnnnnnnnnnnnntatgagaggcaggtgtgaatgcgggtagaaagaaacattaggctaggtttaagatctccaaaa

SEQ ID NO: 15731 - DNA, 666 bp, Macaca Fascicularis
  misc_feature (1)...(666): n = A,T,C or G
ctcacttgttgnnnnnnnnnnnnnnnnnnnannntnnnnnntgtggagggagcggagggcggtacggcttctggattgtgtcactgtgattcctaggtnnnttcgatgacacgcagtgtgtgcttttgtgtatggaagcaagtgtgggatggggccttgcccttctgggtagagagctgtctgatccaagtctcaggcttttggcagcttccctgcagcgtacccggggccctgggtgggagtggggagggtcaggtggggggagatggggcggagtgtggatggcttggtcccagaggtgaggggccaggattgctgccatcctggcctggtggaggttggggagctgtagggggttaatgagtcgagacttagaagaatggggccacatagcagcagaggactggtgtaagggagggaggggtagggacacgagctagacccagtctcctttgggatgtgggcagggagggaagcaggcttggagcgttgatttacccacagaatgtgatagtaataggggagggaggctgctgtgggcctgagggagcaggagaggtcactgggcctgttttctgcctcctggccctgcatctcccaccccatgtatcatagggaactttcaccttaaaatctttctaagcaaagnnnaataggatttttact

SEQ ID NO: 15732 - DNA, 675 bp, Macaca Fascicularis
  misc_feature (1)...(675): n = A,T,C or G
attctagtaatcagagtataccttnnncttggaacaaggtggcaggtggggagccctttacccttctgatgaagttaaaccatagaagtttgcaatttgcctttcacaaaaattagcaggccgggcctggtggctgaagcctgtgatcccagcatgttgggaggccgagtgggaggattgtctgagcctgggagtttaagaccagcctgggcacaatggtgagaccccatctctattatttaaaatttttttctttaataaaaaataaaaacacaaacattagcaactagttggctagccataattcctcccttgtttcgattgccagttagaagcaatttttatttcactagttatttgcaagagaaggggtaaaaaaaacagcatcaaagtgcaacattgaagtgagcttactttaatttgtaagtgaggctattgctgaacatgaccactatccttgctgaaatataaaattatactgattgtaatggttgaaattttcctgaatgttctttgaataatcattagccaaagatcaactctctaatggtgctaatgacaatcttgctaatgtacaaatttaggaagtctttagtactaagtacataattttcaaataatattttttaattgtctactctggatgttagctatgtcttgtgagtataaattcct

SEQ ID NO: 15733 - DNA, 688 bp, Macaca Fascicularis
  misc_feature (1)...(688): n = A,T,C or G
aaggtgcacacagttnctcctttgcacctgggaggaactttggctgtgagaatggggggacgtatcccccatgcagttcgcagtcgggcaacnnnctgccccggcacactcnnnnnnnnnnnnnnnnnnngcatgcaattttggaccccgaattttgatgtaccttaaacttccacatcactgcaccctgaaacagagcatgccttccagaaagtcacactctcagatctgtgtcaagttcagtgtgagccctggcaaggctggcatattaacacccgccttctggcttctgaaagtgagatttctatatgggctgcactcacgcatatgcaagttcgtttatctttgtgtccatgactataacccagtgatgctgaggtcatgtgctgggatgctgtatttggaccacacatttcaaagttgccctatggaaatgaatcccacttagtgacacgtcatcagatgtttgtcacatgtgatgaagaaaaatatgtatacctggcatagagaaaaatatatacctggtacattggagaaaaataattacactttcaaagagaattccctttgcagttttatgtttggatcaccactnnnnnnnnnnnnnnnnnacatttgatctgtatttgtatatgctggtgcaacgataaaaatcactgtgatacttcattgtgttatactggatgca

SEQ ID NO: 15734 - DNA, 660 bp, Macaca Fascicularis
gtgaccatgggctgctggggcatgagcatctacgccttcagtgcagccttctactcagcgatcctggagaagctggaggagttcctcagcgtccgcaccctctacttcatcgcctatctcgccttcggcctggggacggggctcgccaccctctccaggaatctctacgtggtcctgtcgctctgcataacctacggggttttattttccaccctgtgcaccttgccctactcgctgctctgcgattactaccagagtaagaagtttgcagggtccagtgcggacggcacccggcggggcatgggcgtggacatctctctgctgagctgccaatacttcctggcccagattctggtctccctggtcctggggcccctgacctcggccgtgggcagcgccaacggagtgatgtacttctccagcctcgtgtccttcctgggctgcctgtactcctccctgtttgtcatttatgaaattcctcccagcgatgctgccgacgaggagcaccggcctctcctgctgaatgtctgacatcgcggagcctcgactctgcacacgcgcctgcacctgggggtctgcagcaggccgaccagtgaggaccaaaggaccttggggacagggggacaggcaagcctactggaatgtaaatatgtgataaaa

SEQ ID NO: 15735 - DNA, 731 bp, Macaca Fascicularis
  misc_feature (1)...(731): n = A,T,C or G
caagaccagcctgggcaacatagcaaggcccccaactctacaaaaattattattttttaaaaaaattggccgggcgtggtggtgcttgcctgtagtcccagctgctcagaacgctaaggtgggaggatcgctggagcccaggagtttgaggctgcagtgagctgtgtgattgcaccgttgcactccagcctgggtcacagatcaagaccctgtctcttaaaaataaaagttggagacgagagctggctcatcacctgaaaggacggattagtaggtaggagggtgggtggaggatggttgaatgtgtggatggataggaggatggtattaagttggtgccaaagtctttgctattactcttaatggctttaataaagaacttgaaggaagaacggttggttggatagacagagataaacgcatactggaaacaaagtaaagataaaacacaagtcataccaggccagcaactctgtctattttgttcactttgtctatgtcttatttgttcatcctggataactgaagggaggtcaagtttttgtgattgatttgtcagagaacctgttgaagtgttaattaagaagctaagaaaatacttcttagcaacattttctttttcttttttttttcttttgagacagagcctcactctnnnnnnnnnnnnnnnnnnnnnnnnnnnnnnnnnnnnnnnnnnnnnnnnnnnnnnnnnnnnnnnnnnnnnnnnntcc

SEQ ID NO: 15736 - DNA, 734 bp, Macaca Fascicularis
  misc_feature (1)...(734): n = A,T,C or G
cgtgcaaganntggaggacgtccaannnnncnnngatgacggagctgagcatcaagagcggcaaccccggggagtcctcccgtggttggatgtggggctgtgctttctcgggggactcccagtacatcgtcactgcttcctcggacaacctggcccggctctggtgtgtggagactggagagatcaagagagagtatggcggcnnnnnnnnnnnnnnnnnnnnnnnnnnnnnnnnnnnnnnnnngctgggctagcctgtgacccctcaggactgcctggtgtaggtggtggcagctggagggtcccatgcagcacccaggtcagaacaggccctactgccggcctacaccagctggacctgatggccccctgtggcactttgacctgctgggccaggccgccctgggactctcagcccnnnnnnnnnnnnnnnnnnnnnnnnnctcgacccaagccaggctgcacactcctggactaggctagcctgcactgcctgggagtcagccaagggcccaaagctgctgaggggtgtgaggctggtgcccacccctaagctagtgtgtttcctgtcccctccctgccgnnnnnnnnnnnnnnnnnnnncagagaacaccaccgtggccaggtggaagggtttattagtccctgccggcagctatcctccctggtgcgggnnnnnnnnncagcccgctggattggggacagggaccgggctgggccaggtcggggctcag

SEQ ID NO: 15737 - DNA, 1046 bp, Macaca Fascicularis
  misc_feature (1)...(1046): n = A,T,C or G
aaagcacatannngaaacagaaatgagaactgannnngtatacaaagtgccaactcaacaaggaagttggagtatgtctgttgcagagaaccaatgtagcagcgcccaggggtagagaccatatgttccatactcagatatttgggttttttgagagagctggggagtgtcgcaactcgattaggcctgggagattttgaccaaactaaaggccttttctccttactgcatctgacacatgtcttgagacaagatagtacccatgaattacatcatgaagtatgtgtgaattcagtttacatgtaagacctgagagtttgaagagggcacattcccaaagacattcccagtcatgaaatgtagaagactggaaaattaagaaattatgtaaaggtagatatggcttttagagttacattatgcttggcatgaataagatgccgggaaaatagtttaaaatcatacatcagcatacagactgctgttagaaggtatgggatcacagtaagataatctgtcagctactactaggcatttattgttaattgagttacagagaaaagtcattcaagactgaatttatgaaagtatattgcatctatctctgtgtagaacatttgcttcacattgtaaagaatgcagtttaaaatgtattgaatgcaatctagatgtacactaaaggtgaaaaataacaggtgctctttactgttttgataaattgttttctgttatttcccttcgtttactatgaggggttgatttatgaggagagctctgggttccttgctcagatttcctttttgccctaggatatgattcccttattagagataaatacttctgttttcttctagctaattcattcatttagcagtcagttgctcagtgctaggtactaggaacagaggctcaatttctgctctcaaaaaactcaatataatgagagagagcctgacagataaaatgaactatgactctataagagggctcaagattgtgaattctgcaggcagagaaacatgagccatggtctgtccctgcatttt

SEQ ID NO: 15738 - DNA, 750 bp, Macaca Fascicularis
  misc_feature (1)...(750): n = A,T,C or G
gctgnnngctgccnnnnncagcaannnnnaggtccaggtggaggccattgaagggggagccctgcagaagcttctggtcatcctggccacggagcagccactcacggcaaagaagaaggtcctgtttgcgctgtgctccctgctgcgccacttcccctatgcnnnnnnnnnnnnnntgaagctcggggggctgcaggttctgaggagcctggtgcaggagaagggcgcagaggtgctggccgtgcgcgtggtcacgctgctctacgacctggtcacggagaagatgttcgccgaggaggaggctgagctgacnnnnnnnnnnnnnnnnnnnnnnnnnnnnnnnnatcgnnnnnnnnnnnnnnnnnnnnnnnnnnnnnnnnnnnnnnnnnnnnnnnnnnnnnnnnnnnnnntggcgctgcctgagcatgacgcccgcgaaaaggtgctacagacactgggtgtcctcctggccacctgccgggaccactaccgtcaggacccccagctcagcaggacactggccagcctgcaggttgaataccaggcgctggccagcctggagctgcaggacggtgaggacgagggctacttccgggagctgctgggctctgtcaacagcttgctgaaggagctgagatgaggccccacaccaggactggactgggacgctgctagtgaggctgaggagtgccagcgtgggtgggctcttcaggcaggaggacatcttggcagtgctggctggccataaag

SEQ ID NO: 15739 - DNA, 764 bp, Macaca Fascicularis
  misc_feature (1)...(764): n = A,T,C or G
ataggtaanannnannnngnntgcacaagcacagaaatgtttgcatgtaccgccaggcatatacaggaaacaactcttcacaaatccaagcagctatgaaaggttttgaagaggtcataaagaaatttccaaggtgtgccgaaggctatgcactatacgcccaggcattaacagatcaacaacagnnnnnnnnnnnnnnnnaaatgtatgataaatgtattgatttggaaccagataatgccacaacatatgttcataaaggtttacttcaacttcagtggaagcaagatctggatagaggtttggaacttnnnnnnnnnnnnnnnnnnnnnnnnaataaatgtgattttgcctatgaaaccatgggaactattgaagtacaaagaggaaacatggagaaannnnnnnnnnnnntcaacaaagctattaacctggccaaatnnnnnnnnnnnnnnnnnnnnnnnnnnnnnnnnnnnnnnnnnnnnnnnnnnnnnacagaagttgcaaagaaatacggattaaaaccaccaacattataaaatagggggaaagcagactgaccctctttttaaaagtttaccccctcttcaactgaaccctaaagacactgtcatgaactgtgttgaatggtggaaattagtatttgtttgtggtgttgttatttgttacatctgtttcatgtctaggtgttgtgggtgtggctgttgaaggaagtttgcagtcttnnnnnnnnnnnnnnnnnnnnnnnaaaagattagaacatg

SEQ ID NO: 15740 - DNA, 865 bp, Macaca Fascicularis
  misc_feature (1)...(865): n = A,T,C or G
tttacatacatgatggaaagtggaagacatataccaattatattccaggaaaaaatactttaatagtattgttatatagggtattggctaattccagtggatcctcatctctcactgctgacattatctccaatatttgaattatatggcagggttcatttctgtcttttaagcagtgcccactttcccacttctttttggtaggaaatgcagtttttatatattttgatccagcatgtgtacttttgactccacaccaaggtgcatctgtctcaatcattaatttttcactaggaattgacttcaaaacttccaaattagcttcagttttcagtgaacaaccattaaatcctatataaagatccaaatcaatcaaagcagctgctgcttccttggtaccatcaaatgaatgcaccactccccctacacagcgatctctatttcttttcattatgtccaaaaattcagcatgtgagtttcgacaatgaagaaacattggtaattttgtttgttctgacagttcaaattgtttttcaaaatatttgagttgagtatctttgggacaaaactttctctttattgttttcagtccacattctcctattgccacaactttctctttattgttttcagcaagatttagcaactcctttaagtaaagatcagggttattcttttcaaattcaccacatcttgtannnnanatccactgtactnnnaaaaacatatcatttgtttgtgccaaatgcagtgcatctttactgtcttgtagatttccacctgtaatcataaactttttaacaccaatctcgacagctctccctattacatcctgtaagtcatcttgatgcttttgaacccccta

SEQ ID NO: 15741 - DNA, 720 bp, Macaca Fascicularis
  misc_feature (1)...(720): n = A,T,C or G
acccaacatatgtttactttatgaacttaaatggaaattaatttattgtagactacatctctatttggaatgatgaggtanntgtannnnnnnnnnnnnnnnnnnnnnnnnnngttctgtgtatcgagaaagaggtgtgggagcggtaggcagcctgccgccaacacacagatggctcccaccactacgaaggttgagagcaaagccaggaggcccagaggagcaacagccctgggccacgagtgtgggtcggcctttcaagtgctctgtatgcacagacaaccaaggccagtagaaagcnnnnnnnnnnnnnnnnnnnnnnnnnnnnnnnnnnnnnnnnnnnnnnnnnnnnnnnnnnnnnnnnnnnnnnnnnnnnnnnnnnnnnnnnnnnnnnnnnnnnnnnnnnnnnnnnnnnnnnnnnnnnnttcatccnnnnnnnnnnnnnnnnnnnnnnnnnnnaactctgcattttcatcccagcgtacacctttaatgttttattgatttcattggcactgtatttggacctgtccttgtatatgtagagacatatgtggcttcattggtaatttacaagcaaaagatgacatgacgtcacacctgtatgaaaatgtgatgattgaactccctgtgtatagtgagcgaattaaaatgtctgcctctccagacatttcttaatgattccacttaatagattctatgtatgctgaatgttcctgg

SEQ ID NO: 15742 - DNA, 769 bp, Macaca Fascicularis
  misc_feature (1)...(769): n = A,T,C or G
acatgnnnnnnnnnnnnnnnnnnngcttggatgggccgatgggcgaggcgcccggcgacttnnngcagcgcctcctgccggcgggcgcgggcatggccgcgggaggtcccctgggccggcgcctgtcctttctactccgcaagaacagctgggtgtcggaggcgtctaccggggccagctgctcatgcgcggttgtccccgaaggcgcggccccggagtgcagctgcggggacccgctgctcgatcctggcctgcaggagcccgagcctccgccccctgcaggtcctgaaccggttgccctcatccctgggcctgtcgagcccttcagcatcgtgaccatgcccggatcccggggtccggcgccaccctggctgcccagccctattggcgaggaggaggagaatctggcctaagatcttagagcccagccgcctaaggacagggaaccaggtccctgcacggcacacaggcaggtgtcccggtctgcataagcctacgtgtgcctttgtaaagtccacctacacttttgaccagctctcgctgcctgcctgggtttggcgctgtgctaggggcaagagttcttccagactcttggaccagcccgcctgtaccaccatctctacttcccaacccccactgcctgagaggtcatcaatgtcctgcctgaattctttccttcaagtgaagatgtgactgactatctcatcgagttgtcatgaggatgaaagaatggcattaaagcatttggtatacagtagtnctcaataaa

SEQ ID NO: 15743 - DNA, 763 bp, Macaca Fascicularis
  misc_feature (1)...(763): n = A,T,C or G
gcctcatatcgcttccttttccaaatatcagagggcagctgagggggatgcggactcaggggcgggatagaacagtagaagacaccgggcagctgactgcggcagtcgggtccagcccactgcgtttcgtggggaaagatggagtgaacacagccacactccgtcgttctcgcgttgtctttggttgctttgagctgtggtagtggggttgagccattgctgcagnnnnnnnnnnnnnnnnntactctaaagaatacactatctggccctttaggaagtggtcagccacccatggaataattaaggtttgggccaaaaggaagggaagctggggaaataggatagagccaggtgggtgcacacagagaacagatgccaggggacagaagctttcgttagaggagaccacaaatggggttcaggcttcctagtannnnnnnnnnnnnnnnnnnnnnnnnnnatgccaaccaaatgccaactttggttcaggagaaccaaagctcttacaggtttggagggctctcatggaaggggcagcatgccataaagggttacgattagtaagtgatgaaaattaaacagatgttacgacatggcgttnnnnnnnnnnnnnnnncnnnnnnnnnnnnnnnccgtcatgaggatgcacaggactgtgtgtgttgtcccgggcacagccctgggcctgtgcttcctagatctgctcctctccgccgtggcctctggggttcgcgttcccagggannnnnnnnnnnctgctctg

SEQ ID NO: 15744 - DNA, 473 bp, Macaca Fascicularis
  misc_feature (1)...(473): n = A,T,C or G
ggccttgtagaggaggccaagatttagaacgtctaacaaagcggagaactgaaaaaccccccccttccacccactcatacaattattcattctctttccatatctatatatccatctatatctttcagtctctatctctctctctctctctctcaacctctttcttccaannnnnnnnnnnnnnnnnnnnnnnnnnnnnnnnnnnnnnnnnnnnnnnnnnnnnnnnnnnnnnnnnnnnnnnnnnnnnnnnnnnnnnnnnnnnnnnnnnnnnnnnnnnnnnnnnnnnnnnnnnnnnnnnnnnnnnnnnnnnagtcaggccgttgctagtcagttctcttctttccaccctgtccctatctctaccactatagatgggggtgaggagtagggagtgcagccctgagcctgcccactcctcatcacgaaatgactgtatttaaaggaaatctattgtatctacctgcagtctccat

SEQ ID NO: 15745 - DNA, 1046 bp, Macaca Fascicularis
  misc_feature (1)...(1046): n = A,T,C or G
gcctgtatcaccggnnnnnnnnnngccatggaggctcttgttgttgaagtaaccaaacannnnnnnnnnnnnnnnnnnnnnnnccctgtaaatgaacgtatgctgaacatgatccgtcaaatctctagaccctcagctgctggtatcaaccttatgattggcagtacacggtatnnnnnnnnnnnncgtcctcccaannnnnnnnnnnnnnnnnnnnnnagcggatatagaaggggagnnnnnnnnnnnnnnnnnnnnnnnnnnnnnnnnggctataccagtggaggctatggtggcggaggctatggtagcggaggctannnnngcagccccaactcctttcgggcaggatatggtgcaggtgttggtggaggctatagaggagtttcccgaggtgnnnnnnnnnnnnnnnctggaggagactacagagggcctagtggaggctacagaggatctgggggattccagcgaggaggtggtaggggggcctatggaggtggctactttggacaggggagaggaggtggtggctattaaatcttggttatgtcagttcctgtgtgtagacagtaaggaaaaaaaggcatgctatgtgttacgtgttttttccaatatgtttatttgccaccaaaaagtaaatgcattttcacccattctgtggttcattgtagtttaaggaaaccaagcatatagatgcattagtgattttgtttatattatgtaaaatataacgatctatcttaaaaataccacagtttgtattttttctttaaggagtaaagatttgcctttaaataacttggtattttcctggctttcgtttaatacagtagaaaataaagtattacaccgaatacttgccgtgtagtttgttgaccttatatattagaaaattttaaaatgccagttacatctgttcattttaaatgtcagagaagttgtaccatgtttcaaaagtatactaagtgatactacttgtaatagaaaaatcaccttggaattgttaccttttgaagtaaatactggcaagtgtacaagccacataa

SEQ ID NO: 15746 - DNA, 728 bp, Macaca Fascicularis
  misc_feature (1)...(728): n = A,T,C or G
tagctgnnnnnnnnnnnnnnnnnnnnnnnnnnnnnnnnnnnnnnnnnnnnnnnnnnnnnnnnnnnnnnnnnnnnnnnnnnnnnnnnnnnnnnnnnnnnnnnnnnnnnnnnnnnnnnnnnnnnnnnnnnnnnnnnnnnnnnnnnnnnnnnncagatgtgaggnnnnnnnnnnnnnnnnnnnnnnnnnnnnnngcccttctaggtccaaagttctgggaatttctagcttattctnnnnnnnnnnnnnnnnnnnnnnnnnnnnnnnnnnnnnnnnnnnnnnnncaaccccacatggctgagatgacctgggcctaggatgcccttggacagaagactggcctacctagcagacctggaattttcttcctgatctgctgcttccaagttgtgtgaccttggnnnnnnnnnttnnnnnnnnnnnnnnnnnnnnnnnnnnnnaataaagtggatctggagaacaagaaatgtaataagcacgtggctcaccattcaagagatgagtctgaccattcactttctgtgtgccagagaagagagaccatgggtatagaccagcccctggaaaggctgctttagtcaaggctgagagcagcnnnnnnnnnnnnnnnnnnnnnnngaggtgaccactgtctttctgacctggcacagaggaaatgttggctgtgaatatgaccaatagaaagaagcctgtatttctcattnnnnnnnnnnnnnnnnnnnnnnnnataa

SEQ ID NO: 15747 - DNA, 717 bp, Macaca Fascicularis
  misc_feature (1)...(717): n = A,T,C or G
tcctcccaagggtgaggcctcaggacaaggaaacaggtatcagcatgatggtagcagaaaccttnnnnnnnnnnnnnnnnnnnnnnnnnnnnccaaagagttgtggttccgggccgcagtcattgctgtgcccattgctggagggctgattttagtgtttgcttattatgttggccctgaggatgcttagaagtgaaaacaagaggctccaggatcagcggcaacagatgctctcccgtttgcactacagctttcacggacaccattccaaaaaggggcaggtcgcaaagttagacttggaannnnnnnnnnnnnnnnnngggcacgagaactgctgtctgacctgtgataaaatgagacaagcagacctcagcaatgataagatcctctcgctcgttcactggggcatgtacagtgggcacgggaagctggaattcgtatgaccgagtcttatctgaactacacttcttgaacgcttgaaggccttttgagttctgctggacaggagcactttatctgaagacaaactcatttaatcatctttgagagacaaaatgacctctgcaaacagaatcttggatatttcttctgaaggattatttgnnnnnnnnnnnnnnnnnnnnnnnnnnnnnnnnnnnnnnnatagaaagcaaagagaagactttgtacacacggtcaccagggttatnnnnnnnnnaaggagngatggaannnagt

SEQ ID NO: 15748 - DNA, 715 bp, Macaca Fascicularis
  misc_feature (1)...(715): n = A,T,C or G
aagaccattgaaatacaggctacaagtgcactggatgaaaagtcaaaactagaaaaagcactgcaagatttacaacttgatcaaggaaatcaaaaggattttataaaggcccaagacttgagtaacttggaaaannnnnnnnnnnnnnnnnnnnnnnnnnnnnnnnnnnnnnnnnnnnnnnnnnnnnnnnnncagaagtcactggaggagaatnnnnnnnnnnnnnnnnacgacctactcagnnnnnnnnnnnnnnnnnnnnnnnntgaaaaggaattggaaaagaannnnnnnnnnnnnnnnnnnnnnnnaaacatgaaagagattcttaccaagaagannnnnnnnnnnaaagatctgaggaaaagactggcacaatannnnnnnnnnnnnnnnnnnnnnnnnnnnnnnnnnnnnnctgccacacacaaacatannnnnnnnnnnnnnnnnnnnnnnnnnnnngaagcattttgtcatatcccctctccttatttttctaatatttagacttctaatatttnnnnnnnnnnnnnnnattttcagctaattgaaaacagagaaaacctagtgattctgtctggttatcccacatgcctctctactgagtgctccagagtcttagctcgcatgcaccgagaattctttacagcaaagaagagatttttagagtgggaagaaagaggctcatccttctgcattagtataaagagtc

SEQ ID NO: 15749 - DNA, 751 bp, Macaca Fascicularis
  misc_feature (1)...(751): n = A,T,C or G
tatattcacagttggtgtcctgtcactttgttttaaaataagctagaaccaggatgcttccttattggaaaggctttgccagtccttaaggtacattgagtgatgctgcaacttgcaaaaatgtaccagcatttaaaatttcttttcctgggaatcaaggtaactcacacgactacttgcagtacaaattttttgcttctctttcgacctgaaatgtacttggtgggttttccttccttttattaaactaaaactgtgtggaaaaggttgatttttcttaatagactctgaattccactcacagggagatgggattcctttctcgtcccaacaaagggagttgctcgaaagcgagcatcagttaaaatgtaggggaaaatgtattctgtatgtagtgtagataatactttgtgaatggacaacagttacatagtgtcttggtagctnnnnnnnnnnnnnnnnnnnnnnnnnnnnnnnnnnnnnnnnnnnnnnnnnnnngacatcaggagtgagggatggaaaaggggataaaaggcctggagccacactccatatggctgaggaaggcgctagggaaagagatagacacaatggggtaaaaannnnnnnnnntcccctgcctggaaactgctggtggggaaatgatggtgaagggtgtttgctagaactcatgnnnnnnnnnnnnnnncgtaaactagccttctcaaaatcccagcaatataaagcacnnnnnnttcagtcattaaatcca

SEQ ID NO: 15750 - DNA, 708 bp, Macaca Fascicularis
  misc_feature (1)...(708): n = A,T,C or G
gcccacttggcctggcctgctctcaccacctcctcccaagtactcaggccctggcagggccnnnctgaggccttggatgaggaggtggagtcatcagtgttgcccttgcccccagcctcagccagagggtctccaggacgttgcctgtcccaggacttgggacggtggcctcatctttgtcctccccaccccccagccctagggacaccccaggcagtcctgggtgtggacacgatgaagcacctgctccataagacactgaccttttggggaagtggttgtgcatattttatttttctttgactcgtgtgagttcaaagtaaacaccaccaccgtggacaactcttgaattaaatccactagagcgagctttaaaactaatctgagcataacccccaacgtggctctatgcttgtgtacctttgcacatattttgtttagtacagtttcatatttgagtttgcagaattatctaatagtctttttttggctaatatttttataacgtggttcttatttaactgtctagttttgatagaatttaccaggtctggctgaatgaagatattggcacgtgttattttagtggtttaaatcctcttatttatggttttaactctaagaaaattttaaaaggaagagatgtttggatgacaaaaaaaaatgccttattgaaaaactaaagcaaattctttataggaagaaaat

SEQ ID NO: 15751 - DNA, 748 bp, Macaca Fascicularis
  misc_feature (1)...(748): n = A,T,C or G
cttataannnnnnnnnnnnnnnnnnngataagctnnnnnnnnnnnnnnnnnnnnnnnnnnnngcttattttaaatgtattattagtgaccattaannnnnnnnnnnnnnnnnnnnnnngaacacagcagcaaatagtttatgattnnnnnnnnnnnnnnntttgaaatataggttcttaatacatagatacatattgtagcactatgacttcatcatacctcatttctttaaatagctatccaagctttcactgaagtctgtctgttttttatatttgctgtctggattttaaagacttttcatattttatatttctactgattttgtttcccctaacaacatttgtcactgtctttgaattnnnnnnnnnnnnnnnnnnnnnnnnnnnnnctaaaattttgcctgtgaggttttgttcatannnnnnnnnnnnnnnnnnnnnnnnnnnnnnnnnaaatacctatgttaactcacaagtataaaatatgtgtgtattataaaacaatgaaannnnnnnnnnnnnnnnnnnnnnnnnntttagaagnnnnnnnnnnnnnnnnnnnnnnnnnnnnnnnnnnnnnnnnnnnnnnnnnnnnnnnnnnnnnnnnnnnnnnnnnnnnnnnagtacaataccttaattatttcttaaaatactgactttgacctagctcactgtattttttatttaatggattatggattataatatttttcttctgagttaaattttcataatttatgtgaaga

SEQ ID NO: 15752 - DNA, 712 bp, Macaca Fascicularis
  misc_feature (1)...(712): n = A,T,C or G
aaagagccaaagtatcaacttacagatcgntttaaagcttaaatgtattaaccacctttgnnnnnnnnnntgnnnnnnnnnnnnnnnngggcagccttcttaaatgacagatgtaaaaaaagtaatgagagactnnnnnnnnnnnnnnnnnnnnnnnnnnnntctataggaactgtcttaatttgaaaaccttgctgttacaaattggacctttatannnnnnnnnnnnnnnntgaaaagagcatatttaaccttttctggctgtaaatggttaccttcctgtagctgccccgcacctggaggcatggagttgtgtgcgtcctgcttatgtacaattgttttcagtgtttctaagaatgagtctgaatggttcttgaaaattagccnnnnnnnnnnnnnnnnnnnnnnnnnnnnnnnnaaaagttggacttnnnnnnnnnnnnnnnngtttggaagagaaatgcaggccatatgtgcgcatgaccgagattttgaaaaaagatgtacatagtgacatgtttggtgcatggttttgaggagggcttttgtcaaaaaggaggtataacctttccccgcnnnnnnnnnnnnnnnnnnnccttttctatgcaatattacagannnnnnnnnnnnnnnnnnnnnnnnnnnnncacacgtaggtttgggctgtaatctaaacaattggacagattaaatgtacatggaaatgagcagt

SEQ ID NO: 15753 - DNA, 625 bp, Macaca Fascicularis
tggcaccaggcccgccccacctgtgaggaaccacagcccccttctccagtgatctcggggagggtgtaccagggccaccccacctggatgtgagaaaccaaggccccttctccattgatctcggggagggtgcaccaggcctgccccacctgtgaggaaccaaggccccttctccagtgatctcagggagggtggcaccaggcctgccccacctgtgagaaaccaaggccccttctccagtgatctcggggagggtgcaccaggcctgccccacctgtgaggaaccacagcccccttctccagtgatctcggggagggtggcaccaggcctgccccacctgtgagaaaccaaggccccttctccagtgatctcggggagggtggcaccaggcctgccccacctgtgagaaaccaaggccccttctccagtgatctcggggagggtggcaccaggcctgccccacctgtgagaaaccaaggccccttctccagtgatctcggggagggtggcaccaggcctgccccgccttggagaagctgcggccccttctccagtgccgtttggtcctgccttccccaaagctgcttacagctcagtcgaggcaagagtgactggctcagagag

SEQ ID NO: 15754 - DNA, 701 bp, Macaca Fascicularis
  misc_feature (1)...(701): n = A,T,C or G
agtgcagcaccccnnnncnnaggcaggggaagagcaggaggtctactacgnnnccctcagcttccagggcctgaggctccgggagcctgaggaccaggaggcccccagcagcaccgagtactcagcgatcaagatccacaagaggcggccccagaagggctcgggctttggttggagagggagnnnnnnnnnnnnnnnccgaggtgaagagtgctccatggaaacaggacaccagcaagtgtgtgggagtcgtgctggtgtgannnnnnnnnnnnnnnnnnnnnnnnnnnnncatcctgagactaatagtttgagcaagttactttactcctcactttcctcctctgcgctgtggacacagtcagcctaactcacagggttcttgtgaggcataaggaagtaattaacataaagcatccatcagaggcgagtctcatctgagtcacgcctcttcccagggcagcccatgatgtgggctgtccaccctggtccaaaccgagacccttctgcagggcaggtccagcttcagagctccctgaagcctcgggtggggctgtccttgggcnnnnnnnnnncttgattctctctctgtcgttcctgctccccccactcccactatggatcccggggcagcctacacatccctgcaggctgctttccgcctcagagcccgcttcctgggacctcaacctccgtattga

SEQ ID NO: 15755 - DNA, 776 bp, Macaca Fascicularis
  misc_feature (1)...(776): n = A,T,C or G
gcaggagacacnnnnccagaacagggctaacttccannnnnnnnnnnnnnnnnnnnnnnctgtcatccccaccaacgtctttgggccccacgacaacttcaacatcgaggatggccatgtgctgcctggcctcatccacaaggtgcacctggccaagagcagcagctcggccctgacggtgtggggtaccgggaagccgcggaggcagttcatatactcgctggacctggcccagctctttatctgggtcctacgggagtacaatgaagtggagcccatcatcctctcagtgggcgaggaagatgaggtctccatcaaggaggcagccgaggcggtggtggaggccatggacttccatggggaggtcacctttgatacatccaagtcggatgggcagtttaagaagacagccagtaacagcaagctgaggacctacctgcctgacttccggttcacacctttcaagcaggcggtgaaggagacctgtgcttggttcactgacaactacgagcaggcccggaaatgaagctggaaggcaggagcaggtgccagcggaccatcggctggcagagccaccacccatcaaccctgccaggagctcagggcaccacctgggcccacattctgtccgctctgcagccccaagcatctatccagtggggcccccattcacatcagtcctcagggaaaccagggcccgggcaggcccggtgctttgctccccacactggcccccggccttgcgtgtgtccactctgatcctnngtcccgctccc

SEQ ID NO: 15756 - DNA, 721 bp, Macaca Fascicularis
  misc_feature (1)...(721): n = A,T,C or G
tgctacatagattttgtcaaatgannntgtgacaagatggtgttgtgctaatgttaaatgtcagtccacagagctaataatacctcagtataatgtcatgagcagttgaaattcatcacatgaaaagtaatctgctaaaagacttggttgcccactgcctaactgtgtacagtgttaccagtatcctattatnnnnnnnnnnnnnnnngttaacgcctaggtgttcccattacttttttcccctcatgtcactactgaattttgacaggaggaaggaatagaatgatagcttgttttatttgtaaagctttcagtgaaacactacatacatgaagaaaaggaacaaggtttaactatttaagaactgtttgctgctgcatagtgccattggataggggaagaacttcagaaatctgtggtactcttggccttgtctttgtcttccctgaacacgtctccactctgtgaagccagcatctaggggctaaagatgcaaaggaaagcagcatgcattgtctgtacaaatgtgcagtgaaatacccccaaagcttttcctactgtacagatctctcgagtctgcttcaagtgatttcttttcttcttgattattttcttatatttctatatgtatagtgtaatagccttttgttaactaattttcttttttccttttagtaattaagcacgatcatgtccctttttacgccttacctgagaggaa

SEQ ID NO: 15757 - DNA, 758 bp, Macaca Fascicularis
  misc_feature (1)...(758): n = A,T,C or G
tcccggnnnnnnnnnnnccatattactgtggtgtgggagcagacagagcctatggcagggacatcgtggaggcccattaccgggcctgcttgtatgctggagtcaagattgcggggactaatgccgaggtcatgcctgcccagtgggaatttcaaattggaccttgtgaaggaatcagcatgggagatcatctctgggtggcccgtttcatcttgcatcgtgtgtgtgaagactttggannnnnnnnnnnnnntgatcctaagcccattcctgggaactggaatggtgcaggctgccataccaacttcagcaccaaggccatgcgggaggagaatggtctgaagtacatcgaggaggccattgagaaactaagcaagcggcaccagtaccacatcnnnnnnnnnnnatcccaagggaggcctggacaatgcccgacgcctaactggattccatgaaacctccaacatcaacgacttttctgctggtgnnnnnnnnnnnnnnnnnnnnnnnnnnnnnnnnnnnnnnnnnnnnnnnnnnnnnnnnnnnnnnnnnnnnnnnngtcgcccctctgccaactgtgaccccttttcggtgacagaagccctcatccgcacgtgtnnnnnnnnnnnnnnnnnnnnnnnnnnnnnnnnnnnnnnnnnnnnnnnnnnnnnnnnnnnnnnnnnnnnngcccctcctagttcttcatcccactccaactcttccccctctcccagttgtcccaattgtaactcaaaggg

SEQ ID NO: 15758 - DNA, 726 bp, Macaca Fascicularis
  misc_feature (1)...(726): n = A,T,C or G
agtagtagctgggatcttacaggtgtgtaccttcacacctggctgatttttattnttagtagagcatgnnnnnnnnnnnnnnnnnnnnnnnnnnnnnnnnnnnnnnnnnnnnnnnnnnnnnnnnnnnnnnnnnnnnnnnnnnnnnnnnnnnnnnnnnnnnnnnnnnnnnnnnnnnnnnnnnnnnnnnnnnnnnnnnnncacagctggtgggacagggattttaagttttaaaaaactcttctgtggagcttatggtaggtaatttgcctaagagttgtaaagcagtgcaacactaggcgaggggctatgtgtagctattgaggattaagggatagtgaaatgaactttaggaacattctcagccataagcaagagctggattcacacaaccaatttttcaaaaaaaaatcaacttaagatacccataatttgggcacctttatatttcatgatgagaaagcgcatgttaactacatgtttaaatatattttatttcaagttaatataacagccatgatttgttcatttaagtgaaatgcctagataaaaacctcaagtgtcacttggctaaaatgttggagacagtaaatgtaagccactagagtaatgactctggttctttagactactgcatgtaccttactgaaatacaggaatgcacattgataaaatgcataatgtcttcacatgtctcaatcctcattcctcttcctttcatgcctccct

SEQ ID NO: 15759 - DNA, 1002 bp, Macaca Fascicularis
  misc_feature (1)...(1002): n = A,T,C or G
gccacactgatgatcatatggctctacncttagaggaagaaaacgctatcttttctggagactgcatcctaggggaaggaacaacgatannnnaagacctctatgattatatgaactctttaaaagagttattgaaaattaaagctgatattatatatccaggacatggcccagtaannnnnnnnnnnnnnnntaaaattcaagaatacatttctcacagaaatatnnnnnnnnnnnnnnnnnnnnnnnnnnnnnnngagaactttgagaaatcatttacagtaatggagcttgtaaaaattatttacaagaatactcctgagaatttnnnnnnnnnnnnnnnnnnnnnnnnnnnnnnnnnnnnnnnnnnnnnnnnnaaannnnnnnnnnnnnnnnnnnnnnnnnnnnnnnnnnnnnnnnnnnnnnnnnnnntttagtttcagattaaagaaagctttgttttattttgctttgagaaaatggtatgttttcttaactataggttattttatagagagtataaaagtataaaacattgaaaataaccctagatatgctttaaaataatgttatatttatgctaaaatatatgaattacactatacaaccatatgataggttatttctctaaccttggttttataacgttttaccaaaaattcaaaatctaatagtttatcagttttcaatagattcaataaaatggttactttaaaaataataaaatttatccannnnnnnnnnnnnnttatttttggtggtcagttatctattattagtgatcagtaatactgttttctatagctactttatttaacagcacagatttctatgtacccttactcttttctcaacccttgtctctatctgtacataattgctttgtcttgatgtttctatcaactatatcatgactatctattggttccataactctgtatcatgtgtattttcttattctggtatacaacaaatgattcatgctaaatgannnttttggtg

SEQ ID NO: 15760 - DNA, 369 bp, Macaca Fascicularis
aatttcagattcatccctgtgctcttcccaaatgctaagaaggagcatgtgcccacctggcttcagaacactcacgtctacagagggcccaagaataaaaaaaacatcctgctgcggctgctgagagaggaagagtatgtggctcctccacggggagcctctgcccacccttcaggtggttcccttgtgacattgttcatccccagatcaatgaggttaggccatgtttggggccctgttctgacagcattttagctgagggtggtcggtagcattcctgggtggtgttttgtgtgttcctccctgagaggccctctggcccccaggaaacctgttgtgcagagttcttcccaggagacctccacatac

SEQ ID NO: 15761 - DNA, 637 bp, Macaca Fascicularis
  misc_feature (1)...(637): n = A,T,C or G
ctgcgtgcggagcctgctgggcatggtggtcggcctggtgtgaggcccccggggaccggcaagtgtgttcagggaagggatggccctgagcccggcggctcaccgagtgtatttctnnnnnnnnnnnnnnnnnnnnnnnnnctggctcatgaggcagtcgggactcatgacttgctggctgctgctgcctcacgtgctggggttacatgnnnnnnnnnnnnnnnnngccccggcctcgcctgctgcctcgcctgctggggtcccatggaggaaccaggcctggtgccccggcctcgcccagtggctggtgtgggcagctgtgcccgcctcgcagtgtcctggaggcagccgtctcacagactcagcttggtctcccgcaggcttcagaaaaacctgaattgcacgtgtggggttcttccccagcccttgggtgcggagtctctgtgcacttgagagctgagggacctacccaccatctcccgctccgagttcatcccagagcgtggggcccgctgggcacccagcacccggcctgcaaggccacctgtcccccagatgctgctacgagtgaccagtactgtgtggaggaggccaagggccgcccctgggaaaccaggcttcaacagtacaaggaaaa

SEQ ID NO: 15762 - DNA, 691 bp, Macaca Fascicularis
  misc_feature (1)...(691): n = A,T,C or G
caannnncagtncagtgannnngnnncatatagtgttcaagccaaannnnnnnnnnnnnnncacgaacaggagttcgaagnnnacaagaaatttggcctggttgtgagatccgatacttagaagggggtcatattagtgcttatctttttaaacaaggactcttcagacaagccatctatgatgcatttgaacgcttcctccataaatacgctaactaattggattattatatgtaaccagtgtggccaagatgtttcttacaaaaggaagcttcatcctatgatcatgtgaaggacaagcagacagcactaatatatctaatcgctatcaatgtagtctggaattcattgttacagatccgttaactataaacttcgaatacatttgaataatttcaagataatatttgaagtaaataatgttaaagtatttttattattgttcattggaatcccatatactcagtgtttagtctgttgttactatctatgaaaactaaatttttaatcatgaataatttattaaattaaatacatttattcattgaaactcttctgggttttagtaaaattgctaaatcaaaccaagattttaatatatcagcatttactttgtacccttataacatttcactattgactttatttgaaaaacatgtttattttttgaatgtatggtgaattcataatc

SEQ ID NO: 15763 - DNA, 903 bp, Macaca Fascicularis
  misc_feature (1)...(903): n = A,T,C or G
tctnnnggtagtaattaaaaaatggtccatcccttntnnnctgacattaaattatgtagagaaatgcttccagatttcaaatgctacagatgattgtaagccaaaactctttcatttctccaaagagagtgcatatgccttaccaaccatggctttttcatttctctgccatacctcaatattgcccatatactgtgaacttcaaagtccttcaaagaaaagaatgcagaatgttaccaatacagcaattgctttaagttttctcatttattttatatctgcactctttggctacctcactttttatgacaaagtggagtcagaattactaaaaggttatagtaaatacttaccacatgatgttgttgtcatgactgtgaagttatgcatactatttgctgtgcttttgacagtccctctaatccacttccctgccagaaaagctgtaatgatgatgtttttctccaattttccattctcgtggagtcgccattttttgatcactctagcactcaatattatcatcgttttacttgcaatatatgttcctgacattagaaatgtatttggtgtagttggtgccagtacatcaacatgtttgatttnnnnnnnnnnnnnnntgttttatcttaaacttagcagagaggattttctctcgtggaaaaaattcggggcatttgttttgctcatctttggaattttggttgggaattttagtttagcactcatcacttttgataggattaacaaataaatattttcctacttcttaaaagaataatatacctctatatgtaagaatgaattattctggaagacaccctggatgaaaaataacattttaataaaaaatattaacagaaaagcagaacannntggcagtgggtatggggaagtaagagt

SEQ ID NO: 15764 - DNA, 758 bp, Macaca Fascicularis
  misc_feature (1)...(758): n = A,T,C or G
aagcatgatcaaagcttgtttnanntcaccactgtgtaggaaaatgactgactatgcccatccctggggtaattctggcatgtatacctgtaactagtaattaacatcttttttgtttaggnnnnnnnnnnnnnnnnnntaggtatcatagcttnnnnnnnnnnnnnnnnnnnnnnnnnnnnnnnnnnnnnagccttcctcctgnnnnnnnnnnnnnnnnnnctgaagttgagatggcctgccctactgccaaagaggtgacaggaaggctgggaactgctttgttaaattgtgttcagttctgttacacagtgcaatgccctttgttggggnnnnnnnnnnnnnnnnnnnnnnnnttgttggaatgctttcctcggcgtttgtccctggctcccatctccccattcctgtgcctactttgcctgagttcttctacccctgcagttgccagctgcattgggagtctgtttgttccaatgggttgggctgtctttgtcgtggnnnnnnngaactttgcacatgtcactactggggagttgttcctgctctagcatccacgatgagatgccctctttacctaccctctcaatcactactcttnnnnnnnnnnnnnnntttattcttcnnnnnnnnnnnnnnnnnnnnnnnnnnnnnnnnnnnnnnnnnnnnnntctcaaaagcttaccagtgtggacttggtctgtgtcagccacactagattnnncatacagtacgtgtcctgtttttaaaatataaaa

SEQ ID NO: 15765 - DNA, 715 bp, Macaca Fascicularis
  misc_feature (1)...(715): n = A,T,C or G
caaaaagcatgcccagagacctggagggacaggagtgaccacctccattgactctttctctctttcgcttnnnnnnnnnnnnnnnnnagaacagcctggaggagacnnnnnnnnnnnnnnnnnnnnnnntgtcccagatccagggactgatcagcagcgtggaggagcagctggcccagctacgttgtgagatggagcagcagagccaggagtaccagatcctgctggacgtgaagacgcggctggannnnnnnnnnnnnnnntaccgccgcctgctggagggcgaggacgcccacctttcctcccagcacgcatctggccaatcctattcttcccgcgagggtaaggcttctgaggctcccccgcactgcagcccctctgcctgtttccacggagtgggggccgggcccttctcctcagagctcccagccctcccttctccctgccctggagtctgctcagctctcagactccttctcacctcttcttctctctcccacagtcttcacctcctcctcgtcttcttcgagccgtcagacccggcccatcctcaaggagcagggctcatccagcttcagccagggccagagctcctccaactgagctgcctccaccacagcctcctgcccaccagctggcctcacctcctgaaggcccgggtcaggaccctgctctcatggcgccgttcccagctgtctcccctgctcctccgctg

SEQ ID NO: 15766 - DNA, 396 bp, Macaca Fascicularis
caaataaaataaatgaataaatagaatgctaatcatttcaaggattcactgtgactagttgtaatgctggggatcccctttgtaacactggaactgaaagacaaaaaaaaaacgctatgtcaagcattcattattctgaagaggaaatagaaatgccacatacctttcccatgggacctgtggtggaatgaatccatggttctgcctcactttgagcagacttttgttctcagtactccttacgatggatattcatgcttcattttcacatctctctgcacaattagattgggagctccttgagggcagagtgtgccttgatctttatctttgtaatgccacaatgaacacagtgcctcctggtacactgtaggtgcttacgaaatactcacttga

SEQ ID NO: 15767 - DNA, 684 bp, Macaca Fascicularis
  misc_feature (1)...(684): n = A,T,C or G
ggaaacccgaggcagaagtgcgcanncctgcgcacagcggaagcgccannnnnnnnnnnnnnnnnnnnnnnnnnnnccnnnnnnnnagctgggtgacatttccggaaggcgtgcctcgtaatgcgtccattccagactgacttaccactgcaattctaaaatcagaaacttcccnnnnnnnnnnnnnnnnnnnnnnnnnnnnnnnnnnnaaaatgaagtttggtatcaaaaatgtcatgnnnnnnnnnnnnnagcagaaaacttcaaatctgactgtttcccattgcctgctgaagtatgtctcctgtttcttttcaaagaggaagaagagttgacaacagatgaagcagatgaaactaggagcaatgaaacccagaatcctcataaactatcacctagcaagctgtcaacaggtgcatcnnnnnnnnctgtctgggataannnnnnnnnnnnnnnnnattttttagaagctacnnnnnnnnnnnnnnnnnnnnnnnnnnnnnnnnnnnnnnnnnnnnnnnnnnnnnnnnnnnnnnnnnnnnnnnnnnnnnnnnnnnnnatagaagtattacaagagtagttaattcactatggacacttttgtcaccaggctataatttgcctgatgnnnnnnnnntttgataaatatatcatnnnnnnnnnnnnnnnttatcactttgcttt

SEQ ID NO: 15768 - DNA, 683 bp, Macaca Fascicularis
  misc_feature (1)...(683): n = A,T,C or G
agcaagggctgcnnnnnnnnnnnnnnnngggcctcaagaattttttgcaccagtnnntggagacagtgtcccagaacaatgagaaccctgctgtcgatctattgccccctaagtctggtcctctaactgtcccatcttgggaggaagcccctcaagnnnnnnnnnnnnnnnnccctgtccannnnnnnnnnnnnnnnnnnnnnnnnnnnnnnnnnnnnnnnnnnnnnnnnnnnnnnncctcctcccattcacaaggcagtggtcccagcagtggttccccagagagaggtggagatgggctcgcattcccaaggcagctgatggaggtgtctcaattgttgcgactctaccaggctcggggctggggggctctgcctgctgaggatctcctgctctacctgaagaggctagaacacagcgggactgatggccaaggggnnnnnnnnnnnnnaaggaacatagaatcnnnnnnnnnnnnnnnnnnnnnnnnannnnnnnnntcccaatctgtccctcgccgccttgctacagcccccaagactgaaaaacctcccgcacggaagaaaagtgggcaccatgccccgagtagtatgaggagccgggggggagtctggagatgagccccctaccctctttcctcttctttgttctcttattgttgttattttaataaatgctcgata

SEQ ID NO: 15769 - DNA, 678 bp, Macaca Fascicularis
  misc_feature (1)...(678): n = A,T,C or G
aggaggcggtctcacnnnntcagaggagctgagtaaagaagggactcccagcagaggccacagcagagnnnaggccagcagagnnnngcttccagtggagcctgagcagggccccgctnnnnnnnnnnnnnnnctgagcctcttgagggcagagactgatcggctgcgggaagtcctggcggagaaggaacgggagtaccaggccctggtgcagcgggctctacagcggctgaatgaggaagtccggacctatgccctggccccagagcccccagccactctttcaacggaccagggcctggtgcaatggctacaggaactgaatgtggnnnnnnnnnnnnnnnnnnnnnnnnngaaccatagcttcaccctccacacccnnnnnnnnnnnnnnnctcgagatgacctcatctatacccgcatcaggggagggatggtatgccgcatctggagggccatcttggcacagcgagcaggatccacgccagtcacccctggnnnnnnnnnnnnnnnnnnnnnnnnnnagaggccagacagatccaaggatggatgaatggagaggacaaaggcagcttctgacacaccagccccaggacctggggtgactggaggaagccaggcgagtgggggccagnnnnnnnnnnnnnnnnnnnnnnnnaccacaggcacccaagcact

SEQ ID NO: 15770 - DNA, 718 bp, Macaca Fascicularis
  misc_feature (1)...(718): n = A,T,C or G
tccttttacccctttccctgcaacctctttgactgtggcctgaatttnnnnnnnnnnnnntttctctgtctgtacctatttaagccaaaggcactagcctgaattttgcttgaagatcactttgtcttggaaatgactagagaggcagaggagaagggtttccagagttactgggtttgggagtggaagggnnnnnnnnnnnnnnnnnnnnnnnnnnnnnnnntctgacaccagctccctgtggaggcctggtttctgggtactgtctcccttggnnnnnnnnnnnnnnnaaccaaatgggccatcaggtacttcattagtcatggcagaaggaggggaaannnnnnnnnnnnnnnnncagaaagtctactcccctgcccccagccatagccctggataggaagggataggaagagactacttggtgccatggggtaggggtgagggtataagtagatcagagtgggaagacctcagccttgggtggcttgtctctgctttttgccaggtgggagggcctgtccacaccctggctccccgtaccacagtgccagccatgcccttccccnnnnnnnnnnnnnnncctttcctcacccagttggtggaggagtcaggagatgggaggccatgggctttggttttgtaatgtaaccactgtgggggtgagggaggatggtgtaccatgtatttcagtgaaatatttaatatatttaaatat

SEQ ID NO: 15771 - DNA, 748 bp, Macaca Fascicularis
  misc_feature (1)...(748): n = A,T,C or G
acccctcagctcaaaactcagantnnnagaattttgactagctagtataactcattatnngcttccactaaatgtctcctctcagtggatgcccgggtctatcgagttcgatcttattcttaagagatagaattggggagtggttcttccatccagtattgggtaaccggggggatggagctccccatcctcatacctttgatttgtgtggcaggactgatggccaaggggnnnnnnnnnnnnnaaggaacatagaatcnnnnnnnnnnnnnnnnnnnnnnnnagaggtgagggaaagtcagccagggaccaggggagaaaagggctctcactgaccagttccttcacctctgcgcactcctggctggcccctccattccacccccccattctgtagcatggcctttcctccctgcagactcatctggccctctccacgtgcctttcctcagtggtgtnnnnnnnnnnnnnnnnnnnnnnnnnnnnnnnnnnnnnnnnntccctcaactctcagattccctcccaatctgtccctcgccgccttgctacagcccccaagactgaaaaacctcccgcacggaagaaaagtgggcaccatgccccgagtagtatgaggagccgggggggagtctggagatgagccccctaccctctttcctcttctttgttctcttattgttgttattttaataaatgctcgatagtctgtatcagagtctctggctcataggaatttgaaaatagaggt

SEQ ID NO: 15772 - DNA, 715 bp, Macaca Fascicularis
  misc_feature (1)...(715): n = A,T,C or G
agaatcaaggaaggcnnnnnngcgggggtgccctgatccatcccnnnnnnnnnnnnnnnnnnnccagctgcttccgaaaccagaaccccgggactgtnnnnnnnnnnnngggcnnnnnnnnnntgaggcggcgggagaggcannnnnnnnnnnnnnnnnnnnnnnnnnnnnnnnnnnnnnnnnnnnnnnnnnnnnnnnnnaacctgaacgacctggtgnnnnnnnnnnnnnnnnnnnnnnnnnnnnnnnccagcnnnnnnnnnnnnnnnnnnnnnnnnnnnnnnnnnnnnnnnnnnnnnnncggcaccagatgccaggtggccggctgggggacccggcgtagtggggggcatctctctcgtnnnnnnnnnnnnnnnnnnnnnnnnnnnnnncccgaggaccagtgtcgtcccaataacgtgtgcaccggtgtgctcgcccgccggnnnnnnnnnnnnnntggagacgggggcacccccctcatctgcgacggcctggggcacggcgtggcctccttctccgtggggccctgtggccgaggccccgacttcttcacccgagtgtcggttttccgagnnnnnnnngatggtgttctcaacgggggaccagtgccagcctaggggggcctgtgacctcccaaagagcccagccctgccctccgcgcctcccgcgctccgaacccacctcccacggccccgcccctgccccgctccgg

SEQ ID NO: 15773 - DNA, 784 bp, Macaca Fascicularis
  misc_feature (1)...(784): n = A,T,C or G
ggagatgctgctgaatgagaaggggnattannaaantgaaactgaagggaaaacatttcagttaacaaaagacatggtcaatgtgaagagattccagaaaacactatatgtggaagaagttgttccgaatgtaattgaaccctnnttcggcctgggtaggatcatgtatacggtatttgaacatacattccatgtacgagaaggagatgaacagagaacattcttcagtttcccggctgtagtcgctccattcaaatgttccgtcctcccactgagccaaaaccaggnnnnnnnnnnnnnnnnnnnnnnnnnnnnnnnnnnnnnnnnnnnnnncggagtgtctcacaaggtagacgattcctctgggnnnnnnnnnnnnnnnnnnnnnnnnnnnnnnnnnnnnnnnnnnnnnnnnnnnnnnnnnnnnnnnnnnnnnnnnnnnnnnnnnnnnnnnnnnnnnnnnnnnnnnnnnnnnnnnnnnnnnnnnnnncagataagagcagaggtctctgagctgcccagcatagtccgagacctannnnnnnnnnnnnnnnnatgggccgatgtggaggccaggtatcctctgtttgaagggcaagagactggtaaaaaagagacaatcgaggaatgaagacaattttgacaacttttgaccacttgcgctgaaaaacaaaacaaaacaaaaaactctttatcatgtccactttacaaaagannnnnnnnnnnnnnntactcccagggactgtatttatcttcagtggctgcctgattcacccccacaata

SEQ ID NO: 15774 - DNA, 740 bp, Macaca Fascicularis
  misc_feature (1)...(740): n = A,T,C or G
acctggaaaggctaaagnnnnnnnnncagcgatgtggtctggacaacacaaagcaagatgaccgacctcctttgacctctttgctctccaaaccagcagttcctaccgttgcctcttccacagacatgctccacagcaaactctctcaactccgggagtctcgggagcagcaccagcattcagacctggattctaaccagactcactcttcaggaactgtgacctcctcctcctccacagctaacatagacgacttgaaaaaaagactggagagaataaagagcagtnnnnnnnnnnnnnnnnnnnnnnnnnnnnnnnnnnnnnnnnttagtttactaaactagaagtcctcatagtttaaagtggcctcagcaggcctagtgnnnnnnnnnnnnnnnnacgtatcatgccgtggnnnnnnnnnnnnnnnnnnnnnnnnnnnnnnacttgtacatactctgcttctcttnnnnnnnnnctcgctgctctagaagactgtccgtggatgagtttagtgtacagacttgtaaacagcctccccctttgctgtctagttcccagatccttttctttttaattgctcatttgtaaaattgtcctaatctttcctagctttctaatagttaatattagaaactctttaatagtcttcctttcagtttgtgagctcttctctgtcgccctgaagggtcactgtattctgtatgaatgcatggcatgatacaactaatttaagagtc

SEQ ID NO: 15775 - DNA, 652 bp, Macaca Fascicularis
  misc_feature (1)...(652): n = A,T,C or G
acagggaatgaagtttttcatatattnnnnnnnnnnnnnnnnnnnnnnnnnnnnnnnnngctgatctgcaaaaaactttaaatttaattaactacataaatgaatatcttttattttgaaatttgagaatgtcctaagaggatgtctacaggacatgaaactactaggtgcaggaaaattttttaaannnnnnnnnnnnnnnnnnnnnggaaaacaaacagtggagaaaattgtggtagagaaagtaaagaaggggcaggagaaagctgtacatataacctgggccttcctttcttctcatgaagccaggggcttcatctatatcctatacnnnnnnnnnnnnnnntacaaaccaaatgctgcaaaataaaagtaataatgacccaaactaatttaagtcttttgtttaaggagtaaatgagagaaacattgtagcttctcaatcgaagagtgctataatttcaaggtatcttaatataattcacttaaccctaaagcaattgtgcaataagcaaattataaaaggaaaacaacaaaggttaactttctactggggccaatagacaagatctgtggagcacagcaattaaccttcacatnnnnnnnnnnnntttacaaaggccatcaaaaactcagattatgaaaatcacaa

SEQ ID NO: 15776 - DNA, 908 bp, Macaca Fascicularis
  misc_feature (1)...(908): n = A,T,C or G
aggagagcagagatgagatttgacaaaaaanatctgaattaaaannnnacactgtctnnnnnaaactaacataggaaagcctttcctattatttctcctcttagcttctccattgtctcaatcagggaaacaggaaaacacggctttctagcagctgcaaaatggtttaatgccccctacatatttccatcaccttgaacaatagctttagcatgggaatctgagatannnnnnnnnaaaacatctgtccctacttnnnnnnnnnnnnncatggcttaaatctatatggtttgtgcattttctcaaccaaaaatggaggatgataatctgaattctccgtatactcactaatcaaagacactattttcataatagatttctgagacaaatactcactgaagggctttaaaaataaatcgtgttttggtctgttcttgtannnnnnnnnnnnnnnnnnnnnnnnnnnnnnnnnnnnnnnnnnnnnttgcgctgtcgctcttatctgcaaggtggcaagcagttcttttcagcagattttgcccactattcccctgggctgaagttctttgcgtagatttgacttaaacttgaattnnnnnnnnnnnnnnncttgctctgtgatgtcagatgtgattgtaaatgnnnnnnnnnnnnnnnngaacgcaaaatgagaatgtaagtttttttaaatgtgtgtattttaaatgtgtttgactaattctgaaattataagatttctatgcaggatttatcttcatcctgtgcatgtttcccagactgtgaggagggaaggcnnnnnnnnnnnnnnnnnnnnnnnnnttctaacaaaatggtgctttgagnnnnnnnnnnnnnnnncctttaggaaggtgcagctttgttgtcctttgagctttctgttatgtgcc

SEQ ID NO: 15777 - DNA, 760 bp, Macaca Fascicularis
  misc_feature (1)...(760): n = A,T,C or G
gtgtaaagatagaattngnnnngacaaaattttaagaaaatgtgggaataccaaatgtcctttataagataaaaaaaaatttttttaagggacatactagttttagggattttcagatgagaagctgggtttttaggattgcccgtcttggagattcttgcaggaagagattgtattagatattatatttatttcatttaagataattttgaaagttaattttctaaataagataattctcatttgtgtttgtcttttaaaaagccaataaaatatctgtcagtatcattgtaataatttttttagagtttaatttgtaaagcttagcaaataaaatcttgtactattaatagcttcttgctttatgactttaggattaacttgtaaaaaacatatcctgaactgagatatgcaaaacactcattttcaagttatggaaatgtgtttgtggcatataggactgtggggtctgtgtgtgtagtgagagtatgtaaccgnnnnnnnnnnnnnnnnnnnnnnnnnnnnnnnnnnnnnnnnnnnnnnnnnnnnnnnnnnnnnnnnnnnnnnnnnnnnnnnnnnnnnnnnnnnnnnnnnnnnnnnnnnnnnnnnnnnnnnttaaaatgatggtattttatcttttaaacttaaaaattatttaatacagctatatggaacgtataaaattgatttcttatttattattagacattactactaaaaggtacatctaactattcagggacatnnnccattccaaaaa

SEQ ID NO: 15778 - DNA, 806 bp, Macaca Fascicularis
  misc_feature (1)...(806): n = A,T,C or G
aaaaaagagaacnnnacagnattccaacaaatgacgaattactgtatgatcctgaaaaagataacagagagattctgattctgaggatgaagagaaggggttnnnnnnnnnnnnnnctacagaggtcatgtcacnncagnntgtccaaatagtgatgctgtcttgaattgtcctgcctgcatgaccaccctttgccttgattgtcaaaggcatgaatcgnnnnnnnntcaatatagagcaangnnngtgatgaattgttctattaacaaagaggaggttctaagatataaagcctcagagaacaggaagaaaaggcgaggnnnnnnnnnnnnnnnnnnnnnnnnnnnnnnnnnnnnnnnnnnnnnnnnnnnnnatgtggaagaaatctatcacccagtcatgtgcactgaatgttccactgaagnnnnnnnnnnnnnnnnnnnnnnnnnntttcattttttcaatgttttagcaagccattcctaaacagcnnnnnnnnnnnnnnnnnnnncaatactgtatataaggcaaatatggacagttactttcctcctgcctgttcataagtgacactgaggaaacagtgtttctctttataaagaagaatagttgtcagccttcattcatctcttacatctctcaccctctccttttcttttttcctttgattttcccccnnnnnnnnnnnnnnnnnnnnnnnnnnnnnnnaacatttggaaatggggggctttttgttaaggctctttagaattaaaatgttatggaattataagcaatctttgtttctgagtattatttttactttg

SEQ ID NO: 15779 - DNA, 713 bp, Macaca Fascicularis
  misc_feature (1)...(713): n = A,T,C or G
caacctggccaccgtgggtgaggcctgaccaccttgggacanctgcaagacgactccaaaccaacaacaaccagnnnnnnnnnnnnnnnnnnnnggtnnagtttccatatttgccatgtgtctgtccagatgtggggttgggcggggatgggnnnnnnnccagtggattgggtcacctggcagacctggggaagatgaggcgaggtggggagttgggagaatccccatacctcccagatttgctgagtctnnnnnnnnnnnnnnnnnnnnnnnnnnnnnnnnnnnnncccagttggatggggaaaggctaatggggtcagaccccaccccctctacccctccagtcagcccagcgcccatcctgcagctcagctgggagcatcattctnnnnnnnnnnacatagggcgtgatcccctggcnnnnnnnnnnnnnnnnnnnnnnnnnnannnnnnnnnnnnnnnnnnnnnnnnnnnnnnnnnntttctcaacactacttttctgatatgagggcagcacctgcctctgaatgggaannnnnnnnncgactcggaatgtgtcctcctcatcnnnnnnnnnnntgtttaatggtgatgcctcgcgtacaggatctnnnnnnnnnnnnnnnnntgaatacccagaggttgggcagatcagtgtctccagtcccacccagttttaaagttcatggtaagatttgaccccatctcccgca

SEQ ID NO: 15780 - DNA, 754 bp, Macaca Fascicularis
  misc_feature (1)...(754): n = A,T,C or G
catnnnnnnnnnnnnnnnnnncttctggaccaccaataattcccccaccacctcccatatgtccagattctcttgatgatgctgatgctttgggaagtatgttaatttcatggtacatgagtgnnnnnnnnnnnngctattatatgggtttcagacaaaatcagaaagaaggaaggtgctcacattccttaaattaagnnnnnnnnnnnnnnnagagcagcactaaatgataccactaaagaaacgatcagacagatctggaatgtgaagcattatagaagataactggcctcatnnnnnnnnnnnnnnnnnnnnnnnnnnnnaaaaaggaagtggagtgggtaactcttccagattaaaagttatgtaataaccaaatgcaatgnnnnnnnnnnnnnnnnnnnnnnnnnnnnnnnnnnntnnnnnnnnnnnnggggtgggggtgggaggccaacacggtggtgaggcagttgagaaaattggaatgtggattagatttnnnnnnnnnntggataannnnnnnnnnnnnnnnnnnnnntgagaagggtgttgtagtttataaaagactgtcttaatnnnnnnnnnnnnnnnnnnnnnnnnnnnnnnnnnnnnnnnnntaaaatgtttaaaatggtttaacaaaatgtgtgatgtgatgcatatgtggcaaaatgttacagaatctaannnnnnnnnnnnnnnattcattgtactgtttttttctatcttctgtatgtttaaaaggatataataa

SEQ ID NO: 15781 - DNA, 835 bp, Macaca Fascicularis
agtatgcatcagatgctggatcagacttactgggagttaaacaacatgtgaaaacctccttagctgcgaccacattctttcattttgttgttgttttgttttgtttttaaacacctgcttaccccttaaatgcatttttatttacttttaccactgtcacagaaacatccacgaaataccagctaggtcagggggtggagaaaacacacacaaaaaggcaagcccatgtcagggcgatcctggtttaaatgtgccatttcccgggttgatgttgccacactttgtagagagtttagcaacacggtatgcttagtcagtgtaggaatcctcaataaagcagaagaagttccattcaaagtgccaatgatagagtcaacaggaagatgaatgttggaaacacaatcaggtgtggattggtgctactttaaacaaaaggtccccctgtggtcctttgttcaacattgtacaatgtagaactctgtccaacactaatttattttgtcttgagttttactacaagatgagactatggatcccgcatgcctgaattcactaaagccaagggtctgtaagccacgctgctcttcgagacttccattcctttctgattggcacacgtgcagctcatgacaatctgtaggataacaatgtggatttccactgttttcagttcttcatgttaaagtgaaagatttagacactacatccaattggtaaaggacattttcttgagagttataactatatgtaaacattgtataatgacatggaataaaatgcacattgtaggacattttttaaaaaaaaaaaaaaaaaaaaaaaaaaaaaaaaaagg

SEQ ID NO: 15782 - DNA, 1373 bp, Macaca Fascicularis
  misc_feature (1)...(1373): n = A,T,C or G
tacctcaatgcagaatgatcaaagatgtcactacttctgaagacttctttgataaannnnnnnnnnnnnnnnnnnttatgtctggaatagacactgataaggtcaacaattacattgaggattgtatcgcccaaaagcactcgttgatcaaggtgttaagattagtttgcctccaatccgtgtgtaatagtgggctcaaacaaaaagttttggattattacaaaagagagattctccagacatatggctatgagcacatattgaccttacacaacctggagaaggccggcctactgaaaccgcagacggggggcagaaacaattacccaactatacggaaaacattacgcctctggnnnnnnnnnnnnnnnnnnnnnnnnnnnnnnnncatatcctacgtgtacagtgggtatgccccgctcagtgtgcggctggcccagctgctttcccgacctggctggcggagcatcgaggaggtcctccgcatcctcccagggccccactttgaggagcgacagccactgcccacaggactgcagaagaaacgtcaaccaggagaaaaccgagtgactctgatatttttcctcgggggcgtaacctttgctgaaattgctgccctgcgatttctctcccagttggaagatggaggtacagaatatgtcattgccaccactaaactaatgaacggaaccagttggatagaggctctgatggaaaaacctttctagggtattcagaggagacttaacgagtgtactgnnnnnnnnnnnnnnnnnnnnnnnnnnnngctgaaaggaagttaaaccccatagaagaaacatggaatgcagaatatattctggggtcagcttcttaaattatgctaccgtttactgctttctccttctcttttgtattccattttttttttgctttgnnnnnnnnnnnnnnnnnnnnnnnnnnnnnnnnnnnnnnnnnnnnnnnnnnnnnnnnnnnnnnnnnnnnnnnnnnnnnnnnnnnnnnnnnnnnnnnnnnnnnnnnnnnnnnnnnnnnnnnnnnnnnnnnnnnnnnnnnnnnnnnnnnnnnnnnnnnnnnnnnnnnnnnnnnnnnnnnnnnnnnnnnnnnnnnnnnnnnnnnnnnnnnnnnnnnnnnnnnnnnnnnnnnnnnnnnnnnnnnnnnnnnnnnnnnnnnnnnnnnnnnnnnnnnncatgcccagcccctaannnnnnnnnnnnnnnagaatagaagagaatcaacctgagtcaaagaagcactggttttgagttttctaagctcagggtcttcattagaggcctctggaaacacattaaggatggtgggggtagatnnnnnnnnnnnnnnnacaaaggaggccggctgttaaaataagaaag

SEQ ID NO: 15783 - DNA, 609 bp, Macaca Fascicularis
accacccctccaattgagatcagctcctctcgtctgaccaagttgacccgccgaaccaccgacaggaagagtgagttcctgaaaactctgaaggatgaccggaatggagacttctcagagaacagagactgtgacaagctggaagatttggaggacaacagcacacctgaaccaaaggaaaatgaggaggacggctgtcatcagaatggtcttgccctccctgtagtggaagaaggggaggttctctcacactctctagaagcagagcacaggttattgaaagcaatgggatggcaagaatatcctgaaaacgatgagaattgccttcccctcacagaggatgagctcaaagagttccacatgaagacagagcagctgagaagaaatggctttggaaagaatggtttcttgcagagccgcagttccagcctgttctccccttggagaagcacttgcagagcagagtttgaggactcagacaccgaaaccagtagcagtgaaacatcagatgacgatgcctggaagtaggcatataaatgctcacagttaaatcttgacccagtaaactctgtgtgtttagggagtatacaaaagaaatcgttcttttcc

SEQ ID NO: 15784 - DNA, 472 bp, Macaca Fascicularis
  misc_feature (1)...(472): n = A,T,C or G
tccatcttcgcggtagcggcannnnnnncnnnnnnnnnnnnnnnnnnnnnnnnntttttgtccgcgcccaggagctacacaccctcgaggtgaccggccaggaaacggtcgcccaaatcaaggctcatgtagcttcactggagggcattgccccggaagatcaagtcgtgctcctggcaggcacccccttggaggatgaggccnnnnnnnnnnnntgcggggtggaggccctgactaccctggaagtagcaggccgcatgcttggaggtaaagtnnnnnnnnnnnnnnnnnnnnnngggaaagtgagaggtcagactcctaaggtggccaaacaggagaagaagaagaagaagaccggtcgnnnnnnnnnnnnnnngcagtnnnnnnnnnnnnnnnnnnncgttgtgcccacctttggcaagaagaagggccccaatgccaattcttaagtcctttgtaatgcgnnnnnntc

SEQ ID NO: 15785 - DNA, 1342 bp, Macaca Fascicularis
  misc_feature (1)...(1342): n = A,T,C or G
gaaataatgaagatgtttcattttcaagaccagcagatcttgaccttnnnnnnnnnnnnnnnnttaaacccctggcactaaaaacaccacctcgtgtacttacgctaagtgaaagaccactagattttcnnnnnnnagaaagacctcctacaacccctcaaaatgaagaaatnnnnnnnnnnnnnnnnnnnnnnngagagcggtctatgagtgaaaatgctgttcgccaaaatggacagctggtcagaaatgattctcttgtgacaccatcgccacaacaggctcgggtctgtcctccccatatgttacctgaagatggagctaatctttcctctgctcgtggcattttgtcgcttatccagtcttctacccgtagggcataccagcagatcttggatgtgctggatgaaaatcgcagacctgtgttgcgtggtgggtctgctgccgccacttctaatcctcatcatgagaacatcaggtatggcatttcaaatatagatacaacaattgaannnnnnnnnnnnnnnnnnnnnnnnnnnnatgcagcttcactaagacgacagataatcaaactaaatagacgtctacaacttctggaagaggagaacaaagaacgtgctaaaagagaaatggtcatgtattcaattactgtagctttctggctgcttaatagctggctgtggtttcgccgctagaggtaacatcagctctcaaaaatattgtctcaacaactggaaatataaaagatttgcaaacttctttgtttctgtctctgcgttgtatgccattttatagtccactccctgaaaatgtatttcttccagaaagtctggaggaaggacctatatttgtagaagtgaaggtatattctgtcactcagctgtattcacgtttgagcagttctgcagtaacacctgcttaaaattctccctttgcatgttttgtaaataggctccagttttgttttttaaaaggaatttattttttgcctcatcagtccacacaagtgattctgaataggagagagtctgtagagaattgatttagataagtgtctgtgaaagaaaaacaatttttttgtcctgtttctcaaacactgttaagcagttttgttaatagacatttttgcatcaacacttcaacattaacactttcaannnnnnnnnnnnnnnnnnnnnnngagaaactcgaaccacctaatatttcataaccttcttcattaggtacttgtacagattaagttgtnnnnnnnnnnnnnnnnnatatgtgnnnnnnnnnnnnnnnnnnncattttagttttgcacttggttttctataaagtacgtttttactcagttcatgt

SEQ ID NO: 15786 - DNA, 842 bp, Macaca Fascicularis
  misc_feature (1)...(842): n = A,T,C or G
aaacaccaagaatacnnnnnnnnnnnnnnnncttggatgactgcagttggtcttnnnnnnnnnnnnnnnnnnnnnnnnnnnnnnnnnnnnnnnnnnnnnnnnnnnnnnnnnnnnnnnnnnnnnnnnnnnnnnnnnnnnnnnnnnnnnnnnnnnnnnnnnnnnnnnnnnnngaaagcagaaaccaagctggcagaagcacagatagaagagctccgtcagaaaacacaggaggaaggggaggaccgggctgagttggagcacgaggcctannngcgtgaggattgagggnnngagtccactgccctgtctccccactcagtggggaaagcacgggcagatgccatcctgcccagggttggcacgagtatctacaccgagaagaggtggcgggtcccgctctggccaatcaggcgagacgcccttgtgagctctgagtgcctcccgtggtctcaggcttgcacctggacatggttctcagcccttgggcactgtaccttgtttaacatttcaccccactctgtacagatgctcttacccacccattttttcacctcacacccnnnnnnnnnnnnnnnnctgggtcagagagaggaatcctttttgtcgtgcccctaagttcagcagaggtttatcccgttttcagtgttatttacattgtcaaaaatgatttagtacttgttccctctgttgggatgcgagttttggcggggggcagggaacccgtccagtttgtacgatttgcttttaagtgtttttaatgtgttctctgatatgccctcactgccccgtgaggacagctcaggccaaggagtgaaaagactacttactaagggaagggatgc

SEQ ID NO: 15787 - DNA, 729 bp, Macaca Fascicularis
  misc_feature (1)...(729): n = A,T,C or G
tgtgcacatttacgatgtggagaagnnntgctgggaggaggggccccagctggacannnnnnnnnnnnncctggcggcctgtgtgctcaccttgcctcgctccctgntcctcgagccgccccgcggtacccctgaccgcagccaggcnnnnnnnnnnnnnnnnnctgaggtgatgagtgtgtctgactgggaggagtttgacaactccagtgaggactaggcttcccgtgcctggtgtcagagggaagggcggctggggctgcagggcagtgaaacccacgcagcctaggccacagcactttactccagggcagggccccctgcccctgttggccacagcttgggggccctgccctctttcttcacaccagccccttggccagcctgccgcaggcatctcagggccgtgcagatcccggcctgtggattacatcacagcaggaaatgcttcnnnnnnnnnnnnnnnttcctcagtgagccctggaggggttggccttctctttcctccctgcctagatcagtccttatccaaagggacctgggagctgacagcctgggcaggggggctgaggtacgtggcagccctctttctgtgaatggggtgggcctgtgggagtagctggggttggaggatgagagctcctgaggggcagaggagcagagatgcatcagctctcctgggactggctctgtgataaaaagacccctcccgctgggtnncagacccca

SEQ ID NO: 15788 - DNA, 723 bp, Macaca Fascicularis
  misc_feature (1)...(723): n = A,T,C or G
ttggccccagtccctccnnagggcctttatgatctgcctcgggagcccaaggatgcatggtggtgccaagcccgggtgaaggaggagggctatgagctcccctacaaccctgccactgatgactatgctgtgccaccccctcggagcacaaagcccctccctgctcccaagcctgaacnnnnnnnnnnnnnnnnnnnnnnnnnnnnnnnctacaactcagccctatacagccaggtccataaaagcggggcctcagggagctgagactgtgagctgtctagagtagggactgacaagactagggtcaagtcagaggcctctacctgagaaggagggcaaggctgaggtggctaaggaggaccatggggaggtggcactagggatctaagaaaatggttagaaccagcagaagccagaaggtgggaggggccgtgctgtatgagaccaggggaccagagggtaggggagtcaaaggaaggacaatcccaggaagtcctaagaagtggggcagatggcaaggctgagggatgggctctgtatcctcctaaagctgtcccttctccacttccccaaaggaagggacagctgcgggaccaggtctgtggaaagtggtgcatggtcagagtgggtgcagtttgaggggcccatgtggaggcctcagggagatgttggactgtgcctggattcttactcctgcattgttcttgccagagacctattaaa

SEQ ID NO: 15789 - DNA, 760 bp, Macaca Fascicularis
  misc_feature (1)...(760): n = A,T,C or G
tggtatgtactttttgtaagttgtaactgaaaattttcagatgctttgaacttgacacatactctagcaattcatngaacaccaaggcaaaaacaccaacctgctaaagagatcctttcatttttcttatttnnnnnnnnnnnnnnnnnnnnnnnttcagttaagcctaaagataggttaatttgtaaatggcaaagtttgttnnnnnnnnnnnnnnnnnnnnnnnnnnnnnnnnnnnnnnnnnnnnnnnnnnnnnnnnnnnnnnnnnnnnnnnnnngtactcttagttctatgtaagaaaccttaggatgagctcccttttctaaggtgtttttgttttttgtatgtttgcttttttcctgttttttgtttttttcatttacggcagtggtaccatgttttggatgtataatgtttatatgggagaacannnnnnnnnnnnnnnnnnnnnnnnnnnnnnnnnnnnnnnnnnnnnnnnnnnnnnnnnnnnnnnnnnnngaacaagagtactgaatgtttcatcattaaaaatttcttgtatttcttgtgcattaatctgaccataatttccctgtatattatgttcatttagctgtttgtaatttttgttaattagatcaagttgtctgcatttgttggtgtaaatgaacatcacagttatcctgagttgagtttaagccaaatacatgcatagaaaagggtcttcctattaatggaagaaggtaatttttaggatgtgtattatttcagttttgtatgt

SEQ ID NO: 15790 - DNA, 705 bp, Macaca Fascicularis
  misc_feature (1)...(705): n = A,T,C or G
aatgggctggcccttcagatttgggggtgtggtgagtggcaagtaagggcagaattttagaagaaccagagtcacctgctgactctattgagattgttacacccagaatccttttgtagtttttttgtgggtttttttttttttttgagacggagtcttgctctgtcacccaggctagagtgcagtggtgtaatcttggctcactgcaacctctgcttcctgggttcaagcaattctcctgtctcagcctccccagtagctgggattacagcaccnnnnnnnnnnnnnnnnnnnnnnnnnnnnnnnnnnnnnnnnnnnnnnnnnnnnnnnnnnnnnnnnnnnnnnnnnnnnnnnnnnnnnnnnnnnnnnnnnnnnnnnnnnnnnnnnnnnnnnnnnnnnnnnnnnnnnnnnnnnncatgccctgccaccagaattcctgttgtatagctgagacttttggttaccacctcatgaagaatatgcttcatgcattgtcctagtcctagttgtattctcacaggtgttatgtgcaggacacgatccaaatcataaacctggcgcatgcccaccacatttctgtttatagggagagggacccaccacacagccacacgtgccagaggtccactcctcccagaggagaggccctgtctctgtagaatgcttaaagctcgagcaacactgtggaacatcccagaattatga

SEQ ID NO: 15791 - DNA, 733 bp, Macaca Fascicularis
  misc_feature (1)...(733): n = A,T,C or G
cnnnnnnnnnnnnnnnnnnnnnnnnnnnnnnccacgtgtcttcnnnccgtattccatatgcctgcnnnnnnnnnnnnnnnnnnntacagtctatgaacattatccccaggttaaaactgtccaagtacaatgaatgaggatagaaaaaaatgattattaaagagaacaagcaatacatccaatacaatggaaagcagaagggatttaggactactactcctcctgtgaagaattcccttgtgtattctgtcactaaaacaaacagaaaaaatggagaggcttttgatatacnnnnnnnnnnnnnnaacaaccttgatcagtgaacctnnnnnnnnnggagagatgctgaccatgtggactgcaaggcagcttgattcacagatggatgtgatctacaggagaaatnnnnnnnnnnnnnnnnnnnnnnnnnnngacattcactcattagaagaccttactccttcaagagnnnnnnnnnnntcaaatttaccatatcttctggctannnnnnnnnnnnnntcttctggaaacttggaagannnnnnnnnnnnnnnngatttggtcagcctggcttttgtggctggctctgataaattttccnnnnnnnnnnnnnnnnnnnnnnnnnnnnnnnnnnnnnnnnttttagtcttggtgaaatataatgacattcttgtcannnnnnnnnnnnnnnnttcccttaggactcaattgctattattttgaacctccatga

SEQ ID NO: 15792 - DNA, 774 bp, Macaca Fascicularis
  misc_feature (1)...(774): n = A,T,C or G
tgggatgacctcatcgcntnnnntatcaaccacaagctgagagactggacgcccccccggcttcctgttacgtcagaggcactgagtgaagatggtcagatatgtgtgtatttttttaaaaacgatttgaaaaaatatgatgttcctttgtcgtgggnnnnnnnnnnnnnnnnnnnnnnnnnnnnnnnnnnnnnnnnnnnnngacgtttgggaataaagccttttcatccttctgcaaacaattttcccataccattgcttcacatgcaccgtaactggaagaggagcacagagtgtggccgagaggggaggattccccnnnnnnnnnnnnnnntgcgannnnnnnnnnnnnnnnnnnnnnnnnnnnnnnnnnnnnnnnnnnnnnnnnnnnnnnnnnnnnnnnnnnnnnnnnnnnnnnnnnnnnnnnnnnnnnnnnnnnnnnnnggagaacaagagactctagtgtctctttctcacgctattgaacctgtgatgaaaagatctgtaactactagcccacagagtgacatgacgaggcagcaactgcagctgtcagaggcaacaggaacgtgtctaaccnnnnnnnnnnnnnnnnnnnnnnnnnnnatccggagatcaagggaagaggaagttgcctctgagctccatctctctnnnnnnnnnnnnnnggtggacatttgagcagctgacctgtggggagggggtctctcccaaagagtttctgtttttactcaaaataatgttattctcagatgcttgatgcactgtggaaat

SEQ ID NO: 15793 - DNA, 738 bp, Macaca Fascicularis
  misc_feature (1)...(738): n = A,T,C or G
ctcccagcatgtcatatnnnnnncttagnnnnccatgtgactgtttccaccatcttgggcatttgtggggacccccagactgaaggcagaaaaccctacaaagtggatgggagtgtggggctggatttttccccacccctaactttgtgtctctgggatctccagggacctggcccctcaccagtgcctctgaggcgcatgcttggggaagagcttaggaatgggatgggcgtgggagtgctgggtagcaacctttaagcaaatctgcatcttatttctgacctttttccacgtgctcagtcctnnnnnnnnnnnnnnnnggcatactaatattctttatactatttaatcttttgcagaaaccttattattgtaacttgcnnnnnnnnnnnnnnnnnnnnttcgtgccgagagcatcggaaatgtttctgtgtcttactgatgttttcatgatcaacttgtaaatgtaagcaattgacttcataaaaggtattttaactattcttggacctttgctacccaagcacctggtttcaccatgcgatcactcacttttctacagcgaagactctttcttaatgtaggatttcgatgtgctcttttgattaaaaatatctaaccttaaaagatgtaaaaatgtatctgtgaaatcttctcactttgttagcattgttgctgttgtcgttttctattatgataattgaagagagaaaagaagaaaacatgaacactgtgtct

SEQ ID NO: 15794 - DNA, 640 bp, Macaca Fascicularis
  misc_feature (1)...(640): n = A,T,C or G
ttttccccacccctgctcttcagcctctgtcagttctgaggctggagggtttgggcaagacaacatccccattccaattccatcttctgatgcaaattttagctgagggatttggaagccatttggggaggcaggctgggccagagggtagagctgggtaataaatgtctattctctgggggaggagggattctaaactttccttccatcctcaatttctacctccatagaccggccagaatttagcttcacttgagagagatctggaatggtcgccatgattgaaaccacgcaccattacatcgcccaataaattatttcttcccccgtcccctttccagcactcaactgaggagcaaagctcatcccacccccacccctcccgggtctgttcactgccaggctcctttcccttgttcagtggagctggcttttctcccagcccctttccatgcctttcgttccannnnnnnnnnnnnnnnngggagcctggggacgggtttgggtccccaagaggagagccnnnnnnnnnnnnnnnnnttctagtaaccccttgccttgtcacataacagcttttgccctctgctttgatggctgaggtgaactcatgttctttgggaaaagggaaggtgtgctgtga

SEQ ID NO: 15795 - DNA, 754 bp, Macaca Fascicularis
  misc_feature (1)...(754): n = A,T,C or G
catgnnnnnnnnnnnnnnnnnnnnnggtacatattaagccggaccagtccaacgngcgatgcatgcacaccgctgtgaagctcaatgaagtcattgtcacgcgctcccacgacgcccgcctggttctcctaaacatgcctggcccacccaagaacagcgagggcgacgagaactacatggagttcctcgaggtactgaccgagggccttgagcgggtgctgttggtgcgtggtggtggccgtgaagtcatcaccatctactcctgagcccagtgtcaccttgtggcctggagtcgaggtcttggccaggatatcacaagctgtggtctggggtaacagcctcttcccagcacccacttgccagccctgcttgcctggccctgtcctggacccagctttgctaggtctccttggaaaccaggcctgggcctcaaaatggagatggatcccaggtcttgtgggactgtgggaggtttggggactttactgtctagcaccccagtaggcctgtcctggcgagagaagactggttggggccgagtggggtttgaaggcagctggcgcagcccagtccaggagcgctatttattgcatatttattatttggatctcaccatcagagacgaagggaagggtagccagggagggagtccagcccagctgcctgcaggaagatctggctcagtcaactatgggcagggccccccaccaagctgagccgaatggagacagccgagctgaggcctgacttttca

SEQ ID NO: 15796 - DNA, 557 bp, Macaca Fascicularis
  misc_feature (1)...(557): n = A,T,C or G
cgacttggctgggggagaaagggagcaagagaggctaatcaccaggaatcctttccctgtacccctcgagaacaattgaaatcaagagccctggggtctggctcctcccatgtcagtcctaagatctgggcatgccaccctgtggaatcccagggaccggtggcccagctgcacatgctgcagatctccacactcccagcgtggctcacgtactagtccctcctccactgcatnnnnnnnnnnnnnnnnnnnnnnnnnnnnnnnnnnnnnnnnnnnnnnnnnnnnnnnnnnnnnnnnnnnnnnnngtggtagtagtaatacctgttcttcgcatgctgccgctctataaattctgcaaagacaaaaccacagactcacacctcattggtttggacaagcttttagctttctagttctcataggccccttggaggggagggaggagaacttcctgagtgttccagcgtttagaaaacaggcaattcggccgggcgcggtggctcacacctgtaatcccagcacttggggagtccgaggcgggcggatcataaggtcaa

SEQ ID NO: 15797 - DNA, 758 bp, Macaca Fascicularis
  misc_feature (1)...(758): n = A,T,C or G
ccaaccagtcagacttcgagacagggagcagaacacgaggcctcccaggatgaggagcccaggttgactggaggcgccgctggccaccaggaccgcagcaattcggggcagtatcctgcaaaaggggggccccagcagccccataatagaggcggtgtggctcccacggctggattggcagcccttctgttggccgtggctgctggtgtcctgctgtgagcttctccacctggaaatttccctctcacatacttctctggccctaggtactccctcttcccatcacttcctgttcccaccactggactgggctggcccaggccctgtttttccaacattccccagtatccccagcttctgctgcgctggtttgcggcttcgggaaataaaatactgttnnnnnnnnnnnnnnnngggtgttctagctttttgaggacagtacctgtattcttctcatccttgtctctccgcttgtcctcttgtgatgttaggacagagtgagagaagtctgctgtcacagggaaggtaagagagaggatgctaagtttcctactcactttcttctggccagcctggactttggagtgtggggtgggtgggacaatggctccccactctaagcactgcctcccctactgcccccatctttggggaatcggttccccatctgtcttccttactagactgtgagctcctcgagggcagggaccgtgccttatgcctgtgtgtgatcagtttctggcacacagatgcctcaa

SEQ ID NO: 15798 - DNA, 725 bp, Macaca Fascicularis
  misc_feature (1)...(725): n = A,T,C or G
tacctatttttatgctgaaatgtttatacaggtttattaatagcaagtgctactaactnnnnnnnnnnnnnnnnnnnnnnnnttgatatattagcnnnnnnnnnnnnnnnnnnnnnnncccaaactccttatcttttgcagtctctctgggatcagtaaaagaaaaaaaaaaaaacatcatgtgcttaagaagtgggactgtaaatatgtatatttaactttgtatagcccatgtacctaccttgtatagaaaaataattttaaaaatttgaatggaagggggtaaagtaaggaagtcatgaagttttttgcatttttatttaaatgaaggaattccaaataactcacctacagatttttagcacaaaaatagccattgtaaagtgttaaaatttatgataattattctattggggagggaaggtaactatgatctcagttatagttttttttcctttttaatttcattattttggttttttggtttttgcagtcctatttatctgcagtcatattaagtcctattgctagaataggttactacaaaaaagattatattctgaaagaaaaataactgacatatataaccaattaatttaaagtattgccatttaaattacacactgagagcatgtcctatgcagacatagatttttctgttcgtttatttttcttcattgcagtggattgatttgataaatagatgtgttgaattactacatttg

SEQ ID NO: 15799 - DNA, 713 bp, Macaca Fascicularis
  misc_feature (1)...(713): n = A,T,C or G
gtcataattggaagtaaatatgatatttttcaggattttgagtctgagaagagaaaagtaatatgcaagacacttcgatttgttgcacattattatggagcatcattaatgtttaccagtaaatcagaagctctattactaaaaatacgtggagttatcaaccagttggcatttggcattgacaaaagcaaatcaatatgtgtggatcagaataaaccactgtttatcacagcaggattggattctttcagtcaaataggatctcctcctgttcctgaaaatgacattggaaagcttcatgcccnnnnnnnnnnnnnnnnnnggaaaaaagtgtatgaaaagctctttccaccaaagagtattaacacactgaaaaatatcaaggaccctgcaagagatcctcagtatgctgaaagtgaagtcgatgagatgagaattcagaaggatcaggaactggaacagtacaaaagaagttcttccaagtcttggaaacaaatcgagcttgattcttgaacctaattcaattgttgtatatttatttcttcttttctaaatacaaataagattatattatgaattaactattgtggcaatatgtgaagaaagttaaactgtataatttgtgacaacgaacaagctcgatttcttgcgacctagtgctctccctctatattttgaagcttcttaaaaggacaaaaatatgtagaaccatg

SEQ ID NO: 15800 - DNA, 580 bp, Macaca Fascicularis
  misc_feature (1)...(580): n = A,T,C or G
gccgccccagaaaccccggctccccacggctgctcatagcccataccctggaggctgagaagccagaaatggcttnnnnnnnnnnnnnnnccctctcaccaggatggccgggagcccacccccaatttgtttggtgtttcgtgtccatactcttgcagttctgtccttggacttgatgcctctgaactctgcggtgggaccggccccaccagagcctggtgcactggggggagggagggaggagggagcctgtgcttacggagcacctggcccggcgtgcccctcctgggctgtgtgaccccagcctccccacccacctcctgctttgtgtactcctcccctccccctcagcacaatcggagttaatatgagaagtgcgggagcttctctggtcagggttctctgaacagttgtggagagagtgcttcctgcgaggtgtggcatttgaaggggctggagggcaggtctttaagatggcgagactgcccttctcagctgataaacacaagaacgacgatcctgtcttcagtaaggctccacgagaagagaggaagtatatctacacctcacccctcccagc

SEQ ID NO: 15801 - DNA, 649 bp, Macaca Fascicularis
  misc_feature (1)...(649): n = A,T,C or G
cannnnnnnnnnnnnnnaccagccacatgcaccagctctatttgggggaagtgtagtgaggaggagcccagaggtccccaggggagtgaggagggagaacttggaagggtgcagcccacttccagactctccactctcccacccttctacgccgtgaagggaaatgagggctttagtttccctgggcgggaggggcagcttctgaggttgccaaaggcccccactggatcgaacctgtcagctgctcctctccgcagccagaaatgctgccggctgcacccagagggagcagtgaggcaggacagannnnnnnnnnnnnnntgcgctacagttccttgctccctggagactgggaaaaggccacagggcagggggactgggcagtggtggctggtggtttaaaggtcgaactttctctgaagctcctttccccttgctcttggtccctgccccccaagcaagcctgccccctctgcctcccannnnnnnnnnnnnnnccctcccttggggcgactcctgatgaagcacaactccccgcagggcccccagcccacaggggtggccatatttgggcagttcccagtcctgtgggcnnnnnnnnnnngggagcagattttgggtctggatctccctggggagtgggtcctgg

SEQ ID NO: 15802 - DNA, 790 bp, Macaca Fascicularis
  misc_feature (1)...(790): n = A,T,C or G
gatttgaagttactnnnnnnnnnnnnnnnnnacgctcnnnnnnnnnnnnnnnnnnnnnnnnnnnnnnnnnnnnnnnnnnnntccacccacaaggagtatggcgtatttgtcctgcannnnnnnnnnnnnnnnnttctttctttcttgaggcaaaaggaatcaggagagtttgaagagaggctgaacttcgatataaacttagagaatcctagtaggaccctaatatcgataactcaagccaaacctgaatctgagtcctcatttttgtgtgccagctctgatgggatgctatggannnnnnnnnnnnnnngcccagaaggagaatggaccacaggtaacatctggcagaaaaaagcaaacattcctgaaacccaaactccaggggcagacccatctacctgcagggaatctgacgccagcatggatagtgagccaacatcacagctaaagacacggcagcgtagaaagattcactcgggctctgtcacagccctccatgtgctacctgagttgctggtgacagcttcaaaggacagagatgttaagctatgggagagacccagtatgcagctgctgggcctgttccgatgcgaagggnnnnnnnnnnnnnnngaaccttggctgggcgctaactccaccctgcagcttgccgtgggagatgtgcagnnnnnnnnnnnnnnnnnnnnnnnnnnnnnnnnnnnnnnnnnnnnnnnntaccccttgtgctagagatgcaaagcctgaagacactggtagcttttaataattataaaattaataattctaacaa

SEQ ID NO: 15803 - DNA, 700 bp, Macaca Fascicularis
  misc_feature (1)...(700): n = A,T,C or G
catgaagcccaggcactcgggacannnnnnnnnnnnnnnnnnnnnnnnnnnnnnnnnnnnnnnnnnnnnnnnnnnnnnaccccattgtggagactctgcggcagaaggctgaggccgacaagaatgataaggcagttaaggacctggnnnnnnnnnnnnnnnnnnnnnnnnnnnnctcttcaggcttttcccttgaggatccccagacccactccnnnnnnnnnnnnnnnntgatcaagctaggtctaggtaagcagctttggtacttgatgtggcaaggagtttgtgcaactaggctcctgtctggatttgacttaatgctatttaatcaagtcttacatagcttaattttactttaggtattgatgaagannnnnnnnnnnnnnnnnnnnnnnnnnnnnnnnnnnnnnnnnnagattccccctcttgagggcgatgaggatgcgtctcnnnnnnnnnnnnnnnattaggttagaagttcatagttggaaaacttgtgcccttgtatagtgtccccgtggctcccactgcagcctcaagtgcccctgtcccacctggctccccctgctgatgtctagtgttgtttttcctctcnnnnnnnnnnnnnnnnnnnnggaaaccaagggtgtcaagccccattccctctctactctgacagcaggattggatgttgtgtgttgtggtttattttattttcttc

SEQ ID NO: 15804 - DNA, 565 bp, Macaca Fascicularis
actggggattctttctttggtccttcctggaatgaacaggttccctccctgccacctgtgaggagagtcggggcctggctgtcttcctggcctccttccttcccttgtggcagaggcctgcatgtgggtgccagaggccagctctccccctccgttttggggggcctgacccgggaaggtgggtgcagacacaggctgaggaccagccctggccctgcccctgccgtctgctttcaccaagctgtttccgacgtagcttcccttttccctccaggccaaagtgtgttgctgactcccacccccttggtcatcacctgccccagcgttgctgtttgcgtggagggtgggggttggggagagctcagtggtagggagtcagcggtccctggggtcatgggaatgggaacacgtgcccaaccgctccatcccctcctcctccttaggatgcataacctcccttgtcttttttttttttttttttaattttctttccagatagagtagctctttgtacataaggaatacttgaaaaattaattgtatgatgtatgagaagacagagtct

SEQ ID NO: 15805 - DNA, 349 bp, Macaca Fascicularis
  misc_feature (1)...(349): n = A,T,C or G
cagaagacctggtgaggcaagtccnnnnnnnnnnnnnnnnnnnnnnnggagaaagccttgaactctatcatcgacgtctaccacaagtactccctgataaaggggaattaccatgctatttacaaggatgacctgaagaaattgctagagaccgagtgtcctctgtatatcaggaaaaagggtgcagatgcctggttcaaagagttggacatcaacaccgatggtgcaattaacttccaggaattcctcatacttgtgataaagatgggcgtggcagcccacaaagaaagccacaaagaagaccacaaagagtagctgagttactgggcccaggggctgggcccctgga

SEQ ID NO: 15806 - DNA, 777 bp, Macaca Fascicularis
  misc_feature (1)...(777): n = A,T,C or G
tcccaacgttcatcagcagctgagatgacctcagaattttgcccaaatcattgaggccgatgaagttctcctgttcgaaagagctacgttcttggttatttcccactaccagtgcaaagagcagcgcgacgtccaccggtttgagaagatcagcaacatcatcaaacannnnnnnnnnnnctgcagtaaattggccgcttccttccagagcatggaagttaggaattccaacttcgctnnnnncatcgacatcttcacttcanncacgtacgtgatggtgatnnnnnnnnnnnnnnnnnnnnnnnntgcggccactctgatcaacattcgcaatgcccggaaacactttgagaagctggagagagtggatggccccaagcacagtctccttatgcgttgaatattgccaaatgctctttctgaaaatgctgaattgcctttttttgtttgcatcctttatttttaatattcataatgtcttgtgcttaaaagtgggctttgaagtgtgtgatgcttactcctttcatctttctccccggctccccagtctttaaacattggacgctatttactcggctacccagtagagctttgaagctggcctttctgagaagttggtatgatgtaacactaaagtaggtggttcgtgtgtgttctcattacctggttataatagatatgcacatcaaagcctttnnnnnnnnnnnctgnnnnnnnnnnnnnntnnnnnngatggaatgttactattttatcagtaaggtattaaaatgcatttat

SEQ ID NO: 15807 - DNA, 757 bp, Macaca Fascicularis
  misc_feature (1)...(757): n = A,T,C or G
ccagcacggccctcgggcggaggagagaagcaagcacaaggcccggaggagaccacgatccagctcctnnnnnnnnncttccagttctagctcctcttcttcctcctcgtcctcctcctcttcctccagtgatggccggaagaagcgggggaagtacaaggacaagaagaggaggaggaagaagaagaagaagaagctgaagaagaagggcaaggagaaggtggaagcacagcaagtggaggctctgccgggcccctcgnnnnnnnnnnnnnnnnnnnnnnnnnnnnnggaagaggatggcccagtnnnnnnnnnnnnnnnnnnnnnnnnnnnnnnnnnnnnnnnnnnnnnnnnnnnnnnnnnnnnngatgcccggcagagcataatccgcaaggtggtggaccccgagacggggcgcaccaggctaattaagggagatggtgaggtcctagaggaaatcgtaaccaaagaacgacacagagagatcaacaagcaagccacccgcggggacggcctggccttccagatgcgagctgggttgcttccctgagggccccggctggccaaggcctgtggacggtgctggcgacccggcctggnnnnnnnnnnnnnnnnnnntgggannnnnnnnnnnnnnnnntggccttttccctgtggattggcctctggcccagcccagcctcttctcaggggcagggggtggaggatggggtcaccagtctgctcggcacccccatctgaaacagcgacactctaa

SEQ ID NO: 15808 - DNA, 706 bp, Macaca Fascicularis
  misc_feature (1)...(706): n = A,T,C or G
gtagggttacacccagcatnnnncagctaatggcccataacaaagtgatggtagaaatggtgtgtctccatgtgattagtttaatggaggcattgcaggaatgcaattcgaccatttttgtcaagctgatacctatgtggttgccaatgattcagtcaaatatcaagnnnnnnnnnnnnnnnnnnnnnnnnnnnnnnnnngctattcagaaccacgtgaaccaccacagcctaaggacgctgccgggctcgggccagagcagtgctggcctggcagccctccgcaagtggctgcagtgcactcagttcaaaatggcccaggtggagatccagtcctcggaagcagcctctcaattttatcctctatgagtggactcctcggcgctcagtgtcaacacactggtttagcaataatgggtttaaaaacaaacaatttgatccaagcaggttggggaacatattggtactgtacattctctttctagtttagtaaaagatgtgcaaaggccagagagggccgaaaatgaagctttcttgctacacatatttctgatgactccttgggctatctgattaagtgtttccttacattattttttaaaaaccaaatcatttttctttaactaacttctattttttttaagaaaaaaaaaaatagactggtgggtactcacagaaaagttgtataagtccccctgttgctattt

SEQ ID NO: 15809 - DNA, 748 bp, Macaca Fascicularis
  misc_feature (1)...(748): n = A,T,C or G
ccaggagaatgagctgatgntctggagaccagcgctctcacaggtgagaacgtggaagaggcgttnnncaagtgtgcccgcaccatnntcaacaagattgactcaggtgagctagaccccgagaggatgggatcnnnnnnnnnnnnnnnnnnnnnnnnnnnnnnnnnnnnnnnnnnnnnnnnnnnnnnnnnnnnnnnnnnnnnnnnnnnnnnnnnctgctgagccttgtggagccaggtgggacactgggggctcagagaggcagggtggtctcctgggaatgggggaggtggtgtggagatagacactgaacatgtcatggcaagagaaacagagtgagagagaaagatgcaaaagcacacaagctaaaacaggcannnnnnnnnnnnnnnnngccggtaatctcagtgctttggnnnnnnnnnnnnnnnnnnnnnnnntcattgggtgggggtggagggacagacccacttccagacagtgacagctcagaaacgtcagggccaggctgggcacagtggctcacacctgtaatccctgcactctggaaggctgaggcgggtagatcacctgaggtccggagttcgagaccagtctggccaacatggtgaaacccccgtctctactaaaaatacaaaaattagccgggtgnnnnnnnnnnnnnnnnnnnnnnnnnnnnnnnnnnnnnnnnnnnnnnnnnnntcgctnnnnnnnggaggtggaggttgcagtgagcgaggtcacgcca

SEQ ID NO: 15810 - DNA, 788 bp, Macaca Fascicularis
  misc_feature (1)...(788): n = A,T,C or G
gagctgcgcatgtgaggccctggcaaggggatagggctagggggtgcggcatgggcnnnnnnnnnnnnngcacaattagaaaggtccccaaaagctttttccttggagggtacactttcttcactgtccctattcctagacctggggcttgagctgaggatgggaccacgtgcccagggatggacccaccagagcacaagggaaggtgactgcctgggggtgtcccggggactcctgtcagtgccttcagcccaccagcaggagcctggagtttggggagtggggatgannnnnncaagcacaattgttctctgagtggaaccaaagaagcaaggagctaggacccccagtcctgcgccccaggagcacaagcagggtccccgcagccaaggcagtgggatgggctgctgaggaacggggcaggcaaggtcactgctcagtcatgtccacgggcaacgagccgtgggttctgctgagtaggtggagctcgttgctttctccaagcttggaactgttttgaaagataacacgagggaaagggagagccacctggtacttgtccaccctgcctcctctgttctgaaattccatccccctcagcttaggggaatgcacctttttcccttttccttctcacnnnnnnnnnnnnnnnnnnnncattcgatatgctaaccgttctcagccctgagccttggagaggagggctgtaatacctccagtcagtctctggggatgaaactcttaaatgctttgtatattttctcaattagatctcttttcagaagtgt

SEQ ID NO: 15811 - DNA, 329 bp, Macaca Fascicularis
  misc_feature (1)...(329): n = A,T,C or G
aaagtttttttttatnnatggaaagtttgtgaactcctgtaaaacatgctgtatttgaaatacatctgttaaaacttaaaaactaaagtgtgatttttttgttgttattgttagatttattgaactttagtcccttaatcagtgaaggacaacccttatttattacctaccgcagttgtataatttgnnngttagaaattctggtattgggacagtggataagcaggttatcatataacatacaattcttgaaagatacatgtgnnnnanaagnaatctcaaataaaagctaatttctttgaaaaaaaaaaaaaaaaataaaaaaaagg

SEQ ID NO: 15812 - DNA, 703 bp, Macaca Fascicularis
  misc_feature (1)...(703): n = A,T,C or G
agggcatagnnnnnnnnnnnnnnnctcnctaatactacactctgtaaggacctggggcagaannnnnntcccccagggatcntctgtttacgtggcttctgagagggtgaacaggattgttacttttaagtctannnctgctgtgacccatcatgtgggtcttttgtttctcccttctgtggtttatgagcctgcccttacctttttcctgtctctgacttcatatttccaggtctgtatttctctgtagtccagggtatggggtagagctgactgctgttcaccctttgaacaagtcatggatgtgaggatgggtgctgaggagaaccaagagaggaaactttggcgctgttaaaatggaatttctcatgtgccagcattattaagggtgggctaggttggatggaaggtgaaaggggtgaactgccttttgctggaagctgtcttaggctgtgagataggagcaggggaaccacagcctatggggaactgcccttgactatgttggagccttagcccaaggccattccttctgtgatgataaagcccatttctgtattctcttccagcactgctcctcaggggttgggggcccttctacctggcagccaccacatgtcccagggctaccttctctggctggatttgcatttgtggcactgtgtttggatttgcatttgtggcactgtgtttgatgcagtga

SEQ ID NO: 15813 - DNA, 703 bp, Macaca Fascicularis
  misc_feature (1)...(703): n = A,T,C or G
caaacagcagtgnctgngtcccgctccacggagtcttccagaacgcctcnnnctgaattaatcccggagcaccccaacccccagcgagtcccaccttgtcctcttcaaagtcagaactcttctctggagacaaatattcgggactttcgaagccccgaacttgagacaccgagtttgtctccatggagacacgtggccgctgcagtcggacagctgcgtgctggagtttctgcccccaaaccaactgcagagaagaaagacgagcctcggcccaggacgcgctttctaacgaaatgcaatagttttctctttttggaaaaatgtttataccaatagttttgtgctctaattgttattagaatgtttcttatgaatgtgtacattgcagtatgttcagtcccaaatgttttgttctcattcacacagaaggtactaatagctcacgtggcctttaaaaaccttccttccctgcttgcaggagctcagagcaacgctcggcctgcgcccgagtggaggggcaggaggagaaagacgcgtgctcactttagaaacgaaaagtcaggaataatcactgtttgtctggtcgtatagcccaaaccttagttgaaatccgacggaaagaatgtctttatacctctcctctccttggagacaccgaagctcacagttaacagattgtaacgcccggctnttgctcactcct

SEQ ID NO: 15814 - DNA, 645 bp, Macaca Fascicularis
  misc_feature (1)...(645): n = A,T,C or G
agtggaactgggaacncgcggcgtacacgttgtcctggtacacctcgtccgccagcagaaagagccgctctttgaaggcgaagcggatcacagcctcgatgcactcgcgggtctgcacctgcccggtggggttgccagggttgatgacacacagcgcacgagggtggcagtggccacgcgcctgacacagtgcacggtgaagctcggacacgtccaacgcccaggcgcgttcctcgtccaggtagtaatccacctgcactgcgcccagctctgccagtgtggccgagtagagtgggtactgggggataggaatgagcacacctgtgcgtgtgtggccctcgccggccaccagcagcttcagcaccgtcacgatggcgtcgctggcccctgtggacaggaagacattgttggggtccgcagggatacctccgtcgcgcctctcgatgtactgcgccacgtcctcccggatcagctggatgccggagctgacgctgtaggcccccaggctgtggcccccacacgcctgcaggatgcgctccgccctcttcttggcatcgtcagggaagctggggctggtcagaagatcggggttgacacagagagccaggacctggcgcaggaaggtgatgggcctctgccccatag

SEQ ID NO: 15815 - DNA, 740 bp, Macaca Fascicularis
  misc_feature (1)...(740): n = A,T,C or G
gggacagcaaatgcaaagnggggnactcnagnnnnntcacnnnnntggggaaatagtcacgacttctcaaggtatgcttagaccatatgtgcattcgggggactcttgtctttgccagcactcctcaggtgaacccgggatggctatctgaaatgtatggaaaatacagtcccctccccaaacatctgtcatggccactaaatctttagacttgccttatagatctttccatatcatccccaagtgccccttctgcctcagtcctgttcctctgggcaatagctctagggaaaagtaggtattaaactgctgtacaaaattcaaannnnnnnnnnnnnnnnnnnnnnnngattcttagccagtctgtgaaactgggcctccctctgtggtgggctgtttggcttaggagatgctgtagtagtagagataatcaggttctattttaagcaatgagcagagatcagtattgtacagatacaagcaaaggtttaataaataaatataaatatatatatacacatatagatgtgtgtgtgtgtgtgtgtatatatatatatatttctgtagttgtgccagggacagactggccaaagaccaaacactccagggtccccaagaaatttgtccttatatcattgtatctgagggccagatatgattatgaagctttttccaaagatccagggatgggaatgggagtgggtaggaggggtaatacggtcattggagtcaggggccgg

SEQ ID NO: 15816 - DNA, 749 bp, Macaca Fascicularis
  misc_feature (1)...(749): n = A,T,C or G
ctggacgcacgtttgatgcccagatagtgattatagagcacaaatccatcatctgcccaggctataatgcggtgctgcatattcatacctgtattgaggaagtcgaaataacagccttaatctccttggtagacaaaaaatcaggagaaaaaagtaagacccgaccccgttttgtgaaacaagatcaagtnnnnnnnnctcgcttaaggacagnnnnnnnnnnnnnnntcgagacgtttaaagacttccctcagatgggtcgttttaccttaagagatgagggtaagaccattgcaattggaaaagttctgaaactggttccagagaaagactaagcattttcttgatgaccctgcacaatactgtgaggaaaattgactgcaaaagcctacttcacaccgccttctcttattttctgcccataaacctctccccatattttgcaaagaggaaattcacagcaaaaattcacattatgtcagctttctcatattgagagctctgctatgtcactgatgaatttaccctcaagtttccttccccttttcaaactctgcttccttggacagaatcagtaatagctttgtaagtgatgtggacataattgcctacaataatgaaaacctacaggaatttttttatttttcattttccccttaggcatatttagtattttttccccaggcannnnncattctgtgtgcgagtgtgtgtgcacatgttacaaaggcaactaccnnnnaataaaa

SEQ ID NO: 15817 - DNA, 772 bp, Macaca Fascicularis
  misc_feature (1)...(772): n = A,T,C or G
ttgcccgaggccatggccacttcccggcaggttgccagcatcgctgcagcccagaccaaggcagaataatctccagatgagctggtggcaccgctgagcctttgctcttaccagggcttcctgttgctggcaggcggggtggagcagggctgctgggaggctgctggataggagagggggtcacggctgcagaagaggaggttcttcgggacactcgcggatggacacagcaaggaaacaccaggtcaaccacagttggggataaaatagcacaaccacaccctgccgtccggcgtctcccagcctgcgccccttcctagtaccaccagcaactgtcaatcccgtctcctcctgcctcctctcctgcaatccaccccgccacgaccgtcaccatggcagccctgatcgcagagaacttccgcttcctgtcactcttcttcaagagcaaagatgtgatgatttttaacgggctagtggcactgggcacggtgggcagccaggagctgttttctgtggtggccttccactgcccctgctcgccggcccggaactacctgtacgggctggcggccattggcgtgcccgccctggtgctctttatcattggtgttatcctcaacaaccacacctggaaccttgtggccgaatgccagcaccggaggaccaagaactgctctgctgcccccaccttcctcctcctaagctccatcctnnnccgtgcggctgtggcccctgtcacctggtctgtcatctccctgctgcgtggtgaggc

SEQ ID NO: 15818 - DNA, 166 bp, Macaca Fascicularis
gttatattcaggggttgccggtttgtgttttttttttttttttttttttttcatcacaatccattttattccactgcatgtttaagggaatgttattttcaggacgatgtttgggattaaaataattaaaaaaaacctggaaattcacacatttatgtatctcttc

SEQ ID NO: 15819 - DNA, 693 bp, Macaca Fascicularis
  misc_feature (1)...(693): n = A,T,C or G
gaccannnnnnnnnnnnnnnnnnnnnnnnnnnnncctctacaggagaaggtggtttttgggatgttctttttgggtgcagtgctctgnnncagcttctcctggctctttcacaccgtctattgtcattcagagaaagtctctcggactttttccaaactggactattcagggattgctcttctaattatggggagctttgtccnnnnnnnnnnnnnnnnnnnnnnnnnctccccacagccacggctcatctacctctccatcgtctgtgtcctgggcatttctgccatcattgtggcgcagtgggaccggtttgccactcctaagcaccggcagacaagagcaggcgtgttcctgggacttggcttaagnnnnnnnnnnnnnnnnnnnnnnnnnnnnnnnnctgagggctttgtcaaggccaccacagtgggccagatgggctggttcttcctcatggctgtgatgtacatcactnnnnnnnnnnnnnnnnnnnnnnnnnnnnnnnnnnnnnnnnnnnnnnnnnnnnnnnnnnnnnnnntccagtctcatcagattttccatgtcctggtggtggcagcagcctttgtccacttctatggggtctcnnnnnnnnnnnnnnnnnnnnnnnnnnnnnaaggcggctgtactgatgacacccttctctgagccttcccacctgcggggggaggagg

SEQ ID NO: 15820 - DNA, 790 bp, Macaca Fascicularis
  misc_feature (1)...(790): n = A,T,C or G
gcctggacatgagatgcnncctacaggnnnnngctgaagggcgaggagcagaggctgtgtgagggcgttggctcggtgaatgtctgcgtcagcagctcccgcggtggcgtcgtctgtggcgatctctgtgcctccactactgctcccgttgtctccannnnnnnnnnnnnnnnnnnnagcaacagcaacgtggtggtgggcaccactaacgcttgcgccccctccatcgggattggcgcctgcggtggcannnnnnnnnnnnnnnaggaagctgcggcctctgccagcgcctgtagccatcattctccacccagccagtcctcgggccaccggaacgcgccgccctggccggcctcccaagagccgccgtcagctgcgtgcactctaagtgccctccccaccgctccgctctgggagccatccctggtcgcaggagtccggggaggcccggccagcgccgtggtctctctctctctagcctttcctggtagtcaatttgttgtcccgaggattcatccttttcttccgcctaccttctgtttttttgctgtatgcattggtcttgcctgacctcttccccaaagcttggaggaacgggggaggcccgggagtgtccctgtctgcacgacctgggacnnnnnnnnnnnnnnnnnnnnnnnnnnnnnnnnnnnnnnnnnnnnnnnnnnnnnnnngtgactctgcgagggacaggcccacgtgtggcccgcaagagcttctgaaaaagtaatgactctgctgccttctcctttgtctttgtttcactctccgt

SEQ ID NO: 15821 - DNA, 745 bp, Macaca Fascicularis
  misc_feature (1)...(745): n = A,T,C or G
gatgctcacagaccacatgccagacannnngatgcggnnnntggacagcctggtnnccgacagggcggcctgcgtctcctgtccggcacagggggtctccggggtggacgtggcctgaccagggctacgggaaactgtcccaggaatgatggactcacgcttttgtccttaaactgacctaccatccgaggaattcccannnnnnnnnnnnnnnggacgtccgtcaannnnnnnnnnnnnnnnnnnnnnnnnnnnnnnnnnnnnnnnnnnnnnnnnnnnnnnnnnnnnnnnnnnccattgtagcagaagcagcgagcacgctcaggtgatgggactcctgagacccagcgactgcggagacagcctcgggaggccacggatggatcccttggctgnnnnnnnnnnnnnnnnnnnnnnnnnnnnnnnnnngcccgcccagaagaccgtgaacagatccgtaggctcccaccctcaagccagcccttttcatccaactcggtttacaggcgtggtttgtttnnnnnnnnnnnnnnnnnnnnnnnnnnnnnngaactgttgtgagggtgcggcctgggnnnnnnnnnnnnnnnnnncctacgctctggctggggnnnnnnnnnnnnnnnnnttggggaagtgagtggagcccctggccacgccgttgtttcattgtgtccgcannnnnnnnnnnnnnntgaattcttgctactcttctggctctggggtcggccaagtggattcagga

SEQ ID NO: 15822 - DNA, 725 bp, Macaca Fascicularis
  misc_feature (1)...(725): n = A,T,C or G
caggcgctcgggtctgcctcgctggatcctgnnnngctgcctcttcctctccgtgctggttatgctgtggctgagctgctccaccctggtgaccgcgcctggccagcacctcaagttccagcctctgaccctggagcagcacaagggcttcatgattgagcctgattggcccctgtaccctccgccgtcgcacgcttatgaggacagcccgccaccctacaagctgaagctggacctgaccaagctgtaggcctccgctggccccatcattgccaactgcaggggccccttgggcctcacttgccctgagcccaggagtccaagggtagggtgggtccagccttgagcccctccacccccaaatctttcctctcttcccagtcccaccccttgccccacagagtcctggggacgcagtgtcccagctgggaggagggcgggattgggcgctggttcttccttgtccccgctttctccggggcttgctactttttgtcttctattgtgtggctttctcagtatttgaaccccagtcctgtgtcgccatcctttttccttctctgtcccctctctgggggggctgaggccaagggggagctgcatcttgctaaggtttctcccttctccccatcccgatctccagagacccagcttccgagagatggggtgtgggcatctccataccctgacagtgtgtgtctggggcttgtctggggctggggagg

SEQ ID NO: 15823 - DNA, 766 bp, Macaca Fascicularis
  misc_feature (1)...(766): n = A,T,C or G
agtagataatgatggagtnnttgagaagttggatgaatatatatatagacacttctttggtcacacttttcccctccatatggannnaggtcggtttacataaaaccatgtcattacagtagtttgaaacatttgtagattggatagcatttttatgatttgatgagtttcttggaaggttactgtttctaagagttgtgctttattgccactgagagaattcagaataaattgaaaggtggagtctaaaaattattagctgttacaaatggaacatttcattataatgtaatcannnnnnnnnnnnnnnatggtttaatttttatcctaaaaatcagttaagaatatataaaatcctattttggccaactttgtttcttttcagtatagtttataatgaaaagatcaccttaagtgaaattattttcctttaatcttttatgtatttattcactttcggaagctaggagtgagcaacacaaattttactctgaagtcagaagagctcatatataataatttgaatgccccacctattttcacttgtccattcnnnnnnnnnnnnnnnnnatgatacttaatacttaatcacataattatctttgataaaggtagaggcacaatcaaagaggcaactgagcaagtcaaattctaatgtgtgtacctcataataattttttatccattttcatctttatattctgtaacatgaaacttacctaatcttaaaatgttagcttcactttttacctatgaaatacttacc

SEQ ID NO: 15824 - DNA, 748 bp, Macaca Fascicularis
  misc_feature (1)...(748): n = A,T,C or G
aatacagtttcnannnnnnggaaaggtaggnnngatgtggagaaaataatgtactagatcattgtcacagaaaaaccaactatgatttgtggttgtgttttcagaattcaacattaaagattaatgtttatttaaatgaacacattcctgtgttcaggatgtgaggccgtttaataataagggcacaaagcctgttagagtttttaacggtgcttatagctgccagctggattccaaacaggaatcacnnnnnnnnnnnnnnnnnnnnnnnnnntttccattcaggcaccgaaatagttaacatttcaaataagtcttcaaaagaaaacataagagattattgagttactgggactggatcctttatttcataagttcagatcatcttaaatgaaaatgccatgattatctgcagttaaatagatgacagctattctacatcagacttgatttttgtcagctaactacataattggtaagctataattgaaaccttannnnnnnnnnnnnnntaactctgttttgattcatgtttgtagtcnnnnnnnnnnnnnnnnnnnngttaggcttgatgatggttaaaatcagtttgatagcaccatgggacgtttttctaacaaaaataaatgcataaagagacatagccttttagttttgctaattgtaaaatggaaatgttttacaggaagtaaatgcaaattacttgtaagtgtgctttaaagaaaacatattttccccacaagagaaa

SEQ ID NO: 15825 - DNA, 746 bp, Macaca Fascicularis
  misc_feature (1)...(746): n = A,T,C or G
agtgcnnnnngctggtgcagtgctcgccctggctggtgatgcggatgggcatcctcggccgtgggctgcaggagtaccagctgccctaccagcgggtactgccactgcccatcttcacccctgccaagatgggcgccaccaaggaggagcgcgaggacacccccannnnnnnnnnnnnnnnnnnnnnnnnnnnnnnnnnnnnnnnnnnnnnntgtgtggaccgccaggaggtggnnnnnnnnnnnnnnnnnnnnnnnnnnnnnnnnnnngtcagcaagcccggtgcccttcgtcgctccctgtcccgctccatgtcccaggaagcacagagaggctgagagggactgtgacttgggctccgctgtgcccgccctgggctggccctttcctggctaggactgtggaggggagctgctggccatggctgctttgtagtttgcccagagttgggggttaggggaggagggagccagaggccaggacgcgtgagccccgtgatttcccaaagggagggtggcagagacggtgggcactaagggtggagagttgggggccagcacagctgaggaccctcagccccaggagaagggacaaaagatactggtgagggcaagaggtgcctgggaggagtgccccttatccaggaaaatgtgaggggaatctggaatgctctaggcagaagaagctgggagagagggggaggtgaagagggcagaggcaaggatggtggggcccccagcaccttc

SEQ ID NO: 15826 - DNA, 741 bp, Macaca Fascicularis
  misc_feature (1)...(741): n = A,T,C or G
atagcaacagtccgcnnnnncngtnntnnatgaaccaaagaaggctggnnnnnagagaggtggggggccagggagcaggcaacacaggaggactggagccagtgcaccctgccagcctcccggactcctctctggcagccagtgccccgctgtgctgcaccctctgccacgagcggctggaggacacccattttgtgcagtgcccgtccgtcccttcgcacaagttctgcttcccttgctccagacaaagcatcaaacagcagggagctagtggagaggtctattgtcccagtggggaaaaatgccctcttgtgggctccaatgtcccctgggcctttatgcaaggggaaattgcaaccatccttgctggagatgtgaaagtgaaaaaagagagagactcgtgactttccggtttcagaaaaacccaatgattacccttaattaaaactgcttgaattgtatatatatatctccatatatatatatatccaagacaagggaaatgtagacttcataaacatggctgtataattttgatttttttttgaatacattgtgtttctatatttttttttttgacgacaaaaggtatgtacttataaaggcatttttttcttttgttaacgttattagcatatctttgtgcttttcnannnnnnnnnnnnttaccgttctatgtaggctgtgacttgcgctgcttttttagagcacttggcaaatcagaaatgcttctagctgtat

SEQ ID NO: 15827 - DNA, 743 bp, Macaca Fascicularis
  misc_feature (1)...(743): n = A,T,C or G
aaagccagcagggctgctgcgtgcctnnnnnntgcaagcctgtgagctgcgtgcctgtttgctctggggcttnnnnnnnnnnnnnnnnnnnnnnnnnnnnnnnnnnnnnnnnnngcaccacctnntgctgcagaccctcctcctccgtgtccctcctctgccgccccgtgtgcaggcctgcctgctgcatgcctgtctcctcctgctgnnnnnnnnnnnnnnnnnnnnnnnnnnnnngctgccgcccagcctcctgtgtgtccctcctttgccgccctgtgtgctcccgcccggcatgctgcggccccacctcaacccagaagtccagctgctgagtgatctccttaagatcatccaaagccgagtgctcactgcccctgcacccctgggttctttacccttgagggctctccacatcccgctcctgagccctgcagtgggcgtcagtggccagctggccacnnnnnnnnnnnnnnnncctcctagcagcagttcagctgtttctccaagtcttgactttcccccagttacccagccctgcctccccagcaacaggtgggcagtgacccagcaaagtcagtgggtcctcccagcccatgacccggtgtggggagaaacgagggtagacacgtatccggtgtgggtttctcgtcactgccctggcccagtggcaagctctgctcctcccctgctgtgggcctgggcctctttctctgtcttccctgaccatgggaacaggtcag

SEQ ID NO: 15828 - DNA, 734 bp, Macaca Fascicularis
  misc_feature (1)...(734): n = A,T,C or G
ggagagaagtcactttannnnnnnnnnnnnnnngtacaaaacnnnnnnnnnnnnnnnnnnnnnnnnnnnnnnnaagaaagagactatgatcttgtatttattgtgggaatggaaaacagggtggggtgggtgagtgaaaaggtagaaatccctggnnnnnnnnnnnnnngttacacagtttcaccataggccaattttaggggcctatgaagtatctttctacaaacacagaccaagctccactaccccannnnnnnnnnnnnnnntcaagtccactgtcacaannnnnnnnnnnnnnnnnnnnnnnnnnnnnnnccagctacacagaaggccaaaatgctttcactccttagctttgccagctgcatcctccaaaacttcccagaatacctccctttccagttccaccaaatctgtacttgggagcagcctactggatccagaacatgaagacagannnnnnnnnnnnnnnnggacacagccctgacttctcctctctccacattacccttacaaaaacaggtcctccccatgagagagctacagggcaggggcagacactgtgagtaagctactttcctccctggagtgctctatgtgnnnnnnnnnnnnnntccctgcctctcctggaaggtgtctcctctatggcgtggctagagctgcaaaaaagggacacaccccacttgggtaaaagaaaatagggaaaggccataaacaaagacagacttgtagtt

SEQ ID NO: 15829 - DNA, 525 bp, Macaca Fascicularis
  misc_feature (1)...(525): n = A,T,C or G
gtacattgtccttagcannnnnnnnnnnnnnnnnnnnnnnnnacttggaaataataaaggttgggtgattatatcttgatgatacattacttgttcaatatagccannnnnnnnnnnnnnntttttttgttttatttttttccttattttatcttttttggttgggaacagctcaacactaggaatgtatcttgctctatagaggatttttgtttgtttcaagcttcagcctttaatctatacctctgtagtgcaccatatggtgtgtgactttcacaggactcgnnnnnnnnnnnnnnnnnnnnnnnnnnnngtcacatccacgcgctttcaaaggccggaagaannnnnnntgacctacgccattggaaacatacccacctcagcctcaagaacccgattgtgctgagggcaatgggccccaatatttagtccttgttgaatcatttcnnnaatattttacttcatttgtgnnnanncctatggattccctcagtttttttttcccttaaaatttgtttttgc

SEQ ID NO: 15830 - DNA, 650 bp, Macaca Fascicularis
  misc_feature (1)...(650): n = A,T,C or G
cnnnnnnnnnnnnnnnnnnnnnnnnnnnnnnnnnnnnnnnnnnnnnncgtggtgtccaatacattcactgccctgatcctctcgccgttgcttctgctcttcgctctgtggatccggattggtgccaatgtctccaacttcacnnnnnnnnnnnnnnnnnnnntatttcacctgggacatgctgctatgctggggctnnnnnnnnnnnnnnnnnnnnnnnnnnnnnnnnnnnnnnnnnnnnnnnacccggccgcagcctcctnnnnnnnnnnnnnnnggtcacaggtcacacgaggnnnnnnnnnnnnnnnnnnnnnnnnnnnnnnnnnnnnnnnnnnnnnnnnnnnnnnnnnnnnngtttaattttatgaaggnnnnnnnnnnnnnnnnnnnnnnnnnnnnnnnncgactccgacctcttggccacagaggactcacctgcccacactgagggcaaccccgtcacggcctcaaggcacccccaagccccttccttgcctgtgcatccgggggcagctctttagagggtttgctggggaactggcgccgtcgctgggactccagannnnnnnncgcccctccccagctcgcccctcgaggacggcccactctccacagnnnnnnnnnnnnnngggagcccctgtcccacc

SEQ ID NO: 15831 - DNA, 770 bp, Macaca Fascicularis
  misc_feature (1)...(770): n = A,T,C or G
actctcacttattaagnnnnttgggctgcgtccaaangggactctgcggctggtgctctggactgcagaagaacaaggtggagttggtgccttccagtattatcagttacacaaggtaaatatttccaactacagcctagtgatggagtctgacacgggaaccttcttacccactgggctgcaattcactggcagtgaaaaggccagggccatcatggaggaggttatgagcctgctacagcccctcaatatcactcaggtcctgagccatggagaagggacagacatcaacttttggatccaagctggagtgcctggagccagtctacttgatgacttatacaagtatttcttcttccatcactcccacggagacaccatgactgtcatggatccaaagcagatgaatgttgctgctgctgtttgggctgttgtttcctatgttgttgcagacatggaagaaatgctgcctaggtcctagaaacagcaagaaagaaacattttcatgcttctggccaggaatcctggctctgcaactttggaaaacccctcttcacataacaatttcatctaattcatcttcaaagcgcaactctatttcatgttttctgttattatctttcttgatactttccaaattctctgattctagaaaaaggaatcattctcccctcccttccaccacatagaatcaacatatgatagggatcacagcgagggcatttctttatatcacctcttaaaaacatcgtttccacttaaaactaaac

SEQ ID NO: 15832 - DNA, 751 bp, Macaca Fascicularis
  misc_feature (1)...(751): n = A,T,C or G
cagtgcagaaanttctagcttcagtacttccagccctgtggggnnnnnagtttccagcaggaacaaatgacacagacctttggcttcagggactcagaaatcacgcatctggtgaacgccggagtcctcaccgtccgagatgctgggagctggtggctagctgtgcctggagctgggannnnnnnnnngtactttgttaaagggcgccaggctgtccttggcatggtccggaagtccaagtatcgggagctgctcctatcagagctcctgggccggcgggctcctgctgttnnnnnnnnnggtctcacctaccatgtnnnnnnnnnnnnnnnggcccagctagtggactgcatctctaccacttctggaaccctcctccgcctgccagagacatgaagattctgctcatcattgctcagctccccagnnnnnnnnnnnnnnnnnnnnnnnnnnnnnnnnnnnnnnnnnnnnnnnnnnnnnnnnttgggaaggcttgggagccaggaagagtgttggnnnnnnnnnnnnnnnnnnnnnnnnnnnnnnnnnnnnnnnnttgcctgggctctgacccggtggtggggtttgagcagtgcttctctgcccttccacggaaagtggaaccagaaatggtgccaaggctgtggctgttccctttcnnnnnnnnnnnnnnnnnnnnnnnnnnnnnnnnnaataggaaggtgggatttctggggaggctggtgaaggagggcagggttcttttccctac

SEQ ID NO: 15833 - DNA, 523 bp, Macaca Fascicularis
  misc_feature (1)...(523): n = A,T,C or G
gtcatttgagttagttccnnnnnnnntgcttctggtcgtggaggagttcatattccctnnttggatgacctggatgtggggaagggggacgtggcggtggctgaggacagagaggagaccgtggagctccgggagaggcagacggatggcgagcggaagtagcgggatacgggtcagacacttgctaagggggcaggagcaaggaggnnnnnnnngagacagcccggggcagcagggtggctccaagagagtcctcgccaggccagcacggatctggccctagaatcctttcccactcaggcatcagtgccgggcacaggatctcagcacaagtttgggtggtgggacgagtggcgggatcannnnngccagtggcctgggctcctggcagcacagaccagcgactaannnnnnnnnnnnnnnnnnnnnatcaccacccaaccccatcctcctgtcctcccaggagtgggggtgggaaagnnnnnnnnnnnnnnnnaaggatcccacagcagcacaggttggg

SEQ ID NO: 15834 - DNA, 743 bp, Macaca Fascicularis
  misc_feature (1)...(743): n = A,T,C or G
agtactttaaacatcagnnnnnnatcntggagtaaaaaaagatnngaagctaaattgaaaaannnnnnnnnnnnnnnctaaggatgccagtgcttttaattctcaggaaatgtaaatatgttatgccacattgcaaaannnnnnnnnnnnnnnnnnnnnnnnnnnnnnnnnnnnnnnnnnnnnnnnnnnnnnnnnnnnnnnnnnnnnnnnnnnagggcccaatataatcataggggtctttaaaagttgaagagggaggcaaaagaggaggtcagagtgatcgtatataagaaagacgactannnnnnnnnnnnnnnnnnnnnnnnnnnngaaagaggaagacaccttgagccaaggaatgaagggggcctgtgaaaaaaaaaaaatggaagaggcaaggaaacagattctcccttagagtccccagaaagaatgcagccttgctggcacctttttagctcagtgggatcaatgtcaaacttctgacccacagaaccataatatggtaaatttgtgttcttttaaaccaatgagtcagtgannnnnnnnnnnnnnnnggaatagattaacatagcaaataagtagatgnnnnnnnnnnnnnnnnnnnnnnnnnnnnnnnnnnnnnnnnnnnnnttaagtctgtgtttcttccttttataagagtaattatatttaaaaaatttacctacccttttggaattnctaatattagtgtttatgaagttttaannnngcataaaaaa

SEQ ID NO: 15835 - DNA, 761 bp, Macaca Fascicularis
  misc_feature (1)...(761): n = A,T,C or G
agatgtgccctnnnnagccctgtnnnnnnnnnnctatgagctggtgaagagctggctgaatggacnnnnnnnnaaggaccagacttctgtgggcatgagctttgtggctggtggcatctcagggacnnngnntgcagtgctgaactctaccctttgatgtggtgaagaccnnnnnnnnnnnnnnnnnnnnnnnnnnnnnnnnnnnnnnnnnnnngccccctgcatgtgagctccacctggctgctgctgcggaggatccgcgccgagnnnnnnnccaagggactctttgcaggcttccttcnnnnnnnnnnnnnnnctgcccccnnnnnnnnnnnnnnnnnnnnnnnnnnnnnnnnnnnnnnnnnnnnnnnnnnnnnnnnnnnnnnnnnnnnnnnnnnnngcagctgaaaggggcatggaggcaaggaccccgtctctcccatggatggggagagggcaggaggatacccagccaagtgcctttttctcagcactgagggagggggcttgtttcccttccctgctagcgacaagctccagggcagggctgtccctctgggctgcccagcccttcctcagacgcaacttcttcctgctgctccaatcgtggggatcatcactttcccaccccccaagttcaagaccaaatcttccagctgcccccttcgtgttgccctgtgtttgctgtagctgggcctgtctccggaaaccgagaaaccctcagcctggcatnnnnnnnnnnnncccngtcatccttaagg

SEQ ID NO: 15836 - DNA, 328 bp, Macaca Fascicularis
tgcgtgtggcccctgcggtgtgtcttcttcaggggagagttttaggacggacgcggcagccttctgtcagtgagtcagtttttcctctcgagaacgctgcaggcatctcgtgggctccggggacccaggtctgcatccagccagcacgccaactggctctgggacagacagggaggggcctgtccagaaacatcacactattaaatcacaatgatttttattaaccacgtgtatatatgtatctgtgccacagcttgcagtgacgcaggccactcgtgccagatacatggggcttctgagaggtagtgggtaggatggtcacactccg

SEQ ID NO: 15837 - DNA, 656 bp, Macaca Fascicularis
  misc_feature (1)...(656): n = A,T,C or G
taacannntnancnnnntatagaactgatatatttttttttattttgaaatatctgatattaatatggaatgaagtaaggttctgttaaagaaaatatatatgaagaccccttaaagcactgaatctgaaacaattttcacacttttaagtggttgatatgtacctattttaggtattttgaggtatttaccataaactaaatttagaaagtttttagattcacttgaagtaaacactacaaacactggatacggtggggttttctttagattttacatgagagaaggtgagtacaaagcaatttgcagttgttgtaatgacaagaagaatactgcgcaagtgtgaatccaaacagcatagcttttaaattttaaagcacttggtaaactatcgctgagtttttttctgttgccaatagtaaactgcttttccactaatggagaattcatgcccttcaagcactttaaatatgacaatatttataaatgtatggtttggaggaaaagtttaaattctttcctaattttctttctcttcaagatagattctttcaacaagtaatttgtagtaatgactgtgttgacatcaattttggagtgtagtagctatgttaaagattaactatttggtctcacagaagccaacacagaacttg

SEQ ID NO: 15838 - DNA, 686 bp, Macaca Fascicularis
  misc_feature (1)...(686): n = A,T,C or G
cgcggcctccaggcagctcaaagatcnnntnntagcntcggagactccagacaatcgccttttgcctnnncgtcggagcactcctcggagaacgggagcttgcgcttctccacaccgcccggggagctggacggagggatctcggggcgcagcggcacgggaagtggagggagcacgccccatattagtggtccgggcccgggcaggcccagctcaaaagagggcagacgcagcgacacttgttcttcacacacccccattcggcgtagtacccagagagctcaagatgtgtggcagttttcggatggaagctcgagagcccttaagttctgagaaaatttgaagcccccaggggcggggtggacgcgtgccgcccagtcgacgtnnnnnnnnnnnnnnnncctgctagtttgtgatgttttctgacagtagcctccaagaagccgttgtgcgaagacagagtcctgcagagtccttccagcctggacctgcagtgccattttatttatattttttaataaaaagtaaaaacaaaaaaacagacccacattggaacagtgaatcagtcccatagagagggcccgcggaccatcgctgtcaagagtgatgccctggcccttctgaaaccagccaacctatattacccgtattgtggaaannnnnnnnngtccccaccccttgtttct

SEQ ID NO: 15839 - DNA, 711 bp, Macaca Fascicularis
  misc_feature (1)...(711): n = A,T,C or G
cagcgacacagcatcacccantcggaggtaaagcnnnnngagtgcgacatctgtgggaaggcattcaagcgcgccagccacttggcacggcaccattccattcacctggcgggtggtgggcggccccacggctgcccgctctgccctcgccgcttccgggatgcgggggagctggcccagcacagccgggtgcactctggggaacgcccatttcagtgtccacactgccctcgccgctttatggagcagaacacgctgcagaagcacacgcggtggaagcatccgtnnnnnnnnnnnnnnnnnnnnnnnnnnnnnnnnnnnnnnnnnnnngagcctggactcctgtccagacacctggtgagagcccgaggctggtgttcaggcccccggacacagacacagagcagccgcatctcaaaggcagagccctgcctgaaggaggaatccgtgagtaatcttcaggtcctccgtgttgtggagctgagatgggaatgagctcctacacaaaatggagtcctctagcctaaagatatcagctgttccgtggcannnnnnnnnnnnnnnncgggtggggagtgtcgtatgtaaagtctctggcctcataaaagatggctgtgggtcatcaggaatctnnnnnnnnnnnnnnnggcttctgtgctgttgttggggaagggaccccagtcctgccttccaccccccaaccaggcctga

SEQ ID NO: 15840 - DNA, 708 bp, Macaca Fascicularis
  misc_feature (1)...(708): n = A,T,C or G
agaacgtccnnnnnnntgnnncgccacttcccttgggcccttgtgaaggacggaggctccagggtgagaaggctcacttctgcccagggccctgcgtccggcagcagaggggacaggggcaggcgtgtgactggagtcccgggtgctcaggcctgaccagagggagtgggagggcggagctgaggaggggaaggtgtttctggtcccaccaaggtgggccttgtgtgttcaataagagaacggagctgggacggtgaccggtggaggtgttcagatccccccgttacttcctagcattttctcctcttgccttaaaagttccctgtatgtgaaacaggaagtcctgagtgtgtgtgtgtggctgtgtgcacgcacacaagacgggagtgaccctgtgcttcctgcccaagatactgacccattgaaccccaaagcatctttctctgcagagtccgcggtgccttcctggtgggctgctgacactaatggtgttggggggtcttagaacagcttctctatgtgtggattcgtgtaaatgcgaggagttcacatataaagaagtgactttgattctgggattatattgatttggtacacagtaaatgggagtttaaaaaatccaaagactgtaatgacttgtaaagactaatgatttgtatcatgtaatgaannnnnnnnnnnnnnnntgtgtaccatatatgtctttcc

SEQ ID NO: 15841 - DNA, 915 bp, Macaca Fascicularis
  misc_feature (1)...(915): n = A,T,C or G
ctggagaatatggcatatggatctaattcagtctgctgttnngnntagtgtgatgacnnnagtaagcacatatttggtagcctttgcatacaagannntgaaatttgttctcaagcacaaagtagcgcagaagagggaggatgctgtttccaaagaagtgactcgaaaactttctgaagctgataatagaaagatgtctcggaaggagaaagatgaaagaatcttgtggaagaagaatgaagttgctgattatgaagctacaacattttccatcttctataacaacactctgttcctggtcgtggtcattgttgcttccttcttcatattgaagaacttcaaccctacagtgaactacatcttgtccataagtgcttcatcaggactcatcgccctcctgtctactggctccaaatagaccatgtcagcttcaccccctggctttgtgtctatgggtggcctgtggtatatggaaaagtcgcagggtggtcagggtgggagacacacaagatgttttcatagtctagagcctttaaaaaacccagcagaatgtaactcagtatttgtttattggctgtttttgacagattgttgaaattaaatgaattgaaagggaaactcagagtaccaggacgtttattaaaaggaaaaaaatgtcttgcaatgtgctataatcacaagaggagaaaataacctgtttccttgatctgtcagaggtcacagtaacctgggnnnnnnnnnnnnnnnttattatataacagtagtaggaagttaataactggttctctgtgttccaagtacaatattgcagcttcttttgaaccataaatatccgaatgaatcctcttcccaggggattgaacagaagcttaatgtttaaaagtgtttgaatttgtgatctgaaataacgcaaaa

SEQ ID NO: 15842 - DNA, 1109 bp, Macaca Fascicularis
  misc_feature (1)...(1109): n = A,T,C or G
attatgnnnnnnnnnnnnnaatgtggagagggggctgcatcatcagaagtgtattcctaggaaagataaaggatgcatttgatcgaaacccggaacttcagaacctcctactggacgacttctttaagtcagctgttgaaaactgccaggactcctggcggcgagcagtcagcactggggtccaggctggcattcccatgccctgttttactactgccctctccttctacgatgggtacagacatgagatgcttccagccaacctcatccaggcgcagcgggattacttcggggctcacacctatgaactgttggccaaaccagggcagtttatccacaccaactggacaggccacggtggcagtgtgtcatcctcatcatacaatgcctgatggtgctgctcctgtcaccctccacgattccacagaccaggacattccatgtgcctcatggcactgccacctagccctttgccctattttctgttcagatctttttttaaagtgttgttagagactcctgaggaagacacacagtttatttgtaaagtagctctgtgagagccaccgtgccctctgcccttgcctcttgggactgagcaggagcggctcatgtgcgtgagagtgggaaccatctccttgcggcagtggcttccgcctgccccatgtgctggtgcggttcccatcacgcagtcgggaaggatgtttgtgcactcggatcaactggaacctctatcatgcggctgaattcccttttccctttactcaataaaagctacatcagactgatgctctttctccagattcttagtctcgcctcggccgcatggagccattatccccattggcagaaagatttttctttaaaaacaaagactagaataacaagaaacaccacatttaggatcatgcttcactcggaggtggcaggcagggagggcnnnnnnnnnnnnntaatacactgggcgtgttctctttctccagttgggcagtgggtacgtggatgttcactgtaacgtgctttttctttcgtcttttttttttttttcctgctcctggcaagctgtgcgtgacattcgttatgcctttttgtatgtcaaatacttcata

SEQ ID NO: 15843 - DNA, 745 bp, Macaca Fascicularis
  misc_feature (1)...(745): n = A,T,C or G
tnnncatctctactcatcnnntannnaggtcgctgggagggctgctgggagcctcttctgnnnntgccgggcagcgtcaccaagtccttgaaatcttcccctgccccgcaggtctctggattggcacagtgcagttgaggtctgcattgggcttttcttttcacacaggctgatgtcttgaccgtcacccaggtggtccgtgggccaccgggcagcctggggcagtatatgtgccgtgtcacagcacggcctcccagccttgggaaggaagtcggtgcctgctctgctgtgagccaccaggagcctcctcccatcagtggggtgtagtctttttgccaaaatatcatgttcaattacagtagtttgatgagctgaaggctagaagtgtgaagtgcagatgagtgcgtgttcctccccaaggccccgcacagctccgggacgccactgtcctggcatttgtggccactcactttgtaggaaactcacctccttcctgaggagccgggaggctggaccagtcccgtcatgcagtcaggtgggcggtgtgtcgttccagaaggtcccgtggaaatgtctcgggacttgggtcccggagcacccgtgaagcgcgtgtttttgcttctgaggtgcgtttctcatccttgctttaccacaatgagcaatgaggtcgggttttatatgcaacttattgtatctgaattcctgtagcacacctcataggtatgattttctaaataaagaatca

SEQ ID NO: 15844 - DNA, 746 bp, Macaca Fascicularis
  misc_feature (1)...(746): n = A,T,C or G
acnnnnnnnnnnnnnnnnnnnnnnnnnnnnnnnnnnnnnnnngcagcccccgtnnngnagccaggaccaggctggggagtgcaagtgaattcaaggactcccaggggaagaccttagctctaagctcacccaccaagaaaaccatgagataaaagtgaaaggcagcccatttcccagtagtctgccttgccctggcagactgctccggactcctctaggaaattcctctgtctcatttgtcctcatctccttcttgctttgctttgctgtggatctctcctccttctccttgacctctctgcctcagtctttgttaatgttgaatcaggatttgagagctgcagcccatctttctgcctccatccaaagaggcattttaactcagcctccccttctggatgaagacttggccctttctctgcctgcatgtccctgtgcagaggaaggctgtctctcaaagnnnnnnnnnnnnnnnctgtgctgctctttcataccctgtctcggtaactatttggccatgtgctccctgggtacacaaggtttcggatctactgatacacctgcaggaactctctcatgttagagcaatagtggctcaggcaaaacgcctggtgggaggttgtatcttgcatagccaatgcgtattacatagcctggagtaccccttgaggctaattctatcaaccaagggatttgtgctcttcatctgtgggtacttccttgtttaggcctcacctccctgctcc

SEQ ID NO: 15845 - DNA, 744 bp, Macaca Fascicularis
  misc_feature (1)...(744): n = A,T,C or G
cagattacnnnnatggcaaaccgaaccattttagtggataataacacatggaataatactcatatttctcgagtagggcaggcaatggcgtccacagaggaaaaagcctatgagatcatgagggannnnnnnnnnnnnnnnnnnnnnnnnnnnnnnnnnnnnnnnnnnnnnnnnnnnnnnnnnnnnnnnnnnnnnnnnnnnnnnnnnnnnnnnnnnnnnnnnnnnnnnnntacaggcaaacatattaaggagaatgactattatactccaactggggagttccgtgtggaccgtgaaggttctccagtgctgctcaactgcctcatgtacaagatgtgttactaccgctttggacaggtttacacagaagccaagcgtcctccaggctttgaccgtgtccgaaatgctgagattgggaataaagactttgagcttgatgtcttggaggaagcgtataccacagaacattggctggtcagnnnnnnnnnnnnnnnnnnnnnnnnnnnnnnnnnnnnnnnnnnnnnnnnnnnnnnncgtccagctctgatatgcttcgcactgggcacatcacatttaggacgttgaagatttttttttttttttttaatnnnnnnnnnnnnngaacaaagctggacggcattaaaattgtctgaaagttttgtcctgggcagtatgggctgggccaaatgaaatgatttttataattctaannnnggttaccaannngaaatgtcatggctttac

SEQ ID NO: 15846 - DNA, 677 bp, Macaca Fascicularis
  misc_feature (1)...(677): n = A,T,C or G
tttctaataaaggattcaaacataagtttgtagtgaaatgnnnnnnnnnnnnnnnnnnnnnnnnnnnnaggggactggctacagtgtagatttgcctctgaggctgccccagacttggcctcctcaggcccctcctgacctctgcccttctctggtcctggcatcccttggagctggagaaggtaggggtcttggcttaggtttagatttgctctccatgtgcagggaggcagtcctgggcctgacagctcctccccctnnnnnnnnnnnnnnngccttacggaggtttggcaccatgtctctagctccccaggcacacaccaggaaactgcagggcctcacggaggaagtgctgcctgggccgggaggactagctttcctccatagagaccatgtgcagaacacttctgcggtgcccagaacatgagggagccagtgtttcgtcagcaggaggaagggcctgctgcctctgctgcgtcnnnnnnnnnnnnnnnnnnnnnnnnnnnnnnnnnnnnnnnnnnnnnnnnnnncgctcctttggccaagggttggggggaggtggcccaagtggcatgctctctaggtaagacaataggannnnnnnnnnnnnnnnnnaaggatcctgcacaccagngcacctgnnnnngccaggaccannnnccctgtgtgatgtgtac

SEQ ID NO: 15847 - DNA, 753 bp, Macaca Fascicularis
  misc_feature (1)...(753): n = A,T,C or G
aagagctgaccaaggccatggaggggctaggcatggacgaaggggatggggaagggaacatcctcccnnncatgcagagtattatgcagaacctactctccaaggatgtgctgtacccatcactgaaggagatcacagaaaagtatccagaatggttgcagagtcatcgggaatctctacctccagagcagtttgaaaaatatcaggagcagcacagcgtcatgtgcaaaatatgtgagcagttcgaggcagagacccccacagacagtgagaccactcaaaaggctcgttttgagatggtgctagatcttatgcagcagctacaggatttgggccatcctccaaaagaactggctggagagatgcctcctggcctcaactttgacctggatgccctcaatctttcgggcccaccaggtgccagtggcgaacagtgtctgatcatgtgaaacacaacacgttttcctctctcagtcccagccatggggaacatctggagtcagcagaaccattgggacctgaggcaggagtgtcatctgcgggagaagtctacccgctgccctctgtcatcccattcaagattgtgccataccagctgaggcttttcctctgtctaggaatagggtctgtttcagagaccatttctgtgacccctactccgttgtggtttctgccactatcaaagttccagctacctgccaggtgaaggaaggcatcctttctggggcatgcactttctttcctttctcaaaa

SEQ ID NO: 15848 - DNA, 739 bp, Macaca Fascicularis
  misc_feature (1)...(739): n = A,T,C or G
caagtttagaatatatctatctagcccattatctctgatnnnnctctaaaaccatttgaaatggcttcattgatcaacatttcacaaatgcatctgtggtagaggtagaaagcagcacctttcctaattggcaaatgatcagactaatgtgtgctaatgtttttcttccatgctttcagtcagattcaactattttatcctccaaagttgcttaacttggtgttggaggagggtttaagcattaaaataggaagcaggaaatttgatttatctaattttagaaattatatccctaaaaattaaaacatgaatactgggtggtaatgataattgagggaaatgtatttattttggtgacattttgcatgtgtgaagattttctgaaataggaccttcaagatcctaggggtctttttttgtttgttttttaattgtgaggaataaaaaatctgcccacactggcattttaaggtgactgaggtcaaaggttgtttccttaggttgaaatagcagccaaaacattcttcacacaggggcttgggatatggctgctggcaacatattttgttgtgggcttcttaatttaatgataaaatttaagctaaacacaagccaaaaattaataggttttttaatttttatttttcactaaacaggcaattgaaatacatggtacaaaaataagtggtaagataactgtaaaatgaaatggacagaataaatattcaattttccatct

SEQ ID NO: 15849 - DNA, 707 bp, Macaca Fascicularis
  misc_feature (1)...(707): n = A,T,C or G
cgagcagtctgagcgtgtgantccgcgnnnnngagcgcgctgtcgcttctctcactcagcagcaaagtctctcgcgacaccctgtacgaggcggtgcgggaannnnngcacgggaaccagcgcaagcgccgcaagttccnnnnnnnnnnnnnnnnnnnnnnnnnnttgaagaactatgacccccagaaggacaagcgcttctcgggcaccgtcaggcttaagtccactccccgccccaagttctctgnnnnnnnnnnnnnnnnnnnnnnnnnnnnnnnnnnnnnnnnnnnnntggatatcccccacatggacnnnnnnnnnnnnnnnnnnnncaacaagaataaaaaactggtcaagaaactagccaagaagtannnnnnnnnnnnnnnnnnnnnnnnnnnnnnnnnnnnnnnnnnnnnnnnnnnnnnnnnnnnnnnnnnnnnnnnnnnnnnnnnnnnnnnnnnnnnnnnnnacaacgaaaacatggtggccaaagtggatgaggtgaagtccacaatcaagttccaaatgaagaaggtgttatgtctggctgtagcagttggtcacgtgaagatgacagacgatgagcttgtgtataacattcacctggctgtcaacttcttggtgtcattgctcaagaaaaactggcagaatgttcgggccttatatatcaagagcaccatgggcaagccccagcgcctatataa

SEQ ID NO: 15850 - DNA, 733 bp, Macaca Fascicularis
  misc_feature (1)...(733): n = A,T,C or G
cccaagggcagcgaggggcgaacatccggggcctacctggctgtgcacgctgcagccacactgtggaagctgcccctccccaaggacccgcctcccttgatgatgccaggatctcggcgcatagaccgctctgcnnnnnnnnnnnnnnnnnnnnngtctctctgttcctcaccctnnnnnnnnnnnnnnnnnnnnnnnnnnnnnnnnnnnnnnnnnnnnnnnnnnttgtgcagcgcttaaaaacggggagctccggccgggcgcaatnnnnnnnnnnnnnnnnnnnnnnnnnctgggaggccaaggtgggaggactgcttgaggccagaagtccaagaccagcctgggcacannnnnnnnnnnnnnnnnnncaaaaatactaaccaaacaagaaaaattaggagattttctgcagaaattgagttccagcctctttccctcaccccgtaggagctgaatgccaaccatcctgacccgctggggctcttggtctcctgagtgcacccaggtcctcccaggtgcggtgtgcaccgagagcgcctggnnnnnnnnnnnnnnnnnnnnnnnngggactcctgggtcctgtgagccccgcggcggcaggcccaggaatggctgggtaggaccgggaacgcctttgccccaggtctggctgtggcctcggtgaaagcagacaggagagaggtgggaccctcctcctcagtagtggctgccagcccctctttgcaggaat

SEQ ID NO: 15851 - DNA, 718 bp, Macaca Fascicularis
  misc_feature (1)...(718): n = A,T,C or G
aagacagacaagacgcagacatgaaaaccnnnaagggcctgggcaagaaaaaggagaagtcatgggaattggccaagaaagaggagaagtcggggtctgggcagtcacccacacaaggaacccctaagaaagaagatgccacaaaggcaggcaaggggaaggtaaccatccctgagcagaagccaagcaggataaaagggatcaagatcgggagcagagagaagcgcagcatcctcccggagtccgagcacctgggacaaagcctggactatagccggcagtcaaaacatctggttgttgannntactgaggtgatcaccccnctcctggagcctgtggagcaccgagatgggaaagttttcatgcctgggaacaaggtccttttgcacctcaacctcctccggaaccgcatcacagaggtgggtctggagggcttcctcgccacagtgnnnnnnnnnnnnnnnnnnnnnnnngccaagagtgtgtccaagggtccagtggggctgctgtggctgtccctcgctaaaaattgcttcgccccacaatgtcctgcgtacgccataatccaggagctgatgttgccaagggatcccatcaaggccaaactcagggaggatgaggccatggcattcttcccctagcccctcccacctgcttgcctctgagactcagaagcacctcctgtccctgtgtgggctgacctccctgagggagatct

SEQ ID NO: 15852 - DNA, 772 bp, Macaca Fascicularis
  misc_feature (1)...(772): n = A,T,C or G
tcaatgaaaaaagcaggnnncagctgtagaagagaaggtagctttggtactggggcaggcagccatgtggagcactgggctggtggatgcagcgcctggtttgttgcagggatttgggtgctgacgaagcctccttccttagtggtccccagtaggctcagccaggtctgtcccccttcgataggagaaccgtcgtcgggccaaagaggaagcctctgccatggaggaggagatggcgctggccgaggaacagctgcgagcacggcggcaggagcaggagaagcgcagccccctgggcagtgtcaggtctacgaagatctacactccaggccggaaagagcaaggggagcctatgacccctcgccgcacgccagcccgctttggtctgtgagctgaggctgtccccagagaggatggcagcaggtattgggtcctgagccctctggcgggagccctgaggctgcggacaaagccctttcatctgaggactttcatctgtgcacatcacggccccctagggcagttcctnnnnnnnnnnnnnnnnnnnnnnnnngtggagttcttccatgcaggagtgtgatatggcaggagccgggctgcagagcatccgagatgctgccgggaggtggctggacccattgcatccaaataaactgacccaggacgcttggcgtatgtgtgacttggttgtggctgtgtcttttttaatccttgtgtaaagcagcaaaaaagacctaaagggaattgtaatttggttataattcaggattga

SEQ ID NO: 15853 - DNA, 940 bp, Macaca Fascicularis
  misc_feature (1)...(940): n = A,T,C or G
agtttttatgtttagtgtcccannnaatganatttccaatatgaatcataatcttgaaattctttagcactaaagtcttggaatgtatcaacaactgacttacatatgcagatgctatttgataccaggggctttttaaatgtcgtggggcggcggggggaaaaaaccctaacttggtgaactcccaactaaacaaccaagacttcactgaagatttatcccaattctagaattgttttgttttgttttgttttgttttctcaactgaccaaattcattactttaaagcctagaacatcattctgctttatttatatggctttctcacttttattttgtannnnnnnnnnnnnnnnnnnnnnnnnnnnnnnnttttactagatatttgtcattcaagttttcatctgctttataattgatacaccttgagggtcacttttctaatacttttactataatgtggtaccacctcagccctaataaatannnnnnnnnnnnnnnnnnnnnnnnnnnnnnnnntaactaaaaataaaactatgtacaaaaggattgcttgtaaatatgcatgtaaatagttctgttaataacccactgttttacatttggtacatctgtgtctgctaatacagttagctttctcacttttctgcttgtttgttcagtctgaattaaaattagactttgaaaataaagcttaaatagttctgtttcctctaaatttttgaagtagtatctggaattttaaataatttgctgttgaacttgtttatatgacataatgaatttacttaatggtttgaaatcaaatcagaagatactttattcattctctgaataagaattcattaacaagtctaccttgaaaaactagcaaatataagacattaaaactttaaaattccttctgtaaaggaaatagnatgtaattgtnntcagaagt

SEQ ID NO: 15854 - DNA, 763 bp, Macaca Fascicularis
  misc_feature (1)...(763): n = A,T,C or G
tgaaaaggatatagagggaagaaaagagcactatagaaggtnggaaccaggttctgtgaggcattctaccnnnnnnnnnnnnnnnnnnnnnnnnnnnnnnnnnnnnnagaaatacaaaaaatatactcactctggatcacgtgatttcannnnnnnnnnnnnannnnnnnnnnnnaatacaaatcaaggagaatatgaaagagaggacaattatggggaggatatcaaaacagaggttccagaagaagatgcactaagtagcaaagaacactcagaaagcagtgttaaaaaaaatttacctcagaatttactgaatatatttaatcagatagctgaatttgaaaaagaaaaaggaaataagtcaaaaaattaatacaccaaggatatcagcaccattacacaaaatgccattaagtttttgggtgttttagtcatannnnnnnnntgcagaaatctctgctcctaaaattatttgtagagattacannnnnnnnnnnnnnntaagcttttctcaaattttgtttcagttgtaggtcccttgtcacagcctggtttttagagtttttatgtatatgtttatgtacagtatattactctgacaatttgaatttcttcacttaaagataattctctgaaagtactgtttcttcattcgattacggtatatgagaattcctgnnnnnnncttatcctgctgtttgagagaaaaatttgtgcattgaacacttggatcatttttataannnnttgatttttctgttaa

SEQ ID NO: 15855 - DNA, 747 bp, Macaca Fascicularis
aagtgaagatgcagagttactgtggcgtttggcacgggcatcacgtgatgttgctcagcttagcagaacctcagaagaggagaaaaagctattggtgtatgaagccctagagtatgcaaaaagagcactgcagaagaatgaatcacattttgcagctcataagtggtatgcaatctgccttagtgatgttggagattatgaaggcatcaaggctaaaattgcaaatgcgtatattatcaaggagcattttgagaaagcaattgaactgaaccctaaagatgcgacttcaattcaccttatgggtatttggtgctatacatttgctgaaatgccttggtatcaaagaagaattgctgaaatgctgtttgcaactcctccgagttccacctatgagaaggccttaggctactttcacagggcagaacaagtggatccaaacttctacagcaaaaacttacttcttttaggaaagacatacttgaaactacacaacaaaaagcttgctgctttctggctaatgaaagccaaggactatccagcacacacagaggaggataaacagatacagacagaagctgctcagttgcttacaagtttcagtgagaagaactgagaacttttcagagacgatgtgtgaaacagctaataaacattgccttttcatttaattataaaaatatatgaactataactgttctacggcttttaaaatgttgtgaccatttaacagtgtaaatataaaaaatt

SEQ ID NO: 15856 - DNA, 711 bp, Macaca Fascicularis
  misc_feature (1)...(711): n = A,T,C or G
gacagaggccaaagccaaggaggatgacaagaccctctcaaaggagcctaccaagnnnaaggcggaaaaggctgaaaaatcctccagcacagaccaaaaagatagcaggcctccagagaaggccacagaagacaaggccaccaaggggaagtaaggcagggagaaaggaacatccggaacagccaaagaaactcacaagagtcccagagctcaaggatcggattaacacaattttcactttttctctttatgtaagaagaaactgctttgatgacggggccttcttcttcaaacaggaatttgttagcaatatgttagcaagagagggcactcccaggcccctgcccccacgccctcccnnnnnnnnnnnnnnnnnnnnnntgatagcttatgtagctgaatgtgatannnnnnnnnnnnnnnacgtaaacacttgactataaaactgccccctcctttccaaataagtgcatttattgcctctatgtgcaactgacagatgaccgcaataatgaatgagcagttagaaacacattatgcttgagatgtcttaacctattcccaaatgccttctgttttccaaaggagtggtcaagcccttgcccagagctctctattctggaagagcggtccaggtggggccgggcactggccactgaattatgccagggcgcactttccactggagtccactttcaattgcttctggca

SEQ ID NO: 15857 - DNA, 962 bp, Macaca Fascicularis
  misc_feature (1)...(962): n = A,T,C or G
agcagaccannnnnnnnnnggcagctgcanngagagccgcagagaagagcattggcacagaggagcaagagggcgcccccagtgcctccaccaagcacattctggatgacatcannnnnnnnnnnnnnnnnnnnnnnnnnnnnnnnnnnnnnnnnnnnnnnnnnnnnnnccagcagtgcccactgtgacctgccgnnnnnnnnnnnnnnngccccagcacaaaagaggcccctgccaccctagggatgggccaaaggctggtcaggctgaagcgcccctcctagcagggccccttcccactccaagccagcggctgtgggcaccgcagctctcgtggggcagcccagcttctcagaacctgactagcgaggggcctccgctgcatctcagccaagcccctcccagggtgatctgaccgacagccctgctcctggacagggaccctggtaagagctctctcctcagggaggaagcggggatggggctctgggggtgctttctctgtaccccccagcctgtgtcccaagttgttgtgccaagggaatgcctcttgccacccaccatcctgcccaggccctgagaggctggaggaggcatgtgtctggccgggccccctctccgtaggtgtacagaggacatgtaaatacacagcggtggtgcccaggcagctcctgcccccgccttccctcactgaggcagagctagcaggggtgggaggcagtggggttaacagatcccacaagtcctaacttttcaattgtaaatgttattttttaagcagagagaaatgcatatattttaaatggaatttattctatctattaactgcctgagaggacacaatgggggaggggcttcggaccatagcaggagccccggctgcccacctgagggcagggagagcctgaccccattggcccaggccctggctctgtaaccataacctctcccccaacaacacc

SEQ ID NO: 15858 - DNA, 728 bp, Macaca Fascicularis
tactcactgcaaagaagagatcggctccagtcccttctttgagcggaatggcttggcctactgccccaacgactaccaccaactttttctccacgctgcgcttactgtgctgctcccatcctggataaagtgctgacagcaatgaaccagacctggcacccagaacacttcttctgctctcactgtggagaggtgtttggtgcagaaggctttcatgagaaggacaagaagccatattgccgaaaggatttcttagccatgttctcacccaagtgtggtggctgcaatcgtccagtgttggaaaactacctttcagccatggacactgtctggcacccagaatgctttgtttgtggggactgcttcaccagtttttctactggttccttctttgaactggatggacgtccattctgtgagctccattaccatcaccgccggggaacgctctgccatggatgtggacagcccatcactggccgttgtatcagtgccatggggcacaagttccatcctgagcactttgtgtgtgctttctgcctgacacagttgtcgaagggcattttcagggagcagaatgacaagacctattgtcaaccttgcttcaataagctcttcccactgtaatgccaactgatccacagcctcttcaggttccttatacaatttaaaccaagagaggagaggaaagggtaactttgctgttctgaccttctgcttaatagtct

SEQ ID NO: 15859 - DNA, 707 bp, Macaca Fascicularis
  misc_feature (1)...(707): n = A,T,C or G
gagagaatggctgataatgcctgtgttctttttgccgtctctgttcttatgtttatnnnnnnnnnnnnnnnngttatgggagcaatttcttatcaagtgggttggctgattccattcttctgttaccggctttttgactttgtcctcagttgcctggttgctattagttctctcacctatttgccaagaatcannnnnnnnnnnnnnnnnnnnnnnnnnnnnnnnnnnnnnnnnnnnnnnctggccttggactccagctgcctcctgttcattgttctggtgttctttgccttattcatcatttttaaggcttatctaatcaactgtgtttggaactgctataaatacatcaacaaccgaaatgtgccagagattgctgtgtatccnnnnnnnnnnncacctcctcagtacgttttgccaacctatgaaatggccgtgaaaatgcctgaaaaagagccaccacctccttacttacctgcnnnnnnnnnnnnnnnnnnnnnnnnnnttattcatcatttttaaggcttatctaatcaactgtgtttggaactgctataaatacatcaacaaccgaaatgtgccagagattgctgtgtatcctgcctttgaagcacctcctcagtacgttttgccaacctatgaaatggccgtgaaaatgcctgaaaaagagccaccacctccttacttacctgcnnnnnnnnattctg

SEQ ID NO: 15860 - DNA, 749 bp, Macaca Fascicularis
  misc_feature (1)...(749): n = A,T,C or G
acannngtttngnnnnnttcnnnnnngtctgagaacacatgaacattttccctttactgccttcgggtgtattgactggtcccccatgggctgctggaaaggcccagagattcattctgtggcctggggccatcaggatcaaagaaccaggaggcctgggagatgcagttggatggggctgcctgctaggggctttgaggaccctcccaggtttcccactgctgagcaggagtaactctggctgccaannnnnnntcatggtgttcacaacaagtgggatcattattttccaccgttcaaggggaatgcaggcaagacgtccccccagatgctccgagaggggacaagccagtccccctctgcagccctcagcagctccagaacaacagagacaggggccnnnnnnnnnnnnnngccacggtcccaaacaagcgccactgtgggagaggagaggccacccttnnnnnnnnnnnnnnnagaccccaccccgtctgcaggacactcccacctccctgcagcttggaggccggtggggtctgctcctgggaatggggtgggagccacagggacagcactgatgtcttcttgggggtagaccagagagctcaagtttcagagccagaattaggcacttggagcgtttttactggctttcactttcttattttagagcgcttaaaaaatccggacaaatggggtttaaaagaactgtctctttcaatctacgtttggttaaatatgagcaataa

SEQ ID NO: 15861 - DNA, 742 bp, Macaca Fascicularis
  misc_feature (1)...(742): n = A,T,C or G
cagnnnnnnnnnnngcatcntccgtgccctcatgtacatcatcgnnnagtgcgtgggggccatcgtcgccgccgccatcctctcgggcatcacctcctccctgccnnnnnnnnnnnnnnnnnnnnnnnnnnnngctgannnnnnnnnnncaggccagggcctgggcatcgagatcatcgggaccctccagctggtgctgtgtgtgctggccactactgaccgaaggcgccgcgaccttggtggctcagccccccttgccattggcctctctgtagcccttggacacctcctggctattgactacnnnnnnnnnnnnnnnnnnnnnnnnnnnnnnnnnnnnnnnnnnnnnnnnnnnnnnnnnnnnnnnnnnnnnnnnnnnnnnngnnnnnnnnnnnnnnnnnnnnnnnnnnnnnnnnnnnnnnnnnncgacttcatcctggccccacgcagcagtgacttcacagaccgcgtgannnnnnnnnnnnnnnnnnnnnnnnnnnnnnnnnnnnnnnnnnnnnnnnnnnnnnnnnnnnnnnnnnnnnnnnngcccaaatagaaggggtctggcctgggcatccacgtagggggcaggggcagggacgggcggagggaggggaggggtgaaatcnnnnnnnnnnnnnnnnnnnnnnnnnngccaaagtcacttnnnnnnnnnnnnnnnnnnnnnnatggtcaagcctcatttgggggtgtttctatctctttctttctctttctgttc

SEQ ID NO: 15862 - DNA, 756 bp, Macaca Fascicularis
  misc_feature (1)...(756): n = A,T,C or G
gttagagtgaggccacagntnnnnncacactagggcttttgtattgctctactcntncagccctttactttctggctgaagcatccccttggagtgccatgtataagttgggctattagagttcatgaaacatagaacaaccgtgaatgagtggcatgatcagtgcttaatgatcaagtattacctatctaataatcctctagaaagaaccctgttagatcttggtttgtgataaaaatatcaagacagaagacatgaggaaatcaggcatatgactttgtacttacatcagatattttctgtaatatcctacttccttggttttcccagctccataccacacacctaaacctgtgttatgaattacatattacaaagtcataaatgtgccatatggatatatagtctattctagttggaatcgtttagtctgctagaatttagttgtgagactttttttgtttcccagtatagcagtcttctgtttggtggcattaaattgatttctttaaaatgctttggtggcatttttgtaaatggattgcttctagattgttacaaaccaagcctaagacacatctgtgaatacttagatttgtagattaattgcattctagatttgtgagttgaatgacaaaggagttgaacaaaaattatggcgtttaagaatttaacatatcttagctgtaaaaatgagaaagtgttggttggttttaaaatctggtaactccttgaagaaaagaaatttatttatac

SEQ ID NO: 15863 - DNA, 395 bp, Macaca Fascicularis
  misc_feature (1)...(395): n = A,T,C or G
atctcgaggcctcacccagaagagggaccctctccttcttcaccagagccaccgtcactgtttttgatgacatggagagtcnnnnnnnnnnnnnnnnnnnnnnnnnnnnngcaggctttttaaggcccctaggaagttttgtgccctccaagtgttgaggaannnnnnnnnnnnnnnnnnnnnnncagtctcgctgtggagatgtcagtcactggaataataagatcttggttctctgggagtcttgggggcacgccttttttgctgtgtggcagggttcttctctagacaagtacacaggccccgccaccccgacatcaaaatgctgtattatgataacagtccctgtgccatctttttccaagggtggggctcacaccaggtttttgaatgag

SEQ ID NO: 15864 - DNA, 754 bp, Macaca Fascicularis
  misc_feature (1)...(754): n = A,T,C or G
taaggaannnnnnnnnnnnnnnnnnnnnnnnnnnnnnnnatatacctagattccatacagtgacaagataaatacaaagggagaacatctggatttcatccttgacccatttacaaagcaaaaagagatgctggattcagatataaatgttaattttacagtgtttaaggtaccaaatattctttttttttttttttaaagaagccacatacctatatttttctgtgaaagctttcagttaagtgttgggaactaatttcaagattttaaaaaatgttnnnnnnnnnnnnnnnnnnnnnnngccataaatgacctaacgttttccatttttaatctctgaactaggtgatctcagttttctttcaactccagtactctggaagtttgtgtgtgacctgtagtgtaccattctcaggtagtgatatggtttggatgttttgtcccctccaaatctcatgttcaaagtgtgacattcagtgttagaggtgggcctagtgggaggtatttggttcatgggggcggatcccttatgcgtgacttcgtgccatccccatagtaatgagtgagttctcactctggttgtttacgcaagagctggttgttcaaaagagcctggaacttcctcctctctctcttgctgtctctcaccatgtgacacactggctccccttccccttccgccatgattgtaagctnnnnnnnnnnnnnnnnagaagcagatgccagcgccatgcttcctatacagttctatgca

SEQ ID NO: 15865 - DNA, 726 bp, Macaca Fascicularis
acattcagtgtaccattaaggtggaaaccaaagggtttgagaaagatgaataaggcctattctccttctgctgcagacattatctttcaaaatcataaaaatgagcaagggagatccaggctgggtatagacaagaataattattttgcaaacacattttcctgacagacttttggtaggaaaaaagtatggcaacagtgtcatgaagattgaaactgtaggtgctttgtgtatgtacgcatgagtgcagacgagtttgagagagaaacagtgtaattgagccccaagcttttgtccgcctgggaaacagatgcattcttattttttgaagttgtatgaccctggactgtcccacagcagaaggcagaacaaacacttatgttatgctttaatcataagtggaatggtcataattaataagatattttatatatggcaaagttttatgaaatgcttttttactattagagacctgtttcttctgttattacagaacacagtgttgatcaactgcgggcataattcttttattatacagttgcatgtaaagggagcttctcatttaattcagcgaatatgggtatttttacggcattgtaattgatggttttaataattgttgaataatttttgattaagagaaaaatgtaatacaattactggtcttttagagttacagggcagaagttaatgcaaaaagctatttgagcatgtgtacttatagat

SEQ ID NO: 15866 - DNA, 688 bp, Macaca Fascicularis
  misc_feature (1)...(688): n = A,T,C or G
gaaaactggcattcgatnntgcgcaatgggctggtcaatgcatnntacaccaaactgcagctgcatgnnnnnnnnnnnnnnnnnngcatctacctgagccccatctccagtatttcctttggatactcaggaatgggaaaaggacagcacaggatgccctccaaggatgagctggtccagagatataacaggatgaataccatcccccagacccgatccattcagtcaaggttcctgcagagtcgaaatctaaactgtatagcactttgtgaagtgattacatctaaggacctccagaagcatgggaacatctgggtgtgccctgtatccgaccatgtctgnnnnnnnnnnnnnnntgtatatgaggatggtcaggtgggcgatgccaacattaatactcaggaccccaagatacagaaggaaatcatgcgtgtgatcggaactcaggtttacacaaactgagggggccccagccctcgtaccacccctgttaccccaggatnnnnnnnnnnnnnnnnnnntgttcaggtacagcaactgaggctgccctgaggaatcaaggggccattaccaaggggcaggaaaaggatatgtaagaggtagcnnnnnnnnnnnnnnnnnnncaagaactactccacatttggatggcccagactggcttcaacccctgactttccctttgacttca

SEQ ID NO: 15867 - DNA, 753 bp, Macaca Fascicularis
  misc_feature (1)...(753): n = A,T,C or G
caannnnnnnnnnnnnnnnnnnnnngagactctctcccagtcccccccgaagggcgtgaccatcccgtaccggcccaagccgtccagctntccggtcatctttgcaggtggtcaggacaggtacagcacaggcagcgacagtgcgagctttccccacaccaccccgtccatgtgcctcnnnnnnnnnnnnnnnnnnnnnnnnnnnnnnnnnnnnnccattcaaggacagtataccattccacagccagatttgaccaagctgcaccagttggcaatgcaacagtctcattttcccatgacgcatggcaacaccgtgaatccagctctccagaggtgaaaggctattgggcaggtttggatgcatctgctcagactacttctcatnnnnnnnnnnnnnnnnnnnnnnnnnnnnnnnnnnnnnnnnnnnnnnnnnnnnnnnnnnnnnnngagatccgtcagatgtctggggcgcagatcataattnngaacccagtggaaggatttattgataggcaggttaccatcactgnnnnnnnnnnnnnnnttnnnnnnnnnnnnnnnnnnatcaatgtcaggctttcctcggagacgggtggcatggggagcagctnnnnnnnnnnnnnnnnnnccataatccctttctgctgttcaccaccacccatgatccatctgtgtagtttctgaacagtcaagnnnnnnnnnnnnnnaatagtttgtaaattttnnnnnnnnnnncacttnnnnnnnnnntcg

SEQ ID NO: 15868 - DNA, 721 bp, Macaca Fascicularis
  misc_feature (1)...(721): n = A,T,C or G
agtggagacagaaaaaagacnnnngcttagtttgagtgaggggccgccggggtgctcggtttgtcttcagagnctggtctgcaacaccaatgccacactggtggcactggacaccctgaaggccacggccagtgtcctaggaagggactcagtttctagctatgccaactgagattctggggtgaggctggtgctgcttccgaagttccactgtgctcaaagtgctcggtgaaagttagcgaaggtgatttcacaaaaataaatgcataaaatgtctaggaaacacaaaaaatcctcattattctctttgaatattttctaagcccaaactggaccctaggcaaaagtgagnnnnnnnnnnnnnnnnngactgcaggcaggccccagcctctgcttgctgccatcccaaacagaagttaccagatgaacagactcggatgggctgcgggggtggagagctagaaagctcggttgtgcctctcaacgattaagatttcaatatttacagcaaaaccacaaagcaaatgatagaataaagcaaaacaacaggaagtctgagttcactcatgagagaggtacgtatgtgagctctgaggaaattatagagggaacgcacgcagcgggacagctctccccatcgcagctgcaaagtagannnnnnnnnnnnnnnttttgaaaaatgaaaaacacattactttgaacagccaagaaaaaaaattca

SEQ ID NO: 15869 - DNA, 710 bp, Macaca Fascicularis
atacaatgcaggaaaaccaccaaccatccttgcacaccaggctgaacaaagcacagtgatttcttcccttcatcccccacccccaccccaattcgcatattcccatccacatcagtttaaattttgaggttctttgattgggagtaccagtgaagagggagttggatgagtagaggagccttaaatctggccacctctaagtcccaggagaagggagctgcaggcccagtcagtcaagcagaagctgcattcagtaggtctttgaagtggttgtccatctccctgttctgtgttcaagcccccagcgaaaggtatggcagtagaggatgaccaggtccaagctgcccagttcagagctacggaagcatggtccgttcaccaacgccacgtttctagagagcagtgagctgattctccaatggtgagcaggggactacatgtgaactgggacctgcaggccaatgtatccctgtgccagtgggattcatccctcttggaaaagaagccatactcgggtcacgagcaccagctgggaaaggtgctggatttgaagccaatgagcctgacgaagctggaaaaggagatgggttccttggaaatggggccagatttccaccaagagaaccggccgccataaggaagggatccgagttcacacccaatgggtggcctgtgttgagacaggacccccctgtggtccagggaactgt

SEQ ID NO: 15870 - DNA, 758 bp, Macaca Fascicularis
  misc_feature (1)...(758): n = A,T,C or G
caaagtaaggtnnntaaggaaggtgagtggtgtgactcttactccttaggtgcccagaatttaccatcatctctgaaggagttacagggaagtggtctccccaattgtcccctccctccagtattgcctcctctcactttagcatatattaattagcaggttgggctagagaaatcagctgctatgcgggttgattattattattatttttaatccttttccttatttgccttctactccccttaatctaatctaaaagctctgttccatgcaactttatccctctcttccccttcccttatatattgaggctatggggtaggagaaaagtgcacaacccaccaccccctttactcgtgcattaaaatttctcatttaccctttccccgctttccatttcttcccactttcatctaccttttctggcaaaaaggagccttttgctctctgtgacccctaagagcatactgcacaggggaaattgccccatccagacctggctccactcttgatttcttttgtcctcttctgctcttttcctggtgctcttttttctcggtggggtgtgggtaatagaacagccatgggcttttggggacctttaactttttttttcctcttttgtttataaaaacactaaacattcaattccagagaaccaaaaatcccaccttcccaccgaacactactaaggggcctgtgttctgctccataccttttctcttttctttctgtcttgttaatgctttaaaaacaaa

SEQ ID NO: 15871 - DNA, 683 bp, Macaca Fascicularis
  misc_feature (1)...(683): n = A,T,C or G
tatcccaaagaccacagcgcaactgtcaagctgcttaccccctcaccgagggctacagcctgtgcccagccctttaatttgtgcctctcttgtattgggggtggtggggattattcctctccctttcctgctctggcctcnnnnnnnnnnnnnnnnncccnnnnnnnnnnnnnnntannnnnnnnnnnnnnnnnnnnnnnnggttgtttctctggggctttagggagggccctttgccctctggtttttcttgcctcctggtttagggagcatctcacacttgttagtgtctggttggtgggccagccatgcctcatctagatctggagccaggccaggcaggggccatgtgtgggccagtcagccactacaagatttttgctaagctttgggctgttggcagcatcttggacctcatgcctgagcctgaatgaggctctttcttaagtgtttttacaagtttgtgttttatttatggagtgacttatcccttccattcagagcagccccacccagccagcccttcagcctctgggctcctgcctcttaaaggcagagccgtctggttggtctccaccctgtgcattgggagcccagccaccatgctcacgggtatttttcctcataaagtttataaccagttatttatatgaatctttgttatgtcaacttgtttgtattgc

SEQ ID NO: 15872 - DNA, 633 bp, Macaca Fascicularis
  misc_feature (1)...(633): n = A,T,C or G
ggcagtgcgtcaagcagcgccgacaagcagatggtcgaatnanaggacacaaactttacaaagaatatccagaaggtgactcaaagaatgtggcagaacctggaaggggacaacagaggcactttcaataacgtgaagatgtcanntnnggttncnagaacattcctccactttcngctaagccttggaaacagatgggaaaagtagtttgaccctcaaagttcacattcagctcagcagagcaagactccaagatgcttagagatgggacacctagccgtcaatcccggtttggcccagcctggttgggcgactttgtgggagccacttaaccnnngtgggtccctgttttaccatcatgggagcaaggccctgccactccacaagacctttaacccgggaagaagccgctgcccatgcaaacagttctgaagcccctttctaagacaaggctnnnnnnnnnnnnnnnnnngacagatttctccccagtatnnnnntgggaggtatgtacccatctcaaatgttcccagaataaattcatccatcaagaaatggaaatgaacttgcctactaatgtgtgattcctagttctagcctcctgatgtgctgaggcctaaatgttagcagatggga

SEQ ID NO: 15873 - DNA, 751 bp, Macaca Fascicularis
  misc_feature (1)...(751): n = A,T,C or G
agctcacttactcttcaacttaatggtagactgtgattgctaactgnnnnnnnnnnnnnnnnnnnnnnnnnnnnnnnnnnnnnnnnnnnnnnnnnnnnnnnnnnnnnnncaaaaaacacaaaaaggctaggagggctctcagctgatgagttcgtggcagccctgtgcttgacggggtgggtgannnnnnnnnnnnnnnntgcgactgccctggcttgtgcaacggggaagggaccaggcagtgcgctcatcctcaaaagtagtgcagacagcacccccggccaacnnnnnnnnnnnnnnnnnnnnnnnnnnnnnnnnnnnnnnnnnnnnncagccatcaacactacacccacatagagacacagcaggaaagggattnnnnnnnnnnnnnnnttgcagtctcccatccttaggaagttaggaaaatcagcaccaggagtgaggacctcacttccagaagaagtaaggcaatcagatgaaaaaatggcaagtgctaatctaataaagcaaggcaaataactgacatttatatcaatcttttaaaaggatcacaaagaaatgctggtagtctactggcagaggctgtcgcctatgtgtacnnnnnnnnnnnnnaaagggcaaactaatatttagacacatgatcagtttgattgatttaattttgatannnnnnnnnnnnnnnnnnnnnnnnnncatatgtacaagtatttatatcagtgaaaatttccattggtgattttttggcagaata

SEQ ID NO: 15874 - DNA, 555 bp, Macaca Fascicularis
  misc_feature (1)...(555): n = A,T,C or G
ccctggtttctcctggggggtgatgagcgggagcggctctgggccgagctgctgcgcacggtgagcccagagctcaccctggaccacgaggtgcctccactgcccgccttccctggacaggagcccaggtgcggcccggagcccactgaagccttcactgtcggacccaagaccttttcctggacgccctttccaccagacctgtggagcccgggccgctcctaccggctgcttcgcggggcaggagggcacctggagtcccccgccaggtccctgccccagcgcccggcacctgatccctgcagggcccccagagnnnnnnnnnnnnnnnccgtggagggtaccgccctgcgcagctgccccatgtgccagaaagagttcggccccaggctgacccagctggatgttgacagccacctggcccagtgcttggcggaaagcacagaagacgtgatgtggtgagcaccatccagggagccctgcgcagtgtgcggcgcccggacgcgccctccccctgcagaagcccctcctctcagctctccagcttgtgcataa

SEQ ID NO: 15875 - DNA, 1069 bp, Macaca Fascicularis
  misc_feature (1)...(1069): n = A,T,C or G
gatccagtngtnnngggaggtgatggagtcttnnnccaacacagagcgctctcncttnnttcgcttcgtctggggccggacgaggctgcccaggaccattgccgacttccggggccgnnnnnnnnnnnnnnnnnnnnnngataaatacaaccctccagaccacttcctccctgagtcctacacctgtttcttcttgctgaagctgcccaggtattcctgnnnnnnnnnnnnnnnngagaagctcaagtacgccatccacttctgcaagtccatagacacggatgactatgctcgcatcgcgcttacaggagagccggctgccgacgacagcagcgacgattcagataacgaggatgtcgactcctttgcttcagactctacgcaagattatttaacaggacactaagatggggaaacgtccttgtgaaacgaaagcctgagccaggcggcagagcgctcgctgctgtgtagactgtaggctgcctggtgtgtctgatgagaagcgtctgtcctcgagccaggcgggaggagggggtggagagattgactggctgtgctgggaatgacagtggaaaggtccgcctgtgcgcgtggaacaccgtggatgctcgacttccaagggtcttctcacccgtaatgctgcattacatgtaggactgtgtttacacagtgtgtaaatgtttatataaataccgaattgcagcatccccaaaatgaataaagcctttttacttgtgggtgcaatcgatttttttctttctcctttctttcaagtgtcgtgagtcgtcttgattgtatattggaaataactgtgtaacaaatcgttattataaatatttcaattaattttactctgaatttgtttattaaaagccttttgaacattaaatgatcagtattacttgaatgcatccagaggatatttaaaccaaaatgaaaaaccagaaggccatttggtgtcccctctcccaggtgtccccttctagcatatgcattatgtcatatgaattgaggcctttctgtgaacagcatcataacttctatcatggaaagtgtactatatataacg

SEQ ID NO: 15876 - DNA, 431 bp, Macaca Fascicularis
  misc_feature (1)...(431): n = A,T,C or G
catgaaaaacttcacagcaagcatttgttgttagtcactgtaattcaagggataatgactaattattagcactggtatgccttagttaacaactctgattgctaatctctccctgctgctttgggtagaaagacaacctacaagatctctagtctgacttaaaaatcaagcttaatacttgaatgaaatgctggagttaatgggtcacctaattaagttgtaagcggccattttaatagttctttcttaattgcaggattggtcttgatttgagcaatggtaaacctcgagacaacaaacaagcaggnnnnnnnnnnnnnnnnnnnnnnnnnnntaagagtttgaaatttgcaacagaagctgcaattaccattcttcgaattgatgatcttattaaattacatccagaaagtaaagatgataaacatgga

SEQ ID NO: 15877 - DNA, 794 bp, Macaca Fascicularis
  misc_feature (1)...(794): n = A,T,C or G
agcagttcagancnntcactnccnctctttcccagagcngtnttcccagtccaccannnnnnnnnnggggtccaagactaggcctggttctccttggaccttatggtcactggagctgtggtcgatgatctcatgtggagaattacatcccacagatagaaaaggagggagcttttgttctactccaggcagtgacagtgcccagggctctgatgtgtctctcacggcttgtaaaggtgagaccctggggggcctgatgtgtgtggggtgttggggggaacagtggacgcagctgtgctatggggtttctttgacttggatgtattgagcatgtgatgggctgtttaaagtgtcactcctcactgtgacggatatgaattttttcatgaatattttttctatagtgtgagacagctgccttgtgtgggactgcgaggcaagatttgttcacgccttctctttgtgacttgaagaaccctgactttctttctgcaaaggcacctgaatgtgtctatgttcctgtaggcataatgtgaggaggtggggagaacaccccatccccgtgtccaccatgaccctcttccccacgctgacctgtgttccctccccatttatctttcctgttccagggaggtggggctgggatgtctctatctctgtctcaacttcatggtgcactgagctgtatcttcttccttccctattacaattagaacctgagtataaatttactttttcaaattattatcatgagaggttgatgagttaattaaaggagaagattcctgaaattg

SEQ ID NO: 15878 - DNA, 711 bp, Macaca Fascicularis
  misc_feature (1)...(711): n = A,T,C or G
cagcctgcaaggccctgtcccccaggctgggaagcacggcctctgccaagaccagaggagccaggaggaggcacttcgaaggggaggggtggccggggcaggagctccgtgctgaccgggttggctaaannnnnnnnnnnnnnnnnnnntgaagggggtcctgctgcacacgtactgaacaaacatgcatgtaacatacgacctgtgttcaccctggggtgggnnnnnnnnnnnncagtgtgtcgcaatgaggccctaaacctcaggtcttctcagaacacaaaggcactcaaggcggagcctctgtaaatcggccggagccggtccacggtcgggggtcccttatcaggaggaggttcctgaagtcaggcttctgcccagtcagagctgtggtcatggctgtggaacgtggtcagtttgcgtctgcgggtggatgggctgcagtcatnnnnnnnnnnnnnnnnnnnnnnncagtgtgtgtttagctgcnnnnnnnnnntgctcatacgtgcattcgtggggaacgagcgctgtctggctcagctgagtcatgtctcctgcctgagagtgagttctggaaacttattccctctcacctctcaggttcctgcattctcccatgtcactgccatggcacgatcctgttgcctggcacctgccaaggcgtggcgcccgcnnntcctgctggcctggcctcccctgctgcctgtt

SEQ ID NO: 15879 - DNA, 495 bp, Macaca Fascicularis
aacattcccacataattcattccatcgcagccagcccagctccactcagggctggcccggggagtccccgagtgccccaggaggccagccccagggtgagcagggccctcagaggcaaggcggtgtggtggaggcccctcggcattcgggcacagcgtggcctcccccgcggagctgcagggacaccggctccagactccaggctgaccgggggcctctgcctccaggagggcatcagctttccctggctcagggatcttctccctcccctctccccctgcctggccctcccagctggtgtcactctgctaagaccaaggcctcaggagagcgtccccaccacacccctgcccgcattgacctcggggccagactggctgcacagcccaaccgggaggggtctgcctcccgcgctgggaccagaccggccgcatgtctgcatggcagaagcgtctccctcggccacggcctgggagggtggttcctgttctcagc

SEQ ID NO: 15880 - DNA, 747 bp, Macaca Fascicularis
  misc_feature (1)...(747): n = A,T,C or G
cgccaatgacgagtgggggcccgagggagccgcacggtgggggccacctcgccagagggagagcaaccctttgccgatgaccacgcttgctgccatctcttagttttctttttcacgaacgctttatttttttaatagataaatcacattttgtaagtcctttaataagattcttctttcctgcattttatgctttattttctgcttgaaggcttacnnnnnnnnnnnnnnnnnnnnnnnnnccaagcggtnnnnnnnnnnnntggttcacgccccccacccgcccccgcccccgcccccgcccccgcctgtcaggtgtgaatgaggtagtcgcactcagaaggacaggcttgtttgccagctcacaagggcaggctgcagcggggttgggagctggccttaggcccctggtgtctgagggcccgggccttgccaggcctctgctgctcctgctcctgggtttgaagatgccaattgccagctctgtggcagcggtcactaaggacagcctgactgtgccatctcggagcctcgggcagggctccggagacagaagacaggtcgccggaggctccctgctcctttccattctgcagatgctctccatggcgctgccctgcagggtgtcagcgggcggggtctcagaacatgtgcttctgattattttactggggtccattgtccagatttttctttgattgtaaaatatatttttactttttagcctcctaatttaataaatgatcc

SEQ ID NO: 15881 - DNA, 723 bp, Macaca Fascicularis
  misc_feature (1)...(723): n = A,T,C or G
agagcgtgagaacnnnnnnnnnnnnnnnnnnnnnnnnnnnnnactgcatcgggcacaacgaggtgatcggcgtgtgccgcgtgggccccgacgctgccgacccgcacggccgcgagcnnnnnnnnnnnnnnnnnnnnnnnnnnnnnnnnnnnntggagcactggcatcagctagtggaggannnnnnnnnnnnnnnnnnnnnnaaaggcagcaaaggactatcagannnnnnnnnnnnnnnnnnnnnnnnnnnncctaggcccgggatcggaccaggctccctcaggatcccatcctttcctgcccggacnnnnnnnnnnnnnnnnnnnnnnnnnnnnnnnnnnnnnnnnnnnncagggcagccctggccctaggcttccnnnnnnnnnnnnnnnnnnnntgggaggaggccggcccagctccttcnnnnnnnnnnnnnnnnnnnnagcctccactgtgtctgtcttttcttccctggggctcccccttggggcgaggggccatgcatgtctgggggacccctgccccccaaagccctctgtctgtctctgtcactttgctgtttgtccaagacttggtgtcccgacccttgttctcgccgtgannnnnnnnnnnnnnnnnntctctgtcctttcagacacacacacacctgtgtccaccccttctgttcgccacaccccgcgtctggccggtccccccactgctgctgctatcaacgccaga

SEQ ID NO: 15882 - DNA, 554 bp, Macaca Fascicularis
  misc_feature (1)...(554): n = A,T,C or G
gcaacaaaagagtgatagttagcagttttccatgtnnagttgtccttgactgattagtccacatgtcagttgtaactcccccactccctacaaaaggaattatttctaacccagatatatcacttgaaactttttaaaagcaaaataatcagggaagttcctagaaaggtgtttggctttttggtttttccttgaggattggggtaaagacttcccccaaaactgtcagcacaaaacagggtattgatttttaactctgatgtttctattggagttgaaataataaataaataatgagggaaatacgtttctaataaaattccctacatnnnagaacaccccacccctgcgtccaccatgaccctcttccccacgctgacctgtgttccctccccatttatctttcctgttccggggaggtggggctgggatgtctctatctctgtctcaacttcatggtgcactgagctgtatcttcttccttccctattacaattagaacctgagtataaatttactttttcannattattatcatgagaggttgatgagtt

SEQ ID NO: 15883 - DNA, 703 bp, Macaca Fascicularis
gtcaaagggatgctggaaatcccagcaaggagctaagaaggcgaagctgcaggacacagccagagtgttcacactacgaaggagggcccgggtatcctaacgccgggttcacgcgtgtgctcacagagctacggccacacacatgcctcccaaggcggcgcgctacgccacctctgaactggcactttcctgtttttacaaatgcagcttcttctcgaaaacaaacaaaacctccaattcagtttttataaatattaagcatgaatattaaaaggtgcttctacttttggttgtaaaaacatctgaatgactctgagactgataagtattttgaagtctaagccgtcttacagaagatcttttataaatgtttgcttataaatagctcaccattacaacaaattgttttaactgtttttctattagctctagctgcatatttgaagtaaatgacaatcactgaaaaatgtcagaaaaagcattttcaatactagcataaagtgccgtatgtaaaaaagaaaaatgtgatgttataactaaataacacacaaacatcgagaggctatttatacaaataatttatttccgctagggaaagtgcgttactggtgaaggtattatcagtttattctacttgcttataatgctacagtgggtgttctgcctcactctgcctcactttccattccccaaaatgatgtgt

SEQ ID NO: 15884 - DNA, 690 bp, Macaca Fascicularis
  misc_feature (1)...(690): n = A,T,C or G
cagagggaaagnnntatgtgaccaaggaggaactctaccaggtatgggcctcaggaggtgggtgaagaggtgtcctttggaaaaccaaagccacatttgtggcagagccgagtctggggcaacaggccctgtgctgggtacagttttctccccatttacaaatcaaacccnnnnnnnnnnnnnnnnnnnnnnnnnnnnnnnnnngcagctctgaacccccagcatcctgagacctgggaggtcaggtttgaagtgggtgcagctggctcagacactaggtgtggtctctgaccccgtagaacctgacccgggaacaagctgactactgcgtctcccacatgaagccctacgtggacggcaagggccgtgagctccccactgcgtttgactannnnnnnttcacccgcttgcttnnngtgnnctgagccactccttgggtcacccgcccctcgctgcttgccccgcgtcgccttgctgcatgtccgctcctctctgtgctctcactttccactgtaaccttaagcctgcttagcttggaataagacttagtagaaaatggtgcttcactaacccgcttccggtccagtcacaatcaccatgtcactgtggggacccagatccacgtcttgaagcagctgccctcattccgacttcagaaaatcaaagcagctggctcttccccttgtctcc

SEQ ID NO: 15885 - DNA, 773 bp, Macaca Fascicularis
agcagtacgttgagcagcccatggcatggctggaatctactacatgttaatgcagccagcagcaaaagtggaccaagaaactttgacagaaatggtgaaacccagtattgattacgtgcgccacaaaaaattccggtctgggaattacccatcatcgttaagcaatgaaacagaccggctggttcactggtgccacggtgccccaggggtcatccacatgcttatgcaagcgtacaaggtctttaaggaggagaagtacttgaaagaggccatggagtgtagtgatgtgatttggcagcgaggtttgctgcggaagggctacgggatctgccatgggactgctggcaacggctactccttcctgtccctttaccgtctcacgcaggataagaagtacctctaccgagcttgcaagtttgcagagtggtgtctagattatggagcacacgggtgccgcattcctgacagaccctattcactctttgaaggcatggctggcgctattcacttcctctccgatgtcctgggaccagagacgtcacggtttccagcatttgaacttgactcttcgaagagggattaaaaggtgcaaaaagacaactaaaatacccgtttggaacaaaagccaccagattgcttagtgcctgacacagaaacaactgggaatcctgaaagagaagcagacactgtcacaggcccctctgttagagcatgagtgatcgaagccatccatcaacattaacggcaccctcatcagtataaaatatgacttc

SEQ ID NO: 15886 - DNA, 751 bp, Macaca Fascicularis
  misc_feature (1)...(751): n = A,T,C or G
gcannnnnnnnnnnnnnnnnnnnnnnnnnnnctccaaacatggacgtcctcccctccaaatccagaagctcccaaaaggtgtccttaacagcaaggctgtgcggggtacnnnnccagatggaatcaggaagtggagacgccatcccaggtgtgtgagagcgagagaacgaaaaggagacggcagtgttgcagcccagagcccctgtcaggggacagctggtgggcaaagcagccagcccacagccttgtggctagagtgcagtgcggtgggcccctagctccaagagcccggcacccagctggcagggttgcccatgcccgctggccacctgctccatcctttagggttccacaggcccctgactgcacagggaggctggggtcagcctgggctcccaggtctgaggacatgcctcccaccaaatgtcccctgctccagtcccactcctgtcaccccacgctcttcactggggagagaatgggaggtgctcgtgctggccctgggtgggannnnnnnnnnnnnnnnnnnnnnnnnnnnnnnnnnnnnnnnnnnnnnnnnnggggaacccctttcccacatttgtgctgtgtcattgttgctctgcttcctttcaatgtgtcagtgcctggggggaggggaggagcaccccctcagcccccctgaacctgaccaaaagccatggctgttgctcccccctttgtatgatgcaaatgctgagatgtacaaaatcaaccatgacaacaaagaaaa

SEQ ID NO: 15887 - DNA, 744 bp, Macaca Fascicularis
acttattgagtgcttactatgtaccaggtaccacgatgagtgtttcacacattatctcatttaatcctcttggttctacatttaagaataggtcctagtatcctaattttacacagaaggagaaaccaagcacttgcccaaggtctcacagctgatgtatggctaggcaagaaccctaccctgggtctctctatccccaaagtctgtgctttcaagcaccacaccaacccaggtaacttagtccatgggagaaatggaggccacgaagtgtgcagctccccaccaatactaaaaatatctccacagaccaggctctgtgcttctcatttaggcctcacaacattccagtgaagcagaggcttagaaaagtgatctcagttggcccaagatgacatgagtggtaaaggaagccactaaagtttaaagtctggctctcacgtcagttaagcacaggccagattcccttcctctccctccacatagctctcacctcccctggcctttctgctgatggcagaggtgtgttcctcgcattgcttctttccaagggtacttcctcaaccctgccccagtccttatcaacacagcattcattctcagggaattgaaagctccaagtcaccctcgtcactggctccttccatcaaggaacatcctttccaccatgctgtccccttcatcaagctaactacctctgctgttttcctttgtttcaaaacctcttgaaatgcagcagaaaggaaa

SEQ ID NO: 15888 - DNA, 685 bp, Macaca Fascicularis
  misc_feature (1)...(685): n = A,T,C or G
ggcagtgatggaggggctcaggactgctgcctcaagtacagccaaaggaagattcccgccaaggttgtccgcagctaccggaagcaggaaccaagcttaggctgctccatcccagctatcctgttcttgccccgaaagcgctctcaggcagagctatgtgcagacccaaaggagctctgggtgcagcannnnnnnnnnnnnnnggacaagacaccagccccacggaaaccagcccagggttgcaggaaggacaggggggtccccaagaatggcaaaaagggaaagggctgcaagaggactgagcagtcacagacccctaaagggccatagcccagtgagcagcctggagccctggagaccccaccagcctcaccagggcttgaagcctgaacccaaaaggcaagaaggaggctatgctcaggggccctggagcagccaccccatgctggcattaccacactctttctcctgctttaaccaccccatctgcattcccagctctaccctgcatggctgagctgcccacaccaggccaggcgcagagaggccgaggagggacaatctcccagggagcatgagaggaggcagcaggactgtcccctcgaaggagaatcaccaggaccctggacctgannnnnnnnnnnnnnnnaccccacctcttcctgtaaatatgacttatacctaa

SEQ ID NO: 15889 - DNA, 698 bp, Macaca Fascicularis
  misc_feature (1)...(698): n = A,T,C or G
gccaagagcattctcttaccgactaagggtatttaagggtttaggaagggggagcctaccacaggctgggaatgtttctgtgtgaaggaaagttttattgcagaattggaatatctctggttgtaagggaggttattctcaggattggcatgtttctggtcagatgggggtttatctcacagttgaaatgtttctggtcatactgacatgagccattaggctgatgttttgggctggtttttaatcacggggaacttaaaatgaccgtgtttgtccaagatggcaatgctcctgctgtcacacccgcccacccacagggtactggggtcactgcagaacctggccgcctttgcagacacgttccactgtgcccagggcacccccatgcaccccaaggagcgatgccgcgtgtggtagccaaggccccgccgcactgcgcggcccacgcccacccgctgctccgaggcatctgtgcggagaaggtgcagccagcggcgacccagcatgtgccccggcccggccgaccatgccaagcctgcctgccaggcctccgcacctggcctagggtgcagccacctgcccgacacccagggatgagcagtgtccagtgcagtacctggcccagagtcccctctacggacacccgcggggctcagcnnnnntgtcacagccctatnnnnncnntcaactgtgtcctg

SEQ ID NO: 15890 - DNA, 803 bp, Macaca Fascicularis
  misc_feature (1)...(803): n = A,T,C or G
tcatgggggtannnnnntcatgaaggaacctggagtnnnnnnnnnnnnnngagatcttcgcatcttccgaatcttgaggggacaaatgacatccttcggctgtttgtggctctgcagggctgtatggacaaaggaaaggagctctctgggcttggcagtgctctaaagaatccctttgggaatgctggcctcctgctgggagaggcaggcaaacagctaaggcggcgggcagggctgggcagcggcctgagtctcagtggaattcacctacccggcagttgagtcgcagcggtgagctggcagtacaggaccatcgaccactatgccactgtggtggaggccaagttgatannnnncaggcggggaatgcctgagccgcagggggcctgnnnnnnnnnngcaaacggggccatagacctatattccatagtggtggttctctcgagggcttcaagatccttgagtgagggccaccacacggcccagcatgagaaaatgctctgtgacacctggtgtatcgaggctgcagcccggatccgagagggcatggccnnnnnnnnnnnnnnccnnnnnnnnnnnnnnnnataccgcaacttcaaaagcatctccaaggccttggtggagcggggtggtgtggtcaccagcaacccacttggcttctgaatactcctggccagggcctggcccggttatgtgcctttcctcaagccaaagcccctctccttggggccctggtttgtcccggagggggcctagtattcccaggactgtgcctgctctcaagagcacttactgcctcgaaa

SEQ ID NO: 15891 - DNA, 744 bp, Macaca Fascicularis
  misc_feature (1)...(744): n = A,T,C or G
gcaagagcaatggctggatcgtgnnnnctgtgtaccagggcatgtacaacgccaccacccggcaggtggaaacggagctcctcccctgcctcaggcactttggactgaggttctatgcctacaaccctctggctgggggcctgctgactggcaagtacaagtatgaggacaaggacgggaaacagcctgtgggccgcttctttgggaatagctnnnnnnnnnnnnnnnnnnnnnnnnnnnnnnnnnagcaccacttccaggccattgccctggtggagaaggccctgcnnnnnnnnnnnnnnnnnnnnnnnncccagcatgacctcggccgccctnnnnnnnnnnnnncaccactcacagctgnnnnnnnnnnnnnnnnnnnnnnnnnnnnnnnnnnnnnnnngcnnnnnnnnnnnnnnnnnnnnnnnnnnnnnaacggaggaagggcccctggannnnnnnnnnnnnnnnnnnnnnnnnnnnnnnnnnnnnnnnnnnnnnnnnnnnnnnnnnnnnnnnnnnnnnnnnnnnnnnnnnnnnnnnnnnctgcccaaggctcttctgtcacctcttttgttctctcacactgaccagtcttggccttnnnnnnnnnnnnnnnnnnnnnnnnnnnnnnnnnnnnnnnnnnnnnnatttttctagttcctgccttgctccctgtttactttnnnnnnnnnnaggcgggggtgagtcccacttgagcactccctgttgaataaagcaggc

SEQ ID NO: 15892 - DNA, 721 bp, Macaca Fascicularis
  misc_feature (1)...(721): n = A,T,C or G
cagggcagcccacaccgnnnacgtcgccggagccgcagcgcagcagtcccgggccgacacccgcgcccggccccgcccgggagaagagcgccggcaagaggggtccggaccgcggcagccccgagtaccggcagcggcgcgagcgcaacaacatcgcggtgcgcaagagccgcgacaaggccaagcggcgcaannnnnnnnnnnnnnnnaagctggtggagctgtcggccgagaacgagaagctgcaccagcgcgtggagcagctcacgcgggacctggccggcctccggcagttcttcaagcagttgcccagcccgcccttcctgccggccgccgggaccgcagactgtcggtaacgcgcggccggggcgggagagactcagcaacgacccatacctcagacccgacggcccggagcggagcgcgccgtgccccggcgcagccagagccaccgggcacccgctgcagtttcttgggacatacgagcgcaaagaagctacagcctggacttaccaccactgaactgcgagagaagctaaacgtgtttattttcccttaaattatttttgtaatggtagctttttctacatcttactcctgttgatgcagctaaggtacatttgtaaaaagaaaaaaccaagacttttcagacaaaccctttgtattgtagataagaggaaaagactgagcatgctcacttttttatattaatttttacagt

SEQ ID NO: 15893 - DNA, 766 bp, Macaca Fascicularis
  misc_feature (1)...(766): n = A,T,C or G
gtggttaatatggtataatgcatggctttgtgcacagcccagtgtgggattacagctttgggatgaccgcttacaaagttctgnttggttagtattggnnnnnntnnnnnnnnnnnnnnnnnnnncgtatatatacccatagggctagatctgtatcttagtgtagcgatgtatacatatacacatccacctacatgttgaagggcctaaccagccttgggaatattgactggtcccttacctcttatggctaagtctttgactgtgttcatttaccaagttgacccagtttgtcctttaggttaagtaagactcgagagtaaaggcaaggagaggggccaagctctgaatgcggccacggatgccttgctgctgcaaccctttccccagctgtccactgaaacgtgaagtcctcttttgaatgccaaacccaccattcactggtgctgactacatagaatggggttgagagaagatcagtttgggcttcacagtgtcatttgaaaacgttttttgttttgttttgttttgttttgttttgtaattattgtggaaaactttcaagtgaacagaaggatggtgtcctactgtggatgagggatgaacaagggaatggctttgatccaatggagcctgggaggtgtgcccagaaagcttgtctgtagcgggttttgtgagagtgaacactttccactttttgacaccttatcctgatgtaccgttccaggactctnnnnnnttttttttcaaatgtagctgaaatcca

SEQ ID NO: 15894 - DNA, 1525 bp, Macaca Fascicularis
  misc_feature (1)...(1525): n = A,T,C or G
aaaattgggtgnnnnnnaagtatnntaggatctacagttatggtcattcatgctccaaaggaggaggagattgagactttaaatgaaatgtctcacaagctgggtgatccaggttttgtggtctttgcaacccttgtggtcattgtggccttgatactannnnnnnnnnnnnnnnnnnnnnnnnnnnnnnnnnnnnnnnnnnnnnnnnnnnnnnnnnnnnnnnnnnnnnnnnnnnnnnnnnnnnnnnntgtgaagggcctgggcnnnnnnnnnnnnnnnnnnnnnnnnnnnnnnnntgtgctgcggcatcccctggcttgggttctgctgctgagcctcatcgtctgcgtgagcacacagattaattaccnnnnnnnnnnnnnnnnnnnnnnnnnnnnttccattgtgactccaatatattatgtattctttacaacgtcagttttaacttgttcagctattctttttaaggagtggcaagatatgcccggtgacgatgtcattggtactttgagcggcttctttacaatcattgtggggatattcttgttgcatgcctttaaagacgtcagctttagtctagcaagtctgcctgtatcttttcgaaaagacgagaaagcagtgaatggcaatctctctaatatgtatgaagttcttaataataatgaagaaagcttaacctgtggaatcgaacaacacactggtgaaaatgtctcccgaagaaatggaaatctgacagctttttaagaaaggtgtcattaaaggttaatctgtgattgttatgaagtgaatttgagtatcagaatgtgtctaaaaaaacattgtcctcaaataatgttctttaaaggcaatctttttaaagatttcactaattaggaccaagaaattacttctatttaaacaatggtagctcactaaaatgacctcannnnnnnnnnnnnnnnnntaatattgtattgttgtagaattattttacattttcattccttctccaaaatctgaatgcactaatgacagttttaagtctataaaaatgctttattttttcattcgtgatggaaatctgaaatgtgcatttgtcatctccactccatcaatccctgaacatataaggcttttttattttaaaaaagaacagttatcccaatacattatcctgtgatttaccttacctataaaagtggctcctgtttgatgattggttttattttttgaaataagggaaaactaagttactgaatgaaggaaacttacaaaataaaaaaaagggcggaaatcaccccaaggaaggattctnnnnnnnnnnnnnnnnnnnnnnnnnnnnnnnnnnnnnnnnnnnnnnnnnnnnnnnnnnnnnnnnnnnnagccagtgcatcctgcctgctgctgcagcctggctgggtttgttcttcagttatcctaatcccatgatgcctggaaccttgattaccattttacatcagctcttgtacttttcagtatattttcataatgagttatattgtcatttggactttgaacagct

SEQ ID NO: 15895 - DNA, 741 bp, Macaca Fascicularis
  misc_feature (1)...(741): n = A,T,C or G
tgtggcagannnnnnccnttttgacaagcaaacaacaaagtcagagctgnngnnnnnnnnnnnnnnnnntgaggaagagtcaagggcacagagagatgcagagcgatctaaaattagtttcagtaacataatatcagatatgaaagttnnnnnnnnnnnnnnngctagnnnnnnnnnnnnnnnngagtatcannnnnnnnnnnnnnnnnnctatgacagttctcctgaccagcagaccactgatcttagaaaaagacttaggaaaaacatattctcggggaaaagacttcatatttttgacatgacagcagttactaaagaagcacctgaaannnnnnnnncaccttcactgtgggatgtggaatttgctaagcagttagccacagtagannnnnnnnnnnnnnnnaatgggtttgaagagctgatccagtggacaaaagaggggnnnnnnnnnnnnnnnnnnnnnnnnnnnnnnnnnnnnnnnnatgatgatggttcagaatttcatgaacatatatttctggagaaacacctggagagctttccaaaacaaggaccaattcgccacttcatggagctggtgacttgtggcctttccaaaaacccgtatcttagtgttaaacagaaggttgagcacatagagtggtttagaaattactttaatgaaaaaaaggacattcttcaagaaagtaacatacagttcaattaagaccatggaaatttttatttcaaacaattaga

SEQ ID NO: 15896 - DNA, 751 bp, Macaca Fascicularis
  misc_feature (1)...(751): n = A,T,C or G
ccgnnnnnnnnnnnnnnnnnnnnnnnnnnnnnnncacaggaatgagaggccacacgtgtgtgagttctgcagccnnnnnnnnnnnnnnnnnnnnnnnnnnnnnnnncacctgcgcacacacacgggcgagaagcccttccnnnnnnnnnnnnnnnncaagaccttccgaacccaagccagcctggacaagcacaaccgcactcacaccggggaaaggcccttcagttgcgagttctgtgaacagcgcttcactgagaaggggcccctcctgaggcacgtggnnnnnnnnnnnnnnnngggccggccccacttctgccagatctgcggcaagaccttcaaannnnnnnnnnnnnnnnnnnnnnnngtcagacgacataagggggtgaggaagtttgagtgcaccgagtgcggctacaagtttacgcggcaggcccacctgcggaggcacatggaaatccacgaccgggtggagaactacaacccgcggcagcgcaagctcnnnnnnnnnnnnnnnnnnnnngagaagatggtggtggtggcgctgcagccgcctgcggagctggaggtgggctcggcggaggtcattgtggaatccctggcccagggcggcctggcctcccagcnnnnnnnnnnnnnnnnntgtgcagaggagagcttcaccagcccaggtgtcctggagccctccctcatcatcacagctgctgtccccgaggactgtgacacatagcccactttggccaccagagcccac

SEQ ID NO: 15897 - DNA, 742 bp, Macaca Fascicularis
agcattcaggtgccaggaatacagatgggagagccagtgccagaaacaggtccagctgtactcctcgatgaatactgtgggttcccagcattttcagacgcttattcctcagctggtgactccgtgtatacttacttcagtgctgttgctggacaggatggtgaactggatgctgaagaacttcagagatgtttgacacagtctggaattagtggaacttactctcccttcagtttggaaacctgcagaattatgattgccatgttggatagagattacacaggaaaactgggatttagtgaattcaaagagctatgggcagctcttaatgcctggaagcaaaacttcatgactgttgatcaagatggaagtggcacagtagaacatcatgagttgcgtcaagccatcggtcttatgggttataggttgagtcctcaaacaataactactattgttaaacgttacagcaagaatggcagaattttctttgatgattatgttgcttgctgtgtgaagcttcgagcattgacagatttctttaggaaaagagaccacttgcaacaagggtctgtgaatttcatgtatgatgattttttgcagggcactatggcaatttgaatgttcagaattctaaacctgaagagacactgtgaattcttttgcttggaagaagtgaactggactactttaaaacttttaagcgttttccatgttcttcctacccgttaagtctctcttcact

SEQ ID NO: 15898 - DNA, 750 bp, Macaca Fascicularis
  misc_feature (1)...(750): n = A,T,C or G
aacagacggtnnnnnnntcatgtgctgtggnnnagggtatgacacaactcgagtcacccgtgttacccagtgtgagtgcaaattccactggtgctgtgctgtacggtgcaaggaatgcagaaatactgtggacgtccatacttgcaaggcccccaagaaggcagagtggctggaccagacctgaacacagatacctcacgcatccctccaattcaagcctctcaactcaaaagcacaagatccttgcatgcacaccttcctccaccctccaccctgggctgctacagcttctgtttaaggatgtagagagtaatccatagggaccatggtgtcctggctggttccttagccctgggaaggagttgtcaggggatataagnnnnnnnnnnnnnnnnnnnnnnnnnnnnnnnnnnnnnnngaagggagagtagaagagatagagggtctttnnnnnnnnnnnnnnnnnnnnnnngtatgtagttgaggctccttttttctttcctttgcaccagcttcctgatacttccttggtgtnnnnnnnnnnnnnnnnnnnnagagagcttctttttgtttctacctggccaaagttagatgggacaaagatgaatgacatgcctgttctctgaagtcagtttgagcagaactacctggtaccccaaaagaaaatcttaggctaccacattctattattgagagnnnnnnnnnnnnnnnnnagtggacaaggttccattcacatgctcatatgtttat

SEQ ID NO: 15899 - DNA, 718 bp, Macaca Fascicularis
  misc_feature (1)...(718): n = A,T,C or G
gacagtcctttatcaagnnnnnnnnnnnnnnnnnnnnnnnnnnnnnnnnnnnnnnnnnnnnaacacaataatgtgtctttccacattttattacactaaatgatattcatattnnnnnnnnnnnnnnnnnnnnnntaataaaaagtaacacacaaagtggaggattcatggcttatgcttgtttcatatgtgtagaattctcagtgatatgcttaagttatgtgtaggggtgggtatgctctcatttctctcaatttgaaacacaagaattactaatagtaacaggccttgagcacaaaatttggtcaagaaatgaaatctgtttgaaatgcttagttggtgaaaccacagatctctctgttactaatgatcactctggaaatgcgaataggaggagaaaaaacaaaatcatattaatgccttttgtatatcaaccttctcctgtctccatgatactgcatttggnnnnnnnnnnnnnnnnnnnnnnnnttaagtggatctgtttgtaagtggattcggttcattcacttggtctgtcggtgactcctgaaggtctcctggtccatctcattgcagcctgttgggcagagctggacaaggtgtctttggaggaaaactaagtcttgtctcatttaggactgggttcccaacagtgacaatcacttccttcagcttcttacttcttcttctagaatccccacagggaaatactgtatga

SEQ ID NO: 15900 - DNA, 777 bp, Macaca Fascicularis
  misc_feature (1)...(777): n = A,T,C or G
ggggctatgtgggtgcagccaccgtggagcggctgcctggtggttcatgtacgctgannncgggcctcatnnnnnnnacagccagctgactcacnnnnngcagtgcaccgaggacaacgnnnncttcgagggcgtagactgtgaggtctttgaggcctccgagcccatgaccatggccctgtcnnnnnnnnnnnnnnnnnnnnnnnnnnnnncactcaacagcctgtncgagagccagtcnnnnnnnnggatnnnnnnnnnnnnnnnnnnnnnnnnnnnnnnnnccatctgcctctccatgtccctgcacttcctcatcctctacattgaccccctgccgatgatcttcaagctccaggccctggacctcgcccactggctcatggtcctcaagatctcactgccggtcattgggctcgacgaaatcctcaagttnnnnnnnnnnnnnnnnnnnnnnnnnnnnnnnnnnnnnnnncnnnnnnnnnnnnnnnncgtgtcacagatccagaagatgaaagaaggaagtnnnnnnnnnnnnnnnctgtcctccccaccctgatagtgacgcatcttcaggcacagctgtggcacagacccccgtcctgtcccccacacccctgtcatgtgtctgtttataaacatgaccccttccctttccttccccctcggccacccacctccctctcaaccttgtaaatcccctttcccaaccccgaggggcttgcagggacaaggcgaccgactgcgctgagctgcttatttatgaaaataaagaca

SEQ ID NO: 15901 - DNA, 753 bp, Macaca Fascicularis
  misc_feature (1)...(753): n = A,T,C or G
cagctgcatttattgatannntcccgcaccaggccgggcttgggccctgcacaggtatttccatttcttcctcactatcagtctgagcaagatcctgttgtttccactaaacgaactcctacgggagtagctggaaagttggaaccgtgtccagcacagaaggaatctgtgcagatgagcagtctcactgttactccacagcggaggagaccagctcagaggcccaggaacccggagcaaagcagggaggtgtgggagaactgggatatgaacccccgccatctggcaccagagcccgtgctcaaccactgtgtcgttctgctgcccccgcagttggcagcgaggctgttttgtcctgtttccttggaggccaccgcggcagacctggacactagggtcaggcggggtggcgtggcggggagaggcgttgctggggtcggggtggggagacctggttggccgtggtccagctcttggcccctgcgtgagttgagtctcctctctgagactgctaagtagggacagtgatggttgccaggacgaattgagataatatctgtttggtgctcatgagtgacggacacacagcactctaaatcttccttgtaaggattatgggtcctgcaattctacagtttcttactattttgtatcaaaaccactatctttctgataacagaattgtcaaggcagcgggatcttgtgtctttaaaaagcagtcctcttgtttctaaggtaatcccgttaaaacac

SEQ ID NO: 15902 - DNA, 1584 bp, Macaca Fascicularis
  misc_feature (1)...(1584): n = A,T,C or G
atgacttggttacgatgagacnnntacagggctgaccagcctcgctcagcacnnnctctcagacccaaggattatgaagttgatgctactctgaagtctctcaacaaccagattgagacccttcttactcctgaaggctctagaaagaacccagctcgcacatgccgtgacttgagactcagccacccagagtggagcagcggttactactggattgaccctaaccaaggatgcactatggatgctatcaaagtatactgtgatttctctactggcgaaacctgtatccgggcccaacctgaaaacatcccagccaagaactggtataggagctctaaggacaagaaacacgtctggctaggagaaactatcaatgctggcagccagtttgaatacaatgtagaaggagtgacttccaaggaaatggctacccaacttgccttcatgcgcttgctggccaactatgcctctcagaacatcacctaccactgcaagaacagcattgcatacatggatgaggagactggcaacctgaaaaaggctgtcattctacagggctctaatgatgttgaacttgttgctgagggcaacagcaggttcacttacactgttctcgtagatggctgctctaaaaagacaaatgaatggggaaagacaatcattgaatacaaaacaaataagccatctcgcctgcccttccttgatattgcacctttggacatcggtggtgccaaccaggaattcttgtggacattggcccagtctgtttcaaataaatgaactcaacctaaattaaaaaagaaagaaatttgaaaaaaactttctctttgccatttcttcttcttctttttttaactgaaagctgaatccttccatttcttctgcacatctacttgcttaaattgtgggcaaaagagaaaaagaaggattgatcagagcattgtgcaatacaatttcattaactccctcccccgctccccccaaaatttgaaattttttttcaacactcttacacctgttatggaaaatgtcaacctttgtaagaaaaccaaaatataaatagaaaaaataaaaaccatgaacatttgcaccacttgtggcttttgaatatcttccacagagggaagtttaaaacccaaacttccaaaggtttaaactacctcaaaacactttcccgtgagtgtgatccacattgttaggtgctgacctaggcagagatgaactgaggtccttgttttgttttgttcatgatacaaaggtgctaattaatagtatttcagatacttgaagaatgttgatggtgctagaagaatttcagaagaaatactcctgtattgagttgtattgtgtggtgtattttttaaaaaatttgatttagcattcatattttccatcttactcccaattaaaagtatgcagattatttgcccaaagnnnnnnnnnnnnnnnnnnnnnnnnnttgttctttgccagtctcattttcatcttccatggttccatgnnnnntttgtttcttgggcaagcagaaaaattaaattgtacctattttgtatatgtgagatgtttaaataaattgtgaaaaaa

SEQ ID NO: 15903 - DNA, 463 bp, Macaca Fascicularis
cagctggtgcgcctctcctggcaacatcctcctggcctcaatcatggcttgtggtctggtcgccagcaacctgaatctcaaacctggagagtgcctccgagtgcggggcgaggtggcccccgacgccaagagcttcgtgctgaacctgggcaaagatagcaacaacctgtgcctgcacttcaaccctcgcttcaacgcccacggcgacgccaacaccatcgtgtgcaacagcaaggacggcggggcctgggggaccgagcagcgggaggctgcctttcctttccagcctggaagtgtcgcagaggtgtgcatcacctttgaccaggccgacctgaccatcaagctgccagatggatacgaattcaagttccccaaccgcctcaacctggaggccatcaactacatggcagctgacggtgacttcaagatcaagtgtgtggccttgactgaaatcagtcagccc

SEQ ID NO: 15904 - DNA, 771 bp, Macaca Fascicularis
  misc_feature (1)...(771): n = A,T,C or G
gcaggcaggatgctnnnnncaacgagctgagggcagctgctttgcagaagacctcacacgatgtccaatcacatccaaataacattgttcccatcctcccccacccacctcatcaaaacataacacatcacagcactcggtagaggtcctgcctccccgtttcccaaggaaagcaagtaggcaacacagccagcacggtgctctccagggcggcccctctcagaggaggaggcagctggtgcagccaggcatctgcagagcagccacgaaggtggcctaggatccaggtgtctcccaggtgagtccatccacacacacatttaaaaaatactattagtctttctaatacactgagggaaagatttttaaaaatctgtggaataaaggaggagattttatttagattttttaaaaagccacgtgggttgacaccttcctccttacccactagatgtcaacagaggtgctgttctgtgactctgcattaacccctgcctcatgtctgtcacatgtgctgctgtgtgacagtaattccagctcagtccctgcaggcaaaggagaaacgggacttcacaggacagaggattgacagaagtcagtttaagggaagtgtttgaatcagactttagtacatctcattcatttcttgaatttgtgttcacaattgtgttctctaaaatgtgtctaaattttaaaaatatgtacatgcataatgtcattttaaaatatgaaggaaggaatttgatgtccacaaaaagtgtttgaggttct

SEQ ID NO: 15905 - DNA, 730 bp, Macaca Fascicularis
  misc_feature (1)...(730): n = A,T,C or G
tgaagcttttgtnnngaattaagaaatagnnnnaggaattgacaaannnnnnnnnnnnnnnnnnnnnnnnnnnnnnnnnnnnnnnnnnnttnnnnnnnnnnnnnnnnnnnnnnnnnnnnnnnnnnnnnnnnnnnnnnnnagcaaatataaagatttactatgcacgtgatacattttatggagtgcctcaagccaagatagtgaacttacatgaagagtgtgaaatgtatttctttactactatagtagtatagttataactttgcatatataattgagctttctcatctgtcaacnnnatggttttcttaaaatgttacaattctatatctatccaccttgtttttttattgtccacaaaccattaaatgtaaatattgtttttagagagagtcagtcattggctttgtcatttaccctttgagagttccacaagtggtagtagagtggtctaacttctttcctgtagtactaccagtattcataaatgtatgccccttactataatttgttcctcttagaagtcagatcatctgatttatagaggattannnnnnnnnnnnnnnttgaaaaggcttattttatacatacatattatatagagaaataactgtttttattaaatgtttcactgacccaagtaatttaaaagtaatatgttacctgtgtctttcaggaaaaataannnnnnnnnnnnnnnnnnnnnnnnntttaannnnctattttagta

SEQ ID NO: 15906 - DNA, 705 bp, Macaca Fascicularis
  misc_feature (1)...(705): n = A,T,C or G
gataagctgtannnnaaannnacacctttccctctccagcaagatgccagcactgcactcattctattcataccacacacacctagttatggaatgtccagagttctcgaagaaatgactttaggaagaggtatacatttttgaagtcactctgtctccaaatctgaacagtcactgtaaatcattcttaagtccagatatgagaactcctctgagtgggtggtcagcaaatacccatgctgatgaaatgacttaggcccaaagaacaaatacttaagatgggagtggaacaatatgagcctgctcagctctgcattaagtaattcaagaaacgggaagcttcaccttaaagtgtgcaaatggcagctagaggtttggatagggagtatgtttgtttcttagtgtttacaaatattaggtacttttgatacaaaacatacttttaaacctcataacctttttataaaagttgttgcagtaaaataatagcctcagttctatgcatatatggattagctataaaaaatgtcagtaagattgtacaaggaaaattagagaaaggtacatttagggtttactttttatgcttggccagtaaaaaaaggtaaatcttatcagaattttttaaataactttttttaagttccctaaatgtgtgtgtgtattgtgcagtggtataagaaatgactttgaaccactttgcaa

SEQ ID NO: 15907 - DNA, 689 bp, Macaca Fascicularis
  misc_feature (1)...(689): n = A,T,C or G
gcctgcccacgtcgtctgacggcggtacgcggngtccccacgtttcttcactgcacattgcaatgcatttgcgattcccannnnnctgttaggagccagcctggtggcaccactcccagagccatgggttccagacatagcattcctttagttcctgtttattgggacactgaggccccacatgtcacatgcctgaggccacccaaccccagcctgcagggtgttcccactgcctggatgccggcctgagttccgcgtgggattcagggtggtgatggcccctgctggataggcctagccctggcccaggtggtgagcggtttgcagtgtccgttgtnnnnnnnnnnnnnngcccagccaagggcccccactgaccagcctccctggacggccctcgcggcccctgcagcccagcgtgggactcagaccctgtgccccagagctcccctgctgcaggatggggctccagctggccccgaccgggtccaggggcattgctcgcctgtacataccgttgccctagcccgcctggtgccgcggcagccacccccaggtgctgggggggcacagcccctccccaccccaggccacgcccccacccaccctgcgtgtttctgccctgtgactcctggaacctgcgtcctccccgaagccatgggaggggtgtcctcctccgaccacccccagat

SEQ ID NO: 15908 - DNA, 694 bp, Macaca Fascicularis
  misc_feature (1)...(694): n = A,T,C or G
gagagtactcccatagctgaaactataatggcttcaagcaacgantnnntagttgtcaatagggtgactggaaatttcaagcatgcatctcctattctgccaatcactgaatnntcagacatacccagaagagcaccaaagaaaccattgacaagagctgaagtgggagaaaaaacagaggaaagaagagtagaaagggatattcttaaggaaatgttcccctatgaagcatctacaccaacaggaattagtgctagttgccgcagaccaatcaaaggggctgcaggccggccattagaactcagtgatttcaggatggaggagtctttttcatctaaatatgttcctaagtatgttcccttggcagatgtcaagtcagaaaagacaaaaaagggacgctccattcccgtatggataaaaattttgctgtttgttattgtggcagttttttttgtttttggtctatcaagctatggaaaccaaccaagtaaatcccttctctaattttcttcatgttgaccctagaaaatccaactgaatggtatctctttggcacattcaacttggtctcctatttttaataactgtgttgaaaaacatttgtgtacacttgttgactccaagaactaaaaataatgtgattttgcctcaataaatgtagtatttcattgaaaagcaaacaaaatatatagga

SEQ ID NO: 15909 - DNA, 722 bp, Macaca Fascicularis
  misc_feature (1)...(722): n = A,T,C or G
atggaaaataatgatcgattcagtaggaggtcaagcagttggcgtattttggggtcaaagcagagtgaacaccgtccctcattacctcnnnnnnnnnnnnnnnnnnccnnnnnnnnnnnnnnnnnngaaaaatgtgaactaaaaactaaagatgactcagagccacctggagaagaaatagtagaaaggacaaggaagccaagtctttctgaaaagaaaactaatccatccaagtgggatctctcttcagtttatgacacaatagcttcctgggcaacaaatctcaagtcctccatcagaaaggctaataaggccctctggctttctattgcattcattgtactgtttgcagctttgatgagcttcctcacaggccgatttttccagaagtctgtggatgctgctcccacacagcaagaggactcatggacgtctctagaacatatcttgtggccatttaccagactccgacacaatgggccaccaccagtgtgacagcaggacatcctaatannnnnnnnnnnnnnnnnnnnnnnnnnnnnnnnnnnnnnnntcgtaaattagtaacttttagctgggaaagtatagcatgaaagcagaggttctcagaatgactgtaagatagcttacatttcctctttttgcctttatctccccaactaaaatacaacagggaagaagtctgcttatgatctttgaatgagcttttattatatattgtt

SEQ ID NO: 15910 - DNA, 1339 bp, Macaca Fascicularis
  misc_feature (1)...(1339): n = A,T,C or G
taattaatggatattcttacaaagttaaacaatatagaaatatacaaagtagaaaattaaaggctaatcccactcccatataaccacctgcagacagaatgggaagatttagtcataaatacaaagacgatacatggaaaaaaatagacaactattaactctaggaaaaatgtaatcatagcatactccttggctcagaagtgaaaactatttacatggtcattaaaaaatatatgtatggatttccccctaatttttaacacagccacattgggaagattgaggaaggtagaagtataagagattgaataattctcctttatttttttattgacagaaatatatgtattttatttaacaacacgtgtgcacatatgagtagtttcttctagggaatggaatttggtgctatgggtagggcagacaagtaacacctgtgtttgattttaagccttttagagctatataactttatattttataggcatatacaatttattttataggtatttacaatttatccagattgggataaagctacaagaaannnnnnnnnnnnnnnnnnnnnnnnnnnnnnnnnnnnnnnntgaaaagtttattaacataagtaacaataaatcattcaacttttcggtcttcaggaagtttcagttttaaggattaatttcagaagtcctcatgtaaacaaatcaggcatgaataaagcccttataatgaacttttcaaataaatttttaaaatatcttttttnnnnnnnnnnnnnnnatagtattaaacatgatagtactaacttttcttatttttattaaaattagctcttcaagattgttgttaacaaatcttgatttttattactgtgctagggcaagattttaatcactaagttcttcctcatcactgaaatatgtgcttttctttatcctcgggcgtcttgaatcatctgatgttgaggggcctcctgaactgggtttccattttttttgttcttcttcaattttggcttgctggaatgctatggcctgactgaggctgtcaagagcaggatcctccccttcatcttcactttcttctacttcctcaatttcttcttctggttcaggagctttcttttttttctttttttctttcttctttggaggctcacgttctccaagcatatttttcggacaggcgtaacttaagtgtccactttccccacattcataacacttagatttatcaaagtagtttcgccttcggatgaactcagctgctcttccattgtgaatagcaatgcttgcttttatcactctgccaaataactgtttgttgtttattgccctggcannnnnnnnnncag

SEQ ID NO: 15911 - DNA, 771 bp, Macaca Fascicularis
  misc_feature (1)...(771): n = A,T,C or G
tgtgataacttacatacacaaagtgtacaaatagtctgtacatgtgtatacatccatgtaaccataaccaggatcaagacataaattatttccagcacctcagaagctcccaatgccccgccacnnnnnnnnnnnnnnnnnnnnnnnnnnnnnctgacattaccattgattcaattggattgttgttgaactgtataaaatggaaccctaaagtatatcttcctcaaactaacttctcttctgtttcctgtctctgacaatggcaccactacttacccagtacccaagcctggaagcacccttgactcttcttgctcttcccttaccccttccccttactcatcaacaactaagttgatggcaataacgtactaacagtcctcaaattcctaccaggattgccttagcctcatctgtgaccatcnnnnnnnnnnnnnnnnnnnnnnnnnnnnnnaaactactctgtggcacaaaaccaagcattaaatgcttctcnnnnnnnnnnnnnnnccttgcactaattaattgttgtgattatttacctgtttgggtctccctcattagacatgtaagagacggtgttttattgctttctcnnnnnnnnnnnnntaacccaatgtttggagtatcnnnnnnnnnnnnnatgtttgctgtcttcctgcttgtnnnnnnnnngcttgtaccccagcgcctgacgcnnntctggcatcctccgcagcatgagtattatttgtggcatggtctatgtgactctgaatatatctgttttct

SEQ ID NO: 15912 - DNA, 1267 bp, Macaca Fascicularis
  misc_feature (1)...(1267): n = A,T,C or G
ccatatgcaaatacttnnggaagagagatttcccaggcagacagcatcatcaaaaatgttttcactgtaggaatcacaaaataagattgtcaaaataactgttgaacgttatactggtcttcctcactggtggtaagctcctcctagccaatttgtggtacttccttcattttcccttgacatgttacttgttaaatatgtcctcaggcggtttcatctttgttgattctgcccatctaagtcataagcttctcaaatgcaagttactagctagtcacagttgaaagtttccataatgacatgattctaaacataaagagttcataagaatcacctggagagtatttaaaaacgagattcctaggcccacctcaaattctgataaatctgtgtgatgcagattttttctggactataataactgacgctgtcctaatgctttaatacaggccaaagtaacgtggaagcgcacagcagaaaatcttcagaaagacgtcaggtttgttctgattttgacaagggtaactttattaaagcaaataactggacataatcttaaaggattccacctccatcgtctttcctaacttacatcttcattgagaaattgtgcaaaattaagtttacttttttctagtgctgctgttttggctcgtcttggtagtctcatcttcatttctgattctggttctggaacttcatgatcactaaacagatgtcaaaatacacgaattcagacacaacctgtaaaacctagctgaaactgtcacttttctctgtcctctgttagtctttagctgagtagattttgatgcttgggttgcttttacacctctgagaggagtcatatatacttctttattcttttcatcttcgttttgaaaagtagttgtagtcaagctggcatcctgtgctgcttcagcttggtcaccaaattctttatttcctttttctaactgaatcttgattttctccaaagctctcagacatgtcctatcttttacnnnnnnnnnnnnnnnnnnnnnnnnnnnnnnnnnnnnnnnnnnnnnntggctactgagttctaaagaactcaaggcttttgtatagactcgaatttctggtgagcatggacttgttaagatctcattgcaaattttcatagccaaattgtcatgtactgttaaggcctgataatcttgggaagtcttggtctgaggatttaatccacttggtcttgtcaaatctacaagtaactcagcaacatttgtgannnaatttcagctaa

SEQ ID NO: 15913 - DNA, 784 bp, Macaca Fascicularis
  misc_feature (1)...(784): n = A,T,C or G
gatgggtagatacatatcacaacacaggtattacaggaataaccgaagcagttaaagagatcacattggaaaacaaggacaatataagacttcaagattgctcagcactatgtgaagaggaagaagaggaagatgaaggagaagctgcagatatggaagaatatgaagagagtggattgttggaaacagatgaggctaccctagatacaagcaaaatagtagaagcttgtaaannnnnnnnnnnnnnnnncagtgaagatgctattttgcaaaccagaacttacgacctttacatcacttatgataaatattaccagactcnnnnnnnnnnnnnnnnnngctannnnnnnnnnnnnnngcctttaacagttgagcacatgtatgaagacatcagtcaagatcatgtgaagaaaacagtgaccattgaaaatcaccctcatctgccaccacctcctatgtgttcagttcacccatgcagnnnnnnnnnnnnnnnnnnnnnnntcattgagactgttgcagaaggagggggagaacttggagttcatatgtatcttcttattttcttgaaatttgtacaagctgtcattccaacaatagaatatgactacacaaggcatttcacaatgtagtgaagagagcataaaatctatcctaattactggttctgatttttaaagaattaacccatagatgtgaccattgaccatattcatcaatatatacagtttctctaataaagggacttatatgtttatgcattaaataaaaatannnnnnnntacca

SEQ ID NO: 15914 - DNA, 523 bp, Macaca Fascicularis
  misc_feature (1)...(523): n = A,T,C or G
cccaacctgtgctgctgtgggatccttnnnnnnnnnnnnnnnnctttcccacccccactcctgggaggacaggaggatggggttgggtggtgatnnnnnnnnnnnnnnnnnnnnnttagtcgctggtctgtgctgccaggagcccaggccactggcnnnnntgatcccgccactcgtcccaccacccaaacttgtgctgagatcctgtgcccggcactgatgcctgagtgggaaaggattctagggccagatccgtgctggcctggcgaggactctcttggagccaccctgctgccccgggctgtctcnnnnnnnncctccttgctcctgcccccttagcaagtgtctgacccgtatcccgctacttccgctcgccatccgtctgcctctcccggagctccacggtctcctctctgtcctcagccaccgccacgtcccccttccccacatccaggtcatccaannagggaatatgaactcctccacgaccagaagcannnnnnnnggaactaactcaaatgac

SEQ ID NO: 15915 - DNA, 662 bp, Macaca Fascicularis
  misc_feature (1)...(662): n = A,T,C or G
ctacagctgcccggagtgcgcccgtgtctttgccagccnnntgcggctgcagagccaccgcgtgtcgcactaggacctcaagcccttcacgtgcggcgnnngcggcaaggccttcaagcgctccagccacctgtcgcggcatcgcgccacgcaccgcgcccgcgccgggccgccgcacacctgcccgctctgcccacgccgcttccaagaccccgcggagctggcgcagcacgtgcgcctccactaagctcgagacccggcttgagctgccctgcccctctcagggccacgaagtctgacccacacagcgtcactcactcccacacacactccctggatccgctgaggttactgccttaccctgggcctcagtttccccaccttccaaagggaggagcatcattccttccttaccccctttctagctgtgtgatgtagaccaaagtcgttgcccctccctgggcctgggaaccagtcggaactgggttccggtccagctgtgctgtgtgagcctttgcaagtgacatgacctctctaaaccttggttttctgctctctggagcggtgaaccggtggttgactgtggggaagagatgataaagagcacgggcacggtctggttcatttctgtatctaccccccttccgcccacgtcccctacc

SEQ ID NO: 15916 - DNA, 464 bp, Macaca Fascicularis
  misc_feature (1)...(464): n = A,T,C or G
tctcctcccctctccctactcccggtgctgaggctgcatcaaaccctggtagggaggggtgccgcagccactgacggtatgtgctctccttcagtcctctcccttcggagggacgtggtcttgcccactgtccttttgcctccatgctgaggttggtgctgtatttcagagggagggtccttttcattccccttgctttgtatttaaggactggggcatagcatgggggcagtcccccagacctcttcattccccctcctcctgtggtgagggctaggtgtgatcaacacttttcttctccattcccttcctgcttttttcatggtggnnnnnnnnnnnnnnnnnntaggctctggccctagttgaaggggcaccccttcctctgtgccaagaggattcatcctggccttgtgaatgggagagggggcaaggtggaatnnnnataactcacatgtaaaaggaac

SEQ ID NO: 15917 - DNA, 733 bp, Macaca Fascicularis
  misc_feature (1)...(733): n = A,T,C or G
atgaagaagaggactcaggggttagccccacttnnnctgaccactgccnnnaccagagcccaccaagcaaggnnnnnnnnnnnnnnnnnnnnnnnnnnnnnnnnnnnnnnnnnncctcatcctgccactcctggtcaccagccactcggaggaacttcagatgtgagagcagagggccgtgttcagacagaacgccaagcatccggcacgccaggaagcggcgggaaaaggccattggtgaannnnnnnnnnnnnnnnnnnnnnnnnnnnnnnnnnnnnnnnnnnnnnnnnnnnnnnnnnnnnnnnnnnnnnnnnnnnnnnnnnnnnnnnnnnnnnnnnnnnnnnnnnnnnnnnagagaggcaagaagtacggcttcattacctaccggtgttctgagcacgcggccctctctctgaggaacggcgctgccctgaggaagcgcaacgagccctccttccacctgagctacggtgggctccggcacttctgctggcccagatacactgacnnnnnnnnnnnnnnnnnnnnnnnnnnnnnnnnnnnnnnnnnaagcaagtacgaagccatggattttgacagcttactgaaagaggcccagcagagcctgcattgataacagccttaaccctcgaggaatacctcaatacctcagacaaggcccttccaatatgtttacgttttcaaagaaatcaagtatatgaggagagagcgagcgagcgtgagagaacaccc

SEQ ID NO: 15918 - DNA, 699 bp, Macaca Fascicularis
  misc_feature (1)...(699): n = A,T,C or G
aagaggaggcagcaatagantnnnnagtggaagatcccttctactgggtcagccctgcagtgctggttctcctcgcggtgctgcctgtgctccttctgcagatcactgtcggcctcgtcttcctcnnnnnnnnnnnnnnnnnnnnnnnnnnnnnnnnnnnnnnnnnnnnnnnnnnnnnnnnnnnnnnnnntccccacttnnnnnnnnnnnnnnnnnnnnnnnnnnnnnnnnnnnnnnnnnnnnnnnnnnnnnnnnnnnnnnnnnnnttgatcatctgctacaactggctacatcgaagactagcagggcaattccttgaagagctaagaaacccttnnnnnnnnnnnncacatcttggcaggggtggaggagagcctggttgcccagggattggtccnnnnnnnnnnnnnnnncatcaagttgcatactcactggcatctttgctatggggacattccaatttgcactttcaggaacactctgaattccaagtagaattgatttcccttcttctgtcatctaccttttctcttccttcattttcccatttttattatccttctttccatttctctctccagtcttccacttggaaacccttccnnnnnnnnnnnnnnnnnnnnnccctctctccatcagaggacacctgtgctggagagcaacagataggatggtctctgccatgaactggannccagg

SEQ ID NO: 15919 - DNA, 194 bp, Macaca Fascicularis
  misc_feature (1)...(194): n = A,T,C or G
tataggataaaannnataaccatgaaaaaccccgcccccgcccccgactccgtggtttccgtatcgtcaacccttcagccgccgacccgggaggggtccggcatacactggtcttccccttcccatcaactctttctgcttgacaatgtagcaaccccggccccccacccacggtcctccccttttgctctccc

SEQ ID NO: 15920 - DNA, 717 bp, Macaca Fascicularis
  misc_feature (1)...(717): n = A,T,C or G
agcnnnnnnnnnnncagaagatgatgctttaccnnnnnnncagcctcgccaccgtcaacgtggtggccgtgctggcgcgcgctgcnnnnnnnnnnnnnnnnnnnnnnnnnnnnnnnnnnnnnnnnnnnnnnnnnnnnnnnnnnnnnnnnnnnnnnnnnnaggcctgcacctttctggagtaccgtcgccaggtgcgcgacttcccgccgcctgcgctagcgctggagctgcagccgccacccccgcagcgcaactcggtgccgccgccgccgccgctgcacggcccacctgggcgcccccacgggtcctcgcccacgcgtgaccccctggacacgtgacagggcccgcgcgccccccgggacgcccctcgggcgcagagacaccgggctggctcggggcgcggtttgcatgggatggggtgggggcgggctcccctaggggcaggtgcctcgnnnnnnnnnnnnnnnnnncccgtggccgcttcttcatctcaggaatccctcggaccgcggatcctcagccccagctccaccagcccgccccagcgcgtgggtccgtttgggagctctgggccgcagcagagcagaggcggtccagcccctgcctgctggaccgcccgggttggaagggagggcagtgtgggcggagatctgctccctcggtgggnnnnnnnnnnnnnnnnnnnnnnnnnnggaggcctctgtcatttaaagactc

SEQ ID NO: 15921 - DNA, 744 bp, Macaca Fascicularis
  misc_feature (1)...(744): n = A,T,C or G
cagcccggaggtnanctactgcctggtgacagannngatcatctggacacagtatgagatacaggtggcagcgtacaacggggccggcctgggcgtcttcagcagagccgtgactgaatacaccttgcagggagtgcccaccgcgcccccgcagaacgtgcagacggaagccgtgaactccaccaccattcagttcctgtggaaccnnnnnnnnnnnnnnnnnnnnnnnnnnntcaaccagggatacaagcttctggcatggccggcagatgcccccgaggctgtcactgtggtcactattgccccagatttccacggagtccaccacggacacataacgaacctgaagaagtttaccgcctacttcacttccgttctgtgcttcaccacccctggggacgggcctccaagcacacctcagcttgtctggactcatgaagacaaaccaggagctgtgggacatctgagtttcacggagattctggacacatctctcaaggtcagctggcaggagcccctggagaaaaatggcatcattacagctctaagcgaaagacatgaggcctcagcctgaaatgaggttgttttgaggtcatctgatttctgactagaaggtttgcaattttttttggtgatggcatgttcagaatcttggatccctaagttcaatatattggaaatatttaggaactctggaaattatgttgttttcgcatacctagtnnnatnnntgaacttaggatc

SEQ ID NO: 15922 - DNA, 705 bp, Macaca Fascicularis
  misc_feature (1)...(705): n = A,T,C or G
tgtatgnnctgtagaattannnctggcttgcactgatacactgttaacactgttaaactattaccctgcatggatagaggaaggttaaaatggcttacagatggtaaaatggaagatagcctttgccacaagaaaagaggagacagcttcttgttacatgtttgttttcttctgtaagaatcatagattccagcnnnnnnnnnnnnnnnagcaggcagggttgaagaggaagagnnnnnnnnnnnnnnnnnnnnnnnnnnnnnntgtttatccattcaacttttcagtacctgctatgaagaagatctccgttctctctcccagattatagtctggtgggggaagagttaaataagtagtgatgacaatccagtgtgatagttgctaggtttgaggtatacataggatgccatggggnnnnnnnnnnnnnnnnnnnnnnnnnnnnnnnaggccccccagattgctgaggtgggcttcacaagctattttatcttatctccaggctgtaggggcaggcctgcccttaaaacccttgaaagggttttaaagcagagtgataaggttacatgaggattctaggttcctcactctggtgtagattggaagataaggtggagggacccggggaggcagggaggtaggtaaagggcaaatgtccttgtgcaggagaaagatcatggggccaggagtaaggctgatggagca

SEQ ID NO: 15923 - DNA, 752 bp, Macaca Fascicularis
  misc_feature (1)...(752): n = A,T,C or G
acaaactacatagacatttgtatgttgtaaccaaaaatatgtcagtgaaagatgcctactgaaactgttgtgatacattattctaggtagtgagcctcaggaagttgtcacatgctaaccatatctaaatgaatggatttgtaaactggaatgccacgggagtggtctgtgtatccacgtgtgtttacataaatatttgcatgtacatacacacagactctggataatttctgacagggcatttgctactgaacatgaagttcgctcaggctcagagggccagaataggacagaannnnnnnnnnnnnnnnnnnnnnnnnnnacaaagggtggtcttaaaggatagttccataaacttggtataattgggtgcactaaatgtgcgtacttcttgatattgcatctgtaattagaaacaatgatgcagacgattctgatttgttgagtttttttccttttcagcctttatgctgtacacgcccatagtacaatgcaactggataagtcatagcttccttttatattagttacagtccagtcctgtttttgaccagtagtcttcgtcagtggattcaagaaatactttgacctgaatagccttcctgtttttttaggaaccttaaaccttcaaaaatgaatgcgttcatggaaaatcttaagaaaaccattcatcttcggannnnnnnnnnnnnnnnnnnnnnnnnnnnnnnnntnnnannnngaggcagaatgaatnnagtgtttcatatttg

SEQ ID NO: 15924 - DNA, 698 bp, Macaca Fascicularis
  misc_feature (1)...(698): n = A,T,C or G
cccaaaggggacaggccttatgcctacccaaacccaaggttccaggtcccgagcagagtctatatcaaacccacgannnntccagctcagaacccagggctctgccctagtcattagaatataggtctcttctcccagaattccagggtgccagtggaaacctcaccctgggtcctaattaacaatctttaaaggcccagcccctagaaacccaggctcctcctcggaaccgctcacctagagccagaccaacgttactcagggctgctcccagcttgtaggagctgaggtttcacccttaacccaaggagcacaggtcccacctccggcctgggagcctagaccactcagcccctaggagtatatttccacacttcagaattccgtatcttgcgaatccaagccctctgccccaaaaaacttcagttctgctgcagaatttggaaatcctagcttcctctcttacctatcccgagtctgggacacaaaactccccccagcctatgagcatcctgagccccgccctcttcctgacgaaactggccccggatcagagcaggacctcccttccgaccctctgggaacctcccagaggtccagcccatttcggagcatcccggaggaaatctgcagagggttgggagtgggtgacaggagcctgatcttttcctgttttgtacatagatttatttttcagt

SEQ ID NO: 15925 - DNA, 709 bp, Macaca Fascicularis
tggaattggagattgtagacgtggttttacaaagtgtgaaatgtctaaatatctgttcatgaaaataaaaggaaaccatgtatgttgcttcagattgcataatggaaaaaatggcaatgtgaacaggttacatttctgttggtacaatgcataaagatactgaaaatataatgaaataaaagcatcttaggttataccatctttatatgctattgtgtttcaatatttaagatttaaagtgatttttttagtcaccgtgttttgttgataaaattttagaatggaagtttgaattctaagacttgaaacaacctgatcattgaagccaactttgtcccagtacattccttaagtcctaattgggggggaaaaaaaaaaaggtgaaatagttgaaaacctctgttaggtgtaaacaaatgattgttaaccctacacaccattcaattagtagtataaagagcatcacacagatttcagtctaatctgccccttcagtgggccataatataaacataaatgtatgtgtgtaatgataaaaagtaattttcttcaaagggactacaactgcttgtgtagaccagcttctaaattgttagactttgtgttgaaatgtaatatatttattgagaaagtgattttaaattagaatttttaatcatagaaatcaaagtttgggctgtattgatattgtcaatcatgaaatgtccac

SEQ ID NO: 15926 - DNA, 736 bp, Macaca Fascicularis
ctttgtgggcactgccgcccatctggtacagccccgtggcccacctgcgctggctggatcctggggcctttgggactctgggagttggcgcaggatttgcacttggggccaagctgtgccggccggatgccgaggtctggtgcctgtttggggatggagcttttggctatagcctcatcgaatttgatacgttcgtcagacacaagatcccagtaatggccttggtagggaatgatgctggctggacgcagatttctcgggagcaggtgccgtctctgggcagcaacgtggcctgtggcctggcctacactgaatatcacaaggcagccatgggtctgggggcccggggcttgctgctctcacgggagaacgaggatcaggtggtcaaggtgctgcacgatgcccagcagcagtgccgagacggccacccggtcgtggtgaacatcctcattgggaggacggacttccgcgatggctccattgctgtatagggccttgtgggtcagaatgcttggctgccttcctgcggctggactgtgtccagctggtttggagtctcatcattgcttgccctgggcctatcccatgaggcccgatgactccacaacctccctgaggaggggatggaggggtcaaagctcagagaggctcccttgtgagctcttcgaccctcctctccacggacccaactatgccctttgtcccctctcttacggagactgaataaaccacctct

SEQ ID NO: 15927 - DNA, 754 bp, Macaca Fascicularis
  misc_feature (1)...(754): n = A,T,C or G
cagactatagataagtggactggancnngtgtcttgcgggtggcagttgggattactccccaccaaggctgattttaggcagcatgtgttcactgtgctgtgannnnnnnnnnnnnnnnnnnnnnnntgtgttgggatcggccattagcagcttgctttctcttgtcacttttttttcttctattttttttcttcttctttttccccctatcagggcaagaggtctaactggtgcaatcatgaagagagttaatggttaacagacattggccagtaacaaaacaccccatggactgtgactcgagtatccagcaggcagtcagagctctcctggtctaaaagttgcattgccactgctaactttgggattgcatcagagaggccctgagtggggttgagatgaggttggnnnnnnnnnnnnnnnnnnnnnnnnnnnnnnnnnnnnnnnnnnnnnnnnnnnnnnnnnnnnnnnnnnnnnnnnttcgttagnnnnnnnnnnnnnnnnnngctgatctcccctggcatactccaacctgattggacaaaggaaactgtatggcctgggagagagactattcttaatttttctttcttacaaaaactgatttttcccataaatatttttacttcagaggactaggaccattttgttttgggcccttctgaaaatttgtctcgtttaagaggcagctaggatctttaccatatgtatgaatttgtataatttcattttggatagggataactttgctcc

SEQ ID NO: 15928 - DNA, 727 bp, Macaca Fascicularis
  misc_feature (1)...(727): n = A,T,C or G
gggggtcatggccgaagacttctccccacaagagccctacgaccgcggccggttaggccgcaatgcccactnnngctgnnngcagtggaatggacgcagcttctctgtctggtttcatgggctggaggctcccctgccgcaccccttctcgcccacggtgggggtctgcctagaatacgccgaccgtgccctggccttctatgctgtgcgggacggcaagatgagcctcctgcggaggctgaaggcctcccggccccgccggggtggcgtcccggcctcccccattgaccccttccagagccgcctggacagtcactttgcggggctgttcacccacaggctcaagcctgcgttcttcctggagagtgtggacgctcacctgcagatcgggcccctcaagaagtcctgcatatctgtgctgaagaggaggtgatgccgggcatgggcgctcctgctgcggtctctgctccaggaagctgcctcctctgggccctctccttcctctggggaaggcaccagcatgagtcccatacactcagccttctcatttnnnnnnnnnnnnnnnnntatacactcagccttcccccccacaaggcaggaggccccccagaccnnnnnnnnnnnnnnnnnnntcgcttctgagagacagagctacagctgggacagctccaagctaccctgacccctccttttccaggtttctagaaccaatgtctggcatatagta

SEQ ID NO: 15929 - DNA, 1650 bp, Macaca Fascicularis
  misc_feature (1)...(1650): n = A,T,C or G
cggtgctcgtgtaggtatttttttttttaattttatgttttcatacatgaaagtcacgccaggtgccgggacccccacagcccgaccccccgnnnnnnnnnnnnnnnnnnttgggcagcccttacggggcagagggtggcgagccggttcctgcctggaggttccacccgcaacccacggaggcacagacgttatttaaaaatcgttaaaaaacaaaacagaacacacatttaaatagggtatccaagacagttcttcaaaaaacaaacccgcccctgtttctcctttttttttttctatttttttttcttcttttttttttttttggaaaaaaaaaaaaaaacaaaaccccaaatccttgagctctaccctctgggacccctccctgcccaccccccacagaaaaatgtacagagctacagttacaacacgtgatgttcacatctgaaaccattaactttccacacgtaaaggggggagttgaggacctggggttcacctacgagaacaaaggaggggacaggcagggccaggacaagaccaacaggcggggtggggaagggcccagacatctccgttatcattaaaaaataaaaagtgagtggggaaaaaaaaatgcaaaaactaccccattgaaatggccccaggaggggatttgtccctnncctctggagccagacacccctagggcaggggcaccgaggggcggggggtccaaattagaccagcagcggaccccgccacgggggttaatgctacacggagttgttgccccctgcccagggnnnnnnnnnnnnnnnnnnnnnnnnnnnnnnnnnnnnnngaggggcccccagacagtcccaaatccacgtccctcaggttgggccaggaaggagggctcggaggggggaactccccagcacccagccattctctcccctttttcaagagttcnnnnnnnnnnnnnnnntgagtcagnnnnntaatagtctataaataccccaagctcaggcaggtcagaaaacatgggggtgggggcggaggaaacagcacagtctgccggctggggcggggcggagggcgggctggggggtgtagttcccctctcccttccccgcaggaaagggtgccacgcccctgcacccaaaccctgtgcggaccccagccccagcctctatgctaaaacggctttgctcccctttttaaagaaatgaaggaaaatgcaaaaagagaccaagaaaaaaggacaggagtggaagagaaacagtcccctcgttggcttctgtgacctgttggcttgctgtcgcccattgggtgctgctggcctggggtggaggccccgaagtctgcactggggggggatggattatgcgcgctgtggccccctccccttatnnnnaaagtgcataatgacgtatcaacatttttgacttaaaacaagaataggatcgggggaaaggaggcggaggaagggaggggggcaggtttctccttcactctccgccatccacagactgctacatattggagctggggaacggttggcagggaggactgacccggcgcagaggtgaaaggagacaggtaggaagaggaggaggaggaagtgaaggaggaagaggagggcaggagtggagcggtgaaggaggtaggaagcaaagcccacaa

SEQ ID NO: 15930 - DNA, 739 bp, Macaca Fascicularis
  misc_feature (1)...(739): n = A,T,C or G
ccatttagtattnnncntcnnncaaatacatgaaaggatgcacagagaagagaagccatatgaatgtaagggttatggaaaagcattcggtttgcccagtttatttcatagacatgaaaggactcacactggaaggaaaacctatgaatgcaagcagtgtggcagatccttcaattgttcgagttcctttcgatatcatggaaggactnnnnnnnnnnnnnnnnnctatgaatgcaagcaatgtggaaaagccttcagatctgcctcacagcttcaaatccacggaaggactcacactggagagaaaccttatgaatgtaagcagtgtgggaaagcctttggatctgcctcacaccttcaaatgcatggaaggactcacactggagagaaaccctatgaatgtaagnnnnnnnnnnnnnnnnnnnnnnnnnnnnnnnnnnnnnnnntgcatggaaggactcacactggagagaaaccgtataaatgtaagcaatgtgggaaagcttttggatgtcnnnnnnnnnnnnnnnnnnnnnnaaggactcacactggagagaannnnnnnaaatgtaagcaatgtgggaaagtctttagatgttcttcacaacttcaagtgcatggaaggactcactgcatagacacccannnnnnnnnnnnnnnnnnnnnnnnnnnnnnnnnnnnnnnnnnnnnnnnnnnttcaagaccagcctgggcaacatggtaagactctattataaaa

SEQ ID NO: 15931 - DNA, 752 bp, Macaca Fascicularis
  misc_feature (1)...(752): n = A,T,C or G
gagggnnnnnnnnnnnngccatgctcctnnagattcnnnacnnnnnctccctccgcacctccctccccctcgagccgccgcgatgtcccctgagctcctgtcccctcccgcgtagtgcttgcctttgttccaggaatagcgttccaggctcctgctgccgcccctgggcctcactctggagcgagccgccgccctctccttccagccagccagcccctcccatgcacatttggacgctgtcctgcgctccagctgcaagctgggctcctgttacacactggacagaccacccactgccgccgctgccaagccccctcctccccaccagactgccagacgactacatcattctgcccacagacctgcgctgccactgccatcgccatccatcgcatcccactgacagactgctgctcctagtgatctggactcacctcggaggtatctgggctggccacagtccttggacagtgatccagacagctggccccccaagggatctgtcaccttcagcgagacctatttcctccccacccccagaaacctcttgtgttccagcctagacctgccagggctcaggtgtgcctggcaaccaaatcgaatctctcattttctcttgtggaccagttagttttgcctattcctgttttcttctgaattgcaactgtctctctgatgtgtgccttttgttcaacacagtaacccctgcattctgctctgctctaatacactacctggagaaagtcttttcc

SEQ ID NO: 15932 - DNA, 525 bp, Macaca Fascicularis
  misc_feature (1)...(525): n = A,T,C or G
caggtttanntaagtannnnnnnnncnctcatcaacctatgcaagtcccccaccccggccctccatgtttctgagcctttgctcatcccctcaatctcccagggcttctccagtccccctcccactagctgcaggaagtgggatggacgggccacctcgtttggaatcagcagggtgtcccnnncatgggaccctcccctctccccagcctgtcctgtctagttcattctccatcaggnnnnnnnnactgtgcctggcactgggagatggtgagggacaccgtctcacacacacagggaggcaagagctgccccccacccnnnnnnnnnnnnnnnnnnnnaggacgcaggcggccccactctgatgggcaggaccctgaccctctcccgctccagccccctccccaggccctccatgatttcgccctccccacccacttctgtccccagccccactggcagaatcagctttgagtnnnnnnnnnnnnnnnnncgctgtggagaagacttatttgttggagttcac

SEQ ID NO: 15933 - DNA, 717 bp, Macaca Fascicularis
  misc_feature (1)...(717): n = A,T,C or G
tcctgggaggaggcctgcattctatgttggtgggaannnnnnnnnnnnnnnnnnntgnnnnnnnnnnnnnnctttcctggggtttcttttctgttcttttcggaggagaagggcccgagaagggccataccagggcgcggcgctgggttgccacacttgggaaagcagcccggagctgggtgctggggaaggcggggcgcatagcctcccgccgccctgcggttgggccggtggaggcccaggcgttgctaggattgcatcagttttcctgtttgcactatttctttttgtaacattggccctgtgttaagtatttcgaatctccttcttgctctgaaacttcagcgattccattgtgataagcgcacaaacagcactgtctgtcggtaatcggtactactttagtannnnnnnnnnnnnnnnnnnnnnnnnnnnnnnnnnnnacccccaccccatccctttcgtgccactcccgtccccacccccaccccagcnnnnnnnnnnnnnnnnnnnnnnnnnnnnnnnnnnnnnnnnnnnnnnnnnnaaataataacattattatgagaaagtggacttaaccgaaatggaaccaactgacattctatcgtgttgtacatagaatgatgaagggttccactgttgttgtatgtcttaaatttatttaaaactttttttaatccagatgtagactatattctaaaaaataaaaaagcaaat

SEQ ID NO: 15934 - DNA, 783 bp, Macaca Fascicularis
  misc_feature (1)...(783): n = A,T,C or G
cccatcagttcacacannnccagcggnnnnnnnnnnnnnnnnnnnnnnnnnnnnnnnnnnaccnnnnnnnnnnnnnnnnnnngtgtggagaattcaacactttcgaaataaactatcaatcttgcccannnnnnnnnnnnnnnnnnnnnnacaacnnnnnnnnnnnnnnnnnnnnnnnnnnnnnnnnnnnnnnnnnnnnnnnnnnnngtggtgtggtccatgtgatgctcaatggatcnnnnnnnnnnnnnnntgacaaaaacagcacttttgggannnnnnnnnnnnnnnatttgcaaccagagaaggttcaggcactagaggcctgggtgatacnnnnnnnnnnnnnnnnnnnnnnnnacttatgccaggatcccaccataaaagagctggaatcgattataagcaaaaggaatattagatttttctgcaagaatatctacaggtgcatggagctgattatacagtattaacagaaatcaacatgggnnnnnnnnnggagcagatggcccactccctgtgtattcaagggggaatctctacttcagcctgaacttggttaaagtcacttcccccataccccttcccagttgctgcctactgtgttgtctggaaaactctggtcttttaggacgacagaggatgagaagcctattactcccaaagacacaaacatgccccatgagcacnncatagcttttattgtgatctaacaataatcatgaaagcttccccaaacaggggagattgagagttttcctttaaaatgtttttatttttaac

SEQ ID NO: 15935 - DNA, 777 bp, Macaca Fascicularis
  misc_feature (1)...(777): n = A,T,C or G
ttacttaaaaacaaaaatccttggagacagatagtgaaatgcaaactagntnnnaaattaccagttcnnnacaggaagatgcagtttgccagtgtttagtcnnnnnnnnnnnnnnnnnnnctctgtatctaaatcagaacccaatttctacacgtgttgaataagctaacagcctttgatgaatttccctcacaacatggttttagtgaagcagacaattttattttttaagggcattgttctttctagttcatttctttttatgaaataaaattattttgtttaaacatagttccattgtcgtttctgaaaaatacagtattctcataagttgtagcagcagtaaaaaaaaaaattgttatataagtggttggggcagatttaactgattttgttaaaccaatttgtaggttactgcttctaatattacacttctaaaaagctgaatttatactcatgtcctaaaggagaatatgtgataatgaagtacatttgttaagtaactaattgaaataggcttggttttaagagttccggtatataatagtcaaaagttgaaacctaattgacagtatctcttggagttccagtaatgtcacaaattagtgaataagcatgccagtgtgcaagggtaatgtaaggattgttagcctatctaaatattcaaaattactttaaaacttcagtatgttttctgatttttaagaattcagaagtgttctgtaatggattcagatgtttcatttgtagtataatgaannnntacagaaagatact

SEQ ID NO: 15936 - DNA, 759 bp, Macaca Fascicularis
  misc_feature (1)...(759): n = A,T,C or G
gtttttgctttttttcnnnnnnnnnnnnnnntgaacattcccaaatattggagcctctgtggcctcagatgnnnnnnngtggagggagacccagcatagccattccactatggagcacctcactgaacatccctcaaatattggagcctctgtggcctcagatgnnnnnnngtggagggagacccagcatagccaggccagtatggagcacctcacgcaaatccctnnnnnnnnnnnnnnnnnnttgcacatctagagacagagacnnnnnnnnnnnnnnnnnnnnnnnnnnnnnnnnnnnnnnnnnnnnnaaatcctagagtgtagagtgtcctggttgtgcctcaccatctctgtgcgtgcagtgatgtggagccctggggctgtgcannnnnnnnttgctgtctggctcagcagatccggaaaggggaggatattgttgaagagcaacaaccactcaccctgtgggggagaaaggtgctgggaggggaagtccaggcttcctttgtgccagctaccgggagggacactcacctcatcatgtaatagtgagaagtccagactgctcacaggaggaaaagtggggtacagaccttgttccatactacacttgtaactctcaaagagtgtggcaagacgggcacaattatacatgacaaaggtgccactctttgtgccctttgtggagatgttcttgtcagccagagccaggaagagctagacaatatggagcacagctgcagcatctcnnncttgatg

SEQ ID NO: 15937 - DNA, 717 bp, Macaca Fascicularis
  misc_feature (1)...(717): n = A,T,C or G
catctgtaaactattattccccgccctccactccccactttttttnggtttcttttaattttaggaatgtaactccatcnnnnnnnnnnnnnnnnnatgccagagtggaacatccaggagggcgactgtctactgtctgcttatttaagtgactatatataatcnnnnnnnnnnnnnnnttattaccgaaaaannnnnnnnnnnnnnnnnnnnncagtcatttctgcctatttatttctgctttgttattagtgatgtatatacaacattttgttgaaannnnnnnnnnnnnnnnaagctttaatggactcgtaagccagcatgggcttgcaaaaatttnnnnnnnnnnnnnnnatcttcttatcnnnnnnnnnngctatttacatcctggactaaataacttataagaagtaaaactaattgcactnnnnnnnnnnnnnnnnnnnnaaaaaaaaaatctctgcgagtgaaactgtgtagagtttataaaatgactatggataggggactgttttcacttttagatcaaaatgggtttttaagtagaacctagggtttctaactgacttgatttctggaaatgannnnnnnnnnnnnnnnnnnnnnnagcttctttaactgcttttactattgtgaagtnnnnnnnnnnnnnnnnnnnntcatgttttgttttccccagggctttcactgtgatcantcnacnnnggcccaaagccc

SEQ ID NO: 15938 - DNA, 747 bp, Macaca Fascicularis
  misc_feature (1)...(747): n = A,T,C or G
tgcagcaagaaaacttgggacttgaatggtagctcccgttatatggattcattgccccagctactggagtgtagcctacagtgtttatttcagtcaatattcctttatctgggtgttctgtacaatgtttattacagtcaatattccttcatctgggggtgttctgtgaagatagccatgtttatggggatcttagttttcaaactctggcaattctgtgaaaaataggagcaaactagagagccctagaaattggtggtagggaggcgaagatagcaggaagttttaaaaattagcagccccgggnnnnnnnnnnnnnnnctatcatcattttcatcattattattattttggttaggatggcttgaaaatcagaacatatcttggtttacgtagtcgaggtcttaaagaactaggaacagttaaatagtcccgactgccagcgtctgacttacataatcattggtgtgggcttcattttgcgtttagagtcacatctttcagtaagttcacagagatcaagagggatgtgcaacatacagcttaaaggctgttatgcttcggagttgctgaagaagatgaaacatcagcctgccatcgtctagaagagacattggccagtgtagtcgcttggcactgcccatcatgctgagggagcagattcttcccaaggcagcttcagctaggagttgtaagcaaggactttgtgacacatttgtcctctttaactgagccttttcactgtcc

SEQ ID NO: 15939 - DNA, 756 bp, Macaca Fascicularis
  misc_feature (1)...(756): n = A,T,C or G
taacatattgattgatgcatgtagacctaaatttgtgttagcgaccccacagtggatcactgagttaaagttttattaacagtgccannnnnnnnnnnnnnnnnnnnnnnnnnnccacctcggcctcccaaagcagccactcctattctgagtcttggtttcttcacctagaaagtgagggtttggactagacaagtggctttcagggtgttctgtgaatcccctcatgaatactttagggtgggggacggaagggagtaagtgannnnnnnnnnnnnnnnnnnnnnnnnnngttcatcagtttcacactgggactgctacataatacttttgtcnnnnnnnnnnnnnnnaaaaagcannnnnnnnnnnnnnnnnnnnnnnnnnnnnnnnnnnnnnnntacaactgtaggccaattatcactttaccagttaagagttaggccagacaagtgaaatttaactgaaggtcacacagctattaagtaataggcctacaactggattttcttattccaaatcctgtcttttccccactattccattagaccccacaaatgttagttgtgtgtgtgtgcgtgtgttttttnnnnnnnnnnnnnnnnnnntgcatttttttaaggcaaaatttctcccttacctactatgatgacttcagaagatacaatggtccnnnnnnnnnnnnnnnnngcattttaaagaccaatctgaattaagctttatcaatgtgctcttcatctgnnnnnnnnnnnnntngta

SEQ ID NO: 15940 - DNA, 762 bp, Macaca Fascicularis
  misc_feature (1)...(762): n = A,T,C or G
cagcctgccacgatcctgtgtcacnccagatggctacctgtatgagcgtgaggccatcctggagtacattctgcaccagaagaaggagatcgcccggcagatgaaggcctacgagaagcagcggggcacccggcgggaggagcagaaggagcttcagcgggcggcctcgcaggaccatgtgcggggcttcctggagaaggagtccgccatcgtaagccggcctctcaaccctttcacagccaaggccctctcgggcaccagcccagataatgcccaacctgggcccagtgtgggtcctccaagtaaggacaaggacaaagtgctgcccagcttctggatcccgtcactgacgcccgaagccaaggccaccaagctggagaagccgtcccgcacggtgacctgccccatgtcggggaagcccctgcgcatgtcagacctgacgcccgtgcacttcacaccactcgacagctccgtggaccgcgtggggctcatcacgcgcagcgagcgctacgtgtgcgccgtgacccgcgacagcctgagcaacgccaccccctgcgctgtgctgcggccctctggggctgtggtcaccctcgaatgcgtggagaagctgattcggaaggacatggtggaccctgtgactggagacaaactcacagaccgcgacatcatcgtgctgcagcggggcggtaccggcttcgcgggctctggagtaaagctgcaagcggagaaatcgcggccggtgatgcaggcctgagtgtatgc

SEQ ID NO: 15941 - DNA, 711 bp, Macaca Fascicularis
acttaaaacagtatcttaaggtagatggtgattagcacatgtagtatgcctaacgtttaatattataataaaacatcagagtggctctctcatgattaaggctgtgttcccttgttggtgaggaaattaattatgacttgatgcacagaacatgttttaagaagtggctatatagctctggataaaatgaacaaaagaattagaattcctggggagaatatataaaagactgttatttagtcaagcaaaaacaaaacaaaacaaaacaaaactaatgtttaactgaagaaagagaaattgagtaatatagttgtatttcaacatgtgggttcacagatttagtctaacctttcaaggatccactagtaaagttgttctggagtgtatttttaaaaacacacacttaaaatgttccacttctttcatgaggctaagtcaactctgatatcaaaccaaggggaaaaaaatgaaagtataggtgagtttacttagttatatacaaaaggaaattattagcctctattgatggagaacagaggctctgaataaatggagatccataacatgatcctagatgaatatttcaatattgtaatcctgtaagttacttttacattgacagttctgaaattcatgttgagtgttaattagggagctatcagaagggagattttgtagaaggtcatatcccatgggtttttttatattgca

SEQ ID NO: 15942 - DNA, 715 bp, Macaca Fascicularis
  misc_feature (1)...(715): n = A,T,C or G
cgcagncnnngcacgccannctcgcagcagccnnngaggaaggacnnngacaagaagaattaatgcacgcacagacttacatgtcaagagtggactttagactttcatgtgttaagttgcttgagttacaccttgtgacccttctcccataacatggtgtgaggacggactggnnnnnnnnnnnnnnnncagtgtttacagccttgctttcccctacccgaccctggccccaggctgccccaggcctggcgggccacccctctctatgcaaacacgtaaaagccaggaatgctggaatccaaaactgacgaggtttatttttttcagagccagtggctggtcttccatttacagtgtcactattccnnnnnnnnngctgttatgtgccgctccagtgaaggcnnnnnnnnnnnnnnnnnnnnnnnnnnnnnnnnnnnnnnnnagatggcaactcacgtggtgccctaggtgcagctgcgtggtctggtatacatgctgcaaaattcacccagttcccctcattttaatttttctaacctagagcttaattttaataactttaaaacacttctaaatatnnnnnnnnnnnnnnnnnnnnagacaaataatatcctctcccattattttcataagtaacacagatttcctgatttttaaaaactaaaaaataccgctaaacctttcttatgtataaagtatgcctatcatatacagg

SEQ ID NO: 15943 - DNA, 771 bp, Macaca Fascicularis
  misc_feature (1)...(771): n = A,T,C or G
ctgcgtccaagtcggctccatccatccccaaggagaacttcagttgcttgactcgtttgnntcacaaccgagctaaagctcaaattgctcttaaacttggtgtgactgctaatgatgtaaagaatgtcattatctggggaaaccattcctcgactcagtatccagatgtcaaccatgccaaggtgaaattgcaaggaaaggaagttggtgtttacgaagctctgaaagatgacagctggctcaagggagaatttgtcacgactgtgcagcagcgtggcgctgctgtcatcaaggctcgaaaactatccagtgcaatgtnnnnnnnnnnnnnnnnnnnnnnnnnngtcagggacatctggtttggaaccccagagggagagtttgtgtccatgggtgttatctctgatggcaactcctatggtgttcctgatgatctgctctactcattccctgttgtaatcaagaataagnnnnnnnaatttgnnnnnnnnnnnnnnnnnnnnnnnnnnnnnnnnnnnnnnnnnnnnnnnnnnnnnaaggaactgacagaagaaaaagaaactgcttttgaatttctttcctctgcctgactagacaaggatgttactaagtgcttcaaagctgaagaatctaaatgtnnnnnnnnnnnnnnntaccaattaatagtaatgctcacttaaattacttgtgaaaaacaacacattttaaagattatgtgcttcttggtacaggtttgtgaatgatagtttatcatcatgctgttagtatgca

SEQ ID NO: 15944 - DNA, 587 bp, Macaca Fascicularis
gccccgctaccccccatacactactcccccacgaatgagacggcagcgctctgcccctgacctcaaggagagtggggcggctgtgtgagtccgacatcctgggcagagggcctggtggggccccttgttaggagaagggaagacgcccgagacgctgcttccccggaagctggggcagggaggcccaggagatgagagagaaggtccgagtaggtgatagaagacgcaggggaggccgagctggaggctgaggaaaggaagagggcacggagttgccaggagcaaaccaaagtgaagcgagagaggaagctgcctcggggccacccctcgcaagggggtgggtcccacaaacgctgctatgggtggggtggggggctggggggctgcgtagccagtgtttgactttctttttaagtaggggaaagggggagaggacagagtgaggcaagttctccccagcccctgtccatctgtctgtctgtggtggtttctgtttctagggagacatggtaggatcataagtcattcccctcctcctccaggcctcctgctgtatttgggggacctgactggtgtggcggagtccc

SEQ ID NO: 15945 - DNA, 664 bp, Macaca Fascicularis
agctgcgcgcggctgctgctgctctggggctgcacggtggtggccgcaggactgagtggagtagctggagcgagttcccgctgtgaaaaagcctgcaaccctcggatgggaaatttggctttggggcgaaaactctgggcagacaccacctgcggtcagaatgctaccgaactgtactgcttctacagtgagaacacggatctgacttgtcggcagcccaaatgtgacaagtgcaatgctgcccatcctcacctggctcacctgccatctgccatggcagactcgtccttccggtttcctcgcacgtggtggcagtctgcggaggatgtgcacagagaaaagatccagttagacctggaagctgaattctacttcactcacctaattatggtgttcaagtcccccaggccggctgccatggtgctggaccgctcccaggactttgggagaacatggaagccttataagtacttcgcgactaactgctctgctacatttggcctggaagatgacgttggcaagaagggagctatttgtacttctaaatactccagtccttttccatgcactggaggagaggtaagggcacctgtttaactctacactgtaagtaagatagaaaaatgttaccagcccacatttttttaaagcatgaagctatact

SEQ ID NO: 15946 - DNA, 753 bp, Macaca Fascicularis
  misc_feature (1)...(753): n = A,T,C or G
tcaccagctttggnnnnntacgannnnnnnnnnntacaacaannnnnnnnnnnnnnatgaagaatttcaagatgccataagaagggctgnnnnnnnnnnnnnnnnnnntaaagggttcccaatacattttgtgtatagaaatgcaagacgtgcatttgccacatgtcttcgatctcctttctgtgaagaaataatctgttgccgtggagaccaagtgcgannnnnnnnnnnnnnnnnnnnnnntactnnnnnnnnnnnnnnnnnnnctgtttggatcatgtttgcttgtaaatatcgctcggtattatannnnnnnnnnnnnnntaagaattatacctgtgtgtaattagaattttacacattgtacattacttagctatttagaggtttgttattttaaaatnnnnnnnnnnnnnnnnnnnnnnnnttcaattttgtatatacttgactggtaatgtttaaaaaaaaatcatgtgttcctttaaaaattaaggctgaaaaacttgtataaatctccctggaatttagtataaattaagtgtatattctattttaataaatgctactttgtttacagttaccagtagtttaaatattaatataaaatgcattcagttttctttacactaacaggtaatcaaagagagatttgtctaagggtttgagccctagaaaaatcaatatgatcattacttttcacaggttaatgggattattttatacaaattaggagaaattaacttcatgacagat

SEQ ID NO: 15947 - DNA, 606 bp, Macaca Fascicularis
  misc_feature (1)...(606): n = A,T,C or G
ttctggggtctggtcgtgggcaggatggtgcccaaaagggggtcaggttgtcccagtgaagattctgttgccctgtctcaaccccatctgactacccctgactctgcctgcctcacannnnnnnctatcctgattaatctggggnnnnacatcanncagggaaagaatggtggggacccctgtgcttgggggatacacacctgcatcttccccccgccggccccagatggaggccctcaggatctgacgccctcttgtcccaacaccagtcagccctatgccctaactcactccgaccccattttctccggctgcctggccgggtttctacctctcgtcacctgagctgatcactgtcagttttgtaccgatttagaaataacaataatagtgaagattctaggaatggcataatggattgatgcggtaattggagggagggagaagtggtgccctgtcccctgccccctgaccaaagaaagctgtccttgaggctgagccctcagccctggcctggtgggaggacagcagggtcccttgttataagacgggcagagaggacaactccactttggccaacttagccaaggctgcagcatatagact

SEQ ID NO: 15948 - DNA, 154 bp, Macaca Fascicularis
caccaagagtgagtggcagagacttccaggtaatgagtctgcccaggcgccgttgatctgtaccccacccctatctaacaccaccctttgctcccactccagctccctgtattgatataacctgtcaggctggcttggttaggttttactgggg

SEQ ID NO: 15949 - DNA, 712 bp, Macaca Fascicularis
  misc_feature (1)...(712): n = A,T,C or G
tcactnnnnnnnnnnnnnnnnnnnnnnnnnnnnnnnnnnnnnnnnnnnnnnnnnnnnnnnnnnnnnnnnnnnnnnnnnnnnnnnnnnnnnnnnnnnnnnnnnnnnnnnnnnnnnnnnnnnnnnnnnnnnnnnnnnnnnnnnnnnnnnnnnnnnnnnnnnnnnnnnnnnnnnnnnnnnnnnnnnnnnnnnnnnnnnnnnnnnnnnnnnnnnnnnnnnnnnnnnnnnnnnnnnnnnnnnnnnnnnnnnnnnnnnnnnnnnnnnnnnnntggcgagctgttatttttcaaacaaaacaaaaatacgtcacaaaannnnnnnnnnnnnnnnnnnnnnnnnnnnnnnnggtctctgatagcagaaacagtagatgcttacgaattggtaataacatttgagtagaaatactctgattacaaggaacatctaacctatgatactgattctatcatacatcagaaaggtaggtttccagagttcagaggaggctcaaaattgtttaagttgtctacctcatggttattaataatttataggagatttgagggaaattttcaattttgtttatttaattttattttaatttgacaagactttggtatcttttggttgtgctggttcattgttctatcgaacaatgttgactctaaaaagaatgttttagacagcataaatcaatggannnnnnnatacatttgcaaaatgacatgacact

SEQ ID NO: 15950 - DNA, 741 bp, Macaca Fascicularis
  misc_feature (1)...(741): n = A,T,C or G
tggcactcttcagcccagggagtgggtnnnnnnnnnncaaggatcaatttcccaaccacagtgaaggcagcgctcctcctccggagatcaccaagcccctctcacctccctccctccttcccaaggctggcactaaccaggtaccacattcattgttaagaagtggctggtgactgctacacgtgtcaggaacctgcctgggactgtgcagtttgggctggaaggagagatgccagcccttgtgctgcctctggtccctgaagtgtcacctccatcaggacctctcctctggtctggggagttataagtgatggatggcagaaaggaagaactgactcctgtcccgaatagctcccctgccacctgtcctgcagtgggcctgtgtgggttatgattctannnnnnnnnnnnnnnnnnnnncagctatggatggggtagtgccttggtctgtcttgaccacctcgtccaaagagagcactgcccttagaaaggagctgctggtgctgctgtgggctgggctccagctgtagaccttcagttgtttggtgttcactttgctcctcttgccctctgtcttctggtccaggcagatcaggggctnnnnnnnnnnnnnnnnnnnnnnnnnnnnnnnncagccttttccagcatcccaatcagaacggccgggatgagcaggaggccagctcccaggagnanngggaaccccttcataaagttcannntggctgggtagngtgagtt

SEQ ID NO: 15951 - DNA, 803 bp, Macaca Fascicularis
  misc_feature (1)...(803): n = A,T,C or G
ggctggncnncnntccctggnnnnnnnnnnnnnnnnnnnnnnnnnnnnnnnnnnnngcagcacagnnnnnnnnnnnnnnnnnnnnncannnnnnnnncgacagggtcctcatgtcctggggccacgatggtgaggccagactggggcagtgggggacggtggggcagaggtggtgcctggtggtgacaccctctccccacagagtacatgtaccaggtgatgaagtttaacaagttctcactgcccccggaggtaggtggggggaggggcagcccggccccggccaccaggccctgtcccgcagccgagacagctgctgggtatggcttgcccacaggcnnnnnnnnnnnnnnnnnnnnnnnnnnnnnnnnnnnggcnnnnnnnnnnnnnnnnnnnnnnnnngtgcagccagcaggacctggccatgctgccctgggtgcaggagttcaagtacagccctccccgccgagggggcttgtgggagtgaagcggcgggggtgggacctgggggttcttcacggggctcaccgcctctccctgctgcagcaagttcgacctctacnnnnnnnncccaagctgctgctggacccaggcctggccctcctactaccaggggctcatgccctgggcagacagccgccatcagggttcaccttggtgggggaccccaagctgctgctggacccaggcctggccctccgcctgtctggagaggtctggccctgggcagacagccgccatcagggttcaccttggtgggggaccccactcacccccttagggtcgccacccctcgtggcaac

SEQ ID NO: 15952 - DNA, 697 bp, Macaca Fascicularis
  misc_feature (1)...(697): n = A,T,C or G
cagtcctatcnnnnnnnnnnnnnnnnnnnnnnnnnnnctgcagtgcccctgctcccacgtcccccagacagctcggtggagggtcctgcgtctgggccaggctggggtgcacccagtcaaaagacaaagctgcctccacgtgcccaaggattcannnnnnnnnnnnnnnnnncgaggagtctgaccaaaaatggagccagccctgtgggaagccctgactccgcccacgagaaacaggcccacagtgaggatatcccccttccccttgtggggcacagctggcctgggcctccgattctgtggagctttcagggtgtggccttgacctcagaagtggctctggtttggcctcaggagtgtgtggcnnnnnnnnnnnnnnnncagcctcctgggggacccttggtgccacnnnnnnnnactcccccgcttctgccaaaactgcacagacacatgcattgtaaggcctgctcacggcctcaagtgtgcactcttgtttacgtcgtcaagaccagtccttcatttgtgattagttttgcttcgcgagccctggtgtggactgtggtgtgtatgaatcgtgtgttaactgtggtgaggggcttgtcctgtatgtgaatgagtctgtacccannnnnnnnnnnnnnnnnnnnnnnnnnnnnnnnnnnnnnnnnnnnnnnnnnnnnnnnnnnncaacagtaat

SEQ ID NO: 15953 - DNA, 607 bp, Macaca Fascicularis
gacggccctgacgaggtgcaccgggccacggtggccaagctagagctgaagcaccgcatttagaggcttggggctgcaggagcccagtgtcctggctggaccagccatgctcagatctgtcactgacgtgccttgaaagatccagtgtgtgtggctcctgcaccctgctcagcagctctgtcccaggacagtcagggtgcactcaagctttctggttctccacagaagacatctctgcaagaagcctaaagtctgtttcaggccaggaagaggggatttgctgagggccaagggggttccaggacagagtctggaaagctggtcttcaggctctcagtcccgggctgggcaggcacggtcacttcacttcagcctctcagtccctctctctgcctgtggggatctggacacattttgggaggcctcccgaaggctgtgggacatgcttcctctggcagctgcagggttcctgtctggcctccctggtgagcagaggggtggccacgatgggcagcagcctggagacccagggcctgagcgcctgggaaaatggaatgcaacccacattgtaaagccactggcatctgattatctccatttgaacaca

SEQ ID NO: 15954 - DNA, 908 bp, Macaca Fascicularis
  misc_feature (1)...(908): n = A,T,C or G
accaaaataatgagtatgctattaaagagcaaaagtggggagggatcagggaacaagaaaacaagaaaggatatgatcaattattttcttctgctccaaacagtcggagtaaaattcatgggaaatggcccttaatttaaaaaaagatgtacctcactacccactacaaatttggaactttatttgatcttttcaataattagttttctattataaattatctactaaacagtggtagccatgacatggaaagtcaactgattttacaaattgaacattcatttgtgtgccctggaatttccaactagtaataaacaactactgttgatgtagttttaaaattaaaaccactcgaagggactcatgaagcatcttgcaacataaatttgcatttttacatcagatttttttttcctgaaaaacaaccttttataactgtctttcaaaagtaaacgtaaaaatgcacaacataaaatgtttannnnnnnnnnnnnnntacactttttaaaaaatgtgaaagtccaagaattaagttctagttctgactcatcacaagaggtcaaaagtatttgctactgtaacattcaattcacatttgagaatcatggtaaaaataacttgcatttgccttatacatgatcctactgttgagttcggaaaatatggttagacagacttacgttactttttttcagaggtaaattctagattactgtgtcaacctaatattttctatttggccatagatgtaaaatctaccaaataaaagtggattttgtggtctacaacattttgtttaaagtgaattcatgtctgctaacactgtaagtctgccatttaatccagagtgttagactactaatgaatatggtaaggaaaatataaaatattaatggtatctgctttaa

SEQ ID NO: 15955 - DNA, 760 bp, Macaca Fascicularis
  misc_feature (1)...(760): n = A,T,C or G
cgggcaaggaccccctggagggtcagcggcactgctgcggtgttgcacagatgcatgaacacagctcnctgggccacggtgacctggacgccctgcagcagaacccccagcccctcgtcttccacatggaaatgctgaaggtggagagccctggcacataccagcaggacccatgggccatgacggatgaagagaaggcaaaggcagtgccgcttatccaccaggagggcaacaggttgtaccgcgaggggcatgtgaaggaggctgctgccaagtactacgatgccattgccttcatcaagaacctgcagatgaaggaacagcctgggtcccctgaatggatccagctggaccagcagatcacgccactgctgctcaactactgccagtgcaagctggtggccgaggagtactacgaggtgctggaccactgctcttccatcctcaacaagtacgacgacaacgtcaaggcctacttcaagcggggcaaggcccacgcggctgtgtggaatgcccaggaggcccaggctgacttnnnnnnnnnnntggagctggacccagccctggcacccgttgtgagccgagagctgcgggccctggaggcacggatccggcagaaggacgaagaggacaaagcccggttccgggggatcttctcccattgacaggagcactcggccctgccttatacctgccaagcccaccgctgcagctgccagccctcctgcccctgctacgtcatgcttctgtgtatataaag

SEQ ID NO: 15956 - DNA, 847 bp, Macaca Fascicularis
  misc_feature (1)...(847): n = A,T,C or G
gaaggccctgnnnnngatnnnncttgcatgagacgtgtggggatcaatgtgtnntatgtgatttgtttatcaagttggctttgcttttttagtatttctttaaaaaaaaaaaaaaatccttcccatgttactaaattaatttatgtttttgagaggttgagtctcaaagtgtaaacaataaacccccttcttaaggtggatattgtaagcttgatggtggtggtgaaagtgatttagctttgaccacttttcatcttccagcttcaatatcaaactggttaggaaagcccagggggaagggaggggcaggggaggaggcaattctgaatgaatgaatggattttttgttgcttttgcatgtttaatatagaagtttcctttgttccttgggagatcatggcctttgaatatgcacacaacctttgaattgtgcctactaaattatagcaggggactnnnnnnnnnnnnnnnnnnnnnnnnnnnnnnnnnnnagtaattcccagccatcctctggactttattttgctaaccataattgagcaaatgtaaattactgctatattaatgttttaaagcactgggatagtctaattctaacttgtaattaattnnnnnnnnnnnnnnnnnntttgaaataaatttgtgtctgaacagctattgaaactgttaaattgtacagatattattcatgacagctttgtactgtggaatgtgcttaataaaaaacaaaaaagtttgacttttgtccaataaattgctaagtaatgtcaataaatcaagtatgggtattatgcagtgcacctaatctggcttcatgcaattgttacttcagctactgatcaaagcc

SEQ ID NO: 15957 - DNA, 709 bp, Macaca Fascicularis
gcacatatggaggagactccaaaaagaaagggagccaaagtgtttgggagccttgaaagggggttggataaggttatcactgtgctcaccaggagcaaaaggaaaggctgtgccagagatgggcccagaagactgaagcttcactataatgtgactacaactagattagtgaatccagatcaactcttgaatgaaataatgtctgtccttccaaagaagcatgttgactttgtacaaaagggttatacactgaagtgtcaaacacagtcagattttggcaaagtgacaatgcaatttgaactagaagtgtgccagcttcaaaaaccggatgtggtgggtatcaggaggcagcggcttaagggcgatgcctgggtttacaagagattagtggaagacatcctatctagctgcaaggtataattgatggattcttccatcctgccggatgagtgtgggtgtgatacagctacataaagactgttatgatcgctttgattttaaagttcattggaactaccaacttgtttctaaagagctatcttaagaccaatatctttttgtttttaaacaaaagattattttgtggatgaatctaagtcaagcccatctgtcattatctgttactgtcttttttaatcatgtggttttgtatattaataattgttgactttcttagattcacttccatatgtgaatgtaagctcttaac

SEQ ID NO: 15958 - DNA, 746 bp, Macaca Fascicularis
  misc_feature (1)...(746): n = A,T,C or G
acagtatggtgcagcacttatttacacttcagtaaaagaaaacaaaaatatagacttagtatataaatacatcgttcagnnnnnnnnnnnnnnnnnnnnnaagattcctgctgttgttgtggaaaaggatgcagtnnnnnnnnnnnnnnnnnnngataatgataagaaaataggaatattacatgaaaattttcaaacattaaaagcagaagataatnnnnnnnnnatcataactaaaccacctgttcgaaagtttgtacatgagaaggaaattatggcagaagatgannnnnnntttcttatgaagctacagtcccttttagcaaagcagccaccaannnnnnnnnnnnnnnnnnnnnnngcctcaccaagagtcccaggaggctccccgcgaacaccaaatagatctgtatcatctaatgttgccagcgtatcacccatccctgctgggtcaaaaaaaattgatccaaacatgaaagnnnnnnnnnnnnnnnnnnnnnnnnnnnnnnnnnnnnnnnnnnnnnnnnnnnnnnnaaagactggctctccaggaggccctggtgtaagtggtggtagccctgcaggtggggctggaggtggaagcagtggtttaccaccatccgccaaaaagtcaggccagaagcctgtcttagatgttcatgcggagnnnnnnnnnnnnnnnnnnnnnnnnnnnnnagtttctcccacaacacctacatctcctacggaaggagaagcttcttgaa

SEQ ID NO: 15959 - DNA, 1316 bp, Macaca Fascicularis
  misc_feature (1)...(1316): n = A,T,C or G
tcccctggcccgacatgctcgagtgcgaccgtttcccccaagacannnnnnnnnnnnnnnnccnnnnnnnnnnnnnccacctcctgccggccaccgaggaagctccaaaggtatgtgaagcctgcaaaaataaaaatgatgacgacaacgacataatggaaacactttgtaaaaatgattttgcactgaaaataaaagtgaaggagataacctacatcaaccgagataccaaaatcatcctggagaccaagagcaagaccatttacaagctgaatggtgtgtccgaaagggacctgannnnnnnnnnnnnnnnnnnnnnnnnnnnnnnnnnnnnnnnnnnnnnnnnnnngnnnnnnnnnnnnnnnnnnnnnnnnnnnnngggacagaaacagggtggggannnnnnnnnnnnnnnnnnnnnnnnnnnnnnnnnnnngcagagagagttcaagcgcatctcccgcagcatccgcaagctgcagtgctagtcctggcatcctgatggctccgacaggcctgctccagagcacgnnnnnnnnnnnnnnnnnnnnnnnnnnnnnnnnnnnnnnnnnngcacactcccagctgctccagcctcagcctggacagcttccccctgccttttgcacgtttgcatccccagcatttcctgagttataaggccccagggggccacaggagtggatagctgttttcgcttaaaggaaaagcccacccgaatcttgtagaaatattcaaactaataaaatcatgaatattttttatgatgtttaaaaatagctcatgttaaagctagttttgaataggtgcaactgtgacttgggtctggttgnnnnnnnnnnnnnnnnnnnnnnnnnnnnnnnnnnnnnnnnnnnnnnngtggtcacaacgtgcaaattgcttcaattttctctctggcccaaacnnnnnnnnnnnnnnnnnnnnnnnnnnnnnnnnnnnnnnnnntcaacatcttcctcagctccagactgagactcagtgtctaagtcttacaacaattcatcattttgtaccnnncaatgggaacttcaactgttacatgtatcacattccagctacagtacttccatttattaaaagcacattaaccatttctatagcatgatttcttcaagtaaaaggcaaaagatatgaattttnnnnnnnnnnnnnnnnnnnnaagccttgtttaaaacatttcttacttaacttttgcaaattaaacccactgtagcttacctttaatatacatagtagtttacctttaaaagttgtaaaaatannnnnnnnnnnnnnnnnnnnaatannnnnnnnna

SEQ ID NO: 15960 - DNA, 740 bp, Macaca Fascicularis
  misc_feature (1)...(740): n = A,T,C or G
ctgccgggcctgtgaaagattgtatgccaagctnntcatccaataagtatggcttagattacctgaaaaatnnnnnnnnnnnnnnnngtgaacattgtttccaagaacnnnnnnnnnnnnnnnnnnnncactcccctaggattggnnnnnnnnnnnnnnnnnnnnnnnnnnnnnnnnnnnnnnnnnnnnnnnnnnnnnnnnntccatcagggaggaaacagaaaaaaatcccagctgctctcaaagaagtatcagcaaacacagaggattcttctatgagtggctacttgtacagatcaaagggcaataaaaaaccctggaaacacttttggtttgtcataaaaaataaagtactatatacatatgctgcaagtgaggacgtggccgctttggagagtcagcctttattaggattcactgttattcaagttaaagatgagaattcagagtctaaagtatttcagttacggcacaaaaacatgttattttatttattcaaagcagaggatgctcattcagcccagaagtggatagaagcatttcaggaaggcacaatannnnnnnnnnnttggtttcatctcttctgtgattccaaagaggtnnnnnnnnntcagaatggagtaaatgcaattcgaaaattgtataaaaatgaacactgccaagataaagccaaccagacccttcatcaaagaaattgttttgttaggtataagcaattttaaaaggtgtttgttttttca

SEQ ID NO: 15961 - DNA, 716 bp, Macaca Fascicularis
  misc_feature (1)...(716): n = A,T,C or G
gccaggcccctggatcccaagtcctttgtgtctggagccttacctggcctgtgcctggaacgtagcacatctttccagcctcncagggctttgcagcctgcagatgccacctgcccctgagagaagttagcatccctggccctggctggtggtctctcatccttgtgtgctgctctcctaagagatgtccaaggcggagcaggggcaggatcctccttccacactcatctgtcagagccccaaaccctttagacccacagcccaaggaccatgccactccctttggggcatggggactgcagcctttgcttctgtgtcttttggagtttcggtgacttttgtcacctggacacactcaattgttagccatagtgggtccccttggtcagcaacagtgcatgtacctctggatgtcacctgaggtgagaccaccgaggccttttctctctgtgtacagaggggagttaggagctgctggactggatgcattacaaggactggggacacggcagagggacatccagggatcagggcatgagtgggggcagccccccggcctctgccctggcatggtctccacatgggctgtggcatggctgattggctgccacatttcggccatgtgggctggtgtgcccatgttgcaggtattttcccgagttccccagaatggatggtatcgaatctcagccacatgcaacactgtgtccagcatc

SEQ ID NO: 15962 - DNA, 739 bp, Macaca Fascicularis
  misc_feature (1)...(739): n = A,T,C or G
taaaagttacaagtgnnnnnnnnntgactgcgtgagccttagaaaataaaatgtataaagggcaacacatgagctgtcaaacagtgttaggtatgtgtttatatgtacagagttgtgcatagcaannnnnnnnnnnnnnnnnatatgtagtctactcacattttcattatttagcaattttgtacaaaaatagcaattaatttgtaaacactgccagaatactttctagctggtttgtaattttttaagagtgttatttcgttttgttgttttttctgttctttgttgtggttcttgttttcttttttgttgtacgtgtagatctgtaaataaaattgcagtatttaaagcttaagctttcaggaaaaagaaaataagaattcagtgtgtgcatgacaactcgtgtgtatgagaaggagggatttgaaggaagatggcttgcnnnnnnnnnnnnnnnnnnnnnnnnnnggnnnnnnnnnnnnnnnnnntacggggtacgtgattttgtaaaaaggaagtatttctcccaaaattggnnnnnnnnnnnnnnngaatcagtttagctttgtgttgtatgctagtttaaaaaaggaaatatgtaatataatgtaaaaaacaaccacaaaaaaaaagcttttatgatggattttgtaaatagatttgttacaggnnnnnnnnnnnnctagctgtgatcttaccacttcaaatgggtgtaatttgaataaattttgctatggta

SEQ ID NO: 15963 - DNA, 746 bp, Macaca Fascicularis
  misc_feature (1)...(746): n = A,T,C or G
agcccagggtannnnagactccagtttcatcctgaacctnnnntgctgctgggattgacgcctgccattggtcaggctgacctggcctcccgtggaccacttgctgccttaggnnnnnnnnnnnnnnnnnnnccagaggactagctgacnnnnnnnnnnnnnnngtgccaacgggcatggtgccctgcctgcccccgggcaccacctctgtacacttccctgacactttcccaggtgtgggtcactgccacctgtgccatgggcaccctagagcacccactcacccaccatgtctgaccactgcagttctctcctcatgcccacgggcactggcctgtgaccttcgcaggggtcccggcccctcccaccactctagcctttctcaggctgcaccaaagattccatcatcagggccaactgagagtgagggagtctcacccaccacttaccccagtcctcccccgggagcagagagagaaaccctcttcatggaccagactctgcacccggtaaatgaggacagtcccagctgagtcccatcgatgttgaatctcatgccactgcaagtgccattcaccactgcgtcctgggctttaccagaccatgcaagacgggggttagtgaggaaggaggatttggggtgggggtggggcgattgactatttgtataaaaagcaaaaaggaaaaaaaaaatgtttactgattggggaggggcaatatttatttgttgtaaatagcaaatgcta

SEQ ID NO: 15964 - DNA, 1277 bp, Macaca Fascicularis
  misc_feature (1)...(1277): n = A,T,C or G
tacgaagacatcagcaaaagaagaagatgcttttcattttgtcagttatgttcctgttaatggaagactgtatgaattagatggattaagagaaggaccgattgatttaggtgcatgcaatcaagatgattggatcagtgcagtaaggcctgtcatagaaaaaaggatacaaaagtacagtgaaggtgaaattcgatttaatttaatggccattgtgtctgacagaaaaatgatatatgaacagaagatagcagagttacaacgacaacttgcagaggaacccatggatacagatcaaggtaatagtatgttaagtgctattcagtcagaagtnnnnnnnnnnnnnnnnnnnnnngaagaagaagtacagaaattaaaaagatacaagattgagaatatcagaaggaagcataattatctgcctttcattatggaattgttaaagactttagcagaacaccagcagttaataccactagtagaaaaggcaaaagaaaaacagaacgcaaagaaagctcaggaaaccaaatgaagaggatgttttgggatgtgtacacatttctgcttctgcacatattttcatggaaatcattatgtataaagaaccttgagcaacatcctaattggctcagtgcacgtttggcggtagtgccagcctgtcttgtctttaatgcatggattcataaacttcttccctacctgcatcatgtgcatgtagtgcatattaaatgaaagtgatattaagagtgcttgcccaaattccattatttgacattgaatctgagaactgttagttttctggatgtgtaactaccatatgaacctagaaaatgcacaaatgatactccttatctgtaatttaaatacttaaaatttgcaattgtcagatcttaatgaaactggatgtcttatttcttatcatcattaataggaaaaaaatcagtatttctatctttgatatctgagtgttttgaggattttaaaactgaattttatctgctataccagttatttgaaaaagtatgatttaaatgtaaatcatttaaaaaggacaaaagtataatttccagtgattttcactgctgtcagtagaaaagtaataaacatctcaattttattttagtaatttttnnnnnnnnnnnnnnnnnnnnnnnnnnnnnnnnnnnnnnnnnnnnnnnnnnnngtcttgagtattacgcttcaaagcaaaatttcaggttaagaagaaattgtaaatcttaaagaatgttggtgttactctcaannngaatactttt

SEQ ID NO: 15965 - DNA, 746 bp, Macaca Fascicularis
  misc_feature (1)...(746): n = A,T,C or G
gatgcggatgaacgcggnnnnnnnnnnnnnnnnccacttcagccagcnnnacgccaaggtccccctctttagccccgacttcaacgagaaagtgggaattgcctttgaccacatgaaggtctcctttggagactttccaacagtgcccaagctgattcnnnnnnnnnnnnnnnnnnnnnnnngcgacattgaggagatggaggagcgcagggagaagcgggagctgcggcaggtgcgggcggccctcctgtccagggctctgacagacgacctggaggatggggagccccagcagaaacgggcccacacagaggagccacagagcaagaaggtcagagcccagtgaagatctgggagtgaccctgaactctgacggctgtgtgtcttctgccccacgcacgcacccgtatctgccctccnnnnnnnnnnnnnnnnnngagcacggtccacgcaggaggcagctcaggataggtggtgtggagttgtgccgaggcttggactcccagataagcactagtttatagacgcctcttaggactggtgcctggcacagccgtggaacaggaggctgctacacggaagcaagcaaatgaactaatttcacttcaaggcagtatttaaagaagtcatggaaacagacggcagcacctttcctctcatccagcaaagtgattccctgcacgccagagacaagcagaggagtcgcaggaacactgggtctaagtgaccnnnactcaannnnnnna

SEQ ID NO: 15966 - DNA, 728 bp, Macaca Fascicularis
  misc_feature (1)...(728): n = A,T,C or G
tgtagagcaaaannnnnnnnnnnnactaaggnnnnnctannnnnnnnnnnnnnnnnnnnnnnnnnnnnnnnnntggatgacttccccagtccagttcctctccgttactgacttctgtcccagcctctgttaataagtctccatccacacnnnnnnnncccatcagatcacatcccaaccagctagagtgtgagattccaaaatgtaggatacctctcatgccctgccagcaccagtcagactcccctgctcaccactcctgcatcaggagctcccaactgcctgctcacccacccacacactcttataaggtaatggtaagcatctgcccaggattatagtagtgggtggctgaaaagagtaaacnnnnnnnnnnnnnnnnacaacctcaggctctgggcccttagcatattcactgtccagatctaaagcggtacgtttgacatggcttttcttgttactgggggatcaaatggatgaggtcaggatcatcaggtgctagagtgaagaggcaaaccaggtgaggcagatagcaggagtggggtgaaagggagaagcaagggagatagccctgtccagaagtagcctaagagggaaataggagcatgcaaagcactaacacagcaggagcgactggggaataaaagaccagggctggagcaccacatctcagcatttataaacagttactttgctataaaagtcacgagtaataataatacacactt

SEQ ID NO: 15967 - DNA, 1053 bp, Macaca Fascicularis
  misc_feature (1)...(1053): n = A,T,C or G
atgaagagaaaggacttgcataaccaaaataaacaaagcaagacacattaaaaatgtgtgggggagagagaagtgaaaagtggttttcttaatgcagccctgctggtccccagtaacaattgcttgaaattcacgtggatgtaaaattataattgtcagtatcttattcagatgatcttttaaggtttagctggttttgcttttgtttatctatatgtcaaaatacttgtaaattgggaaaaaacttctctcagcttctnnnnnnnnnnnnnntatccttgccattggaagaccannnnnnnnnnnnnnnntttctttcacataatatgctgagaaatatttcttatgctttttactacaaacaaaattactcacctggattaaagannnnnnnnnnnnnnnntttagattatctttaatctccatgaaattgtgaaacaagacaggaataatgtttcagctataggccgttttacagctaattgcccataaattgtagcatttattgacctgaagtactaagctaattgtcttgactactcaaagcccctgaattgttgtcaactttctcctttgtgttgtgtagccctaacgtcatttagcttgttgtctgatgcctccagtaggacacctttgatggagctttgatttctgagnnnnnnnnnnnnnnnnnnnnnnnnnnatctcgcataggctgcctatgatgaaggaccgtgcacctccactccaacagagtgctgagtttaaagctgacctgtgtttgtaatttcactttcatcttgcttaataaatatctgctggattctttcatttcacttttttacatttggatttatgtttttaataaaaggggtgttatactatttgattgcacttaatcggcaaaatttaaggtgatctctagaaagcatatgttaagtccatgaaaagaaaaaaaggtgtgtgaggacatttactttctaaagctaagtcataacaaacatagacaaagcaccccaaatgtttctctgaatgttacgtttaggatctctgagttaggtcgtttcctgctgt

SEQ ID NO: 15968 - DNA, 699 bp, Macaca Fascicularis
  misc_feature (1)...(699): n = A,T,C or G
actggacacagcttgctggagnnngcccccagcccctgaagcccttgccagactgtggannnnnnnnnnnnnnnnnnnnnnnnnagacaatgtggcgggatggctgggggnnnnnnnnnnnnnnnnnnngtccagtgtagcctggctctgagagaaggtggtgagcatgtggagaaggagaaggttccatagtccactcttaggggaaccagcaaagcctcatggcagttggctccatctggacctcccatggtcactgcagggcggtggagcggggcatcctttagcctccccaccaccacatccaggccctctcaggcacctcctgcctcagcccacacctgcctcgtccattgcccccctccctccacctactgccatcccactcctccgccagccacttcccagccgccccaccccactccgtcctccaaatcaccccccaacttaatcctttctggaaggagctgccgcccgggaaccggtattgcctagagcctccaggaggggccctcctcaggccnnnnnnnnnnnnnnnnnngcctgcctgaccctccactgnnnnnnnnnnnnnnnnnnnnnnnnnnnnnttgcgtcatctggggcccccagtggggtgggggggtgtgggctaaccttggccaccaccactaaaggaatgtgccagaatgctgaaccttcttgttaatgctatgaccg

SEQ ID NO: 15969 - DNA, 723 bp, Macaca Fascicularis
  misc_feature (1)...(723): n = A,T,C or G
caggaaggatggcaagcannnnncaggagggnnnnacgatagagtgggagatcagccacagagcccggagggacgccacccagcaacacnnnnnnnnnnnnnnncgctgcaccgtcacacnnnnnnnnnnnnnnnnnnnnnnnnnnnnnnnnnncagagagtcctttgggattctaggaaacccaaggaacaagagaaaaaactagannnnnnnnnnnnnnnnnnnnnnnnnnncagtgtgaggctgggactcgtaaatattcnnnnnnnnnnnnnnnaatcaagagggcagcctcccctttcctacaaaatggagagagccatcccttccctgtccacctcaccggggtgctgtcacacgcaagtgagannnnnnnnacgtacgcaccttatgaaagcaaannnnnnnnnnnnnnnnnnntacaaggacaatgtcttgggagagattttgtcgggacagagaggagttgccagggaagaaggtttgaaagatacggttgtctagaggtgagaccaaaggatccagagacttggggaccagaggtgacagtggatgatgtgaagccataggatccccgcccccatgcagccccttccccccccaccatnnnnnnnnnnnnnnnnnnnnnnnnnnnnngttgggcttgggggaaaagaggtggattcctgggcaagaacctaaagtagcaagactcggaattcttgggaaattattatgactca

SEQ ID NO: 15970 - DNA, 702 bp, Macaca Fascicularis
  misc_feature (1)...(702): n = A,T,C or G
caaccccccaaaccctgcnnnnnnnnnnnnnnnnnnnnnnnnnnnnnnnnctaatggaaccaacacttcagctcctcaagacatctatgcggtaaatggaatcgcgttccatcctgttcatggcacccttgccactgtgggatctgatggtagattcagcttctgggacaaagatgccagaacaaaactaaaaacttcagaacagttagatcagcccatttcagcttgctgtttcaatcacaatggaaacatatttgcgtacgcttccagctacgactggtcaaagggacatgaattttataatccccagaaaaaaaattacatnnnnnnnnnnnnnnnnnnnnaagagctaaagccccggaataagaagtagtggctggagactctggcccggccagagttgttctctccactctgcctcatctctatacgaatttgggtcccagccttgttgggttgtcagccatggacatggatttcaacccctggagaaaannnnnnnattgttgagcagccaagagcccaggcgtccgcggcgacttgccgtctctccattccactgcctgttgcagagtttttctctaactctaagggggttgaggttactatagacgttagattgcgggcaccgccagggattttgcagtgcttcagtgtacgtgttagagaatattggccaannnnnnnnnngccccgtgctgt

SEQ ID NO: 15971 - DNA, 894 bp, Macaca Fascicularis
  misc_feature (1)...(894): n = A,T,C or G
ttcaaccagttcaggaatgaggctatttggccnngactggctgatctnnagctcaaggatctgcttcaaatgcacacaggcctagttgaagtttaaaccccagcaaaacattcctccctgtaannnnnnnnnnnnactgctacccgctcccctcccctgtttttttttcccccccaagatcattagtttagcaactgcctgtcctcactgcctctcctatccgggacaggctgggacctttgaggaagataaagccttccttgannnnnnnnnnnnnnnnnnntccctgttcctcactcagagagnnnnnnnnnnnnnnnnaggcttatttcagtaagttccacaattccacaagactgcaggaagtctccttaagggannnnnnnnnnnnnnnnnggccccagcttctggaaatggcggannnnnnnnnnnnnnnnnnnnnnnnnnnnnnnnnnnnntgtgtcctgggaaaccccatcagtcctttcattncnnnnaactcaactcctgggaagagaggggtctcaagaggggtccctggaaggagggcgggggcggtctgcacgtatttcaggttgtggctcttggttctaggactcttacttctctggctaagggttcagcttcttgggacttcaactatcttccttctgaaagaccaaatctaatgtaaccagtaacgtgaggactgccaagtatggctttgtccctatgactcagaggagagtttgtcgggcaaattcaggtggatgaagtatgtgtgtgcgtgtgcatgggagtgtgcgtgggatatcatctctacagattgcaaataaaccagacaaacttaccaacgtcttgatcggtgtattttggggatggttctgggctcagcaaattnnnacaagctaatac

SEQ ID NO: 15972 - DNA, 615 bp, Macaca Fascicularis
aacatatgggagtttccatatgaacctcacgggtggagctggggcgggggagtgtggaaatgggggctgggtaggaagagcacgtaccaaaagaagcacatgctcttctctataagaacaggggtaatgctgagcagacagaacaacagatgggcattagacaggtccattcgtgctgactctataggagagaggaagcgttttgaactcccttcagttttgccaaatgaatgggccacagatcttgctatagctataggcctccaccagctcattcattactgccaggtccatcttattatttgccaaaatatcccttcacctctgtgtagacagaatcagtatctcacttgcacactcttgtgagttttacaaactgtgggttacaacacactagtgagtgatgaagttggtttagtgagttacaagcaacatcaaaaaaatagaatagcagataattgaagagaaagtatcatcagtaaggggaagtactattacttcataaagttgtttataaagttgtaaaaagtttacttcataaagttgtaaaactaaatatagtatatgtatatatgataaaggaataccagatcactctgggtttgcaatatgaca

SEQ ID NO: 15973 - DNA, 724 bp, Macaca Fascicularis
  misc_feature (1)...(724): n = A,T,C or G
ggaaatgaaactcacctgtctatcacagatgaatgtgctgaattannngggttgtatctgatcatggttcacaaaaattatgttagtgtgttttcagtatgctgaaaagtcagagtgatgcaacagtgatatttaaaaatatacacacacgtatgtacacatgttcagaaatattgttgcttaggatgatttnnnnnnnnnnnnnnnnnnnnnnnnnnnnnnnnnnnnnnnnnnnnnnnnnnnnnnnnnnnnnnnnnnnnnnnnnnnnnnnngaaaatgagccaggtagtctaaaagatcctggtgacaaattaagaattttgttttatttttaaccaaattgagattaaattgaagaaaagcaagcaaattaatttcagcttcattatcaacctatatcaagaacaaaaatgggagaaggtgtccacatttatggtgcgtataggtaacatgggggaaaatgctattctgtgttttggaaaagaagaaatagtgccgtcctatttatttctatatttagaaatttttctcaaagaaatttcaattgtatctatgaggtgggtttctaagtatcttattgtgtgttataagtgcctttttatatcatactaagtgtgannnnnnnnnnnnnnnnaagannnnnnnnnnnnnnnnnnnnnnngtatttttataacctcattgagaagactaagaaatgaaatttcctatcaattttttgttcact

SEQ ID NO: 15974 - DNA, 760 bp, Macaca Fascicularis
  misc_feature (1)...(760): n = A,T,C or G
gtgagagcagcccaaggntnnnagggtgcagggaactccggagctgcccacnnnntgctgccccctctgtacacgcagccagtccccaggtggcctaggggctaaggctggggcggcttttctcccttttcctggcccttcctttcccacctgtaaaccaaagaaaggagaggcaggtgctcgtgtaccccagccccactcagcactgacagccctcagcttctagcagtgagctgggaggcgcttcctaagaccctttcctcagggctgcccgccctgggagctcattcctggtnnnnnnnnnnnnnnnnnnnnnnnnnnnnnnnnnnnnnnnnnnnnnnnnnnnnnnnnntgctgggcagggagcagccgcaggccagagaggcctcctggtccagctcagggacgctcctgccagcacaggggccagggactcctggagcaggcacagagcgagcccaggctgctctccccagctcaggcccctttccttccccactggggttggggtaggtgggggcggtgagggctccgagttgtcagcgctcaggaatgtgctccgggagagtgctgaagccataatccccaagcatttcccttggctgacgcccaggtactcagctggcccactccacagccaggcctggccctgcccttgaccatgggtgttttcagaagtggccatcgagaggtctgggtggttttatagcaacnnnnnnnnnnnnnnnnntgtatctgtaaatannnnntatagagtaca

SEQ ID NO: 15975 - DNA, 805 bp, Macaca Fascicularis
  misc_feature (1)...(805): n = A,T,C or G
ccacatgcaagttcanannnnnnnnnagnnnntgcnnnnncagtgatgcgttctttagaaatgccagcccactatattcagaaattcatcctcagggcacaaaacttccagcaagtcactgtcatggtgaaatgggcggtgggagggggtgttctttaaacagccctccttcccatctagctggccagtaccnnnnnnnnnnnnnnnnnnnnnnnnnnnnnnnnnnnnnnncctctctggggacagcaacnnnnnnnnnnnnnnnnnnnngccccagatctctccagccccagagctgaaaacaccaannnnnnnnnnnagggcgtctgtctggagacttagagtttgtcatgtgtgtgtgtgtttggttaatgtgggtttatgggttttctttctttttttttagtctacattagggggaagtgagtgcctcccacgtgcagacagtgtgtctttatnnnnnnnnnnnnnnnnttccccaatgatgtcggtaatttctgatgtttctgaagctcccaggactcacacaccgtttcccatctcacttgcccacccagtgtgacgaccctcggtgtggatgtacccctgtggactcatggctcttccccacccccacttnnnnnnnnnnnnnnnnnnnnnnnnnnttctctgntgcaaaanncagctaagttcctgtttccaccttgatgttgaaatatcctatgtaagagagcagggggtgtcgtgaagatggcaacaagaacacagtctcaaatttctggaaaagagcctgtggtagagatctaaagatgtttagggaagagct

SEQ ID NO: 15976 - DNA, 766 bp, Macaca Fascicularis
  misc_feature (1)...(766): n = A,T,C or G
acagaatgagccttggaagtacgactgcagcggctggaacgagagcgcacggccaagaagannnnnnnnnnnnnnnnnnnnnnngaggagcgggaggtgaggcgcatgagggaccgtgaagcnnnnnnnnnnnnnnncatgcaggagacagatgagcagcgggcacgccggctgcagcgggatcgggaggccatgaggctgaagcgggccaacgaaaccccggaaaagcggcaggcccggctcatccgagagcgagaggccaagcggctcnnnnnnnnnnnnnnnnnnnnnnnnnnnnnnnnnnnnnnnnnnnnnnnnnnnnnnnnnnnnnnnnnnnnnnnnnnnnnnnnnnnnnnnnnnnnnnnnnnnctgcctgtaagtggggtggagttggacannnnnnnnnnnnnnaagatggcctttgaagannnnnnnnnnnnnnnnnnnncattcttctaccacatntgactgaccttcctccccacctacccacccacccacccnnnnnnnnnnnnnnnnnnnnnnnnnnnnnnnncacccacgaggccctgtccttgctgccagaggcaggcctgggtttgttgcaggtggaccnnnnnnnnnnntgcatgtgggagcaggatgacggggtcaggagggacctggcccaaggcagctctggacaagggagcaggcagtccagagaactggcctccccagcccactgcgacaggccgtgcttctaggactgtggggctcctgtatggcccatgaaggntgtgaggtc

SEQ ID NO: 15977 - DNA, 733 bp, Macaca Fascicularis
  misc_feature (1)...(733): n = A,T,C or G
accatataagagcnnnnngccccaaagcttgtgggcacatgggcgcatacaaacacacagacacacacatatgtacagacgtgcactctcacacacacaggcagctgcatacaaacgtttctctaggtacagctcccaggaacagctaggtgggaaagtcccatcattgagggagcctaaccatgtccctgaacaaaaattgggcactcttgtattccttttctcttgtgtccctactcattgaaaccaaactctggaaaggacccagtgaactggtatttatacctctaatgaagcacagagagaggagagctgcataaactcacacaacaatgaactacagacatagctgttctctccctccttcccagagtgatttgtacgttactctcaagctgtcctttggggacaaggtgtcatggtcttaagtgtctgtgccccagggcagaccttaggaccctagatccaatagaaaatgcatctctttgctccactttcagccaggctggagcaaggtgtcttttctcaggatcttgggagggaatggaggcccctctatgtatgatcttgttgaggtgtttagctgccatgcacctgtccccctttaatattgggaattttagagcaatctcaagaagcatcttctacatattttgtatgcattataataatttcaaagatatctgagaaaagcctatatttgccattcttctgtatcctggaatacatcctg

SEQ ID NO: 15978 - DNA, 697 bp, Macaca Fascicularis
  misc_feature (1)...(697): n = A,T,C or G
attgttagnnnngnncagcgtccagccagagacctgnanntcccccaaaccaatnnnnnnnnnnnnnnnnnnnnnnnnnnnnnnnattttgggaactnnnnnnnnnnnnnnnnnnnnnnnnnnnnnnnnnnnnnnnnnnnnnnnaccatgaaggnnnnnnnnnnnnnnncctttgccatcccttctgatcnnnnnnnnnnnntnnnnnnnnnnggggaaaagaagaattcctcctctggaatcagtgggtcccagcggcgctacattgggnnnnnnnnnnnnnnnctgagtcccagcatccttgctgaactacagcttcgagaaccaagctttcctgatgttcagnnnnnnnnnnnnnnnnnnnnnntcatcctgggctcccctgcacaccgggctggtctgcggcctggtgatgtgattttggccattggggggcagatggtacaaaatgctgaagatgtttatgaagctgttcgaacccaatcccagctggcagtgcagatnnnnnnnnnnnnnnnnnnnnnnnnnnnnnatgtgacccctgaggtcacagaatgaatagatcaccaagagtatgaggctcctgctctgatttcctccttgccttcctggctgaggctctgagggtgccgggacagagggttaaatgaaccagtgggggcaggtccctccnnnnnnnnnnnnnnnnnccagggct

SEQ ID NO: 15979 - DNA, 744 bp, Macaca Fascicularis
  misc_feature (1)...(744): n = A,T,C or G
tgtattgaaccacagnnnnnncgagcttctaaatgtagcctttcattgcacatttcagtgatcagaatagatatctttctacacacacaaaagcaatagattcattcagtggacaatttccttgtttaactacacagctatgatggaatgatatatccaagttccttccctcagtgaaatatgcatatgtatatcatgaaagtgggatgccaagtaagcttaaaatggcattctctagcaaagagattagacttttaaataactcttataaaacaggttggcgatcattttccaagattggtttcccttgagtttttgctaaaacaaatcttagtagtgctgcccgtttaaaacaactcacaatcgtaaatgctactattcctaagatatcttaccttttaatttcagtttagccatgtattgtatgagtgtattagtctcagcagtgagaatattttctgtgcctctatttcagcaaaaagtagaagtatcaaataaaaagggcaacttttaaaatattaagtctgaagacttctaaaaagacaagaaatatggcctaaataactgcacagatttatatagtaagtttcatactactttattaccaaaagcaaacacctcttactttaaactacgttatcatagatatctattgtatgctggtctgtactttttgccaaaatcaacacataatgaagagatggctttgtttcatgagattcaaacttgatgctatgcttaaaa

SEQ ID NO: 15980 - DNA, 695 bp, Macaca Fascicularis
  misc_feature (1)...(695): n = A,T,C or G
cggcnnnacaagacaaagcccacccatggcattggaaaatacaagcacttaattaaagcagaagagcccaagaagaagaagggaaaagtggaagtgagagtcattaatttggggacagattatgaatatggggttttaaacattcatctgactgcatatgacatgaccctggcagagagttatgcccagtatgttcacaacctctgcaactctctctccgttaaagtcgaggaaagttatgcgatgccaaccaaaaccatggaagtgttacatttgcaggaccaagggagcaaaatgttactggactcagtgcttaccacccatgagcgagtggttcagatcagcggtttgagtgctacgtttgcagaaattttcttggaaataatccaaagcagtcttcctgaaggagtcagactgtcagtgaaggagcacactgaagaagatttcaagggacgattcaaagctcgaccagaactggaagaactgttggccaagttgaactagctactgtagactcttttcatgcccgcaatggtcatattgagtgccaaggagaagagcttacnnnnnnnnnnnnnnnnnnnnnnnnnnnnnnnnnnnnnnnnnnnnnnnnnnnnnnnnnnnnnnnnnnnnntgtcctccttctctgtggcatggctgtacttgccatttgttaccacttatctatgaggcaa

SEQ ID NO: 15981 - DNA, 727 bp, Macaca Fascicularis
  misc_feature (1)...(727): n = A,T,C or G
gcagtgggcctgnnnnnnccttgcttccctaacaggaaggtgtccagttcaagagaatccacccagagactgggagtgnnnnnnnnnnnnnnnnnnnnnnnnnnnnnnnnnnnnnnnnnnnnnnnnnnnnnnnnnnnnnnnnnnnnnnnnnnnnnnnnnnnnnnnnnnnnnnnnnnnnnnnnnnnnnnnnnnnnnnnnnnnnnnnnnnnnnnnnnnnnnnnnnnnnnnnnnnnnnnnnnnnnnnnnnnnnnnnnnnnnnnnnnnnnnnnnnnnnnnnnnnnnnnnnnnnnnnnnnnnnnnnnnnnnnnnnnnnnnnnnnnnnnnnnnnnnnnnnnnnnnnncatatccaaaaaaaatttaaaaaagggttgccagagacgagcatgcccatgctccctctacctcactgccaccactcctgctgttaggggctgagtgtgtctccctaaaattcctatgttgaagtcttaaccctcggtaccacagagtatcactgtatttggagatggggtctttagaaaggcacttaaattaaaatgagctcactggtgtgggccccaatgcaatatagttggtgtccttataagaaggggaggttaggacacgcaggaaaggccacacgaaggcccaggagtgggagggggaatagccatcaacaaactaaggaggggggctcagaggaaaccaaccctgctgacacctcagtcttagactctggcctcaaaca

SEQ ID NO: 15982 - DNA, 1177 bp, Macaca Fascicularis
  misc_feature (1)...(1177): n = A,T,C or G
tattggagagtaattgttagctaaatattcaagaaaaagagatattcaactcgtcaaaatcacccctgataatgttattactaatcttaattatttattacatctctttcccaatggatctaatattttaattttttttccctattggtagagaataannnnnnnnnnnnnnnnnatattatacccttggagaaataaagttgaaacagaattaaaaatacttnnnnnnnnnnnnnnnnnnnntataaattaaattaattcatttttgtgtagacattggaaatcacaaaaataataacattgaaataattctactaatgcagtgacagaaacacttttcttatgtaccaagacataggtaagagaaagaaagaattaaagtgaattagaaaatccattttattgcttgggtttaaaatagttatgggatacaagtatttacaatgctattggagtcaattattgacaacactnnnnnnnnnnnnnnnnntttctagtttttcaattggcaatacttagaaccctactgtagtgacctgattttaaataccatatttactaagttaagagctagtttttacnnnnnnnnnnnnnnnnnnnnnnnnnnnnnnnnnnnnnnnnnnnnnnnnnnnnnnnnnnnnnnnnnnnntctttatgtgtatgcaatatacatatgagaaccaaattcannnnnnnnnnnnnnnnnnnnnnnnnnnnnnnnnnnnnnnnnnncccttgtcagttatttcctctgttcaataaatactgaaggacacaaatacctttttacttttcaagagtttgccttctcttctcgattttatttattaatttggatatttttcctcccatgcctcttcatctgatttagtgggatgttttcaataccagcaaaacaaaagaacaggaaaagtattttgcaaacttatccattgnnnnnnnntgtccttaaggtcaagcaaaaagagtcaatttcaatttcaaagagctgttctttaaatgagataaagaaagtctccttttgtttttagatggaaaagaaagcacacgttttttctacctgtgaatgaaatttggtgacctctgtgccattcctgcagcatatttgttcatattggtttagaattcagtgcatgaatatcattacattcttatagctaacatttctagttagctt

SEQ ID NO: 15983 - DNA, 727 bp, Macaca Fascicularis
  misc_feature (1)...(727): n = A,T,C or G
tacaggcacctgccaccatgcntnnnnatnnnnttgtattttagtagagatgaggttnnnnnnnnnnnnnnnnnnnnnnnnnnnnnnnnnnacctcaattcatctgctgacctggaccttccaaagtgctgggattacaggcgtgagccaccgcgcccagccgagatttgtttcctaagatactttgtgtcatgaacagttgagtttagtgtcatgaactattcactttatatttttcttgtattaactgtttaaatttttaaaatatcttgtagtaactctttaaaatgtatgtaagtaaatggctacagaaannnnnnnnnnnnnnnnnnnnnnnnnnnnnnnnnnnagcaatattaccccatccactaaaggtctttgtctccttaaccactactcgttaatcctttaatcacctcattcaaaccaattcattctgcatttttgagtaccagctcttgtcaggctcaatggcagcttctatgagctgatggatggaaaaaaatcaaactctgtgactctgtggttgactgccacctctgcaaccttgactcatctgctgaaaaggcaagaagaagaaagggcagcaagccctgttttagggactatatgagatcagggaagataaaggggacgtagatgagttctttaggattgcctatgttttgagtttttgtttctaactgaagaaatctatcaatattaaatagggtgggaaaatgatttc

SEQ ID NO: 15984 - DNA, 226 bp, Macaca Fascicularis
agatgggctcaggaagccccaggtgcaatcagtgagagccctgcctctcaattgccaaaaggtgcatgggagaatgcagcaaggcacacagagctctgtcagcccctggggactgggcgctgcccctgggaggggagagcctggccagggctggtgttaggcccggaggcagcatcttcaggatgctatcctcccctcccacccctcacagctcaagccaagtcca

SEQ ID NO: 15985 - DNA, 584 bp, Macaca Fascicularis
agtgacagattcataaaaaatggaatgttgtacacagtaattttgtcaggggtagagaagacagggattgggaagtggtgggtaggatgaaggacctggatatatttatcaaataaaaggttaccagaagtgttcattaaaggaattgtagccatcatctagttcaaacctcaactattacagatagaaaatcagggcaggagaggatataattgtgaaggagtcagggctaacacctggatctccggaaacctagcctagcagtttaatcttcacacacctctgggttctgagaaaagcctggaaaaatcacacttctttgtcattgtcatgctgaggtaataatagcaaaactgttttcttttccttaatttcctttcctaagcttatgtaatactttggccattaaatatcttgccttatcttccctactactgctggtatgctatttcttacatactcaaaagaaattcgattatttattgtatatttattgtattctaatataattgaaataaatggcatggatttattttttcttacctatttggattaaagctttgtggttcatgcaaacaatgtgc

SEQ ID NO: 15986 - DNA, 749 bp, Macaca Fascicularis
cagagcattgcgtgtgtgtcttgctgtagcctggaaaaaggttttgtgtaaagattctgggatggcaagttgcttgccttttctgaaaagagaacatacagaacctgtccatctttaagaccttcatccatggaatctactatacaggaggatgcagtgggctggaggggatgggcgaaaacgggagtgggaagcctggcctggcttctggtcatggcctcctaatacctttcacttcaagtagaaatgtactcaagccctatttataaacaaatactcttcctgcctccaccagacccctacagaacatcacctggaattgccactcacactgggttggagtcattgggcagctgtgcctgtgcgagaggtgctgtggtctgggcagcccctggaaaagcacctttacttcctgtcattgttgcctgaagaaggctggagttgctctgagggcagtttgggtttggagtattatatttggcttctatttttattattttggatcaccagtctccctatcccttcttgcctccctcccttctaaacatgtataataactatacagagactgctacaaaattgtatatagtttttggatcaaatagcatgaggggagaggaaaccattaaaaatttgggctcctactctcctttgctttgtaaattcaaaagtggggggtgggtaagagggatagttaaaatgtttacaaaactttaggctccctcggaacttttgccagtgtggaggaa

SEQ ID NO: 15987 - DNA, 554 bp, Macaca Fascicularis
  misc_feature (1)...(554): n = A,T,C or G
gatgaaaagtcttacgtaacatatagctnnnaagcaggggtccctcctcaattttcaaacattttgaaaggatgacaattctgttagccagatgagtaaacctctgtattcattaagttctgaatctctcataatgagggattttaaagtatttataaatacactgccctctaaaaatttcctcagatctgaagtatggccttggtcctgcatatacagtgttatcctatgtttaaaagggtgatccagatatgagacgcaactagttggtgcataagaaggccccacttggctatttcatatctacctacaatcgaccaaaaaaaaatttttaggccagcaattattatttagcttcgctccttctagtgcaagaaactgcaggctggatcagtagttcaacagctaaacagtcataaaatagtcattgtgcatgttacatttctttcaatgataaattccaatttctatttacttattcattgtgacagtattactaaacaggtaaggatgggaatattttgttatactgtgtatagtgaatgtattgtact

SEQ ID NO: 15988 - DNA, 783 bp, Macaca Fascicularis
  misc_feature (1)...(783): n = A,T,C or G
cctccacaggngccccagctgccatcaagaaactctaccaggtgaaggggaagaagaacatccgtgccaccgagcgggcactgaactgggacagcttcaacactggggactgcttcatcctggacctgggccagaacatcttcgcctggtgtggtggaaagtccaacatcctggaacgcaacaaggcgagggacctggccctggccatccgggacagtgagcgacagggcaaggcccaggtggagattgtcactgatggggaggagcctgctgagatgatccaggtcctgggccccaagcctgctctgaaggagggcaaccctgaggaagacctcacagctgacaaggcaaacgcccaggccgcagctctgtataaggtctctgatgccactggacagatgaacctgaccaaggtggccgactccagcccctttgcccttgaactgctgatatctgatgactgcttcgtgctggacaacgggctctgtggcaagatctatatctggaaggggcgaaaagcgaatgagaaggagcggcaggcggccctgcaagtggccgagggcttcatctcgcgcatgcagtacgccctgaacacccaggtggagattctgccccagggccgtgagagtcccatcttcaagcaatttttcaaggactggaaatgagggtgggcgtcttcctgccccatgcttctctgccccccaccgcctgcctacttgcttctctggctgcctggtcagtgcagaggtgccccctgcaggtgttcaataaaggagacaagtg

SEQ ID NO: 15989 - DNA, 699 bp, Macaca Fascicularis
tgcatatgaatacaccagtgtgcacctaattttcatttaccagttcacttggaagcgtttcaggcagcgttgcagaagccaaccctagtcagcatgaccctccgctttgggatgaaattgattcttggtagagttgacatagggttgagcgtggccgcctttctccttgtcctctgtgccctctgggtcacactcattctcctccactgcccagcccaacaacttggaggcaggagagaaggcagcccccagagctgccctagactcccgtctcatctctccccacaggcagtttctaaaccgggatgacattggcatcatcctcatcaaccagtacatcgcagagatggtgcggcatgccctggacgcccaccagcactccatccccgctgtcctggagatcccctccaaggagcacccatatgacgccgccaaggactccattctgcgcagggccaggggcatgttcactgctgaagacctgcgctaggggactcctcacagccctcagcccttccctcgtttccaggcctctccccaggcttgccatcagccttctttactttttgagcctctgatttccaattccctgcccattcccactccattaagaggctaggtgaggcacttctaggttgctggggctctgctgttaaagctggttaaggaacaggaagcctgaccatctccctccactac

SEQ ID NO: 15990 - DNA, 506 bp, Macaca Fascicularis
  misc_feature (1)...(506): n = A,T,C or G
tggctccactcagtgnnnaaggcaccctgcttcctttgcttgcaccccacagactatttccctcatcgtatttagtgcagcaaatctctcgttagtggatgannnnnnnnnnnnnnnnnnnnnnnnnnnnnnnnnnnnnnnnnnntctgtcatagtctgcctttaaaatccttcctcttttcttcctctcttctctaaataaagatgggggtaagttatacccaaagctcactttaacaaaatatttcctcagtactttgcagaaaacaccaaacaaaaatgccattttaaaagaggtgtattttttcttttagaatgtaagctcctcaagagcagggacaatgttttctgtatgttctatcgtgcctagtacactgtaaatgctcaataaatattgatgatgggaggcagtgagtcttgatgataagggtgagaaactgaaatcctaaacactgttttgttgcttgttttattatgacctcagagtaaattgggaaatattggcc

SEQ ID NO: 15991 - DNA, 733 bp, Macaca Fascicularis
  misc_feature (1)...(733): n = A,T,C or G
tgcatatagatgctanttggaggtaagtgaatannnnannnnnnnnnnnnnnnnnnnnnnnnnnnnnnnnnnnnnnnnnnnnnnnnnnnnnnnnnnnnggttactttcctggcaggatttggcctagaaatgaaaatggacatttaaaataatatggggaaaatacagagtcgcttgaatgcttatcactttattactgcaatcataaatgatagtaatttaaattagtccttcacactgatttgtgtgtttacactagtccctagatatgccttttctgccctttgttctgttgctcacccttttaagaaatgccacgataaatagcacatggtcatgttgcgtggagtatcttgtactaccctcccgagtgtatgtacacttattcatttattgtgcctctgcccaacaaatgaaaatgaattttttattcagcttttctgttggacagcactgaaaagcttttgctgattttcaaggcagtctttcagcttatcctctgtcaaagtcagtcgctgctccaagattgaaacagtctgcaaaaaggaggacaaaataatcaatgcctggtcctctggtggtgaggatgacaaagacaatctctgcataggaaggtgaggatgacaatgacaatctctgcataggaaatcctttttagaanntnnnnnnnnnnnnnnnnnnnnnnnnnngttgactcaaaaatgagccccagaacttgctttgcttctgggcc

SEQ ID NO: 15992 - DNA, 745 bp, Macaca Fascicularis
  misc_feature (1)...(745): n = A,T,C or G
gacgaccatctctaccctagagggactgtcactccagcannnctgaggacttcgacaggaccaggacagcaggccccttgacagctcctcccacaggatgtgggctctgaggcctaaaccatttccagctgagtttccttcccaaactcctcctacccccaggtgtgctcccttagcctctggaggcaggggctgggcctgtatctcagaagggaggggcacagccacacattcaccaaaggcccctgcacattgtatctctgatcttgggctgtctgcacgctcacaggtgcacacacttgctcatgctcacactgcccctgctgagatcttccctgggcctctgccctggcctgcttcccagcacacactttggcctaagggcttctctctcaggacctctaatttgaccacacccaacctgggcttcagccacaccagtgggcactggagctggggtgcacatggggcctgctcaccttgcccacacatctccagccagccagggccctgcccagcttcaatttacagacctgactctcctcaccttccccctgctgcccagagctggacatagacttgcacttggactgnnnnnnnnnnnnnnnnnnnnnnnnnnnnnnnnnnnnnnngaccaaggcctactgttgcacatggggccaaaaccagtaaacagctgccttctttgaaagggaatgcaaaggcttggggggtaatggaaaagatctttacaaatgataccaat

SEQ ID NO: 15993 - DNA, 773 bp, Macaca Fascicularis
  misc_feature (1)...(773): n = A,T,C or G
ctgatagcattttgtcntcacacacccatctactacgtccaaccggtctgtctgcttctctcaccccttgcccaataaaggnnnnnnnnnnnnnnnnnnnnnnnnnnntagtgttttcaatagtgtgggcgcaggctcggaaggtggagaggctggccccagaggacgcccaggcttggggctaagtcccagtttccatgtgaagctgtttctggccttgtctgtttttgttgtcccaggctctgtgcctctcactcagtcaagaacttgtctttgtgttgcttcctggggacacgctcggggcagaagtcagagcggaggaggcgggaaaagtagattatgatcatcacgtccagcatgagcaggatacccagcaggaaggtgcccagggtcctctgcctcacataacgcaagaagaaatgggtgaggtagacctgaggggccaggcggaagacgaagtacatgaccaggttcacatacttgtnnnnnnnnnnnnnnnnnnnnnnnnnnnnnntattgattttcatcatcatgcgaatcgnnnnnnnnnnnnnnnnnnnnnnnnnnnnnngtgttaagacaccaccaccgacaaagctgctccaaaagatgccagagaagaaggcacccatggcctagcaggaagaagggagaataggagttagggaaccnnnnnnnnnnnnnnnnctggactttggtggggggtatcagattgagggctggaaaatcccaaatttccacctggaataatagtttatagtggataagatgct

SEQ ID NO: 15994 - DNA, 653 bp, Macaca Fascicularis
  misc_feature (1)...(653): n = A,T,C or G
cagagacaatggactncnnnctgcccttnnntttattgttgcctgggtcataggcatagtgggnnnnnnnnnnnnngatttnnntctaaccaaaaattttagacnnnnnnnnnnnnnnnnaattgccacaattttaggaaatcttcctgcttcagcactcattgtgtctctgccctacctcaattccagnnnnnnnnnnnnnnnnnnnnnnnnnnnnnnnnnnnnnnnnnnnnnnnnnnnnnnncagtcagggatttatatcaatgtcttagatattgctccaaggcattccagttttctcatgggagcatcaaggggattttcgagcatnnnnnnnnnnnnnnnnnnnnnnnnnnnnnnntttcttcttagtcaggaccctgagtttgggtggaggaatgtcttctttttgctgtttgccattaacctgtcaggactaatcttctacctcatatttggagaagcagatgtccaagactgggctaaagagagaaaactcactcgtttgtgaagttatcccacctcggatggaaaagtcattaggcaccgtgtggcataaaatnnnnnnnnnnnnnnnnnnnnnnnnnnnnnnaaagaattttgtttcctgtggctcttttcaattataagaccagtttgttattttgttcaga

SEQ ID NO: 15995 - DNA, 728 bp, Macaca Fascicularis
  misc_feature (1)...(728): n = A,T,C or G
tgcttnnnnngctggcctgtcttccgataggcataaaaagagggctggccagaacgccttaaaannnnnnnnnnnnnncccctttgcccacccagccatctactccctgctcagcggaaggacactcgtggtcctgggggaagatgaggccatagtcaggaagctnnnnnnnnnnnnngctatctttgtccccagctatggctgctacgctaagcccgtgaaacattgggcctcctcccctttgcacattatggattttcagaagtggaagcttattggcttgcagagagtggcctcccctgccggtgccggtacccnnnnnnnnnnnnnnngctacagccgctacacgagcatcctggaccttgacaacaaaaccctgcgctgccccctttacagaggcaccctagtgccccgcctggcannnnnnnnnnnnnnnnnnnnnnnnngcagcacctactacctgcatgtccagagcatgctcactcnnnnnnnnnnnnnnnnnnnnnnnnnnnnnnnnnnccaccacctgcacctgcctacgcacgacaaggagacagaggagctgctagccagccgcnnnnnnnnnnnnnnnnnnnnnnncctgggtctggtgaatgaggatgtcagggtggtccagtacctggctgannnnnnnnnnnnnnnnnnnnnnnaggaatctccagggaccagccaccccatgctcgggttnnnnnnnnnnnccagctttt

SEQ ID NO: 15996 - DNA, 723 bp, Macaca Fascicularis
  misc_feature (1)...(723): n = A,T,C or G
gacttggacnnagannnnnncggggaggatggtagcctctggtccttcaactacttcttctacaataagcggctcaagcgaattgttttcttcagctgccgttccatcagtggctccancnacacgccctcagaggcaggcaatgagctggacatggagctgggggaggaggagttggaggaagaaagcaggagcggaggcagtgagggtggggccgaggagaccaacaccatggaggaggacagggtcccagtgatctgtatttgatgaggaggagccgaggccnnnnnnnnnnnnnnnnnnnaccaatgcctggacctgcccgcctgagaggcccctggggcctccccagctgctggccagaccctggcgctgccacagtcctggcactgcccaaggccatacctgcctagccctttggctccatcctgtaggatgcccactcacccctcagactcctgctgcccgtgctgtggccggactcggcagcacggggcctggtgggaagagtgactgccctgcccaaatgaactgccacagcagggagagctggaccacagagtttatttttgtatttctactgggcctgcacactccagcccaaagggtctgtggccggaggccccgcaaacaggccccggcggtcaccagctctggtcttgggccggcccctggtgcccacctgtacccccacctcgcccatttggccgcgtgcactgagtg

SEQ ID NO: 15997 - DNA, 645 bp, Macaca Fascicularis
tccattttttttcttcattattattttttcatcatttctccaaagcaaagcatttttattgtaaagttggtgtttcaaaaaaatagctgagcttgtctaacttaccatgttggaaacacatcttaacttctaaatttataaggcctatcatgtccttgtcatgaaaagcactaaaacaaaagagtttaagtggcaaaagtcatagttttgcaagagataaatgatctgccttatattagagtcagagactaatagtggcttaaatgcatgaatgtcttttttttttttttaactgtcatttttttactgtcttttgctccataccaggaaatattttggtaggaattagaagaacaaaaagcacttttaccccatctatttcttttaaaaaaagtaaggatttcatttatattgaaaaacaatattaatcattttgttgttaacacaattctctgatgcggtgctgtacagtcatttttaaatctcttgctaacattttattggcagtatgtatttctaccattgtaaccaccattgtgctattgtaactcttcacttctgtgaaagtaatattttttataaaatacactgaaatttaatctcagtaattgagtccattttcaagtgtggtcaagaataatcttc

SEQ ID NO: 15998 - DNA, 726 bp, Macaca Fascicularis
  misc_feature (1)...(726): n = A,T,C or G
gcannnnnaataatagctcagnnnnaaaggagggaacaataccccatgtgagttcaaattanttttctctactttgaggtataccttcctaattatactttacataggctaatttttttaagtttaaattctcgctgttaagttgcattgagaaacaattagaaatgttgtaattgtcatctctttacatgtggcttatgaacaaatgaaagtttgctgtgtgattgcagtttcaagttacaacatttcataaatatgtcagttttagaaactcagactctttcccatcttttgtatggataaagtttatggtttcatttctgagaatagagttggtctgctgtgctaacttcatgtttcttattccaaaggcttgattatattttttcctccggtgattaaaaatgcagcgaaaatccaatttacaagttcatatattgatatttctagatgtagtctagttctaaaagaatgtacttggtgtgcatttttaagtgtttcatgtagacagattaatatatttttgtacaacattgtatttctacatgtatttcaagactacttttcggtgactttttcaagtgcatgtgttaacagaaggttggaatgagagtgcattggctttactagtcaggagaagtgtaatacaagtgatcatagaaggtgagaatgtgtttatactgtacatggaaacctaatgcctcttttctaatgctttgtacattt

SEQ ID NO: 15999 - DNA, 691 bp, Macaca Fascicularis
  misc_feature (1)...(691): n = A,T,C or G
aagactacaaaaaacgacgagggcttatttgagcacacccagcctgctgcttctgaccccgcatgccccatcgcagcgtcccacctttcctcctttcctttgatttagcctctttgggctggagcagctgtcgaactgggaagagactctaaactgccagtcatctgtaatataaaccatttgctgtatagacctccctgtctgcacaccatctcccaccagcctcccctcccccagggccccacccagtgtgggcctgggctctcttgggctttatccatgtctttagatttgtgtttgccttttgtttttttaaccgcgcagttcattggccactctgcacgcattcagtattaccatggagctgggaatcttgctggagcccctggggcaatagcagcagcactgggcggtcttctnnnnnnnnnnnnnnnncccacccattgaacattcggnnnnnnnnnnnnnnnagggagcggggattgggcacctgcggtcctccctctcttcatctttctcttctgcccttctttttggaagaaggggtttcaaaaccagtttagtttccaaaaagtgtacatttgtgggggggggtctaatttgagagcgagagtgtgtatgtgtgtgtgtgtaagtgtgtggatttttttatcatttttttaaaatgcagtactctttgtatcagtctgtc

SEQ ID NO: 16000 - DNA, 745 bp, Macaca Fascicularis
  misc_feature (1)...(745): n = A,T,C or G
acagggtaaannnnnnnnnnnnnnnnnnnnnnnnaatgacaagaatgttccgggagggacggacggagactgtgcgttcctgtaccagcgagtccacagcttttgtgcaggctatggtggagaagtcccacgcgannnnnnnnnnnnnnnntctgttccagaaagctgctaagaagcaccagaatnnnnnnnnnctggccatgaccggggnnnnnnnnnnnnnnnnnnnnnnnnnnnnttacttggtctccaagtacctgggagtcagctctcctttcctcgctgaggtgctctcggaaccctggcgtctctccaccagccagatcccccaatcccagatccgcatgtttgacccagagcagcnnnnnnnnnnnnnnnntgctggaggtggcnnnnnnnnnnnnnnnnnnnnnggctatggagtttcctacatgatcgcgggtgagaacacgatcttcttccacatctccagcaagttctcaagctcagagacgaatgcccagcnnnnnnnnnnnnnnnnnnnnnnnnnnnnnnnnnnnctcgctgatcttttccaagtgcccaagacnnnnnnnnnnnnnnnnnnnnnnnnnnnnnnnnntttgggaactaggaggccctccccctcccccagctcagaccacagaggtggcaagagaagggctgaagctggaagactgttcatgagggacttgtgtgacctgctttgaaatgtgtgactctgctgagtgacgtaggctctgag

SEQ ID NO: 16001 - DNA, 723 bp, Macaca Fascicularis
  misc_feature (1)...(723): n = A,T,C or G
cgagcctcacctttatnnnnncagcacactgcagcggacaaacataaatnnnnnnnnnnnnnnnntgctgacatggccctggtggtgacagtctnnnnnnnnnnnnnnnnnnnnnnnnnnnnnntgctgcttttcaagcagaaaagcaatggaatgcacagcctcattgctacaggccatcttatgtcagtagatccagacagaatggtcatcaagagagtcgttttgagcggtcatcctttcaaaatttttactaagatggcagtagtacgttacatgttcttcaacagagaggannnnnnnnnnnnnnnnnnnnnnnnnnnnnnnnnnnnnnnnnnnnnnnnnnnnnnnnnnnnnnnnnnnnnnnnnnnnnnnnnnnncatgaaatgcagctttgatgggaagctaaaatctcaagacacagtactgatgaacctctataaacgagttttccccaaatggacttacgatccatatgtaccagaaccagnnnnnnnnnnnnnnnntgagagttcttcagtagtacctcaggagggcatggagtaatggattcaaagagattccttcttactggtgccagccagtagtcagggatgggaggcacaagttgtgattgggcagtttattttctatgtcagcctgtcagtctgctgccccattttgcaagacttttttttagccttgacaaaatgtctcagttaagtatgaaagtttttctactac

SEQ ID NO: 16002 - DNA, 728 bp, Macaca Fascicularis
cataagaaaacaaagtgaagctgacttagctgagacccggccagacctgaagaatatttcattccgagtgtgttcgggagaagccactcccgatgatgtgtcttgtgactatgacaacatggctgtgaacccatcagaaagtgggtttgtgactctggtgagcgtggagagtggatttgtgaccaatgacatttatgagttctccccagaccaaatagggaggagcaaggagtctggatgggtggaaaatgaaatatatggttattaggacatgtaaaaaactgaaactgacaataatggaaaagaaatgatgagcaaaattctcttattttctataaggaaaatacgcagaaggtctatgaacaagcttagatcaggttctgtggatgagcatgtggtccccacgacctcctgttggacccccacgttttggctgtatcctttatcccagccagtcatccaggtcgacctcatgagaaggtaacttgcccaggtctggcacatagtagagtctcaataaatgtcacttggttgcttgtatctaacttttaagggacagtgctttacctggccatgataaagatgggctgtggagcttggaaaaccacctctaagttctgttttccttgctctatacagcagcacatatcatcacacagacagacaatccagaatcttttcaaagccctcgtatggtagcacaggctggcctgcgcatcagcaatcct

SEQ ID NO: 16003 - DNA, 394 bp, Macaca Fascicularis
ccgccctccggtggatgtaccaccactcacagaagcagggtgcccatggggacacggtcatcctgggcatgtccagcctggagcagcaggagccgaactcggcagcaacggaggaagggcccctggagccggctgtcgtggacgcctttaatcaagcctggcatttggttgctcatgaatgtcccaactagttccggtaggcccatcgtggctcaggttgcccaaggctcttccgtcacctattttgttctttcacactcaccagtctcggccttaagctgactcagcagagtctttgtggatcgtttagatccatgcattatttttctagttcctgcccagctccctgttaactttacagtgcgaaaggcgggggtgagtcccacttgagcac

SEQ ID NO: 16004 - DNA, 712 bp, Macaca Fascicularis
  misc_feature (1)...(712): n = A,T,C or G
attgtaaaattttgtcaaagatnnnnnnnngtgctatttgaagtacctgtaacaaaannnnnnnnnnnnnnnnnntccatgtactctgcatctgtggattaaaccaattgcagatcaaaaatattagaaaaaatataaaaataatacaaataaaaatgcagtataacagttatttaaatagcatttacactgcattaggtattagtctagagataaagtatacaggaggatgtgcgttggttatatacaaatatgtcattttatgtaagggacttgagtatacttggatttttggtatctatgggttgagggggcggtctgggaaccaataccccatggataccaagggacaactgtacttatttacctttatgatcattgcaagcttcttatggaaactttataggaatgaaaatatacatgttaagattaaacattagatagtagatggtttgttgcatgctagaactgttagtattgttgaatcaattactttggtttcatgaaaaaataaacgataaatatctttaaagagaactagaagaattttttgtttgagtgattccaggctgtagtgtgattatttactgaagtagtttgattggctggctaacttagtagaattattgtttnnnnnnnnnnnnnnnnntaggggttataattataagataaaaatgtgtgtgtttaagggaagtaggtggtggttaaaatt

SEQ ID NO: 16005 - DNA, 741 bp, Macaca Fascicularis
  misc_feature (1)...(741): n = A,T,C or G
tattttcattatatccataaaatgaaaggctcttacttgggcagaaatgtattacttattgttcctattttcttttcttttttttgagatagtatagctctgttgcctaggctggagtgtagtggtgtgatctcagctcactgcaacctatgcctcccgagttcaagcgattctcctacctcagcctctcaagtagctgggattacaggtgcccaccaccatgcctggctaatttttgtatttttagttgagactgcatttcaccatgttggccaggctggtctcgaactcctgacctcagctgatctacctgccttgggctcccaaagtgttgggattacaggcataagccaccacaccctgcccctattttcttttagacatacaggcaatgttgtggtttgttgtaagatgtcttaatattcctcttcccaggctctgaaacctagtgtgaaagtatatgctgctgaacccttgaatgcagatgactgctaccagtccaagctgaagggggaactgatgcccaatctttatcctccagacaccatagcagatggtgtcaaatccnnnnnnnnnnnnnnnnnnnnnnnnnnnnnnnnnnnnnnnnnnnnnnnnntcttcactgttacagaagatgaaattaaggtaaggctccaacaggaaaagaaataacaaagcatggtataacttcttaggcagaagaaccttctgttaggagtagcaagtgacccacgggaactt

SEQ ID NO: 16006 - DNA, 705 bp, Macaca Fascicularis
  misc_feature (1)...(705): n = A,T,C or G
gcccagcatgatgatgagaagagnnnntggggccaaggtagacagccccctgccctcagacaaagctcctacacccccagggaagggggctgccccagaatccagtctaatcaccttcgaggcagctccctcgacgctgtaactccagaccaccttgagtgtggcacctcccctcctgagccccccttgacatcctctcagctactccagggcacctgactgctctgaggagagggaagaaggcctgctggggctttctatggccttctgctgtttctcgccaacactacccaggactcttgctacctggttccaactccagacaaccactatgccaggcctggagcctctgaggcatcggccagtccaggtcctcatctgaggtaagaatgtacatcagctggcagccccaagcaagtggctgcagggacactgatgccacagctcctgggccggccctcacatctgacactggttgccgagagccctgagccaaggcaaggatttgccaaaaatgttctgggggcccagcaaatgcaggagccgacctggggctgcacatccctgcccatccacagaaagactgttcctgtcaggatttgtttccctctgctgtggccgtgactgcttctggaccagaacagcttcggctcccaggtattttctacaggaccactttgagtgggcagccaagcccaggctcgc

SEQ ID NO: 16007 - DNA, 768 bp, Macaca Fascicularis
  misc_feature (1)...(768): n = A,T,C or G
aaatgtttcannnnnnnnnnnnntctaacgctgtgancnnagccagctgnnntctcctggatgagacagactccagaggataaagagctagcgccatggtggcctgcagtgtgcagagccccgcaggacccagcgtgggcgcccttccaagcttcctctagcttcgggcctatgctgtcccccgcaggccccagggaagttacttgcgactctgtggccttcagacttcctcctcagccacctggccactgagacagtgcagcctgggcagcagaacagccacctaaggcaagaatggaacggacacaccttgttcctttctgagtccgtttcccaaaaccctccttccaggtacttctaatgggtgtttccatagcagacgttgctaatgcatcacagtgttctctgaaatgaaacccagacatagcctgcctctcaatcctcagccgggggctgctagcagcctcttgtatttactcagaggaaatcacacggatcctgtttggcattcctgccctacggacgcctcaggggtaacaggaccagggcagagccccagtacaaacaggcaaggctgcagtcaaatgggagggcccaggtgttcgtgttggagggctgggatcttgtagggcctatgcgtcttggttgaggatcaaaccacatatgctgttgggagaaacgatctctgtcaacatagatactgaaagagtaatgaaggcagaagagaaaaaccaagtgtggagtttggggttgtgctgtgtaaataca

SEQ ID NO: 16008 - DNA, 726 bp, Macaca Fascicularis
  misc_feature (1)...(726): n = A,T,C or G
ttgttgtagatnnnntgtatgttgaaaaatagtttttttgttttgtttttgcgtgggagtgtgtgcgtgcgtgggtgtgtgcgtgtttgggtttttctcnnnnnnnnnnnnagccatcttgagtggtcatgggccactgcttttcccctttgtgannnnnnnnnnnnnnntgctgtgtgcttttttgtgtgtgtatttgctaatttttattaattttagtttttcattaaataaatttgactttcctnnnnnnnnnnnnnnnntttcttcactttttttgtaccattttaaagttagtgtcttttgatatgcatacttgttatggtaaaagtttgtaacatgtgttcaatattttcttttcccccattaatnnnnnnnnnnnnnnnnttttaaaatcagctactttgtgaagctatgagttccagaaagtaaaggtgacatcggaaaaatgatcaaaagctatttaaagcatctgtaagatggtctctctctttcttctacggatgagtcacacctttgagcttaatctttgaaaggttagagaataaattgatttttataagtactgcaaatcaggcttttgtttcctttttcaaatatcttggataaatcacatgtttaaaatttgttcttgtatttattggttttgcaaaagaaggcatcgtcatgcacagtatttgtaattaaaagcaaatcatttgtttaaaaaggcagttgcaaaaaaat

SEQ ID NO: 16009 - DNA, 709 bp, Macaca Fascicularis
  misc_feature (1)...(709): n = A,T,C or G
tctctttgtctaataacaagtagaacaaataatttaaatgaactgcttaaccctactctgaagaaccttttttggaattagattttagttaattttttaaagaatacagcccaacgctttttttttacattttaagagttgtagaagttgttcctcacttggggactggacctgccctctaggagggaannnnnnnnnnnnnnnnnnnnnnnnnnnnnnnnnnnnnnnngccagagagcaggggacacggtgctaggttccctcgtgtggtgcttnnnnnnnnnnnnnngtctgaaaaggaccaagaggaaaagagtcggaggggtagaccctgcagcccctgttgagaagaaagatnnnnnnnnnntnnnnnnnnnnnnnnnnnnnnnnnnnnnnnnnnnnnnnnnnngcataccccatcctcttcccacctcctcctggctgtgttctgcagcctcccagagtagaaaacaactttgttacttaaggttgttcaccttgtactagtggttatttgagtttgttcctattacatcaatccttacttgaggtggttcagattacagtttccaaatgcattctgagattgcctannnnnnnnnnggtagagaaaaagcacannnnnnnnnnnnnnnggagtgttgaatgtgtgccccgctgctgtctggggggatgggagtgggctctggggtcatatgtgaacatcccc

SEQ ID NO: 16010 - DNA, 756 bp, Macaca Fascicularis
tggataatgttgtatgtgaatgcaataaaaaggaggatgaaattcagaatttaaagtctcaagtaaaaaaatttgaagaagattttatgagacagcagcgaacaattaatatgcagcagtctcaagtagaaaaatataagactcttttcgaagaagcaaacaaaaagtgtgatggattacagcagcagttgtcttcagtagaaagggaattagaaaataaaagaagactgcaaaaacaggctgcaagtagtcaaagtgccacagaggttcgcttgaatagagctctagaagaagcagaaaagtataaactggagttaagtaaattaaggcaaaataacaaggacatagcaaatgaagaacataaaaaaattgaagtgttaaaatcagaaaacaagaagctagaaaaacaaaaaggagaattaatgatagggttcaagaaacagttaaaattaattgatgttttaaaaaggcaaaagatgcatattgaagctgccaagatgctgtctttcactgaggaggaatttatgaaagcacttgaatggggaaattcataagtgatccctacttcagttagtctctatgacagtatgtggtggatacccattttacttattgtaatggtttgaattatttttactcttcataagtaatatagttgattatgaaatcaaaataatttcaaagaattccctttttagatttgggagatataaaactgatgcattattctaatatgtaagttattagaaaaaattt

SEQ ID NO: 16011 - DNA, 718 bp, Macaca Fascicularis
  misc_feature (1)...(718): n = A,T,C or G
aagaagaagcgctggaatagcatcgaggagcggcgcatccaccaggagagcgagctgcactcctacctctccaggctcattgccgcggagcgtgagagggagannnnnnnnnnnnnnnggaaccacgagggtgatgaggacgacagccacgtccgggcccagcaggcctgcattgaggctaagcatgacaagtacatggcagacatggacgagatctnnnctcaggtggacgagaagaggaagaagcgtgacatccccgactacctgtgtggtaagatcagctttgagatgatgcgggagccgtgcatcacgcccagtggcatctcatacgaccgcaaggacatcgaggagcacatgcagagcgtgggtcattttgaccccgtgacccggagccccctgacccaggaacagctcatccccaacctggccatgaaggaagtcattgacgcattcatctctgagaatggctgggtggaggactactgagatgccttgccctgcccagcatcttggtccaggagagccctgggcggaagccctccacccctgtacatagtttgtgttgctggccaccctggccccttccaagttcaagttctgctgttgggctctggactattccccctctcagcatagctcttgctgggccatgattgtccccctttgtgggctgaaaagcaggtgagggtgggctgggctgaagccactgccgccactg

SEQ ID NO: 16012 - DNA, 728 bp, Macaca Fascicularis
  misc_feature (1)...(728): n = A,T,C or G
ccattgnttttttctactagtcagataacttttaatttttaaatttgggagacactttcttgtttgtttttggaaaatttttccttccagatctgttgcccactgaacggccacccgtccctcactgtcctggtgtccggttgggctggatggtgttggggcatgatgtggggaggaattggaaggtgcttcggtctggttcaggttcgggcattcttcgttgtttgcacatctttttaaattttacccttttcttaagaatcctaatgcagtcttagtattttataccaataatgctgagctttcagtgtagggtctggtagtacagatggtgtgatgggggatgctgctgggtgtaaatttcactgtgtgtgtctaattttttttcctgttgaatgggtaaaaacaaaacaaaacttttttagaaaatgaatttnnnnnnnnnnnnnntggaatgagggacctttgagctcactaccacctggagtttgagttgaagcatgaaaatggtgcccatgcctgacgcnnnnnnnnnnnnnnnnncacgtgcccttgtagaggatccttactgtcctagagagcagatgctttctgaaaactacttgctccataagaccctctgagttaatgtttcagctgtatcattagacttgtatttagagcggtgtcacttcctctgaactgttactgcctgaatggagtcctggacgacattgggttttcctcta

SEQ ID NO: 16013 - DNA, 719 bp, Macaca Fascicularis
  misc_feature (1)...(719): n = A,T,C or G
ctgcctagtttgatgantcntttgtgaaactgaaagagaatagacagtatgacatatagaattaatacaaaacagtttannnnnnnnnnnnnnnnnnaagaaaattggactgtaatcatatcgctnnnnnnnnnnnnnnnnnnnnnnnnnnnnnnnnnnnnnnnnnnnnnngaagnnnnnnnnnnnnnnnnnnncaattgcatttatttatcaataagtgccattaaattgaaattatattacattttacactttnnnnnnnnnnnnnnnnnnnnnnnnnnnnnnnnnnnncacctgtttagcctagtcatgtgccttgaacatatatgtgtcccataatctagctcatggtacctgttcttccatccaaacctttcaattcatgctatctgattcatttatttgacatatatcttaggcccacttgaactcttttcttgtttatctagcatagcacaaatgtttttccagtcttctttatcaacactaatgcctcttaattgcatcagcatttcctattgnnnnnnnnnnnnnnnncagaaaannnnnnnnnnnnnnnnnnnnntttccaaatgtttttaatccaaagaaaaaggtttcaagtttatttccctttcttatacacacctgaataaaattgnnnnnnnnnnnttagggatcaataacctaactgttccttggtctatttatgtataagaatgctttttaaagcacatgtc

SEQ ID NO: 16014 - DNA, 733 bp, Macaca Fascicularis
  misc_feature (1)...(733): n = A,T,C or G
agtcccagcattagggaatagtttcagnnnnnnnnaagtgcacggtgttccagtcgaatggcctcccatcctggaataatatggagaatcctttgtcttccactcactgtcattcacaagnnnnnnnnnnnnnnnnnnnnnnnnnnnnnnnnaacatggcatccctgacccccaaatggtctgttttggcctccatttctatatcctttaaatgactgagaatgcagctggtaaagttggaagaatagttaaccaagcaggccagacgcgnnnnnnnnnnnnnnnnnnnnnnnnnnnnnnnnnnnnnnnnnnnnnnnnnnnnnnnnnnnnnnnnnnnnnnnnnnnnnnnnnnnnnnnnnnnnnnnnnnnnnnnnnnnnnnnnnnnnnnnnnnnnnnnnnnnnnnnnnnnnnnnnnnnnnnnnnnnnnnnnnnnnnnnnnnnnnnnnnnnnnnnnnnnnnnnnnnnnnnnnnnnnnnnnnnnnnnnnnnnnnnnnnnnnnnnnnnnnnnnnnnnnnnnnnnnnnnnnnnnnnntgttttaaaaaaaaaaaaaaaaaaaccaagcagacttttgcttggttggaatctgattttctgttgcatattccttatagccatnnnnnnnnnnnnnnnnnnnnnnnnnnnnnnnnnnntgtcctgcttggagggtgacttgtaagatgctgaattattcataatagggtgaatgttctgggtccatgtactctgagaaac

SEQ ID NO: 16015 - DNA, 742 bp, Macaca Fascicularis
  misc_feature (1)...(742): n = A,T,C or G
agcnnnnnnnnnnnnnnnnnnnnacagattgttagaagtgggtggagnnnnnnnnnnnnnnnnnnnnnnnnnngttcannctagggtcctgggtnnncagagctgtttgtcnnnnnnnnnnnnnnnnnnnnnnnnnnnnnnngcaggcatccatcctgcagtagagtnntgctagctcaggatgctcccatggtggctgccttgcaacagagagagaatagcccagnnnnnnnnnntccctcatttctcaccagttccgttcttccattctccctaccccaggtgctcagcagggagnnnnnnnnnnnnnnnnnnnnnnnnnnnnnnnnnnnnagatgctgggcagacacatcgtagcagtgttgcccgagattgacccggtcttgttccagggcgagattggactccccatcctttgcgtgggttccgtgtggaagagctgnnnnnnnnnnnnnnnnggtttnnnnnnnnnnnnnnnnnnnnnnnnnnnnnnnnnnnnnnnnnnnnnnttctccannnnnnnnnnnnnnnnnctgaggcactcctccgctctgggaggggccagcctaggggccaggcacatcgggcacctcttccccatggactatagcgccaatgccgttgccttctattcctacaccttctcctagggggctggtccctactccacccactccaagctcagtggacactgggtctggaaggaaggagtcttttgcttcctttctccctttacaaaaac

SEQ ID NO: 16016 - DNA, 718 bp, Macaca Fascicularis
  misc_feature (1)...(718): n = A,T,C or G
actggtcaagactgcagtgaccggcannnntagtgagaatgacccacttcgttttaagcctcatcccagcaannnnnnnnnnnnnnnnnnnnnnnnnnatgaggaggaagatgaagtagaagatggccagtctgaggcttcagggaagaaatctgtgaaaggagtgtctaagaaatatgttcctccacgcttggttccagtacattatgatgaaacagaagctgagcgggagaagaagcgtctagaacgagccaagagacgggcattgagtagctctgtcattcgtgaacttaaggagcagtactcagatgctccagaggaaatcnnnnnnnnnnnnnnnnnnnnnnnnnnnnnnnnnnntcaggaggaccaacacaggattaactatgaggagagcatgatggtgcgtttgagcatcagtaagcgagagaaaggacgacgaaaacgagcaaatgtcatgagctcacaacttcattcccttacgcacttcagnnnnnnnnnnnnnnngacagggggaacttctcatcttgatgaggatcagaatcctattaagaagcggaagaagatacctaagaaaggtcggaagaaaaaaggttttcagaggcggcggtgattatgggtgtacgtatttgtatattttttgtcatcctgagatacttctaatttcattgtatataggttgttttccatggaattcattaattgtttgcgttggaca

SEQ ID NO: 16017 - DNA, 722 bp, Macaca Fascicularis
  misc_feature (1)...(722): n = A,T,C or G
cannnnnnnnnnnnnnnnnnnnnnnnnnnnnnnnntacacagagtgtcggaggtgattccagtgcagaccgactcttcccacctcagtggannnnnnnnnnnnnnnnnnnnnnnnnnnnnnnnatattgggcaagtttgcagttgtgatggctgacccaccctgggatattcacatggagctgccctatgggaccctgacagatgatgagatgcgcaggctcaacatacccgtactacaggatgatggctttctcttcctctgggtcacaggcagggccatggagttggggagagaatgtctaaacctctgggggtatgaacgggtagatgaaattatttgggtgaagacaaatcaactgcaacgcatcattcggacaggccgtacaggtcactggttgaaccatgggaaggaacactgcttggttcgttccaccagtcataaacnnnnnnnnnnnnnnnnnnnnnttgaaagactatctcccggcactcgcaagattgagttatttggacgaccacacaatgtgcaacccaactggatcacccttggaaaccaactggatgggatccacctgctagacccagatgtggttgcacggttcaagcaaaggtacccagatggtatcatctctaaacctaagaatttatagaagtacttccttacagagctaagaatccatagccatggctctataaactaaacctgaagagtgatatttgtaca

SEQ ID NO: 16018 - DNA, 761 bp, Macaca Fascicularis
  misc_feature (1)...(761): n = A,T,C or G
gcagagannnnnnnnnnnnnnnnnnnnnnnnnnnnnnnctggagcnnnncgagtnnnngctgcagcggcagcaccaggnnncagaggagatccgcgagaaactgcagcaggtgacgtctaggaggaaagagatgaatgagaagtgggaggcccgctgggagcggctccgcatgttgctggaggtgtgccagttctcgagggacgcctctgtggctgnnnnnnnnnnnnnnnnccaggagccctacctggccagcggggactttggacacacagtggacagtgtgnnnnnnnnnnnnnnnnnncacgaggcttttgagaagtccacggccagctgggcagagcgcttcgctgccctggagaagcctaccannnnnnnnnnnnnnnnnnnnnnnattgcagagagacccgcagaggagactgggcctcaagaggaggaaggcgagacagcaggggaggctccggtttcccaccatgcggccactgagagaacgtccccggtcagtctctggtctcgtttgtctagttcctgggagtcactgcagccagagccctctcacccctactaggctcagcccaggtgaaggcgagnnnnnnnnnnnnnnnnccgccctccatcctgcccacatccctgcagccacctcccagcagagcaggctgcgtcctcattcaggtgttccgcatgagagtactggccttctccactcctcccctcagcgcagaggaaacnggccagcnnnnnnnnnnnnnnattattagtttgg

SEQ ID NO: 16019 - DNA, 745 bp, Macaca Fascicularis
  misc_feature (1)...(745): n = A,T,C or G
cgcgcagggcactgtgagcgcaggagcgagntcaggccacccagcggcagcacccgcgtcctgggcactttgcgtgctgggcagagcaggtgggccccagtcctagcagccctcgcccgtgtcctgtgcccttacatggctcccggactctgcagggagccgacacgttnnnnnnnnnnnnnnnnngaaccaccaggtgcgatggcagtgaggaaactgcnnnnnnnnnnnnnnnnnnnnnnnnnnnnnnnnnnnnnnnnnnnnnnnnnnnnnncaaaagagggaaccggtgacgcagaaagacagatgttttggtaatttaccccaaatgtgccatccacatagtgctttttcctcttgcccttcggcttgtttgaatctcacaattatgtatttaattctcaaagaaatatgtatctgtagccgtttgttgacactaatacagatgattaaggaaaacagctggtctttggggaagggagctaccaacactttatacacacacacacgtgcgcgcacacacacacacactatatatatatattatttacagggaaatttttcagggtttacaaaagagtatgtgattggtagtaagagacacagaatgtttatgaagaaattgcattttctttttcctttacatttgaacttctttatagtttaaatataccgtcttgagatggcacattcctacgattgaagaaggggtcttgagatcccctaaacttgcatacccagtttt

SEQ ID NO: 16020 - DNA, 819 bp, Macaca Fascicularis
  misc_feature (1)...(819): n = A,T,C or G
ccacaatgggcatnnngagcggcagcgtggacgccatggtccaggcccacctgggggccgtgtttatgcctcacgggctcggccacttcctgggcattgatgtgcacgacgtgggaggctacccagagggcacggagcgcattgacgagcccggcttgcggagtctgcgcactgcannnnnnnnnnnnnnnnnnnnnnnnnnnnnnntggagccgggcatctacttcatcgaccacctcctggacgaggccctggcggacccggcccgtgcctgattctttaaccgcgaggtcctgcagcgctttcgcggtttcggtggggtccgcatcgaggaggacgtcgtggtgactgacagtggcnnnnnnnnnnnnnnntgcgtgccccgcaccgtggaagagattgaagcatgcatggcaggctgtgacaaggccttttcccccttctccggccccaagtagagccagccagaaatcccagcacacccggggacctggctttgcaacctcttttcgcnnnnnnnnnnnnnnnnntcagcactccagtagcgagagacggcacccagaatcagatcccagcttcggcatttgatcagaccaaacagcgctgtttcctggggaggaaacacttttttaattacccttttgcaagctcacacctttaatctgttttataccttgcttattaaatgagtgatttaaaatgattgaaaacaatgctgttctttagtagcaactaaaatgtgtcttgctgtcatttgtattccttttcccaggaaagaagcattcctgatactttctctcaaaaatcaatatgcagaat

SEQ ID NO: 16021 - DNA, 701 bp, Macaca Fascicularis
cacttgcaatgtgtggggagacccgcctccggaggtctcgtggttgaagaacgaaaaggccctggcctcagatgaccactgcaacctcaagttcgaggccgggaagaccgcgtacttcaccatcaacggcgtgagcactgctgactcgggcaaatacgggctggttgtgaagaacaagtatggctcggagaccagcgacttcactgtcagcgtgttcatcccagaggaggaggcgaggatggctgccttggaggcccagaaaggcggcaagaaggccaagtgaccagaggtgcgaggagagccagccggcctgtgcgacttggatgtgaatggtttgggttaaggatgagacgtcttcgtgctttctcctccctcttcttttctgggttgagggggaaataatgtcagatctttcattcacataaaaaagcaccaactagtgacactttaattgtttttctttatctacaaaattatgtgttaagaaaataccattcatagcatggagattaggaaagagttttaaggagaagacttgaataaagttggagggacattgagtgatggtcagagggcagacgaatgtgttgtggggcgggttgggattagctgcagctgtgaagccacggccgtgtcttgtgtgttgtcacagaagtgctgtgcttttcaacgggcgccttatggctgggaacctcctcagt

SEQ ID NO: 16022 - DNA, 767 bp, Macaca Fascicularis
  misc_feature (1)...(767): n = A,T,C or G
atgacaaatccagggcacagcactagaatcagtgtggattgacaaagaataattaatccacatgggatnnnnnnnnnnnnnnnnnnnnaccatacagtgtatctttatgttgtgaatcatccccacatgaagtccaccgtggagatatttaaatttgaggaacaacaactttctctggtatacctgaaaactataaaacacgaacttctcaaaagtgtgaatgacattgtggtacttggaccagaacagttctatgccaccagagaccactattttaccaaccccttcctgtcattatttgagatgatcttggatcttcgctggacttatgttcttttctacagcccaagagaggttaaagtggtggccaaaggattttgtagtgccaatgggatcgcagtctcagcagaccagaagtatgtctatgtagctgatgtagcagctaagaacattcacataatggaaaaacatgataactgggatttaactcaactgaaggtgatacagttgggcaccttagtagataacctgactgtcgatcctgccacaggagacattttggcaggatgccatcctaatcctatgaagctgctgatctataaccctgaggaccctccaggatcagannnnnnnnnnntccagaatgttttgtctgagaaacccagggtgagcaccgtgtatgccaacaatggctctgtgcttcagggcacctctgtggcttccgtgtaccatgggaaaattctcataggcactgtattcacaaaact

SEQ ID NO: 16023 - DNA, 757 bp, Macaca Fascicularis
  misc_feature (1)...(757): n = A,T,C or G
agcaggagaccgcagccctgtggaggaagccagaaagcgaaggctgctggaggactccgactcagaggatgaggctgcccccgcgccnnngcagccagcccttcggcccaaccccaccgccatcctggacgaggccccaaagcccaagaggaaggtggaggtctgggagcagagcgttggcagcctgggcagccggcccccgctgtcgaggctggtcgtggtgaagaaggcaaaggccgacctggactgcggcaatgggcagcctcaggcagcccccgccccaggagccccgcagagcaggaaggaggccgaccctgcacccccgacgcctggcgcgtcctccctgagccagctgggtgcgtacctggacnnnnnnnnnnnnnnnnnnnncaactgagccctcctaggacccctgccctgggtcagggccacacatccagcttcagccacattgaggccggcgttgctgatggtcggggcaggaggccttggcgtaaccggagaccctacagacaagtgccagcgtgctccaagcacgtagggccaacagggacctcaaccccgggaggtcgcttctctctgccctcaccagcctctcaacacatcggggacacctgctgctcctgcctccacctgtcaccatgcttagggctgcagtatccctagtgcgtctcagcttccaacactacttcagggtgtcagtgtctggggcactgggcgagcccactggcctctagacggcctcatctcttccttc

SEQ ID NO: 16024 - DNA, 818 bp, Macaca Fascicularis
  misc_feature (1)...(818): n = A,T,C or G
ccagcattgtgatnnnngataactccccaggggcttacaggagccatccagacaatgccatccccatcaaatcgtggttcagtgaccccagcgacacagcccttctcaacctgctcccgatgctggatgccctcaggttcnnnnnnnntgttcgttccgtgctgagccgaaaccttcaccaacatcggctctggtgacagctgctccccctccacctgagttggggtgggggggaaagggaggacgagcccttgggatgccgtctgatgccctgtccaatgtgaggactgcctgggcagggtctgcccctctcacccctctctgccctgggagccctacactccacttggagtctggatggacacatgggccgggggctctgaagcagcctcacnnnnnnnnnnnnnnnnnnnnnnnnnnnnnnncccagactgggatacaggcggaagccgaggagaccgaatcagtgtgtgtgaagaggcaggactggccagagtgacagacatacggtgatccaggaggctcaaagagaagccaagtcagctttgnnnngattggatttttttttaaaactcttgtacaaaactgatctaattcttcactcctgctccaagggctgggctgtgggtgggatactgggattttgggccactggattttccctaaatttgtcccccctttcctctccttctatttttctctccttagactccctcagacctgtaaccagctttgtgtctttttttccttcttctctttaaaaaccatgcattataacttggaaaccaaaaaaaagaaaaaaaaaaaaaaaaaaaagg

SEQ ID NO: 16025 - DNA, 764 bp, Macaca Fascicularis
  misc_feature (1)...(764): n = A,T,C or G
ggtcacttaccgggagcagccctggcacaaggagtgctttgtgtgcaccgcctgcaggaagcagctgtctgggcagcgcttcacggctcgcgatgactttgcctactgcctgaactgcttctgtgacttgtatgccaagaagnnnnnnnnnnnnnnnnnnnnnnnnnncggacnnnnnnnnnnnnnnnncatctcctttgaggaacggcagtggcataacgactgctttaactgtaagaagtgctccctctcactggtggggcgtggcttcctcacagagagggacgatatcctgtgcccnnnnnnnnnnnnnnnnnnntgnnnnnnnnnnnnngaagttgctgcttgtgatctcacacacagatttttatgttttctttctcacccaggcaatcttgccttctggtttcttccagccacatcgagactttcttctagtgcttttcagtgatactcacgtttgcttcaaccctttagtgctttgtgctagttcagtcccagggaaagagaaaactcgccctaggccctaggtgggaagatggtttgaaatttttgtaatcgagtaaggcacacccaaatgtaaaaatccttttgaattatgtctttataaatctttctctcactgcctatttaagtgcaattaatgtatgccacgaacttgaaagttttctaaactcagtaaggtaatgaccaannnnnnnnnnnnnnnnntgtaacttcctgttgtgtcaagtctaaaccaagattatnnnnnnnaaggcaag

SEQ ID NO: 16026 - DNA, 721 bp, Macaca Fascicularis
cagcctctgtgaagaaaacttcccacagggctgcactagcacagccagcctttgcttttacagcctgctcttgcctattaccataccagtgtatgtattcttccacctttggacttggatgggtattaaactcttcaggcataattgatgcaactagagtcaatatgctgtatacattaatggtagttcttgggcatctatctctgaaagctcaaatggatggaattgagtttgtgggaaagaggctttgctttgcgcatatcaggcttaggactgtgggaggcttaagttgcaggtgcttcttttattgtgctcttgttctgcccttgttttttgaaggctctgacttataactgctgtatcagaagaaacattttgacagtgtcttgttggagataaacatccctaattgacatgtgatgactatttcttattccattcatctaaaagtcattgaaattttgttttgcttgtttgtttagcttcaaggtctttggtaaagtcacatgttagggatgactgaaataattccaaaggagtgatgttggaatagtccctgtaagggagagaaatgcatttgaacgaatgtgatacaaaaccatataatgaaatagaaatttcatgtacttacaaaaattgagtttgtaaaattaccttcatttctttgacattaaatgcttatattagcaataaagatgtgacacttcccataaaaaataaa

SEQ ID NO: 16027 - DNA, 737 bp, Macaca Fascicularis
  misc_feature (1)...(737): n = A,T,C or G
aatatgggtccctgnnnnnnnnnnnnnnnctactatcactttggatagtcactccatgtatatttttagaaacctccattagggaatcattaaggctgtttaacatctgctctggatattacacattggctttttgttgcccagtgctgcaaacgttcctgtaggactcagtgtcttcaggcaatgattgtgtatcctgttacagatggttgtgatacaggaagaaccactcttctttgaaaataaaatgttggaagcttttgccagctatttggggggtagaaggaatattagtgactgtattgattgtctacagatacagaattgcctgttgtgagggaaccgagtgtttgttttgttgggaaaagaaatttaccaggagaaagagttttgtgctgtatcgtgagacatgtcgtctgtcagttaaatcagccctgggttaaagtcagtgttaaaggcagctgtgtgtgggcacgannnnnnnnnnnnnnnngactagatttgacttgagttnnnnnnnnnnnnnnnnnnnnnnnnnnntgaatttgctttcttatttaactagaaaatgcatatactatagatcattgtctcattttagtgatcgttccttaaactagtgaaactagtggatttctcttcttcctctttattttttacatgtcaaatgtgaaccttagtgtatttgtattttgtagaaaataatgaaacattttaatggagaatggttaaaaaca

SEQ ID NO: 16028 - DNA, 385 bp, Macaca Fascicularis
cccccaccatcatgaaacaaggaagacagaacctgtggtttgccaaccccgggggcagcaatagcatgccaagccgcacccacagctcagtccagaggacccgctcgctgcccgtgcacacttccccacagaatatgctgatgttccagcagccagaattccagcttcccgtgaccgaacctgacatcaacaacaggctggagtcgttgtgcctcagtatgaccgaacacgccctgggagacggggttgaccggacctccacaatctagaagctgaagatgagagtgaccgcgctggccgtgaaatcgactgctgcgggtccagtgtccgccatcttcagggttgcacagaatcctccaagatactttgcagcctttctttcccc

SEQ ID NO: 16029 - DNA, 750 bp, Macaca Fascicularis
  misc_feature (1)...(750): n = A,T,C or G
ggtaaaattgaggancnngctagctatatagaaccaaattgccctttgtacaggaaccaacccctggcccaggggcactggccaagcacaagtctttnttgctgcacgcctctctgctcttctctgccccttccttcccccctcctccagagaattctaggttacatgttggaccttctctactacttcgctgggcactagacttttctattggcctnnnnnnnnnnncagtattagcacaagtcagggaggaagaggcaggcgatgagtctagtagcacccaggatggcttgtagctatgcatcattttattacagtgttagcactttaagcacatcccctaggggaggaggtgagtgaggggcccagagccctctttgtggcttccccacatttggccttctgtgannnnnnnnnnnnnnnnnnnnnnnnnnnnnnnnnnnnnnnnnnnnnnnnnnngtctcctgcaccatgggaccccagccctgaccaacccctggttgccccatcagcaggaaggtgnnnnnnnnnnnnnnnnnnnnnnnnnnnnnnnnngttcaacagtgtggaagctttagggggacatggagaaaggaggagaccacataccccaaaacgacctaagaacgctttaaaaggcgacctgtaaatgattagaaattaatatagnnnnnnnnatatttttcccttgttgagatcttcttttgtaatgtttttcatgttactgcctaggacagnnntgagcacaca

SEQ ID NO: 16030 - DNA, 698 bp, Macaca Fascicularis
  misc_feature (1)...(698): n = A,T,C or G
agaannnnnnnnnnnnnnnnnngnnnnnnnnnnnnnnnnnnnntttcttttccatccataaccgagtcctcctatgggtacataaacccaaagtccccacttcttttaaaaggatatgaacacgttatataatacgtaccctgcttcccccaaccctgccttcttcactaaataagcatgtaggctcagtggtttccaaatttggctgcacattcgtatcaccagaggagtttnnnnnnnnnnnnnnnnnnnnnnnnnnnnnnnnnnnnnnnnnctgggagtgggagcctgacaccagtatttaaaaaaacaaaacaaaaaaaatccccaaaatgattccaatagannnnnnnnnnnnnnnnnnnnnnncacatcccaaagctaagatacagggttaaatggccttgtttaagtatgtcatactcttatctttaaataaagcaaggcttttgttacactttgtcataccatcattaaaagcagacctttgggctgtttaaccttgtaacaaagataccatgtgaaaaatacnnnnnnnnnnnnnnnnnnnnnnnnnnnnnnnnnnnnnnnnnnnntctaagtccttattttctgatggctcttnnnnnnnnnnnnnnntttttgtttttaatttttaacatcccatccgcagcctcctaattagcagtgttaggaatctgccttatgttttccatctc

SEQ ID NO: 16031 - DNA, 746 bp, Macaca Fascicularis
  misc_feature (1)...(746): n = A,T,C or G
tacataagagaattcatactggagagaaacnnnacaagtgtgaaaagtgtggnnnnnnnnnnnnnnnnnnnnnnnnnnnnnnnnnnnnnnnnngcattcatacttgagaaaaaaataaaaataaaaataggcacagcctttagtatctgctcgcatcctactttacatcagtttggacgtaacaaagttattataaatttaattactattgaaagacctttcatgaaatataagtctccagagcacacaagagtatttcttctgaaaaaaaatgttacaattatgttttatactagatggaagacatgcaacagttgcataaacttccagagaatttgtagagaaacccaacaaatatcataactgtggaataacatttgttcaaaaacgatagcttagaaaacatcagagttcatactaaaagatattttgcaaatacagtaaatgggaaacataagcaaaattcaatttaagtaaacattggaggatttgaagaagagaggaacagagcacggacgcgttctaagtaaacactggaggatttgaggaagagaggaacagagcacggacacgttcggaaacgacagtgaatccgtgtgttgagtctacagggacatctcgacttgaagtagatcgttcattcttatttaagtttaaaaggaggatgagactgagtttttgtagagttataattacattcaaaatacacgtttttgcattgaaaaaatgttaaattttgaaaagcg

SEQ ID NO: 16032 - DNA, 741 bp, Macaca Fascicularis
  misc_feature (1)...(741): n = A,T,C or G
aactcacnctacccagccannntgaactttatgaaggggttcccnntnctcctgggagctggcctcctgctcatcccggccgttctgattgggatgctggaaaaggctgnnnnnnnnnnnnnnnnnnnnnnnnnnnnnnnnagcccctgatctgcctggaccagaagacagagggcaagaggagcaaagtgaacaccaaacaactgaaggtctacagctggagcccagcccacagcagcaccagcagctcctttctaagggcagtgctctctttggacgaggtggtcaagacagaccaaggcactaccccatccatagctgnnnnnnnnnnnnnnnnnnnnntagaatcataacccacacaggcccactgcaggacaggtggcaggggagctattcgggacaggagtcagttcttcctttctgccatccatcacttataactccccagaccagaggagaggtcctgatggaggtgacacttcagggaccagaggcagcacaagggctggcatctctccttccagcccaaactgcacagtcccaggcaggttcctgacacgtgtagcagtcaccagccacttcttaacaatgaatgtggtacctggttagtgccagccttgggaaggagggagggaggtgagaggggcttggtgatctccggaggaggagcgctgccttcactgtggttgggaaattgatccttgnnnnnnnnnnacccactccctgggctgaagagtgcca

SEQ ID NO: 16033 - DNA, 545 bp, Macaca Fascicularis
  misc_feature (1)...(545): n = A,T,C or G
cttggaagagggacagaaagttaggaaaggtgttaggagggtggcaagaactggattttaaaagatagttggtgacccaaatcctgtttgcctgatgccacgttacatagtgggaggcaggaagatgtgtaaggaggccactgtgatgttcagtctggatgatggaaactaagagctacagacattgaaacagatgagtcctgctgcaggttgcaaatggggagtggcgagaggtcagaacggacaggggaagtgggaagggcatgctgttgctagtgctggggtgttttttcctgaaggagatgggaatctttaagcaggagagagatgtcagttttgtggcttacaaagatcactggccannnnnnnnnnnnnnnnngaagggaaggaataagaccgagactttaggggaatgttgctactgcaagcatacaaaaaataaggaagagcagaggcaaatgtggaaagaaggaccaccttggatagacagatgggagatggagttgatgaatctatgtgacaggatgtgggggtggggggaggga

SEQ ID NO: 16034 - DNA, 710 bp, Macaca Fascicularis
cgttgatagaactggagatgttcaaacagcaagttactgcatgttacagggttcacctttagatgttcttaaggatgaaagggttcagtactggattgagaattatagaaatttattagatgcctggagattttggcataaacgagctgaatttgatattcacaggagtaagctggatcccagttccaagcctttagcacaggtttttgtgagttgcaatttctgtggcaagtcaatctcctacagctgttcaactgtgcctcatcagggcagaggttttagtcagtatggtgtgagtggctcaccaacaaaatctaaagtcacaagttgtcctggctgtcgaaaaccccttcctcgatgtgcgctttgtctcattaatatgggaacaccagtttctagctgtcctggaggaaccaaatcagatgaaaaagtggacttgagcaaggacaaaaaattagcccaatttaacaactggtttacatggtgtcataattgcaggcacggtggacatgctggacatatgcttagttggttcagggaccatgcagagtgccctgtgtctgcatgcacgtgtaaatgtatgcagttggatacaacagggaatctggtacctgcagaggctgtccagccataaaatgttatcaccttaagagaaaccttcaagtgtggagctttctaataggtgtccttcatagctcagaaacatacct

SEQ ID NO: 16035 - DNA, 638 bp, Macaca Fascicularis
  misc_feature (1)...(638): n = A,T,C or G
tcacaggcgcacgcagacacaacaagactcccagcagcagagcccaagcactggcttcacccctccgtgccctggggcatgnnnnnnnnnnnnnnnnaggggggcgccctgcacatggcttcgctgtgcacagacgggaaggccgcccgttacaggcagtggagaccccctggccgctgagcaccttctagctcacgggtagtgggtttctgtattagtggggctgagaggtgtgggggcccctccagccccattatcagtgcacctgaaggtccacagcctgtgtcctagaagagggaagaggaaggaaggtgagtggggctggggatatggactgaagtgctgcggggcctggnnnnnnnnnnnnnnnnnnnnnnnnnnnnnnccgatttctggtcgtggcctggccttcccacagcagcctccaccacggccctggtgctcagcggcccctccttgctggctggctgcctctgctgccccgtaccccacactcatcagcctgaagttagtccccgcgtgccacctgcatcctgccnnaaccctgcccgcctggnnnnnnnnnnnnnnnnnnnnnnntgtctgaagttagtnnnngcgtgccacctgcatcctggtgtaactctgcatctggaaca

SEQ ID NO: 16036 - DNA, 746 bp, Macaca Fascicularis
  misc_feature (1)...(746): n = A,T,C or G
gcaggacgtgnnnnnnnnnnnnnnnnnnnnttcagcccatccaattcctgccttcttttcagaagtgagtgtcccagaaaagacaattgtacaacaaaggaatggacttttcctgaagctaaatggaacaccacagccagggtnnncagtcacatccgtcttggcatgggccatgttcttattatagtccagtgttttattgcttcaatggctagtatttataatgaaaagatattgaaggaagggaaccagctctctgaaagcatcttcatacagaacagcaaactctatttctttggcattctgtttaatgggctgactctgggccttcagaggagtaaccgtgatcagattaagaactgtggatttttttatggccacaatgcattttcagtagcccttatttttgtaactgcattccagggcctttcagtggctttcattctgaagttcctggataacatgttccatgtcttgatggcccaggttaccactgtcattatcacaacagtgtctgtcctgatctttgacttcaggccctccctggaatttctcttggaagccccatctgtccttctctctatatttatttataatgccagcaagcctcaaggtccagaatacgcacctaggcaagaaaggatccgagatctaagtggcaatctttgggagcgttccagtggggtaagtttgtgagggtgctcctttttgcttgttcttctcaaatttaaagcatagttaatcaa

SEQ ID NO: 16037 - DNA, 743 bp, Macaca Fascicularis
  misc_feature (1)...(743): n = A,T,C or G
gaccgaaatcggccccaagcgtgaccctgcgaccctgaaactgttcctgagtaacatggagcggctgctgcacgccaaggcacatggggtccgagtgattggaagctccacattggcactctgccacctggcctcgggagccgcggatgcctattaccagttcggtctgcactgctgggacctggcggctgccacagtcatcatcagggaagcaggcggcatcgtgatagacacttcgggtggacccctcgacctcatggcttgcagagtggttgctgccagcacccgggagatggcgatgctcatagctcaggccttacagacgattaactatgggcgggatgatgagaagtgaccgtggctgaggcaaagctgctctccaggcctccctgtgctgctgtgggctcctggggaggtggccctcctggcccacgctccatgccagtggctcacactctgctcctggctaccctagagggagctgtcacgctacagtgagtggctggccttttaaatccacgtctctctcaccaggatttggtgtttagctgtttnnnnnnnnnnnnnnnnnnnnnnnnnnnnnngttagtacgtgttcctctgtcagggccaaaacccagatctcctgtgaaatacgtattgataatccaatcttgatttttttccccccagaatataaatctcaggtaataaggcnnnnnnnnnnnnnataaagcggatcgttctcaggccctccccccagg

SEQ ID NO: 16038 - DNA, 751 bp, Macaca Fascicularis
aagaccaacacggtcagctactgcgggtggacctcagcacaccatcgccaagaaggggggaaagtgccctgagcgtgctggactcagcaggtggcagcggccctgagaaggcgacagtgcacccggcctttgtctaggcacacagacctagggtgggctgcgtccccacacttccatctgtcgcctcagtcacgtccgttaacctctctgaatctcagtgtcttctcttcctgacgcccccagcaccacctacttcagagggttgtttgaggtacaaagaagatataatctggattagcagtgacaaacctctaatgagattagagtatacgttgttagaaaaaacaacggctgtaaagatagcagctccagcgacggcccacaaagttttccatgcactcataaggaagacctcgagaatattttgttatatgaaaaaagaaaattgcagaataacgcatatagaatattacttttctcctaaggggggaaattagattgtatattcctatttgctgccatttgaacaaagtactagagggacacacgaaaagtcgctgtcaccatgctgtgccgtcaggcaggggcgggtggccggagtgggggaaccttcctcagtaaactgaaaaataagagagtctatcactcgcaaaatcaaaagaattaagtgacagcaagcaaaaaccttaaatacaaatacactatttctatcaggaaacccaacattagcaacacaccatcagcaaaacta

SEQ ID NO: 16039 - DNA, 734 bp, Macaca Fascicularis
  misc_feature (1)...(734): n = A,T,C or G
gaaagcaacatgaaatgatctgtagtaggtgtgtagcttggggaagtcaaatggccattttatacatgtgcatttggtatcatgggccatggaacagaatatattttggacctctgaacatttgtaaggggccaattctaagtattcttcacagcagccagaagttaatggtggtagcagctgaggtatggttgttggacgagaaggattttcttttttaatatggaacaatgaaaccaacaacaaacacttttaaaattaaaatgggtaatttgtaaatagtttttagcttttaaaatttgaagtgtttttgagtgtgaaaagttgagtaaaactatttgcaactggttttaagaaaagaaagaagaaaaacaacaaaggaattgaaacaggcagggagatcttaatacctaatttcatcatttctgaaaaaatgtactgttttagaatgtattacaatatcaatgtgaatatcttaaatcctgttacaaatcctgcactgtattaaacatgtaaattaattgtttgtctgattagccaaactcaccacccaaatggggaggtatccatgtttgaagaactgtgtaactcagtaattgacttgttctgatgttgtaactcaatagaagtgttttggaaggaagcatggtgtacgagacagtgtctgttcttttgtgccagctctgtatgatgtttgtaagannnntgtttgtaagannnngaataaattgctg

SEQ ID NO: 16040 - DNA, 1097 bp, Macaca Fascicularis
  misc_feature (1)...(1097): n = A,T,C or G
cgcgacactcannnnnnnnnnnnnnnnnnnnnnnnnnnttnnagctgtacctggaccctcactactgccagnnnnnnnnnnnnnnnnnnnnnnnnnacttccccctggagtccttccactgcacctcgccccgcaagatggccttcgccaagatggacccaagctgtactgtgggcttctatgctggagacaggaaggagtttgagacactctgctnnnnnnngaccagggtcctcggctcctcctcagccacggnnnnnnnnnnnnnnntcaccctggccgagggccatgctcaggaccacagcctggacgacctctgctcccagctctcccagcctacactccggctccctcgcacagggcggctcctcagggccaaacgccccagctctgaggactttgtgtttttataaagggaggggatgagggaaaagatgcaacactatttatttttttatttatgtcatgtcgagtgtgggatcttgagctctggcagtgagaacttcctgttctcagcccctcaagcccagctgcaaccagtctggggccattcagccagggacagagcccatgcacctgtctcccaccagcggggccctcctggcagggtagggagggaggaccccgggcacccccctcagggcctgactcacgtactgtagtttgcactggacgcctgggccctccctgtcccaaagcccccttgggggaactgtggctgctgggggccaataaagttgtgtgacttgatcgtggctgtggctgggcgcagcgttctaaggggatgtgaggtctgggaggtgtctcgagatgagagttccaagtcacgggaagtttaagtcagcctcagtttccacatccataaaatgggacgacttccttacccgcagctacacgtgtttaaatttttttttttttttttaaagagacagggtcttgctttgtcgcccaggctggagtgcagtggtgcaatcatagttcactgcancctcaaattcctggcacttaagtgatcctccttcnncagcctcctgaatngctgggactacannnnngtgccaccacatttttgtnnntatggagtctnnntgtgtntg

SEQ ID NO: 16041 - DNA, 716 bp, Macaca Fascicularis
  misc_feature (1)...(716): n = A,T,C or G
atcaagctaatgagcgagtgaaggatgccagtccaaaccaggttgcagagaaggtggcctccagaatcgccgagggcttcagcgacactgcactcatcatggtagacaacaccaagtttacnnnnnnnnnnnnnnnnnnnnnnatccacgtgtacgagcaccatgagaacagatggcggtgcagagacccacaccatgactactgtgaagactggccggaggcacagaggatctcagcctcactcctggacagccggtcctannnnnnnnnnnnnnnnnnnnnnnnnnnnnnnnnnnnnnnnnnnnntgactggacaaacccagagatcaataaagctgtcctgcacctgtgctaggcaggcaccgccatgactgggctccaggcctttccactacgttgaagaagaaaacctatttttaaatgtaaataaaatatcttgtagcctgtgtggaaagctgaccgttttaagaagtggcatgtgccttgaaagggggcaaaatgttcagtcggtcgtgtttttaacagagtctctagaagaggtgcagacatcccgtctgactgtccctgtggactctctcagttgtatgttgctataatcctccaaatcaaagctctttctgcttgtgcaagattgttcctattaaacagttttaactaaccttttataatctggagagaatactttttaaggcttttgaactatctttttaaaaaa

SEQ ID NO: 16042 - DNA, 685 bp, Macaca Fascicularis
  misc_feature (1)...(685): n = A,T,C or G
gctgctgccagccaagctgctgccagacnnnnnnnnnnnnnnnnnnnnatggcattggtggtggcatcnnctatggccaggagggcagcagtggatctgtgagcacccgtatcaggtggtgccgcccagactgccgtgtggagggcacctacctgcccccctgctgtgtggtgagctgcacacccccatcctgctgccagctgcaccacgccgaggcctcctgctgccgcccgtcctactgtggacagtcctgctgccgcccagtctgctgctgctactcctgtgagcccacctgctagaagccagtttgctgattttcaacttgaaatttccactttcagttcaattcatgaatgaattatttcttcaagcacttgtggaccactaacaaattcttgaacttttctttggctttgttatgggggttaccaaatatttaggnnnnnnnnnnnnnnnnnnnnnnnnnnnnnnnnnnngaccttgctcttctctctgaggaccaaaatacaaatttgacccaaaaaatgaaaaagccgatttaccttgaaattgacccttacaagcattgaagcccacgctctgagtctcagtgccgacgagaccatggaagagccatctgttcttctcaggacactcactttctctattccaccaccctgcaaattgcaccccnnnatgaaagagg

SEQ ID NO: 16043 - DNA, 731 bp, Macaca Fascicularis
  misc_feature (1)...(731): n = A,T,C or G
gaaagnnnnnatgagtgcagcgaatgtnnnaaattgtttatgtggagttccacactcattacacatcagagggttcacactggaaagaggccttatggttgcagtgaatgtgggaagttctttaagtgcaactcaaacctctttaggcattacagaattcatacaggaaaaaggtcttatggttgcagtgaatgtgggaagttctttatggagaggtctacactcagtagacatcagagagnnnnnnnnnnnnnnnngccttatgagtgcaacgaatgtgggaaattctttagcttgaaatctgtcctcattcagcaccaaagagttcacactggagaacggccttatgaatgcggtgaatgtgggaaggccttccttacaaagtcccacctcatttgtcatcagacagttcacgctgcagcaaagcagtgcagtgaatgtgggaaattctttaggtataactccacacttctcagacatcagaaagtccacactggataaggccgttatgaatgcagtggatgtgggaaagccttcagtcgccaannnnnnnnnnnnnnnnnnnnggcagtacacactggagaaggactgagtgtcatgaatgtgggtaattatgtaggtacagttctccaatcgctatgtatcagataattcacactgcagaaatgtgtgttcagcaaacttgggacattattttggtttgactctcattagacataggagagtttaca

SEQ ID NO: 16044 - DNA, 688 bp, Macaca Fascicularis
  misc_feature (1)...(688): n = A,T,C or G
tggcatcccacacattgcccaactcgctggtgtatggagccgactggtcctggctgcgcttccgttnnctgcagcgggccccctcgtggtcctttcctagcaacctaggaaccaagaccgcagacctgaagggtgcaggcgnnnnnnnnnnnnnnnnnnnnnnnnnnnnnnnnaatagcgatggggcgggccatgccagaccccagagtggaatgaagccactcacagagcgcatgaggaagagcggcacctggctgcaggctacagcagccaccacgcgtgactgtggcgtgaacccggaagaagcagactcgaccttcagcctcctggccacctgctccttctatgaccatgcgctccacctctgggagtgggaggggaacggagcttnnnnnnnnnnnnnnnnttcccataaggaaaccaggagggagactgagtgaatgcctgggaccnnnnnnnnnnnnnnnnnnnnnnnnnnnnnnnagnngcctgtgcactgatggaatccacagtgtagtcacaaaagctgttgacttctcttaaatcaacttccctgctaggcnnnnnnnnnnnnnnngggtgattctctctggcagacagtgggnnnnnnnnnnnnnnnnnnnnnnnnagatttgttaagtttttcaggtagattttgactttcagcctttcatacttgttaagcaac

SEQ ID NO: 16045 - DNA, 688 bp, Macaca Fascicularis
  misc_feature (1)...(688): n = A,T,C or G
gcacttctgataagaaactcctcattccactgtggtacccacatcccttttagcacctagccatggctgctattaggctggtactgggggcaggagggctggacagacccaccgggcaagcttcttaggcatgtgtacgtgtgtttcttgcaggggaagnnnnnnnnnnnnnntccgctgtaccacgcaatgatgggtggcagtgaggtggcccagaccctcgccaaggagacctttgcatccaccgcctcccagcttcacagcaatgttgtcaactatgtccagcagatcgtggcacccaagggcagttagaggctcgtgtgcatggcccctgcctctnnnnnnnnnnnnnnntttnnnnnnnnnnnnnnnnnnnnnnnnnnnnnnnnnnnnnnnnnnnnnnnnnnnnnnnnnnnnnnnnnnnnnnnnnnnnnnnnnnggcttaggtatctgtgactcttgggnnnnnnnnnnnnnnnnnnnnnnnnnnnnnnnnnnnnnnnnnnnnnagagaacctgcccacagctctccccgctacaggctgcgggcactgcagggcagcaggccttctccgcctctccgcctctccgcctaagtctctgggaagaagtggagaggactgattctcttcttttctttttttttcttttcttttttctcgctgatnntatgcaaagggctggcatt

SEQ ID NO: 16046 - DNA, 720 bp, Macaca Fascicularis
  misc_feature (1)...(720): n = A,T,C or G
gagaagtacacacaggaatacatatgctcctctattcttcccttcatcctcatttgaacgccaggtgtctcccctcctctctctcccctgcagaggcatgtagggaacagcagagattattctcaccaaagttatgtcaagccccattggcccctggagtagctggagggaagccaaccccctgcagcacaaacaggccccccagccgcagccgtgtgctggcagatagggttgtactattttttcttaccccatgcctgaccaagggaggtcaaaaggagaaaagcataggctgtggacaataactgatgaatatagggcccagatggaccaagtgtggccggggagggatgaacaaaaaccctaccccatgccctgtctttggtgagcagcagccctggggtcacagacatggaagggaccacctggggctgactgcttttctgtgctgttggttcccaaaactataaagaaggaagcagggagcggtgccccaagcatggctcctgccaacacctatttatttccttgtttgtgctatgctgggcaggccttctcttgtcccttgtaggtaccttggaggggccaggggctgaggagggctggacccaggttccaggggcgcaggcagtgcggcttttggctgtgtacatagggtnnnnnnnnnnnnnnnnagtgatacatgctaaggtgggttgggcttgggccgatgtccccata

SEQ ID NO: 16047 - DNA, 738 bp, Macaca Fascicularis
  misc_feature (1)...(738): n = A,T,C or G
atgcaaggtgnnnnaaaccatggtcttnnnnctaccnnnnnnnnnnnnnnntaatgtccaacgacgggcannnggaatgcgccagatatatggacatcagggaggcaacagaactgagaggccccagtttctcaacctcccctatcaagatctgccactattggatatcaaggcattgcacaaggataatgtctcggtgaacctatttgtagtgaacaaaccctggctcttctccctgctttggtgtgcaggggtggattcggtcaccaccnnnnnnnnnnnnnnnnnnnnnnnnnnnnnnnnnnntatctggcttattacccctcaaacctacctaatcatatgggtcattaccaattctgtctccaccatgctgcttctgtggaccttcctcctccaaaggagatttgttaagaagagagggaaaactgnnnnnnnnnnnnnnnnnnnnnnnnnnaggatcaacaatttcatgatggagtgnnnnnnnnnnnnnnnntccccacccaaggcagtctacattgcgcaaacagcaagggttggagagcagctgaaatggaatgcttcaggggtggtgggttgcagtgagaggagctttgccaacaggagattttgaaccatgagggccccttgcctaggtgatgggcattccctaagctgctatggaatctgctccccttggggttttgacctgagatgtttgggaacacagtgagtcatgaatggtctctctccaga

SEQ ID NO: 16048 - DNA, 757 bp, Macaca Fascicularis
  misc_feature (1)...(757): n = A,T,C or G
ttggggggtatacnncagacatatcagaacantgtagnnnnnnnncatntnnaaattannnnntctaaaacataactgnnnnnnnnnnnnnnnnnnnntcctaaaattccaaaattatattgagcaatcgccaaggcctaaagccaattgacctttaaaggtaatcatttcagctaacattaaatttaaagcctaagaatgtatagagctagttttaaaataatgatctcagatttttaaaaaggatataggaacctgcattgtcattctctgaattcagaactgatggtttctatcattatttagccccacctttgtattttaatgtccttcagaatacttttatgaaccaatgagactggacttagccacacacaatggaaattcagaccttgactnnnnnnnnnnnnnnnnnnncaaaggtgatgaagactgtcttgggagcaacttaatcccagaagttgtacatttcttgcagctcctggcgtggaaacttaagtgagaccaccaaatacattggtcctgtccaattctactgaatgggggtggacttggnnnnnnnnnnnnnnnnnnnnggagccagagaaatatgaatataaccaaagttgtttagcctccatcttaaattacgttagtcaacttatagatattcatatgatcacttttctttttagatactacatcaactagattcacgaatatatnnnnnnnnnnnnnnntattggtttaaaatataagattttaagctcctctaaca

SEQ ID NO: 16049 - DNA, 717 bp, Macaca Fascicularis
  misc_feature (1)...(717): n = A,T,C or G
acctggtgccgntnnnnnngcgtaatccgcnnctgcggagtgtggcgctgggcggttgcgggcaactgagtcgtcggnnnnnnnnnnnnnnnnnnnnnnnnnnnnnnnnnnnnnnnnnnnnnnnnnnnnnnnnnnnnnnnnnnnnnnnnnnnnnnnnnnnnngcggcctcgctgaccgctgcccggccctggaggagctggatctcaccgcctgccgccagctcaaggacgaggccatcgtgtacctggcgcagaggcgcggcgctggcctccgcagcctctctctggccgtcaacgccaacgtgggggacgccgcggttcaagagttggctcggaactgcccagaactccagcaccttgacctcaccggctgcctccgnnnnnnnnnnnnnnnnnnnnnnnnnntggccgagtactgccccgcgctgcgctcgctgcgggtgcggcactgccaccatgtggcggagtccagcctgagccgcttgcggaagcgcggcgtggacatcgacgtggagccgccgctgcaccaggccctggtgctgctgcaggatatggctggcttcgcaccttttgtcaacctgcaggtctgacgcgcctgccaatcggagcacagctggactgtgtggctggggcctgacactgagctgtagggaacctgaactgtggggacctctggtgagaggccnnntgccctgccccaccctgagctcaaaaaag

SEQ ID NO: 16050 - DNA, 708 bp, Macaca Fascicularis
  misc_feature (1)...(708): n = A,T,C or G
gtcaagannnnnnnnnnnnnnnnnntcaagtgctttggagaacagaataaaaaacagccccgccnnnnnnnnnnnnnnnnnnnnnntttaatttggannnnnnnnnnnnnnnnnnnnnntgtcacccaggctggaatgcagtggtacggtcacagctcaccacagcctcaaccttctgggctcaagtgatcctcccacctcagcctcccaagcagcagggactacagtgccgaagacgcagatgaaattcagcgtccagacgatgtgccccatcgaaggagaagnnnnnnnnnnnnnnnnnnnnnnctctctgtttggccagaagcataatgctgtcaacgcaacccttatagatagctgggtagatatcgcgattttnnnnnnnnnnnnnnnnagcagtaaannnnnnnnnnnnnnnntccgttctatgaactcagctcttgggaagagcccttggctcgctgggaatgaactcaccgtagcagacgtggtgctgtggtctgtgctccagcagaccggaggctgcagtgtgacagtgccagccaacgtgcagaggtggatgaggtcttgtgaaaacctggctccttttaacacggccctcaagctccnnnnnnnnnnnnnnnnnnnnnnnnnnaagagtttagattttaagaatggtgctctttcatgcctattatcagtaaggggacttgtattagagtcaaagtc

SEQ ID NO: 16051 - DNA, 729 bp, Macaca Fascicularis
  misc_feature (1)...(729): n = A,T,C or G
cagccaggtgcggannctacaggagaagctggacgagctgaggagagtgagcgtcccctacccgagtggcctgctgtcgcccagccgcgagccccccnnnnnnnnnnnnnnnnnnnnnnnnnnnnnnnnnnnnnnnnnnnnnnnnnnnnnnnnnnnnnnnnnnnnnnnnnnctaccccacactgcagcccttccagtacctggaagaggttcacatctcccatgnnnnnnnnnnnnnnnnnnnnnnnnnnnnnnnnnnnnnnnnnnnnnnnnnnnnnnnnncgatgcacagagagtgtggcttcatccgcctcaagcccgacaccaannnnnnnnnnnntgnnnnnnnnnnnnnnnnnnnnnnnnnnnaggtggaggagggtgaggtgaacgggcaggagctgtgcatcgcatcccaatccatcgcnnnnnnnnnnnnnnnnnaggagccccaagtnnnnnnnnnnnnnnngaagttcaggctgaattctgaaggcaaacttgaacagacagtctccaaggcaaccacacacacagccaatgacccaagcatattcatgtcacatacaagaaggtgaccccgtaacctagagcttctggagccatcaggagggcctggctaatgtgtctcaacggttaggctccttggcatacagtccctgcagcagaagtgggtgtggccgggagcctctgcgggctcaagagtgttgtccagatgtttctgtacggc

SEQ ID NO: 16052 - DNA, 749 bp, Macaca Fascicularis
  misc_feature (1)...(749): n = A,T,C or G
atgttgacatggctacagttgnnnncagcatcttaggtgtttgtctgtnnntgatccccaacattgttgatgaagataattcnnnnnnnnnnnnnnnnnnnnnnnnnnnnnnnnnnnnnnnnnnnnnnnnnnnnnnnnnnnnnnnnnnnnnnnnnntgatagtatatagatccatcaaggagaagatcnnnnnnnggactgcactgtttacctttggttggacagggacaatttggggaatatctacaatgttcattcttcaagaacccatcatnnnnnnnnnnnnnnaaacctggagttatctcattgctatatgtgtctgttctactgcnnnnnnnnnnnnnnnnnnnnntgccttggacaaattccatccagctttggttagcacagtacaacatttggagattgtggtagctatggtcttgcagcttctcgtgctgcacatatttcctagtatctatgatgtttttggaggggtaatcattatgattagtgtttttgtccttgctggctatnnnnnnnnnnnnnnnnnnttaagaaggcaggactaccaggaaatactagactctcccattaaatgaatacttnnnnnnnnnnnnnnnnnnnnnnnnnnnnnnnnnatnnnnnnnnnnccattttaatgtttacctatgaatgtcttttgtgttatataattgacagagtactatataatatataatatatacaaatgcagaaaatttattctagtctaatatatcaaatacaaa

SEQ ID NO: 16053 - DNA, 757 bp, Macaca Fascicularis
  misc_feature (1)...(757): n = A,T,C or G
gtgcagagggcatgaatgaaatctggcttngtnnnnacaatgaaaaacagtnnnnnnnnnnnnnnnnnnnnnnnnnnnnnnnnnncaaaggcaagaccatggcggacagttcttacaacttagaagttcaaaatattctttcctttctgaagatgcagcatttaaacccagatcctcannnnnnnnnnnnnnnnatcacgactgatataaatcctgaatgtttggtgtctccccgctatctaaaaaagtataagaacaagcagataacagcgagaatcttggaggcccatcagaatgtagctcagatgagtctaattgaagccaagatgagatttattcaagctnnnnnnnnnnnnnnnnaatttggcatcacacacttcattgcaaggttccaagggggcaaaaaagaagaacttattggaattgcatacaacagactgattcggatggatgccagcaccggagatgcaattaaaacatggcgtttcagcaacatnnnnnnnnnnnnnnnnnnnnnnnnnnncaaaatggtcaccgtagagtttgcagatgaagtacgattgtccttcatttgtactgaagtagattgcaaagtggttcatgaattcattggtggctacatatttctctcaacacgtgcaaaagaccaaaatgagagtttagatgaagagatgttctacaaacttaccagtggttgggtgtgaatagaaatactgtttaatgaaactccacggccataacaatatttaactttaaa

SEQ ID NO: 16054 - DNA, 771 bp, Macaca Fascicularis
  misc_feature (1)...(771): n = A,T,C or G
cagcaggattgagctnnnnnnnnnnnnnnnnnnnnnnctggncctcatagctggtcatgtgccagnnnnnnnnnnnnggggcttgcaggtcctggaaggtggtggtcttnnnnnnnnnnnnnnnnnntaaaaaatgcgtagggtgggtggcagttggggnnnnnnnnnnnnnnnnnnnnnnnnnnnnnnnnnnnnnnnnnnnnnnnnnnnnnnnnnnnnnnnnnnnnnnnnncacagggcccttcatgtgtgggccctcgagtgatctccactggcaggctgaaagccctgtgaggggcggctgtgggcagaggccacgcagnnnnnnnnnntaggagtcatttgtttctaacacctgtgtgctaagtgtcaatgctggatgtggtgttatgatgtatattggttttcatccagcattcctgactcgtgactcccatagtcctcgttccagtctttgttggaatattgggtatgttagggctctgggggcaggcctctgacctctgggtatcttttcactaatgtttgcccacctttttgatggtgggtcctaaagaccttcccatgaaagagtctcaatcctgggggaaggaatgctgatgtcatgaagcttccataaaaacccgagaggacagggttcagagagcttccggatagctgaacacctggcgcttcctggagtgtggtgtgcccagggagggcatggaagctccgcaccccttccccttccctcattccttgccctatgtgcatctcttcatctgtatcctc

SEQ ID NO: 16055 - DNA, 645 bp, Macaca Fascicularis
  misc_feature (1)...(645): n = A,T,C or G
aaaggaccagtggagggaagagctatactactggagaagtaggcctggagttactacagtatgggggagaagggccgagnnnnnnnnaagctaaggcagttcctattgcttccttgcgcaacttctcaaaacgatgtaaagtcagagggctgtcaaactcaagtatcttttgcaaacactgaatactgtgaattcattaagaagaatgttcaagagaaagcaggggtctgatccaaaagaaatgtcattaacaaatactccaaatgcttgannnnnnnnnnnnnnnnnnnagttgaactgtgactgacaggtaatcctaatatatccaaatcaaactgaataccaaattgagatggcaaatttttgtttgatccaagttagcttgttagcatacgccctagagggcctccgcccctacattctaatgtttttattgaaagctctagcctttaggnnnnnnnnnnnnnnnnnnnnnnnnnnnnnnnnnnnaattcacactaaaggggaaagatcaaacctcttccccnnnnnnnnnnnnnnnnnnnnnnnnnnnnnnnnnnnnnnnnnnnnnnnnnnctgagttctgtaaatgttttgacttgttgcagaaattcctatctacattattaagcagtattgatgttc

SEQ ID NO: 16056 - DNA, 702 bp, Macaca Fascicularis
  misc_feature (1)...(702): n = A,T,C or G
aggaccccagnnnnctggcctngnnnnntncnngccccctggtgtcccctgcccagaatggagcacggcctggggaccctgctcgaccacctgtgggctgggcatggccacccgggtgaccaaccagaaccgcttctgccgactggagacccagcgccgcctgtgcctgtccaggccctgcccgccctccaggggtcgcagtccacggaacagtgccttctagagcagggctgggaatggggacatggtgtccaccatccccagcaagtggccctgtgcctgggccctgggctgatggaagatnnnnnnnnnnnnnnnnnnnnnnnnnnnnnnacactttagcttgggtccaccatgcaggacacgattaacaccctgcctggtctgcctggaccccgaggtacagtggaggtgcaagacctagtcccctttcctctaactcactgcctaggaggctggccaagatgtccagggtcctctagcccattccctgcctacacacaccgcttatatcaaacatgcacacaggcgagctttctctccaacttcccctgggcaagagannnnnnnnnnnnnnncttaacattgaggcttcagcaggtgctgggctggactggccatttttctgggggtaggatgaagagaaggcacacagagattctggatctcctgctgccttttctcgagtttgaaaatcgtccg

SEQ ID NO: 16057 - DNA, 755 bp, Macaca Fascicularis
  misc_feature (1)...(755): n = A,T,C or G
gcccggtgcctccgtcacttcctcagnnncagcaatgttcccttnnnagngtcatggagctggctcgcctcaagtctttcattttcccaggctaggtagggctgcgaggaatgcattaagagggtttgggagtttccgagaacctggaggagcaaagcttgatttagaacctgtctgcctctctgggtccttggcaggtcccctgtcctcctgggtgggagcttacggggtggtggggcagaaggactgaaggtcactcctagatctcagtggctggctgcttggccaggacagtgatggcgccagggagaacttctgcttggtgaccagggacatgtcccagatggacacaggagaagcccctctctgcctacctgggattttctgggcttttaattttgagttctctaggatggaagggtatatgtgggagataagggaagtggggtgagaggagaaaggatatgttggcatgggcccgtgtgatgtccctgaagcagaagagccagggactgatggggtcaggtgggagctgctgggtgaggcagggaaacttttcactcccattccttagctttagtctaatggagccaaggactgctgggaccttcaaccctgaccttttgtcatccagtcttctcttagtgtcctgctgctaggttcccttctcttctggttcctctcccgggtgttctcttcccaggcctctctggccactgctttgtatcagggtttttcacgcttttgtagaactg

SEQ ID NO: 16058 - DNA, 773 bp, Macaca Fascicularis
  misc_feature (1)...(773): n = A,T,C or G
aggagagtagcagagaaactttctagcagcccagtaaactggnnnngaagagatctagccatctccctccctcccacagttccnnnnnnnnnnnnnnnnnnnagcatttnnnnnnnnnnnnnnnnnnnnnnnnnnttctcttccnnnnnnnntnnnnnnnnnnnnnnnnnnnnnnnnnnagggagagagcacctaggagttgcctgccccagctggggtgacggccgtggggctggggctgggtctgtgttgcaagccctctcccagcatgcagtggagagtgcttagctctctccctcccgacctctgggcagccagtcatcaaagcagagagacgtggcggcatgtgggcagcatgcccaggttccttgctgactcagcacttacttatgtagtttttaaaaagaatttaatgttttcggttgtatttttttgtgggggtgagggtgggcaaaaacgtggggggagttctgagttgttagaaatgtttctgaatcaagtttgtttgnnnnnnnnnnnnnnnnnnnnnnnnnnnnnnnnnngtcatgagacccaagaactgagaagctttgttgttgttttttttgctttatttacccatttatgcctagtgttccattattgnnnnnnnnnnnnnnnnggagttatttctatcctactgctcaaggtcatcgccaaggtctgatttttcataaaaaacatnnnnnnnnnnnnnnnnnnnnnnnnnnnnnnnnnnnncctgaagctgcaatgcagatnnntcagataacttt

SEQ ID NO: 16059 - DNA, 718 bp, Macaca Fascicularis
  misc_feature (1)...(718): n = A,T,C or G
tcaaggtcgacagcccggacgtgaagaggtgcctgaatgccctagaggagctgggcacccnnnnnnnnnnnnntcagatcctccaaaagaacacagacgtggtggccaccttgaaaaagattcgccgttacaaagcgaacaaggacgtgatggagaaggcggcagaagtctacacccggctgaagtcacggnnnnnnnnnnnaaagatcgaggcggtgcagaaagcgaacaaggctgggacggagaaggagaaggccgaggagaagctggccggggaggagctggctggggaggaggccccccaggagaaggcggaagacaagcccagcaccgatctctcagccccggtgaatggcgaggccacgtcgcagaagggggagagcgtggaggacaaggagcacgaggagggtcgggactcggaggaggggccgaggtgtggttcctctgaagacctgcacgacagcctacgggagggccccgacctggacaggcctgggagcgaccggcaggagcgcgagagggcacggggggactcggaggccttggacgaggagagctgagccgtgggcagccaggccccgcccccgcccgagctcaggctgcccctctccttccccggctcacgggagagcagagtggagaactgtggggaacgccgtgctgtttgtattggttcccttgggttttttttttctgcctaatttctgtgattccaacc

SEQ ID NO: 16060 - DNA, 772 bp, Macaca Fascicularis
  misc_feature (1)...(772): n = A,T,C or G
agcagtnnnnnnnnnnnccttttcacatnnnccaatgttcnnnnnnnnnnnnnnnnttccattttctctttcacctcattttgcctcgccatcccccatccctgcttatttcttaagcccatcgatggcactcattaaattgtgtttagggctaatgaatcattgttccttaatattgttttcaatatgccacaatttaggacacatttaaaattttctagaacaataacctaatcaatattgactaatttgagccacattcccaactcaaactcagcacacactgccagtcttccccaatatctcctttcaattccccattacaccttataaagttggaatcaaagatatctcattctgtcattgttaatctaagaataaaaacactgacttgaatacagttttactaagtttcaaccttctaagtagataggcctctaggtattctgcagatcactggtggtcttgatagctattaatatatgtttgtattatgttatttttcaactaaatcgcagtcgaaaaaaacatttaatattatgcccttggatctattactgcatcactagcacttgtgatgcagtcggacacttcgcctgtactgaaagggccaagagtaaatgccttgttttgtttttttgttttgttttttgttaaacatgtctatagagttggcagttaatgctgaatttgtcaaataccccttccaaaattatacttgtatttaaaaaataaatggatctacctaatttctattgatttaatttgcagt

SEQ ID NO: 16061 - DNA, 719 bp, Macaca Fascicularis
  misc_feature (1)...(719): n = A,T,C or G
aagatgggctgtacatgcagagtgtggtagacgccatcaagaggtcgagccgatccggggagtgggaggctgtggaggtgctgacggaggagcccgacaccaaccagaacttgtgtgaggcacttcagcggaacaacctatgaacctgcacctgggctccnnnnnnnnnnnnnnagggaccagggaggggaacaggagccagatgtgacaggggcttggccctagcagagatggtatctttcacccttaatgagtctgggtgaagccagaggtggccctgggacttcgccccctccnnnnnnnnnnnnnnnnntcagacttgcagggtggcaaatgttcttgttggccaggttaccacggcgtgcagagggcagagctgccgccgggcctcctcatggcaatgccagtgagtgggactcggaaaggctcaccctggtgagcccctcagcctgatccgcagtcctaatggtgagaaagcacaatagggccagctcggctgaggcccgaggagaaatgatgagaagtttcatttccttcttgggctgggacannnnnnnnnnagtgagggcaacaagctgtccctcagggaccctcacctgccctcccatgtgaccaggcccttcccaggtggggactggggcttgctttattaagtgagctctnnnnnnnnnnaagtaggacagagggccctgatttggcagagaggaggcaagggaggg

SEQ ID NO: 16062 - DNA, 716 bp, Macaca Fascicularis
  misc_feature (1)...(716): n = A,T,C or G
gcggtagcccctatctggatttgtctnncntcagttatgatgacaagtgggtatctgtcatggagcggcccaagacttgtggagatcacccaatcaggttctatgcccgggactnnnnnnnnnnnnnnnnnnnnnnnnnnnnnnnnnnnnnnnnnnnnnnnatcaaccacacagtgcgacgccttgttgccttcacctttcacccttttgagccttttgctatttctgtgcagaggactaatgctgagtatgtcgtcaacttccatatgcgannnnnnnnnnnnnnngtgcctcaccagagccnnnnnnnntggtcttccaagactttgccacccacttatctcagtggactccaaagcaaaaactcctgacnnnnnnnnnnnnnnnnnnnnnnnnnnnatacctcagatgggagagagccagagagannnnnnnnnnnnnnnnnnnctaaaggaatttttaaattgtatacaatannnnnnnnnnnnnnnntaatatcctcttacattttccctgtgggaatgcccagcattaagtaagtccatttcatttttgctttactttgnnnnnnnnnnnnnnnnnnnngaaagcattagacttttacccccttcgtgtcacttctttggcattatggtttgcatcnnnnnnnnnnnnnnnnttgtttactcatgagaacgatgtacatcctttccatttaacccataagcacgactatc

SEQ ID NO: 16063 - DNA, 685 bp, Macaca Fascicularis
  misc_feature (1)...(685): n = A,T,C or G
tgtcagggactgaaggggaccccaaaactggctcacccccagaacaccntnntcccagggagggtcctccagctcacctcatgcttcttatttggggagagggctgtgatgtaaaggggttgacctcagaggcctaggcaactggggccatcccccccattagaagggccccaaaacttggttggagnnnnnnnnnnnnnnnnnnngaggaaaggataaaccccaatattgggacctcacagtgggtgtctgaaaggacagatcactccggagtatcagggattgtggggacaggagtgagacaacctccaggtacagcactgacttctcagcccctggcagggcccccccactcctctgcatgtcttggagggccgtagttacacattggcttgtcccctttactttttcccagccacccctccccctgaaatttctgcctctctctaccaccctcactccatgacctgtgagatcacaaagtgaagattaaccctttctgtgcaggagcagagccaggtgggccctggaaatattttttttttaatataacgagatatttataagtgggtgctagggtcttgactttatctcagctgcacaagtagtgggttgaagctttctaatctcatctcccccacaagtgagctgtgagctagactgttcttccctcccctctcaaagt

SEQ ID NO: 16064 - DNA, 698 bp, Macaca Fascicularis
  misc_feature (1)...(698): n = A,T,C or G
gccgcgcctgtccccgggnnggnnnnngacatcttccatcgggtggggcccctgtctgtgtnnncagccaagaaccggtggcggctggcggggcccgtccacctgacccgaggagacggtggcttcggcctcacgctgcggggagactctcccgtcctcatagctgctgtcgttccagggagacagaccgcggcggcccgcctgaaggagggtgactacactgtgtcagagaacgggcagccgtgcaggtggtggagacacgcagaggtggtggcggagatgaagactgcgggagaggcgggtgccaccccgcaggtggtgtcagagctgcccagatctaggctgcccaccctgggggaccgccgacccgccctgctgggccccagggggcttctaagcagccagagggagcacggctgcaagaccccggcatccacgtgggccagcccccggcccctcctcagatggagccgaaaagcccagcagggcaagcctggaggctgctcccagccccgtgccccagagaagccagatctgccctcatcctcgaagtgcccagggtggctgtgagggccaggctccctgcacacatcagccctggctccagctggtgggaagcagcaagcatgccctccccacccagaggacctctgggcaatgcctgccccgcctcatgccagaggctgcctcgggcacct

SEQ ID NO: 16065 - DNA, 760 bp, Macaca Fascicularis
  misc_feature (1)...(760): n = A,T,C or G
caaaagcattgtggaagcttccaagggctgccagctggggaagacagagcagggctttgagaacatggacttctttactttgaatttagagcacatagcagatgccctgagagccatcgactttggaacagatgaggaagaggnnnanttcattgaagaagaagatcaggaagaggaaggctccacagaagggaaggaggaaggacaccagtaaggagctggatgaatgagagaccccccagatgcagagagactggagagggtggggaggggcccagcgatcttggtgacaggcccaggtgggaggggtcggggcccctggaggggcaatggggaggtaatgtcttctctctgctcagagagcagggactagggtaggaccctcactgctgcgtccagcagacactgaaccagaattgaaaatgtgcttgaaacaatcacacaggacacttttctacattggtgcaaaatgaaatattttgtacatttttaaaatgtgatttttgtatatacttgtatannnnnnnnnnnnnnntgctttttgtaaaggaacttttgtataataatgcctggtcgttgggtgnnnnnnnnnnnnnnnnnnnnnnngaaggnnnnnnnnnnnnnnnagctgcccacttcctttcctgagcgggaggacggggtagcactcacagggacgatgtgctgtatttcagtgcctagcccagacatatggggtggtaactgagtttgtgttatatgttgttttaataaatgcaca

SEQ ID NO: 16066 - DNA, 745 bp, Macaca Fascicularis
  misc_feature (1)...(745): n = A,T,C or G
ggctgctgatgacnnnnnnnnnnnnntatccatctacacatgccttggagttgacattgaaaaatttcttgataaagaaagtgaaagaattactttaatacctctgaatgaggtttttcaagtgtcgcaggaaggggctggcaataaccttatccttcaaagcacaaacaagacctgcagccattatgagtgtgcatttctaggtggactaaaaactgaaaactgtgttgagaacctagaatattttcaacccgtctatgtctacaaccctggtgagaaaacccagaagcttgaagaccacggtgagaaaaaccagaagcttgaagaccgtggtgtgaaaatccttgaacccaccgaaataccagcnnnnnnnnnnnnnnnnnnnnnnnnnnnnnnnnnnnnnnnnnnnnnnngtcccaaaagccatccttctgcatccttgggcaaaatgctgcttccagagtttgggatggtcatcattttaatcagtgtttctgctataaatctctttgttgctctgtagtttcatgcattgtttatctttcttgnnnnnnnnnnnnnnnnnntatagggatcccacaggagatcaaaaggaatgatgtannnnnnnnnnnnnnnnnnnnnnnnctgataaaatgagaattgtatatttgttattcattttgcnnnnnnnnnnnnnnnnnnnnnnnnnnnnnnnnnnnncttttcacttctatactaattgaaaaaaatcccgaaaactgta

SEQ ID NO: 16067 - DNA, 811 bp, Macaca Fascicularis
  misc_feature (1)...(811): n = A,T,C or G
tatatgtccatccnnnnnnnnnnnnnnnnnnnnnnnnnnnnnnnnnnnnnnnnnnnnnnnnnnnnnnnnnnnnnnngggttacccagagtgtgcccatctttgagggttactgtctgccnnnnnnnnnnnnnnnnnnnnnnnnggcgggccttgacctcaccaactacctcatggtgctaatgaagaaccatggtatcatgttgcttagtgcttcggacagaaagattgttgaagacatcaaggagaccttttgttatgtggcaatgaactacgaagaggaaatggccaagaaacctgattgtctagagaaagtttaccaactacctgatgggcaggtcgtccggctccatgaccagctcttttcttgtccagaggccctcttctctccatgttgtatgaaccttgaggcccctggcattgataagatatgccttagcagcataatgaaatgtgatacaggcctgaggaattccttcttttccaatattatccttgccgggggatcaacctctttccctggtttagacaagcggctagttaaggatatagcaaagatggctcctgccaacaccgctgtgcaagttatagctcccccagaaaggaaaatatcagtgtggatgggaggttctattcttgcatccttgtctgccttccaggacatgtggatcactgctgcagaatttaaagaagttggacccaacatagtacaccaaagatgcttctgaaatacagataaaatggttagaagaaaatgttttgagtatatgtgacagaaactttggatattatgtgtttctgggagatgagaaa

SEQ ID NO: 16068 - DNA, 783 bp, Macaca Fascicularis
  misc_feature (1)...(783): n = A,T,C or G
aataccaacannnnntggatattaagatccgactggagaatgaaattcaaacctaccgcagcctgctagaaggagaggcaagttccggaggcggtggacgcggcggcggaaggttacgcggcggctacggaggaggaagctccggcggcggttacggaggaggaagctccggcggcggttacggcggcggccacggtggtagttccggcggcggctacggaggcggaagctccggcggcggaagctccggcggcggctacgggggtggaagctccagcggcggctacgggggcggaagctccggcggcggccacggaggaagttccggtggcggcggcagctcgggcggcggcttcggcggcggcagctccggcggaggccacaagtcctcctcttctgggtccgtgggcgagtcttcatctaagggaccaagatactaacaaaaccagggtaatcaagacaattattgaagaggtggcacccgacggtagagtcctttcatctatggttgaatcagaaaccaagaaacactactattgagctgcatcaagaggaaagtcctcccttcacacagaccattatatacagatgcacggaaaacaaagtctccaagaagacacttctgtcctaatggtctatggaaacaggttcactccctgaaaataaggtgtctacaaggtgttttgtggtttctgtattttcttcttttcactgtaccagaaagtgttaatggaaagaaaaacaactttctgttctcatttactaacgagnncaaaaaaactt

SEQ ID NO: 16069 - DNA, 792 bp, Macaca Fascicularis
  misc_feature (1)...(792): n = A,T,C or G
actgacgacctctctcctcactgttcagggaaagatggaactggaagaaacaattaaagtatggaagcagcggacacatgttatgcggttcttccatgaaacagaagcgccaaggccaaaggatttcctatccaagttctatgttggccatgacccatgaagtcactcagtggaaaggtgcatgttgatattattttagagcacaaataaactcgctatacgatggtnnnnnnnnnnnnnnnnnnnnttgnnnnnnnnnnnnnnnnnagcctgttttnnnnnnnncaagtggggctttggtatacacaccacctgttctttcccttttcttgaaatgtggtgtttgctgtaaattggattgaattatttttctcagagccttgcatgtcagtaaacaggaaggaaggaggccatctgttcaaaaactgtgacactgggcatgaggctggataacttgttaatgtagtagtttctacagtccccatgattagacacctttgtgtcagggcacagattatccaaaattagccagctcttgctgtcagagagggatcagagcagcactaacaggcgcaaannnnnnnnnnnnnnnatgggctagttttccttgggttctgaagaaaatggatgtgcaaaggcttggctccactacttgtaacaagctctagcccttaaaatgaaattaacttcctactcaggcaccctgctaggtgcacagctattcaatatacacacagagaacagaaatatttctactgtctttgcaaactctggtctacctctcagggcgga

SEQ ID NO: 16070 - DNA, 619 bp, Macaca Fascicularis
  misc_feature (1)...(619): n = A,T,C or G
gccaaccccgtaaattatggccgnnnnnnnnnnnnnnnnnnngtggaagcttttgctgccannnncngcatcgtaggctttccggacctcgctgtcattttgcttcggaagtttaaatggggcaagggcttcttggacctgaaccgccagctcctggacaagtacgcggcctgcggcggctgggaggaggtgctgcaggcggaacaggagttcttagccagcgccaaggagagcccccaggaggaggagattgatcccttcgatgtggattcagggagagagtctggaaaccccaacaggcctgtggccagcacccggctgccctcggacactgatgacagtgatgcgtctgaggacccggggcctggtgccgagcacggaggaaccagcagcagctgctctgacgaggagcagactcagggacagggggctgaagccagggccccagccgaggtttggaaaggaatcaagaagcggcagagagactgagggttgcagacacgtatatatttgaggctgggtaacgagaagatctagagacacgagggacgtagatgggcctggcagtctcggctcctcgtggctgctggcaggatgagctgtccgggttctctctgca

SEQ ID NO: 16071 - DNA, 750 bp, Macaca Fascicularis
agtagcagtagggtggaagggggacagagagggccctcccctctgccctggactttcccatgagcctcctgaaactgccagcccccgtctttcgcctgttctaccctgtgcagctgacacacagctgaagagcctcccagcctagcgggggctggcagagccacacagtgcctgtgcccggagggcttcagtcagcctctcactcctccagggcacttttaggaaagggtttttagctagtgtttttccttgcttttaacgaccccagccccgcctggagtggctagaagccagcaggcacccatgtgctgctgacaagtgtctcagcttcccctggcctgggtcaggctgtgggagccgctgttatctgcattctctgccaaagactcgtgggggccatcacacctgccctatgcagcggagctggaccaggctcttgtgtcctcactcaggtttgcttccgctgtgcccactgctgtatgatctgggggctgccaccctatgccggtggcctctgggctgcctcccatggcgtgagggcgggctggtgctcacggcacttcctccttgctcccacccctggcagcagggaagggctttgcctgacaacacccagctttatgtaaatattctgcagttgttacttaggaagcatggggagggcaggggtgctccatggctcccagactgtctgtgctgaatgtattataaagccttgggggagatacccagccctgggatgctgttgga

SEQ ID NO: 16072 - DNA, 740 bp, Macaca Fascicularis
caatgagacaactgagaaaagtcttaagatggtacaacaagaatgtaaacatttccagaattggggaaggatggtttgacataccagtaccttatcagactcacgaagatagctccccagctctcctctgaagaactggtctctcttggcaagaaaatggtgacagctttcactacttgctgcacactgagtgaagagtttgcctgtgttgataatttggcagatttagttcttggagagttatgtggagtaaatgaaaatcgaactatcaaccctgctgtggaccactgttgtaaaacaaactttgccttcagaaggccctgctttgagagtttgaaagctgataaaacatatgtgcctccacctttctctcaagatttatttacctttcatgcagacatgtgtcaatctcagaatgaggagcttcagaggaagacagacaggtttcttgtcaacgtagtgaagctgaagcatgaactcacagatgaggagctgcagtctttgtttaccaatttcacaaatgcagtggagaagtgctgcaaagcagagagtcctaaagtctgctttaatgaagagagtccaaaaattggcaactgaagtcagctgctggagatatgtaaagtaaaaagcaccaaagggataaccaatttacaggcttcctatctgtgtggtgatgaatctcatttcctgagaacaaagtaaaaggattttgctgcaactgtcgcctgaaatcgtatatg

SEQ ID NO: 16073 - DNA, 702 bp, Macaca Fascicularis
  misc_feature (1)...(702): n = A,T,C or G
accacactgacaggcttnttcctgagatatcctcaggtnnnnncagccagagagctgcctttagagtccaactgttgtatgtatgtcaccctcactagaaatgtcccatcatcattggaggggagcagggcnnnnnnnnnnnnnnnnnnnnnnagcgttgggttgggggcttccctgttccctcagccccagccgagaggaaagagtatcaggggccattgccagaaagagagtaaagcaaacctggaaggacaaatctgagaccgtgggaagggcaaaggctgaggcccagannnnnnnnnnnnnnnnngtgccttcaggtagcaggatgatttcttttcctgcctgtctgatgctggctgtttcctaaggtnnnnnnnnnnnnnnncacctccccctacttctccaccatccctggcaggccagccccttcccagatcaacctgtcagtgcactcctggaggcagtgcactcctggagccaggagggaggggcagggtggagagggtatgtccagtannnnnnnnnnnnnnnnnnnnnnnnnnnnnnccttctcccagctcaggtggccctgagggctccctcagaactaatgccccaaatcctgacctaagggtcagcatggggaagagatggttgcgggcaaaatgcactttatagagattttctattgctgggaaggtgtgtttctcccatagtttg

SEQ ID NO: 16074 - DNA, 579 bp, Macaca Fascicularis
  misc_feature (1)...(579): n = A,T,C or G
gatttgagaaatgtggggacaacggagaaaagttttcaaaaaactactatgtagatttctgaatgtgttttattttgatgaggaatttggtaacaactgaaagggaaaagtgcttcagccatcttttgaaaacaagttaaaattctggaacttgtatctgtaatacatcctaactcctataaaagaaaataatctgtcatagctggtgtcctttcactgaaagttttaatactgtctctaaggagagaggaaaagattattatataattttataactggcaatatttgagttagtattcggctannnnnnnnnnnnnnnnnnnnnnnnnnnnnnnnnnnnnnnnnnntgttgaagtagtaaaaatacaggtgacttagtaggaacataaaattattttctaataagataatgttgcactcctaccaaataaacaggattttagtaatatctgagggatttttgatggtgagttagactgtatttggcatagaatttggaaatgtaacttgaatgtaaataggctgcaaaatgttgaatgtatacatagaaagacttcttctgtcgatgccaaatacctg

SEQ ID NO: 16075 - DNA, 718 bp, Macaca Fascicularis
  misc_feature (1)...(718): n = A,T,C or G
cacacatgaggaagctgagcctggggacttaggtgacctggactagagtttcagggcactgggatcctgtagaaggtcccactcgcctggctctgctgcagccccctatctctattctctaggtgtgtttggcggccggggccgaggtgggatcccgggcacaggcagaggccagccagagaagaagccgggcagacaggcgggcaaacagtgagcccacccagaccggccgctgcgccccctcnnnnnnnnnnnnnnnntccactccacagtcccggacggatctgctcagaaaggaagaggcgggcgtcagggggaacccccttcgtgttttgtgaccctcccttttaggtgaagtccctttttcttgctaaaaccggcagttctccggttggaaatgttatttggtgtgtttggttttgtgaagcggccgtcccaaagctggctggattcctggaagagcctgtgttgaaggcatctttcaagccctcactctggttctcagggcggcattttccaggcgggtttgttttgcatttctcagagcctctccgagcagtgaccagacgggagatttttattttaagctgnnnnnnnnnnnnnnnnnnnnnnnnnnnntttctttgggcgcggccccagcattgccttcaaaacaaacccgggacggtnnnnnnnnnnnnnnnnnntgcacgggatgccttgggccctggcccatcgc

SEQ ID NO: 16076 - DNA, 653 bp, Macaca Fascicularis
tggcatatttgcatttttactgcttaaaacatcttttttttaccatctttatccaaatttatcatattgatggtaggactaacaggctttttagaagctggctttaacttttgagtctcaagctacaatgctgttgggtagcctggtcctcccacgtgagggtttaacttcgtttatttgcctccagttattccaaaatgcttattaaatgaaaggcccaggaacatgtttattttagtcacctctgctttttaacaattttgttttgtaaccaatgagtaattcatgatgaattatttttgactaatggatagctgaaggccaggcttttaattctaataggtaatgctcttcttttgtcttattgaaacaatgagaatactctgtgcatttcaaatgcactccgattatgctgcggtttcattcacataagcacaatatgtgttttatttataacttcataacaaatttataatgtaataatttaccttagcagacatgcaaacacttattcttgtgtgacttactttctttaagctaataatataaaaataaatatgtatcttaaaaatctataatgaaacatcagaaattaaagatacatgctttttattttgcagatgagttcatctgcttttgtagatggttttcaa

SEQ ID NO: 16077 - DNA, 939 bp, Macaca Fascicularis
  misc_feature (1)...(939): n = A,T,C or G
ctcttgggnnnnnnnnnnnnnnnnnnnnagaggccatctatgcctccaaaccgtggcgggtgcaatgggaaaagaacannnnnnnnnnnnnnnnnnnnnnnaagggatcagctgtttatgccatttttctgcattggccagaaaatggagtcttaaaccttgaatctcccataactacctcaactacgaagataatgatgctgggaattcaaggagatctgaagtggtccacagatccagataaaggtcttctcatctctctgccccagttgccannnnntgctgtnnntgcagagtttgcttggactataaagctgacgggagtgaagtaatcatttgagtgcaagaannnnnnnnnnnnnnnnnnnnttttgctgcttcagttttcctcttataataccatcactataatcaacgaacttgtcttctccacccagagatggcttttccaacacattttaatcaaaggaactgagtacgttaccccgatgtcttaatggaccaaagatctgnnnnnnnnnnnnnnnnnnnnnnnnnnnggtcagcagaagaagggactgagcagttaaactctgagttcatcaattctaatatttgaaattatctacaatggaatcttccctctgttctctgataacctacttgcttactcaatacctttcagccaagtcaccctgttgcctatgggaggaggtggaaaggatttggcaagctcagccacatgctatttagttagcatcggttgtcaccaacactatgcaaagggcaggagagccttgggggaaaggaaaaggctaaccaagctgttatggtcaactnnnnnnnnnntnnnnnagcaatctaagagcaccaaacaaaattcgctatgtttacagtgatactattaagaaaatgaatgtgattctgctctgtctttttaaatatgatcaaataaaaaaa

SEQ ID NO: 16078 - DNA, 648 bp, Macaca Fascicularis
  misc_feature (1)...(648): n = A,T,C or G
aatgggactgctgaagagtggacagttggaccttactttggtgaccccatnnnnnnnnnnnnnnnnnnnnnnnnnnnnnnnnnnnnnnnnnnnnnnnnnnnnnnnnnnnnnaagtgtaatgtgcgatggctgtgtatacataaagaagaaacttgtaaatatcttttttctttttttaatgtttctgacttctgaagtgcttgtatagcttttatcagctgctttaaactgacagtacccagctgtttattggatctattgatttgaaaagaatttgttaggatagatcttaagcagtaatctgtcattgtttgtatttgtattctctgcaattttactgtgaaaaaattttttttcaacaattggggtcattttcttgatgtcgctatttgttggatagttaaatggtctcttccccttgtgtatcttacctagtgtttactcctgggcacccttaatcttcaaaggtgctagttnnnnnnnnnnnnnnnnngaacgatgcctctgataggaggacnnnnnnnnnnnnnnnnnnnnnnnnnnnnnnnncttggattactgtacacctcagtattgattggtcgcagaattttctggcctttcttggcaatgannnttttnnnnnnnaagatttaaagtatttnnntt

SEQ ID NO: 16079 - DNA, 709 bp, Macaca Fascicularis
acagactgaaaagaacaaacagaagattgatttggacagtatggaaaactcagacaggataaagatcatacgacaaaacctacagatggagataaaaattactaccattattcaacatgtgttccagaaccttattttggggagtaaagtcaactgggcagaggatcctgcccttaaggaaattgttctgcagcttgagaagaatgtcgacatgatgtaataagaattcatttctgacatattttacatttttggcaatcccaactcttacttggaatatttctgtgcatttgtttgtccaccataattttagaaaagcatatccataacatttacagttgtacagttgtggttagttatttgtagtgggattgaaagtaatttttttctttttatatttctatatttagtttgctttttttttttgagacggagtctcactctgtcgccccgactggagtgcagtggtgcgatctcagctcattgcaacctctgcctcccgggtttaagcagttctcctgagtagctgggactaaaggtgcacaccgccatgcctggctaattttttgtattttagcagagacggggtttcaccgtgttgcccaggctggtctcggaactcctgagctcaggcgatctgccgcctcggcctaccaaagtgctaggattacaggcgtaagcccctgaacctggcctagtttgcattttt

SEQ ID NO: 16080 - DNA, 1310 bp, Macaca Fascicularis
  misc_feature (1)...(1310): n = A,T,C or G
gagagggccgaaagatggactggaaggtgcctgagcctgagggccaaacaagtcccaagagtaagacctgggatgggacaagggaaactggactgggtggattttgtattttgtttgtgacagggtctcactcttacccaggctgaagtgcagtagcgtgattacagctcactgcagcctcgacttcctgnnnnnnnnnnnnnnnnnnnnnnnnnnnnnnnnnnnnnnnnnnnnnnnnnnnnnnnnnnnnnnnnnnnnnnnnnnnnnnnnnnnnnnnnnnnnnnnnnnnnnnnnnnnnnnnnnnnnnnnnnnnnnnnnnnnnnnnnnnnnnnnnnnnnnnnnnnnnnnnnnnnnnnnnnnnnnnnnnnnnnnnnnnnnnnnnnnnnnnnnnccaactgggtggattttgattgcacatatggagaatagcacttcacagtttacaaagcacttcatcctcctaacattcagtgaaatacattttatcaaaactctccattaactataacttcctcttgcccaagtctaaaatgttcagggaaggtccatgcccttttttctcttgcatttttccttcataggaagtaatgagaagatgcttttttctctactcagcttgaatcatgcttttggttttgtcaactgacaagaatgcagctgtcttctcctcagtgctggcgctctgactacccttcccaaagaaccactgccctctccctttactgttctatagccccagaactgggagatgggttccttagttggctataccttgtccacttccagtactggacgtgctcagggtctagagtctcagatggtgctattaatagaactggaacacagcagaattgttgcaaaggttctaggagccagattcattccttcttcatcctttgcaaaacagtggcacagaaacggagtctagaattgacccagatggaaagtaattggtattcttaatatcctggttcactaatatccaggcagagaagctcctggaaccataattgtcagttcctagctggctagggattgaagtcctggacagcgacagaggataccacagtagttcaagacttagcacaagtcaccaactgcttcagggatgcctggaggggccagcaagtagagtgttggtggcccaaacaaaccagtgttgccaataccattgccaaaagggcctttggatcctggacaaagcttggctgctggcttcatttattcctgctgatggctgagaagcatctgtcttccatcccactctcctgtcccaagttttgttccgttttttaaaaatntttgttgta

SEQ ID NO: 16081 - DNA, 703 bp, Macaca Fascicularis
  misc_feature (1)...(703): n = A,T,C or G
ctctccatagcaagcnccagccatgcccatgcacggcagaccagggagagcagtgttgatgaatacttgccatagctggtgacatctgacttgtagtcatggaagtgcatggctccattcatgaagccaaagttggtgcctccatggaacatgtagaggttgatggaggagccggcgtccacaatggcagacacggtttttaaaacctctgccggaggagggagaaaggggatgtgcagagtgagttaaagtctgagatgagctggggtcccttcactactctcctcttgcccagtcccacctcaaggccaacgttgtcactctgtcctcctagctctcactaaaaccccaatcacagaagattaggggtggaggacgtgtgggccagagtcatggccccagagctcgagcctccagttgtttgtaaatcctggtcaagtctctgagctccatgtggaccacctgcagcccagggcggccagggccttgcagccagcgcgatccccatgtgagcctgcccgaccaggtgtatcaaatgcacacagatggatgcatccctagagagaaaactctgacacctccctggtctgcctttgttaggaaatcaaccaggacatgacaagaccatagcaaaggagaaaaaccaatggtttaataaatatatattttattaatagaaatcaaagaaacgcagactaaacaa

SEQ ID NO: 16082 - DNA, 741 bp, Macaca Fascicularis
  misc_feature (1)...(741): n = A,T,C or G
tgtgcctgagatggnnnnnnnnnnngatgatnnnnnnnnnctggcccatgnnnnnnnnnnnnnnnnnnnnnnncaccagctgcttgagaaggttnnnannnnnnnnnnnntgcgcagtatcctcaccatatctcgacnnnnnnnnnnnnnnnnnnnnnnnnnnnnnnnnnnnnnnnnnnnnnnnnnnnnnnnnnnnnacaggcaacgggcaggcacagtgactggcttggcagtgaatatagctgccttgctctctgtcatgcttcagccttacatgcccacggttagtgccacaatccaggcccagctgcagctcccaccnnnnnnnnnnnnnnnnnnnctgacaaacttcctgtgtaccttaccannnnnnnnnnnnnnnngcacagtcagtcccttgttccaaaaattggaaaatgaccagattgaaagtttaaggcagcgctttggagggggccaggcaaaaacatccccaaagccaacagttatagagactgttacaacagccgggccacagcagatacaagcgctgatggatgaagtgacaaaacaaggcaacattgtccgagaactgaaagcacaaaaggcagacaagaaccaggttgctgcggaggtggcgaaactcttggatctaaagaaacagttggctgtagctgaggggaaaccccctgaagcccctaaaggcaagaagaaaaagtaaaagacctggctcatagaaagtcactttaatagatatggaca

SEQ ID NO: 16083 - DNA, 738 bp, Macaca Fascicularis
  misc_feature (1)...(738): n = A,T,C or G
ctggctctggaaaccccatccggaagtgagcacccctccctccagctctnnnnnnnnnnnnnaatggtggctgccatgcacagatggccctaggggtgacctccagttttnnnnnnnnnnnnnnnnnnnnnnnnnnnnnnnnnnnnnnnnnttataagccttttagtcccactgacattagccaggctcctagtgaggcctccacagcacattgtgctgtcccctgcctctggaagcaatggggaatttgggatcttgtttaagtgcccaaataagtctaatgagtgttctcctcttcttcagcactcaaccctcaatcccttagcactgattagagaagtccccnnnnnnnnnnnnnnnnnnnnnnnnnnnnnnnnnnnnnnnnnnnnnnnnnnnnnnngagccactaatcacatatgactatttaaatttaaattaaattatatgaaaaattcatttcttcagttgcattagccacatttctagaattcatgtggctggtagattctgtattagcacagagatagggaacatttccatcaccacagaaagttctgttgnnnnnnnnnnnnnnnnnnnnnnnnntactgctcttcctcagatctattaatttttgttgttaaataatgttgatgtcttcatttgatgggtcataatgttccatgaaacctctcaaatacacagttgtatgttctgtgtatcctttaccacgaatatcttgctctgctcattctttga

SEQ ID NO: 16084 - DNA, 775 bp, Macaca Fascicularis
  misc_feature (1)...(775): n = A,T,C or G
tgatgccgcgggcnnggagcccgcccttgcgaggaccccgccggaatctatgnnnnnnnnnnnngccgcggagctcgcggctgccgagctggttcttggagatgtcccgggggcctgcacgcccgccatacccacccgcatccccacgctggtcagcctgagccgcggcccagtctcgccgctcgtgcgcttccagctgcccaatgtgctgttcgcctacgcgcatactctcgccctgtannnnnnnnnnnnnnncgcactgctctctgacttctgtgctacactgctcggcgtttccggagccctgggtgcccagcaagtcttcgcctctgnnnnnnnnnnnnnnnnggccgcagcccacgtgctggaagcaggcgaacacccgcctgggcccctgggcacacgaggggctatgcacgaggtcgctcgcatcctgctgggtgagggcccgaccaaccagaaaggctacacgctggcagcactgggagacctggcaaagaccctgggccgtgcccggaaacaggctgtgcttagagaagagcgagatcatctttaccgggcccggaaaaagtgccaattcctcctggcctggaccaatgaaaatgaggcggccctcacnnnnnnnnnnnnnnnnnnnnnnnnnnnnnnnnnnnnnnnnnnnnnnnnnnnnnnnnnnnnnnnnnnnnnnnnnnnnnnnntggagcggctttggggaggccccgtgccacctgccccaaggactctcattgaggagctccctggctgnnnnnnngac

SEQ ID NO: 16085 - DNA, 732 bp, Macaca Fascicularis
  misc_feature (1)...(732): n = A,T,C or G
aagtgcagaacattacaaaggaggatgttaaaagttacctgtttcggaatgctnnngtgctactcactgtcaccgctgtcattgtgggtgagtcatttgattaaaaacaaacaaacctgtatcttgtttctctggggcatctggctgcccggggaatattatcagatgaactagtnnnnnnnnnnnnnnnnnnnnnnnnnnnnnnnnnnnnnnnnnnnttttctccacaaaaatgactgtctgggcatgtttggaagaatatatcataaacacatcattaggcatcattaagcattatgcaaatcaattgtgtgagaaaaaataaatacaatattttcctatttcatataannnnnnnnnnnnnnnnnnnnnatcattaggcatgacaaagcaagcatgctagatttggccaaaatgtaattatatacaatgtcagttccacttaaaactaatttatacaattagtacacctaaaatgagatgttggttccaaatataattatattctaactgatgctgacttgaagctaagtatcaagacttagacacagaggccgaatcctttatatgtttgcgctctgtcacccagcaactgggaaaggtagattggggaaaatgttaacacagatctctttcattcattgctttgcagagcctgccataaccagctatacctttttttgagtcatttccatctcttactaatttagcagggtgacagcaatctgtact

SEQ ID NO: 16086 - DNA, 726 bp, Macaca Fascicularis
  misc_feature (1)...(726): n = A,T,C or G
annnnnatgttggtcacccactctctccagctnnnnnnnnnnnnnnnnnnnnnnnnnntttatggctttgacagtgccannnnnntgatgccaaatcagnngccnnngttgttatganntgcanncttcctgatgacactggaatctctctctctgccgcctcagtttgtctgttggtctcttggggggccaggccctgcacgtctctcctacctggcctcaaatggtgctgctgcccatgatggtaccacaccagggcctcagcctggcccctcaccacataccctttgccttttagaactcagtgccatcctgggtgcccaggtcagagcaggctttcttcacacctcatctgctgcagaaccacatcctgaggagtctcagctcatcctggagggaattgggaacagtgtcactgggaagtgaaggcctagccctgcagcttccaccagtctcctcctgcagtgccacatgctggcatttctcccttcacaccaagaagcagcaagtggaaaatttcaggatacaaagcacataacaccccataagagatgactgtgtttttagaagcaagagcaaaattatgaaacctctagagatttgggtcatgnnnnnnnnnnnnnnnnnnattctcactattccccgctcctcccactaggagcctacactaagtccaggtgtgagccattcacagactagaacacaaggagggagagagactctaaa

SEQ ID NO: 16087 - DNA, 657 bp, Macaca Fascicularis
  misc_feature (1)...(657): n = A,T,C or G
ggcaggtgccgccccagagtcccatcatggtcaacaccagccaggagcaggccnctgcggcccctccggagccggctgcccatgccgctgcccctgccagcaccctcccatgcagcggtggtgagggggctggagccgccgccacagcaggtgtccaagaacccggggctcctggcagtggggctcaagccgnnnnnnnnnnngacacttggggagccatcaccgcagaacagagaactgaccctgcaaacagccagaaggcatcacccaaaaagatgcccaagtcagggggcaagagccgtgggcccgggggcagctgcgagttctgtgggaagcattttaccaacagnngcannnnnnnnnnnnnnnnnngctcgcacaccggggagcgcccctacacctgtgagctctgcaactacgcctgcgcccagagcagcaagctcaaccgccaccgccgcatgcacggcatgacgcctggcagcacccgcttcgagtgccctcactgccatgtgccctttggcctgcgagccaccctggacaaacacctccggcagaagcaccctgaggcggccggggaggcctgagcccaggaaaggccgccactgtgcctggcaccgccaccaacacctgttgacctcctcgtttttgcccccttcc

SEQ ID NO: 16088 - DNA, 728 bp, Macaca Fascicularis
  misc_feature (1)...(728): n = A,T,C or G
cacaaatataaggtttctctcctgtgtgtattgnaaatgaacttgaagtatcgctctacatctgaaggctttcccacactgctcacatttgaatggtttctctccagtgtagactctctcatgagtttgcagacatgaactctgactgaattccttaccacgcatgtcacacttagagagtttctctctcaagtgaactctctggtgaatacgaagagctgagatgtaacagaagctttttccacactccttgcatgtatgagacttctctcctgagtgtaactgctgaggaagatcaaagnnnnnnnnnnnnnnnaaggattgtttacacttcccattctgtgaaggtttctgtcctgtatgaattatagatagttctgcctcaacctgggaagggacatcaccttgttcaaagaagtgagaattatttatgatggagtcttgagactgggttaagtcacttgcagtttgttcccagatttgctggcaagggcagtcttcatgtggtcctgcttccacaacagtcctgcctcctataaggacacagaatgaagagatgtggacaaatgaagcctttgttcagtgtttttaagatttcacacttaggatatggcattcaactttaatgaatgttcagtttatgttttccccatgcatcttgttttctagtttgtatgtgaccaatttataaccccaccatgtctcatatgtaaaatccttgatggaag

SEQ ID NO: 16089 - DNA, 666 bp, Macaca Fascicularis
  misc_feature (1)...(666): n = A,T,C or G
gccgtggccgtgacgtttggtgaccgtgttctctatccagcgtcttgggtcgttccactttttgtggcattttcaaccatcggtgctgctaacgggagctgcttcacagcgggcagactcatttatgtggcgggccgggagggccacatgctcaaagtgctttcttacatcagcgtcaagcgcctcactccagcccccgccatcatcttccatggtatcatagcaacgatttatatcatccctggtgacataaactcgttagttaattatttcagctttgccnnnnnnnnnnnnnnnnnnnnnnnnnnnnnnnnnnnnnnnnnnnnnnnnnnnnnnnggaaagagctggaaaggcctatcaaggtgcccatagtcatccctgtcttggtgacattcatctccgtgtttttgattctggctccaatcatcagcaagcctgcatgggagtacctctactgtgtgctgtttatattaagcggccttatattttacttcctgtttgtccactacaagtttggatgggctcagaaaatatcaaagctcgattaccatgcaccnnnnnnnnnnnnnnnnnnnnnnnnnnncggaggaagaccctgagtaacaagctccatctcttgtagccaagtcaaagctgaatttattttcttaagcagtatttgtggt

SEQ ID NO: 16090 - DNA, 720 bp, Macaca Fascicularis
  misc_feature (1)...(720): n = A,T,C or G
atgaaatgatgcgtgttcttgtaaaattaannnnnatctttannncttctaaaaatctgtataccaggaactgaaaatctttgaacagatattaaaatctacgtaagtatacaaactagttgagggataaactgtttgcttttataaaataactttgattacatgaatataataaattatgtgcatataaatgtgtgtctatatgctttcctttaaatatgtttgaaaagatgtttgaaacttgattatactatttataattggcacagtactttgaattatgccagtactacattgtaaaacagagttgtattttttgatatttaacaatgcttaacactttaaatgccacttctgaggaatggacctggcgtaacacacttgaatatgtgtgatgccaaactttttaaaataaaatataaattatgcttatttattaattttctttagtttaatcttggtcatgttttggtgtgtatttttaatttttttctcaaattaacactttggcatgaacattactgcaggtttttgatgaatataatgaatgnnnnnnnnnnnnnnnnnnnnnnnnnnnnnnaagaatttttctgtgtgtataaatttagctgctattaacagaagagagnnnnnnnnnnnnnnngccatgtgtgttgatcagatacagtttttctgagatcttcaattaatctcactttaaaaatgaccaaaacatgtctt

SEQ ID NO: 16091 - DNA, 130 bp, Macaca Fascicularis
agtagtaaaagaaagagttaagtgaaacctttgccatcttaatgttttataatataaagcttacccaactccagttaagccatggttaacataaatgtttcatgccccagttcagcaaaaggaggaaaat

SEQ ID NO: 16092 - DNA, 700 bp, Macaca Fascicularis
  misc_feature (1)...(700): n = A,T,C or G
aaatagttttcagcacagaaactcacttctttagacaaagttttaaccaatgatggtgtttgcttctaggatatacactttaaaagaactcactgtcccagtgttggtcattgatgnnnnnnnnnnnnnnnnnnnnnnnnnnnnnnnnnnatacctaatttcttttaaccacaatgaattgtccttaattaccaacagtgaagcactacaggaggcaactgtggcannnnnnnnnnnnnnnnnnnnnnnnnnnngaatgttataaaattgtcactcagatatatttttaaatgtaatgttatataagatgatcatgtgatgtgtacaaactatggtgaaaagtgccagtggtagtaactgtgtaaagtctctaattcacaacattaattcctttaaaatacacagccttctgcctctgtatttggagnnnnnnnnnnnnnnnnncaaagaaaactgcctaatataaaaatcatatatatggtaataatttccctcttttgtagnnnnnnnnnnatccataaaagattgtatttttattactatttaaacaagtgattaaatttagtcnnnnnnnnnnnnnnnagttcacatgcattcttttatactgctggattttgttgtgcatcatttaaaacattttgtatgtttcttcttatctgtgtatacagtatgttcttgaatgatcatttgtcagnnnaac

SEQ ID NO: 16093 - DNA, 748 bp, Macaca Fascicularis
  misc_feature (1)...(748): n = A,T,C or G
tgccccatgacctggacatactgctgagggccannnactttgggagcattgtcctgctgagcccagcagtgattgactcnnnactgaagctggagctgcgggtcctggccccaccacgctgcaccatcaagccctctggcaccaccgtctctgtcactgctagcgtcaccatcgccctggtcccacccgacaagcctgaggtccagctgtccagcnnnnnnnnnnnnnnnnnnnnnnnngccaagatggctctccgggggaaggccctgcgcacacagctggacctgcgcaggttccgaatctattccaaccattctgcactggagtcgctggctctgatccccttacaggcccctcnnnnnnnnnnnnnnnnnnnnggggtgatgcccatgctcaacgagcggacctggcgtggggtgcagatcccactacctgagggcatcaactttgtgcgtgaagtggtgacgaaccatgcgggcttcctcaccnnnnnnnnnnnnnnnnnnnnnnnnnnnnnnnnnnnnnaggtgattgagaagaaccggcctgccgacatcggggcgtccactgcccccacaccctccacagcagctgtgtgagcccccaacccccacgctggcagctgtcattcaggactccaactcctctcagcccctcttttcccacattcatagcctgtagtgccccctctaacccccagnncnnnnagggnacggnnnngaagcnnncccaatttaattccataatc

SEQ ID NO: 16094 - DNA, 706 bp, Macaca Fascicularis
  misc_feature (1)...(706): n = A,T,C or G
ggctnnngaactnnnnttttttaaaaaaaaaagcccacatcttatactccaatgaatgtgtttgtgagtttttatcctgtttgnnnnnnnnnnnnnnngcgtcctgggatcagggtaggcacgtggagnnnnnnnnnnnnnnnnnnnnnnnnnnnnngtgtgggtgtttctgtcgtcaggctgggctgtgaacagcactgttccacgtggtgtcggctcacagaggcgctgcagctctgcacagtgggagtgacaccactgatgccacagaagcctttctccttaggggcaaaagcaaacatcgctggtaacaggagctcagggtggtactcttccgccacccagaaagctcacatgcctgcagggccaggaaagggaaatgatcatttcttttgtattaggaaaacaagacttagacttcccgagttgtacagagtgacgtctgtactttttatacttacaacatttggtcaagttttctaaccaaaccttaggaaactgagagggaagctttgtggtacctttaccttttttccgttttatatgaattattttgtacaaagttcagagagcggtacctttcctactgtcttttcttcgactccatggaggaatttnnnnnnnnnnnnnnnnnnnnnnnnnnnnnnnnnnnnnnnnnnnnnnnctattttctcntacacataggaaaaaagtcagacatcgctac

SEQ ID NO: 16095 - DNA, 732 bp, Macaca Fascicularis
  misc_feature (1)...(732): n = A,T,C or G
tatgtacagtccttcctgtttagtttatgccaggaagttaatcgggttggaggccacgccttgcnnnnaggtgannnnnnnnnnnnnnnnnnnnnnnnntatggttcaagtagtagctgcctatgagaaactttccgaagaaaaacagagtaagaaagaaggtgcatttccagtcacccagaaccgggcgctgcagctgctttatgatctgcgttacctcaacattgttctgacagccaaggctgacgaggtgaagagtggccggagcaagccagactccagaattgagaaagtgactgaccacctggaagccctcattgatccatttgacctggacgttttcacaccacaccttaacagcaaccttcatcgcctggtgcagcgaacttctgttctttttggattggtgactggtacagagaatcagctcgccccccggagcagtacattcaactcccaagaaccccataacatcctgccactagcatccagtcagatcaggtttggacttctcccactgagcatgacaagcacgcgaaannnnnnnnnnnnnnnaaacgtcgaaacaaaagcccaggttgtccccccggcacactccacagctggtgacccgacagttcctggctccttgttcagacagctcgtcagcgaagaagacaacacgtctgcaccttcattattcaaactgggctggctctctagtatgactaagtaacatggcaacacgtctgt

SEQ ID NO: 16096 - DNA, 771 bp, Macaca Fascicularis
  misc_feature (1)...(771): n = A,T,C or G
caaactggaaataaggttcatgcaattcagtgtgatgtgagggatcctgatatggttcaaaacactgtgtcagaactgatcaaagttgcaggacatcctaatattgtgataaacaatgcagcagggaattttatttnnnnnnnnnnnnnnnnnnnncctaatgcttggaaaaccataactgacatagttctaaatggcacagcctttgtgacactagaaattggaaaacaactaattaaagcacagaaaggagcagcatttcttgctattaccactatctatgctgagactggttcaggttttgtagtaccaagtgcttctgccaaagcaggtgtggaagccatgagcaagtctcttgcagctgaatggggtaaatatggaatgcgattcaatgtgattcaaccagggcctataaaaaccaaaggtgcctttagccgtctggacccaactggaacatttgagaaagaaatgattgacagaattccctgtggtcgcctggggactatagaagaactcgcaaatcttgctgctttcctttgtagtgattatgcttcttggattaatggagcagttgttaaatttgatggtggagaggaagtacttatttcaggagaattcaatgacctgagaaaggtcaccaaggagcagtgggacaccatagaaggactcatcaggaagacaaaaggttcctaagaccactttggccttcatcttggttacaaaaaagggaatagaaatgaaacaaatgatctctcatcttttgactattca

SEQ ID NO: 16097 - DNA, 721 bp, Macaca Fascicularis
  misc_feature (1)...(721): n = A,T,C or G
tgctttgcagaaagggatgaccttacaccnnnnnnnnnnnnnnnaggtcaagtgtgccttactccggagccggagagtctttttttttttttttgagatgaagtttcactctcgttgcacaggctggtgtgcaatagcatgatctcagctcactgcaacctccacctcccaggttcaggagattctcctgcctcagcctctccagtagctgggattacaggctcatgccaccacgcccagctaatttttgtatttttttcttttttttagtagagatggggtttnnnnnnnnnnnnnnnnnnnnnnnnnnnnnnnnnnnnnnnnnnnnnnnnnnnncctctgcctctcaaagtgctgggattacaggcatgagcnnnnnnnnnnnnnnnnnnntcttaattaagaaaattcgcctaatgttcatttattttctaactccagacnnnnnnnnnnnnnnnnccttatttgagagtagccatttcttgcctacacttgtcagaaccagcaatagtcaagactaatgaaaaagattactctaacccttcaaagacttttaaattcactactatagtggtcattttaaaaatacatccatgttttaacttctttgagctttctttgtgagtaaatgattcctctgtgttctgcctttcaaactagctaaatatttgtcacaaaagtgnntttttctcagctgttgcctattttcatatatcaggtt

SEQ ID NO: 16098 - DNA, 622 bp, Macaca Fascicularis
  misc_feature (1)...(622): n = A,T,C or G
ccccgcgtgnnnngcgccagcctctccctccannnnnnnnnnnnnnnnnnnnnngtgtcctcnnnnnnnnccctcaaacacacaccaccccatgtcacacaggtgtccagagccaggctagacctgggctaggtgacccctggggcctcagacctctcagtgggccccagagcccagctgaggaagccacatggcctccaggacgtggcgcggttcccctccgcgannnnnnnnnnnnnnnnnnnnnnnnnnnnnnnnnncgcaccccagcataagggcctccccggctgagtgagaagccacctcccctctcctctcatcagccaagcctgttggcatnnnnnnnnntcnnnnnnnnnnnnnnnnagaccgtttgcttctgtaacnnnnnnnnnnnnnnnnnnnnnnnnnnnnnnnnngnnnnnnnnnnnnnnntaggnnnnnnnnnnnnnnnncacctaggcnnnnnnnnnnnnnnnnnnnncgggtttctttctnnnnnnnnnnnnnnnnnnnnnnncttgctttgtgtcccattccatctcttgaaaaaatgtagtctttgaatgtgtgaaaatctagggacattcaatctagtcttttaaattatttatttttccat

SEQ ID NO: 16099 - DNA, 738 bp, Macaca Fascicularis
  misc_feature (1)...(738): n = A,T,C or G
aatgttatcaagtacgcaaaagaggagcttancctgaacaacatccggcaatattacgtgttgtgtgagcacaggaaagacaaataccaagctctgtgcaacatttatggcagcatcaccattggccaggccatcatcttctgccagactcgtcgaaacgctaagtggttgaccgtggagatgatacaggatggccaccaggtgtctttgttgagcggggaactgaccgtggagcagcgagcttccatcattcagaggtttcgggatgggaaagagaaggttctcataacaactaatgtttgcgctcgagggattgatgtgaagcaagtcacgattgttgtgaactttgatctccctgtaaaacaaggagaggagccagactatgagacctacctccaccgcatagggaggacagggcgctttgggaagaagggccttgccttcaacatgattgaagtggataagctgccctcgctcatgaaaatccaggaccactttaacagcagtattaaacaactcaacgctgaagacatggatgaaattgaaaagattgactattgaagaaagaactttattgtttgtgcagtatcctagtttatgtgagaacatctcagtgggttttgaaggtagtttttttatgttgaggctttttcaacatgaaactgtcacagatggcaaaataaatgtcactgtacttagtgttaagacatgaggtcttttgaaaccaaattgatgtga

SEQ ID NO: 16100 - DNA, 711 bp, Macaca Fascicularis
  misc_feature (1)...(711): n = A,T,C or G
cacccagcaggcntnnnnnancaggnnncngccaagttcatcaagagcataccttggaattttgggcagtttaaagatgggatcctagacannnnnnnnnnnnnnnnnnnnnnnaaccccaagttcctgaagaacgccggccgtgactgctcccgccgcagcagccccgtctacgtgggtcgnnnnnnnnnnnnnnnnnnnnactgcaacgatgaccagggtgtgctgctgggacgctgggacaacaactacggggacggtgtcagtcccatgtcctggatcggcagcgtggnnnnnnnnnnnnnnnggaagnnnnnnnnnnnccagcgcgtcaagtacggccagtgctgggtctttgccgccgtggcctgcacagtgctgaggtgcctgggcatccccacccgcgtcgtgaccaactacaactcagcccatgaccagaacagcaaccttctcatcgagtacttccgcaatgagtttggggagatccagggtgacaagagcgagatgatctggaacttccactgctgggtggagtcatggatgaccaggccggacctgcagccggggtacgagggctggcaggccctggacccaacgccccaggagaagagcgaagagttcatagacnnnnnnnnnctgtgggtagtgccttggtggatccgtgggctctagttgaagacctccagcggcttaaacttggagcatttttcc

SEQ ID NO: 16101 - DNA, 696 bp, Macaca Fascicularis
  misc_feature (1)...(696): n = A,T,C or G
tcacactgtgctgtattgctgctgaactaaatgcacttttccccacatgtggggcactggcttcaaacaattcagttcagtatcattacttttaatctcatctttcctttcttggtatttgttaatacagttatggaaaagaggcacattgcatagaagccattggggagttcagtggaagttctgtaagatgtgcatgtactatttgatatattttcttttgcttcactgcttttaatacttagcagtattgttggtctaagtcaatttgattattgaggagtctcagagcaagttgcgttctggatgtcatcctataaaacacttcatatataattaataactattttgtataattacatattgctgcttgtgttttttttttttccatttagttgggcgttgtgttttacacaaaaccatttttgaattaaggctgtgatattaagatagaaatttggactgttgttctgcttttcctggcactcaaattcatgactaggttttagatcaaacctatgtttgtaattagagattttataaggatcaactaagaaatggaaggcaggtgaagatataaaacctctagaatgcttaaatgtgctgtaaaactattgtagatgtcactggattttaccaagtaatatcctttcttctttttttttccnnnccatctactgcttttcagttaaaatt

SEQ ID NO: 16102 - DNA, 814 bp, Macaca Fascicularis
  misc_feature (1)...(814): n = A,T,C or G
tgcagtaatcgctgncnnngtgagcctgtaaaaggctatggggaggtgacaaggcggggtcgccggcagcacgtcaggtaccatggcttgaattcagaagaagctctggggaaatttttaaatgaaaggaacttagactgatatttcgttttcttgacagtnnnnnnnnnnnnnnnnaagatgagctgaaacacacacgtgtgaaattctacattgagggctctgagccagggaagcaaggaacggtgtatgcggaagtaaaagaggtgtgggaattgtgggtcgtggggtcagaggttctgagcgcggtgttatttaagttctggaaaggaaaataatacctggaaacactacatttttttcagaaccgagaaagtggtgaatatgattttcgatatatatttgtagaaattgaatcttatcctagaagaactattatcattgaagataatcgatcccaagatgattaaaataagcaagcaagcaggtttctgacggatgttgaatggcgtggactcactactctattcttcacagctgtcttccagaatgnnnnnnnnagacaggaaggagtgtatggtttataaagtgaatctaatacagtatttgttgcatttaaacaaactagacattttcttatggaaaaattatgaaatacagcatattttatgttctcctattgactcaatcatgacagtatttctgctttaacaccatctttcatgattagatgtttgttattgaaaattttatgccatgtaaataaaggaaatagattttagtattgtattcattttatattatagaactgtat

SEQ ID NO: 16103 - DNA, 709 bp, Macaca Fascicularis
  misc_feature (1)...(709): n = A,T,C or G
gagtatgggtaataaggagttatatgtctgctatctgtgttgctcagttaaaaaagtattcattgaataaggctgtttcttatcacatgcataaaattaaatatttttgtttcaaagaaacatctcaatacacttaggggtgtattgtttcccacatattaagtcagggtggataagcnnnagttatcagtnnnnnnnnnnnnnnnaacattcattgatctcaatacaggcaannnnnnnnnnnnnnnttttaaagaagtagatgaaaattatttgacaagattaaaacaatttatatattttactaaaagtttatatagtacagtctatgtagattgaaaagtaccacttgtcttttctgtgaattataactactcatttgttaaaaacgcctaagagcaattatagtgggacatctaaggtcctttttaaacagtgaattagtaaacctcagcatatgtgtttctaccctgatttttttttttcgtgggtatctgaagcctctcctaagttttttcaaaaatggagtatcacaaaattgagtgaaacacaatacttaaaaatgtattgtactagatttgccaaattcataannnnnnnnnnnnnnnnttactttttaatgtgattannnnnnnnnnattctggtcattatcctgttttatttatttaaattttttaaagttgaagaattaaatactttaatggttct

SEQ ID NO: 16104 - DNA, 660 bp, Macaca Fascicularis
  misc_feature (1)...(660): n = A,T,C or G
gcccctgtcctcanntcctgccattcccggcctgagtctcagcatggcggataagagcagcgatgcggnnnnnnnnnnnnnnnnnnnnnnnnnnnnnnnnnnnnnnnnnncctccaactaccgcgcttacgccacggagccacacgccaagaaaaaatctaagatctnnnnnnnnnnnnnnnnnnnnnnnnnnnnnnnnnnnnnnnnnnnnnnnnagcaggagctggagcgagaggcggaggagcggcgcggagagaaggggcgcgctctnnnnnnnnnnnnnnnnnnnnnnnnnnnnnnnnnnnnnnnnnnnnnnnnnnnnnnnnnnnnnnnnnnnnnnnnnnnnnnnnnnnnnnnnnnnnnnnnnnnnnnnnnnnnnnnnnnnnnnnnnaaagtcaccaagaacatcacagagatcgcagatctgacccagaagatctttgaccnnnnnnnnnnnnnnnnnnnnnncaccctgcggagagtgaggatctctnnnnnnnnnnnnnnnnnnnnnnnnnnnnnnnnnnnnnnnnnnnngtccctggacctgcgggcccacctcaagcaggtgaagaaggaggacaccgagaaggaaaaccgggaggtgggagactggcgcaagaacatcgatgcaatgagtggaatggagggccgcaagaa

SEQ ID NO: 16105 - DNA, 862 bp, Macaca Fascicularis
  misc_feature (1)...(862): n = A,T,C or G
aggnnnnnnnnnnnnnnnnnnnnataagatctgatattnctgatcaagagnnnnnnnnnnnnnnnnnnnnnnnnnnnnnnnnnattaatttgtctaaagctgaaactcaggctttaactaattatggaagtggagaagatgaaaatgaggaggaagaaatggaagaatttgaagaaggccccgtggatgtccagacttcccttcaggctaacactgaagctaccgaagaaaatgaacatgatgaacaggtcctacaacatgactttcagaagacagcagaaagcaaaaatgtcccactggaacaagaagccactagtaaagannnnnnnnnnnnnnnnnnnnngaaaccctgnnnnnnnnnnnnnnnnnnnnnnnnnnnnnctttaaatagtgcttcccataaggnnnnnnnnnnnnnnnnnnnnncaactgcagagcctaaccctttgccgttacctttacctgaaatggaacctttagtgcctagagtcaaagaagttaaatctgctcnnnnnnnnnnnnnnnnnnnnnnnnctggaagtcctgatactgaatctccagtgttagtgaatgactatgaagcagaatctggtaatataagtcaaaagtctgatgaagaagattttgtaaaagttgaagatttaccactgaaactgacaatatattcagaggcagatataaggaagaaaatggtagaagaagaacagaaaaaccatttatctggtgaaatatgtgaactgcagactgaagaattagctggaaattctcagacactaaaagaacccgaaacggtgggagcccagagtatatgagatgtcttcagaggctcatctaactctgtccttacatagtcaatgcatat

SEQ ID NO: 16106 - DNA, 710 bp, Macaca Fascicularis
  misc_feature (1)...(710): n = A,T,C or G
tgtggaagggccgcttaacaannngcgcgagagnnncatgcagttcagcaagccgcgcaagctggtcaacaccatcaacccgggagcccgcttcatgaccacagccatgtatgatgccagggaggccatcatcccaggctccgtctatgatcggagcagccagggccgnnnnnnnnnnnnnnnnnnnnnnnnnnnnnnnnnnnnnnnnnnnnnnnnnnnnnnnnnnnnnnnnnnnnnnnnnnnnnnnnnnnnnnnnnnnnnnnnnnnnnnnnnnnnnnnnnnnnnnnnnnntggctattttggacaagccaacgggcctgctgcaggccgaggcaccccgaaaggcaagactggccgtgggggacgccagaagaaccgctttgggcttcctgggcccagccagaccaacctccccaacagccaagccagnnnnnnngtggcgtcacagcccttctctcagnnnnnnnnnnnnnnnnnnnnnnnnnccatgagccagccctcccagatgagccagcccggcctctcccannnnnnnnnnnnnnnnnnnnnnnnnnnnggtgatgagtttaaatcacaaatcgacgtggcgctctcgcaggactccacgtaccagggagagagggcgtaccagcatggcggggtgacggggctgtcccagtactaaaaggtggcggcggaagagctaagcaacgtggcttagtccatcagca

SEQ ID NO: 16107 - DNA, 1356 bp, Macaca Fascicularis
  misc_feature (1)...(1356): n = A,T,C or G
atgtannnnnnnnnnnnnnnnnnnnnagatctcaggaacaattttttaaatnnnnngcccgnnnnnnnnnnnnnnnnnntaagactacaaacgatcaatctttcctttaataggtttaaaatgctacctgaagttctatatcgtatcttcacacttgaaacaattctgattagtaataatcaggttggatctgtggaccctcagaaaatgaagatgatggnnnnnnnnnnnnnnnnggaccttcaaaataatgaccttnnnnnnnnnnnnnnnnnnntcggaaattgtgtgaacttaagaacattacnnnnnnnnnnnnnnncattccgagttcctcgagcagccatattaatcaaaggaacagctgctatacttgaatatttgagagaccgaattcctacttaacatggagttgctttataacccttgtcatgtattattaaccctggttaattctaaggaggatataacatttgttttagtatcatcttaaaaaatgattgctataattgatcttgtagtttcccagtatcacctacccgttggtataattagcctgggccatattcactgccagtaaatatttttacatttttatttaagatttttgtaaggtgttgtatacatttgtaatggtgataaccacaaagtgttcatacatttgttctaaatgttttgcataggatttatcctactaactttcattttcttatagcaatttcttcaaaagtgaatttttgtttaatgtggtttagtattataataacaaannnnnnnnnnnnnnntggttttttttctcatttctttttgtattccatacagtgtgaccaattgactnnnnnnnnnnnnnnnnnnnnnnnnnnnnttgttagatataaaattaaatcgaattttgttgaatgctgttcttcggcatttaaaaaataagacctcatcttgggccacatgtcaaaagaaaaaggaaacaaaaatatattaaaagtaagacttttcattacccatgataggacttttgtgatgtgactaatctcagtacacatttcaacttaaaacctttttatttacagcaccataattttaaaatttacttgcaatcttggtaagactaannnnnnnnnnnnnnnnnnnnagggaatttgatatagataaacttgatttaataaaaattaaatatcatttttgtttacaccaaaattatcagaaataggttgattagtcattataacaccatatgattctattaagaagtcaattcagtagcatgtatatcaatttatatagatagatagatagcttttggatgattgaggcatgcttatattatgaaaaaaattgctaataaagataaatactaca

SEQ ID NO: 16108 - DNA, 766 bp, Macaca Fascicularis
  misc_feature (1)...(766): n = A,T,C or G
gcttgttatataaaatcaaacactcaactttgtcaacatttcttcaataattcaaactcactgatatgtaactgggagcagtttnnnnnnnnnnnnnnnnnnnnnnnnnnnnnnnnnnttacatatttacaacacatgtaaatataacggaagaacacttcaaataatgttgaaattcacagaattctagagatttacagttatagtttagaagtatcaccaaattgtttgcaatcaaatgtacagcactaattatgaaaaatgttttaactatcaaaccaaaaggggagaaaaactggcagggaaatatatggtgttaaagtcctgtgataaatacttagattaaaaagtaataatatacaatcgatttaatgaccaaaaattctttttgaatccctgattgtcatttttggtannnnnnnnnnnnnnnnnnnnnnnnagtatactatgctgtcaggaactctccactgtctcatcagagccatgctaaatgcagtaacagccctggctgaaaataaggaagatgatgttagcaacttgggagtttcacacaccttcaccatacaggctaagtacttatgcttgtnnnnnnnnnnnnnnnnnnaaaaggcccgtcacccattcataccaaaaaatactttctcaacatgcttttaaaggattccttactttgttttcatttttttttattttttgagacaaggtctggttctgnnnnnnnnnnnnnntgcagtggtgtgatcttgacctgcaacctctgtgtctc

SEQ ID NO: 16109 - DNA, 679 bp, Macaca Fascicularis
  misc_feature (1)...(679): n = A,T,C or G
gagnnnaggttccaggtgccttttcagttgctgacttctcttatggacatagattcactgatgaccaaatggagatataannnnnnnnnnnnnnnnnnnnnnnnnnnnnnnnnnnnnnnnnnnnnnnnnnnnnnnnnnnnnnnnnnnnncctgcgctcaactgtgagtgataggtataaggtattcgtagatttatttaatctttcaacatacctgattccccgacactggataccgaagatgaacccaaccattcacaaatttctgtatacagctgaatactgtgatagctcctacttcnnnnnnnnnnnnnnnnattaaaatcatctgcaaaatctatgaagaatactggtttcacagtctattttttattttctatgaattttcataaatagttttaatatnnnnnnnnnnnnnnnnnnnnnnnnnnnnnnnnnntgatttaattctagaaataattttattaccgcttgtttgtggcaagactaagcaataagatgagaaagaattcatttaaatagtaacattgtacatagggtgttttcctattaaaaattcaatttcccctgagaattaatgtaaccacttaatgtaatcattatctcattgtttcatctttataaacttgtaaacttcagctatttcaagtattttatgcagtacaatatgttattctgta

SEQ ID NO: 16110 - DNA, 1324 bp, Macaca Fascicularis
  misc_feature (1)...(1324): n = A,T,C or G
agcnnnttaaagacannnnnnnnnnnnnntcttaagatctgtttgtgtaaacaagacttgtttagggaaaancgactggaaggagagcatctgtgatcaaaatctctcattgtaagcacaaatcgttccgtgtctggttattaacatcgctnnnnnnnnnnnnnnnnnnntcttgtccccccttttaatagaaaattgtcattctagcctggatttctccccactggagatggagggtgggaagagagggagtcagctctgacagcttannnnnnnnnnnnnnnnnnnnnnnnnnnnnnnnnnnnnnnnnnnnnnnnnnnnnnnnnnnnnnnnnnnnnnnnnnnntttttttttttttagcccagatgccgtcagggcccactgaacacggatgaattcgggtggnnnnnnnnnnnnnnnnnnnnnnnnnnnnnnnnctcaggccaaaccccaagccgaaagggagcattgtggcttttataatccaatgatgcaatgatgataccagcttacaggagtcctcagcaggtgctttttattaattgatgaagagctaaggctcatttttgatagataatatatatttattaaatgcattaatgtgtgttttataatgtaactttatcttccccctggctgactgttgcatacttataaaaaagaagttaaagaaatttcaagacaatcaatatgtaccataacatgatatataaatattacaaatttaaaaggttgtaaagcatgggcagataggttttaccctcaaaatgctgttcttaacacaaaaataaaggctttactatttacttaannnnnnnnnnnnnnnnnnnnnnnnnnnnnnnnnnnntaactactaggctttcggatctgccctgaggctcaatctgtggcattttaaatgggagaatcttggttaacggcaaaccacagaacaaattaagataataagcttatttacccataaaagcagaaactttctatataatactctgggactcagacaacagaaatcctttgttacatctgtctgggtttaagtgtctcatcttgttgggtttgcagtaaaagttaaggggtggtctcctatggaaatgatcataagtataaggtcttttgttataaaaagagtggtcagtcactaggtaaacttaaaaccaaattcagaggttggggacttaaattagaatnnnnnnnnnnnnnnnnnnggccaagagtgggaaaactggtaataagagcacttctgtatcccttgggactagagttcattgtacattttaacagcagctggtgtagaaggatactcctgaggcactgaagaaataat

SEQ ID NO: 16111 - DNA, 752 bp, Macaca Fascicularis
  misc_feature (1)...(752): n = A,T,C or G
gcaacgcctttgtgagcacggctaagtgccagctcctcnntgccctnnnnnnnctcaacatgatgcctgannnnnnnnnnnntgaggccctggctgcggccnnnnnnnnnnnnnnnnnnnnnnnnnnnnnnnnnnnnnnnnnnnnnncctgagggctgcctgggctgctggcaccctcccctgggccggaagactgggaattcctgccaagtgtggcttctagagtgtgtgtgtgtaccccacttctnnnnnnnnngggcaaaggggcatcctgtcatctccactgtcccaagcagtcactaggtggtggccaggccagctgggacccagccnnnnnnnnnnnnnnnnnnnnnnnnnnnnnnnnnnnnnnnnnnnnnnnnnnnnnnnnnnnnnnnnnnnnncctcctgtgtgtgtgtctcatcccggctggtggaggcccacagggactgcgcacagctccagggccactcggaagacgggatgtgtgggtggaggatgcctcgtctaggtcagcattcctgcctccttcctgagccagctcagagcctgggggagagccaacttggggtaggaagttaatactgttaatttgggtggttgttggatttactttgctagattttctctttcaccacgtgtgaactgtgggtgannnnnnnnnnnnnnnnnnnnccacgtggcttggttcccagggacagtcagggcctcgggggctcagctatgtacgacgaagctgtcgaaggagaagaca

SEQ ID NO: 16112 - DNA, 695 bp, Macaca Fascicularis
  misc_feature (1)...(695): n = A,T,C or G
tgaccaaatgcttcaagcattanngctcaccnnncagctaccgccaggaggcctacnnnnnnnnnnnnngnnnnnnnnnnnnnnnnnnnnnnnnnnnnnnnnnnnnnnnnnnnnnnnnnnnnnnnnnnnncaacaatgtgcgccgcttctttggcttcgtggcgctcaacaaggatgatgaggagctggttgccaatttcccagtggaaggcacgcagcnnnnnnnnnnnnnnnnnnnnnnnnnnnnnnnnnnnnnnnaccgtgagaaccagggcctcccactctacagccgcctgcacaagtgggcccagggtctggcaggcaacggcgcggcccctgacaacgtggagatggccctgctcgcctcctaaggagctgcttctcatgctctttnnnnnnnnnnnnacttggtcccaaactgaaccccactgcttgctcacatccgttatcagaagaggattttttaaaaaccgttttggccaggggaaaggaccacaaggcaatctgtggtgtggagagacccagtagacaatggaagccccagccagcagggccaggtgacagtgaagctcaccagtgggctcctttatggtactnnnnnnnnnnnnnnnnnnnnnctgcaaagatgtgnnnnnnnnnncagtgcaccactgggaagcggcctccagtgcagcctctggccttattttatatat

SEQ ID NO: 16113 - DNA, 1027 bp, Macaca Fascicularis
  misc_feature (1)...(1027): n = A,T,C or G
aaggcnnnnnnnnnnnnnnnnnnnnnnnnnnnnnncgggactccctcatgcagcccgtgaggaaggtgcagtcggccacacacttcaaaaaggtctgtggcccctcccgcaccaaccccagcgtgatgatcgatgacctcctaaccccatgttcaccaggggacccaggagccatggagatgacttggatggatgtccctggggacaaactcttagagcctgtggtttgcatgtcggannnnnnnnnnnnnnnnnnnnnnnnnnnnnnnnnnnnnnntgcagacgaccncctgaaagtgaagaaattctcagaggactttgggcaggagagttaaaagctgcttcacttgggcgatggtgaaggtgggaggttgatgggggcaaatgcaggcactccctgtgtcagcagccagacagggctccagggcttgtcccaaagtcactacagagtcccctctgctgtttggccgcctgccagggagccagaaggaagagcctcgcagccacagacactccaccgccctggggcacacggtggacactggctcttcctacttcctcctctcctggatgctcaccagctccttctgcccccctcttttttttctatcttttgttcccctaaattaatgctgcttggattttcgtcttgtttataaataaaaataaaatcacctggaagtatcaaggagtgggggggcggggggagcagccatgctgcgaggtcacccagacctccagacagttggctagctccactgcccattccttttacgcccaagttttgctccttgagagcagattggctgatgcccctgcaaccccagcccaagctctgcctcaaagactgagtgacataagccattccccaccctcctaggttcacatccagggctgtgtcttccttgggggaggagatggtgtcgttcagatcaggggaaggcagtcaggcgggtgttcactgccttttcttcctgagcgtgagaacactgaacccagccactgcccctgggtcccttcaagacga

SEQ ID NO: 16114 - DNA, 746 bp, Macaca Fascicularis
  misc_feature (1)...(746): n = A,T,C or G
gagtaggccaaacacacctccaaactnncttaggctgtgcacaaacacaaaaaatggcagccttccatctcctgcactggctgagtccatttacttgtatatttgttctagtgagtggtgagtgagtgatgggactacattttttgcatagacctcaaaaataacttcattctgctgctgttcatttggctttttaaaacccatctgccatagaacactgaaaacagagagaactttggnnnnnnnnnnnnnnnnnnnttaacaaagatttctggcaggaaactcacaaaaaggagaactgaaaatttagacatacagttggccattgtaaaaaacatcagtttcctctcatacattccaaggaaaccaagtaaaataagtgttggagtaacacttgcatagaagaatttaaggagtgatagctctttctgttctgccattcccaacattcctgggggaaaggagactcaatgagttaatactatttcactgagcccaagatggaaacttggtttgatctaaaacatctgattaacataggctagctgatttcttaaaaattcgttgcattgaaggatagtttgcatgtctgtaacacctgtcaatacttgttcgtattgatttnnnnnnnnnnnnnnnntatgtgtaattgggcagatcagctttgcagtagnnnnnnnnnnnnnnnnnnnnnnnnnnnnnnattcttagtgattgttacaaacccctttannnnntctgagaaa

SEQ ID NO: 16115 - DNA, 686 bp, Macaca Fascicularis
  misc_feature (1)...(686): n = A,T,C or G
ctgagcctggaactgatgnggaggagacgctccaaaccataccacagagtgaatccnnnngtctgcttcactgagatgctgccttgccaggacaagaaccaacaactctaactgtcccaggaatctggtgaattttcacatgtgtacttagacataatggtctttcacttgttattatactttgtatattgttatcannnnnnnnnnnnnnnaaacagatgtacttagagacgttggctgtttgtttaggcccaatctttcattttttttttttttttcaaagatcatgaatttgtgacttagttctgccctttggagaacaaaagaaagtagccttnnnnnnnnnnnnnnnnnnnnnnnnnnnnnnnnnnnnnnnnnnnnnnactctagaattgttaaattacaagtaatatnnnnnnnnnnntctttcatcttactagtatggcctataaaaaaacaactaccacgtgatgggggaaggctttggcaatagaaagaagaatagaattcaggttttatgttattcctctgtgttcactttgccttgctcttgaacgtgcagtatttttctatctcatgccaagaatgattaaacgtaaatatttttcattttatcatttatatcctatacacatcttcttcatcattatatatgaagtttattctgagaagtctacattacttac

SEQ ID NO: 16116 - DNA, 709 bp, Macaca Fascicularis
  misc_feature (1)...(709): n = A,T,C or G
gagtgaagcgaaggtgnnngnagcgcgcgcagctcccgaaggaagcaagaggcgaggacgacggcggcggcggcggcgacgacccgggcaacgcgaccgttcccggccgatggcgtggcctccaccggcgacaggcagccaggcgcccgcagagaagcataaaaaaacgctgaacaagaaaaaccaaacaacagaaagtaaaaccactgcaagcaccaagaacaaaacgaaaatgagcacagcaaaaaagattgtggcagcacaaannnnnnnnnnnnnnnnnnnnnnnnnnnnnnnnnnnnnnnnnnnnnnnnnnnnnnnnnnnnnnnnnnnnnnnnnnnnnnnnncctccacaaaacttgacggcaattgtcatgcaaccgattcttagccttgttacannnnnnnnnnnnnnnnnnnnnnnaactttgagttgatttgaacttacggatgggggacttttctccactctcatgtgattacgtgaactttattcctagctcagcgcgagactgtggtggatttgactggccctggttgggttgttggaatttgattgaatgacaaaagaagaaaagatttatatatatatttatatatgtagagagagagagagagaggacaagagagtgtgggtgggggaaggaagaggtggggcagggcaggtggggttggggagtgtgggagggcagggagggctgggattcag

SEQ ID NO: 16117 - DNA, 708 bp, Macaca Fascicularis
  misc_feature (1)...(708): n = A,T,C or G
atcacatatattngnnnnnnnatgtcatgacagatcaaaatcannngatatccctttctccattctaggtttttctttttttcagtaattgatttaccttgatcacttttcaacttccatattcttcgtaatagtaaaaggcaaagtgttgaagatattatggcatagtagtagttgaaaattattgctgtcattgtttacatacttaagacatatnnnnnnnnnnnnnnnaaatgggaggccttatagatgtgcttgggggaagatgaagggcagaaagtatccatacaggagttcaaagaattccatgcccttcagattagcccaattaccagaaacatcatgggagatattttaaaaactaattattcacttgttttgtgtgtctgaacacacagaagctaattggcaagtttttaagaagtatttaaaaatcttactaggattgacatttttctgaagtctgtataaatagcttatagtgagaagtactatgctcaaattttacatttttcccttttcaaattctataatttccactaccaaagaacacactgcatgtaaaagatgtattnnnnnnnnnnnnnnnnnnnnagaaatcttgcttcactgctcacctgctacaagtaagagtcnnnnnnnnnnnnaaacatttgacttttattctatataagagccatatgtaatgtactgtaataaaggagcttc

SEQ ID NO: 16118 - DNA, 738 bp, Macaca Fascicularis
  misc_feature (1)...(738): n = A,T,C or G
acacatccagaacctgnnnnntgccctggaagccagcatcntctggggccaggggcttgcttccttgctccacagccttcaactgcccaggcgctcccaccagcagaactgagcctgcctcctcatcccagcctgccccgctgcccagaggaccccacgcctctcagaggcagaggtcccacgccagcctttgacccacagcggccacacagccgcctccagaccagcactcggactgccctgcagtggctgcttgggcctctctggcggtcccaccctgccctcggctttaccttggaagcctgagaggcgccggctctcttgtgctcctccctcggtggacgctgccttgcttctcatcggacacttgtggatcacaggggcctggggagcagcgctaaccctggaggcagcctttggatgatggctttttcttccctcttccctctgccggcctgttttcaggtgttcctagcatttccgcctccaggcaggacgggatgggtgagcagctttgggagagacacctggcctttttctcccggagcctctccctccctgtcctgggaagtgggcggcagccctgtgttcccccagcttggcagatgggctgcatgcagcgctcccttccatcccacgctcagtggccccggccagaccctggcagagttcacacctcattgctttaccccctggggcctggggaaatgtctgtactttgggatgtcacagaaatac

SEQ ID NO: 16119 - DNA, 749 bp, Macaca Fascicularis
acaaagaaacagaccacgtaccaaagtgactacgacaaaacctacccagatttcttaatgcttttaaactcatttacttcctctcaagtcaaagagtacctccagagtgtttcttacaaagatagacaaattattgatcgctttattcgtactcactgtgacactaacaaagagaagaaatgaaaagagaaaatagtacaagtgaagaaaatctgaaaatcaatggaagcacaaggacattcttagtcattttctcaattatcaaggaaaaataagatgcaaacagcttcaattatgttgggatagtcaagaatttgtgtcttttgctttgctttatttttaaataatacaattatttaaggctacaaaatttcccctgaacatagcttttgctgtatccaataggttttgatacagtgtttttttcttttcccttttggatacttaatttgtgatttcaattttgatttctcctgtgaactaggaattacgtggaagagattttttaatgtcccagtaattagagacttaaaaaatcattttattgcttatctcttctttgaatgagtgaaagtttaaaaatctgcttttgggaaatcaattacagttttatttaatgccattaatcaagtatatgattgtgtgttacgtgaatatgagaaaaaaattatagtttattgtagtttttaaatcctttatatctttaattgtatacttgaattgtcccattttcaccggagaaatcaaaa

SEQ ID NO: 16120 - DNA, 772 bp, Macaca Fascicularis
  misc_feature (1)...(772): n = A,T,C or G
gacatgacatnnaaaccaatgaggaggacttaacactaacagannntcagtcanntaaaaagggaaactcaataccttatttccagatgactcctatcagcacttctctctgctggaatgatctctcctggtttcagagcataactcgattgcccatcatccttaaagggattctgacgaaagaggatgcagagttagctgtgaagcacaatgtccagggcatcattgtttccaaccatggtgggaggcagcttgatgaggttctcgcttcaattgatgctttgacagaagtggtggctgctgtaaaggggaaaattgaagtctaccttgatggcggggtccgaactggcaatgatgtnnnnnnnnnnnnnnnccttggggctaggtgcatttttcttgggagaccaatcttatggggtcttgcctacaagacaaatgagttccacacttccatggccctgccggtcggttgctgagatcaatcgaaacttgatccaattttccaggctgtaagaaaaaagggccaataaccagactgctgaggttgcccacaggaggatcacaaactcacagcatggtgtgtgatgctgtcctgcctggaccccatcccgcccggaggcttatgccccatatttcccatatttccaatccctccacccctgtgcttcaggccctccaaacccctgtattccccaaatgttccatgcccttctttgtatcactgactgttatatgttgctttcttgcctaaaatcttcctctgaagtaaaag

SEQ ID NO: 16121 - DNA, 734 bp, Macaca Fascicularis
  misc_feature (1)...(734): n = A,T,C or G
aggaagctgaaggccagttttataactanttcccaactgagaagatgacacgatgaaaggaacagaaacagtgttattaggctggaggacgccgactaattnnnnnnnnagatgaaggactgagaaggcccccgctccctctggcccttctctgtttagtagttggttggggaagtggggctcaagaaggattttggggttcaccagatgcttcctggtccacgatgaaacctgagaggggtgtccccttgccccgtcctctgccctaactacagttgtttacctggtgctgtgtcttgctcttggtttccaggtggagaaaagacgacgagaacgtcttggacatgaaggagttttttgcatctagaggggtgggaggggtcaggtgtgggacatgggagcaggagactccacttnnnnnnnnnnnnnnnnnnnnnnnnnnnnnnnnnnnnnnnnnnnnnnnnnnnnnnnnnnnnnnnnnnnnaaatacacttattttatcaccatcagcgagccagggtcagggaaaggactcacctgactttgggcggctggcctgggcttcccctgctcaaacacagcggggatcagagaaagggactggaaagggggaaatggcgcatatctcaagaagcnnnnnnnnnnnnnnnntggttgtgtgtgggtgtgtgttttttctttttctttttttgaatgggggaggctatttattgtacagagagtggtnnnnnnat

SEQ ID NO: 16122 - DNA, 729 bp, Macaca Fascicularis
  misc_feature (1)...(729): n = A,T,C or G
gagatgaggtcatggcagggtnnntnnnnacacaccnnnnnnnnnnntnnnnattgggccctggttcgctgactgccaggctgaaggaacccgccaaggactgaacgggtaagggtgactgagaagaggtttgcaagacagagcgcgcagnnnnnnnnnnnnnnagtgaccccgaaggaagaannnnnnnnnnnnnnnnnnnnnnnnnngaacttagccgagtaggggtgggggtgcagggctggagttcactcaatgatggacccagcctgaaccgggaggcaggcagaggaaccttgtgctgtaagaaagtgactggaagtggactccagagggacaggtgtgnnnnnnnnnnnnnnnnnnnnnnnnnnnnncccaaatatgactgaattgtagaaagggcagtagatctctaatgggaggtgggaacattattatggtggaggcaattatgagggtagcatttccttctagacaaaacacccatctgggaaggccccaagggcagcttatgaaggaccccacttgcaccctaccccagccatggaagggtagctggagggtggatgaggaggccagaaggagcactgaggggnnnnnnnnnnnnnnnnattgactcggtgtgcctttaggacattctctgacggcccatgggcctcagtttcccaaannnnnnnnnnnnnnnnttccctccaactgtgacatgcagcagccccacctgcctgagag

SEQ ID NO: 16123 - DNA, 744 bp, Macaca Fascicularis
  misc_feature (1)...(744): n = A,T,C or G
agcgtcaagtggcagtannnnnnnnnnnnnnnnnnncccttaaatcaacccatgggattgcaattaaatcaaccaacatggcctctgtggacaagggggagagtgcacctgttcgtaagaacacacgccaattctacgatggcgaggagtcttgctacatcatcgatgccaagcttgaaggcaacctgggnnnnnnnnnnnnnnnnnnnnnnnnncccaacctgtttgtccagaatgtcttcgtggatacccatgatcttcgctttccctgggtgnnnnnnnnnnnnnnnnnnnnnnnnnnggctgggacagaacttacttgggactacaactacgaggtgggcagtgtggaaggcaaggagctgctctgttgctgtggggccattgaatgcagaggacgtcttctttagaggacagccttcttcccaacccttcttgaactgtcgtttcctcaggaactgggtcttcctgattgttgaaccctgacccgaagtctctggtctaggtactccccccagctcctagtagatagatataggggttctggaccagatgatcccttccaatgtggtgctagcaggcaggatcccttctccacctccaaaggccctaaagggtggggagagatcaccactctaacctaggcctgacatccctcccatcccacatttgtccaagtgttcctgcttctaacagactttgttcttagaatggagcctgtgtatctactatctccagtttgta

SEQ ID NO: 16124 - DNA, 759 bp, Macaca Fascicularis
  misc_feature (1)...(759): n = A,T,C or G
gcaatcacactgcttatganntnnnagagaggnnnnnnngtaccagnnngntcttagggtgnncctgagtaacctgctttttggcctggataggnnnnnnnnnnnnnnnnnnngcctatccctgccttaacctgtctgcgtgaggttggcctgagattgtgagtcaacgactttgctgtcttttcctcnnnnnnnnnnnnnnnttaagaaataaagtcctagctttttacagagaggggtccaaatggtnnnnnnnnnnnnnnnnnnnnnnnaaggaattagctcagaattggcccctagcttttctgcttttgtagggacagcaaaaggnnnnnnnnnnnnnnngaaaattccaaaagattgctatagctgtcacagggaagttgtaaagatcagctaaagttgggttggggtgctttctgcccagtgggtcttggcataagtagattaatcctgctcttataaggaaaggcagcttattcaggcagtctggaaagggggttctcagaaaactcagtttctctgttccttcttttctctcatctactcttactggttttagaggtctttggactctaaagaccaatgtnnnnnnnnnnnnnnnnnnnnnnnnngtctctctgtgatttcatcatagaggtctgttttgtgagagtttggggtgcagaaaactttgattaaatcttcttaatgggaggctgggtgacctggattatctacagtgagcagacttaaatgaacagaagtttatgtgtccaa

SEQ ID NO: 16125 - DNA, 745 bp, Macaca Fascicularis
  misc_feature (1)...(745): n = A,T,C or G
agtgcagccctcactgcaggcaacacgctgggctgtngnnnncctggctcctcagtctgagtggcagccaggaggcagatgcnnngcggaatgccctgatgcccagcctggcctgtgctgccgcccacgccnnnnnnnnnnnnnnnntgcaggtgcttgtggagctgggcagtgacctgggcctggtggactttaacggccaaaccccnnnnnnnnnnnctgcccggggaggccacgtagaggcagtcnnnnnnnnnnnnnnnggaggtgtggacgtgaacacccgggacacggacggcttcagcccgctgctgctggccgtgcggggcaggcattcaggtgtcattgggttgctgcgggaagctggggcctccctgtccacccaggagctggaggaggcagggacggagctnnnnnnnnnnnnnnnnnnnnnnnnnnnnnnnnnnntgcaggtgtggtggcaggcaggggctgacctggggcagccgggctatgatgggcacagcgccctgcacgtcgcggaggcagccgggaatctggcagtggtggcctttctacagagcctggagnnnnnnnnnnnnnnnnnnnnnnnnnnnnnnnnnnnnnnnnnnnnnntctaacctgaagccgtcctgctgcagtgtaagccattgctgcctcccgtggcctgctggaggggtctcaggcatgaccccactgctggggctgcttcccagcctgctctcatgcaaagcctgaaggcctt

SEQ ID NO: 16126 - DNA, 757 bp, Macaca Fascicularis
  misc_feature (1)...(757): n = A,T,C or G
ttttttcttannacagcatacatgatcattttatgagtaaatcaaactatatcattttaaaatttgcatattttaaagttttatcagttacttagattacagactgtttgcaaaatagagggaggatcactcgtaatcttacatagcactgtcagcagtctggtgtcctctgtccagtcgaatcaattgacactagatatgcatgtctcatgtcatgtgtatatttctgtttcccccaagtcttctcttcacctgtccccatcnnnnnnnnnnnnnnnnnnaatgcaaatgtgtagtcctaagtgtgcccacggattgcgatgtccgccaggtnnnnnnnnnnnnnnnnnnnnnntagcagcagtgacgagaaacaaagcagaggaaatagttaaatggtaaagaagagaaaggggagcagaggtggtaggccaggaacagggaataagtatggttctgcccgcacgtgcccatatgcacacacacttaaggccatttaaagagaagcggttgggaatgaggttgcgtttgctgaattagtggttggtttttgctgtctagntatcaactgccgccagctcctcatctaagaggctttctttgctaccaccttcactggtttgtggaaagcttctggccnnnnnnnnnnnnnnnnnnnnnnnnnnnnnnnnnnnnnnnnnnnntgaatgtattcttacaggactatgtatgtacaaaagaagaattagcttaattagctccacatagatgtcacatg

SEQ ID NO: 16127 - DNA, 710 bp, Macaca Fascicularis
  misc_feature (1)...(710): n = A,T,C or G
gtcaggccagaagctaggcaagcacaacctcactaacaggggccccacttttaagagttgtccctggttttatctcnnnnnnnnnnnnnnntggagaaatgtgttactcacgcctcacgtacggagcgtgctgtgctcatcgatgaggtgtgcaccatgaacgacggtccccacagtgccttatacaccatgatgaaggaccagtatgccaactatgtnnnnnnnnnnnnnnttgacgtggcggagccaggnnnnnnnnnnnnnnnnatgcataagatccggccccacatcgcaactcttcgtaagtacacctatggcaagcacattctggccaagctggagaagtactacatgaagaacggcgttgacttagggcccatctgtggcccccctaatggtatcatctgaggcagtgtcacccgctgttcccttattcccgctgacctcactggcccactggcaaatccaaccagcaaccagaaatgttctagtgtagagtctgagacgggcaagtggttgctccaggattactccctcctccaaaaaaggaatcaaatccacaagtggaaaagcactttgtaaatttaattttattacacataacatgtactattttttttaattgactaattgccctgtctgttttactggtgtataggatacttgtacataggtaacctaatgtacatgggaggccacatattttgttc

SEQ ID NO: 16128 - DNA, 757 bp, Macaca Fascicularis
  misc_feature (1)...(757): n = A,T,C or G
gcccagggcaatgaccggctgaagctgctggtgctgtacagtggagaggatgatgagctgctacagcgggcggctgccgggggcttggccatgctcacctccatgcggcccacgctctgcagccgcattccccaagtgaccacnnnnnnnntggagatcctgcaggccctgcttctgagttctaaccaggagctgcagcaccggggtgccgtggtggtgctgaacatggtggaggcctcaaggcagattnnnnnnnnnnnnnnngagagtgagatgatggagatcttgtcagtgctagctaagggtgaccagagccctgtcacaagggctgctgcagcctgcctggacaaagcagtgnnnnnnnnnnnnnnnnnnnncaaccaagatggagagtgagggggctgtccctgggcccaaggctcatgcacatgctacctattgtggcacagagagcaaggacagaagcagctttggctggtggtggctggcatgcccaatactctcgcccctcctcgcttgctgccctaggatgtcctctgttctgagtcagcggccacgttcagtcacacagccctgcttggccagcactgcctgcagcctcactgcgaggggccctttctctgtactactgtagtcagcagggaatggggaaggtgcatcccagcacagcctgtggatcctgaggcatccggaagggcacacacatcagcagcctcaccagctnnnnnnnnnnnnnnngcctgctatcaggcctgct

SEQ ID NO: 16129 - DNA, 638 bp, Macaca Fascicularis
  misc_feature (1)...(638): n = A,T,C or G
attacagttnnnnnacagttccattagttcctgtagattagtgaacagaacagttgcttatgaagagattctgccctgtagacactttatgtgaataactgaagtaacactagactgaatctcctttttggagtgtgtatcttctctcacttgttcaggcacaggcacactgtttaatggcatggaatctttctgttgtgtgacttctgcacatgtaattttcaatgaattaagttcacctggattcgttaacgttcctggacctgtagacacatgtaagattatttaaaatcctttcattttttctgcctcttaccatacgactatagtgcagcaaatattttaaagccccttgtttattttcattagttgtacattgatttcagtgtcagcacctttaaagactcattcatgttgcacagtggcttacatgaatgtgaaactgtggtataaggttttctttcgtactcataattagcccaaaacagttgccacactttgcattgtgctcctgcatttgtgtttgagttgctatatatttgtgaaaattacactgaaagttgactaagagactattgaaaaagcatgaataattaaatatacatgtgggcaacatctcatctgctgtattttactta

SEQ ID NO: 16130 - DNA, 708 bp, Macaca Fascicularis
  misc_feature (1)...(708): n = A,T,C or G
ctggtaggagccagcggctccggccaagnnnnnnnnnnnnnnnnnnnntccagaaggccccacacacccaagtgcccctcacaccttgtgcctccctgtcacagnnnnnnnnnnnnnnnnnnnnnnnnngcccagggtgctgtgaccagttaagacctcccctcagttctcaggtgctggccctgcccagcccagtctgcaaacacacagggatgctcatgggtgcacgagaagacnnnnnnnnnnnnnnnnnnnnnnnnnnnnnnnnnnnnnnnncaggaagcccaccgtgccccatgcaggggctccctccagcacacagccctcaccnnnnnnnnnnnnnnnnnnnnnnnnnnnnnnnnnnnaaagtggggaacaaggggtcttctgagcagcccccagccctgcccctcccgcctgtgcctctgtaaggggctctgggacacccaggccccacccgtcgcccacctggtggtgacaagctccagcagccagtgggtccggacctgctcgatgccacggtgagggacggcgcccacataggcgaggttgagttgctggtcccannnnnnnnnnnnnnnnnnnnnnnnnnnntgtggcagcggggggctggggacagcaaaggggcggctcagtcccgaggctnnnnnnnnnnnnnnnnnnnnnnnnnnnnnnnnnnnnagcccaggactgcccgggcgcgggatt

SEQ ID NO: 16131 - DNA, 701 bp, Macaca Fascicularis
  misc_feature (1)...(701): n = A,T,C or G
tcctgctcacatgctggcggggcccagcagccctgggtgnnnnnnnnnnnnnnntgactcttnnnnnnnnnnnnnnnnnnctatgagctctcccaagcttccccgcccctnnnnnnnnnnnnnnnnnnggctcacctttgccaccctcagctctttcctctggtgtggcttcagctnnnnnnnnnnnnnnnnnnnnnnnnnnnggctttggggcatggctgggagagagtcttggagcattaggggaagaggagagcagagggatctcggggccnnnnnnnnnttggaacgcttctggcagcagagctgggtgtgggaatgaggcctagctcgatatccctgggttagagttgaaatnnnnnnnnnnnnnnntggaaggcatttcccacacaggccagaggttgccaggctgcctgaggtctcctgttctactcnnnnnnnnnnnnnnnnngaagaattactcattaagcagcagaaatactgcctgaggatcaaaactcagaggcaaagagggagttcctgactgctggagatgccaccaccacaaatactttttattcannnnnnnnnnnnnnnnnnnnnnnnnnctgttcctaggttcagtgctgggtcctgggaatacagcaggacagacctcagcttgtctcttcatagaaattatacaaagagaataggggagacagctnnnnnnnnnnnaaaga

SEQ ID NO: 16132 - DNA, 766 bp, Macaca Fascicularis
  misc_feature (1)...(766): n = A,T,C or G
gcagnnnnnnnnnnnnatnnnnnnnnnnnnnnnaagaacaaggcttcccgtccttgcctgcatgtgagtcacttcttggctgtgcagcaggtccccctgtctccgtatgctggaaggtaggattctgcagcccatgttgctctccacctggcagcagactgtgcaggagccccnnnnnnnnnnnnnnnnnnnnnnnnnnnnnnnnnnnnnnagcgcaagagcagggcgacaggaacggagccagtgatgtgtgggttacactgaggagccaaagacaggcccttaggactcccccttacaaggcnnnnnnnnnnnnnnnnnnnccagagaccaacaagatagcttttaattcagctgcatgacctgtgccttttaagccataaannnnnnncaagtctagcgcctcttgaaatccagatgttcatattacactccaaaaaatagactctagnnnnnnnnnnnnnnnnnnnnntgagtctgcttttgaaggaggtagggaatgacatcttccttggacccaaagcttaaaagtaatgtatgctttgctgaccactgttaggccttaaacattcactgtggtggtatcaggcacactgctatgtgcatcggagtttttgttgttgttgttgttgttgttgttgttttgctttccaaacagaatctctggggcacaagttgttttatactcaagctaagtataattttgtcatttcaggtaaatatgataagtgatggaacatgaagttttctaatttgactaatccta

SEQ ID NO: 16133 - DNA, 747 bp, Macaca Fascicularis
  misc_feature (1)...(747): n = A,T,C or G
acggcagaggggcatggcgtggtnnnactgagaacnncccnnttnntcttgactttgtggtctgaggcctggtcttactgtccatgtgtatttggaccctgatgnnnnnnnnnnnnnnnnnnnnnnnnnnnnnnnnnnnnnnnnnnnnnnnnnnnnnnnnnnnnnnncctgggcgaggcgaggatggggcctgtgggccgccagcttgtacggtgctgtcaccgcccgtcttcagtgaccactcaccctggggtgaagtgctcagcaccttcctcttggggggccccattttcctcctttgtctcaggggacataacaagctccactgggcttgaggggcccagacccggtgtctgcagtcagctcctgagacatggctggccggcacaacaggtgttacatcaggagcttcctgtggccgtttggactttgagcgtttatctaaattggcccagggttggctggtgggtcacccagcagaggcttctccccatagtgcgaggatgtgttgcctgggcacggtgaccgcggttattcctggaggtnnnnnnnnnnnnnnnccttgggctgtttgagctagagaagctatgtgnnnnnnnnnnnnngcctgcttggctaggccccggtttgagactcccctgggaactagagtcaggaacagccagtggcactgactaggggatggagtnnnnnnnnnnnttgggccacctgacagctggacagaaannnnnnnnnnnnnnnnnngac

SEQ ID NO: 16134 - DNA, 965 bp, Macaca Fascicularis
  misc_feature (1)...(965): n = A,T,C or G
ataatgcacagtggannactnnnnatagagcacagacctttgtattataatttttaaaaaggcccttttaaataattacaaggagtgtttgctttcaaatgccatgggttacacttttatgggcatgactataaccaattttgtaaagagtaagagttgtataaaataagaaataaatacagtactcaacttactttcatattagcatcatcagccctctaattcaccgtatgggggaaacgctttttgtttgtgatagctattttatcatttccttcatatttttctcttataaaaatgtatttgatactgtgatacgttcatgaaaagtattctttaattattctttgttatagtagagctgttcatcatggaannnnnnnnnnnnnnnnnnnnnnnaaattaattttggcaaaagattgggtacttagtttcctgttactgagttagctctactcttttggaccaaagcaacatgagagtaagtacttttcacacttgttaagatgggagttataactgtcatacatttggaatattatgatcccaagtagtctttttataatttggattatatcgtatgttagatttttgataagatttggccaatttttacagaagaaatgatttctctgatcatttagttctatctatttagaaatatgtaaaactggatttttttttttttaagtaacatgtgaccaaagttaattttgtcccaaaggtctaaataaagagcagtttcccatatttggctgtgatacctttatcctcattatctacaaatgaggagcaggcttactgataagctgaaacaagaaattctcttcatnnnnnnnnnnnnnnattttattgattaattactaaaaagtattactttctaattttattgctgtttctgttggtgtaagattagaatcatnngactgctattaggtgnnnnnnnnnnnnnnnnnnnnnnnnng

SEQ ID NO: 16135 - DNA, 985 bp, Macaca Fascicularis
  misc_feature (1)...(985): n = A,T,C or G
cagatgtggtcanctcagtccagnnnnggggcctccaggccatgtggcngnncccatggcccattcctcgctgcagtaacccctgggggctctgaccacctatgggggtcgggcaggagccactggggccctccactccgacatcaggacctgagattacagctgtgtggcgctctctccctgggtggggtggatgctgcaggctcctctggctcccaggtgctgcttctccacaggtgcggcctgacctggcctcctaaaggccacaccctccccacgcacttcccaggccagagtccaaacatcaggaaccctgttttcttgtttgtgtctcacttagaaatcgtggttcttccccgagggtgcgtgttgtaggagggagagggcagggaagactcacagcagagcaggaggggctgcgcttctcgggtctgcaccccaggcgcagcggtgtcaccccgcagggctgcaggcccgcccccgacccccagcattccccgggtgggcccagaccccatcaccaagactgnnnnnnnnnnnnnnnnnnnnnnnnnnnnnnnnnncgtgagagcgtgcgtgcgtgcacnnngtggccccgcatnnnnnnnnnnnnnnnnnnnnnnnnnnnnngtcgcctcctattgtacatttggggaaagccttgggtgtaaatcagtgtaaacttggaggagaaatttttctatcatgtagagtaggtattttttatagattgaaggttgatcaattttttaatactttcaagagagaaaactatctgtgtatacacatgaaatatatatatatatatatgtataatatataaagactggcaccctgcctctctgtgcccaggcccagccctggtgacacggcaccactcagcagtgctgtcgctataagcatggactcccaggagacagtgtgggaaacgctcctgctttaattcctcaagaaacggctcttcctgcctggatgcaggagggca

SEQ ID NO: 16136 - DNA, 736 bp, Macaca Fascicularis
  misc_feature (1)...(736): n = A,T,C or G
ttgttgtttttattattattagnnnnnnnnnnnnnnnnnnnnnnnnnnnnnnnnnnnnnnnnnnnnnnnnnnnnnnnnnnnnnnnnnnnnnnnnnnnnnnnnnnnnnnnnnnnnnnnnnnnnnnnnnnnnnnnnnnnnnnnnnnnnnnnnnnnnnnnnnnnnnnnnnnnnnnnnnnnnnnnnnnnnnnnnnnnnnnnnnnnnnnnnnnnnnnnnnnnnnnnnnnnnnnnnnnnnnnnnnnnnnnnnnnnnnnnnnnnnnnnnnnnnggaggggttacaaacctgagccactgtgcctgacctattgtatttcagatggtgacggagcagggaagaatgctgggaataggggaagttaaaagtgtaaagtggtggggtcagggaaggttcctctgagaagctgccatttcagcccagactgaaaggaggtgagggaactctggggacagagggaacaaccagggcggaggctgtgcccagcatatcagaggaacatctaggagagcagcgtggctgagcagagtgagtgaaggggagggtgaaggagatgagaccagacaggcaaaggcaggtggacaaatcattaaaggagtgcccttgctaactcctccaaataaccttatgaggtacaatcattactctccatttttttggtttgtcgttttcttttttgggacagggtcttgctctgtcacccaggctggagtgcagtgctgtgactggctcactgcagcctc

SEQ ID NO: 16137 - DNA, 749 bp, Macaca Fascicularis
  misc_feature (1)...(749): n = A,T,C or G
tgatttgtgcannnatatcatgccnatgaaacatacgaattggatcatgataagcaaaatgaaagaaataatgattaagggagaatcaagtgactgtgttacactgcttctnnnaggccagagaataaactgtttcaagcatcgtctttgaagagtcgtgtgatgtgaattggtttagaatggatnnnnnnnnnnnnnnnnnnnnnnnnnnnnnnnnnnntaatcatcagtggggcatgggtaaaacttaagaaaagtttcctcatgccaaattctaattttctcttacctgtaaagtaaaatttnnnnnnnnnnnnnnnnnnngttaagtacagggatttaacatattttgaatataatggatatgttctaaatttgaactttgaggggcaatactattggaattatgtggattctaactcattttaacaaggcagtctgacctgcataagatcacttgaatgttatgtttcatagaactatactaatctcacaaacggtctataaaatatagtagttgaaaaaatttttgtatcaaaatnnnnnnnnnnnnnnnnnnnnnnnnnnnnnnngtattaattctgacttgaattattttctaaaattaagagccgtatacctacctgtaaatcttttcacatatcatttaaactttcgtttgtattattattgatttacagcttagttattaatttttctttatannnnnnnnnnnnnnntgcatgcttttatgtttttcaggaaagggt

SEQ ID NO: 16138 - DNA, 727 bp, Macaca Fascicularis
  misc_feature (1)...(727): n = A,T,C or G
gaaggcaatgtgagcagctnnnnnnnnnnnnnnnnnnnnnnnnnnnnnacnnntcggggggccctagcccccaggcccctgtnnnccgccgtgagggaggcggggcacaccctgttaggcactcctgcccgtgacaccttattcactcgtgactgccagcccgggatatgcgtattattaccccatnnnnnnnnnnnnnnnnctgaggtgcacaaaaggtaagcacctgattaggaggtgctggagcccatcaggagggaaccggcctatccgagtcaggagcccatgctcaggaggccgcctgggtttgaatcccggcaagttttaaactcactaagcctcagtttttccatctgcacacgggagccagcnnnnnnnnnnnnnnnnnnnnnnnnnnnnnnnnnnnnnnnggaggcaacttgggtcgagccgtcagctcccaaataagcaaatcctccacaggggaagtccccaggcttgggctggagcccagggaggtgcggaccctccctgggtcaggggaggtcagaggcacccctcacacaggactgtttcacgttctgtttctgtaactcggggtctgccttcaagcctgtctgcctgtgcacctgtgaactaannnnnnnnnnnnnnnnnnnnnnnnnnnnnnnnnnnnnnnnnnnnnnnnntttccaagtttaaatagttgcaaagagtatgatttccagaatcatgtcaatattgccat

SEQ ID NO: 16139 - DNA, 608 bp, Macaca Fascicularis
  misc_feature (1)...(608): n = A,T,C or G
cccagagcgcgnngcgngtgagagctgagaggtggctctggacannnnngagcacgagaccgggcgagcnnncnagtanngcggacggcctggagcannnacacggggccccctnnnnngggccccgccctcacctggggctccctgaggattcttgagggccgctcctcccccgcagggctttggcgtctaaactgagtgtgtgtgcgaatcggtgtcatcgcttgtgtcttgctgggtgcacggttctctgggacccaggaactgcctttgtgctgtgactccctgagtccactggcagctccccnnnnnnnnnnnnnnnnnnnnngggtggaagtttccaggttcaggggtgggactctgcgggaggctctgggatgcccggctcaggacaggggaggattgccagggaagccaggggcagagctggagctcttggaagaggctggcattatggtggcttcagtttcactaggaatgaggcccagggtctgggggcctctgactcccccacccccaggcctgggcagggatggggtggtggtccctgagtgggtcaggtggggcacagcggccagggagggacaagcagaccccacagcgctgcc

SEQ ID NO: 16140 - DNA, 769 bp, Macaca Fascicularis
  misc_feature (1)...(769): n = A,T,C or G
tggagatcatgtctggagggagttcccannngcctccccggggccctncgtccacatccctgggagccagcagacgaccccgggcacagctgccctcagagcacaacacggaattcctcaacgtgcctgaccagggcatggccggcatgcagaggaagcnnnnnnnnnnnnnnnnnnnngtgcctggtgtgggccgacccaagccccagcctcggacacatggccccaggtgccgggcgctgtaccagtatgtgggccaagatgtggacgagctgagcttcaatgtgaacgaggtcatcgagatcctcatggaagattcctcgggctggtggaagggccggcttcacggccaggagggccttttcccaggaaactacgtggagaagatttgagctgggccctgggattccgccttctcttttgcccgcctgtctgcctgcctgcctggtggggagccaggccctgccaatgagagcctcatttacctgggctgcaatggcctaaaagtccagtcctctggcctccagtcctgcccaggccctgagtctgagagtcactgctgcagcccctacccctgggccctgatcttcccccaacatcacacccgctccgctgcccattctccacttctgcgtgtgtcaaacgggactaacagcagaatctacctcccaactgccatgtgattcagaaatgagtcttgagtcctgtgctgttggcaaagtgccaggcacagttggggggaggggtcgttgacaagcgtgactttgct

SEQ ID NO: 16141 - DNA, 708 bp, Macaca Fascicularis
  misc_feature (1)...(708): n = A,T,C or G
tactaccaaagactgttcagatggcaagctcctcaaagccagttgtaaaataggtcccctgcttggtacaaagaaaagcaaaaagaatttacgaagnnnnnnnnnnnnnnnnnaatcaattgttactgatcatgaaagttagttagaaaatgttaggttttaacttaaaaaaatattgtattgtgattttcaattttatgttgaaatcagtgtagtatcctgaggttttttccccccagaggataaagaggatagacaacctcttaaactatttttacaatttaatgagaaaaagtttaaaattctcaatacaaatcaaacaatttaaatattttaagaaaaaaggaaaagtagatagttatgtgatactgagggttaaaaaaaaaaaattgattcaattttatggtaaaggaaacccatgcaattttacccagacagtcttaaatgtaagtctggttttccatctgttagcatttcagacattttatactcatcttactcaattgataccaatgggaatatcaacttctggagtctattaaatgttttgtcacctttctaaagctttttttgtgtgtatatttcccaagaaagtatccttgtaaaaacgtgcttgttttccttatttctgaaatctgttttaatatttttgtagacatgtaaatatttctgtattttttatatgtcaaagaannnangtcttttgta

SEQ ID NO: 16142 - DNA, 866 bp, Macaca Fascicularis
  misc_feature (1)...(866): n = A,T,C or G
aagatgcccaggtggctgctgagatctggaaatagcagacacacccagcggagacaaaacttccttggagacacggttcatgacgatcctgtgtacccggagctatccacacctccggagagtcttccaggagttcatcaagatgaccaactatgacgtggagcacaccatcaagaaggagatgtctggggatgtcagggacgcattcgtgnnnnnnnnnnnnnnnnnnnnnaacaaacctctcttctttgccgacaaactttacaaatccatgaagggtgctggcacagatgagaagactctcaccnnnnnnnnnnnnnnnnnnnnnnnnnnnnnnnnnnnnnnnnnnnnnnnnnnnnnnnnnnnnnnnnnnnnnnnnnnnnnnnnnnnnnnnnnnnnnnnnnnnacctccggagacttcctgaaggccttgctggctctctgtggtggcgaggactagggccnnnnnnnnnnnnnnnacctctgccagaaatnnnnnnnnnnnnnnnncgccacggccaagcctgattgttccagctccagagactaaggaaggggcaggggtggggggaggggttggggttgggctcttatcttcagtggagcttaagagaggctcccactcccacgggccatcgagggcccagcacgactgagcgactgaaaaaccgtagccatagatcctgtccacctccactcccctctgactcctcagcctttcccagcttcctccccttgctacagcctctgccctggtttgggctatgtcagatccaaaaacatcctgaacctctgtctgtaaaatgagttgtgtccgtactttgatgcgggtggtgnnnnnnnnnnnnnnnntgtgctaagcgggg

SEQ ID NO: 16143 - DNA, 717 bp, Macaca Fascicularis
  misc_feature (1)...(717): n = A,T,C or G
ctgtaggaccnnnngctgccgccccagctgctgcaggccccagtgttgccagtctgtgtgctgccagcctacctgctgccgccccagctgctgtgtatccagctgctacaggtccccgtgtggccagtctctgtgctgctagcccatcttctggcaaacaacctgctgcaggaccacctgctgccaccctagctgttgcatttccagctgctgccatccttccnnnnnnnnnnnnnnnannnnnnnnnnntcctcctgtggtttcagctgcttcaggccctcctgctgcatctccagttgctgccaccccagctgctgccagaccacctgctgcagaactcagtgttttcaaaccaaccgctgtgtgtnnnnnnnnnnnnnnnnnnnnnnnnnnnnnnncacgtgctgctgnnnnnnnnnnnnnnnnnnnnnnnnnnnnnnnnnnnnncatctgaactcacccgattctcatcaaccagcattcttgatgtagctcatnnnnnnnnnnagtcatgggaagctagttggaaaacttcagttccaaccaattcttagattgaatctggcctccaaatatatgctccccctacattttacctctctaccaaatgaacatgggttgtaatttgctccaaaatctgtcaactatcttaattgaaatatttgctctctgccgtaatttctcatatggagctattccattttaaacaaatattt

SEQ ID NO: 16144 - DNA, 784 bp, Macaca Fascicularis
  misc_feature (1)...(784): n = A,T,C or G
tcaaaggacaaagacagtattttgacaaaatacgaagtggagattnncactacattgtacaaggaacaaaagnnnnnnnnnnnnnnnntctaaaaggttaatttctgtcaaatgcagtagatgatgaaagaaaggttggtattatcaggaaatgtgttcttaagcttttcctttctcttacacctgnnntccctcnnnnnnnnnnnnnnnnnattcatctttaaactggtcgttnnnnnnnnnnnnnnnnnnnnnnnnnnttttctcataggaccccttcttaatgagcaatatgcctccttgtattataaaatctttctgataatgcattagaaggtttttttgtagatgagtaaaagtgctttccatgttactttattnnnnnnnnnnnnnnnnnnnnnnnnnnnttctagtaactaggtgtaaaaatcatgtgtggcagctttatagtttttaaaatattttagataattcttaaactatgaaccttcttaacannnnnnnnnnnnnnnnnnnnnnnnnnnnnnnnnnnnccaatattgaccctctttacctcgcccacgcagacacacgcctcctgtagtcgctttgcctaatgatgttcctttgggtctgtgaggttctgtaaactgtgctagtgaagacaatgttgtgttcaacgttactcacgggcaagaatacnnnnnnnnnnnnnnnagccatgacaacagnnnnnnnnnnnnnnnnnnnnnnnnnnnnnnnnnnnntttttacattgatcttttgctaatgnnnnnnnnnnnnt

SEQ ID NO: 16145 - DNA, 735 bp, Macaca Fascicularis
  misc_feature (1)...(735): n = A,T,C or G
tggccagatgtgaggagaatgtggccntnntcagagaggttatctacacanncctggnnnnnnnnnnnnnnnnnnnnnnnnnnnnnnnctttgtnnctgaggtttgggctgtggaggtgagcagaaggtgcctgtctttactaaacagccaggatggaggaatcctgacaagagctgctggtgttctgagccggaccnnnnnnnnnnnnnnnnnnnnnnnnnnnnnnnnnnnnnnnnnnnnnnnnnnnnnnnnnnngatgaaattcctgaagacaggaggcgagactgcatcacgttatgctgtaannnnnnnnnnnnnnnnnnnnnnnnnnnnnnacgaagctcgggaagaagtaataagactggataaaaagttgagcattatgatnnnnnnnnnnnnnncagaggatgaggttctggtgggcaacgctgccctctgccttggtaactgcatggaggtgcccaacgttgcgtcttccctgctaaagacagacctcctgcaggtcttgttaaggctcgcaggcagnnnnnnnnagaagacggccgtgcaggtgaacgcannnnnnnntctggggnnnnnnnnnnnnnnnnnnnnnnnnnnnnnnnnnnnnnnnnnnnnnnnnnnnggcctagaannnnnnnnnnnnnnnnnnnnnnnnnnnnnnnnnnnnngagagatacggtgtctgtgtgcatttagggaacacacaaatgcacactatgggttgtcctatg

SEQ ID NO: 16146 - DNA, 783 bp, Macaca Fascicularis
  misc_feature (1)...(783): n = A,T,C or G
cagacagannnnnnnnnnnnnnnnnnnnnnnnaggaatattcatattataaatgtctcatgtgatggaggaacatgtgcatttagagagagggagagttttcaaggtttacggcaactttgtggaggacttgggtaactcttacccttggtcaaaggaagaggtttgcctgtctggcttctgaggttggagggggcacttagcagtgaaccttaagtctgggtacatnnnnnnnnnnnnnnnngggctgtgcaggccgctcctgcggtcctctggcctgaggcagggcggcaggcatgcaagccagtgggggaaaacccctctgaagctgggcagccctctacctgggccccgggagccgtgnnnnnnnnnnnnnnnnnnnnnnnnnnnnntctggttttcatggcaaagctctaccccagagctcctttaacatctgctaattaagtgcaataaatttttctagaaaatggcaaagatgacttccaggtggatattgctctcttacggtgttggggatgccagaacaccacttggttttatttttctaagtgcatgtgatgtgatagagtgtgtggggctctgtgtccttccctgggagctggcattccagcgggcccctctcttctttacctttnnnnnnnnnnnnnnnnnnnnnnnnnnnnnnnnnnnnnnnnnnnnnnnnngcagaagcagacnnnnnnnnnnnnnnnnnnnnnnnnngtgtgcgtgcgagtgtgtcactgctggtgggccggagtgatgtggtgggagggaagccggg

SEQ ID NO: 16147 - DNA, 723 bp, Macaca Fascicularis
  misc_feature (1)...(723): n = A,T,C or G
aacaccacagcnctgatacttccggtttatgcttctgaactcgggtttcttagtgtgccatttcaacttttaaagttgctagaaaataaaaatgatttattggctgcctttaattttgaggcaattgaaggatgatccctccctcctttgatacccaaaacagtataggaatacaggaaaatagaatgaaaaagtcatccatctttcgcctgaacacaaattttttgatttctcaaacttagtatcacatacctcatgctagtgacattatttctcattagaaagagccttataataaagcaaatagaacaaaaccagaaactcgcaggattgttactgtcttgttcggcgttttgttttctgcttttgtagtattacttttagaaccaatactttccgcattgttcagaattgcctgaaattgttatgaactgtttgtttgtatacatgacttgatttccccaggagctccagggcagagcatctggcttatatgtgttgaactgatccatgtttcccatttccagacccctgtctccctgttcctcttctttcagttgttaaggcaagttgatctgtactagtgctggccagtagaagtacaatgggggccacatgcagaattttacgttttctgctggatgtggtggctcacgcctgtaatcccaatgctttgggaggcccaggcaggagaatcgcttgaggccaagtgttgagaccagc

SEQ ID NO: 16148 - DNA, 668 bp, Macaca Fascicularis
  misc_feature (1)...(668): n = A,T,C or G
tggccagcaggggtgggtaggcagactggggccagtatcggctgttctgcctgggcccaggccgggctgggaaagcacacttgttctcatttccggcctccactttcgtgccagcttgtgctgtcataagcagagattcacagccccatttcttggatggaaaaagtggacactgaggtctgaggcttttgaggacagtcaggagcccccctttgggctcgagtgacgcactcaccagcttctggtcctcttcctccaccacctggaatgccttggctacctcctgtggtcctagggaacctcggccccagccctgcctccccagccagtcacagctcctccctggtcaccctggggacctcagggcccggctggtggctgtgctcctgtcctgtccccaagtcccatggagcctggcaggcaactcctccatgatctgaaccccgttaccttgacagctctgcctggcctcccctctcatggcccagccaccccagaacctgaagaggttttctagctgccgtgcatttgtcaggccgggttacccaccctacttttcctgcctgccctccagtgctgccaagcccagtgtgccagccannnnnnnnnnnnnnnnnnnnnnnnnnnnnnnnnnnnnnnnnnnnnnnnnaagctgagnnnntaactgc

SEQ ID NO: 16149 - DNA, 784 bp, Macaca Fascicularis
  misc_feature (1)...(784): n = A,T,C or G
agagggtnnnnnnnnnnacatcaccnnnnnnnnnnnnnnagatgatgttatttcactcataagaggtggaaccagacaatatgcatttgaactgaaagaaaagcttctccgaggaaccatgattgatgtgactgattttgtcaactgggcctcttccataaatgatgctcctgttctcattagtcaaaaactgtctcctatatataatctggttccagtgaaaatgaaaaatgcacacctaaagaaacaaaacttggaaagagccattgaagactatatcaatgaatttagtgtaannnnnnnnnnnnnnnnnnnnnnnnnnnnnnnnnnaattctaatggatggaaagtgtttgtgtacctgcccattcaaatttgagggaattgcctgtgaaatcagtaaacaaaaagtttctgnnnnnnnnnnnnnnnnnnnnnnnnnnnnnnnnnnnnagaactgttggcttctctgagctccagtggaagaaannnnnnnnnnnnnnnnnnnnnnnnatccctgaagataatcttagctgccaaagnnnnnnnnnnnnnnnnnnnnnnnnnnnnnnnnnnnnnnnnagtctcctctcttaggtctataattattttttaatttttctttcttaaactcctatgatgtttccattttttattccctaatgaggagtcaagagtgannnnnnnnnnannngctttctcccacagacnnntgcctaatctnnnnnaaaaaacaaaattaaattaaaacagaatgttggtttaaaaacttcaaagtaattgtc

SEQ ID NO: 16150 - DNA, 965 bp, Macaca Fascicularis
  misc_feature (1)...(965): n = A,T,C or G
gacgtactgcggctgcacgagagggcagagaagcaagtggtggcgcagggccgcagactgcaggggagtctgggagcagtcctgagggcctcctgcacactgcctgaggggccagagccatgcatctcacccgaggccgtgggactctctggacatagacgacgctgcttggtcccagcctccccggagcaacacgtggaggtggataaggctgtggcacagaacatggactctgtgtttaaggagctcttgggaaagacctctgtccgccagggcctcgggccagcatctgccacctctcccagccctgggccccgaagcccaaaggcaccggccggcagccgcctgggcaaaaacaaaggcttctcccggggccctggggccccagcctcaccctcagcatcccacccccagggcctggacacaacccccaagccacactgaggtnnnnnnnnnnnnnnnnnnnnnnnnnnnnggctaccccctggaccggccactctccccagccctcttgcttctctccaaccctgtccagcaagttcagggtgcctgcacttcaccctgtgcagaggtgggatggggccgcacatgcagggatgcccactccacagcctgcctgcctctcagccctggcccagaccccttnnnnnnnnnnnnnnnnnncctcttctgcgactttgtggagggctggtcagtggctgctgggtggcaggtgcccttgctcagatgcctggcagggctgggtggtgattcataaagacctcgtgttgattccctgatgggagccagctctctgtctcaggggtgggcgggtgggtgctggaggccagaacagcttccctgggggtcctgcagctttgaagacttggccgcctgcaccatgggttccagagctgtgcacattactgtgggtatgtgtgtgggggtctgtgtatggctgtgtgctgcctccacacccactgtta

SEQ ID NO: 16151 - DNA, 704 bp, Macaca Fascicularis
  misc_feature (1)...(704): n = A,T,C or G
tccancnngtgcccttnnnnngnnnntnnnngcnnncggctgcatccctgcccatctnntgggagtgccgtcccacccaggcctgctcccacgagggggtcgtttnnnnnnnnnnnnntcagcagatacttgcgtcatctttgtcacctccacccccataaaacacccaccttggtgtcttccacactggctgggactgaactgggtctgccacgtctgtcctattgggacctggttcctnnnnnnnnnnnnnnnntctgtccccctaaccccaccctctctgctccctgtgatttctgtcccagnnnnnnngtgaggaaggctgcctggaggaagtagtcactnnnnnnnnnnnnnnnnnnnnnnnnnnnnnnnnnnnnnnnnnnnnnnnnnnnnnnnnnnnnnnnnnnnnnnnnnnnnnnnnnnnnnggaggtttggatgcaggaagataggatgcaagccccttgccaggctcagcggcaggcattccccctttgtgtgttaacgctatagtagtcggnnnnnnnnnnnnnnnnnnnnnnnnnnnnnnccgctgctgtgctgctgtcccnnnnnnnnnnnnnnnnnnnnnnnatcgtcgattcagcactgaagccccagtgatgtannnnnnnnnnnnnnnnnncctggcggactatgaccctccaggacaggggctctgtcttagttagctctgtggtct

SEQ ID NO: 16152 - DNA, 764 bp, Macaca Fascicularis
  misc_feature (1)...(764): n = A,T,C or G
ggtatgagcaccggctcattgatgacatggtggctcaggtcctcaagtcttcgggcggctttgtgtgggcctgcaagaactatgacggagatgtgcagtcagacatcctggcccagggctttggctctcttggcctgatgacgtctgttctggtctgccctgatgggaagacgattgaggctgaggctgctcatgggaccgtcacccgccactatcgggagcaccagaagggccggcccaccagcaccaaccccatcgccagcatctttgcctggacacgtggcctggagcaccgagggaaactggatgggaaccaggacctcatcaggtttgcccagacgctggagaaggtgtgcgtggagacggtggagagcggagccatgaccaaggacctggcgggctgcattcatggcctcagcaatgtaaagnngaacgagcacttcctgaacaccacggacttcctcgacaccatcaagagcaacctggacagagccctgggcaggcagtagagggaggcgccacccatggctgcagtggatgggccagggccgagccggcgggtcctcctgagcacggcagagggtgagcctcacagcccctctctggaggcctttctgggggattttttgtaagtgagatgtttttaaaagcatatgtgtgtttcccctcctggtgacgtgaggcaggagcagtgtgttttacctcagccagtcagtatgttttgcatactgtaatttatattgcccttggaacacatggtgcca

SEQ ID NO: 16153 - DNA, 1064 bp, Macaca Fascicularis
  misc_feature (1)...(1064): n = A,T,C or G
ggnnnnnnnnnnnnnnagagggagagggagtacagtgatgtcaagagcacagggctcctggccttcagaccagtcctcagccacagtgctacgggcaaggccggcaccagcccccagactgagtcatgggtaaaggccaagagctgaagcaagagtttctcnnnnnnnnnnnnnnnnnataaagcaacccatccacctggagcccaaaaatgggttgacagattccagaaaggcaagatccttgatgactccataactcccactgccccttnnnnnnnnnnnnnnaaaacctatgataacccaaatcctaaaccctgttgcccctgccgcctctnccagacannnnnnnnnnnnnnnnnnnnnnnnnnnnnnnnnnnnnnnnnnnnnnnnnnnnnnnnnnnnnnnnnnnnnnnnnnnnnnnnnnnnnnnnnnnnnnnntggagtcctgcctgcaacagctggccacacgtcccggacactggggcatccatttgcaaatagcagagcccacagccctccggccgtccctggccttgctggcacacctctccagccttggcctcttgcattggcctgtgtgggttggggccaaaatctcccacgggagtttttcgnnnnnnnnnnntgtggctggcagagagctgcttacagctgtggctgaggtcttcccccannnnnnnnnnnnnnnnnnntnnnnnnnngaggtgctgggcagtggctacagagaacatctgctcacagatatgctagagctgtgccaggggctttggcaacctgtgtccttccagatgcaggccatactgctgggccacagcacagctnnnnnnnnnnnnnggctgctggcatcctccccccgggccaccgtcacagtggagcacagcccagcggggggcgactatgtctctgtgaggacagcgcnnnnnnnnnnnnnnnntgtggataggacccgagtctactacaggctgnnnnnnnnnnnnnnnnnnnnnnnnnnnnnnnnnnnnnnnnnnnnnnnnnnnnnnnnnnnnnnnnnnnnnnnnggctccagggcggaggcttcccacggg

SEQ ID NO: 16154 - DNA, 634 bp, Macaca Fascicularis
cagcccagagcctgccgctaccctcggcctgtccaccaccaagcaagcagcaagcaagatggggttctcatcagttcttcctcccacaatgtaggacctttcctttaccttccaatggataaaatagttcagatttcatagtcatattcatagacacagaatcaagcttttaacatatacatccacctctatatgttaaataaaacatcagattatcaacactgtcattacgtagaaactttggttagccaagcagtgcattgtcatttatgtcatctctaaaaatgacctgtgtctgttctctggggattgctgggtcacagatgcccctcaccttccacagtcaggcagggaagttatagacacaaagctacatctggaatccctttgtgccccttttgtgttcctcaaggaagcagtacctttgaagagatctttgctgcattaaatggtgactggctacctttcatgccaggcttgctttgcctgtgggctactcagaacctgctgtaaccctcagctcaaaaaatggactggtaatgtgagtagtgttggatgctttactgctctctttagttgttaccgtaatcctgctttttcatgggagtttgaatcgtggacccataacttttca

SEQ ID NO: 16155 - DNA, 209 bp, Macaca Fascicularis
atgttaatctcctaacactaaggtaacacgacataatcacaccccagaagggaacacacgtttccatattggtttgtaatatgggtctcgatgggttttgttttatcccctaaattttgttcccccgagttttgtggggagggggagggggattctggttttattagctttgtgtgtgtcttcttctcccccaccccccctcggtgaga

SEQ ID NO: 16156 - DNA, 714 bp, Macaca Fascicularis
  misc_feature (1)...(714): n = A,T,C or G
ggnnnnnnnnnnnnttgaagctgcaatgttggacaggcagaagaagtggtnnaggagagaattnnngatgatgagctgancttaatcaaaaacactaaggctcgtnnnnnnnnnnnnnnnnnnnnncgtggggcaaatgatttcatgtgtgatgagatggagcgctcgttacatgatgcactttgtgtagtgaagagnnnnnnnnnnnnnnnnnnnnnnnnnnnnnnnnnnnnnnnnnnnnnnnnnnccctttccatataccttgaaaactatnnnnnnnnnnnnnnnnnnncgggaacagcttgctattgcagagtttgcaagatcacttcttgttattcccaatacactagcagttaatgctgcccaggactccacagatctggttgcaaaattaagagcttttcataatgaggctcaggttaacccagaacgtaaaaatctaaaatggattggtcttgatttgannnnnnnnaaacctcgagacaacaaacaagcaggnnnnnnnnnnnnnnnnnnnnnnnnnnntaagagtttgaaatttgcaacagaagctnnnnnnnnnnntcttcgaattgatgatcttattaaattacatccagaaagtaaagnnnnnnnnnnnnnnnnnnnnnnnnnnnnnnnnnnntctggagcccttaatgattgatctgatgtctcttttatttataacaatgttaaatggaattgtcttgt

SEQ ID NO: 16157 - DNA, 751 bp, Macaca Fascicularis
  misc_feature (1)...(751): n = A,T,C or G
acagaagctattnnngaagaaattgatgctcaccagcacaaaggaactgaaaatcatggtgactgagaagaaagtggatgatcagctcactagccacatcaaaggtgccaactctctaaagggtagactgtgcagctttgaagcctggaagacaatacctgccaccatgtcaaagccacgctggaacatttctgctatgatgaagattaaatagaannnnnnnnnnnnnnngataacactgattcctgacaacagcgtgagatttcaacagaacttcttgggaacaaatactcacttaaaacttcagcagcagaaaaattacttagtccttaggccaaccaatttaactgcagtgtcatatatttcannnnnnnnnnnnnnnnnnnnnnnnnnnnnnnnnnnnnnnnnnnnnnagattattttactacaaaataattctgaatagatgaaagcataaaatgtgagaaactgaatgtattnnnnnnnnnnnnnnnnnnnnnnnnnnnnntaactaaagttgaatgtaaaagtcaatttgcacttctttataatcctctggtttagaactgtaaattgttaaaaccttgatgattgtcatttaattatattnnnnnnnnnnnnnnnaggtcactggactctacattgggcggccttgaaatatgattctttgtaatggtaaatagtctttttttctctttttactacaacttaacatttctattggaacacagaaaatgaaaatatttagaat

SEQ ID NO: 16158 - DNA, 745 bp, Macaca Fascicularis
  misc_feature (1)...(745): n = A,T,C or G
gggacgccccgggnanntgaaggccctgtccgctctgtcttccgccannnnnnnnnnnnnnnnnnnnnnnnnncagaacccaaggtcaagagggccatcnnnaagcctccacgccaggccctgaatcggaaaaagggcagccctggcctggcctctggctctgtcagccagagccccaactcannnnnnnnnnnnnnnnnncctggggccacagggcctatggcagtcagaccagaggaagtggcccgggggctgggggcaggcacggagagttcagggagggcccaggagccagtctctggggctggcttcccgaaacaggatccccagaagcaggctgaagaggaaaggcaggaggaacctgagtatgnnnnnnnnnnnnnnnnnnnnnnnnnnnnnnnnnnctgatgaccttgaatttggggagtgaggagannnnnnnnnnnnnnnnnnnnnnnnnnnnnnnnnnnnnnnnnnnnnnnnnnnnnnnnnnnnngcccggacagacagaccagagcctctgcccctccacagggaaaaggcaaggcttccgggccaggtggcccagggccctggtggtgctcccagagggggcctggaaggcctgggcagagaccctgcaggatggggtcannnnnnnnnnnnnnnagggacttctcctgtgctgtcctggaccctgtgtgcctcgtaagggctattctttctttcatgtgcaaaacatttttctgaaatgacaacctacacg

SEQ ID NO: 16159 - DNA, 667 bp, Macaca Fascicularis
  misc_feature (1)...(667): n = A,T,C or G
ttcaatgtgtttaattttggagtaacgttttttccttgtgactaagttgcaagatcttatttattaactaggtatgaagtataaacccattttggtgcaatattcttgannnnnnnnnnnnnnnnnnnnnnnnnnncaatgcttaatattacaaggtgttgttaaaacacaaaatgaataaaagtgagagtagtcagaactatgacattcaatttgctatttacagatgaagtatttcatgtaatataagtgaacaactggaaataaaataggaaagaatttgtaccatgtcttactacataggttaattttttaagggatgttgcaaagggattactagagaaagacaaaatgtgaccaaaaaaagcatgaatatctctaagtatcaacaacatgtcaaagctgcatgtgaaggatgtatnnnnnnnnnnnnnnntatttcagaatattttgtaagctataacatatttattgtgcattaaaattaaacactttttccccaaaggcatgcagtcatgagaattacagaaaatttgcaacatataaagtagtttgatctaagaggattcaacacctttgttttgttgctnnnntgtgtaatgactagagatttgtaaatctttgtgaacattctgtgctggttcnnnnagaactattcattccctgc

SEQ ID NO: 16160 - DNA, 723 bp, Macaca Fascicularis
  misc_feature (1)...(723): n = A,T,C or G
cnnncaacggtgaagcagaagtcagtcccacagcgggggccgaagctgtcagcgggggtggcggcggcactggggcgacccctggggctcccctgtgctgtaccctgtgcagggagcggctagaagacacccacttcgtccagtgcccctcggtgccnnnnnnnnnnnnnnnnnntccctgctcccgggagttcatcaaggcgcagggcccggccggggaggtatactgcccgagcggagacaagtgcccgctggtcggctcctccgtgccctgggccttcatgcagggcgaaatcgccaccatccttgctggagacatcaaggttaagaaagaacgggacccctaggctaccactgcctccaggctactgccctctgcccttttgccnnnnnnnnnnnnnnnnnnnnnnnnattccctccccgacccagcccagtgccacccctatctgtgtacatactcccttcctccacccagatgggtccnnnnnnnnnnnnnnnnnntgggtggggggagaaagcttgtggctcctgtccgaggggatatttggggtcccttggcccctccagtttccctctgtccttggcttggctttgctgctgcttgtagttgggggagaggtgcccccctcctccttgagaagggacnnnnnnnnnnnnnnntctttataaacgaggcaaaagcattttattgcccccctctcccgcccccttctgctccttca

SEQ ID NO: 16161 - DNA, 694 bp, Macaca Fascicularis
  misc_feature (1)...(694): n = A,T,C or G
tagtaatcaatagnnntattataatataagnnnnnnnctnnnnaaaattcacgtttaaattcatcannngcaccacagtgcgcctgtgcacaaattcgcatgagtcttcccgtgttacataataaaagggcggcatttgtggcatcctcaattgactcaaagttgtgaattccattttcaaaacaagaaaagctttttttccacaantgttgctaggcagcagacacagatttgctcactactctctcactctgcaatgatgccgcatgattcatgtaaaacactccaatttcatttctaatgttacccattctattcaatacttgtacatagtgttatggattttggcttttcaagtcactaaattgcaagatttcattagcagcctagtaacatttacaactaacagaaagttgactttctaagtctgtagacaaatcagttgcccatgcaaatccttggcaactggactctctgtgaaggctatgcaggatctcctggtcctcttttgtttggtaatgaaactcttcaaggtgtgcagctctattatttgcattatgggccagcattagttggatatcaccacaaagtgtcaaatattgagagagaaacagcagcacttcggaaagcatattggtgcagaggcnngnnnataagtatcacggctttgcaaagctaatttaatgtatcgtaa

SEQ ID NO: 16162 - DNA, 1264 bp, Macaca Fascicularis
  misc_feature (1)...(1264): n = A,T,C or G
cccccggcctggcccctgcaaccattggggcagtggcagtcagtgggtgcctgntnnncgggcttgccatcgctggccctgtgctggcctggagactctggcgatgccgagtggccaggagccgggacctggacaagccctggcctgctcaggataggcccaagcccagtttaggcttgcaaccacggtatggcagccggagcacccccaagccccaagtggtcacgccaccccgcccctccactcctgactatgagaacatgtttgtgggccagccagcagccgagcaccagtgggctgaacaaggggctcacccttcagaggacaatgacttttacatgaactacaaggacatcgacctggcctcccagcctgtctactgtaacctgcaggcactgggccaggccccgatggatgaagaggagtacgtgatccctgggcgctgagcctaagacgtcccaacctccacccagacccccttcggtccctgctgggtgactcagggcatcctaactcctcccgggcctcagtttccccatctgaagaatggggacagaaaaggatccttgaggccccaggaagctctgccgccccctccctgtcccctatgccgctcctcagcccgttcggctcctagagggggaagaggagagacccccaacaaggggacaggagggtcactgtgtgaatcctgtcgtcatcctcctgtggatgttcaggcagtgctcaataannnnnnnnnnnnnnnnnnggctgctggctcagggtgagtgggttcctcaaggtggggatttctgagttctaagaccaagtctccatctgagactcccaaattgctccccacctcccatccctgttttgttttggtttttgttgttgttgttttgtttgtttgtttgtttttgagtccnnnnnnnnnnnnnnnnnnnnnnnnnnnnnnnnnnnnnnnnnnnnnnnnnnnnnnnnnnnnnnnnnnnnnnnnnnnnnnnnnnnnnnnnnnnnnnnnnnnnnnnnnnnnnnnnnnnnnnnnnnnnnnnnnnnnnnnnnnnnnnnnnnnnnnnnnnnnnnnnnnnnnnnnnnnnnnnnnnnnnnnnnnnnnnnnnnnnnnnnnnnnnnnnnnnnnnnnnnnnnnnnnnnnnnnnnnnnnnnnnnnnnnnnnnnnnnntgtggccaccgtgcccaaccacattcctcccttctgcccctctcagggccccttcccaggttcctgatctccaggttcggcccccagtgcagcccacac

SEQ ID NO: 16163 - DNA, 752 bp, Macaca Fascicularis
gttcctttccaggttgagatgtatgaaactagagctgaaaagaagctgagaaatgaccttgtctggtgattttttgcctggcggggccatttgtataaccacacttgtgcattgcctcctcatgctgttactgacggggcagggtgccatgcatggtgcagaggatggaggctgagaaaggtagacggctacccgtgatctagcccagtcgtagtttagagctaatgaaactgatgttcaaaaagcgacaggctgggcctctttcctgtggttcacagctgtagcgtggagattagtagactggacctttccagcacaacacctccatgcactgctttctctgtagcacatgttacctttctttgtgaggcaatggagtggtctaggattgaacaaaaagcaattttcattacatctttatgctaatagatttggaatttttgaagtgaaatgaaaccttgtttaaacattaaaattactaaaatatgggtacattacacacaatccagatctcaaacacgtgattctaagtgaaagaaggcagatgtcagagaccgcgtattttctagtaccattttaggaaatgtccagaaatggcagatcttcagaaacaaagtaactgcaagtgttacaaggaatcttttcggggtgatgaaaatgccaaaactatatggtggtgatggttgaataatttggtaacttcactaaaaatcattgaattgttcactttatatgggcagatttatggcaaa

SEQ ID NO: 16164 - DNA, 672 bp, Macaca Fascicularis
  misc_feature (1)...(672): n = A,T,C or G
caggcaccagnnnnnncgggnctctgatctnncgtccgtccctccctccctcctcccagaagcccagcctggggctgtgccgcccacaggagttgagatgatggccatcctgacaccttcctccactatagccctgaccacaggtccagtcagggagctctcagggtccccagcgtcccagcagctggtttctgttcccccctcaatggtgtgttcccagccaggtcctgaccctcagagctgagtccccgtcacgtctgaggcagccaagcccttgccccccagggacctggacgtgcccagcctggatgtggggttggacgggccattttctatgctgtccctcatccccacccctgccacagcctacacgcatcccacacatgcaggcacacacaagggcacacacagcccgtgcacacgtgtgttctgggcccggtttcatcccccagtgactggtgtctgtgaggtgcagacggacacaccacacgcccagcgccaccctccaggctgtgaccgcgctgcctccgaggccttgacacggcccctcaaccacaggaccgccggacgcgcacactttcatcatcgtcacacaaaccgtctactgcacgtttttctattattcctattcttatgccatatctattacgtatttttctactcttcctatta

SEQ ID NO: 16165 - DNA, 882 bp, Macaca Fascicularis
  misc_feature (1)...(882): n = A,T,C or G
agcaatgcaacaaatggagctgcaggaccaagccaaaaagctgacagccaagatgtaagggagagtggcactgccacatcccaccggcagaaactctccttcatacaaacttcactggctccaannnnnnnnnnnnnnnnnnnnnnagcagttgagcacagggttaattattcacttgtggtaaagattatagcatctattttgatccgtgggttttataatttcaagggtcacacagggttgagttcaataagaaatgctgtagctgttgtcattcaatctagtgccttcttgaggccaggagtttgggagcagcctgggcaacacagtgagacccccannnnnnnnnnnnnnnnnnnnnnnnnnnnnnnnnnnnnnnnnnnnnnnnnnnnnnnnnnnnnnnnnnnnnnnnnnnnnnnnnnnnnnnnnnnnnntctagcagtttgaggttacaggagctgtgatcatgacatggcctccagcttgggtgaccgagtgagactctttctaaaaataaaaacaaataaaaaataaatttcttcttggggtggggtggaggtggggagcaagaatttggcctaggctctgatcccttgtgtgttgtgggcctctttaacnnnnnnnnnnnnnnnnaacctcactgtacctccctttactttgcatgcatttgtgttaatattttaatcttagaagacgctgacccactgagggtttgttgtgagagtccctgaagccatgtagaagcaccttgaaatctgtgaaaccacaataaagtactttataaaaggtatccttatttgaagtggacagatcttacaactcgaactatttagccttatgattaattttaaaagttgtgatttagaaggcaggattgttttg

SEQ ID NO: 16166 - DNA, 294 bp, Macaca Fascicularis
tcccaaaggtcccagcaccccacttccagaagaccccaacaggagggtcatcgagttccacaccacgcccaagatgtccacgtactagctggcgtccatcgtcagcgagttcacctacgtggagacgcaggcatccaacgatgtcttgatcaggatgagggcccggcccagcgccatcgcggcgggtcatggcgattatgctgtgaacgagacaggccccagctctttccctctttacacagaaatatttttgtaaggttctggggcagggagggagcgtgaagtacgaggaaa

SEQ ID NO: 16167 - DNA, 730 bp, Macaca Fascicularis
  misc_feature (1)...(730): n = A,T,C or G
gaagactgccagnnngatagccaacagttgtaaagcagtctnnnnnnnnngatgnnnnnnnnnnnnnnnnnnnnnnnnnnnnnatcagtacggaaaaaatgtaggaatagcttnnnnnnnnnnnnnnnnnnnnnnnnnnnnnnnctcatgttctgaccagatgggcaaaccaannnnnnnnnnnnnnnnnnncgggttagccactggtcctgtcctgtttgcctgtcagcagttcccagaaatgaatgctatgatcatgcgaaggnnnnnnnnnnnnnnnnnnnnnnnnnnnnnncgacagtatgtgttacagagtgatggtgtgcaacaaacaacctacctcgcccagcagtactgccatgaagcaataagagagatcagtaaacttcgaccatccccagaaagagatgccctcattcaactttcagaaattgtcctcacgagagataaatgacaactctttccgttctttctggcagctatctcaccagactgtgcctaaagaattttgtggaatacactttgtttgcttcatgtgcagataaccaaaaatcattttaaaagatatcaaacttatnnnnnnnnnnnnnnnnttttttattgcaaannnnnnnnnnnnnaactttttaaatgtaattaaaccatctgaatctgtcattctagtcctataaattataatcgaggtatcttgatggttatatgtggtattgtttacactgttaatatccac

SEQ ID NO: 16168 - DNA, 718 bp, Macaca Fascicularis
  misc_feature (1)...(718): n = A,T,C or G
cgcccatatgaaagtatgaannntaactaaaaatatgtaatataggcttcagattcatttgaaaatacttttcaagcaacacttacatgcaaaatactctgttctcagcactggagatatagtggaaggcaggaaagacatagtttctaccttcaaattcatataaagaaagataatcaaagaaaacaaatgaacaacaagataactagaagaaaaagggtcctgaagaagtggctgctgaactgaaatctgaactatcagaaggaatcagtcttattaagagcaaggggaagaatattccagacaaacaactgaaggacaaaggccaagaggtaaagaacttgccaagttgttgaaaaactccgaaaaagtcaccgaaaaagacttgtagtcaaggctttttttaatatgtactgttcctttagagcatggaactgtggatagaattcagaagaattttaacgggaaaaaaatttacaattttattttcattaatctctaaatgaaattaattctttcttcaggaattattattattattcttcagtattattataaatggttacaactttgtcaccaacaaagatcagattttttcttttttttttctttttttttcagattttttcataacattagaataaagatatcacataacataaaataaagatattaactaagcccattataattctaaaatctggtatttatcaaattt

SEQ ID NO: 16169 - DNA, 752 bp, Macaca Fascicularis
  misc_feature (1)...(752): n = A,T,C or G
acacacagtgcgagaagcccttccgctgcgcccgctgnnnnnatgnnnctgctcannnnnnnnnnnnnnnnnnnnnnnngcgcgtccatacaggagagaagccctacaagtgcccnnnctgcccttatgcctnnnnnnnnctggccaacctcaagcgtcnnnnnnnnnnnnnnnnnnnnnnnnnnnnnnnnnnnnnnnnnnnnnnnnnnnnnnnnnnnnaccagagcatgaacctcaaacgtcacatgctgcggcacacaggcgagaagcccttccgctgtaccacctgcgcctataccnnnnnnnnnnnnnnnnnnnnnnngcgccnnnnnnnnnnnnnnnnnnnnggtggggcaggagggcctggtctctccgcctctgagggctgggccccacctcatagcccaccctctgttttgagctctcggggcccaccagccctggggactgctggcagccgggctgtccatacagactcaccctgaactaggtccttcttccccacgttttatacagacggaccagaagccacctttttctcccccgctggccaggggctccacacagactaacctaggcactataaggaccagcccaaccccatgggcggggggccatatggaccagggggcnnnnnnnnnnnnnnnnnnnnnnnnnnnnnnnnnnnnnnnnnnnnnnnattcacctccactgctcccaggnnnnnnnnnnnnnnnnnnngggggactgcccagcctcccacctgtttattt

SEQ ID NO: 16170 - DNA, 711 bp, Macaca Fascicularis
  misc_feature (1)...(711): n = A,T,C or G
gttannnnnnnnnnnnnnnnnnnnnnnnnnnnnnnnnnnnnnnnnnnnnnnnnnnnnnnnnnccccgtcaaaaaaaatgggaaggagagacaggcttaactagagccctttccttctgacgcgtgaatgtccttctctccagggatttggacacttggtnnnnnnnnnnnnnnnnnnnnnnnnnnnnnnnnnnnnnnnnnnnnnnnnnnnnnnnnnnnnnnnnnnngggagcccccctggccnnnnnnnnnnnnngagaggaggaaactttgcctagtggcatttccagagggctcctctgtgctccagtgtaggcannnnnnnnnnnnnnnnnnnnnnattccctccctaggtgatgctgggaggttcctggttacagacactggaggcgagtggctgtgtcttatctcaggagctgtttcaacagcgggcccaggaagcagctgccacacaattaggactgaaggagctgccaagtcactgcttggtccatctacacaagaactgcatcccccnnnnnnnnnnnnnnnnnnnnnaaaaactagagtcagctaggcaattcctggctgctcacaggttgcccctgactctggctggagcctcctatgagggggttgctgttaatgactgtatagagagtgggcgccaggcagcagtcagtgtcttgggcacagaacctaacggcnnnccccaactccactcagaaaaaaa

SEQ ID NO: 16171 - DNA, 546 bp, Macaca Fascicularis
  misc_feature (1)...(546): n = A,T,C or G
cccagcccataccaagaccagtgtaagccaaacctgccccctgggnnnnncagccccttgtcnnncttcccctgaggccacagaactccatggggctggggcctctttccctggcctcccctgtgcacctgggggctcctccccnnnntgatgctcccccatccccacccacttctacatccatccacaccccagggtgggctggagctccaggctggctgggctgagccccgcacacacgcagggttctgctccctgaggggggcctgggaggggctccagcaggaggcagtggctgccattggggggaagggggggaatgacacacacttcannnnnnnnnnccgaggannnnnnnnnnnnnnngcaggcttcagacacccccagcgcccaccctcacaggcccaggagtggagctttctctggccaagtttcaggccaatgatctccgcatggtgttgggggtgctgttgtgtcttggtgcccgaacttgagtctcacccaagagataagaggtggcccaggcaccagggcgaaacaataacc

SEQ ID NO: 16172 - DNA, 780 bp, Macaca Fascicularis
  misc_feature (1)...(780): n = A,T,C or G
cagtatgannnnnnnnnnnnagaaagnnnngagagccagttcaannnnnntaaaccgatacttcccaacttcttgggtgaagggactggcagggacagcgaggcaaactccaactccaggaatgattttggttcaattaggaatctgacaacaggtcatgataaatgatagaattcactattcatctgtaagttcccaattctctcattcacacagtcacatattcacacattagtaatggctgttatatttatagctatttcagcctgctggactattttccattccctctaatttttgttgtggtggttgtcaactatgttagttatagcatgtgcacacaatagcagataaatggtgtttcctagggttgttgtttttgtttggtcagattttggaactcacaggtgttttcaggttcccaatatttgaacttgttcattgatacgttatgattaagagaatggnnnnnnnnnnnnnnnnnnnnnnnnnnnnnnnnctctaagtctattgtaaatcacagcttttagtttaaaaaatacttttcatttatgcaaaaattttagtaatcttgtaaattgttgcatttctgttgtgttgtttcaaaaacattactcttccctcaaatgaaccaatattttacctaggtgatgttttctctcttgaattttttctttcaaaattgatatttatagaccatcgggtgttattctaaaggattcaactcctattacatgaaagaataatagaaaaaaggnnnggttgacttgtgatgcttta

SEQ ID NO: 16173 - DNA, 571 bp, Macaca Fascicularis
  misc_feature (1)...(571): n = A,T,C or G
gcgccccgcccgcggccccggggcccggctcagcgccgggacccccgcagcagcaccctggagcccgaggacgacgacgaggacgaggaggacacggtgacgcggctgggacccgacgacacgctgccgggccccgagctgtccgcggagcccgacgggcccctcagtgtcaacgtcttcacatcggcggaggagctggagcgggcgcagcggctggaggagcgtgagaggatcctgcgggagatctggcgcaccgggcagccggacctgctgggcacaggcacgctggggcccagccccacggccacgggcgcgggcaccctgggccgcatgcactattactgatgggccccggctcccgctgcaaggcgcttgnnnnnnnnnnnnnnnncatgagcccagacctgctccggaccttcggactgcatcggcccccacggcccccaggtgctactgggcgtggaccgccagcccccgcgagtctctcttnnnnnnnnnnnnnnnnngaccccaggggcggggagggggcacgatgcagggtccccactccctctctgggggtgatgaagag

SEQ ID NO: 16174 - DNA, 727 bp, Macaca Fascicularis
  misc_feature (1)...(727): n = A,T,C or G
cgagggcgacatnnnnnnnnnnnnnnntttnnnnnnnnnnnnnnnnnnntgctgcgagaacgacatcgacatagtgcgcgtgggcgatgtgcagcggnnnnnnnnnnnnnnnngcgccggcgaggaggcgggcgcgccgggcgacctgcactgcatcctcatttcgaaccccaacgaggacgcctggaaggatcccgccttggagaagnnnnnnnnnnnnnnnnnnnnnnnnnnnnnnnnnnnnnnnnnnnnnnnnnnnnnnaccctccccgagtgacagcccggcggggaccttggtctgatcgacgtggtgacgccccggggcgcctagagcgcggctggctctgtggaggggccctccgagggtgcccgagtgcggcgtggagactggcaggcggggggggcgcctggagagtgaggaggcgcggcctctcgaggaggggcccggcggcggcagggccaggctggcccgagctgaggactctgcaagtgtctggagcggctgctcgcccaggaaggcctaggctaggacgttggcctcagggccaggaaggacagactggccgggcaggcgtgactcagcagcctgcgctcggcaggaaggagcggcgccctggacttggtacagttgcaggagcgtgaaggacttagccaactgcgctgcttttttcaaaacggatccgggcaatgcttcgttttctaaaggannnnnnnnnnnnnnnttgaa

SEQ ID NO: 16175 - DNA, 667 bp, Macaca Fascicularis
  misc_feature (1)...(667): n = A,T,C or G
ctggagtgcagtggcgtggtctcagctaactgaaatctccgcctcgcaggttgcagcgattctcatcagagaatnnnnnnnnnnnnnnnnnnnnnnnnnnnnnnnnnnnnnnnnnnnnnnnnnnnnnnnnnnnnnnnnnnnnnnnnnnnnnnnnnnnnnnnnnnnnnntgaacccctgacgtcaggtgattcacctgccacagcctcccaaagtgttgggattacaggcatgaggtactgcacccggctgactctttaacagaaacttttcttccaatatgaaggaagcatggagagtaggctacagtcacttaatgatccttccaagttcagagtcatgataatccaggcagctcagctctacaggaaggcccagaaccacacagcccaggcagtgattgaattctttcttgtcaccagtgggaggttccctgcctgtgatggacttcttgttttgtgtacagaatttatgttagacagggtcctgctccttaaagagcagcagggacgtcatgaatggattcaggattgccgcagaaaggacgaggtgtcatggggtgggggaggacagaggcatcctcgggaaaggttttgcttcaccagcttgggtagaatcacctgagacatgaggatgctctctcccactttctacctgacacgcagcctg

SEQ ID NO: 16176 - DNA, 761 bp, Macaca Fascicularis
gtagttaaagacatagttagaaatatgacaaaactggcacatgtgcctgtacaagtgtagcacggattccaccctgaagccatgtttagaaggtggttcccagcactaggaggatttaaaactcttataatagcagttataatagtaatagaaacctgcttactgctcccttgtttgctacctgtacttcttcaaatgataaaaagcctcatcactacctcagttcaccagaatgcgtcaacacaagtgtactatatgaatcactattagtctattgcacaaaaagacataagtatcgaaaataagagtgagaactcccactaaataaaaaagtgagaatctcaaaggggggaaatgagggaagagagagagagagaccctctcatattgttttatattgttttatgctcagaaaaggaaagagaagcaaaactaaaggcaggtagcccggtgcctaggaaccagacccgaaaccaggcctgggactgcctgacctaagcctggtagttaaaattcgacccctaacctagcaactgatgttacctatagattccagacattgtatggaaagacattgtgagacctcccattctgttctgtttcactgtgaccaccagtgcttgcaactgctgtcatgtaccccctggcttgctcaatcgatcacgaccctctcacgtggaccccttagagttgtgagcccttaaaagggacagaagttgagcacctgaagagctcagattttaagatgctagcctgccgat

SEQ ID NO: 16177 - DNA, 747 bp, Macaca Fascicularis
  misc_feature (1)...(747): n = A,T,C or G
cagannnnnnnnnnnnnnnnnnnnnnnnnnnnnnnnnnnnnnnnnnnnncatgagcaaannngcaactgnnntnacgcnnnntgaatttgagaatatggcagaatnnattggaatgtacctcaggataagannnnnnnnnnnnnnntcaccccgaaaccagcagaaaaacaaaaaggcctctgaataacggcttgacttagcactgagagctatttaataactttgttctgttaattagtactaattaagtggagagagagaatggttttcctgtttgtacctcccacttttaaaaatctatccaaggttcgtgttccaaagtcaagcctattttaaagaaagactgagctcactagttcactatattttattctcactgacaaaacttggggggagatgtgannnnnnnnnnnnnnngagagagtttgttaaggtttatactatttttggatagtgactgtccgtcgagagagatggtttttatctgtcttttgtacattgttttccccttctacattttgctaattatcctgtatataagtttaatatatcactttttaaaagaaaaaattctaccattttaaattcnnnnnnnnactcctacaaccaaatgagaaaannnnnnnnnnnnnnnnnnnnnnncatttggggtatttttataagtgatttannnnnnnnnnnnnnnnnnnnnnnnnnnnttttttgtaacttcattcttcatnnnnnnnnnnnnnnnncggtatgtt

SEQ ID NO: 16178 - DNA, 671 bp, Macaca Fascicularis
  misc_feature (1)...(671): n = A,T,C or G
taagcagaacgggcagcacgtnncgggccctgcctnnnnnnnnnnnnnnnnnnnnnnngagtggagtagacagtccaaggagtggacccaggcctccccttcctcctgacaggcccannnnnnnnnnncctcccccacctccaccatcaacatctattagaaatggcttccaagactctccatgtgaagatgagtgggaaagcagattctacttccatccaatttccgatttgccacctccagagccatatgtacaaacgaccaaaagttatcccagcaaattggcaagaaacgaaannnnnnnnnnnnccaaccgaagagaaaggggtgccccaccactccctcccatcccgnnnnnnnnnnnnnnnnnncttctctacccaagctcaagagctgcttctgttgctaagaactgcacaccctcctccccgcttcttcccttgtgccccatgtatgggcaggaggaaagatgggagggtgagtgggaatatgcgtgtgtgcgtgggaatcggtaagaaatgcacctagcttttcatattgtttattctccaggctannnnnnnnnnnnnnnnnnnnnngggtcgataggcttttgtggtaataggcagagatgaattgcatcccagctttccaccaaccaaatccaaacattcactgcttattgccacaga

SEQ ID NO: 16179 - DNA, 745 bp, Macaca Fascicularis
  misc_feature (1)...(745): n = A,T,C or G
aaaatnnnnnnnnnnnnnnnnnnnnnnnnngtcaaaattgtggatgtgatggatagcagccaacagnnnncantnnnaggacatgatgcccctgttttaagtctttcctttgatnnnannnnnnnnnnnnnnnnnnnnnntagttgtgatggatctgtcagagtgtggcaaaatttcagatcagacatgtgctattagttggccactgatacaaaaaagcaacgatgtgataaatgcaaaatcaatctgcannnnnnnnnnnnnnnnnnnaagtgggaagttactggcaattcctgtggaaaaatctgttaagctatatagaagagaaacttggagtcatcaatttgatctttcagataatttcatcccggcagaatggctcccgcaaagaagggtggcaagaagaaaaagggccgttctgccatcaacgagatggtgacccgagaatacaccatcaacattcacaagcgcatccatggagtggtcttcaagaagcgtgcccctcgggcactcaaagagattcggaaatttgccatgaaggagatgggaactccagatgtgcgcattgataccaggctcaacaaagctgtctgggccaaaggaataaggaatgtcccataccgaatccgtgtgcggctgtccagaaaacgtaatgaggatgaagattcaccaaataagctctatactttggttacctatgtacctgttaccactttcaaaaatctacagacagtcaatgtggatg

SEQ ID NO: 16180 - DNA, 1015 bp, Macaca Fascicularis
  misc_feature (1)...(1015): n = A,T,C or G
agttgatagcnnnnaaggcagatgctgtattgcctactttaacccatttttcaacctgtttgtttttaaaaggcttcactaagggttgatatgtaccattgtatggggcaattttaagtcagctaaggcaataaccttatgcatgaacatttcccagactttcatgaagctgttgaggtcctaagcaattgatgcagctgttgtgataaatagaaacatctcacctaagtctccttttcttcataacatagatactgacatgataggaagctctcagcttagggaaagataactaaattttagattatagaacatggattcaaaagtggctggaacaaattggctgacaccttactggtaacctgctgttctcctggtgttccttcaggattgttccactaaaatttatttttcaaaaaatttacttcacatgattctatgtaagtgatcacttgtcagtgttccaggtgtatcttagctaaaactagagaatgccctaacttagatggtttttgaagcctatacatttggtattgtttgacccttaagcttttacatctcttagcatggaggnnnnngannnnnnnnnattgttgcttgagagtctgtacatttagaccagatttgtatttgcactgtcaagtatggcaaatgagtgaaaaatgtttaatacactattggattttttatttctttttttgattcagcttataccagggctgaaaacctcaatttatgttcatgacagtggggatttttttaaatgtctacattctttctaataaactgttggaagacttcttggctgtccttttaagtgtctggcttactgtaannnnnnnnnnnnnnnnnnnnnnnnnaatggagttatttttatttgaggaagaatttgggattattcctctgtttgaaaaaaagaggcttgctgtaatgtcacaggaaaccttttaaaagtggatctgtaatagaatattgtagatgcactctgcagcagnnnnnaagaaagtgttgnnnt

SEQ ID NO: 16181 - DNA, 777 bp, Macaca Fascicularis
  misc_feature (1)...(777): n = A,T,C or G
gtnnnnnnnnnnnnnnnnnnnnnngggccacnnnnnnnnnnnncagagaggaaggtccgggcccccacgaagccatggacagaaccctccaccccgcaggccaggcgccgtgtgtgagtgtgggagggaaggaggccnnnnnnnnnnnnnnngagaccccggcgtgtccgttctttagcaatataacccacgnnnnnnnnnnnnnnnngacttggggaagaaggggcttgagctgggcgagtcctggcctgggcacccacagccatctccctttcgtggcccagggaggtgtttgctgtctgagggacctgggccggcccatgggaacctggggttctgtccagataggaccaggggttctcactttggccaccagttcctcggccagcacctctgccctcctgaacctgcagcctggaggggtgcgggggtaaccgccccactttcctccaggttagcannnnnnnnnnnnnnnnnnnnnnnnnnnnnnnnnnncccgcctcctccagagacttgcccaagggcccatcccggctggcctctgggcacttgtgctgggactctgggaccccggcagctgccaccttnnnnnnnnnnnnnnntctggggagtgcttgcgtgctannnnnnnnnnnnnnntctgggtgccgcnnnnnnnnnnnnnnnnnnngagcttccttccttccttcccggacaggtcgtcaggatggatgcactgactgaccgtctggggctcaggctggtgtgggatgcagccggccaatgagaaaataaagc

SEQ ID NO: 16182 - DNA, 742 bp, Macaca Fascicularis
  misc_feature (1)...(742): n = A,T,C or G
cagcttgaannnnntgctagcaggaacctcacgcctaccacatgcctcgagcacagggaaccttggcctcctctgcagaagtgggcatctcggagccagccnnnnnnnnnnnnnnngggctatcctcccacccccctacccactggaagggagtgttgtaagactaggttttggctaagaacttctcacctcagccctaaagatggagcctgtgggttctcagagagatatcacaacttgagtcccgaagaagaggccggttccccacccaccttcccccaaaccctaagcacctgcgccagtacaatcaagaagaggaaagtatgtgaagacccaggtctggctctgccacttgcctggccatgtcaccttgaagcagtgacctgactctatattgctnnnnnnnnnnnnnnnnnnnnnnnnnnnnnnnnnnnnnnnnaccttacaagacaaatgcaagggcatttcaccacagagaggacctttgtgctcactttggcccgggaggcagtgatgctcatggttgcatgactttatgagttgctgggccaggatgaggacctgggcctcctgactcctggcccagggttcttgtccatcagttcagactgcaattttatgtgaaagcattatgactgtcctagtcatgggagagtaaatgtagattgaatgctaggagtcctagagctggagagtgtgattttgaggtccccgtttgggaaacgtgtgccagaaatgtcta

SEQ ID NO: 16183 - DNA, 711 bp, Macaca Fascicularis
  misc_feature (1)...(711): n = A,T,C or G
gagcctgaccctggggctgctggactgtccgggagtcagcgccaccacagtgctgcccttccacaccagcaccgagatgttccagggcatgagagtcaggtttcccaacctctttcccccactgaagccggagacagtggcccggaggacagtggaagctgtgcagctcaaccaggccctcctcctcctcccatggacgatgcatgccctcgttatcttaaaaagcatactcccacagnttgcccttgaggagatccatcaaattctcaggaacctacacctgtatgaacactttcaaagggcggacatagagacaggacgaagacatgcctgaggagtcacggagttcgggggccgcagcacctgggcacacacccgagcgcctgtccgttgacacgcttttgctgggtgagcaggacagctcctgtcctcagcnnnnnnnnnnnnnnnnnntgggccagtcccaggacctttgcacaggactgatgggtgtaactgacccccacggggaggcaggaagccagcacagtagccaccttgacacttttgtacatttccagttccgtagagtttatcgttcaattgcttctcaagtctcaccagcctcagctgtgtgcatagaccatttccaggagggtctgtccccagatgctctgcctcccgttccaaaacccactcatcctcagcttgcgcaaactggtgaacggcaag

SEQ ID NO: 16184 - DNA, 728 bp, Macaca Fascicularis
acaagacccaactgctgtggtattccggggctacctgaggcagaccagatgcgctgaggagaaggcaaccaagacaggctgcctggaggaagaattgcccctgacaggtggccttgggcccaaattcaggggatgcctggatgacgaagcaggcttgcatccatcagccctggccaagggctatttgaaacaggatcccctagaaatgactctggcttcctcaggggccccagctgaacagtggaaccagcccactgaggaatggtcactcctggccttgagcagctgcagtgacctgggaacatctgactggagctttgcccatgaccttgcccctctaggctgtgtggcagccccagatggtctcctgggcagctttaactcagacctggtcaccctgcccctcatctctagcctgcactcgagtgactcgagctgagaggctgcttttggttttaaccatgcctgctcctctgcctggacccggaggagggacaaccaaggccgaagtaaggcacaaggcagtctgggcacttttctgcaagtccactggggacggccccagtcaggccctgcagggctggtcaggatgcctggggcaggaggaggtcaactcactgaactagtgcagagtgtcgggggcactgacccgttctgttgactggggccctgcagactctggcagagctgacaaaggcagggaccttctccctcctcggaactctttc

SEQ ID NO: 16185 - DNA, 691 bp, Macaca Fascicularis
  misc_feature (1)...(691): n = A,T,C or G
taattagtgtagtgattacaaaacagtcataaatnnnnnaaggccttttttctctttttttttttttttagaatagtattttttttttaagtcctttatgtaacatccagataatgtgatactgtctctttgaagcaccctgtaaaccttttagagatttgaagttgggtcttgactcttaatgcatgtggacagtcgcgagcgtttatgctgtcggtgtgtctgtgttggacaaaacaatctgtaatatacagcaaagtacattctacattccgttcatggggcacacccaggggaataagaataaaatgctattatgaataagttgtaaacctatgcacatcccttgcattttgggcaactttataaaaaaaaaaagaaactgatttttattaataataatcatgtagtgaaatgtgtttgtaattttgtctcaatttaatttgttgtaaggtgggggggaattgctggtttcaccatttcagatctgtgttgtctaagagtattaacgtcttaattaagcaaagaaatgaggatttttaatctgtatgtaattgttttaaagcacccattttaagagaaaatactgtgcaatgaagaaaccagtttaggcatttgctataaactgaaatattccaaaagaataatctataacagccctgtaaattcctttaaaatgataacaggacag

SEQ ID NO: 16186 - DNA, 705 bp, Macaca Fascicularis
  misc_feature (1)...(705): n = A,T,C or G
ctcttgacattgtggatgaggatgtgaagctgatgatgtccacactgcctaagtctctctccnnnccgacaactgccccttcaaactcctccagccttaccctgtcaggtatcaaagaagacaacagcctgctcaaccagggcttcttgcaggccaagccagagaaggcagcagtggcccagaagccccgaagccacttcctgacacctgcccctatgtccagtgcctggaagacggtggcctgcggggggaccagggaccagctcttcatgcaggagaaagcccggcagctcctgggccgcctgaagcccagtcacacatctcggaccctcatcttgtcctgaggtgctgggggtgtcacgagcccnnnnnnnnnnnnnnnngggttgaggggggcgtagggggtctgtgaatctgagagtcattcaggtgacctcctgcagggagccttctgccaccagcccctccccagactctcaggtggaggcaacagggccatgcactgccctgtcgccgagcccagctgcgggcggctcctggtgctaacaacaaagtcccactcccaggtctgcctggttccctccccaaggccacagggagcccagtcaacttctccgaagcccgggtcaggcctggcctcatctcagaccctgcttaggatgggggatgtggccaagggtgctcctgtgctcaccctctcctggt

SEQ ID NO: 16187 - DNA, 707 bp, Macaca Fascicularis
  misc_feature (1)...(707): n = A,T,C or G
cagcaccagtgtcgcnnnnnnnnnnnnnnnnnnnncttcccacttctnnnnnnnnnnnnnnntggggaggagcagataagctgggcagggcaggggtgggtggagcctgacactggagggcactgagctggaggcccccccaagggtagaggacaggatgttggctccagctcccctcacacatcatatcatgagcttcttggggctggccagtggcccagggctatattgaggatagatgcctcaaggctgcctgggagccccgcctccccaccatggtgccagggtctccctccgccacatgggaaaggagggagatgtgcgtgtcaaatattcatctagtcccctgggggagaggaagggtgggtctagacatactatattcagagaaatatactaccctcacagtggggccctcagacctgccacggggcagagcagatctggggcctgaggtggggagaaagagagaccaccttactggcaagaaggatcaggatggggtcttggggtcaggatgcctgggtctccccattcccctgttacagtctgacgtcatgtgccgtcttgtcctttttttttttttttttaaaagggatcagggctggggcggggaaacaagggaaggaccctggggaatggtctgctcctgggcctaggggcagtgcgtgggagcccctctcagctgtggggctggcacagagccc

SEQ ID NO: 16188 - DNA, 719 bp, Macaca Fascicularis
  misc_feature (1)...(719): n = A,T,C or G
gcagaaaggctgcnnncagctccaggtgctgcggctgctgaacctgatgtggctgcccaagnnnctgggacgaggggtggctcccggaccaggcttccctagcctggaggaactctgcctggcgagctcnnnnngcaactttgtaagcaacgaggtcatgggccgcctactccacggctctccnnnnnnnnncttactannnnnnnnnnnnnnnnnnnnnnnnnnnnnnnnnnnnnnnnnnnnnctgccgtgtcgggagctggagcannnnnnnnnnnnnnnnnnnnnnnnnnnnnnnnnnnnnnnnnnnnnnnnnnnnnnnnnnnnnnnnnnnnnnnnnnnnnnnnnnnnnnnnnnnnnagaactggacttgagtggccagggtttcagtgagaaggacctggagcaggccctggctgccttcttaagcacccctgggggctcacacccagccctgtgctctcttaacctcaggggcacccgggtcacacccagcacggtcagctctgtgatcagcagctgcccaggcctgctctacctcaacctggagtcctgccgctgccttccccggggtctgaagcgggcctaccggggcctggaggaagtccagtggtgtctggagcagctgctcaccagccccttgcccagctaggcagccacagacctgggacacctcagcccgcctgcccaccccctacctttgcccaattcagatattg

SEQ ID NO: 16189 - DNA, 766 bp, Macaca Fascicularis
  misc_feature (1)...(766): n = A,T,C or G
agtgccagcntnnnggccnnnctgtgagcatggtccagagttgcacaccaccccccgactttaatcagtgcctggagaatggccctgggggaaaattcttcaatcccttcagcaataatatggcctcccaacaaaacacagacaacctggccactgagcaagtgcgaggtcaggagcagactcctgggnnnnnnnnnnnnnnnnnnnnnnnnnnnnnnnnnnnnnnnnnnnnnnntggagtctcaccaggtcaccgccttccccatggctatcatagcgacaagcgacgtcttagtaaggccagcagcaaggccaggtcagatgacctatcagtgtgaccctcctttatgggaggaccaggaccagatgggaacaaaggaggctgagagaggaaagatctctctcttctgaactgatgnnnnnnnnnnnnnnnnnnnnnnnnnnnnnnnnnnnnnnnnnnnnnnnnnnnnnnnnnnnnnnaattctagaaactgtaatcagggctctgggatagtaagagacatgactatccacccagactgcagttccctccccaccctctacccagtatatgaannnnnnnnnnnnnnnnnnnnaacagggtagagggagggaagggaagcatggcaaaagctggcctggaagggatagccagagggatagaatgactctctctctacatatcagcaacataccagatgcatttctttaagtttctacctccttgacctgcttcaccctcaccccctccggcaatcaatacagt

SEQ ID NO: 16190 - DNA, 704 bp, Macaca Fascicularis
  misc_feature (1)...(704): n = A,T,C or G
cgccaacctctctccagcaaacacctncnngttctccccctccagctgccaccaactttcctgcacctccttcccgggccaggttgtccaggccagacagcggcatcctgggtgaggactccaccagtctggtgctggaggattttgaggannnnnnnnnnnnnnnnnnnnttatggattataggagtgatggggagtacatgaggtgaagggagaactaacatgggcacagccaccggctcaggatcctatcttctagnnnnnnnnnnnnnnnnnnnnnnnnnnnnnnnnnnnnnnnncaggcccctttggctccaacccacacgcctgaactttaaggatcattggactgtctnnnnnnnnnnnnnnnnnnnnnnnnnctgtgttcacagaatggccactgataggcacgcctctttccccacccactggaaggctcacaggcaaggtgagagaggacacagaaggtgccaacactgtcgctgtagtaaggaccttgagtgaatttgagaaattcaccctcgcaagccttccttnnnnnnnnnnnnnnngaagtgcagagnnnnnnnnnnnnnnnnnnnnnnnnnnnnnnnncttgggnnagttgcnnnnnnnnnnnnnnnctcatcggtaaacagtgggggtaatgaaacccacctcacagggttgttgtgaggatccgtntgagttgatttaggtaagca

SEQ ID NO: 16191 - DNA, 969 bp, Macaca Fascicularis
  misc_feature (1)...(969): n = A,T,C or G
taccaagnnnncattctctgtcaatatgacaagctcnnnatgacaggatatgttataggttgaggcacacatatttgcagtttactgaaaactagatttcttatgtgacttttttcccttcccagcaaagagcnnnatgctgtatttctaccatcactaatatttggaagtgtttcattactaacaatctcagtacaacatgaaaattgttgcttcacatctgaattacaattttgtctatcagaataaacacaagtgaaattttcacctacattaacattatgtctttgcagctttaggtttgtttgatgtgttcttaagcagaattgttagccacaaacccattgttagctatctatggatatagagctatatctatagatagaggtatacacacacatatatactcacacatatagcataaaatactcagcagggctagttattccaatttcttgcacaattatttagctttttgtaagttcaacatgtaaattttaaagacataaatatagagagacttatgtgtttgaatataaatgatatatatggattagcatgtacctgtatattattaaacatgcaatgaactgactggtaagtgacgtctaattgtatggctagcaatgtaatttattcagactgtatttttgtacagagcagcgcactctaacctatgcctctgtgtcctctttaatgcctaaaactgtgcctagaaatttcatctgtcttaaaaaataaaatatacttcannnnnnnnnnnnnnnnnnnnnnnnnnnnnnnnnnnnatatttattatttttaaatatatgacatgtttactacttaaacatgaattcatggtatcctggttacttttttttaagtcatctgggggaaaacctgtttatcactccagtgattttgagtttgcagtttcacaatcagttcttcatttcatgatttttgtagttgacatgaagttatcta

SEQ ID NO: 16192 - DNA, 717 bp, Macaca Fascicularis
  misc_feature (1)...(717): n = A,T,C or G
tttattaatgtgtttattatgatagtagggtttcagaaaaacaaaaagaaatagagagagtaaaagagaagcaacagaaagaactcaataaacannnnnnnnnnnnnnnnnnnnnnnnnnctaatgtctagatctttgtgtgttgtttgtgaagacttaattcagcactatgactttcagatttgaatttccaaannnnnnnnnntttctgcttgttcagccacttcataaacagatgattcataccatagcagaaaagnnnnnnnnntcttttttgatacgatgtttacattatagttatgttgacatgtaatatgactgtttcaaaaatataccagaactttaatatttcagaggaggttgtctctgtcaaagnnnnnnngaggnnnnnnnnnnnnnnnnnnnnnnnnnnnnnnnnnnnnnnnnttctatggggggaaataaatatatatatgttatatgaaatatataatgaaatatgtatttttnnnnnnnnnnnnnnnnnnnnnnnnnnnnnnnnnnnnnnnnataattttaaaagacaaattttggagcaaaacttgaagaatgcattaaatgatccatgagattgtaagaacgtgttatgggttgcagattgactgtaggaatagtaaagaggagacagctgggatacttagatcagatcagtaagcattggctgtgggctatctttctggacaaagagggaagtggcaa

SEQ ID NO: 16193 - DNA, 184 bp, Macaca Fascicularis
agttaacagttagggagtattgaggggcccagccctatgatgggcacacagccgtgatcacagcagaacggggtggctgccccaatggagcttacattccaatgggtctaatgaccatatcctaggacacagatgtgcccgggaaggttagggcacaggaagtatgaggactttggtgtcctga

SEQ ID NO: 16194 - DNA, 719 bp, Macaca Fascicularis
  misc_feature (1)...(719): n = A,T,C or G
taaaaattttcccatactgaataagaagtttaannnnnnnnnnnnnnnnnnnnngcttaacacgtcgttggtttgaaaacttccatttttaaaaatttacggtttagttactagaaaaaatagtggactagaaagttatatttatatccaaatatacctatttcaaagtgtattcgtgaggcctgttttagcctgtgtcttttgtattgtgtgttgctgaagaattctacttttagtgggctcatcnnnnnnnnnnnnnnnnnnnnnnnnnnnnnnnnnnnnnnnnnnnnnnnnnnnnnnnncagtgaaaaatggaaaacatcggagcttctgttgagataatcttcattaggtatatatcttnnnnnnnnnnnnnnnnnnnnatcttatagcaggaaaaaatcttttgaggggaatagaaggactgtgttacacaaaataaannnnnnnnnnnnnnnaggccttccttttagtggtagggcataatgctggggaatatgtgaagatgtttgtatgaagtctctttccgatcatgaccagtagcttgtgctgtactctgtagttannnnnnnnnnnnnnnnatgacccttttcaattgcttatttctgtgttactgagcacgacgtaattagggacgtaattttatagcatannnnnnnnnnnnnnnnnnnnnnnnnnnnnnnnnnnnnnnaagtgaccttcaaattgtgataatgcct

SEQ ID NO: 16195 - DNA, 710 bp, Macaca Fascicularis
  misc_feature (1)...(710): n = A,T,C or G
actgaggatgatggattggtgcggaacattgatgggaataggtgatcaggaagttattaaagctgaaaatggagagcatcaagatagtaccctcaaagaggatgttccagaacagggaaaggatgannnnnnngaggttaaagcagagcagaacagtgaaccatgtgctagctctagttnnnnnnnnnnnnnnnnnnnnnnnnnnaagaatgaaagcctcaacgcagaatcnnnnnnnnnnnnnnnacttcaggagcttaaggctaagcagtttataaagaaggacactgccacctattggcccctgaactggcggagcaagnnnnnnnnnnnnnnnnnnnnnnnnnnnatgtatggagatctggatgtcttgttcnnnnnnnnnnnnnacgacacagttctggcttatgaaaacaaaggcaagattgcccaggccactgacaggagcgatcccctaatggatacccttagcagcatgaatagagtccagcaagtggaactcatttgtgaatacaatgatttgaagactgaacttaaagactatctcaagagatttgctgatgaaggcacggttgttaagagagaggacattnnnnnnnnnnntgaagagtttcagtcaaaaaagagaagaagagtggacgggatgcagtattactgcagctagagtggagtatgaagnnnnnnnnnnnnnnnnnnnnnnnnnnnnntcc

SEQ ID NO: 16196 - DNA, 736 bp, Macaca Fascicularis
  misc_feature (1)...(736): n = A,T,C or G
atcccagcacnnnnnnggcagaggtgggcggatcanntgaggtcnnnagtttgnnnnnnnnnnnnnnnnnnnnnnnnnnnnnnnnnnnnactnnnnnnnnnnnnnnnnnnnnnnnnnnnnnnnnnnnnnnnnnnnnnnnnnnnnnnnnnnnnnnnnnnnnnnnnnnnnnnnnnnnnnnnnngagaggcagaggttgcgnnnagccgagatgcacccattgcactctagcctgggcaacaagagcaaaactgtctcaaaaaaaaagaaaagaaaaagggcttcctggacagagcatgctcatttgctagcgaacagttccagaaacagaccctattggtccttctgcttacctgctggatttttcaggcactaaatttataactttttgaaacaaaacaatgtgtaattttccatttgggggcaaactctattcttgtgagcattattaaatcttgtttgtaaatatattgtcttttaatatttgctctgggtcaggaagaaactgttcacggtgtgataataccctttagattgtgctttcattattatagatgcatcgtgtcttctgctttcacgtatctgggatggggtcagacatgcatcctccattgattagagtgggtccaactgacagaaaaatctaggatgagatcagaagaatactggtgttttctgacttttacaaaattacttgtttgttttcatttaaaaaaaagcataaactatgtttcttatt

SEQ ID NO: 16197 - DNA, 727 bp, Macaca Fascicularis
  misc_feature (1)...(727): n = A,T,C or G
ataatgaaaccactaggactttatacattttccttaatttgttgacatataaatggtaaattacatttaggcttatcctgttttgaaatgatggtagtcatctttctcactgctnnnnnnnnnnnnnnnnnnnnnnnnnnnnnnnnnnnnccaaaataactaggatctgcatttagaaccagaatcattatttccctgaccttttcagtcctacagagaagcatctgtggttcttttgtacttgccatagatgtaacctaaaaagttttggcgtatttaggtcagcctagcggaacttttttttcatttaaatggagctgaataatggatattttgtgtctgcaaaattcctgagatcattgaaaaagtaacaaggtattccttgtttctgatacataaaattattttaagcattttatcaatcattaaaatttactgccagttgtgagtggctttttaattaacttgactttcattgcacttcactctgcctgttttcaaggggagtaagattggtaacatttggggagactgtatctgtctacttagtgtggctgttttgagggactgtcccatcagtgaacaaactgcatggccttggagagagactctgggctcttggctcagatgtgttcattaaatactcctttaagagctgttgtgggtgtaagtgacatgatgtggccaaaaatccaaactgtgcagttgcgttgtgacaaaaatgnaa

SEQ ID NO: 16198 - DNA, 724 bp, Macaca Fascicularis
  misc_feature (1)...(724): n = A,T,C or G
agatgctcagtgttcgggatcgccgggaccggccccctgaggagggggtagttgcagagctccagggcttcgcggtggnnnnnnnnnnnnnnncctcccacaaaggcnnnnnnnnnnnnnnnnnnnnnnnnnnnnnnnnnnnnnnnnnnnnnnnnnnnnnnnnctccatctctgcctacatggccgcggcgctgctggagttcttcatcacacttgccttcctcttcctctatgccacccagtactaccagcacttnnnnnnnnnnnactggccctgtctggacttcctgcgctgtgtcagtgccatcatcatcttcctggtggtctcctttgcagctgtgacctcnnnnnnnnnnnnnnnnnntgctgcttttgtttttnnnnnnnnnnnnnnnnnnnnnnnnnnnnnnnnnnnattcaagatctaccggactgagatggcacccggggccatccagggggaccagcagtgactctggggctacctggcttctaggcctagccagccagaggggacagtggagcccagacacgtctccttgggattcactaacccccagcccgccaaaccccaccccagccttacggagatgtccagcctgagacgtcactggggacttatctgtggagcctggtgctctgggatnnnnnnnnnnnnnnnnnnnnnnnnnnnnnnnnggaacttatggggggagggagggtggtggggaggaatctgggcccc

SEQ ID NO: 16199 - DNA, 749 bp, Macaca Fascicularis
  misc_feature (1)...(749): n = A,T,C or G
ctcaggcaccggcaacatgaagttcatgctcaacggggctctgaccattggcaccatggacggggccaatgtggagatggcagaagaggctggagaggaaaacttcttcatctttggcatgcgggtggnnggatgtgntaagcttgaccaaagagggtacaatgcccagnnnnnnnnnnnnnnnnttcctgagcttcggcaggtcattgagcagctgagcagtggcttcttctcccccaannnnnnnnnnnnnnncaaggacattgtcaatatgcttatgcaccatgaccggtttaaagtcttcgcagattatgaagactacattaaatgccaggagaannnnnnnnnnnngtacaagaacccaagagagtggacgcggatggtgatccggaacatagccacctctggcannnnnnnnnnnnnnnnnnnnnnnnnnnnnnnngcccgggagatctggggtgtggagccnnnnnnnnnnnnnnnnnnnnncccggatgaggccatctgagcctccagtccagaccccaaaccagcccttgagcctgtcagnnnnnnnnnnnnnnnnnnnnnngcgtcatgcagagggtggggtactaaagttagatctctaagccccctcctggaagtctcattttccccactctcaatgtcccagtgtccagcgtgactaaggacacgggcccccttccatcctcgggctcccggtcccctcctatttatggggtctgaccaactgcacccactcccca

SEQ ID NO: 16200 - DNA, 767 bp, Macaca Fascicularis
  misc_feature (1)...(767): n = A,T,C or G
gatacccgttagacaaggacattttactnnntccagacaccagaagaaatnnnnnnnnnnnnnnnnnnngagacacagannnnnnnnnnnnnnnnnnnntcttcctgtcnnnnnnnnnnnnnnnnnnnnnnnnnnnnnnnngactttagctcacaaatggaatnnnnnnnnnnnnnnnnnnnnnnnnnnnnnnnnnnnnnnnnnnnnnnnngtgctcttttagggtttaaannnnnnnnnnnnnagaaagcaacactgtttttatgtagttcatatatattaccatgacatttaacattaatattgtgtatgttgaaggaggtatgataaactcagtcatatatagtgaacaattcaaatgggaaaatattctaaaacatgttatttgagatttgtcatattcatctttggtttactaagtttacttagaaatatttgaaaggcaaaattgtgtgaaatcaccttatcaaattaaaatgggaggaaagtannnnnnnnnnnnnnnnnnnnnnnnnnnnnnnnnncaccacataaaatctgggcccaaacagccnnngttaactgcatnnnnnaggaacnnnnnnnnnnnnnnnnnnnncacacctgggtaatttaagccaggatattaggaccacttgttgtacatttgaataattatggaagttgggacaaatatgttnnnnnnnnnnnnnnnnnnnnnnnnnnnttaatctatcccttttgnnnnnnnnnnnnnnntctcttactaaggtttcatctgttcacat

SEQ ID NO: 16201 - DNA, 755 bp, Macaca Fascicularis
  misc_feature (1)...(755): n = A,T,C or G
atgccaagtgccagaactccaagctggaggctgcggtggcccagtctgagcagcagggtgaggcagccctcagcgacgcccgctgcaagctggccgagctggagggtgccctgcagaaggccaagcaggannnnnnnnnnnnnnnnnnnnnnnnnnnnnnnntgatgaattccaagctgggcctggacatcgagatcgccacctataggcgcctgctggagggcgaggagcagaggctgtgtgaaggtgtnnnnnnnnnnnnnnnnnnnnnnnnnnnctcccggggtggggttgtgtgcggggacctctgtgtgtccggctcccggccggnnnnnnnnnnnnnnnnnnncgccccctgcaacgggnnnnnnnnnnnnnnnnnnnnnnnnnnnnnnnnnnnnnnnnnnnnnnnnnnnnnnnnnnnnnnnngctcatgcagccaggggaggtgttaagtggcccaaaagagaaccaggggnnnnnnnnnnnnnnnnnnnnnnnnnnnnnncccaaccctcaannnnnnnnnnnnnnnnnnnnnnnnnntttccccttgtgttctgagaatacaccatcagctcattcccaccnnnnnnncctccctacctctcatcccactggaaaggggcctgcggctggggaatagacccattccttcccctgtctcagccttctgcccctcccggggagaagggccttccttcctggaaggnnnnnnnnnnnnnngttccccctgcctctctggcctctgtctc

SEQ ID NO: 16202 - DNA, 812 bp, Macaca Fascicularis
  misc_feature (1)...(812): n = A,T,C or G
agagaaaccttataattgtgagaaatgtnnnaaggccttcatgcacaatttccagcttcagaaacatcagagaattcatactggggagaagccattcaaatgtgaaatatgtagtaagagcttctgtcttaggtcaagtcttaataggcattgcatggtccacacagcaaagaaaccaaacaaaactgaaaaatatggaaaaggcttcatcgataggctggatttgcataagcatcagatgattcatataggacagaaaccatataattgtaaagaatgtgggaagagcttcaaacggtcctcatatcttttgatccatcagcgagtccacactggagaaaagccatacaaatgtgacaagtgtgggaagagctacattactaaatcaggtcttgacttccaccatagaacccacacaggagagagaccttataactgtgataactgtgggaagagctttagacattcctcaagtattttgaatcataagaaactccactgccagaagaaaaccatccaaatgtgaagactgtggaaagaagcttgtacaccggtcataccgtaaagaccaacaaagagaccacagtggagaaaatccatccaaatgtgaggactgtgggaagcgctacaagaggcgcttgaatcttgatataattttatcattatttttaaatgacacataagtgttatacatatttaaggaggaaaatttgatatttaaatatacgtatatgatgtatactgatannnnnnnnntaattagcatatttatcacctcaaacaatgatctcttctttggttaggaaaataaa

SEQ ID NO: 16203 - DNA, 1333 bp, Macaca Fascicularis
  misc_feature (1)...(1333): n = A,T,C or G
ggggagagtannnnngcgtcttcctccccgagcccacgggcagggccnnnnnnnnnnnnnnnnnnnnnnnnnnnnnngcccccagagtgaaggctgtgannnnnnnnnaacacgtcagcgagggggagacggccgtgctggcctgcaagtcagagtccctgcccccnnnnnnnnnnnnnnnctggtacaagataactgactctggggaccaggtcatcgtgaacggctcccagggcaggttcttcnnnnnnnnnnnnnngggccggtcggagctacgcatcgagaacctgaacatggaggccgaccccggcaagtannnnnnnnnnnnnnnnnnnnnnnnnnnnnnnnnnnnnnnnnnnnnnnnnnnnnnngtgcgcagccacctggccgccctttggcccttcctgggcannnnnnnnnnnnnnnnnnnnnnnnnnnnnnnnnnnnnnnnnctatgagaagcgccggaagcccgaggacgtcctggatgatgaggacgcgggctctgctcccctgaagagcaccgggcagcacctgaacgacaaaggcaagaaagtccgacagaggaactcctcctagccaggtggcccgaggacgctccccgcccccgcgtctgcgtcgccgctggagtccactcccagtgcttgcaagattccaagttctcgcctcttaaagaaaacccaccccatagattcccatcatacgctttcgtctttttaaaaaaagtagggttttctttctgcattcaggattctgttccttaggttttttcctttgtgagtatttctcgagagcccgggagctgcggcgccgcggcccgcctgtggctttccacctctgggtctgagtcacggcgggtggccggcgcagcctcctnnnnnnnnnnnngaaggtcacaggtcacacgaggggcccgcgtcctgcctgtctgaagccaatgctgtctggttgcgccatttttgcgcttttatgtttaattttatgaaggccacaggtctgtgtttgactcagcctcagggacgactccgacctcttggccacagaggactcacctgcccacactgagggcaaccccgtcacggcctcaaggcacccccaagccccttccttgcctgtgcatccgggggcagctctttagagggtttgctggggaactggcgccgtcgctgggactccagaaccgtggacgcccctccccagctcgcccctcgaggacggcccactctccacagcaccaggactcaggggagccccttcccacccaccgccacaataaagaccgcccccacccccaaaaaaaaaaaaaaaaaaaaaaaaagggcggccgctcgcg

SEQ ID NO: 16204 - DNA, 767 bp, Macaca Fascicularis
  misc_feature (1)...(767): n = A,T,C or G
tgtcatgggggcctggaccgccatgggaggctccacactgtttgtggagacatccctgagacggccacaggacaaggacgccaagggtgacaaggacggcannnnnnnnnnnacaggccagctgggggaggtgatgaaggagagcgcccgcatagcctacaccttcgccagggccttcctcatgcagcacgcccccgccaacaactacctggtgacctcacacatccacctgcatgtgcccgagggcgccacccccaaggatggcccgagcnnnnnnnnnnnnnnngtcacggcgctgctgtccctggccatgggcaggcccgtccgnnnnnnnnnnnnnnnnnnnnnnnnnnnnnnnnnnnnnnnnnnnnnnnnnnnnnnnnnnnnnnnnnnggagaagaccattgcggccaagcgcgcaggggtgacgtgcattgtcctgccagccgagaacaagaaggacttctacgaccnnnnnnnnnnnnnnaccgagggcctggaggtgcacttcgtggagcactnnnnnnnnnnnnnnnacatcgccttcccggacgagcaggcnnnnnnnnnnnnnnnnnnnnnggagcggtgacggctccccctggactgtaggaagcggatgtcaggccctgtctgggctggaactgagcgctgcggggattgcacccgggcctggcagcggagccaccgagcgagnnnnnnnnnnnngtgacccagatcccagggacctcaatcggcttnnnnngtgtctggnnnnnnnactatta

SEQ ID NO: 16205 - DNA, 724 bp, Macaca Fascicularis
  misc_feature (1)...(724): n = A,T,C or G
tacaggcatgagccaccatgctcngnnngntnntttgatttatagagaggtggggtgtcgccatgttgcccaggctagtctcaaattnctgagctaaagcgatctgcccacctcggcctcccaaagtgctaggattacagatgtgagccactgtgcctggcctatttgtttgtttgtttaaaacatttctccatcactcattccaggtcccagagcaaactctctctgctctcagagcctgtgacactggatatgtgttccacagtttcagtcccaggtcatactctccaacatttttcagagctccatatatatgtagatgccatcctttctaaaaacttctcacgacctcctggaatattcctattgatctcattttatttagcattagctcaagaaactaagtcttagtgcacattatcacaacaaagaaaaagctttgtatttataactggtaaaaacaagaaaagattatcatcaaaatataaatgaaaatataaaattaatcatttctctccgaagagtatgcccgggagcctccagttgttaaaagaggatactattactacttcttatcaaaaatttgtaatgccttgtgatttttatacttcaatacaaagtgttaatatgtatcatcagtataataaccaacaaaatgccactttaannnnnnnnnnnnngtaaatttttttgtaacaatgtaagaaagaaatggggagtaagt

SEQ ID NO: 16206 - DNA, 577 bp, Macaca Fascicularis
  misc_feature (1)...(577): n = A,T,C or G
aggactgtggctattcctgaaccttctttgaggcagaatccctcagaatctcacacnnnannnnnnctaccttttactcgaatgctttaccatattcatgccagnnnnnnnncagagactctcacaaagttcagaaaacagctgggctcaacactaaaataaaatgagaggacctattttctctggtagtggttgattactacattattttcttaagtggctggtttttgagttactatgtaaaaatggctttttttttctgttaatgatgctaatgtgttgtaaacaagattataaatttaaaaaggaaaacaaacttgttctttgcagcttatcaccttgtgaatgttggtaacttacttttccataatattgcaaataacataaaatgttaaaataattccaagatgagtcttctagaatgagcagaaatggtgaaaggagtattgataactagtcatatgagatgggcccctcttgtttatcttctgagtgagtcagattgacatgtggtcagttttggaaatgtgatgaaaacaaagactagatgggtatgtgtgtttatgtgttgggtggg

SEQ ID NO: 16207 - DNA, 642 bp, Macaca Fascicularis
  misc_feature (1)...(642): n = A,T,C or G
ccagtgtgacccatgggaaagggcacggcctgtcctnnngacacgggccgtgctcagccacagaactgcccagcgcctcccctgctgccgtccacggtcagttccnnnnnnnnnnnnnggcatgcggcagccagcggcagctcagcgcagggcattgtgtccagcggagcccagtccactttggggggactccggcagggaccacggacccctgctcacccactggccccgaggggggtgtagacaccaagacnnnnnnnnntgtgacatctggagtcctggagccgggtgtcccagcagcaccactaggtgcctgctgcctccacagtggggttcacacccagagcttctcggtcccctacatgtagcccgccccggctacatgccagacctgcctcacccaccagcacagccggagctggcgannnnnnnnnnnnnnnnnnnnnnnnnnnnttgtcccacgacggctcaccctcccctccatctgggttgtcactcagaattgcctacctgtgcctgcgtgtaaaccagagcctcagaccagctatggggagggggacaatgtggaggaaatccagcttccccggtctggggtgaggagtgccgggagcttgggcatcctcctccagcccccaggtagtg

SEQ ID NO: 16208 - DNA, 691 bp, Macaca Fascicularis
  misc_feature (1)...(691): n = A,T,C or G
ggtagagactgnnnnngaggtggccagannccgaagcaagcagcctctgtggagcgaggggagcaggtgggnnngannngagcgcagcctctgcacaaccagctttcccccacacccatctccagccagggcacccacaggccctgctcccacttaccgcacccgcccttcccaggatgaagcctgctgggagcgtgaatgacatggccctggatgccttcgacttggaccggatgaagcaggagatcctagaggaggtggtcagagagctccacaaggtgaaggaagagannnnnnnnnnnnnnnggcaggagctgagcgggatcagcaccacgtaaggggcctgcctcgcagcgctgagatgtcgagcccatccggcgacagaggacagccaggagcccagccagccccagactccagtgcaccggagcacgcacaggagcctgggcgcgccgccgtgnnnnnnnnnnnnnnnnnnnnnnnnnnnnnnnngaggaaaccaagtgcaactcctgggttttttagattctacctgacacagaacaccaggttttctcccaggtgatgctgttaacgcctcagctggcagtgaccgccggcccggcgtggcgccactgcacaccgcagagctgtccaggcgcagctctgtccccagcgctcatggtgttgaaactgtctgtcatgcaccacg

SEQ ID NO: 16209 - DNA, 752 bp, Macaca Fascicularis
  misc_feature (1)...(752): n = A,T,C or G
ccagtccccnnnnctnnnnctatcacttttcataaaaaaacacaggaaatatttgacatatcttccatttcaaattcttccattttatacatatatcttgcccttcctataagctctcctcaaagctcaggaaacctggtccgctctcctgcatttaggaaaggagaacctcggccaagacctttgctcactgcctgagaccccttccnnnnnnnnnnnnnnntttgctggtcagacatggagcctgcacttggtcccagatgatactgctttatttcagtttttacagtttccttcttaagattcccatcttataaatggagtacaggaannnnnnnnnnnnnnnnnnnnnnnncatgtgtaaggctttgtggcttcnnnnnnnnnnnnnnnnnnnnnnnnnnnnnncttcgttgattttagaaaaattccatcttccatcccctacatggtagttaataccgttatatatggtaaaaccttagagatgacattaatctgctaggaacagaagcaagaaaaaccatggcataaacaaccccagagtttttgttcgttcgtttcatctttcttgataaagcccgaaggtagcccattcagggcttgtgtggttggttgctccatcatgtcatcaataacccatatgttttctttttgatcttccttagtgtaacaccagactacctttctgatagctggtgttcatgaaatattttacgttcaaatgattgtaccttattttggctttagag

SEQ ID NO: 16210 - DNA, 684 bp, Macaca Fascicularis
cagctgtgagctgcggacaccgcctgacaatgggacctgctcttaatatcaaacctgagaccatcttgctttgttactgggcatggagagaacccatttctccagacttttagctacccatgcctgagaaagcatacttgacaactgtggactccagttttgttgagaattgttttctttttcattactaaggctaatgagacataacgcatgtatgtctcgattagactccatgtagttacttcctgtaaacttatcagctggccctttatatgggtcttcactctgattagaatttagtctctgtgtcagcacagtgtaatccctattgctattgtcccttaccattctccccctccccccacttttttttttttttttttaaattttaaccagaaaataaagatagttaaatcctaagatagggattaagtcatggtttagatgaggaacaatcaatatatcagattctgtcctcttccctgcatacagtgaatttatagttaaggatccctttgctgtgagggtagaaaacctcaccagctgcaccagtgaggaagaagactgcgtggactcatggggagcctcacagcagccatgcagcaggctctgggtggggctgccgttaaggcatgttctctccttattggtgctgataagaacagggaaccagtacagtgtgca

SEQ ID NO: 16211 - DNA, 780 bp, Macaca Fascicularis
  misc_feature (1)...(780): n = A,T,C or G
atacagagcccccacnnncatgagttctctggatnnnncnnnnnnnnnnnnnnnnnaaaacctgtgcttgtgtgtgtgtggcggcggggagggaggatcctgtctcccacctccttctcctcccctgtactccccagtgccttccttgttctggtggagctggggtttcgctcctacccagtcccacaacactgccaannnnnnntgtatgtgccattgggtggggcagtcccgagcctcctgggggagcagggcaaaaacaggtgccctcatcgtggtctgtgtcatgtcctgtctttatgatggttgaggagaaaggcggnnnnnnnnnctcagtcttgcagatacgtgtnnnnnnnnnnnnnnngagctctgcaaggctgtgctgtctgtttcttgttctgggnnnnnnnnnnnnnnnnnnnnnnnnnnnnnnnnnacttaggggaggccccactgccttctcaaagcagagcgnnnnnnnntcaaactcagcccacaactttgtttacatgggtggggagatggaacaggggaatacagagtgggatggtcaggacctgggccactgtgaccaaaatggggacttcctgggtagggaggtcactccctctactcactgagctagaattagggaggattatcaccccaaccgttgcaatgggaggtggagggacaggctcagcatcctcattgtctacatgaggcccaaatgtgtgaagtgcgatttctgcttttgtgtaccccaccaccccattaccacagctgcctttgtgtttg

SEQ ID NO: 16212 - DNA, 902 bp, Macaca Fascicularis
  misc_feature (1)...(902): n = A,T,C or G
gcgaggcggggagcacaagnncggccccgccccagctattggtcccggaccccgcnnncttgggctggggccgggggcgggactgggaggggaactccgcccctcgcgggagaccgtaactcttggagcacaggggagacccatgtcggtccggcggaagctggacggcgcgcctgnnnnnnnggnnnnnnnnnnnctgcctagggagtctggggggggaccagcaatggtgctgcacggcgaggtggtgtccccctttgtcctctgcccagggcagggaaagtgcttagtatttacgcgatgcttggggacattggagcctgagcttgacctcagatgggtggcgatttgatgggtccccccaggctggggaaaatgacagcgcttctcctaatcagctcactggtttccatcaccctgagtggtaaaccagatgggcgtcaccnnnnnnnnnnnnnnnnnnacacatcccgtttgctgcagagccggacccannnnnnnnnnnnnnnnnnnnnngtagagagttctcttccttnnnnnnnnnnnnnnnggcgagggcggcttcctcgtggcagcccccgcggagaaatcttgagagaagtggcatgagaaattaggttcatcacaaatacacacacactgccccccaaccctctgctgttgcctctctcagaaaaacaagacgtactgaatgaaacattttnnnnnnnnnnnnnnntgtgcctcctgcatgggtgggagtgaggggaacaagacccccagcctctgcaaatgctacccccatgctcctgggagacctggcaatgcactccggggctcagggcccaccaggcagcctcttaccctagagctctccccactctgaggttcagaaggaccccaacccacaccgtaggtgtccc

SEQ ID NO: 16213 - DNA, 370 bp, Macaca Fascicularis
  misc_feature (1)...(370): n = A,T,C or G
nnnnnnnnnnnnnnnnnnnnnnnnnnnnnnnnnnnnnnnnnnnnnnnnnnnnnnnnnnnnnnnnnnnnnnnnnnnnnnnnnnnnnnnnnnnnnnnnnnnnnnnnncaacaacaacaacaaaaaattagtacaactgttactatttaaaaaaaaaataccctaagtactctgtttacttctggtgaaacaaaaccagtcattagcaatggtctgtgcttttattttcccagactggagtggcttttctgaaatacacacacacacacacacacgtacacacatccctcacttctcctaagccaagaagtttgctttccctagctgcagtgtagatggctcttgtttttgtttttatgttttaatcatttgg

SEQ ID NO: 16214 - DNA, 709 bp, Macaca Fascicularis
  misc_feature (1)...(709): n = A,T,C or G
tcagagtccgaccaagaaacctctccatcccagtnnnnnnnnnnnnnnnnnnnnnnnnnnnnncgaggggaccccgaaccctctcctctcacagagcccctaattcttcatctcgccccttcccacaaggcagctgaagattctagaacccaggaaaaccccgcttcctggctgtccactgcacccactgagcccagccctccagaaagcccccaaattctggcccccacaaagcccaactttgatatagcctggacgtcccagccccttgatccttcctcagaccccagttctctggaggaccccagagcccagtctcccaaggccctgctagcagagcacgctcacctccagccactcaaggaaccaggagccccgaattcccctgctacacccaccagcaactggcaaaagctccagcccagcagccggcccagagtcgctgatcttaagaagtgctttgagggttaagaatcaggggtccggccgggcgcggtggctcacacctgtaatcccagcactttgggaggccgaggcgggcagatcacaaggtcaagagatcgagaccacnnnnnnnnnnnnnnnnnnnnnnnnnnnnnnnnnnnnnnnnnnnnnnnnnnnnnnnnnnnnnnnnnnnnnnnnnnnnnnnnnnnnnnnnnnnnnnnnnnnnnnnnnnnnnnnnnnnnnnnnnnnnnnnnnnnnnnnnncg

SEQ ID NO: 16215 - DNA, 721 bp, Macaca Fascicularis
  misc_feature (1)...(721): n = A,T,C or G
gagcaggtgcnnnnnnnagtggcccagtttcagaagaannnnnnnnnnnnnnnnnnnnnctttcctaaagcacagggccccagctaagaaaatgatcgttnnnaggaggggccgggagttttatatctgaaggagttttccaagcaaagccaaagttcactgtgttcttggcccacagccaggccacgctgtgaggccaggcctcagcttcccttgccttgggcgagacgcgcccagtgcaagacggttgtgggtgcggnnnnnnnnnnnnnngtgggttgctgtgctgtctccagaagatttctcgttgcccttgacctggctccctgcccggggctggtgctgtggtacttacatcttnnnnnnnnnnnnnnncctctgccattatcgtcccagggggatccggcatcctcctaaggaccagggcgagtggcccagataagagtaggtgttcctnnnnnnnnnnnnnnnnnnnnnnnnnnnnnnnnnnnnnnnnnntttctcaccatgcaatgcaaagggataaaggactgtgctacacttcccagttaaattctgaagctcataaatgtatgcaaaggtttgtgactttgcacaacgtgtgtgtagtaagttannnnnnnnnnnnnaaaaatgctgctgcttgaggcataagttgaatgataggctttaaagatcagggattcaggttcataatgaacttcantagtatagaacatgt

SEQ ID NO: 16216 - DNA, 761 bp, Macaca Fascicularis
  misc_feature (1)...(761): n = A,T,C or G
tccagcaacnnnnntgatanncnggtagtcaagacagagattaagtaaaacaggttttactgtttagctgagttcagttaatacaaaatgtacataaaacgttagtccnnngagactgacatgattaatgatcagtgtggtgggaaatgatgtagttattgtacacaagcacttgcaaactctctatccctattcctttaaaacaaaataaggtgaaatatgaagtccctggtctgatataaagcccctattggattcttcggatgcgtaaaagaaatggcctgtttcagccagaagactggtgaaaactcatacatcagacttatgttgtgagccaggttgattttttattttattatatgcaggtgagtgttgaaactgttaaaattccaatttgttttcattcagtattagtttagttctaaatatagcaaaccccatccaggtgctatcagacgaccagttactgcttagttaactaggtgtaaagttttacatatacattaatgtcaatagtttattacaagttgtgtaaaatggagtctagtttaataatgggggaaaaaagattaggttgcnnnnnnnnnnnnnnntagagcatgtaaaatgattttactggattctgttcaactgtaatcaatgaaaaagatgtacgttgtagacaaagttgcagaattaaaaaagaaatctgcttttaatttattctttttgtattaagaatttgtatagtacctttacattttgcaaannnagtgtgtcaa

SEQ ID NO: 16217 - DNA, 726 bp, Macaca Fascicularis
  misc_feature (1)...(726): n = A,T,C or G
agaagatcactcannnnnnnnnnnnnnnnnnnnnnnnnnnnnccattctcgacaccatggacatcntcctggagatcgtcaccaaccctgatggctttgccttcacccacagcaaggatcgcatgtggcgcaagactcggtcccacacagcaggctccctctgtgttnnnnnnnnnnnnnnnnnnnnnnnnnnnnnnnnnnnnnnnnnngccggagccagcagcaacccctgctcgcagacttnnnnnnnnnnnnnnnnnnnnnnngaagtggaggtcaagtccatcgtnnnnnnnnnnnnnnnnnnnnnnnacatcaaggcnntcatctccatccacagctactcccagctcctcctgaatccctatggctacaaaacagaaccggcccctgacnnnnnnnnnnnnnnnnnnnnnnnnnnnnnnnnnnnnnnnnnnctggcctctctctacggaaccagcttcaagnnnnnnnnnnnnnnnnnnnnnnnnnnnnnnnnnnnnngaagcactattgactggacctannnnnnnnnnnnnnnnnnnnnnnnnnnnnnnnnnnnnnnnnnnnnnnggaactacggcttcctgctgccggcctcccagatcatccccacggcccgagagacgtggctggcgnnnnnnnnnnnnnnnnngcacaccctgaatcacccctactgagctgaccctttgacaccctccttgccctcctctctggccccaccca

SEQ ID NO: 16218 - DNA, 712 bp, Macaca Fascicularis
  misc_feature (1)...(712): n = A,T,C or G
tggatatagannnnnnnnccgaaagcacggncntgtgaagaaagccctccccagccctccgccgcttccaccctggcacatggagcaggggcaggcaaacctcttcctttgcagacagaacagtgaaaagctttcagtggaggacaaaggagggcctcactgtgcgggacctggccttctgcacggccctaggagcacctggaggccgccacggaagctgnnnnnnnnnnnnnnnnnnnnagttggctttcttcacatgggaaggaaataatgccaaaaaaatccaaaacaaagaaatacctggagtggagagagcgttcctgctgaaacgtgcataggaagcttttnnnnnnnnnnnnnnnnnnggcagcacctacagcaacttggaatgagtaagaagcagagcgnnaaannnnnntttaatacaaagagctaaaaagacgagtggcctgctctctgctacctggactttcattcttatgtattaggagggcggctgctgtccttcagnnnnnnnnnnnnnnnnnnnnnnntcatatatcgtctgtgtctccccagtcccctcagaaccatgcccttggatggtgactgctggctctgtcacctcgtcaaactggatgtgacccatgccgcctcgttggattgccggaatgtagacggaaatgtactgttcttttttttttttttaaacaatgtaattgctacttgataa

SEQ ID NO: 16219 - DNA, 710 bp, Macaca Fascicularis
  misc_feature (1)...(710): n = A,T,C or G
atccgcacgtnnnnnnnnnnnnnnnnnnnnnnnnnnnnnnnnnnnnnnnnnnnnnaagtggactagannnctagctgtcaagcccctcctagttcttcatcccactccaactcttccccctctcccagttgtcccaattgtaactcaaagggtggaatattaaggtcgtttttctcattccttgtgcccagttaatcttgctttctttgtttggctgggatagagatgggtcaagttattaatttcttcacacctaccctcctttttttccctatcactgaagctttttagtgcattagtggggaagagggtggggaaacataaccactgcttccatttaatggggtgcacctgtccaataggcatagctatccggacagaacacgtttgcaggagggggacttttcttcgaggtagctgaaaggggaagacctgacttcctctggttaggttaggacttgcccttgtggtggaaacttttcttaagaagttataaccaacttttctattaaaagtgggaattaggagagaaggtaggggttgggaatcagagagaatggctttggtctcttgcttgtgggactagcctggcttgggactaaatgccctgctctgaacacgaagctcagtataaactgatggatatccctaccttgaaagaagaaaaggttcatgttgcttggtccttgatttatcacacaaagcagaat

SEQ ID NO: 16220 - DNA, 469 bp, Macaca Fascicularis
gacaattccatcaagccttaaatcaggaaaatgttgaatctggggtaatttatcacttttgtgcacatgttatctgagtccagccatctggtactgctgtacatttcgacaccgagggtataaacaatttgttgaattactaagtgaacacaataataaagaagaaaatggtcaggagtgtggtttcagcactactaacagatgactatttgtacctcatttgaccataactgtgctcgcgagcttccttccttccattcatgactgaagatctgctcaaatgcaccaacattgccaagtgattaaggcagaaaagaaaaatgacaggtatcatcatgtgaaggacagataaatctttttctgcctgttcttcacaatgggatacaaggaacaattacaggatgtcatcagaactgatgctgtaggacatacagctccctttctgtttatggtgattgtacttataaat

SEQ ID NO: 16221 - DNA, 755 bp, Macaca Fascicularis
  misc_feature (1)...(755): n = A,T,C or G
aatcatgctaggactttagctattggagctggggtggaggggtactgagggacaggaggatagccagaggccagactggggagtgtccctgtcatctgtgggcaccaggccgccgtccctgagctcagcactgccctcctacaggtcaaggagctgggcgtggtcatgtacaactgcagctgcctggctcgagacctgaccaagatctttgaggcctactggttcctgggccaggcaggcagctccatcccatcaacttggccccggttctatgacacccgctataaccaagagacaccaatggagatctgcctcaatggaacccctgctctggcctacctggcggtgagtctgggacaagtgaggnnnnnnnnnnnnnnnnnnnnnnnnnncactcacagcctccatccgtccctgtctggtgatgatagggagggcgtatcctgaccatcagttctcaccccagcnnnnnnnnnnnnnnnnnnnnnnnnnnnnnnnnnnnaacatccctcggcctctatttcagttagaaaatgggtannnnnnnnnnnnnnntgggagaggtaccctgcnnnnnnnnnnnnnnnnnnnnnnnnnnnnnnnnnnnnnnnntatagccacaggtggctctttcagtttaagttcattaaatgcaattaataatttaggtcaggtggggtggcttatgcctgtaaccccaatactttgggaggttgaggtgacaggatcactgaggccaggagttgagaccagcc

SEQ ID NO: 16222 - DNA, 751 bp, Macaca Fascicularis
  misc_feature (1)...(751): n = A,T,C or G
ttcatacacattgtttcttggccnnnnnnnnnnnnnnnnnnnnnnnnnnnnntcacaactattaccagagtttggaagccgaaatagctgttaactgaaatctcccannnnnnnnnnnnnnnnnnnnnnnnnnnnnnnnnnnnnnnnnnnnnnnnnnnnnnnctacaagggacccacagtcccccttttagattcgatcaaaaggaacagggttttcccagaggcaggcagcctggtggtatggcagagcagaaacttactgctaatgaaacgggaacctctccttcnnnnnnnnnnnnnnnnnnnnnnnnnnnnnnnaggaaaaattcctgggccaagaagctaaagctaaagaaaccttcctttttacacatttttttttttctttcaaactgtagggtcacttttgattgaggcaaannnnnnnnnnnnnnnntggaaaagactcactcctttaacataagttttcactgtggtaggattgtgctgcctgacatgcttgatatgcttttccttgcacgtgttaagctaggaaacctaaaaggatgtcnnnnnnnnnnnnnnncctggactcagagccctcaagggcttgtggnnnnnnnnnnnnnnnnnnnnnnnnaagnnnnnnnnnnnnaatccaggtcgnnngnnnnnnnnnnnnnnnnnnnnnnnnnnnnnnccagngggtattnnnnnnnnnnnnnnnntctgctgctgcctctttcctcctcactcnnnntgttgtnntcag

SEQ ID NO: 16223 - DNA, 719 bp, Macaca Fascicularis
aaactgactcattgaatatactaaaccaaactaaaatcatattattttgattaagtttatccatggctgtattcttctatgaattcttccatttaattcttccatgattatcttctgtaaatatatacatcacaggagttagaattctctacccatcagctgcaccatgtcgcagaattcatgcaggcacaaagttggagttacagagatgggttgacagcagggaaaacttggcctatgtattataaccacaacttcaagttcttacctcatgtgaatattcacccttcctttagtcttccaaggcaaatagccccatctcatcaccaaatgagcaaggtcttgatacggcatagcagatctccctaaacacagatcatgagaaaagatggaagagacttagggattcaggcatcagatgaagttggcttttcccttttatgccttgtttgtatttccccctgtctaatacactaaggatacttactcattgtacttgcagctcaatatgtctttgctgttcagatactaaaatgtatctctgagtcattgtgagctgtgcagtaggttggacatcgtcatagttggtgatgggactcaaaatgaaaaggtggtctctttaccaggtcacagactgtagcagattgtgcttgttatctgacaatgactgtcactttgagggtcgttgatttgcatgcactattctggggccttgtatg

SEQ ID NO: 16224 - DNA, 722 bp, Macaca Fascicularis
  misc_feature (1)...(722): n = A,T,C or G
acagtgggatgaatatttactctcccacctccttgctttttctttcaatgataccactgannnnnnnnnnnnnnntgacttctgctgctggggatttatgtcccgagnnnnnnnnnnnnnnnnnnnnnnnnnnnnnnnnnnnnnnnnnnncatggtcatgcctgagagagaagtggctggccacagccagaagaaacaacaacagccaggagcctttattttggaaaagactgtcggggctgtcactgtctcttctggttataaagcagagacgtggctatcttttctgcagggttagagtgggctcctttcttttttgaatccttttcttctcctttggtaacagctccctgcctccagggcttccactgcgagcatctctgctgtattgagcagtccagtgggggtgcgagggctttgtttctgcctgcctgaaagagagggctctggggatggagatgaggaacaacacgctctccttcagacaatgaggcattctctcctcctgctgccattcttcatctccactgagagccagagctggtaggagccgagtgccacaggcattctgcattgctttactcttaggtttgcttgtgtgattcttcccctgcctctcacccactcctccctcctctcactatcctaccctgtctgtgggctcttttactaccagcctatgctgtgggactgtcatggcatttagttcagagtggaggggc

SEQ ID NO: 16225 - DNA, 777 bp, Macaca Fascicularis
  misc_feature (1)...(777): n = A,T,C or G
gagcttgaagtgcaatgggagacatcagagactttaaaaatactagtgaagcctcttgtgtttatgtgcagagaagtatatgatcnnnnnnnnnnnnnnnacttgcctttttttccaccattaaggctttaagaacatgtggaataagtttgttagctgctaatgacaaannnnnnnnnnnnnnnnnnnnnnnnnnnnnnnnnnnnnncagaacactgtgttannnnnnnnnnnnntatgtgactggaataaggtggtcctacttgannnnnnnnnnnnnnnnnnnnnnnnnnnnnnnnnnnnnnnnnnnaaatttctaacagtgtatttgtgtaaagtttgtcatttcatactccatnnnnnnnnnnnnnnntcactgatccctgttttgctggcttttaagctacttggtcaaaaatcctgcttccttaaaacatagagaattaatgagcatctcaagctttttcttttcctttttaatgatgcctgcactannnnnnnnnntctagtgttctctctttgttnnnnnnnnnnnnnnncaccaaccttttatttctttaaggtgggagtatatttttatttgctaaatgccgtactatgaagatcaaagtcttaagtgtgtttgtgcagctcaaaaataaagatgtattaaggggggaaaacactggnnnnnnnnnnaggcacacttaaagcaagttttacttttggttgtattttctttgtatattataaacatttatttaacttgttgccgtttgaagtaaaaaatttccaaaa

SEQ ID NO: 16226 - DNA, 732 bp, Macaca Fascicularis
gccccagcacactcagagacagacctcaggatatcattgtgtttgtaattggaggagccacctatgaagaggctctaacagtttataacttgaaccgcaccactcctggagtgaggattgtcctgggaggcaccacggtgcacaacacgaaaagtttcctagaggaagttctggcttctggactgcacagccgaagcaaggagagctctcaagtcacatcaaggtcagcgagcagaagatgaaacagtggttgggggaagggcacagcttcctctctcacccccactacaggcttttcctactaatcagaggtgttggagagcagctttgggttctgtgctggttgttagaactcatctccaggtagcccacagatttgtggttggcacagacacacgactcccagagttgacctaacaataagtctgagtccatctcaacccacttttctctggtagtctttatgtatctgttagcacaatcacttcagttactgatgaattttgttgggatctgacgtggggaaagggttatcagagcctagaggggcttaaaaagtaatcatttgatgtacataccacattccttgacttcctttctcttcccttgaccctttctgcttttcattaaccacattcctgcacaacttatttctgaaaacctaccatatttctttatagagccatccaaaattttttgtccctacatagcaattttctgtggcactgagaa

SEQ ID NO: 16227 - DNA, 736 bp, Macaca Fascicularis
  misc_feature (1)...(736): n = A,T,C or G
tttctcactggaaaagttagtattaanatctacaaaactacatatttgtgcctccttggtaaatacaacacacctaattaaatgtagacagatannncagacatcagctgaattcacttaagtttttccaaaacnnnnnnnnnnnnnnnnnnnnnntggaatttttttttcctggaatttttcccctttgattcacagtggtcccatttatatctgcttccagcttagtgctatgcataagatatgtgtgtgtttggtgttgtgttgtgttgttttttttgtttttttttgtttttttgttttttaattttattttttaatgtttgcaaattaaaaagggccagaannnnnnnnnnnnngacaaacgaataaagataggattgggaaagaagttgctaagtgtgcttagttttaataagtaattctttctcttttttcagagnnnnnnnnnnnnnnnnnnnttgttgaattgttggatgcattcttactctccacacaaacctagaaatttcgtgacccctttnnnnnnnnnnnnnnnnagagaaattgattcagtataaggataaggagggaaggtggaccagaatgaaaactgtaaatatttttttaacctaatatcacttaaattgaggcagaaagatatagatattcaatgaattatattcaatgcatttaaaataccactgtaattgacagagttaaaagcatagatacaaaaccttgtgtaagaggctga

SEQ ID NO: 16228 - DNA, 531 bp, Macaca Fascicularis
  misc_feature (1)...(531): n = A,T,C or G
gtgcccactgccgcgctcacctggccaaccacgacgacctcatctccaagtccttccagggcagtcaggggcgtgcctacctcttcaactctgtggtgaacgtgggctgcgggccagccgaggnnnnnnnnnnnnnnnnnnnnnnnnnnnnnnnnnnnnnnnnncactgcgagaactgcaagaccactttgggaaggaaatatgaacaggcctttgagagcagccagaagcacaaagaggggaagtacatcattgaactcaaccacatgatcaaagacaacggctgggactgacccccgctccccgaagcatgaggctccagcccggcctggccgccagggagcgccaccggcttccctccgcccaaagggagctctggaccctcagggcccctgcagaggacggatccagctcctatacggcctgtgttctgctctcctggccccagtgcaccgtctgctctgtgaactcctcccaccaagcccctctgaccccacgcggtctgtccccctcgttctgtagcgttgagaa

SEQ ID NO: 16229 - DNA, 742 bp, Macaca Fascicularis
  misc_feature (1)...(742): n = A,T,C or G
agccgagagcaggtgcgccaggtggaggcnnnnnnnnnnnnnnnnntgcgtctgcttgcctaccctcgcagcggagaggagggcgacgtggagccgcccagggacggggagannnnnnnnnnnnnnnnnnnnnnnnnnnncacgtagcctcccatccctgtccccggcacggatccgggtcagtcaccatgaaccagggcactcggcatgctgcctcagcactgggagaagcagcgctgtggaggcaatctgtcacactgtcagactctgggagttgacttgctaccaannnnngtgcaattctgctgagcannnnnnnnnnnnnnnnnnnnntaatgacagatgcattggttgagannnnnnnnnnnnnnnggaagtgacagtgcaatgnnnnnnnnnnnnnnngtaaaataggaagagcttaagttcccagnnnnnnnnnnnnnnnnnnnnnnnnnnnnnnnnncaacaaggcgtcctcacaacaaagaagagatgtgatttggtaccatttcacatcagcaggtgtctggacgaaaacatcaatgtgaataagggccaactgcagtcctgtctatcttgattaaattacttaatatcaaataataggtctgggcagtatnnnnnnnnnnnnnnnnnnnnnnnnnnnnnnnnnnatagctccgtctacccagaaccgacttttaaaaagtnnnnnnnnnnnnnnnnntgggagaaccctaatgaactgaaacacattttt

SEQ ID NO: 16230 - DNA, 715 bp, Macaca Fascicularis
  misc_feature (1)...(715): n = A,T,C or G
aatgattggcagtgactcagagcttcntnnnanttcgggtacccacccgctgttctccatgcaaacaaagcacaagggaaatgacccccagggatcacagatgcagggagggccagggaggtaaggggtgggagtgaatgcnnnnnnnnnnnnnnncagtnccnttttcagtgctaccggcctctcaccaaacagtcctccatgtgagcaaccccgagacaaaaaagctaagtgggatcaagagagcagcactcggagagggtgcccaccaacccgcttcctgacnnnnnnnnnnnnnnnnnnagcagtcccacctctgtgggaggcatacaacgcgtgcnnnnnnnnnnnnnnncggtcggcgtagccaggcctggaggccccccaggcaggaggccgcccaaaggcggggccagcgtctcgcagaccagggccagggggcggccacagagggcctcgaaaccacagcccttaccccaatcccacgagccccgccaacgaaccacaggtgctgggctgtacagaacatgggaaggcggccctagacctggcgggaatgcctttccctcagagccaggccccggccccggccccgcctgggaagctcattttgcgaagctgagggagctcggggcaaaggccgggctaacgcggaccggaaggggccgaggctacacgggcctctgccagacggctcaggacatcccggcctggg

SEQ ID NO: 16231 - DNA, 746 bp, Macaca Fascicularis
  misc_feature (1)...(746): n = A,T,C or G
caggcgcacaccaccacgcctggctaatttttgtattnnnagtagacagagtttcaccatattggccaggctggtctcaaactcctgacctcaagtgatccgnnnacttcagcctccctaagtgctgggattacacgcgtgagccaccatgcccggcctccatctttaaacttttaaatgtgaaattctgttatgtaccattagcctaacaagattttctttcctatttctgactggtgcctttcccctttttaggagcaatgaaagctactctgttagttatgttcttttgatgtgataaaatgtcaagaagataggagaagagaatattttatgttgttgatgcttttgttcccaagtgtgaccctaaacttaagctttgtaggagatgacattctttcatgtcccttccctttactcatgcctatcaactgggacattttgtgcttttggtttaaaagttaattgatattataccttggttttatccaaaaagtaaaagtatttgcctttgacaaaagactgacacaagagcaaataagctttaaaatcaggggtgttatgtgctttcctccatttttgagcatattatccaaaatggtctgtataaatgagaatgatgcagtttaagtaagctcttgtataccattgtcatggagccctgtcataaagccatttttcggtttctttgggaaagaggcatatgggatttatacagattcacttgtaaatgttggattggggat

SEQ ID NO: 16232 - DNA, 690 bp, Macaca Fascicularis
  misc_feature (1)...(690): n = A,T,C or G
agaacacaggatgctttgtgcacagcnnnnctctatgtaagcnnnnnnnnnngtgcgttaaagagaaaggagcagctttgacatgaagcnnnnnnnnnnnnnnnnnnnnnnnnnnnnnnnnnnnnnncccctctctcatgcatgaacaggggcatccgaaataagaagctccccattctgtggtggggaaagcggagaggggagagggtgaagctgggaaagtaaagacagcatgttacagaaggaagaaaggaagccagtaactgagggcccactgcctgcccagcccggggccaggccctcagcagaagccatctcatttaagccctgcaannnnnnnnnnnnnnnnnatcattggctcttacagacaagaaaactagactcagagaggctgagtccacatcccagacagctcactgcagacacgggtggagnnnnnnnnnnnnnnnnnnnnnntttaacaacaaaagagttattgaaatgcacgggtagaaattgaaccaggaaaatcagtgaagtgattgtaaaaaagaaggactagcttgcctggagatgatgtttcttgttttttggggggaaaaaaaagtctctgaaatttgattcttactatagatttaaaattttctacatattatatgtaggagctcctagtgttttcaagaaattagactgtacctgtgtacacttcta

SEQ ID NO: 16233 - DNA, 742 bp, Macaca Fascicularis
  misc_feature (1)...(742): n = A,T,C or G
acnnnntaatannnnnntccagctggtgatctcgggtcccgtgcagcagtcgcctcacgccgcgctccccccagggttctacccccacatccacacgcccccgctgggctacggggccgtcccggcccaccctgctgcccaccccgccctgcccacgcaccccgggcacaccttcatctcgggcgtgacgtttcccttcaggcccatccgctaggccggcctgcgtgtgccttctgtgccctcgctggaccaagccttccgagaaggaaggggtggccggtcccccagaagagaacctcggggaagtggccgggtggcccctccccgccggcagaaccgtctcggtgtcacggagtccagtcggtcgcattcttcgacatccagattggatggtgaagggaagagtccagcctctgctgagagcctgctgcgggcgtttttaaaacatgccggacctgggagcctctgttctctgcgcatttcagacacacagcctgtgtggcgaggagtgtgacgggaggaaccacaggtgcaggcccatgtgtctggcctctttccttgtgaagacgatgtgtccccgccagaaaaagtgggctctttccgcagccccgtgagctgagcccaggctgcgtagtgaccacaagcttgtgtgcagcgctgctcagggaagctgtcaggaattcccctcacctcggaaaggaacttctcagttttattgggggtgtctaaattttcctttcat

SEQ ID NO: 16234 - DNA, 752 bp, Macaca Fascicularis
  misc_feature (1)...(752): n = A,T,C or G
tcaagctgaaggcaggcagcgaggagctggatgcagtnnaggcagcactagnnnnngccgggagcacagaggacggactcnnnncttctcactccagnnnnnnnnnnnnnnnnnnnnnntccagccagccnnnnnnnnnnnnnnnnnnnnnnnnncctcggccaggggcaggcagtgggcggcggaagccctgagatgaggtttggggtggggggtgcctgctgggcnnnnnnaggatgacatggctctgcctgagcccgggccggcctcgggccacccacgagggcctcccggtctagggcccgaccgcgccggacgcggtgtccggggcagggcagggctggggcctgggcctcaggagcctaggctaggggcacgtccgagagcccctttttgtgataatgttttgcactttttcgtacagggtgggcgggggtgggaggggctannnnnnnnnnnnnnntgatgctttttttttgtgtgggagaggcctgatgccatttctgctttctgctgagaccaccccaccctgacaccagcagtcccccctctgtcctggggcctggcttggacagagaccaggatttggggctgagctggtttcccctccttcctccccaagggctcaccctctctcttgctggaggtggaggaagggcgtccatgccaaggccccatacctgggccgggggcagcacgacctggctttccccgcttcagtgggccttgcccttngacagnntccaccccca

SEQ ID NO: 16235 - DNA, 558 bp, Macaca Fascicularis
  misc_feature (1)...(558): n = A,T,C or G
acaattttagatggaggagaagaaaaccnnnaaaaaaatctcnntgagnnngncgtaagttctttctgtatgagcctcagattagaaggaggctactttgggtcttggttttcaagcatgagctgctccttcccgggagagaatctccatttctgagggcaccttccaggacgctcacccccgggcctgagcacggtggaggctcggctctagtccgctgtccgtgccagaggagtgaaccccacaccctctctccctgcaatctttcagaagatggtgtgccacggggagcacacgtacctgtttgcccaggccatgatgtccgtgctggcccaggaggagcaggggggctccgctgtgcgcaggatcgcccaggaagtgcagcgctttgcccaggagaagtgagaggccctgtttctgctcatcccctccctccctagtgctccccacgaaacccttcccatggccctcattccacagccaaagctgctagctccttctgttcaacgtataggtagacttccttttggctgggcatggtggctcacctaaggtcag

SEQ ID NO: 16236 - DNA, 744 bp, Macaca Fascicularis
ttgaaacaacatttccgcattagagaacatcttcttaaacagagcacatctattttgcaaaggattcctgttacaaaatccaaagggattagggatttgagaaaaaattactgttacactcttaacaattatttgattattcatgttaattgaatgcagaaatctgaacacgaggcattgctgaaggaaatgaaataaaagaattatgatttgctttgcattaaaaaaattaatatcatacatacaaattgtttcttatatgtggccagaaaaggaaaaatgtcctaaggaagaacgtgatctctgatggcaaacaaattcatatgatggccatccttacacttccattccacggagccatcgtttattcaggatgatggtctgaatgcaacaggttttctcattatgaacagtaacactgatgggtccataaatcacaacatctcaccatttcctccaggaaagtgctttgtcttatctacagaactctctgcaatttgtattgtgtcaggctgttagctttctctactgctttgtgaaacagtttatcaagcccaacttgctcggtgagctggatgtcagaaaaaactggattgaacacaagcctcttgtttgcaggggataaagtatggctactctaaggcaagcagagaggagacggcttgttggtgctactgcctatatggttacgcaacaactttttaaactccacatataatagaagcttagtatgtaagcttttag

SEQ ID NO: 16237 - DNA, 750 bp, Macaca Fascicularis
  misc_feature (1)...(750): n = A,T,C or G
atgtgatctgtgatagaattaaaactcctggcctcaatcctcccactggcctcacaatgttgggattacaggcatgaaccactgcgcgcggcctgtactatgctatcaattccatatatgggaaggtgttttcccgttcggagctctttaaagctctgcagaagatttacatgtgtttatcgagctaagagaaatcagggcatggaaattgagtgtgtaataaaaattaaactcttcatgttatatagtcatgcataatttctatcttcttctctnnnnnnnnnnnnnnnnccatcacagttaggaaacttccatcatgaatttccttattaccaaaagcaagtacccaaataattgtctcaggagaggaaggacaaactgttaacaagctgaaatatttggggatttgtgtgacttgactagggaaccacagggttttgtaatgcctgatttagccctgtgcctaacagtttatttaaatcttaatgctaatgttaactggttcccaggtggttgaccttataagaaaacactgtgtggtattttaatgtggtaaatatgtgaatgaaggcctttggctcagttaatcactcnnnnnnnnnnnnnnnnnnnnnnnnnnnnnnnnnnnnnnnnnnnnnnnnnnnnnnnnnnnnnnnnagatatcagagaactgaaattggttggaattgtaagcagtgaatagatgcgttgttagaatgattccatcacttatacattgttaaaatgcta

SEQ ID NO: 16238 - DNA, 1087 bp, Macaca Fascicularis
  misc_feature (1)...(1087): n = A,T,C or G
agcagatgaaacagtctcacatacccnnnnnnnnnnnnnnnnntgcatcacaacangatgagcagatgagctgggcggggtgggcntcccagagcnnnnnnnnnnnctggaaccctgggaacaagaagcctttgttccaacagagcagggaaggaggttctctaggttcagaccactggacaggatagagcagtaaaaggtggtgacagtttcccttaggggtctgcctggcaggagccacggctcaggagagttgtgggggatgggatggaggctggagaccaggtgaggcccaggccaggcttgggagactcttttgtgctccttcctacacatgccttaaagcttccttcctgtggggtgcctggaccccttccccatctctggcagctcagagggtctctgctgctctcccctggnnnnnnnnnnnnnnnnnnnnnnnnnnnnnnnccnnnnnnnnnnnnnnntctgagggaggttccggagactcatggacttggggctctgcctgtaggaaggaggctgggccggagggagcagccaccattgtctctgttcagccaagtgtgcaagtaggctgcccgccaagaggggcactgctacccactgctgcctgccggctgacgcactgcctccccggccttcctgctgggccaccctcctcccttcccatgcttgttgtaatcagctctggggcctggacctccacaaaggaaggctggcccttggaggccatgtttgggtctccggccaggtcctggggctaggccatgcacccaatgggtgcacaataaatacaggtcaacaaagacggaggtgcgtcagtgtgtgaagaagggaggtcaggcagctaggaccacctgcagtgtggcaggcttcatccctctttgcttcaagtgtgtatgtgtgtctgtgcgtgtgtgtattgtctgtgtctgtgtgttcatgcacatgcaggagtcacacggtcgtaggctgtcaaagctggaggagacctcagaatcatccatccacctacttgctcatttgttcgttcattcattttgcaaataatatgggacgctttctacgtgccagtactagggga

SEQ ID NO: 16239 - DNA, 729 bp, Macaca Fascicularis
aaggatgagatgggcaacccaagatgaagtaaccagagtctaccccatcgccagtcataacctgccacaacgacatccaccaagggaacatcttgctgctctcagagccagaaaatgctgacagcctcatgctggtggacttcgagtacagcagttataactataggggctttgacattgggaaccatttttgtgagtgggtttatgattatactcacgaggaatggcctttctacaaagcaaggcccacagactaccccactcaaggacagcagctgcattttattcgccattacctggcagaggcgaagaaaggtgagaccctgtcccaagaggagcagagaaaactggaagaagatttgctggtagaagtcagtcggtatgctctggcgtcccatttcttctggggtctgtggtccatcctccaggcatccatgtccaccatagaatttggttacttggactatgcccagtctcggttccagttctacttccagcagaaggggcagctgaccagtgtccactcctcaccctgactctccacccccccactccttggatttctcctggagcctccagggcaggactttggagggaggagcaaccagcagaaggccctggggactgggctgagcccccaagtgaaactgaggttcaggagaccggcctctccctgagtttgagtaggtctccatggctggcaggccagagccctgtgctgtgtatgaa

SEQ ID NO: 16240 - DNA, 731 bp, Macaca Fascicularis
aattttactgaaaattagggcagtgttggtcaccttttattaaaagctttttttaagctttcataaaagattgcctttgctatttttgaaaacacgttatgacggtttgtatggtaactggtcatatatatgacagtctactgcatatatatgaatgactaggattaatctggtgtgtttacataggatatacatagttgaaatctagcatgaaaggtcaaaaaggaaatactgcacaatatttcttaaaagtaaaatgctgttattgttatgagtctttggtttaacatcacagtattctgtgatgtctttttaactttttggaaagaggtatcatttgtagaaaaaatttgatttgggttaaatataggtttttaaaactataaatgttgtcttttttatatttttatgaaaaagcagtagaaaattacttttgaagaaaacaggctatttaaatattaaaatatatgtatgttgtgagtttaaggagcctataattgtcagttttacaaaaccatctgtgttcaatggttgtaaataaattctcaaaacatcatttcaaaggctgcctacagaatattatcacttgacagatagagttaataaattaccaatcaggtacattttataatgtttgtctctgtaaaggtaatattagcagttaaagaacacggatgagaaaagaatgtgttacataggttgcatcacttgcagttaaataaaactcacaa

SEQ ID NO: 16241 - DNA, 731 bp, Macaca Fascicularis
  misc_feature (1)...(731): n = A,T,C or G
cagggcaagcagatcacaggagtcaaagggtcttgctcaaggtccccagcttcagccccaggccctaagccagcatcagaacagtcaatctgcatttttcatcagtcattctgtagtgacattatcccagactgccttctgtattcccctgtgtacagtctccttctgtttctaggtttagaagttcagaggtgactgtgtttctccatttccccagccaaatgggggaagaggtgaggctaggggagtgctgtgcccattttccagccttggtcagacaggtcacccgggagcctcgaggaaagctctggagggaatcacgtgtactttttcatgaagcttttcgcaaagtacatctaagatacactagtttattggactaatgtccaggagtagacacaattggtggccaagttgtctggggacacnnnnnnnnnnnnnnnacctacatgacttctcagaacctttaannnnnnnatgtgtgtgacagacttacaagaagggagctgagtatccagcctctcccaaacctctttgagcaaagcttccgtccctcccacacctctcacctcacaggcacatcaggccgcagaatgcactttagaaagcattgttgtaattgagaggggcagggctggagaaggagcaggtagtggggagccaggcttccctcatgcagcctgtggtggatgtgggaaggagatcaacttctcctcactctgggacagaca

SEQ ID NO: 16242 - DNA, 791 bp, Macaca Fascicularis
  misc_feature (1)...(791): n = A,T,C or G
agagctgctatagcaaagtgtgtgtagagaaagcagggnnnnganttagtagcagagaactgggtgagaaaaatggccagagaaagtgacctgccagctaccagtgtttccaaaaatgagggtgggatgggnnnnnnnnnnnnnnnnnacagcagtcatccnnnnnnnnnnnnnnggaggggaggggtgcttagagnnnnnnnnnnnnnnnnnnnnnnnnnnnnnnnnnnnnnnnnnnnnnnnnnggaggagtcttaggaagtgctgtcataattcataaggtcaagagcaacatctggatgaatgagccacctgaaatgtgtgtgggctgagccacaggaagggtgagtcctcttgcttgtggcgctttatggtgtgcaggttgcttgctttcccatattctcatttgctagaaggcagcccaacaaaagggagtccccaaagagctccatgagagcttaagaaaattcatctcctgagggcagagagaacaaagatctggcctatggtcacactgttgaggctctgtcttcacagctgatgttctcctagtggaggtacagctgaagaacattcagccccagcacgagaagatacagagcaacttggaaaccccaaaaggagacacacccttaacactgtgccgtgctgtgctgtgccgtgtcctgagggaggagacagccctatctcctcctggtttnnnnnnnnnnnnnnnnnnnnnnnnnnnnnnnactccttcatctctaacagaggaagaactgtattatcaaacctatggtctacccatgaat

SEQ ID NO: 16243 - DNA, 889 bp, Macaca Fascicularis
  misc_feature (1)...(889): n = A,T,C or G
cgggggaagtacagcgannnnatggagatcccggccaacgangcgcnnnnnncngccannnngaagannnngaaccagtacagcatcccagaaatcaaccaccgcttgaaaagctacatgaagttcctgtttgtccgggagccnnncgagaggctggtgtccgcctaccgcaacaagttcacccagaagtacaacatctccttccacaagcggtacggcacnnnnnnnnncaaacgccagcggaagaacgccacgcaggaggccctgcgcaaaggggacgatgtcaaattcgaggagtttgtggcctatctcatcgacccacacacccagcgggaggagcctttcaacgaacactggcaaaccgtctactcactctgccacccctgccacatccactatgacctcgtgggcaagtacgagacactggaagaggattctaattacgtcctgnnnnnnnnnnnnnnnngcagctacctgaagttccccacctatgcaaagtctacgagaactactgatgaaatgaccacagaattcttccagaacatcagctcagagcaccaaacgcagctgtacgaagtctacaaactcgattnnnnnnnnnnnnnnnnnnnnnnnnnnnnnnnnnnnnnnnnnnnntaaagggggtggggagagggagagaatcatgctttttaatttaagatttttatttgtcaaaagaattatatggatattgggttattttgtaaattaatatttctttggggatgatgctgcgagcagcatagtgagaattatttaaaatccttcgtagggaaggacagctgtctttgcaggggaaataggatgggtcgtccttgtctgtagaagtgaatactgcaacactgtctcaaaggtttccttgtgttct

SEQ ID NO: 16244 - DNA, 725 bp, Macaca Fascicularis
  misc_feature (1)...(725): n = A,T,C or G
gcacggtgtgcagcatccttggaagtgtcagagagccctgggagtatccaagtggcccggggtcagacagcagtcctgccctgcactttcactaccagcgctgccctcattaacctcaatgtcatttggatggtcactcctctctccaatgccaaccaacctgaacaggtcatcctgtatcagggtggacagatgtttgacggtgcccctcgtttccatggtagggtaggatttacaggcannnnnnnnnnnnnnnnngtctctgtcttcattaataacactcagttatcagatactnnnnnnnnnnnnnnnnnngtcaacaaccttccagacatagggggcaggaacattggggtcaccggtctcacggtgttagttcccccttctgccnnnnnnnnncaaatnnnnnnnnnnnnnnnnnnnnnnnnnnnnnnnnnnnnnnnnnnnnnnnnnnnggaaggcattcctcgaccaacttacctttgggagaagttagacaataccctcaaactacctnnnnnnnnnnnnnnnnnatgttctatacttacgcttgagaacagcaagcaagaaaatgggaggaactgagttggtcccagaccacccaaagannnnnnnnnnnnnnnnnnnnnnnnnnnnnnnnnnntctagaaaccaggaaatgggctcttacnnnnnnnnnnnnnnnctggggtcttaatcttggagttcccagccttccagaacta

SEQ ID NO: 16245 - DNA, 574 bp, Macaca Fascicularis
gaagcggttcccctgtgggctggaggtgcactctggccagagagaactggagagtgtggttgctgtcggcgaagccatggcttttgaaatttccaatgggagccatgagttactgtctcagggacagaagcagatttttattcagacttccgatgggtttatcttgtcccctccaggtacaatagtgtctcgggaggaggactttgtcatagtgaccgatgcagaggggcgtgccctgcggatgggcccaccagaaggagttcccctagaagctgtggagtcgttcctcaccgtggagccagagccctcacagtgaagaggagtcagatcctagatttgtctgattttatccagagaaagtctgtggcaagcaatgtatatttttctaatgtgaattttgcacagatgaaccttttatttataaagaatgtctttctaccctgctgtctacatttttcgatggagcttgtcataacaatagcagatgttgcctgatcaggaatccctgtggcgcatctgacgctcatgagtttttgtgatggtgatgagtggccctgccctgttcccttctctc

SEQ ID NO: 16246 - DNA, 737 bp, Macaca Fascicularis
  misc_feature (1)...(737): n = A,T,C or G
gnnnnnnnnnnnnnnnnnnnnnnnnnnnnnnnnnnnnnnnnnnnnnnaaaatgtacagagatgcaggtctgtaatataaaaatcttaaacattatatagttcttcctgcactgttttctttctttattttcttattcatttgctaaatacccataatattttgtcaaatgcactaaannnnnnnnnnnnnnnnnnntttttattttgtggggatttttagtttggccctttttggtgggtggtgattttgaggctttaacatgcccagaagctgttgtggccgacacttcaacaacagggaaaaaaaggtagaaaatatccctactgacagtaactacctgtcacatatttctcttagggcttttaaagatgagccattaaaatagaatgatcctttatggaccnnnnnnnnnnnnnnnnnaaaatgaatccagattgctgtcattttcttttgggtggtggggcttgatgtagattttactcttatgtacagaatttaatgttgaatatattaaaataacnnnnnnnnnnnnnnnngcggaggttagannnnnnnnnnnnnnnnnnnnnnnnnnnnnnnnnnnnnnnnnnnnnnnnnnnnnnnnnnnnnnnnnnnnnnnnnnnnnnnnnnnngtagaaaattttttcagacggataaaatgtatatggtacagatgtaaagttnnnnnnnnnnnnnnnnnnntacaactttctgtacaatattgattctcatctgg

SEQ ID NO: 16247 - DNA, 515 bp, Macaca Fascicularis
cggcggcgccgcacctgcccgcctcggcgctcgtgactcagccagctgccccatcctgagtcgctgaggggctgcggggaggccgcagcaccttctggaagacttggccttccgctctgacgcagggccgaggtgggcagtccaggccgagaggccggcggccctgaaggtctgcgctggggccgggacgaagcacttggtaacaggcacatcttcctcccgagtgactgcctcctgcgaggacatttaggggagggcagaggcctgcagtttggcttcacggctggctatgtggacagcaagagtcgttttcgcggaagccgactggcagccaagcctgtcgggcctccccaatttcccttccagcaaactcaaataggcaatccaagcacctagataccagcacaagtcggttaatccctgtctggactgagcctccgttggcttccgaactggaattttgcagctaacccttccaagactagaaccttaggcattggggagttttagatgaa

SEQ ID NO: 16248 - DNA, 655 bp, Macaca Fascicularis
tagctagcaccagtgccagctccatgccattgcaccttctttagtcttgattgcccttcccgcatttattggtgtataaaaatgactgaatatgaacattaaggactccatgaacctgggctaatgggagactgtagagaaaatgaaaaaagatccaccagaggacatcttgggggggggggagggagctggggggggagggaaatgactaatgaagctaattaaaagaagcattcaaatctgctttctaccctcattaacaattagcagggcactggccagagtttgtaccctgtgttttaccttaacaacattctatttgctctttgtatatttaagtgttgtaaggaaacgtgtttcaatcaaaactgaacatgagataaaggaaagagatgtggcttttgtgatattctatcacaaacacttattgtatctctgtaaaatacaatgtatgtatgcatgtaagtgttttgtcctaatgttgctactcccatggcaaagaaaaaaaagaatgaaaaaaagaaaaaaaaattggaaaaaaaatcaggctcatagcagctactgtgtagaaaattcccccacttctaatttgctgaatgaagaaaaaaaaaatcttttatttgtgtatattttcagagacatttgctctagtatg

SEQ ID NO: 16249 - DNA, 769 bp, Macaca Fascicularis
  misc_feature (1)...(769): n = A,T,C or G
ccttgatgcaggcgnnnnnnnnnnnnnnnntaaagactggaaaaccgtgcccgagagattccactgtgtgggaggctccgtgcaggaccctgagaaaataccatccactggcaagttggtgctgacactcacaaccgatgcctgtgaggggaaggaaaattttgtnnnnnnnnnnnnnnnnnnnnnnnnnnnnnnnnnnnnnnnnnnnnnnnnnagaggagacctgaacatcaacatgacttcccctnnnnnnnnnnnnnnnnnnnnnnnnnnnnnnnnnnngagggatgacgactccaaggtgggctttgacaagtggcctttcatgaccacccacacgtggggggaagacgcccgaggcacctggaccctggagctggggtttgtcggcagtgccccgcagaagggggtgctgaaggagtggaccctgatgctgcatggcactcagagcgccccgtacatcgaccaggtggtgcgggattaccagtccaagctggccatgtccaagaaagaggagctggaggaagagctggacgaagccgnnnnnnnnnnnnnnnnnnnnnnnnnnnnnnnnaactagcgctgcacatccgccttccccgccgccctccctccctggctccgcctctgtcctcgctccacgtttcaggcaggcacctagcaattccatcacccatacagggaattccatcttcttaatccgaagcttcgctcactgtcaatgattattttcattacaatggaaacaatctttttactctagccccaa

SEQ ID NO: 16250 - DNA, 347 bp, Macaca Fascicularis
  misc_feature (1)...(347): n = A,T,C or G
cgcctcctggccggcctcgcgcctttcaccggcaccttgcgtcggtcgcgccgcggggcctgctcctgccgcgcgcacccccggggcttcggctccggcacgggtcgcgcccagctttcctgcccctgaggccgccggccagccgtcgccatgggtgcctatctctcccagcccaacacggtgaagtgctccggggacggggtcggcgccccgcgcctgccgctgccctacggcttctccgccatgcaaggctggcgcgtctccatggaggatgctcacaactgtattcctgagctggacagtgagacagccatgttttctgtctacgatggacannaggggaggaa

SEQ ID NO: 16251 - DNA, 727 bp, Macaca Fascicularis
  misc_feature (1)...(727): n = A,T,C or G
ggcgggtatgggactagccggcgtgtgcgtnnngagacgctcagcgggctatatactcggtggggccgccggtcagtctgtggcagcgacagcagcagcaagacggcgaagtgaaggagggtgggcgtctggcggggtccnnnnnnnnnnnnnnnnnnctgcagccatggccccgatcaaggtgggagatgccatccctgcagtggaggtgtttgaaggggagccagggnnnnnnnnnnnnnnnnnnnnnnnnnnnnnnnnnnnnnnnnnnnnnnnnnnnnnnnnnnnnnnnnnnnnnnnnnnnnnnnnnnnnnnnnnnnnnnnnnnnnnnnnnnnnnnnnnnnnnnnnnnnnnnnnngccaagggagtccaggtgttggcctgtctgagtgttaatgatgcctttgtgactggcgagtggggccgagcccacaaggcggaaggcaaggttcggctcctggctgatcccactggggcctttgggaaggagacagacttattactagatgattcgttagtgtccatctttgggaatcgacgtctcaagaggttnnnnnnnnnnnnnnnnnnnnnnnnnnnnnaggccctgaatgtggaaccagatggcacaggcctcacctgcagtctggcacccagcnnnnnnnnnnnnnnnnnnnnnnnnnnnnnnnatcgcttcctccacctctccctatctcacctgtccagccctgtgccggggccctgcagt

SEQ ID NO: 16252 - DNA, 755 bp, Macaca Fascicularis
atcgcaccgcagaggtgggtcgatgcccagagggagaaacaggactcgggagaggaggaggccgaagagacccagcagcccccacttggaggcgaagagccgactggcccaagtagctgggacgtgttggccgcacgtgcgggtgacccgagaactgagggctcactcagccaccctgcgttgcttttcaactgaggtttgcacttcctctggcggccctcagtagtccctgtgcagcgacttctgagatctgtttgttgattacccttttcatgattgtaagtttctctgcagaaacaactggccaagccttgtgtgtgtgcgtcgtctcccctgtggggaaggttctcagtgcgttcccgagtgagcatggaacacctgagttcccaaggttctagacagtcgttcccagcgtggctgaggccacccagaggcagcagagcattcagactctgaacagaccgctgttcatgccgacgcttgcccggcctcccagttcctgtggctccctcagaatgctaacgggatcggacatgaaaggaccctctgagccagcagccccgtcctccagctcactcgtcaatggggccacacagtccggcccaggcactgggctccaggggactcaacactgccccctgctgccatgtggacggtgcaagttgaggacttcttgctggtctagtcacacatgcagtgttgggggatgccttggttttttctgcccttgagaactgatgagacactttactaat

SEQ ID NO: 16253 - DNA, 1278 bp, Macaca Fascicularis
  misc_feature (1)...(1278): n = A,T,C or G
accaatccagttacaagcccatgcatgacttcctgaaatannnnnnnnnnnnnnncatgtcggtgatcgggggcttgctcctggtggtggcgctgggccctgggggtgtctccatggatgagaagaagnnnnnnnnnnnnnnnnnacagatccccacctgcctggctaagacccgtggccgtcgaggactggtttggggtggagtcaacaaaactgccagcttttatgtatcctcttcccttcccctcccttggtaaaggcacagatgttttgagaactttatttgcagagacacctgagaattcatggctcggtctgctctggagccacagtctggcgtttgacccttcagtgctggccagcctggcagttggaggcctcccctatgccaaggctttggagtgaacagcccacttggctgtggcatctcagtcctatttttgagtttgttttgtggaggtgcaggagggccttcaggctgtgctgtgagcagacacattggtatcaccattcagagcaccctccctcttagttttaagtttacgtttttagcgaaaactactaaatgatgttgggtggttcagccagacctcaaagcggttaaacctccctggtgtaaaatcacaccagtggcttcaatgttgtttctgccccgtattgtagtattttataggaacagtgaaaacatttagggacacccaaagaatgacgcagtattaaagggatggtggaagctgctgtttatgataaaagaagtnnnnnnnnnnnnnnnnnnnnnnnnnngccaagtgttttattgggtaacaccctgggagttttagtagcttgaggcaaggccgaggggcaaaggagtccttggggaagctgctggtctgggtgctgctggccnnnnnnnnnnnnnnnnnnagggctagtgagactacacacggggtggccccagcagcagcaccccgcaagccagcctggccagctgctcctcggaccagcttggggagctgcagccgctgtggccagggggtgtggcgggagctcctagcactggagacccacggactcaatccagttacctcacatggggccttttctgagcaaggtcnnnaaagcgcaggccaccctggctgagcaccatcctcctttcccagctgcactcgccctgtgggcagcccgacacgccactttcctgaggctgttgctcactcagattgtccgtttcctatgccgaatgcagccaaaattcctttttacaatttgtgatgccttnnnnnnnnnnnnnnnnat

SEQ ID NO: 16254 - DNA, 703 bp, Macaca Fascicularis
  misc_feature (1)...(703): n = A,T,C or G
ccatcgagggaggggaacgtggtgaaatataggtgctagtatgttagagggccgacctggcaggaggaagagcaggaaggagagccaggagagtacaaggaatgcttctccctgtatgacaagcagcagagggggaagataaaagccacagacctcatggtggccatgaggtgcctgggggccagcccgacgccaggggaggtgcagcggcacctgcagacccacgggatagatggaaatggagnnnnnnnnnnnnnnncttttctgaccattatgcacatgcaaataaaacaagaagacccaaagaaagaaattcttctagccatgttgatggcggacaaggagaagaaaggttacatcatggcgtccgacctgcggtcaaaacttacgagcctcggggagaagctcacccacaaggaagtggatgatctnnnnnnnnnnnnnnnnnnnnnnnnnnnnnnnnnnnnnnnnnnnnnnnnnnnnnnnnnnnnnnnnnnnnttcctggacaggactattgaaggaggagaatgcgagagcctcccctgggcctgaaaacttggagcgattaatttttaaaaagaaaagtgttattttcacttgggggagatggcaaacacagtggcaagacaacattacccaactactgaagagaggctaactagcaacaataatagatgatttcagccatgcatggtatgagca

SEQ ID NO: 16255 - DNA, 760 bp, Macaca Fascicularis
  misc_feature (1)...(760): n = A,T,C or G
acccagcannnnnccatgtgttgccacagtnnnnaagagaatgctttaaagatgtgggacctgcaggnnnnngaggaacctgtgttcagggccaagaacgtgcggaatgactggctggannngcgggttcccatctgggaccaggacatacagtttctcccaggatcacagaagcttgtcacctgcacagggtaccaccaggttcgtgtctatgatccagcatccccccagcgccggccagtcctagagaccacctatggagagtacccactgacagccatgaccctcactccgggaggcaactcagtgattgtgggaaacactcnnnnnnnnnnnnnnnnnnnnnnnnnnnnnnnnnggcgtctactgggctgtctgaaggggctggcaggcagtgtccgtgggttgcagtgccacccttcaaagcctctactagcttcctgtggcttggacagagtcttgaggatacacaggatccagaatccacggggtctggagcataaggtttatctcaagtctcaattgaactgcctcctcctgtcaggcagggacaactgggaggatgagccccaagagcctcaagaacccaacaaggtgcccctagaagacacagagacagacgaactttgggcatccttggaggcagctgccaagcggaagctctcggatttggagcagacccaaggagctctccaaaccagacggagaaagaagaagcggcctgggtccaccagcccctgacgcccctgtgcctgcccac

SEQ ID NO: 16256 - DNA, 745 bp, Macaca Fascicularis
  misc_feature (1)...(745): n = A,T,C or G
agatgtgctgctctgagttggctctacannnctgtctttagagccaccagannnnnatggcccatacagatatcagagcagatggaaatttttcnnnacaagcgnncagnnncatcctggcaagtcaaagacctccaggccaagtcctgcccncttaagtctccaggaacgctgcagggaaaacccagctgaggcctgggcctagactgtggttaggtcactagattctacccctctccccccacattaataccttttccttcctcagagagaaatctcccacctaacctgaattgtagccccctccagtttgctttcctttggccttccagaccccaggaagtttgcctttccttcttagcgctatggtttctgccattggccatgatttcagggagctggctgaggccagctgaggccacacctgtgccagtggggcttcnnnnnnnnnnnnnnnnnnnnnnnccacacacacagcctctctccctggacatacgttagcacattggcattcagtattggtggcctggcatggtaggtactacccaatgaagagtgtactatatattttcattactataggccatacttatacagacatgtatatatatttatataagatctacctatcttaggatggaaccttggggaaaaataaaattgaggggaagtaaaaagtatgtaatgcttccagttgtgagccaagannnnnnnnnnnnnnnnnnnnnnnnnntcctgtcagtaa

SEQ ID NO: 16257 - DNA, 732 bp, Macaca Fascicularis
  misc_feature (1)...(732): n = A,T,C or G
accagcctacannngcnnnnnntcagggtcgnatcccaggccctgggacccccatcaagtactcggaggtggtgctggactctgagccaaagtcccaggccttgggccccgagccggagctctatgcctcagtatgtgcccagacccgcagggcccgagcctccttccccgatcaggcctatgccaacagccagcctgcagccagctgagatggagggcctggcacagcggggcatgcactgccccagccccctgtagcaggggcatgactgtttcccaaccagcacccaaagacgggcgccattgccaagtcacaggatgtgatctaccctggacttcctatctgagcgtcgagggagacatctcggcaaagcttttgtgatggaggaggcaaagacagtagccccctcctcatttcttttttctatctgttcctcttagcccccaaactcccaggttctcacttccttcttctggagtttaaccagatcctccccacccccgctccctcatagtctacccccacgcctcagtgtctcctcaggcacaggaagtaggcggtgggggaggagtaagggcctgacagtgggtgggtgggtatattcctcgggagctcacagactggagcagacctggaacttagagacgggaaggacccgagcctggcttttgacccaagaaccctggcaggagaatacagtctccatcctgctgtctctgccctgtccccaa

SEQ ID NO: 16258 - DNA, 730 bp, Macaca Fascicularis
  misc_feature (1)...(730): n = A,T,C or G
actcttgtacatatgttgtgggtttaagagtcttttgcatttgttctgtgacacctttttttgaattgactgttttaaaacgnnnnnnnnnnnnnnnnnntttgggactcctagtggttatggcatcccataatgcttcgtgacggccaccaggacagaaccacctgatgttttagagcagttttcagcatgacactgttaacaagtgtgtattttccaaggccacatgannnnnnnnnnnnnnnnnnnnnnnnnnnnnggagcagaaaagctgaaaaacccttttgtgtagaagtctgagtggtttgtgggggggaccttttttagagtttgcatnnnnnnnnnnnnnnnnnnnnnntgaaacagagagagggtaaagctacctgaggcagtgcgctggaggatgaagtgtttgatagcactaggggggaaagaaannnnnnnnnnnnnnnnnnnnttctcgtagactatctagcatgcagagtgtagtnnnnnnnnnnnnnnnnnnnnnttgctgtatcaaagttgtaaaattaagcattatttattgaaaactatgtatttttttgtaaaaacctgatcacatagannnnnnnnnnnnnnngtgcttgtgcttcaatcgaaccagcttcttgacccacccccccttggtatgcagtgttaatgctcagggttgaaaatagtacactccaatgtctcttttgcnnnnnnnnnnnnnnnnggattacat

SEQ ID NO: 16259 - DNA, 615 bp, Macaca Fascicularis
  misc_feature (1)...(615): n = A,T,C or G
tgctcactgcttnnngcnnnnttcctctctcgnnnngctgagtnnnnggacatgctgggacgatnnnnnnnnnnnnnnnnnnaggaagaaaaagatatggctgtacgggaccgaggtctcttctatnnnngcctcctcttagttggcattgatgaagttaagcggattctgtgtagccctaaatctgaccctactcttggacttttggannnnnnnnnnnnnagacctgtgaatagctgggcctcggatttcaacacactggtgccagtgtatggcaaagcccactgggcaactatctctaaatgccagggggcagagcgttgtggcccagagcttcctaaaacttcatcctttgccgcgtcaggacccttgattcctgaggataacaaggagagagaacaagaactccctgattctggagccctcatgctagtcccnnnnnnnnnnnnnnnnnctgattattttgagaaaacttggcttagcctcaaagttgctcatcagcaagtgttgccttggcggggagaattccatcctgacaccctccagatggctcttcaannnnnnnnnnnnnnnnnnnncgcaatgagtagggctgggactcggccatggaaagca

SEQ ID NO: 16260 - DNA, 791 bp, Macaca Fascicularis
  misc_feature (1)...(791): n = A,T,C or G
tgaagccctgtgnnnnnnnnnnnnnnnnnnnnnnnnnnnnnnnnaagatgaggaaactgacataannnnnnnnnnnnnnnnnnnnnnnnnnnnnnnnnnnnnnnnnnnnnnnnnnnnnnnnnnnnnnccagcatccagannnnnnnnnnnnnnnnnnnnnnnnnnnnnnnnnnnnnnnnnnnnnnnnnnnnnnnnnnacacacatagccgactcaggagagggatgcccatgggggaacatgtgactctcagctttggaaggacagagttaggatgatggctttccagtggcanncgttcaggtgttcgcccaagtctcagcttggccaaggcctgtcattgactcgcttaccaaagtcgatgtgatgaggagcctttacacctgaggggatgatgttaacttcagacaagatggagctgctcatttttgctgggtgtggtggccacttcccccccagcccctgtctcaccttacccccgttatccctcctcatttggaggctggacagagagctgaataggaaggacttgctattacctaaggccatgtgtgacatcctcctgaggacctccccaccccagtgtaatggccctgcatggccgggactgggggccatttgcttcctgtnnnnnnnnnnnnnnnnnnnnntgtccctacctggagcctcacctccaagcaaattcatgttctccttaatggaaaaaaaaaaaaaccgactagcttctgcaactcggaataggtgttnnnnnnnnctgtacagcagtgggacctccagagcatggttgtttca

SEQ ID NO: 16261 - DNA, 993 bp, Macaca Fascicularis
  misc_feature (1)...(993): n = A,T,C or G
atgaccccncgnnnaanncagaaagnnnnnnnnnnnnnntggagtcctgtggctnnctgcgnnnngaaaccattgtcctgtcagccctttctggattgaagaagaaactgagtgatttacaaactcaattaagccacgagatccagagtgatgnnnnnnnnnnnnnnnnnnnnnnnnnnnnnnnnnnnnnnnnnnacggagnnnnnnnnnnnnnnnnnnntatgggggtctctcttctagtttctgagaatctagtctactgttgcttgagcgtcttggcagnnnnnnnnnnnnnaatgagaagagggtcacagatagattaccagggatgcagtggtgtttaggcaggaccggtctttactggccctgactgcnnnnnnnnnnnnnnnnnnntgctccccagatcccagaaggtcccttccggactgtttccagcgcacctgtagnnnnnnnnnnnnnnnctctcctggttagtccagctctttaaaccctttctgtccaagatgagtcattttcagttgtaccttagatttctagtgttaggatcaagtgccatagccttttttcaaggggcctataaacctttccagtccttgccccagggctggcacttcaaattcccaggtgtccctaatttgagaagtaaccttttggaatagcattagacactggctgtcccctccccaccaaataaacatgatatttcattctctgtccagcagttatgaaccccttcaccatcaatggcttgatcatttagtttggtggtggtgggcgagggtggaagcagccgcaggagcaagggcccctcccacatacacaggaggaatatttcatttctccttaatgaaggctctggccctaacccctcagcactgtctccggataggaacatgtacaaagcagttaattaggcagcctggagaaaaccagagatccagtacagaaaggaaaggatatttattgattaacagaagttgtcttttaaaagtg

SEQ ID NO: 16262 - DNA, 733 bp, Macaca Fascicularis
  misc_feature (1)...(733): n = A,T,C or G
annnggggcccggnnnnnnnnnnnnnnnnnncaaggcctgtttgaatgcctggccctgaacctgcattgcttggggggacagcagatggagcnnnnnnnnnnnnnnnnnnnnnnnnttcgtcgtatgtctcgcggggtgaatccctccttgnnnnnnnnnnnnnncactatgatgggactgaggcttcaggtggtactggagcacatgcccgtaggtcctgatgccattctcagannnnnnnnnnnngttggtgatcccccccagcctcntnnngaggagccaatggaagttcagggagcagaaagagcttcccctgagcctcagcgggagaatgcttccccagcccctggaacaacagcagaagaggccatgtcccgaggtccacctcctgctcctgaggggggctcccgggatgaacaggatggagcttcagctgagacagaaccttgggcagctgcagtccccccagaatgggtccctnnnnnnnnnnnnnnnnnnnnnnnnnnnnnnnnnnnnnnnncgcagccccctctgagtgatgcctacctcagtggtatgcctgccaagagacgcaagctccggtccgatatacaaaaacgactgcaggaagaccccaactacagtccccagcgcttccccaatgcccaccgggcctttgctnnnnnnnnnnnnntctttgctctatggcccttcctcatcaggggaccgtttccccccttcacagtattaaga

SEQ ID NO: 16263 - DNA, 773 bp, Macaca Fascicularis
  misc_feature (1)...(773): n = A,T,C or G
agacagtgtagannnantnnngagtgaaaagttggaacgcatataaatcttgcttaaattttgtcctatccttttgttaccttatcaaatgaaatattacagcacctacaaaataatttagttttgcttgcttccattgatcagtcttttacttgaggcattaaacatctaattaaatcgtgaaacggcagtatagtccatgatatctaaaggagttggcaagcttaacaaaacccattttttataaatttccatcctcctgcatttgttgataccactaacaaaatgctttgtaacagacttgtggttaattatgcaaatgatagtttgtgataattggtccannnnnnnnnnnnnnagatttttaaattagagaggttannnnnnnnnnnnnnnnnnnnncctcatgtgctgtgtgctctttgaaagaaatgacagcagactacaaagcaaataagatatactgagcctcaacagattgcctgctcctcagagtctctcctatttttgtattacgcagctttctttttaatacaaatgttatttatagtttataatgaatgcactgcataaaaactttgtagcttcattattgtaaaacatattcaagatcctacagtaagggtgaaacattcacaaagatttgcgttaatgaagactacacagaaaaccttcctaaggatttgtgtggatcagatacatacttggcaaatttttgagttttacattcttacagaaaagtccatttaaaagtgatcattgtaagaccaaaa

SEQ ID NO: 16264 - DNA, 754 bp, Macaca Fascicularis
  misc_feature (1)...(754): n = A,T,C or G
cagggcaggcgctccctgccaccagagaccctgttccctagaggggcagcttttctcctccccagaacctcctgtctgtccccacccagtgtctcctcacaggcatgttggggaaacaggtnnnnnnnnnnnnnnnnnnnnnnnnnnnnnnnnnnnnnnnnncgtcttcttcctacccctacagtcgcaacagtgtttgtccccagctatgctcttatcccggctcctctcacctcagagcttggaaatttcagctctctcctgggcccattcatcctatcagcggcttttccagccacacccaaacatgctctgtgatgtcacattttaaaccttcccttgccctcacattcccctttggccacctccctgtttctcagttcctcttcacagcaaaaactcttcaaaagagttgttgattactttcatttccactttcttaccctattttcccctcaattaactctccttcatccccatgatgccattatgtggctcttattagagtcaccaacgttattctccaaaacaannnnnnnnnnnnnnnnnnnnnnnnnnnnnnnnnnnnnnnnnnnnnnnnnnnnnnnnnnnnnnnnnnnnnnnnnnnnntacctcataactctgtctttcccagcctctactgcggccttgtnnnnnnnnnnnnnnnnnnnccaggctctgatacagtgtagctcaaccctgctacacaaagaatctcctgaaagcctgtagaactgtccatgcatgttctgtg

SEQ ID NO: 16265 - DNA, 1116 bp, Macaca Fascicularis
  misc_feature (1)...(1116): n = A,T,C or G
aaaaaatgtgtcatcatggcgctaccnnnnnnnnngacnnnnnnnnnnnnnnnnnnnncagaccnnnnnnnnnnnnnnnnnnnnnnnnnnnnccacttcctgatgagaagtcacgtgttgccatcctcaaggctaacctgcgcaagtcccnnnnnnnnnnnnnngtggacttggannnnnnnnnnnnnnnnnnnnnnnnnnnnnnnnnnnnnnnnnnnnnnnnnnnnnnnnnnnnnncttgcaagctgnnnnnnnnnnnnnnnnnnnaaagtgagattaggcgagaacgagagaggcagacaaacccatcagccatggaggtagaagaggatgatccagtgcctgagatccgtcgagatcactttgaagaagccatgcgctttgcgcgccgttctgtcagtgacaatgacattcggaagtnnnnnnnnnnnncccagacccttcagcagagtcggggctttggcagcttcagattcccttcagggaaccagggtggagctggccccagtcagggcagtggaggcggcacaggtggcagtgtatacacagaagacaatgacgatgacctgtatggctaagtggtggtggccagcatgcagtgagctggcctgcccggaccttgttccctgggggtgggggcgcttgcccaggagagggaccaggggtgcgcccacagcctgctccattcttcagnnnnnnnnnnnnnnnnnnnnnnngactctggacagggggtttctgttgcaaaaatacaaaacaaaagcgaaaaaataaaagcgattttcatttggtaggtggagagtgaattaccaacagggaattgggnnnnnnnnnnnnnnnnnnnnnnnnnnnnnnnggggcagtgcaggggacctgtgtggggtgtgaaccaaggcactactgccacctgccacagtaaagcatctgcacttgactcaatgctgcccgagccctcccttccccctatccaacctgggtaggtgggtaggggccacagttgctgggtgtttatatagagagtaggttgatttattttacatgcttttgagttaatgttggaaaactaatcacaagcagtttctaaaccaaaaaatgacatgtgtaaaaggacaataaacg

SEQ ID NO: 16266 - DNA, 728 bp, Macaca Fascicularis
  misc_feature (1)...(728): n = A,T,C or G
tggccaacccagagcacnnnactgtccaccactggccaaagannnnnnnnnnnnctgccccccatccatcaccaactccatggtggacatacccannnnnnnnnnnnnnngctgcccagaaccagggtcttctccaccccagtggagcccaggacaccagagctctgttcgacctggagctgcttctcccagcaaccaggtctgtccaggcaccaggagccacagccagacccnnnnnnnnnnnnnnnnnnnnnnntgcccagagggtacgttgtaaaccaatatttcaagcaacgtaaggtttggcttgggggaatagataaagtgccagtaggtttctgcaacagccagtcaacacatttnnnnnnnnnnnnnnnnnnnnctggtactatgccaggtagcgaggacgcacaaagggacacagtttagaaagagacaaacacaaatcctcacggtagggtaggataaatgtggaggtaaagagatattctcaatcatatgggccaaagtagnnnnnnnnnnnnnnnnngtctggagaatagaggaagcgacatccgagctggatctgtgaagtagatcagaagtttgtggccagagaagcagaggaaaggctttcccagcagagagagcagggagtccacagtcgggaaggtgtggaagcacatggcatgttcaggaaatgccggaatgttgggtgcaggttcaagtcattgagagtaattgaagcc

SEQ ID NO: 16267 - DNA, 721 bp, Macaca Fascicularis
  misc_feature (1)...(721): n = A,T,C or G
cacccatnnnnnnnnnnnnnnnnnnnnnnnnnnnnnnnnnnnnnnnnntacggacgggtcccagagatggacagaggcatccagagcccccaccttccttccaacacagcctgtgggctccgggaccgagtgtcccccgccaggctactcctaactaacgtgttgcctttcacggaccccgctggaagcttgtagcttggcaaggccaatgcttctgccctggcctgctctgggtggtggtggataggtggacagacggccagccagccagctgtggcggggggcccggctccatgtgtcctgtgttgcccggcgggcgggcttgtgtcccgtgtctgtgtgctgtgctgccgcaccgtgtctgatgtgtcagtgctccggccgccgctgtccctttcatcaaagccttaacctttgcttcatgctcttgtgggaggcgacggggggcaggcgggagcaggcacgggggtgatgctgccacagggggccagtgacacccagagccccctccccagccctcaggccctccctgccaaactggagaatccccgccccaaggcatgccacgtccccagccctggcctggctgcggtgcttgcgccgcgggaaagcacactggggagggggtccgtgcttcccttggtgtcagggacctgagagtaagcacacgacagcgtccgcttgcgttgtgtctgttttatgtttttatatctacatctat

SEQ ID NO: 16268 - DNA, 751 bp, Macaca Fascicularis
gcccagccaccagcaaccccccagtgccaccatggcaactgcaccatacaactactcttacatctttaaatatattattattggggacatgggagtaggaaaatcttgcttgcttcatcaatttacagaaaaaaaatttatggctgattgtcctcacacaattggtgttgaatttggtacaagaataatcgaagttagtggccaaaaaataaaactgcagatttgggatacggcaggacaggagcgatttagggctgttacacggagctactacagaggagctgcaggagctcttatggtctatgatatcactagaagaagtacatataaccacttaagcagctggttgacagatgcaaggaatctcaccaatccaaatactgtaataattctcataggaaataaagcggatttggaggcacagagagatgttacatatgaagaagccaaacagtttgctgaagaaaacggcttattgttcctcgaagcgagtgcaaaaacgggagagaatgtagaagatgccttccttgaggctgccaagaaaatatatcagaacattcaggatggaagcttggatctgaatgctgctgagtctggtgtacaacacaaaccttcagccccgcagggaggccggctaaccagtgaaccccaaccccagagagaaggctgtggctgctagtgacctctttgccgtggcccctcatttgacctttcacctctgtctgtgaaagcagtactttttactgcctca

SEQ ID NO: 16269 - DNA, 824 bp, Macaca Fascicularis
  misc_feature (1)...(824): n = A,T,C or G
atctggctgagaacggcttcctcccacttcacctgttgggcnnccgagtggactgggatgaccgctggatcaacgatgtagaagacagctacnnnnagcagtggacctatgagnnnnnnnnnnnnntggagttcanntgccacacagccttcttcgtcagtatcgtggtggtgcagtgggccgacttggtcatttgtaagaccaggaggaattcggtcttccagcaggggatgaagaacaagatcttgatatttggcctctttgaagagacagccctggctgcattcctttcctactgccctggaatgggtgttgctcttaggatgtatcccctcaaacctacctggtggttctgtgccttcccctactcccttctnnnnnnnnnnnnnnnnnnnnnnagaaannncatcatcaggcgacgccctggcggctgggtagagaaggaaacctactactagccccccgtcctgcacgccgtggagcatcaggccacacacactgcatccgtcacccaccccctctttgtgtacttcagtcttggagtttggaactctaccctggtaggaaagcaccgcagcatgtggggaagcgagnnnnnnnnnnnnnnnnnnnnnnnnnctatggggggaggggggagggctgcctgaaaaccatccatctgtggaaatgacagcggggaaggtttttatgtgcctttttgtttttgtaaaaaaggaacacccggaaagactgaaagaatacattttatatctggatttacacaaataaagatgggtattataatggaaaaaaaaaaaaaaaaaaaaaaaaaaaaaaaaaaaagg

SEQ ID NO: 16270 - DNA, 1109 bp, Macaca Fascicularis
  misc_feature (1)...(1109): n = A,T,C or G
gtccagaccnnnnnnnnnnnnnnnnnnnnnnnnnnncacccacagagnnncacatttctttgttgcctcnnnctgaaaactcaaatactctttattcgtctaagggtctgggagagtcgggggtgttcctggggtgttccgtgtnnntnnnnnnnnnnnnnnnnnnnnnnnnnnnnngacgggagagaggcctgcacggacccttgagccttaatagtccgctgaccccggagaagattaggatggcctgtgaagacaagttcacaaaaatgattccgagagatgagcctgggtcctgtgttccttggaatgtacccatctgaatcaaatgcaaacttctggagaaaatggagtgcctcttcccagatggcagtctgtcctatctctgtgctggaagacactagatctgaaagacacagtttccannnnnnnnnnnnnnnnccacactgttgcttttctatggagctgatttaaagtattccatttagatttgatagatatgcttaagcaatctataaatcatttgcaatgttataaacactaattggtttcctctagggtgatatttgccattactctgtctctttgatccatccagctaaatggaatagacgatgacttgcatatgactcatacttggcttgtatccaccaacagaaattataccatacagtgaaaggcaattttctaaataatttcatttactaatatgaactgtgaagttgtcattttttcatttgtccctttctgctgtcaccttcctcttgtcagaatgaatatagacactgtatctaagtgggaccaaaggaaaaagagcaaactttcaccaaagttttcgtgaaaactcgaaaagctttaaaggttactatcaagaaattgaaaggaaacccacagaatagcataaaatatttgtgaatcatatatttgataaaggtcttataaccagagatatgaagagctcttacaactcaataaaaggcaagtaatttaaaaataagcaaaagaattgctggatggtatggtagttctatttttagtttttaccctaactactcttacttgatcatttaacattctatgtatgtaacaaaatatcacatgcataaata

SEQ ID NO: 16271 - DNA, 727 bp, Macaca Fascicularis
  misc_feature (1)...(727): n = A,T,C or G
ggaagnnnnnnnnnaagcctcactgggccnnnnngggacatggccacctgacctgtgtgtggctggtgcagcctggcaccaagtgggctacctgttaggaacatgaataccttacaaagctgaagctggaacttttccaaagggttttgggtatagcctgccctggaggggaaggaagtccttgcaagcaaagacgtgcagtttgcttgcacacaccagcagagctaagactggagtttcctgtggcctaactttcagtgagggaaccggatgctgttcacacttttgactggatggagatgcatttacaaaacagactggggaaggacttaatactcagatggattggaactatcatggtcactgctcctctcccctccccacaaaaggaaaaaaaaaaaaaaactggatttgatttttttttttctggtcacttgagcacatctaagatcacccattaggttttatctgggacctgcagtttggctttgggattgatcatcttgtggattttattcctgacgaatcccttgctgcctaccctttcctttggttctcaacctcaacgagttcaaatcagtcgtcctttttagctcccgtggaactgttttgtatctgcctctttactagtctaccctagtgccatccaccagctttactctttgacacacacatgcacacacacacgattttaacttgttttnnnnnnnnnnnnnnnnnnactgtc

SEQ ID NO: 16272 - DNA, 767 bp, Macaca Fascicularis
  misc_feature (1)...(767): n = A,T,C or G
tgttaactcagtttaattacaactctggatttcagagttttnnnatttgtaagctgagagaacaatgcttcacttaataagagggggtcttagtccattttacattgttataacagaatatcnnnnnnnnnnnnnnnnctaaccaatagtttatttgtttcataaatctaaaagctgggcagtccaagattgaggggctacatctggtgagggtcttctcaaagcatcataatatggtggaaggtatcacgtggcaagagagcatgtacatgggagtgagagaaaaagggagagagagagagagagtggtgggggcggggaggaggataaactcatccttaaagacaccactcctgagataacaatcnnnnnnnnnnnnnnnnnnnnnaatccattcaagaaggcagagctctcatgacttaatcacatcctaaagggctcacctcacaacactgttgcattgggagttaagtttccacataaactttcggggacacattcaaaccacaggagaaagtcatattattcctgggcaaatcacaatatggggaattgtattcataaatgtccacagagacagtaaatgttctcgcttcagtaataattcatctaatccctcctgtttgtctcaaattataagataactttgaagctttctgaattaactttatttaagaggaaacgtagatgttattttagtctctatcttcatgtcatcatcacttaaaaacctgctaaaagctgtcaacttttngnttgtagcaagt

SEQ ID NO: 16273 - DNA, 345 bp, Macaca Fascicularis
gcagttggacatgttcaagaccaacctggaggaatttgccagcaagcacaagcaggagatccggaagaatcctgagttccgtgtgcagttccaggacatgtgtgcaaccattggcgtggatccgctggcctctggaaaaggattttggtctgagatgctgggcgtgggggacttctattacgaactaggtgtccaaattatcgaagtgtgcctggcgctgaagcatcggaatggaggtccatataaccacggaggaactaattcaacaggacttgaagggaagggtcaagttcgcccaggaagtcagtaaagaagatctgatcagagccttcaagaaaataaagg

SEQ ID NO: 16274 - DNA, 721 bp, Macaca Fascicularis
ctacagcttcgagaatttgacagatgccggaagctttatgaaaagttcttggaattcggacctgaaaattgtacctcgtggattaaatttgctgaattagagacaatccttggtgatattgacagagcacgggcaatctatgaattagccatcagtcagccacgtttagacatgccagaggtgctttggaaatcatatattgattttgaaattgagcaggaagaaacggaaagaacacgaaacctttaccgacggttgcttcaaagaacgcagcatgtcaaggtatggatcagctttgctcagtttgagttgtcttcaggaaaagaaggaagtttggctaaatgcagacaaatttatgaagaagctaacaaaaccatgcgaaactgtgaagaaaaggaagagagacttatgctgctggaatcttggcgaagttttgaagaggaatttggaacagcttcagataaggaaagagtagacaaactcatgccagagaaagtcaagaagagaagaaaggtccagacggacgatgggtctgatgcaggctgggaagaatactttgattacatctttccagaagatgctgccaaccagcctaacctcaaactcctggccatggccaaactgtggaagaaacagcagcaggaaaaggaggatgctgagcaccatccagatgaggacgtcgatgagagtgaatcccgatctttttttcatacgacaaatg

SEQ ID NO: 16275 - DNA, 742 bp, Macaca Fascicularis
  misc_feature (1)...(742): n = A,T,C or G
acacagcctagtttgccacannnttagcatccaaaacnntttaaaagcttctaaatgtctaatataaagggagatgcttgtagccacaacatctattttaccaatattgtttccattacactaccttggattttgcatgagtgagtatagtaacccaagatgccatagaaaaaacttgatcattttctgacctaatcagttactgtggtttcattaaaagctgccgtggtggagtgaagtcaatcagggaaggtttgtttatgttacatttattatgttacattgatttcaccagaattattttaatgtatcaaaggggtttactgtgccaaacaaaattctagggaaaaatactactaaacnnnnnnnnnnnattagaacatgctgttgagtccaatgtgccataagatattttattttagcatgttaaatagcacttttaatagcaaaaaaaggcacatcaactacaaagttatccttagtttggaaatgcttttctagattannnnnnnnnnnnnnnnnagggtcctagacacatcagcctaannnnnnnnnnnnnnntgaatggatttactgataatgatcagtctttagtcttccctttgttatatgattttataggttatgattgatcagatttacgttttactaatggtaagggtgagggtgatagggcaggttttgggttttctagtnntnnnnnnnnnnnnnnnnnnnnnnnntttgtatacttagccataac

SEQ ID NO: 16276 - DNA, 722 bp, Macaca Fascicularis
  misc_feature (1)...(722): n = A,T,C or G
caaaaggataagcccaaaccccagcaaggagatgacatcacagtggtggacgtagagaagcagattgaggccttccgcagccgcctgatccagatgctgggggagcctcttgtccctcaactccaannnnnnnnnnnnnnnnnnnnnntcctgctcttctatgctgcggacttgaaccctgacgcagagccctctcaaaagggnnnnnnnnnnnnnnnnnnnnnnnnnnnnnnnnnnnnnnnaagaatacctcctgaactcttatctccaactacttaaaagctccaaaagtaggaaaagtggctaaaatcttacaagaccaaacctatattatttaatcagtaggttgtaatttctaactctagtataaatatctttttttaaataatcctatcctagcctattctcaaatatggcttaaatatacaaggtatatatattttttaataaattatttatctatactttttttgaaacaggttaatactgtgtgcaccacgtttaacattttcattcaagatgtggaaaaatccctctgctgaagccactctatacaccaatattatgtcattcaaggtaccgacgacctgtttcaggagagacgttcatttttccctaatgaaatgcaagcattctatgttagacctattatattgcctattaatttgactttgtaataaatagagggtagaaacaaaaggatcaagtgtgttacaaaacat

SEQ ID NO: 16277 - DNA, 734 bp, Macaca Fascicularis
  misc_feature (1)...(734): n = A,T,C or G
catccacacgggcgagcggccctacgcnnnnnnnnnnnnnnnnnnnnnnnnnnnnnnnnnnnnnnnnnnnctccagcacctgcacgtgcattcgggcgagcgtccctatcgctgtcagctctgcgggaaggcctttggccaggcctccaagcctcaccaagcacaaacgggtgcatgagggtgcagccgctgatgcagctgccgcngntgcnnnnnnnnnngcagcggcgaccggcctgggcctggggcctggcctaagccctgcatccatgatgaggccggggcaggtctccctcctgggttctgatgctgtttctgtgctcggctctggcttgggcctcagctctggcaccagctctggccgtagctctgaccctggctccgggccgggcactctgccggatcccagctccaaacccctcccccgctccagatccacccccagccctactcctgtggaatcttctgacccgaaggctgggcacgacgctggtcctgaccttgtgcccagcccagaccctgatcctgcgcccagcccagaccctgatcctgtgcccagccctgatcccaaccctgtgtcccaccctgacccctgctctcccactggtgacactgtcagcccagccctccctaccggcgggagtccagagtgggtacaggagcaaggggcactgctggggcctgatggctgaaggggactcgggcatcctccggggcctggggaagttgtgtgt

SEQ ID NO: 16278 - DNA, 725 bp, Macaca Fascicularis
  misc_feature (1)...(725): n = A,T,C or G
gactgcagctgcccagccnnncaaggtcaagaccagcctcccagcntngtctgctgccatggannnnnnnnnnnaacccatgcagaagtatggaaaggctgccccaggggacaggactannnnnnnntctctgtgggcagcagggcaggagctccaagcctggaagagcccaggagccgatctgttgcaagtnnnnnnccaaagcannnnnnnnnnngannnnnnnnnngaggccaccaagaatatggaagctggagccggaagagccagttatatcagctcagcacggctggagcagccagaccccggggcagtggcagctgctgccatcctccgggccatcctggatgtcttgcagagctaggatgtgtgactgcctcccttggcctcagctcctctcactgctgtgctgaggtggcctttggcacttctttctgccttccaaccgtcactttcccctggcctggctccattggcccaccctctaagttgagcaggaaatcctccaccaagcttccagaactacagacagcacccagagcgagctggagtgggtccccgtgcctctccagcatgccctttccctttgtgagggtggagtccctgggtcatgccctcccctgccagttctgggcttcagnnnnnnnnnnnnnnncttgtgcnnnnnnnnnnnnnnnatnnnnnnttaannnnnnnnnnnnnnnnnnttctgcaccttaatccca

SEQ ID NO: 16279 - DNA, 724 bp, Macaca Fascicularis
tcaataagtgccagatatttccttcaaaacctgtctcaagggaagaccagtgttcatataaatggtggcagaaataccagaagagaaagtttcattgtgcaaatctaacttcatggcctcgctggctatattccttatatgatgctgaaaccttaatggacagaatcaagaaacagctacgtgaatgggatgaaaatctaaaagatgattctcttccttcaaatccaatagatttttcttacagagtagctgcttgtcttcctattgatgatgtattgagaattcagctccttaaaattggcagtgctatccaacgacttcgctgtgaattagacattatgaataaatgtacttccctttgctgtaaacaatgtcaagaaacagaaataacaaccaaaaatgaaatattcagtttatccttatgtgggccgatggcagcttatgtgaatcctcatggatatgtgcatgagacacttactgtgtataaagcttgcaacttgaatctgataggccggccttctacggaacacagctggtttcctgggtatgcctggactgttgcccagtgtaagatctgtgcaagccatattggatggaagtttacggccaccaaaaaagacatgtcacctcaaaaattttggggcttaacgcgatctgctctgttgcccacgatcccagacaccgaagatgaaataagtccagacaaagtaatactttgcttgta

SEQ ID NO: 16280 - DNA, 700 bp, Macaca Fascicularis
  misc_feature (1)...(700): n = A,T,C or G
agtaggagcacatactggggactacggatgttgctgttgtggtttgttttgtttctnnnngttaagaaatcaaatttgcagaatttaatctaaaagttgcattatgctttgaaaactccatccctcctaagaatcttaaaaaacttgaaatgctcaccaaatgtccccatgggatttttgaccaaaagtaaggtcataactgaagaaatttttagttctttgatcacttcagtgacaatacccattgatgaatcttcttcatgatttgggattttttgttgttgttgttgttttttacacttcttaacctgttgatctatttgaggtcttttgtgtttatcaaacttattcttaagtttaaaaaagaaattaaaagggtggtttttttaagattttaaagtttgctaacatattaaaaaatcttcaaatgcttattaaatagagcagttcttgccacccagtcttcttgtattctctctttagctagccaaattgtccttgaatttgggttttccacaacctcagagggttatnnnnnnnnnnnnnnnntattttaaaatattttttggaagagctgctaattttattttaaaaaacaaagttgtgaaaatatgcctcctttttaaaaaataacccctccatcccggacatggaatccagcaccacagtgcacaggtcagggctcggagggagcctctgt

SEQ ID NO: 16281 - DNA, 709 bp, Macaca Fascicularis
  misc_feature (1)...(709): n = A,T,C or G
gnctcatcgaccatnngtgnnnnnntccnnncatcagaaccaaccccggggacttgtgnnnctgcctgatcagccagcattgcccccagctctggcctggacttggggccaagtctcagggggcttctaggagttggggttctctaaacatcccctcctctcctacataactgaggaggggactagggatatgctctggggctttcatgggaatgataaagatgataatgataaaaatattatcattattttatcattattattgtaaagtatcattatcataatacaatgaacctttatttattgcctaccacatgtcatgggctgaataatggcccccaaagatatccgtgtcctaatccttagaacctgtgactgctaccttctgtggcagaaagggacagtgcagatgtatgtaagttaaagactttgagataggaaggttattcttgctgattcgggtgggcccaaaatatcaccacaagggtcctcataagaaggaggccagaaggtcaaagaggaagagacaatgtgatgacggaagtggacatgggtgtgatgtgagcaggggctacgaatgctgcagccttcagaaaaggcaaggaacggattccctcgcctggagcctccaaaagaaaccagccctgcccatgccttgacttgagcccagtgaaaccaatctgagcttctggcctccagaatgcaggag

SEQ ID NO: 16282 - DNA, 740 bp, Macaca Fascicularis
  misc_feature (1)...(740): n = A,T,C or G
gaagcttnnnnnnnnnnnnnnnnctggnnnnnnnnnnnnnnnnaagtcgtaaaagacaagggagacctcgagctggaaattattgttcnnnnnnnnnnnnnnnnagatctcgtaaaccaacaacaaaccttggaggagaagatgcgggaagaccgggatagcctggtggagagactacaccgtcagactgctgagtattccgcattcaagctggagaatgnnnnnnnnnnnnnnnnnnntgctccaatggaggacaagctcaaccaggcacacctcgaggtccagcagctgaaggcctcagtgaagaactatgaggggatgattgacaannnnnnnnnnnnnnnnnnnnnnnnnnnnnnnnnnnnnnnnnnnnnnnnnnnnnnnnnnnnnnnnnnnnnnaaagagaacaagatccttaaagatgagatgaacaaagagattgaggcggcacgaaggcagtnnnnnnnnnnnnnnnctgacctgcagcagctccctgannnnnnnnnnnnnnnnnnnnnnnnnnnnnnnnnnnnnnnnnnncaactgcagggctatgagcggaagaacatcgacctcacagccatcatnnnnnnnnnnnnnnnccgggtaagggactggcagaaagggtcccacgaactgacccgagcaggggcccgcataccannnnnnnnnnnncgccccccaagggaggactacttcctttnnnnnnnnnnnnnnnnnnnnnnnnnnnngctatcatc

SEQ ID NO: 16283 - DNA, 782 bp, Macaca Fascicularis
  misc_feature (1)...(782): n = A,T,C or G
aggacgtaggaataactgtggacactgtnnnnnnnnnnnnnnngaaggagcagaccaactaggaaagaagtttgagaccagcctgggtaacatggcgaaacccagtctctacatgctccctgttctgcttgaagtcagctatgccatcannnnnnnnnnnnnnnnaggcttcacattaaaaccacaccataccttgattgagctcatggcagtaaacattgaacattgatatccatgggaataggattagaaaaggattgctttctgcatataataatctgtggactgtgccattttacagtgtaccaaatgagaacgaggtaaaaatgtatgcagtaaggcactccgtaattgctattttttcccagctgacatgatttctcagtgttagaaaacaaacccatagaactttgctttctgcctcttcaatccatcttaccacacagtatttcatgattcagtcaaattcttcaaagtcttataagcaggagtgtttattctgctgtatttctgtgaaattgaaaacttggaagaagcttcaaagctcttggaggctttaaagttctttctgatgggtatgcattacagttaactgatgtttgcgatttacataattttgacttgtattaaatgttatatttacaaagttccaaatgaatcagtatttttaaaaataaaactatgaaagcattaaaatataggtgaattttaaaaaatgtatctgatcatttccctctcctgcttctaaggttataatgataaagtcatgcactgttcagact

SEQ ID NO: 16284 - DNA, 771 bp, Macaca Fascicularis
  misc_feature (1)...(771): n = A,T,C or G
agatcgagagcagaggagatgatgagaacgcgcnnnnagcctataaccaggggttgaagaagtgtccccactccacacccctgtggcttttgctctctcggctggaggagaagattgggcagctaactcgagcccgggccattttggaaaagtctcgtctgaagaacccaaagaaccctgggctgtggctggagtccgtgcggctggagtaccgtgcagggctgaagaacatcgcaaatacgctcatggccaaggcgctgcaggagtgccctaactctggtatcctgtggtctgaggccatcttcctcgaggcgaggccccagaggaggaccaagagcgtggatgccctgaagaagtgtgagcatgaccctcatgtgctcctggccgtggccaagctgttctggagtcagcggaagatcaccaaggccagggagtgnnnnnnnnnnnnnnngaagattgactcggacctgggggatgcctgggccttcttttacaagtttgagatgcagcacggcactgaggagcagcacgaggaggtgcggaagcgctgcgagagtgcagagccgcggcatggggagatgtggtgcgccgtgtccaaggacannnnnnnnnnnnagaagaagatcggggacatccttaggctggtggccggccgcatcaagaacaccttctgattgaccggtcgctcgccgtggccggtctccgtggggcagggttgggccgcacgtgggagggcctgtggaagggccctgagccgtgtcctcctcataa

SEQ ID NO: 16285 - DNA, 757 bp, Macaca Fascicularis
  misc_feature (1)...(757): n = A,T,C or G
cacagttgtaannnnnnnnnnnnnnnnnnnnnnnnnnnatacaaacatttgtatgacgtgaatagttgatggcatttttttgtcatgaaaaaaaaataatgtaaatcacagactnnnnnnnnngctcttatttttttcctaaatctctccagaaaaaaaatgcaagcgattaaattcaattattgacttattcacactttttatccatgacttctccaaatcannnnnnnnnnnnnnnnnnnacaatatctatggccacnnnnnnnnnnnnnnnnnnnnnccaattagaagaaaagaaatgtgaatattatattccgtgttttgagtgacaagtttcaaaaaataaaaacactgtatttttaaaagggaaatgcacttaaatgagaacagttattacaaaagttaagatttaaaaagaaaaagcaagagtttttattatgatgtaataccagtagnnnnnnnnnnnnnnnnnnnnnnnnnnnnnnatcaatgtaaatattttctttcaaagttgtaagttttcatatcatgtgctgtaaannnnnnnnnnnnnnnnnnnnaacgtaaacactggtgacataaaccattcattgctacgttgcttattgtgtttttatgctgttttatacttttttatgagttatgatagcagcaattaagttgtttgtattttgcttaactaaaacaaaaatgcttttatcttgctatagaataaacacatttcagtaaaaactgtggactgtattttgatgcaaca

SEQ ID NO: 16286 - DNA, 703 bp, Macaca Fascicularis
  misc_feature (1)...(703): n = A,T,C or G
tnnaacccacaccatgctccatgcacctggaagatgtgtcccacagatcattgcttttcttaatagtaaaatcccagaggatcagcatgctcttttggtaaagtatcaaggtttggttgtaaannnnnnnnnnnnnnnaaataagaagnnnnnnnnnnnnnnnnnnnnnnnnaataatgaattaggcaaagaacaagaagatgttgccaatactcgtaaagagcttcaannnnnnnnnnnnnnnnttaaagaccttgttctcaaatctaggaaatcatctgtgacagaagagtaatgatcttaatttacatttgtcatatagtaaacattttcccccaagattggaggtgagtggtcacacaaaagtagtcactatacagctcccctctcctcgcaaaaaccacctcatacacacacaattcagttaaaacagtagtgttgtgttaaatgtaaatcttaaaaagatgtgaatttttgtaaattgnnnnnnnnnnnnnnntttttttccaccttattttcacacaaatactatatgaaatttttcacataaacattattttcacataattttaaaaattacatatttcaggtttgttttctttccaaatgttgaatgaaaaacaaattttctgatccatttatccctggggaaggattcatttgttgtgagtgcccagtatacttaaatgtatactttaaatac

SEQ ID NO: 16287 - DNA, 1391 bp, Macaca Fascicularis
  misc_feature (1)...(1391): n = A,T,C or G
gggactcccactctcctccctctttccgccgagtttgtgactccgagatggacaaagtgtgtgctatttttggaggctcccgaggcattggcagggctgtggcccagttaatggcccggaaagnnnnnnnnnnnnnnnnnnnnnnnnnnnnnnnggaaggggccaaagccgccgccggtgacctcggcggagatcnnnnngcatttagctgtgatgttgctaaagaacatgatgttcaaaatacatttgaagagatggagaaacatttaggtcgagtaaatttcttggtaaatgcagctggtattaacagggatagtcttttagtaagaacaaaaactgaagatatggtatctcagcttcatactaacctcttgggttccatgctgacctgtaaagctgccatgagggctatgattcaacaacagggagggtctattgttaatgtaggaagcattgttggcttaannnnnnnnnnnnnnnngtccatttacagtgccagtaaaggaggattagttggattttcacgtgctcttgctaaagaggtagcaagaaagaaaattagagtgaatgtagttgcaccaggattcgtacacacagatatgacaaaagacttgaaagaagaacatttaaagaaaaaaattcctcttggaaggtttggagaaactattgaggtggcacatgcggttgtgtttcttttagaatcaccatatgttacagggcatgttctggtagtggatgggggattacaactcattttgtaatttatagattattcagttataggggtggttagcatcaggggcacactttggctacagattagacaattatgcctacatgggtaacatttgctaatcaaacttgctgatgctacaaatgttaatttctgtctttataaaaatatgtctgaaaagaacaatgtgtgacaagtttttttttttttggtctaagttacagcagtgttgttttgtttaaaaagccttcatgagatacaattcacataccatataaattacacatttaaaatatacaagnnnnnnnnnnnnnnnnnnnnnaatatatgtgcaaccatccccccagacaaattgtattttctaaagggtatgtatcacttaacttcggttaccttatagactgtagcaatcttagtatatagacattttgcaagtcatgtagacaagtattgatttatatattttgcctcaaaagtagaaaaattatattgtctaattatgatgaattattttcttgtatcaagctaaattttctaaaagttaagcttatgggctattgccaaaataagagtatttagaggacactgattgtcaatactttagcaggcccactaacgataaatatattccttttatctgtgcttgggtgatcagttt

SEQ ID NO: 16288 - DNA, 683 bp, Macaca Fascicularis
  misc_feature (1)...(683): n = A,T,C or G
aagttgtcacttatgggcgggtaccatacccagggatgagcaacccnnnnnnnnnnnnnnncctggagcgcggctaccgcatgccgcgccccgaaacctgcccgcnnnnnnnnnnnnnnnnnntcatcgccgagtgctggcgcagccggcccgaggagcggcccaccttcgagnnnnnnnnnnnnnnnnnnnnnnnnttnnacacggccaccgagcggcagtacgagctgcagccctagccagccgcgcccgcctgtgccccatgcccacctctgcgcggacgaccccgactcccgtgccagcccagactggccgcgaaggcgagggggtcggctgtgcccatttctcagacccggaagccannnnnnnnnnnnnnnnnnnnngagggtccccggacggactccttcaccgactgtgtgccctcggcgagttacgcggcctctctgtgccgcctcatttgtaaagagggctgtaatagtgacctcgaacggtcacccggagtactaagccccagtaaggtgttcaggactagtaagccactgacatcacgtaagcccccagtgctgggccctgaccgaggagtcgccgcctctggtcgcgtgcccgccgctgcgccctgctgggaccccgccctgccccgctgcagaagccagactgggtcccccggctccggcactgcgggg

SEQ ID NO: 16289 - DNA, 615 bp, Macaca Fascicularis
gccagctggtctatgatgggctgggcctgccctatgttgctgggtctgcccaccttgatattcctgccccccagcatcaccgagttcatctgctccaaggccagctgtgcagcttcagggacctcatactccacgaaggcaaaacccttgtgcttcatggtgacagagtcccaggacatgtcgatgctcttgatgggaccaaagggggcaaaggcctggcggatggtgtcctcccccagctcgtagtagatggagcccacgtagacacggcacatgatggccagcgcccgctgccgctgagccgccatctgcaggttggtgagctgctgctgctggtgcgcgatggtctgcttcaccagcacgctcttgatgctctgctccatggcgtacttcttggccttctgaagggcctcctgctgctcaggcgtcaggggaggcagccccagcttggcggctgtgctctgcccgttctccatcttgatggagtctgtgccctgtggcggtttccatttgtctcccgctgccaccactgccgccgccgccgccggctcggacccccctccttgctggccaatgacctggagagctatggtcgccgtcgccatcttgcgtccg

SEQ ID NO: 16290 - DNA, 792 bp, Macaca Fascicularis
  misc_feature (1)...(792): n = A,T,C or G
gattcactgggagccaattcctgccttgttaatatttgtgaggaaaagcgaaacaagtgatctggttttagcccagatgatgaaagtggatacggcacattttcacacacgtgagatcattatagcttgccccacaacaccgggtgtcggagaaagggagagagagacataagtggaagaaaaagccaagcatagtgagtgggaaaaagagtgagagcctgtgagggctgctgacgagcnnnnnnnnnnnnnnnnnnnnctcgtggggagatggaggcagagcccagggcaggggacagctgctggggcctttccttgcctgggagtctgtcccaggaagagcttccccactcccatcccccaaattggaaaaattgtatcgtcaagcctgtttggccctgaaattcttaagaatctggttaagaattaactcagtaatgtcaaaagtcaaaacctcctaggggttgtcctgggagtcaggttcatgggtacagaagatgaatctcagacatcgctcagcctgagctgtcattcnnnnnnnnnnnnnnnnnntgggtttctcttactcagttcctggagtgtaagcatttggatcatgtcacagattccctttttaccttttctgtctctctctttttttttaagtatcggtgcccacagcttactgagtattgagttttagagctttcgcttgatgtgcttgaccaagagacttcttttgtatccttttcttgtcctatgatgtaaataaaagcctcaatttatgtaaaaaaaaaaaaaaaaaaaaaaagg

SEQ ID NO: 16291 - DNA, 698 bp, Macaca Fascicularis
  misc_feature (1)...(698): n = A,T,C or G
acattcaagaacctccactttcaggctgtttgacgtcggaggccagcgatctgaacgcaagaagtggatccattnnnnnnnnnnnnnnnnnnnnnnnnttttctgtgtcgcgctcannnnnnnnnnccaggtgctccacgaagacgaaaccacgaaccgcatgcacgagtctctcatgctcttcgactccatctgtaacaacaagttcttcatcgatacctccatcattctcttcctcaacaagaaagatctatttggcgagaagatcaannnnnnnnnnnnnnnnnnctgctttcctgaatacacaggccccaatacctatgaagatgcagccgcctacatccaagcacaatttgaaagcaaaaaccgctcacccaacaaagaaatatattgtcacatgacttgtgccacagacacgaataatatccaggtgnnnnnnnnnnnnnnnnnnnnnnnnnnnnnnnnnnnnnnnnnccggggctgcggcttgtactgacctcttgtcctgtatagcaacctatttgactgcttcatggactctttgctgttgacgttgatctcctggtagcatgaccttttggcctttgtaagacacacagcctttctgtatcaagcnnnnnnnnnnnnnnnnaccccagagtgactgacggctgtgtatttctgtagaatgctgtagaatccggttttagttgagtctt

SEQ ID NO: 16292 - DNA, 713 bp, Macaca Fascicularis
  misc_feature (1)...(713): n = A,T,C or G
ccctcccgctgtccctgnncagcccccttgncccggtccacctgcgcttccgcaccttaccctccccttctccttcctcattgcctcctcccttcctgttccctcatctctgccttccctctgtgaggaggcaggagctagggagtgggagcctgtgaccccacgtctgacagccacagccgcctgtgcccacagcttccgcccacagacctccagggacaggagcaaattgcaccacagttccccgcctggccctccccaggtggctcggtagctcatgctgtcctgtgacagcccctgccccagagcagccccactaagtgcatgtggctcctgggccacccatagccagggcagcctgctggagccacagggccagggccacgcagatggaggcctctaggagccacctgcaatccctctccactcattcaaccagtggcacagtgtccctgtgcccacactgagccagcaagtcctgctgtccacacccacaagctccctggagggacaggacccacctccatccctcggaaggccttcctggagtcccaccttggccacccccgcacccagcttggggcttgtgttgagcctttgggttgggccagggtccaggaggtggtggggtcgcaggtggcttgttagcaccgccagggaggacgcttcctctgcgccggcgcagacccggtgcggggctcacgctgcacaag

SEQ ID NO: 16293 - DNA, 727 bp, Macaca Fascicularis
  misc_feature (1)...(727): n = A,T,C or G
cagaaaggaggagagcagcccannnnnnngggggcacttctgccccatcaaacgaaaagccaacagcaccaagagggacagaggaactttgctcaaggcacagctccgtcaccagtcccttgacagtcaatctgaaaatgccaccatcgatctaaattctgttctagagcgagaattcagtgtccagagtttnnnnnnnnnnnnnnnnnnggagtgtttttatgaaacagagagccatggaaannnnnnnnnnnnnnnnnnnnnnnnnnnnnnnnnnnnnnnnnnnnnnnnnnnnnnnnngtggtaaaaagtggaaattgcaaaaaaactattcattcctgggttttgtgcagtatacattttcccacgaaatggttgtaaagatttaagttattttaatttattgtggatcagaaacctagaagaaactggtcagaatctgtaaattacttagtttatatccactttgagcaggtatcaaatgatttagaatccttaaaattgccttctaattattttaagttatgtggaaaaagtaaggctggggaagttgtgattaatagttttcaaagggtcattttttaaaatcctctgggcattttctttcagctgtcagtttttgctttatttaaagcatatttaagttattttaatgtggtttaggggcaaaatgtgcagatacttcatttttgtaagattgtaatagatgctgtttatactaaacctg

SEQ ID NO: 16294 - DNA, 738 bp, Macaca Fascicularis
  misc_feature (1)...(738): n = A,T,C or G
gaatgggctacgcccnnnnnnnnnnnnnnnnnnnnnnnnnannnnnnnnnncaggagaaggaggtcaagcaggggaagctgctcgctgatctggccaagcgtctgggcctccactatgtggtctatagcggcctacagaacatcaagaagctgacagcagggnnnnnnnnnnnnnnnnnnnnnnnnnnnnnnnnnnnnnnnnaggaatatttccgagacatcggcgttcnnnnnnnnnnnnnnnggctgccctgctatttcgagaacttcctctcccacttcttgccccagaaagccccagatggaaannnnnnnnnnnnnnnnnnnnnnnnnnnnnnnnnnnnnnnnnnnggcatgtctgtgtccgacctgggtcccgtggnnnnnnnnnnnnnnnnnnnnnnnnnnnnnnncannnnnnnnnnnnnnnnnnnnnntacttgtaggcacacggctgaggagtacgctgccctgctcaccaagcacacccacaaagtcgtgcacgatgccaagatgactcctgaggactatgaaaagcttggctttcccggggcccgggacctggccaacatgttnnnnnnnnnnnnnnnnnnnnnnnnnnnnnnnnnnnnnnnnnnnnnnnnnnnnnnnnnnnnnnnnnnnnnnnnnnnncagtnnnnnnnnnnnnnnaaaggggacttcgccctgctgtgacctgcccatcttgcagccccttttgggggttggggacaccagagg

SEQ ID NO: 16295 - DNA, 721 bp, Macaca Fascicularis
  misc_feature (1)...(721): n = A,T,C or G
accagctgnnnnnggtttaagcttgagcctttacgtgatctttaaaccatggtagcaaaataagcctcactcaaacatagctgacttcctattgnnnnnnnnnnnnnnnnnnnnnnnnctacatacacattttatgcttaaaaagttaacatgatacaaaactgtgattagaaaatatctggtctggatgtgattagtaagggtacaagataatgctctaagactgcctaatgctttttgtttgnnnnnnnnnnnnnnngtgtggttatgtgctatgagggtagcaggtatgtctttgtcttaatgatctaaggctggtgtagaaacaaggggcctaatgagaaccagtcgtcatggaagtcagtcgcgggnnnnnnnnnnnnngaaagggaannnnnnnnnnnnnnnnnnnnnnnnnnnnnnnnnnnnnnnnnnnnnnnntcttagaggactgtgaagtacaggcacagcccgactgcagggacggacacacccatcatttgcccatgggagcatctgtaggaccatctctcttccacttctcttcccctcccctcctccatctggatagatggactgtcctacagcaatcatttccatctgtcaccctcttccctctcctttcatagtactcactatcttgggtaacacatttatacaggacagtggtacagaagtacatctttgccctgagaagacagcaaatatttaaactttaagt

SEQ ID NO: 16296 - DNA, 1322 bp, Macaca Fascicularis
  misc_feature (1)...(1322): n = A,T,C or G
ttaaaaatggaaaaataacatccatagtgaaagatagctctgcannnnnnnnnnnnnnnnnnnnnnnnnnnnnnnnnnnnnnnatcaatggacagaatgtcattggattgaaggactctcaaattgcagacatacnnnnnnnnnnnnngactgtagttactattacaatcatgcctgcttttatctttgaacatattattaagcggatnnnnnnnnnnnnnnnnnnnnncctaatggaccacaccattcctgaggtttaaaattcacggcaccatggaaatgtagctgaacgtctccagtttccttctttggcaacttctgtannnnnnnnnnnnnnnnnnnnnnnnnccagcaagcatatgctgcatgaggacttttctatcttacattatggctgggaatcttactattttcatctgataccttgttcagatttcaaaatagttgtagccttatcctggttttacagatgtgaaactttcaagagatttactgactttcctagaatagtttctctactggaaacctgatgcttttataagccattgtgattaggatgactgatacaggcttagctttgtgtgaaaccagtcacctttctcctaggtaatgagtagtgctgttcatattactttagttctatagcatatttgcatttttaacatgctaccatagtacatttagaatgattgcctttgatttttttaaaaaattctgtgnnnnnngtaaaatgccaataagaacactgnnnnnnnnnnnnnnnngcattaaacagtgtatgtaggttgcaagagattgtgatgattcttaaattttaactaccttcatttaatatgcttaaactgtcgccttaactatgttaagcatctagactaaaagccaaaatataattattgctgcctttctaaaacccaaaatgtagatctctattaacctgaaatgtacactagcccagaacagtttaatggtacttactgagctatagcatagctgcttagttgtttttgagattttttagtcaatgcatnnnnnnnnnnnnnnnnnnnnnnnnnnnnnnnnnnnnnnnnnnnnagaagtgaatcactatatatttaatgtaaaagttattacactaaacaggataaacttttgactcctcttttgttcatttgtggattaagtnnnnnnnnnnttaattttggcatttgactcttaagattatgtaacctagctactttgggatggtcttagaatatttttctggtaacttgttccatttcctgnnnnnnnnnnaacaaaatgatagtgacattttatcctgacttttttcttctttttggttt

SEQ ID NO: 16297 - DNA, 525 bp, Macaca Fascicularis
  misc_feature (1)...(525): n = A,T,C or G
cactgccctaaccaagtgtccacattctaaatgtatagtgtccatccctcatgtannnnnnnnnnnnnnnccaaagtgagactttccttttaattggagaagggtatagaggtagtccannnnnnnnnnnnnnnnnnnnnnnnnnnnnnnnnnttgggaccacctgttcttgccccactaccctctagtaggggccaaagtaaaggctggttggtgggtgtctggattgaggatgtggcagggactggtcctcccacctccctctggccaaagatgggctttgcccgctgtgtgcctgtcaccacccaccagcagtcatgccctgggcttcccaaatggagaggtagcaggcaacgtttttaaaaagaaagaaaacaggaaactgtattgtgttagagggaggcgggaggggagatgaggaaacggtttggattttgtgtgtgggagggtatttttttgggggtagttgtctgtaactttcctaagtgctttttttccttttctttttaaagtaagtgcaggctg

SEQ ID NO: 16298 - DNA, 699 bp, Macaca Fascicularis
  misc_feature (1)...(699): n = A,T,C or G
ggaggctttnnnnncannnnnctggctggtgggtagtgccggggtggggtgggcacaggccctcaaggagccccttttgccttgtagtcttacaccttgccctgcctgggctttggtgcagactgggtgtggatttgagctctatgatctatgtttgctgcctggctcctggatggctctgcaggcaggtgctggccaaggacatcatctaggcggggggagaggctgggctgaccagctgtgaccaaaactcccttatgccccatcctgccccctccacttcctgccctctgttccatcttccccttccccaaaggccgtagcctttattccaggcccagggatgtaggagggggaaggaggaaacaggaggcccagagagggcaaagggcctacctcgggcgcgaaccatgccccagactattatctcagggctttctgggcactgcactttggcctggcccacctgcccnnnnnnnnnnnnnnnnnggtgaggggtggctcatgagggcttttataccctttgtttgctaatgtttaattttgcatcataatttctacattgtccctgagtgtcaaaactataatttattccatttctgtgtcagtgccaagnnnnnnnnnnnnnnngcctgcccccttgcccaagaggccttgccagcctgtgtgcttatgggaacaccttgtacctgagctaca

SEQ ID NO: 16299 - DNA, 740 bp, Macaca Fascicularis
atacagtcgtcaaaagattcctttttatcagccccacactgtgtaagtggagagggcattgtgttccgtgtctgtccagttcacagcgtctctgccccttagcgtgttttgtgacaatctccctgggtgaggagtgggtgcacccagcctcaaggccggtgggttgctcggggccttccatgtgagttctagtgttcagctgatgccagggaatagaattagagaaacctctgacccaccgggtgccagggaccagtggaggtggatggcaggtccgactcgaccatgacttttagttgtgagggtgtgttggctttttcagtctcgtgtgaaaatcctcctgtctctggcagcaccgtctgcactttcttgtttactgtctgaagggacgagtaccaagcctcaagaacacttcttttggccacagcataagctaatggtgtgtaaggaactgatgggccattaaacatgaactgaacggttaaaagcacagtctatggaacgctaatggagtcagcccctaaagctgtttgctttttcaggctttgggttacatgcttttaatttgattttagaatctggacactttctatgaatgtaattcggccaagaaacgtgttgctaagatgcaatcctcagtgttctctgtatgtaaatctgtgtatacaccacacgttacaactgcatgagcttcctctcgcaccgagaccagccggaactgagcatgagacgctgtcaaa

SEQ ID NO: 16300 - DNA, 734 bp, Macaca Fascicularis
  misc_feature (1)...(734): n = A,T,C or G
gcagagccacagtcagnnngcccacacgccgccaagcaaacncatcttgcttttcacatnnctcctacagccttaatggctgctcgctgccatatgtgacaaatcaccaccaccnnnnnnnnnnnnnnnnnnnnnnnnnnnnnnnnnnnnnnnnnnnnccccaggaaggccttccagatctggctccagggccaccnnnnnnnnnnnnnnnnnnnnnnnnnnnnnnnnnnnnnnnctgtgaggctccttttgacgtacttttgacatcgggcaggtttgggaagaaacaaagccatgcctgctcctgcctctctcccaacatgtttcnnnnnnnnnnnnnnncctgtgtgtgttttccctttgccttgtttcctgccttatatcttgtatttcgacttactacnnnnnnnnnnnnnnnnncttaatttaggtcaagtataaaatttgtatgannnnnnnnnnnnnnnaaggtttttttctcatttaatctgatgtggcattttcgtcatctgaagcatgagtgacaagttgggaatgatgtgatttagaatgcagtattggccaagtcaaannnnnnnnnnnnnnnnnnnnnnnnnnaaaaaccgggaacaggggcccaagcacgtccagtcctcttccctctgctggaacctttggggacactcaaggttacagtttgacactgatctggtccatgggggctgcccagagaaagcactgcttctgtatgtctg

SEQ ID NO: 16301 - DNA, 804 bp, Macaca Fascicularis
  misc_feature (1)...(804): n = A,T,C or G
gatatgaaaattagattatttacttcagatcttcaagataaaaatgaatataaggttttagagggccatacagatttcattaatggtttggtgtttgatcccaaagaaggccaagaaattgcaagtgtgagtgacgatcacacctgtaggattnnnnnnnnnnnnnnnnnnnnnnnnnnnnnnnnnnnnnnnnnnnnnnnnnnnnnnnnnnnnnnnnnnnnnnnnnnnnnnnnttttaagctaatggttgcagagaagaatggaacaatccgattttatgatcttttggcccaacaggctattttatctcttgaatcagaacannnnnnnttaatgtcagcacactggtgcttaaaaaacaccttcaaagttggagccgttgcaggaaatgattggttaatttgggatattactcggtccagttatcctcaaaataagagacctgttcacatggatcgagcctgcttattcaggtggtccacaattagtgaaaatctgtttgcaannnnnnnnnnnnnnnnnnnnnnnnnnnnnnnnnnnnnnnnnnnnnnnnnnnnnnnnnnnnngcccatcctcatgggttctgtagccgttggatctggcctgtcctggcatcgaactctccctctgtgtgtaattggaggagaccacaagctgttgttttgggtgactgaagtataaagttttctttgtaccttagattcacaaactttgtatttttagtacatattttgaagaatttctatagtacatattttgaagaatttttatatcaaatataccatatactttagaaaatgtctt

SEQ ID NO: 16302 - DNA, 677 bp, Macaca Fascicularis
cttcaggggagctggttctttcagattggatttgtcctgtatccccccagtggaggtcctgcatgggatctggtggatcatgaaaatattttgtttcttaccatatgcttttgttggcattatgcaataaccattgtcatcgttggaatgaattatgctttcatcacctggttggttaaatctagacttaagagactctgctcctcagaagttggacttctgaaaaatgctgaacgagaacaagaatcagaagaagaaatgtgactttgatgagcttccagtttttctagagaaaccttttctttttttacattgtctttgttcttggttttgtttcttgatcttttagttggagaacagctggctaaggatgactctcagtgtactgtttgtatttccaatttggtcgaagtatttgaatttaaatattttatttttagctttgaaaatgttttgggtgatactttcattttgcacatcatgcatatcatggtattcaggggctagagtgacttttttccagattatctaaagttggatgcccacactatgaaaaaaaaaattttattttatttgccttatagatatgctcaaggttactgagcttactactatttgtaactccttgaccatggaattacacttgtttatcttgttgctgcaatgagaaataaatg

SEQ ID NO: 16303 - DNA, 773 bp, Macaca Fascicularis
  misc_feature (1)...(773): n = A,T,C or G
gcccagtgncgctgggcagagccccagnnnnnnnnnatccaggcctggcagtccctgcctgacttcggcatctcttatgtcatggtcaggttcaagggcagtagaaagatgagatcctgggcatcgccaacaacccgactgatccgcatcgacttggctgtgggcgacgtggtcaagacctggcgtttcagnnncatgcgccagtggaatgtcaactgggacatcnnnnaggtggccatcgagtttgatgagcacatcaatgtggccttcagctgcgtgtctgccagctgccgaatcgtacacgagtacatcgggggttacattttcctgtcgacgcgggagcgggcccgtggggaggagctggatgaagacctcttcctacagctcaccgggggccatgaggccttctgagggctgtctgactgcccctgccctgctcaccacctgccacggcaactcccaagcccacacccacaggggctcactgccccacacccgctccaggcaggcacccagctgggcatttcacccgcggtcactgacttcgtgcaggccaaggacctggcagggccagacgccgtcatcacccaggccagggatgggggtgggggtccctgagctcctgcggtacccccttcccttgtccgagtggctaaggctgatacccctgagctatctgcagtcccctagcacacaaggaagaccggatgtagctacaggatgatgaaacatggtctcaaactggagtttctttcttgttactttttaaaatt

SEQ ID NO: 16304 - DNA, 772 bp, Macaca Fascicularis
  misc_feature (1)...(772): n = A,T,C or G
aactggcttgaaggaattccgagtaattcaagtgtcctaaatctaattaaattgcacagatacacacacctcctcagtctcagtacatcccaggctgtactttccagaaaggtaagtaccattataattacatctactttaaggcaatgcttactatgtgcatattcatctctctaacaattcttcaaactgtaggcttgagttttgtggggttttttgttttgttttgttttgttttgttttttccctcattctggagtgaaaggaataaaattcatgacgtgagattttacaaaagctgagtggaagaagccaaaagttataaatcctccatcgtggtcctagttaagtacattgcttctaggctctagacagaattacaagatattcacagtttttctcattttcccnnnnnnnnnnnnnnnnnnnnnnnnnnnnnnnnnnnnnnnccacacttatcactgaaaattttcccacccagccccattaaaaaagttaaagtgtgagagattttatttcaacactgacaagctagttactacagggcctacaaagagtatcgtgctcgaacacgcagggaccctggttcaataccttttaatggtatatgggagctgagcagaaaccattcatctgtggcatgccctttctgtaatcggctcaactggcagcgcataaatacttgggaagaaaaacaagcaattattgtctaaaaagataacatgatagtcatgcaagtaaatttttctggtgttcagtcttctctatggtg

SEQ ID NO: 16305 - DNA, 626 bp, Macaca Fascicularis
gagcaccagcaggacctagggcaaggcatagcagtgcagtgggaagggacagaggagatcttagagttttgaggaaaatctgggacttgaaacctggattctaacagaccaactgcatgtgtgtctgtaggtctcagtttccacattcatacagtgagagtgttaagtcaggtagctggagactccccgtcacctctgacacttttagaggtgatatgatacagcccccaaccaaaccaggctttgtgggggggtgagagaatatagacataagtggcaggattcagatggaagcttcgcaaggctgggggccgaggaccacccacttctctttcccagtcctatttctgggctccccaggggggcaaggggtggtggaggcggtgcccatgctgggctgagcctgcagtttttgtgagctctgggcttgtctccatggaaacaggggtgccttcttagtgagctcatttcacacaaatcaaggggatatgcatgggggagttgtgagtgagctcagctccttcaggcctggcccctcccagaacagagtgaaacccctgccctggacccctgctcccttcgacccttgagggccatcaatagaagagcccacccttcattctgca

SEQ ID NO: 16306 - DNA, 671 bp, Macaca Fascicularis
  misc_feature (1)...(671): n = A,T,C or G
cccggctgcnnnagcccatcgcccaggaccagcccaaaatnctaagcaagaacgaacccatcccgcccagcgccctggtcaagcccaatgccaacgacgcccaggtcctcatgtggcggcccaagtacgggcagccgctggtggtaatcccgcccaagcaccggtgacagccagggccacccgctaggttagactcgcaaataataataccgctgaaaacaaaactcagactcactcttcagtcattcagcaagatacgaccattctaccctctccagcgggcggatctcactgtgctgaggccccccgggaaggcctccccggcgctcagcacctgcttcctttcagggaggggggagacctaagcgggacagacagaccccacgtgcgccctcagggtcacctctggtctccttgcctctccttttgctcacagcttcagtcactcacccgtaacagattccctgaaacactgctttttccgttttttaaaaaaactcctcttatgggggttcaggggcaggaagaggaggagccgattaggagggaagctccggccccccatcaaagagacagatccgcactgctgccgatttgtggcgctggccggccttccctccccgggtccccctgccctctgtcatgcggccttatgtagacttgctttgcca

SEQ ID NO: 16307 - DNA, 772 bp, Macaca Fascicularis
  misc_feature (1)...(772): n = A,T,C or G
agcagcagggtgaggcagccctcagcgatgcccgctgcaagctggcggagctggagggcgccnngcagaggccaagcannnnnnnnnnnnnnnnnnnnnggagtaccaggaggtgatgaactccaagctgggcctgnnnnnnnnnannnnnnnnnnnnnnnnnnnnnnnnagggcgaggagcagaggctatgtgaaggcgttggggctgtgaatgtctgtgtcagcagctcccggggtggggtcgtgtgcggggacctctgcgtgtcaggctcccggccagtgactggcagtgtctgcagcgctccgtgcaacgggaacgtggcggtgagcaccggcttgtgtgcgccctgtggccagttgaacaccacctgcggagtgggttcctgcggcgtgggctcctgtggtatcagttccttgggtgtggggtcttgcnnnnnnnnnnnnnnnnnnnnntaggcaccccaactcaagtcccaggccccaggcatctttcctgccctgccttgctcggcccatccagtccaggcgcctggaacaagtgctcagctacttctcctgcactttgaaagacccctcccactcctggcttcgcatttctctgtgtgatcccctactnnnnnnnnnnnnnnnnccacaatgggaaaggctaccctagaaagaagtcccctggcagccacaggaaggggcctcaggagcaggaagggccaggaccagaaccttgcccatggccactgccttcctgcctctccccttcttcctctgcccttgatc

SEQ ID NO: 16308 - DNA, 754 bp, Macaca Fascicularis
  misc_feature (1)...(754): n = A,T,C or G
accaaactgcttggctnnnngtaaaaaccggttttgtatgtcaaggaggagtttaaggcctttccgaccaccttgtgttcccctttnnnnngcagccatgtatcacgtggagttgctcctaaccacacctcacgtgcccctgagccctatttcctgatttcttctgggctggacttccctattctccaccagcagctccagtatcccaaactttctagtcctgctgatcctcccagcaacggggtggaaactggagggcagtgtctggtctgttttctaagaaacttatgaattctattatctttacaaatataagatgagaaaattttttcaatattttttattaatctttttataaaatgaaaagaaactcatgtgatcgattaaggaaggtggttatggctgggtggttcatggggtttttttgtttttttttttctttcttgtctttaaccttaagctgtttaagttgaagcattctcagatgtttggggggaaacatcctcttaaaatgggtccttgtgcttgccttctggggaggcggtcctgagcaggtgaatcataaggcatttatgcatatgttatatgcggactgcacccacctctccccccagcctttgcctcttgggttgttgtgctgctttccccttactttgctacatttctatagttaagttggttttacttgaatgattcatgtttagggggaaaatgaaaatctcccttaaaatttgtttcaactcctactgcaaat

SEQ ID NO: 16309 - DNA, 728 bp, Macaca Fascicularis
  misc_feature (1)...(728): n = A,T,C or G
ggagataccgcacannnntnnngatctccactcaatgacgtcacgttagtttgtctttggttnnnnnnnnnnnnnnngggagtatttttgtatcacaaagattagagaggactatacatcagggcttgatcttgatttattgttttgttggttttctagacttcagaacatgctggattaaatgtcagtaatgcacattaaactttaaagtatgtcttgtttatagccaatacagtgtgaatagcaccaaaatatgaagaaactgttcttccaannnnnnnnnnnnnnnnnnnnnnnnnnnnnnnnncttctcgaatcattgaagaaactggagttctgacattcatcttcattgttttacttttgtcttcctcactagtgtaaacaaaaatttcaagcagcattcatgccaaacttctacccattcttcagcgtctcgctgtagagtaatcagtgatttttattcgtagtctaacttgnnnnnnnnnnnnnnnnnnnnnnnnnnnnnnnnnnnnnnnnnnnnngagcttggcaaaaaaaattagcaaaagattctataaggattaattggctatannnnnnnnnnnnnnnngagtgtttacaataaagaatatttacaataaagagtttattattatttgtaaattgtgtgcaacaaacatatcctttatctctgtaaaatttatacacaaaaaaattaaaagattctggaagaattaattggctgt

SEQ ID NO: 16310 - DNA, 729 bp, Macaca Fascicularis
  misc_feature (1)...(729): n = A,T,C or G
accagcacaggggcnnnnnacgcaaccaggctccaaatatacacggtttcnnnaaaggccgccatgcagagctgtgcttcctggacctgattcccttttggaagctggatggccagcaatacagggttacctgcttcacctcctggagcccctgctttagctgcgcccaggaaatggctaaattcatttcaaataacgaacacgtgagcttgtgcatcttcgctgcccgcatctatgatgatcaaggaagatatcaggaggggctgcgcaccttgcacagggannnnnnnnaaattnnnnnnnnnnnnnnnnnnnaatttgagtactgctgggacacctttgtggaccgccagggacgtcccttccagccctgggatggactagatgagcacagccaagccctgagtgagaggcttcgggccattctccagaatcagggaaactgaaggatgggcctcagtctccaaggaaggcagagacctgggttgannnnnnnnnnnnnnnnnnnnnttccaagaaatgcaaacaggccgttcaccaccatctccagccgctcacagacaccagcgaagcaaggcgctcctgaccaagtagattttttaaaaattagagtgaattacttttaatcaaaaatttatgttacgtttcaagaatatagtactaagattatactcaatacactcagaaaagtttcaaacctactaatccagtgacaatttgaattggttt

SEQ ID NO: 16311 - DNA, 759 bp, Macaca Fascicularis
  misc_feature (1)...(759): n = A,T,C or G
tagttttctactgaaatacaaaacatttcattaactgctataannnnnnnnnnnnnnnnnnnnnnnnnnnnnnnnnngaggttctcacttttatttgaaggaggtggtaagttaattttctatgtttcttgcattttgaagnnnnnnnnnnnnnnnnnnnnnnnccacttcaaaaaatagttgtgtttactttctccacggtatttcagtatctgtcatacattaaaaatacttgtcactgttttaagatcttgactcttcatttgtttcagaatatctcttctactttattctgacaactctttgctttatagcatttnnnnnnnnnnnnnnnataatggtaacatttccatgcttgtgacagcatttttaaataatatattttatcaacctttccatcatgtctgttttccggttttttggttttttgttttttgtcnnnnnnnntttatttnnnnnnnnnnnnnnnnnnnnnnnnnnnnnnnnnnnnnnnnnnnnnnnnnnnaactacattgtcatttgtgacatctatattaaatacggttttcacattagttatttgtcacttacttggaaaatgatgctgttaggtcctggtattaaaaatctagaaaagatttgttggtttatatgctgaaatgtctttatttataattaattttaactaatatttacttcattttggatcctgtttaacaaagatacctgagacacccatttgttttaatgaaatctttacggatatggaaatgttgccct

SEQ ID NO: 16312 - DNA, 683 bp, Macaca Fascicularis
  misc_feature (1)...(683): n = A,T,C or G
gcatnnnnnnngaannnnnccttttaaaatgtcagatttannnnnnnnnnnnnnnnnnnnnnnnnnnnnacatcccttttcacatttattggtttagtactttgatcttcttcaaccnnnnnnnnnnnnnnnnnnacnntggtgaattatccttcaacgtttcagttaactgagactttgagaacagtactcttaataggagggaaactatccttaaacgcctgtggggttttttgttttgggttcttttcctcttaaagacctcccagaatgagggtgggaacagctgaggtttgttttgtgtgttgtatattagttaacccttatggaattcacagtgtgacatcaggaattgatcacacacttcttgattttcataaattaaagctaagatttaagctttattagagtatcagaaatactacttatcctgaataaattttttaaaaatcagacattcctaactctccctgtttaacaattacctttttttcagtcactactttgatgaactgaagttagctccatgggttacattgtccgttcaaggctttgcagacagccctgtttcttggggaaaaaatgaacatggtttttggaaaggaggagaacatttatataactttgtgatttttaataatcaggactattggcttcagatggctgttggggcgaatgatcac

SEQ ID NO: 16313 - DNA, 709 bp, Macaca Fascicularis
  misc_feature (1)...(709): n = A,T,C or G
cggggaccccaagcagtnnnnnnnnnnctaggcacgccgttnnngagcggcgcggaggggcagctggagcgcgtggcgcgcatnnacannnnnnnnnnnnnnnatcnnnnnnnnnnnnnnnnnnnnnnnnnnnnnnnggagctggcggggccggtgcgccgcagccacctggtgcgtcccatctgcctgcccgagcctgtgccgcgacccccagacggtgcgcgctgcgtcatcaccggctggggctcggtgcgcgaaggaggctccatggcgcggcagctgcagaaggcggccgtgcgcctcctcagcgagcagacctgccgccgcnnnnnnnnnnnnnnnnnnnnnnnccgcatgctgtgtgccggcttcccgcagggcggcgtggacagctgctcgggtgacgctgggggacccctggcctnnnnnnnnnnnnnnnnnnnnnnnnnnnnnnnnnnnnnnnnnnnntggggctatggctgcggccggccccacttcccaggtgtctatacccgggtggcagctgtgagaggctggataggacagcacatccaggannnnnnnncacgtgattgcccaggccgggactctaggcgaaagcagcaggagcagcaggccacccaacaccccacctcactgtaccctacccaaggacgggagtgggggggggggggtgctgtgggtcatggggatgcattttggtagcacc

SEQ ID NO: 16314 - DNA, 709 bp, Macaca Fascicularis
  misc_feature (1)...(709): n = A,T,C or G
agacaagagttcacagatgttagtgnnnnagggttcacttcacacacatnntccccgtccctggcttaatgagtatatccttcctcccaaccccaacatgattctgagagagtcatttatttattgggaatggctgggcctcaggggttgaggtgcctagaccannnnnnngtctctactcctgtctcctctttcttttctgcctcagcctcagagcccctcccagtggagacactcaccnnnnnnnnnnnnnnnnnnnnnnnnntccatttttgggattgggcttgaataggtgaactcttgaggattcagcctgcaatcacctctgtgagaaagtgaattaactgcatgatagtccctagggcagtgagtgagaacagaagagagactggctgaggagagagcaggtaaaagccctgcagtcatggctctctgcttgggtgattttatggccctttgtatagactgtctacttggatatggccaaaatgttctgttccttatctttggcttttttaaaagttataaataagacannnnnnnnnnnnnnnnatctttttttttcttataaactgtcatnnnnnnnnnnnnnnnnnnttctcattactttatctctctcactccttcttgtactcnnnnnnnatactnnnnnnnnnnnnnnnnnnntgtcccttgaggaaatacacattttgtgtgtatgttcattcct

SEQ ID NO: 16315 - DNA, 698 bp, Macaca Fascicularis
taaaacagaatggtatttctacagaatttacatatcagactaaagatgctgctacaggaactgcttctataattgtcaataatggaggccagaatatcattgtcatagtggctggagcaaatttacttttgaatacggaggacctgagggcagcagccaatgtcattagtagagccaaagtcatggtctgccagctcgaaataactccagcaacttctttggaagccctaacaatggcccgcaggagtggagtgaaaacattgttcaatccagcccctgccattgctgacctggatccccagttctacaccctctcagatgtgttctgctgcaatgaaagtgaggctgagattttaactggcctcacagtgaacagcgctgcagatgctggggaggctgcattagtgctcttgagaaggggctgccaggtggtaatcattaccttaggggctgagggatgtgtggtgctgtcgcagacagaacctgaaccaaagcacattcccacagagaaagtcaaggctgtggataccacgggtgctggtgacagctttgtgggagctttggccttctacctggcttactatccaaatttgtccttggaagacatgctcaagagatccaatttcattgcagcagtcagcgtccaggctgcaggaacacagtcatcttacccttacaaaaaagaccttccgcttact

SEQ ID NO: 16316 - DNA, 771 bp, Macaca Fascicularis
  misc_feature (1)...(771): n = A,T,C or G
gcaaaaatggttctgtgcacttggatgtgaaatgctgtccagttttattttttttatgttgttatccttggatgtacaaaaaattcagaatatgatctctgtagatattctgttttattttggtcatctttagaagttatcaggaatgtgtttaaaacaagaagagaacttttctaaggaatgatacatagaaaagatccttgttttattttaaaatgagttgtaaagcttgtgtttnnnnnnnnnnnnnnnnnnnnnnnnnnnnntaatgcaaatggacacattttttatgtcagaaacacacacacacacacacacacacacacacgcacacacgaaaaacaaagaaaaaaatgcttgagctttttctaacctccccttgcagtctgttgtgtgagcagcctgtttatttctctaatattatgtcagtttattctctttaatggactgtaaaaaaatgtaatcacaagagtgccaaatatcttgaaatgccaaaaggcattttagtttcttttctctgtgctctgagtccacgtacaggaatgcttggagtgtcttttctgttatttatagggattctcttaaggcacaccagctgcctgttttgcatggtatttgcaaaaatgcctcttgcgtgaggaaatcttttaccattttttgtttgcaactttggacctcaagaggtttcccttcccttccccgttccctcttttcttaattcaatattctgtatgttgcaccttgaaccagcacacagggctattctccaat

SEQ ID NO: 16317 - DNA, 730 bp, Macaca Fascicularis
  misc_feature (1)...(730): n = A,T,C or G
cagctccaggcatnnnnnnnnngcnnnantggccttgcatccaaggtcnnnnngccccccnnnnnntgctatgggatgagcccctcaggctccttggcagacaagaggaagaacgccccatggagcaggcggcgcccagtggttgtggaaccnnnnnnnnnnnnnnnnnggtatctgttctgtggggacacggtggagatcctagaaggcaaggatgccggaaagcagnnnnnnnnnnnnnnnnnnnnnnnnnnnnnnnnnnnnnnnnnnnnnnnnnngctgaacacatattaccgctacatnnnnnnnnncgtggattcccgaggaaccatgatccctagtgaagcccccttgctccaccgccaggtcaaacttgtggatcctatggacaggaaacccactgagattgagtggagatttactgaagcaggagagcgggtacgagtctccacacgatcggggagaattatccctaaacccgaatttcccagagctgatggcatcgtccctgaaacatggattgatggccccaaagacacatcagtggaagatgctttagaaagaacctacgtgccccgtctaaagacactacaggaggaggtgatggaggccatggggatcaaggagactcggaaatacaagaaggtctattggtattgagcccagggacagcagctcctccccaacttctgtcccagccttgaaggctgaggcacctttttcagagcca

SEQ ID NO: 16318 - DNA, 504 bp, Macaca Fascicularis
caggtgcagcagatccagggggtcattggtggcttggaggcccagctgagtgagctaggatgcgagatggagggtcagtaccaggagtacaagatggtgcttgacataaagacgggggtggagcaggagattgccacctaccgcagcctgctggagggccaggatgccaagatggatgacattggcatcagggaagcatgtttcggaggtggcggtagcagcagcaatttccgcatcaatgtagaggagtcagtggatggaaaggaggtttgttcccgcaagagagaaataagaatgcccattgcaggagaaacatcccttcccactccccactctcatcaggccaagcggaggactggccagggggcgtgaacgtgcaaactccagtccctgccttcagagagaggaaaagggtccgtcggtcttttatttcagggatgggcatgcgctctgttccccctctacctctccctgccttctttagagcaaggaggtgcagaagca

SEQ ID NO: 16319 - DNA, 646 bp, Macaca Fascicularis
  misc_feature (1)...(646): n = A,T,C or G
cctcccctccctagcccccctcgggcacaagaagcacaagcaccgagccaaggagagccagcagggctgccggggcctacaggcaccgctggcctcgggcggccccatcctggggcgggagcacctgcgggagctgcccgccgtggtggtatatgagagccaggccgggcagccggtccagagacatgagcaccaccaccaccacgaacatcaccaccattaccaccacttctaccagacatagagcccctccccagggccccaccctgccgtatgaaggaccccacccccgacaccccaaggcattattattctattaattattgttattatgacgattattgttattaataattattgttactccactaatatttagctagccttcatgtagaagatctatggaaacacagaactaaacttttatttatatgttgtggggactgcataactagcccaggaaatgactctggtttggagtggcctgtaatgggcagaggctccctggaggctcaggagctgcagcatctgtgcggatcagcccacacccttcccagagccggggagccctcagccccaactctgccccaccccagcctcttccaggagnnnnnnnnnnnnnnncccagcttccagagaccctcga

SEQ ID NO: 16320 - DNA, 712 bp, Macaca Fascicularis
  misc_feature (1)...(712): n = A,T,C or G
cagccagaggnnnnngagtcaaacacaacgcatgggatagaattatttgaagatnnnnnnnnnnnnnnnnnnnnnnnnnnnnnnnnnnnnnnnnccaaagagattgaacnnnnnnnnnnnnnnnactgtgaaactttcgggatggtggtgaaaatgctgattgaaaaannnnnnnnnnnngaaaagtctatacagtttgcattgaggcaaaatttacatgaannnnnnnnnnnnnnnnnnnnnnnnnnnnnnnnnnnnnnnnnnnnnnnnnnnnnnnnnnnnnnnnnnnnnnnnnnnnnnttttagatttttnnnnnnnnnnnnnnnaaaaaaaacagcttcnnnnnnnnnnnnnnnnnnnnnnnnnnnnnnncttnnnnnntggaatttttgtgatnnnnnnnnnnnnnnnatgatagttgaccacatttcaatattaaataaacatctaaaatagtctgtttaaaatgtttaattagaatttttgtatttttttttttttttagaaatgnnnnnnnnnnnnnnnnnnnnnnnnnnnnnnnnnnnnnnnnnnnnnnnnnnnnnnnnnnnnnnnnnnnnnnnnnnnnnnnnnnnnnnnnnnnnnnnnnacnnnnnnnnnnnnnnnnnnnnnnnnnntcnnnnnnnnnnnnnnnntaagtnctgattttattgacttgttgcttgctttttcttaggctttgtaactcgtaat

SEQ ID NO: 16321 - DNA, 750 bp, Macaca Fascicularis
cagctgtggaggctgtgagcagtccagggtgctccaaagtagcccctgtccaagccaacccctggctttccccccagttctggtcagcctacgttccatgccagacccaggaccgggatgccctgcgcctcaccctggagcagattgacctcattcgccgcatgtgtgcctcctattctgagctggagcttgtgacctcggctaaagctctgaatgacacccagaaattggcctgcctcatcggtgtggagggtggccactcgctggacaatagcctctccgtcttacgtaccttctacatgctgggagtgcgctacctgacgctcacccacacctgcaacacgccctggtgagcctagcacagatggtgtgggactgccgcggcaggggcagagatgtgcctgaggtcactgtggtcccagaacaagctttacccatggggtctggcactgactcgagtggggagggaagctgggattctggttttcagaatatgactggacccctggccagatgcggtggctcacacctgtaatcgcaacactttgggaggctgaggcggacagatgactaaaggccaggagttcgagactagcctggccaagatggtgaaaccctgtcttgacggaaaatacaaaaattagccatgcgtggtggttcatgcctgtaatcccagatacttgggaggctgaggcacgagaatctcttgaacccaggaggtgcaagttgcagtgagccaagatcgcacca

SEQ ID NO: 16322 - DNA, 751 bp, Macaca Fascicularis
  misc_feature (1)...(751): n = A,T,C or G
ttgaatcctcacaacaccccatcaggtagtctcatnnncaaagtatggaagctgaggcagggcaacgttaagtaacttacataactcctacggtaatttgtgtagttaggagatgttcagcctcagtccctggctaattgcccattcttttccagcctgatttttttccctgggaagagcccccatgtagccctgaggttttcttcccagaacagcaccagggtagagataattgtaagtggttgtggagttgacacccctattgactccttcccagctgattatcagagccttagacacaacactccttagattagctctgcagagtgtcttggttgagagaataacctcatagtacccacatgacatgtgacttggaaagagactagaggccacacttgataaatcacgtgaaagagatgtgtgcccatccaacaaatgtgataagtgatatcacagccagaaccagccttcctacagtcaannnnnnnnnnnnnnnnaaataccctaaagactctctgtgatataggaaatttggatgaaggaagctagaagaattacagggatggttttaatcccactatggactcagtcttctggaaataggtctgtccacccctgatcattggtggatgttaaacccatattcctttcaactgatgcctgctagggaaaactactcctcattgtcatcactattaatgctcaccactgtatcccctctacttggcaagtggttgtcaagttctag

SEQ ID NO: 16323 - DNA, 719 bp, Macaca Fascicularis
  misc_feature (1)...(719): n = A,T,C or G
tgaagagtgagnnnnnnnnnnnnnnnnnnnnnnnnnnnnnnnnnnnnnnnnnnnnnnnnnnnngtccagctctannngcagcacctcacggcgcgcaaccggccgccgnncgccgccggcgccaacagcaaggggcccccggannnnnnnnnnnnnnnnnnnnnnnnnnnnnnnnnnnnnnnnnnntctgtggccgccgccgcgggccggagccgagcagccgtcggcaggaaagccaccaaaaaaactgataaacccagacaagatgataaagatgatctagatgtaacagagctcactaatgaagatcttttggatcagcttgtgaaatatggagtgaatcctggtcctattgtaggaacaaccaggaagctgtatgagaaaaagcttttgaaactgagggaacaaggaacagaatcaagatcttctactcctctgccaacannnnnnnnnnnnnnnnnnnnnnnnnnnnnnnatggaagtaatgattctgacagatatagtgacaatgaagaaggtaaaattttaaatgatgttaatcaaatgtacgtaatttttttcacactcaaaatacagnnnnnnnnnnnnnnnnnnaatttaaaacaatattggcaagaattacaaattttattcatgnnnnnnnnnnnnnnnnnnnntttgatttaaatactttttattgaaaattataagaaacaacatagtacaaatttataattttc

SEQ ID NO: 16324 - DNA, 705 bp, Macaca Fascicularis
  misc_feature (1)...(705): n = A,T,C or G
aggaggaagaagaaaaagaagagacatatgatnnnnnnnnnnnnnnnnnnnnnnnnnnnnnnggttcccnnnnnnnnnnnnnnnnnnnnnntgggagtgtggggataaaagagcctacagaggagaaagaagaagaagatatttatgaagtcttgccagatgaagagcatgatctagaagaggatgagagtggcactcgacgaaaaggagcagactatgccagttactaccagggcctnnnnnnnnnnnnnnnnnnnnnnnnnnnnnnactgtccttccaacggggtgacctcannnnnnnnnnnnnnnnnnnnnnnnacatgtatggctggtgggtgggagaactgaacagcctcattgggattgttccgaaggagtatctcaccactgcctttgaagtggaagaaagatgaaacccaggaaatatattcttcccctctactgcctttatgannnnnnnnnnnnnnnnnnnnnnnnnctccctatttctgccacctcaccaacgccttggactcctccctttgctgaagagacccaagtctctgacacctcagagtgactgtaagctaccagaaagacaagtgggaagaggtacattcatcaaacctgttactaaaccagcctagtcatagctcatccccatctctaaatgtgtccacacatccacatctgccttttccacaagcttttcacaaaggtgagaga

SEQ ID NO: 16325 - DNA, 732 bp, Macaca Fascicularis
  misc_feature (1)...(732): n = A,T,C or G
accgcgcccnnnnnaggccaagcattttatacacaccctnnnnnnnnnnnnnnnnnnnnnccannnnnnnnnnnnnnnnnnnnnnnnnnnnnnnnnnnnnnnnnnnnnnnnnnnnnnnnnnnnnnnnnnnnnnnnnnnnnnnnnnnnnnnnnnnnnnnnnnnnnnnnnnnnnnnnctatacactcccagcaacaaactcctcgtgacacctgcacaccatctgaaaaccactaaagcacaagccaaccacnnnnnnnnnnnnnnnnnnnnnnnnnnnnnnnnctggtggcacaccagtgacactgccccacaaaggcctgggcccgtgggggnnnnnnnnnnnnnnnnnnnnnntccagatttctggcttaaaaccaactttccgtcacagaagcctcctcggtagttactctgctcatgagacagatctgggctccaagccagcaaaggtgaacagaaaccacaagtgtccaggcctcggtgctagagtggacgttaattatcagccagactnnnnnnnnnnnnnnnnnnnnnnnnnnnnngttctggcattnnnnnnnnnnnnnnnnnnnnnnnnnnnnnnttagcctcagtttcagtgctnnnnnnnnnncagcttatcatctcattggtatttaggtatacaaacannnnnnnnnnnnnnncacaaatttctggttctctgtatctcatgtagaacataagaaaatgggaagtaatagggaactttat

SEQ ID NO: 16326 - DNA, 715 bp, Macaca Fascicularis
  misc_feature (1)...(715): n = A,T,C or G
aggnnncaggctctcagattgttgacattgacaaacggaagtacttggttccatctnntatcactgnnnnnnnnnnnnnnnnnnnnnnnnnnnnnnnnnnnnnnnntccttctgaaaaggcgatcnnnnnntttgtggataagacagtcccacagtccagcctaactatgggacagctttacgagaaggaaaaagatgaagatggattcttgtatgtggcctacagcggagagaacacttttggcttctgagggccattgctgggctaggtgcaccgtannnnnnnnnnnnnnnnnnnnnnnnnnnnnnnnnnnnnnnnattataccagaacctcttcacatagacctattagtgcatttgtaactggatttatttcttaatatattggaaggttttgnnnnnnnnnnnnngtaaattatcatacagagttttattttgnnnnnnnnnnnnnnnnnnnnnnnnnnntggctgtattatccaggaaactnnnnnnnnnnnnnnnnnnnnnnnnnnntacttctatatcaaagtgaggtaggcgcggtattaaagtgaaagggaaggtgatacatttattctgggttatgcttgaagtgttagatggctaagtattaaaattatccaaattaaatccttagcagtcagaacacttgcttcactagaatatgccaactgccaatcatgttggactgagctaatttgttcctctttctg

SEQ ID NO: 16327 - DNA, 743 bp, Macaca Fascicularis
gagagcagtgaatccagtaagcttctgtcacaggccaaaatgggactccttgaactgaagaacacctctccaatgaataatttaaatctctaacagcctttctgagaaagtcatcctacttccctcttcaaggatccacctagaactccctctcgctctgactttcccaacttctgttggcactgatgtcatgtcttccttctaactagaaactttgtttcctctcttagaattacctctctgaacaggactttgtgtctgtgtttggcatcacaagagggcaatttgcagctctgcctggctggaaacagctgcaaatgaagaaagaaaaggggcttttctaaagcaagaaggcctatatctactgcaaggccacagaagagagcagatagtgccaatatcaggaaataatttatccaccaatttctgcctgacattcagctacttaatttagatataatagagtctgaaaatcactgttctccattttttctcatccttgcattccttccttgttatatacctaaaatgttaaccacatggtttttggattttgtggccctctagctaaagcctcagcagaaagcactaaaactgcataaatctggagaaatcaaaagaaagagaaccaaaaaacaatgctcaaaatgtttaataactttgtttagcattataccaggacctacctttgtttccagattttaagatcattatttctaaaatctatttaacctgtaaatcat

SEQ ID NO: 16328 - DNA, 814 bp, Macaca Fascicularis
  misc_feature (1)...(814): n = A,T,C or G
ttccatgtagacaaggttcacaatannnttgcagaaatggtgatgnngggaatggtattggagacaaacatgaatgagattgttacacaaattgatgcacaaaataagacaggacagaaatacaaggctggcttagcgggagctccagcccgtgctgtatcagctgtaaagaatatgaatcttcctgagatcccaagaaatattaacattggtgacatcagtataaaagtgccaaacctgccctcttttaaataaaaatgtaaaaaggccactcccaggtaaaatccagggggaagagtcatctaagtttaccatgcagttgtttaccaaaaatagaggaggagagtcttaacttttgctcttggatttaagtcaaggtactgtatagaagttgtgtaaaatcagtatgaaagttcaatgttgcttttcttgctcagtgattttaaagaaattgagtagttcctatgtgatttttttttttttcttttctaaactgcattcctgtgcccacctacggcatgcctctatgtattggctactacagtgttttaaaaagtgtttcagatatttctttaattatgtacaacctaaaatgttggtgttttgtgtggatcacaagtgcagcattccttaattccttctgctatttgtcatacaattgttatttaaagaaccaagtatgtattgcatgaaaacattatgacttttttctcttagtttaaataaactccaaggtaactggacttctaaagcacctttctgtttttgcctgatatctacnnntagcaataatttttttacaaccctctgactc

SEQ ID NO: 16329 - DNA, 643 bp, Macaca Fascicularis
  misc_feature (1)...(643): n = A,T,C or G
gtggacnnnnnnnnnagccgcannnntcagacnnnnnnnnnnnnnnnnnnnnnnnntanncagattccacgcgtacgtctggncnnnnnnnnnnnnnnnccaagtgtctgcagtgctggtctcgacccttccagagcagnnntggacagatgagataagactgttctgaaacaaagatggccacagccttcttaacaaggcggtcatctggccatgtttgtattgtaactggtaaaaggcttcaagtcagatcaagaaaagtcaaaaccccagcccaagattgagaaagcaggtggtggttccaagcttttaagaaattatagaagctctccatctcgttctgtgagagtgtcttctctttttctttcacgtcatannnnnnnnnnnnnnnncatctctgctcttgcgtaaagatgaccgatggcatccaaagccaagtggcttcaccagctgacaagccaccctcttgcagcctgagtttcacactccactaggttcgttgtcatgtggtgtttgaacggttaagcccnnnnnnnnnnnnnnnnnnnnnnnngaaaatatcggatgcacatagcagagccattggtggtatttnnnnnnnnnnnnnnnnntcctcactgtttctgcctatacaaaagatcca

SEQ ID NO: 16330 - DNA, 724 bp, Macaca Fascicularis
  misc_feature (1)...(724): n = A,T,C or G
acatgaagnnnnntagannnaggagaagaaaaaaattttctttctattacctaactagattggggcatatttctgataaagactcacctctagtgagattcatcttttttgtttgtgtgactatattacatatgagaagaaagatgggatagctcaacttcattatataccaaagcaaaacnnnnnnnnnnnnnnnnnnnnnnnnnnnnnnnnaatttagacgagtattcttgactagtgtttactatctatacccccaaaactactactatatagacagaatagaaattatttctagttgtccttttgtttttttctannnnnnnnnnnnnnnnnnnnnnnagtggctataggtttacttaaaaggaatacacttggattgctcatttggtttatttcctttctaattcttcatatttttatgtgaggaatggagataatttccaacttttattatgttcttatactttcattcattagcatagttatttgagttcccatgaaatgtagagatttgtctctaattgccatgattaatacaatgaagatgtgtatacatacaggtataccttggaaatattgtgggttcagtttcagactaccacacaaannnnnnnnnnnnnnnnnnnnngccagacaaattttttttgtttnnnnnnnnnnnnnnnnnntaaattatgtttacactatactatagtctgtttaatgtgcaatagcattatgt

SEQ ID NO: 16331 - DNA, 949 bp, Macaca Fascicularis
  misc_feature (1)...(949): n = A,T,C or G
ctgaaggagaagaagctgnnncccatcacntacccgcagggcctggcactggccaaggagattgactcggtgaaatatctggagtnnncagccctcacccagagaggcctgaaaaccgtgttcgacgaagccatccgggccgtgctgtgccctcagcccacgcggcagcagcagagcgcgctgcagctcctctaggggttgcaccccagcgctcccacctagatgggtctgatcctccaggatccccacccaaagcctgatggcaccccgactggccacgctgtcccctccctgtggcgtttcttagcagatggctgcaaagcttcatcgatggtcttttctgtactggaggcctcctgaggccaggaaggtgtgaatttgcaggtgctgcattccaagcccctcatgctcctgccttcctgagggccagaggggagccccaggacccattaagccacccccgtgttcctgccatcagtaccagctgccgcgtatggaagcatctaccggttcattccagtcccaccccacgcctgactcccctctggaaactgcaggccagatggttgctgccacaacttgtgtaccttcagggatgggactcttactccctcctgaggctggctgctctaatatcgatggtcctgcttttcagagagttcctctacccagcaaaaatgagtgtctcagaagtgtgctcctctggcctcagttctcctcttttgggacaacataaaacaaatcgaattttctacgtctctgggggtatctgctcagccaatggaaaatctgggttcaactggcccctgccatttcttaagactttctgctctactcacaggaatcctgagctgcacttacctgtgagagtcttcaaacttttaaaccttgccagtcaggacttttgctattgcaaatagaaaacccaactccacctgctcagcnnnna

SEQ ID NO: 16332 - DNA, 446 bp, Macaca Fascicularis
aacatagaaatccgcaagctgggtgtgctttgagtgtgcagcctcacaaacatggccttttctctctccccttccacttttaaggatttctttttttcccccttttctttattttgctggggagaggctaaagggaaaggtagtaggggcgggggtagtgacctttaagtcttctgaggttggtaattttccacaattggattgtcattatagacagcagtgtgttaattagaaagataagagaatcacccctatgccgctgagatgtacatttgtaatttatctgttgcatacttagtttttagtcctgtaaatgcaaacaaagcattttttaaaactttctttgttcttggtactaatactttgaactatgatgtacatatttatggcttttggcttttaatataatggacttgcaagggctgccagaggttctgacatgtaag

SEQ ID NO: 16333 - DNA, 752 bp, Macaca Fascicularis
  misc_feature (1)...(752): n = A,T,C or G
cgccaaggagcaggagctgggtgatcttgaagatgactttgatccctcggtgaagtggaagctcatccctcaggaagagccttaaagctccaaataccctatgtctttctttaatcctgtgactctttaaaagacaatattttatagccttaatataccttatctcagaggtagtacaaaatgcctttgaaactcatgcaataattatcctcaatagtatttcttacagcgagacaacaggggatgtcagtgagggcgatggtagggcataaggctnnnnnnnnnnnnnnnnnnnnnnnnnnnnnnaccaaatcccatgtttcctactgtgttaagttcaaaaatacattcattatagaattgtctacatttctgaggatttcatggagaatgcttaattttctttctctgaacttcaaaatattaaatattttcttattttttaattaaagtataaattaagacatcctattgacttccgggtaaggggagtcaattnnnnnnnnnnnnnnnnnnnnnnnnntttttataattcactttttaaatacttgttcttaattcactggttttccttttctgtcatttttcagagtttagattgtgagtccatgttttgtctgttgtgcctttaaaggaaatttgaaatctgtatccttctactataatgatgggttgatgggtgcagcaaaccaccatggcacatgtatgcctgtgcaacaaacctgcacattctgcacannnccccagaacta

SEQ ID NO: 16334 - DNA, 703 bp, Macaca Fascicularis
  misc_feature (1)...(703): n = A,T,C or G
gacgaagatggcaaggtcctgaccnnngaggagctgctctaccgggctgtgcagtctgtgaacgtgannnnnnnnnnnnnnnncgcacaaatggacgtgaagccgcctgctcaccaatcctggccgtggtccccaatgagcaggtgctgcacctgtggctggaggtgctctgctccagcctgcccaccgtggagaagtggtaccagccctggtccttcctgcgcagcccgnnnnnnnnnnnnnnnannnnngagctccgagtcctctgctgctttgccttcagcctctcccaggactgggaactcnnnncgaagagagaggcgcagcagcccctgaaggagggcgtccgggacatgctggtgaagcaccatctcttcagctgggatgtggatgggtgacccgtcctccccaacccagccttgggcctgggtctgaggtggcccaggaccccaagctgcagagcccagggaagagcagctccagagccctggccggggccccgggatatcaggctgccccactccaggttccccagcacatcccaggtggtggcagcagagggtgccctgccctaccagggtccttagagatgctttgggccaaaccagtttgtaccaaaagccttgtgaggcggtggggagccatgtctgtgccagtctttgctcatgaagagggaaggggatgggggtgactaataggctcc

SEQ ID NO: 16335 - DNA, 746 bp, Macaca Fascicularis
  misc_feature (1)...(746): n = A,T,C or G
tagatgaattcgcatctgtgaactgctcnttcatgtgaaaagataagcgaggtcactgtcaaagattggttggtttgccttgcaaaacggaaaactggaattttagctcaaaaagtagaacctaaaatcaacatagatgtacaactagattctcaaaagaaaactggagttgaagatgagctgtttcaagaggatgaccgtgaagaatcacattctgattttccatatggatcatttccctacgttgctagaccagtacactggcaacatggtcatacaggtgagtaatgttttcagaacatattaaatggtgttttttcttctaattaatataatgactttatgtttttcttctcttaaattagcttttcttgtcaagttgaggaagatcaaaccacaactgagtactccagatgacagcaactgacttgaagatggaaaaatatcaaaatagaactttatattgaaaatcacnnnnnnnnnnnnnnnnnnnnnnnnnnnnnnnnnnnnnnnnnnnnnnnntttacatataattttgaaaataacaaaataaagatgtataannnnnnnnnnnnnnntaaacatcccattttgacacttgtcttgcagttagtttgacattttgtagttaatgattccaaattggtttagttggaccatctcattcttcgcttcctgtgaaccactccatagatttgtctttcttcaagaaattagttttctttcctttatttgattgatggtca

SEQ ID NO: 16336 - DNA, 728 bp, Macaca Fascicularis
  misc_feature (1)...(728): n = A,T,C or G
annnnnnnnnngtcgaaatttatttgccaatagcttaacacctatgaactataatatattttttcacttgttaaannnnnnnnnnnnnnnnnnnnnnnnnnnnnnnnnnnnncacttacgttcattgactccacttgatgcagcggatatattgatgcaaataggaaaaaaggaagatgagaaagtagttaacatgtaccctgaagacttcaaaagactttttgaaactatagagtcttccgaagattgtacttataaatnnnnnnnnnnnnnnnnnnnnnnnnnnnnnnnnnnnnnnnnnnnnnnnntttggtggagcagtttatttacttggaaactannnnnnnnnnnnnnnnnnnnnnnnnncccatgctttcagcagaagataactgttcttgttttgcacaagccaggcagatcatttctcctaagttaccattggcatattggatgaaacagtggctgctattttattcacaattgaataaaatgaaaacttcaattaattatggatttgatcagattgaattcattttctttcagattcctctttaaatatttcacttttnnnnnnnnnnnnnnntgcatcttcttgaagagcaagagtctgtacattattaagcttagaaagtaaacaaaactgatacactgatttgcctttcagtttgttgaaatgtattgtcnnnnnnnnnnnnaatgaaattgtttaaattgtaatataatttaaa

SEQ ID NO: 16337 - DNA, 730 bp, Macaca Fascicularis
  misc_feature (1)...(730): n = A,T,C or G
gccgggatnnnngggtcctgtggggcccccgcagtggtcccaaacagctgnnnnngccactgacggcagggacacaggcagcccggctnnnaggacatgacttgtaatgcaagtttggggacatgtgatggattgtaaataaaggatgatggccacaacacgaaaactnnnnnnnnnnnnnnnnnnnnnnactgtttggacttttattttggcaggctgtttttcagacttgagggttttccagtgtgacccatgaccacacctgcctctcctctagtctcttccggaagccctcccagccggctgcatccccgggcagggctcccacagagacagggagggcgcaggcatctgcccccgctttaaagtcgatctacacacactcctccacgcacgtgcgccttcgaggaaacaaaacccaggctagacaacgcgacctcggccacgccgaaggcagccagccgtgagtgcagacccctcggccagcgtggcacggcagccctgagcagtagtggtgtgtgtgtagatcaagtcagatctagtccagctcagttcattagcgatccatgtaatctgatgtcatcttgtcccaaagtctctttttttggcccaggccttgaagaatacactgtgacttaagaagccttaccacgcagtaactacagctttaggatgattgtattcgaggagtgccgtgtgttgcatgcagctgcccgtaggaagacttgcg

SEQ ID NO: 16338 - DNA, 709 bp, Macaca Fascicularis
  misc_feature (1)...(709): n = A,T,C or G
gtccattgnnnnnnnnnnnnaagagatgctgaatgggcagaaactgcagnnnnnnngagacagcccgggagctacatagcatcctccagcacaagggcctggtggacaagtttcccttgttcatggctgtgtacaaggtgtgctacgagggccagccagtgggtgaattcatccgctgcctgcagaatcatccagaacatataaacaggaagagttgggagagggagcttcagtagacagtggcctcgagaccctgcctgcctgaggaggcctcggttggtcgcgaaggagctgcagcatccaggagacnnnnnnnnnnnnnnnnagcagctagctgaccttggctataagaccttctctgcctccatgatgctccttactgtgtatggggggtacctctgcagtgtcggaatctaccactatttccagcagcgcagggcccagcgccaggcggcagaagaacagaagacctcaggaatcctgtagatctggggggctttttctcctgagcagagaggcccaaggcatgctgtggagagacttcacctgccaccatttccaggtcaacaggactagagcgttgatggttttcaaactctgttggannnnnnnnnnnnnnntttctctggttctgccagnnnnnnnnnnnnnnncagtttatggaggctgttgaatcgtaatagcaatgtgagtgtgaggtacacctaca

SEQ ID NO: 16339 - DNA, 804 bp, Macaca Fascicularis
  misc_feature (1)...(804): n = A,T,C or G
ccaagcagacatgggcccggctgctgcgtgagtaccaggagctcatgaacaccaagctggccctggacgtggagatcgccacttaccgcaagctgctggagggcgaggagtgcagactcagtggagaaggagttggaccagtcaacatctctgttgtcacaagcagtgtctcctctggatatggcggcggcagtggctacggcggtggtctcagtgcaggtcttggcggcggcctcggtggaggtcttggcggtggtcttggtggaggtagcagcggaagctactactccagcagcagtgggggtgtcggcctaagcggtgggctcagtgtggggggctctggcttcagtgcaagcagtggccgaggcctgggagtgggctttggcagtggtgggggtagcagctnnnnnnnnnnaattggtttcccccccttcttcttccggaagagcttcaagagctaagagtctgctgcaagtcactgccttccaagtgcagcaacccagcccacggagactgcctcttctaggcagttgctcaagccatgttttatccttttctggagagtagtctagaccaagcccattgcagaaccacattctttggttcccaggagaacccagttcccagtccctggtctcccttgccacagttctatattctgcttcaaatcagcctttaggtttcccacagcatggtccctgctgacacaagaacccaaagtattcccaaatctaaattgtcaaaacagaatccccaccccaatcccaaattttgttctggttctaactacctccagagtgtgtc

SEQ ID NO: 16340 - DNA, 1157 bp, Macaca Fascicularis
  misc_feature (1)...(1157): n = A,T,C or G
gtgcgtgtgtggcactnncagnnnnnnnngacagggtgcagatgtgaggctcagtgttgggaaaatgccaagggctnnnattaaaatttgaagctttatttttaccttagaagtggaaaacccagagctctgttgatttcctaccacaacccagtaggggcccctctctcccatgggctggacagctttttgaggaagccattcagctcccacagttgagctcccacagggcttcaggtgtcccttccctttcaactgcttagaggcagctttgagcacagccttcctgggaggaagctaggcaagccctgccacacagcaaaggttgggtttacaagggtgacattggtacccccttggccaagagtaaagtagaacgagtctaagccctgcttttatcttggttttctgggtggtggcagagctcatcagctccttatcctcagtcggcttctctaaaagacgagaggtgttcactgactttgtgcagtgagaaggcagcaagtactcatggctggtgctgtgggacctcacagcttctaaggagaggggctaggagggcctttgccctcggatctgcgtaatgcttgcctgtggtaaaggcaagatggaccaagggccttggaaaaaagggctcccaggcctctgaactttgaggcctcagcactttctgcactgttgtcaaactctttggaaagaaaccaaatcattaaaaagtagaacgaaatctgcctcttgtctgccccactgcccctttacccccactctgtccccaaatgatattattgcaccttgacctgggagtgcagagaggggagggnnnnnnnnnnnnnnnnnggtgccctctgcnnnnnnnnnnnnnnnnnnnnnnnatattttggcccctggcagcctcgcccagcccctgatcagcccaggcctagggcagttaggacctttctgtttatgttctcaagcagagagaatgatctcannnnnnnnnnnnnnnnnnnnnnnnnnnnnnnnnnnnnnnnnnnnnntggtggggttacatttttgtacttgcctcttgtgtgtgcacgtgtgtgtgtgtcttttaagagaatcttctggcttaagctaagatgactcttgagggagaaaaagttacaaacaaaatgtggtgtgatttgtcggtg

SEQ ID NO: 16341 - DNA, 737 bp, Macaca Fascicularis
  misc_feature (1)...(737): n = A,T,C or G
tgagcgacgagtttgactgtggggtgttgttcgaggaggttcgagaggatgaggccgtcctgcccgtctttgaggagaagataattggcaaagtggagaaggtggnnnnnnnnnnnnnnnnnnnnnncgctgcaccaggcgaggccctcggtgggcacaggtgtcacagccaggcggatgacctcgtactcaggagcccgatagagaacagcgtgggggcgccgcccacccctgcagtctcgccgtgtctgggcgggtaggggtccctccgcgtggtccacaggcttctgtcctgcccccgaggaggcagccggacactccccatagcaatacttggagggcctagcccaagtggggcagccagggtccctgctgccggcttcaagcaacgccccggcgcctcccctgggcacgtgtgctgggatctgtttttccctctgggatttgcccacgtaccctggtctggctgggcgcagccccaggcctgggcgcagaggcctgcagggcctctgtcaattgtactcgccaccgagtgccttcaacacagcttgtctcttgcctgccactgtgtgagccggcgacggggtactgcacctgcctccagctgccggctgcgcggtcccgggtcctcctttctgagggcccatgtaaatatgtacatttctcaggccagggccagcaggggctgcccaggtctgtttttcatgcgatgacacttgtacaattatcttttcaaa

SEQ ID NO: 16342 - DNA, 693 bp, Macaca Fascicularis
  misc_feature (1)...(693): n = A,T,C or G
gcccagcagccatgaccgtcatgcatnncgccaagttnnnccgcaacaagatggatgtgcccagcaagtacaaggtggaggttctgtacgaggacgagccactgaaggaatactacaccctcatggacatcgcctacatctacccctggcggcggaacgggccccttcctctcaagtaccgtgtccagccagcctgcaagcggctcaccctagccacggcgcccgccccctccgagggcaccaacaccagcggggcgtccgagtgtgagtcagtcagcgacaaggctcccagccctgccaccctgccagccacctcctcctccctgcccagcccagccaccccatcccatggctctcccagctcccatgggcctccagccacccaccctacctcccccactcccccttcgacagccagtggggccaccacagctgccaacgggggtacctcgaactgcctgcagacaccatcctccaccagcagagggcgcaagatgactgtcaacggcgctcctgtgccccccttaacttgaggccagggaccctctcccttcttccagccaagcctctccactccttccactttttctgggcccttttttccacctcttctactttccccagctcttcccaccttgggggtggggggcgggttttataaataaatctatatatatatgtacataggaaaaa

SEQ ID NO: 16343 - DNA, 720 bp, Macaca Fascicularis
  misc_feature (1)...(720): n = A,T,C or G
gaggaattactcnnnntnaaacattnnnnnnaaagtttagcgtatcagtaagaaaacagacctagtttaaaaggaataattaacaattttataaaggagatggctatcttattccaccataacccctccaacannnnnnnnnnnnnnnnnnntagttaactttctctctctctgttaatttagactttcaacctatgaaaatgtaaatacctttgaaaaaactaaactatcagtcatatacatcttctcatgaatgaaatacagtatagggagaggagatggcaggannnnnnnnnnnnnnnnnnnnnnngcctgcttctcttttgcctaattcttcctgacctgtatttactgatgagctaataatatttgtaagactctaggggttcatttcccatttcagcggaaagtacttcactcaataacaatattctcaagagtcttctactggaagctagaaagaaataggagtttaagtccatagaatgaaggtagttattcctgcctctgttgcccacctgttcacaaaaagtacctttatgcttgaaaacattaggttctttggttactgcactgtagtttcaaatggatcctcctagatggcattcatgtcttagaaagggcacagccattgtccacaaagcttctgcctactaattctagtggtcttgtgtttttcttgattgcttggcaaagtaaaaatggagctattttctgtct

SEQ ID NO: 16344 - DNA, 1077 bp, Macaca Fascicularis
  misc_feature (1)...(1077): n = A,T,C or G
ccggcaacagannnnnnnnnnnnnnnnnnnnnnnnnnnnnnnnnnaannngaaagatacagtgggaatgacaaaatagcagtcagaactgaagacaacatgggtggatgtggagttcgnnnnnnnnnnnnnnnnnnnnnnnnnnnnnnnnnnnnnnnnnnngcactgatggaggannnnnnnnnnntggaggaggcccagggcgccctggnnnnnnnnnnnnnnnnnnnnnnnnnnnnnnnnnnnnnnnnnnnnnnnnnnnnnnnnnnnnnnnnnnnnnnnnnnnnnnnnnnnnnnnntcaagaacagnnnnnnnnnnnnnnnnnnnnnnnnnnnnnnngaaccagaatccactgncctnccaaagcagtggtgattcacaagtcaaaatatagagatgatatggtaaaagatgactatgaggacgattcccatgttttccggaaacccgccaatgacatcacatcccagctggagattaattttggcaacctccctcgtcccgggcgcggagccagaggaggcacccggggaggccggggaaggatcaggagggcagagaactacggacccagagcagaagtggtgannnnnnnnnnnnnnnncaacccggatgacccnnnnnnnnnnnnnnnnnnnnnnnnnnnnnnnnnnnnnnnnnnnnnngcggagctgcacccgtggagacttttccagctgggccgagagagtcagagtctgagaacaatagatgttgcttttcccatgttgtgtgaatttgtcgcactttttcgggctggnnnnnnnnnnnnnnnnctccagaggcttgagagcaggcccnnnnnnnnnnnnnnnnnnnnnngtgactgtttttactgaaggaatttcaaatgaagtccaggaataatgtttacactgtgcacataagagatagtatagactcctcggcgggagcgcggaggggaaggaggtcgtcagacagactccgtgcagactcttnnnnnnnnnnnnnnnnnnnnaggctgtgcctttagcgttagaggaaacacataggaccggaactgttcatggaaagcagtcacagctgagattcagagac

SEQ ID NO: 16345 - DNA, 687 bp, Macaca Fascicularis
  misc_feature (1)...(687): n = A,T,C or G
cccccaagacagcgcggcagacggagaacntcagccgcaccnnnaagcccctggctcgccccaactcacgtgctgccgcccccaaagcnnnnnnnnnnnnnnnnnnnnnnnnnnnnnnacttgctggtggggaccgtgccagccgaccacnnnnnnnnnnnnnnnnnnncagtgagaagggaggccgggcacccctgtccagaaagtcctcaacccccaagactgccactcgaggcccgtcggggtcagccagcagccggcccggggcatcggccgccccacccaagtccccggtctacctggacctggcctacctgcccagtgggagcagcgcccacctggtggatgaggannnnnnnnnnnnnnnnnnnnnnnnntgttacgtcatcagtggccaggaccagcgcaaggaggagggcatgcgannnnnnnnnnnnnnnnnnnnnnnnnnnnnnnnnnnnnnnnnccgagacctgcaggtgaccctgattcccaccttcgactnnnnnnnnnnnnnnnnnnnnnnnnnnnnnnnnnnnnnnnnnnnnnnnnnnnnnnnnnnnnnnnnnnnnnnnnnnnnnnnnnnnnnntccnnnnnnnnnnnnnnnnnnnnnncctgcaaggtgnnnnnnnnnnnnnnnnnnnnnnncattcccccactcagcccagcccgccctcccctagatc

SEQ ID NO: 16346 - DNA, 684 bp, Macaca Fascicularis
  misc_feature (1)...(684): n = A,T,C or G
ctggttatgcaaccantnnttcantnctttgcaaaatgtagttaagatatactttattctaatgaaggccttttaaatttgtccattgcattcttggtatttcactacttcaagtcagtcagaactttgtggaccgacatgaagtttctttttgaatacattgtttctttagcccttagaagatagaaaaaccactttttaagtactaagtcatttgccctgaaagtttcctctgcattggatttgaagtagtttagttatgtcttttctctgtatataagtagtataatttgttacttgcaaataccagtactttcaatgcagggttttttttgttgttgttatctataaaagttgagggaaatggttatgcaaaaaaaaatttggctttggatcacatttcctaagcataaatttaccttcctaattatgtttacttaggaaaatgctcaattttgcttgcattccttgagaatgtatttatttgaatatcaaaacaatccaaatgtataagtactaggcagaagccaattttaaaattttcttgaataatccatgaaaggagtaattcaaatacagataaacagagttggcagtatattatagtgataattttgtattttcaggaaaaaaagttaaactcttcttttctttttattataatgaccagctttcggtatttca

SEQ ID NO: 16347 - DNA, 737 bp, Macaca Fascicularis
  misc_feature (1)...(737): n = A,T,C or G
tcataggaagaanngaaaacttgggatgatgtggttgcaggttgctgtnnnngattcacagtgtatgttttataagccaatgtccatacctggttatgagagctccttaaattatatgatatcaaatttgttcctcactctgtatacagtgcttttctgcaaggtaaaaattaccttcctgtgcatctgatttttgctacagtttagacactatggtttacaaaacagcatgcactcaacttgggactttannnnnnnnnnnnnnnnnnnaggaaaagccacatactcagttttttaaatgtacaatcaacaagtaaaaataacctcatgtaagtaaactatttttatttgcctttctagatattttattttattgtggaaaactgtaaacatgttcagatttggctttttttttttttcattaactgagcatgactttcaggatattnnnnnnnnnnnnnnngtaggttgtcctgaattctacgttattagattactttaattgagatttgttaaaacagttaggactgttttgtccaggaaagataagaggaccaaacatataaggtgaaattcagaattccatttccttctaactaatgaaaaactacttactaaaaaaaatattttatactttccttgctaaggtcccacacgttgatttgtatagatccactgagtcattttttcctttttttaagtgccattttcgtctgattttaaacttatgataccag

SEQ ID NO: 16348 - DNA, 741 bp, Macaca Fascicularis
  misc_feature (1)...(741): n = A,T,C or G
ggtgttagggnnntgttagggtaacatccgagttagggttaaaggttggggttnnnnnnnnngcttctctggacattcccagctttggttcttcatgtgtctactctccccgcaggtggtttgacaaatccttcactcttatttccttcaagnnnnnnnnnnnnnnnnnnnnnnnnnnnnntgcgtgggcagatgctcccatcattgggcacctctgggaggtaatagccttgcagagggaacctgcagggcaggctggaggggatgaggccggcctctcagcctcatcctctccctgcagtttgtcctgggcacagacagcttccacctgggctacacggagactgggcactgcctgggcaaaccgaaccctgcgctcccacctcctacgcggctgcagtgggacattccaaaacaggtgggttggaagctcccagagcaggtgtgagaccacaaagcagcaggcgggtacaaccccaacaaggcctgagtccccctcctcctcctccccccctgctggccccaccgcctgacccagccctcgggaaggcacagggcacatctcaggatacccgtagagtccaaactggcttcagggaggacagagaccacccactgcccctggggccatctgtgtttagagaaggccatgagatgggggcgnnnnnnnnnnnnnnnnnnnnnnnnnnnnnnnnnnnnctcttccccacaaagctcagcccagcctctgnnngctgattc

SEQ ID NO: 16349 - DNA, 680 bp, Macaca Fascicularis
cactcactataaagaaagctgcattgagaagaaaatggctgtcatttaaaggatggtttagctagtgagattcctattgtggttatacaaggtctcttgtttgtttgtttcttttaaattattttagctttaaaaatacagaaatggaatctgtcaagagcaggtatctcatacggttaaaaaaatgaacatgcagactccttttcaatatgggtttatatatataagtattttttgtgtattatgactacgttaggagtttaatattgccaaggacagtacaactgcaaagggatgctgtatagcagcacatcagaagtcggaaggaactgacatattttctcagaactcaaggtcttaaagagcttgagttaaatctaggtacagttacaggcgtgtatagacttaaatggatgcaatggaagctaactaaaataaggcttagttgtcctttctatttaaataccccgaattgtcttcttacttcctctcccctctcccattttgcactgtgtgtcgatgcaatcttcgctagcacaaaatattgtcgctaatagtcatttctgttttcccattgtaaatgctgttgagctttattctattttacgttaccttgttaatgaaatttaggaaagcagttgtttctttaaatttattgtgatattctatatctagcggcc

SEQ ID NO: 16350 - DNA, 736 bp, Macaca Fascicularis
  misc_feature (1)...(736): n = A,T,C or G
ccagactgatctgtatatgtgatactgagtctctttctaaatgttacctgttatctcttcctttatttctactattatctttatctggatcagaattattgtcataggctcctaactggtcctcctgcttctagtttctacccactcaatcaattaccnnnnnnnnnnnnnnnnntatcttcagaaaatnnnnnnnnnnnnnnnnnnnnnnattttgcttaaagtgttttaatgccccctctttgcaaaagacataatacccataatttgaactccaaaattgatgattttccacagttggttccaattcnnnnnnnnnnnnnnnnnnnntactatctctcatttctttgctttcagcagaatcatctcgaaacctgccaaacttatccttccttcacagctttgcttttctccctcctctctcaagcctgcttcagattataagttcttctgcacatctcctgaatcactccaaacctgcatttacctttttattttctgatataagttttgatgcctcttcaattcttaggacatttaaacatatgaatgtnnnnnnnnnnnnnnnnnncctagcttcatatgaaaatgtcttaaattcccacctgaatgaaaagaaactgcctcttatgatgttctaggcatttttagaccaaannnnnnnnnnnnnnnnnnnnnnnnnnnnnnnnnnnnnnnnnnnnnnnnnnnnnnnnnnnnnnnnnnnnnnnnnnnngtt

SEQ ID NO: 16351 - DNA, 776 bp, Macaca Fascicularis
  misc_feature (1)...(776): n = A,T,C or G
atgagaagggnnnnnntgnnnnnnnagtgggtgtcacagagctgtcggatgcccagaagaagcagctgaaggagcagcaggagatgcagcagatgtacgacatgatcannnnnnnnnnnnnnnnnnnnnnnnnnnnnnnnnnnnnnnnnnnnnaggcagtgcagcagcaccagcacggctacgacagcgatgaggaggtggacagcgagctgggcacctgggagcaccagcngnggcgcatggagatggacaagaccagggaatgggccgagcaactgacaaagatgggccggggcaagcacttcatcggagacttcctgcctccagacgagctggagaagtttatggagaccttcaaggccctgaaggagggnnnnnnnnnnnnnnnctcggagtacaaggagttcaagctgactgtggagaacattggctaccagatgctgatgaagatgggctggaaagagggcgaggggctgggttcggaaggccagggcatcaagaacccggtgaacaagggcaccaccacagtggacggtgccggcttcggcattgaccgcccggccgagctttccaaggaggacgatgagtacgaggccttccgcaagaggatgatgctggcctaccgcttccggcccaaccccctgaacaaccctagacggccttactactgagtgttctggaaatacgtactttctgaatgaccaaccgtccctggactgtggaatgttccggcctgcatttctgcccacccctnnnnnnnnnnnnnnnnnnntgcc

SEQ ID NO: 16352 - DNA, 562 bp, Macaca Fascicularis
  misc_feature (1)...(562): n = A,T,C or G
tatcccagccttggtccggggctgccgcttggaaggtgtggccggccacaaggaggcgcacatcctgagggtcctgccgggccactcggccgggccccggacggtgacggtgaaggtggaactgagctgcgcgtctggggatcccgatgccgtcctcatcctgcagggtcccccctacgtgtcctggctcatcgacgccaaccacaacatgcagatctggaccactggagaatactccttcaagatctttccagagaagaacattcgtggcnnnnnnnnnnnnnncacaccccaaggcctgctgggggaggcccggatgctcaatgccagcgttgtggcatccttcgtggagctaccgctggccagcgttgtctcacttcatgcccctagctgtggtggtaggctgcagacctcannnnnnnnnnnnnnnnncactcctcccaaggacacttgcagcccagagctgctcatgtccnnnnnnnnnnnnnnnnnnnnnnnnnnnnccatgaccctggtactaaagaaagagcttgttgcgagattggccaggggtgatggaaca

SEQ ID NO: 16353 - DNA, 803 bp, Macaca Fascicularis
aagccaggtgagacgccactaccaaaagatgaaaatggaaaattaatattcgacacagtggatctctgtgccatatgggaggccatggagaaatgtaaagatgcaggattggccaagtccatcggggtgtccaacttcaaccgcaggcagctggagatgatcctcaacaagccagggctcaagtacaagcccgtctgcaaccaggtggaatgtcatccttacctcaaccagagaaaactgctagatttctgcaagtccaaagacattgttctggtggcctttagtgctctgggatcccatcgagaaaaaccatgggtggaccagaactccccggttctcttggaggacccagtcctttgtgccttggcaaaaaagcacaagcgaaccccagccctgattgccctgcgctaccagctgcagcgtggggttgtggtcctggccaagagctacaatgagcagcggatcagagagaacatgaaggtgtttgaattccagttgacttcagaggacatgaaagccatagatggcctagacagaaatatacgatatttgacccttgatatttttgctggcccccctaattatccattttcagatgaatattaacatggagggcattgcatgaggtctaccagaaggccctacgtgtggatggtgatgcagaggatgtctctatgctggtgactggacacatcacctctggttaaatctctcctgcttgaccacttcagcaagctacagctaagcccattggccagaaaagacagacaataacttttttatcatttgacaaaaattaaatg

SEQ ID NO: 16354 - DNA, 731 bp, Macaca Fascicularis
tgactcagtaggaggggcaggaggcaccacggttcttgttggaccctgcccctaggccatggccaggtgaccatggctacattgccaaacctctgactgccatagctgcagactgagagggtgggtctgagtccccacaatgtctgaagctgcccctgggattctcaggctaacctgccaacagcaagtggattttcttgcaagatcttgaaggcctccagagaccccacttctggagccagtgtctcctgggtgccttctgaggactcccacccccataccagtatctcatctgtcccctctcctggggcttaagtggattgcttggaggcagaagcagccaaggactgatcccagtcactttctgtagcaaatgactgtgaattacaacttttcttgcccttctagcaatctgtgcctcctctctgaccagtttggagggcaatgaagaaaggcaagggccatgctgctgctgtgcaaggcaggagaggagcctggccagcgtgccacatttcatacccgtgcaggcgcggagaagcaactggcacccccctcaggcctgaaagttctccctgcaagaaggtgtgcaggagagaagaggccccggcatggggctttgggttctacaggggatgtgatgactgtaaatgtgcactggctgagtggggagtggtatccagtgttcaagtgcagaaatctttggctttgctaccagttccatatgatgagaa

SEQ ID NO: 16355 - DNA, 726 bp, Macaca Fascicularis
  misc_feature (1)...(726): n = A,T,C or G
gtagcagataacagaacctacgatgaaatggtaagggtcgaccgcgctattactcttgtgggctggcaggggcttgggcaagtgaagtacacacctctccaggtctaaggatgtgggcccaaatgattccttgggcatatctggttggtttccctttggtcacccttgactggcctggccatagtggggacaggttgaacaccccaccaccctgctgcccacagagtctgattcaggatgacgtggacctccgtgacacacggaggcactgtgacaagggaaacctgcgtgtcaagccccgacagggcacagcagtcttctggtacaactacctgcctgatgggcaaggttgggtgggtgacgtggacgactactcgctgcacgggggcnnnnnnnnnnnnnnnnnnnnnnnnnggnnnnnnnnnnnnnnnattaatgtggaccccagccgagcgcggcaagcgctgttccaacaggagatggcccgcttggcccgagaagggggcgccgaatcgcagcccgagtgggctctggaccgggcctaccgcgatacgcgcgtggagctctgagggaaaagttagccccagttcccagccgcaggtcgccagnnnnnnnnnnnnnngggtccaactgtccctctgtccnnnnnnnnnnnnnnnnnnnnnttgccccaccccgccagccgcaatnnnnnnnnnnncctatattcatgttatttattgtgta

SEQ ID NO: 16356 - DNA, 753 bp, Macaca Fascicularis
  misc_feature (1)...(753): n = A,T,C or G
tacacatatgaacgnnnnnnnnnnnnnnnnnnnnnnnnnnnnnnnnnnnnnnnnnnnnnnnnnnntgtgtaggaaatctgaagccttttcctgaggtcatctgtaaattagtctcattgccaaggcatccccagtgccagctggtgaannnnnnnnnnnnnnncatacgtattattaaatgatagggtttagaatgacaggaacccatcactgtgtctcatggttctacttctccatctgtgtgtgaattcctttagactaagggcaggaagacttccaactttctctttgttcttcagtgtgaaactgagaccaagtctctctgagacaaatgcagtgtatttaatgtttgtaagcaattcnnnnnnnnnnnnnnnnnnnnnnnnnnnntaactgatttccatccaaacctatcttatagagcacaatattaagtgtcgtacaattactgtgagaactgtgaatatgtgtaactttttttagtatttgcccggggcgggggaaatattgtattatcatatatgctttttttgcaataaggatttattctcagaacaccaagtaaatctatctctatataaaaaatatatgtaatatatacatattcaaagtatatacagagcctgttttaaaaaatacagtattatttagtaaaattatctgttctatggaccaaatgtaaaatatttataaatgaagatgcattttaaatgtctataaatggtgtcataactagagcacgggcgttatgta

SEQ ID NO: 16357 - DNA, 787 bp, Macaca Fascicularis
cattaactatgtatggagctttgtatctgtatgaaagactgtcctggaccacccatgccaaggagcgagcctttaaacagcagtttgtaaactatgcaactgaaaaactgaagatgattgttagctccacgagtgcgaactgcagtcaccaagtaaaacaaaaaatggctaccacttttgctcgcctgtgccaacaagttgatattactcaaaaacaactggaagaagaaattgctagattaccgaaagaaatagatcagttggagaaaatacaaaacaattcaaagctcttaagaaataaagctgttcaacttgaaaatgagctggagaattttgctaagcagtttctaccttcaagcaatgaagaatcctaacaatagagattactttggtgaccatgatgggaggaaatgaaacttgtaagattgggacagttgttatttttatgaaatgactttaaatatgaattgtactaactgtacctaaatagcaaagccctgtgtagattctggtaatgatctatctcagggtatgtgtatttttgaagagtgttatgtccttagttttaattttgggtaaagaaagggctaaaatcatgaattagttacaagcaacagtaccaacttatgtgacccctgaggggtggggctgtgagctcttaatttgtttttgattctgaaaaactctgcttcctggcatccaggagttagagattgagcctttcatcttcttaaaactagtttttgatgctttctttcatgggaatagtcactttttaattttatta

SEQ ID NO: 16358 - DNA, 708 bp, Macaca Fascicularis
  misc_feature (1)...(708): n = A,T,C or G
gccaggtttcgtcagtcatagatgtggacctactnnnngagacccaccgacgggtgcgnnnnnnnnnnnnnnnnnnnnnnnnnnccctgggcttctacatccgagatggcatgagtgttcgtgtggctccccagggcctggagcgggttccaggaatcttcatctcccgcctggtacgtgggggcctggctgagagtacagggctgctggcggtcagtgatgagatccttgaggtcaatggcattgaagtagccgnnnnnnnnnnngaccaagtgacggacatgatggtcgccaacagnnnnnnnnnnnnnnnnnnnnnnnnnnnnnnnnnnnnnnnnnnnnnnnnnnnnnnaggggcatctgggcgtttgacaggtcctccctctgcagggcctgggcctgctgagcctgatagtgatgatnnnnnnnnnnnnnnnnnnnnnnnnnnnnnnnnnnnnnnnnnnnncaatgggctgtatcaggggcccccatgatgggacatgcaccctggctgccgacgtcctggtacccgcagctctctgccctccctggatgaccaggagcaggccagttctggctgggggagtcgcatgcaagatggtagtggcttcagcctctgacaggcaggatgcagccccatgccactccaaactgctgggacatggcagggacttcacagtgggggtttttagctggctcccagggctc

SEQ ID NO: 16359 - DNA, 732 bp, Macaca Fascicularis
  misc_feature (1)...(732): n = A,T,C or G
tgcctggccacgcggaanctgccccacntnctccnnnnnnnnnnnnnnnnnnnnnnnngcagcggcctggannncggcgccatctacgagcgtgtggagggcttcgccagccagcccgaggcggccctgcgcatccacgccacccacctgggccgcagccccccgccgcgcatcggctccgggctcaaggcactcctgcagctgccggccagtgaccccacttactgggccactgcctacttcgacgtcctgctggacaagttccaggtcctcaacatccaggataaggaccggatctctgccatgcagagcatcttccagaagaccaggactctgggcagcgaggagagctgagctgggccacctggtcttggccacctgttctcggctgcctgacagactctgcactgcaccatgggaggctcctgggacatttggaagaaggaatgggcttctcattgagggggacagtggagggattttgtctcnnnnnnnngcctctgagagtctttcagtgcctggtggggcaaggcagccctcttggagcacctcctccctgggtcagggcctggatgcgggtgccaaaccccacgtagtgcatgttgacccagccacgtggtggtgttaagcaaacagcctcggcacgagacctggagctgagggcttggccctgcctgcactgtgtgccattccttggagaagaaatgctgtatgttgatctgaaaaaatgaa

SEQ ID NO: 16360 - DNA, 687 bp, Macaca Fascicularis
  misc_feature (1)...(687): n = A,T,C or G
cgggaggtggcagggcagtcccctggctgaggcctttgcgcccccgcctccagggccaagggccattctagacagggtgtcttctacnnnnnnnnnnnnnnngccttcctggcctggagggcctggtctcgcactggcagctgtaatacaaagggaacttgccccacttctcccagcctggtgctgtcctctcggcccaccatcnnnnnnnnnnnnnnnnncctctggggctgacaacaggcccctgactccccctggccacctcccaggggnnnnnnnnnnggcctctgtgtttggggggtcacttgcccttcatcctgccaggcgttttgcccgccctgcctcagcctgggccctgtgcccttgagccctccacccctggcccaagaccccccaaactgtctgactctgtgtttcctgccctgaggagagaggggtcagatcgcagcgggccgagtgccctctctgtcccctctcctcccacccgcgccacaggccagcctactcttccctccatccatggccatacccctagccattttgtaccattatataaatatatatataaatataaatatataaatacaatatgtgaagacnnnnnnnnnnnnnnnnttttgaaacaatttttaggcttgttccgggggtctctgtgctgcctgtactgtattgacctgttttataggt

SEQ ID NO: 16361 - DNA, 720 bp, Macaca Fascicularis
  misc_feature (1)...(720): n = A,T,C or G
tcattttataaacttcaaagtggattcactttctgatatttaacccccataaatgtgcacgtacctgtgtcttatctgtattttaacctgggagactgttgtcctggcatggagatgaccatgatgctggggttacctcacagtccccaccttttcaaagttgacatatggccataccattggctggtntccacagacacacctaagcctgtggcactgggacagaatagattttccatttgagaggnnnnnnnnnnnnnnnncttgtttgaaggaggtggtggtggtggggagaggtgaaggaggtagggagtgccctccttttcaaagttgacatatggccataccattggctggaatccacagacacacctaagcctgtggcactgggacagaatagattttccatttgagaggcacttcatgtgtcagtcttgtttgaaggaggtggtggtggtggggagaggtgaaggaggtagggagtgccctccaagtacaaaaatgacaaatatgattatttaccatctgggaattttcacacattgatttgttttttaagcagttgccagaaacccccttttttagcttttgcttggggtggggatagaagataaggtttattcaatcctgtccngggtagggcgaaagtgaatctagccatgtgatttttcagaaaagtaagtggaacatgctgcctattttcaattcagtcagtgcttc

SEQ ID NO: 16362 - DNA, 676 bp, Macaca Fascicularis
  misc_feature (1)...(676): n = A,T,C or G
gcatcaactgannngtgtgtgagtggtcccnnactaaacccaactctgggggcagagctgtcttccccatctctggtgctcctgacacctgtgagatggtcctgtcgagaggactaggaaccgataggaggagagtccttctcggcagagctcactgcaaacaactggaattgaggttgcacactgtgatttttacaccgaaaagccaaaaggagctggccatccagggcctagggagaccagccttcctcagctatgcttgnnnnnnnnnnnnnnnnnnnnnnaagagccctgctctgcccctcatggcatggatccttttcctggtgtggactctgaagggtcagtctttggggaagagaggtggggtggggctactagcatcccaatttagaaaatagaggagtttgtagccagaagcctgtaaactggaaacactggtctcaaccaacctcctcagggcgccctggctnnnnnnnnnnnnnnnnnnnagnnnnnnnnnnnnnnncagtatgcgcagagcactggaagggctggtgcagatctacttcccgtgcggaagagaagtcagatcttccagggaatcgcaatgtggtggcgtctgacttgtatgtcacatttgtgtaaaatggtatattctttaaaatagtgttgataactggaatattgtatgtat

SEQ ID NO: 16363 - DNA, 752 bp, Macaca Fascicularis
  misc_feature (1)...(752): n = A,T,C or G
acatgaggctggagttcacggtttttaaactgtattttacccctttnggacccattcctgtgtcctggagtctttcatgaggcacgtgggtcccctgcatcctcacactcccccctagcccaggtgcagccccgggagggtgccctgaccccgccttaatcaaccacctttcccaccgaatcccatctggggggggtttgggtgccaagtgccctggaaacctattgtaacattccctccttcctttccttccgggcttgggggaaccttcttaaaaatcatagttagggtgaagtccaannnnnnnnnnnnnnnnnnnnnnnnnnnnnncttgttgagaaactaacaggcagttgggaggaaaatccgaatttgactccaccctctttagggcaaaggagaagcaggtgacccaaggaagggcagggcagaggagggtgactcctgcacagggacccccgccctcggaccccgctgtccttttctatttgtttacttggcggnnnnnnnnnnnnnnnnnnnnnnnnnnnnnnnnnnnnnnnnnnnnnnnnnnnnnnnnnnnnnatctgtgacagacggttctgtggtgaaaaaggtttattatattccttatggctgccttnnnnnnnnnnnnnnngaaacgctaatgtaagatatcagatttctaacaagacaaaaacagcattatggagttaaaagatttttacaactggtcttgattttgatgtgagctggtttttagctctcaaatg

SEQ ID NO: 16364 - DNA, 750 bp, Macaca Fascicularis
  misc_feature (1)...(750): n = A,T,C or G
tagcattttaacaatgtataagtgatggaatcattctaacaacgcatctattcactgcttacaattccaaccaatttcagttctctgatatctnnnnnnnnnnnnnnnnnnnnnnnnnnnnnnnnnnnnnnnnnnnnnnnnnnnnnnnnnnnnnnnngagtgattaactgagccaaaggccttcattcacatatttaccacattaaaataccacacagtgttttcttataaggtcaaccacctgggaaccagttaacattagcattaagatttaaataaactgttaggcacagggctaaatcaggcattacaaaaccctgtggttccctagtcaagtcacacaaatccccaaatatttcagcttgttaacagtttgtccttcctctcctgagacaattatttgggtacttgcttttggtaataaggaaattcatgatggaagtttcctaactgtgatggnnnnnnnnnnnnnnnnagagaagaagatagaaattatgcatgactatataacatgaagagtttaatttttattacacactcaatttccatgccctgatttctcttagctcgataaacacatgtaaatcttctgcagagctttaaagagctccgaacgggaaaacaccttcccatatatggaattgatagcatagtacaggccgcgcgcagtggttcatgcctgtaatcccaacattgtgaggccagtgggaggattgaggccaggagttttaattctatcacagatcacat

SEQ ID NO: 16365 - DNA, 934 bp, Macaca Fascicularis
  misc_feature (1)...(934): n = A,T,C or G
agcgagtatgagannnnncagnngnntcagccctgaaagaaaattctgcaactccatcagagttgaatgaaaagcaagagcttgtttatactaacaaaaagttagagctacaagtggaaagcatgctctcggaaatcaaaatggaacaggctaaaacggaggatgaaaagtcnnnnnnnnnnnnnnnnnnnnnnnnnnnnnnnnnnnnnnnnnaggaacataatcatgcattgaaaacgattgaggagctaacaagaaaagagtcagaaaaagtggacagggcagtgctaaaggaactgagtgaaaaactggaactggcagagaaggctctggcttccaaacannnnnnnnnnnnnnngatgaagcaaactattgccaagcaggaggaggacctggaaaccatgaccgtcctcnnnnnnnnnnnnnnnnnnnnnnnnnnnnnnnnnnnnnnnnnnnnnnnnnnnnnnnngaaaattcatgaggaaaaggagcaactggcattgcagctggcagttttgctgaaagagaatgatgctttcgaagatggaggcagcaggcagtccttgatggagatgcagagtcgtcatggggcgagaacaagtgaccccgaccagcaggcttaccttgttcaaagaggaactgaggnnnnnnnnnnnnnnnnnnnnnnnnnnnnnnnnnnnnnnnnnnnnnnnnnnnntggagaggttcnnnnnnnnnnnnnnnnnnnnnnnnnnnnnnnnnnnnnnnnnnnnnnnnnnnnnnnnnnnnnnnnnntccccaaaactgttggaagacacaccacggagccctcccttcctgcctctctgtgtgcatgcaccaaggaaaagccatgtgaggacacagcaagaaacaactatctgcaacccaaggaaagagccctcatcagactctgaccctgcccacaccctgaccc

SEQ ID NO: 16366 - DNA, 755 bp, Macaca Fascicularis
cagatgcagagaatgtggatacagaataatgtacaagaaaaggactaaaagattggttgtttttgatgctcgatgaaacctgggaattcagaggagtgtcttcacttatacttggatttgctgtcttaacgtttctgattgttgtatttcgattttgcatactgtagttctctcttatctttgggggatacattccaaggcccccagtgaactcctgaaacctcagatagtaccaaacctttatacactgttttcttctatatatactatgatatatgtgtgagagagatatatatatgttaaagtataatgtataaattaagcatagcaagagattaataacaatgtaataggacaatgctaacatactgtaataaaagttatgtgaatgtggttggtctctcttgctctcaaaatatcttcttttacagtactcacctattttagaatgtggctgactacaggtaactgaaaccacagaaagggaaactttggatgaggggggcactactgtacttaggaatacaactatatatacatatgattttatttttaagaccatattgtatttgggtatctactaatattctgtataaagcaattttttgttccattacattactttttgttttattgtatatgtaatctgacgtacaataaagggtaaagttgcttccccaaaccatacttttaatcaaaacctagaatcatctgcagtccttgttaaaaatgcaggtttctagaaccctctgaag

SEQ ID NO: 16367 - DNA, 576 bp, Macaca Fascicularis
ggcggggccgagagcgtgactcgcctgctccgcgctgcttcccccgcgccgcctgcccgcgccgcccgcgcagccatgtccgaggagaagcccaaggagggcgtgaagacagagaacgaccacatcaacctgaaggtggccgggcaggacggctccgtggtgcagttcaagatcaagaggcacacgccactgagcaagctgatgaaggcctactgcgagaggcagggtttgtcaatgagacagattagattcaggtttgacgggcagccaattaatgaaaccgacactccagcacagctggagatggaggacgaggacaccatcgacgtgttccagcagcagacaggaggtgcgccggagagcagcctggcagggcatggtttctagagggcccgtccccagcccgggccgtccgtccttgcattgctgttgaatggtgagcacgtgaccatgccgaccacaaaggcatctgcggaaactcgaggacattcaccacaatgattttcctctctctgatgtacttcaagtgcaactcgaaactatatctgcagggatgaatctgtaacttaaattggg

SEQ ID NO: 16368 - DNA, 769 bp, Macaca Fascicularis
acatgatcaatcatcacagatagccccggatagactatgatagcataggtgctttgtcactgattttctctcagattccttttccatctctcacccataaaggaaggactgaaatccaaaggcattctccttttgtacctacagtatccagaaccaatgtgggcagccttctgctcatgacaataattggcccattgcatgcagagagaatgtcttctatagagagaatgtcattaaatacttgaatctgcatgacagtttgacttgaatgcaacagcaggaaaattttgcaagttacgtaattgtatatacagtaggttttcttcagtctcttcggttcatcctttgtagtttatgtgtgtatctgtagtattgcaggcttttggagaatattcttacagatagtatgtcagtcatcaaagaaaatgctgtcacctgccattgttgtatttgtgggtatttatagttgtatgtatgtaaatgcattagtgtgtagattgcgtatcagtatatggtacatgtacatcaaaattatttttgtccttaatcagtgtgatatgaaaagcaagaacaacctcataggactgattatgtaatgaagttgttgagagtatatatagtggtattgttttattaaacttaaattcaaataatattttgattaaaatttttaataagactttatgctagaaaattctgtctttgagctttgaatcaccagggcaaaaatgactttgaactaaccttgtgaatcttttgcagtgtactg

SEQ ID NO: 16369 - DNA, 403 bp, Macaca Fascicularis
  misc_feature (1)...(403): n = A,T,C or G
cgccgaggttgcacgcgtgaggcctctccgccgccgccgcagacgccgnnnnnnnnnnnnnnnncgcctcctacctgctggctgccctcgggggtaactcctcccccagcgccaaggacatcaagaagatcttggacagcgtgggcatcgaggcggacgacgaccgactcaacaaggttattagtgagctgaatggaaaaaacattgaagacgtcattgcccagggtattggcaagcttgccagtgtacctgccggtggggctgtggccgtctccgctgccccaggctctgcagcacctgctgctggttccgcgcctgctgcagcagaggagaagaaagatgagaagaaggaggagtctgaagagtcagacgatgacatgggatttggcctcttttgattaaa

SEQ ID NO: 16370 - DNA, 751 bp, Macaca Fascicularis
  misc_feature (1)...(751): n = A,T,C or G
ctgtggtgagcacaactgaacgagcctatgtgtgtacctgaattttccccataactnnnnnnntcaatatgaagaaacaccaaactatgtacagggnnnnnnnnnnnnnnnncagacctttttttagccgtgtaacccacgtagcctaaccatctggcagaatgactacaaataggggtcattgtgctggtaaaagccnnnnnnnnnnnnnnnnnttggacgttggcaaaatttaattgttacagtatttagagcnnnnnnnnnnnnnnnntcacaacataaaacaggagaaatgacgagtacgtnnnnnnnnnnnnnnnnnntcagaacatgcgtaatctctacctggtctgtagcnnnnnnnnnnnnnnnnnnnnnnnnnnnnnnntaagagacttatgaaaacaatgcaatgatattaggatatacacttttgtatttttattcttatataaggnnnnnnnnnnnnnnnnnnnnnnnnnnagttcagtctgtgttatttaaattctaatatatgaattatttggattgaattcatgttcgagnnnnnnnnnnnnnnnnnnnnnnnnnnnnnnnnnnnnnnnnnnnaattattgtaaactatattttacaactttttttctggctttattatataaattttctattgggtcagtgatttaatcatataatttaatgaatctctttttttttccccaaatatatgtgctttaggtgtagttaccnngatgatgaattttcctcgtatgct

SEQ ID NO: 16371 - DNA, 725 bp, Macaca Fascicularis
  misc_feature (1)...(725): n = A,T,C or G
cgcgagaagcggggctgcggcttgtgctgatcaacacgcccccgggagaccaagagaannnngnaatggggctggggagacatccccgggagacaggcggccttccgagaggggannnnnnnnnagagccaatacgccaaggccctgggctgtcccaggatccacctgannnnnnnnnnnnnnncccagggannnnnnnnnnnnnnnnnnnnngctgagatggagatcgtttttctggagaacctgaggcatgcagctggggttttggctgaggcggacctcgtgggactgctggagcccatcaatacccgcatcannnnnnnnnnnnnnnnnnnnnnnnnnnnccagcaggcggcagccatcttacagaaggtgggaagacccaacctccaattacaaatggacatattnnnnnnnnnnnnnnnnnnnnnnnnnnnnnnnnnnnnnnnnnnnnnnnnnnnnnnnnnnnnnnnnnnnnnnnnnnnnnnncaggtcccaggccgaggggagcccagcagccccggagagctgaatttcccctatctgtttcnnnnnnnnnnnnnnnnnnnnnacannnnnnnnnnnggctgcgnnnnnnnnnnnnnnnnnnnnnnnnnnnngggcttgagttggctacgttcatactgggataggcggggccaccccgaggtggccagtgagggcctgcacaccacccacatgcctccagacagcgaggagatccc

SEQ ID NO: 16372 - DNA, 704 bp, Macaca Fascicularis
  misc_feature (1)...(704): n = A,T,C or G
gtgacagacaaaacaaaagtgcccttcaggagcccagagancnnnctggaccccaagatgnnnntgacaggggcaagggagctcctaccccatgcccaggaggaggctgaggctgaggctgagggagaggctgaggctgagttgcctccttccagtgaggtcttggcctcagtttttccagcccaggacaagccaggtgcagagggccctgacaagcctagcgttgtgtcagggctgaacccaggccctggtcatgtgtggggccctctcctgggactactgctcctgcttcccctgatgttggctggaatcttctgaaggggataccactcaaagggtgaagaggtcagctgtcctcctgtcatcttccccaccctgtccccagcccctaaacaagatgcttcttggttaaggccctctggaagggaaaggctacggggcatgtgcctcatcacaccatcctggaggcacaaggcctggctgactgcgagcgcacggggccgcctgaggactgcacaccgggcccacacctctcctgcccctccctcctgagtcctgggggtgggaggatttgagggagctcactgcctacctggcctggggctgtcttgcccacacggtatgagtgctctccctgagtgcctgtgtagctggggacggggattgcaaggggcagatgaaggacaagccccactggagtgggg

SEQ ID NO: 16373 - DNA, 550 bp, Macaca Fascicularis
cctatctttatgtatgcccccgagttcaagttcatgccaccacatacttatactgaggtggatctgtgcatcttcaacaacaacgtgcagtgaacacttggaagaaaagaagcagctttacacacttctttctttttgtctctcttcctggactctcactttttcagagactcggtagtgtctgcaatggagtgtggatccacactagcctctgacttctcaatgcaggaggtggtcagcaggcaatctcttgggccctaaaggatgcggagtcatcttcagccagcgccgatgttgtgatacaggggtgtttgttggatgggtttaaaaacagctagaaaaactcaggcccctccattttttcagatatccctgaaaatagaggccttttcggtagtttcgggtcaggtaaaaatggcctcctggcacgagcttttcaaggtttcttggaggctttgtgcaaattgtgataaccactttggaccctcaacttatgtatctatcacgtggaaaagagccactttagcacactaggaacacgaaaagggaa

SEQ ID NO: 16374 - DNA, 260 bp, Macaca Fascicularis
aaggcccatgtgatgctggaaggagggatgtttgggccatccttctgcatggagcaggcctggaaggtacctgtgaggccaccagagggttctgcccacagcagtagtgtaggagcggaggtgctcagtgtctccgatagaggagctggacctgtgggtgcagctggaagagggcctgtcaccattggtgcaaggggctggggacaccaagatgggtcccctgggagtcagactaaactagaacagtggcccttgcaggg

SEQ ID NO: 16375 - DNA, 895 bp, Macaca Fascicularis
  misc_feature (1)...(895): n = A,T,C or G
tggggagtgagcctcccaggtccttcctgcctgaaacggcctgaannnaatgctccctgnnnctcctgggagtcgaatcccaattcttggcttaagcctgttttagtcagagaccacccaacttagtgtgcaggtcaccagagtgggtgagggtcagaggccgggtcttcagccctgagaagtggaaatgcaggggctgtgctgtcactggtcccccaggggatggcaaggaaggaactgagccttccccagcagggcttcctgccccgacgcttctttctccactcggcttttcccaagaggcggcacccagctcctcaatcgaagcacccgcctcccccacctcagccccctcgagcccaccgtctgcttctgagtgtcgcactaggattttcattgcttattttaaagtgtcttaatcctttgttccccgacacataacccctctagctctcggaggggcgatcatgagaaaccttccagggaaacagagcacaggatggactgttagttgtttttaaaagtctatatataatttcaacagatcataaagaaaaaatttatctctttggtccttgcaagagaagtcaaaggaacttttgtttctcctcaagagcctggacatctctgtctgtcgtgactggaaagagcccgttgtgctgaaatctgtcatcatggtgggtttgatcttcagtggccaaacatgaagaattaaagtgtaannnnnnnnnnnnnnnnnnnnnnnnnnnnnnnnnnnnnnnnnnnnnngcggtcattcctggcgcgcgtatcggtgtgacatgagccctggagtgtgtcgtccctctcagccctgctccttctgcctcctgggacccagtgactggggccctgctctagaactgtgtaccatcca

SEQ ID NO: 16376 - DNA, 713 bp, Macaca Fascicularis
  misc_feature (1)...(713): n = A,T,C or G
annngnnnnnnattgtgtgctggcncnnnnnnnntgtgcagctgtgggccgcgtggacccggaggcannnnnggaaggggcgcccttcgtgctgctcatgttgctggccagcctcaacagctgcaccaacccctggatctatnnnnnnnnnnnnnnnnnnnnnnnnncagagctgcgaagcttgnnctgctgtgcccaggggcgcaccccacccagcctgggtccccaagatgagtcttgcaccaccgccagctcctccctggccaaggacacttcatcctaaggagctattgggtgtcttgcctccagaggctttgagaagctcagttgccttcctggggctggtcctgggggccactgggaaggggacccatggagaattggccagatcctgtggccccgaggctgggaaactgtgtgtccctggacaagccgcagcccctgcctgggtctccacatccccagctgtatgaggagagcttcaggccccaagactgtgggggcccctcaggtcagctcaccgtgctgggtgtgggaggagctgcagcagagggctgaggggcctgggggtggcaggaaagagggagcaggtgcccccaggtgagacagcggtcccagggacccgaaaaggaaggaccgggctggggccaggggaccttcctgtctctgcctttctaatccctcctttcctccatctctcctcatctccccct

SEQ ID NO: 16377 - DNA, 651 bp, Macaca Fascicularis
  misc_feature (1)...(651): n = A,T,C or G
ccaagcactttgccagccgctggtggtccctgcttttctgagtaccatgtttccaggaggggccgtggaggtcagggtggttttgagagagcagggcaaaggaggaatgtgctagaagtgctcctggtttcttgtaaaggaannnnnnnnnnnnnnnacaaaggggaggtttgtacagagtcgacagtaccagagtgggaggcaggtgaagtcgcctgctgggctcccctagaacnnnnnnnnnnnnnntgctatgtattagctgatgtctttagtgttgagcctctggattctggggtctgggccagtgactgtagtgaagcctggggacgtattactgcagcatctgggctgccagccacagggaagggccaagccccatgtagccccagtcaccctgcctggctctgcctcctggccatgctgggaggggttggatcctccaggtattgccttcacagccccctgccctctgtcctggnnnnnnnnnnnnnnnnnnnnnnnnnnnnnnnnnnnnnnnnnnnnctttgtagccatcctgggcattgtgtgggtgcttggaactcgggatgaccgaggggtacattggagtgggtgcttgtgtctgctgtctcagaggtcttggtcaagatgaagttggctgatgcagct

SEQ ID NO: 16378 - DNA, 755 bp, Macaca Fascicularis
  misc_feature (1)...(755): n = A,T,C or G
ttccacagaaacnnntcnnnctgtagnnncnagnnnnnacctccaagggaaggcttaggcaatgatcctgtttctaccaacaccacaccttatcccaagaacttgccctagacctccagagaccatattttctctccctccatttctacccagacctccaggcctccttctggaatcatagaaccttagaactggaaggaattttagaggttatctagttggagttgtatccaacagagttcattaacacaccagcctgggcctctttttcctcctccctctggacttttttcatcttttcctccacctcaaaaaacacttgcacacagattcttcttgtacaggcaccaaaaccagctcctctgcccctaaggctgtgtccctatgatctccagccacccctgccccagtcactcaccccttcctcatctctggaatttggccaggtagtcccagaagactctggagtgacctcctttgcttaaaaagcacacagataggcatgccccaggccctgagtgtgtgagcagaggaggactggagggtgagagggaaagaaaatgaaggtaactttcatggaagattcatatattttccccgattgtaccaaccgcatgtatttttggcctggctgcaaggagcaatattggtttactctcgtatccttaaaaagttacagaactgtgtcttaagagaattatttatagttactataactgaattgacaaatgtcaacttaactggtaaattatatt

SEQ ID NO: 16379 - DNA, 707 bp, Macaca Fascicularis
  misc_feature (1)...(707): n = A,T,C or G
gcagatcacggaccaggtggcnnnnnttcgcctcacctggagcgagctgtttgtgttgaatgcggcgcagtgctccatgcccctccatgtcgccccgctcctggccgccgccggcctgcatgcttcgcccatgtccgccgaccgggtggtcgcctttatggaccacatacggatcttccaagagcaagtggagaagctcaaggcgctgcacgttgactcagccgagtacagctgcctcaaggccatagtcctgttcacctcagatgcctgtggtctctctgatgtagcccatgtggaaagcttgcaggaaaagtctcagtgtgctttggaagaatacgttaggagccagtaccccaaccagccgacgcgattcggaaagcttttgcttcgcctcccttccctccgcaccgtctcctcctcagtcatagagcaattgtttttcgtccgtttggtaggtaaaacccccatcgaaaccctcatccgggatatgttactgtccggcagcagttttaactggccgtatatggcaattcaataaataaataaaataagaagggggagtgaaacagagaaagaaaaggcaaaagactggtttgtttgcttaatttccttctgttaagaaaggatataaaaggatgttacaagtttgctaaaagaagagaggggaagaatttaatggactgtgaatttcaaaaaaaaaaaaagac

SEQ ID NO: 16380 - DNA, 663 bp, Macaca Fascicularis
  misc_feature (1)...(663): n = A,T,C or G
aagcaggaacagcatagtggaagatgctcagtgtcctggattaccagatttantnnnngaaaaccatgatgtaaataagacaaacttgaaggtggattgtttacccagtgagggaatgagtttgcctcttcttgctggtggagtagcagatgatattaatactaacaaaaaagaaggaatttcagatgttgtggaaggcatggaactgaattcttcgattacatcacaggatgttttgatgagtagccctgaaaaaaatacagcttcacaaaatagcatcttagaagaaggggaaactaaaatttctcagtcagtactatttgataaaagtctcactactgaatgccaccttcttgattcgatgggatcttgctatgttgctcgggctggtcttgaagtcctgggttcaagtgatcctaccacctcagcctcccgagtagctgggactacagccaggtctacagtgcagtaatccatttactcagctggagaggagacatcaagagcatgccagacacatttcttttggtggtaacttgattactttttcacctctacaaggagaattttgaatttaaaaataaatccattttccttcacattatcaatgcttatatattctttagactattgaaattttggagaaaatgtatttgtgttcac

SEQ ID NO: 16381 - DNA, 732 bp, Macaca Fascicularis
ccacaggtcaggagtggtgccaggaaatctcttctggccccgagagaacacttgggggacatggtatgtttaatggagggaggggaggctgagggaaaggctggtagctggtggcttccgtggggcctgctgtgggtcagggtagagatcctgggtgggctaaggcatgagtcccagcactaggtgggaaggctgctcaggtctctcccactcctgaggagccctggtttcagcgcccccagtctcatgaattgcttagcctgttgcctttgactaggggcctggggtggcctgcctttgactaggggtccctttgggctcttgattctccctgaaggagggatacatttctctcttgctcttcctctacccacatttgggggaagctgaggaacagtcagccacagctctcttccaggactgtcctctcctcccccaagctttgaggaagagcgtccccttcctcctttccctggccactgctgctgcagccaacatcctctctgggcctgggaccctctccacagacaggatgtggtccctggccatgacataacctggcagcagtagggaaaactcccttctgtgaaggggaagcagactgggccataaggaaacagcaggactggctcaagtgcccagggtttgtttagggcctgggaattggccatgtgttaaagggggagaggagtggagtaggtggctctttctcccacctccttctctcttccc

SEQ ID NO: 16382 - DNA, 746 bp, Macaca Fascicularis
  misc_feature (1)...(746): n = A,T,C or G
gagcagctttgtgnnnnggggnnngncagtccagagccctcaagctcttgcggccatggagaaggaggaagaagagagttcctcttccagtgaagaggaagaagatgtacctttggactcagatgtggaacaggccctgcagacctttgccaagacctcaggcaccatgaatgactacccaacatggcgtcggactctgctgcgcnnnnnnnnggaggaggagatnnnnnnnnnnnnnnnnnnnnnnnnnnnnnnnnnnnnnntaaatgagatcgagggtgccctgagggagctagaggccgagggcgtgaagctggagctggccctgaggcgccagagcagttccccagaacagcaaannnnnnnnnnnnnnnnnnnnnnnnnnnnnnnnnnnnnnnnnnnnnnnnnnnnnnnnnnngaggaggctgagctcatgatcacggtgcaggagttgaacctggaggagaaacagtggcagctggaccaggagctacgaggctacatgaaccgggaagaaaccctaaagacagctgctgatcggcaggctgaggaccaggtcctgaggaagctggtggatttggtcaaccagagagatgccctcatccgcttgcaggaggagcgcaggctcagcgagctggccttggggataggggcccagggctagaagagggtggacnnnnnnnnnnnnnnnnnnnnnnnnaaacccctcaccccagcacagtgccacccctgttcatctgggctgc

SEQ ID NO: 16383 - DNA, 454 bp, Macaca Fascicularis
cagcccagcttgtccccgcgcctgtacccgccgcagcgctcagaccccggcccccagtatacgacgacggccccgcgggcccagatgccgaggaggcaggcgacgagacacccgacgtggaccccgagctgctgaggtacttgctgggacggattcttgccggaagcgcggactccgagggggtggcagccccgcgccgcctccgccgtgccgccgaccaggatgtgggctccgacgtgccccctgagggcgtgctgggggcactgctgcgcgtgaaacgcctagagaccccggcgccccaggtgcctgcacgccgcctcttgccaccctgagcacagcccggatcccttgcaccctgggacccaggagtgcccccgccatcccgccaccaggactgctccccgccagcacgtccagagcaacttaccccggccaaccagccctcccacccgag

SEQ ID NO: 16384 - DNA, 726 bp, Macaca Fascicularis
  misc_feature (1)...(726): n = A,T,C or G
caggggatcaatgagttaaagactgcagaacaaancaacgagcatgtttcnnnnnnnnnnnnnnnnttctttgtcaagactgtgggtcattatgcttcctatatcaagcgggaggcaaatgggcaaggccacttccaagaacgatccttctgtaaggctctgacctccaagaccaaccgccgatttgtgaagaagtttgtgaagacacagctcttctcacttttcatccaggaagctgagaaaagcaagaatcctcctgcaggctatttccaacagaaaatacttgaatatgaggaacagaagaaacagaagaagccaagggaaaaaactgtgaaataagagctgtggtgaacaagaatgactacagctacacannnnnnnnnnnnnnnnnnccctgccagtgtggcaggatcagcannnnnnnnnnnnnnnnnnnnnnnnnnnnnnnnnnnnnnnnnnnnnnnnnnnnnnnnnnnnnnnattggtgtctgacatttggatccctnnnnnnnnnnnnnnnnnnnnnnggagggctctgacaccatgctcacagaactgggctcagagctgcattttttgcagaggtgacaggtaggaaacagtagtacatgtgttgtagacacttggttnnnnnnnnnnncaacnnncctctcccatcattataacatcttcaacagagaacacactttgtattgaaaggctcagcctctccacatgaagaagtct

SEQ ID NO: 16385 - DNA, 746 bp, Macaca Fascicularis
  misc_feature (1)...(746): n = A,T,C or G
gacatctaaaaatgttgaactggactgttggggctccagcatgtggtnnnnnnnnnnnnnnnnnnnnnnnnnnnnnnnnaaaggggaaaattgtggatgctaggtttannnnnnnnnnnnnnnnnnnnnnnnnnnnnnnnnnnnnnnnnnnnnnnnnnnnnnnnnnaggaaagacggtggagnnnnnnnnnnntatcaaaaacacagatatcgccaaggagctctgcctgcctcccgtgaaactgcacnnnnnnnnnnnnnnnnaagatgcaatcaaggccgccctggctgattacaaattgaaacaagaacccaaaaaaggaggagcagagaagaaatgagccctccctgggtgaagcctccagcaggccacacccctgtttcccacctgccnnnnnnnnnnnnnnnnnnnnnnnnnnnnnnnnnnnnnnnnnnnnnnnnnnnngagatacgcacaatacttgctgttcacattatgactctcatgcaagcaaaatacacagtttcattgttctgaatcccgtggtttctttcagtccacttttatcgccttaacctagttaatgtgtattttgaattgtgtttatgacctcagaactgaaattgataagtcgcaaatgttgatagcccatgaagtgcgtaagtatctaattttacctgaattgatttggagggaaannnnnnnnnnnnnnnnnnnnnntgaatatttgatagaactaattgttgtacataaaacagatctgnna

SEQ ID NO: 16386 - DNA, 817 bp, Macaca Fascicularis
  misc_feature (1)...(817): n = A,T,C or G
ttttatatgcttttttacattgatcaagtacattatttttactaaacagcattggtttcccactacatccatggttatgtgtaaaaaaaaatgccattgtcaagattttaaaaaattatttccataagaggattaaattctaatctatgattcacttaacttcctactttacaaacactaggtaaagtaacctaacaagctgccaaagaacacatcccaagtaatcacagatgatgaggcacctttacaggacacctccaccctcaaacatgcgcgtgtccagagaagtagtaatgccttaatagactactgaaggttaactatttacattattctaaaaatattttaagctgtattacagtgctataaattctccttttaaggaaaaaattaatagattgtttccttaccgtgttctgaaaggaaaaaaaaaatacatctatagtaactagtggtctgctgattttttccctgaatttttaaactccaacaaagcattactttgcaaaaagtcctttagcccaaagtcagtgtctctgttttgatctctttgtaaaagannnnnnnnnnnnnnnnttctctttgcctgggaccgtaaaataaggnnnnnnnnnnnnnnnnnnnnnnnnnnnggaccctttgtggtagcaggtggtggagcacatctttgatcatctaatctggatccttgacattgtatgagaaagagatgtaaaagaaatcttcgtgggaatgtttgttgtaatctatgttatatctctgtcagtcataccaagaaaacacagttgtaaacttatttggggcttctcagaaatta

SEQ ID NO: 16387 - DNA, 738 bp, Macaca Fascicularis
  misc_feature (1)...(738): n = A,T,C or G
gagatggctggggnnncacctgtgctgcaggaggcctctgtggcataagcnnnaannnnnnnnnnnnnnnnnctgagaagaccaaggggaagcaatgctttgctgctggggaccccaggcacctccagagtagggaagcggggttcttttgctgtgagtggccagggacannnnnnnnnnnnnnnnngggctcccgatgagcaggaacnnnnnnnnnnnnnctcaaggcctgctccttccggctgctccagcccctgggggcagagtccacaaagagtccccatcaagacttcttccctgagtcaagtacagggtggcacagtcctccacccacccaacctctctgcctggccagggtggcaaggtgtctttctagacctcatcagccccaaggctgggggcagtcgctccagggctgcagcacttcactcctgcacgtagaacccaggtcactgctggggcgattgaacaggttgcctgacttttctctgctgtcagtttggtgtggaggcctatattctgccccatacgccccataggccctgcttatgggaaggaacacaggcctccacccagaggactgtgccgccctgtacttggtcgtccacattctgtctccctctagcacnnnnnnnnnnnnnnnnnngcatggacagaaaagacagagaggacttgtgcaaaggctttgtaaaaccagaggctgctatttttgtctactgttattcagctcagggcggg

SEQ ID NO: 16388 - DNA, 676 bp, Macaca Fascicularis
  misc_feature (1)...(676): n = A,T,C or G
agctnnnnccccacctgcacctannnctgtgttggatgggccccctgcacctgtcctgcctggggacaaagccctggacttccctgggctcctggacatgatggtacctcgactcaggccgatgcgtccaccacctcccccgccggctaaagccccggatcctggccacccagatcccctcacctgaaggccagggaatccttgacccccggtgnnnnnnnnnnnnnnnnnnnnnnnnnnnnnnnnnnnnccctcaatgatccagagcaacacagccaaaacctggaatctccctatttccaccctcacctccaagnnnnnnnnnntgccccttcccatttctgggactggagcccactcctttttttcccattgtcctatcatctctaggactggaactactcctttctcttctgccatcaccctatctagggtggtgaaatgcctgaaatctctggggctggaaaccatccatcaaagtctctagtggttctggcccacctctttccccaccnnnnnnnnnnnnnccaccccnnnnnnnnnnnnnnnntcactggggttaggccggggagaggaacaggccttggggatcagaaggcgctggagccaggatgcgaagcannnnnnnnnnnnnnngcggatttatgacaagaataaagggcacgaaggccagcca

SEQ ID NO: 16389 - DNA, 680 bp, Macaca Fascicularis
  misc_feature (1)...(680): n = A,T,C or G
gataaaattgtggaagaaggcaaagaccgcanngagccggcctggcgccccagcgggatcccagagaaggatctgcacagcgtcatggcaccctacttcctgcagcaacgggacaccctgcggcgccacgtgcacaaacaggaggctgagaaccagcannnnnnnnnnnnnnncctggcagggcggaggcaggtggaggagctgcagctacaggtccaggcccggcagcaggcnnnnnnnnctctacacagagaacagagagagctggtggctgtgctgagggagcctgagtgaggagaccgccaggcccagaagcagagggcagtcaaggtcaagannnnnnnnnnnnnntgcctggcctgggcggcctgcctctgagaacggctgaaacggtgcccagtccctcagcagtgatagaatttgctggaggactaggccagagaaagcctcattgccactgtgcctttggggtacccttggggttggacatacaccccctttagattcctctgtttcttctacctggataattcttggccatgttctctcttctttannnnnnnnnnnnnnnnnnnnnnnnnnnnnnntcctgctggttcctgagcccttttccctgggcctggcttggagaatctgttttcaatctccactgattgcccccttgctgcccagcccagggg

SEQ ID NO: 16390 - DNA, 754 bp, Macaca Fascicularis
  misc_feature (1)...(754): n = A,T,C or G
ggccggccccagctccagggggccccgactgcggagcccatgcggtgcccatgatgctgctgaacctggtagagcagcttggggaggcagatgaggagctggcaggcaaatacacagagctgggggactggtgcgcccannnnnnnnnnnnnnnnnnnnnnnnnnnnnnnnaagctgtgctggagaatgtgtcagaggatggcaaggaactttctggctgcctggggagacagcagaacccaggccacgcactggaggccggctggtttctgctccgtcattgcaatcggaaaggcgaccctgaacttcgagcccacgtggttgacaagttcctgttgttgcctttccgctccggatgggaccctgaccatggaggcctcttttannnccaggatgcngatgacttctgccccacccagctggagtgggccatgaagctctggtggccacacagcgaagccatgattgccttcctcatgggttacagtgagagtggggaccctgtgctgctgcgcctcttctaccaagtggctgagtacaccttccgccagtttcgcgatcccgagtacggagaatggtttggctacctgagccgagagggcaaggtggccctctccatcaagggaggtcctttcaaaggctgcttccacgtgccgcggtgcctagccatgtgcgaggagatgctgggcgccctgctgagccgccccgcccccacgccgacgcccgtccccacccccgcccgtcgaggcgcgca

SEQ ID NO: 16391 - DNA, 763 bp, Macaca Fascicularis
  misc_feature (1)...(763): n = A,T,C or G
agaatttgtaaaattgtcaaataatacgaaagtggtgaaaacagaatacaaagccacagaatatggcttggcctatggccacttttcttatgagttttctaatcatagagatgttgtggtcgatttacaaggttgggtaaccggtaatggaaaannnnnnnnnnnnnnnnnnnatccccagattcactctgttgatcagaaagatgtcactaccaattttgggaaaagaggaattttttacttctttaataaccagcatgtggaatgtaatgaaatctgccatcgtctttctttaactagacctnnnnnnnagaaaccatataagtcataggctgtatggattggtaatgtgacagaccttagtgannnnnnnnnnnnnnnngttctctccttccaggcacatagaatatggcacagtctggtcctttggggcttgggcagggctgtgacacaggttctggccaatgatttgtgagaggaattgatcagtatcactttaagtcctgcatttaatcagcagcacgagatgctgcagagcctctttccctctgccacagttaccaagaatgtgtcaggagaccgctgcttctgggcataagtcctgcaaggaaagcaacatggaaaacagccccaactcacccataagggatgcaaagcactgctgagaaaggcatgtgctgtttannnnnnnnnnnnnnnnnngctttttgtcactatctatcaagactgatgctactggggcttttcctattgatttggaagt

SEQ ID NO: 16392 - DNA, 710 bp, Macaca Fascicularis
  misc_feature (1)...(710): n = A,T,C or G
tctacacatatttaacacccaaaaagctgttggatgatataaagatnnnnnnnnnnnnnnnnnnnnnnnnnnnnnnnnttaaggatgaatagcttttctttttggagggtttagagattcttactaatatgttgaactaaaatagaaagaaaatgttgctgtcatgtaacttaaacaatgtaaatattttatggaataatggcttttcaaatatatttcttaaggaactgtttatgattatgtattactggatttgtcatttttgatnnnnnnnnnnnnnnnnnnnnnnnnnnnntgatgagaagcaatgttaaaatgctttctaaaaggaaattttttcacctttggagcagaatatattagagttgtgggtaatttctcacaaccacctgtgtacatactaannnnnnnnnngatacttacatctnnnnnnnnnnnnntaaagtatagttttttgggaaagaatgattttaaataaagagattgtaaaagtaaaaactgtaaatgtgtatgtatgatagaattgtttcctctaagtgtagtttttctttcaactaaaattcagtttgttttatgtgcaaaataattcagtcattaatagaaatgnnnnnnnnnnnnnnnnnatactattttgccacatacttctaaagaacacaattttatataattttgaaatcatgtatgtttaaattagaaaaccaaaaatcatg

SEQ ID NO: 16393 - DNA, 758 bp, Macaca Fascicularis
  misc_feature (1)...(758): n = A,T,C or G
gaggagcagaatgtggacnnnnnnnnnnnnnnnnngaaggaatatgactccatctcccggctggaccagtggctcaccannatnatgctgcgcatcaagaagaccatccagggcgacgaggaggacctgcgctaagccccacccagcctcccagcgcccgtcttcgtgtcccatctgcttagagagaggtggggccgagacttgctggagagcttccctcctttcccacctggggagtcccgcaggccacagtgggcaggtggcagcgggggtcagcatgcgggggcaccagaggcccaggatgcaggcaggacagtcacctnnngctctcgctacatcccttgctccctgcccatttatttaagcccccataggtgcccttcacccccannnnnnnnngtacagaatctttgatacagacatatttgctaggggtgctgccgggggtttggggtcagcatctggccccccatctcctgaccagctgattcatgaggccggtttctgtctctcccacttttgtcccccagccaagctctaaagcacatgtagccgctgagacttgctgtctctacggggggaagctcctcttcccccaaactctgggagcttcccccagcctcctgcagccccgacctctcaggttagaccccgggccctggagcttagggggttgtccccgaccccagccccacacctgctccttccctaatgctttgaggttttcttggttggaagctgcagctggcccgagaaag

SEQ ID NO: 16394 - DNA, 776 bp, Macaca Fascicularis
  misc_feature (1)...(776): n = A,T,C or G
gcagcagcaannnccnnncagccatgcagcnnncgactgggggaaaatggcagagcagtggctgcagaaaaggagcagaacggcggaaacagaagcagcggctgacannncnnncttcccccagtcccatgatcgaaannnncccnnnnnnnnnnnnnnnnnnnnnnnnnnnnnnnnnnnnnnnnnnnnnnnnnnnnnnnnnnnnnnnnnnnnnnnnnnnnnnnnnnnnnnnnnnnnnnnnnnnnnnnnnnnnnnnnnntccctccctgcccctccttttctgtccataaagtggcgtgaagtgacgttctctttggnnnnnnnnnnnnnnnnnnnnnnnnnnnnnnnnnnnngtgaacttgagctctgtgtgctaggcaacaattctcccactccagaccctcaccgaccacctggcctgggaccaggctgggaggggagtgtggcagggaggaggaagaggaaggtgagaatgagtagaacagttttgattctactccctacaagccattttgaacttctgccctcnnnnnnnnnnnnnnnnnnnnnnnnnnnnnnnnnnnnnnnnnnnnnnntcccctggctcttgtggggagagggatgctatttattcagtttggggcaggagggagannnnnnnnnnnnnnnnnnnnnnnnnnnnnnnnnnnnnnnnnnnnnnnnnnnnnnnnnnnnnnnnnnnnnnnnnnnnnnnnnnnnnnnnncccagtccctgcctggctgccctttccccactgctgccgccaccgcttcctgcc

SEQ ID NO: 16395 - DNA, 955 bp, Macaca Fascicularis
  misc_feature (1)...(955): n = A,T,C or G
annggacagcccatgattaattngtacacagacagggagactgcaaagctgaagggagaggnaacggtcnnntttgatgacccaccttccgctaaagcagctattgactggtttgatggtaaagaattctccggaaatcctatcaaggtctcatttgctactcgccgggcagactttaatcggggtggtggcaatggtcgtggaggccgagggcgaggaggacccatgggccgtggaggctatggaggtggtggcagtggtggtggtggccggggaggatttcccagtggaggtggtggcggtggaggacagcagcgagctggtgactggaagtgtcctaatcccacctgtgagaatatgaacttctcttggaggaatgaatgcaaccagtgtaaggcccctaaaccagatggcccaggagggggaccaggtggctctcacatggggggaaactacggggatgatnnnnnnnnnnnnnnnnnaggctatnnnnnnnnnnnnnnncggggccgcggaggggaccgtggaggcttccgagggggccggggtggtggggacagaggcggctttggccctgnnnnnnnnnnnnnnnggggtgagcacagacaggatcgcagggagaggccgtattaattagcctggcttcnnnnnnnnnnnnnnnnnnnnnnnntcctgtacccagtgttaccctcgttattttgtaaccttccaattcctgatcacnnnnnnnnggtttttgtgtcggactatgtaattgtaactatacctctggttcccattaaaaatgaccattttagttaaattttgttcctcttccccctcttcagtttcnnnnnnnnnnnnnnnnntcccaatcaggaaggtggggagttttcctgttcagattaccctgcccagcaggaactggaatacagtgtttaatccaggggagaagnnnnaannnnnnnccttgaga

SEQ ID NO: 16396 - DNA, 749 bp, Macaca Fascicularis
  misc_feature (1)...(749): n = A,T,C or G
acaggagcccgccaccacctccagctatttttgnnntttagtagagacggggtttcactaagttggtcaggctggtcttgaacccctgacctcgtgatccacccgccttggcctcccaaagtgctgcgattacaggcataagccaccgcactcggccagaaatatatggtttgaattactgagtttataaaatttgtttgatggtacacttaataaagaagatttgaatgtctattatttaaaaatgatgaatactcatgattctaatctctataatcaaaagtataatttcctgtagaaaaagaaagagatgcttgctctgaaagtaagaccagtaaactgctttcaggtctcaatctttaagaattgcaaattcatcaaataattgcttacatgataaaagtttaaggtattagaaaacctgcttaacaaacaatattatgtattaaatattttgatacgtaaagctctacacaaaattaaatatagtttaataatctttacactaataagcaaatacgttaatcttttcatttttttgctgtcatgtaatcttagtgatatgcctatttataattttaatttaaggacttgatttattaaataaacaaattggctcaactggcttttttaaaattttgaaattcttatagatgttgataaggtatatctataaattaacttcaatttttaaatgatgatataaaaataaatataagtatttttcttgtccgtgtatataattaaat

SEQ ID NO: 16397 - DNA, 762 bp, Macaca Fascicularis
  misc_feature (1)...(762): n = A,T,C or G
gacgctttacctcctgcctttggattgactgcatttgaccatggactccagtctgtgtagggagagagctgagtaggaggcctccgctccggatcgaggtttgtacagggctcgtttccccacacatgcctgtttctgaagaggctcctgtcttatttgaaggccggcccacacccagctactttaacatcaggtttatggaaaatgtcaggccttccccacaactcccgtgtaactggtatcactcccctacttgctggctctcggaagcccaggggagtccctgtgctcctgaattctttccccagagatgaccagcatttaaccaacctaagggcccaaaggccttggatagctgcatggagctgtggtctaggagagggaggggcaccagatgctaggtcaggggagggggcaggagtgtccctcccgtcagtgcctacccacctgtgaggcagccttctgatggcctggcccacattccccagaaccaggggaggcctgaggcttcagttttgctctgctgcaaaatgaaggcaggcccacaagccgactgcacctagggaggctgttgaggacaatttcattccattaaattaaaannnnnnnnnnnnnnnnnnngcaggtgccacatctgggaacagggacgggggagcttcacctttttgtcttggcttttcattgggctgtggggggggcatccattcccagggtgggggaggaaataccaaatgcattgttgttctgctcaatacatctcac

SEQ ID NO: 16398 - DNA, 667 bp, Macaca Fascicularis
  misc_feature (1)...(667): n = A,T,C or G
aagaggctcaagagaggattgaaaaggcaggattcacagaccaagtgnnngaagctatttggtacctgtcattcaggacctccagctctatttactctatcaaagacnnnnnnnnnnnnnaacaccctgtatttctcatagattggaannnnnnnnnnnnnnnntcagaagataagtgttaattttcttttgcagaaaaatgtaaggggtgaattcacttattatgaaatacaagataatacagggaagatggaagtggtggtgcatggacgactgaccannnnnnnnnnnnnnnnnnnngataaactgaaactcacctgctttgaattggcaccgaaaagtggcaataannnnnnnnnnnnnnnnnnnnnnnnnnnnnnnnnnnnngtcatcaaggccaggaaaaacaagaaagacatattcaatcctgattcaagtatggaaacttcaccaggcnnnnnnnnnnnnnnnnnnnnnnnnnctgatggtaatgtttatggagataggtctaagtgcctaaaaaaatgtacatatacctggttgaaatnnnnnnnnnnnnnnnnnnnnnnnnnnnnnnnnnnnnnnnnnttaatcctatggaatggggtattgnnnnnnnnnnnnnnnnnnnttataggttttttttttaataaaatgtcatatgttg

SEQ ID NO: 16399 - DNA, 723 bp, Macaca Fascicularis
gatttaaagaaatagaattcattagcgtgggtggatttggccaagttttcaaagcaaaacacagaattgacggaaagacttacgttattaaacgtgttaaatataatagcaagaaggcagagcgtgaagtaaaagcattggcaaaacttgatcatgtaaatattgttcactacaatggctgttgggatggacttgattatgatcctgagatcagtgcttatgagcctgagagcactgattttgatcctgagaaccaaaaaaatagtttaaggaattttatacccagatcaaagactaagtgccttttcatccaaatggaattctgtgaagacgggacattggaggactggcttgatcgtagaaaaggcaaggaactagacaaagttttggctttggaactctttgaacaaataacaaaagggttggattatatacattcaaaaaatataattcatagagatcttaagctgggattacaggcatgagccactgcgcccagcctcatctctttgttataaagatggaaaaaacgcccccaaattttctttttatgctattaatgaatcaatcaactcatacctatttattaaatttctactgcttttaggccaaaaaaaataagatcgttctctgcctcacatagcttacaagccagtcggagaaatatggtactcataaacaaaaacaaaaaaaagtgatgtacaaccactttggaaaacaatt

SEQ ID NO: 16400 - DNA, 858 bp, Macaca Fascicularis
  misc_feature (1)...(858): n = A,T,C or G
agtacatgcannnnnnacaaaacataaattttaataatannntaatgcaaattactgaatcctcagtgcattaaaattatttcgtaatttatgagcctcttagtttggaggttgcttgaagccacaaataaaactcaaatgagagtcagttctttgtcccactgtagtttgcattttctttagtttggttttagctctagtaaggcttcatatatgtggctattgccacattcctgtactgttttctttcggatactggacatgctagtaacttggagaggagaataaaagaatgtctcctggaattttacattcccattaatgtcctcattcaattggcagacctaggatgtatggttaactctcaggccattatgttcttcatggctcatttcccaaactgcattgttggtaggtgccttgctaagctgtaatgcagtgaagaagatggtggggcattttcagtaattggaactgtaatattaatttacaagattgaatcggggatgtctggaagctgacaagggagagccaagtactgttaatgccatcaatcctctaggaaggaattggtggtttttatcaagtgtgggagaaagggtggtttattgatggatttcatggccagtaagtaaatttaaatgattcatttttaatttggatgtttctgatagagacctttgatttggaaattagttattttgcatgtttgtcaactgtagatgtattaaaatagaaaaaaaaaaaaccatgctttttataaaaacgcctaagttttgtatatgttcatctttaggcttctgaaaggagagaaaccattttggaaatcaatgttggtgttctgaaatctgcttgtaa

SEQ ID NO: 16401 - DNA, 722 bp, Macaca Fascicularis
  misc_feature (1)...(722): n = A,T,C or G
gagcactgtggtgcaaaatgagcagtagtgtgattcataccaagacttggtgaagtgtttcacattgatcatccagagtctnnnnnnnnnnnnnnnnnnnnnnnngctccatagtggaagtaacagtttactaagtaagctcattcatcagtcttannnnnnnnnnnnnnnnnnnnnnnnnnnnnnnnnnnctactccagttcaaatgcttttggaaattggtttggacaaactaaagaaagattatatcagttttttnnnnnnnnnnnnnnnnnnntctttgaatcatttggaatacttcattgctccatcagtagatatacaagaacaggtttatcgtgtccaaaaactccaccatattctagaaatattagtcagttgcatgcctttcattaaatctcaacatgaactcctcttttcattaacacagatctgcataaaatattacaaacaaannnnnnnnnnnnnnnaacacatttttcagctgccagtcagaccagattnntgtannaatcttatatcaaagtgagaagccacagaaatggagagtggaaatatatagtggtcaaaagaagattaagacagtttggcaactgagtgacagctcacccgtagaccatctgaattttcacaaacctgatttttcagaattaacactaaacggtagcctggaagaaaggatatcctttactaacatnnnnnnnnnnnnnnnnnnnnattca

SEQ ID NO: 16402 - DNA, 761 bp, Macaca Fascicularis
  misc_feature (1)...(761): n = A,T,C or G
caatcagaataagcnnntcagtgtgccgcatactangtccctggagagccgcatcaaggaggagctaattgcccagggccttttggagtctgaggaccgcccagcagaggactctgaggatgaggtccttgctgagctgcgcaaacggcaggcggagctgaaggcacttagtgcccacaaccgtaccaagaagcacgacctgctgaggctggcaaaggaggaggtgagccggcaggagctgaggcagcgggtgcgcatggctgacaacgaggtcatggnnnnnnnnnnnnnnnncatggctgcccggcagaagaagcggactcccaccaagaaagaaaaggaccaggcctggaagactctgaaggagcgcgagagcatcctgaagctgctggatgggtagccctcacccctgcctcaggctgnnnnnnnnnnnnnnnggaggggaagggaggcccacttccttctttgggcacaggaagcattggcnnntggatgtccctcaaatggcgacagtctctagaggaccgtggcccttcccctgaggtcttttggcctagctctgtacagccaggacacaggaagccctgctgggctggcctgaggcctagtctctgcttggtccccaagatggggttggaggggacttcgtttcctggtcttcctcttccccctttaccatcccccactccctaaccccctgcccctgtttccccttcaaggacttctcccttgtggttttgtaaagtgcaaactaagaataa

SEQ ID NO: 16403 - DNA, 760 bp, Macaca Fascicularis
  misc_feature (1)...(760): n = A,T,C or G
tgactgcaggccgnnnnnnnnngcacgccgagatgccttgnncagaggagccagcccatggcctacaactgtgggttaatttgaggagctcagagaagatggtggagcctcagtaccaggaactgaaaagtgaagaaatccctaaacccagtagggatggtgtgacagttgctgtcatttctggagaagctctgggaataaagtccaaggtttacactcgcacaccaaccttatatttggacttcaaattggacccaggagcaaaacattcccaacctattcctaaagggtggacaagcttcatttacaccatatctggagatgtgtatattgggcccgatgatgcacaacaaaaaatagaacctcatcacacagcagtgcttggagaaggtgacagtgtccaggtggagaacaaggatcccaagagaagccactttgtcttaattgctggggagccgttaagagaaccagttgtccaacacggtccatttgtgatgaacaccaatgaagagattnnnnnnnnnnnnnnnnnnnnnnnaaacgcgaaaaatgggtttgaaagggccaaaacctggaaatcaaagattgggaactagtggaaagcagcagagcaggtnnnnnnnnnnnntagaattttgccatttatgagactgagccgttgaannnnnnnnnnnnnnnnagcttatttagctggtgcttctaaagaatnnnnnnnnnnnnnnnnnnnnnnnnnnntgtaacaagaaatgtagtatatttc

SEQ ID NO: 16404 - DNA, 688 bp, Macaca Fascicularis
  misc_feature (1)...(688): n = A,T,C or G
caacttgagaagtttgacgtaaagagnnnntgcaagatcctggggccattatcctactccaagatcaagcatttgcgtttggatggtaatcgcatctcagaaactagccttccaccggatatgtatgaatgtctacgtgttgcaaatgaaatcactcttaattaatatctgtatcctggaacaatattttatggttatgttttcctgtgtgtcagttttcatagtatccatattttattactgtttattacttccatgaattttaaaatctgatagaaatgttttgtaaacatttatttttttttaaagaaaagatgaaatgcaggcctatttcatcacaagaacacacacatatacacgaatagacataaaactcaatgctttatttgtaaattcagtgtttttttatttctactgtcaaatgatgtgcnnnnnnnnnnnnnnnnnnnnnngaaatcagccaagttttataatccttaaatcttaatnnnnnnnnnnnnnnnnattaaatacatctggatgtttactgtcttgaaccaaattatcttgatacattcaaattggtctggttaaaaaataggtggtagattttgaggccaagaattttgcaaaatacatnnnnnnnnnnnnnnnnnnnnnnnnnnnnnnnnnnnnncgaatttgcaaacttacctagtnnnnacttttc

SEQ ID NO: 16405 - DNA, 742 bp, Macaca Fascicularis
gagcagcagcatatcgcagcccaacagaaggcagctttgcagcatgctcatgcacattcatctggatacttcatcactcaagactctgcatttgggaaccttattcttcctgttttacctcgccttgacccagaatgaagaaaatatttgcgatggaaaagtgactttgtaatatcaaatgccaaagctactatcattcagtgctagatgaactgtgactttcagaaatttggtgaactttgatattttttgtttgtctgaaagaaaggaatgtgtaactgaaagcagaaagaagagtaaccaggatggtgagagctgtggaagctatattatccaaggaattgattatgtaccgtgactgcaacttttttgtaatgctgtttaattctcaatcagactctgagttggatggtcacaaaatcattccccaactcctagcaagtttgactgaatatatcatgtccacagtagattttcaagaatcatttatagtacttaactttaaagaaacaagggtgcttttaaaaaatgaaccaataggcttaaatcaattacatccatatttgctgtttataggattgctatcagtataccttttgagtttatagtcaacatgtatcatcctgaaatattctttctggactcataactacttccacctttttcactttaaaacaaaccccaagaataaattactaaccagtcttaaccatcttttataaacatatgctcttataaatgt

SEQ ID NO: 16406 - DNA, 680 bp, Macaca Fascicularis
  misc_feature (1)...(680): n = A,T,C or G
aaggcatgaagaaagnnnnnnnngacatggacattgacaaggtagatgaactgatgactgacatcacagaacaacaggaggtggcccagcagatctcannnnnnnnnnnnnnnnnnnnnnnnnnnnnnnnnnnnnnnnnnnaggatgaactgctggaggagctagagttgctggaacaggaggaattggcccaggagttgttaagtgtgggcgacaaggaggaagaacccccagtcaaattgnnnnnnnnnnnnnnnnnnnnnnnnnnnnnnnnnncagctgcagtgaaacaacaatgggagaggggcatcaagaacatacacaagaacgtggctgaaatgatggaatgcagaatctaagctgcatgggtaaggaagattatatggtttggatctgtgtccccacccaaatctcatggtcaattgtaatctgcaatgttggaggtggggcctggtggaaggtaattggatcacggaggtgggtttctgatgaatgtttagcaccaccctcttgaagtgagttatcatgagatgtggtcatttaaaaaagtgtgtagcacctccccctttgccctcttgctcctgctcccactgtgtgagatgcttgctcccccttcgccttctgccatgattgtaagcttcctgaggccttcccagaagcagatgccagcattatgtttc

SEQ ID NO: 16407 - DNA, 720 bp, Macaca Fascicularis
  misc_feature (1)...(720): n = A,T,C or G
acgcaaaatattgtttgtacatgtgtgtctgtatatctctgtggngnaggttttatggcttttgtcagannnnnnnnnnnnnnnnnnnnnnnnnnnaccgctgccctgaggnnnnnnnnnnnnnnccaagctaggatggcatcactctgtggcagctctgcctggccttgccctgcctggaacagggtgattgctggaatggagttaccactgagatgccagaggttcctgggtctggaagacttgttgcctttcagctgtctttgagtctgactgactgtggccagtccctgaactggtagctgctggaggccttcttgtttctccagtccctggaagctgagctctgtgtgtatttgatgacattgtcaactctcaccaaacttcaagacctcttcctgcttgaccactcgcacatgctctaggcttctgctcagtactggtcttggcctgtgaatgtgcctcgttcatccctggtgcttgagcccctcaagctccagtcaatgatccagtcctgcccctttgaagttttctcctctgctttcctnnnnnnnnnnnnnnnnnctactcaaaagagtccccttgggtttggaatgatcagtggctttgccactaataaatgtgtgatcttcggcaagtaacctaacctagggacattagtttactcatttgtgaagtggggataacaaaaacctacctcagggttgctacaaggattac

SEQ ID NO: 16408 - DNA, 736 bp, Macaca Fascicularis
  misc_feature (1)...(736): n = A,T,C or G
tccagaggatgatgaccagtggttagatctctcaccagatcagctggaccagctgctgcaggaagctgctggcaaaaaagaatcagagtctatttccaaggaggagaaggagcagaactatgacttaactcaagtctcagagagcatgaaagctttcatatccaaagtctcaacccacaagggagcagagctgcctcgagaaccttctgaagctccaataacttttgatgcagattcttttcttaattattttgataagattttagggccaaggcctcatgagtcagattctgatgatctggatgaggaagaatttgaatgtttagatagtgatgatgacttggacttcgaaacacacgaacctggcgaagaggcttctctgaaaggaactcttgataatctcaagtcatatatggcccagatggaccaggaactagcacacacctgcatcggcaaaagtttcaccactagaaagcaagtggaacctgtatcccagactactgacaacaattcagatcaggaagattctgatacaggagaatctgttatggcaccagtagatgtggacctgaacctggtttcaaatatattggaatcctatagctcccaagctggactggcaggacccgcttccaatcttttacaaagcatngggagtgcagctgcctgacaacaccgatcacagaccaacaagtaagccaacgaaaaattaaccagcacatttagcttctctttc

SEQ ID NO: 16409 - DNA, 767 bp, Macaca Fascicularis
  misc_feature (1)...(767): n = A,T,C or G
gaagaggaggttttgcggggtgggaatggtntnnnagnnnnnaatagagacagactcctgcacccgaccggcntnncgatatctcctcgagatcgcagggtccaggttcaagaactccccagtataggccttggaaaagggtcagtggaatcatggaggtttctcgggttgggggtcctgaggctaccccagccttctcatgcagtccaannnnnnnnnnnnnncaaaaggtcctgtagctgcctggaccgcgagggcgcggttccctgcttctttaggggtccggacacggcgacggatcttgacgctttttcccctccacagacaaaaaacttggactttcgccgaaagtgggacaaagatgaatatgagaaactcgccgagaagaggctcacggaagagagagaaaagaaagatgnnnnnnnnnnnnnnnnnnnnnnnnnnnnnnnnnnnnnnnnnnnnnnnnnnnnnntggacttggaatccaagcttgggaagacaattgtcattaccaagacaacccctcaatctgagatgggaggatattactgcaatgtctgtgactgtgtggtgaaggactccatcaactttctggatcacattaatggaaagaaacatcagagaaacctgggcatgtctatgcgtgtggaacgttctaccctggatcaggtgaagaaacgttttgaggtcaacaagaagaagatggaagagaaacagaaggattatgattttgaggaaaggatgaaggagctcagagaagaggaaga

SEQ ID NO: 16410 - DNA, 735 bp, Macaca Fascicularis
  misc_feature (1)...(735): n = A,T,C or G
cgtnnnnatgaaataaatacgttccatggggcccacacattgctggggaggcctggagtcaggtttgggggtttcagacctcagaaatccccttgggggagcaggattagacctttggatagaacagaagctgagcaagagaagatgttggtttggatcatcggttgccctatatctgcgagctctcaaatgtcttcttctcaaggcaagaggtggaaggctactgactcggtttgtttcaagtcaggcagggctggagtgtgagcagccagggacatgttgcacaaggcctgagagacgggaaagggcccgatagctctttccccgctctcactggtgtgatggaaggtggcctttctcccaagctggtgaataatgaaaaatgaagcatcccatctctcggcattccagcattctgtcaatttcccttttgctctagaggatgcatgtttatttgaggggatgtggcactgagcccacaggagtaaaagcccagtttcctaggaggtctgcttactaagaatgacagggagatctggggtgggtgtggttgggggtcttaaaactaataaaagttggcggcggggggcttttgcagctttggtgacattctctccacggggcacatttgctcagtcgctaatccagcgtaagtgtccgtgtgttctgcatgtgcaggggccattctagtgcccggtgtgtggcatcatctttttgctctagcccttcctctcc

SEQ ID NO: 16411 - DNA, 765 bp, Macaca Fascicularis
  misc_feature (1)...(765): n = A,T,C or G
gcaagctcaatgatgcaggcaataaacagcnnntnntggcagcctaccaatgccagaaggataaatgtctttccaaaagtgtgtattcctgttcaattaagctcttgctaacttgaaaactctctgttctgccagcgaagctccctcctcctctccagctggtggtcactcgctgtgaatggtggtcagtctnnnnnnnnnnnnnnnnnnnnnnnnnnnnnnnnnnnnnnnnnnnnnnnnnnnnnnacccaaggaatttcagagaattttgtttgacagagcttttacctgttattctttgccctcaaatacagtattgtggtcattttgatatgtgtgtaaaatgtgaataatccaatttgtgtgtctgtactcagccttttgatgtctttttaggacttcctcttctacatagcaatacatagtgctcgagtatccttgtagcaaagcacatagagtcagctgtcccgtcagttcccctgtttgcctctgaaatgtctggttagtggggacccaaagattctagtgagtcaacatccataactctgtatctagttgtattattcatagaaaagcaatctggtgctaatggttggccccggtgttcttgggtggcagctgctccttccccttcttgtagcgtggctgtggagggctctgcctatgggaggtggcctgtggcttgtnnnnnnnnnnnnnnnnnnnnnnnnnnnnnnnnnnnncatgctcgacacttaccactcacctatcaacagatcatcctgc

SEQ ID NO: 16412 - DNA, 709 bp, Macaca Fascicularis
  misc_feature (1)...(709): n = A,T,C or G
cagcccaggtccnnactgctctcacacccttaggctgggacctccctccctcctctggtgtcaaggctgctttgggggtggctcgttaccccctttttctcctnnnnnnnnntggagctgcctcagctgcggctgggggtgtggaggcagtgggatgaactggggacaggtctgcactgcagtgggatctggttgctctgcctcctttcccaccccagctgaccatgagactttgctgagaagtggaggccccaggacaggctggctggctggctgacccagtgtgactctccttcactgagtgataccctgctccgggcccatgccccatggagcccttcaaagcccacactgccagtcgaggnnnnnnnnnnnnnnngccacagtggaaattgtgccgagcctgttgtccattccccgctctgctgcgtggggccccatggctttggctggccatcaacggcagggtgtggaggtgtggagaccctctgaggagctgcggcggcccaggtacgaagctgcaactctgctcgcagtgggccagatctcaccagccccaggctgcaggtgaggcttcaggggccgctggggccccactgcccctccactgccttgtcctccatccttcctctgttccttctggccgggcaccacagcactggggctcacctcttggttgatcctcttgtactgggaggggtgccttttg

SEQ ID NO: 16413 - DNA, 712 bp, Macaca Fascicularis
  misc_feature (1)...(712): n = A,T,C or G
ttgatgcccatattcaaagtagagcaaaccttcaaatgtctcattcnnnagaagatcaacaaaggaagtttttaggaaacattttccgtgtggggtgagtaaagtattcttgcattttattcatagctgattgcttagaaaaaaattacacgtttcttttcctgtctgtacttcnnnnnnnnnnnnnnnnnnnnnnnnnnnnnnnnnnnnngtttcgagcctgaaaaaaataggtcctactttctgcatcaagctaaaaaannnnnnnnnnnnnnnnnnnnnnnnnnnnnnnnnnnnnnactactagatttgannnnnnnnnntggcacccatattaaaaattgatggggtgtttaataacaatgttcttaactactgtctctcattccatgcctgggcaaaatgggttttagtttttcaagtgggcaggccagctatacttcctgcctttccaagtagtcacatggataaggacatatttccaaaattcaagctatgacatcaagtctttgttttatttggtgaagtatgttctnnnnnnnnnnnnntatatcaaggctaaagactctttggtttaccattgtaaaatctaaattggttttagcctattttttttcttgnnnnnnnnnnnnnnntttctttgctttggaatagggagttgaaaggcatgcttttggagatccttcnnntgaagannaaatcccagattgct

SEQ ID NO: 16414 - DNA, 593 bp, Macaca Fascicularis
tatgaggagaaaatctcccgtgtgctgcagtgggagcggagaaagaacaaagaaatctgtaaatggtggtggactttgtatatggcgtgtggccccaccctccccacttttgattggtcttcagatccaggcgtccattttcattggagcatgtgaacatacaagacccggatcaacacatggctgggacaggagaacaccagggcagtgcacaaatgggatttcagtgtctcgtgtcatatcttgcgtccactggtgccactgagggcagatagagtctgcagccaggcgtcttggattcaattgcgtgcgtgggtctcaccagcactttccctcttggtgcgtcagtttcttcttctatgaaatggggaaattaacagtatttatttcttgtggttggatgaatgataagggttaccatatatgaagtgtttgcagatgtgccacgttatttttgttattttgttattatattttaatatatctcatgtgcagtaattgtattattatagatgagctttttgagtgagtgtcctggtgacggttcttcttggggagccaggaccagcttttttggcaccttgaggtcccct

SEQ ID NO: 16415 - DNA, 768 bp, Macaca Fascicularis
  misc_feature (1)...(768): n = A,T,C or G
ttgaaagtacaagtatactaaanannntgtgtgtatcacacacagttactcgcttccatttttatgacnnnnnnactatagataataactcttagagaaactaatttaatattagaatttctattatgaatcatgttaaagcatgacattctttcacaatagcactattttaaataagttataagctttaaggtacgaagtatttaatagatctaatcaaatatgttgttgattcatggctataataaagcaggaacaattataaaaacttcaatcaattgaactgttacaaaaccacttgagaatttcatgagcactttaaaatctgaactttcaagcttgctattaaatcatttagaatgtttacatttactaaggtgtgctgggtcatgtaaaatattaggcactaatattttcatagaaattaggctggagaaagaaggaagaaatggttttcttaaatatgtacaaaaaagttactgtggtatctatgagttatcatcttagctgtgttaaaaaggaatttttactgtggcagaaatggtatggatagtaaaattttaagcactaaaatttttttcataacctttcataataaagtttaataataggtttattaacggaatttcattagttttttaaaagtgtttttggtttgtgtatacatacatatacaaatacaacatttacaataaataaaatacttgaaattctctcttttgtgtctcctactagcttcctactcaactatttataatcttataataa

SEQ ID NO: 16416 - DNA, 739 bp, Macaca Fascicularis
  misc_feature (1)...(739): n = A,T,C or G
gaaatatgtttccatcacacaatttgttacttcactgaatttctnnnnnnnnnnnnnnnaagtgaggtcatccttgaaaagtggcagaaaaagaaaatagcagagatgggtccagtgcagtggcttgccactcaaaagaaggcagcagacaaagttgtcttccttctttccaatgacnnnnnnnnnnnnnnnnatggtacctgtgccaagagtgagggcagtcccagtgagaactctcaagacctcttcccccttgcctttaaccttttctgcagtgatctaagaagccagactcatctgcacaaatatgtggtggtctactttagagagactgnnnnnnnnnnnnnnnnnnnnnnnnnnnnnnnnnnccccaagtaccacctcatgaaggatgccactgctttctgtgcnnnnnnnnnnnnnnnnnnnnnnnnnnnnnnnnnnnnnnnaagatcgcaagcctgccnnnnnnnnnnnnnnnnnnnnnnnnnnncccatgagaagcaagagaccttaaaggcttcctaccccaccaattacaaggaaaaaacctgtgataatcctaaagcttactatgcagcctacaaatagccttagtaattaaaacattttatgccaataaaattttcaaatactgctaactgatgtagcattaactaaagaaactacatttacaacttcaaagctagattagttttatacatagaaatcaattagttttaattgaaaactataacca

SEQ ID NO: 16417 - DNA, 582 bp, Macaca Fascicularis
  misc_feature (1)...(582): n = A,T,C or G
cagcgtcaatgtcannnnnaccagcaatattcagtctaaaagcnnnnnnnnnnnnnnnnntggcatcctgatgggcgtcccagttccctttnnnnnnnnnnnnnnnnnnngttgtaaaagtggaattaactgtcccatccaaaaagacaagaccnnnnnnnnnnnnnntaaactaccagtgaaaagcgaatatccctctataaaactggtggtggagtggcaacttcaagatgacaaaaaccaaagtctnnnnnnnnnnnnnnnnnnnnnnnnnnnnnnnnnnnnnctctaagtgcctcattgagttcggtgcannnnnnnnnnnnnnnnnnnnnnnnnnnnnnnngcctccagctatgctgcttcaacaacagtgacttgctctccaatggtatccagtgattcgttgaagaggaggtgctctgtggcagaaactcagctccgggtggctggttctcagtggttgtctcatgtctctttttctttcttaggtggttttcattaaatgcagacttggttagcagaggtttaatttttttttagcaatattaacttgtggcctctttctacacctggaaatgt

SEQ ID NO: 16418 - DNA, 324 bp, Macaca Fascicularis
ggctttcccttttccatgagaaagaaaggtctggggggtttttagtgtcacgagatcaaagacagcgctttgtggggacattccaagacagtacacagtcgtggggtctcctgggaaatccgtatagttcacatttcgagggcaataccgtggtggttttgacgggattttcatataaactttttaaagaggagagtgatagagctaccccttatgtgtaagttgagaatttatagtgtttcatcccatgcacaaacccattttttcctacaaatagtgggggttgtggtggtgtttcttgtgataatatttttttttttgcgc

SEQ ID NO: 16419 - DNA, 1004 bp, Macaca Fascicularis
  misc_feature (1)...(1004): n = A,T,C or G
gcnnnnnnnnnnnnnnnnnnnnnnnnnatactggtgccnnnnnccccacagactgctgnttccnnnnnnnnnnnnnnggtgtttgccctctgggagtctggagacatgnnnnnnnnnnnnnnnnnnnttttgcttgaaattttttccaaaaattaccgnnnnnnnnnnnnnnnnnnnnnnnnnnnnnnnnnnnnnnnnnnnnnnnnnnnnnnnnnnaaacaggaggtggataaagtannnnnnnnnnnnnnnnnnnnnnnnnnnnncatgtggtaccttaaagggacagtacaatcttgacaatagtggcaaaccactaacccagcaaatctaagcccaaggaagaagggcggaaccagaagtagnnnnnnnnnttgcttgagacgacacagagcaagaggaactgaccatctcatggcctgtggcattgcatggtgcagtggacagaagggattatcnnnnnnnnnnnnnnnnnnnnnnnnnagttagatcactcccagaagagaccagctgnnnnnnnnnnnnnnnnnnnnnnnnaaattnnnnnnntattttgcttattatttggtttcattctcataataaagagagtgtatactgacatgggcaggatgataaaaatcatggtttaatattttcttttgtaaacttaatgccaacaaggtctaagttatgtttacaacatgaagaaaacctcaaagtttttaatttttaaaatgcctagaagacaatatttagtcttgaattatctatctgctaagacctccaccaatttcattaaaccaaactgaattattctactcttgggattctgtggccactttacctttgacaacaacctactttatgtagcagtctcaactgtttacatgaaccatagcaaaaaaatcagaatcaaatccatctccttttaatgtttgcacaaagatgcaaacaaaaccaggtaagtatggaacaatgtgcaagtgaggttatcacactttgatgtaaaaatttctattttg

SEQ ID NO: 16420 - DNA, 782 bp, Macaca Fascicularis
  misc_feature (1)...(782): n = A,T,C or G
cccagctgcacagnggaaggagccagctcccagcccactcatcgcagggctcatgatttttacaaattatgttttaattccaagtgtttctgtttcaaggaaggatgaataagttttattgaaaatatagtaactttatttaaaatgatttttaacattatgagagactgcttagattnnnnnnnnnnnnnnnngtgtgtgtgttttttaagttcccgtcattataacatatactgtgatgtatctttactggaaatgagcccaagcacacgtacatggcatttgtgccacaggagggcattgctggggatgcggctggagcacgagccagctctgtcccaggatggtcccaacggacgctgtcaagggcaatgaagtgtttagatgaaggacaagtaggtaagaggacgccttcaggcaccacagataaacctgaaacagcctctccaagggttttaaccttagcaacaaagggagctgtgggaatgattttggcaacactgtcaacatttgttagaacaagtcttttgaaagaaaagtatttccagtttgtcacttgccactctattttgcaaaaggtggcccttcactgtccattccgaatgagccacacgtgccctgctggattctaaattatgtgaattttgccatattaagtcttcctcatttatactagtttttgttacattcagtcaaatccccgaaacctcctataaagcttagctgccccttctgaggatgctgagaacggcatctgactttataaatgcaaatggctaccg

SEQ ID NO: 16421 - DNA, 610 bp, Macaca Fascicularis
gcatatatatgtgtgcagctaggcgagccagcagaggtgtgtgtatgtcttatgaaatgttgaaaagagataagctgactgcttgataaatcattctcaggtgtaaagctccaagtgtaaataaaagtggcatttaacaaatctttcagaacaaagtacagctgactatatataccaagaactaagctaaaggaacagctgagagctcctgatctccacaagagaggaatctaaaagctctgctttgtgcttcttcaccctgcttttgtacaaggaagggggatgatgggaaatcatggacttgtaagttgtatttaaacataaaaatgaacttggtaacttctgggtttagtagagcctcagtgtcgctttaacttagtttacttttttaaagcagcaatggatggttttaaaggagtattatgactgtaaaattgctaaatacgactgtaacagctatgtggtagctgtgacacagttcagttgggcaaaggagtggtgatggactcgttaaaatcatatatacttgaatagtccattgaccgcaactctttatagaccattgtgtaaatgtggaatcacagactgttaacattgcctggacttcagc

SEQ ID NO: 16422 - DNA, 771 bp, Macaca Fascicularis
  misc_feature (1)...(771): n = A,T,C or G
gaacatgagagagagtgatcccnnnangccatgnnggaaaacaacaacttcatcaagatggctaaggaaaaactggcccagaagatggaatccaataaggagaaccgggaggcccacctggctgccatgttggaacggctgcaagagaaggaaccgcctgctgcgcggtgactcccgggacctgatcggtggcctcgtcccatggacaagcatgccgaggaggtgaggaaaaacaaggagctgaaggaagaggcctccaggtaaagcctagaggccaaagaactttccaggtcagccnnnnnnnnnnnnnnnnnnnnnnnnnnnnnnnncctcgcccgccggctgcactcccagcactggggtttggggggaggggggtggccaaggggcgtttcctctgcttttggtgtttgtacatgttaagaattgaccnnnnnnnnnnnnctatttgtttctggggaacaatgatggggtgggagaggggagaggagagagtttgggaaagggagatggagaagagctcaaggacgttgcaaccctgcccagcacagatctgattttcacatctctacctggacattgagcctccaggtaccatggtgaggggagatgaaaaccagggcagtnnnnnnnnnnnnnnnaggacagagccttgggtggggcagcggctgcagggcacaccggagatcccagccagagggtgtgtgaggaccagaggtgtcgcttccgccctgcagcaggtgggatgaggtctgtgtgtgtgtgtgtgaa

SEQ ID NO: 16423 - DNA, 709 bp, Macaca Fascicularis
  misc_feature (1)...(709): n = A,T,C or G
gtgccaaagaccacgtgggcggcggcgcagggtcactgcgcggatgccagcgctcacctggtgatcgttgggggcctggaagagcagggcttcctgactcggaacacaggtggccgtggttactggctgggnnnnnnnnnnnnnnnnnntctgggcaaggttcagggctaccagtgggtggacggagtctctctcagcttcagccactggaaccagggagagcccaatgatgctcgggggcgcgaggannnnnnnnnnnnnnngcgcacggggctatggaacgacgcaccgtgtgacagcgagaaggatggctggatctgtgagaaaaggcacaactgctgaccccgcccagtgccccggagccacgcccattgcagcacgtggtatcctgggggctgctcacctccctggctcctggagctgatcgccaaagagttttttcttcctcatccagcactactgagtctcagaaacactaggcccaacacagccctgtccagtccagtgcctgtgctctgggacctccatgccaacctcatcccaattccactcacgcagacccaacctaacctccacttgctccaaaatccctgctcctgtgtccccgtgatatgactctacttctctctctaaccaaggttaggtgactgatgactggaactgtttggttttctcgcattttccaccaaactaggagctgtcttgcagc

SEQ ID NO: 16424 - DNA, 588 bp, Macaca Fascicularis
agaaggatctgtaagtgtctctctgagatcctctgagcaaggaggtaattaaaattgtgagcttatttaattttcacttttactaagactctctttttattttagccgtataggtgagggacttgatcaggctctgccctgtctgacagaactcattctcaccaataatagtctcgtggaactggtaagttgcacagaaggaaaatgtatttggtgggtgggattaaaggtactatgtgcttcctacagaaaatttacaaaatctagaaaatctcatagaaaatgatctcagtatccgcttgtctttttcttaattcaggatctgggccttttgggttctgcagctgtatgttgcaaatattttcctactcttacttgcactttgacttaggatatcctgttagagaagttcctaatttaggtgcagtccaatgtatcaatctttttctttattgtagcccttttgatgtttaagcttcctctattccagagttgtaaactgctatgttgttttctagaattgcagtgtccaatacagtaccagtaactacaggtggctacttataaataagatgtggtagaactatc

SEQ ID NO: 16425 - DNA, 722 bp, Macaca Fascicularis
tcaaacgcactgtttactttaaacgcacggggagaaacgaataaggaggacgtggtgatttttaatttatacagtaacttttgtacttctctggcgtggagagtttggagccgaacgatttgcattttttacatgtccgacattatttaataaatactttttaaaagaaaagaaagataaatgaagtcaacacgattttctcatctggggaggaactcttggttgcttcgcctggacaagatggaaaacactggtttcctccttgggtagaaagagggagcgaggacaaatggggagtagagataaaacaggcgagaacaagcaccctaattccagtgggctttacaataagacaaaatcagctttacaacaatccctagaggctcaaccacagaataatgccagtcaccaccctgaacgcacaatcttcagtgcaggctctaattactgtacatattattgttaattattattattattgttctgtaaacatgttgcacaagcttagcctttttgcgttctgttgtgtgtggctgtaaaaccccatgctttgtgaaatgagaatcttgacattttacttgtgaaatttggaaaatgtgatcaattaaaatcaactgtgttttgtgttctctatgtcaaagtttagttttatattgagaatgttaacttattgctttgtatcttgggaaaaaaacctttgtaaataagttataaagttcctt

SEQ ID NO: 16426 - DNA, 725 bp, Macaca Fascicularis
  misc_feature (1)...(725): n = A,T,C or G
cagccatgaggagcagaagtcannccggctggccagggagctggagagcagagaggcagagctaagannnnnnnnnnnnnnctacaaggagcagctggggcgtattgagaggaagaatgctgagatgtataaactgtcttcacagcaattccatgaggcagcttcgaagatggagagcacaataaactcaaggtgttccaggctcatcttgtcctttctctgccccagccctggagtcagccgttgctcccaggagccacattccttctgttggagnnnnnnnnnnnnnnnnnnnnnnnnnnnnnnnnnnnnnnnnnnnnnnnnnnnnnnnggaggtgtcattgcttctaggtgctctcagtgggannnnnnnnnnnnnnnnnnnnnnnnnnnntggagcccgtctgctcagggctgcaggcccagatcctccactgctaccgagatcgcccgcatgaggtgctgctgtgctcagacctggtcaaggcataccagcgctgcgtgagcgccgcccacaagggctgaggagcagacatcattccctgtcctggcagtgacttggagccctgaagaagggaccaatcatgggaccacagtccacagagccctaggccacagccactgtgccctgccgtttcctgctgggcccctgcatatgcccctgagcctggggctgccatgtgtttaggaaacaaagtatgcgctactgtnnnnaacaaataagc

SEQ ID NO: 16427 - DNA, 698 bp, Macaca Fascicularis
  misc_feature (1)...(698): n = A,T,C or G
aggaatattgggatactgtaaggcccttgctccagaggtggtgtgcagatcccgccttactaaactgnnngaagcaaaaaaacaccgtggtcaggtaccctagaaaaagaaatagtttgatagagcttcctgatgactatagctgcctcccgaatcaagcttctcatttcaggtgcccacggtctgcagatgatgagcgaannnnnnnnnncctctgtcttttctgtggggctatactatgttctcagaacatttgctgccaagaaattgtgaacggggaagaggttggagcttgcatttttcacgcacttcactgtggagccggagtctgcattttcctaaaaatcagagagtgccgagtggtcctggttgaaggtaaagccagaggctgtgcctatccagctccttacttggatgaatatgnnnnnnnnnnnnnnnnnccgaagaggggcaacccccttcatttatctcatgnnnnnnnnnggaagctccattnnnnnnnnnnnnnnnnnnncattatagaagagattgctaggagccaagagactaatcagatgctatttggattcaannnnnnnnnnctgtgagctccaactctgcctcaagacaatcacaaatgacgannnnnnnnnnnnnnngattcagaattatggaaaactttctgagggctggggaagtattggagggtcttttgctcc

SEQ ID NO: 16428 - DNA, 748 bp, Macaca Fascicularis
  misc_feature (1)...(748): n = A,T,C or G
cagagnngggccaatgcggtgctggggctggacactcaaagcgatcacatggtgatgctgtctgtgattcctggggaagctgagnnnnnnnnnnnnnnagagcctagcggcggcacctgtggcgctggaggagaggaggactcaaggtgcaacctccgagagagccttttctctttggannnnnnnnnnnnnnnnnnnnnnnnnngagaagaggagtattacacagagccggaagtggcggaatcggacgcagccnnnnnnnnnnnnnnnnnnnnnnnnnnnnnnnnnnnnnnnccaaaggtgaactgtgaggagagnnnnnnnnnnnnnnnnnaaaatttcannnnnnnnnnnnnnnnnnnnnnnnnnnnnnnnnnnnnntttctgaacccaaacggtagtgactgtactctagtcctgttttacaccccgtggtgccgcttttctgccagtttggcccctcactttaactctctgccccgggcttttccagctcttcactttttgnnnnnnnnnnnnnnnnnnnnnnnnnnnnnnnnnnnnncttagcaggtcagcctcaacaaggaggttgtgtgtaaataaatctagaacnnnnnnnnnnnnnnnnnnnnnnnntaaaatgaagttgagtaaacttctgttactctgtacttgaggccaggtgcagtggctcacacctgtaatcccatcactttgagaggccgaggtagaaggatcgcttgagcccaagagtttgagaccagcc

SEQ ID NO: 16429 - DNA, 748 bp, Macaca Fascicularis
  misc_feature (1)...(748): n = A,T,C or G
gtgccggttacaagaagagttganaaagctccgcacagccggccccctggagtcttcagaaacagaggaggcctcccagctgaaggagagactagaaaaagagaagaagttaacaagtgacctgggacgcgctgccaccaaactgcaggagctnnnnnnnnnnnnnnnnnnnnagnnnnnnngggagaaggacacnnnnnnnnnnnnnnnnnaacagctggaaaagacagaggacggcagcagctcaaaggagggcacctctgtctgagtctcctctgtggaaagagaagttactgttcaacttaccaaaatgccttacacattccttacaaatacaccgaccaacctacacagcgttatccaggcccaacttccggtagctccgagcgaagccatgagagaccagagtctcttacagccacagaagtagaccttccagagtccccgtttgtaaacgaacctgtgtcacgtatnatnnacactatcctgggcgcagccctgggccaccaccgagtgacgccaaagtcctggttggctctgacagccccgtgggtgtgtgggaggccgggcactctggggtctgtctgtcagtgcaatcgtttcgtgttttttcagcggggcgggacgggaagcgggtgggaccgggcagccagttctcgaaggctgtggggccgactggaggccacagcccctcacccctagacatgccagcgagaactgacgtgcgacctcctgggtgtgatgccat

SEQ ID NO: 16430 - DNA, 739 bp, Macaca Fascicularis
  misc_feature (1)...(739): n = A,T,C or G
atttgccagcagggaagtaaaataattnnngagnnnannncntaagnctaatattaaatcagttttgttaaggggaaaactcaataattgttacttcagctgttgaatatatggttagatccaagttgatttttgtgtctacaattaaattttgtatacaattagattattttttaatataggatttagaaaccaagggtatgtgttttaaaattatactttttcttgacctgtctagctgtcagaaaacgtaacagaagatggacctagaaatcnnnnnnnnnnnnnnnnnnnnnnnnnnnnnnnnnnnnnnnnnnnnnnnnnnnnnnnnncaaaaccaatacagaaatcagctaaagctgccacagaagagacatcttcaagatcaccaaaaatagataagaaaaaaagtccatatggactgtggatannnnnnnnnnnnnnnnnnnctaatggctaagtttgcatgaaaactgcactttattgcaagttagtgtttctagcattatcctatccctttgagccattcaggggtacttgtacatttaaaaaccaacacaaaaagatgtaaatacttaatactcaaatattaacattttaggtttctcttgcagatatgagaaatagcacagatggaccaaaggttatacacaggtgggagtcttttgtatatagttgtaaatatattcttggttatgtaaaaatgaaattttttagacaccagtaattgaactgtatt

SEQ ID NO: 16431 - DNA, 733 bp, Macaca Fascicularis
  misc_feature (1)...(733): n = A,T,C or G
cggcacagtacctggaagagaagtcagaccagcaaaagaaggaggagctgctgaatgccatggtggcaaaactggggaaccgggaagacccgctcccccaggactcctttgaaggcgtggacgaggacgagtgggactagcctgcgcccccgtcacctccaccccaccgacgctgccacctcctagcgtacacctcacagctcatcctcaagctggaagatacctctctggccccggcacacgtcacccctgcgctcctggcttcccttgggcacttccacagcctctgggcttctggcagcttccagggactgttctcacctctgctgtctctggggtcagctgctgctcatcagctgcccactagcatgtagccaggggtgcagggtggcgggaggtcagtagcatgtccccaggcaggccctgggcaccctgtctcccctggtctcactgctgacctgggcnnnnnnnnnnnnnggttggcctcatccaggatctttggtcactccacactgccccatcttgcctgctgtctcagttctggtcaagcgccttgggggctggccccccaccaggccttctggagcagcaccagtctcagggccctgggaccagctgccctgcttnnnnnnnnnnnnnnnnngagaaggggggcatcgcagagctgatggtccaataagggggtgtgagccctgcagggactggcccgcacctgccctggatgtctcagcaa

SEQ ID NO: 16432 - DNA, 1138 bp, Macaca Fascicularis
  misc_feature (1)...(1138): n = A,T,C or G
gccatagtgacccttgnnntaggcaagaccaacagcaactggataggccatttaataggggtaaaggggaccgccagagattttatagtgattcacaccacttgaaaagagagcgacatgaaaaggagtgggagcaagaatctgaaaggcatagacgcagagacagaagccaagacaaggacagagacagaaaaagcagggaggaagggcataaagataaagagagggcacggttatcacatnnnnnnnnnnnnnnnnntggaaaagcaagcagagatagtaggagtgtagacaagaagccagataaacctaaaagtgaagactatgagaaggacaaagaacgagaaaaaagtaaacatagagaaggagaaaaggacagggataggtaccacaaagatagggaccacactgacagaactaaaagcaaaaggtaaaatttgcaggctgcttcaggattacatttaaataactgttaaatgttgtatcttgtaaacaaaagaaagattgcctgctaggattgtgccatctttaaaatttttactatcagtcatttgcagaacagtaaattctatgtgttggtgcagagtgtcctgtaccagtgctcatcatcccttcttcataccaactgtccctagttataggaatttaatatttttaaaaattttacattgctgtatattcaaagatttgttttattaatatgcaataaaggcttagaaattttagttttattccttaattggtaaatatggttaactatggaatatatttactgcctctagtgaatgtcctttatataatgactaatttgggagtaatgtgtggctctgtaagtttgttttaaattgcactgtttttaaagaaactgtagaggagcaacaaaaatccaaacaacttcataatcagattatgctaatcatttagttgagcagtttttgaccaagaatcagaagcccaaggggtacatttattgctttaatctgcactcattgaagtcatttattaccatgtactacagctttgtggtaggtcattgttttcattttcatttttggctcttcagaaacttgaatacttaagcttgtacatgatcttgtgttttgctatcctttttactgtaaaatgtaaatattttaag

SEQ ID NO: 16433 - DNA, 721 bp, Macaca Fascicularis
atcgtgtcagtgctgtgtgtgtgtgtccgagagtgtggtgtgtgatgtgtggagtgtgcgtgtgtgtgtgtgttggggcagaaggaccactctttcctggggatcccttgacccttataactagaaaggacattagggagcatctaatctggtgcccccattgtacaggcgaggtccagagggataacatctgcccaccccaccccttgccctctcgttgcctgcactcatttcccagggaccctcctaggataggaatgccctccttcctagcgccctcccaccctcctcccagccacccacataatcaccatctcagcccagctctggtggtcctctaggccccagtggtctccatgcatccttcctgccccagagtagccagctcaccaaggcctttatccccagcccaggagaaggggcagggagggaaggggctgctccagccctgaggcctcaaagacttgggagaaaagccaaaactcctcatgcccaggcccacatgtctgaccaccccagcccaccccaccaccaaggtaaaagcacaacaggagacccccttattaatgggtgaaatgtatcggggttgtttttttagtcacacggccccgtcctcacccctttgccttgctgtctgtctccaccccagcctctgttccccatttgcctctctttcacctccaagcccccaaatgtaacctctagttgcggacgcggtgtc

SEQ ID NO: 16434 - DNA, 712 bp, Macaca Fascicularis
  misc_feature (1)...(712): n = A,T,C or G
agcaaagccnnnnnnnnnnnnnnnnnnnnnnnannngatagactgctgtttttctggtctgaccgtcgcaacccnnnnnnnnnnnnnnnnnnnnatgctacaaggtacgcaataactgtttggtattttgatgcagatgagagagcacgagctaaagtaaaatatctaacaggtgaaaaaggtgtgagggttgaactcaataaannnnnnnnnnnnnnnnnnaaagacgtcttctagagcctttgatccagcaataccccacttcatctacaataattgttgacgctgtttgttaacttgtgaataagaataaatgggataaagaaaaatagacaaccagttcgcattttaataaggaaacagaaacaactttttgtgttgcatcaaacagaannnnnnnnnnnnnnngactttgtactnnnnnnnnnnnnnnnaatctgtgattgcttacaggaagaagataagctactaattgaaaatggtttttacgtctggatatgaaacaagtgccctgtgtagaatttttttcattcttatattttgccagatctgttatctagctgagttcatttcatctctcccttttttatatcaagtttgaatttgggataatttttctatattaggtacaatttatctaaactgaattgagaaaaaattacagtattattcctcaaaataacatcaatctatttttgtaaacctcttcata

SEQ ID NO: 16435 - DNA, 816 bp, Macaca Fascicularis
  misc_feature (1)...(816): n = A,T,C or G
accagtttcattnnnnnnnnnnnnnnnnnnnnnnnnnnnnnnnnnnnnnnnnnnnnnnnnnnnnnnnnnnnnnnnnnnnnnnnnnnnnnnnnnnnnnnnnnnnnnnnnnnnnnntttctattgatgtaaaacatttgccatctcatagtgagaatataacaagaggatctcggtgaaaggcctcagtgggtgttttgtgtgaggtggcttgtagccagctgcttccttgtggatggtagagtattccagtcctctttgtgctagggttcttgcttccagtttgggatgtgttagaaccaccatttcactgcttcccttcctcaatnnnnnnnnnnnnttttcttgctgtttaatgagcttttaagcctctcgcttcagctttatttatttgtaagctgcattactaactgccnnnnnnnnnnnnnnnnnnnnnnnnnnnnaaaagttcacatttctagtcaccccaatcnnnnnnnnnnnnnnnnnnnnaaatttatatcattctttgtctatgaggtacaagaggaaggaagataatacaaagacatgttgaatagtgaaaaaaacaaaaaacaaaaaaactgaggcaagccaatgttctgtaaaactcactgtaagatggcaaatgttttcatttttaagattctgaatgtaaactagtgtgctagaaagcaaaccaccctccactcaaaccagtannnnnnnnnnnnnnnnnnnnntttattaaaatactttatgagaacattatactttgtaggttaaaaatgaggataaaatgctaaactatcaaaaaaaaaaaaaaaaaaaaaaaaaagg

SEQ ID NO: 16436 - DNA, 764 bp, Macaca Fascicularis
  misc_feature (1)...(764): n = A,T,C or G
tgacttcaacacantccagtgcctgtggttaaggctgtgagcaaagatggaagagtgactgtattttcacttacatgaaaatagctctacccaacacaattttattnnnnnnnnnnnnnnnnnnnnnntaggaagtttctacccagttaaggcctcattttgggataagatttgtttccattgtgttcctgagggcaactcactttactccagaagagaaatgtaatagtgatgtatgtatattcaaacagtaactaacagaatggccagtttatccactggaatttcctgctttcaattnnnnnnnnnnnnnnnnnagagtctgaaagatagcattgtcttcaggcatcacatgatatccacgagatctgatcacactacacaaattaccctgtattcaggaatttcctaaatgacattgctggaataggtgtccatatgaactacagttttcctgatatgaatcaattctgcatggtattatttaaaaataaaacatccttaggctgaatccaggttacttccaaattttggctttgagatttcattctgcatagtaatattttttatcatttaataaacattcaatattaacacattagttctcaaatctaaaaggaaagtagtggaagcctcattttaaataattgaagcagggaagaactaaaccttatgaaatctnnnnnnnnnnnnnnnngcatgacttaaaaatatgattgtacaaagaatattttagaagcattaatgtaatcaaagaaaattac

SEQ ID NO: 16437 - DNA, 775 bp, Macaca Fascicularis
  misc_feature (1)...(775): n = A,T,C or G
tacgttcaagnntgaataatctgtgtaatnaactgattactacagtcattacatataattttgtgtgaataggctttttgatttttaagaagtttgtctagctgagattagtggtggattttctcccacttctgaaatgttcatttatactggttgcatttcaagatcatgaaacaattccagttacatagtaaaaaggatatcttaagagtgattttgttgaacaagatagaggcataagcttaagagcatttccatgaaacttaacacatgcagcattccaggaacctgattgttaaattcaataagaaatttgctttattaatgaaactaagctgcatttcatcaaaaccttgtgacattcccttggtacacaggacataaaacacagaggcattgctatttggtaagttaagcctctgtgattgtaatcataaaagagcaacattgaccaaacctgggaaacaagagcacaatcttgtttggagagtctacataattactttgcactaacatttgcaggatgttcatccaattttaaattgtactgtatgtggctttttgaagtcttcccttgactctagtaaaatatagcttgaaacttgtaaacnnnnnnnnnnnnnnnnnnnnnnnnnnnnnnnnnnnnnnnnnnnnaacttttttccccttcttttcctgattgtaaactaggccaacnnnnnnnnnnnnnnnnnnnnnnnnnnnntcaggttctttcaaatgcatcttnnnnnnnnnnnacaaaaattaaggaata

SEQ ID NO: 16438 - DNA, 520 bp, Macaca Fascicularis
  misc_feature (1)...(520): n = A,T,C or G
ccaaaataaaaacaaaaacaaacagtatccatgaggcatcgtagaatgaggtatgcctgtattgctcttactgaagtggtgtgatataaaccatctctaagaaatgtttctcccctgaagatttccnnnnnnnnnnnnnnnntccataactgtggactccacatctggatccaaccagcctcggatagaagatatttgaaaaaaaaattgcgtctgtactgaacacatacagacctttttttccttgccatnnnnnnnnnnnnnnnnnnnnnnnnnnnnnnnnnnnnnnnnnnnnnnnnnnnnnnnnnnnnnnnntagagatgatttaaattatacaggaannnnnnnnnnnnnnnnnnnnnnnnnnnnnnnnnnnnnnnnnnnnnnncttgagcatcctcagatgttagtgccggagggttggggttgcagtnnntggaacccnnnnccccatggatannngaggcatagctgtactgtgtgtnnnnnnnnnnnnnnnnnnactacaacttgagtgtga

SEQ ID NO: 16439 - DNA, 823 bp, Macaca Fascicularis
  misc_feature (1)...(823): n = A,T,C or G
cganggnannntcactnnnnncngtcattnantaaaagatttcttctgactccccgccatcggctcagttcatgaatcgtctccggaaacacctgannnnnnnnnnnnnnnntctacactacannnnnnnnnnnnnnncttcctggagcgtgtgtgggggcagtaaggacccatgggttcgggaattgatgagctgtcttgatctcaaagaatgtggacatgcctacttggggagtgtggcccaccaggagcatttacctcctaccagcacccccatttctcaggcctcagagggggcatcttcagacatccgcacccctacccagatgctcctgtccatcttgcagtcaacccagtgccccacccccccagcaggatcactgtccttggacaaagagctcactcgtcccagtgaaaccaccattcccactgcgggccacagtctgggagttgggcttgaggctggggagaaccagaagcagctgaaaaacaatgctggtcccacagccgggacatcggccacagtgccggtcctgtccctcctggccatcgtcttcatcctcaccgcactcctttcctatgtgctgtgcaagaggaggagggggcagtcaccgcagtcctctccagatttgcagcttcattatatacctgtggcgtctgactctaatacctgagccaagaatggaaccttgtacgggctgtacgttgcccaggctgttatggaactcctgagtcaagtgatcctcccaccttggcctccgaaagtgtgtggattagaagaagcgtgacctaccatattcagcctacacatatttgttaatat

SEQ ID NO: 16440 - DNA, 1016 bp, Macaca Fascicularis
  misc_feature (1)...(1016): n = A,T,C or G
acagaatatgaagttgaactctcattttcccattaatgagtcttcagtttcctcctttannnnnataggcgtccacctgaacgcctacttctccgaaaccagcacacgtctcgccaaccagatcccatttataattcagtattttatgctccgagagaannnnnnnnnnnnnnnnnnnnnnnnnnnnnnnatactacaggaaaaaaatcgctnnnnnnnnnnnnnnnnnnnnnnnngtgagaccgccaccaagagaagaatgcttaaggagagaatttatcgnnnnnnnnnnnnnnnnnacgcgctctgtcaattctccagcaaagagatccattgaaggacggcgatgcctgtggttgttttcttgtacatactcattcattctgaggggagatggtgcaggatgctgcttctgctttgggggccacactcttctgttactatctgtgtccatctctactgtgctccctcagcatcagagcatacatcagggctccacacaggctcagctctctccaccacccagctcttccctgaccttcatgaaggggtgggtctctagtccttgagccctgtagcacacagttgcagtgtcctaagctactgctctcattgtttactnnnnnnnnnnnnnnnnnnnntccccctacaagattatagaccccagggtgggaaggtccgggtcaaattcttcttttgtatgtccagtcttttgcacagcacctgcaacattgtaactgcttaataaatgacatctcactgaacgaatgagtgccgtggagtgacagagatacctgaggctattgccgaagcccaggccttggacatttagtgaccgttagctggtccctttcagatccactggccatgccccctgcttcccatggttcactgtcattgtgtttcccggattctccactgccccccagaaagaagcctgagtgattctcttttcttcttgtttccctgattatgatgagctaccattgctctgttaagtcttgaagaggaattaa

SEQ ID NO: 16441 - DNA, 702 bp, Macaca Fascicularis
  misc_feature (1)...(702): n = A,T,C or G
tgaggggctcactctactgncgcagggtaggannncaggcaaagttcaccagnnnnnnnnnngagcaagcaggcagtgccgtaaagcctgagcctgcctgaggtgctgcctcctcccaggtggtgcgggggttggtgggcgggcgggcaggcgtgctgacagccggcagtttgcgtgggctgtgccatctgatgtctattcccagccctgggaggaagggggagtcatttatattctgcaggaggaaggggccccagctgtcgcctttctgaccagcaggcctgtagggcaggggcacagagcagagaggagggcacaggtggtctcctgcttagcctggtctgactgcagtgtagggaataggtcaccaggaggagcccttcatcctggcaggccggattgcggagggacttccctcccccttctttccatttctcccttcatcaccacctgccctcacatcatggnnnnnnagctnnnnnngccattagannnnnnnnnagggcactcttcctccagctgggatctcagtggctcccagctgcatggcctcctgcttgtgtgttccctcctccaccatcctctgttccccgcacctcccttattctcatgtctggggtattcacttggcgcctcagcaaggaaggaaacgccttggaggagaagcacatggttgcccttttgtccttgctccnnnnnnna

SEQ ID NO: 16442 - DNA, 714 bp, Macaca Fascicularis
  misc_feature (1)...(714): n = A,T,C or G
tcccatagcggcatcagcnnnnggaccctctcagagtcttggtctcaatgtccacaacatgaccccagctacctccccaataggnnncatcaggtttaggtattatctctgatgacaagatgattaagactgaatgtggttctgctgattttatgaatttggttgatggttttaagataaaataatctgaaaatgcaagactaaaataatggtcaaaatgaacacctctaattgcagatttcctcgtcttcattctacattggcacataactttttctctaacttttcagaggataaaactacctgataggatgttttagaactatctcattaaaagtaaaagtttatttctttataataaatgagctgatgcttgatatccaggactgtctttgttgggaaatgataatatttcttcatactgtgtatttgcaaatatctctcttttgtctgtgaacttttctgaaatcaagcatagtattattgtcatataataattattttataattacttaggattctagttgggtaaagggggtgctaagaggcctgcattgatcataatattatctaataatttgatagtcaacctacgtcatctatcttcttgatctagaatcatgtgtcaattaaaagtatttgcagaggttttgttcctgtacttcttgataggtatcaatgtagactatagatatatatatataaatgtttaga

SEQ ID NO: 16443 - DNA, 110 bp, Macaca Fascicularis
actccaaagagcaacaaacgccacttggagctgtatctggccccaaagttaagggattgaaaacacggttctttgaggaggaaacccctttaggttctagaagaataggg

SEQ ID NO: 16444 - DNA, 792 bp, Macaca Fascicularis
  misc_feature (1)...(792): n = A,T,C or G
gcatgacccagcctggcggaagagggaccannnnnnnnnnnnnnnncaaaaacaggagcagttcaanntggacagggagggaggcnnnnnnnnnnnnnnnnaccatgtggattcccgcactgccctgtccgtgggcggggccccctgtactgtcntcaacatcnnnnnngactgtgacaagaccgccacgccctggtgcacattcagctgagttggatggacaatgaggaagcctgtacctacaggccacgttgctaaggctcaggacaaggcctcaggtcccaggcccagctccgacaggatgtggggtggccacgaccaagacagcaagctcctnnnnnnnnnnnnnnnnnccgccaaggcaggcttgagctgggccaggacacgtggggtgcctgggacgctgctagccgtgcacagtgatcagagggaggctggggtgtgtcctgaccaggatcccccctgccttcctgctcaccctactctggcctccttcacgtgccaaggcctgtgggcagtggggagggctgaacaggacaacctctcatcagtcgtgattttgttccttcgtggtgggccgccttgtgcaaagacacagcgcaggggccacgcagctggtgtaggtggcagctgggcctgggacggttagaactccggaaaccagagcacaagccccacagagggaacagccagcaccgtctagctggtggtcgccgtgctggaatgtgggcctagtgttgccagatcttctgatttttcaaaagaaactagaatgctggattcttaagtgaa

SEQ ID NO: 16445 - DNA, 652 bp, Macaca Fascicularis
  misc_feature (1)...(652): n = A,T,C or G
ttgtgattttcataatctgagtttttgatggcctttgtaaannnnnnnnnnnnatgtgaaggttaattgctgtgctccacagatcttgtctattggccccagtagaaagttaacctttgttgttttccttttataatttgcttattgcacaattgctttagggttaagtgaattatattaagataccttgaaattatagcactcttcgattgagaagctacaatgtttctctcatttactccttaaacaaaagacttaaattagtttgggtcattattacttttattttgcagcatttggtttgtannnnnnnnnnnnnnngtataggatatagatgaagcccctggcttcatgagaagaaaggaaggcccaggttatatgtacagctttctcctgccccttctttactttctctaccacaattttctccactgtttgttttccnnnnnnnnnnnnnnnnnnnnntttaaaaaattttcctgcacctagtagtttcatgtcctgtagacatcctcttaggacattctcaaatttcaaaataaaagatattcatttatgtagttaattaaatttaaagttttttgcagatcagcnnnnnnnnnnnnnnnnnnnnnnnnnnnnnnnnnaatatatgaaaaacttcattccctgt

SEQ ID NO: 16446 - DNA, 736 bp, Macaca Fascicularis
  misc_feature (1)...(736): n = A,T,C or G
gaggctgcagtgagccagtcacagcactgcactccagcctgggtgacagagcaagaccctgtcccaaaaaagaaaacgacaaaccaaaaaaatggagagtaatgattgtacctcataaggttatttggaggagttagcaagggcactcctttaatgatttgtccacctgcctttgcctgtctggtctcatctccttcaccctccccttcactcactctgctcagccacgctgctctcctagatgttcctctgatatgctgggcacagcctccgccctggttgttccctctgtccccagagttccctcacctcctttcagtctgggctgaaatggcagcttctcagaggaaccttccctgaccccaccactttacacttttaacttcccctattcccagcattcttccctgctccgtcaccatctgaaatacaataggtcaggcacagtggctcaggtttgtaacccctccnnnnnnnnnnnnnnnnnnnnnnnnnnnnnnnnnnnnnnnnnnnnnnnnnnnnnnnnnnnnnnnnnnnnnnnnnnnnnnnnnnnnnnnnnnnnnnnnnnnnnnnnnnnnnnnnnnnnnnnnnnnnnnnnnnnnnnnnnnnnnnnnnnnnnnnnnnnnnnnnnnnnnnnnnnnnnnnnnnnnnnnnnnnnnnnnnnnnnnnnnnnnnnnnnnnnnnnnnnnnnnnnnnnnnnnnnnnnnnnnnnnnctaataataataaaaacaacaa

SEQ ID NO: 16447 - DNA, 760 bp, Macaca Fascicularis
  misc_feature (1)...(760): n = A,T,C or G
tcaagatgaaagcnnnaatgtgtaaagtcaaanctgatttaaattttgtgcttttgtattaagacatttcttcatgtggtgatatatcttttgttggacctgctaatagtaggtcaaagaggagtactccttgtcccctattcctgggattatgcagttttctttttagagtttatatagggcaagtggttatttttttctgaattataggatggaaaaagatcatatcctttgtcaggaaatataaacttgaaagtatgtagtcagctcttgnnnnnnnnnnnnnnnnnnnnnnnnnnnnnnnnnnnnnnnnnnnnnnaaaactgtaatgtgtggttctctataacaaggcgatttctgtttcccaaggctcagacctaatccagttatattaaaatcagttaaatgaaatattctatgnnnnnnnnnnnnnnnnnnnnnnnnntccatccatataggagtcactttctttaagacagatggtggtagttatttttgtggcatggttagatttgactggttttgcagaagattatagtcatgtactgcataatgacatatacagtagtgatcccataaaattataatggagcagaaaatctattgcctcataatgttatagccgttgtaannnnnnnnnnnnnnnnnttactcacgtgtctgtggtgatgctggtgtaaacaaacctcttcactgccagttgtataaaagtacagcacattcagttatgtacagtacgtaatactgataatgacaataa

SEQ ID NO: 16448 - DNA, 719 bp, Macaca Fascicularis
  misc_feature (1)...(719): n = A,T,C or G
ttttaaacagaaaacttttaatgaactattcannnnnnnnnnnnnnntcaatgaagttatattattaatctattgctaataatgatttttacttttaagtcacttttgggctcactagtggactaaccagaagtgattgtagttgagtccagtttttgctttttaataatgtgttgaagttttagtttttactctttgttgactttgctgcttattggcaccagggacagagtttctagatacaattttatggattggttttaatttttatgagtttgtctctgcagtgattcggtttttcagagtctcatggcatcatagttttaccagaatgacacagtagccactggtggaggacagcccaggggtggcatagtcacttccgcctgttgctctgacaccaacccaggcagctctgctgtggcttctcctgggctctggcattagttggtctgtgtcacattgtcagaacaggtggctgctatgtggtgccatcgagtccctgctggttccccttgtcctggtagggtcacccattgccgaaggaagtacatccacttggcaggtgacctggaggagtagcttccccgaggacccccaggcttggcctgtgagtgcccaaacccacatttcctaagcacactggacaccctctgaatgcgggttttaataaacatccccgtgaaattgaacacctgtgccacacatgtcacaaaaga

SEQ ID NO: 16449 - DNA, 774 bp, Macaca Fascicularis
  misc_feature (1)...(774): n = A,T,C or G
aaatgcagcaagacaacggtggtttaaagnttgatgatcatgaagtttctgatanctccgtttcttctgtgaaatcgtcagcagcttacatcctcttttatacttcactgggaccacgagtaacggatgtagccacataaggagacataggttataaactagttatcttttaaaaggctcagcaacacaactcttgaaatgcttatcaagataatggtagctatagctgaccgattagaggaattctaggacagtgggagctgtgttactagcactatataattccggtcagtgctgacaaataacatttaacaagtattgcagtaagcatcacttacaggtaccatttatttcaaaacaacttttttagtctgctccaaatttaaaataattaactagctaagcattattattctactggtctaaaaaccattgtatctttttttttccttttcactgttacggccttttcacatttctaaatcccatcttgatatactatgaatactctagaatgatgtaaagcagataggaatgtatgtgtacatatttattgcatacttgcacatcaaatcgatgtacatagtttaacacgtccttttgtgaaacctagaactcagaggattgctttttttctttcagcctattttgactaacttcagtgctttcttagggaaatgacagggcaacagcgatctttctgttggctttgggctgtacttgtgcacataaatctttattctaaaaaaataaaatggaaactttaattttttt

SEQ ID NO: 16450 - DNA, 321 bp, Macaca Fascicularis
caaacgcggcaatggtctcatcaaggtgaacgggcggcccctggagatgattgaaccgcgcacgctacaatacaagctgctggagccagttctgcttctcggcaaggagcgatttgctggtgtggacatccgtgtccgtgtgaagggtggtggtcacgtggcccagatttatgctatccgtcagtccatctccaaagccctggtggcatattaccagaaatatgtggatgaggcttccaagaaggagatcaaagacatcctcatccagtatgaccggaccctgctggtagatgatcctagtcgctgcgagtccaaaaagtt

SEQ ID NO: 16451 - DNA, 778 bp, Macaca Fascicularis
  misc_feature (1)...(778): n = A,T,C or G
gcagcagcgtgannnngacaccacagatgtgggagacccacagcatgcagacactgtgggctgaaaggtgggaagggagaggccaatggaggtggaggcgtttgaaagtgagacagcagcagcagaggcactggtgggccaagtccaggtgaccctcagaatgttgcacaagagcatcgggggaaagaaccagaatcctttaagggaaatgttcttcatgtacaagagagtaaagagatttttctaagaaggttcagctcttctctgacttacctggacatttctagatacttccaaaggaccctgtgggaacccatagctccctaacctgaagatgggaggtcgtaatggagatgctgtgggatttcttgaagtttcttgggnnnnnnnnnnnnccccctcacttgttgttctcccgcgagccaccctccacctgccaaagacactctggtcctcgtatagtgagtagtggggctcacggcctctccaacaacagagaggagctgactgctgtagagctggccccatgacttcctgagtcnnnnnnnnnnnnnnnnnnnnnnnattcttcccacctccccatccccccagctggatcgggcgctgtgcagtgnnnnnnnnnnnnnnnnnnnnnncatttctttggtggacaatattcccctttatctctcattacacnnnnnnnnnnnnnnntgctgtatcgtccgtgctcaaggttttagtctgtcagggctcaccttctcgctggaaagaatttgcttaacttgacattccatgg

SEQ ID NO: 16452 - DNA, 328 bp, Macaca Fascicularis
gttgtctgcaggcactcagaatggtccaacgtttgacataccgacgtaggctttcctacaatacagcctctaacaaaactaggctgtcccgaacccctggtaatagaattgtttacctttataccaagaaggttgggaaagcaccaaaatctgcatgtggtgtgtgcccaggcagacttcgaggggttcgtgctgtaagacctaaagttcttatgagattgtccaaaacaaagaaacatgtcagcagggcctatggtggttccatgtgtgctaaatgtgttcgtgacaggatcaagcgtgctttccttatcgaggagcagaaaatcgt

SEQ ID NO: 16453 - DNA, 780 bp, Macaca Fascicularis
cttaaagtagatagtatactttacacttacaaaaaaaaatcaaattttgttctctattttgtgtgtgcctgtgatgtttttctagagtgaattatagtattgatgtgagtcccactgtggtatagattccataatatgcttgaatactatgatatagctatttaataacatgatttcattatgtttaatgaatttggaaatatgtactgaaagaaatgtaaaacatttaaaatagctcatgttattatggaaaaaagtgcactgaatttattagataaacttatgaatgcttaacttctttacacagcataggtgaaaatcatatttgggctattgtatactatgaatgatttgtaaatgtcttaatttgatgtaaataactctgaaacgggaaaaggtttttaacttagagtggccctaaaatatggatgtgcttatataatcacttagttttggaactgtatctgagtgacagaggacagctgttttttaaccctcttctgcaagtttgttgacctacatggtctagtatggatactaaaaatactacattgatctaagaagaaactagccttgtggagtatacagatgcttttcattatacacacaaaaatccccaaggggcattttgaggcatgaatataaaacatttttatttcagcaacttttccccctatgtaagttactgtggtttgtggtacaacttcattctatagaatattaagtggaagtgggtgaattctactttttatgttggagtggacacaatgtctatcaaga

SEQ ID NO: 16454 - DNA, 744 bp, Macaca Fascicularis
  misc_feature (1)...(744): n = A,T,C or G
ttaaattgtatttactcnnnaaacaacacttgacaggctgtnnnacagggcttctatagatcagtgtgtcaggaatgggaggccccttcctgcctgccttcacgtattggtcccttgacattgacaaaagcacagtgactgtcagcagattcctttacttttgtttgtgggatgtaggaattgttttaatgcattttaaacagtgtttctcaaataggatggctggctaatagacactgannnnnnnnnngtgcttatcttaaaattgcagatttagggagcctgccaatttaacagtctcatcaggtgattcttttcagcagtaatgtttgagaattactgggttaaattgtgggaaagggtccagattttaaaggtgctttaaggttgccctctgccgatactgtttgtctttctactgtttcatcccctaacctcccccaaccctcaaattaaaactagtagaactatagatccacatgaacacacgcctgagatttggtcactcacctatgttttgggtggattgcctaggaaagaaagtcatatggccattgatagttctcatgtaattagttttgctcaccactagtacagatgacccgtttacacatggcttccctcggaagccctcgtcgacagtagctggtgtgaaagacgaggtcagtagagttggaaaagctttataaccgnnnnnnnnnnnnnttgctatttaaagctgtgtgttggttttgtttttctgcc

SEQ ID NO: 16455 - DNA, 764 bp, Macaca Fascicularis
  misc_feature (1)...(764): n = A,T,C or G
ctaccacatgccatgccctccaggctgcccagcgtccctgtatgaggcnnnngaacagacctggngtctggacccggaggagaggcccaccttcgagtacctgcagtctttcctggaggactacttcacctccaccgaaccacagtaccagcccggggatcagacatagcctgtctgggcatcaaccacctctctggcggtgaccaccagtccttgccaatccccagagctctttttccaaagtccccaggctggcttagaagcccatagagtccgagcatctccgaggaggcgggctgctctgacaccacctagggcaactcactcactttacagatggggcaaaaggaggcccagagctgatccctcatccgctctggccccaagcactatttcttcctttcccacttaggcccctacatgcctctagcctttctcactccacccccacccaaagtgctcagaccttgtctagttatttataaaactgtatgtacctccctcacttctctcctatcactgctttcctactctccttttatcccactccagtccaggtgccaagaatttcccttctaccctcaattctcttgtgtctgtaagttacaaagtcaggaaaagtcttggttggacccctttcctaccgggtggatgcagtgctccaggactggggtctgggcccaggtttgagggagaaggttgtggagcgcttcccacctctctgaatagtgtgtatgcgttagtttactgattctgtaaataag

SEQ ID NO: 16456 - DNA, 535 bp, Macaca Fascicularis
  misc_feature (1)...(535): n = A,T,C or G
tgtacccccaaccacnnctggctgggaggagtcggagactgagacctacacagaggtggtgacagagtttgggaccgaggtggagcccgagtttgggaccaaggtagagcccgnnnnnnnnnnnnnnnnnnnnnnnnnnnnnnnnnnncagnnnnnnnnnnnnnnnnnnnnncagctggagcctgagtttgaggaagaggaagaggaggaggaggaggaggaagaggagatagccactggccaggcattccccttcacaacagtnnnnnnntacacagtgaactttggggacttctgagatcagggtcctaccaaggccccagcccagctcaagctacagcagtagtannnnnnnnnnnnnnnnnnnnnnntcacatcacccatcagcacacggaaggcccctggtgtggacactgaaaggaaggccagccaccccgcattcactttctttgtaacaacttcctttgttgnnnnnnnnnnnnnnnacagtgtttataacgtgtacatacattaacttatgacctcattttgttat

SEQ ID NO: 16457 - DNA, 674 bp, Macaca Fascicularis
  misc_feature (1)...(674): n = A,T,C or G
tgnaagggtgcagtgggtaggtcagcgagaaaggagctgactgcaggaaacaaaggcttgctggagattgtataggatggtgcttgtgctgtgtactgaannnnnnnnnnnnnnnnnnnnnnnnnnnnnnnnnnnnnnnnnnnnnnnnnnnnnnnnnnnnnnnnccaagggtctggtggtaagttgcatgcaggaagattgtgagttatttgtgcaggaaggctgtgttctagaccatgaagaaaggcagacttacagcttctttgcttttatctttttgcttttccnnnnnnnnnnnnnnnnnnnnnccccnnnnnnnnnnnnnnnnnnnncttcccacctttcagcattatccatctttcatgatttactcatttaatagaatgtttgttgagctccaggcactgggtttgctgctagaattttacatctttatgcaagagaatacgtaaaattagaatgaatggttggttttgaaagtttaaaattaagaacctctgcacaccgcacgcccctccagatccacctattgcnnnnnnnnnnnnnnnnnnnnnnnnnnnnncacgtgcacgtgcacacacatatgcacatgcatatgcaaatgtgcacacacacaatatgtaaaatacctttggagtgtgggacactgtgcctaagagcacgggctttgaaaa

SEQ ID NO: 16458 - DNA, 913 bp, Macaca Fascicularis
  misc_feature (1)...(913): n = A,T,C or G
aaaagcccaaggatagggactcnatgntctccccnnntatcatctttaaaggaacataacatatatcccacnncttctggatttacctcaagcttattcactgtaagtgnnnnnnnnnnnnnnnnnnnnnnnnnnnnnnnnnnnnnnnnnnnnnnnnccaaagtgaccaaaatccccaaacaatatcgaacaaaggaaacaacgtttggtgccactctaagcaaagacaccacctttactagcactgataaggcttttgtgccctatccagaagatacatccacagagactatcaattcacatgaagcagcagctgcaactctaactattcatctccaagatggaatggttacaaacacaagcctcactagctcaacaaaatcatccccaacacccatgaccctaagtatcactagtggcatgccaaataatttctnnnnnnnnnnnnnnnaaagcacaacccttaacttacggagggaagagacaaccacaaacgtaaagactcaattaccttctgtggcaaatgcttggaaagtaaatgcttcatttctcttaatgctcaatgttgtggtcatgctggctgtctgagggtctgcattttctgaaactaatgaaagcactcctccctgatgtacagttgggaaaatatgttcatatctaacnnnnnnntcaagctatattaagtattcaagaaagccagtcttaacatttctgactctgatgtaaatgaagtaacttgtcttaaataaaagaaatgcacaatgccttggtacttgctgctattttactgtcttaattaagtaaactaatgagtttcttttataaaaaaagttttctttttaaggcttcaatttattgcacaaaatataaagcatctaaactttaatatgtattttatgtatgtttacacgtc

SEQ ID NO: 16459 - DNA, 773 bp, Macaca Fascicularis
  misc_feature (1)...(773): n = A,T,C or G
ttggacatttgtactgaaatccacgataannnnnnnnnnnnnnnnnnnnnnnnagcagtannngatatacctaacttgttatggaggttgattgatatcttatccctgcaaaatactttgacttgtcattttgtttatgatgcaaannnnnnnnnnnnnagaatacttatattctttttctgtatttctttaaaccctgagaataatttacatgctcataatacaggatttcaacatatctgtgcaccttattaagccccatcttaagaaaacacaaagtctaagtctgcnnnnnnnnnnnnnnnnnnnnnnntgaatattaggagatgattctgagaaaggaaaggcgttggcagtactcctgttaagccattagtctctaaattccagctttactgtgaagttctatagagtgttaaatacaaattttcctgtcttgcttcacacagttccttaaaatcagttttgannnnnnnnnnnnnnnnnnnnnnnnnnnnnnatctggtggtccctatggcttatacataactttgtaaaaagaaaaaaaaattttttctgatgctttgaatatagttttgaaaggagttttgacttttttccccctcattcatctcagtagagtgtactatttcacaatacaatttttgtcattaaaattatcatattctttattatataacgttaacaattgagttgatctgtttaaaatataaatctcaagttaattaaaaataagcttttcaaaaatgtattatatttataacaaatgtacc

SEQ ID NO: 16460 - DNA, 733 bp, Macaca Fascicularis
ccaggttgaaaagctggacatcacccctaaaagtgcccagaagatcaagccggtgcttgagcggtggatggctgaggctgaggcccgccatcgagcaggtatgcagaacctgaccgagtttatcgggagtgaaccatccaaaaagcgcaagcggcgcacctccttcacaccccaggcccttgagatcctcaatgcccactttgagaagaacacacacccctctgggcaggaaatgaccgaaattgctgagaagctgaactatgaccgagaagtagttagagtttggttctgcaataagaggcaagccctgaagaacacaattaaacgcttaaaacagcacgagccggccacggcagtccctttggagcccttaacagactctctggaagaaaactcctaaagagatgcccacccataatcagaagcaaaattcacagaaactaaactccacgcttgggactccacgacaataacaatgacttttaatttaatttaaaaatagccccggccatcatcacccttgtaagtaaaagactaagaaaactaccaagtggacagaatggtttctacatgtctgttggttttccaaataggaaacaagaaatttttttgaaaatttttaaacaaggaatacaccacactgaaggtgtatacggtaggatagttcccttcccccacccgtctcccccaaacccagttttttaatggacttaaagcaaaccaaataaccacg

SEQ ID NO: 16461 - DNA, 751 bp, Macaca Fascicularis
  misc_feature (1)...(751): n = A,T,C or G
tgccccatgccgtacgagtcagtgcccgggactttctggatgctggcacctggagcacctggagcccggagnnnnnnnnnnnnnngagcactgggaccgtaccaaaggaggtaccagcttggggccagctacacatgcagccagaggtggagcctcaggtggatagccctgctcctccaagcccctccctccaaccacaccctcggctacttgatcacagggactctgtggagcaggtagctgtgctggcgtctttgggaatcctttcttttctgggactgatggctggagccctggcactggggctctggctgaggatgagacggggcgggaaggatggatccccaaagcctgggttcttggccccaatgattccagtggacaggcgtccaggannnnnnnnnnnnnnnaggacccaggagggcttcggcagagtccacttataattctgtcttgctggtgtggatggatggacagtagatccctatggttgggtctcagctggaagttctgtttggagcccatttctgtgagaccctgtatttcaaatttgccagctgaaaggtgcctgtacctctgatttcaccccagagttggagttctgctcgaggaatgtgtgtaatgtgtacatctgtgtccatgtgtcaccatgtgtctgtgaggcagggaacatatattctctgcatgcatgtatgtaggtgcctggggagtgtgtgtgggtccttggctcttggcctttccccttgcaggg

SEQ ID NO: 16462 - DNA, 708 bp, Macaca Fascicularis
  misc_feature (1)...(708): n = A,T,C or G
gcagtgcgcannnnnagtnnntgcttgaacctgggcaagcagctttggcccccggctgtccagggtgcagagcccgggcttttgtttcctttcgcctccctgcgttttgtggattcgcactgcgatccgggaacagtaggcaaccccgggccnnnnnnnnnnnnnnntgctctcacctggaggggcttgcagggcgcatccgccaggagcgcggtggtccggcagtggtcgcaggtgtagcggaaagcgggttctttcggagaggacggttcctcaggaaaacctcacgaaaatcctcaacgatggtggggcccagaaaacacgagaaggaaaagagggaaaaaaaaaaaaattaaaaatgcacttgcgttggccgggaatcgaacccgggtcaactgcttggaaggcagctatgctcaccactataccaccaacgcttaggtactactggttcctttcatacctcatgttgattgcggtgagtcgggttggacccgtgcggagccagggaaacagcatcagcgagatccaggtaaaagtaatggctgctgtcgtctgcccggcgcaattgtgagtgacctttaccgctagtgcgcgccaccccacatgaacctgtagggttatgcccagtctacagacgaggaaaccaaggtccaaagaagttgagtcaccggcagagctgggattacatcctaagatctctccagg

SEQ ID NO: 16463 - DNA, 691 bp, Macaca Fascicularis
  misc_feature (1)...(691): n = A,T,C or G
tgcccacgcatccatgaggtgcccctgctggagccccnngtgtgcaagaagatcgcgcaggagcggctcacagtcctcctgtttctggaggactnnnnnnnnnnnnnnnnnnnnnnnggcctcannngcacctgggcccggccgggcaaggcgggcatctcctcccaaccaggcaactccccgagcggcacagtggtgtgaagccatggatatcggggcccctaccccatgcccccagcctcctagccataaccctccctgctgacctcatggatcaacgtattaacaagactaactatgacagatggactgcgccggtcccccaacctgcacaaaatttgggggcccccccagactggcccagacactgggggaatgtagtggcccttgtggcctcagccttgtcccccacccactgccaagtacaatgacctcttcctctgaaacatcagtgttaccctcatccctgtccccagcatgtgnnnnnnnnnnnnnnnnnnnngactccccgcccccgccacaagagccccaggtctgcagtgtgccccttagttgagtgggcagggctgggggtggtccagccctcacccggcccccaccccagctgcccttgctattgtctgtgcttttgaagagtgttaaattatggaagcccctcaggtttcctccctgtcccccaggacctcttatt

SEQ ID NO: 16464 - DNA, 725 bp, Macaca Fascicularis
  misc_feature (1)...(725): n = A,T,C or G
gatgaaaagtcctcatcctccgaggatgagcaaggcgacagcgaggacgatcaggcaggctctggggaggccnnnnnnnnnnnnnnnnaagacactgacttgggggaaacatcatccgtggctcatgctctcgtgccagcaccccgggagccgccaccttccatcccgatacaaaagatgcagatagatgaaagagaagagttcggcccacggctgcctcccgtcttctgccccaatgctcgtcagacacttgaggttcctcaaaaagagaaacataaaaagaacaaagacaagcacaaggccaagaaagagcacaggcggaagaaagagaagaagaagaaacacaggaagcacaaacacaaaggcaagcaaaagaataaaaaaccagaaaaaagtagtagctccgagagttccgacagcagtgacagccagagtgacgaggaaacggcagacgtgtcgccccaggannnnnnnnnnnnnnnnnnnnnnnnnccgctaagaaggcagtaattgaaggctgcactggctcgtcctnnnnnnnnnnnncctccatgatggaagcccagtgattgttcagttaacgcattgtacagagtgtatttatatgtaaattcctgctgtaaaataatttttaaaaccttgacgtttcaaagactgccttgaaaggtcgtagaaattgatttctatttttaatttcagttagtgtcagggggaaaaaatccaga

SEQ ID NO: 16465 - DNA, 732 bp, Macaca Fascicularis
  misc_feature (1)...(732): n = A,T,C or G
tcacccaggcaaggcagagcccagccgggctaagtcccgccccctgcccaacatgccaaagctggtcatcccctccgccgccaccaagttcccccctgagatcaccgtcacgccacccaccccaaccctgctctcccccaaaggcagcatctcggaggagaccaagcannnnnnnnnnnnnnncatcctttctgcccagtctgctgccaacgtgaggaaggagagcctgtgccagccggccctggaggtcctggagacatccagccaggagtcctcgctggagagcgagacagacgaggacgacgactacatggacatttgaggggcccttgcagccccaccgccacgccccaggagactggccaggcctgggatgccctggaatgccccctcagcctggaccctgggcggggccagaggcccacgtgggatgccactccccacacagcccccaggcctgcccagtccacctcctcatggcattcaccctgtnnnnnnnnnnnnnnnnnncacaccacgtgggagcccagaggaggaggggtccaccttagccatgtgaaggtggattggtcgccctctgcnnnnnnnnnnnnnnnnnnnnnnnnnnnnnnntgactttctaaatctgcccacacccagctggccatgtccacccctcgacgccgggatgagccggctgtgcctgtgtcacagtggaggggtcctttagggccaggctcgcccctcactttt

SEQ ID NO: 16466 - DNA, 758 bp, Macaca Fascicularis
  misc_feature (1)...(758): n = A,T,C or G
gcccagcctcacttccttgnncnnnctcctgccttnntcaactgttccaaggaggggggcctcattgtgtctcccgtgcatgctctgcagcattgaagtatggtgtgttcacgtagttctagcagtcccnnnnnnngtgagtgggagagtacctgtgtgtttcataacagccatgatccccttgatagatgtttggatattttttggtgtgccctgtgcgtgtgtgtgtgtacaaatacatgtgtatattccttttaaagnnnnnnnnnnnnnnnnnnnnnnnttttgaggtttagcaatagctagctatatatggtaggtgcnnnnnnnnnttttatttagcatggggattgcnnnnnnanncagcacactggactnnnnggtgattcagacaagacaggggnnnnnnnnnnnnnnnnctcccgccaggggcttctccgttcctgcgcatatagactgtacattatgaagaatacccaggaagactgtgtgactgtcacttgctgctttttctgcgcttcagtaacaagtgttggcaaacgagactttctcctggcccctgcctactggagatcagcatgcctgtcctttcaatctgatccatccatctctgtcttgcctgaggagaaagagagatgggccaggcagagaacagaactggaggcagttcatctagggaatgggactgtgaggccatacttgtgaaacgtttggactgctattctagagcttttatttggtgtgttcgttgcacagct

SEQ ID NO: 16467 - DNA, 746 bp, Macaca Fascicularis
  misc_feature (1)...(746): n = A,T,C or G
annnnnnnnttannnnnnnnnnnnnnnnnnnnnnnnnnnnnnnnnnnnnnnnnnnnnnnnnngtatccatggcnnnnnnnnnnnnnnnnnntgaatatgttaccaccaaatcatagtagtgactttttgttggaacctcctgggcataataaagaaaatgaagatgatgtagagattatgnnnnnnnnntcctcaagcagtagtagtgagtctgattgaaaaaccgtaaaagacaatatacagaattgaatactgtagaattccatttctttaacagtagcagggaaatgnnnnnnnnnnnnnnnaaagaatnnnnnnnnnnnnnnnnnnnnnnnnnnnnnnnnnnnnnnnnnnnnnnnnnnnnnnnnnnnnnnnnnnnnnnnnnnnnnnnnnagttttagttttaagccactaggtagatatttaggggaatagtcaacatttactgttgaaaagagannnnnnnnnnnnnnnnnnnnnnnnnnnnnnnnnnnnnnnnnnnnnnnnnnnnnnnnnnnnnnnnnnnnnnnnnnnnnnnnnnnnnnnnnnnnnnnnnnnnnnnnnnnnnntaggtttcttggaattatttagaaaagcatttttannnnnnnnnnnnntgactgaataggcatcatatttctttttgtgtgtcatttaaaagtaacaaaaactccnnnnnnnnnnnnnnnnnncttggcttctgttggaggaatgggaaattgtctcaatttgtacatttgtaatta

SEQ ID NO: 16468 - DNA, 709 bp, Macaca Fascicularis
  misc_feature (1)...(709): n = A,T,C or G
catagaattcatactggaggaaagccctgtgaacgtgacaagcatgggnnnnnnnnnnnnnnnnnnnnnnntcttgtgaggcnnnctggaaattcatattggagataaagttttggaatgtagtgagcatggaannnnnnnnnnnnnnagctcaggtctaatacagcatcaaagaaaccaaacagaatcataacccacaagataaatcagaaatcttgactggaataagcttctagttccatttcaccccttcatcgtcagaggttccacaccacaagaaaatcttgtaaatggtggaagcgaaatccaggctctgtcaatttcatctctgtgacttttattgtttctgagtcttgatttttctcatagggctcgctctccacctgagcaaggactgcaattcccagggtcctccagggcatctggccgcgccattccagtagtgcaggcggcgcgctctttcccgctccgctcaagtaccggaaccggttccccggctcccagcctctcggcagcgcccacgcgcctgggccgaagtgcgcgagcggaagcggtcggcgcggaggcttctgggagatggaggccgaggctgcgacctgcgcaggcgcaaacctgcagctgggggtgagggctggaagtggcgcggttcgcggcagcgccccgatggaacctcctggtcctgtgaggtgagtgttggcggcggcttccc

SEQ ID NO: 16469 - DNA, 864 bp, Macaca Fascicularis
  misc_feature (1)...(864): n = A,T,C or G
gcacagaagcgcatnntcgggnnncanngaaaaggactcgtaccctcgctttctccgtnctgacctctacctggaccttattaaccagaagaaagatgagtcccccgctttaggggccggccactggagtcgagctcagcgttcacaccaggcgggctgggtctcctgcccacctgcctccctcnnnactgtgacggagggggcaagcaagcccccagaggctgtgtctctggacagatggatagacatacggaagtgaggcctggaccaagagaggcccaggctactggaggagtagaaggatgggccccgtggggtacccactgccccggtacgagggggcccaaggaccctggcaggtcgggggccccggccgagccagatctggagctgctgctccctgcttnnnnnnnnnnnnnnnnnnnnnnnnnnnnnagttnnnnnnnnnnnnnnnnnatggggcaggaggtccaggcctaggctctcgggccctcctggagggccattggagctcgcagctcagacccccactttgagttttatttatttaaatagtagttggatgcttggcacgttgtcctgtaataggaaacccttgcctcatcagttttcctgatttacaagtgcaatattttagccaatgccttgtgagaagctgccacacaaaggtggacatcattcttcagcttcaggggatgtgcttgtcccgggcaccagtggtgggcagctggccttctggactaaggcggccttgggggacactgcagtctggctgcacacaaagatctggcaccccctgggtggggtgtcccttgggggcttttgggaaagcattggcaccctcagaccacacagtagccgagt

SEQ ID NO: 16470 - DNA, 749 bp, Macaca Fascicularis
gacaagggcagcatcctgccacccaacacagaaggaaacattggcatcagaatcaaacctgccaggcctgtaaccctcttcatgtgctatgagggtaacccagagaagacagctgaagtggaatgtggggacttcttcaacactggagacagaggaatgatggatgaagaaggctacatttgtttcctggggaggagtgatgacatcattaatgcctctgggtatcgcattgggcccgcagaggttgagagcgctttgatggagcacccagcggtggcggagtcagccgtggtgagcagcccagacccgattcgaggagaggtggtgaaggcctttattgtcctgaccccacagttcctgtctcatgacaaggatcagttgaccaaggaactgcaggatcatgtcaagtcagtgacagccccatacaagtacccaaggaaggtggagtttgtcccagatttgccaaaaaccatcactggcaagattaaacggaaagaacttcagaaaaaagagaagggtcagatgtaatcagcagtgaactcacaacccactgtgcacctaaggcaaatccctggccactctagtctccccgctatggtgaagatgagggtggggcattgagagtgttgatttgggaaagtatcaggagtgccataattccaatgtttttgttcttttaagttaaattcagttactctgcttcctccaagtcctctgtatctttagaatttcccagggagcactcagat

SEQ ID NO: 16471 - DNA, 688 bp, Macaca Fascicularis
  misc_feature (1)...(688): n = A,T,C or G
gggctgaggggcctgttgtnnnnnncagcaaagacggcagagaacgagagcgagaaaaacnnntcagcttcttcaagaagaacaagtagctgggggcaaggtcccaggccagctccttccctccgttcaggaaactgccagggacagtcaacagggaccaccctcttgtcaggacaactgcctgctgnnagggtctgttgccaaggtcaacccatcaccaggaactgtcactggggacaagtccgtgttcccaagggcagcccttctcttctgctgtttaattccagactggtggtgggacccaggcaaccccctctcccacccccgccgacttctcccctctttccccagcctcgtgcctctgtccctcaccaaggtgcggacagtgctgcaccctcaacataggccatgtagggagtgactgcccctgcctcagggtcattctcccaccatagcgagggcactcgccttctgccttctggttcctcacccctgggaccagccaggaacctctcagagctgaagcaggccctgggggcaggagtgccagatgacaggcgcaggagccctccctccccacccccaccctctaactccagctgccacnnnnnnnnnnnnnnnnntcannnnnnnnnnnnnnnnnttgnnnnnnnnnnnnnnnnnnnttgagtnnnccaaggagggataa

SEQ ID NO: 16472 - DNA, 648 bp, Macaca Fascicularis
  misc_feature (1)...(648): n = A,T,C or G
aannnaaatactttaaatcttnnnnnnnaaaannntcattgccaagaaaggccagaaaattctgcgaccaatcaatactgaggtgtacagtaatccaagnnnnnnnnnnnnnnnnnnnnnnnnnnnnnnnngtcctcctatcagaggcatcgttcnnnnnnnnnnnnnnnnnaactagcacctttgaagattaagggtgcccaggagtaaacactaggtaagatacacaaggggaagagaccatttaactatccaacaaatagcgacatcaagaaaatgaccccaattgttgaaaaaaaattttttcacagtaaaattgcagagaatacaaatacaaacaatgacagattactgcttaagatctatcctaacaaattcttttcaaatcaatagatccaataaacagctgggtactgtcagtttaaagcagctgataaaagctatacaagcacttcagaagtcagaaacattaaaaaaagaaaaaagatatttacaagtttcttctttatgtatacacagccatcgcacattacacttnnnnnnnnnnnnnnnnnnnnnnnnnnnnnnnnnnnnnnnnnnnnnnnnnnnnnnnnnnnnnatggggtcaccaaagtaaggtccaactgtccactcttcagcagtcccatt

SEQ ID NO: 16473 - DNA, 724 bp, Macaca Fascicularis
  misc_feature (1)...(724): n = A,T,C or G
agagtcgcnnnnnnnnnnnnnnnacagggatgacatccttcctgtactccccaggacctgcccctctacaaggaggagctggannnnnnnnnnnnnnnnnnnnnnnnnnnnnnnnnnnnnnnnnngcgcatggttcgtctggaggacctgttccagaggtttccaaggacacccatgagtgtggagatcaaagggaataatnnnnnnnnnatctgtgagatagcagacttggtgagacgctatgaccgtaatgaaatcaccatctgggcctcggagaaccgctcggtcatgaagaaatgcaaggctgccaaccccgagatgcccctgtccttcacgataagccgaggattttgggtgctgctttcctactacctggggctgctgcccttcatccccatccctgagaagttcttcttctgcttcctgcccaacatcatcaacaggacctatttcccattttcctgctcttgcctgaaccagctgtcggctgtggtttcgaaatggctgatcatgaggaagagtctgatccgacacttggaggagcgaggggtgcaggtggtcttttggtgccttaatgaagagtcggattttgacgcagccttcagcgtgggagccactggcgtcatgnnnnnnnatcccacagccctgnnnnnnnnnnnnnnnaaccgtggaccggccgcccagacctcctaagtccagaggcctcacgctctcctgtttctct

SEQ ID NO: 16474 - DNA, 675 bp, Macaca Fascicularis
  misc_feature (1)...(675): n = A,T,C or G
aggttaacaattggtccagnnntatgactggacacaaacaggacttgaacgttccaattcaatttcttcctttcagaagagggagatgaaagggaaccaaccaccctattattatttttttcaccttattatttgctgcacccacagctgnnnnnnnnnnnnnnnnnnnnnnnnnnnnnnnnnnnnnnnnnnnnctcctcagtcaacgctcagctgacagttcttcagtgctacactccaattaaactgtacagtaagttctgcagaaatggatctaatatttctacctttatttacaaatatcacataatggattctagttgaatctacatgtttaaatccatcagctaaaaacatattacatattgtaaacatggcaatatttaatacagtatctattctaaaatattttcatgtcatgatcacatttgttatacctgaaattgaatttatgcacattaaagaattactagcaatggttgctgactttacaattgagggcagggggctagggctacattttatcatttcagaaacatcttcaaagtaaagttaaagcttgtctttgattggctcggcgtatccttttcgtatccatatttaaaatgaagattgacacagaaaatagcgagggccccttccaatttacaggattttaaaaaatcagttcgagat

SEQ ID NO: 16475 - DNA, 728 bp, Macaca Fascicularis
  misc_feature (1)...(728): n = A,T,C or G
cagatagagagcagtgaggantccgaccaaggcaagtacgagtgtgtggcgaccaactcggcaggcnnnnnnnnnnnnnnnnnnnngaacctgtatgtacgagtgcgccgcgtggctcctcgtttctccatcccacccagcagccaggaggtgatgccaggcggnnnnnnnnnnnnnnnnngtgtggcagtgggtgcgcccatgccctacgtgaagtggatgatgggggtcgaggagctcaccaaggaggatgagatgccagtcggccgcaacgtcctggagctcagcaatgtcgtgcgctccgccaactacacctgtgtggctatctcctcactgggcatgatcgaggccacagcccaggtcacagtgaaagattctggnnnnnnnnnnnnnnnnnnnnnnnnnnnnnnagcgctttggaaagccaagttggaaggattgcttgagctcaggagtttgagaccagcccagttaacatagtgagaccccatctctacaataaaaaaattcaaagctgtgcatggtggcacacagctgtggcccagctacttgggaggctgagacaggaggattgcttgagcccgggaggatgaggctgcagtgatgcagtgagccatgatcacaccactgcattccagcctgagtgacagtgagaccctatgaaaaaagaaaagattccttcctggtctccctacttcaattgtcaacagcctctgatccattatcta

SEQ ID NO: 16476 - DNA, 704 bp, Macaca Fascicularis
  misc_feature (1)...(704): n = A,T,C or G
cgggctcaccggcaggcctggtgctggcaggacgagtggtatgggctgagcatggagaacatccgggagctggagaaggaggcgcagctcatgctttcccgcaagannnnnnnnnnnnnnnnnnnnnnnnnnnnnnnnaccgagctcgtcaagcacgaagccgcctcggaccaggcctctggggagcccccggagcccagcagcagcaatggggagcccctggtggggcggggcctcaagaaacagtggtccacatcctccaagtcgtctcggtcgtccaagcggggagcgagtccttcccgccacagcatctcggagtggaggatgcagagtatcgccagggactcggacgagagctcagacgacgagtnnnnnnnnnnnnnnnaggacctgtctgacacagaggaaatgttccccaaggacatcaccaagtggagttccaatgacctcatggacaagatcgagagcccagagccggaagacacacaagatggtctgtactgccagagcgcccctgagttcagggtggcctccagtgtggagcagctgaacatcatagagatcaaaaataagatcttcaccttgtgcccagcctgtctgctgtccctgaagataaaaagacgaaaaggnnnnnnnnnnnnnnnnnnnnnnnnnnnnnnntgtggccgtggccgacaagatggccccgcgggaggcaggcggag

SEQ ID NO: 16477 - DNA, 239 bp, Macaca Fascicularis
caggttcagagaggggacgtgattggcctaaagtcaggaactaggcaagctgtcaagccatgctttgtgactttcaagttaattcttcttgttcttgtataataaagttcttggggtagatggtgtgtgtgaaacagtgaagtctcaacagcagaaaagaacaaactgtaaattcatgaataatggttctggttatacttccattatcaaggctaattgttttaagagatactgccttg

SEQ ID NO: 16478 - DNA, 682 bp, Macaca Fascicularis
actgacgtctttctgatctgcttctccctggtgagcccggcctccttcgagaacgttcgtgccaagtggtacccggaggtgcggcaccactgcccccacacgcccatcctcctggtgggcaccaagctggacctccgcgacgacaaggacaccattgagcggctgcgggacaagaagctggcgcccatcacctacccacagggcctggccatggcccgggagattggctctgtgaagtacttggagtgctcagccctgacccagcggggcctgaagacagtgtttgacgaggcaatccgcgcagtgctctgcccgccgccagtgaagaagccagggaagaagtgcacggtcttctagagccctggcacccctgagcctgagggctggcggggagcagccctagacgtgtccgctgttgtgttgagacgtgtggtgtccctgagtcggctgtggggagcggtgagggtgggcaggggggaagcatggggatgaggctgggcggcaggatcctgtcctctctgctgcctcattctggggtgtggctccagccttccctggcccccgccggaggccaggagggagcagggtctccctcagggctgcaggggcaggtgcagggaagccccaggatgggcttccctggagggggagggtgggggggagttctgtccattgcgccccg

SEQ ID NO: 16479 - DNA, 921 bp, Macaca Fascicularis
  misc_feature (1)...(921): n = A,T,C or G
atatttagtcaatttaccgtgtcttaatttaatctttgtacaccttccatttttaagtgcttaaatgagtactatattgcaataaaatgtagtgatataattaaccagccattaaaaatttacttctacagatacagtgtcaattgagtttatatattaggtacttgcatactttttatgattaatatgaaaattagagcaattaaaattaatggtttctacaattaatctgagttctacaacctaaaactgccttcagtttactggcatccctggattagggttaaacctgatattatgggtgacacagaaaggcaacaggaaattaaattcatttttttcatattcataatatggcatatgagactcaccaggcaagcaaatccccagactggttaaaagtaaaaatttaaacgctgttagttagctatattttgtccactgaatctttaacagcaaattgtctaagggctgcagttggagacttttctggaatgtccatttctcctttttgtccgtgccatttttgccacccctcccaccccccaggggagagtagacgaggtgctattgctggtatgagtatggcttgaattcagttaaatacattaaaaagaaaattccttcttaaaccactttttcctctaggattgcaaggcacaattctactccagaagaatgaaatgtggttgagtaattcctcaaataggtttatgatttttataatgatcctttaaaattatctaccaataatttattagataaattctatacatacaaagtacagattcttcatttagcattgatttacttcttagttttcatctttctgaccatccaccgtcttttaaacctcttggcattttgttttttctggatnnnnnagcattattcaaaaactggacagcagcctttttcact

SEQ ID NO: 16480 - DNA, 735 bp, Macaca Fascicularis
  misc_feature (1)...(735): n = A,T,C or G
tggggcccgcgtggcnntggcgggccaagatcgccatcngtctgctggagttcgtggaggagctcttccatggctcctatggaactttctacatgtgtgagaccacactggccaatgtgggctacacagccacctacgacttcaagatggccgacctgcagcaggtagcacctgaggccaccgtgcgccgcttcctgcagggccgccgctgtgagcacagcgctgactgcacctacgggcgcgactgcagggccccgtgtgacaggctcatgcggcagtgcaagggcgacctcatccagcccaacctggccaaggtgtgtgcgctgctacggggctacctgctgcctggcgcgcccgccgacctccgcgaggagctgggcacgcagctgcgcacctgcaccacgctgagcgggctggccagccaggtggaggcccatcattcgctggtnnnnnnnnnnnnnnnnnnnnnnnnnnnnnnnnnnnnnnncaacaccaagtactcctgatgggcagtgagggcctggccacccttcctggagctggccgggcgccagggtccagcccgccctcaaggaatcctgtcagaaagtatgaaatgcaactgttgcaaaatcacttccctaaggttagggctctggattccaacaccacagacaggagatcccagctcagagcaaaggtggacatcctggcaggagggccctcctaaggggttttgttactctgaagaatgtg

SEQ ID NO: 16481 - DNA, 697 bp, Macaca Fascicularis
  misc_feature (1)...(697): n = A,T,C or G
gagaacagcttaactcccatncaactcaatgctgnggaaagacagggacggaaccgtggctcaagcctggtcattgccccctaagcactctctcctggaaggccttagttctagagtgaggggtgggtggaacctgggggcacctgattcaccctgtccctactccccacagttttaggatctaaatgattgcctctggaactatttttctaggctatcccacatcaggatcactgggaaatttaagtttgcagatcccacacctcaccctgaatcctcactcagggtggggtcaggaatctgcattttaactagttgcggggattgtggggggcagtagctgactgtcttgtggtgtttctgtggctctgaagtgttcccccatcccaggaccaatctcttcatatcttctctacagagccacactgacggcctgacccccatgggtagtcacttgggggccacttcctaagttgctgtccagcctccgtgaccccctagtgcttcctggagctgaggctgtgggcagccatccccgcgaccagggaaggggttcccccaatttctcatacaaacagatcagcatgaggacagaggcaggagactttggtcagtcagttacctgggaattctgggctgctgggaaatgatttgggcctctgtcagtttcttttccatgtatgaggagggagaaatt

SEQ ID NO: 16482 - DNA, 741 bp, Macaca Fascicularis
tgggcgactgaacgaaactctgtctcaaaaaaacaacaacagtaagcttttatatttaattaaatgatacctttcactgtgcaatctcaagaggaagattttctaaattagacattgtctttaccttaaataagaaaattgtctatttcagtgtctttttgtagcaagattgaccaaaacaggtggtaagtgtgtaatttttaactgtcatgaaatactgtaatgctagtaaggaaatggtctccctttggattatgggaagtttcttgtctgtgatatggggtgtctgtgtacatatatgtatatttccttttttaatacaggataataatatggggtcttgtccttcaccttttaagttcagggagcagtttgtcctgaccacacatatgttatcagtgtaatgctttatgaagctttagaaatgagctcatgactcattaaaaaataaacatgatactattttaatattttcaaataaataatctgaggatgtgtttcatactttagcatcagcgctaagttgtgccttgtagatttgcattgtctatacatgcaaaagactattaagttagaatgaagtagactccttaattactatgaaattctatcttgcaaatgctctagaataacttgcattttaaagtgtatttgcacattttacatatgctatgtggttgcctttgggttttctgtacagattgtttttgttattaaatggaaaaggcctgaattatgctc

SEQ ID NO: 16483 - DNA, 720 bp, Macaca Fascicularis
  misc_feature (1)...(720): n = A,T,C or G
gaagccgggctggtcccagcacttgannnnagctgcactgctgtacagggctgccgtcacccgaagtcaggtaaagtatgggaaggctcctgagctctttccctttttccttattctccctggggtccaagtgtaatcccccacattatgctcaattttaagccattccctactttacccttttaaactatgttcccttcttctggattcttagtgacctctttccacttctgaccacagtcccccccatcnnnnnnnnnnnnnnnnnnnatctcatcagaagaggaggaaggagaggtggacagtgaagtagannnnnnnnnnnnnnnnnnnnnnnntcagagnnnnnnnnnnnnnnnnnnnctatctaccttcagctcagagaatccatcagatggggaggaaggcacagctagtgaaccttcccccagtggcacacctgaagtcggcagcaccaacactgatnnnnnnnnnnnnnnnnnnnnnnnnnnnnnnnnnnnnnnnggctcagaaatcccactggacccacctccttcagaggtcatccccagcccagaacccagctccctgcccattccacaccaggaacttctcagaggaaagcagggccctcccaattctgaggactcagactgtgacagcacnnnnnnnnnnnnnnnnnnnnnnnnnnnnnnnnnnnnnnnnnnnnnttccctccctccatgaaagccactcatattc

SEQ ID NO: 16484 - DNA, 720 bp, Macaca Fascicularis
  misc_feature (1)...(720): n = A,T,C or G
acagggtcagtggaaaccatgtcaggaggctggccaggccacaccccttgctgtctcagcagacgggatataggaagcttctgggcttagctgtggaaaaccaagtaccctcactgggatgggacatgagggacagctagacttcaccccctcccnnnnnnnntgcctccaaagcaaggagaattctgccttaatctgttgggctccagtctccaaggttgagttccagtgtatcccactgggagtgaatggatcatgannnnnnnnnnnnnnnnnnnnnnnnnnnnnnnnnnnnnnnnnngaaggagattcccgagtagagnnnnnnnnnnnnnnnnnnnnnnnnnngcgacgggnnnnnnnnnnnnnnnngtctgtgttgttagaactcagaggaagagggcaggggcagcacccgatggggcagcannnnnnnnnnnnnnnnnnnnnnnnnnnnnnnnggctggggcatggaggtacctcaccaggtgggtgtcaggccccctctagagtttctggccattcacttaccactctgttctccccctgacccccgctccattgtttataatgggaaaannnnnnnttggctaggtgtctctcatggctgctccatcctagcccccacaagctggggctttctcgtgtagaggctgtgcccgccccatgatgagtnnnnnnnnnnnnttgagggaagaaggaaattcataccagcagttt

SEQ ID NO: 16485 - DNA, 732 bp, Macaca Fascicularis
  misc_feature (1)...(732): n = A,T,C or G
acncagtggtgtgagcagatgctgcacacactgagcgccacaggcagcctggacgtgcccatggctgtagcgatcctcaaggaggtggaatccccctatgatgtccacgattatatccgttcctgcttgggggacacgctggaagccaaagaatttgccaaacaattcctggagcggagggccaagcagaaagccagccaacagcggcagcagcagcaggaggcgtggctgagcagcgcttccctgcagacggccttccaggccaaccacagcaccaaactcggccccggggagggcagcaaggccaagaggcgggcactgatgctgcactcagaccccagcatcctggggtactccctgcacggatcttctggtgagatcgagagcgtggatgactactgaccagcccggacccccagcccctgggctgtaggccagggtggctgcggcggcatggaccgagggtcccagcctgcaggctccccgcagggagcagaggaggaggcaggggcggggtccccagcacttgttacaaacacacgatgcaccttaactcacccaccacgaggcactttacagactgggggagggggttttctttttattttttttttaattttaaacgactttgaagaaaagttaggagaggcaaaaatattgttaaaaactagactctaaacaccccttcccgctgtgaggatagtgggtgtgacgatgaaggtccacagagga

SEQ ID NO: 16486 - DNA, 693 bp, Macaca Fascicularis
  misc_feature (1)...(693): n = A,T,C or G
cgcctgcccaaaagaagcccttcacgccggtcaagtacttcnccatcgaccgcgtattccggaatgagaccnnngatgccacacnnnnnnnnnagttccaccagatcgagggtgtggtggcggatcacggcctcaccctgggccacctcatgggcgttctgcgnnnnnnnnnnnnnnnnnnnnnnnnnnnnnnnnnnnnnnnnnnnnnnnnnnnncaacccatacacagagcccagcatgnnnnnnnnnnnnnnnnnnnnnnnnnnnnnnnnnnnnnnnnnggtcggaaactcgggggtcttccgtccagagatgctgctgcccatggggcttcccgagaatgtgtcggtcattgcctggggcctctccctggagcgcccaacgatgatcaaatatggcatcaacaannnnnnnnnnnnnnnnnnccacaaggtaaacctgcagatggtgtacgacagtcccnnnnnnnnnnnnnnnnnnnngccgaggccccctcccacacaggaggctgcgtgacatgggccagtctaggacagctcatcctccctgagtccctgctgctgcactcctttgcatccctggccagtgaccttgtatttatgaggcctctgtgaggccagcccccaccttactctttcccacctgtcccagaaccagaatcnnnnnnnnnnaggaccaggtagcaggttcctt

SEQ ID NO: 16487 - DNA, 712 bp, Macaca Fascicularis
  misc_feature (1)...(712): n = A,T,C or G
annnnntaaccattnntcctccatgacgtttgcacagtgttccactgttgcagatgtgagttacaaatcatgcggctatgggaccaccccacagcccccacttgtggagatttggtggctggctggagaggagccagtgagtggggtccatgtaaatcaggacacttgggactcctcccacccacggccctggcactgcagaaggggaagcctgtgcaggtgggaggctgggctggaggcccccctcagatcccnnnnnnnnnnnnnnntggctacttccctgtgatgggctgaacctgtacgacttccctttccctcctaggtgggccttgctgtgatttcacctgaacttcacctgctggggaggggaacagggtgccaggcaacattggccctgggtgttgcctggagtcttctcctccccgcttgcccaccctgcccaccttgggtgtttggtgcctccaagcctcatgtggggactcactgtagaggaaaaaatgtgccctaagttcccacatgtggaactcaccgcagcaggcagtattacttctgggannnnnnnnnnnnnnnnnnnnnnnnnnnnnnnnnnnnnnnnnnnnnnnnctctcctnnnnnnnnnnnnnnnaggagggtcagggcccagcatcatgcccaccccaccccctccaggnnnnnnnnnnnnnnnnnnnggctttgggggtgggnnnctgcg

SEQ ID NO: 16488 - DNA, 748 bp, Macaca Fascicularis
  misc_feature (1)...(748): n = A,T,C or G
catgtacttaacaggctgcccaagcctgtgctcttgccagagctgcccacgcttctttccttgctgctggaggccctgtcctgccctgactgtgtggtacagctctccaccctcagctgccttcagcctcttctactggaagcaccccaagtcatgagtcttcacgtggacaccctcgtcaccaagtttctgaacctcagctctagcccttccatggctgtccggatcgccgcnnngcagtgcatgcatgctctcactcgcctgcccacccctgtgctgctgccgtacaaaccacaggtgatccgggccttagnnnnnnnnnnnnnnnnnnngaagagactggtgcgcaaggaagcagtgtcagccaggggggaatggtttctgctggggagtcctggcagctgagccctcagtcctggcctagactgttctgacaatctaacctggaattactatcgannnnnnnnnnnnnnnnnnnnnnnnnnnnnnnnnnnnnnnnnnnnnnnnnnnnnnnnnnnnnnnnnnnnnnnnnnnnnnnnnnnnnnnnnnnnnnggaacataagagtccagatttctagtggatttgtgaaataagtgtgtgtgagacacttgtgtttgaagaaagatctagggtcctgggtctcttgtattggtatgtcagaaaaggggcgatatgctgctgaggggtgagtgcatatgagtgtggccctgaggaccgaggctggtggatgtgtgtacctgctgaaga

SEQ ID NO: 16489 - DNA, 785 bp, Macaca Fascicularis
  misc_feature (1)...(785): n = A,T,C or G
agtataggcaacataatgagatactgtgcttccnncctccccttcagttcagagccaaaatggtctagaatctggcactttactcatttcctttgattaaattaaattgtactatgcnnnnnnnnnnnnnnnnnnnngatagccgtagaggactgcagctgtctaggtctgtggccacatcttggggacacactggattgttcccaatgtgcagagttcagcacttacctgggagtgctaggggttaggcttttgagcttgaacgtctgtgtgtgaacagatgaaaaatccttcagtacccaagtcccaatctgtcctatggggagcagtttgggggcggcgggcagcaggagcctgggaaagaggccctcgccaggtgatggccgggccagggtggcctggggcgcccagaggagtgtgcttagtagnnnnnnnnnnnnnnncacccttggcttttcctactgtgtctttgttaaaaggcctcagcaatccacagaactcactctctccttccttccacctgtcagcttctctgcttccaagataagaaccatttgtgtaacaccaatactcaacttcagaaagacatgcattatgtggttgcaatcaaccccgatgctttcagacgacctacttacatcttcagtgtggataagataaagaacaaaacaaatgcatctaaacctctgggcaatccagttgacttttaaatgtaagaatggaattccaaacacttaacacattcagctatatgacagaaagtaaatctatggatatggtatttt

SEQ ID NO: 16490 - DNA, 781 bp, Macaca Fascicularis
  misc_feature (1)...(781): n = A,T,C or G
tgatttcaaaaccacatatgaccagatgtacaatgatcttcttaggaaagacaaagaactctatacacagaatgggattttacatatgctggacagaaataagagaatcaagccccgaccagaaaggttccagnnctgcaaagacctgtttgatctgatcctcacttgcgaagagagagtgtatgaccaggtggtggaacatctggttcaagnnnnnnnnnnnnnnnnnnnnnnnnnnacgtagtcaacgtggacatccaggacaaccacgaggaggccaccctgggggcgtttctcatctgtgagctctgccagtgtatccagcacacggaagacatggagaacgagattgacgagctgctgcaggagtttgaggagaagagtggtcgcacctnnnnnnnnnnnnnnnnnnnnnaatgagcccagcgcccgcctggagccgcctccggagcttcctgttcatactttttccttcctgacattggtttttacttacaggtgttccgctggtgacggtagcattgcccaaataaactgtgcatatgaaatgggagaggagatgccagaagnnnnnnnnnnnnnnnncaagttttttctttcccacttttacttatgagcgggatattgattataaagtttttcttctttaaccagaaaggaaagnncggtttgtgtgcacttcccgacgtacctgtgtctccatgtgcctgccttccctccctcctccccacccggctggactgtacacagccctgctgcggcgtgttgggaatgacnggaa

SEQ ID NO: 16491 - DNA, 717 bp, Macaca Fascicularis
  misc_feature (1)...(717): n = A,T,C or G
agctgtacaacttgtaaggacagttggccacaccactacaaaccacttnnnnnnnnnnnnnnnnnnnnnnnnnnnnnnnnnnnntcccatgaacaattcctnnnnnnnnnnnnnnnnnnnnnnnnnnnnnnnnagtgttgtttctccagtcnnnnnnnnnnnnnnnnnnnnnacttcagcaccatcgccaacagcnnnnnnnnnnnnnnnnnnnnnnnnnnnnnnnnnnnnnnnnnnnnnnnnnnnnnnnnnnnnnnnnnnnnnnnnnnnnnnnngagagaaccacgaannnnnnnnnnnnnnnnnnnntggaatagcagagacaacagtagctatggaagtgacataacctaaaccatgtggctctgacctgtgctgacggtgtgcagtcattcatattccagctgaatgcaaaaggcaccactctgtggatcacagagtgtaacaatggacctaaatggactatagtatattggatgttaaatccatatatgatgtatattttgtaaaattgggaaaatcactaccttgtaaaatagtttatttgtatcatcaatattatttctgttacttgaatannnnnnnnnnnnnnnnnnnnttttgcacttgaatttgcaactgaatggattttaaaaaataattctttaatgggatcatgagcatgaaatgggatcctgcatcacttgttttaactatttattttgccatgtttacatt

SEQ ID NO: 16492 - DNA, 716 bp, Macaca Fascicularis
  misc_feature (1)...(716): n = A,T,C or G
tagccattannnnnctgannnnngccattgtggttaannngaggattgggctgtcttggggctcagaaggtaaagaactgtttgagcagatgtgtgtgggcagcactggattccacccaactgccaagttagtattgttagagnnnnnnnnnnnnnnnnnnnnnnnnnnnnnnnnncaaacatttttaaattatggaaagttaaacctagaaagannnnnnnnnnnnnnnnnnncaactctctcattttaaaagtgaannnnnnnnnnnnnnnnnnnnnnnnntangatcttccaggaacaaagacaagaatccaaatgtacttggggacaagaattagtccccaaattcagtgttcttcctagtattaaannnnnnnnnnnnnnnnnaattttggatttcattcttgtnnnnnnnnnnnnnnnnnnnnnnnnnnnnnnnnnnnnnnnnnnnnnnnnnnnnnnnnnnnnnnnnnnnnnnnnnnnnnnnnnnnnnnnnnnnnnnnnnngaatcacttgccaaagacactggcatttagcaagctctcttcannnnnnnnnnnnnnnnnnnntgggggatcctttggtttcattgttatgatgtattttttaaatgtactagtcatatccttgtttctgtatttttgctgannnnnnnnnnnnnnnaagttttgttttaatggtatatattggattnnnnnnnnnnntacaaaancaa

SEQ ID NO: 16493 - DNA, 743 bp, Macaca Fascicularis
  misc_feature (1)...(743): n = A,T,C or G
aaataaggactccacctttagggggtcctccatgtttgctgggtattagccaagctggccctgggaaaaagtagatactgtccatggactaccaagccagcttgtttctcatgccaggggctaacagatccagtgggagtccatggtgtcatgccaagacagtattagacacggccccagaagggggcattatgggccctgcctccccataggccatttggaatctgtcttcaaacaaaggcagttcagtccacaggcatggaagctgtgaggggacaggcctgtgcgtgccatccagagtcatctctgagccctgcctttctctggagcattctgaaaacagacattccggcccagggaatnnnnnnnnnnnnnnnnnnnnnnnnnnnnnnnnnnnnnaggtgccagtctggcaactgaactccctctggagacaggcttgagggaggattcctcnnnnnnnnnnnnnnnnntttatttatttattttgttcctttatttattggagaggcagcattgcacagtgaaagaattctggatatctcaggagctctgaagttctagctctgactctgctgttcccagggatgtgaccttggggaagtcacttatcctcttgcagcctcagtttcctcatctgaaaaataatgactgacttgtctaatccatagggatgtgaggttctgctgaggaaatgggtatgaatgtgccttcaacacaaagctctgtcaatgagtgataca

SEQ ID NO: 16494 - DNA, 722 bp, Macaca Fascicularis
  misc_feature (1)...(722): n = A,T,C or G
aagaagacgtccaaannnnnnnnnnnnnnnnnnnnntcagccnnnnnnnnnnnnnnnnnnnnnnnnnnnnnnnnnnnnnatgcaggggagatggtcatcgagtactccggcatcgtcatccgctccgtgctgactgacaagcgggagaagttctacgatgggaagggcatcgggtgctatatgttccgcatggatgactttgatgtnnnnnnnnnnnnnnnnnatggcaatgccgnnnnnnnnnnnnnnnnnnnntgtgagcccaactgcttctctcgggtcatccacgtggagggccagaaacacattgtcatcttcgccctgcgccgcatcctgcgtggtgaggagctcacctacgactacaagttccccatcgaggatgccagcaacaagctgccctgcaactgtggcgccaagcgctgccgtcggttccttaactgaggccgtggttgcccaccacgacccctcacacctcctgctgccgtcgctgccatcttgcccctagcatgagggccccccagcccctcccagagcatctcacccccatcctcatgttcagggtggaagtgggcatgcaggcgacaagggccctgcctccacccctccagcccacccagcaatcgccccctttctgccctgggggcccaggatgtagatattgtacaaaggtttctaaatcccttattttctatgcacttttttatttaagaggtgggtcccag

SEQ ID NO: 16495 - DNA, 674 bp, Macaca Fascicularis
  misc_feature (1)...(674): n = A,T,C or G
tgctgctgtatatatttttaactccttaatataatccagattaaataagggatttattagaaggaaactgggatggatagttaacagtgaatggaattaggtgtaggaaccagagcaagctacagcctcaggaaccgaaattgcacatctgtatggaaagtnnnnnnnnnnnnnnnnnnnnnnnnnnnnntggtctctttagcttttgacttcaccatatactgtcttgctcattctgtgggcacataatgttacaaaaattatttgatagctcaaaggaacttagtgatttggcccgtgaccctccagcacagtgttctgcaggtccagttggggatgatatgtttcattggcaagccacaattatgggacctaatgacagcccctatcagggtggagtattctttttgacaattcattttcctacagactaccccttcaaaccacctaaggttgcatttacaacaagaatttatcatccaaatattaacagtaatggcagcatttgtctcgatattctaagatcacagtggtcgcctgctttaacaatttctaaagttcttttatccatttgttcactgctatgtgatccaaacccagatgaccccctagtgccagagattgcacggatctataaaacagatagagaaaagtacaacagaatagctcgggaa

SEQ ID NO: 16496 - DNA, 916 bp, Macaca Fascicularis
  misc_feature (1)...(916): n = A,T,C or G
aaaaaaaaaatcactgttgggctttttttttaaaggtccataaatcttcaatgcaatgtttaactggggaaatggttatagcagctctcacataattatgtgaattaataaacattatcacagtattaagaaagcaaggtaaacaaatagcttaagtattttatttgtttgcaactaagcttgttaacactatataatgaaaatgtacaaagaataatgttgcagtttttggttagatttaagtcaaagacattcattaataaggaatcttcgaatgtgaatattccagaaatttatctaagccatctgatcagaacaactgtctctgaatattaccttactttggaaggtattggcatacatttgaattaaactcagaatttttcaaaataagccctaattaaaaaaactattctatattcaaagtaaaacaatattaatagaactttcctttccagaaacaataaaggaaacaaggcattttgtaaaatgtggtcctgaacaagtcacagtaaaaaataaatgtatacttaacttccacctcctcaaaacagaggctactttctgttcctcagccttggaaacaaggtgaagaacagcctatgtgcgactttgggcagggggttgccaaaacaaagctgaagcagttgaccatggacacctcaaaggaattcgggagaatctgaccaaaggatccaaattctatggtttttttgagacgaagtctcgttttgtcacccaggttggagtgcagtggggcgatctgtgctcactgcaacctccacctccaaggttcaagcgattctcctgcctcagcctcccaagcagctgggattacaggcgcctgccaccacgcccagcttattttgttgtatttttagtagagacgnggtttcaccgnnnnnnncaggnnggt

SEQ ID NO: 16497 - DNA, 1286 bp, Macaca Fascicularis
  misc_feature (1)...(1286): n = A,T,C or G
tgaagccaaatgaagatcctagtactcnnnnnnnccgggacccgagcagccagccagccgcctaactcctcagattctgcccagaagccctgggagcggagcaactcggtggagaaacctgtgtcccagactcactccaggatgaagcctgctgggagcgtgaatgacatggccctggatgccttcgacttggaccggatgaagcaggagatcctagaggaggtggtcagagagctccacaaggtgaaggaagagatcattgacggcaggagctgagcgggatcagcaccacgtaaggggcctgcctcgcagcgctgagatgtcgagcccatccggcgacagaggacagccaggagcccagccagccccagactccagtgcaccggagcacgcacaggagcctgggcgcgccgccgtgaaacatcctgacctgtgaccacacgttacagtgaggaaaccaagtgcaactcctgggttttttagattctacctgacacagaacaccaggtctgctcatcttttttgtgttttatatttgcttatttaaggtacatttctttgggtttctagagagatgcccctaagtcacctgcttcattagacggtttccaggttttctcccaggtgatgctgttaacgcctcagctggcagtgaccgccggcccggcgtggcgccactgcacaccgcagagctgtccaggcgcagctctgtccccagcgctcatggtgttgaaactgtctgtcatgcaccacggtgtctgtgnnnnnnnnnnnnnnnnnnnnnnnctgtctgcaccctcgggctcaggccctcgcattgatccttcacgctgcaggctgggggtgcccctttccgggaagcgcccgggaccacggtgaccaggatcgtaggcaggggcaaggtggtagtctccaacaggagcctgggctcacacattcccaagccccggcagggtgggctggtgtcctggggctgggcttcaggtcctgtctgtagggaactcnnnnnnnnnnnnnnnnnnnnnnnnnnnnnnnnnnnnnnnnnnnnnnnnnnnnnnnnnnnnnnnnnnnnnnnnnnnnnnnnnnnnnnnnnnnnnnnnnnnnnnnnnnnnnnnnnnnnnnnnnnnnnnnnnnnnnnnnnnnnnnnnnnnnnnnnnnnnnnnnnnnnnnnnnnnnnnnnnnnctcctgggaggaccacctggcctgcaatgggctgtcccaggcccctgccctgnnnnnnnnnnnnnnnacagagnctctgaccctcggcttcaggacnnnngtc

SEQ ID NO: 16498 - DNA, 746 bp, Macaca Fascicularis
  misc_feature (1)...(746): n = A,T,C or G
aggggattgaaaggatccaggatgggctttgtgtgtgtgtctccgattctcatttattagtgagcacacctgtgtatatatataattcacaaggagatcatcaagggaaaacattttgcatgtgtaaagcttcatgaagttctctttaaaaaataccaaagcttgtttatttctgataattaacctaagcccttatgaaaataaacaaaatgaagggattnnnnnnnnnnnnnnnaaaaacaccaaaaggaacaaaggggcctgcattaaaatctatttgctaatgcttcacaactaggagagcatgccgtcttgatgtttgaaaaacccagggtcttcgcccttcctttgatttgtgcaattctgtcttccacaattccggagccttcagtgaggggtagctacatgccccatgcctgccctttctttccttccttgctcactttactatgggtgtattttaatcttgtgtaaaaatatnnnnnnnnnnnnnnnnnnnnnnnnnnnnnnnnnnnnnnnnnnnnnnnnnnnnnnnnnnnnnnnaaacagatttggtttgtgtttttgaaatgtcagttcattttgtgccactaacactgtgatgtataaaagagctgtttgaatgccttttaatgttgtgttttgtactctggaattatatggaaaaagtttgatttgtaatttcaatacatattttaaatgtattgtgtcttacgtagtttgtccccccatccccctttagcagg

SEQ ID NO: 16499 - DNA, 694 bp, Macaca Fascicularis
  misc_feature (1)...(694): n = A,T,C or G
tagtactgnnnnnnataaaatnctcatttggtgtcctcaaggtgcggaatatggacttaagggctcctccagacaattcaaatgtattgtagacagttaagatagaataaaactcacctttttgtctcactgaataatttatttagtattatttctcactagtatatatttcatcaagagtagtttcattcatttcaccaattttaggtgatttttcttgttgctgttaatgttaagtggaaacagcaagatatacaagtgatccaatgagtcttttgtgccccacccaactgcccccacaaaggtcaaggggccccttaatgatacttgatgtggttatcaatcactacagagtagtagcttcaatataaacaaaactttcaaaatccattcaaaacacaaaataagacataagcttaattaaggaaggttttctcatatgtaaggtgatatagaagataaaagaagcaggtatatctgacacagatcaaacatagtgtgcctgatgtggtcctagctttaggacctgggcagagaaaattaagaattcctgttggcatgagtgtagaaaggtgctgctaacatagttctgtccctagttactactttttttctgtgcatccgtctttgccttgatatgagttttggcttctctatcagctccaaacattttcttgttttcttttctgtattg

SEQ ID NO: 16500 - DNA, 1221 bp, Macaca Fascicularis
  misc_feature (1)...(1221): n = A,T,C or G
cagcccctcctgcaaccctcccactatgggcaatctgggatctcaatgtcccacatggacctaagggccnnnnnnnnnnnnnnnncccagccgggagggagaacccagagagacagctcttctactacccccacagacctgctctggacacttactcatgccctgccaagcagcagatggggagggtgccctcctatccccacctacttctcggtcaggaggaaaagacaggagaatnnnnnnnnnnnnnnnnnnnnnnnnnnnttcctttcatcattcccctgcccacctccttccagcactgactggaagggaagttcaggctctgagacacgccccaacatgcccgcacctgcagcgcgcacacgcacgcacacacacatacagagnnnnnnnnnnnnnnnggggctgagcaggaggtgggctgggtaggagtacaggttagggcatggaaggcttctccgcccactctgacccagggcctaggatggttaggcaggaacatacagacacatttacgctagaggccagggatagaggatattaggtctcagccctgggggaatgggaagcagctcaagggaccctggatggagcacaggaggggtctggacatgtggttaccaatacaagttttgccctgattaaaaaatctcccaaagccccaaattcctgttagcgaggtggaggcttctgatatgtgtatgagactatgcaaaagtacaagggccgagtttcttcatgtatagctgtgtgaacgtgtatgtacctaagatatgttaatgtatagctggcatgttagttgcatgaccacatagaacatgtgtctgcttttgcctgtttgacaannnnnnnnnnnnnnngtgagacattgcacagaagacagcagcaagtgtgctggcctctctgacatatgctaacccaaaaatactctgaatttggagtctgactgtgcccaagtgggtccaagtggctgtgacatctacatatggctccatatctccaatgctgcctgggagccagggtgagtgtctgggtccaggcctgaccatgtggccctccagtgtatgaaggggccctgcctgctgtatcttctctgttgccctatccactgccagcttcccttcactcccccatcccatgtcaccgtttctccctctcgaggcaggggtcatagatcctaagccataaaataaattttatccaaaaataacaaaataa

SEQ ID NO: 16501 - DNA, 713 bp, Macaca Fascicularis
  misc_feature (1)...(713): n = A,T,C or G
tcacagcagaaattcatgacagcaaacctcannnnnnnnggtacatcctgaatgggggcagtgaggaatgggaagatgtgacttctgccgnnnctgntnnnnnnnnnnnnnnnnagaacagtgttttacccggggagagacttgttaggaatggggtcccctggtcccactcgagcacactgcccttgggaagctcactgcctgatgaacttttgtttgctgacgactcctcagaaagctcagaagtcctgatgtgaggagaggtgcggggagacattccaaaactcaagccagttcttctgctctaggagaatccagttgtatctgatgtttttggtatttgtcttccttaccaagtgaactccatggccccaaagcaccagatgaatgttgtcaagtaagctgtcattaaaaatacataatatatatttatttaaagagaaaaaaatatgtgtatatcatggaaaaagacaaggatattttaataaaacattacttatttcacttatcttgcatatcttaaaatgaagcttcagccgctccttgatagtaacatttgtacagagctgaagttgctttttcaagttcttttctttttcatgactatgaaatgtaaaaatatttgtaaaatgaaatgccatgtttaacttagcttctggtcttgatgtatttgatgagaatgattcattcaatgtttaaagttttataacgga

SEQ ID NO: 16502 - DNA, 729 bp, Macaca Fascicularis
  misc_feature (1)...(729): n = A,T,C or G
gtttgttttgtccttgaatagagcagtgggacctgggaacagagccactcttgcagggtggtggggacagaaactagaaactgaggtgggtggggtatacgtagaatcgtgcatgatgtgtgctctgatgagttttgggattcttttgaaatgacaaaagagtaagggtttaagttagaaacgagtaaaaggagctacatttgtgccaggaggtattagggaaggaaggcaagcagtgtctatggaggatatgagtggaggtttgaaaaagggctctgactaggagagggtatttgggaggaagaaggtggcccctttgcccacaaagtatttcctgccgtggtttatttggacttttattttggaggagccacagccccttccccagatctaggactgagccaggcccagccaggccggtggccattagaggcctgccttgcacacagctcaggtggagtgcaggtggcgttctcttcctcctgagcccttggaatgccagaggccaggcctgggagaacctggcagcatcccaccccacgcccttcatctttaatttgaggaattagaggccgtgagtaggagaaccggccttgtcaagagcaaacagttggtctgtggggcagtgtcttctcagggttcctgtggacttgggagtgacaggatttgagaaggaaaagggagagactttggttttaagnnanntgtgnnnnntggccagaggcagca

SEQ ID NO: 16503 - DNA, 762 bp, Macaca Fascicularis
  misc_feature (1)...(762): n = A,T,C or G
aaggagtcatacnnnnntatacatgagtgaacacatgcaagagcaaaagactgtacctatagaaatgnnngnnnctggaaccccggcattgttaaacaagagtgagcgcctagtgggtagaaatgtagtgattgtagaacaaccttttccaagaaatcaagcctttgtagttaatcaggaatttgaacagggaataagcctcgcaaatgaagtgaatgtggccccatcattaataaattatatcttgtatgttacagatactgtataagaataaatctgataccagaaaggtgggaaaatctttagtaggaatcctgcannnnnnnnnnnctggagagctcatttannnnnnnnnnnnnnnnnnnnnnggtcgtggaggacatttctgtgagaagtcaaacctgttaaatgccattgaaatcatgttgggcagaaatgcatctgttatgaggaagcctttacctggatatgatacctcaattggtatcaaaagaattcttacaggaatgtttatgaaagattgtgatggtgcttttagcactaaattgtgccttgtgtgccaaagaaacaaagacaactgtagaggcaatggatatggaaaacatttttagtaaaatatgggagaatttatagaaaagaaaaactcttgaaagtaagacatgatggaaactcaccaaattaactcctgtatcacacttttatgtcttgagagtcttggagggacatggttaataaatgaaatcgtgaaccccaggaatggta

SEQ ID NO: 16504 - DNA, 519 bp, Macaca Fascicularis
tgcccctggagcacctggcagaagaacaagtggcagcggtcacctttgtccttgtgtcctaggtgagcgggcagccagaggtggatgacatcctcgcagctgtcctccggcccacacgccttgtgaccatcatgatggccaacaatgagacgggcgttgtcatgcctgttcttgaaatcagtcagcgcattaaagccgtcaaccaggaacgggtggcagctgggctgcctcctatcatcatgcacacagatgatgcacagccctcggggaagcagcgggtggatgtggaggacctgggcgtggacttctttaccatcgtgggccacaagttttatggtcccaggattggcgcactttatgtacgaggacttggtgaatttacccctcttttccatatgctgtttggaggtggacaagaacggaatttcaggccagggacagagaacaccccaatgattgctggcctcgggaaggtgagccctggtgagctggaggagatgggttgattgctttgtcatc

SEQ ID NO: 16505 - DNA, 727 bp, Macaca Fascicularis
  misc_feature (1)...(727): n = A,T,C or G
ggccggtggcgccgacaggatgggcaagtgtcgtggacttcgtactgctaggaagctccgcagtcaccgacgagaccagaagtggcatgataaacagtacaagaaagcccatttgggcacagccctgaaggccaacccttttggaggtgcttctcatgcaaaaggaatcgtcctggaaaaagtaggagttgaagccaaacagccaaattctgccattaggaagtgtgtcagggtccagctgatcaagaatggcaagaaaatcacagcctttgtacccaacgacggttgcttgaactttattgaggaaaacgatgaagttctggttgctggatttgnnnnnnnnnnnnnnnnnnnnngtgatattcctggagtccgctttaaggttgtcaaagtagccaatgtgtctcttctggccctatacaaaggcaagaaggaaagaccaagatcataaattttaatggtgaaaacactgtagtaannnnnnnnnnnnnnnnnnnnnnnnnnnnnnnnnnnnnnnnnnncgttctcaccacaaagattgtgttctttaccatacgtcccctgcctttttttttaatcctaaaccagcgaacacaggatctgtaccaattttaggagatgataagacagggttgtttcaggattctctagagttaataacatttgtaacttggcacagttcccctcatcctgtggaataagaaaatgagatagagctggaataaat

SEQ ID NO: 16506 - DNA, 739 bp, Macaca Fascicularis
  misc_feature (1)...(739): n = A,T,C or G
ataggcnnnnnnnnnnnnnnnnnnngctgnnnnncctctccacccctcatatgggcatggggtcctcaagcaacatcacctttacctgagaggccccaagaagctgagctggcagagagctccaccatttggtgctaaaaaaaacgtcctgagnnnnnnnnnnnnnnnccactttctggcctttacatagtcatctttcactgaggtcaggagcccctgagcagttgctgctccctgacaaccacagccatttctctccacggggtcattcacaggactaatgtatttcatgatctactgtgcacatccaggcctgtggccacagtcccctgctaaagctgctcaggtgttctagtcctgacttcacctttttgatgtggtgtgcgccctatggtatgtacccttccctatctgagcctcagtgtgtccatgtgtctgatgggggatgggtgggctgtatgatttccaagggctctactcannnnnnnnnnnnnnnnnngatgtcattgggtggaggtggtgttttgtacctaaagnnnnnnnnnnnnnnnnnnnnnnnnnnnnnnnnnnnnnnnnttcttctctcttctgaaagttctggcttatagacccctcccctcctttgcaaaggtatgggatagaggggtnnnnnnnnnnnnnnnactgtaaaatgggctctctggtatctcctgtcttccctactgctccaaaccctaaattttggttgtatgttttgttt

SEQ ID NO: 16507 - DNA, 752 bp, Macaca Fascicularis
  misc_feature (1)...(752): n = A,T,C or G
cagacaagggacnnncagnnnnnngcaccaaaactgagaactcaggtgaggcattagctgaagtggaggnnnnnnnnnnnnnnnnnnnnnnnnnnnnnnnnnnnnnnnnnnnnnnnnnnnnnnnnnnnnnnnnnnnnnnnnnagagccagagagccgactagagaaaggtgtagatgtgaagttcagcattgaggatctcaaagcacagcccaaacagacaacatgctgggnnnnnnnncgtaactaccaggctcggaacttccttagagccatgaagctaggagannnnnnnnnnnnnnnnnnnnnnnnnnnnnnnnnnnnnnnnnnnnncgcaggacttatgaagatcgtgaaagaggcttacccagaccacacacagtttgagaaaaacaatccccattnnnnnnnnnntagcaaagaggacaaccctaagtggtccatggtggatgtacagtttgttcggatgatgaagcgtttcattcccctggctgagctaaaatcctatcatcaagctcacaaagctactggtggccccttaaaaaatatgactctcttnnnnnnnnnnnnnnnatcaatccaacccctgacccaagaagagtttgattttgttttgagcctggaggaaaaggaaccaagttaactgagatactactgctagaatgggcaagaaattactccaagacaaaagaaggtgtgaggggggggcttgcttgttatgctcacctgggcttgcgtagctaagtagtttttg

SEQ ID NO: 16508 - DNA, 765 bp, Macaca Fascicularis
  misc_feature (1)...(765): n = A,T,C or G
cnnnnnagcaaccatgacagcccaaaccccagcccccatacaggctccctccgccatcctgccactgcctngnaaagcgtggagcagctctgtgtggaccccagacatcaccaggggccaatgaacctgctctcagaccctgagcaaggggttgaggtgactggccagtatgnnnnnnnnnnnnnnnnnnnnnnnnnnnnnnnnnnnnnnnnnnngaaccctccggtccgggttcatgcatcccctgaacacgtggtggtaactcggaaccgaaaaagctctgcgtacaagtggaaggagacgctgttctnnnnnnnnnnnnnnnngaagatgaccatggacaagacgggcctcctgctgctcagtgacccagacaaagtgaccatcggcctgttgtcctgggatggccgtggggaggggctccggctgcttcnncgagacangggcggtttctccagccacgttggcgggtccctnnnnnnnnnntaccaggaggtgcnnnnnnnnnnnnnnnnnnnnnnnnnnnnnnnnnnnnnnnnnnnnnnnnnnnnnnnnnnnnnnnnnnnnnnnnnnnnnnnnnnnnnnnnnnnnnaccaggagggagccccgggagtggagatttcctgctggtctgtggagctgtagttctgatggaaggagctgtgtccagcctgtacgcttggctgcccccttgcaactgcagggccgcttctggggcctggaccaccatgggggggaaaagtcccactcatacaaataaagaaa

SEQ ID NO: 16509 - DNA, 687 bp, Macaca Fascicularis
  misc_feature (1)...(687): n = A,T,C or G
tcacgcactaactagagaacctggacaagcaccagactcaggcgtaccgagggcactggtgggtcagcatgttgccaccttgaaagaacatgataattctctcaaagaagaggcaacannnnnnnnnnnnnnnnnnnntacagaagagtgtggccataggtcagctattcacagtagtgaatcatcttgcagcttgccgtctattctgaatgacaatagtggaataaaggaagccaaatctgctgtatggctcaacaacgttcctacaagggaacaagaagtttcaaatggctgtggagacaagagcaagaaagaaaacatggctgcagatatcccaatcacagaaacagaagcctannnnnnnnnnnnnnnngctacccttcaggataatacaaatcaaactgaaaacaggtttcaaaaggcagatgcttctgtgtcacacttgtcaggtnnnnnnnnnnnnnnnnnnnnnnnnnnnnnnnnnnnnnnnnnnnnnattgcgtcggaagctagtttttcatctagtgaaggaagtcctttgtcaaggcatgaaaacaaaaagaaacccatgatcaagttaaaatctaatgccctctgggatgagtctgacgacagtaactcagaaattgaggctgctttacgccctagaaaccataacaccgatgattctgatgatttttatgacta

SEQ ID NO: 16510 - DNA, 357 bp, Macaca Fascicularis
aggaggccgtggggaggccataatgaggcgccaggcccggcccgggtcggccccgcggggcgtcgcctcctcctccgggcgccctggcctcatgttccagacaagcctggcggggccccgggcccggccacagtcctggggccgagggcgcccgacggccagacggccacgagctccctgtaggtcaggcccgcgcagcctccggcacccggaagcccacgccgccgccgccgtccgccggcgccccggtcctcgcggaggtggccgagccgacgcacctcgagggtgtccacctgccccagcacccaggggacgcgctggaaagcaaacaggaagattcccggagggaaactgtga

SEQ ID NO: 16511 - DNA, 665 bp, Macaca Fascicularis
gcacagcatgctgcagatctgtaaagtagatgtgcacaccagcctacagctgggacttttgccatggtacttaggtagggtgtgtgcccccagatttaaccattccataatcatgttagagttatttatataaagtgaacagattttattaatcatggcttttggtgaatttgtttaaggttaattatggtagcaaattttggacctaaaaattatttttctgtatcctgctgtaactcctaaaactctcattattctctaactattacacttgggcacattctcatgtttctcatcctttgccagaagactaccttaatccatcataattgttctctaggaaaagagaacttttttcaatattcaaaatactttttaaggatggcacagtaccatataactggagtaataaaacatgagcttacagtcttacaataactaagccacttaaaatgatccaggcactaatgttttggtctgaaaagctgtgtactttcgttatggacattttcagaaatttttggaaatttccattaaaggtggaaaatctattatttttctcctttgcaatgtcttagtttgagtgaaacacttctaagttctacaattctagaaagagccttaatgtatttgatgtattctgtgataagaggtactaaatagta

SEQ ID NO: 16512 - DNA, 799 bp, Macaca Fascicularis
  misc_feature (1)...(799): n = A,T,C or G
tgatgactnnnntcgttccagacacagatgacctcaagcagctggcaaacggcgttgacagatacatctccaagtatgagctggacaaagccttctccgataggaacaccctcatcatctacctggacaaggtctcacactctgaggatgactgtatagctttcaaagttcaccaatattttaatgtagagcttatccagcctggtgcagtcaaggtctacgcctattacaacctggcggaaagctgtacccggttctaccacccagaaaaggaggatggaaagctgaacaagctctgtcgtgatgagctgtgccgctgtgctgaggagaattgcttcatacaaaagttggatgacaaagtcaccctggaagaacggctggacaaggcctgtgagccaggagtggactatgtgtacaagacccgactggtcaaggcccagctgtccaatgactttgacgagtacatcatggccattgagcagatcatcaagtcaggctcggatgaggtgcaggttggacaacagcgcacgttcatcagccccatcaagtgcagggaagccctgaagctggaggagaggaaacactacctcatgtggggtctttcctccgatttctggggagagaaacccaatctcagctacatcatcgggaaggacacctgggtggagcactggcccgaggaggacgaatgccaagatgaagagaaccagaaacaatgccaggacctcggcaccttcactgagaacatggttgtcttgggtgccccaacgaccacacccccatcccccactcccaaaaa

SEQ ID NO: 16513 - DNA, 1434 bp, Macaca Fascicularis
  misc_feature (1)...(1434): n = A,T,C or G
ttatctactgtagcataacagtgttttaacttaaattcacggccaagaggatgaggtgcaaggggcttcctgaaaataggtattttctactacaaaacggactcttgtttttaccttggcttgttctccctgtcccagtgggatgaccctcactgagagtagcagcaagggaatttgaggttttgtcacactttgttnnnnnnnnnnnnnnnnnnnnnnnnnnnnnnnnnnnnnnnnnnnnnnnnnnnnnnnnntcagaggaagaggcgaagactacagctaacctggcagtggatgtgattgcttcaagttttggtcagacaagagaaggagggcatattgtctatggccaacnnnnnnnnnnnnnnnnnnnnnnnnnnnnngaaaatcaagcacgtgtgagaatttaggannnnnnnnnnnnnnnnnnnnnnnnnnnnnnnnnnnnnnnnnnnntgaggcattgaggggacagacagatacaaaatggttgtctgggtcaatactgccttaatgagaacatttacacattctcacaattgtaaagtttcccctctattttggtgaccaatactactgtaaatgtatttggctttttgcagttcacagggtattaatatgctacagtactatgtaaatttaaagaaatcataaacagcatttattaccttggtatatcatactggtcttgttgctgttccttcacatttaagtggttttccatctttcctccctcctccnnnnnnnnnnnnnnnnnnnnnnnnnctgaactgttagcccacagcagcaatatgcttattccatccacatccctaacatcatgcattcacaaggtcaaagttctggtccacaaacccttccctatagaagttcaatggctgcgaaagaatttgtagtaaaccaggcctcccaggatggcgagctccagtaagatgataatggaaagcagcagcttgttggttgtcacttttctggacattgaacggagaatctttcgacttttgctcaagttttcacttgtgtttaccagtctactcttggtgcgttctaactggtctcgttgttcccccagctcttctatgatttctgagccaatttggtcggtctccgtggcaatccgatgnnagcgttcatactttgggtgnnnnnnnnnnnnnnnnnnnnnnnnttgcagaagcnnnnnnnnnnnnnnnnntagccgattcatatgctcattctctagagcatatatgccatatttcatgtctcctcggcctccaggtgtggctgtcaaaggtgtgcttctcacctcccgatggagtttagcaaggtccttccnnnnnnnnnnnnnnttagacatcatggggttannnnnnnnnnnnnnnnnnnnnnnnnnnnnnnnnnnnnnnnnnnnnnnnnnnnnnnttgcttcctgttgctnnncatcaaaatccc

SEQ ID NO: 16514 - DNA, 764 bp, Macaca Fascicularis
  misc_feature (1)...(764): n = A,T,C or G
ccacatagagaaccaagnnnnnnnnnnnnnnnnnnnnnnnnnnnntgcccgtctctggcacaccactgaggaaatccccaagagagagacctactgcccggtcanngagaggaggttaatacagctgtgtaaatctcagattctcaagcatccttatcaggccaggcggatctgtgtccaaaactccacgttttctgctacctggaaccgaggattccgggaaggctatccttacccctatccccataccctgtacttactggacaaagccaatgtacgannnnnnnnnnnnnnnnnngatcagctnnnnnnnnnnnnnnnnnnnnnnnnttttggcagtgccctggctcaggcccggctcctctatgggaatgatgccaaggtcttggagcagcccgtggtggtgcagagcgtgggcacagatggacgtgtcttccatttcctggtgtttcaactgaataccacagacctgtcctctaatgagggtgtcaagaatttggcctgggtggactcagaccagctcctctatcggcatttttggtgtctcccagtgatcaaaaagagagtggttgtggagcctgttgggccagttgatttcaagccagagacattcagaaagtttttagctctatatttgcacggtgctgtgtgagctgaggacccctctgaatcctgaaccctcccttgcctctcttccacggaagagagcctgggtcccgtggagcctcagtgcccgtttggnnnnnnnnnnnnnnnnaaatgaa

SEQ ID NO: 16515 - DNA, 774 bp, Macaca Fascicularis
  misc_feature (1)...(774): n = A,T,C or G
gagtacgcaaagaggagagaatttgattatgtgattaatgatttgactgctgttccaatctccacgtctccagaagaagattccacatgggagtttctcagactgattctnnnnnnnnncaatgaaagtgttgaaacaggatgggaaatattttacacaggggaactgtgtcaatctgacagaagcgctgtcgctctatgaagaacagctggggcacctgtattgtcctgtggaattttcaaaggagatcgtctgtgtcccttcatatttggaattgtgggtattttacactgtttggaagaaagctaaaccttgaagatcagtagcccctaatcacatgtgctgcgaatggccttcctgacctccatatgctgtacatgacatcgaaatgagtcaggcaattgattgtgaattccttaaagttttcctttttttaataattatttttaatttaaacaagcaaatggcaaatgtatattttgatgagcttagggtgttatttttttttgaaagtcagctgaaggatggttagacagcacagcgaagactgctaaatgcactgacctcccctccccccgccattagaatgtgatttttgttcctctttatttctctgtgggcttttgtttttgtttttgttttcgtagatcttcaatttggatatttggaggagtaaacatcgttgttttgctggagggatgatcttgatgatgtttctttccccaaaaattgacttagatattaaaatttggtgcttataagagagagcaacga

SEQ ID NO: 16516 - DNA, 758 bp, Macaca Fascicularis
  misc_feature (1)...(758): n = A,T,C or G
gacccggatgcagggcctggaggcacacaaataccggaacacgtgggactgcggcttgcagatcctgaggaaggaggggctcaaggcattctacaagggcactgtcccgcgcctgggccgggtctgcctggatgtggccatagtgtttatcatctatgatgaagtggnnnnnnnnnnnnnnnnnnngtggaagacagactaagcctagagaggctgcaagggcaccgccccaggcacctccagagtgccccaccacctttgtctcacatgattccagtgcagtagtgccaaaaggcccttcccacgtccctcgagctctgtagcctggtctgtgcattgtggctgtcaagtccatgtgtccccccgtggtctgacaccaccactgtgtcctggtgtctggcccagccatggctgggtgtgcatctggcctgtgaccccgtgcccacttgtccatgtgcatactgtgagccctgtgcctgtgtttcatgttctgtgtcatgtgacctgtgccccgcctcccggggtgcccgtgtggcctgggtcctcggccctgtagccctggcccggtcccagtccggtgccttccaccctgccccggcctaccacagctgcctccgggcctcggcctggcttcaccgcattccaggggctgcagcccctcgcttctcccgccattggccttaactggccctcgggccctccctccgcccgggacagggtggcacccaccactctcaggaccaccctgccaaggcaga

SEQ ID NO: 16517 - DNA, 660 bp, Macaca Fascicularis
gtgagagaggctgaaaagaaatactccattatgaggaaatgtgaagaaatctggtatccaagcttaaatttcttggtgtacagaaactctgtatgtatataggctatttctgaagggcacagggaagggggaacaaatctcttcagttatatttgtgaattacatgtttcatgaatccatttggcacagagacacgaggaggaaaacactagtaaccatctttccactagttcatagactgagaaacagtaaatacctttcctttccacttttaccctgtgttctttgaacatcatttgtgcagattctgccctcaatgaggaccaaataaagatgatttttgtgcttagcagtttaaggtatatggctgcatatgcaaaactctttcccaattcagtcgctacttttacttctgccccttctatccataatcttcattttgtgtatacagtgctgtgtgtaagcttatcagtgtttttttgtttttgtttttgttttgtatcagtcatgaaagtcttgttaggtatccagagttctatttatctagctgtacagactctttcagaggtttaacgtgctgcttctgatgtgccacctgcagtagcggatcatgtggagtgaaaggcaaatcttactgcttaatgtataaactctcaccac

SEQ ID NO: 16518 - DNA, 745 bp, Macaca Fascicularis
  misc_feature (1)...(745): n = A,T,C or G
tcaaagataagaagttggtgttcagcttagttgattcagtagttgtaccaagaaacatgtgttagaggaaaacaacttggtatttaagtatgaagtggatgaaatgtttatttatttaagatgaaagcatttgnnnnnnnnnnnnnnnntcttcagtttgggtttaatgttatagaaataaatgatgataaactctaactattaaaggaannnnnnnnnnnnnnnnnnnnnnnnnnnnnnnnnnnnnnnnnnnnnnnnnnnagggaatattcaactagatgtaaatcaaagtatatgtttggctcatttgagcattttagaatatttgagaatgtataatacatgtaaaataaactattagaactctaccataattgtgttgaaggtagaagtgatcttcaaagagatggccattaacttagcagtgggacctcacttnnnnnnnnnnnnnnnnnnnnatacttgaagaatttaatatgtacagaattttattctggataataaataggatcacactgtattagggnnnnnnnnnnnnnnnttgaattttttatgtacataaagtcttatgtttagggtggtttctatctgtcttgtttttcacttgtataacactgtgaacttctaaagagagaataaaagaagcatgaatgagaagaatgacatttcagaaaaatggttcaatgaaaatctatagctaaaatatgtaaacctaggtaaagcgcttgccttcatcctgagtcag

SEQ ID NO: 16519 - DNA, 738 bp, Macaca Fascicularis
  misc_feature (1)...(738): n = A,T,C or G
taaccgtgacttcaggagagagttggaagaaagagagagagctgctgcaagagagaaannnnnnnnnnnnnnnacccgagaacnnnnnnnnnnnnnnnnnnnnnnnnnnnnnnnnnnnnnnnnnnnnnnnnnnnnnnncaacnnnnnnnnnnnnnnnnnnnnnnnnnnnnnnnnnnnnnnnnnnnntgaagaagaaagtgatgatgatgatactgcagctcttcttgcagaactggaaaaaattaaaaaggaaagagctgaagagcaggccaggaaggaacaagaacaaaaagctgaagaagagaggattcgtatggaaaacattctgagcggaaaccctctccttaatctcactggcccatcgcagcctcaggccaacttcaaagttaaaagaaggtgggatgatgatgttgtcttcaagaactgtgcaaaaggtgtagatgaccagaagaaagacaaaagatttgtaaatgacacactgcgatctgaatttcacaaaaagttcatggagaaatatattaagtagtacagttttatgtgcttaattaaagactgtaaaacataaaggatcattctgacttatttttatgagtttttttcttttccctgtctaaattgtgtgtgggcttccccaattttaaactcctatctttctctttactgacaccttacttgataatnnnnttgggaatannnnntaacnnnnnttcgcattctnnnnaatgtttccactgatac

SEQ ID NO: 16520 - DNA, 700 bp, Macaca Fascicularis
aggggagtggtggatcgctagggctgcagggtgcttgcttcggaacaagctctcggggactatccggaggcagcctggaggccgccgtagcgcgggtacgtgcccctctcctgtctggaggcgggtgtagaagtccgaccgcggaagccagactgctgtccagtcagcgagcgcctaccattcagtattggctccgcccgagtcccaccttcctcaggctctgattggctggtagatggcaagcgcgaaaagcccggaccgttggaaagcccggctgcttgagggcggaagtattgcgttgacgtacgccttagtaagggcggaagtgagtttcccagcggaagtggctcctgtaaggctgcaaggcagcgtggccggcgtcggagcaggggttgtgtccccgctgggctgccgtcccagctggactaccgccatggaactcagcgccgaatacctccgggagaagctgcagcgggacctggaggcggagcatgtggaggtggaggacacgaccctcaaccgttgcgcctgtagcttccgagtcctggtggtgtcggccaagttcgaggggaaaccgctgcttcagagacacaggctggtaaacgcgtgcctagcagaagagctcccgcacatccatgcctttgaacagaaaaccctgaccccagagcagtgggcacgtgagcgacagaaatgagagact

SEQ ID NO: 16521 - DNA, 703 bp, Macaca Fascicularis
  misc_feature (1)...(703): n = A,T,C or G
ggcccccagcattcctgccaactctccttttgcagagaaaccctcanntgggatttcctccttcctgtgggaaggtgactctggataattgatgcagtgaccgtgggttctctgcactgggtgctctgagtacggcaaaccagtggccctaggctacagcttctgacccctgttctcccctccctgacagctcctcagctcgcaggctcagagcctgatgctactcaccactgtggccatgccagtcttcagcaagaagaacgaaacgcgatcccatggcattctcctgggtgtggtgggctcagatgtggccctgagagagctgatgaagctggcgccccggtacaagtcaagtttggaaaggactcctcaatcaatggatggaagcatggcactggctcagttgtgttcctattgaaaacactcactgctgtgagctgccatcttcgactgtcctgtggcccccaaacccctgcccaactccagatgcccagcacaaacagcagacctaatgcccctccaccctggactctggcagcttggagtgcacggatacgcctttctgaannnnnnnnnnnnnnnnnntctctcccatcctgacctccgacccttggtaggtacagaccttctttgccttgggatcctcactgtatgggatttgggggtaattcacaaaaacgattaaaacaacaaacacacattg

SEQ ID NO: 16522 - DNA, 746 bp, Macaca Fascicularis
  misc_feature (1)...(746): n = A,T,C or G
tgaggcagagagacgacgcattcaggagaagaaggatgaggacatagctcgccttttgcaagagaaggagttacaggaagaaaaaaagagaaagaaacactttccagagttcccagcaacccgtgcttatacagatagttactattatgaagatggaggaattaagccaagagtgacgaaagaaactnnnnnnnnnnnnnnnnnnnnnacccacagggatcaggaatggtatgatgctgaaattgccagaaaactacaagaagaagaactcttggctacccaggtggacatgagagccgctnnnnnnnnnnnnnnnnnnnnnnnnnnnnnnnnnnnnnnnnnnnnagaaaagaaagcttacaaaaaagccaaggagcgggagaaaccatctttggacaaaagaannnnnnnnnnnnnnnnnnnnnnnnnnnnnnnnnnngcagcatattcaaagnnnnnnnnnnnnnnnnnnnnnnnnnnnnntaagaatgaaaggccagcacggccaccacnnnnnnnnnnnnnnnatggtgaagatttggattacactcannnnnnnnnnnnnnnnnnnnccacacggcatttctcaaaatcagagtcctctcataaaggttttcattacaagcattaaaaacctaggaatctgccttgaaaatggactcactatagcaaatattactgggtgatacagaatgaattctacacttatttttttctcctgttgtttgcattcctgggatttatcc

SEQ ID NO: 16523 - DNA, 744 bp, Macaca Fascicularis
tatgcatcaaacgaaggccatattgtccataaatgctcagtgctcaggatctcattaatatgccgaacctaactacagatgactttttaatattgtaaaatattttctgctttttgacttgcatctgagagtttcttgtttcagtaaaaaaagaaaagacaaaaaaatcagctttggaaagtaatttaaacgcacctttatttttttttctttatgttttctttcattgggcaacagctaagagggcccagcaaggtaatttatggtcgagctgatgtcaattggttcttaagtcttgagtcgactcaatttagcccaagtgctgaaacaagaaatgtcatttttttcatcgaagacaccagggcagatttttaagtaaagaaagacaattggacccttaagaatttatgcatttgtaaagttgctgttgatccaaatattttcaagccatgtaatccattggttttgtgggaagtttaataaacctgaaacttttgtgtgtttttaaattgtacctgagttgaccatcctttctttttatagtatatttcttgtatgatattttgtaaagctctcacctggttcttttatggggacttttcgtttttgggcaactccagtgtatttatgtgaaactttataagagaactaatttttccatttgcatattaatatgttcccccacacatgtaaagacacagtggctccgtgtgtaaaaacagctgtattttatgtatgctttac

SEQ ID NO: 16524 - DNA, 581 bp, Macaca Fascicularis
tacaggacctccccaatctcatgggacacggtttggttgtggtggatgtagtgtaagcgctccatctccaggactcgtgccacaatgacggaggtaaaaccaaagaacatccccagagccatcttctgcagagcagatggaagcagcttgcaccgcagcagcagagggtcgatcaagcggtccttcagagggaccagaatcagcaccaccacgacgttggccaggatggagccaggcttctgggatcgtatagctgctgccctgggctctcagggccatggagatgttggacgggttggctgggaaaatgttcgggatgtggaggtgaagaccctgcaggacgtaggtggactgcatctgaaagtagaccatccagtagggcaccagggtcaccatgacgggcaagatcttcaccagcacctggaagttggtgatgtcctcttgcggggaagccccaggctggggagacctctggtcaggcagcaggcgggcaccttgatggtctctggctacagtgtcgttgccacaggcgggggcagctgttttggagagcgagcttaagcattgaggacacttggctg

SEQ ID NO: 16525 - DNA, 726 bp, Macaca Fascicularis
  misc_feature (1)...(726): n = A,T,C or G
ttgacatctaccaccctcctcntnttaaaaaatttctttagaatttctcaatcgtcaaggctctaacctcttaagaatttactaacagacagactatctggaggagttgtcttcaaatgctgtgctnnnnnnnnnnnnnnnnnnnnnnnnnnnnnacnnnnnnnnnnnnnnnacagaatcatctgttcccaacgctccagccccttggtcctgtggatggctggatcctgcctgaaacggatctgcagagcagcagcatccttccggtgtggaggctgtgtagctggtgtgctgctcatggccatacactacccatgctgagagcctctcacacagaactgctggatttggttctnnnnnnnnnnnnnnnnnnnnnnnnnnnnnnnnnagtcatcattgtagccaggaagatggaatacaccaaatggacaggcctggcatgtacccacagagactgaaagttggtgctggtggttgtggcagatgatattacctgaagaagggacgaatgggtactgggnnnnnnnnnnnnnnnnnnnnccagttcaggcctctcttctttccctggtgtcttcattttcctccctctccctgctgtcccttaaccctctgcccagtctctcattactcctggtnnnnnnnnnnnnnnnnnnnnnatactccactgggggtacctgagcctggattagagggcagggggagaacactgcctagccaaagtggggt

SEQ ID NO: 16526 - DNA, 587 bp, Macaca Fascicularis
cagagtaatcaatgtccacccccatgaaactgtaagacaagcctcctgtatgaagccagaagcacaagtgccttcagagggcagtgattccagtccagttgcctccctagcttgtgtgtggcctgcctccagcatagcagggactagggagggaggcagggaaggtttttttcttttctacgtcttcacaggttcggctgggggcagctgatgggcctaagtccataccttactatttaagatactctgatcgcacaactgcagagacagggttccctcactgctagtcagcttcctttggaaactggacaggccattgccacctgcactttgaagaagtgagcaaagacgtggccacatttccaataagctgaaatggtctttctcccttcctcagagagcaaccagctttttttttttaaaagtcctttctatctgttggatacaacagtgcgcttttggtgcacattttttagcaatagttgtgaattaatggcaaaagcaaaacaaaacaaaaaaccaaacttatttaccagccctcagttgtgtttgcacgaggggcctttgagcaaagaaatgggttttgc

SEQ ID NO: 16527 - DNA, 680 bp, Macaca Fascicularis
  misc_feature (1)...(680): n = A,T,C or G
ccccacncnnntccggggcctcctcccctcatggcaccctggccctggggtcccccagcatctcagagctccccctggcctcgagccacagctttctggacctccacctcagactcagagccccctgcctcaggagacctctgctctgagcccagcacccctgcctcacctcctccttctgaggaaggggctaggactgggcccccagagcnnnnnnnnnnnnnnnaggctaccagcactggagagcccccgccagtgtcagggggcctggccttgccctgggacccccacagcctggagatggtgcttattggctgccacggctctggcacagtccagtggacccaggaagaaggcacaggggtctgagtaccagccctagaactcagtgttgccaggcgtgctgccatctgctgttcagcccaacctcagagtgaagacagggtggcggccaccccatggactccatgtggcccgctggctcagggcagggagcctggaagcaaaggagggcctggctcctgactctcagagagggtgggctggagccctggggcaggcccctcctcagcctgctcctccgacctcccggtctccctctgcaggctgggggcagagacctgaggacaaggaagggctttgccatcccctgcatgtgcccctgcctctacctgtcccaa

SEQ ID NO: 16528 - DNA, 739 bp, Macaca Fascicularis
  misc_feature (1)...(739): n = A,T,C or G
ggtatatacttttaaaaaatatttacttttattgatgtgtactcttcctatttgacgagttaattccataaatctctacttagtttaacttattggatcaaattatcttcagcatatatatctggggaannnnnnnnnnnnnnnnnnnnnnnnnnnnnnnnnnnnnnnnnnnnnnnnnnnnnnnnnnnnnnnnnnnnnnnnnnnnnnnnnnnnnnnnnnnntgctaatatacatttcctttaaacatccacaaattcttaaaaatactgaatcagtaaatttcatttcagctaaaaatgaagtctaatatattgtttcaaaagatacatttttacataccataaatgttacaatatctgaatatgctttgtcaaactatccctttatgcaattgtcttcatattgtttttatgattctaatcaagctgtatgtacagactgaatgtgaagtctgagcacaaaaataatgcacgatgagatcgcctaccattttataggacatttactatgtatttatatgttaagacctctatgaannnnnnnnnnnnnnnntgtctttgtaactgtttaattcaatctgtaataaaaatctgactcatttctattaaaaanngtattttcctttaggcggggaatgggaatccttgctgcactgttgcagtcattctgaaaggacctttccctgtacttacttttcannnntgcttcaatcttatcaatgctacattnngtatttttc

SEQ ID NO: 16529 - DNA, 672 bp, Macaca Fascicularis
  misc_feature (1)...(672): n = A,T,C or G
cattacccataagagagtgtgnncatgggagaccctgtgaatataatggacatgtgagagcctttctgatagaccaatattcattgttcatcagataactcacataagggagagttcttatgaattcaatgaatgtgagaagaggtctggtgagaagccacctgtaagtaaacaccacagagttaatggagatggaacactatgagtgtaatgcgagagaatagttttggcaagaaatcactcttcattctacgaagttacagaggagagaaaacttttgactgtaatagagatttgaaagtattttgcaagaagccaaatttcactcagcatcaagaaacacgtataggaaagaatgcctataaaattaatcagcatgctagtacattttgctataagccaaagctttctgtatatcagaaaacagatagaggagaaaaactctatgaatgtagtgaatgtgggaaaactttttactagaagtcatccctcacagcacatcagagaacacacacaggggnnnnnnnnnnnnnnnataatgaaaccttttaccagaatcttgactttgctaaacatcatagaggaaacccttgtcaacatcttgaaggctcagaaaccttcaccttcttggactcattccatagcagaaacaacccaggtgggggagaacac

SEQ ID NO: 16530 - DNA, 764 bp, Macaca Fascicularis
  misc_feature (1)...(764): n = A,T,C or G
agcaggaacaccnnnnnacctgtgaggcctttnagctgcaagaggtnnnnnnnnnnnnnnttctccgcnnnnnnnnnnnnnnnnnnnnnnnnnnnnnnnnnnnnnnntgtgtcaaggatgatgagctctacgaggaagtgcggcnnnnnnnnnnnnnnnnnnnnnnnnnnnnnnnnnnnnnnnnnnnnnnnnnnnnnaagagcacgggcaccgagcccccggctccggtgccctaccnnnnnntactatgatcgggaggtcaccccactggccagcagccccagcgtacagccatcctgcnnnnnnnnnnagaggttctctggactnnnnnnnnnnnnnnnnnnnnnnnnnnnnnnnnnnnnnnnnnnnnnntccacagagaccctgacccccacccctgagcggaatgagggtgtctacgcagccatcgcagtgcaggagatgcagggaaacccagcctcaccagcccaggagtaccgggcgctctacgactatacagcgcagaacccggatgagctggacctctnnnnnnnnnnnnnnnnnnnnnnnnnnnnnnnnggggaggatggctggtggaccgtggagaggaatgggcagcgtggcttcgtccctggttcctacnnnnnnnnnnnnnnaagaagggccaggagccccctcggacctgcccnnnnnnnnnnnnnnnnnntgctcccagcactgaccatgccttgctggggcccagaaccaagcgtccccagccctgagagacatccttctcccagaga

SEQ ID NO: 16531 - DNA, 794 bp, Macaca Fascicularis
  misc_feature (1)...(794): n = A,T,C or G
gcaatggtcgccacgcagacngnnnanctgaacannnnnnnnnnnnatccagcgcagagcagctgcagtnnnaccaggcggagatcatcgaactgagacgcacggtcaatgccctggagattgaactgcaggcccagcacaacctgcgaaactctctggaaaacacactgacggagagcgaggcccgctacagctcccagctgtcccaggtgcagagcgtgatcaccaacgtggagtcgcagctggcggagatctgctgnnnnnnnnnnnnnnnnnnnnnnnnnnnnnnnnnnnnnnnnnnnnnnnnnnnnnnnnnagagtgtgagataaacacgtaccggagcgtcttggagagcgaggactgcaagttgccctccaacccctgtgccaccaccaatgcatatgaaaagtccattggatcctgtgtcaccaaagcttgtggtcctcgttcccgctgtgggccctgcaacacacttgggtgctagatactctggggccagcaggagtatagcatgaagacagaactaccatcgatgggccagttccacatctccgacaaccatcagccaccagaccccaccccgaggcatcaccacaaaatatggtgtggaaggagaacaaatactcagcgtttgggtctgactctgaacctaggcccacttgatcctcctcaccccaagcccttctcctgtactcagtttgggttctgatggtcagaggttggagctgtgacagtggcatacgaggtgttttgttctctctgctgcttctacctttattgcagtccccaaatc

SEQ ID NO: 16532 - DNA, 595 bp, Macaca Fascicularis
  misc_feature (1)...(595): n = A,T,C or G
ctcgatctcctgacccagtgatccgcccgtctcggcctcccaaagtgctgggattacaggcttgagccaccgtgcccagcccagactcaagaattttaaggataaacaggaacattgcctctcctgattctttctgttaagtctgtggcctctggcacagtgtttaagttgggtgttcctgttagcaaccctttgggcttgattctttcnnnnnnnnnnnnnnnnnnnnnttttttcagctggggtgaagaatggggcatgggtggctacataaagatggccaaggannnnnnnnnnnnnnnnnnnnnnnnctcagcagccagctaccccactgtgtgagctggtggacagtgatgaggaaggacttgactggggatggcgcatgcatgggaggaattcatcttcagtctaccagcccctgctgtgtcggatacacactcgaatnnnnnnnnnnnnnnnnnnnnatttgaattctgtgatattttcacactggtaaatgttacctctattttaattactgctataaataggtttatattattgattcacttactgactttgcatttttgtttttaaaaggnnnngtataaatttt

SEQ ID NO: 16533 - DNA, 711 bp, Macaca Fascicularis
  misc_feature (1)...(711): n = A,T,C or G
aaattaatttactttttttttttttgtacttctggccgaaatttttatgagatatctctcacttgtcttccactttgaaccggttaaagctcatagctgtcagctctgaatgaggaggggagaagcccctgggtctgtctttgaaaggaatccgcnnnntgagggccgccttcccctgtggtgtgtgggtcgtttctcttcctgacgcatcttatgatatcagaggtaactatgcaaagcatccagacggttctgaatgtgaagcactccacccagcagagtcccggtgtcctctgtccccgctgccggcccgtgttctctctcaagaggtcaccaaggaacacagaggtttaggctcccagaaaggggagcctttgggttctttcaaaaaacgcattaggagagctgtccacagtggaatggggggtctccctggggaatgtaggccaggtccttttattttaacatgatgtccgtgaagaggtttgctgcctgggcagccctgtctgtcggcaaggagcgtgcatactgcgtttctgtaattgtttgctgtatctcccttccctttgagctgtattgttctttaatggctgtcttgcccttccaaaaaaaattgaaaaaaaaaaaacaaaaaacctgaaaagtacaaaaaaaaaggttttgtttagtttactgtgaaatgaactgtatggcttatttacagtattttaa

SEQ ID NO: 16534 - DNA, 762 bp, Macaca Fascicularis
  misc_feature (1)...(762): n = A,T,C or G
cagatgctgtgnnnnnnnnnnnnnnnnnnnnnnnnnnnnnnnnnnngagaggagagaggaatccacaggaccaccagagggtagagggagccagatatgcaggtcagagatagaggaagtggaaccagagagctgggaggcaccaaggctgtaaggatggctaagtcccaccataacagctaaagggtccnnnnnnnnnnnnnnnnnnnnnnacccaaccccaggatttccacaacacacacccacaggcctggacctgggacaaagatgaatgaagaacatggactcatgtggatgtggtttggctcacgtgtgcctgcaataaacaaggaatgtcaccttgactggattaaggaatacctagacaactgtacaacattatttccgggtgtgtctgtgagnnnnnnnnnnnnnnnnnnnnnnntgtgagtcagtaggaaattctcccctccaattgactacgggtccaatagaaccaaaaggnnnnnnnnnnnnnnnnnnnnnnctcctctggagctgagacattcttcttcttctgcccttggacatcagaactcctggctctctggcctttgaactttnnnnnnnnnnnnnnnnnnccctgggttctcaggcctttggctttggactgagagttacacaatcatcttccctggctgtgaggctttcggacttaaaatgagccgcgctaccagcatcccagggtctccagcctatagacgggctgttgtgtgatttcttagcctctgtattcacagagcc

SEQ ID NO: 16535 - DNA, 488 bp, Macaca Fascicularis
gaaataatggtgccctgcaaaatcttcctctgaagtcccatggttagggatcacacaagttaatcacttttcgtttttttttttttttggttttttttttcctaaaatgtcagtggcccatgtcttctgggaaaattagaaaagccatacgattacaaagtgatgttagatttatcgtgttgggttggtcaagtagtagtggactcagtcctttaaatattttattacagattgtacatctgctgttcagatgtgttttagcagagggattatatcagaaccctatgaccttctggttgctttatgatatatttttatatatttaacattcctcagacaggcaaatagcacattccttttgtgtcacagatgtgtcatggtgatggcaggctagagtttatatgattcattgtaactatgagataaagaacaaccagtccatgtggccaaaaggattagatttgatttgatgttcatcttggagttta

SEQ ID NO: 16536 - DNA, 769 bp, Macaca Fascicularis
  misc_feature (1)...(769): n = A,T,C or G
cgtacgtaataaggttttaatttagtaaaccaatcctatgcatggttcagcactagccaaacctcaccaactcctagttctagaaaaacaggcacttggcagccttgtgatgtcatacagagaagtcacagggcagtacctgagggtctgtaggttgcacactttggtaccagataacttttttttttcnnnnnnnnnnnnnnnnngtactccacactgcacaataactcctcccagggttttaactttgttttattttnnnnnnnnnnnnnnnnnnnnnnnnnnnnnnnnnngtgtagctacagagaaaccagcttccttcagagagcagtgcttttggcggggaggaggaaatcccttcatacttgaacgttttctaattgcttatttattgtattctggggtatggcgtaagtacagagaagccatcacctcagatggcagcttttaaaagatttttttttttctctcaacaccatgattcctttaacatgtttccagcattcccaggtaggccaaggtgtcctacagaaaaaccttgggttagacctacagggggtctggctggtgttaacagaagggagggcagagctggtgcggctggccatggagaaagctgannnnnnnnnnnnnnnnnnnnnnnnnnnnnnnnnnnnnnnnnnnnnnnnnnnnnnnnnnnnnnnnnnnnnnnnnnnnnnnnnnnnnnnnnnnnnnggaggtttattacgtatgtctggttctcaattccaacagtttaatgaagatctaa

SEQ ID NO: 16537 - DNA, 642 bp, Macaca Fascicularis
  misc_feature (1)...(642): n = A,T,C or G
taccctctcctcttccttctcctctctcccattcttccctgcctcttccttaactagacaattttttatnnnnnnnnnnnnnnnnncaggcatgagccaggtgctgggaagatcacgatgatccagctccttctggtcctttccttagctggttagaggctgggaggacacacaagttcagctnnnnnnnnnnnnnnnnttggtggtagcccctggagaacttgtgcaatggggctatgaggctgaatctggctccaggaaagcatgttgcaatccacgagtgatgtctgccatgcgcacaggcatggagagtgaggcacctgtgctgtcttnnnnnnnnnnnnnnnnnnnnnnnnnnnnnnnnnngcacccagannnnnnnnnnngtgtgctgcatagccctcctaaccaattcagtatttttcactccattttccagggagaaatcagactctaaggtatcagaatgtaaggttcnnnnnnnnnnnnnnnctccagggtccctggttttctgtgacatcatgctgcaggaccctgtttctctctttgctttggctgctgggtagctcggaagggagctttaggcttgctctcaggcaccacattagctcaggggtttgggcatttttgtcgccggctcct

SEQ ID NO: 16538 - DNA, 777 bp, Macaca Fascicularis
  misc_feature (1)...(777): n = A,T,C or G
gattagaaatgtgtgtatttagtgaaaataggtttgtagtgaaatagttactatttcatgaaagtagatatttttagaatttttgaaataccacagttgttttcctggattatgaggaaaggcacattacatttagtcttcctttcgatnnnnnnnnnnnnnnnnaaatatgatttttagaaatcagctacccattatagcacaaaatcagccaaagcagaattttttaaaattggcttttttaggattcttttagtttctccccctcccatcttagtcttaccttgagggaacagtcctatgagaaggaacnnnnnnnnnnnnnnnnnnnnnnnnnnnnnnnnnnnnnnnnnnnnnnnnnnnnnnnnnnnnnnnnnnnnnncctattaccggtgttccctggggactcctcttaacttttccaaatgggaaggacagttgatttccaacatgaggttttttgttttttatccagaaatattttcagcaaaaccttccaactgagtggagtctgattaaggatttatttgaaaatggtggaattcattggcccataggtacattggaaaatgtatctctcnnnnnnnnnnnnnnnnnnnnnnnnaggctgtttatatgttcacagttacttttttttaaaaataaaagtcatttaatgtagaatacttttaatttcactttctgtattttaattttgttgaagggctgattgggatttccatgttcttattaaaaatctaacaaatcttaaaaaaaaaaaaaaaaaaaaaaaaaagg

SEQ ID NO: 16539 - DNA, 745 bp, Macaca Fascicularis
  misc_feature (1)...(745): n = A,T,C or G
tgactgacggtgactgaaggagctgggaataagnnnnnnnnnnnnnnnnnnnnnnnnnnnnnnnnnnnnnnnnnnctgaatgcaggcaagggacgcgagagacaaattttacaggaaaccattcacaactttcactcttccnnnnnnnnnnnnnnnnnnnnnnnnnnnnnccctggcaacagcccctgtgcgtgatcttccttcccgcagccaccagcccatggctgggtgggtgaggccagaagaaactccctccggcaannnnnnnnnnnnnnngacgtgnnnnnnnnnnnnnnnnngcccacagaagtgaggagtggccnnnnnnnnnnnnnnnnnnatgtgcctgactctgnnnnnnnnnnnnnnnnnnnnnnnnnnnnnnnnnnnnnnnnnnnnnnnnnnnnnnnnnnnnnnnnnnnnnnnnnnnnngtaaaaagggggcagggaacccgtctcttttgctcttgcctcggagctgcctgaagacatgggccaggctggaggctggacaacnnnnnnnnnnnnntctgagctgtgcttccaagtaaatgcctcctgaagagcccgagacccttcctgggagaattctgcagccagaatgnnnnnnnnnnnnnnnnnnnnnnnnnnnnnnnnnnnnnnnnnnnnngtccttgtccattcctagcaagttaatcgtgtcnnnnnnnnnnnnnnnnnnnnnnnnncgtgtaaagagacctgatattttcccnnnnnnnnnnna

SEQ ID NO: 16540 - DNA, 696 bp, Macaca Fascicularis
  misc_feature (1)...(696): n = A,T,C or G
ggtctgggggaagggacagggctgcccatctcagctctcgaccgaccttcccggagaggggccaggcctggcagccccgtgcaccgcgcccgctaagcagtcaaccttgtcccctccaagcacaggcatctgacccaatctgggtcccagggaggcggagtcgcaaaccctaactcgagggcnnnnnnnnnnnnnnnnnnnnnnnccctccccagatagctctcccaggcttggggcacagactttgcagacatccaccggggagatttctcagtgcagacagagctgaggtaggggttttggagaggctgacctcgagaggcccctgagggccaggaaggaaaaggagtcatttcactcttagaagctcaaacactccagacctcacactgccgactgccgggcacaggccaggctcctccctcggcaggcctctgtttctgggccctgggtggctgaggactcaccgagggagagcacgtaaaagtacctgcacacagtaggcgctcttcaggtgctggcgcccctccctccttccctgccctggctgtcagcctgtagcctcacaggtctttgctgaattccctcaccagcgtgtagcccaggcagccccagcccccctcggcctggtagccgcagccctccagcatccccgccactccccaggcagccanagccacggggaccacaagccgg

SEQ ID NO: 16541 - DNA, 752 bp, Macaca Fascicularis
  misc_feature (1)...(752): n = A,T,C or G
tcagtagtgncnnngcattggtttggctttggctannnnnnnnnngtngcntctggnnnnnnnnnnnnnnnnntannnnnnnnnnnnnnnnnntccctcgctgcggggctgctcttcggcagcctagccggcttgggtgcttaccagctgtctcaggatccaaggaacgtttgggttttcctagctacatctggtaccttggctggcattatgggaatgagannnnnnnnnnnnnnnnnnnnnnnnnnnnnnnnnnnnnttnnnnnnnnnnnnnnnnnnnnnnnnnnnaaagttggagttagtatgttcaacagannnnnnnnnnnnnnnnnnnnnnnnnnnnnnnnnnnatgaagaattaaaaatctgcatcttccactattttcaatgtgttaaccgaaataagnnnnnnntttttgcatctgacattttacctaaaaaaaaagacatcaaacttggcggaggggtggaaaatcagttgtcaccattataaccctacagaggttataatgaggatataacttgagctcattgagaccctcatagagattgattcttgtatattgatgttctcttctttctgtatctataggtaaatctcaagggnnnnnnnnnnnnnnnnnnnnnnnnnnnnnnnnnnnnnnnnnnnnnnnnnnnnnnnnnnnnnnnnnnnnnntctcttatgagatttagaatatctgttcttttgctcatcttagattacagactgacttgaaattatgttaagtgaa

SEQ ID NO: 16542 - DNA, 721 bp, Macaca Fascicularis
  misc_feature (1)...(721): n = A,T,C or G
ctataccctcaagtgaggatggctcagggtggggctgtcccctccaggagtcttgccttggagggcatcctacaaggggttagtcaatcagctgaggcagaactcactgggggtgggcagctaaggtggaggctgattccaattgtctggttgaggggtcataccacctattccccccagcttccttcaggaccctgcttctgagtgacggaccagctcacacaatgtcttgagtccatgatcccactgacccactcttgcctgctggagggtaatgagaaactttggttctgccatctctcccactctnnnnnnnnnnnnnnnnnnnnnnnnnnnnnnnntttgtggggaggataaaacctgcccaacctacctcacaatggtttttcacattgcaaagggtaataacatgggcggtgtggacttaggccaccccctccagtttgctttccataaatgcaaattgtccctactgcaagtcaggaatgattgctgactcatagtagggctgctatgcctgtgtgtaaacttgggaatggctgagggaacagagacttactcttccacgtacccaagttggtctagtgtgctgcccagtagcaaaccatggcaggctcaccacctattctgagctccagggctgttgtagggcagggtgggcttcctcccagacttgccttaccctgggctgacctttgcccnngtatgcattaatggactc

SEQ ID NO: 16543 - DNA, 657 bp, Macaca Fascicularis
cttggcaggtgaaaactcgagggaggagaagggacttgccttgtggcatctctgatcaggttggggtgcccagcacctagtatcagtttggggtttaagaagcaggactctgtccctgctcatgactatgccacgtggtaggacacataggacacaggaattcctgggtccctgcccacgactgtgccacgtgctaggacacaggacacaggaattcctgggaagtggtagcttcagaagtgatcttggctcgcaggcaccaatgccacgtaccaagctgtgaaactaaaccttctccactaaacgtcgttagggccttagttctagacgaataatatctgatttacctgcactgctccccgtgtgccgagcacagagcatacgatagcgcctacttcacgcaaacttgtgcctttaaactttgtaaatttaaatacacccgagaagttgcttctttttactttttctacttttcctacctttttgtagaaaaaaaaaaaaataatgtctctgcttctatttctctgggagtgggggcaggagccgccacagacctgttttatgcagtgtctccctcggcaccgcgttcggaggacgcgccctcactcgcctgctgccttcgcttctttctgaccaacgctaacttttgtacagatc

SEQ ID NO: 16544 - DNA, 782 bp, Macaca Fascicularis
  misc_feature (1)...(782): n = A,T,C or G
atagatgagcaatgggaactggttgccagggtctaaattggntttnantnntgtactgttatctgttttgacacagatttccttgtaaaatgtgcctagtttaccaaaattaacaaaggggggtggggaaaggactttaaaaatgttcaaggtaaaatcaagtatagccacagcataagagaatcgagaaatttgatagaggtaacttgtttaatgtaaatctaatagtacttgtaatttctttctgcttagaatctaaagatttgtttagaacctcttgtttaaaaataatagactgcttatcataaaatcacatctcacacatttgaggcagtggtcaaacagataaagcctatgatgtgtgtcattttaaagtattggaatttagcctctgaataccttctccactgggggaaagatattcgtggaaccactcatgacatatcttagaaggtcattgacaatgtataaactaattgttggtttgatatttatgtaaatatcagtttaccatgctttaattttgcacattcacactatagggagcctgttggttctctattagtcttgtgggttttctgtttgaaaaggagtcatggcatctgtttacatttaccttacaaacctagaatgtgtatatttataaatgtatgtcttcattcctaggtactaatttgcagatgtctttacatatttcaaatacagaaactataacattcaatagtgtgctgtcaaagtgtgcttagctcacctggatatacccacattgttaaatgtctaaa

SEQ ID NO: 16545 - DNA, 760 bp, Macaca Fascicularis
  misc_feature (1)...(760): n = A,T,C or G
aggcgcgctgctgggaccagcggnnncaagcgccgcttcagccgcctggagaaccgctacgaggcgctggccaagcaggtggnnnccgagatgcgcttcgtacaggacctggtgcgcgccctggagcaggagaagctgcagggcgtggagtgcgggctgcgctaggcctactgggatgggccaggccccaggacagctggagctcggccttcggtgggggcgcttacttggacgctgctcctcctgtcccgttccagcccttgtacaccgcccccaggctggaggcggagtgggaagagctggagggcaagggtgggtgtgggacggggctgtttctctgcacagcctccaagccggccttcaccttcgctcctgcatcatcaatgacgctgggaccctccaggcagcgtggcctctggcgctgtgagggttgggacccaggatgggactggctaccgaggcacagcggccgtccgaatgcagccctggcccaggcccaggcctgggggagggtttgcgggcagttcggcggggtgctgcccgctgctgccactggcccaggaggaggtcgtgggacagggagggtggggtggacggcggacaggcagtccccacacttctgggtggcgccgggcttggtggggtcttctaccatgtgccctccttgccgaggtcggttccctggatgtggggtcttctgctgcggactcctccgcgagccccgtcctggcgcgtgtgcaggcctagacaagagcggccc

SEQ ID NO: 16546 - DNA, 860 bp, Macaca Fascicularis
aagataccaagaagagctcctgcccatggccccactggaaatggactctgctgagcaaagcccccagttgaagagaacagaatccacacctgcattgaatacctgtttctccatgtgtatcgtctctgagattaccttcttgccctttccaacaccttagtgattcctcaattcctcccctattgggaaggccatagggcattaactgaaggaactggcctctctccttttcctgtaccttcaccctttagtctgtcaaggaaaaccttaggacctctgaatcaagaggactgagtttgtgggtgaaccttgaaggtgctctttctgctacaggggccctgggagatagcatggacatgtgcattgagaagccagcctcagaccttagcttgaagcagcttgaggtgagacctactgtaggctcagcatcttgctaggaggcatgggagtgatccattctgccaggcatttaggggctttcagaaatttagtaaaaggtggagtgtatctttccagtatcttccatcttcatatgtatacttgtccttcctcccatttcctccctttggcccagggtgggagggtggagggaggctgctactctctaccacttcctgtgtgcctctactgtggcctcaaccctgccaattaaagctgctcccatcccctacctgggcatgtgtgagcccttctcactggattttatacccttgtgtctgtgtacataaatatatatacatatatatatatatataaactttgtacaaaaggcaagccgccgccttgtggcggctgttgcccatttgtgtgtggtctttgttatgtatctctctgacaacttctcatgagcccaactcatg

SEQ ID NO: 16547 - DNA, 755 bp, Macaca Fascicularis
  misc_feature (1)...(755): n = A,T,C or G
gnnnnnnnnnnnnnnnagtgacagaagggtatttattgcagggctgggcctgtatgggtccagctctgggaaggctgagtacagcgtgaagattgagctcaagcggctcggggtggttctggctcagaacctgaccaagttcatgtcagacggatccagtaacaccttcccggtcnnnnnnnnnnnnnnnntccaggttgaacaagacaccttctacacggccagtgccgtcctggatggcagcgaactcagctactttgggcaggaggggatgacggaagtgcagtgcggaaaggtggnnnnnnnnttccagtgctcctcggatagcaccaacgggactggggtccagggtgggcagatccctgagctcatcttctacgcctgaggtgcccggggaggcagcagcagatcggcaagtgagcggagcggaagtcaatgtactaactgctcttagccttgtctctctctgacatgtagtcaactgaagcttgattnnnnnnnnnnnnnnncttttccacacagccagagcctggggattggagtcataggcatctctggtacactggggtgcacgtctcaggtggaggaagattgagggcacaaggcaggccccagatcccctcccagtggcacccacgccacctgctttgaggggttggatgttccagccacgctcttggattctaagtggttccaagcttaacttgagaccttcccttcaaatctaaaatcggcaaaaagtcactaaaataggg

SEQ ID NO: 16548 - DNA, 1072 bp, Macaca Fascicularis
  misc_feature (1)...(1072): n = A,T,C or G
accaagagaagatgactcatcannnncnccagatgcatgcagaattcatggcnnnctatatgtcaataaagtagcagggaattttcacataacagtgggcaaggcaattccacnnnnncgtggtcatgcacatttggcagcacttgtcaaccatgaatcttacaacttttctcatagaatagatcatttgtcttttggagagctnnnnnnnnnnnnnnnnnnnnnnnnnnnnnnnnnnnnnnnnnnnnctatagatcacaaccannnnnnnnnntattttattacagttgtgccaacaaaactacatacatataaaatatcagcagacacccatcaattttctgtgacagaaagggaacgtannnnnnnnnnnnnnnnnnnnnnnnnnnnnnnnnnnnnnnntattnnnnnnnnnnnnnnnnnnnnnnnnnnnnnnnnnnnnnnnnnnnnnnacatgccatnnctggcagttttttgtaagactctgtggtattgttggaggaatcnnnnnnnnnnnnnnnnnnnnncatggaattggaaaatttatagttgaaataatttgctgtcgtttcagacttggatcctataaacctgtcnnnnnnnnnnnnnnnnnnnnnnnnnnnnnnnnnnaccacttacctcttttagaaaataatacannnnnnnnnnnnnnnnnnnnaggagaaaaactttttgcctgagacataaaacctttttttaataataaaatattgtgcaatatattcaaaggaaaggaaacacaaataagcagaaaacatacttattttaaaaaagaaaaaaaaggaaannnnnnnnnnnnnnnnnnnnnnntatatgttgtgtctgtnnnnnnnntcctagaagaaatcatgcagctaaacagtgaagaagcccaactggagtannnnnnnnnnnnnnnnnnnnnnttatannnnnnnnnnnnnnnnnnnnnnnnnnnnnnnnnnnttgcttcttggtgataaaaagcctgaaggaaataagtgaaactacatctatggaaaaaaaaaaaaannnnnnnnnnnnnnnnnnnnnnnnnnnnnatcttttgttt

SEQ ID NO: 16549 - DNA, 643 bp, Macaca Fascicularis
  misc_feature (1)...(643): n = A,T,C or G
ctctagaaatctagatgtcggtgggnnnctgagatacgctgtttatggattcttcttcacagggccgctgagtcacttcttctacctcttcatggaacactggatccctccagaggtccccctggcagggctcaggaggctcctcctggaccgcctcgtctttgcaccggccttcctcatgttgttcttcctcatcatgaactttctggaggggaaagacacctcagcctttgctaccaagatgagggggggcnnnnnnnnnnnnnnnnnnnnnnnnnnnnnnnnnnnnnnnnnnnnnnnnnnnnnnnnnnnnnnnnnnnnnnnnnnnnnnnnnnnnnngctcttcgccaacctggcagctctgttctggtatgcctacctggcctccctggggaagtgacgaccgctgggagaacatcagatgcactgtggacgtgggtctgggggtcttacctgcccagcgagagcagaaccaacccagtcaggacgtcactgcctctaaatcaggtgattcaagatgcccgaaaatgatggatagagaaacagaaatctcttaatgtcagaaccttgtgttttaaaaagnnnngtcgctgacttcagctggtgctgccccagaaacttaacatttagtagaggcaatttc

SEQ ID NO: 16550 - DNA, 335 bp, Macaca Fascicularis
  misc_feature (1)...(335): n = A,T,C or G
gtccctnnnnnnnngcccgaacggaggcaccagaagggaggggagnnnnacgcccctaaaggtacangngacactcaggaaatgccacatcatgaaggggccnnncaaggagcccatgaacaaaaagccagaaccccanngaacaannnagttgaaggtcctacacaagagaagggacnnnnnnnnggcagggccccccaccccgcaggactcgggactgtgttcgctgggagcgctctaaaggccggacaccgggttcttcctacccccgcctgcctcggggccagggagcataccggcctggtactcggagggagcccctgggcctggaatct

SEQ ID NO: 16551 - DNA, 672 bp, Macaca Fascicularis
  misc_feature (1)...(672): n = A,T,C or G
acacacacacacacacacacacacacccacacacacacgggtgtctactgacctggagtgannnnnnnnnnnnnnnnnnntaaatgtgacaactgtgcattcaatcctgggtcagggacattctaatggccaggagagtgacacagccaggaccttgatggacagccagaggggccacttcaggatggatgtggggagagtggaagaggcagggagtaatcctgggagacagcagggaggaggcacttcttccctatgtccaggagagggcaatagagggaagactgaggctgaagaactgatggctctggtcccaggacagacagacagacagacacacacacacacacacacacacccatctctgtagcaagcaacctcctatgatagctgttctccctgtcatgatggtatagccaccatcctgttgtgtgctaggagggagcttaacctacctggggaaaaatagctccccaagagctcgcaccagcaccactgatgaacctgcttcctctgagagtgagatgcccagggggaggagccctagggaataagtcagggacagggaccaggatgccactctgtcactgtgtgaccctcagcaagtcactaacccttggcctcatttttcctctcttgtgaaagaggacaataattcctacttctcaagat

SEQ ID NO: 16552 - DNA, 719 bp, Macaca Fascicularis
  misc_feature (1)...(719): n = A,T,C or G
gcctcccgagtagctnnnactgcangcatgagccaccatgtccagctnnttttcgtattttgannnnnnnnggattttcaccatgttggccaggctggtcttgaactcctcatctcaggtgatctgcttgcctcggcctcccaaactgctgggattacagacatgagccaccgtgcccagcttcacacccatttcttttaaaaggatcctgtagcaggaagaaaaacccctcccatctcgctcctccgagactgtacccccttggaggtatttccatcctccacttgtccgtggctggaaatgccagcctgctcctggccccctggaagcctccccacagctggtggtctggacttaaggattgctgggccaccgcctctctgcccatcaccattccatatttaagtggagcccctacacagaaaggcctcggggctttattttagtcttttcagggatgtcgtgggcgggggaggggggttcttggtnnnnnagccctctccccacccctaaagggaccccgacgctatctgnnnnnnnnnnnnnnnnnnnnnnnnnnnnnnnnnncaggggaccccatggaaaagatggggaagagcaaaatacatggagacgacgccccctccaggatgctcgctgggattcccacgcccaccattgtcccccaccccgtggctgggaggggcctctgaacggaacagtgtccccacagagcgaaa

SEQ ID NO: 16553 - DNA, 231 bp, Macaca Fascicularis
ctctcctcccctcttttccttccttcctacccacttctccctctcccttcccctgactgttccacccaggaggaggaaacttcacatagccgtgctcacagttttttattttaaaggaatttggctggggagctgaacagggctccctgtgatctgaagaaagcttttggtgcttgtcctcacaaccacctcaatcctccctccctgtcctcccctgtctcctttcctcct

SEQ ID NO: 16554 - DNA, 696 bp, Macaca Fascicularis
ccaaacttcaggttctgaaactccttttgaatttggctgaaaatccagccatgactagggaactgctcagggcccaagtaccatcttcactgggctccctctttaataagaaggagaacaaagaagttattcttaaacttctggtcatatttgagaatataaatgataatttcaaatgggaagaaaatgaacctactcagaatcaattcggtgaaggttcactttttttctttttaaaagaatttcaagtgtgtgctgataaggttctgggaatagaaagccaccatgattttttggtgaaagtaaaagttggaaaattcatggccaaactggctgaacatatgttcccaaagagccaggaataacaccttgattttgtaatttggaagcaacacacattgtaaactattcattttctccaccttgtttatatggtaaaggaatcctttcagctaccagttttgaataatgaatatcatattgtatcatcaatgctgatatttaaccgagttggtctttaggtttaagatggatgaacgaatatcactacttgttctgaaaacatgtttgttgctttttatctcgctgcctagattgaaatattttgcttttcttctgcataacgcgacagtgaaccaattcatcataagtaagctcccttctgtcattctcatcgatcacacttgtgtatcatca

SEQ ID NO: 16555 - DNA, 690 bp, Macaca Fascicularis
  misc_feature (1)...(690): n = A,T,C or G
gcaggaacatggctcccatactattttccttgagggcctgttttgaataatagtgtttttctgaatatataaccaagcatttcttctggactagaagccaaattcgatccctggttatcagaaatgtgggtttggtggttctatctttatagatacttatacacatcacaaaatcaccaaatttggggaaatgccaaccatactttaagagaataaagatgagcagttgtgcctacttgcatagggaagcctgcataaaaagtcagtgattccttaggctcttttcctgcactaaccagtgcagttaatacctcattttcatgaacagcaaactcgtggcaacattaaatgaatcatggccgggcacagtggctcatgcctgtaatcccagcactcttggaggccgaggcgggtggatcacctgaggtcaggagttcagnnnnnnnnnnnnnnnnnnnnnnnnnnnnnnnnnnnnnnnnnnnnnnnnnnnnnnnnnnnnnnnnnnnnnnnnnnnnnnnnnnnnnnnnnnnnnnnnnnnnnnnnnnnnnnnnnnnnnnnnnnnnnnnnnnnnnnnnnnnnnnnnnnnnnnnnnnnnnnnnnnnnnnnnnnnnnnnnnnnnnnnnnnnnnnnnnnnnnnntaaaaaaaaaaaaaaaaaagattcatgtccttagattgtaagccctactggg

SEQ ID NO: 16556 - DNA, 1156 bp, Macaca Fascicularis
  misc_feature (1)...(1156): n = A,T,C or G
caaaaatacattnnnnnnantatctataaagatgtcaacatatttcaaaatacataagaccatacaagttccagttgaataatacagttatgttttgcaaaggtaattttatttgcctttattaggcaaaacttacattatcaagtagcatttttaataaagcaaatagcatatatcttagtaagattatcttttttcaataaaaatattaaatgtatttactttcctnnnnnnnnnnnnnnnatcctacatagnnnnnnnnnttacaagaaaaattagtcagagctacatagtcaaattgtaatggtannnnnnnnnnnnnnnagtgaaaaagctattagcctagaacaaaatttttcctaatttttatacattaaaaaagaaacaagaagaaaataacttttatcttttcaatgggatttatttatgtttaagtaaaagtagcaaatgttacataagttgtttccttaagaacatttattttgtacaatcacattgttatcaannnnnnnnnnnnnnnagtttcctcgggtccacacactgaactttgaaactattgtagcatcctcttttccaagtttaaacatgnnnnnnnnnnnnnnnnnnnnnnnnnttcgcattgcagagtggtcacatgtgacaacctgacaccaagcgagaagccttttgatgaagtatgttttatcttttgttgagttacaaaatggtactttcatgtgtgtgattatcaaactcatacttttttttcaggtcatttctcttctgctacaataaaaataaaccagttaaaactaagcagtatagcaatgtaatcgaccatctatcaggttatatcttatataggatgttttaggtgatattgatgctttatattacacatctgtatttaatatactttgggcaatacaaagttagaacatgtctggtagataaacaaaaagatttccctgaaaattgatacattgnnnnnnnnnnnnnnnnnnnnnnngtttattcttcagaagtgtggtggaattgtttaatattaaaataaaacatcttgctgttgtcatttttttcatattcctattttatacatttttagataacagaataatnnnnnnnnnnnnnnnntaaaacattattacttggttagacatgattatcagattttggg

SEQ ID NO: 16557 - DNA, 714 bp, Macaca Fascicularis
  misc_feature (1)...(714): n = A,T,C or G
ctgttgatattctgaatttgtttatccannnnttatcctatcctaatttggtggagagaggagcctgtgaactgctgctctcaggtaacttacaatctgattgaagaagatgtatcacgtattcttcaattaaatcctgcttagaccagttggcttgaattggtcctttttatttctctatgtttttttactggccttaataacctttatggtgctatgaactccagatgtcagctgtggtttttctccattttttgacagtgtgaagaatgtaagtcgaaccttatctccttccttacattgcatggtgtcctcgtttctaaccgccaatacttccatttccccagtcttgtcacttaggtcaaataatacatttttcttcttttctgttaccttctggactacaaacaacccattcacaattgttccaaggggctgagtttgaagcgtgttgatctttggggtttcaccagcttttctgataatgttcagcgggacatcaaccttttggtcagatttagcatctaacacacatgaggcgctatttacctctaagaaaccactgtgctgataatatcttgatattataatcattctctttggaatgaannnnnnnnnnnnnnnnntattaaaaactttttacaaagaagaattccttctctgtagccaccgtagcatgaaacatctcttgcttgcccttcttnntctcaacgt

SEQ ID NO: 16558 - DNA, 710 bp, Macaca Fascicularis
  misc_feature (1)...(710): n = A,T,C or G
tcctcacgcagtnnncttccgtggggccctccccaagctgggcatctgtgctggccttcaggtggtgctggggctgcccttcctgnnnnnnnnnnnnnnnggctacctgtcccgctcctttgaccttggccgccagtttctgttccgctggacagtgaactggcgcttcctccnnnnnnnnnnnnnnnnnnnncgagccttccacctggccctgttggctgcccacctcaccctgctcctnnnnnnnnnnnnnnnnnnnnnnnnnnnnacaggagaaagtatcttgtcgctcctgagggatccctccaaaaggaaggttccaccccannnnnnnnnnnnnnnnnnnnnnnnttctaccctcttcacctccaacttcattnnnnnnnnnnnnnnnnnctccctccactaccagttctatgtctggtatttccacacactgccctacctcctgtgggccacgcctgcacgctggctcacacacctgctcaggttgttggtgctggggctcatcgagctctcctggaacacatacccctccacatcctgcagctctgctgccctgcatgtatgccatnnnnnnnnnntgctgcagctctggctgggcctgcagcctttccccaagagcacccaacacagcaagaaagctcactgaaatccacccctttccctccagtccactctcaggacctggggtgggatggactctgtgc

SEQ ID NO: 16559 - DNA, 755 bp, Macaca Fascicularis
  misc_feature (1)...(755): n = A,T,C or G
tctgtcatccagccgccagtgtcagggttcaccaccaatctgtactcctatgaagattaacgtcaatgtcaactcagctgctggtctcctggatcaattctatgagaaacagcgactcctcatcatctcagctcctgatccctccaaccgatattataaaatgcagatctctatgctacagcaatccacctgtggactggatttgcggcatgtgaccatcattgaactggtgggacagccacctcaggaggtggggcgcatccgggagcaacagctgtcagccaacatcatcgaggagcnnnnnnnnnnnnnnngcctcactcgctcctacttcaatatggtgttgattgacaagcagggcatcgaccgagaccgctacatggaacctgtcacccccgaggaaatcttcacattcattgatgactacctactgagcaatcaggagttgacccagcgccgggagcaaagggacatatgcgagtgaacttgagccagggcatggttgaagtcaacggaaaagctcctctnnnnnnnnnnnnnnnagacctaataaaaggaggaaatggtttcccacagttctagggacaggactctgaggtgggtgagtttgccaaatcctacaacgtttccaggcatccttttagggctgtttaatagtttccctagaagctacgtagggactgaggacaggccttgggcagtgggttgggggtagaagttcttcctttcctaacccgggcccctgcccagctctc

SEQ ID NO: 16560 - DNA, 671 bp, Macaca Fascicularis
gaagaaatacaggccccaccatcccgggcagcacgagatgtttgcagagagatacaccaacccaaatcccagcttgcaccaaatcctgctgcaatagtgaatacatttcttagggaagagaaagtagactttcgcagcttttgaatcttctttccaggcgtctcaggaggaatcagatgatactagccaacaccttattccagtgtgtgtgctatcaccccgaggagttccagatcatcaccagcggaacagacagaaagattgcttactgggaagtatttgatgggacagtaatcagagaattggaaggttccctgtttgggtcgataaatggcatggatatcacacaggaaggggtgcactttgtcacaggtggaaatgaccatctggtcaaagtttgggattataatgagggtgaagtgactcacgttggggtgggacacagtggcaacatcacaagcatcagcataagtccaggaaatcaatatatcgttagcgtaagtgccgacggggccattatgcgatggaagtacccatacacctcttgaaaaagacggcgttgcacacagtcctgttgaagaccgattttaagataactccaacactagtcttcatttctcacagctctgtttttgttgtggagtccaaacttttttttctttatagaatgc

SEQ ID NO: 16561 - DNA, 775 bp, Macaca Fascicularis
  misc_feature (1)...(775): n = A,T,C or G
aaatgactacaccaaatttccagaaaattaacatttgaacttagctgtaattctaaactgacctttccccgtactaacgtttggtttccctgtgtggcatgttttctgagcgttcctactttaaagcatggaacatgcaggtgatttgggaagtgtagacagacctgagaaaacgagcctgtttcagaggaacatcgtcacaatgaatacttctggaagcttaacaaaactaaccctgctgtcctttttattgtttttaattaacatttttaattgatagcaaaatagtttatgggtttggaaacttgcatgaaaatattttagccccctcagatattcctgcagtgttgaaattcatcctacagaagtaaccgcaaaactctagagggggagttgagcaggcgccagggctgccatcaacatggatatgacatttcacaacagtgacgagttgaatcccttgtaaagtagtagttgtctgctctttgtccatgtgttaatgaggactgcaacgtcccttctcttgtgattcctaggacttttcctcaagaggaaatctggatttccacctaccgctttnnnnnnnnnnnnnnncacctacttactgtattctacattattatatgacatagtataatgagacaatatcaaaagtaaacatgtaatgacaatacatactaacattcttgtaggagtggttagagaagctgatgcnntnnnttctacattctgtcattagctattatcatctaacgtttcagtgtatcctacagaa

SEQ ID NO: 16562 - DNA, 730 bp, Macaca Fascicularis
  misc_feature (1)...(730): n = A,T,C or G
cagcaaaaacttatgagnnnnnntnnnntggtggtactnnntatgaaaaaggtgttgacgtggacccttcagtatccagaagagcacatggcagtgttttctacnnnnnnnnngcaatgagaaggcagcctcaacttctagtgaannnnnnnnnnnnnnncagaagatcgagaaatgtactaagtctactgccggaaacattaattggaagtatgtgttctgttcacttgttgatattttatcgacaaattcttggagatgtgctcctgaaagacaggatgagcttgcaaagtactgatttaattnnnnnnnnnnnnnnngccaccttccccatgnnnnnnnnnnnnnnnnnnnnnnnnnnnnncctcaggagttcatgggctgaaaaagaaagtatgttaaaaagatcagagaagagagacaaagagttcctgaagtccacgtttctcctggtttaccatgactgcgtgctcccacttctccactccacacacctgcccccattcaggtgggcagaagaggagtctgagactgcacgatggaaagttatcactgacttccttaagcaaaaccaagaaaaccagggtgccctccaagctctgctgtcgccagacggaattcatgaaccttttgacctttcagagcagacctatgacttcttgggtgaaatgagaaagaatgcagtgtgatggtgacagcctctagccctcagcttcccatgaatcagatg

SEQ ID NO: 16563 - DNA, 735 bp, Macaca Fascicularis
  misc_feature (1)...(735): n = A,T,C or G
caatgatatacagctgttgcatatttgtgtactgcatgtttgaatgtttcaagatcaagaactcagtaaactaccatctgctttttaccttagttctattcagtttaatagtaaccacagtttaccttaaggtaaaagannnnnnnnnnnnnnnggtcatgtatggaatgttggtctttacattagtacttcgatctatttatattgttacatgggtttatccatggcttagaggactgggttatacatcattgggtatatttttattgggatttttattttggaatatagataacatattttgtgattcactgaggaactttcgaaagaaggtaccacctatcataggtattaccacacaatttcatgcatggtggcatattttaactggccttggttcctatcttcacatccttttcagtttgtatacaagaacactttacctgagatataggccaaaagtgaagtttatctttggaannnnnnnnnnnnnnnnnnnngagcctctcaggaagcattgatgaatcattccaccaagaaaacaagcacctaccatagacctggcagaataaataaggaaatccttaaagatctacaagttcaaatatgtcatgaccatcatagcagaggagtgactttctgactaatgctgccacccactccacaaacagaataagaagtgaggcctgctgggtgtttagctcatggcattatctcatttgtcccctcctcctt

SEQ ID NO: 16564 - DNA, 847 bp, Macaca Fascicularis
  misc_feature (1)...(847): n = A,T,C or G
acatcagatgacctcactcagatgctggacaccnatagggcttaagtatgagtgctacgacctttgtccacgttggacannnntgnnnnctttactgatggtaatgaaactgcagacctactttgggattttttgactgaaacctgcaactttaatgccacagcaccacctgatctcaaagcagagcttgtgaaagatctacaagagcctgaatttagtactaagaaagaggggaaggttctttttaataataatctgagtttcatagtgattggggcataactatcaatcacaaaagtatattcaaaaattatattttgaacaactctgattgctcattgatatccatattaaaattacaaacacctacattaatgtagataaagccctgtttggatatgagaagtagtgaactccaagacattattggacttccatttggaatcatatgggacactgctggtcttatcctgtccctcctccaggaagagagaccacatgcaggctcaacataacataagctagaaaaattagatgaccgaatttctatggcatattgataataaaattcattccatttgctgattgtctgaaatttttctagaataataataaaatatatactatagattctttattagtgacgtatgcacttatcaacactttgaacccaaagcctgtgttactgatttggccattttatgaagaaatatttctctttgtacattcttctattgtactttttatctcatttttattaatttttaagagtaagcacctttagaatattaaaaattaattctttaaaaaaaaaaaaaaaaaaaaaaaaaaaaaaaaaaaaaaaagg

SEQ ID NO: 16565 - DNA, 717 bp, Macaca Fascicularis
  misc_feature (1)...(717): n = A,T,C or G
annnnnnnnnnnnnnnnnnnnnnnnnnnngattctnctgatgaacttcctgtatatgttggtataaatgaagcaaagaaaaattgtataattgttccaaatggagataatgtatttgctgcagtcaaattatttttgacgaaaaaacttaaagaagtaacagataaaaagaaaatcaatctcttgaaaaacatagatgaaaagctcacagaagcagccagagaattggggtactcgcttgaacagnnnnnnnnnnnnnnnnnacagagagataagaaagtagtgacaaagacctttcatggtgcaggcttggttgttccagtagataaaaatgatgttgggtaccgagagctccctgaaacagatgctgacctcaagagaatttgcaaggcaatagttgaggctgcaagtgacgaggagagactaaaagcttttgctcccattcaggaaatgatgacttttgtgcaatttgctaatgatgaatgtgattatggcatggggcttgaattgggaatggacctcttttgctatggctcacattattttcatannnnnnnnnnnnnnnnnnnnnnnnttgcatataatctgttgaagaggaatctgtttgcagaaattattgaggatcatctggcaaacagaagtaaagagaacatagaccaacttgctgcatgagtaaggtggctttgattggtgtacaatatttcaaaggactagtatc

SEQ ID NO: 16566 - DNA, 750 bp, Macaca Fascicularis
tcatgtggacatcggtgggagaaaaggaacagccatcgaactccaaggacacaacgacaaagtccaggccctctcctatgcgcagcacacgcgacagctgatctcctgtggcggtgatggtgggattgtcgtctggaacatggacgtggagaggcaggagacccctgaatggttggacagtgattcctgccaaaagtgtgatcagcctttcttctggaacttcaagcaaatgtgggacagtaagaaaattggtctaagacagcaccactgccgcaagtgtgggaaggctgtctgcggcaaatgcagctccaagcgctcctccatccccctgatgggcttcgagtttgaagtgagggtctgtgacagctgccacgaggccatcacagatgaagaacgtgcacccacagccaccttccatgacagtaaacataacattgtgcatgtgcatttcgatgcaaccagaggatggttactgacttctggaactgacaaggttattaagttgtgggatatgaccccagtcgtgtcttgatgactctcccaggaatcagaaagatagtatttactaaagaaatggttgttttaatccaagtcattaccagagtggtaaagcagacatgtgagaagtaagaaagaaactaaagaccctggatgaatttgcagatgacccatgcgcacagtggggacccggcgagtgagaacttgcaaggggactcttccaacttgttcataccaatataaaagaagcta

SEQ ID NO: 16567 - DNA, 665 bp, Macaca Fascicularis
  misc_feature (1)...(665): n = A,T,C or G
ccatgttgtgcacgcatcggtggttacagcttacctcttnnnnnnnnnnnnnnnnnnnnnngggatgttcattttcttattcctgtgtgttttatctagaaagattcaagaagagtattaccgattgttcaaaaatgtcccctgttgttttggatgtttaaggtaaacacggagagtgatggataattacaactgcacaaaaataaaaattccaagctgtggatgaccaatgtataaaaatgactcatcaaattatccaatattaactactagacaaaaagtattttaaatcagtttctctgtttacagtataggaactgtagataataaggtaaaattatgtatcatatagatatagtatgcttttctacgtgaaatggttctgtcaaaaatagtattgcagatatttggaaagtaattggtttctcaggagtgatatcactgcacccaaggaaagattttctttctaacacaagaaatatatgaatgtcctgaaggaaaccactggcttgatatttttgtgactcatgttgcctctgaaactagtcccctaccaccttggtaatgannnnnnnnnnnnnnagtggaacataagagaatgaagcagcagaatatcaaacagtgaaaagggaatgactgttaaaataataagatgtattttgaat

SEQ ID NO: 16568 - DNA, 743 bp, Macaca Fascicularis
  misc_feature (1)...(743): n = A,T,C or G
gcgatgtgagnnnntgaacacaagaacagtttannnnnntgaacactgggtnncnnnnnaaatgaaagggaacaggaacttcagaacttattggaggttgtaaaccaatgttgtgaggcttcaagttcagacatcactgagaaatcaaatggacataaggcagctcatgagaggcagcataacatttttcttggtcagatgactattgatgaagaaaaattgatagcacaaaatctagaacttaacgaaaccataaaaattggtttgactaagcttaattgctttctggaacaggatctgaaactggatatcccaacaggtacaacaccacagaggaaaaattatttatacccatcaacactggtaagaaccgaaccacgtgaacatctccttgatcagttgaaaaggaannnnnnnnnnnnnnnnatgatgctaaactcttcggaaaacaacaaagaagagacaattccggatgtggatgtagaaaaggcagttctagggcagtgtactgaagaacctctaagtcaagagccatctgtagatgctggtgtggattgttcatcaattggcggggttccatttttccagcataaaaaatcacatggaaaagacaaagaaaacagaggcattaacacactggagaggtctaaagtggaagaaactacagannnnnnnnnnnnnnnnnnnnnnntacctctgcgagcccagatcaacctttaattcacttgggggttagcaatttt

SEQ ID NO: 16569 - DNA, 623 bp, Macaca Fascicularis
actcctctaaacataagggcagagtatctggcatgtattcaaaaagtaaagcacaggtgtgtaccactgtcgtcatttaatagggttgtcattgcacaggataccttctaagacctccagtggatgcttgaaacttcagatgatactaaaccccatatatattgttttttcctatatatatatctatgataaggtttaatttataaattaggcacagtaagagattaacaacaataaaatagaataattatagcagtatactataataaaagttatgtgaatgtggtcttgatgtctgaaaagatctcactgtattgtgctcacctatttttggattgtggttgacagtgaaaagaaaaccatgtggaaagggggtgggggaaagtgtcgtaattatttaatatttaatttgaggctcattagcaattacctataatgagtgctgtttgcctgagtttagtccatttcaatttatcacctcccaggattagaaatattgcaagaaaatgtcaaacggtaatttttaaaaaatagcctttaataaaaaatacaaaaatataatattgtatctttgaaacatgatctgtatattcagcaagtcctaagctcccataatgtaaaat

SEQ ID NO: 16570 - DNA, 482 bp, Macaca Fascicularis
aggaggattgcttgagctcaggaggcggagggtgcagtgagctgagattgggtcaatgcattccagcctgggtgacagagtgagcctcagtgtcaaaaaaaaaggaaaaaaaaaaaagagctgcttcacatgtaaatgtctatagctagtagcctggccctctaatgtttaatttgaataaatatatctattctctgtgaattatcttgaaagttttaaacagaatgacctcatagtttttaataaagaatattatttacctaaaatgtactagtagcatcttgcccagccataaagcaataaacttctcaataatcttaattttgacatttgaataaataatggaaactttgtattttaagggcatatatcccatcaattggaatcagtaccttaacagaaaaaggcagctcttcaatggaattaacgtgatataaaatgtttgatataggcagtacttttataaaaaaaagatatgctgg

SEQ ID NO: 16571 - DNA, 763 bp, Macaca Fascicularis
  misc_feature (1)...(763): n = A,T,C or G
cacatgcaagggatgaatgtaaaagcaacatcagcttgaccagtataaaattacagtggattgctcatctcagtcctcaaagctttttgaaaaccaacaccatcacagcttgttttggactttgttacactgttattttcagcatgaaaatgtgtgttttttttagggtttctgattcttcaaagaggcacagagccaaattggtagaggaaggatacagagtataaatttgtgtaatattactttaacatgcctatattttacttggaaatattaaaagaaagggttctgaaaaatggaaaacttagtttgtcaattgattttgaggagtggtttttattttcttggacacttaattctgttctnnnnnnnnnnnnnnnnnnnnnnnnnnnnnnnnnnnnnnnnnnnnnnnnnnnnnnnnnnnnnnnnnnnnnnnnnnnnnnnnnnnnnnnnnnnnnnnnnnnnnnnnnnnnnnnnnnnnnnnnnnnnnnnnnnnnnnnnnnncatacaatagcatgttgtagatannnnnnnnnnntttgttaccttaaaactaggcatttgtaaatattaaaccttaagatggcaggtgatgtcctgtaaacactcagctgttcagattggacataactgacttagttcttcccttctctctctcaaaattataggagacttgtagtttagtgttgttttctgttactaacntgctgctgataatgtacatgaacttaacatgctgtgtaagctgtgtcccagttctgaa

SEQ ID NO: 16572 - DNA, 680 bp, Macaca Fascicularis
  misc_feature (1)...(680): n = A,T,C or G
ttcacaacagggcagttgtgataccaatagaacaaaaaacaaacacttaaacttttttaggactccagtgagtttgggacttcaggaaaaatcaacccagcaccagcagctatcaaccaccattccatctcttcacttgaacagcattagttaagtccagatgtgggaacccttaagaagttcctaattgtttgtctcagatcggtgttataccagccagccaccaccttgctaaacctataagctttttagaatccaatattctgccaagaatatgccttgatagttagccctcagcccataggtgttttttgttttttaacaattatatatgtctgggggtgaaaaacaaacccttgcattccaaaggtccatactggttactggtttcatcgccaccacttagtggatgtttagtttagaaccattttgtctgctccctctggaagccttgggcagagcttactttgtaattgttggagaataactgctgaatttttagctgttttgagttgattcgcaccactgcaccacaactcaatatgaaaaaaactatttaacttatttattatcttgtgaaaagtatacaatgaaaattttgttcatactgtatttatcaagtatgatgannngcaatagatatatattcttttattatgttaaattatgattgccattat

SEQ ID NO: 16573 - DNA, 801 bp, Macaca Fascicularis
  misc_feature (1)...(801): n = A,T,C or G
aaaagaagtttaaaacccaccnnnnngagagacatgactatngggcagctacaagtgatagtnnnnnnnntccatccccagatagaaagcttgaatgaagannnnnnnnnnnnnnnnnnnnnnngagatgagctgcacacagagcaggatgccatgctggtggacatcgaagacttgaccagacatgctgaaagtcagcagaagcacatggcagagaaaatgcctgcaaagtgaaaagaagccattcaaccagagaacaagctagaatttattttgcttctgtggttgtaaaaatgctgttgnnnnnnnnnnnnnnnaaacaaacaaatatcagtgttagtcnnnnnnnnnnnnnnnnnnnnnnnnnccagtgattggcctttgcttcttaatttattttaattttttacttgtgccacttaatatcaggcattttaataaaatattgttacaaaaaaatgtacagtactgacaccannnnnnnnnnnnnnnaataaaagagagtagttttaactttatttttatttgtttagagattttaagtnnnnnnnnnnnnnnnccattgactacttttcattcttcactgtagttttaaagaagaactgtaaatgacggtgctatacaagnnnnnnnnnnnnnnnnnnnnnnntagtgaagttgtagctctccgtaatatgtatattttactcagttttcaacattttgtgaatgttgactacctgaagttcctttttagatgtgctattaacattctgttggattcagagggttccttgaaagttttatgtataaatatgaaaa

SEQ ID NO: 16574 - DNA, 718 bp, Macaca Fascicularis
  misc_feature (1)...(718): n = A,T,C or G
tggatgacagcttcaagcttctnnctttcaagcagtaacatctggagcctggagatatcctcaggaagcacatctgtaatgcactcccagcaggccatggactaatcactaaccccagtgtcaaaggggcatgggtggtcggggggggggggaattaagcttatctggatatttctttctttatttattttacatggaaacaataggattttactttttctttagtttctttgctctacttgggcacctggggctaagggaataccttagtatcttacatcacaaatttcaacagctacattatattgccttctgacacttggaagatcttgaaatttctagaaatgtatccttctcacaaagtggatactaagagaaaaactcattggttgggtttctacttctttcaaggactcaggaaagttcactttgaactgaggccaagtgagctgttaagataacccacatttaaactaaaggctaagaatttaggcttgatgggaaattgaaggtagtctgaggactgggaatccaaattgaattttgattctccttggcagtgaactattttggagaagtggtgaatgggttgttgctgctgtgagcacgtacaacctctggagccagaagcnnnnnnnnnnnnnnnnnnnnnnnnnnnnnnnnnnnnnnnnnctgaaaggaatgttgagtcacctcttcaagtttagacagcaaaccc

SEQ ID NO: 16575 - DNA, 710 bp, Macaca Fascicularis
  misc_feature (1)...(710): n = A,T,C or G
aagggtgatgccaactctgaagtcactgtgtactnnnnnnnnnnnnncaggagtctgagagaatacactctcatggagctgcttgtgatgcacatggaannnnnnnnnnnnnnnnnnnnnnnnnaccaagcagacccttgggtaccatgtctaccctacctgtaggaacnnnnnnnnnnnnnnnnnnnnttctgtcactgtggggactcaggcaaccaaatacaattctgaagttgttgataagaagatagaagagtttctttctagcttcgaggagaagatcgagaatctcactgaagaggcattcaacacccaggtcacagctctcatcaagctgaaggagtgtgnnnnnnnncaccttggggaggaggtggataggaactggaatgaagtggtgacacaacagtacctctttgaccgccttgcccacgagattgaagcacttaagtcattctcaaaatcagacctggtcaactggttcaaggctcatagagggccaggaagtaaaatgctcagcgttcatgttgttggatatgggaagtatgaactggaagaggatagtacctcttctggtgaggattcaaattcttcttgtgaagtgatgcagctaacctacctgccaacctctcnnnnnnnnnnnnnnnntatcatccccnttactgatatcagggctttcacatcaacactcaaccttctcccctaccataaaa

SEQ ID NO: 16576 - DNA, 757 bp, Macaca Fascicularis
  misc_feature (1)...(757): n = A,T,C or G
gagatcaggatgtgaagaaatgttaaggatttccaactgcggnnnnnnnnnnnnnnnnnnnnnnnnnnnnnagagcagactcnntctgggacttcgagtgccttttccagttatttcaacagcaaagttggcattcctcaggagaatgcagaccatgatgactttgatgctaatcaactattgaataagatcaatgaaccaccaaagccagcacccagacaaatttnnnnnncagttaccaaatctgctgacaatgcatttgagaaccctttctttaaagactcttttggttcatcacaagcctctgtggcttctcctcaacctgtatcttctgagatatatagggatccatttggaaatccttttgcctaaattctgaacttggtctgcagaccatccggaggaataaaaaggttattgtgggagttcatcaaccacatccaatgttaccttgagggggaagaagagggtgatgctcagaagctaaacaagacagtggccacatgaccctctattgactagccccaagtagaaagtcctgtggttttatgtttaatggtaatagctgatcatatatggcataattttatatcagcttcctactcagtcactataaacacagacttgaaatagtactttaaatgtccaaatacctaaatgtggtaaactggaggtaaatatttctaggtagttcaatttttgaaagtcatgatcagccacacaactgttttgtacatacttattttctcatgcacnt

SEQ ID NO: 16577 - DNA, 735 bp, Macaca Fascicularis
  misc_feature (1)...(735): n = A,T,C or G
aagannnnnnnnnnnctggagacattcaagcaaaaggttggacaactacttttccagaacagaaacgaaactcatgcatcagaaaaggtgactaataaaggtaccagaagaatatggctgcacaaatnnnnnnnnnnnnnnngataaaacagtttaaggaatttctggggacctacaataaacttacnnnnnnnnnnnttttggactgtgttaaagacttcacaacaagagaagtaaaacctgaagagaccacctgttcagaacattgcttacagaaatatttaaaaatgacacnnnnnnnnnnnnnnnnnnnnnnnnnntatcatattcagcagaatgaagccctggcagccaaagcaggactccttggccaaccacgatagagaagtcctgatggatgaacttttgatgaaagattgccaacagctgctttattggaaatgaggactcatctgatagaatcccctgaaannnnnnnnnnnnnnnnnnnnnnnnnnnnnnnnnctttggcaaatggaaaccactggagaaacaaaattgctatttaccaggaataatcaaactagnnnnnnnnnnnnnnnnnnnnnnnnnnnnnnnnnnnnnnnnnnnnnnnnnnnnnnnnnnnnnnnnnnnnnnnnnnnnnnnnnnnnnnnnnnnnnnnnnnnnnnnnnnnnnnnnnnnnnnnnnnnngcaacttatgtgttcaatnnnnnnnnnnnnnnacaaatttttnta

SEQ ID NO: 16578 - DNA, 660 bp, Macaca Fascicularis
  misc_feature (1)...(660): n = A,T,C or G
gcaggataggaccctccaactccaacagcagtgtcctgcagggcgcaaatcccgcaaaaagaaatccaaggccacacnnnnnnnnnnnnnggacagagtggaggacccttcgcctccaagcaaggccctttccaggacacgaagggcaaagagagaccttcctgagaggactgcaactcagcggcctgaggggcccagcctccagcaggacccagaagnnnnnnnnnnnnnnnnnnnnnggaggagaaaggggcgacaggcggcttctggtgggctttcctcatcactcccagcaacgggctctacaggagaggatgggatggtggcctaggagcgcgtgaacaaaggtaggggagaggctgccacggnnnnnnnnnnnnnnnngagctcaccatcttgcctgttcttcccccaggccaccgcagaccccggaaggtcaaggctgacaccccatccttggacccggaggggacctcagcctcttagcaggagggtctccttgctgcactcaccctttcttgtcttgccctgaatcttggggtctgaattcnnnnnnnnnnnnnnnnnnnnnnnnnnnnnnnnnnnnnnnnnnnnnnnnnnnnnacaactctcatgtttttaattgtaccccaccttccacatctttaaagctcatgtgaa

SEQ ID NO: 16579 - DNA, 745 bp, Macaca Fascicularis
  misc_feature (1)...(745): n = A,T,C or G
ggcagggctggcttggctcacattaaggagctcctggcccactcagagagcttgtcaatccgtgtcttgaggcagagacctgtnnnacggtgacccagaagtgccgctgccctcactgtcactgcctcggaagccctgaagcacttggggtggttggcaggaatgtgctgcacagagctgctctgtggcggaaacagatcctggcagcatctaacctcttgggctgtggcagggcttctgtggtgggctgccttcgggagaggcaaggagcctgttagcatattttgtttaaggccatttatgcagaactagaaaaagaaaaaaatgggtctccttccatgtctgagggggtgtcaacatctacttgtacctttgttggcaggggaaggagggagatgcagtgggtcctttggttgatgtctgagagctggcctcacctccgggtcccactcccggtcaaaggctaccccagcctccaacactgtggaaccaaagaaagcacatgtccttattggccttgacccttccctttttcagccacgttcctccctactccattcactgccttnnnnnnnnnnnnnnnnnngggnnnnnnnnnctggagtaccagccttacagccattgaccatatatgccaaaccaaaattggaatgtgtcgtctgacaggagttttatgccccttctgggtttgggaacatctgggagatgttatctggtagccagaatattaaaaattctaggaaat

SEQ ID NO: 16580 - DNA, 681 bp, Macaca Fascicularis
  misc_feature (1)...(681): n = A,T,C or G
aaaccaaacaacaaaaaacaaaaacaactgattcagagtcaaatagagtttttgagcatttgactatttttagaatcataaaattagttactaagtattttgatcaaagcttataaaataacttctggcaatttttgtaagtattgatacaatataataggatttacctattttcattttaaggagaaaaacaccactcatttttaaaaatatagtacagttactagaagtcttgnnnnnnnnnnnnnnnnnnnnnnnttgactgaacattcagaacaaggatattattttcagtgattttgtnnnnnnnnnnnnntgaaaataattttttttaaaaatcgctttgccctcacaacagttgttcagggcatggaactttaacattttaatataaactttcatccagttagcttcataacttttacattccagaattttttattttcctgtcaatgaaaacaatttttaaagatatcagtgggacaggcttgtttcttaaaaatctcatatgttcaaattaacataaatgttaaacgtcaatacactgtacatggtggtaatagactaagcaattgccaagatgtattctatttttatgaagtgtatatatatattaccttagtgtgcattttctatgtaatatcttgatggactcttttataaaattattttataaaaaaa

SEQ ID NO: 16581 - DNA, 624 bp, Macaca Fascicularis
  misc_feature (1)...(624): n = A,T,C or G
gggtcgaggtcgnnnnggaccacgtggtggcnnntnttccatcagttctgtgctcaaagatccagacagcaatccatacagcttacttgataatacagaatcagatcagactgcagacactgatgccagcgaatctcatcacagtactaaccgtnntaggcggtctcgtagacgaaggactgatgaagatgctgttcttatggatggaatgactgaatctgatacagcttcagttaatgaaaatgggctaggcaaaagatgtgattgaagagcatggtctttcagaaaaggcaataaacggcccaactagtgcttctggcgatgacatttctaagatacagcgtactccaggagaagaaaagattaataccttaaaagaagaaaacactcaagaagcagcagtcttgaatggtgtttcataaactgaagaagttcctagtttacagttcttttacattacatttacaatagtgcttgtacaagcttgccaaagatagaatatggatcgccagtctttacatcgcactttcagttcctccatttggaattcaaaaaggggagggatcctgaagaaatcatatgttaaacatactttgacacctactgtgttataaaatatatcat

SEQ ID NO: 16582 - DNA, 618 bp, Macaca Fascicularis
  misc_feature (1)...(618): n = A,T,C or G
atgttgaaaaaggtatgaaagatgggcaaaagatactannnnnnnnnnnnnnnnnnnnnnnnnnnnnnnnnnnnnnnnnnnnnnncataattgtgcttgatcagaaggatcatagtgtctttcagagacgaggccatgacttgatcatgaaaatgaaaattcagctttctgaagctctttgtggcttcaagaagacgataaaaacactggacaatcgaattcttgttattacatccaaatcaggtgaggtgataaagcacggggacctgaaatgtgtgcgtgatgaaggaatgcccatctacaaagcacccctggaaaaagggattctaatcatacaatttttagtaatcttccctgaaaaacactggctttctctggaaaagcttcctcagctggaagctttactgcctcctcgacagaaagtgaggattacagatgacatggatcaggtggagctgaaggagttttctccnnnnnnnnnnnnnnnnnnnnnnnacagggaggcctatgaggaggacgaagacgggccccgggctggagtgcagtgccagacagcatgacgtggtgcggggcagcgtggccccgccggactagcacatgatgaatgtaaagttggca

SEQ ID NO: 16583 - DNA, 741 bp, Macaca Fascicularis
  misc_feature (1)...(741): n = A,T,C or G
cagatttaagacagtagtgttgtcatctgtagnnnaaagatcctttttatcctttaaaattcagtcctaagaatgagtgcttgtcccctaacagtgtttaatggcaaggnnnnnnnnnnnnaaggacacctcctgcnnnnnnnnnnnnnnnnnnnnnagactagaattctagnnnnnnnnnnnnnnnnnnnnnnnnnnnncctgtaattcctacctccctgcaaccaactacaaccaagctctctgcatctactcccaagtacggggttcaagagagtaatggatttcatatttcttatcaccacagtaagttcccactaggcaaaatgagagggcaatgtttcctttttggtacttattactgnnnnnnnnnnnnnnnnnnnngaaaccttatttttccccaaagccagaaccagatgagtaaaggnnnnnnnnnnnnnnnctgaacatccttccagctcacccatcactgtgtgttagttcccaacatcgaatgtgtaaaacttaagttggtcctgtacactcaggctttcactatttcctttaaaatgaggatgttnnnnnnnnnnnnnnnnnnnnnnnnnnnatagttgcttgcctgatataaatgcaatattaatgcctttnnnnnnnnnnnnnnnnnnnnnnnnnnnnnnnnnnnnnnnnnnnnnnnnncttagaggaaataagaaaaatcatgtttgctctcccnngttcttccagtggtttgagacactggtt

SEQ ID NO: 16584 - DNA, 828 bp, Macaca Fascicularis
  misc_feature (1)...(828): n = A,T,C or G
gggagtggtnnacnnnnnnnnnnnnnnnnnnnngaagaccaaagagcaagtgacaaatgtgtggggagcggtggtgacgggtgtgacagcagtagcccagaagacagtggagggagcagggagcattgcagcagccactggcttcatcaaaaaggaccagttgggcaagaatgaagaaggagccccacaggaaggaattctacaagatatgcctgtggatcctgacaatgaggcttatgaaatgccttctgaggaagggtatcaagactacgaacctgaagcctaagaaatatctttgctcccagtttcttgagatctgctgacagacgttccatcttgtacaagtgctcagttccaatgtgcccagtcatgacatttctcaaagtttttacagtgtattttgaagtcttccatcagcagtgattgaagtatctgtacctgcccccattcagcatttcggtgcttccctttcactgaagtgaatacatggtagcagggtctttgtgtgctgtggattttgtggcttcaatctatgatgttaaaacaatttaaaaacacctaagtgactaccacttatttctaaatcctcactatttttttgttgctgttgttcagaagttgttagtgatttgctatcgtatattataagatttttaggtgtcttttaatgatactgtctaagaataacgatgtattgtgaaatttgttaatatatataatacttaaaaatatgtgagcatgaaactatgcacctataaatactaactatgaaattttaccgttttgtgacgtgttttattaacttgtgtttgtatataaatggtgaga

SEQ ID NO: 16585 - DNA, 217 bp, Macaca Fascicularis
  misc_feature (1)...(217): n = A,T,C or G
gaagggtgaagcagtgaagaaggaccgcagaaagaagctgacccagtccaagtttgtagggggagccgagaacagtgcccaccccagggtcatcnnngcannngagatgagacaggagtctgagcagggcccttgcggcagacacatggaggcctccctgcaggagctcaaagccagcccacgcatggtgccccgtgcagtgtacctgcccaattgt

SEQ ID NO: 16586 - DNA, 851 bp, Macaca Fascicularis
  misc_feature (1)...(851): n = A,T,C or G
agtcagtnnnnnnnnnnnnnnnnngtattcctcttggattgtgtagactcaacatgagacatcctttctgctttggagggcaccagaggcctttctctttgaaaaatttcttttttgtctgttgacaaaaacaaaaatcttttttcaaatttagtgctggtgtaaaggtagggctgagtgattannnnagccacagggtggctgagcaggaactttagaagaaacttctgagctttcctgtccattcccagcatccagctcctattccagtgcctcttccctgcagggcagggacaccttgggaaagcgaggaggtggggcgggttgggccgtgtgtcccaggtttcgcaggggtcggagttatgctcccgcttgaatccggacgtgaatctggtaaaaatgtcaagtacctgtggaaatccctgattctataccctcttccttctttcttcaaggcagaggaatagtatttttaaaggttattttgttttagttttaaatagcagaacacaagctgcatttttatttattttgcataagaaaggtaaatcttcttacaaaaaaagtatagagttggaagctcggggaaaacttactgaaatacacaaatgcttctctctctgtaatgtgcaatatgctttgcaacttagatgatattttatgtttaatctgtaaataagaaatgtatttaaattaaaagggatctttttgtaaaaggaccaaatgttcttttataaatgtaataaggaatatcttgctctttaaaatttattaggatttttatgagtaatttttattaaaagatttctttttttgagctgtaaaaaaaaaaaaaaaaaaaaaaaaaaagg

SEQ ID NO: 16587 - DNA, 728 bp, Macaca Fascicularis
  misc_feature (1)...(728): n = A,T,C or G
ggcccctcaagtcaacagcacaaggaaacactgcaacaatcccaggccagcacacactattaccgctggactcaccattgaacatttccatttctgaacgcagggtttnnnnnnnnnnnnnnnnnnnnnnnnnnnnnnnnnnnnnnnnnnnnnncagctagggacagatggaagagaggtcgaaggcaggtcagcaagaccaggggtggaggaggagggaagtgaggggctctgggctatgtgaatcttagggcggaagcaagcatgcacctccaatcctctcccaagcccatctacctaagaagtactttgcgttcttctccacaaactctaacttctggtggannnnnnnnnnnnnnnnnnnnnnnnnttgaggaggagtccaccgttcagggagaggcactgtcttagccctagagacaaaagactgttggccagagagggctggaacgaggggatggcccaagtacccgtgannnnnnnntgatctacattctccacagggcacaccgagcccagcctgagctacacaaagaaaagtcttctctggattcagaggtctaaatgcnnnnnnnnnnnnnnnnnnncagattgtcatgtactggggcgctttaaagacatggatatcaaaaccacaaggagnnnnnnnnnnnnacttaaaatgacattgatattatctaccagaattatctatgtcaaattgattatacatccctttatttctttct

SEQ ID NO: 16588 - DNA, 727 bp, Macaca Fascicularis
  misc_feature (1)...(727): n = A,T,C or G
aggtagaagggatgttaaagacttggtttccacatatagctgcccagaagtcgtcatnnngtggtggcaagcatcagctgaccaagcattttccaagccaccacagtgattcagccgcttcctctcctgcatctcctatggaaaagatggaccagacacagctaggacatctagctttaaaaccaaagcagccttggcacctcacagaatgnnnnnnnnnnnnnnnnnnctggatccacaccactccaatttgcaacccccctctcagctccccaggtactatctcctttagccatggtcctttaggcactggaaccggtattggcgtcattcttttcctacagcatggagtgcaacccttcacccactctgccccagccactccagtcccacctactacagcatctcctgtcatccctggtgaacctatgaaactatctggagaggggcctcgttgctacagtttgccagtaactctgccatcagactggagctataccctatcccctcccagtctacccaccttggccagggagatgaccaaaggacaccgggagcagnnnnnnnnnnnnnnnnnnnnnnnnnnnnnngctcatcttctcaacctctagcctggggcatacagctgtccactgtgatttctaatttgtgtaaatattcatgtatatatgtatttttacttttaatgtgtgcatttgtgttgagggaagacaaatccttctgataa

SEQ ID NO: 16589 - DNA, 767 bp, Macaca Fascicularis
  misc_feature (1)...(767): n = A,T,C or G
caaagcccatgtctgttttagttaacaaggaaaacacagtgatttaaatgctgcacataaactnnnnnnnnnnnnatgtgggcattatgctcccagtggtccacagtatttacatataaaaatgtaagaaatgtctcatagtccaaagcactgtggtcagggtagcaatcaatacctatatataataatgatctgtttagtcaggtaaatggaaagcattacagtcagtcatccaaannnnnnnnnnnnnnnntgatatctgttgtgtcaatatcttctaattccaaattatccaaatctacttctagttcgagtaaactcttttcttctttgttggctgtgtgggaagccacaataactggaataagaaaaacaagtttcccatccagttcctgttgagctgtagatcttgagggctgaaagccttttgcctcttccatgacatttctctcttcatttggcgtgacaagtgggtactgtttggctggccacagatcagcatgtgtttccttcacccattcttccacaacaaaggcttcttttaatccagggaataggttttcatactctgttggatcagcaagggattctgctgctttctgattgacttttgagagattctctctccagagtttcactacccnnnnnnnnngactgggtaagtaagttcgggccaggaaggcagcttctggcagccgtccagttctaatcaagagctctaggcaggcatcaacccttgcctgtaaaaagtagctcatgaatgccac

SEQ ID NO: 16590 - DNA, 731 bp, Macaca Fascicularis
  misc_feature (1)...(731): n = A,T,C or G
cacattttaaatagtgcttcctgacaatataccagctggctcttctctaataagggcaataaggatagcaattcacattcaggggattagtttcaccataccacaacatttgggggatggcaaaaacggggtctaaggaaaagggagggtacttaagggacagaggaggggaagacccttgcatttgcagaagtcattactatttctcagtagtggtcatattnnnnnnnnnnnnnnncccacgatgggattagagaaagaaaggagcatttcctatcttagacacctgggtgggtggctgcctgcaaggagaaggaggtttagggacacatttcacaagaaaccagcacccacattgnnnnnnnnnnnnnnnctcaattttcagccaccacttacacctttctgtgccggctgcaagaggaagaagaaaactaagcgtataacgttgtttcgcaaggagagattcaaactcatagtccaaagaatctatgttaggttagtttnnnnnnnnnnnnnnnnnaattcagagacattaagtttttctagcttcctctcatctcgttctgggatttgccctgcatcaacacagtcctctccccaaacaatcccaccaaaacaggtcctcattaacaacttcatgtttcactgccgcatagagtggctggcttcccagnnngctttaacatgacagnnnaccaggtgatgcctggacagctcagtcagaccacagg

SEQ ID NO: 16591 - DNA, 760 bp, Macaca Fascicularis
  misc_feature (1)...(760): n = A,T,C or G
ggagcagagaggagaaatgnnnnnnnnnnnnnnnnnnnaagagnnnactgaccgactggggagggaacatggaggtgttaggaaggtggagcaacaatgtacctcccctcctgtcatgccctgatatcttggtggctctctgccactgcccaccgcctcttctccatctgagaatcagagagaggcttagataatctagaggcatggactgctagagtccccagggatctggnnnnnnnnnnnnnnnngcttcactttgtaaaccaggtgggggcatctcacagcctgacttcctttccccaggccagggttgctgggatacctgcccctcctgagaggaccccctccccactgtcaggctctccattcccacgagtggggaggggtgggttttgggggattgttgtcccttgtgtctatggactagagatagggcgggggagctggggaagggtgcaggcgggaagagtgggctgtctttcccagggtgatgcaagcatgccgcagccctggaggctgggaatgtggaggctctgtgagccctgcagtcctcagaatcagggccagggatgcagaagattgagaggatatggagatggacagggggcaggagacccttaggatagactgtgggacccaagcaggaacaggtgtccacaaggactcaggatggcatcagttagctcagaagccacctgtaagaccccgtgtttccatctctggaatctctgttttatgctaaatggatttaggaagactg

SEQ ID NO: 16592 - DNA, 775 bp, Macaca Fascicularis
  misc_feature (1)...(775): n = A,T,C or G
gaggtggcagctatgtnnnngaggtggcggcggcggcggcggccgtggcagctatgnggccggtggtggcagctacgcggccggaggtggcagctatnnnnccggaggcggcggcggcggccatggcagctacggctccggaagcagcagtgggggctacagaggcggctctggaggaggcggcggcggcagctccggcggccggggctctggcggcgggagctcaggaggctccataggcggccggggatccagctctgggggtgtcaagtcctctggtggcagnnnnnnnnnnnnnnnnnnnnnnnnnnnttactccggagtaaccagataaagagataccctctgtttcgttagctctagttctccccagcatcactaacaaacatgcttggcaagaccaaggtcaatttgtcccagccttactggagaaaagagctatggttagttacactagctcatcctattcccccagctctttcttttctgctgtctcccaatgaagttttcagatcagtggcactctcagtcccctggctatgaccctgctttgtgctttccctnnnnnnnnnnnnnnnnnnnnnnnnnnnncatgtgacatttcaaagcaccttcttaagccagnnnnnnnnnnnnnnnnnnnnnnnnnnnnnnnnnnnnnnnnnnnnnnnnnnnnnnnnnnnnnnnnttggttttgtacataaggtgttagcaagttgtttttcttttgtggagaggtcttaaactccccgtttccttgttttgctgcaataaa

SEQ ID NO: 16593 - DNA, 746 bp, Macaca Fascicularis
  misc_feature (1)...(746): n = A,T,C or G
gaaagcatgaaactgnnnnacagcatttgtaataacaaatggtttacagaaacttcaatcattctctttcttaacaagannnnnnnnnntgaggaaaaaataaagaggagtccgttaactatctgttatccagaatacacaggttccaatacnnnnnnnnnnnnnnnnnnntatattcaatnnnnnnnnnnnnnnntgaacagaagaaaagataccaaggagatctacactcacnnnnnnnnnnnnnnnnnnnnnnnnnnnnngcagtttgtttttgatgctgttacagatgtcatcattaaaaacaacttaaaggaatgtggactttattgaaaagcatggatgttagtgaaagttactacagtgtggagtgttgagaccagacaccttttgctgtcttacggggcannnnnnnnnnnnnnnnnnnnnnnggaatggcagcagcatgcagaatcttagcactctttagcacaatcttctatattagggaacttttaattgacatgagatgctaaagtcagacattggaattggaagnnnnnnnnnnnnnnnnnngatcatcaagacatcacttggatttcttaatcttaaatgcttatggaagatgtgaagttgannnnnnnnnnnnnngaacttcaatatgtagcttactctttttttcccccttcttaacaannnnnnnnnnnnnnntttttagggttttttcatcaagagaagaataactttactaaattttatttctttat

SEQ ID NO: 16594 - DNA, 688 bp, Macaca Fascicularis
  misc_feature (1)...(688): n = A,T,C or G
agttcagaagatcgtgggccgtggcccctccctttgtatccagtactaggagagtactcattggacagctgtgatttgggactgctttccagtccttgctggcggctaccgggagtctactggcaaaacggactctttcctggagtccagagcaccttggaaccaagtacagcgaagtcccctgagttcggttggccggggacacacaagcagcaagaggcatccgtggaagaggtggggcagggagaggaacccgacagactcacgctccagcagctttcctggtgcagtcctccgcattcctggaacagacagcaggacaccgacgtctctgacagcgggtgccttttggaaggccgccatcctcctgccctccatctgtggcgccaccccccggggggtttctcagactgcctggagcggattcttcgcgttggttttgccgcgttctctgtactctgggcgtgctgcctacgaatctgtggagctaaacagccttagatatcagcaggaggctttttggattctcctccttgaaaagatgctcagttaccaagcgtctccacctagaaaataaaaatacattaagatgggctttcattgnnnnnngtccgtttttgaattctcctttttcctgatgtttcnnnnngntttcgtgtggcttattactttcagtttccttgtcttt

SEQ ID NO: 16595 - DNA, 216 bp, Macaca Fascicularis
gccagcactaatgagcctattgtcctggaggattgagcacctgtgggggagggaggtgggctaagaggtagagggtggatgcccagggcacccaaacctcccttccctttcgtgtcaaagggagtgaggagtaaggaagagagcaagtgagtgtgcgtccctggaggggttgggcgccctctggtgttaacaacctcgagacttgtctcatgcctc

SEQ ID NO: 16596 - DNA, 673 bp, Macaca Fascicularis
cacacaacaattaaggtagtcatccgtagactcgaaatgagacgacatggggatgagatagatccttctagttagcctagtactgctgtattggcctgtgtgtacatggggtccttcagatgaggccttacaagtcaagctggctgtgccatgtttgtagatggggcagaggaatctagaacaatggaaaacttagctatttatattaggtacagctattaaaacaaggcaggaatgaggctagactcttaacttccctacggcatacttttctagctacctctgccttgtgtctggcacctacatcttgatgattgttctcttactcgttctggattttttttttttttttttaaataaatacagaaagcatcttgatttcttgtttgtgaggggtgatgccctgagatttagcttcaggaatatgacgtggttcatgtttcccatatttcccaagtagggaaatacacgattctctaacactggttaaaaatgcaaattcaagatttggaaaggctggtataatgaaataatgagccgtatcagcatgtgcaaatcttgtttgaaggattttattttctccctttagacctttggtacatttagaatcttgaaagtttctagatctctaacatgaaaactaaggtggctattttcaggttgctttcagctc

SEQ ID NO: 16597 - DNA, 723 bp, Macaca Fascicularis
  misc_feature (1)...(723): n = A,T,C or G
tatcactttaactcaggaggcagaggttgcagtgagctgagatcacaccactgcattccagcttgggtgataaaataaaatagtcatggatcttgttaaaatgcagattcctcagattcagtaatgagagctcagactctgggaacagggcccaggaatctgtgtggnnnnnnnnnnnnnnnnnnnnnnnnnnnngaagatttgagaaccattgttctaaatgctgcttccatttgacaatgatagttttcaaaaagagaagcannnnnnnnnnnnnnnnnnnnnnnnnnnnnnnnntgaaatctgtttgttgacttattaggactttgaattatttctttattnnnnnnnnnnnnnnnngtatatattattattcaagaaaaatacaatcaggattttaaacgtgtaaatacaaattttgtataactttttatgacttcagtgaaattttcaggtagtctgagtaatagattgttttgccacttagaatagcatttaccacttagtattttaaaaaattattgttggagtatttattgtcagttttgttcacttgttatctaatacgaaattgtaaaactttcagagagnnnnnnnnnnnnctctttggaaaatagtttgcaacatatttaaaaggtacttgatgccaaactgactttatacaatgattgtatttgtgacttttaaaaataattattttattgtgtaattgatttataaata

SEQ ID NO: 16598 - DNA, 867 bp, Macaca Fascicularis
  misc_feature (1)...(867): n = A,T,C or G
gtgaatattagttaccactgttantnnntcagctgtgatatgtggctgatgttggggagacggacctcagtgtgttttatattgtctggtgttaagatgataaattactttgtgattacaagcaaattttctatttgacaaagcccttggtggagtccaaatgatttttctgtaccatattgttctcttacacatacgtaggttaggaaaataggcacactttcaaagagaagcataggggcttttactgccttcgaaatcacttttaataagagttgtatgataaatcattaaaaatgcgagtgtaaatatttttttatgtctatcagggtttttatttgaaagtgtgctcttaccatttccttgtttgagtaagagagtgaaatggttctgagtgtttaggaaggatttgcttgcttgcggcagaggttctaggaaaagcaagcgcctcccaaatatcttgagaacactggcagccttatggccactaaatccacactttctttaaagagatgcagatgaattacttttctgttaatatatagaaaaatacacatgagaacatgcagatacatgtaaatatctacatacagggatattcgtatgcgtggttgtgaaacccatatacaagtggatttggccatctttgggcagtgaggtcaaatgtgaatatgtgtaaaagtgcttttcaaaagtgtgcattactatgagaaaacatcaaaactgctgtagttttccatttctactgtatttcagttgcaacctatttttaataaactttgtatgtatttaagtgtatttgctattnnnnnnnnnnnnnnnncaaagtttatatttgtaacatcagccttcctcgcccgtctcttt

SEQ ID NO: 16599 - DNA, 736 bp, Macaca Fascicularis
  misc_feature (1)...(736): n = A,T,C or G
acagcgtgcggaggagttgtctccccaacnnnnnagcagtcgccctggccctgggagagctgggctaccgggcagtgggcgtgaggctggacannnnnnnnnnnnnnnnnnnnnnccaggagatccgcaaggtgttccgagctgctgcagcccaggcagtgaggtgaatgtcattggcattggcaccagcgtggtcacctgcccccaacagccttccctgggctgtgtctataagctggtggccgtggggggnnnnnnnnnnnnnnnnnnnnnnnnnnnnnnnnnnnnnnnnncgttacctgggagcaaggctgctttccggctcctgggctctgacgggtctttacttatgnnnnnnnnnnnnnnnnnagaggagccagcgccacaggctgggcaggagctgagggtgtggcctccaggggcccaggagccctgcaccgtgaggccagcnnnnnnnnnnnnnnnnnnnnngctnnnnnnnnnnnnnggacagctatgtgagccgctcccatccctggcagagtctagagccttggtccagctgtccctgagccaactcagccctgagcacaggcggctgcagagnnnnnnnnnnnnnnnnnnnnnnnnntctgagaggctgcaggccctggtgaacagtctgcatgcaagggcgtccccctgagactgccagctataggccccagtggacagtctgcgtgcaggggcgtcccctgagactcggagcggggctgcc

SEQ ID NO: 16600 - DNA, 642 bp, Macaca Fascicularis
  misc_feature (1)...(642): n = A,T,C or G
ctgaccacagcctggctggcagctgctctgtggaggacctccaggnnngagactgtgggctttgttttccgagggtcttcaataggccccctagctatacctggaagtttcagaacccactttgggggcctcctgcctgggcaggctcttcacaagtgtggccctctttggagtcaaccctccttcctgaccccctccccctagcccagccccagtcactgtcagggtcgggccagcccctgcactgcctcgcggagtggcctgggctaggtcactccacctctctgtgcctcagtttccccccttgagtcccctagggcctggaagggtgggaggtatgtctagggggcagtgtctcttccagggggaaattctcagctcttgggaacccccttgctcccaggggaggggaaacctttttcattcaacattgtagggggcaagctttggtgcgccccctgctgaggagctgccccaggaggggaccagaggggatgctgtgtcgctgcctgggatcttggggttggcctttgcatgggaggcaggtgggacttggatcagtaagtctggtgcccgcctccctgtctgagagaggaggcaggagccccagggccggctcgtgtttgtacattgcacagaaac

SEQ ID NO: 16601 - DNA, 752 bp, Macaca Fascicularis
  misc_feature (1)...(752): n = A,T,C or G
cttcatgaggcagatctggagttgcagaggaagcgggagtacattgaggagctggagccacccactgacagcagcacaacccgacggatcgaggagctgcagcataacctgcagaagaaggacgcggacttgcgggccatggaggagcgataccgcnnnnnnnnnnnnnnnnnnnnnnnnnnnnnnnnnnnnnnggaacccaagcagcggccggctgcagggggacctccagaactccgttccctaaggacacagctccgagaacgcgatgtccgcatccggcacctggagatggactttgagaaaagccgaagtcagagggagcaggaagaaaagctgctcatcagtgcctggtatnnnnnnnnnnnnnnnnnnnnnnnnnnnnnnggggnnnnnnnnnnnnntnnncatgcccagtcattnatggcacagcagaggnnngcaaccgatgctcgccgtggacccctgggacgcctggcatctctaaaccttcgccccactgacaagcactgaccnnnnnnnnnnnnnnnnnnnnnnnnnnnnnnnnctggcttcctccaactcacatggcgcccagcannnnnnnnnnnnnnnnnnnncaagaactttgaggccaagatctctgccctaccctctcccagattggtggggagggagagtgggaggtaggtataggcctgttctttttagcaatgtgattcttatcgttgattctctctctggagttcatgtgctgcctggggagactctga

SEQ ID NO: 16602 - DNA, 215 bp, Macaca Fascicularis
actcaccagaccgtttgcttttttgaaatggagaaagccgtgcgtgcgcgtgttatttatttaagtgagcttgtgtgtgcaggcctgggagcacactttgcacagccacagcgtttttggtttgggtgtacagtcttgtgtgcctggcgagaagaatattttatatttttttaagtcatttcatgtttatgtctggggaaggggagttcagtatc

SEQ ID NO: 16603 - DNA, 1419 bp, Macaca Fascicularis
  misc_feature (1)...(1419): n = A,T,C or G
aggtggccccagcctgcccttcctcccnnnnnnnnnntggagattnnnnnnnnnnnnnnnnnnnnnnnnnnnnnnnnnnnnnnnnnnnnnccttgaggtcacagatgttgaagttggagtctcactccttcccnnnnnnncaccctagnnnnnnnnnnnnnnnnnnnnnnnnnnnnnnnnnnnnnnnnnnnnnnnnnnnnnnnnnnnnnnnnnnnnnnnnnnnnnnnnnnnnnnnnnnnnnnnnnntgtttgtgctgtaagaaggagctgatgatactggccacatgctggggttcgctcatgtggacacagtgattgcctgggacttccacaaacnnnnnnnnnnnnnnnaaggagagggtgtgtggtgaggtgtggccagaggagcctagggagctccataggccttggggtcagggccctcccacagccttcaggctccctgcagggcaggagcacctccaacggtgagtttcccgcacactcaatgccttggagccggttcagtccatagcaccccagaaggtgtgtgagccctggggacttggaggcctcccagctgagttgtgaagttgcatggcagggacagggcggggccgaggccagggttgctgtgattgtattagaggaagtccctttgagaaaaaataatcagatggggacctgagcagcctgcagacttgtgcctgnnnnnnnnnnnnnnnnnnggaaggccctgcctgccttggctctgaccaggtgaccggccagccacaggtgcgcttcctccctttgtgacaacaccaggaaacctgcagaggccccagggtcaggtgtttgagggtaagtgaccatgaatcaccaggtgctcccaggaacccgggcacagccacccccacctacagccagcacacccactggcgcgatgggtgcggagggaagaggcagccagatgttctgctgtggtttgggagcctataaaatgtgagactaggctgggcacggtggctcctgtctgcaaaagcagcacttcgggaggccaagtcgggcagatcgcctgaggtcaggagtttgnnnnnnnnnnnnnnnnnnnnnnnnnnnnnnnnnnnnnnnnnnnnnnnnnnnnnnnnnnnnnnnnnnnnnnnnnnnnnnnnnnnnnnnnnnnnnnnnnnnnnnnnnnnnnnnnnnnnnnnnnnnnnnnnnnnnnnnnnnnnnnnnnnnnnnnnnnnnnnnnnnnnnnnnnnnnnnnnncaacagagnnnnnnnnnatgactccatctcaaaaaaaaaaaaaaaaaggactattagctgggcgtgatggcgtgcacctgtagtcccagctactcaggaggctgaggtgggaggatcacttgagccctggagtttgaggctgcagtgagctatgattgagccactgcagtccagcctgagcaacggaat

SEQ ID NO: 16604 - DNA, 473 bp, Macaca Fascicularis
  misc_feature (1)...(473): n = A,T,C or G
cannnnnnnnnnnnnnnnnnnnnnnnnnnnnnnnnnnnnnnnnnnnnnnnnnnnnnnnnnnnnnnnnnnnnnnnnnnnnnnnnnnnnnnnnnnnnnnnnnnnnnnnnnnnnnnnnnnnnnnnnngggtttcaccgtgttagccaggatggtctcgatctcctgacctcgtgatccgcccgtctcggcctcccaaagtgctgggattacaggcttgagccaccgcgcccggcctctttgatggtttctaaagtgccttatctgcaaacaatttcttttctccttcaggaactgtgaatgactagcagaaggagctcagtaaactagacgtccagggttgcttggtttactggtttataagaaatctgaaagcacctctgaaattccttttattaactcacctctcagttgaaagatttcatttttgaagggtcaagaccatgaactgaaaaaaaaggttggcctttttgcggga

SEQ ID NO: 16605 - DNA, 753 bp, Macaca Fascicularis
  misc_feature (1)...(753): n = A,T,C or G
agcnnnnnnnnnnnnnnnnnnnnnnngcagtttgcagattccaagggcgatgtggggctgggcttggtgaaggaggggctggtcatggtggaggtgcgcaaggagnnnnnnnnnnnnnaagtgatcacagnnnnnnnnnannnnnaggagtcagccaagagcgccaggctgnnnnnnnnnnnnnnnngagactttcgagctgannnnnnnnnnnnnnnnnnnnnnnnnnnnnnnngaggggatcgggtttggcccccagcaccgctcacgccattccctcttcctctgccgggnnnnnnttttcaactccaaaccccagacaggggttgtagattnnatccagctttgcttcagtgtgtggaaatgtcttgtagggtggcattggggctggttggggggtggaccccaaggctttctggggcagacccttgtcctctgtgatgatgggcactgctatccacagtctctcccagttggttttatttggaggtttgtggttttttaaaaagagtcctcaaatcaggaaggaacatcaaagactatgtcctagtggagggagtaatcctaacacccaggccgactgccagctggcacctgcctctatcctagactgccctcctcccagctctctgtccaactgttgattatgtgatttttctgatacatccattctaaaatgccagtgtgttcacatctttgccctggccagcccattctgtatttaaagcttttgaggcccaataaaatagtacg

SEQ ID NO: 16606 - DNA, 755 bp, Macaca Fascicularis
  misc_feature (1)...(755): n = A,T,C or G
aaaaacancacaaagttctggaacaagccacacagtccnnnnnnggttcgctgagttctannnnnnnnnnnctaccagattatgcacaagacctaaatgtcattgaagaagtgattcgaatgatgttagagatcatcaactcctgcctgacaaattcccttcaccacaacccaaacttggtatacgccctgctctacaaacgcgatctcttcgaacaatttcgaactcnnnnnnnnnnnnnnnnnataatgcaaaatattnnnnnnnnnnnnnnnnnnnttagctcaaggttgctgcaatctgganctgagctgtcagtggnnnnnnnnnnnnnnnnnnnnnnnnnnnnnnnnnnngcgctgcccaaagacagactgaagaaatttccagaattgaaattcaaatatgtggaagaggagcagcctgaggagttttttatcccctacgtctggtctcttgtctacaactcagcagtcggcctgtactggaacccacaggacatccagctgttcaccatggattccgactgagggcaggatgcgctcccaaccggacccctccagccaagcagcccttcaagttgttttatttctgggtaacagaagtagacagacagattacttggtgtatcttctgttaaagaggattgcacaagtgtgttttcctcacacactttgatttggagaatnnnnnnnnnnnnnnaatagatcactcagcatagatagtagtgcaaaaaggggaggaaatacacaaca

SEQ ID NO: 16607 - DNA, 664 bp, Macaca Fascicularis
gcatatttagctgaaatttgaagcgtctttttctttctttcttttttcttttttttgttttgttttttgttattgatattaaacagtgtaatctttgcaagcgtatattgaagattattctggagcatttattgccttaccagaaatgttagtaggaaatgttctttagagtagaaagatagacttgagtttctatacttttaataagagctctttgttcctggcggggaggggggtagggggtgaattttactttcatctcaagttattaaaaacccacaactgaggtaaattttatttcaaggatcagcagttttagaatttcagatagtacttgctcagaagtacatgctactcaagatattaagcgataacaagatctgtagatctgctattgaatcagaatctgtgtacttgaacaaatgtatgaatctcaaatatctcaaagcaaaagaaaaagtgttctagagtgttgttgctttttaaaaaaagcactgaagttagaccaaggtatgcagttttgttctaacagacatttaggttaattgtaaagataaggaatgcattatgggtcaaaaatcaaacattcctctcatgttatgtatattttgttcctgttatattggctttattttcaaaattgtagtttgtagtattagtttcc

SEQ ID NO: 16608 - DNA, 554 bp, Macaca Fascicularis
tccctctccctctctccccaccggctttgcctccggccctaacctcagggacctggctccgcctcctagaccccaacctcgccccaggccctgcctcctgggcctcacccacaacctcaggccctgctcctgattcctgtccccttcccactgtcccgcagtaagctttcccgccaaagcgccacggagatcccgctgcccatgctgcctctggcggacaccgagaagctgatccgcgagaaagacgaagagctgcgccgcatgcaagagatgctagagaagatgcaggcccagatgcagcagagccaggcccagggcgagcagtcagacaccctttgaggccacgccccgcccggccttacctcggctccgccttcagtcggcctcttgtccaatccccgcgccccacactgcccagcgccccctggaaccccgtgggtgccgccctcgcgcgggctagggggaggttctaccagcccgggcccgtagccccgccccggcgctggtcccgcccacccagacaccgcccacttcccggccggagcctgcggccc

SEQ ID NO: 16609 - DNA, 1085 bp, Macaca Fascicularis
  misc_feature (1)...(1085): n = A,T,C or G
tgtcgagcaaaaaggcaaagaccaagaccaccaagaagcgcnnncagcgcgcaacatccaatgtgtttgccatgtttgaccagtcacagnnncaggagttcaaagaggccttcaacatgattgatcagaatagagatggtttcatcgacaaggaagatttgcatgatatgcttgcttctctagggaagaatcccactgatgcataccttgatgccatgatgaatgaggcaccagggcccatcaatttcaccatgttcctcaccatgtttggtgagaagttaaatggcacagannnnnnnnnnnnnnnnngaaatgcttttgcttgctttgatgaagaagcaacaggcaccattcaggaagattaccnnnnnnnnnnnntgacaaccatgggggatcggtttacggatgaggaagtggatgagctgtacagagaagcacctattgacaaaaaggggaattnnnnnnnnnnnnnnnnnnnnnnnnnnnnnnnnnncggagcaaaagacaaagatgactgaaagaactttagctaaaaccttccaattacattgtcttactctgttttatttctcagacacttcccccaccctcatagaacctgttgcatgcagcttagtttcacagctttgcctctttttgatgtatttattccagacctttctgccacttagcacttgtataatcagactggaaatggggatgagggtgtaaattgtattgaaaaagagatcgcgaataaaaatcaagaaatgtgaaagcccagaaaaatatattcgtatttctggttttgctggatttttacatttttatataataaaaatgttattttgaaataaagattatgctgactcaaatgcagtgtaatggcaagttaaacaaatgagtgataggtgcgggtagtccttttttnnnnnnnnnnnnnnnnnnnnnnnnnnnnnnnnnnnnnnnnnnnnnttttcacatgtatgggacagtgttcttcagaacttttaagtaccctttaacattattatgcagtgcaaactagttatgccattgtttctttcatgcttctagtcagatgtttattaaatgataaatataaa

SEQ ID NO: 16610 - DNA, 659 bp, Macaca Fascicularis
agccgggcatggtgacgggcacctgtattctcagctactccggaggctgaggcaggagaatcacttgaactctggaggtggaggttgcagtgagccaaaatcacatcactacagcctgtgttacagagcaagactccgtctcaaaaaaaaaaaagattaaatcatcacttcataaatatatctgcactcccatgtttgtggcagtgttattctcgatagccaagatgtggaaacaacctaaatgcccatcaatggacaaataaagaaaagaaaatatggcatatgcatgccatggaatagtattcatccttggaaaagagggagttcttgccgtttgccgcaacatagatggacctggagaacatgctaagtgaaataagccagacacaaggagaaatactgcatgatctcatatgtggaatatttaatttttttttaaaaaggagctcaagtacacaaacagtgcttaccatagattggagaagaggaaatggggagatgtaggccaaggatacaaaatagcagataagacgaacaagcctagagatagggctaaagttaatacaattgtattaggatttttgttaagtaagtagattttagctgctcttatcacatgaaaaactgtgagatgataatgttaatctgcttcactatag

SEQ ID NO: 16611 - DNA, 776 bp, Macaca Fascicularis
  misc_feature (1)...(776): n = A,T,C or G
ccccagcagtgggtagagggtnnnnnnnnnngncagacgaccagtgagtgaggatggagtgtggccccatttggccctactacccaggtgttcgtagacccgctgaggaggaagagcctgggccggctattacgactacaacactgatttcttccaggagaaggtgggcccccacccactagttgtcaacatgtactttgctactggcttcagtggtcacgggctccagcaggcccctggcgttgggcgagnnnnnnnnnngatgatannnnnnnnnnnnnnnnnnnnnnnnnnnnnnnnnnnnnnnctcttcaaccgcttttacttgggagagaagacccaggagaacaacatcatgtgagcatgtgtgctctgcactggctccactggcttgcatcnnnnnnnnnnnnnnnnnnnnnnnnngtgctccagtcttccccagcactgtgctgggccttctcccctccccagtgtcctctccnnnnnnnnnnnnnnnnnnnnnnnncatggctgggcaggcacaggcactgaggcccaggccaacagcaagcgatgagcagaatcctaggactgatctgtagcccatgctggtgtcccccaccagggcaatccagctggaggcctgagcaccctggnnnnnnnnnggctccantctggcaatgaccaggaaagnnnnnnnnngaccctcttagcagacagcccaggcatgggagcattctggggnnnncnnnnnnnnnnntcttgattgtctgtttatcctatccatcaatcaatac

SEQ ID NO: 16612 - DNA, 1152 bp, Macaca Fascicularis
  misc_feature (1)...(1152): n = A,T,C or G
agcaagagatgcacaggagcganntagggcagnnnngcagaggtanntgttctacnnnnnnnnnnnnnnnnnnnnnnnnnnnnnnnnnnnnnnnnnnnnnnnnnnnnnnnnnnnnnnnnnnnnnnnnnnggaggagatgcaacagcacaacatgnnnnnnnnnnnnnnnnannnnnnnnnnnnnnnnnnnnnnnnnnnnnnnnngtgtcgtgccacactcatgtacacttatgtcttcgctttctacctcaaaaagaataaccagtccattatctttgagaataaccaagcagatctagagaatgccacagaggtgctctcgggctaccttgaacgagatatttcccaagattctctgcaggatataaagcagaaagtacaagacaagtnnnnnnnnnnnnnnnnnnnnnnnnnnnnnnnnttacagcatgtgcatgaaggctatgaaaaagatctgtgggagtacattgaggactgagaatggccctgcataaaatgaactctgaaaactttaccatctagagtgctcatgcaattaaaacaaaacaaacacaaacaaggaggcactaagcctattctgacaccactggtctgtagtaccagaattgttttgttaacggaaagtttaagtaaattatattgtaataaaaaaggtagataaaccattgtacaacagtattctaggccgccaacaaaagtgtgacagacacactaaaagccctccaactttaacttgtaacgtagcttcattctcaaagctgactccttttttctttttctttttccttttcctgagtgtagtacagttaaaatttcaaacagctccttgacactgcttttcatgttcaaaccagccattttgttgtactttggtaaaggacctcttccccttcctcccctacacatacagatacacccacacacagactgactctctttctctcataccccaaggtcatgagtgaatgatgcttagttccttgtaaagaaaatcttgggatggggaaggggtaggcagcaagaggattcaacaaacaaaaaacataaaaactttgtatatgacttttaaaacaagaggacaacacagtatttttcaaaattgtatatagcgcatatgcatggacaaagcaagcgtggcacgtgtttgcataa

SEQ ID NO: 16613 - DNA, 1470 bp, Macaca Fascicularis
  misc_feature (1)...(1470): n = A,T,C or G
agnnnnnnnnnnnntatttacagattttaaggttgttaatgttctggcagtgtgtaacatgccatttgaaatccgtttgccagaattcacaaagaacaatannnnnnnnnnnnnnnnnnnnnnnnnnnnnnnnnnnnnnnnnnnnnnnnnnnnnnnnnnnnnnngagctacgttacagattttttcgacaggaagtatcacagtaacagggcccaatgtannnnnnnnnnnnnnnnnnnnnnnnnnnnnnnnnnnnnnnnnnnnnnnnnncaggaaagaaattttataattcaccacttaattggttagaatctctannnnnnnnnnnnnnnnnnnnnnnnnnnnnnnnnnnnnnnnnnnnnnnnnnnnnnnnnnnnnnnnnnnnnnnnnnnnnnnnnnnnnnntcacggctacagtgtaagctccagtccctttggattttattccaaccttgctgtaatataaaaggaagtttacaagacatgacattgctgcttttacaaaaggacattctatttattttcgcagtaattctcatgtccccatnnnnnnnnnnnncacagtgtgcactaccttagattgttttattgttgtcattgttatttttttccattttgagctaatgtgttttatttgtgaatagtcttttacatnnnnnnnnnnnnnnnnnnngcaccaaagannnnnnnaaagttatctttttcaattgaatgtgcacaaataaaagtttggannnnnnnnnnnnnnnnnnnnnnnnnntaacttttattccccattttctattttaacaaaaattgtattcatactttttttaaaaaatctatnnnnnnnnnnnnnnnnnnntaaagtgtgttggcttctttttgaagtgtattttgtgtgtgtgtgtatatatatacatatatatgcgcnnnnnnnnnnnnnnnnnnnnnnnnnnnnnnnnnnnnnnnnnnnaataggaatttttttttcttgcagattagaaataaaaatgtgtatataaactctagagaaccagactagaagtttatagataaaggataatgttttatgttgctaatttaatatgatagaaaatgttaaataacttgtaaacgttaagaaattgtagttttaagaagagaaacctcttacccactaggtggccatgagaaagaagctgtgatgaatggtgcctcatttggatctttgnnnnnnnnnnnnnnnnnnncacctgtagttgtagagaagtgattgaggttcttgactttaatcttgggttggtgcccaagcctatactaagagtcttgtcagaagttggtaacatggagatgttttaacaagaagtgcccacaagccgcctctgtnnnnnnnnnnnnnnntcaaatagcccctcctgaatttgaaacgccattttgtgcgatattgtccttccccttgctgtatcttatttaatggagttaaagagtgactattcagtatatgagattg

SEQ ID NO: 16614 - DNA, 651 bp, Macaca Fascicularis
  misc_feature (1)...(651): n = A,T,C or G
acaggtgacctctatgannnnnnnnnnnnnnnnnngccgggcaggcctccttccagcccagagtggcccagtagagtaaggcagacagtgacctccacccccgcagcccccttaaaaggccagtactcttgggggtggggggagggtttagaaagcatttgctcacctgcctttctttcccccagcccgcacccgctttgaatgtagagacctgcgggcacttttccttttgtggtgggggnnnnnnnnnnnnnnnnnnnnnnnnnngcacggccgcctggaatgcagnnnnnnnnnnnnngttagnnnnnnnnnnnnnnnnnnaagctcctcctctccccttgttctgggggcaggcgctgtgcttctgtgaggtggtttagcttttgcttcataagtggccagccgcggccaccaggtctcagcacaagagcgcttcctttgcacagaatgagcttcgagctttgttcagactaaatgaatgtatctgggaggggtcgggggcacgagctggctccaaacacatgcctttgctgagtgtgtgtgcgctgggagatcagagtggatgtagagcgcggttttatttttgtactgacattggtaagagactgtatagcatctatttatttagatgatttatctggtaaatga

SEQ ID NO: 16615 - DNA, 853 bp, Macaca Fascicularis
  misc_feature (1)...(853): n = A,T,C or G
gaccatgtgatgcannngnncnnnnnnnnnnnnnnnnnnnagnnnnnnnnnnnnnnnnaggggagcttcccggagaacttgagacaccttaagagcaccatggagaccttggactggaaggtcttgagagctggatgcaccattggctcttgtttgaaatgagcaagcactccttggagcaaaagcccactgaggctccaccaaaagagtcactggaactggaggacccgtcttctgggctgggtgtgaccaagcaggatctgggcccagtccccatgtgagagcagcagaggcggtcttccacatcctgccagccctgcacagctacagctttcttgctcccttcggcccccagcccctcccccatctcccaccctgtacctcatcccatgagaccctggtgcctggttcttcgtcacccttggaaacgaaaaaccaagtcggaacagcagataacaacacagcaaggccccgctgcccaactccatctgtcaacaggggcgtgaggtcccaggaggtggccaaaagctagacggaaccccattcctgacatcacggtagcctccaacacaaggctctgagatctgggcttatggacaaggtgggaaggcgcaggannaagggataaccctatccccaggctggacaggctgactgtcctttcccctctggcctttggccttggcttttctagcctatttacctgcacgctgagccactctcttccctttccccagcatcactccccaaggaagagccaagattttccacccataatcctttctgctgacccctagttccctctgctcagccaagcttgtatcagctctcagggccattggtaaaaaaaaaa

SEQ ID NO: 16616 - DNA, 776 bp, Macaca Fascicularis
  misc_feature (1)...(776): n = A,T,C or G
gctacagaagtttgangncnctataagnanngcagagaatgtnnnaattgatactcttgaacccttgaggatcaagacctgcnnnnnnnnnnntttgatgagtctgaggaggaagnnnnnnnnnnnnnnnnnnnnnnnnnnnnnnaagagaagtgggattgtgaatctatttgtnnnnnnnnnnnnaatttatataaccatccacagcttatcaagtatcaaccaaagcccaaacaaattcgaatatcttctaaaacaggaatacctctcaatgtcttaccaaagcaaggactcacagcaaagcaagctgaaagaatacannnnnnnnnnnnnnnnnnnnnnnnnnnnnnnnnnnnncagccacgttctaaaaacgaaagcaaagaagataaaagagcaagaaagcaagctatcaaagaagagcgcaaggaacgaagagtggagaagaaagctaacaagttagcatttaaactggagaaaagaaggcaagaaaaagagctgcagaacttgaagaagaatgttgagggtctaaagctatagacagtggagcatacagggcaagcaaggcactttattaggggctcttcattatctttagtcattgactagaaccttcagaaannnnnnnnnnnnnnnnnnnnnnnnnnnnnnnnnnnnnnnnnnnnnnnnnnnnnnnnnnntttataccagcaagtgtcccctgccagctgtcttgtaaatactgtaatgttttaatttttaatattttaagcttacatttgctctgaaataaatga

SEQ ID NO: 16617 - DNA, 643 bp, Macaca Fascicularis
  misc_feature (1)...(643): n = A,T,C or G
agagcgtgnnggcccagagcttcctaaaacttcatnnnnnnnnnnnnnnnnnnnnnnnnnnnnnnnnnnnnnnnnnnnnnnnnnnnnntctttaccttttcaatgattggcagaaagtagagtatcgtagcactaaagctcagactgttgtctgaatttgaagcatttgtgaacaagaaagaggttcatcgttggttatttcagccatttatccaaagatgaaagtcacattgtgtacatttgggaatttgggtaaaaaacttagctcctacagattaagagtatctttcacacaagttttctgtctctttttaggacccttgattcctgaggataacaaggagagagaacaagaactccctgattctggagccctcatgctagtcccnnnnnnnnnnnnnnnnnctgattattttgagaaaacttggcttagcctcaaagttgctcatcagcaagtgttgccttggcggggagaattccatcctgacaccctccagatggctcttcaagtagtgaacatccagaccatcgcaatgagtagggctgggactcggccatggaaagcatacctcagtgccnnnnnnnnnactggttgtctgttcttaacagaactgctattggagcctgaaaactcagaaatgca

SEQ ID NO: 16618 - DNA, 772 bp, Macaca Fascicularis
  misc_feature (1)...(772): n = A,T,C or G
ctggcatgcctccagttggggggctggggcgggcagcngcagctgnnnnnnnnnnnnnnnnntttccccctttgttttttttaacaagtttttctaatcgacttgcagagtagttgaagtgggtaagcagcagggtacctnnnnnnnnnnnnnnnnnnnnnnnnnnnnnnnnnnnnnnnnnngcccctgggataaaatcagggtggtcctcacatctagaggacagggacnnnnnnnnnnnnnnnnnnnnnnnnnagcgcccttgcagtctgactgtgtacacttggttcagcnnnnnnnnnnnnnnnnnncactgggttactttnnnnnnnnnnnnnnnnnnnnnnnccatattggctcaataannnnnnnnnnnnnnnnnnnnnnnnnnnnntagaaatcagtgcctacttttcctggaaactcaattttaaatagnnnnnnnnnnnnnnnnnnnnnnnnnntgtcattttcattcaatgacgttctctcccatgacacccagaagggtcagaagaaccacatttttgatttatagatgtttgcatcctttgtattaaaatgattttgaaggggttgcctcgttggatggcttttttttttcctccaaggagaaggggagaaatgtacttggaaagtaatgtatgtttacatctatttgnnacattccnnnacatagagatacattttttaagtgtgaatgtaacgacatactgtgaattccatcttggttacaaatgagactcacccannnnnnctactctgcaagtcg

SEQ ID NO: 16619 - DNA, 1246 bp, Macaca Fascicularis
  misc_feature (1)...(1246): n = A,T,C or G
annnnnnnnnnnnnnnnnnnnnnnnnnnnnnnnnnaagggcccgggtagatcctactgttgaaaatgaggaaacattcatgaacagagttgaagttaaagtaaagattcctgaagagctaaaaccgtggcttgttgatgactgggactnnnnnnnnnnnnnnnnacagctcttttatcttcctgccaagaagaatgtggattccattnnnnnnnnnnnnnnnnnntacaagaaatctcgtggaaacacagataataaggagtatgcggttaatgaagttgtggcagggataaaagaatacttcaacgtaatgttgggcacccagctactctacaaatttgagagaccacagtatgccgaaattcttgcagatcatcccgatgcacccatgtcccaggtgtatggagcgccacatctcctcagattatttnnnnnnnnnnnnnnnnnnnnnnnnnntacacctctggatgagaagagccttgctttattactcaattatactcaagatttcactaaagtacctgcaaaagaattctgcaactttgtttagtgccagcgattacgaagtggctcctcctgagtaccatcggaaagctgtgtgagaggcactctcactcacttatgtttggatctccgtaaacacatttttgttcttagtctatctcttgtacaaacgatgtgctttgaagatgttagtgtataacaattgatgtttgttttctgtttgatttttaaacagagaaaataaaaggggtaatagctccttttttcttttcttttttttttcatttcnnnnnnnnnnnnnnnnttttcaatgatggacaacaggagggatatgctgtagagtgttttattgcctagttgacaaagctgcttttgaatgctggtggttctattcctttgacactacgcacttttataatacgtgttaatgctatatgacaaaatgctctgattcctagtgccaaaggttcaattcagtgtatataactgaacacactcatccatttgtgctcctttttttttttttttttttaatggtgcttaaagtaaagagcccatcctttgcaagtcatccatgttgttacttaggcattttatctttgctcaaattgttgaagaatggtggcttgtttcatggtttttgtatttgtgtctaatgcacgttttaacatgatagacgtcaatgcattgtgtagctagttttctggaaaagtcaatcttttaggaattgtttncagatctca

SEQ ID NO: 16620 - DNA, 688 bp, Macaca Fascicularis
  misc_feature (1)...(688): n = A,T,C or G
ttttttttttggtaagaaatgagactacagttccagctacctacatgtcttttcttgtcatccttatagatctctnnnnnnnnnnnnnnnnnnnnntgataatgtgtatgaatcagtcacagtgaattttacttgaatattgtatgttgcattccacttcattggaagataatgaaatgtaccactgtttacatcatttgtagtgatttcacagataatatatttaatataacagattatgtttcaagtctgtagatgtcgaacgtcgtagacagtcggccctctgtatccatgagctctacatctgtgaattcagtcaagtttggatgggaaatattttttaaaaagatacaaaatatacataataatgaaaaataatacaaatttaaaaaccaatacagtataacaactatttacatagtgcttacattctattnnnnnnnnnnnnnnnnnnagagatgatttatcaagtatacaggaggatgtgcctaggttatannnnnnnnnngtgccattttatatcaggaacttgagcatttgcagataatggtattggagggcggtcctggaaccagccaaccacagataatgaggggcgaagtttcacgaagtgtagatcattgtattcagagattgtaagtgaaaaaatatatagaaactctttagttttggcagatttttttttctg

SEQ ID NO: 16621 - DNA, 536 bp, Macaca Fascicularis
  misc_feature (1)...(536): n = A,T,C or G
tggcacccaccaccccccatgcccgcccacgaggcggggtatggctttgaggggagaagcccctggtgtnnnnnnnnnnnnnnnnngagagggagggaggnnnnnnnnnnnnnnncattaaatacagtcactatattgtnnnnnnnnnnnnnnnnnnnnnnnnnnnnnnnnnnnnnnnnnnnnnnnnnnnnnnnnnnnnnnnnnnnnnnnnnnnnnnnnnnnnnnnnnnnnnnnnnnnnnnnnnnnnnnnnnnnnnnnnnnnnnnnnnnnnnnnnnnnnnnnnnnnnnnnnnnnnnnnnnnnnnnnnnnnnnnatttcccctactctgtcttcaactnnnnnnnnnnagatggcattgaagnnnnnnnnnnnnnnnnnnnntccaagcatagttcagttaatagagttgaaaaataaaagtataggcccttgattaggggagatcctggtttccccttctcagcccatgaaggagctgttgcttacagtagaaccaagcttctggannnnngagagcagtgtggcagagggggtgt

SEQ ID NO: 16622 - DNA, 774 bp, Macaca Fascicularis
  misc_feature (1)...(774): n = A,T,C or G
gatgagcactgcgncccctgggaacnnnnnncagtcctgcccagcaccgcatacagggaccgtctgcctgactcagagacctggggctgcctcaccctctctccagacccacagccagctttgtttctggaatgtggaagatgtttcttattccctgaagaagggggcctgccacacacagcctgggagtcgcctcatccggaaacagggacttggctagccggcctgggccctggggacttcttactggtcactcttctgagtccgctcacctggccgaggggtgtcccggcaggatctcagggtggaaggtggggaggggcagctcctgccatcccttgccgccctgcacttctctgcnnnnnnnnnnnnnnnnnttcctctccccgcgctgggccagggctgtgctccctgaagtgactttgatgtggggccgtcccagctcctagttgctcatggatgcttcctgccccacactggggcctgccataataactggcccaggtaccaacacccaggttggaccccctggagcccgctctccctcgggaccagggggagactcctggcctcacccagtgcccccctgcccaatctgggtggggtgcccccaagtaaaccctgtgcccccagtgtctgctttctggctctgcttccagtggtctaacctgggcggtctcctcagcaaatctgcctcagcacatagacggcgatgaacccgccttgcccgcagcccatttgaggaacgggtgatggcggcaggcaatcaacagc

SEQ ID NO: 16623 - DNA, 730 bp, Macaca Fascicularis
cagtgttgccatgactatttttattatcattagtaatgattacttagatcaattatttagcggtggactaatggaagctacagagcagggaagggaagcagacctagggaggaaggcagttttgatttgaggaggtttgcacacatagagaagcatattggagaagcttatccagagcaaaagatatctctccattgaacatctgcctcttttgatgttggaagacgcatgtcttactccctaaacagaccccagcactgggagccttcttgatgatctcaaaagtaatagctattcaagaaaatcaccaagtcactgaaaccgggagtttggaaggctgatgagaacacatgggagcaacatgaatgttctacaaaactttaaagcagagactgtttcaaacagatgtagcagatactactgaaaaccaaaggagagtgagattgtgtaagaatgtgatttcatgtttgtagtgcttacaattttgtgcaccaactggatggctagaaagggtaaaataatttaattaatagctcatattttatgtgtgaaaacatattagtgaacatatataatcaaaatagatttcattgctattgcatagtctgatacatagaatgattttgcttttctcttttattatactcgctttaaaatacttgaaatagattttgtattaaatgcatttcaagttaaatgtgttaaatgtatacattagatgtgtgcttaa

SEQ ID NO: 16624 - DNA, 762 bp, Macaca Fascicularis
  misc_feature (1)...(762): n = A,T,C or G
atgaatagcannnngtnnnntnnnnnnnnngtggctgacatggactgctggcctgtgagccctgagtttggccaccgctgtgcccttgggggtcaggggcttgaggtttacaactggtatgactgaggtatcccacggtggccggtgtgctgggcatggggcctgnnnnnnnnnnnnnnggagcagnnnnnnnnnnnnnnnnnnnnnnnnnnnnnnnnnntgaggggaggaggtggcggccacgggttcctgacatcggtccaggaactgaaggtgagtggagtgctgccaagaatatgccccactccccatgacaagacagaactttgtaacagtaccaatttattttggccgtgggtttttgctttttttcnagttgatgactttgtgaacattcccaaatattggagcctctgtggcctcagatgnnnnnnngtggagggagacccagcatagccaggccagtatggagcacctcacgcacagccctnnnnnnnnnnnnnnnnnnnnnnnnnnnnnnnnnnnnnnnnnntcgaggctcctgaaagagaaggggcctactggtctcatcctctgcttcctttgtctttaccctgtacctctctgcatgtcccaaacccgtttttgctgtgcgctcacccctaggatgtgtactcggttgtagtannnnnnnnnnnccnnnnnnnnnnnnnnnnnnnnnttgcacatctagagacagagactgagtcactggcccatctctttgctcnnggccccagacca

SEQ ID NO: 16625 - DNA, 735 bp, Macaca Fascicularis
  misc_feature (1)...(735): n = A,T,C or G
gcagtgcatttagacaggcatctatttggacctgtttctatccctaaatgaatttttggaaacattaatgaggtttacatatttctctgacatttatatagttctcatgtccatttcagttgaccagnnnnnnnnnnnnnaggttaaaaagaaaaaaattatagtgagaatgagattcatttcaatgtaatgcactaaagcagaacacgaacttagcttggcctattctaggtagttccaaatgatatttttgttgtcaaactttaaaatttatattaatttgcaaatgtatgtctctgaataggacttggaccttttctgacatttattttatccgtgatgtattttttaaaaattcttctgatacagagaagggtcttttttttaaagtatttcagtgaaaacttggtgtaagtctgaacccatctgttgaaatgtattttcttcnnnnnnnnnnnnnnnnnnnntcctnnnnnnnnnnnnnnnntatggaaagctttgtttgcttcctacaaatacatgcttattccttaagggatgtgttagagttactgtggatttctctgttttctgttttacaagaaacttgtctatgtaccttaatactttgtttaggatgaggagtctttgtgtccctgtacagtagtctgaagaattcccccttctgtctcctagcnnnnnnnnnnnnnnnnnnnnnnnnnnnnnnnntctttttgtaatataatctagacctgt

SEQ ID NO: 16626 - DNA, 759 bp, Macaca Fascicularis
  misc_feature (1)...(759): n = A,T,C or G
cccatcagtatatcacttaaatttatgttttctaaggaaattnnnnnnnnnnnnnnnnnnnnnnnnnnnccatactcagggtgtagggnnnnnnnnnnnnnnnnnnnnnnnnnnnnnacctgtcaccagcacaagagaattagagcttcattgagaatttagaaaaattatactaaagtnnnnnnnnnnnnnnnnnnnnnnnnnnnnaactcctctaagcatttactcatttactgtattcctgctctgaagatgtggatacagnnnnnnnnnnnnnnnnnnnnnnnnnnntttattggttttttttttaaccatctgtgtacattcctttcatagggtagagttgtagttctacaggttcttattttgtttttgttgtaatgtttgaatactatttaatatccggttttaatattgctggatttgctacctttggttacttgtgcagtgttaaaagtaatccactttcttgtttaatataccagatacatagcaaaagcagcttggaataattatagctgtttatttggctgtgctcagttactacattaagatcttgtactgtgtaacagtaactcttttttgctcttcagtaatttaatatgttcacttaacaaaacatgaactttgagatgcactaaaattttgttttagcagtggctcaaaaaatttcagaaattacttttgtaattatttgcaattaattgttcttttatcttacaattgtttaagccctgtgatctttcttctcccaactaa

SEQ ID NO: 16627 - DNA, 737 bp, Macaca Fascicularis
  misc_feature (1)...(737): n = A,T,C or G
agacatnnnannnnnnnnnncaggagctgnnnnnnnnnnnnnnnnnnnnnnnnngcnnnnnnncagcccagaaactnnngagcntgctgcaaaaggacgagttcaagtctggagcccacgtcgacttctatgacaaataagcccatgtttttggcttcctgaaccttttcgtccccactttcagacataccccagagccctgtggctccccacaccctgccataggggcagtcctgccttacacatagaaacactcatgcctgctgccctgccgtcaggcacagccagctgtgagctcccagatcttggccttacctgttgtcaggagtctgtgctgtgcaccctggattatgaggatggtaggagagaggttatgggcattggtgtctctatccccagaaatagaacttaaggagtgggaagagcaggaaaagaagcnnnnnnnnnnnnnnnnggaggttgtgtctcctgctcatagcaagcctgtggggagagggaagagtgatctggtgtggaataggaggacccatgtagattcgcagatggcctagatgggaagaagagcagatggtacaagnnnnnnnnnnnnnnnatgccccttgctgagggtagcaggaccttcttttgcactttgtgtcctcactctgatgtctctttcctcccgaatctaccacccctcccccaggctgggagaaggggctcctgggtgtctgtatacatgccacaaggcagataca

SEQ ID NO: 16628 - DNA, 489 bp, Macaca Fascicularis
agaatgaaagcttctcgagggcagggactttggtctattgtctgtatttgctggtgcctaggattgtgcctgtatgcaataggcactcaataaacatttttgctgtagactggacaggcatgagttagtcagattctctggggcttctgcagagtctggtttggaaaaggaggtactggggaaaaactctgctccccgcaacctcacctttttaatctttcagtgttgaaaagtggagaggagccggattcagtttgctggggacagagccagtggggtgtggaggtgctcagagcagtctttgggaaggtgtggggggaagctgggttcccaactgccagcctccaggcctgggatggacctagcatgctgagaaagggcatacaccgctgggggagtcacctgccagccaccaactcactgaggaaccagaagaattgctgttcttggtttgaaggcacttggaggagaggaaggagggatgggggc

SEQ ID NO: 16629 - DNA, 792 bp, Macaca Fascicularis
  misc_feature (1)...(792): n = A,T,C or G
ctagtggggnnncctgcttccccaaatcaaagatgcatctataccaggaaattaaaataaagtaaaaagaaatagtttctttatagaggaaacaggagagaattagaccagaaaccagagttaagttttataacagttgagcacttaatttggctctctgagcagacagtaaaacataacaggnnnnnnnnttatcacttgacagacattttttcctggcaccacattccaagcagaattgattccttgcactctcttgtggaggatatagagtaataaaacacgtaatttatttgaaagtatttatggagaagannnnnnnnnnnnnngagcttcaggtaaccttcatttcctcacctgcctgtcctatctgccccttcctcgggggctccttttcttgccatctgcataacagccacattcaccatcttatgagtccttcatatttctattttaccaaacaaagtggcggtaaggtgtgcaccctgaagaacagnnnnnnnnnnnnnnnnnnnnnnnntcctacgtttcatcttggctgtctgcaaccctggccaagtcacccaccctgtatgggcctcggtttccccatgtttacaatgagatatnnnnnnnnnnnnnnnnnnnnggaattagagtttgcatgtattaagagcattnnnnnnnnnnnnnnnnnnctataatatcaccaatccttacagtcatctgacaggannnnnnnnnnnnnnnnnnnnnnnnnnnnnnnnnnntatatccnnnnnnnnnnnnnnnnnnnnnnnnnnnnnnnnnngc

SEQ ID NO: 16630 - DNA, 690 bp, Macaca Fascicularis
  misc_feature (1)...(690): n = A,T,C or G
ggacccctatagagaagggcttggcctccatggngaaggcatggatggaagatggagcaaaggaaaatacatgaaattggctgcctgccaaaatctgttccactataacagaattgcattcggaccccagcacagtggttcacgcctataatcccagcacttaggcaggccaaggtggaaggatcacttaaggccgggagtttgagaccagcctgggcaacagagcaagaccccttactacaaaaatgaaacatcaaaaacaaaaacaatcagctggccatgatggcacacatctgtagnnnnnnnnnnnnnnnnnnnnnnnnnnnnnnnnnnnnnnnnnnnnnnnnnnnngaagctgcagggagctctgattgtaccactgcactccaggctgggagacagaatgagacgttatcttaaaaataaataaataaaaagcaaaaagaaaaaaagtactgcatttgggcatcatctcagctcccttgcagccaggtgcagcatggactgagttcttggcaacagaacgtggtcagaagtgacgtggcaacacagggtctgggtgggggctcccccacacactttccttgcctatgagctggaacataacacatgcctatgatccagctttggccatacgcaaggggaaggtggagcaagaaatgaaaaggaacctgaatccctgaatgactg

SEQ ID NO: 16631 - DNA, 567 bp, Macaca Fascicularis
  misc_feature (1)...(567): n = A,T,C or G
aaagtcacttaaaataagccaacagactctcccagatcacacaacttgtggaatgattcatcctttgtccattacttccttaatcacaatttagtttttttcttacccttgtcaggcacagagttcgattctttgtttctgtttctttcgtcttttcctagagatgaggggcctacagcagcatcattcaaagagggaaagacaaagggaaagaagagaaaatccccctgtggtgatatgaacatgcgtattccagtattaaatggcatctggcccaatttaaggactttggattcaatttgcctctgatgtttattttggaaacatttaggaatgttttcctccccctactccataaattgtttagcactttttattccatttgctttcaaatgaccacagtnaagcccgttaatacaagctcccgtgttaaatataataacccatcagtgattggggaatcagaatattttggttaaaaaaacacggttatttaaaactgtaaaccnaaaaaaaaattaaattgaattaaagctannnaacnnnagttaccctgtaaatgagcaa

SEQ ID NO: 16632 - DNA, 775 bp, Macaca Fascicularis
  misc_feature (1)...(775): n = A,T,C or G
cattgcattgactgggattncagtagtaattatcatnnnnnnggtgaatgtattcattggtgaagctgaactagcagaaattccagaaggctatatcccagaacactgggaatattataagcatcccatatcgagatggattgcccgtaatttctatgacagtcctgaaaagatttnnnnnnnnnnnnnnnncgtccttcagattgaagctgaaaaggctgaattacggttgaaggagctggaagtacgaagattgatgcgtatgagaggagatggaccctggtattactatgagacaattgataaggaacttattgatcattctccaaaagcaactcctgacaattaagcatttttttctccaaatacaaagtatgttctctttgttggaaaataaattagtaaatatattctgtatttttgctctccgtgaaaaacaannnnnnnnnnnnnnntactgtctctnnnnnnnnnnnnnntgaggctttcgtttagggagtttggcttccagtccacaaagaagatttaaaatgtactaataaaaactggagaaacaggaatttgtaaactcctaaagttgtagcaactttgaaaggttagtgttttatttacctgacaaatggaagttatagaaaagaagtttaattatgttaagtacaagtaattgtagtattttgtacaaatgcctgtactgtagatgtctgtattattgannnnnnnnnnnnnnnnnnaagttccataaagcattgaaccaactctgtaatgtactccttaa

SEQ ID NO: 16633 - DNA, 706 bp, Macaca Fascicularis
ttcccatggcataagtcatacagttaattagcatgtgagcaacacagagttaaaaactgcttttccaaacttaattttgtatttcaggttgcaagctatttgaaagtttaagacagagtagcatggtttgatattagtgtttatggcgctttttatgatcacagtttttttgttttgatatggggtcttgctctatcacccaggctggagggcagtggtgcgatcacagctccctgcagccttgacctcctgggctcaagccatcctcccagctcagtctctccagtagctggtactataagtgagcacaaccatgcccggctaatttttctattttttgtagaggaggggttctcactatgttgtcctggctgttctcaaacttctgagctcaagcgattctcctgccttggcttccccaaatgctaggattacaggtgtcagtcactacacctggcccacagatttaatgtaatactcacaaacagtattttagcaaagtgcttaagagtatgagtcaagccagttaaacgggtttagctcattgtattacatattgatgggtagtataagaaagtgtgtataaaataaaaaatactagtaaatgtttcaaatatttttaaccattattaaaatgaaaaggtaaagaatggatcacaagatttcagtgaaagagatatcagatttcataaataacacagtttga

SEQ ID NO: 16634 - DNA, 680 bp, Macaca Fascicularis
  misc_feature (1)...(680): n = A,T,C or G
ataatggcaatcataatttaacataataaaagaatatatatctattgcnnntcatcatacttgataaatacagtatgaacaaaattttcattgtatacttttcacaagataataaataagttaaatagtttttttcatattgagttgtggtgcagtggtgcgaatcaactcaaaacagctaaaaattcagcagttattctccaacaattacaaagtaagctctgcccaaggcttccagagggagcagacaaaatggttctaaactaaacatccactaagtggtggcgatgaaaccagtaaccagtatggacctttggaatgcaagggtttgtttttcacccccagacatatataattgttaaaaaacaaaaaacacctatgggctgagggctaactatcaaggcatattcttggcagaatattggattctaaaaagcttataggtttagcaaggtggtggctggctggtataacaccgatctgagacaaacaattaggaacttcttaagggttcccacatctggacttaactaatgctgttcaagtgaagagatggaatggtggttgatagctgctggtgctgggttgatttttcctgaagtcccaaactcactggagtcctaaaaaagtttaagtgtttgttttttgttctattggtatcacaactgccctgttgtgaa

SEQ ID NO: 16635 - DNA, 743 bp, Macaca Fascicularis
  misc_feature (1)...(743): n = A,T,C or G
ggagtacattgcggatctgtannccgccgagcctgggaggaggagccggcgtgggtgcagacggagaggcagcagttccgggacttccgggatctaaacaaggacgggcacctggacgggagtgaagtgggccactgggtgctgcccccggcccaggaccagcccctggtggaagccaaccacctcctgcacgagagcgacacggacaaggatgggcggctgagcaaagcggagatcctgagtaattggaacatgtttgtgggcagtcaggccaccaactatggcgaggacctgacccggcaccacgatgagctgtgagctccgtgcacctgccacagcctcaggggccccgcacagtaacccgagccccgtgcacctgccacagcctcaggcccccacacagtgacccaaggaggggctgccgtggtctaggcccctccctgtccaggccctgcaggaggcagatgcatcctcctgctcatgggctctcaggaaccccttgggtcagcttctgtccctgtcatacccccaaccccggggaggggccgtcacagtcccagaggataagcaacacctctttctgactgaatctcccagcccagacccagggaccttggccccaagctcagcctctaaaaaccgccaccaacccctccagctccgaatctgagcctccaccacacagactgaagctcccctggccccagccctctcctgcctggcccggcctgggacacctcctc

SEQ ID NO: 16636 - DNA, 675 bp, Macaca Fascicularis
  misc_feature (1)...(675): n = A,T,C or G
tacatgtggatgactttggctcagcccaagagctggcggctttcctcacgggcatgaatgagagccgataccgacgcttcttnnnnnnnnnnnnnnngctgcgcgtgcgactcttcaccgactggcgggagcgcttctgtnnnnnnnnnnnnnnctacccgcacctgccccgcaaccaggtctatgaggaccttgagggatggtttcaggcctgagctctgctggccgggggaggtgggtgtgggtggaagggctgggtgtcgaaatcaaannnnnnnnnnnnnnnnnnnnnnnnnnnnnnnnnnnnnnnnnnnnnnnctggggacagaggtcaggaagcaggggtggggggtgcaggtaggcactggagcaggcagaggaggtgagggcaggagggaggtaacgnnnnnnnnnnnnnnnnnnnnnnnggggaaaggctgaggaggaccctctccannnnnnnnnnnnnnnnnnngggtcaaggcctcgctggaagagggtaaaaggcagggcccttggggctggggacaccccaggctgcagtttgtgggggccaaacctgggaccccaaacttcctctgtagcagaggcacgggtccctggcacatccacagttctgaggtccctgtggtaggctggggcggggcccaggagaccacggggagcaaaccagct

SEQ ID NO: 16637 - DNA, 782 bp, Macaca Fascicularis
  misc_feature (1)...(782): n = A,T,C or G
aggtagagggtccagttccggaggaggatatagctctggaagtggcagttatggctctggaggccgaggatctggctccagaagcggtggaggaggaggctctgtctctggaggaggatacggctctggcggtggttctggaggaagatacnnnnnnnnnnnnnnnnnnggctctggaggaggatatggctctggaggtggaaaacacagctctggaggtggctctagaggaggctccagctctggaggaggatatagctctggagggggaggttccagctctgtaaagagtagctcaggtgaagcttttggttccagcgtgaccttctcttttagataaagatgagcccccaccaccaccgactctcccaccccagactctcccactccagaatgtagaagcctgtctctgtacctnnnnnnnnnnnnnnnnnaaattttgtcatttatctctgatggcattttgaggaaaaagaatgtccacgtacagtttttgcaagatcttttctccaaaccagttagttannnnnnnnnnnnnnnntgtgttctggggcgnnnnnnnnnntgtctaggtttgtgcttctagccatgccccgttcctgcccccaccatgcctctttnnnnnnnnnnnnnnnnagatgggtattctattgaggacccaggcccacccagggatttcatctctaagcctggcagtgccggggggaaatgtgtttctgtgtatatagctcctcttgtccaccctgctttcggaagtgctgtggtctgggggtcttcgtaat

SEQ ID NO: 16638 - DNA, 744 bp, Macaca Fascicularis
  misc_feature (1)...(744): n = A,T,C or G
gaggcaaattgcacccactctctctccctgtaagatcnnnnnnnnnnnnnnnnnnnnttgcaatgctttcagtttgaggctaagcagaatgttatgctgtgaacggtcaccacagacagaccagtgtcgctggtatagggaggcgaggctcagggttggacaggttaattacctacataaccctggctgtggcccagcccagcaccttccagaacagggaatgannnnnnnnnggtctactttggagttggggtcagtgatgaggggaggcagggtctgcctctgtgcaggtaaaatgccccctcaccccagccttccnnnnnnnnnnnnnnnatctgaaaacactttggctttggggctgctgtgtacctctgnnnnnnnnnnnnnnnnnnnnnnnnnnagaggagtttgaagcccaatgtgcaaggacatttctcaagggccatgtggttttgcagacacccctgtcctcaggcctgaactcaccataaacacccatgtcagcnnnnnnnnnnnnnnnnnnnnnnnnnntttgaactgctgccccttaggagactccagcggnnnnnnnnnncttcctccttnnnnnnnnnnnnnnnnnnnnnnntccaccaccctggcagcccagagatgcttctgagttaggacaacaaataggggggccctatagtcagagcagctcttannncaagtggtgnnnntnnnnnncccngtcagnnnnncagttaacggcctttacagctg

SEQ ID NO: 16639 - DNA, 610 bp, Macaca Fascicularis
tgtatgtacttgctgtgtaaaagtttgggcatgactttgcatctagcgggtgctgcctgtatcactttgtctataagcttgctctgggattgagacagcctcttaggacctacgatgccagcagctctcataaagatggaaattacagaggccaaggatggccaagtgaagacccaagtctcagaaaacccagacttgggacagctgcctgggaactgtaggatgctagagcagttctgtaatgctttgagacacggcaattttcacattggccattctttccccctcccccaccccttttcttttgagggacttttaatgtttgctgctttaggtggatggagagtccaccagtcccactcaatgctgctctaaccctacccacacccacataattaggggtgctaataaaacatatgctgaggttgagataaagacgggacataaggggaaaattcattccatagagctgaaatctggttttcaaggcctctgtggctttcttctgaacttaccaccagccctggctggaatgtagattgtgtttttagtaacgtgtactgtgagctgtcttctgtataatgtattttgtaatgtatttttctcatct

SEQ ID NO: 16640 - DNA, 758 bp, Macaca Fascicularis
  misc_feature (1)...(758): n = A,T,C or G
tcagcactnnnnnnnaacttggggagcgtgtgtctgtttcggtttgtgagaaagtggctgcccctcattnnnnnnnnnnnnnnnnnnnnnnnnnggggctggctacaagaagcaaaacggcccatgcaaagagaacagaggtcacttttcaaaacacttgcatcattaccctaaaaataggctgttacgcattttgacaattgtgctatcctacactctgagggagttggcaacgcatgcggtatggtggagtgggaagagttaagagactggaagttaagacaagnnnnnnnnngtcccagctcatcatctcaccccagtgaccttgacagtgtgctcactctcagagccatggattgcctgaaacaaagcgaagatgagggcccacggtcctttccaggtataacatgctatcgttctttaattttattttatatatacatacttttttcctgttttttttttctttaagaactaaccccaatcaagaatattttctttagctagcttaaaaagaaaaatatatcttatgtaaaaacacatacatggccaaatgcaatactgaagagacaatcatcctgtatcttgtgtggtttttcctgcttctgagtggcggctacaacgccaggtggcttatcccattgggtttctgctttggggtgtggtttggttgctttgggttgtcatgggaaagagacactctccttgcagctacctccatgtaagtgaattcctggataaagcaagatttcctttca

SEQ ID NO: 16641 - DNA, 755 bp, Macaca Fascicularis
tcatgacagcccctaggccaggaaccgtcaggggggccggctggcatccaattcctgcggacaagtagcattgggagagaacaagaaaggggacttgagttacagggtgaccagaaagacggtcagctgtgtccagcctgccacccgtaagtaggccaatcaagcacttcatgaagaggaggcctcgtggcatattcagtttacacctgaaatattcctcgatgggacagcttgtggggagtggctgtgggggaaggggaagatgagaaaggaagctctcaacaccagagatgcatcggaggaccacgatcagttctatgctgccaaagattaaaaataaataaaaacataaaaaattaagaggggccaagaggaagacattctttctgcaaggaaattttgtttaaattctgaactactactacacataagtgtaagtcaaccctgtgtaaactggtgtcctctctctagccctctcccttactggcccacgtctctctccgtagagggcctgagaaactgccccaatgccacagtgaagacgagggagtcttggctggcattgccaactcacagccgccatccatctggacacaaaggaagagagacccgcaggagtcatggagggcaccgttagccccggtccatgcagggggttcagccaagcccaagactcaacgctgctttcctttcaggatttgtagtaacataaggtgataatggccaaaagtggttctctctcataaaacaaacca

SEQ ID NO: 16642 - DNA, 1223 bp, Macaca Fascicularis
  misc_feature (1)...(1223): n = A,T,C or G
ttaaaaaagtnnagnnnnttcagtagtntnncnnatacgtcatttaatttttttaagttatcctgaagnnnnnnnnntcctnaatatagtctaaacaaatttatagatcactgtttgaagtaaataatacgagtgagtattttcaaatgtgataaaatggcacaagtgactggtgataaaatttgaaattatggttaacctccttagctgtgatcttatgtatgtaaaataaaacttaaatatataattatnnnnnnnnnnnnnnnnnnnataatgtcattttattttagtcattattttttgaattatatcatttactgttttcttatagtctttattatattttgttgttactatgttatatttgaaaaccatcaaattcaaatacattgtacagttgaagaaattgacttagtacttaaaagaaagatttcccatttcatagaggttattggagaaacttttccttttgttgcatttgtggaagttagttttctggcccgtggcctttaattttcttaatcaacctaattacatcaggatagaggtagagtttctgtaaaagaagagacattaagagttcctgaaatttgtatctggcatacggataggcttatattcaaaacatcttagtcatgtgactaaattcaaagtggaatcactaaatagtttgcagtacgtttctaatatnnnnnnnnnnnnnnnnnnaaacaagacaaatgctgttcagggaaagaagttggcaagcttaaggttaaaaataaaattacatgtgtttttgccttttcttcctagctccctgtcatttctaaatacttggttaaatttaacttggtatctctttccttcatagataatattatactcttgtggggttttgtgtatacgtgtgtgtgtgcgcgcgcacacgtgcacatttgctcagaatgagaaaaaaatggtatttttccttctttccagtatatttctcccctcatagagctgtaacatgaatactaaataaatattatataagatggattcttagaggttagagtgcaagaagtctccttcttgtggggaagtgttagagggggagttagaaggtttctcattctcatgattctagtattgttaataagtacattgaggcaagtttggcctgttcttagaatggcctatttctaatgctgtaaaagaagtagaatatgatttataacaacattttcagttctaaacatttc

SEQ ID NO: 16643 - DNA, 1148 bp, Macaca Fascicularis
  misc_feature (1)...(1148): n = A,T,C or G
aaaggaatatgtgaataccatgaaaaaaactatgtgctgccctagaacttnncagaagacaaaagttagatagtgcagatgctaatttcagtgtctggattaaaaggtgtcaagaagctnnnnnnnnnnnnnnnnnnnnnntgtggactcaccagtcaaaaatcaagtatgactggtatcaaaccgaatctcaagtannnnnnnnnnnnnnnnnnaagaatgttcagaagaatgatgtaaatgtggaattttcagaaaaagagttgtctgctttggttaaacttccttctggagaggattacaatttgaaannnnnnnnnnnnnnnnntataataccagaacagagcacgtttaaagtactttcaacaaagattgaaattaaactgaaaaagccagaggctgtgagatgggaaaagctagaggggcaaggagatgtgcctacgccaaaacannncgtagcagatgtaaagaacctatatccatcatcatctccttatacaagaaattgggataaattggttggtgagatcaaagaagaagaaaagaatgaaaagttggagggnnnnnnnnnnntaaannnnnnnnnnnnnnnnnnnnnnnnnnnnggttctgatgaagtgnnnnnnnnnnnnnnnaaatcctttatggagtcgggtggtacagttttgagtaccaactggtctgatgtaggtaaaaggaaagttgaaatcaaccctcctgatgatatggaatggaaaaagtactaaataaattcatttgctctcactgtattatgtatattcacctaatgcccgttgtgtattgatattgcattcttgaattttgaacactgaatatctttttgaaagattatacctctttacctctttgtgctttagaaattattttccttcaagtgttcaagtctaatgaagaatgaagataacattttatcacttctgtccttaaagatttcagacatggtgaaactgaataaagcgtatcacttgctcctagatagattcattctatctagttgtggggatggagaaatctttaatggtatattttgggttattgccttatttttgatgcagtattctgtcagtaatttattagnnnnnnnnnnnnngggtgagcatagatttttcgccttcagtgttacattg

SEQ ID NO: 16644 - DNA, 735 bp, Macaca Fascicularis
  misc_feature (1)...(735): n = A,T,C or G
gggccacacactgaggctgctcaacttccccannnnnnnnnnagcggnnnnnnnnnnnnnnnatgcagatcaagaaccagatcagccctttcatctcacagatgtgcaacatgctgggcctgggggacatgaacgcagaccagctggcctccaagctagaggagactctgcccgtcatccgctcagtcagcgagcagttcaaggaccctgagcagacaactttcatatgcgtatgcattgccgagttcctgtccctgtatgagacagagaggctgatacaggagccggccaagagcaagatcgacacgcacaatatcaatgtcaaccagctagtcttccctgaccccgagaagccctgcaagatgtgtgaggcccgccacaagatccaggccaagtatctggaccagatggaggacctgtatgaagacttccacatcgtgaagctgccgctgttaccccatgaggtgcggggggcagacaaggtcaacaccttctcagccctcctcctggagccctataagccccccagtgcccagtagcacagctgccagccccaaccgctgccatttcacactcaccctctaccctccccaccccctcggggcagagtttgcacaaagtcccccctataatacagggggagccacttgggcaggaggcagggaggggtccattccccctggtggggctggtggggagctnanttgcctcctacctctcccacctctgctctca

SEQ ID NO: 16645 - DNA, 655 bp, Macaca Fascicularis
  misc_feature (1)...(655): n = A,T,C or G
ctggacccccannnnnnnnnnnnnnnnnnnnnnnnnnnnnnnnnnnnggtgctgcaggcactgctggtccatctggtcctagtggactcccaggagagaggggtgctgctggcatacctggaggcaagggagaaaagggtgaacctggtctcagaggtgaaattggtaaccctggcagagatggtgctcgtggtgctcctggtgctgtaggtgcccctggtcctgctggagccacaggtgaccggggtgaagctggtgctgctggtcctgctggtcctgctggtcctcggggnnnnnnnnnnnnnnnnnnnnnnnnnnnnnctgctggccccaatggatttgctggtccnnnnnnnnnnnnnnnnnnnnnnnnnnctaaaggagaaagaggagccaaagggcctaagggtgaaaacggtgtcgttggtcccacaggccccgttggagctgctggcccatctgtaagttgaattcactggtggtccacacagcagccacccattagatcttacaattaaacatatattcgtcaagtgcctactatgcaacagggaatacaccagatagaagatggaaaataacggaagggttaacatttgcacgctgttttacaatgtataaaagtttcataaatattgttttattttaattctct

SEQ ID NO: 16646 - DNA, 732 bp, Macaca Fascicularis
  misc_feature (1)...(732): n = A,T,C or G
gccagctgacgtgnnngaaaagcaccaccttgagggccagttgtggggttgtaagcacagttatgaaaatttctatctagcctccgttttgaatggttttaagaaactttgtatatggaggatggaaatgcttatatatttattgaaaatccttttatttgaaattaaaattatttggtaaataattgtttgatatttggggagggttttggaggggaggtaatgtcactgataaattaaaagcctgttgattttgcagaaaggtactgttagtgactgataggatgcctttgttttgtacatgaaccaaatctttgttttacgtttcttttatccaaaatatttaggcatctgacattttcaaccagaatttcaattacatactgtgatttttatttgttgcaatacattaaaatttcagaggtactttggggctcaaaagctaggatttctaagtcagtatgtgcatttcacatgataaagctgttaatggtgagcaaagtattatatactaactagatttttccacatctgtatagtatattatatgtattttgtggtattgagagtatagaaagtttagagtnnnnnnnnnnnnnnnnnnntgtatttttaaacaaatttatggcaattaaaatatttggagacaagggtatcacatttcaatttgtaaagatctttttaactttactgtgtcattaagatgctttgtacaatgccaaaccatagctg

SEQ ID NO: 16647 - DNA, 758 bp, Macaca Fascicularis
  misc_feature (1)...(758): n = A,T,C or G
ttctgggcatataagatctattannnnnnnnnnnnnnnnnnnnnnnnnnnnnnnnnnnnnnnnnnngtgactgtctgtgtgactattgtgtgcacatattttctactaaatgcagaagattacaggtggcaatggacaagttttctctctgctgcatcaactgcaatctatgtttacatgtattccttttactactattttttcaaaacaaagatgtatggcttatttcagacatcattttactttggatatnnnnnnnnnnnnnnnnnnnnnnnngggataatgtgtggagcgattggttacatgggaacaagtgcctttgtccgaaaaatctatactaatgtgaaaattgactagagacccaagaaaacctggaacttcagatcaatttctttttcataggggtggaactcgcacagcaaaaacaaacgcaagaagagatttgggctttaacacaccgggtactttgtgggnnnnnnnnnnnnnnnnnnnntaaagtaacatctatttccattgatcctaggttcttannnnnnnnnnnnnnnnnnnnnnnnnnnnnnnnnnnnnnnnnnnncgcagtaggcattactacagtacatggctaatcttcccaaaaactagctcattaaagatgaaatagaccagctctcttcagtgaagaggacaaatagtttatttaaagcatttgttccaataaaataaatagagggaaacttggatgctaaaattacatgaataggaatcttcctggcacttaa

SEQ ID NO: 16648 - DNA, 714 bp, Macaca Fascicularis
gctcaaattctcccagtagtcagatgccagaagatggcttatctccaagtgaaccgcttaatatctatgaggatgacccagtggactcagattgtgacacagacacaaccacagatgatgaatactacctggatgaaaatgacaaagagtcagaactgtgaggctttttcattaaaatgctttacctttttcaccaaaagcttataatggaactgaggtgtatgtgtgcatgtacatgggaggataaaagatctagtctgggcagtgtctgctctgaaatgtcccacatctcctttttttcctccacaccctatatagatacttcctgaatgttagaacaatgaattcttgttttgggatagtctctgctattttctctctctgtaaatgttcttagcctgcctttctaccactcccacttaatccctaattcactgtctgatttgggctttctgctttacttccctcctaatatttttcatctttaattgtgatttacaaccctaatatcccaggcacacatacaaaacttactaattaccccgcagaactgtgaaactctgtatggcttcttccagtccacaccctatactcatgacattaaataaaaggtagggatgataacagtggggtaaatattatcatcctgtttgactcatgaacatttatgaagtttaaggtgatgatcttctctttcaaacaaagataaaggaa

SEQ ID NO: 16649 - DNA, 878 bp, Macaca Fascicularis
  misc_feature (1)...(878): n = A,T,C or G
acccannnnnttncttnntccagnnnncgctggtctgtccctatgccttcccagggcttcttcatgtcagatgcacccaagtccttagcccagctgtgccacctgcaggagttcgctcttgcatttcttcccctccccaagaagggagggggccacttgaggcccttctgtgtgttgcnnnnnnnnnnnnnnngtccaaccagctacccacctcaactcccctgtagcttaggacacaaaacagctaccagcggtacagagcggtgatcacagccgagtacttacaactctggtaagcctagcttctccgcctcagcccttctgcttctggaagggctatcctgggggtgaacttgaaactctcatcaggcttctgcaaaagctcttctccctgaagacagacccagcctttgcactctcaccctccagtctggtaaagctgcacctctggggggaatgaggggctgcaggaatctctggagagcctggtgcttcacgatgctgctctgatgattcttgtacctaatctggtgtgnnnnnnnnnnnnnnnnnnnnntcgtggtcagggacaccgagagagtggggtcacttctacttcaaaccttcagtgagggggtgggttggagagaatgctgaatcttttttttgacgggatggggtttttctctttgtaattatttctttagtttaattaactttttggttgtttgtgcaatattatatattttaaattataatgacatctccccagagtattttgtagctgggaaaagaaaaaaggaaaaaaaaaaaaagaaaaaagattctaacagctgttagttttataattaaaaaagaaagaaaaaagaactttgtcctgaaccttttacagacttgcc

SEQ ID NO: 16650 - DNA, 712 bp, Macaca Fascicularis
  misc_feature (1)...(712): n = A,T,C or G
caaacggcggcgtgagtgcgcaggatcgacagttgctgtgcttctactatgaccaatgtgagacccatttcatttcccttctcaacgccattgacgcgctcttcagttgtgtcagctcagcccagcccccgcgaatcttcgtggcacacagcaagtttgtcatccttagtgcacacaaactggtgttcattggagacacactgacacggcaggtgactgcccaggacattcgcaacaaagtcatgaactccannnnnnnnnnnnnnnnnnnnntcaagactatagtcatggcgaccaagatggccgccctccattacccgagtaccacggccctgcaggaaatggtgcaccaagtgacagacctttctagaaatgcccagctgttcaagcgctctttgctggagatggcaacgttctgagaagaaaaaaagaaggggactgcgttaatggttactaaggaaaactggaaatactatctggtttttgtaaattatctatttttgtagatattttatatgaaaatggaatattttaacattttaagggttagacaactttcagaaattcagggagctggagagggaaatctttttttcccccgagtggttcttatgtatacatagaagtatctaagacataaactgtacagagacttgtccacgtgcttttgtatgcctgtgtattcatgtttgtttgtagatgtttgtctgat

SEQ ID NO: 16651 - DNA, 725 bp, Macaca Fascicularis
  misc_feature (1)...(725): n = A,T,C or G
gcaggtatttatacctggtatttatgatgcagtatataagtggtgaacaataactgacagtattgtgcttgctgtacatgtctggtcttttgaaacagattttagtaagcattttccagaggtaaaactgtgtcctattctaattttattcctagagcaaagtagacagggattatttccttgaatctgtttccaaattaatatttttatctttggtatttctacactttaaggccatttggtgcaatttagaaagtgttggcctcccttcccttagccacattcaaaattaacttccaaaacctcaggaacagtacaaagaattaaaaccnnnnnnnnnnnnnnnnnnnnnnnnnnnnnnnnnnnnnnnnnnnnnnnnnnnnnnnnnnnnttggtggtcttgtgcactttaatttctgttacaataagagttaagaggatgaggaagaaatctactcattaacacttactgcagaaatatctgtgttattccgtttgttttcttattattttacctctccaaacatcttcctgtgcagatcactacttcatagttaccaaattttaaaacacttaacttctgaaattcagtgtcagcaaagtgatattacattgttctgtttctaactaacattagcaaatgtacataatgtcataacccaatagtatttgacagtacttatgtatacaatgtttgataagcatttttaataagatttgtattt

SEQ ID NO: 16652 - DNA, 617 bp, Macaca Fascicularis
acctgcagcatttgcatatcactgggaacaaagtggacagtctgccaaaacaattgtttaaatgcataaagttgaggactttgaatctgggacaaaactgcatcacttcactcccagagaaagttggtcagctttcccagctcactcagctggagctgaaggggaactgcttggaccgcctgccagcccagctgggccagtgtcggatgctcaagaaaagcgggcttgttgtggaagatcacctttttgacaccctgccactcgaagtcaaagaggcattgaatcaagacataaatattccctttgcaaatgggatttaaactaagagaatacgtgcacagcgatgtgcaggaacaacttcctagattgcaagtgctcacgtacaagttattacaagataatgcattttaggagtagatacatcttttaaaataaaacacagagaggatgcatagaaggctgatagaagacataactgaatgttcaacgtttgtagggttttaagtcattcatttccaaatttttttttttttcttttggggaaagggaaggaaaaattataatcactaatcctggctattctttaaattgatcataccgtagcggcagcatccaag

SEQ ID NO: 16653 - DNA, 911 bp, Macaca Fascicularis
  misc_feature (1)...(911): n = A,T,C or G
gagagagaagtgaagatgggcgcgaagctgcttnnnnnnnnnnnnnnnnnnnnngcggatgtggtccaggtgtgcgaaggaaagaagaagcagaccaactacttgcgcacnnnnnnnnnnnnnnnnnngaaagggatcttgcctcggagctggtctcactacacggtnnnnnncggcatgacggtcatcnnnnnnnnnnnnnacttcagcgagagnnnnnnncagctgcagannnnnnnnnnnnnnnnnnnnnnnnnnngcgccaaggagctaaagaacatccacgtgtgcctgggtggcctgttcgtgccggaggcgtacatcacggccaccaggcagtacgtggcccaggccaacagctggtccctggaggagctttgcctggaagtcaacgtcaccacctcccagggcgccaccctggacgcctgcagctttggagtcacgggtttgaaacttcaaggggccacgtgcagnnnnnnnnnnnnnnnnctgtccagcgccatctccaccgccctccccctgacgcaggtgcgctggctcaagcagaccaacgccgagaagaaggccagtgtggtgaccttacctgtgtacctgaacttcacccgtgcagacctgattttcaccgttgactttgaaattgctacaaaggaggatcctcgcagcttttacgagcggggtgtcgcggtcttgtgcacagagtagaactaaacttttctagctgcccctttctgtaatagtgaaagttgttatttaacatttattcattattaaaatgtttggaaggtctgagcttgtgacaagaaagtggttggttcgaggttggaggaagctgaatggaatttgacggctgggagtggtggaagttgggaggataccaggaggtatttgagaaggccgacggcagggctcct

SEQ ID NO: 16654 - DNA, 1077 bp, Macaca Fascicularis
  misc_feature (1)...(1077): n = A,T,C or G
gagctgaaagannnnnnnnnnnnnnnnnnagaagaanagaagaaaatgattgaaaacgaaaagctgacaatggaactgactggagattctnnnnnnnnnnnnnnnnnnnnnnnnnnnnnnnnnnnnnnnnnnnnnnnnnnnnncgtccccatcccagacaagaggaggaaacctgctccagcccagctaaactatttgttaacagatgaacagatcatggaggatctgagaacattaaataagcttaagtcacccaagagaccagcannnnnnnnnnnnnnnnnncacttgcctgcgacacnnnnnnnnnnnccagcccnnnnnnnnnnnnnnnggatagaagacggcaaactgtactatgacaaaagatggtaccacnnnnnnnnnnnnnnnnnnnnnnnnnnaaaggacaaccagaaacnnnnnnnnnnnnnnnnnnctgtaggagccaatgagatctgggtgaggaagacaagtgacagcaccaagatgaggatctacctgggccagcttcagcgcgggctctnnnnnnnnnnnnnncgctcagctgcttgactttctgcagtgctcttctcttgaccctttttctggagtgggttttattttgttttgttctgttttgttttgttttgttttcttaatagaaaaatgttaacttccgggaatagctactcagcctggaaatggagagcacgtcgtggatcctnnnnnnnnnnttttgtggctggtcacttccaactttgtcagtcttttctgcctcaacttcttccagagatcggtcaccaggagactattttactttcaggagtattgggggtttgatttactttccttttatttccttattttttgcttatacttgtttttgaaaacctctgannnnnnnnnnnnnnntgtttctattatctttaggtctctctatcatggagaagagcaggaagggatacactctcnnnnnnnnnnnnnnnttttgaatctgattagtggattatgtagctactttccccgtcgagcccaattcactatttccccagaagcttggggcagaggtcctagcaggaggagatgaagtctcct

SEQ ID NO: 16655 - DNA, 750 bp, Macaca Fascicularis
  misc_feature (1)...(750): n = A,T,C or G
ccatgcagtcctnnnnnnnnnnnnnnnnnnnnnnnnnnnntcccgnnaggagggcgccagcgactacgtgctgtggaaggagattttgttcctggtggatctcatctgctgcggcgccatcctgttccccgtagtctggtccatccggcatctccaggatgcgtctggcacagacgggaaggnnnnnnnnnnnnnnnnnnnnnnnnnnnnnttccggcattactatgtcatggtcatctgatatgtannnnnnnnnnnnnnnnnnnnnnnnnnnnnnnnnnnnnnnnnnccctttcagtggcagtggctataccagctcttggtggaaggctccaccctggccttcttcgtgctcnnnnnnnnnnnnnnnnnnnnnncaggggacaacccgtacctgcagctgccccaggaggacgaggaggatgttcagannnnnnnnnnnnnnnnnnnnnnnnngttccgggaaggcctctccaaagtcaacaaaacagccagcgggcgggaactgtgatgatcnnnnnnnnnnnnnnnnnnnnnnnntccttctcccnnnnnnnnnnnnctcctgcccttcttccacagcgtatgtggggaggtggagggggtccatgtggaccaggcgcccagctccccgggaccccggttcccggacaagcccatttggaagaagagtcccttcctccccccaagtattgggcagccctgtcctcactccgggaccacccctcccttccagctatnnnnnnnata

SEQ ID NO: 16656 - DNA, 1027 bp, Macaca Fascicularis
  misc_feature (1)...(1027): n = A,T,C or G
tcgtcttgaagggacccaggggcagtggctgggttcagtgttctcacgctcaggaagaaaaggcagtgaacacccgcctgactgccttcccctgatctgaacgacaccatctcctcccccaaggaagacacagccctggatgtgaacctaggagggtggggaatggcttatgtcactcagtctttgaggcagagcttgggctggggttgcaggggcatcagccaatctgctctcaaggagcaaaacttgggcgtaaaaggaatgggcagtggagctagccaactgtctggaggtctgggtgacctcgcagcatggctgctccccccgcccccccactccttgatacttccaggtgattttatttttatttataaacaagacgaaaatccaagcagcattaatttaggggaacaaaagatagaaaaaaaagaggggggcagaaggagctggtgagcatccaggagaggaggaagtaggaagagccagtgtccaccgtgtgccccagggcggtggagtgtctgtggctgcgaggctcttccttctggctccctggcaggcggccaaacagcagaggggactctgtagtgactttgggacaagccctggagccctgtctggctgctgacacagggagtgcctgcatttgcccccatcaacctcccaccttcaccatcgcccaagtgaagcagcttttaactctcctgcccaaagtcctctgagaatttcttcactttcaggnggtcgtctgcannnnnnnnnnnnnnnnnnnnnnnnnnnnnnnnnnnnnnntccgacatgcaaaccacaggctctaagagtttgtccccagggacatccatccaagtcatctccatggctcctgggtcccctggtgaacatggggttaggaggtcatcgatcatcacgctggggttggtgcgggaggggccacagacctttttgaagtgtgtggccgactgcaccttcctcacgggctgcatgagggagtcccgnnnnnnnnnnnnnnnnnnnnnnnnnnnnnngcctt

SEQ ID NO: 16657 - DNA, 1189 bp, Macaca Fascicularis
  misc_feature (1)...(1189): n = A,T,C or G
gtccccaaccntnnnnnaggctcgaacttatactgaaactgtcaaccatcactacttgctctttcaagacacagatttgggttcattccatgatctgctccgtagagaaccaatgctgcgcatgcaggannnnnnnnnnnnnnnnnaactctgcctggacaggctgcagctggaggctattcataaggtacgtttcagcccaaacctggactcctatggatggctggtatctggggggcagtcagggctggttcgaatccattttgtccgtggactcgcctccccactgggcnnnnnnnnnnnnnnngaaagccgagcccacttcaatgctatgttccaaccatcctcccccactagacggcctggcttctctccaaccagccatcgccttctgcccactccctagccttggcccacacctgatccttggagtgaagtcggtcaagaacaaatggcccctatgcacagagccataggaactgggggccttccctggacagtgatcatgccaggcctggacctttaggcctgcctccccaggactccttagatcccactctttctacagacttctgtgatcacagccccctgcgggcaggggggctctccctccaccaactctcaaggctcctcagcctaagactatggctcatgagaaacactcaggcctgacctaggcttgggagtcaaactgctcatattgagcatattgttaagtgggtaaagccaagtaaaggtactgggtgtttttgcgaccacttgtgaatgggtgtatggagaattgaaaagggtgtatgcatgaaggctcctgtctgactattccaggatccaatattactgccttctgaaacttcctctttagggtaaccatcatgtatgcccacaagggtgatagtaatttgtgagactgaagttgcttagagtacttctttgaccaaggaacaccacagacaccctactgatagaacagtggctcagatcttacttgctcctgcttacgaagtattcccaatcactggtcatctgaccctacttgaacactcctgaacagtcatgtttttaaaaatcttcctttatatcaagtcagagtatacttctataaatttcactcatgggtgtaaggaaatccagtcatcttccctgtgattgccctgttaagtatttaacctatacctatcatgtgttccca

SEQ ID NO: 16658 - DNA, 814 bp, Macaca Fascicularis
  misc_feature (1)...(814): n = A,T,C or G
cgagcgcagatggaaagacgttttggtgctgtgggcagcaccctcccccgcagcggggtagggaagaaaattgtcctgcgggttttaattatttcatccagtttgttctccggacgtggcctcagccctcagaacaatccgattcatgtagggaaannnnnnnnnnnnnnnnnnnnnnnngcaatatggcgttggggggccgggcaggtcctgccgctgcgtcccctctnncatccagccgccgtgggctgtcaccagctgtctttcatctctctggggccctgggcctcagttcaaccttgtggcaccagatgcaacctcactatggcatgctggccggcaccctctcctgggggtggcaggcacacggcagcccccagccctaaggctgtgtctctgaggacatcatcaggctaggcccctgggatgggaccagggatgggggatgggccagggtttacctagtgggacagaggagaaggtttaaatttgttattgtgtattatgttgttcaaatgcatttggggggttttaaaaaatctttgtgacaggaaagccctcccgcttccccnnnnnnnnnnnnnnnnnnnnnnnnngtcccaccgggagcctccccctcagatgatctctccacggtagcacttgaccttttcgatgctcaacctttccgctgtcgccccaggccctccctgactcgctgtgggggtggccgtccctgggcccctccacgccctcctggccagatgctgccgnnnnnnnnnnnnnnnngcgtttttttacaacattaaactttagtatttttactattataata

SEQ ID NO: 16659 - DNA, 689 bp, Macaca Fascicularis
  misc_feature (1)...(689): n = A,T,C or G
ttctgcatgaaataatgagacatatgatactttgtaaagattactttttacatcatatatgtaaaaaacaaatcaaaattggcaaaacgttggtgtttnnnnnnnnnnnnnnnacaaaatatcatagactaggtggtttaaacaannnnnnnnnnnnnnnnnnngttgtggaggctgtaaagtccaacatcaacgtgccagctgttttagttcctggtgagggctcttttcctagcttgcagacaggcaacatcttgctgcgtgctcacatggcctttcttggtgtgtgcacctctgtctctgtttggtcttcctgattatttacaggaaaaaacaaggcagacattgcagctgtacgccataggactcaggccccgtagccacattcttcgcaaggctctgaataatttcaagttccaacagctttaagttggaattttttaatttcagttgattcacttgttcttttcctgtctcccacaacagaannnnnnnnnnnnnnnatgcaaccttggcaggcttctaaactgccacggctccagtttcttgtaggttagacactcattattagttgaaggaaagatctaggcaggcctcggtgcgccgcctcctctttaatgcgagggcttactagatgaatgtgagcagacggaancagnaccaccctgttaatgaaggctgcgcattct

SEQ ID NO: 16660 - DNA, 660 bp, Macaca Fascicularis
  misc_feature (1)...(660): n = A,T,C or G
actcgcttagatgatgggatatgaatattattagacagtaatnnngctttccatccagtatgctagttcttattcgagaactatggtcagagggtatttggatatgagtatcctttgcttatctttnnnnnnnnnnnnnnnnnnnnnnnnnnnnnnnnnnnnnnnnnnnnnnagaagcttttcttattcttttattcttaagatcagtatctttttacagtattctttctacaggatccttttttgtacatttaagaatattttgattacattaaacaagactgctgattttgctactttttttaaggggtcttcaagtaagtaaaacatacatcgtagctagaagaaaaatgtaccttaaatttgcatcttccctctcatacccaagctgtaaacaactgaaatattttgtcttaaatcacttggttcaatacatgcttatttgttttaaagcctgtatcatcaaactctctctctctaaatttaaaatgctgtnnnnnnnnnnnnnnnnnnnnnnnnnnnnnnnnnnnnnnnnnnnnnggatttagtaggccgagtatgctaagtgtacaatatattttttaattttacacctaaannnnnnnnnnnnnnncactaaaaataaacgtatatatgtaggaattaatgtactcttgcttt

SEQ ID NO: 16661 - DNA, 799 bp, Macaca Fascicularis
  misc_feature (1)...(799): n = A,T,C or G
caggggccacgctgatcaatgacaatgctgctgaccacggctaacaatcncttnctgaaccattcagaaaatgcaacagcgaaagacattgcccctactttaacactctatgtggggaaaaagcagcttgtagagattgagaaggnnnnnntacaccctaactactcccaggtagatattgggctcatcaaactcaaacagaaggtgcctgttaatgagagagtgatgcccatctgcctaccttcaaaggattatgcagaagtagggcgtgtgggttacgtgtctggctgggggcgaaatgccaattttaaatttactgaccatctgaagtatgtcatgctgcctgtggctgaccaatacaattgcataaagcactatgaaggcagcacagtccccgaaaagaagacaccaaagagccctgtaggggtgcagcccatactgaatgaacacaccttctgtgccggcatgtctaagtaccaggaagacacctgctatggcgatgcgggcagtgcctttgccgttcatgacctggagaagaacacatggtatgcggctgggatcctaagctttgataagagctgtggtgtggctgagtatggtgtgtatgtgaaggcgacttccatccaggactgggttcagaaaaccatagccgagaactaatgcaaagctggccagaggcccttgcctgaaagcaagattccagcctggaagagggcaaagtggacgggaatggacgggataagatgtggtttggagctgatgggtgccagccctgcgttgctgagtcaatcaataaaga

SEQ ID NO: 16662 - DNA, 664 bp, Macaca Fascicularis
  misc_feature (1)...(664): n = A,T,C or G
acnnnnnnnnnnnnnnnnnnnnnnnnnnnnccagtcacaaataggtttcatcgatttcatagtagagccaacattttctcttctgacagactcaacagagaaaattgttattcctcttatagaggaagcctcaaaagccgaaactacttcttcctatgtggcaagcagctcaaccaccattgtggggttacacattgctgatgcactaagacgaccaaatgcaaaaggttccatgagcgatgggtcctattcctcagactactcccttgcagcagtggacctgaagagctnnnnnnnnnnnnnnnnnnnnnnnattcagcagaacaaagagaggtggaaagagttagctgcacaagaagcaagaaccagttcacagaagtgtgagtttatccatcagtaaacacctttaagtaaaacctcatgcaaaaggtggcagctctaatttgaccaaaaggcttggcgattttgatatgcttgctggaaatctaccttgccctgtgtgaaaaagggaatccatttttgcagattgctcaataagcatcatgagccatataaataacagctgtaaactccttaattcaccgggctcaaccactatcgaacagattcatctagtggctacatcagcaccttgtgctttcaaatatctgtttcaatgggattt

SEQ ID NO: 16663 - DNA, 765 bp, Macaca Fascicularis
  misc_feature (1)...(765): n = A,T,C or G
catgaagcacccagaggtggaggccaaggtccacgaggagattgacagagtgatcggcaagaaccggcagcccaagtttgaggaccgggccaagatgccctacacggaggcagtgatccacgagatccaaagatttggagacatgctccccttgggtgtggcccacagggtcatcaaggacaccaagtttcgggatttcttcctccctaagggcaccgaagtgttccctatgatgggctccgtgctgaaagatcccaagttcttctccaacccccaggccttctatccccagcacttcttggatgagaaggggcagtttaagaagagtgatgcttttgtgcccttttcaatcggaaagcggaactgtttcggggaannnnnnnnnnnnnnngagctctttctcttcttcannnnnnnnnnnnnnnnntttcgtttcaagtccccccagtcgcccaaggacatcgacgtgtcccccaaacacgtgggctttgccacgatcccaccaaactacaccatgagcttcctgccccgctgagggagggctgtgctggggcaggtctggtgggcggggccaggggcggggctcacgggaggggcgggactaagaatggttgcaggataggggaaaggaagactaggtggttagagggaagagaagaaacagaaggggctcagttcaccttgataaggtgcttccgagctgggatgagaggaagggaaaccttatagtatgctatgaagagtagtaataatagcagctctttt

SEQ ID NO: 16664 - DNA, 587 bp, Macaca Fascicularis
  misc_feature (1)...(587): n = A,T,C or G
gcggacacgaacagggtcgagcttctcggtgcgctctgtgaaggccgtgcaacatgggaagcccatcttcnnnnnnnnnnnnnnnnnnnnnnnnnnncagcccagccccannnnnnnccagttctccatgcccactgtgccaccaccagaagagctgcttgactgtgagaccctcattgaccagtatttaagggaccctaacctccaaaagaggtacnnnnnnnnnnnnnnnnnnnnnnntgctcaggaggtccccattgagatcaagccaataaacccatcccccctgagccagctgcagagaatggagcccaaacagatgttctgggtgcgagcccggggctatattggcgagggtgacatgaagatgcactgctgcgtggccgcctatatctccgactatgccttcttgggcactgcagtgctgccnnnnnnnnnnnnnnnnnnnnnncacttcatggtctnnnnnnnnnnnnnnnnnnnnnnnnnnnnnnnnnnnnnnnnnnnnnnnnnnnnnnnnnnnnnnnnnnnnnnnnnnnnnnntggtggctctcgggggctggtccatgggcggctgtggcgtcagg

SEQ ID NO: 16665 - DNA, 743 bp, Macaca Fascicularis
  misc_feature (1)...(743): n = A,T,C or G
catggggtgacannnnnnnnnnnnnnnnnnnnnnnnnnnnnnnnnnnnnnnnnnnnnnnnnnnnnnnnnnnnnnnnnnnnnnnnnnnnnnnnnnnnnnnnnnnnnnnnnnnnnnnnnnagaggaattcattaatgacatttctgggggtaaacccctagaagtggagatggcagggatagaatacatgaatgatgatcctggcatggtggatgttctttacgccaaagtccatatgnnnnnnnnnnnnnnnnnnnnnnnnnnnnnnnnnnnnnnnnnnnnnnnnnnnnnnnnnnnnnctggactaatagtgaaagagtggaatagtgtgaaactgcatgctacagttatgaatacacnnnnnnnnnnnnnnnnnnnnnnnnnnnnnnngtacaannnnnnnnnnnnnnnnnnnnnnnnnnnnnnnnnnnnnagagaatcatttgatggccgaaatattttaaagttgtttgagaacttctactttnnnnnnnnnnnnnnnnnnnnaattcacatctctcagaggttcaccatagacagcttnnnnnnnnnnnnnnnnnnnnnnnnnnnnnnnntctcctgaggtagatcttggaaagcactagaaactgaacatcctcaccaggtgctgaagaaaagtctcttcattttaattgccaagcagagatgtgcacatttggatggtgnnnnnnnnnnnnnnnnnnnnnnnnnnnnnnnnnnnnnnnnnnnnnnnnccagccgagat

SEQ ID NO: 16666 - DNA, 791 bp, Macaca Fascicularis
  misc_feature (1)...(791): n = A,T,C or G
atgatagcacagannnnnnnnnnnnnnnnacaatcataggaggcatcgttttttggcgtttgcatntnntgcactatttataagccctgattctggtttttnnnnngctgtttgttcatctgtatttagtttaaaatagatattttctgtacatagtgtacattacaactaaaagtgatggaaaaatactgtattttgtagcactgatttgtgagtttgacccattatgatgtttgagatataatcattgnnnnnnnnnnnnnnnnnnnnttttaaaagaaacctgacttctaagtgtggggtttttttctctccagcataattatgttaatatagtccccattttnnnnnnnnnnnnnnnnnnnnnnncagtggggtctgccatgcgattttctttcagcactgacccctttttaaggaatacaaattttctccttcatcacttaggtgttttaaagatgtttaccttaaaaattttcttggggaaagaatgaattaatttctatgttttaaaacannnnnnnnnnnnnnnnnnnnnnngtttaatcatcggtcttttcaaaattaggtgtttaaaaaaagacatatatgatattactgttatatcaataacatggtacaagaagaactgtctgccaggtcattcttcctcttttttttttttttaattgggtaggacacccaatattaaaacagtcaatatttgacaacgtggaattaccaaattaaaagagaatactatgaatgtattcatattttttctatattgaataaacaatgtaacatagata

SEQ ID NO: 16667 - DNA, 702 bp, Macaca Fascicularis
  misc_feature (1)...(702): n = A,T,C or G
attcagccgttgctacctcgattcnnnntgtgttgacagaggctgggggcagtgccagcctgattcttccaacctacctgccatttgttcccgccttcagatggatggacagtttgctggctattgataggagtagggactgggtgggggcttctccctctacccagggctgggctgatccccctactgcaactaactgttccccccgcaccccaaacccccagttgaggaattgagagggtgcaggctggggtcaggacatgctgtggatgcttgtgcctatggggagttattccaacccacctattctgtctaatccccatggctttgcaccaaatcctccacccctccaattgggaggggactgttcaccaccttgtggtaagggacaacaccctaaggctggtgccagtagttatgagtagcctaccaccccctcccttacagtaaccgccaccccttcaggatcagtcaagggaaagtactagagcccctgggtagggaaagaaaggagagaaaaaccataaaaggaatacttataatgtgaaggtttgtaaatagtccatgatgatgtcgtggcagagtctgatttctatatagaggtgacttttttttttaagtactgtgcaagctctgtacttctagaatgtgggaagtggcttggggaagatggcccccagcctaggaagactgttgtgttat

SEQ ID NO: 16668 - DNA, 762 bp, Macaca Fascicularis
  misc_feature (1)...(762): n = A,T,C or G
ataatatatgaaattgactttccttantttatagataaggaaaaagaaattgtgaaaggtgaatttacttaattagtgaaagttacataactaattaattacagcagtctgtactatataatgcagaggacgattctccctgtaataggaactagaagctattactaaaaatataatagacagaattaaaagaaggaatgataagaatttaacttacaaaatattgttaattaaaattttagatacttaatgtttatttaacttaaataatagataactgtcagataaaacttcattttactaatgagctgtgattttcttaggaattgatgaaggcttattggtatcaagaatttaaaccaaattaaaactgacacaggacatttagatacataataaaatttgagctacataagtatatggaaaataatgtaccttgattattatgaaacagagcgtcttgaaattcagttttactccaaatgtacttttaatacttacagattctaagattacattgtaaaattccaggttgtcataatgttaagataggaaagtagaatataaagtatcaacaagtgtggttatacgttttgttttagatatttaatccttacttggggaaaaatcaacatcaaagtaaattattgttttaataacaactttaaattgccaacctctgagaggtgaaaagctatgtaaatagaaggaatggccaattcaaaagaatagtagacgtggtagtgccatgagtgtattcta

SEQ ID NO: 16669 - DNA, 716 bp, Macaca Fascicularis
  misc_feature (1)...(716): n = A,T,C or G
tgccctgggatgtggaagtaaaaagtaaaaatttatgttgaatgtaataataatgtaagcaattgagccttgaaaatgtacccaaaattcaagaagaatatttcttaatttctcatttgttttattttagcaaaaaatggggaaaaaacagaatggaaagagtaaaaaagttgaagaggcagagcctgaagaatttgtggtggaaaaagtactagatcgacgtgtagtgaatgggaaagtggagtatttcctgaagtggaagggatttacagatgctgacaatacttgggaacctgaagaaaatttagattgtccagagttgattgaagcatttcttaactctcagaaagctggcaaagaaaaagatggtacaaaaagaaaatctttatctgacagtgaatctgatgacagcaaatcaaagaagaaaagagatgctgcnnacaaaccatagaggatttgccagaggtattcatcctgaaagaataattggtgccacagacagcagtggagaattgatgtttcttactgaaatggaaagattcagatgaggcagacttggtgnaggtgaaagaggcannnatgaagtgtcctcgaaattgtaattgcttttatatgaagagagactaactgggccttcttgtccagaagatgaagctcaataattgttcacattgtttttttatatatatttatatatatatataaaatttgggtct

SEQ ID NO: 16670 - DNA, 700 bp, Macaca Fascicularis
  misc_feature (1)...(700): n = A,T,C or G
agttgtgggttcctcagggncnnngcattgctaacgatggtcccatttgctgtgtgagaacccccctcaaccccttcctcctccctctgggggtgaagtgggagtnnnnnnnnccctttttttaacaaaagggctcagtgcagagaagtggaggcctctgaggtttgaagggctctgtgagttagagctgtcacatgttctcctggttcttgagttttcagcaggtcctgaaaaggaaggctctgctggccccgtgccttcctgagcttctctccccttccctcccctctcttttcttgccgagtttgctttgnnnnnnnnnnnnnnnnnnnnggaggagggttcatccccagggagggcccagggctggagtccccagtctctgtgctgtgggcacaaagagacttcagctcttcccgtcgccttggctttttcctgagcaaacacacaacaaacaaaaaggccagagaagagcacagactctgtccctctcacagctctccggannnnnnnnnnnnnnnnnnnnnnnnnnnnnnnnnnnnnnnnnnnnnnnnnnnnnnnnnnnnnnnnnnnnnnnnnnnnaagtcatctgcctgggcagccacctctcagattcctgtcttcgtttcagacacttgccccagaagcatgcccatgtccaccagccaatgtgcccgtgtcccccccatcagccaagcga

SEQ ID NO: 16671 - DNA, 674 bp, Macaca Fascicularis
  misc_feature (1)...(674): n = A,T,C or G
ccccaccaacacagggcagccgtccacacccctccagactggctggctgggctcaggagcccctggcatccacctgggcctctgttctcccagccgggaccaggcatgacacccctgctgccccttccttctctgagaatccgtttcatcgtcttctgcagtgacagagcatgagacaggttgtgtctctcnnnnnnnnnnnnnnnnttaggaactgatggatctctctttgcacctgatgtccccaaggcacggccacatgcaaaacacggccagccttgcgcttccgatcatgctccaccatgagacacttccaaaccagaacgcccctcagaaagggaccctttacccactaacggcatcttttttgtctttttagtcacaggaagaataatgaagttattgcttaaaaggacttttctgttttcttcaagaaaaaaaaaatacacttgagtttcactattaatgaatttcagtactaatagatattctttttttctccctaaataattaagtcccacatgtacatggggtttcggctcctcttgatctgcaactgaattgttctctttgtagagaaattgtcttgaagagttacattaatttttgcaatctgtaaaaccgtttcctgctgtgtcacctaagtctcagataactaactgcctccaagacag

SEQ ID NO: 16672 - DNA, 664 bp, Macaca Fascicularis
  misc_feature (1)...(664): n = A,T,C or G
atgatgttgatgagtatatgcaggcccagctnnncctagctgnnctgaacattgctacacatgtcctgaagccagggggctgctttnnnnnnnnnnnnnnnnnnnnnnnngatgtgacgctcctctacagccagctgcgagtcttcttatccagcgtgctgtgtgccaagcccaggagcnnnnnnnnnnnnnnnnnnnnnnnnnnngctgtctgtcagggctatgaccctccnnnnnnnnnnnnnnnnnacctgagcaaacccctgatggaccattcttacgatttcaaccagctggatggtcccacccgcatcattgtaccttttgtgacttgtggggacctgagctcctatgattcggaccgcagttacccactggacctagagggcggctcaaagtacaagtacactccacccacacagccccccatctcgccaccataccaggaggcctgcacgttgaagaagaaggggcagctggccaaggagatccgcccccaggactgccccatcagcagagtagacacgcttccccagcccctggtcgcccctcagtgccacagcctgctggcccctgaggtctggaaatgtgactctcaacccgcattgaccccttccctgtgtgcctctttctgacccaaatctcatggtttctggggccaaaa

SEQ ID NO: 16673 - DNA, 783 bp, Macaca Fascicularis
  misc_feature (1)...(783): n = A,T,C or G
tcctggcagagatgacaggcacagagcttgtgcagtgccagaatatcattagtgttcccttctttagtggtttgcttaaatttnnnnnnnnnnnnnnnnnnnnnnnnttctcctaggaaatggtgaagtctnnnnnnnnnnnnnnnnnnnnnnnnnnnnnnnnnnnnnnnnnnnnnnnngtattatttggagtaaattttttccacgtcaagttctggccttnnnnnnnnnnnnnnnaaggaacttagtctgttatgaacccaggttgatgagagaccagtccttgtggaataagattccctttaaaaactctttagccagttgtgacatcaaccctagacctgtctgccttggcatttgctctcaccgtctgctgggctatgtaggcaggtttatcctccacttcttatgtggttgaaccagtgtgttttttggtaaaatggtgattgtagataagcttagttcccccaccccctgccccctgcccctgcctcttttcccaattcccttccttatgctggacttttaaagcttaaaaaaaaatcctgattgaatataaatgcctaatttcattctttgtgaaatggttgcttccttctaattccctaattgtgctgtgttcgtgtcttgcannnnnnnnnaacattcccttctccttttgtactgnnnnnnnnnnnnnnnnnnnnnnnnnnnnnnnnnnnnnctgtctttttagcaaaaaatttcagtaaagtgttttctgtaatctttttttaaaagatgagaactaattattgtccatac

SEQ ID NO: 16674 - DNA, 728 bp, Macaca Fascicularis
  misc_feature (1)...(728): n = A,T,C or G
gatgtagcccatcggatgctggccacaggcgagtgtacnnnngaggatctgtgtttctccctacaggaaactgtgtttgcaatgctggtagagatcacagagcgagccatggcacattgtggctcccaggaggccctcattgtgggaggagtggggtgtatgtattactgaacagtgttcctctttcctgttcttagcactgtgcgtcttccttctgatactcttaaatcattaagnnnnnnnnnnnnnnnnnccaatccttgccccggtcccctacgtcattgttctaagtaagtnnnnnnnnnnnnnnnnnntggaccatgaggagatagctaaaactaagctaatcctgttccctacctctttgtaggtaatgtgaggctacaggagatgatggcgacaatgtgccaggaacgtggagcccggctttttgctacagatgagagattctgtattgacaacggagccatgatagcccaggctggctgggagatgtttcaggctggacacaggaccccactcagtgattctggggttacacagaggtatcggacagatgaagtagaagtgacctggagggactaataagattaacagaatcacagtagacagttccttaattggaacccaaaggaccctgtgcctcaatcnnnnnnnnnnnnnnncgggagtcctagcaaagctgtagactccaagcaaggcttggggtcctttatggaaccccaaga

SEQ ID NO: 16675 - DNA, 652 bp, Macaca Fascicularis
acgagaacgataaatgctggagaagagctgacttttgattatcaaatgaaaggttctggagatatatcttcagattctattgaccacagcccagccaaaaagagggtcagaacagtatgtaaatgtggagctgtgacttgcagaggttacctcaactgaactttttcaggaaatagagctgatgattataattttttccccaatgttaacatttttaaaaatacatatttgggactcttattatcaagattgtacctatgttaatttacaattcatgtttcaagacatttgccaaatgcctctgaagagagggtcactgggtctcatagattgatttgaagtctacatatctgtagtgcttagagaccaaactaatggaaggcagactatttacagcttagtatatgtgtacttaagtctatgtgaacagagaaatgcctcccgtagtgtttgaaagtgttaagctgataatgtaattaacaattgctgagagatcaaacattcagcttgccataaacctcaaatttggagaaacagttaatttgggcaaatctaccagttctgtttttgctactctgttgtcattcctgtttaatattcactgtacttgtatttgagacaaataggtgatactgaattttatactgttttc

SEQ ID NO: 16676 - DNA, 678 bp, Macaca Fascicularis
  misc_feature (1)...(678): n = A,T,C or G
tgggcatgannnnnnnnnnnnnnnnnnnnnnnnnnnnnggaggctgaggcgggagaatcacttgaacccaggagctgaaggttgcagtgagtcgagattgcaccactgcactnnnnnnnnnnnnnnggagnnnnnnnnnnnnncataagcaaaaaaacaaacaaacaaccaacctagcgggtgaaatgattcagtgacccaaggacagccagagnnnnnnnnnnnnnnnnnnnnnnnnntgctgaaatggagannnnnnnnnnnnctcaggcttgggacaggcccctgcctgttcctcgggcaccaggtgattaggagaggtcgaatctcatttccacgagagtgaggataaagagtgggctgccaaagaggactcctctcataaacatcgannnnnnnnnnnnncccgcctgtgatcccaaactcctcctgcggtctgggatcatgagtgtcctgcgggttcatctcggacgggcggtgcatgaacagactgcagggaacgtctgggagaaccagcttcacaacagatataataaggaagaagtttgaaatannnnnnnaattgcgaaagtgtgacacacagatannnnnnnnnnnnnnnnnnnnnnnnnnnnnnnnnnaacagacttgcttgactctggagttaccacgaaccttcaatttgtnnnaaaaaaaagc

SEQ ID NO: 16677 - DNA, 748 bp, Macaca Fascicularis
  misc_feature (1)...(748): n = A,T,C or G
aatatcatgctgccatctgtcattctaaattatactcatgagttacaattgatacaggaattattagtagtaattcttgtctgttcatgtacaatgaagaacactagctacattttcagaagttaacatcaagccgtcaaacctgggtatagtgcagaaaacgtgtggcacacactgaccacacattaggctgtgtcaccatggtgtggtgttcctgctggaagaattctggcacactacttggggacataatttcagtcggaaatacgccactgtcagaatttttcccccctctttgcagtggggctaggacagttgattcaacaaagtatttttttcttttttctcagtcctaatttcaannnnnnnnnnnnnnnnnnnngcattccaggtaacaggtgtgtacgtaaagttaggaactcactctttagatattacatccagcttctcatgttaaatatttgtccttaaagggtttgagatgtacatctttcatttcgtatttctcataggctgtgccatgtgcggaattcaagttaccaatgtaacacnnnnnnnnnnnnnnnnnnnnnnnnnnnngtactcattgcagtcttatttaaccaggggtcctaaccactaacattgtgacttttctttgagacctttcctctcctgggtactgaggtgctatgaagccaactgacaaagatgcatcacgtgtcnnnnnnnnnnnnnnnnacccgatttgtttatttgcaattgagcc

SEQ ID NO: 16678 - DNA, 739 bp, Macaca Fascicularis
  misc_feature (1)...(739): n = A,T,C or G
aagagtaagagaaaaagagcaaagatannnngagaaaaagagaagaagatgaagaaacccagcttnnnnnnnnnnnnnnnnnnnnnnnnnnnnnnnnnnnnnnnnnnnnnnnnggaaccatagccattgaaatggataagggaacctatatacacgcactcgacaatggcctttttaccctgggagctccacacaaagaagttgatgagggccctagtcccccagagcagttgacggctgtcaaattatnnnnnnnnnnnnnnnccctgaaatctggctatggaaagtatcttggtatcaattcagatgggcttgttgttgggcgttcagatgcaatcggaccaagagaacaatgggaaccagtctttcaaaatnnnnnnnnnnnnnnnnnnnnttcaaatagctgctttattagatgcaatgaagctggggacatagaagcaaaaagtaagacagcaggagaagaagaaatgatcaagattagatcnnnnnnnnnnnnnnnnnnnnagaaaaaagatgacattccagaagaagacaaaggaannnnnnnnnnnnnnnnaatcaattatgtaaagaaatttcagagcttccaagaccacaaacttaaaataagtaaagaagacagtaaaattcttaaaaaggctcggaaagatggatttttacatgagacgcttctggacaggagagccaaattgaaagccgacagatactgcaaatgactgggatttttgtttctgct

SEQ ID NO: 16679 - DNA, 637 bp, Macaca Fascicularis
  misc_feature (1)...(637): n = A,T,C or G
ggggccagcaggaggtgccggctnnagnntccaccatagactcagtggcctggcctccccagaccccagagccaagaacactaagcactcgccggccctttggcaccttcgccctccctcccaactcaacccggccgttgcttctgtatatagagaaataagttattggccgcgccccacccttcagtccacggtactacccgggcctcccctcgtccctcctctagtggtaccgcccaggccttaatcacccccattccgtgcggtggtatctcccaggctccacattctcgggagtggcgcctcctaagtggctcccgggaccttctcgcgctcctcctggcctttgagggatgcgtcctaccccgccatcgccccgtgccccaggacggggacctccccttagtcagtcctcccaccgccgggccctgccccgcatcccggccttatgcactgcccctcccgcccggccccgcccaggcacggcccgaccccgccccgggcaccgcccaccgagccatcctgccacgcctctccccacgcctgcagcttctcgcgaggggcggcgacggtcccttggtggcaggaggggctccccctgttgcgggtgaggcggctgtctctatttcagatgtgc

SEQ ID NO: 16680 - DNA, 755 bp, Macaca Fascicularis
  misc_feature (1)...(755): n = A,T,C or G
gtagagccatagaaatatctggctggggcagcagtccttcttcccttnnnnnnnnnnnnnnnnnnctacacttacgggtgtttctccaaaccctttcccaattttattcccttgttcatttcaagagctcnnnnnnnnnnnnnnnnnnnaagcacctccaggaggcaggttggaaggcaggcaccacgnnnnnnnnnnnnnnnnnnnnnnnnntagtagggcttccggggtgcccgctagnnnnnnnnnnnnnnnnnnnnnnnnnnnnnnnnnnnnnnnnnnnnnnnnnnnnnnnnnnnnnnnnnnnnnnnnnnnngggtggaatggatcacatgagggtttcttgttgcttttggagggtatgggggatattttgttttggnnnnnnnnnnnnnnnnnnnnnnnnnnnnnnnnnccaagcccattgtttctgtcatggtttccatctgtcctgagcaagtcattcctttgttatttagcattttgannnnnnnnnnnnnnnnnnnnnnnnnnnnnnnnnnnnnnnnnnnnnnnnnnnnnnnnnnnnnnnnnnnnnnnnnnaaagagttnnnnnnnnnnnnnnnnnnnnnnnnnngtgagggtggnnnnnnnnnnnnnnnnnnnnnnnnnnncattgctttttctatcaaactacccataagcctttaacctttaaagaaaaatgaaaaaggttagcgtttgggggccgggggaggactgacctcttcataagccagtacgtctgagctgnnnnt

SEQ ID NO: 16681 - DNA, 1659 bp, Macaca Fascicularis
  misc_feature (1)...(1659): n = A,T,C or G
gagcgagcaggccggcggacncnnnnnnnnnnnnnnnnnnnnnnnnnnnnaggttgnnnnnnnnnnnnnnnnnncgcnnnnnnnnnnnnnnnnnnnnnaccctggatgtcctatctgagcatcgtagccatctttggctttgtggccttctttgaagtgggtcctgnnnnnnnnnnnnnnnnnnnnnnnnnnnnnnnnnnnnnnnnngnnnnnnnnnnnnnnnnnnnnnnnnttgcaggcttctccaactggacctcaaatttcattgtgggcatgtgcttccagtatgtggagcaactatgtggtccctacgtcttcatcatcttcactgtgctcctggttctgttcttcatcttcacctacttcaaagttcccgagactaaaggccggaccnnnnnnnnnnnnnnnnnnnnnnnnnnnnnggggggatgccagccaaagtgacaagactacccgnnnnnnnnnnnnnnnccctgggggctgattcccaagtgtgaggcgccccagaccaccagcccggcctgctcccagcagccctaaggatctctcaggagcacaggcagnnnnnnnnnnnnnnnnnnnnnnnnngatgtcagccgagccgggcctggggctcctttctccagccagcaatgatgtccagaagaatattcaggacttaacagctccaggattttaacgaaagcaagactgttgctcaaatctattcagacaagcaacaggttttataatttttttattactgattttgttatttttatatcagcctgagtctcctctacccacatcccaggcttcaccctgaatggctcagtgcctgagggtggggactatgccctgtccagacacttgccttcttcaccaagctaatctgtagggccggacctatgtcctaaggacacactaatcgaactatgaactacaaggcttctatcccaggaggtggctatggccaccccttctgctggcctggatctccccactctaggggtcaggctccattaggatttgcccattcccatctcttcctacccaaccactcaaattaatttttccttacctgagaccagttgggagcactggagtgcagggaggagaggggaagggccagtctgggctgccgggttctagtctcctttgcactgagggccacactgtcaccatgagaagagggcctgtgggagcctgcaaactcactgctcaagaagacacggagactcctgccctgttgtgtatagatgcaagatatttatatatattttttggttgtcaatattaaatacagacactaagttatagtatatctggacaagccaacttgtaaatacaccacctcactcctgttacttacctaaacagatataaatggctggtttttagaaacatggttttgaaatgcttgtggattgagggtagggaggtttggatgggagtgagacaaaagtaagtggggttgcaaccacttcagcggcttagactttgactcaggatccagtcccttacacgcacctctcatcagtgtcctctattgctcaaaaatctgtttgatccctgtgacccagagaatatatacattctttatcttgacattcaaggcatttctatcacatatttgatagttggtgttcaaaaagacagcagttttgtgccaaccgtgat

SEQ ID NO: 16682 - DNA, 558 bp, Macaca Fascicularis
gcaaggctggctttaagagcacaaggagggaaagtaacgaaagggctggactactataaaagttacaaatacgtagttagaccaatagatttctatagtcaggtttttgtcatgtaatttattaactattacagaaacacaacgaagaatatcaagtatttctctggctcttgacagaaaaaaaaatcagttgacttaaccctttgctgtcaaaagagttggcgtttcctggtctgggtgctactgccaaacgttctggtacttagagtcgggatgcacaacttccaccaccgacttatcaatgcagccgcctgtgtattgcaattggccgttaccttaagcactgagccacccgggtttagttcagccatttcaagagtatatttaacgtcggtagttctgctttattaaaatgcagcagaggtaatattatgtcccttccgtttatagttctctgagagagttatattttttggtttcgttttgtgttttattaagcattttatatcttgtatttatccctgaacatgttttgtacttttttttttttttaaagaa

SEQ ID NO: 16683 - DNA, 773 bp, Macaca Fascicularis
  misc_feature (1)...(773): n = A,T,C or G
gaagtagagaaagaaggcgaagcagaagtagagatcgacgaagaagcagaagccatgatcgatcagaaagaaaacatagatctcgaagtcgggatcgaagaagatcaaaaagccgggatcgaaagtcatataagcacaggagcaaaagtcgggacagagaacaagatagaaaatccaaggagaaagaaaagaggggatctgatgataaaaaaagtagtgtgaagtccggtagtcgagaaaagcagagtgaagacacaaacactgaatcgaaggaaagtgatactaagannnnnnnnnnnnnnnncagtgaagacattaaatctgaaggtgacactcagtccaattaaaactgatctgataagacctcagatcagacagaggactactgttcgaagatttttggaagaatactgagaacggcataaagtgaagatcgacatttaaaaaatgaggtgaaagaaagctatagtggcatagaaaaagtataaagctcagttagtttttttattattattattattattaaaagttaattcaggactgatgtgacctaccagatttcagaacatgtgttaatagtatatatgccactgaaaacttaggtcctgtatcatacttttttctttaagacttttnnnnnnnnnnnnnnnnnnnnnnnggcttgctcagtgtttaattgcaagttttcattcttggannnnnnnnnnnnnnntaaacgttagtattcgtgtgaatcagactaagtgggatttcatttttacaactctgctcta

SEQ ID NO: 16684 - DNA, 738 bp, Macaca Fascicularis
  misc_feature (1)...(738): n = A,T,C or G
gccacataaatggaaaactgcatgacaatagacaaactgtcctnnngctataggagggaagctggaatctctgactatcttacaattggagaattagtgaagcaacttgtagaaacagtttcatgtggaggaaatcttttgatgaatattgggcccacactagatggcaccatttctgtagtttttgaggagagactgaggcaaatggggtcctggctaaaagtcaatggagaagctatttatgaaacccatacctggcgatcccagaatgacactgtcaccccagatgtgtggtacacattcaagcctaaggaaaaattggtatatgccatttttcnnnnnnnnnnnnnnnnnnnnnnnnnnnnnnnnnnnnnnnnnnnnnnnnnnnnnnnnnnnnnnnnnnnnnnnnnnnnnnnnnnnnnnnnnnnnnnnnnnnngatttctttggagcagaatggcattatggtagaactgccacagctacccattcgtcagatgccatgtaaatggggctgggctctagcactaactaatgtgatctaaagtgcannnnnnnnnnnnnnnnnnnnnngttacgtctaagactaggaactatcgggtgtctataattatagcatatggagaaagcaaatgtaaaattggataagaannnnnnnnnnnnnnnnnnnnnnnnnccctttttcccactaaattttttcttaaattaccattttaactcnnnnnnnnnnnnnnnnataa

SEQ ID NO: 16685 - DNA, 702 bp, Macaca Fascicularis
gagccaggatgaggcccctggggaccccattcagcagctcaacctcaagggctgtgaggtggtccccgatgttaatgtctccggccagaagttctgcattaaactcctagtgccctcccctgagggcatgagtgagatctacctgcggtgccaggatgagcagcagtatgcccgctggatggctggctgccgcttggcctccaaaggccgcaccatggctgacagcagctacgccagtgaggtgcaggccatcctggccttcctcagcctgcagcgcacgggtggcgggggccccggcaaccacccccagggccctgatgcctctgctgaaggcctcaacccctatggcctggttgccccccgtttccagcgaaagttcaaggccaagcagctcactccacggatcctggaagcccaccagaatgtggcccagttgtcgctggcagaggcccagctgcgcttcatccaggcctggcagtccctgcctgacttcggcatctcttatgtcatggtcagacttccagcttccctgacaagtaggtgtagacggagaccaagttctgaccagcgctctgtgaatggaagtgttgcagctttctggggtgtgccctgtctttgggcctccccctcttttcctggctagcttgcagttgtatttgtggcaagtcatctggaccatgaggatgaggacacccccaggaa

SEQ ID NO: 16686 - DNA, 1236 bp, Macaca Fascicularis
  misc_feature (1)...(1236): n = A,T,C or G
atgccaagtattattttgannntcgtnnnctggcagaagcgaacaacctgagctttcccttggagcccctgagcagggagagggctcacaagcttgaggccatctctcgcctctgcgaggacaagtacaaggacctgagaagatctgcgaggaagcnnnnnnnnnnnnnnnacaacctgactctgccccggtggtccccggccatcatttcctaactgcggaggcccgccggaggccacaccatcccttagtttctccttcagtttgagaaaagacagacttggggtgggtttgtttttgttttttctttccttttcttttttaacgcatagttccgtcaggctgcctggatgagcgcccacgcagcaaggcttggaggaagcgtcagtaccctggaggtcccagctggctctcaccactgtcagcaacagcacttcctttgtggaggaagcagactccaatcctgcaggaggaaataaagggaaagggaagtcgtggagaggcagggaaaatgattaagcggcccggccctctggagtccccgtgggggcggtagctgaagttggtgagcgcagcggtggatnnnnnnnnnnnnnnnnccagggctggaccggtgtgtcctgtaagacttcttgcattccttctgctgcttttttgggatgggggggatttttgttcgtttgtttttgccctgttnnnnncntggtcccacagagcaggggatgtagtttgtacccaccatggcgcgtgggcgctnnnnnnnnnnnnnnnnnnnnnnnnnnnnnnnnnnnnnnnngcgctgtcttctgagctttcttcnnnnnnnntgggctgtgctcgttccatttctgtacaccctcattttataccgtttttcttcaacannnnnnnnnnnnnnnnnnnnnnnnnnccaaaagtatccctttccctccttattcctcaccccaagagcattctagatcacatgggtgcttgtgccttccgattttcttgcatttgtttttttcctgacctgaagttgttgttacaaaatcagtcagacttcgtgggctgaaggacacnnnnnnnnnnnnnntgtccccgtgagagttctgcagagtgctgggcgtgcacccgaagctaccgagtaggnnnnnnnnnnnnnnnnccctgcctaatccattcctctccttccaagtccattgttgcaagcaatattcttctcaatttttatatgttcacnnnaaatcaaagtta

SEQ ID NO: 16687 - DNA, 798 bp, Macaca Fascicularis
tagccagagagtatgactatgttcgattatttttaaagatgaaacatgtatgataggatggattctttctgtattctgagagtgtacagtatagattataatgaaagtttatatcaacagggtttcgttggctctgccatatattataagcaaaagagattggtaaagtgccacagtattccagataacttttcagttgcggcctttcttctcgttctttaatttgaaacctagatacatgcagtaaaaactaggagaatgacttttacccttggggacggccaagttttgttgataaacctatttcctagcatgccttcaggaagttgcgccagaccctagattgtgaaggagccactgttcttctgttgtacgagctccctgaaccattgttcagaggaccaacgtaacatcgcttcatgggcatggcccatggagcatctgggtgacatctgtctacagtattggctcttctgcgaggctaatacacaaggcctctcttccacatggtcatttgcaaacctcccccagcccctaccatccaatgtggaaggaaaacaagaactgcctgaagaagagtccaagctacagatacacagcgtgtgcatcgcggctgtcaccttcctcctccctcttctgtatcctcagagatgctgcgtggatgtttccttaacctcagctgacttccctgtgaatgtcttaatgctagttcagggcctccgggcattgatttgtacagtggcaactccccaatggggcttctgttatcgtttgtgtgctttctctgtcataaaagaa

SEQ ID NO: 16688 - DNA, 730 bp, Macaca Fascicularis
  misc_feature (1)...(730): n = A,T,C or G
cagaaagagaagaannnnnagaaacaggctgncnnntccaaggncnnntcagtttccattaacgtcaannnnnnnnnnnnnnnnnnnaggagcaacaacgttgaggactgcaaggtgatggtgagnnnaggagataagatggaagatgcaacagccaatggtcaagaagactccannnnnnnnnnnnggtccacactgaaggccctgggcctgcctcagccagacttccacagcctcatcctggacctgggtgccctctccttcgtggacactgtgtgcctcaagagcnnnnnnnnnnnnnnnnnnnncttccgggatatcgaggtagaggtgtacatggcggcctgccacagccctgtggtcagccagcttgaggccgggcacttcttcgatgcatccatcaccaagaagcatctctttgcttctgtccatgatgctgtcacctttgccctccaacacccgaggcctgtccccgacagccctgtttcggtcaccagactctgaacatgctgcatcctgcccgagactgcacctctggaggttgtgacagggcacccttgagaagcccctcaaccctaagccgcctccaggtgctacccgggagtcccctccatgtacacacacacaactcagggaaggaggtcctgggactccaagttcagtgctccaggtctgggacagggcctgcagtcannnnnnnnnnnnnnnnntacggggagggaactggtgc

SEQ ID NO: 16689 - DNA, 689 bp, Macaca Fascicularis
  misc_feature (1)...(689): n = A,T,C or G
tggccctnnnnnnnggttggtgctngggcctccagccagggnnntccaggggaaccaaaccnnngctctcacctgtgggttcatgcccatcannntaattgtattgagaactcaaaatatacgtgcacttacataatgtgtggtnnntactcaagccatctattatctgcaacgcctggcttcgatnnnnnnnnnnnnnnnnnngtcatggcacccaaggtttttgattctgacccagcagtggtcctgaagagagctgatggcaagtctcgtagtcattttaattgaagggtgagcacaaccttgtgaactagcagnngattattccaagcgngaatttatctgttttttttttttttttttaagctgtagctaccaaatattttctcgaacgcattacttaacctattagnnnagtttagaatactttctgcttaatttttatacttaactcttcttcagtagaggggttacaaacgagtacaaaggttaaattacaaattcattcccagcctacggctctgggcacatttcctgttcttgaattctgctcctgaagaaggtgacacaaatgggacgttcaaatagtgagctcagaatcactttaaaatggaggtaacagccattacacctaaatttaatttattttattaaaataacataaaattgagggaccatcagataactgt

SEQ ID NO: 16690 - DNA, 750 bp, Macaca Fascicularis
  misc_feature (1)...(750): n = A,T,C or G
tatgcacattggtatacagtnnnngagaactggctnnnnnnnnnnnnnnnctacaggtaaaagaccataagcaaactgattatttaaaatgtaaaaaagaatatgaatgtcttattaaaacgtttcattgaatatatacagtctaaatttattatttaaattgtagtagcaaaagtcttaggtgaacaatcaactagtatttattgagctcctatttggccagagatggtcatatttaaacagaagtataagtttttcagtttcaacatttttttaaatttctatcagttatgacatccacgagcatcactttttgtgtctgtgtttttttgttttttgtttnnnnnnnnnnnnnnnnnnnnnnnnnnnaagcagtggtcagaaggctgtttcatacaagaacaggcagaaagtgcccattgttcttgattctaatagctacatctacttaatatcttcatttctaaattgactgcttttaccttttttctatgtttatgtaatggtatgcttgcatatatttcatgaatacattgtacatattatgttaatatttacacagtttaaaatatagatgtgttttattttgaagggagaaaaggaacattaacaggcatgtttgtacagttagaatatattagtaagatactgtttttnnnnnnnnnnnnnnnnnnnnnnnnnnnnnnnnnnnncaaagctgaagactttgtataaagcatttggattttgttcttatacggtctcttcaac

SEQ ID NO: 16691 - DNA, 755 bp, Macaca Fascicularis
  misc_feature (1)...(755): n = A,T,C or G
ccagaccggtggccaccaaaatcccagcctnnnnnagctaggcgcctcactcttngtctgacctnnnnnngccaggctgtcctcaccccgtgccctgggctgaggtcctaccagccannnnnnnnnnnnnnnnngaggtggggggtacagacctcaggtacatttgaccctgaggtcaaaaggggttcagtcaagaggtgggagaggaaaggggtagatggggggtggaatctgtaggaaagagaaaatctaagttgtccactgactgagcagcccccagggagtagannnnnnnnnnnnnnnnnnnnnnnggtgacaggtcagtaatgcccccagccccacccaagaggagggcagcatgggcctgtggtctgggacgtggactggatggcagcccagggtcacaggcataggataacatgtgctttggacctgctgagggagtaccttgggggtctgatggggccnnnnnnnnnnnagcctctgcagagatggaggctgcagccctcagaagggaggggaggaaagagactgagggccctggcctggggcatccatggggaagtggtggcccccagtcctcctctgctgctcccagccccctcctcctggggccctcagggatctcacaaagtcttccttggcccaaccaggcagatgccccgggctccagtggggggaggggtctggggnnnnnnnnnnnnnnnnnnctttctctgtgtcccccctccctcttctccgcggtgcggaaaaaa

SEQ ID NO: 16692 - DNA, 885 bp, Macaca Fascicularis
  misc_feature (1)...(885): n = A,T,C or G
ttatttggtattttggaggagatcacactaagagaacgttgattgcctcggctattgtgctggctggacactttggtcacttttgaagcatgttaataaatgtcactgattaaaacagctggagcatttccttcccattccagtgaaggagcagcagagtgaaatcctggcacccctcgccttcttgtgatgacaagaaggctgacagtcacagagtccaggagaaggtgctgctctccttgctttctgagtaaacggagtaatgttttctttttcttattttcccaaggaaagaaagggggaaaatatatttgtatgtttagaccagtcaaattctgtcattattttatcttcaacctgctgtatattagagcagctgaatataatatggaataagtttgaccaggtcaagttttaggatatagttgaatttctttaaaaagttttctattttatctaaaatctttctattatatctaaatcagaatgatcgtcctgcagcaaattcacattactgtttgctggctaatcgacagtatttatcagcatcactgtgtagcattctattttagcatctttgaattatgatcatttgatttggctaattacaaaaagtacaggtttaaactggacttaccttgagttaaaggcaaagaaaatctaaaaacataaatgttatgtttcataagaaatcagttgcatattatccattacatacttagtttttaaaagaagagtcaccttgaattattttttgagtcaccttgaattatttgatctctcaacctgctttctcatctgtaaaaaaggggggaggataactttcacagggtaattggtagcctaaataggagttacagaaaactgttnnaaataggaaagaac

SEQ ID NO: 16693 - DNA, 1122 bp, Macaca Fascicularis
  misc_feature (1)...(1122): n = A,T,C or G
cattccagctcgctcatgaagaatgtggctcatatgaccaaagtccacagtttctttattcctgatatagaatatctttcagatattaagggactgattaaatacttgggagagaaagttggtgttggaaagatttgcttgtggtgcaatgagaaagggaagtccttctactccacagaagctgtacaggcgcatatgaatgacaaaagccactgtaagctcttcacagatggcgatgctgctttggaatttgcagacttctatgattttaggagtagctacccagatcacaaggaagggaaggaccccagtgaggctgaagagttgccctcagaaaagaacttggaatatgatgatgaaaccatggaattgattctgcnnnnnnnnnnnnnnntgggtcatcgctccttgatgagatactacaaacagcgatttggcttgtccnnnnnnnnnnnnnnnnncaaaaatcggaaggccgtgggnnnnnnnnnnnnnnnnnnnnnnnnnnnnnnnnnnnnnnnnnnnnnnnnnnnnnnncttatgcgagagcgagacatgcaatatgtccaaaggatgaaatcaaaatggatgctgaagacaggaatgaagaacaatgccaccaaacagatgcactttcgggtccaagtgaggttctgagagtctgctgggattgagcgatcatctcctgcccaagtttcctccttgccctgaggaccagtgaaagccagatcataggagagacccttttgctgctacttcattggttctgacctaataataaaagttagaatcatatgagttttcagatgtcatttttgaatagtgttgaaaggttatgttttcnnnnnnnnnnnnnnnnntctactggaccctgggacttgcactgctgcctgacagttgcttcatcgcctcaactttaaatgatttatggttgtcagagtactgtgaggaatcaggaatgactnnnnnnnnnnnnnnnnactaactttccaannnnnnnnnnnnnnnntggcactgggacctatgtaagggggcttgaagccttatgtaggggcaaagttgaatgtcgcttatggaatgtatcgtggcacaggaggtagtgaatatctctgggcactgcat

SEQ ID NO: 16694 - DNA, 774 bp, Macaca Fascicularis
  misc_feature (1)...(774): n = A,T,C or G
atgactttnntactanaaatatggttacagctattatataaatatatatattctggtaatagttctaatatggagatgttgcgtgcaatgctggcctgtggcagtctgtgtaatgctttaacttgtatggaggaggccagactcagagctgagatgtggcctgaaccttccctgtatcgatcctttaatttagaactctcaagatgccactttctccccctctgccttttagtggtatctgaaatatactcaaaacagaaatttcctggtcacatcattaactgctaattctatatttataaagaattttcagatggacatatacaaatctgaactcaaaccatccccagtccagatacagggcagcgtgtaggtgaccacaccagagcctcagccttggtccttctcagccatcgggataggaaccaggcatttcttttaaatctcagaggtagcagtaaacttttcagtattgctgttagcaagtgtgtgtttgccaatagatatccattatactaatgtgccaagtaaatgttcattgcacatctgcttccactgtgtccccacgggtgccatgaagtgtgtgaggaacccctcatctggagggatgagcgctgcattgactactgctatcaggattgtgttgtgtggaatattcatctacataaattttatatgcacagtaatttccctttttatatgtcaagtaactatttgtaaaagttatactcacaaattattataatgattactaatatatttttccatgttcat

SEQ ID NO: 16695 - DNA, 765 bp, Macaca Fascicularis
  misc_feature (1)...(765): n = A,T,C or G
agatcaaaggaatgtggaggagtnntnatccaaagctctaactgttaaacaaacaggagaaatcacatcacaaaaattctgtacctgtcgtcaatgtgaaaatgccatcctttaaacaaatgagtaaaatcgacaggcgagcaaccatacgtctgtaattgctgtgcactgtcattcagctaagcaccagttttggtgtctgcaagaaaattcattatcagataactgataaaaacaggaaatttgtgaaaatatttttattaggtggatgaagcctcttgcacaattccagaaattcatagtagagaaattattcagtgagaaatcattttcttaatacagcagcacttctataatagatcagaattcacatggtgtagaacgctcagtgacatgaatggagggcagtcctcagtaaattactcattccttagtcaataccagcatttttccactgagaaaacaatcttgacatgatagtagaagaaccttcaggcagctttcctgtcaaaaaagacagggaagaaaactctaaaaagccattgagatgtatagctgggggacaagacataaagccatcaagcacatgcttgagaaaaaaaattatggttttgagcagactttctacttaaaatatgtgggatgaaatgtacaattctgaaataacctgggaatattgaatgcagaattgtgtaagaagtaataagattaaattagtactgtcaaaaatgcaagcattaaatgtcgttgctgaataataggtga

SEQ ID NO: 16696 - DNA, 738 bp, Macaca Fascicularis
  misc_feature (1)...(738): n = A,T,C or G
gagccagctggtnnnnnctcatacttggagaaagtnnnnnnactgnnnnnnnnnnnnnnnnnnnnnnnnnnnnnnnnctccttctctgagggcactgtcatctgtgtcactcgccgctactccgatggctggtgcgagggcatcagctcagaggggactggattcttccccggaaactatgtggagcccagctgctgacagcccagggctctctgggcagctgatgcctgcactgagtgggnnnnnnnnnnnnnnnnnnnnnnnnnnnnnnnnnnnnnnnnnnnnnnnnnnnnnnnnnntcttgggctgtgagctgtgttctgtccctcctcccatcatggagggaaggggtcctgcggagagagaacttacccagaggcctgttgcagatggggaagagctggaaacaaagaagtttgtcaacagaggacccctactccatgcagggcagggtctcctgctgcaagtctcaactttgaataaaatggnnnnnnnnnnnnnnntgnnnnnnnnnnnnnnnnggccaggagggattgaaaggcatcccaattctaaggctgctgctaattacagcccccaacctccaacccaccagctgccccagaagcagcatcttcccattccctcagtacccactaaaatgcagccacattggaccccagacacccctctgcagccatnnnnnnnnnnnnnnnnnnnnnnnnnnnnnnnnnnnnnnnnnnnnngtgttcatatgtg

SEQ ID NO: 16697 - DNA, 659 bp, Macaca Fascicularis
  misc_feature (1)...(659): n = A,T,C or G
cctggaatccagggaggaagctgcccagctcctcagaaggggagacactgtcaccaccattgtctcaaaattcttgaagctcagcctgttctcagcagtagagaaaccactaggactactttttaccaaaagagaagcagtctgggtcagatgccctgccaggaaagggacatggacccacgtgcnnnnnnnnnnnnnnnnnngccaagacagatggggctttatggccctgggggtgcttctgcggcctccacaaagttgtccttacctcctaggggcacctctgctgccattctgaggaacatctccaaggaacaggagggactctggctagagcctcctgcctccccatcttctccctgcccagaggctcctgggcctggcttggctgtcccccgcctgtgtccccgggctgcaccccttcctcttctctttccctgtacagtctcagtcgcttgctcttgtgcctcctgggcaagggctaaaggaggcctctccatctcacctcggggaggctgccctcaatgtgggagtgaccgcagccagatccgaaggacatttgggagagggatgcccaggaacgcctcatctcagcagcccgggctcggcattccgaagctgactttctataggcaattttgtacctttgtggagaannt

SEQ ID NO: 16698 - DNA, 749 bp, Macaca Fascicularis
  misc_feature (1)...(749): n = A,T,C or G
tcaaattaaacaaggctgnnnngtactttggaatactgagttgtttaggacnnnntgttgtggcaaacttccagaannnnnnnnnnnnngctgcacatgtaagtggagctgtgcttacctttggtatgggctcattatatatgtttgttcagaccatcctttcctaccaaatgcagcccaaaatccatggcaagcaagtcttctggatcagactattgttggttatctggtgtggagtaagtgcatttagcatgctgacttgctcatcannnnnnnnnnnnnnnaattttgggactgatttagagcagaaactccattggaaccccgaggacaaaggttatgtgcttcacatgatcactaccgcagcagaatggtctatgtcattttccttctttggttttttcctgacttacattcgtgattttcagaaaatttctttacgggtggaagccaatttacatggattaaccctctatgacactgcaccttgccctattaacagtgaacgaacacggctactttccagagatatttgatgaaaggataaaatatttctgtaatgattatgattctcagggattggggaaaggttcacagaagttgcttattctgctctgaaatnnnnnnnnnnnnnnnnnnggctgacagtaacattgatgaatactgataatcaggaaacatgaaagaagccatttgatagattattttaaaggatatcatcaagaagactattaaaaacacctatgcct

SEQ ID NO: 16699 - DNA, 741 bp, Macaca Fascicularis
  misc_feature (1)...(741): n = A,T,C or G
ctgctactggnatcagaattgaaaatcatagtttaagtaaatgtttaggtacagattacaaaaatctgttaaatcaaaacattttggaggagtgaaatagtaaaatgccaagtattgtggcagatttatgctctgaaccacacacacaaaaaattgaggaagcatttttttaaacggtcggtttaaattgtttttagaattattgctttttgttctaattttnnnnnnnnnnnnnnnnnnnnnnnnnnnnnnnnnnnnnnnnnnnnnnnnnnngggccatattagatgttcattgtcagagctcaagatgatatatataaatatatatatatatatatacacacaaatgtctgtgcaagtaagaaaaaaaaaagcatattctttgtgccttgtattttggggaaactataaaactggtaatattttgtatgatgaaaaccctaatgagaaaaaaacaagatatatagatggaaaaattatggggtttaaatgtttttttgttccaactctttttcagattttttgaatgtatataggactatgttgaaatgtagatatatgccacagagtctgtgtattgtataaaaaacaaaacaaaaaaaaacaaaaaaaagatggctcnnnnnnnnnnnnnnnnnnnnnnnnnnnnnnnnnnnnnnnnnnnnntgcacattattgcgattgttttattttttgtaccaaagacaaatgcaactgatatggcaaactgccagtctaagt

SEQ ID NO: 16700 - DNA, 562 bp, Macaca Fascicularis
  misc_feature (1)...(562): n = A,T,C or G
tgtgggccaatatggtgtttacattatataatnnnngctgtggcaagtaaagcacactttgtttttctcctaaaatgtttttccctgtgtatcctattatggatactggttttgttaattatgattctttattttctctctttttttaggatatagcagtaatgctattactgaaatgaatgatttcctttttctgaaatgtaatcattgatgcttgaatgatagaattttagtactgtaaacaagctttagtcattaatgtgagagacttagaaaaaatgcttagagtggactattaaatgtgcctaaatgaattttgcagtaactggcattcttgggtttgccctacttaatacacagtaattcagaacttgtattctattatgagtttgacagtcttttggagtgaccagcaactttgatgtttgcactaagattttatttggaagcaagagtggttgaaagaggattcagtagtacgcatataactaatttatttgaactatatgctgaagacatctaccagtttctccaaatgccttttttaaaactcatcacagac

SEQ ID NO: 16701 - DNA, 689 bp, Macaca Fascicularis
  misc_feature (1)...(689): n = A,T,C or G
atgaatagaaagagaaatcttccaatcatcaatgtgtgacctgtttactatagctttggtataaaagagacctgttttgatgaccacatagccacgctttcaatgatttatctcagaagaatatacagattctgacattcattagaaaacaacatacccttcataagaggtgtttatgccaacaactgaagaattttcacaagtcacaagaaaagataaaaaatggagaagatactcaagtaaggataaccaacatcctatgtgggcagcttgtttgacagtaatcttgaacttcttcataattaaaccaccaattatgtatccaatacatattggagagacagaatcttactctgttgcccaggctggagtgcagtgatatgatcatagctgactggagcctcaacctcctgggcttaagggctgctcccacctcagccttctaagtagctgggactacaggtacacaacaccacactgactaatttaaaaccaaaaattgcagagacaaagccttgctatgtcatccgggctnnnnnnnnnnnnnnnnnnnnnnnnnnnnnnnnnnnnnnnnnnnnnnnnnnnnnnnnnnnnnnnnnnnnnnnnnnnnnnnnnnngttcaaggtactttagagagtcactttgctgagcctgttgctgtcaggtgtatttacatttcatgtcttgct

SEQ ID NO: 16702 - DNA, 718 bp, Macaca Fascicularis
  misc_feature (1)...(718): n = A,T,C or G
tacagtnnngagcctcctannnntgctggnnnnnnnnnnnccattgtgtgccnnnnnagtaccggtgcccatcaccaacgccaccctggaccggatctctggcaagtggttttatattgcatcggcctttcgaaacgaggagtacaataagtcgattcacgagatccaagcaaccttcttttactttacccccaacaagacagaggacacgatctttctcagacagtaccagacccgacagaaccagtgcatctataacaccagctacctgaatgtccagcgggaaaatgggaccatctccaaatacnnnnnnnnnnnnnnnnnnnnnnnnnnnnnnntgatcctcagggacatgaagaccttcatgctggctttcgaagtgaacgatgagaagaattggggggtgtctgtctatgctgacaagccagagacgaccgaggagcaactgggnnnnnnnnnnnnnnntctcgactgcttgcgcattcccaggtcagacgtcgtgtacaccgatcagaaaaaggataagtgtgagccactggagaggcagcacaagaaggagaagaaacaggaggagggggagaggcagcacgaggaggagaagaaacaggaggagggggaatcctagaaggacacagccttgnnnnnnnnnnnngacttgggggccatcctgcccctccaacctgacatatgtacctcagcttttcccctcatttgcatc

SEQ ID NO: 16703 - DNA, 665 bp, Macaca Fascicularis
  misc_feature (1)...(665): n = A,T,C or G
gaaccgagtcctggccaacctnntcctgctcannncctcnnnnnnnnnnnnnnnnnnnnnnnnnnnnnnnnnnnnnnnnnnnnnnnnnnnnntggaggagtgtgtggactgcctggagcagggtggccgcggcagtgtcctgcagttcatgcccttcaccaccgtgtcggaactggtgaaggtgtcagccatgtccagccccaaggtggttctggccatcannnacctcagcctgcccctgggccgccaggtggctgctaaagccattgctgcactctgaggagcttggcatggccgcagtgggggctgggggctggggactggcacagccccaggtgcctccaagggaagcagtgaggaaannnnnnnnnnnnnnnntcacatccgctccacatggtgcaagagcctctggcagcttctaattccccgcttctgactcctgacctccaggatgtctcctggtttcctcttttgaaatttcttctctgtctgccagcacctgaggagtgtgagnnnnnnnnaccacaagcccagtggtcacccctgtgtgcgcccgcccnnnnnnnnnnnnnnnnnnnnntctgaggaactttctagacgcagagagtctagaaagtgtgtgtgtgtgtgtgtgtgtgtgtgtatattttgtaatatgtgaggga

SEQ ID NO: 16704 - DNA, 829 bp, Macaca Fascicularis
  misc_feature (1)...(829): n = A,T,C or G
gcgggtgccgtgcnnngcaactcatcgtgcgctctcttgttcctcgggtgttctcctcgctcgccctctgnnnnngctatgccctnnnnnnaagagacacccgccatttcacccagtaagcggccccggcctgcagaggagggcggcatgcagctccgctttgcccggctctccgatcacgccacggcccccacccggggctccgcgcgggccgcgggctacgacctgtacagtgcctatgattacacaataccacctatggagaaagctcttgtgaaaacggacattcagatagctctcccttctgggtgttatggaagagtagctccacggtcaggcttggctgcaaaatactttattgatgtaggagctggtgtcatagatgaagattatagaggaaatgttggtgttgtactgtttaattttggcaaagaaaagtttgaagtcaaaaagggtgatcgaattgcacagctcatttgcgaacggattttttatccagaaatagaagaagttcaagctttggatgaccccgaaaggggttccggcggttttggttcccctggaaagaattaaaatttataccaagaacagaaaacgagaagtcatacctttttcttaaaaaaaaaagtttttgcttaaagtgttttggtgttttacacttctgtaaacttactagcttcaccttcgaaaagtactgcattttttactttatttttttttttatggtcaaggaagagatcataaaaaaannnaacccaaagctttttgtgtttggatcaaaaagaaaccttgtttttttgcaattgatggttgcatgtaaatttgcttt

SEQ ID NO: 16705 - DNA, 238 bp, Macaca Fascicularis
aacaacaagtacgcggccagcagttacatgagcctgaagtccgaccagtggaagtcccacaagatctacagatgccaggtcacgcatgaagggagcaccgtggagaagacagtggcccctgcagaatgttcataggttcccaaccctcaccccacccacgggggcctggagctgcaggatcccaggggaggggtctctcctcccaccccaagacatccagcccctctccccacacaca

SEQ ID NO: 16706 - DNA, 654 bp, Macaca Fascicularis
  misc_feature (1)...(654): n = A,T,C or G
caacccccccccccccccgtgtcctaggccctgtttcatgtcccttctgtgatagtgaacccatggtcttgtaattgtgaacttctttgttgccactttgaagttggcgagtgctcgttgcagatgcatccaagatgggtaatctgtgtattaacagtggacgtgttgattgtttctgcagggttctgaagcatgcaacatagaacagatacctttacatttaggggtgctaaggaaagcaggaaccagtaatcctctcctgtggttggatgggaggcttgggagaggggtggaatggagnnnnnnnnnnnnnnnnnnnnncagcctggggtggaggtgggtgcaagcaggacagatagtgcctgggggtggggggcggaggctttgcctctagaaaggggctagaagggatgaggaaagagctcatagcttcnnnnnnnnnnnnnnnnntcttctgcatgtgtgtgtttgcacatgagtgtatgtagaccacagaccataaaaaaatacggaattcaaaagtaagttacaaaagggtnnnnnnnnnnnnnnnnnnnnnttttttcagtgttgctatgtttcccaggctggacccaaactcctgggctggagcagttctccccctcagcctctggagtagctgggcctacaggt

SEQ ID NO: 16707 - DNA, 759 bp, Macaca Fascicularis
  misc_feature (1)...(759): n = A,T,C or G
ttatttactcttaaaactgttacaacagaatcacagactgacacaggtaatggctgagccataagcaaatcgggaagtacagaactgtcccaccccaaatggctgcggagtacacatcacacagggcctctggtcctggccttctcaggtgctctggtgtgcaggatccttcgagggaactctgaccactcctattgtcttacctagagagcatgccacttgggccacctccccccaacccttggccaaaggagcgaaaggacctggaacctgtcgtcaacctcagcatcctcatgaccctgggacagacgcagcagaggcagcaggtactctgggcctgtgctgttgcccctgtggtgtctcctgactacccaaccctcactgtttccttctcactttcatcccagcaggcccttcctcctgctgacgaaacactggctccctcatgttctgggcaccgcagaagtgttctgcacatggtctctatggaggaaagctagtcctcccggcccaggcagcacttcctccgtgaggccctgcagtttcctggtgtgtgcctggggagctagagacatggtgccaaacctccgtaaggcactgctacctcaaaaagggggaggagctgtcaggcccaggactgcctccctgcacatggagagcaaatctaaacctaagccaagacccctaccttctccagctccaagggatgccaggaccagagnagggcagaggtcnnnaggggcctgnnnangccaagtc

SEQ ID NO: 16708 - DNA, 741 bp, Macaca Fascicularis
  misc_feature (1)...(741): n = A,T,C or G
tgcatgtggaggnnncctgtggaaagggngnnnangtcctggctgcagaaaaccctgggnnattggtcccaggtnntgatacagctcatcaccaggcagcaagggcagagatgaatctcctgcgacctgcacggatgctggattcctcctcacctcacctcctctgcatggccaccccctcccagccctgtggggaaactgttccnnngaaccaccccactccctgcatcccccccactttacagcatcttccatccgcctcccaccttctaggcgaatagtccccagagctgtgtccctccaaggggtccgaggaatcactcactcctggcggctggcaaggagacagtctgaggccagggacacatgaagggatgtccccaccccagcactgccagcccctccccaggcttccagagttgaaagccaggagaaactcggcaaagaccacccttccctgaacccaagcacccaatgatgcaaagaacaaaacagaaaaacgccaaatccccaaattcattccggatctatttttctacgagagagaggagcaaagtccccctcccctacctccatacattctgcacttcatagctggattctgagcttaggatcatcgggagaccccatggagggacttggaaaggggaatggggattcggggaggggctggaggacttcctcacgcttccacctccactgcgccccacctccctgcctgtgtgtgtnntcaaaggaaaa

SEQ ID NO: 16709 - DNA, 738 bp, Macaca Fascicularis
  misc_feature (1)...(738): n = A,T,C or G
ctcatgtgtgnnnnnccaagaggaagggcaggggaggatttggacagggtatacgacctcatgatatttttcgtcagagaaaacagaacacaagtagaccaccatctatgcatgtggatgactttgttgctgctgaaagtaaagaagtggttcctcaagatggaatacccccaccaaaacggccactcaaagtttcacagaagatttcatcccgtggtgggttttcaggcaatagaggaggacggggtgctttccacagtcagaataggtttttcacaccacctgcttcaaaaggaaactacagtcgtcgggaaggaacaagaggctccagttggagnnnnnnnaatactcctcgaggaaattacaatgaaagtcgtggaggccagagcaattttaacagaggccctcttccaccattacgaccccttagttctacaggttaccgcccaagtcctcgggaccgtgcttctagaggtcgtgggggacttgnnnnnnnnnnnnnnnnnnnnnnnnnnnnnagtggaggctcaagaggaaagtttgttagtggaggaagtggtagaggtcgtcatgtacgctcctttacacgataagaatccttttgggaacatcttaactgtatatgaacattttgtgaggacaataaaaataagacattgaaggaccaatttnnnnnnnnnnnnnnnnnggagacatctgagagaatatttttatctgaagaaagcagattttgtttga

SEQ ID NO: 16710 - DNA, 1309 bp, Macaca Fascicularis
  misc_feature (1)...(1309): n = A,T,C or G
cgaccaccannncatccaggaggcgctcannntcgacaacaagcacaccaactacaccatggagcacatccgtgnnnnnnnnnnnnnnnnnnnnnnnnnnnnnnnnnngaccatcaacgaggtggagaaccagatcctgacccgggatgccaagnnnnnnngccaggagcagatgaatgagtnnnnnnnnnnnnnnnnncactttgaccgggatcactccggaacactaggtcccgatgagttcaaacgnnnnnnnnnnnnnnntgccnnnnnnnnnnnnnnnnnnacccagggagaagcagnnnnnnnnnnnnnnnnnngcattgtggaccccaaccgcctgggggtagtgacattccaggccttcattgacttcatgtcccgtgagacagccgatacagatacagcagaccaagtcatggcttccttcaagatcctggctggggacaagaactacattaccgtggacgagctgcgccgcgagctgccgcctgaccaggccgannnnnnnnnnnnnnnnnnggccccctacaccggccccgactccgtgccaggtgctctggactacatgtcnnnnnnnncggcactgtacggcgagagtgacctctaatccaccctgcccggccgccctcgtcccgtgcgccgtgccctgccttgcacctccgccgtcgcccatctcctgcctaggttcggtttcagctcccagcctccaccggggcgagctggggcccacgtggcatcgagcctccctgcccgcgaagtgacagtttacaaaattattttctgcaaaaaagaaaaaaaaaagttacgttaaaaaccaaaaaactacatattttattatagaaaaagtatttttttctccaccaaatggaaaaaaagaggaaagattaactatttgcaccgaaatgtcttgttttgttgtgacataggaaaataaccaagcacaaagttatcttccatcctttttactgatttttttttcttctatctgttccatctgctgtattcatttcttcaatctcatgtccactttggtgtgggagtcggggtagggggtactcttgtcaaaaggcacattggtgcatgtgtgtttgctagctcacnnntccatgaaaatattttatgatattaaagaaaatcttttgaaatggctgttttttaaggaagagaatttatgtggcttctcatttttaaatccccagaggtgtgactagtctctttatcagcacacacttaaaaaattttaatattgtctataaaaaatacgacaaacccggagaacaacgaccaaagtgnncatgagatgaag

SEQ ID NO: 16711 - DNA, 729 bp, Macaca Fascicularis
  misc_feature (1)...(729): n = A,T,C or G
acannnnnnnagtnnnnnnnnnnnnnnnnnnnnnnnnnnnngtgataaagcnnttagggccacttgcacttctaagcnnnnnnnnnnnnnnnnnnnctgaattttaaaagggctagaaaaaaatgactgaccagcctgggaaacataacaagacccccgtctctacaaaaaagttaacaattagccaggcatggtggcctatgcttgtggtcccagctattcaagaggatgaggcaggaggatcccctgagcccagnnnnnnnnnnnnnnnnnnnnnnnnnnnnntnnnnnnnnnnnnnnnnnnnggtgacagaatgagaccctgtctcaaaaaaaataataataataagattgaaattaaaattcaggtttagcttcaatggcagtcctcacccccacctctctaaaatacacaggaggatggcacagaaacacnnnnnnnnnnnnnnnnnnnnnnnnnnnntaagattcaagagagaggacaagtagnnnnnnnnnnnnnnnnnnaattgtcagaattgcagatggcttcttcacagccatgtgagaagcagacagatgcagagaaaatctggaatccctttcnnnnnnnnnnnnnnnnacctgatacacaattatgnnnnnnnnnnnnnnnnnnnnnnnngtgctacttttaagtaatgtatgtgctttctgtaaagtgattacatttgttttctgtttatttatttatttatttatttttacggt

SEQ ID NO: 16712 - DNA, 628 bp, Macaca Fascicularis
  misc_feature (1)...(628): n = A,T,C or G
cttgtttcagtncngatccagggagatcacccctctaattatttctgaacttggttaataaaagattataagatttttatgaagcagccactgtatggtattttaagcaaatacgttatttaaaatattgatccttccctggcaccaccttcatgttagctgggtattattaataagagatacaaccatgaatatactgtgtttatacaaaatcaatctgagcacaattcatatagatttctcttttataccttcctcactggccccctccgcctgcccatagttaccaaattctgttttaaatcaatgacctaaggtgaacaatgaagtattttataaatgtatttatgctcctagactataggtcaaatgtttccattttcaaattatttaaaattcttaagtgtttaaaattcatgaatttctaaatctaatcatataaaatgaaactgttgctccattggagcagtctcccacctaaatatcaagacggctatacactaacaagagaaaatatggtcaagtctaaaatggctaattgtcctatcatgctattatcatagactaatgacatttatcttcaaaacacaaaattgtctttagaaaaataaatgtgactacaggtaga

SEQ ID NO: 16713 - DNA, 704 bp, Macaca Fascicularis
  misc_feature (1)...(704): n = A,T,C or G
gccatgacgnnnnacgtgctgcgaggtgtctcgctaacnnngcgcccgacgagcgggcttctgggaacttggcagaggcagattagaaatactcaccagcgagcatcattgttgtctttctgggaactcattcccatgagatcagaacctcttcgaaagaagaagaaggtagatcctaaaaaagaccaagcagcaaaggagcgcttgaaaagaannnnnnnnnnnnnnnaaaaggctagtcaagagctaattcctattgaagattttattacccctctaaagttcttggataaagcaagacagcggcctcaggtggagctcacctttgaggagactgagaggnnnnnnnnnnnnnnnnnnnnntggtccttgtacaagcagcaagagcataagatggagagggacaccatcagggccatgctagaagcccagcaggaagctcttgaggaactgcgactcgagtccccgaagnnnnnnnnnnnnnnnntcaagcgggatcccaacctgttcccctttgagaggnnnnnnnnnnnnnncacaccaccgatccctaactaccnnnnnnnnnnnnnnnnnnnnnnnnnngtcaccaaggtgtacacacaagtggagtttaagagatagacttgnnnnnnnnnnnnnnnnnnnnnnnncnnnnnnnnnnnnnnnnnnccagggttcaagtctnnnnnnnnnnnnnnagg

SEQ ID NO: 16714 - DNA, 1313 bp, Macaca Fascicularis
  misc_feature (1)...(1313): n = A,T,C or G
tagagatgtttannnncnnncannagatgatgggtntnnnactaaagacagctattcaagcagagattannnangttctcgtgatactagagattatgcaccaccaccacgagattatacttaccgtgattatggtcattccagttcacgtgatgactatccatcaagaggctatagcgatagagatggatatggtcncgatcgtgactattcagatcatccaagtggaggttcctacagagattcatatgagagttatggtaactcacgtagtgctccacctacacgagggcccccgccatcttatggtggaagcagtcgctatgatgattacagcagctcacgtgacggatatggtggaagtcgagacagttactcaagcagccgaagtgatctctactcaagtggtcgtgatcgggttggcagacaagacagagggcttcccccttctatggaaagggggtaccctcctccacgtgattcctacagcagttcaagccgcggagcaccaagaggtggtggccgtggaggaagccgatctgatagagggggaggcagaagcagatactagaaacaaacaaaactttggaccaaaatcccagttcaaagaaacaaaaagtggaaactattctgtcataactacccaaggactactaaaaggaaaaattgtgttacattttttaaatgccctgttaagttttcctccataatttttatgttcttgtgaggcaaaaagtaaaacatgtttaattttatttgactttatgacattgctttttaacaagcaaatgttcttgtgaggcaaaaagtaaaacatgtttaattttatttgactttatgacattgcttttcatacaagcnnnntgttaaatgtgnnnnnnnnnnnnnnngttgcaactttccaagtaaaagtatccctaaaggccacttcctatcttgatttttcccagtaaatgaggcaagcaattctaagatcttccacagaacatctagccatctaaaatggagagatgaatcattctacctatacaaacaagctagctactagagggtggttggggtatgctacttataagatttcagagtgtcttccannnnnnnnnnnnnnnttctcagtatgaaaaacctgaaatcacatgnnntgtgtaaggaaagtgctattcacccagtaaacccaaaaaagcaaatggataatgctggccattttgcctttctcacatttccttgggaatctgcaagaacctcccctttcccctcccccagtaagaccatttaagtgtgtgttaaacaactacagaatactaaataaaaag

SEQ ID NO: 16715 - DNA, 769 bp, Macaca Fascicularis
  misc_feature (1)...(769): n = A,T,C or G
gaaagcccagatgtgacagcgccaagagcccctgggagccggatggcctnnnnntgctggagtggaatctctgcttggaggannnnagaaaggcagtgatggtgctccctgatgagaaccagagagaggatgcgctgatgaggctcaacaaagcagcnnnnnnnnnnnnnnngaagccaaggccattgcagtcnnnnnnnnnnnnnnnnnnnnnnnnnnnnnnnnnnnnnnnnnnnnnnnnnnnnnnnnnnnnnnnnnnnnnnnnnnnnnnnnnnnnnnnnnnnnnnnnnnnnnaggagaccatctatttgaatgtgcctgaagagcaagatcaaaaatcacnnnnnnnnnnnnnnnnnnnnntacctgtggggaaagttgggaaggaggagcggaaaggagcagcccaggaaaagaagcaactggggatcaaagacaaagaagacaagaaaggagccagggaccgtcccaacagcaagaagcacagggcaaaggacgacaagaaagtcataaaatctacaagtcgggacaggttttccttggaagaccctatgcctgacatcaacctcccttctcaagaacccatagaccccctgnnnnnnnnnnnntacacccagaggctgcacagcgaggtccatgggctgctggacaccctggtgaccgacttnnnngtcctggctgatgagctcagccccataaagaatgtcgaggagnnnnnnnnnnnnnnnnnnnnnnnnnnnnnnnnnnnnnnnnnnnctggaaaacgggt

SEQ ID NO: 16716 - DNA, 683 bp, Macaca Fascicularis
cctttacaaaattggcctgtgttcccagtaccctgcagttagttggcacttagcagacatgtgctgaatgcgtgaatgagcatgaattcagtgggttttctatgggtgataatttaaattcctaattttatgcctctgcacagaatctttatcttccgatcctgaggttttgcttcaaattgatggtgttactgaagacaaactggaaaaatatggtgcggaagtgatttcagtattacagaaatactctgagtggacatcgccagctgaagacaattccccagggatgagcctgtccggcagcagaggccccggaagaagtaccgctgaggagctcgacgaggaaatatctgtatcttcccactactttacaagtaaaaccagaaatgaaaggaaaaggaaaaagatgccagcctcccaaaggcctaagaggagaaaaactgcttccagtggttccaaggcaaagggggggtctgccacatgtagaaagatatcttccaaaacgaaatcctccagcatcattggatccagttcagcctcacatacttctcaagtgacatcaggagccaatagaaaattggggattatggctccaccaaagcctataaataggccatttcttaagccttcgtatgcattctcataacaaccgaatctcaatgtacatagaccctccttcttgt

SEQ ID NO: 16717 - DNA, 736 bp, Macaca Fascicularis
  misc_feature (1)...(736): n = A,T,C or G
gacaggtattgacnattnatatagaaatacagcacaatatattcatttatgagaaactacctactgatatgggcttgaaattttgggtgaatcattgagcatttctacgctagaagtaatttcaaaattgttggtttttataaacaagaaaaatggtgagtagtgggacttttaagcatctctgaaataaaaaacctattctttttatagacaagcattatagtttgagttacagacaacagtgtgtatatatgtaatatatatatagtaaaaggaaatttaaatatgaagccaaactttttaaaattagaaactacaaatggttatactgattagtgtctagcctagagtggtaaccaggctttactaatccaattatcaaacacattatttataatgcattagctgtattagctgttgcttttttgatgttcaggataactatgttatctcatttctgcatttaattaatagctcgagtattaaaagaccaccccttcaagaaaagcnnnnnnnnnnnnnnnnnnnnnnnnnnnnnnnnnnnnnnnntttaatctctgaacccagtatcataaaattttcctcttttggtaatatctgtactttcatattctgctcactatcaaatgtannnnnnnnnnnnnnnnngtttgaaaatgacggggttttatctgcacttgacattgnnnnnnnnnnnnnnnnaagtactccaagggaaaaattaaagtggaagttt

SEQ ID NO: 16718 - DNA, 720 bp, Macaca Fascicularis
  misc_feature (1)...(720): n = A,T,C or G
gcatcngnnncnggncagacggcccgccgtgcctgcattcgcagcagctccgcctggcacccactctggattccggccctggctggggacttggccgcttccctacccacagggcctgacttttacagcttttctcttttttttaaaagttgataggagacttgtacagttgactggttttcctcccgttggtagttgagacgctgttgcaaattccacccctccttccctggtccagattgtagctcttagtcctccctgctcagctggccggggtggaggcctcaccctgcttggggcctggcgttcggggagctctggtgggaaaatgtctcccacctcttttcctagttttatgtttcttggaaaaannnnnnnnnnnnnnnnnnnnncagggcttcagatattttgcacgaattttaaaacatggcaataaatggctcgtgggctctggctccctggggccccctccccgcccttcttttgaccccttcttgtctggcccaaaggaagtagcaggcccagctggggcccctcggctgccccccacctctcctgccgggcaggtcccaggctggaggccctaggcgcggttcaggtcagggctatggatggggcccagaggctttggtggcccctccccaactccttcctctttgcttgggttcctttttcacgttcagtaactgttttttttggaaagcacgaaacttctgtaac

SEQ ID NO: 16719 - DNA, 740 bp, Macaca Fascicularis
  misc_feature (1)...(740): n = A,T,C or G
aaaaggaacgagcctggaggaggtggaaagggccatcctggagatgaagtggaaggtgagggctgagaaggaggtatgccagcaggaggaagagttgccggcagcagtacatgccttccattttgtttaaattgggcttggagaatctatcctgaaaacattgactctagacttgtacaaaagagccactttagtttcaactcaaatgtaaagcaaagtagtttagtgacattttgcttttatgtgaaatagtgcacagtatgagttaatctgagcaggtctgaattgaccagatgcttctctatgaggttactagagctctgctgacccttggccgaaactctaaaatgtacctattaaagataaatgctgttaccaaagtaaaactctgtgagttgtttcagggcagaatgtaccagnnnnnnnnnnnnnnnnnnnnnnnnnnnnnnatttttgcctagcactcggttttggtggagctgaagattttgagggctgaggctggttaagtagctggaatgtgcctatgtgaccagctcacttgcagacaccctgcaggaagcagagcttaatcttcctgggactgaggtcttagcacatgtactggtggtnnnnnnnnnnnnnnnntatgaatacaaagcttgttctgtgtgacccagcaagtggaaggacaaagaattgtgagcctcagatctttggatccttgcaatgcgtatctttctccctgttattgctgcgat

SEQ ID NO: 16720 - DNA, 148 bp, Macaca Fascicularis
gggcagcctcaagctggagacattgtctggcctcactgcccactgggtagagacacgtggatgacatttcagtacccaccggcagcttgtcacactcatccagagatggccggtgggcaggcgggaagagcagctttccttccctgga

SEQ ID NO: 16721 - DNA, 788 bp, Macaca Fascicularis
  misc_feature (1)...(788): n = A,T,C or G
tggcttcggacatcctnnnnnnccaaaggannnnnnnnnnncggatcagctggtacctccgtnacatcatcactcgatatcaggagannntcagtgtcatcgagaagtgccccaagcctgtgattgctgccgtccacgggggctgcattggcggaggtgtggacctcatcaccnnnnnnnnnnnnnnnnnnngtgcccaggacgctttcttccaggtgaaggaggtggacgtgggtttgnnnnnnnnnnnnnnnnnnnnnnnnnnnntgcccaaggtcatcgggaaccagagcctggtcaacgagctggccttcaccgccnnnnnnnnnnnnnnngatgaggccctgggctgtggcctggtcagccgggtgttcccagacaaggaggtcatgctcgatgctgccttagcgctggcggccgagatttccagcaagagccccgtggcggtgcagagcaccaaggtcaacctgctctactcccgcaaccattcggtggccgagagcctcaactatgtggcgtcctggaacatgagcatgttgcagacccaggacatcaccaagtcggtccaagccgtgactgagaacaaggaactgaaaagcgtcaccttctccaagctctgagagctctcgcatcccgtttcccagccagggggctggccttgtcccacctcatctgcagaaaggnnnnnnnnnnnnnnnnnnnnnnnnctatgccttctcacccagtctcccagtttataactatatgacaatgacttcctcaagcccaaggccttatctcaccccacg

SEQ ID NO: 16722 - DNA, 1122 bp, Macaca Fascicularis
  misc_feature (1)...(1122): n = A,T,C or G
gacattttttcacannnnnttggggattttggtttcatgtttggaggaacccctcgtcagcaagacagaaatattccaagaggaagtgatattattgtagatctagaagtcactttggaagaagtatatgcaggaaattttgtggaagtagttagaaacaaacctgtggcaaggcaggctcctggcaaacgnnnnnnnnnnnnnnnnnnnnnnnnnnngaccacccagctgggccctgggcgcttccaaatgacccaggaggtggtcnnnnnnnnnnnnnnnaatgtcaaactagtgaatgaagaacgaacgctggaagtagaaatagagcctggggtgagagacggcatggagtacccctttattggagaaggtgagcctcatgtggatggggagcctggagatttacggttccgaatcaaagttgtcaagcacccaatatttgaaaggagaggagatgatttgtacacaaatgtgacaatctcattagttgagtcgctggttggctttgagatggatattactcacttggatggtcacaaggtacatatttcccgggataagatcaccaggccaggagcgaagctatggaagaaaggggaagggctccccaactttgacaacaataatatcaagggctctttgataatcacttttgatgtggattttccaaaagaacagttaacagaggaagcaagagaaggtatcaaacagctactgaaacaagggtcagtgcagaaggtnnnnnnnnnnntgcaannnnnnnnnnnnnnnnnnnnnnnnnnnnnnnnnnnnnnnnnnnnnnnnnncgatatttattatctacagggtttttttgtgtgtgtttttgtttttattttcaatatgcaagtttggcttaattttttttgtctaatgatcatcatgaaatgaataagagggcttaagaatttgtccatttgcattcagaaaagaatgaccagcaaaaggtttactaatacctctccctttggggatttaatgtctggtgctgccgcctgagtttcaagaattaaagctgcaagaggactccaggagcaaaagaaacacacatagagggttggagttgttagcaatttcattcaaaatgccaactggagaagt

SEQ ID NO: 16723 - DNA, 709 bp, Macaca Fascicularis
  misc_feature (1)...(709): n = A,T,C or G
gggaagccgccgccaacactcacctcacaggaccaggaggttccatcggggcgctgccgcgaaccgcgccacttccagccctcacccccagctgcaggtttgcgcctgcgcaggtcgcagcctcggcctccatctcccagaagcctccgcgccgaccgcttccgctcgcgcacttcggcccaggcgcgtgggcgctgccgagaggctgggagccggggaaccggttccggtacttgagcggagcgggaaagagcgcgccgcctgcactactggaatggcgcggccagatgccctggaggaccctgggaattgcagtccttgctcaggtggagagcgagccctatgagaaaaatcaagactcagaaacaataaaagtcacagagatgaaattgacagagcctggatttcgcttccaccatttacaagattttcttgtggtgtggaacctctgacgatgaaggggtgaaatggaactagaagcttattccagtcaagatttctgatttatcttgtgggttatgattctgtttggtttctttgatgctgtattagacctgagctnnnnnnnnnnnnnnttccatgctcactacattccaaaactttatctccaatatgaatttccagnnngcctcacaagannnnnnnnnnnnnnnnnnnnnnncccatgcttgtcacgttcacagggctttcctccagtatgaattctatg

SEQ ID NO: 16724 - DNA, 687 bp, Macaca Fascicularis
  misc_feature (1)...(687): n = A,T,C or G
ggcatttatgtgttggctttgcagctgctgtctgggtagcggctgctggggtgctttcactgggccagtcaacaggggctcctgnnnaggccacagagaacctgagttcccaggagctgggccctgcctgcagccagggatgggattgccagaggccctggagggaaggacagtccctgctggggaaaaacnnnnnnnnnnnnnnnnnnnnnnnnnnnnnnnnnnnnnnnnnnnnnnnnnnnnncgccctccccgctagcacagaggcctgactgacttttttgcttaacttcatgttctgggtgatggaaactgccaaacctcctgtcagtgaggactctttccaactgcccagagagtgggggtggaggaccgaggctacagctccacacgccccggtcccccagagcatctgccccaagtacacctcccgttgcgccccgcacaactgcgggagccagactctccagggaaacagcccctcttttctacacactcagccacaaagccccccagcccccacaccgcgtcccagctcccctcttttgtaagtatgtgaaaaggaaaaaatgcaaacattggagtttgggctggagctcctccctccagctgcgacttttaactatgtaataatgtacagaggaagctgttggtgttctaagactctgtgtggctgtgcaatttctg

SEQ ID NO: 16725 - DNA, 715 bp, Macaca Fascicularis
ggaaacccgcgattcctttcgagtagacgtgggaaagagcccgttggaggatatggggtcctgtgaaattcagttgtgtgtgtggctccttgttagcagtcatgttgacatagtattaggaggctcccccatccaccctttacgtgatgtagggaccagtgtcttgtgagattaaccttgggacacagtgggttagcctggagaaaacaagaggccccacctggacccagggagaggagccagtgacacagggagagcggtgcagccctctttcccttccctgtggaggaggtggtgccaggagcctgcccgctcacctctgctgaagcataagtggactttgcttttggggcttctctctgatacatgctggagccctgcctctccactgctagatggaacctggaatctctcatctacctcttagtcggtcagtttctacgtgtgagaagcaagcttgtgggccagtgtccttgtacatgctgtagcacttaaaaaataattccagggttccctggaaagccagtcccagggttcctatgatctgtagtttctacctggattataactggtattgggtacctgaattttgattggttagccttaattatagtctggcgtgatcatgtagaatcttttctggtgatcagatcatagagttctatcaaggcatccatgtcagtggtgctatgctggttacaacttgagatttgaa

SEQ ID NO: 16726 - DNA, 684 bp, Macaca Fascicularis
  misc_feature (1)...(684): n = A,T,C or G
gctgtactgcaagttgcacttttctttaggctaaaaatgtagttcctgatttttaaaattcagttatttattcccacttcaaatgacaagttcatatatagaaattacggagagaaacttgagaccatttacagagagaaacttgattctgggaagatagcagagtacaaaccagctgcctcacttctgtttcacagggaggctgatggaaaggaagcaagctggacccatcctccctgctcacagagcactatggtcacacacagtgcctgctctgccagtttcattattgaaagagttgtgctggcnnnnnnnnnnnnnnnnnnnnnnnnnnnnnnnnnnnnnnnnnnnnnnnnnnnnnnnnnnnnnnnnnnnnnnnnnnnnnnnnnnnnnnnnnnnnnnnnnnnnnnnnnnnnnnnnnnnnnnnnnnnnnnnnnnnnnnnnnatgccgggcgcggtggctcaagcctgtaatcccagcactttgggaggccgagacgggtggatcacgaggtcagnnnnnnnnnnnnnnnnnnnnnnnnnnnnnnnnccccgtctctactaaaaaatacnnnnnnnnnnnnnnnnnnnnnnnnnnnnnnnnnnnnnnnnnnnnnnnnnnnnnnnnnnnnnnnnnnnnnnnnnnnnnnnnnnnnnnnnnnnnnnnnnnnnnnnnnnnnnntg

SEQ ID NO: 16727 - DNA, 767 bp, Macaca Fascicularis
  misc_feature (1)...(767): n = A,T,C or G
agtaccagcgctgcttcagtgnngaccaggcaccagcactgctttggtgttgactgggcaccagcgctggcttcagtggcggactgggcaccggtgctggctttggtggtggactggtcactagtgatggctttggtggtggactgggcaccaatgctagttttggcagcacacttggcaccggtgctggctttagcggtggnnnnnnnnnnnnnnnnnnnnnnnnnnnnnnnnnnnnnnnnnnnnnngacagaggactgagtaccatcattggctttggcagtggttccaacaccagcactggctttattggcgaacccagcaccagcacgggcttccatagtggacccagttctattgttggcttcagtggtggaccaagcactggtgttggcttctnnnnnnnnnnnnnnnnnnnnnnnnnnnnnnnnnnnncgagcacaggagctggcttcggcggtggaccaaacactnnnnnnnnnnnnnnnnnnnnnnnnnnnnnnnnnnnnnnnnnnnnnngtggagccaccagtcttggtgcctgtggcttctcctatggctagtgaggtttcagatttattccccatgtttacagacaccgctaataaattgcagtagtccttcccatggagccaaagtacatccttggaatctttgtccacacagcagtcaaagcacctacggccaatcagctaagggtgtcatgtgatggaaaaatctgtttgctgttcctgctttattgtttgctttctgtgtgctgtcatatt

SEQ ID NO: 16728 - DNA, 715 bp, Macaca Fascicularis
  misc_feature (1)...(715): n = A,T,C or G
cctggcaggactcacaaccaggcatcacctcgaccaggnnnnnnatnnnnactgggtatactctttggtgattgtctttttcaatggcagtggcccctggatgcatgtgtgttcccaggtggtatagcacctgctcagagtggggcctgtgagtggctgaggaatgaggcatggattgtttgtgtgacggagtgagctccccatccttgggggctgtggggagtttgggctcatgatggacatcgtagacaataggaagggcttggcacttgggacccagggcctggcctggggctgctgcttgtgcccacatctgacagggccttgtcatcatagcttcacaacgtcaccctggcgctggagctgctgaaggatgagggcctgctcagctgtcccgtcagccctgaagacatcgtgaacaaggatgccaagagcacactgcgggtgctctatggcctgttctgcaagcacacccagaaagcacacagggacagtacgccctgtggagccccgaattgaccctcactgcccccaaagccnnnnnnnnnnnnnnnnnnnnnnnnnnnnnnnnnnnnnnnnnnnnnnnnnnnnnnnnnnnnnnnnnnnnnnnnnnnnnnnngtgacccgcttccctcccaccctgtctcctgtctccatcatcagatgatctctgaacccccttgtgtggatcattttgagctgcctggcctgctca

SEQ ID NO: 16729 - DNA, 704 bp, Macaca Fascicularis
  misc_feature (1)...(704): n = A,T,C or G
aatcatataaatgtatgaggtaattaaaaacactactgtaatctgcttgtatgatcaaaaaacaccacaaaagtaaagacagtgaagatcacactgtaaacgaactctcaaatgatcacgaggtggtcacttcacaactcgctccctccacccaactcaaaacaggagctcgagcctgcctgtatttgagactggagccgcctgtatgaggactggatcaactgctagtcatgttatatccaaatctgcattatcattgggcacattttcacagaattttactgaattattccttaattgtttaatagttgggaatagtttgggaattaccttccatcaactnngttaagaaaggaatggattctggtagcaagacaatataattctcctttagtttttcagccagtgttaacacagtaatcaaagcagcaaatcgaacctgaaagggataaaagagcaaagaaataaaaggtagtgttactgtattatcttaagagctgtactgacttgagacaagctctaactttctaaactaaacattagttcacatgcatttattcacctcattcagctttcatcttagaataccagtttaaccatttgggagctatttgtaatatgcataaccttataaatcagtgttttccaaaccgtgtcccacgactgcaaatctttaatgtgaaatgtctttttataatctcttc

SEQ ID NO: 16730 - DNA, 761 bp, Macaca Fascicularis
  misc_feature (1)...(761): n = A,T,C or G
acccagcaataaacgtnnnnagctgaggtagcatcagcccatcacagttcatcntctaacccaagagtcagagatgaggctggtcatgttccctttggtttaaataactcccttgactaaaacagactcctctagtacttggagatcttggacatatacctaatccagtgggaccttggcttccttaactacaagtgagaaggggaggtccacccaggagcctcgggtctgatcaagggagaggccatgcggagctcactgtggcggctccctaagaaggcgaagcaatgtgggaacacatcttgaggacggggcctttctccannnnnnnnnnngctattatcttctgannnnnnnnnnnnnnnnnnnncaagccacagaatctaagtctggaagagcaaagggaagttactaggacatgaggtgtggtaatcccagaatctgctcagctttccacccaccaccaacaccttccaaccaggccttgccttctgagagcccccgtggccaagcccaggtcataaatcttcccnnnnnnnnnnnnnnnatccagaaacaggaaccccatttctcttcccacatctggtggaggtgagggggctcctcaaaagggaactgagaggctgctcttagggagggcaaaggatctggggcaggcagtgtctcccatcagtgccttttttaataaaagctctttcatctatagtttggccaccatacagtggcctcaaagcaaccatggcctactaaaaaccaaccaa

SEQ ID NO: 16731 - DNA, 683 bp, Macaca Fascicularis
  misc_feature (1)...(683): n = A,T,C or G
agtggaggacttcnnnnnnnnnnnnnnnnnnnnnnggtgnnnctgcagctcccctacnnncttgtacctccccctacccagccnnnnnnnnnnnnntgagctgagaggagttgggtagctccttgtgcctctaatactgggtttggtcacagcagtccctgagtctgaaannnnnnnnnnnnnnnnnnnnnnnnnnnnnnnnnnnnnnnnnnnntcaccgtctgaaggtaggggaagggctatcccttttttgtagatagggaaacacagaagctcacctggaggacaagagttgcttgaaggcagagctgcacttactctggccagaagccagctcttataatgactgcaccccacttaggatgtggccctcgagtgaaatttgtgcctggccctctgccacctccaatccctggccctaatccccatggtcagcactggggcccagtggtccatcgggggatgccacgctatgttcctaacagcccctaccatgtgcggagaatgggagggccctgcaggcagcggctcagacactcagagagactgatccacacatacaaactggacagacggcctcttgcccattcggggacatggcctgggtagactggatcttgggctgggannnnnnnnnnnnnnnnncctgcagggcctgcctggcacctcaggtactgggctag

SEQ ID NO: 16732 - DNA, 684 bp, Macaca Fascicularis
  misc_feature (1)...(684): n = A,T,C or G
caaatagaatttgtnnnnnntnnnnnnnngattccagcagaagggaactctatccaannnnnnnnnnnnnnnaaaacgtaaaattcatcctgatcagaaaaatattaatgcctatgttgtgtttaaggaagagagggctgccacacaggcgttgaaaagaaatggggcccaaattgcagatggatttcgtattagagttgatctcgcatctgagacctcatctagagacaagagatcggtttttgtggggaatctcccttataaagttgcannnnnnnnnnnnnagaagcactttctggactgtggaagtgtcatggccgtgaggattgtgagagaccaagtgacaggcatcggcaaagggtttggctatgtcctctttgagaatacagattctgttcatcttgctctgaaattaaannnnnnnnnnnnnnnnnnnnnnnnnnnnnnnnnnnngcgttctgttaataaagaaaaattaaaacaacaaaattcaaatccacgattgaagaatattggtaaacctaagcagggacttaattttacttccaaagctgcagaagaacattctaaaagcttatttattggagaaaaagctgttcntaaacgaagaagaaaggacagaagaaaagtggatgccctaagaaacagagaaaatagaaataacaaccaggaactgctttttct

SEQ ID NO: 16733 - DNA, 865 bp, Macaca Fascicularis
  misc_feature (1)...(865): n = A,T,C or G
aaaatagaccatgnnctatacacaaannnnnnnnnnnnnnnnnnnnncagaaatatgaanaagctatatactaaaatgcatatgaccttgggaatagggaaacattccttgtaacaacttcaaaaatacttagcagttctacttgtgagtatgaatgctcaggaaatacatactaggatatttactgtggcttgatttgtagtagccaaaaattagaaacaacggagaaagctcatcatgaacaatatgggaaattcttatggaatacagtatatctgtaaaatgcaacaaatgaaatccacatgtattaacagaaagatcccaaaattattgagggggatcaagttgcagaaggacgcagatagtacagtgactctttgtaaatttgaattaaaaattccctcacaaaactcagtactatctcttggtaatggatgcatatatgtatgtacacgtttttgaaatggattggaaggaaacagaccaaactcttgatagtggtcacctgtgaagagtggcgaagggaaagtaatgagtgtgggaggtggggtgggtattggttaaaggggacttcagctttttatataaacatccacttctctttcaaaagacttcaagtaaatataagaagatactgattgattctggattgtggtatagggatatcttgtcttattttttgtacttttctgtatttttaaaatttctcaaaataagaatgggagtgaggatgggaatgctgtatctgtggaagtcatgttatactggattcatttccaatcaaatactaaacattttatagaaaatatttctaaaattttatcatgaatgagtggatggacttgctctctatgtaatatgaaat

SEQ ID NO: 16734 - DNA, 835 bp, Macaca Fascicularis
  misc_feature (1)...(835): n = A,T,C or G
gnnnnnnnnnnnnnnnnnnnnnnnncccaccgtgtacagtgtgttatagtgttaatccttgtgcatatgtgtcataatacgactatttctgtaaagaaaggacactattacatatgaaaatatctcttctttatataagagaaattactccagtcagaaggacttagaaacatgtttttttccttttaaacttttaagtcagtttttatgaagttgttataatgtttctttacttttcaatgcacacatgctttgggatatgtttgtttttacttggaacatttgtttcttttcttttttaaggagaaaaaaaatgagtaaaagaagctccacactttgacttaatttcatacaaagctctgatgacagaggccatgactgtgtagagtggtcagaactgtgtggttggtttgagggagcgaatttggggaaggcacttggtgatataactttgttttgtttacagagtacctgcnnnnnnnnnnnnnnnnnnnnnnnnnnnnnnnnnnnnnnnnnnnnnataaattcaaaccatatccacacacaacaactaattgtatgaaacttttatatcctaatttaaaagctgtgaaattagttttcacgcatcaaaccggattgtttatatgtttaaacattttatgctcttatttaaagaagactttgagctatttttttctgtaccctgtaaaatattgaaaactaacataatatgttgagnnnnnnnnnnnnnnnacataaaactaaaattttctgaatcgtgtgtttatgtttgaaatctgtgttttaactttgtaagtaaattctctgcctttgtatttatattttacaaaaa

SEQ ID NO: 16735 - DNA, 765 bp, Macaca Fascicularis
  misc_feature (1)...(765): n = A,T,C or G
ctctgttaggagggcggtcagaccacctagccaaattgctcctcaaccctagacaaagnnntnnnccaagagggaggtgctgttagctgggcagcccttctgggtttcagagaccggtgttggctccagactggtctcatctccattgccttaatgccaggtggcccaggagtgcccatgcacagcagctgtagggtgtgggcatcttcaggagtgttctggtaaaattgtgaggatagctgtgtgaaggaaaccagtggaaggaaatgaagttttcaggatggcgggatgtgattcagacacagtgcacatgctgttagggctgtcactagggagtggccttcatggagggtggtaacagcacctcagtccatccaagatgtttagaaatagtctgcggtcccagaggacggcttctcagggcacgccacagttaaaggtcacctgcctggaagatgaatgagnnnnnnnnnnnnnnnnnnnnnnnnnnnnnnnnnnnnnnnnnnnnnnnnnnnnnnnnnnnnnnnnnnntgttgcattcttgcacaagtcatgaaaatggggccagagagcgagcctggacatcggggacttctgcccacagcacatgacacccacagctgcccagcctgtccacgtgctggggaccagcacagcacctgaagccatgtgtgacagtgagctttgttcattctagccacagggggatgaaannnnnnnnttgcatcgcagannnttttatatatattttgtttgtaatgagcc

SEQ ID NO: 16736 - DNA, 746 bp, Macaca Fascicularis
  misc_feature (1)...(746): n = A,T,C or G
ttnnttccnnnnnnnaacataaggatgacgagaaggacactaccgtacacactggctaagaacggggactgtttttgggaaggtggcattgtctcattccctgaaataccttaaaatgtcatcgacaccaaccctcccccttctgtctaccctgctcacatgtacagtgacagggaactcaccaccttttgaagaggcagttcattttctttgcaaagctctctcctaactttctccgtcaattccagccagcatggccacatgggtcacgcctggtccctttgcacagcagcccttcacacatttgaagggtctacgtccctttttaaagcttagaggcacaagctcaggacagtcttcagtaaggaaatttgtggatttccctttggatctttcttcctctccggcccacaagtggctctagtctgacgagcatttaagctgcagatggtggcactccactcgggtctcagagccaccagatgtgcaggtgggacagtgnnnnnnnnnnnnnnnnnnnnnnnnngtcccttccaggtgctagccctggcaggcatagccctnnnnnnnnnnnnnnnnnnnaaatgctcttggtgagaggctcactttaaagaagtccaaaccgtgtgcttatccaaggggttctgctatttcagacttcacggcttgcatgtttgatttttctaagagaaaagaggctgcctgctgggtgtctgtggaaatgagattaaactgtacaatctcag

SEQ ID NO: 16737 - DNA, 816 bp, Macaca Fascicularis
tctcagttcagtgaacacaaacttatttaaagatgttttatatgtagaaattgtttgaaatcatactctaacccttagtgagggcaaagtgtagttgatagaagaaattgctgaaaaccaatctaacgtgctatgtttatcaagtcatgtactaaaatggaaagctagttttgagagattattcagaagccttgttattttaaaaatgaaatatttcaaagacttatttctaataataattcattgcccctgtttgtgatttagaagagtataacagctgtatttcatatttgcatccttatatatatcaaagaccaaggtatttccttctgctccaaaagatgaaaattgggaaagaaaactcacttgagtcttgatcaaacaagtgtcttttaagaagaaacttggtaatcattgtggcacccacagcaagctgttgccttaccagtgaaaaaggtgcactgatgtaacagctaaaacagagttgtgttcttaatagaacagttctaatcctgccgggtgttatcattatatattttatagttacctttctaactacttagcacagtttgagaatatgttaattgctatttactatttaaaaagttttactgaaatcagtccataagattaagatgagctctaatacgtaagattttcctctggaatggatgtgagaaatgtaaattttctaacagcagtatttatcctggtttaattctaataggatgtctgttaatttcatgttgtgattaataaaagcattttcttcttcactcagttttatataggttcctgaactctatccacatgctg

SEQ ID NO: 16738 - DNA, 773 bp, Macaca Fascicularis
  misc_feature (1)...(773): n = A,T,C or G
gcccccacatcannaagctaaagggaaaagtcaagctgggaactgcttagggtcaacctgcctcccattctattcaaagtcaccctctgctcactgagataaatgcatatctgactgcctcctttggagaggctaatcagaaattcagaaggatgcgaccacttgtcttttatctacctacgacctagaagccccttccctgctttgagtcttcctgcctttgcttcgagttgtcctgcctttccagactgaatcaatgttcatcttgtgtatgttgattgatgtctccctagaatgtataaaaccaaactgctatgactaccttggnnnnnnnnnnnnnnnnnnnnnnnnnngtgtgtcccaggtgcatgtcctcaattttagcaaaataagctttctaaattaactgagacgtgtctcagattttcagggctcacaggtcaaactgacacaatttggaatatgaatgggaaagtaaaggtatgcatcaatgtttcagtaaaagaatatccctattctaggctggacatggtggctcacgcctgtaatcccagcactttaggaggctgagatgcgtggatcnnnnnnnnncaggagtccagggccagcccggccaacatggtgaaaccccatctctaccaacaatacaaaagttagctgggcatggtggtgtgctcctgaaatcccagctactcaggagaggctgaggcagcaaaatcacttgaacccaaggaggtggaggctgcagtgagctaagattgtcacactgcact

SEQ ID NO: 16739 - DNA, 678 bp, Macaca Fascicularis
  misc_feature (1)...(678): n = A,T,C or G
caacaagtgcnnnnnnntgcagtctgaatacnnnnagaagaacgtggagcggatctggaggcagctgaagatcaccaatgctgggatggtgtctgacgaggagctggnnnnnnnnnnnnnnnnnnnnnnnnnnnnggtgtttgtgtccaatatctcgaaggacacacaggtgactcgacaggccttaaatgagatatctgcccggcacagtgagatccagcagcttgaacgcagtattcgtgagctgcacgatatattcacttttctgnnnnnnnnnnnnnnnntgcagggnnnnnnnnnnnnnnnnnntgagaagaacatcttgagatcagcggactacgtggaacgcgggcaggagcacgtcaagacagccctggagaaccagaagaaggcgaggaagaagaaagtcttgattgccatatgtgtgtccatcaccgtcttcttcttagcagtcatcattggggtcacagtggttggataatgtcacacattgttggcactaggagcaccagggacccagggcctggccttctctcccagcagcctgggggacagggcagagcctccagctggaccccttcctcacactggcccctatgcagaagnnnnnnnnnnnnntctggggttggcagatgctcattcatggtggcctcctccttcaggcctcagtgcctgggg

SEQ ID NO: 16740 - DNA, 731 bp, Macaca Fascicularis
  misc_feature (1)...(731): n = A,T,C or G
acgtcagagcaccggctgggcaaggactcccnnnccaacaagctgctctatgccaaggacatccccagctacaagagctgggtggagagataatacgcagacattgccaagctcccagccatcagtgaccaggacatgaatgcctacctcgcgcgagcagtcccgcctgcacgccatggagttcaacatgctgagtgcccnnnnnnnnnnnnnntcctacgtcagcaagtatagtgaggagctcatcggggccctagagcaggatgagcaggcgcggcggcagcggctggcttataaggtggagcnnnnnnnnnnnnnnnngtccattgagagctgagaggaggagccttgcattcctgggaagagggacccgtccaagctgtcacactgggagtctcagatggaaggacaagtgatggggatcaggccccagagcttgctgtcccctgagaccccatcctggggagaggggagggcccctctccctatgcaagccaagtttcgtcatagccagttccagccgggagagacagtgggcgtcatccatccacagtgagaacaccagagaacccggggccgggagaaggtggttcttcaagccgagaggcacgagctggggacagttctgcctctgtgactgctgctttgcatgaaaactcatttgatgtatattggggaaataataagaactttatttaattttttttaagaaannagggaaaaaaacagaa

SEQ ID NO: 16741 - DNA, 758 bp, Macaca Fascicularis
  misc_feature (1)...(758): n = A,T,C or G
ctgagtacagtctagcacaggtatgtccccgggtcaaaggggtgtgctcnnnctcatcctagatgccttctctgtgccttccacagcctcctgccttataacacgactgcccccgcccnnnnnnnngccattccaattcttcccggcnnnnnnnnnnnagccttatctaggaaaggaggagtgggtgtagctgtgtggcaagactggggcctcccccatcccagcttctccaccaccccagcaggtcaggatatcagacagtcctcccctgaccccgcctccttgtagataccaattcccaaccagagccgaatactcgatatttatagtcacacccctgtacagcatttttcataagttatatggtaaacggtctggatgatttgtgctcctagtgctctcatttnnnnnnnnnnnagggttcttctatgaaatgtaaagaaagaaaccactttgtatattttgtaataccacctctgtggccatgcccgccccacccactctgtatatacgtaagttaaacccgggcgggggctgtggccatctttgtnnnnnnnnnnnnnnnnnnnnnnnnntctttgtacttgcattgattgtataataattttgagaccgggtctnnnnnnnttgctcaggctggtctcaaactcctgagctcaagcaatccgccctccnnnnnnnnnnnnnnnnnnnnnatgacaggcgtgagccaccacaccagnnnnnnnnntaattttttttttttttctggtgtggaa

SEQ ID NO: 16742 - DNA, 747 bp, Macaca Fascicularis
  misc_feature (1)...(747): n = A,T,C or G
cactcccaaactgcntgctggcatcagcatccaagaatttcctgaaatgagtcccctggcccctggagaatctgccactgctgtaatgggcattaatttctgtgactcaacccaggcagccaacttccagctgtgcacccagacccgacagttctatgtctccattcagccacctgttggggagctgatggcccctgtgttcatgagtgaaaatgagtttaagaaggaacagggaaagctgatgggcatgaatgagatcacagagaagctcatgctgccagacacctgtcggagtgaccacgttgtggtgcagaaagtgactgccactgccaacctgggtcgtgttccttgtgggacatctgatgagtacaggtttgcagggaggacactaaccagtggaagcctcgttctgctgaccctggatgcccggcaagctggagctgcccagctgactgtcaacagtgagaaaatggtgattggcaccatgctggtaaaggatgtgatacaggctctgacccagtgacttccaagtgctgtgacctctttggctcctatctgtacctccccatgacatctgggctgtcagtccctctcacctttctctctctctcatcatcatcctcatgccagatagcattcagggtgtcctctctccctcgggaggaccacgccttcccctaatcccctccccatgtgttccttagtgatctgtgcagagggagatggcagtcactcccttcagtcctc

SEQ ID NO: 16743 - DNA, 734 bp, Macaca Fascicularis
  misc_feature (1)...(734): n = A,T,C or G
cgtatgtgnnnnnnnnnnnnnnnnnnnnnnnnnaaggatttcaggggagcagtatggaannnnnnnnnnnnnnnnnnnnttaggaatctcttttatggagcttgctcttgggaggtttccatatcctcagannnnnnnnnnnnnnnnnnnnnnnatgcctctccagcttctgcagtgcattgttgatgaggattcgcccgtccttccagttggagagttctcggagccgtttgtacatttcatcactcagtgtatgcgaaaacagccaaaagaaaggccagcacctgaagaattgatgggccacccgttcatnnnnnnnnnnnnnnncggaaacgccgctgtggtgtccatgtgggtgtgccgggcgctggaggagaggcggagccagcaggggcccccgtgaggccgccgcagggcgctgaaagccccggaccagtcaccaagaacaacccacctgtcgcccctctccgtacgctgcctgcnnnnnnnnnnnnnnnnnnngccctggcttccctgccttcgccttcacccctgccagcaggtggccttgcctggggagccccacgtgtggcccgccccaccaggccatccccatatcttcnnnnnnnnnnnnnnnnnnnnnnnnnnnnnnnnnnnnnnnnnnnnnnncgagaatggaggctcctagggtccctgcccacttctgttttcctaacgtttttctctgtaaagggtcaggcccatcagcatcactg

SEQ ID NO: 16744 - DNA, 743 bp, Macaca Fascicularis
gatttagacaacacaaagagcatccaaagaaagaagacagaggtggaaatagaaaccgtacatgtcagtacagaaaagcttaagaatcgaaaggagaaaaaaagccgagatgtagtctctaagaaagaggaacgtaagcgtacaaaaaagaaaaaggaacaaggccaagaaaggacagaggaggaaatgctttgggaccagtctattcttggattttgaagctttcaaagttggttcttccaaagttaagttgaaaaaataggtgagagcttggttttatgatgtccatgttcataccacttttcttatgtgaataggttaacttctaacaaaggccaagtgaacagaaagtgtttagcatgcttgctctccaacacagaaattacttttcctcattttctaaaagcattattacatttttttgacatatagtgtaatttcctttaatgaaagtcactctgcttttattcatcaaattgctttgatggtagaattattttctcttgggaggttatttattttaaattggaggattaatggactttgcacaatctgtttcttgattgggtttgttacagttttgagttgggtattttatgttcattggtttttctctatgaagcaatttttttctcctgtattagatctaacttgcagtgtattttctaggctggaaagtggaaaatgaaatacattataatcttaggttacataaagtttctaaagtttcaaataatcttgat

SEQ ID NO: 16745 - DNA, 1033 bp, Macaca Fascicularis
  misc_feature (1)...(1033): n = A,T,C or G
tcctgcgcaggagccgcagggccgtaggcagccatggcgcccagccggaatggcatgatcttgaagccccacttccacaaggactggcagcggcgcgtggccacgtggttcaaccagccggcccggaagatccgcagacgcaaggcccggcaagccaaggcgcgccgcatcgccccgcgccccgcgtcggggcccatccggcccatcgtgcgctgccccacgnnnnnnnnnnnnnnnnnnnnnnnnnnnnnccgcggcttcagcctggaggagctcagggtggccggcgttcacaagaaggtggcgcggaccatcggcatcttctgggatngaggaggcggaacaagtccacggagtcnnngcaggccaannnnnnnnnnnngaaggagtaccgctccaaactcatcctcttccnnnnnnnnncctcggcccccaagaaggngnncagnnnnnnnnnnnnnnnnnnnnnnnnnnnncagctgacgggaccggtcnnnnnnnnnnnnnnnnnntataagaaggagaaagctcgagtcattactgaggaggagaagaatttcaaagccttcgcnagtctccgcatggcccgtgccaacgcccggctcttcggcatacgggcaaaaagagccaaggaagccgcagaacaggatgttgaaaagaaaaaataaagccctcctggggacttgtaatcagtcagcagtcacgctgggtctccccgtggtgtatttcgtgggagctgctgggcctgggatggggtttcgctgctgtgacttccttacaggggatttggggctttcttgaaagacagtccaagccctggattatgccttcctttctgtgttaaagcactgggtggtttggtcagtggctgatgtaaaatggttttcttgtggggaggttacagaggctgactttggnnnnnnggacttttttttttcttaaagagataaggttgggctggtgctcacactgtcatcccagcacttgggattggctcaggagttcaacaccagcctggccaacannnaaaatc

SEQ ID NO: 16746 - DNA, 1044 bp, Macaca Fascicularis
  misc_feature (1)...(1044): n = A,T,C or G
cactaaagcaatatgctatggactattcgaataaagctcttgagaannnactgaatnnnctggatgcgtactccgatcttgctgagttcctggaggcagaatgttaccagacaccattcagtaaggaagaccctgatgctgagaagcgacaatcccatcagcactattgcaaccttcagaaatataacgggaagtctgaagacactgctctccaatgtggtttagagggtttgtccataagcaaaaaatcaactgagaaggaagagatcaaagaccaaccacagaatgtannnnnnnnnctgcttccacaaaatgcaccgaattattggtatcatcaaggattaattcataagcagaatggagatctgctgcaagcagtcaaatgttatgagaaggaactgggccgcctgctaaggaatgccccttcaggcataggcagttnnnnnnnnnnnnnatctgagcttgaggatggcagtgaggaaatgggccaggacacagtcagctccaatcctagagagctcgtctctaactcagagtaactgaattgagacagaggaggaaaacagagcatcagaagcctaaaatgatggttgtgaagggtaggaagataggaagacagggggccccagcttggggttgctgagcagggaagttttgcatgttgctttaaagtacatttttaaagaattgtttcgcatnnnnnnnnnnnnnnnnnnnnnnnnngtagtcagaagttctgataactaatcactggtagcaataaatgcttcaggcccacatgttgctgattagttctgagttttcattcagttcaccatataaccctcattccagcccttcctgccaagagtcataattggtgactgcctannnnnnnnnnnnnnnnnnnnnnnnnnntttcatctagccttctggacctcaaagattaacttttgactaaccctggagcatctcttgtctcacttatggcttnnnnnnnnnnnnnntatgtattcttgatagcaatactgtaatcaatgtgtattcttgatagtaatgctacaa

SEQ ID NO: 16747 - DNA, 596 bp, Macaca Fascicularis
  misc_feature (1)...(596): n = A,T,C or G
cggaaatggcagaggtagaggagacactgaagcgactgcagagccagaagggagtgcagggnnnnnnnnnnnnnnncacagaaggcattcccatcaagagcaccatggacaaccccactaccacccannnnnnnnnnnnnnnnnnnnnnnnnnnnnnnnnnnnnnnnnnnnnnnnnnnnnnnnnnnnnnnnnnnnnnnnnnnnnnnnnnnttggaattcgctccaagaaaaatgaaattatggttgcaccagataaagactatttcctgattgtgattcagaatccaaccgaataagccactctcggctccctgtgtcattccttaatttaatgtcccccaagaatgttannnnnnnnnnnnnnnggactggcacgtggcagtcgccttggaacccactcagaccaatccagtgaccatgtgtgggctggcagctcttcctcccccaccaaaggaacccctgnnnnnnnnnnnnnnnnnnnnnnnnnnnnnnnnccgtctctcctcacttccaggttttagagcaagagcttgcaagaagcccgcacccagcttccttctgaccttcnnnnnnntttgtcgccctggagaaagctg

SEQ ID NO: 16748 - DNA, 760 bp, Macaca Fascicularis
  misc_feature (1)...(760): n = A,T,C or G
tcacagannnnnnnnnnnnnnnnnnnnnnnnnagccgcagcaaagcnnnnntgaagctcnnnnnnnnnnnnnnnncaccagacaggaagtgaatgaattaaggaagnnnnnnnnnnnnnnnnnnnnnnnnnnnnnnnnnnnnnnnnnnnnnctctctctggccgaggagcagatcagacggttagagcacagtgaatgggactcttcccggactcctatcattggctcctgtggcactnnnnnnnnnnnnnnnnnnntagatcttacaagcaacagttgtcgaaggacccggagtggcattggatggaagcgagtcctgcgttcactctgtcattcnnnnnnnnnnnnnnnnnnnnnnnnnnnnnnnnnnnnnnnaatgattcatgtcctgctcattctgtgttttacgggccatctatagacttagttgttactctttggaccactcgcctcagaacttggaattctctcacctctaacatcagaactatcnnnnnnagtggaacagtcttcccatttacaggtcttctctccaactctccacggannnnnnnnnnnnnnnnnnaggtggatacgaggacaggttggagctgcagggactggcaagtctgctttcttctactgccctgggcctgaacacttctgcttaatctgagaatcacagttggtttgttgagcctaatatttgttgagattttgcaggaccctgatcttttgtggtcctgtaaaagatactgaggaatgtcagctaagnnnngag

SEQ ID NO: 16749 - DNA, 769 bp, Macaca Fascicularis
  misc_feature (1)...(769): n = A,T,C or G
aaagtggtataatatgtgtactgtatattnannnnnagtaatatttttatattgcattttnntattaaaaaaattaacagttaatgtttcagtcaatatattatctgtagcannnnacaaataatgtgtgctttgaaccaaaatgctcaacatttggactcaagcatcaacaccaaattattcctcccttnnnncatcaatagagtnnnnatccacatgagaaactgtgtgtgctttagtgttagaggagataggcagagcagtcttgcttagttccttggtgcggcttcttgcccacnttgacatggaacggctgtgtctgctttagcacgcacgctccgaatgactcatggtgataggccatgctggctgctgtcgctgagcgggacccaggccaagaagcgtgacctcaggccagcctgtcnnnnnnnnnnnnnnnnnnnnnnnnnnnnnnnnnnntttctattccgcagtcgcagagccaaccccgcgttgacaaggtgcataatgagtgcacaccatcctgtcaaggtgcatacttagtgaactccatcctgctcaacgtgtatttcaatgtttcacttactggacgggtaacaagaaaaaaatcctaacccaggcagtcaccagaaataaannnnnnnnnnnnnnnnnnnnnnnnaaaaatgttaattttatgacttagcacaaaaatattttcacaacttgaatatatcaaaacccataccccttatccccccgctcatcatcacctctacccttctactac

SEQ ID NO: 16750 - DNA, 785 bp, Macaca Fascicularis
  misc_feature (1)...(785): n = A,T,C or G
aggaagnnnnnnnnnnnnnnnnnnnntactggcacaacagattttggctgggaaatgagaagattcatttgataagcacacagtnngccatcccatatgcattaagagtggaactggaagactggaatggcagaannnnnnnnnnnnnnnnnnnnnnnnnnnnnnngggatctgaagctgacaagtaccgcctaacnnnnnnnnnnnnnnnnggtgnnnnnnnnnnnnnnnnnnnngatggctatgattttggcgacgatcctagcgacaagtttttcacatcccacaatggcatgcagttcagtacctgggacaatgacaatgataagtttgaaggcaactgtgctgaacaggatggatctggttggtggatgaacaagtgtcatgctggccacctcaatggagtttattaccaaggtggcacttactcaaaagcatatactcttaatggttatgataatggaattatttgggccacttggaaatcccggtggtattccatgaagaaaaccactatgaagataatcccattcaacagactcaccattggagaaggacagcaacaccacctggggggagccaaacagnnnnnnnnnnnnnnnnagaccatttcaaaagagatttacttttttaaaggactttatctgaacagagagatataatatttttcctattggacaatggacttacaaagtttcacttcattttaagagcaaaagaccccacgttgaaaactccataacagttttatgctgatgataatttatctacgtgcattcaataaa

SEQ ID NO: 16751 - DNA, 747 bp, Macaca Fascicularis
  misc_feature (1)...(747): n = A,T,C or G
agtagaaagtatcatataagtatatggnnngaattcaattcagttatttacatggctctaccagtaaatggttaacagtggagaccagaaatttagaaaatgtagaagactgaacgatatataagtgattgagaacatgagtctctctcctcatcatgtaggacatgggttgaggtcatagacttaattggtaggagttgctacttttgaagagtgaaatgctttgaggcttttaagagaattttaagttgattaactttttatttgtggaattatgatgtgggctttattaaaatatcacaattcggcattgtttcataaacataattataggccaccttttcaaaaattgcaagagttacttgaaatttagttcaaaggaccttcttagtaactcttgtaatttttatgggtacagttagttgtctgcataaagtcattccattttccaaagcttcttactctctgcacaaatgacaaattggcacatgcacaatggcacaggaaaagaagtaactgctaaggtcacatatgtgaggacattgcagcctttaagtattggaggccaaaggtaccagaaacatgggcagacagattaaaattgtcccttcttatgtttgtgcattgtttctatatggaaaattacatttttctgagagtaangntgtaaatatgcatctgctagtgttttggcaactctaagatacctaaattagttttgatcaacactgtcggattttaaaccca

SEQ ID NO: 16752 - DNA, 750 bp, Macaca Fascicularis
  misc_feature (1)...(750): n = A,T,C or G
gctgcattgacagatgctgtaaggccactgaaaagcggatgtctggacnnncagaggccctgcttcctgttgtacatgagtacgtgctttatagtgaaatgttaannnnnnnnnnnnnnnnnnnnnnnnnnnnnnnnnnnnnnnnnnnnnnnnnnnnngaagctttgacctataaaaagacagatactgatctgcttccagaggagattggaaaacttgaagataaagtggaatgcgctaannnnnnnnnnnnnnnnnnnngggaaagatggaaacaaaatatgcaaaatgacatcaagttagcatttacagatatggctgaggagaatatccattattannnnnnnnnccttgctacgtgggaatcattccttacatcacagaccaacctccacttggaagaaacctctgaagataaaccttaatcccattgaggacttctgtttgatctttgggagacagcatttattaaccaaagttattctttctggatctgccatgtcccttataaagtggatgaaaaatgttttgtactatctggaaaaccaacaacttgaaacctcaggtattccaggtcactgacatgaatttgaaaatatatctatctgtatggatatatatctatatgtatatagatatagaaatacagcgagagatctggcttggttttaattatgttcttaaatttgtgtgccaataattgcatatagattttttttcttaaatatttgactgtggaacatgccattt

SEQ ID NO: 16753 - DNA, 646 bp, Macaca Fascicularis
atacgcaacataattaaattttgagttctacatcagtaattcaagaaaaaaaacttcaatatccaaaccaaataaaatgtattgtgttgtgaatgttgtgacgtattctagctaatgtaataactgtgatgtttacattgtaaatattatttgagagttctacattttgtctttaactcataaaaagcctgcaatttcatatgctgtatatcctttctaacaaaaaaatatatttaatgataagtaaatgctaggttaattccaattatataagacttttttggaagagtagtaatagagcaaaattgatatgtttatttatagagtgtacttaactattcaggagagtagaacagataatcagtgtggctaaatttgaatgttaagcagatggaatgctgtgttaaataaacctcaaaatgtctaagatagtaacaatgaagataaaaagacattcttccaaaaagattttcagaaaatattatctgtccccatattttataggcaacctttatttttaatggtatttttaaaaatctcaaatttggattgctaatcaccaaaggctctctcctgatagtctttcagttaaaaagaacgacccctgcttctgacattgaaccttccctttaaaaagtgttaagta

SEQ ID NO: 16754 - DNA, 326 bp, Macaca Fascicularis
ggaagagagtaggtgtgggcacgtgaccaaaattcacatccctcttcacggcactcattcagtgtgtgtatatatgcaagttatttaacccacaggagcgcaaattccctcatatataaaaaggggataatattatgtaccccacaagaggaggaaaaataaacacgatgaatcaaaagcactcggcacgtgaggggtattaaaaaagcccgatatttttttctccccctctctctcatgtatatgctctggtccctgctttttaccccccagagataagaggtagcagacagagtctcttgggaggagaggttcaccctctttca

SEQ ID NO: 16755 - DNA, 747 bp, Macaca Fascicularis
  misc_feature (1)...(747): n = A,T,C or G
tgcataaagcaaggtaaaantgtatgccacatctcagttatctaaactggattagatccaagccaaggtttcccaacagagagcaaacggccaggcagtagggtagaaatcgagataaaaatcactccttccttgtgatccaannnnnnnnnnnnnnnnnnnnnnnnnnnnnnnnnnnnnnnnnnnnnnnnnnnnnnnnntcagcccccaccacaaacacagccctggaaacatacagtggctcaaggtcctcttgaaatgttaataattaatgttcccaaaccagagaatgctttgaaaatgtattactcagtgtaaattaattacatacatatttttctatatatttacttcaaattgtaaaaataannnnnnnnnnnnnnnnnnagagtgaagccagccggacttcctgggtcgagtggggcctaggagaactttcctgtcttacaagaggattgtaaaatgcaccaatcggtgctctgtaaaacacaccaatcagtgctctgtagctagnnnnnnnnnnnnnnnnnnnnnnnnnnnnnnnnnnnnnnnnnnnnnnnnnnnnnnnnnnnnnnnntgcactaatcagcaggattctaaaagtagccaatcgcagggaggattgaaaaaggggcactctgatagggcaaaaagggaacacgggaggggacaaataagggaataaaagctgctcaccccagccagnnnnnnnnnnnnnnnntggtcccctttcacgctgtggaagct

SEQ ID NO: 16756 - DNA, 750 bp, Macaca Fascicularis
tgctgctgctgcgagtccgcgacgagatccgcatgaccatcgctgcctaccagaccctgtacgagagcagcgtggcgtttggcatgaggaaggcactgcaggctgagcaggggaagtcagacatggagaggaaagtgagtggggtttaccgtgacccttggccccgtctcttctgtaaaccgcagggccatgtgcttgtcattccagcactacattctggcctcctaaggtgctctcctgacagtcacaacacttggacctgcatcacctcagtgagggacccctggttgagtatgatggccagcctggtggtcttggcagagttgtctccgctgtggacgctccatgccaggcactgacctcccactgggtggcagtatataccctggcaatgtcttatgtcccatgtcccttccacccaggctcacaccattccattcacctggcaacatcccaggatgactggtcattctctcctcagattgcagaattggagacggaaaagagagacctggagaggcaagtgaacgagcagaaggcaaaatgtgaagccaccgagaagcgggagagcgagaggcggcaggtggaggagaagaagcacaatgaggagattcagttcctaaagcggacgaatcagcagctgaaggcccaactggaaggcattattgcaccaaagaagtgataatttccaccatgataatttccacacaacgacaccttgggtattatttactatgttcttctggcagc

SEQ ID NO: 16757 - DNA, 1021 bp, Macaca Fascicularis
  misc_feature (1)...(1021): n = A,T,C or G
aatcatgacctnnnctgttccttcctgaagtcctgggcatgcatctgggacgcccgtggagnnnnnnnnnnnnnnnnnnnnnnnnnnnnnnnnnnnnnnnnnnntggaattctaagagcctcggacctgggtgtgtggctagggttgcccttgctggggcctggtgcccagcctcccaagtagctctgcgcagaagagctgnnnnnnnnnnnnnnagacgcgagacggaggccatggcgagaatccagctttgacctttattcaagagcggctgctgggttgccccaggatccggctgccagccctgaggccaagcacggctggagacccacgacctggtctgccgttgccctgagctgcagcctcagccccaggatcctgctcacagccaccgctgatgcaggcaggaagcagccctgggggattggacgctgctattgattcattaaaaaaaaaaaaaagaaaaatacaccaaggctccatgttccccgtgacaggtgggcctgaggggccggggtgaccccccccagcatggcagcatgatttctgtacaatccatccatcatctggggcacaggcgcggggcgcaggggctatttcttggctttggcggaattgcggggtggggtgatgggccggcccccagggttcaggccactgaactgcccgtacttccccttgttcttgtcggcgggcttgaggatctggaaggagcacatgagggtctcgtccacgctcatcatggcgccagctttgtcaaactcgccacagtagttgggagctgagaaaagtgtcaccagctgccgcttggcaaagaactcatagccatcttctaccacctggtgtgctcggcagatgaggtccaagtcgtgcttgtggaggaacttggccaccacctcggctccaaaggtaaaagagacgccacggtcgttctcgccccagccctgcacgtccttgtcagggtcagnccacagcaggtcacacagcnnnnnctggtcaggcacgtctgtgggccgcatga

SEQ ID NO: 16758 - DNA, 724 bp, Macaca Fascicularis
  misc_feature (1)...(724): n = A,T,C or G
ctctcccagcaggtctccccattnnnactcaggcacccccttcactctgcctacatactcagtctcattacagctttgaccaatggttggaacccaacaccagagctttgctaataattagtgtggtcaggagccgtctgagcctaatgagtcccagctgcattaggttaagagactcttccagagccagcgccaggtcttgaatggcacctctccctaggatacacannnnnnnnnnnnnnnngacctggatgacacccgcctcactgtggcagtgtattgcctgttaattgctgctaattctaattctgatgatgattcctactccattgtttaccccaaagcgtcagctaggctggagtgatttgttacaaaagagcaaaagatgagtccctgcttccctcagaaataaagggaggtgagctgcagggttgcattgggcttctccgcctcccaactcttcccattcccagaatccagaagtcagctttgcatgttccccttcctgggaggaaaccaattgtgagaagggtatatgttgccccctcccctcccatcctcctaagcagtcctggcttttcctcatcactcccctctacagtgcctggtagacaagtgctacgttgaagaatacaaacctcttgttaagacttgtcctgtagcttgatattacagatgtgctattagtgcaataaggtgaaggctgtctgcccagagaaataag

SEQ ID NO: 16759 - DNA, 756 bp, Macaca Fascicularis
  misc_feature (1)...(756): n = A,T,C or G
ttccttccaccagtggtggttctggctataagaataatggtcccggggagatgcgtagagccaggaagcgaaaacacgcaatccgctgttcctattgtggtgacgagggtcactcaannnnnnnnnnnnnnnnnnagagtgacaaggtccaggtttttgagaatttgatcatcaccctgcaggagctgacccataccgagatggagaggtcaagaggggcccttggcgaatacattgacttctctgagccactctaaggaaccagctcccagatttcagtgaacccttacctatattcagcatccagtagtgggaaaactgggttggggtgggggcggggcttctaactgcatgaattaatccacaaagtggctatcttttggggtggaggagaaagggtcttggataccagcacattggagggagatagcctgacctctgtccttgctccttctccctgcagcctacgggtctgttttctgtgtgtgctcacttccttgacagctttattttttgtgaaagtggtataatttattgttaaatctttgaacaataaaaaagtacaaaaagtgaagtacaaattacccaaatctttccacccttatgtaatcatggtcaaccctttgatgagtgcccttctagatatttccctatacctatgtacccagatagatatatgtatagataaaagtgatgaaatataagtgcnnnnntatactctgtattttttcaccaaacaatatatgttgtgagctg

SEQ ID NO: 16760 - DNA, 749 bp, Macaca Fascicularis
  misc_feature (1)...(749): n = A,T,C or G
ttttaattttaagattncnncnnnnnnnnnnnnnnnnnnnnnnntattttgtttaaatgaagggatatataagctttctaatggtgtcttcagaaannnataaaatgtaaatactgatttgattggtctttaagatgtgtttaactgtgaggctatttaacgaatagtgtggatgtgatttgtcatccagtattaagttcttagtcattgatttttgtgtttaaaaaaaaaataggaaagagggaannnnnnnnnnnnnnnnnnnnnnnnnnnnnnnnnnnnnnnnnnnnnnnnnnnnnnnnnntaaactctgatttnnnnnnnnnnnnnnnnnnnnnnnnnnnnnnnnnnnngctttaatttgctaaagctgtgcacatatgtaaaaaaaaaaaaaatagattattttaggggagatgtaggtgtagaattattgcttatgtcatttcttaagcagttatgctcttaatgcttaaaagaaggctagcattgtttgcacaaaaagttggtgattccctcccccaaatagtaataaaattacttctgttgagtaaactttttatnnnnnnnnnnnnnntgaaaaaatccctttgtttctatttataaaaaaaagtgcttttctatatgtacccttgataacagattttgaagaaatcatgtaagatgataaagcatttgaatggtacagtagatgtaaaaaaaattcagtttaaaagaacatttgtttttacattaaatgtttattgaaa

SEQ ID NO: 16761 - DNA, 1268 bp, Macaca Fascicularis
  misc_feature (1)...(1268): n = A,T,C or G
gtatactccagagcaagtggctatggccaccgtaacagctctccaccgcaccgttcctgcagctgttcctggcatctgctttttgtctggtggcatgagtgaagaggatgctactctcaacctcaatgctatcaacctttgccctctacctaagccctggaaactaagtttctcttatggacgggccctgcaggccagtgcactggctgcctggggtggcaaagctgcaaacaaggaggcaacccaggaggcttttatgaagcgggctgtggctaactgccaggcggccaaaggacagtacattcacacaggctcttccggggctgcttccacccagtcgctcttcacagcctgctacacctactagggtccagtgctcgccagcctagctccagcacttctagtaggagggttgaatgggagcaacttttcctccaatcctggaaattcgacacaattagatttgaactgctggaaatacaacagatattaaatcttaagtacaatggggagaaaaaacaaatcagttattgaaacataaaaatgaataccaaggatctaatcaaatttcacacagcagtttccttgcaacactttcagctccccatgctccagaatacccacccaagaaaataataggctttaaaacagtattggcttctcatccaaagaacaactgctgattgaaacacctcattagctgagtgtagagaagttcatcttatgaaacagtcttagcagtggtaggttgggaagcagatagctgcaaccaaaaaagaaataaatattctataaaccttcagctgctatcgggtttcacttttctgctcttgttgtccaaagactcagtgtatttcattacttttnnnnnnnctnnnnnnnnnnnnnnnnnnnnnnnnnnnnnnnnnnnnnnnnnnnnnnnnnnnnnnnnnnnnnnnnnaatttnnnnnnnnnnnnnnnnnnnnnnnnnnnnnnnnnnnnnnnnnnnnnnnnntctagacctaggatcctctattagatttcttaaagttccctctgattcnnnnnnnnnnnnnnntttgagaactaccaatctaaatttcaagtttgagggtatttgaaaatttaaagccattcaccatacgaagacagctaaaaatgtagaatgattttgagcaacttgtggagtgtaataagataattcatgtgacttcaatgcttggagcattcctcttcaagtggcccagatttggtgaaacaggactaccttgtcatctgcatgtccaggt

SEQ ID NO: 16762 - DNA, 837 bp, Macaca Fascicularis
  misc_feature (1)...(837): n = A,T,C or G
cagccantnnannnnnccacgagaaattacgacgagtnnnnnntcgaggacnnnnnnnnnnnnnnnnnnnnnnnnnnnnnnnnnnnnnnnnnnnnnngtctcaagtccaccggcnnnnnnnnnnnnnnnnnnnnnnnngcccgtccctacagtgaactgaactatgaaacgagccactacccagcctcccccgactcctgggtgtgaggagcggggcacaggcgctccgggaacagtgcatgtgcatgcataccacaagacatttctttctgttttatttttttttcttctgcaaatttagtttgttaaagcctgttccgtaggaaggctgtgataaccagtaaggaaatattaagagctattttagaaagctaaatgaatcgcaagttaacttggaaatcagtagaaagctaaagtgatcctaaatatgacagtgggcagcacctttctagtgtgagctgtagagtaacgagaagtgctttatactgaacgtggctgatgggaggagagacgaggcatttgggccggtggggcgtgagagttatcgttaagcacaagacacagaatagtttacacactctatgggggacggcttctcacgctttgtttactctcttcatccgttgtgactctaggcttcaagttgcattggggttcctctgtacagcaagatgtttcttgccttttgttaatgcattgttgtaaagtatttgatgtacattacagattaaagaagaaaagcgcgttgtgtatattacaccaatgccgccgtgtttcctcatctatggttctaaatattgcttcaatttcaaactttgaaagatgtatggatttcca

SEQ ID NO: 16763 - DNA, 680 bp, Macaca Fascicularis
  misc_feature (1)...(680): n = A,T,C or G
cccccaccacccaaatcacccaccaccctcgagtgtccagagcatcttcagnnnnnnnnnnnnnnnnnnnnnnnnnnnnnnnnnnccactacagcctcaaagatctcagctctggagaagctgctcaagcctcggacagnnnnnnnnnnnnnnnnnnnnnnnnnnnnnnnnnnnnnnnnnnnnnnnnnnnnnnnnnnnnnnnnnnnnnagggaaggccaaggatttcacattctgatctcgaccatcctgggccttttcctgctggcacttctggggctggtggtgaaaagcgctgttgaaaggaggaaagccctctccaggcgggcccgccgactggccgtgnnnnnnnnnnnnnnnnnnnnnncccagaggactcgcgggtcgccgcgaccgcgctcccaaaacaacatctacagcgcctgcccgcggcgcgctcgtggggcggacgctgcaggcaagggagaggcccccgttccaggccccggagcgccgttgccccccgccccgctgcaggtgtctgaatctccctggttccatgccccatctctgaagagcagctgtgaatatgtgagtctctaccaccagcctgccgccaannnnnnnnnnnnnnnnnnnnnnnnnnnnnnnnnnnnnnnnnnnnnnnnnnnnnnnnnctgtcccccgaccccaggctcagact

SEQ ID NO: 16764 - DNA, 756 bp, Macaca Fascicularis
  misc_feature (1)...(756): n = A,T,C or G
attctctgagcatttttagggatagccctagaacannnnnnnnnnnnnnngtaacaaataacatggtatttgcaaggataaattactaggatcttttaaatggtaataatacaagtaatcttaattagtatcacatactaaaagacaactataatttctgaaaaatatttatttcttgtttgatgaaagcattgtttctcagcaatgcatttaaaaaaatcttttagctgtaaattaaaaatggtcataatgtacccttggcagatttcagcatataccaaattttaaatttaaatcaacttgaattcagtggggtatacaaatcattttagctgtttagggctttttactgaatagaaaaaatataaacaaagttgtagagtaatgagaaatcctccacactgaaaaaaaactagtagttttaatatttttggaatcatattttctgaggtgtaactgactttcattagatcatacttttcctgacattttaacagtgtatttacatataaaaactgacaagataannnnnnnnnnnnnnnnnagcctatttgtgatttttatgtttttctctgacccatcattgattctataaaaaagtgccaggccaagaaacaatagttagagtaattcttcctttaagttcttnnnnnnnnnnnnnnnngcaagcatgtatcattcctgatgtacttctaccattgacagcaagaagaatatcaccacatctaattcttccatcattgtatgctggtgttc

SEQ ID NO: 16765 - DNA, 777 bp, Macaca Fascicularis
  misc_feature (1)...(777): n = A,T,C or G
agtatctttctgtannnnttcattatactacaaatgaaacatctgaatccattacagaacacttctgaattcttaaaaatcagaaaacatactgaagttttaaagtaattttgaatatttagataggctaacaatccttacattacccttgcacactggcatgcttattcactaatttgtgacattactggaactccaagagatactgtcaattaggtttcaacttttgactattatataccggaactcttaaaaccaagcctatttcaattagttacttaacaaatgtacttcattatcacatattctcctttaggacatgagtataaattcagctttttagaagtgtaatattagaagcagtaacctacaaattggtttaacaaaatcagttaaatctgccccaaccacttatataacaatttttttttttactgctgctacaacttatgagaatactgtatttttcagaaacgacaatggaactatgtttaaacaaaataattttatttcataaaaagaaatgaactagaaagaacaatgcccttaaaaaataaaattgtctgcttcactaaaaccatgttgtgagggaaattcatcaaaggctgttagcttattcaacacgtgtagaaattgggttctgatttagatacagagnnnnnnnnnnnnnnnnnnngactaaacactggcaaactgcatcttcctgtnnngaactggtaatttnnnanctagtttgcatttcactatctgtctccaaggatttttgtttttaagtaa

SEQ ID NO: 16766 - DNA, 756 bp, Macaca Fascicularis
  misc_feature (1)...(756): n = A,T,C or G
agctatatatcgatccatcgaaagtggacaattgtgcagtttgggannnnntgcccaggaagcccggcttgnnnngagggcgtgtgatgggnnnnnnnnnnnnnnnnnnnntcatattaccaaccgcagagaggaattggcccaaataaggaaggaggaaaannnnnnnnnnnnnnnnnnnnnnnnnnnnnnnnnnnnnnnnnnnnggatgggctactccacgcacgcagcccagcaggcgctccacgcagccagcgggaacctggacgaggcnnnnnnnnnnnnnnnnnnnnnnnctcagatgtggtggttaaatgattccaatcctgaaactgacaannnnnnnnnnnnnnnnnnnnnnnnnnacattgaccaattggtgtacatgggttttgatgcacttgtggcnnnnnnnnnnnnnnnnnnnnnnnnnnnnnnnnnccagctgnnnnnnnnnnnnnnnnnnnacaacggaggaagcctgcctcccgannnnnnnnnnnnnnnnnnnnnnnctttgtccccgccagccacatccccttctgactctgcaggaacctctagtgcctcaacagacgaagacatggagacagaggccgtcaatgagatactggaagacattccggagcatgaggaagactatcttgactcaactctggaagacgaagaaatgattattgcagagtacctatcctatgtagaaaatatgaagtcagcaacaaagaaaaactaaataatgaacagaaatagtgctaa

SEQ ID NO: 16767 - DNA, 716 bp, Macaca Fascicularis
  misc_feature (1)...(716): n = A,T,C or G
agagggaccagaagccnnnnnnnnnnnggcagcgggagaggcgctcgcttgggaccttccacctctccaacattgtcccctgggtcgctggcgcacgcggcacttcagagccccgcccggggccgcgaccccgaccgtcccggctgctcccctaggacgcggctaaactcttggccaaaaggcggtactcacgtggcagaagggaaactgcattaagaaaagaacgaaagctcagcggagccgcagcggcgcctctcccagaagtattactttttctattgttattttatacgttttcttttttatttttgtctttgaccatataagcttgtaactctgactgcagagagtgaggggtgaggggagaggcaaggaagtccttagcactggcagctcccacctcctcctcccgcccctgccccctcccccggagcctgcaaaagtgtaatccctgtatctgcttcagcctcccgccccagggaccgcggggcaggagcgccccctcccagctcttgcggctcagcccgcttccgtgggctccgggactccgacagcagggcggggacctcaggcctgggtctgcagggggcccggcctccgctgccgcgacactgcgagggagcagccagccaggagccgggcgttatattgcgattggcactttatgctgaccatcggtaacggacatttatcactggagtttttttttttaaact

SEQ ID NO: 16768 - DNA, 769 bp, Macaca Fascicularis
acacacacacacacacacacacacacagagagagagagagaccaaaatacttacacctgcaaaggaataaagatgtaagagtatgtctccattgttcactgtagcaaagggacagataagatcctgctttatttggacttggcacatataacgtatatatttagtaactttgtactatgtaaagtaccttatatactgcactttaaatttctctccagatgggtactttaatttgaaatgcactttatggacagttatgtcttataacttgattgaaaatgacaactttttgcacccatgtcacagaatacttgttactcattgttcaaactgaatgaaatttctaataatcccaaataatgaatgtagaaatctatctccataaattgatagaagaagaaagtgataagtattaaaaattaaatgtgataacctttgaaccttgaattttggagatgtattcccaacagcagaatgcaactatgggcatttcttgtcatatttctttccaaagaacatgatttgcatttatttttccccaaaagagagtcaagtactgacagattcattctaactatattgtttctgtcataaaattattgtgatttcctgatgagtcatattactgtgattttcataataatgaagacaccatgaatatacattttttctatatagttcagcaatggtctgaatagaagtgaccaggcaccatctcagcaatgttttctcttgtttgtaattatttgctcctttgaaaattaaatca

SEQ ID NO: 16769 - DNA, 968 bp, Macaca Fascicularis
  misc_feature (1)...(968): n = A,T,C or G
aatagattatctcagnnaaanntctctgaatgataacccttccttactactgggtgatgtgtaaatatttgttgggggacagggtctcactttgtcacccaggnnnnnnnnnnnnnnnnnnnnnnnngcttactgcagcctctacttcctgggttcaagtgatcctcctgcctcagcctccctagtaggtgnnnnnnnnnnnnnnnnnnaccatgctnnnnnnnnnnnnnnnnnnnnnnnnnnnnnnnnnnnttcaccatgtgaccaggctgtctcgaactcctgacctcaaatgatccatccacctcggcctcccaaagtgctgggattacaagcataagccactgtgcctggccttgatgtgtgaatatttgagaggtcataagcagtggttttggctatactgtactacaccgtatacatcagtaagagctcatcttggaacccgttttgcagttttaaaaattaaagacctacatcacagggttgatgtgaagaaagttttatttttcaaatgagtatttaatgaaagtatacataaccagttttgggtatacagatgcttctcaacttacgatgggtttatgtccagataagcccattgtgagttgaaaataccaaacgtcgaacatcacagcttagcctaccttaaaagtgctccaaacactacattagcctacacttgggcaaaatcgtctaatacagagcctattttttaataaagtatgttgaatgtctcacataatttttgaagattacattgaaagtgaaaaacagaatggttgggtacttgaagtacagcttctactgaatgagtaattctaaagttgaaaaatagaaccatcataaagtctgtttcctctagtaaaggtgagataaatgttttttcccacccaaaaaactatataaattcggattagctcatttctgcgtgtttaaatagtatgattatacattataaactggaa

SEQ ID NO: 16770 - DNA, 750 bp, Macaca Fascicularis
  misc_feature (1)...(750): n = A,T,C or G
tacatataatatatatatatatatattataaatatcaaagaaattatatatctatcctgggatgggaaaatgagnnnnnnnnnnnnnnntggagggggatcttactcttcnnnnnnnnnnnnnnnnnnnnnnnnnnnnnnnnnnnnnnnnnnnnnnnnnntggttccctctcatttgttccagttactaaggaaatagcatcctctgttggtgctaagtgtgattaggaagaagcctggggagaggcgagtctgggattttggtcacaagagggagggacttggagaggagaattagttttctaggctcattggcatttagtttccctaggaaaggggtcaaaacttcaagacactggtggtggggggagatcaggaaaataacttggcctagctcaaacaatattggataatcccctccttgggggagagggattagagtgggctccttctactagccccttggagcctcccctagcttacacggttaacttgattttaaaatccaaggccaggagagaagaatccaaaaagcaatatttttcatcacatgccaaaaacgggggatagagagaaggagtggcaggcctaggcccctccaatnnnnnnnnnnnnnnnnnncctcagcccacctcactatggtgctgggtagaggggatacctgggttctaacctctaaataggggagatcccagcctccacaaagaggcccttttattttttattctgattagccatttaaaccaacgag

SEQ ID NO: 16771 - DNA, 718 bp, Macaca Fascicularis
  misc_feature (1)...(718): n = A,T,C or G
actgtctacntnnnnagatccttggtgtgtatcaccaatgcaggatgctccttagagaagaaaaaaannnnnnnnnnnnnnnnnnnnnnnnnnnngctttgaattactctgtcattctggactaaatctctttaactgctggatagctgtagaggaattcttcctgctacttaggaattgggaaacaatgcttgctaaaccatgcccatgtgagcacctgtctcccactcaaacctctcccacctcccaacaatggcacttgaatggcagaataccagcagtgaaatggtattactgtttccctctgagtgaaactgctagagtatgtgtcacgtagtgacatttttttctcactcaggctattgccatctgggattctctccctactacagttggcaaagttggtttgcagcaagaagctggtgggagggggccagggtgcaggaggagaagaagaaaagtttggaaggaacaaactgttttgcttctaattttgacagtatcagtgtttcctgttgaaaatatacaataattttaaaagatgaatgcctaaagttccaattttggcaaatatgggaacctcagcaatgctaattttctagaaaaacccagggctctttggnnnnnnnnnnnnnnnnnnnnnnnnnnnnnnaataagacaatggttttgagaagccaggcaaataatctttctcatagtagaacagaaagttacaaa

SEQ ID NO: 16772 - DNA, 177 bp, Macaca Fascicularis
tcttctctccccagggggcactgggactggtccttgccctcatcgttagcctgggccttccccagaggtattaagtatgattcctccatcttcagttcttttcaggggcatcctgcccatagtacctagttcccaaggggcccccagtcacgtggtgaaacctagcactcgtgcagc

SEQ ID NO: 16773 - DNA, 706 bp, Macaca Fascicularis
  misc_feature (1)...(706): n = A,T,C or G
gtgcaggctaaatacannnnnnnnnnnnnnnnngcctgggccagtggattgctgttgacaccactgatgacaggcatatatacccccgaggcacctgcatttgttgagtttccaaatggctccattttattttctgctgtggtcagtgcagcctgtgagaatgtgaaggagcccaacaaaggcccttctagtgtccccagcccttgcctttccctgtgcaggttcctgnnnnnnnnnngagatgaccgagaacaaacgccagcctctgccccgatgagggaatggtgggggcagggcttctgtgctgagcctgtcatgggcacctccgggcattcaggagcagtggggagagtgcttgcctctcattctccatgnnnnnnnnnnnnnnnnnnnnnnnnnnnnnnnnnnnnnnnnnaaggggacggagacaccgactgaggcggtgggagctgcccaccagagtgcctctgagcagctcacagtgtgtgcccaggcgtgccatccctgtgggcagcaagaagctgggatcgctgnnnnnnnnntttcccagcnnnnnnnnnnnnnnnnnnnnnnnnnnnnnnnnnnnnnnnnnnnnnnnnnnnnnnnnnnnnnnnntttccttgtaggaacagcctttctcgaatctatttnnnnnnnnnnnnnnnnnnnnnnnnnnnnnnnnnnnnnnnnnnnnnnnnnnnnnaga

SEQ ID NO: 16774 - DNA, 824 bp, Macaca Fascicularis
  misc_feature (1)...(824): n = A,T,C or G
cagaactgaagaannnnnnnnnnnnnnnnnnnnnnaactacccagctcaaagagctgcccacacttcaggggaaccgcctgcaccgcaaacaccccaaactagggaaacttggatttaactggtcagaagcaggtattcaaagcagagaacaatccctgggtgacccccattgcagaccagttccagcttggtgtgtcccatgtgtttgagtatatccgttctgagacatacaaatacctctatggcagacacatgcaggccaacccagaaccaccaaagaagaataatgacaaatcgaagaagatcagccggaaacccctggcagccaagaacagataaggaannnnnnnnnnnnnnnnnnnnnnnnnnnnnnnnnnnnnnnnnnnnnnnnnnnnnnnnnnnnnnnctcaaannnnnnnnnnnnnnnnnnngccttttttatttttcttttcactctgtaatgcttcccaccttaccttttagattcttttggtaggtgggagattgttgtaaggtctttaaaccatttccatttgtttctttaaaattacgaaaagcagggaacaaagctcttattcaactgcaaattccatagtgggctcaggcttttgttgaatagacatcacaaggttgcttattatcaaaagaataattaaaatcatgtaaccatttannnnnnnnnnnnnacacttttcactctttctgttgattcacacaactcattattttgctttattaaaaatctnnnnnnnnnnnnnnnnatgnnnnnttaacttacaaatgattttaataaaatcttgagtgagtttgtatcacatgttac

SEQ ID NO: 16775 - DNA, 413 bp, Macaca Fascicularis
aaaacccaaatctctcaaaatgtaaattatgtatacctgccaagataccttttccagggtgtctgtgcacattttaagttaattcacataatataaaaattactcaatgtgactgttgatttgctgaactttacatatcacaaagtgaattatttgtgatactttagttaataaaatggtaaatttttttctcagttattgaacaagcaagcattatccagttgatctggcaatgactttttgtgtgtgggccacaatattgattttcccattaacaatttttttttgttttttaaatactaatacgtttcacactatagtttgtgtaacaacacgtgttcgcattatctatgttgctgttacttttgtgcttttattctttttagactttataaaaaaaaaaaaaaaagctc

SEQ ID NO: 16776 - DNA, 707 bp, Macaca Fascicularis
  misc_feature (1)...(707): n = A,T,C or G
tcatccggtccaatctctttcctctttcnnnnnnnnnnnnnngcagaaatcctctcttcagcttcttttgtaggtgggaatccagcctctgttaggtatgtccagggatggaaacttactcccctacaaaaaatagagcttaatggagnnnnnnnnnnnnnnattaaaaaacaagttcagatgaaatatcagtaactgtcttggacagtgctgaaatcaggtggttaaacgggtaaacaaaatatactgtattttgataaatggcacaaaaacaggcagtcatctttaagggctacgcctaggcaaactactaacatgcattgtgagaatgccgtgtatacctcacgtactgtgtactttgtacatatattttaccttttatacctacgttcggttttgttttgttgtgttgtgttctggctttgaggcttgtttcgttgtctgtgtctgtctgaataacctgcgtgtctaaaaccacgtgaaatgtgaatgattattggcaatattaccttgacagaatcatgggactttgagaagagggaggacagaggcctcnnncgcnnnnnnnnnctcgtggttgctcgactgttgtatctgtgatacattatccgactaaggactctgggctggcaggggcttctgccgggaactctagaaacactaggttcttcctgtacatacgtgtatatatgtcannnngtgagatg

SEQ ID NO: 16777 - DNA, 754 bp, Macaca Fascicularis
  misc_feature (1)...(754): n = A,T,C or G
gctgggcaatcatgcaaaacgctgtcctactaaactacaaaaaatagccaggcatggtgtgcacannnnnnnnnnnnnnnnnnnnnnnnnnnnnnnnnnnnnnnnnnnnnnnnnnnnnnnnnnnnnnnnnnnnnnnnnnnnnnnnnnnnnnnnnnnnnnnnnnnnnnnntcacactgagaccctgtctcaaaacaaacaaaaaatctcagccaatgaaaacacctgaaaatctctgtaaaagagaaagcagtctcttttacatcacagctctgtaaaaagttggcttaaaaccagttcttccaaaccattttctagtagagctggaactccttcagagggctggctggtgtgggaggggcctctggccaccgtggagggcctgcagggagctggccgaatctccagcgcgcctgcccccaggcctaggcagcagacctacccacaatggtgtcgggcacaggagcccagacattcacctcaccttgaaagagcctgttttatctgttacactgccttgaaattgaaagtatgaatgatgaacaaaaacagccttgcgcactacagccattacaaataacaggggatgtttgtgtgtaactggacaagagccacgtagcggcagcaataagtaaaatattctagggagaatttagtggacagcagaattttacttttaatgttttgagctttgctttttaaagtttattaattttagactgagttcaactcaaaactcaatgtgaagaatgaaaa

SEQ ID NO: 16778 - DNA, 650 bp, Macaca Fascicularis
  misc_feature (1)...(650): n = A,T,C or G
cactcctgagtcccttgacttttgtattctnnnnnnnnnnnnnnnnnnnnnnnnnnnntcctgggggccagcccctggagtcttccctccatggtagcctctaaccagcattcccagacacctgaggcagatagatggatgggctggtgggcaggggggtggctggggctgggccatcaccattccagagacaaggccagtgtatatgcaaactgggggactctcctctcccttctctccccagttctggtcctggccaggccatgctacactaacccctgcccccactctcctcccctcttttccttccttcctacccacttctccctctcccttcccctgactgttccacccaggaggaggaaacttcacatagccgtgctcacagttttttattttaaaggaatttggctggggagctgaacagggctccctgtnnnnnnnnnnnnnnnnnnnnnnnttgtcctcacaaccacctcaatcctccctccctgtcctcccctgtctcctttcctcctcctgggttcatgttgtaataaaaaaagattgttggtgtgtaattaatttgttcaaaaggaaaaaaaaagcaaaacaagaaacttggttccaactgaagcctattttaattttattttattattttcctcttg

SEQ ID NO: 16779 - DNA, 578 bp, Macaca Fascicularis
ctagatgccagtggacggtgggcaggtggatttagggaggacaggaccagcagcagcagcagtactcagtgatagggggctggctgggtcaggaatgtgagatgaacatgcaagtggaagggagaataggtgaagatgtgaacgaaagtagctctggagcctttcccttaccccaccccccacacacgcaacaactctgtacccctgcccagaacttggaacctcccaggaatgctgccttcctgcagcccagcctccagccctgggttccctcaggaattcgaagaccttggctaggtggtgagcttggaagggctgggctttgctttctgtctcctgtaacctctttccttactccttatcccatcccatttgagttcaggagtgaggcttaagatcttaataaataataccttactgcttaacctgtggcttgacctgtgaggagtagccttcaaatccaccttctgggagctgagcttcagagtttacaagggagcggttttctgagcccaccctagcagcctggtacttcggacaaccaaacagatggacgaacggagcacagcagtgctatg

SEQ ID NO: 16780 - DNA, 737 bp, Macaca Fascicularis
  misc_feature (1)...(737): n = A,T,C or G
acgcccggcccgagagccgccnnnnnngcaaccgcgagctctgccnnnnncgttggcgagccgggccctggtcccagtgctcggtgacctgtggcaacggcactcaggagcggccagtgctctgccgcaccgcggacgacagctttggcatctgccaagaggagcggcctgagacggcgaggatctgccggcttggcccctgtccccgaaacatctcagacccctccaagaagagctacgtagttcagtggctgtcccgcccggaccccgactcgcccatccggaagatctcgtcaaagggccactgccaaggcgacaagtcaatattctgtaggatggaagtcttgtctcgctactgctccatcccaggttacaacaagctgtgctgcaagtcctgtgacctgcacaacaacctcaccagcgtggagggcaggacacagcnnnnnnnnnnnnnnnnnnnnnnnnnnnatgtgttcatgcccaccctcccagtgcccactgtagtcacggaggtgcagccatcaccaagcacccccctggatgtccctctcaatgcctccagcaccaatgccacagaggatnnnnnnnnnnnnnnnnnnntagatgaaccctacaaaattcatggcctagaagannnnnnnnnnncacccaacctaatccctcgacgaccaagcccatatgaaaagaccagaaaccaaagaatccaagagctnnnnnnnnnnnngcggaagaaagag

SEQ ID NO: 16781 - DNA, 662 bp, Macaca Fascicularis
  misc_feature (1)...(662): n = A,T,C or G
ccagaaggcagtgttnctgcagagcntggtgcaggaggtagaacngaacatcgtggccggttatgggtctcccaaagatgtggctgtatacgcagcgctgggcctgtccccaagccagacatacatcgtgggccgtgccgtgnnnnnnnnnnnnnnnnnnnnnnnnnnnctgtcagatggctacgtggcccatttgggccagctggaagcgggctcgcactcgcatgcctcctcgggacccccaagggctgccttgggcaaaagcagctatggtgtggctgcccctgtggacttcctgcgcaaacagagccaattgcttcgctccagaggtccaagccaggtggatcgtgagggcccaggaacaccacccaccaccctggcacggggcaaggcgcggagcatcagcctgaagctggacagcgaggagccaggcccacagtaccaggnnnnnnnnnnnntttattgacacagccgaggggccagaggggctgcatgtgggaggctggggacccagacttggggccccagcgctgacccccccagccccacaccctacatctnnngtgtgcccctcggtgttacttccctttcatatgaggggacccagcgccagagggagggaggagggcgtgggcgtgggcgcagaggcttttccagtgtgt

SEQ ID NO: 16782 - DNA, 672 bp, Macaca Fascicularis
  misc_feature (1)...(672): n = A,T,C or G
cagaggcagagcttagcaagacccaggccacccagagccagaggcagaacttcagcaagaccaaggccgccgcacacaggagnnnnnnnnnnnnnnnnnaggccacccagggccaagggcggcgctccagcaagactgaggccactcagggccagaggcagagctccagcgagatcgagacctcccagggcccaaggcaggagcccagcaagaccaagaccacccggagcccaaggcagaggccccgaaaggtcaaggctgctcgtgnnnnnnnnnnnnnnnnnnnnnnnnnnnnnnnnncccagggccgaagcaggggactgatccgaagttccaccaagaatgaggctttatatgactcaaactggagcctcagcaagactgaggatgttcaaggccagggccagagaaccagcaaggnnnnnnnnnnnnnnnnnnnnnnnnnnnnnnnnnnnnnnnnnnnnnnnnnngctgagtccacctggggacccagcccgagtgtcagcaaaactgaggttggtcaggacctcacctactacgaagctctctgaagggaccatctagcccctcacttcttgctggggaggggagcagttctactcaccccccagcactggcactgagccagctgcctccttccagagcaattaaaaatcttagcaaacagtcctc

SEQ ID NO: 16783 - DNA, 702 bp, Macaca Fascicularis
  misc_feature (1)...(702): n = A,T,C or G
gtagagagaagaaannnnnnnnnnnnnnagagaaactgttcgggactcttcccagtnttcctccccattccaaagcagcagaaaacagtttgaggccttttttgcccaggacnnnnnnnnnnnnnnnnnnngtgtgctaggccttggagtcagtgaaggagtcgggcactggtttctggttctagaagaaagtgtctgggtcgtggttggtttaaggaactggannnnnnnnnnnnnnnnnttttctgccttcatcccaggaacaccatgaagaagacttctttctctacattgcctacagtgacgagagtgtcnnnnnnnnnnnnnnnnnntgtccctgagctggaggggggtctcattctacaaagagagaggtggcccccttttcttgacctcctcctccttcaagctcaaacaccacctcccttattcaggacgggcacttcttaatgtttgaagttttctctccagcctctcttcggaggggtaatggtggagttggcatcttgtacctctcctttctcctttcttcccctttctctgcccgcctttcccatcctgctttagacttcttgattgtcagtctcttcatatccagtgattgttttggtttctgttccctttctgactgcccaaggggctcagaaccccagcaatcccttcctttcactaccttcttttttgggggtagttggaagggac

SEQ ID NO: 16784 - DNA, 722 bp, Macaca Fascicularis
  misc_feature (1)...(722): n = A,T,C or G
cagaagcccgtgtggagtgtgctgtgtacacanntgctttgnnncacacataggnnntnnnngcttgggtgcttatcaagtgccaagacctgttctaggtgctgggaatacagcagtgagcaaaggggacgatactccctgctcacagagatgacacactggcattcttgagctgacagcactttcccatgaccataggtcattgtctacactgggtacactttgtaccagtgtcggcctccactgatgctggtgctcaggcacctttgtccaaggacaatccctttcacaaacaaaccagctgcctttgtatcttgtaccttttcagagaaagggaggtatccctgtgccaaaggctccaggcctctcccctgcaactcaggacccaagcccagctcactctgggacccatgttcccagcatcactgtcctcttgattgagagattctccttccaggcctaagcctgggatnnnnnnnnnnnnnnngaatccaaactatgaggctagttcttgtctaactcaagaatgttctggaatgagggttcaggcctgtcaaccatggggtttctgacctgagcaccaaggttgagggacaggattaggcagggtctgtcctgtggccacctggaaagtcccaggtgggactgttctggggacacttggggtccacaatcccaggtccatactctaagttttggatactgtgagtatgtattttacc

SEQ ID NO: 16785 - DNA, 1068 bp, Macaca Fascicularis
  misc_feature (1)...(1068): n = A,T,C or G
gtgggaactacaggnnnnnnnaaagaaaaaggaatgtgcatcaagaggagaagactatgagaaagtgaagttgctggagatcagtgcagaagatgcagaaaaatgggagaggaaaaagaagaggaaaaaccctgatctgggattttnnnnnnnnnnnnnnncccagttannnnnnnnnnnnnggttgaccaagnnnnnnnnnnnnnacatggaaacatatgagagactgagagaaaaacatggagaagagtttttcccaacatccaatagtcttcttcatggaacacatgtgccttccacagaggaaattgacaggatggtcatagatctggaaaaacagattgaaaaacgagacaaatatagccggagacgtccttannncgannnnnnnnnnnnnnnctacattaatgaaaggaatgccaaattcaacaagaaagccgaaagattctatgggaaatacacagctgaaattaaacagaatttggaaagaggaacagctgtctaatctcttcaagaactgtttatagaagcttgagaatggggtaaaaatttctgctagcaaaatcaagttctttttgaaattttatcagtaatccagaatttagtagtctatgccttctcactcagcatttagaaataaaaatgtgatttcttaaacatatatcctttcatgtatatttccacatttttgtgtttggatataagatgtatttcttgtagtgaagttgttttgtaataatctactttgtatacattctaattatattatttttctatgtattttaaatgtatatggctgtttaatctttgaagcattttgggcttaannnnnnnnnnnnnnnnnnnnnnnnnnnnnnnnnnnnnnnnnnnnnnnnnnnnnnnatagagtctagactcaggggccacttggggttatggactccaaagccacggacagtgatgaggaagatggcagtgnnnnnnnnngggctggnnnnnnnnnnnnnnnnnnnggcctgtgaccgaggtcaggaaggagtggagctattctcccatgatannnnnnnnntgcagttcccttttaaaaag

SEQ ID NO: 16786 - DNA, 676 bp, Macaca Fascicularis
  misc_feature (1)...(676): n = A,T,C or G
cggcctgtgacacagtattggctggttactctcatgtagcgcttnctatnnngaaaggggggggtttgttttgaggaggggttggggtttttaaattttttttctcctgactgagccaccagtatttatctctgaagagtttgtgctgagctggtttctgctaatttagtgatgaagcctatccaagttggagatagcttattattttcataaataaaaaacaaatgagatttttatatatatatatatataaatatatatatattaaaaaaaaagacagtatttatcgtagcattagtggtccagcacctcttgggtgaggctgtccaggcaccatgttttctttgagtccaactcattaaaaaagaatcatctttgtcacctcagccaagtgatttattttttgctcccccttttttgagtcacaggccgagctgcagcctaggaaacccaaatagggtttggtgggccacttagtgggcatggttatgttggtttatagcaccccaagaactgtgggtccctaggcccctgagagctggacagagcagagaactacagggccaagggtccagagaagtgataacttgacccagggccacacagcagaggtagagggtccttggccagcacactatctaccactctaccccacctcccactgcttgccttgctc

SEQ ID NO: 16787 - DNA, 768 bp, Macaca Fascicularis
  misc_feature (1)...(768): n = A,T,C or G
cccagcagtccatgcactgagaggcgnnnnntttntgccagctaccgtcaccagcagggccctggcctgaccccaccgtgtccctgtttgatggccccagctcccccttatcacgcactgccacccgtctactcctgcccctgctgccacatctgcccactgtgtcgagtgccccttgcccactgggcctgcctgccaagggagcaccacctgccccaggtgttggaccctgaggcctcaggtggcaggcccccatctgcccgacccccaccctgggcacccccatgcagccctggctctgccaagtgcccaagagagaggagtcacagtgactggactcagactcgagtcctggcagagatgttgatggaggaggaggtggtaccttctgcaccccccatgcccgtgaggcccccgaagacatcaccaggtctgagaggtggggccggggttccaaacctggcccagagactggaggccctcagagaccagattggcagctccctgcgacgtggccgcagccagccaccctgcagtgagggtgcacggagcccaggccaagtcctctctccccgttgaaggccaaatgggaacccaggagactgctgtgtgacctcagactgggctctgtgctcttgggcctcagtctccccatttgccaaatggagacagcagccactccacctgaagctgggctggggcggggcctgggggtgctatttaggggagcaaggggattcaggagaaaccaggcagcaggggatgaag

SEQ ID NO: 16788 - DNA, 258 bp, Macaca Fascicularis
gaggatgtggagtcagagaaactgccatgggacctgatctacctcgggcggaagcaggtgaaccctgagaaggaggcagccgtggaggggctgccgggcttgatggtggccgggtaatcttactggacaatggcatacgccgtgagcctggcgggcgcccgcaagttgctggcatcacagcctctacgccgcatgatgcctgtggacgagttcctgcccataatgttcgaccagcaccccaatgagcagtacaaggca

SEQ ID NO: 16789 - DNA, 562 bp, Macaca Fascicularis
  misc_feature (1)...(562): n = A,T,C or G
tggagagagtcntctgtggggagagtcctctgtggagagagtcctctgtggggagagtcctctgtgtggagagagtcctctgtgtggagagtcctctgtgggggagagtcctctgtggggagagtcctctgtgtgggggagagtcctctgtggggagagtcctctgtgtgggggagagtcctctgtggggagagtcctctgtgtgggggagagtcctctgtggggagagtcctctgtgggggagagtcctctgtggggagagtcctctgtcggggagtcctctctggagttctcttcggcccctggctcttcaccacctgtctctatgcccagcctccaagcccaggctgaggcagctggctgggcccttctttccggcaggttctccatggtggtacaggatggcatagtgaaggccctgaatgtggaaccagatggcacaggcctcacctgcagtctggcacccagcatcatctcacagctctgaggccctgggccagatcgcttcctccacctctccctatctcacctgtcnnnccctgtgccggggccctgcagttgg

SEQ ID NO: 16790 - DNA, 740 bp, Macaca Fascicularis
  misc_feature (1)...(740): n = A,T,C or G
ggcnnnctgtgtnnnannaagcccgggggaagaatgctaataagaacatgaacaagaacgccaatggggttaaaatgaaaaaggtgatcaagcnnnnnnnnnnnnnnnnnnnnngtgactttgagannnnnnnnnnnnnnnnnagnnnnnnnnnnnnnnnaaagccagccagaggaaattagatggactagcaaaagaggaggaaaagaaagaggagatgaaagaggaaaaaaaggaggaagtgaaagaggaagcaaggagcagtgtggnnnnnnnnnnnnnnnnnnnnnnnnnnnncctggggaagctaaatccacagaagatcaggaggaaaatgaagaggacaaagagcaagaggagaaggaagaagacagtgaagaggaggaagatgacattgactcttcccttgaaagtcccgaagaaaacaaccccctcagactttccgagagtaaaaagaacatgtttgggttgtggaagcctatggtattcnnnnnnnnnnnnnnnnnnnnnnnnnnnnnnnnnnnnnnnnnnnnacagcaggagtcagagttctgcctcatggagtgatggcagaccttggccagcgcgagggcagatccccagtggccaccaccctcagctttgggcaggacacactgtgccagaaccctccccatatgttccatgtgtccccgtctcctcagcctcagtcacccaggctggaaaggcttgtggggagcggctgactcccatctcctgcc

SEQ ID NO: 16791 - DNA, 834 bp, Macaca Fascicularis
  misc_feature (1)...(834): n = A,T,C or G
taccagccagatgtgaannnnnnnnnnnnnnnnntctgtgcagaagaattgggtaatnnnnnnnnnnnnnnnnnnnnnnnnnnnnnnnnnnnnnnnnnnnncactaagaaggaactagcttccagagaatctctgcctatgaattattacacagtattctaccatgttcaagagcaactacctagagactgctttgtggtaagcgaaggagcaaatactatggacattggacggactgtgcttcagaactaccttcctcgccacaggcttgatgctggtnnnnnnnnnncaatgggagttggtttaggatttgctattgcagctgccatggtggctaaagatagaagccctgggcaacgggtcatctgtgtggaaggagacagtgcatttgggttttctggcatggaggtggaaaccatctgcannnnnnnnnnnnnnntcatactcttggtagtgaataacaatggaatttacnnnnnnnnnnnnnnngatacttggaaagaaatgttaaaattccaagatgctgcttcagtggtccctccaatgtgtttgctgccaaattcacattatgagcaagtcatnnnnnnntttggaggaaaagggtattttgtacaaacaccagaagaactccaaaagtccctgaggcagagcctagcagacacagctaaaccctctcttatcaacatcatgattgagccacaagccacacggaagacccaggattttcnnnnnnnnncccgctctaatatgtaaatannnnnnnnnnnnnnnnnnnnnnnnntttctctttcttgcaagatgaaatttnnnnnnnnnnnnnnnnattactctact

SEQ ID NO: 16792 - DNA, 693 bp, Macaca Fascicularis
  misc_feature (1)...(693): n = A,T,C or G
atagtgacatgatnnanacnnnacagacnnnaaatgctaggagagacacagnnnnntgggagnnnnaggggagtaatagtaacacaggggaagagctcccctatggaccaggtgtagagaaaggtctatgcagaaataagttggagtttcccctaacgaaannnnnnnnnnnnnnnncctcattccttcaacttgtacctggaagtgtgtgttgttggggtgcagccacactattctatgacccagcatgggttagtgctacagtgggagagtaaattgaaggcctggaattagcttggggccaccgaagagactaggaggggagagaagaggagggaaggatttaggatggtaaagttaggtacagagacctccctgttcaaggcccctgacagctgtccctgcccttcttccccttccctgactgcaggggttatgtggaagtgtgtgtggcagcagggaggggagcaacggggaagggggagctggggagcttggctgagggtcttggaaatgagcagggatgggggggaatgtggatcaggtttactagcacctcccagggaggccatcttgggctccttctccaccccagcccccaaagcagcccttcccccagtgccctttgcattgtcccctcccccacccctgctgtgggttcccatcannnnnnnnntcagcgcctggcctacc

SEQ ID NO: 16793 - DNA, 767 bp, Macaca Fascicularis
  misc_feature (1)...(767): n = A,T,C or G
agcaaaagaaaaccccaacacctcacctttcgctgtttttgnnncatagattattaaaaaaagagaaagtctatagctataaatctttaaagagaaatatgaatacagttcccctaaactttcctcaaaagagaattgagtctacagccatttaaatgatctttgctgctacagaagtgctttaagagaattgcctgaaacatctgtattatatcgnnnnnnnnnnnnnnnnnnnnnnnnnnnnnnnnnnnnnnnnnnnnntgcctcttgcatgtattactaaataaaatgatctctctctctctctctctctcttttctaagaaacaattatgtgcactttgatacacaaccttctctaaccaactatatcaagacccaaaaattgaagaaaaatattgttttctcatacagtgagcagatttttcagtcttctaattctgacttgtcttggtgtgctagcctacaccttctctttggtttagttttccttttctataacactctgaattgctaatcttactaacacctatgatgttacctgaaatcaatctcccatatgtatgctgtatgctatgataagactcctgaaatatacttactctgtgcttgtgtatgtgaatgttaatgcaactattacctagagtgaactttaagctttattgttgaatgtaattccattatatttccttttgtacacctgtgaaaaagtggagtagtgtttttttaannnnttgttaatcannnntttgtgtatgaaagacacag

SEQ ID NO: 16794 - DNA, 911 bp, Macaca Fascicularis
  misc_feature (1)...(911): n = A,T,C or G
atgagcccacacagnnncgccagtcnnnnnnnnnnnnnnnnnnnnannnaatggtggacgatgnnnctgatgaccgtccggctggaacgcggagtgtgagagctccagtgacgaaagtccatggtggttcaggcggggcacagagnnnnnnnctctgtgacaaatgtgggagtggcatagtcggtgcagtggtgaaggcacgggataagtaccggcaccnnnnnnnnnncgtgtgtgctgactgcaacctcaacctcaagcaaaagggctacttcttcatcgaaggggagctgtactgcgaaacccatgcaagagcccgtacgaagcccccagagggctacgacacggtcactctgtatcccaaagcttaagtctctgcaggcggggcacgcacgcacgnnnnnnnnnnnnnnnnnnnnnnnnnnnnnnnnnggctttgggcagaaggattgtgcagattgtcagctccaaatctgaagtcaaggctttagacctttatcctattgcttattgaggaaaaggaatgggaggcaaacgcctgctatgtgacaaaaacatacacttcgctatgttttgcaaccctttttgtctggggctagcaataatgatatttaaagcaataattttttgtatgtcatactccacaatttacatgtatattacagccatcaaacatgtaaacatcaagatatttgaagaagtctaattgtctttcctagacaagttgattttgcaattgtggtaaataccaaataacaatcttgtattctaacataatctgcagttgtctgtttctgttctnnnnnnnnnnnnnnnngttagggagaaagtccctgaatttctttagttttatattcaaacaattatgccactggatgcaacaaacataataaatacataaaagattttaa

SEQ ID NO: 16795 - DNA, 716 bp, Macaca Fascicularis
  misc_feature (1)...(716): n = A,T,C or G
cactttattttgtagaaccatttgaaatnnnnnnnnnnnnnnnnnnnngaaggatgacatgggcccagactgaacagtcagcttgcagatcttaaaggacattgctcattttaaaacgagggaaggacacaaaatggaatgattgcttagtcctttctcagatactcttaaaacaattttttattgttaaatttgtnnnnnnnnnnnnnnncaactgtggatcaaacaaggtcagtctacagtcgtggcaggtcctgggtgtgacctgataccaccaccctttgtggcagcgccaggctggactgccctgatccctgggctgtgagacttagcttccagccagtgtgaatcattgcatctgtctcataatcgcagcacagctgcagacacaattacaacaatgtgcagcattttttacataaaaatannnnnnnnnnnnnnnnatggaaatgccttacaggcattagtcttgaaaaaaacaccaaggtgaggtttaaaatttttagtacgtatcctcaaattggagctaagttacacttcttttataaaatgttgggcatccggttgagaggagacaagattttgtttacagtgatgcaacaaatacctatttgccacctttggactgctattactgatttgtaacttgaaaaggccgtggttgatcatgaccccgcctcttccacctcccttgtaagatgtggacaagagcttta

SEQ ID NO: 16796 - DNA, 849 bp, Macaca Fascicularis
  misc_feature (1)...(849): n = A,T,C or G
cagataccatgcaatgcnnggaaaaagacagtggtttcagagttctatgatgaaatgatattcaagacccaacagcaannnnnnnnnnnnnnnngacaacatctcgtcagctaacattaggagcctataagcnnnnnnnnnnnnnnnnagagcttgaagtgaaaaccagagaaaaattagaagctgctaagaaaaaaacaagctttgagattgcagagcttaaggagagattaaaagcaagtcgtgaaactataaattgtttaaaaaatgaaatcagaaaacttgaagaagatgaccaagcaaaagacatataaacagttctcatgagaacttggtagtaagctaaactgaaaataaggtgggnnnnnnnnnnnnnnnnnnnnnnnnnnnnatgctatgacgtttcttagaggaacttcatatatagctgttgaccatgaatttctcagcaataggaatttgtactatttaagcaatctttaatggaaagtacatgtgtaagaatggatgcatatacatttttaccattttaccaacccattttaaggaaattctatgatattaagcgcaattttaaaaaatgtttattgtagtatatgtatagcttattacccttttgacaggcatcagcatttcattataaagtattacttgtacaaattttgtacttctctagtagttagaattagtgataaacttaatgtatatatttaatttcttcaagttcttacctgcccccaccctatctttttnnnnnnnnnnnnnnnnnnnaagtagtcaataaatgtagtttattgatcctatttctccctcctgatctgttcttcctctttgaagactttctggaac

SEQ ID NO: 16797 - DNA, 780 bp, Macaca Fascicularis
  misc_feature (1)...(780): n = A,T,C or G
aggaacacaacagnnnnnnnnnaggaggccctcaaagaatccagcatgatgtttaaacactttgacaaggnnnnnnnnggcaggctgannnntcaggagttcaaatcttgcctgcgctccctgggctatgacctgcccatggtggaggaaggggaacctgaccctgagttcgaggcaatcctggacacggtggatccaaacagagatggccacgtctccctgcaagaatacatggctttcatgatcagccgtgaaaccgagaacgtcaagtccagtgaggagatcgagagcgccttccgggccctcagctcagagggaaagccttacgtgaccaaggaggaactctaccagaacctgacccgggaacaagctgactactgcgtctcccacatgaagccctacgtggacggcaagggccgtgagctccccactgcgtttgactacgtggagttcacccgctcgctctttgtgaattgagccactccgtgggtcacccgcccctcgctgcttgccccgcgtcgccttgctgcatgtccgctcctctctgtgctctcactttccactgtaaccttaagcctgcttagcttggaataagacttagtagaaaatggtgcttcactaacccgcttccggtccagtcacaatcaccatgtcactgtggggaccnnngatccacgtcttgaagcagctgccctcattccgacttcagaaaatcaaagcagctggctcttccccttgttctcccgccctcccccaaatctgttttcatgtaaaagacaa

SEQ ID NO: 16798 - DNA, 735 bp, Macaca Fascicularis
  misc_feature (1)...(735): n = A,T,C or G
actgagtgtgatcctccncnnnaacnnntcgctgaccacttggccatctcaggccctgggcccacaccctcagcccacccacttaccttatnnnnnnnnnnnnnnggaggccagaacagcagggcacatgcagactctggctgacttcaggcacctgcctgcccggactctctctacccactggccaccccaaagatccctgtgcagctcagattttattcgtatccttgtgatcttctccggaatgtttcttgtnnnnnnnnnnnnnnnnnnnnnnnnnnnnnnnnnnnnnnnnnnnnnnnnnnnnnnnnnnnnnnnnnnnnnnggannnntgcnnnaaccttgtccttacagctgccccagggaggaggaaggcagcaccatccccatccaagaggattaccgaaaaccggagcctgcctcctccccgtgagccagcacctgcgggagctgcactacagccctggcctccaccccaccccgcaggccatcctagggagaatgagacctggcagccaccactgcagtcccatcctcttgtcagggccctttcctgtgtacacgtgacagagtgccttttcgagactgccagggaccaggacaaacacggatgaggtggagagtgggaagcaggagcccagccagctgcgcctgcgctgcaggagggcggggctctggttgtaaaacacacttcctgctgcgaaagacccatatgctacaagacagacaaaataa

SEQ ID NO: 16799 - DNA, 731 bp, Macaca Fascicularis
  misc_feature (1)...(731): n = A,T,C or G
tgcacagggtggggcgcgcagtaggaaccncccccgcaggagctggcgccctctcgnncctgctcacacagtcaccctnncagctcttgctacttcggcaagacgtcttaagaatgggacacattttcaagggcgtctctatctttcgctgcagagttgtagttctgggccctcgattcctttcccatcaccccacaggctttaccctttgagaaaaaggcagccctccagattttgtagacatttttcttaatatttttaacattgtgtcttttaaaagaaatgttttacacagttcatccaaagagcagagaactgaacttctcactattgccttggccctgacagctgttaccagcacccttttcccaagaaaagtcaattcccaggtgcttattggacatccttcgagggggaagaggagggaagcggccagctcacccttccgggaccctagtgtgggggcgaatctcaccgacctgacctcagaggtgcannnnnnnnnnnnnnnnnnnnnnnntgtattcctctgnnnnnnnnnnnnnnngtgtttcgcttcggtttgctggaacatgggagttagagctggtcgtaagccgtgggcctttttgcgatgtcacaactcttcacctgcctgggctgttccgcacacagtgcagcctggatcctggcgatctgtacttgcggccgagctaatggtcgcattgatagttgattacannntggcacga

SEQ ID NO: 16800 - DNA, 745 bp, Macaca Fascicularis
  misc_feature (1)...(745): n = A,T,C or G
gccagctcnnnnnnnnnnnnnntcctcaccgccgcccactgnnncctgtacccgccctgggacaagaacttcactgagaatgaccttctggtgcgcattggcaagcactcccgcaccaggtatgagcgaaacattgaaaagnnnnnnnnnnnnnnnaagatctacatccaccccaggtacaactggcgggagaacctggaccgggacattgccctgatgaagctgaagaagcccgttaccttcagcgactacatccacccggtgtgcctgcccgacagggagacagcagccagcttgttccaggctggatacaaggggcgggtgacaggctggggcaacctgaaggagacgtggacgaccaacgttggtaaggtgcagcccagcgtcctgcaggtggtgaacctgcccatcgtggagcggtcggtctgcaaggactctactcggatccgcatcactgacaacatgttctgtgctggttacaagcctggtgaagggaaacgaggggatgcctgtgaaggcgacagcgggggaccctttgtcatgaagaaccccttaaacaaacgctggtatcaaatgggcatcgtctcatggggtgaaggctgtgaccgggatgggaaatatggcttctacacacacgtgttccgcctgaagaagtggatacagaaggtcattgatcagtttggagattagggggccactcatattctgggctcctggaaccaatccagtgaaataattattttgc

SEQ ID NO: 16801 - DNA, 763 bp, Macaca Fascicularis
  misc_feature (1)...(763): n = A,T,C or G
acctggagaacatgtatgncnnncaggagtccctgacnnnnnnnntcgagcgagccgtgcagtacaatgagnnnctcaannnnnnnnnnnnnnnnnnnnnnnnnnnnnnnaagtcagagaannnnnnnnnnnnnnnnnnnnnnnnnnnnnnnnnnnnnnnnnnnnnnnnnnnnnnnaaagnnnnnnnnnnnnnnnnnnnnnnnnnnnttctgcggaggagccaggctggggccagtcaccgcgtgctgcagcgagccctggagtgcctgcccagcaaggagcnnnnnnnnnnnnnnnnnnnnnnnnnnnnnnnnnnntttcagctgggggatgcagagcgagccaaagccatnnnnnnnnnnnnnntgagcacctacccaaagcgcacagatgtctggtcagtctacattgacatgacnnnnnnnnnnnnnnnnnnnnnnnnnnnnnnnnnnnnnnnngannnnnnnnnnnnnnnnagcttggcccccaagagaatgaagttcttcttcaagcgctacctggactacgagaagcagcatggcacagagaaggatgtgcaggcagtcaaggccaaggccctggagtatgtggaggccaagagctcagtgctggaggactagtggcaggccagctccgccggacactgtcagcagtgggccagcccggctccatctcgagtgcctgggcacttggaagactgttgcttcaggacgctatttaaannnnnnnnnnnnnnnnnnnnncttgggggaatcctgtcagg

SEQ ID NO: 16802 - DNA, 804 bp, Macaca Fascicularis
  misc_feature (1)...(804): n = A,T,C or G
ctgccagctgagaaggcagaagccatcaggaagataggcttcgggaccaataataaaatcttcctggagtttgaggagcccttctgggagcccgactgccagctgnnnnnnnnnnnnnnngacgacacatcgcccctggaggacgctgcccctgcgctgcaggatgcctggttccggaagctcattggctttgtggtcctgcctgcctttgcgtctgtccacgttctctgtgggttcattgctgggcttgagtctgagttcatggagactctgtcagatgaagaagtacttctgtgtctcacccaagtgctccgaagaatgacaggaaacccacagctccccgcgcctaagagcgtcctgcggtcttgctggcacagcgccccgtacactcggggctcctacagctacgtggccgtgggcagcactgggggtgacctggacctgctggctcagcccctccctgcagacggcgccnnnnnnnnnnnnnnnnnnnnnnnnncaggggaagccacacatcgcacgttttactccacgacgcacggtgctctgctgtcgggatggagggaggctgaccgcctgctcagtctgtgggccccacaggtgcagcagcccaggccgaggctctagctgggtccagcctgctctgttcttcctgtgccaggggaggctgggaccctcgtttcctctgacagatttcaatctgacttgatatttggggatgtaaatgagagtcctctggtttttggtaactggagccatcttctcagttcttgtgtctgttattggagtnnggccagggttgac

SEQ ID NO: 16803 - DNA, 724 bp, Macaca Fascicularis
  misc_feature (1)...(724): n = A,T,C or G
agacactcttnnnnnnnnnnnncgcagtggctgctctggatgccttgagccgggagtgctgtgtgacggctgggggccgggatgggactgtacgtgtgtggaagatccctgaggagtcccagcttgtcttctatggccaccagggctccatcgactgtatccacctaatcaatgaggagcacatggtgtctggcgcggatgatggctctgtggccttgtggggcctctccaagaagcgaccacttgccctgcagcgtgaagctcacgggctgcggggagaaccaggcctggagcaacccttctggatatcgtcggtggcagccctcctcaacacagatctcgtggctacaggtgggtgccctgagaggcagggaggagcggtcgccgggtgggccggtgcgggggttgctcactgttgtctccccaggctcccacagctcctgcgtgcggctttggcagtgtggggaaggcnnnnnnnnnnnnnnnnnnnnnnnnnnnnnnnnnnnnnnnnnnnnnnnnnnnngcctcaagttctccagctctggggacttcctggtggctggggtggggcaagagcacaggcttggccgatggtggagaatcaaagaggctcggaattctgtctgcatcatcccactccgcagggtccccgtacccccagctgctggttcctgacactcttaccctccttatttaagtccttcccaggccatgccccaccctc

SEQ ID NO: 16804 - DNA, 711 bp, Macaca Fascicularis
cttcctggaatccctctggacacaccctcctagcttcctctaggaaagatgcggcagctcaaagggaagcccaagaaggagacctccaaggacaagaaggagcggaagcaagccatgcaggaggcccggcagcagatcaccacagtggtgctgcccacgctggccgtggtcgtgctcttgatcgtggtgtttgtgtacgtggccacgcgccccaccatcaccgagtgagccccgcagccagccgcggaccccatcggcagggagaggaggcgcgggagggggacgcaaacaaaaaatggctttcatattcagagatgttcatgttgctgagctgtaagctggagcaccctgtcttctctggtctttgacttgattaaagtatctccgcttttcttgggagggaataggggatgttttatcagtgaatgtgccatacaccttatggtccacttcatgtgcctttcagacttcaaagcgcgcgcgcgcgtgtgtgtgtttctttttctctcctaaaaatcaataagtagctccacctgaagaggtgcggaacctctgggtcgggaagcagctggaatccgcactcacctcattcccattgtttggatcatgcctctttccaacacgtgtcacaatctccacaagggactgtatttcttctctgtgcttaatgtgatttgaaatatgttgaatcaaagtgcataatatttattt

SEQ ID NO: 16805 - DNA, 725 bp, Macaca Fascicularis
  misc_feature (1)...(725): n = A,T,C or G
gcagcctctcaccggatgnnnnnnnnnnnnnnnnnnnnngttaaggggtcaatccggtcctgtgaaaatgtggaagaagggtgagcctgtgagctcaagccaggcaggaaacccaacgcccatgccctcagagagctccacacttctgggggtacctcttggtctctgtctccctgccagcctgcctctgcactgagccccaagctcacgcccgttaccnnnnnnnnnnnnnnnnnnnnnnnnnnnnnnnnnnnnnnnnnnnnnnnnnnnnnnttcccctcctctcttnnnnnnnnnnnnnnnncttctgataggcccctgccttctttggtttcatctacctcaaagttgggcagggatgtggctagtgcagaggaattttctgggttccactctctaaggggactggctcagtgcctctctgggagccactgctgagtagccaagtgcagcaacttgtccaaaagtgccaccactaggctgggcatggtggttnnnnnnnnnnnnnnnnnnnctttgtggggccgaggcagacagatcacatgaggccaggagtttgagagtagcctggccaacatggcaaaatcttgtctcttactannnnnnnnnnnnnnnnnnnnnnnnnnnnttgctggtgcctgtaatcccagctactcaggaggatgaggcagaagaattgcttgaacccaggagccggaggctgcagtgaaccaagatcacgccat

SEQ ID NO: 16806 - DNA, 1353 bp, Macaca Fascicularis
  misc_feature (1)...(1353): n = A,T,C or G
tcactttaaattttgtactacccatatctanaaanatnnnnnnacttgttttttcagtaagtgaccagaagtgactnnnnnnnnnnnnnnnnnnnnnnnnnnnnnnnnnnnnnnnnnnnaacattctatgttattctagactatacaaattaagtggtaagcagctacaaagatggcaagaccatgctattgaaaaagttcagaaaacatataccgtggaccagaggtcataatcctatctatgaatgtgttttgtgtggcccatgtagtgttgtaaaaaacatttagaaccattattctaaaaaaatggggatatttcacattaaagttcagatttctgcttcttttttaaacatcagagacnnnnnnnnnnnnnnnnnctctcttctttcctggcatcagtctgcaggacctagtgtggtggctcacttggaaggagccttgtgctctccactttgccacagtaccactgccgccgtactgctcacttatgtcatccacttggcccttgtatgacctgaatttgcgacctcggtatactannnnnnnnnnnnnnnaatattcaaagacctgccaagtactgcattagtattctgagtttatacagcatttttgtagggttttcaattgtattcaaggtcactttctaagcgcttcttggttttgcttttctagaagaaaatgaaaagctattccttataataaacatggcggcaagtaaacattgtgattgtgaaaaaaatattatttatagattttctacaaattaatatttgtctaccaagtaaaatattttgactgaaattattctttgaaatgcatattgattcatgcgtattttaaaaaattgaggtataattttcacaaaattctccaattttcagcgtcgaattcagtgaattttgaaaacaatatatataattgtgtgtctgccacagnnnnnnnnnnnnnnaacactttcttcaccctgaaaacgtctcattttttcttttgcagtcaatcccctgctcctatccnnnnnnnnnnnnnnnnnnnnnnnnnnnnnnnnnnnnngttctgctgtttgagaatttcatataaatggaatcatcctgcaatgtgtcatctattgtgcctgacttctttcacttagcattttgagaaaagcatttatactatttacagattgtcgacaaatatttatccacaagtaaaatgttagactgaaatgattctttgacaagcttgccaattttactgattttgtcaaagaaaaatatgtttttttttgaagtttgttcatcctttgagcgtgtgagtgtagtatcagaggcttaattttgtgtttatggagctattctaacttgttattta

SEQ ID NO: 16807 - DNA, 745 bp, Macaca Fascicularis
  misc_feature (1)...(745): n = A,T,C or G
agcgtcgagccgagctgcgtcggaggaannnnnnnnnnnnnnnnnnnnagnnnnnnnnnnnnnnnnnnnnnnnnnnnnnnnnnnnnnnnnnnnnnnnnnnnnnnnnnnnnntttcttactttgcaacttgcgtacatgggattatacaaatattttcccaagagtgaaaagaagataaagacaacagtactaacagctgcacttttattatcgggaattcctgctgaagtgataaatcgatcaatggatacctatagcaaaatgggcgaagtcttcacagatctctgtgtctactttttcacctttatcttttgtcatgaactgcttgattattggggctctgaagtaccatgaagcctgcagaactgagaaggagaagcttacaaaaaaaaaaaaatcctctttnnnnnnnnnnnnnnnnnnnnngaggcaaattagtttacaccttcatgtaattcttttactttaggggttgcaaaactactttattagaaatagannnnnnnnnnnnnnnnnttaaaagggctgagtttgtattattactgatatgaagaacagagtaccaatgtcattaattgatttttcttgtttaatcagaatccttattctgtacctttcctctaacttctcagatttgtaattcttcttttgggannnnnnnnnnnnnnnttaggagannnnnnnnnnnnnnnnnnnnnnagccctagagactgcttcttgtatttgtgtcattctgtcctgagaa

SEQ ID NO: 16808 - DNA, 754 bp, Macaca Fascicularis
  misc_feature (1)...(754): n = A,T,C or G
ancnnnnnnnngcttctacagcctcagacaatgactttgtcacaccggagccccgccgtactacccgtcggcatccaaacacccagcagcgagcttccaaaaagaaacccaaagttgtcttctcaagcgatgagtccagtgaggaagatctttcagcagagatgacagaagacgagacacccaagaaaacaacccccattctcagagcatcagctcgcaggcgcagaccctaggaggcgcgctccccgccggcgcggaccctaggacttgtagggtgacctggaattctaattgttacccttgtaaaatatttgtctgtcttttaaaaaaaaacaaaaaacaaaaccgcccnnnnnnnnnnnnnnnnnnnnnnnnnnnnnnnnnnnnnnnnnnnnnnnnnnnnnnnnnnnnnnnnnnnnnnnnnnnnnnnnnnnnnnnnnnnnnnnnnnnnnnnnnnnnnnnnnnnnnnnnnnnnnnnnnnnnnnnnnnnnnnnnnnnnnnnnnnnnnnnnnnnnnnnnnnnnnnnnnnnnnnnnnnnnnnnnnnnnnnnnnnnnnnnnnnnnnnnnnnnnnnnnnnnnnnnnnnnnnnnnnnnnnnnnnnnnnnnnnnnnnnnnnnnnnnnncaaaaaaaaaagtacatacacgatctttaaaatgcaaggcctttctcttaaattagcctaattgaactgcattgagctgctttcactttggaatatgtttgccaatctccttgttttctaatgaataaatg

SEQ ID NO: 16809 - DNA, 737 bp, Macaca Fascicularis
  misc_feature (1)...(737): n = A,T,C or G
aacacagagcattcagcccttccctggatttccctnnnntgagccatggagtcagtgccacagcctttgctatgcacctctcaggcctctccttggcattgaccttggaacaacctaccaccacctatttctcccatagtctgtacccagtgagttgaaggctgggtccccacccttccttttggtttcctgtcttccttctcatggccccagctggttgccgtggagatgaggttcctggtcctccctgtcctggccggactgccccgcctcagatccaggatgccgttggcatcgctcccaccctctgccagctattcctccctgctctgacaacgggcatgcaaaaaggggcagctgccatctagcaggtctgcccacccccttcagttcaggtaataccgttttgnnnnnnnnnnnnnnnggttagggccccgggcaccacacgcagcccctcacctaagccagggcctactcctcttacaacagcaagggggccctggggccccaggcctgtcgagctnnnnnnnnnnnnnnnnccgcttttgggaaaatgacttttcctcttcaagctgaaccactctgtccatattacacagaagccatatttgtacggggggtgggagggagaggggctcttgtgctgtgtgtgtctgtccaaggtggagggtggggaagggagcagggaggggaccgtgtatctttataatctttctaactctcctgtgctaatctca

SEQ ID NO: 16810 - DNA, 719 bp, Macaca Fascicularis
  misc_feature (1)...(719): n = A,T,C or G
gcagacaggaccagggatttccatgaggcccctgtttgttnctgaaagggacgctacccgggaagggggctgggacatgggaaaggggaagttgcaggcataaagtcaggggttcccttttttggcnnnnnnnnnnnnnnnnnngcctggatgaggccacaccagccgtcctggcccctcagggtccctgggggcagctcacctctcccttggattgtccccgagtgtgacccttgctctacctgaggggcctcttatggcctggnnnnnnnnnnnnnnnnnngaacactccttcacaaatgggtgcttggaggaaggaaacccagctctggtccatagagagcannnnnnnnnnnnnnnnnnnncgcccggcctttgcactcccttgctgggcgtggcacagtatattcaggaagttcagggcctggctcaggtggggtcactctggcagctcagagagggtgagagtggaactgatgcactttgttctggctcttccaggctgggagagccttccaggggtggggcaccctgtgatggggccctgcctcctttgtgaggaagctgctggggccagctggtcccccttccatggactttgttagtttctccaagcaggacatggacaaggatgatctaggaagactttggaaagagtaggttgatccttttacttttccaaccctcatcaccaatgtctgtgccattttgtattttac

SEQ ID NO: 16811 - DNA, 723 bp, Macaca Fascicularis
  misc_feature (1)...(723): n = A,T,C or G
gcaggagaatggctactcatcacacgctgtggatgggactggtcctgctggggctgctgggcggcctacaggcagcacccgaggcccaggtctccgtgcagcccaacttccagccggacaagttcctggggcgctggttcagcgcgggcctcgcctccaactcgagctggctccaggagaagaaggcggcgctnnnnnnnnnnnnnnnnnnngtggcccctgccgcggatggtggcttcaacctgacctccaccttcctcaggaaaaaccagtgtgagnnnnnnnnnnnnnnnnnnnnnnnnngggagtccctcggctnnnnnnnnnnnnnnngtccccactggggcagcacctactctgtgtcagtggtggagactgactacgacnnnnnnnnnnnnnnnnnnnnccagggcagcaagggccccggcgaggacttccgcatggccaccctctacagccgaacccagacccccagnnnnnnnnnnnnnnnnnnnnnnnnnnnnnnnnnnaaggcccagggcttcacagaggattccattgtcttcctgccccaaaccgataagtgcatgacggaacaataggactccccagagctgaagctgggaccgcagccagccaggtgacccctgcgatctggatgtttccgctctgttccttccccgagcccctgccccggctccccgccaaagcacccctgccccctcgggctcctcctggctctgc

SEQ ID NO: 16812 - DNA, 803 bp, Macaca Fascicularis
  misc_feature (1)...(803): n = A,T,C or G
attcctcccgccagtctccattgaancaatggtgcaggacagaaagccagtcagactaatttccttctttcctcgcacttctccccactcgtcatcttttaactagtgtttcacaaggatcctctgaaaccctctctgtgccccaagcacagatcccattacttctgctttcgtatctcctcaggcaaaagtggagggtgccttatgggccctcctcataggttgtctctgcatacacgaacctaacccaaaatttgctttggtgnnngaaaannnnnnnnnnnnnnnnnnnnnnnnnnnnnncaaagtgtactgtgaacaacagttggtttaaaatatgaggggcaaggaggaggatgcatttcaaaagcttgatcgatgtgttaagagccaaattaagaggagnnnnnnnnnnnnnnnnnnnnaccattttttgtcacagtgtctgatgcagccnnncatnnnnnnnnnnnnnnnnnnnngactgggttaatagggtcatattgtgaatgtctcactacaaaatgacttgagtccagtgaaatcttagtagggttaagaatatttcagggatccttaatgttttgatttttgttttctgaaattggattttattttatcttataatttcagttcatctaaattgtgtgttctgtacatgtgatgtttgactgtacnnntgactgttatggaagttcagcgttgtatgtctctctctacactgtggtgcacttaacttgtggaatttttatactaaaaatgtagaataaagactatttgaagattgaataaagtaaaccccc

SEQ ID NO: 16813 - DNA, 752 bp, Macaca Fascicularis
gatgcccgtagactttgagccaagaaacactctgtgtgactctgcatacacctcatgtggtttagcttcaaagtcattgatgcaacttaaaaggaaacagtttaatgctggaaatgaactaccatttataacttttttttttaattgagaaaatgattcacgaattccaaatctgattgccaggaagaaataggacatgaccgtactgggatatgtgattctcccagcccctgctgtccactaggtgagaggaaaaactctttacttctgcccctggcagggacttctgggtgatgggagaaaccagagatgggaatgaggaaaatatgaactttagcagaagcctctgggcagctgtgacggagcccccgacgttacttttctcgcatctgtcccgccttctttccctgtgcgaggctgtggggcgggattcagagtgcttattctggtcactgggagaagaggagttcttgcacatgcaagtcttgctctgtggctgtcatttgcatttggaaggtgttctgtatgtctgtatgttggggactgcctgtatttggaaggtttaaaaacctagcatcctgttctcaccctctaagctgcattgagaaatgacttgtctctgtatttgtattaagccttaacacttttcttaagtgcattcggtgccaacatttttctagagctataccaaaacaaaaagcctgtactcacatcacaatgtcattttgataggagcgttttgttatttttac

SEQ ID NO: 16814 - DNA, 723 bp, Macaca Fascicularis
  misc_feature (1)...(723): n = A,T,C or G
ggnannnannccaccatcnnnnnnnnnnnnnnnnnnnnnnnnnnnnnnnnnnnnnnnnnnnnnnnnnnnnnnnnnnnnnnnnacttctggttgggattatttctggttcctactgcctgtttgattgaagatgtggcgtggagagcagccaagcacacctgcaaaaagacattgctggaggaggtgcaggagctggaaaccaagtctcgagtcctgggaaaagcggtgctgcgggatagcaatggaaagaggctgaacgagcgcgaccgcctaatcaagaggctgggccggaagacgcnnnnnnnnnnnnnnnnnnnnnnnnnnnnnnnnnnnnnnnnnnnncatgggtatgctttttctcaagaagnnnnnnnnnnnnnnnnnnnnnnnnnnnnnnnnnnnncttatgacaccaccaaannnnaatgcaggaagaagtaagacttgaattttcctgactgatcttnnnnnnnnnnnnnnnnnnnnnnnnnnnnnnnnnnncacatctttgtcagaaaagactggcgtccgcagccaaaacaccagaaaacacatttctgtggccttagccaannnnnnnnttagttacatattcccttgcaaacnnnnnnnnnnnnnnnnnnnnncgcaggggaagctatctttgccctcccaacttgtttgcagcgcttagcctaacttttgtttacgtcgttatgaagcagtcaactgtgctcnnngagg

SEQ ID NO: 16815 - DNA, 742 bp, Macaca Fascicularis
  misc_feature (1)...(742): n = A,T,C or G
tgcgagcgatgcccccgggttccggcaccanccnnncacctgtgaatggagacagggtgagtggagctcccggagggtgctggcccccagttccaggcgagcggtccccgtcctccatggtgccctccatcttgatcagcaaagcccaggggtcgaagctagtgattggcggggctggcggggagctcatcatctctgccgtggcccaggccatcatgaacaagctgtggcttggctttgacctgagagcggccattgcagcccccatcctgcatgtcaacagtaagggccgtgtggagtacgagcccagcttcagccaggaggtacagaggggactccaagaccgtggccagaaccagacccagaggcccttcttcttgaacgtggtccaggccgtgtcccaggagggggcctgtgtgtatgccgtctcggacctgaggaagggtggggaggccgcaggctactgagacactgctctgcccagagctgaagtctggccccaccatgggtcctatgtccaggccggacatggctgggggaccaagtactccggcaggatctggacccctggcaggggagtccagctgagagtggaagaggtggcagggaccagctgggcagatgggaggctgggccccgtccctgaccccctttcccagagcccctggtggccctgaatgggcctctctatccctcctcaggcatcttgcctggggccactctcccacccgctcaacctgta

SEQ ID NO: 16816 - DNA, 742 bp, Macaca Fascicularis
gatttagaagacaaaaacaattttggtgctgaacctccacatcagaatggtgaatgttaccctaatgagaaaaattctgttaatatggacttggactagataacattaaattggcttattccttcaattaataaaatatttttgccatagtatgtgactctacataacatactgaaactatttatattttcttttttaaggatgtttagaaattttgtgtattatatggaaaaagacaaaaagcttaagtctgtagtctttatgatcctaaaagggaaaattgccttggtaactttcagattcctgtggaattgtgaattcatactaagctttctgtgcagtctcaccatttgcatcactgaggatgaaactgacttttgtcttttggagaaaaaaactgtactgctcgttcaagagggctgtgattaaaatctttaagcatttgttcctgccaaggtagttttcttgcattttgctctcccttcagcatgtgtgtgggtgtggatgtttataaacaagactaagtctgacttcataagggctttctaaaaccatttctgtccaatagaaaatgactttttgctttgatattaaagatcaatgagtaaaacaaaagctagtcaaatgtgttagcagcatgcagaacaaaaaccttaaaatttatctctcactatacagtatattgtcatgtgaaagtgtggaatggaagaaatgtcgatcctgttgtaactgattgtgaaca

SEQ ID NO: 16817 - DNA, 759 bp, Macaca Fascicularis
  misc_feature (1)...(759): n = A,T,C or G
atcagactcnnttnaatataatcaagtctaaaattctgtagacctaaaataaaatgaaggggtgagcttaacccttgaaatctatagttatataatgtaaacatcagactctttttttaatataatcaagtctaaaattctgtagacctaaaataaaatgaagcggtgagcttaacccttgaaatctaatccctctgtctctaaagaaaatctctgtgaaacctgtacatggaggcagaattgctctcccagcccttgcattgcagaggggccgctgaaagaggagaggccactcctttacaaatagaatttgagcatcagtgaggttaaactaaggccctcttgaatctctgaatttgagatacaaacatgnnnnnnnnnnnnnnnnnnnnnttttatactttgtcaagacaattgttggagagccgctcgcacagccctggcctctgctcaactagcagatacggggatgaggcagannnnnnnnnnnnnnngaggctgagagcccaaactgctgtcccaaannnnnnnnnnnnnnnntacagtatggtacnnnnnnnnnnnnnnnattggagagaaaaaacttaagtagataaggaagtaagaaccactcataattcttcaccttagaaataatctgttaatatggtatactttcttcctgattattttctatgcatacgtgtaaaatatgtctttctttttaaaannnnnnnnnnnnnnnntgttataagtggctttaatgaataaacatttgta

SEQ ID NO: 16818 - DNA, 740 bp, Macaca Fascicularis
  misc_feature (1)...(740): n = A,T,C or G
tagttattatctgcctttcttcactttgcannnnntcttgnnnnnnnnnnnngatggcttccactnnnactcctccactaaaaatgctcttaccaagatcaaatctaatgggcactttttaagttcctatgtgatttggcttttctgtgtcaatcatcactcccagcnnnnnnnnnnnnnnnnnnnnnnnnnnnnnnnnnnnnnnnnnnnnnnnnnnnnnnnnnnnnnnnnnnnnnnnnnnnnnttccctgcccctgatatattgatgtttcctggagttggttttgttcttgattcattctcatctcattctgcacacactccctgcataaactcaggcaggcccctcatttaatgaccnnnnnnnnnnnnnnnnttctcaaatctgtattccctgatcttgcatttgagttccagccccacttatcctcnnnnnnnnnnnnnnnnnnnnnnnnnnnnnnnnnnnnnnnnnngaaactttttctctttcctgtctcctctcccgtgatctgttcttctttagaacaccacccaagaacgtcacctcctccatcagattgtgagctcctggcgggcaagagctgtgtcctattcatcttcctatccccagaaccttgcctggaacgtggtaggtgctcagtaaatgtgtgttgaataaatgaatgaatgaatgaagaaatgaatgaatttgcttacttcaatgcaaaagaaccatgaaactattttgagtttttatgtta

SEQ ID NO: 16819 - DNA, 765 bp, Macaca Fascicularis
  misc_feature (1)...(765): n = A,T,C or G
cnnnnnnnnnnnnnnnnccaagnnnnnnngatggctaccgatctccgctgcccaccaatgagagccagcccctcagnnncntcccgactggcttcccgtaggtnnnnnnnnnnnnnnnctgactggccagccccctcccctgccggaggaggggagaagccccgctctggtcctaccctcnnnnnnnnnnnnnnnnnncatcaaccaccttccccaagcttagtgacagcagccacccgtcctacctggatggagaagagacccttctccaagcacctcggcacacctgccctctgccacacctgtcggtggaggctgtggccaggagagactgcagaagctcggtccctgtgtatgtttgcatatgacatcctgcattggatccgcttttgtattttttaaccatacccacggtggggcggggagggggnnnnnnnnnnnnnnnnnnntctgggggcctgagtggggacagagttgatggtccacccggccatcttgaccctgagtggatagtcacagcctcagctcacatctgtctgtgacacgctgcccccagcttcccctggtcagccccactccagcacagggtgaacggaggcccagagtcctagggaaggaggaagggaggagacgcctcttcttcctcctttctttccccatctgttcatgggaagagtttgtctttcttatctttaagcccctttaccctggtcctgtactgatcagtgaaggaaaccgtggttactgaggccctgtcaaaaagtg

SEQ ID NO: 16820 - DNA, 672 bp, Macaca Fascicularis
gagggcaccttaaaggtggtggatgaagaggccatggagaaggtgccctggatcccactggaccccttggcgccagacctagcccgctaccccagttacagtcaggcccaggcccttcgctgtacagtgcgggccggtgagatgctctatctgccggctctgtggttccaccacgtccagcagtcccagggctgcattgcagtgaatttctggtatgacatggaatacgacctcaagtatagttacttccagctgctcgactccctcaccaaggcttcaggccttgactgatggagcactggtgaacatggccaggcacgcctcgggggaaggggccagcccctccctggccgggtcaattctcgagagcctggagtgtgcatgctggctgctggcccagggtccagcatggcttgagatcaactttggaggatcttggaatgtggtcatgaggactcaaggtgccaggcaggtctgggtgagggttctcaggaagttgccacacaggtgagcggagcagggatcaggtgcagtggcacctctccccagtgctgtgatgttgggagagtcactgcatctcgggcattggtgtcctgtcagtaaacagatgataatggctctacctcgcggggctatcatgggctgtggagatgatgtctatgaggaccagcg

SEQ ID NO: 16821 - DNA, 630 bp, Macaca Fascicularis
agatgtcatattcaattactaagttcagcagcttattctcgtacaaatgtttaaaatatggcttttctaattggatattgtattttttctaagtcttcttgaaggcgctctaattgctgctaaatgttgttgcttctttgctaaaaaaattaaatgacctagaaggtgcaagttgactgtacatcatagagagatattaaaaagcatacagtcattaatcaagacgtaaaagtgatccatgttggacataattgagttttttaaatcagtttattgggttctagggctgtggagcacatagatactagatttataatttgttcatggttattctgcatttctagaaagttcttatcagcaagatggtcccataaacaaatttcttgtggtttgtacagatttgttaaaatgtgaacattttctaactgccttgtagggtagaaaccatatttttcaggatgctgtatttcactcctgtaaggactttttctttattgtcacattcataatgctgatacttacatgtaagttgttcatgttgcagaaaaaggaggttatacttaccacggattctctttaatattgtacagttaaactgtatttctgatgttgcaagccgattttgttttt

SEQ ID NO: 16822 - DNA, 1123 bp, Macaca Fascicularis
  misc_feature (1)...(1123): n = A,T,C or G
ttaaagttgaagtactataatttaannnnnnnnnnnnnnnnnnnnnnnnnnnnnnnnnnnnnnnnntgtaagcactacagagcaatatatgatactccctgtatacaggcagaaagtgaaaannnncagcaggctctgaagagcgttgtactctacgttatcctggctccttttgacaacgaacagtcagatttggttcaccgaataagtggtgacaagaagttagaagaaattcccaaatacaaggatcttttaaagctttttaccacaatggagttgatgcgttggtccacacttgttgaggactatggaatggaattaannnnnnnnnnnnnnnnnagtcnnnnnnnnnnnnnnnntggttccacggaggaaggcgaaaaaaggtggaaagacttgaagaacagagttgttgaacataatattagaataatggccaagtattatactcggataacaatgaaaaggatggcacagcttctggatctgtctgttgatgagtccgaagcctttctctcaaatctagtagttaacaagaccatctttgctaaagtagacagattagcaggaatnnnnnnnnnnnnnngacctaaggatccaaataatttattaaatgactggtctcagaaactgaactcattaatgtctctggttaacaaaactacacatctcatagccaaagaggagatgatacataatctacaataagggtcttaatgcttttagaaaaaagttaaaattggaagtcattaaaaaaaagagactgttataatggtgtatatgttggggttttttttctaagcttctttgtcttaaattttaaaatagtgaatatgttttgagactccctttgacctttcagttccccaagttcattgttannnnnnnnnnnnnnnnnnnnnnnnnaatacacatttctgtcgtctgaatacacaaaaagttgtgtcataacttacccagatatgtttttctatcatttgaaacctttttagctactgtttgttttcattcaactaacaaacatattacaataataaaagcagtatatacacatttcctttctacagttacctctgattctaaccattttgnnnggtagtgatttggcaannnnnaaacatat

SEQ ID NO: 16823 - DNA, 691 bp, Macaca Fascicularis
  misc_feature (1)...(691): n = A,T,C or G
gacaagttagtaggagggctgctttcnnncagcctggattactgcttngtcctagaagatgaagatggcatatgtggttacgnnntgggcactgtagatgtgaccccctttattaaaaaatgtaaaatttcctggatacccttcatgcaggagaagtataccaagccaaatggtnnnnnnnnnnnnnnngaggctgagaaaataatgttgagtttccatgaagaacaggaagtattgccagaaactttccttgctaatttcccttctctgataaagatggacattcacaaaaaagtaactgacccaagtgtgnnnnnnnnnnnnnnnnnnnnnnnnnnnnnnnnnnngaaggctaatggctcccggggagctttctgtgaagtgagaccagatgataaaagaattctggaattttacagcaagttaggctgttttgaaattgcaaaaatggaaggatttccaaaggatgtggttatacttggtcggagcctgtgacatttgtaggcactgtgaactgtccaaaagtctcttaactgcaccttgtgggtggcagttgaggtcttcatnnnnnnnnnnnnnnnnnnnnnnnnnnnnnnnnnnnattggattcgaaacaaagaagactatgtaaaactcacccatcacactttcagactactcactggttggaagaatatagtattacagcaaa

SEQ ID NO: 16824 - DNA, 745 bp, Macaca Fascicularis
  misc_feature (1)...(745): n = A,T,C or G
caggtaattgggnctcattgagagggaagtgcagaggcagcagannnnnnnnnnaaaactgaaaaggagttccgtctgcatgagaaaggatagcaagtcnctgaggtgannncagggtggaattctttgttaagtccaccctgccccagggtgctcctaccctcttggtctttttagccaaggtgtgatttaggcacctgactgtcccgtttaccttaacaactttgggaatccatgtgatgattttgatagttcttcctcattnnnnnnnnnnnnnnnnnncatttgggcttctggggcccctgagaccaaagannnnnnnnnnnnnnnnnnnngaaatnnnnnnnnnnnnnnnnagagactggttgtgagttgcacctgtcctgaaggccccagttgggaagccatgggcagtccagatcaagccaccaagtgccctatnnnnnnnnnnnnnnnnnnnnnnnnnnnnnnnnnnnnnnnnnnnnnnnnnnnnnnnnnnnnnnnnnnnnnnnnnnnnnnnnnnnnnnnnnnnnnnnnnnnnnnnnnnnnnnnaggaattggcagaggaagtggttgtctgataaccctttgtgnnnnnnnnnnnnnnnnnnnnnnnnnnnaaaaataaacagctctggagtcgtgttcctgacnnnnnnnnnnnnnnnnnnnnnnnnnnnnnnnnnnnnnnnnnnnnnnnnnnnnnnnnnnnnnaggggggaaattagggattgtgtctttccct

SEQ ID NO: 16825 - DNA, 738 bp, Macaca Fascicularis
  misc_feature (1)...(738): n = A,T,C or G
tttgtaaccacatccagtgtcattcttactnnntagagagttcagatgaattcttaaaatttaaaaagaaaaactccatagtactaattttgtttctttatatagtttgcatttgatattagtgcttgcaattgtattaaagtcaaaagctgatttttatggcatacacaattaannnnnnnnnnnnnnnttttatttcataccaataaattaaagattgatatgctaaaaacaatttgcacagcactaaagcannnnnnnnnttcatctaaacctgtaaaaatatgaaagattttatatttttnnnnnnnnnnnnnnnnnnnnnnnnnnnaaattannnnnnnnnntagaatatatttaataaaagacttataaaatacctaactataggacttaaaatatagattggcttgtagtatatagaacaatattccatataaataagtttagcctttatannnnnnnnnnnnnnnnnnnncattacattctgtacttactaagtgtcaacagcccttaaaaacattaaatgtaaatnnnnnnnnnnnnnnngcgttgtttaaatgnnnnnnnnnnnnnntattcattgttaatgctttgnnnnnnnnnnnnnnnnnnnnnnngatctacgaaaatattgttcatactgatcagaattaaatttgtatagagcagagttttaaaacgaatgtaaatagcactaaacattttctttctgnnnnnnnnnnttatagattcttc

SEQ ID NO: 16826 - DNA, 713 bp, Macaca Fascicularis
  misc_feature (1)...(713): n = A,T,C or G
gcagagtgaggagcaagctgttagnnnnnnnnnnnnggaaactgtgacaactgccatgtcacaagaaaatnnnngccagtcaacagagtttgccttctgccaggtggatgcctccatcgctctggccctggccnnnnnnnnnnnnnnnnnnnnnnnnnnnnnnnnnnnnnnnntggcccctggactgcccatcctgctgggatggctgttgggagatggtgatgacctcgtggtctgtgtggagagcatgcatcaggtggaagaagactacctgtttgaaaaagcagaagtcaacttttgggccgagaccctgatctttgtgaaatacctctgcaagcacctcttctgtctcctctccaagtctggctggcgtcttccaagccctgagatgctctgtcaccttcaaaggatggtgtcagagcagtgccgcctcctgtctcagctcttcagagagcttccaccagctgcagaatttgtgaagacggtggagttcacaagactacgcattcaagaggaaaggactttggcttgcttgaagctgctggcctttttggaaggaaaggaaggggaagacaccctagttctcagtgtttgggactcttctgcagaagcgaggcagttaactcttccaagaacagagcagcatgttgaagaaaatttgggggattgggatgggggtatgtgtggatttttcctcacaannnnnnnnnaaa

SEQ ID NO: 16827 - DNA, 767 bp, Macaca Fascicularis
  misc_feature (1)...(767): n = A,T,C or G
atcatgtantnncagaannnnanttcaggaagacagggaagcgatccaaggccaatatcattttcaatacttctcttggagccatttttggggttaagaagtatgcagatgccctgcaggagatcatccgggagcggaacctcactgttaactacaagcaaaacctcattgaagtccgagccgataaacaagaggctgtatttgagaacctggacaaacctggagagacccaagtgatttcagtgagtgctgcccagtcaggaatacttgatagaacaatttctctgattatgaagaatcaaacaccaacaaagaagtatgatggctacacatcatgtccactggtgaccggctacaaccgtgtgnnnnnnnnnnnnnnnnnnnnnnnagcagagccgctagaaaccttcccctttgatcaaagcaaagagcgcctttccatgtatgtcatgaaagctgacctgatgcccttcctgtattggaatatgatgctaaggggttactggggcggaccagcaattctgcgcaagttgtttcatctgggtatgagttgaggatggctcagcacttgctcatttggatggcttctgggccaaaactgcagtcactgaatgaccaagagcagcacgaacgacttggaacctatccttgtaaagagtttcttgatggataatggtgactaaatgcctcccttttcagtacctttgaacagcaaccatgtgggctgctcatgacgggcttgattctttgggaataanaaacaaaat

SEQ ID NO: 16828 - DNA, 681 bp, Macaca Fascicularis
  misc_feature (1)...(681): n = A,T,C or G
ctttttatatggaaccatattaacagatggaaaagatgcttataccaaggaaccaaccaccaacatttgtgtttttgnnnnnnnnnnnnnnnacagaagtcccactggctcgggagtgacagcccgaattgccttacagtatcacaaagggcttctggaactgaaccagaccagagccttcaaaagcagtaccactggctcagtattcacagggaaagctgtgagggaagcgaaatgtggtgattttaaagctgttatagtggaagtatcaggacaagcccattacacgnnnnnnnnnnnnnnnnnagtagaagatgacgacccactgagggatggatttcttctcaagtgacttcttccatgattttaagggctttctttttaaagtaatcattatccataatgattgttttctctaaattatgtgaaaaccaataatcaaattatacatataaactaactttctttctagaatactaccctgtgactaaatataaagtcattatacctcatatttgcaactgtattttggtataaatatcacttatgtctagcatacaaaatgccagaaatgcagtctttttctcgtgattaacacatcaggtaaaattaaagcagtagttacttttaaaatattgctctatggtaattactattaatatcatatttnntttaaagact

SEQ ID NO: 16829 - DNA, 729 bp, Macaca Fascicularis
  misc_feature (1)...(729): n = A,T,C or G
tgacaccaactgcaacccctgnctcatcacctaccccatacccggcaacgacgactccccgccggccgtgcacctctactgcaggctcttccagaccaccatcacccgggccaaggagaagcggcggcgggttgaggctctgtatcgcctgcaggcccagaaggagcccggggcccaggggccagcccaccctcctggggccgacgtgagccgttccctgtgatgttcactcaactcctcccaaagcaaaccacagccaagcccgtctgagctgggagtccccttccccagccctgggtcagcggcatcctcagtccttgttacttacttagctgacgtcacagtgcagacatccgctgttccgcctcagaaccagtggttgagcggaccgaggttgcctttgcatttgctgtgtgggaaacagagcgcagagggtgagcgatgtgcgcaggacggccccttggctgcagttaggacctcaatggctggtgtggcnnnnnnnnnnnnnnnnnnnnnnnnnnntgtgatccgagcagccctcccttcaccttgacccctgaccttcgtcaggaaggtgcagtttttcttctcaatctaaatgcctttcaggtgggctgcttccttgaccgcctggttccagggggatgttttgtaatgannnnntgcaggcaagctgcttggaggctcccagctgggttggtgggacagccaggccagaggacctgatcc

SEQ ID NO: 16830 - DNA, 696 bp, Macaca Fascicularis
  misc_feature (1)...(696): n = A,T,C or G
agctcccagacctctcagaacagagggccaannngctgcggctgcaggcagagctggagaccagtgagcaggtgcagagggacttcgtgcgactgtcccaggccctccaggtgcgcnnnnnnnnnntccgccaggcagagaccctggagcaggtgcgcagcatcatggatgaggcgccactcacggacatcagggacatcaaggacacctgagggggtcagggtgtccccacccccgccctgggaaagacgcctttccccactccagaaccgtgaggcctggctctggggtcttgggtggcttctccaccgtccccgagcctggggttgaggggactgatggggccacctctgccctaccctccagcgcctcctcccagggtggctgggcctcctgctctcagggattacacctgggtgaggggcccaagcccctcctggaaccaannnnnnnnnnnnnnnnnnncgactttctggctgctgtgctgcctcctgggctccagccctcccctgcccccagcctgtcccctgcccagggcacagccgagccatgggggctgggagtccctatcagaggcagtgaggtgggccctggccctgggacaggcagctgccttctggtctgcatgacactaagacgcttgtccacagcggcgacccacgcctccaagcgcgcacagaagcaaggccagacttt

SEQ ID NO: 16831 - DNA, 528 bp, Macaca Fascicularis
ccggaagccgcggttcctaccaaccgtttttattgctggcggccctgaggagcccatcatggcgacgccccctaagcggcgggcggtggaggccacgggggagaaagtactgcgctacgagaccttcatcagtgacgtgctgcagcgggacttgcgaaaggtgctggaccatcgagacaaggtatatgagcagctggccaaataccttcaactgagaaatgtcattgagcgactccaggaagctaagcactcggagttatatatgcaggtggatttgggctgtaacttcttcgttgacacagtggtcccagatacttcacgcatctatgtggccctgggatatggttttttcctggagttgacactggcagaagctctcaagttcattgatcgtaagagctctctcctcacagagctcagcaacagcctcaccaaggactccatgaatatcaaagcccatatccacatgttgctagaggggcttagagaactacaaggcctgcagaatttcccagagaagcctcacca

SEQ ID NO: 16832 - DNA, 667 bp, Macaca Fascicularis
  misc_feature (1)...(667): n = A,T,C or G
gaagcaactcttggaggagaggccnnnnnnnnnnnnnnnnnnnnnnnnnnnnnnnnnnnnnnnnnnntcataaatgcttcttactannnnnnnnnnttttaggtcattgcttgtaccnnnnnnnnnnnnccggggatgggtaaggtttgggttttctggtgggagtggggtggtgggtattttttgttcatgccttagtgcaggcctgttctgaggcaataacatcaagttgctgtgaaaacagcacgtgatgctgcctttgtaactgcatggaaacttttcacatgggtttttctccaggttaatacagaaatatgtaaactgagagatgcaaatgtaatatttttaacagttcacgaagttaagttattaaaataacaaaaataacataaaacttaattactttaatattatataatagtagtattagccttgctttacaaacctatcaaatacatttcagaaatcaaagttgatagtattatttatcttatgagtaagaaaagctttcctaaagtcccatacgtttggaccatggcagctaattttgtaatttaagcaatcatatgaactacctatggacatatattaaagtgattgacaaaannnnnnnnnnnnnnnnnnnnnnnnnnnnnnnnnnnnnnnnnnnnnnnnnnncagaggaaag

SEQ ID NO: 16833 - DNA, 780 bp, Macaca Fascicularis
  misc_feature (1)...(780): n = A,T,C or G
ttggagcccgctctctcagaggctgccttctgtcgccgagggtcctgggccgagcacgcggtggcagctggcttagttggtggacggcttggcccactcgacattgagaatgaggtggtcgtagccgaagccagacaccccggcgatggcgcgcgcggcatcctcacggcggtggaagctgatgaaggcgaagcccttggactggccggtggtcttgtccttagccaggtannnnnnnnnnnnnnnnnnnnnnnnnnngaagagctcctgcaggtcggtctcacgtgtgtcctctgacaagttggtgacacggatggtggcgttgtcgtcggctctgcggttgggctgcatggactccccgcggcggctggccccgtcgcgcaggcttggtggcacgtacttccctgtcttgttctgcgtggcctgcaccggctccagctctcccggcagcttctccttctcgccggtagacaggcccagctgctcggccagctccttctgcatgggacccagcgtgtccttgtaggggcagcgggtggtccagtggtcgcccttgcagatgcggcaagacacgatcttctggcccttgagtttgttcatggggtcctcctcctcctggcagttcaggtcctctttgctggtgatgaacgtcatagagacgtcatcactgacggtggtggtggccacattgggtcccggggggtcaaactccgagttcccgaacttcttccagttcttcctccttgcacagcctttgaagccttcgggtctcatcttgaa

SEQ ID NO: 16834 - DNA, 737 bp, Macaca Fascicularis
  misc_feature (1)...(737): n = A,T,C or G
aaccactattcctgnnnctgcaaaccccagactttgcacacagccctgggctccacacagaaatgtgaacttggcctcagacaggctggcccttcctaggctctaggggctggcgggtagtgggagccaataggtcccatattcctgagtgcagggggagtccctcttacctgcttcctcagatgactctggaagcttccccttaccaccgggcactgagacgaagctccctgacagccgagactggcagccctcatctggtctgtgccctcgccagaggccccctacatcaacctcctggcgatgccctggtggaacggatgggtgctctgggagtcctgtgcttcctgatccaatggtgccaaacccttcatctcccccagaagcacagcatacccctgggacccctcgaccactgccccctcggggagccttctgtttctggggtctcccccaccacagctgactcccaccccacataggactagcctggctgagggggaaggggtgggagagaagatacagacatggaggaggggaggctgctctggcaaagtcttcaaggcttttgggggtccaggcctggggtcaagaaggaaaatgtgtgtgagcatgtgcgtgagtgaggagtgtgtgtgagcgtgtgtgaggggtgtgtgtgtctttcctaggacccaccataccctgtgtatgtatgcatgtttttgtaaaaaggaacaaaatgaaaaaaatctgaa

SEQ ID NO: 16835 - DNA, 729 bp, Macaca Fascicularis
  misc_feature (1)...(729): n = A,T,C or G
gtatactgatggaagnnnnnnnnntccagacttcctagaagactgtctgcactggtgctttagtatctcaggcctccaaggattccatgatgattttaacatctttctcaaaactctgatatttgtcacacctagnnnnnnnnnnnnnnnnnnnnnacttgccttgactaaattttgggacctcttgggggcattttgaagtatttaactgtcttggccagttggaagaagatgtatgggccataggcatcttctggacagaactgctttcagagagaaaacctttccaagagagttttgttttgtttgagatagggtcttgctctgtcacctaggnnnnnnnnnnnnnnnnnnnnnnnnnnnnnnnnnnnnnnnnnnnnnntgaccctcccgcctcagtctcctgagtagctaagactgcaggcacgcactactgtgcccagctaacttatttttatttttttatggagatggggtcttgctttgttgcccaggctggtcgnnnnnnnnnnnnnnnnnnnnnnnnnnnnnnnnnnnnnnnnnnnnnnntcgagggctttaatggtttcacattgaagtctgaagttgctaagactcaggttgtttcttacatctgattttaagtagatgaaacaaccagaaacttacttgtgatactctgccatgaaggatgcggcgatggcaggaataacggaataattggtgcttgtaaacatttaagattctcct

SEQ ID NO: 16836 - DNA, 772 bp, Macaca Fascicularis
  misc_feature (1)...(772): n = A,T,C or G
gttcaaaaaaggggtcccngtgaaggtgaccaacgtccaaggatggcaccactcaccagacctccttggagctcttcatgtannngaacgaagtcgcgggcaagcacggtgtgggccgtattgacatcgtggagaaccgcttcattggaatgaagtcccgaggtatctacgagaccccagcaggcaccatcctttnnnnnnnnnnnnnagacatcgaggccttcaccannnnnnnnnnnnnnnnnnnnnnnnnnnnnngcctgggcttgaaatttgctgagctggtgtataccggtttctggcacagccctgagtgtgaatttgtccgccactgcattgccaagtcccaggagcgagtggaagggaaagtgcaggtgtccgtcctcaagggccaggtgtacattctcggccgggagtccccactgtctctctacaacgaggagtnnnnnnnnnnnnnnnnnnnnnnnnnnnnnnnnnnnnnnnnnnnnnnnnnnnnnnnnnnnatcaattccctcaggctgaaggaatatnnnnnnnnnnnnnnnnnnnncactgccaaatagacccctgtacaatgaggagctggggcctcctcaatttgcagatcccccaagtacaggcactaattgttgtgataatttgtaattgtgacttgttctccnnnnnnnnnnnnnnnntggggctgccaggccccagctttgttccctggtccccctgaagcctgcagacgttgtgttgtcaccaaaggggggcagctgcgggggcagctgcg

SEQ ID NO: 16837 - DNA, 728 bp, Macaca Fascicularis
  misc_feature (1)...(728): n = A,T,C or G
tcagcaggccaatggccatgtgtctcaggatcaagaggaacccgtctacctggagagcgtggccagagcacctgctgaggatgagacccagtctattgactcagaggacagcttcgtcccaggccgaagggcctctctgtctgacctgactgacctggaggacattgaaggcctgacagtgcggcagctgaaagagatcttggctcgcaactttgtcaactacaagggctgctgtgagaagtgggagctgatggagagagtgactcggctatacaaggatcagaaaggactccagcacctggtcagtggtgctgaagaccaaaacggtatgtagttgtttctgtttgggaatgggtttaggctcttttgtcctcttcaaccccaatccctttagtagtcttaagaattctgagcatttcagcctccagagagagggtgtgttggaaactcacagagacccagggggcctctcaccatctttagaaattctctctgaggccagccgtgnnnnnnnnnnnnnnnnnnnnnnnnnnnnnnnnnnnnnnnnnnnnnnnnnnnnnnnnnnnnnnnnnnnnnnnnnnnnnnnnnnnnnnnnnnnnnnnnnnnnnnnnnnnnnnnnnnnnnnnnnnnnnnnnnnnnnnnnnnnnnnnnnnnnnnnnnnnnnnnnnnnnnnnnnnnnnnnnnnnnnnnnnnnnnnnnnnnnnnnnnnnnnnnnnnnnggagaaccg

SEQ ID NO: 16838 - DNA, 736 bp, Macaca Fascicularis
  misc_feature (1)...(736): n = A,T,C or G
cccagcatcgtgnnnnnnncagcgttcagcttcaggagnnntgcttcccacctggccccatcaggctgcaggtcacacttgaagacgctgnnnctgccgcatccaccgcgtcnnctgcgcacgttgcnnnnnnnnnccacccccactgcaccgttgcagctctccaggagcaggtgttctcagagctcggtttcccnnnnnnnnnnnnnnnctgggtcattgggcggtgcctgtgtgtgcctgagcgcagccttgcctcctatggagttcggcaggatggggaccctgctttcctctacttgctgtcagctcctcgagaagccccagccacaggacctagccctcagcgcccccagaagatggacggggaagttggacgcttgtttccctcatcattggggctacccccaggcccccagccagctgcctccagcctgcccagtcctctccagcccagctggccctgcccttcctgcaccttcatcaatgccccaagccgccctggctgtgagatgtgtagcacccagaggccctgcacttgggatccccttgcagcttccacctagcaaccaccagaggttacaaggggagagtggcccttccctcataggtggcacggcagaacctacacgccgaatgacccagctccacccccacaggttacaaggacagagtggcccttccctcataggnnnnnnnnnnnnnnnnccccgccgaactcaggggacctctactg

SEQ ID NO: 16839 - DNA, 730 bp, Macaca Fascicularis
  misc_feature (1)...(730): n = A,T,C or G
ccggcaagcggacatcccggnnnnnctgtgaggccagccngggagaagagatgcccctctagcccctcaggtacccagatgacctggcctctgatcccacgctgcccacagcccccgggacccttgggggaactgaggcatgctgccttctcctgggccagtggatggctgggatgtgatttgccgttgggggcgggggcgggtctggcatacataaacggtacccctgccatgtgcacacaatctgagtccttaggaggctatggttgtgccctggagccatgctcccagctctgggcagactcctaaagggtaaatgtgtctccttcggctgccagatctgcggaaccagccctacatccgcgcagacacaggccgccgcagtgcccgccggcgtcccccaggccccccactgcaggtcacgtccgacctctcgctgtagccgctatttctgcaggtggattctgcaagggtgtggggccgtggacaggctgaggctcaaggaaggtggtcctcagctcggctggccgggcagcccctcctccgctgtggcccgccnnnnnnnnnnnnnnnnatcctcctcttgccacagagggcaaatgctgcttgcagcacccaccccaaagccccctccaaatagccatacttagcctcagcaggagcctggcctgtaacttataaagtgcannncgcccccgcaagccccagccccgaggaccgtccatggacc

SEQ ID NO: 16840 - DNA, 725 bp, Macaca Fascicularis
  misc_feature (1)...(725): n = A,T,C or G
cgactggaaggccattctggacagcaagcggccctgctgagctggactgtgcttcgggctnnnctgnnnnnnnnnnnnnngggctcccagctcggggcctgtggnnnnnnnnnnnnnnnctgggggtccctccgagactcctgggccccatgacctcctgctnnnnnnnnnttcccttccccagccctgccaggccttaacctgatcacagggcagggctgggccctctgggcgcttggacatagacatgtggtcccaggnnnnnnnnnnnnnnnnnnnnnnnnnngctccaagctaccagaagcccaggggctcaggacagggaggagttgaggccactgttcaggggactggtggccctctccactccctaggcaagttctctgaggcagaggggagttccctgttcccagagtctgcagccatcagcaaggaggacgggaacccggcgactgannnnnnnnnnnnnnnnnnnnnncccccctcatggtctcagccgcagcaccccttattccagctgccctgcccaacctgctcaccccacacgaccttctctgtattcagcaaacactcactaggtgacagcgnnnnnnnnnnnnngtgctgggggacgataccggccctggcctcgaccagctcagaggtttctcacacctctgttcccagggccctgctcagggcccagcagnnnnnnnnnaggcttgaacgtgnnngagtgcagaaaa

SEQ ID NO: 16841 - DNA, 1306 bp, Macaca Fascicularis
  misc_feature (1)...(1306): n = A,T,C or G
ggtacaggcaagacactctgtgcgcgggcggttgctaatcggactgnnnnnnnnnnnnnnngagttattggatctgagcttgtacagaaatacgtcggtgagggggctcgaatggttcgtgaaactctttgaaatggccagaacaaaaaaagcctgccttatcttctttgatgaaattgatgctattggaggggctcggtttgatgatggtgctggaggtgacaatgaagtgcagagaacaatgttggaactgatcaatcagcttgatggttttgatcctcgaggcaatattaaagtgctgatggccactaacagacctgatactttggatccagcactgatgaggccagggagattggatagaaaaattgaatttagcctgcccgatctagagggtcggacccacatatttaagattcacgctcgttcgatgagtgttgaaagagatatcagatttgaattgttagcacgactgtgtccaaatagcactggtgctgagattagaagcgtctgcacagaagctggtatgtttgccatcagagcacggcgaaaaatcgctaccgagaaggatttcttggaagctgtaaataaggtcattaagtcttatgccaaattcagtgctactcctcgttacatgacatacaactgaaccctgaaggctttcaggtgaaaactttagattggaatcctaaccttacatagacttgttaataaccacttcataaacaaataaatggcttcaaaattgtatgtttccatatctcttcttataataaaaggtgatctctaatgttattagacagaaaagcttgttagaatatattttgactgtttttttgacccactcccatttaagggtttcacagcaaacagagtgcttgcttagatggcttatatcctgggcatatgctggctgggtgctctacatagaaattctcattgtatcctnnnnnnnnnnnnnnnnnnnnnnnnnnnnnatggatcttcatctaatggattcataaactttcctacttacttgtagtggcaaagctgggtttctggtccaagtttgtcagctccattacctatgctcctattatcctcttctgtcccgcatcaaagtagctcacttaggcttctgaccacatgcattatgatagtttcccaccaccatgttgaataataaaagctttggccaaatcttttttaaagtaagagaaacattggatgtatatgttttgcattgcaatttgatttcaaattaatcaggaagaattagtgattttaatgagcagtaaagtaatacaataaagcagaaagaaaa

SEQ ID NO: 16842 - DNA, 889 bp, Macaca Fascicularis
  misc_feature (1)...(889): n = A,T,C or G
tatttcttatgnnnnaatcantccgcgttcctcaaggagttctccaactttgctaactcctggcatgatggaaaatcttttccatgaaatgggacatgccatgcattcaatgctaggacgtactcgttaccaacacgtcacttggaccaggtgccctactgattttgctgaggttccttctattctgatggagtacttgcaaaatgattatcgagtagttaaccaatnnnccnnnnattatcagactggacagccactgccaaaaaatatggtgtctcgtctttgtgaatctaaaaaggtttgtgccgcagctgacatgcaacttcaggtcttttatgccgctctggatcaaatctaccatgggaagcatcccctgaggaattcaaccacagacattctcaaggaaacacaagagaaattctatggcctaccatacgttccaaatactgcctggcagctgcgattcagccacctcgtggggtatggcgctaaatactactcttacctcatgtccagagcggtcgcctccatggtgtggaaggagtgctttctgcaggatcctttcaacagggccgctggggagcgctatcgcaaggagatgctggcccacggtggaggcagggagcccatgctcatggttgaaggtgtgcttcagaagtgtccttctgttgatgnnnnnnnnnnnnnnnnggtttctgacttggatctggacttcgaaactttcctcatggattctgaataacagaaacatgctaaacctcttnnnnnnnnnnnnnnnnnnnnnnnnnnnnnnnnnnnatgctacagctgtgagagcttgtttctcatttcagtgttcacttctgtaataaattcggaaaaactttaaactgagagaacnnggaataaa

SEQ ID NO: 16843 - DNA, 710 bp, Macaca Fascicularis
  misc_feature (1)...(710): n = A,T,C or G
atccaggcagctgacagcacagccgtgaatggcagcatcacacccacagacaaaaagataggatttttgggccttggtctcatgggaagtggaatcgtctccaacttgctaaaaatgggtcacacagtgactgtctggaaccgcactgcagagaaatgtgatttgttcatccaggagggggcccgtctgggaagaacccccgctgannnnnnnnnnnnnnnnnnnnnnnnnnnnnnnnnnnnntcggatcccaaggcggccaaggacgtaaggaccccctccctcccctcagcgactccgggtcacagccagnnnnnnnnnnnnnnnncctcccctcctcccctgcacaccaagtgagtgtccannnnnnnnnnnnnnnnnnnnnnnnnaagggccatttcccattgtgaagggtgtttgcattaattgaatacagacttcctttaattccaatcaaagaatgaatactactagagcccttggagtctgtnnnnnnnnnnnnnnnnnnnnnnnttcatgtgttcnnnnnnnnnnnnnnnnnnnnnnnnnnnnnnnnnnnnnnnnnnnnnnnncaggtttctatatttagctgtcgctgtatttgtatattttacaagttcaagtgcggtagtcatcnnnnnnnnnnnnnnnnnnnnnnnntccaaataaatccaaagaagcccccaaaataaaccattcttttaaatggg

SEQ ID NO: 16844 - DNA, 729 bp, Macaca Fascicularis
  misc_feature (1)...(729): n = A,T,C or G
gccaagagcacagcttattaatgaaagagacctgtggattgaagtgctgcagatagatcccacagtcccttgtgaaaggaactcaaatacaaatgaagcaagagccctaaaacggaatgaaagaggatgtgtgaggccgtctcagagagatggaagcaggcgnnnnnnnnnnnnnnnnnnnnnnnnnnnnnnnnnnnnnnnnnnnnnnnnnnnnnnnnnnnnnnnnnnnnnnnnnngttagaactgcaggccagctccaaagagtgcttaagattcaaaagtggataagtaaaatggatcagtgggaaggataaggtgtccaacagaaagtgtgggnnnnnnnnnnnnagcccatcagtgctcctgagagaaaccatnnnnnnnnnnnnnnnnnnnnnnnnnntacgtgagaactgcttgtcatgaccagagaagattggaaaggggaaaccccagaaacgtgnnnnnnnnnnnnnnnnnnnnnnnnccaagaagttgtcactattacacataagcaccattcccttagagtagatccaggtgttgactataaccagatttactctttgcttactaggtttttcattgtcaccattgnnnnnnnnnnnnnnnnngccacagttgtgaaaataaatggaagttggttgattgtctagaaagtgaaagaagatggccctgctccttttctgctgaccatttagtattggaaactcctacttccctttcata

SEQ ID NO: 16845 - DNA, 999 bp, Macaca Fascicularis
  misc_feature (1)...(999): n = A,T,C or G
agaaactccatgagaggaaatccaggagctgcaggctcagattcaggaacagcatgtccannatcgatgtggannntccaagcnnnnnnnnnnnnctgccnnnnnnnnnnnnnnncagcaatannnnnnnnnnnnnnnnnngaanctgcaggaggcagaagaatggtacaagtccaagtttgctgacctctccgaggctgccaaccggaacaatgacgccctacgccaggcaaagcaggagtccaatgaataccggagacaggtgcaatccctcacctgtgaagtggatgcccttaaaggaaccaatgagtccctggaacgccagatgcgtgaaatggaagagaactttgccgttgaagctgctaactaccaagacactattgnnnnnnngcaagatgagattcagaatatgaaggaggaaatggctcgtcaccttcgtgaataccaagacctgctcaatgttaagatgncccttgacattgagattgccannnannnnnnnnnnnnnnnnnnnnnnnnnnnnnnnnnnnnnnnnnnnnntccaaacttttcctccctgnnnnnnnnnnnnnnnnnnnnnnnnnnnnctccanatggtggacacccactcaaaaaggacacttctgattaagacggttgaaactagagatggacaggttatcaacgaaacttctcagcatcacgatgaccttgaataaaaattgcacacactcggtgcagcaatatattaccagcaagaataaaaaagaaatccatatcttaaagaaacagctttcaagtgcctttctgcagtttttcaggagcgcaagatagatttggaataggaataagctctagttcttaacaaccgacactcccaaaagatttagaaaaaagtttacgacataatctagtttacagaaaaatcttgtgctagaatactttttaaaaggtattttgaatatcattaaaactgctttttttccagcaagtatctgaccaacttttctgctccaataa

SEQ ID NO: 16846 - DNA, 700 bp, Macaca Fascicularis
tgccccaggaagcccacagcctcacctgctgctgcccctctaggtctgggcagccatgacctgcagggcctagcaccactgtctttcccctcatctgcccaagaccccggctggcgctcataccctgtcctttctccctgaccccacgggcacagaggcaaggcctcctgtctgcagcagcttcctcagtttcctactgccttaggaggcccctgcttgtgctcagggaaggcctcttcatgggcatgtgtctgctggggcggtggggcttggtgccaactctgctaagttttctgagataagggtctagccctgttggggacagaaaagtgtgtagaccttcttcctgctagggctgcactgtcctgggtgttgggcccttctggtgggcaaggctgtgccaaccctgtacagaatagagtgctgtaacctggctagaccccagagcccttgtgccatctttcttcctggccagagtgatggggttccagccatggggaagcaacccaatactctgtctcgttgctccaatggaggcagaagagcccaggacccaagcgtcttggcaggggtgctgtgaatgtccagtggtcccagcaccccaccctggccctgccccagcctgtgtagctcttcctgcatgtggatgctgcatgtctggtctggggcttggatgttgcactgccccactgcctgtccc

SEQ ID NO: 16847 - DNA, 776 bp, Macaca Fascicularis
  misc_feature (1)...(776): n = A,T,C or G
ataaatgtggccccatggtattggatgctttaatcaagattaagaatgaaattgactctactttgaccttccgaagatcatgcagagaaggcatatgtggctcttgtgcaatgaacatcaatggaggcaacactctagcttgcacccgaagnnnnnnnnnnnacctcaataaggtctcaaaaatctaccctcttccgcatatgtatgtgataaaggaccttgttcccgatttgagcaacttctatgctcagtacaaatccattgagccttatttgaagaagaaggatgaatctcaggaaggcaagcagcagtatctgcagtccatagaagagcgtgagaaactggacgggctctacgagtgcattctctgtgcctnnnnaagcaccagctgccccagctactggtggaacggagacaaatatctggggcctgcagttcttatgcaggcctatcgctggatgattgactccagagacgacttcacagaggagcgcctggccaagctgcaggacccgttctctctataccgctgccacaccatcatgaactgcacaaggacctgtcctaagggtctgaatccagggaaagctattgcggaaatcaagaaaatgatggcaacctataaggagaagaaagcttcagtttaagtgtttccatgctaaacatgacttaaaaccagctcagagctgaacataatttatatctaatttgagttcctttaaagatcttggttttccatgaatacagcatgtannnnnnnnaattttaagaaataa

SEQ ID NO: 16848 - DNA, 742 bp, Macaca Fascicularis
  misc_feature (1)...(742): n = A,T,C or G
ggcgggcacagagnnncacctgtactgnnnnctatcgtgaggctctggcacnctgggccactgcctggcagctgcaagcccagctgggcacccnnnctggcccagaccgccccctgctgaccctggctgggctggccgtgtgccaccaggagctggaagaccctggggaggcccgggcatgctgtgagaaggccctgcagctgcttggggacaagagcctccaccctttgctggcaccctttctggaggcccatgttcgactctcctggcgcctnnnnnnnnnnnnnnnnnnnnnnnnnnctcggctccaagccctgcaggaggcaggccttacccccacgccaccccctagtctcaaagaactgctcatcaaggaggtgctggactaacccttgcctaggtttaaggccactgtgaggagagaggctgccccagaatgcaggggaaggnnnnnnnnnnnnnnnnnnnnnngagagcacctagaagttccaaaagagaatgtgaagcagatcaaggaaacttctgttgagctgggctcaggatgagctttggctgaggttgccctggtatagtacagggaagaagtctgacatagcctctccagcttataaacagccaaggggctgtggcacaggtcaggggcaatgttcccttgttggtgggcccccaagctggcgagacctcctctgaaggccagggactctgccctggagtcctggagttgaggcatgaaggcaaggtc

SEQ ID NO: 16849 - DNA, 1013 bp, Macaca Fascicularis
  misc_feature (1)...(1013): n = A,T,C or G
gccggggcttccagnnncgtgctgnnncnnnactcccgaccatggtgtgcgtgtgtgcccgtctgtgactttctactcaccgaggttgaagaaaggaaacggggaaaatcaaaaggggttcaaaccccacctcagtaggtggaggggagcgccagccgttggttgtacttttgttctgagttttcagtgccctgttcctaactactccatcccatgacctcaccacacctactgggggcatctggctggtgcctgctgccgtggccgggtcccactctcaccctgcacagggggtctcgcagctcccaggcccacagctcattggaaggacagggtggccctggggagaagagggaggagcccatgggcttacctcaccgagggggctcctcagcaggcatccactaccccaggagccctccacatgtcatggcaagcttggtagtgaacgggcctggttgggagcagcccctggcccattgcccacccacccatctcactatgcaatttgagttccaagcaccatttgctcctgccctggggccagctctgcccagccctgggaggggtggtgaggcagcgccctggaccccagaacctcagatgggggcaggcgggggaccagggcccctcctgtgggatctttgttttgtgtttaaccataatggttgtgtactgaaccacttcatatttgttatatataatatatatatataatcttaagactcagcctcccggtttactccccgccccacacaccgcccgggcatctgacctcccccaccccagtgtgatttnnnnnnnnnnnnnnnnnnnnnnnnnnnnnnnnnntttccccctcctccagcctccgtagggccatggctgtatgtactgtcgctgtgtttttttgtttttttagaactgggtttgggggctgatttttatttctttgggggctttatttttcttggcaaatactaaaaatctcgtcaatgtaatttctgtggtttctattcagcttgggttcatgt

SEQ ID NO: 16850 - DNA, 824 bp, Macaca Fascicularis
  misc_feature (1)...(824): n = A,T,C or G
cccagccactgcngncgactgcagnnnnnnnnnncggctgatcaaggagctggctaaatatgaatacatggaagaacaagtaatcttaactgaaaaagatctgctagaagatggttttggagagcacccctttaccactgctggttgcagaagtgcncaaagagcactnnnnnccggaaggacacagcattgttgttttgccatgtactattttacctatgacccgtggattggcaagttactgtatcttgaggacttcttcgtgatgagtgattatagaggctttggcataggatcagaaattctgaagaatctaagccgggttgcgatgaagtgtcgctgcagcagcatgcacttcctggtagcagaatggaatgaaccatccatcaacttctacaaaagaagaggtgcttctgatctgtccagtgaagagggttggagactgttcaagatcgacaagcagtacttgctaaaaatggcaacagaggagtgaggagtgctggtgtagatgacaacctccattctattttagaataaattcccaacttatcttgctttctatgctgtttgtagtgaaataatagaatgagcacccattcnnnnnnnnnnnnnnnnnnnnnnnnnnnncatgtttgaaatgaggtctattttaaagtggcaatctcagatgcagtttggagagtcagatatttctccttgaatatctttcgataaacaacaaggtggtgtgatcttaatatatttgaaaaaaaacttcattctcgtgagtcatttaaatgtgtacaatgtacacactggtacttagagtttctgttttgatcttt

SEQ ID NO: 16851 - DNA, 745 bp, Macaca Fascicularis
  misc_feature (1)...(745): n = A,T,C or G
cttttcaacctcattagnncctnnncnnncttccgcgagggcgaggcctggacgcccgtgtgcctgcccaaattcaacgcagccggcttcttccacgcacatatctcttacctagagcctgacactgacctctgcctgctgtttgtctccactgaccgtgaggacttctttgcagtctctgactgccgccgccgcttccaggagcgccttcgcaagcgtggagcccacctagccctgcgagaggcgctgcgcacaccctactacagcgttgcccaagtgggcatccctgacctgcgtcacttcctctataagtcaaagagctcgggactcttcaccagccctgagattgaggccccgtacaccagtgaagaggagcaggagcggctgctgggccnnnnnnnnnnnnnnnnnnnnngtgcccacaatgcctctcgcccactcaagaccatttactacacgggccccaacgagaacctcctggcctgggtgacaggcgcctttgagctctacatgtgttacagccccctggggaccaaggcatcagctgtcagtgccatccannnnnnnnnnnnnnnnnnnnnnnnngaggaagaccgcctcttcattctcacgcccctcacctattgatgggaatgtgtgcaggcttggccttcccaggcacactgggtgtgggaagccgtaggagcctccagatgggggctggcctctcttgcccagccagcaggcagggactgtgggttggtga

SEQ ID NO: 16852 - DNA, 767 bp, Macaca Fascicularis
  misc_feature (1)...(767): n = A,T,C or G
acgccattgctggggttgctgtggccctgaagcaagctatgannnnnngaattaaagnnnnnnnnnnnnnggtggtggccaactgcagggctctgtcnnnnnnnnnnnnggnnnnnnnnnnnnnnnnnnnnnnnnnnnnnnnnnnnnnnnnnttgatcctcgtggatctccgttccaaaggcacagacggtggaagggctgagaaggnnnnnnnnnnntgttctannnnnnnnnnnnagnnnnnnnnnnnnnnngacaaaagtgctctgcggcccagtggactgcggctggggaccccagcactgacgtctcgtggacttttggaaaaagacttccaaaaagtagcccagtttattcacagagggatagnnnnnnnnnnnnnnnnccagagcgacattggtgtcagagcnnnnnnnnnnnnnnnnnaggagagactggcaggggataagtaccagggggccgtgcaggctctccgggaggaggttgagagctttgcctctctcttccctctgcctggcctgcccgacttctaaagnnnnnnnnnnnnnnnnnnnnnnnnnnnnnnnnnnnnngaagccgcctgccggaggacccccacttgagaaatggatgagctgctccacaggggaacggttgacacttgggccctctgacggggtttcttttggacttttttcatgttttcttcacaaatcaaaatttgtttaagtctcacnnttagtaattctgggacaggttattaattaaaggatttaaatttgaacctg

SEQ ID NO: 16853 - DNA, 733 bp, Macaca Fascicularis
  misc_feature (1)...(733): n = A,T,C or G
ccatggcacgnnctgggcacccattctgtacagggagtgaggagccttcctgctcatcagcatccaggtcctcccgttcttccttgctgtgccggagactgaagaccaggcggtggagctggggagggcgggagcacggactaggtgggagttctgtccccccatgcccgaccctgaagtctcttgcacaccagctcgttactgcctgccctacccacctctgttgagaccacacagccagcccaggctcaactcatgccaactccatcctacatggctgccctgtgctctcggggtaaaccccgagcccctgagcttgtgttgacagccgttggccctgctcccccagcttcatcagctcaggtcccctgtctacacccagatggtagcgcttgcgaccctggcctggcagtcctgctcacagtgttctgtgcccgtgtgctcccacccttcccccctgctgctgcggaatccctgtcatccttccacactccctgtcatccttccacacccggatctcttgtcctgtcctcaccccaccctgccaccatcagccctgcctggagccacctgcccttcagcaacaaaaccaaacctttttgtgggcgttcaagatggtattgtgccccaccagtcagatcctgtgttttgagtcccaaaggccatgccaaggattggctctgggaggctttaatcaccaacccatcaacatcaagcctcccccaggctgtca

SEQ ID NO: 16854 - DNA, 707 bp, Macaca Fascicularis
  misc_feature (1)...(707): n = A,T,C or G
attttagttcagcagttannnnnnnnnnnnntaatttttgccagaaaagtatgagcctaacattctgatgagtccagaagactacgttttgtcagtagcaacacactaggaagtaaaatatatttagaatgtaaacattgtgtgccagtggttctcgcgcttgactgcatgtcagttacttgaagagccacacctgtgatcaacgcagtctgaaccagggaagtaggtcctagacatcaaggacctttttaaagctccccaggtgattctacgttccccaaggttgaagaccacttctgtgcattggcttgcacaatttgaaaataatgcttttcatgagctggatcccagtgttgcctaacagggtgtctgccgggccgcggtaaagcnnnnnnncttcatccagccccaaaatgtatgtnnnnnnnnnnnnnnnnnnnnnnnnnnnnnnnnnnnnnnnnnnnnnnnnnnnnnnnnnnnnnnnnnnnnnnnnnnnnnnnnnnnnnnnnnnnnnnnnnnnnnnnntgccttgttccccgtcagtaaacaaggttacctacctcaggcggctgctagtgagggagcaaatgcagtattttcagaatgatttatttttttaattgtaaagacttgtgccattggctgttctttctagtcacctaaatttctgttctcaatttctctagaacttgcaatagttgggggtt

SEQ ID NO: 16855 - DNA, 918 bp, Macaca Fascicularis
  misc_feature (1)...(918): n = A,T,C or G
gatgagaattgacagggcactgactcacaaagagttcctgtcctgnnngagaggactcaatactatttgcccntgtggaggaggatgaacatgagcccgagtttaagaagttcctggatgctgtggatccagggaggaagggctacgtctcactggaggactataccgctttcctgattcacaaggagtcagaaaacatcaagtccagcaatgaaatagagaatgctttccaagccctggcggagggcaagtcatatattaccaaagaagacatgaagcaggcccttaccccagagcaagtgtcattctgtgccacacatatgcagcaatatatggacccacagggtcgaagccatctctctggctatgactacgctggcttcaccaattcctattttggcaactcataagcagctcctcgtggatcatagaaaatcttagtgttgtgggaaatttactggggggtgaagagtacaggcaaatgtggaagataaaagatggcctcgtgtgtgtgtgtgcttgtgtttgtgtgcatattacatttattgcaggatcttaaaaaatctcaagggtgggagatagaaaggttaatagagttggaggagtggatgctattttgtatgcaactagtcactgctgaggcgtgtcaaagtttctattttttatttgttctgttttgcatgtctttatcattatgctttattcctattatatagtaattctttttaacaatatttttggggcaaagttaagtgaaatgttgagcttctatatttctgagaactgtacttatataagagtgggcagctaattttactgtaaagaagggccatggtatagtaaataaataaaatccaaggcaatttgcaaacaatttttttaaactttggaatgtgtctatataataggaatgaaagc

SEQ ID NO: 16856 - DNA, 741 bp, Macaca Fascicularis
  misc_feature (1)...(741): n = A,T,C or G
gacgaccgtggttannnnngccacagagaaacacctgcagaagtacctacgccaggacctccgcctgatccgagagacgggagatgactacaggaacattactttaccccacctggagtcccagagcctcagcatccagtgggtgtataacattcttgacaagaaggctgaagcggaccggattgttttcgagaacccagatccctctgatggttttgtcctcatccctgacctcaagtggaaccaacagcagctcgatgacctgtacttgatcgccatctgccatcgccggggcatcagatccctacgcgacctcactccggagcacctgccgctgctcaggaacatcctccaccaggggcaggaggccatcctgcagcgctaccagatgaagggagaccgtctgcgagtatacctgcactacctgccctcctactaccacctgcacgtgcacttcaccgccctgggcttcgaggcccccggctcaggcgtggagcgggcccacctgctggctgaggtgatcgagaacctggagtgtgaccccaggcactaccagcagcgcacgctcaccttcgccctcagggccgacgaccccctggctcaagctcttgcaggaggctcagcaaagctgaattaactcaggcagaagagcacagatgtgtgggactgggggaggagtggggacaagattttttatctccaagtgaattttctaaaaagtattttgtaccggctatccta

SEQ ID NO: 16857 - DNA, 757 bp, Macaca Fascicularis
  misc_feature (1)...(757): n = A,T,C or G
ggnnnnnnnnnnncgaccaccagctcactgaggtggggaccatgaacatctttgtctactggacccacgaagatggggtgctggagctggtgacgcccccgctgaacggtgtcatcctgcctggagtggtcagacagagtctgctggacctggctcagacctggggtgagttccgggtggcggagcgcacgatcaccatgaagcagttgctgcgggccctggaggagggccgcgtgcgggaagtctttggctcaggcactgcttgccaggtctgcccagtgcaccgaatcctgtacaaagacaagaacctccacattcccaccatggaaaacgggcctgagctgatcctccgcttccagaaggagctgaaggagatccagtacggaatcagagcccacgagtggatgttccnnnnnnnnnnnnnnnnnnnnnnnnnnnnnnnnnnnnnnnnnnnnnntctcatcacgccagcacttacctccctaccaatgactcacctgaagtgcaatactaaataaaaggccagcgggcggtgtctgggtctctggcgccccccatgtggttgcgacacccccaaagccataagggccgacccaggcatcttggtccccagcccctcgtctcgggttcaggtccgccccttgctccttgtcgtgaggtcaaggatacaccttggccccgactccggatctctccattctcaggccagaccgccggtgttgccgttgagtttttttttccctctctgtcttgcgca

SEQ ID NO: 16858 - DNA, 669 bp, Macaca Fascicularis
  misc_feature (1)...(669): n = A,T,C or G
acgaggaggatgaggagnnngagannnnnnnnnnnnnnaaggcactgacagnnaanntacagctgcagactnnncggccctcatnnctggagtggacagcccaggtccagagccaggcctggcgcagggcccaagccaaacctggaccagggggacctggggacatctgtggtttcgactcaatggacaccgcccttgagtggctccgacaggagctgcgggagatgcaggcgcaggaccggcagttggcagggcagctgctnnnnnnnnnnnnnnnnnnnnnnnnnnnnnnnnnnnnnnnnnnnnnnnnnnnnnnnnnnnnnnnnnnggatgaggccgagctggagctggagctggagcccggggccggcctggccctggccccgctgctgcggcacctgggcctcacgcgcatgaacatcagcgcccggcgcttcaccctctgctgnnnnnnnnnnntgcccccctgactccccgccccctctcccaatgctgcttcccctgcctgtctgggaagaggaaagggaggggtgccccagaggcaccagctcctggcgggggaggaggaacatttaggtttctgagagctgaattccaagagtgcaaaaccccagcatcctgtttcctctgctgccccagctgggagggggaggaggaggatctcacacc

SEQ ID NO: 16859 - DNA, 742 bp, Macaca Fascicularis
  misc_feature (1)...(742): n = A,T,C or G
agaacattttagatggggtcggcagagggagaaataagccagccatnnnnnnnnnntggtttcccaggtggaacgggctaacacaggagatgatgggagcctgtcctgcagtccctgcatgacnnnnnnnnnnnnnnnnnnnnnnnnntgggcatcctggggctcttagggtcccagaacaagccccaggcaagctggaactcgggtgaggaggggacatgaggataaacagccgaccgtggcttcaaggacatcagggccatcccnnnnnnnnnnnnnnnnnnnnnnnnnnnnnnnttgggtttggatcaaaagtgtttaaaattaatatgttgtcagtgattataacaacactgtttacataaaaaccattttttctaattctaacaagttagaagtgaggaaggaatgaacacgcatgtttaggaaactgccctttggtgctnnnnnnnnnnnnnnnnntggggtgtcgctgctgtccgggggctgctccgctgccccggcccaggtccccttgtggtgttgccagacaggcctnnnnnnnnnntgtgcagaggcaggnnnnnnnnnnnnnnnnnnnnnnntggagaaaaggttctgtgccctcaggtggggcttccccctcgtatttataatcttaatttatatagtgaccaccgtggaaacaaatgcctcttgtattgttatgtacatagtccatacctgagtgctgtacataagttggtctgtgtataaataaaac

SEQ ID NO: 16860 - DNA, 863 bp, Macaca Fascicularis
  misc_feature (1)...(863): n = A,T,C or G
ccacagccagnnncccacagcaacaaggaatgagacccccaatgccacctcatggtcagtatggtggtcatcatcaaggcatgccaggataccttcctggtgctatgcccccgtatgggcagggaccgccaatggtgcccccttaccagggtgggcctcctcgacctccgatgggaatgagacctnnnnnnnnnnnnnnnnnnnnnnnnnnnnnntcttacttcatccagtctaataggtttggagattaaaccttttctcaacttgtgctgtttatnnnnnnnnnnnnnnnnnnnnnnnnnnnnnnnnngactttaacaaacattatcttcccacataccaggaactattggacatttattttacatgggaaaaattatttggaataataannnnnnnnnnnnnnntgaagttgcaatttatactgtatggcttctttttcatgtttcatctaggtttttagaagtgaagtatagtaaatttggttcgttaaattgtgaaggcgctggaattacatgaacataccaccttaataaaggcaagttctgtaagcttacattgctatttgtaaagtttgccnnnnnnnnnnnnnngatgctgttggacttcatgtccccaacctagcttggtgagggnnnnnnnnnnnnnnnnnnnnnngtacattggaagtctgaatgtgtaacaatatttaatgtatttagagttcctcatgttgcagggtttaagaaatctgacccacnnnngtcannnnnnnnnnnnnnnnnnnnnnnnnnnnttgtaataaaacgagagaaaaatttatgcctttttattcataacccagctgtggaccactgcctgaaaggtttgtacaaatgcatgcc

SEQ ID NO: 16861 - DNA, 744 bp, Macaca Fascicularis
ctaaaagcttacatactaagcttctattatatgtggagtttaaaaagttgttgcgtaaccatataggcagtagcaccaacaagccgtctcctctctgcttgccttagagtagccatactttatcccctgcaaacaagaggcttgtgttcaatccagttttttctgacatccagctcaccgagcaagttgggcttgataaactgtttcacaaagcagtagagaaagctaacagcctgacacaatacaaattgcagagagttctgtagataagacaaagcactttcctggaggaaatggtgagatgttgtgatttatggacccatcagtgttactgttcataatgagaaaacctgttgcattcagaccatcatcctgaataaacgatggctccgtggaatggaagtgtaaggatggccatcatatgaatttgtttgccatcagagatcacgttcttccttaggacatttttccttttctggccacatataagaaacaatttgtatgtatgatattaatttttttaatgcaaagcaaatcataattcttttatttcatttccttcagcaatgcctcgtgttcagatttctgcattcaattaacatgaataatcaaataattgttaagagtgtaacagtaattttttctcaaatccctaatccctttggattttgtaacaggaatcctttgcaaaatagatgtgctctgtttaagaagatgttctctaatgcggaaatgttgtttcaa

SEQ ID NO: 16862 - DNA, 766 bp, Macaca Fascicularis
  misc_feature (1)...(766): n = A,T,C or G
agggtntggcaacgtttgccctctgaaccagacccttctccctgacgtggcnttnnnngccagggcatgagccctctttctatacctgttccctttcccccagtgggggctgggtcatgggagaaggggacatatttgtggccaaaatgatactaaccaaaggggctgccttgtcagggcctggtggagttggtgggtcactggggctcactgcctcgtccttctctcctgtctctgactcccactcagcccttctctccctgcagcctagcagtttatcattctgagatggaaagttgaagggggcaagcaagacctctcctcagcctatgcccagctgtcaggggagaggtgcagggaggaaggccttgtgctgggacagccgctctcttgccttacctcggagagggactgtgccctgacccctcctttctgaaaatcagtcccctccctgttgctctaggaggctcctgctggcttggtagaagacagaattcgatccgcgtgtccctttttcctctggggtttggcgcataggctcctccctgcaggctgtggctctggtggcctctcannnnnnnnnnnnnnnnnnnnnnnnnnnnnnnnnnnnnnnnnnnnnnnnnnnnnnnnncccactcccaggcgccccatgtcctcacaggccaggatgccatggcagggtggagaggacttggtggatttttgcttcttgcctgacctcagtttcatgaaagaaagtggaagctacagaattattctaaaataa

SEQ ID NO: 16863 - DNA, 1025 bp, Macaca Fascicularis
  misc_feature (1)...(1025): n = A,T,C or G
caaaataattttatatgtggccacactgatgttcatctttgtgcccagggtctttgtgccttgtctctactccctctcttggatctggggaggagggacagactcctgggactctgtatttctatagttctcctggcagagcctttgggaatggggagaaacagcctgggctggggcaacaggtctgtcactatgctctcttgccttcagacagaccattctgaattctctaaagggaaagggcttttgcatctaatcacaatagagttgaaagagaggccttaggattctcctctctctaggtgctgagccctcacctccctgttccagcctgnnnnnnnnnnnnnnnnnnnnnnntcttcctacaatgcnnnnnnnnnnnnnnnnnnnnnnnnnntgaccttcctctatcccctgcccgtcctgcctcttacctcctcnnnnnnnnnnnnnnnnnnnnnnnnnnnnnnttgagctcaagctgtgataaagaagggcccatcctatttcccctcatctagtcnnnnnnnnnnnnnnnnnnnnnnnnnnnnnnnnnnnnnnnnnnnnnnnnnnnnnnnnnnnnnnnnnngaaattaatggctattctttcccggatacattctggcttattgagatacacgattctcttagaatcctgtcccttggttcaggaaagtagcttgggaaaggagtaggggtatagcttgggtcccttttcctgcaaggccccatggggcagaatataataaatattctgagtgaggagtgtggcctatttttcattcaggtctttttctgatcttcctcagcttctgtaagttgcagagtgaggtatattaggagactagtnnnnnnnnnnnnnnnnnnnnnnnnnnnnnnnnnnnnnnnncttctacaacttagtctgcacctcagttggcaaaggagactgggtggccatctttcctcatgttcccttgagtatttcaatgtnnnnnnnnnnnnnnnnnnnnnnnnnnnntaacattttacattattgttattaa

SEQ ID NO: 16864 - DNA, 715 bp, Macaca Fascicularis
gcaagcccgggctaaactagaggcagaagggaaaattccaaaggaaagaaggaaatacctgcatgagtctcggcaccgtcatgccatggcacggaagcgtggtgaaggtggacgatttttctctccaaaggaaaaggatagtccccatatgcaggatccaaaccaagccgatgaagaagcaatgacacagatcatccgagtgtcctaaccccaggccatatgatggagctgatcaaggtcatgtttctcaccagtttctcactgttccaggaaattgatcaactcttccaatgggacattgacgatcacattctgcccttttctacaggacggaaaccacttagtttttcataagtggctcagtattacaattgcagcaatgcctggcaaattgaagttgcaagcctttgtcttactctttcagtcaggacctatttcagactgttgatcacactgacatttcatggattcggatgatgcaaggagacacatgccaccccagcagtacacaaagcacttacgttgactggtgacatgagccagccatctcagcagggaaaaacaaccttctcaaccaaaactgcaatcaggaaagcagcagcccactccttcccatggaatctagacagtatttatccctctggtgggggaatctcacactgactaactgaatggacgctttgtattcagagatggcttccaagcaaggaagttc

SEQ ID NO: 16865 - DNA, 717 bp, Macaca Fascicularis
  misc_feature (1)...(717): n = A,T,C or G
aagcctgtgcctctcnnnaaagagctcctcnntgctgccaagccctggtctggccacgagccactacnnnnnnnnnnnnnnnnnnnnnnnnnnnnnnnnnnnnnnnnnnncgaagcctcagtcccccatctgagccaggcctagtcctctaatagggatggtggctttgtcctcccatcactgcaggtgcattccacctggggaatgaggctgtgcgctgggcgtctgctggccctgagacatccagtcttccacactcaaccgtgggatgggagggtggcgtggccttacccacggggctggccaggnnnnnnnnnnnnnnnnnnnnnnnnnnnnnnnnnnnnnnntggttagacctaattgtagtggagcctgggggagagggtgagggaggggactgcgggtcagataagacctggaagacagacgtacagccggcgggcagggggactctaaggcaaggaggacttacagttgggaaggaggcagtggcagaggggcgagggacaggggggcccttaagtccagcgaggaaagcttcgtgtgggccccgcactgcgctccgttcggnnnnnnnnnnnnnnnctcttttcccagctccctccagccatcagcagcctcttgtcaagcttccgtctcaccccagtctatccccacccccaaatcnnnnnnnnnnnnnnnnnnnnnncactatttattctttgttccttttctttt

SEQ ID NO: 16866 - DNA, 676 bp, Macaca Fascicularis
  misc_feature (1)...(676): n = A,T,C or G
agccccnnnnnnnnnnnnnnnnnnncccannngnnnntgaggtgggtccctaccccnnngnncctcttcatcctttcccctttgtcccgaaagggaggggcaatggtccaggcattaattccacccagggaattttagctatgccctcatatcccagggagagagccacacgcctgttttccatttatagcaagattgtttgcatacttttgtaatgaaggggagtgtccagtggaaggatttttaaaattatcttatggatagctcaagtgtctgccatttgtaatttttggctctaagctccaattggagaagcttctccttgtgcatatgagttgactgatgttgtgagtgtaaatgcatttggctatttttggtatctgtggccacttggatggatttttttttttacattttgttcttcagttacagaaaggagtccctttggtgtgtgaatatgtgtgcctgtagagggtggggcagggtggggtggggatggaaatgtgtggcatgcacatgagttgaaattttacttttatgcatttttttgaaaaaaaaaaaaaaactctgaggacataggggatgtcagtttcttatggaagagacacctctgacctgttattcttataatcaaaatctcaaggggaaaaaatgttttagttctttcaccactcat

SEQ ID NO: 16867 - DNA, 692 bp, Macaca Fascicularis
aacagaccgcggcccaggtgaccctcaaagccatctcagcccactttgatgactcgagcgcatcctcgctgaagaacgtgtatttcctgctcttcgacagcgagagcatcggcatctacgtgcaggagatggccaagctcgacaccaagtagccgctgcactttccagcagggatcagaggaccacccgagtcccaagagtgggttttgctttttaaaaggagagaggaggggtgacggcgggggagtagagggcggccgggcaggtcctgccggcgcagggagccctctgcccttcacactgtcctccaaaagagcctccatctgtaaggaagcaggtctccgcgcggggtttctttccatgtgttttcctcctgttgttttagaacttttctaaaaaaacagacctcgttttagatttatagcatcgacttttacacacactcatacaagaaaaaatcctttcaaaattcttaaatcttctgttcctcctttttctaagggaagagggcaaaaagcgacctgggctctgttggtatgcgtgttccgtgtgcggagaggagaaaatgggagacatctcactggtgcttttctcttttatttttagtgccccccgcccccacccctgtatatacctgtaactactcctaaaaaggttttgcttcaggcttttttttttggtttcattttggg

SEQ ID NO: 16868 - DNA, 756 bp, Macaca Fascicularis
  misc_feature (1)...(756): n = A,T,C or G
aaagtcactgaggtaccagtagagccagtcttgacagtacatccagagagcaagagcaaaaccaaaactaggagcagaagtagaggtcgagctagaaataaaacaagcaagagtagaagtcgaagcagtagcagtagtagttctagtagcagttcaaccagtagcagcagtggaagtagttctagcagtggaagtagtagcagtcgtagtagttccagtagcagctccagtacaagtggnnnnnnnnnnnnnnnnnnnnnnnnnnncactagtagtagtagtgagagtagaagtcggagtaggggccggggacataatagagatagaaagcacagaaggagcgtggatcgcaagagaaggnnnnnnnnnnnnnnnnnnnnnnnnnnnaaatcttcaaaaggtggtagtagtagagatacaaaaggatcaaaggataagaattcccggtctgacagaaagaggtctatatcagagagtagtcgatcaggcaaaagatcttcaagaagtgaaagagaccgaaaatcagacaggaaagacaaaaggcgttaatggaagaagccaggctttcttagccattctttgcagcagaagatttcttgatataaaaggattacctgtccttgtaaggaggatgctgccttaagaattgcatgttgtaaaaaatctttttggaaaatacagactgtttgtttaccagacattcttgtactttttgcataattttgtaagagttatttatcaaaattatgtgaggtt

SEQ ID NO: 16869 - DNA, 587 bp, Macaca Fascicularis
  misc_feature (1)...(587): n = A,T,C or G
tctgggcccaggatgacagtgtccgggggcatcacaaaacagttgtacaatccagtgcagccatcctgctcacagtaagatccattaggccagagcaggcctaacttgggtggagaacccagcctgagcaccaaaattagttgcttccacttgtgcagcctgctgaagagcccaactcaggttgaagcagctttcctcccagtcgtcactgatctccacagggagcaaacagaagtccccacaagtaccaagctcttcctgagactgcagccaccacacctcggggaaggggaggctggcaggagaggagtacactgtcctggtgacccacaccaaggcggctccanntgtaaacaaagcctggtgccagggannnnnnnnnnnnnnnnnnnnnnnnnnnnnnnnngaaaaagtgaaatgacctcttctagcaccagggtgggtttgcttgggtctgcgcagcagtccctcacccttcccttacggagaggttatttgatgacttgggcccttgagatgttctccnnnnnnnnnnnnnnngnnagnattcaggtgatccacctgaatttcagaagtttcagtcctct

SEQ ID NO: 16870 - DNA, 748 bp, Macaca Fascicularis
  misc_feature (1)...(748): n = A,T,C or G
gaggactggtgtgaaggtgctgatgactggggaagtgacactgaggaggcgccttcaccacagcttaccttggatnttgggaatgatgccagcagtgccaaagacgtagactggactgctcggctccaagacctccgcctgcaggatgctgtcctgggtgctgcccatcctgtgcctcctggggagcagaccgccttgtctcctgggctgccgctattcctgccctactacatctgtgttgcagacgaggatgaatacatagactttgtcaacctggatcatgcccacagccttctgagggactatcagcagagagaaggcattgccatggatcagttgctttcccaaagtctttctaatgatggtgatgaaaaatatgagaaaaccgtaattaaaagtggagatcagacgttttacaaattcatgaagcgaattgctgcttgtcaggagcagattttgaggtattcctggagtggagagccactctttctgacctgccctacatcagaagtcaccgagcttccagcctgcagccaatgtggaggccgaaggatatttgagtttcagcttatgccagcactggtcagcatgctcaagagtgctaatttaggtctttctgtggaatttggaacaattctagtttacacatgtgagaagagttgctggcccccaaatcatcagatccccatggaagaattttgtattatacaagaagacccagatgaattattgttaagagcacttcctt

SEQ ID NO: 16871 - DNA, 716 bp, Macaca Fascicularis
  misc_feature (1)...(716): n = A,T,C or G
tctggatgtggcagtgacgtggannngacaggagctgggcggatccccagtccaagtctctggtgcctccttttccagcctcaggcaaagcgtggcaggcacctacagcatctcctcctctctcatcgcagaacctggctctgcaggtgccacttacacctgccaggtcacccacatctctctggacgagccccttggggccagcacccannnnnnnnnnnnnnngcagagaacagccttgggagtcatcgnnnnnnnnngcctcttccttcttgcactgttgttcctggggcttcagagacgccaagctacctccctaaggtctgtcaagactctaaggcactctgggtagccactctcctgcctcagagtagaaagaaagagcagtcatgtgctcccagaaggactctaagtcaagtcgcagagctaaaaaggcatgaaggtggtaccagctcacgggtcactgggcctggctctgcataggcctctgccttccttcactgtgcaccctgggctcatgcaccaaggcggagaacaggaagaagtgaggggacaagaagaaggcagaatgtccagatggaggttaagactaaagagccaggttggtggtgtggtggtaggaaaacaaagctggaagaaatggagaaggaacaagtgagggacaatgaggcacgggctggggctgggctacccctcccaaactcggctnnnnnnaa

SEQ ID NO: 16872 - DNA, 1071 bp, Macaca Fascicularis
  misc_feature (1)...(1071): n = A,T,C or G
acagggccctagagcagatgtgnnnnncccnnnnnnnnnnnnnnnnnnnnaaagggaaggggcaacagaaagtcctgggctaggagaatnnnnnnnnnnnnnnnnnnnttgggcacgtctgtggccatcgctgggtccacttttctgactgtgaagtagggagagacgttctcagtacccagggcctcttcagctctttgtgggttctgggctgggttgtggggggctggggagctgggctctaccatccctcctattagtagctttatccagccccgtttttgctgcttccagggcctctgccttctagaccccaacggggctgtccatccatggctctgctacagaagggnnnnnnnnnnnnnnnntgcccctcccccagctnnnnnnaatgaaaccgaaaaaaacagacttgatcccggcaggactatgatacagagccctagcctgcccagccggccccaagatnnnnnnnnnnnnagggagaagagtgttggtggggctggagcacaccttgggcctcagtggtttctgcgtccctgtggtgccagtgcttctgggcagtgcaggcagctgccaggcccagccnnnnnnnnnnnnnnnnnnnnnnnncctggttatttatgtggggccgtgcaggcatgggccccgctgcctgtccgtcctgtttctcttatttattgaaacttgccgttgccctatccttgtgtctccatccccttccatgtgttgaataataaaaggtgggaaagtgctgtcacgaggagctctttttctctgtgcccttcccagcttatctgcctgttccacttgtacctgtccagccctgccctgtgttgggcaccatggcaggctgccctccccttgcagttcctgcacctcagcagccggggaagcagggcccagagaagacccatcagctcatctggttctcaccaaagcccctagctagaggcagggctgtcccacagaagtagtgtgagccacatatgtgactttaaattttctgacaatcacatttcgaaaagtaaaaagaagcaggtaaacttaattttaatacattttttaacc

SEQ ID NO: 16873 - DNA, 718 bp, Macaca Fascicularis
  misc_feature (1)...(718): n = A,T,C or G
ccannnnnnnnnnngagannacnnnnnnnnnnnntgaggacacaacgcgaaagtacnnnnnnnttnnnaccacgtccannnnnnnnnnnnnnncatataccacctctaccacggtgctcattcagaccacccgtgtgccnnnnnnnnnnnnnnnnnnnnnnnnnnnnnnnnnnnnnnnnnnnnnnnnnnnnnnnnnnnnnnnnnngaagaccaccaagatcataattggctgctttgtggcagtgactctgctagnnnnnnnnnnnnnnnttgtcttctataaacttcgtaagcggcaccagcagcggagtacagtcacagccgcccggactgttgagattatccaggtggacgaagacatcccagcagcaacatccgcagnnnnnnnnnnnnnnnnnnnnnnnnnnnnnnnnnnnggggcagtagtgctgcccacaattcatgaccatattaactacaacacctacaaaccagcacatggggcccactggacagaaaacagcctggggaactctctgcaccccacagtcaccactatctctgaaccttatataattcagacccataccaaggacaaggtacaggaaactcaaatatgactcccctcccccaaaaaacttataaaatgcaatagaatgcacacaaannnnnnnnnnnnnnnnnagagtggggagagactttttcttgtatatgcttatatattaaatnnnnnngctgg

SEQ ID NO: 16874 - DNA, 516 bp, Macaca Fascicularis
  misc_feature (1)...(516): n = A,T,C or G
tggccctgttaaaggctattaatggacataaccagatctctcacaaaaggcataaaacaaattcccctgttaaaggatctatatggacaaagccagatctctaaacaaaatggcttatgaaaggagtgcaatgcagaattatgaaagaagacgttaataaactacctgacgttatttattcagcttcatttgtgtcaatgggcaaggaaaggtaaaataagacatacactatgaggaataattatttatttaataacagttgtttggggttgaaatttcaaaaagtgtttatttttcatattgtgctaatatgtgttgtaaacatgttttaattccaatatgactcccttaaaatagaaataagtggttatttctcaacaaagcacagtgttcaatgannnnnnnnnnnnnnnnnnnnatacagtccctaaagaaaaaaatcattgctttgaagcagtcgtgtcagctactgcggaaacggcgggaaactcctgacagtcttgtgcttttcctatt

SEQ ID NO: 16875 - DNA, 721 bp, Macaca Fascicularis
  misc_feature (1)...(721): n = A,T,C or G
atgtaagggtttttaatagagaatggattaaaaaaaaaaannnnnnnnnnnnnnnngattcttactgaaaattatccttctataagatagcagagnnnnnnnnnnnnnnnnnnnnnnnnnnnnaaaatcaattctccatttttatcacatgtgggatttgttgctaaatcatattcgacattagcttttatgttcctaacatatctgaacgttatttatgaatggataaactggattatagatatactgatttttttttttttaatggggacatttcccattttcttnnnnnnnnnnnntaatcccctggctgaccaggaccattaaacatagtgtggactggatgatgccttcgacaaaccagagaagccaagttgtggggagctggtgcctggagtgggccctgtgcacctcacctggcggaggctggggggctccgtcagcaggaccctacagactcctattccattttaaagaagcacaacgggtcatttccctttgtatgttcctagtgcagaactgtttctaaaacatcttgaagtatagttttgttatccaagcaatttttgttttatgtgtactagaatgcgaaacctttacggttcgggtttttaaaaannnggtacagtannngtatttgtctcatctgttgcactgtatttcaatctgtaattaaaatgatcttatgtttgctccctggtcttttttaagtatctcagat

SEQ ID NO: 16876 - DNA, 814 bp, Macaca Fascicularis
  misc_feature (1)...(814): n = A,T,C or G
cagccagcaacatnnnnnnnnnnnnnnnngcagactcacagggcatggagcagcatgagtannnnnnnnnnnnnnnnnnnnnnnnnnnnnnnttggctgtgcnnnnnnnnnnnnnnncccattggnnnnnnnnnnnnnnnntgccgtctcttacaagccagccccaccaagtgctggccagtgagcccatcccgttctctgatttgcagcaggtctccaggatagctgcatatgcctacagtgcactttctcagatccgtgtggacgcaaaagaggagctggttgtacagtttggnnnnnnnnnnagagaggggtccttggacagctcttctcctctcttcatcccatctctaccccacccccttggcccccagcctcactgcggcttatatagtaccctaacctgctactaatcacagagaaaaatgtgaagaaggaggagaagaggaaggctggaagcctgagcaagtgagggtagaaccttttgggactggcccttgaannnnnnnnnnnnnnnngggtgggggccaaaaggacagagcctggnnnnnnnnnnnnnnnnnnnnnaatgtggagataccagtttgggtggggggtgatcaccaggggacctagggagatccccttcccaccctctctctnnnnnnnnnnnnnnnnnnngccccctctccctgacttggtgctcacnnnnnnnnnnnnnnnnnnnnnnnnnngggtctggatgagcttgaatttgaatgaattgagtttgtatttctagaaccctgggtttttacatgtttggtcttttttttgttttggtttgtcaccctcg

SEQ ID NO: 16877 - DNA, 745 bp, Macaca Fascicularis
  misc_feature (1)...(745): n = A,T,C or G
ggtccctgcctggcatccgagtgtcggtgtgtggcacagaaggctnnngcttgcttccaaagcgatggacaggaaggggcagagtgagtcacggcccagagtgggcaccttcgcatctcagcctcagggagccccacggccccaagcttgctgaggcaatatgagaacaggctacgggaaggctgcaaaggctgagaaacgcaaaggctcatatttataaatcccacccccagagcggggagggtcaggtgcccgacctggactaaactgcaccaagcaaacacccagcggggtctcctgtgagccgggaccgtgcagcctgggacctccagtcactgcacctcacgggagtcaggagccagggaccgtgcagcccgggacctccagtcactgcacctcgcaggagtcaggagccggggaccgtgcagcccgggacctccagtcactgcatctggcaggagtcacgctaagggttctcctgtgagcagggactgtgcagcctggaagctccagtcactgtgcccagcaggagtcaggctaaggaaccccggtctgcctgtccttgctgggcaatggctgatggctgccagtttctgctgatacacaggtaggatgggacctgtcatgaatatctgactttaataagttggtaaggatatatttttttgtctatgttctgtttcaacttatgtagattattataaattgatgtaaaccacggagaggaaaatgtaataaaaaaggc

SEQ ID NO: 16878 - DNA, 718 bp, Macaca Fascicularis
  misc_feature (1)...(718): n = A,T,C or G
agtgtcacaagccatcagatgtgtgtngnntccatccaatgtatgtttgtttagtntntatccaacttgaagaatgaaaacttaactggatctctcttgcatccttaaagggcctgagtctcaacatggctgctgatccatactcacacatcttnnnnnnnnnnnnnnntacattgattatagaaccactactatgtgaaaaggcttgaaacaaccaacatacacaaataaaaccctgccttgtaaaatagttctgagatgctattttaaaagagggatttaaaaaggaaactttgggagatatattgaaataaggtgctttataacattactgtatttaagactttaacagtgttacttggatagcttatatgaattttgagaaagtagcaagttcaaaagaactctggtaattttactgtatgtacaatttaaagagtgaataagattattagaattcagccatagaaatatatctgttttcagttcaactacagaaatatattttattcattcacattaggtcactgtcataggatgagagagttcttcaaaaattatgttttcccaagatcagttgcttatagataatgttcaacgacctcaagacatatatttctgagaaattatcattttaaaaaatttggtctatattgattgttttcactgattccaatattattgcttacaatggtgacctctgaaaatattttgtcac

SEQ ID NO: 16879 - DNA, 733 bp, Macaca Fascicularis
  misc_feature (1)...(733): n = A,T,C or G
aacagcaagagtacacatcaacaaaaaatggaaacaaggctttggctgaaaaaaacatacatttgacaaataatgttaatagctagacaagaagaaagttagctctgtaaacttcttcatttgattcagagaaacagagcatgagttttcttaaagtaacaagaaaaggaacaaaaaaaatgaggtttgaaattttttaccatggcaaaacattaacatctttctcaaaaacatagagaaatctggaaaaatcaagaagataaannnnnnnnnnnnnnnnnnnnnnnnnnnnnnnnnnnnnnnnnnnnnnnnnnnnnnnnnnnnnnnnnnnnnnnnnnnnnnnnnnnnnnntccaacagcagcgaactgatgttgttccttggaataaaagtcaatccccaccttaaaaaatatatggcttctccgaggaattcttatgtcttaaacactttttacattctagacaattaaattgattgaggtcataagtgaagaaatgaatagttaccactacatggtaaggtaagcagcctgaaaacatctgcatcataaatgtgtgtgtgtgtgatatatataaagtcaaaaactcctctacttgtactttggcattcaatttttagaaattcagtctcaaatgccattatggtatttttcaaatgatacctttaagtcaannnnnnnnnnnnnnnnnnnnngnnnnnnnatgnnnannaaaatnnnnnnnnnnnatctt

SEQ ID NO: 16880 - DNA, 777 bp, Macaca Fascicularis
  misc_feature (1)...(777): n = A,T,C or G
tgcagacagggaagttgagctgaaaggagcacaagagagtnnccgnnntcgctgcngagctcggnnnnnccccgctgcagttatttgtagacaaaggcaccccgatttttgtggtttttctccctttctgtgcttgccaatagttgttttgttttgtggacctgacctgggggctggcagctccttcaggcagcctggcagaggtggaactcccccctccactgatggctgggaagggagttggggaggaagaccgggagggagggctggggatggatgggagggaaggggagggaaaggtgggaggaatgggaagcagctgttctggtggcttccactctgaggtgtgggaacggggagcttttggggggcacctgtttccccagtgactgagagagagagcaagactgcaggaacggaggggtcttgcagggtgtccaccaagaagtcacagagcccgttctgcgcccnnnnnnnnnnnnnnnnngggcttctcttctgaatgaactgaagaaggtgcttagaaggggtctagaagccaagccctgtgagcagcagtggaagaccttgggccatgcggcctggagaggacttggtggcgatccgcaacctggaccccagtaaggtggtgggctgactgggaaggagaggcccccagcctcctcaggatttgcacgtgtgaactaggctgcctgggggtgcccctcaggcttggagagccccagattgaggcagacaggctgcaccaccccttccccctgcatctgagaataaagc

SEQ ID NO: 16881 - DNA, 1172 bp, Macaca Fascicularis
  misc_feature (1)...(1172): n = A,T,C or G
gcacacgttgcagaggagagtggagcccacagtgaccatctccccatccaggacagaggccctcaaccaccacaacctgctggtctgctcggtgacagattnnnnnnnaggccagatcaaagtccggtggtttcggaatgaccaggaggagacaaccggcattgtgtccaccccccttattannnnnnnnnnnnnnnnnnnnnnnnnnnnnnnnnnnnnnnnnnnnactccccagcggggagatgtctacacctgccacgtggagcaccccagcctccagagccccatcaccgtggagtggcgggctcagtctgaatctgcccagagcaagatnnngagnngtgttggaggcttcgtgctggggctgatcttccttgggctgggccttatcatccatcacaggagtcagaaagggctcccgcactgactcctgagactattttaactgggattggttatcactcttctgtaatgcctgcttgtccctgcccagaattcccagctgcctgtgtcagcctgtccccttgagatcngagnnnnnnnnnnnntgtcacgcagccaccaggtcatctcccttcatccccaccccaaggcgctggctgtgaccctgcttcctgcactgacccagagcctctgcctgtgcatggccagctgcgcctactcaggccnnnnaggggttctgtttctattctctcctcagactgctcaagacaagcacatgaaaaccgttacctgactttagagcttttttacataattaacnnnnnnnnnnnnnnnnnnnnnnnnnnnnnnnnnnnnnnnnnnnnnnggcaggaaatcactgcagaatgaaggaacataccttgaggtgacnnnnnnnnnnnnnnnnnnnnnnnnnnntaccttgaaaagacactgaaagcattttggggtatgaagtcagggtgggcagaggaggtagaaaatcaattcaattgtcatatcattcatggttttttaatatnnnnnnnnnnnnnnnnngcctgagaatatcccagcctctnnnnnnnnnnnnnnnnnnnnnnnnnnnnnnnnnnnnnnnnnttgtttggggacatatatggtgannnnnnnnnnnnngtgtttcaaannnnnnnnnnnnnnnnnnnnatcaagaataatttttatttttaagaaacaaaaccagcaataaa

SEQ ID NO: 16882 - DNA, 753 bp, Macaca Fascicularis
  misc_feature (1)...(753): n = A,T,C or G
atgattgcactttannntttacannctaaaaacaggacttgttagttgtatgcatgctctttgtcccgtactgtgtgtgcaatgacaacttgtttctgttttatttaaagtaactgacattttggattttcatctagcatacctagagggcatggcagctctctctgacagtggtaccccatgatcttcaggaagtatcataatgtcatcctactctacatttcacaagacagattattttgagatttattatattaaaaatctttttaagttcccactaaattttgacccccatataaagaaatgtgttatgtatgttgtgcctccttagagacataaatttagtgtcaaaacatgggagatggcttactcagaagcatactccacttaacacaccatgacccgagctaagtgccatgtcccgtttgtgtcttatttttaaatatttcctttgtccacatgggcagttgaccttagagttaaggcggttgcttttttgaagaaatcaccaaagtgtctgggaaactatgttcaaggttaaactggagagtagatttaattttatttgtcttgtagggaagaaatcttcctttgaactgtttttcttgctttttgcctttttcccaaactaggttacagatccttatctgcaaggttcaaattgcttagacactgttttccagtattctgcagggccagtcagttgtacagaagttggaatattctgttcccagaattaaagaagtttttaga

SEQ ID NO: 16883 - DNA, 631 bp, Macaca Fascicularis
  misc_feature (1)...(631): n = A,T,C or G
agtccgatgacaggagtaggcttgtatttaaaagcggcccctcctctcctgtggccacagagcacaaggcgtgcttgaattcttgacaagcagacctgctcctgcagaggagacagccacatttggaactgggcacaaagaagacctgagaaaaacccactgtnnnnnnnnnnnnnnnnnnnnnnnnnnnnnnnnnnnnnnnnnnnnnnnnnnnnnnnnnnnnnnnnnnnnnnnnnnnnnnnnnnnnnnnnnnnnnnnnnnnnnnnnnnnnnnnnnnnnnnnnnnnnnnnnnnnnnnnnnnnnnnnnnnnnnnnnnnnnnnnnnnnnnnnnnnnnnnnnnnnnnnnnnnnnnnnnnnnnnnnnnnnnnnnnnnnnnnnnnnnnnnnnnnnnnnnnnnnnnnnnnnnnnnnnnnnnnnnnnnnnnnnnnnnnnnnnnnnnnaccgcaaaaggcagaaaaacccaatatcataacagaagagcaagaatacaaagccagaatcaaaaacaaagagaaaaacaagagatgaaaagaaaaagggacaatacaaaaaaaaacaagaggataaaaaaacaacacaaggagagatataagaataaagaaaaaccagaaagaggccaaggccaaggaag

SEQ ID NO: 16884 - DNA, 773 bp, Macaca Fascicularis
agtttgagctgactctggaggaggaagaagaggaagaaatatcaatggccccgataccgtgcacagcccaagaggcattgacagcgcagggattgtcaggagccgaggaagctctggatacaaccgtggcccgggaggcatccccagcgcaggagtcattggatgttatggcacaggatgagtccctggaggccgagctggaggaagtgtatttgacacagcaggcacagtccacaggcagtgcacctgtggctcaggatgagttctcgtcccaggaagaatcggtggttgctgtaagccagagcagcctctccgccctggctcttcaaagcccccttctccctgcctggaggaccctgtctgtttcagagcatgccccgggcctcccgggcctcccctccacggcggccgaggtggaggcccaacgagagcaccaggctgccaagagggcttgcagtgcctgcacagggacatctggggaggacacatctgcactcccagctcctggtgggggagggtcaggtggagaccctacctgatccccagacctctgtccctgttcccctccactcctcccctcactcctgttctcccccaaccacctcctccgctgcctcaaagactcttggccctcctaagaaaaaagaaaacgaaaggtgggttttttttttctcttttctttttttcccctttccccccgcccccacccacggggccttttttttggaggtgggggctggggaacgaggggctgaggtcccggaagggatttt

SEQ ID NO: 16885 - DNA, 905 bp, Macaca Fascicularis
  misc_feature (1)...(905): n = A,T,C or G
tgaaccgtggcaattcnnagagatcaagaatnnntnctagctcgaaggttaagctcttagaacaagctctggnnnnnnnnnnnnnnnnnnnnnnnnnnnnntacttgaacannnnnnnagacccttctcacccnnnnnnnnnnnnnnnnnnnnnnnnnnnnnnnnnnnngtgtnnnnnnnaaagtcatcagcacctgtccaaggagtcaatggcaggaaacnnnnnnnnnnnnnnccacagcagtaaaaccattgaannttgacaccaccnnntnctgnnnnnnnaaagccgatgtgactncactcccagctgaccatagccctaaatccccagttgctgtgaggttacagatgtcagagcgtaacattattcctatcatctggaaccctgacacctcgaacctcccccacagcaggtagcccagcagcagtgaagatgcannnnnnnnnnnnnnnnnnnngtgagcagtgaccttcctcactttctcttgtcccagcttctccctggggggcccgagagaccctcaccttccttctgcccatcttccatgttgtaaaggaacagccccagcgcactgggggaggggagggagtgaggggcagtggtgcccttcctgcaggagagacatgcagcagtagcgccggcgccatctccaggagccggcgggctggccttctggaccctggcttctccccactgtaacgcctgttacacacaaactgttgtgggttcccgccaggcttgaagaaaatgatctgaattttttcctccttttggttttattttgttggtttattttgtgttttcttttctccttttttgggggtattcagagtgggctgggcccctgggcgagacacagctacctctgttggcatctttttaataccaggaacccagcggc

SEQ ID NO: 16886 - DNA, 998 bp, Macaca Fascicularis
  misc_feature (1)...(998): n = A,T,C or G
gggaannnnnnnnncatgancccttacaccagcaacatctatactnnnnnnnnnnnntcaggagaatttcagattgtaaatcctcacttattgaaagatcttactgagcggggcctatggcatgaagagatgaaaaaccagattattgnnnnnnnnnnnnctattcagagcnnnnnnnnnnnnnnnnnnnnnnnnnnnnnnntttataaaactgtgnnnnnnnnnnnnnnnnnnaccgttctcaagatggcagctgagagaggtgctttcattgatcaaagccaatctttgaatatccacattgctgagcctaactatggcaaactcactagtatgcacttctacggctggaagcagggtttgaagactgggatgtattatttaaggacaagaccagcggctaatccaatccagttcactctaaataaggagaagctaaaagataaggaaaagatatcaaaggaggaagaagagaaggagaggaacacagcagccatggtgtgctctttggagaatagagatgaatgtctgatgtgtggatcctgaggaaaggcttggaagagaccagcaagtcttcagtagccaaactacttcttgagcatagataggtgtagtggattttgcttgaggtggtaaggcnnnnnnnnnnnnnnnnnnnnnnnnnnnnnnnnnnnnatttaaagtactgttacgatgataatgatttttttttaaaactcatatattggaattttcacnnnnnnnnnnnnnnngaaaaaaagaaaaaaaaaaacacagatatattgggaatcaaagtagaagttttaggaatgcaataagtcttcttgcatacagggagtgattaagtaaagtttcatcacccctttagcactgattttctgatgacttcagttttgttaaggagatttagttttactgctttgactggtgggtctctagaagcaaaactgagtgataactcttgagaagtactgataggacctttattggatatggtc

SEQ ID NO: 16887 - DNA, 735 bp, Macaca Fascicularis
  misc_feature (1)...(735): n = A,T,C or G
ctgctgaagccccgggagatggagcagcagatgcagaggatcctggacaacacctcggagnnnnagcctggggaggccaggctggcagccctcaccgcaggagacagagttccctgggccaggtgtcgccaggcctattttggacgggggaaaaataaacagtctcttgatgccgtggagnnnnnnnnnnnnnnnnnnnnnnnnnnnnnnnntgaacaaggatacagaacggaagacccagatacatnnnnnnnnnnnnnnnncaagtctctactacatggccaatgttatgacaggtggtttgacaagtcgttcacgtttgttgtcttcaaaaacgggaagataggcatcaacgcggagcactcctgggcagacgcgccgatcatggcccacctttgggagtacgtcatgtccactgacagcctccagttgggctatgcagaggatgggcactgcaaaggcgacaccaatccgaacattccgtaccccaccaggctgcagtgggacatccccggggaatgtcaagaggttatagagacctccctgaacaccgcaaatcttctggcaannnnnnnnnnnnnccattccttcccattcgttgcctttggtaaaggaatcatcaagaaatgtcgcacgagcccagacgcctttgtgcagctggccctccagctggcgcactacaaggtcaagtgatacagagtggacgtgttcnnnnnnnnnnntgtcgctgtctgc

SEQ ID NO: 16888 - DNA, 728 bp, Macaca Fascicularis
  misc_feature (1)...(728): n = A,T,C or G
cgggcccggcagctggtgaagaacatccccccttcagacatggcccagatcaaggccaaggtggccgccatgggggccctgcaagggcttcgtcaggactggggctgccggcgggcctgggcccgagattacctgtcctctgccactgacaatcccacagcatcaagnnnnnnnnnnnnnnnnntaaagacacttcgggacaaagatggcttcagggctgtgctcttttcaagccacatccgtaaggtgaaccgcttctacaagatccggaaccgggccctcctgctcacagaccggcacctctacaagctggaccctgannnnnnnnnnnnnnnnatgcgggctgtgccccttgaggcggtgacagggctgagcgtgaccagcggaggagaccannnnnnnnnnnnnnnnnnnnnnnnnnnnnnnnnnnnnnnnnnnnnnnnnnaccgctcccggccgccgctggacaaccgcattggggagctggtgggtgtgctggccgcacactgccagggggagggccgcgccctggaggttcgcgtctccgactgcatcccgctgagccagcgcggggcccggcgcctcgtctcggtggagcccaggccggagcagccagagcccnnnnnnnnnnnnnnnnnnnnnnccttcaccctactctgnnnnnnnnnnnnnnnnnncgcacccgccgcgccccgaggccgcggatttccgccccgcccgcgcgcaaa

SEQ ID NO: 16889 - DNA, 703 bp, Macaca Fascicularis
atctctatactttgttcctggtataccaacaatggaacactttcatcagttttattgttatcttgtctatgaatttgacaagttttggtttgaagaagaaccagaaagcattatgtatttcaacttgtatagagagaagtttcatgaaaagattaaaggacttttactggactgtaatgtagcacttactttaaaagtataaatcatccactgtatcttctatttctaccacattttgcacattcaacagaatttatatgttgtaataggaattatctgatcaattacactcttatatataatttcctacaaaaatatttcagaaattctatttaagaaagctagtggacaatcagtgtatgtttacagttgtttatacactgttctccaaaggtaccttatccttccaaagatcccctctgtagagtcatgcgagctacagtttggaacttgggacttagcccgttggtgtaaatagtataaatcaggtatttgtattaaattggttgattaaaatgtgtaaaatcaattttcatttttatgtgttgtgggatcaagttggtatcttttttcaaagctctttaaggttttttttttttttttggtttttagtttggaaatggctgtttttaattttgtctgatttttatttctagggtaattaacaggaagagtgtttctttatgattttctttgtttgcat

SEQ ID NO: 16890 - DNA, 1015 bp, Macaca Fascicularis
  misc_feature (1)...(1015): n = A,T,C or G
cagaagtannnaggtgatgggcccaaactcgtacgggaattgtttcgagttgctgaagaannnnnnnnnnnnatcgtgtttattgatgaaattgacgccattgggacaaaaagatatgactccaattctggtggggagagagaaattcagcnnnnnnnnnnnnnnnnnnnnnnnnnnnnggatggatttgattctaggggagannnnnnnnnnnnnnnnnnnnnnnnnnnnatagaaactttnnnnnnnnnnnnnnncannnnaggccgcattgacaggnnnatgantttccnnntgcctgatgaaaagacgaagannnnnnnnnttcagannnnnnnnnnnnnnnnnnnnnnnnnnnntgatgtaaccctggatgacttnnnnnnnnnnnnnnnnnnnnnnnnnnnnnnnnnnnnnnnnnnnnnnnnnnnnnnnnnnnnnnnnnnnnnnnnnnnnnaacgtagaatgaaagtaacaaatgaagacttcaaaaaatctaaagaaaatgttctttataagannnnnnnnnnnnnnnnnnnnnnnnnnnnnnnnnnnnnnnnnnnnnnnnnnnnnnnnnnnnnnnnnnggaaatttctcaatccctgaaagggatgaggttctgggagttgcctagaggaatccctattcccattgatttttattagcaaagcatcctgtgtcttttggagtacgatgtgtaagtgcccattgggtggtctgnnnnnnnnnnnnnnnncagcagtctgctcccaataaagnnnnnnnnnnnnnnnnnnnnttcctgtttctgcagtctccacacacacctaccnnnnnnnnnnnnnnnnngggtggacccagctgcagggaagcctgtggatagnnnnnnnnnnnnnnnnnnnnnggagtgtggacctcactatgcgttccccgcgtcacacccccagagctggcattcaacagtaattacagcgggaaatggtcactaccacagagccagggatattcgttgtttaataaaggctgaataaatgtg

SEQ ID NO: 16891 - DNA, 689 bp, Macaca Fascicularis
  misc_feature (1)...(689): n = A,T,C or G
catccagcaccagcgnncccacacgggcgagcggccctacaggtgcgctgtnnnnnnnnnnnnnnnnnnnnnnnnnnnnnnnnnnnngcagcatcaccgggtgcacagcggtgagcggccctacaagtgcgatgactgcggaaaggccttctcccagagctccgacctcatccgccaccagcggacccatgcggcgggccggcgctgacccagggccccagcaggggtgggaggtttgggcagaagataaggggccagggaactagaagaacctttagggaggatagtggagaagccgcagcaggatggaggagctgaggatgctggaagaagagggccagggtggaggaagtgacatgccctggagacttgtgggaagtgggttggagggaggccaggccggcagcgggaggccctgggagaaatggagagaggtcagtggagggctggcctcgcagtggtggctcctcggtgggtgcctggcttggcaacgtgctagagcagggaggggggagggcaggggattacctaattagagtgggttagcttagattggtagctgctgaaacccttgttgagtcaggagcagataaaagggtaggtggggtggggagtggggcctcggggtggggcctgggcctctgcgtgcaaaccccagcctccctctttttcctcaggcttggagcccc

SEQ ID NO: 16892 - DNA, 715 bp, Macaca Fascicularis
  misc_feature (1)...(715): n = A,T,C or G
aacggagagaattcgaggtcnnnngaaaactggctgtccttgctccttttcctggagccaatatactcgctttttactctgtttgatttatattctgggcaaggaagctttgcatactttattggcataatcctttgttctgtcatttagccatatctgctggcttcagccctggcagatgataagttgtcttctatatgtagaaggaaaacctgagtatttgcaggcatctggttaaagnnnnnnnnnnnnnnnnnnnnnnnnnnngagtaatatgtcaggctttatcttagtttacaacaaaactacaagtaagcggtattagcctcactaaatagatgaggaagcaagattccagaatgtaccagaaggccatttgatacaaaaggagattggttcctgcccagatgacagaaaatgggagctctgtctagttgtccttaagtctgactgacttcaatggctcataaccgtgaaccaagtatttgttggttcataactgttgttttgtgaactatgtcttatatnnnnnnnnntctgctggatctagggaaaggagaagctgtcgaagtacaacggatcaaaaaaccacagggcttttgggcactgcctccttgagaagttagtggccacagaagagagatgaaacctgtaagaagtctggagtcttggaacttcagccatttccccaggttgttactttcttagtttgtac

SEQ ID NO: 16893 - DNA, 539 bp, Macaca Fascicularis
  misc_feature (1)...(539): n = A,T,C or G
gagttgcgggagagagaaggagaaggcacgatgggcctcanntgtccccgagcagtgagggttccagtgtgccctccactcccgagtggccacaggcttgtgggctgggaaggattcactctctttagccccaggagggcagctcagcttagcccagcacaaagagatgggctctgctctgagagtagggctgccttgaaggccctgatgggtggaccaccagcctgggcacagtggtgctgggggcgtgcagttggggccaagggctgtgtgctcaggcctgacccgttgcactgaacaagaccaaatcgctggctgtgcacttacgtgagggtgagtccagtgtgccctgcgatgggtcccgtgtcactgtttacatgacctatttgtgtggttatatagccctttatttaaaagagagaagttccttttacaaagttattaaattaattatatgtttaaaagttaaagaaaaaaagagctgcagagtatttataaaactgtcttttgaaaaaaataaaaacaagcaagaagaccat

SEQ ID NO: 16894 - DNA, 579 bp, Macaca Fascicularis
caggagaagaccatgttcagttcgagcgccaagatcgtgaagcccaatggtgagaagccggaggagttcgagtccggcatctcccaggctcttctggagctggagatgaactcggacctcaaggctcagctcagggagttgaatattacggcagccaaggaaattcaagttggtggttgttggaaagttatcataatctttgttcctgttcctcaactgaaatctttccagaaaatccaagtcgggatagtacgcgagttggagaaaaagttcagtgggaagcatgttgatttatcgctcagaggagaattctgcgtatgccaactcgaaaaagccgtacaaaaaataaacagatgcgtcccaggagccgtactgtgacagctgtgcatgatgccatccctgaggatttcgtctttccaagcgaaattgtgggcaagagaatccgcgtgaaaatagatggcagccggctcataaaggttcccgcggggctggggccagacaaagactcggccaaggggcgagaggggggaacgagcgggcgccgggccactcggggctgagctgagggcgagcaggggc

SEQ ID NO: 16895 - DNA, 763 bp, Macaca Fascicularis
  misc_feature (1)...(763): n = A,T,C or G
cagagcagnnnnnnnnnnntccctgggaacgcgaaccccagaggccacggcggagaggagcagatctaggaagcacaggcccagggctgtgcccgggacaacacacacagtcctgtgcatcctcatgacggnnnnnnnnnnnnnnngnnnnnnnnnnnnnnnnaacgccatgtcgtaacatctgtttaattttcatcacttactaatcgtaaccctttatggcatgctgccccttccatgagagccctccaaacctgtaagagctttggttctcctgaaccaaagttggcatttggttggcatnnnnnnnnnnnnnnnnnnnnnnnnnnntactaggaagcctgaaccccatttgtggtctcctctaacgaaagcttctgtcccctggcatctgttctctgtgtgcacccacctggctctatcctatttccccagcttcccttccttttggcccaaaccttaattattccatgggtggctgaccacttcctaaagggccagatagtgtattctttagagtannnnnnnnnnnnnnnnnctgcagcaatggctcaaccccactaccacagctcaaagcaaccaaagacaacgcgagaacgacggagtgtggctgtgttcactccatctttccccacgaaacgcagtgggctggacccgactgccgcagtcagctgcccggtgtcttctactgttctatcccgcccctgagtccgcatccccctcagctgccctctgatatttggaaaaggaagcgatatgaggc

SEQ ID NO: 16896 - DNA, 761 bp, Macaca Fascicularis
accctcaaccgcggcccctgtaggccaaggcgccaggcaggacaacagcagcagcacgtctccttcagctccagtccagggagctcccaaggaagtggtcgacccctctggtggccgggccactctgctggagtccatccgccaagccgggggcatcggcaaggccaaactgcgcagcgtgaaggagcgaaagctggagaagaagaagcagaaggagcaggagcaagtgagagccacgagccaaggtggggacctgatgtcggatctcttcaacaagctggtcatgaggcgcaagggcatctctgggaaaggacccggggctggtgaggggcccggaggagcctttgcccgcgtgtcagactccatccctcctctgccaccaccgcagcagccacaggcagaggaggacgaggacgactgggaatcctagggggctccatgacaccttcctcccccagacctagacttgggctgttgctctgacatggatacagccaggacaacccgctgagacctgcttccctgggagcgggtggtgatggaaccagcactgtgcggagaccacctgcaaggagcggaaggctggcctgaggccacacggctggggcgggggcttctgtcctcctgtgctccacggggggcggctccacccagcctgcaccattgtgttcttctcttctctaaggaggcttccagagaaagcagcacacagatcaataaggaactgagcagaaaccaacagcgcgcttttaataaagggc

SEQ ID NO: 16897 - DNA, 744 bp, Macaca Fascicularis
  misc_feature (1)...(744): n = A,T,C or G
ataaagtaaacatgnnnctgcctttccttcaaaagtggaattacaaagctggagtgcttcttcagatggactaaatttatgtcttttgtgtgtgtgtgtgtgtgtgtggttgcccattttttagaaggagctatacagaagaaaaattattctgcattatgtaggattgctgtttgcattgccattttgcataaggaagtaatttttgattttgaaaatctcaaaacttttagatctgaaatacaaccatgtgatcgtattctaaaggctatttaaaacgtaaaagggtttaggggaagggcagaaaacatgcaatctgggcattgactgacttggaagtctaagcttattttagttataactattaaaatcatttttaaaaatttgttcgttttgctgacagagaaaaatcgtcagttgtcagattttgcacaccaaaataaacgtaccaccacacacggaatatgctaagaaaattatcagatagcgtttgatacactagtcattgtctcaatcactgatcctgtaagttgtcaccaaaatatgatttagaaannnnnnnnnnnnnnnnnnnnnnnnnnnnnnnnnnnnnnnnnnnnnnnnnnnnnnnnnnnaaagaaaaatgcagaggttattcaaatgtaaagaggtaacaatctttggatttgtctatacatatatatatatatatggctttgccttaatatacccccttttttgtttgtgactttcaactgtaatcag

SEQ ID NO: 16898 - DNA, 729 bp, Macaca Fascicularis
  misc_feature (1)...(729): n = A,T,C or G
acnnnnnnnnnnccttacaggaatgagtcactcttacttaatgaaatgttaaagccaattaaaaagcatgccgtgatgcccannnnnnnnnnnnnnnnnnnnnnnnnnnnnnnnnnnnnnnnnnnnnnngtggcaagaggcaactggctccacagcctgagatgctgccataccaagaggaaagaagcagcaaaatgcctttgttgttccaaacccccatgcataaagtatagaggagggatggccaagggtgggtggtataaagtgtgttcaggctgacactggcaaggaatacagataatttcactttcctcttccaggggcaaaggctgatggcctctacctttgtatccaggagaaactgcagagcagccctgtgactttacaaaatatgctacctcaaagtgctaccgataaacctttctaactgtaagtgcccttactaagggcacatgtcttaatcaaagttagtttttttgttttctgggttttttttttttttgtatactgatgaatgagatcttaacctattaaatatattattggatcatggttcctgaaggtcattaaagtttgagtgtatgtgtatgtgtgtgttttatgacttaaatatctttatgtgtggtttttagagtttggttctttaaagatttggagaagatatgtaaattaccaaggcacttagttcnnncaggaaccatgatccannnaatatatttaataggttaa

SEQ ID NO: 16899 - DNA, 738 bp, Macaca Fascicularis
  misc_feature (1)...(738): n = A,T,C or G
ttatatgagagattttnnnnnnnnnnnnnnnnnnnnnnnnnnnnntgttggcagtttagannnnatggcttgaaaggaaggagactgaaaaaaactctgaggagcatacactgtccaaggccattagtgtaaggaccactagcaggcctagaggacatcactatactacatcatctgatgatcgttctttattatgcctctaggtaattaagtaaaggtgaaattgcatacacagatatgtagtacatattttaaaagttttatcttaaattgattaaaacttttttaaaagctttggtattaaaagaggtaaacatcagtttcctcaaacattttattcatgttgaatgcctttttgcaatgatgaatgagttgttatagtattttaaaacctgtatagtgttttagacttgttaaaacattgctgtctagtgtacatctagctgaaagtgtggtttatctgaaccgttttaataagcaggatgactgggaaatctctgccccttttctgagcagtatgcctcttcttttagaattaaatgaattaaattaaatgaggtccaggtgtgtgttgatgtagacttgaaatgtctctacattttggaggacttcctcagcccttttcattgagggaaaatatatttgaatttctgttttagagtgtatcgggtcccagttgattcatgtgtacaaagttatgctacctaattacaggccattacccaaataacctaccag

SEQ ID NO: 16900 - DNA, 647 bp, Macaca Fascicularis
  misc_feature (1)...(647): n = A,T,C or G
gcgtgcaggaggtgtgcgccgacgcgctgcagctgctgggctaccggcctgtgtactctgaggaccagcagcgtgacctcaccctggatctggtgctgccacgaagcccagaccacttaagctgggcgtcacatgactgagaactctgggccttagagcaggccccgaattgtggttgcccggcccaggaggcgactgcacggtggagagggagctgggatgcatggggaagcaggtccctactatgaactgggagtttggggtcctcccctgaggtaggcaaggactgcacgtttctttttctcctgattctcggttttcctttgagtcctctggagctgccttctcatcaggtgcactcttcatggaaagcaacacttgcccctacctattctgagcacagggagtaagttctgctaaattaaattaaatgtgttccaggtcgggcgcggtgcctcacgnnnnnnnnnnnnnnnnnnnnnnnnnnnnnnnngggtgtggatcagctgaggtcaggagttcgagaccagcctgaccaacatagtgaaaccccctctctactaaaagtgcaaaaattagccgggcatagtggcacactcctataatcccagctacttgggaggctgaggtgggagaatcacttggac

SEQ ID NO: 16901 - DNA, 774 bp, Macaca Fascicularis
  misc_feature (1)...(774): n = A,T,C or G
atttccacagtgcatcaagcatctgagaataacattattttgagtaaaaacagaaactctttgggagagaccccctccccacaggtcagctgctcaaatgtccaccnnnnnnnnnnnnnnagagagatggagctcagaggcaacttcctcttcccttgatctccggatnnnnnnnnnnnnnnnnnnnnnnnnnnnggttagacacgttcctgttgcctctgacagctgcagttgctgcctcgtcatgtcactctgtgggctagtagttacagatcttttcatcacaggttcaatagcgtgagaaagagacactagagtctcttgttctccnnnnnnnnnnnnnnnnnnnnnnnnnnnnnnnnnnnnnnnnnnnnnnnnnnnnnnnnnnnnnnnnnnnnnnnnnnnnnnnnnnnnnnnnnnnnnnnnnnnnnnnnntcgcannnnnnnnnnnnnnnggggaatcctcccctctcggccacactctgtgctcctcttccagttacggtgcatgtgaagcaatggtatgggaaaattgtttgcagaaggatgaaaaggctttattcccaaacgtcnnnnnnnnnnnnnnnnnnnnnnnnnnnnnnnnnnnnnnnnnnnnncccacgacaaaggaacatcatattttttcaaatcgtttttaaaaaaatacacacatatctgaccatcttcactcagtgcctctgacgtaacaggaagccgggggggcgtccagtctctcagcttgtggttgatannnnangcgatgaggtcatccca

SEQ ID NO: 16902 - DNA, 683 bp, Macaca Fascicularis
  misc_feature (1)...(683): n = A,T,C or G
ggcttcacagtgaggcgcagaagcgcccagcagagcctggcccagacaggagctctcgtccttggcggcaccgccccagcnnngnnnnntgccactgaacggggccctccgttcattcctttggggaaattgtttgacttctgtgggtgtggctattttctgactcnnnnnnnnnnnnnnnttttctgtttccctctgctccccatagcttttcccttgaaaggccaaattgtctcccagccnnnnnnnnnnnnnnnnnnnnnnnnnnnnnnnctcatcctgtccctcttgcacagtgggagagtcccaatgtcttatgtctcgtctatgatgtgaccagtgaacagtccttcaacnnnnnnnnnnnnnnnnnnnnnnnnnnnnnnnnccaggctccgggcacctctctcnnnnnnnnnnnagttgggaacaagannnnnnnnntcggcnnnnnnnnnnnngactcagctgaggcccgggcatgggcgctgggnnnnnnnnnnnnnnnnnntgaaacatccgtgaaggagatggaaaacttcgaagcccctttccactgcctggccaagcagttccaccagctctaccgggagaaggtggaggttttccggnnnnnnnnnnnnnnnnnnnnnnnnnnnnnnnntacacaaccggagaagacagaattacctctgcactttaat

SEQ ID NO: 16903 - DNA, 727 bp, Macaca Fascicularis
  misc_feature (1)...(727): n = A,T,C or G
aaaatataaagagaaatacatttgtcacttgtacctaaaatatgagtggctcatttttgtgttattctcttctagacttgactagtcatttacctggtatatattgttttcactgattggggaaacactagatttttacctaggtttttgatcatttataatggagagcggaagttgcctatattttctaataatttatttttcagcaggaatattgattagcaggttttttttctttatacccatagaaaactaactagattaatatttagtttcttatttgtnnnnnnnnnnnnnnnnnnatttcaggctctggggtttcttgtatattgtgtgtctgtatcaaaaatatcctctccttttcaaaaatgacaagttggaaaatgtttgtcagacttattaactggtcacattataataatattgataatgaccaactgctcattctgaaagccaaacataaaagctaggagatgtggcatctgaacatttnnnnnnnnnnnnnnnnnnnnnnnnnactaataatacaataatagcgatttaaaaaaaaaaaaactgagatttcctactggcttgaagtttttctatttagcagaataataataataagtttcaactagctctaaagaatgaacacattgtaaacagttgccacagtagtttctaataaattgaccataaaagcagcaatctttcttttttttaattctagcttctttataaagat

SEQ ID NO: 16904 - DNA, 655 bp, Macaca Fascicularis
  misc_feature (1)...(655): n = A,T,C or G
agcagaannnaggtccccagagtcctgctgtaggagtgagcctgagataccagagccctctcagcaggaacagcttgaggtaccagagccctgccctccagcagaacccagtccccttcagcccagcacccaggggcagtctggacccccagagccctaccctagggtagagctgggggnnnnnnnnnnctgcaccctggaacatagaagtccagagtccagcctaccaccctgctgcagtcagtgggctccagcaaccaccagcctgatcttctcttcccaacacccgctttgtgccagcccccctatctgctcactccagtctctgagaaccccggcaggccaggcaggcctcagcagtctggcccctcgaaccctagccctgagggnnnnnnnnnnnnnnngtttaaccgccatccactgcttccatgaggctcgtctggacgatgagtgtgccttttacaccagccgagcccctccctcaggccccacccgggnnnnnnnnaaccctgtggctacattactcgaatggcaggatgccctgtgtttcattccagttggctctgccccccggggctctccatcatgagacaaccactcctgccctaccgtgcttcttccttttagcccttatttattgtcggtctgcccatgg

SEQ ID NO: 16905 - DNA, 705 bp, Macaca Fascicularis
  misc_feature (1)...(705): n = A,T,C or G
gcgccgcgccggnnntggctggcctcgcacatgagcnnnannntcctcacnnngctgtnnntccccgcnntcgtgggcgctgccatcntnnnctgctacgcagtctggcaggtgaagccctcgagcacctgtggccccttccggaccctggacagcatgtacgaggccggcagggtgtgggtgcgctacctggaggcggcgggccccagggtctcctggctgccctgggtgcaccggtacctggtggaaaacactttttttgtcttcctggtgtcggccctgctgctggccgtgatctacctcaacatccaggtggtgcggggccagcggagggtcatctgcctgctcaaggagcagatcagcaacgagggggaagacaaaatcttcttaatcaacaagcttcactccatctacgagaggaaggagagggaggagaggagcagggttgggacaaccgaggagactgcagcaccccccaccctgctcacagatgaacgggatgactagggggacagcgatgggcctcacgggcccgcccagcaccctgagaccacactggtgcctcccagtgaccctgctgggacatcaggacaaagaagatactgtctcgcctctcgaaagccgcagctgcgcctgggctggagccagaagggtgggtgaatccggcttgggcatccacagtgaactctgccctgcctgggactc

SEQ ID NO: 16906 - DNA, 724 bp, Macaca Fascicularis
  misc_feature (1)...(724): n = A,T,C or G
cagctccccgtatcgacccaccacnnnnnnatcactgccgtggcccacccaggagccaagtctgtgccccccaagccagcaaacacagctgcagcccgggccatcttcccaccagctccgcaccgctcgcccatcagccatgaaggctccctgtcctcagctgccatgtcccccagcttctcaccctctctgtctcctctggctgctcgctcacccgttgtctcaccatttggggtggcccagggtccctcagcctcagcactcagcacagagtctggcctggagccacctgatgacacggagctgcacatctagctgtggcccaggctgggccccgacctgggatgcgcatagtgtccccaatgcaggtcccactctgagcctgccctgggcagcctcgtactatgactggctacggggaggccaccaccaggccccagctctccaccctgaactccccagccccctcagagcactaggaccatagaagtcctgttggtcactgacctgtgaccagatccaatgtggggagaaatatgaaggaggtagcagccctgggttctcagtgagggctccctgccctgcaccagcaccctgagatggagctgagactttatttattgggggtagggggatggaggaggtccctccaacatgtttggacccagctcctttgggttccactgacgcccctgcccctgcccagaaccaagtgccaattctc

SEQ ID NO: 16907 - DNA, 746 bp, Macaca Fascicularis
  misc_feature (1)...(746): n = A,T,C or G
aggagaagatgatggcagaaatctatgcaaatggtcctatcagctgtggaataatggcaacagaaagactggctaactacacnnnnnnnnnnnnnnnnnnnnnnnnngatgtcacctacataaaccatgtcatttccgtggctgggtggggcatcagcaatgggactgagtactggattgtccggaattcatggggtgaaccatggggagagagaggctggctgaggatcgtgaccagcacctataaggatgggaagggcgccagatacaaccttgccatcgaggagctctgtacgtttggggaccccannnnnnnnnnctatgtcactagaagagccgtttaagaaaaggcatggtgagccatgatcagaggggatcctatggttatgtgtgccaggctggctggtgcgaacggggttggctatcaatactggacagcaaggacagcgtagtactggctcagagtgttcttgagggttgaaaatggggtgacttaaaacacttgcacaggacacaggatggctctgcctcacaatnnnnnnnnnnnnnnnnnnnnnnnnnnnnnnnnnnnnnnnnnnnnnnnnnntgnnnnnnnnnnnnnnnnnnnnagggcttgatcttttgtatttggccactgtgggcaatcatacggcacgtgagaggtgaaacagtnnnnnnnnnnnnnnncttcttatgtcactttggaatcaagggctggggagggagggagggagatggcaatttca

SEQ ID NO: 16908 - DNA, 690 bp, Macaca Fascicularis
  misc_feature (1)...(690): n = A,T,C or G
tggccacagannnnnnnnnnnnnnnnnnnnnnnnnnncccttagtattccaggggctctaaaccaccttctgtaagtcaggatggaagtagatggtgccacgaagatttctctctgctgtagccactccttcagtgtctcaaaatgttttaacatctttcagtaaaaatctgtcagtccttgataaattaaaaaaaaaaaaggcagcaaagtttttagagctcccttgaaccttctattttaaggcgcctttgtagataattcccaacattctgtgtgtcggtcatctttggaatttatcgatcgatcattgtttctcttcaaacttggccttgccctgcccattccnnnnnnnnnnnnnnnnnnnnncttcactagtcaattccacactcattctagacactgggtgcacgagactcactcccgtttgtattaccaaaactcaggccaataggatataaaaagtaggaagaatactgggatttaacatgagtacaaatctcatttcttccaattcctatgtcttcttgaatcctaatctttctgagactcaagttttctatctaaacgatcccttgaccagaatgttcaacagacgtgacaatactagaacgtgttttaattcattctaagattccttaaaattctgtaattctatgtgcttctgattctgggaatacatagccagcag

SEQ ID NO: 16909 - DNA, 725 bp, Macaca Fascicularis
  misc_feature (1)...(725): n = A,T,C or G
ctgacggctgccaagaggccccnnncccagcccnnnnnnnnngcacgtggnnnnntgttctcctctctctgcnnnnnnnnnnnnnnnnnnnnnnnnnnnnnnacaacttctccactcgtgacaaatcaactgtgagcctcgctccttccatttctgtccattagaannnnnnnnnnnnnnnacctcacccattagccgccccaccacccagcgatcaggcgcctcagtaaggcagatccgcggatggggagcctgccggtggccagaggtggtgtttgtgtttgtctccagctcggtgttccatggctcctaggcgaggtgatcagggagtggggccagtgggtccccggccctggctgtgggaccttgtgctgagggatgatttgctgctgaccttgattaacttaacagttcccagctggaagggacactttctggacccagtccactgtatggcattggtgatgcagaattatgcactgacatgaccctgggtgacaggaaagcctttcgagaggcccacggtggcctcgccagccctgcagtgttgatgtgccgtattgccccacggctctgcagaccttggccattgccgcagtcagcttccttttttctgtttgcactgtttgtatgatgttagctaattccaatgtgtatataaattgtattttttttaatttgtaaaatgctatttttatttgaacctttggaactgggagttctca

SEQ ID NO: 16910 - DNA, 752 bp, Macaca Fascicularis
  misc_feature (1)...(752): n = A,T,C or G
ccnnnnnnaatgagacagcnngnnnnnagatttaccggtctgtaaaatggaaatgttgagatcacctggaaagctttgttaaggagttgatctttgctttccttaacaagacagtaaaatgtaaacagaaattgaaaacttgaaggatatttcagtgtaatggacttcctcaaattgaagtgctattttcttatttttaatcaaataactagacatatatcagaaacattaaaatgtaannnnnnnnnnctttcaacattttattacgattattattcagcaacacattctgagggaggaacaatccacaccaccaataataacctggtaagatttcaggagctaaagaaggtagaataattgatggggagatagggcctgaagtaaacaagatatgggcatgcatgctaaagggaaaatgtgtgcaggtctactgcattanatnnnnnntgctnntcttttggatttacagaaatgtgttaaatgtaaatcttacaaagccatttaaaaatattcactttagttctctgtgaagaagaggataaaagcagtcctcctgattgtattgttttaaactttaagaatttatctaaatgccggtacttaggacctaaatttatctatgtctgtcatacgctaaaatgatattggtctttgaatttggtatacatttattctgttcactatcacaaaatcatctatatttatagaggaatagaagtttatatatataaaatacccgtatttttaat

SEQ ID NO: 16911 - DNA, 694 bp, Macaca Fascicularis
  misc_feature (1)...(694): n = A,T,C or G
acgaccaccactgnnnnnggatggagaactgtgtagnnnagcgcaaccannnnctcnnngtggtctacctggcactgcagctggtggtgcttctctggggcctgtacctggcatggtcaggcctccagttcttccagccctggggactgtggcttcgatacagcgggctcctgttcgccaccttcctgctgctgtccctcctctcgttggtggccagcctgctcctcgcctcacacctctacctggtggccagcaacaccaccacctgggaattcatctcctcacaccgcatcgcctatctccgccagcgccccggcaaccccttcgaccgaggcctgacccgcaacctggcccacttcttctgtggatggccctcggggtcctgggagaccctctgggctgaggaggaggaggaggccagcagcccagctgtttagggttgctagaggctgggctactatcttgtgcctgaaaaccaggggacctgtccccagctagggtcagccctcggagggttgactcctgcccactcctcccaggtcccagaactgaacttcaagacagacagatccctgcctcggtgggcagttctgccttccaaggaagaaagggaaaaaaggacctgtgggcagctcaggcccaagcagaccctgggctccaccccagccccacccaggcgactgccagtgcacac

SEQ ID NO: 16912 - DNA, 766 bp, Macaca Fascicularis
  misc_feature (1)...(766): n = A,T,C or G
gagtcgatatagagataatnnnntnnnnnnnnnnnnnnnttaaagatacaaaaaatcnngtatttttttttgtgtgtgtttacaagtagtaaatttattttcagctgtctacctataaagttcattgtgtagaaggatttattatgaccccctttgttccaagcatgcagtatcataagaacnnnnnnnnnnnnnnnncgccaaaaatccacagttgacagttgaattgacacttttattggggcagaatggaacagtccaagaatgtagatattgattctttctccataaatgttcttatagtgtgttcatcctagagttatttttttgtttgtttttttctttttggatcttgattgataactgccatgatattttgctttgatgtgtttctacatgtagttgcacacggttcagtaaaaataatgctgctatcaagtatgcaaatgttgaagtatgatggtttgactgtatggcagtgttgtagcagcctcttgtttttttccccattgcctcttttttaaaaaacttataaagtcactttttatttttcctcagtcttcaatgatgagagcaatattaagaagacattgctatctaatttttaatctttttaaatgaaaaattcctatgttcagtagcgtggttgatgctattgtttagccttcccctccaaattgtatacattggcttggaatgttcacaacttgcgtgcgtggcagcggaagacgattcccatattctacantcatcaaaacaaaatatc

SEQ ID NO: 16913 - DNA, 542 bp, Macaca Fascicularis
  misc_feature (1)...(542): n = A,T,C or G
ccgtttattgggtacccaccgcatcccacccctgggcctcaacggcagagcaggcagaggctgcagcgggaggccccattccactccgggaccacgtggcgggtgtccatcaatgtctgccacctttgcattgagcccattttccagatagtgaaaatgcagcttccaagggaagccactcactacggtcacccctacgggggccaatgacccaagggctgctgtaggggaggtaccagactctgaacccccgcttctctccccaacagggtgacgctgggggacccctggcctnnnnnnnnnnnnnnnnnnnnnnnnnnnnaactggggtcaccagctggggctatggctgcggccggccccacttcccaggtgtctatacccgggtggcagctgtgagaggctggataggacagcacatccaggagtgaccgccacgtgattgcccaggccgggactctaggcgaaagcagcaggagcagcaggccacccaacaccccacctcactgtaccctacccaaggacgggagtggggggggggg

SEQ ID NO: 16914 - DNA, 687 bp, Macaca Fascicularis
  misc_feature (1)...(687): n = A,T,C or G
aatgccatatagagnaanctctgtaaaacatctgctttcaaacccaagtacactcttgcattctatgctctaagttaaatgcaaactcctttttccttcttcctgctgcaagtgctgtctcatcctgattctcaagtgtgtcagggcctgggcttgcaaacagagactactcaaaaattatttggggagtagcacttcacacaattgtctctcccccacaaatcataattgtttcactaaaatggttacttggtttttctaagaaaaaagtcatttgtactcatttttggcctctttttgtttatttagaaactaatctggattcactccctctggtggacacccactcaaaaaggacacttctgattaagacggttgaaactagagatggacaggttatcaacgaaacttctcagcatcacgatgaccttgaataaaaattgcacacactcggtgcagcaatatattaccagcaagaataaaaaagaaatccatatcttaaagaaacagctttcaagtgcctttctgcagtttttcaggagcgcaagatagatttggaataggaataagctctagttcttaacaaccgacactcccaaaagatttagaaaaaagtttacgacataatctagtttacagaaaaatcttgtgctagaatactttttaaaaggtattttgaatatcatt

SEQ ID NO: 16915 - DNA, 712 bp, Macaca Fascicularis
  misc_feature (1)...(712): n = A,T,C or G
gagggggcagcgggcagtgtgactgccaagccggctacggggtgagggcctgtggccagtgtggccttggctacttcgaggcagaacgcaacgccagccatctggtatgttcggcttgttttggcccctgtgcccgatgctcaggacctgaggaatcaaactgtttgcaatgcaagaagggctgggccctgcaccacctcaagtgtgtaggtaagtggggctctagctaggtctggggaagatgggcaggggcctgggcttggtccttcattctctcaacacaagcctgggctaaactagcctaggcctcaccttcatggagatctcaacctggctgggaaggcagacaagtaaccagatacttacagtccagtacacaggtactgtgtagtatagtccctgtgtacagtgagagatgcctctgatctagttcagtggaagtagtgatggggaatcaggaaaggcttcttggaggaggtgctactttggccaagtctcaaaaattgaggaaggggctgggcgcggtggttcacgcctgtaatcccagcactttgggaggccaaagagggcagatcacgaagtcaggagatcgagaccatcctggctaacgcagtgaaaccccatctctactaaaaatacaaaaaattnnnnnnnnnnnnnnnnnnnnnnnnnnnnnnnnnnnnnnnnnnnnnnnnnnnnnnnnnnnnnnnna

SEQ ID NO: 16916 - DNA, 1201 bp, Macaca Fascicularis
  misc_feature (1)...(1201): n = A,T,C or G
agnnnnnnnnnagatggcagacaaatacaaaaagaaaatgtgggggtggnnnnnnacagaagccggagcccagtctgaacttgagaccgcgttggggattggcgggtttgggtaccccgccatggccgccatcaatgcacgcaagatgaaatttgctctgctgaaaggctccttcagtgagcaaggcattaacgaattnntcagggagcnnnnntttgggcgtggcttcacggcacctgtaggaggcggggctttccctaccatcgttgagagagagccttgggacggcagggatggcgagcnnnnnnnnnnnnnnnnnnnnnnnnnnnnnnntgtggaacttgatgacttggggaaagatgagttgtgagagccacaacagaggcttcagaccattttcttttcttgggagccagcnnnnnnnnnnnnnnnnnnngggacattgtttacgatcagatgactttcccagtggcctttaaccaagaagtagtacttgattggtcatttgacaacactgcaacagtgaacttttgcatctcaagaaaacattgaaaaattctatgaattgttgtagccggtgaattgtattgtattctgtcacattaatattttgaagaaaacttggctgtcgaaacgtttttccctctctctgactgctgcttggatgttcttggaggctgtttcttatgtatgggttttttaatgtgattccttcatttgaatattaatggctttttccattaaagaataaaatattttggataatgccgataaatgtatgaaattagtatctacatcataaattcagagtgatgtttagcagtaaattaatattttgaagtgatacacagatatctttcctcccccacaaacttttttaaacaaaaaacaagatctctttgcnnnnnnnnnnnnnnnnnnnnnnnnnccacaacagagattttacatggaaaccggactcagtgagcactgatttcccacccaatatttgtctttgggctgtctctagtgactaattattaaggaatctagctggttatacagtgcaaggctttctatgttgttatgaaccttagaatagccattaagacatgaaatacagcagcaggttaccaatgcgaacacatagttcgcatttatgtaaaacattcagaaaaatgaagttttgaatttgttagaaccttcaaaggactgagagcat

SEQ ID NO: 16917 - DNA, 693 bp, Macaca Fascicularis
  misc_feature (1)...(693): n = A,T,C or G
gnnnnnncccgcgtnnnnnnntggccccggcgcccccggcccacgccgacccttccagcannnnnnnnnnnnnnnnnnnnnnnnnnnnnnnnnnnnnnnnnnnnnnnnnngcattcacctgggcgagcaccgcgaccgcttcgaggaccatgagatagaaggcgcgcacctgcccgcgcttaccaaggacgacttcgtggagctgggcgtcacgcgcgtgggccaccgcatgaacatcgagcgcgcgctcaggcagctggacggcagctgacgccccacccccactcccgccccggccgtgccctgccggcagggccccccacccccaccccgggccgcgggctcggcctgcccctaccgacggcgcccgggccaggaatgttgcatgaatcgtcctgtttgctgttgctcggagactcgccctgtacattgcttagtgctctcaccggccgcccagcccacccagcacacagtcaggaagggcgtggaccagggaggctggggcgggaggggccgggggtgggatgctctagcctgaccaccgccttcacagctcctggtggccattctcccagagggggaacctagtccagcatgcgaggtcaggacccgccttggtgactcggggggaggggggagacattgggattctcgatgggggccaaggagcccccctgtttgcatatttaatcc

SEQ ID NO: 16918 - DNA, 777 bp, Macaca Fascicularis
  misc_feature (1)...(777): n = A,T,C or G
acacagataaccctggaatnctcatnnccanncagcgggcccagctggagcgaagcttgcaggacatcgtagagaaaaccatccaaaagtaccacaccaaccccgaggagaccgcggccgaggagagctgggactatgtgcagttccagctgcgctgttgcggctggcactccccgcaggactggttccaggtcctcaccctgagaggtaacgggtcggaggcgcaccgcgtgccctgctcctgctacaacttgtcagcgaccaannnnnnnnnnnnnnnnnnnnnggtgatcttgccccagctcagcaggcttggacagctggcgcggtccagacacagtacagacatctgcgcggtccctgcaaacagccacatctaccgcgagggctgcgcgcggagcctccagaagtggctgcacaacaaccttatttccatagtggnnnnnnnnnnnnnnnnnngcctactcgagctcgggttcatgacgctctcgatattcctgtgcagaaacctggaccacgtctacaaccggctcgctcgataccgctaggccccgcccccgtcannnnnnnnnnnnnnntccctgctgcctgtaaatatttgtttaatccccagttcgcctagagccctctgccttcannnnnnnnnnnggacccaggtggctgcctgccaccgctgctgtcacctctcccacgggacctggggctttcgtccggtttcctgcccccatctgtcggcctaccacctcccacaagattattttcactcaaacctcaaat

SEQ ID NO: 16919 - DNA, 725 bp, Macaca Fascicularis
  misc_feature (1)...(725): n = A,T,C or G
cactcgctttgacctgctnnnnnnnnnnnnnnnnnnnnnnnnnnnnnnnnnnnnnnnnnnnnnnnnnnnnnacaacgcagcctttgcaggcctcactacactctgtctggtgaagaccttcactgcagctgtgcgggcagagctgatccgggccttnnnnnnnnnnnnnnnnnnactgcccgtctctggtttcccccgggcatctaggaagacccagcaccagtgacctccagctgggggtgggnnnnnnnnnnnnnnnnnnnnnnnnnnnnnncctaggcctggagggaagcccaaggctagctggacctcaggacctggaatctgagagggtgggtggcagaggggagcagagccatctgcactgttnnnnnnnnnnagccagagnnnnnnnnnnnnnnntcctgcttttccatacttaactgtggcctcagcatggggtagagctgggtgactgggtctagcccctggtcccaaatctgtttacacatcaatctgcctcactgctnnnnnnnnnnnnnnnnnnnnncatgtttacatgatttgatgtgcaatagggtggggtgggggcagggaaaggactgggccaggccaggcttgggagatagattgtttcccttgnnnnnnnnnnnnnnnagcctaagcactgtgctatcctggaggggctttggannnnnnnnnnnnntaaggggataggaggaggcttcacccatcagcaataaagt

SEQ ID NO: 16920 - DNA, 765 bp, Macaca Fascicularis
  misc_feature (1)...(765): n = A,T,C or G
ggtagccatgaggtgcaaattcgtgaagatatcagcagcatgtttggcagctgagtattggagcaaggagcctgccacaaggttttgagaacagagtgccgttttagagctggcggcagcannntagcccaaaagaaggttatattcccagaggatgtcaatcccaaggaccagtagctgccgtcagtttggattatgaaaactttaaccagcatcaacattgggtgtagaaacatgattgctttgtgtatcagaggacatgctcagcagatccaagagatatatttggcaactttttctagaaaaggcacattgggtatcattcattacattcttgagtttttttgggtttttttttttttttttgagacagtcttgctgtgttgcccaggctggaatgtggtggcacaatcacagctcattgcagcctcaatcacccaggcctaagcaatcctcccgccttgtagctgggactatagctcacagcacatctggctaaaatttttttttttgttgaggtggattcactgtgttacccaggctggtctcaagctcctgggctcagatggtcctgcctcagcttccaaaggcataggccacgttgtagctttgtcccttgccatcctgcccaacagggggtgctgtaccttttaatgaattgactttcataaattggttatgttggtgggcaagttctttaagctggaaattgtaaattcttcctgaaatgttttttcatgcagttaccatgaactaaatactaca

SEQ ID NO: 16921 - DNA, 698 bp, Macaca Fascicularis
  misc_feature (1)...(698): n = A,T,C or G
cgcgggggtgagctcctggtccacactggtttccttggaccttctcaggaccgtggtgcctaccagacgattgactcagcagaggcacccgcagatccctttgcagtcccagagggcaggggtcaagatgcccgagggtactgaagccagccacactgtgcccggccccgccccaggccttccttgtgcctgggaggtcgttctagggatgctcctggcctccatctcttggacctaagatggactgtgtccccagcnnnnnnnnnnnnnnnnccaagtgccctgagaggccaggagcccccatgggccacccagtgccttgcacactcctgtcccaaactccctgaggcctcccctcccttcagggcacccactgnnnnnnnnnnnnnnnccatggtctctcttcacctcctaccgcaccacagaggcccccagctgaatcccgcctgagtgtgnnnnnnnnnnnnnnnnnnnnnnnnnnnnnnccccctgagacctcccctgagtttgtcaggcttcagtggaagcccnnnnnnnnnnnnnnnnnnnnnnnnnnnnnnngccgtctggcatgggagtgannnnnnnnnnnnnnnnnnnnnnnnnnncgtggtggctagggatgcagggctggaggtcnnnnnnnnnnnnnnnnnnnnnnnncatcacagcctccagcctccctttcggagccacag

SEQ ID NO: 16922 - DNA, 757 bp, Macaca Fascicularis
  misc_feature (1)...(757): n = A,T,C or G
cagagatgaggctgggtgcagacagaggaaagagagctgcagatggagaagaaggcgggaggaggagaggatgcagggcaaaggaaaacagtctagcaatgccaaggaaacttgggagctcgtggtttccccaggggtgatgaactacacccctggatctgggagnnnnnnnnnnnnnnnnnnnccatcttcagtgggagagagttgatagagcttgagaccaacagttctttacccaatggcctgacatnnnnnnnnnnnccaggccagaggcaggagaaagacaggaggcggaagccccattcccaggagtacaggcaccagacaaagcaaatagaaagggctcttaagggctcccagatattttgaccctacagacannnnnnnnnnnnntaaatataaacatcccacttagaatatcaatatatattcctggagaaaatannnnnnnnnnnnnnnnnnnnnnnnnnnnnnnnnnnnnnnnnnnnnnnnnnnnnnnnnnnnnnnnnnnnnnnnnccagtttgggaaatttccattatcttgctgcaataattttttttagataaattattttctaggtgtttgttaaatgaggatttgattcatctcatggtcttctctccctattnnnnnnnnnnnnnnnagatagcttctgctactataggtagtttgggtggcattattttttttaacacatccagctttccatatcaaatgttgcagacttaaatatcatcaagaagacttgatactcca

SEQ ID NO: 16923 - DNA, 735 bp, Macaca Fascicularis
  misc_feature (1)...(735): n = A,T,C or G
tcacgnnnnnnnnnnnnngccacgacagccgcaccaccatcggggtgangttctccacccgcnnnnnnnnnnnnnnnnnnnnnnnnnnnnnggctcagatctgggacacagctggcctggagcggtaccgagccatcacctcggcgtactatcgtggtgcagtgggggccctcctggtgtttnnnnnnnnnnnnnnnnnnnnnnnnnnnntggtagagcgatggctgaaggagctctatgaccacgctgnnnnnnnnnnnnnnnnnatgctcgtgggtaacaagnnnnnnnnnnnnnnngcccgggaagtgcccactgaggaggcccgaatgttcgctgaaaacaatggactgctgttcctggagacctcagccctggactctaccaatgttgagctcgcctttgagactgtcctgaaagagatctttgcgaaggtgtccaagcagagacagaacagcatccggaccaatgccatcactctgggcagtgcccaggctgggcaggagcctggccccggggagaagannnnnnnnnnnnnnnnnnnnnnnnnnnnnccagaaccaccctgcccccactggctttttggtgcctcttgtccccacttcagccccggnnnnnnnnnnnnccctttggttccaaatatcagactgttccctgttcacagcacccccagggtcttaaggtcnnnnnnnnnnnncacaatacctcttttatctgtccacccctcacagacta

SEQ ID NO: 16924 - DNA, 715 bp, Macaca Fascicularis
  misc_feature (1)...(715): n = A,T,C or G
ttggagttaatgtttctacaaaaagtttctataaacaatagaaaacttctagcatgaagtcacaggatgttaaaaatattacaacacaataaatacaactacaccctcnnnnnnnnnnnnnnnnnnnnnnnnnnnnnnnnncaggtttggagggaaacactcttgagatcgccttcacaatccacaggaacccagagcaccacatgggaagagggagcaacatgagactccaacttctgcttcctcagctttgcctcttcccaatctgaccctgcctctggcccacaccagctaaaaactatagcttcagtccacttcggttctcatggaaaccctcttgtcagtggattggtggacaacaggtctgtttttgtgcagagcacatggacacactggtttctgtatggattaagtctgcctttatggccagtaataatgtcggggccaggtcccatatccaagtcctgtttatagggcctttcagtgacctctagaatggactcacagnnnnnnnnnnnnnnnnnnnnnnnnnnnnnnnnnnnnnnnnnnnnggtctttgagaaaagtaaccagggacctgaaagaccatgagattgcggaaggcacctggtcttagtccnnnnnnnnnnnnnnnnnnnnnnnnnnnnnnnnnnnnnnnnnnnnnnnnnnntctgttttatccttggangnnnnnngtgtcatgtgacactctcta

SEQ ID NO: 16925 - DNA, 581 bp, Macaca Fascicularis
aagtggagtacgcgcaggaggccgtcaagaagggctcgaccgcggttggtgttcgaggaagagacattgttgttcttggtgtggagaagaagtcagtggccaaactgcaggatgaaagaacagtgcggaagatctgtgctttggatgacaatgtctgcatggcctttgcaggcctcaccgccgatgcaaggatagtcatcaacagggcccgggtggagtgccagagccaccggctaactgtggaggacccggtcactgtggagtacatcacccgttacatcgccagcctgaagcagcgttatacgcagagcaatgggcgcaggccgtttggcatctatgccatcattgtgggtttcgactttgatggcactcataggatgtatcagactgacccattgggcacataccatgcctggaaggccaatgccataggccggggtgccaagtcagtacgggagttcctggagaagaagtatgatgatgaagccattgaaacgaggtgatttgaccattaagctggtgataaaggcaatgctggaagtggttcaatcacggcccaatgtgcccagagacaatcattg

SEQ ID NO: 16926 - DNA, 753 bp, Macaca Fascicularis
  misc_feature (1)...(753): n = A,T,C or G
actcggagtacgagagccccttcatggggggcgcgcggggccacgcgctctacgtggagccccacggccacggccccagcctgagcgtgcagggcctctcgcgcgccagccctgtgcgcctgctcagcctggccttcgcgctgtcggcccactcggtcttcgagggcctggccctgggcctgcaggaggaaggggagaaagtggtgagcttgttcgtgggggtggctgtccacgagacgctggtggccgtggccctgggnnnnnnnnnnnnnnngagtgccatgcccctgcgggacgcagccaagctggcagtcaccgtgagcgccatgatccccctgggcatcggcctgggcctgggcatcgagagcgcccagggcgtgccgggcagcgtggcctccgtgctgctgcagggcctggcggcnnnnnnnnnnnnctnnnnnnnnnnnnnnnnnnncctggccaaggagctgnnnnnnnnnnnnnnnnnnnnnnnnnnnnnnnnnnnnnnnnnnnnnnnnnnngccgtcctggccgggatggtcttcctgaagtggtgagcagccacgccatcgtccctgccgccgggagccccgagccggacacaggccacgtcccccggccccgcctcccctcagagcaagcactgtggccccgggccaccgtctgtgcgcaaggggcctcccggaaccaggctgtgcccccgatcctacaccccgagtctcagagcactgctacnnnnnnnnnactcttctc

SEQ ID NO: 16927 - DNA, 213 bp, Macaca Fascicularis
gggaggtgtggtcttgttacacacgaaggagggtgattctgagttcacgaatatcattgccaaagagatagggtctgaggagaccctcttatttttaaccgtgggggatgagaaagatgctggactctttttattggcagggccacacgtgtgtgtggagaccctggggcccacggtgggtgaggtcttggaaggcaaaggagcagggaagaa

SEQ ID NO: 16928 - DNA, 681 bp, Macaca Fascicularis
taatggcgccaaccccatgttgctgaggcgctccgctcaccttcctgcccgcctcgtgttccctccaggcatggaggaactgcaggcccagctggagaaggagctggagggaggcacactgtttgaagctgacttctccctgctggatgggatcaaggccaacgtcattctctgtagccagcagtacctggctgcccctctggtcatgctgaaactgcagcctgatgggaaactcttgcccatggtcatccagctccaactacccagcgcaggatccccaccacctccacttttcttgcccacggatcctccaatggtctggcttctggccaaatgctgggtgcgcagctctgacttccagctccatgagctgcagtctcatcttctgaggggacacttgatggctgaggtcattgctgtggccaccatgaggtgcctgccgtccatacatcctatcttcaaggtaacaccttatccccttctctcctgcctaccccagggcacgttcccacctctggaggctccctttctgtgaggtctccggtatggagagaaacaatgaatggacaatgtgagagcaacagagaacgagcagggctggccatgcattttcaaaggggatatcacctcccacctggggaaagtggtggaaaaaatcttactctttttatatataaagca

SEQ ID NO: 16929 - DNA, 731 bp, Macaca Fascicularis
  misc_feature (1)...(731): n = A,T,C or G
acacagtgcagtgtgtgcagcaannnnnnnntgaacgtgggggacctgtccaagcacatcatcatccacactggagagaannnnnnnnnnnnnnnnaagtgtgggcgtggcttcaaccgggtagacaacctgcgctcccacgtgaagacggtgcaccagggcaaggcaggcatcaagatcctggagcccgaggagggcagtgaagtcagcgtggtcactgtggatgacatggtcacgctggccactgaggcactggcagcgacagccgtcactcagctcacannnnnnnnnnnnnnnnnnnnnnnnnnnnnnnnnnnnnnnnnnnnnnnnnnnnncgagatcagcaaagctgtgaagcaagtgcaggaggaagaccccaacactcacatcctctacgcctgtgactcctgtggggacaagtttctggatgccaacagcctggctcagcacgtgcgaatccacacagcccaggcactggtnnnnnnnnnnnnnnncgcggacttctaccagcagtatgggccaggtggcacgtggcctgctgggcaggtgctgcaggctggggagctggtcttccgccctcgggatggggccgagggccagcccgcactggcagagacctcccctacagctcctgaannnnnnnnnnnnnnnnnnnnnnnnnnnnnnnnnnnnnnnnnnnnnnnnnntaaggatggatggcaccctggaactgggaagggtnnctctcccta

SEQ ID NO: 16930 - DNA, 1005 bp, Macaca Fascicularis
  misc_feature (1)...(1005): n = A,T,C or G
aggaagcgttagggctgatnnnnnnntcnnnnnnnnnnnnnnnnnnnnnnnnnnnnnnnnnnnnnnnnnnnnnnnnccccagcactcgcctccctgtggaagatgaacacatcagccacctgtgtacagccgctcacttcgtgtgctccttgttgcctgagaggaaaccttggggtgccagggtggggacagaaacatgggctgggttccggttccttctccactgtgccctgtgcatgggcnnnnnnnnnnnnntagccacctgctccttggaggcccccaggggtggtagaggctagaaggaagccacagcaggaggacgccactctgggccctccacccttgccaagtgagccgctcacagtgtggtcggggctgcacgtgctggaggccctcctgcctgggcctgatggggcaaatattgggtccccgggctggaaagatggacagaggcccaatgggtgaaggctttgaagagcacacagaagcccctggccccccacgagagctggagagccatgtatatggcttcaaagccacctatggcagggacacacttgtgagcatgggcggcctgcagctcaggtgatacatttaccagtgctcttgtttgcgtggtgccaggaaattgattttggaaaatgaaataacattaaaggtgaatgtgagacttccacttttatccaaaaggagctatattagctaggctgtttttgatatccaatcattggtttaacaataaaggcaatttgtttaatcaataacggaaatttcttggcttatgaaagnnnnnnnnnnnnnnnnnnnnnnnnnnnnagcaggggagcaattcttccagtgtcttcctgcctccctctgcgtttgtgtttgccacatcccaggccaccacctccaaggataaaaaggnnnnnnnnnnnnnnnnnnnnngaatccctccctcactgcctcactgccagagcagcaccttctctgtagcacctctgctgtctcagagcctccagcaaa

SEQ ID NO: 16931 - DNA, 758 bp, Macaca Fascicularis
  misc_feature (1)...(758): n = A,T,C or G
tattaatacataacaattcttgttacaataaacgtgcttttgagatttttaaatctgagctcatctacttatcagattgcataaaaaattaaaatagtatcaattgacacctaattgnnnnnnnnnnnnnnngaaattccattccttggcatggatacgtaagttcaatgcagaagtgagggatgcctttaacactggaagacaatgctgactcagcttaaaaaaaagtaccgagagaacggtgtaaaaaatggtatttaaaaatcatttaaaaaaaaacaaaaaggaaccgtttcttctttagttacaatccatgaggctctctagggaccnnnnnnnnnnnnnnnnnnnnnnnnnnnnncaggaacacaaacgactggcccgagatctggctcagctgccttgcccactggtctgcacagggactcatgggcacagcctgtggtgaggagacacctgtcatgccagtcctgggagcacaccacccgtctgcaggcccggggtcccgacacagacgccgctcctcctgtctccccttcccaagtgacttcacgttagtcctgtggaccaaaataaggccatccctacaggctctctattcttcaaataatgggcagtaggagaaaaacacaaactttccgaaacgtgcagtttcctaagcaaaaaggccacacacccccacttctgtgttacttggtcagttgagcccctggcgccctcaggacctactgatagagcatgtcctctgcagtatactc

SEQ ID NO: 16932 - DNA, 748 bp, Macaca Fascicularis
  misc_feature (1)...(748): n = A,T,C or G
gtgaggcgggcaggtgggannnnaacgcagtcaggagcatttgcannnnnnnnnnnnnnnnnnnnnnnnnnagggaccagttgtgctcggaatttgagctgaattccgcagcctgcctttgtttcctgaagtgatagcctactaatgctcccaagcagatgcttaatagtaaatttctaaaacccccgggtctttatcgttcagtttgttctgtgcacctgaggcgctcagccgtgnnnnnnnnnnnnnnngagtgtagccctgtttcactnnnnnnnnnnnggcacggccgcctgcgtgtctgtccacctcgtccctccgtgtatctgagggagtaaaggtgaggtctttactgcttcactgcctaattttcttgcccaaatttgctgaagcgatggagagacgggggccagtagccagccaaccccgtggggaccggggttgtctgtcatttatgtggctgggaagcacccaaagtggtggtcaggagggtcgctgctgtggaaggggtctccgttcttggtgctgcatttgaaacgggtgtagagagaagctgtgttttcatttgtaaaggggagaagcgtggccaggcaggtggcacgtggcattgcacggtgggctcggcagcaccttgcctgtgtttctgtgagggaggctgctttctgtgaaatttcatttatatttttctatttttagtactgtatggatgttactgagcactacacaagcnccttcggtgcatgtgtag

SEQ ID NO: 16933 - DNA, 697 bp, Macaca Fascicularis
  misc_feature (1)...(697): n = A,T,C or G
tgctgggcctggggctgctgctgtactcctttgccgccgccgttgtggtgccctgcctgtcctccgtggtcgctggctatggtaagacctttcnnncagccaaagccacctaaggcggagaagggcagtggcccctgactacgactctccccacaggctcaccagggcagaagggcacggtcatgggtacactgcgcagcctaggcgctctggccagggccgcggggcccctggtggctgcttcaggtgagggtgcgggatagtgctgggacaggctgggggccgggcacctgctctcacctccccagtgccagccccctcggagcctgggtgacgctgccgtctctccgcagtgtactggctggccggggcccaggcctgcttcactacgtggtccgggctctttttgctgcccttcctcctcctgcagaagctgaattactcggcacagacgctcaaggctgagtagctgagccactgtgcccaggctgtgggcaccaggcagagtgggagcctgggtcagagccctgcccactgcctgacccccctccttcccagtccagggagaccctgtgggtgggagccggccccccagcaggaagcccaggcagctcctccagactcattgctattaatgactccaggcggcagcactccaaggctgtccgggttggtttgttttctaaactatgcacca

SEQ ID NO: 16934 - DNA, 752 bp, Macaca Fascicularis
  misc_feature (1)...(752): n = A,T,C or G
tgagacctatggggacnnnnatgggcggacagcnnnacannnnnccagtgccatggccaatgtgtcttcacacagctgctcatctggtacggggtggacgtgaggagccgggacgcccggggcctgactccactggcctatgctcgccgggccggcagccaggagtgtgcagacatctnnnnnnnnnnnnnnnnnnnnngggagggctgtggcttagtgcctacccccaacagnnnnnnnnnnnnnnnnnccaacccctcnnnnnnnnnnnnnnntagtcctagcctcctataaggcccaggaagagggcagaggggccagaaggactccatggcccgaagaccatcctccttgcaggcactgtgggaacagacacagagatggacaagcagggacatgccgagaggacgaagcagaggaaattagggaggagagtcaaagggatcaaggagagttggggatttgagctgcagcagagagggatgagggatttagccctctgccctaaggtgccattgaaaagggacaggacccttcggaggtgcctgtgaggagaggggagcaggacctctccctcctccagatccctgcctcctagtgccagcccctcacacgccttcatcnnnnnnnnnnnnnnnnnnccagtttgggggtgctggatgaaagagacgaggggtgatctgtgagtcccatgtaaactttgtacattggaatatttatgtttgtgtacatatttgatgtgtgtgtgtatg

SEQ ID NO: 16935 - DNA, 300 bp, Macaca Fascicularis
tatatatggaacttgggtacctctgcctgaaatggctgccatcaacacagtgctaaaactgacacgaagtatagagtttcacagatttctgcgttttattggtggaacctgattcgcaacatttgttaaatggattagatgaatgtacttctttttgtgaacttaattgcctggattgctttaaagttaacgttcgtgcaataccaagaaagtggctccttaaacgaatgtcttcgtatgtttcaaggtgactttaggatctatagaagcaggtgttgacctaatccagacctttgagag

SEQ ID NO: 16936 - DNA, 786 bp, Macaca Fascicularis
  misc_feature (1)...(786): n = A,T,C or G
cnnnnnnnnttgcagagcagaagcagctgctggaggtgaactctacgcagactatagagagaactcgtatgtgccaaccactggagcgatcattgagatccacagcaagcgcatccagctgtacggagcctacctccgcatccacgcgcacttcactgggctcagatacctgctgtacaacttcccgatgacctgtgccttcataggtgtcgccagcaacttcaccttcctcagcgtcatcgtgctcttcagctacatgcagtgggtgtgggggggcatctggccccgacaccgcttctctttgcaggttaacatccgaaaaagagacaattcccggaaggaagtccaacgaaggatctctgctcatcagccagggcctgaaggccaggaggagtcaactccacaatcagatgttacagaggatggtgagagccctgaagatccctcggggacagagggtcagctgtctgaggaggagaaaccagatcagcagcccctgagcggagaagaggagctagagcctgaggccagtgatggttcaggctcctgggaagatgcagctctgctgacggaggccaannnnnnnnnnnnnnnnnnnnnnnnnnnnnnnnnnnnnnnnnnnnnnnnnnnnnnnnnnnnnnnnnnngaaactttgggcagctccgaacccgctgagggtgctctccgacagcgccccacctgctctagttcctgaaggggcagactcctcacattccagcactttcccacctgacccctctcccctcgttttcctccaataaacta

SEQ ID NO: 16937 - DNA, 669 bp, Macaca Fascicularis
  misc_feature (1)...(669): n = A,T,C or G
annnnngagacccccagctctggtcccctggatgaggagggggccgtggccccagtcctggcaaatgggcatgcaccctacagtcggactcttagccacatcagtgaggctagtgtagacgctgccttggctgaggcttcagtggaggccattggcccagaaagcctagcctggggacctagcccacctacacacccagctcccacccatggagagcaccccagccctgttcctccgaccctggaccctggccactctgccacaagctccaccctcggtacaacaggctctgtccccacatctacagaccctgccccatctgcacacctagactcagttcataaggccacagactctggcccttcagaactgccaggccccactcacaccactacaggctccacctgtagtgccattcaaagccccctcactcacactactacaggctctacccacaagcccataatctctacccttactactacaggccctaccgtcaatatcataggcccagtccagactaccacaagccacatccataccatgccaagccccacccatacccccacaagtcccacccataaaaccaggatgtcaactcctaccactataagtcccaccctgcctctgcccagccacatcccttgattttgtattttatttacagag

SEQ ID NO: 16938 - DNA, 648 bp, Macaca Fascicularis
  misc_feature (1)...(648): n = A,T,C or G
agagtatgtgccaggaaactcttgctatcgaattgagacgattaaaatggtgacttaatccatagttactttgcactcactgaaaggaaagtgctnnnnnnnnnnatacaaagtatctaaaagtgtcaccttttctggcctgatcaacctgatcaacaatttgggcttcatgtttgtatgaggggctatttggcataatcttcacagcttttatcagtacaagttaaaggctgaatacattttttcatcacgagaaaagcagttgaaatgaggcatgagttactgtgcattgggattttagaacaattttcttgacagctcttttgtgaagttaggttcnnnnnnnnnnnnatggtggtcacttaaaatgtgcattannnnnnnngccaggatcaagcatgaaagacttttaaattagatcatcacacataaggcagtaagttagataataggcttttttggttttttttttaacctctttaagtattgattctgcttgagaatattgaagtacttgccagaagttgtggatttcannnnnnnnnnnnnnnnnnnnnnnnnnnnnnnnnactcnnnnnnnnnnnnnnnnnnnnnnnnnnnnnnnnnnnnntgtttnnncttactcagttgtgtttgttgctggcttgt

SEQ ID NO: 16939 - DNA, 869 bp, Macaca Fascicularis
  misc_feature (1)...(869): n = A,T,C or G
gtggttcccgtggannncggggcaatcgtgggggcaatgtaggaggcaagnnnnnnnnnnnnnnnnnnnnnnnnnnnnnnnnnnnnnnnnnnnnnnnnnnnnnnnnnnnnnnnnngggttcccaacccatcnnncagcagcgnncagcaaggtggtgactattctggtaactatggttacantnnnacaaccaggaatttatcaggatacttatgggcaacagtggaagtagacaagtaagggcttgaaaatgatactggcaagatacgattggctctagatctacattcttcaaaaaaaaaaattggcttaactgtttcatctttaagtnnnnnnnnnnnnnnntttgtattgggctgaagaaatcactattgtgtatatactcaagtctttttatttttcctcttttcataaatgctcttnnnnnnnnnnnnnnntgcagagttccctnnnnnnnnnnnnnnnnnnnnnnntatggtttcaggcttcattttagcttcaaaacaagctgggcacactgttaaatcatgattttgcagaacctttggttttggacagtttcatttttttggatttgggatagattacataggagtatggagtatgctgtaaataaaaatacaagctagtgctttgtcttagtagttttaagaaattaaagcaaacaaatttaagttttcttgtattgaaaataacctatgattgtatgttttgcattcctagaagtaggttaactgtgtttttaaattgttataacttcacacctttttgaaatctgccctacaaaatttgtttggcttaaacgtcaaaagccgtgacaatttgttctttgatgtgattgtatttccaaatttcttggttcatgcaag

SEQ ID NO: 16940 - DNA, 339 bp, Macaca Fascicularis
acatgcgcctcactctccctatgaggaggagggagagcaggaccaacctcgggctaccggagccctgggaccccctcgcgtcagcagcaggattcaaagaaggtggcaagaggaagaagcagaagcagagagaggagtccaagaagaagaagtcgaccaaaggcaatcactagactggactagaggcgcgcggtgcacccccggacgctggcgctcccccgtactcggcgcgcggtcgtgcacacgcgctagatagaggcgttggggcaggactgtatggaggccgcactagctcggcaggactacgcgatcacggatcagtcagagcagggtcaggag

SEQ ID NO: 16941 - DNA, 688 bp, Macaca Fascicularis
  misc_feature (1)...(688): n = A,T,C or G
caannncactgtcctataaactagctgaaagaacattccttagccttctcnnnnnnnnnnaaatataagggaatccgcaaaaattttttaaaagcattatatttttcctatagaatgattatatgaaataaaatacatttttttaaaaggcttggccagacatggtggctcacacctgtaatcctaacactttgggaggctgaggtgggcggatcacttgaggttaggagtttgagaccggtctggacaacgtagtaaaactnnnnnnnnnnnnnnnatacaaaaaaagtagccaggcatggtggcaggcgtggtggcaatcctacaacacacagaaatctaggaccaagatttaatttgtgaggatgagccaccaattgtatttccctgatactaagttcaggctcccaaacaaaccagctataagatgtatttgtagtataccttagcaaggtcttcttttaacttgttgtattgctccacatcaaaatgctgttgctttgatttcttgtggaagaactgaagaaattgcctactcttaacagctgagtaagtataatccttaaaaaaaaaaagagagaagaaaatnnnnnnnnnnnnnnnaacataatgcctctgcaagaaggatacttgactcagcaacaccaaagcaaaagaaggcagatgaatgggtaaaatatttgcaatg

SEQ ID NO: 16942 - DNA, 799 bp, Macaca Fascicularis
  misc_feature (1)...(799): n = A,T,C or G
atgtcagtgatgatgacctcgatatggatttagatcatcaaatgtgtttggttctggaaatacaacttnnnnngaagaaatactttcacaagagaaatggggcttaattaagttgttttcgtggtcacgtttattcttgttacttcgctgtgtttttgaaatgttgggcatggccttgtattttgctgttacctttgtgacctgnnnnnnnnnnnnnnnnnnnnnnnnnnnnnnnnnnnnnnnnnnnnactttagaggtgcagtggaagatactacgctgcctggttgagcctggtgaagaatgtattaatgagactgctttgcataaagcagggaagaacgagaagacagttggagatggaaggtggttttgtatatatnnnnnnnnnnnnnnnnnnnnnnnnnnnnnnnnnnnagagctatgttttgtggcacattgtctgatatatattgtgtaacctgtcaggtgagttgatttagaccacatagctgaccttttatgacaaggcagtttgattaggaactgtcgtaataccctcacacattacaggggcannnnnnnnnnnnnnnnnnnnnnnnnnnnnnnnnnnnnnttaagaggccagagaaaggaaaagacattatcagggcctggaaagtctcttccagttcatcagggtagtagacctgtcagattggaggtcaaagtcaaacgtatagtaagtattaatttgccttgaaaaacaaagacctaaaaagccttttttaaaaaataaattttttgttcacatgaccaaagccccccctgaccataaggaga

SEQ ID NO: 16943 - DNA, 747 bp, Macaca Fascicularis
  misc_feature (1)...(747): n = A,T,C or G
tgcccgatgcccattncgattacgcacgctattcgggctcctataatgattacctgcgggcggctcagatgcactctggctaccagcgccgcatgtagggccatcctgggatggggcaccacagggcgggagggagaaaagaggtgggtagggttacagatccaggttataactactctggcccatacctttcctggttgtggtttttcatcccctctaccatgtgggccttccccaggagatgatccttttgagtgttcggcagtaacctactttgttccttcgcctcagnnnnnnnnnnnnnnnnnnnnnnnnnnnnnnnnnnnnnnnnnnnnncctgcctcccgtctccccagaatgggaatttcttttatgtttttatatctctaccggctccctttttatttttgtgcgcgatatttaaggtcgtctggatggggaagcaacctgcagctgaggtcgccggcgcctttttctttttagatgggaaggaggccaggaaagggttagcttaaccatttcctannnnnnnnnnnnnnnnnnnnnnnnnnnnnaccctgactgtccctctgtagactgttgagactgagttcttgttgggacagtcagttggcatgtatccaagtcccctgctgaccgctaatgttctagctgatggtgagcggcacagtcccacttccccatctccccaagtaggtggtgttagaaaaccttaattttttttccctttttgtatggactacaaat

SEQ ID NO: 16944 - DNA, 715 bp, Macaca Fascicularis
  misc_feature (1)...(715): n = A,T,C or G
gnnnnnnnnnnnnnnngccgagagcgagctgcacctgcgcggcgtcnnctcacgggagcccngagccaggtgaccgtgctcagccccggctcttgcctgtcgtggccttggggcgctcagccctcttcctggatcctggtcaggccgaacctccgctgcctctccttccttcgcatgagcctctggcacggtcctccctgcagccggcctgggctgggcagagcctcctcctgccgggacccctgcctggagtgggggtgttcataccaaagacagaaccatttcgcctttaaagaaaatatatccagaggccgccgctgcctgggagccctggcctgtgggtccccctctcgcccggctggttcggtctcgcgcccgggagagtcagggctcccaggaccctggggaggaggcggatcccgggcctggctgggcttacttttcccacttgaggaactgggtgcacggttgtctttgatgggggacagttaaggtgctttggggttctcaggccaggacacatgctggcgttgggagtggaggcagccttgaggtgacctgggattccggggcagccaggcggctccaagacagtggatactgtgaggccccgacacttgggagcaggggaannnnnnnnnnnnnnnnnnnnnnctgtgcccaccagcttccacccaaccccgccctcccagctgtggatctagaccagatgttc

SEQ ID NO: 16945 - DNA, 740 bp, Macaca Fascicularis
  misc_feature (1)...(740): n = A,T,C or G
gnnnncatgcatacattcaannaacaaatattttcatagaagtcactgaaaatatctgtggcaaattgcatatgattaacaagataatagatgattctttgtagatgtttcatctgtaaagtcacagtgtttctcacagtcacttagtccaggatgttacattcccagcacatagtacagttactcttgagaactacaggtgagaaaggggggacaattgagtttgtccaaggccacctagagcactgtcctgcactaccttgtgattcagctatttcattcctagatatacaccccagaaaaatgactgcnnnnnnnnnnnnnnntcacaatagcacaaaactgtaaacactcaaatttnnnnnnnnnnnnnnnnnnnnnnncaaactgcaatatagtcagcggaatactgttcattaaaaaaaaggacgctgatacnnnnnnnnnnnnnnnnnnnnntcaaaaacattaagtagagcaaaacaagccagatataacatactatctaattacttttacattaaagccacttctaggcaaaactagcatttgatgatagataccagagtagtggctgctttgagtgagggcagggaattcaaannnnnnnnnnnnnnnnnnnnnnnnnnnnnnnnnnnnnnnnnnnnnnnnnnnnnnnnnnnnnnnnnnnnnnnnnnnnntagttgcatacatttgtcaacatgcctcatgctgtatgtttagatttgcgattttagtat

SEQ ID NO: 16946 - DNA, 723 bp, Macaca Fascicularis
  misc_feature (1)...(723): n = A,T,C or G
cttcactggctgctccatgaacccagcacgttcttttggccctgcagtggtcatgaatcggttcagccccgctcactgggtcttctgggtagggcccatcgtgggggcggtcctcgctgccatcctctacttctacctgctcttccccaactccctgagcctgagtgagcgtnnnnnnnnnnnnaaaggcacgtatgagcctgacgaggactgggaggagcagcgggaggagcggaagaagaccatggagctgactnnnnnnnnnnnagtgtcaggcaggggccagctcctcagcccctgagccaagggggaaaaaagaaaaagtacctaacacaagcttcctttttgcacaaccggtcctcttggctgaggaggaggtgccggtccccctggctacacagttagagaggggagaagnnnnnnnnnnnnnnnnnnnnnnnnnnnnnnnnnnnnnnnnnnnnnnnnnnnnnnnnnnnnnnnnnnnnnnnnnnnnnnnnnnnnnnnnnnnnnnnnnnnnnnnnnnnnnnnnnaagggccaagctagaaaagagtgagcctgcagcctgcatcccccacccccgctcaagnnnnnnnnnnnnnnnnnnnnnnaggtgggcagcggcagaccctccccagagctccttaggaagaagacagactggttcattgaatgctgccttatttatttctagtgaggatgcatgcgtggggctgctggtgttg

SEQ ID NO: 16947 - DNA, 685 bp, Macaca Fascicularis
gagcacagctgtgcgggcagcgcatgggcgtcaatgtttcgatgacaacctggccaacctgctcctagccttcttgcggcgccagccacagccctggtgcctggtggcacacaatggtgaccgctatgacttccccctgctccaagcagagctggctatgctgggcctcaccagtgctctggatggtgccttctgtgtggatagcatcactgcgctgaaggccgtggagcgagcagacagcccctcagaacacggcccaaggaagagctacagcctaggcagcatctacacacgcctgtatgggcagtcccctccggactcgcacacggctgagggtgatgtcctggccctgctcagcatctgtcagtggagaccacaggccctgctgcggtgggtagatgctcacgccaggcccttcagcaccatcaggcccatgtatggggtcacagcctctgctgggaccaagccaagaccatctgctgtcacagcccctgcacacctggccacaaccaggaacactagtcccagccttggagagagaaggagacccaaggatcttcctccaatgaaggaccctggagccctacccagggaggggctgctggcaccactgggtctactggccgtcctgaccttggcagtggccacactgtatggactatccctggctgcacctggggagtag

SEQ ID NO: 16948 - DNA, 701 bp, Macaca Fascicularis
  misc_feature (1)...(701): n = A,T,C or G
cccatcacnnntccaaacctgttgaagttcattttgcatcactcagaccctgcttccagcccccagaacatggctaactctcctaccaaggagtgtcttcagagcgaggcagtcttacagcgggggcacatctcccacttggagagagagatccagaaactgagagcagaaataagcagcctccagcgagcacaagtgcaggtagagtcccagctctccagcgcccgcagagatgagcaccggctgcggcggcagcagcgggccctggaggagcagcacagcctgctccgcgcccacagtgagcagatgcaggccctctacgagcagaagacacgcgagctgcaggagctggcccgcaagctacaggannnnnnnnnngcctcggaaaacctcctcaccgagaacacatggctcaagatcctggnnnnnnnnnnnnnnnnnnnnnnnnnnnnnnnnnnnnnnnnnnnnnnnnnnnnnacccggaaagaggtccgccccaagcagccggagccctcaagcaccccccagctccctggcagttcccctccacctgccaatgtcagtgccacactggtgtctgaaaggaataacgagaacaggacagactaactttttaaatgacgtgaagaaatcagaggtgaaaattgtacattgggaatatatttatgcaaaattttanngaaatanatgtaaataaagat

SEQ ID NO: 16949 - DNA, 801 bp, Macaca Fascicularis
  misc_feature (1)...(801): n = A,T,C or G
gtcaagacgtttttgcctttgggggtgctgtggagaaccccgannnnnnnnnnnnccggggaggagctgcccctcagccccaccttcctcctgccttcagcccagccttcgacaacctctattactgggaccaggacccatcagagcggggggctccacctagcaccttcaaagggacacctacggcagagaacccagagtacctgggtctggacgtgccagtgtgaaccagaaggccaagtccgcagaagccccgatgtgtcctcagggagcagggaaggcctgacttccactggcatcaagaggcgggcgggccctccgaccacttccagaggaatctgcnnnnnnnnnnnnnnnncttaaggaaacttcctgcttgagttcccagatggctggaagggatccagcctagttggaagaggaacagcactggggagtcttggtggattctggggccctgcccaatgagactctagggtccagtggatgccacagcccagcctggccctttctttccagatcttgcatattgaaagccttagggaagctggcctgagaggggaagtggccctaagggagtgtctaagaacaagagcgacccattcagagattgtccctgagacctagtactaccccccatgaggaaggagcagcaatggtgtcagtatccaggccttgtacagagtgcttttctgtttagtttttactttgttttgttttttaaacatgaaataaagaacccagggggagaatgggtgttgtatggggaggcagatgtggggggtccttctccacacccac

SEQ ID NO: 16950 - DNA, 732 bp, Macaca Fascicularis
taaaagttgatctgtatagtcaacatcttgaactatatttcaaatgaatttaaatatcttttaaagaaaaaaacacctaaaaataaatcttaacaaacaattctattctgattatatcaagccaaatttttcctttcttgcaaattgctttgtgtgttcaatgctaggtctgatagcgatagcttttagtagacagcggtaggtgcctgcagaacttgtgtttttctcatctttaaaatacaactacttatgctcttaaatcaaggctgtctgcttatttatactagcgtaggcaatacttggatttcccttcttagtatgcttcataactgctttacagagagcttttgcttgttctttctcatgtatctcgtgtttatgtgcacagtgccaaaagaagactgactgggtggagggaggctctgccttgcctcaagaaccatcccctgcagagcatccagggaggtttctcgccccaatagcctcatggcacagtactcttgggcagtaactggacaccttttatttgaacaaacaaactgaagaaaaaatgcttccttaagtgctgacagcctttttaaccaatacatttaaaattgtacagaacaaaaaaaaatcaaagactgatcttgtacagatactagtgttaccagcattcatgtggaaatcaagagcaaagacaaaataatgttaaacaactctgtatcataacattttctgtaatgatactga

SEQ ID NO: 16951 - DNA, 728 bp, Macaca Fascicularis
  misc_feature (1)...(728): n = A,T,C or G
ttgctcaacataggttgctgaggggtcagagcaagcanntgacttgtgcagtcccctggatatggggaggcccaccatgcttttattctgtatcgcttttgtctttactgtggctttcaacatttacatttggctaccaataactnnnnnnnnnnnnnnnnnnnnnnnnnnagtttcatcatcccactgtacttttttgtttttgnnnnnnnnnnnnnnnnnnnnnnnnnnnnnnnnnnnnnnnnnnnnnnnnnnnnnnnnnnnnnnnnnnnnnnnnnnnnnnnnnnnnnnnnnnnnnnnnnnnnnnnnnnnnnnnnnnnnnnnnnnnnnnnnnnnnnnnnnnnnnnnnnnnnnnnnnnnnnnnnnnnnnnnnnnnnnnnnnnnnnnnnnnnnnnnnnnnnnnnnnnnnnnnnnnnnnnnnnnnnnnnnnnnnnnnnnnnnnnnnnnnnnnnnnnnnnnnnnnnnntgtgagtgagcccctgtgcctggccctttttttttttttttttaagagatggtatcttgctgtatcatccaggctggtctnnnnnnnnnnnnnnnnnnnnnnnnnnctttaacctacagctacaggtaccccaactatacatttttaatgaggattcatggctcagagggattttctggtggttttgctgatttgtttctagttttttgtgtttaatttatatttaacatgaagaccaagtttatataactaggtatctgta

SEQ ID NO: 16952 - DNA, 706 bp, Macaca Fascicularis
  misc_feature (1)...(706): n = A,T,C or G
tgaaattctgnnaatttnnnnntaaaggaactgtaaagttttcacttggttcattttgtttcacaatttgactagatggactttttggtaaatactttagtggcatttcactgtcaaatatgaagttcaaggcaaaatagtattttctattactgtgcaggggaaagggatggatcgatacatgcaaatttaatgtagtaactcacttttccatgtattttgaatgtatatttctatttataataccaatttataaaaaataattacacaaaaaatggaataggaaaaattatgcgtctagcacatttaaactgtgcagatatgaaaatttttcgaggattacattttatctgaaggctgcatattttaactggctttaaaactgtaacacaccacataaaagatactttaccaggtatgtattgcattatatcattgcaataattattggaagtctagatatcgagccatcccaggtgttgggaggggggagggttgtggcaagattgtcttttcaattttggagagttttcctgtggctacaaggcaagtaacgggttggaaaaagtctgactgtaagcgttggacaccttcatagtgtagtgttttagtgactttttttatacggttcttgtaaattagatacgtgtagtggtgtttcagaatgtttgtttatgcactagttcagacaactttccctgttact

SEQ ID NO: 16953 - DNA, 840 bp, Macaca Fascicularis
  misc_feature (1)...(840): n = A,T,C or G
ctgcaacacaaacaggacacactnnnnngngggnctatcagatagttgataattctcagagggaaaatcaagaaggagcagcaaatgtcaacgtgagaggggagaaggatgagcagacgaaggaagtaaaggaggcaaagaagaaagataaatgatggagnnnnnnnnnnnnnnnataccaaagccttatgaaatggatgaaattttgttatgtaagcaaatgtggaattcctcacagattaaccagtattttttaaatgtattcattcctacaaattaactttcataaattttatggcatgtcttctatttaaaaggaaaagaataagtattcttgcatctggccttagaaatgtgaagtaatattctcaagtttattttttccaagtgtagctgaaatatttttgcaggtaaaataaagctaataatacatgtgctatttagaccttattaaacctaatgttgaactatttttatatctgctatatttcagaaagcaaattaggaaactatatatttgcttaaaaattggcatttagtaaccttaattctttttatagaaggcttaaagtattgtctcctctttttnnnnnnnnnnnnnnnnnnnnnnnnnnnttctcaaaattttcagtgtgtaagctaaacctaattctaaactaagaattctcaaaaagacttgttcaaaacggaaagactgatgaaaagtaaaatggactacttttgtaacttacctgtttgttaggaaatggaatggtctttttgatttaaaatgaataaaaatagattannnnnnnnnnnnnnnnnnnnnnnnnnnnnnnnnnnnnnnnctaggacatttgg

SEQ ID NO: 16954 - DNA, 796 bp, Macaca Fascicularis
  misc_feature (1)...(796): n = A,T,C or G
acagcacaataaaagtgttcatgttgctggcnnnnncatggtaaagcctggctcagtacagcctttcagtaaagaagagaaaacagtggcgannnnnnnnnnnnnnnnnnnnnnnnnnnnngcactttcctgctggactctggcctagttcaagctgaccaatggcagaggnnnnnnnnnnnnnnnnaactgtgtgnnnnnnnnnnnnnnnnnnnnnnnnnnnnnnnnnnnataggttctaacagcagggtttggaaacctgtctctaagtaatgcattacttctgtcagaagtgtcttagggtggttatctagttcagtactccaaattattggggaccttgaggcttaagtatttttctgaatataatgctaaaggtaagttgcattcatttaaactaatagagcagacagannnnnnnnnnncttaatagtttttnnnnnnnnnnnnnnnnnnntatatatgttaggaaatggagaggtatagagagagcaggttccatannnnnnnnnnnnnnagtggaagatcatttgaatctcagtcttcagcctgcactgatttgtagcctgcactgtcttactgatttacaaactgaaatcactgagaaatgtctttagttgggggagagaaaccagaacacttgttcctagtgttgtgttgtttttttaagcaaattacttactgtatttttatggcaggagggagaaaaagtgttaaaacggtttctaatgaagtccggtatttaaatgatgaatgactaatgtgtttagtagagacaaaataaaccaataaatga

SEQ ID NO: 16955 - DNA, 919 bp, Macaca Fascicularis
  misc_feature (1)...(919): n = A,T,C or G
gcagatgctggattagaaaaaattcannnnagcnnnnnnnnnnnnnnnnnnnnnnnnnnnnnnnnnnnnnnnnnnnnnnnnnaagtggttcagaaactgattccacaactcccaactctggagaatttgctgaacatctttatctcaaattctggaattgaaaaggcatttctgtttgatgtggtcagtaaaatttatattgcaactgatagtactccagtggatatgcaaacctatnnnnnnnnnnnnnnnnnnnnnnnnnnnnnnnnnnacatctcttgtatttatggtctcaaagaagatggagcagnnnnnnnnnnnnnnnnnnnatctacagccatcataaagcttaataatacaaccgtgctttatttaaaagaggtgacaaagttcctggctctcgtttgctttgtcagagaggaaagctttgaaagaaaagggctaattgactataattttcattgcttccggaaggccattcatgaagtttttgaggtgagaatgaaagtagtaaaatcccgaaaggttcagaatcggctgcagaagaaaaagggagccacccctaatggggcccctagagtgctgctgtaggtgaggtttcaggaacaccttttgaaaccannnnnnnnnnnnnnnnnnnnnnnnnnnnnnnnnnnnnnnnnnnnnnnnnnnnnnagattgggacacataccatggatttgttgtttaaaaaaaaaattcctgcaactctcttgatcttgtcttttataaataaagtaagcactttgaagcaaaaaacttgtatattaacagtgatgtgaaatccattgtcctttcattacacaaatgtaaacttttatggtctgtattcaaaaaaatcccatgtaagaactgccaggaactgtacatattttgcactttttcatgtttctcatgaatg

SEQ ID NO: 16956 - DNA, 808 bp, Macaca Fascicularis
  misc_feature (1)...(808): n = A,T,C or G
gcagcacaacagtcaaacnnnggtacagacgtgccaaaacaaagcccaagtgcactcaacnnnnnnnnngcctagtnnnnnnnnnnnnnnnnnnngccagaaaaannngaagagctacnttcagccctcccctaactgtccccaagcctctcctgacataaaactgcctagcccaccactgatgagcgccctcnnnnnnnnnnnnnntccagaagaggaggcagtggccaaagtggtgaaggggcgggccaaggcttcagaagccaaagatgagaaggaggtacggacctcattctggaagtctgtgctggcggggccctcgcgcacacccctctgtgggggccacagggagcnnnnnnnnnnnnnnnntgtgaagaagccaggacccaacctgggccgccgcttctatatgtgtgccaggccccggggtcctcccactgacccctcctcccggtgcaacttcttcctctggagcaggcccagctgaaccaatggaggcctggggacgtctggcatagtcacccctgcacgtgatctgaggccagctccccttccctgagctgcctcctgcttctccccgaaagtctcctacccttctcttcctcttcttagccctctcttcctcactgaccttcctacctagctccttgttggtgagctttttgcaccttaatgctgtgacccagcccgctacaccactttccaccttcctgtctgaagtacacagacactggctgccccgggaagttgtgtgattttaaatcacttctgtctttgctggaaaatgtatttgtgcataaataaagtc

SEQ ID NO: 16957 - DNA, 737 bp, Macaca Fascicularis
  misc_feature (1)...(737): n = A,T,C or G
agcaatgtgtgtttgcagnnnnnnngaaaaccannnnngcttttgtaaagcgtaaaaacatcacaaagtagttcattccatcaccacccttgtctctctacacattttgcctttggggttctggttggggttttgggttttttgttgttgttgtttatttgttattttagaggtaaattgcacttttgaaaaaataattggttgacttaatatatttgcttttttttctcacctgcacttagaggaaatttgaacaagttggaaaaaaacaatttttgtttcaattctaagaaacacttgcagctctagtattcacttgggtcttcctgtttttcctgtaccaggtcatggtcatttttggttgttttggttgttttcttaaaaaacaatttaaaacctgaagatttctgcaggctgtgtaagcatgtttacctgttggcttgctttgtgtgtctgtnnnnnnnnnnnnnnnnnnnnnnnnnaaaataaatcgacagtgtctcagaactgaatnnnnnnnnnnnnnnnnnnctctaaaacagtgtaggatttaagaatagatggtttttaatccttgaaattgtgattgtgacccatgagtggaggaactttcagttctaaagctgataaagtgtgtagccagaagagtacttttttttttgtaaccactgtcttaatggcaaaataattatggtaaaaaacaagtctcgtgtttattattccttaagaactctgtg

SEQ ID NO: 16958 - DNA, 780 bp, Macaca Fascicularis
  misc_feature (1)...(780): n = A,T,C or G
aatatannnnntatgctatgtttttgtgtctnnntgcaatgcctttaccnnnnnnnnnnnnnntatgagtagtgaattgagaacatcttgaattcttaaaagacttcttagtgactttttataaaaaggccatgtagaaaatttattaaaactactatgactgctacattcaggaatatgccaatggtaaagcatttaaatgtagcttgtcagattactataatccttctaatttctttgcagcttattaattttgtgaaatttgtatatatgaagaatttgcatgtatgtgtatttacaaatttttctaagtatcttgaattctcagactgcagaaggcctattttaactattgattttttaaaaaaaaaaatcttgtctttgaatgtattggaagttgacatgcattaactgtgacattattgcacctcagttttttttctttcttttttgggcaaactgatattatctgtaggatatttatgtttgttttttgggggaaagaaactggaactcagtgttaccttaaagtgatggaatactttgttttaaaggaagagataataagtttagttatatttttttgttaatattcaaatgaacttctttaagtatctatgtacagtaatgcctctttcatctagaggtaatctggcagtctcgtgaaaaccgaacacaactcagaaacttggaatcctttttttaaaaaatgcctttgagcaacccatataagtcacaaagtctgtgtgttagagcttatgcatnnnnnnatatgagaga

SEQ ID NO: 16959 - DNA, 761 bp, Macaca Fascicularis
  misc_feature (1)...(761): n = A,T,C or G
gtggatgacgctgaagataagtgtgaaaacatgacacacaattgaaaatggcatcccctgtgatcnnntggacatgaagggagggcacattaatgatgccttcatgacagaggatnnnnnnnnnnnnnnnnnntgaagggctgttgttctgcttcctcaagaaattaaacatttgtttctgtgtgactgctgnnnnnnnnnnnnnnnnnagagcagatcatatattttgtttcaccattcttcttttgtaataaattttgaatgtgcttgaaactgaaaagcaatcaattatacccacaaacaccactgaaatcataagctattggcgactcaaaatattctaaaatatttttctgacaatatagtgtataaatgtggtcatgtggtatttgtagttattgatttaagcatttttagaaataagatcaggactatatatatattttcacacttcaaagacctaaggaaaaataaattttccagtggagaatacatataacatggtgtagaaatcattgannnnnnnnnnnnnnnnnnnntcacttatatcactctgcatatgactaagtaaacaaaagtgagaagtaattattgtaaatggatggctaaaaatgaaagtattgatatacagggtannnnnnnnnnnnnnnnnnncaccaacagttgcttatatattttctgaatatcagcccctaataggataattctatttgttgaccatttctacaatttgtaaaagtccaatctgtgctaactaataa

SEQ ID NO: 16960 - DNA, 733 bp, Macaca Fascicularis
  misc_feature (1)...(733): n = A,T,C or G
gtgcctgccaccaagtgttcatcctgggatcgtatttttatatcatattcacatatttgtttttttaattggtgttagatgacatgattaataaaaaaggcaagatattttcagaatttgaatttcagttttttttcttttgaaatgtccctttaagatttttttattctaaacaaaataaagaaaatcttgctgctctggtccttgtaataagcctctattaggcacctgaggagcaactgcagcaaaatctaggggtgtcagtgtatcaggacttatgtgacttaccgtattttgggaagatgagggttgggttttttgtttgtttgtttgtttttgtttttttttttaatgctatgtnnnnnnnnnnnnnnnnnnnnnnnnnnnnctgggggtaaatcaattcctcaacccttgggtgtgtgagtttgaggcagggtcatttgtatgatgtgtttggccttaccaaagcaaaagagggtgcaagaatgtgggagtatgtctgccggtttcaacacacacagacaaacacagccacacgcgcacacaagtatcagactttttgtattaccgctcccttacttaacatacttgaattcttgaatttcctttggggtaaaaaaggatttgaaaccataaagtgttctgaagaaattaagtctataaaaaacatactttcttttttcttttccttttttctcctccacagacaatgtcctctgttcaattccta

SEQ ID NO: 16961 - DNA, 772 bp, Macaca Fascicularis
  misc_feature (1)...(772): n = A,T,C or G
ggaagagtatgtnnngntgttcaagaaaaannnnnnnnnnnncatttgannnnnncagctnnncngatgcnnnnnnnnnttgcnnnnnnnnnnnnnnnnnnnnnnnnnnnnnnnnnnnnnnnnnnnnnnnnnnnnnnnnnnnnnnnnnnnnnnnnnnnnnnnnnnnnnnnngctgcttccgcatcttctgctcatgttcctgtttnnnnnnnnnnnnnnnnnnnngcannnnnnnnnnnnnnnnnagaaatgtatgtgccaagagtnnnnnnnnnnnnnnnnnagaaagcaggaagaactattacagcccggatcacaggaagatgtgattttgcttcaaaaaatagaattagcagcggtttagctataatgggagtttctcctcccatgagctcagttgttgtggaaaaacatcatccagtcacagtgcaaaccattcctcaggcaactgcagcaaaatatccccggaccattcatcctgaaagtagtacctcagcttccagatcacttggaaccagatcagctcacaccccgtctctcacnnnnnnnnnnnnnnnnaaagtggttgactaaagtgaatatgtccatagtggggtcttttaatccctctggtcttaccaagggttagaagtcttttgtttttaactttttcatattgttagaacatcatggatacatcacgttcatctgttcaaaattaacaagagactttttcaaactctaccatgctttgtaactatatgtagaaattattttaatgttattttttatt

SEQ ID NO: 16962 - DNA, 718 bp, Macaca Fascicularis
  misc_feature (1)...(718): n = A,T,C or G
gctcgggcttggcggcctacgcggtgtgggcgatgctgntccagcccggcttccggcgcgtgccgctgcggctgcaggtgccctacgttggcgcgagcgcgcggcaggtggagcacgtgttgtcgctgctgcgaggccgccccggaaaaacggtggatttgggctctggcgacggcaggatcgtgctggcggcccacaggtgcggcctccgcccagccgtgggctacgagctgaacccgtggctggtggcgctggcgcggctgcacgcctggagggccggctgtgccggcagcgtctgctatcgccgcaaggatctctggaaggtaacctggggagccctggccacccgctgacagcccagggtgcgnnnnnnnnnnnnnnnnnnnnnnnnnngggactcggaagctgccgttaccccgtgcccaccaggcctgtcccccgctggggcaactcctcttccggcagctcccactgctggaggacaagctgagagcagagctgcctgccggggcccgcgtggtgtctgggcgcttcccgctccccacctggcagcctgtggccgtggctggcgagggcctggaccgagtctgggcctacgatgttcctgggggtgggcaggctggggaggccgtctcctcgcggatacccatccaggctgccccctgacctagttctgcctccgtcctgggggccctttttctcagaccagctgagtgtt

SEQ ID NO: 16963 - DNA, 756 bp, Macaca Fascicularis
  misc_feature (1)...(756): n = A,T,C or G
aagagnnnnnnnnnnnnnnnnnnnnnnnnnnnnttcctggacaannnngatgcnnnnnactactttccagacagtgggtnnttctgtgaagagaattccagtgatgatgacgtgattctgaaagaagaattcagaggggtcattatcaagcagggatgtttactgaagcaggggcataggaggaaaaactggaaagtgaggaagttcatcctgagagaagaccctgcctacctgcactactacgaccctgctggggcagaagatcccctgggagcaattcacttgagaggctgtgtggtgacttcagtggagagcaannnnnnnnnnnnnnnnnnnnnnnnnnnnnnnnnnnnnnnnntcatcacagcagatgaagtgcactatttcttgcaagcggccagccccaaagagcgcacagagtggatcaaagccatccaggtggcctcccgaactgggaagtaaagacactcctgcattcctcctcccctcctgcgggaagcccacggacaagctcagtccaggacctgtccacttccgtgacaaatcaacaggaaagagcccaggggtgggaagttttcatgtgcaggggggctgaatgtaactcatcacgtggcgcacaagcttcccctgcatcctattgctcactgcagccgctccgcccctctccatgacccccaagcagatagaacaagctgtgcagcctcagtaggctgcttgccctctccaggcctcagggcctcttctggaaaatgaaga

SEQ ID NO: 16964 - DNA, 790 bp, Macaca Fascicularis
  misc_feature (1)...(790): n = A,T,C or G
ccatggtgctcagcnncttgaaacannnnatagannnnnnnnnnnatttcctacagttcttgatattacagcggaagatccatccaaaagctatgtgaaattacgagactttgtgcttgtgnnnnnnnnnnnnnnnnnnnnntgtttttcccgggaaaaattaatgcaaggattcaatgaagatatggcaatagaggcacannnnnnnnnnnnnnnnnnnnnnnnnnnnnnnnnnnnnnnnnnnnnnnnnnnnnnnnnactagtaannnnnnnnnnnnatgccgaacaatacagaagttatagactggatattaaaagaagactaattagcccatataagaaaaagcagagagatcttgctaagatgagaaaatgtctcagaccagaagaactgacaaaccagannnnnnnnnnnnnnnnnnnnnnnnnnnnnnnnnnnnnnnnnnnnnnntttcaggaactnnnnnnnnnnnnnnnnnnnnnnnnnnnnnnnnnnnctcaagagtaaagattnnnnnnnnnnnnnnnnnnnnnnnnnaaattttctgtacaatgtgctgtgaaaaatctgatgactttaattttaaaatcttgtgacattttgcttatactaaaagttatctatctttagttgaatattttcttttgcagagattgtatattttaaaatactgtttagagtttatgagcatatattgcatttaaaaaaagatatagcttctgaaatactactgcaattgcttcccttcttaaacagtataataaatgcttagttgtgatatgttaatgt

SEQ ID NO: 16965 - DNA, 752 bp, Macaca Fascicularis
  misc_feature (1)...(752): n = A,T,C or G
tgccaacagcccttaccaaagctgggagccccatcgccccagcagctctgacctgtggttccagaagccaagaaagctccactggggcttgcagaatccnnnnnncacctaagctgcacagttcctgcagctttgccagccccacaaaactactgtgcaccccacctctgaagatgctgggggaggcagccaggatgggagccagccccatgcctgtctgtgaccccacagtgggtgagagcccgtcacagtccagggtgtggccgctctggaagaattaggaggcagnnnnnnnnnnnnnnnnnnnnnnnnnngaggggccagtgaggacaggaaccgagagtagatgtcccagaataaagaggcttctgggaggtgcccaggtacagatgtctgttcagcaggtgtgtgggcctagaggagacagcacagcccagaaatgtcttctgcaggcccacgttgtgacttgaagctttcatgggcatgtcgccattgggttttgcccttgcaaagacttcctaggtctccaatggcccctnnnnnnnnnnnnnnnnnnnnnntgcttggggatgtgcactgctggccaccagccttgcagtctccctaccctggggaggagcagtggctgcccagagcgcagggcatatagcagaagacacgagttgatttttgtgttgggtttggggtttctttgtcctcaaggtactgttctgcttctctttactcctctgctttatttattgtaagcattc

SEQ ID NO: 16966 - DNA, 361 bp, Macaca Fascicularis
actgggtacagatggcaaagtcaagagagccaatggcggaaagaggagagtagagagtacacgcagatgttgaggaagttgttcacagcaatctgtgccctgtttttgggtgtgtgtgtcttgaaagtcacagtgtctttgggttctctgggagagaatatttgaaaaatgtgtggccagagatcccagcccccgaatgaggaaggatctgagaagagagtattgggggagaaattggtgcccccctctccctctagggagcagacatccacagtcattgtcttgtgagaggccaaagaccccactgggatgcgcgcatgtgtctgtgtggggcagcccagggcccccactcttgggtctt

SEQ ID NO: 16967 - DNA, 734 bp, Macaca Fascicularis
  misc_feature (1)...(734): n = A,T,C or G
tgggagcatgcaaagatggggacttggataatgacttaagctttatatataaagaattttagaagannnnnnnnnnnnnnttcctgctggaggaatgaatagatggctgtttcagttaagctattagtaataaaagtgaacattgctactatctgagccnnnnnnnnnnnnnnnnnnnatttcannnnnnnnnnnnnnnnnnnnnnnnnnnnnnnnnnnnnnnnnnnnnnnnnnnnnnnnnnnnnnnnnnnnnnnnnnnnnnnnnnnnnnnnnntaatttctctcattagttttttaaattcagggttctggatattaaattataatggcattcttaaagattttcttcaaaaagcaatcctaaatgaaagtgtgtaaattacaagaagctggcgnnnnnnnnnnnnnnnnnnnnnnnnnnnnnnnnnnnnnnnnnnnnnnngtcttgtgcagtagttgtgtttccagcatcgaagttgtgggatatgttgctgtagactgctgcgcagtcctgggtgcattctgtgtctctgcctctgcctgcctcctggtcccccctttaaaggttgtgcagctccttaaataataaagctggaaaacatttttagtcaggttatcacatttgatttacaaaaacgctaactttgtttgaaannnnnnnnnnnnnnnaaatatgtattaagtactttgtattctggaagcgtgaattgcttttgaagtctgtcagtattact

SEQ ID NO: 16968 - DNA, 751 bp, Macaca Fascicularis
  misc_feature (1)...(751): n = A,T,C or G
ctttgctgtgtagatagccagtcagccagcagtgttagtgctgttttcaaagatttaagctctgtaaaattgggaaattatctaagatcgttttccctaagcattgacacatagcttcatccgaggtgagatatggcagctgtttgtatctgcactgtgtctgtctacaaaaagtgaaaaatacggtgtttacttgaaattttaactttgtaactgcaagaattccaattcagctgggcgaggattaatattactattactatttttaactctccataggattttcagtactaccaaattgttttggattttttaatttcctcttcacataccagggttatgaaaagtgtgctttctttttaacattatattacagttacaaagtaaaattcccaactgctatttatttnnnnnnncccagtaccacaaagaacgtttcaccataatgacccctccagagctgggaaacctaccacaagatctnnnnnnnnnnnnnnnnnnnnnnnnccaactatggtctttatttcttgtggtaatatgatgtgcctttccttgcctaaatcccttcctnnnnnnnnnnnnnnntatttaaatgtcttctaattcagtcatttttttttataagtatgtctgtaaacattgaacttttaaaaaatcttatttatttattccactactgtagcaattgacagatgaaaaaaaagtaacttcataatttcttaccataacctcaatgtctttttaaaaaata

SEQ ID NO: 16969 - DNA, 706 bp, Macaca Fascicularis
  misc_feature (1)...(706): n = A,T,C or G
aaaattattgactgtaaacaggtaaccttaaaatacagagaaggaagcaaagttactaaacctaaatggttgtgggcctgcgctcaaagccaggcctttgttaaaacggagagtagcagatacaagtgttaacatcaaacnnnnnnnnnnnnnnnntgaatctgaaaaagagctggccggggaatgccctcctcacaccccaagccnnnnnnnnnnnnnnnnnnnnnnnnnnnnnngccagccttcactctagttgttttgtccccgcatcctgtactggggtatggattctctggcctcccctaaggacagaagcctgaggctttgcctgnnnnnnnnnnnnnnnnnnnnnnnnnnnnnnnnnnnnnnnnnnnnnnnnnnnnnnnnnnnnnnnnnttggggcccgaaaacctcagtatgacatctggnnnnnnnnnnnnnnnnnnnncagccgaatggagagcaccggagaacttgggaaaatccaggtaaagacccatcggggaagcaggtaactgaggggaaaggatcttccccagaagtgagaggacttgggcttaagagctgctgtctcaaccagcagccatggttctagggttctagctatcacactctccggggaaggcaggctgcgtgcctgggcggtctctatctgtccctaccatgacaggtgttcttcccgcctctgangacacaggtcttcttc

SEQ ID NO: 16970 - DNA, 1650 bp, Macaca Fascicularis
  misc_feature (1)...(1650): n = A,T,C or G
ttgtgggctttgcttcctacctccttcaccgctccactcctgccctcctcttcctccttcacttcctcctcctcctcttcctacctgtctcctttcacctctgcgccgggtcagtcctccctgccaaccgttccccagctccaatatgtagcagtctgtggatggcggagagtgaaggagaaacctgcccccctcccttcctccgcctcctttcccccgatcctattcttgttttaagtcaaaaatgttgatacgtcattatgcactttnnnnataaggggagggggccacagcgcgcataatccatccccccccagtgcagacttcggggcctccaccccaggccagcagcacccaatgggcgacagcaagccaacaggtcacagaagccaacgaggggactgtttctcttccactcctgtccttttttcttggtctctttttgcattttccttcatttctttaaaaaggggagcaaagccgttttagcatagaggctggggctggggtccgcacagggtttgggtgcaggggcgtggcaccctttcctgcggggaagggagaggggaactacaccccccagcccgccctccgccccgccccagccggcagactgtgctgtttcctccgcccccacccccatgttttctgacctgcctgagcttggggtatttatagactattannnnnctgactcannnnnnnnnnnnnnnngaactcttgaaaaaggggagagaatggctgggtgctggggagttcccccctccgagccctccttcctggcccaacctgagggacgtggatttgggactgtctgggggcccctcnnnnnnnnnnnnnnnnnnnnnnnnnnnnnnnnnnnnnnccctgggcagggggcaacaactccgtgtagcattaacccccgtggcggggtccgctgctggtctaatttggaccccccgcccctcggtgcccctgccctaggggtgtctggctccagaggnnagggacaaatcccctcctggggccatttcaatggggtagtttttgcatttttttttccccactcactttttattttttaatgataacggagatgtctgggcccttccccaccccgcctgttggtcttgtcctggccctgcctgtcccctcctttgttctcgtaggtgaaccccaggtcctcaactcccccctttacgtgtggaaagttaatggtttcagatgtgaacatcacgtgttgtaactgtagctctgtacatttttctgtggggggtgggcagggaggggtcccagagggtagagctcaaggatttggggttttgtttttttttttttttccaaaaaaaaaaaaaagaagaaaaaaaaatagaaaaaaaaaaaggagaaacaggggcgggtttgttttttgaagaactgtcttggataccctatttaaatgtgtgttctgttttgttttttaacgatttttaaataacgtctgtgcctccgtgggttgcgggtggaacctccaggcaggaaccggctcgccaccctctgccccgtaagggctgcccaannnnnnnnnnnnnnnnnncggggggtcgggctgtgggggtcccggcacctggcgtgactttcatgtatgaaaacataaaattaaaaaaaaaaatacctacacgagcaccg

SEQ ID NO: 16971 - DNA, 666 bp, Macaca Fascicularis
gagattattagtaaaaatacttaaaaaagtccttagagtaataatttcaaccaaatgaatttcaggcaacaatttactatttatcaaaaaggaatttaattatttttaatgtaattacaaattaaatttcaaatatttaaaaatactattttatataattctttatgacattttaaactttatattttaaaatatttgaatacaaaaagatcagtctacctctactccattctagacaaagtattaatccttagtgaaagtaattaaattgctgacttggcattattattaaagttgataggaatgcaacattaaatttaaaaatgtttcccgtgggtaattttctattatatattttcatatggaaagggaaaaatgataaatcctctgtaatcacaaaccccaatttcgttttgtttattcagcttctaaaatattgaacgcccagacttttaattcaacctttaagaaccttatcatttatgtttcagtagatatgaaagtaatccatgtttgtgtcaaacgatcatagaaaataaatagagacagtcaagcaagtaaaaagaaaagcattgttttaatttgtttgcatttttttcatttgtcaaaatgcttcttttgttgccacagtaaagaacggtttttattgttttgtaagtaaaatta

SEQ ID NO: 16972 - DNA, 600 bp, Macaca Fascicularis
  misc_feature (1)...(600): n = A,T,C or G
gccntacatgatgggttccgccacgtccagaagatttcagcagaggcagacgtggagctcaacctggtgcgcattgctatccagaacctgctgtactatggcgttgtgacactggtgtccatcctccagtactccaatgtatactgcccaacgcccaaggtccaggacctggtagatgacaagtccctgcaggaggcatgtctatcctacgtgaccaagcaagggcacaagagggccagtctccgggatgtgttccagctatactgcagcctgagccctggcactactgtgcgagacctcattggccgccacccccagcagctgcagcacgttgatgaacggaagctgatccagttcgggcttatgaagaacctcatcaggcgactacagaagtatcctgtgcgggtgtctcgggaagagcagagccaccctgcccggctttatacaggctgccacagctatgacgagatctgctgcaagacaggcatgagctaccatgagctggatgagcggcttgaaaatgaccccaacattatcatctgctggaagtgaggctggtggtggctggatggacacattgctgtgggtagtccctcctac

SEQ ID NO: 16973 - DNA, 688 bp, Macaca Fascicularis
  misc_feature (1)...(688): n = A,T,C or G
tgacaatgtgatnnccccggatgctgcagccacggaggagccgaggaccttccagacgttcggcaaggcagaggcaccagagctgagcccaacaggcacaaggctggccagcacctttgtnncggagatgagctcactgttggnnnnnnnnnnnnnnnnnnnnnnnnnnnnnnnnnnnnnnnnnnnnnnnnnnnnnnnnnnncggctctcggtctgcgggaggaccctcagtctagacttggccaccagtgcggcctcaggcatgaaagtgcagggggacccaggtggaaagacggggactgagggcaggagcagaggcagcagcnnnnnnnnnnnnnnnnnnnnnnnnnnnnnnnnnnnnnnctggatccaagaatcaggggcctgaggatctggggacatgagctggtttctaaaatcttataactcactagctagtggtggcctgagaactttagggtgactgatgctacccccacagaggaggcaggagccccaggactaacacctgactgaccaannnnnnnnnnnnnnngcggctctgagtcttttggaggacagggacagtttgtggctgaggcaagtnnnnnnnnnnnnnnnnnnngtagagcacaaagggtcagtcctctggcagaacagatgccacggagtaccacaagcaggaaaggatggccttcttgagtagcag

SEQ ID NO: 16974 - DNA, 716 bp, Macaca Fascicularis
aacttggtggggcctcctttaaggatgagccaatggtaagaatgtggctgtagtcagcagagacccctctgaggggtatctgttctgcatcccctagtgaaatcatgtgagacagaaacctaaacatggtaattgattctaaacctgtgccagtctatagcctctgcctccccaatcagagctcaagccaaactctcctgtcctctttccttctgcattaaccctttgctgatcctcaggggccactcccccaacacccctgtacttgggtgagggatgttggacagagcctgttttcatgtactgcaggtgggggtgtgctgacatgtttgctcttggttgatggagaaggtacagaggccagggagtgaaaatggttgacagtaagaagggggaagagttaggtgtctcatagtcactcacagtggggtggtcaggggtagtggcatctccccactttagggttctcaaacagactttggacacttctcaagttcagatgttttacaggtgagctctgatgtggaaagacaggaggtatggggaaggagggggatttcgtgtgtttgcatgagtgtgtgtttcaggccttgggagttggcaagagggagggaaggaaggagagtaaaatcttcggaaggtgtttcttgtatctgggggaatcctactctgaatctccatagtctccactgtgaactgaggaggggaggggtgtg

SEQ ID NO: 16975 - DNA, 742 bp, Macaca Fascicularis
  misc_feature (1)...(742): n = A,T,C or G
tgacatcatcaagtnnnnnntgggccaggctctgtgtgtactactcggaagaaaactggagtggggtatccacagctcagtgcagtaatggagtgtgcagatgctgctcatggcctcaaaggccacatcatttcagatggaggttgcagctgtcctggggatgtggccnnnnnnnnnnnnnnnnnnnnnnnnnnnnnnnnnnnnnnnnnnnnnnnnnnnnnnnntagtgagtcaggtggtgagctcatcgagagggacggcaagaagtacaagctcttctatggaatgagttctgaaatggccatgaagaagtatgctggggnnnnnnnnnnnnnnnnngcctcagagggaaagacagtggaagttccttttaaaggagatgtggaacataccatccgagacatcctaggagggatccgctctacgtgtacctatgtgggagcagctaagcnnnnnnnnnnnnnnnnnnnnactaccttcatccgagtcacccagcagacactcactggggaggaagcaaggaagaaaacagtctgagaaaatgacgcaagataatcaaatgggaatctggggacccaacatcctgaagattattaaaaggaaaagatgctgattggtacataagtctcttatatgaccttggtctagaggaggcaggcttttagaatcatgttttgttaatctgcttcactaaatgggaccttcacatatctaaaaagcnnnnnnnnnnntgtatattgag

SEQ ID NO: 16976 - DNA, 668 bp, Macaca Fascicularis
  misc_feature (1)...(668): n = A,T,C or G
tttaagttgccctttagggaataattgcggtatgtgtagagactctcttgggatgcacttatatttttatttaatgactacttgttttctagttttgcccacaacgtgtgaaaccactaagacattcaggagcatgttgggcttctggtttggaaactgcaagacccgccatttatgacaaggacagccaagaggttaatacttggagtttaactgcctttcctttgaactagttaaaacctgtaagaataaggaagttgttggagaggcttaaaatctgggttctgaaaaagtagtttcagtttataggatagacatttactcactgagctccagttccagtactaaattagacaggatcatatagaccgaaaatgaaacgctagaactgccgttctttggatcgtccctctatgggggtctgtcttttaactactcttctgnnnnnnnnnnnnnnnnnnnnnnnnnnnnnnnnnnnnnnnnnnnnagaccactttatctgcaaatgtgttccagtttttatcagctacctactacacagcttcagcgccagtgtgaatttattttttttaagtgccattaccatctctgttcagattttgacattcaggaaaatatttttattttgatgccatactgaaatctacaatgtatatctgacaaagcag

SEQ ID NO: 16977 - DNA, 659 bp, Macaca Fascicularis
gctgcctgggaccctgatgcggggagcggcccttgagggccccggagccacggaatagctgttgcaggacgtggaacccacgggcagccgcaggtgtgcccttgggggccagaacgccaggggcttccgaggtgttcacacctgcgaaccgccccaacctggcccccagactccttcctccgagttttggaaagaactacagctggcgctgccgcggaaggtgcattacaggccggtggaaggagacccccagacgcagctccaggacgacaaggaccccatgctgattcttcgaggccgagtcccggagggccgggccctggactcagaggtggacctggaccctgagggagacctgggtgtccgggggcctgtctttggagagccatcagctccaccgcacacgagtggggtctcgctgggggagggccggagcagtgaagtggacgtctcggaccttggctcgcgaaactacagtgcccgcacagacttctactgcctggtgtccaaggatgatatgtagctcccaccccagagtgcaggatcacagggacagcgggggccagggctgggggatcgctcctctgctcagcaggaccacaccccctgccagcagccctgggaccctgggggaaaaggctgtggcctcaggggtgcct

SEQ ID NO: 16978 - DNA, 692 bp, Macaca Fascicularis
  misc_feature (1)...(692): n = A,T,C or G
ccccagcgggccctctggagnnngccctgcccctcccctagccccccatccctcgcgtctgggctgtcatgctcttggtgtgccccttgcactggggctggctgggttggaaagtgggctggacttcagttgcctttctacccccaatggcatctgcccccttagcagtcactgtgttggggagagagtgatgattgcaatggctggggctggagatgggagtgggattgaaggaaaccctctcctctccccttcccttctctctcctgtccatgggaagcttctctccctctgcaggactccctcagatgggctgtcgtccctgcttctcttatgatcgccccacctcgtttccatttcagtctggggaccccgcttctccctcctttccaacttccttcctttcttgtcctgtttcccttcctgcccttgcagtcttgaggtcttgcagccccggcccctcttctgtgacctggtgtggccaagttgcggggacgggaggggatgtgggggccccaggtgtatatatataatgtatattttttcaatgttgtcgtgagtgcagcccctgtgttcccgtgtgcagctcacggcctgtgtgtgtgtgtgtgtgtgtgtgtgtgtgtgtgtgtgtgtggcatcgtcatgtcctggggcaggggcggggggatgggtgtggtgagggaagggac

SEQ ID NO: 16979 - DNA, 705 bp, Macaca Fascicularis
  misc_feature (1)...(705): n = A,T,C or G
cttttaaaatcaactgtttgaatagaggcagagctattttatattagcaaattagagctactctgttaacatttcttacttaacatataaactttttttttttacttcttctggtcggattttttttttttttaagcataattggaatccttggataaattttttagctggcacactctggcctgggtctctgaatccagcctgtcaccgacggctgactgatgaaatggacatgtctgatctgacgcactcttccttccactgaaggtcttcaccggcctccaggtggacaaagggatgcacaggcggctcgcatgccccagggccagctaagagttccagagatctcagagttggttttatgagtcatgagtacagaaacagtctcaaacttgtacaattttttttttcccttttgaaagcccctggggccaatttgtggttaagaggtggtgagataagaagtggaatgtgacatctttgccagttgtcaggaagaatccaagcaggtattggcttagttgtaagagctttaggatcaggccgaatatgaggacaaggtgggccacgttagaatctgcagggatcactctggaggcttctgtttctacattctgccacgagagctaggtccttgctcttttctttagatcgaaagtctgtctctgaacacacattattnnnacaaggnnnnnccctctacca

SEQ ID NO: 16980 - DNA, 617 bp, Macaca Fascicularis
  misc_feature (1)...(617): n = A,T,C or G
cnnnannncacccnnnacccccacccttactcccacccccacacctcaatcgtcagaggtgccacggtgggccagagggtgccggctctggctgtccctgtgccggtccctcacaaacctctctcgccttttgaaactcaagcacagctgcgaggagggcagccaggagggacccctctcgcactggtggtctctttcccccgctgtgtcataggtagcggaggaagcgaaggaagtgaacgctgaatgtgacacatttccgaagagctcagctgtcaccgggcacagcctggaagccccaagtctgtgctgactttgcctggccgtctctctgacccgcctcctagatcgttgtccttgatgtctaggccgggccatttaaagtagagccgcagtcaggaaggttgtgagactcagggctgtgctggattttgaggccttgctgatgtattcgtgtcagccgctgagccacaggccaggtgcccggaagcagcctctcgccacacaggcagtgatttgcgatttgcgattactttaaagcccacctttcttctctccctcgctgtttgctgctgtcagcacaatgattgtgttccttccctatgggatcctctttt

SEQ ID NO: 16981 - DNA, 782 bp, Macaca Fascicularis
  misc_feature (1)...(782): n = A,T,C or G
caagagccgcgacaaggccaagatgcgcaacctngagacgcagcacaaggtcttggagctcacggccgagaacgagcggctgcagaagaaggtggagcagctgtcgcgcgagctnnnnnnnnnnnnnnnnttgttcaagcagctgcccgagcccctgctcgcctcctccggccactgctagcgcggcccccgcgcgcgtccccctgccggccggggccgagactccggggagcgcccgcgcccgcgcccccgcctccgcccccggcggcgccggcaaaactttggcactggggcacttggcagcgcggggagcccgtcggtaattttaatattttattatatatatatatctatatttttgtccaaaccaaccgcacatgcagatggggcgcccgcccgtggtgttatttaaagaagaaacgtctatgtgtacagatgaatgataaactctctgcctctccctctgcccctctccaggcgccggcgggcgggccggtttcgaagttgatgcaatcggtttaaacatggctgaacgcgtgtgtacacgggactgacgcaacccacgtgtaactgtcagccgggcnnnnnnnnnnnnnnnnnnnnnnnnnncctaacagggcttctgttgatgttttgttttgttttgttttttggtctttttttttgtattataaaaaataatctatttctatgagaaaagaggcgtctgtatattttgggaatcttccgtttcaagcattaagtaagaacacttttaataacccctcttttctcatagaaat

SEQ ID NO: 16982 - DNA, 928 bp, Macaca Fascicularis
  misc_feature (1)...(928): n = A,T,C or G
tcaggtcattatgtatcatnnntgaaaaggaaacaagatgaatggattaagtttgatgatgacaaagtcagcatcgtaacnnnnnnnnnnnnnnnnnngctttcnnnnnnnnnnnnnnnnnnnnnnnnntacgttctactctatgggcctcgcagagttgaaataatggaagaggaaagtgaatagtagtcttcattttagctatttatgcttaggtgtgaaaataaatgttannngctgatcatttctataatccagagctttagaggaannnnnnnnnntggttttatctgtttcccctcgtttgaaacaagaggacagaagcagaccactctgtgcatcaacctaaaaaattacagaaaagagaaaattatctttggattgtgctgccctgtatnnnnnnnnnnnnnnnnnnntttttaaaagcttattatttcttgcattatttttaaaaattctgagttgaaatgcctttcaaccatttctttctgtggtcatttttcttgctgcctttttcacccaagattcagcaatcagatgtttattgcacacctattacctattatttgttgttcttgcatggttcaaaccaccattctatagccacccatcctttgccttatctaacaaacatttttccaggaaggtggaaaaggaagttttgctctcattgtgtaactcagtgctgctgtccatcccatggaaacatgggcacaatcaagtatttgtccagcctgtgcaggcnnnnncatgactttaaaataaattgtgatcagtaatagtacatttgattatacatttattattgtgtctctctctgatgtactgtggattgtacatttaactttggaatggctttgtaataatcaatcttaagaaaatgttgacaagctctggttgcttacttttagaaaatgaggacattaat

SEQ ID NO: 16983 - DNA, 745 bp, Macaca Fascicularis
  misc_feature (1)...(745): n = A,T,C or G
tggcctggctttgcactgcaagccctcggtcaagatatagtcaaataactatggctgcaggttccacagttccacaataaccatggctacacgatccacaattcaaacagacacagagctggggtgcacaggaggggcaggagggcggcagagtgcggactgtccccagccctggcctctccatgtggagttgacccaggcagacacaccccatggaatgatgagagtgatggcatggccccttcccacagcaagcctagggctgccaggaaactgcccttcagaacctttgggcccaggtcaccctgaagccccacaactttttatctggattagttattaaaaaacaataaattaaaattaagcaacaacttggtcctgaggatgctgagccagcatgtccacagtttttggcacaaaaaaattaggatctgttttgcttttttggagtgcagggtttgttggcttgtcttcattttcaaaacacattcccagtgaggtaagaccccagggggtagagctctgtaagagcctgaacctgggacacagtcgagtcagccagcaccatgctctgtatcctcttggggaacagggactagggatgggggtgcgggccaggaagagtgtgcagccagcaggatggggtcgtggagaggccgagctgccacacagcagctttggtcgagatgagggccaggccccaccctnnnnnagggcnnnnntggnnnnaggagcctgtgctgtc

SEQ ID NO: 16984 - DNA, 704 bp, Macaca Fascicularis
  misc_feature (1)...(704): n = A,T,C or G
tcactgcataaagcaaacagtcacagggggtgattcagaaattgtagatgggtttaatgtgtgccaaaagctaaaacaannnnnnnnnnnnnnnnnnnnnnttttatcctctaccttcgtggactttacagacattggagtggattactgtgatttttctgtacaatcaaaacacaaaattatagagttagatgataaaggccaagtggttcgcatcaacttcaataatgcaactagggacacagtatttgatgtgcctgttgaaagagttcaacctttttatgctgctctgaaggagtttattgacctcatgaacagcaaagaatccannnnnnnnnnnnnnnnnnnnnnnnnnnnnnnnnnnnnntnnnnnnnnnnnnnnntacttcatggccgacgtagctatgaagcaggaactgagatatcccgccatctagaaggagcttatgctgactgggatgtggtcctgnnnnnnnnnnnnatcttaaggcagagggtcgagaatggaaactgaagtctcccgtagataattttaggaagattccaatgagtatattttgtaagatatgacacattattcacagaccatgattttgtcatttacatataatttccttaacaatgaacatgtaacttctctcacaagagtactctttactttgtaatcatatacaatgtcaactttttagatnnncaccactctt

SEQ ID NO: 16985 - DNA, 886 bp, Macaca Fascicularis
  misc_feature (1)...(886): n = A,T,C or G
gaccttttataggtaatgaagcagttcaaaacttgaaagaaaacaaaacctgtcctcagaattctataaaggttattaagaatgttccttaaaggtttaagaagcagtaagcagcatctgaagccacaatctattataaatactttatttcaactagaaggtacaatctctcaggggtttcatagtttaaaaagctacaatcacatcatgttgtaactacataaaaaacagtgctgtaaatggaactgcttggctttgaccatacacatttctgcacagcccttacagaatctgcacaaagaagtatctccctttgctccagttaattgttcttgtacgtaagttgctttctattccagtatatccagagtggtgaaataacaaggccagccacgtagccaaaggnnnnnnnnnnnnnnnnnnnnnnnnnnnnnnnnnnnnnnnnnnnnnnnnnnnnncagcggaataggaagtgctccaagccatgctcctacaaaactagaaattgtagtcatctggagactattctcccatatggatgaaactcnnnnnnnnnnnnnnnnnnnnnnnnnnnnnnnnnnnnnnnnncctaacaaacacaagcaaggcacagtagtaaaagtagacaaaataactgcaaataaaaatgtttccaatgccaacnnnnnnnnnnnnnnnnnnnnnnnnnnnnnaattacatgaaaggagaaacaagacataagaaagtagatacagcattnnnnnnnnnnnnnnnnnnnnnnngataatgaacttcttttagaggatgtatttggtttcaccgctaaatatagtactagattgannnnnnnnnnnnnnnnnnnnnnnnnnnnnnnncatgtcaagtgtgtttccatattgagaagtc

SEQ ID NO: 16986 - DNA, 730 bp, Macaca Fascicularis
  misc_feature (1)...(730): n = A,T,C or G
ggtttaacttgcacagaacaaaattttatatcannnnntgnnnnnnnnnnnnnnnnnnnagaacatggtcttgttgtcattgctccagataccagccctcgtggctgcaatattaaaggagaagatgagagctgggactttggcactggtgctggattttatgttgatgctactgaagatctttggaaaaccaactacagaatgtactcttnnnnnnnnnaggagcttccccaactcataaatgccaattttccagtggatccccaaaggatgtctgtttttggccactccatgggaggccatggagctctgatctgtgctttaaaaaatcctggaaaatacaaannnnnnnnnnnnnnnnnnnnnnnttgcaaccctgtacnnnnnnnnnnnnnnnnnnnnnnnnnnagtggatatttgggaacagatcaaagtaannnnnnnnnnnnnnnnnnnnnnnnnnnnnnnnnnnnnnnnnnnnnnnnnnnnnnnnnnnnnnnnnnnnnnnnaggaaaagatgaccagtttcttttnnnnnnnnnnnnnnnnnnnnnnnnnnnnnnnnnngcctgtacagaaaagaaaatccccgttgtttttcgattacaagagggttatgatcatagctactacttcattgcaacctttattactgaccacatcagacatcatgctaaatacctgannnnnnnnaaaactccaaataagagnnnnnnnnnnnnatataaaa

SEQ ID NO: 16987 - DNA, 721 bp, Macaca Fascicularis
  misc_feature (1)...(721): n = A,T,C or G
agtgatgctggagaaagagangnnnnggcannnnagccnnnactggnnncagcgcccctctgagcttcatccctcgccacttccgacccaagggggcaggcagcaccaccgtcaagattgtcctgaaggagaaacataagaaagcctgtgtgcatggcgggaagacgtactcccacggggaggtgtggcacccggcctttcgtnnnnnnnnnnccctgccctgcatcctatgcacctgtgaggatggccgccaggactgccagcgtgtgacctgtcccaccgagtacccctgtcgtcaccccgagannnnnnnnnnnnnntgctgcaagatttgcccagaggacaaggcggaccctggccacagtgagatcagttctaccaggtgtcccaaggcaccgggccgggttctcgttcacacgtcggtatccccaagcccagacaacctgcgtcgctttgccctggaacacgaggcctcagacgtggtggagatctacctctggaagctggtaaaagggatcttccacttgactcagatcaagaaagtcaggaagcaagacttccagaaagaggcannnnnnnnnnnnnnnnnnnnnngcccccacgaaggtcactggaacgtcttcctagcccagaccccggagctgaaggtcacggccagtccagacaaagtgaccaagacattataacaaagacctaaacagttgcagatatgagttttata

SEQ ID NO: 16988 - DNA, 1077 bp, Macaca Fascicularis
  misc_feature (1)...(1077): n = A,T,C or G
ggctttgcagtgcactttggggaacagatattaacttatttttgtgtttgacagtagtgaaatattgtgacttttaatcgctttgataatacttccaaattatgatctttctgaaggaaatactgcaaaaattttaaatatggttcctccccctttccaaaacctgttaaactaatgagcaaataacactaactttgaatgtctctagaatacccgctgataactcggtggagnnnnnnnnnnnnnnnnnnnnnnnnnnnnnnnnnggcttctctccactgcggctgacnnnnnnnnnnnnnnnnnnnngggtgtggtcggctcccggccctgcccagctttgttnnnnnnnnnnnnnnnnnncctgatcatcggcttccaattctttgtcattaatgtgaagcaaaacacaaaaactgccccaatccctcaggattccttggcatccgaaaccaggnnnnnnnnnnnnnnnnntacccacccacgtgtggtcacaggggatatgtccgattgggcagcttaaaacgtggtcacctgtgggggaaactcttcaggcacccgaagtgagaacccagctgtccatcctcaggccagcctttcttttggtgacgcccgtccgcggctgtctgggttcccttcgtggtgtttgtcttgacctctaaaccccggtgtgcgcagtgcccatcttccagaactaccttattttcaagaattaaacctgttttataattcaagttaatgcaaatgactgtcagttgccaaatatcttgatcctatgagtgtagttgatgactgttagtcagtagagtaaaatgctgtgtccatggggtgtcacggccnnnnnnnnnnnnnnnnnnnnnnnnnnnnnnnnnnnnnnnnnnnnnnnnnnnnnnnnnnnnnnnnnnnngtgtctaaacttcatacaatataaggtcagattccttttaggaatactgggtgctgtcaccaggtttgatagttagacttaaaaacttgaaattcacttttgggggggatatactgaaatagagatttgagacttgccagttgggggaaaatagcatttaaaatggaaag

SEQ ID NO: 16989 - DNA, 703 bp, Macaca Fascicularis
  misc_feature (1)...(703): n = A,T,C or G
cgctcaccgcaggtgcaagaagngnnatccagcagccnnnnnnnnnnnnnnnnnnnnnnnnnnnnnnnnnnnnnctgggccaggcctgcgaaggcgccgctgcgcaaggcgcgcagccggttgctggtgagcgccagctccagcaggcgcggctgcgcgcggaaggcgccggcctccagggcgcgcaggctgttgttgtggaggtagagccgccgcagagcggcgagcggcgccagggctcctggctccaggcgcgcgatgttgttgtcctgcaggaacagtgtctgcaggccggggaaaggggaggcgcttaccccgctgcgggggtcttctccttgggggcaccctgtcctcccgcagctccacacagtgcccacctgcgtccctggcgggattcccagcgggacgacacgcaaccgcagggcgccgcactccactgtggnnnnnnnnnnnnnnnnnnnnnnnnggcagccaacggtgcggggcggnnnnnnnnnnnnnnnnnnnnnnnnnnnnnnnnnccccggggccatctcccgaggcccagctcctcaccggcccttccgcggttcagccgcggacgcgtgccnnnnnnnnnnnnnnnnnnnnnnnnnnnnnnnnnnagtcgagagccagccaatagatggnnnnnnnnnnnnnnnnnnnnnnnnnnttttgacgctataaatcggtcaaaaaacta

SEQ ID NO: 16990 - DNA, 786 bp, Macaca Fascicularis
  misc_feature (1)...(786): n = A,T,C or G
actaatcattgnnnnnnnnnnnnnnnnnnnnnnnnnnnnnnnnnnnnnnnnnnnnnnnnnnnnnaactccaatggcaattgnnnnnnnnnnnnnnnnnnnnnnnnnnnnnnnnnnnnnnnngtcctgnnnnnnnnnnnnnnnnnnnnnnnnnnnnnnnnnnnnnnnnnnnnnnnnggacggcacaacctctacattgcggagtctggctcactggtcgtcagtgtctctaagattgtggtgcacccggactgggactccagcgatgcctccaaagnnnnnnnnnnnnnnnnnnnnnnnnnnnnnaaccccgtctccctcacggacaagattcagctggcctgcctccnnnnnnnnnnnnnnnttctacccaacaactacccctgctacgtcacaggctggggnnnnnnnnnnnnnnnnnnnnnnnnnnnnnnnnnnnnnnnnnnnnnnnnnnnnnnnnnnnnnnnnnnnnnnnnnnnnnnnnnnnnnnnnnnnnnnnnnnnnnnnnnnnaaccctgtatgatctgtgctgggggtgatggcgtgatctccagctgctacggagactccggcgggcnnnnnnnnnntctggcacctgacggccggtgggaggtgcatnnnnnnnnnnnctttgggtctagcctcggctgcaactactaccacaagccccccgtcnnnnnnnnnnnnnnnnnnnnnnttgactggatcaaatcggtgattgcaaataactaaccaaaagaggtccccgggacggtttcatacttggaaaggtcacagaaggaaattaa

SEQ ID NO: 16991 - DNA, 802 bp, Macaca Fascicularis
  misc_feature (1)...(802): n = A,T,C or G
tcccccagtgccttcacatctcgaggatatgcttctgtactttttaaaagcttatagttggtatggaaaacatttttctgatttttaaatgttattaattatatctattgaaaaactattcctgaaatatatacactcttatgtcccaataagcctgtgatttaaaaatgtttaagtaacagaaattaacatattttaatgattttactttgtatttctaagaaaagtatttgaaagatggaataattttaaatcaataataattctagggatcatgaactcccagaagattttattatttaattgtaaaggtggaggccaggagccannnnnnnnnnnnnnnnnnnnnnnnnnnnnnnnnnnnnnnnnnnnnnnnnnnnnnnnnnnnnnnnnnnnnnnnnnnnnnnnnnnnnnnnnnnnnnnnnnnnnnnnnnnnnnnnnacaacaacaacaacaaaacnnnnnnnnnnnnnnnnnnnnnnnnnnnnnnnnnnnnnnnnnnnnnnnnnnnnnnnnnnnnnnnnnnnnnnnnnnnnnnnnnnnnnnnnnnnnnnnnnnnnnnnnnnnnnnnnnnnnnnnnnnnnnnnnnnnnnnnnnnagtgggactacatcttaaaaaaaaaaccccaaaaacaaaacaaaacaaaaaaatcataaaggtagaaaataaatctaaattgtgtcataattatgattattacaattaaaattatataatgacttatttttggtggcaaatactnntggaacaataaagccttatggtaattattgatgtgtagtttcttttgttcatgaagtc

SEQ ID NO: 16992 - DNA, 758 bp, Macaca Fascicularis
  misc_feature (1)...(758): n = A,T,C or G
tgaatgtatatantnnngagaagaacttgtttagcagattacaagttggcagaatagaatagaatgttcacagaaactaggcaaaaatttgaaaaagcattctagtctctaaaacccattactaattattaacattaaaatatttgtagcttagaaagggggcattactaagacgactttaacttgttcgtgatgaaatctttgttgtgtgatgcaggtacagtgcacccattccaactggaatagcagtttgatttttattgtaaaactaaactttgggaatatgtatgcccaaagttaagtaggatgagaaaagtatacatgggatatggtccaatgaataaaagccccaagatacagctaaatacatttatgatttcataaaatctagtttagnnnnnnnnnnnnnnnnnnnnnnnnnnatccatttgtgtttagagtaaatatcatgtttagaagatgttttgtggtttggatttatatgtttataaggttttttaaaaaaatgttcgttttttctgaattgtaacattgagtaaattgatgagttatataatgagatttctagaaagctctggacatgggtactgtgtgttttgcttatctgtataatgtctacagtgataaatttgtgtctccatgtattgtggcagtctttttttctagttaatttggctttaaagagcaatctttgtatgacaccagannnnnnnnnnnnnnnttgaatgaaaaaaagataatgctttaatattttattc

SEQ ID NO: 16993 - DNA, 1123 bp, Macaca Fascicularis
  misc_feature (1)...(1123): n = A,T,C or G
tcgcccgacggannnnnnnnntcgtaatatatgtgaactcgcgtccgtgctgcgtgcccagagtagtggccgaataccttaannnnnnnnnnnnnnnnnnnnnnnnnnnnnnnnnnnnnnnnnnnnnnnnnnnnnnnnnnnnnnnnnnnnnngccaaccagtcgggtttggnnnnnnnnnnnatccgcaagcccttccacaccgacaaccctagcatccagggccagtggcaccccttcaccaacaagccgaccactttccgcgagctatgcccccgagaggttcaggatcctgccccagcccannnnnnnnnnnnnnnnnnnnnnnnnccaccccaggctttggactgtttcttcagtaaaggtggttcttcccctttggggttnnnnnnnnnnnnnnntggaacccatcaatgggcaagttgacagaggttctgctggngataaagaagagctgcctgtttctttccagtgcctgcttctaggggcagtgaccttgtgaacccctaatttttatcagttagcattcctaaaacctgagatgaggaagacttaaggggttttacagggcccttgttttttaaatccaaattgataatgatctcaaaacacaatgagaggtctgaaggctagcttctgaagaatccctgatgtcttattggtacaaccactgagctgtggagagctctgctgtgatgggctaggcactttatatctgtgtgaatgtgtgtgtgtatagatttataaaactgaggttaataaacttatccaaagtcacatttcaggtctgtcttcaaaatgtgtgcatatggtcagcgcaagcttcagttttcattattttaaaactagacgcagaacatataacaaccatcaggtggttagtattaaaggctaagtgattaatctaggcctgacccttgaaagggagaagggagttattccctggccaacaagctttctgtggtcttagctatacatctccttcctcccacgttcctctttgtgcagaaataaaatccatgtcccttgagccagctggtggggggtgctgagaaccttggggaagggcaggaaggctgattaatattttccagtcttagttaaaaaggggggatggtggggaa

SEQ ID NO: 16994 - DNA, 657 bp, Macaca Fascicularis
tgaaggagtggacagggctccgtgatgcctaccttgaaactcgggacttcaagggctctgaagaaggcaacaccatggtacccaagaactgctacgtcaaccagcaggagctgaagccgtttccctttggagtccgcattgactacatgctttacaaggcagtttccgggttttacatctcctgtaagagtcttgaaaccactacaggcaacgacccttacagcggcacccccctctctgatcatgaagccctgatggctactctgtttgtgaggcacagccccccacagcagagccccaactctacccacagaccagcagagaggtcgccgttgatgagtgtgctaaaggaggcctggacggagctgggtctgggcatggctcaggctcgctggtgggctgccttcgctagctatgtgattggcctggggctgcttctcctggcactgctgtgtgtcctggcggctggaggaggggccagggaagctgccatactgctctggacccccagcgtagggctggtgctgtgggcaggtgcgttctacctcttccacgtgcaggaggtcaatggcttatatagggcccacgctgagctccagcatgtgctaggaagggcaagtgaggcccaggacctgggcccagagcctcagccagctc

SEQ ID NO: 16995 - DNA, 723 bp, Macaca Fascicularis
  misc_feature (1)...(723): n = A,T,C or G
gnnnnnnnnnnnnnnnnnnnnngatgacaagcacaannnnnnnnnnnnnnnnnngtctcattactttgtggctctctatcggttcaaagccctggagaaggacgatctnnnnnnnnnnnnnnnnnnnnnnnnnnnnnnnnnnnntgactccaatgaagaatggtggcgggggaaaatcggggagaaggtcggatttttccctccaannnnnnnnnnnnnnnnccgggctggagaacgtgtgcnnnnnnnnnnnnnnnnnnnnnnnnnnnnnnnnnnnnnnnnnnnnnnnnnnnnnnnnnnnnnnnnnnnnnnnnnnnnnaaaggagacgaagcgggcggctacgtcaaggtctacaccggccgcaaggtggggctgtttcccaccgactttctggaggagatctaggcgtgcgggcgcctgcaagtgggagacacccacaccccattctgggcgggcccagtggagtttggggagggggcgaaaacaacagaactgctgggagaggaggggttggaaggcccgcctgagcgcgacggggcnnnnnnnnngggactggttctcgccctgttccccagcctggagcctcggatacgtgctgcccagagcagcnnnnnnnnnnnnnnnnnnnnnnnnnnnnnnnnnnnnnnngaaaaaaacgcatatctactagcagaagcgagggactggggcggggggcgggggcgagggaggatgaactgtcg

SEQ ID NO: 16996 - DNA, 721 bp, Macaca Fascicularis
tcaaactggctacaagacaatggaatgaagcttctgtgtgatgtctttcggcatccaagctgtaatcttcaggacttggaattgatgggctgtgttctcactaatgcatgttgtcaggatctggcttctgttattgtatacaacccaaacctgaggagcctggaccttgggaacaacaatttgcaggatgatggaatgaaaattctatgtgacgctttgagatatccaaactgtaacattcagaggctcgggttggaatactgtggtttgacatctctctgctgtcaagatctctcctctgctcttatctgcaaccaaagactgataaaaatgaatctgacacagaataccttagggtatgaaggaattatgaagttatataaagtcctgaagtctcctaagtgtaaactacaagttctagggttgtgcaaagaggcatttgatgaggaagcccagaagctgctggaagatgtgggagttagcaatccacacttaatcattaagccagattgtaactatcataatgaagaaaatgggtcttggtggcggtgtttctgatttgaagaaactgacattcctttaaaaatataaatataaatacatacatacatagatacatacccagacttgggtgcttaacttcagatactctatgcccagaaattgtgcacttggcagctgtcagatacccacttctctgtaaaatatctgttctacttca

SEQ ID NO: 16997 - DNA, 700 bp, Macaca Fascicularis
  misc_feature (1)...(700): n = A,T,C or G
tgccgnncnnncccgcccgcccgcctttgcccccctcaggccngtccacacaccctggtgcctttgccgccctccggcctttcccccacccccgcctttgccgccctccagcctctccgcccacccccgcctttgctggcctcgggcgggctctcactgtggggctcacggggcctggggccgtggctttcttcttggcgcccaaatgcctttcctcgagtggctaagcctctcctgacgaggctcctcacgcggggagagggctggggtccaggggtctccgggccttttctgcaggctgtgccggccccctccagcctgcccctgccctggggacatcctgtgcccaggctggaggccccgcctcgctgctggccagcctcacctgctggggctggaggccttggatccctcacagcatccgaggtttgagttcctgtttttctccttgcagggacaacgccaaagttctttttcccaccatgtttaaatcaaagttgtttaaaacaacattaatttaaaaatatatataaaagcaacccatgcttatggttaaaaaagaaagtacaggagtctggagtccgttggagggtaaaggactcccgcgctgccagtggctctttttcgcaaagactgccggaagttttctgtgcttatgaaagtgtgtgtgtggcctttctcttcccttccttataaacac

SEQ ID NO: 16998 - DNA, 773 bp, Macaca Fascicularis
  misc_feature (1)...(773): n = A,T,C or G
gagttgagaangagaaaatagaacatgggaaagacaacggcatccatcctcccactctccagactgccaatcctctgtacctgctcttgaaagcacccagctccctacccctgnnnnnnnnnnnnnnnnnnnnnnnnnnnnnnnnnaaccacagtgagcaggagatggcagnnnnnnnnnnnnnnggggtccaggctgtgcactacaacggtgtccttgctgccgagctctggaggaagaagctgcacctcatgctcagtgccaaccnnnnnnnnnnnnnnnnnnnnnnnnnnnnnnnnnnnnnnnnnnnnnnnnnnnnnnnnnnnaacaccttccttagactcaccgccatggcaacacactctcagtccagccttagctgctttgctcaggaagacattgccatttgtagaccgcatcttgccatcaagatgccagagaaagcagagcagtatcaacccctcacagcctcagtcagcatccagaactccatagatgcccccatggaggactgtgtgatctccatcctgggaagggggctcattcacagagagaggaggtacagatttggttcagtgcggcctgaaaacaccatgtgtaccaagttccagttcacgccgacacatgtggggctccagaggctcactgtggaaatggannnnnnnnnnnnnnnnnnnnnaaccaacnnnnnnnnnnnnnnnnnnnnngcccctgaactttcagcttaaatttccagctctatcaccactctcctgccaacccttgctctacaa

SEQ ID NO: 16999 - DNA, 495 bp, Macaca Fascicularis
  misc_feature (1)...(495): n = A,T,C or G
tgctgatcatgtacaaggccatgtggtacgatcagctcacctgccccgatggcttcctnnngcnnnnnnnnnnnnnnnnnnnnnnnnnnctggagatgtactacacggagaaagaccccgagcgccaccgcagcatcctggcggccatcggggcctacccgctgagccgcaagcacggcacggagacgccggcggcctggggggacggctaccgcgccgccaaggaggagcgcaaggggcccacccaggctggggcggcggcggccaccgaaccccccgggaagccgtcggccaaggcggagaaggaggcggcgcggaaggcggccgggagcgcggcgcccccgcccgtgcagtgatggtctccggccccgcagcccggtccgggcgtcccccgccagctcctgtgaccagcgcgtcgcccgatgctctccgccgtgttcgtgtctcgcccccaggcgccctcgctgcagccctgcccccgtgggtctctgactc

SEQ ID NO: 17000 - DNA, 744 bp, Macaca Fascicularis
  misc_feature (1)...(744): n = A,T,C or G
tttgagaccagcnnnnncaacatggcaaaaccccannnnnactaaaaatataaaaattagccatgtgtggtggcaggcacttgtaannncagctactagggaggctgacgcaggagaattgcctgaacctgggaggcggaggttgcagtgagccaagatcacgccactgcactctagcctgacaacagagcaagactccgtctcaaaaaaaaaaaaaaattataagtcactttaaataaaactctaaattcaatcagattataatatttttagtcaaaatactcttttatgaacatgcaccaaacatccagtagtggtcagggtcagtgaggacgctgtctgtggtgaagctggaagtcggctgagatggtcaaacatcccacaacatttagcaaggcttcagacagaggcaacggagcccggcggtgagggagaagctgacgcccacatccccagatccctaaacggagcctggcctcttgtggggtggagctgctctggaccatggcgggttagggtgaggcaggtgagagttaagcacagacacctacgctcgggctgcagcctttctgcagatggtgcttcagcatcttctcaagcttagacacggccctgctcagctccagcttctcccgggtcaccgtgctgagggcttnnnnnnnnnnnnnnnnnnnnnnnnnnnnnncgtccacaaactggagttgcagctctgctgccatttttttctggnnnaaaaaaaaaatc

SEQ ID NO: 17001 - DNA, 733 bp, Macaca Fascicularis
  misc_feature (1)...(733): n = A,T,C or G
gccggaccaggctcccngtgggcagccctggcctcntccttaacgctggacccggtccagggccggcccccatgcctggctggacaccgcactgcgcaaaggggccctggagctccaggcagggggcgctggggtgatgcactttgggggatggagtctcagggtggcagagggggatctgaacccttgnnnnnnnnnnnnnnnnnnnnnnnnnccttgggaggactctgccagggtcttctcgggctgggaaggcccatgtagggcaggccttctagaattgggggcaccaagggcgcctatgtccccaggccttgctggggtgcaggggtatatcaacttctcattagcaggagctccccagtggcaagcctggcccagtgggctcagtagtgcccggctgccaggcctgaggtgtgcatagtccttcctggccatattaaccacgcagcctgagcccggcccagcctcggctgccagaggtgcctttgctaggcccggagccgttggcccgggccggccttgccctactcctctctcctcctcctcctgggtcccccagggtggctgggcttgggctatgtgggtggtggtggtggggggccttgggggcctctcagctcccacccatgcctccctgatggggtgggccccgggnnnnnnnnnnnnnnncagacctcacccactcctcgctcggtttgaccactgtaagtgcctgcactctgtatcctat

SEQ ID NO: 17002 - DNA, 723 bp, Macaca Fascicularis
  misc_feature (1)...(723): n = A,T,C or G
ctgatctnggatacaagcaaatgaatgcagttgcattggtcgggatggttacagttgctgagcttgcaggatttgtgatccccgtgatcatcattgcatggtgtacctggaaaacgactatatccttgagacagccaccaatggctttccaagggatcagtgagaggcagaaagcactgcggatggtgttcatgtgtgctgcagtcttcttcatctgcttcactccctatcatattaactttattttttacaccatggtaaaggaaaccatcattagcagttgtcccattgtccgaattgcactgtatttccaccccttttgcctgtgccttgcaagtctctgctgccttctggatccaattctttattactttatggcttcagagtttcgtgaccaactctcccgccatggcagttctgtgacccgctcccgcctcatgagcaaggagagtggttcatcaatgattggctaaaattaagatatctctttaattatgactttgtttacctacattccttgtatttttcccaaaggccagagttgaaaaccaatttctttaattgaaccttgtgaagaacagaaataagtactttttgtgtgatattcacagtcaacagaggtgtgatggtgaaggcagagtgtgaaaaatgtgagagaggaagagaaaatagatttacctgattctgctttgaaattcaagccactttcttatttaagaaatc

SEQ ID NO: 17003 - DNA, 716 bp, Macaca Fascicularis
  misc_feature (1)...(716): n = A,T,C or G
agnnnnnnnnnnnnnnnnnnnnnnnnnnnnnnnnnnnnngaacagctgcannngggtaggaccacacagaactgccttcaaggtgagtcccgggagcgcacactcagccctgtcagtggggtccggcttcagcagccaggcctccatggacccccatgggcccccagggctgagagggaggacagagcccttcagaacagaggcctcatctcaccgcctcccccatcaccccctagttccctgatggtcctaatttgtgctctgagagcccagtttactccgtggccaggccccacctgtgtttccaagtccggctggagaagcaggatggggtaggccttgtgctttgagtgcccccagctctgcctcacaggcaggcaggccccgggggcaagagtgcactctgggttcctaaagcaataaatgcaaacaagccaacagctctggtgcttgagaatttccatctcaaccacactcctccctttaggggcttcggaggagaggtcagggctgaggctggggatggaactgcagtagagagagcagctgcggggcccacattctgagcctccgtccactccagttttagcaacttttgccttttgcactgagtgctaaacaaattctagctctgtgatttttttcccattcccagatttactgtaagttctccttaaaaagtatctaagctgttatagtagctttcccttcatttg

SEQ ID NO: 17004 - DNA, 500 bp, Macaca Fascicularis
  misc_feature (1)...(500): n = A,T,C or G
gaagacccnnnnnnnnnnnccctccctggggcggtggtcannnnnnnnnnnnnnnnnnnnnnnnnnnnnnnnnnnnnnnnnnnnnnnnnnnnnnnnnnnnnnnnnnnnnnnnnnnnnnnnnnnnnnnnnnnnnnnnnnnnnnnnnnnnnnnnnnnnnnnnnnnnnnnncctcctggacctggacccgaggcccannnnnnnnnnnnacccagacaccccaaagcctgtgagcttcacagtgaaggagacagtgtgccccaggacaacacagaagtcaccggaggattgtnnnnnnnnnnnnnnnnngctggtgaagcggtgtgtggggacagtgatcctaaaccaggccagggactcctttgacatcagttgtgataaggataataggnnnnnnnnncggctnnnnnnnnnnnnnnnnnnnnnnnaagagaagattggcggagggcttaaaaaagttggccagaaaatcaaggattttttggggaatcttgtacccagga

SEQ ID NO: 17005 - DNA, 739 bp, Macaca Fascicularis
  misc_feature (1)...(739): n = A,T,C or G
acatgtgatctatatactcatctaaaatatggaaacntttccaccccatgtaaatatgtacaagtgcatcactggtacaattttatgtaactcagttggacactaggttgccacagacctatgctaggtgtctttaaaaaattaaggtgacaaagcacatgggactgtgtagagcttggttatcggccggcccggtggcttggcaggcagtgctgtgcgctgctcatggagaagacctgggcttagagtctccttagttcttgctacacaggatggtgactggaactaaggctgcacagagggtcgcacttggactctgagggttgggtgtggaagggggaaaaggggatggaaacctgctccccagctcttcctgtcagtcagtttacatgggaacagggttaacatctgtgttaggggaggtcaccttacccttttgcacagggtaagagtgtcagactcctggctatctcagggggaatggagaaaagaatctttcaagggcaaagaactcgtgagaggatgtctgttgtatgtaatactcacaatggcttttggttagtgttgaaggtgggaagagcctttgtaggtccagaagagtggaagagagggaggggtacagcaacatgtgcacaggcacgcacatgtgtgcacgcacacacataatctgggttatctttgtgctatatagtggattataattctgtgaaacnnnagtttgtatattgaattacattaa

SEQ ID NO: 17006 - DNA, 707 bp, Macaca Fascicularis
  misc_feature (1)...(707): n = A,T,C or G
catcaatgaggatcagaaggtggccctggatcttgacccgnnnnnnnnnnnnnnnnnnnnnnnccggcgacgcgtnnnnnnnnnnnnnnnnnnnnnnnnnnnnnnnnnnnnnnnnnnnnnncggctaaaccacagtgttgccaaggaaacagcccgcaggagagcaatgctggattcgggaatttacccccctggctccccaagcaaataacagatgagcctatggactcagtagcgcaagtactgttcccagctgccttgtttcaacagacatgcaaagatcctaggagacagtccccttagaccttcagacatttaaaaaggcagctgtatgggttgttnnnnnnnnnnnnnnntactcatttatgtaggggccccaggaaagctacacacagccagaatgaggttcccaaaggacttacgttaattatggctcttgcttcctttcacaaatgagcagaggcctctactttnnnnnnnnnnnnnnnnnnnnnnnnnnnnnnnnnnnnnnnnnnnnaaccagaggggcttcctttgttacatgcctagttacatgggcctgggcagcatgtcctctacctgtgacttctcattttcctgtttacactggggatttggagagggcaggcaaagtcaaagtgaatgacctctgtccacccagttttttattgcactggcttcaatacagtagcagtattgatagaatc

SEQ ID NO: 17007 - DNA, 726 bp, Macaca Fascicularis
  misc_feature (1)...(726): n = A,T,C or G
acggagatgcnnggnncaatatnaaanannnnntacagatgatgactgcaaagtgaaggcnnnnnnggcagctggcgatgcccgttctcttgatctctctcttctcgcgcgcgcactctctcttcaacactcccctgcgtaccccggttctagcaaacaccaattgattgactgagaatctgataaagcaacaaaagatttgtcccaagctgcatgattgctctttctccttcttccctgagtctctctccatgcccctcatctcttccttttgccctcgcctcttccatccatgtcttccaaggcctgatgcattcatcagctgtctgtgacatcccacctcgtggcctcannnnnnnnnnnnnnnnnnnnnnnnnnnnnnnnnncatccaggagctcttcaagcgcatctcggagcagttcactgccatgttccgccggaaggccttcctccactggtacacaggcgagggcatggacgagatggagttcactgaggctgagagcaacatgaacgacctcgtctctgagtatcagcagtaccaggatgccaccgcagaagaggaggaggatttcggtgaggaggccgaagaggaggcctaaggcagagcccccatcacctcaggcttctcagttcccttagccgtcttactcaactgcccctttcctcnnnnnnnnnnnnnnnnnnnnnnnnnnntatcttgttttttgttttttcttctgggg

SEQ ID NO: 17008 - DNA, 680 bp, Macaca Fascicularis
  misc_feature (1)...(680): n = A,T,C or G
ggttgcaagcggctgctgcgagcagccggtccctcgggaatatgcggcgcgcgtggatcctgctcaccttgggcttggtggcctgcgtgtcggcggagtcgagagcagagctgacatccgataaagacatnnnnnnnnnnnnnnnnnnnnnnnnnnnnnnnnnnnnnnnnnnnnnnnnnnnnnnnnnnnnnnntgcttctgcatctggctcgggagctgatgaggatgtagagagtccagagctgacaacatctcgaccacttccaaagataccgttcactagtgctgctccaaacgtggaaaccacgacnnnnnnnnnnnnnnnnaagatnnnnnnnnnnnnnnnnnnnnnnnnnnnnnnnnnnnnagagaaagttcacctctctgactcagaaaggaaaatggacccatctgaagaagatacaaatgtgtatactgagaaacactcagacagtctgtttaaacggacagaagtcnnnnnnnnnnnnnnnnnnnnnnnngttattggctttctctttgcaatttttcttatcctgctgttggtgtatcgcatgagaaagaaggatgaaggaagctatgaccttggagaacgcaaaccatccagtgctgcttaccagaaggcacctactaaggagttttatgcttaaaactccaacnnnagtgtctctatttatgagatc

SEQ ID NO: 17009 - DNA, 704 bp, Macaca Fascicularis
  misc_feature (1)...(704): n = A,T,C or G
ggagattggtagtagaagggtagaggtgatgatgagcggggggataaggggttacacgtgctggtgggaggtgtgagagtgtagtccaccacgttgagcttccttgacacacaaacagggcattccagacaatgagagggctgagnnnnnnnnnnnnnnnnnnnnnnnnnnnnnnnnnnnnnnnaggaatggggcccacttagttcaggggctcctctctaaaaggcacataaaaagatctgaaatttgggccaggcaannnnnnnnnnnnntgtaatcctgacactttgcaaggccaaggtggcaggattgcttgaggccaggagtttaagaccagcctgggnnnnnnnnnnnnnnnnnnnctttccccttcaaacaaaacaaaaagcctgaggtttgacgtggggagccgtcaggatccctacattcaatctgcatgtgcnnnnnnnnnnnnnnnnnnnnnnnnnnnnnnnnnnnnaggtgggcagtagtcgtggccctgggggactcccttccctttctttctccacagggaagaggaggggctagaggtgctgaaggagcagaactgggagctgcccctgcaggatgaacctctgtaccagacctaccgagcagccgtgctgtcagaggagctgtggggggtcggtgaggatgggagtccttctccagcnnntgctggagatgcgcccactttcccacga

SEQ ID NO: 17010 - DNA, 722 bp, Macaca Fascicularis
  misc_feature (1)...(722): n = A,T,C or G
cagcgctcagaacaaaagtttgaaaaatgcattgttcatatgaatgtcatctcttttcagttgccagtatcctttttaaaaaatggcaaaagcctagatttacaacttgatgaacactaaatatttcctattaatataatctatttttgtattttacttaatgagctttaagtgcctgtcgttctgaaaattgtgtatttataattcagcttatctcataattggacctaatagcatttctttgtgcagttaggtgatgagcactgctttgaggcccaagcactagtagagatgcgtgatgcaggtctagttccaataactgttccagacatcaagcaataaaaaaatgaataccacaaaagatgtttgattttacagtggnnnnnnnnnnnnnnnnnnnnngaagtttaaggtcctcctaggtatgagtacttttagtagtggatcactgtggacagggtgcagctctaccagttcctgtttcttctgagccagaccctcctcaaggaagggaccaattaattttaaaactcacttgaagcacagctggtcatggggcttggtataaagttcctatttccaccctgatacttccaattcctggaaccccagcccactcccccatccctcctctctatgaaactagtataatgattttgaattggtacagtgtgtttaactgnnnnnnnnnnnnnnnnnnnattattatctttgtaatgaat

SEQ ID NO: 17011 - DNA, 698 bp, Macaca Fascicularis
  misc_feature (1)...(698): n = A,T,C or G
gcatggaactggagctgtatggtgttgatgacaagttctannnnnnnnnnnnnnnagaggatgcgctgctgggctcctnnnnnnnnnatgacggctgccgcatccacgtcattgaccacagcggcgcccgccttggtgagtatgaggacgtgtcccgggtggagaagtacacgatctcacaagaagcctacgaccagaggcaagacacggtccgctccttcctgaagcgcagcaagctcggccgctacaacgaggaggagcgggctcagcaagaggccgaggccgcccagcgcctcgccgaggagaaggcccaggccagctccatccccgtgggcagccgctgtgaggtgcgggcggcggggcactccccccgccggggcaccgtcatgtatgtaggtctcacagatttcaagcctggctactggattggtgtccgctatgatgagccactggggaaaaatgatggcagtgtgaatgggaaacgctacttcgaatgccaggccaagtatggcgcctttgtcaagccagcagtcgtgacagtgggggacttcccagaggaggactacgggttggacgagatatgacacccaaggaattccactgctccagctcctaactcggccactgactgcccctcctgtgtgtgcccatggcccttttctcctgaccccattttaattttattcatttttcctctg

SEQ ID NO: 17012 - DNA, 756 bp, Macaca Fascicularis
  misc_feature (1)...(756): n = A,T,C or G
tgctgttacagatcntnctgatgattctgattttgatgaagaagctaaactgaagtactataaagaaatagaagnnnnnnnnnnnnnnnnnnnnnnnnnnnnnnnnnnnnnnnnnnnnnnnnnnnnnnnnnnnnnnnnnnnnnnnnnnnnnnnnnnnnnnnnnnnnnnngctaaaaataggggacttactcctaggagaaagaagattgaccgcaatcccagagtgaaacacagggagaagttcagaagagccnnnnnnnnnnnnnnnnnnnnnnnnnnngaagttcgtaaagaagnnnnnnnnnnnnnnnnnnnattatctggnnnnnnnnnnngagttannnnnnnnnnnnnnnnnnnnngaagtttttgcttagcataaggtttttgnnnnnnnnnnnnnnnnnnntttttacttttaactaaagtgattgtattaatatataatactttaaaatttaaaaattcttgtccacagggaaannnnnnnnnnnnnnnnnnnnnnnnnnnnnnnnnnnnnnnnnnnnnnnnnnnnnnnnnnnnnnnnnnnnnnnnnnnnnnnnnnnnnnnnnnnnnnnnnnnnnnnnnnnnnnnnnnnnnnnnnnnnnnnnnnnnnnnnnnnnnnnnnnnnnnnnnnnnnnnnnnnnnnnnntaacttttcacataaagagaatgcacctttgagagttatttgtaaagcagcctataaaatagttctgaaatattttatttacctaactnnnaattattgggcta

SEQ ID NO: 17013 - DNA, 778 bp, Macaca Fascicularis
  misc_feature (1)...(778): n = A,T,C or G
agccccnnttccctgcagacgtgggagtgtttggctgccccacaactgtggccaacgtggagacagtggcagtgtcccccaccatctgccgccgtgggggcacctggtttgctggctttggcagagagcgcaactcaggcaccaaactnnnnnnnnnctctggccatgtcaaccacccttgcactgtggaggaggagatgtctgtgcccttgaaagaactgattgagaagcatgctgggggtgtcacgggcggctgggacaacctccttgctgtgattcctggtggctcgtctactccactgatccccaagtctgtgtgtgagacggtnnnnnnnnnnnnnnnnnnnnnggtgcaggcacagacaggcttgggcacagctgcggtgatcgtcatggaccgctcgacggacatcgtgaaagccatcgcccgcctcattgagttctataagcacgagagctgtggccagtgcaccccatgccgcgagggtgtggactggatgaacaaggtgatggctcgtttcgtgaggggggacgcccggccggccgagattgactccctgnnnnnnnnnnnnnngcagatagaaggccacaccatttgtgctctgggtgacggggctgcctggcctgtgcagggtcnnnnnnnnnnnnnnnnnccggagcttgaggaacggatgcagcggtttgcnnagcagcatcaggcccggcaggcagcctcttatgcccaccaccctggcctgctgtcctgtgtctgtccgtctggaatgctggacaataaagc

SEQ ID NO: 17014 - DNA, 723 bp, Macaca Fascicularis
  misc_feature (1)...(723): n = A,T,C or G
atagctgggattacaggtgcacgccaccatgnnnnnnnnnnnnnnnnnnnnannnnnnnnnnnnnnnnnnnnnnnnnnnnnnnnnnnnnnnnnnnnnnnnnnnnnnnnnnnnnnnnnnnnnnnnnnnnnnnnnnnnnnnnnnnnnnnnnnnnnnnnnncgtacctggccagccctgttgtctttcaaagaacctcgaccccaatgatggctgatctctcactcccactgtctcaaagaattacactccttcctggggactcctgttcccgcagtcttgtccttgaggagtacagggaagtacctgcagtgaccctgcccccacgatcttggccaggcaggacaattccagagcccatactgtgggaatcctcactgaccagcccagccccatccacaaaccaggctgggcctgggtgtaacttcgctgggctctcccaagaccatcggcagcgcattcagccccctggggcctgggcttttgctggttctccatcagtcccttggtctctagcctcatccagggctgctctgctctccgccctcctttgtgtatcaagtgtcactcagccccattcactggggagcctttcggatctatttggtctttctcatgcccccactggtctgtaccccagggaaggggcgcttgtactgtgaatccagtgttcacattcacacttaatgacttccttggcaccaatcatgtatttcaccatttgcac

SEQ ID NO: 17015 - DNA, 752 bp, Macaca Fascicularis
  misc_feature (1)...(752): n = A,T,C or G
tgctttatatatcattaaatttttatcatagttcagaaaaatgtgcaaaggaaactcttgtctcactccttcaaaacagtcctaattaactttcatattnnnnnnttannnnnnnnnnnnnnnntcaaaggaaattaaatgatatggaccctaatttgtatcattctgagttgattgtgtggtttattcattctggaaacatgttgatacttaaagtcaaccattgcttttgataagtgatattgattaggttaaatcttcttttaaatagtatttaccagttagcaaagtctgtgttttcagaattacagtgggcacagaggtgttcataaaataggaattgtgtcccacttgataagagttgcttaaatttgatactgttgacatttgggctggatgaaatccttgtggtagggagggttccatgctgtgcattatagggtgatgagcagcatccctggactacacactggatgctgtttgtatccctctcccgtgacacccacagttataccagatgttgccagatgcccctgggggacagtgtcaaccgctgtcctatagagtcaggaaatattgtagggagaaaaaaataacaacgacaaaggccaatgttcatgttaaatagattgagattatggaatgtttatattaatgttaaaaattgtaccttgatcaatgtacttttataaacttgccatagatatctcaaatttgaaatctcaagacagctttattattcttaaatgctg

SEQ ID NO: 17016 - DNA, 1199 bp, Macaca Fascicularis
gaaccacctccagttccaggccgaccccgacgtgctgcacaacagctatgcattgcatggcatccgctacaagaacgaccatatcaacctggccgtactggcggacgccgagggcaagccctacctacatgtgtccgtggagtcccgcggccagcctgtcaagatctatgcctgcgaggcgggctgcctggacgagccagtggagctgacctcggcgcccacgggccacaccttctcggtcatggtgacacagcccatcacgccgctgctctacatctccaccgacctcacacacctgcaggacctgcggcacacgctgcacctcaaggccattctggcccatgatgagcacatggcccagcaggaccccgggctgcccttcctcttctggttcagcgtggcctccctcatcaccctcttccacctcttcctcttcaagctcatctacaacgagtactgtgggcctggagccaagcccctcttcaggagtaaggaagatcccagtgtctgagtgaactaacagtcctgctttcagccaccatttgcacaagacacccagcactgaaagtcctgctgccagggatcctttggaagcacccgccctttgtgccttgttgggggaaaccagtgacgcagaagcgaatgtggatacaccagagtttgcattggaaggaacgagtgtcacgtggggagggaaggggccagtggaccttttgtaagctttccactcaataaaacgaacctgtatggcaaatacttgaaatggaactcactccttccactttccccctttgttctgtcccaggaaatagaccgtcttttgaaaagactcttgtctagggaacgttatgtccttttccgaatttatcgtgttctttcttgatgaagttttaatttatttttgttgagattttgctagatggcttttgcatcccctgtagatggtgagtgctggcagtgatatccatctcagcctttggaggccccacggtcccgaggctgggctggggtccccagggtggctgtgctgctgcctgtaggagggtgcgggttgcgctgtcatcctcgggtttgcacgccctttcttatgagcctgtggacacctgtggttttgtactttggggcttcaggggaggtgtttaactttctagtgattgatgattgtcaggttttgaaataccaaagctttttttgttctg

SEQ ID NO: 17017 - DNA, 764 bp, Macaca Fascicularis
  misc_feature (1)...(764): n = A,T,C or G
ccccagaactaacctgggaggtgctgaaggggcattgggccagagtaagcaagggaaaaagggcagatcatgtggagagatgaccttgatctnngattgctaccctaaccttgacctataannngtgattccccccagctcctgaaagagatgtcctaatatctcttagggacccagacccctaaattctcctcctcccccattttggtgttaaggtggagagggcatgtatcctctgtcctgatctaggtgtctgtagctgaggggtaagaggttgttgtagttgtcatggtgcctcnnnnnnnnnctccctacttatcccatatttgcaaggggagggatttggggctggggctnnnnnnnnnnnnnnnnnnnnnnnntctcattaaccctttaggactctgaagggtatggacctacatgaatgtgtgtcagggggagacttgctggtgggttagtggnnnnnnnnnnnnnnnnnnnnnnnnnnnggtgtaaaaaggaagttggaatgggaattggtgggcaatgaacaagtgtcggggaaggattggtgctggggaaacaggaaggggcctggggccatttggctgcactaactttggtagctctcagtgtgcatctagagtgggactggggnnnnnnnnnnnnnnnnnntgggctacttgggnnnnnnnnnngagatggaaagggctatcctggggctctgaccacactgtattacgtgtggagggtgccctcctgtctcccacaacttctgctataac

SEQ ID NO: 17018 - DNA, 359 bp, Macaca Fascicularis
ttcccctcccctcctttcccccttcctccctcacccttcataaaggcctcccttgtcaccttccctcccaacccatctcagccctgtgctcctggaggccctgctcccaaaaccgctggaaggattggggcagtttctcccacagtagaacacagacagggcttccgatcgcccacgcctgttttcagctgtgggtggccatgcagacacgcgccctggcacgtggggcctgggtgggcaggcaggactgggccctaccacccatcagagcccactcgggaccagggttcagggcgcccacctggacacatccctcaccacgtccggatttccttctttggatggaatgtaacgcgatc

SEQ ID NO: 17019 - DNA, 468 bp, Macaca Fascicularis
  misc_feature (1)...(468): n = A,T,C or G
gcaacgcggaggaaacgggagtgaacggagagcttagtgaccatcatgagcctnnnnnnnnnnnnnnnnnnnnngatgaccccagaggagctgcagaagcgagaggaggaggaatttaacacgggtccactctcnnnnnnnnnnnnnnnnnnnnnnaacaacacccaagtgctcatcaactgtcgcaacaataagaaactcctgggccgtgtgaaggccttcgataggcactgcaannnnnnnnnnnnnnnnnnnnnnnnnnnnnnnnnngaggtccctaagagcggcaagggcaagaagaaatccaagccagtcaacaaagaccgctacatctccaagatgttcctgcgtggggactcggtcatcgtggtcctgcggaacccgctcatcgccggcaagtaggggctgcctatccatcgacagaactcactctctcgtcctatgaagaccattgccatggtgttgaga

SEQ ID NO: 17020 - DNA, 716 bp, Macaca Fascicularis
  misc_feature (1)...(716): n = A,T,C or G
ttatgtttttttttcctttgggttcatnnnnnnnnnngatttaaaatatgtccacttactcacagactgaagatgtcagaagccccagcagggaccaaggctggaaggcccagtctgtaggtgactgctcccctgttctgcacccctcatgcctctcctgttcccaaagagttnnnnnnnnnnnnnnnnnnncttcccttcccccatccttcagctttttaaatgtaacctcagaagaaaccccatctatattcttttgaattcatgagcttttgagtcagggaaaggaggactcttcttcgtctctttaattcaacagatcacagagccacgggcgggttgcctcgctctgctgctcccggatggaattcagctgagcagtgggagaagccagggtgtttcttaaactgtcctctgggcgcannnnnnntcattaaaccatggcttttgttggtcttcagaataaagaacagtcctgcactcctccgctgttctcctttgtgctagggaannnnnnnnntttaaaaatacctctgaagactcacagctctgcccagttacactagcttcgcctgtgtggcttttgtaatggggaggaagagaaaggatctccccaggacctcagatcatctttactgtgacatctcnnnnnnnnnnnnnnnnnnnnnnnnnnnnnnnnnnnnnnnnnnnnnnnnnnnnnnnnnnnnnnctcccct

SEQ ID NO: 17021 - DNA, 732 bp, Macaca Fascicularis
  misc_feature (1)...(732): n = A,T,C or G
gcaatnnnnnnnacgagttagcacaagtgtattcaaccaacaacccctcagaactccgaaacctggtgaataagcacagtgaaacnntcactcgtgataacaacatgggaatggtgaagcaatgcttgtcatctctttataagaagaatattcagaggctaacaaagacctttttaactctgtcatnnnnnnnnnnnnnnnnnnnnnnnnnnnnnnnnnnnnnnnnnnaggcagaaaaatatgttctgcacatgatagaagatggtgagatttttgcaagtattaaccagaaggatggtatggtcagtttccatgataaccctgaaaaatataataacccagccatgcttcataatattnnnnnnnnnnnnnnnaagtgcatagagctggatgagcggctgaaagccatggaccaggagatcacagnnnnnnnnnnnnnnnnncaaaagagtatgggctcacaagaagatgattcaggaaacaaaccatccagttattcttgaaactaacatccnnnnnnnnnnnnnnnnnnnnnnnnnnnnnnnnnnncagtggcaagtgttcggagggcagcagagaggaccaagcctgtgtcacctggagactaagaaannnnnnnnnnnnnnnnnnnnnnnnnnnnnnnnnnnnnnnnnnnnnnnnnnnnnnctgcaaagaaaggaaacagatttgcaaactttaaagtctgtcgtggatttatttatcctcagatta

SEQ ID NO: 17022 - DNA, 738 bp, Macaca Fascicularis
  misc_feature (1)...(738): n = A,T,C or G
gcagaaggtttgnnngtagctgctccatacatcgaaaatacagaatggagcatantncggaatcaagannnctttctccaacagccttttcactgaaatttctgcacaagaaatccaccaaaatcccggagactgaggacctttaatgggctttgtcatggagtagcagatcagagggcagtcagtttagtacaaagcaatactaggctgaaggagagacctgagaactttcctaggtagatcaatccattgtatacttcagttcttctaaagtctactttggttaggctgatggcagtattatagttgctaaattcagcactgtgttcctgttgtcatggttcaagacctaccaggtattttcagattgtaggaattttctttcttaacaatttcaacaggccactcactcttaagggtaagaagaataaccacaattgtgtgtgcctgttttttactcttagcattagatgaattcaaatttggaaacagattgatagcatttttttctaaaaacattaggcttctgttaaccttttttttgttgttgtttttaatttgcttcaaccagttgactttctttggctaattttactttgcatgatatgccttaatatgccttcataaataaccattttaagtcataatttgtccttaagctgcttttttcttctattaattggatcgtagtaaagagtagtcaatagggtcttcagctattagttatagaagtgataa

SEQ ID NO: 17023 - DNA, 690 bp, Macaca Fascicularis
  misc_feature (1)...(690): n = A,T,C or G
gccaggannnangtcacaccgtggctcaaaagggaaaggccttcccgctannnnnnnnnnnnnnnnnnnnnnnnnnnnnnnnnnnnnnnnnnnnagggcaggannnnnnnnnnnnnnnnnnnnnnnnnnnctgcgctgttgagttgaagttggtaccaaatacacatttaccacttttatatnnnnnnnnnnnnnnngccatcgtttcatgatgataaccatttataagagaaaaagacaggacatgctttccatgtttcagtatttgatgacacaaaannnnnnnnnnnnnnnnnnnnnnnnacttctagcactacgagtgtggctcccacttggacaagataccgagcttcgttatgcagtttttaatattatttattattttaaaaagtaataagcacaaaaccacatacattgtatgtcatttaaagtatttatgtcaaacagggtgcaagtgtgaacccaaggactggagcacaaattcctaactgcctggggcagggctaatgttagcattggtgtgcgtctgcctccaaaggaggttctagtggtcagcgagactcaacacagatgacattgaaattccgtttctctcctcatctatcacactggagcaaaactggctatttctgtgaatgatataaaacagggttctctgtaatggtattgtacatagtatatgtttattgt

SEQ ID NO: 17024 - DNA, 619 bp, Macaca Fascicularis
  misc_feature (1)...(619): n = A,T,C or G
tgcagagagaacccggacagctcatcctgccagcagccacgaggagccgagactgccaggcccatctacgtccctcgtgtctctagatcttctcgttacccagcctcaaatatatacgtgtctgcaaccctcagtctctctgccgcttcttgattcctttccaaacctcggctggggccctggcttcagccccctgtccctgagtctgctcctcgtcagagcagctgctgctggttcctccgtgctcggcaccaggccccgggtcctcagacgcatcactgtcatcagtgtccgagggcagccgggtgctggccacaggcctgttggggtttccagactctctccctgaatccacatcgaagggatcaatctcctcctcctgggggctctccttggcgctggctaagaactcctgttccgcctgcagcacctcctcccagccgccgcaggccgcgtacttgtccaggagctggcggttcaggtccaagaagcccttgccccatttaaacttccgaagcaaaatgacagcgaggtccggaaagcctacgatgcngnnnntggcagcaaaagcttccacnnnnnnnnnnnnnnnnnnncggccataatttacggggttggc

SEQ ID NO: 17025 - DNA, 816 bp, Macaca Fascicularis
  misc_feature (1)...(816): n = A,T,C or G
caataggaaagacgactccagctaatgaaaatgtagagattcaaaaacatgccacaggaaagaagtctccaacaaagagtcctaatcccagtacacctcgtgggaagaaaagaaaggccttgccagcatctgagaccccaaaagctgcagagaccccagggaaaggcccagggaagaagcaaaagatcaaagaagaggcagtgaaggaaaaaaatccttcactggggaaaaaagatgtgagacagactccaaaaaagccaggggccaggttcttcaccactcttagtaaatctgtgagaaaagcttcccacacccccaaaaaatggcccaaaaaacccaaagtaccccagtcggcctaaagtcagtnnttcagccggaaggaaacttcagtgctgcctccagagcttcttagaaatactcagctcttgaccctctttataagtaaccnnnnnnnnnnnnnnnnnnnnnnnnnnnnntttttaaaacctccataagtagtccaggcgcggtgcctcatgcctgtaatcccagcacttcaggaggtcgaggcgggtggatcataaggtcaagagattgnnnnnnnnnnnnnnnnnnnnnnnnnnnnnnnnnnnnnnnnnnnnnnnnnnnnnnnnnnnnnnnnnnnnnnnnnnnnnnnnnnnnnnnnnnnnnnnnnnnnnnnnnnnnnnnnnnnnnnnnnnnnnnnnnnnnnnnnnnnnnnnnnnnnnnnnnnnnnnnnnnnnnnnnnnnnnnnnnatgacagaacgacactccatctcaaaaataaataaaaataataaaacctcnnntaaataattt

SEQ ID NO: 17026 - DNA, 742 bp, Macaca Fascicularis
  misc_feature (1)...(742): n = A,T,C or G
tatgcatacctgaaaatcgagttcgtccgttagtgctggtgattaagaagtgggcaagtcaccatcagataaatgatgccagtcgtggtactttaagcagctatagtcttgtattgatggttttgcactatttacaaaccctacctgaacccatccttccatccctccaaaaaatttacccagaatcttttagtcctgctatacagctgcaccttgtacatcaagctccatgtaatgttcctccttacctctcaaagaatgaatcaaaccttggggacctcttactgggctttcttaaatattatgctacagaatttgactggaatagtcaaatgatttcagttcgtgaagccaaagccattccgaggcctgatggtattgaatggagaaataaatacatctgtgtagaagaaccttttgatggaacaaatacagccagagcagtgcacgaaaagcagaaatttgacatgatcaaggatcaatttttaaagtnnnnnnnnnnnnnnnaaaacaagagagatttgaacagtatactacctgtaagagctgctgtcctgaaaagataactggcctctatttcttaataaattcttccaagaaataaagaacaatagtttcatcgtaatacattatgtttacctccatcataattgcttttttcatagttcttgttttcattttttatttttaaaaagacatataaagattgcatattttattatgacatttcctaataaaaccc

SEQ ID NO: 17027 - DNA, 777 bp, Macaca Fascicularis
  misc_feature (1)...(777): n = A,T,C or G
taacatgttctgttgttgatctnnnnnnnnnnnnnnnnnnnnnttcctatcctaaggaacaatcacagccatggtttttcttttaaaagatgctagagaattttctccatctctgtctccacccctctcagtgtgtctacatttgggtcaagagcatatttgcaaccaatggatacacgccagtacttatactgcctaaagccaaagaaggaattcgcagaaaaagcaggcatcattaagggagtaacagtgattggaaaattggatatagtatggaaaacaaatctaggtgaaaggggaaggttacaaacnnnnnnnnnnnnnnnnntggtgagtttggaaaaaacttcactggggttttggtgtgtgagagacaggcagttaaaacaacttaattttttctacgtctagcagtaaaaaaattggagcactataaaaggcattaatactactatagaagaaaagattaatagtttcactgatagataggtagaaaactggtgttgccgtgaatgaaaaatggtcaaatgttaaatttatccttcatacatgtgttctttatcaaacagaaattaaaataactgtttatcaagtgtccctcctttggtaacacaggcccactcttcttctgacttccaaacacattaaggttttctattttgcaatgtcctgaaactcttggacttacttcatttacctactcggttcataccatttttaagntgttaaaaanggtgagttctattaaagttatcttataagcattggttgcatatt

SEQ ID NO: 17028 - DNA, 716 bp, Macaca Fascicularis
  misc_feature (1)...(716): n = A,T,C or G
tacagcagcggnnnnnnnnnntccatgttgattttgaagacccagctagaccccgagtcccttacacatcggccaaggaatacgccaagatcatccgaaacaatggccttgaagcacatctgtaggcaagatggctgagaaatacaggagaagcctctgcttttgaaaaggagatctgctttggtgatgatctttcaggcaatctcaacttacttctgtaatcaacatctaatatcagtggatctgtgatgataaagtctgaatatgtaatgcctcatgaagtgtttaataatggcctttactttatttgcattcggatcaattaggtttttaaaaaaagtagaagagaaaaccannnnnnnnnnnnnnnnnnnnnnnnnnnnnnnnnnnnnnngaaacgtaaatttaaatcctgagacatttttctagaaaaaaaatgcaaagtttataaagataatatacccatgatttgcaactgtaacaggtgatcatttattataagagtacttaatcattccggttccataagctatttttgcttaggagatccactgtcatgtgatccataatttttctacataaaaaatcaaagttaaaagttagtcacattatacagttatgcattcatttcaacaaaatagtgaattgataatctatttgttaatatattcggcacatattttgtgtgtttggacaagtacaatctcccttttgcc

SEQ ID NO: 17029 - DNA, 769 bp, Macaca Fascicularis
  misc_feature (1)...(769): n = A,T,C or G
gacaagctcagcacgtgacttatnnnnnagactgttggaatgatccaagtccatttactgtgcgtaaaccagatgaaactggaaaatcagtattgggaaacaaaagcaatagagaagaagctgtattacagcggaaaacggcagccagtgccccgccgccccccagcgaggaggctgtgtccagcagctctgaggatgactctgggactgatcgggaagaggagggctctgtgtctcagcgctccactcccgtgaagatgacggacgcaggagacagtgccaaagtgaccgagaatgtggtccaacccatgaaggagctatatggaattaacctctcggatggcctctcagaagaagatttctccatttattcaagatttgttcagttggggcagagtcaacataaacaagacaagaatagccagcagccctgttccaggtgctcagatggagttatcaaactaacacccatctcagctttctcgcaagataacatctatgaagtccagcccccaagagtggacagaaaatctacagagatcttccaagcccacatccaggccagccaagnnnnnnnnnagcccctaggaaaagaggactccgccatgtaccgagnnnnnnnnnnnnnnngctacctgtgaaaagagcgcaggcccacatgggggccacatctgattagcttagaacctgtcttgtctcatcttccaagggtaacttatcaaatgtcctttgcgtctgaaggctttccccttttctgtcacttgcaaat

SEQ ID NO: 17030 - DNA, 736 bp, Macaca Fascicularis
  misc_feature (1)...(736): n = A,T,C or G
gagtgaagtataagaagggtggccttgtgatcaatgaaactgggctgtactttgtatattccaaagtatacttccggggtcaannnnnnnnnnnnnnnnccctgagccacaaggcactgaaaatgttgtattcagtgagggtctccttacatgcatttgaggtcaagtaagaagacgtgaaccaagtggaccttgagaccacagggttcaaaagacaactttaagaagaatttactggggtgagaagaattatgaagcaaatctttctgcctttgccaaggattcattctctctatatattctctttcctcttcacctcccagagtttccgttaccaatattgtgaccagtgttaagcttacccaactttccatggatttgatgagaaattatattttcctgaaggcagaactacggcacagtggaaagggcacacactttggactaaaaaacttagatttgaatctttgttcttccatgtactgcctaggtaatcactggttaggtcacttgaccttccttgaacaaaaaaagagctgaaagtatcagacatatagaatatcaaaaaatggtttctaccactactaagccatcctattagagccacttcattctccagaggccactgatctgtgggatccatgtaaacaccttgtttcttgtattctcatgcttgtcattcacaatggccttttcctattttattcaaccacttgctatcatgggctctccctag

SEQ ID NO: 17031 - DNA, 868 bp, Macaca Fascicularis
  misc_feature (1)...(868): n = A,T,C or G
caggaaggatttgcgttttcattgnnnnnnnnnnnnnnnnnnnnnnnnnnnnnnnnnnnnnnnnnnnnnnnnnnttgacgcctnnnnnnnnnnnnnnnttttaaaatgtaacttctnnnnnnnnnnnttcctgctttgtaggctgggaagatgccctcggggtagggatgctgannnnnnnnnnnnnnnggaggaaggctggagcttgttcctgccccacggccaggccaggagggaaggctgcagcaggactgctgtggggagcacccctgctgcccccctcactgaccaggggtggacaatgcccaagcagagggagcccattggnnnnnnnnnnnnnnnnnnnnnnnnnnnnnnnnnnnnnnnnnnnnnnnnttcccgtttcctcctccccacatggtgctgannnnnnnnnnnnnnntgcaattaaagcaattgattttctagtgctggtatttgttgactaccatgcagaagggctatctttctattcatgtcaaacctttggttgtgtggggttttttgttgttgttttttgggttttgttttttaatactttagggtcctgatttgtgggaacagaccttgtaaataaccactatctgagttgtggcaggaggatgataaagcacgcagcccctcccaaaggagcccttgagctagggaggtggtgcagtcagcctcgctctcaatgtgacccgggaatgaccacccagagggatgagctagcctgtagaggggaactggggtccaaaggtctttggggagggaggcagagctggctggctcagctaagtggcacgatgacgcatgaaggagattatgttgtgctctttattgccaaaaataaacactnnnaaaagacaac

SEQ ID NO: 17032 - DNA, 744 bp, Macaca Fascicularis
  misc_feature (1)...(744): n = A,T,C or G
tgtcttcagtctnnnnatgaannnnnngcctcaatggacggtgccgacgcactgtcagcatggagaccggatgccaaaatgtccaatgtngttccaccatcctcaatgtggcctttccccctgaagtcattgggccacttttcttctttcccctcctctacatgattttccagcttggagaagggcttctcctcattgccatgtttcggtgctatgagaaattcaagactcccaaggataaaacaaaaatgatctacactgctgccacaactgaagaaacannnnnnnnnnnnnnnggaaatggcacctacaaaggcgaggactgctccccttgcacagcctagcccttcccctggtggcctggattctggtcccaaagcaattctgaaagccagtctggtcaactacagagagcagcaaaaacaacagtcttgcctgagtctctcnnnnnnnnnnnnnnnnnnnnnnnnnnaatcatcaagccttggccgggaacacagacagggtgtctgcccaagaagcctcaactatccccaacttagaatttgctacttatttcaaagacttgtttagtgactggaaattctatgaaaccagaaaccaaatctgcctcnnnnnnngatctctgaaannnnnnnnnnnnnnnnncttaagtcactcaattcctgaactaatcaatatatatgtttaacccattactcaaatacccaaatcccattccaagttttgtgacccaaaagagaa

SEQ ID NO: 17033 - DNA, 677 bp, Macaca Fascicularis
  misc_feature (1)...(677): n = A,T,C or G
gggagcatcnnngcgcggctcggcagcgacggcaggtccgtttccgcctgacgccgccctccccggtgcggtccaagccgcagcctgcggtgccgcaggagctggagatgcccgtnnnnnnnnnnnnnnnngccttgggcctggagctgcgggccacagnnnnnnnnnnnnnnnnnnnnnnnnnnnccgtggaggaacagctaagaaagtcgttccagatccgctgcggcctggaggagagcgtgtccgagggtgaggggggcgggcggccggccgcgcgcgggagtcggaacgaggggcgccactcacctccgcccccgctgcgctctcagggctgaacgtgccgcgctccaagcggctcttccgggacctggtgagcctgcaggtgccggaggaacaggttctgaacgctgcgnnnnnnnnnnnnnnngctctcctgccgccacaggctcgagccccgcccccaaaggcgccacctgggccgnnnnnnnnnnnnnnnnnnnnnnnnnnnnnnnnnnnnnnnnnnnnnnnnnnnnnnnnnnnnaccctcgacggtttgtcccctctccggcttcaactccggccccgcccttcagaggacaccttcctcatgcaccggacactgaggcgatgggaagcgtagtagaccccaaagatccctggaggactagttcgta

SEQ ID NO: 17034 - DNA, 215 bp, Macaca Fascicularis
gcctacccccctctacaggccaccagatgggctcctgagaccctccccaggttgcttacagatcattttgctgggggtagagatgaggggagggagtaagttaaaccttggagtagcaagtagaagcatgggggggatctgtgtgcctcagtttccttctatacaactgaatatttatagtggtctgaaaactggggagatacatgatggagcag

SEQ ID NO: 17035 - DNA, 702 bp, Macaca Fascicularis
  misc_feature (1)...(702): n = A,T,C or G
agtggccagtcgggggaggagaaagacgcgattaacactgtggcattcagccaggccccatgtcctctctgtggaaggtttttgnnnnnnnnnnaggaccaaggcccttgggccactatcctgctaggctccagagcagcaggggcttcttgaactgggagcagggtggggctgtcgccttagatcccacccaagcccctcattccctccttgcacagatgcgtacactagggcccagcagctgcctccnnnnnnnnnnnnnnnngtagaaacatacagagctggaatcggcctagagccattcccctaccctgctgctaggccacggtctgtgccctggggcctcatctccccagcccacttgtttttcccccttttattccctaggcccttttcagacacttgggcccttggatactcttctcccaccccccttcacaggatggcaccctcccataccccatagctgggaccagcaggttctgctgagggtagggctggtgtagctatccccaagagacccctgccctgtcccttcaccagtcctggggaggctgggactccccctgccacaagcctgggccacagctcacattccactgctgggagaagagacaggccgaggcccagagtggcctgcccccgggagccaaagaccccagtggccacactgggacagggtggggaggctggcagccctct

SEQ ID NO: 17036 - DNA, 550 bp, Macaca Fascicularis
  misc_feature (1)...(550): n = A,T,C or G
gcccctcctccgggcagcccctttcctccatgtacnnnncaggggacagaagggggcccccatccctaccctgctccctggcctcctgcccctgtggtacccaaggaggggtatgtatgagagcccctctcctgctacctcccaccattgnnnnnnnnnnnnnnnnncacacaggcatatcagctttcacactttccccatgcactccctcccacccccttccagggcctctgctccaaaggaggcctctggaacccaggactctggggttttacaagagggctggggtggggaagggcaagctgcaccaaagacggtggacatagccactcccccagcatctgcttggccaattagttcagcctcagaccatggcacttcaacggggtctccacctccccatcaacagctgcagggggaccccagtgccaacttcctctcccactagggccctgccctcagctggtgcttgctgcgattcctgtgccttatgtaaccgcccttccttcccttgccctaggaaaaaggctgcatctttatatgttacatc

SEQ ID NO: 17037 - DNA, 730 bp, Macaca Fascicularis
  misc_feature (1)...(730): n = A,T,C or G
tnnnnnnnnnnnnnctcagaaactgatcaatcctgtcaaaacctcccggaaccatcaagatcttcacagagaacttcttatgaatcaaaaaaggggtcttgctcctcagaacaaaccagaattgcagaaggtgatggaaaaaagaaaacgagaccaagtaataaagcagaaggaagaagaagcacagaagnnnnnnnnnnacttggaaatagagctattaaaacggcagcagaagctggagcagcttgaacttgagaagcagaaattgcaagaagagcaagaaaacgcccnnnnnnnnnnnnnnnnnnaaggcaatctcaggagaacaggccaagaagtcgcccaagcccaggagtcctaggccgaggctgcagcaagacctcgtgtgtcaccccacagagctgtctgtgggtgcctcctnnnnnnnnnnnnnnnnnnnnnnnnnnnnnnnnnnnnnnnnnnnnnnnnnttgacttgcagtaggatttggtgtgattttcctacgatctgggtggatgccttgcctgtgatggttgcagttcctattcgccaaatgaagggcagtgccccgcacataagttggaatgatggacccgtgttcagagacttaacagaaccaacaagcagaaaagtgagaacaggaaaaaggaagaggacactggaatcagttcttgagaatcagttcttgagagttgcacgacttggttnncttccattccaagtttagtga

SEQ ID NO: 17038 - DNA, 757 bp, Macaca Fascicularis
  misc_feature (1)...(757): n = A,T,C or G
gattgaccacaataaagcacaggccttgccgcggcgtcaccctctcccactcctttgttctgggtcctttcgggagggctgatgggcagcacaggaggcccatcctcagcggggactgggcacatcatgctccttgcctggcatccagcatagctgcggtcaccaaagcaggcactggccctcggacatgagcgcccagccgggcccatgtggtctgcagatgcgagcggctgtttttgagcacggggccactctgcggtcacggtgaactggtccccgtcgcagacggagcgcacgtgcccgcgccatgttctcaggctcagtggagggacgcgttcggcaggacggtgcccacgggtacttgcagctgtgtcccatgtggcatcccggagctgcaccctgccggtctccgtcagcgccacgctgctgtgctggaaatgccactttaaaaagggataccacgggactctgcccatctctttcataatgcaatatttatttgtattgggtgattgatttttttgacctgacattttaggttttaaccaaataaccggtccaggagtgagcagctccgttctctgtcacagatgctattccagatgttaccagaacaatgacaaaaggggagacgctctattttttcacagttaaaggacagttgtagattgatacacagttgtgcatgggaaggggaaacgcacagctttannnnnnnnnnnnnnnnnnnnnnggaaggcttgtggaaccgtgcgca

SEQ ID NO: 17039 - DNA, 783 bp, Macaca Fascicularis
  misc_feature (1)...(783): n = A,T,C or G
cgtnnnnnnnaggcagtaggcccagcgcagnnggnctgctcctggaggagctgcacgtgtttgaggactcggccgctgtcaccagcatgcaaatctcctccaagaggcaccagctgtacatagcctcgcggagcgcggtggcccagatcgcgttgcaccgctgcgctgcccacggccgcgtctgcgccgaatgctgtctggcgcgtgacccctactgcgcctgggacggggtcgcgtgcacgcgcttccagcccagtgtcaagaggcggttccggcggcaagnnnnnnnnnnnggcgaccccagcacgctgtgctcgggagactcgtnnnnnnnnnnnnnnnnnnnnnacagagtnnnnnnnnnnnnnnnnnnnnnnnnnnnnnnnnngtgtgagccccgctcgctgcaggcgcgcgtggagtggactttccagcgcgcaggggtgacaacccatacccaagtgagccttactccaccctccctgccaggctcccgtcccaccccctgcatccaggagaggccccgccctacccaacgaagccccgcccaaccagacccacaccccgccgcgtcgtttggtccctcacctgcactccacaagctgcggagaccccattgcttccaaccgggctcctgacccgtctcccctgaattcgggagaagacccgccctccacctgcccattgaggtccctgacccaccccgcacgttcatgtaaaccccgcctcgttcggattctcccttgaagaccaccaactcccaaacagccttaaaatgtgcgc

SEQ ID NO: 17040 - DNA, 631 bp, Macaca Fascicularis
  misc_feature (1)...(631): n = A,T,C or G
attcatccagtgtccctacatagtgtcacaaagaatcatagtctgtgtttttaaaatcatagaaatgttattgaagaagttataagcctattaaataagaggcctcaggcaggcagatgtaaagttgtcattttaagtcaaggagaagaatctcactgattgttgtatcatatggaaaggaagtttagttgtcgatttctttttcagtttaagtgagtaaccaagctgaatatccccctttgatttaggaacggttgataccccatctctacaagaaagaatacaagccagaggaaatcctgaagaggcacggaatgatttcctgaagagacaaaagacgggaagatttgcaactgcagaagaaatagccatgctctgcgtgtatttggcttctgatgaatctgcttatgtaactggtaaccctgtcatcattgatggaggctggagcttgtgattttaggatctccatggtgggaaggaaggcaggcccttcctatccacagtgaacctggttatgaagaaaactcaccaatcatctctttcctgttaatcacatgttnnnnnnnnnnnnnnnnnnnnaatgacgtcactgtttgcaagtctgattctttaggtatattaatctctttgt

SEQ ID NO: 17041 - DNA, 642 bp, Macaca Fascicularis
  misc_feature (1)...(642): n = A,T,C or G
ataacataacaccaaacttcatttttaaaaaaatctgttgttccaaatgtgtataattttaaagtaatttctaaagcagtttattataatnnnnnnnnnnnnnnnaaggtataattaaacttttctcctctacattgacacatagaaatgtgtcagtgtaaagccaaaaccatcttctgtgtttatggccaatctattctatgtccaaagttaaaagtaaaattgttttagagtcacagttccctttgtttcacataagcccaaattgatagacagtaagggtgtttagttttatactatatttgtgctatttaattctttatattttcacaattattaaattgtgtatactttcattacttttaaaaatgtagaaattcttcatgaacataactctgctgaacgtaaaagaaattttttttcaaaaatgttgttaatgtatactactggtggttgattggttttgttttgnnnnnnnnnnnnnnnnnnnnnnnnnnnnnntttccatttgtattgtacataaaattttctagaaatacacttttttccaaagtgtaagtttgtgaatagattttagcatgatgaaactgtcataatggtgaatgttcaatctgtgtaagaaaacaaactaaatgtagttgt

SEQ ID NO: 17042 - DNA, 788 bp, Macaca Fascicularis
  misc_feature (1)...(788): n = A,T,C or G
gagatgcgcaaattcactcnnnagtacaaaggacaaagccaaaggccccttgttagctgtccgtccctgccccattttttcccctggtcctttcccctgtggccacagggaagnnnnnnnnnnnnnnnnnaccccggctcctctgcacccagagctgggagccacctnnnnnnnnnnnnnnnnnnnnnnnnnnnnnnncccctgcagcagtcgagcgggcgggcagcaaggactgagcagattgagtgatgctggggcagagaggcctgggaggaaaggtnnnnnnnnnnnnnnnnnnnnnnnnnnnnncggcacctgctgaaacgcccccacctgacagccccatcctcaaagactgtctaattactcatggcaggttctagagacttaagggggaacgctgctttcaaggccaccacatgtctgtgctccccaaccaactctatctgccttgtgttcattttgttnnnnnnnnnnnnnnnnnnnnnnnnnnnaataaaaacatattttaaaagaacaaaaggcctgggtgcctacccgtgtgggggcactgtgggaagcctttgctagggtgtcttgtgctgtgtggtttgttttgtttgcccctttattttgttttgcttacccaatcttcccttattcttggatgcttcttnnnnnnnnnnnnnnnnnnnnttccccctgtattcaggctctgctttaaagcaagccatgaggctattggagtttctgtttagggcattaaaaattcccgcaaactataaagagcaatgttttcagtcttttag

SEQ ID NO: 17043 - DNA, 860 bp, Macaca Fascicularis
  misc_feature (1)...(860): n = A,T,C or G
gannnnnnnnnnnnnnnnntaatnnnnnnnagtagcacaagaaacactccttgagagggagaggaaaagacttnnntaaatatttcatttatgacctgcaaattcaagaataaagacattgaannnnnnnnnnnnnnnnnnngttgtttccagtcttttcagatggatgcctattgtggagattaactttggcatattccagtgtcagctttccttagctggaattgccaaatcatttgttgctcctgctgctctcatgnnnnnnnnnnnnnnnnnnnnnnnnnnnnnnntagnnnnnnnnnnnnnngtttgatatctaaagtagaattacttttaatgtagtttttcttcattattgtcattgcgtgttcttaagttttaccccattagatggtaagaacaatnnnnnnnnnnnnnnnnnnntatttttacattctgatcattcaattctgttattgtaatctttgttgttagaaacaaatgatggaaacataggggttctgtaaacttttgtaatgctatgaattctgtttaaattttgggctgtttattttctgctgagaccattgcaaacctgagctttggcgggttgggaggggttatatattcatgggtnnnnnnnnnnnnnnnnnnnacagaactgatttctctctgtcagtgatttaatacattgaacattgagtgaaatgttcaaagagaaaagatgtttcccaaaacaacgtttatgttaaaaatagtcattaaaagatatgttgtaatagatnnnggatattattttttaatttcaaacatttcttctgtaatgaaaaaaaaaaaaaaaaaagntgttatttagacaattaggcataacattgttttgt

SEQ ID NO: 17044 - DNA, 741 bp, Macaca Fascicularis
  misc_feature (1)...(741): n = A,T,C or G
ctgacgtcagcaggatngnngccagtggggccgaggaccggcacggctacatctgggaccgccactacaacatctgcttggccaagctgcggcacgaggacgtnnnnnnnnnnnnnnnnnncagtccccaggagcaggagctgctgctcacggccagcgnnnnnnncaccatcaaagcctggcgctccccacgnnnnnnnnnnnnnnnnnnnnnnnnnnnnnnnnnnnnnnnnnnnnnnnnnnnnnnnnnnnnnnnnnnnnnnngcnnnnnnnnnnnnnnnnnnnnnnnnnnnnnnnnnngacccctcgacgccacccaggctctgtggttctttaccgagcgggagaggtggagacgcttgtagcagttacgccttaggaaggggacagccaggccccgccacgctctcacacgcaaacctgctcacgcagctgtgatgcttggcacagggtggccagtgaggttggaacccaaggtccccttggcctcctggccagcttggggtgcacaggatactgggggtgccgctcctcgctcatccctaggctaggggttcacccgccccagctggcctcagcctggggcaccctcggctggtcctgcggggnnnnnnnnnnnnnnnnnnnnnnnnnnnnnnnnnnnnnnnnnnnnnnnnnnnnnnnnnnnntgcgcccggggcttgggagtggccagtcacactgctgtgggcccgaatgtgttgcatgtccacgcaccacccg

SEQ ID NO: 17045 - DNA, 767 bp, Macaca Fascicularis
  misc_feature (1)...(767): n = A,T,C or G
ggcacgnnnnnnnnnnctggnnnnnnnnnnnnnnnnnnnnnnnnnnnnnnnnnnnnnnnnnnnnnnnngaagctggcagacatgctcactgagnnnaccctgggccttcacgcctgcctgcagctcggccgcttgaaggaccaggacaaggctgcccccgagatggtctctctgctgaagaggaataactgtgggaaagccctggacatcgcccgccaggcccgagacatgctgggggggaatgggatttctgacgagtatcacgtgatccggcacgccatgaacttggaggctgtgaacacctacgaaggtacacatgacattcacgccctgatccttgggagagctatcacgggaatccaggcattcaccgccagcaagtgagcccgtcccatcaggggcccaaaactctgaagcccctttctggagagaggcctggctggaccgctggagcgccatgctctgagagggaggtggcggatggcgtgggaagtgagagacactgatttttaaatatcaaaatttccctttgaagtcgttcggatgtgttccttaaaaagaagatggaattctctgtagagcgtctcaatccacttttaaccatggatgagaacagactccatttaccctgaaatagcagcttttcttgagaggagagtgacattgaagcaactccgtctgctccagccgacccctcacaccgagttcacagtgtgccctccgtccctcccatctgggggtagtgccttatgctgggtgttggagcg

SEQ ID NO: 17046 - DNA, 737 bp, Macaca Fascicularis
  misc_feature (1)...(737): n = A,T,C or G
gctgcatgagannncccagnnntgcgggcgcaacgccaccacgnnntngtgagaacgggctgctatgagaaggtgaagatgtggttcgatgacaataagcacgtgctgggcacggtggggatgtgcnnnnnnnnnnnnnnnnnnnnnnnnnnnnnnnnnnnnnnnnnnnnnnnnnnnnnnnnnnnnnnnnnnnnnnnnnnnnnnnnnnnnnnnnnnnnnnngccgggagtgcccgccccgccctgctgccctgtggagggaagaagattgagctttgtgtcgcctgcctgcactctccagatgtgacccctgcacccacccaccctggcctgccctaccccacctaccctgcctcagcctcggacttctcagtgggtggagtgccagggaggaggaggcacannnnnnnnnnnnnnncggggcacctggattcctgcatctgcatatgcgtatttgccaaagacgacagggtgggctggggtgcactcaggaggaacccccagcactgatgggcttctgcccctgcccttcctcacacnnnnnnnnnnnnnnnnnnnnnnnnngggagcagagtgcccgcccnnnnnnnnnnnnnnnccagcaggggctgctacgtccatggccaccatggggcacttggcggggcggggggtctgccagcctctgggcaaggcccctggagcatctcgcccaggctttttataccttacaatgtaactttttttattttatttact

SEQ ID NO: 17047 - DNA, 722 bp, Macaca Fascicularis
  misc_feature (1)...(722): n = A,T,C or G
ctgccatgcagaggtccaactcnccacccacgtccctggtacctgagacccctggcatcctcagggtcctgcccgtggcgcccttctaccaacccagggtgcggctgctgcactgtctacacagctgggggcctctgagcctggtgggctctcctggactcttggccacactcctcaccccctccacacgacacccatgagccgaaaggatgtcactaaagatggctgattccccaagggcacctgctctccctcccccgctgctggaggaacgcatcatgtcagatgagaggaagatggcctttgatggacagaatttttcttttaactcagcttttgctactttggcaacaattagtgagggatagcggaaacctgtgccaagggctgtccctatgtcttggcccctcctagagagtgtgcggactgatgattttatatgtaaatcaagactcacatccctttcctagtcccccacatccaaagcccctcagcctaccttgcagaccaatgggctccatgttctgtagccccctcccccatacctcccccctccttcctctcgcaggttctggggggccagtgagagaaacagtgggggaggcggggagtctggtgcctgcagagattctctgcttctttcctggggggaggtggggaggtcttagcaggagcagggccctgtacccacctgctgacatgctgtttggtagagaaataaa

SEQ ID NO: 17048 - DNA, 719 bp, Macaca Fascicularis
  misc_feature (1)...(719): n = A,T,C or G
agcgnnnnnnnntcannnnnnnctgattagatgaaattgttatcttaccctaaacacagtatttctttttaacttttttatttgtaaactaataaaggtaatcctagccaccaacattccaagctaccctgagtacctttgtgcagtagaagctggtgagcatgtgagcgagcagtgtgcacacggagactcatcgttatcatttactatctgccaagagtagaaagaaaggctggggatattttggttggtttggttttgatttcttacttgtttgtttgtttgttttatactgaaacagtattatcttttgaatatcgtagggacataagtatatacatgttatccagtcaagatggctagaatggtgcctttctgagtgtctaaaacttgacacccctggtaaatctttcaacacacnnnnnnnnnnnnnnnnnngaagtttttattcatttttaaccactggaatttttcaatgccgtcattttcagttcgatgattttgcactttgagattaaaatgccatgtctatttgattagtcttattttttatttgtacaggcttctcagtctcactattggctgtcattgtgacaaagtcaaataaacccccaaggatgacacacagtatggatcacatgttgtttgacattannnnnnnnnnnnnnnatgttgcatgtgttttacctcgacttgctaaaatcgattagcagaaaggc

SEQ ID NO: 17049 - DNA, 586 bp, Macaca Fascicularis
  misc_feature (1)...(586): n = A,T,C or G
ctccccccatattcacaggtctccacaaccctggaccttttcacagctgcttggggacagccgtctgtgggcccctcagggtggggctnnnnnnnnnnnnnnnnnnnnnnnnnnnnnnnnnnnnnnnnnnnnnnnnnnnnnnnnnnnnnnnnnnnnagannnnnnnnnnnnnnatgtcctgttccttctannnnnnnnnnnnnnnnnnnnnctggaaagattcttcgactcagaagatgaagactttgaaatcctgtccctttgaaaatcctggggtcgggggtggcacctgtgagagcctggggctcctggtgccgccgcnnnnnnnnnnnnnnnnnnnnnnnnnnnnnnnnnnnnnnnnnnnntgctgcctccccccagagggccacccgctccgcttgtggactgaggctgcnnnnnnnnnnnnnnnnnactgcttggtgtccgactgccgagctcagagtgcccgtcagggnnnnnnnnnnnnnnnnnnnnnnnnnnnnnnnnnnnnntccagagcgttctctggacactgccagccccgcgttagcgcctgggcctcagtcccacttgctcccaggcgccg

SEQ ID NO: 17050 - DNA, 726 bp, Macaca Fascicularis
  misc_feature (1)...(726): n = A,T,C or G
ccggtgccaaggccagcgnngaggcggcgggcacgggatgctgtttgtgctaccccaattagggccnnnnnnnnnatggcagctccagcaaggaccgtctgggatagcacctctcagtcaacatcatggggctggacagggctgcggcccctctgcccatactcagtactgaccaaagccagggctgtgtgtgcctgtgtgtgggtcccacggctgctgcctccccagggggcggagcctgggcctcccctaagaggcttcccccaggcagctnnnnnnnnnnnnnnnnnnnnnnnnnnnnnnnnnnnnnnnnnnnnnnnnnnnnnnnnnnnnnnncggggagggagagcctggggctccactcagggcccatnnnnnnnnnnnnnnnnnnnnnnncggtggtattcaaggcagttttgtagcacttgtaatcggggagagggagtgtgcccctctggcaggagggaagggcatctggggaagggcagaagggaaggagggaagaagggaagggctgtccccacagccacgcccatgaccaggttggcctcttatcagcctcccaggtgccttgagccctcttttgagagggcggctgcttccttgagcatagttttttatgtgatttttgtaacattcatttttttgtacagataacaggagtttatgaataatcaaagaaggtatttccccgcatgtcttattcttgccctccccccaaccact

SEQ ID NO: 17051 - DNA, 750 bp, Macaca Fascicularis
  misc_feature (1)...(750): n = A,T,C or G
gacgaagatgaagacttcaagaggcaggatgcagagatgaaggaaagcatcccttttgcagtcgtgggttcatgcgaggtggtgagggatggcgggaagcgaccggtgaggggacgccgctactcctgggggaccgtggaggtggagaacccacatcactgcgatttcctgaaccnnnnnnnnnnnnnnnnnnnnnnacacctgcaggacctgaaagaggtgacgcannnnnnnnnnnnnnnnnnnnnnnnnnnnnnnnnnnnnnnnnnnnnnncccggcctggggnnngcgatcgagccagccgcagtnngctttcccgccaaagcgccacggagatcccgctgcccatgctgcctctggcggacaccgagaagctgatccgcgagaaagacgaagagctgcgccgcatgcaagagatgctagagaagatgcaggcccagatgcagcagagccaggcccagggcgagcagtcagacaccctttgaggccacgccccgcccggccttacctcggctccgccttcagtcggcctcttgtccaatccccgcgccccacactgcccagcgccccctggaaccccgtgggtgccgccctcgcgcgggctagggggaggttctaccagcccgggcccgtagccccgccccggcgctggtcccgcccacccagacaccgcccacttcccggccggagcctgcggcccagtctccgaccgccccactgtcttccggggtgcccccctctctcccaga

SEQ ID NO: 17052 - DNA, 740 bp, Macaca Fascicularis
  misc_feature (1)...(740): n = A,T,C or G
gatgatgagaacagcagctgctnnnnnnnnnnnnnnnnnnnnnnnnnccgtggtacagaacaccaaagcagagcttacgcactcccgggagaaggtccgtcaactggaatccaatcttcccaagcaccaaaaacatctaaacccatcaggtaccatgaaacccacagagcaagaaaaattnnnnnnnnnnnnnnnnnnnnnnnnnnnnnagaaagaacgatctcctactaacaggaaggtcagtcagatgaattcccttgaacaagaattggaaacaattcatttggaaaatgaaggcctgaaaaagaaacaagtaaaactggatgagcagctcatggagatgcagcacctgaggttcactgtgacgnnnagcccgtcccctcatgcttgggatttgcagctgctccagcagcaagcctgtccgatggtacccagggagcagtttctgcagcttcaacaccagctgctgcaggcagaaaggataaaccagcacctgcaggaggaacttgaaaacaggacctccgaaaccaacacaccacagggaaaccaggaacaactggtaactgtcatggaagaacgaatgatagaagttgaacagaaactgaaactagtgaaaaggcttcttcaagagaaagtgaatcagctcaaggaacaagtgagcctccctggtcatctctgttcacccacctcacattccagctttaatgccagtttnnnnnncctttattgccattaactca

SEQ ID NO: 17053 - DNA, 1142 bp, Macaca Fascicularis
  misc_feature (1)...(1142): n = A,T,C or G
cagaagtgcctggagataggggcgctcacgcggcaggncgaggagcgtgagcacacactgcgccgctgccagcaggagggccaggagctgnngcgccacaaccaggagctgcatggccgcctgtcagaggagatagnnnnnnnnnnnnnnntcattgcctcacagggcatgggcaacggctgcaggcgcagcaatgagcggagttcctgcgagctggaggtgctgcttcgtgtaaaagagaatgaactccagtacctgaagaaggaagtgcagtgcctccgagacgaacnnnnnnngatgcagaaggacaagcgcttcacctcgggaaagtnnnnnnnnnnnnnngtggannnnnnnnnnnnnnnnnnncggtccaagcgggagatcgagcagctgaaggagcacctgcgccttgccatggccgccctccaggagaaggagtcaatgcgcaacagcntnnnngagtagaggtcccgctcacatgcagaccatccaggctggaggaccagccgccctctttccctcgtggatggaagtcaaaagccaagctttctccccaccctctgtgggccacacgtgcacttgcacccaccacacacacccacacacagacacagacacacacacacacgtgcacacatgtacacacggacacacacacacacacacacactctgcgtatctgagcgcgcccctcgcactgggtcttaccttgcaccttcttcaggattttatatgtgaagagatttttatatagatttttttcctttttttccaaaacactttatactttaaaaaaaaaaaaaaaaattcctggtggtcgtgtgcctccagccctggtccccgctctgtctccagccaccctctgcttgggcttctgggctggtggccctggtccgggggtctggcggaggcccaggcagcagccatggcagggtatctctgcaggggagaggcgggagcctgccaccttcctcctaccctacctcctactaacacttcctgccccatttggacctgtaccatggggctcaggacagagggagccagcagctggcttccatggccccacagcctcctctgaggctgtgctgggtgcggaaccgccggagccacccaaaaggtgattctctcctgccccc

SEQ ID NO: 17054 - DNA, 654 bp, Macaca Fascicularis
  misc_feature (1)...(654): n = A,T,C or G
agcnccatctggaaggagtccctgctctgtcccagccctaacccgaggctgtgtgggagtcccttctgcacctcttatttcctaaacccttcgtgtcagctgctgtttgctggcttgtccccagccaggcctcctgaggccttcgtagttggcagagtccacatctcttctagcttcactggccgctcactcagcccagagtccctacgtgcccccccgccacccccccacttatctctgcatctctccaatttggaagccatccagctgatgctaacagccagggccagtccctccagctggtcccatgtaatgaggccagggctgcttatcagcttccaggcggctgggatctcaggcagggtgtgcgtcagccttccaacccccaggggggcgcctgtggggagggaaccaggaggccacactgggggagcgtgcagccagcatgtgcagtggccagctcgaggccagtggaaagttactgtgtggagacaggaaagctctgagtggatagcagaaccctcccttggcttcgccctcctcctcttctctctcccctgtgctgggagctctgtctgccctgggaagggtgacgaggtgtgctgttccttcccaaccccatccctccccacccttcctactcccagcttcaag

SEQ ID NO: 17055 - DNA, 459 bp, Macaca Fascicularis
cggcgggagcccgggcggcgcggggtgggcccgagggccagagaacgcggaaggctctttggggcaaggggaggggctgcagctttcggcctcctagagggcttgcaggaaccatgaaccgcggcagagcaaactcactgtccgcgctcctcgtctccgggaggccaggaaagtcccttctgctggttcgccgccgccgccttcctgggcatggcctggcccggccctcagagaggtgagggcgggacggggaagctgggagttgtccttccttcctttctttgaaatcaaaatcctttcctcggggaggagcgcgggaggcagcacaggcagactctgctgtcagccgccgcgctcgaggccacctcgggcttggcggcgcacgtgggcttcaggcgccgtgaccccgccaggcggcacttccccgcgacggcaggcgggggctggctctccgagacg

SEQ ID NO: 17056 - DNA, 700 bp, Macaca Fascicularis
  misc_feature (1)...(700): n = A,T,C or G
cngcannnngcnnnncagaannnngtcccacttgcaaaccttannnnngagccacaatgagcttcttggtctccagagtcaagcattcaaagaatgtcctcggctagaactcctggatttggcgtttacccgcttacacattaatgctccacaaagtcccttccaaaacctccatttcctgcaggttctgaatctcacttactgcttccttgataccagcaatcagcatcttctagcaggcctaccagatctccggcatctcaacttaaaaggcaatcactttcaagatgggactatcatgaagaccaacctacttcagaccgtgggcagcttggagattctgattttatcctcctgtggtctcctctctatagaccagcaagcattccacggcttgggaaaaatgagccatgtagacttaagccacaacagcctgacatgtgacagcattgcttctgttagtcattttaagggaatttacctcaatctggccgccaacagcattaacatcatcccaccccatctcctccccatcttgtcccagcaaagcaccattaatttcagtcacaatcccctggactgcacttgctcgaatattcatttcttaacatggtacaaagaaaacctgcacaaacttgaaggctcggaggagaccacgtgtgcaaacccgccgtctctaaggggagttaagctatctgat

SEQ ID NO: 17057 - DNA, 745 bp, Macaca Fascicularis
  misc_feature (1)...(745): n = A,T,C or G
ctgtgaagnnnnnnnnnnnnnnnnnnnnnnnnnnnnnnnnnnngcctgtcaatgcggcnnnnnnnnnnnnnnnnnngactattcccattaccaccctcttggttaaccctacttccttcccctgtcaattgaaccagccccttgtggcctcctctgtctcacccttaattgtttcnnnnnnnnnnnnnnnnnntcctataccttccacccctgaagataaggcccatgtgaatgtggacattgcttgtgctgtggctaatggggaaaatgcctttcagggcctagaacccaaattagagccccaggaactatctcctctctctgctactgttttccccaaagtggannnnnnnnnnnnnnnnnnnnnnnnnnnnnnnnnnnnnnnnnnnnnnnnnnnnnnnnnnnnnnnnnnnnnnnnnnnnnnnntgaaaacagaggagggaagacaagctctggagccgctgcctcagggcatccaggagtctctaaacaactcttcctctggggatttagaggaagttgtcaagatggaacctgaagatgctacagaggaaatcagtggatttccttgaggaaggagaatagagtgtggagactgggagnnnnnnnnnnnnnnnnnnnnnnnnnnnnnntaggacgtaaccaataggaaacctttaaaagggtacttaannnnnnnnnnnnnnnnnnnnnggggctcttgagcagcttgctttagcctgctccaactctntggagtatactt

SEQ ID NO: 17058 - DNA, 713 bp, Macaca Fascicularis
  misc_feature (1)...(713): n = A,T,C or G
caggacaaagaggtgaagacataggccaggagcggtggcttacgctgtgnnnnnnnnnnnnnnnnnnnnnnnnnnnnnnnnnnnnnnnnnnnnnnnnnnnnnnnnnnnnnnnnnnnnnnnnnnnnnnnnnnnnnnnnnnnnnnnnnnnnnnnnnnnnnnnnnnnnnnnnnnnnnnnnnnnnnnnnnnnnnnnnnnnnnnnnnnnnnnnnnnnnnnnnnnnnnnnnnnnnnnnnnnnnnnnnnnnnnnnnnnnnnnnnnnnnnnnnnnnnnnnnnnnnnnnnnnnnnnnnnnnnnnnnnnnnnnnncaaaagaaaaaaagaaaaaaaaggtgaagacagacacagaccctgactgtttcagcccctagatccagccatgcctgaaactggtccacttacatgaactaaaaaattccctatttttcttatggttgtttgctttggtatctatcacttggagctgaacgcattctgacataacctctttgtgatcccagattaagaatgtcttttttcctggcagcaaatttccttttgatgaaactgccaatcaagctctagaccaccatgagtggccccttgcagcctgagttgctcagccagagatgtttggttggaattcattagcgatcttatcataactgtaaaggtatattctatgtgggttttctgaaatatttgtaatggcttaaggcagaatctggcctgcagact

SEQ ID NO: 17059 - DNA, 814 bp, Macaca Fascicularis
  misc_feature (1)...(814): n = A,T,C or G
cnnnnnnnnnnnngtgtgcagaggccagggaaactgcacggcggctgctgacccactacgtgaaggtgcagggcctggtcatatcacagatgctgcgcaagagcgtggagactcgggactggctcagcactctggagccgcgtaatgtgcgggccgtcatgaagcgggtggtggaggataccaccgccatcgacgtgcaggtggggcttctgtacgaagagggtgttcgcaaggcccagagcagcgactccagcaagaggaccttctccgtgtacagcagctctcggcagcagggccgctacgcccccagctatacccccagtgccccgatggacaccaacctcttgagcaatatccagaagctattctctgaacgtattgatgtgttcagccctgtggagttcaacaaggtgtcgggccnnnnnnnnnnnnnnnnnnnnnnnnnnnnnnnnnnnnnnnnnnnnnnnnnnnnnnnnnnnnnnnnntcagcctgaagacgctgctggagtgtgtgcggctgcgcacctttgggcgcttcgggctgcagcaggtgcaannnnnnnnnnnnnnnnnnnnnnnnnnnnnnnnnnnttttgtggccgacgaagaactggtgcacttgctgctagacgaagtggtggcctcggctgccctgcgctgcccagaccctgtgcccatggagcccagtgtggtcgaggtcatctgcgagcgcggctagnnnnnnnnnnnnnnnnnnnnnggcctgtcccggcgccccatggnnnnnnnnnnnnnnnctccacccggtggtccccgcaggcaggctcaggaccta

SEQ ID NO: 17060 - DNA, 724 bp, Macaca Fascicularis
  misc_feature (1)...(724): n = A,T,C or G
atgtcaaattttcagatgtgaaatctacaaagtnnnnncannnaccatcccagactcctgtttacctttgggcatgtctcaagnnnnnnnnnnnnnnnnnnnnnnnnnnnnnnntcctgggcgagatatggtgcaccacctactgagtgttagcactgccgagggcacagnnnnnnnnnnnnntgagacgagcgtagctggcttcattgtggtgacnnnnnnnnnnnnnnnnnnnnnnnnntttactgttctgtctccagccccccgcccactgcctaagaacttccttctcatcatggacatccggttcatggatctgaagtagagatcagcaggaagccttgctgcctgggacatagagatcttctggccacccctagaggcagatgggctgagataagagactctgttggggccacctaaccagtaaactgtggactagtagaagttcatattctacctctaaaaacaggtagtggtaacctgactcttctaatctggaaccaaaaggaaaaccnnnnnnnnnnnnnnnnnnnnnttagactacctaagatgccacttngnnnnctcnaagaccctggagaattgcatttctttcactgtgctactttgtggtttttaaaaatcaatgctttatattccatatagggttcttacccatttatctaggatgaaagtgtgaattannnnnnnnnnnnnnnnnaannnnnnnnnnnnnnnaata

SEQ ID NO: 17061 - DNA, 722 bp, Macaca Fascicularis
  misc_feature (1)...(722): n = A,T,C or G
ttaaagcatacatcagcatgcattcatactcccagcatatagtgtttccatattcctatactcgaagcaaaagcaaagaccacgaggaattgtctctagtagccagtgaagcagttcgtgctattcagaaaaccagtaaaaatatcaggtatacacatggccgtggctcagaaaccttatacctagctcctggaggtgcggacgattggatctatgatttgggcatcaaatattcgtttacaattgaacttcgagatacgggcaaatacggattcttgctgccagagcgttacatcaaacccacttgtaannnnnnnnnnnnnnnngtctctaaaatagcttggcatgtcattaggaatgtttaatgccctcgattttatcattctgctttcgtattttaatttactgattccagcaagactaaatcattgtatcagattatttttaagttttatccgtagtttcgataaaagattttcccataccttggttttgtcagagaacctaataagtgctactttgacattaaggcagacaagggttcatgtctttttacctttcaaaaaaaaattgtaaaagtctagctacctactttttctttgnnnnnnnnnnnnnnnnnnnnnnnnnnnnnnnnnnnnaataacaagtttnnnnnnnnncgttggatcctactcaataaaaggaagggtggtcagaagtacattaaagatttctgctccaaa

SEQ ID NO: 17062 - DNA, 1117 bp, Macaca Fascicularis
  misc_feature (1)...(1117): n = A,T,C or G
tgtcttagctattagcaaataaaacagattatcattctttattaaccctccttggaattttaaaaacctcaagattaaagttgccaaattgattactggatcaatnnnnnnnnnnnnnnnnnnggacagacagacagactgaannnnnnnnnnnnnnnnnnnnnncacagaacatgagattccttttgctggatatgcagaaatgataggaaaaaaaaacaatggtgaaatttcaagttttgaaaaccaacttttcattaccaatcccaggcaacaaacatgtcccagagtgttctttaaatgtctgggatttatgtacaatttaatactggagttagaaagaactttttccttattgaatgccaaccttatgatggatgtgaaaatctatgaccaaatacttgaaaacacctttctatattgcacagtgggcaaatggcttatgtgaggtaagacactagagggataaatttccagtccaacatggctatggtgtttagcaatggcccagcttagagacttcagctactgatctcatcacttattagacaaatcgctgctgatcttacatctgtatattaagcctnnnnnnnnnnnnnnnnnnnnnnnnnnnnnnatnnnnnaattagnnnntcctggccaaaccaccccaagatgattacactgaagcataatacnnnnnnnnnnnnnnnatctgtttctaacagcatgtgcgtctcttgggannnnnnnnnnnnnttaagccacaatgcccttgtgccttttaacataccacagtgccagttaaactagtatttttgtttgttgcttttgggagttattttcattagtgagttcagcaaatctcatgataaaggacaaggtcaagaactccagagcactgagcagagaggctagtaatgnnnnnnnnnnnnnnnncacactgaactgtaaggcagtaggcagtacagggtaactggaggtggggccagggcctcagcactannnnnnnnnnnnnnnnnaggctgcacatggcccaggagtggcaccatgttgcagggacaaccatccccacttggcttctccttaaaacacaattgcannngcattctgcatcgcagannnttgctaactcact

SEQ ID NO: 17063 - DNA, 726 bp, Macaca Fascicularis
  misc_feature (1)...(726): n = A,T,C or G
ttttgatgggcactnnnnnnntgaacgtgatgggacctgncttctccactagcagctgggcagctcacaactcacacctgtgtacctgccacatccctcacttggtggaaaacacccagaaggtctggagtccctcacccctgggtgtcagtccaaatgactgtataggaggcccttatttttgtcacagagcaagctggccatgaatgaaggagagaggacgccacagatttccttccctcccttccaggagaccataagatagatcccccatcctctcagccctatccccacgcctccctctcattagaggagctgaccaaagcagtcctaatgggccataacacttgaccaattcagctgctggcagagggaggaaacaagtgttttcccaagtggcattttcatctcgctttcaccctgactaaagattgtcttaagtagcaggccagcccgcccagccccaggtgggtagtggggaggagagctggcattcctccaggtggcaaatggcaaatctatactctccgcccgccccagggctggattggattagaaaaatgcctatttttcttgtatcgatgtagaaactctattttctcccaaagacactatttttgcagctgtttgaagtttgtatattttccgtactgcagagcttacacaaaattgaagaatgttaatgttcgagttttcttatcttgtgtttagaggttgttttttgca

SEQ ID NO: 17064 - DNA, 742 bp, Macaca Fascicularis
  misc_feature (1)...(742): n = A,T,C or G
gccaggctgatcttgaactnntgacctcgtgatccacccgcctangtctccgaaagtgctgggattacaggcgtgagccacaaagcccagccaagagagagatttctacatgaacaannnnnnnnnnnnnnnnnnnnnnnnnnnnnnnnnnnnnnnnnnnnnnnnnnnnnnnnnnggagatcaccannnnnnnnnnnnntagagcagcacacattttcacgtttccactgcaatcgttttgcacaaagtcttnnnnnnnnnnnnnnnnnnnnnnnnnnnnnnnnnagagatgtaaaaataagaatgaatgtggcaccccttcttccagatgtaatagaaagctttgccgtatcccaaggagggtgtttaagtgccccttgtgttttaactgtattcaactgagcacaagatgnnnnnnnnnnnnnnnnnnnnnnnnnnnnnnnnnnnnnnnnnnnnnntgcagatcgcagacctgtttccaggctgatgtttctggtgtgtaattgctagtgtttctgaagggttttccgaattgtttcagccttgtgaagtattcttttcttaattataacttgcctttcagcgatggtacatgacttggttcaacgtttggttctgaacttatacactgatgcatttactcatctaacataatctgacaaggcctcagtagggagccatacatttttgtaacgttttgatatgttttaatgcacctgacttagatcttaccgaaataaag

SEQ ID NO: 17065 - DNA, 1075 bp, Macaca Fascicularis
  misc_feature (1)...(1075): n = A,T,C or G
atacagcaggttttggtttgaattactaaaactttaaaaaatatnnnnnttacgtatgctgtaacatcataggtgtttataaaattctgttagtagtcttaaaattgaattggtggaaccactagtccctaaaagttagtctggttatttttcatatagaagtaagtttaatccgagtgtggtggtgttcacctttaatcccagctacttgggaggctgaggtgggcggatcacttgagcccaggagttcaagaccagcgtgggcaatatagaagactccacccctccacaccccaaaaaagtaagtttagaattagaatatagctaagtccaatgttaaatacatttnnnnnnnnnnnntttgtcacattcagctttgagaaactgtaagcatgttactattaaatggttggttattttatatagtatattctttatnnnnnnnnnnttatgaataaagtgtagttattttaatnnnnnnnnnnnnnnnctaaatagaaaatatttgagtcattactgaattcatgtatgtttttttttactttttaaatacccaacatgtattatgaaatacctcaaaagtaatttagttacattcttaaacaatgacattgtcgaaagtcagaaagttcatataaactgttttttgcatttttataacttggtggtactatattctgtttccnnnnnnnnnnnnnnnnnnnnnnnnnnnnnttgttgggttttagatctcttttcatttgtcaaccttttcagtaaagcactccgttatgtcattgtgactgtggctgtgttattagagatgaattctgagttaaatttatacttactagaggtcttacagagggagaatctggccttgacagctatgccatatcacatcctgtcctaatggttagaacnnnnnnnnnnnnnnnnnnnnnnnnnnnnnnnnnnnnnnnnnnnnnnnnnnntacttgccctctaaaaaaatttttccaacttcctaaaggggctatttcatacagatatactcactttatatgtatgtttctaaaaganttannnnaggctgaatccaagtttcatgtagtag

SEQ ID NO: 17066 - DNA, 645 bp, Macaca Fascicularis
  misc_feature (1)...(645): n = A,T,C or G
gaagcatacagaatggtaagaaaggaagcccggggctcggctgcagtcctggggatctgagtcagggggttgagctgctgcaagaaaagggtccggaacagcagaggggacgggggctctgtacagaggacaaagccagaggcagggcgtggggctatgtacaacgggaatagaaaaggagaattccatttcgatagcttnnnnnnnnnnnnnnnnnnagaaagtgaggtgtatttttaaatttttgacgtttcatgagacagtggagtcacgtcgggagcctgtattttttgctgcttccctacttcagtgctccctgccttgccaggagctcctccctgccacctgctctgctcctcccaccaggtgagcttggctgctcctgccacctggacacctgccttgggagcagcgaaggggccggcccaggcttccccatcccttgcccttcccatgggcctctgctctggctgtgccggtccaggcccacagccactgagactcccaaccttgaggcgcagctgggcactggcccgtccctggccgcccacagtggactgggctcgcaggggagcggcagggagggctgggtcccagcaggcagcacgaggtcagccttggtgtgcacaggccccaggccacctc

SEQ ID NO: 17067 - DNA, 717 bp, Macaca Fascicularis
ctggtcacacaacatactaaagaggcaaggcaatgactgttggccaactctcaccggggaacaacccactgttaggatggcatgaacatttccttagatcgtggtcagctccgagggatgtggcatctgggctcttggggagccccgggccgcacccggccgtaggctagtgtaactcgcatcccatcgcagtgccgtttcttgactgtgttgctgtctcttagattaactgtgctgagactccacgtagctcctggacccgtgtctagtacatactgaagcgatggtcagagtgtgtagagtgaagttgctgtgcccacgttgtttgaactcgcgtaccccgtagatatattgtgcagcgttcttctgttattcccttgaggtggtaactttgtatgttcagtttatgcaatgattgttgtagatgcaatgccgtagtttggattaataagtggatggtttttgtttctaaaaagaaaaaaaaaaatcagtgttcacccttatagagacatagtcaagttcatgttgataataatcaaaggaattactctctcttcttgttaaattagctcaatcatgtaaccgcagataggaagggctcacctagggaaactctggtttccgatgggacggtaaagtcatatgggcaacagtgtgcgggaagtacattttttaagtaaaaaacaaaggaaaactttgtactatccagttatctaa

SEQ ID NO: 17068 - DNA, 739 bp, Macaca Fascicularis
  misc_feature (1)...(739): n = A,T,C or G
agagcacatgaaccaggagnannnntnctgtgggctggttcgatgcagagctgagtgaaaagggggccgaggaggccaggcggggagccaaggccatcaaggacgccaagatggagnnngacatctgctannnnnnnnnnnnnnnnnnnnncatccgcaccctctgggccatcctggatggcacggaccagatgtggctgcctgtggtgcgcacttggcgcctcaatgagcggcattacgggggcctcacaggcctcaacaaggcggaaacggccgccaagcacggggaggagcaggtgaagatctggaggcgctcctttgacatcccgccgccccccatgaacgagaagcacccctactacaactccattagcaaggagcgtcggtacgcaggcctgannnnnnnnnnnnnnnnnnnnnnnnnnnnnnnnnnnnnnnnnnnnnnnnnnnnnnnnnnnnnnnnnnnnnnnnnnnnnnnnnnnnnnatcaaggccggcaagnnnnnnnnnnnnnnnnnnnnnnnnnnnnnnctgcggggcattgtcaagcacctggaagggatgtcagaccaggcaatcatggagctgaacctgcccacagggatccccattgtgtatgagctgaacaaggagctgaagcccaccaagcctatgcagttcctgggtgatgaggaaacggtgcggaaggccatggaggctgtggcagcccagggcaaggccaagtgaggggttgggctggc

SEQ ID NO: 17069 - DNA, 665 bp, Macaca Fascicularis
  misc_feature (1)...(665): n = A,T,C or G
acccgtgccaannncatagccatgacnnnnngacagatgccatcgtgaggaannnnnnnnnnnnnnnnnnnnnnnnnnnnngagtggacctgacgctggaccctgacacggctcacccggccctgatgctgtcccctgaccgccggggggtccgcctggcagagcggcggcaggaggttgctgaccatcccnnnnnnnnnnnnnnnnnnnnnnnnnnnnnnnnnnnnnggcccagggcttccgctctggccggcactactgggagaccggccagaatttagcttcacttgagagagatctggaatggtcgccatgattgaaaccacgcaccattacatcgcccaataaattatttcttcccccgtcccctttccagcactcaactgaggagcaaagctcatcccacccccacccctcccgggtctgttcactgccaggctcctttcccttgttcagtggagctggcttttctcccagcccctttccatgcctttcgttccannnnnnnnnnnnnnnnngggagcctggggacgggtttgggtccccaagaggagagccnnnnnnnnnnnnnnnnnttctagtaaccccttgccttgtcnnnnnnnnnnnnnnnnnnnctgctttgatggctgaggtgaactcatgttctttgggaaaagggaagg

SEQ ID NO: 17070 - DNA, 1369 bp, Macaca Fascicularis
  misc_feature (1)...(1369): n = A,T,C or G
aactccagctgtcnnngatccatggttaagaaaccagaaactaaactgaaacaagagacaactttctagcatttaagagaacagaagtnnnnnnnnnnnnnnnnnnnnnnngaaattcttctannnnnnnnnnnnnnnnnnnnnnnnnnnnnnnnnnnnnnnnnnnnnnnnnnnnnnnnnnnnnnnnttcctctgctggtccctcaacagcaaaattgagttcaacaacacaaaannnnnnnnnnnnnnnnnnnnnnnnnnnnnnnnnnnnnnnncctgtgggtttgactggtnnnnnnnnnnnnnnnaaaggtggaataggttccaaaataggttccaataacagcactacgcccactgtaccattaaaaccacctccacnnnnnnnnnnnnnnnnnnnnnnnnnnnnnnnnnnnnnnnnnnnnnnnnnnnnnnncaaagtaggtcttcctagtccaagtagtttagttccaggaaacagcagccaactaagtgggaatggaaatactggaacatcaggacctagtggaagtactactagcaaaactacttcagaatccagcagctctccctcagcatcccttaaaggtccaacttcacaagaatcacagctcaatgctatgaagcgattacagatggtcaagaagaaagctgcccaaaagaaactcaagaagtaatgtggccaagtaggtttttatatcatattagcctaaagatgaaaggcttattattaagatatatgtaatatactgtaatttaataaaagtcttcataatcaaatttctattgtttcttgccttaaaatgctaaatatatataacaaaacttggaaacgtttattttaaatcagtcttcaacatttttattttaatgatttccatagtgtgtgaaaacaatgattagaatgactggttctcaatgagaacttcagaagattgatagcatctgtgaatttaaggaaaaagaattagttcgtcttctagcaaagccccaagagttgatcctgatgaatgaggtgccttatgtggtggcagggatgacccaacatagtttttctattttcctacccgtattctgggtgttcattttctgtgctagccccatttcaactgactctccctttccctcccaattatttcatcttttttaaaattattttttcattattgatttctcatatcaatggattttcctaattgatttatcatacttcatattgtatctttacctttttttatcacctcatttcagttattgaaggatacatctttttccaataaattgtgaactctcttggtgtttaatacagtattttttctcaagttgctcactttacctacattgccaatgtaatatatgcacatagtac

SEQ ID NO: 17071 - DNA, 746 bp, Macaca Fascicularis
  misc_feature (1)...(746): n = A,T,C or G
tgtgggtgcactacatagattctgacagtgttgtgatactgtataggatttttaaaaatgacaacattcacaaaatttgttactttttaaaaaataacatgcctattannnnnnnnnnnnnnnataaaagaaatatatttgtgttttgtttgtactaaaatgcaaaagcaagagtgcagtttttgaaatctagaagttaggggcacttttgttggagaaaaatggactgatctaaagcattcagtcttactgggatttttatgcataaaaactcacatataaacatgaaataaacagtgccaatattcattgtaaagtgagaaactataatatttggctattattctattcaacaggttttagacgcacgccaccattttttccttatatttttgcttgattttttaaaattgtcatttaattcttaaattgtcatttatttgagatggaaataagatctaaagttagttgcctttgcttgtaagacatgtaatttgcaaattactacttttaacaaatggaagtaaatttgttttacataaatcttgattttcagccttcctggataccttaattgtaactgtcagtgttgcactggtcggtatgtggaaacacattgctctaccctgctacttacgttgattttaaagtgaatttacagtgatgaggaatttgtgaaaactatattgtatttcttttgatgtttcaaaanngttgcctatgaaaaactgatttgtaaaacatgc

SEQ ID NO: 17072 - DNA, 718 bp, Macaca Fascicularis
  misc_feature (1)...(718): n = A,T,C or G
gtggccagtgactaggaggcgaagcgccaannnaccatggcggcggccgacgagcggggtctggaagacggagaagaggaggaagaggaggagcagttggttctggtggaattatcaggaattattgattcagactttctctcaaaatgtcaaaataaatgcaaggttttgggcattgacactgagaggcccattctgcnnnnnnnnnnnnnnnnnnnnnnnnnnnnnnnnnnnnncactcttgggacctgtgttatatttgaagaaaatgttgaacatgctgatacagaaggcaataataaaacagtgctaaaatataaatgtcatacaannnnnnnnnnnnnnnnnnnnagaactcttctgacagagaagaaggaaggagaagaaaacataggtggagtggaatggctgcaaataaaggataatgatttctcctatcgacccaacatgatttgtagctttctacatgaaaannaagacgaagaagtggcagcctcagccccagataaatctttggaattggaagaggaagagattcaaatgaacgacagttcaaacctnnnnngtgaacaggagaaaccaatgcacttggatatagaagattctggtcctcttattgatatacctnnnnnnnnnnnnnnnnnnnnttttatggaaactcaaatgctgccttagaaatcactcctagatgaaatttttctcataacttgtcaagaac

SEQ ID NO: 17073 - DNA, 700 bp, Macaca Fascicularis
  misc_feature (1)...(700): n = A,T,C or G
tgggctccntnnnggcagctgccaccatctacaccctcttctacacggccattctccacttttcgggtggacagctgannnnnnnnnnnnnnnnnnnnnnnnnnnnnnnnnnnnnnncctaccttcctgatcannnnnnnnnnnnnnnnngnnnnnnnnnnnnnnnnnnnnnnnnnnngatgctccagctgtgtctcttcgccatcacggaccaggannnnnnnnnnnnnnnnnnnnnnnnnnnnnnnnnnnnnnnnngcatcctcgtggtcatcattggggtgtccctcggtatgaacacaggatatgccatcaacccgtcccgggacctgccccctnnnnnnnnnnnnnnnnnnnnnnnnnnnnnnnnnnnnnnnttcagnnnnnnnnnnnnnnnnnnnnnnnnnnnnnnnnnnnnnnnnnnnnnnnnnnnnnnnnnnnnnnnnntcatctacctggtcttcattggctccaccaccccacgggaacccctgaaattggaggactctgtggcgtacgaagannnnnnnnnnnnnnnnnnncccaagatgggatctcacgaacccacgatctctcccctcacccccgtctccgtgagccctgccaacagatcttcagtccaccctgccccgcccttacatgaatccatggccctagagcatttctaaggagagattatttgtgatcccatccctcccca

SEQ ID NO: 17074 - DNA, 763 bp, Macaca Fascicularis
  misc_feature (1)...(763): n = A,T,C or G
agtgctgagtacnnncannntgtacatgagannnnntgccaaggcaaaaagaacgagtgattcttccttaggatacacatcaaccacttcgctgttgaagctgtcagaataaattcctggtggtcagatgaaagggcagattaaatggactcatcagggtaagaggaataatatgggtgaaacaagaaatggcccagagagtttcacactattcctatacctccaggtctggaagacaggtaaaaaaaattctgtaatgtaagaatggaggtagttaccctgatttgacccagtgcgggaaatgctgaaagcaccagaaggaagctagttcctgtgagataagttaacccggcctgacagaatcaagaaaattgagatgagatttgaaaagacctgaaaatgcaggggttggctttccgactgggaacttaaaaatcactcttcatgcttccctggtcctaagtgataacagagttagagacttgagtctgatttcagtcatcttcagggaccggtctgatgttgtagcaagaaaactccctttaaaagtgttactgttcaaatcgtatgtcaggttgaatcacattcaacagagatatattctagaataattttttagaagaggctaataaaattaagggaagaattatattgaatggaattatttttgataatgagaattatttgggtagattcactgaggctatgtcaacatgatatttagaccaacaggtgatcaatgttttgaaaatacaacaatgac

SEQ ID NO: 17075 - DNA, 772 bp, Macaca Fascicularis
  misc_feature (1)...(772): n = A,T,C or G
actgacgcgcgggaaatgccnnnnnnnnacagtgagcatgtcatccacaagtatttcctgccnnnnnnnnatgctgtcgccatcccactggctgcaggcctcctactgctcctgtttgtgggacnnnnnnnnnnnnnnnnnnnnnnnnnnnnnnnnagggtgaccaagaaggctcagtgaaggtcccgcggggatgaggctgccagccccttctctgcttcccctccagcacagggaccaagtaggggagcctgcagaacctgtccaggcacagtggcgcctccagcctgcctgtcctgcagagtccnnnnnnnnnnnnnnnnnnnnctgcctgaccggagccccctccctgactttcacttccagaagctaggaggnnnnnnnnnnnnnnnnnctccagtcacccccttcttgctcagggcctaaaannnnnnnnnnnnnnnnnctcactctcagactccctgccaccttttcccccgggttctgccatgttgcctcacttcccctnnnnnnnnnnnnnnnnnnnngacttagcgggttctagggccgcatgtgtgacctctctgacctccctccacaagtcctgctcctccagcaaggcagctttccttagcctgacacagcccaagacnnnnnnnnnnnnnnnggacctggaacgcctggggaaggactgacagaccccaggaccagccctgggcctcaaggcatattagctnnnnnnnnnnnnnnnnnnnnngagttccccagggctggcctgtttgggagagcgacc

SEQ ID NO: 17076 - DNA, 754 bp, Macaca Fascicularis
  misc_feature (1)...(754): n = A,T,C or G
aatgaagtttaactttatacaatgaagctaagctaggcaagctcaagaaggaaaaaaaaatcttgaacattatttttttttacctgacttattaaattttgaaggttttccacttgaagtaaattaggaaaggtacnnnnnnnnnnnnnnnnnntaaacgcttaagaaaagtcaagctgaggccgggcatggtggctcacacctgtaatcctaacactttgggagnnnnnnnnnnnnnnnnnnnnnnnnnnnnnnnnnnnnnnnnnnnnnnnnnnnnnnnnnnnnnnnnnnnnnnnnnnnnnnnnnnnnnnnnnnnnnnnnnnnnnnnnnnnnnnnnnnnnnnnnnnnnnnnnnnnnnnnnnnnnnnnnnnnnnnnnnnnnnnnnnnnnnnnnnnnnnnnnnnnnnnnnnnnnnnnnnnnnnnnnnnnnnnnnnnnnnnnnnnnnnnnnnnnnnttccaaaaaaaataaaaagtgaagttggcatttttggatttaaatggtaaaaaaagaaaatctnnnnnnnnnnnnnnnnnagctaatcttcagatggagagcttgcctggctacctagggtgcaccagagaatctgatccaatgcaagccagtcaagcctacaaatgtggtgaggtagtctcccttcctgtattttaataaatgtaaccaaaggccatctggaggtgggggaatgagaggtgaaggaacagaatagaggttataaggatggaactaaaagttgtcagaagaggtatgagc

SEQ ID NO: 17077 - DNA, 1152 bp, Macaca Fascicularis
  misc_feature (1)...(1152): n = A,T,C or G
aaaaaaccccaactaagattcttgttttctagtaatactattccttccattttgctcccttgctagatggctgaaaaagaacatgcaacccaccgaagacctcaagtcagtgatctgtaggctgtccgcatttggcccaattcaatcagtcactgtttgtggacgtcaaagtgctatagtggcattcaaagacatgacttcagcctgtaatgctgtgagtgcttttcaaagtaggaccccannncaccatgttccagtgttcctgannnacaacgattcatgtcaaaagacgtaagtctctctactaccaaaaacttatgtgaattcttaagcttgttttacaaaatttttattcatcaggggtgtagtgaaatatcatcattgtaactgatatttcagtactgcaaaaggcacaatgaagcttatttagtttaagtactagaaatcagaggtaaagcacatccttccttggacatgctttactccgctgtagtggtcatcacagttttgattttctggataagaagttcaccaccgcattcatgcattcatctgacagccatcttccctgaaggacactgcattcttcagcattaacagcatgtagtttttctttctctctattcctgattatctcttttgaaattctcatggcatttgggggaagctttgcaaatgccttcagcctggtccagacttctttctgaaaagtgctatcagggaaaacttcagtaacaagtccttgagcacatgcttctcctgctgttaacttctttccaaaaacaagcatctctgttgccttggctgggctcattatcttcggaaaagtgtaagacgagcatccttctggactttggccgaggtgactaaatggtgtatgaaatgttgccctgtcagatgcatacacggcatcgaataacccaaggagggtgacggagatgcccacagctggaccattgaccactgcaatcagaggcttaggaaaatctataaaacagcccacaaattccctcagtaagatggcaccatttttagctttctcctctactccaccagggggaatatcagtgaagttagtcaggtcgttcccactactgtaatagtcaccatttccctgtaaacagtgatggctgnntcatccttgctggcagc

SEQ ID NO: 17078 - DNA, 768 bp, Macaca Fascicularis
  misc_feature (1)...(768): n = A,T,C or G
caccattagtgnnnnnagagtgcannnnntnntcaaactgttaccataagtatggtagtcagtgacttggatatcaagactaagtgctgatatgaagacttgccttgtgtttccttatgaaacacataagtataaagcaggactcaagcacaaggctgactgttcttctttgaataacagctttcttgcagtctcctccacatgggtggcactgtgtttagaannnnnnnnnnnnnnnnnnnnnnnnnnnnnnnnnnnnnnnnnnnnnncctcttaggttgcattctctctaggccactggttctcaaacattagggtgtattgtacccattacagagcttgtgaaaaatgcagaaacctgagcctcaccttatgagattgtgattcagccagggggaagacaggaatttgcgtttttcataggaacctcaagtaatctttattctgagggtctctggattgcaggttgaaaaacataaccttaattagcagtaaattcttctctacctggccaggcacgnnnnnnnnnnnnnnnnnnnnnnnnnnnnnnnnnnnnnnnnnnnnnnnnnnnnnnnnnnnnnnnnnnnnnnnnnnnnnnnnnnnnnnnnnnnnnnnnnnnnnnnnnnnnnnnnnnnnnnnnnnnnnnnnnnnnnnnnnnnnnnnnnnnnnnnnnnnnnnnnnnnnnnnnnnnnnnnnnnnnnnnnnnnnnnnnnnnnnnnnnnnnnnnnnnnnnnnnnnnnnnnnnnnnnnnnnnnnnnnnnnnnnnca

SEQ ID NO: 17079 - DNA, 1092 bp, Macaca Fascicularis
  misc_feature (1)...(1092): n = A,T,C or G
caaatgcaaccacagtggagagcccacagtgggcttagcctgcctacgcccttccatttctgttctttgaccgtgctaggaattccaggaaagtgcattccttccctggcgaccttttcctatttctaggctccttcacgggtgctgctgttttgtgagctccggctcctgtttagcttttaattcagttgtatcctcagtccagaaatgtaggcgaggttggttccctcttcagccatggctacaatactgtaaattgctagttttaatttttttaagtagtgcttcctaaatggtttgcatgagagccatctggggtacatgttgaaaattgatttatttggggtctaccccaaacctaataacccaatttggggatggggtccaggaatatgcattttcaaaaagtcagctgcccttnnnaggtgattctataactgtccctcaaccgtacttggagaaatagtgttttaaagcagtggtccacaaagtgttctgctcacgtgccccccagaagtattttggaaaatcatgtattcccctcacccatctaagttaacatctaaaatttttcatgggaagttaaatagttgacaaagtatgtatttgctggtgtcgtgtaaatattggtattctaaaataaaaactgttacatcactattttaaacatatccagtacaatttaaatatcgtaacaatttgacacccttcattcatttataaaaataaatgagctagttctttagtagttgaacatttcaatttggcttttctccttctgtatttctatactacttttcagccaagaatcctatcagaatgtaatctattatgcctgccatcttttaatcattcactccattatcttgtcaacaaaaaatataaatggaaataagttttttttagttcttgctttaagtgtttatctatctcagtccagaacaaatgttatcataattattggtatataatgaaaacagtattaatataattctttgatgattaaaagttgttttattagaatgttctttatcttaattagttcatttatccaagaatacatgaatgtgatttacagctgagatggggttc

SEQ ID NO: 17080 - DNA, 778 bp, Macaca Fascicularis
  misc_feature (1)...(778): n = A,T,C or G
gcaaagtgcaggctgcctgtgcggctccaggcggtggagnnnnnnnnnnnnnnnctcaggcgccatgcnnngaagaggcagggtacagatggggctgggagggcaaagatggggtggggcctccccctgacagagctcaccctccacagcgacccttttccttcctgcctaatcccgttgggctgcgaccttttcctcctgccctcagtttctgaaacagaaatctttggggcctcccctttccccagcgtctggnnnnnnnnnnnnnnntcctgaggaacaatgtccccaggaaccacgttctggagcctggtggccagacgtggcttctcctgagttctagggctcgggccagagtggccctactgcccggccagtccaggctcaggcaggaatcggacgctggggcccgggctctgcacagagagctgggcttgagtggagtcgattgtagatttctcccaaggggatcacttagcttctcactgacacacccttcccaattgccactagcacaggggtatcttacagcactttggggaggggtgggacaaacggcaaggttctggggccaaggcctacccaggggcctctggccagagaactcacaacccccctctgacctaggggtcaatgcaaacaggtcacagtgcactcccatattatgccatccctttgacgaagaattcaggggatgtgggaagtggggaggcggggagggatcttgactcttgtctcctttgtccttttgttcagacaggttgtacctgcagcagac

SEQ ID NO: 17081 - DNA, 734 bp, Macaca Fascicularis
  misc_feature (1)...(734): n = A,T,C or G
atcccaaacaatattncnatttttgtaaaacaattgtatgtgtaannnnnnnntgaaatcagtttgcaatctatggaaatagagtagcaattgctatttctaaattgtgaactgaaagtcaatctagatttatttgagaagtaattgctcactctttacttttgaggcagccattaggttgaaagtatatatttatcatataaaacttgatgtgnnnnnnnnnnnnnnnnnnnnnnnnnnnnnnnnnnnnnnnncagtctttgaaatatggaaaatcagcagtctaaagtttgttttaaattctaaataaaaaaaaatcttcaaatctgaatatactgcaaatgtcatgagaagtttgattcagtaatttgtgatggaggattctttggtatcttactgtttagttagggcactaattttacttacctattagattttgaaagcatctgagatatacaaatctccctgtaggaaatgtgaaagaaaagcacaacaaaactagggttttctgttcgtttgcttgcttttatggttttttttttttggtttgttttaatatcaggtggatttttgtttgtaagcaatatatacatataatcaaccaacatatctgaaaaggatcctgaantcctgagaaannnnnnnntggacgactngtacataggaatctagcaaattcaggaaccaaggggaaatgttctgagataacatttacattgtcaacctttattgac

SEQ ID NO: 17082 - DNA, 736 bp, Macaca Fascicularis
  misc_feature (1)...(736): n = A,T,C or G
tcactttnnncccatatctatctccgtccttcatccaaaaccttcccagaatccatcagcaagcatgtttgaggcctatggtgtaggggactgaattttttttttaaacttctattccattttaattgtaggatctctgtccatatacccaggtgtccttatttgaatgtactatttggtcctcatctgtgttcaggcaaaaaataggaaatgagtaattttgagtttgtaatctctcccggaagacaaactgcttcagtgggtaaaagctttgacatgttttattcataaagggggttaattatttgctacaaagaagcacggtctgttttcatnnnnnnnnnnnnnnnnnnnnnnnntcctatagatcctnnnnnnnnnnnnnnnnnttctgactttttgcctttgcttttgtgtgaccacatgtttcctgtaccagtcactggggaaagannnnnnnnnnnnnnnngttttaaaaaagttttgcttgtctatttagcattcctttttgggtctcaagatttatggaacaataaatgtcatttaatgctgtgtgcttattttgaattcctcatcaggttttagaagcggggtaaaaatacttagacgcttatgagacttaaattttactgcgtggcattgaacatgagtttgnnnnnnnnnnnnnnnctaaataaatcttggcaccagcaaatttgttactttgtttttttaatagtaggatgtacacattcag

SEQ ID NO: 17083 - DNA, 758 bp, Macaca Fascicularis
  misc_feature (1)...(758): n = A,T,C or G
ggagagagtgtgggcannntcggaactgctgtcatcctggccactgatggctgagtttatggcaagaggctgagatgggcacagggagccactgagggtcaccctgccttcctcctcgctggcccagttgctgtttatttatgctttttggtccgtttgatcttttgcttttttaaaattgtttttttgcagttaagaggcagctcgtttgtccaaatttctgggcttagcgcttgggagggcaggagccctggcactgatgccgtacaggtttttttcctgttaggagagctgaggccagctgccccctggatctcctgtccctgagaagggagtatggcagggctgggatgcggctactgagagtgggagataggggaaggaagatgtaaattggaagtgagcaaatgtgaaaaattcctgtttgannnnnnnnnnnnnnnttaggctctgcagtgctgttcagagactgagagtgagtgtgtgttgacacatgtggatcaggcccaggaggggcacaggagctgagcactacagaagtcacatgggtcctcagggcatgttaggggcagaaacagtaccggctctctgtcactcaccttgcgagcggagcaggccctggtctgctctgggctgtgcaggggtggaacaggcagtgaccagctttgcccttcctgctgtctctgtttctagctccatggttggcctggtgggggtggagttccctgccaaacaccagaccacacatcctccaaacg

SEQ ID NO: 17084 - DNA, 756 bp, Macaca Fascicularis
  misc_feature (1)...(756): n = A,T,C or G
gatatatagagactactgctnnnnnctaagaagtacgtattgaatgaagaaatgtctggcctccctgcagccagaaaacatctgaacaagttgcggaatatacgttatggttttannnnnnnnnnnnnnnnnnnnnnnnnnnnnnnnnnnnnnnnaagatcacaaatggcaagaaacatctggtactttgtggttagtctgtgttacaagtttctgtcatacttccgagcatccagcactatgagatactgaagaccaagaattcagcattagaacatctatacatgtggtgatctaaatgcacaaaatgtaaaatgtacttaagtcatctcaccttttgtcaagacattaaaccatcntagatcagagtgtgaagtaaattatgatacattttatgtaacattttaatgtttatgctcataaaacttagtgaacacactgtgttatgccagctcaaatctacaatagccaccaaaaccatgacttaatattttgagccctagaagaaagggatgggctgagggcaagagtggggaaataggaacactgaccagtataactgtgcaattctggaacatattaattaaaatatgccttaacatatagtgaatttctaattctaatgttcagtgcaatggaagacatttatttggacagtaatactagctaagttggtagatatttgattcttcattgtttgatttttttcattagttgaagtgggttttagttttgttaaaattataaccaacctat

SEQ ID NO: 17085 - DNA, 741 bp, Macaca Fascicularis
  misc_feature (1)...(741): n = A,T,C or G
caagttgcagctggctgncctacaggnnnnnngcccnnnctgtgagagactggacctaggtgagggtgacctgaataaagtggctgatgcctgcttgatttacctcagcgccaaacagcccgtgaaattacaagaggctgccaggagtgtcttcctcnnnnnnnnnnnnnnngacccagactccacctggttcctcctgaacgagctttactgccccgtgcagttcacacctccccaccccagcctccaccccgtgcagctgcgcggggccagcgggcagcaaaacctgtacacggccaacgtgctccacctgctcacagagctgcagtgaccctgctcgcccactacagaggccaccgatcctcccctgccagccagaagttgggctgaccccaccctggccataggcggtggcagtggcagcagagaaggtgaattagtcagccaatcgatttgtaaattgatcagtcacacaactgcttagaaatggattgaaggaaagtagctgactgttatttatatttcataccttgtgttttcaagtgacgttgtctggtggctctaagggtttaactccttagcctaccatctctatagccccagctccctcacaggtaacatgcacacacagacacacacaagaggtcagttcccctccgtctgcatacacctccctctcttcaaataatgagatggaactaattttgttgtacctaacctgttctnnggaaacaaacggaa

SEQ ID NO: 17086 - DNA, 761 bp, Macaca Fascicularis
  misc_feature (1)...(761): n = A,T,C or G
gtttnnnctnnnctcagtcgccctgttctgagannctctttnctctgtatcatggttctcaccttatttgggggaaatacctagagcagaatacagtgggaaaagagtctctacccctttctgttcgaagttcatttttatcccttcctgtctgaacaaaaactgtgtggaatcaacaccgctgagctctgtgggaaaaaagaaaaacctgctcccttgtctctgctggaagccggagggtgccgggcccctgtgtagtagtgcatagaattctagcttttttcctcctttctctgtatattgggctcagagagtacactgtgtctctgtgtgaatatggacatttggcatttaccaacatgtatctgtctactttctcttgtttaaaaaaaacaaaaacagaaaacaaaaccttaaaaaaatgggtttatagaaggtcagcaaagggtgggtttgagatgtttgggtgggttaagtgggcattttgacaacatggcttctccttttgcatgtttaattgtgatatttgatagacatcctttgcagtttaagatgacactttttaaaataaattctctcctaatgatgacttgagccctgccactcaatgggagaatcagcagaacctgtaggatcttatttggaattgacattctctattgtaatttttttcctgtttatttttaaattttctttttgtttcactggaaagatgaggttcagtttttaaagttaaaagtgtacaagttgctttgttacat

SEQ ID NO: 17087 - DNA, 737 bp, Macaca Fascicularis
  misc_feature (1)...(737): n = A,T,C or G
ctgacgtagctgcaaaggacagatccaaggactgaagccaaagttatgcaagggactatgtgttgccacaggacgcagtcagatttccagtctccaccaggaacctctttgggaagtgtggtttatgctgaaacagaatactcttaaagaaaaaaaggagggggaaagatcaggtcatactctctactctcctcatctctaacagctcaggatctcttagcattttaatcagatgtaattgtttgtctttaactgtcaaaaagtttggttctgtgtctgtgttttaataagacaagagaggatgagcgattgagnnnnnnnnnnnnnnnnnngacctaatgctccttgttcctagagtagagtggagggaaggtggcctaagaattgagctctcggaactgcatgctgctggacagtatcactgtctttcttagnnnnnnnnnnnnnnnttccattttttcaaggtaatttctggtgcctctaatagcccaaaaatgggaggttgatcgggtctgacatgattccttcctgttctgaactgtggggtgcacatctctgcttgagtcaggtttgagtagaggcttagagacagttgggtgagaacaaccaaaatcttatcatggtctcagttacaatcattagggggagctctagccaaatggtttaacttctgcctttggaactggggattgggtgggcaggaaaaggtgatatccattctttctgataactagacg

SEQ ID NO: 17088 - DNA, 740 bp, Macaca Fascicularis
  misc_feature (1)...(740): n = A,T,C or G
ggtgccaaagtaatgtccactnnnccctttcatgctgcatgttaactgattaattatactgcagaagtcttttcacctnnnnnnnnnnnnnacagtacatctttacttctgtatacattgcactgattctgtctcaatgccctgggagaagttgaaaatgattgaaagtgactttcatatctcagctcatgactcagcaaggcagaatggccacccctgccaaggtttgcttctcttttcaacagtgnnnnnnnnnnnnnnnnnnnnnnnngtgcttctgcccttccacaaacaactcctccatttcctttttgggatttgtcaccgtccttctattctctggtcttctatttttggtgttgttcaagtgaaggaagagatgttccctctaatttctctgtagcccattataacctgctatcttggggcaacttttgatgtatgacatgtcacccttcccaacttggtctcctccaacatgttgtcttcgtgtggagccctcaccacaatccctgactccggtcatttgtgcctttctcttgtcatctctgtacactacttatattcactgtgggttgggggagctaattttaagcatgttcagtggcagctcccnnnnnnnnnnnnnnnnnctgttaaaatttatccaaaatcaacttcactaggggttttcttaaggggtaaaggccttttacagaagctaaacccttccccacatgtggtagaatgtgctcttctat

SEQ ID NO: 17089 - DNA, 773 bp, Macaca Fascicularis
  misc_feature (1)...(773): n = A,T,C or G
tttttcgatttgtaaagtaaaattaaaccatttcagccaggtgtggtggcacgtgcctgtagccctagctacttactccggaggctgaggtgggnnnnnnnnnnnnnnncaggaggttgaggctgcagtgagccatgatcgcacccctgcactccagactgggcgacagagctgagatcctgtctgtctctttatctcgtgggccctagggcactnnnnnnnnnnnnnnnnnnnnnnnnnnnnnnnnnnnnnnnagccctttggggtgctaaaacctatgaatgaggaaaacttagggtgcccaagctgaggcagagccctcagaaccccctgggatttgtgttggagtcctcgtggcatgagacacaggtggattatgcaatgggaatttctttcctatgagcacccacatgtgggcgggtggagggcagaagccatgcgnnnnnnnnnnnnnnnncagcccctccccacttcagggcacaccttccacttggccagcnnnnnnnnnnnnnnnnnngggcggcgcagcctgggctggctctggcnnnnnnnnnnnnnnnnnnnnnnnnnnntccagggaggacctcaggggtggctgagctcttacctggttttcaggcggggcccatggaaggtacggggggtggatcctgtgttgggcttctgaggagctcccacacatcacctactgcttctgactctagttagcatccccttccccactaaaccctgctcactgtggacccctcactaacctggcctgactgtggctc

SEQ ID NO: 17090 - DNA, 656 bp, Macaca Fascicularis
  misc_feature (1)...(656): n = A,T,C or G
ggcctggtcacataccccatcnnnagtgctcnnnnnagctggggaggnnnnnnnnnnnnnnnncctttccagacatgcttatgtataagtaaaggggcaggtgcttgggctccagagagaccctaggtactgccttctaactcctgcatcctcagcaggggaaaaggaactgggaagtaaaggggaaccatatggccccagggaatggacccttggagactcccatcctctcttccccttcaccaagtgcccaggannnnnnnnnnnnagaccagcccaaggccttgcccagtggcaggggaaaggggcacctcactccacctcaaagtcatttgactgcccccatccaccccaccaccctaatcttccaccacctctccggctgcccctgccccccatcacaggcagtagagccgggcagctttcttatgccattttctacactgtgcttcataagtaggactttcttgcactagttcttatgactgagtctccaaactggtttcctagtagtcccccatcccttcctcccttacccagctatgattcagttgtctctgccctccctcttaccctgcctctgtgtttcggtgagagtctctgtatgtgtactgctttctgttttgttgcattgtggagcagaggcctctctgctc

SEQ ID NO: 17091 - DNA, 685 bp, Macaca Fascicularis
  misc_feature (1)...(685): n = A,T,C or G
cgggggccacagctgtnnngcgcctgngccttacttcctaccgagacttcctggnnnnnnnnnnnnnnnnnnnnnnnnnnnngctgcgacagcagggggccaccaactggggtgacacgcaggcctatctcgcggacccactgggggtgggcgctgcactagccacggccgatgacttccttgtcttcctgcgccgctcccggcaggtggctgaggcccctgggctggtggatgtgcctggtgggcaccctgagcctcaggccctgtgccctggtgacagcccccagcaccaggacctcgctggggagctggtggtacgtgagctcttttccagtgtccttcaggagatctgtgatgaggtgaacctgccgctactcaccctgagccagcccctgctgttgggcatcgcccgaaacgagaccagtgctggccgagccagtgccgagttctatgtccagtgcagcctgacttctgagcaggtgagannnnnnnnnnnnagtgggggacccgaggcccacgagtctannnnnnnnnnnnnnnnnnnnnnnnnnnnnnnnnnnnnnnnnnnnnngacggagatgtgggctgaactctgcccctcggccaaaggcgccatcatccnnnnnnnnnnnnnnnnnnnnnnnnccaccggagcagccctagggtccccagccctactcccacc

SEQ ID NO: 17092 - DNA, 737 bp, Macaca Fascicularis
  misc_feature (1)...(737): n = A,T,C or G
agaagtaatttttgatgagaaatggtacaatactaattaacaacttggtttaatatgtttactgagcatctgttaagtgttgggcaaaagaagcaggatccagagctataggtacagtgttatnncagctttgcaaacacattttctacatagatagtagtaggtattaatatatatgtaaagaaagaaaacacaccaaaacattaataatggtaagattggtttatgtgatcttagtggtatttttggcacccttacatgttttccaaattttcagcagtgatattatttccgtaacttaaaaagtgagtttgaaaaagaaaatctccagcaagcatcccatttaaatnnnnnnnnnnnnnnnttaaaaatacagcaatatgtgactttttaaaaaagctgtcaaataggtgtgactctactaataattattagaaatacatttggaaaaacatggagtacctcaagttagtttgccttgaaaaatatcaaatataactcttagagaaatgtacataaaagaatgcttcgtaattttggagtaggagaatccctcctcaattttgtattttaaaaaagtacatggtaaaaaaaaaaaaatcacaacggtatataaggctgtaaaatgagaattcctcctcacctcttaccccagtactattctccagnnngtaatctattaacagtttcttatgtaattttcagaaaaatttgtatgcgaatataagcaaatatgt

SEQ ID NO: 17093 - DNA, 756 bp, Macaca Fascicularis
  misc_feature (1)...(756): n = A,T,C or G
gctnnnnnnnnnnnnnnnnnnnnnnncaatgtgtcagcccatggaagccaagctaactcaccctcaactcccaactcagctggttcttccagttcttttaacatgtcaaactctggagatttgttcatgagcgtgcagtcactcaatggggattcttaccaagggnnnnnnnnnnnnnnnnnnnnnnnnnnnnnnnnnnnnnnnnnnnnnnnnnnnnnnnnncagacaggaggatacagtgatggactcgcagccagtcagatgnnnnnnnnnnnnnnnnnnnnnnnnnnnggaggttggcaggatgctactaccccttcatcagtgacctcccctacagaaggccctggcagtgttcactctgatacctccaactgatctcccagcaatcgcatcccggctgaccctgtgccccagttggggcaggggcaggagggagggtttctctccnnnnnnnnnnnnnnnnnnnnnnnnnnnnnnnnnnnnnnnnnnnnnnnnnnnnngtctccttctcttctcttctttgggatgctatttcagccaatctggacacttctttatactctcttccctttttttttttctgggtagaagccacccttccctgcctccagctgtcagcctggttttcgtcatcttccctgcccctgtgcctctgtcctagactcccggggtccccgtcctctctcatatcactgaaggatattttcaacaattagatgaannnnaagaccaannnnanagctgaggcaggaa

SEQ ID NO: 17094 - DNA, 708 bp, Macaca Fascicularis
  misc_feature (1)...(708): n = A,T,C or G
cttttttatatgannnnnnnnnnnnnnnnnnnnnnnnnnnnnnnnnagggactgagcagaccccagggcctcttagccaagtcccgggcctggtgaagcaggcgaagcagatgatcggaggccagcaactacctgcacttgccgccaggagtgggcagtcctttaggtctctcgggaaggccccagcctccctccccactgaagaaaagaagttggtaaccacagagcaaagtccctgggccctgggnnnnnnnnnnnnnnnnnnnnnnnnnnnnnnnatagtggctggacagacactggcacagtcttgctggtctcctgggagcacacagacattgacacagacttgctggtctcttggaagagggcaagaccccaaaccagagcaaaatacacttccagctcttaaccaggctccttccagtcacaagtgtgcagaatcagaacagaagtaataccaatcaatgtcacatgaacaaacaagctgcccccagggtaccatttggggaggggaaatcttttctttctttccccctttaagaaaaaccagatctgcccccaacactttcccactgttattctttcctcatatcccaacactcagaactcttgtgacattagccagtgggggcttatggttgtgtgaaccatgtttgaaaatccagtgggccccaaccaaggagacagacagacttgcgtctctttccc

SEQ ID NO: 17095 - DNA, 710 bp, Macaca Fascicularis
gagtgagtggcagggcaggtgtggctggcggacagggtggggcaggaagagagagtgctctgattccagcactgaccctggcactgacccctctctccctcccaggtagcaaatgcaaatgcaagagcagccagaagcagcacaggtgagcccaaccctgtggtgcgcccctccttcagggcagaactatgggaggacagtcctgacctggagagtggacagggtcctggccattcactggacttgcagccagctttgttattcagatagtcaaccctgaagggccccagtcagggaaagctctgacctcggtattgtgtgaagtgaccatggaaggagagcaaggaggtgcactcttggggccaggcggcaagagtctgggatgtagggtagaaggtcctccaggctaacctgatactactctgatgcggtcctttctctagtaccgtacttgagaaaactatcccactcatcactccggtgagacgggcttccgtgggctgagggggtgcctgtgtaaggattgtgtctgatggcctgcctgccactctccgcaggctctaccactacctgctgagcataggaccggcctccagggatggcctgaagcctaacactggcccccagcgcctcctcccctgggaggccttatcctcaaagaaggacttctttccaagggcaggctgttaggcccctttccaatcaggagg

SEQ ID NO: 17096 - DNA, 1022 bp, Macaca Fascicularis
  misc_feature (1)...(1022): n = A,T,C or G
atatgcagaaattagaaagaaacnnnnntcaactttcactggatccaaatggacattcattttgttcttcctcagtatgacttattccaaaataggagatgaaccaccaaaggtttttcaggcctcaactcaaacccgtagagctccaggaggaataaaggaaaccaggaaagcaatgagagattctgacagtggactagaaaaaatggctattggtcatcatatccatgaccgagctcatgtcattaaaaagtcaaagaacaggaagactggagatgaagagnnnnnnnnggannnnnnnnntatgaatgaaaatgatgctcatgcttttgatgaggaatggcaaagtgaggttttgaagtacaaaccaggacgacacaatctagaaaacactagaatgagaagtgttggtcatgagaatcctggctcccaagaacttaaaagaagggagaaacctcaacaaagtccagccattgaacgtggaagaagatcaaatgttttgggggataaactccacatcaaaggctcatctgtgaaaagcaacaaaaaataaatagccatgcatttgatttgcttagttttggttgttttaacagttagtaatggtgctgggtaataagcataagaccaatctcttgctgttaaatcagttctgtccttggcaannnnnnnnnnnnnnntgaatgttcatgaaggtcctagctttatattgtccctcttttaggaataaaattttgattttcaacaatgtgagtaaattgtgaaacagtctatttaatataaaactctttaaaacatactgattttttaaagcttatatgctgattttgcttccccagttgtttttgtgttggctaggtattcttttatatttatcaagattgattgcnnnnnnnnnntgtcacttataattagttataagacattataatgttaaaaatttctcagtttttactaacactgtactcgggtgatattaataaaggtttaaataatttatctctaaattttataatgtgttg

SEQ ID NO: 17097 - DNA, 759 bp, Macaca Fascicularis
  misc_feature (1)...(759): n = A,T,C or G
gcaaagagccaggcatcgcaggacttatgaagatcgtgaaagaggcttacccagaccacacacagnnngagaaaaacaatccccattnnnnnnnnnntagcaaagaggacaaccctaagtggtccatggtggatgtacagtttgttcggatgatgaagcgtttcattcccctggctgagctaaaatcctatcatcaagctcacannnnnnnnnnnnnnnnnnnnnnnnntatgactctcttnnnnnnnnnnnnnnnatcaatccaacccctgacccaaggtaagagtgggccctctcctacatcgtccgtataccagaatgacctcatgaattcccacttactannnnnnnnnncnnnnnnnnnnnnnnnnnnnnnnnnnnnnnnnnnnnnnnnnnnnnnnnnnnatgagggagggaatgtggcctgagttacctgttagtattacccagtactctacagcgcttggcacctggtaaatagttttgaacgannnnnnnnnnnnnnnnnnnnnnnnnnnnnnntacctgtgcctggcacaactttcctgttcaagaggagacattaatacctaattcttcctttttcctttttttttaatagaagagtttgattttgttttgagcctggaggaaaaggaaccaagttaactgagatattactgctagaatgggcaagaaattactccaagacaaaagaaggtgtgaggggggggcttgcttgttatgctcacctgggcttgcgtagctaagtagtttttg

SEQ ID NO: 17098 - DNA, 714 bp, Macaca Fascicularis
  misc_feature (1)...(714): n = A,T,C or G
agtgtattttgaatgtgtggaaactnnnnattttattacttcatttagtttttacaaaataatccacactagattatgcctttattagatatttactagaatcaggaagattgaattacatgtctaaggtgacagagctagaaagtggcagaatttatcccttctggtcttctgattctcctcacataaatgctcataacaccacacacacatacacacaactacccatgtaagaatacagacaatctgaactataacatttaatgtcctatgtttttctctatcttaatagatatatagagaatttaaagcaaccctagcctacctaagtaagtagtgtgcccctggggccacttgctactctttaaataatctatttattatcacttagctttttagagttcaaatgtacttatggaataagaaaaaaatggattaatagatggtggcttaagatgaacatgccaaaataattgtataaaaaaagaattaccttaataactgatgtctccactctggatgggggactctgaacttgtgctgctgccgccatatttgcaatggtgctgaggtggttcatctggctcattgccatggtgacagacgctggaggtaggctgacaggaattagagggtggggcatcatcataaaaggaagttccagtcctataaaaaatgcacatatatcatcattgctctggagggcataaatca

SEQ ID NO: 17099 - DNA, 1040 bp, Macaca Fascicularis
  misc_feature (1)...(1040): n = A,T,C or G
cagatgggtaccaacaaagttgcttcccagaaaggaatgagtgtgtatgggctnnnnnnnnnnnnnnnnnnnnnnnnnnnnnnnnntgctcctacnnnnnnnnnnnnnnnnnnnnnnagccaaggaacaggaacaaatggttcggnnnnnnnnnnnnnnnnnnnnnnnnnngaataccccgatgagtatcatgnnnnnnnncaggatgactaccccagagattaccaatatagcgaccaaggcatgnnttantagatccacacagaaggagcgcagtatttagtccattgtttttattcagtgagaaccaagctagccttgagtaatttttatcttgtcttcctaaaacactattaagcttattgtacttttaagaaaaattgccttacatacattcctttttcctttttctgcctcttccctcaatagttgccttttagtgctgtaatagttaaatcctacagcataatcagtaactcgcatatgaagtaaaaaggaatactgtgaaaggggagtactcttgtacagccagttcttgtatgcaaagatctatgcatttttacaatcttatattaaactggtattttcaaacaatagaaactattttttttttttttttacagtttagtgtatctggtttctacatggaagactaaactcatgcttattgctaaatgtggtctttgccaactaaatttaagatgcagcattttagaaatttacatatcaatgtttctacagtattgtttgctaatttttaaataaagtcatgatcagtgtgcatttgtgattatatgtgtactcattctcttacctagcggacaagatcttttcagagtggtgtttctaaaggagcatgtacaaaagtggcctgtggacatttaggcctgggtgatgcatttgctcttcctgtttgtgccaatgtatcaatgtagagttgctctgttttcttcaactgtatttattgctgcatttctcagcataaacttatcccattgtattttttataaataaatattttgttttgaacattaaaaaaa

SEQ ID NO: 17100 - DNA, 750 bp, Macaca Fascicularis
  misc_feature (1)...(750): n = A,T,C or G
cannttaggagagacatacggccccnntggcagagaggacaggagtgggcttttgttcacagggnctgccctttccctgcctgagttgctacttctgcacaacccctttatgaaccagttttggaaacaagattctcacattagatgctaaatggtttatactgagcttttacttttgtatagcttgataggggcagggggcaatgggatgtagtttttacccaggttctatccaaatctgtgtgggcatgagttgggttataactgagtcctactatcattgtggctttggttcaaaaagcaacactacatttgctcacagatgattcttctnnnnnnnnnnnnnnnnnnnnnnntgaagagctagcctcctgcctgccattaagcaggaatgtcgtgttccaattcattacgaaagaaaacaatgaaacaatgtgaatttttataataaaatgtgaactgatgtagcaaattatgcaaatgtgaagcctcttctgataacacttgttaggcctcttactgatgtcagtttcagtttgtaaaatatgtttcatgctttcagttcagcattgtgacnnnnnnnnnnnnnnnnnnnnnnnnnnnnnnnnnnnnnnnnnnnnnnnnnnnnnnnnnnnnnnnnnnnnnnnnnnnnnnnnnnnnnnnnnnnnnnnnnnnnnnnntcacaatgtatgttatagtattattattatatattgtgttcaaatgcattctaaagagacttttatatga

SEQ ID NO: 17101 - DNA, 691 bp, Macaca Fascicularis
  misc_feature (1)...(691): n = A,T,C or G
catcaacggctccnnnnnnnatgcnnncaacgtctcccagaagatgatcgagatgtncgtacggacaaaacacaagatcgacaaaagccacgagtttgcactggtggtnnnnnnnnnnnnnnnnncctggctgtccggcctgacctccgacccccgtgagctctgcagctgcctctatgatctggagacggcctcctgttccaccttcaccacaatggcaccgaggagaaggaggaggagatgagctggaaggacatgtttgccttcatgggcagcctggataccaagggtaccagctacaagtatgaggtggcgctggctgggccagccctggagttgcacaactgcatggcaaaactgttggcccaccccctgcagcggccctgccagagccacgcttcctacagcctgctggaggaggaggatgaagccactgaggttgaggccactgtctgaatcatccctgtacatctgcatcttcttgtgcaaggaagtccttggcctaaagccttggttctcatactgggttccttgggacctctggggtcagggggttccaggaggcacctagggtaccttgtggggtcctaggagggaaacccaggattccaggagggatcccaggaactgtgggcacccatcttccgtgtttcccagcccatttccactcctagtttgtcatggataattt

SEQ ID NO: 17102 - DNA, 261 bp, Macaca Fascicularis
cttttatttccatatgcaatgtaatgtttaggcacgctgcttgggatgctatttataaaaaaattgtaggccatttttcagaatatccttttggtcttaaatagtggtcaggaaaaacaaatgatgtaaaaatacgtgaataattttctattacagaaatgaaaaactgatttgcatgtaaaagtgcaagaggtgaagtaatttaaccctttcaccagaggatatggcaatatacaatatattgcttcagctgtttgagaa

SEQ ID NO: 17103 - DNA, 757 bp, Macaca Fascicularis
  misc_feature (1)...(757): n = A,T,C or G
actgnnnctggaaccaagtnntgcttgcnnnntgatgaagagaggccacataaagagagtttggaggaaaaaagacaccaggaggcaggctgcggagtaggagaaggttctgagaggatgcagcaatccagaatacctccttttctagccagcatcccttgaacttttgaaaggttgtgcctaccactgnnnnnnnnnnnnnnnnnnnnnnnnnnnnnnnnnnnnnnnnnnnnnnnnnnnnnnnnnnnnnccttcttggtgaagatannnnnnnnnnnnnnnnnnnnagttcacactcaagactttggctttatggttttcctttcttcttgtctttgccctgactttgatcaacaggggtgaaaagaatcaccctggtgtcttcatgcctctcccattttagtggtagcattttgtgtctttactccacccttcaccctatttccaccaaggttaacgcaccagatatnnnnnnnnnnnnnnnnagttgtatggattaacttcagtccactgtaaatacacctgggaaggggtggggttggggggtgtttagggagaagaagccagacttgctttgtgaactgaatgtatttttatgcaattttgagtggcctttcaaccctaagatgaatggttttgttttactggttgttattatatagtattgagtattctgtgtttcaaagtttgggaataataatattcacatctatatgatgcctgtaaacacaacaggtatttataaatgagtaaataa

SEQ ID NO: 17104 - DNA, 1157 bp, Macaca Fascicularis
tacaagaccactgtcaaacaggaagggtttgggggcctctggaaagggacctctcccaatgttgctcgtaatgccattgtcaactgtgctgagctggtgacctatgacctcatcaaggatgcccttctgaaagccaacctcatgacagatgacctcccttgccacttcacttccgcctttggggcaggcttctgcaccactgtcatcgcctcccctgtagacgtggtcaagacaagatacatgaactctgccctgggccagtacagcagcgctggccactgtgccctcaccatgctccagaaggagggaccccgagccttctacaaagggttcatgccctcctttctccgcttgggttcctggaacgtggtgatgttcgtcacctatgagcagctgaaacgggccctcatggctgcctgcacttcccgagaggctcccttctgagcctctcctgctgcggaccggatcacctctggctttggctctagccgggccatgctttccttttcttccttctttcccttccctccttccctctttccccgcctctctcttccgtgcctttacccaccaccttccctctctccacattgtcatctcctcattgtctctcagtgctggtggagctgacatttgacagtgtgggaggcctggtaccagccaggatcccaagcctcccatcccttggaacattcagccagaatcttcgtcctgccccccgcagcccaccctagcccacttgtcacccataaagcaagctcaaccttggtgtctcctccttctcttgtagctgttaccagaggtcttggtccgatggcctttttggtacctggtgggcaggggaggaaccacctgactttgaaaatgggtgtgatccaccttccacctccagcatccaatctgcagcccatggaggtcatccagtccatttcttttcagacctaggccctgcactaacatggggacagcaggagccacctgagagacagcagtggccttgctctcgcctccccttcttttgccaggccacttgagctcttactcagaatctggtaccctagtgcctgccatcccaaccccccaccccagccacaggcctgtttatctgcacaacaagagtgctcctctctgccctgcatctcctgcagtccagagaa

SEQ ID NO: 17105 - DNA, 779 bp, Macaca Fascicularis
  misc_feature (1)...(779): n = A,T,C or G
gggttagagcagatgcgggggtcgcgggnnnnnngttgatactgtgctctcannaaggcggatcatctcgaccctcactcctcgtgnnnctggcgtagccgatgctgagtggtcgcctggtcccaagtctggtctccatggctggccgggtctgtttgtcccggggcagcgcgggatccggggccatcggtccggtggaggccgccattcgcacgaagctggagcaggccctgagccccgaggtgctggagcttcgcaacgagagcagtggccacgcggtcccgcctggcagtgagacgcacttccgcgtggctgtggtgagctctcgtttcgagggactaagccccctacaacgacaccggctggtccacgcagcactggccgaggagctggcagggccggtccatgcactggccatccaggcacggacccccgcccagtggagagagaactctcagctggacactagccccccatgcctgggtgggaacaagaaagctctaggaaccccttgagccccaagagaggggcaggaccaggatccgaatgggctgagtgagcacgaactactgaggccttcccttcgatatagtccaggatttgaaagggatgaagacccctgagctctattctattggggtccatacatattctccgnnnnnnnnnnnnnnnnncaggtcaaagtgaacccaagaaaagagaagaatcactcactactgctcttgccctggactattcaggaagggcagcccggatgttccatgttaaatcgtgacaga

SEQ ID NO: 17106 - DNA, 620 bp, Macaca Fascicularis
  misc_feature (1)...(620): n = A,T,C or G
gctcccttcnnntggtattgagccagaatatttcagaatacacaatatctgagctgttnntcttaacattttnnnnntatttaacncttnnattcagtnnnnacttggttttaaagtttgagccttgcagatttggcacacttgatggttgtcacagttttcctatatgttgacagggtggtgacttcacacgccatnnnnnnnnnnnnnnnnngtccatctatggggagaaatttgaagatgagaacttcatcctaaagcatacaggtcctggcatcttgtccatggcaaatgctggacccaacacaaatggttcccagtttttcatctgcactgccaagactgagtggttggatggcaagcatgtggtcnnnnnnnnngtgaaagaaggcatgaannnnnnnnnnnnnntggagcgctttgggtccaggaatggcaagaccagcaagaagatcannnnnnnnnnnnnnggacaactcgaataagtttgacttgtgttttatcttaaccaccagaccattccttctgtagctcaggagagcacccctccaccccatttgctcgcagtatcctagaatctttgtgctctcgctgcagttccctttgggttccatgttttc

SEQ ID NO: 17107 - DNA, 725 bp, Macaca Fascicularis
  misc_feature (1)...(725): n = A,T,C or G
cagctgcaggagtactggcggaggggctggacgttcnnnnnnnnnnnnnnntggctgtacctggcagggagcagcctgccctgtctcacgctgattggctctcctnnnnnnnnnnnnnnnnnnnnnnnnnnggacctggaggcccagattgcgatcgtgacagagaacgaggccctnnnnnnnnnnnnnnnnnnnnnnnnngagcagctctacctgaggtcaggggtggtgtcctctgccaccttcgagcagccgagtcgccaggtgaagctgtgggtgaagatggtgactccactgatcaagaacttcttctgaggacagacaggaatggccttgatgaagatgacaggcatggctggggtcagctccttcagccgcgnnnnnnnnnnnnnnnnngtctgggtgtcccagcgagcccctgcagggacagtatggctgagggccggnnnnnnnnnnnnnnnnnaagggaggggtcctccctttgcannnnnnnnnnnnnncccnnnnnnnnnnnnnncaggtgccacagcaggaagcagaggccttcgtaggtgatggcgtgcatgttgtaactaccccgtctcgctgggcacaaggaaccgctcagctaaagccctcgggttccatccgtttaaatctgtggcgttttcagagcctcatctgtcagccttaagtcanntggcaggaaatcataactccagctaacaattaaagttccctgattc

SEQ ID NO: 17108 - DNA, 702 bp, Macaca Fascicularis
  misc_feature (1)...(702): n = A,T,C or G
aaataaagctatnctnnaaagagaagtgcagttgtaatgggaagaggaagacggcgagannnnnnnnnnnnnnnnnnnnnnnnnnnnnnnnnnnnnnnnnnnnnnnnnnnnnnnnnnnnntgctnnnnnnnnnnnnnnnnnnngaaagtaatgggaagtgggccaaaagaatcagctttaaaagccctaaatagtgacatgcctttatatattctgtcatcctctcaaggtagagggctgaaacctcattatgctcaacttatgaggctttttgttgtggttcctgatgctcctttgcagataatactaatgcnnnnnnnnnnnnnnnnnnnnnnnnnnnnnnnnnnnnnnnnnnnnnnnnnnnaagaaatcacgcttccacctgatggcctttgggttttgagatttccttatgcatatgtgactgagagaggaccttgtttcccccctaaggaaaatgtgcagttaatgagctacaaggtgctccgaggagttcttaaggcagtaacacaatannnnnnnnnnnnccagttcaatcctatgcttgagctggtttttgtttttggtatgtgtggctgtgtttttggtatgtgtttactgtgttttccnnnnnnnnnnnnnnnnnnnnnnnannnnnnnnnnnnnnnnnnnnncataatttgttccacntnttttattgttgatatttattgtaaacgtggc

SEQ ID NO: 17109 - DNA, 733 bp, Macaca Fascicularis
  misc_feature (1)...(733): n = A,T,C or G
caaacccaaagccaagttgacacccaaaatacagaaacnnnnnnnnnnnnnngcgagaaactatacactcagttttaaagaagcgaaaattgtgaaaaagttcaaagactccaaaagtgtattgttgatcacttgtaaaacatgcaacagaacagtgaaacatcatggtaaaagtagaagcttnnnnnnnnnnnnnnnnnnnnnnnnnnccactcctacaannnnnnnnnnnnnnnnnnnaccagagagaaggactgcaaacccaaatcctgacatgtctggttccaaaggnnnnnnnnnnnnnnnnnnnntcagaacacnnnnnnnnnnnnnnnccgtatctacttgctcctcaaagaatacaagcaaaacaaagaaacacttctctcatctgaaaaggttacttagtcagaatgagtcccaaaagaatccaaaggtggacttcagaaatttcttatcttctctgaagggtggactttgaaaataagaagtgcctgatgtcaattctgaaactaaagtaaaacaactttttaaacttttagtttttgaatacgtggaaactagatctgaatgcaaacttttcttggcatccttcagtgtttatggggaaagtacctcattagtatgaatacctgaaacctgcctacctcataggacggctgtgaggatcaaaaaatatatgaaagttccttgtagatatatgtctatagatatgtatgtgtatgtaaaaaga

SEQ ID NO: 17110 - DNA, 732 bp, Macaca Fascicularis
  misc_feature (1)...(732): n = A,T,C or G
gtccagtttatttggatatcgtaaaaccacaggctggacgggtgctcccgggatgaacgcaccaggtttgaaggtaattaggcaggtcctgttcgtacaagttccttctggaaaaatcattatctgcggccactttccgtttnnnnnnnnnnnnnnnnnnnnttcttctactgttttcctgcgagaatcttggtctgaccgggacacgaacacaggccgtatataccggatcagagttccccagatcgggatatctctgctctctgccttcatcacgatggaggacatcgtcatggtcacagggatggcgtcgaagtaggatgagtgaggcgcgagcgtgaggatggccgcctcggtgggcagcgcctgccgccccttcacggccacccggtggaagccgccggcgaaccacatggtgcgcatgatggccttcagcaggaagtccacgaccttcctccacagggccaggggctgctcgggttccttctccgcagagcccagggatgcaacaagtgcgaggggccaggccagcagcatcatggcagcggcaaccaggaggcggaccgggaagagcgtcagtgtcatgagggccacctgggccttctgcagggcgctgaggcgcagctcgtgcacgaaggggttccgccccgggggcgccagcagccgagcatcgccggcccctgcgctggaggcaggggcggcccggggtctgcatccacctcaacactcatg

SEQ ID NO: 17111 - DNA, 695 bp, Macaca Fascicularis
  misc_feature (1)...(695): n = A,T,C or G
atggagccatgcacggtagacnnncagctannnnnnnnnnnnnnnnggctcattgcctctgaggctgaagttacagaactttattttcatgactctgcaaataaggagtttatgctactttcaaaacaattacaagagaaaggatggaaagtgggagacctcctgcaggctgtgcttcagtactatgaagtgatggaaaaagcttccagtgaggagagatgcaagtcgctgttttgattggctcttggaaaatgcatagagcaaaccccaaaccagtatattttagtatttgtttggggaggggaacaagccaataaagatgtttaggataaaatttgaatagtgaatattaacattgtcagtcagttgggaggcaagtaaatatagctttctaagcgctttgggttatcactcagtgtatatagttcatacttttgtaatctctgtcaaaatactagcttcatttattcttctatacatgtgtgtagtgtgtgaagaccctaagaacatgtatttgaaggaaggtctaaccatggggttttcaggggcattgtctgaccacattctttttgtatccaaatagtgctgctagaaactgcactgaagtggctgaggataggttccagtgatagagttatcattttgctccnnnnnnnnnnnnnnncatctaattaataactagtcgacatcagaaa

SEQ ID NO: 17112 - DNA, 1016 bp, Macaca Fascicularis
  misc_feature (1)...(1016): n = A,T,C or G
attatccattagcaatcaagcctttctacatgagggataatgaagatggccctcagcacacagttgctgctgttgatcttctggttcctggagttggggaactctttggaggaggcctcagagaagaacgataccatttcttagaggagcgcttagcnnnnnnnnnnnnnnnnnnagtctaccaatggtatctggaccttcgtcgattnnnnnnnnnnnnnnnnnnnnnnnntgggatgggatttgaacgctacctgcagtgcatcttgggtgttgacaatatcaaagatgttatccctttcccaaggtttcctcattcatgccttttatagctagaagattggttaagaaaaagcaccccatggcagaggcactgcacaggattgtacagacagtacaatgcatgtttggattttagaaatgcagatttcaacatgtaattgttgtgccataagatatcatagaaaaaatataagtggttgtgattttcttagaaagttaagggtatttcatgtaaggatgagctcccccaagaagaggtacttatagcaaggggactctcaaatccattacctcaattaagaagaaatgaagaaattgaattagatagtctcaaagtttcttttaaactctaaaacagaatgagataatgtattttactttgtaatcattaaatcactccctgtgtaatttttgagaaccatctagtagctcaaaataaaataatgttggatcttttctcccttgnnnnnnnnnnnnnnntaaatccttatctcattttcagtactttcctaaacattgcagaaaaaaaatattccttaaagtcttaattgatttaacgaagtagctattctgaattgaaatctcctttnnnnnnnnnnnnnnnaagaaatcagatttaataactgttgcttttccattttaaaagctgttgagatattacattaagtatttcaactctttaatcactgttgtgttataatttgtttatatttgatgtttataatttctctaat

SEQ ID NO: 17113 - DNA, 596 bp, Macaca Fascicularis
  misc_feature (1)...(596): n = A,T,C or G
caggagccaggttgtgccatgtcccccctcccaccgcccccagcagcacaattctgtccctgtccctgccccgccnnnnnnnnnnnnnnnnnncctttgactccttctccccaatcacgagatcttccttccgctctgaggcaacctcctcggagcctgtgttagtgtctgtccatctgtctgtcctacccacccacgtccaaccctggggcgtggacagggccggggttgcggccgcggctgggagcctcgcccctgcagtgttgcctcctcccgtccagcgtctgcgcggatgtagcatgttctatgtgtttttaaacgaagatccgaagagacggctcctccccgatccccgacagtggctctccaaggggcccccgggcagcctcagagcaccccgccccactcccattaactccgagaacattttttttttaaccaaaaccaggagccaggctgtgccatgtcccccctcccaccgcccccagccggcccggtccgaacgcgggcgtcgtgtgttgtgattgtggcatggagagtccccatcccccccgtgtgagcgtgtcccgggcgggtgggcccggccgccccccgcg

SEQ ID NO: 17114 - DNA, 752 bp, Macaca Fascicularis
  misc_feature (1)...(752): n = A,T,C or G
cacaccaccatgcagtnntgtcccgannnnnncagtttgatgtcanngtaatgccnnnncnnnntngcaacattgtcaacaacgtctgcgcaggactggttgggggcccaggccttgtggctggggccaactatggccatgtgtatgcannnnnnnnnnnnnnnnngaggaacaccgnnnnnnnnnnnnnnnnnnnnnnnnnnnnnnnnnnnnnnnnnnnnnnnnnnnnnnnnnnnnnnnnnnnnnnncacctcaagctgcactcctatgccacttccatccgtaaggctgtcctggcgtccatggacaatgagaatgtgaggttccccttgcaccctaccctgctaccccacgcagtctccccctgcagcctcctgtagcccacctcatgcactgaccgcggtccccaggggagggtgataatggatccggcaccaccttctggcccttagctggtgccacttccctcctgtggcagtcccagccctgcacgccacgggagacagtgggtagccccaggccacctgtacagcggggagtggcggggcctggcgtgtgccgagcctgcctgtgtcctacagatgcacactccagacatcgggggccagggcacaannnnnnnnnnnnnnnnnnacatnnnnnnnnnnntccgcgtcatcaacggccgggccgtggaggcctaggctggccctgggacctccttggattccccttcccaccccagcaccccagccagccnnnaggcagagccc

SEQ ID NO: 17115 - DNA, 751 bp, Macaca Fascicularis
  misc_feature (1)...(751): n = A,T,C or G
gtcattgaccggcggctggaccgcaactgtgacannnnnnnnnnnnnnnnnnnnnnnnnnnngcccctcaccacttccccagcctccacaccaaggcccagctgccttctccccatgtactccgacaccagggccagatcctcagacnnnnnnnnnnnnnnnnnnnnnnnnnnnnnnnnnnnnnnnnnnnnnnnnnnnnnnnnnnnnnnnnnnnnnnnnnnnnnnnnnnnntttccctcccacctaaccttgatttcaaggtggcacccagcatcnnnnnnnnnnnnnnnnnnnnnnnnnnnnnnnnnnnnncacccagtggaccgtgctgannnnnnnnnnnnnnnnggagggcacaggcagacggcagctcccaggctggctggcaccccaagggaagagcttgcctccctcagaagcccctttctcaacagacttctgaccgtctccctcttctcccctcctttcacactgaggctcctgctctcttctgcctccgaggcccccagctggaagtgccttgttgcctctgccctttgaagtcggaacaattcctagcaccnnnnnnnnnnnnnnnnacaaaggcaagttcaaggccaaactgcgacaaacccagggctgaggcgtgccccatgaagaggctgagccccctgaaacccctgccccttgttggtacattccagaggcacaggggcctgggggtatgaagctagggaagcccctgcttcgattccccactgcccttgtcctg

SEQ ID NO: 17116 - DNA, 693 bp, Macaca Fascicularis
ggccacgctgtgagcccagcagaaactgcaagccgaggcgcaggagcgtctcaagaaggaggagcagcggcacgccgaggcccaggaccagctggagcgcgccttgcgggcgatgcaagtggccaaggacagcctagagcacctggccagcaagctggtccacatcactgtggaggacggccgcttcgtggggaaggagctggatccccaggcagataactatctgccaagcctgctgggcctcgtggaggaaaagctgctgaaattgcaggcgcagctcgggagccacgacgtgcaggagatgctgcgccacatcgctgaccgcgagttcctcgccagcttagagggaaggctgcccgaatacaacacccgcatcacgctgccccttgccactcccaaggacaagttttttgatgaagagagtgaggaggaggacaaccaggtagtgacccgcgcatcgctaaagatccgttcccagaaattaatcgaaagctacaagaagcaccgtcgctctcggaggccctagagtcgccctgacacccacctggcggcccccatcggtgcccccaatccctccgggtctagcgcaggccccacggggccccttcaagggctgaacgcggcccggacagggagcggaggcggccagcggcgcccggaggggaggaaggggccgggccagacgttcccaca

SEQ ID NO: 17117 - DNA, 731 bp, Macaca Fascicularis
cattagtgatgaggcagatgaaaagacttacaatgatgcactttttcgatacaatggcacagtgggattgtggagacggtgtatcaccatacccaaaaacatgcattggtatagcccaccagaaaggacagagtcatttgatgtggtcacaaaatgtgtgagtttcacactaactgagcagttcatggagaaatttgttgatcccggaaaccacaatagcgggattgatctacttaggacctatctttggcgttgccagttccttttaccttttgtgagtttaggtttgatgtgcttcggggctttgatcggactttgtgcttgcatttgccgaagcttgtatcccaccattgccacgggcattctccatctccttgcaggtctgtgtacactgggctcagtaagttgttatgtagctggaattgaactactccaccagaaactagagctccctgacagtgtatccggtgaatttggatggtccttctgcctggcttgtgtctcagctcccttgcagttcatggcctctgcgctcttcatctgggctgctcacaccaaccggaaggagtacaccttaatgaaggcctatcgcgtggcgtgagcaagaaactgcctgctttaccattgccatttgtatttttttaaaataatactgacattttccccacctctcaattgtttttaatttgtattttatttgtggatataccattttattatgaaaatctatt

SEQ ID NO: 17118 - DNA, 842 bp, Macaca Fascicularis
  misc_feature (1)...(842): n = A,T,C or G
gccagcagtatagaaccnctctcgccaggaaaccaggaatttaagggcannnnnnnnnnnnnnnnnnnnnnnnnnnnnnnnnnnnncacaaagtgcngggaattannnnnnnnncagaaagctctnnnnnnnnnnnnnnnnnnnnnnnnnnnnnnnnnnnnnnnnnnnnnnnnnnnnnnnnnnnnnnnnnnnnnnnnnnnnnnnnnnnnnnnnnnnnnnnnnnnnnnnnnnatttgtaccttgttgaagtgtaaaacgactaatttnnnnnnnnnnnnnnnnnnnnnnnnnnnnnnnnnnnnnnnnnnnnnnntgttctccctcagtggcactttcggaacccagtatgtctttcctgaggtnnnnnnnnnnnnnnnnnnnnnnnnnnntggagaatttcaggtgnnnnnnnnnnnnnnnnnnnttannnnnnnnnnnncatccagacctgtcttaannnnnnnnnnnnnnnnnnngttgtatgagaaagactgggcatcaaatgcttcatcaggtctcaaagcacaagcaagaagaataatgctaatagttatagcacctattgtatactcattaatttggtnnnnnnnnnnnnnnnnnnnttttttacttgggataatttaaaaaatgatggataagaaaagaaagattgttctgggttaatattgttctctagtataagtgaattactgatttctctttatttagacaaacacacacacacaccagataatataagcttaataaattatctgttaatgtagattttataaaaaactgtatttgaacattggtctttcttggaagtgagctaattatatcatataagtattacaaatctt

SEQ ID NO: 17119 - DNA, 723 bp, Macaca Fascicularis
ctcaccacttccacctctgaccaggaccaagattacgactatctgaacgagtggggcagccgcttcaagaagctggcagacatgtacggtggcggggacgacgactaggccgcctgcctgcagggctggggaccaaatgtcaggccacagagcatctccaaggggtctcagtccccccttcagccaaggactttggagcttgtcaggaagcggccgtagcaacttggaggagacaggctatgagtctggccttagagtggttagttccttagcctttgaggatggagaaatgtgggcagtttgacttcagcactgaaaacctctccacctggtccagggctgcctcagaggccaggtttccagaagcctctcacctgccgtaaaatgctcagccctgtggcctgggcctgggcctgctgtgaccgacccctgatggctttgtctctggaatggacccttctgaggcctcctgatgcaacctttttttttttttaatgctattttcaaaacgttagagacagttcttcaaaagtgcagcccagagctgccgggcccactggccatcctgcatttctggtttccagaccctaaggcctcccattcagatggatctccgcgtttttatactatgtctagattgccccttattttttattttccccgttgcgttgctgtagaggaagggtgaggacaatcgtgtagatgtactagaatttttataaa

SEQ ID NO: 17120 - DNA, 773 bp, Macaca Fascicularis
  misc_feature (1)...(773): n = A,T,C or G
acagactccagnnngaaggcaggatgaacccacacctggcatgaggaggggagcctggcacagttgnnnnnnnnnnnnnnnnnnnnnnnnnnnnnnnnatctgaagccgggtccttcacccgcaggaggttgccgtccgtctgtcctgctgctcacgccagctccgtggtgtccccccacggggcttctcttctcaacaggccttgcaaggctggggtgggaggtgatagaggcggcacgtgcannnnnnnnnnnnnnnnnnnnnnnnnnnnnnnnnnnnngctgacgacagcttgggcagctgctgtgcccgggacctaggttcagtgtgggctcgggaagcctggcgaatgtggccgcgtaaaagctttctgaggcaggaggctcgcctcacctctgcctgcctgggcaccgcgtgtagcatcttggtttgcaggacagattttaggtgacacctggttatgaaagtcaggaatttgagaaacttctcacaagtgatgcactttacgtaatccgcatgccatcgagacgcttgtgtgcgcacccgcatgtctgccgtttgtggttcaagtgtctgcccccagccttcggacggaaacccactgatacggacagaaagagaaggcccacaagtgggtcttctgtggaagatgcagaaggaggaagttagtgcttacattttagtctttttctccctcgaaaaaataggttaagtttcagtgtcagctannnnnnnnnnnnnnnnnnnnnnnnnnngggggtggttttgtcaa

SEQ ID NO: 17121 - DNA, 656 bp, Macaca Fascicularis
  misc_feature (1)...(656): n = A,T,C or G
tgtgnnnnnnnnnntttcaggggccatcgggnnnnnngcaaggtgacagggactnnngnnntggctcagaggtgattcgggcagccaggggcaggagccaccctccccaggcccagctctgctagcgtcccagaccagccccatcgattgcggagagtgggagtgctcagggaaagaaggtgatttgtgtttgtctccccgctgaaaggaacaggattcaagtccagagttttcatcttcagcctgtgatctgtccagggacccttgggatctggggctccctggcctggccagagctggagcccccacagggtaaggaagagagggtgggaggcagagtatgatggggaggagggacaagaaggcccttttaatgatgagggtaactattgctgttgtgagcctcctagggcccctggctgggaggctcagagggatgagtatgggacatgtgttccccggcaggcagggacaagatggcatggcaagcatgggggcggggtgggtggggagggatgatgcatttctcagctgggcagccatcaatttaatggtcctttaaaatgtctgtgtattaaaaatttaagaataccacactttaatattaaatattcataaggtctagtatcttgataataatgtagatgttttaataa

SEQ ID NO: 17122 - DNA, 754 bp, Macaca Fascicularis
  misc_feature (1)...(754): n = A,T,C or G
tcagttaggggannnnagaattgtttgggacctgggtacaggtaaaagccagattcggcagggacccctctttctaggctgaacactgcgtccccctgctttttggtagacctaatggatcactgtcctgcagccagttcttcttgtggggcctcttaggccagtgctgggggaggcatgctcctctttctatgccacagaacaaacactactctagcagagcctttcttgcactttaaagtgagattaatttagctctaatttggttaaaaacttcctaagagagaaaattcagtctactgatttggtataggtaaatggacattaaattttaaaaaaagtaaaggagatgataggtacagttatagtcttgaggttcatgtgaagccaatggtgttaccttattttgatttccttgttcaggtcagggcctggaatgcctgtgtggggaggtgaatgaattcaaaattttctgtatgaaagcatttttcaccaaaatgagcctcatccctttatgcaacacataaccttactgagggagggaaatagggaagccacctttttatttctcctcactgtgtacaagttcagttgttgtcttgaacactgtctcaagtacctgttttttgtttgggatagtacctggtctgtataagaannntggccttccatagagaggccctggagtctaaaattatgagaacaattaatttatttgtgtcttcnnnttatgatttctnntttgacagtaaaa

SEQ ID NO: 17123 - DNA, 1184 bp, Macaca Fascicularis
  misc_feature (1)...(1184): n = A,T,C or G
aggcccagagtactgtgaggggtgatttgaaagannnnnnnnnnnnnnnnnnnnnnnnnnnnnnnnnnnnnnnttagactaaagaagtcaaggaaatgttgctttctgtactccttcttccctcacccccttacaaatctctagcaacagagaggcaaagtatctgaacaagaatctatattcaaagcacatttactgaaatataaaacaacaggaagcaaagcaatctccctttgtttttcaggccattcacctgcctcctgtcagtagtggcctgtattcgaaatcaagaaagaacagggtggtttgtgctcaggctagggaagagagaggcaggctctgctgccagaattcccaggagggcatatcagcaactgcccagcagagctatattttgggggagaagtnnnnnnnnnnnnnnnnnnnnnnnaataaatattatatatatcaaaagccaaaatctttatttttatgcatttagaatattttaaatagttctcagatattaaaaagttgtatgagttgtaagtaatcttgccaaaggtaaaggggttagttgtaagaaattgtacataagattgatttatcattgatgcctactgaagtaaaaagaggaaaggctggaagctgcagacaggatccctagcttgttttctgtccttcattgtaagtagcacattgcaacaacaatcatgcttatgaccaatacagtcattaggttgtagtttttttttaaataaaggaaaagcagtattgtcctggttttaagcttatgatggaattctaatgtcattattttaatggaatcaatctaaatatgctgtatagagaatgtatctttcatatattgctgcaatttccttatgttaatcctttaacactaaggtaacatgacataatcataccatagaagggaacacaggttaccatattggtttgtaatatgggtcttgatgggttttgttttatcctttaaattttgttcccatgagttttgtggggatggggatggggattctggttttattagctttgtgtgtgtcctcttctcccaaacctcctttcggtgagaacatcccctnnnnnnnnnnnnnnncttgacctcagataacaataagagagctcatctcatttttacttttgaacgttggccctacaatcaaatgtaagttatatatatttgt

SEQ ID NO: 17124 - DNA, 791 bp, Macaca Fascicularis
  misc_feature (1)...(791): n = A,T,C or G
ctgcacagggtgaagnnnnnnngcagcaagatcctgccnnntgggagcaannnnnnnnnnnnnnnnnnnnnnnnnnnnnngtgactcaggagggcagacaagcctctgtccggttgtggaggtcacgtctnnnnnnnnnnnnnnnnnnnnnnnnnnnnnntctgctnnnnnnnnnnnnnnnnnnnnnnnnnnnnnnggcgtaccatgcggttatcaagtattacccagagcaagagccccagctgctcagcggcatcggccggannnnnnnnnnnnnnnnnnncataaaaacagctgaaaagtattttcaagatgttgagaaagtaacacagaaattagatggactacagggtaaaatcannnnnnnnnnnnnnnnnnnnnnnnnnnnnnnnnnnnnnaataactttgcagaagcccacaggttcttcacagagatnnnnnnnnnnnnnnnaacaaacgcagtggccaacaacaacgctgccgtgtgtctgctctacctgggcaagctcaaggactccctgcggcagctggaggccatggtccagcaggaccccaggcactacnnnnnnnnnagcgtgctcttcaannnnnnnnnnnnnnnnnnnnnnnnnnnnnnnnngagcatgcagaagaaacaggccctgctggaggctgtcgccggcaaggagggggacagctttaacacgcagtgcctcaagctggcctagctgcctccagcatactgtgtcagaatgacccgggtctttgaaactgtgtccatgaagctaatgtattaatgtgacacggactca

SEQ ID NO: 17125 - DNA, 879 bp, Macaca Fascicularis
  misc_feature (1)...(879): n = A,T,C or G
cacacaacatgnnnnnnagnnncncctgnanngccatcaangtctgggacatcgtgggcactgagctgaagttgaagaaggagctcacaggcctcaaccactgggtgcgggccctggtggctgcccagagctgaagttgaagaaggacctcccagacaatcaagatctgggacatccgaaccctcgactgcatccacgtcctgcagacgtctggcggcagcgtctactccattgctgtgacaaatcaccacattgtctgtggcacctacgagaacctcatccacgtgtgggacattgagtccaaggagcaggtgcggaccctcacaggccatgtgggcaccgtgtatgccctggcggtcatctcgacaccagaccagaccaaagtcttcagtgcatcctacgaccggtccctcagggtctggagtatggacaacatgatctgcacgcagaccctgctgcgtcaccagggcagcgtcaccgcgctggctgtgtcccggggccgactcttctcaggggctgtggatagcactgtgaaggtttggacttgctgacaggatccaggccaggccgtggcttcccctggaccagccctggacctgtctgagccaggctggccacatggggtggtctcggggtttctgcctgccctatgggcacaggtgcacaggctttggcagccgggcagtgccctccctgcccaatgctcggcgagcctccctctactcggcactatcctcgctgcccagcccctctctctgggtgccaggtacgacgcttgccccggcccaccctccatccccaccctagatggatcgagggcctttttactcaccttttctactgtttttagactgtgtgtagatttggtacttcctgggg

SEQ ID NO: 17126 - DNA, 748 bp, Macaca Fascicularis
  misc_feature (1)...(748): n = A,T,C or G
ggagagagaggtgcccagcctgtgcaggacacgaagctgcacgtgtttgacgcaaagactctgnnnnnnncacagccagagacacttgggaatcctccatctccccggcatggtcatgtgatggtggcannnnnnnnnnnnnnnnnnnnnnnnnnnnnnttggcaggggacaaattctatgatgatctccactgcattgatataagtaacatgaaatggcagaagctaagtcccannnnnnnnnnnnnnnnnnnnnnnnntgcccactcagctgtggctgtgggaaatcacctgtacatctttggtggaatgactcctgcaggagcgctggacacaatgtaccagtatcacacagaaaggcagcatnnnnnnntgcttaaatttgattcttttctaccccctggacgattggaccattccannnnnnnnnnnnnnnnnnnnnnnnnnnnnnnnnnnnnnnnnnnnnnntccaactctctcactctgaaccatgaagctgagaaaagggattcagctgannnnnnnnnnnnnnnnnnnnnnnnnnnnnnnnnnnnnnnnnnnnctgatnnnnnnnnnngtttggtgttcggtgggatgaatacagagggggaaatctatgatgattgtattgtgactatagttgactaataaaacccacatttttattacctgtctgttacnnnnnnnntagttaagtaaaacctgagctattttatacctccaaaatatcttctgcaatatatatctg

SEQ ID NO: 17127 - DNA, 685 bp, Macaca Fascicularis
  misc_feature (1)...(685): n = A,T,C or G
gaagaggagcagcctgtnggnnngacattcatgnnnngacatgannnnnnnnnnnnnnnnnnnnnnnnnnnnnnnnnnnnnnnnnnnnnnnnnnnggcactgcctggcagggtgctgcccatgagaggaagggaagaggagctgccacccatttggggccctccttctctgggtcctcggatttgcccttcagtctagagtctatgaagaccctgcggccctggacggtggggagnnnnnnnnnnnnnnnnnnnnnnnnatcctggccctggcaccccggctccnnnnnnnnnnnnntagtatcttcttagaagtggacccnnnnnnnnnnnnnnnnnnnnnnnnnnnnnnnnnnnnnnnnnnnnnnnnnnnnnttaatcttgtggctgtgcgcaaggacttctgtgggaggtnnnnnnnnnnnnnnnnnnnnnnnnnnnnnnnntagtgtggctgccctgnnnnnnnnttgtcagtggcgccagcctgaccggagggaggtggatggcactttccagaacccaagtgcttatggcatttcccaaggttctnnnnnnnnnnnnnnnnnnnnnnnnnnnggatatttctaggacacctgggtagacccaagttctcagtctggctccatcacatcagggtggccgagggcagttgctgtgtgttggtgaaatagatgtgggagtat

SEQ ID NO: 17128 - DNA, 764 bp, Macaca Fascicularis
  misc_feature (1)...(764): n = A,T,C or G
tggaagtagcatantnnnaaaccagactaacaagagagactatgtttctaagtatatcgattacattttcannnnnnntgtgaagggggtttatgaagaatttcggagaggattttacaaaannnnnnnnnnnnnnnnnnnnnnnnnnnnnnnnnnnnnnnaactgaaggatgnnnnnnnnnnnnnnnnnnnnnnnnnnnnnnnnnnnnnnnnnnnnnnnnnnnnnnnnnnnnnnnnnnnnnnnnnnnnnnnnnnnnnnnnnnnnnnnnnnnnnnnnnnnnnnnnnnnnnnnnnnnnnnnnnaaaagaaaaaattccttgtatttcttacaggaactgacagactacaaacgaaagatttaaagaatatgaaaataacattttgctgtcctgaaagttggaatgaaagagaccctatgagagcactgacatgtttcagtgtcctcttcctccctaaatattctacaatggaaacagtggaagaagcgcttcaagtagccatcaacaannnnnnnnnnnnnnnnnnnnnnnnnnnnnnntccaacagccttattttgttgttgttgttgttgnnnnnnnnnnnnnnnnnnnnnnnnnnnnnnnnnnnnnnnnnnnnnnnntttcgtttctgtctctaatgagaagtgggaaagagggatgaagaagaggctttacnnnnnnnnnnnnnnnnnnnnnnnnnnnnnnnnnnnnnnnnnnnnnnnnnnnnnaaacccctatgtctacatcatattcccctcttgggaa

SEQ ID NO: 17129 - DNA, 795 bp, Macaca Fascicularis
  misc_feature (1)...(795): n = A,T,C or G
agtatcccatctgtctccatcatgttaatgttatatttcatgagataagcatagaacgttgacagcttcttttcaactctcttgacaaaaatatccaaagacacttggcatctgagctgtcttnnnnnnnnnnnnnnnnnnnttccaaaatgccacttcatttgtgaaccactgtggactatgcacaggcatctattgtcaccagttattatcttcccagttcagctccccttcttcttcccagccttcagcctctccctcagtnnnnnnnnnnnnnnnnaattttgaggaaaactgcatcnnnnnnnnnnnnnnnnnnnnnnnnnnnnnnnnnnnnnnnnnnnnnnnnnnnnntataagaaaagcagcagaaggcttaatttctgggatcatatcagcaaaccaatccatctcaggatcttttactggcttctttttcacttgaatggtaaattcctctcctaaaccaagttctgatggaaccttaaggggcctttcttgtgatgacacttttggcggcttgatttggtctgggtcatccccgttttgtacaagactagtcttttggggtaggcttgatttccaaggcatagactcttcagtgagtggaagcaaagcaggaatgggcttctgctccattgaggtaacagattttgtagcagtgattccacctcctnnntttactttagtatctaaattgctgggctcgcagtcatccnnnnnnnnnnnnnnnnnnnnccaggtagtgcacnnnnanttgacagcatcacatggttctctatgccaaatctgtat

SEQ ID NO: 17130 - DNA, 742 bp, Macaca Fascicularis
  misc_feature (1)...(742): n = A,T,C or G
gggctgccacggcagggcccagccgggaacagctcaaggctgacctggatgagttggtggccgctgagtgtgtgtactgtggggagttgatgatccgctctattgaccggccgttcatcgacccccagcgctacgaggaggagcagctcagttggctgtaggagggtgtcannnnngatgggggtgggcagtgggagcagcggcttgaacccacttgggaaggctgcctcctaggctctgctgagtcatcttgcagttnnnnnnnnnnnnnnnnnnnnnnnnnnnnnnnnnnnnnnnnnnnnnnnnnnnnngtcaggtgtgagtgtattctgccagcttttcatgctgttcttcagagctgcagttatgccagaccattagcctgcctcctggtagaggccctttacctggagaagtcagaaatctgacccaattccacccctgcctctagcagctcttctgtccctgtcattccccatacacatcctgttcaccttctcgagagagagagcacctctgtctgttcactctgtggcctctggaactccagctcttctgcctcagaagacttctcttccacctgcctgtagatgtcccagaagtgagaaggcagccttcgaagtcctgggcattgggtgagaaagtgaggctagtgggggcatgcttttgtgcacactgtctggggctccagtgtgaagggtgccctggtgctgagggccttgtggaggatggtcggtgaggc

SEQ ID NO: 17131 - DNA, 764 bp, Macaca Fascicularis
  misc_feature (1)...(764): n = A,T,C or G
gtaagggttacagtcgaaaagggtttgaccggcttagcaccgagggcagtgaccaagagaaagaggaggatgacggaagtgaatcagaagaggagtattcagcacctctgcctgcacccgcaccttcctcctcctgaaaaccaagctttgatttagattaagtgagatttacccagaatgtcagattcctttccctttagcacgtttaaagttctgtgtatttaattgtaaactgtactagtctatgtgggactgtacacactttatttacttcgttttggttaagttggcttctgtttctagttgaggagtttcctaaaagttcataannnnnnnnnnnnnnnnatatgaacatagactagagaaacagtcctctttttccatcatagtactaatctaactatggaagatttgcccatttacactttgagactttttggtggatgtaaataaccccattctttgcttgaacacagtattttcccaatagcactttcattgccagtgtctttctttnnnnnnnnnnnnnnnnnnnnnnnnnnnnnnnnnnnnnnnnnnnnnnnnnnnnnnnnnnatgacgacaaagctgctaaatctcctatttttttaaaatcactaacattatattgcaatgagggaaataaaaaagtctctatttaaattctcttttaaattttcttcttcagttggtgtgtttctgggatgtcttatttttagatggctacactgttagaacactattttcaaaatctgaatgtaatttt

SEQ ID NO: 17132 - DNA, 559 bp, Macaca Fascicularis
  misc_feature (1)...(559): n = A,T,C or G
ccctccccacccaaacctcacctccccacctcttgaacccccatgcaatgagcttctaactcagagtanatgaacaaaagcctccccattccccaacgcctgcctcctcactcctctgtcgctgcccttcacaccttttggtgctacccttccccagagttaagcactggatgtctcctgatcccaggctgggacccccaccccctttgatcctttctacttccacggtgaaaggactaaagtcagactacagagggaagtgggacttcccttgactgagctgtgtgtttcttgtcctgcctcagtccagctctgcaaatcccctccccctgccccccacctccccagactcaccttgccatgccaggtgaatcggggaccaagatggtgggggggaatcaggatcctaatggtgctgccctatttatacctgggtctgtattaaaagggaaaatcccccgtgttgtagatttcatctgcttcctccttagggaaggctaggatatgatgagagattccaacccaagcccggcccccccaccgccaggccatagggcat

SEQ ID NO: 17133 - DNA, 724 bp, Macaca Fascicularis
  misc_feature (1)...(724): n = A,T,C or G
gtatatatttcaagacaaagtgaattagggttggcnnnnctagcagaagaacccannncctgcttagttgagatagttgaatctagcattcgttcctataaaagagagaggtccattgtggcgcccctttccagtgtttgacagtgtgccattcgacaacacattgttatagctacatggagaaagctctgtggattcatcactgtggtgttctccatgtctgctagccatttaggtaagggtagggcacttttaatttaaatgacttcttgcaccatcttgcctaatggactagattggactgtatcaacattgatttactccactttttatgccttccattgtgatgacgtcaaacacagtgaaagccttcagtcatgctatgggatttaattgtgtatcctcattactgtatcatttgtggggtacaccccttccccctttttttaaattaaatacagctcattcttactgtggcttgtagcattcctcctcttctggcctcctggactcctccccttcatctctcttacccttgccccctccacccggtcttggtggtggtatattaaaaaaagaaagaatgaaagcacacaaaatgagtcagtttggggtcagtggtataaagggggtatatgttgcgaacaaatgttttaataacagttggctgtaatcactcctcgccgtgtctggcactgaaaataaggaaaaaaaaaacctacta

SEQ ID NO: 17134 - DNA, 781 bp, Macaca Fascicularis
  misc_feature (1)...(781): n = A,T,C or G
gggacagcagcatacatggcannngaagtcatcactcgcgccaaaggagaaggccatgggcgtgcggccgacatctggagtctggggtgtgttgtcatagagatggtgactggcaagaggccttggcatgagtatgagcacaactttcaaattatgtataaagtggggatgggacataagccaccaatccctgaaagattaagccctgaaggcaaggacttcctttctcactgccttgagagtgacccaaagatgagatggaccgccagccagctcctcgaccattcgtttgtcaaggtttgcacagatgaagaatgaagcctagtagaatatggacttggaaaattctcttaatcactactgtatgtaatatttacataaagactgtgctgagaagcagtataagcctttttaaccttccaagacnnnnnnnnnnnnnnntgacaagcgtcacttctcctgctgctcctgtttgtctgatgtggcaaaaggctctctggagggctggtggccacgaggttaaagaagctgcatgttaagtgccattactactgtacacggaccatcgcctctgtctcctccgtgtctcgcgtgactgagaaccgtgacatcagcgtagtgttttgacctttctaggttcaaaagaagttgtagtgttatcaggcgtcctataccttgtttttaatctcctgtttgttgagtgcactgactgtgaaaccttttaccttttttgttgttggcaagctgcatgtttgtaatgcaaaggcncattactgaaatt

SEQ ID NO: 17135 - DNA, 727 bp, Macaca Fascicularis
  misc_feature (1)...(727): n = A,T,C or G
ttcaggtgaaannnnnnngacgtgnnnnnnnnnnnnnnnnnnnnnnnnnnnnnnnnnnnnnnnnnnnnnnnnnnagcacaactgtggtcagaactttgaatgacagaaatagtattgtaatgggagaagctatttcacagtcatcatctaattctcagtgatnnnnnnnnnnnnnnnnnnnnnnnnnnnnnnnnnnnnnnnnnntgtgctgtagagcaacattttagtagtatcttccattgtgtagatttatatgtaatataaatacattctaattatttgtactaaaatgctcatttacacgtgccattttttaaatnnnnnnnnnnnnnnnatttgtttaatcttatttacattataaatcaaaaaatatttattgttaaaagtaagtcatttatatatcttagaaaagattacatacttttgtttctataattctgaaatatatgaaaaacttagaatatgtcnnnnnnnnnnnnnnnnnnnnnnnnnnnnnacatcttatttttcttctttatatacaatagtgatagtttacactcaatcatcctacggctcacctnnnnnnnnnncaactttacttgcctgcaatgattcannnnnnnnnnnnnnnnnnnnnnnnnnnnnnnnnnnnnnnnnnnnnnnnnnnnnnnnnnnnnngtgagttgagggagctaatctgatacactttgaataatatgatgcctttcaaactagttactaaatc

SEQ ID NO: 17136 - DNA, 787 bp, Macaca Fascicularis
  misc_feature (1)...(787): n = A,T,C or G
gctnnnngaaattgactcatgctgccnnnngcatgctgtttatgaaaggaactcctcaagaaccacgctgtgtttcagcaagcagatggtggaaattcttcacaaacataatattcaatttagcagttttgatatcttctcagatgaagaggttcgacagggactcaaagcctattccaattggcctacctatcctcagctctacgtttctggagagctcataggaggacttgatataattaaggagctagaagcatctgaagaactagatacaatttgtcccaaagctcccaaattagaggaaaggctcaaagtgctgacaaataaagcttctgtgatgctctttatgaaaggaaacnnnnnnnnnnnnaaatgtggattcagcaaacaaattctggaaatactaaatagtactggtgttgaatatgaaacattcgatatattggaggatgaagaagttcggcaaggattaaaagcctactcaaattggccaacgtaccctcagctgtatgtgaaaggggagctggtgggaggattggatannnnnnnnnnnnnnnnnnnnnnnnnnnaattgctgcctatactgagaggagaaaattaataaatcttaaacttggtgcccaactattgcaagaaatatttaattacattggaagcagttcatgatttagtcctcagaaatggactaggaatagaaaattcctgcttactcagttacatgttttgtgtatttctcaatgtcgtgctaaataaatgtatgttacatttttttcccaccaaaaataga

SEQ ID NO: 17137 - DNA, 753 bp, Macaca Fascicularis
  misc_feature (1)...(753): n = A,T,C or G
cgccaaagaacaaatggagaaaaaaagctttacttccttgcattcttctgcctttaaatagcaaagtaccactaccaccacctcttgtccccttccctcttttcttaaacttctggcatttcagagctcagcaggctacccctggtttctggagagttgggctaggcctgaagctctccctcccccacctctgctaggcagcccaggcctgggctgggagacagcccctcaccctgcctgggctcttggccaagcagccttggatggatgaagtcagagaggtggagtgagggtgagtttactcagagcccccagaggaagccctccaccctctgccctccccccacacagggcgggagcccaggcctgttcctggcagctgtggctgcagctgtgctgctgctccctcctggaatgtgcgacaagcccaaatgttccagggagatggccggggtagggggcttagaaatgctaatatggttctgtgttttnnnnnnnnnnnnnnnnggttcccctgaatagcaactttacaaggtccatgtgggagggaccaacccagatgccctgccaagtgtccctgaaaccatggcagctccgtctgtcaagatggcaggggcgggagtgagggggctgctggcttaaccgcaggcatctgggcaggccagtcctcaaagcagctcctgagggtctgtattgcactgtgaccagtctcaagctatgcctctaatttcgccggggatatgactaggaaga

SEQ ID NO: 17138 - DNA, 386 bp, Macaca Fascicularis
  misc_feature (1)...(386): n = A,T,C or G
aaaaaaaaaaaaaannnnnnaaaaaaaaaaaaaaaannnaaaaaaaaaaaaaaaaaaaaaaaaacctccaccctccctcccctcccggctccctggccagagggagagcttggtctctggacctgccttaggaaggagagggagggcaggaaggaaaagaaaggacttggaggtggcaggagtccgggccctgctccttgtgggcactcgcactgcccccggagcctgccggcagtggggccagcgatggacagctgaagttggggccagtgtctcctgggcacccttgcctcgccccagaccggcccgtccagtccccatcacaccttggcggcctttatttattctcttcccccagcnnggccacttctttgaaggagggctgg

SEQ ID NO: 17139 - DNA, 803 bp, Macaca Fascicularis
  misc_feature (1)...(803): n = A,T,C or G
agcacgctagcnnnnnnnnnnnnntgcatgagccgctgagaagagccactgaaggccccagcaggggatgctcatcactggagactgcgattgtgaagaacactgccccctcccccgggttgggtggcccagccagctggccagcctccactcccactctgccagacaccccgacacccacccaggctttcaacagcatggagggggannnnnnnnnnnnnnnnnnnnnnnnnnnnnnnntaaaaaaaaaaaagacttgaaagttcactgggactcagtttaccttaatgccttagcagaagacaaatcctacctagagacctttgtcccttaaagcaataactgacaactctttgtagtcctcctcatgggtagttaaaagtggggtcacccctttatctccaagcactacattttggctgctgccggcctctggggaggtggcagtaatgctgttactagtgattttagggctttgttatttaacttattccaagggtgctgtgctcagccctgcccnnnnnnnnnnnnnnncctccnnnnnnnnnnnnnnctgtagccagtgcagacctcactgtcgtgtccatgccaccctggcatggctgtaggtggcctgatgactccatgatggacgatcttgctcctgggacctgcctcttcccaggcttcctgggggagagttgtatgcccaggcaaacaagggctgagcggcgttcgcatggctgtttcatgaccgcttgtttttctccttttggtgtaatgttttacaaatcctttggcctgagaactaatatgttaatgcc

SEQ ID NO: 17140 - DNA, 721 bp, Macaca Fascicularis
  misc_feature (1)...(721): n = A,T,C or G
gattgacctgtttaggtaacatctannnagcaggtttttttagtcnctgaagcttaccagggagggtcaggttaatttcctgcattgctcttggagcaaaggctaaaaatattaggtgacatctttggcaaccaggctgtcagactgacctgtaaacctcctttagggggacagagtagaaactggagatgacttgtttccagctgtgagcttgagagaagcgtcactcccaacatttgaaggttattgctttcaataccattgggacaaatatatgggccaggctttgatatctgtgatgcgcattttggaagtgctgggttgggaagtgacacatgtctgttgcacaaatgcatattggttataggattgtgttttctgccaaacccccacatttcttgggtttgcgagtgaggaagggcatgttgtaatgccgagctgatttgtagctcgtaaggtagtaattggtatttaacatttggatttgttatttctacttatcttagcactcagataattgaactacctgctaattcttgcctcatttcaaagaaaataagttgttatgcactttgggatagtggtgatctgtacaggctgtgtgttagctacttgaaggcttaactggtatttcttgtatgttttaacagcatgacttcttacagagttgtaatttttaaaattgaggacgccgtatttgagatgtcagttttaacactca

SEQ ID NO: 17141 - DNA, 762 bp, Macaca Fascicularis
  misc_feature (1)...(762): n = A,T,C or G
ggggcaagggttgagctggtcgaaaagtcctcaacgtcctgacgggacgcccctgaagccaaggcagtttgagcccattcattattctctcctggatcttaggcaaagccccgggccccttggagcagcaccagggttcccgacacccccaccgacagggtcgaacgtgcacaggctgggaccacgccggagttcattgagccctcttncngggagggcagttccagggaccatgaagggatttccgtccagtgccaggttatccacctggggcagctcgtcaggccgcggcctcctgttcagtctgttgcagctgagatcgagcactctgagcttggccggcagtcctttaggcacctgttccagcccagcgaacgacagattgagggagtttagggcgctggaccacatacatctcggagcgctagggtttgcggtggcgcgcagcgagttgtggctgaggtctaggctgtggggctgcacacctgccgccgccagtgcagcgcacacgcctgtgggcgtctccattcctgtgttgcgcagcgctagattctggagggccgggaacttgtggggacagagagccgcgatcagtccgcgttcgcccagtccaggattgtcagacaggtctaggctggtgagggccgggaaagcgcgaacctgnnnnnaggaaaaggcaggcgagtgtgcttgggcaatgctcagtaccttgaggccgggcttgagccactgctgcagctcggcgnnncaggaacgccctgt

SEQ ID NO: 17142 - DNA, 653 bp, Macaca Fascicularis
  misc_feature (1)...(653): n = A,T,C or G
caggctggtctcnnnnnnnnnnnnnnnnnnnnnnnnnnnnnnnnnnnnnnnnnnnnnnnnnnnnnnnnnnnnnnnnnnnnnnnnnnnnngcccgtacagcttttttgggaatgctgctaaccttgaaatgatcagacacctaggagttattagtgctaaaaaggggaccgtgcaaggcagcagagttacatggttcttcaaatcatgtctgaatctattcttggaatcttctgtataataagggaagttctctttccccactgccacatatgtctgttttaaaagataagtccactaactgtgtaaaaatgatatatgtaggcattaaccatacactttaatgggtataattttctgcctgcttccgttcctcagcccagtaggttaaacagcaaagaaagactggtgtgtactgaataggaaagggaagttttatttggaaccttctgagaggaaatcaaccaggaccaaaaagccttaaaggacacagagcaaagcacagccacttcccttccccagcttggctgccctacggtgatttctcaagctccttgggggactgttgtttctcatctggaatcaatgtgtgtatgagttttgtctggtaggattgctctctccgtccaaacaatatcactgtgaactgaataaat

SEQ ID NO: 17143 - DNA, 726 bp, Macaca Fascicularis
  misc_feature (1)...(726): n = A,T,C or G
aggatgnnnnnnnnnnnnnnnnccctnnctgcnnncgggtggggctnnnnnnnnnnnnnnnnnnnnnnnnnnnnnnnnnnnnnnggtggtggagggggttagcactgcgctgggctccccctgactagcacaagagtggtggggctggggccagctccaggacggcttgggagctcagcctgcctgggagagccctttgtggcgaggcagcaaaactcgggcatcaccttctttcttggtggcagaaattttgaagtcagagagaaatggtcctttgttggcttttttttggtttcccgtgggtcctttggcaggtctnnnnnnnnnnnnnnnnnnnnnnnnnnnnnnnnnnnnnnnnnnnnnnnnnnnnnnnnnnnnnnnnnnnnnnnnnnnnnnnnnnnnnnctcctcttcctttccactttctctttcctaatttcctagacatacgtcaactgtatgtacacactggggctcctctcccaacgtatatgtatatatacatccatatacatatattgtgtggttttcccctttctttcctttttttaagcaacagaactatggaaacaataccccaacagatgaacgaaaatgtattattgtaaagtttattttttttaatactgttgtctataatggggaaaaaggannnttgccccccagtgccctgctccagtcggtctggctgggctctggtgggggcttctgatccgcatccacgcta

SEQ ID NO: 17144 - DNA, 778 bp, Macaca Fascicularis
  misc_feature (1)...(778): n = A,T,C or G
gctgatggcaccatcaannnnngggcgctccaggacttcagctnncttaagacattcgaggggcacgatgcttnnnnnnnnnnnnnnnnnnnnnnnnnnnnnnnnnnnnnnnnnnnnnnnagcggctcggatggcctcgtgaagctctggaccatcaagaacaacgagtgtgtgcggacgctggatgcccacgaggacaaggtctgggggctgcactgcagccggctggatgaccgcgccctcactggggccagcgactctcgagtcatcctctggaaggatgtgaccgaggcggagcaggcagaggagcaggccaggcaagaggagcaggtggtcaggcagcaagagctggacaacctgctgcatgagaagcggtacctgcgggcactgggcctggccatcnnnnnnnnnnnnnnnnnnnnnnnnnnnnnnnnnnnccaggccatccggagagaccctgaggcctgcgagaagctggaagccaccatgctccgactgcggcgagaccagaaagaggccctgctgcgcttctgtgtcacgtggaacaccaactcgcggcactgccacgaagcccaggccgtgctgggtgtgctcctgcggcgcgaggcccccgaggagctgctggcctacgaaggcgtgcggnnnnnnnnnnnnnnnnnnnnnnnnnnnnnnnnnnnnnnnnnnnnnnnnnnnnnnnnnnnnntccaggccgccgctttcttggacttcctgtggcacaacatgaagctgcctgtgctggcggccacccccacaccct

SEQ ID NO: 17145 - DNA, 766 bp, Macaca Fascicularis
  misc_feature (1)...(766): n = A,T,C or G
tggcgcagctcaaggtggagctggagcgggccacgcagaggcaagagcgnnncgctgagaggccagcccttctggagctggagagattcgagcgcagggccctggaacgcaaggctgcagagctggaggaagagctgaaggccctgtctgacctccgcgctgacaaccagcgcctcaaggatgagaatgcagcgttgatccgcgttatcagcaaactctccaagtgacctggagggactttcccgcacccgtatttnnnnnnnnnnnnnnnncacacgcaccccttcccccgtgtgaacacgagtgacagggctccgggggaagtctcagagaagccatagcccccctgggacctccgaactgggaggggagcagagtccccaggagccaagggggccacccgaggccaggatggaggtgggaggccgagccaagtagggggacgttgccagaggggaccagggccagagccgggactaggaaggaactgaggaccaagaagtgcaaggaccagtagccaggaccagagtggccgcctggaggtccccctctcacgtgtgatgccaccccgtcaccccccctcctgagcagggatccaagactgtgccgagagtcctgccggcnnnnnnnnnnnnnnnntgtatatagggtccatgtgcaatagggagggacgtcttctattttttgctgccccctccccgcccactgtctggggcagggggagaaggtatttcgagataaagcacaggcaccacaaataaaagtc

SEQ ID NO: 17146 - DNA, 798 bp, Macaca Fascicularis
  misc_feature (1)...(798): n = A,T,C or G
aatacctagatgaagnnnannntnnnnnnntattgtaaacttttgaatctggtttcattgttttaaataaattaaggggacactaaagtcctatcattcatttgcttcattgctgaacaggtaagatataatattacatgaatgattactatattttgttcacactaataaagcttgtgctcagaaatgccatacacacacacatacacacctgcacacaaacacacacattatcatttaatgcataaatcaatgcaaaaggttttcccattaatatgaaatgttacatatatataaatgccatatttaaaataatttgtctaacagtagaactttctcagagcactcactgaagcttgcattccactgaaagagttatttgtgtaagtagagtatcctgagaaggaaaagaacttacgacctttctttataacagaaactcaactctaaattcaatannnnnnnnnnnnnnnnnnnnnnnnnnnnnnnnnnaataggttactatatgttctcaattaaattctttaatctgtccagtcccagtttctcttattaataaaactttggaaatttctttnnnnnnnnnnnnnnnnnnnnnnagatatagagactaaggactgtgactatacagctgtcactcttaagtttagtgaaacttaaacagcaaaaacaaaaaaacaaaaaagaccttcctgtgatactttatttccaaactaataaaaatctatatgactttttattgttgtgtgataacaaagtaagttttttgtattttgtatactttcaggcctggcaact

SEQ ID NO: 17147 - DNA, 769 bp, Macaca Fascicularis
  misc_feature (1)...(769): n = A,T,C or G
tgcagcacatcacagggttaacagtaaagactgcagaattgttacaggtgcaannnatggannnnnaggacaatatgaaccacacttcgacttctctaggcgaccttttgacagcggcctcaaaacagaggggaataggtgtagccacgtttcttaaactacatgagtgatgtagaagctggtggtgccaccgtcttccctgatctgggggctgcaatttggcctaagaagggtacagctgtattctggtacaacctcttgcggagcggggaaggtgactaccgaacaagacacgctgcctgccctgtgcttgtgggctgcaagtgggtctccaataagtggttccatgaacgaggacaggagttcttgagaccttgtggatcaacagaagttgactgacatccttttctgtccttccccttactggtcccgcagcccatgtcatcttcaagttcaatgtgacagacacctttgtatgttccagtttctatcaggctggtttttggagaaatgaatgtctggagcagagggagaccatactagggcgagtcctgtgtgactgaagtcccagcccttccgttcagcctcnngccatccctggccccaagaccaggatcaaagtggctgcagcagagttagctgtctagcgcctagcaaggtgcctttgtacctcaggtgttttaggtgtgagatgtttcaacgaaccaaagttctgataccttgtttacattgtttgtttttatggcatttctatctattgtggctttta

SEQ ID NO: 17148 - DNA, 735 bp, Macaca Fascicularis
  misc_feature (1)...(735): n = A,T,C or G
annnnnnnnnnnnnnnnnnnntnngacatggnnnnnnnnnnnnnnnctgaagtgcttacctttgccctgtgctcccaagaagatatagctgataaacttggtttggatatctctgcaacaaaggcagtccacataagtaatcctaaaacagctgaannncaggtggcacgcactacccttcttcctggcgtctcgaagaccatagcagcaaatcgtaagatgccccttcctctgaaactgtttgaaatctccgacattgtaataaaagattctaatacagatgtaggcgcaaaaaactaccggcatctctgtgctgtttattacaacaagaatcctgggtttgagatcattcatgggctgctggacagaattatgcagttgctcgannnnnnnnttggtgaagacnnggggggatatgtgatcaaagcatcggaagggcctgctttcttccccgggcgatgtgcagagatatttgccaggggtcaaagtgttgggaagcttggggtccttcatcctgacgttatcaccaagtttgagctgaccatgccctgctcctcgctagaaatcaatattnnnnnnnnnnnnnnaagattggtctctgtggtgtgattctcttcccaagtgtccctttctcctcccctggtgtcccttagtcttcctccacggggaacatctattcgggctttaatgtttaataaagtagaannnnnnnnnnnnnnntgtgggtagagacca

SEQ ID NO: 17149 - DNA, 705 bp, Macaca Fascicularis
  misc_feature (1)...(705): n = A,T,C or G
ggcttgcatgagaacacagatgcantnnnnntnnnnntcnnnnnnnnnnnnnnnnnnnnnnnagggaggaaggagaggcagggtctgatggggggctnnnnnnnccctggtgtcgtcaggatggnnnnnnnnnnnnnnnnnnnnnnnnnnnnnnnnnnnnnnnnnnnnnnnnnnnnnnncatagcctttcggcaggcctgggagctgcccctgctacgggtgaagagtgtgccagggcggcggctggctgatgggtgcacgctggacgggcgggctgggctggctgacgttgcccacgtactcaacggccttgctgagcagctgtggcaccaggaccaggtggcagctggcctgcttcccaaccccccagagagtgctcctgaatgaataacgagtgggtgcttgtgatcccacccccaaccctcaggtctcgacatagggcctgaggctgaggcaggaacatgggtcccatctggaagactagccagcatgacctgatatggaggatgtggccggagagggcccgcccccgagcagcactttccttgcagaattcatgccagggagttggggaacaaggccctgagctcgaacatctcccacggcctttccccctttggcagcacccgtggagggtgactggaagaaggggtgcctctcaagtgacttcaatcaagagcctttattggttgagggacaccattg

SEQ ID NO: 17150 - DNA, 764 bp, Macaca Fascicularis
  misc_feature (1)...(764): n = A,T,C or G
tgtcacccaggctgtagtgcggtggtatgatnnntggctcactgcagcctatgcctnnnnnnnnnnnnnnnnnnnnntttctcagcctcccaagtagctgnnnnnnnnnnnnnnnnnnnnnnnnnnnnnnnnnnnnnnnnnnnnnnnnnnnnnnnnnnnnnnnnnnnnnnnnnnnnnncctcgcaactcgctnnncctcaaagtgnnnnnnnnnnnnnnnnnnnnnnnnnnnnnnnnnnnnnnnnnnnnnnnnnnnnnnnnnngcccaggctctgggaatattgagataaataagatgcttctatccatttattcaagcacatactgatcacctactgtgtgcctggcactcgtgtcgcaaagataagttattgatttggtacacttagcccctgctgtgtgcagggagctgagctgtgggatgggaatgggagtgaacaaggtacttttcacgtttttcctttttctcctcactgctagacggtgtgggaacttctcactctttaattggcttttccacacacctcaagagcactgactgtgtgctgggcactagtgataagaaagaggatgacagttgttcagtctgcattttcgtcatgggctacatgccaagtgctagggcacagagatgaacaagatcggttccttcacttcatgccacaagcgtttattgagcacctgtgtgctaggcctcacagactcccagttgggttgaaggatggttgactgagtttgattcttccctgtgccatggtcatctg

SEQ ID NO: 17151 - DNA, 958 bp, Macaca Fascicularis
  misc_feature (1)...(958): n = A,T,C or G
gaacccaaacggtagtgactgtactctagtcctgntnnncacncnntggtgccgcttttctgccagtttggcccctcactttaactctctgccccgggcnnnnnnnnnnnnnnnctttttggcactggatgcatctcagcacagcagcctttctaccaggtttggcaccgtagctgttcctaatattttattatttcaaggagctaaaccaatggctagatttaatcatacagatcgaacactggaaacactgaaaatcttcatttttaatcagacaggtatagaagccaagaagaatgtggtggttactcaagctgaccaaataggccctctnnnnnnnnnnnnnnnaaaaagtgtggactggttgcttgtattttccttattctttttaattagttttattatgtatgctaccattcgaactgagagtattcggtggctaattccaggacaagagcaggaacatgtggagtagtgatagactgaaagaagttggaaagaggaacttcaatccttcgtttcagaaattagtgctacagtttcatacattttctccagtaacgtgttgacttgaaacttcagtcagattaaaagaatcatttgttgaacaactgaatgtataaaaaaattataaactggtgttttaactagtattgcaataagcaaatgcaaaaatattcaannnnnnnnnnnnnnnntgttnnnnnnnnnnnnnnntaatccagtatttgaaaagtaatccagtttgaaatgtgaagatgtattctggtagaacagtgagtagaatgacatgcttactatacagaagccaaaaataggactctcagataatagttttaggaaacccttgatttcttatataggtttaagaaggttagttttctgtttctttgcaatttttcttccagagtccatagcaggaaagtatgtaacgagaattggttagtgtgaccccctc

SEQ ID NO: 17152 - DNA, 605 bp, Macaca Fascicularis
  misc_feature (1)...(605): n = A,T,C or G
tgccgcttgtccttgtgtctgggctgctccaagcctttgtgctgggcgccctggacatgtcctgctggtgagggaccccgggaagatgacagtctgtgtgcctttgtgtggagaccaacctgaggatgtcctgggaaannnnnnnnnnnnnnnnnnntccttgactggcctttaaaaaaaaaaaaaaattcccattgcccagcctcagtgcatttggcaaattcttacttcgcgtcccagagtcagagaattggcaaaggcccataaatggtaatctggctggcctgggagaaagactcaggagaaaagccagtggagaaggtgccgctgntaggcggcagcagggctgcccacccgtgagccacgcagacccccaggcgtgcctgccggctctcgtgtgtggccnnnnnnnnnnnnnnnnnnnnnnnnnnnngcctacaagctttgccactccctgccctctgtggtggtcactgtttttcccaccctctaaaccatgttgtctcgtaatgacagtgaaagaaccctnnnnncgnngaggnncggtgacatatagacacagccccttttgagacttaccgttgtttaannnnnnngcgaatgac

SEQ ID NO: 17153 - DNA, 794 bp, Macaca Fascicularis
  misc_feature (1)...(794): n = A,T,C or G
gggcagataatatannnnnnnnnnnnnnncaaaagggtcaaaggagaataaaatgatttaaatatatgtatacacgcatgcacacacacacttagtctnnnnnnnnnnnnnnnnnnnnnnnnnnnnnnnnnnnnnnnntgttttctttttctaagtcatgataatgtagatgttctggtctatcataaaagaatgtttatgtacatttcagtcattcaatatgtggctttggaaattaaagtatagctaaaatatttgtattacacattatatataatttcattttgtaaatgttgnnnnnnnnnnnnnnnnnnnnnnnnnnnnnnnnnnntttatgtgacctgtagtcttccacaaaacctaaagtaataacctggcttttctgtgatagccacttttgcgtattttttttccctatttcccttgcctgctaatgttgagcagcatgaacttgctttctgatgctgttttagactgtccctgttgtatttcaataatacctttgttttccttcagcctttattactgtaattgttcattctacatgaaagctaagaaactgaaattagannnnnnnnnnnnnnnnnnnnnnnnnnnnnntgtgtgttatatgtgtcaatttccctttaaaataactatgtattttaaaataactattggcaataaggaaactgnnnnnnnnnnnnnnnnnnnnnnnnncaaagatgttaatcacagggttgtttatgatagcaatgtacatacacatttggctagtactagggtgaataggaaaataaatcatgttgtatgta

SEQ ID NO: 17154 - DNA, 733 bp, Macaca Fascicularis
  misc_feature (1)...(733): n = A,T,C or G
tatttagactatatannggaaccttggtttcttctagatagcagctgtcccaaagaaaatannncttctttgcctgttaagatttatctnnnnnctnnnnnnnnnnnnnnnnnnnnnnnnnnnnnntcaaccagcaatgttgagagcagaacttaagatagctgttgtactttttgctttccatctgttactgtccttcattcttggctccctactatctannnnnnnnnnnnnnnaaggagaaaagttgagtaagagttggcttaaattttaaaaaggaaaaagaaaattgaggttttaggattttcatggtaacaannnnnnnnnnnnnnnnnnnnnnnnngttcagatactaaaatattatttggtcatatcttggatccttttgaaaaagttaagactatatgaaggtaaattagaaataagtatgaatattaataaaatagcatttatcttatttctctattttatgttgtgacttaacctaattttatttttttaacattttctnnnnnnnnnnnnnnnnnnnnnnnnnnnnnnaaggtagatctatgtggttttcttttgtgtttcttaattgtttatctctaactcttaagattatttgtgatctggatttatgtatttgttagatacatatgaattgttaaaatggaatgcaagtttttcaaaagccccaggtctaaatgtaatggttggtttattgttctacaaccccagcccatcattttct

SEQ ID NO: 17155 - DNA, 762 bp, Macaca Fascicularis
  misc_feature (1)...(762): n = A,T,C or G
tgcccagagtcgtgacagtccgaaggggctggtgtggccggtgggcactgcctcttcatccgatgcagcaggaggtccgctggtgggggaaagcttcttccgaggccnctgcacncgcctggaagaggcccagtcactacaggaccccgagatgtccagaccccttatacttttctaaagaggtgaaactgtggccttggcccnnnnnnnnnnnnnnnnaaaaatacatacctatcttccagaacaagccacacaacaacacacctcccctccttgagcctggcccacagcaccgggctctgtgaatttggaaagcgtttcactttgtggcctactgctcggggcaggggagctgagccaggatgtgcaatagaannnnnnnnnnnnnnnnnnnnnnnnnnnnnnnnnnnnnnnnnnnnnnnnnnnnnnnnnnnnnnnnnnnnnnnnnnnnnnnnnnccctgcctcctctgagggacggggcagggcggggtagggggatagacaggaaggggtctgaatgctctggcaacggtgagaagaaacnnnnnnnnnnnnnnnnnnnnnnngcccagccgccaggatctctgcctggagccctttgccctgtccctgctgcctgaggtggcgtagagcagaggaggagaatttgctccaggccaggagcacaaatcattgttcaatgaatttctctccaactcgaccttggtaaacggaaatgttggggggaagagaaacaatcactatttttttccttttttatc

SEQ ID NO: 17156 - DNA, 762 bp, Macaca Fascicularis
  misc_feature (1)...(762): n = A,T,C or G
catcactcaccnnnnnccctgtgtagctgtcctgagggaccgtgacaagcatgtgtttggtgggtttgcctcttgctcctgggaggtgaagcctcagtttcaaggggatgacagatgcttcctgttctccatctgtcccagcatggccgtatacacacacacaggctacaatgaccactacatgtacctgaannnnnnnnnnnnnnnnnnnnnnnnnnnactggggatgggagggcagcacaattactttgggctttgggtggatgttgattttgggaaaggacacagcagagctaagcccacgtgcannnnnnnnnnnnnnnnnnnnnnntnnnnnnnnnnnnnnnnnnnnnttgataagatggaggtgtgggcggttggagacccttcagaggagcagttggccaagagcaacaagagcatcctggacgcggaccctgaagcccaggccctgctggagatcagtgggcggtcgcgccacagcgaaggnnnnnnnnnnnnnnnnnnnnnnnaatgaggagccgcctgagccttcctggattcctctgggtagagagggcaccgcctgcagcccctcttccctcccccatggtttaactgtaatagagtgccacacgggtcacagccaggtagtcccagatgtgccaacaagacgccctctgaagccatgtcctgactgatgggtggatctcccagaaatagatgtttttttaaattttattttttgccctacagggtcactctcaggatctctccgagaaa

SEQ ID NO: 17157 - DNA, 755 bp, Macaca Fascicularis
  misc_feature (1)...(755): n = A,T,C or G
cagactggggcagtnncccaacaaagctgttgctctgggttgggaggaagcagatgcaagctgggctgggtctagtccctccccaccacaggcaacacgagtacagtccctcactccccannnnnnnnnnnnnnnntacagtcccttctcaatcaccacattgtgcctctgctttgggggtgcccctgcctccagcagagcccccaccattcactgtgacatctttccnnnnnnnnnnnnnnnnnnnnnnnnnnnnnnnngaggccagttcccacgggaaggagtctgcctcttctggccccaagcttactcagcctggcggccatggggcctgccgtgcctgccccannnnnnnnnnnnnnnnnnnnnnnnnnnnnntctggacttctccccaggctcactcagtnnnnnnnnnnnnnnnnnnnnnnctctgtctggctcaccctcaggggctacccgcacctcaccctgtgctccttgtgtcactgctcccaatgctgctgctgaccctcactgacagctcctagtggaagcccaagggcctctgnnnnnnnnnnnnnnnnnnccgtttccctgggctgagaggggaagnnnnnnnnnnnnnnnngtactggttcctgtgtcttagggcacaagccttagcaggtgattgattctgcctagaccannnnnnnnnnnnnnnnnngcagggaaaaggaagaacagagtttatttttacagaaaagagggtgggagggtgtggtcnnncccttata

SEQ ID NO: 17158 - DNA, 740 bp, Macaca Fascicularis
  misc_feature (1)...(740): n = A,T,C or G
tatcactgttaataacacaancnnnnnnnnnnnnnnnnnnncagtggagttccttcatgttgccactcctttttaaggacaaactcaggcaaggagcatgtttttttgttctttacaaaatnnnnnnnnnnnnnnnnnttcatattttaattgtcaggtgacacatgttcttggtaactaaactcaaatatgccttttcccatatatgttgctgatgattgtaataaatgtcaaagttctcctgttgcttctgtgagccactatgggtatcagcttgggagtggccatagatgacagcatttccatgacctaactgtatttcacccccttttccttccctactgttcttgccccaccccaaccagttcctgctgctgcttttggcttcttagaggtgaagggctcaaaacaaggcttctaagcacgcagctatctccgtacatgaacaatctagctgggaaactgaaaggacgagggccaccccagctgtctcctctctttctgccaattgttgcccgtttgctgtgttgaactttgtgtagaacttatgcatcagactcccttcactaatgctttttgcatgccttctgctgccaagtccctggctgcctctgcacatcccgtgaacactttgtgcctgttttctatggttgtggagagtgaatgaacacatcagtatgtagaacagttttcctcatggtattggtcacagttatactagtgtttgtattattctaact

SEQ ID NO: 17159 - DNA, 767 bp, Macaca Fascicularis
  misc_feature (1)...(767): n = A,T,C or G
cacacgccgcaggactccctcacaggggtagggggagatgtacaggaggcatttgcacaaagttcaagaagaaatttaaggannnnnnnnnnnnnnnnnnnnnnnnnnnnnnnnnncaccatgtcctctcttgtgaaagagctgaattctgaggttgggagtgaaacagagagtaatgtggattctgaatttgcacggactcagtttgaggatcttgttccctcaccaacctctgaaaaggcttttctagcgcaaatccatgctcgaaaacctgggtatattcacagtggagctaccacaagtacnnnnnnnnnnnnnnnggttacggaggatgcagatccgtatgtgcggcctgaggatgaaaactacgaaaatgactctgtccggcagctggagaatgagctcaagatggaggaatacctgaaacagaagctgcaggatgaagcctatcaggtcagcttgcaaggttgaatgcaatatccttttatcacactcctctcaaagctagtgataaaggaggatcagcaggcctaggaggtcaatgtggtgacagcaacagcaatcaaattaagagatccaaggagagtgtcaagagtccacatgttaagtgttcttatctcagaaacaaaccacaaagggacacaaagaaacttttggannnnnnnnnnnnnnnnnnnnnnnnnnnnnnnnnnnnnnnnnnnnnnngtatatgtatgtccaaactcatccaattgtatatattaaataggtacagattattgtatatc

SEQ ID NO: 17160 - DNA, 646 bp, Macaca Fascicularis
  misc_feature (1)...(646): n = A,T,C or G
cagctttactcccaggcccaaaaaaattacccgtacagccccagatgggatggaaatgaaatggccaaaagagcaaagggatgccaagggagcagagatgcctgcagcccgtgggagcaagtcctggcctttgcnnnnnnnnnnnnnnnnnnnnnnnnnnnnnnnnnnnnnnggaactggccaagctccagagggcctccttggagggcctcagagggagagannnnnnnnnnnnnattttgatcactttgggcttatttcaaaacctttgtccctcagttccaggaggcagcgtttgccaatggaaagctttaggaaaccccagtcttgagaggtggccagccagactgcctgtccacatgcgtgtcagcacacacagccgcttcctggaagccgcctggcatgttttcacggcagcnnnnnnnnnnnnnnnnnnnnnnnnnnnnnnnnnnnnnnnnnnnnnnnnnnnnnnnnnnnnnnnnnnnctggtggtccctggatcctagagcccttcacttcgggttcctccctttttcttgcctttattttttagttggaagaaataaactcacaaattatggtgcagtaattttccggggaaagtaaagcatcaggaatgcccacaccttttttcnnnaagcctttg

SEQ ID NO: 17161 - DNA, 531 bp, Macaca Fascicularis
  misc_feature (1)...(531): n = A,T,C or G
ctcataatgacacccagctcctttgagaggatcagagnnnattgcacaannnnnnnnnnnnnnnnnnnnnnnnnnnnnnnnnnncaaaaacgacaccccggtaatctagaacattctcaagcccctttaactcagatgccaagccacagggcaaacccattcaatacctcccaccaaggaatgagatatgtggacctcactgctcccccaacccggcatcaggctgggacacgccaatgctgttctgggttggaacagcagaggctcagaagctggctctgaaatagacctagcaaaaggaagatacaaggtatccagcgggttcttgtttgggaggcaaatttcccttggaaaaagaagacagacttttctaatgtggtccaaatgccggtcactggtcagatggactctagaagcagtgagctcccnnnnnnnnnnnnnnnnnnnnnnnnnnnnnnnnnnnnnnnnnnnnctcacgcctgtaatcctggcactttgggaggccgaggtgggcgnnnnnnnnnnnnncaa

SEQ ID NO: 17162 - DNA, 754 bp, Macaca Fascicularis
  misc_feature (1)...(754): n = A,T,C or G
tnnnnnnnnnnnnnnaaaattagatatagagaaaatattgcaagtttgatggacaaatgttttnnngagaaaaacaaacnnnnnnnnnnnnnnnaatatatggaaacagtgaaattactagactacnnnnnnnnnnntctttatcaaaatttacgtgatattcttttgcaaggactaaaagctataggaagtaaggatgatggaaaattggacctcagtgttgtggagaatggaggtttgaaagcaaaaacaataacaaagcgaaagaaagaaatggaagaaagcaaggaacctggtgttgaagatatggaatggtcagacacacagacagaggaggccatacagacccgttcaagaaccagaaagagagtccagaagtaattcagatgctgtgaaccagctttnnntctctttttttcttttgacttttttctccttttctatttgaagtgttttattttcatgtgagtcttgcgaggtggaagtaataattaaatacccatgtgttcagaaaaccaaattttttataaaaataaatattttgtacaattcattaaaggctaatttatgaaatttcaaaatcttcagattataccccttacgtnnnnnnnnnnnnnnnnnnnnnnnnnnnnntggagtacatatatatgaaaattattatgatatgcacttttctaatcattgtacatttctnnngagtggataaaaatgttgacagagtcctcactttttaggaaatgcaaagctaaaataa

SEQ ID NO: 17163 - DNA, 709 bp, Macaca Fascicularis
tgaatgccatgccactggcttcctgggccccacaggacggggtacggatgagttgctgggcgtgatggatcaggtcaccatcatcaactccaccctggggaaggccctgggtggagcatcagggggctacacgacagggcctgagcctctggtgtccctgctgcgacagcgcgcccggccctacctcttctccaacagtctgccacctgctgttgttggctgcgcctccaaggccctagatctactcatggagagtaataccattgtccagtctatggctgccaagacccagaggttccgtagtaagatggaagctgctggcttcactgtctcaggagccagccatcccatctgccctgtgatgctgggtgatgcccggctggcctctcgcatggcggatgacatgctgaagagaggcatctttgtcatcgggttcagctaccctgtggtccccaagggcaaggcccggatccgggtacagatctcagcagtgcacagtgaggaagacattgaccgctgtgtggaggccttcgtggaagtggggcgactgcacggggcactgccctgagctctgggtagggacgagcagagccaaggtccacctgctgctacagggtcaaaggaggttttcgatcggcccagagcagaggctctcagccctgaaccaaagtcccagagctgggctgggacgtggcctgcactgagggct

SEQ ID NO: 17164 - DNA, 768 bp, Macaca Fascicularis
  misc_feature (1)...(768): n = A,T,C or G
tgaaatgcagacnttaaaaatttaatannnnatnnngcagtcaaaaaaaccaagcataaaaggtcagtaagttgtaatcttgatagtaaaggtggaacactaactataaatggaaagaaagttttgatttcctttttttgttnnnnnnnnnnnnnnnnatattatacccaaagttggtttaaaaaatatttccatcaactatttttttaaaaataaacattnnnnnnnnnnnnnnaggcagcttttttcctcaaaagtaacctgttcctctttggaatagcacattttaggnnnnnnnnnnnnnnnnnnnnnntttactcagnnnnnnnnnnnnnnnactgtgtgtaaaatatctttaagtaagattgaaggcctctgtggggaataaaatattaccaaagtctataaaaataaattttacatgttctcttttacgacagagagcagcactggttctgttatttttaaaatgaataattgatttcttgataggtgtttaatatttcttccctcnnnnnnnnnnnnnnnnnnnnnnnnnnnnnnnnnnnttgatagactgttttcagaaaacccttatcaacaagtgtacaatacttatctaaaactgtacatttagaatggagcagttcaatactagatctcagaagtttggaaaatagcaaagaagactggatttggaaaggatggtctacagttgcttgtcaaattctgaagctatgaagaataaatgttttaactttggattatgaaaccnnnatttatgatttt

SEQ ID NO: 17165 - DNA, 710 bp, Macaca Fascicularis
  misc_feature (1)...(710): n = A,T,C or G
tgagagaacctttcagtgtaggagtgtnaaangnnnccatgtaatgccnattaattcggcatcagagaagccacactggggagaaacccttcagatgtgtggaatgtggcaaaggcttcagctttagttctgactacattatacatcagacagtccacacttggaagaaaccctatatgtgtagtgtgtgtgggaaagcattcaggtttagcttccagctcagtcagcatcagagtgtccatagtgaaggaaaatcctaataatgagaaagatgtagaaaactctcaagattaatgccaaaatggatcaagtatcatcagattcgcccattgaaaaacccccaagagggaaagagtatggcagagtcttcatatggaaacagtttttattctgttcaatttttaatcaggaaaggatgaccacttaaagagaaacatccaagaataaatagctttgttttgtactaacaggaattagaaaatataatgaaggaaaagatttcattcccagcagcatcaagaaaagtagattttctagaaataaacagttatggaagactcgtatggagaaatttannnnnnnnnnnnnnncnnnnnnnnnnnnnnnnnnnnnnnaaatggagagagagagaagccttgtttttggataggaaaacccatactaaagatactcactctacctgcattaatttatttgtttaatttttgaca

SEQ ID NO: 17166 - DNA, 741 bp, Macaca Fascicularis
  misc_feature (1)...(741): n = A,T,C or G
tgtggagggccgggttatggatgtgccaggcctctactgcagcggctgggtgaagagaggacctacaggnnnnnnnnnnnnnnnnnnnnnnnncagcttccnnnnnnnnnnnntgttgctgcaggacctgaaggctgggctgctcccctcgggccccagnnnnnnnnnnnnnnnnnnnnnngccctgctcagcagccgaggtctgggccccgatgctgaggtcctgggaggtggggtgggtggtccttctctggggcctcactctttgggaggggcttgttctgggaggggtgaaggaggaggtgttaagaatctcccctctgcttcaggggtccggccagtctctttctcagactgggagaagctagatgccgaggaggtggcccggggccagggcacagggaagcccagggagaagctggtggatcctcaagagatgctacgcctgctggggcactgagcccagccccagcccctgcccctggcagggaagggatgaatgctgggaggggaaggnnnnnnnnnnnctgagtgggactttgcaacctctgctgatcccagctggctgtggcttggaggcttggctgctattccagcgtctcctccctcctagggaaggtctcccttgcgcccgagnnnnnnnnnnnnnnnnnnnnnnnnnnnnnnnnnnnnnngtggaggtgcgggccgacctaactccttacccacctctctactgctggactgtggagggtcaccagg

SEQ ID NO: 17167 - DNA, 715 bp, Macaca Fascicularis
  misc_feature (1)...(715): n = A,T,C or G
cagaaagctgtgatnnagaagacgacttccagcgagagatgagtttctaccgccaagcccaggccgcagtgcttgcagtcttaccccgcctccatcagctcaaagtccctaccaagcgacccgctgattattttgcagaaatggccaagtctgatctgcagatgcagaagattcgacagaagctgcagactaaacaggctgccatggagaggtctgaaaaggctaaacaactgcgagcacttaggaaatacgggaagaaggtgcaaacggaggttcttcagaagaggcagcaggagaaggcacatatgatgaatgctattaagaagtatcannnnnnnnnnnnnnntaaactggatttccttgagggagatcagaagcctctggcacagcgcacgaaggcaggagccaaaggccagcagatgaagaaggggcccagtgctaaacgacggtataaaaaccagaagtttggttttgggggaaagaagaaaggctcaaagtggaacactcgggagagctatgatgatgtatctagcttccgagccaagacagctcatggcagaggcctcaagaggcctggcaagaaaggatcaaataagagacctggaaaacgaacgagagagaagatgaagaacagaacgcactaaacagcatctttgaatacaaagaaccaagaaaaaggaaggaagactcacaatttcacaacacactttgatcc

SEQ ID NO: 17168 - DNA, 731 bp, Macaca Fascicularis
  misc_feature (1)...(731): n = A,T,C or G
catatgctgtgtgcagattgnnnnnnnnnnnnnnnnnnnnnnnnnnnnnggcagtgaccagtgcctttttactagcaaaagtgatccnnncaaagcttttctctcaaggggcttttggctatgtgctgcccatcatttcattcatacatgccagcattgatacatggtggtctttctgatggtcagttacatcaagaagcagaagaagaaaacagatctgaagaagctgaagaaaaacaggnnnnnnnnnnnnnnnnnnnngaactatgagtactacttttgttaaatgtgaaaaaccctcacagaaagtcatcgaggcaaaaagaggccggcaatcgagtctccctgttgacagtaaagttgaannnnnnnnnnnnnnnnnnnnctttattgaacagctaataaagatttatttattgtaatacctcacagacattgtaccatatccatgcacatttagtcacctgcctgtggccggtaaggtaatgtcatgattcatcctgtcttcagtgagactgagnnnnnnnnnnnnnnnaataggtgaagnnnnnnnnnnnnnnnattcctaatcaaaagacttaatatattgaaataacacttttttagtaagcaagatacctttttatnnnnnnnnacagaatggaatttttttgtttcatgtctcagatttattttgtatttcttttttaacaccctacatttcccttgtgttttttaannnnatgcnnnnt

SEQ ID NO: 17169 - DNA, 942 bp, Macaca Fascicularis
  misc_feature (1)...(942): n = A,T,C or G
gggactcctgtnnnncccctggacctgccaacatcnccgggcnnnnnnnnnnnnnnnnnnnnnnnnnnnnnaccctcatcggatacttcgtaggcctgctcactgctactgtggcgtctcgcattcaccgggccgcccagcccgcccttctctatttggtgccatttaccttattgccactcctcacaatggcctatctaaagggcgacctccggcggatgtggtctgagcctttccactccaagtccagcagctcccgattcctggaagtatgatggatcacgtagaaagtnnnnnnnnnnnnnnnatagtccttttctctcaactcatggtttgtttcctcttagagctggcctggtactcagaaatgtacctgtgtttaaggaactgccgtgtgactggatttggcatttaaagggaacttgtttgcaggagagaggtgctggagccctgtttggttccttctcttcctgcggatgtagaggtggggccccttccaagagacaggcctctccccagcgctccttcctcccacgtttttatggatctgcaccagactgtnnnnnnnnnnnnnnnnnnnnnnnnnnnctgtttaaaaactgaaaacagcgaggagtctttctagaacttttgaacactaaaaggatggaaaaaattagcaaaccgaagtttcttcaatgacccctcgagaactttgggaccagtttcctatgggggactnnnnnnnnnnnnnnngagacagaagctcttctgtcgttatattcttctttccttttttttggatttattaaatattttctgtggtgtgaagtgacttattaaatccacagacattgagtgacttcttacaacatccacataagaatttgttgtaatgagttcatgnnnnnnnnnnnnnnnngttggcacgtgaacnnnngannnnggggtttttatacgcac

SEQ ID NO: 17170 - DNA, 719 bp, Macaca Fascicularis
  misc_feature (1)...(719): n = A,T,C or G
tatttttatgctgtcatgcttgaatgnnnnagatgtaacnnnngacatatttagaactctcgtcctatacaatgtttattgctcaaatgtagaggttatgtcattttataaagactccattgataagatggcttttattcatactaatcctcccaattttaccccttccatcttccaagaagaaaaaaatgcctgaatattcagaatagatatttctgatttgaaaattctaaagaattaaactggaaaagtatttaatttacttagtgctctgaatttacttttacagttttctgcagtatcattaaaatgtttaagtttacatttgaattgaaaatatgtataaaatctagcaattcacaaaaatgccctagaaatatagatttnnnnnnnnnnnnnnnnnnnnnnnnnnnnnnnnnnnnnnnnnnnnnnnnnnnnnnnnngccgctagagaaattaagttgcactcatgtaagtatcaaactatataaaaggaggtcttgtgcatttcaagtttgcaaggtacttgtgtacttaaaatatgtgtggagacctactgtacagtagttttgcccctttaattggggcacattaatcttaaatcttatagtatttatccacccaaaccccagactgagatnnnnnnnnnnnnnnnnnnnnnnagctgccagtacatgattttaattgctgtcttgaagttaacaagtgttataacgaaa

SEQ ID NO: 17171 - DNA, 694 bp, Macaca Fascicularis
  misc_feature (1)...(694): n = A,T,C or G
ttacaaagaaataattatagtttttatttacccatntgatttgtgtgaagaattcatcactattttatacataccgtgtagtctactatagtatagtaggctactattgctacttctggtgtgagttgtaatgtttcttaatcattggaaatcaattatttttagagtgtagtatataatttcatagcattttaaatttaatgtatcatgcaagtttttttggttgatgctaaataatgtggttgctaaacaaagaatgctaaagaatgttcaagctttgtaggtaactttattgttattatttattttcacacatttacttcctattaaatacagccacaagaaagaaaaaattatggagttgcaaatggcagtgtgctgtcacctgcaacacaagtacataccagaagtatgactcatgcaaagcattttatcatacaaatatcctggtgcgatgatgggcctggcaacattttctactgtacttttgtttaaatttaatgaaacaaaaaattcataagaaattccatcctaccagtaacaaaatggtataaagaatctcccagcctggccaacatggtgaaaccccgtctctaccaaaaagtagccaggtagtatgcgcctgtagttccagctacttgggaggccgaggcacgagaattgcttgaacaaaggaggcagaggttgcagtgag

SEQ ID NO: 17172 - DNA, 781 bp, Macaca Fascicularis
  misc_feature (1)...(781): n = A,T,C or G
agtcattttaatgatagcatatcagaaatatgtgaaccgtgtcatcgaaaaggtcgaattgataacaatctgataccagatagatgataaaccaaacaaccaggttcgaatatccaaccaactctcaaannnnnnnncanncgattattctgttcctatagaaatccccactataaaatgtaaaccagacaaacttccattattcaaacggcagtatgaaaaccgtatatttgttggctcaaaaactgcagatccttgctgttacgnnnnnnnnnnnnnnnnnnnnnnnnnnnnnnnnnnnnnnnnnnnnnnnnnnnnnnnnnnnnnnnnnnnnnnnnnnnnnnnnnnnnnttttagagctaatgctattgcaagcctttttgcttggactggagcacaagctatgtatcaaggattcnnnnnnnnnnnnnnnnnnnnnnnnnnttttgtctcnnnnnnnnnnnnnacagatggaaaatacttttcctttttctgctaccagctaaatacttnnnnnnnnnntacacnnnnnnnnnnnaataaccctcgtaaaaatatatgttggggtacacaaagtaagcctctttatgaaacaattgaggataatgatgtgaagggttttaatgatgatgttctacttcnnnnnnnnnnnnnnnnattgaatagaccaaaagaagaaaaagcacagctgttggaaaactgaaaaaacatacttgattgagaactttgggaataannnnnnnnnnnnnannnnnnnnnnnntttgtaactgtcaacttaa

SEQ ID NO: 17173 - DNA, 779 bp, Macaca Fascicularis
  misc_feature (1)...(779): n = A,T,C or G
tggcaccaatgtgatggtgacagtggccaagtcctttgaggcaccaatannnnnnntgtttccccaggatctgctggagaaaggcctcgaagcaaacaactttgccatgctgggacttggagatgtcgtcattccagggatcttcattgccttgctgctgcgctttgacatcagcttgaagaaaaatacccacacctacttctacaccagctttgcggcctacatctttggcctgnnnnnnnnnnnnnnnnnnnnnnnnnncttcaagcatgcnnnnnnnnnnnnnnnnnnnnnnnnncctgcctgcatcggttttcctgtccnnnnnnnnntggccaagggagaagtgacagagatgttcagttatgaggagtcnnnnnnnnnnnnnnnnnnnnnnnnnnnnnnnnnnnnnnnnnnnnnnnnnnnnnnnnnnnnnnnnnnnnnnaagaaagagaaatgatgcagcnnnnnnnnnnnnnnnnnnggaccagaccagacaaatgggggctgggcccacacaggcatgcacgggcagagggcacaggaggctgagggcagctccaggacagggcagggggcagcaggatacctccagccaggcctctgtggcctctgtttccctctccctctcctggccctcctctgctcctccccacaccctgcaggcaaaagaaacccccagcttccccctcccccggagccaagtgggaaaagtgggtgtgatttttagattttgtattgtggactgatttnnnnnnnnacactaaaaactcatccca

SEQ ID NO: 17174 - DNA, 1048 bp, Macaca Fascicularis
  misc_feature (1)...(1048): n = A,T,C or G
ggataaaagtactgtatgattttgtgatggatgatacaataagtccctactcaagaatgaagaggcaccaaaaaggagagatggtgctggagtagatatcattagtgccaaagggattcctctccaaaactttagatgataaagtggaagttttgcattattaaacttgagaccagggatacttagaagctcctctggcacaattnnnnnnnnnnnnnnnnnnnnnnnnnnnnnnnnnnnnnnnnnnnnnnnnngtcagcctgactctgtactgcttggcttcactcacagaaaacttgtgacttgtgtattatcgtcattgagaatgtttcactcatgtctgtcattttataagcatatcattttaaaagcttttaaaaaggtattttgccgggcatgnnnnnnnnnncctgtaatcccagcacttgggnnnnccaaggtgggtggattacctgaggtcagnnnnnnnnnnnnnnnnnnnnnnnnnnnnnnnnnnnnnnnnnnnnnnnnnnnnnnnaaaattagncggggcatnnnagcacatnnnnnnnnnnnnnnnnnnnnnnnnnnnnnnnnnnnnnnnnnnnnnnnnnnnnnnnnnnnnnnnnnnnnnnnnnnnnnnnnnnnnnnnnnnnnnnnnnnnnnnnnnnnnnnnnnnnnnnnnnnnnnnnnnnncaaaaataaatatataaaataaaaagctatttctagtttatttcactataaagttttgctttattaaaaagctaataaacagctattaatcacagtgtgttagtatttgttacatttttgtatttcactatctttattacatttttgtatttcactatctttataatatggtaaccagggtaatgggggaactttaaaatttcatctcaaaaataatttttaaaaagcctgaggtatgatatagcataaaagattggatgaaaatatatttcaccataagctgaattgctcgtttaaaaattttagctatcatatatgagactcgaattagacactgttgaatcctgtacagccttactcataaataaagtac

SEQ ID NO: 17175 - DNA, 746 bp, Macaca Fascicularis
  misc_feature (1)...(746): n = A,T,C or G
gaaataacagtgtcatcacctccccgtctattaannnnnnnnnnnnnnntgtgggctgagtaattggcacaactctatctaaggtgtttactagtttctgaagtgtgtttcaactattgtgagaattttcnnnnnnnnnnnnnnnnnnnnnnnnnnnnnnnnnnnnnnnnnnnnnnnnnnnnnnnnnnnnnnnnnnnnnnnnnnnnnnnnnnnnnnnnnntttttcctttttaattttattttaaacttacttaatttgtttgaacaaggtgtctaagaatatactgttgaataaagacatgcacacagcataattcaatgtctattttggttgtacagtaattataaaatgcatgttatgaaaatcagatgaataaaatgatgtgtttataattattaggaattatatattatgtatcttttaaaaattgaaattttaaaatattgagaatatcactaagctgacaatgatattgggagatgcatttgcaacaatataaaagctatgcaattttctttttattaaggatgaatctaaatgaattcaattggtaactattcctctttaagtatttgcagatggggcaacatgatatttgggtagccgatgtcataatttggggacaattatctcaatcatcaagaaaaaatttcagcacttgttttgtattattcagaaattaactgtacaggtttgttatcnnnnatgtataattgtgtttttccaacccacattttaaggcaat

SEQ ID NO: 17176 - DNA, 752 bp, Macaca Fascicularis
  misc_feature (1)...(752): n = A,T,C or G
taccagcctgcnnnggcctgtgctatgtgcagaaccactttgtccaaaccccacctcctccagtgtctacccagcttctgcaggcacctccctgggtgtccagccccccacccctgtgaacagccctggcacagtgtattctggggccttgggcactccgggggctgcaggctccaaggagtcctccagggtccccatgcccnnnnnnnnnnnnnnnnnnnnnnnnntcacttggccttctgaaggtcctccttaagattctcctgacagaaattatttattgaacacctctatgtgccaggctctgtgttgggtactttgatcagtgtccctgtttcagtctcatctgcacnnnnnnnnnnnnnnnnggagtacagtgtactggcccaacttagatgcagaaagcgagacgttctgccatcacaaagtcacgtggctcnnnnnnnnnnngacaagactcctcgccaaggaactcgtggcagaagagggcagcggttggcagtggctgccgatgtgtgttcccagccccaccgttcctccctgtggctatgccgtgctcgtggttacagtgtccttgtgtccgtgcgtctgcccttcaggagctcacagctggtgtgcttggtggtcccaggcctgtgtagtgtctctcccctgccgcggtcgcccccaccccgattcctctccccagaagcggtgggacgggcccccgtgaactgcagcagcatgctgaggggtccgtgttgtctgccttg

SEQ ID NO: 17177 - DNA, 741 bp, Macaca Fascicularis
  misc_feature (1)...(741): n = A,T,C or G
taggtaaaagggtagttgtggagctacagtctgaagaacatagctggggctcaagttcaaatgagccatctttttcctctgcgtttttcttgactgaaggtgagatgttatttgtggcatgtgaactgtggcaggtgggaataatcctggccttgagagaaaggatctccagcctcccagaagcctgctgtgctttcgtcccacagctttctgcccattgtttcttactagtttcttgaattgttcttgtggacttttcctcagggatacattggcctgcaggtcccagttcacatgtagtcccctgctcaccattggagaatcagctcactgctctctagaaacgtggcgttggtgaacggaccatgcttccgtagctctgaactgggcagcttggacctggtcatcctctactgccataccttttgctgggggcttgaacacagaacagggagatggacaaccacttcaaagacctactgaatgcagcttctgcttgactgactgggcctgcagctcccttctcctgggacttagaggtggccagatttaaggctcctctactcatccaactccctcttcactggtactcccaatcaaagaacctcaaaatttaaactgatgtggatgggaatatgcgaattggggtgggggtgggggatgaagggaagaaatcactgtgctttgttcagcctggtgtgcaaggatggttggtggttttcctgcattganctttcttac

SEQ ID NO: 17178 - DNA, 736 bp, Macaca Fascicularis
  misc_feature (1)...(736): n = A,T,C or G
ggaacagggagatgctnntgncatncnnnnnnnnnnncacactccaaacacagagataccatctaaactagtcccacaactcccccacaccacaatccccccaccagggtttcctatcgctgaggtgttcacgctgaagcccctggagtttggcaaacccaacacgttggtctgttttgtcagtaatctcttcccacccatgctgacagtgaactggcagcatcattccgtccctgtggaaggatctgggcctacttttgtctcagctgtcgatggactcagcttccaggccttttcttacttaaacatcacaccggaaccttctgacattttctcctgcattgtgactcacgaaattgaccgctacacagcaattgcctattgggtgccccagaacgcactaccctcagatctgctggagaatgtgctgtgtggtgtggcctttggtctaggtgnnnnnnnnnnnnnnntgggcattgttctcatcatctacttccggaagccttgctcaggtgactgattcttccagaccagagtttgatgccaacagcttcggccatccaaacagaggatgctcaggtttctcaggatctcttcttctcagggtagaagaagtctctgggacatccctggggtgtgtgtgtagatttcccacctggggactctgctatccctgggcttgcatcccagggatcccagagtggcctgcctatcacaaccacatccctcccctgca

SEQ ID NO: 17179 - DNA, 1067 bp, Macaca Fascicularis
  misc_feature (1)...(1067): n = A,T,C or G
ggcgtaagttggannnnnnngccaacgtagtccatgtgaagtcacttcctgggtatannnnnnnnnnnnacaatctagacctggtgatcattcgagagcagaccgaaggggagtacagctctctggaacatgagagtgcaaggggtgnnnnnnnnnnnnnnnnnnnnnnnnnnnnnnnnnnnnnnnnnnnnnnnnnnnnnnnnnnntttgactatgccaccaagaaaggacggagcaaggtcactgctgtccacaaggccaacatcatnnnnnnnnnnnnnnnnnnnnnnnnnnnnnnnnnnnnnnnnnnnnnnnnnnnntaccccaaaatcaaatttgagacaatgatcatagacnnnngctgcnnnnnnnnnnnnnagaatccttaccagtttgatgtnnnnnnnnnnnnnnntctctnnnnnnnnnnnnnnnnnnnnnnnnnnntgctggcctggttgggggagctggtgtggtccctggtgagagctannnnnnnnnnnnnnnnnnnnnnnnnnnnggtgcccggcacccatttgcccaggcagtgggcaggaatatagccaatcccannnnnnnnnnnnnnncggcttccaacatgttgcggcatctcaatcttgagtatcactccaacatgattgcagatgcagtgaagaaggtgatnnnnnnnnnnnnnnnnntcgaacctcgagacgggtggctatgctacttgccatgacttcactgaggnnnnnnnnnntgccttgccccacccnnnnnnnnnnnnnnnnnnnnnnntctcccagccttgcaaggaccacactccccatacnnnnnnnnnnnnnnnnnnnnnnnnnnnnnnttgtgcctctaggcagtggaccatggtcannnnnnnnnnnnnnncctaggttgtcctggcccgcttccttaggggagactgttgggtggtgatgggaattgttaggctggaacccaggccacatggatgatgatgattctcccccacaggttcgaacctctgacatgggtggctatgctacttgccatgacttcactgaggctgtcattgctgccttgccccaccc

SEQ ID NO: 17180 - DNA, 663 bp, Macaca Fascicularis
  misc_feature (1)...(663): n = A,T,C or G
cgggnnnnnngcgccccaccacccccaccgctgctgctgccactgccactgctgctgccgctgctggagctgccactgctgcaccggtcctcgtagatggagatctcaatctggggtcggcggttaaggagaactgcgagcccagctgctgagcaggggtcggacatgaaccagtggatggagtccggcaaaggagtgggaaagtgggcttgtgctgctgcctagacagtagggatgtagaggcctgggagctagaccctccccaagcccatccatgcacattacttagctaacagttagggagacttgtgaggccaagccctatgatgggcnnnnnnncgtgnnnnnnnnnnnnnnnnnggctgccctgatggagcttacattccagtgggtctaatgaccatatcttaggacacagatgtgcccaggaaggttactgcacaggaagtatgaggactttggtgtcccgagtttaaatcctgactcaggcactcacaaagctatgtgaccttacaccagtcacttaacttgttagtcatccattatggcataagcaaaatggggattaaaatagaatctaggggttagtgtggagattagatgaaatgtatgtaaggcacttagcacaaaacctggcacatagcaaaggctctaataaaaaca

SEQ ID NO: 17181 - DNA, 799 bp, Macaca Fascicularis
  misc_feature (1)...(799): n = A,T,C or G
atcatggtcagtacatnnnnngtagcacctcacacacacagtgagaggattagactggtgacagagtactatgtgactgaatctaaagaaagcccagaatcagaatctggttcatcaaaaagctgagaaacatcgattggatcaaagtcgtcttctgtggccaatgacattaagtttatctcatcaaatatatttacgtcaaggtcatacagtaggtcttggcttgttagattccgcatatgattgttaactgnnnnnnnnnnnnnnntcgagttagtnnnnnnnnnnnnnnnnnnnnnnntggtggtatgagaatttaactgcnnnnnnnnnnnnnnngactgtgaagtccttgttggatttcgtctaaatgtattgttgggacaaagcaagatggcctcgtgaagatnnnnnnnnnnnnnnnnnnnnnnnnnnnnnnnnnnntnnnnnnnnnnnnnnnnnnnnatgccatcactgatactgcctggaagaggagtatctcccaatgagatgccctgaaaaacgaaaaacactttaaacatgaatagccctatttctgaagcagtcctattacctaacacaacttttgtttcctctcttgtcagttcctttaatagagagatgctgttggcagtaacttcctggttaaagtgcagtcaatacatgatgtgagtccaaatcagaatacttggaattctgcagaatacttggaattctgagtaacctagaaattaagattgattagtataaaagctaactgcatttttgtattaaaaagtctaatgttacaatcttgtaa

SEQ ID NO: 17182 - DNA, 762 bp, Macaca Fascicularis
  misc_feature (1)...(762): n = A,T,C or G
aagaccatggtgctggtggtggtgacgtnnnccanctgctggctgccctaccannnctacttcatcntgggcagcttccaagaggacnnnnnnnnnnnnnnnnnnnnnnnnnnnnnnnnnnnngcactcttctggttggccatgagctctaccatgtacaatcccatcatctactgcnnnnnnnnnnnnnnntttcgctctggattccggcttgccttccgctgctgcccgtggctcacacccaccgaggaagataagctcgagctgactcccacgccctccctctccacgagagtcaaaaggtgtcacactaaggagactttgttcatggctggggatgcagcccccgcagaggctacctgtggggaggcggggcgtccccaggatggatcagggaatatggttagggtatggtttgattgtccccaccaaaacttatgttgaaatttgatcccaatgtggcagtgttgggaggtaggggatagtgggaggtgtttgggtataggggaaggatctcttatgaatagattaatgccctccagaaggagttaatcctcactcttgtgggaatggactagttcccaagataacaagttgttagaaagagtaaggtntnnncagtttccctgtcttgcttcctctctcaccatgtgatctctttgcacaaaannnaattcccttatactttccaccatgactagaagcagcctcannnnnnnnnnnnnnnnnnnnnnnnnnnnnnnatattccagccaccagaat

SEQ ID NO: 17183 - DNA, 603 bp, Macaca Fascicularis
  misc_feature (1)...(603): n = A,T,C or G
agcaaagccatcccctcaattcagggaagggcaaggagccttcctcattcagnnnnnnnnnnnnnnnnnnnnnnnnnnnnnnnnnnnnngcacataatcttnnttnnncgtgactgaaatgtgtccctcatttatcatcccctttgattgtgattgctgctaaagtcagttgtattttgttttttttaaaaaaaaagnnnnnnnnnnnnnnnnnnnnnnnnnnnnnnnnnngatgggacattaatctcccactgcaagcccatgaacttcccacgagtgtaacggcttgctctttttggaatgtnnnnnnatttgnnnnnnnnnnnnnnnnnccctattctaactgattttaagctgttcctatgacaagcttagagacagcgtcggtgtctgctgctgtgtccccaggttttgcgtgggtggcacagatctgggcagttagatggagctctgtgcctgaggtgaagccacattggggtgaagcctcaatcccctgtttgagcgacgcagtgcctgctgcccgagttcctgaagggacnnncattcagataagnngaactgttgagttacattaagaaaatnnatttgcatttgtcaggcaga

SEQ ID NO: 17184 - DNA, 880 bp, Macaca Fascicularis
  misc_feature (1)...(880): n = A,T,C or G
gtgggcaccgtggagaaccagcagggccaggacattgacgacaactgggtgaaagacagaaaaaaggagtttgagnnnnnnnnnnnnnnnnnncacgacggcatcgtgacggcagaggagctggagagctacatggaccccatgaacgagtacaacgccctgaacgaggccaagcagatgatcgcggtcgcggacgagaaccagaaccaccacctggagcccgaggaggtgcncaagtacagcgagttcttcaccggcagcaagctggtggactacgcgcgcagcgtgcacgaggagttctgagcgcccagcgcgccccgcgcaccaccagagcggccccgcggtnnntccaggctccgtggctgtcccggaccccagcccctccctgccacccaccaccggccgaccgtggccgccccannnnnnnnnnnnnnnnnnnnnnnncagcgcgcacccccgcgaggctcagcgaggcgtccccaccgcggcgcgcaccccggcgaggcttctgctgtgatgcgtccggggtgcggggctggcctgcggctccgcggcgcctcctcctccctgnnnnnnnnnnnnnnctgcatctcacttctgagaacgnnnnnnnnnnnnnnnncactatacagacggcgctgaccgnanagcggccggaacctctgggcccgacccctcccagggccaccgctccggggaaataacagcttctccgtttccttgaaaactgaacgattattaaaaatagattaaacttcgctggaaatgagtagccacgaagttcaggggagggcgcctggtccttcccgggcctggcaggttggagccacccaggtcccacagctgccgctgagaaaatgcgaatatttgttgtgacaag

SEQ ID NO: 17185 - DNA, 768 bp, Macaca Fascicularis
  misc_feature (1)...(768): n = A,T,C or G
catgnnnnnnnnnnnnnnnnnnnnnnnnnnnnnnnnnnnnnnacccacccggccatgagnnnnnnnnnngctcagcacgggcactgccacttggtgtggctcaccagggcaccannnnnnnnnnnnnnnnnnnnnnnnnnnnnnnnnncagacacgcgggaccccagccgcnnnnnnnnnnnnnnnnnnnnnnnnnnnnnnnngtgtttgtctgtatttgcacgtgtgtttgtgtgtctgtgtgtgtgtatgtgtgtgtgtgcacgtgcgtgcgcgcttgtggcatagccttcctgtttctgtcaagtcttcccttggcctgggtcctcctggtgagtcattggagctatgaaggggaaggggtcgtatcactttgcctctcctacccccactgtcccgaatgtcgggcagcgatgtacatatgggggtggggtgggcagggtgctgtgccccttcagggggagtgcagggctcggggtgggcctagtcctgctcctagggctgtgaaagttttcagggaggggggagggagatggagcctcctgtgtgttttgggggaagggtgggtggggcctcccacttggccctggggttcagtggtattttatacnnnnnnnnnnnnnnnnnnnnnntgggaaaggctgtgtgaggggagagagggtgggactgctgtggataatggcatactctcttccagccctaggaggggggctcccaacggtgtaacttattgtgtccccgcgtannntatttgttgtaaatatttga

SEQ ID NO: 17186 - DNA, 744 bp, Macaca Fascicularis
  misc_feature (1)...(744): n = A,T,C or G
gaggcaggagtttgggaccannnngagctacatagcaagaccccatcactacaaatttttacaggtnnnnnnnnnnnnnnnnnnnnnnnnnnnnnnnnnnnnnnnnnnnnnnnnnnnnnnnnnnnnnnnnnnnnnnnnnnnnnnnnnnnnnnnnnnnnnnnnnnnnnnnnnnnnnnnnnnnnnnnnnnnnnnnnnnnnnnnnnnnnnnnnnnnccaaaaaaaaaaaaaaagcaatgtttgtattataaaacagtgtcctaacagtccccaggctagagaggactaaggagaacggagagagttatgcaggagcaagcctttcatttccttggtgggggaggggggcggttgccctggagagggccgggtggggaggtcgggggggtgtcagccgaaacgtggaggtggtcctctgcacgcagcccttacccagtgtggcgctgacactgtattcttacgttgtttgaaaatgctatttatattgtaaagaagcgggtgggtgcctcagctgcccttgtcccttgggggtcacacccatcccgtggtgggctccgggacagcctgcgtagacgggccacagaagggcaggccggagctgcacgctctccccacaaaggtatctgtttcttactctgtgcaaagacgagacaaaacccagcgccctggtttttccccacccgagatgaaggatacgctgtattttttgcctaatttcccggcctctaggctcataagaataaagtc

SEQ ID NO: 17187 - DNA, 794 bp, Macaca Fascicularis
  misc_feature (1)...(794): n = A,T,C or G
atgcatcataatgtgtttccaacccagtggacatcttacatatgtacctggaaactaagtggattacccaaacaccgcgtgattggaagtggatgtaatctggattctgctagatttcgctaccttatggctgaaaaacttggcattcatcccagcannnnnnnnnnnnngattttgggggaacatggcgactcaagtgtggctgtgtggagtggcgtgaatgtggcaggtgtttctctccaagaattgaatccagaaatgggaacggacaatgatagtgaaaattggannnnnnnnnnnnnnnnnnnnnnnnnnnnnnnnnnnnnnntcatcaagctaaaaggatataccaactgggctattggattaagtgtggctgatcttattgaatccatgttgaaaaatctatccaggattcatcccgtgtcaacaatggtaaaggggatgtatggcatcgagaatgaagtcttcctgagccttccatgtatcctcaatgcccgaggattaaccagcgttatcaaccagaagctaaaggatgatgaagttgctcagctcaagaaaagtgcggataccctgtgggacatccagaaggacctaaaagacctgtgactactgggctctaggctatagaaattttaaaactacaatgttattaactctgagcctttagttttcatctgtgtacatggatcgcagtttgctttgatcttcttcaatatgtgaatttgggctcatagaatcaaagcctatgcttggtttaatgcttgcaatatgagctctgaacaaataaataa

SEQ ID NO: 17188 - DNA, 693 bp, Macaca Fascicularis
  misc_feature (1)...(693): n = A,T,C or G
tttatttttggtagtgttaatgtctattaatatgattttttttttttttaattttctcgcaataggttgatgacaacaagaaactaggagaatgggtaggcctctgtaaaattgacagggaggggaaaccccgtaaagtggttggttgcagttgtgtagtagttaaggtaagtcaccatttattttagggatgaaggttgtgctaggtaatcatataacaccttgtattgaaattaagttgaggatcttaaaaaaggaaaaaactgattcaacaggtttaaagcattttctgcatttcagaaaaaaataaaagctgtaatttacaagccannnnnnnnnnnnnnnnnnnnnnntgtgtttgtgcagacatactttaaaaactgnnnnnnnnnnnnnnnnnnnnnnnnnnnnnnnnacattgaagtcgttaaggtccctgaaagtggctataacaaatcttagtgatgagaaacatatttataagacatagctaattgttgannnnnnnnnnnnnnnnnnnntaataacttggtgaaattcctaaatgttaacannnnnnnnnnnnnnnntttttttaaggactatggaaaggagtcnnnnnnnnnaggatgttacgaagagtacttcaaatgcaagaaatgaataaataaatctttggctcacaaaaaaaaaaaaaaaaaaaaaaaaaaaagg

SEQ ID NO: 17189 - DNA, 750 bp, Macaca Fascicularis
  misc_feature (1)...(750): n = A,T,C or G
ccagctgggcagtgccagccaatccctggccatttggccccaggggatgtgggccctgcaggctgcaggagggcactggagctgggaggtctcgttgcagccctccccatcttggggctgctgtgtggacggcgctgcctcaggcactctcctgcctgtacctgccctcactgtgtttaaccttttgctccaggacgcgttctgataggagtgggcagcagggctgggccttgtgacaatctgcctttcaccacatggccttggctctgtggccctgactgtcagggagggccagggaggcagagcaggagggagtgtcagcaggaggctgccctgaggggctggggagggggttacctcatgaggaccagggtggagctgagaagaggaggaggtgggggctggaagtgttggtagctgagcggaggggcaagtgagaggggagggagggaagtcctggggggatcctgannnnnnnnnnnnnnnnntaacccactaatcagttcttagattcaggggaggggtgggcaccaacaactcagaatgggggcctttggggagggcgcctagttctcccagctctaaccagccaggagggacctgcatctaagcgtctgggttgccatggcaatggcatgcccccagctactgtgtgcccccgacccccgcagaggcagaatgaacccacagggagctgattgtaatgtttatcatgttgcttccccacccctnnaaatttttgaaataaaa

SEQ ID NO: 17190 - DNA, 722 bp, Macaca Fascicularis
  misc_feature (1)...(722): n = A,T,C or G
taaaacaaaggacnnnngatgtctgtgaatcttgtagtggaatatgttaaaacgaaggacacctgatgtctgtgaaatctgctaaggacaggtacaaaatttatgaattgctttttaaacagtttaaaatgaggaatgcttttgataataagaaagactaatgtaaagtgctgactgatgnnnnnnnnnnnnnnnnnnnnnnnnnncaacttttcttcctcattatggtattctctgtgtacagatttctaaaaatgcaaacttcctatggacaagacaatatgatctgctataatataaattaagatatgataatatgctaggattctgagtaacatgaaaaataggtcttataaaaagcccatatacttcatttggtgggggaaaagaannnnnnnnnnnnnnnnnnnnnnnnnnnnnnnnnnnnnnnnccaatgttatctaaattgccctggcagtcttcagttttctctaagtaaacataaagtaaaagtgacaataaggatgcaggtgtagtaatagctgcagaaaagatgaaactacgaagccacaatgacctgtgggcaggctacatagagacannnnnnnnnnnnnnnnnnnnnnnnnnnnnnnncgacactccatggctgcatgaagatgctggaggcaccaagtgggtggcctgaactctagtggattccactaggcaacgtaagttggttagtgggttcctgtaagtgcct

SEQ ID NO: 17191 - DNA, 611 bp, Macaca Fascicularis
ctcacatggggggaaagtacggggatgatcgtcgtggtggcagaggagggtatgatcgaggcggctaccggggccgcggaggggaccgtggaggcttccgagggggccggggtggtggggacagaggcggctttggccctggcaagatggattccaggtgagactttaaatcagaataaaaaagtagagcaggtgaacagaggccataggataacagggttttgttgagaaagtggtttcattttgagggctagatggaaggacctgagattgtaaccagtagtggagagggaaggaaaattaactcaggaggaatgaatctgtagacccacttgagataagatactcgttgatttaggtaggaggggcagataggatatctaggcttggagagaggtggtaactcaaatacaatggataattaatttttttttttttaagcaggggtgagcacagatcaggatagcagggagaggccgtattaattagcctggcttcccagaattatggaacagctttttgtcctgtacccagtgttaccctcgttattttgtaaccttccaattcctgatcacccaagggtttttttgtgtcggacaatgtaattgtaa

SEQ ID NO: 17192 - DNA, 754 bp, Macaca Fascicularis
  misc_feature (1)...(754): n = A,T,C or G
tgctgggcattaaagttataaatgtagagacaaaccggtgtgtgcggannntaggcaaacaagaaaatattagagtgatgcaattggctttgttccaggggatagccaaaaagcatcgtgctgcaactactatagagatgaaagcttctgaaaatcctgttcttcagaatattcaagctgacccaacaatagtctgtacatcattcaaaaagaatagattttatatgtttaccaaacgagaaccagaagatannnnnnnnnnnnnnnnnnnnnnnnnnnnnnnnaatgagaaaccttctaaagaagaagtcatggcagctactcnnnnnnnnggacctaaacgagtttcggatagtgccattatccacaccagcatgggagacattcacaccaaactctttcctgttgagtgccctaagacagtggaaaacttctgtgttcacagcagaaatggttattataatgggcatacatttcaccgtataattaagccttnnnnnnnnnnnnnnnacacagtatttggacgagtgactaaaggaatggaagttgtacagaggatctccaacgtcaaagtcaatcccaaaacagataagccctatgaggatgtcagcatcataaatattactgtcaagtaaataagatttgttttaatgtacttgcaaataaaaatgcaaattaaacagattattttacattagggagcttaggacttgnnnnnnnnnnnnnnnatgttcaaagatacaatattatattt

SEQ ID NO: 17193 - DNA, 741 bp, Macaca Fascicularis
  misc_feature (1)...(741): n = A,T,C or G
cataggagagcccgnnnnnacgctctccatcataggcttacaccaggaagacncgtcttggcannnnnnnnnnnnnnnnnnnnnnnagcaaccctttccaaaccctttcctggttgctgggcctcattctagcaccttgttcttagannnnnnnnnnnnnnnnnnnnnnnntgggacggagcatggtcccgaggaagggccgtagcctggtagagactagggaggggaggtctcctcttgactgactcagattgacttgagcttttcagttaagttgctttaagcacgtgggctgaggaggcagttcttattccttcctgcgttatagtggggccttgtctcttcctctgcaggacacagatccggaggacatggactggggtaggaaaccaccctgagggtgttagtacatagtagtgaaatggatgaggtcatttctaaggtgtgttgcccgtggatctgggcacaatcattggaattccttggagcatggttaaaggcaaatgaaagctactgggattcatggctttgtatccaaccgcatccaggcctgaggctgctgacatttgacaccagggccagtagagagtgcccttttgtatcttgagccaagaagtgaggcctgggggtgggggaggggggaaggggtgggagccaatactgannnnnnnnnnnnnnnactactctgtcttcactattcagaacttgtaactaaagtatttaaagannnnnnnnntaaat

SEQ ID NO: 17194 - DNA, 727 bp, Macaca Fascicularis
  misc_feature (1)...(727): n = A,T,C or G
gaggnatggtagcctggccagnnncccttatnnnggtgacctcacaaagttcggccgtggnngatgctcctccccagccccggccacaaccttggcccaaccccaacagaaccagacgcagactcaccataccacgcagcagacattcctgaacccggcgctgcctcctggctacagttacaccagcctgccatactatacaggggtcccgnnnnnnnnnnnnnnnnnnnnnnnnnnnnnnnnngtgttccctgtggctcctacctcttccaagcagcatggtgtgaatgtcagtgtgaatgcatcggccacccctttccaacagccgnnnnnnnnnnnnnnnnnnnnnnnnaacactggaagaaaatatccacccccttacaagcatttctgnnnnnnnnnnnnnnnntttggcccaaggctgggggctatgttttgtgtgtgtgtataaatttgcactgaagtcttgtttcagaaaccagaccactgaggagagcctgctgagctgaggccatggcctgcgtggcttggggaaatgagttggtggataccttctgggcttttgaacttgcccctcccccatttccctctcccccatgtgtctgaccctgtcttacccatttnnnnnnnnnnnnnnnnnnnnnnnnnnnnnnnnnnnnnnnnnnnnnnnnnnnnnnntttgatttctggaaggcatgtagtttcaacttgtaacaaaaatatttgt

SEQ ID NO: 17195 - DNA, 751 bp, Macaca Fascicularis
  misc_feature (1)...(751): n = A,T,C or G
agaagacaaaccaccgnnncagcctgnnnacgccggnnnccggcacgagcctcagtgcagccatccaccgcacccaactctggttccacgggcgcatttcccgtgaggagagccagcggcttattggacagcagggcttggtagacggcctgttcctggtccgggagagtcagcggaacccccagggctttgtcctctctttgtgccacctgcagaaagtgaagcattatctcatcctgccgagcgaggaggagggccgcctgtacttcagcatggatgatggccagacccgcttcactgacctgctgcagctcgtggagttccaccagctgaaccgcggcatcctgccatgctnnnnnnnnnnnngctgcacgagggtggccctctgaacaggccatggannnnnnnnnnnnnnnnnncgcattcaggctgcccaccgcctgtccacccatccagtggactctgggacgtggcagcggggaacgggatgaggagcggaagggttcccccactccagttttctcctctgcttctttgcctccctcaggtagaaaccagcccctgctccagttcactcctgacccctctcctcaagggaaggcctggggtggcccctccccttctcctagctccggagttgctgctctagggcagggcattatgggagaattgggggcagcccaggcagtctcatgccccacactctgtacagactgagaggccagttgatctgctctgtnnntaccaggac

SEQ ID NO: 17196 - DNA, 742 bp, Macaca Fascicularis
  misc_feature (1)...(742): n = A,T,C or G
tgcnnnnnnnnnnnnnnnaccaacaatggcgcaggctttgggctttctatcctctgggtcctccttttcacgccctgctcctttgtctgctggtaccgccccatgtataaggctttccggagtgacagttcattcaatttcttcgttttcttcttcattttcttcgtccaggatgtgctctttgtcctccaggccattggtatcccaggttggggnnnnnnnnnnnnnnnnnnnnnnnnnnnnnnnnnnnnnnnnnncacagcagtagccgtgctcatgctgctggtcgccctgctcttcactggcattgnnnnnnnnnnnnnnnnnnnnnnnnnnnnnntccactccttataccgccgcacaggtgccagctnnnnnnnnnnnnnnnnnnnnnttnnnnnnnnnnnnnnnnnnnnnnctgcggtgcgaaccgcagctgccaatgcagccgctggggctgctgaaaatgccttccgggccccgtgacccctgactgggatgccctcgccctgccacttgagggagctgacttagctcccgtccctaaggtctctgggacttggagannnnnnnnnnnnnnatggctcctccgtagtgctcccaatccaatggccatgactgctgaacctgacaggcgtgtggagagtccactgtgacctagtccccccatnnnnnnnnnnnnnnnccacctctcacacgccccaacccagcttccctttgctgtgccacagctgttgcttcg

SEQ ID NO: 17197 - DNA, 742 bp, Macaca Fascicularis
  misc_feature (1)...(742): n = A,T,C or G
gcacttnnnnnnnnnnnnnnnnnncacttttcttaatatgtttcatcagtgacaggcatgataatgtttctaatataatgggtaattgggaaaaatagattagaaataaaattgctctaaagaagttaaaaaactgaatgaacagctaatagtggtataaaaaactgaatgaacagtaatgtttggagccaacatgttgtcccttgtgttagtaaaaggatattcacattccatgatccctggctgagttccacctctagtctttcttacccagctgttgtctatccttgttcaattagaaatactgataagagaatttttagaatacagatcttgtactccttaaatttgaatccgtcagcattgtcactcataggaaaatgatcaaacaannnnnnnnnnnnnnnnnnnnnccctttnnnnnnnnnnnnnnnntgccttacactcatcctgaggtccaccttggtctctcaaaacaccatgtgctctcatgcccccatgtcttttcacacactgttccatttgctcttcctcccacattacactgaaactttcaagcctcagccaaaacattgctgcttctgcatagcagccttcttgacatcccttcttactccccagtccctacagggcttccgtagctctttgtgcgtacttcaatcccagcattttccatcaacttgtaattgtttctgctacnnnnnnnnnnnnnnnnnnnnnnnnnnnnnnnnnnnnnnttact

SEQ ID NO: 17198 - DNA, 760 bp, Macaca Fascicularis
  misc_feature (1)...(760): n = A,T,C or G
gttgccaggacaggcnnnnnnnacattttttcnnnnntcatcatccacttatgcttnnnntttgctgcttacnntaacttaatgatggattgagctgtctgggtggtctctagccgtctgggcaatgtggttctgtctaaccnnnnnnnnnnnnnnnnnnnnnnnnnnnnnnnnnnnnnnnnngacagagctcttcagatcatcttcacacacatgtaactgctggacatcttattctattatgaataagaaatgagaagtttttcaaagggttagtcaggatctgaaggctgtcattcagataacccagcttttccttttgacttttagcccattcagactttgccagaatcaaaccaaggactgcttttttgctacagttttctgccaaatggcctagttccnnnnnnnnnnnnnnnnnnnnnnnnnnnnnnnnnnnnnnnnnnnnnnnnnnnnnnnnnnnnnnnnnnnnnnnnnnnnnnnnnnnnnnnnnnnnnnnnnnnncatacagctgtacgtaagcccctttgccttctctgtaggttcttggcagcaatgagcagctttcagccagtgacacaagtaattactgagtcctaatttgatagccaccaactatacctgggtaggcaaagtcagatttttgagaaccttttcttgatttgaagttttaattgccttattttcttttatgctttcctctgtcttgtaatctcttctcttcttaatatctttccctagaatttcaattattggatta

SEQ ID NO: 17199 - DNA, 723 bp, Macaca Fascicularis
  misc_feature (1)...(723): n = A,T,C or G
gagggagcnnnaaggcatgaannntngttgaagctgtgagcaggaggagcagcnnctgcgggcttccaggtctncnngacctgcctgctctatgcccccacaccctacgtgccatggttctgtgcagtgtacgtagatagctctcgcctgggtctgtactgtttgtcgtgaaaagcttaatgggctggccaggctgtgtcacctccaagcaaagccatatggagcatctacccagatacccactctgcacacactcactcccacctctcaagccttcaacctcttggccagattgggctcattaatgctgttgcctgcccatccgcatgaatnnnnnnnnnnnnnnnnnnnnnnnnnnnnnnnnnnctcttcaagttctaatccttaactctaggattagctcccaagcgcgctgannnnnnnnnnnnnnnnnnnnnnnnnnnttctggcccctctccctgcctcaatctaaaagcaatgccacaccctccaaagtggaatggaaagaaattcatgagtaagggctgcaaggaattcttatcccggccacatgccctccacgcacacannnnnnnnngnnnnnnnnnnnnnnnnnnnnntnnnnnnnnnnnnnnnagttctaatcctgcttctgttcccttttctctccttgaaagtccagcataccgttcttgtccttccccagtcttctcaccctccgcccctccagcttcatgctcagtg

SEQ ID NO: 17200 - DNA, 857 bp, Macaca Fascicularis
  misc_feature (1)...(857): n = A,T,C or G
gccatagcaataagcatagcagacgctntcatgaacttcatgatgagagctctttgtgacaatggtgtgacctttgcacccatgatggagctggaatgctnnnnnaatnnnnnnnatatgaccagagcccaggcccaaaacatcttgcctggttgctacattctggtgtgatggnngcagtcatggctcnnntgacaatattagggggtcctcnnnnnnnnnnnnnnnnnnnnnnnnnnnnnnnnnttgtgggaggcctctccactgtggccatgtgtgcccccagtgaaaagtttctgaacatgggtgcacccctgggagtgggcctgggtctcgtctttgtgtcctcactgggatctatgtttcttccacctaccactgtggctggtgccactctttactcagtggcaatgtatggtggattagttcttttcagcatgttcctcttgtatgatacccagaaagtaatcaagcgtgcagaagtgtcaccannnnatggagttcaaaaatatgatcccattaactcgatgctgaatatctacatggatacattaaatatatttatacgagttgcaactatgctagcaactggaagcaacagaaagaaatgaagtgactcagcgtctggcttctctgctacatcaaacatcttgcttgtttaatggggcagatatgcattaaatagtttgtacaagcagctttcattgaagtttagaagataagaacatgtcatcatgtttaaatgttccagtaatgtgatgcctcaggtctgcttttttttctggagaataaatgcagtaatcgactcccaaataagcacacacatttnnnnnnnnnnnnnnnnngtgattttaaaa

SEQ ID NO: 17201 - DNA, 657 bp, Macaca Fascicularis
  misc_feature (1)...(657): n = A,T,C or G
tttggtgggcagccactctccccgagatgttgccatcagatttctgcagtccaaagnnnnnnnnnnnnnnnnnnnnnnnnnnnnnnnnattcctcttcctctttgtgtaggtttcagccacaannnnnnnattcactctaggggatccctgctaaaggataacttcaggtgtgcagccctgagctccaaggccctgcaccatgccacacacgtgctgtaaggctagaagtgaagaccttattaataggagcataattgcaagggaggatcatggttctgcagtctggagtagacactggaataacagcacagaaaaatctatgactccagtatcttctagaataaagaattttccctctttaacacaagggcccttcttgtcattgaccttagctaaaccatggcaattcataaatagaggaaacattaatgaatnnnnnnnnnnnnnnnnnnttttaactaatatttgcacattttcttagtctctttccaagtctttgcctcttttctttctttatttttattttttcctttgacagatggtatcccttcctggatcattcatttcaccttggtttctaactttaggtttactttcacttgttatttgacttagcaggtgcaacaaaaacaagaaacaaatgtgcccaccccact

SEQ ID NO: 17202 - DNA, 747 bp, Macaca Fascicularis
  misc_feature (1)...(747): n = A,T,C or G
taaagcatgttatttatagtgcatgttatnannagtgtgtgttatttacagtggtaggcattttatgaataacagttatttctgcatttctcaaataaagtttgagaacaggttcagtgcttcagtcattctttatttccccagtcagcgggtgcaggtagttaggcctggagctannnnnnnnnnnnnnnnnnncatgtaattgataactaagaagattaagtcaggaatcccagggaagactgccttgagagagaagagaagaggacaagcttgggcattgaagggatggacagaaggtagaggttcttcagaatgcaagaaattgggttgtgccagaggagtcttgctgttaaccccaaaatctgatcatatagtgtggttannnnnnnnnnnnnnnnnnnnnnnnnnnnnnnnnntttnnnnnnnnnnnnnnnnnnnnnnnnnnnnnnnnnnnnnnnnnnnnnnnaccagaacctgtgtcatacagaatatattagggaaaggtggtggtgaaggaaattctctgataatgggaaaggacatttctagtatttcgttaagacattttctgtttgagtnnnnnnnnnnnnnnntacccttttttgttttttaacagacttgtaaagaaaccaaagatgttagtgctctgacaaaagcagctgattttgtgaaagcttttattctaggctctcaggtggacctgagtaattatatgacatctaaaatggggacttgaaaaatact

SEQ ID NO: 17203 - DNA, 714 bp, Macaca Fascicularis
  misc_feature (1)...(714): n = A,T,C or G
ctgatgagggnnncacgcagagcttgtgccatttttcannnnncacaaataattttggatgggcaaataaaagtatttccctcttccccctttctctctctctgtttcacgggcctcactctgccaagtctgaaggcactaagacattgtcttggccctcagggtctaggggaagaggtgttggggcaggaagtgagtctctccaaggactggacccactgtagtaggggcacctccttgctgcactggtggtatggggttaggccaggtaggacattccagaggggcttccgaaaatcaagagtccccagggaaagggaacagagtaaggcaggccttgttctcactgccctctaagggaacttggtcacttggcacttttaagcctcagtttccccagttcaataataaggacaacaacttttcccacgcattctctttcccagggaaagatgactgaggtgaccaataatagaactgaaaagggagagtgtcctgagtgcaatgttgtatcctggattggatcttggaacaaaaacaggacattagtgggaaaactgtaaatctgaaaaatgtctgaattttaattaatataccaatttcagtctcttagttttgacgaatgtaccatggtgatataagatgttgaccttggggtaggctgggtgaaggatatacaggaactctttatactatctctgcaacttttctgta

SEQ ID NO: 17204 - DNA, 761 bp, Macaca Fascicularis
  misc_feature (1)...(761): n = A,T,C or G
gaacannnnnnnnnnnnnnnnnnnngagcagctgcagtcctaccaggcggagancatcgagttgagacgaacggtcaatgccctggagattgagctgcaggcccagcataacctgcgagactctcttgaaaacacactgacggagagcgaggcccgctacagctcccagctgtcccaggtgcagagcnngatcaccaatgtggagtcgcagctggcggagatccgctgnnnnnnnnnnnnnnnnnnnnnnnnnnnnnnnnnnnnnnnnnnnnnnngtgcccggctagagtgtgagatcaacacgtaccggagcctcctggagagcgaggactgcnnnnnnnnnnnnnntccctgtgccacgaccaacgcgtgcagcaagtccatcggaccctgtgtctccaatccctgcacaccttgcgttcctcctgccccctgcacaccctgtgccccacgcccccgctgtgggccctgcaattcctnnnnnnnnnnnnnnnnntaggaaatgccggaggagcaaggatgcagggcccaggactgcagagctgtgacctggctctggtttaacaaaaggggcctgaaaacatcatttgcatggctgcagtggcccccgtaaggcagccaagaaacttacccaaagcctgcagcctccccaactactctagactgtcctgctcaccctttccttcctgggggtctgttccttcctatgctcacccagagaactcnctgatgttccccgtggccctccctttaacctccta

SEQ ID NO: 17205 - DNA, 1079 bp, Macaca Fascicularis
  misc_feature (1)...(1079): n = A,T,C or G
aagacaaaaatannnnncannnngctannngaacaaggaaagttcaagcaagcagaaacactgtacaaagagattctcannnnnnnnnnnnnnnnnnagtttggttctgtagatgatgaaaataaacccatctggatgcatgctgaagaaagagaagaatgcaaaggaaagcaaaaggatgggacgtcttttggagagtatggcggctggtacaaagcctgcaaagttgatagtccaactgttacaaccactctaaaaaaccttggnnnnnnnnnnnnacgtcaaggcaaatttgaagctgcagaaacattagaagaagctgccatgaggtctcgtaaacagggtctnnnnnnnnnnnnnnnnnnnngggaggcggaagtgctcaatgaccctgagaacatggagaagcgcaggagccgtgagagcctnnnnnnnnnnnnnntcaagtacgagagtggccctgacggaggggaggaaatgagaaaaatgaagctcgggctggttaaatgacttgctcagcgtcccatggcctagccgcccgtgactctcacactgtctcctgcatgacgggtggcgcctcccgcagcttcccttctctctccagtgctgcccgctgtgtctagcagccccctaggatcttgtcagagctgcacctctctgtgaactggccattcctttcggtgctgctgtcctttttggggggttcctgatttctgtatacatgtagctttgccagatatgtacttagtaatataaattgtattaataaaattcatttactgtgtaatacacgagtttaaaaattaagannnnnnnnnnnnnnnnnnnnnnnnnnnnnnnntaagtgtcacacaaggtgttgttgcnnnnnnnnnnnnnnnnnnnnnnnncgtaactaagccttagagcaaggcatgtgccgcacgtgccccatggtacttagagccctggggttcctgcttggactccgggtctccctaggatacgccccagtagcatttgctgtgtagtctgtgtgtggaattcgggcattctgcttttctctactaatcttgaagtgctcagtgatttgtgtattt

SEQ ID NO: 17206 - DNA, 764 bp, Macaca Fascicularis
  misc_feature (1)...(764): n = A,T,C or G
cagagcgagcgcgnnnnngnngctgctgtcatgtgnnnacccngtattacccaacaccaaaagggcttnnnctggtnnnntgtccctaagacagtaatccctttctgacgaaggagcctgcacatgtgggtgagcagacnnnnnnnnnnnncagctctttctcgtcctgccatccagtagcagttagtcttcatccccacgcgaacaaaacgggaaggagccttgaggagaggagtgaggcagcgggcacccaaagtccctcgtccttccctctgtgtgctcnnnnnnnnnnnnnnnncttcccgacccatctctgaccagctgggaacctgcttggggtccccctcaaacctgtgtctggggtgtgggctcacagatccttaccagcctggttcgtgtgagggctcttcctaaagggatccccatctctaagtcactctgaaagggagtcgtggagaggagacgcctccaggttcttagaagttttgaggactgaactgggtcactcgggatctgtgttcaaatcctccccacccctctctttgtggaggttcctcacctgctgctgaagcacaatattttggtgctttcttttctcatttgttaaaggcagtgtccaaaagccattccagatgccaggaccaggggcttatttctagggaaggtaggtcggtttccacgtttgcctcccgttatttttgttttgtaccttttgcctgagacaagccgagtgtgaggtggtttgatttaagaaaaatcaatga

SEQ ID NO: 17207 - DNA, 729 bp, Macaca Fascicularis
  misc_feature (1)...(729): n = A,T,C or G
accagcccccaccnnnaccgcatgaccgtgctgcgcnnnntgccgcgcctacagaagctggacaaccaggctgtgacggaggaggagctgtcccgtgcactgagtgagggagaggagatcaccgccgccccggagagagagggcacaggccacggcggccccaagccatgcttcacactgagctccctcagctccgctgctgagaccggccaggatccgctggacagcgaggaggaggcaatcagcgcccagggtgaacttggcctaaagcccccttcccgggaccagtttccttccttctcacccagagatgcttcgagcagccacaggagcaggaacgtcctgactgccatcctgctgctgctgcgggagctggacgcagaggggctggaggccgtgcagctgactgtgggcagccggctgcaggccctgcgtcgggaggaggtgcaggagcacgccgagtgaccacaggacctgagcaccgctccaccgtccacggggaccccagtgtcttccccagcccccaggagctgaagggtggctgccacagccctggccccacacaaaagcctccccggtttgccacatcggccaagggcaggagtgggtgttgtgctggctagctggagtggtggagatgcctgtccacaccagaatgtccccaggactccccttctgtggtctggaggttctgggctggcctgggctcttaaagggaggatttgcagg

SEQ ID NO: 17208 - DNA, 686 bp, Macaca Fascicularis
  misc_feature (1)...(686): n = A,T,C or G
acaccaaggncnttngnnnnctcaatacaccaagttgcctacaaaaacaatgacagcacannnngcctgaaggctcacacctgcctgcaagcatatgctcaccttacggggaaacggctttatccagcatcttgagactttagagtagattaaaggagagctttgcatcttgaggcattagggtagatgaaaggagagctttgcagacaacaaaatagcctatccttaataaatcctccactctcttgaaggagactgaggggctttgtaaaacattagtttctcatttttgtgggattatttagctgggctataaagatgaaggcatggaataaacttctcaaagtatttttaattttttccgataatagagaaacttcgctaaccaactattctttcttgagtgtatagccccctcttgtggtaacttgctgcttctgcacttcatatctatattttctgttgttcactttattctgtagagcagtctgccaagaattttattcctgctgtttttttttttgctgttaaagaaaggagttaagtcaggataacagaaaagtccacataaccctagaatttttagtcaaggaataattcaagtcagcctagagacatgttgactttcctcatgtgtttccttacaactcagtaggttgtcaaggtcctgactttaaccttaataa

SEQ ID NO: 17209 - DNA, 692 bp, Macaca Fascicularis
aggaaggcacaggacggtacctaaagagaattagagaatgcacctggctggacgggggtctaatcctgcacctggctgggttggtcagtagaacctgttttcagactcaaaaaccatcttcagaaagaaaaggcccagggaaggaatgtatgagaggctctctaagataaggaagtgtattctccgtgactatgaagctcaggcctctccctttttttaaaccaaagtctggcaaccaagagcagcagctccatgacctccttgccccagatcagcccgggtcaggggacatagtgtcattgtttggaaactgcagtccacaggtgtgggtctatcccacttcctactactccccacattccccgtcagggtttcctcacgtgggcaggtgtgctagtccaagcagttcacttgagtgtccttgtcctcatgcttcaggagtgggagccacacctgaactacagagagttcaggctggatacacgtgctcacctgctgctcttgtcttcctaagagacagagagagtggggcagatggaggagaagaaagtggggaatgggtagcatagcattcaggggatatggtttatctgccaaaagggcctcaggttcttaatttagcaaactaagaagccaaattaaaaagcattgtggctaaagcctaatgctcctctcttggtcagataacaaaa

SEQ ID NO: 17210 - DNA, 764 bp, Macaca Fascicularis
  misc_feature (1)...(764): n = A,T,C or G
agagaagaaagaggagtgggatcgcaaggctgaggatgccaggagggaatatgaaaaagccatgaaagaatatgaagggggccgaggcgagtcttctaagagggacaagtcaaagaagaagaagaaagtaaaggtaaagatggaaaagaaatccacaccctctaggggctcatcatccaagtcatcctcaaggcagctaagcgagagcttcaagagcaaagagtttgtgtctagtgatgagagctcttcgggagagaacaagagcaaaaagaagaggaggaggagcgaggactctgaagaagaagaactagccagtactccccccagctcagaagactcagcgtcaggatccgatgagtagaaatggaggaaggttctctttgcgcttgccttctcacacccccagactccccacattttggtaccagtttctcctcatgaaatgtagtccctggattctgtgccatctgaacatgctctcctgctggtgtgtatgtcactagggccgtggggagacttcttaactctgttgcttcccaaggatggctgtttataatttggggagagagagggtgggaggcagggcaatgcaggatcaaaatcctcatcttactttcccgaccttaattaaggatgtagctgctgctggtcctgttcannnnnnnnnnnnnnnngtcatgtgaggccaggcctgtagctcctacctggggcctatttctacttttattttgtatttctggtctgcgaaaatgattaataaagga

SEQ ID NO: 17211 - DNA, 751 bp, Macaca Fascicularis
  misc_feature (1)...(751): n = A,T,C or G
tgccngctcagagtgcannnangtgggannnnnaggccatgaggcccatccattgcctcgtcaggccaggccagccccttcctctctaggggcttggagctcgtcacaggaaatagctcaagtttgaggcacttctgaatgcagaagagattcatgtgtgttaaagctgaaatgtcaaaaggtatcaggtttttttttataaaaacgaaaagatatgtttaaattttatttttcagcnnnnnnnnnnnnnnnnnnnnnnnnnnnnnnnnnnnnnnnnnnnnnnnnnnnnnnnnnnnnnnnnnnnnnnnnnnnnnnnnnnnnnnnnnnnnnnnnnnnnnnnnnnnnnnnnnnnnnnnnnnnnnnnnnnnnnnnnnnnnnnnnnnnnnnnnnnnnnnnnnnnnnnnnnnnnnnnnnnnnnnnnnnnnnnnnnnnnnnnnnnnnnnnnnnnnnnnnnnnnnnnnnnnnnnnnnnnnnnnnnnnnnnnnnnnnnnnnnnnnnnnnnnnnnnnnnnnnnncaaaaaaataaataaagtttatttttctataaaaagtcataacaaagtttagtatgactttttgagtaagttaatttctgccaatgtttgttaattattttattaaataaaagatgttgcactgaatccttaaagtgtaaaagtgatttgacctctgctttgagaannnnnnnnnnnnnnnnnnnngttatacttcaaagnnggggattttgaattttataaatgcttataaataa

SEQ ID NO: 17212 - DNA, 720 bp, Macaca Fascicularis
  misc_feature (1)...(720): n = A,T,C or G
gcatatgacacagctttaaccactacatgatttaatnnnnnnnnnnnnnaacaggaccaaatacacaagagcgtaatcaaatcatccgtaacttcttaattacagtttacctatttctgannnnnnnnnnnnnnnnnnnnnnnnnnnnnnnnnnnnnnnnnnnngccctctagaattaccactgagatgcactatttgatccatggataactggtaatgggaaaatgctccgaccctcaatgcagtaaatatttacttgccggcaactgggttctcatctcttgatttgcttttgtaattggcaataataaaatagcaggtggatggatgacagttgcttattctgagaaacttcactcttttcacgtatgcatcatgaggaaatactaaaatacataccaagagaaaaataccttgccatcggatcatcaacaagtcttctatttacaaacttcaaaaaacacaacaatcatgttttaaatgctttctacttgtggttcaagaagtactagatttagtaagaaactccacctatacactttgtttgaagttagtaacttcctgagatgctaaagacttacagcctgcgattatacaaggatttacacatgcttcctctggtgctttacttctaaaatctaaaaaggcaatgaaataggtataaggagagagggatttaaaccttttaaaaaacttttgctgacttatattactgtaaag

SEQ ID NO: 17213 - DNA, 741 bp, Macaca Fascicularis
  misc_feature (1)...(741): n = A,T,C or G
tgctatatatnngnngagannnncattgtttctttccttctcaaaggttgaaaaaatgtttttaatttttcacagctgagaaacagtgcagcagtatatgtgcacacagtaagtatacaaatttgagcaacagtaagtgtgcacaaattctgnnnnnnnnnnnnnnnnnnnnnnnnnnnnnnnnnnnnnnnnnnnnnnnnnnnnnnnnnnnattgtagagtatcctaaatatgttatcaagtatttagagttctgtatattaaagatatatgtgttcatgtattttctgaaattgctttcatagaaattttcccactgatagttgatttttgaggcatctaatatttacatatttgccttctgaactttgttttgacctgtatcctttatttacattgggtttttctttcatagttttggtttttcactcctgtccagtctatttatcattcaaataggaaaaattactttacagggttgttttactgtagctcataatgatactnnnnnnnnnnnnnnnnnnnnnnnnnnnnnnnnnnnnnnnnnnnnnnnnnnnnnnnnnnnnnnnnnnnnnnnnnnnnnnnttataagaaaatcaagtatataaatctaggaaagggatcttttagtttctatgttgtttagactcagagnnnnnnnnnnnnnnnnnnnnnnnnnngttgtttagttatattcggagtnnnnnnnntggtaaaaattccaatcaatcaaaagaggtca

SEQ ID NO: 17214 - DNA, 853 bp, Macaca Fascicularis
  misc_feature (1)...(853): n = A,T,C or G
acaataaggttataaggcattatcatggacatttaagtgcagtgtatggtttggatttgcacccaacaatcgatgnnnnnnnnnnnnnnngtcgagattcaactgcacggatttgggatgtgagaactaaagccagtgtacacacattatctggacatacaaatgcagttgctannnnnnnnnnnnnnnnnnnnnnaccacaaattattacaggaagccatgatactacaattcgattatgggatctggtggctggaaaaacaagagtgacgttaacaaatcacaaaaaatcagttagggctgtggttttacatccaagacattacacatttgcatctggttctccagataacataaagcagtggaaattccctgatggaagtttcattcaaaatnnnnnnnnnnnnnnngctattattaacacattgacagtannnnnnnnnnnnnnnnnnnnnnnnnnnnnnnnnnnnnnnnnnnnnnnnnnnnnnnnctggagaacnnnnnnnnnnnnnnnnnnagttcatgcagctgtnnnnnnnnnnnnnnnnnnnnnnnnnnnnnnnnnnnnnnnnnnnnnnnttgatcagtctgaaagtcgattactaacagctgaannnnnnnnnnnnnnnnnnnnnnnnnnnnnnnnnnnnnnnnnnnnnnnnnnnnnnnnnnnnnnnnnnnnngaaaccagaaattatcaagagaaagagattttaatgaatgtggaattttctttttttttttttttaaaaaaaaaaannnnnnnnnnnnnnntgatgaggatacccagtcattttgtgctctggctgggaatataaaggagaaattcacttgcttcaatcattgctgcttc

SEQ ID NO: 17215 - DNA, 272 bp, Macaca Fascicularis
gggtgtgagatcactcacggggtgctggacagaaatatgcagatgctcgatgtgcctcttggtgaagacacggggggatatgtgatcaaagcatcggaagggcgcgctttcttctccgggggatgtgcagagatatttgccaggggtcaaagagttgggaagcgtggggtctctcatctcgacgttatctccaagtgtgagaggaccacgccccgctcttcgctagaaatcaatattggaccccttttgtgaagagaggtgtctgtggggtg

SEQ ID NO: 17216 - DNA, 702 bp, Macaca Fascicularis
  misc_feature (1)...(702): n = A,T,C or G
aggatgtcagatgtaaatgtatctgccctccctataaagaaaattctgggcatatttataataagaacatatctcagaaagattgtgattgccttcatgttgtggagcctatgcctgtgcgggggcctgatgtagaagcatactgtctacgctgtgaatgcaaatannnnnnnnnnnnnnnnnnnnnnatcaaggttaccattataatttatctctccattttgggccttctacttctgtacatggtatatcttactctgnnnnnnnnnnnnnnnnnnnggcgcctttttggacactcacagttgatacagagtgatgatgatannnnnnnnnnnnnnnnnnttgcaaatgcacacgatgtgctagcccgctcccgcagtcgagccaacgtgctgaacaaggtagaatatgcccagcagcgctggaannnnnnnnnnnnnnnnnnnnnnnnnnnnntctttgaccgannnnnnnnnnnnnnctaattgggaattgaattcaaggtgactagaaagaaacaggcagacaactggaaataattgactgggttttgctgggtttcgttttaataccctgttnnnnnnnnnnnnnnnnnnnnnnnnnnnnnnnnntggaagcaaaaacatgcttgattttctttttcttgttaatgtaataatagagacatttttaaaagcacacagctcaaagtcagccaataaa

SEQ ID NO: 17217 - DNA, 862 bp, Macaca Fascicularis
  misc_feature (1)...(862): n = A,T,C or G
tataccaacaggcnggggtcttgaagatgacccttagagatgacatgattccaaaggagtccaaatttcgactgacaaccaaattctttggaaccttcctacctgaggtggccaagatgttcccaacatgaagatagagatccacgtnncagcctctgccccaccacacctgtccgtgcagcccaccggccttaccttctaccctgccgtggacgtccagacctttgccgtcctccccaactcctccctggcttccctcttcctgattggcgtgagcacgactggttccatggaggttggcgccaagtccgacaggcttgttggaaagctcaaggtggataggctggtcctggaactgaagcactcaaatattggcccgttcccggttgaattgctgcaggctgtcatgaactacattgtacccacttttgtgctgcccagggttaacgagaaactacagaaaggcttccctctcccgacgcccgccagagtccagctctacaacatggtgcttcagcctcaccagaacttcctgctgttcggtgcagatgttgtctataaatgaaggcgccaggggtaccaggggctgtcagccgcacctgttcctgatgggctgtggggcactggctgcctttccccagggaatcctctccagatcttaaccaagagccccttgcaaacttcttcgactcagattcagagatgatctaaacacgaggaaactttattcgttggaaaagtgcatggtgtgtattttagggattatgagcttctttcaagggctaaggctgcagagatatttcctccaggaatcgtgtttcgattgaaccaagaaatttccatttgtgcttcatgaaaaaaa

SEQ ID NO: 17218 - DNA, 725 bp, Macaca Fascicularis
  misc_feature (1)...(725): n = A,T,C or G
gnnnnnnnnnnnnnnnnnnnggaaaatgagaggtgagactgtgtccaggaagggtgtaaggagaggatggatnnnaatccatggattcaggatcattagggtcctgtctgggaccccggttttcctgcttacctgctccttcctccttggtcaaaggaggggctggttcattgctctgacttcggtnnnnnnnnnnnnnnntggagttcggtcacacttaggtcatcttctctctcacctttctgcttttgccaactaatggacgtgaaggagatgtgaatggggcaggnnnnnnnnnnnntggcatcaagaatttagcttctggtgcactgtgtcccagctctgatttcagttgcagccnnnnnnnnnnnnnnnatggaagctgagactctcactgacagtgaaaccctcaaatgaacacaatccctgctttcctgcccaggatccttatagggtcccccagcttccccactttttttctgtgtcctgacaaagaaacacagagtaacttgattgccctgtgacctggnnnnnnnnnnnncccctggaggcttgagcccaagccagagccttgaaaaggtattcaggttgttgctcaaaacacaaaaaaactggccctggccctgaaccaaatatcttgaaccctcataaactccataccctgacccccttgttttggacatatcgagatagaacaactctttctctcactgtctgttgtaagg

SEQ ID NO: 17219 - DNA, 639 bp, Macaca Fascicularis
  misc_feature (1)...(639): n = A,T,C or G
gaagtgccctgggcccatnnnnnnnnnnnnnnnnnnnnnnntgccacttgttggggagccgggtcccaaggaagagaatattgannnnnnnnnnnnnnnnnnnnctccctcagcgtctgcattgactcctcatgctgggacgggacccgtcaacgcccctgctcgctgctcacgtaccttcatcacttttagtgatgatgcaactttcgaggagtggttcccccaagggcggcccccnnnnnnnnnnnnnnnnnnnnnnnnnnnnnnnnnnnnnnnnncagccctataccgggaccctgttacagacataccctacgccactgctcgagccttcaagatcattcgcgaggcctacaagaagtacattactgcccatggactgccacccactgcctcagccatgggccccggccagccgccacatgagcccctccctggctctgggccccgagccttnnnnnnnnnnnnnnnnnnnnnnnnnnnnnnnnnnnnnnnnnnngaaacttctttcctgccctgattggggatattgctgttccatctcctctccctgcttctcccctttgtcacctctgatctttgccctatcttttctctatttctttctctttttcnnnntagttcttnnnnnnnnnnnng

SEQ ID NO: 17220 - DNA, 715 bp, Macaca Fascicularis
  misc_feature (1)...(715): n = A,T,C or G
cgagcccagtcagtcaccccgatggccaagaagccaaggcactgccgccctttgcatgtgacgtgtgcgataagaggtttacctgtaattccaagctagtcatccacaagagatcacacaccggagagagactctttcaatgtaatctctgtgggaagcgtttcatgcagnnnnnnnnnnnnnaatttcaccagcgaacccacaccggcgagaggccctacacgtgtgacgtctgccagaagcagttcacccagaagtcctacctgaagtgtcacaagagaagccacacaggggagaagcccttnnnnnnnnnnnnnnncaagaaggttttcacctacagggggagcctgaaggagcaccagcgcacccactctggagagaaaccctatnnnnnnnnnnnnnnnnnnnnnnnnnnnnnnnnnnnnnnnnnnnnnnnnnnnnaccagaaaacacatccagaagccacttctcattgattgcataatccggtctatgccttctgcaccaagaagaagtgaatgatgatttttcactgatgttaccagagtacatttgacacgtgcaagggcgcctggcacacagagggagtgccctagatatgaattgccatgatgttttgagtaaatatgtatcctccccactgagctttgttttctgtttcattatgtccattgttttcctataggtttattttggtttctgttgctgttcttca

SEQ ID NO: 17221 - DNA, 1074 bp, Macaca Fascicularis
  misc_feature (1)...(1074): n = A,T,C or G
gcagcatccacnnnttttgtctagtgtcgaaggtggtgggcagatgccgggcctccatgcctaggtggtggtacaatgtcactgacggatcctgccagctgtttgtgtatgggggctgtgatggaaacagcaataattacatgagcaaggaggagtgcctcaagaaatgtgccgctgttacagagaatgccacaggtgacctggccaccagcaggaatgcagcaggttcctctgtcccaagtgttcccagnnnnnnnnnnnnnnnnnnnnnnnnnnnnnatannnnnnnnnnnnnnnnnnnnnnnnnnnnnnnnnnnnnnnnnnnaccttgccgtgcgtccttcccacgctggtactttgacgtggagaggaactcctgcaataacttcatctatggaggctgccggggcaataagaacagctaccgctctgaggaggnnngcatgctccgctgcttccgccagcaggagaatccttccctgccccttggctnnnnnnnnnnnnnnnnnnnggggctgttcgtgatggtgttgatcctcttcctgggagcctccatggtctacctgatccgggtggcacggaggaaccaggagcgtgccctgcgcactgtctggagctccggagacgacaaggagcagctggtgaagaacacatatgtcctgtgaccgccctgtcaccaagaggactggggaaggaaggggagactatgtgcgtgctttttttaaatagagcgattgacttggatttgtgcgatcattagggctgaggtctgtttctctgggaggtaggacggctgctttctggtctggcggggtggatttgcttcggaaattctctaggaggctcctccttgcatggccggtggtctggcagcagccccgagttgtttcctcgctgatagatttcttccctccaggtagagttttctttgcttatattgaattccattgcctgttttctcatcacaaaagtgatgttagaaccatttcttttgtttgtctgatttatgggttttttaagtataaacgaatgttttttattagcattctgaaagaaggaaagtaaaatgtacaa

SEQ ID NO: 17222 - DNA, 754 bp, Macaca Fascicularis
  misc_feature (1)...(754): n = A,T,C or G
aggaatcacagctctcaatagcatagagggtgtttataggaaagcggttgtattacaagctcagaaccaaatgtcagaggcacataagcttttacaaaaattgttggttcatnnnnagaaactgaagaacacagaaatggtgatcagtgtcctactgtccgtggcagagctgtannnnnnnnnntcctcccctaccatcgcgctgcccatgctcctgcaggccttggccctnnnnnnnnnnnnnnnnnnnnnnnnnnnnnnnnnnnnnnnnnnnnnnnnnnnnnnnnnnnnnnnnntcattcttggaatcccagaacaggccttaagtcttctccacatggnnnnnnnnnnnnnnnnngctgacggggctatcctggacaaaggtcgtgccatgttcttagtggccaagtgccaggtggcttcagcagcttcctacgatcagccgaagaaagcagaagctctggaggccgccattgagaacctcaatgaagccaagaactattttgcaaaggttgactgcaaagagcgaatcagggacgtcgtttacttccaggccagactctaccacaccctggggaagactcaggagaggaaccggtgtgcgatgctcttccggcagctgcatcaggagctgccctctcacggcgtacccttgataaaccatctctagagaggacatccctgctgggctgctgtgcagagtataagattttggactcgttcgtgtcccctctctccttataaatgnnngtat

SEQ ID NO: 17223 - DNA, 1054 bp, Macaca Fascicularis
  misc_feature (1)...(1054): n = A,T,C or G
ctgtaaaacagatatatgtatgtgcaattcagttaagatatagcagtaacttatgggcanaagctggccctctacttacaacatgcttnctctgttgaagccttacctcttcttccaacccgaaaataatacactgatagctggttagtaacctcagtaagaattaaaactgaggtcgtttactcattttgccttttaagtcttttatccccctttggggaaagtttccccttaggaaaaaaggtgtcaaacaaccctgatttttttttttttttgcatcatttttattacaccaaataaaagttgggagttccaggatcccattccagttcatatttaaccaagatctaaaatttaattttttaaaatctttgaatcttccctcctgcccctcatggatccttggttttaattatcatggaaacatctaattcttacagttattccgtagcttttgctgattgctctgaaatttcagttaagacttgtttcaaaagacagatagctgactggttcataatacattggaatagttggatccaaactaataagagtaagctgtacaggaactagtgctcaatatacattgtataaatttgtggaaatttcttggatgtgaattgttacttcaagtggcttacattaagattttctcagacttacttggaggttaaagcaaacccaaatgtgtattattttgttacagagctctgctttataattttgtaataaagttgtaatacagacacctgtcttgtctggtgtgaggatgttagaggttgatagcactgacaaaagagcctgacagtggttcacgctataatttcaacacttgaggaagccaaggtgggaagactgcttggagtttgnnnnnnnnnnnnnnnnnnnnnnnnnnnntcgtgtctacttaaaaaaacagaaaagccaaaaaaacaaaaaattagccatgcatggtggtgcatgtgggtagtcccaactannnnnnnnnnnnnnnngggaggatcacttgagccannnnnnnnnnnnnnnngtgagctnnnnnnnnnnccacact

SEQ ID NO: 17224 - DNA, 649 bp, Macaca Fascicularis
  misc_feature (1)...(649): n = A,T,C or G
tggagtgtgctgcgtgtcccaggcccgaccagcnnncagccagccacctacacgtgtgtggtcagccacgaggactccaggactctgctcnnnnnnnnnnnnnnnnnnnnnnnnnnctcacaagtctcccnnnnnnnnnnnnnggcccagacggtgcagtggttagagctaaggcttatcccgnnnnnnnnnggcgccttggtccaaggaagcccctgtgcttttcttgcctcgatttcccctcttgtctgctgagccagcaggggccacgtcctgggctgctgtgaggaggaagtgagttggtgctaggaggggctcctgtatgtgcgtgggcaggcggggtgcaggtatctgagcaccccggcctcnnnnnnnnnnnnnnnnnnaggagctctctgacccacccagaccacacatggtgtgttccacgtgtctcacgttatctgtggcagagaatccagcttctttctannnnnnnnnnnnnnnnnnnnnnnnnnnnnttgtaaaatgcagtaagaaatactagaaaaatgatatgaacagaaagacacgccaattttttgttattagatttaacagaccgtggccccgtgaaatgatccctggaacagatccgtccacacccgccactcagcagccctggctgagc

SEQ ID NO: 17225 - DNA, 733 bp, Macaca Fascicularis
  misc_feature (1)...(733): n = A,T,C or G
actgcttcatgtaganggnnngctgcctacactagtcnngnnnngctgaaccatcaattagcagtnnnngccatacttttatttaaattaatatgtggagataccagaggccaagccacagagaggataatagtttttcccagcaaaggtgatattaatcagactaatttcaaactaaagaagttactacctaaagacagaattcaggggaagcaagactcatttagaacaaatgaaatttctccagtcctacatttctgaattaacctctagcacatcaaaaatatttcagtcattatcagtctcnnnnnnnnnnnnnnnnnnnnnnnnnngcagtgttctttcacactgttttaattttcttgggaaatcaagtccaatggatgttaattaagtgggttgcccatcctctttatgacggcattaagagagcactgtgctgtcaagtgcctggcctgggaaagaacgggaagaaacaattgcattttatccaaaggtacactataaaaatacagtttttaccaaaaaaaaaaagatgtttgttctcatctcagttggcctcatttgggcaagtgacccacaggtcttttggcgagttcgctatttgcctnnnnnnnnnnnnnnnnnnnnnnnnnnnnnnnnnnnnnnnnnnnnnnnnnnnnncacgactaaaattctaagcctgaaacctgaaaaaagagatataacaaggnnnnnnnnnnnnnnnnnatat

SEQ ID NO: 17226 - DNA, 758 bp, Macaca Fascicularis
  misc_feature (1)...(758): n = A,T,C or G
catatttaataggannngcgagtnnnntttccccatatggttgccttnnaataaagattgtaataggcagaggacataatttgcctctcagatagatagctaaacaaaattaatttatttttctgagtnnnnnnnnnnnnnnnnnnnnnnnnnnnnnnnnnnnnnctaaaacctttggagctggcaccccagaatcaacacattcaaatttctagtgcaaaataatgaatcttcactaattgaaaaccaaaatgagcctcttgtcagttttggtcagtttttgctgctacacatgaagcaagcttagtaaaaaatgagtatttcaagggattgnnnnnnnnnnntatttcagtggagaggagaaacattagctttggtnnnnnnnnnnnnnnnnnnggagttctnnnnnnnnnnnnnnnttgagaacgggcacgctgtcagccttgttttgttttgcagtgccggtgggggtgtgcacatcgaaccccggtatagacagttccccnnnnnnnnnnnnnnnnnnnnnnnnnnnnnnnngttatacagtggattcatgtggttctggatcctctggcgcnnnnnnnnnnnnnnnnnnnnnnnnnnnnnnnnnnnnnnnnntcctgatccnnnnnnnnnnnnnnnnnnnnaactaggtatccctcctgataatgaagactgaagatacagactcagactcgctctgtacaagagccaggtgagaatttcgaggattatcgacttcatatttaaagttacaa

SEQ ID NO: 17227 - DNA, 625 bp, Macaca Fascicularis
  misc_feature (1)...(625): n = A,T,C or G
gctggtggggtgggctggacactcacctcacnnctgctgggtgccctagtgcagggcgcagtttgccccaccagaagctgtggccctgggcatgatgggctgggaagttccagggcaggggtccctataaacctggcctgntccggcccctgcaggtcctgggccccaaacctgcnctgaaggagggcaaccctgaggaagacctcacagctgacaaggcaaacgcccaggccgcagctctgtataaggtctctgatgccactggacagatgaacctgaccaaggtggccgactccagcccctttgcccttgaactgctgatatctgatgactgcttcgtgctggacaacgggctttgtggcaagatctatatctggaaggggcgaaaagcgaatgagaaggagcggcaggcggccctgcaagtggccgagggcttcatctcgcgcatgcagtacgccctgaacacccaggtggagattctgccccagggccgtgagagtcccatcttcaagcaatttttcaaggactggaaatgagggtgggcgtcttcctgccccatgcttctctgccccccaccgcctgcctacttgcttctctggctgcctggtcagtgcagaggtgcccc

SEQ ID NO: 17228 - DNA, 777 bp, Macaca Fascicularis
gtcacggaccagagcctgatcgtgaacttctcgagctgcaggcccacgtgcagggcgaagcggctgcgcggtaccactttgaggatgttggtggcgtgcagggggctagggctgtccacgtggagtctgttcagcctctcagtttggagaacctggccctgaggggctgctgtcaagaagcctgggtcctctctggcaagcagcagatagctaaggaaaaccagcaggtagcaaaggatgtgacacttcatcaggccttgctgaggctgccccagtaccagactgatctcttgctcaccttcaatcagcccccgtaaggaggaaggaacgggcgggtatctcatgactgggttcccaggagaatcgggctgggagggacagaacagggagactcactggtgggatcctcccaggaagcaggagtgggccagaggtttggggtaactgatacccaggtcctctggaaccagaattggcaatttccaaacctcaggcctggatgatgttctctctccatctgtttccccaccccaagccctgacaacaggtcatctcttggccctgaaaatctgtcacctccaccctggagcctgggtgactttgaacagctggtgaccagtctgacccttcatgatcccaacatctttggtccccagtgaaggtgctgaagcactgcatgatgttgctgagaacttggggactcggttctgtgagggggaaaagaggttgaaaagagcagtttcctctcatttcttccctgtgcataaacataagaca

SEQ ID NO: 17229 - DNA, 533 bp, Macaca Fascicularis
tatcaaatcaatagttaggtctagatctagcaataatgacgatgaggacatgacaccggagcagaaggcggagcgtgagaaggagcggagaatggccaacaacgcccgagagcgcgtgcgggtccgtgacatcaacgaggctttcaaagagctcggccgcatggtgcagctccacctcaagagtgacaagccccagaccaagctcttgatcctccaccaggcggtggcggtcatcctcagtctggagcagcaagtccgagaaaggaatctgaatccgaaagctgcatgtctgaaaagaagggaggaagagaaggtgtcctcagagcctcccccactctccttggccggcccacaccctggaatgggagatgcatcgaatcacatgggacagatgtaaaagggtccaagttgccacattgcttcattaaaacaagagaccacttccttaacagctgtattatcttaaacccacataaacacttctccttaacccccttttttgtaatataagacaagtctgagtagttatgaat

SEQ ID NO: 17230 - DNA, 734 bp, Macaca Fascicularis
  misc_feature (1)...(734): n = A,T,C or G
ccatggtggctctcancnnagggacctaggaacagcctgtcaccacataattactttnnnnnnnnnnnnnnnnnnnnnnnnnnnnnnnnnnnaatacttccagaacagccaaatgggaaggaccttggttgggactctttccagttcacttggggcagaaagaatttatggctcatatagctgaaaaggatgggctagattgggcttcaggctgcatcccaggannnnnnnnnnnnnnnnnnnnnnnnnnctctcagctctgctttcatttgagttggctttattctcgggnnnnnnnnnnnnnnnnnnnnnnnnnnnnnnnnnnnngataaaaagagctcccctttgctgacagaactgctggatttggttctnnnnnnnnnnnnnnnnnnnnnnnnnnnnnnnnnagtcatcattgtagccaggaagatggaatacaccaaatggacaggcctggcatgtacccacagagactgaaagttggtgctggtggttgtggcagatgatattacctgaagaagggacgaatgggtactgggnnnnnnnnnnnnnnnnnnnnccagttcaggcctctcttctttccctggtgtcttcattttcctccctctccctgctgtcccttaaccctctgcccagtctctcattactcctggtnnnnnnnnnnnnnnnnnnnnnatactccactgggggtacctgagcctggattagagggcagggggagaacactgcctagc

SEQ ID NO: 17231 - DNA, 644 bp, Macaca Fascicularis
  misc_feature (1)...(644): n = A,T,C or G
ggacggattcaagtaccntnnnntacacagcggtcagatagcatcagacctgcattgaacagtcccgtggaaaggccaagcagtgaccaggaagagggagaaacttctgctcagaccgagcgtgtgccactggacctcagtcctcgcctggaggagacgctggactttggcgaggtggaagtggagcccagtgaggtggaagactttgaggctcgtgggagccgcttctccaagtctgctgatgagagacagcgcatgctggtgcagcgtaaggacgagctcctccagcaagctcgcaaacgtttcttgaacaaaagttctgaagatgatgcggcctcagagagcttccttccctcggaaggtgcgtcctctgacccggtgaccctgcgtcgaaggatgctggctgccgccgcggaacggaggcttcagaagcagcagacctcctagcgctcccttgccttcctcagctgcctcctgcgccctgtgcccaaccgaccggaggaggcctgtcccagttctgcccgctgtgtggagaagcgggcttgactgcattgccgctgtataaagcatgtggtcttatagtgtttggnnnnnnnnnnnnnnnaatccttctttgtaatactttctatgtgacatttctcttc

SEQ ID NO: 17232 - DNA, 879 bp, Macaca Fascicularis
gaagaaaaggttcatgttgcttggtccttgatttatcacacaaagcagaatagtatttttatatttaaatgtaaagacaaaaaattatatgtatggttttgtggattatgtgtgttttgctaaaggaaaaaaccatccaggtcacggggcaccagatttgtgacgaatagtccggattagaaaccaagcatctccttttgagtagggagtgagggaggtggtgcttagaaagatggtgctctggggttaggtcctcgtgaccacttctgggtttctgccctgcccaccctctggagaaggtgggcactggattagttaacacgtttctagcagtcacttgatctctgtggctttggtttaaaagacagacacttgtccacatgggtttagagataagagttggctggtcaacttgagcatgttactgacagagggggtattggggttattttctggtgggaacagcatgtcactaaagcaggccttttgatattaaattttttaaaaagcaaaattatagaagtttagattttaatcaaatttatagggtttctaggtaatttttacagaattgcttgtttgcttcagctgtctcctacctctgctcttggaggagatggggacagggctggagtcaaaacacttgtaattttgtatcctgatgtctttgttaagactgctgaggaattattttttttcttttataataagaaataaaccccacctttattccttcatttcatctaccgttttctggttcttatgttggctgtggcaggccagctatggttttctcttgtcatgacaacttctaattggcatgtacagtatgttcaaagtcaaataactcctcattgtaaacaaactgtgtaactgccc

SEQ ID NO: 17233 - DNA, 652 bp, Macaca Fascicularis
  misc_feature (1)...(652): n = A,T,C or G
ctgataagatataatgcaaaaaaaaggagaaatgtttgccttatatatattccctttatttccatttaccttgtgtttttccttggacttaaacagagaaaataatgcttatttatctgaagaaaaggtcagatctattggaaatgacagcctgatactagagcctcctctttaaaaggtnnnnnnnnnnnnnnntttgtgtaaataaagcatttttaaaaactcttagttaaaacacttannnnnnnnnnnnnnnnnnnnnnaaattcatcttttggttgaatcttcactatgctatttggcacctaaaaatattctccaaacccttnnnnnnnnnnnnnnnnnnnnnnnnnnnnnnnnnnntcgaaataaaatccattgtgattcatttatgagttatcttacatatcacaaaggccaattagaatttgtccttattcttgatgaaaagtttgtttttaatcataannnnnnnnnnnnnnnnnnnnnnnnnnnnnnnnnngcagagctaacaccaccttcagacaggcacaccatgcataactcttgggaagttgagctttgctaaataaaagatattttggctgatcagagatgttcaagctttctgtgtattggaacagaaagtaacnnngaggaatgagccaggaga

SEQ ID NO: 17234 - DNA, 1339 bp, Macaca Fascicularis
  misc_feature (1)...(1339): n = A,T,C or G
ctgnnnnnnnnnntgccagggcaataaacaacaaacagttatttggcagagtgataaaagcaagcattgctattcacaatggaagagcagctgagttcatccgaaggcgaaactactttgataaatctaagtgttatgaatgtggggaaagtggacacttaagttacgcctgtccgaaaaatatgcttggagaacgtgagcctccaaagaagaaagaaaaaaagaaaaaaaagaaagctcctgaaccagaagaagaaattgaggaagtagaagaaagtgaagatgaaggggaggatcctgctcttgacagcctcagtcaggccatagcattccagcaagccaaaattgaagaagaacaaaaaaaatggaaacccagttcaggaggcccctcaacatcagatgattcaagacgcccgaggataaagaaaagcacatatttcagtgatgaggaagaacttagtgattaaaatcttgccctagcacagtaataaaaatcaagatttgttaacaacaatcttgaagagctaattttaataaaaataagaaaagttagtactatcatgtttaatactatnnnnnnnnnnnnnnnaaaaaagatattttaaaaatttatttgaaaagttcattataagggctttattcatgcctgatttgtttacatgaggacttctgaaattaatccttaaaactgaaacttcctgaagaccgaaaagttgaatgatttattgttacttatgttaataaacttttcannnnnnnnnnnnnnnnnnnnnnnnnnnnnnnnnnnnnnnntttcttgtagctttatcccaatctggataaattgtaaatacctataaaataaattgtatatgcctataaaatataaagttatatagctctaaaaggcttaaaatcaaacacaggtgttacttgtctgccctacccatagcaccaaattccattccctagaagaaactactcatatgtgcacacgtgttgttaaataaaatacatatatttctgtcaataaaaaaataaaggagaattattcaatctcttatacttctaccttcctcaatcttcccaatgtggctgtgttaaaaattagggggaaatccatacatatattttttaatgaccatgtaaatagttttcacttctgagccaaggagtatgctatgattacatttttcctagagttaatagttgtctatttttttccatgtatcgtctttgtatttatgactaaatcttcccattctgtctgcaggtggttatatgggagtgggattagcctttaattttctactttgtatatttctatattgtttaactttgtaagaatatccattaatta

SEQ ID NO: 17235 - DNA, 746 bp, Macaca Fascicularis
  misc_feature (1)...(746): n = A,T,C or G
caaccaggttctttggagnnnntatgtacagattcagaataagtcccacagtgccagcaagaccaggagatttttnnnnnnnnnnnnnnnnnnnnnnnnnnnnttggagccttggttgtttgcaattgaagctgagaaactgaggaagagactggtggannnnnnnnnnnnnnnngacggtagagagatccacgccacaattcctgagaccggcttaacgcatcggatccaagccctnnnnnnnnnnnnnnnnnnnagcgacagtggcagccagtgccccttgctgtggaggatgtatttgaactttctggtttccttaggaaataaagaaagaagcaaaggtgtattctacaaagcgcttcagaactgcccttgggcaaaggtgttatacctggacgccgtggagtacttccccgacgagacgcaggagatccnnnnnnngatgactgagaaggagctccgggtgcgcctgnnnnnnnnnnnnnnnnnnnnnnnnnnnnnnnnnnnnnnnnnnnnnnnnncaagttgcccacccnnnnnnnnnnnnnnnnnnnnnnnnnnnnnnnnngtgttgggagacctcagctttcgagaaatgttctttctcgatagtaataatgtgggctgtcagcctcttcacatcttgcacactttttgggtgtgtaaatgacacaaaagctatttacatattatatatgtgaatatgtgtatatttgtatatagccagaagagtcatgccaaggggt

SEQ ID NO: 17236 - DNA, 724 bp, Macaca Fascicularis
  misc_feature (1)...(724): n = A,T,C or G
aggacaacgnnnnnnnnnnnnnnnnnnnnngagcctgtgggggctgnnnnnnnnnnnnnnnnncgacctgacctccaaccagctcacgcacctgcnnnnnnnnnnnnnnnnnnnnctgggcaagctggagtacctgctgctctcccacaaccnnnnnnnnnnnnnnnnnnnnnnnnnnnnnnnnnnnnnnnnnnnnnccttctggctggacgtctcgcacaaccgcctggaggcgttgcccggcagcctcttggcaccgctggggcggctgcgttacctcaacctcaggaacaactcactgcggaccttcacgccgcagccccctggcctggagcgcctgtggctggagggcaacccctgggactgcagctgccccctcaaggcgctnnnnnnnnnnnncctgcagaaccccagtgccgtgccccgcttcgtccaggccatctgtgagggggacgactgccaaccccccgtgtacacctacaacaannnnnnnnnnnnnnnnnnnnnnnnnnnnnnnnnnntcgacctgcgggacctcggcgaggcccacttcgctccctgctgaccagggccccggactcgggcccccgcctggctcaccctgtgctggggacaggtccnnnnnnnnntcaggggcctggcaggcatgcggccccannnnnnnnnnnnnnnnnnnnacacaagggcctgactggggtggaaggcagggcggcccccagctgtc

SEQ ID NO: 17237 - DNA, 757 bp, Macaca Fascicularis
  misc_feature (1)...(757): n = A,T,C or G
actgcaaggattntgctcagtctcttcctctctgctctttcactacagcttaatcaggattgtcaaataggttgtttcccatatattccacacatcaattctaacctattagtaatgactatctagagaatgaaggaaaagtttctgaagccaaaatgtgtgaggaggagaaggggtatggtggcctgtatgccaggcatttgctattcttaatctacattgtactctcctgacaagttgaattccatactgacaaatcttccctatttgcataaaaccatagaaatgtcagtcttcatattgcttattattttaccagtaattctcaaattattttacctgtaattctcaaattcatgatgaccaactctaccagaatcacctacaacactttgcaaaaatacagttctctaagctctatcccagacctactgaatcaatctcagtgatatggtttggatctgtgtccccgcccaaacctcatgttgaattgtaatccccagtgttggagtagggcctggtaggaggtgactggattacaggggcagatttccccctccaatgctgttcacgtgatagagttctcacgagatctgattgtttaaaagtgtgtggcacctccccactctctctcttgctccttctctggccatttgaagtgctgatcccgctttgccttccaccgtgactgtaacttttcctgaggcctccgagaagccaagcagatgtcagcattatgcttcctgtatagcctgca

SEQ ID NO: 17238 - DNA, 452 bp, Macaca Fascicularis
  misc_feature (1)...(452): n = A,T,C or G
acatttcattctcaaaaaaaaaaaaaaaaaaaaattctcttcttcctgttattggtagttctgaacgttagatattttttttccatggggtcaaaaggtacctaagtatatgattgcgagtggaaaaataggggacagaaatcaggtattggcagtttttccattttcatttgtgtgtgaatttttaatataaatgcagaggcgtaaagcattaatgcaagttaaaatgtttcagnnnnnnnnnnnnnnnnnnnnnnntttataataattataaannnnnnnnnnaaatttttctggacaatgccagcatttggatttttttaaaacaagtaaannnnnnnnnnnnnnnnnntaaatggtgtttgtagcatttttatcatacagtagattccatccattcactatacttttctaactgagttgtcctacatgcaagtacatgtttttaatgt

SEQ ID NO: 17239 - DNA, 729 bp, Macaca Fascicularis
  misc_feature (1)...(729): n = A,T,C or G
cacnnnnnnnnnnnngnnnnntgtgnnaaagcaggtatggcggggcgccctgnnnnnnnnnnnnnnnnnnnnnnnnnnnnnnnnnnncttccgaggatgcacggcgctggagctcggggccggnnnnnnnnnngctagcatcatcgcagccactgcggcacggaccgnnnnnnnnnnnnnnnnnnnnnnnnnnnnnnnnnnnnnnnnnnnnngaaacattgccctcaacagccacctggctgccgctggaggtggtgtagttaaggtcaaagaactggnnnnnnnnnnnnnnnnnctctgcannnnnnnnnnnnnncccttcagttggtcacaagaggaaatttctgacttgtacaatcacaccaccatcctgtttgcagccgaagtgtnnnnnnnnnnnnncttgacggatgctgtatttaaaaccctctcccgactcgcccacagattgaaaaatgcctgcacgnnnnnnnnnnnnnnnnnnnnnaggctcaacttcacactgagacacttggacgtcacatgtgaagcctacgatcacttccgctcctgcctgcgtgcgctggagcannnnnnnnnnnnnaagctgcgcttcgtggtggagcccgtggaggcctccttcccgcagctcctggnnnnnnnnnnnatccagcagctggagctnnnnnnnnnnnnnnnagaaccagtaacatgacccatcgcctccacaaggcgcggcgtcncgactgt

SEQ ID NO: 17240 - DNA, 147 bp, Macaca Fascicularis
ttttttttttggtaaaactctcctgcagcggcttctattgaacctccgtggaaaaaggaaaccacaaccgtttaaataatacaagaaaaccaaaccggatgtacattggcaaaagtgaaaacagaaaggtgagggggctacaggact

SEQ ID NO: 17241 - DNA, 697 bp, Macaca Fascicularis
  misc_feature (1)...(697): n = A,T,C or G
attactgttgnnnnnnnnnnnnnnnnnnnnnnnnnnnnnnnnnnnnnnnnnnnnnnnnnnnnnnnnnnnntgggtacagactcattcacatacaggacaagcccctcaccacagttaacacacgattcatacacaccacagtccacaccagggctcgcgaagcaaaactaatcacaaatgaaggactggtcttgacgacgtaaacaagagtgcacacttgaggccgtgagcaggccttacaatgcatgtgtctgtgcagttttggcagaagcgggggagtnnnnnnnngtggcaccaagggtcccccaggaggctgnnnnnnnnnnnnnnnngccacacactcctgaggccaaaccagagccacttctgaggtcaaggccacaccctgaaagctccacagaatcggaggcccaggccagctgtgccccacaaggggaagggggatatcctcactgtgggcctgtttctcgtgggcggagtcagggcttcccacagggctggctccatttttggtcagactcctcgnnnnnnnnnnnnnnnnnntgaatccttgggcacgtggaggcagctttgtcttttgactgggtgcaccccagcctggcccagacgcaggaccctccaccgagctgtctgggggacgtgggagcaggggcactgcagnnnnnnnnnnnnnnnnnnnnnnnnnnngataggactg

SEQ ID NO: 17242 - DNA, 653 bp, Macaca Fascicularis
  misc_feature (1)...(653): n = A,T,C or G
tccccacaatgacattatgacaccagttgatcctggggtagctcaacccaacagccnnnnnnnnnnnnnnnnnnnnnnnnnnngccctaattcggtcatgtcaaccnnnnnnnnnnnngcatctcataacaaaatgatgaatcccagctcnnnnnnnnnnnnnnnnnnnnnnnnnnnnnnnnnnnnnnnnnnnnnnngtgccctgtcccacacgnnnnnnnnnnnnncccacacctcgggaatgaaccgcctgacccaagtgaagacacctgtacaagtgcctgtgccccaccccatgcagatgagtgccnnnnnnnnnnnnnnnnnnnnnnnnnnnnnnaatggctatggcagaatgggccttctccaccaggagaagctcccaagtgacttggatggcatgttcattgagcgattagactgtgacatggaatccatcattctggaatgacctcatggatggagatacattggattttaactttgacaatgtgttgcccaaccaaagcttcccgcacagtgtcaagacgacgacacataactgggtgtcaggctgaggattagtgagcaggttacacttaaaagtacttcagattgtctgacagcaggaactgagagaagcagtccaaagatgtccttcaccaactcccttt

SEQ ID NO: 17243 - DNA, 925 bp, Macaca Fascicularis
  misc_feature (1)...(925): n = A,T,C or G
ctacaaacagccaagaagtatgggaccaagaataagagagctgccctacaggctttgcggaggaagaaaagattcgaacagcagctggcacaaactgacgggactttatccnnnnnnnnnnnnnnnnnnnnnnnnnnnnnnnnnnnnnnnnnnnnnnnnnnnnnnnnnngtaccatggagcttgctgcccaaggcatgaagaaagcnnnnnnngacatggacattgacaaggtagatgaactgatgactgacatcacagaacaacaggaggtggcccagcagatctcannnnnnnnnnnnnnnnnnnnnnnnnnnnnnnnnnnnnnnnnnnaggatgaactgctggaggagctagagttgctggaacaggaggaattggcccaggagttgttaagtgtgggcgacaaggaggaagaacccccagtcaaattgnnnnnnnnnnnnnnnnnnnnnnnnnnnnnnnnnncagctcccaaagcggatgaagatgaagaagcactaaagcagttggctgagtgggtatcctgataaatctgggcttgtcttcctaatgctacctttgttggtccttttttccttaagtgccaaatgctgagctaaaggagaataactttttggggaagtcctgctgagggtggtagtatgaccctgcctgaaaaaagggtctcttgccctcccagccctggctcaactctgaagaagatcttgctacagaaggagcccgtgggctcccttctctttgatagcagttataatgcccttgttcccaataaaactgggcagatggaatcctagtgtctatactgccttgtctacccctgaagctgttcccctggcccttgnnnnnnnnncnnnnnnnnnnnnnnntcaagcaatgaataattacagcaaagaagggaggnnnaacannaacaaatgggcatcc

SEQ ID NO: 17244 - DNA, 700 bp, Macaca Fascicularis
  misc_feature (1)...(700): n = A,T,C or G
attatgatccagagacaggcgtgntcacagcgccactggccggannnnnnnnnnnnnnnnnnnnnnnnnnnnnnnnnnnncacgagnnnnnnnnnnnnnnnnnnnnnngctccaaccagggcgtggcccgcgtagactccggcggctacgagcccgagggcctggagaataagccggtggccgagagccagcccagcccgggcaccctgggcgtcttcagcctcatcctgccgctgcaggccggggacacggtctgcgtcgacttggtcatggggcagctggcgcactcggaggagccgctcaccatnntcagcggggccctgctatatggggacccagagcttgaacacgcgtagactggggtcccgcccgacgtgtctacgccggctgaagagacagcgggggcggcaggctcccggggtcccgcctgggacgcagcacccagccctgggcgagcgccgcacccgggcccgcagcggcaccgcgcccagaggggcctctccccaggcccggggcgcgccggctcagggaggcccggggccgcccatggagacttttggcctggcgcgatacccccggaacccctccagggccggcctgcggaagagccgatcctcgcaccctccgctccctccactggccctccaggcagagtccctggggctccaggctcccccgcgcgggcgccgcccaccgccgt

SEQ ID NO: 17245 - DNA, 760 bp, Macaca Fascicularis
  misc_feature (1)...(760): n = A,T,C or G
tggctgacaaggagctnnngccctccgtccggcaggnnnnnnnnnnnnnnnnnnnnnggnagggnnnnnnnnnnnnnnnnnnnnnnnnggtgagcaatctggaggagcnnnnnnnnnnnnnnnatcgagagtacatcaaagtgcagacggacaaaggcacagaggtggccaccaacctggtgattctctgcaccggcatcaagatcaacaactccgcctaccgcaacgcgtttgagagcagactgnnnnnnnnnnnnnnnnnnnnnnnnnnnnnnnnnnnnnnnnnnnnnnnnnnnnnnnnnnnnnnnnnnnnnnnnnnnnnnnnnnnnnnnnnnnnnnnnnnnnnnnnnnnnnnnnnnnnnnnnnnnnnnnnnnnnnnnnnnnnnnnnnnnnnnnnnnnnnnnnnnnnnnnnnnnnnnnnngcctacaagccaggtnnnnnnncgttcctccnnnnnnnnnnnnnnnnnnnnnnnnngggccaaatcagtggcttttatgtgggccggctcatggttcggctgaccaagagccggnnnnnnnnnnnnnnnnnnnnnnnnnnnnnnnnnnnnnngtctccaccctgatggaaaggccgggcgggagatgagctaccgcagcaggtgggcgtacggactgcttggcgcatggcacccnnnnnnnnnnnnnnnnnnnnnnnnnnnnnnnnnnnnnnnnagatgccaatgatgtggtggccagaaatgcaacttgtataaaacaaaaatgggagagagagagg

SEQ ID NO: 17246 - DNA, 752 bp, Macaca Fascicularis
  misc_feature (1)...(752): n = A,T,C or G
aggaagtgagaatgggnngctggnnnnngtggaagcccctctggctgtgtggctatggactcacgcagagcactgtcggcacgcggactnnccttnnnnnnnnnnnnnnnnnnnnnnngcgtctgaaaccatttggtgtccagagatttctatacacagggcgccagcccaggcctgaggaagcagcggaattcnnnnnnnnnnnnnnnnnnnnnnnnnnnnnnnnnnnnnnnnnnnnnnnnnnnnnnnnnnnnnnnnnnnnnnnncctgcaaccaagggactctgcaacaaggacttcttccagaagatgaaggaaacagctgtgttcgtcaacatcagcaggggcgacgttgtaaaccaggacgacctgtaccaggccttggccagtggtcagatcgcagctgctggactggatgtgacgaccccagaaccactgcctacaaaccaccctctcctgnnnnnnnnnnnnnnnnnnnnnctgccccacattggcagtgccacccacagaactcgcaannnnnnnnnnnnnnnnnnnnntaacaacctgttggctggcctgagaggggagccnnnnnnnnnnnnnnnnnnnnnnnnnnnnnnnagtagagatggagggccgggaggcnnnnnnnnnccaggcttgatttggatccacaggcagagccaagggaaagtcttattctctgaggaaagagtgattctgatagatgtacttgtcacattggtggctggacacacttgagccaaaagt

SEQ ID NO: 17247 - DNA, 580 bp, Macaca Fascicularis
acttccccatagacagattggtgcgcgacaggggctgcttgggccgcaggcttggggagggtggaaaggtcccacctgttgctgcctgggcccggaagtgggcctggccctgttcccttagaagcattggaggccagggcccaagccggtgctggagtcacacccaactgcggagggagaacccacctgtctcccaccctcagctctgggtctctggggccagggctcaggcccccaactctcctccttgcccctgcaccctcggacttggcctagccagaagggatgggggcaagaggaaagcagccaggggctccagcccatgccctcacagatttgcctctcgagtgggggagcgaagggctggggaagacactggggaccaggccagcagtgcctctgcagtttcctccagggagcaccaaggttaggcgcggcttcaccgcggggctggatcgtggccagcttggcccctgggtctgaagacctctgggcggcccaggccaaccttgccctgccgccgcacactcggctgccctctcatacccaggcttggggacttccaggtcccgatcccctc

SEQ ID NO: 17248 - DNA, 574 bp, Macaca Fascicularis
  misc_feature (1)...(574): n = A,T,C or G
aaaaaaaaaatgggcacctagccaaggtattgcatcaatacattgctcacagtagttagtaataaatgcttacagtatccctgaaagcttccctgaaacaacccattgtggccatccagaatcagccaaaattctatttggacttgggcttcctagatgtgtttgagacctattgtattaattctaggcataccaaatatattttgatcatatctctttaatactcttcccatcttaacaaaactgtaagataaagacaagatcttttattttacttcagtggcctccactctttctcctcagcannnnnnnnnnnnnnnnnnnnnnnntcgaacaacttcagtgctgatcaggtaaccagagccttggagaacgtgataagtggtaaagcctgaagcctccaatgaggattaagagcaacagccccagagcatgggctctgctggatcttagtataatgtgaaaaaaaatgtgttcccnntattcnnncataaannnnnngtnnnnnnaatactttctcagggtgttcttgtcctcatctaccctctaccccttactgtgtaaccaatgaggc

SEQ ID NO: 17249 - DNA, 195 bp, Macaca Fascicularis
gacccgcgggatcaacctgagaaaaattgccgagctcatcccatgagcatcaggggtagcagtgaagggcccgtgcaccgaagctggcaagtatgcccttcgagaacggcgagttcatgtcactcaggaggattttcagatggcagtagccaaggtcatgcagaaggacagtgagaaatacatgtctcatctccc

SEQ ID NO: 17250 - DNA, 530 bp, Macaca Fascicularis
  misc_feature (1)...(530): n = A,T,C or G
agagcatcaagaaagagcttaaaggaganntagaatatgctttcctgaacccggtgcannncattcagaacaaacccctgtattatnnngaccgnnnntatgactccatgaagggcaaggggacnnnnnnnnnnnnnnnnnnnnnnnnnnnnnnnntcccgcaccctagtggacgggctnnaaccctccccatgcaaccagcatagcccctactgggcccccccatgttacaccctgaagcctgaaacctgaaccccaatcctctgacagaagaaccccagggtcctgtagccctaagtggtactaactttccttcattcaacccatccgcgtctcatagtcacctcaccccactgtggctgatttggaattttgtgtccccatgtaagcgcctcttcattcggcattccccacttgagaattacccttttgccctgtacatgtttttcatcttccnnnnnnnnncccttcctttccacaggattcttcctccctccctctttctctcccttcctctttccatctaccct

SEQ ID NO: 17251 - DNA, 1366 bp, Macaca Fascicularis
  misc_feature (1)...(1366): n = A,T,C or G
tatgaccagcagnnnaggcgttcaagaggatttgccnnnnnatantttgaaaatgtagatgatgccaaggaagctaaagaacgtgccaatggaatggaacttgatgggcgtaggatcagagttgatttctctataacaaaaagaccccatacaccaacaccaggaatttacatggggagacctacttatggcagctctcgccgtcgggattattatgacannnnnnnnnnnnnnnnnnnnnnnnnnnnnnnnnnnnnnnnnnnnncatacagaggaggaggtggcggaggaggagnnnnnnnnnnnnnnnnagacagggatcagatttataggcggtcaccttctccttactatagtcgtggaggatacagatcacgttccagatctcgatcatnnnnnnnnnnnnnnnnnnnnnnnnnnnnnnnnnnnnnnnnnnnnccctagagctgggatattgtttgtggacaatattttttattgtctcttgtttaaaaagtgaacagtgcctagtgaannnnnnnnnnnnnnnnnnnttttatgatgactacttttggtggagtnnnnnnnnnnnnnnnnntctgcatttgtgtagttcgnntgctttgttcaaagttaagtgtttcagaaaagtatgttttgcatgtatttttttacagtctaaattttgactgctgagaagtttctattgtacaaaacttcatttaaaaggtttttctactgaatccagggtattctgaagatcgaagcctgtgtaaaatgctaccaaatggcaaaaagcaacaataaacagtttgatttttacttttctttctaacatatcaatgcttagcagaactattcagattaagttgnnnnnnnnaaatttaaagacaaatgcccattttcctccagtccatgaaacataccatacttatataagtgcaactaaatgttaaaaattatgctctgtaactctgtactgctagtattagaactaaaaaccttaaaatacagccagtgcttaatgcttatataaatgtggatttgtcagcttttatgtaatctgtaatatgtatagcaggaaataagaaacgaagagttacacagtgtatgccttaaaaggctgtttcttaaaaagctgttacaaggggataatggtatttcaactagtnnnnnnnnnnnnnnnatacattccaccacaaatatactcttgttcttctagcttttagactatatgaaaaaannngggtgcttcagagtacatgataagagaagggaacactacannnnnnnnnnnnnnnnnnnnnnnnnnntgcctgttcattttttaaatattattttcaggtcctttgcttaccaaaggaggcccaattcactcaaatgtttg

SEQ ID NO: 17252 - DNA, 748 bp, Macaca Fascicularis
  misc_feature (1)...(748): n = A,T,C or G
atgccccctcaatactttcatcatgtttccatcatctttcaggtcncacactctgagagttttgtctcttgaagctgacaccaggatcaagcttccatctggagcaaaagttaaatctctgaccacttcagtatgatctaccaagttaaggaggagttttcctgtatatacatcccatattttgatacgcccattgttcaaccctgtagcaagaagtagctgatcttgtccaaatctgaagcgatgccattctatatttacacagcgactctgtttttctggaactgacgacccaaaagcaagactccagactatatctccacagtctataatatgttcacgaggcttatttttctgaccaccatcactattttgtcttggcaatcttaaactgcttgaattggtaacattcttggtgccatgcaagagaaagttctgaaggcactgggaccacggaacaagttttactgtgcgatgtccttgtgaccaagcaaagtatgaaccatctggagcaaaagcaacagtccaattttcacgaccacatttcttgtcaaaaggagctgcaggagctaaaagttcacctatagtacgtgatctcacgatctctttctcgttgaccctcgggggaaagctggccatctatggggcaccgtctgattccgggaatacgatgcggacccaacgacagagaagagagtggcgagcgctgaggggcgtgactaggggttggtcctccccccgggccggg

SEQ ID NO: 17253 - DNA, 552 bp, Macaca Fascicularis
ttcaggaaaaggcttatgtggaattccaagattatataaccaaaacatatccagatgacacctccaggttatccagactgctattcagattgccagctttaagactgatgaatgctaccatcactgaagaattgtttttcaaaggtctcattggcaacataggaattgacagtgtcatcccacatattttgaaaatggagcctgcagattataattttcaaataattggtcacagcatttgaaagctgcaactgcagtgctgtaaacttaattgttctttgccagaacacaagacaccaaattgaactcattgcttttggggcatctggaaatttttacttcaaaaagtaaccagaatccaaggtatttttattttagcttccttaagaatttttgaagtgactgggccaacagcagaaattaaatgaatttttcttcctgattcctttaaatgaacatgaaacactacaaatttattcttggtgaagatgaaacctgaagctgtcacctcttgattatctaaactaagctctcattctattttataaaaca

SEQ ID NO: 17254 - DNA, 674 bp, Macaca Fascicularis
gtggcaatttatgactatacaaaagacaaggaagatgagctgtcctttcaggaaggagccattatttatgtcatcaagaagaatgacgatgtacagtcaagtcaactgcacagacttgaagcagccaagctgggtgagagctgcagagccgagggcaatgaaagaaggcacagtactagtgtcatccggcagtagatgctttccatgaatactccagagaaaaagagctacagaaatacagttgaggaaaagatacatcctgacaaaaatccaaattaaagaaaacccattagggagtaaaacatcagaagtataaagtatcactttactggttttttaaattcagttcatacatgaggttaaaacatttttaacagccatttctgtctgtgaaggaatgtcaagggaaatggcgtgttgggagacaagccactggatttggggttaaaatgacagtctcctcctctagccttaccctcttcaaggcatcattagtgttcaaaaggatgtctgcttttccaggaagacacaccagaagcatgtgttcaggatggctatcatcaggattgatacacagcaacgaaattccaagaaatcttgcactgaaaacacaaagggctgttgtttcagggctcaagtcatgggtgaaaaaaacgttggggggttatgttttt

SEQ ID NO: 17255 - DNA, 736 bp, Macaca Fascicularis
  misc_feature (1)...(736): n = A,T,C or G
gagctgcctcccgagggctctagagcccatnnnnnnnnnnnnnnnnnnnnnacggnnnnnnnnnnnnnnnnnnnnnnnnnnnnnnnnnnnnnnnnnnnnnnnnnncccaggtcccctccaaagtggtcaccnnnnnnnnnnnnnnnctcaatgcctacaaccgcactcggtatgaactgcgggaattcctggaggacacctgtgtgcagtatgtgcagaaacatatttccatggaaaacatgaaagggagccaaacaagccgctcctacacttcgctgatcctgggcgtcctggtgggcagtttcatcattgctggtgtggctgtaggcatcttcctgtgcacaggtggacggcgatgttgattactctccagccccctcaggaggggctggactgatggaggctggcaagggaaagtttcagctcactgtgaagccagactcccccactgaaacaccagaaggtttggagtgacagctcctttcttctcccacatctgcccactgaagatttgagggaggggagatggagaggagaggtggacaaagtacttggtttgctaagaaactaagaacctgtatgctttggtgaattagtatgataagtgaatgtttatctatctttgtggaaaacagataatggagttggggcagggggcctatggcccatcctccaaagatagacagaatcacctgaggcattcaaaagctgtaaccaaaaaacaaatcatccacaa

SEQ ID NO: 17256 - DNA, 752 bp, Macaca Fascicularis
  misc_feature (1)...(752): n = A,T,C or G
ttacgagctcatgactggctcactgccttacagccacattggctgccgtgaccannnnnnnnnnnnnnnnngccgtggctatctgtccccggacctcagcaaaatctctagcaactgccccaaggccatgcggcgcctgctgtctgactgcctcaagttccagcgggaggaacggcccctcttcccccagatcctggccacaattgagctgctgcaacggtcactccccaagattgagcggagtgcctcggaaccctccttgcaccgcacccaggctgatgagttgcctgcctgcctactcagcgcagcccgccttgtgccttaggccctgcccaagccaccggggagccagtctcagccctccacgccaaggagcctagcccaccagccaatcaatgttcgtctctgccctgatgctgcctcaggatcccccattccccaccctgggagatgaggggggtccccatgtgcttttccagttcttctggaattggggtcccccaaagactgagccccctgcctcctccatcatttggtttcctcttggctttggggatacttctaaattttgggagctcctccatctccaatggctgggatttgtggcagggattccactcagaacctctctggaatttgtgcccgatgtgccttccactggattttggggttcccagcaccccatgtggattttggggggtcccttttgtgtctcccccgccattcaaggactcccctctttctcaccaaga

SEQ ID NO: 17257 - DNA, 754 bp, Macaca Fascicularis
  misc_feature (1)...(754): n = A,T,C or G
gcccagccagnnnnnnngnnncccacccaatgctgctttcccctgtggggatctcaggggctgtttgaggatatattttcactttgtgattatttcactttagatgctgatgatttgtttttgtatttttaatgggggtagcagctggactacccaccttctcacacccaccgtccgccctgctcctccctggctgccctggccctgaggtgtgggggctgcagcatgttgctgaggagtgaggaatagttaagccccaagtcctgaagaggcaggccagccaggcgggctcaaggaaagggggtcccagtgggaggggcaggctgacatctgtgtttcaagtggggctcgccatgccaggggctcataggtcactggctctccaagtgccaggggtaggcaggtggtggcacttagccccctccaacactgtgcccnnnnnnnnnnnnnnnnnnnntgtcatgcccccctcaaacctcctcttctgacgtgccttttgcacccctcccattaggacaatcagtcccctcccatctgggagcccccttttctttctcctagccattcctggtacccagccacctgcccaggggtgccccctcctctcccatccccctaccctcgtggccagcccggctggttttgtaagatactgggttggtgcacagtgatttttttcttgtaatttaaacaggcccagcattgttggttctatttaatggacacgagataatgttagaggtttaaagataaa

SEQ ID NO: 17258 - DNA, 720 bp, Macaca Fascicularis
  misc_feature (1)...(720): n = A,T,C or G
tcacatgccagttnntcattcgtgtgactacagtacctggtaaactcgggccagggacagtagcctgcacttttgacttttcaccctggaccaatgaccctgtggagaagctgnnnnnnnnnnnnnnnntgttgacggtgagaggcatnnnnnnnnnnnnnnnnggcttcagcgtgcccatgtccatcgtcgttgtcagttatgggcttnnnnnnnnnnnnnnnnacaagcaaggcttaattaagtccagtcgtcccttgcgggtcctctcctttgtcgtagctgccttttttctctgctggttcccatatcaggtgnnnnnnnnnnnnnnnncagtcagactccataacatattacaaggcctgtccaaagaacttagaatnnnnnnnnnnnnnnnnnnnnnnnnnnnnnnnnnnnnnnnnnnnnnnnnnnnnnnnnnnnnnnnnnnnnnnnnnnnnnacttccgggagaggctgatccactctctgcccaccagtctggagagggccctaaccgaggactcagcccaaaccagtgacacagctaccaattctactttaccttctgcagaggtgcagttacaggcgaagtgaggagggagctggggacactttcgagctcccagctccagctttgtctcaccttgggttaggctgagccacaggcatttcctgcttattttagggttacccactcatcagaaaaaaaagcctttatgtc

SEQ ID NO: 17259 - DNA, 752 bp, Macaca Fascicularis
  misc_feature (1)...(752): n = A,T,C or G
tcccagaccctgtacactcctctgnnnnntgttgtgtgatcagttcgtggtttattctgtatttgtctcccatgtcttgctcttcccctggagaattctgtcctctctttggccatctcaaattgagaacctaaactattcctgcagaactgcctggctggcgcccacaagcaatacctcttgttccagcaggaccaagggaaccagcctccagcgagtgactccagnnnnnnnnnnnnnnnnnnnnnnnnnngtccgggagcctggccccagcaagggccctcctgacctctggctctagtgaannnnnnnnnnnnnnnnnnnnnnnnnnnnnnnnnnnnnnnnnnnnnnnnntcttggcacacctggggcttaccagtggcccaggtaattttttgtttcatggactatggactctttcaaagggatctgatccttttgaattttgcacagccctagatataatcccttttgataaaagggtctttgcttctgattacaggagcactgtggnnnnnnnnnnnntatgttattttataattccatgtatagttggtgtacactcaaataaannnnnnnnnnnnnnnnnnnnnnnnnntgtatagggccataatgaaattctgaagaaatcttggggagggaaggggagttggaacaaatgtctgttcgctggaggccagtctggtgctcagacctttagactcattgtaagttgccactgccaacatgagaccaaagtgtgtgacttgtca

SEQ ID NO: 17260 - DNA, 998 bp, Macaca Fascicularis
  misc_feature (1)...(998): n = A,T,C or G
gccattatgctgtgatgaacaannnnncccagacagcctttggccctaaacgttgcatacagacgctgctnnnnnnnnnnggctgnnnnnnnnnnnnngccaggttcagtgggtatcactgacccctgtgagagtggcaacttcagagtacacacagtcatgaccctagaacagcaggacatggtctgttacacagctcagactctcgtccgaatcctctcacatggtggctttaggaagatccttggccaggagggtgatgccagctatcttgcttctgaaatatctacctgggatggagtgatagtaacaccttcagaaaaggcttatgagaagccaccagagaagaaggaaggagaggaagaagaggagaatacagaagaaccacctcaaggagaggaagaagaaagcatggaaactcaggagtgatgttcccttcactccttttcctacccaagggggaagactggagcctaagctccccgctactgggctttacatggtggcagacatttccgtgggatagggaagatagcaggaagaaaagtaaactccacagaagtgtcattccactgggttttgatattggctttgctgccagtctcccatttgtgacctatgccatccatctataatgaaggaggataccaacatttcttcctaatattctagaatccccaactcctgaaaacccctctctcaattaatactttgctgttgaaatgttgtgaaatgttaagtgtctggaatttttttttttctaagaaaaactattaaagtacttcctagtagggctcttggccttttggttggttttttgggtttgtttttttgcatgtggcaaccttttttgcttctttttgctttgtatactcttgcgttgaaaatagtatttgagtcttttaattataaatactcagatcacaatttgaagctgtctttgaattaaagtacaaactcctagaacctttccatataccagagtaaactagaatacc

SEQ ID NO: 17261 - DNA, 699 bp, Macaca Fascicularis
  misc_feature (1)...(699): n = A,T,C or G
gagataggacctgctaccaataccaataagattttattggaatatggaatgtaaacaaatgtttcaaacaaacaatctaaccttataaaaatgtatggcattattaaatagttaataaagaaatcctaaagggtgatgtggtagacacctctagttctagcctaggtgtgtgaagtccccagagctgtggcatggccctgcagctgggatgaggggactgcctacaaaccatgttgctgctgagtcccccaaatgaaatcagccctatttttgtttaaacaaactctagctttctctgctaacatgaaggtttgcacaatggatccaacacttgctccgggagcaccgttttcttccccaagccccttgtatattcctcttagttgcttgagtttcagatgaccctgcccagacaactctagtacctgcatgcaagacagacttatctttgccatcacataaatgaatcacatatcagaactcacaaatgcatattacagtgggaaactgtacctcatggggataaaaggaggtgggagagggatatctttttcggtctttcctgaaaaaattctaatgggatgttttcctccctcgccttgcctgaagactnnnnnnnnnnnnnnnnnnatggttgtgaacaaaaaggtatgtgtttcagagaggtgtattaaaataggcgcacacatagggatgtgc

SEQ ID NO: 17262 - DNA, 723 bp, Macaca Fascicularis
  misc_feature (1)...(723): n = A,T,C or G
tacacatcggaagtcagcccgggaagcacttaggtgtttacctggaggccggaaaggnnnnnnnnnnnnnnnnnnnnnnggcaggcgggacctcaacctcagtcannnnnnnnnnnnnnnnnnnnnnnngacagtggcactcggtggcagtnnnnnnnnnnnnnnnnnnnnnncacctggaactggacacagacagtagctacacagctggacagatccccttcccacctgccagcactcaagagccactgcaccttggaggtgctccagctaatttgacgacactgaggatccctgtgtggaaatcattctttggctgtctgaggaatatttttgtcaaccacatccctgtccctgtcactgaagccttggaagtccaggggcctgtcagtctgaatggctgtcctgaccactaacccatgcctgtttcacagcaaggaaattcaccttcaaaagnnnnnnnnnnnnnnnnnncctcccaccccagctcgagatcattcttcactcaggacaccaaccagacaggtttaacagcaaaccnnnnnnnnnnnnnnnnnnnnnnnnnnnnnnnnnnnnnnnnnnnnnnnnnnnnnnnnnnnnttatatacaaatcccatttcttgaagataaaaacattgttattcaaacatgcacagaatgtttttggtaatattaatttccactaaaaaattaaatgtcttttaaggaacattctttccactg

SEQ ID NO: 17263 - DNA, 738 bp, Macaca Fascicularis
  misc_feature (1)...(738): n = A,T,C or G
catgatgatgatgaagatgaagaaatgttagagactgcagatggagaaagcatgaatacggaagaatcaaatcaaggatctactccaagtgaccaacagcaaaacaaattacgaagttcatagaannnnnnnnnnnnnnnnngcaattgtttgttagatataaaccctgtgactgtaatacattgcttcttgctctccacaattcatgacttaagtaccaaaatgcataccagttattatatattgccaagaattaaatgataaacttagagactgattagactgaaaatgcctaattgatatatatattcttgtgcctagtactttaccacaaatacagtgtaatatcatcagtccaaaactgcattacttttgtaaaaacactggttaatttgtataagatatatagctttttatgctttagaagttaaacagtatctttccgggggggggactaatttattttcatcactcttaactgtggtggtagctcttataaagtttgttgatctgttgttttttttaaatcaaaagccaattgaacaacaggatatatagactgataaatattcaggctaaatagtatttaacactcgtcttcaacttgatttatctgtttaattgaaaagaagtataagagttactgtcgcattttctggcctactacctttaaaattcctgttgagtttctttgtatttacaaggaaaggactgaactttttctcatcaaaactagct

SEQ ID NO: 17264 - DNA, 749 bp, Macaca Fascicularis
ctagttccatatgtgtgcacatgccctactctccactaactatacttaaaagtccaaaaatgttttctttagtaacagacttaggtacttctaagcaattattaacacaatattccttagttttcatatgttggttattcatatgtatatttatatgtatatttatttttatgtatgttactatgtaaatatgttttgcagttgtttttgtgtggaatcttgtctttccatataagttgtaagctccttgagagcaggatccatgtcattcctttatttttataaatcattcccccatcattcctttacagtgcctagtgctactcattatgtgttcattgaatttgactgacatacttaaaaacttaaggtttattttagactttaagggaaacaaaagacttgagtcctctctttgtaattctgcccctctcatttgtttaccctgggttttatactgttcttttccttctcccctcccacctttccgtggctctttgcctccattccatgaggcatacagtaaggctacctgctagtaagcagtcagataagtgggtacctatccagccattctcttttcagagcatataatactatcttggccaaatttgcctttgcttcactcatcatgcagccttctggattggttgctatatgtatcttttttccttgatttcccattctcttccacagcactgaggtctcatgaatttttctactttctttttgctgttgatgaattgttc

SEQ ID NO: 17265 - DNA, 747 bp, Macaca Fascicularis
  misc_feature (1)...(747): n = A,T,C or G
ttatggtagactaagcaatttnntcncgtgtgtgcatctcagaacccatcggtaggcaaaggaaatacgctcgggtggctgcggtgtagaccgtgtcaggcctagggagtcagccagcggtgagtgtaagaccagtcactccctctgccttcaggcttttgtcaatctcattatcctcaagcaggaattatgtcataagtcactgaccctaacggcagaccatgaagtaaattatgtaactaggtttttgcttctccagcagtgacccccctgcctcacaacttgggctcttctcagcagggagagccgagaagcatttgtgggcacctgggtattttagtaagtgtgtcttcctagaattcaaaggctctctctttctagaggtgctacatagttgttaatgcttggaatggcaatagggcagaattattaatcnnnnnnnnnnnnnnnnnnnntgaagagtatccttccttcagggtttaatagactgagtcagatgggtctgatactaatcaaaattgtctcttctgaggactgctgataagcattgacttgctgtcccctagggaaatccaagcgactacaaagcgtttctttagttttcatttcaattaatgttgcatttcgcttggtgaatgcgtactttttctacctggacgtattcctggcattcgcatattttgtgttttttttttactaaagctatgttacacggaaagggttttgaagccttttgtttcccttgct

SEQ ID NO: 17266 - DNA, 726 bp, Macaca Fascicularis
  misc_feature (1)...(726): n = A,T,C or G
agccccagatcnntgaaancntgagcaacancgnncggctgaaattggacgtgcagaagtatgaggcgtgnnnnnnnnnnnnnnnnnnnnnnnnnnnnngcaaccggggagacagcctgannnngcacgcccggcctcccgacccccctgctagcgccccaccagacagcagcagcaacagcggatcacaagacaccaaggagagctctgaagagcctccctcagaagagagccaggatacccccatttacacggagtttgatgaggatttcgaggaggaacccacatcgcccataggtcactgtgtggccatctaccactttgaagggtccagcgagggcaccatctctatggccgagggtgaagacctcagtcttatggaagaagacaaaggggacggctggacccgggtcaggcggaaagagggaggcgagggctacgtgcccacctcctacctgcgagtcacactcaattgaaccctgccagaggcgggaagacggggggctgtcggctgctgcttctgggccacggggggccccaggacctatgcactttatttctgaccccgtggcttcggctgagacctgtgtaacctgctgccccctccatccccaacccaattccacctgtcactccggacggacccgctgtgccttctaccatcgttccaccattgatgtacatactcatgttttacatcttttcttcctgccgctcggctccggc

SEQ ID NO: 17267 - DNA, 746 bp, Macaca Fascicularis
  misc_feature (1)...(746): n = A,T,C or G
gaggaggattaccnngagcttggcagccctaagtgaggggccatagctgtggcatccagagtccctgcctggaccagcctctccactcatgtgactctttcnnnnnnnnnnnnnnnnactcgggcaggggccggggggctgtctgagagaggccattctttcccaacatctcttggggagtttagggcatggggggtgggtggttgggcggagnnnnnnnnnnngggagccgggagcctgaccctcatctttcttccaaatgggctcagagggtgtcctgtgccggggcctgggcaggagggaggtgcttctagttctgccaggagacaggttagctgctccccacgtcagccgggacatccctacttttgtttaccagagagaaagggagggggagagggccgcctttggacttgtcccgggacaccgaggctagggcggggagagacgggccctggtggtggccccggaaggagagagttgtcctcagccccgcgtggaactcgcgtctggcacagcctgaccgcggcctaacctgctgagagcccatcagcctccatcccacccccagggccttgtcatcccaggcttcccacggctcctcgagatcccaacactgccagcatctcccttccttcctctctcctgtctccctcctctgcccgggagctcaggagccgaggcaaggaagggtcctatgggctcctaaaggctcttttgtaaggtttttgtagtgatttttatgc

SEQ ID NO: 17268 - DNA, 715 bp, Macaca Fascicularis
  misc_feature (1)...(715): n = A,T,C or G
ctgaattcctgtgtnannnncttcctataattacttatagtagataactttttcttttggttgtatataacttttctataacttgtgatggacaagannnnnnnnnnnnnnntcaaataagctttcaatattcgatgctcttgggtcaaaatgtccttttaccaaattgacctttttatgagttctttgggtaaatactttaaagctttttatattttaaagaatacttgtaaaagcatatcacatcttaaacnnnnnnnnnnnnnnnnnnnnnnnnnnnnnnggactctactgttcagctttaatttataaaacatatcacacatttaatgttatacagtatttacatatagtnnnnnnnnnnnnnnnntcagttttatgtaaatttttgttaagtgttgtagcctgcccagagtgactttttttttnnnnnnnnnnnnnnnnnnnnnnnnnnnnnnnnnnntccaatttgaagattcatttgaaggtggctcctgccacctgctaatagcagttcaaactaaattttttgtatcaagtccctgaatggaagtatgacgttgggtccctctgaagtttaattctgagttctcattaaaagaaatttgctttcattgttttatttcttaattgctatgcttcagaatcaatttgtgttttatgccctttcccccagtattgtagagcaagtcttgtgttaaaagcccagnnnnac

SEQ ID NO: 17269 - DNA, 900 bp, Macaca Fascicularis
  misc_feature (1)...(900): n = A,T,C or G
ggtggnnnnnnnnnnnnnnnnnnnnngtggatccagtgcttcaacgatgtgactgccatcatnntcgtggnnncnnnnnnnnnnnnnnnnnnnnnnnnnngggaggacaaccagaccaaccgcctgcaggaggctctgaacctcttcaagagcatnnnnnncaacagatgnctgcgcaccatctctgtgattctgttcctcaacaagcaagatctgctcgctgagaaagtccttgctgggaaatcgaagattgaggactactttccagaaattgctcgctacactactcctgaggatgctactcccgagcccggagaggacccacgcgtgacccgggccaagtcattcattagagatgagtttctgaggatcagcactgccagtggagatgggcgtcactactgctaccctcacttcacctgcgctgtggacactgagaacatccgtcgtgtgttcaatgaatgccgtgacatcattcagtgcatgcacgttcgtcagtacgagctgatttaagaagggaacccccaaatttaattaaagcattaagcacaattaattaaaagtgaaaggtaattgtacaagcagttaatcacccaccatagggcatgattaacaaagcaacctttcccttccctcaagtgattttgcgaaacccccttttcccttcagtttgcttagatgttccaaatttagaaagcttaaggcggcctacagaaaaaggagaaaaggccacagaagttccctctgactttcaataaaaataaataaaacaacagcagcaaacaaacaaaatgaaataaaagaaacaaatgaaataaatattgtgttgtgcagcataaaaaaaaatcaaaataaaaattaaatgtgagcaaagaaaaaaaaaaaaaaaaaaaaaaaaag

SEQ ID NO: 17270 - DNA, 736 bp, Macaca Fascicularis
  misc_feature (1)...(736): n = A,T,C or G
cagagcccccgcaccaggcagagccatacctgnnnnnntccccaagnnnnnnnnnnnnnnnnnnnnngcccagcccagggnnnnnnnnnnnnnnnnnnnnnnnnnnnnnnnnnnnnnnnnnnnnnaaggtggtggggcacccgagctgcatgttcctgtacggccccccagacccagctgtccgggccacagacccccagcaggtagcattccccagccctgctgagctcccnnnnnnnnnnnnnnnnnnnnnnnnnnnnnnnnnnnnnnnnnnnnnnnnnnnnnggctgcagctggagcttcgggggccacagctgtgggcccggcgcatgggcaagtgcaaggtgtactgggaggtgggtggccccccgggctccgccagcccctccaccccagcctgcctgcnnnnnnnnnnnnnnnacacccccatctttgacttcagagtcttcttccaagagctggtggaattccgggcacggcagcgccgtggctccccctgctataccatctacctgggcttcgggcaggacctgtcagccaggaggcccaaggagaagagcctnnnnnnnnnnnnnnnnnnnncctggctgtgccgagtgcacctggagggcacgcaacgtgagggtgtgtcttccctggatagcagcagcctcagcctctgtctgtccagcaccaacagcctctatgatgacattgagtgcttgctcatggagctggagcagcccgtctagagccc

SEQ ID NO: 17271 - DNA, 754 bp, Macaca Fascicularis
  misc_feature (1)...(754): n = A,T,C or G
gcagcatggacccggccatgctggagcgcnnnnngagcttggacnnnntgctggnnncccaggggagccagggagccnnnctgttgagtaccccaaagcgagagcggatggtgctcatgaagaccgtggaagagaaagacctggagattgagaggcttaagatgaaacaaaaagaactggaggccaaggtgttggcccagaaggctgaagactcaaaggaaaaggaaaaccattgtcccacgatactccggccccttttgcatcacacagtcacagtggcaaagcccnnnnnnnnnnnnnnggtgacgcccctacnnnnnnnnnnnnnnnnnnnnnnntccccaaatgccgagatccatatcctgaagaataaaggccggaagagaaaggtggagtccctggatgccccagagcctgaggagaaggctgaggactgctgggagctacagatcagcccggagctactggctcatgggcgccaaaaaatattggatctgctgaacgaaggctcagcacgggatatcagcatttttcagtgtattggcccgaagaaggctcagctaatcgtgggatggcgggagcttcacggcccctnnnnnnnnnnnnnnnnnnnnnnnnncgtggagggcataacggggaaannnnnnnnnnnnnnnnnnnnnnnnnnnnnnnnnnnnnnnnnnnnnnnnnnnnnnnnnnnnnnnnnnngaccgtcgtctcttcacttcgcctttttaaatccttgtataacccc

SEQ ID NO: 17272 - DNA, 832 bp, Macaca Fascicularis
  misc_feature (1)...(832): n = A,T,C or G
gattgaagccaagaaaaaggatcaagtgagatgctcagacattttccaagacaaccatgaagatggacctaccgctaaaaaattaaagactgagcaagggggtgcccannnnnnnnnnnncagtctggctgaaggcagtgtcacctctgttggaagtgtgaatcctgntgaaaacttccgtgttctagtgaannnnnnnnnnnnnnnnnnnnnnnnnnnnnnnnnnnnnnnnnnnnnnnnnnnnnnnnnnnnnnnnnnnnntaatgaaacaccatattttatgaagagcatggactgcatccgagccttccgagaagannnnnnnnnnnnnnnnnnnnnnnnnngctttaacaacttcctgaaagnnnnnngagagaaagtggaaattaaacagttaaatcatttctgggaaattgttgttcaggatggaattactctcannnnnnnnaaaaatacctctggaagttctgtcacagctgacgaagccaaaaagtttctggcccccaaagacaaaccaagtggagacacagcagctgtatttgaagaaggtggtgatgtggacgatttattggacatgatataggtcgtggatgtatggggaatctaagagagctgccatcgctgtgatgctgggagttctaacaaaacaagttggatgcagccattcaaggggagccaaaagctcaagaaattcccagcaggttacccgaaggcggatcaccttaattctctgtggaatgaatacacacatatatattacaagggataatttagaccccatacaagtttataaagagtcattgttattttctggttggtgtattatttcttc

SEQ ID NO: 17273 - DNA, 763 bp, Macaca Fascicularis
  misc_feature (1)...(763): n = A,T,C or G
annnnnnnnnnnnnnnnnatgaatgtactgaatgtggaaaannnntcagccagagctcaaccctcattcagcatcagaggattcataatgggctgaagccccatgagtgtagccagtgtggcaaagccttcaaccgaagctccaatctcattcaccaccagaaagttcatactggggaaaaaccctacacctgcgttgaatgcggtaagggcttcagccagannnnnnnnnnnnnnnnnnnnnnnnnnnnnnnnnnnnnnnagcgcccctacaaatgcagtgagtgtgggaaagccttcagccagcgttccgnnnnnnnnnnnnnnnnnnnnnnnnnnnnnnnggtgaagccctacgactgcgctgcttgtgggaaagccttcagccannnnnnnnnnnnnnnnnnnnnnnnnttgattcacaccagggagtagcctgttgggctggcaggagtgaaattgagcatagtctnnnnnnnnnnnnnnnnnnnnnnnnnntctcagcctctgccacttcccagaccgaaagcctgcactcagctcactgccccacatccagtggccacatggcctgggaccctcctttgaaacatcctttacgggctcccttctcactgccactgctcttgcctcttgtgatgtcttgagtttgggtttgtttttacagcttgtgaacagactgnnnnnnnnnnnnnnnnnnnnnnattatggaggctacatattcatgaatagagtttattattgtaatcaaaagtaccaaaaaa

SEQ ID NO: 17274 - DNA, 693 bp, Macaca Fascicularis
ctgggagtcacgcagacctccttcctctcttactcccacacagtgagccataaagtccagtctttctatcttaacatcactgtcaaacccacactctattccatgaccagtgctgccaagtgaatgtactctcctcacttccttcctggattacccatagccccacctcatcctcctacccttgctttcctccctgaagtcagagagatgctactcaagagataactgcttctgacagcccttattacagaactgaagtactctccttagcttcagctctgtgcccacatgccttggctttggatacaacatactacagcactttgtccactctccaggcttatctctgtcactccacatgcacatcttagaaaatgccagccttaagagaattctccctagccccaaaatgtctttgcccagtgcaattccttctttctgtagtaccgctttccctcctccacactatctgcctggctaattcttatttatcctcagttcaagtgtggccttctctgggaagctgatcctcctggcccaccccttgtatatactttgatgccctagggcacaccacctttatttccctcatagaaacagccttctgtaaattgttccatcacatcacaacctgtatttcaatttgtaagaaatttgcatgtactgtgagctccccaccatcaggagaccaac

SEQ ID NO: 17275 - DNA, 736 bp, Macaca Fascicularis
  misc_feature (1)...(736): n = A,T,C or G
ggaagcagtgtgggacaggagagaaagtcccgtccctatnnnnnnnngcgcagtgagtgtggcntnnnaacaggccccttcctaagctcnnnnnnnnnnnnnnnnnnnnnnnnnnnnntggcctccatggtctcagagctgccatccctctgtgccatcctgcagttttgggaatggaaagcaggcctctgaggcagtggacaggaagctttctcatccttgaattctagctcccattccaaactgtgagtccccagcattgtggtcacatcagaggtcaacagcagagcagaggcaggtcggggttgtcctctctgattagcagaacaacggacccttcctcctcctccctccctcccatcccttctcattggctccctgctcctgggatgctttccaagacctctagcctccatggctgatgacctcagctttcacataggtgaaatgtgtgtgcccatactgcagctccatcccatgggggccctgaagacccactgaggaattccacagggtcttgttcccacaattggagtgctggctctaacagtgaactttgatgcatttaaaataagattcnnnnnnnnnnnnnnnaaagcaggcgctggttctgaagcaccgatggaaatagattgatgcagatggaaggaggaagggagactgggcccactgatttccagccccaccatgtgcgctgttttcagatgtgactgaggggtgttctgcctgcctccac

SEQ ID NO: 17276 - DNA, 820 bp, Macaca Fascicularis
  misc_feature (1)...(820): n = A,T,C or G
gattcttacttcattagcctagtttatggccaataatacttgatggggaagactcagtaattagttatgaatatggatatcctcaattcttaagacaaacaatttgtaaatgtatttgtaaaaattgtatatatttttacagaaagtctatttctttgcaacaatgagagtatcgaatttacattagtttttttcatacctttttgaactttgcaacttcggtaattaggaacctgtttcttacagcttttctatgctaaactttgttctgttcagttctagagtgtatacagaacgaattgatgtgtaactgtacgcaaactggttgtagtggaaccaatctgattgataaactatgcaggtttaaattttcttatctgattttggtaagtattccttagataggtttttctttgaaaacctgggattgagaggttgatgaatggaaattctttcacttcattatatgcaagttttcaataattaggtctaagtggagttttaaagttactgatgacttacaaataatgggctctgattnnnnnnnnnnnnnnngagttccttccatttgacctaatttaactggtgaaatttaaactgaattcatgagcnnnnnnnnnnnnnnnnnactaaaagattttcagctgttctgaatggaactcgttagccgtgtgcatataaaannnnnnnnnnnnnnnnnnngagagacatttgatcccttgtttgcttaataaattgtaaaatgatggcttggaaaagcaagcaagtctaaccatggtgctattattaggcttgttacacacacaggtctaagcctagt

SEQ ID NO: 17277 - DNA, 1075 bp, Macaca Fascicularis
  misc_feature (1)...(1075): n = A,T,C or G
gccatcaagatgggnngnnncgannnaagttttgcagccgctggcnnnnnnnnnnnnnnnnnnnnnnnnnnnnnnnnnnnnnnnnnnnnnnnccgaatcggagtcactctggcgggacaccagaagaaaatattggccagtgtccagcacatgaagtcccaggccaagccgggagccccgggtaggaccggatgaccgaccccacagtactgacatgcaggaactgcccaccccagggacagggcctcctcatctatatggggcagagtggggactcacagaggcccccagccctgagccccgctggattgcactttgaacccgtggggtggggagttggcaatttggagagacaggatttgggggttctgccataataggaggggaaaatcacccccccacagccccctcggggaactccagaccaagggtgagggtgcctttccctcaggactgggtgtgaccagagggaaaggaagcgcccatcatctcccagcctccccaggtgacccccctcaccttgacgggtgccttcccgcagaccaaagagtgtgactcccttgccagctccggagagggggactgtcccagggggcaagaaggggtgtcagggcccagtgacaaaaccattggggtttgtagtcccaacttgctgctgtcaccaccaaactcaatcattttttcccttgtaaatgcctctcccccagctgctgccttcatattgaaggtttttgagttttgtttttggtcttaatttttctccccgttcccttcttgttttttcgtttcgtttttctaccgtccttgtcacaactctgtgttggagggaacctgtttttcactacggcctcctttgcccaagttgaaacagggatccatcattgtgtctgtttccagaacagtgccttggtcatgccacctccccggatcccgcctgggacccccaagctgtgtcccatgaaggggtgcagggtgaggtagtaaaaggggcggtaggtggtggtggaacccagaaacggatgccggtgcttggaggggttcttaaattatattaaaaaagtataactttttgtat

SEQ ID NO: 17278 - DNA, 1387 bp, Macaca Fascicularis
  misc_feature (1)...(1387): n = A,T,C or G
caagcannnnacagtcannnnnnnnnnnnnnnnncacaggaaacatagnnnacacgccatnnnnatccaaacctgtgaccatcactgtccaagtgcccagcatgggcagctcttcaccgatagggatcattgtggctgtggtcannnnnnnnnntgtagcggccattgttgctgctgtagtggccttgatctactgcaggaaaaagcggatttcagccaatcccactaatcctnnnnnnnnnnnnnnnnnnnnnnnnnnnnnnnnnnnnncctattcacttctcatgcatccggacgctctggaagagcctgatgaccaaaaccgtgtttagtctccattgtcttgccttgggatttgagaagaaaatcagagaaggaaagatctgatagttcctggcctaaattccccttggggaggagaaggagatgctgcagttccaaaaaagaaggtctcttccagagtcatctacctgagtcctgaagctccctgtcctgaaaaccacggacaatatggccccaaannnnnnnctgcaccttctgtgcttcagcccttcttgacatcaagactcttcattccacatccacacagccaatacaattaatcaaaccactgttattaatagatcatagcaacttgggaaatgcttatgttacaggttacatgagaacaatcatgtaaatctatatgatttcagaaatgttaaaatagactaacctctactagcacataaaagtgattgtttctgggtgataaaattattgatgattttaattttctttatttttctataaagatcatatattacttttatgataaaacattataaaaataacattctgtttaccttttcaagcctgtattggtttgagtgtagattgaattgcgtggggtctgtttctcttcagtgatgagactcttaggaaggcaggaacggataggatgtgggggaaaggagagatggggatttggaatgtagagttagtgccccttttcttaaaactgaatacagtcnnnnnnnnnnnnnnnatttttagttcaacaacaaactgcatatatgatggtggtcccataaaattataatgctatatttctactatgccttttctattcctatgtttagatatatgagtacttaccattgtgttacagttgcctaaagtattcagtacagtagcatgctgtacaggtttgtagcctaggggcaataggctatgccatacagcctaggtgtgtagtaggccacaccatgtaggtttgtataagtacctgctctaatgttcacacaacaaaattgcctgcatttctcannnnnnnnnnnnnnnnnnnnnnnnnnnnnnactgtactcttctgccaataaccttgtattcttgtttccatgtcttctt

SEQ ID NO: 17279 - DNA, 655 bp, Macaca Fascicularis
  misc_feature (1)...(655): n = A,T,C or G
attcattatgnnnnnnnnnnnnnnnnnnnnnnnnnnnngaagagnaaacacctnnnaaaattttttgacactttttgtattttttccttaagagatatttgtggttgttgaggtttgaaaagctgactgttttttgcaggggnnnnnnnnnnnnnnnnnngcattgaagcttgcaccttttcatgtacagcattaaaattttacctctctctgggatttaccagcttaagagtccaactcacttccagtgcccaaaagggcacccaccagaaattccagtaaatcttcatttgaggaaactctcccttgtttactctgttaccacattggggaaatttttaagtttttcactttgggggtttttgtttgtttcttcttttcctttatccacttttctttttcctggtagagtaggtttatttatctgagcaataacttctgtgttggtttcagtggctggaattaaaacaaaacaaaacaaaattccaaacagtgtgttggtgctttagcgattcactgatgtacagaacacaaatgtctagtttctagtgtcactgatgaactagtgatgtagaaaagagacctctctgtaagtaattgccacagctgtattttggctttctccctgtcccttcctttctcccctattttttgg

SEQ ID NO: 17280 - DNA, 755 bp, Macaca Fascicularis
  misc_feature (1)...(755): n = A,T,C or G
annnannnnntcatcgacatggtcctgaaccgcatggcaaaaggagtgaaggagattgacatcgctgccaccctggagcatgtccgtgaccagcggcctggccttgtccgctctaaggaccagtttgaatttgccctgacagccgtggcggaggaggtgaatgccatcctcaaggccctgccccagtgagaccctggggccccttggcaggcagcccagcctctgtccctctttgcctgtgtgcgcatctctgtgtacccactcctcactgccccaccggccacctcttgggcatgctcagcccttctagaagagtcaggaaggggaagccagaaggggcacgcctgcccagcctcacgcatgccagagcccggggcatcccagagcctggggcatcccacgggggtgctgcagccaggagaagaaaggacatgggcagcaattctacccagagccttctcctgcctacattccctggcctggctctcctgtggctctcctgtgtttccgggagctcccccaacatctctgtgtgcccctctatgctccaatgtggaagaacagggtggagggtcgccacacctggctccccttgcttctcagccccaggcctgcctccttgactcacacttgggcgctccgccctccctggcctcatgcccagcctcctcccaccaccctcccaccatgtgctgctcaacctctctccttctggcgcaagagaacatttctagaaaaatctacttttgtaccag

SEQ ID NO: 17281 - DNA, 938 bp, Macaca Fascicularis
  misc_feature (1)...(938): n = A,T,C or G
tnnnnnnnnnnnnnnnnnnnnnnnnagannnnnnctnnnnncctgaccaatcttgtttaccctatacatccacagggttttgacacttgttgtccagttgaaaaaaggttgtgtagctgtgtcatgtatatacctttttgtgtcaaaaggacatttaaaattcaattaggattaataaagatggcactttccaattttattccagttttataaaaagtggagacagactgatgtgtatacgtaggannnnnnnnnnnnnnnnnnnnnnnnnnnactgaagtggctaaatactggttcacatcctaccccnnnnnnnnnnnnnnnnnnnnnnnnnnnnnnnnnnnnnnnnnnnnnnnnnnnnnnnnnnnnnnnnnnnnctaatgcatgtattcgggttaggggaatggagggaatgctcagaaaggaaatacattttatgctggactctggaccatataccatctccagctatttacacacacctttctttagcatgctacagttattaatctggacattcgaggaattggccgctgtcactgcttgttgtttgcgcatttttttttaaagcatattggtgctagaaaaggcagctaaaggaagtgaatctgtattggggtacaggaatgaaccttctgcaacatcttaagatccacaaatgaagggatataaaaataatgtcatagataagaannnnnnnnnnnnnnnnnnnaccatataaatgtggaggctatcaacaaagaatgggcttgaaacattataaaaattgacaatgatttattaaatatgttttctcaattgtaacgacttctccatctcctgtgtaatcaaggccagtgctaaaagtcagatgctattagtacctacatcagtcaacaacttacacttattttattagttttcaatnnnnnnnnnnnnnnnnnnnnnncatgtgctgc

SEQ ID NO: 17282 - DNA, 751 bp, Macaca Fascicularis
  misc_feature (1)...(751): n = A,T,C or G
ctccccagccagcctggctgggactggggacaaaactcggtgtccccacnnnntgctgtcttttctttgccatnnntgctccaactgggatgggaggtgggcaagctggccgcaggggcaagggaggccatctggagagcccagagagtccccccacccccgccgccagcattgcactctggcagcaccacctcttcccgccgcccagcccgctccacagccggctttcaggagccccaaacacaagctgccttcggtacccaccagacaacatccaagtggcctccgtcactacctggctgcggggcgggcacacctcctcccactgcccaccggccggcctctttcagccacccccacttcccaggaccccttagcagccctgccctcccccacttcccatcgtctgaacaattgtcttcctcagcctcctcctgcccccaccttgggaatgtaaatacaccgtgactttgaaagtttgtacccctgtccttccctttacatcactagtgtgtaggcagatgtccgagtccctaggtggtttctaggattgatagcaattagctttgatgaacccatcccaggaaaaataaaaacagacaaaaaaaaaggaaagattggttctcccagcactgctgtgccccnnnnnnnnnnnnnnnncctccctgtatgcctgtgcttggtctactgataagccctctacaaaaaacaaaagtatatatatatatgtacataatatcagaattataac

SEQ ID NO: 17283 - DNA, 818 bp, Macaca Fascicularis
  misc_feature (1)...(818): n = A,T,C or G
atatcaaaacatatttcaatnnnnnnnccttcatttcattcttgcaaatctacatcacatatttgaaaatgagatattagaaaaaaccaattcttaaatttagttcatctttaaaagaacattaaatataaccattttgttggatcgatgtgtttcttttggagcataaaatgtatgctgttgtgaccaataaatataaaatatggaaattggaattaactccacaccatagtatgcattgttatgcatacggtgcacctaattatgtataccagtgtagtctcaattatatctaaaagtagttgtgactaacaagtatgctttgccttatttccacatttaaactaccttttaacgtaagggatttgtagtatcagcttgttgagcaatgactttgaatcgagttttcagtgatcagaagcagcagttacttgagtgcatgaatggaatgataactataatgtagtgaaaccaccatattacagaaatatttactacatattttccatctgtagtttttcagaaaggctatggattagttgaactgtcaaatcttgcatacttctgtgacacccttgcctgttttctctaaccaaggtgttaggtgtgactgtcacaactgttaatgttttccggtaaactagaagtataatattatttggtaattatatttgtaccctaattttcaccacctaaatgtaatgttgattcccaagaatgaaatgaaggcactacattgaaatatgttttgtataaatttgtcatgttgaacaacattttagcatggtaagttcccttagctatatgaannntggcat

SEQ ID NO: 17284 - DNA, 763 bp, Macaca Fascicularis
  misc_feature (1)...(763): n = A,T,C or G
atgccagagatggaagtgaaaattagctntagcagaaaccaagcatttgttagaaattctatcatcgcccagcgcccaccatgttcctgtgtccctggagtcagatccaggttcctggccatggcttttgggtgcagcttcctctcaccagctccactatgatcaactggtctgtccctccagcaaagccacctgtgattccaagtgaacaatgcagtgaatgcactgcacactgggacccgaatgccgggatctctgtcctggctaccgtgcccaggcttctggaccatctggtttccaccctctgttctctgcttgcatttctcaatgctagagcaacccactcagcaaatccaaactccccacagaatctcaagctcagtctctgcagggtccgtccacagggagtggtgattggcggcaggaccctcctcccggtgaccccttccaggtcctcttgctcagttacaacgggcccttcttgggtggcagtaatgattcgtgtgtttcagacaggaatcactacctcagggacacaggaggaggacacaggtcgttgacctgccttgacctcagggacctgggaggacccggctattcatatcagctgccaggggtgggaatcttgggcttccatggtgaccaccggcccctcctgctggacggtgcccctggaatcttgacacacacagcacagtttctgggcagccagggaaatccagggtgggcgccgagtggccgagaccctggtccgttcctcccg

SEQ ID NO: 17285 - DNA, 668 bp, Macaca Fascicularis
  misc_feature (1)...(668): n = A,T,C or G
gacatgcagaggatagaagatgtgttgggcagcagtgaggacnnnaggcggacagagtccacaccggctagtagcgagaacactaaagacattaggctgtaggagcagaacacttnnnnnnnnnnnnnnnnatattgggaagctgcagggaccagggcttgtgcagattgtacggtctccccagatatggaccatcagtgactcatgctggatgaccaaggaagccatgaccccatgctccgtcatttaacaggnnnnnnnnnnnnnnnnnnnntggtccagagtcaactgttcccataacccctagtcaccgtttgtgtgtatgaattgggggaattaagtttcaagaaaggcgagagttaaggtcaatgacaccnnnnnnnnnnnnnnnnnnnnnnnnnnnnnnnnnnnnnnnaaggtacctaggttggagtctagcctaatcaagtcaaatggagaaacaggcccagagaggaaagtggcttnnnnnnnnnnnnnnnnnnngtctgtagctgagctacctggggtggcggccaagtcacaggttnnnnnnnnnnnnnnnnnnnnnaatgagggctgagtttgcacagtggtctggaatggannnnnnnnnnnnnnggactcagctctaaggagtacccccagcccaagagnnnnnnnnnnnngga

SEQ ID NO: 17286 - DNA, 731 bp, Macaca Fascicularis
  misc_feature (1)...(731): n = A,T,C or G
gagttnnnnnnnnnnatcnnngagttctcgcgggccatgcggcggctgggcctggacgannnnnnnnacgccctgcnnnnnnnnnnnnnnnnnnnnnnnnncgaccggcccaacgtacaggagccgggccgcgtggaggcgctgcagcagccctacgtggaggcgctgctgtcctacacgcgcatcaagaggccgcaggaccagctgcgcttcccgcgcatgctcatgaagctggtgagcctgcgcacgctgagctctgtgcactcggagcaggtcttcgccctgcggctacaggacaagaagctaccgcctctgctgtcggagatctgggacgtacacgagtgaggggccggccacccagccccacagcctagcctgaccaccctccagcagatagacgccggcacccctttctcctcctcgggtggaaggggccctgggctgagcctgtagacctcccagccctcagcccttgggatgagccccagtccgggtccaggaggctccctccctgcccaccaagtcttccagaaggggtgaaagggttacaggtcccgaccgctgacccttcccggctgccctccctccccagcttacacctcaagcccagcacgcagtgcaccttgaacagagggaggggaggacccatggctctccccataggcggggagaccaggggccttcctcttcctctgctccttttatttaataaaaactaaaaacaaaaacag

SEQ ID NO: 17287 - DNA, 719 bp, Macaca Fascicularis
  misc_feature (1)...(719): n = A,T,C or G
ctatgacacacgtgtgaccatnnncgggcacgtgcagagaggagggaccccctcggcattcgacaggatcttggccagccgcatgggggtggaggcagtcatcgccttgctagaggccaccccggacaccccagcttgcgtcgtgtcgctgaacgggaaccacgccgtgcgcctgccactgatggagtgcgtgcagatgactcaggatgtgcagaaggcgatggacgagaggagatttcaagatgcggttcggctccgagggaggagctttgcgggcaacctgaacacctacaagcgactcgccatcaagctgccggatgatcagatcccaaagaccaattgcaacntagctgtcatcaatgtgggggcgcccgcggccgggaagaacgcggccgtgcgctcagctgtgcgcgtgggcattgccgacggccacaggatgcnnnnnnnnnnnnnnngctttgatggcttcgccaagggccagatcaaagaaatcggctggacagatgtcgggggctggaccggccagggaggctccattcttgggacaaaacgcattctcccgggaaagtacctggaggagatcgccacgcagatgcgcacgcacagcatcaacgcgctactgatcatcggcgggtttgaggcctacctgggactcctggagctgtcagccgcccgggagaagcannnnnnnnnnnnnnnnnnnnnnnnnnnnnnnntta

SEQ ID NO: 17288 - DNA, 785 bp, Macaca Fascicularis
  misc_feature (1)...(785): n = A,T,C or G
gccggcatgtggcagatgactgtatnnnnnnnnnnnnnnnnnnnnnnnnnnnnnnnnnnnnnnnnnnnnnnnnnnnnnnnnngtgcagtgagccaagatnnnnnatgcactccagctnggcgacacagcaggacttcatctcaaaaaagattatatagaaaagtgacttgcaatacaggaactgtacacatgtagtcaatcaatcaaattgcaaacagtgcagtcactccagatgttagtgaactggagaattatagtctgtactcttgccagcaagaagaaggcagaaacatgagcaagctagaggaggagggaaattgcaaggaaaacacaaatgtaaattgataccattatcaaatgttgcaccatgtgcaaagtttgctacatttgtctttggtcaaggagattcttaggnnnnnnnnnnnnnnnnnnnnntctctctgaaaacctgagcaagagaaagtcagtctccaagagtaccaataccctaaaatgactcacgggtttaaaacaacacactctccactgccacccccgccacaaccaccatagcccagatggatgccaacaattaagaaaagannnnnnnnnnnnnnnntggaccagcaaaggcacgtttctagagcaggacgagagccgaagtgtgatgctgggagaggaactagccttggaaagggtggcgtgctcccacgaaagncatttgttggacaggagctnnnntttgagcctggtagctctcatctgacttctccaggccctgtgtatacagaggccatgatctcaaa

SEQ ID NO: 17289 - DNA, 878 bp, Macaca Fascicularis
  misc_feature (1)...(878): n = A,T,C or G
agacatgtgtagcatcaaaacacaaaggcccacannnnntgatggatgccnnnnnnnnnnnngctgnnnactgaccccaacccttgatgatatgtatttattcatttgttattttaccagctatttattgagtgtcttttatgtaggctaaatgaacataggtctctggcctcacggagctcccannnnnnnnnnnnnnnnnnnnnnnnnnnnnnnnnnnnnnnnnnnnnnnnnnnnnnnngggtgcctggtgaaaagatcaaatggggctgggacttctcatcggccaacctgcctttccccagaaggagtgatttttctatccgcacaaaagcactgtatagactaatagtggttacaggttcagggattacccagtgaggccttattcctcccttccccccaaaactgacacctttgttagccacctccccacccacatacatttctgccagtgttcacaatgacattcagtggtcattcctggacatgagtgcccagggactatgcccaacctatgccttgtcctcttgtcctgtttgcatttcactgggagcttgcacnnnnnnnnnnnnnnnnnnngcagtgatcagggtcctgcaggcagtggggaagggggccaaggtattggaggactccctcccagctttggaagcctcatgcgtgtgtgtgtatgtgtgtgtagacaaggtctnnnnnnnnnnnnnnnnnnnnnnnnnnnnnnnnnnnnnnnnnnnnnnnnnnnnnnnnnnnnnnnnnnnnnnnnnnnnnnnnnnnnnnnnnnnnnnnnnnnnnnnnaccataggcttacaccaccacacaaggcaaatttgatttttttttttttaagagacnagggtcttgcaacattgcccaga

SEQ ID NO: 17290 - DNA, 705 bp, Macaca Fascicularis
  misc_feature (1)...(705): n = A,T,C or G
ctttgtgtcggctgggccacggccttctcccctgccttcgccacagcctgcaccccgccgggcaccctggacctnnnncccagactcagaccccttctgggactccccacctgccaaccccttccggggaggcccccaggactgcagggcacagaccaaagacatgggtgcccaggccccttgggtgccggaggcgggaccttgagtgggccaggccactcccccgagctccagctgccttagaggagtcacagcatannnnnnnnnnnnnnnnnnnnnnnnnnnnnnnnnnnnnnnnnnnnnnnnnnnnnnnnnnnnnnnnnnnnnnnnnnnnnnnnnnnnnnactgcacaggaagccttcacactggatggggggcctgcgcccccatacctgaaacctcccagctcacctgccctactggggcccgacactgtacccagctggttgggaggacnnnnnnnnnnnnnnnggaattgcccgcaggggtgatgcagggaggaggggaggtgcagggaagaggggccggcctcagctgtcaccagcacttttgaccaagtcctgctactgcggcccctgccctagggcttagagcatgggcctcctgccctgggggtcatctggggccagggctctctgggtgccttcctgctgccccagccagggtggagtattagcctcgggatccaatgaagccnnaagccaa

SEQ ID NO: 17291 - DNA, 706 bp, Macaca Fascicularis
  misc_feature (1)...(706): n = A,T,C or G
agctgnnnnnnnnnnnnnnnnnnnttccaataaaaaaagaacagcagcctagctacttaaggtggggatttccatagttccaaagaagnnnnnnnnnnnnnnnnnnnnnnnacacttnnnnnnnnnnnnnnnaaggttctcttagcctgggaaactatcaactttttctttaaaaagaaaaagggttgaaaatcctcttggtgaacagaagtctctttggctgttcagtgaggccgatgttaacaacatatgtagaggaggaaaagttcaacctcaagttaaatggtttgacttattcttcatatcattagaagaaccccagagatagcattcctctaattttattttactttcttttggattgcactgattatttttgtgggaatgacactttatctggcaaagtaactgagagtttggtaaaagaatattttcttctctgaataataattattttcacagtgaaaatttcagtattttatcactaatgtatgagcaatgatgtatatgaatttcaaggcacgtgaaacaaattttttagtnnnnnnnnnnnnnnnnnnnnnnnnnnnnnnnnnnnnntaggttttgggttgtacaaattaggataagtaagcttatatatgcacagagattattgtattannntgtaaattgacttacaagtacttaaaagccatggtcccnnngtgaggccaagaaagtttcc

SEQ ID NO: 17292 - DNA, 929 bp, Macaca Fascicularis
  misc_feature (1)...(929): n = A,T,C or G
ggaacagaacaaatcagggggccaggggagggctgtgggggagagagagtggtttaaataggggagggggggaagttcggtgatgggggagggaggcaggtatttacaagaaggctcagggggccagaggctcatcttggaatattttataacaatataaataagattctggtttgcttttccttttcgtctcgtaaaggagagagaagtgcagagttcgattctgtacaagggggcagcggcagaaggccggccgggcgggtcactgggcgtccacccggaaggacagcagcttctcggaatgcatgttgttcagggtccgcaggtccggcagcttgagcagcagcttggtgaagcgggaagtctccnnnnnnnnnnnnnnnnnnnnnnnagcccgaagagcccgcagcagcgtctcctggagctgctccaccgaagcggaattctccatgcccgagcggtctgcagagacaagcaccaccgcggtgaagaggcccagctcctcctcggtaagcgccagggagttgagcttctcgctgaagtcgaacatggcattgagcaggtctcccatgcccatggcaccaagctcctgcaggctgtaggtggtgcggcttaggaacatcactgtctggtccttgacgttaaacaatgatgcaaagcgcaccatcagcacctcaaaagtgccagccttannnnnnnnnnnnnnnnngtgctgagaaaggtcacggaagcctgggatgtgcttggcnnnnnnnnnnnnnnnnnnnnnnnngggtgtgaagctcatggagaaatcttcccagatctcctgcaccgttcgtccactgcgtccgtgcgggtacatgttcatannncatgccagcagaacattcttggagttaccctgcccggggattgttggcaggtgccttgcttnnnnnggctgcata

SEQ ID NO: 17293 - DNA, 691 bp, Macaca Fascicularis
  misc_feature (1)...(691): n = A,T,C or G
tcctcggggctgttggcaacttgatcccctcttcctgtgctggagggtatggggggtcttccggaagcctgggaggagaagtggagacagaggctggagcactgcgtttcactagaacgtttgcctgagcagaagtgggcttgggagaggttttctgatttatgaaagaagcaatcactgcgttgctgatggggaacgtcttgatggagaaatccaagggcnnnnnnnnnnnnnnnnnnnnnnnnnnnnnnnnnnnctagtgggcttgagggtgtccacgtggcgctgtcccttgacagggtcaggacagctgctagggtgggaccagcagttggggtctgcagtgtggagatgggcaggaagctggagcccagcgcatggcctgcctgcacccccctgccaccacctcctggtgggttccgccctcatgcccgccctctccccacagcgggacctggacttcaccatcgannnnnnnnnnnnnnnnnnnnnnnnnnnnnnnnnnnnnnnnnnnnnnnnnnnnatgcgctgaggcccagctctcccgccctgcacgggcccaggggctgagcattcctaggcggtttcggggctcccccttcctctcccttcttccnnnnnnnnnnnnnnnnnnnngcctgggctggggggatggggagggcacatcgtgactgtgtttttcataacttat

SEQ ID NO: 17294 - DNA, 1024 bp, Macaca Fascicularis
  misc_feature (1)...(1024): n = A,T,C or G
caaaatgacaccggctgtctgtactagacaaggttaccaagtgcggaattggttaatactaacagagagatttgctnnnnnnnnnnnnnnnnnnnnnnnnnnnnnnnnnnnnnnnnnnnngtaggtttgctctgtatccatgtgtacagcctacccatgcaggattcgaggacttccaggcgcatagggtaggaccaaatggtagggtaggagcatgtgttcttgagggccttgtaaggctgtttcctnnnnnnnnnnnnnnnnactatataatnnnnnnnnnnnnnnnnnnnttcaattttgcatatagaggagccaaagagagatttcagctctgtatttgtggtatcagtttggaaaaaaatctgatactccatttgattattgtaaatatttgatcttaaatcacttgacagtgtgtgtttgaattgtgtttgttttttcctttgatgggcttaaaagaaatgatccaaagggagaaannnnnnnnnnnnnnnncttaaaacaaaacaaaacaaaaaaattgtgctcttttctaatccaaagggtatatttgcagcatgcttgactttaccannnnnnnnnnnnnnnnnnnngacactattatcactaagaccttgttatggcgaagtctttagtctttttcatgtatcttcctcatgatttttttctctttatgtagtttgactatgccttacctttgtaaatattttggcttgtgttgtctcaaaggggataatcttggaaagacaccaaatcatgggctcacttaaaaaaaaaaaaaaccnnnnnnnnnnnnnnnnnnnnnnattacctctgtataaaattcttcagggagtgtcacctcaaatgcaatactttgggttggtttctttcctttaaaaaaattgtataaaactggaagtgtgtgtgtgagcatgggtacccatttgataggagaaatgcatttgattgtgaagaagggagagttaaattgctccattannnnngtggtgtaaagttttgagctggaatttattataag

SEQ ID NO: 17295 - DNA, 830 bp, Macaca Fascicularis
  misc_feature (1)...(830): n = A,T,C or G
gcnnnnnagttatnnnnnnggncggaatnngaacacgctggctccatatcgtgaaatttttattaattttttttctttttcctttgttatttccttatctcttcctttcttcagactccgtccaaggagatgctctccccggtcttctgctgcaattagattcctttcccttctctccagttctccttcccttaccaaggagaggggagcaaatggttttgggcatgggctgcagccattcatgtcaagctggttgtggcgttctttggttctaagtttttcaaggcgccatagccacccccgaagatatttaaagtgtgaggttttttagtctctgccacccttgtcaagggagtcttgtacagttgccgagggtannnnnnnnnncaggttccaggattcccatccgccctnnnnnnnnnnnnnnnnnnnnnnnnnnnnnntgagctcccttgggctcgcctgccagcctggagttcttcccgtgctccttgaccacctgagctgcctnnnnnnnnnnnnnnnnctctccttcctggaaggctttcttttgtgttttattttaatcccaaatgtctgaatgttttgcagtgtctaggggtttgagcccctcgtttattctccttcctttttcctcccgcttccctttccatggagtgattatgttgatgataatgtatactgcgcgttctcttcactggtttatctgcagaaatttctctgggctttttttggtgttagattcaacactgcgctaaagcggggatgttccattgaataaaagagcagtgtggttaaaaaaaaaaaaaaaaaaaaaaaaaaaaaaaaag

SEQ ID NO: 17296 - DNA, 745 bp, Macaca Fascicularis
  misc_feature (1)...(745): n = A,T,C or G
tcagggtttgaagccgtctaccagctaactagaatgtgcaccataagaatgagttttgtgaaagggtggggagcagaatannnaaggcagacggtaacaagtactccttgctggattgaacttcatctgaatggacctctacagtggttggacaaagtattaactcagatgggatccccttcagtgcgttgctcaagcatgtcataaagcttcaccaatcaagtcccatgaaaagacttaatgtaacaactcttctgtcatagtattgtgtgtggtccctatggactgtttactatccaaaagttcaagagagaaaacagcacttgaggtctcatcaattaaagcaccttgtggaatctgtttcctatatttgaatattagatgggaaaattagtgtctagaaatactctcccattaaagaggaagagaagattttaaagacttaatgatgtcttattgggcataaaattgagtgtcccaaaggtttattaataacagtagtagttatgtgtacaggtaatgtatcatgatccagtatcacagtattgtgctgtttatatacatttttagtttgcatagatgaggtgtgtgtgcgctgcttcttgatctaggcaaacctttataaagttacagtacctaatctgttattcccacttctctgttatttttgtgtgtcttttttaatatataatatatatcaagattttcaaattatttagaagcagattttcctcgtagaaaaact

SEQ ID NO: 17297 - DNA, 707 bp, Macaca Fascicularis
  misc_feature (1)...(707): n = A,T,C or G
taaagccacagccagatgccagagtgtatatgcatatctgaacagtcacctggatctgattaagaaggctcagcccgtgggtttccttactgttgatttacatgtttggccagatttccatgnnnnnnnnnnncccttagcagatatgacactaaagggtatggtcacaggatagaaactgtctcaggacctcgatgatcttgccattctctacctggccacagttcaagccattgctttggggactcgcttcattatagaagccatggaggcagcagggcactcgatcagtattcttttcctgtgtggaggcctcagcaagaatcccctttttgtgcaaatgcatgcggacgttactggcatgcctgtggtcctgtcgcaagaggtggagtctgttcttgtgggtgctgctattctgggtgcctgtgcctcaggggatttcgcttctgtacnnnnnnnnnnnnnnnnnnnnnnnnnnnntgggaaagttgtgttcccgagactacaggataaaaaatactatgataagaaataccaagtattcctgaagatggttgaacaccagaaggagtatttggcgatcatgaatgacaaatgaacagggcttgcaggtgttgatgccnnnnnnnnntgtgccattgcattaaagacctctgtcatttcatccatgttcaagacccctgaggtattgtttcatcatttctgta

SEQ ID NO: 17298 - DNA, 756 bp, Macaca Fascicularis
  misc_feature (1)...(756): n = A,T,C or G
gggaagcactggggtgccatatagaacagggaaccaagagaccgcggtcagaaggaggtggaactggggagtctgctcagggagggacgagcaaaagactgaaactagatggacagaaaaagagctgtgaggaggggagagaggagcagcagggatgtgcaggggacggggtagaagagatggttatagaggttggagagatggtgcaggactgggccatgcagggccctgggcagccaggggagctgcccctgatgactggaaagcatggagcccctggagaagaggggcagcccagctgtgtggccctggcagagcgggggcccaagggacatgaggcagcccaagaagggtcccagggtgaggcagggcagggggcatctctgccctcctcagtgagctggcgctgtgccttgtggcaccgagtgtggcagggacggcggcgagcccgtagacgcttgcagcagcaaaccaaggcaggagccggaggtggtgctggcacaggagcagggtggctggcaactgaggctcaggtcacccaggagctgagaggactgagtggtggcgaagagaggccagaaactgagcccctgctgagctttgtggcgtctgtctccctggctgaccgaatgctcactgtgaccccgctccaggatcgccaaggcctgttccctgatctccatcatttcttacaggttttcctccctcaagcacttaaacatctgaagtgaaannnntngcccctaaaggcaaaaa

SEQ ID NO: 17299 - DNA, 719 bp, Macaca Fascicularis
  misc_feature (1)...(719): n = A,T,C or G
agaagaactgtatgntnnctgaagaagtatcacatagacctagatccacacttcaacgatatcctgggacaacattcacggaaacgctgnnnnnnnnnnnnnnntagtgagaacagacnnnnnnnnnnncctgaggccctagatnnnnnnnnnnnnnnnnnnnnnnnnnnnnatcaacagagactgactgccaaagaggccatggagcacccatacttctaccctgtggtgaaggagcagtcccagccttgtgcagacaatgctgtgctttccagtggtctcacggcagcacgatgaagactggaaagcgacgggtctgttgcggttctcccacttttccataagcagaacaagaaccaaatcaaacgtcttaacgcgtatagagagatcacgttccgtgagcagacacaaaacggtggcaggtttggcgagcacgaactagaccaagcgaagggcagcccaccaccgtatatcaaacctcacttccgaatgtaaaaggctcacttgcctttggcttcctgttgacttcttcccgacccagaaagcatggggaatgtgaagggtatgcagaatgttgttggttactgttgctcccagagcccctcagctcgtcccgtggccgcctgtttttccagcaaaccacgctaactagctgaccacagactccacagtgggggaacgggggcagtatgtggcatggcggcagttacatattatta

SEQ ID NO: 17300 - DNA, 776 bp, Macaca Fascicularis
  misc_feature (1)...(776): n = A,T,C or G
agcacaaagcactgcccngnnnnccaggaccnngnttcctnnncatcttgcctcattttgcttcccatctgaagagtggaaatggggaactcccccagaggtggatattggggggcaggccccccaaactgatggacatgagagtagggcctgacaggcctnnnnnnnnnnnnnnnnnnnnnnnnnnnnnnnnnnnnnnnnnnngaggggccctgttactgtccagagtctctttttacacttcacctccttctgcagtcagactgaaatataaaaaaggtggtggtggtggtgaaggggctggtggagatgtatgaaccgatctgctatttttaatttcctctgaggatagnnnnnnnnnnnnagactcaaagaagtactgtactttcccaggttgactaagaaatgccagtggtggaggtgggtgtttgggaaaggcagggccctgaaatggcctgtctctagggctctccaagcactagccttcccagctttacccctccccatctcttctgtctaacttggggaaggggcctgggctgtgaggacagggcccccacaggggatgttttcctgagtgtagtcccggaggccttcccttcacagctctcctccagccctgggcacatagcataggttggggacacaggatcctggcctgagaattgagaggaggtggccagcccgcagaggtggggtgctggggcnngcatgatttttgccctgcgtcctttctctttggggctcctttcccctctcactcatacaaaaaatcg

SEQ ID NO: 17301 - DNA, 765 bp, Macaca Fascicularis
  misc_feature (1)...(765): n = A,T,C or G
tgactgagggggcctggatgccccctgnnnnnnnnnnnnnnnnnntgcacagcggnnnnnnnnnnnnnnnntgaatgggnnnnnnnnnnnnnnnnnnnnnnnnnnnnnnnnnnnnnnnnnttttttaatctcttgactgaatggactttgcacactttggcccagggtggccacacctctatcccggctttggtgcggggtacacaagaggggatgagctgtgtgaatcccccaagactcccatgagggagatgccatgagccgcccaaggccttcctctggcactggcgaacggggcctctgcggggcacactgnnnnnnnnnnncctgcctgccaccctnnnnnnnnnnnnnnnnnnnnncgttttttttttaatttatcctctgttgattttttcttttgctttatgggtttggcttgtttttcttgcatggtttnnnnnnnnnnnnnnnnnnnccaccccctagggtatcagcctcgccctctgctcaggctggcgtccagtgggaggggcccaagatctctgctcagagaagtgcagggggagccttcccgcccactctccctgaggactggctcagcgggggctatgggtttgctttggtgttgtttttaaaaaaagaaaatatatttttttgaaaaaacggactgcccatcccgggtcctttccctgatgggttggggcagttacctggttgctgttttaattaaaaaaaaaaaaagaaaaggaaaaaaaaaaaaaaaaaaaaaaaaaaaaaaaaaag

SEQ ID NO: 17302 - DNA, 733 bp, Macaca Fascicularis
  misc_feature (1)...(733): n = A,T,C or G
ccgacttagacctggagnnnnnnnnnnnnnnnnnnnnnnnnnnnnttggaannnnnnnnnnnnnnnnnnnnnncgtngcctcgctcatcgacaaaccaaccaatttaggaggactgtgcaggacctgtgaggtatttggggcttcggcgctcnnnnnnnnnnnnnnnnnnnnnnnnnnnnnnnaacannnnnnnnnnnnnnntgtnnccgcggaacagtggcttcctctagtggaggtaaaaccacctcacctaattgattatctgcagcagaagaaaacagaaggttataccatcattggagtggaacaatctnncaaaagtttagacctaacccaatattgctttcctgagaaatctctactcttgttgggaaatgaacgtgagggaattcctgcaaatctgatccagcagttggacgtttgtgtgnnnnnnnnnnnnnnnngcattatccgctcccnnnnnnnnnnnnnnnnnnnnnnnnnnnnnnnnnnnnagtacaccaggcagcagttgctctcgcacggagacgccaagccatgatgtgccttcctcagtgaagcgctggtnnngttcaaacctttttttaaaaaactatttggactaaagaaacagattatgaaatttactgtgataatttgtatttcttttttcttgcaatttaatgcctcacctttatggtttgccttaaacataataccatatattttcccctttaataaacactttttgtt

SEQ ID NO: 17303 - DNA, 717 bp, Macaca Fascicularis
  misc_feature (1)...(717): n = A,T,C or G
tggattcaggtgnnnnnnncacccacaacgtccccatctatgaaggctatgccctgccccatgnnnnnnnnnnnnnnnacctggctggccgtgacctcactgactacctcatgaagatcctcacagagagaggctattcctttgtgaccacagctgagagagaaattgtgcgagacatcaaggagaagctgtgctatgtggccctggattttgagaatgannnnnnnnnnnnagcttcctcttcctctctggagaannnnnnnnnnnnnncagatgggcaagttatcaccatcggcannnnnnnnntccgctgccctgagaccctnnnnnnnnnnnnnnnnnnnnnnnnnnnnnnnnnnnnnnnnnnnnnnnnnnnnnacaattnnnnnnnnnnnnnnnnnnnnnnnnnnnnnaaggacttatatgccaacaatgtcctctctgggggcaccaccatgtacnnnnnnnnnnnnnnnnnnnnnnnnnnnnnnnnnnnnnnnnnnnnnnnnnnnnnnnnnnnnnnnnnnnnnnnnnnnnnnnnnnagcggaagtactcagtctggattgggggctctatcctcgcctctctctccaccttccagcagatgtggatcagcaagcctgagtatgatgaggcaggaccctccattgtccacaggannnnnnnnnnnnnnnnnnnnnnnnnnnncaaggacccctcgagnnnnnnnnnnnnac

SEQ ID NO: 17304 - DNA, 915 bp, Macaca Fascicularis
  misc_feature (1)...(915): n = A,T,C or G
acagtcaaagcaaaggaatgatgggttcttgcctatcttgctttggtccttatttnnnaagccttcctcttttagccaaggctacagggcatttgtcttccctggtggctctctcccctttggagagagcaggtggcagagcaagctagctaggtcctccttgggctttgaatgtgggagcacctagtgccccaggccttgcactgtcctgcccaaggagtatttcgtgggtggatctcccatactcctcagggttctgaggtccttgtatttagggtatggtgtaaaaacttacatgtacacattttgttacatcacttaagattactggagcttcactggttaaatatagggtcaccagagaaagttcctttccccagttgatatcttgaggctgttgagaaacttaggacagaagcctacctcatcccaggcctctgtccttgaaggcctgcccctctgtgcatagctctggctttgggtcttgttcatagtgctgttcaagcataatggaatagtctcaggtggggacacctcttgccagctccaggaaggctttctcaccagtctgggatgtggtgggaaatgagttgagaccagggacttgggagttgggtcagagttgagcctggacttaaccaattaattcccttgcctttcagcccaagatagctacatgtctttacttgctgtgtaagttatccttttgtcctgggggcgcctgattgatcctgtctcttcacccttcattctttcaacaaacatgccatctatctcccaggacatttattcctttctattcaaggccagttaggaatgcaattattttttctcagttcaatacagacttgttggacccaaggtaccctttctctttttaaaaactttttatcatgaaaactttcaaatacaaaa

SEQ ID NO: 17305 - DNA, 723 bp, Macaca Fascicularis
  misc_feature (1)...(723): n = A,T,C or G
caggcctcccactnnntccagcnnnnnnnnnnnnnnnngtggcaccgccctccttgctgggggtagatgggaccctactactgaactccggttttgatctcgtgacttttagaaaaacacagggactcgtgggagcaagtgaggctcccaggaccctcaccctctgggacaggccctcccccgtgctcttgtctccagaaggacagcggccctcccatcactggaagtctgcagtgggggttgctgggggtggagagaacactaagagaggtgaacgtgtgtgtgagtgtgcacgcgtgcgagtgtgcatgtgcgtgtgtgcaaagatccagccaccccgtcctccagcctgcnnnnnnnnnnnnnnngccttgcctgacacccagccccctctccccctgagccattgtgggggtcgatcatgaatgtccgaagagtggccttttcccgtagccctgcaccccctttctgtggctggatgggaagacagggtcagggccccccaccctctccagcccctgcagcaaatgactactgcacctggacagcctcctcttttctagaagtctatttatattgtcgttttataacactctagcccctgcccctattgggggacagatggtccctgtcnnnnnnnnnnnnnnnnnnnnnnnnnnnnnnnnnnnnnnnnnnnnnnnnnnnnnnnnnnnnagccccggtccccccacccctgcctcgagt

SEQ ID NO: 17306 - DNA, 785 bp, Macaca Fascicularis
  misc_feature (1)...(785): n = A,T,C or G
ttgtgtgataccagcccnnnnccagacaatagnnnttgctgacaccccagcctacttccccgatcctgggctccctcttgataacttttgacattttccagctgtcaggcgtcactggggctagtccagcagcgacctatatggggcccacccccattcctgctcaagcacgggcacctaccacatggtttctgctgctcagcctgcctgcaactcacctcaaaggcaaaccagcctgcctccatgatgactgcagcagacctcctcgggtggaccgatgcccctcatctcccactttcacacctaaccctgactccttcaccaagaagacgggagtcggcagccgggagttcccatggcacctctctctcttcgtggctccctgcttcccccttccctctttccaaggaagggtcaacctattctctctcaaagccaacccctaggccaatggcctggatctcctcccctctcccttctttaaacgagcttgcttccctcttgccaagtttggggcaaggctaagaaatttcagccacagaaacaactctattatctggtgactttgggtaatgtgaatcagtgcctgaggacctttgctgtgtccttggtacaaaaccatccacttgacctaactacctcccctggccgcgctctcgctcttctcttcttcgccaagccaattatcaccctctcccactctcttcttctccctgccccctggagggcactgcgtttagttgtgcaaatgtattttctatgcgtgtttccagcagtggcattaa

SEQ ID NO: 17307 - DNA, 954 bp, Macaca Fascicularis
  misc_feature (1)...(954): n = A,T,C or G
tcaatgtcaagcattgccaagtaattttatattaacaccaaatgttaaagaataggatacattaaagttttaataacaatattaaattacaagattggaatctcctctttgtattctttccttagcatttacatatttggctttgaaaaatatggaaccgatacctaaagcctttttttattcacttcccactcagtttaattgtttttgtcttattcaaccaatatggaagcaaatttatttaaaagccagtttgtttgtgaaaatacctaaaaatatttttaattttaaatgttttttttttccttttttttataaaacatgtcacatcttgatgcagttgatgtcaagtgtgcttaagtcattatgaatcaagagactaacaatagtggctgcagaaacaggtttgttgtctgtacaaagacttcaggtaaattatggtacttccatgttagnnnnnnnnnnnnnnnnnnnnnnnnnnnnnnnnnnnnnnnnnnnnnnnnnngtgttttaattaatcattccttacaattcaagatgaactccacatatttaagaattcttggctgaaagaaaagtcttcaagatactggatgcctctcaccactttgacaataaacacacaagaaaaccattgtgtaaggcactcaaaaggttcttatcaatcacgagagatcagtcacactgacattcattcccatgccaggactcacgtaagggacagcatgcactgctttgggaaattctggagtcatnnnnnnnnnnnnnnnnnnnnnnnnnnnnnnnnnnnncagccttgccttgttcctcatggcatcattcaaggtcatcttaaatgagagaggagggaaagaaagaaaaagaaatcatatgttacggtttnnnnnnnnnnnnnnnggaaagacagggttgttagtctnnnnattcataatgacttaagcacactgacatcaa

SEQ ID NO: 17308 - DNA, 744 bp, Macaca Fascicularis
  misc_feature (1)...(744): n = A,T,C or G
taatgtaatcacgannnagaggaaaggctatgaagatgatgattacgtctcaaagaagtccaaacatgaggaggtatgttnactccaaagatgaactctaagtcatttttgttacacattctggtgtgattatactattaagatttgttctccaagagtataagcattatagagttgtgggttttttcattttttgcatacttccttacgtacagtactgttgtccattattaaagggatttttctctctcctgtctttgcttgatgaaaaatccttcttgtgttcatagaaagcagaagcaatatgcatacatactacatttttgctttatttcttattttccaaggatttttcccttacccccttttaaaaacaaattttctgtcaagtcaggtaagtgaataatcagaggcagaaggtcacagttgtaacctttattcctcattggagtagtctggtgagaccatgccaacattactaacagtgaactattacaaaatttcctggtttatcttttgtaatccacatgggtaaaaggaggagaacattttcctaaagggaggtaagaggtaaacaatactggttatgcttcagtgttatccttaccacactttttttccttcttaggaagaatggactgacgacnnnnnnnnnnnnnnnctctaaccatttgaagttgatttctcaatgctaactaatcaagagaagtaggaagcatatcaagcgtttaactttattaaaaa

SEQ ID NO: 17309 - DNA, 893 bp, Macaca Fascicularis
  misc_feature (1)...(893): n = A,T,C or G
tcaggcacagagcgcgagttccggggcctgggagactgcctggtgaagatcaccaagtctgacggcatccggggcctgtaccagggcttcagcgtctccgtgcagggcatcatcatctaccgggccgcctacttcggcgtgtacgatacggccaagggcatgctccccgaccccaagaacacgcacatcgtggtgagctggatgatcgcgcagaccgtgacggccgtggccggcgtggtctcctacccnnnnnacacggtccngcggaggatgatgatgcagtctgggcgcaaaggagctgacatcatgtacacgggcaccgtcgactgctggaggaagatcttcagagacgaggggggcaaggccttcttcaagggtgcctggtccaacgtccttcggggcatggggggtgccttcgtgctggtcctgtacgacgagctcaagaaggtgatctaagggccgcggcctcctccccacacacaccaagggaaccaagagaaccacgtagaatcctcaaccgtgcggaccatcaaccttcgagaaattccatttgtctttttcccagccggaccctgcccgtagacggcggccggggaaggctgtagagaaggggcgcgacgcgatcccgtcgtcggcccccgattccatgtcttgatcacggggtgggagggaaccatggcgtccccgcgggcccatgggcgaggcactccaacactgagacctagagtccagacgcttgtaggacccgagtcgtgttttaagtatttatttaaaacaaaagaatcatgtttcccatttgtacctcagcgctagcccctgtttttgcacggccgagtactagcaagtatgttctgtgttgggcatcctgctgcaaaacaataaaccgaggacac

SEQ ID NO: 17310 - DNA, 741 bp, Macaca Fascicularis
  misc_feature (1)...(741): n = A,T,C or G
cagctnncgaacaaccccgtgaagggcaggacctgcaaggagagggactcagagggctgctgggtgacgtacatgctggagcagcaggacgggtgggatcactacatcatctatgtggatgagagccgagagtgcgtggcgggccccaacatcgccgccatcgtcgggggcactgtggcaggcatcgtgctgatcggcgtcctcctgctggtcatctggaaggccctgacccacctgagcgacctccgggagtacaggcgttttgagaaggagaagctcaagtcccagtggaacaacgataatccccttttcaagagcgccannnnnnnnnnnnnnnnncccaagtttgctgagagttaggagcacttggtgaagacaaggccatcgggcccaccacgtctgccccgtcacgcggccgagacatggcttgcaacagctctcgaggatgtcaccaattaaccagaaatccagttattttctgccctcaaaatgacagccatggccagccaggtgcttcgaggggctcatcaggggggacagccctgctctgacctgcacagtccttgcatggagacgtgagaagggagggcttgaggctgctgaggtgaggagcgtgtctcctgtgcaaggcaggacagtccggttaaaggtggtgccaatttatttacatttaaacttgtcagggtataaaatgacatcccattcattaaattgttaatcaatcatgtgtatagaaaaaaa

SEQ ID NO: 17311 - DNA, 671 bp, Macaca Fascicularis
  misc_feature (1)...(671): n = A,T,C or G
agtccagcaagccctggatggnnnntgagaggagcccacgacactgcagccgcacccagatgcccctttctgggttattctgggggctgcaatttgcccctgtgctgcccagcgggcgcccagctcctgacactgctggagaggccccagccgcttggcgatgccggccgagctctgcacagtcccagcggtgggacctacggaggcatggtctgcgctctgcatcctctgaagccagctgagcaggaggcctaggagggtcctctgaggctccagacctgagacagacgggctgctttcccgaagctcccacggtcccatctgcttcaggccccggccttggcctgtgttctccctggccacctgggtcggatgctcagatgctggggcctggttcccggagaaatgtgccttctatctccctctgcagggaccgcccctgtctctcagagccaggtctctccctcctcctccaggaagccttcccctaccccttgtcccccctccctcccagagcacctgctgtctgggtagctcactcagcacttgctgcggccttcccttctacctagcgggacagggcttccccaggggctgtcctggaggnnnnnnnnnnnnnnnnnnnnnnnagggtccatgtgcagtttcttccaatctgtacctgagaggtt

SEQ ID NO: 17312 - DNA, 699 bp, Macaca Fascicularis
  misc_feature (1)...(699): n = A,T,C or G
ccagcggtgttcactttcacggcccagatgtttccagagcgacacctggagacagcagaaatactgggagctgatactcgcactaccaggatccaagatgcagggctggtgttagcagacacgctccgcaaattcttattnnnnnnnnnnnnnnnnnnnnnnnnnnnnnnnnnnnnnnactccannnnnnnnnnnnnnnnnnnnnnnnnnnnnnnnnnnnnnnaggaaagggtcaccaagcttgcaccccgtccccagtcagaagaggatctggctgccctgtttgaagcttcaatgaaactgtattagttgtcattnnnnnnnnnnnnnnnnnnnnnnnnnnnnntagtgctgagagcaagaactgatttagctagggctttgtcttnnnnnnnnnnnnnnnnnnnnnntgttaccagtataggtgggatataaatnnnnnnnnnnnnaaattccccaaagctcagagtccagctccttccataaaacaggctggacaaatgaccacnnnnnnnnnnnnnnnnnnnnnncttcgggggtcagtgttcctgtaccaaaccccacacagaatactctgcccctgcttcatgagcaaatgagcaaaaactcaaaagtgtaaattatatttcctatgcctagtaattcactgcatgtctagaaatttgtctgataggaacattagcaccagtacatacagaa

SEQ ID NO: 17313 - DNA, 767 bp, Macaca Fascicularis
  misc_feature (1)...(767): n = A,T,C or G
tcgcaagtctgggaagggcttttacatctatcaggagggtgtgaagaggaaggatttgaattctgacatggatagtattttagcgagtctgaagctgcctcctaagtctgaagtctcctcagatgaagacatccagtnnnnnnnnnnnnnnnnnnttgtgaatgaggcagtcatgtgcctgcaagaggggatcttggccacacctgcggagggagacatcggagccgtctttgggcttggcttcccaccttgtcttggagnnnnnnnnnnnnnnnnnnnnnnnnnnnnnnnnnnnnnnnnnnnnnnnnnnnnnnnnaagtatgaagctgcctatggaaaacagttcaccccatgccagctgctagctgaccatgctaacagccccaacaagaagttctnnnnnnnnnnnnnnnnnnnnnnnnnnnnnnnnnnnnnnnnnnnnnnnnnnnnnnnnnnnnnnnnnnnnncaacagagtggtctagatttatcagagtaacgagaaggaagacaaactctggcactggggttgctccctgatcaaagtgccctcagccaagaccatctctccctcctggtgaagtgtgactgtgaattagtttgcacttcctgttgcaagctagagcccactgtgctcattgtataagccctgaggcctagagtggcagccaggagccatctggagccacctctctgcctgttcctcccaagaggccagggtggccaggggtggtgagtggtgagggtaattctgcacccagccaaacac

SEQ ID NO: 17314 - DNA, 746 bp, Macaca Fascicularis
  misc_feature (1)...(746): n = A,T,C or G
cgacatgcaggggacngggaggacaaccacatggatggggacaagggcgcccgcaggtggggccagggcctggcatacagtggggaaggccaaggccacaaggcttgggggtggccaaggagtagggnnnnnnnnnnnnnnnnnnnnnnnnccttcccaaaggggccggaaaccaggcagcggcggccggaagaacggtggaatgggaacgaaaagcaaggacaagaagctgtccgggacagactcggagcaggaggtgagtgaggccccagctcttcgccctgcccttgatgatgggacagacagnnnnnnnnnnnnnnnnnnnnnnnnnnngccagcgctcatccttttctgcgacctctttgcacccagtttatttgtaaactggggctgtgagggtctactgctgtccctgccactnnnnnnnnnnnnnnngtgtcttttcttgtcaactctgacctctgtggtgctcacaggatgaatctgaggacacagatactgatggggaagaggagacatcacaacccccaccccaggccagccacccccctgcccactttcagagccccccnnnnnnnnnnnnnnnnnnngcctctactctgcctttgcccccagcgcccccgggccccnnnnnnnnnnnnnnnnnnnnnnnnnnnnnnnnnnnctcctagcgccttctgccccccaggccatagccccttttagttggttttagttgctctggggggaagatagaaggtagagct

SEQ ID NO: 17315 - DNA, 635 bp, Macaca Fascicularis
cgcggttatggacaccaagaagaaaaaagatgtttccagccccggcgggagcggcggcaagaaaaatgccagccagaagaggcgttctctgcgcgtgcacattccgccccggccgcgacggccgcccgggaggacattggcgactcggatctatctgaggcttcactttgtccagccagaggggcggcgggccgggtggtgcttcctcccttcgggacggcgcccaggggggcactgccccgtgtttgctgagccacccttcttttggacgccccgctaaggtcctcctgtgtaaatttcggcccacacgtgtctaacgcttggatgaagaaggtggagtccaggggcggggttccagacacctgatgccaaataccccacacggcccctgggccagccctccccggctgggaagctctggggcaggaaacctggacccccggctgctgtgtggcccccacggtggtgacccgattatgcgggaataagtgctctatttgaaaatgaaacattcttgtttacatctctcatgtaagacatttaaaaccgtgtttgaattacacgttagatgttgctgccacagacctcttaaacagtgatcactggagctaaccgtgtaactaccgtttctccca

SEQ ID NO: 17316 - DNA, 947 bp, Macaca Fascicularis
  misc_feature (1)...(947): n = A,T,C or G
ggccaacgtgatccgttacntnnncacccaagcnnncaacttcgnnntcaaggacaagtacaagcagctcttcttagggggtgtggatcggcataagcagttctggcgctactttgctggtaacctggcatctggtggggccgctggggccacctccctttgctttgtctacacgctggactttgctaggaccaggttggctgccgacgtgggcaagggtgccgcccagcgtgagttccatggtctgggcgactgtnnnnnnnnnnnnnncaagtctgatggcctgaggggtctctaccaaggtttcaacgtctctgtccaaggcatcattatgtacagagctgcctacttcggagtctatgatactgccaaggggatgctgcctgaccccaagaacgtgcacatttttgtgagctggatgattgcccagagtgtgacggcagtcgcagggctggtgtcctaccccttcgacactgttcgtcgtaggnnnnnnnnnnnnnnnnnnnngaaaggggctgatattatgtacacggggacagttgactgctggaggaagattgcaaaagatgaaggagccaaggcnnnnnnnnnnnnnnnnnnnnnnnnnnnnnnnnnnnnnnnnnnnnnnnnctttgtattggtgttgtatgatgagatcaaaaagtatgtctaatgtaattaaaacacaagttcactgatttacagtgaccttgatccacaagttcacagatccattgtgtggtttaatagactattcctaggagaagtaaaaagatctgggataaaaccagactgaaaggaatacctcagaaaagttgcttcattgagtgttcattaaaccacagatgtattttgtatttattttacatttaaattcccacagcaaatagaaaataatttatcatacttgtacaattaactgaagaagtgataagaaataactgaat

SEQ ID NO: 17317 - DNA, 734 bp, Macaca Fascicularis
  misc_feature (1)...(734): n = A,T,C or G
gtgtgannnnnnnnnnnnnnnnncaaaaattcacntnnnagaatgcctctcagcctcatgtgctggtcctctgctcctcctagctccccagggatgtcatgtgctggtcctctgctcctcctagctccccagggatgtcatgtgctggtcctctgtgcctcctagctccccaggaatgttgaggacccagcttggcttggcagctgagaagcagtgaccaggatatggattttggtgacctgtgtggtggtttgagctgctttctgtgtttgtgaggactgccgccatttcctaaaggaaatgccccggcgaggacnnnnnnnnnnnnnnnnnnnnnnnnnnnnctccggctttgctacctgcttctgaagccccgctaaaagtaactcatccaagattcctttgtagttaaagggtccagttccgactggagcctctggagagctgggctttgctgttttcaccttttgttcctacctgaannnnnnnnnnnnnnnnggaggggctgtgaacacagaagcctcagcacaaggatgacagagctggaggacacannnnnnnnnnnnnnnnncctcactggctccccagactgtgtctgagaaactaaatcccctgcttgcttgagtccggtttgttagatctctgttcctggcagagtgtgttctgaccccccacctcatggtatcgatgatgaggccacgtgagtcaagacacgagtgtgcgaggctgtaaag

SEQ ID NO: 17318 - DNA, 751 bp, Macaca Fascicularis
  misc_feature (1)...(751): n = A,T,C or G
caaaaggagataaacttcctgaacctcaaggagtctcacaactcaagaaggaaacgggaaattactgaaaaacagatagatgatagcagaaaattttctttatttgctgaaagaaaataccagactcttaactgtagcgtgaatgtgaactgtgtgaacatcagatgcccactgcgagggctggacagcaaggcgtctcttattttgcgctcgaggttatggaacagcacatttctagaggaatattccaannnnnnnnnnnnnnnnnnnntcgtgcgagccttnnnnnnnnnnnnnnnnnnnnnnnnnnntatcaagctnnnnnnnnnnnnnnnnnnnnnnnntgtgactgtgtttccctcaaagactgtagctcagtattcaggagtaccttggtggatcatcctagtggctgttctcgctgggattttgatgcttgctttgttagtgtttatactatggaagtgtggtttcttcaagagaaataagaaagatcattatgatgccacatatcacannnnnnnnnnncnnnnnnnnnnnnnnnnnnaagagaggcttacttctgatgcatagtattgatctacttctgtaattgtgtggattcttcaaacgctctaggtacgatgacagtgttccccgataccatgctgtaaggatccggaaagaagagcgagagatcaaagatgaaaagtatattgataaccttgaaaaaaaacagtggatcacaaagtgaacgaaaatgaaagctact

SEQ ID NO: 17319 - DNA, 759 bp, Macaca Fascicularis
  misc_feature (1)...(759): n = A,T,C or G
tttgtgaattcaaagacagtaataagaatgggatcnnnngcgttnnggagaagcaactaaaagaatttaattccagaatgnnctggggcaaaaagaagactcattccttgctgctagacaccattcatagagaaggtgtatatttttatctttcagaatgttggctaccagggtatttagcctagttggcaagcgagcaatttccacctctgtgtgtgtacgagcacatgaaagtgttgtgaagagcgaagactttatgctcccagcttatgtggatcggcgtgactatcccttgccggacgtggcccatgtcaagcacctgtctgccagccagaaggccttgaaggaaaaagagaaggcgtcctggagcagcctctccatggatgagaaagtcgnnnnnnnnnnnnnnnngttcaaggagagctttgccgagatgaacaggcgctcaaatgagtggaagacggttgtgggcactgccatgttcttcatcggcatcaccgcgctcgttgtcatgtgggagaagctctatgtgtacggccccctcccgcaaacctttgacaaagagtgggtggccatgcagaccaagagnnnnnnnnnnnnnnnnnnnnnnnncatccagggcttagcctccaagtgggactacgaaaagaacgagtggaagaagtgagtgaagctggcctgcgcctgcctctgtcacctccatgcaactccatgcctatttactggaaannntgttatgccannncagtactactgcta

SEQ ID NO: 17320 - DNA, 380 bp, Macaca Fascicularis
ctcagaggagatggccagtgatgagctgaaggagatccgtaaggccatgaccaaggaggccatccgagagcaccagatggcccgtactggcggcacgcagacagacctgttcacctgcggcaagtgcagaaagaagaactgcacctacacgcaggtgcagacccgcagctctgatgaacccatgaccacctttgttgtctgtaacgagtgtggaaaccgctggaagttctgctgagccctcgtgtagatgtgctgcagccttgggccgtggccagtgctggcctcccccgcccacgtcctccgttgatacagcttctctggagaccctagaaggcggcatgtcctgccctcaacctgcctgcctggattgcacctttctg

SEQ ID NO: 17321 - DNA, 1108 bp, Macaca Fascicularis
  misc_feature (1)...(1108): n = A,T,C or G
tagcaannnnnnnnnnnnnnnnnnntgcccaactgttataggtgttggataaagcaatggttatttagggaactgcttgacacaggaacggtaaatttctgtgggagaattcttacgtgttctctttgctttaagtgtgactggcagttttccattggtttatctgtgaaatagtttaaagccaagtttatatacaattatatcagtcctctttcaaaggtagccatcatgcatctggtagggggaaaatgttgtgtattttattacatctttcacattggctatttaaagacaaagacaaattctgtctcttgagagaatattagctttactgttgttatggcttaatgacactggctagtatcaattgaaggatgtacatttccaaattcacaaattgtgtttgatatccaaagctgaatacattctgctttcatcttggtcacatacaattatttttacagttctaccaagggagttaggctattcacaaccactcattcaaaagttgaaattaatcatagatgtagataaactcagaaatttaattcatgtttcttaaatgggctattttgtcttttttgtaattagggtggtgtttagtctattagccacaaaattgggaaaggagtagaaaaagtagtaactgacaacttgnnnnnnnnnnnnnnnataatatgagaatcagatcatttcaaaactcatttcctatgtaactgcattgagaactgcatgtatttcgctgatgtatgtgtttttctgacaattacatttgtgaatggttccattatctttcctgtgctttttccagacacttttttgaatggatgatgttttgtgaagtatactgtattttttacctttttccttcctaatcactgacacaaaaagtannnnnnnnnnnnnnnnnnnnnnnnnnnnnnnnnnnnnnnnnnnnnnnnnnnnnnnnnngtaccttgtttttccactnnngctaccacannnntattatcgtgcaaatgctgtatttttctttggcggagataaagttttcttgagttttgttttaaaattaaagctaaagtatctgtattgcattaaaaaaaaaaaaaaaaaaaaaaaaaaaagg

SEQ ID NO: 17322 - DNA, 775 bp, Macaca Fascicularis
  misc_feature (1)...(775): n = A,T,C or G
gacagtacaggaagacttgangncgtnnnnnnnnnnnnnnnnnnnnnngtagannnnnccacccagtggagctgttccagttactgggataccacctcatgttgttaaagtaccagcttcacagccccgtccagagtctaagcctgaatctcagattccaccacagagacctcaaagggatcaaagagtgcgagaacagcgaataaatattcctccccaaaggggacccagaccaatccgtgaggctggtgagcaaggtgacattgaaccccgaagnnnnnnnnnnnnnnnngacagtcaccaactcttcattggcaacctgcctcatgaagtggacaaatcagagcttaaagatttctttcaaaattatgggaacgtggtggagttgcgnnnnnnnnnnnnnnnnaaattacccaattttggttttgttgtgtttgatgattctgagcctgttcagaaggnnnnnnnnnnnnnnnntatcatgttcagaggtgaggtccgtctgaatgtcgaagagaagaagactcgagctgccagggaaggcgaccgacgagataatcgccttcggggacctggaggccctcgaggtgggctgggtggtggaatgagaggccctccccgtggaggcatggtgcagaaaccaggatttggagtgggaagggggcttgcgccacggcagtgaatcttcatggatcttcacgcagtcatacaaaccctagttccaacagaatggtgannnnnnnnnnnnnnnnnnnnnnncttggagtatgacccc

SEQ ID NO: 17323 - DNA, 677 bp, Macaca Fascicularis
  misc_feature (1)...(677): n = A,T,C or G
gcagtgggctcannntgaagannngcagtcnnnnnngctcagggtcgctgatgctgtttcggtgaaagggatttataaacagatgcctggttgctttaatttcctccggaaaaagcttttctttaaaacatcataaggccagggcccctcaccctnnnnnnnnnnnnnnnccaaagccttcctgccccaggcctgaaagtggctgagacctggactttcctgcaactcaaggactttgcagccggcacagggtctgcnnnnnnnnnnnnnnnnncagtcaggctcttagcagnnnnnnnnnnnntgacaagggctgaacagtggaggaagagggacagatgaatgccatggattgtgtgtggcctcttgagnnnnnnnnnnnnnnnnnnnnnnnnnnntcccgtgatccctgtgttctctctagggcagggattaacctctgtactactgacctgtggggtcaggtcaccctttgctgtgaggctgtcctgnnnnnnnnnnnntgtccctcgcctnnnnnnnnnnnnnnnnnnnnnnnnnnnnnnnnnnnacaaaaatgttctcaggtgttgccaaatatgtcctggggtataaaactttactcacctgaccaccactggtctgtagggatttttggctacacacaaaccagtatctctcatagatcagcaagctgg

SEQ ID NO: 17324 - DNA, 785 bp, Macaca Fascicularis
  misc_feature (1)...(785): n = A,T,C or G
acagctnnnnnnnnnnnngagagaactgcgtggtcatggtgtggcatgatcagggacaatgnnnnnnnnnnnnnngcaactaccacctgtcctacacctgcaagatggggctggtgtcctgtgggccaccaccggagctgcccctggctcaagtgtttggccgcccacggctgcgctatgaggtggacacagcgcttcgctaccggtgcnnnnnnnnnnnnnnnnnncgcaatctgccactgatccgatgccaagagaacggccgttgggagaccccccagatctcctgtgtgcccagaagacctgtgagtgacaggaggaggcaggcccgagctctgcacccagagaaggacccagaaggacgtcaggggaggctgctgggacgctggaaggcgctattgatcccctcttccagccccacgccaggtccttagggggcaaggccttgaacactgccggccacagcactgccctgtcactcaaattctccctcataccctgtgctcctgccaccacaggatgtcacaacatgactagagtccaggtgatagttcctgaaggggcttctgggaaatacctgggaggcttcagcccagcccaggccctctccccctcccctgggcaccagattttccatcagggctggggtaaatccctaagtgcctcaactgccctctgcctggcagccatcctctcccctccatttctctggggagcactgtgcccactcattctggattttccaagggaatgggcttgcaggatgaactgtcnnnaaaaccaac

SEQ ID NO: 17325 - DNA, 714 bp, Macaca Fascicularis
  misc_feature (1)...(714): n = A,T,C or G
gctcgnnnnntggtggtgaactgctgcactgaattcattcaccttatatcttnnnnnnncaatgagatttgtaacaannnnnnnnnnnnnnnnnnnnnnncagaacatgtcatacaagcactagaaagtttgggatttggctcctacatcagtgaagtaaaagaagtcttgcaagagtgtaaaacagtagcattaaaaagaagaaaggccagttctcgtttggaaaaccttggcattcctgaagaagagttattgagacagcagcaagaattatttgcaaaagctagacagcaacaagcagaattggcccaacaggaatggnnnnnnnnnnnnnnnnnnnnnnnnnnnnnccagcttgctgctgcctcagccagnnnnnnnnnnnnnncgggatcttctcaggatgaagaagatgatgatgatatctgaaattcaccagctgagtttctatttcttctataaatgtttttccctgcacaacaaaaacggtgaaagaaatgcttatctgtaattttgtatgcatcttggtggacttgtcattggtattctagggatgtctgctattaagtttcatctattgtgtgctatacatgtaaaaactgtctctttgaactattgaaaattnnnnnnnnnnnnnnntatcaattttgaatttttaatggtgtttatgaaattttagatagcagcaagtccttcatttgatcaataaacagt

SEQ ID NO: 17326 - DNA, 694 bp, Macaca Fascicularis
  misc_feature (1)...(694): n = A,T,C or G
aaacagatgatgtgcccatcnncctngtggcaacaagagcgacctggtgcgctctcgtgaggtctcagtggatgaggnnnnnnnnnnnnnnnnnnnnnnnnnnnnnnnnnnnnnnnnnnnnnnnnnnnnnnnnnnnnnnnnnnnnnnnnnnnnnnnnnnnnnnnnnnnnnnnnnnnnnnnnnnnnnnnnnnnnncaaagaggccaaannnnnnncggcaagcaggtacccggaggcgagagagccttggcaaaaaggcgaagcgcttcctgggccgcatcgtagctcgtaacagccggaagatggcctttcgcgccaagtccaagtcctgccacgacctctcggttctctaggtcccacccgctctcagtatggtgggagacggatggacgggttggtgggctggcccagccaactgccccaggagcctcagggctggctcagactctgggtcccttggagctgccagccgggtacccccaacctcatggtcatggacagacagacagtgttgcccagtgaggccaggggccagtgagggctgggcccacagagatgcatgcgcaggctgatctgcgtcccaagcagccggagcgcagccgcggggcaggcctgtgtgccgggagaggactttgacttttttcacaacccgggtgtgcctgccctggagggaggctgttcagtgccgtggctat

SEQ ID NO: 17327 - DNA, 762 bp, Macaca Fascicularis
  misc_feature (1)...(762): n = A,T,C or G
gtcattttcctggacgtgttcctgcctcgagtcacagaattagcgctcacagccagtgacagacaaactaaagttgcagcctgtgaacttttacatagcatggttatgtttatgttgggcaaagccacgcagatgccagaagggggacagggagccccacccatgtaccagctctataagcggacgtttcctgtgctgcttcgacttgcatgtgatgttgatcaggtgacaaggcagctgtacgagccactagttatgcagctgattcactggttcactaacaataagaaatttgaaagtcaggatactgtcgccttactagaagctatattggatggaattgtggaccctgttgacagtactttaagagatttttgtggtcggtgtattcgagaattccttaaatggtccattaagcaaacaacaccacagcagcaggagaagagtccagtaaacaccaaatcgcttttcaagcgactttacagccttgcgcttcaccctaatgctttcaagaggctgggagcatcactcgcctttaataatatctacagggaattcagggaagaagagtctctggtggaacagtttgtgtttgaagccttggtgatatacatggagagtctggccttagcacatgcagatgagaagtccttaggtacatttcgcttcagtgttctgtctgccttacaggtctgaaaagtttccccaatgnaggagttaaggctcgtgtgattctcttataaggcttccccccctccaaga

SEQ ID NO: 17328 - DNA, 765 bp, Macaca Fascicularis
taaaagatcaaaagatagatctcctaggaacagattggagataggagatgaaaagttgggaggatgtctttattctaatgtgagggtagggaaatgtggataacattactgtggtgagagaggcatcgttctttagttggagttctcattcttattctccagtactgactggagcatactttttcactgccaggtactgaatgcagaggctcagccaagtatatatgtgggaagtgcatgcatttcgtttaatagcaagcatagctggattaagacaaaattgttggtttggaaaggggttaaagccttaagtgaacaaatctagctaacagtgaatgaactaggtaattaacttgcatatttttaatttcctttggttaaagatcccccatacttctctattcggagaagtatgattacttcagtgttagttttcctaatttttttttttcctatttgtcctgtgtctctttgttgcaagttagaaatctgtgggttctacatagggcagctctttgtgaaagtgggttattccactggagaaaggggatggaaaatcagaaccaatgtatttcttgccccacggaacactattcctataagatagctgaaagaagctgctgtgaggagctcagctccaaacacaggatcagcaccttgtacaggaattcccatgaattatgacttctcattctgttttatcagagtgcatatatgtcctatttcaggaaaagtaaaacagtccatttacaaaagaaagtcaat

SEQ ID NO: 17329 - DNA, 786 bp, Macaca Fascicularis
  misc_feature (1)...(786): n = A,T,C or G
acccccatggcacctggcagctannncatctccatcaagtatggtggcccctatcacattgggggcagccccttcaaggccaaagtcacaggcccccgtctcgtcagcaaccacagcctccacgagacatcatcagtatttgtagactctctgaccaaggccacctgcgctcctcagcatggggctccgggtcctgggcctgctgacgccgccaaggtggtggccaagggcctgggactgagcaaggcctacataggccagaagagcagcttcacggtagactgcagcaaagcaggcaacaacatgctgctggtgggggttcatggcccaaggaccccctgcgaggagatcctggtgaagcacgtgggcagccggctctacagcgtgtcctacctgctcaaggacaagggggagtacacactggtggtcaagtggggcgacgagcacatcccaggcagcccctaccgcgttgtggtgccctgagtctggggtcagtgccagccggcagcccccaagcctgccccactatccaagcagccccgccctcctcccctcagccctggcccctgggccaccttggccgcctgcctgtcactgcagccgcccctgccctgtgccgtgctgcgctcacctgcctccccagccagccgctgacctctcggctttcacttgggcagagggagccatttggtggcgctgcttgtcttctttggttctgggaggggtgagggatgggggtcctgtacacgaccacccactacttctctctccagccaagaggaataa

SEQ ID NO: 17330 - DNA, 765 bp, Macaca Fascicularis
  misc_feature (1)...(765): n = A,T,C or G
ggaagagctgagaccttgcnnngagactcctcagcacccctccagttttgnnngagaaggggcagatattcccagagcagacagctcttcccttctctgcctcacctannnnnnnnnnnnnnncctctttcttttctctgtctactccttatcccttggtttagaggaacccaagatgtggcctttagcaagactggccaatgtccaaacccactcatgactgcatgacagagcccagccatgtgcctttacacttcgctgttgtcacatctcagggaatcgaacctcaggcacaccttgcagaaggcaaggccttgccctgcccaacctctgtgatcaaccgagcatcttccactggaacgtnnnnnnnnnnnnnnnncttggagaagtggcatcagtcaacagagacgagcagggaaggagacatccagctcacccttcatcatggactgaggttcccactctgggcaaaacccctcacactgcaagggattgtagataacactgacttttttgttttaaccaataactagtttcttataatgatttttttactaatgatacttacaagtttctagctctcacagatatatagaataagggtttttgcataataagcaggttgctatttaggttaacaatattacttcaggttttttagttggaaaaacaattcctgtaaccttctattttctataattgtagtaattgctctacagattatgactatatattggccacactggtgcatgacnnnnnctgtat

SEQ ID NO: 17331 - DNA, 763 bp, Macaca Fascicularis
  misc_feature (1)...(763): n = A,T,C or G
gacgggaccggcgtccaggaggctgtggaggaggctgagtgttccgggctgcctgggaagcccnntgccattcaggnnngcaacctgcagcgctgtgcagcctggagcccggagccctggggagagtgctctgtcagctgtggcgttggcgtccggaggcggagcgtgacttgccggggtcatgggggttctttgctccaaactgcagcgtgctccttggaagaccggccacctctcagcgagccctgcgtgcatgaggactgccccctcctcagggaccaggcctggcatgtcggcgcctggggtctgtgctccaagagctgcagctcgggcactcggaggcgacaggtcatctgtgccattgggccgcccagccactgcgggagcctgcagcactccaagcctgtggatgtggagccttgtaacacgcagccctgtcatctcccccagggtaaggacaggagggcagggaggagcctggcccgacctctctcccactggctgtgaacccacaagcatgtgctgcctcggggcctctgcctgcactgtcatccctctggaccccacttctcccacgtctcccccgctgaaccctttgccatctgtaaggcccgcctggtgtgcagcccacgaggcagccctgcgttcctccactcagcagtggcgcgccccctgcccctccggcccccatagcatgctgtcatttctgtgggactcttagattcgtttccttgtgctgctgtggttgtatacggctgtcaga

SEQ ID NO: 17332 - DNA, 1194 bp, Macaca Fascicularis
  misc_feature (1)...(1194): n = A,T,C or G
cgctgctaccgttgacttccaggcacggtttggaaatattcacatcgcttctctgtatctctttcacattgtttgctgctattggaggatcagttttttgttttacaatgtcatatactgccatgtactagttttaattttctcttagaacattgtattacagatgccttttttgtagtttttttttttttttttatgtgatcaattttgacttaatgtgattactgctctattccaaaaaggttcctgtttcacaatacctcatgcttcacttagccatggtggacccagcgggcaggttctgtctgcttcgggcagacacacgggcgcgatcccacacaggctggtgggggccggccccgaagccgcacgcgtgagaaccgtgccggtgtccccggagaccaggctgtgtccatcttctcttccctgcgcctgtgacgctgggctcttcatctgatcgggggcgtatcatcatagtagtttttacagctgtgtcattctttgcgtgtagctatggaagttgcataattattattattattattataacaagtgtgtcttacgtgccaccacggtgctgtgcccgtaggactctcattcgggatgattggaatagcttctggaatttgttcaagttttgggtatgtttaatctgttatgtactagtgttctgtttgttattgttttgttaattacagcataatgctaatttaaagagactccaaatctcaatgaagccagctcacagtgctatgtgcccgggtcannnnnnnnnnnnnnnnnnnnnnnnnnnnnnnnnnnnnnnncgggcccgcgtggctggggccctgccctggcagggtcatcctgtgctcagaggccatcgtgggcacaggcccgtcccgccccacccctccagaacacggctcacgcttacctcaaccatcctggctgcggcgtctgtctgaaccacgcgggggccttgagggacgctttgtctgtcgtgatggggcaagggcacaagtcctggatgttgtgtgtatcgagaggccaaaggctggtggcaaatgcacggggcacagtggagtctgtcctgtgacgcgcaagtctgagggtctgggcggcgggcggctgggtccgtgtgtttctggttgcaccgcggcgcttcccagcaccaacatgtaaccggcatgtttccagcagaagacaaaaaga

SEQ ID NO: 17333 - DNA, 712 bp, Macaca Fascicularis
  misc_feature (1)...(712): n = A,T,C or G
aagagaataatcatcgtgttccactgtgaattctnnncagagaggggcccccgaatgtgccgctctctgcgtgaagaggacaggtctctgaaccagtatcctgcattgtactacccagagctatatatccttaaaggcggctannnnnnnnnnnnnnnagaatatttggagctgtgtgaaccacagagctactgccctatgcatcatcaggaccacaaggctgagttgctgaggtgtcgaagccagagcaaagtgcaggaaggggagcggcagctgcgggagcagattgcccttctggtgaaggatgtgagcccgtgacaacattccaaccactggctgctaacgagtcaccaaaagacactgcagaaaccctgagcagaaagannnnnnnnnnnnnnnnnnnnnnnnnnnnnnnnnnnnnnnnnnnnnnnnnnnnnnnnnnnnnnnnnnnnnnnnnnnnnnnnnnnnnnnnnnnnnnnnnnnnnnnnnnnnnnnnnnnnnnnnnagtcctggagtggctctataagagctctataagagtggcagacttgagttgcagagagatttttgttggttnnnnnnnnnnnnnnnnncctcttcccaactcctcgtgtcttctcacaggccagccaactctttctctctgggcttctggctgtgcaagagagttgtctaccctctttctttgtattttccttctttgtttccccct

SEQ ID NO: 17334 - DNA, 784 bp, Macaca Fascicularis
  misc_feature (1)...(784): n = A,T,C or G
gctttgccccnnnnnnncnnnnnnnnnnnnnnnnnctggtcgggacctcactgactacctcatgaagatcctcactgagcgtggctactcctttgtcacacnnnnnnnnnnnnnnnnnnnnngtgacattaaggagaagctgtgctatgtcgccctggattttgagaatgagatggccacagctgcctcttcctcctccctggagaagagctatgaactgcctgatggccaagtcatcactattggcaatgagcgcttccgctgtcctgagacgctcttccagccctccttcattggtatggaatctgctggcatccatgaaacaacttacaatagcatcatgaagtgtgacattgatatccgcaaggacctgtatgccaacaatgtcttatctggaggcaccactatgtaccctggtattgctgatcgtatgcagaaggaaatcactgccctggctcctagcaccatgaagattaagattattgctccccctgagcgtaaatactctgtctggattgggggctccatcctggcctctctgtccaccttccagcagatgtggattagcaagcaagagtacgatgaggcaggcccttccattgtccaccgcaaatgcttttaaggtgccttctctctctatctaccttccagtcaggatgatggtattatgcttcttggagtcttccgaaccaccttccctcatctttcatcaatcattgtacagtttgtttacacacgtgcaaatttgtttgtgcttctaatatttattgctttataaataaac

SEQ ID NO: 17335 - DNA, 890 bp, Macaca Fascicularis
  misc_feature (1)...(890): n = A,T,C or G
aaatccagaagcataaaaccctccctangatgtctggaggttgggagctggaactgaatgggacagaagcgaaattagtgcggaaagttgccggggaaaaaatcattgtcactttcaacattaacaacagcatcccaccaacatttgatggtgaggaggaacccacgcaaaagcagaaggttgaagaacaggagcctgaactgacatcaactcccaatttcgtggttgaagttnnnnnnnnnnnnnnnnnnnnnnnnnnnnnnnnnnnctgtcattatccagaggatgaggttggacaagaagacgaggctgagagtgacatcttctctatcagggaagttagctttcagtccagtggcgagtctgaatggaaggatactaattacacactcaacacagattccttggactgggccttatatgaccacctaatggatttccttgcggaccgaggggtggacaacacttttgcagatgagttggtggagcnnnnnnnnnnnnnnnagcaccaggagtacattagttttcttgaagacctcaagagatttgtcaagagccagtagagcagacagacgtnnnnnnnnnnnnnnnnnnnnnnnnntctggccagtgaacaagtcctactctgaagctagacatgtgctttgaaatgattatcgtcctaatatcatggggaaaaacaccaaatttaaattatatgttttgcgctctcattatcatttttcctgtacaaatctattatttctagatttttgtataacatgatagacataaaattggtttatctcctccaaagcagtgtatctattcctcccgcttcaacctgcgtcacaaaagaccaagaacagagatgtcggaaaagttttttttccttcaggatcggttaaaag

SEQ ID NO: 17336 - DNA, 456 bp, Macaca Fascicularis
  misc_feature (1)...(456): n = A,T,C or G
cttcataaaagtaaaagctttttgtttctttgtctaaacaaacggagccacaagcataggatacatgcaagacgnnnnnnnnnnnnnnnnnnnnnnncaagtacaacttccacgaagaaactcgctacttaagtatgcagaagccaccgcaacccaccgcaaacctccattccgcgatcgttaaatgacaagagacatttcagaaacgtctcaaacctnnnnnnnnnnnnnnnnnnnnnnnnnnnnnnnnnnnnnnnnnnnnnnnnnnnnnnacacactaatcctctccggaggtcttgctaaacaagctgtgggaaatgaagggagctaggcacgtacgctttcctgcaatctaaaacttccgagactgcatttaccacaaccagtttccacaaagaggtaagggtgacttagctgcnnnnnnnnnnnnnnnnnncaaaattcgaaaaggtaccc

SEQ ID NO: 17337 - DNA, 121 bp, Macaca Fascicularis
tgcgcggttgaagcggtcgtgcatgacatccatcatgtgtgtttgctgccggtcgttctccagcagggagtgtatgcggtcgctgtttatccagaagtagaagggtgagctctggttcagg

SEQ ID NO: 17338 - DNA, 725 bp, Macaca Fascicularis
  misc_feature (1)...(725): n = A,T,C or G
cagctggtaatgaccgtgnnnnntctggcggtggtcgtctacctatacaccgtagtggnnntcaacttcttccgcaagttctacaacaagagcgaggatgaggatgagcctgacatgaaatgnnnnnnnnnnnnnnnnnnnnnnntgtttcacatgtacgtgggtgtccgggctggcggaggcattggggacgagatcgaggannnnnnnnnnnnnnnnnnnnnnnnnnnnnnnnnnnnnnnnnnnnnnnnnnnnnnnnnnnnnnnnnnnnnnnncctgttggccatcatccagggtctgannnnnnnnnnttttggtgagctccgagaccaacaagagcaagtgaaggaggatatggnnnnnnnnnnnnnnnnnnnnnnnnnnnnnnnnnnntactttgnnnnnnnnnnnnnnnnnnnngagactcacacgctggaggagcacaacctggcnnnnnnnnnntttttcctgatgtatttgataaacaaggatgagacagaacacacaggtcaggagtcttatgtctggaagatgtaccaagagagatgttgggatttcttcccggctggcgattgtttccgcaagcagtatgaggaccagcttagctgagacccccagctggctctccacccccacctcaagtgccttattctcacagcaagtcccttagtccccaagctcttccccctaaggcagctgggggagaggtgacctagtactgaaaa

SEQ ID NO: 17339 - DNA, 750 bp, Macaca Fascicularis
  misc_feature (1)...(750): n = A,T,C or G
actaactttgtggttccagattttttttaatctcctacttctgctatcttgagcaatctgggcacttttaaaaataagagaaatgagtgaatgtgggtgatctgcttttatctaaatgcaaataaggatgtgttctctgagacccgtgatggggggatgtggcggggggtggctagagggagaaaaaggaaatgtcttgtgttgttttgttcccctgccctcctttctcagcagctttttgttattgttgttgttgttcttagacaagtgcctcctggtgcccgcggcatccttctgcctgtttctgtaagcaaatgccacaggccacctgtagctacatactcctggcattgcactttttaaccttgctgacatccaaatagaagataggactatctgagccctaggtttctttttaaattaagaaataagaacaattaaagggcaaaaaacactgtttcagcatagcctttctgtatttaagaaacttcagcagccggccgcagggannnnnnnnnnnnnnnnnnnnnnnnnnnnnnnnnnnnnnnnnnnnnnnnnnnnnnnnnnnnnnnnnnnnnnnnnnnnnnnnnnnnnnnnnnnnnnnnnnnnnnnnnnnnnnnnnnnnnnnnnnnnnnnnnnnnnnnnnnnnnnnnnnnnnncagctactcaggaggctgaggcaggagaatggcatgaacccaagaggcggaggttgcagtgagccaaaatcacaccactgcactccaaact

SEQ ID NO: 17340 - DNA, 775 bp, Macaca Fascicularis
  misc_feature (1)...(775): n = A,T,C or G
agtacacagccagnngggagccaagtttcccattaagtggacagcgccagaagccattaactatgggacattcaccatcaagtcggatgtgtggtcttttgggatcctgctgacggaaattgtcacccatggccgcatcccttnnnnnnnnnnnnnnnnnnnnnnnnnnnnnnnnnnnnnnnnncgaggctaccgcatgccgtgccccgaaaactgtccagaggagctgtaccaacttatgaggctgtgctggaaggagcgcccggaggaccggcccacctttgactacangcgcagtgtgctggaggacttcttcacggccacggagggccagtaccagcctcagccttgagaggcctcgagaggccctggagtcctccccttttctctccagcctgacttggggagatgcagnnnnnnnnnnnnnnnnnnnnnncnnnnnnnnnnnnnnnctctgcacannnnnnncgcccatatnnnnnnnnnnnnnnnnnnnnnnnnnnnnnnnnnnnnnnnnnnnnnnnnnnnnnnnnnnnnnnnnnnnnnnnnnnnnnnnnnnnnnnnnnnnnnnnnnnnnnnctgtataaggtacccctttggctcttccatttcctgagaccacagagagagggaagaagcctgggattgacagaagcttctgcccacctacttttctttcctcagatcatccagaagttcttcgagtgccaggaccttatctaatacctctgtgtgctcctccttggtgcctggcctggnnnnnntcaggagctca

SEQ ID NO: 17341 - DNA, 508 bp, Macaca Fascicularis
  misc_feature (1)...(508): n = A,T,C or G
tgnnnnnnnnnnnnnnnnnnnnnnnnnnnnnnnnnnnnnnnnnnnnnnnnnnnnnnnnnnnnnnnnnnnnnnnnnnnnnnnnnnnnnnnnnnnnnnnnnnnnnnnnnnnnnnnnnnnnnnnnnngccaggtttcgctatttttggtcaggcttgtctcgaactccttaccttgtgatctgcctgcctcaagcctcccaaagtgctgagattacaggtgtgaaccaccgtgcccagcctataatattacatttctacttttttggctgtaggtttcaaaaacaagttccattataattttttttttttttttaaaggaacttaaaaagtatggagtgaccactttggttcgagtttgtgatgctnngtatgataaagctcnnntngaaaaagaaggaatccacgttctagattggccatttgatgatggagctccaccccctaagcagatactacatgattggttaaacctgttaaaaacnnaatttcttgaacagccagattgctgtg

SEQ ID NO: 17342 - DNA, 685 bp, Macaca Fascicularis
  misc_feature (1)...(685): n = A,T,C or G
ccaagtgaccagaaggaaggaggaagctcattggtggctgttcctagaggcgtagctgnnnntacagaaacagaagaggaaagagagactcagctgcagaggccacctggattgagcctaatgtgtttgagcattgctcaggagaagtcttctatttatttatttatttatttgtttgtttcttttagaagattctatgttaacattttacgtgtaaaataaggttatgattgaatctacttgcacactctcccattatatttattgtttattttatgttaaactcaagttagttcaatcctgattcatatttaatttgaaggtagaaggtttgcagatattctctagtcattatgttaatatttctgagtggatgacatatcaaacgtcagccactgtgatagaggctgggggatccaagaaaatggccagtgagatcaatgtgagggcaggggaatgtatgtgtatatatttttgtaactgtaaagatgaatgtcagttgttatttattgaaatgatttcacagggtgtggtcaacatttatcatgttgaagctttaagaaataaaatgttataaatatcccttggacattttatgtctttcttgtaaggcatactgccttgtttaatgttaattatgcagtgtttccctctgtgnngaacagnnnaggtttcgatatttatt

SEQ ID NO: 17343 - DNA, 718 bp, Macaca Fascicularis
  misc_feature (1)...(718): n = A,T,C or G
ctcaccacctggtctcactatactaccagagtgaggagcaggcagaggaggagctcctggacatggcggtgctgaaggactacattgcttatgcacacagcaccatcatgccgcggctaagtgaggaagccagccaggctctcatcgaggcttatgtagacatgaggaagattggcagtagccggggaatggtttctgcatatcctcgacagctagagtcattaatccgcttagcagaagcccatgctaaagtaagattgtctaacaaagttgaagccattgatgtggaagaagccaaacgcctccatcgggaagctctaaagcagtctgcaactgatccccggactggcatcgtggacatatctattcttactacagggatgagtgccacctctcgtaaacggaaagaagaattagctgaagcattgaaaaagcttattttatctaagggcaaaacaccagctctaaaataccagcaactttttgaagatattcggggacaatctgacatagcaatcactaaagatatgtttgaagaagcactgcgtgccctggcagatgatgacttcctgacggtgactgggaagaccgtgcgcttgctctgaagccttgtgagcaaggaaggctgcctgcatgtcccgcttgctgcatgccacacgggtgtggcctgcatctcagttggccgccatcagtgtaaatagagctaannnnnnnnntt

SEQ ID NO: 17344 - DNA, 734 bp, Macaca Fascicularis
  misc_feature (1)...(734): n = A,T,C or G
tccgctgtccagcagctgccagaggnnnnaggtcccctcgggtccccttgaaagaatgtctcgtcacatcaggcccgctaggtccagagagccagcccccaatgcccgaccaggctaagccgcagagaccctctcagcccccacctcaggctagggctctgcccgcagcctgacctctagccctggtggcagaggtccctcagctgcgaggctgattgggtgaccaccaattccagctgtggttaatccagcttggacctgtctgcactgcgatcctcttgggctcccctaggatctccccatgccccataagaggtggaaggcacttccttccaggacagcaggctttgagtccagtacccccagcctgcctttgccaccagccccaccccgcagactatatgaggtttgacagagtctgccccctcccccactgcaccccgagagagagccccagtcagtggaacagtttctattaccccctccctgcccccagacccacgtgatttctgctttcttctttagcaggatattctggtttctaggtaaggaagagtctctaatgagcccccgagcctcagtctcttcagactcatgggctggtctgaggggtccaagcatgtcctagccaatcagaactggctgtggaccaccctagcacggccacctctcagggccactggcaggccttcctaagttagatttgtagttgcacatttagcttgcacattgaa

SEQ ID NO: 17345 - DNA, 796 bp, Macaca Fascicularis
  misc_feature (1)...(796): n = A,T,C or G
actgnnnnnnngagatttgatggagccctgaatgttgacctgacagaattccagaccaacctggtgccctacccccgcatccacttccctctggccacatacgcccctgtcatctctgctgagaaagcctaccatgaacagcnnnnngtagcagagatcaccaatgcttgctttgagccagccaaccagatggtgaaatgtgaccctcgccatggtaaatacatggcttgctgcctgttgtaccgtggtgatgtggttcccaaagatgtcaatgctgccattgccaccatcaagaccaagcgcagcatccagtttgtggattggtgccccactggcttcaaggttggcatcaactaccagcctcccactgtggtgcctggtggagacctggctaaggttcagagagctgtgtgcatgctgagcaacaccacagccattgctgaggcctgggctcgcctggaccacaagtttgacttgatgtatgccaagcgtgcctttgttcactggtatgtgggtgaggggatggaggaaggcgagttttcagaggcccgtgaagacatgggtgcccttgagaaggattatgaggaggttggtgtggattctgttgaaggagagggtgaggaagaaggagaggaatactaattatccattcctttggcactgctatcacatcatgctcccaggatttcagcttcagcttagctgacagacattaaagctttctggttagattgttttcacttggtgatcatgtcttttccatgtgtacctataatattttcatcatcgtgtctca

SEQ ID NO: 17346 - DNA, 754 bp, Macaca Fascicularis
  misc_feature (1)...(754): n = A,T,C or G
aagtttaaacacaactctgtgggaagaaaggagattattacccagaattcacatgtagtgattattaaggacaatttatttttttaattaagaaagttggcagcgggggtgggggatggcaatcatttttcttcctatacataccaaggatactgtcaaaaatggcataagttcttctgttgtggcctgttattctgattgctgctgtatacagttttgttactctttagttgttagttaagcatattgatagactgctctaaannnnnnnnnnnnnnnnntttacctggggaatattctacatactgcttactttctctataaaactcatcaataaatcatgaaaggcactgagttctgtaaatcaggaccctaaatgtttaattgtaaataagtttcagataattgttacagctttgcgttgacgttttgttggttttttccaattagttaagtcttaactgcttctaaaataactctgtattgtagattatgcagacctttacaggcataaatatttaaactgtaatatgctaacttgaagagattgcaataaagctgcttcagctacccctgtttatgtttaaatactagggtttgttctatattttatacacgcactttnnnnnnnnnnnnnnnnnntggttttcgtttgcaatttgcttgtgtaaatcaggttgtaaaaaggcagataaattaaaatgtttgtggtatgaggaaataaaagaatggaattagcattcattcagaaacc

SEQ ID NO: 17347 - DNA, 607 bp, Macaca Fascicularis
agaaagatggtgagtcattagttgaaggtcgttgaagaaccacttactgaaggattcattgagatatatgagtcgttaaatgaagagattgattgattgaatgaagagattgaagcagctgaaaatgaagaggcctcagtgttttcacagattctttatgtggctggcaatatgtttattgcagtgctacctggggctggtaagttagttgatttagggatgaaaattatttgctcttttatgtaataggttgagaaatcctggtaaataaattatgaaatgaggtttcttttgttaaaatggtgtaacactgtttgtcattttaaaagtatatgtgttattgcagtttccttcaagaaaagtttaaaattaaaaagcaaatttcaatgaatattatggcctgcagttcataaaaacaaacttaattttgactgaagtaataattaatagaaatggtgaacaagctagaagataaaattatccttgaaaagatttaaataaagcaaaaagacaaatggtaagatgaagaaattattttcaatcaatgttatagtcacagagataatttaagttataattagctctgttaaatcagtgagaagagagt

SEQ ID NO: 17348 - DNA, 1353 bp, Macaca Fascicularis
  misc_feature (1)...(1353): n = A,T,C or G
tgccaagactggccaagccactgtggntnntggcnnnnntgctggctggatgggtttggactgtggtcctgaaagcagcaagaagtatgctgagnnngtcactcgggctaagcagattgtgtggaatggtcctgtgggggtatttgaatgggaagcttttgcccagggaaccaaagccctcatggatgaggtggtgaaagccacttctaggggctgcatcaccatcataggtggtggagacactgnnnnnnnnnnnnnnnnnnnnnncacggaggataaagtcagccatgtgagcactgggggtggtgccagtttggagctcctggaaggtaaagtccttcctggggtggatgctctcagcaatatttagtactttcctgccttttagttcctgtgcacagcccctaagtcaacttagcattttctgcaactccacttggcattagctaaaaacttccatgtcaaggttcagctagtggccaagagatgcagtgccaggaacccttaaacnnnnnnnnngcatctcagctcatctttactgnnnnnnnnnnnnnnntacattcttcaagatcccatttgaatttcttagtgactaaacattgtgcattctagagtgcatatatttatattttgcctgttaaaaccaagtgagctgtgttagcttagttctcttttgatgtaggctattatgattagctttgtcactgtttcactactcagcatggaaacaagatgaaattccatttgtaggtagggagacaaaattgataatccattaaataaacaataaannnnnnnnnnnnnnnnnnnnnnntattttttcctgtcatactttgttaggaannnngagaatagnnnnnnnnnnnnnnnnnnnnnnnnnnnnnnnnnnnnatgcgagaagtggggcagcagcagtggagagatgggacaattagataaatgtcttttctttatcaaggtcctactttatggcagacattgtgctagtgcttttattccaacttttatgtctatcagttacacatgatcataatttaaaaagtcaaggcttgtaacaaaaaagccccagcccattcctcccattcaagattcccactccccagaggtgaccactttcaactcttgagtttttcaggtatatacctccatgtttctaagtaatatgcttatattgttcacttatttttttaaattttttaaagaaatctatctttcataccatggaggaaggctctgtttcacatatatttctatttcttcattctcagtatagttttgtcacaattatagattagatcaaaagtcttcatacctaatactcacagctgagctatgtagtatgcatgattgaat

SEQ ID NO: 17349 - DNA, 1193 bp, Macaca Fascicularis
  misc_feature (1)...(1193): n = A,T,C or G
gcacagcaatggaagcagannnnnnnnnnnnnnnnnnnnnnnnnnnnnnnannnnnnnnnnnnnnnnnnnnttctacttccaggaggatgagtagtactgcccaggcctgcctgttcccattctggcatggcaaggactgcagggactgccagtccccctgccccagggctcccgactatgggggcactgaggacaagccattgaggggtggatcctcagaaggagtcacaagaacctggtcacaggactctgcctcctcttcaactgaccagcctccatgctgcctccagaatggtctttctnnnnnnnnnnnnnnnnnnnnnnagcccctgcgcaaagcccttccgcgtctcctttgcattcgggatcaaaccccgaccacctgcccagcctgctctcctctccccactgcctcctccatcctcattccacgttcccatgccnnngatacatcaggccccttgatgaccccccaccaagtnnnnnnnnnnccctgttttacaaacaaatgccagtccgtgaggaaggtttttaagagtttgtggagaatgaaaattaaggatttcctgatttcttttttagtccacgtgaaggagagcacttcatttggagattatgttcttttgggagagactgggggnnnnnnnnnnnnnnnnnnttgtgaaatgatggtgaaagtaaatggtagctttcccatttttttcttcttttttgtgatgtcccaatttgtaaaaattnnnnnnnnnnnnnnnatgttggtcctataattttttttttccttttaaaacacttccataatttggactgttctataagcagtccaggcactgctgcccaggctccgagctccatctccactccagattnnnnnnnnnnnnnnnnngtactttacctcctatcagaagtttctcagctcctaaggctccgagcaaatgtggctcctgggggttccttcctcctttggtgaaggaaagaattgctccttgacattgtagagtttttggcacttggagacgtgtatgaaagatgactgtgcctcggcctgtctcccccaccaggctgggagcttttcagagcaggaaaaaagactcgtatatgcagggccgagcacctagcctggctcggcaggtactcagcgaatgagtgctgtatatnnnnnnnnnnnnnnnnnntacttcctgtcacttcagct

SEQ ID NO: 17350 - DNA, 721 bp, Macaca Fascicularis
  misc_feature (1)...(721): n = A,T,C or G
gtatnnncgatgaaagatacatcgaatcaacaaagaannccagnnnggtcgcctggacccagcagcccagaacaccaagcagaagtgggaggcagaaccagtctatgtgcagcgggccaaggcatacctggaggaggagtgccctgagactctgcggaaatacctgaaatacagcaaaaatatcctggaccggcaagatcctccctctgtggtggtcaccagccaccaggccccaggggaaaagaagaaactcaagtgcctggcctacgacttctacccagggaaaattgatgtgcactggactcgggatggcaaggtgcaggagcctgagctacggggagaggttcttcacaatgaaaatggcacttaccagtcctgggtggtggtggctgtgcccccgcaggacacagccccctactcctgctatgtgcagcacagcagcctggcccagcccctggtggtgcccggggaggccaggtaggaagcaagagctggaggcaatgtgggatctcagccccagtagctgcccttcctgcctgatgtgggagctgaaccacagaaatcaccgtcaatggatccacaggcctgaggagcagcgcggggagacagacaggaggtggatttggagaccgaagactgggatgcctgtcctgagctgacctggacccaaaaaatcatctcaccttgagcccacccccaccccattgtctaatctgtagaa

SEQ ID NO: 17351 - DNA, 734 bp, Macaca Fascicularis
  misc_feature (1)...(734): n = A,T,C or G
agcctcagatttttactcataatctacacagatttggaaacttttttctctgttttggtctcttgggcaacatttggcccacatttgggcattttggnnnnnnnnnnnnnnnagaaaaagagtaannnnnnnnnnnnnnaccgccacgaagggtnnnnnnnnnnnnnnnnnntagactagggctgcctggtcagtcccaggtgaggccaagggctttctggccatcttagggaggggccaccaggttcctcccctcgcnnnnnnnnnnnnnnnnnncctcctctgctctgggtggtaagggaagccctcctggttcccacaggctgtgatgctgcagaggcaggtgtaatacagcagtacatactggaaattttttattttcctaaataccaatggaattttgctacggttacaattttgaaatattaagtgggcctcaaaatcacccccagcctttctgtctagcatatcttggcctctcccatgtctcagtgttgcctgcgtttctcctaggacttgggggtggggtgaaagagtacaaaagatactcgaaaggtctcctggggtacacaagcccagtaggtcctgagtgaagctgtgggccctccaaatgctcattttatagcaacctctctctgccttagttctccaggttcacgtctgccttcctcaggtttggtatctggcaggtttgactatccagaggaaattaaatatttttatatcaaattaaa

SEQ ID NO: 17352 - DNA, 241 bp, Macaca Fascicularis
gattacaggcgtgagctaccgcgtccggcgacaacttgcaatctttttatatgttctctccaccgtcaatttagcgtcattccaaaaccacaccctggcaaagctttgtactcctcaccccaggtgatctccaggcagctcagatgtctttcccacctttgccctgcactgttccccggtacttcctcctatattgtagcattcaactccccagccaatctgtacatccctcagaggcagc

SEQ ID NO: 17353 - DNA, 725 bp, Macaca Fascicularis
  misc_feature (1)...(725): n = A,T,C or G
atgnnnnctacgagatcgccaagagatcgcacaactggctcaagctgaagaaggactaccttgatggcgtgggnnnnnnnnnnnnnnnnnnnnngatcggcgcctacctgggccgggggaagcgggccggccggtacgggggcttcctgctggcctcctacgacgaggacagtgaggagctgcaggccatatgcaagcttnnnnnnnnnnnnnnngacgaggagctggaggagcatcaccagagcctcaaggccctggtgctgcccagcccccgcccttnnnnnnnnnnnnnnnnnnccgtgactcccgaccactggctggaccccagcgccgtgtgggaggtgaagtgtgccgacctctccctctcccccatctaccctgctgcgcggggcctggtggannnnnnnnaggggatctcccttcgcttccctcggtttattcgagtccgtgaagacaagcagccggagcaggccaccaccagtgcacaggtggcctgtttgtaccggaagcaaagtcagattcagaaccaacaaggcgaggactcaggctctgaccctgaagatacctactaagtccttgccctcctagggcctgggtacagggcatgagttggacggannnnnnnnnnnnnnnnnnnnnnnnnnnnnnnnnnnnnnnnnnnnnnnnnnnnnnntttnnnnnnnnnnnnggaggggtgtgtgtgtgaggggggtggcttacacctg

SEQ ID NO: 17354 - DNA, 547 bp, Macaca Fascicularis
attccacccaatataataaaacctgttaagaatgtcagactttgttcaaacatctgtttgttctatctccagtcattaaatcagtgctgctgcatgacactctaattcctgactttttatatccagtcataaagttgactttcagcacaacagatacttataaacaaataaaaactttttatttttctctcttattgatgtaaggtttggcactcttttgactggtgccattagacatcttgattattgtgacaactctagacctgcctgctctatctaatgtaatcatgctcggcgtctgcaggttgtttaataatcagtcacacagagaactgaggaactgatgctgtttgtttgcttctatgatacagagatgtctaaaaacttcaaatggacatgttttgtagtttagcaacttccgtatacataaagggacatattaatactggttcatttgtaaattattattcatatagaccactgtagtagatataactctaatggtacacctgcttatgtgttgcctcacactgtgtgtgattttgtt

SEQ ID NO: 17355 - DNA, 682 bp, Macaca Fascicularis
  misc_feature (1)...(682): n = A,T,C or G
ctgggtaaggagtgggcatggtgagaggtggagcagcccataccccacctgccagctgacagtctctgtgcttctctaggctcaagttcggctaaagggagctggcctaggagccaaaggcagcgcgtatggtttgtcgggtgccgattcctacaaagatgctgtccggaaagccatgtttgcccggttcactgagatggagtgagagagagagagagagagatatgacaaggagcacaagaagtggtccatcttctcctggattcgctcttaccgcctgtctctttannnnnnnnnnnnnnnnnnnnnntagatcttagggtgaaccacttcattctgcagggttctccctcccaccttaaaaaagttccccttatgtgggttgtctggtgaatggccttccnnnnnnnnnnnnnnnnnntgaacagaccggagaggacagtgggttttttatacttcagtgtacatagtgtaatgtagcgtgtttacatgtgtagcctatgttgtggtccatcagcccctcacattcctaggggtttgagatgnnnnnnnnnnnntgtgacaccaaagccacctctgtcatttgttgnnnnnnnnnnnnnnnnnnnnnnnnnnnnnnnntatttgtatattacacatttgtacagaattttggaagattttcagtctagttgccaaatct

SEQ ID NO: 17356 - DNA, 726 bp, Macaca Fascicularis
aagagaatagaaaggacattgctttctcagccccacccccaggtccacagtgtccgaggttatggcacacatattcatgcacaagaagcactcacctagagctgtctgtgcctctctgggagagaggagaggggataagaaggaaaggttcacaacctgtgaacaggacttgagcacgagacacttttcatctggagcagggtggtgagctcctcagcagcctctgcaacagctgccctgcctacacccacagagctggaggttctatcctccctgctgctctcaggagtgttcaagggtggagggcagggaatggggcctgaggtattaaggctaagaggttgggggcagggcccatgtcccagccttcattaggaagggaaagggctttggggtcaggtggcagctattccccaccaagagattcagggtcacaggtttttccccacacctctgaactcagggcctagccacccccaaacttccaaatcccacttttgtgatatgtgaagctacttatttcttacccttggaggctgtgtggggaatttccagccctttcatgcctgtgtgatcccgccccacccccacagttgtataaaggtcatagtgaaggagctgggggaagactgcttcagccagatcctggggtggggtctttaggttttctcactttgacaagcccctgaatgtttttatagtagtttttttgtatttttttgtaat

SEQ ID NO: 17357 - DNA, 703 bp, Macaca Fascicularis
  misc_feature (1)...(703): n = A,T,C or G
acaaccccaccagcacaaagcacttctnnnnctccgtgggtgctgtgccccgggccctgcagnnncagctgagtnnnnnnnnnnnnnnnncctcctacatggagcagcacctcatgaagggtggagatctgcccagtgtggaagaggtagnnnnnnnnnnnnnncccttgctgctgcagtgggtcaagacggaccaggctctcctcatgctgtttagtgatggcacggtccaggtgaacttctacggggatcacaccaagctgattctcagtggctgggagcccctccttgtgacttttgtagcccgaaatcgtagtgcttgtacttacctcgcttcccaccttcggcagctgggctgctctccagacctgcggcagcgactccgctatgctctgcgcctgctccgggaccgcagcccagcctaggacccaagccctgaggcctgnnnnnnnnnnnnnnnnnnnnnnnnnnnnngcctttgtggccctccccattcctttggtgcctcactgggggctttgggccgaatcccccagggaatcagggaccagctttactggagttgggggcggcttgtcttcgctggctcnnnnnnnnnnnnnnnnnnnnnnnnnnnnnnnnnnnnnnnnnnnnnnnnngttatttatggaccacttttatttattgtcagacacttatttattgggatgtgagccccaggggg

SEQ ID NO: 17358 - DNA, 757 bp, Macaca Fascicularis
  misc_feature (1)...(757): n = A,T,C or G
cagggaggagatnncntaaggcaaagaaaaccaccaaagagagcctggcccagacatccagtaccatcactgagagcctcatggggatcagtnnnnnnnnnnnnnnncaggtccagcagagcgaggaggccatgcagtctctagtcacttcttcacgaacgatcctggatgcaaatgaagaatttaagtccatgtcagggaccatccagctgggccggaagcttatcacaaaatacaatcgccgggagctgacggacaagcttctcatcttccttgcgctggctctgtttcttgctacggtcctctatatcgtgaaaaagcggctctttccgtttttgtgagatcccannnnnnnnnnnnnnngccctttctgcnnnnnnnnnnnnnnnnnggttcctgagctctaggctgccaagctgagccacacacccctccatttgtgccannnnnnnnnnnnnnnnnnnnnnnnnnnnnncccacttttctgcaagtggctggcttgtaaagggtgaacagaaccatgggagggaggcctgtcattgggatgccgccctggggacataggaactgcctccttccctcatcgtgcactatgggaggctgcggccactctgtggggcacttaaagtccagcctccaggacccgatgcctctcctatctccctctcccnnnnnnnnnnnnnnnnnnnnnnnnggtggagtgaagagagaagaggtaggaannnnnnnnnnnnnnnnnnnnngtcatcctgaaaaa

SEQ ID NO: 17359 - DNA, 764 bp, Macaca Fascicularis
  misc_feature (1)...(764): n = A,T,C or G
cctgccatcatgactgctaattttgtatttggtagannnnnnnnnnnnnnnnnnnnnnnnnnnntgtcnnnnnnnnnnnnnnnnnnnnnnnnnnnnnnnnnnnnnnnnnnnnnnnnnnnnnnnnnnnnnnnnnnnnnnnnnnntggcccttgcaatcttctactttaaggtttgcagagataaaccagtaaattcacaccgtacatctgcaatgtgaattcaagaaaggaaatagtaccttcaatacttaaaaacagccttccacaaaaaatactttatttctgatctacacaaactttcggaaggttatcttctttatcattgctaaactgatgacttaccacgagatggggtccagtcccatgactttggggtacaattgtaaacttgagttttatcaactttggtgaacagttttggcataatagtcaatttctacttctggaagtcatctcgtcccactgttggtattatataattcaaggagaatatgataaaacactgccctcttgtggtgcattgaaagaagagctgagaaataatgaaaaggttgcctgaaaaatgggagacagcctcttacttgccaagaaaaacgaagggattggaccgagctggagaacctcctttaccannnnnnnnnnnnnnnnnnnngtttttgctctcgacagtatccacaatagctgatggctgggtgtttcagtttgaaaatattttctgttgccttcaacttcactgcaattttgtgtcaannnctgaaagatccg

SEQ ID NO: 17360 - DNA, 723 bp, Macaca Fascicularis
  misc_feature (1)...(723): n = A,T,C or G
accgtgcagggatgccaagcagccgnntggacttnnnnactcttggacttttggatgcctggccttcggctgnnnnnnnnnnnnnnnaagtttgggaaaggcccaagctgggacttctccaggcctgtgctccctccccaggaagagtgccccaaacctcttcatattgaagatggattaggagagggggtgatgacccctccccaagcccctcagggcnnnnnnnnnnnnnnnnnnnnnnnnnnnnnnnnnnnnnnntcacacttgtctattcttcagtgctggaggcctggcagggtcaggttggggtaagctggggttccacagggcccagccctggcaggggtctggccccccaggtaggtggagagcagtccctccctcaggaactggaggaggggactccaggaatgggcaaatgtgacacccccatcctgaagccagctggcacctccagtttgcacagggatttgttctgggggctgagggccctgtccctacccccgcccttggtgctgtcataaaagggcaggcaggggcaggctgaggagttgccctttgccccccagagactgactctcagagccagagatgggatgtgtgagtgtgtgtgtgtgcgcgcgcgcgtgtgtgtgtgtgcacgcactggcctgcacagagagcatgggtgagcgtgtaaaagcttggccctgtgccctgcaatggggccagctggccgacagc

SEQ ID NO: 17361 - DNA, 749 bp, Macaca Fascicularis
  misc_feature (1)...(749): n = A,T,C or G
gcgggaggcccaggaccgggcccgagcggaagaccttaatagccgagtctcttactggtctatcggcgagacgattgccctgttcgtggtcagcttcagtcaggtgctactgttgaaaagcttcttcacagaaaaacgacccatcagcagggcagtccactcctagccctggcatcctgctctagggcccctcatgtcccagcctggagcagctctcctaggtctcctaggcgcatagcccagggtggaggcagaacgatgctgctgtggtagccctttgcctttcatgcccatgcttgattcttgcacctcagcagctgaaggtctcagagaccagtaatcagaaggcatccgactgcattatgtgtgcagcactgaaaagatgtttacaactaggctagggnnnnnnnnnnnnnnnngggtggacaggcaatggttcagcggcctggctggtagcaggaactccaagtgcccaggccttttgggcagctcagggccctgcctctgtttcatgatgcatgggtcatttgtcttgggtgtcctatcccatgtggagaagaaaggggctctaagttctggctcttcctcccctggggttctctgtacctgaggataccaggccctgggcaactttgcannnnnnnnnnnnnnnnnnnnnnnnnnnnnnnnnnnnnnnnagcaggacagaatggtgactgggtgcccttagtgagctgtgtatttcctaggaggtagaaaactgtgggaaa

SEQ ID NO: 17362 - DNA, 755 bp, Macaca Fascicularis
  misc_feature (1)...(755): n = A,T,C or G
cgccgtttacagtttgcacagtgnnnnntccccatgtnnactcaagtcgtggcctggggaacacagacggagctgtccccagtgtcctccacccctcagcccctggcctggctgagtttggcagggcctgggccgtccctgggacaaaggtgcgtcccttcagctcttctctgtggagctcggggctttctgtatttatgtatttgtacgaatgtatatagcgaccagagcattcttaattcccgccgcagacctggtgcctgccttggctcctgggggcagccagccctggctgggagagtgggagctggcagaggagccactgccaaactcaaggctcctccggcccagcttggacggctgagggtgctcacannnnnnnnnnnnnnnnnnnnnnnnngccacccccggcctctgagtaagactcgtgcctgcctccgctgccctgggctcaggctgctactctctggggcccaaagctgtcccttctcagtgcttgtcagagatggatctggggcctctgtatcccctaggcctgtgccaaagtgtccagagattgggccggctgtgagacccgtcagcccactgccccggccggcccagatgataggtttgcctctgccttccagctcccagggcctggtccctgatgctgggccctgtcctggagacacctctttcagaaacacccgagcccagcccctaggagggggtggggcatccctggtcaaccctcaaacattccagactcccct

SEQ ID NO: 17363 - DNA, 727 bp, Macaca Fascicularis
  misc_feature (1)...(727): n = A,T,C or G
ttttattttactactagtaaagattttttttaaatcaagtatgctttgccttgttactatcatttatcccagcatagtttctaaaagtattttaagaggcgatattacatactgatgttcattccagttcattcttgatttagctgtcttccaaatatcaagatattaatttcatcttggctagaggctttgactattttattctctgagatttacaagcccataatcccatatccgaaatatttaggggcagatgagtttcagaatttagaatttcttggcttttagagaagtaatcaataatatattgcaaaatatgtaatatcctcatcagaattggaacagtactcccggaccagaacacaggaatattcactctaagtggaataaattgaactaaatggcttcacagtctattcagttcagtttttgctgccaaaataagtttaggtcagattttgcaataagtgtaagttctcaaaacaaaacaacaacaaatgaaatgaacaaaaatcttttgatagaggatcagagacctatagctaattaagatctaaattccagttaaggaagaaatagaaatgcagttctacgttactgatccagtattgttctggaataaatttaatataagtttaattttgcaggttaatgaaatgtatttcttcaaatattttaaacttccttcttttatccaaattgtnnnnnntctttctnnnntatcccg

SEQ ID NO: 17364 - DNA, 783 bp, Macaca Fascicularis
  misc_feature (1)...(783): n = A,T,C or G
gatcaaaaaattggtatagaaattatcaaaagaacactcaaaattccagcaatgaccattgctaagaatgcaggtgttgaaggatctttgatagttgagaaaattatgcagagttcctcagaagttggttnnnnnnnnntggctggagattttgtgaatatggtggaaaaaggaattattgacccaacaaaggttgtgagaactgctttattggatgctgctggtgtggcctctctgttaactacagcagaagttgtcgtcacagaaattcctaaagaagagaaggaccctggaatgggtgcaatgggtggaatgggaggtggtatgggaggtggcatgttctaactcctagactagtagtgctttacctttattaatgaactgtgacaggaagcccaaggcagtgttcctcaccaataacttcagagaagtcagttggagtaaatgaagaaaaagnnnnnnnnnnnnnnnnnnnaaccatcagttactggtttcagttgacaaaatatataatggtttactgctgttattgtccatgcatacagataatttattttgtatttttgaataaaaaacatttgtacattcctgataatgggtacaagagccatgtaccaatgtactgctttcaacttaaatcactgaggcatttttactactattctgttaaaatcaggattttagtgcttgccaccaccagatgagaagttaagcagcctttctgtggagagtgagaataattgtgtacaaagcagagaaatatccaattatgtgacaaccttt

SEQ ID NO: 17365 - DNA, 747 bp, Macaca Fascicularis
  misc_feature (1)...(747): n = A,T,C or G
cagccacctgggatttcgacgacgaggcattcgatnnnnnnnnnnacgatgccaaggatttcatcagcaatctgctgaagaaagatatgaaaaaccgcctggactgcacannnnnnnnnnnnnnnccatggctaatgaaagataccaagaacatggaggccaagaaactcnnnaaggaccggatgaagaagtacatggcaagaaggaaatggcagaaaacgggcaatgctgtgagagccattggaagactgtcctctatggcaatgatctcagggctcagtgnnnnnnnnnnnnnnncagggtcaccaaccagcccgctcaatgcagaaaaactagaatctgaagaagatgtgtcccaagctttccttgaggctgttgctgaggaaaagcctcatgtaaaaccctatttctctaagaccattcgtgatttagaagttgtggagggaagtgctgctagatttgactgcaagattgaaggatacccggaccccgaggttgtctggttcaaagatgaccagtcaatcagggagtcccgccacttccagatagactacgatgaggacgggaactnnnnngtaattattagtgatgtttgcggggatgatgnnnnnnnnnnnnnnnnnnnnnnnnnnnnnnnnnttggagaagccacctgcacagcagagctcattgtggaaacgatggaggaaggtgaaggggaaggggaagaggaagaagaggaaacaaagccagagaaaagcagttcta

SEQ ID NO: 17366 - DNA, 667 bp, Macaca Fascicularis
  misc_feature (1)...(667): n = A,T,C or G
gacctgtgagatggcccaaggaggagggccagccactacattccgggtggatggcgacagccccgagagccggctgaccgtgccgggcctcagcgagaacgtgccctacaagttcaaggtgcaggccaggaccactgaggnnnnnnnnnnnnnnnnnnnnnnnnnnnnnnnnnnnnnnnnnnnggatggaggccccttcccacagctgggcagccatgccgggctcttccagcacccactgcaaagtgagtacagcagcatcaccaccacccacaccagcgccaccgagcccttcctagtggatgggctgaccctgggggcccagcacctggaggcaggcggctccctcacccggcatgtgacccaggagtttgtgagccggacgnnnnnnnnnnnnnnnnncctcagcacccaggtggaccaacagttcttccaaacctgatcccaccctgcctcacccccgccatgtcccactaggcatccttccaactcctctcccagagcctcctcagctactccatccttgcacccctggccgcccagcccacccacatgcacagagcaggggctaggtgtctcctgggaggcatgaagggggcaaggaccccctctnnnnnnnnnnacctatttgtaaccaaaaagctgggagcagcacaaggacccagcc

SEQ ID NO: 17367 - DNA, 658 bp, Macaca Fascicularis
  misc_feature (1)...(658): n = A,T,C or G
tgccagactgcnnnnnnnnnnnnnnntgagctntgagcaccnnntgtgtggcagtctcccatccttccacgcacttcctcttcccctcctcccaggccggggctcacagacagccccgtggttggcccatccccggtgactgtgtgttgatcaggcgcccagtcacgctgcctgctcccccccacccaaccccagggctctatgggaaggaccagcgggaggcagccctggtggacatggtgaatgacggcgtggaggacctccgctgcaaatacctctccctcatctacaccaactacgaggcaggcaaggatgactatgtgaaggnnnnnnnnnnnnnnnnnnnnncttttgagaccctgctgtcccagaaccagggaggcaagaccttcattgtgggagaccnnnnnnncttnnnnnnnnnnnnnnnnnnnnnnnnnnnnnnnnnnnnnnnnnnnnnnnnnnnnnnnnnnnnnnnnnnnnnnnncctgctctcggcatatgtggcgcgcctcagtgcccggcccaagctcaaggctttcctggcctcccctgagcacgtgaacctccccatcaatggcaacgggaaacagtgagggttggggggactctgagcgggaggcaggggctgcttgcctcccttnnnnnnnnnccaata

SEQ ID NO: 17368 - DNA, 421 bp, Macaca Fascicularis
  misc_feature (1)...(421): n = A,T,C or G
atattctttagccactaaactgtnnntgtgaaaccatcatgcaagtgggaagaacagttcaattcatgaaacttggtgtgctgaaaaattgccattcacctccacacacattttagggatggtttcacacacgctctaggttttcagatcccctgaatggcaaccgtaccctgggaggaggtatgaggatcaaagaagataagggactcgtccagagccacaggtggttgggagccgggtcagatttgagcacaagacagaccaggaaccatcattttcttccttttcacaaggataggggaaactgggtcaggagggtgacactcgtctaagtaggctcaacccagcactctacatgggtggtcctaaacttgtgtgatgtctacctagnnnnnnnnnnnnnnnnnnnnnnnnnttaggt

SEQ ID NO: 17369 - DNA, 780 bp, Macaca Fascicularis
  misc_feature (1)...(780): n = A,T,C or G
tcagaatgatannnnnnnnnnnntgaaaggtctgcatgtattgtattctgaattttacagtgaatgggagaatgtaccctaattgttcgatggggctcaaaggaaagattccatttttaatggttcacattctaaagaggggcagtgtgataggaatgaggtggtcctttaggacttaattcctcagcccaaggtttttcctcttggccccccttttttttaaacggagtctctcttgccaggctggaatgcagtggcnnnnnnnnnnnnnncaggttcaagcagttttcctgtgtcagcttcctgactaactgggattacaggcacctgctaccatgcccaactaattttttnnnnnnnnnnnnnnnnnnnnnnnnnnnnnnnnnnnnntgctggtctcttaactcctaacctcaagtgatctgtccaccttggcctccaaaagtcctgggattataggtgtgagccaccacnnnnnnnnnnnnnnnnnnnatcttgatcgaaattcttgttatattttgaatgtgatgaannnnnnnnnnnnnnnnnnnnnccagcaatctgcaatttcaatatgccagggcttttctgtatgtcaaagtgggtttgagatggttaatttttcttctagtctgaaatgtatcgagaaaatttggaaatcctgaagaccagaaattgaaataagtttttctaggatttgtgtttcttgctgtggaaaactgatggtgaccaatgcatgtttacaaataagatcctcatagatcctaagggtaaattata

SEQ ID NO: 17370 - DNA, 720 bp, Macaca Fascicularis
  misc_feature (1)...(720): n = A,T,C or G
gacaaagcccacancctnntagtacnnnnngacagcagtgagaagatctgcaccatccannnnnnnnnnnnnnnntggacccctggctacccccacacccaggaggcgctctgcccgcagatgacatggtcctgggaccagttgcccaacagagctcttggcccggttcctgcgtccacactcttgccagagtccccagtcggctcgcccaccatgatgctgcagccgggcccgcagctctacgacgtgatggacgctgtgccagcacggcgctggaaggagttcgtgcgcaccctggggctgcgcgaggcggagatcgaagccgtggaggtggagatcggccgcttccgagaccagcagtacgagatgctcaagcgctggcgccagcagcagcccgcgggcctgggcgccgtctacgcggccctggagcgcatggggctggacggctgcgcggaggacttgcgcagccgcctgcagcgcggcccgtgacacggcgcccactcgccacctaggcctctggtggcccttgcagaagccctaagtacagttacttatgcgtgtagacattttatgtcacttannnnnnnnnnnnnnnggtcctgcgtagccgcaccagccggccccacccctggtcgcccctatcactccagccaaagcgaagaagcacgaaggaatgtcgggagggggtcaagacatttctcagtttctcggccggagttg

SEQ ID NO: 17371 - DNA, 702 bp, Macaca Fascicularis
gcacaccctccacagacaacaggtaaaacagggccacatagatgctgatggagccttcccaagttgtggtgcttgagccaggaggcctgctagggttaggaggtccttaggcctctgagaagctctgaagaactctctggaagcccctgggcccagcagttagctggctctgtgcaggtgctgactggcttgagcaagttagagctggccacaccaggaccctgtccaatctttgacaattgggagctgccaagagtgaagggaagagacagcccaggatactggcacagaggtagtctcactacttgaactaggctgagcaatctggccctatgggtctaggacacagttcctgggaatatcgcattcttctgcccttcctgtaggcaggaacaaacagggctgccttctggccttgtaaaacccttgttgctgtccaggagggcctggggacttgtgtctacggggagcagagcgcagaggcagtgcacatattcaggcaccaggattggggctggagtgaggttgtggtatttcaattaccttctattggtctccattctctacactcttgtaataaaatgtctatttttaatgtttgtacacaacaatctttctattctagcctgcattgtgcttacatgcctgcataaggtttaagaaccattgatttaatgtaatagggaaagttctaacccaagt

SEQ ID NO: 17372 - DNA, 778 bp, Macaca Fascicularis
  misc_feature (1)...(778): n = A,T,C or G
gtcactgaacatgagagcatnntaatgactgctagtacagttcaaatgaaattcaggtgtnnnaggagaccatgtacatgactgtctccattattgatcggttcatnnnnnnnnnnnnnnnnnnnnnagnnnnnnnnnnnnnnnnnnnnnnnnnnnnnnnnnnnnnnnnnnnnnnnnatgnnnnnnnnnnnnnnncagaaattggtgactttgcttttgtgactgacaatacttacactaagcaccaaatcagacagatggaaatgaagattctaagagctttaaactttggtctgggtcggcctctacctttgcacttccttcggagagcatctaagattggagaggttgatgttgagcaacatactttggccaaatacctgatggaactaactatgttggactatgatatggtgcactttcctccttctcaannnnnnnnnnnnnnnnnnnnnnnngcactgaaaattctggataatggtgaatggacaccaactctacagcattacctgtcatatactgaagaatctcttcttctggttatgcagcacctggctaagnnnnnnnnnnnnnnnnnnnnnnnnnnnnnnnnnnnnnnnnnnnnnnnnnnnnagtatgccacgtcgaagcatgctaagatcagcactctaccannnnnnnnnnnnnnnnnngttcaagatttagccaaggcnnnnnnnnnnngtgtaacttgtaaacttgagttggagtatatatttacaaataaaattggcaccnntgtgccannntgtacnntatt

SEQ ID NO: 17373 - DNA, 714 bp, Macaca Fascicularis
  misc_feature (1)...(714): n = A,T,C or G
ggtgacagagtgaaactctatctcaaaaaaaataaaaaataaaaaaaatagaatatccctgtannnnnnnnnnnnnnnnnnnctgttctgtgctagaccacacgttatttaatttactcatcactacatgtgtggtagggattaatannnnnnnnnnnnnnnnggaaaaacaggctggcagaggacacacaactagcatgtggtgggattgggatcagaagccaggcctgtttgtcctttgggcccttggtggagaacagtgcgaccttcagaannnnnnnnnnnnnnnagctcctatggctcatggtatccctcagagtctgctgaggaccctcaaactccctcctcatgcctggtgtgctgtgcctctcctcacagggggccgcctgccctgcccannnnnnnnnnnnnnnnnnnnnnnnnnnnnnnnnnagcagtgctgggcctatgagcctgggcagcggcccagcttcagcaccatctaccaggagctgcagagcatccgaaagcggcatcggtgaggctgggacccccttnnnnnnnnnnnnnnnnnnnnnnnnntaggtgcagctcctcagcggctccagctcacacactgacagctcttcacagtcgtggactcctgccaccagcatccacactgctggcaggatgcagctccgtgtcttctctgtgtcccnnnnnnnnnnnnnnnnnnctcttccaggcagaaac

SEQ ID NO: 17374 - DNA, 708 bp, Macaca Fascicularis
  misc_feature (1)...(708): n = A,T,C or G
cgccatggccaatgacagctgcgggcccgcgagccgagtgagactggcagtactgcgagctgtgggggaagatggagaacctgctgctctacagnnnnnnnnnnnnnnnnnnnnnnnngcaccagcctcaggactggaagaagtacaagttagtgtgccagggcagcgagggtgtcctcggtcacggaggcaaagcctagtttgctgacattgaacccaactttgatagactgctgtttttctggtctgaccgtcgcaaccctcatgaagtacaacaagctgaagtgtgttgttaccactgatcttctggctctgagaattcctgcagagaagagcagggtggcaaggagatagtgagcaactcccaggagcgtggagggatccagaatctggacagaagaaccacctagaaataactcagcagaattctgaaaatgaggtcacgctgggacttacagttccccagccagatggggtcacaaggctgcagaaaagtgaagagctttggaatgaagttctccaggacttcaaggagattcagaaaacatccagcgcagagacaggggctcaccatgttgcccaggctgatctcgaactcnnnnnnnnnnnnnnnnnnnnnnnnnnnnnnnnnnnnnnnnnnnnnnnnnnnnnnnnnnnnnnnnnncatgcttnnnnnnnnnnnnnnnnnnaattaattatcacttagcc

SEQ ID NO: 17375 - DNA, 700 bp, Macaca Fascicularis
  misc_feature (1)...(700): n = A,T,C or G
gtttcgggaggttnnntggctacactgagagagatgtggagctgctgtaccctgtcaaggagaaggtcttctacagcctgatgagggagagcggctaaatgcacactccagtgcacaaagctgcctataccatagagaagttttccacctggaccaatacggaattccgatacctggaggatggaggcctggaaaggaagttctccgaggatgacnnnnnnnnnnnnnnnnnnnnnnnnnnnacaacagcaaccatcgtctcctcccagcgcttctacaaggagaacctgggacagggctggatgacccagaagcatgagcggatgaaggtctacgtgcccactggcttctctgccttcccttatgagctaatgcacacgcctgaaaagtgggtgaggttcaagtacccgaagctcatctcctattcatacatggctcgtgggggccaccttgcagcnnnnngaggaaccagagctgctcgcccgggacatccgcaagttcctgtcagtgctggagcagcagtgaccaccccacaccgccccctgcctccctccacaagtgccctccaggcttttctttgggaagataccccttttctgaggaatgagtttgcctccgtcccctgcccatgctgggagcccacacttaccccctcacccctccaagctcactccccaatccccaactctgtgcgataagc

SEQ ID NO: 17376 - DNA, 778 bp, Macaca Fascicularis
acccatgctgagtgtagagctggggcctggtagtgggtgggggccgggtgggaggcggcagtagtcttagcctgtgcactctcttccttgggtgtttcgtgctggctcctgggaactacaaatcccagagtgcggtgcgcccggcctcatttctgatagatcccgcttgggggaggtggtgcgtggttactgagctgtgcatcttgggacatgtagtagcccaggtcggcttgtcactcgctgtgagatggggagattttgtcttttgatttatccctggagggctggcagggttgtagatgaaggaggaatgatctgagcattggttcccctgacacatcttgctagccccagggttagagtgggcagggcagagccgtgcagcacctgggagaggttcctttcccatgggcagcctggggtcccaggaacaagccagggcgagtagcatgtccgcctgagcagagtgtggccccagaaagctgaggagtgtgggtggcagagagctttgagggcaaggccacccgcaggggcgtgtgtgtggcggggcttggcatgtgatggcagctccaggcatgctgctgcttgtatggctttctttggcctctgaccctgctgcccgttctttccaacatcacagatgagccgcctctcctcctccctgcctggggatcccggtggccagggaggggagtggtggagctagccgccgttaacactgagcctcagagacaaaccaaaaccagctgggctgagctcagatccagggggaaatgct

SEQ ID NO: 17377 - DNA, 802 bp, Macaca Fascicularis
  misc_feature (1)...(802): n = A,T,C or G
gccctggcagtatgaccctgcgaaggggccctggtccttccaggtccccaccgataggactctatggctctttctgggccaagttcctttagtgccctccacagctgcagcctccctctgacttgcagaccgagagcagaggcagtgagttgtggaaagcctgtgctgccnnnnnnnnnnnntctcggaaggctagctgggcacggacgttcggggcacgccggggcaagtccctgactcactgtggcctgccccgcccagcnnnnnnnnnnnnnnnnnnnnnnnnnnnnnctcaggttttttgtttgtttgtttatgtctcccctgggctctgacccagctctggcttccagaaaatcccagcatccttctctgcagaggggctttcaggagggatgctgcctgagtcacccatgaagacaggacagtgcttcagnnngaggctgagactgcgggacagtcccagggctctgtgcagggaggaggtggcagccctgtaggctgtaggggtccttcaggttagctcaggaggcttggaaagcatcacctcaggccaggtacannnnnnnnnnnnnnnnnnnnnnnnnnnnnnnnnnnnnnnnnnnnnnnnnnnnnnnnnnnnnnnnnnnnnnnnnnnnnnnnnnnnnnnnnnnnnnnnnnnnnnnnnnnnnnnnnnnnnnnnnnnnnnnnnnnnnnnnnnnnnnnnnnnnnnnnnnnnnnnnnnnnnnnnnnnnnnnnnnnnnnnnnnnnnnnnnnnnnnnnnnnnnnnnnnnnnnnnnnnnnnncacatgtcaccgtactc

SEQ ID NO: 17378 - DNA, 692 bp, Macaca Fascicularis
  misc_feature (1)...(692): n = A,T,C or G
atcattaaactttcttccaatatagatgagtatttctctgaacagtcattgaagaatcttctgctttcaacttctgaggaacaaatcgaaaaatgtcttataattgaaaatataagcacaattgctacagtagaagaaactaatcagactgatgaagatcataaaaaatacagttcccaaactagcgaagattcaggaaattattctaatgaagatgaaagtgaaaataaaacaagtgaagaactacagcaggactttatatgaccagaaatgaactctgtcaagtataaggtttttctgcaggagttacactgggatcctgagctccttgccttcctctcagtaactacaaagagaacatttccctgtttcggggaagaaaaaacatcttcagatcataggtcctaaaaatacaggcaagcactttactatttaaaaatgaaattacaggctcaggcacagtggctcatgcctgtatcccagcactttgggaggccaaggcaggcagatcatgaggtcaaaagattgnnnnnnnnnnnnnnnnnnnnnnnnnnnnnnnnnnnnnnnnnnnnnnnnnnnnnnnnnnnnnnnnnnnnnnnnnnnnnnnnnnnnnnnnnnnnnnnnnnnnnnnnnnnnnnnnnnnnnnnnnnnnnnnnnnnnnnnnnnnnnnnnnnnnnnnnnnnnnnnnnnnn

SEQ ID NO: 17379 - DNA, 845 bp, Macaca Fascicularis
  misc_feature (1)...(845): n = A,T,C or G
gatccagccagagggaaggtcgagnnnagagtgagaatnnnnnnnnnnnnnnngagacccggtccannncgagatccaattccaaatcgaaaccaaaccttccatcagaatcacgctccagatcaaagtcagcttcaaaaacccgatctcggtccaagtctagatccaggtctgcttccagatcaccctcccgatctagatctaggtcccactcaaggtcctaactggctatggccacagctggaactacccgagaagtcttttgtacatgtttggtagccgtagcacaagtgattggagtagaacatgtcactgctgtacatttttaactcccctaatggtgtgtctataattgttaaatctaagtgcttcctctcagtaaagcctcctggcgccaggccttcctgctcgactgaaaaaaattttctctttgaaaatccccttttactcatggcccacagtagaatatccaaaacgccttggctttcaggcctggcctttcctacagggagctcagtaacctggacggctctaaggctggaatgaccacgtaggtaggtatggtgagttcaaccatttttgctcttgaattgatgcccttcgatgtatgccatttagtgaaagtgctaagtcttaagtnnnnnnnnnnnnnnnnttcatattnnnnnnnnnnnnaaagttnnnnnnnnnncagtcgaggaaaattgatacctgcagtaacccataggaaataaactgtagagttnnnnnnnnnggtattgtgattatattgttttatattaaaaaagaaaagaaaagaattttttttaattttatttttccccngtcttgcaaagtatagtgac

SEQ ID NO: 17380 - DNA, 756 bp, Macaca Fascicularis
  misc_feature (1)...(756): n = A,T,C or G
gcagctagtttaggagcttgcatttccagaaaagggcaactttgtgtgaagcagcttctcccacagagcttnnnctgcattgttggcgatgtccggcagagcatcactctttaacctggggcactgagtggccccagcagagatgtcatgnnnnnnnnnnnnnnnnnngtaccatctctgcccccagaggaagacctgtccgtggttccaggcctgccttgaggccaccatatctgtgtctnnnnnnnnnnnnnnnnnnnnncgggccgaaggaagaggcgttagctgctgccnnnnnnnnnnnnnnntacctgcccagcccttccttgtctgctgaggtnnnnnnnnnnnnnnnnnattaaataccggctgatgtcacagagcggacggtgcattgccgaggactcactcacagctgtgggcccccttccatctcctcccactttcttggctgggtcttctgaggcctacgtggaatgaactacacatgtggcctcatgcccaagcgtttgttcaatggcttctgactctgggattcaacttgattnnnnnnnnnnnnnnnnnnnnnnnnnnnnnnnnnnnnnnnnnnnnnnnnnnnnnnnnnnnnnnnnnntgggccccagggaggggatagcgggggtgaggccctgaggctgtccagggtccgagctctttgcctccaacctgcttctgcctcaaaaggaacaggctgttggtggcaggctcctcccggggagctgtactgtacagaccaag

SEQ ID NO: 17381 - DNA, 751 bp, Macaca Fascicularis
  misc_feature (1)...(751): n = A,T,C or G
tgaccacagctgagcgcgagatcgtgcgcgacatcaaggaaaagctgtgctacgtggccctgacttcgagaacgagatggccacggccgcttcctcctcctccttggaaaaganntacgagctgccagacgggcagggtcatcaccatcggcaacgagcgcttccgctgcccggagacgctcttccagccctccttcatcggtatggagtcggcgggcattcacgagaccacctacaacagcatcatgaagtgcgacatcgacatcaggaaggacctgtatgcgaacaatgtcatgtcggggggcaccacgatgtaccccgggatcgctgaccgcatgcggaaagagatcaccgcgctggcccccagcaccatgaagatcaagatcatcgccccgccagagcgcaagtactcggtgtggatcggcggctccatcctggcctcgctgtccaccttccagcagatgtggatcaccaagcaggagtacgacgaggccggcccttccatcgtccaccgcaaatgcttctagacacactccacctccagcgcgagacttttcaggacgacgaatttgctcaatcggctggggactgaccagccaccccgcattcactttctttgtaacaacttcctttgttgccattgtaaactgacacagtgtttataacgtgtacatacattaacttattacctcattttgttatttttcgaaacaaagccctgggaaggaaatggaaaactgaagaagcataa

SEQ ID NO: 17382 - DNA, 721 bp, Macaca Fascicularis
  misc_feature (1)...(721): n = A,T,C or G
atgccgtgtccatcatnnnngccatggggnnnnnnnnnnnnnctgcatatgcgaagaacaaactgaatgggaaatnnnnnnnnnnnnnnnnnnnnnnnnnnnnnnnnnnnnnnnnnnnnnnnnnnnnnnnnnnnnnnnnnnnngtgctattttaccannnttgagatnnnnnnnnntataagacgccttcactcagcagttctggttcctctgatggagggacacgaccaagcagctgtcagcagggcatgggggatgatgaggcttgcagcatggacaccaactgatgctgactccacgatcctgccaccctgcagcaccagcataatcccccaggagaacananttgacactgtgcagactgctagtgttctgtccaaaaaccagacaaggaaatacccttcttttatgagcagaagggggaaaaaaaaaaaaaaaagaccgtttacctagaagaagctatgtcaagaggctgaattatttttatttttaaacaggtggtgagaaatttctgtgaaacctgtgaagctgaaaagggggtgggatgggggtacacaatggagtatgtctgnnnnnnnnccaaagaatggagagaaacannnnnnnnnnnnnnngagcagcctggagacccaccccacctgcagggctgccctgagcgcctggatttctggttctgatgctgatactagtcaccccaaagtagtctgctcacagtaaccca

SEQ ID NO: 17383 - DNA, 711 bp, Macaca Fascicularis
  misc_feature (1)...(711): n = A,T,C or G
gagaacggcaatggtnnnngagagnnnnnnnnnnnnnnnnnnnnnnncgagagantnnncagtgacctccnnnnnnnnnnnnnnnnnnnnnnnnnnngccagctcgctgccacggcccttcggaaagtgctgtccctgaagcagcttctgtttccggcggaggaagacaatggggcggggcctcctcgagatggggatggggtcccagggggcggccccctgagcccagcacggacccaggaaatccaggagaacctgctcagcttggaggagaccatgaagcagctggaggagctggaggaggaattttgccgcctgcgacccctcctgtctcagcttggggggaactctgtctcccagcctggctgcacttgaggtccctgtccaggaaggccttttgcaagaaggagaggaatgggggagaggacgtgagggaccacccccacccacacannnnnnnnnnnnnnncacaccctgagggcctgaggagagggagctgtgggccacgcctgggaggggcccagctggggtcagaggccctgcatgagcctcggccatctctccctcctgccctctgcttgggggactcagggcttcattccggagggcaccacggtgacccgggccatctcagtattgcctgtgggggccacccctccactccccacccccaagtgccttcgctctgtttttatacnctgaattggaggt

SEQ ID NO: 17384 - DNA, 773 bp, Macaca Fascicularis
  misc_feature (1)...(773): n = A,T,C or G
agnnccagcccggggcactgagcgctgctgaggtggagaagaggctggcagtccgagagnncgcagccgccactctcactcatgtgcaaggctgcagcgctgtggacggtctgggtctgcagcagggcctggagcgcctctatgagatgattctcaagaggaagaaggcagctcggggtggcaagaagagacggtgacccgagcccccctccttttccccccacctggtaggggtctgcacacttggacagcagggtggggccagcctgtgaccnnnnnnnnnnnnnggggtgcannnnnnnnnnnnnnnnnnnnnngagagaggagaatggggggtcctgttttggcgccacattagggtggggatgggagatgggatgtctttgcacatctctctctcatcctctctggagaagtgggcgctgcaggactgtggagacgtaaatgtaaactgtgactctacctcgaccctgtttcttgtttttcttctctggctttttaattggatgcgttttgggtggtgggggatggaaagtggcttggagaatgtgtttgggatgaaagaactatctccccgtcctctgtcccccaactggggagtctccccaagctgcttttctnnnnnnnnnnnnnnnnnnnnntttatttttgtgtttgtgaaagtgccaagaaccccttcccacatttgtagatccatgaccctttttataagcnngtgtatgtcctctgtattattgttattaactgttttttagcatttgcctgtaagtata

SEQ ID NO: 17385 - DNA, 684 bp, Macaca Fascicularis
gtacataatttcttttggagcagaagttggacttcatagagtctgacagtccctgttcctctgaagcactttcaaagaaagaattgtctgccgaagagctgtataagcgactcgagaaactcattattgaggacaaagcgaatgatgaacagatctttgattgggtagaggctaatctagacgaaagccagatgagttcacctacattccttagagctttaatgactgctgtttgtaaagcagctattatagatttgctgcgaatgttttttgattgcctgtatgatgaggaggtgatctccgaggatgccttctacaaatgggagagcagcaaggaccctgcagagcagaatgggaagggcgtggccctgaaatctgtcacggcattcttcacgtggctgcgggaagcagaagaggagtctgaggataactaaaacttcaaatacacaaaaggaaacaaacaatttaagtatttttttaaaaagtttcacgtcttcgccaatcacagtgcagcaaggccaattctcgcagaaacccccacgtgtgcacgagtgggagaggggaaagagaaaaaaaggtgatcatggaggaaaaaggtactggaaaaaagtaaacttcaaaccttagggcgggagcactaaaaccaaaatacatgtattatttatagaaaatattttctgtttt

SEQ ID NO: 17386 - DNA, 756 bp, Macaca Fascicularis
  misc_feature (1)...(756): n = A,T,C or G
taggaaccatcccaggtgcgggtggcacccagagactcacgcgtgctgttggaagtcgctggcaatggagatggtcctcaccggtgaccggatctcagcccaggacgccaagcaagcaggtctcgtaagcaagatttttcctgttgagacactggtggaagaagccatccagtgtgcagaaaaaattgccagcaattctaaaattatagtagccatggccaaagaatcagtgaatgcagcttttgaaatgacattaacagaaggaagtaagttagagaagaaactcttctactcaacctttgccaccgatgaccggaaagaagggatgactgcgtttgtggaaaagagaaaggccaacttcaaagaccagtgagactcagccgcccctccctcacacctttgcttggagagggcaaatgcagcctgctgtcagttttagaagcaagtaaatcatcctcttttcgagagcagcgtccgtggtgcgcagtttctctctgactgctgcgtggtcacggcccgagctctcacggcatgactgccttcttcacccagcctgtgagggtccgtgttcacgtcctgattggagcaccttcttctcaatgttaagattctgctgaggagcccctgctggtccctctgggcatgctgtgcttgggcggaaagcagggcctgcaggtccttgtgtccctgcggctggagaggggctgctctgagggaannnnnnnactgccttcacacnnnngctctgctgataaa

SEQ ID NO: 17387 - DNA, 890 bp, Macaca Fascicularis
  misc_feature (1)...(890): n = A,T,C or G
gaccaggaagnnnnnnnnnnnnnnnnnnnnnnnnnnnnnnnnnnattttcctttgttannnctgaatttttaaaacccgaagtcaagagctaagtagatgtgtagatctccgtccttcatttctgtcattcaagctcannnnnnnnnnnnnnnnnntttttatgtttttcattgccaagttgcatccatgttnnnnnnnntgatgannnnnnnnnnnnnnnnnntcagaatccaaatgtcctcaggtagtttggagcatctctatgagatgggattatgcagatggccnnnngnnnnnnnnnnnnnnnaattaacacattatcaaannnnnnnnnnnnnnnnnnnnnnnnnnnnnnnnnnataagtagacccaatggggagagaaaatgcnngatttctttccctcttttnnnnnnnnnnnnnnnnnnnnnnnaaccatccaatctgtggataattggatgttagcagtactcttctacttccgggcctggagcttggcttgtatccaagtgtatagttgctttgcctaagaggaatccctctatttcacctgttctggaggcaccagaccttgaaaagaacatgctcaaaataaaatgttacttgttatttttttaaactcaaagttaaagttatcaaagttctaaaattccaagaatnnnnnnnncnnngtannnnnnnnnnnnnnnnnnnnnnnnnnnnaagggcaaccagcttgggtgctacctcagtgttgtagtttctgctactttatgtctttgatcactctcatccccaaactacttgaaaagggcatttggcaccactccctgaaacaacacagtcactctagcaaggcccccaaagggccctggttttacattgcatttcaaactttattgctttggggt

SEQ ID NO: 17388 - DNA, 595 bp, Macaca Fascicularis
  misc_feature (1)...(595): n = A,T,C or G
gtaccttgcgtgtagttnnnnnnnnnnnnnnnnnnnnnntcatttcnnnnnnnnnnnnnnngtnnnnnnnnnnnnnnnnnnnnnnnnnnnnnnnnnnnnnnnnnnnnctgcnnnnnnnnnnnnnnnnnnnnnnnnnncaattcggttactgtctcctcgtgggaaccttccccttcaactcttttctctcgggcttcatctcttgtgtggggagtttnnnnnnnnnnnnnnnnnnnnnnnnnnnnatcaacccacagaacaaagcgnnnnnnnnnnnnnnnnnnccagagcgagcctttgctgattttcnnnnnnnnnnnnnnnnnctgcaccttgttgtcatgaactttgttggctgaatcattcccatttacgtaattgaggagtaggagactaaaagaatgttcactctttgaatttcctggataagagttctggagatggcagcttgttggacacatggattttcttcagatttgcactagctctgatttttatgcaggagaaaannnnnnnnnnnnnnnnntgtcagaacaactttctaacaaacatttattaatccaacctgcctttcattaaatgtaacnnnnnnnnc

SEQ ID NO: 17389 - DNA, 421 bp, Macaca Fascicularis
  misc_feature (1)...(421): n = A,T,C or G
acctaannnnnnnnnnnnnnnnnnnnnnnnnctaggtagacatcacacaagtttaggaccacccatgtagagtgctgggttgagcctacttagacgagtgtcaccctcctgacccagtttcccctatccttgtgaaaaggaagaaaatgatggttcctggtctgtcttgtgctcaaatctgacccggctcccaaccacctgtggctctggacgagtcccttatcttctttgatcctcatacctcctcccagggtacggttgccattcaggggatctgaaaacctagagcgtgtgtgaaaccatccctaaaatgtgtgtggaggtgaatggcaatttttcagcacaccaagtttcatgaattgaactgttcttcccacttgcatgatggtttcacannnacagtttagtggctaaagaatat

SEQ ID NO: 17390 - DNA, 758 bp, Macaca Fascicularis
  misc_feature (1)...(758): n = A,T,C or G
atgcaacaattattnntnncaaaatgatgcttatgagtgctacaactgcattctatagaatgacaagaaagnnnttgccaatccagaagactgtgtaacatttggcaaaggagaaaatgccaagaagtatctnnnnnnnnnnnnnnnnnnnnnnnnnnnnnnnnnnnnnnnnnnnnnnnnnnnnnnnnnnnnnnnnncatttcttggaattggcctcctgtattccttgagtggtcccgacctctctacagccatcctgcactnnnnnnnnnnnnnnngagcacggatctaccacaccatttcatatttgacaccccttccccagccaaatagaggtttgagtttttttattggatatggagttactctttccatggcttacaggttgctgaaaaataaattgtacctgtaaagagaatcatccaactcattatccagttggttttttaagaattctctacttccaatttataatgaatactttcttaggttttaggtaggagaggaacagaggaattacgaactggggtaaacccgttttgaatattagcattgccagtatcctctcttcttgtttttacaatttggattagaaatttagcataataattcttacgtcttttgtctgattttttaaagtactttcttatacatttggatcatgttatgatttgtaacattcatgcagcacttcacttctgaatctataaaataattgtgtgtatgagaaacctatatttcaacactgctgaaacgga

SEQ ID NO: 17391 - DNA, 710 bp, Macaca Fascicularis
  misc_feature (1)...(710): n = A,T,C or G
atttatggaacannnnnnnnnnnnnnnnnnnnnnnnnnnnnnatgtnnnnnntngtgggcatcgaccgagacagctatcgaagaatcctcatgggaagcacactgagaaagcggaagatgtatgaggaattcctcagtaaagtctctattctagagtnnnnnnnnnnnnnnnnnnnnnnnnnnnnnnnnnntgcattggaaccagtgcagtttgaagatgggcagaagattgtggtgcagggagaaccaggggatgagttcttcattattttagaggggtcagctgctgtgctacannnnnnnnnnnnnnnnnnnnnatttgttgaagtgggaagattggggccttctgattattttggtgaaattgcactactgatgaatcgtcctcgtgctgccacagtcgttgctcgtggccccttgaagtgcgttaagnnnnnnnnnnnnnnnnnnnnnnnngttcttggcccgtgctcagacatcctcaaacgaaacatccagnnnnnnnnnnnnnnnnnnnnnctgtctgtctgaaatctgcctcctgtgcctcccttttctcctctccccaatccatgcttcactcatgcagactgctttattttccctacnnnnnnnnnnnnnnnnnnnnnnnnnnnnnnnnnncctgtctgtttatatattgaaagttgcttttattgcaccattttcaatttggagcattaactgaatgc

SEQ ID NO: 17392 - DNA, 520 bp, Macaca Fascicularis
  misc_feature (1)...(520): n = A,T,C or G
acagaaagaggaaacaagcccgccctctggtgaaatgggactccctcccaaccgcctgaaagcttcacagattcacgcagagtccagtgggcaggaactaggcaggaaaggctcctcaagagactcctgggggggctggcctaagccccagtcagaggccctgctctctctggcccggggcatccagctgttgttctgaaggcacagcccattccgtgggcttacaagacacagtgaaggggatcatggcctgcgcccctgcttttcagcagtaaaaagcccaaaaagcctggagagcatggccaagttgggagggccgagccggaactccatgtccctcgagagcaggggcctcttaagggctggcactggtctcagcctaatggctgaggcggtgccctggcttcacatgcatctcactgctcccactgcgggagggcagggaatgggtgtctgggagcccttcatgtgtagggccgagctgggggcccccatgngccatcctgggccccactgctcc

SEQ ID NO: 17393 - DNA, 781 bp, Macaca Fascicularis
  misc_feature (1)...(781): n = A,T,C or G
tgacttaagagcacggtgctgtnnnnnnnnnnnnnnntttgattcagtacaagcgnnnncaaggacagcgtattccagcagacaccttcttccccggcacagaaagtgtnnnnnnnnnnnnnnnnnnnnnnaaaagctttgaaacagatatgaacctaaactttcaaaacctgtcagtgattgggttccnnnnnnnnnnnnnnnnnnnnnnnnnnnnnnnnnnnnnnnnnnnnnnncggctgtggtccagctgaggtctgcaggattgtaagacagcctgtgctccctcgttccttcctctgcatcgcccctcctctccctctccaagcagagggagctctcccacccccatggaggagaaagctgctaccacctctgtgccccccggnnnnnnnnnnnnnnnnnncctacccaaatttgtgattaagattgccgaagagcnnnnnnnnnnnnnnnccaccccctctgttcccttatggctgcttgtcactgactgacattcacggcagaggcaaggctgctgcagccgcccctggctgtgcacattccctcccgctccccagagactgcctccaccaccccacagatgatggatcctcagtgagttctcttgggctctaggtcctggagaatgttgtgaggggtttatattttttaaatagggttcataaagaaatacatactattcttcttctcaagacatggggggaaattatctcattattgaggccctgcnnntgctgtgtatctgggtgtgttgtatatcctgctgccaatggct

SEQ ID NO: 17394 - DNA, 684 bp, Macaca Fascicularis
  misc_feature (1)...(684): n = A,T,C or G
ggtagcagcagccncgcccctagcagagatgcctnnnngagctagaaccctctgtcccccccnnngcacctcctccttccctctcccactcacaccaccagcctcaggggcctaagctccagctccctcaggcttcagctgccagtgtcctgagccccagggagagggggctgacgggtgcctaggcctgggcagtggatggctgtgaatgggtgcccaccttttgggtgccnnnnnnnnnnnnnnnnnnnnnnnnnnnnntcctcccttccagctccctgtgcccgcagggtcctgggaggagagacactggtggggataggccagccacgcatnnnnnnnnnnnnnnnnnnnnggagcccattgtggcctgaggctgccctcctccggggttcagccctgaggacagagatgcctccttcctcttttccttcccaaagcaannnnnnnnnnnnnnnnnnnnnnnnnnnnngtactgtacagctggctctgcttcccnnnnnnnnnnnnnnngtggggtctgccacccaggatccccgaggcgctttgggggcgaagggttctgctggcctctgcgagtggtttctcgtgcactggcaccaagtgcgggtccggcagcttctgccccctgcagaaccagagagccagccaaggggtggggctgcgggggttccgtgtccaccc

SEQ ID NO: 17395 - DNA, 819 bp, Macaca Fascicularis
  misc_feature (1)...(819): n = A,T,C or G
aagcaagctgtgaaaggnncnnncccacatgaaaaggataagccaagatagctgtaaacacaaagcatttgagctgccactctcttggagcatattgatttttcaaaagccagctctgtcaggaaaggaggtgctgttatgagcagctcttccaggggggcnnnnnnnnnnnnnnnaatttcttccattgctggctcatctgtgggnnnnnnnnnnnnnaagcaacctgtggcctgcacctgtggcctcgaaggaagcacaaaccctccatccacttcccatttcctctacccttttccacctcccctttccatcccaccagctgccagtggctcccagaaagccttattgagccccttgttgacacttagggctgcagaggcctctccccactggcttggcctttcctgagaggcagggctcccatcctcagagcctttctggaacaaggannnnnnnnnnnnnnnnngacacaggcctggcctgtcgctgtcacttgtctnnnnnnnnnnnnnnnnnnnnnnnnnnnnnnnnnnnnnnnnnnnnnnnnnnnnnnnnnnnnnnnnngggaagtttcagggtacgctggttcccctctccagctgnnnnnnnnnnnnnnngggactgcagacttttctactctgtgatcaattcaacgcccgatgcttctgtttcattcctgaccctttctactatgcattttccttttatcaggtggataaagttaaatactgtgtatttatcactaaaaagtacatgaacttaagagaaaaataagcctttcgtgtttttccactagtatgtttaagcttctctgta

SEQ ID NO: 17396 - DNA, 757 bp, Macaca Fascicularis
agagatgtggactttattgctatatgggaatacacatttaaatttgagggcattttatataaagaaaaatacagacctataaagtttggcatattcattaagttatcttttaatatttttttctagaaaacaggtgacatttgtatctacaataaaaaatttttatacagatcctactgtcgcaaactgaatcccatcaagaaaatcagtttctattgtattagtaactcaaaataaattaccacttcgaaaacttgctttcccacactaaggtaagttcaggctagattcaacactccagaagtttttttactaaagacttttttcagttagaagtgatggcagttttataaaaagagaatatacttccactgatgcccttactgtgcaaaaaaagtcttaagaaaagcaagtagacatcttcataactatgaatgaagctgctgaggtagtgtttaggattctccatgtcagttagtgagtgtaagaaggactgtgttaaagtgttgtaaacagttagtgcaatgtatagcctgagtctatcgagaatggctgtaaccaatttgacatcacgttatggatcaatacacaatgaaaaaccaaagaaccacgtatatcttattcttaacttttgtaaaccatgttttatgggtaacttttcagttttctcaaaaggctgataaatttcagtattttgaatacatcattgttaattttgagttggcagaggtaaactaaccaactaccattatgtttt

SEQ ID NO: 17397 - DNA, 771 bp, Macaca Fascicularis
  misc_feature (1)...(771): n = A,T,C or G
tacgtttgcagtgagagaactnnnnnnnnnnnnnnntcagtgannnnnnnnnnnnnnnnnnnnnnnnnnnnnnnnnnnnnnagaactccagtcgcttcaacacacagtattagcagtgcagccaccccggatcgaatccgcttcccaagaggcactgccagtcgtagcactttccacggccagccccgggaacggcgaaccgcgacatacaatggccctcctgcctctcccagcctgtcccatgaagccacaccattgtcccagactcgaagccgaggctccactaatctctttagtaaattaacttcaaaactcacaaggagaaacatgtcattcaggtttatcaaaagacttccaactgaatatgagaggaacgggagatatgagggctcaagtcgcaatgtatctgctgagcaaaaggatgaaaacaaagaagcaaagcctcgatccctacgcnnnnnnnnnnnnnnnnnnnnnnnnnnnnnnnnnnnnnnnnnnnnnnnnnnnngggaaatccgcaaagtgtnnnnnnnnnnnnnnnnnnnnnnnnnnnnnnnnnnnnnnnnnnnnnnnttctgtgtccacggtgatgggcacgcagagaacctcgtgcagtgggaaatggaagtatgcaagctgccaagactgtctctgaatggggtccggtttaagcggnnnnnnnggacatccatagccttcaaaaatattgcttccnnnnnnnnnnnnnnnnnnnnnnnnnnnnnnnnnnnnnnnnnatgtaaattaagtagc

SEQ ID NO: 17398 - DNA, 763 bp, Macaca Fascicularis
  misc_feature (1)...(763): n = A,T,C or G
atgacttaaaatgctnnngactaaggggagggatgctgtgcacactgtggaaggccatcattgactttcgaaacaaacagacttgactgttgctcaatttaatcttcaatggaaattctaaaaattaatacagatctgaccttcttgggggtgggaaaatcgaagggagaggagaaaggagctgcactttaaatccagtatttgtttactcacgttaaaaaaaaaaaaaaaacagacaaaacacactgaaatttcctaactacatctannnnnnnnnnnnnnnnnnnnnnnnnnnnnngactcttaaaataatcctgaacattagaaccctaacgttcaggaagattttaatctaagcatttttatggaaatatttttaatgcagcagctattgcacttcagccaaatgtttatttcacacaaaacggatgtaacatttcatgtgattgtgcaccactggaacaaaaccaaaatgtgaccataactttttaggcttctgtgtgtttgtaatatgctctaataatctgagtagaaatgcataatttcaattactgtataaagtttatgtttttttaagtgtgcagaatctgagagcaatggtttttacttctctgtgttaattgtaatattgactatattttgtaacttaagtttctgacctgtcgtacatttgtttgagtcgtttatgtactactgaactgtaccagttgcacatgcttgaaccgtagtaacgttagcttgttctaaagctatccattgtgtc

SEQ ID NO: 17399 - DNA, 779 bp, Macaca Fascicularis
  misc_feature (1)...(779): n = A,T,C or G
cactattgancnggttcaaaattcttctcagaaaactcagaatgatgtggacatagctgatgtggcttattattttgaaaaagatgttaaaggtgaatccttgtttcattctaagaaaatggacctgagagtaaatggggnnnnnnnnnnnnnnnnnnnnngtcaaactttaatttattatgtcgatgaaaaagcacctgaattctcaatgcagggtctaaaagctggtgttattgctgttattgtggttgtggtgatagcaattattgctggaattgttgtgctggttatttccagaaagaagagaatggcaaagtatgagaaggctgagataaaggagatgggtgagatacatagggaactcaatgcgtaactactataatttgaagattataaaagaagggaaatatcaaatggacgcaaattacaaatgtgtgcacatgggacgaagacatctttnnnnnnnnnnnnnnnnttagtttaacatgatatatttgtaatagtgaaacctgtactcaaaatataagcagcttgaaatggcctttaccaatcttgaaatttgaccacaagtgtcttatatatgcagatctaatgtaaaatccagaacttggactgcatagttaaaatgttttatgtgtagcgttcaaatgtgtgtattaaatatgcttccacagtagagtttgaaaaactatctgatttgtgattgaaagctgcctttctatttacttgagtcttgtacatacatacttttttatgagctatgaaataaaacatttaaa

SEQ ID NO: 17400 - DNA, 756 bp, Macaca Fascicularis
  misc_feature (1)...(756): n = A,T,C or G
acacccagagcggnnnnnnnctgttcattgggcgcctgnnnnnnnnaannnntgacaaagatgcgagacgagttatagnnnnnnnnggtgcacacagatggcaggaggcagccaaaggcttctgagacacatgggtgctattggggtttgggggtaggtgaggtaccagccttggatactccatggggtgggggtggaaaaaaagaccagggttcccgtgtgcctgagcggaccttcccagctagaattcactccacttggacatgggccccagatnnnnnnnnnnnnngcttggaaannnnnnnnnnnnnnngacatgggccacagtcannntgcctgccctcaaaatcccagannnnnnnnnnnnnnnnnnnnnnnnnnnnttatagccaggtaccttctcacctgtgagaccaaattgagctagcggggtcagccagccctcttctcctgacgccaaaacacctcagctgcctccctagctctatcccaacctctcccaactataaaactaggtgctgcagcccctgggaccaggtacccccagaatgacctggnnnnnnnnnnnnnnnnnnagaaagagctcccaggaggggcttctgggcagactctggtcaagaagcatcgtgtctggcattgtggggatgaactttttgtttttgtttcttccttttttagttcttcaaagatggggagggaagggggaacatgagcctttgttgctatcaatccaagaacttatttgtacaatttttt

SEQ ID NO: 17401 - DNA, 748 bp, Macaca Fascicularis
  misc_feature (1)...(748): n = A,T,C or G
caggcatggccattggctactcnagctcnangctgaccctnnnnnnnnnnnnnnnnnnnnnnnnnnnnnnnnnnnnnnnnnnnnnnnncgatgtgatcatcaccgactcctcannnnnnntgggccccgccgaaagtctcttcaaggagtcctattaccagcttatgaagacggccctcaaggaagatggtgtcctctgctgccagggtgagtgccagtggctgcacctggacctcatcaaggagnnnnnnnnnnnatgccagtccctgttccccgtggtggcctatgcctactgcaccatccccacctaccccagcggccagatcggcttcatgctgtgcagcaagaacccgagcaccaacttccaggagccggtgcagccgctgacacagcaccannnnnnnnnnnnnnnnttgaagtactacaactccgacgtgcaccgcgccgccttcgtgctgcccgagtttgcccgcaaggccctgaatgacgtgagctgagcccaggtgccaccgcggatgccacccaggacctcggaccttggagcctgcagggtgcctcggcccctctagccctgggccagacctcctcccggctctcgcccaccaaccaagtgttacaagccccagaatgctgcccggcctgccctgctaggcggactgtctgtgtgtctgtctctctggcgttccacctccaagcctataccagctgtgtacagcgccatctctctgccttctgttgcccctcactc

SEQ ID NO: 17402 - DNA, 709 bp, Macaca Fascicularis
cagtataaactcatggattgaactggaagaggatcacctggcccgggtagaagaggcaatcactcgtatgcttgtgtgtgccctgaaaactgcagagaatccacaaaataccagagcctggttaaaccccactgaggttgaggaaacgtcccatgcagtgaactgttgctacttaaatgcagctgtttctgcattttttgatcgttgcagaacatctaaggtagtagaaatccaagcaccgagaacagatggagagtgcatgaaaaaggaagaattaaatgtgtacagccacatggaggtgggccaaacaggtagccagaacttgaccacaggaacaggcaaaccggaggcagcaagtccctttggccctgatctggtacctgtggcacagaggtccgaagaaccaccttcagaaagaggaggcatatttggaagtgatgggaaagactttgttgacaaggatggagaacactttggaaaactgcattgtgccaagagacaacaaataatgaacagtgaaaaggcaattaaggaacagattgcctcaaatgctactacggctccttctcaaacattcatttctacggacgacttgctggactgcttggtgaatccacaagtaaccaggatagtggcacaacttttgatacaaggaagaagtttgtgattctagtggaagatgacttttaaaataatattttttaaatat

SEQ ID NO: 17403 - DNA, 734 bp, Macaca Fascicularis
  misc_feature (1)...(734): n = A,T,C or G
ccgggatacgtggnnnnngaggnnnnngcccaaaagccctacagcaaggctgtggattgctggtccataggtgtcatcgcctacatcctgctctgcggttatccccccttctatgatgagaatgatgcnnnnnnnnnnnnnnnnnttttgaaggcnnnnnnnnnnnnnnnntctccttactgggacgacatctctgactccgccaaagannnnnnnnnnnnnnnnnnnnnnaaggacccagagaaaagattcacctgtgagcaggccttgnnnnnnnnnnnnnntgcaggagatacggctctagataagaatatccaccagtcggtgagtgagcagatcaagaagaactttgccaagagcaagtggaagcaagccttcaatgccacggctgtggtgcggcacatgaggaaactgcagctaggcaccagccaggaggggcaggggcagacggcgagccacggggagctgctgacaccagtggctggggggccagcnnnnnnnnnnnnnnnnnnnnnnnnnnnnnnnnnnnnnggcccagaactgtcccccacactgccccaccagctctagggccctggacctcgggtcaggatcccctgcgtgggagggcttgggggcagcctgctccccttccctccctgaactgggagtttctctgccctgtcccctcctcacctgcttccctaccactcctcactgcattttccatacaaatatttctattttatgtcctc

SEQ ID NO: 17404 - DNA, 737 bp, Macaca Fascicularis
  misc_feature (1)...(737): n = A,T,C or G
agacaacgccagagacatcaatannnnnnnnnnnnnnnnnnnnnnnnaatatggcgcatgtgagatgcagaacaagaacccaacagggcctggaagggtgttggcgtctcctgggtcacctctgtccccaggagggcctgggaagcctgggtctccgtggatgtcggcacctgtggaagagttataacagcagctgaggtcggtgtttccaaccatacagctgactttcctaagggaaagaacagctcggggtgcctcgaaagcagagaaacagaggcagccacggcggtttcagcttgcattacagtgtatggcctccaggtcgcaggagctgagatttggaagggatctcacagagatcacagtggaagcccttggctttannnnnnnnnnnnnnnnnnnnnnnnnnnnnnnnnnnnnnnnnnnnacaaggatctcctgcnnnnnnnnnnnnnnnnnnnnnnnnnnnnnnnnatgacgcaggagtgcgtgaatttacatgtcatatacacacatacaaattcacctgtagacagagcaatatttggttatatgaaacgtctacaaagagcacattctaaaagcagctttaggattatgggtgcttttctccctcttaaatgtgttaatttttaaatgtgtttaaatgtgttaattttttttctccactgaacataaataatttgtatacattgaaaagaaaacaaggttatctttgaaaaaaagacacaatcaat

SEQ ID NO: 17405 - DNA, 851 bp, Macaca Fascicularis
  misc_feature (1)...(851): n = A,T,C or G
tgaaaggttattttggatttggaagcacccattatgcactgtgggcactccaataggtgctgggcacacagagtggaataggaccgagacctgcccttaagagcaaagtagatgatgcatagagtgtgacatatgcgtaataaatatgttcacacaaacgaggctatcagctaaagaactttnnnnnnnnnnnnnnnnngttcttgtggttataacttaaggtgaaaacataatgcagtacaggacatatattttttaaaataagtctggtnnnnnnnnnnnnnnnnnacttacaaatgtttgcttaatagagtgctcaaatcaggttttcttttaagaatcaatcatgtcagtctacttagaaataacagaagaaaatagaattgacattgaaatctaggaaaattattctataatttccatttacttaagacttaatgagattttaaaagcattttttaacctcctaagtatcaagtatagaaaatcttcatggaatttacaaagtaacttggaaattaggctgaaacatatctcttttttcttatgaaaaaatggtagcattttaaacaaaatnnnnnnnannnnnnnnnnnnnnnnnnnnnnnnnaagagcaaactatttccaaataccatagaataacttacataaaagtaatataactgtactgtaagtagaagctagcactggttttattaatttagtgtctatattcattttatctaaatcagtggagatttactgtcattgtttattagtctgtatatattaaaacatgctatcattactgtacttacaaaatagtatgtcactgtttttatgttcactcttaaaaaactaacctatataaa

SEQ ID NO: 17406 - DNA, 770 bp, Macaca Fascicularis
  misc_feature (1)...(770): n = A,T,C or G
acagatcagcacaaccganaatgcaccagccccaggtnnncggacaccgaggagaatgacaagaggcgaacacacaacgtcttggagcgccagaggaggaacgagctaaaacggagcttttttgccctgcgtgaccagatcccggagttggaaaacaatgaaaaggcccccaaggtagttatccttaaaaaagccacagcatacatcctgtccgtccaagcagaggagcaaaagctcatttctgaaaaggatttgttgcggaaacgacgagaacagttgaaacacaaacttgaacagctacggaactcttgtgcataaggaaaaggaaggaaaaagattctttctaacagagctggtcccaatcagtcacctatgaacttgtttcaaatgcatgatcaaatgcaacctcacaaccttggctgagtcttgagactgaaagatttagccatgatgtaaactgcctcaaattggactttgggcataaaagaacttttttatgcttaccatcatatttttttttttctttaacagatttgtatttaagaattgtttttaaaaaattttaagatttacacaatttttctctgtaaatattgccattaaatgtaaataactttaataaaatgtttatagcagccacacggaatttcagtcctactatatagtacctagtattacaggtactataaactctaatttttttttatttaagtacattttgctttttaaagttgattttttttctattgttttagaaaaaaataaaaatg

SEQ ID NO: 17407 - DNA, 734 bp, Macaca Fascicularis
  misc_feature (1)...(734): n = A,T,C or G
agaaagccagggcttnnnnnngagtcatagagcaagtttctggatgatctggggccagannnnngagcttctgnnncctgcctgggtgtgggtctcaccccggctgctcttggcctctaaggctgaacatanngntngggnnnccatgatccattcatcggggatggggaatggaccatgtctctgatacatttgcctatggttccagcattcgggttggcagtgacaactgggaaagttatatccccacaaccttttcatccttgttcctgcagccggtggctgtcggctacgaactattcaagggacggccacgnnnnnnnnnnnnnnnnnnnnnnnnnnnnnnnnnnnnnnnnnntgagctgtgccaggaggcccacagcctcatcttgagcatcctggaacaggcggccaagaaaaccctcccaacacccccaccagaggtctatccgactatgctacttcgaattgccaggatcccctgaagggtctgggatggggcccaggagattcgccatgaggattcattctgttacttacttgcccctgtttatctttccatcttgccccagtcccttgtctccagcttcatgtgaagctctgcacaggcaagactgtgtccttggcagtgctgcttctccttaggtacagcatacataaccagtaagagactaaatctgcaatacataaaaaactcctacaaatcagtaacgtaattggtaaatgtcatcagt

SEQ ID NO: 17408 - DNA, 727 bp, Macaca Fascicularis
  misc_feature (1)...(727): n = A,T,C or G
aacacaagaacatgaaaagtatgaacttgnacaatcctgtgtacttgaaaaccactgaagaggacctctccatagacattggtagacacagtgcttctgttggacacacatacccagcaatatcagttgtaagcacagatgatgatctagcttgacttctgtgacaagtcttgacctttgaggtctaaacaaataatacccccgtcggaacagtaaccgagccagcagctgaagtctctttcttcctctcggctggaagaacatcaagatacctttgtgtggatcaagcttgtgtacttgaccgtttttatattacttttgtaaatattcttgtccacattctacttcagctttggatgtggttactaagtatctgtaacccttgaatttctagacagtattgccacctctggccaaatatgcactttccctagaaagccatattccagcaatgaaacttgtgctatagtgtataccacctgtacatacattgtataggccatctgtaaatatcccagagaacaatcactattcttaagcactttgaaaatatttctatgtaaattattgtaaactttttcaatggttgggacaatggcaataggataaaacgggttactaagatgaaattgccaaaaaaaaatttgtaaactaattttgtacgtatgaatgaaatctttgacctcaatggaggtttgcaaagactgagtattcaaactactgtaca

SEQ ID NO: 17409 - DNA, 699 bp, Macaca Fascicularis
  misc_feature (1)...(699): n = A,T,C or G
ccagcaagggcagagnnnntaaagccaggggttagcacctggccagcttacgtagcagatggtctcagttacttcactgctttcccaaactcctgcagctctcctgcgtccaccttccgttgatagcaaagcactgggtaagaacaaccttttttctagtagttttttccaagcagttttccatttctccacagtaccctttccatttagaggagcttaataactgcttgttaaaaattaacccatgtgacctaaacttttaaaagtttttgtggcaaaacgatgcccagatagtcacatttaagcaaatatccagcttgattcagtgattaacagtaaatgggtctacatgctaacatagcagcacattcaacacataacacatcactcacatcaacgtccactgcccctgcacctgctacttcagggcactgaggctcctgttccaaggccttacaaacctatgtggtggcctgtagggcaaaaggaattatcattacaactggttagaggtaggaattcagaaagaaattgaggaggcaaaacacatgtggtttgaggctgaaggcttaaagacacctcttacccaagagtgacctcagagtttcacatcccacacaatcacactgtggttgagtgaaatcaagtgccgttttatttaagaactcgaaagaataatcagtatctnnaaagaaaatc

SEQ ID NO: 17410 - DNA, 1065 bp, Macaca Fascicularis
  misc_feature (1)...(1065): n = A,T,C or G
aggcaggcacaaacaagactgatgtngtctgtggtccccaggatcggcagagagccntngtggtgatccccatctgcttggggatcctgtttgtcatcctcctcttggtgctggtctttatcaaaaaggtggccaagaagccaaacgataagtcccccaccccaagcaggaaccccaggagatcaattttccggacgatcttcctggctccaaccctgccgctccagtgcaggagactttacatggatgccaaccagtcacccaggaggatggcaaagagagtcgcatctcagtgcaggagagacagtgaggctgcacacacccaggagtgtggccacgtgggcaaccaggcacttgaccagagnnnnnnnnnnnnnnnnnnnngtggcgtgagggtgagggactggcactaactgggcacagctaccccctcccgcctgcacccctgcagttnnnnnnnnnnnnnnnnnnnnnnnnnnnnnnnncagttcaccttgaacctctcacttcaccctggagcccatccagtctcccaacttgtattaaaggcagaggcagaagtttggtggtggttgtcgggggtgtggtttagtaatatccaccagaccttcnnnnnnnnnnnnnnnnnnnccagagaggcatcctggtggcttccctgcgcccaggaagccataaacacannnnnnnnnnnnnnnnnnnnnnnnnnatagtgaannnnnnnnnnnnnnnnnnnnntccatcagcaggagactggctaaataaaattagaatatatttatacaannnnnnnnnnnnnnnnnnnnnnagtaaggaaaaaaagagcatgctgctggatgatgggtatggaactttttaaaaaaaatacatgcttttatgtatgtatataaaaaaaaaaaaaaaaaataaatacaatatgcatcatatattgatataacaagggttctggaaggacacacagaaaacccacagcttgaagagtggtgacgtctggggtggggaagaagggtcgggggagggttggttaaagggagatttggctttcccnnnaatgcttcatctttttcc

SEQ ID NO: 17411 - DNA, 726 bp, Macaca Fascicularis
  misc_feature (1)...(726): n = A,T,C or G
aagatcaacaacctcatacaagtttctcgatggtgctataataaataaacttcaacactcttaacgataacaacactgtgttacattctttgaatcctagcccatctgcagagcaatgactgtgctcactagtaaaagataacctttctttctgaaatagtcaaatatgaaattagaaaagccctccctattttaactacctcaactgatcagaaacacagattgtattctatgagtcccagaagacaaaaaaaattttataagttgataaaacttataaatttcattgattaatctcttggaagattggtttaaaaagaagagtgtagtacaagaatttcaagaaatatttttaaagccacaattattttaatcttggatatcaactgcttttaaaggtgcttctcttttttcttgtcattgctggtcaagattactaatatttgggaaggttttaaagacgcatgttatggtgctaatgtactttcacttttaaactctagatcagaattgttgacttgcattcagaacataaatgcacaaaatctgtacatgtctcctgtcagaaagtgtaattggcatgccatggaggattctccccttcatcctgtaaaggtcaacgatnnnaaccaaataatggggctgcttttgtcacactagcatagaggatgtgttgaaatttaactttgtaagcttgaatgtggatgnngatctttttttttttcc

SEQ ID NO: 17412 - DNA, 759 bp, Macaca Fascicularis
  misc_feature (1)...(759): n = A,T,C or G
caggtctnnnnngcgtgatctagatgactctgcaccantnnnaggnnatcccccgaaaagttactctcaactggagcaaatgaactgtggtcccaaatannnnnnnnnnnnnnnnnnnnattatgctctgtttccaactgcatttcctttccaattgaattaaagtgtggcctcgtttttagtcatttcaaattgttttctaagtaatcgctgcctctattatggcannnnnnnnnnnnnnnnnnnnnngagattcaagaaaaatttctattctttttttgcatccaattgtgcctgaacttttaaaannnnnnnnnnntgccatgttccaaacccatcgtcagtgtgtgtgtttagagctgtgcaccctagaaacaacatattgtcccatgagcaggtgcctgagacacagacccctttgcattcacagagaggtcattggttatagagacttgaattaataannnnnnnnnnnnnnnnttctgttctctcacaggtgataaacaatgctttttgtgcacttcatactcttcagtgtagagctcttgtttnnnnnnnnnnnnnnnnnnnnnnnnnttgtgtttgatggattaatannnnnnnnnnnnnnnncatactattactgacgtgactcggttttgtcgcagctttgctttgtttaatgaaacacacttgtaaacctcttttgcactttgaaaaagaatccagcgggatgctcgagcacctgtaaacaattttctcaaccnnnntttgatgtca

SEQ ID NO: 17413 - DNA, 775 bp, Macaca Fascicularis
  misc_feature (1)...(775): n = A,T,C or G
gctttacaaatatgtcagtttgcagttacgcagaatccaaagtaaatgtcttgctagctagttaaggattgttttaaatctgttattttgctatttgcctgttagacatgactgatgacatatctgaaagacaagtacatttagnnnnnnnnnnnnnnnntagggttgaaatagtngatctccacaggccatgggaaaaattcagagagttaggaaggaagaaccaatagctttaaaccctgtgtgccattttaagagttacttaatgtttggtaacttttatgccttcactttacaaattcaagccttaggtataagaaccgagcaattttctgctaaaaagtccttgatttagcactatttacataaaggccatactttgcaaagtatttgctgaatggggacctttcaagttgaatttattttattttattatttttattttgtttaatgtctggtgctttttatcacctcttctaatcttttaatgtatttgtttgcaattttgggtaagactttttttatgagtactttttctttgaagttttagcggtcagtttgcctttttaatgaacatgtgaagttgtaccgtggctatgcaacagctcnnnnnnnnnnnnnnnttacttcgaattagtgccatagcagaccactgtatgtttacttctcaccatttgagttgcccatcttgtttcatactagtcacattcttgttttaagtgcctttagttttaacagttcactttttacagtgctatttactgaagttatttat

SEQ ID NO: 17414 - DNA, 303 bp, Macaca Fascicularis
gtggaagaacacacacacaagtatataatatctaaagccatatcttctctctccacgaggaaaggggcccctttgtgtgtgaacacgccgggggtggcaaaacatttgcaaagaaacaaagtctcactaggcacgctgttgtacacgatctcgacaagaagaaaaagaagatcaaagtaaaaaaatatcgtgaaaaacggagtttggcctctcgtgtcagtggatatatccctcccaaaaggaaacaagggcaagggttatatttgtgtcaaaaaggagagtcacccaagagtgtggaagaca

SEQ ID NO: 17415 - DNA, 713 bp, Macaca Fascicularis
ctccacaaacccatcccagcctctttgtttaactagccagtcccgttttgtccttacgagaacgtctgtgatactttctgctaatggttcgatgcagctttcttggtttatggtcttcaagtgtttcgccacaaaggcaccaaaagaaatgagagtcacaatcctgccccagtttgttacgccgtcgctgaaaacatggaccatcactcgagacaaagatttgacatcgtcttcgtttttgatgtccagtttccgaagcatgccttggaaggccgtctcgtggttgcgctgcacgccatccccaacccgtcgtaaggtctccagagccttcctgctggtggccccagacctgcccattggctttgtgtccttggcgccggtggcctgctcccgaaggtaccgagagataatctccagcgactgccggtacaactcgtcctcctcctcctctgctggcggcggcgtcgagggtagtgacccatccgtactggggctattaccagattccccgaccaactccagcaggggcaggacagccggccgcttcccgagaggctccggctcgtacccgtccagctcctcttcgggcgacatgatggcgtcggcggccggggcttccatctcctcaagcggccccgcgcggcgggtgggcgcaaagaaaagcagcctcgcggggctcgcggtgacgtcggggacctccgcgccaatgggcg

SEQ ID NO: 17416 - DNA, 707 bp, Macaca Fascicularis
  misc_feature (1)...(707): n = A,T,C or G
caagccacagcaggtgcgcaacatgacgctgnnnnnngacctgntggctgagaagttcannnacgacatggaggacgtcctctgcccggaccctcagatagtgtgcccagaccttccctgccaaacagatgcaccgtggcctggcggcgagtccccggtcaccttcctccgcacggaagaggggccggacgccaccttccccaggaccatccccctgannnnnnnnnnnnnnnnnnnnnnnnagctcacacaggacccggccgcctactcccagctggtggccgtgctggtctacaccgccgagcgggccaagttcgccaccggggtagagcggcaggactggatggagctgttcattgacacctttaagctggttcacagggacatcgtgggcgaccctgagaccgcgttggccctctgctgaaaccggggcgcccgcccagctgggccagcccctccctgccacgctcacttcccagggctgcccctgcaggctggcgctcagtggaggccagaggtctgggatcggggtcagcggggccacagtccctccaggggctccagggcagcttccggcctcttcccaccctggtggctgccatgtcccttgctgtggctgcatcttccgctctctcctccgtcttactgtagccgctctatttatagggacaccagtcattgaacttaaggcccaccccaagtccaga

SEQ ID NO: 17417 - DNA, 1139 bp, Macaca Fascicularis
  misc_feature (1)...(1139): n = A,T,C or G
gattcagggaagctctacaccttggtcctgacagacccggatgctcccagcaggaaggatcccaaatacagggnnnnnnnnnnnnnnntggtggtcaacatgaagggcaatgacatcagcagtggcacagtcctctccgattatgtgggcnnnnnnnntcccaagggcacaggcctccaccgctacgtctggctggtttacgagcaggccaggccgctaaagtgtgacgagcccatcctcagnnnnnnnnnnnnnnnnnnnnnnnnnnnnnnnaaggnnnnnnnnnnnnnnnnnnngtacgagctcggggccccggtggccggcgcgtgttaccaggccgagtgggacgactatgtgcccannnnnnnnnnnnnnnnnnctgggaagtagggggttagcttggggatctgaagtgtcctggaggccccaagccctgttccctagttcagtgttgcatgtataatagatttctcctcttcctgccccccttggcacagacgacnnntggccagtcagatggtgtttgagggtggcttttcctgctgcctgacctttctaattttactcactcactctgatttatgttttgatcaaatttgaacttcgttttgggggatatgttggtactgtgatggggtcatcaaattgttcatctgaaaatagcaacccagaatgtaaaaaagaaaaaattggaggggggtggggaaagaccagttctacagtgacagagcaaagcgtcaaataatctttaagggaggttaaaaaaaaaaaaaaagattggttgtctctgcctttgtgaacctgagtccagaatggtacacaatgtgtttttatggtgatgtcgctcacctagacaagcagaggctggcattgaggctgacccccaacacggtacatctcagaggcctcgacaggcatcagcatgtcgctgtgccccctttaaagagcagtcctggaagaggcaggaggaagagtagctttgctgccgttgggacgtggccatggagaccagcagcagcgctcgctgacagcttaggaggaatccttacatctttgtctgttaaattgatcgttctcatgggggtcagaaaagctggtctggaatcgctgaatgttnnattaattgtgctgtttgctta

SEQ ID NO: 17418 - DNA, 680 bp, Macaca Fascicularis
  misc_feature (1)...(680): n = A,T,C or G
tactccgagaccaactcgatcaaagtcatgcaannnnnnnnnnnnnnnnnnnnnataggctttgtctacaaacttgtttccatctattactagaggctgcccggaaccctgtgtatggaatgactctaaagtcccactgggctgggcgggaaagagtggtgatctattagtgatgtctgccatgggagggtggtgagtgttgacaggcctcctcctgtttgctatgcctggcccttacctgtctcttacagggacaagcatgaggagaaccaccggcccttattccacaagggccccgtgatcaaggtgaacagcaagcaacgctatgcctcaaacgcagtgtcagaggccctgatccgagaggtggccaacaaagtcaaggtccccctgcaggatctcatggtccggaatgactccccttgtggaaccaccattggacctatcttggcttctcggctggggctgcgggtgctagatttaggcagcccccaactggccatgcactctatccgggagatggcctgtactacaggagtcctccagaccctcaccctcttcaagggcttctttgagctgttcccttctctgagccataatctcttagtggattgagccctcttggaaagacttccctgccatccctttgcacctgagaggggaagttcttagctgagcgaagc

SEQ ID NO: 17419 - DNA, 503 bp, Macaca Fascicularis
  misc_feature (1)...(503): n = A,T,C or G
gtctcctcgctccccgggactnngtgtttcccgtgggtaaccatcggggccccggtttcnngtgtctcccttgcaaccaggaggtcagatgcgccccagcttgcctttgtgtctatgggtcccattctcgccagacaggccaggggcccccttgcgactgtgggctccaaattcacccttctctccttagaagccaggaacgcccttgggtcctgggaatccaatggcgccttagatgcgtgggtctccctgttttcctttctgcacagtctctcccgtctcacacatgttgcccttggcacctttctgtacacggtagcccttgggnnnnnnnnnnnnnnnnnnnnnnagacagctccccctgtagcactgaaacgagcaagcagagacagaaggttgcacaggtggcacattccccaggtggcagagcaggggctcagaacgtgtaccccgcgactctcaggtggggacaaggagacggtgaaacccccagagaacccggg

SEQ ID NO: 17420 - DNA, 847 bp, Macaca Fascicularis
  misc_feature (1)...(847): n = A,T,C or G
gcagccccagcaggnnnnnncnnnnnggccaagtgtcccagacccagctcacagcagcctgggctcctgggtgcccactatcatggaagaggaggccttccagctgcctggcctgggcatgccacccatcaccaagctcacagtgctggaggaggacgagaagaagccactgccctgggagtcccataacagctcagagacctgtggcctccccactctggtccagacctatgtgctccagggggacctaagagcagcttccgcccagccccaatcccagtccggcaccagcaatcaggtcctctacgggcagctgctgggcagccccacaagcccagggccagagcactatctccgctgcgactccactcagcccctcttggcgggcctcacccccagccccaagtcctatgagaacctctggttccaggccagccccctggggaccctggtaaccccagccccaagccaggaggacgactgtgtctttgggccactgctcgacttccccctcctgcaggggatccgagtccatggggtggaggggctggaaagcttctagggcttcctggggttcccttcttgggcctgcctcttaaaggcctgagctagctggaggagaggggagggtccagaagcccatgactaaaaactaccccagcccaggttctccccatctccagccaccagcatcccctctcccgccagtctccataggctgggcctcccaggcaatcttcataatttaaggaccagatcatgctccatccggccccacccaatggccttttgtacttgtttcctataacttcagtattgtaaactagcttttggttggagtttgtat

SEQ ID NO: 17421 - DNA, 723 bp, Macaca Fascicularis
  misc_feature (1)...(723): n = A,T,C or G
gaatcaatagtgcgcgggcacttccannnnnnnnnnnnnnnnnnnnnnnnnnnnnnnnnnnnnnatgggggcaccggggatgcggccactcgctacatagcccccaccatcctcacggacgtggacccccagtccccggtgatgcaggaggagatcttcgggcctgtgctgcccatcgtgtgcgtgcgcagcctggaggaggccatccagtnnnnnnnnnnnnnnnngaagcccctggccctctacgtgttctccagcaacgacaaggtgattnnnnnnnnnnnnnnnnnnnnnnccagcggtggggtgacggccaacgatgtcatcgtccacatcaccttgcactctctgccctttgggggagtggggaacagcggcatggggtcctaccacggcaagaagagctttgagaccttctctcaccgccgctcttgcctggtgaggtctctgatgaatgatgaagcactgaaagtcagatacnnnnnnnnnnnnnnnnnnnnnnnnnnnnnctgaggaggcgctgctccgcctggcctggccacactgtgtcccatcagagtgcggaccaccctcactggctctcctggccctgggagagtcactcctgcagccccagcccagccccgctcctctgctgacctgctgtcctgtgcacaccccactcccacatgggcccgggcctcaccactccaagtccccaccccattctagaccaataaagag

SEQ ID NO: 17422 - DNA, 728 bp, Macaca Fascicularis
  misc_feature (1)...(728): n = A,T,C or G
gaannnnnnnnnnnnnnnactgtgagcagcccacccacctccccaagacctggcagtgctgcaacagtatctgcctctacaagtaacatcatacccccaagacaccagaaacctgcaggggctccagcaacaaaaaagaaacagcaacagaaaaagaagaaaggtggaaaaggtggctggtgatgagaatattcttgttgcaggctgtttttaaactagtctcagtgacactaggaatataataaaggtaacacagcaagaagcacagaactgctccctcttcatnnnnnnnnnnnnnnnnnnnnnnnnnnnnnnnnnnnnnnnnnnnnnnnnnnnnnnnnnnnnnnnnnnnnnnnnnnnnnnnggttgcctcatagctttgtacagattatgaggactgaaaataattgggcatttacccatcttggtatctgttgtatnnnnnnnnnnnnnnnnnnnattcaatcttttttcnnnnnnnnnnnnnnnnnnnnnnnnnnnnnnnnnnnnnnnnnnnnnnnnnnnctacgatttcagctggagtctnnnnnnnnnnnnnnctgttcaagtcccgctttaaattatgtcttaggaggccttaggagactgaaagtggaatcttctgagcattcctaaatatctgcttagaaatatcatgtgataaagagggaccttcttaatacttaaccgatgttcttcacttaattaaatggatggccacaagaaaa

SEQ ID NO: 17423 - DNA, 768 bp, Macaca Fascicularis
  misc_feature (1)...(768): n = A,T,C or G
aaaaagagttagcgcccagctagaannnannnnnnnnnnnngtaaannnagaatcaggaagcannnnnnnnnnnnnnnnnnnntttacttcaggacattttcagccctctagaagaagaagtgaagatgggaatttattcaaaaccagggggctatcgtctctttattcagaagctacaagacctgaagaaaaagtaccatgaggaaccaaggaaggggatacaggctgaagagattctgcagacatacttgaaatccaaggagtctatgnnnnnnnnnnattctacagacagaccagactctcacagagaaggaaaaggagattgaagtggaacgtgtaaaagctgagtcnnnnnnnnnnnnnncaaaaatgttgcaggaaatacaaagaaagaatgagcagatgatggaacagaaggagagnnnnnnnnnnnnnnncttgaaacaactgactgagannnnnnnnnnnnnnnnnnnnnnnnnnnnnnnnnnncaagagaggaccctcgctcttaaacttcaggaacaggagcgactgctaaaagagggatttcaaacagaaagcagaaaaatgcaaaatgagatacaggatctccagaagaaaatgagacaacgaaggacatgtaccataagctaaagaccagagccttcctgtcacccctacccaaggcataattgaaacaattttagaattnnnnnnnnnnnnnnntacatttgataacaattagatcttgcatcataacaccaaaattataaaggcatgcagta

SEQ ID NO: 17424 - DNA, 289 bp, Macaca Fascicularis
agcccttggccactttgtcgaggatcatgccctgctatcagccatagtgatggtccaggcctaggagtatgtgagagcctccttgtttgcatgtgaagccataaacgggaatgcctttggcaatagccttgagcttagagggccctctgatgccccactgaggtgctgttggtttatggctggcaatgtgaattctttcaggggtataggaggggcatttgagagattgcctgacaccacccccatcccctgccccccgctctcagaaaagggtagaagatgaaatgaa

SEQ ID NO: 17425 - DNA, 773 bp, Macaca Fascicularis
  misc_feature (1)...(773): n = A,T,C or G
ctcccagcagnncagcatgtggcgctgaaggccgtggcccacgtggactgggaggcagtctcagagccacccagcgtgctgttcagctgcccctccctgccaccagcaggggcccaggctgccatcactggaggctgcagggaccaagaggccatcaccgtgtctagagagagcagacaggagcagaacagcgccgggggctcctgagcctctgcgtgtgccctcccagcccacaccggtgctctcggccactgagcacccagactcaggcttgggttccccagacttactggaaggcagctcccgcataccaggataacccctgcaaaccacatagcagacccccgccatcctcgcagaggggaaaatgttgcagcaaggctttgcctctgcagaccccaccttagtggcacagtgcttgggcctgtgttccccgggtggtggagccctgtactggtctgtggccctgggggccccactctgctgtctgccccagcccatgccgtctgctgggcaaggcaggctcccccgtgccctgcctccctctgtcagggaacctgggacccctctccccanngccnnnnnnnnnnnnnnngaccctggnnnnnnnnnnnnnnnncaggtccacgttgggcactagggcaggttccgtgccagagtcaggggccacatgagggcctggtgctggtgaggggggtgtgcgctagaggggaaaggggcccccgcccacctgtccaccatgtgggccatgctgtgtccttatgtcattgtaa

SEQ ID NO: 17426 - DNA, 761 bp, Macaca Fascicularis
  misc_feature (1)...(761): n = A,T,C or G
aggaagttgcattctagaaagtagcagatgtaataaatgtactgtgggaggtgttgataagtgctataaataaatatagagtttgggagcaaaaagagggagtggatctattttagataaggagcccaggtaagacctctctgaagaactgccatgaaggagggagggagcacattcccggcagagaaaacagcacatgcaaagnnnnnnnnnnnnnnntgtgtgcctgaagagcagccaggaggccagcatggctggagaggcaggcttaggcagggaaccgagnnnnnnnnnnnnnnnnnnnnnnnnnnnnnnnnnnnnnnnnnnnnnnnnnnnaggcagcttttagttggagagatacgggaagcctcctagggttctaagtagaagagggacatgagctggttcacattctgaaggacctctctagctgaccagtgccgaggaggttggagagagaaaaggtgaaagcagagagaccagtgcagggctgttacagtgttgcaggtgagagactggggtgctgggcacccctagactaggactccagtgccctcctctcccaagagacaaaggccattgtattgaaggaagtgggaaatgattagattctgaacatatataattgtttttcagtctttttcaaagatacaaatatttacatagttttaattatgcaatatatacagattaatgtcctattgttttacttaatagtgtatcatgttttccctgttggtatgtagcctggataaatgctc

SEQ ID NO: 17427 - DNA, 1060 bp, Macaca Fascicularis
  misc_feature (1)...(1060): n = A,T,C or G
ggatgtagcaggcaccaagaacagcttccagacactgcagatgaagctagaaaatatcaccaacccctggagcccgagacaccgcgttgtccagccgaccctggagcagacgcggtactcccgggaacgccaggcggccttccgcttcaaaaggaagctgccccggtacctgctcttcaccagcccccaggagaacccctggggccacaagcgcagctaccgcctgcagatccactccatggctgaccaggtgctgcccccaggctgcaggaggagcaggccatcacctgggcaaggtaccccctggcagtgaccaagtaccgggagtcagagctgtgcagcagcagacatccaccaccataacgaccacctggacccgcccgnnnnnntgagaaagtttcttcacaacaatgagaacnnnnnnnnnnnnnnnnnnnnggcctgggtgacggtgggcttcctgcacatcccccactcagaggacattcccaacacagccacacctgggaactccgtgggcttcctgctccggccattcaacttcttcccagaggacccctccctggcatccagagacactgtgatcgtgtggcctcgggacaacggccccaaccannnnnnnnnnnnnnnccctgaggacagggactgctcgatgcctcccccttttagctacaatgggacctacagacccgtgtgaccagcccctgcccccagttcctcccaagaagcccaggagcctcaccggggcagacaataaaccctcagagcttcactctgtgtgcttgtggggaggcacagggccatgtgtgtaggacacacacacacagacagagtgcacgcactcacacagacatgcacacactcgcatagatgtgcacacacacgtgcacactcgcacagacgtgcacacactcgcacagatgtgcacacacacagacatgcacactcgcacagatatgcacacacacagacatgcacacactcacatagacgtgcacacatggcatgtactttattcacactggtctactgcagcccagaaaagccagcgttactaata

SEQ ID NO: 17428 - DNA, 713 bp, Macaca Fascicularis
  misc_feature (1)...(713): n = A,T,C or G
caggattgggactagnnnnnnnnnnnnnnnnnnnnnnnnnnngaatccannnnnnnnnnnnnnnggaaggctttgatggtggctggtgcctctctatacatcagccctgggcttctctgcttgtcagagggattaaaagggtggagggcagatcctggtacaccccccacagaggacgactttggatagcagccacagctaaaaaaccctcccctcannnnnnnnnnnaactccaggctacatatcgtcttcttcgtggnnnnnnnnnnnnnnnnnnnnnnnnnnnnnnnnnnnnntgtcttctgggctgtgtgnnnnnnnnnnnnnnnnnnnnnnnnaagcaatttaaggagcagtttccannnnnnnnnnnnnnnnnnnnnnnnnnnnnnnnnnnnnnnnnnnnnnnncctcaggaaatggttgtgaagtttcctattaaaggaaatccaaaaatctggaaactggattccnnnnnnnnnnnnnnnnnnaagaaggggttaatgaannnnnnnnnnnnnnnctgacctaggagaaaaggaactatacagcatagtggagttttatgtactaaaattgctatctactggtcctttggaattgaagtagtagaaacctaaaggcttggcatcaggcttgaatatctcagaacttaaactcttaccaaaacctgtatatttttcttaaagagtgggattcctactttatgtaat

SEQ ID NO: 17429 - DNA, 722 bp, Macaca Fascicularis
  misc_feature (1)...(722): n = A,T,C or G
acatctgtactaaatacatgtaccaatcacacggagtaccacggctgcctccagttggataatcccactcacatgaacaatggagactacactctaatagccaagaatgagtatgggaaggatgagaaacagatttctgctcacttcatggnnnnnnnnnnnnnnnnnnnnnnngcaaacccaaattatcctgatgtaatttatgaagattatggaactgcagcgaatgacatcggggacaccacaaacagaagtaatgaaatcccttccacagacgtnnnnnnnnnnnnnnntcgggaacatctctcggtctatgctgtggtggtgattgcgtctgtggtgggattttgccttttggtaatgctgtttctgcttaagttggcaagacactccaagtttggcatgaaaggttttgttttgtttcataagatcccactggatgggtagctgaaataaaggaaaagacagagaaaggggctgtggtgcttgttggttgatgctgccctgtaagctggactcnnnnnnnnnnnnnnnnnnnnnnnnnnnnnnnnnnnnnnntctggggttttctggtagatgtgggaggtgtttggaggatgtactatgtgaagcctgcatatattgtgagctgtgattggggaacaccaatgcagaggcaactctcaggcagctaagcagcacctcaagaaaacatgttaaattaatgcttctcttcttaacag

SEQ ID NO: 17430 - DNA, 704 bp, Macaca Fascicularis
agtgggctcggtggagcagaccccgcgcaagaggctgcggtgagcgaatttagagcccaaagagccccgagggaacctgccggggcagcggacgttggaagggcgctgggcctcggctgggaccgttcatgtagcagcaaccggcggcggctgccgcagagcagcgttcggttttgtgtttaaattttgaaaactgtgcaatgtattaataacgtctttttatatctaaatgtattctgcacgagaaggtacactggtcccaaggtgtaaagctttaagagtcatttatataaaatgtttaatctctgctgaaactcagtgcaaaaaaaaagaaaaaagaaaaaaaaaaggaaaaaataaaaaaaccatgtatatttgtacaaaaagtttttaaagttatactaacttatattttctatttatgtccaggcgtggaccgctctgccacgcactagcttggttattggttatgccaaaggcaccatccatctcccacatccggttattgacaagtgtaactttatttccatcgcggactctggggaaaggggtcactcacaagctgtagctgccatacatgcccatctagcttgcagtctcttcgcgctttcgctcgctctcttatattactgtgtttatcttaaacttgaagacaaatctgttaaaatggttcctgagccgtctgtaccactgccccggcccct

SEQ ID NO: 17431 - DNA, 820 bp, Macaca Fascicularis
  misc_feature (1)...(820): n = A,T,C or G
cctttttttttttttttttttttttttagcactgatggcttttattgcagattcgtgtcattacaaggataatctgggaatatatattttttaaaaccctcccttttatatacacaaaacatgctacatggtacactttgtgagaaatgctgaggtaataggcacacacccagacatggacagtaccaaacatccaacatctcacacagcctggcccacgtgcccaccgggaagagtctcaccttcttgactcatcccttgcccctccttggcaatagtcctgggagtgctgaggctgacacttcgtggccaacagggctcagaaagccaccatgctgcagtgcatcaaccgaggggtccggtgacccctgattattcagcaactcctgagaagtggcccattttcatttttgtggcacttgttctccagggaagtgtagtttggagatgagatgcggactctagtcagcctgagagcgtggaacctctggtctgtagccagctgggggctgtgatgatctgatgacttctgttcaaccgattatctcctggccagataggttattatttgtgtgaagactaaaatgacatgtaggctaaagtgtgaatggaagatacaaaactgcgagtacattatctgtgtgaccagtggagcttttggcctggccttcccttcccaaccagaaacctggagcccagagtgtttcctactcagaagctgaggaatcttgcctggaaagaaggggctgtgtgacnnnannggcaaggagtaggtaggcgaggagcacaacnnnncnnnaaggggcccttggactgcggt

SEQ ID NO: 17432 - DNA, 769 bp, Macaca Fascicularis
  misc_feature (1)...(769): n = A,T,C or G
atgaggcagtgnntnnntnnngccagggtttttcngnttcctcccagtcccaacctccctttgcttgtctgaccagtctcnnnnnnnnnnnnnnnnnnnnnnnncannnnnnnnnnnnnnnnnnnnnntgagtctctgatgaagtcttcnnnnnnnnnnnnnnnnnnnnnnnnnnnnnnnnnnnnnnnnnnnnnnnnngcttttctgagagtcatttttgtggctcttgtcccttagttttgtcttcattctgaagtttgcttagataccagctgttctctgaggtttgaatgtctcgccggagcctgcgtttcatgtggatgatgttctggcataatcgccatcttggctcctgtggaggcctgctgggaacgggacttctaaaaggaactatgtctggaaggctgtggtccaaggnnntttttgccggctataagcggggtctccggaaccaaagggagcacacagctcttcttaaaattgaaggtgtttatgcccgagatgaaacagaattctatttgggcaagagatgcgcttatgtatacaaagcaaagaacaacacagtgactccaggcggcaaaccaaataaaaccagagtcatctggggaaaggtaactcgggcccatggaaacagtgnnnnnnnnnnnnnnnnnttccgaagcaatcttcctgctaaggccattggacacagaattcgagtgatgctgtacccctcaaggatttaaactaacgaaaaatcaataaatannnnnnnnnnnnnnnnnntgta

SEQ ID NO: 17433 - DNA, 1062 bp, Macaca Fascicularis
  misc_feature (1)...(1062): n = A,T,C or G
gaccgttttagtagtcgcagacctcgaaatgatagacgaaatgctccacnnnnnnnnnnnnnnnnnnnnnnnnnnnnnnnnnnnnnnnnnnnnnnnnnnnnnnnnnnnnnnnnnnnnnnnnnnnnnnnnnnnnnnnnnnnnnnnnnnnnnnnnnnnnnnnnnnnnnnnnnnnnnnnnnnnnnnnnnnnnnnnnnnnnnnnnnnnnnnnnnnnnaagaatgcnnnnnnnnnnnnnnnnnnaaaggaaataaatgggagaaaaataaaattaattgaaggcagcaaaaggcacagtaggtcaagaagcaggtctcgatcccggaccagaagttcctctaggtctcgtagccgatcccgttcccgtagtcgcaaatcttacagccggtcaagaagcaggagcaggagccggagccggagcaagtcccgttctgttagtaggtctcccgtgcctgagaagagccagaaacgtggttcttcaagtagatctaagtctccagcatctgtggatcgtcagaggtcccggtcccgatcaaggtccagatcacttgacagtggcaattaaactgnnnnnnnnnnnnnnngggggcctttttttaaaaaacaaaaactccaaaaattcccaaaccatacttgctaaaaattctggtaagtatgtgcttttctgtgggggtgggatttggaaggggggttgggttgggctggatatctttgtagatgtggaccaccaaggggttgttgaaaactaattgtattaaatgtcttttgataagccttctgctcacatttttgtgaatgtctgaagtatatagtttgtgtatattgacagagctcttttataactaaagcaaatttaatttttttgtactagaaaaaaatttgaacattttagttcctggttattaaaatatgttaattcagaattagtttaatgcctcaattaaactaattaatagctttggacacttaaaagagctctaaatttgcttgtacataaaggcttaatttgttttccttgttagggtcaagggtgtccttcactctttaacagctgccggacagacac

SEQ ID NO: 17434 - DNA, 768 bp, Macaca Fascicularis
  misc_feature (1)...(768): n = A,T,C or G
tcattgcagannnnnagaaaagannnnnnnnnnnnnnnnnnnnnnnnntcatggaggctgcagatgaggcctnnnnnnnnnnnnnnnnnnnnnnngctgaggccgaagcccgggctgaagcaagaacccgcatgggaattggagatgaggctgtgtctgggccctggagctgggatgatattgagtttgagnnnnnnnnnnnnnnnnnnnnnnnnnnnnntggagatccctggtccagaattccatttaccttctgggccagataccaccagaacgcccgctccagatttcctcagacctttgctggtcccattattggtcctggtggtacagccggtgccaactttgctgccaactttggtgccattggtttcttctgggttgagtgagatgttgggtaggtacatcactttggattgggcagttagggtctctgggggatatagggtccatgggattgtatttatgtgcatgagctaggagtcttaggaaactcattgtagggaggtgaggaaagtatggggcagcactctttggtgtgtatattccttattatttgatatatatcattgatttttttacttttttttcttatgttcannnnnnnnnntatcaatcgcaatagtctttcccctgtgtgaggctgaagcctcagattccttctaaacacagctatctagagagccacatcgtgttgactgaaagtggcatgccagataaatttatttgctgttccttgtctactgctttttttccccttgtgtgctg

SEQ ID NO: 17435 - DNA, 766 bp, Macaca Fascicularis
  misc_feature (1)...(766): n = A,T,C or G
atcatacagagagnnnnnataatgcacctggatgctgctctggaaatttgctcgctcagatgagctcactnnnnnnnnnngcaagcacacaggcatcaagcctttccggtgcacagactgcaaccgcagcttttctcgttctgaccacctgtccctgcatcgccgtcgccatgacaccatgtgagctgcacagatcacactagagaagctacgctggtatctttcctgttcgtgtgctgaggttgggacaattttttcctctttgacttcagcttgcatctgcaatggggttgaagcagcccactgagccaagttgaggagactggaggaaaagagagctggtctcccggggggaggctcttcatattctaccttcacttctccactgtccagacccgtttttttcaacctccatgtgggttgaattccagtgtggcacccatggctgccttcccatcccccctgctctgaaataggacatttttcctacagtaacaaaacaggaatcaaactcaaggctgtgaacaaacatacgctgcttttttctttccaatttttctcttgttttctagaactctcgtccatatgttttttaaataagtacctaaaagtcgcttgatagtgtcctaaatgactcctctaacttcctaaatggaaagagcataatgatgtagttgattggtaagatttacagggatttggtttctgagtaagaggcacactcccagtgaataagctgagtcccataccacactcaaaaggttta

SEQ ID NO: 17436 - DNA, 310 bp, Macaca Fascicularis
ccctgaagtagctctttaatttttttttttttttttcgacagaaactgaagaagtattttgtagcgttaagtaatagtgaatattgttacagcaatttgtaatttatcagaattgagtaatggtgtagaacaataattcataatcactgtaataatcgtgatttgaataaagtgttacattgggtagcctttttgtataaaatagacaaatagaaaatggtccaattagtttcctttttaatatgcttaaaataagcaggtggatatatttcatgttttagatcaaaaactttatttgggatatgtatgg

SEQ ID NO: 17437 - DNA, 635 bp, Macaca Fascicularis
  misc_feature (1)...(635): n = A,T,C or G
aagggactggattgagtgaggctgggcctctcagccaagctgatgtttaacnnnnnnnnnnnnnnngggcctggggttcctgggaagttgttcatacccattgccaggagcgtaggctctggccagacctggatcagctcctaactgaagcagcagcnnnnnnnnnnnnnnnnngagtgtttttgtggtggacagaattgggctatgagtgtgacaagctgtgtccnnnnnnnnnnnnnnnnnnnnnnnntctgttaaatggacaggtggggaaacagctacctgctggcctgcccgggcgcctgccatgggcccggggtgctcagcttctcagtgtgagactgtccacacctgcatgttgtgctaaaggtgcaggttaggtggactgaccccaggacctccctgacccccaaccaggccagcggaagcctgccacctnnnnnnnnnnnnnnnnnnnnnnnnnnnnnnntcgcgccannnnnnnnnnnnnnnnnnnnnnnnnnnnnnngaacaagtaccgccccgacctgcgcatggcagccatccgcagggccagcgccatcctgcgcagccagaagcctgtgatggtgaagaggaagcggacccgccccaccaagagctcctgagccccctgc

SEQ ID NO: 17438 - DNA, 658 bp, Macaca Fascicularis
  misc_feature (1)...(658): n = A,T,C or G
cagagagagctnnnaaggaggcccagcagattggcgctggtcagggtaggggagccaggcgggggacgggagcgggcagttcaggcctcagggcagccccgggaggcttctggcagtggtggccagagggctggactgtgcgggcagcttagcagggacagtggacgtgcacccgacgctgacctggactgcctcagtctagaagcaggccagagagcggaggcacgtggcatcccagggcgacctcagacggccagccggttagctagttctgctgttgcttcacgagttctgagcgttctctgctagcctatggaagctgcagccctcggaggacagaagtgttgtgcgcccaacagaaccctctgagacgcaagctgctcccttggctagctcatatgtggaaatagccctgtaattcgaggttgaaggggcccggccaggactcggggaagggtggcctgagagcagcgatgacctctggggtcactgtcccaggagggacttcacctgcaacaagagctggaggcagccgcttgccccggaggcttgtcccctgaggcgcttcccgagcgaggtgcgggctcagggcctcaagtctcttctggaggacgggctgcggtgcgctggcggcttgcggggcggccagtccttgccc

SEQ ID NO: 17439 - DNA, 738 bp, Macaca Fascicularis
  misc_feature (1)...(738): n = A,T,C or G
catagaannnnnnnnnccacacctgttaatgtnnnnnnctgtcagtgaataagaatattatagaaggtatgaaggtgtaattaccataataacaaagcaccctgtctttaaggctgaccttttgtcctttgacctcctcagcctccattcccatcttagctcagactgcaagtatgtttgtnnnnnnnnnnnnnnnnnnngtcttggagctggggaacattctttcattctaagaattnnnnnnnnnnnnnnnnnnnnnnnnnnnnnnnnnnnggctctggcttatccaggaggcaaacactgacctctggtaattaaaattctagttcttttcttttgtctttcccaggaatttgacaagaagtacaatcccacctggcattgcatcgtgggaaggaacttcggcagttacgtgacacatgaaaccaaacacttcatctacttctacctgggccaagtggccattcttctgttcaaatctggttaaaagcnnnnnnnnnnnnncacacccagtgatccatccaaaaacaaggactgcagcctaaattccaaataccagagactgaaattttcagccttgctaagggaacacctcgatgtttgaacctttgttgtgttttgtacagggcattctctgtactagtttgttgtggttataannnnnnnnnnnnnnnnnnctacatttgtatttattttctattccatacttctgcccatgttgttttctctcagccatcc

SEQ ID NO: 17440 - DNA, 750 bp, Macaca Fascicularis
  misc_feature (1)...(750): n = A,T,C or G
tgagtgacatagcctcatgttnnnnnnnnnnnnnnnnnnnagtgttaggaaaaccacaaatggagcccctgntgaaagnnncgagtgtnnnnnnnnnnacgcctgctgtcttctccccaaggctgccccaggctggagcccaggtacaggggctgtgactctgggcagggacccggggtctcctggaccttgacagaacagctaactccaagagcagtgggcaggtggccgcccccgaggnnnnnnnnnnnnnnnnccaggaggagccaccttcccgcctcccacgctgcctcgtgccagcagcctcgcacaggccctagctttgtactcatcacctaaacttgtactttatttttctggtagaaatggtttcctctnnnnnnnnttatgcggttcttacannnnnnnnnnnnnnnnnnnnnnnnnggtgtgacgcagcctgagggaggcactagtcaccgacagcggccttgaagacaaagcagagcgcccacccaggtcccccgactgcccgtttccatgaggtactggtcccttctttctgnnnnnnnnnnnnnccactctattttacacacatctgttggtatgcatcttttatagacgctcttttataagtggcgtgtgcacagcgccctgccctgctccctcggatgcctgtggtggctcctctgcttctctgggtccagtgcattttgtttctgtatatgattctctgtgttttttttgaatccaaatctgtcctctgtagta

SEQ ID NO: 17441 - DNA, 773 bp, Macaca Fascicularis
  misc_feature (1)...(773): n = A,T,C or G
agannnnnttcggcggactgagnnnnnnnnattatatccaagcccagtgtgccatcatcatgtttgacgtaacatcgagagttacttacaagaacgtgcctaactggcnnnnnnnnnnnnnnnnagtgtgtgaaaacatccccattgtgttgtgtggtaacaaagtggacattaaggacaggaaagtgaaggcgaaatccattgtcttccaccgaannnnnnnnnntcagtactacgacatttctgccaaaagtaactacaactttgaaaagcccttcctctggctcgctaggaagctcattggagaccctaacttggaatnnnnnnnnnnnnnnnnnnntgccccaccggaagttgtcatggacccagctttggcagcgcagtatgagcacgacttagaggttgctcagacaactgctctcccggatgaggatgatgacctgtgagaatggnnnnnnnnnnnnnnnnnnnnagtctagttttataggcagctgtcctgagatgtcagcgatgcagcgtgtgtgccacctcattattatctagctaagcggaacatgtgcttcatctgtgggatgctgaaggagatgagtgggcttcggagtgaatgtggcagtttaaaaaataccttcattgtttggacctgcatatttagttgttttggaacgcggttgattccttgagtttcaaatataagactgctacagtcacatcannnnnnnnnnnnnnnnnatcttgttttgttactgtcattcccattccttttcgtttagaat

SEQ ID NO: 17442 - DNA, 701 bp, Macaca Fascicularis
  misc_feature (1)...(701): n = A,T,C or G
cagcgaggtgcaatgtggggagaatacattgtagaatataaggtttggaagtcaaaattatagtagaatgtgtatnnnnnnnnnnnnnnntttgccatttcattcaaacctgacaagtctatctctaagagccgccagatttccatgtgtgcagtattataagttatcatggaactatatggtggacgcagaccttgagaacaacctaaattatggggagagttttaaaatgttaaactgtaatttgtatttaaaaagcattcgtagtaaaggtgcccaagaaattattttggccatttattgttttgtccttttctttaaagaactgtttttttttcttttgtttacttttagaccaaagattgggttctagaaaatgcacttggtatactaagtattaaaacaaacaaaaaagaaagttgtttcagttggcaacactgcccatnnnnnnnnnnnnnaaggggacaaaattaacgattgccttcagtttgtgttgtgtatattttgatgtatgtggtcactaacaggtcacttttattttttctaaatgtagtgaaatgttaatacctattgtacttataggtaaaccttgcaaatatgtaacctgtgttgcgcaaatgccgcataaatttgagtgattgttaatgttgtcttaaaatttcttgattgtgatactgtggtcatatgcccgtgtttgtcac

SEQ ID NO: 17443 - DNA, 985 bp, Macaca Fascicularis
  misc_feature (1)...(985): n = A,T,C or G
aaccattgcagattgatgaattttcagtgaaggttgtgcccctgggtctgagaagaactccagtctctgtaagctgtgtatgggcccaagcccaaacctgtgtgaacccaacaacaaagagggaatactacggctacacaggggctttcaggtgtctggttgagaagggagatgtggcctttgtgaaacaccagactgtcctacagaacactgagggaaaaaaccctgatgcatgggctaagaatctgaaagaagaagactataagttgctgtgccttgatggttccaggaaatctgtgcaggagtttgcaaactgccnncntggcagagccccgaatcatgctgtggttgcacggaaagataaggcagattgtgtccaaacgtagttacttgaccagcagcgcatgtttggaagtagtgtaactgnnnnnnnnnnnnnnntttgtttgtttgagtccaaaaccaaggaccttctgttcagagatgacacagtatgtttggccaaacttcatgacagaaacacatatgaaaaatacttaggagaagaatatgtcaaggctgtcactaacctgagaaaatgctccacctcaccactcctggaagcctgcactttccatagagcttaaaatctgagaggtggggctgccaccaacgtgaagatgggagcgcagatgatccatgagtttgccctggtttcagtggcccgagtggtttgtgctaaccacgtctgtcttcacagctctgtgttgccatgtgtgctgaacaaaaaataaaaattattattgattttatgtttcaaaaactccattctttcctaaatattttcaacagaaggatttctttatgcgttctgcctatatatctatgcaactgagcccttccttctcagcnnnnnnnnnnnntggtctttccctatggctttnnnnnnnnnnnggnnnnnnnnnnnnnnnnnnnnnnnnngggaaatcttttctaatagggtctg

SEQ ID NO: 17444 - DNA, 1126 bp, Macaca Fascicularis
  misc_feature (1)...(1126): n = A,T,C or G
aagaggcagccaaggtnnnagtgcctgtccacgctnnnccggcctgtnntcggagagctcaaagagaagcacaagcagagcggcgggagcgtgggtgctctggaggagctggagaacgccttcagcctggccgaggagtcctgccccggcatctcagacaagctgatggtgcatctggtggagcgagtgcagaggttttcacacaacagaaaccacctgacatccacccgctgaaacgcgctgctgttcagataggggacagaaggtcctttgtttttgttctgagctccataagaactgtgctgacttggaaggtgccccgtgctgtttcgtgcctgcagggacacgtcagatcctgtgggcctcacatgccaggtcaccgtctccttccacccctgcagtgtgctgttctgcacgtcaggggatgccgttccacatgtccactgccctccttcctctcctggcccagcaatagagctcacgggggctccagcagccagcatggtcctcatgagctatgcctgggtcttctgcagactcacgcagccctatggccgctcagaccaaggcgcagagcaactatcagggcagctctgcctcctcctcccatgagatggggagaggcaacaggacagcccccagaggagtgccctggccgctgtcctcccagggcccatgatggccatagatttgccttgtggtgttggatcaggtactgtgtctgctcataagtacttgtgtcatccagaatgtttgttttttaagaaaattgaatttacttgtttctnaangtattctgaggttaatatgttagttttcatagaacattgagaggcccctgccactttcaataaagacctgacttggagacatacaggtgtgtgggggggcgggcccggaccatgcagggctgcagcatccctggtcctgagtcctcatcacggcacgcagagactgcagcccagccacccttcaaaacttccctgtgactgattcctgggctctgcttnnnnnnnnnnnnnnnnnnnnnagcaggcagaggagtatgcaggtggggagatgctgtttatttttaatnnnnnnnnnnnnnnnaaagcagtcactcgtctacttcccgttggaagga

SEQ ID NO: 17445 - DNA, 735 bp, Macaca Fascicularis
tgaccattcaatttcagcctccttcaggagaccaaaaggacggagtgggggagagagactcagacgaggacagagtggtttccaatgtgttcagtagatttaggagcagaaatgcaaggggctgcatgacctaccaggacagaactttccccaattacagggtgactcacagccgcatcggtgactcacttcaatgtgtcatttccggctgctgtgtgtgagcagtggacacgtgagggggggtgggtgagagagacaggcagctcggattcaactaccttagataatatttctgaaaacctaccagccagagggtagggcacaaagacggatgtaatgcactttgggaggccaaggcgggaggatcacttgagcccaggagttcaagaccagcctgggcaacataccaagagccctgtgtctttaaatatatatattttaaatatatttaaatatatatttctaatatctttaaatatatatgtatatattttaaagaccaatttacgggagaattgcacatagatgtgaaatgaatgtaatctaatagaagcctaatcagcccaccatgttctccaatgaaaaatcctctttctttggggtttttctttctttctttcttttttgattttgcactggacagtgatgtcagccacatacaggatccacaggggcggtgtcagatgctattgaattgtgttgaattgtatgctttttcacttttgatatataaac

SEQ ID NO: 17446 - DNA, 767 bp, Macaca Fascicularis
  misc_feature (1)...(767): n = A,T,C or G
aannnnnnnnnnnnnnnnnnnnnnnnnngtaggaaggccttaagaaacatcagcannnnnnnnnnnnnnnnnnnnnnnnnnnnnnnnnnccnnnnnnnnnnnnnnnccaggaaggatgtgggaaacacnnngcatcacccagcaagctgaaacgacacgccaagacccatgagggctatatatgtcaaaaaggatgttcctttgtggcaaaaacatggacagaacttctgaaacatgtgagagaaacccataaagaggaaatactatgtnnnnnnnnnnnnnnnnnnnntaaacgcaaagattaccttaagcaacacatgaaaactcatgccccagagagggaggtatgtcgctgtccaagagaaggctgtggaagaacctacacaactgtatttaatctccaaagccatatcctctccttccacgaggaaaggcgcccttttgtgtgtgaacacgccggctgtggcaaaacatttgcaatgaaacaaagtctcactaggcatgctgttgtacatgatcctgacaannnnnnnnnnnnnnnnnnagtaaaaaaatctcgtgaaaannnnnnnnnnnnnnnnnnnntcagtggatatatccctcccaaaaggaaacaagggcaaggcttatctttgtgtcaaaacggagagtcacccaagtgtgnnnnnnnnnnnnnnnnntcgacggttgcagtacttaccctcagctaagaactgcactgctttgtttcaaggacggtagacgaaggagcttanntctctcagagc

SEQ ID NO: 17447 - DNA, 751 bp, Macaca Fascicularis
  misc_feature (1)...(751): n = A,T,C or G
tatctatctatacaaatttctgtttatccatagataggtatctatacatacacatctcgagtgcatctattcccactctcattaatccatcatgttcctaaatttttgtaatcttactgtaaaaaagtgcactgaacttaaaaacaaaacaaaacaaaagtccaaactgatatatcctatattctgctaaacgacaaaagtgaacgaaagcatttaactggtcaattttgattggaaatgctgtaaagatatggaatgaagtcctgtgaggccttcctatctccaagtctatgtattttctggagaccaaaccagataccagataatcacaaagaaagcttttttaataaggcttaaaccaagaccttgtctagatatttttagtttgttgccaaggtagcactgtgagaaatctcacttggatgttatgtaaggggtgagacacaacagtctgactatgagtgaggaaaatatctgtgtcttttcgtcagtttggtgcatttgctgctgctgttgctactgtttgcctcaaacgctgtgtttaaacaacgttaaactcttagcctacaaggtggctcttatgtacatagttgttaatacatccaattaatgatgtctgacatgctatttttgtagggagaaaatatgtgctaatgatattttgagttaaaatatcttttggggaggatttgctgaaaagttgcacttttgttacaacnnnttatgcttggtacaagcttatgctgtctta

SEQ ID NO: 17448 - DNA, 748 bp, Macaca Fascicularis
  misc_feature (1)...(748): n = A,T,C or G
gtaacatgaagaatgacatcgttgcacctnntaatcagcattgnnnnnnnnnnnnnnnnttgcagctgttaagnnnnnnnnnnnnnnnnnnnctaaatcaaacgtgccatggaacacgtttttaaccaacatcttctgacttaggtcttattttgagactccttccctgcacacctctgttttcctggctgtgggcatacgaggcagggaaagttacgggtcaaaattaggaagacctcattgccttgatgagggggcctcaggacaagccagtnnnnnnnnnnnnnnnnnnnnnnnnnnnnnnnnnnnatcagcgctcaggcccatccaggaatggaagcccggccattgtggtcccccaaacgcaggaaggtagtgctgagatgctggctttcccaccacacnnnnnnnnnngggtgaagtcaatgtgtgctacaaggagctgtgtggcccttggcccagccaccagctgttgaccaaccagctgcagcggctgtgtgtgctgctgnnnnnnnnnnnngagaccgagagccatgacgacagtgtggaggggcccaaggaatttccccaggagaagatgtgtctgcggcttttcaggggtcccagcaggatgaagccatttaaatacaaccatcctcagggattcttcagccatcgctgacctctcgcccagcctgttgtttcccccaaggcctcaccctgagtcctgggcttctgctttctgctgtggcccnnnntgtgactcttg

SEQ ID NO: 17449 - DNA, 1286 bp, Macaca Fascicularis
  misc_feature (1)...(1286): n = A,T,C or G
cagtcaaaggcagcaagcagatagactnnaggtgnngnaaagatnnnacacaccaggagnnnnnnnnnnnnnnnnnnnccagactgtctgtctgtgtctgcatgtaagagtgagggagggaaggaaggaactacaagagagtcggagatgacgcagcacacacgcagttccccagcccagtgatgcttgcattgaccagatgttcctgagtctggagcaagcacccaggccagaataacagagctttcttagttggtgaagacttaaacatctgcctgaggtcaggagnnnnnnnnnnnnnnnnntacaaaagctcaggtgaaagactgagatgaatgtctttcctctcccttcctcccaccagatttcctcctggaaaactctttggtagatttggccgggagcttgcttttatgtaaattggtgaaatacacacatcttacactatccacagatatagccaagtagatttgggtagaggatactatttccagaatagtgtttagctcacctagggggatatgtttgtatacacatttgcatatacccacatggggacataagctaatttttttacaggacacagaattctgttcaatgctgttaaatatgccaatagtttaatctcttctattttgttgtcgttgcttgtttgaagaaaatcatgacattccaagttgacatttttttttttcattttaattaaaatttgaaattctgaacaccgtcagcaccctctcttccctatcannnnnnnnnnnnnnnnnnnnnnnnnncttttctctgcttcatgtttgggggccttccttttaactgccttcctggcttggctcagatggcagatgagagtgtagtcacgggcctgggcacaggagggagagctgcagcgtcctgcctcggctggagggacacctctcctgggtgtggagacagcttggtcccctttccctagcttcccggtgggtgannnnnnnnnnnnnnnatcctcacctcttggaattaaaattgttggtcactggggaaagcctgagtttgcaaccagttgtagggtttctgttgtgtttggtttttttttttaaataaaactataatataaattctcctattaaataaaattattttaagttttagtgtcaaaagtgagatgctgagactaggtgataatgtatattttacgggcggggggtggtaggatggtgacattgaacatgattgctctctgtcttttttcagcttatgnnnnnnnnnnnnnnnnnnnnntttgtatcttcagttcattccactta

SEQ ID NO: 17450 - DNA, 741 bp, Macaca Fascicularis
  misc_feature (1)...(741): n = A,T,C or G
gaaaatatgttgtgttcttcttttatcctcttgacttcacctttgtgtgccctacggagatcattgctttcagtgatagggcagaagaatttaagaaactcaactgccaagtgattggtgcttctgtggattctcacttctgtcatctagcatggatcaacacacctaagaaacaaggaggactgggacccatgaacattcctttggtatcagacccgaagcgcaccattgctcaggattatggggtcttaaaggctgatgaaggcatttcattcaggggcctctttatcattgatgataagggtattcttcggcagatcactgtaaatgacctccctgttggccgctctgtggatgagactttgagactagnnnnnnnnnnnnnnntcactgacaaacatggggaagtgtgccctgctggctgnnnnnnnnnnnnnnnnnnnnnnnnnnnnnnnnnncaaaagagcaannnnnnnnnnnnnnnnnnnnnnnnnnnnnnnnnnnnnnnnnnnnnnnnnnnnnnnnnnnnngccatgagaacaaaacctcttctgtattttttttttttccccatgagtaaaacacaagacttcagattcagccgaattgtggtctgttacaaggcaggcctttcctacatggggtggagagaccagcctttcttcctttggtaggaatggcctgagttggtgttgtgggcaggccactggtttgtatgatgtatcagtagagcaacccgtt

SEQ ID NO: 17451 - DNA, 732 bp, Macaca Fascicularis
  misc_feature (1)...(732): n = A,T,C or G
catgttgttgaggctgtcacacagtcctgagtgnnnnnnnnnnnnnnnnnnnnnnnnnnnnnnnnnnnnnnnnnnnnnnnnnnnnnnnnnnnnnnnnnnnnnggccacttttttttttttttttttggtagatgcatgacttgtgtgtgatgaggaggggaatggagacagagtctccagctcctctactgtttcacaacgtgtctttcttattttgtttgaattgttaattcacagaatagcacaaactacaattaaaactaagcacaaagccattctaagtcattggggaaacggggtgaacttcaggtggacttggagacagaatagagtgatagnnnnnnnnnnnnnnnnnntccttttgccactgctgtgtgattagacaggcccagtgagcnnnnnnnnnnnnnnnnnnnnnnnnnnnnnnnnnnnnnnnnnnnnnnntgaatcctttttaaatgacttggctcgatgctgtgtgnnnnnnnnnnnnnnnnnncaggccgtgtgtctgtcagcccgaccttcacatctgtcacgttctccacacgggggagggatgcagtccgcccaggtccccgctttctttggcagcagcagctcccgnnnnnnnnnnnnnnnnnataagatgannnantggattcgccctcctccctgtcacagagctgcagggcggagtgaaacagttgaggagctannctctctgtctccattcccnncctcatcacacac

SEQ ID NO: 17452 - DNA, 1368 bp, Macaca Fascicularis
  misc_feature (1)...(1368): n = A,T,C or G
acagggacccaaccgcgcagcccgggggtgagctgatgctgggcggcacggactccaagtattacaggggttctctgtcctacctgaacgtcacccgcaaggcctactggcaggtccgccnnnnnnnggtggaggtggccagcgggctgaccctgtgcaaggagggctgtgaggccattgtggacacaggcacctccctcatggtgggccccgtggatgaggtgcgtgagctgcagaaagctatcggggnnnnnnnnnnnnnnnnnnnnnagtacatgatcccctgtgagaaggtgtccaccctgcccacgannnnnnnnnngctgggaggcaaaggctacaagctgtccccagaggnnnnnnnnnncaaggtgtcgcaggccgggaagacnnnnnnnnnnnnnnnnnnnnnnnnnnnngacatcccgccacccagcgggccactctggatcctgggcgacgtcttcatcggccgctactacactgtgtttgaccgcgacaacaaccgggtgggcttcgccgaggccgcccgcctctagttcccaagccgtcggcgtgccagcacagaaacagaggacagtcccggaggaggaggcccccggccccccggcgcctcccacacgtagtcacacacactcacacttgcctgcccactgccctgggcgccctggaagccggcggcccaagccagacctgctgttttgttctgtggttttcccctccctgggttcagaaacgccacctacctgtccgcctgtctctccacctgtccatctgtccgcctgtccgtctgtctgtctgtttggtgggggtagagctgatctggagcacagatctgttccatacacttggaagaccccgccccagcttggcagccgagcttgtgtatcctggggctcccttcatctccagggagtcccctccccagctctaccagcgcccgctgggctgagccgccaccccacaccaggccgtcctcccggaccctcccttggaaacctgccctacccgagggcccctatgccgagcttgggcccctctgcccagcttgggcccagctgggctctgccacccctacctgtccagtgtcctgggcccattgtggatgaggccagtggaggcctgaggatgagctggaaggagtgaggggataaaactcaccttctggagcctgcatggtggtcctgggactgagcccatccctggggcatgcattggcctggaggtggggctgggaccgggggctggcgtcagccttcctctgcagctgactcctgtcctccccttgggcgaccgagagccccagctgatgtgaaaatacagttgttggcctcccctcaaaaaaaaaaaaaaaaaaaaaaaaaaagg

SEQ ID NO: 17453 - DNA, 712 bp, Macaca Fascicularis
  misc_feature (1)...(712): n = A,T,C or G
caatgggatcattcatatcatttccaggccnnnnaaagcaccccctgcccctatgagcttgacccacactggcttgggagcagggatcttctttgccgtcatcttggtcattggagctgttgccttggctgcatattctttctttcggctaaaccggagaacnnnnnnnnnnnnnnnttttgagtcggaagaggacattaatgttgcagctgttggcaagcagcagcctgagaatatctcgaaccccttgtatgagagcgccacctcagctcccccagaaccttcctacgaccccttcacggactctgacgaacggcagcttgagggcaacgaccccttggggacactatgagggcctggacaggagacgccagccatcacccactgccatctgggccatcaactgnnttttcagcaccacttgccttttgggaacataaagtcctttaagcactcannnnnnnnnnnnnnnnnnnnnnnnnnatctgggggttgtttctgtgggcgagggttatgttactgtgcccaccagagcagcttcctgctctgaccctttggctcttcttcctttgtacgcttcagctggcacccgctccattctgccccacacgatgggtaactgatctttcttccctgttagactgtaagcctccatctttgtatcccagcccctagcccagtgcctgacacaggaactntgcacaataaagtt

SEQ ID NO: 17454 - DNA, 218 bp, Macaca Fascicularis
catcaagtcccaaggttcttccgcagcatagaatgggacttgtaggagaagaagcaggtgctccctccattccagccacagatcatggacgactacggtctggacaactttgacacacagttcaccagcgagcccgtgcagctgaccccagtcgatgaggatgccataaagaggatcgaccagtcggagttcgaagggttcgagtacatcaacccatt

SEQ ID NO: 17455 - DNA, 649 bp, Macaca Fascicularis
aagtgttgggattataggagtgagtcaccgcaccggccaagacacttttcaaactgatacagctgacaatgggagcctcataaagatggcttttgtttcttcccttcaaggtcatttacttgtacgagacagaaaaagatagcaatggggacatgggatgcgggagggaggggaatagtggaactttctttccatgggaaactttcccttttgtaagctgagggccaggggtagggatattttttagtttgtgattttacatttatctgtacatactttttcaagattgatcgtttttataaccatggttttcctgaaatcctcaattcatcaatatgaaggaaatgaaccacatagactttatgcaataaataacagtgcaagtgagtataactttaactgatgttccacaaaacatttttgatttcaggtttgtatgatgtagtttttaatcctacattttcacatgcttcaaactaacacatttttaaagctttcccccacttttctctctatttgcattgttagccatcttgaagtgatgttgtttaacatagaattgtactgttgaatttggctttagcgggtgtaaacagctgatggtatatcagtatctgagaccccaaactctccaaatactgatggtgca

SEQ ID NO: 17456 - DNA, 573 bp, Macaca Fascicularis
  misc_feature (1)...(573): n = A,T,C or G
tcagcgccntccgcgagcgnnngggacccctggtggagcagggccgcgtgcgggccgccactgtgggctccctggccagcnnnnnnnnnnnnnnncgggcccaaggccttgggtgagcggcttcgcgcacggaatggaggagatgggcagccggacccgcgaccgcctggacgaggtgaaggagcaggtggnnnnnnnnnnnnnnnnnnnnnnnngaacaggcccagcagnnnnnnnnnnnggccgaggccttccaggcccgcctcaagaanctggtggcggaggtgcgcgccaagctggaggaacaggcccagcagataagcatgcaggccgaggccttccaggcccgcctcaagagatggttcgagccnnnnnnnnnnnnnnnnnnnnnnnnnnnnnnnnnnnnnnnnnnnnnnnnnnaggatgccgtgggcgcnnnnnnnnnnnnnnnnnnnnncgacaatcaatgaannnnnnnnnnnnnnnnnnnnnnnnnnnnctccaccccatgcctcctctctccgctcagcctgcagcgggagaccctgtccccgccccagccgtcctccaggg

SEQ ID NO: 17457 - DNA, 746 bp, Macaca Fascicularis
  misc_feature (1)...(746): n = A,T,C or G
cagagccataannnnnnnnnnnnncaatnnnttgtacatgatatagaggcatcaagcaaaatttgacagaaattttaaaatatgaaattgtatagcttttccaagatggtaaaacccacgttagtcatcagtaacattctctattatttttaagaannnnnnnnnnnnnnnnnnnnnnctaagggaacaaatctgataaattgtgtaacctagtctcttctctacatggnnnnnnnnnncagcaattataaattaatatcaatgaccaaaagtaatttaaaagcatgagatatttgcaatttcattcattgggcacatatcaaagtataattttgattttaaatggtcacccatttatttgtttccaagcaagtaaaaaataccgtaacaaacctgatgtgggtaggannnnnnnnnnnnnnnnnnnngtgttcaatcttgtgtttgtttcatatgggccctttccagaagtttgcaaaccttgtcatacccatatgcaaaattgtgtttccttgcattaaaccagtgaagtttgggttttcttttgnnnnnnnnnnnnnnaaannnnnnnnnnnnnnnnnnnnnnnnnnnnnnnnnnnntcttccactcagtcactacaaaaaaacatagtttcagtttgcatgatttttttttcttcaatggttgtgcagataaggatccatttctgggatagaattgtattttttaagtctctttnnnnnnnnnnnnnnntatgtacaaataa

SEQ ID NO: 17458 - DNA, 715 bp, Macaca Fascicularis
  misc_feature (1)...(715): n = A,T,C or G
gtcaggagccagcagggcgnccaggagaaagaaggtttaacattaagtattccttggcccagcggctgcccgcccggattgtggtgtgagatggtgcgccgtggggggnnnnnnnnnnnnnnnnnnnnnnnnnnnngagaannnnnnnnnnnnnnnnnnntggggaacccaacctggggatcccctcacttcataggcagagcccgaccacctgggccctaggcatactctccaggattgtccagacccccaacatatgtccccagagggtccctaggtgggtcaactccaaggcaaatgtccaaacatcaagaagataatgacactggaggggtccggcttggctagtcacacatcaagtcccaaggcagcaacagggccgggagccaggtgtgccgactgtcttacagtatcattnnnnnnnnnnnnggagtcaagtgtgtctgctctccagccccacatccatacccctgccccagagaagcctcagtccctccctcctggctcacagnnnnnnnnnnnnnnnnnnnnnnnatgcagatgtagccaggcctcccgcatgctgcctgcctccggccctgccccacacaggcctggcccagccagcaggttctctcctgtgagctccccaatccannnnnnnnnnnnnnncccagccacctggatctccaggcccagcctggccccaaatggttctttccttcatcctcagcng

SEQ ID NO: 17459 - DNA, 762 bp, Macaca Fascicularis
  misc_feature (1)...(762): n = A,T,C or G
gtcaggtagtganggaccagannngggttttgaagggatnnnagggaggtggaaaacagtaagaccagagacagatgctgagcagttccagaacagcctgacacagcacagcactctttttccagaggattcttttggtgggggttggttgcagaggcggggggctgtccagtagaaatcaagctgcacccctgggtcacgaggcacgggggctggcaggggctggggagaaggaagagggaggatgttgcccggaatcgcccccaccaggacaagcagtcacctgccaaacacattcccatcctcccgaccgtgatntnnntgaagaccatgatacgtaaacgctcctttgggaacccattcgagggcagccggcgggaggagcgttcccnnnnnnnnnnnnnnnnnnnnnnnnnnnnnnnaccaaccagggaatgtgagtccctgtctgagctcaaggaagcaaggcagcgaagacaacctccagggcaccgacccgccccccgtgggggaggaggaagtgctcttgtgagaggcagtccctgcgtggaaagatgccgggcccccgcccccggctcccccgcaagcatgcatccaccgcggcaggaggaggcgatggagcccgagtagctgcctggatcgctcgacctcgcatgcgcgccgcatcgcctcttgggggctgctgcaccgcgtttccatagcagcatgtcctacggaaacccagcacgtnnnnnnnnnncgatcgtcatctctggttatctg

SEQ ID NO: 17460 - DNA, 765 bp, Macaca Fascicularis
  misc_feature (1)...(765): n = A,T,C or G
agagcaaaatggacgagtgncnnnaatatgcagaacagtnnncagctacagtgaaggactatgaattacaaacaatgacctaccgggcnnnnnnnnattcannnnnnnnnnnnnnnnnnnnnnnncgaagaatgcnnnnnnnnnnnnnnnnnnnnnttcaagagttcatggacttaaggactcggtatactgccctggtcactctcatgacacaatatattaaatttgctggtgatnnnnnnnnnnnnnnnnnagaggaggagaagtcactggaagaagaaaagaaagagcatgttgaaaaannnnnnnnnnnnnnnnnnnnnnnnnnnaatatcagcaagacattgaaagatgcagagaaggctgggaaacctcccttctctatgcaannnnnnnnnnnnnnnnnnnnnnnnnncaaaaaggaacagttannnnnnnnnnnnnnnnnnnnnnnnnnntttttggcaaaacatggagataaaatgacagatgaagaaagaaatgaattggaaaaacaagtgaaaactcttcaagaaagttataatttattattcagtgaatctctgaaacagctacaagaatcacaaacctcaggagatgtaaaggtagaggagaaggtaatattatttatttaaacacgaggctgtttcaagaagcttagtttgattgcatggctctggaaatctatgtcaataataaagaaatgaccttgaattttgtacgtagttaaaacatggattgagtttatttaaatgtttggagatt

SEQ ID NO: 17461 - DNA, 735 bp, Macaca Fascicularis
  misc_feature (1)...(735): n = A,T,C or G
gccagtagaagtgaaggtcttaagccgattttaattgttttgattgtactgagaggtctttttatttcctgcagtgtgtgctgacttgatcagaggcgcgaaggaaaagaacctgaaannnnnnnnnnnnnnnnnnnnnnnnnnnnnggtaaagtaaatcggaggggcaggaagtaggagagttgcttctgcatgttgtgtaaattcgggttctttaagaggtttggctgccaaaattnnnnnnnnnnnnnnnnnnnnnnaacgcgtattgaaattggtggtagatttcggttcctagtaagtatctaatgtttagatatgatcgtttaattattgctgttgtgttcttggtgtggtttggtgcttaacaggcgcaagctctaaggctggtgtcctactacagtgaaaacagacctggcattttcaacccgtggtacnnnnnnnnnnnnnnnngtaaataggaatcatgccaaagggaaactaatnnnnnnnnnnnnnnnnnnnttccagatgttctagggataagtataaagccataaacacttggtttcctttgtcttttgctgcagactttgagaatcactacaagaaaaactccttgtggtgaaggttctaagacatgggatcgtttccagatgagaatccacaagcgacnnnnnnnnnnnnnnnnnnnnnnnnagattgttaagcagattannntccatcagtattgagccaggagttgaggtggaagtc

SEQ ID NO: 17462 - DNA, 745 bp, Macaca Fascicularis
  misc_feature (1)...(745): n = A,T,C or G
gctcagctnnnnaganntgagatacaggtgcacgccaccacacctagctaatttttgtattattagtagagacggggtttcggcatgttggccaggccagtctcttctgacctcagggtgatcagcccacctcggcctcacaaagtgctggggttacaggcgtgagccaccttgcccagcccacatcatacagtttgaaatgaaactttgccacaaccagcctttgctgtagtacacacatatatcactgaacctgcttgaaataaagttttttttttctttttcatgattcgtctttgagtacctccaggctgaaggactgttgtaccagtaaaaacttaaaggcacaaattctcctttgaagaccttctctcttttctttggccccatattttatgttgctttatctttgaaattttgcatgaaaaggaaatgaatgggttcgaatgaaattgtcctttaaagcatgattacttgttcccatggacagatatttttctccccttgctcttcctggcctgaaacacaggaaatcagagtcagaagttatctccctctccctgtgatgccttgagatttttttctgcannnnnnnnnnnnnnnnnnnnnnnnnnnnnnnnccattggaaaatactgttataccaaataattctagatgagtaacaaagatctttctaggccttcattttatggtttttcttaactgttaagattgtgacacagattatattactaattttggatg

SEQ ID NO: 17463 - DNA, 475 bp, Macaca Fascicularis
  misc_feature (1)...(475): n = A,T,C or G
ggggtgggcgagcctagaacactgcgtgcggcgggttcccgggtccagccagcgcggaccgcgtggggcccggcggctcttaggcgaaggtggagttgttccagcccacgttggccgcgttcatgtcgtaatagttgatgtagaccctgnnnnnnnnnnnnnnnnnnnnnnnnnnnnnnnnnnnnnnnnnnnnnnnnnnnnnnnnnnnnnnnnnnnnnccgccgannnnnnnnnnnnnnnnnnnnnnnnnnagcgcgcaaggctcgctggagcctccgaaggccatgagctggtccgggaccacgtgcaccgcgatgtactgggggggcttgccggtggcctgcgccagctgctgggtgagctcggagaggaacccgtccggcacggaggcgcggggcacgttggtgtttacgatgaacatcggcatgatggcagaagaacccggacacccgcgcagaagcacaaactcacgcgc

SEQ ID NO: 17464 - DNA, 725 bp, Macaca Fascicularis
  misc_feature (1)...(725): n = A,T,C or G
gaagacagaccagcagggagacactccccggcagcgggctgagaaggctcaggacaccgagctggccgcctacctggagaaccggcnnnnnnnnnnnnnnnnnnnnnnnnnggaccaggagacggctgtgtagcgggctgcccacgggtagcaggagggacaatgcggccaggggacgggcgccctccttgcccacctcactgccannnnnnnnnnnnnnngccacggggggacccaggccccagggaaagaaccccgtgccgcgccctaaggagccgcccaaacctagggctggattcaggannngggggcctcacctgtccccaagaggcccccaacggacccggaggctcacaggggaacaggacacggagggnnnnnnnnnnntttggagggggggattctgggtcagggcgctccctggccgcagcacatgccctccgaggagtggaggggctggagaaagagggaggccttcggaaagaggcctcctgggccccctggtcttcggccgggcccccagcctccgctcttgccccaccccacctcccccgggcttcctcccggacacccagcgcctgctgcacttgcccgccctgccctgcttggcacccgctccggcgaccttccctgctcccccnnnnnnnnnnnnnggactgtgcggcctgggggtggggggcgggactctcacggtgacatgtttacagctgggtggactcagaaag

SEQ ID NO: 17465 - DNA, 680 bp, Macaca Fascicularis
ctgccgggcggtggaagcgccaggtttcctttcaaccagcggggcctgcagcctcgaagtctcctcctccaggccgcgcgcggatatgtcatccagaacccagcccagcctgggcagaatgatgacccacctccttctacactgctcaaagactaccagaatgtccctggaattgagaaggttgatgatgtcgtgaaaagactcttgtctttggaaatggccaacaagaaggagatgctaaaaatgaagcgagaacagttgatgaagaagattgatgcaaacccggaggacaccagatccctggaggctcgaattgttgccttgtccgtcaagatccgcagttatgaagaacacatgcagaaacatcgaaaggacaaagcccacaaacgctatctgctgatgagcattgaccagaggaaaaagatgctcaaaaacctccgtaacaccaactatgatgtctttgagaagatctgcagggagctggggattgagtacaccttcccccctctgtattaccgaagagcccaccgccgattcgtgaccaagaaggctctgtgcattcgggttttccaggagactcaaaagctgaagaaggaaaaaagagccttaaaggctgcagcagcagcccaaaaacaagcaaagcagaggagcccagacagccctgccaacactggaccaga

SEQ ID NO: 17466 - DNA, 753 bp, Macaca Fascicularis
  misc_feature (1)...(753): n = A,T,C or G
tacactatgtgaatatttggaattgaacggctgtatattgctaagagggcccaaagaattggaatcctccttaatttaattgctttgaagcacagctacaatttgtttttgtatttttgttttgaaagtttaacaaatgactgtatctaggcatttcattatgctttgaactttagtttgcctgcagtttcttgtgtagatttgaaaattgtataccaatgtgttttctgtagactctaagatacactgcactttgtttagaaaaaaaatctgaagatgaaaatatatattgtaaagaagggatattaagaatcttagataacttcttgaaannnnnnnnnnatgtcatcagtaaagtacctttatgttatgaggatataatgtgtgctttatggaattagaaaattagtgaccattattcacaggtggacaaatgttgtcctgttaatttataggagttttttggggatgtggaggtagttgggtagaaaaattattattagaacattcacttttgttaacagtatttcttttttattctgttatatagtggatgatatacacagtggcaaaacaaaagtaaattgcttaaaatatatannnnnnnnnnnnnnnnnatcttcccatttaacattgtttttgtatattgggtgtagatttctgacatcaaaacnnnnnnnnnnnnnnnnnnnnnnnnnnaattaaaaaaattccttgtgacttacaatttgcacaatatttcttttgttgtac

SEQ ID NO: 17467 - DNA, 766 bp, Macaca Fascicularis
  misc_feature (1)...(766): n = A,T,C or G
gagagctacatgcnnggatgacttacacnnnngattgggcatgagcannngcacgtcgggttggaaaaanntctcccagcaattaatgggattgtcntnntggtggactgtgcagatcattctcgcctcgtggaatccaaagttgagcttaatgctctaatgactgatgaaacaatatccaatgtgccaatccttatcttgggtaacaaaattgatagaacagatgcaatcagtgaagaaaaactccgtgagatattcgggctttatggacagaccacaggaaaggggaatgtgaccctgaaggagctgaatgctcgccccatggaagtgttcatgtgcagtgtgctcaagaggcaaggctacggcgagggttttcgctggctctcccagtatattgactgatgtttggacagtgaaaataaaagagttttacttctctggactgatcctattcacagcttcctcatgaacttttctaatagaacaaggaaagctctccaaccatgtctggcgttgagaagccaagagtctctgtcaactctctcattgnnnnnnnnnnnnnnnnnnnnnnnnnnnnnnnnnnnnnaggtaatgctgccccacgtgctggtgcaggtcagtatcccgggacttggaagnnnnnnnnnnnnnnnaggtaaagctgtgtgccatcatggggcacctgaaaagaaaaacacgtctcaccactgtggttgatttcaaaagaaactgattctattttttaaagaaagtgttgttaatgtaa

SEQ ID NO: 17468 - DNA, 645 bp, Macaca Fascicularis
  misc_feature (1)...(645): n = A,T,C or G
gcaactcaaagacccattggaacaagacaatacatggcttgatatacaacgccctgaagctcttcatggagatgaaccaaaagctattcgatgactgtacacaacagnnnnnnnnnnnnnnnntaaagaatgggaatactggctcctttgacactgctcgctttacactgtcctgcagtctcgtttcttcagtggatatatgagcttctcatcgaagtatgtaggtcccatgaagaaacaaccgaccaggggaagggcaaggatggagacataagacttacttagattagatttcttttaagaattcgaattcttggtcatgttaaatgttctgatattttctcatgtttaaatctcggttcattcttcatgctgtgctnnnnnnnnnnnnnngtggggagatggagcggaggggctgcgggaggagccgctggctgtgcccaacgtgcctgtgccttcgccccttcagcgtgttcttnnnnnnnnnnnnnnnnnnnnnnnnnnnnnnnnnnactgtttttcagagagaagctaaaaatgaaagaacgggaagaagcatgggttaaaatagaaaatctagccaaagccaatccccaggtactaaaaaagagtaacatgaaaacgcccagggttacttgaatgttt

SEQ ID NO: 17469 - DNA, 1273 bp, Macaca Fascicularis
  misc_feature (1)...(1273): n = A,T,C or G
gacccccgnnnnnnnnnnnnnnnnnnnnnnnnnngcccggggcagctacagcatcaagtcccgcttcacagacgacgacaagaccgannnnnnnnnnnnnnnnnnnnatctcaccatcaagaaggactggaaggactgagcccagccagaagcaggcagggcagacggacggacggacgacggacaggcggatgtgtccccccagcccttcccctccccataccannnnnnnnnnnngccctccgtgcccctcccaccctggtccgcctccctggcctggctcaaccgagtgcctccgacccccctcctcaaccctcccccgcccacaggcccagcctcctcggtggtcttgtgtctcgttgctgcttctgcctgtgctgtggggggaagaggccccagccaggcctctgctgccctttccgtgccccccaggttctatctccctgtcacacctgaggcctggcttaaggaaggagcggagcagccattctccaggccccgtggttgcccctggacgtgtgcgtttgctgctccgtggtggagctggggtgtgggatgcagggtcttgtgggggccgggccatcctccagccctgctgctccctggccagcccctttgtcgctgtcagtcccgtctaaccatgatgccttaacatgtggagtgtgccgtggggcctcactagcctctaactccctgtgtctgcatgagcatgtggcctccccgtcccttccccagtggcgaacccagtgacccagggacatgtggggtgtgctgctgctgctccccagcccaccagtgcctggccagcccgccccctcccatggccaggactgtggagatggctccagcggcttggggaaagccaaattgccaaaactcaagtcacctcagtaccatccaggaggctgggtgttgtcctgcctctgccttttctgtctcagcggacagcgcccagaacccaccccctagagagccgtcaatggacagcctcactcaccccacctgggcccagccaggagccctgcctggccatcagtatttattgcctccgtccgcgctgtccctgggccgctggcctgccgcctgtttccccaggctctcggtgccaccacccccagcaggccctccctgacccagccaagaacaaacaagggaccaagtgcacacattgctgagagctgtctcctgtgcctccccgaccccgtccctggtcttcatgttgtgtctgccaggctcagnnnnnnnnnnnnnnncctgcttctccttttctgac

SEQ ID NO: 17470 - DNA, 751 bp, Macaca Fascicularis
  misc_feature (1)...(751): n = A,T,C or G
actgccagtgccctgctctcccgttcgnntcntnntgtttctgtgtgacttnnnnnntatatcactcgttaaatagattttctttaaatttatttaaagaacaactatttaaaagnnaaggatattttgttgannnnnnnnnnnnnnnnnnnnnnnnnnnnnngaagttaaaattgnnnnnnnnnnnnnnnnnnnnnnnngttactctttcttgtcnnnnnnnatataagtccagtgtgttcattaatctagctgacacaaagaagaatctcctggtagagaagcgacgtgtaaaaaactggtggaaaaaggtttggatttttttccagtggggtggggggaggnnnnnnnnnnnnnnnaggtcacggctggactgaatgggcctttttatcttcccaccgtatcatggaagtagctgcttgcttgtactgcctatccttcaggcatccctaaagctcactctgaagatggtagagacaaacannnnnnnntggagtcaaagttgatcctgacactgannnnnnnnnnnnnnnnnnntnnnnnnnnnnnnnnnnnnnnnnnnnnnnnagaaaannnnnnnnnnnnnnnnnnnnnnnnnnnnnagatattgacacaatttaaaaaaacaaatcagtaaaggaatgtatataatattgctctcgtgttttacagtaagatttgttgctctcagactgtgtaaaacnnnaatttattcatgttttctgcatattaaaaaatcttattgtaccaa

SEQ ID NO: 17471 - DNA, 765 bp, Macaca Fascicularis
  misc_feature (1)...(765): n = A,T,C or G
ataaaggcatctagacacagcacaagcccatnnntggattcggaatacaatgaagagttaaatgaagatgactctcaatctgatgagaaagaccaagatgctatagaaactgatgccatgatcaagaaaaagacaaaaccttcaaagccttcaaaaccagaaaaagataaggagcccagaaaaggaaaaggaaaaagttcgaagaaatgaaaccatttttcactagcgacagccactttttactctccctcctgaccagtccagctggtctagagaaagccttgttttttcccagagcaaccatgttttagcataatgggatggcctggtgtcccattataaataaagggtggtatggctagaagggtatgagcagtaggcttatgtacacctcttatagaggttgataggactgcttgggtcctccactgtcccttgtcaatctagttagatgtgcttttgaatgactgtagaattggaactagaaactacgcctggccttggagccagattttagttaacgatattgagcctgggagcagtactaagtagtactaaggcgtcttttgtaggcttaagagtttatcccaatggcctttataggaccaatgctgatttttttttaaaggtagttcctattatgtggtgaaattttgtaaataaatgattatacaaaacagtcatcacctagaactgggtattctttgtacattgtcagatatctttcaaagtataaattaggaataaaaatgttccacatgatac

SEQ ID NO: 17472 - DNA, 1186 bp, Macaca Fascicularis
  misc_feature (1)...(1186): n = A,T,C or G
gacactcaccgccaccgnnngggacccaatatcttcagatacctgtgaactgtccctaccgtgctcgagtggccaactaccagcgtgacggccccatgtgcatgcaggacaatcagggtggtgctccaaattactaccnnnnnnnnnnnnnnnnnnnnnnacaacagccttctgtcctggagcatagcacccaatattctggagnnnnnnnnnnnnnnnacactgcnnnnnnnnnnnnnnnnnnnnnnnnnnnnnnnttctatgtgaatgtgctgaatgaggaacagaggaaacgtctgtgtgagaacattgcaggccacctgaaagatgcacaaattttcatccaaaagaaagcggtcaagaacttcactgaggtccanctgaatacgggtcccgcatccagactcttctggacaagtacaatgctgagaagcctaagaatgcgattcacacctttgtgcagtctgagtctcacttggctgcaagggagaaggcaaatctgtgaggccggggccctgcgcctgtgcagcgaagcttagcgttcacctgtgtaacccgctcatcactggatgaagattctccggtgctagatgcgcaaatgcaagctagtggcctcaaaatagagaatcccgctttccatagcagatcgtgtaacaattttaatgctctttccccaggggaaaatgaaggttaggatttaacagtcatttaaaaaaaattttgttttgatagttggttggattattcatttaaaatgattagaaggaaagtttctagctagaaatatgattttatttgataaaattttttgaaattatgtatgtttacatatcacctcatggcctattatattaaaatatggctataattatataaaaaggaaagataaagatgatccactcagaagtttttatttttctaaggttctcataggaaaagcacatttaatacagcagtgttttcagaaaataacttgagcaccatcatggtttaatgtttattcctgattataattgatcaaattcatttttttcacttgaaattacattaatgctaatttgcactgatttcacaacagatcaatttgtaattgcttacatttttacaataaataatccgtatataagaatagagatggtatttgatttctttnnnnnnnnnnnnnnnnnnnnnnactgccaccaga

SEQ ID NO: 17473 - DNA, 717 bp, Macaca Fascicularis
  misc_feature (1)...(717): n = A,T,C or G
gtattttnnnnnnnnnnnnaaaatgtnngtgtntatgtgtgtgtgtatatgtatatatttttttaatcacataaactttaccaagtgaaaccaagccatactgtgtnngagccaattaagaaaattgccatttttaaagtgtagcattnnnnnnnnnnnnnnnataaaatgacttgatgtattctagactactgaaagaaaaccacttcaaagattttgttgaaagttttagtgttgtctgaaaagcaagagggaaggtgattggtagtgagctaaaagaaaaagagagaaaaagagagtagttttgtcttcaggtaaaatgtctggttgtgccagacatttcacaagtgtgaaaggagataggagaagctcaacttgagggcatgtagtaagttgtagaaggctcgaggggacgtggacttatttgccttggtttgcaatacctgcaaataatgagtttgaaaagaaannnnnnnnnnnnnnnnnnnnnnnnnnnnnnnnnnnnnnnnnnnnnnnnnnnnnnnnnnnnnnnnnnnnnnnnnnnnnnnnnnnnnnnnnnnnaatgtttctgttaaaatgggatatcatctttgaaaggggggaggaggagtaaaaacccgattataatggtgatcaattcaagtcagtgttgactattctgtgaaatatatttggcccagtggaaatgataatcagaaaagactgtaaatagatcca

SEQ ID NO: 17474 - DNA, 771 bp, Macaca Fascicularis
  misc_feature (1)...(771): n = A,T,C or G
annnnnnnnnnnnnnnnnnnnnnnnngtcacaggcgccaagcagggcccacagctcagtgaccagcaggtgccacctcaccaggactgcgcctgctgagagccaccccaccccctttcccctctttcccgtcttccccaccttcccccanatacatgggcctgacctggcccctaccagccatgggcacaagacccctactcctgacttagcccgtcacccttatttattattgtagctatttatttatttatcgaagatgtcccccaggggcccgggctcccctgcccaccccaagccctgcccatcctgtacatatagccctttccccactcagccgtggtgtctcgtggccctgtgaactcaccactcaccctcctgaaccccctcgccttttttttaaattcacccccaaccacagttgtcagttgtgaagagggggccagatgacaccctagagcaggctgatcgggcaatgggaggtggccaggcctgccagtccctcggctctgccgcggtgggccgaggccgctgttgggggtttccctgtgcggaccatgggggtcagagtctggcctgccgggctcctctcccccagttttctcttttggtggggggctgtgctgtgggtattcaccaccctgggacccctccccctacccaccagacctgttctgacctcatgagtgtcaaacgtgccccccagttccttaggagatgtcaagacaacactacacacacccaataaagcgaatggaccacgtgtgttcct

SEQ ID NO: 17475 - DNA, 736 bp, Macaca Fascicularis
  misc_feature (1)...(736): n = A,T,C or G
ccgcnnnnnnnnnnnnnnnnnnnnnnnnnnnnnnnnnnnnaacaagggcattttgccagcccggaccagaattcaatgctttctcagcttgctagcaatccaggcatggcaaacctccatggtgcaagcgccacagacctgggactcagcaccnnnnnnnnnnnnnnnnnnnnnnnnnnnnnnnagagtacactagacatacactagagacaccttgtagtattttgggagcaaaaattattttctcttaagactttttgtactgaaaacaatttttttgaatctttcatagcctaaaagacaattttccttggaacatataagaactgtgcagtagccgtttgtggtttaaagcaaacatgcaagatgaacctgagggatgatagaatacaaagaatatatttttgttatggctggttaccaccagcctttttttttccccttgtgtgtgtggttcaagtgtgcactgggaggaggctgannnnnnnnnnnnnnnnnnnnnnnntcctgccnnnnnnnnnnnnnnnnnnntattattttttttaaattaatgaaaatatgtaatattaatagttattatttactggtgcagatggttgacatttttccctattttcctcnnnnnnnnnnnnnnnnaaaacatttctaaaaccagaggacaaaaggggttaatgttactttaaaattacattctatatatatatataaatatatataaatatatattaaaatacca

SEQ ID NO: 17476 - DNA, 190 bp, Macaca Fascicularis
tttttccagcaagttgagaacctgcctgcacagaagacaagagagcatcctccccagattgagcggccactaggtttatattttttttcctggtttttgagttttcggtaatatatatattgaagaaatattaataccgcatggggagaaccccaaccaaagaaatgtgaaatatatagtaaatgctttt

SEQ ID NO: 17477 - DNA, 720 bp, Macaca Fascicularis
  misc_feature (1)...(720): n = A,T,C or G
atcacactcaaaagcaaagcannnnnntcccagtgcctatcggacagtgcggcggtcgaggtcccgctcccggtcccctcggaggagagcccactcccctgagagacggagagaagagaggagtgtgcccactgcctaccgcgtgagcagcagccctggggccagcaggaagcggacccgctccagaagtccccacgagaagaagaagaagaggcggtcccggtcgcggaccaagtccaaggccaggtctcagtcggtgtcacccagcaagcaggcagctccccggcccgcggccccctcggcccactcggccagcgtctcccctgtggagagtcggggctccagccaggaacgctccaggggagtctctcaggaaaaagaagcccagatctcttcagcaatcgtttcttccgtgcagagcaaaatcactcaggatctcatggccaaagtcagagcgatgcttgcagcttccaaaaannnnnnnnnnnnnnnnnnctgagacggggccagcggaggcagagctgggaggctgcgtgggcttctgggcaggcnnnnnnnnnnnnnnnccacaccatccacctggccgcctccgtggaccctcggtggcttttgtaaattaatttttgatgacattttcagttttaagatnnnnnnnnnnnnnnnnnnnnnnngtatatttgtaaatatatcatgtttctgtgaaaatgtattatgaaataa

SEQ ID NO: 17478 - DNA, 754 bp, Macaca Fascicularis
gaaattgacagcgttcattccaagtatatgggccgcacaagttttgatccgagagtttggaccctgaggcttcacaaccttcagatcaaggacaagggcttgtatcaatgtatcatccaccacaaaaggcccacaggaatgatccgcatccaccagatgaattctgaactgtcagtgcttgctaacttcagtcaacctgaaatagtcccaatttctaatataacagaaaatatgtacataaatttgacctgctcatctatacacggttacccagaacctgagaagatgagtgttttgctaagaaccaagaattcaactatcgagtatgatggtgttatgcagaaatctcaagataatgtcacagaactgtacgacgtttccatcagcttgtctgtttcattccctgatgttacgagcaacatgaccatcttctgtgttctggaaactgacaagacacagcttttatcctcacctttctctatagagcttgaggaccctcagcctcccccagaccacatcccttggattacagctgtacttccaacagttattatatgtgtgatggctttctgtctaattctatggaaatggaagaagaagaagcagcctcgcaactcttataaatgtggaaccaacacaatggagagggaagagagtgaacagaccaaaaaaagagaaaaaattaatgtacctgaaagatctgatgaagccccaatgtgtttttaaaagtttgaagacaccttcatgcgacaaa

SEQ ID NO: 17479 - DNA, 745 bp, Macaca Fascicularis
  misc_feature (1)...(745): n = A,T,C or G
tcaggccatcgccaaggcccttgctgnncctagccggttcgnnnnnnngccccagagagagggtggaggtnnnnnnnnnnnnnnnnnnnnnnnnnnnnnnnnnnnnnnnnnnnnnnnngacagtgaggagagggcctcctacatcctcatggagaagatcgaacctgagccttttgnnnnnnnnnnnnnnnnnnnnggcagccctgcccannnnnnnnnnnnnnnnnnngagctgggcatctttggggtctannnnnnnnnnnnnnnnnnnnnnnnnnnnnnnnnnnnnnnnnnncacctacttcgaaccaaagccatcgagcatgcagatggtggtgtggcagcaggagtggcagtcctggacaacccataccccgtgtgagggcacaaccaggccatgggaccttctatcctctatatttgtcattcctttcctagccctcctgaggggtatcctcctaaagacctccaaagtctttatggaagggtaaatactgataccttcccccagctctccatctgaggaccagaaaagctgtgtttcccttagatgagatctagaggcccccaaatcctgggggtgtgggtacagctgaggggaagctgctctgaggtaaaggtccatgaaccnnnnnnnnnnnnnnnnnnnnnnnnnnnnnnnnnnnnnnnnnnnnnnngtgcctgacttgggctaggactgagtggtaggaggatggggagtggaggggcnnnnnnttcccctaat

SEQ ID NO: 17480 - DNA, 631 bp, Macaca Fascicularis
  misc_feature (1)...(631): n = A,T,C or G
taaagtgctttggacgtgaacagacccgcaaagcaagagcaaaggcctcagacgcacagagccgccctgacatccctcagttcggagtccccgtgccccttgtcagagccctaaacctgtctccctgcctgcactgtctccggcagacaaagggnnnnnnnnnnnnnnntgccccccaagtatgcaggacacgaaccaggaggacccagtgaaaatgtcccctttcaccatgattggcagtccccctcccgcggccccgccagccgtcctcgcagggcacatggcatctggcatctccagcagcatcacacacagctgtccctgccnnnnnnnnnnnnnnnnnnnnnnnnnnncaggcttgggcttgggcctgggcttgggcttgggccatgggcagcaggagggctggagaggcgtgcggggaactccccttcctccgggatcggacgtcagaatcgaaagcgtnnnnnnnnnnnnnntggtgtggtctcnnnnnnncccgggcagcacagggcgggggccaaggaggaagaagaaaggtggcctctgctgcccctgcctggcaggcctcttcctnnnnnnnnnnnnnnnnnnnnnggagggaggtgttccaaaccagtgcccacccctc

SEQ ID NO: 17481 - DNA, 691 bp, Macaca Fascicularis
accaggtgcttcccagctgttatctgccagatcttcccatcttgtggcacgtggtgcccccaccgacatcccaaggggaccgatccccttgccaccactctgcatcacctgggaccacagatttgggcaggaagggctctgagaggaggccaaagccctcattttacagatgaggaagctgaagcccggggaggggaacaaccctcaaggccacccagctggacacgggagacttgagcccagccttctgactgcgttcagccctctctagaacacagcagcctctcccaagcactgagtcccccctcctctgtgtgtcccagcacccttggcctgagtaaatgtggaaaggggctccctcccagagatgggattcctctcttcaccctttattccagctgcctgccaccccagaccccacctcccaccctgacctccgacccctgggtggggaaggggctcacgtgggcccaggctgagtgtgagtgagcatgtcaagttgtctgacactgtgacattagtgcaccctactgacaacccctccccagcctcacccctttctcctctccctgttttgtacataaattgacatgagctgcaacatgtgtgcgtgtgtgtgcgtgtgtgtgtgtatgtgtgtgatctgtgtcatggttttgttacctttttgtttttgtaaacttgaatgtca

SEQ ID NO: 17482 - DNA, 1281 bp, Macaca Fascicularis
  misc_feature (1)...(1281): n = A,T,C or G
tgagcgagtcttgggtttgtaaannnnnnnnnnnnnnnnnnnnnnnnnnnnnnnnnnnnnnnnnnnnnnnnnnnnnnnnnnnnncaaattaaaggatggatattacatgagaccttgtgtattaactaattgcagagatgacatgacctgtgtgaaagaagagatctttgggcctgttatgtccattttatcatttgacactgaagctgaggttctagaaagagccaatgataccactttggactagcagctnnnnnnnnnacnaggnnnnnnnnnnnnnnnnnnnnnnnnnnnnnnnnnnnnnnnnnnnnnnnnnncttcattaacaactataatgtcagcccagtggagttgccctttggtggatataagaagtcaggatttggcagagagaacggccgtgtgacaattgaatattattcacaactgaagactgtgtgtgtggagatgggtgatgtggaatctgctttttgaaaacctgcagtgaaacctactgacatggccaggctgtggaatgatgcgaattggccctgtttacagaggcagtacaacggaatgttatttttaaattcagaattttggcattcaggataagagaatggttcatgttactctttctctctccatcagcttcgtcactgaaaatgtgcattaagtgccttgtagatactaatcaagaaagttggcattctcctcaaagtatatttttgtgaaatcttttaagagccagtaacatacttctagagagcaggaaacgggactgggataatacatcttccacacatttggcccactgacaatgttaattctctggcgtatttcaaagaacttgttcctggctgatccaagtgcagtggtatttacaactaattgatcacaaccagtttctagatttctttgttccttatccattcccactgcttcacttgactagtcttgaaaaaaaaaaaaaaaacaaaaaacaacaacaacaaaaaaaaaacaccttgttcctttgtaggttcctggtagaatcaatagagatgatttcagctcattgactttcttttaagctgtatccccttgtcatttcattgagaaagctgataaccgggatagggaggggattagataatagacggggtcaaattctgtgtgaatgttaacttgcctagtaagcactttgtctctgttcactactgcaatagaggaaacctatctccctatcttgggtccttgaactacagcctgctgtcttacaccagcagagctaccctttaaatgtacaaattatttgtacgc

SEQ ID NO: 17483 - DNA, 723 bp, Macaca Fascicularis
  misc_feature (1)...(723): n = A,T,C or G
tcagagagtgactcagacatctcctctacaagtacctaacccatcttggatgcaccaccattcatacctcatgcagccttcaggttcagttctgacaccagggatggaccatcccatttctctccagcctgcctccatgatgggaccccttacccagcaactgggccacctctccctcagcagcacaggcacgtatgtgcagnnnnnnnnnnnnnnnnnnnnnnnnnnnnnnnnnnnnnncacccctgtgccttcttccagtgnnnnnnnngaggagagcagcggccaacagaaccaagcggcagtggacgcaccctcagagcatggggtctattctttccagnnnnnnnnnnnnnnnnnnnagattcccctccccatctttactgaatagaaatgaattcttggagatactcttgctcccagattccagagggttaaccaggaatggagaccatccgtcggccctgctaaggactaacacttagccatcgtttttcacaggcctgggcctggaaaaagaaagctctatgtnnnnnnnnnnnnnnnnnnnnnnnnnnnnnnnnnnnnnnnnnnnnnnnnnnncttttcttgtgtgctacattcaaggagatcaaaaaaacttttttttcttttgcaaagaaagctttttgtttttaactgcaacgtacttttcccctaccctaaagagacatggtggttnnnnnnnnnnntcgatatgaaaaa

SEQ ID NO: 17484 - DNA, 716 bp, Macaca Fascicularis
  misc_feature (1)...(716): n = A,T,C or G
gnnnnnnnnnnnnnnnnnnnnnnnnnnnnnnnnnnnnnnnncagcatcaccggcagatgggcannnnnnnnnncatcacctcggcctggaggagcccaagaagctgcgaccgccccctgcgaggactccctgccagcaggaactggaccaggtcctggagcggatctccaccatgcgccttccggatgagcggggtcctctggagcacctctactccctgcacatccccaactgtgacaagcatggcctgtacaacctcaaacagtgcaagatgtctnnnnnnnnnnnnnngggggagtgctggtnnnnnaaccccaacacgggaaagtagatccagggagcccccaccatccggggggaccctgagtgtcatctcttctacaatgagcagcaggaggcccgcggggtgcacacccagcggatgcagtagatcgctgccagccggtgcctggcgcccccgcccccacccctctccaaacaccggcagaaaacggagagtgcttgggtggtgggtgctggaggattttccagttctgacacacgtatttatatttggaaagagaccagcaccgagctcggcacctccccggcctctctcttcccnnnnnnnnnnnnnnnnnnnnnnccttcttgctttccccgggggaggaagggggttgtggtgggggagctggggtacaggtttggggagggggaagagaaatttttatttttga

SEQ ID NO: 17485 - DNA, 748 bp, Macaca Fascicularis
  misc_feature (1)...(748): n = A,T,C or G
cttggtagtacaggaaaaggtgttgttcatgatgatatggaatgttcacattacatgaaaaattttgatgttggacatgtgccaataaggcttccaagaacaaaacacttattaaatgtcatcaatnnnnnnnnnnnnnnnnnnnnnttctgccgcagatggctggatcgcttgggagaaagtaaatacttgatggctctgaagaatctgtgtgacttgggcattgtagatccatatccaccattatgtgacattaaaggatcatnnnnnnnnnnnnnnnnnnnnnnnnnnnnnnnnnnnnnnnnnnnnnnnnnnnnnnnnnnnnnnnnnnnnnactattaaacttagtccaaagccacctcaacacctttattttctaagctttgttggaaaacattataccagaattaatttgcaacatgttgtctgttttaacagtggacccatgtaatacttttatccatgtttaaaaaagaaggaattggatcaaaggcaaaccatctaatgtaattaaccaacgaaaaagctttcaggacttttaaatgctaactgtttttccccttcctgtctaggacaatgctataaagctcaaattagttaggaatgacttnnnnnnnnnnnnnnnnnnnnntaagagatactttttggatatttatattgccatattcttacttgaatgctttgaatgactacatccagttctgcacctnnnnnnnnnnnnnnnnntttttaaccttcctggaatcca

SEQ ID NO: 17486 - DNA, 562 bp, Macaca Fascicularis
  misc_feature (1)...(562): n = A,T,C or G
ttataatattgatcttcaactttgccattcatgcttctatgcacattaggctaggtattccacattgaaagcatgagagtgtctaggcctttgaatggcatatgccatttctgggaaatttatctggaggctaagtattgcttnnnnnnnnnnnnnnnnnnnnnnnnnnttaaaaagaagaaatgcatattgaagtagtttcatgatttgtttggcatataggaagcacgctggtgctaagtattttttaaatggttannnnnnnnnnnnnnnnnnnnnnnnnnnnnnnnnnnnnnnnnnnnnaagattgtggaatgggtgtaagacaattggtaggaggtgaaagtgggtttgattaaatggatcttttatggccctatgatctatcctttacttgaaagcttttgaaaagtggaaagatcattttgttgcatttccccatttcttgtttttaaaagaccaacaaatttcaagcccaataaatggcttgtannnnnnnnnnnnnnnnnnnnnnnnnattgttaaacatgaaaaaaaaaaaaaaaaaatggtacactttggg

SEQ ID NO: 17487 - DNA, 764 bp, Macaca Fascicularis
  misc_feature (1)...(764): n = A,T,C or G
tgcaggctcagcaggtcaannnnnnnnnnnnnnnnnnnnnnnngccccggcccacgctgaccctctcgcaggcccctcagcctggccctcgcacccctggcnnnnnnnnnnnnnnnnnnnnnatcgcacttcctgtccagacactggtgtctgcgcgagcagctgccccaccacagccttcccctcctccaaccaagtttattgtaatgtcgtcgtcctccagcgccccnnnnnnnnnnnnnnnnnnnnnnnnnngcaccttgggcccnnnnnnnnnnnnnnnnnnnncctcgcccgtcaccaccaccgtccccagtgtgcagcccatagtcaagctggtctccaccgccaccaccgcaccccccagcngtgctccctctggtcccgggagtgtccagaagtatattgtggtctcacttcccccaacaggggagggcaaaggaggccccgtttcccatccttctccagttcctccaccggcatcatccccctctccactcagcagcagtgccctctgcggggggaagcaggaagctggggacagtccccctnnnnnnnnnnnnnnnnnnnnnnnnnnnnnnnnnnnnnnnnnnnnnnnnnnnnnnnnnnnnnnnnnnnnnnnnnnnnnnnnnnnnnnnnnnnnnnnnnnnnnnnnnnnnnnnnnnntacacacgtgcatgcatactaagcggaaggaagttgtagattgcttcctttcatgtcactttctttttagatattgtnnnnnnngtcctcagaaaaaa

SEQ ID NO: 17488 - DNA, 756 bp, Macaca Fascicularis
  misc_feature (1)...(756): n = A,T,C or G
aacgagcatagagcgcnngnttagacagaggcaggagtttcgttagaaggcggacgctgttctaagaaaggtctcctgcaggtctctctaggctgtgatgatgaatattatgaaatgtgccttttttgaagagattgtgttagctccaaagcttttccnnntgcagagtgtttcagttctttattttcccttgtggatatgctgtgtgaacagttgtgtgagtgtggtatgcctgatcacagatggattttgttataagcatcaatgtgacacttgcaggacactacaacgtgggacattgtttgtttcttccatatttggaagataaatttatgtgtagacttttttgtaagatatggttaataattaaaatttattgaaatggtcttgcaannnnnnnnnnnnnnnnnnnnnnnnnncattgctgctacaaatatttctatttttagaaagggtttttatggaccaatgccccagttgtcagtcagagccgttggtgtttttcattgtttaaaatgtcacctgtaaaatgggcattatttatggttttgtttttttttttnnnnnnnnnnnnnnnnnnnnnnnnnnnnnnaaagaaagtctgtacattgggttataacactagtatatttaaacttacaggcttatttgtaatgtaaaccaccattttaatgtactgtaattaacatggttataatatgtacaatccttccctcctcccatcacacaactttttttgtgtgtgataaacttctt

SEQ ID NO: 17489 - DNA, 772 bp, Macaca Fascicularis
  misc_feature (1)...(772): n = A,T,C or G
cccagaaaagggtatacagcttgatggagaacaactcttatccccgtnnnnnnnngtcagaattctaccaggacttgtgtaaaaagcctcaaatcaccacagagcnnnnnnnnnnntgaaatgtaaaagggagcccagaaatggaggacatttcattctttttcctaaggggaaagactgacctgccataaagactgaccttgaattcagcctnnnnnnnnnnnnnnnatcgctcagaactattgattcaaagctgggtagtgaatcaggaagccagtaactgactaggagaagctggtatcnnnnnnnnnnnnnnnnnnnnnnnnnnnnnnnnnnnnnnnnntaggtggtctgaacgtggtgtctcactctgaaaagcaggaatgtaagacgatgaaagagacaatgtaatactgttggtccaaaagcatttaaaatcaatagatctgggattatgtggccttaggtagctgactgtacatctttccctaaatcgatccatgttaccacatagtagttttagtttaggactcaataacagtaaagtgtttactatgtgcaagggtattggagttcttatgaccacagatcatcgnnnnnnnngtctcatgtagtgctgaaactgaaatggtccatgtttgcattgttaaaaatgacatgtgaaatagaatgagtactatggtgttgaaaactgcagtctccgttatgagtgccaaaaatctgtcttgaaggcagctacactttgaagtggtctttgaatactttaataaat

SEQ ID NO: 17490 - DNA, 739 bp, Macaca Fascicularis
  misc_feature (1)...(739): n = A,T,C or G
ttgttggnncnntgnnngggccaggcccagcnnnnncgtggaccggaatcgattatctagtgagagcagctgtaagagctggctgagctccatgactannnnnnnnnnnnnnnnnnnnnnnacgtgtgtgtctgaggactccagcaggggtgccttcagtcggcagacgagcacagatgatgagtgctttatccccaaggagggggatgattttctgaggaggtcatcttcaaggaggaaccggagcatcagtaacaccagcagcggatccatgtctcccttgtgggagggcaacttctcaagcgcgtttgggaccctgccccggaagagcagaaagggaagtgtccgaaagcannnnnnnnnnnnnnnnnnnnnncttcatcgtgctgtggaagaggaagaaagtcgcttnnnnnnnnnngtggtgtcctttcaaannnnnnnnnnnnnnnnnnnnnnnnnnnnnnnnnnnnntcccagcttggtgnnnnnnnnnnnnnnnnnnnnnnnnnnnnnnncccattnnnnnnnnnnnnnnnnnnnnnnnnnaattgttgtgtcatagtttttgcttcttacatcatttttcaacctgaacagctcaatnnnnnnnnnnnnngggaaactaaacaataagttaattaatataacaaacatgnnnnnnnnngctcattccagtactgtctttgaaagcaaaactaatatttattttctagattatccctgtgaataattgata

SEQ ID NO: 17491 - DNA, 579 bp, Macaca Fascicularis
  misc_feature (1)...(579): n = A,T,C or G
ggaaggaggaggtggtgacaannnnnnnnnnnnnnnnnnnnnnnntcaaagcctcctgcctnnnnnnnnnnnnnnnnnnnnnnnaggacggagacctcaccctgtaccagtccaataccttcctgcgtcnnnnnnnnnnnnnnnnnnnnnnntatgggaaggaccagcgggaggcagccctggtggacatggtgaatgacggcgtggaggacctccgctgcaaatacctctccctcatctacaccaactacgaggcaggcaaggatgactatgtgaaggnnnnnnnnnnnnnnnnnnnnncttttgagaccctgctgtcccagaaccagggaggcaagaccttcattgtgggagaccnnnnnnncttnnnnnnnnnnnnnnnnnnnnnnnnnnnnnnnnnnnnnnnnnnnnnnnnnnnnnnnnnnnnnnnnnnnnnnnncctgctctcggcatatgtggcgcgcctcagtgcccggcccaagctcaaggctttcctggcctcccctgagcacgtgaacctccccatcaatggcaacgggaaacagtgagggttggggggactctgagcgggaggcaggg

SEQ ID NO: 17492 - DNA, 722 bp, Macaca Fascicularis
  misc_feature (1)...(722): n = A,T,C or G
gcatnctgtnntgagggcccagggcccgggcacccacgagcccgnnnnnnnnnnnnnnnnnactccccagtactgcccaccgcccggcagcccaccccgcaaggggcagggaggtgggggcctcctcagcctctgcaactgcgagaaaggggacccaggaaaccaaagtctgccgcccacctcgctcccctctggaatcttccccgagggccaaacccacttctggcctccagcctttgctccctccctgctgccttttggcnnnnnnnnnnnnnnnnnnntgggcaagcagagagcacagactgcannnnnnnnnnnnnnntcttatttttctagcaaacatatttctccagacccagaggccctgaagcctccatggaacattccggatctgaccctcccactctcatctccttccctctagaaccccccaggccctaccatgctcatgtccctgtcctcaggcccagcccttcttcaggggagatgaggtctttctcctcaggacaaggcctcgctcactcactccaaggccaccggggtcccaggaagctggtgcctgggtggccatcctacccggcgtggcccaggccaggaagagccacctggcagggctcacactcctgggctctgaacacgcatgccagctcctctctgaagcgattctcccattggaacggcaaaaaaaatttttttttctctttttggtggtggttaaaagt

SEQ ID NO: 17493 - DNA, 756 bp, Macaca Fascicularis
  misc_feature (1)...(756): n = A,T,C or G
tcacatgcctgtagtnnnngcaaaccatgccaggttcatctaaagacataggagagattaaggactctcttggacagaccatgaattgaatttgctgccaggtactgccacactgaatttggttgacagaactcccagcccaggaaagnnnnnnnnnnnnnnntgtcgtagaaggaaatttcccactaaagtcagtccattttcaagttttgggcttcagaggcaaaaggacgtcccagccacctgattttgatggtgaggtaactctaagtttaattcagactggtgttgcagtgtagctctggcatggtcatgaacgagcacccagaatgtgttgaaccaacccccacccctaactactgactatgactgcagtaggtttttatggggaaaaaaaatgtgtgaaaagcaaaaagaaaggaatagagatnnnnnnnnnnnnnnnnnnnnnnnnnnnnnnnnnntgtgaattgagtataaacatatgcaaagtaacaagagattcctaagaaagacaaatccttgagtttcactcacttcatgttcaacatttgctgtaatccannaggcagcctgtgaatcattctcatgccctgtgtggttttttttttttccctataatgttccaggtttaaaagccattttttttccacgttttctgtaaataatggataatcatttttaaaaattttatttttagtgctgttttagcaatgtggatagatcataaatgtacttgctgaattcaatcatttt

SEQ ID NO: 17494 - DNA, 1097 bp, Macaca Fascicularis
  misc_feature (1)...(1097): n = A,T,C or G
agggattccctgtccccaccaggaatttttaaaccaaaacaccccaacttggcagctttttctgtggaggacagacggccggccagacctctgagcacatagtgtcctgcccaccctaccagctcctccagccctgccaggcacatgcccggaggacgcctgccctgcccaggcggcctcctggtccgccctcacctctgatagacnnnnnnnnnnnnnnnnnnnctactttgagannnnnnnnnnnnnnnnnnnnnnnnnatgaaccctcctcctttttaagggttttttttttttttcctttttctaaaaagctatgtatcgctcctattgaaagaccagattcttaaagaagtttgtggcataaaaagaaagtggggacagattcgcagcacagagtccctggcatgtttcactcctgctnnnnncagccagctgnnnannnnngcggtgccagcctcatggagggccgtgtgacactcttgtggtatgtatgggagatggcagcagtgaagcagcagccaccagagagtggccatttaagggttgggacagggagggtgttttgggtggcatagaggttttgtattgagggccagtgatgatgttttgatatttatttcctgctacttaaatttgaatctgagtgaattgtacctatttctgatgatgtcggtnnnnnnnnnnnnnagattcataaagtaatgatgaaatctttctttcttcccgtgtgtatttctaagaaatagagccaactgattttgtatgtaaataccaagagcaatttacctgnnnnnnnnnnnnnnnnccagtgcggacccttcccagccctcaccccacttcctttcctactgtcctggaacctgtctccatnnnnnnnnnnnnnnnnnnnnnnnnnngtggtcaacagatcccagtgaagggttttgtgtgtttaggccnnnnnnnnnnnnnnnnnnnnnnnnnnnnnnnnnnnnnnnnnnnnnnnctagtgtatactctgtagtctctgttcgtgttgatcnncattccatggaaataaaaagtatgttgtnnnntactgccgaagaattgtcttgcaagttaaggcttccccc

SEQ ID NO: 17495 - DNA, 474 bp, Macaca Fascicularis
  misc_feature (1)...(474): n = A,T,C or G
aataaagtgaaaataatcccattttaagctgcaagaggaaagactcacagacggaaagtccttcacagacagagacccaggatcctgaaatgcagcacatcccttacatgttttgagagtaaaactttaaacatacaagccctgggaggaaaagcaattcctaaaacatggcagaaacaatgtaaaaaaaaatcttgctgttgttttaaaaattgacctaagactgggcatgnnnnnnnnnnnnnnnnnnnnnnnnnnnnnnnnnnnnnnnnnnnnnnnnnnnnnnnnnnnnnnnnnnnnnnnnnnnnnnnnnnnnnnnnnnnnnnnnnnnnnnnnnnnnnnnnnnnnnnnnnnnnnnnnnnnnnnnnnnnnnnnnnnnnnnnnnnnnnnnnnnnnnnnnnnnnnnnnnnnnnnnnnnnnnnnnnnacccanggaggttgaggctgcagtgagttgagattgtaccactgcact

SEQ ID NO: 17496 - DNA, 658 bp, Macaca Fascicularis
  misc_feature (1)...(658): n = A,T,C or G
cagggagtcatttttcccannntcctcgatgtctgtctcgtccctttcccttgccccccgttggcctgttgtttttcatttcagcctggcttgggcctcagtctcctcatctttagtgtgcggtggatgnnnnnnnnnnnnnnnncagcctgatgctcgctccccggcactggttctcctctctcttgcaggatgattgccgccgtggacacagactccccccgagaggtnnnnnnnnnnnnnnnnnnnnnnatgttttctgacggcaacttcaactggggccgtgttgtcgccctttnnnnnnnnnnnnnnnnnnnnnnnctcaaggccctgtgtaccaaggtgcccgaactgatcagaacnnnnnnnnnnnnnnnnnnnnnnttcctccgggagcggctgttgggctggatccnnnnnnnnnnnnnnngggacggccttctctcttactttgggacgcccacgtggcagaccgtgaccatcttggtggctggagtactcaccgcctccctcaccatctggaagaagatgggctgaggcccccagctgccttgaactgtgtttctcctccataaattatggcatttttctgggaggggtggggattgggggacatgggcatttttcttacttttgtaattattgggggggtggggaa

SEQ ID NO: 17497 - DNA, 692 bp, Macaca Fascicularis
  misc_feature (1)...(692): n = A,T,C or G
gcttcctgagtagctgnnnnnnnnnnnnnnnnnnnnnnnnnnnnnnnnnnnnnnnnnnnnnnnnnnnnnnnnnnnnnnnnnnnnnnnnnnnnnnnnnnnnnnnnnnnnnnnnnnnnnnnnnnnnnnnnnnnnnnnnnnnnnnnnnnnnnnnnnnnnnnnnnnnnnnnnnnncacgcccagccactacgcactttaaaaccaaaaaaagctcaaagtgatggatcattgtccatggcaggagccccaccttggggtaagcctaatgtagatggattaatttagaaagtggtgtatttatcagggcaaaggaaattcttccagaggtgatgatgcggcatatattcccagtgctctcccacagcaagctggccctcttgtcatcatttcagtgggcggcagcagctgcccctccttccacaagcactcaaacctgtttgtaaatactgaaggaattgatggggttgaggaaaagaggttcatgtgaccagggtcccaaggccacagcttttcagatcctaggaagcaagtggcatttgcttgagttgtggcctcggaaggatcatgtttatctgttttnnnnnnnnnnnnnnnnnnggattctccctgtcattgagaagaaagcattatctaattaccttcaggtggtttacttattctgtaaagaatatgtgtaaatattttgtacagagccc

SEQ ID NO: 17498 - DNA, 679 bp, Macaca Fascicularis
  misc_feature (1)...(679): n = A,T,C or G
ggnnnnnnnnngattgaacgtgaaatatgtagtgccattgggaccatgaagggaattcttgcacatgctcgtgctggtgtgggcgtgggactggttggaaacgtctgtattcagggagccagggtgagggcagagtgtggtggcagctgaacttggagtaatgcccgtatagaaaaaggaccgtgttcttatccagccaatnnnnnnnnnnnnnnnnnnnnnnnnnnnnngcatctgaatgtttgatgtggtttcgtgtgtgtgtatgtgtgtgtttaatattgaagtggatcatgagatgtaaagaaaacaataatgacaatgagttatattcaaacctgtatttgtttctttatcagtgtaatctgctgaggacctttgtgtttaagattcagaaannnnnnnnnnnnnnnnnnnnnnnnnnnnnnnnnnnnnnnnnnngttgttgatggtggtgaaacaccgtagggcatgtggttcaaagagaagcaggaggccaagnnnnnnnnnnnnnnnnnnnnnnntgtagcttatgacttatttaatgaataagcccagccaagctcagagtaggcgccnnnnnnnnnnnnnnnnnnnnnnnnnttttgtctttttttttttttaaaagccctgacatcccgcaagaggacagtgaattattcctacgtcggctcttata

SEQ ID NO: 17499 - DNA, 665 bp, Macaca Fascicularis
  misc_feature (1)...(665): n = A,T,C or G
gaannnnnnnnntccagctaaactgattgtttgtggaatgacatcaaatggttttaccattgcagacccagatgatagaggcatgttggatatgtgtggctttgatactggagctctggatgtaattcgaaatttcacattagatatgatttaaccgtaannnnnnnnnnnnnnnagagatccattgccatcagtgatctcactaaaaatatacagctacttcccagctaatccccacccaatgaatgatgatggtatagtatgtgtataatggaaagttaccttactgaaaagaaaaaaaaaaaaaaagaaggaaaaataagatgggcccaaaggtctgtctactaaactagctcttggggaaatagcttcaggatactgtagtttcctctatctgatagagaactttttgttaatagatactgtaaaatagttttgctttgttgaataatacatgtgtacttaaaagaggtaagagcaaacagtgtaattccacatcatgtcacttgagaagtgcttaacattttcttaaacatttccattgggaaaggacagctttgataatgtccaaatactctgaaatgcactagaccatgtaannnnnnnnnnnnnnnnnnnnnntctgtaaacttttatancaagggggaaaaaaaaaaaaaagacat

SEQ ID NO: 17500 - DNA, 708 bp, Macaca Fascicularis
  misc_feature (1)...(708): n = A,T,C or G
aacatcaagacnntggagcaccgannnnnnnnnnnnaacatctgggatgtgggtggccagaagtccctgcggtcctactggcggaactactttgagagcaccgacggcctcatctgggtagtggacagcgcggaccaccagcgcatgcaggactgccagcgggagctccagagcctgctggtggaggagcgcctggccggagccaccctcctcatctttgccaacaagcaggacctgcctggagcactnnnnnnnnnnnnnnnccgcgaggcccnnnnnnnnnnnnnnnnnnnnnnncaccactggtgcatccagggctgcagcgccgtcaccggggagnnnnnnnnnnnnnnnnnnnnnnnnnnncctggatgacatnccagccgcatcttcacagctgactgagccactccagatgtccctccaccnnnnagtacaggtcccccaaccctcaaccaaacaatatccaagggggcatgggaagtcaaccagacaaaataacaataaacatgctccaccccaacctgctgctgctactgctgcccgctgctgctctgtggccacccagctcctgtggcgggagggctgtgccctggctgtttccctggctcctggnnnnnnnnnnnnnnnnnnnnnnnnnnnnagaggactgggcggggaggagctgctactgcnnnnnnnnnnnnnnnnnnnnnnatcctcactcag

SEQ ID NO: 17501 - DNA, 122 bp, Macaca Fascicularis
gacccctgtgacatgagatagacggccagcctgtatatgccaggtggggtggtcattaggtacaaagttgtccagtcttaggtgctgaggccagtatgggtgcaaagggcccgcattggtag

SEQ ID NO: 17502 - DNA, 748 bp, Macaca Fascicularis
  misc_feature (1)...(748): n = A,T,C or G
aaaggnnnnnncgtggagcgggaccgcaagcgggagaagaggaagcccaagagccaggagaccccagccaccaagaaggctgtgcaaggcgggggagctgcccctgtggtgggggctgtccaggggcctgtcccgggcatgccgccnnnnnnnnnnnnnncccgcattatgcaccacatgccgggccagccgccctacatgccgccccnnnnnnnnnnnnnnnnnccaggccttgcacctggccagatcccaccaggggccatgcccccgcagcagcttatgccgggacagatgccgcctgcccagcctctttccgagaatccaccgaatcacatcttgnnnnnnnnnnnnnnnnnnnnnnngaccaatgagctcatgctgtccatgcttttcaatcaattccctggcttcaaggaggtccgcctggtccctgggcggcatgacatcgccttcgtggagtttgacaatgaggtacaggcaggggcagctcgtgnnnnnnnnnnnnnnnnnnnnnnnacgcagannnnnnnnnnnnnnnnnnnnnnnnnnnnnnngtagcaccttttccccccatgcctgccccttcccccgttctggggccacccctttcccccttggctcagccccccgaaggtaagtccccccttgggggccttcttggagccgtgtgtgagtgagtggtcgccacacagcattgtacccagagtctgtccccagnnnnnnnncttgcgctgtaggccggaataaa

SEQ ID NO: 17503 - DNA, 756 bp, Macaca Fascicularis
  misc_feature (1)...(756): n = A,T,C or G
agaaagaagcaagaatggtgtgtaaaagatcagccttcagatgcagcagtaagtagcaacgccactccttctcagtcttcatctatcaatgacatttcatccatgtccactgagcagacactggcctcagacacagacagcagtcttgatgcctcgacgggaccccttgaaggttgtcgatgataagttagaaatagcaaacctgtcatcattgaaggaactctcacctccatgggcctgaaatgcttgggagttgatggaaccaaatagaaaactccatgttctgcannnnnnnnnnnnnnngccttgcccctactcagatctaataggattgcctgcttagatgataaaatnnnnnnnnnnnnnnnnnnnnnnnnnnnnnnnnnnnnnnnnnnnnnnngattttgttcaagatcatttcaggtgagcagttagagtaggtgaggttgtttcaagctataatagtgacagtttctcatcatccgtaactgttgagaggtgtgtgcatgtgaccacagatgcttgctnnnnnnnnnnnnnnnnnnnnnntggaaatcagtatttaaatgccaaataatctcccaggtagtgctgcttctgaagttatctcttaatcttcttaagtaatttggtgtctgtccagaaaaggttgatttatgtgtattaattggccgtcatgatgttatcatatcttattcccttttgtgctatgatttattctatcttttgtatttcagaagacatattaataaatct

SEQ ID NO: 17504 - DNA, 670 bp, Macaca Fascicularis
tggtcttgaactcctggctgcaagcgatctgcatgccttggcctcccaaagtgctaggattacaggcctgagccacggcgcccagcctaggtgtgccattttatgaggaaactctttatttacctcagtctataatgttcttttatacaaaatgcctggcatacaataaaattataagacacatgatgaactggtaacagagcagactcaaagatgaaccagatgatgaaactaccagagactttaattaagataaccatggtaaatgtgtgaaaggacttagtggaaaaggtagacaatatgcatgcgcacatgagacacagagaagaaaagtctattaaaaaaaaaaaacaactaaatgaaaatgccaccaataaaaaatacaacataagaaataaataattcatttgttgggcttaacagcagttacaaagaatcagtgaacataaggacaactgaaattacccaaactgaaatacacagaggaaaaatcgtgcaaagaatttaaaaattcaactcattaaaatctaaggaatagtatcaaatggtctaaaaacgcatgttattagctttccagacggaggagagcagaaacgggacgaaactgaagaagagataatggctcaaaactttccaaaactaatgaaagatttaacccacagatcaaaaa

SEQ ID NO: 17505 - DNA, 753 bp, Macaca Fascicularis
  misc_feature (1)...(753): n = A,T,C or G
aatcgacacaccctagcggacaattttaaccctgtgnnngaggagcggggcaaagtccaagattgtttctannncnttgagatggatagcagcctggcctgttccccagagatctcccacctcagtgtgggttctatcttacttgtcacgtttgcgtcactggttgctgtttatgttattggggggttcctataccagcgactggtggtgggagccaaaggaatggagcagtttcctcacttagccttctggcaggatcttggaaatctggtagcagatggctgtgactttgtctgccgttctaaacctcgaaatgtgcctgcagcatatcgtggtgtgggggatgaccagctgggggaggagtcagaagaaagggatgaccatttattaccaatgtagattgcactttatatgtccagcctcttcctcagtcccccaaaccaaagctacacagccagatttctcaagcagtctcaactccagtctctcatctcacccttactattgctcttgctttccagtttgcttttgatttgcatcttctcactagtaaaactgccttccctttgttccttattttctgttttttctctagcgaggtacagttgtaagtcagacttaatattaatagggcctgtgaaaacaggcttttgcattgtctcttgacatcacaaggtacaacaggcatatgggcaaaatggtgtggcaggctcacctggccctttgttttttaaacacattttcacaagtttc

SEQ ID NO: 17506 - DNA, 820 bp, Macaca Fascicularis
  misc_feature (1)...(820): n = A,T,C or G
atgccagcccagagcccacaacgctgcccagtgtgcctcactcactgtctggggctctcctgggagcatggggcatcccctgttcctgtttcactctcagcttctcccctcgaagggactctctagccacctcctccaccgcagtccagctccctcagtctggcagccactgctacactcagcctcatgagccacttcagaccagacaggtgtcttccccggccctgccaggccctgctcacattccctccgctggtctatgctggtctcagaaggccaccgtgtctgcattccactcagccagggtccagctgcagccctgccactgtccttcccttccttgtcctgagtcatgctgttgccaccccgtgtgacttttgaagctgtaaaatgnnnnnnnnnnnnnnnggtggcgtcggggcagggccgccgaggctgggaggaagtgcttctgcctttcgctggtgtttctggaatttgctttccctcacctctcacttccctctagaaggagcttcctgactggaaccagagaatgcatgtctgtccacttttgggctgctgggtggggctggaaacaagggccgctgacccttcatgccggccgggacctgccactagccccccagcctgcttcttccccttaagcttcgtgcccctggatgcgctaacattcgctcttgtttgttccnnnnnnnnnnnnnnnnnnnnnagatggttatctaaagagaattccctatttatttgacaaaaaatccagttaatatattaatgtgaaataaaccctgtttgcaccttgatttgtttgctgaaaatgtga

SEQ ID NO: 17507 - DNA, 657 bp, Macaca Fascicularis
  misc_feature (1)...(657): n = A,T,C or G
gctgcagatggtgggggatgcagctgctggcatggagtacctggagagcaagtgctgcatccaccgggacctggctgctcggaactgtctggtgacagagaagaatgtcctgaagatcagtgactttgggatgtcccgagaggaagctgatggggtctacgcggcctcagggggcctcagacaagtccccgtgaagtggaccgcacctgaggcccttaactacggccgctactcctccgagagcgacgtgtggagctttggcatcttgctctgggagaccttcagcctgggggcctccccctatcccaaccttagcaatcagcagacacgggagttcgtggagaaggggggccgcctgccctgcccannnnnnnnnnnnnnnnnnnnnnnnnnnnnnnnnnagcagtgctgggcctatgagcctgggcagcggcccagcttcagcaccatctaccaggagctgcagagcatccgaaagcggcatcggtgaggctgggacccccttttcaagctggtgacctctgcaggcctaggtgcagctcctcagcggctccagctcacacactgacagctcttcacagtcgtggactcctgccaccagcatccacactgctggcaggatgcagctccgtgtcttctctgtgtccctgctgctgc

SEQ ID NO: 17508 - DNA, 1655 bp, Macaca Fascicularis
  misc_feature (1)...(1655): n = A,T,C or G
tccaaagtttatacnnnnnnnnnnnnnnnnnnnnnnnnnnnnnnnnnaactgaagcacaaaagccagactgactcacctgatggcagcagtaggctgggaatttcaaccccgaaagagttcagtgcaggagaaagctctacttctctcgatgctaatcacacaggggcagtcgttgagcctttgagaacttctgttccaaggctcccatcagagagtaagaaggaagactcctctgacgctacccaagtctcccaagcaagtctcaaagccagtgatctctctgactttcaatctgtttccaagctaaaccagggcaagccatgcacatgcataggcaaggaatgccagtgtaagagatggcatgatatgnnngtgtatccttttcaggcctgcagagtgtccctcctttggctccagaacgaagatccacacttgaggactactctcagtcgctgcatgccagaactctgtctggctctccccgatcctgttctgagcaagctcgagtctttgtggatgatgtgaccatagaggacctatcaggctacatggagtattacttgtatattcccaagaaaatgtcccacatggcagaaatgatgtacacctgatagcaagaagctaattcatatgctttaaaccaatgaaggcttgtcaaagagattgagttaatggcagactttgtggccactttgtgtgggaagacatctctctttgctcactgtgcttgcaataaaaactttacttggcatctcagtcaatcttcattctttaaacttactctctgagctcttccgtacacttcaaggcaagcagatcaaagaaaaatttcgaaatgttcctgggggatgaagaaactataattacttgagactggcagcagtgggtaaaagcctttgtaaaacagtgcatttttcagatttgtttaaggtttggtagccaaggaaagtaaaatgtgattttgtaactgcactaaacatttgtcatgctgtagttgccagcccagaatattagaagttacaagactgatttaaaccatctctgatttaatgcaagatttattgtgtctataaagatttctcatgttattgttaagccagagatctaaggtttagattcaattttgaataaactagctggcctgccctctattgtttgagagagttattaaccatcactaaagaagcccctgctggtgctattcatcctgagacatgttacatgcagttactcaagcagcttggaatgggctgcttcagttggagggaggaggtgtaatatttgaaactagtgtgtgtnnnnnnnnnnnnnnnnnntttaagtatatggtgtgtttttttgttattagttgtaatacaggtctcatacctcagtttcagatgttctagatggttacctctttgagctgccctgtcaccccagcaaccccaaaagagaattttgtacattctgtatcccacagatttggtcaaccatttcaaaattccctccagtttggtaaaaaaaatctgtcttcggtttcagctggatgatgaatccttgtttttcaggtggctccaaaaagaatgttccatgtgttcagaccatcctaagcagagccaccaaatttagtgacagtgtctagtcatgttagcaataatgttaacagaagctt

SEQ ID NO: 17509 - DNA, 1549 bp, Macaca Fascicularis
  misc_feature (1)...(1549): n = A,T,C or G
ctctcgaggtctcaccccagtcnnngggccgtatactcggccctctgagagtgagctgtgggacatgtgggcagggnnnnnnnnnnnnnnnnnnnnnnnnnnnnnnnnnnnnnnnnnnnnnnnnnnnnnnnnnnnnnnnaagttcagaaggcgctgggtgggagctcttgcctctgtaactatccccattcattttatctatgggccattggatcctgtaaatccctatccagagtttttggagctgtacaggaaaacgctgccgcggtccacagtgtcnnnnnnnnnnnnnnnnnnnnnncactatccacagctagaggatcccatgggcttcttgaatgcatatatgggcttcatcaactccttctgagctggaaagagtagcttccctgtattacctcccctactcccttatctgttgtgtattccacttaggaagaaatgcccaagagnnnnnnnnnnnnnnnnnnnnnnnnnnnnnnnnnnnnnnnctactcaaattggtgaacagtgtataggaagaagccagcaggagctctgactaaagttgacataatagtccacctccnnnnnnnnnnnnnnnnnnnnnnnnnnnnnnnnnnnnnnnnnnnnnnnnnnnnnnnnnnnnnnnnnnnnnnnnnnnnnnnctgatgcagaaagacgttctttggcataaaatactttttaacactttggatttctctgaaatatttagaagtgctcatttctggcccagccccaacaggaattctatagtaaggaggaggcgaaggggcctccttccctctccttgaatgacgtatgggcacatgcctttaaaagttctttaagcaacacagagctgagtcctctttgccatacctttggatttagtttcatcatctatttttagttataaacgttttgttaaaatagatattggtttaaataatatagtattctaggtatttgatttaagactatgatttacctatatattacatatattttataaagacactaaaccagcatacccttactctgccagaatagtgaagctaattaaacatgtttgatttctgaataaattgaactaaatccaaactactacctaaaatcacaggacattaaggaccaatagcatctgtgccagatatttactgttattagctgggaagaccaattcgaacagcaaataacagtctgagactcctcatacctcagtacttagaagcatgtttctcttgagctactgtagaggggaagggattgttgtgtagtccaagnnnnnnnnnnnnnnnnnnnnnnnnnnnnnnnnnnnnnnnnnnnnnnnnnnnnntgcctgtcccagagaggctttccaatgtagctcagtcattcctatactttacagacaggaaagttccagaaactttaagaacaaactctgaaagacctatgagcaaatggtgctgaacacttttttttttaagccacatttcattgtcttagtcaaagcaggattaagtgattatttaaaattcattttttaaaattagcaacttcaagtataacaacttgaaactggaat

SEQ ID NO: 17510 - DNA, 490 bp, Macaca Fascicularis
  misc_feature (1)...(490): n = A,T,C or G
gggactgtggacgcgctgggtgtgctgactggggcgcagcttttctcgctgcagaaggaggagctgcgggcggtgagccccgaggagggggcgcgtgtgtacagccaggtcaccgtgcagcgcgccctgctggaggacaaannnnnnnnnnnnnnnntggaggcagtgatggagaagcaaaagaagaaggtggaaggcgggatggaaatggaggtcatttgacctgcccggcgcccttcgcaaagagtgaccaggccccgtgtgagaacggactcttcagactcctcaatagcagaagtcggtcttctgaaggatggccaatctgctccggccccggtcttcccccatccccgtggacagactgaataatccnnnnnnnnnnnncnnnnnnnnnnnnnnngactggctgtgagtggggagggcgtggagacagtctacggaaagcgctagcagacccccaagagggtgcagtagagccctgagcattgta

SEQ ID NO: 17511 - DNA, 776 bp, Macaca Fascicularis
  misc_feature (1)...(776): n = A,T,C or G
cagcaacctacaggtatccaatgannnggggaatcgctacnnnntnnagcttatcaatgcactggtgctctatgtcgggactcaggccattgcacacatccacaacaagggcagcacgnnntcaatgagcaccatcactcactcagcacacatggatatcttccagaatttggctgtggacttggacactgagggtcgctatctctttttgaatgcaattgccaatcagctccggtacccaaatagccacactcactacttcagttgcaccatgctgnnnnnnnnnnnnnnnnnnnnnnnnnnnnnnntccaagaacagatcacaagagttctcttggaacggttgattgtaaataggccacatccttggggtcttcttattaccttcattgnnnnnnnnnnnnnnnnnnnnnttaagttctggaaccatgaatttgtacactgtgccccagaaatcgaaaagttattccagtcggtcgcacagtgctgcatgggacagaagcaggcccagcaagtaatggaagggacaggtnnnnnnnnnnnnnnnnngcatctccgttgtacgtgtgtcagcctagaggtctcactgcaccgagttcacaaactgaagaatcctttcagctcttcctgactttcccagccctttggtttgcgggtatctgccccaactactgttgggatcagcctcctgtcttatgtgggcacgttccaaagtttaaatgcatttttttgactcttggccaaaatnnnnnnnnnnnnnnnnnnnnnnnnnnnac

SEQ ID NO: 17512 - DNA, 729 bp, Macaca Fascicularis
  misc_feature (1)...(729): n = A,T,C or G
cttttcagagttantnntcatgnnnnnnnnnnnnnnnnnnnnnnnctaatccttcataaagaatcagctagagttgtcatgataaagtcagcacacacaaaaaggctccttacacatacctgtcttaaaccatgtgtagagctttttaaaacaaaacaaaacaaacccccatacacttttgaccatcttaaatcaagaaaattgcatatttccattctggtctttctgggccagatttttgtattggttttcagtaaatgtctatctataatatttcattatagagtccagtagcttagtactgacactgacttgatacagcatgaagtttctagtgccacacacagtatttagaaaacctttaagcgtgaatgacttatgtgggatatatataaacataatgtttattttatctcacaaatgcatgtgaaatgtataattacatcctaggaatccaaaatggtctgcagagagtgagcggaggcacnnnnnnnnnnnnnnnnntttacactggtgagattctacctgatgaatattaaagatattctactttctgagaactctttatcaccagatggcagttgggatatgggaggaactaaagcatcctgttttgtatctgtccagatcattatttctgtcgcttgttttttcttcccggttcaggatacttttttaagggattgagaattgaagattttccaaaagctttcatgaatttagagcatc

SEQ ID NO: 17513 - DNA, 782 bp, Macaca Fascicularis
  misc_feature (1)...(782): n = A,T,C or G
actatatagacattttgtttcaaatgaaactttaaaagactgaaaaattttgtaaataggtttgattcttgttagagggtttttgttctggaagccatatttgatagtatactttgtcttcactggtcttattttgggaggcacacttgatggttaggaaaaaaatagtaaagccaagtatgtttgtacagtacgttttacatgtatttaagtagcatcccatcccaacttcctttaattattgcttgtctaaaaataacactacagatagaaaatatgatatattgctgttatcaatcatttctagattataaactgactaaacttacatcagggaaaaattggtatttatgcaaaaaaagaaannnnnnnnnnnnnnnnnnnnnnnnnnnnnnnnnnnnnnnntcatgtggctgtgaaattcacagtaatatggttcccgatgaacaagtttacccagcctgctttgctttactgcatgaatgaaactgacggttcaatttcagaagtaatgattaacagttatgtggtcacatgatgtgcatagagatagctacagtgtaataatttacactattttgtgctcaaaacaaaacaaaaatctgtgtaactgtaaaacattgaatgaaactattttacctgaactagattttatctgaaagtaggtagaatttttgctatgctgtaatttgttgtatattctggtatttgaggtgagatggctgctcttttattaatgagacatgaattgtgtctcaacagaaactannnnnacattcaga

SEQ ID NO: 17514 - DNA, 1073 bp, Macaca Fascicularis
  misc_feature (1)...(1073): n = A,T,C or G
atcagaggtactgtctttccccagttgtacttaccctatcttttctttaattaatatnnnnnnnnnnnnnnnnnnnnngtgaaaaaataagatttttctttaaagaacagaggcagaagagtaaaattcattgtattgctagcaatattttttttatgccatctgtctcaaatcaaggagtcatcatagtaggaaatagcatgttagtcatcgtttggcatgagggtgcattccagtaattcttaattgatacttgattaattccatacctttgattaaaacatgctagttcaaaataagactgctcagtttccaatggttttcaagcctgcttacctttgtaaaggttctctagtctctgattagccatggctgtattggactttgaacattttctggactcaaaacctctactctaaactaacctcatttggatgtgtaagtcttttgtaaaggcaaaaataaataatgtccaggataatttattagttttctcagtattttcccaaatattannnnnnnnnnnnnnnnnnnnnnnnnnnnnnnnnnnnnnnnnnnnnnnnnnnnnnnnnnnnnnnnnnnnnttgatatactgcatagtctccaaataggtaatacttctcaattgattagattttcagagtaaatttagagttatctgtttgtctggtgagggtcatatattttgttgaaataattaagctcacaaatttgataaacgaagaattgtcttcatttgtctcaataatgtgtaataaaatctatagaaaatcaaaacctgcttttccagtttttatggtatttgcctctcatcactnnnnnnnnnnnnnnnnnnnnnnnttcttaacagtgttctatgctggaagcctttatctaaactaaatacagggatgacctcttagcaatcttgccatcaatattgtattcaaggaaataaaagtttgattatttgttatttttgtttttcatcacatgagcacatccttttgttgtgtcacattttgtggttgattgttttgacctgatttgttctgttgaatgacaatttctggcttgaacnnngaatcnnnnnc

SEQ ID NO: 17515 - DNA, 890 bp, Macaca Fascicularis
  misc_feature (1)...(890): n = A,T,C or G
agaaatnnnnnnnnnnnnnnnnnnnnnnnnnnnnncttttaatctagagaaggcgtttcatatttgggggctaannnnnnnnnnnnnnnnnnncaaacagcaagagtaagnnnnnnnnnnntgcaggtacttggttaatgttgatttaaattttttttttccatgaatgtgctggtgaacactgtgagcaggcttttgtagatggcgatgtgttatagacgctgctcattcccaagggacggcaagtgagcagagatgtactgtgaagtcgccagtcactactgcaaggtagcttctgcctggggcccccagaagctgctcctgtatcctcttggtcccatggctgaagctggagcagtggattgctgccgcctgcgtgtggagcacagctctcccctcctgctgggcgtgtgtgacatnnnnnnnnnnnnnnntactgcgtgtgacttctccctgcccttcctcctgatggagtgtgcannnnnnnnnnnnnnnnnnnnnnnnnnnnnnnggacctccctgtctcccagctcccctcccgggggannnnnnnnnnnnnnnnnnnnnnnnnggcctctcctgccctnnnnnnnnnnnnnnntgtgggatcctgttgagtgggctgggccgcccccgggcagggnnnnnnnnnnnnnnncctgtgttctctgagggctcagtttcccggcccttacctttccnnnnnnnnnnnacatcatcattcttgtgggagacagcagcctctatgtggtgaacggcgtggattgagtgtannnnnnnnnnnnnntatatatgaaatgtcccgcgggatacagtcttagctgactttttttactctgaactcttatttgaattgttttttgtgcatatatttctgctaccacagagat

SEQ ID NO: 17516 - DNA, 244 bp, Macaca Fascicularis
  misc_feature (1)...(244): n = A,T,C or G
gaagcagaagggaaagaagtaggcagaaacgagcaattccctcctccctgataagagttgtcccaaagggtcgcttnnnnnnnnnnnnnnnnnnnnnnnnncatagaaggatttcatgagcagatcaggacccttagcaaatgtaaaaataaaatctaactcccatttgacaagctgagaaaggaaagttaaataccagataagcttttgatttttgtattgtttgcatccccttccctcaaaa

SEQ ID NO: 17517 - DNA, 732 bp, Macaca Fascicularis
  misc_feature (1)...(732): n = A,T,C or G
caacaccagagttcagtgtttaaacagacaaaatagaaagtattgagtaggtggttcatttgccacatccacttggtaggaagaagccaccagctttatagtgtgcctgatagattttacacattcctgggcacccactcaagagtgctctttttatcaccttctggaaatctccaaagttgaagggacctctggagtgtctctgctctagagagaattggtgggacccccgctcagtgcagtggccccaactagtggagggagagaggacttcagtcagatggactcaacaaaaacgggtttccagaagaataatgaaaagttgtgggtagcaaaatgaatcagttgnnnnnnnnnnnnnnnnnnnnnnnnnnnnnagctcaaccaacnnnnnnnnnnngggaacctgttagtaaagccaggttggccaaatgccgtttgattttgaaccttgtaggtccccactcaccgtctgccaggagctaaggcaggagagctgacgtgggactgctggctcggccccaacagggagcccccttcccaccacccctcggcaagctcaccacctcatccttctgccaaggcagctttccttttttttctgtgttttctgtgttcttagcctccaccctcctgccacccttgtggactaggaccaggtcctgaccccagtcagaaaatgatatgtacagtggcacactttagccagtcactaattttcactgttgtgaa

SEQ ID NO: 17518 - DNA, 730 bp, Macaca Fascicularis
  misc_feature (1)...(730): n = A,T,C or G
agtcagtctggtgaactgcttgtttnnacnntcttggagcaaaaatcagtgagagaatacagggccacacaggtgctgtgacatgtatatggatgaatgaacagtgtagcagtatcatcacaggcggggaagacagacaaattatnntctggaaattgcagtattaagtgccttttcctctcctgaatattaagttgaactctatttaatgcatttgtaaaccaaacttttaaacggactggtgaatgtgcaatgctagtaattagaagttttaccacatggaaaatttgtggttttaaactttctaannnnnnnnnnnnnnnnnnnnnnnnnnnnnnnnnnattctcttaaggcagataaaatgtggcagtgctagggaaaacatgttacattgtnnnnnnnnnnnnnnnncctgtnnnnnnnnnnnnnnnnnnnaggactgggtagcagagaacagctaagagataaattgggctagggaaacttgtcagaaagcattgaacaattaagaattttccaagaaaatgtgcagtattctctgctacttctgaatctgttttgtcttcctaatctatcacaattgctggccatcgggttttgggtgtatgttttcatagagtggttactttctataatgctgtacccagattctaagaacctggaggattagcagttcttataacagtaagtttactgtgtataggaaccggtttgtatttcattatagct

SEQ ID NO: 17519 - DNA, 757 bp, Macaca Fascicularis
  misc_feature (1)...(757): n = A,T,C or G
tnnnnnnnnnnnnnnacaggccccacnnnngccccaggcatgcccagcccccggtggtggnnnnnnnnnnnnnnnnnnnnaaactgaggcagcatgcacgaggcagggccaggggagaggagaccaagctgaggaggtgctgcaggtcccacctggccccagcccttgtcagatccacccagggtgaagccttcaaagctttttgctaccaaagcccactcactctttgagcnannnnnnnnnnnggcgggagatactgtccttcctcctagacctgttttttccatctttggaaacatcagtttttgtatggaagccactgggagattnnnnnnnnnnnnnnnnnnnnnnnnnnnnnnnnnnnnnnnnnnnnnnnnnnntcttcatctgtccgacaagttcactcgcctcggttgcagacctaggacactttatctgcaggccgcttaccttcccctgagtcaggcttactaatgctgcccttgctgcctctttgcagtaagggagagagcagagaaatacaggtcatctcagattatggaattgctgggatctagttttccaagtaacatttgcggtggcagaagcctacaaaagagctaaaatcaggaaagaaaaggaaaaatacgaattgaaaattaaggaaatgttagtacaatagatcagtgttaaactagattctattcattactagataaaatgtataaagctatctgtactaaggagaaataacttttataacattnnagaaaaaaat

SEQ ID NO: 17520 - DNA, 1000 bp, Macaca Fascicularis
  misc_feature (1)...(1000): n = A,T,C or G
acagaggaagaatcctggggttggaagccagaagcaaaaggccccgggccagttcctcagacacggggtccacagcaaagaaaccccggaaatgcagcctttgccaccaacctggacacacccgtcccttttgtnnnnnnnnnnnnnnngctcagggtagggtagagagcgccactttctcagacctgtctcctttgtgnnnnnnnnnnnnnnnnnnnnnnnnnnnnnnnnnnnnngtgtcctggaaacttggaggacagtgtggcctttggagtcgggcctttttgtgttaaggggcacaaggtccagaccactgtggagcaggccagctctgttggacagtggccctcttcccaagcctcagaagtgaccatagccactgctgaaaagtcacgcagctgctccctcggaccccccaagggtggttgctgttagcagaggattggtgcagtcctagctgaagcccattgtgtgccaaaggaagaagctcccaggactgcttccttcacctccagaaagccccaggtgagccggcagcactcatggggcaggccatgtccaagctgcccaggacttctctcatagatgtcctgagaaggacggtgtaatacaaggaagtggctgtggtaacactgatccggcagaagaagcttcattccctctttagttaagccaggacacccagannnnnnnnnnnnnnnnnnnaacccaggctgggtgcagtggcttacgcctgtaatcnnnnnnnnnnnnnnnnnnnnnnnnnnnnnnnnnnnnnnnnnnnnnnnnnnnnnnnnnnnnnnnnnnnnnnnnnnnnnnnnnnnnnnnnnnnnnatacannnnnnnnnnnnnnnnnnnnnnnntgtgcctgtagacccgactactcaggaggctgaggcaggagaattgcttgaacccaggaggcagaggttacagttagccgatattgtgtcactggaccccagcctgggtgacagagcgagacgcagtctcaaaaaaa

SEQ ID NO: 17521 - DNA, 817 bp, Macaca Fascicularis
  misc_feature (1)...(817): n = A,T,C or G
agacatgcctagtgaaggcccaggatggcttttgccatggccccatggggtaggagggacagagagacagagtcagcctccccattcagaggcatcacaaataatggcatgattcttcggatgattgcagaaaatagtgtttcatagttcaacaactcaagacaaagcttatttctgaggataagctctttaaaggcaaagctttattttcctctctcatcttttgtcctccttggcacaatgtaaaaaggaatagtaatatcagagcaggaaggaggaatggcttgctggggagcccatccaggacactgggagcagctagagattcacccatgtttgttgaacttagagtcattctcatgcttttctttataattcacacatatatgcagagaagatatgtccttgttaacattgtatacaacatagccccaaatataataagatctatactagataatcctagatgaaatgttagagatgctatatgatacaactgtggccatgactgaggaaaggagctcgtgcccagaggctgggctggtctcccagaggccaaacccaaggaggtctggcaaagtcaggctcagggagacnnnnncctgctgcagccctcggtgtgaacacacgctgcacagaggtctccttgaaaacagaggggtctcaagacattctgcctacctattagcttttctttatttttttaatttttggggggaaaagtatttttgagaagtttgtcttgcaatgtatttataaaaagtaaataaagtttttaccattaaaaaaaaaaaaaaaaaaaaaaaaaaaaaaaagg

SEQ ID NO: 17522 - DNA, 873 bp, Macaca Fascicularis
  misc_feature (1)...(873): n = A,T,C or G
actggccaaaggtggcagatagagcaactcccaggccagtgagctttacttgccgtgtaaaaggaggaaaggggtggaaaaaaccgactttctgcatttaactacaaaaaaaagtttatgtttagtttggtagaggtgttatgtataatgctttgttaaagaaccccctttccgtgccnnnggtgaatagggattgatgaatgggaagagttgagtcagaccagtaagcccgtcctgggtttgttgaacatgttcccatgtaggaggtaaaaccaattctggaagtgtctatgaacttccataaataactttaattttagtataatgatggccttggattgtctgacctcagtagctattaaataacatcaagtaacatctgtatcaggccctacatagaannnnnnnnnnnnnnnnnnnnnnnnaaaagataaacatgcgtgttaatggctgttcgagagaaatcggaataaaagcataaacaggaacaacttcatcacagtgttgatgttggacacatagatggtgatggcaaaggtttagaacacatttttttcaaagactaaatctaaaacccagagtaaacatcaatgctcagagttagcataatttggatgcnnnnnnnnnnnnnnngannnnnnnnnnttcacagaaatcaagatgttatttttgtatactatatcacttagacaactgtgtttcatttgatgtaatcagtttttaaaagtcagatggaaagagcaactgaagtcctagaatatagaaatgtaattttaaactattccaataaagctggaggaggaaggggagtttgactaaagttcttttttgtttcaaattttcattaatgtatatagtgcaaaataccatata

SEQ ID NO: 17523 - DNA, 724 bp, Macaca Fascicularis
  misc_feature (1)...(724): n = A,T,C or G
agggttcccagtccagtgatagagagggagccaaacnnnnnnnnnnnnnnntgatcaaagctgtgacagctggggctggggacacaaggacttgtgacagctctttaatgggcagaannnnnnnnnnnnnnnggcacgcacttccttagccattcatgattcactcactgagccatgggccacacaacgcctgaggcctccatgggccaaggacagaagatgtcagggtcccagggtccaagcagtcctgagccctaccctccacaagcttccccaagtaagggaccagagtcaccatccaggagggatacaggctacagcggagnnnnnnnnnnnnnnngctttgaagactgagagnnnnnnnnnnnnnnnnnnnnnnnnnnnnnnnnaagctggcaacgggccaggagaggactgcatgtgctggagcctcnnnnnnnnnnnnnnnnnnnncaacacctcgcctccagcccagccacatgcatttggaactcctggcctccaggactgtnnnnnnnnnnnnnnnnnnnnnnnnnnnnnnnngcgtttgtgctatgtgtaacagcagcaataggacacggatacactactcatacatacacgcaaatgggcgaagggnnnnnnnnnnnnnnnnnnnttcttactgtgggctgtagtttaaaaattcaaaacgacactgaggtaggacctctcattacatgcttcttagcacacactggtcagt

SEQ ID NO: 17524 - DNA, 664 bp, Macaca Fascicularis
  misc_feature (1)...(664): n = A,T,C or G
ctggtgcccctgggccccgacagcacccgccacaccacgctgagcntnntgaagcgggccaaggtgcacatcaagaaactggaggagcaggaccgccgggcactgagcatcaaggagcagctgcagcaggagcatcgcttcctgaagcggcgcctggagcagctgtcggtgcagagtgtggagcgcgnnnnnnnnnnnnnnnnnnnnnnnnnnnnnnnnncggacgactcagagcaagaagtggacatagagggcatggagtttggccctggtgagctggnnnnnnnnnnnnnnnnnnnnnnnnnnnnngaccactacagcctgcagagtggcagcggcggcgacagtggcttcgggccccactgccggcggctgggccgccccgccctctcgtaggcccgtgccctctgctccttggcctgcctgctcgccagccacgcgtgtcagccctccagttctccttcagttgacgccagcctctccacaggcccactgctgtgccattctggaagctccagctgccacctgggctgcctggcactgcccgcttgccggtcagggcctgccgagctgcctgcccctctcagctggnnnnnnnnnnnnnnnnnnnnnnnnnnnnnnnnttccacgtccggagccctggnnnnnnnnnnnnnncacggtc

SEQ ID NO: 17525 - DNA, 722 bp, Macaca Fascicularis
  misc_feature (1)...(722): n = A,T,C or G
ggacactatgaaataatgcattctgaggatccctaacaaaaattatgagattgtctttattgctctttggtttgacagtgcctagtaattaagagggggctctgggctttgctatattattattatggatttctctttaacttcagttggagaaattctgagnnnnnnnnnnnnnnnnnnnnnnnnnnnnnnnnnnnnnnnnnnnggactccaagcccagtgttctttccccgtaagataacccattggcaaacttggtgacccctgtttctttagtctgggttattcctctatgggtttttataggcataggaacccagtcagcctcagagaaatccctagttagcacatatgccatgtatacccctctcctcacttgactactgcagggcctgggaggctggggcagggttggggattcaagttgcagatcaggcactgactaaacttcttactcttacttcaggccttctttgacccttggccagagtatggaaatagctccgcagaggcgtgggctcgattcctcagggccacgttaccacagacctgtttgtttcttatgctgttgttcgcggagtctcacgggattgtctggtttcccttacagggccccctcccccgggaatgcgcccaccaaggccctagactcatcttggccctcctcagctccctgcctgtttcccgtaaggctgtacatagtccatttattctccttgtgg

SEQ ID NO: 17526 - DNA, 726 bp, Macaca Fascicularis
  misc_feature (1)...(726): n = A,T,C or G
gccccagctcaaggctattaggttgaatattnnnnntcatgaataaatgtggatcttnnnnnnntggcttcaaaataagtcatgaacacaaattctttgtaaattatgtaaattcctgtttatctatataannnnnnnnnnnnnnngnnnnnnnnnnnnnnacagttcaaaatctctttcagctgctctcttcccgccgagctnnnnnnnnnnnnnnnnnnnnnnnnnnnnnnnnnnnnnnnnnnncgcctgtgcaggggagaggccacccatctccccacccggccacagagagataagaaatggcatttgagttgggtgtccagggccctgtatggagacatttaagatggtatatgannnnnnnnnnnnnnngaccaaatgttaaattctctatgcgtatttcataagttattacaggtataaaaatgatgacctatcttgaggaaatgaaagtggctgatttgctggtagaattttgtacagtttagagaagcaattatttattgtgaaactgttctctactccaactcttttatgtggatctgttccaagtagtcactgtatatacgaatagataggtaggtattttaaattgcattctgaatccaaactcatnnnnnnnnnnnnnngaattacatttttaaaatgcatatgtnnnnnnnnnnnnnnnggcaagatggtannnnnnnnnnnctcattcattgcgcannnnnncagaaagta

SEQ ID NO: 17527 - DNA, 772 bp, Macaca Fascicularis
  misc_feature (1)...(772): n = A,T,C or G
tgcctgtannnnnnnnnnnnnnnnnnnnnnnnngatgtagggtcaaggnnnnnnnnnnnnnnngactccacacagagaggatatgatgagatatggccatcacctgaaaagttctcttatcttctccttctatgctttggtccctttctcctggaaacaaacctgcctgtgtatgaagctagttgatttccagttgnnnnnnnnnnnnnnnnnnnnaacattgtctagtcctttgcgaatttctctgatttgtgggcacagttaacgaagtttccccgcatgtgaagacaagtacaaaatagcagagccaagcagacagtgggtctgttcttcattagctcagtgacttgtccacactccagtcttagcacttatgtttcaaaagcttgtcacaaacccttggagtcattcccagataacagaactggacatgataaatcccctaatgccaagggtctagtgtgttcttagtagttatactgggaagtgtatggagatttaggtgctgctctgcttctctggatggccgaaggctcctgggccatcttcatgtgctgctcgaagatctcctattttgtactcttggctagaatgctgtggagcaaatacaaagtgaaaaaagttctctgtaaatttctaaagtgcatattcattgatgccaaaaaaaaaagctgccttttgaagtgatgttctttgctgtcttcttaaacataaggcttttaaaaatgattagtatattttgtggtaaagaaaacaggcgtcggctcaaagc

SEQ ID NO: 17528 - DNA, 758 bp, Macaca Fascicularis
  misc_feature (1)...(758): n = A,T,C or G
actatatgtaaaagatctaatatcagattataatatcattttaagaataatttttaaaaggcataaaccaaagattatttcatgcccctctcccactaataaaatgcaaatcatgtcacaagtattttactaattattatttgaatatgccagannnnnnnnnnnnnnnnnnaataatctttttttctcctctgaggctctagtacannnnnnnnnnnnnnnnnnnnnnnnnnnnnnnnnnnnnnnnnnnnnnnntgctattgtgcttctaattaagctatttcattaataaatcacatagtgactgttcctacaataaaaatcatatgctgcataggacttgagaagtgtatcactacannnnnnnnnnnnnnnntccctaatttttctttaaattgttaatgtgtatatgtgtgtatatatatcatttaatattcagtctgatccaaagtgtatttttactgaatatatctgaaaaaaattgagattaaatttttaatgaaatatattacttttcatgaaatgaaaacatttaatgaaatatatttactttcaaaaaaggtgtgtttgactaaaatgcagttttgaagaatgaggaatagttattaatagaatggttgattaatgtgtttattatgtgacatcaacaataacaggacatttacgctgaatgatgttnnnnnnnnnnnnnnnngcaagataaaattatannnnnnnnnnnnnntaaatcagtaggcaaaatggaccaagatgttttg

SEQ ID NO: 17529 - DNA, 725 bp, Macaca Fascicularis
cggctggaacccagtgacataagcatgctctgaccccacatggggccccctgtccaagcagagctggcaggcccctccttgctggcagaggcacaggaggcccgttggggatgaggccactggccagggctgtgctgcaccagaccaatggcaccgcccccacccctcccagcacaggggcagcttggaggagaggcggcattggccgccactgcaggcgcaagtcagcgtcaacagggtccctgagtcagaaagcccaggcccaccaggtcagcagacaggcacaggcagggcctgcagaggtgccaaggccctggcccaactgggctggaaggagcctggacctgctcttccgcaccccctcccacccccacggcacaggcttgtgccttggtgccccctggaggtagcagggcggaggcttctcaggcagaagtcttaagttgcatcccatcccctggaatctccaggagggagaagagggacagcccctccttcctgccagagccacagctctagggcaatgggatggccctgcacccagcccaggcaccccctctgtgccaaccacgctgtcctttggttccgaggaggccctgagcactgcccacccccacaccttggagggagcagacagagggtgagtactgcacagagcctgcctggaggtgcagactcatgcactcagccctgaagaggtgggagaggctggatcttaactgtgg

SEQ ID NO: 17530 - DNA, 571 bp, Macaca Fascicularis
ctattttccagccaactcagggtaaaaatatgcccaagtgggcaatgaacatggccattcttctgtcacatgccaattcagttgtcaatcccattgtctatgcttaccggaaccgagacttccgctctacttttcgcaaaattatctccaggtatcttctctgccaagcagatgtcaagagtggggatggtcaggctggggtacagcctgctctcggtgtgggcctatgatgtaggctctcacctcttccaggagaagatacaaatccacaggaaacaaagaggacacggctggcttattctcattgtgaaagatagctacacctcacaaggacatggactgcctttcttgagcacttccctggacccaccacgtatctagctaatacgtatgtgtcactagtaggctccaagggttgacaaatatatttatgatctattcagctgcttttactgtgtggatgatgctgacagcttgaatggattctaagagacacttttgtttttaaaagtctgccttgtttatggtggaaaattactgaaactattttactgtgaaacactgtgaacta

SEQ ID NO: 17531 - DNA, 714 bp, Macaca Fascicularis
  misc_feature (1)...(714): n = A,T,C or G
ggcctatagacttnnnnccaaggccccatcccccagtgttgccagcaggtacctggacagcacagccacgcatctccctttcacatggcccacctcctgcttcccagaggactggccctacgtgctctctctagtcctacctatcagtgtccagcgtggcagagcctgcagcccttggccactgcagacgggaacctctcagtgtcttgacatcgccctacgcaggcagtgggtctccaccacagccactttgagtctgtggtccctggagggtggcttctcctgactggcaggatgaccttagccaagatattcctctcttccctcttctgggataaataattcccttaacacgatatgatccacccatgaaaatagctactggcccagctaccatttcccagctgctgtaccatttgcctgtagaatttcattcagtttataatttggcattctctctggcgatggagagtgtggctgggctggctgcaaaggatgcctcacacactgcccccacccgtagccactgccccatcagaggctgcctcctccttctgattaccacccatgttgcatgtcaaggtgcccagggactggagacgagacaaaaccaggagcagcacagtggggacctctccgtctcaacagccccaggcctgtggggactctggaaggatgggtcagctgcaggggtcggggagggagacatccagc

SEQ ID NO: 17532 - DNA, 743 bp, Macaca Fascicularis
  misc_feature (1)...(743): n = A,T,C or G
gagaactagaacctggtgggctagcacctagaagggctagaacctggtggnnnagaatgtagaagggctagnnnnnnnnnnnnnnnnnnnnngagggctagnnnctggaaagctagaatctggagggctagaacctggagagctagaacctggcagactagaacctggcaggctagaacctggcgggctagaacctggagggttagannnnnnnnnnnnnnnnnnnnnnnnnnnnnnnagagcccataaatcctgaccaattcaactctgaattttaaagcaaaagtgtcaaaaaaaagattccctccttacccccaacccactctttcttcccaccacccacacccctctgccccaataaatacctggagaaagaaaacaggtgaaagaagaagtaaaaaccatttagtattagaatgaagtcaaactgtgccatccatgatgaatgaaaaaacaaaaagannnnnnnnnnnnnnnnnnngggcagtcattcatcagcagagcatgtgatggtctgagactctcttagaagcagagctctatccnnnnnnnnnnnngggnnnnnnnnnnnnnnnnnnnnnnnnnnnnnnnnnnnnnnnnnnnnnnnnnnnnnnnnnnnnnnnnnnnnnnnnnnnnnnnnnnnnnnnnnntgtgaaagactcaaagagctgttatgttgtaaacaggaagcatttcacatccgaatgagaaaatggatgaatcatgtaaacatgtgtctttcc

SEQ ID NO: 17533 - DNA, 442 bp, Macaca Fascicularis
  misc_feature (1)...(442): n = A,T,C or G
gggtaaatcagggacagagccaaggagaaaaccaccaagagctctttcctgtaataagcaggacccagtttgaagaaagttcagtgaatataaaaaagccatttaaaaatctatatatatgtatattttttttttgacaatgagtcttgaaaagttnnnnnnnnnnnnnnnnnnnnnnnnnnnnnnnnnnnnnnnnnnnnnnnnnnnnnnnnnnnnnnnnnnnnnnnnnnnnnnnnnnnnnnnnnnnnnnnnnnnnnnnnnnnnnnnnnnnnnnnnnnnnnnnnnnnnnnnnnnnnnnnnnnnnnnnnnnnnnnnnnnnnnnnnnnnnnnnnnnnnnnnnnnnnnnnnnnnnnnnnnnnnnnnnnnnnnnnnnnnnnnnnnnnnnnnnnnnnnnnnnnnnnnnnnnntgccccgccataaaatcgatattaaaagaagaaat

SEQ ID NO: 17534 - DNA, 827 bp, Macaca Fascicularis
  misc_feature (1)...(827): n = A,T,C or G
aaacgattgattagtgtcttaaacaaaagcacgggtgaagtcacaaagaaaaagcctannnnnnnnnnnnnnnnnnnnnnnnnnnnnntagagctgcagacacnnngaccaatagctcttgagctgtataaagacnnnaaagagctggggaggttcatgctacgttacggtggttctacaatagctgctggtgttgtcactgagataaaagaatgatgggtcagaatttctgccgtgtttccggatacagtgaaatagctaacctctgtttcaaagaatccagtcactaagtcaaaggaacaatgtgcaattgatatttttttagatgagaggaaaaattaaagctaaaattagctgcaaagaagtattaataatcacctctgcaaaaattataagttgccaactggcaaagaaagggtaatgttaaaaacaactttccctttgaaatgttagtaaatggatttacttcgctgagatagatggcaagtgtcaaaaatagtatccgaagatactgaatcatcacgaaatgaactctacttctggccaaagcacaatgtatttgcagttttctcttttgattcaattatactgcacatgttttaaggaaaagtaacttaactgggtttttcaggcagttgatatttgacctaagcttttttttttttttcccggttaacgctaagaaaagatttgggaaaggttataataaaggtattttgtggtgaccataagaatgtccctccccaaacacgtaaacttgtgaaagtttaatttggaattagtggaagctgttcctttgaaagccacagatattattaagtgtaaag

SEQ ID NO: 17535 - DNA, 683 bp, Macaca Fascicularis
  misc_feature (1)...(683): n = A,T,C or G
cacggaagtaagggnnnnnacccacagatcaactgtgtaatcttttnnnnttccaaatatgaaaagctataattcaacttcaaagtagagtagaaaaaaaacttgtcttaactgttctagttcttgatggttttcttccttattaacagttggtgtttattccttggcccttttggactaatgttactgtccaggttctttctcgagaaaccacatctggttcagaagagtgtcaagtcggactctaaactccgttgctgtctgagcaatcttggtgcctagactttgcattccttgttctgttgacctgcatacatgtgagagctatttctttaagaactatataggctgtgaaaacgcactttctttcccccaaagagctgggaatttatgaagttnnnnnnnnnnnnnnnnnnntgctgggacaattatttaactccatttttttttggtaatattgtcaaatgtctctgtggattctgacagagatttctctttgttttgttattcttttggttgtcagtttcattttaacnnagtgtaactagtaccattttattctttggattttgtataattacagtacatgattgtgtattgtgacatgnnnnnnnnnnnnnnnnnnnnnnnggcattgtgaaacctgttactttgtgtcacttcctgataaataagagcgtgat

SEQ ID NO: 17536 - DNA, 812 bp, Macaca Fascicularis
  misc_feature (1)...(812): n = A,T,C or G
ggtcccacagannnnnnnnnnnnntgagatagatgtgaatgttatnnntcgagtgacagctgaagacaagggtacagggaacaaaaataagatcacaattaccaatgannngaatcgcctgacanntgaagaaatcgaaaggatggttaatnnnnnnnnnnnnnnnnnngaggaagacaaaaagctcaaggagcgcattgatactagaaatgagttggaaagctatgcctattctctaaagaatcagattggagataaagaaaagctgggaggtaaactttcctctgaagataaggagacnnnnnnnnnnnnnnnnnnnnnnnnnnnnnnnnnnctggaaagccaccaagatnnnnnnnnnnnnnnnnnnnnagctaagaagaaggaactggaagaaattgttcagccaattatcagcaaactctatggaagtgcaggcccgcccccaactggtgaagaggatacagcagaaaaagatgagttgtagatactgatctactagtgctgtaatattgtaaatactggactcaggaactttgttaggaaaaaattgagagaacttaagtctcgaatgtaattggaatcttcacctcagagtggagttgaaaatgatatagcccaagcggctgtttactgcttttcattagcagttgctcacatgtctttgggtggggggggagaagaagaattggccatcttaaaaagtgggtaaaaaacctgggttagggtgtgtgttcaccttcaaaatgttctatttaacaattgggtcatgtgcatctggtgtaggaagttttttctaccataaggacacc

SEQ ID NO: 17537 - DNA, 683 bp, Macaca Fascicularis
  misc_feature (1)...(683): n = A,T,C or G
tcactgggtcacttggaagaggacttggggtagaggctgggaggagcccctggacatgcctgtcctgaaagcggctacctccatcatccattcccaagatgcctgatcagaagccaacttgaatgaacccctggctccttcacctccgcccccacgattggtatgatgctgctggcacagctgggatacacacggctcccccaggcctgagctgcttcactagggaatcctgcggcaggactgcagagcagatggcagacgcgcgtgttggaggagagagccttgggagccactgccactccagtcctgccaccaccctgtcttcctctgcaagtgctcagggaaatggccttcctgccggaggccgactatctgcctgacaggctgtgactcttctctcaaccttggccttctcccctcttctgagctagttggttgaatttttttttaatgcttaagatttgtttttctggctgggcgtgnnnnnnnnnnnnnnnnnnnnnnnnnnnnnnnnnnnnnnnnnnnnnnnnnnnnnnnnnnnnnnnnnnnnnnnnnnnnnnnnnnnnnnnnnnnnnnnnnnnnnnnnnnnnnnnnnnnnnnnnnnnnnnnnnnnnnnnnnnnnnnnnnnnnnnnnnnnnnnnnnnnnnnnnnnnnnnnnnnnnnnnnnnnnnnnnnnnnnnnnn

SEQ ID NO: 17538 - DNA, 1444 bp, Macaca Fascicularis
  misc_feature (1)...(1444): n = A,T,C or G
acgccaagtactccagggagannngcagctcttctccatggaaggctttgggaccgacgctgtcatctatctcaaggccctgtccacggactcggtggagcgcctgcctgtctacaacaagtcagcctggcgccactaccagaccatccaggaggccggcgactggtgtgtgcccagcacggagcccaagaacacgtccacgtaccgcgtcagctaagggccgccactcatctgcacctgagaggacggactgccgcctctgggccccaccaccgcggtgcccctcaccgtcctcctcggggagcagggggtgggttctccctgatgaccaggctctgtctctatagaagtcactgcggtgataggtctgtgatggtccctaagtgccagtccatctccgtggagagccctcggtggcctccccatctctgtgggcgatgcctgagggttggggatgtctccaccctgatggggtgtcccagagacatttccccatggcagtcctcctctctgagaccagggctgtcacttttctgccaggggtactgggtccccctcagcaccctccacagcccaggccttccaagtggatgctccgcttgccttattctcccagcccacagaggcaccctgggctttggcctgttgaagaggctgggtgccctccagacctgaggactgagtgaagaaaggggttacacccgtgagtggggaatgaggctggtcctgcagcctctctctccactcgggactttaaggtcggtggcagagggggtggctctcacagggcccaaccctaaagtggaggaaccttgttagacccagagcttgccacccagccaagctgctcgaggccctgcagcagccttggcaatgtctgtgccacctcccgagccctcccagcatgtcctcacgtgctcatgcccatccgcccctccacaagcccagtccgtcctgcctgagttccagcccccagcccccactgtgcccagacacgtgtgctcagggtggctttctcccaggaccctctgtgtatatagttagttttataaccctgaatgcccccacccttcccctaagcacacaggggttaaagctgtgtgtccctcccagtggctgtggcagtgacagtgacacccacacccacagnnnnnnnnnnnnnnnnnnnnnnnnnnnnnnnnncatccctgggggaggggatccacacatgcgcacgtacacacgcacactgcagcaccctgtgaccaccacatgacgcactcgggacgtccggcccagctcaggacnnnnnnnnnnnnnnnnnnnnnnnnnnnnnnnnnnnnncgccggatggcccagcagctggtgacagacctgttgtcccaccacactcagggcccagcagaatctgnncaacccaacagctggagcagacagaaattctgnnnnnnnnnnnatctaagtg

SEQ ID NO: 17539 - DNA, 706 bp, Macaca Fascicularis
  misc_feature (1)...(706): n = A,T,C or G
ctgnnnnnnnnnnnnnnnnnnnttgtggaattnnnnnagaagtgtttatgctttgttagcattccaacttgcgttattataaagaggtattaatgcctcagttnnnnnnnnnnnnnnnnnnnnnnnnaggattctatttcagctgtcttttctaactgtaagttgagttttgaacacgtgctgtggacatcagnnnnnnnnnnnnnnnntcttgaagctcctttttcattcctgctcctctgtctacttgtatttctcagttacagcactgagtggttgtttccaagtacatttctgggccacctcagggaacnnnnnnnnnnncctggcatttaggcagcagagcccctgactgtccccccagggctctgcctcacgtcctcatctcnnnnnnnnnnnnnnnnaaataggaaatgggaaaaggagnnnnnnnnnnnnnnnnnnnnnnnnnnnnnnttttatttatttatttttaatttgtttttttcctccaagtccaccagtctgaaattagcacagtaggcagtannnnnnnnnnnnnnnnnnnnntgttgtgattctcttttcttagtggagtggaatgttctatccccacaagaaggattatatcttatagacnnnnnnnnnnnnnnttctgtatttacccatttttttgaaatatatactaagttccatgtatttttgttacaaatcttctgaaaaatac

SEQ ID NO: 17540 - DNA, 926 bp, Macaca Fascicularis
  misc_feature (1)...(926): n = A,T,C or G
annnnngagagctggcaagannnnnnnnnnnnnngtcgccgtatccagcgcagggggccatgcatcatctataatgaggataatggtatcatcaaggccttcagaaacatccctggaattactctgcttaatgtaagcaaactgaacattttgaagcttgctcctggtgggcatgtgggacgtttctgcatttggactgagagtgctttccggaagttagatgaattgtatggcacttggcgtaaagccgcttccctcaagagtaactacaatcttccnngcacaagatgattanatacagatcttagcagaatcttgaaaagcccagagatccaaagagcccttcgagcaccacgcaagaagattcatcgcagagtcctaaagaagaacccactgaaaaacctgagaatcatgttgaagctaaacccatatgcaaagaccatgcgccggaataccattcttcgccaggccaggaatcacaagctccgggtggataaggcagatgctgcagcagcagcactagaagccaaatcagatgagaaggcggcggttgcaggcaagaagcctgtggtaggtaagaaaggaaagaaggctgctgttggtgttaagaagcagaagaagcctctggtgggaaaaaaggcagcagctaccaagaaaccggcccctgaaaagaagtctgcagaaaagaaacctactacagaggaaaagaagcctgctgcatgaactcttaaatttgattattccataaggtcacattattttggacagcttctcttgaataaatacctgatcatacaggcagtgagaaacatggcttgttggtgtgttctgtaaagcttggttataatttttttaaagtgacattttggccataatttagactgttccattttatactgagtccatggagttcaatggaaggggaa

SEQ ID NO: 17541 - DNA, 735 bp, Macaca Fascicularis
  misc_feature (1)...(735): n = A,T,C or G
acgaaacctgtaatacgctgtacagtaacaagtgttggcattatcagttgaactgtaaatacaaaatgcttcttccaattagtctctatgatgattaagtttctaaaatttatctgaacaccattcagaaacttgttttggggaatttgatagttattgatgtgcatctgttaaactgatgacagacataactcatcattccccagaaaccttttttgattacagtatctaacattttgcctcctcttttttggttttgctggttataaaggtttggattggagagggctcactggatcccaatccttggagctggatcattggattcaaatcataatgtggataggatagggaggannnnnnnnnnnnnnnnnnnnngcgggatcagattaccaggaacataggagtggattcctgccccaaccaaaccgcattcgtgtggatttttttattcaacttaattggctattccaaagatttttttttttcctatttttgacgattggagcccttaagatgcacgatggaattgtgttttgcgttttttggtaaaaggagcaaagcgaggacctggagataaacgctggagcaatctccttggaaggattcagcacgagtagatggtaaacatttaaaggggaaagggggggtttgtttaaaatagtaaatcagtaagtcacttctaaatttaaagaaaacaaaattggagttgaagaataagtaggtttccaattg

SEQ ID NO: 17542 - DNA, 739 bp, Macaca Fascicularis
  misc_feature (1)...(739): n = A,T,C or G
aaaagcacatggacacagcactttgacctggcaagcaccggggagaacttctatgtggacgagacgactgtggtgaaggtgnnnnnnnnnnnnnnnncgagcaccatcagttactttcatgactcggagctcccctgccaactggtacagctgaactatgcgggcaatgggactgtcttcttcatccttccagacaaggggaagatgaacacagttatcgctgcattgagccgggacacgattaacaggtggtccgcaggcctgaccaacagccaggtggacctgtacattccgaaggtcaccatctctggagtctacgacctcggagatgtgctggaggaaatgggcatcgcagacttgttcaccaaccaggcaaatttctcaggcatcnnnnnnnnnnnnnnnnnnnnnnnnnnnnnnnnnnnnnnnnnnnnnnnnnnncaactcagtgaggagggtgtggacacagctggcnnnnnnnnnnnnnnnnnnnnnnnnnnnnnnnnnnnnnnnnnnnnnnnnttcaaccagcccttcatcatcatgatcttcgaccacttcacctggagcagccttttcctggccagggttgtgaacccagcgtaagagaccgctcacccagagcctcagcactatctgactttgggcaccagggacaccacggaaatgttttggagagtgggaggtttcccccaatctcctccaagttctcctccccagagttgtgtctacctttagg

SEQ ID NO: 17543 - DNA, 805 bp, Macaca Fascicularis
  misc_feature (1)...(805): n = A,T,C or G
cctaacaggannnnnccatcgccgtggtacaagaggcagacagcgggcactaccactgcagtggcatcttccagagccctggtcctgggannnnnnnnnnnnnnnnnnnnnnnnnnnnnnnnnnnnnnnnnnnnnnnnnnnnnnnnnnnnnnnnnnnnnnnnnnnnnnnnnnnnnnnnnnnaggaggccccatgaccctgagctgtcagacaaannnnnnnnnnnnnnngtcagctgcccgcctcctcttctccttctacaaggatggaaggacagtgcaaagcagggggctctcctcagaattccagatccccacagcttcagaagatcactccggctcatactggtgtgaggcagccactgaggacaaccaagtttggaaacagagcccccagctagagatcagagtgcagggtccctccggctctgcacctcccaccttgaatccagctcctcagaaatcagctgctccaggaactgctcctgaggaggctcttgggccgttgcctccaccgccaaccccatcttctgaggatccaggcttttcttctcctctggggatgccagatccccatctgtatcaccagatgggccttcttctcaaacacatgcaggatgtgagagttctcctcggtcacctgcttatggagttgagggaattatctggccaccggaagcctgggaccacaaaggctactgctgaataggagtaaacaattcgtccacgatctcgctaaaccaccccaataaatctgattctttctatattttctcttcctgtcctgcacatatgcataagtacttt

SEQ ID NO: 17544 - DNA, 764 bp, Macaca Fascicularis
  misc_feature (1)...(764): n = A,T,C or G
gacatattgggcttnnnnnnngctctatacttgtgaaatgaagagtaaaaacaaaattgcttgactattttaaaattatgttagaccttaagctgtttaaggaagcattaaagcaaatgtatggctgccttttgaaatatttgatgtgttgcctggtaggatactgcaaagaacatggcttattttaaaatttatacacaagtcacttaaatgccaattgtctgaaaaatcttaggagattttacccttgatatgggacttacacaggtagggagtgttcagtggacaatagtgtaggttatggatggaggtttgggtacttaattgaataatgagtaaataatcttacgtgggtagagatggcctttgccaacaaagtgaactgttggttgttttaaacttatgaggtatgggttcagtggagatgtttggaactctgaaggatttagacaaggttttgaaaaggataatcatgggttagannnnnnnnnnnnnnnnnnnnnnnnnnnnnnnnnnnnnnnnnnnnnnnnnnnnncacccttgnnnnnnnnnnnnnnnnnnnnnnnnnnnnnnnnnnnnnnnnnnnnnnnnnnnnnnnnnnnnnnnnnnnnnnnnnnnnnnnnnnnnnnnnnnnnnnnnnnnnnaagctgggctgtgtagcatgtgcctgtggtcccagctactgaggaggctgaagtgggaggattgcttgagcccaggaggcagaggttgcagtgagccaaggtcacgccaatcatcactca

SEQ ID NO: 17545 - DNA, 786 bp, Macaca Fascicularis
  misc_feature (1)...(786): n = A,T,C or G
tcaagtatgnnnnnnnnnnnnnnnnnnggagcagctccactgcactgtgtaccgaggagacaagagccagcctggcaggnnnacaccagacgagctggaggccgtgcgcaagtacttccagctagatgtcacnnnnnnnnnnnnnnnnnnnnnnnnnnnnnnnnnnnnnnnncacttccaagaggtggctcagaaattccaaggtgtgcgactgctgcgacaagaacccatcgaatgccttttctcttttatctgttcctccaacnnnnnnnnnnnnnnnnnnnnnnnnnnnnnngagcggctgtgccaggcttttggacctcggctcatccagcttgatgatgtcacctaccatggcttccccagcctgcaggccctggctggtgagtaggtgggtcccctgcccccaggcctccatcagctttgaagatctgttcatttttcccctggttaccatctcaaggcttcctgccataccaaacacttccccaatccagaacnnnnnnnnnnnnnnnnnncaactccagttactcatcctccctatgcatccccaaaatgtcagcacctcactggtctgtgctttttgcctagtgagttcaatgcctcatcagaaaaacatctgtatacaatgtacagtagtttggggttaaaagcatgcattctggggacagacccatgcctggttttgaaccccaactctcacttgggcacattatttagcatctctgtactaaagtttcttcatctgtgaaatagaataatagcatctacctatgctgttattgg

SEQ ID NO: 17546 - DNA, 705 bp, Macaca Fascicularis
  misc_feature (1)...(705): n = A,T,C or G
gagatannnncatgggttcagtaacctttcattttataacattgggcacggtacagagtggctgtcacataaggtacttgaagatttattagtttaattctatttttacagtaaccttgaattcttctgagttttgcatgtattaaattcaattaatgctgaatatgaagagtaaagtatttatctgaaagaagttactgggttaggagaagtaatgaatgtatccatttgtacatggtttacatgttgtggatgctttgtaaacattttcctatatgtttaaattgtgtnnnnnnnnnnnnnnnnnnnnnnnnnnnnnnnnnnnnnnnnnnnnnnnnnnnnnnctgtgtgaaatggnnnnnnnnnnnnnnnnnnnnnnnnnnnnnnnnnnnnnnnnnnnnngagccacacgtttaaatacagacagctttcctgatcatttgatttattgtgcacctgatttttggtttaaaaggaattattgccacaatatattttatttattctttagattttagccttgtaagttaaagtgctttacatgatgatgtgaaaagctgtttgtccctttactgggtttggggggttgttaaaagatagggaatgaagaatgcaaaatggtttattgttcaaactgtccactctgatccaaccctgtactgatagtactttccagtatgatattgtgatgtttcatacaatgca

SEQ ID NO: 17547 - DNA, 834 bp, Macaca Fascicularis
  misc_feature (1)...(834): n = A,T,C or G
cacgtctgcatttcggtgggtagtcaagctcctcctccctgcatctgaccagcagcgcctttcccaactctagctgggggtggggcaggctgatgggacagaattggatacatnnnnnnnnnnnnnnnnnnnagcgccccccacccctgggggctgttttcaactgccaaaatgctctagtgccttctaaaggtgttgccccttctagggttattgcatttggattggggtcccnnnnnnnnnnnnnnnnnnatacacacatatgagggggaatagtctagatgactcctcagtactttggaggcccctatatnnnnnnnnnnnnnnnnnnntcctagagggaggggcctaggcctcagccagagaagctataaattcctctttgctttgttttctgctcagcttttgtgtgattgacagctttgctgctgaaggctcattttaatttattaattgctttgagcacaactgtaagaggacataacggggtcctggccatcccacaagtggtggtaaccctggtggttgctattttcctcccttctgctactggcaaaaggatcattgtggccgaggagctgctacagcctggggtggggtcatgccctcctctcctgttgtccctctgccccatcctccagcagagaaaatgcaacagggatgccctggaggtggctgagcccctgtctagagagggaggaagccctgttgacacaggtctttcctaaggccacaaggtttaggctggtggcccaggaccatnnnnnnnnnnnnnnnaagattgtgaaataaaactggaaaaaaaaaaaaaaaaaaaaaaaaaaaaaaaaaagg

SEQ ID NO: 17548 - DNA, 712 bp, Macaca Fascicularis
  misc_feature (1)...(712): n = A,T,C or G
aggacccctgtggnngttcccncnctcccagccaccacctgccacaccactcctgcctgatgctcggcagacgccactgtgccccggccttgggtctgccgagcctcctgccgcaggggacaggtgctctggccagagtcacagcccgacacatttcccactgtcctggaactctggaaagaggggctcccccacctgcctgccccccaggctcttctgggcctgccccttgggaactggcctcatcacactgggagttggtgcttcttgtctctgggtctccggagttcgccccgcctgtgcacacctcatattccagactccagccatcttggcaggatctcctggctccttgagtgcccaagtgccaccaagaggaagggccttgtgggatatgccttgcagaatagggattggtgtgcgctgctgctggggggtccccacggggactgtggcccctcggcaggcaggacattccaacccctggctgggactgaaccacccagagcagagcagctccctttccgaccttgcgagtcacctggcaggccccagctgggctggctgtccgtgtccctcggcctggctggtgactccctgcgggccggaaatgaagagtccctggaggtttgggttttgtttggtttattttgttctttcaccttttttcctcattaaaaaaaaaaagttcctgtggagtgtatttatttat

SEQ ID NO: 17549 - DNA, 729 bp, Macaca Fascicularis
  misc_feature (1)...(729): n = A,T,C or G
gaagcaaccaatganntttccctnnnntnctgttaattaatgtcacnnncaagnnnnnnnnnnnnnnnnntgtaaaaaatatagttgcnnntaattcttgagaggttactaatagcagtaggatagaattatatgaggttacgtacaactacttaatgttcttacactgtaagccttgttgctttacccaagacaaatgtaattttatcattgcttatgtagtagttttcttttggaaatgtgccttatgttaaacactatgtacttttactttctgcattgtccagacttctttattagatgaagatgtttctttttctgttttttaaactaaatagagtatcatccaaataatggggcctatgacttgaatgaatagaaatgaataaggtggtgttttttcaaaatggaagtaatttagatttgttctcctcatacataaaatgattttagttcagttttaaccagtgaaaactttgtttttatgaaaaaaaggaaaacggtttcctatttggttttatatgtgttaaataaatgtgtaaagtaaccaccaaatgttattagaattatttttctagcatttatacttttttcaactcctattgtgtttctttgtgtgtgatattttaatcaaaagtggttgagttgttaacagtgttctttgaaagaatttttgaaaggcttataaatgtttgaaatatcacacaaaggctgatttctaaaaaatat

SEQ ID NO: 17550 - DNA, 781 bp, Macaca Fascicularis
  misc_feature (1)...(781): n = A,T,C or G
tccagtatgtatgnnncnntgaaaattatattactttnnnnnntatnnnttttattctggatactaaggatgtgccaaatgagtcggatactaagattcatcctttgaagtcatctggtgttttatgcagttatcctcaacaacnnncagcgatgtctgaacttttcaaacatctgttagagcaaaattgaaagagcatttggtagtagtctttttgttcagttaacaagtggttgataaagtttccatatttttctggaaaagtttaaaaaaagttacatgtcatttggagaaaatatatagtcagaaatttttgcatagattgatgccaaaaaagacatttctagcattgtggaacatggtgagacactatataaaatttcagaaagaaagcaactggatttacagatttattgtgagacacaaattcactgctgcctttacactaagaaatgtatatgttaaccatatatgctgtatttattttgttaagcatacttttagtttactcagaattttcaatttgctataaaaatgtatcaattagcatatagaaaaatattactttaagatgacttgtttcctttgaaaatacatatgtactgagggttatgatttatatcagaaattgacataagtgcttttacaagcaccaaagttgaatgaattttcaacaaaatgtaattcaagtctatgttttcagatgtgactcaggttaagaaatgtgttttaggatctacttgctggtttttctttttgatccaaattgtatgatctgccc

SEQ ID NO: 17551 - DNA, 767 bp, Macaca Fascicularis
  misc_feature (1)...(767): n = A,T,C or G
cgannnnnnnnnnnnnnnnnnnnnggagnnnntcaagaacctggagcaagagatttcttttgactttggccccaacggggagtttgcctacctnnnnnnnnnnnnnnnnnagctcaccaccaacgagtacgtctaccgcctctgccccttcaagcttgtctcgcagaaacccnnnnnngggggctctcccaccagcctcggcacctggggctcctgggctggccccgagnnnnnnnnnnnnnnnnnnnnnnngtatgagcannnnnnnnnnnnnnnnnnagggccccaaccgctccaccaccgtgcgcctcctttgcgggaaagannnnnnnnnnnnnnnnnnnnnnnnnnnnnnncgctgtgagtacnnnnnnnnnnnnnnnnnnnnngccgcctgcctggagccnnnnnnnnnnncacccaccgaagacgaccatgacgagctctagctggatgggcgcagagaacctcaagaaggcatgaagccagcccctgcagtgccgtccacccgccccgtgtccggggctgcctgtggctctgttgccctcctctgtgggggcaggactttgtggggcttcgtgccctgtcctggggcccaagcaatgctggtccacattcccaggccccagcagcctccaaagatgggtaaaggagcttgccttccctgggccccnnnnnnnnnnnnntcaccccaccacccctagccctgtccctgccactcctcctggtggggaccagtgaatgacttgaccnnnnnnnnnnnnaca

SEQ ID NO: 17552 - DNA, 725 bp, Macaca Fascicularis
  misc_feature (1)...(725): n = A,T,C or G
tatgcacagggagcatcaggaaacttggccacggannnnnnngtctacatgctagagggcttgggcattcacacgggtgtgaatctccagaagattctggaagctgggaactttatctgtcaagccctgaacagaaaaactagctccaaagtggctcaggctacctgtaaactctgagccccttgcccacctgaagccctggggatggtatggaaataggtgcacacacagatgattcttggatgggaacacggaaatgagaatgaggttaaatggtgcaggtacctcacagccagatctacacagaggtctctcctggcagaaagcaggtgaggggcaggaggagctgcttggcagcaggaccccctgcccagacctgagtaggagcaagaggctttgagggctgaagtctcccttcattatggaccctggcccaggagttgaatccctgaggacatgtgggaaccccattccctacttggcatgatccttgagtctcctctctggatggaatctgtgagctggccacctggccgccctctacacagctccaccctgccatggccttggggcccttgctctctgacttctcaggacacaggtcatggggcttcttcccaagctggcagagaccatttgtggaaagtggagagctttgtgctggccatctgccaactccagcatctctagaaaatctccacgctgaatntgattttgaaaacagc

SEQ ID NO: 17553 - DNA, 728 bp, Macaca Fascicularis
  misc_feature (1)...(728): n = A,T,C or G
ccaggggccccgaggctggactcatgccacctgccaggtagtgtagtatcaggagtggagacaaagtgggctctgggttgggggaggggaagggagggctcagaaagaggaatcaagatgttatatgacaaaaaggaaagttactgagaacaaaaatccagattggtgagatgtgacacttgtnnnnnnnnnnnnnnnnngggccatctttattgtggattggtaagaatcaccaggaaaccattaagccccaatagctacaaggagggtggttaagccactacatcaaactccttctctggaaccaggaaacaccaagacatgtttcggctcattgtaatccggtgaacaatgcagtcaggcctgttataactgctgagcagtcatgctcgcaccacttgggtgctgtcgtctgtgttggcacaggcttttgcatgcctggtaaagtccagccaacgctggtgaaggccaacatctgcacacagaaagtctgcaccagttacgtactaaaaagttgtgtgaacccaggtgccccgggaaaggggctgcaggacacagcaaaatgccagcagtgtgccagacccctcccttgcatcctcctctccaaacagagctcaggaaaaacactgactgggatgatagaaaggccatgtgttaactataatcacatttatggtttggaaccatcaccccaaggtaaaaaataaataaataaaaggtattctcag

SEQ ID NO: 17554 - DNA, 699 bp, Macaca Fascicularis
  misc_feature (1)...(699): n = A,T,C or G
ccccctccaggcggcgcaccatgcaagctgggcagccaggctggagaggcagctaaggtgtttggaggcttccaggtggtaccggctcccgatggccagtttgctttcctcattcccaacggggccttcgcgcacagcggccctgtcatcccggtctacaccagcaacagcggcacctccgtgggccccaacgcagtgtcaccttccagcggcccctcgcttacggcggactccatgtggaggccgtggcggaactgagggggctcaggccacccctcctcctaaactccccaaccgacctctcttccctctggactgtaaacaggaacttgaatactgggagagaaaaggacttttttgattaagtggttactttgtgtttttttaatttctaaaaagttactttttgtagagagagctgtattaagtgactgaccatgcactatatttgtatatattttatatgttcatattggattgcgcctttgtataaaagctcagatgacatttcgttttttacacgagatttctttttatgtgatgccaaagatgttgaaaatgctcttaaaatatcttcctttggggaannnattgagaaaatataataaaagaaaaaagtaaaggcttttatgtcttagaactgactcttccaggatatgtaaaaaggctcttagtggaatttgaattacatgtaattag

SEQ ID NO: 17555 - DNA, 739 bp, Macaca Fascicularis
  misc_feature (1)...(739): n = A,T,C or G
ccagggccagcnnnngagcatcggaagtgcaccggcctgccgccttgcccagtggctgggggctgggggccttggggccctgtgagcccctgccctgtgacctgtggcctgggccagaccatagaacgacggacgtgcaatcgccctgtgccccagcatggaggcccctcctgagctggtgatgccacccggacccacatctgcaacacagccgcgccctgccctgtggatggagagtgggacttgtggggacagtggagcacctgtgtccgccggaacatgaagtccatcagctgtgaagaaatcccgggccagcagtcacgctggaggacctgcaagggccgcaagtttgacggacatcgatgtaccgggcaacaacaggatattcggcannnnnacagcatccaacactgccccttgaaaggatcatggtcagagtggagtacctgggggctgtgcatgcccccctgtggacctaatcctacccgtgcccgccagcgcctctgcacacccttgctccccaagtacccgcccaccgtttccatggtcgaaggtcagggcgagaagaacgtgaccttatgggggagaccgctgccacggtgtgaggagctacagnnnnnnnnnnnnnnnnnngaggagaaacgaccatgtctacacgtgcctgcttgcaaagaccttgagggagagaaactctaacacctctctcctccactctgagcaccctgacctccaaacctca

SEQ ID NO: 17556 - DNA, 733 bp, Macaca Fascicularis
  misc_feature (1)...(733): n = A,T,C or G
ccctttttgggatgcaatactaggaagtaaagtgagggatttatctcattagttagtggctatatttcacctatctctcaggaatcatctccnnnnnnnnntgatgcaggttcaggtcccttttcagagatgtaataagcccaataagatggagaagctggtggatctagtgaccagatatatagaaggactgcaaccactgattctctcttgtccttnnnnnnnnnnnnnnnnnnnnnnnagcttggcactcaggtcctgaagggtcacatggactcagccttgcaaacagccagtgctagttctgacccaaccacagaggatgctgacatcatttgtattatgttccaaggccactacagacaaggctacctactatgtatttgcaaggctgatttatggccagaatttcccactgacatgtatagggtgtgatttaggccagtagactgtgattcttagcaaaaaatgaaccgtgataannnnnnnnnnngcaaaatcagaatggaatgctctgatctannnnnnnnnnnnnnnnnnnnnnnnnnnnnnnnnnnnnnnnnnnnnnnnnaacctatgagggtgagctggttccctctatatatacatcatacttaactttactagtaatctcacagcatttgccaagtctcccaatacccaattttaaaatgaaatgcattttgctagacagttaaactggcttaacttagtatattattattaattacaa

SEQ ID NO: 17557 - DNA, 698 bp, Macaca Fascicularis
  misc_feature (1)...(698): n = A,T,C or G
acttgaaagtggaagagagaagttnctagtgtttgcacaccataaggtggtcctgnnnnnnnnnacacaggagcttgagagaaagcacnnnnnnnnnnnnnnnnnnnnnnnnnnnnnnnnnncggctgagcgggagnnnnnnnnnnnnnnnnnnnnnnnnnnnnnnnnnnnnnnnnnnnnnnnnnnnnnnnnnnnnnnnnnnnnnnnnnnnnnnnnnnnnnnnnnnnnnnnnnnnnnnnnnnnnnnnnagctgttttggaacccaggggtgctgatnnnnnnnnnnnnnnnnnnnnnnnnnnnnnnnnnnnnnnnnnnnnnnnnnnnnnnntacctcgtggcaaagnnnnnnnnnnnnnactacctttggcccctgattcaagagaagattaaagttctggcggaagctgggctttctgagaccaatttttcagaaatgacagaatccactgattacctctacaaggacccaaagcagcagcagatctatgacctattccagaagtcctttgagaaagaaggaagtgatatggagctcctggaagcagcagagtcctttgacccaggaagtgcttcaggaacatctggaagtagttcccagaacacgggagacaccctggatgaaagctcattgacagccagtccacagaagaaaaggagatttgaattttttgataactgggacagctttacctctc

SEQ ID NO: 17558 - DNA, 747 bp, Macaca Fascicularis
  misc_feature (1)...(747): n = A,T,C or G
gggctacacagtatataaggtcaccgcccggataattgtatgaagagatacagtgatttaagaaactacacaaagaactatggcaaattcacaaaaacttattccgacattcagaattgtttcctccatttgctaaaggaatagtgtttgatggaattttgctctnnnnnnnnnnnnnnnnnnnnnnnnnnnnnnnnnnnnnnnnnnnnnnnnnnnnnnnnnnnnnnnnnnnnnnnnnnnnnnnnnnnnnnnnnnnnnnnnnnnnnnnnnnnnnnnnnnnnnnnnnnnnnnnnnnnnnnnnnnnnnnnnnnnnnnnnnnnnnnnnnnnnnnnnnnnnnnnnnnnnnnnnnnnnnnnnctgacctcaggtggtccggcctccttggcctcccaaagtgctgggattacaggtgtgaaccacctcgcctggcccattttttcttgatttaacaacttttacatatctattgactcactactctggtgggtatttagcttgtttaccctgtttctctgtattattacataatgtttttagttcttctattgactttatttctcgttccgtaactgtggacagtatcatttgtctaagatgattctaatagcatttttgatcttcctcctaccccttcagctctcttcaccacttaacatttgaaatctatacttatattttaacatttgtcaaacggtggtgatatttatattctctttattggttataattaagcttgtaatgtataga

SEQ ID NO: 17559 - DNA, 306 bp, Macaca Fascicularis
accacattccagcttgggcaacagaacaagactgtgtctcaaagaaaaaaacaaagaaaaagaaaaatgacgtgtagcacacaattccatttacgtgatgttaattgaagtaacatacctgcagagatagagaacagataaatgggtgccaggggccaaggacaagggaggggatgggtgtcgccagaaaggggtaacacaaaggagtcttgtgataatggaatggttccagatttaaagggtggtggtagttatgcaaggctacatgtgataattttaaagggagctacacacgcgcatatataa

SEQ ID NO: 17560 - DNA, 773 bp, Macaca Fascicularis
  misc_feature (1)...(773): n = A,T,C or G
gacaagatgaaaaaggctgtggtgnttcagcgnctgacagaatctccatgtgctttggtggccagccagtatggatggtctggcaacatggagagaatcatgaaagcacaagcgtaccaaacaggcaaggacatctctacaaattactatgcgagtcagaagaaaacatttgaaattaatcccagacacccgctgatcagagacatgcttcgacgaattaaggaagatgaagatgataaaacagttttggatcttgctgtggttttgtttgaaacagcaacacttcggtcaggatatcttttaccagacactaaagcatatggagatagaatagaaagaatgcttcgcctcagtttgaacattgaccgtgatgcaaaggtggaagatgagcccgaagaagaacatgaagagacaacagaagacacgacagaagacacagagcaagacgaagatgaagaaatggatgtgggaacagatgaagaagaacaagaaacagcaaaggaatctacagctgaaaaagatgaattgtaaattannnnnnnnnnnnnnnnatcctgtgtggagagggaatgtgaaattgacgtcatttcttctgggagagacttgtttggatgccccccaccaatccccttctcccctgcactgtaaaatgtgggattttgggtcacaggaagaagtgggttttttagttgaattttttttaacattcctcatgaatgtaaatttgtactatttaactgactattcttgatgtaatcagtaacatagtacaa

SEQ ID NO: 17561 - DNA, 448 bp, Macaca Fascicularis
atgcaagtacaagtttgagaactggggagcgtctgatgggggcacaggcaccaaagtccgccaaggcaccctgaagaaggcgcgctacaatgcccagtgccaggagaccatccgcgtcagcaagccatgcacccccaagaccaaagccaaggccaaagccaagaaagggaagggaaaggactagagaccaagcctggatgccaaggagcccctggtgttacatggggcctggcccacgccccccctcttccaggcccgagatatgacccaccagtgccttctgtctgctcgttagctttaatcaatcattccctgccttgtccctctcactccccagccccacccctaagtgcccaaagtggggagggacaagggattctgggaagctttagcctcccccaaagcaatgtgagtcccagagcccgcttttgtcttccccacaattcca

SEQ ID NO: 17562 - DNA, 761 bp, Macaca Fascicularis
  misc_feature (1)...(761): n = A,T,C or G
tgcccctcccagaaggcatcaatgtggtnnnnnnttccatgggcatcagctgcnnnnnnnnnnnnnnntgcaatttcagtgcagnnnacggcgggctgcgggcaagcgctaccctgctgggcgccgggctgctgctgagcctgctgccggccctgctgcggttcggcccctgaccgcccagaccctgtcccccgatcccccagctcaggaaggaaagcccagccctttctgnnnnnnnnnnnnnnngggagcccctgacttctcacgtgcctgatctgtgcccttggtcccaggtcaggcccaccccctgcacctccacctgccccagcccctgccgctgccccaagtggggccagctgcccttacttctggggtcgatgatgtgaccttccttgggggactgcggaagagacgagggttccctggagtcttagggtccttcgtcaggaccaagtcccatggacacgctgacagcccccagggaggctgtgtcagtagggatgtgtgcctagctgtgtacgtgggtgtgcagtgcatgtgggagcacgtggcggcttctgggggcggtgtttggggagggaggggtgccggcagcctggagagcctcagtctcctgtagcccctgccctggcacagccgcatgcccatcaagggcagcctttgggagctgggatttctgctgcttccaggtctaggccccgccccaaatccagccagtcctgccccagcccacccctacattggagccctcctgctgctgt

SEQ ID NO: 17563 - DNA, 816 bp, Macaca Fascicularis
  misc_feature (1)...(816): n = A,T,C or G
agtacatgagncttcaacgacgagctagaagccttcaaggagcgtgtgcggggccgtgccaagctgcgcattgagaaggccatgaaggagtatgaggaggaggagcgcaagaagcggcttggccccggcggcctggaccctgtcgaggtctacgagtccctccctgaggaactccagaagtgcttcgatgtaaaggacgtgcagatgctgcaagacgccatcagcaagatggaccccaccgacgnnnaagtaccacatgcaacgctgcattgactccggcctctgggtccccaactctaaggccagtgaggccaaggagggagaagaggcaggtcctggggacccgctgctggagnnnnnnnnnnnnnnnngagatgagaaggatgtcagcgtgtgacctgccccagctaccaccaccacctgcttccaggcccctatgtgccccttttcagaaaacggatagatgccatctcgcccgctcctggcttcctccacttgcgctgctcggcccagcccggggggcccgcccagccctccctggcctctccactgtccccactctccagcgcccattcaagtctctgctttgagtcaagnnnnnnnnnnnnnnnnnnnnnnnnnnnnnnnnnnnnnnnnnggcccgggggtccggggaggggcagaggttgccaggctggtccaccaggtagtaggggagggtccccagccaaggggccagctctggtcactgggctctgttttcactgttcgtctgctgtctgtgtcttctatttggcaaacagcaatgatgttccaataaagaattcagatgctctc

SEQ ID NO: 17564 - DNA, 773 bp, Macaca Fascicularis
  misc_feature (1)...(773): n = A,T,C or G
agttcattttgtcatataggcactgggtnnnnnnnnnatcatcatcgtctatnnnnnnnnnnnnnnnnnnnnnnnnnnnnncatatgatatcatggtgtaaaaaaaaaaacacacatacacaaatatttgtannnnnnnnnnnnnnnatgggcctcaaagattcaaagattgaaacaaacaaaaaagcttttgatggaaaatatgtgggtggatagtatatttctatgggtgggtctaatttggtaacggtttgattgtgcctggttttatcacctgttcagatgagaagatttttgtcttttgtagcactgataaccaggagaagccattaaaagccactggttattttatttnnnnnnnnnnnnnnnnnnnnnnnnnnnnnnnnnnnnnattgtttttttacactgtggtacatataagcaactttaataggtgataaatgtacagtagttagatttcacctgcatatacatttttccattttatgctctatgatctgaacaaaagctttttgaattgtataagatttatgtctactgtaaacattgcttaatttttttgctcttgatttttaaaaaagttttgttgaaagnnnnattgaatatnnnnnnnnnnntagtgtattggatggcttcttttgtcaccctgatctcctatgttaccaatgtgtatcgtctccttctccctaaagtgtacttaatctttgctttctttgcacaatgtctttggttgcaagtcataagcctgaggcaaataaaactccagtaatttc

SEQ ID NO: 17565 - DNA, 912 bp, Macaca Fascicularis
  misc_feature (1)...(912): n = A,T,C or G
attcaaattgaccacannnngcagatggcatatcagannngccagtcaataaatttttacatcataataaattaacccnnnnnnnnnngaagcctgaaaatannnnnnnnnnnnnnnnnnnnnnnnnnnnnnnnnnnnnnnnnnnnnnnnnnnnnnnnnnnnnnncactgaaaaacacagatatcaaagtgttgactttgaagtnnnnnnnnnnnnnnnnnnnnnnnnnnagtactttggtgtctaccnnnnnnnnnnnnnnnnnnnnnnnnnnnnnggctttaggttggtctcagccttgtgatgtttggagcataggttgcattcttattgaatattaccttggtttcacagtctttcagactcatgatagtaaagagcacctggcaatgatggaacgaatattaggacccataccacaacacatgattcagaaaacaagtgcaggggtccccaaacgtacaacaggagatgagtggcagaaaacgcaagtattttcaccataaccagctagattgggatgaacacagttctgctggtagatatgttaggagacgctgcagaccattaaaggaatttatgctttgtcatgatgaagaacatgagaaactgtttgacctggttcgaagaatgttagaatatgatccaactcaaagaattaccttggatgaagcattgcagcatcctttctttgacttattaaaaaagaaatgaaatgggaatcagtggtcttactatgtacttctctagaagagattacttaagactgtgtcagtcaactaaacattctaatatttttgtaaacattaaattattttgtacagttgtgtaaatactgtatgttttgtatcaatagcataattaacttgttaagcaactgtggttcttgataatgcaatagaaaaataaaat

SEQ ID NO: 17566 - DNA, 779 bp, Macaca Fascicularis
  misc_feature (1)...(779): n = A,T,C or G
tatgtatgtatnntcagtatannnnnnnnnnnnnnnnnnnnnnnnnnnnnnnnnnnnnnnnnncgtattatgtgttagatgctttaatgnnnnnnaaatctgtcttgtgaatggactgtnnnnnnnnnnnnnnnnnctgttttgaagtgctattacctttctcagttaccagaatcttgctgctaaagnnnnnnnnnnnnnnnnatggatttttaacaaataagtctttgtttttgaaaaacaaaaatcaaaagcagtaactattttatatggaaatgtgtcttgataatattacctattaaatgtgtatttatagtacctcctatcaaacaannnnnnnnnnnnnnnattgtcatcgggtatatatgtatttactctctattattggtcatagaggtggcttctgctccagaactctatccaccgtatttctacatcgtgagtcattttactttaaaagggaaaaacaaatttgtagcaactatgaagtatcaaaaattttaactatgtgtcactcttttgctaagaagggatttttgaatatgctatctggaatctacctggaatctctctctcaacaaaatgtatgccttcaggaatgatataacctgtcccattttcnnnnnnnnnnnnnnnngacatttccatgtatgtccttacatttctgaaaggtttcaaccttcaagagacaaaaaaaaattcaaataactacccnnnnnnnnnnnnnnnnnnnnnnctcaagtatgaatttttaatgcancnnatgttgactttgttca

SEQ ID NO: 17567 - DNA, 741 bp, Macaca Fascicularis
  misc_feature (1)...(741): n = A,T,C or G
aaatatgaccagtcnnnnngcccgagtgggctcnnnaagctggaacagctatatcctctccagtggttcacgttctggccacatccaccaccatgatgttcgggtagcagaacaccatgtggctacactgagtggccacagccaggaagtgtgtgggctgcgctgggccccagatggacgacatttggccagtggtggcaatgataacttggtcaacgtgtggcctagcgctcctggagagggtggctgggttcctttgcagacattcacccagcatcaaggggctgtcaaggccgtagcatggtgtccctggcagtccaatgtcctggcaacaggagggggcaccagtgatcgacacatnnnnnnnnnnnnnnnnnnnnnnnnggcctgtctgagtgctgtggatgcccattcccaggtgtgctccatcctctggtctccccactacaaggagctcatctcnnnnnnnnnnnnnnnnnnnnnccagctggttatttggaagtacccaaccatggccaaggtggctgaactcaaaggtcacacatcccgggtcctgagtctgaccatgagcccagatggggccacagtggcatccgcagcagcagatgaaaccctgaggttatggcgctgctttgagttggaccctgcccggcggcgggagcgggagaaggccagnnnnnnnnnnnnnnnnctaatccaccaaggcatccgctgaagactaacccatcacctcagttgttt

SEQ ID NO: 17568 - DNA, 576 bp, Macaca Fascicularis
  misc_feature (1)...(576): n = A,T,C or G
cannnnnnnnnnnnnnnnnnnnnnnnnnnnnnnnnnnnnnnnnnnnnnnnnnnnnnnagctgctcgagaagctgaagcacaggaatcacttgaacctgggaggtggaggttggaggtggagccgagatcatgctggtgcactcttcagcctgggttacagagtgagactctttaaaaaaaaaaaaaaaaaaaaaaaggagaaaatggacaaagtctccaggctggtcannnnnnnnnnnnnnnnnntcttcccacctcagcctcccaagcagccgggaccacaggcnnnnnnnnnnnnnnnnnnnnnnnnnnnnnnnnnnnnnnnnnnnnnnnncctgccccagaacctcaagaaggcatgaagccagcccctgcagtgccgtccacccgccccgtgtccggggctgcctgtggctctgttgccctcctctgtgggggcaggactttgtggggcttcgtgccctgtcctggggcccaagcaatgctggtccacattcccaggccccagcagcctccaaagatgggaaaggagcttgccttccctgggccnnnnnnnnnnnnnnntcaccccaccac

SEQ ID NO: 17569 - DNA, 752 bp, Macaca Fascicularis
caggaccagaagacggtggagttcaaaatagacatcgtggtgctagctttccagaaggcctccagcacagtctataagaaagagggggaacaggtggagttctccttcccactcgcctttacacttgaaaagctgacgggcagtggcgagctgtggtggcaggcggagagggcctcctcctccaagtcttggattaccttcgacctgaagaacaaggaagtgtctgtaaaacgggttacccaggaccccaagctccagatgggcaagaagctcccgctccacctcaccctgccccaggccttgcctcagtatgctggctctggaaacctcacgctggcccttgaagcgaaaacaggaaagttgcatcaggaagtgaacctcgtggtgatgagagccactcagttccaggaaaatttgacctgtgaagtgtggggacccacctcccctaagctgacgctgagcttgaaactggagaacaaggggacaacggtctcgaagcaggcgaaggcggtgtgggtgctgaaccctgaggcggggatgtggcagtgtctgctgagtgactcgggacaggtcctgctagaatccaacatcaaggttgtgcccacatggcccaccccggtgcagccaatggccctgattgtgctggggggcgttgcgggcctcctgcttttcactgggctaggcatcttcttctgtgtcaggtgccggcatcgaaggcgtcaagcagagcggatgtctcagatcaagagact

SEQ ID NO: 17570 - DNA, 781 bp, Macaca Fascicularis
  misc_feature (1)...(781): n = A,T,C or G
ggatgaccagaaatttcaggtganncctccaggcttnnnnnnngtctttttaccctttgctgatgataaaaggaagatgcccnnnactgaaaaaatcatgcaactccagagcaggtggacaagatgaaggctatcgttgagaagcttcgcttcacatacagaagtgacagctttgagaaccccgtgctgcagcagcacttcaggaacctggaggccttggctttggatttgatggagccggaacaagcagtggacctgacattgcccaaggttgaagcaatgaataaaagactgggctccttggtggatgagtttaaggagcttgtttacccacnnnnnnnnnnnnnnnnnnggaaagttaccaagagaaaacacgataatgatggttctggaagcaaggcccaaggtggagtattcagaagaggagctgaagacccacatcagcaagggcacgctgggcaagttcactgtgcccatgctgaaagaggcctgccgggcttacnnnnnnnnnnnnnnnnnnnnnnnnnnnnnnnnnnnnnnnnnnnnnaccaagcacttccaggactgaccagacaccgcgcgtccagctgcccttccacagtgtggccaggctgcctggccttgtccttagccagttaaaatgtgtttctcctgagctaggaagagtctacccgacataagttgagggactttatgtttttgaggctttctgttgccatggtgatggtgtagccctcccactttgctgttccttaccttactgcctgaataaagagcccta

SEQ ID NO: 17571 - DNA, 671 bp, Macaca Fascicularis
  misc_feature (1)...(671): n = A,T,C or G
tatggccacnnnnnnnnnncaatggcagagctgagcagtcgtggcagagaccatttggccagcgaagcgtaaaacacatactgtctgcaggggcttcctgggtggaggggggnnnnnnnnnnnnnnnnnnnncctctggattgagagctcttcctcccccagggaagagcttgcccacctcctccctagcggggacatcgaagctcacctttacagagcactttctctgtgttctgtgccacccaagcccatacccaggcccagtgagctctgtgcattggtcatccccctcactgcagggggaggccccagataccacccacgggacacattcgtgtgtgaagtgccacactagggcccagaagggacagctccccaccaggtagggacaaagcaggggtgaagnnnnnnnnnnnnnnnnnctaagggctggacgcttcagtatgggaaatgtgtgggcggggttgcggagggggttggtaaggggctcaggaacaacacagatgtgttcagagacagggcgggtcattagatttgatggaggcttggggtccctgagcttagaaagcccccatggaaaccaagtcacaggaatccagggtaatgaagactgcccagacttttctaggagatacatccccaaagacgtcctctcgtggctccatttgggc

SEQ ID NO: 17572 - DNA, 757 bp, Macaca Fascicularis
  misc_feature (1)...(757): n = A,T,C or G
ctgcatacatagaaatgcaaacagttggcnnnnntgaaaatgcaatcgggtggtatcatagccatcctggctatggctgctggctttctgggattgatgttagtactcagatgctcaatcagcnnnnnnnnnnnnnnnnnnnnnnagtggtgattgatccaacaagaacaatatctgcagggaaagtgaatcttggcgcctttaggacatacccaaagggctacaaacctcctgatgaaggaccttctgagtaccagactatcccacttaataaaatagaagattttggtgtacactgcaaacaatattatgccttagaagtctcatattttaaatcctctttggatcgcaaattgctcgagctgttgtggaataaatattgggtgaatacgttgagttcctctagcttgcttactaatgcagactataccactggtcaggtctttgatttgtctgaaaannnnnnnnnnnnnnnnnnnnnnnnnggacgagggagtttcatgctgggtttggaaacgcatgacagaaaatcagaagacaaacttgccaaagctacgagagacagctgtaaaactaccatagaagctatccatggattgatgtctcaggttattaaggataaactgtttaatcaaattaacatctcttaaacggtctctgagaagtactttannnnnnnnnnnnnnngagaaaaatattcaagtaacactttaaaaccagttacccaaaatctgattagaagtataaggtgctctga

SEQ ID NO: 17573 - DNA, 195 bp, Macaca Fascicularis
  misc_feature (1)...(195): n = A,T,C or G
cgccccctccctactcccagacacccaccctcgcttcagccacggtttcctnnnnnnnnnnnnnnntgggttggactggaaaatctctttttgactctcgcaatccacaatctgacattctcaggaagcccccaagttgatatttctatttcctggaatggttggattttagttacagctgtgattggaagggaa

SEQ ID NO: 17574 - DNA, 1220 bp, Macaca Fascicularis
  misc_feature (1)...(1220): n = A,T,C or G
acggttgatgacatgactaaacttgtgctagtaaatgccatctattcangggaaactnnnnnnnnnnnnnnntgaaagaggccacgacgaatgcaccgttcagactgaataagaaagacacaaaaactgtgaaaatgatgtatcagaagaaaaaatttgcatatggctacatcgaagaccttaagtgccgtgtgctggaactgccctaccaaggcaaggagctcagcatggtcatcctgctgccggatgacattgaggacgagtccacgggcctgaagaagattgaggaacagttgactttggaaaagctgcacgagtggaccaaacctgagaatcttgatttcattgaagttaatgtcagcttgcccaggttcaaactggaagagagttacaccctcaactcagaccttgcccgcctaggtgtacaggatctctttgacagtagcaaggctgatctgtctggcatgtcaggagccagagatatttttatatcaaaaattgtccacaagtccttcgtggaagtgaatgaagagggaacagaggcggcagccgctacagcgggcgtcgccaccttctnnatgttgatgccagaggaatacttcactgccgaccatccattccttttctttattcggcacaattcctcaggtagcatcctgttcttgggcagattttcttccccttagaagaaagagactgtagcaatacaaaaatcaagcttagagctttattacctgagtttttaatggtgccaacgttcttctatctttaccaannnnnnnnnnnnnnnnnaacaaatcttttattttctttttaacttcggctcnnttggnngtttacacccatgaatttccccatgggtatctacttttctttttttacatcgaaaaaatccannnnnnnnnnnnnnnnnnnnnnnnnnnaagagaaaaaaagaatacatcagatgtgtagattcttgaccatgttgtgatctatgaaattgctatatcctcctgacagctatggggaaacatgataagatggtcatttattttgcagttagaattttgggagccgtgaaatagacagacaccctgactgttgaagggaggtttaaaaacacatattcaattgaaatataagagagcaccccaactgagagcccaggttatgaagacaaacttgtctcgcctgatgtttctatccgttgttctgcaggattagtattctgttacagc

SEQ ID NO: 17575 - DNA, 1036 bp, Macaca Fascicularis
  misc_feature (1)...(1036): n = A,T,C or G
aacgagtgacattggctgacatcacagtnnnnngnnnnnngttgtggcncnataagcaggtcctagagcctncnnnnngccaggnnnttcccaataccaaccgctggttcctnnnnnnnattaaantcagccccagttccgggctgtcttgggggaagtgaagctgtgtgagaagatggcccagtttgatgctaaaaagtttgcagagacccagcctaaaaaagatacaccacggaaagagaagggttcacgggaagagaagcagaagccccaggctgagcggaaggaggagaaaaaggcggctgcccctgctcctgaggaggagatggatgaatgtgagcaggcgctggctgctgagcccaaggccaaggaccccttcgctcactttgcccaagagtacctttgtgttggatgaatttaagcgcaagtactccaatgaggacacactctctgtggcactgccatatttctgggaacactttgataaggacggctggtccctgtggtactcagagtatcgcttccctgaagaactcactcagacnnnnnngagctgcaatctcatcactggaatgttccagcgactggacaagctgaggaagtatgccttcgccagtgtcatcctctttggaaccaacaatagcagctccatttctggagtctgggtcttccgaggccaggagcttgcctttccgctgagtccagattggcaggtggactacgagtcatacacatggcggaaactggatcctggcagcgaggagacccagacgctggttcgagagtacttttcctgggagggggccttccaggcatgtgggcaaagccttcaatcagggcaagatcttcaagtgaacatctcttgccatcgcctagctgcctgcacctgcccttcagggagatgggggtcataaaaggaaactgaacattgaaccctttcctgtcctgcctcctctgtgagtggtggcgtctccaaggggagtaaacatgttgaagcagggtgctttctgtgtttgcagtacctcgatatgcagga

SEQ ID NO: 17576 - DNA, 786 bp, Macaca Fascicularis
  misc_feature (1)...(786): n = A,T,C or G
gaatgaaaattgtacatgagctttaagcatcatgannnacagtttatgttcacattaagatacgttctaatggggatggccagggggtgacatcttaattcctaaactaccttagctgcatagtggaagaggagagcatgaagcaaagaattccgggaaacccaagaggctgagaattcttttgtctaccatagaattattatccagactggaatttttgtttgttagaacacccttcagttgcaatatgctaatcccactttacaaagaaagaatataaaagctatattttgaagacttgagttatttcagaaaaaactacagccctttttgtcttacctgccttttactttcgtgtggatatgtgaagcattgggtcgggaactagctgtagaacacaactaaaaactcttgtcttttttcacagaataatgtgccagttttttgtagcaatgttatttctcttggaagcagaaatgctttgtaccagagcacctccaaactgcattgaggagaagttccagaaccatcccctttttccatttttatataatttataaagaaagattaaagccatgttgactattttacagccactggagttaactaacccttccttgtatctgtcttcccaggagagaatgaagcaaaacaggaatttggttttcttttgatgtccagttacaccatccattctgttaattttgaaaaaaatataccctccctttagtttgttgggggatataaattattctcaggaagaatataatgaactgtacagttact

SEQ ID NO: 17577 - DNA, 727 bp, Macaca Fascicularis
  misc_feature (1)...(727): n = A,T,C or G
aagagtaattgatgggtactttatctacattatccattttgggtttaaagccttcatttaccattattgtatgttggaaattcttattttctttattttctatgtgactttctggaccttagagagtgtcctctcatcatctaggatgtaagtnnnnnnnnnnnnnnnnctgggggatatgacatcccatctgagttgtcctgttacttaggtatccttgaagggactaaccattgtcttgatactgatttgatgcaacatagatgtaaaagagtattactcagttgaacacaagagggcactgtaaaatcttgtgtccggtttatttctgatgttgaaggctgacaatcttttagtaannnnnnnnnnnnnnnnnaaagtgtgtgatagagcacacctgggtgtgccttgcggcaacaacacttgtgttccaggtgtgaagtgatgggacattggcaggcccagtgatggaagcagctagtaaactattctctttgctgatacctagtgcattaagtttattgctttgtgaaaggtaaggaaagaggccagttgtttgagtggtggggaaaattttgttttttctagccagcttaggaactcaggattggttttatccaagctagtnnnnnnnnnnnnnnnatctcttgccaggaaaagatgagtgttaggtcaaaggttttacttgagtctcccctagatatcgggagaaaagacataagagaat

SEQ ID NO: 17578 - DNA, 713 bp, Macaca Fascicularis
  misc_feature (1)...(713): n = A,T,C or G
taaagctctgaacaaaagcttttctttcccnnngcaacaagacacagcaaagccacattttgcattagacagatgatggctgctcgaagaacaatgtcagaaactcattgaatgtgttgatttgagaaattttactgacagaaatgcaatctccctagtctgtttttgtcctgttatttttttatttccacataaaggtatttagaacatattaaattgttagaggagcaacaggaaatgagagttcaagattgttctgtccaatttccaaagggcagtaaagcttttgtgcctgtttttagctattagcaactgtgccacacttgcacctattactgcacattttgtacaaagatttgctaagcagtagttgtcaagtttcagatctttttgtgaaatgcaacctgtgtctcataggtttacactgccaaaacaatgcccgtaagatggcttatttgtataatggtgttactaaagtcacatataaaagttaaactacttgtaaaggtgctgcgcgggtcccacgtagtagtgtcttcctaatatattagtttgatttaatatctgagaagtgtatatagtttgtggtaaaaagattatatatcatgaagtatgccttcttgttttaaaaaannnatatattctacacatatatgtatatgtatatctatatctgaactgctgttaattgattaaaatttggcaaagttata

SEQ ID NO: 17579 - DNA, 775 bp, Macaca Fascicularis
  misc_feature (1)...(775): n = A,T,C or G
ctttagaagtggaacgacaggaaaatgannnnagagattatttatacaaangaaagaacaactgcagcagattctaaaaaggaagaataagcaggcttttttagatgagctggagagttctgatctccctgttgctctgcttttggctcagcataaagatagatctacccaattagaaatgcaacttgagaaacccaaacctgtaaaaccagtgacgttttccacaggcatcaaaatgggtcaacatatttcactggcacctattcacaagcttgaagaagctctgtatgaataccaaccactgcagatagagacatatggaccacatgttcctgagcttgagatgctaggaagacttgggtatttaaaccatgtcagagctgcctcaccacaggaccttgctggaggctatacttcttctcttgcttgtcacagagcactannnnnnnnnnnnnnngggcttttctggcagcccagttaaccatttataagatttggaccttggagctgaaccagtgagctagcaaaagtaaagcagccttgtaaaattatagctatatgcagctgcacaacacagtcctaccactagcagctgtgttaaagtatttataaagagaaaatttcagaactaacttgaggaatataggggatatatatttgtgaaaaagaatttttacttatatttttcagaggatttgacacaataagcctcatctgatggaagagaggaataaataattcacttatgtgtgttggaggttgacagacttataaa

SEQ ID NO: 17580 - DNA, 724 bp, Macaca Fascicularis
  misc_feature (1)...(724): n = A,T,C or G
agagccctgcactttgttttttcnnntggcttcatcaactacatcagtggcacccctcatgctctgattgtgcgtcgctacctctccctgctggacacagccgtggagctggagctcccaggataccggggtccccgccttccccgaaggcagcaagtgcccatctttccccagcctctcatcactgaccgtgcccgctgcaagtacagtcacaaggacatagtagctgaggggttgcgccagctgctgggggaggagaaataccgccaggacctgactgtgcctccaggctactgcacagacttcctgctgtgcgtcggcagctctggtgctgtgcttcccgtgaggacccaggaccccttcctgccatacccaccaaggtcctgcctacagggccaggctgcctctagccccactactcgagaccctgctcagagggtggtgctggtgttgcgggaacgctggcatttctgccgggatggcagggtgctgctgggctcgagggccctgagggagcggcacttgggcctgatgggctaccagctcctgccgctacccttcgaggaactggagtcccagagaggcctgccccagctcaagagctacctgaggcagaagctccaggccctgggcctgcgctgggggcctgaagggggctgaggggatgatgtggggttcaggatggcccccccatggggggtggatgatttgcactttggttccc

SEQ ID NO: 17581 - DNA, 765 bp, Macaca Fascicularis
  misc_feature (1)...(765): n = A,T,C or G
caggagcacatttacaaactgatgaaaagtgattcatannnncgttttataagatacaccaacaatcagggccagctactacaggcaaagaaaaaggggnnnnnnnnnnnnnnnnnnnnnnnnnnnnnnnnnnnnnnnnncttactaaatggatcatcttgtagcatgaatgcagactggagtcactgcacatactttgtagctcgctgttgtgatctggagcagaggacattagaacaagatgttgcatgagcaaaggacctaaattgttatttgtgtgtgtacattccatctccagtggactcttccatctcaatgcctccattccaaactgttgtctgctttctttctccctctacttaccctggatctgtgtcttttcctttttaacaagtnnnnnnnnnntaaaaccttttctttttttccttctctctctctctctctctcaaagcttcagctagacacacagttcactgaannnnnnnnnnnnnnnaaactggaagaactgtaaaagaaaaaagtatatatcaataagtatacatacggcttcacatttattaaacagtaaattcgcacagaaagtttcatttcaccagtgtatccacagtcggaaagaaactcctgtctttgtctgttgtctgtacattctccgttaatgtttcttgcatttatttttataccatatttaaagaagaaacaccttttactccaaatgtattaaagttgttccnnnnnnnnnnnnnnnntgtatgtttatattgttgt

SEQ ID NO: 17582 - DNA, 750 bp, Macaca Fascicularis
  misc_feature (1)...(750): n = A,T,C or G
gtnnnnntctacncccagaaaggacaatgtcccctattnnnnnnnnnnnnnnnnnnnnnnnnnnnnnnnnnnnnnnnnnnnnnnnnnctccagaaccaatagaaatcagtgcnnnnnnnnnnnnnnncagagtctccccggaccggcagtcatcatggcagtttcagcgttcaaacagtaatagttnnnnnnnnnnnnnnnnnnnnnntaataaaatccacattcacttaggaagtccttacatgcaagctgtagccagccctgtgagacctgccagcccttcagcaccactgcaggataaccgaactcnnnnnnnnnnnnnnnnggcactaaacaaaacaaccaataaagtcaccagcagtattactatcacaccaacagccacacctcttcctcgacaatcacaaattacagtaagtaatataaataactgaccacgctcaccctcatccagtccatactgatatttttgcaaggaactcaatccttttttaatcatccctccatatcccccaagactgactgaactcgtactttgggaaggtttgtgcatgaactatacaagagtatctgaaactaactgttgcctgcatagtcatatcgagtgtgcacttactgtgtatcttttcatttacaaacttgtatggaaaatatatttagtctgcacttgtataaatacatctttatgtatttcattttccataactcactttaatttgactgcaacttgtcttggcaaaatacttaaca

SEQ ID NO: 17583 - DNA, 819 bp, Macaca Fascicularis
  misc_feature (1)...(819): n = A,T,C or G
cnagccagttgctcatattgnnnnnnnnnnnnnnnnnnnnnnnnnnnnngccgannnnnntgaggaggtcagtttnnnnnnnnnnnnnnnnntgctcaanattacaggttgtgccagccctggaaaaacagttacaattgttgttcgtggttctaacaanatggtganngaagaagcagagcgctccattcatgatgccctatgtgttattcgttgtttagtgaagaagagggctcttattgcaggaggtggtgctccagaaatagagttggccctacgattaactgaatattcacgaacactgagtggtatggaatcttattgcgttcgtgcttttgcagatgctatggaggtcattccatctacacnnnnnnnnnnnnnnggcatgaatcccatttctacagtaacagaactaagaaaccggcatgcccagggagaaannnnnnnnnnnnnnnatgtccgaaagggtggtatttccaacattttggaggaactggttgtccagcctctgttagtgtcagtcagtgctctgactcttgcaactgaaactgttcggagcattctgaaaatcgatgatgtggtaaacactcgataatctnnnnnnctgactagcaccattatgnnnnnnnnnnnnnnnnnnnnnnnggaagatgatcaccttggtgttccttgtttggaagattatttcctctgaatttttgggcttggtcttccagttggcatttgcctgaagttgtattgaaacaatttaatgaaaatattaaatatttggtttcaaaaggcagattgatttatcttctcccaacattctgctgttat

SEQ ID NO: 17584 - DNA, 1170 bp, Macaca Fascicularis
  misc_feature (1)...(1170): n = A,T,C or G
tagtcagagcacctatcannnnnnnnnnnnnnnnnngcaactgatggaaaatgtaagagggagttcttaagnnncttggtggcatcannnaaggcattctgggaaaacctagggcctgtccccaaaacttccctactctgtggctagtcnnnnnnnnnnnnnnnnngtagtgacctggcnnnnnnnnnntttgcttttatttctaagtcaaggacaagcagcnnnnnnnnnnnnnnnnnnnnnnnnnnnnnnnnnnnnnnatatattccttgctttccagggagaatgtacttggcaaggtctggagaactaattcagaatcttagggaaaggggaggagagatggaaatacaatctgcttactggaaaggtgcaaatatatgggttgagctggaggtaggaatacaggtaattaaggtttctagtttaagggaaaacagatctatttccacttaaataaggtaaccaggatttggttaagttcacaaagatagcagaagatttatttacaggcttcacccgtaccatcaggggaagagaaagcctggtaaaccagctatagcagtttactggtgtgatggctgcgacacagctccgctccacggttggacacagcagagggcagctgggctggcccggtccagtgtgannnnnnnnnnnnnnnncacacatggtacatgtgattttcttttgtgagccttacaccaagccaagctattgtcaaagcatcatttcannnnnnnnnnnnnnnnnnnnnnncctgttctattacaacctgccacatccaccctttcctacctagatttaatgagcccaggtttttttacatggaggaaatgactctggggcaaagacccctaatgnnnnnnnnnnnnnnnnnnnnnnnnnnnnnnnnnnnnnnnnnnnnnnnnnnnnnnnnnnnnnnnnnnnnaccttaagtggaaaccaaagttatcaagaaagcacaaagtattaatagaagtttctggttggggtgatttaggtacaacagaaataagacggtttctaagcataaagccatttaagaattcctgagtagggtggggaaagcaannnnnnnnnnnnnnnnnnnnnnnnnnnnnnnnnnnnnnnnnnntatgggcaaaagctcgtgtcacaggtttttgggaactagcctataagagggcc

SEQ ID NO: 17585 - DNA, 741 bp, Macaca Fascicularis
  misc_feature (1)...(741): n = A,T,C or G
agtgttaaaagaccnnnacaacagccaannntcccttttgcagttgcaaaccaactcttgcttnnnnnnnnnnnnnnnnnnnnnnnnnnnnngcatgaaccaaacccacnnnnnnnnnnnnnngtgtttaagtaaacagcttggtactttactgactagtcttggtaaacaagtgactgtacagggtactttgccagacctttatcaaaatgggactgctgtcttctttcacttgtannnnnnnnnnnnnntcattgagactacatcacaacagagctattactcacctaatgaggtccgctaaagagagagttcgtcaggatccctgtgaggatgtttctcatattcagaaaatcagatcaagggaagtcgccttcgaagcacagacttcacgttacttaaatgaatttgaagaagttgccatcttaggaaaaggtggatacggaagagtatacaaggtcaggaataaattagatggtcagtattatgcaataaaaaagatcctgattaagggtgcaactaaaacagattgcatgaaggtcctacgggaagtgaaggtgctcgcaggtcttcagcaccccaatatcgttggctatcacactgcgtggatagaacatgttcacgtgattcagccacgagcagacagagctgctattgagttgccaactctggaagtgctctccgaccaggaagaggacagagaacaatatgatgttaaaaatgatgaaagtagcagctcat

SEQ ID NO: 17586 - DNA, 728 bp, Macaca Fascicularis
aaaatgtattcattaccctggccccacagatgcttccctccatactttttatttgctctgtttcctcagatttattttgtcctgccccattgcctctccttccctgaactctttccttttcaatctcaactcattcactgctgttgcttgtttgcccttttccatgtattttttcctacttaggattttccactctatctttgtggttcatgaggactttgcctcttctcctgcctcattccctgactttctctagttagatgccagtcctaaataggttttcctcatttcaggcctcacccctcaccttgtttttggggggctccagggaccaatctggggctgaaaatgttaggaggtggccttggtgctgccccagatctgtccagcagggagcagtaagtgatcttggtagtatccctggctactaagcccttggcaggggtggtcctttctacattcccattcacttaacagctcttttgggattgggtatttcattccatttctgcccactccctctcctctcctctcctctggtaggtttaattttatgctttccctgattccagcttcctgcttcctgaggactccccgctccccccaccccaaagtttgtctgtggtgttatagtggtaactgcagttccttctctggaatgtagactgtatatgtttaataactcaccttctctatccttgctcaaaatgtgggataacacgatgact

SEQ ID NO: 17587 - DNA, 691 bp, Macaca Fascicularis
  misc_feature (1)...(691): n = A,T,C or G
actgacaggactgcaagaggaagaaagaattttgtcaattaaaattattctgtattgcaactttnntcagagattgcaaaggattttttaagtagagattacttttccttatgaaaaatgatctgttttaaatgcgataaaataggagaagttcctggcttaacctgttcttacatattaaagaaaagttacatactggatttatgaaatactcagcttaggtatttttactttaatccctaaattgattttgtaaatgacacaaatgcatagaattgttgccaacctccaaagggctctttaaaatcatttgaggatgtcttataaagactgaaggcaaaggtcagattgcttatgggtgttatttttataacttgttgaatttcttaatttaaaaaagctcattattttctgcacactcacactctctcagaaactagtggcatttgaaccaccaaaaagaaataaagggctgagtgtgnnnnnnnnnnnnnnnnnnnnnnnnnnnnnnnnnnnnnnnnnnnnnnnnnnnnnnnnnnnnnnnnnnnnnnnnnnnnnnnnnnnnnnnnnnnnnnnnnnnnnnnnnnnnnnnnnnnnnnnnnnnnnnnnnnnnnnnnnnnnnggcacnnnnnnnnnnnnnnnnnngggaggctgaggtgggaaaatggnnnnnatccaggaggccgaggct

SEQ ID NO: 17588 - DNA, 720 bp, Macaca Fascicularis
  misc_feature (1)...(720): n = A,T,C or G
gttgaaannnnnnnnnnnnnnnnnnnnnaagcagnnnnnnnnnnnnnnncacggccacagtgtcaatggggagtacctnnnnnnnnncatgaaaaatggacaggtcatagtgaaagnnnnnnnnnnnnnnnnnnnnnnnnnnacctcagtaacacccaagcagagtctctgtgatggcagatggcacagaattacagttattagagattctaatgtggttcagttggatgtggactctgaagtgaaccacgtggttggacccctgaatccaaaaccaattgatcacagggagcctgtgtttgttggaggtgttccagaatctctactgacacnnnnnnnnnnnnnnnnnnnnnnnnnnnnnnnnnnnnnnnnnnnnnnnnnnnnnnncggacaccnnnnnnnnnnnnnnnnnnnnnnnnnnntcagcgnnnnnnnnnnnnnnnnnnnnnnnnnnnnnnnnnnacacaacagaacacagccgcccaaatacaaagttctttagagcactgaaagaaacacaaagccagccaggaggaacagcaactcttccttctggtggaagctttcatctagttgaacaggacttaaatgaatcatcagggactggatatttcttatttctcatttggattcttannnnnnnnnnnnnnnnnctgcaatggacaataattgaaggagtggcaaacttacttgtattgagagcacacgcaattcctactg

SEQ ID NO: 17589 - DNA, 694 bp, Macaca Fascicularis
gagggaaggaactagtgggagagagccagggaggggagggcacagacagagaggctgcagggcgagctctgactgaagatgggcctttgaaatataggtatgcccctgaggttgggggagggtctgcactcccaaaccccagcccagtgtcctttccctgctgctgacaggaacctggagctgagcaggttatccctgtcaggagccatgggctgggctgcatctcagccccacctgcatggcacccagctcccatccacttctcacccttctttcctcctgaccttggttggcagtgataacctccatctctcacccacccgtctaccatcacctctaaccaggcaagccagggtggaagagcaatcaggagagccaggcctcagcttccaatgcttggagggcctccacttcgtggccagtccgtggtggtggctctgaggcctaggtaacaggcgacagggttgccagttgcccctgggttcctttgtgctgctgtgtgcctcctctcctgctgccctgggtcctccactgagagaccctaccctgcctggccactgggcccgtgactttctcttcctgcccaggaaagtgagggtctgctggccccacctcccctgtcctgatgctgacagctaagggaagggcagtgaacttgcatatggggcttagccttctagtcacagcctctata

SEQ ID NO: 17590 - DNA, 758 bp, Macaca Fascicularis
  misc_feature (1)...(758): n = A,T,C or G
ggccagcctgccgnnnnnacaaacaaagannnctgcccagtgccaggaaagccaggggaggccgtggctgccaggaagctctttgccccacagcagattctacaatgcagccccgccaactgagaggcctgcgagggccgcccgctcccttcctgccgctgctgcccagcggacactgccccacgtgctgcctggccactccaggaggaagctgggaggcgtggagggtgaccacaccttggccttctgggaagtctttgtgtggctgccccacctgccacatactccctcctctcctacnnnnnnnnnnnnnnnnnnnnnnnnnnncggctgctgggacgatcacccaggctggagctggccccgcttggtggcctgggatctggcacactccccctcctttgggtgagnnnnnnnnnnnnnnnnnnnnnnnnnnnnnnnnnnnnttcctctctgcggctttcaccgctgagtttctgttcttcctgggannnnnnnnnnnnnnnnntgagccttgggccacactgaggcttaggcccttcctgggaccggctcctgccctcccctgaggatggcctggactcacgccctcttgcttccttttgggctcaaagcccttcnnnnnnnnnnnnnnnnnnnnnnnnnnnnnnnnagcatctttcaccaagatgggtggcaccaaccttgctgggacttggatcccaggggcttacctcttcaagtggggagacagggcagggtccatgcctctgctgtag

SEQ ID NO: 17591 - DNA, 710 bp, Macaca Fascicularis
ctgcaagttgagtggcccttcttgcctaggtgtgcctccttgccttgggattctgacatgaacaggtgaagtctccatgattttttttttttttttgttaatggtatgcttgctattatggccaatatgtaaatgttactctgaatacatatttatataccatgttacttagtgacattattcagacatttgtatgcgtatttgtgaagttgtttgcatcagtcatttaaagaatatttcagcctaagttttctaagaggtatgttgaatacatttttaaaagccagcttaagggtcacagcagccttagtttaggagaagagctaatcacaggtgaccactcaagttttttcaatgaagacctgatgatgtatttagttcccattttccatggtgattgactcaatttaagtgcattgtggctatatgtaatttacaggctgctttacgttgcaggtggggaaatctcctaggctggtgtgaggccgatctgggataaaagaccccctgacccctcctcattctaaggtcaccacctcttagagggtctcttattttctttcagagatcaaatgcacagttatgctctacaactaaattctgcagtcttgggaatccttacgattatcaactgttagtcactttttaaagcccccaaagtggagtgaggatagggggagtggaagcagtgtttggttcttactttaccc

SEQ ID NO: 17592 - DNA, 153 bp, Macaca Fascicularis
ctgcccccagacccacgtgaattctgctttcttcattagcaggatattctggtttctaggtaaggaagagtctctaatgagcccccgagcctcagtctcttcagactcatgggatggtctgaggggtccaagcatgtcctagccaatcagaac

SEQ ID NO: 17593 - DNA, 960 bp, Macaca Fascicularis
  misc_feature (1)...(960): n = A,T,C or G
acagcnnnngaggcnnngagagagaagaaattcnnnnnnnnnnnnnnnnnnnnnnnnnnnnnnnnnnnnnnnnnggaaatctactcctttgnnnnagtactttatccnnnnnnnnnnnnnnnnnnnntcgtccctcgtgtggagaagggctacaagatggatgcccccgatggctgcccgcccgcagtctatgaggtcatgaagaagtgctggcacctggacgccgccatgcggccatccttcctacagctccgagagnnnnnnnnnnnnnnnaaaacccatgagctgcacctgtgacggctggcctccgcccgggtcatgggcctgtggggactgaacctggaagatcatggacctggtgcccctgctcactgggcccgagcctgaactgagccccagcgggctggtgggcctttttcctgcgtcccagcctgcatccctccggccccgtctctcttggacccacgtgtggggcctggggagcccactgaggggccagggaggaaggaggccacggagcgggaggcagtgccccaccacgtcgggcttccttggcctcccgccgctcgccttcttaagagttttattcctttccttttttgagattttttttccgtgtgtttattttttattatttttcaagataaggagaaagaaagtacccagcaaatgggcattttacaagaagtacgaatcttatttttcctgtcctgcccatgagggtgggggggaccgggcccctctctagggacccctcgccccagcctcattccccattccgtgtcccatgtcccgtgtctcctcggtcgccccgtgtttgcgcttgaccatgttgcactgtttgcatgcgcccgaggcagacgtctgtcaggggcttggatttcgtgtgccgctgccacccgcccacccgccttgtgagatgaatcgtaataaaccacgccatgaggacaccgccgcccg

SEQ ID NO: 17594 - DNA, 830 bp, Macaca Fascicularis
  misc_feature (1)...(830): n = A,T,C or G
gagcaagtgtcggtggnanggatggagtttgaacaggaagcggggccatgtgtttgaggagtcccaagtggccggcacccccatgtttgtgtcaaggcctacttgcctgtcaacgagtcctttggcttcaccgctgacctgaggtccaacacaggcggccaggccttcccgcagtgtgtgtttgaccactggcagatcttgcccggagacccctttgacaacagcagccgccccagccaggtggtggctgagacccgcaaacgcaagggcctgaaggaaggcatcccggccctggacaactttctggacaaattgtaggcggcccttcctgcagcatctgctgccctggggactcgcagcacccacagcaccacgtcctggagactgtcccgacacagcgacgctcccctgagaggtttctggggcccgctgcgtgccatcactcaaccttaacacttgatgccgtttctttcgatatttatttccagagtccagaggcagcagacacgccctcttagcagggacttttactgggctggtcggggagggggaggtgggatgggacaccnnaacactttttccatttcttcagagggaaactcagatgtccaaacaaattttaacaaacgcattaagaggtttatttgggtaaatggcccgtagtggcttttgccccggaaaggggaaaggaacaagcgggtagatgatttctagcaggcaggaagtcctgtgcggtgtcaccatgagcacctccagctgtactagtgccatggaataataaatttgatatggtggtgaaaaaaaaaaaaaaaaaaaaaaaaaaaaaaagg

SEQ ID NO: 17595 - DNA, 747 bp, Macaca Fascicularis
  misc_feature (1)...(747): n = A,T,C or G
ctgtgaaagaaccaaaacagatcacaatactcnnnagagagagagaaaaaaagtgagatcttgatccacagaaatacatgaaatgtctggtctgtccaccccatcaacaagtcttgaaacaagcaacagatgaacagtctgtccaaatggacttaagatagacagcagtttccctggtattcagggaggggttttggtgatacccaagttattgggatgtnnnnnnnnnnnnnnnnnnnnnnnggagggagaaccatcatcttgataatgggatgaatggaaggaggcttaggactttccannnnnnnnnnnnnnnnnnnnngctgcaatggaattaggaagaccaagatggagatcacccaggggcttacttagcctacagatgtcctacaggaacatgggctggcccagcacagagctagcaaatttgagttggatgattgtttttgctcaaggcaaccagaggaaaactgcatacagagatggatataccgggagaaacgactttggaaacctggctctaaggtgggatcagtaagggatgcggcagtctctgtccaaacctaaagagaactctgggggggcctgagccacnnnnnnnnnnnnnnnnnnnnnnnnnnnnnnnnnnnnagggttgtnnnnnnnnnnnnnnnnnnagcttgtccatgtaatattcccatgtgtgtaccctgcccctgccttgattagactcctagcacctggctaatttctaacatgttttgtgca

SEQ ID NO: 17596 - DNA, 762 bp, Macaca Fascicularis
  misc_feature (1)...(762): n = A,T,C or G
cagcaccacacacagcgcgnnntnnnagcgctcggcaccgnngngncaggcgagtcctgccttcatttatccagcagcnnnnnngaaaacgcannngctgttcggagtttaatcagaagaggattcctgcccccgttctcggctccttcagcgttccccctcccctgtctctctcctggggaggcgtgaagcggtcccgtggatagagattcatgcctgtgcccgcgcgtgtgtgcgcgcgtgtaaattgccgagaaggggaaaacatcacaggacttctgcgaatactggactgaaaattgtaannnnnnnnnnnccgccgctgcctttttttctcgagctcttgagatctccggttgggattcctgtggattgacatttctgtgaagcagaagtctgggaatcgatctggaaatcctcctaatttttactccctctccccctcgactcctgattcattggnnnnnnnnnnnnnnnnnnnnnnnnnnnnnnnnnnnnnnnnnntgggatcgttgccttatgcatttgttttggttttacaaaaaaggaaacttgacagaggatcatgctgttcttaaaaaatacaacatcacggaggaagtagactgatattaacaatacttactaataataacgtgcctcatgaaataaagacccgaaaggaattgaaataaaaatttcctgcatctcatgccaagggggaaacatcagaatcaagtgttccgcgtgactgaagacaccccctcgtccaagaatgcaaag

SEQ ID NO: 17597 - DNA, 734 bp, Macaca Fascicularis
  misc_feature (1)...(734): n = A,T,C or G
caactgtgctgtgnnnncttaagccaatgaacnnnaattcctggcagtnnacaagaagtctcttaatgctaatgaagaatttaaaggtctttttaagaaaatgaagggctttccaaatagaatgatttactctgaagaaagaaaaaatggtatctctgaaactcacaacctaaagcccaatcttgannnnnnnnnnnnnnnnnnnnnnnnnnnnnnnncttcttctcttatccttactttctttaatagatatttattaaagnnnnnnnnnnnnnggtgccacaatacccagtattgtaaacaacaggtttgcattcattaagttttcattcattctggagtctactaatttacctgaatggtgtttgcattctgtgaaatgcctctccacattgcatatgtcacacttttgtctgcacataactcnnnnnnnnnnnnnnnnnnnnnngccacagcagcacagtcagcgggcgaattacaggtgcctgctgcctgcctacctggggaatctgatnnnnnnnnnnnnactgtgtgctcatcactgaagaattgcaggccactcatgnnnnnnnnnnnnnnnatggcttataaacattagcagtttatttatgttttaagatgcaaagatgtgtgtttgatattcactttaataattagaaatggatcttgtaaacagggcatatatcaaagatgaccttataatatgtacctgaatatacagttcaagaatttgt

SEQ ID NO: 17598 - DNA, 209 bp, Macaca Fascicularis
taaggctctggcccttgcctttgtggccctctccattcttttggtgcctcactgggggctttgggcggaatctcccagggaatcagggaccagctttactggagttgggggggggttgtctttgctggctcttaccccctctccaagataagcgtgagccttagctcccagatagggggcgttatttatggaccacttttatttattgt

SEQ ID NO: 17599 - DNA, 484 bp, Macaca Fascicularis
  misc_feature (1)...(484): n = A,T,C or G
cggacctagttcgcgacgacatggccaaacgtaccaagaaagtcgggatcgtcggtaaatacgggacgcgctatggggcctccctccggaaaatggtgaagaaaattgaaatcagccagcacgccaagtacacttgctctttctgtggcaaaaccaagatgaagagacgagctgtggggatctggcactgtnnnnnnnnnnnnnnnnnnnnngccggcggtgcctggacatacaataccacttccgctgtcacggtaaagtccgccatcagaagactgaaggagttgaaagaccagtagacgctcttctactctttgagacatcactggcctataataaatgggttaatttatgtaacaaaattgccttggcttgttaactttattagacattctgatgtttgcattgtgtaaatactgttgtattggaaaannnntgccgagatggaatattgtaattcagtctcctttttagtagtcaaatg

SEQ ID NO: 17600 - DNA, 733 bp, Macaca Fascicularis
  misc_feature (1)...(733): n = A,T,C or G
tggggactgaccacagattccnnnnnnnnnnnnnnnnnnnnnnnnnnnnnnnngatnngcaattggcaaaccatgcttggttgcgttaggacaaaatcctagtttttctttctttaccttttctatcttgatgaaaatgttgcacattctatagttgcaaaacacataaaaggggacttaacatttcatgttgtatcttaccttgcagtgaatgcaagggttacttttctctggggacctcccccattacccaggttcttatttgggattcccaattcccagggttcccaaaccatgctgcatggtttggttaatgaaatccagtagctaaccccactgtacttccacatgcttgccttccaaagggtgatatccagtttttatatccctatacggaatttgtccatcaatcacataaaaacaaacagtcccttttgccctctgcccagatatttccagcatgttcccaaggtttccaagttagccttccctaaggactctgggagcctctcagtttatgatctggccaaggtccccattttcttctgtcccctatgtttaagtcgggatttttacagagggagctgtctccagacagctccatcaggaaccaagcaannnnnnnnnnnnnnnannnnnnnnnnagtggtattgtgtatacgggagggacgtgtgtgtcattgttatttgagttatgctgttgtttagggggaaataacagtaaataattaat

SEQ ID NO: 17601 - DNA, 784 bp, Macaca Fascicularis
  misc_feature (1)...(784): n = A,T,C or G
ttcaatgagacatatgcacaggntttcagaaacagaaatttagtttatttggcagattaaaaaatgctgcattagaattaaagcaagttattttcttatttttataatgacacaaagcactgggagtcagactgcttgtatattatcaaacattttcagagaattctaataaagctgtattttacatcatctatattttcctgtatctcctgtatctccacacacactgcatgcttgttgatcacttaagatatatgtgtactatataaatgtatgcatatatattttgtctgcaaagatttcatttatttggtataaagatgttcagttactggttcctttttgttttgagnnnnnnnnnnnnnnnnnnnnnnnnnnnnnnnnnnnnnnnnnnnnnnnnnnnnnnnnnnnnnnnnnnnnnnnnnnnnnnnnnnnnnnnnnnnnnnnnnnnnnnnnnnnnnnnnnnnnnnnnnnnnnnnnnnnnnnnnnnnnnnnnnnnnnnnnnnnnnnnnnnnnnnnnnnnnnnnnnnnnnnnnnnnnnnaccatgttggccaggccagtctcaaactcctgatctaaggtgatccacccgcctcggcctcccaaagtgctaggattacaggcgtgagccaccacacccagccataattgttacttataatgagggaaaaacccaaaatgtccagcaatatttacatatttactgaaactgtttggaacttgtattagtttgttcttgcattgctgtaaagaactacctgagactgggtaattacaacaaaa

SEQ ID NO: 17602 - DNA, 703 bp, Macaca Fascicularis
  misc_feature (1)...(703): n = A,T,C or G
tgangaggtgtacncggcgggagattctgtcnnnnnnnnnnnnnnnnnnnnnnnnnnatcaccaaaaaaaggtttccacctgcgatacaccagcaccaagttccaggacacactccacagcagaaagtgaccacnnnnngaacaggggcggggaccggagcctgctgcccttggtcnnntagactggacagtgggggtgggcggaaggcgacgcaccatacctctcccccaggccccaggacctgcagggccaatggcccggtgagactgtccataggaggtggggggaactggactccggcgtaagccacttccccacaacccctcgaccagcaaggggccggggccggggagcagagcttccccaagacatttcaaagtcaccattcctctcttcgggggccctgcctggtnnnnnnnnnnnnnnnnnnnnnnnncccgttgccgtccctgtgtctacacgctgtattgtgtatnnnnnnnnnnnnnnncttcattgtaatgttcatttcccacccctgctccagcctcgatttggttttattttgagcccccactacaccccccagtttcctggggcacaagtgtctgtgtgtgtcccccanggagcnnnnngtggaagctgatggggaggggatggaggaacaagacagggcctctctcaggcccagtggccggtcagccacaccagggcaccacagcc

SEQ ID NO: 17603 - DNA, 796 bp, Macaca Fascicularis
  misc_feature (1)...(796): n = A,T,C or G
caatgtggaccagctgaacatgttgggagagaagcttcttggtcctaacgccagccccgatggtctcattccgtggacaaggttttgtaaggaaaacataaatgataaaaattttcccttctggctttggattgaaagcatcctagaactcattaaaaaacacctgcttcctctctggannnnnnnnnnnnnnnngggcttcatcagcaaggagcgagagcgcgccctgttgaaggaccagcagccggggaccttcctgctgcggttcagtgagagctcccgggaaggggccatcacattcacatgggtggagcggtcccagaacggaggcnnnnnnnnnnnnnnnnnnnnnnaaccctacacgaagaaagaactttctgctgttactttccctgacatcattcgcaattacaaagtcatggctgctgagaatattcgtgagaatcccctgaagtttttgtatccaaatattgacaaagaccatgcctttggaaagtatnnnnnnnnnnnnnnngaagcaccagagccaatggaacttgatggccctaaaggaactggatatatcaagactgaattgatttctgtgtctgaagttcaccattcaacacataagaccgacatgttacaaacctcaagccagccttgctcctggctggggcctgttgaagatgtctcgtatatttttctccatagtaattcgacagtatgatgaacgcagctgaacttgtaatttttttcatcttctnnnnnnnnnnnnnnnnnnnnnnnnnnnnnnnnnnnnntgctactctgtcct

SEQ ID NO: 17604 - DNA, 724 bp, Macaca Fascicularis
  misc_feature (1)...(724): n = A,T,C or G
ctgaatcagnnnnnnnnnnnnnnnnngcanngcgtcaagccactcttggagaagaatgatgtggagaaagtggtggtggtgattttggataaagagcaccgcccagtggannnnnnnnnnnnnnnnnnnacccagcctccactgctgtccatcagctcagactccctgttgtctcacgtggagcagctgctccgagccttcatcctgaagatcagtgtgtgcgatgccgtcctggaccacaaccccccaggctgtaccttcacagtcctagtgcacacaagannnnnnnnnnnnnnnnnnnnnnnnnnnntccaggtcatcaaggatttcccctggatcnnnnnnnnngagcaggatgtccacatgcatgacccnnnnnnnnnnnnnnnaaaaaccatgacgtcggacattttaaagatgcagctttacgtggaagagcgtgctcacaaaggcagctgagggggcatctgccacctcactgatgcnnnnnnnnnnnnnnnnnnnnggatccccgcctagggcagtgctgcatggctgccctgattccaagtgctcttatcgcctgtgtgtgtggatcgcccgccccagcccggggccgctcaggtctgcttggaggatgcctcccccaggaggcagtgaaggatgccgcaacctcgacttctcagcctcctggggttacgccggcaaacactgtctgtctcaaatactgtgctgtgagtcttca

SEQ ID NO: 17605 - DNA, 742 bp, Macaca Fascicularis
  misc_feature (1)...(742): n = A,T,C or G
tnnnnngctgtactgctggctgctgtgctagcactgctgtgctgctctgtggaagatgggattcttcaaacgggcgaagcaccccgaggccaccgtgccccagtaccatgcggtgaagattcctcgggaagaccgacagcagttcaaggaggagaagacgggcaccatcctgaggaacaactggggcagcccccggcgggagggcccggatgcacaccccatcctggctgccgatgggcatcccgagctgggccccgatgggcatgcggggccaggcactgcctaggttcccatgacccagcctggcctgtggctaccctccaccccttccccagagatggctctttgggatgaagagggtagagtgggctgctggtgtcgcatcaagatttggcaggatcggcttcctcaggggcacagacctcccccacccacaagaactcctcccacccaacttccccttagagtgctgtgagatgagagagggtaaatcagggatagggccatggggtagggtgagaagggcaggggtgtcctcatgcaaaggtggggagaagggatcctaatcccttcctttcccattcactctgtgtaataggaccccaaggacctgcctccccagaagtgccttagcctagagggttggggaggaggttgtgtcactgactcaggggctcctcttctctagtttnnnnnnnnnnnnnnnnnnnnnnnnnnnnnnnnnnnnngtggttttgtggtt

SEQ ID NO: 17606 - DNA, 726 bp, Macaca Fascicularis
  misc_feature (1)...(726): n = A,T,C or G
ggaaaaaaaaaaagatcnncatccacattcaagcttacaaagttaaatttcaacacatcctctatgctagtgtgacaaaagcagccccattatttggttnnnatcgttgacctttacaggatgaaggggagaatcctccatggcatgccaattacactttctgacaggagacatgtacagattttgtgcatttatgttctgaatgcaagtcaacaattctgatctagagtttaaaagtgaaagtacattagcaccataacatgcgtctttaaaaccttcccaaatattagtaatcttgaccagcaatgacaagaaaaaagagaagcacctttaaaagcagttgatatccaagattaaaataattgtggctttaaaaatatttcttgaaattcttgtactacactcttctttttaaaccaatcttccaagagattaatcaatgaaatttataagttttatcaacttataaaattttttttgtcttctgggactcatagaatacaatctgtgtttctgatcagttgaggtagttaaaatagggagggcttttctaatttcatatttgactatttcagaaagaaaggttatcttttactagtgagcacagtcattgctctgcagatgggctaggattcaaagaatgtaacacagtgttgttatcgttaagagtgttgaagtttatttattatagcaccatcgagaaacttgtatgaggttgttgatctt

SEQ ID NO: 17607 - DNA, 376 bp, Macaca Fascicularis
  misc_feature (1)...(376): n = A,T,C or G
cgatggaggagaagtggggacccaggccagcaggagacaggaccccggagctcaggccttgggatggagcagaagctggaggggcggggcacgctgccgccttccctatcnnnnnnnnnnnnnnnnnnncacttgagggtggagtgagactgactgcaacccccaccctccttgagactggagctggcgtctgcagactagagacctggttgaacttggttggtgcttgtctgcaccctcgacaagaccacactttgggacttgggagctggggccgaagttgctctgtacccatgaactcccagtttgcgaatcatagagacaatctattttgttacttgcacttgttactcgaaccactgagagcgagatggga

SEQ ID NO: 17608 - DNA, 759 bp, Macaca Fascicularis
  misc_feature (1)...(759): n = A,T,C or G
tcactgagaatctgnnnnnnnnnnnnnnnnnnnnnnnnnnnnnnnnngcatgggctcacatgggggaccttctgatctgcagcttgcacagatccatggaaaaagtgtggttttctgtgataaaatattttaaatggtccatttgcaaggcatgataaatctaagtatggcagccagtctgcaaatgtgacaaaccgcatggctcatgcacctagaaggtcacaataagcgaacagaatgtagaggagggtcaacccataagagagaagaaagttccctttcccctgactggcagcgcgaggccgcatgatgcctggagttactgtaaaagacgtgaaccagcaggagttcgtcagagctctggcagccttcctcaaaaagtccgggaagctgaaagtccccgaatgggtcgacaccgtcaagctagccaagcacaaagagcttgctccctacgatgagaactggttctacacacgagctgcttccacagcgcggcacctgtacctccggggtggcgctggggttggctccatgaccaagatctatgggggacgtcagagaaacggcgtcatgcccagccacttcagccgaggctccaagagtgtggctcgtcgggtcctccaagccctggaggggctgaaaatggtggaaaaggaccaagatgggggccgcaaactgacacctcagggacagagagatctggacagaatcgccggacaggtggcagctgccaacaagaagcattagaacaaaccatgc

SEQ ID NO: 17609 - DNA, 674 bp, Macaca Fascicularis
  misc_feature (1)...(674): n = A,T,C or G
gagatctggtgtcagagttctctgcnnnnnnnnnnnaatcgcnnnnnnnntgaacatttgttccagccaccttttgcacatggattccgtaccttgcactagcaatgtctaccttcggtaacnnnnnnnnnnncaccctgtattctcaatgatcccttcctccccatatctcacccttcccccgaagccgatagggcagaggtgcactttatgaaactggcacttggctgaacagaaggaaacagctgtacccctaagctcctttcacagaaattgtcatctaccttggaatgcaaatagttcttatnnnnnnnnnnnnnnngaattgggcccaaagatcaaacacagcattnnnnnnnnnnnnnnntctaaatgcacaactcgggagctgtgcacggctcctcannnnnnnnnnnnnnnnnnnnnnnnnnnnnnnnnncctgtttttgtcctcagtggcacccatgagctttccaatagtataattttctttctttccttgtcctggttgaaggtaacgtgtgttcctagaaaagaaaatgctgcataggaaaactgagatgccttttattctaacgtgtttgatccctgtcactcactattctgtactttttattgtacattctattcctgtaattattgtgccctttaagtgttgtaaaatcgtttggaat

SEQ ID NO: 17610 - DNA, 711 bp, Macaca Fascicularis
  misc_feature (1)...(711): n = A,T,C or G
gccggcccagcccgcacccatggnnnnnnnnnnnnnnnagcagagccgcatcacccccatccagaagccgcggggcctcgaccctgtggagatcctgcaggagcgcgagtacaggctgcaggctcgcattgcacnnnnnnnnnnnnnnnnnnnnnnnnnnnnnnnnnnnnnnnnnnnnnnnnnnngaacnnnnnnnnnnnnnnngctcaaggccctcaggctgctgaactttcagaggcagctgcgccaggaggtggtggtgtgcatgcggagggacacagcgctggagacagccctcaatgctaaggcctacaagcgcagcaagcgccnnnnnnnnnnnnnnnnnnnnnncaccgagaagctagagaagcagcagaagattgagcaggagcgcaagcgccggcagaagcaccaggaatacctcaatagcattctccagcatgccaaggatttcaaggaatatcacagatcggtcacaggcaaaatccagaagctaaccaaggcagtggccacgtaccatgccaacacggagcgggagcagaagaaagagaacgagcggatcgagaaggagcgcatgcggaggctcatggctgaagatgaggaggggtaccgcaagctcatcgaccagaagaaggacaagcgcctggcctacctcttgcaacagacagatgagtacgtggctaacctcacagagctggtgcggcagcacaa

SEQ ID NO: 17611 - DNA, 1373 bp, Macaca Fascicularis
  misc_feature (1)...(1373): n = A,T,C or G
gccaagaaaattnnngaggcaggatccaggatggacaggcnnnnnnnnnnnnnnnnnnnnnnnnnnnnnnnnnnngcnnnnnnnnnnnnnctnnnnnnnnnnnnnnnnnnnnnnnnnnnnnnnnnnnnnnnnnnnnnnnnnnncagcaaggtcaaggccgaggtgcagaatctcggcggggagctcgttgtctctggggtggacagcgccatgtccctgatccaggcagccnnnnnnnnnnnnnnnnnnntggtgcagacagtgaaagcatcctacgtcgcctctaccaaataccaaaagtcgcagggtatggcttccctcaaccttcctgctgtgtcatggaagatgaaggcaccagagaaaaagcccttggtgaagagagagaaacaggatgagacgcagaccaagattaaacgggcatctcagaagaagcacgtgaacccggtgcaggccctcagcgagttcaaagccatggacagtatctaagtctgcccaggccagctgcccccacccctcggggctcctgaagatcagtcactgtttgtcactcaaatgaatttgctaaatactacactgatgtcagattccacagggaaatgggcagactgtgaaccagtccaggtggtgaattttccaagaacatagtttaagttgattaaaatgcttttagaatgcaggagcctacttctagctgtatttttttatatgcttaaataaaagtaaaaattccataaccaaagagaatcccacattagcttgttagtaatgctttgagcaagccgagatgcccattctctctattagtgagggcggcattagggtttgagagaagggaatttggctcaacctcagttgagagggtgcagtccnnnacagctagaatgcttttaaatgaccaaagatgacctgtggtaagcaacctgggcatctcaggaagcagtccctggagaaggaatgttctcagaaaggtctttagaggaacaaactcagtaaaacgtaatgtttcatgaagaaaactgattactctctttatgacatgaaatgagaatttaaatgcatggttacaattactaatgtacgctgctgcaggtcattaataaagttgctttttttaggctacagtgtcgtaatcagaacacacttttctcctctttcttccagcttcaaatgcaaattcatcactgggctcacttctaataattgcagtgtttcccaccttgggcttgcagcagaaaaacnnnnnnnnnnnnnnngtgctaaggcagtaatttagactttaccttatttgtgattactatagtgattactgtaactacaaggcataacttaccatcttatataaattttacaaattttgaatgttttttacacta

SEQ ID NO: 17612 - DNA, 776 bp, Macaca Fascicularis
  misc_feature (1)...(776): n = A,T,C or G
gactaacagcagtacatgttatnatctaattaggacacatttaaaatttggcaaataatgcatatgaaatcaatattgtaaggcctgcttttgtaatcaaaatggagagagtgaagagcactgtgtgccagtaaatactccccttcatctnnnnnnnnnnnnnnnnnnnnnnnnnnnnnnnnnnnnnnnnnnnnnnnnnnnnnnnnnnnnnnnnnnnnnnnnnaccaaactggcttttttttttccctagtgaaggatcagttttaaacaaacattgggataccaatacagaaaacttgagacagtatttgtatcttttaatcagtgtagctgtgtgcttctgcttctcaagagctggatccatccaggttgtgtccctnttaccttcttgannnnnnnnnnnnnnnnnnttgaataatccacggtttgggacggcatccagaagttttccctatgactttatattttgtattatgtcaaatgttatggcagggcccaaatagcatagccacaagtttggtttatgtgggcataaaattctaaccaaactgcagacatagggagtcatttggagaaagcctgtatgtggtgttttaacctaataaagttgatgagggaaaaggggagaggaagcaaacgtaaagcgggtaaagtgtagagcatcttttatatctcaggcgtggcttcttcagtggaccaagctgcaatgcagtattgacttgacagagcctctacttctgtctcaaaatggctccaaatgatttctgtactgcaaa

SEQ ID NO: 17613 - DNA, 1196 bp, Macaca Fascicularis
  misc_feature (1)...(1196): n = A,T,C or G
catnnnnnacagcnnncgaagaagaagcaggtatttannnnaataaaggaatggttggtattctagttaatcaagtaattcttttattagcaaggcagaaactagtgtttttctataaacttgaatgttaattgtacaggtgtattttacaatttttgtttaattaaaaaaatgttactatattaatnnnnnnnnnnnnnnnnnnnnnnnnnntttcttcgtttgagtcagtcgccttgattcagaatgtcacgagccttatgatatcatgannaggcgnnnntnnaaatccgacattaagatcctcctagaccttgaggtgatcagcataagaggccagatcccctcgagtcatctacacctagcttcaccttattctttaaagggcagaaaatttgagacggtgatcgccgtaacagtaaatttggcttacaattggggcccccctccggtttagaaagagnnnnnnnnnnnnnnnnnnnnnnnnnactagaaaaatcttcttgcgtcaatcaagnnnnnnnnnnnnnnnnnnnnnnnnnnnnnnnncgtcgttagattgaagaaaacatctagatgcagcgatcggctatagatacttctagatcgtctagatctactagaccatgggccaaagagggtcgacctgcaaacttgcaaggtttattttaaatacacattacagtgttttatattatgtaattctaagtcgctaactcagcaggagcagggnnnnnnnnnnnnnnnnnnnnnntcctcgacgatcaagatctatctctcttcgtagatcaagatcagcttcactcagaagatctaggtctggttctataaaaggatcgaggtatttccaatccccgtcgaggtcaagatcaagatccaggtctatttcaagaccaagaagcagccgatcaaagtccagatctccatctccaaaaagaagtcgttccccatcaggaagtcctcgcagaagnnnnnnnnntgaaagaatggactgaagctctcaagttcaccctttagggaaaagttattttgtttacattattataagggatttgtgatgtctgtaaagtgtaacctaggaaagataattcaaccatctaatcannnnnnnnnnnnnnnnntactctgtaaattcacagcagtaagataatataaatttttgttgaatgtattaacatcctatggtctgaaaatgt

SEQ ID NO: 17614 - DNA, 760 bp, Macaca Fascicularis
  misc_feature (1)...(760): n = A,T,C or G
tgtatagctgggattnnncnnnnggattgtngnnntatctgtccacatacagccaaaatgcctatccagaaatccagtccactggaaaggaaaattggaactcctgtgccacaggggttccagaaaagggaagtcactttaccttgcggtggtgggatcctgatgtctttcttccatttgtagtaaaagctggtaaagcttttcttactcctggttccctataccagtatttctaaacgtgtcgcactttctccacaggcatgtggttttgacctttttttcaatcttctggaaagggaatggaagcagaagtgggacatcgagggctctgctgtcctctgcgctgggtgtggaatgctgctgcacctgtcccttctgctggctcagggaagtgtcttcttgcccacatttctgtggggaaaggtttttaatcctccgatgcttccatgttcctgtttaggccatgtgcccagaaacctggactgatctttctgtaatagtgaacccctgggccactgaagagtaatatggctccactggacacaaaagaggaatggaatcaataggcagggggccttttctaagccttaggaaaagaaaatgaaactatttcatctttggacttttcaatactattggagtgattttttctttctaaacnnnnnnnnnnnnnnnnnaaaagcatcttttttgttatttgtttgcatccctccccccccacaccctggtgttttaaaatgaagaaaaaaaaaacatcact

SEQ ID NO: 17615 - DNA, 776 bp, Macaca Fascicularis
  misc_feature (1)...(776): n = A,T,C or G
gattttgttgttacatgattcaatcaatttagctattaagctaggtgctgtgctataattaattattttaacaaaagaagtaatacaatggatttttctcctgcttgttaaactaagtcatatgattataaaaattaaactttatagacgcgactcacaccaagcctctccccagataccaagtgtcgccctcggcagggatgcccgcatcaccccagtcatttagggtcattagagccccgagtaacgctggggcctgagcaagcggtcgggatgtctgtgtcccagtcccgcacccagccccgagctctgcgaacagcgccacaccccatggcttgtgtttcgtgtgtgtacttgagagagcatgagttttgtaaacgtgctgctgactcatattaaaaacatgaaatggtaacggcagcctccacatgccgtcctctgctgtctgtgcctccgtgcccttggctgttcccaccccggggtctgcgggggtcagggtccacctcctcttcttcagttggagtgaatttggggtctggttgagggcctcggccatcatcaaatgtgacaaacacaggccctcccctgagaccgcgtgtccaggatgcacctgctcctccggggttcactgcagtcgtctgagcggtgctgggccaccaaccacttctatcacacagcggccagcgatggggccttgggtcgttttctgannnccaccaccctttggcatcggannnnncagagccttttgcatccccaccaggccccttgcccag

SEQ ID NO: 17616 - DNA, 824 bp, Macaca Fascicularis
  misc_feature (1)...(824): n = A,T,C or G
gatggttggaggtgtaaaacaatgncntncgctgaggccaaagtttccatgtaagcgggatccgttttttggaatttggttgaagtcactttgatttctttaaaaaannnnnnnnnnnnnnnnnnnnnnnnnnnnnnnnnnnnnnnnnnnnnnnnnnnnnnnnnnnnnnnnnnnnnnnnnnnnnnnnnnnnnnnnnnnnnnnnnnnnnnnnnnnnnnnnnnnnnnnnagcaaaacaaagtgaaaactgaatggattaacttttgcaaaccaagggagatttcttagcaaatgagtctaacaaacatgacatctgtctttggcacttttgttgatgtttatttcagaatgttgtgtgattcatttcnnnnnnnnnnnnnnntgtattttgttgtgttaaaagtacttttcatgatttttgaatgtatttgtttcagcagagttcattatattggatttttctaacctgtgttaacaccattgaatgtgtatttcttaagaaaataccaccctattgtgcccttaannnnnnnnctttaactggtaggaaacaccagannnnnnnnnnnnnnnnnnnnnnnnnnnnnnnnnnnnnngatatgtataaatattacaaaggataaaaatatattactgtctctttagtatggttttcagtgcaattaaaccaagagatgtcttgttttttttaaaaaaaaatagtatttaataggtttctgacttttgtggatcattttgcacatagctttatcaactttaaaacattaataaactgatttttttaaagatccttttgnnnnnnnnattcttaaaagtaattattgaa

SEQ ID NO: 17617 - DNA, 810 bp, Macaca Fascicularis
  misc_feature (1)...(810): n = A,T,C or G
tccgaccatgtcactgtnnnngagccgcccagngaaagcaaagcctgggaatctgctcgttgttgtttgggctcaggtagcacctgacggnnnaggtattgagggtcccccctgctggtggccctgtcctggggtcctcagaagcctgactgtcctacgggcttctccagtgtccataggggcttgggatggttgtggggggctggcccctctagcctttcaggtccttcctggacaaatctaagccttggccagggctggagtttaggcccctgtnnnnnnnnnnnnnnnnnnnggtaggcgggggacctgtacacctctgctgtgggcacggggctgctgagggtctgtggannnnnnnnnnnnnnnnactggctagagctgggctgagnnnnnnnnnnnnnnnnnnnnnnnnnnnnnnnnnnnnnnnnnnnnnnggtggcagaggtgctggaccacatctccgccaagtcactgcccagcagccttctccgtcctgtccccagcccacgtgctccttgggtgtcagcttcctgtgcctctgtgggagagggcagctgccgtgtgttatgtctggggccacggtcactgcaaggtcctggatctgccactcaaccctgggagtggtgttcccagtgtggctnnnnnnnnnnnnnnnnnnnnnnnnnnnnnnnnnnnnnnnnnnnnnnnnnttggaccgaggcctttgctgtgaactgcagtgtttcatacgacccatctttcctagtgcatgagaaataaagattatttaattaatgaaaaaaaaaaaaaaaaaaaaaaaaaaaaagg

SEQ ID NO: 17618 - DNA, 452 bp, Macaca Fascicularis
agtaggcagcccccaccccctccctctggtcctcttcccccatggcaacagcagcagcagcagcctccgccaccccctccgcccagcagcagtatggcttccagtacccccttgccatggcagcaaaatacgacgactaccaccacgagcgctggcacagggtccatcccgccatggcaacagcagcaggcggctgccgcagcttctccaggagcccctcagatgcaaggcaaccccactatggtgcccctgccccccggggtccagccgcctctgccgcctggggcccctccccctccgccgcctccaccacctggttccgccggcatgatgtatgccccgccccctcctcctccgcctcccatggacccttctaactttgtcaccatgatgggcatgggggtggcgggcatgccgcccttcgggatgcctccagctcccccaccgcctcc

SEQ ID NO: 17619 - DNA, 782 bp, Macaca Fascicularis
  misc_feature (1)...(782): n = A,T,C or G
agtgagaaaacagnnnnnnnnagcttcctcacaacagggacaagaaaaaaaagaagatgatctaaagaaaaaggagctgaagtccttagatattnnnngttttataaaagaagccaatacactgaacctggctccctatgatgcnnnnnnnnnnnnnnntcgaggagacaggtgggaagacttgcccagatcacaggtgcgctgctatgtccacatcatgaaagaggggctctgctctcgagtgagcacactgggactctacatggaagcaaacnnnnnnnnnnnnnnnnnnnnnnnnnnnnnnnnnnnnnnngaaccactggtccatnnnnnnnnnnnnnnnnnnnnnnnnnnnnnnnnnnnnnnnnnnnnnntcatcgggccagagacacagattggagagaagtcatccattaagcgctcagtcattggttcatcctgtctcataaaagatagagtgactattaccaattgccttctcatgaactcagtcactgtggaggaaggaagcaacatccaaggcagtgtcannnnnnnnnnnnnnnnnnnnnnnnnnnnnnnnnnnnnnnnngactgcttgattggaagtggccagaggattgaagccaaagctaaacgagtgaacgaggtgatcgtggggagtgaccagctcatggagatctnnnnnnnnnnnnnnnnnnactccttccttttggcctccaaaatcacagatgttggctggcccacatgtttcactctgtatttatttcccaataaagaaaggcttccaaaggcatgctgga

SEQ ID NO: 17620 - DNA, 820 bp, Macaca Fascicularis
  misc_feature (1)...(820): n = A,T,C or G
accgcagtccaagggccccttnnngnnnngttgtgctcctcgcctacctactccttgccnntnnngtcacacagccccttctttccaggcaagattcctcagcttctgagtaggaaacactctgggctccaggtttctggttgggaagggaaggccaggccaaaagctccactggtcacacagataatgtactcgcagttttgtatcttccattcacactttagcctacatgtcattttagtcttcacacaaataataacctatctggccaggagataatcggttgaacagaagtcatcagatcatcacagcccccagctggctacagaccagaggttccacgctctcaggctgactagagtccgcatctcatctccaaactacacttccctggagaacaagtgccacaaaaatgaaaatgggccacttctcaggagttgctgaataatcaggggtcaccggacccctcggttgatgcactgcagcatggtggctttctgagccctgttggccacgaagtgtcagcctcagcactcccaggactattgccaaggaggggcaagggatgagtcaagaaggtgagactcttcccggtgggcacgtgggccaggctgtgtgagatgttggatgtttggtactgtccatgtctgggtgtgtgcctattacctcagcatttctcacaaagtgtaccatgtagcatgttttgtgtatataaaagggagggttttaaaaaatatatattcccagattatccttgtaatgacacgaatctgcaataaaagccatcagtgctaaaaaaaaaaaaaaaaaaaaaaaaagg

SEQ ID NO: 17621 - DNA, 764 bp, Macaca Fascicularis
  misc_feature (1)...(764): n = A,T,C or G
cagcgagcatgcacacnnccatcaagttccttaacaaggaaatcaccagtgtgggcagttccaagcgggaagaggaggccaagtcagaacttcaagcagccattgaccggtatgtgaaagagaagattgtgcttgcagctcaggcaatttcacgctttgcttaccagaagatcagtaatggagatgtgatcctggtatatggatgctcatctctggtatcacgaattcttcaggaggcttggacagagggccggcgatttcgggtggtagtggtggacagccggccacggctggaaggaaggcacacgctacattctctagtccgtgctggtgtcccagcctcctacctgctgattcctgcagcctcctatgtgctcccagaggtttccaaggtgctattgggagctcatgcactcttggccaacgggtctgtgatgtcacgggtagggacagcacagttagccctggtggctcgagcccataatgtaccagtgctggtttgctgtgaaacatacaagttctgtgagcgtgtgcagactgatgcctttgtctctaatgagctagatgaccctgatgatctgcagtgtaaacggggagaacatgtcgcactggctaactggcagaaccacgcgtccctacggttgttgaatctagtctatgatgtgactcccccagagcttgtggatctggtgatcacagagctggggatgatcccttgcagttctgtacctgttgttctacgagtcaagagcagtgaccagtga

SEQ ID NO: 17622 - DNA, 705 bp, Macaca Fascicularis
  misc_feature (1)...(705): n = A,T,C or G
cagccacagcacccagagcagagatnnnatcaataaggccaagtacctcaccaagaaaacccaggcagccagcgtggaggctnnnnnnnnnnnnnnnnnnnnnnnnnnnnnnnnnnnnncctcagtgcccgtggatgtgatgccaggcgagtttgatcccaccaactacacgctcccccagcagcccctccacccctgcatgttcccgctggccactgcctactccacgctccagctggtcnnnnnnnnnnnnnnnnnnnnnnnnnnnnnnnnnnnnnnnnnnnnnnnnnnnnnnnnnnnnnnnnnnnnnnnnnnnnnnnnnnnnnnnnnnnaggatcacttggagattctggagtggaccctgcgggtccgtcacatcagccccacagcacctgacactctaggttgttaccccttctacaaaaccgacccattcatcttcatagagtgccagcatgtttacttctgtggcaacacccccagctttggctccaaaatcatccaaggtcctgaggaccagacangtgttgtnnnnnnnnnnnnnnnncttcagtgccacgcagaccgcctgccnnnnnnnnnnnnnnnnnnnnnnnnnnnnnnnnnnnnnnttctcgggcttcggggcagaggatcgatganctgggaggcctggggctgggcccctgactcaaaaaggtggttnnnnnnnnnngaggcccagat

SEQ ID NO: 17623 - DNA, 727 bp, Macaca Fascicularis
  misc_feature (1)...(727): n = A,T,C or G
cagggcaaaacnnnnngagtggcggtggtggtggtgaccgtcnttcttgtctgctgggctccataccacatttctggagtcctgtcattgtttactgacccagaaactcccttggggaaaactctgatgtcctgggatcatgtattcactgctctagcatctgccaatagttgctttaatcccttcctttatgccctcttggggaaagattttaggaagaaagcaaggcagtccattcagagcattctggaggcagccttcagtgaggagctcacacattctacccactgttcctcaaacaatgtcttttcagagagaaatagtattagtacaactgtgtgaaaatgctgagcagccaacaagcaggggctcttaggtaatcacacagtgaacgtttctaaaaggatgaagtgatatggtgagcaggggacttcaaaaactgtcaaagaatcaatcctttgttctcaaagtgtacacagactactnnnnnnnnnnnnnnntagaaacttgttagaaatgcagattctcannnnncagcccagaattactgaattggaanctnnaggggttaggacccagcannnnnnntgaacaaaccctctcgtttctgattaatgcaaaatgtaaaaatcattgtaaaaattagttctatttctatcctaaagcaagctgggtgacataagagaatctactctgtttttcaatgtttgacgttaaatgtttgttg

SEQ ID NO: 17624 - DNA, 738 bp, Macaca Fascicularis
agatccagagatacatgaccttctccccaccaacctgccccatgcagtgacctgtgatgttaaattcagaaactacctcatccccaagggcacaaccatattaatttccctgacttctgtgctacatgacaacaaagaatttcccaacccagagatgtttgaccctcgtcactttctggacgaaggtggcaattttaagaaaagtaactacttcatgcctttctcagcaggaaaacggatttgtgtgggagaagccctggcccgcatggagctgtttttattcttgacctccgttttacagaactttaacctgaaatctctggttgacccaaaggaccttgacaccactccagttgtcaatgggtttgcctctgtgccacccttctaccagctgtgcttcattcctgtttgaagaagagcagatggtctggttgctgctgtactgtccctgcagctctctttcctctggggcgttatccacatttcactatatgtgatgccttttctggcctgtcatctcacattttcccttccctcaagatctagtgaacattcagcctccgttaaggagagtttcctatgcttcacagtgcaaatatatctgctattctccatgctctgtaacggttgcattgactgtcacctaatgctgatacttatctaatgttgttattaatatgttattattaaatagagaaagatgatttgtgtatcataattcaaaggcattcttcttgc

SEQ ID NO: 17625 - DNA, 694 bp, Macaca Fascicularis
  misc_feature (1)...(694): n = A,T,C or G
agcccctgcacacccctatcgtggtgacctccacgcctgctgtcactccgggcacctcgaacctcgnnnnnnnnnnnnnnnnnnnnnnnnnnnnnnnnnnnnnnnnnnnnccctctgagtcctgctccaaggctcaccnnnnnnnnnnnnnnnncggggaccagtcatcagactccttgaactcccccactcnnnnnnnnnnnnnnnccagcgcacttccctccccagctccggaggggggtcctccttgctcctccttcccagggaccagcaccttcaagcgctccagggctgtgagggcaagagggggacttgccagggagcttcctggctctgggggacccaggtgggacttggcagtgagtattggaagacttgggttgatctcttggaagccgtgggacctcctccctcattcatcttgcaagcaaatcccatttcttgaaaagccnnnnnnnnntcggtttggtagacttggacatcnnnctggcttctgaagnnnnnnnnnnnnnnntggaccattcctgtccctttgttaccatactgtctctggagtgatggtgtccttccctgccccaccacgcatgctcagtgccttttggtttcaccttccctcgacttgccccttccctcccccagtgtcagtttcactccctcttggtttttatcaaatttgccatgacatttcatctgg

SEQ ID NO: 17626 - DNA, 804 bp, Macaca Fascicularis
  misc_feature (1)...(804): n = A,T,C or G
tgagggcatagcnnnnnnnnnngatnnnttcactgtcttttatagtgagcggagtccctggtgggtgcgggtcaccagcactgggaggccaggccatggctcgctcttcatcgaggacacagcagcagagaagctgcacaaggttgtgagctccatcctggcattccgggagaaggaatggcagaggctgcagtcaaacccccacctgaaagagggggctgtgacgtccgtgaacctgactaagctagagggtggcgtggcctataacgtggtacctgccaccatgagcgccagctttgacttccgtgtggcaccggatgtggacttcaaggcttttgaggagcagctgcagagctggtgccaggcagctggcgagggggtcaccttagagtttgctcagaagtggatgcacccccaagtgacacctactgatgactcaaacccctggtgggcagcttttagccgggtctgcaaggacatgaacctctctctggagcctgagatcatgcctgctgccactgacagccgctttatccgtgcggtgggggtcccagctctaggcttctcacccttgaaccgcacacctgtgctactgcacgaccacgatgaacggctgcatgaggctgtgttcctccgtggggtggacatatatacacgcctgctgcctgcccttgccagtgtgcctgccctgcccagtgagagctgagccctggaactcctcaacctttgcccctggggcttccatcacaaccagtgccaaggacctcctcttcccccttccaaataataaagtctatggacagg

SEQ ID NO: 17627 - DNA, 929 bp, Macaca Fascicularis
  misc_feature (1)...(929): n = A,T,C or G
acctcatggcagggccagnnnccagcagcgaggaggatgaggcctcccacagcggcagcagtggagatgaagcccccaagcttncnngaaagcgcccccagaccaaaaccaaacccactcaggcaacgggacccnnnnnnnnnnnnnnnnccccatcccctgaagagaccaaagcagcctcaccagtgctccaggaagatatagacattgagggggaacagtcagaaggacaggacaacggggcggaagattctggggacacagaggatgagctgaggagggtggctgagcagaaggaacacagaccaccccctggccaggaggagaacggggaagacccatatgcaggctccacggatgagaacacggacgatgaggaacaccaggagccacctgatctgccagtccctgagctcccagattttttccaggggaagcacttcttcctttacggggagttccctggtgatgagcggcggaaactcatccgatatgtcacggccttcaatggggaactcgaggactatatgagcgaccgggttcagtttgtgatcacggcacaggaatgggatcccagctttgaggaggccttgatggannnnnnnnnnnnnnnnnnnnnncgtccccgatggannnnnnnnnnnnnnnnnnnnnnnnnnnnnnnncctcaccagctctatggagtggtgccacaggcctgaagtatgtgctacacacacacacacacacacggcctcacacacannnnnnnnnnnnnnnnnnnnnnnnnnnnnnnnnnnnnnnnnnnnnnnnnnnnnnnnnnnnnnnnnnnnnnngctaagcgtggctttannnnnnnnnnnnnnncattcatttgctcattcacactcctaccgataactcaccatgttagttttgtactactgctgtaacaaattatcacaaactca

SEQ ID NO: 17628 - DNA, 694 bp, Macaca Fascicularis
  misc_feature (1)...(694): n = A,T,C or G
cccgttagagtcagccntccccnnncccctccccaaaacatgcccaaggccctgcagagggggaacccgtgtagccttgcccggattctgggannnnnnnnnnnnnnnnnnncctggaaaggctgactcagtctcaggtgcatggggataaaggacaggcatgaacttatctagaagagtgggggcagggtgataaattgttgataaattccactggacttgagcttggcagctgaactattggagggtgggagagtccannnnnnnnnnnnnnnacaagannnnnnnnnnnnnnnngaatcaagatgnnagactggctggctgcagtgacgtacacctgtaatcccagataatccggaggctgagggcaggatcactggagcccagaagtttgaggctgcagtgagctatgatcgcgccactacactccggcttgggcaacagagtgagaccctgtctcttaaaaaagaaagtcagactgccgaggctggccaggtttctgcccacattggacccacatgaggatgcgatggagtgcacctgccccctggtggacagtcctgggagaacctcgggcttccttggcatcactgggcagagccgggaagcgatgaatctggagactgtggagcctcagttcccttgcgtgtgttgatcctgagacaatgagagtttgcactgtatgctggacngc

SEQ ID NO: 17629 - DNA, 1074 bp, Macaca Fascicularis
  misc_feature (1)...(1074): n = A,T,C or G
ttttaaagctttnnnnnnnnnnnnngaatttaaaaatatagtggaatctctttaaaacagtggtggtaaaggataagactgtaatagtatcattatagactacctgtgtcaaacagactttgttacccataattatattttttaagtcatggcacacagatgaaccctgtctnnnnnnnnnnnnnnnnnnnnnnnnnnttctacttagttgtctttatttgtctttgtaaaggtaaactgaggctggagccaaaccgggaacgaagacacaaggcaaatggcagtgagaatagcctttactaggactcgcaggcgaggttcctcggtccaaaggtgcgggccgaggaagtcacgctgagggaggagggtaggggctttttatagcctgagaggtagggaagctggttgtgcaagcagggcctggggggctcttgaaactactagggcaggagttgagtaagggtcatgaggaaggggtctttggaaactgttaaccgaaattgctgtttacgaacttgtggaatgcaggtgagctgcaggtcatgggggagtgtgactgcccagccggaactctgacgcatgtaagtctgcgggtgtgtacaagggtgaagggagtctttaacaaaaggcctgctacaccgggtaannnnnnnnnnnnnnntctagattcctgcctaacattccgacctctttctaataagaaagtgaggcgacgtgttcatctggctgcttcctgctggtatgggtcatcgtggggtttttcggaggtcggaactcgggtataggggtggagcagcatctgnnnnnnnnnnnnnnnggagacttctttcatgtggtcctggatgaagtggaggacacagggagctgatacctggagcataaccctgggctcagtgagagtgcgaggggtccccgagtctgggcctcttcaatcttcatcggtgtnnnnnnnnnnnnnnnngcctccaatacctggagnnnngttgtcacgtggnnncgcagcgaccgtccttanntcggggcagtctgacttccagtggcccatccagcagtgatcgnnnntnagtcaatttg

SEQ ID NO: 17630 - DNA, 749 bp, Macaca Fascicularis
  misc_feature (1)...(749): n = A,T,C or G
aagtgctgcacatgannnnnaaccccgccagtgtnnnaggnnnnnnnnnnntgaggaccacagccagctgcaggcagagtgcgagagactgcgagggcncttgcgcgccatggagagaggtggcaccgtcccaaccgaccttgaggctgctgccgcgagtctgccatcatccaaggaggtggcagagctgaagaagcaggtggagagcgccgagctgaagaaccagcggctcaaggaggttttccagaccaagatacaggagttctgcaaggcctgctacacgctcaccggctaccagatagacatcaccacagannnnnnnnnnnnnnnnnnnnnngtgtatgccgagcacccgggggactgcctcatattcaaggccaccagcccctcgggctccaagatgcagctgctggagacggagttctcgcacaccgtgggcgagatcatcgaggtgcacctgcgacgccaggacagcatccccgccttcctcagctcgctcaccctcgagctcttcagccgccagaccgtggcctagcccgcagccgatctgctcagccggacctgcgggtcccctgccccgccagccacaggctgggtgcacgtcctgcctctgcagccccgcagcagcggtatgactgacagacacgccgagacatatgtcagacttctgctggggcggccagcaccctccccacgtgcagacactgtgtgtcccggagcctggtgtgcgggcgtcggctgccagccca

SEQ ID NO: 17631 - DNA, 461 bp, Macaca Fascicularis
gagtctcaagggtgagataattaaccacaagaaaatgtcacggtttagcgtggtacagtggtgcatgcccgcagtcccaattactggagaggctgaggtgggagggctgtgtgggcccaggagttcaaggtcagtctggacaatataatgagagtctgtctgtaaaatcaaaaattagagaaatcataaaaattataaaattaaaaaagaaaatgtcacaatagctcaggtttcagagaggcatcgtgcactactctgggaaaaaagtgaagtggcagctcagccctgacagcaggacctagaagggctgagatgaagaggctggcctatagagctcagcctagatccacagaaggggcagctgagttcacagagggatactgccatttaagctggttgtgaatgaggtgatatcaagaccaactgcactagtattctctccaggttacaaataccatgat

SEQ ID NO: 17632 - DNA, 624 bp, Macaca Fascicularis
  misc_feature (1)...(624): n = A,T,C or G
ggatgaggagaacacgttggcggctgaccactcggaggaggagaagaaggagctgaaggccccccgggcccggaccagcccagacgaggacgaggacgaccttctccccccagagcagaaggccgagcgggagaaggagcgccgggtggccaataacgcccgggagcggctgcgggtccgtgacatcaacgaggcctttaaggagctggggcgcatgtgccagctgcacctcaacagcgagaagccccagaccaaactgctcatcctgcaccaggccgtctcggtcatcctgaacttggaacnnnnnnnnnnnnnnnnnnnnnnnnnnnnnnnnnnnnnnnnnnnnnnnnngcgagaagaggaaaaggtgtcgggcgtggtcggagacccccagatnnnnnnnnnnnnnnnnnnnncaggcctgagcgaagcccacaacnnnnnnnnnnnnnnnnnnnnnnnnnnnnnncctgacagcgagcaacaaaacacacactttgtcagaacagaaaaaaatgccttaactataaaaagtggagaaatggaaacatatcactcgagggggatgctgtggagacctggcttatgcttcaaaagccacctagctaaattgtgcctaagcct

SEQ ID NO: 17633 - DNA, 744 bp, Macaca Fascicularis
  misc_feature (1)...(744): n = A,T,C or G
ttaagattataccccagatattaagaagaaaacctctaaatttcaaaattatgaagaattacagaattactcatttaaggtactttaaaagaagtttgtacattgtcaaagtaaattttaattcaaatcatgtctgtaaaacttgatgtattttgtgtatgcatgttttcannnnnnnnnnatttaatatatagacctnnnnnnnnnnnnnnnnnnnnnnnnaggttacctagatgttatgagaaattttagttnnnnnnnnnnnntcaagttgcttaaatagccnnnnnnnnnnnnnnnnnnnggctttctatcatttttatgttttaatgcaaaggaaatttnnnnnnnnnnnnnaagtgtttttgattaagcaatgcagcctagaagcaatggttctgttcaatcattcagatgttagtggaagcataaaagtcaagactgcatgttgaaacttttcttttgnnnnnnnnnnnnnnnnnnnnnnnnnnnnnnnnnnnncatgtgctaatttttcacaattattgnnnnnnnnnnnnnnnnnnnnnnnnnnnnnnnnnnnnnnnnnnnnnntggcctgcttccctcatgccctggaatacaactcagagctccaggcagcggaaccatctnnnnnnnnnnnnnnnnnnnnnnnnnnnnnnnntggtctcctgtctaagttggaaatattatgcatgtgcaggactattcgagtattttataaacagtagcacacaataaatc

SEQ ID NO: 17634 - DNA, 708 bp, Macaca Fascicularis
  misc_feature (1)...(708): n = A,T,C or G
agtgcccagagagacacgagagaacccaccatggccccctttgagcccctggcttccggcatcctnnnnnnnnnnnnnnnnnnngcccccagcagggcctgcacctgtgtcctaccccacccacagacggccttctgcaattccgacctcgtcatcagggccaagttcgtggggannnnnnnnnnnnaccagaccaccnnnnnnnnnnnnnnnnngatcaagatgaccaagatgtataaagggttccaggccttaggggatgccgctgacatccggttcgtctacacccccgccatggagagtgtctgcggatacttccacaggtcccacaaccgcagcgaggagtttctcattgctggnnnnnnnnnnnnnnnnnnnnnnnnnnnnnccacctgcagtttcgtggctccctggaacagtctgagcttagctcagcgccggggcttcaccaagaccnnnnnnnnnnnnnnnnnnnnnnnnnnnnnnnntccctgtttatccatcccctgcaaactgcagagtggcactcattgcttgtggacggaccagctcctccaaggctctgaaaagggcttccagtcccgtcaccttgcctgcctgcctcgggagccagggctgtgcacctggcagtccctgcggacccggatggnnnnnnnnnnnnnnnnnnnnnnnnnnnnnnnnnnnnnnnnnncaccctgttcccactcc

SEQ ID NO: 17635 - DNA, 733 bp, Macaca Fascicularis
  misc_feature (1)...(733): n = A,T,C or G
gggcaggagganntgggcctcctgagctccttccctgaggctgtctcctgggaatgctggacagggggattactcacacccccatttggacatctggggaagtggagattaaccccttctccagactccagaatctttgtaactcgtgccttgcctctcaggacctggcatagtggctggccctatagagtatggaaaaggcctctgccttcctcaggagggacacgtcgggggtcatcaccctttctcacacctgcttcctaatgagcactcagcagcatggctgagacctggggcttgacaggcctctgctccttagattaggatgctctggtattcctggggccagttaaaatgggtcagtgaggggctctcctggcctcaatctccatctttagggtctccacagaggaacattgaagtcttccagaaaccttgaggagctgggctagatacttggagagtagccctgtcttgtcccctcctatccccagattagcaccacccctctcactcttgggttggatgttatgggaattacaacctatcattcccaatgcctccctttcctggaggagcctgccacattcccctgctgagggatcccagagaggacaggtgcccaccccacaggcccttttctgcaccatggaaccaggtggaacctgtctggccccttacccactgggttcttactccttcacaacagtcagcactccccctctgcccccca

SEQ ID NO: 17636 - DNA, 764 bp, Macaca Fascicularis
ggcagtgctagcttgatggaggcagcatgcttcccagagggagcaggccggagccacagggccagagggagctggaacccgaggggccggggaagccgccagcccagaacacccctagtgagggtgtgagaagtgccttctccttccccaggatggactcttctcggctcaggctctgctggtggaaagcgattcactgtacaaactctttttttatggaaaaaatggcatcaaccaccatggatttttacaagatccatttgcctttctgggagcagaaacagccattgcggcccaaggaggggaactgagtcacactgaggctctctgagactctttagagcagctttgggatcccaccctggggacccccacgattggccatctgtagccatctgcacacacctccgagacagtccagtgtcacctctctcagagcctctggctggttattagaattaattctatccccagtcagctccttttccgttctgttctgctgggagttctagaaccacttcctgctacaggagtggactcatgccctgctggcttccagcttcaggcaccagcatccacctcggccccaccagtggatcccctgtggtcaggctgggcagccccagagagaggatgtggaaagcactttttggctgacttcttttggggttggcaacaggacagagttcacgggaggccagtgggtgggccatgagggacaggggcttttttcacttcttcctctgctggttactcagggtcat

SEQ ID NO: 17637 - DNA, 694 bp, Macaca Fascicularis
acgtcacggaaaattggtgtctatggtccagtgcattgtataaagaccacagttgaaaatgaactacctccaccagaaaatatagaagtcattgttcaaaatcagaactatgttcttaagtgggattatacgtatgcaaacatgacctttcaagttcagtggctccagaaacctggaaaccatttgtataaatggaaacaaatacctgactgcgaaaatgtcacaactacccagtgtgtctttcctcaaaacactttccaaaaaggaatttaccttctccgcgtacaagcatctgatggaaataacacgtctttttggtctgaagagataaagtttgatactgaaatacaagcttccctgcttcctccagtctttaacattagatcccttagtgattcattacatatctctatcggtgctccaaaatggtctgaaaacaagcctgtgatccaggattatccactgatttatgaaattcttttttgggaaaacacttcaaaggctgaggtaaaaagactatagtataattttgtagcttagagttataactgtgatttaggtaaataaagcttgaatttaaaatttgggggaaatttttaaacttttatgtgggctgagtgcagtggcctgtaatcccagcacttcaggaggccaaggcgagaggatcacttgagcccaagggtttgagaccagc

SEQ ID NO: 17638 - DNA, 779 bp, Macaca Fascicularis
  misc_feature (1)...(779): n = A,T,C or G
agcaagtatatgacacaaagannnngaagggaagagctaatgatgctatagcttctgcttgtctctatattgcctgtagacaagaaggggttcctaggacatttaaagaaatatgtgccgtatcacgaatttctaagaaagaaattggtcggtgttttaaacttattttgaaagcactagaaaccagtgtggatttgattacaactggggacttcatgtccnnnnnnnnnnnnnnnnnnnnnnnnnnnnnnnnnnnncagatggcagctacccatatagcccgtaaagctgtggaattggacttggttcctgggaggannnnnnnnnnnnnnnnnnnnnnnnnnnnntacatggcctcacaggcatcagctgaaaagaggacccaaaaagaaattggcgatattgcnnnnnnnnnnnnnnnnnnnnnnnnnnnnnnctatagacttatctatcctcgagccccggatctgtttcctacagacttcaaannnnnnnnnnnnnnnnnnnnnnnnnnnnnnnnnnnnnnnnnnnnnnnnnnnnnnnnnnnnnnnnnnnnnnnnnnnnnnnngttgtacatagcctatacaaaatgctgggttgagcctttcatgaggaaaaacaacagacatggtacgnnnnnnnnnnnnnnntactattgcttggcattctgtatgtatatataccagtgaaacatatttaatgatttaaatttcttatcaaatttcttttgtagcaatctaggaaactgtattttggaagatattgaaattatgtaatct

SEQ ID NO: 17639 - DNA, 778 bp, Macaca Fascicularis
  misc_feature (1)...(778): n = A,T,C or G
ctgcctcagtgncnnnnccngaaaaaggcaaagaggcggacagtacagggctccttcctcctacctcaggcctgatccatcgtgcccttgactttgctgtcccaaagtttcttagctgactttggctttcacatttgttctttccagagctaactgataagagtggaggaggaatgcctcctcctaagagtcagttgaaagaaagacaagagagtcacatcttagctttnnnnnnnnnnnnnnnnnnncaggaataggttagggaatggtcactcctgattttccaacagtcgctccttctctgcagatatcttcctttgggaagacaagaatttttcttaataacaaagatccctttacgagttattccttctttcagttcatctcactggagcacagccaagatggacatgtttatggatagtgctctagatgtgaaaacagatagaactggtttgtgggacaggggcagcttgcttaggagagggaataacgcaggtcccttttcttggaaggcttgcactatggccatgacagtgacannnnnnnnnnnnnnnnnnnnnnnnnnnnnggttgtctttctttaccttgtgtcttctcttgtaaaaatgaaactcaaaaataaaataaatgtgtcaaattttgaaaaaaagaaaaactgaaaaagctaacatgaattgtgtgaaattgcataatgctgtaatgctaacctacaatatgtaatgctatcttgtatgttgaatttgttaatgcaccacacaaagtgcaaaaataaaaa

SEQ ID NO: 17640 - DNA, 728 bp, Macaca Fascicularis
  misc_feature (1)...(728): n = A,T,C or G
ggagaaaatcaagcagctgnagatgaactaaggaaagagataagtaaaacgatgtnnnnngaaatggaaatcgttggtcagtttaacctgggatttataataaccaaactgaacgaggatctcttcatagtggaccagcatgccacggnnnnnnnnnnnnnnnnnnnnnnnctgcaacagcacaccgtgctccagggacagaggcttattgcacctcagactctcaacttaactgctgttaacgaagctgttctgatagaaaatctggaaatatttagaaagaatggctttgattttgttattgatgaaaatgctccagtgactgaaagggctaaattgatttccttgccaactagtaaaaactggaccttcggaccccaggacatcgatgaactgatctttttgctaagcgacagccctggggtcatgtgccggccgtcccgagtcaagcagatgtttgcctccagagcctgtcggaagtcggtgatgattggaactgctcttaacacaagcgagatgaagaaactgatcacccatatgggggagatggaccacccctggaactgtccccatggaaggccaaccatgagacacatagccaacctgggtgtcatttcgcagaactgacagtagtcactgtgtggaatcatcggttttattgcagatttttatgttttgagagacaggggtcttcactaaccttttttgttttcaaatgaacctgctac

SEQ ID NO: 17641 - DNA, 702 bp, Macaca Fascicularis
  misc_feature (1)...(702): n = A,T,C or G
agacataaatggtatcaagctttacacttcatatggagttaaacttggtcagtgttactaaataaaatcaggatgtgattctaccgtacattgcattattcataattgtttgaaattacattaaataaatcaacttattaaatactaaagttttgttcctttttaaaggaaataaccacaaaattttccccagcccaaattccagcgccaattttaggccaactttggttgttttcttccaaaagtgcttatgtggaactggggtnnnnnnnnnnnnnnnnnnnnnnnnnnnnnnnnnnnnnnnnnngaatgcatgatctgtgaaggtagtnnnnnnnnnnnnnnnnnnnnnnnnnnnnnnnnnnnnnnnnnnnnnnnnnnnnnaccatccgtgcttgatgtagcctggagccccaggcccactgatgcactgggcatggggccctggcttgaaggctggagccgttactgttgttcatgtgcatnnnnnnnnnngtgggnnnnnnnnngcagctgtgtgctgattaaatgtctttggcaaggcagctnnnnnnnnnnnnnnnnnnnnnnnnnnaggcaccaaggatcacccagcccagtgaaggcagaagaggtcacatgtggatcaacctgtgtctttccagcagaatctgatnnnnnnnnnnnnnnntgtnnngcgnaagnnnnnnnnnnnnnnngcat

SEQ ID NO: 17642 - DNA, 782 bp, Macaca Fascicularis
  misc_feature (1)...(782): n = A,T,C or G
gcagctacaaccacgactgcctggggcttggtttgagggaggtggtggtattacttcccattggagagaatctgagctcatggcacacagcctgtaagaggtgtcagacttggagtccanngctttctgtccccaggcttggcacgttttccctctgccacgctgcctgaccgctgggtgagacgtggtccgtaaagccttcacctaaatacaaccctaatgctgggtttgaatccatttttattcaaagggaaaagaatcccgcccaccaagacgcgacccctcagacaggggtccaagaagcccctgctggaggacgaccctcagggcgccaagaagatctcgtcggagcccgttcctggcgagagtaagagccaccgggctgggtcgaggcaggaccagcctgctccgtgctcagacacgacccctgtccttccccacctgtgcagtgnnnnnnnnnnnnnnnnnnnnnggaagggattgctgctgaggtcgatgagctccagctggctgaggctgggcagggcaggcagggcccgaagctggttcttctgcaggtgcaggctctggagtccgggccccaggcctgaaaaggccccaggagaaatctgcaggagttgccaggccccagtgtgagctcctggcagacctgtcccacccccaagtctnnnangaagccccatcttccctcagcagaagagaagctggagagnnccagatgatccagacaggaagtgcggtgcnnnnnnnnnnnnnnnnnnnnnnnnnnnnncactgctctg

SEQ ID NO: 17643 - DNA, 799 bp, Macaca Fascicularis
  misc_feature (1)...(799): n = A,T,C or G
gtagagttaaactnnccaagaaacaactacaagctatagaatttaacaaagctttacttnnnnnnnnnnnnnnnnnnnnnnnnnnnnnnnnnnnnnnnnnnnnnnnnnnncagnnnnnnnnnnnnnnnnnnnnnnnnnntgtgttaatccaagctgcccagcnnnnnnnnnnnnnnnnnnnnnnnnnnnnnnnnnnnnnnnnnnnnnnnnnnnnnnnnnnnnnnnnnnnnnnnnnnnnnnaaattaagcnnnnnnnnnnnnnnntgaaaatttctcaaggtaatatttctaaagcatgtctaatattaagaagcatagaggagttaaagcataaaccaggcatggtgtctgcattagttaccatgtannnnnnnnnnnnnnnnattgatagtgccattgaggtcttcgcactannnnnnnnnnnnnnnnnnnnnnnnnnnnncaaatctcctgctcatttgtccttgataagagaagctgcaaacttcaaactcaaatatgggcggaagaaggaggcaattagtgacctacaacagctatggaaacaaaatccgaaagatattcacaccctggcacagctaatttctgcttactcacttgtagatccagagaaagccaaagctcttagtaaacacttgccatcgtcagatagtatgtctctaaaagtagatgttgaggctcttgaaaattctcctggtgctacgtacattcggaagaagggggaaaagttactggagatagtcaaccaaaggaacaaggacagggagatttgaaaaaaaaaaaaaaaaaaaaaaaaagg

SEQ ID NO: 17644 - DNA, 924 bp, Macaca Fascicularis
  misc_feature (1)...(924): n = A,T,C or G
gaatacggatgagannnactgcatcgacaacgaggcgnnnnacgacatctgcttccgcaccctcaagctgaccacccccacctnnnnnnnnnnnnnnnnnnnnnnntcggccaccatgagcggggtcaccacctgcctgcgcttcccggnnnnnnnnnnnngacgcannnnnnnnnnnnnnnnnnncatggtcccctttcctcgcctgcacttcttcatgcctggcttcgcgcccctcaccagccggggcagccagcagtaccgcgcgctcacggtgcccgagctcacccagcagatgttcgactccaagaacatgatggccgcctgcgacccgcgccacggccgctacctgacggtggctgccatcttccggggccgcatgtccatgaaggaggtggacgagcagatgctgagcgtgcagaacaagaacagcagctacttcgtggagtggatccccaacaacgtgaagacggccgtgtnnnnnnnnnnnnnnnnnnnnnnnnnnnnnnnnnnnnnnnnnnnnnnnnnnnnnnnnnnnncatcnnnnnnnnnnnnnagcgcatctccgagcagttcacggccatgttccggcgcaaggccttcctgcactggtacacgggcgagggcatggacgagatggagttcaccgaggccgagagcaacatgaacgacctggtgtctgagtaccagcagtaccaggacgccacggccgacgaacagggggagttcgaggaggaggagggcgaggacgaggcttaagaacttcnnnnnnnnnnnnnnnnnnnnnnnnnnnncttctattgtcctcaagcacggtctttctacttgtaaactatggtgctcagttttgcctctgttagaaaaattcacactgttgatgtnnnnnnnnnnnnnnnnnnnnaaaattacagtatgtctggaagg

SEQ ID NO: 17645 - DNA, 834 bp, Macaca Fascicularis
  misc_feature (1)...(834): n = A,T,C or G
gttcatttgtaaattattattcatatagaccnnnnnnnnngatataactctatggtacacctgcttatgtgtnnnnnnnnnnnnnnnnnnnnnnnnnnnnttttgttaagcagcacttacgtagactgcatttccaaatgtgttgagcactcagagtgtagtcaacagtacgttcttttaatgaataccagttttaatttatagactgccatggccttaaatatattctgtacaatatactgcactgtgttgcacagacactacttgcttttctccattcatatttttatgagtagaatctgggcttttaaatttctcttcttattctttgaagcatgttgcatacttccctggtgagatggatggttctgtaaatgaagggatatttaaacttgctactgttgttcaacaccattcatggtcagtctgaaccattacaaagaatgtggcaacttgcttgtgcctaaaaggaggaattggaactagaatgtgtgactttgtggggactgcataggtttattaattgacctatagctaaaccttaatgtgtttgtgtgtctatannnnnnnnnnnnnnnnnnnnnnnnnnnnnnnnnnnnnnnnnnnnnnnnnnnnnncattaactnnnnnnnnnnnnnnnnnntaacagttactgaactatgtaaatatgtgaattttttttatttaggtggatgcattttttgtctgtttactgctcttctcagctttattcaataaacttgcattttaagggttgtattggcaattttaacttaaaatgtgcatcacgatggaaggtgcagacttttttggaaggtgatagtaagtttccaa

SEQ ID NO: 17646 - DNA, 767 bp, Macaca Fascicularis
  misc_feature (1)...(767): n = A,T,C or G
accagatgatcancgtcaagaacttcatcttggcagccgacgtcatgaagagcatttcgctgctgcgctaccaggaggagagcaagacactgagcctggtgtcgcgggatgccaagcccctggaggtgtacagcgtggacttcatggtggnnnnnnnnnnnnnnnnnnnnnnnnnnnnnnnnnnnnnccgcaacctcatggtgtacatgtacctgcccgaagccaaggagagttttgggggcatgcgcctacnnnnnnnnnnnnnnnnnnnnnnnnnnnnnnncgtgaacacgttctggaggaccccatgccggggggccaccgaagggctcagcaaaaagtcggtcgtgtgggagaataagcacatcannnnnnnnnnnnnnnnnnnnnnnnnnnnnnnnnnnnnnnnnnnnntgcaggagaagacctaccggcggcnnnnnnnnnnnnnnnnnnnnnnnaccaccatgcttccgcaccacgccggcctcaacccccgtgccttccggatgctgcacgtggaccgccgcaccctccagaatgnnnnnnnnnnnnnnnnngatggcgagctgctcaaccgctacctgtacctgagcaccatggagcgcagcgagctagcgaagaagatcggcaccacgcccgacataatcctggacgacttgctggagacggaccgcgtcaccgcccacttctagccccgtggatgccgttgccaccagcaccaccgcactacctcccacccccatttnnnnnnnaaacacaagaaa

SEQ ID NO: 17647 - DNA, 734 bp, Macaca Fascicularis
  misc_feature (1)...(734): n = A,T,C or G
gagcgtggaccactaccccattctggtggcagtgacgggcatcctggtgcagctcctggtgcgtggcccagcctcagagagagagcgagccacatcagtactcctggcagatccctgcttccagctacgctcaatatgctatctcctgggacagccagagcccccagcacctggcactgccctgccagcccctgataggaagcgcttctcnnnnnnnnnnnnnnnngattatatcagtgccgatgagctggcccaagtggaacagatgctggcacacctgacctctgcatctgcccaggcagcagctgcctctctgcccaccagtgaggaggacctctgccccatctgctatgcccaccccatctctgctgtgttccagccctgtggccacaagtcgtgcaaagcctgcatcaaccagcacctgatgaacaacaaggactgcttcttctgcaaagccaccatcgtgtctgtagaggactgggccaatacgagtactacctcctcagctgcctaggcctcacagcctgtgccatcctggaacctccacccttgaacccagagccaggctgggccctatttatgagctccctttgcccttctcctgtatctgcccccccgcaaccgccaccaccaccacattcaacctccttgcctgcctgtatcctcattggtgggagcccagccatggccctaattgtgcctgagcttgactctcagtcagggccacagtcagc

SEQ ID NO: 17648 - DNA, 700 bp, Macaca Fascicularis
  misc_feature (1)...(700): n = A,T,C or G
ggaagctgttggtgcttttgtagtctttgatatatcaagaagttctacatttgaggcagtcttaaaatggaaaagtgatctggatagtaaagttcatcttccaaatggcagccctatccctgctgtcctcttggctaacaaatgtgaccagaacaaggacagtagccagactccttcccagatggaccagttctgcaaagaacatggctnnnnnnnnnnnnnnnnaacttctgcaaaggataacataaacatagaggaagctgcccggttcctagtggagaagattcttgcaaaccaccaaagctttcataatgaagaaaacgatgtgggcaaaattaagctagatcaagagaccttgagagcagagagcaaatnnncagtgttgctgatagggcttctgcttctctcatgtgtgccnnnnnnnnnnnnnagttcctgagaatgggttatggatgtcatgttagctgtnnnnnnnnnnnnnnnnnnnnnnnnnnnnngcagnnnnnnnnnnnnnnnnnnnnnnnnngaaaatggaactttgggagaagnnnnnnnnnnnnnnnntctgtaannttaacagactgannnnnnnnnnnntttgnnnattgttgccatcatatggaannnnnnnnnnnnnnnnttttaaacatctttttatatgacagttccttaggatttggtaagcctnnnnnagttgtag

SEQ ID NO: 17649 - DNA, 746 bp, Macaca Fascicularis
  misc_feature (1)...(746): n = A,T,C or G
ctgaaaaataaaacgatatagaactagtgactaattctcncttacagctnnngcttggtcccacccactgaagtagctcatcgcagtgcgggccgtattagaggcagtggggtacgttagactcaaatgggatagtatactaggtgccagtgttaggatgtcagttttacaaaannnnnnnnnnnnnnnnnnnnnnnnnnnnagttattgtttggggatgtgtgttgtggttttgcttttgtttttttagactgtattaataaacaaatacaacacaagctggtcttgtgttgctggttcctattcagtatttcctggggattgtttgctttttaagtaaaacacttctgacccatagcgcagtatgtctgaattccagaggtcacatcagcatctttctgctttgaaaactctcacagctggctgcttcacttagatgcagtgagacacatagtttgtgttccgattttcacatccttccatgtatttatcttgaagagataagcacagaggagaaggtgctcactaacagaggtacattactgcaatgttctcttaacagttaaacaagctgtttacagtttaaactgctgaatattatttgagctatttaaagcttattatattttagtatgaactaaatgaaggttaaaacgtgcttaagaaaaatgcactgatttctgcattatgtgtacagtattggacaaaggattttattcattttgttgcattattttgaatattgt

SEQ ID NO: 17650 - DNA, 494 bp, Macaca Fascicularis
  misc_feature (1)...(494): n = A,T,C or G
cctctcccttccctccctccccaactccccaaccactgtggaaggggagaagggagtgacccannnnnnnnnnnnnnntcagggtctagaccacggtggtgccagcctggggggcaggggccctcagctnnnnnnnnnnnnnnnnnnnnnnnnnggagggtgcgcctcttccctctacccccgcaccacctgctgtgtgccagcccgagacggttcctgcctgtcttggggattggtggagggaggannnnnnnnnnnnnnnnnnnnnnnnnnnnnnnnnnnncatccagggctgtgggggtctggaggaggggacatgaggtgagaggtatcctggccgagggcggggggcagcgggggtctccctccggacctacctcagggagctgagcgtgcaggcgctccagggcaggcctgggacagagtcaaggcccagagaataaaggtagctaatctcataataatatttttattagaatgttctgatgataaaa

SEQ ID NO: 17651 - DNA, 638 bp, Macaca Fascicularis
caaaaaaaaaaaaaaatgctatttgctatgatttttggatgatatctttataatattaagggatgtcccttccttggattttgctttttaaaggaaaggtaacatctaagataagcctttgaaatcttgaaattcagagtgctttgggatttatagagagctgtacagagcattggtgattgttattccttgagttcttaaaacgtaacccaggcctgggcccttccttcctctgtgcccaactctcatcctctgtggtttgtggtttcagttgttgccttgtccgtcaagatccgcagttatgaagaacacatgcagaaacatcgaaaggacaaagcccacaaacgctatctgctgatgagcattgaccagaggaaaaagatgctcaaaaacctccgtaacaccaactatgatgtctttgagaagatctgcagggagctggggattgagtacaccttccctcctctgtattaccgaagagcccaccgccgattcgtgaccaagaaggctctgtgcattcgggttttccaggagactcaaaagctgaagaaggaaaaaagagccttaaaggctgcagcagcagcccaaaaacaagcaaagcagaggagcccagacagccctgccaacactggaccaga

SEQ ID NO: 17652 - DNA, 430 bp, Macaca Fascicularis
  misc_feature (1)...(430): n = A,T,C or G
gggagccaaaagggtcatcannnctgcccnnnctgctgacgcccccatgttcgtcatgggtgtgaaccatgagaagtatgacaacagcctcaagnnnntcagnnnagcaacgnntccngcaccaccaactgcttagcacccctggcgaaggtcatccatgacaactttggtatcgtggaaggactcatgaccacagtccacgcccnnnnctgccacccagaagactgtggatggcccctccgggaaactgtggcgtgatggccgcggagctctccagaacatcatccctgcctctactggcgctgccaaggctgtgggcaaggtcatccctgagctgaacgggaagctcactttcatggccttccgtgtccggcactgccaacgtgtcagtggtggacatgacctgccgtctggaaaaacctgccaagta

SEQ ID NO: 17653 - DNA, 708 bp, Macaca Fascicularis
  misc_feature (1)...(708): n = A,T,C or G
cggagaccctaactacctgcaccgcannannacgctnnnttgcatcaatgtgctgtctgaggtctgtgggcaagacatcaccaccaagcacatgctgcccacggttctgcgtatggctggggacccggtggccaatgtccgcttcaatgtggccaagtctctgcagaagatagggcccatcctggacaacagcaccctgcagagtgaagtcaagcccatcctagagaagctgacccaggaccaggatgtggacgtcaaatactttgcccaggaggctctgactgttctgtctctcgcctgatgctggaagaggagcaaacactggcctctagtgtccacctccaacccccacaagtccctctttggagagacactggggggcctttggctgtcactccctgtgcatggtctgaccccaggccccttcccccagcacggttcctcctctccccagcctgggaagatgtctcactgtccacttcccagtgggctgggggagcacggggttggacaggacagcgaccctgggaggaaggggctactccgcccacgtcggggagagatgtgagcatcccnggtcattggatcttgttgttgtaatgggaacccctcccccatttacttctccacctcccgtccttcccctcattggttttttttttgtgtgtcaactgtgccatttttattttattccttttattttccccc

SEQ ID NO: 17654 - DNA, 716 bp, Macaca Fascicularis
  misc_feature (1)...(716): n = A,T,C or G
aaaaatgaagggacgcttgaatgagtctcggcacttcgcagcnnnaaggaatgaatggacccaggccctgcccgtgatggtcgcccacatcccaaanngnnnnnnnnnnnnnnnnnntgcccccaccagctatgaggtcttcctgtgcccccaaaaaatatcacactgaaactgattctgtccccagacccaactaccaatttacaggaaacagagaaatcagggaaacatgtagaccacactacggggacacaattagcaaagtctggaccacggggagctcnnnnnnnnnnnnnnnnnatgtcttcagcaagaaagagagatgtctggagnnnnnnnnnnnnnnnnnnnnnnnnnnagatatacacacacacacacacgaaactacagtgctcaggaatgcgcacttcagnnnnnnnnnnnnnnnnnnnnncgtgatatggtttgtctgtgtccccacccaaatctcatcttgaactcccacatattgtgggagggaccaggtaggaggtaactgagtcacggggacaggtctttcccgtgctgctctcgtgatggtgannnnnnnnnnnnnnnnnnnnnnnnnttaaaaatgggagtttccctacacaagctctttttgcctgccaatatccacgtaagatgtgacttgctcctccttgccttccaccatgattgtgaggctcccctggccacgtggaactgtgagtctcata

SEQ ID NO: 17655 - DNA, 764 bp, Macaca Fascicularis
  misc_feature (1)...(764): n = A,T,C or G
cgccccgggcgagctggccaagtacnnnctgccggggctggcgcagctcaagagccgcgagtcgtacgtgctgtgctacgacccgcgcacccgcggcgcgctctgggtggtggagcagctgcgacccgagcgtctccgcggcgacggcgaccgacgaacatgcgacttccacgaggacgactcggtgcacgcgtaccaccgtgccaccaacgccgactaccgcggcagcggcttcgaccgcggccacctggccgcagccgccaaccaccgctggagccagaaggccatggacgacacgttctacctgagcaacgtcgcgccccaggtaccccacctcaaccagaatgcctggaacaacctggagaaatacagccgcagcttgacccgcagctaccaaaacgtctatgtctgcacagggccactcttcctgcccaggacagaggctgatgggaaatcctatgtgaagtaccaggtcatcggcaaaaaccacgtggcagtgcccacacacttcttcaaggtgctgatcctggaggccgcaggcgggcaaattgagctccgctcctacgtgatgcccaacgcacctgtggacgaggccatcccactggagcgcttcctggtgcccatcgagagcattgagcgggcctcggggctgctctttgtaccaaacatcctggcgcgggcaggcagcctcaaggccatcacggcgggcagtaagtgagggtggagcccagcaaggctgggcgtgtgcaggccgggagcataaa

SEQ ID NO: 17656 - DNA, 665 bp, Macaca Fascicularis
tcaaataaatgcattggccaacaatgtactccaattgctggatatccaagcctctcagcttcggagaatggagtcttccatcaatcatatctcacagactgtggatattcataaagagaaagtggctcgaagagagattggtattttgacaacaaataagaatacgtcaagaactcacaaaataatagcacctgcgaatatggagcgccctgtaaggtatattcggaaacccatcgattacacagttctggatgatgtgggccatggtgtcaagcacggaaataaccagcctgcaagaactggcactctgtcgagaacaaatcctcctactcagaaaccgccaagtcctcccatgtcaggccggggaacactgggacggaatactccttataaaaccctggaacctgttaaacccccaacagttcctaatgactatatgacgagtcctgctaggcttggaagtcagcatagtccaggcaggacagcatctttaaatcagagaccaaggacacacagtggaagtagcggaggaagtggaagtcgagaaaacagtggtagcagtagtattggcattcccattgctgtgcctacaccttcgccacccactattggaccaggagagtcgttttttaaagggagtataatacgtgctactatttatgagc

SEQ ID NO: 17657 - DNA, 769 bp, Macaca Fascicularis
  misc_feature (1)...(769): n = A,T,C or G
catactgacaggagggttgatagagccacagggtcactctcgattatcaatagannnnnnnnnnnnnnnnnnnnnnnnnnnnncctcattgccacnnnactcaaagatcaaaagtcatatatcagaaatataatatgtcctcagacaaaaagaaagttgacatatnnnnnnnnnnnnnnnnnnnnnnnnnnnnnnnnnnnnnnnnnnnnnaaactgttagaagtatctgannnnnnnnnnnnnnnnnnnnnnnnnctctactattcttcctaataggacatgtttaaataactgtgcaaggggtgatgctggctggttcatgccactttttcagagtatgatcatattggctacgtatgcagtctgtgaattatgtaacatactctttcttgagggctgcaaattgctgagtgctcaaagtagagtaagttttaaattgaaaattacataagatttaatgcccttcaaatggtttcatttagccttgagaatggttttttgaaacttggccacactaaaatgattttttttttacatagaatatgnnnnnnnnnnnnnnnnctccaagttcacagcatcatttcttcagaactccccttcattgaatagtgatcatttattaaatgatacactgcactcactgaaagaacatgtcatgaagcaccgtggaatcaaagagaaagatataaattcattcccacagccttcaagctgcagtgttttagattgcttcgaaaaatgaaaaagttttgcctttttctgtatatag

SEQ ID NO: 17658 - DNA, 959 bp, Macaca Fascicularis
  misc_feature (1)...(959): n = A,T,C or G
attgtgcatcaagctggcatgttgaagcgaaattgttttgcctctgtcnnngaaaaatacttccaattccaagaagagggcaaggaaggagagaacagggcagttatccattatagagatgatgagaccatgtatgttgagtctaaaaaggacagagtcacagtagtcttcagcacagtgtttaagnnnnnnnnnnnnnnnnnnnnnnnnnaggtgttcatgcaggagttcaaagaaggacgcagagccagccacacagccccacaggtcctctttagccacagggaacctcctctggagctgaaagacacggannnnnnnnnnnnnnnnnnnnnnnnnnnnnnnacctttgtgctgttccctcgtcacaccaatgccagcgctcgagacaacaccatcaacctgatccacacattccgggactacctgcactaccacatcaagtgctctnnnnnnnnnnnnnnnnnnnnnnnnnnngcaaaaacatctgacttcctcaaggtgttgaaccgcgcacgcccagatgctgagaaaaaagaaatgaaaannnnnnnnnnnnnnnnnnnttcatcccgctaatcttgggaataagaggaggaagcggctggcaactgaagtctggaacacttgctactggataatcgtagcttttaatgttgcacctcttcaggttcttaagggattctccgttttggttccattttgtacacgtttggaaaataatctgcagaaacgagctgtgcttgcaaagacttcatagttcccaagaattaaaaaaaaaaaaaaaaaattccacttgatcaacttaattccttttctttatcttccctccctcacttcccttttctcctaccctcttttccaagctgtttcgctttgcaatatgttactggtaatgannnnnnnnnnnnnnnnnnnntaacttgttttctcctanagtatttgagttcaaaactcct

SEQ ID NO: 17659 - DNA, 656 bp, Macaca Fascicularis
  misc_feature (1)...(656): n = A,T,C or G
atgatgtatgccccgccccctcctcctccgcctcccatgnnnnnnnnnnnnnnnnnnnnnnnnnnnnnnntgggggtggcgggcatgccgcccttcgggatgcctccagctcccccaccgcctccaccacagaactagacttgttttttaagaaaatatatattatatatagagagaattggtcnnnnnnnnnnnnnncgaacctcaccatatggagnnnnnnnnngggacgcacgcatgtgattgtgtgtgcacgcatgtgtgtgtgtgcacgcactgggctgggccaagcgactgaggattcgnnnnnnnnnnggcaggtggtagtaggggcgccagcttgagctctcctggcgccccgtagcatcgagtgtcttctttgtcttctttctctcctcacccaactccctttgcctctccccaaaccgggccgccaggatccctccccgcggcggcgatggcccgagccatgagagtgaggactttccgcgcccattggtgacccttccaggcagacagcctcagcaacgcccctggtggnnnnnnnnnnnnnnnnnnnnnnnnnnnnnnnnntttgtggacggaatnnnnnnnnnnnnnnnccatatcgtgaaattttgattaattttttttctttttcctttgttatttcctta

SEQ ID NO: 17660 - DNA, 181 bp, Macaca Fascicularis
  misc_feature (1)...(181): n = A,T,C or G
ctgagcaccaggtggtctcctnnnnnnnnnnnnnnnnnacccactcttccaccttcnnnnnnnnnnnnnnnnntgccctcaatgaccactttgtcaannnnnnnnnnnnnnnntgacaacgaatttggccacactgaatctcccctcacagtttccatgtagaccccttgaagaggggagg

SEQ ID NO: 17661 - DNA, 721 bp, Macaca Fascicularis
  misc_feature (1)...(721): n = A,T,C or G
ggcgccctggagcctcacatcaacgcgcagatcatgcagctgcaccacagcaagcaccacgcggcnnacgtgaacacannngaacgnnaccgagagaagtaccaggaggcgttggccaagggagatgttacannnnnnnnnnnnnnnnnnnntgcactgaagttnnnnnnnnnnnnnnntatcaatcatagnnnnnnnnnnnnnnnnctcagccctaatggtggtggagaannnnnnnnnnnnnnnnnnnnnnnnnnnnnnnnnnnnnnnnnnnnnnnnnnnnnnnnnnnnnnnnnnnnnnnnnnnnnnnnnnnnngtgnnnnnnnctcaggttggggttggcttggttttaataaggaacggggacagttnnnnnnnnnnnnnngtccgaatcaggatccactgcaaggaacaacaggccttattnnnnnnnnnnnnnnngatgtnnnnnnnnnnnnnnntnnnnnnnnnnnnnnnnnnnnnnnnnnnnnntacctaaaagctatttggaatgtaatcaactgggagaatgtaactgaaagatacatggcttgcaaaaagtaaaccacgatcattatactgatcgtaccctaatgatctcagcaagataatgtcctgtctgctggtatagagtactgcacaagtacatactgaaaatcctataaggtagcgtttcttgattgtttgattattcattgaagaaacatttattttccaattg

SEQ ID NO: 17662 - DNA, 752 bp, Macaca Fascicularis
  misc_feature (1)...(752): n = A,T,C or G
cagctnnnnnnnnnnnnnnnccagtggtggctcactgctaactctcaacaaaatgccccatgattatgggcaggaaggacctctagaaggcaaaatttagcctgcagacaannnnnnnnnnnnnnnnnnnnnaagccctaaaattctnnnnnnnnntccacaaaacagaagctgaagcgcatccagaggtgctnnnnnnnnnnnnnnnnctgaatcattctcgatataactcgagaccttttcaacttggcttcctttcttggttcataaatgaattttagtttggttcacttacagatagtatctagcaatcacagcactggctgagcggatgcatctggggatgaggttgcttactaagctttgccggctgctgccggatcacagctgctttctgttgtcattgctattgtccctctgctacgttcctattgtcattaaaggtatcactgtccccacctggcattccttctgaccatccacagcatcgttttgcattcaaattaagggttaagaaaagggatattnnnnnnnnnnnnnnnnnnnnnnnnnnnnnttttaaaaaggcatattgctttttctaatgtggttatttctctgatttgaaaaaaaaaaagtactcgtcaatatttaaacnnnnnnnnnnnnnnnnnnnnnnnnnntattttcccccttttctgcattttgctattgtaaatatgttttttagatcaaatactttaaaggaaaaaatgttggatttataaatgcta

SEQ ID NO: 17663 - DNA, 692 bp, Macaca Fascicularis
  misc_feature (1)...(692): n = A,T,C or G
gctataaccccatggaggcccacatcaacttctccctgtcggcctacannnnnngcgcagagaccaacgccgcccgcctggcacattacctggagaaggcnnnnnnnnnnatgcgtgccctnnngcagagccacccccgggccaagctctgagcccctaggactcaggcctnncaatgccacagccaagcccaccctgggatgggccacccaccagggctcagcccattggttccctcttccctggtccccccaaatctactaagtcacggaccacatcctccaggggcctgcaggccccagccaagtgccttccgtgggtcatctcagcacctgccagggcccgacctggggctgagtgcagaggctgagcgggacgttaggcccgggccccggtgcctcctccaccggtgcctcctctggggaagggaaccagccctttggaacaggagactggcaagagctctttgtctcaccagctcacccccgccactccctgccatctctatgaccaggccagcgtctgtaccctgcttcccagactcccaggacctggagacaggactgtctggggcaaggggccagggtgtgaggtttcgcctccgtggcggctgtgttcctgtgggtagcatggctagcgagccgcttctggttccactcagcttggttcctgcccctgccctgttgtatgat

SEQ ID NO: 17664 - DNA, 686 bp, Macaca Fascicularis
catttaaaggctgcaccagaaagaaacaccagcctaagtcccagcttttttgttaatgacacataacccgcggtgtgacaaatagagttttggcaataacacatgacaaatctcttgcgaggaggagattcagagaccacaacctatccgcgaaatgtccggcacgctgaggacacaacacagactcgagtctgttccatgcaccatcagccagcctggcagcgggaagacctgggcggcaccgcggtgggagaacggacaggtcgggtgccgccagggtgagccaagcagccccgtgcctgaacacaaggtgcaggacggtgtgcaccaggaagctaaggacaggcgcggccaggacatggcagtgaggatggcttcatgaggagcaggaccgcggatgcggctgcaggcaggaacgctaactagtaggcggtgctggtgttcaggatggcaatttgacattttccttcatttggttttcttttccatgttggccctattttattcatttatgttatataaatatcatgaaggtcataaaaaatgtgttcttctaccacctgttctcctgcctttcccaggtaactgtcagacctgttgtggtttttcttacagctatgctgaggtgtacttgacatataaactgctatacaacttgaaaaagtacataacgtgatgagttttga

SEQ ID NO: 17665 - DNA, 580 bp, Macaca Fascicularis
  misc_feature (1)...(580): n = A,T,C or G
acaccatgtcnnnnnggnggcggtgtctgtgaagggtgttaggagatgacgaggtgcctgggacccagctcnnctccttgagtgacttcttctcactgtgtgccctgaacccactattgctctcaaaaacaggcagggcatgaatgcagggtgacacgggggcacccgtggaagggcgggtctggcggccccatctgtggccgcaggggtcttgctgtgttggaaacatgggaccactgaggggtctcgtgcggctctcttcctcgctgtactggaagcacgggaccactgcttcttgggaggagtggcggctgcagtccccccactgtctttgagttgtggtggacgctggcctgggatctgcgggccccgaagacctttgtatcccccctctgttgcgtggggtgccctgtgcatgggtctgctgtggtgaccccaggtgggcctggcaggactccagatgaggacaagagggacaaggtgtggggtgggagccacaattgaggatgccccaagaccaccgagagccctgggctgggggctgagatatatccctgctccccacgggggccccaacagg

SEQ ID NO: 17666 - DNA, 620 bp, Macaca Fascicularis
tgcagggcaccctcatcctgtagagttcatgcactccccatccgtgctacctacctccccgtttctgtttcggttttaagacaatgaagcagcattcactgggtgtaacatgaagggataaaaacgaaggagaaagagagtttgggatgggatgtgtaaggcaggagttgacatctggcaaccaaagaaatgagttttggggaggaacacaactcccatcccagtttccttcccatggctgcatgttaagatggatgcatggagagaccatctgcctggcttcctgtcttcattttccacacagcctggtgatggcaggcctgggtttggatttcagaatatgagctccgggctccactcatgtggcagcaagaccgcttcgttccagcatttagaaacacacctgtatttggttatcagtcatgggagccctcgctgcactggtgggaggtggttgggaaagttgcaggaaaaccttagtcttccatccttccgatccatggtggaaattcacaccatggatttttaatggatcttttgttctaggcagctgggaatagacatggtacttaccttagagttttccagatttatctctaattttatatggcttgtgattc

SEQ ID NO: 17667 - DNA, 715 bp, Macaca Fascicularis
  misc_feature (1)...(715): n = A,T,C or G
gcatagcagagttactggaaatattgggaagtatattaatggatttgccttaccactcaaagaagagcacaagatttctttattgaaggtgttactacctttgcacaaagtgaaatctctgagtgtctaccatccccagctggcatactgtgtagtgcagtttttagaaaaggacagcaccctcacggaaccagtggtgatggcacttctcaaatactggccaaagactcacagtccaaaagaagtaatgttcttaaatgaattagaagagattttagacgtcattgaaccatcagaatttgtgaagatcatggagcccctcttccggcagttggccaaatgtgtctccagcccgcacttccaggtggcagagcgagctctctattactggaataatgaatacatcatgagtttaatcagtgacaacgcagcgaagattctgcccatcatgtttccttccttgtaccgcaactcaaagacccattggaacaagacaatacatggcttgatatacaacgccctgaagctcttcatggagatgaaccaaaagctattcgatgactgtacacaacagnnnnnnnnnnnnnnnntaaaagagaagctaaaaatgaaagaacgggaagaagcatgggttaaaatagaaaatctagccaaagccaatccccaggtactaaaaaagagtaacatgaaaacgcccagggttacttgaatgttt

SEQ ID NO: 17668 - DNA, 601 bp, Macaca Fascicularis
  misc_feature (1)...(601): n = A,T,C or G
tgacctggattagtaatgtgcnnncagntganttttcagctgaggctctgagaactgggactctcagtgtgttctggtcannntgtggcttagttgtagaagcaggtgtgtctcttgcctctgcttgcctcctactgcacactcagcacccacgactggaatcaccgactactgaatctcctacatgtattgctgatacttcaagctcctccactcgaaaccttatgattttcccaaggggagatgggacagtgtcatctaaatattccgaatgtttggccttctgagaaaagagcttctagtaattgaaccatgggaaacgcagcttctggagggttggccacgcgggtgtatacgtgtgtgtgcccaggggtgagtgtttctcaggattcctaacgattcaaattaccgtcgagtatatataaagagatgagtctctgtatagaagaacaaatgtgtgcattcacccccagtcacaatggtctccattgcatttcaaaggagaggatcagactatctgaatataaacacaatctgatgttaatttattctaagaacaccatcattttgattgtcctaaagaattctgcctttgtgaata

SEQ ID NO: 17669 - DNA, 758 bp, Macaca Fascicularis
  misc_feature (1)...(758): n = A,T,C or G
gcagcaagatgaacccccacagaccccctgggatcgagtgaaggacctggtcactgtgtacgtggaagcactcaaagacagcggcaaagactatgtgtcccagtttgaaggnnnngccttgggaaaacagctaaacctaaagctcctggacaactgggacagcgtgacctccaccgtcagcaagctgcgagaacagcnnnnnnnnnnnnnnnnnnngttctgggataacctggaaaaggagacagagggcctgaggcaggagatgagcaaggatctggaggaggtgaaggccannnnnnnnnnnnnnnnnnnnnnnnnnnnnaagaagtggcaggaggagatggagctctaccgccagaaggtggagccgctgcgcgcggagctccacgagggcacgcgccagaagctgcacgagctgcacgagaaactgagcccgctgggcgaggaggtgtntnnnnnnnnnnnnnnnnnnnnnnnnnnnnnnnnnnnnnnnnnnnnnnnnnnnnnnnnnnnnnnnnnnnnnnnnnnnnnnnnnnnnnnnnnnnnnnnnnnnnnnnnnnnnnnnnnnnnnnnnnnnnnnnnccacgccaaggccagcgagcatctgagcacgctcagcgagaaggccaagcccgcgctcgaggacctccgccagggcctgctgcccgtgctggagagcttcaaggtcagcttcctgagcgctctcgaggagtacactaagaagctcagcacccagtgaggcgcccgccgccgccccc

SEQ ID NO: 17670 - DNA, 737 bp, Macaca Fascicularis
  misc_feature (1)...(737): n = A,T,C or G
attgattgtgtctttttttcaaagataaccttgttttcttttcaatgtatacaaattatttatgttcagtggagaaaaaaaattaacacatttaaacacatttaaaaattaacacatttaagagggagaaaagcacccataatcctaaagctgcttttagaatgtgctctttgtagacgtttcatataaccaaatattgctctgtctacaggtgaatttgtatgtgtgtatatgacatgtaaattcacgcactcctgcgtcatnnnnnnnnnnnnnnnnnnnnnnnnnnnnnnnngcaggagatccttgtnnnnnnnnnnnnnnnnnnnnnnnnnnnnnnnnnnnnnnnnnnnntaaagccaagggcttccactgtgatctctgtgagatcccttccaaatctcagctcctgcgacctggaggccatacactgtaatgcaagctgaaaccgccgtggctgcctctgtttctctgctttcgaggcaccccgagctgttctttcccttaggaaagtcagctgtatggttggaaacaccgacctcagctgctgttataactcttccacaggtgccgacatccacggagacccaggcttcccaggccctcctggggacagaggtgacccaggagacgccaacacccttccaggccctgttgggttcttgttctgcatctcacatgcgccatattnnnnnnnnnnnnnnnnnnnnnnnntattgatgtctctggcgttgtct

SEQ ID NO: 17671 - DNA, 1305 bp, Macaca Fascicularis
  misc_feature (1)...(1305): n = A,T,C or G
tatagacttcagccctngnnnnatattgtaactggggagtatagagtagaagaaagtatagttaaaacatttgttctacaaattaacctttaaaaataaaattactgctaaaaatagagtgctgttacacttaaggaaaattagtgccattttgaaaatgagatctcgtgccataaatacagctgaactaaatataaacgttcacaaattaatgctgtcagaggaatgagtaaagcagaacaacttttaaccagcggcatgtcattctaaagcatgtagtgtgatcaaacatgatcatccagaatttttgtattttttctttgtacagaggttacatcttctgggtgttcttttataaaggaaacattttaaatcccacaaattgacgctttctatcttcaaagatttttttggtcagtaatctctgaaatttccctaaattatatacttactatagcagagaaactggattgtttttgtatataagactgcttccacctgaaatgctgtcataagtactggggggtgggggagtgcctatcttgtacatgatattcttagaggtaataaggtaataatgcatgaacttgttttataaactcttggactatgtatttgacatgtaaaatatgtacagtattaatgtcaaccatctctttaaagttagcctataaatattgttgtataattnnnnnnnnnnnnnnnnnnnnnnactgcatagtgacactcgctaaggattttcagtgccatttagcaaaccaactgtctttagtctatgcaactannnnnnnnnnnnnnnntgcaacaatacagttttcacacttcaaattttacatgaggggttcttcacgattctcctggaacccagtctagcaaaattagaggaaaggccctagggagatttatttctgttaaatagttaactctactgagtataacaaatagtgtctactatctcaaccctccaacatttgcagtgttgggactgtcatatgtgatttctttttggtggggtagttgaataaaattgggcagttaaatttcagttccatgtgcctcccaaataaaaaacagaaaataagtagttttttgnnnattgacttgcagacaaagtaggaaccgtcctgcatgatgttgttattttgtaaatggatgacattttccaaccaagcacatgccatccaattttctgtcaatcacgctgttgtataaagcagcagaactgaaggggaaaaatgattgttgtacacactgaattgctttgcatggtctcatttgagataattggtgtaagaatcttgactc

SEQ ID NO: 17672 - DNA, 736 bp, Macaca Fascicularis
ccagcacaaggctgcaggagcgcagggccgcgcggtagtggtcgagcttcagctgcgaggccgccaggttgttcagacacttcaccttcaactgcaggagctgtgcctcctcctcgaacgtcatgtccactttggcgctggaggtgatggcctcgatggcgaggtcgtaggagttggcggccaggacgaagtccgcccgctggtagtgggcgttgccgcactcccgctttcggttggccagggccacgcgctcctgccccgtgagcatctccaggtcaggcccgtccacggccgtcttcagggtcacctccaggcacagggccgcatgcggggggatgtatgggctcctgctgccttgggggccgtagcagtactcggagtcagcagtgaccatggccgtctccccaacgtccacgagtgggacactgagatccaaggcctggatgacgtcacagtcacccagagtgaacaccagctccggctcctcctgcacccgtgtgccgttctccagcgacgtccgtagatgtacggtgaccacctggcccttgactgggcggctcgaacctggtggccctgggaccagcgtcttcttcctcaacagcccgttccccagaatgtccagccactcttccggggccggggctggggcgggctcgggttccatggcagcaaggaactctcgggccagggccccaggctgctcagcctcctccacggggggttgtcccatgtcctc

SEQ ID NO: 17673 - DNA, 746 bp, Macaca Fascicularis
  misc_feature (1)...(746): n = A,T,C or G
agagagatggannnnnagtnaanatagnnnaaaagtgatgttggtccttaggatgtattttgtactatatgacttatnnnnnnnnnnnnnnnnnnnnnnnnnnnnnnnnnnnttnnnnnnnnnnnnnnnnnattgatcctnnnnnnnnnnnnnnnnnnnnnnnnnnnnnnnngaaagatcttcaggatgtgttaaagtgttgtttaaaaagggaccnnnnnnnnnnnnnnnnnnnnnnnnnnnnnnnnnnncatccatacgttcaaattcaaactcatccaggtaaccaaatggccaagggaaccactgaagaaatgaaatatgttctgggccaacttgttggtctgaattctcctaactccattttgaaagctgctaaaactttatnnnnnnnnnnnnnnnnnnnngaaagtcataattcttcatcatccaagacttttggaaaaaaaagggaaaaaaaatgatttgcggttactcgtaaattgtcacataccacctataaaatatattggactgtaatactcttgactccttgtggaaatctacatttgaagacaacatcattcttaannnnnnnnnnnnnnnaaaattcagtagattatctttaaaagaaaactgtaaaaatagcaaccacttatgtcactgtatatattgtagacttgttttctctgttttatgctcctgtgtaatctatttgacatcatttcnnnnnnnnnnnnnnnggtggatagnnnnnatattctaaa

SEQ ID NO: 17674 - DNA, 750 bp, Macaca Fascicularis
agccctctcactatatgctatccagaatatgcaggatcaaacacatatgaagaggcagctgcatatattcaatgtcagtttgaagacctcaataaaagaaaggacacaaaggaaatatacacccacttcacatgtgccacagatactaagaatgtgcagtttgtttttgatgctgtaacagatgtcatcataaaaaataatctaaaagattgtggtctcttctaagttttgcagttaatggtaaaatgcattttcaaaccaaatgagtacttatatatggatctctgtagactagagtcttgcagcaacacagaatgtaatataaggcaaatgcatctgggacctgaccaaagttgttctgttttgtttttttaactgaaagtaacagaaggacctttcttaaatgtgacagatggtcctgcagtgtgaaactgaaggacagtgttaaagctgggctctagtatattgatgatttctgcataagtgtaaatatgcaaatgtatgtatacatgtatttatgactttagttttcgacattatttttaggtttttagagtggcaacttaggattctagggtgatggctttggaaataacataaataataccttgtactgaatgacagactattactatgtttgccagttttaaacagctttatttatgttcatgtcctgtaaatttttaagtacagtaattaatattaggaaacataacccttatcttgattatatgtatacttgtataataa

SEQ ID NO: 17675 - DNA, 549 bp, Macaca Fascicularis
gaaatgttttgcctatctaagccttgtgctaaaggcgtttaacgttggtgcctatctacttagggggcattctagtcttcaaagttgtctgaactgtcccgccctggcgttttttgatttggggtaaacctaagggtgtttgttagtctcaaaactgtgaagtgacatgtcagaacagtccagactgctaagaaaattaatggcttcacttgaatttaaaccagctttagataggaaaaaaaccagtctcctcatttgctttttcaatggagtagtacatcccatattttagaacaagtaggggtgccttgcttaaataatagcatttaatgtataattgtgtgaagggtttatggataaagttgtacttttgtcacaagggggcggtccattttgttttaatattaagaacagcctgtaatttaaatattcgccaaaatggctggcttcaaaatctagtctttaataaactatgcgcatctgaggaggtgaatccaactcctgttcagtttcactccctaatctgggttagatggagacgacttccac

SEQ ID NO: 17676 - DNA, 738 bp, Macaca Fascicularis
  misc_feature (1)...(738): n = A,T,C or G
ggtaaannnnnnnnnaaatggnnnnnnnnnnnnnnnnnnnnnnnnnnnnnnnnnccacattgaaaagccagtagaagaggctcattctactctagttgaaactctgtacagataccgatctgacctggaaatcatatttaatgccattgacactgannnnnnnnnnnnnnnnnnnnnnnnnnnatttcgtgccatgtggaaactttttagtgctcactaccatgttcttattgatgattcccaagtcaataagcttgccaacataatggacttgaacaaagatggaagcattgactttaatgagtttttaaaggctttctatgtagtgcatagatatgaggacttgatgaaacctggtgtcaccaaccttggctaaacacaaatgagagcttccctnnnnnnnnnnnnnnnnngctaggcccaaatgacaagtatagtcctttccaatacccctgaaattcacagtcagtagcagagaaaagcagatcccaattcatcccacaaannnnnnnnnnnnnngggttttggaagtccctagcaagctgttaatggtaagattaggtatattnnnnnnnnnnnnnnnnnnnnnnnnnnnnnnnnnnnnnnnnnnnnnccacctaaccaggaggccannnnnnnnnnnnnnnnnnctgaaannnnnnnacacagcacaagagaaaactactaagcacgacatctgtgagtgacagagggagagaggaagaataccaggttatc

SEQ ID NO: 17677 - DNA, 748 bp, Macaca Fascicularis
  misc_feature (1)...(748): n = A,T,C or G
gccctgaaaacaatcaggtatgaccagnnagaaattacaggacttagtaagagaagnnnnnnnnnnnnnnnagttggatgaagatgtggaggagatgctgctgcagattgctgatgattttatcgagagtnnnnnnnnnnnnnnntgtcagcttgcgcggcatcgcaagtccagcaccctggaggtgaaagatgtccagctgcatttagagcgccnnnnnnnnnnnnnnnnnnnnnnnnnnnnnnnnnnnnaaatccgaccctacaaaaaagcttgcaccacagaagctcacaaacagagaatggcattgatccggaaaacaaccaagaaataacacacggaaaggtcagggaatggacaacaatgtatnnnnnnnnnnnnnnnnnnnnnnnnnnnnnnnnnnnnncttggattttttttttttgtaatgctttacgangagcatnnntattttttattaacagtgcagcaatatctataatgactgagannnnnnnnnnnnnnnataaagcctcctaccccaacttccggtcccttttccctgccatctcaaagaggagcaatgtatcttccagagaagattttatttgtggtttattatatacgtgactgaatatgggnnnnnnnnnnnnnnnctttttggtaagacagtattagcaggatttgtaaagggttttgtttccttctcccttccccttttccctgtactttgtaatgtcagtgtttatatgaatatgactttcattgc

SEQ ID NO: 17678 - DNA, 743 bp, Macaca Fascicularis
  misc_feature (1)...(743): n = A,T,C or G
gtcatttaagaggatactaagtttgctgaaggacaaaagatagctcttggtggggagactgatgaggccacacgctacatagccccaacagtacttactgatgttgatcctaaaaccaaggtgatgcaagaagaaatttttggaccagttcttccaatagtgcctgtgaaaaannnnnnnnnnnnnntagatttcataaatgaacgtgaaaagcctctggctctctatgtgttttcacataaccataagctcatcaaacggatgattgatgagacnnnnnnnnnnnnnnnnacaggcaatgacgtcattatgcacttcacgctcaactctttcccctttggaggagtgggttccagtgggatgggagcttatcacggaaaacatagtttcaatactttttctcannnnnnnncctgtttattaaaaagtttgaagagagaaggtgctaacaaactcagatatcctcccaacagccagtcaaaggtggattggggaaaattttttctcttgagacggttcaacaaagaaaannnnnnnntcctggtgctcactttcctgggcattgtagccgctgtgctggtcaaggctggatattactgaagaatgatcccgttcaacctcnnnnnnnnnnnnnnnnnntattcctcttttaaatggttaatgaaccaataatttttaaatcctaccaaaaatagtaagaaaatatgcaaacacactgtgatcaaactcaaaagtcatgccat

SEQ ID NO: 17679 - DNA, 752 bp, Macaca Fascicularis
aattttagtgttaatgactctttctgaggaagagaagacatttgccttttgttaaaagatggtaacccagatctgtctccaagacctcggcctctccttggaggacatttaggtcaaaatccctagtctccacctggaaccctgggagagaagtttgaagcacaactcctttaaggtctccaaaccagacagtgacgactgtgggaccatctggggcacctgcttccgcctctctctctgcccactcgggtctgcagacctggttcccactgaggccttttgcaggacggaactatggggcttacaggagcttttgtgtgcctagtagaaactatttctgtttcagtcacattgccataactcttgtactgtctgccactgtggaggaggctggtgacaggccaaaggccaatggaagaagcaccctttcatctcagagtccattctggcactggccacccctccccagtacaggggtgctgcacatggcagagtgaatgtcccccatcacgtggcccaaccctcctggcctggctgtctccctccccagaaacagtgtgcatgggttattttggagtgtaggtgacttgtttactcattgaagcagatttctgcttccttttatttttataggaatagaggaagaaaggtcagatgtgtgcccagctcctcacccccagtctcttggtggggaggggtgtacctgaatatttatcatatccttgcccttgtgtgcttgttagagagaaaga

SEQ ID NO: 17680 - DNA, 875 bp, Macaca Fascicularis
  misc_feature (1)...(875): n = A,T,C or G
gcagggtcaaggnatcatnnnnngcaaccctgacgagacgtggacacagacaagcgccaaatgtgaaaaaatctcgtgtggtccaccagctcatgtagaaaatgcaattgctcgaggtgtacattatcaannnnnnnnnnnnnnnnnnnnnnnntgttacagtggatacatgttggagggttccctaaggagtgtttgtttagaaaatggaacatggacatcacctcctatttgcagagctgtctgtcgattcccatgtcagaatgggggcatctgccaacgcccaaatgcttgttcctgtccagagggctggatggggcgcctctgtgaagaaccaatctgcattcttccctgtctgaacggaggtcgctgtgtggcccnnnnnnnnngtgactgcccacctggctggacggggtctcgctgtcatatagctgtttgccagtctccctgcttaaacggtggaaannnnnnnnnnnnnaaccgatgtcattgtctttcttcttggacaggacataactgttccaggaaaaggaggactgggttttaaccactgcacgaccagctggctctcccaaaagcaggatcatctctccttggtagttcctgggcatcctggaacttatgcaaagaaagtccaacatggtgctgggtcttgtttagtaaacttgttacttggggttacttttttaattttgtgatatattttgttattccttgtgacatactttcttacatgttttccatttttaaatatgcctgtattttctatataaaaattatattaaatagatgctgctctaccctcacaaaatgtacatattctgctgtctattgggaaagttcctggtacacgtttttattcagttacttaaaat

SEQ ID NO: 17681 - DNA, 694 bp, Macaca Fascicularis
  misc_feature (1)...(694): n = A,T,C or G
tcaatattagaaagancnnnnnnnnnnnngtcgttagaacaaaatacagtagtgctgtaaattgtagtgtttgtgttcatctcgagttgctttaattgttaaatgataaggtaaggccattttaaaataaaaactggaaattaaaagtgttaacttatttttaatacataaatcccatgacatgtccagatctgtatatagtaataactataaaagataagggcgaaaacagatgggtttagaacagagttattgctctctaacttttatttgtagaatataaacgtctttggcacttatgcgtgatttaccatctttgctttttaatcttttttttaaaatggtcatctttgttgttaatatgttttatcgtactacttttattattcaataggtcacatatcctggagcaggaaaacttccacacatcattggaggatcagatctaatacctcatcatgctcgaaagaatacagaactagaagagtggctaaggcaggaaatggaggtacaaaatcaacatgcaaaagaagagtctcttgctgatgatctttttagatacaatccttatttaaaaaggagaagataactgaggattttaaaaagaagccatggaaaaacttcctagtaaacatctacttcaggccaacaaggttatatgaatatatatagtatatagaagagatttaagtta

SEQ ID NO: 17682 - DNA, 773 bp, Macaca Fascicularis
  misc_feature (1)...(773): n = A,T,C or G
atatagctagannctnncatgcacatccgannnnntcagaaagcttttagagaagcaaatcttgctgcatcatttggcaaatcaatcaactttggaattagaagattatatatttttttttctgaaatttcctgggagcttttgtagaagtcacattcctgaacaggatattctcacagctccaagaatttctaggactgaattatgaaacttttggaaggtatttaataggtttggacnnnnnnnnnnnnnnntatatctatattttacataaatttagtattttgtttcagtgcactaatatgtaagacaaaaagctacttattgtagcatcctggaatatctccgtcaactcatattttcatgctgttcatgaaagattcaatgccactgaatttaaatagcttttttctctgatacagaaaagttgaattttacatagatggagttagaatttgatatgtgaacagttgtgtttgaagcaaagtgatcaagttatttttaatttggttttcacattagaaacaannnnnnnnnnnnnnnaagattcaaatgtctataaaccaaactgatgtaagtaagtggcttcttacttgttttatttaacccctgaattcttttagtttaggggtagaatttatgtgtttaagaggtttttaaggttccattgttgtctacaactctgaagggtaattacatagttatccaaattaagagagtctatttacggaactcaaatacgtggggattcaaatgtattacagtgggaatga

SEQ ID NO: 17683 - DNA, 796 bp, Macaca Fascicularis
  misc_feature (1)...(796): n = A,T,C or G
gaaacagatcaacaattacgtggagaaggaaactcaagggaaaattgtggatttggtcaaggagcttgacagagacacagtttttgctctggtgaattacatcttctttaaaggcaaatgggagagaccctttgacgttgaggccaccaaggaagaggacttccacgtggaccaggcgaccaccgtgaaggtgcccatgatgaggcgtttaggcatgtttaacatctaccactgtgagaagctgtccagcnnnnnnnnnnnnatgaaatacctgggcaatgccaccgccatcttcttcctgcctgatgaggggaaactgcagcacctggaaaatgaactcacccatgatatcatcaccaagttcctggaaaatgaaaacagcaggtctgccaacttacatttccccatactggccattactggaacctatgatctgaagacagtcctgggccacctgggtatcactaaggtcttcagcaatggggctgacctctcggggatcacggaggaggcacccctgaagctctccaaggccgtgcataaggatgtgctgaccatcgatgagaaagggactgaagctgctggggccatgtttttagaggccatacccatgtctattccccccgagatcaagttcaacaaaccctttgtcttcttaatgattgaacaaaataccaagtctcccctcttcatgggaaaagtggtgaatcccacccagaaataactgcctgtcactcctcagcccctcccctccatccctggccccctccctggatgacataaagaagggtgagct

SEQ ID NO: 17684 - DNA, 1364 bp, Macaca Fascicularis
  misc_feature (1)...(1364): n = A,T,C or G
aaaagttttatttcaaaaagggttaaaaggtagggaaactttttaaactactgaccaagcctgccaccttcataattcagatgagttagtgcagagannnnnnnnnnnnnnnntggcctagaacctgtgtgtgcagactgcactctgttagtcttcagcctatcagcctcagnnnnnnnnnnnnnnnttaagggtgcgcctccccagagctggatgatgctgtgctcaagcctgcgggtaggagggctccagcttgcagatcccatgcgtggatgctgtggtatgtagatgnnnnnnnnnnnnnnnagaggaaggaaggtgaccttacagccactgccgagaccaacgtgtgccnnnnnnnnnnnncatctggaattcccannnnnnnnnnnnnnnnnnnnnnnnnnnnnnnnnnntaggtccttacatgttggtgttgtcccaggcagtnnnnnnnnnnnnnnnactgaggatgtgagacnnnnnnnnnnnnnncctgccctgccagtagactgcctgcagccccaccctctttccctcaaaaaagaaggaagccaggcaagagagcagaggcccagggtggggaagtgaaagggccaatttaatgagaaactacaaactgagactgggccacgattcacagtgacaggaggccatgcagtggcagtgcgagaccaggaaggacagtggcaggatacagcggtccaggtgagcaggttcacaaaccattcaggaaataaagacagggcaaggctggtgtccaccaaggcagttctaccacctgtggctgctccttcctcatccccagcccagtgtgcctgcaagagcaggtacagcaacagcctgtcagctggggcaaggggcccggcacttacagggaagaaaactcatggagagggctctgcacatccaagcacacccacaagggggatcctctgccatctcttgccccagttgggacacaccagccaccgagcagaagtcatatccacacgcaatgaggacacggggcagatgggaaggggctaggctcaggggctccttcgggccccagcaatacagggttcacagaggcatggccagaaagggggtctgcacactgacccaaagggggaagttccttcttagcnnnnnnnnnnnnnnnnntcacccaggtacagtgtcctctctacctgacaccagacagctctcaggcactgggacagggtattnnnnnnnnnnngttctatacctgagagttctgagggccagagttggcagttttacttccagccaccatgctccacctctagcatcccagagacgcaaagtacccagaaacaaacccaggctttgtgaccctatcctacttgggtccacctgac

SEQ ID NO: 17685 - DNA, 742 bp, Macaca Fascicularis
gaaaagccaggcccggaggacaagttgcatgagcagtgtcgtccctggaagaagaatgcctgctgttctaccaacaccagccaggaagcccataaggatgtttcctacctatatagattcaactggaaccactgtggagagatggcacctgcctgcaaacggcatttcatccaggacacctgcctctacgagtgctcccccaacttggggccctggatccagcaggtggatcagagctggcgcaaagagcgggtgctgaacgtgcccctgtgcaaagaggactgtgagcaatggtgggaagactgtcgcacctcctacacctgcaagagcaactggcacaaaggctggaactggacctcagggtttaacaagtgcccagtgggagctgcctgccaacctttccatttctacttccccacacccactgttctgtgcaatgaaatctggacttactcctacaaggtcagcaactacagccgagggagtggccgctgcatccagatgtggttcgacccagcccagggcaaccccaatgaggaggtggcgaggttctatgctgcagccatgagtggggctgggccctgggcagcctggcctctcctacttagcctggccctaacgctgctctggctgctaagctgacctccttttaccttctgatacctggaaatctctgccctctttagccccatagctcccagctatttggttcctgctccttggttgagcctctgacagccac

SEQ ID NO: 17686 - DNA, 741 bp, Macaca Fascicularis
gagacagtttctgtggatgttcctcatctgaaattttgagaatggagagaattattctggataagttgaattgggatcttcacacagccacaccattggattttcttcatattttccatgctattgcggtatcaactaggcctcagttacttttcagtttgcccaaattgagcccatctcaacatttggcagtccttaccaagcaactacttcactgtatggcctgcaaccaacttctgcagttcagaggatccatgcttgctctggccatggttagtctggaaatggagaaacttattcctaattggctttctcttacaattgaactgcttcagaaagcacaggcttcctaaaatactggcagaagctccatcctttctctgtgctttgttccaatatttttagcatgtttcagcttgttctacatccctgggatatataataagacctagcctaaatgtaagcttgatagttcagggactatcttaagtgttacgtaacttttttcttttaagggagggagaacaaattctaatactagttaatagtgtcttacccatagtgtgttatctaatgcctttcaaactaggagaaaaaaaatcagtgaacaatatgatggtagatgctaaaatctgcccttttgttgtatatttctgacagtttcagttattttgcatttgtattatacaatgactaacatcagccttttaccattctttcctctggtatttttcagtaaca

SEQ ID NO: 17687 - DNA, 954 bp, Macaca Fascicularis
  misc_feature (1)...(954): n = A,T,C or G
ttgatgtcagtgtgcttaagtcattatgaatnnnnagactaacaaccctgtctttccnnnnnnnnnnnnnnnaaaccgtaacatatgatttctttttctttctttccctcctctctcatttaagatgaccttgaatgatgccatgaggaacaaggcaaggctgnnnnnnnnnnnnnnnnnnnnnnnnnnnnnnnnnnnnatgactccagaatttcccaaagcagtgcatgctgtcccttacgtgagtcctggcatgggaatgaatgtcagtgtgactgatctctcgtgattgataagaaccttttgagtgccttacacaatggttttcttgtgtgtttattgtcaaagtggtgagaggcatccagtatcttgaagacttttctttcagccaagaattcttaaatatgtggagttcatcttgaattgtaaggaatgattaattaaaacacnnnnnnnnnnnnnnnnnnnnnnnnnnnnnnnnnnnnnnnnnnnnnnnnnnctaacatggaagtaccataatttacctgaagtctttgtacagacaacaaacctgtttctgcagccactattgttagtctcttgattcataatgacttaagcacacttgacatcaactgcatcaagatgtgacatgttttataaaaaaaaggaaaaaaaaaacatttaaaattaaaaatatttttaggtattttcacaaacaaactggcttttaaataaatttgcttccatattggttgaataagacaaaaacaattaaactgagtgggaagtgaataaaaaaaggctttaggtatcggttccatatttttcaaagccaaatatgtaaatgctaaggaaagaatacaaagaggagattccaatcttgtaatttaatattgttattaaaactttaatgtatcctattctttaacatttggtgttaatataaaattacttggcaatgcttgacattga

SEQ ID NO: 17688 - DNA, 748 bp, Macaca Fascicularis
  misc_feature (1)...(748): n = A,T,C or G
caggcannnnnnnnnagnnnccatgccgagnnttccaaaggtggaatgagagagtagggttgaaatgtcacagtatttgctccataggtttctgtttttaatttcaatgttaaatataactacaannnnnnnnnnnnnnnnnnnnnnnnnnnngtngagaacttgtaccatggacttgagaccgccnnnnnnnnnnnnnnnnnacaagcatgtacaccccctgggcagcctcaaaaccccgcttacagcagcaacnnnnnnnnnnnnnnntccattttataaccattaatctctttatccatttctgaacgactgtgactattcactaatgaaataatagtaattaattagtatggtataatctttaataaatttcgtgccaaaatgcatggttttccacttannnnnnnnnnnnnnncatcgagagtagttttcaatttcttatgtactcttcgaagtaagttgaaaatcagtttctacattttaattcgtttcctgttaaatctgttgcactctcatgggctgtctttttttccagcagacccctgcatgcagttgtgtaaggactttnnnnnnnnnnnnnnnnnnnnnnnnnnnnnnntaaccactgaacnnnnnnnnnncctccatggggttctttagatttttggtgaagtattttgttacctcagtcttgtatcaagttgctgtatttttcagcttgttacattgataataattatttcactaattaaatactttaatgtac

SEQ ID NO: 17689 - DNA, 752 bp, Macaca Fascicularis
  misc_feature (1)...(752): n = A,T,C or G
gcagccagatggaagggagaggnnnnnggacttcctaaatgcagccgcatcacctctcaactcgctgcagnnncagagacagtggaagctgctctttacctcaaaagcacaaagcagaattggcaacttcacannnnnnnnnnnnnnnnnnntcctttggtctcgtgtcnnnnnnnnnnnnnnnnntgtatgggggacaaatttgttacatgtttccannnnnnnnnnnnnnnnnnnnnnnnnnnnngcctagctcatgtgaggtactttgtggatcaggtactttgctggggggatacaatgacccaggtggtctgtgtcctctgccattggtttgaacagggcaccccctgaagtctccatctcggctgtatagtctagtccaaatttgcctggcttccccgctccctcccaggtcctgcacactgtctttttgccaacacctcagccctgtgtgctatctcatgtctgcatggtacgagacaccgcttcacggcatatactgccannnnnnnnnnnnnnnnnnnnnngtgtatgtgtagcatgtagctcattctgctcagcctctggtccgttccacattgctcccagccccactgctgtcactgtcgtcccagatgtccttgccatnnnnnnnnnnnnnnnnnnnnnncctggaaacgctggggctgcccttcagagagctggcagccactggcagtcagggcctgctttgcagaatagaatgtgaacccatctcctgatggcctact

SEQ ID NO: 17690 - DNA, 1364 bp, Macaca Fascicularis
  misc_feature (1)...(1364): n = A,T,C or G
gtcaggtggacccaagtaggatagggtcacaaagcctgggtttgtttctgggtactttgcgtctctgggatgctagaggtggagcatggtggctggaagtaaaactgccaactctggccctcagaactctcaggtatagaacnnnnnnnnnnnaataccctgtcccagtgcctgagagctgtctggtgtcaggtagagaggacactgtacctgggtgannnnnnnnnnnnnnnnngctaagaaggaacttccccctttgggtcagtgtgcagaccccctttctggccatgcctctgtgaaccctgtattgctggggcccgaaggagcccctgagcctagccccttcccatctgccccgtgtcctcattgcgtgtggatatgacttctgctcggtggctggtgtgtcccaactggggcaagagatggcagaggatcccccttgtgggtgtgcttggatgtgcagagccctctccatgagttttcttccctgtaagtgccgggccccttgccccagctgacaggctgttgctgtacctgctcttgcaggcacactgggctggggatgaggaaggagcagccacaggtggtagaactgccttggtggacaccagccttgccctgtctttatttcctgaatggtttgtgaacctgctcacctggaccgctgtatcctgccactgtccttcctggtctcgcactgccactgcatggcctcctgtcactgtgaatcgtggcccagtctcagtttgtagtttctcattaaattggccctttcacttccccaccctgggcctctgctctcttgcctggcttccttcttttttgagggaaagagggtggggctgcaggcagtctactggcagggcaggnnnnnnnnnnnnnngtctcacatcctcagtnnnnnnnnnnnnnnnactgcctgggacaacaccaacatgtaaggacctannnnnnnnnnnnnnnnnnnnnnnnnnnnnnnnnnntgggaattccagatgnnnnnnnnnnnnggcacacgttggtctcggcagtggctgtaaggtcaccttccttcctctnnnnnnnnnnnnnnncatctacataccacagcatccacgcatgggatctgcaagctggagccctcctacccgcaggcttgagcacagcatcatccagctctggggaggcgcacccttaannnnnnnnnnnnnnnctgaggctgataggctgaagactaacagagtgcagtctgcacacacaggttctaggccannnnnnnnnnnnnnnntctctgcactaactcatctgaattatgaaggtggcaggcttggtcagtagtttaaaaagtttccctaccttttaaccctttttgaaataaaactttt

SEQ ID NO: 17691 - DNA, 724 bp, Macaca Fascicularis
  misc_feature (1)...(724): n = A,T,C or G
aagagctgtgatatgaaaagcccaaactgttgattattagccaggtaatgtgagtaaattatataggaacatatgaaaatacaacttaaataataaaaaatggaatataaggaaagcaataaatggatgggctgagctgcctctaactnnnnnnnnnnnnnnnngatcttgagcagagacaggactcgnnnnnnnnnnnnnnnnnnnnnnnnnnnnnnnnnnnntcaggaagggcctgcagcccgcttctccatacacactggtgtgtgtggacgatgccgtcagggcaccattgccaagtaagaaagtgaagcaaatcagaaacttgtgaagtggaaatgttctaaatgtggtgagttacaataaaaaatcatagtactctttgtagcacaattcttaagcatgttattttctgttgaagtttacaatcaaaggaaaatagtatattttatactgtttactgaaagaaaaagaccacataggactctannnnnnnnnnnnnnnnnnnnnnnnnnnnnnnnnnnnnnnnnnnaggcaagctccaggcctcacatgtgctgagccgtcactcaccaagtctcactggcttccagtctgacatttcacaggagatttcttgttgctcaaaaaatgaactcgcatttgtcaatgactgtttttcttactagatctgtaacttttctaaatacacatagcatgtaatggtatctcattaaagtgtgtg

SEQ ID NO: 17692 - DNA, 720 bp, Macaca Fascicularis
  misc_feature (1)...(720): n = A,T,C or G
taggaattcagacgctggccttacgtgaactnnntgaaaggnnnnnnnnnnnnnnnnnnnnnnntggacaggactgcaggctggaacatnnnnnnnnnnnnnnnnnnnnnnnnnnnnnnctcctgcaaatttgatgaatacttcagtcaaagctgtgcccctggggctgacccgagatctaatctctgtgcnnnnnnnnnnnnnnnnnnnnnnnnnnnnggataagtgcgtgcccaacaacaatgagagatactacggctacactggggctttccggtgcctggctgagaatgctggagacgttgcnnnnnnnnnnnnnnnnnnnnnnnngcagaacactgatggaaagaacactgacgcatggnnnnnnnnnnnnnnnnnnnnnnnnnnnnnnnnnnnnnnnnnnnnnnnnnnnnnnnnnnnnnnnnctgaggctaggagctgccatctcgccatggccccgaatcatgccgtggtgtctcggacagataaggtggaacgcctgaaacaggtgctgttcgaccaacacccctcctggaagcctgtgcattcctccagaagtaaaacccaagaagatggcccagcctccccaaggaagcctcagccattcactgcctccagcccttctccccgggtgtgctggggccttggcctccctggctgaaggtggggattgcccatccatctgctcacaattccctgctgtcgtcttagcaagaa

SEQ ID NO: 17693 - DNA, 692 bp, Macaca Fascicularis
  misc_feature (1)...(692): n = A,T,C or G
ctgatttctcgcacactggctggccctctcagtctcactcctccttggnnnnnnnnnnnnnnnnnnnnnnnnnnnnnnngcctccctgtgcagtccagccctgccttgctgcagcccagcccagagggaacacagcactctcccctgagggagtccctgggcctagctatcccctcactactccctacccaaatggtggcttttcatctgaacttaaggtgnnnnnnnnnnnnnnnnctttttccactttggaaaatgtcactgtgagaaaagccagtatacttcccctgcacccatctgctcaccagatctcaggcaggaaagcctctctctgttgatgtgaggggctatcttttggtgtacttatgtgaaagtggctggttgggagcagggccaagaggcttcccattaacctgaggtctctttctttactctgggtcagacctgaggttggggaagnnnnnnnnnnnnnnnnnnnnnnnnnnnnnnnnnnnnnnnnnnngagtggggcagagagggccnnnnnnnnnnnnnnnnnnnnnnnnnnnnnnnnnnnnnnntggtagcctcagggtgccgagtgcctggtgctgcctgacaagtgcctgacacccagcctagttccttcctggcccctctctcactggctggaaaaccctagaccatgtcagataggacaacactgctgggtt

SEQ ID NO: 17694 - DNA, 522 bp, Macaca Fascicularis
  misc_feature (1)...(522): n = A,T,C or G
gtggctcnnnnnnnnnnnnnnnnnnnaaggagatgtcctgcaaaatgtcgcnnnnnnnnnnnnncatagagaccatcatcaacaccttccaccagtactctgtgaagctggggcacccagacaccctgaaccggagggaannnnnnnnnnnnnnnnnnnnnnnnnnnnnnnnnnnnnnnnnnnnnnnnnnnnnnnnnnnnnnnnnnnnnnnccacnnnnnnnnnnnnnnnnnnnnnnnnnnnnnnnnnnnnnnnnnnnnnnnnnnnnnnnnnnnnnnnnnnnnnaggctaacctgggcctcccacgagaagatgcacgaggatgacgagggccctggccaccaccataagccaggtctcggggaggacgctcgctaagaccacagtgtccaagatcgcagtggccatggccacgccacagccactaatcaggaggccaggccaccctgcctctacccaaccagggccccgggacctcttgtgccaaactgtcctggctgtggcggtaggggctggggccaaa

SEQ ID NO: 17695 - DNA, 765 bp, Macaca Fascicularis
  misc_feature (1)...(765): n = A,T,C or G
aaaagcaataacctcaaagtgactattcagttttcaggatgatacactatgaagatgtttcaacaaatctgaccaaaacaaacaaacaaacaaaaaacaaaaaacctctacgcaatctgagtagagcagccacaaccaaaaaaattctaccacacacactgttctgaaagtgactcactcatcccaagaaaatgaaatnnnnnnnnnnnnnnnnactctacctcatatcagtttgctagcagaaatctagaagactctcagcttccaaacattaatgcaatggttaacatcttctgtctttataatctactccttgcaaagcttgtagaagaaagagcaacaatccatctctcaagtagtgtatcgcagtagtagcctccaggtttccttaagggacaatgttcctaagtcaaaagagaaaagaggcaccactaaaagatcacggttggactgannnnnnnnnnnnnnnnnnnnnnnnnnnnnnnnnnnnnnnnnnnnnnnnnnnnnnnnnnnnnnnnnnnnnnnnnnnnnnnnnnnnnnnnnnnnnnnnnnnnnnnnnnnnnnnnnnnnnnnnnnnnnnnnnnnnnnnnnnnnnnnnnnnnnnnnnnnnnnnnnnnnnnnnnnnnnnnnnnnnnnnnnnnnnnnnnnnnnnnnnnnnnnnnnnnnnnnnnnnnnnnnnnnnnnnnnnnnnnnnnnnnnnnnnnnnnnnnagcaannnntactttcaaaaaataataataataataaaaattgtatatgtatgtg

SEQ ID NO: 17696 - DNA, 654 bp, Macaca Fascicularis
  misc_feature (1)...(654): n = A,T,C or G
ggaacaggagaaagaaaataaactgctgtgtgaagacctcccaggcannnnnnnnnnnnnnngccatcnnnnnnnnnnnnnnnnnnnnnnnnnnnnnnnnnnnnnnnnnnnnngtagtacaaatgactcnnnnnnnnnnnnnnnnnnntctactttttaagaccaccccccccccccaacagaacactaaacagactatttaacttgagggtaataaacttagaataaaattgtatagagatatgcaggaggaggggcatccttctgccttttttatttttttaagctgtaaaaagagagaaaacttatttggtgattatttgnnnnnnnnnnnnnnnnnttcctctttgcatggaatttgtaagtttatgtctaaagggctttagtcctagaggacctgagtctgctatgttttcatgacttttccatgtatctacctcactattcaagtattaggggtaatatattgctgctggtaatttgtatctgacaggagattttccttcccacaccctcggacttgaggattttgaatatctcggacctttcagctgtgaacacggactcttccccgctcctcttatttgctcacacggggtattttaggcagggatttgaggagcagcttcagttattttcctgagcaaagtctaa

SEQ ID NO: 17697 - DNA, 735 bp, Macaca Fascicularis
  misc_feature (1)...(735): n = A,T,C or G
agagggcagcagggcnnnnnnnnnnnnnnnnnnnngctagcctgggcctccctggagagggttgacagtggaggggaacaggagtggcagttggcctgagacccctgcttttgggagagactagcagggtggttcctgcccaccatgcccagctcctccctgggtgacttgtcccatctcagagcccctaaatgggggtagtaaggagcacctttctggaaccccctatagcatccaagtttctttctgggctctcttgccttttcccccctttcacagatggcacccctgggcatctgtccttgcctaggtgattttggaggttggtgccttcctgggaactagccaccagcttatctgcttcccctcccctggcatcacttcccgtaggcctggggtttctagactggggtccggccacccctttccccaatccgggagtgagtcggcctccagagaagactggcacagttccaactagagtcaacccatgctgccttctgcccttcccactcagatctagatcctgctttcannnnnnnnnnnnnnnnnngacttttgtgtttttgaggtttattagcaggtctgctcaggaaccaaaccaatgagtagttttctattgggctatcccagtatatggctttgggggctgaaaaagcagatgtagaccccctcccttggatcccattggtgtgccctttagcaccccgcagactctgcgggnnnacaggagtg

SEQ ID NO: 17698 - DNA, 769 bp, Macaca Fascicularis
  misc_feature (1)...(769): n = A,T,C or G
gccacnnnnnnnnnnnnnnnnnnnnnnnnnnntagctcagcatggatttccnntatctgatgatnnnnntgcgtttacttggccaatttggggaacagacctccactgtgattccatactctctctttgctttcactatcccatggatgggaggcggagggtagagatgaactcactgagcagccagagccacatgcaatcggtacgaagtcttagaaggaaggaggcgtagcccaggtatgagagagaaaaaactactaagnnnnnnnnnnnnnnnnnnnnngggctggggccctttttcttttgcnnnnnnnnnnnnnnnnnnnnnnnnnnngtctactgagatgcccatctcttcctgcctgctagcctgctagactctcaaactgggtgggttctgtgtcaataaaaagctttaccctctggctgagtgaggtggtcccctgcaatcactgtttgtcccctacccacccagcctgtccctgcctgctcccagcccactcatccttatgtgctaaggataaatcaagagtccttagcactccacattcccaagaaaatcccaggaactcctaaacnnnnnnnnnnnnnnnnnnnngaggttggcagctgatgagacctcaataattttatattgtaataagctctttgaatgtgtatattcttattttttacaatcatttcatttttgtattnnnnnnnnnnnnnnnnnnnnnnnnnnagaaaataattgtaatgttcatattcaatatcttacagtgatacagtt

SEQ ID NO: 17699 - DNA, 754 bp, Macaca Fascicularis
  misc_feature (1)...(754): n = A,T,C or G
ttccaaatggctgtatttataaaggtttttggagctgcactgaagcatcttattttatagcatatcaaccttttgtttttaaattgacctgccaaggtagttaaagatctttaacagttccatctttttaaaaattttttctgcctatttaaagacaaattatggaacgtttgtagagcctgagtgtttttctttttaccagttttttagttagacctctcaggattattggagctagcaataattgattctggcaagtttggccagactggtttcagaaaattaatgtgtatccaggacattttaaaaacctgtacacagtgtttattgtggttaggaagcaatttccaaacgtacctataagaaatgtgcgtcaagccagcctgaccnnnnnnnnnnnnnnnnnnnnnnnnnnnnnnnnnnnnnnnnnnnnnnnnnnnnnnnnnnnnnnnnnnnnnnnnnnnnnnnnnnnnnnnnnnnnnnnnnnnnnnnnnnnnnnnnnnnnnnnnnnnnnnnnnnnnnnnnnnnnnnnnnnnnnnnnnnnnnnnnnnnnnnnnnnnnnnnnnnnnnnnattcaaaaaaaaaagaaaagtgtatcaataacatgattatccaggggtattttctaattcagataatcaaactgattatatagaagagttgctttaaaatgtttgcaaatgtctttttttttttttttaatactggaagaaaaaatattctgttgtgtctcatacagtgcttaggatgtctt

SEQ ID NO: 17700 - DNA, 759 bp, Macaca Fascicularis
  misc_feature (1)...(759): n = A,T,C or G
agcatgacaccaccgaatacaaaagctggcccgaccatggggtccccagtgagcctnnnnnnntcctcannnnnnnnnnnnnnngatcaaccagcggcaggaaagtctgcctcatgcagggcccatcatcgtgcactgcagcgccggcattggccgcacgggcaccatcattgtcatcnnnnnnnnnnnngagaacatctccaccaagggcttggactgtgacattgnnnnnnnnnnnnnnnnnnnnnnnnnnnnggcgcagcgctcaggcatggtgcagacagaggcgcagtacaagttcatcnnnnnnnnnnnnnnnnnnnnnnnnnnnnnnaccaagaagaagctggaggtcctgcagtcgcagaagggccaggagtcggagtatgggaacatcacctaccccccagccatgaagaacgcccatgccaaggcctcccgcacctcgtccaaacacaaggaggatgtgtatgagaacctgcacagtaagaacaagagggaggagaaagtgaagaagcagcggtcagcagacaaggagaagagcaagggttccctcaagaggaagtgagcggcgctgtcctcaggtggccatgcctcagccctgaacctgcggaagccttccacggtggacagactcacaacctgaacctaggagcgtcccattctattgtaatttaaatgnnngcatcccccccacctctccctgaccctgtatatagcccagccaggccccaggcagggccaacccttctcctctga

SEQ ID NO: 17701 - DNA, 682 bp, Macaca Fascicularis
tgtgcagaacgtacacacgccgcgagtgcgggtggaccccgatgggcgctgcgcagccatgcttgtttacggcacgcgactggtggtcctgcccttccgcagggagagcctggccgaggagcatgaggggctcgtgggtgaggggcagaggtccagcttcctgcccagctacatcatcgatgtccgggccctagacgagaagctgctcaacatcatcgacctacagttcttgcatggctattatgagcccaccctgctcatcctgttcgagcccaaccagacctggcctgggcgcgtggctgtgcggcaggatacgtgctccatcgtggccatctcactgaacatcacgcagaaggtgcaccccgtcatctggtccctcaccagcctgccctttgactgcacccaggctctggctgtgcccaagcccataggtggggtggtggtctttgccgtcaactcgctgttgtacctgaaccagagcgttcccccatacggtgtggctctcaacagcctcaccacaggcaccacagctttcccgctacgcacccaggagggtgtgcgaatcaccctggactgcgcgcaggccaccttcatctcctacgacaagatggtcatctccctcaagggcggcgagatctacgtgctgaccctcatcaccgacggcatgcgcagcgtccgagca

SEQ ID NO: 17702 - DNA, 705 bp, Macaca Fascicularis
  misc_feature (1)...(705): n = A,T,C or G
gtcgtaccaaatgctggaattctacctcttgtgacaggatcaggacacgtatctgtcccatttccagatacatatgaaataacgaagagttattaaattattctgaatttgaaacgacatatttttatacttaatgaattgtatctcattaatctcttcccttacatcttcatttattgttggtttggttttttttgtttgtttttttatttggtataagaactaacatcaaaaggcctgtttgaagggaaaggttaatgggctacttaatgttacaaacaaaacaaaaaaacaaggctgccacagtggagtgttatcttacaagaataagaactacataaaatggatttgtaaaaaatacatatttgaagtattccctgtatttctattattctctatggaatataaagtgagcatgaaaggtagttaaaactttcaggtgcctgtagagtcgtaacaactctgtattttatgccttttgcattcacgcgagttcatgttggatgtgatttaaaagtagacattctcttttatctcttttaggatatgttcgattactggaaaattaatacggttatttgttagaagtctggtttataaaaaagtgatnggaattttattccatttgtcttaggaaggcccatgatacttgtttttcttacatgtgactagcaactttctctacttaaagactaaatacctctt

SEQ ID NO: 17703 - DNA, 778 bp, Macaca Fascicularis
  misc_feature (1)...(778): n = A,T,C or G
tgagagaagtacaaaggttgcagtgctgagctgtgggtggttnctggggatgtcccagggtgaactccacatgctggtgcacatannnnnnnnnnnnnnnnnnnnnnnncgtgtttcagtaaccatgttccatnnnngaggatttagcagagnnnaacactgcgtctttaaataagaaagtatacaattctttttccttctacagcatgtcagcatctcaagttcgtttttcaacctacaatataacaatttgtaataaagccnnnnnnnnnnnnnnnnnnnnnnnnnnnnnnnnnnnnnnnnnnnnnnnnnnnnctgatactgctgagtcagaccgtcagaaaaagctagcactaactcgtgtttggagctctatccatattttactgatctctttaagtatttgttcctgccactgtgtactgtggagttgactcggtgttctgtcccagtgcggtgcctcctcttgacttccccactgctctctgtggtgagaaatttgccttgttcaataattannnnnnnnnnnnntgactgttannnnnnnnnnnnnnnnnatgactgtccnnnnnnnnnnnnnntacaattgaaatgaaaactctattgttacctcgattgagttgtgttccacagaaaatgctatccagcagatcatttaggaaaaataattctatttttagcttttcatttctcagctgtccttttttcttgtttgatttttgacagcaatggagaatgggttatataaagactgcctgctaatacgaacagaaacgca

SEQ ID NO: 17704 - DNA, 1069 bp, Macaca Fascicularis
  misc_feature (1)...(1069): n = A,T,C or G
gcctacccaaaccgtccagatgnnntagtgctacaggggctgacattcaccctacgccctggcgaggtgacggcgctggtgggacccaatgggtctgggaagagcacagtggcttccctgctgcagnnnnnnnnnnnnnnnnnnnnnggacagctgctgttggatgggaagccacttccccaannncgagcaccgctacctgcacaagcaggtggctgcagtgggacaagannnnnnnnnnnnnnnnngaagtcttcaagaaaatattgcctatggcctgacccagaagccaactatggaggaaatcacagctgctgcagtaaagtctggggcccatagtttcatctctggactccctcggggctatgacacagaggtaggcgaggctggaagccagctgtccgggggtcagcgacaggcagtggcgttggcccgagcattgatccggaagccatgtgtacttatcctggatgatgccaccagtgccctggatgcaaacagccagttacgggnnnnnnnnnnnnnnnnnnnnagtcctgagcggtactctcgctcagtgcttctcatcacccagaacctcagcctggtggagcaggctgaccacatcctctttctggaaggaggcactatccgggaggggggaacccaccagcagctcatggagaaaaaggggtgctactgggccatggtacaggctcctgcagatgctccagaatgaaagccttctcagacctgcgcactccatctccctcccttttcttctctctgtggtggagaaccacagctgcagagtaggcagctgcctctagaaggagttacttgaaatttactttgagtgtgttacctcctttccaagctcctcatgataatgcagacttcctggaggacaaacacaggatttgtaattccttggtgtgactgggtttagagccagggttgatgctttggtgtggccagcactctgaaaactgagaaatgttcagaatgtacagaaagatgatcagctattgtcaataggactgaaggcgtatgctggcccataaacaccctgtaggtgcttgatattata

SEQ ID NO: 17705 - DNA, 801 bp, Macaca Fascicularis
  misc_feature (1)...(801): n = A,T,C or G
cagagagtaggcataggtgtgacccaggaccacatgacaaggtgtcaagaggacagctgaagtacctgtgagtgaggccagtgggcaggatccaccagctaaagcagcaaagcaggatatagaggatacagcaagtgatgccaaaaggaaacgggggcgccctcgaaaaaagtcaggtggcagtggggaaaggaattctacccctcagaagtcagcagctgccatggactctgcccagtcaaggttaccatgggagacatggggcttaggaggggaaggcaactcagctggaggggcagaaaggccagggccaatgggagaggctgaaaaggggnnnnnnnnnnnnnnnggtcaggaagatggtactgttttcaaaggaggaaggggccccagttcccggcataccaaagaagcagaagataaaattcccttggtcccctcaaaagtgagtgtcatcagaggcagcagaagccaaaaggaggcttttcctttggcaaagggagaggtaggcactgcaccacagggtaataaagacttaaaggagcatgtgcttcaaaattccttatcccaggagcataaagaccccaaagcaacacccccatgatataggtctgtggggaagagtgtttatatccctacattaactttgcctagtgnnnnnnnnnnnnngcacttgcttctcatttggctattcttttcctaaagaagtccattctcttctgtacagacagctgagtcatccagtctacttagtacctggttgctgcctctgaccttttcagcttgatacccttggcttta

SEQ ID NO: 17706 - DNA, 766 bp, Macaca Fascicularis
  misc_feature (1)...(766): n = A,T,C or G
agtattttatatantttgactttttaaaagttcatcagtgtttttgctactgttaagctcatgcagtttatactgtattttttatatatcctttatatttacaaaactttactccctgtaaaggagtgctatcttaaaaacaacttaaggggttaaagtcgtttcttttagtttaatagatgtgcataaggtagctttagcaattaaattctagtgaagttgatatagtctcatttttaattgtcctataatggaacagtagcaaattcactaaacttttgtgttcaaagttaaattgttcttagtactttaaatgtaggggaatgtaataaacatagtgtgtatgtttgggttttaattacacattttatatatgagccatttagatatgcagtgttaattctannnnnnnnnnnnngtatgtaacttagcttatgttaatgcaatcatgaagttggtttgctctagcatcctgtagtctttaaacattcttttagcgaaattgtcattgttttatcagtgctaatgtgtgcaagcagtttttttattttgcttnnnnnnnnnnnnnnnaaagtggtgtcccagcgttttctgtactagattgcaccaaggaagcttttggggaggaaggaaggacattaaattctttccctggtaatgaaaagagcgcgttatcaatacagtgctgcaatttctggatatcagctacaatttgtttttaatttggtttttaacatgtttatttggcaaattttataatgaagtt

SEQ ID NO: 17707 - DNA, 885 bp, Macaca Fascicularis
  misc_feature (1)...(885): n = A,T,C or G
aagaaaaatgaaagacacagacnnnnnnagagnnaattagagaagcattccgtgtgttgataaggatggcaatggctatattagtgctgcagaacttcgccatgtgatgacaaaccttggagagaagttaacagatgaagaagttgatgaaatgatcagggaagcagatattgatggtgatggtcaagtaaactatgaagagtttgtacaaatgatgacagcaaagtgaagaccttgtacagaatgtgttaaatttcttgtacaaaattgtttatttgccttttctttgtttgtaacttatctgtaaaaggtttctccctactgtcaaaaaaatatgcatgtatagtaattaggacttcattcctccatgttttcttcccttatcttactgtcattgtcctgaaaccttattttagaaaattgatcaagtaacatgttgcatgtggcttactctggatatatctaagcccttctgcacatctgaagttagatggagttggtcaaatgagggaacatctgggttatgcctttttttaaagtagttttctttaggaactgtcagcatgttgttgttgaagtgtggagttgtaactctgcgtggactatggacagtcaacaatatgtacttaaaagttgcactattgcaaaacgggtgtattatccaggtactcgtacactatttttttgtactgctggtcctgtaccagaaacattttcttttattgttacttgctttttaaactttgtttagccacttaaaatctgcttatggcacaatttgcctcaaaatccattccaagttgtatatttgttttccaataaaaaaattacaatttacccaatggttgctctacatctgagtcatttaactgttaaagtctaata

SEQ ID NO: 17708 - DNA, 756 bp, Macaca Fascicularis
  misc_feature (1)...(756): n = A,T,C or G
atttcattgtaatttatatattttacttgtattcatttgtaaaactttgtactggtgtaacatactcctcatattctacttttacaaaggcctgtaaagactggcatcttcacaggatgtcagtgtttacatttagtaaacttatgttgtttttttttaaggaatgaggaaacaaaccaccctctgggggtaatttacagactgagtgagagtcctcagtatatgtgagataaactctataatgttttggataaaaataacattccaatcactattgtatatatgtgcatgtattttttaaattaaagatgtctagttgctttttatgagaccaagagnnnnnnnnnnnnnnnnnnnnnnnnnnnnnnnnnnnnnnnnnnnngtatgatgtttcccattcatacacctataaatctctaacaagaggccctttgaattgccttgtgttctgtgagaaacaaatatttacttagagcggaaggactgattgagaatgttccaatccaaatgaatgcatcaaaacttacaatgctgctagttgttgtgaatactatgagattcaaatttttccaacatatggaaagccttttgtcctccaaggacgagtactagggatcacgtgtttaaaaaaagaaaggctgagatgactgggccagaagaaagatgggaaactgaataannnnnnnnnnnnnnnnnntaggaacgggggaggagtgagggcaggaggactacgaggaaatacctttaaaactaact

SEQ ID NO: 17709 - DNA, 742 bp, Macaca Fascicularis
  misc_feature (1)...(742): n = A,T,C or G
atcctggagattgtgtacgcctcgctgggcgctctgctcttcacctgcttnnnngcagtggacacccagctgctgttgggnnnnnnnnnnnnnnncctgagcccggaagagtacgtgttnnnnnnnnnnnnnntgtacacagacatcatcaannnnnnnnnnnnnnnnnnnnnnnnnnnnnnnnnnnnnnnnnnnnnnnnnnnnnnnnnnnnnnnnnnnnnnnnnnngtggcatggctggcctggaccctgcccctggcacggcagtgccagctgtccttcccctctctcttgtccccaggcacagcctggggcagaggacgcccctctccaaccctcccatatgtacactgcagatacttccgtttggaccccctgtggccacagcatggcccctttagtcctcccgccccgccaaggggcaacaaggccacgtttctgtgccacctcctgtctactcattgttgcatgagccctgtctgccagcccaccccagggactgggggcagcaccaggtcccggggagagggattgagccaagaggtgagggtgcacgtcttccctcctgtcccagctccccagnnngnnnnnnnnnncccctcccccccaccctggagtgctgcccnnnnnnnnnnnnnnnnnnnnnnnnnnnnnnnnnnnnnnnnnnnnnnnnnnnnngaggacggcagtttcaggggaggggggcagccttcctctcaatctgctgtcaggaaatccaaaaa

SEQ ID NO: 17710 - DNA, 1162 bp, Macaca Fascicularis
  misc_feature (1)...(1162): n = A,T,C or G
caaggacatggaatattnctttggtgaaaactgggaggagcaggtgcagtgccccaaggctgccaaaaagtacgtggagcggatccactacatagggcagaatgagnnngagatattggtggcccnnnnnnnnnnnnnntacatgggggacctctcggggggccaggtgctgaagaaggtggcccagcgagcactgaaactccccagcacaggggaagggacccagttctacctgtttgagaatgtggacnnnnnncagcagttcaagcagctctaccgagacaggatgaacgccctggacctgaacatgaagaccaaagagaggatcgtggaggaggccaacaaggcttttgagtataacatgcagatattcaatgaactggaccaggccggctccacgctggccagagagaccttggaggatgggttccctgtacacgatgggaaaggagacatgcgtaaatgccctttttacgctnngagcaagacaaaggtgccctggagggcagcagctgtcccttctgaacagccatggctgtgctgaggaagcccagcctccagttcatcttggccgctggcatggccctagctgctggactcttggcctggtattacatgtgaaggacccatcatgccatgccggtaccctcctcccgactgaccactggcctacccctttctccagccctgactaaactaccacctcaggtgactttttaaaaaatgctgggtttaagaaaggcaaccannnnnnnnnnnnnnnnnnnnnnnnnnnnnnnnnnnnnnnnnnnnnnnnnnnnnnnnnnnnnnnnnncacagggtgtcaccctgggagcagtcggcacagtgcagcaggcctggcccccgacccagctctagtccaggctcccacacctctgggccctaggctgcttccagtagttcctgtttttgtagtacatgggtggctatctcccctgctggaggtgagtggcctgtaagcccaggctgtgggagggggccttgctggnnnnnnnnnnnnnacttctgggcctctcttggaccctgggggtgagggtgggtgtgggtggaagcctcagaggacttgggagcttatccctctcacccagaattcctctaaccccttgggtgaggtctgcttggccccagcttgtctcctccg

SEQ ID NO: 17711 - DNA, 759 bp, Macaca Fascicularis
  misc_feature (1)...(759): n = A,T,C or G
cagatgagtgcccagctccaggaagtgagggacccannnagagggggcagagctggannnncatccagggctgcttgtccccagagcccaggtttacactacctccctggggcgggggctggccgcagggtaggggagaggctctgcagtgtgaggggtggagcctcattgagggcagctgggttaggggagcacctgttnnnnnnnnnnnnngaagaggggagcacagtagctactagaccccattggcaccccacaagccagccaggggccccaggaaaatggggcaccccccagcaccctccagattgagggcaaggtagaggaaggagtcccagcctctgggcagaccagaggcccagagagaggggctagcagaaggcttttgggttttctcttgcctgaggcttggatctgacaaacgctttgtgggcactgctcccttagattcttccccacatcagtctacctgcctagagtagcagcgcccagacccagttctgggactgaaggttaacccttcacctgctgccccttctcaacacccaggcccccagagccagccgggcccctccagcagccacactgtgggtatttatgagtttcatatgaagtactgtgccccttcccttcctcatcccgaccctgcccgagcttcctgaaggtcctcaccgtttgnnnnnnnnnnnnnnnnnctccaaaccccacctaggttttataatgtatattatatattttttgtgtgtatttttaaaatcc

SEQ ID NO: 17712 - DNA, 691 bp, Macaca Fascicularis
  misc_feature (1)...(691): n = A,T,C or G
aagacnnnnnnnnnnntgtttnntgtattaaagcaacttgatgcccagcagacacagctccgaattgattccttctttagattagcacaacaggagaaagaagatgctaaacgtattaagagccagagactaaacagagctgtgacatgtatgctaaggaaagagagagaagcannnnnnnnnnnnnnnnnnnnngtttctgttgctatggagaaagaatttgagatacttgatgaggcaaaaggaaaaacccagaagagaggcataacaaatacattggaggagtcatcaagcccgaaaagaaagaggctttcagattctaaaggaaagaatacgtgtggtggatttttgggggagacctgcctctcagaatnnnnnnnnnnnnnnnnnnnnnnngatgctgaaagtttaatgaatgtacaaaggagaagagcggcgaaagagccaaaaatcagtgcttcagattcgcagaactcagtgaaggaagctcctgtgaagaatggaggtgtgaccaccagcagctctagtgatgatgacggagggaaagagaagacagtccttgtgactgccagatctgtgtttgggaagaaaagagggaaactgagacgtgcaaggggaagaaaaaggaaaacctaattaaaaaatatgtatcctgtataattaggtatgacagccttttgtaatgaatttg

SEQ ID NO: 17713 - DNA, 725 bp, Macaca Fascicularis
  misc_feature (1)...(725): n = A,T,C or G
tcggctggacaatctgcacagttgcttctgtgccctgcaggccttgatagattcctgtgcaggccctggctccctggccacggagcctcatgtgcgcatgatcacactgtatgacaacgaagaggtggggtctgagagtgcacagggagcacagtcactgctgacagagctggtgctgcggcggatctcagcctcgtgccagcacccgacggcctttgaggaagccatacccaagtccttcatgatcagcgcagacatggcccatgctgtgcatcccaactacctggacaagcatgaggagaaccaccggcccttattccacaagggccccgtgatcaaggtgaacagcaagcaacgctatgcctcaaacgcagtgtcagaggccctgatccgagaggtggccaacaaagtcaaggtccccctgcaggatctcatggtccggaatgactccccttgtggaaccaccattggacctatcttggcttctcggctggggctgcgggtgctagatttaggcagcccccaactggccatgcactctatccgggagatggcctgtactacaggagtcctccagaccctcaccctcttcaagggcttctttgagctgttcccttctctgagccataatctcttagtggattgagccctcttggaaagacttccctgccatccctttgcacctgagaggggaagttcttagctgagctgaagctgnnnataaa

SEQ ID NO: 17714 - DNA, 785 bp, Macaca Fascicularis
  misc_feature (1)...(785): n = A,T,C or G
tttgagatcatggcctctgtatacacagggcctggagaagtcagatgagagctaccaggctcaaannnnagctcctgtccaacaaatgnctttcgtgggagcacgccaccctttccaaggctagttcctctcccagcatcacacttcggctctcgtcctgctctagaaacgtgcctttgctggtccannnnnnnnnnnnnnnntcttttcttaattgttggcatccatctgggctatggtggttgtggcgggggtggcagtggagagtgtgttgttttaaacccgtgagtcattttagggtattggtactcttggagactgactttctcttgctcaggttttcagagagannnnnnnnnnnnnnnnnnnnncctaagaatctccttgaccaaagacaaatgtagcaaactttgcacatggtgcaacatttgataatggtatcaatttacatttgtgttttccttgcaatttccctcctcctctagcttgctcatgtttctgccttcttcttgctggcaagagtacagactataattctccagttcactaacatctggagtgactgcactgtttgcaatttgattgattgactacatgtgtacagttcctgtattgcaagtcacttttctatataatcttttttgagatgaagtcctgctgtgtcgccnagctggagtgcatnnnnnatcttggctcactgcacnnnnnnnnnnnnnnnnnnnnnnnnnnnnnnnnnnnnnnnnnnnnnnnnnnnnnnnnnatacagtcatctgccacatgccggc

SEQ ID NO: 17715 - DNA, 733 bp, Macaca Fascicularis
  misc_feature (1)...(733): n = A,T,C or G
tgaaggagaaagcagctgcctcaccgcccagacattgatttgttcagatgtttcaatgcctcatgatacaataaaaccacaaaaattttcttaacagtttaaattgttttaattagtttactagttggctgggcatcaaaagccacccggacccattgtctgtctcatgtctcaccctcccacttctgccccaactctgaatacctgtttcagggagaaactgctgaagcagcactcccagctagcctctcagaagccctgtagggcagttctctcccactccacagggcgactggtcttgggaaagcaggcaggaagagctcaggtccgacttgaagcttctcgcactgaagcctgtgcagtcagttctgatacctcctgtgacttctgctctggcgaggttcagggctctagtagcaggagagatgatcctgaatcctgctgaagctggagaggccttggcaaaatggcccatcacatttaggccctgtgggctgaggtctcagcagtatcaagggaggggtccgctgtatccccagaaggatcaggatcatatccagggtgccccacatacaccaaaccaggcagagggcagctcagctcctgtcccatctgctttggatatcattacccaaaggcaggtaatccgaagagccagcctccactgcccacagagccaggcccagttgggttggagtatnnntcaagagctgtggaaggaggcagtctgtga

SEQ ID NO: 17716 - DNA, 895 bp, Macaca Fascicularis
  misc_feature (1)...(895): n = A,T,C or G
attttgtaacagagggagccagggacctcatttcaagagtgttgaagcataatcccannnnnnnnnnnnnnnnnagagaagtacttgaacacccctggatcacagcaaattcatctaaaccatcaaattgccaaaacaaagagtcaactagcaaacagtgttaggaatcatgcagggggagannnnntgagccagggctgctgtataacttgtcaggaacatgctactgaagtttattttaccattgtctgctgccctcaatctagaacgctacaagaaatatttgttttactgagcaggtgtgccttaacctccctattcagaaagctccacatcaataaacatgacactctgcagtgaaagtagccatgagaattgtgctacttacactgattcataatctggaggcaannnnnnnnnnnnnnnnnnnnnnnnnnnnnnnncaggcatggtgtccccacaggaggcaaatccagagtctggctgtggggaaagtgaccactttgcccgacgcgatcagttaaggagctgtgcaataaccctccaagtccccgagtgagnntgtaacttattgggttggccacnnnnnnnnnnnnnnnnggaatgagtatgtgattctttttaagtatgaaaataaagatatttgtacagatgtgtattttttctctggtgnnnnnnnnnnnnnnatgctctgtgtctgtcnnnnnnnnnnnnnnnnnnnnnnnnnnnnnnnnnnnnnnnnnnnnnnnnnnntcccatatgagtgtgtgtaaaataggaacatgtgctctacctccatttagagacttgcttgggatacagaagaggccgtgtgtctcagagctgttaagggcttatttttttaaaacattggagtcatggcatgtgtgtaaac

SEQ ID NO: 17717 - DNA, 711 bp, Macaca Fascicularis
  misc_feature (1)...(711): n = A,T,C or G
gacccccctgtaccagacttcgccattatgaagatggaggtccctggctctgtcactgaatacaaggtcttggcnnnnnnnnnnnnnnnnnncttcttggtggtacaggggacagtgatagccagcacacccacaacccagacaccaatccctctgcagagtggtggcgtgctcttcattggggccaatgagagtgtctcactgaagcttactgagccgaaggacccgctgatattccgtgcccgctgtctgctgtagaggctgcagcctccctagctctcttctgccagccaccctaaattccagccagccttgcctcttgaggcccagctcaagcagccttccttgctctggactccttaggtatatcctagaagagctggggtggaggagggagcgtgaagatagtgactcctgaacacacccaggtagaaccatcttctttggggatgaaaggcctgtgtaaggggtgtgatactccccttgtcttccctctctactcctcactacacctgagccaggctcttgccaactctgttccagcctatggctttaggctagctggtaaaatatgtgacccagccgggtaatttctaagaacagggttctagtgctgggactgcccatttcctcagctgcagaggaggaaagggaaagggtaggcctgtggactaacactgtttacacccttttattctgtcaaagcaataa

SEQ ID NO: 17718 - DNA, 751 bp, Macaca Fascicularis
  misc_feature (1)...(751): n = A,T,C or G
gagagtagctatgaaccagatgagctgaccaaagagatggcccacctggaaggactaatgaaggacctaaacgctatcacgacagcnnnnnnnnnnnnnnnaggacatgacttcaaacctgagtctggaagtcttggaacttaccttgaaaacaaggaattgtacagagtacgagannnnnnnnnnnnnnaacgnnnnnnnnnnnnnnnnnnnngccagcgcctctgtgtagggctggctccaggcatggccacctgcctnnnnnnnnnnnnnnnnnnnnnnnnnnnngttgaggcagcttccctttgcctgctgatattctgcaggactgggcaccatgggccaaaattttgtgtccagggaagaagcgagaagtgcaacctgcatttcactttgtggtcaggctgtgtcttcgtgctgcgactgcatcacctttatggagtgtaaacattggcatttatgtacaattttatttgtgtcttattttattttaccttcaaaaacaaaaacgccatccaaaaccgaggaagtccgtggtgttctccacaagtggttgacatttgactgcttgttccaattatgtatggaaagtcattgacagtgtgggttgttcctggggttggcttgttttttggttttgtttttgttttttaattcnnnnnnnnnnnnnnnnnnnnnnnntgttaatccatcactctgagggggaggaaatgttgcattgctgtttgtaagcttttttattattttttta

SEQ ID NO: 17719 - DNA, 1174 bp, Macaca Fascicularis
  misc_feature (1)...(1174): n = A,T,C or G
agagagagatgnnngngccattcgctattttgtgnntgaaggcttcgagnncttctgtgcccagtccttctccaagaacttcgggctctacaatgagagagttggnnnnnnnnnnnnnnnnngaaaagaacctgagagcatcctgcgannncnntcccagatggagaagattgtgcggattacttggtccaatccccccgcccagggagcacgaatcgnnnnnnnnnncctctctaaccctgagctctttgaggaatggaaaggtaatgtgaagacaatggctgaccggattnnnnnnnnnnnnnnnnnnnnnnnnnnncgactagaagccctcaaaacccctgggaccnnnnnnnnnnnnnnnnntcaaattggcnnnnnnnnnnnnnnnnnnnnnnnnnnnnnnnnnnnnnnnnnnnnnatcagtgaaaagcacatctacctgctgccaagtggtcgaatcaacgtgagtggcttnnncaccaaaaatctagattatgtggccacctccatccannaagccatcaccaaaatccagtgaagaaacaccacccgtccagtaccaccaaagtagttctctgtcatgcgtgttccctgcctgcacaaacctacatgtacatatcatggattagagacacttgcaggactgaaaggctgctctggtgaggcggcctctgtttaaaccgtccccacgtgaagagaacatcccttgagacgaatttggagactgggattagagccttgggaggtcaaagcaaattaaaatttttatttaagaataaaagagtactttgatcatgagacataggtatcttgtccccctggctaaaaggcaggagtattgcgtgtggcaaccacgtgcttctgtgtggtgtttgactctgtacaaagtctagtcccaaagatcaagttgtctgaaggagccaaagtgtgaatgtgggtgtcggctgtggcattaaactcatcatctcaacccggagtgtctggtctgcctgctctttctgcatggttgtgtccctagtcctaagctttggttctttagggcgactgtgttaagaaggatatttaatcatgacacacacatatttaactgaaacagaagtttgaccaaacagtattcactcgtgatgtgtgtagtgcgttctatttttgagccattctactgtgttctact

SEQ ID NO: 17720 - DNA, 574 bp, Macaca Fascicularis
  misc_feature (1)...(574): n = A,T,C or G
catgtaatttggaagggtnngcaacatnnaanncccatatccagtcaccaaaacctgttgactacataaccatctgaaatctgttcatctttcatgtccataatctcagnncaggccatttcttattnnngttgtaactcctaaattgtctgtagttgatcggttccctttgcttgagatgtatgttggttttatatctcaagtaccatcctatcctcagcaaaaagtttgtgtctacctttgaaataggagatttagggtattttgctataaattaagtattagnnacagcnnnnnnnnnnnnnnnggttcccctggtatttagtcccattgtttaacatgacaggaccatgcaatttttaagaatttcagtgtaatttcctggtaacaccatataatgtagtatttagtaggtacttatcatttattgaatatactgaccttaaattatatctttttaaggttcattaacctcactgaaacaccataaagatgacatttcaattgtcaaaacgggaatggattgtggtctcagtttagannaagaaaatatggaatttaaagtgggagatag

SEQ ID NO: 17721 - DNA, 706 bp, Macaca Fascicularis
  misc_feature (1)...(706): n = A,T,C or G
aaacnnnatgctgcgtaaatcagttaccggaaatgcacatttcatagtgtgaagcactcatttctaaaccttattatctaaggtaatatatgcacctttcagaaatttgtgttcgagtaagtaaagcatattagaataattatgggttgacagatttttaaaatagaatttagagtatttgtgtggggttttgtttgtttacaaataatcagactataatatttaaacatgcagaataactgacaatgttgcacttgtttactaaagatataagttgttccaagggtgtacatgtagacagannnnnnnnnnnnnnnnnnnnnnnnnnnnnnnnnnnnnnnnnnnnnnnnnnaccatagctgaannnnnnnnnnnnnnnnnnnnngactacctgtcacgaaggtataaaataatttagaagtgaatgtttttctgtaccatctatgtgcaattatactctaaattccactacactacattaaaacaaatggacattccagaatatagatgtgattatagtcttaaactgattattactaaaccaatgattgctgaaaatcagtgatgcatttgttatagagtataactcatcgtttacagtatgttttagttggcattatcatatcgatggtgaataacgtattcccagtaaatttatatagcagtgaagaattacatgccttctggtggacattttataagtgca

SEQ ID NO: 17722 - DNA, 718 bp, Macaca Fascicularis
  misc_feature (1)...(718): n = A,T,C or G
cnnnnnnncaaggctggttatttcnnnnnnnnnnnngcgacaattacttacctggcccaggaggatgggcccgttgtgattggctctaccagtgcacctggacagggaggaatcctggctcagcgggagtttgacaggcgattctcccctcattttctggactgggcagcctttggggtcatgacccttccctccatcggcatccccctgctattgtggtactccagcaagaggaaatatgacactcccaaaaagaagaagaaatgagtggggcttccacagccctcctctcccaagaaatccaggctcctctcccaagaaatccaggtgctttccagactccagagggtatattaatgcaatatcttctctcttagcccttggccactttctcctggatcctgccctgctctcagccatagtgaaggaccaggcctaggagtctgtgagagcctccttggttccatgtgaagccataaacgggaatgcctttggcaatagccctgagcctagagggccctctgatgccccactgaggtgctgttggtttattgctggcaatgtgaattctctcaggggtctaggaggggcatttctgagagtgcccgacaccacccccatcccctgccccccgctctcagaaaagggtagaagatgaaatgaaagatatgggactcttggaggatacccagtnnnnnnnnntgggttagagaagtgc

SEQ ID NO: 17723 - DNA, 605 bp, Macaca Fascicularis
  misc_feature (1)...(605): n = A,T,C or G
gtggtctcgatctcctgaccttgtgnnnnnnnnnnnnnnnnnnnnnnnnnnnnnnnnnnnnnnnnnnnnnnnnnncgcgtccggccacgctgctgctttctctacacaggcggcctggggaagctcaaaggcaccttggccagccagttgcattctgggcatggaggacctgtcctcccttagggcctgtgctgtccaggcaccttttcaaatgcctccctactgccaccagctccgggtagatgaatctgtgactcctaacaagtaacttagatgatgtcttcttttgaaagtctacttttctgattacaaatgtaatgtaaaatgtaatgtcctcaaggactggcgcacacactcagnnnnnnnnnnnnnnnnctcctctttcagtgtccacattcatgactccagcccctgctgtctttgttagggggatatctggcctccctcttgagccatgtccccannnnnnnnnnnncccctggggcacaggtgcgacctcccagggagccaccctgctcagcttcctctgctgtggctcctgagccacacgatgtccctggggannncannccctggatggaccacnnncnnagctcagtgacatt

SEQ ID NO: 17724 - DNA, 989 bp, Macaca Fascicularis
  misc_feature (1)...(989): n = A,T,C or G
tttaagtgcagannnnnnnnnnnnnnnnnnnnnnnnnnnnnnnnnnnnnnnnnnnnnnnnnnnnnnnntccacatccatgaaaataaaacaccctcctgttgtggacggtgagcacctgatgccgcttatttgctgtgagtttggacggcgcccctgatgccacttatttgccgtgagtttggacggcgccccctgatgcnnnnnnnnnnnccatgagttggacagcgcccctgctggcggatagcgagactgtggagtttgttcagtggtacggtgtccaagcaaacagcagaattcgactttctaaacagccctaagcaaacagcagaattcgactttttaaccaataaacaccatcaaccttattgactttattgtcccttaaattatattgactgttgtgattccatcaagtttatacactcttttctctccctattttgcagcaacaaattgcnnnnnnnnnnnntttgtttgtttttgtttgnnnnnnnnnnnnnnnnnnnnnnnnnnnnnnnnnnnnnnnnnnnnnnnngcttggaatggtttattnnnnnnnnnnnnnnnnnnnnnnnnnnnnnnnggcagtgtttggaaaccttttattatatagttgtttacatacttataagtctatcatttaaagacatctactgaaacaaatgtatttgtttcnnnnnnnnnnnnnnntaatctattataaaattgaaattaaatatagagaatgttttaacaattttttaactcaaaatttgtcaatcatttttaatagttctttttttataaaaagaaaaaggaatttaaggacaggcagtagtctcttttaaaatttattcacaaaacccattaactgcacagttgctattagctgcctgttctaaaacgatagtctttttattgaaacacaaataaacttttctgtaatattttatggaatataaagagactttaattgtttgacttgtttaacttggcactgttagttttt

SEQ ID NO: 17725 - DNA, 753 bp, Macaca Fascicularis
  misc_feature (1)...(753): n = A,T,C or G
aatttgatttacaggagtgagcaacaaaactgaaataatcacacccccagttnnnnnnnnnnnnnnnnnnnnnnnnnnnnnnnntgtgagcaggcggtttggctacgttgcctttcaaaactatgtcccttcttccgtgaccacgatgctctcctgggtttccttttggatcaagnnnnnnnnnnnnnnnnnnnnnnnnnnnnnnnnnnnnnnntctgttctgaccatgaccacgtnnnnnnnnnnnnnnnnctcgtatcgatagccgtgcccatgcccgtacccgtgcacgttcccgagcctgtgcccgccaacatcaggaagcttttgtgtgccagattgtcaccaccgagggaagtgatggagaggatcgcccgtcttgctcagcccagcagccccctagcccaggtagccctgagggtccccacagtctctgctccaagctggcctgctgtgagtggtgcaagggttttaagaagtacttctgcatggtccccgattgtgagggcagtacctggcagcagggccgcctctgnnnnnnnnnnnnnnnnnnnnnnnnnnnnnnnnnnnnnnnnnnnnnnntgaccttcttcttcttcaatgtgctctactggcttgtttgccttaacttgtaggtaccagctggtaccctgtggggcaacctacccagttccccaggaggtccaagctccttgccgagggagttgggggaaagcagcagcagcagcaggagcaactagagttttcctgccc

SEQ ID NO: 17726 - DNA, 882 bp, Macaca Fascicularis
  misc_feature (1)...(882): n = A,T,C or G
atcaccagagacccgggcagaaccagnnnnncaggacgccgctgaccaccctcaacacggacatcagcatcctgtccttgcaggctnnnnnnnnnnnnnnnnnnnnnnnnnnnnntgacagcaaagcactgtgtggctgaataagcggtgttcatgacttctttttttttctttgcacaacaacaacaacaacaaatccacagaatcttttaagtgctgaacttttcaaccatttcacaaggaggacaagttgaacggacctttttgaaaagaaaaaaaaaaatggaaggaaaactaagaatgatcatcttcccagggtgttctctcaccnggagtgagatattcgttatttatgaaaaagacttttaaatgccctttctgcagttggaaggttttctttatatactattcccaccatggggagcgaaaacgttaaaatcacaaggaattgcccaatctaagcagactttgccttttttcaaaggtggagcgtgaataccagaaggatccagtattcagtcacttaaatgaagtcttttggtcagaaattacctttttgacacaagcctactgaatgctgtgtatatatttatatataaatatatctattgagtgaaaccttgtgaactctttaattagagttttcttgtatagtggcagagatgtctatttctgctttaaaaagtnnnnnnnnnnnnnnnnnnatgctaaactttttataaaagtttagttgtaaacttaacccttttatacaaaataaatcaagtgtgtttattgaatggtgattgcctgctttatttcagaggaccagtgctttgatttttattatgctatgttataactgaacccaaataaatacaagttcaaatttatgtagacaga

SEQ ID NO: 17727 - DNA, 730 bp, Macaca Fascicularis
gattgcagaagaatttgtaagatgaatacttttttttaatgtgcattattaaaaatgttgagtgaagctaattgtcaactttattaaggattgctttgtgcccaccacctagtgtaaaataaaatcaagtaatacaatcttaactgttgtggccttttttgatcataagaattggtactgtttaaggccaaaaataacagtttttatagatcttttagtttcaactcaatttttacaataaaaaggattcgtattgcattgagcttataaacttacggtttgagaactccatatttgatctattctcttccaatcaaatgtctaggcttgtttgactttcaccccaatgatttttcactctttttataattgtttacttcagtttcctttaataacttaatctcttcctgttcagtttttacttcactctttattcttttctttgagtatgttatgcttatttggaaagtcagtgaaactgtcaaaatgttatctcaataggatacttacatgagaactacaatcaccaaatctactgtattcaacattagcagatctaatttgataaacaacatggcttgtgtgaaaattgagcaggtgtttgtttacccatagtgttctgtgtagttattgcttagtctgcagaaaataatgacttagatgagatgtctgacttgctttcacttattaaacatgttcaccatgggatgatgtctgtaacatcagcata

SEQ ID NO: 17728 - DNA, 761 bp, Macaca Fascicularis
  misc_feature (1)...(761): n = A,T,C or G
cccagtaggtcaagaccagccagggcaacatgatgagaccctgtnnnnacaaaaaattgttttaaacaattagcctggcgtggtagcgcacgcctgtggtcccagctacttgggaggatcatttacgcttgggagattaaggctgcagtgagtcctgattgtatcactgtactccagcctgggcgacagagcaagaccgtgttttgaaaagaaaaaccctgggaaaagtatggctataagtcctgcgattcagtcctagcaagaagcaagaattctgagatcctccagagagtcgagcagcacccaccctccacctcannnnnnnnnnnnnnnnnnnnnnnnnnnnnnnnnnnnnnnnnnnnnnnnnnnnnnnnnnnnnnnnnnnnnnnnnnnnnnnnnnnngacgagctccaagccaggtcaggctttggaggccnnnnnnnnnnnnnnnnnnnnnnnnnntgattgtggcagaggggccactacccaaggtccagctaggcccaagacctagttacccagacagtgagaagccccaggaaggcagaaaagttgggagcatggcagacagggaagggaaacattttcagggaaaaaacatgtatcacatgtctttagaagcaagtcaggtttcatgtaacttagtgtcctcttgcgtgtccaaaagtagcccagggctgtagcacaggcttcacagtgattctgtgctcagccgtgagtcacactacatgcccccatgaaagctgggcatcggtgaagtc

SEQ ID NO: 17729 - DNA, 712 bp, Macaca Fascicularis
  misc_feature (1)...(712): n = A,T,C or G
gcacntnnnnggcttttgacaagcacatgaannngatcctctgtgactgtgatgagtnnnnnnnnnnnnnnnnnnnnnnnnnnnnnnnnnnngaaagggaagagaagcgagtcctcggtctggtgctgctgcgaggggagaatctnnnnnnnnnnnnagtagagggacctcctcccaaagatactggtattgctcgagtgccgcttgctggagctgctgggggcccagggatcggcagggctgctggnnnnnnnnnnnnnnnnggggttcccatgcctcaggctcctgcaggacttgctgggccagtccgtggggttggcgggccatcccaacaggtgatgaccccacaaggaagaggtactgttgcannnnnnnnnnnnnnnnnnnnnnnnnnnnnnnnnngggccccgacccagtacccacctggccgtgggggtcctcccccaccaatgggccgaggggcaccccctccaggcatgatgggcccacctcctggtatgaggcctcctatgggtcccccaatggggatcccccctggaagagggactccaatgggcatgccccctccgggaatgcggcctcctccccctgggatgcgagggccccctcccccgggaatgcgcccaccaaggccctagactcatcttggccctcctcagctccctgcctgtttcccgtaaggctgtacatagtccttttatttctttgtggc

SEQ ID NO: 17730 - DNA, 748 bp, Macaca Fascicularis
ctaaacgcaatgtcattttaaaaaagaaggacttacgatgtcgttttcacatatgacaatgttgcatttacgatgcagtttcatataccgaaacgttgaattgatgatgcagttttcatatatcaagatgttcgctcctgcagtactgttggttaaatgacaatttatgtggattttgcatgtaatatacagtgagacacagtaattttatctaaattacagtgcagtttaatctcttaatactgactcagtgtctgcctttaaatataaatgatatgttgaaaacttaaggaagcaagtgctacatatatgcaatataaaatagtaatgtgatgctgatgctgttaaccaaagggcagaataaataagcaaaatgccaaaaggggtcttaattgaaatgaaaatttaattttgtttttaaaatattgtttatctttatttattttgtggtaatatagtaagtttttttagaagacaattttcataacttgataaattatagttttgtttgttagaaaagttgctcttaaaacatgtaaatagatgacaaacgatgtaaataattttgtaagaggcttcaaaatgtttatacgtggaaacacacctacatgaaaagcataaattggttgctgttttgcttctttttccctcttatttttgtattgtggtcatttcctatgcaaataatggagcaaacagctgtatagttgtagaattttttgagagaatgagatgtttatatattaac

SEQ ID NO: 17731 - DNA, 682 bp, Macaca Fascicularis
  misc_feature (1)...(682): n = A,T,C or G
atgaaatagtggatttttatttnctctaattttaaatgtaacttgttctagtatggtgctaaaaactttaaataaacctgttacattaagtagaagcaaaataaacaaaactaaggttttaaaaatgatttttgtacatttgatcatattctgtttctgttttgttccttacaatatcaatcttattttatattctcttgtgagaacacaaacatttgttaattgctcagtagtggcagcagtaaggacaatgtacccaatcactctctgtatcgctgtttcaaactgttgttttgaccctgtggtttactactttacatcggacacaattcagaattcaataaaaatgaaaaactggtctaccaggagaagtgacttcagattctctgaagttcatggtacagagaattttattcagcataacctacagaccttaaaacgtaagatatttgacaatgaatctgctgcctgaaataaaaccattaagactcactgggacagaactttcaagttccttcaactgtgaaaagtgtctttttggacaaactatttttccacctccaaaagaaattaacacatggacattttaaagtctttagtataaagaaaatttgtattcaatgtgttaagcattaacatgtattttatttgtgtatacactccnnnntgatttttctgagcc

SEQ ID NO: 17732 - DNA, 1495 bp, Macaca Fascicularis
  misc_feature (1)...(1495): n = A,T,C or G
tcaacttannnnnnnnnnnnnnnnnnnnnnnnnnnnnnnnnnnnnnnnnnnnnnnnnnnnngtgcacacgctccagctaatacaccagcagaagtgcctcatagcacaggtgtagcaagtaatactatccaannnnnnnnnnnnnnnnnnnnnnnnnnnnnnnnnnnnnnnnnnnnnnnnnnnnnnnnnnnnnnnnnnnnnnnnnccccagaggactttgctagagctcagaagtacnnnnnnnnnnnnnnnnnnnnnnnnnnnnnnnnnnnnnnnnnnnnnnnnnnnnnnnnnnnnnnnannnnnnnnnngttactgacgacaggcagagaatgaagcctttgtataacagacccatgtatttttggcatgaggaactaacagtccattactctatcttcagccnnnnnnnnnnnnnnntttaaggaagacttggtttcatttaatatgacaatgaaatctgtgtgtatcagatttttattgaannnnnnnnnnnnnnnnnnnnnnnnntttcgttgtccatttagtagattcagtcatctctgagtatatagggctgatgtcagcaagaccctaaaaattctcattgaaccccgcttcaacaaatgaaaacacatctatnnnnnnnnnnnnnnnnnnnncctttgtatttacatacattaggggaattttttaaaatctgtaatgtttggacaaacagatgatactactttgctataaaattataaatgtaacttttaataaagattgccagaatattctaaattagaaattatgtttttgtttccctcaagacataaaacaaatatgaacattctaaactggtggattaatctgaaaagacattcagttcaaattttaatttattctcatgttaaatataactccattaaaagtttaatatnnnnnnnnnnnnnnnntgataaggtaaagaggtagaatcactttcagacttaagaataatgttgattccccaactgctttaccttatttattaaagtataagatgaattggtatttgcttcataggcagtttgactgcatgtattagagaatgaaaagaaggtatttgcctggaaacttggtgctctaaattaaggtactcctctgctgctgtagaatggattcnnnnnnnnnnnnagctatggatgattcagaatattatgtttagattcccatttgttaagtttataagttttgtggggaattatgaacttgctgtgtaccacctgcatntgtactgtgtgaaaaataaatacaaggattcgtttagctaattcaacttactacaaagacaaatgtctgtttttatttgcctgctagaattgtctttttttaaagtcctttttatttataggaatatgggtgtttctataggaagaaacaggttttttgttgttgctgtttttaaagataaatttgacaaagttacctgaaatttatctggtccattttattcatgctannnnnnnnnnnnnnnnnnnacacaagggga

SEQ ID NO: 17733 - DNA, 698 bp, Macaca Fascicularis
  misc_feature (1)...(698): n = A,T,C or G
ggccaggcgttccacacnnnccgcnccctgccctgcagtaacggtcatctgtgccgcccctggtgcggacggggcgtggtggcgagcccaagtggttgcctcctacgaggagaccaacgaagtggagattcgatacgtggannnnnnnnnnnnnaagagggtgaaagtagannnnnnnnnnnnnnnnnnnnnnnnnnttgtcaccctgcnnnnnnnnnnnnnnnnnnnnnnnnnnnnnnnnnnnnnnnnnnnnnnnnnnnnnnnnnnnnnnnnnnnnnnnnnnnnnnnnnnnnnnnnnnngatgacagggaatacnnnnnnnnnnnntcaggtgacaagttacagtccaactggtcttcctcnnnnnnnnntgtggagtgtggttggagatgaagtggtgttgataaaccggtccctggtggagcgaggccttgcccagtgggtagacagatactatgcaagcctttgacccccggttccccatgctgcttcatgagagtctttttttgcactgttgaaaccgggcttggcactcaagtcaaagattaacatcagaataacaaacagttgccctctccagaaagtcctttcttcctccatactgtagtcctattgagaagacgtttcgtctctgagaaaaaaggatgaaaccgtgggttctcttctcaaagctaaaggatagtgttaacaagccagct

SEQ ID NO: 17734 - DNA, 749 bp, Macaca Fascicularis
  misc_feature (1)...(749): n = A,T,C or G
ggnnnnnnnnnnnngnaacgtgaacannnnngacgccatcacggagatcgggaannnnnnnnnnnnnnncaaggatgggaggtactggcgattctccgagcgcagggggagccggctgcagggccccttccttatcgccgacacgtggcccgcgttgccccgcaagctggactcggcctttgaggagccgctctccaagaagcttttcttcttctctgggcgccaggtgtgggtgtacacaggctcgtcggtgctgggcccgaggcgtctagacaagctgggcctgggcgccgacgtggcnnnnnnnnncggggccctccggcgtggcgcggggaannnnnnnnnnnnnnnnnnnnnnngcttctggaggttcgacgtgaaggcgcagatggtggatccccggagcgccagcgaggtagaccggatgttccccggggtgcctttggacacgcacgacgtcttccagtaccaagagaaagcctatttctgccaggaccgcttcnnnnnnngcgtgagttcccagagtggggtgaaccaggtggaccaagtgggctacgtgacctatgacatcctgcagtgtcctgaggactagggctcctgtcctgctttggtagtgccatgtaaatccccactgggaccaaccctggggagggatnnnnnnnnnnnnnnnnnnnnnnnnnnnnnnnnnnngaggacagggaggagtggaggtgggctgggccctcttctcaccttccttttttgtggag

SEQ ID NO: 17735 - DNA, 689 bp, Macaca Fascicularis
  misc_feature (1)...(689): n = A,T,C or G
gtagcagggagctgacgtattagnnnngtgggcaacatgatgcatgggaaatggaagatttttgtaaaaagtcagtatttatttccaggaaaagnnngaccctgctatttgaacatccaagactcgttagaggatgtgtttggtgttcacacgtgtttcttctcttctggatagtagagaagtaaagcttacaaagaatgcctagaacaagaaatttttgcattaaaaattttgcccagtgttctgatatgtgactttgaggccaatgggtcataaacaaatataagaaagctgttaatgagtttcttcaaaggagggaaaactttctatgaatctaagatcgatggagctagaattgtaggactaggctcatcagaatcgtgactattattgttccatcaaactgtgaaaagaaataatgtggaccttgctggaaacaaaggcttggcaaacaatttttgttcagtgcccaccgagatgtgtagaattgggaactgatacatgtatcccttataggctcaaaaattatatcttacaatttcttatttaggggaaaattacttgaatcagattctatttagtcaaaccaccctttatgttttattagttttgaattcacggagtcatcataaaaatatttttaaaatcaaaattattgataccccgtagtgcaaaatgtcaatttttaa

SEQ ID NO: 17736 - DNA, 743 bp, Macaca Fascicularis
  misc_feature (1)...(743): n = A,T,C or G
gttcaacgacttgaagagcaagagaggcgacaccgagaagaaaaagaacggcgtaagaaacagcagtgggaaatagtgcacaagcacaatgagacatcacaaaaaatcgccgcccgagcatttgcacagcgttacctggctgaccttctcccgtctgnnnnnnnnnnnnnnnnnnntagtggctacttttatgatcccattgaaagagatattgagataggatttcttccatggctaatgaatgaagttgaaaaaaccatggaatatagcatggtgggaagaacagtgcttgacatgnnnnnnnnnnnnnnnnnnnaaaagagactgtatatgtatgagcataaggaagaaacacatcggtctccagaaccagaggatgagcctggtggtcctggagcagtgacagagtcactggaggcctctnnnnnnnnnnnnnnnagcatgtcacannnnnnnnnnnnnnnnntagatggagactatgcacaaagaacaacatatgacagaaggtcatcccaggaaaggaagtttatggaagagacagagctattagagcaggatgaagaatcagcaatgaggaagtccttagaggaggaagaattgtcatagnnnnnnnnnnnnnnagtcatgaaaccaatcaacagccaagtcagcaagcnnnnnnnnnnngatgcgcgagtcccctcaggttatagaaattatgttgtatttagtcaatatgtctttttgtctaatggactgggcca

SEQ ID NO: 17737 - DNA, 758 bp, Macaca Fascicularis
  misc_feature (1)...(758): n = A,T,C or G
gannnnnntnnnnnnnnnnnnaaagcatataactgtacttgattgatgagggaggtgttactttcattgtatataggtcttatttcataaacagatatcctgtatcagaataaaaatatttgttatatatttgaagtcatgcatggtaagaagtgtgtttaaattgttataaacaataatgcannnnnnnnnnnnnnnnnnatcttgcataactataagtactatgaatgaatttggttggttttggtggtnnnnnnntcacatgtttacacactcagtgccctaatttgccctgagggaattgctttttaagtgatccttacagtggtgttttatgttactttattacagagctccttggttttttatttctgcagttaaatttttttaaataacatgatgatggtacattttcctctgttgtctagctaagggnnnnnnnnnnnnnagtaaataagatcaaatgctattaaatgttcctattaccatccttctgtaaatactggattttcctgtcatttagcaccgtgctgcttctgtctgtcttaatgctggcattaagatgatgagccctttttcnnnnnnnnnnnnnnnnnnnnnnnnnnnnnnnnnnnnnntattgatgcagtttgatattttttcataatctgtatttaaacaaaattacatcattgcatcatcttttctaaattcatctccattaaaacttgccttaagctaccagattgcttttgcctccattagccatactgtgtgtt

SEQ ID NO: 17738 - DNA, 742 bp, Macaca Fascicularis
  misc_feature (1)...(742): n = A,T,C or G
caaacgcaccgccactcacannngcagctacgcaggctgcggcaagacctacaccnnnnnnnnnnnnnnnnnnnnnnnnnnnnncacgcacacaggtgagaaaccctaccactgcaactgggacggcnnnnnnnnnnnnnnnnnnnnnnnnnacgagctcacacgccactaccgcaagcacacgggccaccggcctttccagtgccatctgtgcgatcgtgccttctcgcgctcnnnnnnnnnnnnnnngcacatgaaacggcacatgtagccgggacgcccctgcccacctgcgcgcggccgtggcgggtcccacgcgccgggcgcggccccctcccaaactgtgactgatatttattggacccagagaaccgggccgggcacagcgtggctacagagggtctccctcgatgacgacgacgacgacgccaccgccccagcccccatctgtgactgaaggcccggtgggaaaagaccacgatcctccttgacgagttttgtttttcaaaatggtgcaataatttaagtggcatcttctctcccaccgggtctacactagaggatcgaggcttgtgatgccttgtgagaaataagggccnnnnnnnnnnnnnnnnnnnnnnttttttataatattgtatatagtgactgtgacaaatattgtattactgtacatagagagacaggtgggcatttttgggctacctggttcgtttttataagattttgctgtttttttaataaa

SEQ ID NO: 17739 - DNA, 1054 bp, Macaca Fascicularis
  misc_feature (1)...(1054): n = A,T,C or G
cgcagcacgctgagnnnnnnnnnnnnnnnnntgtgtccccgcgggcagtgacatgagtggggaggagactcaggctcacattgcccacacctgnnnnngaacnnnnnnnnnncacccccacccccaggtgcctgtgactggggtcctgaggctggggctcttgtgccaggagtgggtgggacgcagaaaccctcgtgccaaannnngggcatccccagccccccggcccctccacatcccctgtgtattcaggactccatctgctgaactctgacctgtccccgctccgccatcagcccctgctgcccctcggccagagctcccaggatgcagagagaccccagacggccagagaacccaggatgcagggagaccttggnnnnnnnnnnnnnnnnnngggccatggaagctggcaggagacactggtctcagaggagggagagagacgcagatttcagatataagaagtcggatccgcattgcataagcnnnnnnnnnnnnnnnnnnnnnnggcagctgcagggagcggcccggggtgctgggcccagctgtggttgttcttttctgggtcgggagcgactgcggagtggctgggacgctcctgccgggggaccctcctgctgggggtggccgcttgcctgggggaagacccctttcttcttcttctttatatatatatttttgaggctcaaaaaaaaaaaaaaatccaaataaagcaccatattcccaccacgccaaattaacctggacaacaatnnnnnnnnnnnnnnnnnnnnnntttttattaattaaggtaaaatttacgtatggtgagatgcannnnnnnnnnnnnggaccccagcccctagaaggtccctccagcccttcctgttggcgtcccttccccatttgtggctctnnnnnnnnnnnnnnnnnnnnnnnnnnnnnnnnnnnnnncttcaaggagtcagaatgctgcagttggagactttgatgtctnnnnnnnnnnnnnnnnnacttagagcttcatccgtgctgtcgtgtgtgtctgtagctcattgctatttgttccttc

SEQ ID NO: 17740 - DNA, 749 bp, Macaca Fascicularis
  misc_feature (1)...(749): n = A,T,C or G
gatggcaccggggcactttcctatcnatctggcggtgcaagagggtcacactgctgtggtnnnnnnnnnnnnnnnnnnnnnnnnnnnnnntcgcagggacgccaggggtctcacacccctggaactggcactgcaaagaggggctcaggacctcgtggacatcctgcaggggcacatggtggccccgctgtgatctggggtcactctatccaggaagagaaccccgtggggttatgtatcagaagagaggggaagaaacactttctcttcttgtttctcctgcccgctgccgcannnnnnnnnnnnnnnnnnnnnnnngcttataggtgttggtttttggggtgtgtgggtatttgggggacgtttctcatttgtttttctcactccttttggtgtgttggacagagaagggctcctgcaggccacagccacctaaacggttcagttttttctgcgccccaggctgttggggcctcagacaagacccaagggcagagcgtttaagagtgaaatcacctccagggagcctagaacctggtgaccttggctggctgtgctcagagacctgaagtgtgcacgttgcttcgggcacagggggtgggggnnnnnnnnnnnatcagtaagaaggtagaatgagttattcatattctgttggaagcttgttttccagtctcttgtacagcgttttaaaagaaatggattttatttattatgctttattggaaaaaaatgttgtaataatttaatgt

SEQ ID NO: 17741 - DNA, 897 bp, Macaca Fascicularis
  misc_feature (1)...(897): n = A,T,C or G
accaagcagacacagaccttcactannnnnnnnnnnnnnnnnnnnnnnntgcttattcaggtctatgaaggtgagcgtgccatgaccaaggataacaacctgcttggcaagtttgaactcacgggcatacctcctgcaccccgaggtgttcctcagattgaagtcacttttgacattgatgccaatggtatcctgaatgtctctgctgtggacaagagtacaggaaaagagaataagattactatcactaatgacaagggccgtttgagcaaggaagacattgaacgtatggtccaggaagctgagaagtacaaagctgaagatgagaagcagagggacaaggtatcatccaagaattcacttgagtcctatgcattcaacatgaaagcaactgtcgaagacgagaaacttcaaggcaagattaacgatgaggacaaacagaagattctggacaagtgtaatgaaattatcaactggcttgataagaatcagactgccgagaaggaagagtttgaacatcagcagaaagagctggagaaagtttgcaaccccatcatcaccaagctgtaccagagtgcaggaggcatgccaggaggaatgcctgggggattccctggtggtggagctcctccctctggtggtgcttcctcagggcccactattgaagaggttgattaagccaacccaagtataggtgtagcattgttccacacatttaaaacatttgaaggacctaaatttgtagcaaattctgtggcagttttaaaaagttaagctgctatagtaagttactgggcattctcaatacttgaatatggaacatgcacaggggaaggaaacaacattgcactttataaacactgtattgtaagtggaaaatgcaatgtctaaaataaa

SEQ ID NO: 17742 - DNA, 821 bp, Macaca Fascicularis
  misc_feature (1)...(821): n = A,T,C or G
tacatggcgtcggtgcaggtgaacggcgagcacctgtgcggcggcgtcctggtggccgagcagtgggtgctgagcgcggcgcactgcctggaggacgcggccgacgggaaggtgcaggttctcctgggcgcgcactccctgtcgcagccggagccctccaagcgcctgtacgacgtgctccgcgcagtgccgcacccggacagccggcccgacaccatcgaccacgacctcctcctgctgcagctgtccgagaaggccacgctgggccctgctgtgcgccccctgccctggcagcgcgtggatcgcgacgtggagccgggcactctctgcgacgtggccggctggggcatagtcagccacgcgggccgccgcccggaccgcctgcagcacgtgctcttgccagtgctggaccgcgccacctgcaaccggcgcacgcaccacgacggcgccatcacccagcgtatgatgtgcgcggagagcaaccgccgggacagctgcaaaggcgactccgggggcccgctggtgtgcgggggcgtgctcgagggcgtggtcacctcgggctcgcgagtttgcggcaaccgcaagaagcccgggatctacacgcgcgtggcgagctatgcggcctggatcgacagcgtcctggcctaggacgctggggcctgaagatcggggtcacccaagcaacaaagtcccgagcaatgaagtcatccactcctgcatctggttggtctttattgagcacctactatatgcagaaggggaggccgaggtgggaggatcattggatnncaggagttcgagatnnnnnnnnnnnnnnnagc

SEQ ID NO: 17743 - DNA, 778 bp, Macaca Fascicularis
  misc_feature (1)...(778): n = A,T,C or G
accacgttggatgacacgtgtgannnnnttgccccccctagtccaggagactaacaaggagcccccacagacggtgaacccaattggccatctcccagaaagtttaacaaaacccgaccaggttgcccccttcaccttcttgcaacctcttcccctttccccaggggtcctgtcctccactccagatcattcctttagtttagagctgggcagtgaagtggatatcactgaaggagataggaagccagatgccactgcttatgttgccatgatccctccgtgcataaaggaggaagacaccccctcagataatgatagtggcatctgtatgagcccggagtcctatctgggctctcctcagcatagcccgtctaccaggggctctccaaataggagcctcccatctccaggtgttctctgtggctctgcccgccccaaaccttacgaccctcctggagagaagatggtagaagcaaaagtaaagggtgagaagctggataagaagctgaaaaaaatggagcaaaacaagacagcagccactaggtaccgccagaagaagagggcggagcaggaggccctcactggcgagtgcaaagagctggaaaagaagaatgaggctttaaaagagagggcggattccctggccaaggagatccagtacctgaaagatnnnnnnnnnnnnnnnngcaaggcaagggggaagaaaagggtcccctagttgagggtagtcaggagcgtcagtgtgcttgtacatagagtctctgctgttgctgtgtga

SEQ ID NO: 17744 - DNA, 201 bp, Macaca Fascicularis
ggaagcagagggaaatgggaggtctaaggatgaggggttaatttatcagtacacgagccaaaaactgcgtcttggattagcctttgacattgatgtgttcggttttgttgtttcccttccctgacacgctgcctcgccccccgattttctagttaactttttccatatccctcttgatattcaaaacagttacttaagatc

SEQ ID NO: 17745 - DNA, 734 bp, Macaca Fascicularis
  misc_feature (1)...(734): n = A,T,C or G
cacacgccannnggagggtttaaggaatctggaaacgggagggagctgggtgaggatgggcttaaggcctacacagaggtgaagacggtcaccatcaaagttnnnnnnnnnnnnnnnnnnnngcnnnnnnnnnnnnnnnccagtcccagtccagcaattccacaaccaccttgaccaatgcttgccaaactgttttaaagccaagaacaccctttatttgttccaaattaactcttagaagaaaccccacaaataaagcaattcagtcaaggctgttctatttaaagcagtgatggggaccaggctcagagttctacctatccaacctccagccacagcccccttgggggcccatgagttgcttgcatgaactcttnnnnnnnnnnnnnnnnnnnnttaaaaaccaatgatctgtaatttgtannnnnnnnnnctgatccagggactttcccatgggttgacttgatggtttagtggattgactcaactcagacataggcttggaaagcgttagggcttttgaactaggtggataccaaatctcggccccactcttcattggcttaacctaaaaaccaaaggtgtttttccttgtctgtgtgccagttgctggctgttttagttgcttgcccttcattttgctactgattttccttaatttgtgggaaggagtagacaaagaatatgcttatataattacaattgtaaagtaaacccaaacaccccaaatgtcc

SEQ ID NO: 17746 - DNA, 708 bp, Macaca Fascicularis
  misc_feature (1)...(708): n = A,T,C or G
tctttgctccctccaatcttgagattgggtnnngctttagtgcaagtataataattccgtatgatagttggggcctggacacccatctcaacagggtcacttggtaattaacaatagccatataannnnnnnnnnnnnnnnnnnccctcaccgtttaccttcctcaggtnnnnnnnnnnnnnnnnnnnntttttttttttaaattggctttggccagtagctaaagtgcaagactgaattaatgagaagatatattaaatgtagtcataggggactgaggannnnnnnnnnnnnnnnnnnnnnnnnnnnnntgtccatttgctgggtttcccttccttttnnnnnnnnnnnnntgccaggtagtggagtaaaaaaggagacagtttatttttttattctatgtgcacacttacagtatacatatatatttatatcacaatttatgaaaccaaaaagttgagtttccaatggaacccttgttttttaataatcgactgtttttaaatgtgatcaggactataatgttgtacagttattatagggcttttggggaaggggaggatagcgagaagatgctctgggggttttgtttttgcttttccttcagggttttatttttgattgttttgttttcttgttggccatttctgtattgctggcatctgtgctaagccttacagtggcaaaaataatgacatgtagcaaaga

SEQ ID NO: 17747 - DNA, 883 bp, Macaca Fascicularis
  misc_feature (1)...(883): n = A,T,C or G
caaccattccctcacagcaaagcaacaatacaggccagggatgggaatcctttaaacatataaaaattgctcctattataaattacccagtttagaaggaaaaaaagaaaataattgttcctaaataaatggataagtagagttaatagttgaggcagggccatacggagtgtgggaactgctgagnnnnnnnnnnnnnnnnngggaccaatgaaagaatggctgagaaatagcagggtagtccgggatagactaagggaggtgtccccatctgagcccagagataaggctgtcttcctagaacannnnnnnnnnnnnnnnnnnnnnnnnnnnnnnngggtggggtagaattgagtcttccaggggagtctatcannnnnnnnnnnnnnnnnngtatataatgatgagcccccttaatgctaggtgtagaaaatggtcctaggaaggggactgaggattagggcgggggtggggtgaaaaagaaaatacagaacaaaccttgtgtcactgtcccaagttaagctaagtgaacagnnnnnnnnnnnnnnnnnaatgagaaagcctgagaagaaagaactgaccacaagcacacgggaaggaaagcgcaggaggtgaaaatacttttttgaccagggtagtaagaagggcagggactgtaaaaccatcttttctgtttnnnnnnnnnnnnnnnnnnnnnnnnnnnnnnnnnnatttattaaacaaatgttgtataaccaatactaaaagtactactgagcttcactgagtgaaattatgaaactttcaaatctttcatcatgtcagttccaatgaggtggggatggagaagacagttgttgcttatgaaagaaagctttagctgtctctgttttggaagttttaa

SEQ ID NO: 17748 - DNA, 716 bp, Macaca Fascicularis
  misc_feature (1)...(716): n = A,T,C or G
tttnnnnncannnncctaccaaaaattgccaagtgcctatgcaaaccagctttaggtcccaattcggggcctgctggagctccggcctgggcaccagcatttggcagcacacaggcggggcagtgtgtgatggactggggnnnnnnnnnnnnnncctgggtccacgtgtggcctctgtcctgttgctgatggaagatttgcggatgagggcacatgtggctgaactgagaaggcggcaggcctccgtcttcccagcggttcctgcgcagatgccgctggagagaggtgccggggaggggcagagaggaagtgctctgtctgttaccataaggctgattctctttaactgtgcgaccagcggaaacaggtgtgtgtgaactgggcannnnnnnnnnnnnnngcccctgttgaggtgggtgggcctgattgttgccccccagggtcctaaaacttggatggacttggatagtgagagaggaggcctggnnnnnnnnnnnnnnnnnnnnnnnnnnnnnctctctaccccccaccttggtccctctcaaatgcccagtnnnnnnnnnnnnnnnnnnnnnnnnnnnnnnnnnnnnnnnnnnnnnnnnnnnnngatgtgtccgacctacgttcctggctccctcgttcagagactgcccttctcaggggttctattcctgtgctgggaaggaagcaaccatgggaaggaaacaaatgtgtat

SEQ ID NO: 17749 - DNA, 725 bp, Macaca Fascicularis
ccacagttaagatccagcctctcccacctcttcagggctgagtgcatgagtctgcacctccaggcaggctctgtgcagtactcaccctctgtctgctccctccaaggtgtgggggtgggcagtgctcagggcctcctcggaaccaaaggacagcgtggttggcacagagggggtgcctgggctgggtgcagggccatcccattgccctagagctgtggctctggcaggaaggaggggctgtccctcttctccctcctggagattccaggggatgggatgcaacttaagacttctgcctgagaagcctccgccctgctacctccagggggcaccaaggcacaagcctgtgccgtgggggtgggagggggtgcggaagagcaggtccaggctccttccagcccagttgggccagggccttggcacctctgcaggccctgcctgtgcctgtctgctgacctggtgggcctgggctttctgactcagggaccctgttgacgctgacttgcgcctgcagtggcggccaatgccgcctctcctccaagctgcccctgtgctgggaggggtgggggcggtgccattggtctggtgcagcacagccctggccagtggcctcatccccaacgggcctcctgtgcctctgccagcaaggaggggcctgccagctctgcttggacagggggccccatgtggggtcagagcatgcttatgtcactgggttccagccg

SEQ ID NO: 17750 - DNA, 730 bp, Macaca Fascicularis
  misc_feature (1)...(730): n = A,T,C or G
gcannnnnnnnnnnnnnnnnnnnnnnnnngccnnnnnnnnngggtgggaattaagcgcagctctgcctgcgggtggtggcacgcctccagtcatggccagccgtggctaacctggccttttatctagtggnnnnnnnnnnnnnnnnnnnnnnnnnnnnnnnnnnnnnnnnnnnnnnnnnnnnnnnnnnnnnnnnnnnnnnnnagtttgtnnnnnnnnnnnnnnnnnnnnnnnnnnnnnnnnnnnnnnnaggtggcaaatacagcgttcatttcaagttgcctgatgtgtatggtgtattccagtttaaagtggattacaaccggctaggctacacacacctgtattcttccaatcaggtatccgtgcggccactccagcacacacagtaagagcgcttcatcccctcggcctacccctactacaccagcgccttctccatgatgctggggctcttcatcttcagcatcgtcttcttgcacatgaaggagaaggagaagtctgactgaggggccagagccccgggactctgcacagtgtggagatggggcgggggttattaggattggtggttttattttgctttgtttaaagccatgggagaatggcacaactttacctctgcgggagatgtaacactgagagccaacgggtgggagtcgggataatttttatgtaagtttttccacttcgaattgctaattggcatttttcatgtgtgcagtcactctc

SEQ ID NO: 17751 - DNA, 681 bp, Macaca Fascicularis
  misc_feature (1)...(681): n = A,T,C or G
cccacacccctcacccctacctcacacacggctaacacctccccccggcccgtctccggcatggagagagagcggaaagtgagtatgnggttgcaccgcggggcccccgtcaacatctcctcgtccgacctcacgggccgacaagatannnnncgcatgtccacctcacagaatnnnnnnnnnnnnnnnnnnnnnnnnnnnnnnnnnnnnnnnnnnnnnnnnnnnnnnnnnnnnnnnnnnnngtcgggtggcttccagtggtcttcagtctgnnnnnnnnnnnnnnnnnntctccttattgctnnnnnnnnnnnnnnnnnnnnnnnnnnnnnnnnnnnnnnnnnnnngctttactagtgacgcgtcccccggtctaggatcgaaatgttaacaccgggagctctccaggccactcacccagcgacgctcatgggggaaacagactaaacggacagactccaagagctgccaccgctggggctgcactgcggccctccacgtgaactcggttgtaacggggctgggaagaaaagcagagagagaattgcagagagtcagactccctttccagggcctcagcnnnnnnnnnnnnnnnnnnnnnnnnnnnnnnnnnnnnnnccactgtaactaccaatcttctacttggttaagacagttttgtatcatttgctaaaaatactg

SEQ ID NO: 17752 - DNA, 731 bp, Macaca Fascicularis
  misc_feature (1)...(731): n = A,T,C or G
cagatgttgatgccaagaacatgatggctgnnngcgannngcgccacggccgctacctgacggtggccactgtgttccggggccgcatgtccatgaaggaggnnnnnnnnnnnnnnnnnnnnnnnnnnnnnnnnnnnnnnnnnnnnnnnnnnnnnnnnnnnnnnnnnnnnntgtgaaggtggccgtgtgtgacatcccgccccgtggcctcaagatgtcctccaccttcatcgggaacagcacggccatccaggagctgttcaagcgcatctccgagcagnnnnnnnnnnnnnnnnnnnnnnnnnnnnnnnnnnnnnnnnnnnnnnnnnngggcatggacgagatggagttcaccgaggccgagagcaacannnnnnnnnnnnnnnnnnnnnnnnnnnnnnnnnaggacgccacggccgaggaggagggcgagatgtacgaagacgacgaggaggagtcggaggcccagggccccnnnnnnnnnnnnnnnnnnnnngagtgaggggcaggtggcggccggggccaaggtcagcagtgtctgacccccannnnnnnnnnnnnnncgacactgtaccctgctttcccccttgccctagggctcccttgccaccctcctgcagtatttacggcctcgtcctccccacctgggccatgtgtgtgctgctcctgtctnnnnnnnnnnnnnnnnnnnnnnnnnnttttatggttttgttttttactggtttgtgttt

SEQ ID NO: 17753 - DNA, 720 bp, Macaca Fascicularis
  misc_feature (1)...(720): n = A,T,C or G
ggacaggaaccagaaaatcagggacacggctgatggctgcggatgctggaaccttggcccccaaactctggggccgattggctgctgtttctcctgcgcagggtagtcgctgctggctctgggaagagagtgcgggacagaggaaacatttatcctggagcgcagaaagaatggttctctcaaaatagccagtggcctggccgacctgctctggccctggattccccatccatctcactgtctaaatatttagcaggcggagnnnnnnnnnnnnnnnnnngtacactcaggtctgctctggtctgagtgctggctccaatctacgtccacttagggggaccagctgcccaccccaagtccccaggggacggccctcccctctaccaagccactccaagagccagcccctctctgctccacaaaaaccagggttcttggaaaagctccctgcctccccttgccgctggtcccccatcaggcttgggagcgctggcatcccaaaggggcaatgggagaaaggggaggctnnnnnnnnnnnnnnnnnnnnnnnnnnnatgtgcttggtacaaaaagggcctgagaccttccacctagcttgatgggctgcgagatgagaactgtgagggtgcaggtggcggggagacagatggagaagctgacagatggctggggatcccggggactgccccagaacaaaaacctaagtcctgtgcctgtccc

SEQ ID NO: 17754 - DNA, 724 bp, Macaca Fascicularis
ggaaaagatacagttaccaaagataatggcattcgtccttcctcactggagcagatggccaaactaaaacctgcattcatcaagccctacggcacagtgacagctgcaaattcttctttcttgactgatggcgcatctgcaatgttgattatggcagaggaaaaggctttggccatgggttataagccgaaggcatatttgagggattttatgtatgtgtctcaggatccaaaagatcaactgttactcgggccaacatatgctactccaaaagttctagaaaaggcaggattaaccatgaatgatattgatgcttttgaatttcatgaagctttctcgggtcagattttggcaaattttaaagccatggattctgattggtttgcagaaaactacatgggtagaaaaaccaaggttggattgcctcctttggagaagtttaataactggggtggatctctgtccctgggacacccatttggagccactggctgcaggttggtcatggcagctgccaacagattacggaaagaaggaggccagtatggcttagtggctgcctgcgcagctggagggcaggttagagaaagagggaccaattaacttcatcttttcctaaacttgagaagagacaaaccaagtcctgcccttcatctccaatgttggaagatcagaggttcctgtcaattaagtcgtcctttcttcataactatgcaaaagaaat

SEQ ID NO: 17755 - DNA, 743 bp, Macaca Fascicularis
  misc_feature (1)...(743): n = A,T,C or G
cgccgagctcccancntcatgcgggtgcccttccttgagttcaaagccccagggatcnnncagggatggagactctgaaagacacaccggccccacggctcctgaagacacacctgcccctggctctgctgccccagactctgttggatcagaaggtcaagatggtctatgttgcccgcaacgcaaaggatgtggcggtctcctactaccacttctaccacatggccaaggtgcaccctgagcctgggacctgggacagcttcctggagaagttcatggccggagaagtgtcctacgggtcctggtaccagcacgtgcgggagtggtgggagctgagccacacccaccctgttctctacctcttctatgaagacatgaaggagaaccccaaaagggagattcggaagatcctggagtttgtggggcgctccctgccagaggagaccgtggacctcatggttcaacacacgtcattcaaggagatgaagaagaaccctatgaccaactacaccaccgtcccccaggagttcatggaccacagcatctcccccttcatgaggaaaggaatgactggggactggaaaaccaccttcaccgtggcgcagaatgagcacttcgatgtggactatgcggagaagatggcaggctgcagcctcagcttccgctctgagctgtgagaggggctcccggggtcactgctgagggagtgtgcgaatcaagcctgaccaagcggctcaagaata

SEQ ID NO: 17756 - DNA, 733 bp, Macaca Fascicularis
aactcgctatgtaatcttgacctctttgggctttagttcttctcataaaaggaagagatgtgttggactagactagatgatcaccactgtctcttctagttctaatctttttaattctaatacctgtatttcaaagttatgtcaattaaatcattatcaggttatttcctaatgtaagaatagctgaaatgttgcagagaaataagtgacccaacaaaatttattcatctgtgatgggtaagatttgccataaattcttcctaaataatttgtttactaactctttaggccactgtgctttgcagtccattagtaaacttgtgttgctaagtgctaaacagaatactgctattttgagagagtcaagactctttcttaagggccaagaaagcaacttgagccttgggctaatctggctgagtagtcagttataaaagcgtaattgctttatattttggatcattttttattgggggtggacttggggggttgcatacaaagataacatatatatccaagtttctgaaatgaaatgtttttagattacttttcaactgtaaataatgtacatttaatgtcacaaaaaaattgtcttctgcaaattttctagtataacagaaatttttgtagatgaaatcattatgtttagaggtctaatgttatgttttcatattacagagtgaatttgtatttaaacaaaaatttaaattttggaatcctctaaacaattttg

SEQ ID NO: 17757 - DNA, 739 bp, Macaca Fascicularis
  misc_feature (1)...(739): n = A,T,C or G
cttttgggaagctggactagtgaggggagttgttggggtcagtgctggcttaacagaaaacacagtgaatttcccctccagttctccccaagtccactgaacaaggctagttcctgcaccacccaggattcaaaggaaagacgaaggaagcagaacttgtggcggcaacaggtaaacttcaagagagagggcaggagccccaccctacagggctgggaggagcccagaggccccatctgtttctcctctcctccaggagttgtcaaggcagcagaaaggagtcacccagccaaaggaggagatggctcaatggggctgcaccaaccggccaagaggccctacccgtgtctaaaccctcctctcactcccctaagcctggtgaaacagtcagaagccccaggctcctttttctgtttcttaacagctaaaaaatggctccaggtagtgagtcaatgaagttcagacatcttggtgtaatgtttctcctctgctcctgaaaacttcaccttcttggtgtctcacgtcctcattctcccctatatgacgtgcaaaaatgatctttgaaatccctctggggagaagacatgtttattgaaactgtccttcagccttaaatacaaaaataaaaccaaagctgctccagaaagcaactttctccaaaaatgtctttggtttgtttctcatagggttaggaaaagtgcattgtnnnaaaatccattgccctctatcccagtcttac

SEQ ID NO: 17758 - DNA, 729 bp, Macaca Fascicularis
  misc_feature (1)...(729): n = A,T,C or G
cggccactatgatnnnnnnnnnnnnnnnnnnnnnnnnnnnnnnnnnngtgagcatggtanctcaccttcagggaagagagggtgctggggctgtgtgcttctgtgcgtgggggnnnnnnnnnnngttgaagacaagagggtgggtgctgaccacctatccccctggcagcacctgtccagcccactggcttcaggtgccgtggccaacaagctatgccagagtttccagaccttcagcatctgctatgcagacacgggtttgcagggtgcacactttgtctgtgaccgaatgaaaatcgatgacatgatgttcgtcctgcaagggcagtggatgcgcctgtgtaccagtgccacggagagtgaggtggcccggggcaaaaacatcctcagaaatgccctggtatctcatctagatggcactactcctgtgtgtgaggacattggtcgcagcctcctgacctatggccgccgcatccccctggctgaatgggaaagccggattgcggaggtggatgccagtgtggtgcgtgagatctgctccaagtacatctatgaccagtgcccagcggtgtctggatatggccccattgagcagctcccagactacaaccggatccgtagcggcatgttctggctgcgcttctaggcgggaagcctgtgtaaacaagagagctgggctggggctcgtggtccccccaccacaaacacagcactccggctcctctaacc

SEQ ID NO: 17759 - DNA, 934 bp, Macaca Fascicularis
  misc_feature (1)...(934): n = A,T,C or G
gacagcagcagtgannncagnncagtgagnnnnnnnnnnnnnnnncncgcgaaaggagctgccggagtannacgagnncnnccgcaagcccgtggacttcaagaagataaaggagcgcatccgcaaccacaaataccgcagnnncaacgacctagnnnnnnnnnnnnnnnnnnnnnnnnnnnnnnnnnnnnnnttcaacctggagggctccctgatctatgaagattccatcgtcttgcnnnnnnnnntcaccagcgtgcggcagaaaattgagaaggaggatgacagtgaaggcgaggagagtgaggaggaggaagagggcgaggaggaaggctccgaatctgagtctcggtctgtcaaagtgaagatcaagcttggccggaaggagaaagcacaggaccggctgaagggcggccggcggcgaccgagccgagggtcccgagccaagccggtcgtaagtgatgacgacagtgaggaggaacaagaggagnnnnnnnnnnnnnnnnnnnnnnnnnnnnnnnnnnnnnnnnnnnnncagtctcgaccctgagcccctcgttccagagccgagacggcataggccttagcagtaacggatagcagcacacgtagtttcagacttggggtaaaactgtataaacaaaagaatcttccatatttatacagccgagaagctgtaggactgtttgtgactggccctgtcctggcatcagtagcatttgtaacagcattaactgtctaaaagagagagagagagaattccgaattggggaacacgtnnnnnnnntttttcttttcctttgctggcagtactgttgcgccgcagtttggagtcactgtagttaagcgtggatgcatgtgcgtcaccgtccactcctcgtactgtattttattnnnnnnnnnnnnnnnnncgggggcccggtgagggtatgtc

SEQ ID NO: 17760 - DNA, 765 bp, Macaca Fascicularis
  misc_feature (1)...(765): n = A,T,C or G
tcaaggagatcaaagaagtgatcgagctgcctgttaagcatnntgagctcttcgaagcactgggcnatgnncagcccaagggagtgctgctgtatggacctccaggcactgggaagacgctgttggcccgggctgtggctcatcatacggactgtacctttattcgtgtctctggctctgaattggtacagaaattcataggggaaggggcaagaatggtgagggagttgtttgtcatggcacgnnnnnnnnnnnnnnntatcatcttcatggannnnnnnnnnnnnnncggctcctcgcggctggaggggggttctgggggggacagtgaagtgcagcgcacaatgctggagttgctcaaccagctggatggctttgaggccaccaagaacatcaaggttatcatggctactaatnnnnnnnnnnnnnnnnnnnnnnnnnnnnnnnnnnnnnnnnnnnnnnacagaaaaattgaattcccaccccccaacgaggaggcccggctggacattttgaagattcattctcggaagatgaacctgacccgcgggatcaacctgagaaannnnnnnnnnnnnnnnnnnnnnnnnnnnngggctgaagtgaagggcgtgtgcacggaagnnnnnnnnnnnnnnnnncgagaacggcgagtccatgtcactcaggaggactttgagatggcannnnnnnnnnncatgcagaaggacagtgagaaaaacatgtccatcaagaaattatggaagtgagtggacagcctttgtg

SEQ ID NO: 17761 - DNA, 788 bp, Macaca Fascicularis
  misc_feature (1)...(788): n = A,T,C or G
gaatgctagtaacgtgtttcaccagctggtaactgtgccaaacttaatgtcattttccttaagatggttacagctatgtaacctgtattattttggacagacttgttaaaaaacagacagacaaaaaataaaacaaaacgagttctatttaccttgcacatcttttgttgttacagtgaaaaaaaaaatggtccaagaaaatgtttcccatttttgtattatttagtttttaactggaacatttagaaagaaggaaataaacgtgcattttattaattccttagagacacaaagaggacaataatagctgatcttttgaaagttgaaaaacgtctttagatgaccaagcaaaaagactttataaaatggtaatgaaaatggaatgcagctactgcagctaataaaaattttagatagcaattgttacaaccatatgcctttatagctagacattagaattacgatagcatgagtttatacattctattacttttcctccctttctcatgtttttataaataggtgataaaaatgttttgcctgccaattgaatgatttcatagatgaagtagaaacatttaggtttccgttgcattaaattgtgaagacaactggagtggtacttactgaagaaactctctgtatgtcctggaataagaagcaatgatgtgctgcttctgatttttcttgcattttaaattctcagccaacctatagccatgatctttagcacagtgatnncgccatgacttcacagatacggtctagaatctgtaccctacccaaat

SEQ ID NO: 17762 - DNA, 727 bp, Macaca Fascicularis
  misc_feature (1)...(727): n = A,T,C or G
tgnnnnnnnnnnnnnnnnnnnnnnnnnnnnnnnnnnnnnnnnnnnnnnnnnnnnnnnnnnnnnnnnnnnnnnnnnnnnnnnnnnnnnnnnnnnnnnnncctggagctggtttaggctgtcaaaaccagggtaacctctcacatgggtcatgattctgggtcctgggactgtgaccttgggtaagtcatnnnnnnnnnnnnnnnnnnnnagggcaaggagaagaaagtaccctggggagggaaaggacagaggagggtattcctggcttttccactccaacccaggccaccctttgtctctgccccagagttgagagaaaaacnnnnnnnnnnnnnnnnnnnnnnnnnnnnnnntccttggagtagagggcaggaggagagagcgcctccactctagaannnnnnnnnnnnnnnnnnnnnataatcagggtgcagggtgggtaggttgctctggggatgggtttatttaagggagattgcgaggaagctatttaacnnnnnnnnnnnnnngcaaggactgatggagcccctgggggtgtgggatggaggagggtctgcagccagttcattcccagggccccaccttgatggggcaagggctaagcatgcatgtnnnnnnnnnnnnngagcaggctaggctggggctcatggagggtctcaggccgaggccactgcagtgccagtgcccccctgaggactagggggcaggcagctgggggcacttggct

SEQ ID NO: 17763 - DNA, 727 bp, Macaca Fascicularis
  misc_feature (1)...(727): n = A,T,C or G
gatagtgatatgccacttttagatagctaaatccccaagaagaggactttacatgtatatattcatcaaaatgatgaactatttattttgaagtatcatttggtacttttttttgtaaattgctttgttttgtttaatcagatactgtggaataaaagcaccttttgcttttctcactaaccacacactcttgcaaagctttcagatgttactcagctgcatagttacacagatgtaatgcacattattggcatatctttaagttggattcaaatggccatttttttccaattttggtaaattggatttctttttattacaaatatgaccattaacctcagttaaatttttgtttgttttcctgtttgatgctgtctatttgcattgagtgtaagtcatttgaactaatggtataactcttaaagctttctctgctccagttatttttattaaatatttttcacttggcttatttttaaaactgggaacataaagtgcctgtatcttgtaaaacttcatttgtttcttttggttcagagaagttcatttatgttcaaagaagtttattcatgttcaacaggaaagacaaagtatacatgaaagttcacggtctgatagggtaccagtctccatatatatagaaagatcgggggtgggatgggatggagtcagccccatccacttagttggactagttttaaataaaggttttnnnntttgtgttttt

SEQ ID NO: 17764 - DNA, 788 bp, Macaca Fascicularis
  misc_feature (1)...(788): n = A,T,C or G
aaaggaaggttncgaatatagagtcaaaattcacttcaaagtgaacagggatattgtgtcaggnntgaaatnnnntcagcacacctaccgcactggagtgaaagtggataaagcaacatttatgntnnncagctatgggcctcggcccgaagagtatgagttcctcactccagttgaggaggctcccaagggcatgctggcccgaggcacgtaccacaacaagtccttcttcaccgacgatgacaagcacgaccacctcagctgggagtggaacctgtcgattaagaaggagtggacagaatgaatgcatccacccatccctttccctacccttgccatctggaagaattctctcaggcgtgttcagcaccctgtccctcctccctgtccacagctgggtcccacttcaatactgcccacatatccttattgatgcatcttttcccacgctgtctctcaatgtggtccctagcacaagaggcataaaaccgggctttcaccctgcctcctccctccgatcctccgtcagggccagatcttccacatctccatctcaatgcacaaccatttaatattgccctctcttaccccattcgagcaactagaggccaggaaatgggcaaactatcactaacaggtctttgactcaggttccagtagttcattctaatgcctagattcttttgcggttgttgctggcccaatgagtccctagtcacatcccctgccagatggagttcttcttttgtgagagacactgtaaacaacacaagagaataagaataaac

SEQ ID NO: 17765 - DNA, 758 bp, Macaca Fascicularis
  misc_feature (1)...(758): n = A,T,C or G
gattatggccagnnnnngcttcgtgtggngtnncnnaggacttatggaggtcggggtgggtggccccgtggtgggaggaatgggcctcctacaagaagancnnnnnnnnnnnnnnnnnnnnnnnnnnnnnntccatcaggcagctggcaggacctgaaggatcacatgcgagaagctggggatgtctgttatgctgatgtacagaaggatggagtggggatggtcgagtatctcagaaaagaagatatggaatnnnnnnnnnnnnnactggatgacaccaaattccgctctcatgagggtgaaacttcctacatccgagtttatcctgagagaannnnnnnnnnnnnnnnnnnnnnnnnnnnnnnnnnnnnnnggggccgtgactctccataccaaagcaggggttccccacactacttctctcctttcaggccctactgagacaggtgatgggaattttttctttattttttaggttaactgagctgctttgtgctcagaatctacattccagattgaggatttagtgtcttaggaaatttttttaatttttttttttttaaagaagaaaaaaaaaactacataatttctaccagggccatattagcagtgaaacattttaaactgcagaaattgtggttttggttcagannnnnnnnnnnnnnnnnncacccctgattatgggaaaaaaatcagttctgtctttgtgggttgctctactatggagatcaacagttactgtgactgagtcggcccat

SEQ ID NO: 17766 - DNA, 1249 bp, Macaca Fascicularis
  misc_feature (1)...(1249): n = A,T,C or G
atcacctcattcaggaggagtttgcaaaccaaagctgatcagcaagtcaaacagcaggaaatctaaatctccnnnnnnnnnnnnnggctacttaggaaccgaacggccctcttcagtctcctctgtacattcagaaggggattaccataggcagacgccagggtgggcctgggaagacaggccctcttcaacaggctcaactcagtttccttataaccctctgactatgcggatgctcagcagtactccaccaacaccgattgcatgtgctccctctnnnnnnnnnnnngcagctcctcaccaacagaacaggatctgggagcgagagcctgccccgctgctctcagcacagtacgagaccctgtcggatagtgatgactgaacggcacaaagtgaggggaacagggtgcaggagagggatctctagtttttggtggtttaatttttagtagcaggtcaaaaacctgccctcctatgacttattccctgagacttttcaggagagccagcccacagatgatgaagaaatgatggaaattcatttggagagtcaaatgggaaaaaaccatacnnnnnnnnnnnnnnnnnnnnnnnnnntcagtggactataataatagtggagggttgagatgtagagttnnnnnnnnnnnnnnnnnnnnnnnnnnnacatctgtttgtaaagaaaaccataannnnnnnnnnnnnnnnnnnnnnnnnnnnnnnnnnnnnnnnnagtgtatatccccttgctgtagtatctggtgtacttatgttnnnnnnnnnnnnnnnnnnnngggggtgatttttaaaaatctttttgtctatctttttaaccctagccttctaaacaacctcannnnnnnnnnnnnnnnnnnnnnnnnnnnnnnnnnnnnnnnnnnnnnnnnnnnnnnnnnnnnnnnnnnnnnnnnnnnnnnnnnnatgtttaaaatcttgtgaaaatgtttagatttttaacacagaccctnnnnnnnnatctgtacgttagggtcaaaaggtagaagtaacaaattttgccatattgtaaatnnnnnnnnnnnnctttaattttttttttttttttttttcattagtagcactgaaaaaatattactgcatgggtatgttctagttcagtttataaagttttaaaggcttatttgaggcatacctcactgttacgcacnnctggtaatttaaccatgcccctaagtattccttttctcctgcatttgatgcagcccaacaaagc

SEQ ID NO: 17767 - DNA, 781 bp, Macaca Fascicularis
  misc_feature (1)...(781): n = A,T,C or G
cataagctgtaccactcaggannnnnnnnnnntccagatgaccagcagtagacaaatggatactgagcagagtcttaggtaaagtcttgggaaatatctgggcattgatctggccaagtctacaatgtcccaatatcaaggannnncaccctnnnnnnnnnnnnnnnnnnnnnnnnnnnnnnnnnnnnnnnnnaggctacacagtctatgagcaataatgtgatttctggacattgcccatgtattatcctcactgattatttcaagctaaagcaaactaccttatacagagatctagaatctcttgatgttctccagaggaaggtggaagaaaccatgggcaggagtaggaattgagtgataaacaaatgggctaaagaagaaaacttttcttctnnnnnnnnnnnnnnnaattataacttcaatgggacactttnnnnnnnnnnnnnnnnnnnnnnnnattaagcaaagttacataatgtcaaatacacactgtatttatgataatgtataatttgcaaagatggactttaaaagatgatgtgtagccaaactgaaataattcaattacttattgtttannnnnnnaaagcttatgctagtcttttctaattcttaacagtcatacttgaaatnnnnnnnnnnnnnnnnagaagagaatatgggatgttttttgacatttttgacccatttaataatgctcttgtgtttacctagtatgtgtagactttatctcatgtgtcaaaagtcctaggaaagtgactgatgtttcttatagcaa

SEQ ID NO: 17768 - DNA, 740 bp, Macaca Fascicularis
  misc_feature (1)...(740): n = A,T,C or G
gagacagtaaggtggtatcagtatgacagccatgggtaggatcacaaacccgannnntggcttccaaattcctatcacagtatagagaaacctatcacnnnnnnnnnnnnnnnnnnnnnnnnnnnnnnnnnnnnaagcgctgcttatattcacttatcaatgaagcattccatatcttgggagaaggtatagctactagcccagagcacattgatgttgtctatttacatggatatggatggccaaggcacaagggcggacccatgttctatgcttccacagttgggttgcccacagttctagagaagttnnnnnnnnnnnnnnnnnnnnnccctgatattccccaactggagcccagtgactatctaaaaaaactggcttctcagggaaaccctcccctgaaagaatggcaaagcttggcaggctcccctagcagtaacttgtgattcagccttccagattatgcctcacatgctagcatcaggtaatgctcactgaatttcagtgaaattaaatcaaaaatccaaagtaagattgttctgaaatacaaagcaaaagaaataatcagtagagtcttctgtgtgacgactctaatggtcaaatctttaggaatgtgcttcctatgcctctgaatctgtccttatcagataaattcaatgcatgaacttgtgtgaatgtaatatcataatcgctgatgaaagaggctcaggcataagttgagattctcnnaatgttttgat

SEQ ID NO: 17769 - DNA, 1102 bp, Macaca Fascicularis
  misc_feature (1)...(1102): n = A,T,C or G
caccgagannnnnnnnnnnnnnnannncactgnnnnnnnnnnnnnnnnnnnnnnngaccaaaaggaacgagacgtgatcatgagggagttnngttctggctctagcagagttttgattaccactgacctgctggtgagtagagggaattgacaggaaaggcagaagggaggatccaaggtgattcctgatccaaggtgattccctctccaaggggacatccagtgcccctctcaggaaagtagcagcttggaatagaatctggcatgcctaaggcctttggggaacagggatacttatttcctccgccttccttggctgcctacatggatgcctaagtgtctcttcgggatggtgttctctcatgcacatgcagaagagtttgtactttcttgatgtaggccagaggcattgatgtgcagcaggtttctttagtcatcaactatgaccttcccaccaacagggaaaactatatccacagaatcggtcgnnnnnnnnnnnnnnnnnnnnnnnnnnnnnctattaacatggtgacagaagaagacaagaggactcttcgagacatcgagaccttctataacacctccattgaggaaatgcccctcaatgttgccgacctcatctgaggggttgtcctgccacccagccccagccagggctcaatctcggggggctgaggagcagcaggaggggggagggaagggagccaagggatggacatcttgtcattttttttctttgaataaatgtcactttttgaggcaaaaaaagaaggaaccgtgaacattttagacacccttttctttggggtaggctcttgccccaggcgccggctcttctcccaaaaaaaacactaatccatttccctaacctagtaacctccagatcccagaggctctcctcacctcagctgagctcctttgaaagtgattcaggggactacgtcactcagcctnnnnnnnnnnnnnnnnnntggagggagaacccctaaaacccctgagtgaggttgcccagggggttgtccccaggtggggggaagcaggggagagaaaatggtagccatttttacattgttttgtatagtatttattgattcaggaaaca

SEQ ID NO: 17770 - DNA, 739 bp, Macaca Fascicularis
  misc_feature (1)...(739): n = A,T,C or G
gctgccaagaagaagaaaagcccccggttcncnnnnnntattgaggaacgatctgaccacctcacaggcctgccctgcagctggaacactcggcgctctaaggcctgtgccgtgtccagctgtgactgtgcggtgggctccatctgctggacaaaaggggaactgcaccatggcacttggcccatgggatagagggtgtggtgggtgtacggatacctcctcgcccgccctccaagcctcagctgccttccttttggattcccaagcttcaggatgtgttccctcttccagctgtgggaccgctgtccgttattcaacccgttagcaacagtggatagagaacacagtggctattaatgaagaggcccgtgctggagactggaagggttcccttgtcctagacactgaggacagataagacaaaaaccaagcatacgagaagaaactgtctcagatctcacggccaggcctctctcctgctgctgtttttgattttcctaggtagtgggagagaggaaaggagggaaggcaagattctttccccctccctgctgaagcatgtggtacaaaggaaagagcagagcctgagaagcgtcaggtcccacttctgccatgcagctactgtgagccctcggggcctcctcctgggcctcagcttgcccagatacatacctaaatgtgtgtatatatatatataaaagggagaacacctcacccagattttgtcccgctggaaaga

SEQ ID NO: 17771 - DNA, 721 bp, Macaca Fascicularis
  misc_feature (1)...(721): n = A,T,C or G
ggacgtgtacaggctatgcagtaccctnnnnnnnnnnnnnnnnnnnnnnnnnnnnnnnnnaccaagctgtgcggcacaataaagccacggaaaacaaggagaagaagagaatcataaaactactggtcagcatcacagttacttttgtcttatgctttactccctttcatgtgatgttgctgattcgctgcattttagagnnnnnnnnnnnnntcaaagaccacagcaagtctgggaagcaaacttacacaatgtatagaatcacggttgcattaacaagtttaaattgtgttgctgatccaattctgtactgttttgtaaccgaaacaggaagatatgatatgtggaatatattaaaattctgcactgagaggtgtaacacatcacaaagacaaagaaaacgcatactttctgtgtctacaaaagatactatggaattagaggtccttgagtagaaccaaggatgttttgaagggaagggaggtttaagttacatattattataacatcaagattatgttttgaaaaggaaatctagcatatgaggggactaagggttcccagaatgatattttaatcctgtctaataaaaatatcttaagagnnnnnnnnnnagctccctccctgagttttattaaatgacatatattgaacaaagttcaatattttcttaatgactcagggacatttgctaatgcctaattgtttttgtatctgtgct

SEQ ID NO: 17772 - DNA, 742 bp, Macaca Fascicularis
  misc_feature (1)...(742): n = A,T,C or G
cggaacccgaggacaggagacaagatgaaagaaacaatcatgaannnnnnnnnnntcgccaaactgcaggcacaagtgcgcattggtgggaaaggaannnnnnnnnnnnagaagaaggtggttcatagaacagccacagcagatgataaaaaacttcagttctccttaaagaagttaggggtaaacaatatctctggtattgaagaggtgaatatgtttacaaaccaaggaacagtgatccactttaacaaccctaaagttcaggcatcnnnnnnnnnnnnnnnnnnnnnnnnnnnnnnnnnnnnnnagacgaagcagctgacagaaatgctacccagcatcttaaaccagcttggcgcagatagtctgactagtttaaggagactggccgaagctctgcccaaacaatctgtggatggaaaagcaccacttgctactggagaggatgatgatgatgaagttccagatcttgtggagaattttgatgaggcttccaagaatgaggcaaactgaattgagtcaacttctgaagataaaacttgaagaagttactgggagctgctattttatattatgactgctttttaagaaatttttgtttatggatctgataaaatctagatctctaatatttttaagcccaagccccttggacactgcagctcttttcagtttttgcttatacacaattcattctttgcagctaattaagccgaagaagcctgggaatcaagttgaaaca

SEQ ID NO: 17773 - DNA, 770 bp, Macaca Fascicularis
  misc_feature (1)...(770): n = A,T,C or G
tgacgcgcannnnnnnnnnnnnnnnnnnnnnnnnnnnagggaaagggagatcgtgcagacaatgaacagcgannnnggcctggctgtgnnnnnnnnnnnnnnnnnnnnnnnnnnnnnnnnnggcacgttccatgnnnnnnnnnnnnnngatgacgacnnnnnnnnnnnnnnnnnnnnnnnncaagacagctnnnnnnnnnnnnnnnnnnnnnggaagcagatggnnnnnnnnnnnnnnnnnnnnnnnnccttccgtgctgtggccgaacccggcatccaactcaaggctgtgaaatcttccacgggccctggggaacagctgcggaacgcactgtggcatacaggagacacagactcccaggtgcggctgctgaggaaggacccgcgaaacgtgggttggaaggacaagaagtcctatcgttggnnnnnnnnnnnnnnnccccaagtgggctacatcagggtgcgattctatgagggtcctgagctggtggcnnnnnnnnnnnnnnncttggacacaaccatgcggggtggccgcctgggggtcttctgtttctcccaggagaacatcatctgggccaacctgcgttaccgctgcaatgacaccattccagaggactatgagacccatcagctgcggcgagcctagggaccaagggtggggacccaccgccggatgacagcaaccctcactgtggctggatgggggctctgcacccatccccaaggggtggccgtcctgagggggaagcgagaagggctcagagaggaca

SEQ ID NO: 17774 - DNA, 728 bp, Macaca Fascicularis
  misc_feature (1)...(728): n = A,T,C or G
ggaccacgcacaatgatgnnntggccatnnnccgccaagctcgagagcccaggcaagctgtgattgtcacaaggaagctgactgcagagtccatgcccgacctcaactccaccactgactctgcagcctcagcctctgcagccagtgatgtttctgtagaatcctcagaggccacagtctacacggtgacactggannnnnnnnnngcagggctgggcttcagcctggaaggagggaagggctccntgcatgtagacaagcnnnnnnnnnnnnnnnnnnntttcaaaggagcagcctcagaacaaagtgagacaatccagcctggagatgaaatcttgcagctggctggcactgccatgcagggcnnnnnnnnnnnnnnngcctggaacatcatcaaggccctgcctgatggacctgtcacgactgtaattaggaggaaaagcctccagcccaaggaaaccacagctgctgcagactcctaggcaggacatgctgaagccaaagccagtaacacatagctcctataactnnngattctcagggtctctgctgccgccctacccagatgggggaaagcacaggtgggcttcccagtggctgctgcccgggcccagaccttctaggacaccacccagcaaaagggttgtccctaaagtaagggcagagtcacactggggtagctgatacaaattgtagaccgtgtaaaaagagagcttaatgataatatt

SEQ ID NO: 17775 - DNA, 745 bp, Macaca Fascicularis
  misc_feature (1)...(745): n = A,T,C or G
agatnnnnnnnnnnnnnnnnnnnnnnnnnnnnnnnnnnnnnnnnnnnnnnnnnnnnnctttcactaaagctaagacaagttcttccccaacaggaagtgcttcatcttcgattggcccgctcagaagaagtaccttgctcgcctggagcagctaaaggaggaagagctgaaccctgatttcatagaacaagttnnnnnnnnnnnnnnntacatcctcagccattccaatgtcaagactctttcaggtggcattcnnnnnnnnnngcctcgtgagtcactttctctacccacttcctacctggactttctccttctgcccattgtagaggataaaatggaaagcataagggtcacttctgacaaatgcatagtctattgatggcaaggaaaatacaccatgaaaatcataatataaattttacatgaatactaaaactatagtatcatctcatattccttgcaaggagaaaaaaagaaaagaactagaattgaattctgnnnnnnnnnnnnnnnncaccagcttctcagctccctctttatcaaataaacatccaggatatatatactgagcaacaaagaaaaaagcaaatactgtatgtaagtgagactttgctactaattgcagtacaattcnnnnnnnnnnnnnnnntaaaatatttnnnnnnnnnnnnnnnngtaatgtaccaaccactgggtataatgatggataaaagaaatgtgactttttcctcatccagcataatag

SEQ ID NO: 17776 - DNA, 676 bp, Macaca Fascicularis
  misc_feature (1)...(676): n = A,T,C or G
aaatttagttaactccatanncttcagactgtgatattgtgtaaatgtcnnnnntgccctggtttgtgtgaactgggatgttgggggtgtttgtggttatcttacctggggaagttcttatgtttatcttgcttttcatgtgtctttctgtagacatatctgaagagatggattaagaatgctttggattaaggattgtggagcacatttcaatcattttaggattgtcaaaaggaggattgaggaggatcagatcaataatggaggcaatggtttggattggagagggctcactggatcccaatccttggagctggatcattggattcaaatcataatgtggataggatagggaggannnnnnnnnnnnnnnnnnnnngcgggatcagattaccaggaacataggagtggattcctgccccaaccaaaccgcattcgtgtggatttttttattcaacttaattggctattccaaagatttttttttttcctatttttgacgattggagcccttaagatgcacgatggaattgtgttttgcgttttttggtaaaaggagcaaagcgaggacctggagataaacgctggagcaatctccttggaaggattcagcacgagtagatggtaaacatttaaaggggaaagggggggtttgtttaaaatagtaaatcagtaa

SEQ ID NO: 17777 - DNA, 696 bp, Macaca Fascicularis
  misc_feature (1)...(696): n = A,T,C or G
cgcgggatgccangnnnntggaggtgtacagcgtggacttcatggtggacaacgcccagctgggttttctgggtatgtgggcagggccctggggagctgaggctctgggggtggccggggctgaccctgggcctctgctccccagtgtctgaccgtgaccgcaacctcatggtgtacatgtacctgcccgaagccaaggagagttttgggggcatgcgcctacnnnnnnnnnnnnnnnnnnnnnnnnnnnnnnncgtgaacacgttctggaggaccccatgccggggggccaccgaagggctcagcaaaaagtcggtcgtgtgggagaataagcacatcacgtggtttggagaagacctaccggcggcnnnnnnnnnnnnnnnnnnnnnnnaccaccatgcttccgcaccacgccggcctcaacccccgtgccttccggatgctgcacgtggaccgccgcaccctccagaatgctgtgcgcaacgtgctggatggcgagctgctcaaccgctacctgtacctgagcaccatggagcgcagcgagctagcgaagaagatcggcaccacgcccgacataatcctggacgacttgctggagacggaccgcgtcaccgcccacttctagccccgtnnnnnnnnnnnnnnnnnncaccaccgcactacctcccacccccatttttgtataaaacacaagaa

SEQ ID NO: 17778 - DNA, 1062 bp, Macaca Fascicularis
  misc_feature (1)...(1062): n = A,T,C or G
gtggtgaagggatgattttttttgtaatgctgcagtagagttggagttctcttcttgtccagtatatctaataagtgtttcatattatttccacataagggaaataagggagtacttttctttttatatttttacgcttaaaattctctttcctagtcaaaaattgcccaactctgtgtttgttttctgcttgttatgtttttctcccttacttttcttgggctaaaaacannnnnnnnnnnnnnnnnnnnnnnnnnnnnnnnnnnnnnncagcataattatacaagcatatttaatgctgagtttaatttaatatgtaatacatatggtaattgtagggtaatacccacaacaactgtagtttcttacttggccaagagaatgcttatttaagtgttagacttccgttctggcaaaatcttgccatatcagaagacattggaaagagggattccctttggtgtttggtcttctacttagaaaatacttattgcagttagagtttatcttgtagtattcatctttatattctgaagataatatggtttgaattaagttgatatacacagaggggaaccaatttttttgatccaatgtgaattataaatgagataatccacagttattcattgtggagttgttgagactatgaaagactcattgtctttgtattcagctcttaaaaagtgtaaccatacccccacctctgcttgctttctttccctcccctccgatgataaagaaaatgataaattttctgttgtgcattcaattcttattttaaataagactaagtataggcattgtacctgacattgctacgtttctaccagtgtttcaatttaaagtgctagtgtttaaaaacattttcaagggataagaccttctgtattttgcttatttgaagaatcagtggtaggagcagtgaagtaaattctatggagtacatttctaaaatcataaataagtttattcaggttctaaccctttgctgtacacaagcagacagaaatgcatctgttacataaatgagaaaaagctattatgctgatggagcatgct

SEQ ID NO: 17779 - DNA, 723 bp, Macaca Fascicularis
  misc_feature (1)...(723): n = A,T,C or G
taaaggactatatacatctaatatggtaacactatgtcatcttctggagttatcaaaaattgtatgcaatcaagacaacacaaaataagaattattttatttttaagtgcacatacaggtactgttggagttgatgggcaccatgctttctcatgaagtagcatttccctaccatcaagccattgttttgtnnnnnnnnnnnnnnnnnnnnnnngaatttatgctgtnnnnnnnnnnnnnnnnnnnnnnnnnnnnnnnnnnntttataagaagatgtttgacatactaattattttatatcatttaaaccatactgtagcaacataatatatgtagctaatttttagaattatttttacaatttccaaccaaatgtactgtactgttatataatttattgtgaggatcttctcatggcaaccattaggaagacaaactggaggtaaatatcacattaatctgtattatcaatttcttatagacactgtnnnnnnnnnaattttaaatgacctgcatcaagtcttctgatttcagataactcagtacagatagcaattagtcacctgatttgattacaatggagtaactgacaatatatttatttataaagcaaatattcataataatgagaagaattcagagtaaccnnnnnnnnnnnnnnnnnnnnnnnnnnnnnnnnnnnnnnttaaatagtttgtcctaaggtgtttaaaaatgtcaact

SEQ ID NO: 17780 - DNA, 723 bp, Macaca Fascicularis
  misc_feature (1)...(723): n = A,T,C or G
cnnnnnnnnnnnnnnnnnnnnnnnnnnnnnnnnnnnnnggtgaggagtgagttaagagattagatgnnnncaaaagctctaaaaattgaaataacttgactagataaacatgagacggtttaactagagcaggatccacaaaggtgtgtcttatttgctgaggtcgtcnnnnnnnnnnnnnnnnnnnnnnnnnnnnnnnnnnnnnnaagtgtagaaggaagaatgaggcaacaagataaccccacacaaatttttcttcttccttttcctccacagtggaacgtgtaaaagctgagtcnnnnnnnnnnnnnncaaaaatgttgcaggaaatacaaagaaagaatgagcagatgatggaacagaaggagagnnnnnnnnnnnnnnncttgaaacaactgactgagannnnnnnnnnnnnnnnnnnnnnnnnnnnnnnnnnncaagagaggaccctcgctcttaaacttcaggaacaggagcgactgctaaaagagggatttcaaacagaaagcagaaaaatgcaaaatgagatacaggatctccagaagaaaatgagacaacgaaggacatgtaccataagctaaagaccagagccttcctgtcacccctacccaaggcataattgaaacaattttagaattnnnnnnnnnnnnnnntacatttgataacaattagatcttgcatcataacaccacaaattataaaggcatgcagtacagtgat

SEQ ID NO: 17781 - DNA, 746 bp, Macaca Fascicularis
  misc_feature (1)...(746): n = A,T,C or G
cnnnnnnnnnnnnnnnnnnnnnnnnnnnnnnnnnnnnnnnnnnnnttccccactgatggannnnnnnnnnnnnnnnnnnnnnnnnnnnnnnnatgctcacataggttgtgccatgagtgggctaattgctgatgctaagactttaattgataaagccagagtggagacacagaaccactggttcacctacaatgagacaatgacannnnnnnnnnnnnnnnnnnnnnnnnnnnnnnctggctctccagtttggagaagaagatgcagatccaggnnnnnnnntctcgtccctttggagtagcattgttatttggaggagttgatgagaaaggacctcagctgtnnnnnnnnnnnnnnnnnnnnnnnnnnnnnnnnnnnnnngctcgtgcaattggctctgcttcagagggtgcccaaagctccttgcaagaagttnnnnnnnnntctatgactttgaaagaagccatcaagtcttcactcatcatcctcaaacaagtaatggaggagaagctgaatgcaacaaacattgagctagccacagtgcagcctnnnnnnnnnnnnnncatgttcacaaaggaagaacttgaagaggttatcaaggacatttaaggaagcctgattctcagaacttctctgggacaatttcagttcttaataatgtccgtaaattttatttccaactcctgatccttggaaaatctccattgtatgtgcatttttttaatgatgtctgtacataaaggcag

SEQ ID NO: 17782 - DNA, 693 bp, Macaca Fascicularis
  misc_feature (1)...(693): n = A,T,C or G
caataagtagttacatggagtatgtnnnaggtgacttnnnntaaggactgtggacttngnctgcaggggcttgagtgaataaaggttaactaatactggttgatggtggtaggtgtctccagatagggaaagaagagagtaaaatgagctaaggagaaagcacgtggtaagaaccagagctggtgagctggtgtgttgggagggttgacttggcatagtcatgaccctcttgtcaagggcctcaggagccttgtcgtctannnnnnnnnnnnnnnnnnnnnnnnnnnnnnnnnnnnnnnnacaggaggacagaaccaacagannnnnnnnnnnnnnnnnnnngctgaggttgagaaatttctcttctagaataccttcctttatccactagatgttaatgaatctaaattatttaattatgcatttatttgtgttggtgcttaactaaaaaccgattcaaaagccaaataaccccttacggaattcagctcaaggtttgaagacttctagcttgtcctatggacctcaacaccaacgattacaaattgcaaatttaataggtcattttgtatcaaaaggtcaattatgaaacacctagnnnnnnnnnnnnnnnnnnatatgttatctgggttctgcnnnnnnnnnnnnnnnnnnnnnnnnnnnnnnnnnnnnnnnnnnnnnnnnnntttttcc

SEQ ID NO: 17783 - DNA, 752 bp, Macaca Fascicularis
cataatcatttatatccattattttctgcataaatgtaatgctattgtacaaggtttggtagaataaatattcagactgactattctaaattatcacaaaaatatccccagaaaacatgcctcctaaaaaacattttcctatcttttacaagatgtatgaacatttgtagggttccacatttgcatctagaaatccagtgctcttcagaatgttactagatcgccaggatgacctttagcattatatgatgttcagcaaattttaatttaaactttggtatgtctgtacactaaaaagtaaacccatcacctcccatttcataccgtaccttttggttcccagttgggagagcacatggagggaaggagatgatatagaaactatggagtccgctgatagtgggctgcatggtgtgacagagcccttctctgtgaaatggaaatgacaccactagccatctcagtagtcatgagaattaaaagagatgcagtacccgaagtgcttagcaccttcgtagcatttcataaatgtttagtgtcaatactaatgctctagtaatgtaaattgttaatttatttcccaagtatcaggaaatcccagttgtctatgtggcccagtgcttaaaaatgccttcttgcatgaggggattgaactatacaatgtttgttaactttgtatttgtattttttcctataaaatgttacagtaaaattaggagatgtgttctgatgtaacaataggatgagcaatt

SEQ ID NO: 17784 - DNA, 461 bp, Macaca Fascicularis
aaaaccaaaatgatacttcctgaaccgtgtgtaatcgttccttttattttttggtgcttatctgacttaccatggagttaacatcatgaatttattgcacactgttcaaaaggaaccaggaattttttttgtcaacgttgtgatgtatattcctttgaagatagtaactgtagatgtaaaaacttgtgctataaagctaaatgctttcctaaatcagatgttttggtcaagtagcatgactcagtataggtagggagatatttaagtataaaatacagcaaaggaagtctaaatattccgaatctttgttaaggtcctgaaagtaactaataatctataaacatgaaatattgctgtattagctccttttgaccttcatttcatgtataggtttccctaatgaatcagtttccaaatttgactttaatttatgtaacttgaacttatgaaacaatggatat

SEQ ID NO: 17785 - DNA, 721 bp, Macaca Fascicularis
  misc_feature (1)...(721): n = A,T,C or G
cannnnnnnnnnnnnnnggagctgacccgagcggcnnccgnntacgctggcaagcaggcccacgtggagctggccgagaggatgaggaagcgggaccccgggagtgcgcccagcctgggcgaccgcgtcccctacnnnnnnnnnnnnnnnnnnnnnnnnnnnnnnnnnnnnnnnnnnnnnnnnnnnnnnnnnnnnnnnnnnnnnnnnnnnnnnnnnnnnnnnnnnnnnnnnnnnnnnnnnnnnnnnnnnnnnnnnnncctccnnnnnnnnnnnnnnnnnnnnnnnnnnnnnnnncgtgccgaggctgtgctactgcggggggaccacacgcnnnnnnnnnnnnnnnnnnnnnnnnnnnnnngtggcctcctggccttcgccaaannnnnnnnnnnnnnnnnnnnnnnnnnnnnnnnnctcaaccaccagggagccgtgtgtgagttctgccagccccgggagtcnnnnnnnnnnnnnnnnnnnnnnnnccatctgaatgccctggaggagcgcttctcgcgcctctggacgcagtgccagcgctgccagggcannnnnnnnnnnnnnnnnnnnnnnnnnnnnnnggactgccccatnnnnnnnnnnnnnnnnnaggtgcggaaggacctggaggaccaggagcagctcctgcggcgctttgggccccctggccccgaggcctggtgaccctgcaagcatcccatggggcgggggcgggcca

SEQ ID NO: 17786 - DNA, 779 bp, Macaca Fascicularis
  misc_feature (1)...(779): n = A,T,C or G
gacatacgcagaggacactgtgcccgctcttactccgtgccgcttcactggcagtgagatccgccaccgtgacgatgctctaccttttgctcatgtggccattgcagtagagggtcctggctgggccagcccggacaatgtctcgtgcagacttgaccaatgccactcatcggccactatgattgcacttacggtggtggcgtgcacctgtccagcccactggcttcaggtgccgtggccaacaagctatgccagagtttccagaccttcagcatctgctatgcagacacgggtttgctgggtgcacactttgtctgtgaccgaatgaaaatcgatgacatgatgttcgtcctgcaagggcagtggatgcgcctgtgtaccagtgccacggagagtgaggtggcccggggcaaaaacatcctcagaaatgccctggtatctcatnnnnnnnnnnnnnnntcctgtgtgtgaggacattggtcgcagcctcctgacctatggccgccgcatccccctggctgaatgggaaagccggattgcggaggtggatgccagtgtggtgcgtgagatctgctccaagtacatctatgaccagtgcccagcggnnnnnnnnnnnnnnnccattgagcagctcccagactacaaccggatccgtagcggcatgttctggctgcgcttctaggcgggaagcctgtgtaaacaagagagctgggctggggctcgtggtccccccaccacaaacacagcactccggctcctctaacctgtgccgcagggac

SEQ ID NO: 17787 - DNA, 749 bp, Macaca Fascicularis
  misc_feature (1)...(749): n = A,T,C or G
gcgtgaggtttaccgcaagggacnnntgttcgccaatgccccagactcggcctgcgtnngatcggnngaagaagaaggcggtggccttcagccnnnnnnnngagctcaagaaagacactgatttcgagcaccgcatgccgcgggagcagtggtggctgagcctgcggctcannnnnnnnnnnnnnnnnnnnnnnnnnnnnnnnatggccgcctatgtgtcaggggagctggagcacgtgacccgtcgcaccctgagcatggacaagggcttctgaggccatgcccacgcccctccccggcccccacccatgccagctgcagcgccagggctcagatggggcctgggctgttgtgtctggagcctgcaggcaggtgggggctgtgtccctgctcagcccagcccctgcctctatccctggccacccgccaggcctccctggggctggtcttgagaccagcctgccaggccctgcagcaggaggacagagcgtcctggggcatccaccttcctgcccaggggacgtggggctgtcggtgtttgcaggctgatgtcccctggctttggcgccccatgggccccagcctctccccactctgggctcactcacaggggccagcccttgccctacctggctgccggtgcctgggttgtgttgagagggggatgcccttggccctgcctcactgtgacctgctcctgcccatgtgcagcacctgtcaccttttctagaaataaaatcaccctgacc

SEQ ID NO: 17788 - DNA, 730 bp, Macaca Fascicularis
  misc_feature (1)...(730): n = A,T,C or G
caagaaagcagaaatatttttacnnnnnncgcctggattgggatgagaacannnnnnnnnnnnnnnnnnnnnnnnnnnnnnnnnnnnnnnngcgggtcagacagaaaagaataaactacctttgaagagcttacattttaatgaggaactaaagaagattcatgaagttgacaaggatatacaagtagaaagaactttcaaagattatggagtaattgtgctagtgggaagcggtatctgacctcagaggcagaggaacaccaccannnnnnnnnnnnnnnnnnnngcatgctagagtatgaaccagctaagcggnnnnnnnnnnnnnnngcccttcagcatcctttcttcacccgccttcgggctgagccacccaacaagttgtgggactccagtcgggatatcagtcggtgacgatcaggccctgggcccccctgcatcttttatagcagtgggtgtccagtccaggacactggtgcttttttatacaannnnnnnnnnnnnnnntcactccttcctcctggctggctgtatacctgtgaatatgtgaaatagtgtaaatatgaaagaacttgtacctatcacttcaacccctgccttgtacataatgctcttccatccacacagtttccaccctcacctgccccctcatacggagttggatggggaccgagtgaggtaaccaggtggcatctacccannngttttataaggaatttgtacagtcttt

SEQ ID NO: 17789 - DNA, 597 bp, Macaca Fascicularis
  misc_feature (1)...(597): n = A,T,C or G
cctacatattttcctgatggagatgaagaggaactgccagaagatttgtatgatgaaaacgtgtgtcagcctggtgccccttttattacatttgcctaacatctttggatgtggcagacccttacacattttgtgagctttgatgagccagagtgatataatcccccccagaaatcatattttttttttttagtcacaacaaaatcaaacatttcatttttgtcaagggcataaatatatcattcatacgcccattaaattttgttagaaaatttgccacattaagcccgggcgcggtggctcacccctgtaatcccagcactttgggaggccaagacgggggaatcacgaggtcaggaaatcgagcccttcctggctgacacagtgaaaccccgtttttattaaaatacaaaaaaaattgcccgggcgtggtggcgggcccctgttttccttcccaattattttggaggctggggcaggagaagggcnnnnnnnnnnnnnnnnnnnnnnnnnnnnnnnnnnnnnnnnnnnnnnnnnnnnnnnnnnnnnnnnnnnnnnnttcaaaaaaaaaaaaaaaaaaaaaaaaaaaaaaaaagg

SEQ ID NO: 17790 - DNA, 778 bp, Macaca Fascicularis
  misc_feature (1)...(778): n = A,T,C or G
ggcaggcgctgtggatatttgntgaacagtgnnnnnnnnnnnnnnnnnnnnnaggataaggacttgnnnnnnnnnnnnnnnnnnnnnnntagtaaaggtcatgaaaaatgtgccttgttaatacttgacaagatannnnnnnnnnnnnnnnttaatgcaaaaaataatgcactgcagacacccctccacgttgctgcacgcaatggcttgaaggtggtagttgaggagttgctggccaaaggggcctgtgtacttgctgtannnnnnnnnnnnnnnnnnnnnnnnnnnnnnnnngctcctaacnnnnnnnnnnnnnnntgcctggccctcattttggctaccatgatgcctttttctccttnnnnnnnnnnnnnngctgtcaacttcgtttgtttaaaaaaagacaatttgagcaggacgnnnnnnnnnnnnnnnnnnnnnnnnnnnagcctgtgcagtaacaacgtaggctcggaggatgggtacaatgaaaatgattcnnnnnnnnnnnnnnnnnnnnnnnnnnnnnnnnnngctttcctttgatcacctgtgttggaggaaaggaaagaagcttgaattccaggtttatgtgtgttcaagtattatttggggcctgggcttccagaagctagtagagaaggaattaatcgagggcgggcagtgaggctgttgggtggaacactcacacagatggccccagttttgttttgtttcacatcttctttaagatacttctatggaagtctacctctcattttaagtaaagaataaaaga

SEQ ID NO: 17791 - DNA, 721 bp, Macaca Fascicularis
  misc_feature (1)...(721): n = A,T,C or G
ggtatgtcaagctgtnaatactttttttacattttaatctnttccattaattaagaggttgaaaagaagtgcagtgtaagaaaacccagcattttaattacttgcaaattaagttaccacagactctgtagtgtgtaaatgttgacaaggaattggatcacaatcatgtagcannnnnnnnnnnngaccactgcccaccagtgacggacacccacgtggcagnnnnnnnnnnnnnnnnnnnnnnnnnnnnnnnnnnnnnnnnnncaattaactttcagttatgatttcccatcaacattttctttgccctgtttgtagctgattgttgtgttttannnnnnnnnnnnnnnnnnnnnnnnnnnnnnnnnnnnnnnnnnnnnnnnnnnnnnnnngctgggccagaaaatttcactaggtcagtnnnnnnnnnnnnnnnnnnnnaaaaaataataatgtgaaacaaaaccaactaaaaagtgattcttgcacatgaactgtcacatgtttaaaaatgtgttttttagagnnnnnnnnncttactgatttcaaacacttttttcttctgtgtattgcttttaagagagccatcagttagctatcagactctaggttgatgcattttgtacttagctgtactgtgtgatatttttcattattttaggacgccaacatgagacctgtaataaaatatgtaatggggttgaaagctggggaggaggat

SEQ ID NO: 17792 - DNA, 718 bp, Macaca Fascicularis
  misc_feature (1)...(718): n = A,T,C or G
atgttacgcatgatcattgagggccagtaccagttcagttcccctgagtgggacgaccgttccagcactgtcaaagacttgatttccannnnnnnnnnnnnnnnnnnnnnnnnnnnnnnnnnnnnnnnnnnnnnnnnncagcaccccttctttgagcgttgtgaaggcagccaatcctggaacctcaccccccgccagcggttccgggtggcagtgtggacagtgctggctgctggacgagtggccctaagcacccatcgtgtacggccactgactaagaacgcactgttgagggacccttatgcgctgcggtcagtgcggcgcctcatcgacaactgtgccttccggctctatggacactgggtgaagaaaggggagcagcagaaccgggcagctctttttcagcaccggccccctgggccttttcccatcatgggccctgaggaggagggagactctgctgctataactgaggatgaggccgtgctggtactgggctaggacctcaaccccagggattcccaggaagcagaactctccagaagaagnnnnnnnnnnnnnnnagctcctctgggctctagcctcaggcctaccactgatcctgctaccctcttaaagaccagcctggtacctgtcttcccaccagccagggctctgagatcagagctggggtggaagggagccactctgaacgccacgcctggcccagtcagtgctg

SEQ ID NO: 17793 - DNA, 722 bp, Macaca Fascicularis
  misc_feature (1)...(722): n = A,T,C or G
tgtttgnnncattcattgtttttttttttaattattttaaatgaggttttcatttttttaaatgcaatatctctgtatacagattggctgggccccaccccctgcgtgtggccctcccacagtattttgtgcaatgaagccctgctcccagcctttcagagacagggacacagcccctatttggaannnnnnnnnnnnnnnnnnnnnnnnnnnnnnnnnnngaaagcatgccatggccactcgccttcctacccccgcctgccatccttagctgcaggaggatctggggactaccagannnnnnnnnnnnnnnacaaggtggggggccccactctttctctcctgcagtcccatagctggggcctccttccttctcagggtctccccagctcagccctcttgctcccatcccactaggtgctgttgggtaggggccctgccaggaactgaccagctcagcaaggagccatactgtgcatatgtnnnnnnnnnnnnnngggggagggggttgtgaggggttgtgcccaggtgttgccccctatctcctggggagggtgagcagggcagggannnnnnnnnnnnnnnnnnnnnnnatgggtggttacctccccttcctccaccctaagccctggggcctgaaatggggtgggagggcaggggtgggagccctcctagtgggtttggggggttgggttcctgaatgcaccataatcgnnnttgca

SEQ ID NO: 17794 - DNA, 433 bp, Macaca Fascicularis
  misc_feature (1)...(433): n = A,T,C or G
ctcnnnnnnnnnnctttcnnagcttntggggggaaaaggcccctacactctgcagggcctgctgggctgtgaacncgngccctnnnnnnnnnnnnnnnnnnnnnnnnnnnnnnnnnnnnnnnnnnnnnnnnnnnnnnnnnnnnngacctcaaacngggcacctggggtggggactggccccaggccctggctatcaatcatcggtggcagcaccaagacaaggcggccaacaaggagctcaccttcctgctattctcctgcccacaccggctgcgggagcacctggagaggggccgtggaaacctggagtggaagggctgctgnnnnnnnnnnnntatnnnctggggatttgcacagatgttcattccaagtgccacaaaggagaagttgagacttaaccagagcccccctccatgcgcctgnnngcccgacc

SEQ ID NO: 17795 - DNA, 739 bp, Macaca Fascicularis
  misc_feature (1)...(739): n = A,T,C or G
aagctgtgtgactttggctttgcgcnnnnnnnnnnnnnnnnnnngttccgccgctcagtggtgggcacgccggcctacctggcgcccgaggtgctgctcaaccagggctacaaccgctcgctggacatgtggtcagtgggcgtgnnnnnnnnnnnnnnnnnnnnnnnnnnnnnccctttcaacgaggacgaggacatnnnnnnnnnnnnnnnnnnnnnnnnnnncatgtacccggccagcccctggagccacatctnnnnnnnnnnnnnnnnnnnnnnnnnnnnnnnnnnnnaggtgaagatgcgcaaacgctacagcgtggacaaatctctcagccacccctggttacaggagtaccagacgtggctggacctccgagagctggaggggaagatgggagagcgatacatcacgcatgagagtgacgacgcgcgctgnnnnnnnnnnnnnnnnnnnnnnnnnnnncctgggtctgggctgcccgcggacagggatctcggtggggcccatccaccacaggaccacgacatgcaggggctggcggagcgcatcagtgttctctgaggtcctgtgccctcgtccagctgctgccctccacagcggttcttcacaggatcccagcaatgaactgttnnnnnnnnnnnnnnnnnnnnnnnnnnnnnnnngggacacgtggggagtggggtggggggagttatttccgaggcccctccctgtttccccagcaataaaacggact

SEQ ID NO: 17796 - DNA, 759 bp, Macaca Fascicularis
  misc_feature (1)...(759): n = A,T,C or G
cagtctgactacacagaggcatataatcccaaaataaaacgtgatgaacgcaccttaataaatccagatattaaagttgtagactttggaagtnnnnnnnnnnnnnnnnnnnnnnnnnnnnnnnnnnnnnnnnnnnnnnnnnnnnnnnnnnnnnnagttattttagccctagggtggtcccaaccatgtgatgtctggagtataggatgcattcttatnnnnnnnnnnnnnnngttaccgtatttccaacacacgatagtannnnnnnnnnnnnnnnnatggaaaggattcttggacctctaccaaaacatatgatacagaaaaccaggaaacgtaaatattttcaccatgatcgattagactgggatgaacacagttctgctggcagatatnnnnnnnnnnnnnnnnnnnnnnnnnaggaatttatgctttctcaggatgttgaacatgagtgtctctttgacctcattnnnnnnnnnnnngagtatgatccagccaaaagaattactctcaaagaagccttaaagcatcctttctttgaccttctgaagaaaactctgtagatctgtaatnnnnnnnnnnnnnnnnnnnnnnnnnnnnnnnnnnnnnnnnnnnntttttaaattttaagttattttgtacagctttgtaaattcttaacatttttgtattgccatgtttattttgtttgggtaatttgatttgttaagtacatagctaagtaatgaacatctttttcagtaattgtaaagtgattat

SEQ ID NO: 17797 - DNA, 767 bp, Macaca Fascicularis
  misc_feature (1)...(767): n = A,T,C or G
atatgcaaaannactgaatnnnnnnnnnnnnnnncaaatataaaagctgtttctctttatgaattttattattttagaataaaataagtacatgctgctgtaataannnngcctttaatcacttaacaagcctaaccttgactgaaatagtgaatgcctacaaaaattattaatggaaaaaactaatattttttattataaaagtgtcatttatagcttatcagtcatgtattgtccagcaaacattaaaagccctgtggataattaagttttcttcatacctgcaaagtggtggnnnnnnnnnnnnnnnnnnnnnnnagaatttgctaagtataattatgacacatagtccaaagaatgcagtaacctttttatcatgttactaattgttctctttggaagatctgtggttgactaattaaacagtaattcaannnnnnnnnnnnngaagaaaaccacttgggctccctgtttggagtctggctggctctgagcattgccaatggccctactcacctgactttgtgtcctctccttttagaggttttccannnnnnnnnnnnnnnnnnnnnnagtggactgaaaacaaccttgggtgagtgtttcgtttgggagttatttggccagggccttttgagcagtagtgtccctgtgaagtgctagatactatatgtgtaagaatgagctttttatctttttaactataacacccttgagaaatttctaactactttttaacnnnnnnnnnnnnnnnnnnnnnnnnnnca

SEQ ID NO: 17798 - DNA, 688 bp, Macaca Fascicularis
cacacttttcctccttgcctctggatgatcaggtcatattgctgcgggcaggctggaatgagctcctcattgcctccttctcccaccgatccattgatgttcgagatggcatcctccttgccacaggtcttcatgtgcaccgcaactcagcccattcggcaggagtaggagccatctttgatcgggtgctgacagagctagtgtccaaaatgcgtgacatgaggatggacaagacagagcttggctgcctgagggcaatcattctgtttaatccagatgccaagggcctctccaaccctagtgaggtggaggtcctgcgggagaaagtgtatgcatcactggagacctactgcaaacagaagtaccctgagcagcagggacggtttgccaagctgctgctacgtcttcctgccctccggtccattggccttaagtgtctagagcatctgtttttcttcaagctcattggtgacacccccatcgacaccttcctcatggagatgcttgaggctccccatcaactggcctgagctcagaccctgacgtggtgcttctcacactggaggagcacacatcctagagggactccaagccctggggcagggtggggggccatgttcccagaaccttgatggggtgagaagtacagggcagaaccaagaacataaaccctccaagggatctgctt

SEQ ID NO: 17799 - DNA, 694 bp, Macaca Fascicularis
  misc_feature (1)...(694): n = A,T,C or G
catgagcctgccnnnnnnnnacagcagcctggctagtatccaagagctcctgtctccccaggagccctccaggcctcccgaggcagagaacagcagcccggattcagggaagcanntggtgcactacacagcacagccactgttcctgctcgaccccggctccgtggacaccgggagcagcgacttgccggtgctgtttgagctgggggagggctcctacttctccgaaggggacggcttcgcagaggaccccaccatctccctgctgacaggctcagagcctcccaaagccaaggaccccactgtctcctagatgccccggaggagctgggccagccgtggcctgcccacccccacccccagtgcagggctggccttggggaggagaggcagcctcgaggtcctgggcactggtgggttggccaccacagccccagtaggacaaacaggggctcaggtctgggcagcacctctggtcaggagggtcaccccggcctcccagtctgccttcccccaaccccgtgtcctgtggtttggttggggcttcgtagccacacctggactgaccctgcaggttgttcataatcagaattgtattttggatttttacacaactgtcccattccctgttccatagagatatacagatatatacacacaggggatggacggacggacggacaagacaggcaga

SEQ ID NO: 17800 - DNA, 687 bp, Macaca Fascicularis
  misc_feature (1)...(687): n = A,T,C or G
aatttggaatgttgggannacctgnnnnaatctnncnnnngggannagagattcagtctgtataagtgcacatatattcatgcaccctctgattttggttttcttgtttctgagttcttagaaagtatccacatactctttttttttttgtagaagtagctgttgtagagtgaaggaaaggataagactttaaatggttgattctttttgtgttttctaccaactattttttgaaatttaaatcacaagcgaactcgttttctggtttttagaaagtagatgatttcagaggagtaagacatgccaagcagcattgcccagtggggttttaggttgtcaggtgcagctgagaaaaggtatgttcaagtcataagtagctaattgatagggtatgaactagtcaaaatatgaaccgttatgattcaagatagattttcctctggagagacagatctgaatgttcagttctagccaaggtagattttactttcagctttttgatcagtatcgctttctgtgcttaactctttggtgttacattgtccattttcatttgtctaaaattctgcagagaagactacaatttgacatagtggtatacatggattgttaaaggtaagctttcagttgaagattaaagcaagatgccattttcccaaatgactttcattttgtttacattttttt

SEQ ID NO: 17801 - DNA, 944 bp, Macaca Fascicularis
tactacatgcggagaccctatgggcgtcgaccacagtattccaaccctcctgtgcagggagaagtgatggagggtgctgacaaccagggtgcaggagaacaaggtagaccagtgaggcagaatatgtatcggggatatagaccacgattccgcaggggccctcctcgccaaagacagcctagagaggacggcaatgaagaagataaagaaaatcaaggagatgagacccaaggtcagcagccacctcaacgtcggtaccgccgcaacttcaattaccgacgcagacgcccagaaaaccctaaaccacaagatggcaaagagacaaaagcagccgatccaccagctgagaattcgtccgctcccgaggctgagcagggcggggctgagtaaatgccggcttaccatctctaccatcatccggtttagtcatccaacaagaagaaatatgaaattccagcaataagaaatgaacaaaagattggagctgaagaccttaagtgcttgctttttgcccgttgaccagataaatagaactatctgcattatctatgcagcatggggtttttattatttttacctaaagacgtctctttttggtaataacaaacgtgttttttaaaaaagcctggtttttctcaatacgcctttaaaggtttttaaattgtttcatatctggtcaagttgagatttttaagaacttcatttttaatttgtaataaaagtttacaacttgattttttcaaaaaagtcaacaaactgcaagcacctgtaaaaaaaggtcttaaataattgtctttgtgtaaatttgtctagttttgctttagtttaagttcttagctatttataggaccctcagcttgacccagtctacaaatagatgatgctcactggcaattccctcaggtaaaatgtctttaaaatctctaatcctttaagtggcatgc

SEQ ID NO: 17802 - DNA, 866 bp, Macaca Fascicularis
  misc_feature (1)...(866): n = A,T,C or G
gcactgatnnnatgaagcaggtgccagccctgaagattgatggaatcaccattcaccagtcactggccatcattgagtatctagaggagacgcgtcccactccgcgacttctgcctnnnnnnnnnnnnnnnnnnnnnnnnnnnnnnnnnnnnnnnnnnnnnnnnnnnnnnnnncatccagcccctgcagaacctgtctgtcctgaagcaagtgggagaggagttccagctgacctgggcccagaacgccatcatttctggatttaacgccctggagcagatcctacagagcacagcaggcacatactgtgtaggagatgaggtgaccatggctgatctgtgcttggtgcctcaggtggcaaatgctgaaagattcaaggtggattgcaccccctaccctaccatcagctccataaacaagaggctgctggtcctggaggccttccaggtgactcacccctgccggcagccggatacacccaccgagctgagggcctagctcccaaatcctgccccgttggcacagggccacaggagcagaagctgggtggggtgaagaggcctggaaacaagtgagttaattgaggagacaggagacgccaactctagccctggatctgccttcctgctgaaacttgttccccctcagtcccctcatctgtcaaatgcatgtggggttgggtaggaagatgctgggagcagcggggcaggaatactgttatctatgtgacggggcagtcgtgaagctgagatgagaatgtggattaaaatgcctggcatgctcaccataacaccacgggaagcctgtgtgccttttctcatctgcttttgtnnnnnnnnnnnnnnnnnnnnnncccacgctgaaat

SEQ ID NO: 17803 - DNA, 701 bp, Macaca Fascicularis
  misc_feature (1)...(701): n = A,T,C or G
gcagctgaagatgatgaggatgacgatgttgataccaagaagcagaagactgacgaggatgactagacagcaaaaaaggaaaagttaaactaaaaaaaaaaggccgccgtgacctattcaccctccacttcccgtctcagaatctaaacgtggtcaccttcgagtagagaggcccgcccgcccgcccaccgtgggcagtgccacccgcagatgacacgcgctctccaccaccccacccaaaccatgagaatttgcaacaggggaggaaaaaagaaccaaaacttccaaggccctgctttttttcttaaaagtacttttaaaaaggaaatttgtttgtattttttatttacattttatatttttgttacatattgttagggtctagccatttttaaagaatctcggatgaccaaaccagccttttggagcgttattttgtcttattttatgactttattttttgtttttaccattttttatttttttttttttttgtttttttttttctttttaaaaaaagttttttttttttttttttttttttattttttattttgagcatttccagtaactttttttgtgtatgtactttagctnnnnnnataagtagatggttttgtatgagatggttaaaaaggccaaagataaaaggtttcttttttttccttttttgtctatgaagttgctgtttattttttttg

SEQ ID NO: 17804 - DNA, 724 bp, Macaca Fascicularis
  misc_feature (1)...(724): n = A,T,C or G
gctttgtgagggcggcccagtggtggaggcactgcctggtggtggcagccagaggtgcccacaggaggcacacctcatggtgcaggcatggaggatggcaaggtaggcagaggggtctggacacagtgaggtgcagccccctcccaccaggtcagacccaggagacggtgcaggtgcatagagcaggtccctggcccaggcaggaaggcagctgtctggatgtgcactagggcagagaagacaggagcctagggaggctccacttccacattgtccatccatcccacaggggacggggcttgcgtcttgctgcgagcactggagcccctggaaggtctggagaccatgcgtcagcttcgcagcaccctccggaaaggcaccgccagccgtgtcctcaaggaccgtgagctctgcagtggcccctccaagctgtgccaggccctggccatcaacaagagctttgaccagagggacctggcacaggatgaagctatatggatggagcgtggtcccttggagcccagtgagccagctgtagtgacagcagcccgggtgggcattggctatgcacgggagtgggcccggaaacccctccgattctatgtccggggcagcccctgggtcagtgtggtcgagcagagtggctgagcaggacacacaggtctaagcaaagggcctgcccagacaatattttttnantgtttaaaaacaaataaatgtttta

SEQ ID NO: 17805 - DNA, 717 bp, Macaca Fascicularis
  misc_feature (1)...(717): n = A,T,C or G
gacccggcccacgtggagagctgcaggagaaggcacaggtggccctcaccgagtatgtgcgggcgcagtacccgtcnnnnnnnnnnnnnnnnnggcgcctgctgctgcggctgcccgccctgcgcgcagtccctgcctccctnnnnnnnnnnnnnnnnnnnnnnnnnnnggtggggaagacacccattgagacactgatcagagacatgctgctgtcggggagtaccttcaactggccctatggctcgggccagtgaccgtgacggggccacgtgtgctgtggccaggcctgcagacagacctcaagggacagggaatgctgaggcctcgaggggcctcccggggcccaggaccctggcttctctcctcagacttctattttttaaagactgtgaaatgtttgtcttttctgttttttaaatgatcatgaaaccaaaaagagactgatcatccaggcctcagcctcgtcctccccaggacccctggccaggatggaggtaagggatggagggtccaatcctgggacagccttgtccctcggcaccccaagcatgaacttgtgggatggttgggttggcttccctggcatgatggacaaaggcctggcgtctgggccggaggggccgctcccgtgggcaggggtagctagcgtgtgccaggcagatcctctggacacgtaatctatgtcagacactacatgatgactcaatcaaggcc

SEQ ID NO: 17806 - DNA, 668 bp, Macaca Fascicularis
  misc_feature (1)...(668): n = A,T,C or G
atatcaaacctcgggagctctatctgcttttcagaccatttaagggctatgagggttctcttataaagctcacatctaaacagcctgtaggtntgtnnnntnnagacagtcnnncagaagcagaagctgnanagaatgctttgaatggcatccgcttagatcctgaaattccgcaaacactacgactagagtttgctaaggcaaacacgaagatggccaagaacaaactcgtagggactccaaaccccagtactcctctgcccaacactgtacctcagttcattgccagagagccatatgagctcacagtgcctgcactttaccccagtagccatgaagtgtgggccccgtaccctctgtacccagcggagnnnnnnnnnnnnnnnnnnnnnnnnnnnnnnnnctatcccgcttcactgcatgcccagatgcgctggctccctccctccgaggctacttctcagggctggaagtccacttctccagctgaatactatgtctctgggaatgtgtttgtaactgcaatctgtcttgtgggtattaatgcaatcttcagtggtggctactgttctctagctgttctgcaaaactggagcatgctggcttgaaaaaaccttgcccagttttgatcccttcaagactttgccacagcctctatcacacatctg

SEQ ID NO: 17807 - DNA, 756 bp, Macaca Fascicularis
  misc_feature (1)...(756): n = A,T,C or G
gccagggagtgtgtcaactgcggagcaacagccactccactgtggcggagggnnnnnnnnnnnnnnnnnnnnnnnnnnnnnnnnnnnntctatcacaagatgaatgggcagaacaggcccctcatccggcccaagnnnnnnnnnattgtcagcaaacgggcaggtactcagtgcaccaacngccagacgaccaccacgacactgtggcggagaaatgccagcggggaccccgtgnnnnnnnnnnnnnnnntctactacaagctacaccaggtgaaccggccactgaccatgcggaaggatggtattcagactcgaaaccgcaaggcatctggaaaagggaaaaagaaacggggctctagtctgggaggcacaggagcagccgaaggaccagctggtggctttatggtggtggctgggggcagtggtagcgggaattgtggggaggtgacttcaggcctgacactgggccccnnnnnnnnngcccatctctaccaaggcctgggccctgtggtgctgtcagggcctgttagccacctcatgcctttccctggacccctgctgggctcacccacaggctccttccccacaggccccatgccccccaccaccagcgctactgtggtggctccgctcagctcgtgagggcacagagcacggcctccagaggaggggtggtgtcctcctcctcttgtagccagctgtctggacaacccaagtctctgggccctaggcaccccatggcctaacctcaaagct

SEQ ID NO: 17808 - DNA, 714 bp, Macaca Fascicularis
  misc_feature (1)...(714): n = A,T,C or G
caagcgcggccgacgtnngtgggcgcgcaagaggcaggcagcgcacacgtgcgcgcacccgggttgcggcaagagctacaccaagagctcccacctgaaggcgcatctgcgcacgcacacaggggagaagccatacgcctgcacgtgggaaggctgcggctggaggttcgcacgctcggacgagctgacccgccactacaggaaacacacggggcaacgccccttccgctgccagctctgcccacgtgctttttcgcgctcagaccacctggctttgcacatgaagcggcacctttgagccctgccctggcacttggactgtcctggggattggggatgggacaagaagcctgtttggtggtttctttacacggacaagtgacacaatgccgggtggttttcccacgaatggaccgtcccctggactcgctgtcccaaagattcacnnnnnnnnnnnnnnnnnnnnnnnnnnnnnnnnnnnnnnnnnnnnnnnnnnnnnnnnnnnnnnnnnnnnnnnnnnnnnnnnnnnnnnnnnntgtccaaactgtcatgcagacccagtgagacagaccaccaaataaacggactcagtggacactcagaccagctcccagatggccctggacagcagaagagggtgtggggtgaggcttcccagagaccctgggtctagaaaggggctcctgaaggtcccttattgtggctgatattaac

SEQ ID NO: 17809 - DNA, 830 bp, Macaca Fascicularis
  misc_feature (1)...(830): n = A,T,C or G
acaggggaagnntatgtgcaattgaagaacccnnnnnnnnnnnnnnnnnnnnntgaaacacagggaagaaattggtaatcgannnnnnnagatatttcnnnnnnnnnnnnnnnnnnnnnnnnnnnnnnnnnnnnnnnnnnnnnnnnnnnnaatcacatcttctcctactgctaagtatataactgagccagaaatggtnnnnnnnnnnnnnnnnnnnaatgaggatattcnnnnnnnnnnnnnnnttgaaagtgagaaggannnnnnnnnnnnnnnnnnnnnnnnnnnnnnnnnnnnnnnnnnnnntgattttggaactacgtcttctctgcattttgtccacatgagaggattacctttccaagccaatgcccaagacattataaactttttcgctccactcaagcctgttagaatcaccatggaatacagctccagcgggaaggccactggnnnnnnnnnnnnnnnnnntgagacccatgnnnnnnnnnnnnnnnnnnnnnnnnnnnnnnnnnnnnnnnnnnnnnnnnnnnntattgaactgttcctgaattcatgtccaaaaggaaaataagacttcaggggctccagataataagggtgaagcaagaagcatttcatttgcacatctttctnnnnnnnnnnnnnnnnnnnnnnnnnnnnnnnnnnnnaactgctagggaaatgattttggtgttttgggttaattgcttctaagaaaagtttcatagtggactgcttagaagaagaaatgaaagatcnnnnntgggattatgaaataaaccacaaataaaaatttttgtttaannnnnnnnngatctgattaaaaa

SEQ ID NO: 17810 - DNA, 679 bp, Macaca Fascicularis
  misc_feature (1)...(679): n = A,T,C or G
ggggccatgtgaccgtggcctctccctggggatgggcttaccacagcacactcaccctgctgccatccacttctgtttcctctgcaaatgtaagaaagaaccacttgactagaagtgtcccccagatgctttttttttttcttttgnnnnnnnnnnnnnnnnnnnnnnnnnnnnnnnnnnnnnnnnnnnnnnnnnnnnnnnnnnnnnnnnnnnnnnnnnnnagattctgcctcagccttccaggtagctgggattacaagcacccannnnnnnnnnnnnnnnnnnnnnnnnnnnnnnnnnnnnnnnnnnnnnnnnnnnnnnnnnnnnnnnnnnnnnnnnnnnnnnnnnnnnnnnnnnnnnnnnnnnnnnnnnnnnnnnnnnnnnnnnnnnnnnnnnnnnnnnntgcgcctggccccccaaatgctcttgaaccagaaacccagggctgggagatgctcactgagctgctgcttttctgtgtgctggtgctgtgtgtgtttgtaagtctgtggcagctgtcctcttgcgactataagggaattctggccaccctgggtggggcgtggtcggggtgagaaccgaagcgttggaactgtagacccgtcctgtcgactgtgtgcccctgggcatgtgtgagcctcagtttcctcatctgtaagagggggcgatgataacctac

SEQ ID NO: 17811 - DNA, 744 bp, Macaca Fascicularis
  misc_feature (1)...(744): n = A,T,C or G
gaaaagggcatccatccagtattcaaaggatagttctggggtgatccannnnnnnnngaatggttcagagccaacagnnnnnnnnnnnnnnnnnnnnnnnnnnnnnnnnnatgaaattccaaacctccagaaggaaaannnnnnnnnnnnnnnnnnnnnnnnnnnnnntgaaattgggggacccaatgtggaatcctgcggggaaggcaccatgaaagtcctagaaaagaggctgaaggacatggggttccagtacagctgtattaatgattaccgaccagtgaagctcttacagtgtgtggaccacagcactcatcctgactgtgccttnnnnnnnnnnnnnnnnnnnnnncaaagaaaagcnnnnnnnnnnnnnnnnnnnnnnnnnnnnnnnnnnnnnnnncccctccttctggtgctggcttccgggactcaacggtaactgtgaactgtgttgctctaaccctcccccagccctgcagcctccccttgcaatcatcattcctgttctgtgtataccaaatgattctgttgtctaaagaagctctttgcggggaaaacgatgtcctgaaatggtatttcaatgagacatatgcacaggatttcagaaacaagaaattagttttatttggcagattaaaaaatgctgcattagaattaaagcaagttattttcttatttttataatgacacaaagcactgggagtcagactgcttgtatattatcaaacatttcagagaatc

SEQ ID NO: 17812 - DNA, 742 bp, Macaca Fascicularis
  misc_feature (1)...(742): n = A,T,C or G
agccagnnnnnnnnnnnnnnnnnnccaccagcagcaggcggcgagcagactggccctcacattcgggacacctcccaagctnnnnnnnnnnnncagtatttttttgaggctgtttctacccagatggaaaagtggtatgaaaggaagattgaagaagcacgcagccaagccaatcagaaagcccagcaagacaaggctacattgaaggaacacattaaaagtttagaagaggaactnnnnnnnnnnnnnnntagggtgcagaaggaaaattagcaccaataaagaggaaacacgaaaggattcttgaagatttccagttttgcnnnnnnnnnnnagctatgcccaaggagtcatctgttgtatatattgcagattggcctttttaaagagaaatctaattctacaatgtgccagatacatgtttccnnnnnnnnnnnnnnntgaagacctcagcaattaaactgaaaccaggggaagcttgcttagttttgggtttcattataaactcttagccttagtccaggttaatctgaagtttgaaagctcagattaagcaagccatgccaagaaactggatgatgtgtaagcctagactctaaaattcaagatgtgtgaaataatataagtcaaaagcaagaaaaacttaatcccgtctgaactcaagtagtcattcatataaatttgaacacnnnntgctgtgcctagacaagtgtctttctgtaagagagctgtcactctgaga

SEQ ID NO: 17813 - DNA, 768 bp, Macaca Fascicularis
  misc_feature (1)...(768): n = A,T,C or G
cagaggcagaacacatnntnncagagaagctgctgctaaggnnnnnntagactgctcacagggccttaacttcatgttgccttcttttctattcctttgggccctgggagaaggaagccatttgcagtgctggtgcgtcctgctccctccccacatcccccatgctcaaggcccagccttctctnnnnnnnnnnnnnnnnnnnnnnggnnnnnnnnnnnnnnnnngcccagcccagctgttggctacatgagtattttgaggaagtaaggtagcaggcagtccagccctgatgtggagacacatgggattttggaaatcggcttctggaggaatgcatgtcacaggtgagactttcttcagagnnnnnnnnnnnnnnnnnnnnnnnnnnnnnnnnnnnnnnnnnnnnnnnnnnnnnnnnnnnnnnnngccgcccgaaggagcctgctttggtactatggaacttttcttaggggacacatcctcctttcacagcttctaaggtgtccagtgnnnnnnnnnnnnnnnnnnnnnnnggcactcagccagtccccatctcggccctcagggagcagtcttccatcannnnnnnnnnnnnnnnnnnnnnnnnnnnnnnntggggcggggccgcagggccagccttgtttctctaacagccttgnnnnnnnnnnnnnnnnntnnnnnnnnnaggaagcnnnnnnnnnnnnnnnnnnnnnnnatttgggttttaattttgtttttattgcacctgacaaaatacagttatctga

SEQ ID NO: 17814 - DNA, 756 bp, Macaca Fascicularis
  misc_feature (1)...(756): n = A,T,C or G
gcacgaggaagtgnngggtgtggtgccagccgggcaggtgccccagcacaaagactttgcccacttgccgctgctcaaagctgtgcttaaggagacnctgcgcctctaccctgtggtccccacaaattcccggatcatagaaaaggaaattgaagttgatggcttcctcttccnnnnnnnnnnnnnnnnnnngttctgccactacgtggtgtcccgggaccccaccaccttctctgaacctgagagcttccagccccaccgctggctgaggagcagccagcctgctacccccaggatccaacacccatttggctctgtgccctttggctatggggtccgggcctgcctgggccgcagnnnnnnnnnnnnnnngatgcagctactcctggcaaggctgatccagaagtacaaggtggtcctggccccagagacgggggagttgaannnnnnnnnnnnnnntgtcctggttcccaataagaaagtgggcctgcagttcctgcagagacagtgctgagctgagtccccaccttgctggggcttgtcctagaggctccagcnnnnnnnnagtggttcctggctgccgcctgtctcagatgaggagggagagaaggaggccgccagacttgagaggtgggaggaactccctgcacttcccacagaccctgagcttttgccacttctatcatttttgagcaactccctctcagataaaaggccaccgctttatcgcattgctgtccttgggtagannnnnaa

SEQ ID NO: 17815 - DNA, 733 bp, Macaca Fascicularis
  misc_feature (1)...(733): n = A,T,C or G
tggaaacaaattgatgaagaatgatggtgggggtggggggagggttttggtttttccaaagtggaacnnngaaataaaggaagtgttccttagttcacatgtgaaagcaagggccccgtgacatccagtggcataaaaggatcagagctgactggacacagtgagccgctgccttgcgttcggggcacccctgttaaacctgctctgtgtcataagtgactccggatgcgtcagtgtccaccagttggaagcaatgacaaggatggctggctggggttgttcagccttccggtttatagactgtatttatctagtggattcctgcaggccccatactgagcctggactgaaagtatccactcggaccatctgttatctctctacactgaaaataaaacctcttccacccaccccattcggttcttctgcctgaccttcaaatgcccacgttnnnnnnnnnnnnnnntgccacggcaccaagcgagctgccgcatctcacactctaaagggtttgaactattagttcttgtcatttttttaaaagaaccattcccaagtgaaattgttatatcgtctgtcttgcgtgtgtcagaattgggtttttgtggaggttcagagcaggcaacaccgtaaggtgctctcagatccttgttctgaagtacattctcttggttctctgtacttctgtagctggtgtgatgctgttaatcgtatgtaccacacatctccagac

SEQ ID NO: 17816 - DNA, 739 bp, Macaca Fascicularis
  misc_feature (1)...(739): n = A,T,C or G
cgagaggaacataaatattactaaggatttgttggatcttcttgttgaagctaannnnnnnnnnncatcttggttagaaaacatggcttatgaacaccactacaagggtnnnnnnnnnggacgttctaagagcagatttagtggagggtttggtgccagagactaccgacaaagtagtggnnnnnnnnnnnnnnnnnnnnnnnnnnnnnnnnnannnnnnnnnnnnagtggcggaggtggccacggtagcagcagaggattcggtggaggtggctatggaggcttttacaacagtgatggatatggaggaaattataactcccagggggttgactggtggggtaactgagcctgctttgcagtaggtcaccctgccaaacaagctaatatggaaaccacannnnnnnnnnnnnnactataccttgtgtagcttcaagaactcgcagtacattaccagctgtgattctccactgaaattttttttttaagggannnnnnnnnnnnaagaagaaatgaaagtaacaatcagcagccctgttnnnnnnnnnnnnnnnnnnnnnnattgctgtagtttggattaactcccctcccgcctacccccatcccaaactgcatttataattttgtgactgaggatcatttgtttgttaatgtactgtgcctttaactttagacaactttttattttgatgtcctgtnnnnnnnnnnnnnnnnnagatatcaatnnnnnacaaaataa

SEQ ID NO: 17817 - DNA, 767 bp, Macaca Fascicularis
  misc_feature (1)...(767): n = A,T,C or G
agtacttgttttcattctggccagcagttctacattaaatcaccttgtcgagagctctatttagatctatacattttgaagatgaaatttttagccttaaagtttnnnnnnnnnngtccttttacaaccagtgtgtctcctgaactagcacacaggctgtagaaacagtcttagaaatcattgaaagatttgattatgaaagaatagcaaaattatatttcctgacatatnnnnnnnnnnnnnnnnncctttattnnnnnnnnnnnnncagaaccaggaatactatattgaaaaattagtctgtggatttaacattgacctagcatatagcttaaagttgcccttttggtttttaacttcgtctcatacatatgctccaaggacaatgtgatgttaaaaaggaggaaataattatttttattttgacactgtggcagttttggtaactaggatcctagggagggaaatgtttgcctcttgaacttctttccattatcagaggatttagttaggtcgttaagatgatgatcacacagcttcaatcgcaatatgccaagtataacctggtttcgttagtggtgtctacagtccagatgttcttcgtaataaaagcaaagtttttgaacttctgagtacaaagcaggctggttggcataatatgtaatttgaaaaataaaatnnnnnnnnnnnnnnnnnnnnnnnnnnnnnnnnnattatgtgtattatttctaatatccaaaactaaatacttgattttttatatgtgt

SEQ ID NO: 17818 - DNA, 1474 bp, Macaca Fascicularis
  misc_feature (1)...(1474): n = A,T,C or G
attcaagctccttaggtgctactgtatttatgttgcacgcacagacacgtacacagagtttcattagtaatttttcatctataggtttttcttaaaaaaaaaaaaaaaatcccgtgtggcacaaagatctcttcaattatctaaacacagcagcaaccaaataaaaactggatgtggcgcttccactgcagaaggtcttttggaggggaagcccaaaaagacaatcactgacttcctgggagggcagaggannnnnnnnnnnnnnnnnnnnnnnnnnnggacatgaaaccagttaaaacactcaaaaggggctaaaaaaataagacggagtaaggcaagggtaccttttacccatccaaattcctaactaattttcccaaaacgtagaaagacaatttccttccactactttttgcagctgccgtactttgggactatcaaatatcatagtcctttaaactcaccaatgcatattccctctgaacgatcatgactgtgagtgagaacctgaaggaactcacagatgatttttctttcaagttcgctgaattttcatgttgaaggtgaagaaaaaaacttaccctcaaatgggaatcggagatttgaatctcgggaaaagatcaagaaaaaaaggctttatgtatttcacctctggagaatgttccccccacatactgagataggatcacaataactcaataactgaggagcccacatgcaggttatttttttctctaacaagtttacagcagtgtacagcagttacagacatttattttatcataagaaaagtacaaccatatttattaaacttaaggtgaggtgggcaggggagagggaggaaagcacattcaggaatgagttctcaaactaatgctcagaactggtgtccagtgacatagaaaccactttcccaaatggcagagtctttccttccctggggatagtggcagagggagtggcggccaccgcagcattcccgttgactccctctcagtcccactttccatttctattcttttttatcagatggcattcttggaatcaggaattatcactatcacctataagttattcatcaagttgaaagttaaatcactaaagaaaaggnnnnnnnnnnnnnnnnnnnnnnnnnnnnnnnnnngaagataggatttgagggctgccaaaaaaaaaaaaaaaaaaccaaggaagatatnnnactcctgtccccaagtaattttttcataagctaatcatacttcttaagggtaaaactataatggatagctgagtaagactagtgcttaaaactggatagaaggatccagaggtgttctatctttcattttctcttctacctccaatctttcccctttcaagctacaggtaaaggctccaccacaattaaggtattgacttatcctatgaatttgattctttctttattcttctgagttctaagatagttctttttcagtccatcaatttttgt

SEQ ID NO: 17819 - DNA, 737 bp, Macaca Fascicularis
  misc_feature (1)...(737): n = A,T,C or G
annnnnnnnnnnnnnnnnnnnnnnnnnnnnnnnnnaaagattannnnnnnnnnnnnnnnnnnnnncaagaggagcaattttcgtgccnnnnnnnnnnnnnnnnnnnnnnnnnnnngtgtggannnnnnnnnnnnnnnnnnnnnnnnnnnnnnnnnnnnntacgtcttcagtggtgcttatgtgcccttnnnnnnnnnnnnnnnnnnnnnnnnnnnnnnnnngcgaagttggcagggccttgatgaggtggtacggctgctnnnnnnnnnnnnnnnnnnnnnnnnnnnnnnnnnnnnnnnnnncaaggcttccagtgagtccctgcgcctcatcttagtggtgttcttgggtggttgcacattctctgagnnnnnnnnnnnnnnnnnnnnnnnnnnnnnnnnnnnnnacaggttcattttcctgacaacagcagtcacaaacagtgctcgtcttatggaggctatgagtgaggtgnnnnnnnnnnnnnnnnnnnnnnnnnnnttgtcatcttccctgaacacattcctcagtgggaggnnnnnnnnnnnnnnncagctgttataaccaagnnnnnnnnnnnnnnntgctacgagccgggagcatggaacgggttgggatttagagaacatatctgagaagagagttcacttcctgctcccaggatatttttctcttttctgtttatgaagtacaaccnnnnnnnnnnnnnnacaagcaggaagaggnnnnnnnngtta

SEQ ID NO: 17820 - DNA, 788 bp, Macaca Fascicularis
  misc_feature (1)...(788): n = A,T,C or G
ccaaaaaccactattgataccactgcaaannaaagccagcaaaaagatagtgtagagaggttggcttgcttccctctcttcctaactgcatgttgaaaaataagccgttattgatcttaaacatctgtcagatgagtcatacattgggttattttttatatacatgtatacacagaatatttcaaattgaaagcaacatcttaatggattcaaaactattnnnnnnnnnnnnnnnnaacagatgataaaaaatttataactgtaaaaacaaatgcacatattgatatttaaaatgcataattaagaaaacccattggtgttgtgtttttcttgtataccaataattaagccattactgttggcactgtttggttttctattttaacactgaaggagtgaaagtatttcctatatttatgaatttactactaaaatcttggcaaaaaaagaaaaaaattgtctaaaatgtgtgggtgaaaactgttaatcaagtgtgtttctactcccccaccgccgccccctgaaagttggacaccaactgtataccctaggttgcttaaagggatttcactattatataaagtcaataaaaatgaagtagttgtatatatgcaacattgtgtacagaggggaaataatgaatagtattaaagaaacattctcgtcttcctttacctttaatcccctaatacctagtctactttttaaattttcagacttcactgctttttgaattcataattctaattttcacattattgttaaggaaaatcatatctaataaaggt

SEQ ID NO: 17821 - DNA, 849 bp, Macaca Fascicularis
  misc_feature (1)...(849): n = A,T,C or G
acgccggagcagccccnnnnnnnnnnnnnnnnnnnnnnnnnnnnnnnnnnnnngctgcacggcgtccgcgactacgcggcctnnnnnnnnnnnnnnnaccccgaactccgacaaggcattaaagactattccaactggccnnnnnnnnnnnnnnnnnnnnnnnnnnnnnnnnnngtggggggctgtgacatccttnnnnnnnnnnnnnnnnnnnnggacnnnnnnnnnnnnnnnnnnnnnnnggggatccactcngcccttttagatgaaaagaaagaccaagactccaagtgagggcggccaggtcctcactgagcagagagggagccgttcacgtcagagactcactgccagaaaagccttacccattttggttttcactattgagaccgcagctgcttgcactgatcattttggttcgtgagcagttgggtgattttagtttgtctggtgtttgggctaagaatattttattgtggacttaattccaaccactgcactgtaacgattcaatgctgtattatgagattgctgtaaacaaaattcattcttgtattgtcgcttattctttgcctgattcaggagttaaataggagctttggaatcattattcgtgacccctctgcaaatgtgtcagtctccaaagacagtatctccccccagattttgtgtagcttcttttgttacggaaaatgatggacaaaaaaagaaactgtgataactgaggcgttggcattgttttttaaaataaactccagcacagggatgctgtgcatgcctgagttaattctgaagtgcatgtgtctgtaaggatttggagtgcctgcaatgttttgtgtgtgggaagta

SEQ ID NO: 17822 - DNA, 801 bp, Macaca Fascicularis
  misc_feature (1)...(801): n = A,T,C or G
caaagaccccaaggnnntgcaccattctcctccggggggctagcaaagagattctttcggaagtagaacgnnnnnnnnnnnnnnnnntgcaagtgtgtcgcaatgtnnncctggaccctcagctggtgccagggggtggggcctccgagatggctgtggcccatgccttgacagaaaaatccaaggccatgactggtgtggaacaatggccatacagggctgttgcccaggccctagaggtcatccctcgtaccctgatccagaactgtggggccagcaccatccgtctacttacctctcttcgggccaagcacacccaggagaactgtgagacctggggtgtaaatggtgagacaggtactttggtagacatgaaggaactgggcatatgggagccattggctgtgaagctgcagacttacaagacagcagtggagacggcagttctgctactgcgaattgatgacatcgtctcaggccacaaaaagaaaggcgatgaccagagccggcaaggcggggctcctgatgctggccaggagtgagcgctaggcaaggctacttcagtgcacagaaccagcagagtctccccttttcctgagccagagtgccaggaacactgtggacgtctttgttcagaagggatcaggttggggggcagcccccagtccctttctgtcccagctcagttttccaaaagacactgacatgtaattcttctctattgtaaggtttccatttagtttgcttccgatgattaaatttaagtcatttgagaaaaaaaaaaaaaaaaaaaaaaaaagg

SEQ ID NO: 17823 - DNA, 743 bp, Macaca Fascicularis
  misc_feature (1)...(743): n = A,T,C or G
cccaccccacnnnnccacntnnncatgaccggctacaccccgctcactacggaccagtcagtggccagcgtgaggaagannnnnnnnnnngatgtgatgaggcggctgctgcagcccaagaacgtgatggtgtccacaggccgagaccgccagaccaaccactgctacatcgccatcnnnnnnnnnnnnnnnnnnnnggtggaccccacccaggtccacaagagcctgcagaggattcgggaacggaagttggccaacttcatcccgtggggccccgccagcatccaagtggccctgtcgaggaagtctccctacctgccctcggcccaccgggtcagtgggctcatgatggccaaccacaccagcatctcctcgctcttcgagagaacctgtcgccagtatgacaagctgcggaagcgggaggccttnnnnnnnnnnnnnnnnnnggaggacatgttcaagnnnnnnnnnnnnnnnnnnnnnnnnnnnnnnnnnnnnnnnnnnnnnnnnnnnnnnnnnnnnnnngcggccacacggccagactacatctcctggggcacccaggagcagtgagtcccccaggacagggacccttatctgccttactggttggcccaggccctgcctgactgactactccttcagagcacagatcagggacctcacgtatctctttctcataaacatgcactctctgttggcctgtgaacacagttacttctcctcttataagactattatct

SEQ ID NO: 17824 - DNA, 734 bp, Macaca Fascicularis
  misc_feature (1)...(734): n = A,T,C or G
caaagtccataatcaagannnnnaggactggccagcgcagtactgtgaggcgttggcagatgaggagaacagggccagacctcagcccagtggctcagccccatcctcttgaaatctgaggtggattcagagggacccccgggacaagggtctgagacccaaaggcacagtgcagaggagcgggggaagggagaacgaacccaggaagcgtatttctgtagcgtttcaatgtgtgtagctttaggatgtgtttgcaaagttttgttcttttaatgttgtgttatttggttccagattttcatctataaacaaaggagcatttgttttgctttgattttactttttttggtataaaaaattttcctagcttagtaaaacgaattggaaaacttgactatgatctgaaacagatatgccagaaggaacacataagtaagttgctttggtgccaagaaaataaaaaagtagctattatcgggtctcttaagcatcccagtttgtaaggaaaaataaaagtctttataaaattaaaaataaaaacgtaattgcctatatccttattaccttaacctattttattttttctatatttcctacatatgtaagtattattcatggttccaagcaatgaacgtggtgtattttctccaaatagcaattgtttatattcataattactcagctgtgttgctaaacatgcagttccacttagttttttttacatgctactctag

SEQ ID NO: 17825 - DNA, 720 bp, Macaca Fascicularis
  misc_feature (1)...(720): n = A,T,C or G
aagaaggacccccgccagtcgctcacgcccannnacgtcacggctgcatgcgccgtgagtcgcgggcaccggcggacgccatcggacggggcgctggggcagcgggggcctcccgagcccgcgggccacggccctggccctcgtgaccttctggacttcccccgcctgcccgacccccaggccctgtttccagcccgccgccggccccccgatttcccaggccgccccaccaccctgacctttgccccgagacctcggccggctgccagtcgcccccgcttggacccctggaaactggtctccttcggccagacactcaccatctcgcctcccagcaggccagacactccggagagccctgggccccccagcatnnnnnnnnnnnnnnnngacatggacatggaggggcagaaccaggacagcacagtgcccctctgtggggcccacggctcccactaaggcctgcccaccaccgcccgcctgggcagccatgaatgtagcgccccaggccccgccccagcccgccatgccacaaggcgggggaggccctgggcaggatgttcactctatttattggggaaggagggaggggggaacacttaacttattcctttgtactccagggggtggagccctgtgcccgccctgcactggggagagggtgggcagggatactcagggacagggcatcatgggggattggcacaaaatggagcataa

SEQ ID NO: 17826 - DNA, 771 bp, Macaca Fascicularis
  misc_feature (1)...(771): n = A,T,C or G
tgccccaagggccccgccgccgctccagcgccgcgcagccaccgccgccgccgcctgtccttagcttccgccatgacgaccgcgtccacctcgcaggtgcgccagaactaccaccaggactcagaggccgccatcaaccgccagatcaatctggagctatacgcttcgtacgtttacctgtccatgtcttactactttgaccnnnatgatgtggctttgaagaactttgccaaatactttcttcaccaatctcatgaggaaagggaacatgccgagaaactgnnnnnnnngcagaaccaacgaggtggccgaatcttccttcaggatattaagaaaccagactatgacgactgggagagcgggctgaatgcaatggagtgtgctttaatttggaaaataaatgtgaannnngtcactagctggannntgcaaactggccactgacaaaaatgaccccnnnnnnnnnnnnnnnnnnnnnnnnacattacccgaatgagcaggtgaaagccatcaaagaattgggtgaccacgtgaccaacttgcgcaagcatgggnnnnnnnnnnnnnnncnnnnnnnnnnntcnnnnnnnnnnnnnnaccctgggagacagtgataatgaaagataagcctnnnnnnnnnnnnnctatagccatggggtgacttccctggtcaccaaggcagtgcatgcatgttggggtttcctttaccttttctataagttgtaccaaaacatccacttaagttctttgatttgtaccatcctcaaaaag

SEQ ID NO: 17827 - DNA, 179 bp, Macaca Fascicularis
ttcagaggttagcatgtgatgccccagggacctttgtagccacttcactttttgtctgttgtttgccttgatatagcatatgtttttgtaagttttatgcatacagtaattttaagtggttgatttcagaagaaattctgcaagctttttaaaattggacttgaaatgtaattcaaact

SEQ ID NO: 17828 - DNA, 796 bp, Macaca Fascicularis
  misc_feature (1)...(796): n = A,T,C or G
acggacagttcctggagtgcacggaagtcacagctggtctatcagtccagacagggacctttggtcaaatattctaattacttccaagccccctctgactacagatactaccnnnaccagtccttccagaccccacaacaccccagcttcctcttccaggacaagagggtgtcctggtccctggtctacctccccaccattcnnnnnnnnnnnnnnnacggcttctcctgctcctccgacgagctccccatcctgggcctcaccaagtctggcggctcagatcgcagcattgcctacgaaaacaaagccctgatgctctgcgaagggctctttgtggcagacgccaccgatttcgagggccggaaggctgcgattcccagtgccctggacaccaacagctccaagagcacctccttcttcccctgcccagcagggcacttcaacagtttccgcacggtcatccgccccttctacctgaccaattcctcgggtgtggactagatggcgtggccccagggtggtaagaacccgagaaccccaggacgccctcactgcaggctcccctccttggcttccttcttctctgcaacaatcatcaacaaccgtccaccagatgtccccctactcccctgagctctcagcttcaagaagacttccactcgtgtccgccaggagttctcccnnnnnnnnnnnnnnnnnnnnnnnnnnnnnnncagggcgtcctcgaggtcgctctggggtccccccacagcccctggtcagtctgcccttgtcactggtcgaaggtcattaaaaa

SEQ ID NO: 17829 - DNA, 750 bp, Macaca Fascicularis
  misc_feature (1)...(750): n = A,T,C or G
gcagccaaatgtttcagatacttcagctttgtgtnnnntcgtagcttcatattaatacaagtttctttagaaaacccaagtttttaaccatttttgttctaaggaaaaagaaaagatttttaaacgaatcttatgtgaaactttttgaccagttttcttttcttcttttctttttttttaaaaaagacatttaaagacaaagacattatttctcatagcaggaagtgtagaggtagatggttccagaatcagtatagtggctaaactacattagaaaagatccagcttccgtctttcccctcttttgtcttcctcagcaggttggctttttcccctggtgcctctcacctcattggtgaccagtttcttaactgaaagctttaatgttacatagtaaatggtagtgtgtcctgtgtaaattagtatacctattaaaagttgcaaagtagaattaaaggaattcctagaataaggattctaaagttttattttaaatgattatcttcttaacagtttagtcctacctcttacttcctgcctcagtctgctttctctactgtctggattnnnnnnnnnnnnnnnnnnnnagttaaagtcacacatttctattttgcaaacattgtgatcactctttgctttgtacctctgctttgctttgtaggcttctgctttaactttttctcttttctcagacaaattactgataaaaatgatattgctctatatgtaatatatcctggaacgcgttat

SEQ ID NO: 17830 - DNA, 706 bp, Macaca Fascicularis
  misc_feature (1)...(706): n = A,T,C or G
acaaaggatgaannnnnnnnnnnnnnnnnagattctactctgtcatttttaatattactgtctttattcttattactattattgttcccctaagtggattggctttgtnnnnnnnnnnnnnnnnnnnnnnnnnnnnnnnnnnnnnnnnnnnnnnnnngaattacagtgaaattttggtgactgtgggtagtcattcttacaattgcactgctgttcctgctccatgactggctggctgcctgtattttcgggattctttgacatttggtggtactttattcttgctgggcatactttctctctgagtaggagggagccttgtgagatcctnnnnnnnnnnnnnnnnnnnnnnnnnnnnnnnnnnnnnnnnnnnnnnnnnnagaaagtgtacatcatgttattttattattattagcttttcatgtagaatnnnnnnnnnnnnnnnnnnnnnnnnnnnnnnnnnnnnnnnnnnnnnnnnnnnnnnnnnnnnnnnctgtctactgtggtgatctgtagacttctggttgtatttctatatttattttcaatatactgtgtgggatacttagtggtatgtctctttaagttttgattaatgtttcttaaatggtggaattattttgaatgtcacaaattgatcaaggcattaaaagatcagatttatctttccccatatccaagtaccaatgctattgtaaacaacgtg

SEQ ID NO: 17831 - DNA, 750 bp, Macaca Fascicularis
gctggagctgcagaacgggcgctgcatgcgcgaggcgcaatacagcatgctggcgacctggaggcggcgcacgccacgacgcgaggccacgctggagctgctgggccgcgtgctccgcgacatggacctgctgggttgcctggaggacatcgaggaggcgctgtgcggccccgccgccctcccgcccgggcccggtcttctcagatgaggctgcgcccctgcgggcagctctaaggatggtcctgcaagatccccttccaaccccacttttttctggagaggaggggtcctggaggggcaaacaggggctagcagccgcctacttggtgctaccctctagatgtacatagcttttctcagctgcgcgccgctgacagcactgagcgcgcggagagaggagcgccgtgggctcaagagcttgagtgggtggttgcgaggatgagagacgctatgcctcatgcccggatgagagacgctatgcctcatgcccgttttgggtgtcctcaccagcaaggctgctcaggggctcctggttcgtccctgagcctttttcacagtacataagcagtttttgtttgtttttgttttttttgttgttgttgttttttaaaatcaatcatgttacactaatagaaacttggcagtcctatgccctctgcctggacaagcacaaagcaagctgaactgtcccaaggcgggggcgagcacggaacaatggggccttcagctggagctagtgtaacatgatga

SEQ ID NO: 17832 - DNA, 586 bp, Macaca Fascicularis
  misc_feature (1)...(586): n = A,T,C or G
ggnntcggnnnnnnnnnnnnctctgcgagggcctgacctgtgcaagcacctcccccaggagaccgttgcagtcggccagcccccttctccacggtaaccatgtgcgaccgaaaggccgtgatcaaannnnnnnnnatgtcggaagagatgcaacaggactcggnnnnnnnnnnnnnnnnnnnnnnnnnnnnnnnnnnnnnnnngaaggacattgcggctcatatcaagaaggaatttgacaagaagtacaatcccacctggcattgcatcgtgggaaggaacttcggcagttacgtgacacatgaaaccaaacacttcatctacttctacctgggccaagtggccattcttctgttcaaatctggttaaaagcatggactgtgccacacacccannnnnnnnnnnnnnnncaaggactgcagcctaaattcnnnnnnnnnnnnnnnnaaattttcagccttgctaagggaacacctcgatgtttgaacctttgttgtgttttgtacagggcattctctgtactagtttgttgtggttataannnnnnnnnnnnnnnnnnctacatttgtatttattttctattcca

SEQ ID NO: 17833 - DNA, 761 bp, Macaca Fascicularis
  misc_feature (1)...(761): n = A,T,C or G
agcggctgttggtnnnaggggaagagtgggagttcgaggtgacagcnnnntacccggggccgccaagtnnnccagcagaccatctcntgcccagagggcctgcggctggtggggtccgaagtgggagacaggacgctgcctagatgtccaatcacactgccagaccctggcatgtccctgacagacaggggagtgatgagctacgtgaggcacgtgctgagctccctgggtgggggactggctctgcggcgggccgggcagcggctctgggcccagcggctggggcactgccacacatactgggcannnnnnnnnnnnnnnnnnnnnnnnnnnnnnnnnnnnnnnnncgaggtccccaaggacaaggaaggaggcgtgttcgacctggggcccttcatagtagatgtgatcactttcacagaaggaagtggacgctcaccacggtatgccgtaaggttctgtgtgggggagtcatggccccaggaccagccatggaccaagaggctcgtgatggtcaaggttgtgcccacgtgcctcagggccttggtagaaatcgcccgggtagggggtgcctcctccctggagnnnnnngtggacctgcacatttccaacagccacccactctccctcacctctgaccagtacaaggcctacctgcaggacctggtggaggatatggatttccagggccctggggagacctgagccctcgctcctcatggtgtggcctctaacctccccacaccccaccacctcaacca

SEQ ID NO: 17834 - DNA, 915 bp, Macaca Fascicularis
  misc_feature (1)...(915): n = A,T,C or G
cttcagtgattacagtctacacaatgtatttgacatggtcggctatgaccaatgaaccagaaacaaattgcaacccaagtctactaagcataattggctacaatacaacaagcactgtcccaaaggaagggcaatcagtccagtggtggcatgctcaaggaattataggactaatcctctttttgttgtgtgtattttattccagcatccgtacttcaaacaatagtcaggttaataaactgactttaacaagcgatgaatctacattaatagaagatggtggagctagaagtgatggatcactggaggatggtgacgatgttcaccgagctgtagataatgaaagggatggtgtcacttacagttattccttctttcacttcatgcttttcctggcttcactttatatcatgatgacccttaccaactggtacaggtatgaaccctctcgtgagatgaaaagtcagtggacagctgtctgggtnnnnnnnnnnnnnnnnnggattggcatcgtgctgtatgtttggacactcgtggcaccacttgttcttacaaatcgtgattttgactgagtgggacttctagcatgaaagtcccactttgattattgcttatttgaaaacagtattcccaacttttgtaaagttgtgtatgtttgtgcttcccatgtaacttctccagtgttctggcatgaattagattttactgcttgtcattttatttgttattttcttgccaagtgcattgatatgtgaagnnnnnnnnnnnnnnnnnnnnnnnntttatgaatatggtgatgagttagtaaaagtnnnnnnnnnnnnnnntattctctgctctatacttgtgaaatgaagagtaaaaacaaaattgcttgactattttaaaattatgttagaccctaaccctcggcaa

SEQ ID NO: 17835 - DNA, 731 bp, Macaca Fascicularis
  misc_feature (1)...(731): n = A,T,C or G
tcaaccaggagaggacacggaggaggaggaagatgaggacagtgatacaggatcagctgaggatgaaagagaagctgagatttccacttccacaccccctgcaagtgctttcttgaagtcctgggtgtatcggccaggagaggacacggaggaggaggaagatgaggacagtgatacaggatcagctgaggatgaaagagaagctgaaatttccacttccacaccccctccaagtgctttcttgaagtcctgggtgtatcagccaggagaggacacggaggaggaggaagatgaggatgcggatagtgagggtgcacttctccgagaaggtcactgtccattttctggctgtctgggcagggccggcccaggccgcccgccagggcccctgggagcagcttgctcgggatcggagccgctttgcacgccgtatcgccctggcccaggaggagctgagcccctgcctcacccnnnnnnnnnnnnnnnnnnnnnnggcacnnnnnnnnnnnnnnnnnnnnnnnnnnntccctgccctcacccagaccttgccttcctcctctgtccctttgtccccagtccagnnnnnnnnnnnnnnnnnnnnnnnnnnnnnnnnnnnnnnnnnnnnnnnnnnnnnnnnnnnnnntcccctggacctctttgggaggcgtggctaagaccaactggtttgcctataatttattaactattttttctaagtgtgggttgtataa

SEQ ID NO: 17836 - DNA, 762 bp, Macaca Fascicularis
  misc_feature (1)...(762): n = A,T,C or G
gccacattatgatnnnctgaaggaatttttaaaaagtttaagaatcatttgtcacgtcatttttagaaatgttctacctgtatatggtaatgtccaattttaaaagtattggacatcttcagtcttaaacagttatatttagctaattggttctcacatatacttctaaaagagaaattttatgttataagagttacttgtttggattagatttattaatctcagttacctactattctgacattttaggaaggaggtaattgtttttaatgatggataaacttgtgctggtgttttggatcttatgatgctgagcatgttctgcactggtgctattgtctaatataattttatatnnnnnnnnnnnnnnnnnnnnnnnnnnttaatttagtccatatgaactgttgaccccttttgagacggcaacatacgcactcataaatcagtgtgtttagacttctcaagtatctaactcatttccaaacatgtaccatgtttataaatcttgatttctagcaacatgctatagaaaacacctgctattcaaaacacaacttctactcagtgtcatccattgctgtcgtgagagacgacatagcaatatctggtatgttgcaagctttcaagatagcctgaacttaaaaagttggtccattagnnnnnnnnnnnnnnnnnnnnnnnnnnnnnnnnnnnnctttgtgtcaagagctaaaactgtgaacctaactttctcttactggtgnnnnnnaacgaaaaataaag

SEQ ID NO: 17837 - DNA, 724 bp, Macaca Fascicularis
  misc_feature (1)...(724): n = A,T,C or G
aaaaccaacataatgtatttnnnnnnnnnnntgtggaaaaaataaatgttccanctgtagggatagggaaaaagtaaccaaaagagagaaagagaagggaatgctggtttatctttgtagattgtaatcaaatggagaaattttcaatattttagccattgttagnnnnnnnnnnnnnnnnnnnnnnnnnnnnnnnnnnnnnnnnnnnnnnnnnnnnnnnnnnnnnnnatgataggaaagcaacaaaatggggaacctgggtgactaannnnnnnnnnnnnnnncttgggaaatgtcattgacaatagatggtggggttttcccccctttagaaatgttggatattaagagatataaacacttctaactctgaaaatcttctgagaaatcccaaaattcatggtattcttggacaactgggattttctaggaagatactgaatggcctagacatcaaagttggtgtgaaccaaaatagagtcagctgacccagcatgagaccatcagtcatgctctgggttggaaaatgtttgcctgttggaattaatttaagcttaagtatatatcaacattattttattgtgcaattaaaacaataaaaattcaaggtgttttaaagttaaaaattctaaccactctaacaacaatttttgtgttattttctgtattaaaaatcttgttgcatgcatttgaggtcatcaggatgcaaaatttgtattcctga

SEQ ID NO: 17838 - DNA, 892 bp, Macaca Fascicularis
  misc_feature (1)...(892): n = A,T,C or G
cacccacttcnntcttactgcatcaccagatagggctttgnnacaaggcacaaatgattcaaatcaaggaggctacaaaagggcagcctagagggcagaatagagaaaagatagacaaaatgataagattagccatatttcattttgaatctgcagtggaaaataagcccacatttgaggtggctcatctagacctggcaagaatgtatatagaagcaggcaatcacagaaaagctgaagaaacttttcaaaaactgttatgcatgaaaccagtggtagaagaaacaatgcaagacatacatttgcagtatgctcggtttcaggaatttcaaaagaaatcagaaatcaatgcaattatccattatttaaaagccataaaaatagaacagacatcattcataagggataaaagtatcaattctttgaagaaattggttttaaagaaacttcagagaaatgcattagatctggaaagcttgagcctccttggatttgtctacaaattgannnnnnnnnnnnnnnnnnnnnnnnnnnnnnatgagcgggccctgagactnnnnnnnnnnnnnnnnnnnnnnnnnnnnnnnnnnnnttaggcacnnnnnnnnnnnnnnnnnnnacatttcatttcattttatgttaacatgtactaatcatcttttctgcttactgttttcagaaacattataattcactgtaatgatgtcattcttgaataattacatctgataaaatattagttgcagtcaacaattagtgaaacaatgtgtgtgtgcatgtaagaaagagagaaatcatttgtatgagtgctatgtagtcgagaaaaaatgttaggtaactttgtaggaaataaaatattggacttacactaaatgtttaattcattcatttt

SEQ ID NO: 17839 - DNA, 770 bp, Macaca Fascicularis
  misc_feature (1)...(770): n = A,T,C or G
catgcccagcctnnnnnnnnnnnnnnnnnnnnnnnnnnnnnnnnnnnnnnnnnnnnnnnnnnnnnnnnnnnnnnnnnnnnnnnnnnnnnnnnnnnnnnnnnnnnnnnnnnnnnnnnnnnnnnnnnnnnnnnnnnnnnnnnnnnnnnncaataacctgtcaagcacagaggagcaatttcgnnncnatttcagcagtgaagctggctggcgaggagtggttggggaggtgccgagacccgaacagnnnnnnnnnnnnnnnacaaagcatgatttgtatatctatgcagggcatggggctggtgcccgcttccttgacgggcaggctgtcctgcggctgagctgccgggcagtggccctgctgtttggctgtagcagtgcggccctggctgtgcatggaaacctggagggggctggcatcgtgctcaagtacatcatggctggttgccccttgtttctgggtaatctctgggatgtgactgatcgtgatattgaccgctacacggaagctctgctgcagggctggcttggagcaggcccgggggcccccttttgtactnnnnnnnnnnnnnnnnnnnnnnnnnnnnnnnnnnnnnnnnnnttggggctgcacctatagcctatggcttgcctgnnnnnnnnnnnnnnnnnnnnnnnnnnntcttattgatgctagaagcctcatacctgttctacctccaaggttagatttaatcnnnnnnnnnnntcttttaaagtgactttccnnnngtgttttatatgaaacatttcct

SEQ ID NO: 17840 - DNA, 137 bp, Macaca Fascicularis
  misc_feature (1)...(137): n = A,T,C or G
ttttnnnnnnnnnnnnnnnnnnnnnnnnnnntcagagttcacggagttcacggaggatgagctgccctatgacgactgtgtgtttggaggcnnngcgtctgacattatgagcgcannnngggctgaaagaacatgga

SEQ ID NO: 17841 - DNA, 742 bp, Macaca Fascicularis
  misc_feature (1)...(742): n = A,T,C or G
gccctaaagccctcctcattcnaaaccnnnnnnnnnnnnccatccagctcacgcctgacggtggacccctgagcctgcggggtgccctctcacttgaagatcaggcacagatggccgtggagttcaaatgtcgatgctaccctggctggcagggaccgtggtgtgagcagaagagcatgtggtgattggccacacattgagttgcgcaccttgagaacctaatgcactctgggtctggccagggcttcctcaaatacaggcacagtcatataagtcatggtcacagtgaagagtacactcagccactgtcacgggcatattccctgcacatgcatacttacagactagaacagtggcataaggagtttgaactacagcagacaccattcatttcatgtccatatgcatccacttggcaaggtcatagacaattcctccagagacactgagccagtctttgaactgcagcaatcacaaaggctgacattcactgagtgcctactctttgccaatcgccgtgctaagcattttatgtggacttattcattcttcacaatgagactataaggaaactgagtcacagtgagggtaaacacgttgcccaaggttgcacagcacgaaaagggagaagttgagattcaaacccaggctgtctagctctgggggtacagcccttgcactcctactgagtttatggtaaccagccctacacgacccctgagtctgctgagaggcaccagcc

SEQ ID NO: 17842 - DNA, 634 bp, Macaca Fascicularis
  misc_feature (1)...(634): n = A,T,C or G
gctgggatcnnntccgcgactggtacccgcacagccgnnncntcgaccaggccttcgggctgccccggctgcccgaggagtggtcgcagtggttgggcggcagcagctggccaggctacgtgcgccccctgccccccgccgcgatcgagagccccgcggtggccgcgcccgcctacagccgcgcgctcagccggcagctcagcagcggggtctcggagatccggcacacggcggaccgatggcgcgtgtccatggatgtcaaccacttagcccaggacgagctaacggttaagaccaaggatggnnnnnnnnnnnnnnnnngcaagcacgaggagcggcaggacgagcatggatacatctcccggtgcttcacgcggaaatacacgctgccccccggtgtggaccccacccaggtctcctcctccctgtcccctgagggcacactgacggtggaagcccccatgcccaagctagccacacagtccaaagagatcaccatcccggtcactttcgagtcgcgggcccagcttgggggcccagaagctgcaaaatctgacgagactgccgccaagtaaagccttagcccggatgcccacccctgctgccgccactggctgcgcccccccaccctcaa

SEQ ID NO: 17843 - DNA, 669 bp, Macaca Fascicularis
  misc_feature (1)...(669): n = A,T,C or G
tattctgaatgtgtgtttacataatgtacagtatatattcagaaagtantnngcttcaacatttactttctatgatgtagnnnnnnnnnnnnnnnncagcaccccaccttccccaacagatgtacagtgttctgtctccatgcaaaatctacaatgtaatatgagtgcattgtatgggtttgaaaccaaaggatgaatgaagcattcagagacttaatatttaaaaaagggatactcagtattttatattttattnnnnnnnnnnnnnnnnataaatttaataaactgtaccatgctgcnnnnnnnnnnnnnnnnnnnnnnnnnnnataaggattgggnnnnnnnnnnnnnnnnnnnnnnnnnnnnnnnnnnnnnnnnnnnnnnnnnnnnnnnnnnnnnnnnnnnnnnnnnnnnnnnnnnnnnnnnnnnnnnnnnnnnntttccatcattattaaaaaataggaacttttaggctctgaagatcatgtggaccagagcaaattaaagttcagtttgtgtcacaattcattgccagacttctttggaatgctttgtttgatgatgtatattcattctcagctttattttcagatgcttaactgggcaatgaagtctaacttcaggttgaactttctcatgcttaatctcaggctaaatgtaaatgatatt

SEQ ID NO: 17844 - DNA, 691 bp, Macaca Fascicularis
  misc_feature (1)...(691): n = A,T,C or G
gaaaatgtggttagaatgttaattggataatgtatatataagaagttaaagtatgtaaagtataacttcagccacatttttagaacactgtttaacatttttgcaaaaccttcttgtaggaaaagagagctctctacatgaagataacttgttttatatttcagattttattttaaaagccgtgtctgttaaacaagaaaaaacacaaaagaactccagattcctggttcatcattctgtattcttactcactttttcaagttatctattttgttgcataaactaattgttaannnnnnnnnnnnnnncaaatgcctgtttaataaagaactttgaccaaggctataaatgccacttacattattttcagtattgttggttatatttaaattttccttataataaagcacacttttataataaaatacatgaattattgtttttcatacttttttgcttctttaaacttttctgacttgcataatgcataattcattgaaaagcatgatagaaatgtggcatgtggaagctaacccccagggcataacatagtaagaaagtatggttctgtatggcaataggtttttaaaattattagctattcgtcatgtgtgggagaaataatctgtggtgtgttgcagatttatttggcccacttagaataaccaaaataaatctgnnnnnnnggaat

SEQ ID NO: 17845 - DNA, 755 bp, Macaca Fascicularis
  misc_feature (1)...(755): n = A,T,C or G
acagagggcccgcnnaaatttcacctcaataatctnnnnnncagaaatgctggagagtacannngcgaatactacagaaaagtgttcccccacatcccttcannnnnnnnnnnnnnnnnnnnnnngttggtgacaggacatttatctaaacctttcctccaaacccaccaaaggggtacggtgaccgcaggtggaagggtgactctgcagtgccggcagccagaccaactgtttctgcctatcatgtttgctctactgaaggcagggacgtcatctnnnnnnnnnnnnnnnngtccagcggggaaggagacggacttctccctggaggacgtgacagccggcgacgctgggaactacagctgcgtgtactaccaggcaaagtctcccttctgggcctcagaacgcagtgattggcttgagatannnnnnnnnnntcccccaggtaccacgtcaagcaactacaccctgggtaacttcatacgactgggtctggctgccataattttgattatcatgggagctttcctggtggaggcctggcacagccgaaaggtgtctccgggtggatctgtcagaggccttcaaaccagagtgactccatcttgaaccggggctgggtaaactgaggctgctacctgctggactgcattcccagggggttaagactttctaagtcacaggatgagacaggnnnnnnnnnnnnnnnnacaaagaccccgctgattaaaaaaaaaagagagatgcaataaagaagc

SEQ ID NO: 17846 - DNA, 759 bp, Macaca Fascicularis
  misc_feature (1)...(759): n = A,T,C or G
tgcaatgaacataatttcaaagaaaaaaaaagaaatcaaagtggattggcctgcctaccaattctgctnnnnnatgtcagaatctngagatagagaagcagaggcggatagaacggataaagcagaagcgggcccagttgcaagaacttcttntannnnnnnnnnnnnnnaaaaacctggtacagagaaatcgacaaaatgagcagcaaaaccagggcccgccagctctgaactctaccattcagctgccattcataatcatcaatacaagcagaaaaacagtcatagattgcagcatctccagtgacaagtttgagtatcttttcaattttgacaacacctttgagatccatgatgacatagaagtactaaaacggatgggannnnnnnnnnnnnnnnngtcaggcaaatgctctctggaggatctaaaacttgcgaaatccctggtgccaaaggctttagaaggttatatcacagatatctccacaggaccttcttggttaaatcagggactacttctgaactctacccaatcagtttcaaatttagacctgaatactggtgccaccttaccccagtcaagtgtaaaccaagggttatgcttggatgcagaagtggccttnnnnnnnnnnnnnnnnnnnnnnnnnnncagtcaccagtccagcagtgcagcctctcactgctccgagtcccgaggcgagaccccctgttcgttcaatgatgaagatgaggaagatgatgaggaggattcctcctccc

SEQ ID NO: 17847 - DNA, 776 bp, Macaca Fascicularis
  misc_feature (1)...(776): n = A,T,C or G
cagacccggatctgggagtgtggcatcaccgccaagggctgtgnnnnnnnnnnnnntgtcctcaggaccaaggagagcctgaaggagctcagcctggccggcaacgagctgggggacgagggtgcccggctgctgtgtgagacgnnnnnnnnnnnnnnnnnnnnnnnnnnnnnnnnnnnnnnnnnnnnnnnnnnnnnnnnnnccgcctgctgctcccacttcagctcggtnnnnnnnncagaataagnnnncctggagctgcagataagcaacaacaggctgggggacgcgggcgtgcaggaactctgcaagggcttgggccagcccggctccgtgctgcgggtgctctggcttggcgactgtgatatgagtgacagcagctgcagcagccnnnnnnnnnnnnnnnnnnnnnnnnnnnnnnnnnnnnnnnnnnnnctcagcaacaactgcctgggggacgcgnnnnnnnnnnnnnnnnnnnnnnnnnnnnnnnnnnnnnnnnnnnnnnnnnnnnnnnnnnnnnnnnnnnnnnnnnnnnnnnnnnnnncgatggaagaccggctgcaggccctggaggaggannnnnnnnnnnnnnnnnnnnnnnnnngaggcgcttcctgccgctgctctccctggacgaccggcttcgaggcacccctggggctgaccagcccctgccacgtcctcgccctgcatatcctaggttgaagagaaacgctcagatccgcttatttttgccagtatattttggacactttataaaccattaaagcact

SEQ ID NO: 17848 - DNA, 996 bp, Macaca Fascicularis
  misc_feature (1)...(996): n = A,T,C or G
gctcatacgcnnngactgacaannngaggncactttccagcaaaactccnnnctggatgaagaaactgtctccccgggccatccacctgaccatgccccgactggtgctgcgaggatcttatgacctgcaggacctgcttgcccaggctgagctgcccgccattctgggcaccgagctgaacctgcaaaaattgagcaatgacgacctcagggtggggaaggtgctgaacagcattttttttgaactcgaagcggatgagagagagcccacagagtctacccgacagctgaacaggcctgagttcttggaggtgaccctggaccgcccattcctgtttgctgtgtatgatcaaagtgccactgccctgcacttcctgggccgtgtggccaacccgctgagcccagcatgaggccagggccccagaacacnnnnnnnnnnnnggcctctgcccctggcttttgaggcgaaggccagcggcagatagtaactctggacaaaccagcgatttgtcacccccagtctcccaccttttcttctaatgagtcaacttcgagctggaaagcagtcgtttctccttggtctaagtggtgctgcgtggagtgagcagtaagaaannntnnnnnnnnnnnatgcgcctcccaggttgctgggtttattttagagaatgggggtggggagnnnnnnnnnnnnnnntagcgcgggaccaccgttccaaaaagaattccaaccgaccagcttgnnnnnnnaacaaaaaagtgttcccttttcaagttgagaacaaaaattgggttttaaaattaaagtatacatttttgcattgccttcggtttgtatttagtgtcttgaatgtaagaacatgacctccgtgtagtgtctacagtagcttagttttttccacagatgcttgtgatttttttggacaacacgtgaaagatgcaagcatctgaatttctgtttgaatnnnnnnnnnnnnnnnnnnnnnnnnnnnnnnnngc

SEQ ID NO: 17849 - DNA, 798 bp, Macaca Fascicularis
  misc_feature (1)...(798): n = A,T,C or G
tctaaactcattatgggttctgtgtttgagtaatcnnnnncaaggttaaacctgtaggcagttgccccttttcacgaagtgcacagtgggaatcgagaatcgatggggttaattttggagcagtggcttataccattcacctctttttttgtgacttatttcacaggtaatgagaccttaataacaaataggtgtaaaaaaattttcacattgaaatgatacaaacatttgatgtaataaaaccttgttggcttgatattttaaggaattgaaacctagcagtcttaatggagagacaagaattggtctccagctgcctttgatagattcgggtgcaggtggagcaggagccatatacctggagggattgtgctttgtcacaccaaagaggatttttttttcttcaaactcgtatgttgcctaggtttcaaattatttgccgcaaggctgatttgctttcattaactggaattctgtaggagatactggttacctaagctaagttgcactcagcatactcagagtcaagctaacgaggttctattataaagcttctaattttaatctgagggaaaacatgttcagggcttctagaacactaaaaattttggcttagaccagtgttcagtctggtgccaaacttccagtggaattcaaattcaataatctgaactttgttcacaggttatcctaatagagtaattcttcactttgctctattgaactgtcttaaggatttgtttaaacagctaagttacttgattaaaataatgataaaattgtactttgtctctgctt

SEQ ID NO: 17850 - DNA, 686 bp, Macaca Fascicularis
  misc_feature (1)...(686): n = A,T,C or G
gccggggcgcgcctgcctgccctgcttgacgagcagcaggtgaacgtgctgctanacgacatgaacggctgctactcacgcctcaaggagctggtgcccaccctgccccagaaccgcaaagtgagcaaggtggagatcctccagcacgtcattgactacatcagggacctgcagttggagctgaattcggaatccgaagtcgggacccccgggggccgagggttgccggtccgtgctccactaagcaccctcaacggcgagatcagcgccctgacggccgaggcggcatgcgttcctacggacgatcgcatcttgtgtcgctgaagcgcattccccagggatcggcgcaccccagccatccgggggcaagaggaattaagtgctctccccaacgcgcctcgccggatctgggggcgaactagacagatcggcggccactgcgcccttacagcatccagcctagggctgagggactggagaggagagggcgaccctctctccacacctactagtcaccggagactttagggggtgggattccactcgtgtgtttctattttttgaaaagcagacattttaaaaaatggtcacgtttggtgcttctcagatttctgaggaaattgctttgtattgtatattannnnnnnnnnnnnnnnngaatattgttttacaatagttatgtgggg

SEQ ID NO: 17851 - DNA, 758 bp, Macaca Fascicularis
  misc_feature (1)...(758): n = A,T,C or G
tgtttacagcacctaagcttagcctccagggtcccaccnnncccagctgatggtgagctgacagtgtccacaggttgcaggaccatttgagattggaagctacattcaaagacactcccaccaggctctttctcccttttcctcttgctcactgccctggaatcaacaggctggttactggttagatttttctgaaacaggaggtaaaatttttctttggcagaggcccctaagcaagggaggggtgttggagagccagtgcccttnnnnnnnnnnnnnnnnnnnnnttaccaagttgccttttgccactgtagctgaccaggggactaggttgtagaggtgggaaggcccccgctgggctgatcttgtgccattcttgaccgtggacctgcttggttgagggagagggccagaccagagtgccaggagctaatggagccaggcctgacccctacaagtggtccaaaggccttcagcctagatggtgcaaagttggtgccagcctgtcttcaccggcaccctcacctgtgacaccnnnnnnnnnnnnnnnnnnnnnnnnnnnacagtattctcccccacaccatcctatgaccaaaggcccctgccaggtgtgggccgcagcagcaggtatgtgtgaaagcaatgtagcnnnnnnnnnnnnnnnnnnnnnnnnnccaactcacctcccttctcttagcccaagcctgtccctcgcacagcctcgcacaaactacattgcctggtggggcccagtgtac

SEQ ID NO: 17852 - DNA, 829 bp, Macaca Fascicularis
  misc_feature (1)...(829): n = A,T,C or G
ccagcttaagtctggtgctcatnnctgcagggtttgtngctnnnnnnnnncccannnnnnnnnnnnnnnncagatgcacagagcannnnnncaacgagcatcagaccctagactggagatgggacataagcagacttgtgcacaaccannnnnnnnnnnnnnnataattccagaccacaacttcctttttccagaatttgaaattgtaatagaaacagaagaggagattatgcctgaggttgtggaaaaggaagattactcagagattacagggagcatgggtgaagcacttgaggaagaactggattnnnnnnnnnnnnnnnaatccagggaagatacaatttttcagaagtttaaaactcagatagcccttgaaccagaacagattcttagatatggcagaggtattgcccccatctggatttctggtgaaaatnnnnnnnnnnnnnnnnnnnnnnnnnnnnnnnnnnnnggtgccaagagaatactggaattccaggtcatgcctcagctcctaaactacctgaaggctgacagactgggcaagnnnnnnnnnnnnnnnnnnnnnnnnntcttcacctgtgctgagagctgcagcttgggtactggctatacagaagaatttgtgtggaagcaggatgtaacagctacaccgtaaaggnnnnnnnnnnnnnnnnaaaatgttaatgctcttttataccttgcaattccatttctgggattttatcctaaggaaatacttataccaaaaataaaggtgcagagannnnnnnnnnnnnnnnnnnnagtgtctacatattactgaaacaaaagtgtcnnnntgacagag

SEQ ID NO: 17853 - DNA, 738 bp, Macaca Fascicularis
  misc_feature (1)...(738): n = A,T,C or G
atggccccagaaggctataattagatacnnnnntgtnnnnnnnnnnnnnntaagggtcacggacaaaactttcttgttggtaatcagctgagccttgcagatgtgattttactccaaaccattttagctctagaagagaaaattcctaatatcctgtctgcatttcctttcctccaggagtacacagtgaaactaagtaatatccctacaattaagagatnnnnnnnnnnnnnnnnnnnnaagaagcctccccctgatgaaatttatgtgagaaccgtctacaacatctttaagccataaaacaacacannnnnnnnnnnnnnnnnnnnnnnnnntagagatggttctgtccacagtcatgtcttaatggatcccagctctgtcatggtgctgtgtattacgttgggtcctaagtttggtcttttgtgtcaaagagatcatctctttctagaaatatcaaccttttttgtccagtaaataattgttaggggatcttttttggaaaacttttttggcgagtctggtatttaagttagatctnnnnnnnntactaatgtcctgtagccagttcatcctcataatgagaatggnnnnnnnnnnnnnnnnnnnnnnnngtgtgtttctgctctccttatcctgttctcttatccttatcccctccagtctttgcctaatttttagtgtttaataacaaccaaatgtctagtgaatgactctcatctgaactgtaataaataa

SEQ ID NO: 17854 - DNA, 735 bp, Macaca Fascicularis
  misc_feature (1)...(735): n = A,T,C or G
gccatccgggcaactcannctggacagtcagcttgcggaatcggcagggccagcatttctgtggcgggtctctagtgaaggaacagtggatactgactgcccggcagtgcttctcctcctgccatatgcctctcatgggctatgaggtatggttgggcaccctgttccagaacccacagcatggagagccaggcctacagcgggtcccagtagccaagatggtgtgtgggccctcaggctcnnnnnnnnnnnnnnnnnagctggagagatctgtgaccctgaaccagcgtgtgnnnnnnnnnngcctgccccctgaatggnnnnnnnnnnnnnnnnnnnnnnnnnnnnnnnnnnnnggctggggtgagaccaaaggtacaggtaatgacacagtcctaaatgtggccttgctgaacgtcatctccaaccaggagtgtaacatcaagcaccgaggacgtgtgcgggagagcgagatgtgcactgatggactgttggcccctgtgggggcctgtgagggtgactacgggggcccacttgcctgctttacccacaactgctgggtcctggaaggaattataatccccnnnnnnnnnnnnnnnnggtcccgctnnnnnnnnnnnnnnnnnngtgtctctgtgtttgtggactggattcacaaggtcatgagactggcttaggcccagccttgaccccatatgccttgggaaggacaaaacttcttgtcagacataaagc

SEQ ID NO: 17855 - DNA, 742 bp, Macaca Fascicularis
  misc_feature (1)...(742): n = A,T,C or G
ggcacagcaactgcagggtagcccgagncnnttgggaccctaacttnnnnnnnnnnnnnnnnnnnnnnnnnnnnnctggttgtgggggccgcaaggagggacccacaagctgctggcggagtcgctgcttcaggtctggcttgagccactccacagccacctgctctccacagaggtgtgactgccctgcaggaaaaaggtaaagataagggcaggtccaaaccctgggcccaagcctccaggttgtnnnnnnnnnnnnnnnnncagtactgtaatgtgtagccttcgcatttcctggtagtgtgaccatgggtaagaaaagacaagccttcaggctccnnnnnnnnnnnnnnnngtataacacaactgctaccttacaagtttccttggagaagtactggttnnnnnnnnnnttgtctgcctcataaccatcatnnnnnnnnnnnnnnnnnnnnnnnnnnnnnnnnnnnnnnnnnnnnnnnnnnnnnnnnnnnnnnnnnnnnnnnnnnnnnnnnnnnnnnnnnnnnnnnnnnnnnnnnnactatagtaaaaggctcagttgggttcccttgagcaaannnnnnnnnnnnnnnnnnnnnnnnnnnnncgagggtcctgtgcctattatgcggtgtgggtgtaggggaatgttgaggattaagtcaggagataatgctcgggaagtgttaccaatttaggtaagtggtggtggtagcannnnnnnnnnnnnnnnnnnnnnnna

SEQ ID NO: 17856 - DNA, 715 bp, Macaca Fascicularis
  misc_feature (1)...(715): n = A,T,C or G
cctccctttcaacatggcgctgtcaatgtacnnnnnagccacaggacattacaatccgttctttccaggcaaattggtcacannnnnnnctacagctccaaatatctcctggtctgacctcagtgcccnnnnnnnnnnnnnnnnnnnnnnnnnnnnnnntggtcagatatatggctgtgataatccatggacagggggcattttcctgggagccatcctactctcctccccactcatgtgcctgcatgctgcaatcggatcattgctgggcacagcagcaggactcagtctttcagccccatttgaggacatctactttggactctnnnnnnnnnnnnnnnctctggcctgcattgcaatgggaggaatgttcgtggcgctcacctggcaaacccacctcctggctcttggctgcgccctgttcacggcctatcttggagtcggcatggcaaacgnnnnnnnnnnnnnnnnnnnnnnnnnnngtacctggcccttttgtttggccacgctattgttcctcatgatgaccacaaaaaattccagcatctacaagatgcccctcagtaaagnnnnnnnnnnnnnnnnnnnnnnnnnnnnnnnnnnnnnnnnnnnnnnnnnnnnnnnnnnnnnnnnnnnnnnnnnacaagccccnnnnnnnnnnnnnnnnnnnnnnnccttctgcctgactgctccagctaacttccagggtctcagc

SEQ ID NO: 17857 - DNA, 745 bp, Macaca Fascicularis
  misc_feature (1)...(745): n = A,T,C or G
tgcagagcaccaatatgnnnnntgggaaggtgacagaggagactgnntacannngcaccgggcacccgctcaagtcagatatcgccaacatcctggactggatgttgaatcaagatttcaccacagcctacagaaatattacannnnnnnnnnnnnnnaaggggttggcactgcatgatatcctgacagagatacacttgtttgtgcatagagtnnnnnnnnnnnnnnnnnnnnnnnnnnnnnnnnnnnnnnnnnnnnnnnnnnnnnnnnnnnnnnnnnnnnnnnnnnnnnnnnnnnnnnnnnnnnngagctccctcattgctgcatttcaagtcaccagagacctgattgttgcagaggcctagatgctccgagggctgttcacaattctcagggctctgcagtgacggaagaacagagnnnnnnnnnnnnnnnnnnnnnagcctggggtcgtgggatgaaccagtcactctaaatcttggaaaaactcctttccaggacaggatgggcaggcatttttaaaagtaccatttttgtggtggtttggagcagagatgtacaaaataattttaatgtataactcatactgcccatcttttataggnnnnnnnnnnnnnnnnntttattttaaagttataaggcttttaccttttagttgcttggatgacagggaattagcctaccccattttggtctggaannnnnnnnnnncaaatctaatatggtccaaagtgtcttcctactc

SEQ ID NO: 17858 - DNA, 772 bp, Macaca Fascicularis
  misc_feature (1)...(772): n = A,T,C or G
aaaaagtcacagagatgnnnnnnnnnnnnnnnnnnnnnnnnnnnnnnnnnnnnnnnnnnnnngatgatgaagcggaaggaagcactacagttcgtaaggagatcatcaggagtaagatcagnnnnnnnnngaagatggcacgggtcttttcaattcttcggcaagaaagtgagagtgtgctgactctcaagggcctgactcccacaggcacgctccctctgggtgtcctctcaggaggcaagcagactatcgagacggccacagtagaagcggtagaggccnnnnnnnnnnnnnnnnnnnnnnnnnnnnnnnnnnnnnnnnnnnnnnnnnnnnnnnnnnnnnnnnnnnnnnnnnnnnnnnnnnnnnnnnnnnnnnnaaaagacagcatacacgcggatgggccagtgaaatctgtagcctcagcacactcacacgctgcgcacaggagcgaccaaggcaagaaagcccagtaatggcttcgagtcctgccgtggctcggtggatctgaaactcaagaacaaattttatttatttattattggaaaatgaaaagcaactcaaacaatttcaacctggaggtgcatttatannnnnnnnnnnnnnnnttctgtaaaaaggtgactgttttataaattcttttaatttatgttcaatatatataaaaagtgcatctgttttgtttttcccttttttctccataattttaaaaaatgaatctgattgttgtcaacatatttgtgaagtcttgtgctataaaggggaacttccccta

SEQ ID NO: 17859 - DNA, 663 bp, Macaca Fascicularis
  misc_feature (1)...(663): n = A,T,C or G
agggcacctannnctgtcaggccaggagcactcgaggggaggtcacccgcgaggtgaccgtgaatgtgctctccccccggtatgaggtggtcatcatccctgtggtagcagccgcagtcatcctgggtactgcaggcgtcgccacgtacctctacaaccgccagcggaagatcaggaaatacagactacaacaggctcaaaacggcacccccatgaaaccaaacacgcaagccacgcctccctgaacatatcccaggacagggcctcttcctcggccctcccatatcggtggcagtggtgccacactgaacagagtagaagacgtatgccatgcagctacacccactggccctgggatgccagaggacagggcattgtcatcagtcagatgcagacagcatttggggccatggtacctgcacctaaaacaataggccacgcatctgatctgtagtcacacgactaagccaagaggaaggagcaagactcgaggggaagtggtgggggagacatacccccaccatgaggacatacagccgggaaatgctgaaacttgctgcctgctgggtatgctgagaccccacagacantannngannnnaanntggccctccnnnagacatgtgtagcatcaaaacacaaaggcccacacttcctgatgga

SEQ ID NO: 17860 - DNA, 929 bp, Macaca Fascicularis
  misc_feature (1)...(929): n = A,T,C or G
tatgcagccnnnnnaagcaaggcacctgccaacaatccccgggcagggtaactccaagaatgttctgctggcatgnnntatgaacatgtacccgcacggacgcagtggacgaacggtgcaggagatctgggaagatttctccatgagcttcacacccnnnnnnnnnnnnnnnnnnnnnnnngccaagcacatcccaggcttccgtgacctttctcagcacnnnnnnnnnnnnnnnnntaaggctggcacttttgaggtgctgatggtgcgctttgcatcattgtttaacgtcaaggaccagacagtgatgttcctaagccgcaccacctacagcctgcaggagcttggtgccatgggcatgggagacctgctcaatgccatgttcgacttcagcgagaagctcaactccctggcgcttaccgaggaggagctgggcctcttcaccgcggtggtgcttgtctctgcagaccgctcgggcatggagaattccgcttcggtggagcagctccaggagacgctgctgcgggctcttcgggctnnnnnnnnnnnnnnnnnnnnnnnggagacttcccgcttcaccaagctgctgctcaagctgccggacctgcggaccctgaacaacatgcattccgagaagctgctgtccttccgggtggacgcccagtgacccgcccggccggccttctgccgctgcccccttgtacagaatcgaactctgcacttctctctcctttacgagacgaaaaggaaaagcaaaccagaatcttatttatattgttataaaatattccaagatgagcctctggccccctgagccttcttgtaaatacctgcctccctcccccatcaccgaacttccccccctcccctatttaaaccactctctctcccccacagccctcccctggccccctgatttgttctgttcc

SEQ ID NO: 17861 - DNA, 689 bp, Macaca Fascicularis
  misc_feature (1)...(689): n = A,T,C or G
tgctgggtggtgtcggccgctcactgcttctcccacagtcccnncagggaaagcgtctcagtggtgctgggccagcacttcttcaaccgcacgacggacgtgacacagaccttcggcatcgagaagtacatcccgtacactctgtactcagtattcagccccagcgaccacgaccttgtcctgatccggctgaagaagaaaggggaccgctgtgccacacgctcacagttcgtgcagcccatctgcctgcccgagcccggcagcaccttccctgccggacacaagtgccagattgcaggctggggccacttggacgagaacgtgagcggctactccagctccctgcgggaggccctggtccccctggtcgccgaccacaagtgcagcaaccctgacgtctatggcgccgacatcagccccaacatgctctgtgccggctacttcgactgcaagtccgacgcctgccagggggactcaggggggcccnnnnnnnnnnnnnnnnnnnnnnnnnnnnnnnnnnnnnnnnnnnnnnnnnnnnnnnnnngctgcgggcggctccacaagccgggggtctacacccgtgtggccaactatgtggactggatcaacgaccggatacggcctcccaggcggcttgtggctccctcctgaccctccagcgggacatcctggttcccaccgtccctgct

SEQ ID NO: 17862 - DNA, 1208 bp, Macaca Fascicularis
  misc_feature (1)...(1208): n = A,T,C or G
gaaacgggcacagaagagatcagtgggatctgatgagtaaatgttcctttgtgcaacaattcggtctttacttaacctgccctaatatttttcggcctgatgggaattagtgcagagaagccatatcaccatagaaggcaactactacttatgtgtggactgagcaatcagagtctgtggcgataatattgcnnnnnnnnnnnnnnnttcatttttctaaagtaacaaatttggtttttttttaaaccattaaaatctatgtgtgtgcgtgtgtatgtatgtgnnnnnnnnnnnnnnnnagaatcattgttgaactacctgaaacaagtctttagaatactaaatataatgcagttgtctcttcctttttgacattttctgatttttcccccaaacctcagttaatatttacccactatgattattgatgtcctgccttgaacagttttaaagaaaacaattgttggaatagctcaaatttcaattgatggcacaaattaacatttcgttgttgttgctgtannnnnnnnnnnnnnnnnnnnnnnnnnnnnnnnnnnnnnnnnnntagcaatagaattgtttcggtattttgctgctgtttaatgcacaccttcannnnnnnnnnnnnnnnnnncaaggaatttggggatctctctggcaacaaattgtgaacacaaaatttctgctgactttaatatatgaaacctgatcctacccccttttttaacaaaaagaaactagtatatttgtgaaaactgtgttgtgttgtctgttgttgctctagttctgacccagagatagctctggagtgattttagacctactcactcagttgtgtgtaggtttttttgttttgttttgagagaatttttctctccttaataaaagcatcctttttaaagaaaagttgccttggtccacagactaagcagaaaatcaagttatcaggacagagatatttcccaattaactcctaatcaatgaagaaagtgagttggatatttttaaagcagttaactaattgtttcttatctaatcttttgggagttttgcttgttgatataacctttttagttaatctgaaagattccagaaattgttcttaagtgcttaagactgaaaccaaaattaaattgtacttcataaaatcctcttacagagttactcttgccctagattgtaaattaagtctggcattattgtcagac

SEQ ID NO: 17863 - DNA, 644 bp, Macaca Fascicularis
  misc_feature (1)...(644): n = A,T,C or G
tggagttgcagtggatctacagatacatgatattttggtataactagaatcttgatttctttcataaacnnctgccatgttctatttcttcccttaatgtttttttcttccctactgttttgtcctccctttgctttggaaggatattgctgcatatcgagctaaaggaaagcnnnnnnnnnnnnnnnnnnnagttgtcaaggctgaaaaaagcaagaaaaagaaggaagaggaggaagatgaggaagatgaagaggatgaggaggaggaggaagatgaagaagatgaagatgaagaagaagatgatgatgatgaataagttggnnnnnnnnnnnngtttttttttcttgtctataaagcatttaacccccctgtacacaactcactccttttaaagaaaaaaattgaaatgtaaggctgtgtaagatttgtttttaaactgtacagtgtctttttttgtatagttaacacactaccgaatgtgtctttagatagccctgtcctggtggtattttcaatagccactaaccttgcctggtacagtatgggggttgtaaattggcatggaaatttaaagcaggttcttgttggtgcacagcacaaattagttatatatggggatggtagttttttcatcttcagtt

SEQ ID NO: 17864 - DNA, 771 bp, Macaca Fascicularis
  misc_feature (1)...(771): n = A,T,C or G
aggaacacacgtggtccattcgctttattgggtgtgtgtagtgttgtcttgacatctcctaaggaactggggggcacgtttgacactcatgaggtcagaacaggtctggtgggtagggggaggggtcccagggtggtgaatacccacagcacagccccccaccaaaagagaaaactgggggagaggagcccggcaggccagactctgacccccatggtccgcacagggaaacccccaacagcggcctcggcccaccgcggcagagccgagggactggcaggcctggccacctcccattgcccgatcagcctgctctagggtgtcatctggccccctcttcacaactgacaactgtggttgggggtgaatttaaaaaaaaggcgagggggttcaggagggtgagtggtgagttcacagggccacgagacaccacggctgagtggggaaagggctatatgtacaggatgggcagggcttggggtgggcaggggagcccgggcccctgggggacatcttcgataaataaataaatagctacaataataaataagggtgacgggctaagtcaggagtaggggtcttgtgcccatggctggtaggggccaggtcaggcccatgtatntgggggaaggtggggaagacgggaaagaggggaaagggggtggggtggctctcagcaggcgcagtcctggtgaggtggcacctgctggtcactgagctgtgggccctgcttggcgcctgtgacnnnnnnnnnnnnnnnnnnnnnnnnnt

SEQ ID NO: 17865 - DNA, 770 bp, Macaca Fascicularis
  misc_feature (1)...(770): n = A,T,C or G
gcgggagatgtgccatcaagctcaagttnntnnaagaaaacaagatcaaggtgatgcacaagcagctgctgctcttccacaatgccgtgtccgcctactttgnnnnnnnnnnnnnnnnnnnnnnnnnnnnnnnnnnnnagttcaacatcaagcttcggcctccaggagctgagaaaccctcctggctagaggagcagtgagctgctcccagcccaccttggctatcaagaaggacattgggaagggcagccccagggtgtaggagattggacatgggacatcccttgtcacttgccctctggcttgggctcctttttctggctggggcctgacaccagttttgcccacattgctatggtgggaagagggcctggaggcccagaagctgttgccctgtctnnnnnnnnnnnnnnnnnnnnnnnnnnnnnnntcttttccttccactnnnnnnnnnnnnnnnnnnnnnnnnnnnnnnnnnnnnnnnnnnnnnnnnncttcaggctggggtgtgccccctgaccaatggcagagcctcaaaatgccctgtcagccaatggcagctcttctcagactcccctgggccaatgatgttgcgtctaataccctttgtctctcctctatgcgtggccattgcagagaaggggactgggaccaaaggggtggggataatggggagccccattgctggccttgcatctgaataggcctaccctcacccacccacccagtttaattgtgcttagagcccaagaagatgngatctagcacta

SEQ ID NO: 17866 - DNA, 703 bp, Macaca Fascicularis
  misc_feature (1)...(703): n = A,T,C or G
caannnnnngtcttgnnnnntttcccttnnntcactttctgttnnngttttctgtttactttaaggggtgtgtgtttctattcccttcctacactttctgtttctatttctgtttatttcaagggggtgtctgtttttttcccttcctccctctccgcagccctccaacgcttggccttgactttgagattccagaccctcagatcctctcttcctctgctcactgcaggccctggtgctgcccagcccccgcccttnnnnnnnnnnnnnnnnnnccgtgactcccgaccactggctggaccccagcgccgtgtgggaggtgaagtgtgctgacctctccctctcccccatctaccctgctgcgcggggcctggtggannnnnnnnaggggatctcccttcgcttccctcggtttattcgagtccgtgaagacaagcagccggagcaggccaccaccagtgcacaggtggcctgtttgtaccggaagcaaagtcagattcagaaccaacaaggcgaggactcaggctctgaccctgaagatacctactaagtccttgccctcctagggcctgggtacagggcatgagttggacggannnnnnnnnnnnnnnnnnnnnnnnnnnnnnnnnnnnnnnnnnnnnnnnnnnnnnntttnnnnnnnnnnnnggaggggtgtgtgtgtgaggggggtggcttacacctg

SEQ ID NO: 17867 - DNA, 805 bp, Macaca Fascicularis
  misc_feature (1)...(805): n = A,T,C or G
tggaaatggagaaggaaaagcacaagtgcagagcgctgtacacaatggacggtatcaccgtgactgtggccgacctgttctttgcggggacagagaccaccagcaccactctgagatatgggctnnngattctcatgaaataccctgagatcgaagagaagctccatgaagaaattgacagggtgattgggccaagccgaatccccgccatcaaggataggcaagagatgccctatatggatgctgtggtgcatgagattcagnnnttcatcaccctcgtgccctccaacctgccccatgaagcaacccgagacaccattttcagaggatacatcatccccaagggcacggtcatagtgccaactctggactctgttttgtatgacaaccaagaatttcctgatccagaaaagtttaagccagaacacttcctggatgaaagtgggaagttcaagtacagtgactatttcaagccattttccgcaggaaaacgagtgtgtgctggagaaggcttggctcgcatggagttgtttctattgttgtcnnnnnnnnnnnnnnnnnttaatttgaagcctcttgttgacccaaaggatatcgacatcagtcctgtaaatattgggtttgggtgtatcccaccacgtttcaaactctgtgtcattccccgttcatgagtgtgaggaggacccccagaatcccctgctttcaaacaagttttcaaatggttttaggtctggcttcctcaaaccgcattctttctttgcatatgaatattgaaaataaatattttcccagaatataaataaat

SEQ ID NO: 17868 - DNA, 727 bp, Macaca Fascicularis
  misc_feature (1)...(727): n = A,T,C or G
cgggatannnnagaaagannnnnnacaatttggataaaagaaggaagtttaaaatatttgaagaaatacatttcattaacctgcaaaattaaacttatattaaatttattccagaacaatactggatcagtaacgtagaactgcatttctatttcttccttaactggaatttagatcttaattagctataggtctctgatcctctatcaaaagatttttgttcatttcatttgttgttgttttgttttgagaacttacacttattgcaaaatctgacctaaacttattttggcagcaaaaactgaactgaatagactgtgaagccatttagttcaatttattccacttagagtgaatattcctgtgttctggtccgggagtactgttccaattctgatgaggatattacatattttgcaatatattattgattacttctctaaaagccaagaaattctaaattctgaaactcatctgcccctaaatatttcggatatgggattatgggcttgtaaatctcagagaataaaatagtcaaagcctctagccaagatgaaattaatatcttgatatttggaagacagctaaatcaagaatgaactggaatgaacatcagtatgtaatatcgcctcttaaaatacttttagaaactatgctgggataaatgatagtaacaaggcaaagcatacttgatttaaaaaaaatctttactagtagtaaaataaaa

SEQ ID NO: 17869 - DNA, 644 bp, Macaca Fascicularis
  misc_feature (1)...(644): n = A,T,C or G
tggaggaggnnnnnnnnnnnctgcgacccctcctgtctcagcttggggggaactctgtctcccagcctggctgcacttgaggtcccnnnccaggaaggtgagtgggggatctgggggccagggcactgtcctgaaaggagggtccccctccacctcgtgtttctcatctctgtgtctctctttctgataatctgtttctatctctgtgcctgcctgcctctccccacctccccttctctgtccgctctctctgtcttgtctgtgtgtctgtctctccctgtctctctctccatctccccatctcccgtcttctcctacatcccccaggccttttgcaagaaggagaggaatgggggagaggacgtgagggaccacccccacccacacannnnnnnnnnnnnnncacaccctgagggcctgaggagagggagctgtgggccacgcctgggaggggcccagctggggtcnnnnnnnnnnnnngagcctcggccatctctccctcctgccctctgcttgggggactcagggcttcattccggagggcaccacggtgacccgggccatctcagtattgcctgtgggggccacccctccactcctcacccccaagtgccttnnnnnnnnnnnnnnnnnctgaatggagg

SEQ ID NO: 17870 - DNA, 701 bp, Macaca Fascicularis
  misc_feature (1)...(701): n = A,T,C or G
agatgaaactgaattccgagataaattatctccaatcaacattagtttgaattacagtttggacgaatccacctttaagnnnnnnnnnnnnnnnnnnccaatattgaactactacagggaaaatgttgttagtgaacaggctcacattctggtggactgtggagaagacaatctgtgtgttcctgacttgaagctgtcagctagaccagataagcatcaggtaatcnnnnnnnnnnnnnnnnnnnnnnnnnnnataataaatgcaagaaatgaaggggaaggagcatatgaagctgaactctttgtaatgataccagaagaggcagattatgttgggatcgaacgcaacaacaagggatttcgaccactgagctggaacagatggaaagctctccggttaccactcagcaactcagcacctagcagcaacgacaaattgggcaggaaattgccagagtannnnnnnnnnnnnttacagcctacacagagtgaatcgtctcaggccacaaacacannnnnnnnnnnnnnnttctannnnnnnnnnnnnnnnnnnnnnnnnnnntgtcgtttagttgcaacaaatctatgcagactttgtttttactacagatatttttttaaatactttttatttgaatttcaaaagaaatgcaatgtaagttaaagactttaaaaataaccaacttaggacaaagatttta

SEQ ID NO: 17871 - DNA, 730 bp, Macaca Fascicularis
  misc_feature (1)...(730): n = A,T,C or G
caaagattggtgctttttgcatgtttgcaannnnnnnnnnnnnnnnnnnnnnnnnngccaatcagataccaaccgttaataatctacatgtcacagcactcaccactgaagagaccttaactatgctttatcaggtgaagaaaggtgtctgtgatcaaagttttgggattcatgttgcagagcttgctaatttccctaagcatgtaatagagtgtgctaaacagaaagccctggaactcgaagagtttcagtatattggagaatcacaaggatatgatatggaaccagcagcaaagaagtgctatctggaaagagagcaaggtgaaaaaattattcaggagttcctgtccaaggtgaaacaaatgccctttactgaaatgtcagaagaaaacatcacaataaagttaaaacagctaaaagctgaagtaatagcaaagaataatagctttgtaaatgaaatcatttcacgaataaaagttactacgtgaaaaatcccagtaatggaatgaaggtaatattgataagctaattgtctgtgatacttttatattgttttatattaattctttttccatagtgttaactgtcagtgcnnnnnnnnnnnnnnnnnnnnnnnnnnnnnnnnnnnnnnnnnnnnnnnnnnnnnnnnnnnagatctttattttgaaaaaagagctgtaactgaggactgtttgcaattgacatacggcaataataagtgatgtgctga

SEQ ID NO: 17872 - DNA, 1218 bp, Macaca Fascicularis
  misc_feature (1)...(1218): n = A,T,C or G
tcaatgtaggtaggcccagagtcttacannnncgatcttacatgcaattataaaacnnnnnnnnnnnnnnnnnnnnatttaaagcctcatgtcataggtgacattctaaaatcccattaaagccacttgagtgttaaataaggatatacatgcacatcagctcaatgtctttgagtattaattttatgtaagcattctatttaacatgaatataagacaaatcatgaacatatctatagaccttggataaactggattgaccaattgtatgttcacggtgactttgttgttggtgggaaagggattggggtggggcagggtggcttaatgnnnnnnnnnnnnnnnnnnnnggacttctggctccctgctatattcccattgctctgaatggttgattgaagggtcaggaaactagattttatggctttagttcactgtgattgtacatttatacttggcccatgtgctggccacatctgaacacagctggtgcttatgccgaattatttgtgatgagtaaatatttagtttctttttcttcatatttataatgttgatctggcatcctcaggctgcagcttaattagcttataaattactcatctctgtctttaccagcaggctctgtattgttgatatttgtgacttgttttgcttttccattggtggaattgaagtaattagtttttaattacataagatgcctgtttgctagttggtggaagatagaagttcatattgaagcagttatatttgtactgtagttcaataaaagaaaaatgaagtattctgtagctatatttttcatagagctcatgagcatttactgtacttgctggatcttgccaagatcatannnnnnnnnnnnnnnnnnnnnnnnnnnnntaccaaatttaaggtggttttaatatatgtttcatggaagttgtttataaaattcaaaggtatttcatttaggtgaaaagtcttatttattaaagtggtttgaataaagtagatcaaaacttccagannnnnnnnnnnnnnnntaggaagaaatatcactcactataatttaaataaagaataaaaataaattttgtggtggcaaatgtttggtagaactgtaattagaaaaaaacaagtgtatttgggtgatggttacactagaagcccagactttacgactacacaatatattcatgtatctaaactgtacttgtaccccctaaatttatt

SEQ ID NO: 17873 - DNA, 165 bp, Macaca Fascicularis
cttatgttcaaatcagcgcattaactttgggggtgatttttaaaaatctttttgtgtatctttttaaccctagccttctaaacaacctcatacagcccagttacataatgttggctgtcacgggcattgtacttttatcaagatatttgtttcctctaaattcag

SEQ ID NO: 17874 - DNA, 1157 bp, Macaca Fascicularis
  misc_feature (1)...(1157): n = A,T,C or G
gcaaagcaagttctctgttntagcagtagtttgnnnnnnnnnnnnnnnnnnnnnnnnnnnnnnnnnnnnnnnnnnnnnnnnnnnnnnnnnnnncagctcttgatgcctttcttttaaattaattatagnnnnnnnnnnnnnnnnagctgatctcttaccctggtatttcttgtttttttgttgtttttgtttttttaaatcacaagtagannnnnnnnnnnnnnnagaggaaaccagattggatatggactcttttttatgcctattctggtgttgcgtttgtgtatccaaatgggcattatcctctcagattcttatctggcactaatttataactattatannnnnnnnnnnnatttagcaatatatcaatgcacaggcgcatcccaggcctgtacagatgtatgtctacacgtaagtataannnnnnnnnnnnnnnnnnntttacacttgcatctctaatagagattaaaaacaacaaattggcctcttcctaagtatattaataccatttgtccttgcattttatgcctccccctaaattaatgactgagttggtggaaagcggctaggttttattcatactgttttttgttctcgacttcaaaagtaatctacctcttaaaaatttgtagtttaatatttgtttggtgaatttgtgccactttaatccttccactatcattcccattttgttacatttctgttatggggactttatgttgaaatattgtataaagcatttgtagcagtttaaaaataaaatatttaaaattatttaaattgttttggacgcttcaattgtattatatgtgatttacatttcactttttttgttggcgttgttaacccagagagtgctcctgtattgaactttgctgttagttattttattgcttctttttggagagtgctataaaagactattctaatgaaaacattaaaatttacaatttgacataccaaaaggggttgtccattgattttaaccaatgtagcattgagagagagagaggttaattatagatagacaagagtgctgtttgctgtttttccctccagcattgaaatcactggggctcgtcagatgtatcaaaaaaagacatttttgcaaaatcgctgcacaacacctaataactatatcaaaatgtaaacaa

SEQ ID NO: 17875 - DNA, 787 bp, Macaca Fascicularis
  misc_feature (1)...(787): n = A,T,C or G
cacnnnnnnnnnnnnnnnnnnnnnnnnnnnnnnnnnnnnncaagggagaggtgcagaggtctctgctggagaaggagctggagtctgtgggcatccgcctcaacaagcacaagcctaacatctacttcaagcccaagaaaggcggtggcatctcctttaactcgacagtcacgctgacccagtgctcggaaaagctggnnnnnnnnnnnnnnnacgaatacaagatcttcaacgcagnnnnnnnnnnnnnnnnnnnnnnnnnnnnnnnnnnnnnnnnnnntgtgatcgtgggcaaccgggtgtacatgccctgcctgtatgtttataacaaannnnnnnnnnnnnnnnnnnnnnnngtggaccgcttggcccgaaaannnnnnnnnnnnnnnnnnnnnnnnnnnnnnnnnnnnnnnnnnnnnnnnnnnnnnnnnnnnnnnnnggagtacttgnnnnnnnnnnnnnnnnnnnnnnnnnnnnnnnnnnnnnnnnnnnnnnnnnnnnnnnnnnnnnnnnnnnnnnnnnnnnnnnnnnnnnnnnnnnnnnnnnnnnnnnnnnnnnnnnnnnnnnnnnnnnnnnnnnnnnnnnncctggtgtggggcaccagcaccaagtacagtccgcagcgggtggggctgacccacaccatggagcacgaggacgtnnnnnnnnnnnnnnngaagtaacggcgcccaccaggcctcccgcccacctgcctcctctccctggggagctggtcccactgggacacacaaacacccaaacagaaaaatacaaatacacgacc

SEQ ID NO: 17876 - DNA, 637 bp, Macaca Fascicularis
  misc_feature (1)...(637): n = A,T,C or G
gaaagtccctgcccttgcctctcgccttaagccccggcccagcccgagcagcacccgagaacccnnnntnnnnnnnnnnnnnnncggcaatggtggccgagagacgtctccggctgatgcccggaccgagagaatcctcagtgacctcctgcccttctgcagaccaggccccgagggccagctcgctgccacggcccttaggaacaggagctggaggaggaattttgccgcctgcgacccctcctgtctcagcttggggggaactctgtctcccagcctggctgcacttgaggtccctgtccaggaaggccttttgcaagaaggagaggaatgggggagaggacgtgagggaccacccccacccacacannnnnnnnnnnnnnncacaccctgagggcctgaggagagggagctgtgggccacgcctgggaggggcccagctggggtcnnnnnnnnnnnnngagcctcggccatctctccctcctgccctctgcttgggggactcagggcttcattccggagggcaccacggtgacccgggccatctcagtattgcctgtgggggccacccctccactccccacccccaagtgccttnnnnnnnnnnnnnnnnnctgaattggaggtttatttttta

SEQ ID NO: 17877 - DNA, 692 bp, Macaca Fascicularis
  misc_feature (1)...(692): n = A,T,C or G
gcctacannnnnntcatgaacacaagattgtctacagggacctgaagttggacaatttgcttctggacaccgagggctacgtcaagatcacagactttggcctctgcaaggaggggatgggctatggggaccggaccagcacattttgtgggaccccggagttcctggcccctgaggtgctgacggacacttcatacacgcgggctgtggactggtgggggctgggtgtgctgctctacgagatgctggttggcgagtccccattcccaggggatgacgaggaggaggtcttcgatagcatcgtcaacgatgaggtccgctacccccgcttcctgtccgccgnnnnnnnnnnnnnnntgagaaggctgctgcggaggaacccagagcggaggatgggatctagcgagagggatgcagaagatgtgaagaaacagcctttcttcaggactctgggctgggaagccctgttggcccggcgcctgccgccgccttttgtgcccacgctgtctggccgcaccgacgtcagcaactttgacgaggagttcaccggggaggcccccacactgagcccgccccgtgacgcgcggcccctcacagccgcggagcaggcggccttcctggacttcgacttcgtggcggggggctgctagccccctaccctgcccctacccctgcccgagagctgttagttt

SEQ ID NO: 17878 - DNA, 762 bp, Macaca Fascicularis
  misc_feature (1)...(762): n = A,T,C or G
gaccngtaggagcagatagggcttgtactcactttaatttgaatcttatcaacttactcataaagggacaggctaactagctgtgttagaagtagcaatgacaatgacaaaggactgctacacctctgattacaattctgatgtgaaaaagatggtgtttggctcttatagagcctgtgtgaaaggcccatggatcagttcttcctgtgtttgtaatttaatgctgctacaagannnnnnnnnnnnnnnnnnnnnnnnnnnnnnncataagcttcttgtcattctnnnnnnnnnnnnnnnnnnnntagacgcacaacactcctccagtcttgtgggggcagcttttgggaagtcccnnnnnnnnnnnnnnnnnnnnnnnnnnnnnnnnnnnnnnnnnnnnnngagtcggattaccaaaacactgcctgctcttcagacttaaagcactgataggacttaaaatagtctcattcaaatactgtattttatatatgcatttcacaaaaacagcaaaattatggcattttgtgaggccaaggcttggatgtgtgcgtaatagagcgttatggtgtgtgtgcacacacccagagggagagtttgaaaaatgcttgttggacacctaacctggctctaatttgggctgtttttcaaatacactgtgataagttcttttacaaatatctatagacatggtaaacttttggttttcagatatgcttaatgatagtcttactaaatgggaaataagaatgaactctcaaa

SEQ ID NO: 17879 - DNA, 732 bp, Macaca Fascicularis
  misc_feature (1)...(732): n = A,T,C or G
tcatcgttaccaaatatggacaacagtagtagattggatacaccccagcattaaagatatagtagttgaatacgcggatagaattattttccatgaaaactacaatgcaggcacctaccaaaacgacatcgctttgattaaaatgaaaaaagagggaaacaaaaaagattgtgagctgcctcgttccatccctgcctgtgtcccctggtctccttatctattccagcnnnnnnnnnnnnnnnnnnnnnnnnnnnnnggacgagaaaaagataatgaaaaagtcttttcacttcggtggggtgaagttaaactaataagcaactgctctaagttttatggaaatcgcttctatgaaaaagaaatggaatgcgcaggtacatatgatggttccanngacgcctgtaaaggggactctggaggccccttagtctgtatggatgccaacaatgtgacttatgtctggggtgttgtgagttggggggaaaactgtggaaaannnnnnnnnnnnnnnnnnnnnnccaaagtggccannnnttttgactgnnnnnnnnnnnnnnngggaaggcctcttatttctcagcacaatgtataaaattgtgatctccctcttctttctgttctttttctctcaagagttccatttaatggaaataaaactgtataattaataattctctaggggcaaaaannnnnnnnnnnnnnnnnnnnnnnnnnnnnnnnnnnnacaaagtt

SEQ ID NO: 17880 - DNA, 308 bp, Macaca Fascicularis
cccatctcagcatcagtttcctcatctgtaaaatgggaacagtcctcccgcctgacccatgccatgtgtggggtgcacatgacatgcttgaagtgaactcggtttgttcaagggtgcggtggtggctcagagaggtcttgcaggtcccttcccctgtctgagctcagagcctccacggaggtgcagcgctgaccttccatcattagtacaaggcccaaacaaaaacatgctctttttcaggtacagtggatcagacctgtaatcccaacagtttggtaggccaagacgggtggttcgccacaggtcag

SEQ ID NO: 17881 - DNA, 770 bp, Macaca Fascicularis
  misc_feature (1)...(770): n = A,T,C or G
atacagtgagcagtgtatgcctgttggtgcccagtggttaagtcattgtcacttagctgatatttgtcagtttgatatttattttaaattgtggaactagatgcatacattcacatttctgcctttcctttgcatcttccaatatatattgtgtgtgtgtggttttttttttcctagaaaaatatttaaagcattgtttgacaggtagaaactcatgtatctggtagtccatgagttatatcctggctcagtggagtgatatttatgtattatttttacttttctctcagtgtcttatattaagattaatatgttgttaatagttgctttgtcggttaatctctcttgttggtgttttaatacatgaaataggcttgcctttagatcaggtgctgatattacctgtttcctagtaatcggctgagcaaatggtcagcggaattcttggtttgatgataagcttattaattgaaattttttactgatggggctttaaaagaggtttattttgtgtatgtttagaactctgattttgatgaattatatgggaacgagaaacagaagaagtggtatttgctggtgagttaaataggcaaggtacccagtgataacaccaaccagaccactcctatcnnnnnnnnnnnnnnnnnnnngttgcctgttgttttactgtgtatattttatttttaatatattaactttgtggattcatctaaggtctgctcaaaagtaacactgtcaaaaccactattatgtatgtaaaaattgtg

SEQ ID NO: 17882 - DNA, 727 bp, Macaca Fascicularis
  misc_feature (1)...(727): n = A,T,C or G
tgcagaaatagganaaaatnctnnnctctannntagaaccctgaaagaagaggaggagatacatatacgaaataagcaggtacgacaaagagcaaaagaatgttcccaagctctcaatctgattcttgacattgatcatggaaagccagtgaagaatgcattagatttaaagtttgatatggaacaactaaaggactctattgatagggaaaaaatagcagtaattggacattnnnnnnnnnnnnnnnnnnnnattcagactcttagtgaagatcagagattnnnnnnnnnnnnnnnnnntgatgcatggatgcttccactgggtgatgaagtgtattccagaattcctcagcccctcttttttatcaactctgaatatttccaatatcccgctaatatcataaaaatgaaaaaatgctactcacctgataaagaaagaaagatgattacaatcaggggttcagtccatcagaattttgctgacttcacttttgcaactggcaaaataattggacgcatgctcaaattaaagggagatatagattcagatgtagcgattgatcttagcaacaaagcttcattagcattcttacaaaagcatttaggacttcataaagattttgatcagtgggactgcttgattgaaggagatgatgagaatcttatcccggggaccaacattaatacaaccaatcaacacatcatgttacagagctcttcaggaaca

SEQ ID NO: 17883 - DNA, 756 bp, Macaca Fascicularis
  misc_feature (1)...(756): n = A,T,C or G
gtaccatggactgtactcacccttgggnnnnntnnnnnnnagctcacagtgtgccttcaactgctctgagggaacaaacttaactgggattgaagaaaccacttgtggaccatttggaaactnnnnnnnnnnnnnaccaacctgtcaagtgattcagtgtgagcctctatcagcaccagatttggggaccatgaactgtagtcaccccctggccagcttcagcttttcctctgcatgtaccttcatctgctcagaaggaactgagctaattggggagaagaaaaccatttgtgagtcatctggaatctggtcaaatcctaatccaatatgtcaaaaattggacagaagtttctcaatgattaaggagggtgattataaccccctcttcattccagtggcagtcatggttactgcattctctgggttggcatttatcatttggctggcaaggagattaaaaaaaggcaagaaatccaagaaaagtatggatgacccatattaaatcgccctcggtgaaagaaaagtcttggaatactgaaaatcatgggatcctttaaatccttccatgaaacgttttgcatggtggcacctcctacatcaaacatgaagtgtgtttccttcagcacatctggaaagatttctacctgaccaacagctccttctgcttccattctgcccctcatttatccctcaacccccagcccacaggtgtttatatggctcagctttttgtcttttctgaggagaaacaaataa

SEQ ID NO: 17884 - DNA, 780 bp, Macaca Fascicularis
  misc_feature (1)...(780): n = A,T,C or G
cgnnnnnnnnncnnnnnaggacacagtggtggctctccatgctctgtccaaatatggagcagccacgttcaccagaactgggaaggctgcacaggtgactatccagtcttcagggacattttccaacaaattccaagtggacaacagcaaccgcctgttactgcagcgggtctcattaccagagctgcctggggaatacagcatgaaagtgacaggagaaggatgtgtctacctccagacatccttgaaatacaatattctcccagaaaaggaagagttcccatttgcattaggggtgcagactctgcctgcaacttgtgacgaacccaaagcccacaccagcttccaaatctcactaagtgtcagttataccgggagccgatctgcctcnnnnnnnnnnnnnnnnnntgtgaagatggtctctggcttcattcccctgaagccaacagtgaaaacacttgaaagatctaaccatttgagccggacagaagtcagcaacaaccatgtcttgatttacctggataaggtgtcaaatcagacactgagcttgttcttcacggttctgcaagatgtcccagtaagagatctgaaaccagccgtagtgaaagtctatgattactacgagacggatgagtttgcaattgctgaatacaatgctccttgcagcaaagatcttggaaatgcttgaagaccacaaggctgaaaactgctttgctggagtcctgttttcagagctccacagaagacacatgtttttgtatctttaaagactgagaataa

SEQ ID NO: 17885 - DNA, 640 bp, Macaca Fascicularis
gctacaaggccatcctggagttcgcagagaaggagggcatggtatcctctggccaaaacctgctggctgtggagggtcagtaactctcccacgaacctcctacctgctggccagccttccttaaactaccctggacaccgctgagcctataggttgccatcagttacgctgaagccatggatcaacttctttcttctgtctcccggcacacgtgtgcacacaaggcagcctttccctttggctagataaatgtggtgaaattgccactagaaagggccagcagcaatgtgttcttaattcctagcacctgctatcaaactgtgccttattaaaaccaaattgtggctattgatttttgccagggtccccgaggtaagtggggaaggaacctccctcctcctttctcccaccattctctttctggaggtctcctgtctcccactccttccctttgctaggattttatggggcggtttgatgagcatttgcctttctccccagagagcttgaccaagttacatattctagagatcgtcctgagtgccaagcacgtttataagtagggcgtgtattcgagtcctgtcattctgtgtgtgtgcgtgtgtgtacttatgtgtatgggtcccatatgtacgtgtgt

SEQ ID NO: 17886 - DNA, 1065 bp, Macaca Fascicularis
  misc_feature (1)...(1065): n = A,T,C or G
gtgtagtgagccttgaaaatggttagtaccgagttcagtttagttcttannnnnnnnnnnnnnnagctgtgtgcttaatttactctgttgtaaagggataaagtggaagtcatttttttccatggagtggagattctgctaatatttttatctatgttttataacttggtgagtgacgatgagagccctgcannnnnnnnnnnnnnnnnnnnnnnnnnnnnnnnnnnnnnnnnnnntcttcctggcaaccaggctgggccatcttctcctggacaccnnnnnnnnnnnnnnnnnnnnnnnnnnnnnnnnnnnnnnnnnnnnnnnnnnnnnatgatcagttaagcattttcctccatgggaaggaaggatgggatgtaaaaaagctaagggctatcctttacaaattctggttctgcaacttcctagcgnnnnnnnnnnnnnnnnnnngtttcttagccgttctgnnnnnnngtttcctcatctgtacaatgagattaatagtacctatctaccttcaggattgctgacagaatctgaaataaaatatgcaagttagctagtacaaagtannnnnnnnnnnnnnnnnnnnnnnnnnnnnnnnnnnnnnnnnnnnnnnnnnnnnnnnnnnnnnnnnnnnnnnnntacacctgtatcatgtgtaggaaaccagaaaggtgttccttatttcttgttcccaaacaggattaactgtgaagactaatttataaatgtgaacctaagaaaactccagctctgaaggaaatcatttgaattttgtttttgtacgtaaagttaaccttccagtggtctgagctgtcgnnnnnnnnnnnnnnnnnntctggccctccggacgagnnnnnnnnnnnnnnnnnnnnnnnnnnnnnnnnnnnnnnnnnnnnnnnnnnnnnnnnnnnnnnnnnnnnnnnnnnnnnnnnntcccagggccagacggctgctgcttccgcgcgtggactcggatctgctgtgacaccgtctgcccgacagtctctccacaggcnnnnnnnnnnnnnnactttttctccatggtcgaaataaaacagggga

SEQ ID NO: 17887 - DNA, 736 bp, Macaca Fascicularis
  misc_feature (1)...(736): n = A,T,C or G
catgatagctgttatatatatatgctaaatctttatatacagaaatatcagtacttgaacaaattcaaagcannnnnnnnnnnnnnnnnttgctccttgcatggttcatnnnnnnnnnnnnnnnnntgatttacattttcaactatatttactttttaaatgtgtgactttcccattttaaaatctaaactagacatcttaattgnnnnnnnnnnnnnnnnnnnnnnnnnnnnnnnnnnnnnnnnnnnnnnnntgaagtagttttataggtatgggttttttctccccctccaccagggtgggtggaatnnnnnnnnnnnnnnnatgtgtaatatttaaactgttctgtaaaataagtgtctggccatttggtatgatttctgtgtgnnnnnnnnnnnnnnnnnnnnnnnntgcatccatgatcagcaaccatttaacccttccttgttctaaaaaaccaaagggcactggttggtagggtgaggtggggagtattttaatttttggaatttgggaagcagaccagctttactttataaggctggaacagcagcactatccatgaaatataaaccaaaaatctttactatttcctagattgctattatttggtcctaagttgagtattccacagaaagtggtaattatcttttctctcttcctccattagaaaattaggttaataatggattnnnnnnnnnnnnnnnnnnnnnnnnnntaaaacacacatagaatg

SEQ ID NO: 17888 - DNA, 1032 bp, Macaca Fascicularis
  misc_feature (1)...(1032): n = A,T,C or G
acagaactggaggagagaggccaggagaagtgtgcccagtactgncnnnccgatggactnnngtcctatggagatattacagtggaactgaagaaggaggaggaatgtgagagctacaccgtccgagacctcctggtcaccaacaccagggagaataagagcnnnnnnnnnnnnnnnnnncacttccatggctnnnnnnnnnnnnnnnnnnnnnnnnnnnnnnnnnnnnnnnnnnnnnnnnnnnnnnnnnnnnnnnnncagcagcagcagtcagggaaccaccccatcaccgtgcactgcagcgctggggcaggaaggacggggaccttctgtgccctgagcaccgtcctggagcgtgtgaaagcagaggggattttggatgtcttccagactgtcaagagcctacggctacagaggccacacatggtccagacactggaacagtatgagttctgctacaaggnnnnnnnnnnnnnnnntgatgcattctcagattatgccaacttcaagtaagcggcaacaagcgtccgtggaccaggaggattgcctttaatattttgtaatattatgttttgttaatataccccaaattgtgtatatatcttataactgttttagaaattggtacataggcttctattacctattaggtggaaattttatatgtaaatgtgttagcactgatagtcctttttccaatgttttattggggaattaaatagtgtgatgtttggactgatatcgtgaaatcctcagccaggaaattgggctggattgtgctttggttaatatatctttccctaaagaagataaacacaaaatccattccaggtagctcggcaccaactaagaaaaaaagcacaaagtactcagagctctagaggaaagtggttgtccccataccatcatgcactgtaaatatccctcccctctgtccctggtcccctcccccatccccaccacctatatcatgggagtaatgggaccagagcggtatctctggcaccacactagggnnnnnnnnntaataaa

SEQ ID NO: 17889 - DNA, 695 bp, Macaca Fascicularis
ttcaattgttgactgcttttacttttgtaggcatggctaatgtaaaagcagccccaaagataattgacacaggaggaggctttattttagaagaggaagaagaagaagaacataaaattggaaaagttgttcatcaaccaggacctgttatggaatttgattacgtaatatgtgaagaatgtgggaaagaatttatggattcttatcttatgaaccactttgatttgccaacttgtgataactgcagagatgctgatgataaacataagcttataaccaaaacagaggcaaaacaagaatatcttctgaaagactgtgatttagaaaaaagagagccacctcttaaatttattgtgaagaagaatccacatcattcacaatggggtgatatgaaactctacttaaagttacagattgtgaagaggtctcttgaagtttggggtagtcaagaagcattagaagaagcaaaggaagtccgacaggaaaaccgagaaaaaatgaaacagaagaaatttgataaaaaagtaaaagaattgcggcgagcagtaagaagcagcgtgtggaaaagggagacgattgttcatcaacatgagtatggaccagaagaaaacctagaagatgacatgtaccgcaagacttgtactgtgtgtggccatgaactgacatatgaaaaaatgtgattttttagttcagtg

SEQ ID NO: 17890 - DNA, 714 bp, Macaca Fascicularis
  misc_feature (1)...(714): n = A,T,C or G
cccagtgactttgcctagcnnngacccagacactaggccttggtgacttcctggggccaagaaactaaggaaacttggctnnnnnnnnnnnnnnnnnnnnnnnnnnnnnnnnnncacctagggcacaccataggagttctatcacttgcttgacccctggacccataaaccagtccactgttatacctgaggcactctaacgatcacaatcaatcaatcgaattcccttaaatttgtatggcactggaactttggcaaagcacctttgacaaattgtgtctatttggagcttcatgatagccctgtgacatcnnnnnnnnnnnattcttatccccattgtgcagatggaaaccctgaggcacagatttctatgagactgtggatctcactggaagctatccaagagcccactgttgcctactagaccacatgacagggctaagcaactcagttcaccatggttctattctgtcacctctgctggcacaccagtggcagggcccagaatggtgacctctctttagctcaatctctgggcctgaggtactcagactgcccccaggatcaaatctctcctggctctagtaacccagtggaatgaatctggatatgccccaatgcttctatatgctaaggaaaatctgtgtctgtaatttattagggggtggatagggtggggtctccatctactttttnnnnnnnnnnnnnnnnatg

SEQ ID NO: 17891 - DNA, 733 bp, Macaca Fascicularis
  misc_feature (1)...(733): n = A,T,C or G
tcacagactgcctccttccacagctcttgannnatactccaacccaactgggcctggctctgtgggcagtggaggctggctcttcggattacctgcctttgggtaatgatatccaaagcagatgggacaggagctgagctgccctctgcctggtttggtgtatgtggggcaccctggatatgatcctgatccttctggggatacagcggacccctcccttgatactgctgagacctcagcccacagggcctaaatgtgatgggccattttgccaaggcctctccagcttcagcaggattcaggatcatctctcctgctactagagccctgaacctcgccagagcagaagtcacaggaggtatcagaactgactgcacaggcttcagtgcgagaagcttcaagtcggacctgagctcttcctgcctgctttcccaagaccagtcgccctgtggagtgggagagaactgccctacagggcttctgagaggctagctgggagtgctgcttcagcagtttctccctgaaacaggtattcagagttggggcagaagtgggagggtgagacatgagacagacaatgggtccgggtggcttttgatgcccagccaactagtaaactaattaaaacaatttaaactgttaagaaaatttttgtggttttattgtatcatgaggcattgaaacatctgaacaaatcaatgtctgggcggtgaggcagctgctttctccttca

SEQ ID NO: 17892 - DNA, 720 bp, Macaca Fascicularis
  misc_feature (1)...(720): n = A,T,C or G
acaagtcactttttaaaaaatttgtatgttttntatacnnnnnnnnnnnctattcaaatgtgagtctaccatttttaatttatggttcaactgtttgtgcgactgaattcttgcaatgcataagatataaaagcaaatatgactcactcatttcttgggattgtattcctnnnnnnnnnnnnnnnnaataactgaaacaacgtaagacaacataatcatgtgttttttaagatatttgagaatataaaggactagcaaataaaactcattttgctttaaaagttggattatattttaggnnnnnnnnnnnnnnnnnnnnnnnnnnnnnnnnnnnnnnnnnnnnnnnnnnnnnnnnnnnnnnnnnnnnnnnnnnnnnnnnnnnnnnnnnnnnnnnnnnnnnnnnnnnnnnnnnctttcttgactgatttaaaaagctgatcaatttattaaagccagaaatgttgtcctctgggaaaacaatttctatctatttatctaccaatccccactcacatgtatatgtttgtgtttacatatagatagatggaaggattttcctggtgttacattatttcctaagacagagtgggttggagaccactaaagttataaaaaccaaggaaagtaaagtttttccaatgtttgtactgtttaaggtgtttatttatataaaccatgcataaatttaataatttaaatttaaccnagtaaattatcatg

SEQ ID NO: 17893 - DNA, 732 bp, Macaca Fascicularis
  misc_feature (1)...(732): n = A,T,C or G
tatctttcttnatcttcttcctttcnnntctntgctcctttgttttttttctctcgctttctctttccctctcttctttcagattatctcatttcttctggatctgtctctgtgttcctcactcccttccccattccaaccccttctttctctagattgtttacatatgaagggcttttctctctcagagttgctgtcttctctgagacacacaaatctaagtcagaccattgccccacgccctcccaccttttctttagacctcaacttcgatgcgggtgggggtttggnnnnnnnnnnnnnnnnnnnnnnnnnnnnnngagaggaggaggaagaaaagaaggagtgattgaatgccgggcaagggactggctgcgctgctgtggctcccnnnnnnnnnnnnnnnnctgtccctctgaggcctagtgaaaaagctgcaggaggtgcatcctccacctctaatcttggaggctattagctcacctccaagcactgagctgggttcctgcccaattccatccttccctgagggagagaagggaagtgaaaagtagaataactccctaccatttccctctttttctcctcatcggccagcccctcctccagccccctctggtggcatgccatgccaagagcaacgtgtaaaggaacagagaatatccaatgcagtcaagtccaccccgcccagactttgccactgccttctcccacccttcnnnncccccacaa

SEQ ID NO: 17894 - DNA, 750 bp, Macaca Fascicularis
  misc_feature (1)...(750): n = A,T,C or G
aaacctgtgaccatcactgnccaaggtctnnnnncnttagtgcccagcgtgggcagcnnntcaccgacggggatcattgtggctgtggtcactgggattgctgtagcggccgttgttgctgctgtagtggccttgatctactgcaggaaaaagcggatttcagccaattccactgatcctgtgaaggctgcccgatttgagccacttggacgtcaaacgattgccctcagaaagagacaacttgaagaaaccaacaatgactatgaaacagccgacggcggctacatgactctgaaccccagggcacctactgatgatgatagaaacatctacctgactctttctcccaacgactatgacaacagtaataactaagagtaaagttatgccatgtggtcacactctcagcttgctgagtggatgacaaaaagaggagaattgttaaaggaaaatttaaatggagactggaaaaattcctgagcaaacaaaaccacctggcccttagaaatagctttaactttgcttaaactagaaacataagcaaaacttcactggggtcacactacaagcataagcaaaagttaacttggatcatttctggtaaatgcttatgttagaaataagacaaccccagccaatcataagcagcctactaacatataactatctgtctagggactttctaacaagatactcacccccaaaaacaattatgtaattgaaaaccaatcaaatgtctttatttgcttc

SEQ ID NO: 17895 - DNA, 596 bp, Macaca Fascicularis
ccccaccctcctccccttctctccttcctcctcattctaacccaagctgctggctatgcccctccagactgccccttgggggtgagtttcttgttagttggagtttctgggtgctgggtgggtgccgtctggcaggcctaatactgatggagcctagggcagcaagctggcctagggatagaggagggaggggagcagctggggcggcggggagctcaggtgtggggaaatgcaccagcagaggcggagcaactatcatgcttctgctcgggctcctcatgagatggggcagaggccaccaggcgggtcctgcctcacatcacatccttgtgctcctgcttggactccttaatgacctctccatcccgcatctccacggtcttcaccacgatgttcctctctgaggtggccttctgacacagacatggtgtccaggctggtttgtcggatctgcaggttggagaaggtctgcactaggaatggtgatccggttatcctcgcctctccagcagcttcgtgtaggtggcgatctcgatgtccagggccagcctgacgttgagcagccccttatccccccgctcatcatcacctctacc

SEQ ID NO: 17896 - DNA, 734 bp, Macaca Fascicularis
  misc_feature (1)...(734): n = A,T,C or G
ggatgcggatagtnnnnnnnnnnnnnnnnnnnnnnnnnnnnnnnnnnnnnanntgagtcagacccacatcnnncccacccggcccagagtgcccacttcaggggctgggtataccgacctggaaaggagacagaggaagaggaagctgctgaggactggggagaagctgagccctgccccttccnnnnnnnnnnnnnnnnnnctggagagaagccaccacctccctgggctcctcctagactgcccctccgactgcagaggcggctcaagcgcccagaaacccctacccatgatctggaccccgagattcccctaaaggccagaaaggtgcacttctccgagaaggtcactgtccattttctggctgtctgggcagggccggcccaggccgcccgccagggcccctgggagcagcttgctcgggatcggagccgctttgcacgccgtatcgccctggcccaggaggagctgagcccctgcctcacccnnnnnnnnnnnnnnnnnnnnnnggcacnnnnnnnnnnnnnnnnnnnnnnnnnnntccctgccctcacccagaccttgccttcctcctctgtccctttgtccccagtccagnnnnnnnnnnnnnnnnnnnnnnnnnnnnnnnnnnnnnnnnnnnnnnnnnnnnnnnnnnnnnntcccctggacctctttgggaggcgtggctaagaccaactggtttgcctataatttattaactattttttctaagt

SEQ ID NO: 17897 - DNA, 720 bp, Macaca Fascicularis
attgtgtcatagtgttttgctcactgaagaagcttcttatggaccttgcaactttgttgctagcttgaggttgattattgtggttgtattgttcactgtgtgtagaaatagtatgagtacgatttcaatagactgttcagtttttaatattagccatagcactggttagtatctcagtagtttcatgaaacgtttcctgtattctaatctattttgaaacttgttttttttaaattgtgtcttacagtcaagtttgtagattttcataagccacaattttaaaagatgcagtaatcttccaacctccaatatttatccattcgttgtggacccacacattgcatctgtaaattcataataagtttccttaactatcttatgtttctggtcttttaagcttagtgataaggtggaagcacaagaaaaatttcagtagaatacagtttttattttgtaaacactaatgtattaaacttgctatacattaaagcaaataatatatatttttatttgaattgtatatgtgaattggaagttataactagttgattttttcattttgttagaggtattttcactgaacaaggtcaattggttacctcagtattacagccaatatagtccaagggaccatttctccctgagtctcttatactttattgtgcgatgtccacgtttttgtgactcttcaagctgttggtgaggtgggacgagtgcact

SEQ ID NO: 17898 - DNA, 415 bp, Macaca Fascicularis
aatccccaccttgggctctgggagcagcccgctgagtggactggagtggagcatttgctgaaaggccaggagggtattggggatgtcctgtcctcgctggctttcaggatggtgcctcagagggtttccatggggtaggaggaggggatctcccaccagtgactttttctaagggctcccatgcatggtggaagaggggacagttccctcacccacccacaatcctattctcgggctgagaaccctgcgtggggatagtggctggcctcaggaatgggctgtttttggcctaaccctcagaagcactggggctggcacaaactcttggtttctttagcaggagaattttatcgtgtttcttttggttccattgtttggagacattcctgggcacagtttggtccgtagaataaaa

SEQ ID NO: 17899 - DNA, 749 bp, Macaca Fascicularis
  misc_feature (1)...(749): n = A,T,C or G
aggaagacccccnatttcctgaccatgcnnnctgnngcaatttcagactgggaagagcaaaaagggaggggaagaaaataagaggaatggggggaggaaggaatgcacagctctgccccttagagcaagtctgaaaccagaatcaagagccctcctccccagtggggccagctgtgtggggggaggggggcagcctgccccaggggtgcaaaaggacagcaattcattcagcctccaggccaaagcagctgagacaaagtgtgcccatcaggatcccctctcaggctttggctgtttaccatgtcactgcctactgtgacttcatgtccttttgggataagaaaccacaaaatgtatggaacaactatccatggctcttagccagaaacgtcttgcttctggtctctgaaaaactggggtgagtggttgtcccaaagacaatcgcccccagtttgggggctcctctcagggttcaccctgtcaccggggtgtgggacctgggaaacttccactagactgttgcccccagctcctccccgccagcatcccagtcaccaccaggtnnnnnnnnnnnnnnnnnnnnnnnnnnnnnntctgaaggcccaactctgtcaggccagactcctgtcactcatggtggggagacctgacttcctcgggctcttcaggagactgagacagagaggacaagcgaaagcgcagcctgtgtatgactctccgcggttcacatcctgcctctccctgggtta

SEQ ID NO: 17900 - DNA, 884 bp, Macaca Fascicularis
  misc_feature (1)...(884): n = A,T,C or G
caggtgggggctgtgcttatcagccttcacctnggagnnnnnnnnnnnnnnnnnnnnnnnngcggcgatctcgtgggagcagacgatgagctcctcatacttgcccatgtaaagaaccccctttccnnnnnnnnnnnnnnnngggattgatgaatgggaagagttgagtcagaccagtaagcccgtcctgggtttgttgaacatgttcccatgtaggaggtaaaaccaattctggaagtgtctatgaacttccataaataactttaattttagtataatgatggccttggattgtctgacctcagtagctattaaataacatcaagtaacatctgtatcaggccctacatagaacatacagttcagtgggagtaaacaaaaagataaacatgcgtgttaatggctgttcgagagaaatcggaataaaagcctaaacaggaacaacttcatcacagtgttgatgttggacacatagatggtgatggcaaaggtttagaacacatttttttcaaagactaaatctaaaacccagagtaaacatcaatgctcagagttagcataatttggagctattcaggaatnnnngannnnnnnnnnttcacagaaatcaagatgttatttttgtatactatatcacttagacaactgtnnnnnnnnnnnnnnnnnnngtttttaaaagtcagatggaaagagcaactgannnnnnngaatatagaaatgtaattttaaactattccaataaagctggaggaggaaggggagtttgactaaagtttttttttgtttcaaattttccttaatgtatatagtgcaaaataccctattaaagaggggaatgtggaggactgaaaaaaaaaaaaaaaaaaaaaaaaaaaaaaaaaagg

SEQ ID NO: 17901 - DNA, 671 bp, Macaca Fascicularis
  misc_feature (1)...(671): n = A,T,C or G
gttgggcataaggaaaacagagggagagttaacctccaccctggacagagttccagcctcaaggaggagccaggcgggctacagaagtctcacagtgagggagtcgtcctgcaggctgacagaagttaaaggacagatcagggaaggcttccttgaagaggtggccttgggttcatccaggcctcctgcccacttgtgcctgggtctgcctacaggacagaggctgatgggaaatcctatgtgaagtaccaggtcatcggcaaaaaccacgtggcagtgcccacacacttcttcaaggtgctgatcctggaggccgcaggcgggcaaattgagctccgctcctacgtgatgcccaacgcacctgtggacgaggccatcccactggagcgcttcctggtgcccatcgagagcattgagcgggcctcggggctgctctttgtaccaaacatcctggcgcgggcaggcagcctcaaggccatcacggcgggcagtaagtgagggtggagcccagcaaggctgggcgtgtgcaggccggggagcattaaaggtggtgatttttggagacaagtctggtggcgtccatcccaagtgacctgcagagcccctggtttcactgctgcttcactgatgtcctnnnccccttagaactttcnnnngtgctgggcaccggc

SEQ ID NO: 17902 - DNA, 749 bp, Macaca Fascicularis
  misc_feature (1)...(749): n = A,T,C or G
gtgcaggatggcannnnnctggccannnnnnnnnnnnnnnnnnnnnnnnnnnnnnnnagtgctggggtcggctccatctttgacagagttctaactgagctggtttccaaaatgaaagacatgcagatggacnnnnnnnnnnnngggtgcctgcgagccattgtgctctttaacccagannnnnnnnnnnnnnnnnnnnnnnnnnnnnnnnnnncnnnnnnnnnnnnnnnnnatnnnnnnnnnnnnnnnnnnnnnnnnnnnnnnnnnnnnnnnnnnnnnnnnnnnnnnnnnnnnnnnnnnnnnnnnnnnnnnnnnnnnnnnnnnnntggcttgaaatgtctggagcacctcttcttcttcaagctcatcggggacacccccattgacaccttcctcatggagatgttggagaccccgctgcagatcacctgagccctaccagccacagcctccccacccaggatgatccccgggcaggtgtgtgtggacccccaccctacactttcctccacctcccaccctgacccccttcctgtcccaaaatgtgatgcttnnnnnnnnnnnnnnnnnnnnnnnnatgagacttttataggtggacttttgtatagatgttaaaggtaatacgctttgnnnnnnnnnnnnnnnnnnnncttactggaagttcttgggaaaactaaccaagcctctgtacatacaattggtttaaattattttttcatttgccctgaaagcaaacaaatgagtaataa

SEQ ID NO: 17903 - DNA, 693 bp, Macaca Fascicularis
cagtaggtgtgggggagaccaagaacgtgaacatatctaacaagtttccaggtgatgctgttgttgctggtccaggggctgtatttggaaaaccactgtccaggagcgtggttttccaattgtgatatgaggttctgccccaactgcatagaagttgggctgcttgttaaaaacgcaggccaggtgcggtggctcacacctgtaattccagcgcttcgggaggctgaggcaggtggatcacttgagctcaggagttcaggaccagtctgggaaatatgacgaaacccatctttacacgcctggaatcccacctgctcaagtggctggattgcttgagcccgggaggcggaggttgcagtgagctgagattgcaccactgcattccagcctgggtgacagagcaaaaccctgtctcaaaaaaatgcagactgccaggcacagtggctcacacctgtattccgactgtaagcttatcaccttgggaggccaatgtaggaggatcagttgagcccagaagttcaagaccagcctgggcaaagtagggagaccccatctctacaaataataataaaacgaaccgggcatggtaccatgtgcctgtggtcccagctgctctggaaagaggaggctcgcttgagcccaggaggttgaggctgcagtgagcagagaacgtgccactacactccagcctga

SEQ ID NO: 17904 - DNA, 804 bp, Macaca Fascicularis
  misc_feature (1)...(804): n = A,T,C or G
agatgggaaaaaggtggatcagtacaagggaaagcnnnnnntggagtcnnngagggagtacgtggagttgcagctgcagcgcacagagaccggagccacggagaccgtcaagccctcagaggccccggtgctggcagccgggcccgaggctgacaagggcactgtgttggcactcactgaaaataactnnnnnnnnnnnnnnnnnnnnnnnnnnnnnnnnnnnnnnnnntatgctccatggtgcggtcattgtaagaatctggctcctacttgggaggaactctctagaaaggaattccctggccnnnnnnnnnnnnnnnnnnnnnnnnnnnnnnnnnnnnnnnnnnnnnnnnnnnnnagcaagtactcggtacgaggctaccccacatnnnnnnnnnnnnnnnnngggaagaaagtcagcgagcacagtggaggcagagaccttgactcnnnnnnnnnnnnngtcctgggccaagcgaaagacgaactctagaaacacagttggaagtcacctctcctgcccggctcctgcaccccgcatttaggagttcagtcccacagaggccactgggttcccggtggtnnnnnnnnnnnnnnnnnnnnnnnnnnnnnnnnnnnnnnnntctttgtgtgtgtgtgtgnnnnnnnnnnnnnnnnnnnnnnnnnnnnnnnnnnnnnnnnnnnnnnnnnnnnnnnnnnnnntggtcactgtgtaaactaagtannnnnnnnnnnnnnnnnnnnnnnnnnnnngtctcttgatgaaatttaaatggtttcctttgagactgaaatagagtgagg

SEQ ID NO: 17905 - DNA, 782 bp, Macaca Fascicularis
  misc_feature (1)...(782): n = A,T,C or G
gacttaactagctatcagatcctttgaaaagagaaatatttacaatatatgactaattttgggaaaatgaagttttgatttatttgtgtttaaatgctgctgtcagacgattgttcttagacctcctaaatgccccatattaaaagaacccattcataggaaggtgtttcattttggtgtnnnnnnnnnnnnnnncgtcaacgcaatgtctaactggacttcccaagacaaatggtaccagcgtcctcttaaaagatgccttaatccattccttgaggacagacctcagttgagatgatagcagaatgtgcttctctctggcagctggccttctgcttctgagttgcacattaatcagattagcctgtattctcttcagtgaattttgataatggcttccagactcttttgcgttagagacgcctgttaggatcttcaagtcccatcatagaaaattgaaacacaagagttgttctgctgagagttttggggatacgtccatctttttaagggattgctttcatctaattctggcaggacctcaccaaaagatccagcctcatacctacatcagacaaaataatcgcggttgttccttctgtcctaaagtattgtgttttgcttttgaaacaccaactcactttgcaatagccatgcaagatgaatgcagattatactgatcnnnnnnnnnnnnnnnnnnnnnnnnnnntatttaataaaacctgttaatttttatactgacaataaaaatgtttctacagatattaatgnnncaagacaaa

SEQ ID NO: 17906 - DNA, 738 bp, Macaca Fascicularis
  misc_feature (1)...(738): n = A,T,C or G
cagcacagacggattttcnnttatcagtgtcnctagggcaggaggattacccggtcacctttactagtccnnnnnagacaatttacctgtattaggagnnnaggccacgctacactctgcccacactggtgtctgctgctgagcaggtcttcccatgcccnnnnnnnnnnnnnnnnnnnttcttgctaaataaaagtgggagtggggtgtgtgggttatccatgtatcgcctttcagctgcagatcccccctcccctgcctgctctgcagtcgtgggcggggcctgtgctgtgtttctccttggtagcgtgcatggtgttgaactggggcgctggggagaaaggggctttcatgtcgtttccttcttgctcctgctgcatagctnnnnnnnnnnnnnnnnngacatccaggggcgctctgcctggagtgtgcagacctcagagaggtcccagcaccgactgtggcctttcgggtgtaggcgagtgggctctgctccccgattccctgtgaacgcccaccttctcgagagaattttctgcttgcccggtgactctgcacggactctggcttgagcaactcggggaacttcaccctcgggggcctcccacgccnnnnnnnnnnnnnnngtctcagtcctggccttggcagggcacctccttttctgtgctttgttacctggggcattctccctcatccctacggtgttgtgtaaagctctttttaaactttatgctctga

SEQ ID NO: 17907 - DNA, 783 bp, Macaca Fascicularis
caaagtgctgccaagaatggaccacacagaggctgcctctcccatcacttccctacatggagtatatgtcaagccctaattgttcttagtttgcagttccattaaaaggtgaccaatcatggtcacaaatcagctgctactactcctgtaggaaggtcaatgttcatcatcctaagctactcagtaataactctaccctggcactataatgtaagctgtactgcggtgctatgttcttagtggatgtgccaagtcctaaccctgcttccggtatttccctcacctttcccatcttccaagggtactaaggaatctttctgctttggggtttatcagaattctcagaatctcaaataactaaaaggcaatcaaaatgataatacaatctgctttttaaagaatgccctttacttcatggacttccactgccatcctcccaaggggcccatattctttcagtggctacctacatacaattccaaatacatacaggaaggtagaaacatctgaaaatgtatgtgtaaatattcttatttaatgaaagactgtacaaagtagaagtcttagatgtatatatttcctatattgttttcagtgtacatggaataacttatgtaattatgtactatgtatcaacaagtaacaggaaaattttaaaaatacagatagatatatgctctgcatgttatgtaagataaatgtgttgaatggttttcaaaataaaaatgaagtactctcctggaaatatgagaaagactatctaaatgtgaaagaccaaaaagg

SEQ ID NO: 17908 - DNA, 742 bp, Macaca Fascicularis
  misc_feature (1)...(742): n = A,T,C or G
tnnnnnnnnnnnnnnnnnnnnnnnntgctaccaccaccacttacctaaattggtaacacttcccgagcattatctcctgacttaatcctcaacattcccctacacccacaccgcataataggcacaggaccctcgnnnnnnnnnnnnnnnnnnnnnnnnnnnnntttgctcaagggaacccaactgagccttttactatagtnnnnnnnnnnnnnnnnnnnnnnnnnnnnnnnnnnnnnnnnnnnnnnnnnnnnnnnnnnnnnnnnnnnnnnnnnnnnnnnnnnnnnnnnnnnnnnnnnnnnnnnnnatgatggttatgaggcagacaannnnnnnnnnaaccagtacttctccaaggaaacttgtaaggtagcagttgtgttatacnnnnnnnnnnnnnnnnggagcctgaaggcttgtcttttcttacccatggtcacactaccaggaaatgcgaaggctacacattacagtactgnnnnnnnnnnnnnnnnnacaacctggaggcttgggcccagggtttggacctgcccttatctttacctttttcctgcagggcagtcacacctctgtggagagcaggtggctgtggagtggctcaagccagacctgaagcagcgactccgccagcagcttgtgggtccctccttgcggcccccacaaccagnnnnnnnnnnnnnnnnnnnnnnnnnnnnnaagttagggtcccaanngnctcgggctaccctgcagttgctgtgcc

SEQ ID NO: 17909 - DNA, 760 bp, Macaca Fascicularis
  misc_feature (1)...(760): n = A,T,C or G
tgggggtgtgggannnagagtccccagnngannnnngacacgtctgcctacccattcgtggttataaattaaatgtaggtatgaataagtttgaagctacatgagtgaaccatcgttataaacgtgatcagctgtttgtcatagggcagtttgaaactgcctcctaggaagaggctcataggggtctcttgaggttcttagtgtaannnnnnnnnnnnnnnnnnnnnnnnnnaatcgtttcactactcacagtctctttcatcttcagttttatctttaatctcctcttttatcttggactgacatttagtgtagctatgtgaaaaggtcatannnnnnnntcctggtttgggtgttacgcttacatacttaaatgaaagtatgtgacatactcatagtgtaacacaacatgaataaaaggcatacattttgcagcagtcagtctcttcagaaaaccctcttctatagtagggttgagttacttcctatcaagccagtgtgtggtaacaggctcaatattcctgaatgaaataccagactagtgacaagctcctggtcttcagatgtcttctcgttaaggagatgggccttttggaggtaaaggatacaattagtgagttctgtcatgattcgctattctagaacttgcatgacctttactgtgttagctctttgaatgttgttgaaattttagactttctttgtaaacaaatgatatgtccttatcattgtataaaagctgttacgtgcaacaatgtgg

SEQ ID NO: 17910 - DNA, 781 bp, Macaca Fascicularis
  misc_feature (1)...(781): n = A,T,C or G
atcagccattttatcgaggcacgtgatcagtgttgcaacataatgaaaaagatggctactgtgccttgtgttacttaatcatacagtaagctgacctggaaatgaatgaaactattactcctaagaattacattgtatagccccacaggttaaatttaattcaaaacatgttaaacattactttcatgtactatggaaaagtacaagtaggtttacattactggattttcggaagtaagtagtttcccctttcctagtcttctgtgtatgtgatgttaatttcttttattgcattataaaataaaaggattatgtatttttaactaaggtgagacattgatatatccttttgctacaagctatagctaatgtgctgagcttgtgccttggtgattgttttaactgattactgtagatcaacctgatgatttgtttgaaattggcaggaaaaatgcagctttcaaatcattggggggagaaaaaggatgtctttcaggattattttaatttttnnnnnnnnnnnnnnnaactgttatgtaccataatgctaaataaaacnnnnnnnnnnnnnnnnntaatttagtggaaaaagaagacaatgctttccatattgtgataaggtaacatggggtttttctgggccagcctttagaacactgttaaggtacgtacgctaccttgatgaaagggaccttcgtgcaactgtagtcatcttaaaggcttctcatccactgtgcttcttaatgtgtaattaaagtgaggagaaattaaatactctgag

SEQ ID NO: 17911 - DNA, 750 bp, Macaca Fascicularis
  misc_feature (1)...(750): n = A,T,C or G
ggatgccagcannnacnnnnnnnnnnnnnngaaggacatgatccgctggggagaggagaaacgccaggctgacccaggnnnnnnnngcaggaagattgtggagggcatctctcagcccatctggttggtgagtgacacacggagagtgtctgacatccagtggtttcgggaggccnnnnnnnnnnnnnnnnnnnnnnnnnncgttgtagcgttggagcagagccgacagcagcggggctgggtgttcacgccaggggtggacgacgctgagtcagaatgtggcctggacaactttgggggctttgactgggtcatcgagaaccatggagatgaacagctcctggaggagcagttggagaacctgatagaatttatccgctccagactgtagtcgctaggttctaggagtcagctggggcctgctgcggtgggggtggggctgactctgcaagatgaggggtcccctgatcctggccaaggtgaggaacagacagaggggggtctagattctgaaggggttggtggatgttgggcaaagcaggaaacgtctggagacctcattttctccatggggaagacagccnnnnnnnnnnnnnnnnnnctccaagggcaaaggagggtgacttggctgtgcttgaaggagaaaccctgctgtctccccagcgccagtcccctcagcctgtggcagcctggcaccctgactggatgttctcagccccttgttctgggaaagaacccagggctccccac

SEQ ID NO: 17912 - DNA, 732 bp, Macaca Fascicularis
  misc_feature (1)...(732): n = A,T,C or G
cgctggccagcnnnngggggcctacctccaccaaggccagttctgacctgcatgaggaaagtgcacaaccgagccaccaacccagaagcccaagaaggttgtaaatgccaagaaagatgttgtgagcacaaagatgtttgaggagctcaagagccgtctggacaccctggcccaggaggtggctctgctgaaggagcagcaggccttgcagacggtctgcctgaaggggaccaaggtgcacatgaaatgctttctggccttcacccaggcgaagaccttccacgaggccagcgaggactgcatctcgcgcgggggcaccttgggcactccgcagactggctcggnnnnnnnnnnnnnnnnnnnnnnnnnnnnnnnnnncgtgggcaacgaggccgagatctggctgggcctcaacgacatggcgactgagggcatctgggtggacatgaccggcgcccgcatcgcctacaagaactgggagaccgagatcaccgcgcagcctgacggcggcaagaccgagaactgcgcggtcctgtcaggcgcggccaacggcaagtggttcgacaagcgctgccgcgatccgctgccctacatttgccagttcgggatcgtgtaaccggcggggcgggggccttggggggcctggaggagggcgggggccgcgggaggccgggaggagggtggagaccttgcagcccccatcccctccgttcgcttggagcctctttgcaa

SEQ ID NO: 17913 - DNA, 698 bp, Macaca Fascicularis
  misc_feature (1)...(698): n = A,T,C or G
gaacataaataaaattccaaaatactcaatgagaaatgactagtaatataggctttcaagagttggtannntntagctatatttgcagatactctgggattttaaggaactgagaaaacagcaaagttgactaaattttatatttcttgtcctctaaatattttgataatttctggattgatgcagtgatgtttttgttccttccgtatttataaatgaaacacctttttttagtgtttctaaacctaaaatctacttggtttgaaatnnnnnnnnnnnnnnnnngtttgacttttatttgaagcatgtggttgattgaaaatttcattgaagttttcagtcagtgtgtaagtttgattctgtaatgagcacagcacctnnnnnnnnnnnnnnnnnnnnnnnnnnnnnnnnnnnnnnnnnnnnactttgtttgtaaacagtatcccaatannnnnnnnnnnnngaggtctgtgggttttttttgtttgtttgttttgttttttttcctaatagaattaagaattctaatgttgaaaaactgcacaaatttgtatgggacaaagcctagaaaagagaaatgtagattgaatcataatataaatcatggtttgatagaagagggaaagttttggtgccataatttctcctttcactggtgttggacttaaatcaattgaaactgtatttctgtaccacaa

SEQ ID NO: 17914 - DNA, 668 bp, Macaca Fascicularis
  misc_feature (1)...(668): n = A,T,C or G
gagtattttttttatacaaaagaaagctctgtacataggactgtgaccatgtccactattcgtgggtcagcatcccaggggaagtagaaaccactgacatacacactcatattcacgcacacacactcaggcacacacacacacacacataccccagagccaccgaggaagggaaacaccaagggtcgctgcacataaaaatgccacctcaactcatccctgacacacgtatgtcctcccaaggccacgctcacacaacacacattataagcactttgcctgattcactcacggggtctgtcttttgtgggaaggagaggaagaattcatcaaaggtctcctcccatgggtgggggagtagggagtgagtgagtggtggtggagtgaaacaagagcagagaaaaggggctgggcttttacagacnngagtcccaagctcccctgctctctggcccctgatttgccatgccccagccttgaaagccacccataagccccatctatctccaagaaaaagcccagaaaggtgacttccatcttggcaccccaaactggggcaagacagcaatgagggttagaggttagggggttcnnnnnnnnnnnnnnnnnnnnnncccttgataactaggctgtgcgtaaaatcttcccccacnncttcacctaatcac

SEQ ID NO: 17915 - DNA, 757 bp, Macaca Fascicularis
  misc_feature (1)...(757): n = A,T,C or G
tataaatcagctcatttaaagtgtgcttgtgttgtcaaaatatcagatagtaatacacagtaagcattttaaacaaagggaaacctatatttatgtaactgtataatgaattctgacaaaataaaaaattaaagataccttattgatgaaatatttagcataaacaaaattctatttaatccaccttaaaacgtaaatgtattttcatggatttcatttgttggtacatattacataaaacattgtgccttaaaatgagtcgtacatattttaagttggaatgcagtaatagatatatgattttacatcatttttgagaagccaaggggaaataataagttgaaaaagaaattcataattattataagattttaacttttttattttattaaaatgtttgcatattttaagtaaaattaaaaatgttttctgaatttatttttttatttgaatattttgggattagtcacaaaatatttagagattaagtaaataatagctttgtttgtattannnnnnnnnnctacttgtattttctttcttgttaaaagtctagacaactgagatttactnnnnnnnnnnnnnnnncaacccaaaagtaagcactaagtctcattttatgaggccaccatttcttaatatcacatccagtgcacctttgtctttctgccatatctgaaatagaactactgttaattcacgtagataaacataagactaaagaagtatatttacattatctgaagagttttgtgca

SEQ ID NO: 17916 - DNA, 740 bp, Macaca Fascicularis
  misc_feature (1)...(740): n = A,T,C or G
taatgccagttccagcttgatctacctttgagtcatattgaggcattcaaggatgcacagttcaagtatttattcaggaaaaatgcttttgtnnnnnnnnnnnnnnnnnnagaaatagacagtcaggctactataatattagtgttatttttggtttttttgacttctgcctatacccaggtaagtggaggtgggaaagagaagagaaagagtggtggggatttgtaagacttagatgagatagctcataataaggggaagactttaaagtacaaagtagaatgtttgctgtaggttttttttatagctattttaaaaaatcagactatggaagttttcttctatttttannnnnnnnnnnnnnnnntgtttctttgtcttacatcatgaatggacgttgcattttatcaaatgcattttctacatgtattaagttggtcatattcttcttcttcttttatgtaaatcatcataaataatgttcattaagttctgaatgttaaactactcttgaattcctggaataaaccacacttagtcctgatatactttaaatatttatctctcacaagagttggttagaatttctgtgtttatgtttatataaaaatggttctgttatttcactttttctactatccttgctaagttttacatcaaacttgtaatggtctcttaaaaggaattgagaagtaattcctctgattctgttctctgacnntangnntcccacctccact

SEQ ID NO: 17917 - DNA, 219 bp, Macaca Fascicularis
tccaccatccccatgaccgactgatgttcccacggatgctaatgaaaatggtgagcctccggaccatgagcagcgtccactcagagcaagtgtttgcactgcgtctgcaggacaaaaagctcccaccgctgctctctgagatctgggatgtgcacgaatgactgttctttcctcttattttgttttctgggccggatggctgaggcctggtggctgcct

SEQ ID NO: 17918 - DNA, 748 bp, Macaca Fascicularis
  misc_feature (1)...(748): n = A,T,C or G
ctccagggccgctgccccnatggctctcgctgccacttcatccacaaccccagcgaagacctggcggccccgggccaccctcctgtnnnnnnnnnnnnnnnnnnnnnnnnnnnnnnnccctctggccgccggacctcaccaccaccaccaggcctggtcggcccttccctgtcctccagctccttctcgccctccagctccccgccaccacctggggaccttccactgtcaccctctgccttctctgctgcccctggtacccccgtagctcgaagagaccccagcccactctgttgcccctcctgcagaagggccactcctgtcagcgtctgggggcccttgggtggcctggttcggaccccctctgtacagtccctgatgatctgagcccnnnnccnnngccagcagcggcagcagcctggggggctctgactctcctgtcttcgaggcgggggtttttgcaccaccccagcccgcggcagccccccggcgactccccatcttcaatcgcatctctgtgtnnnnnnnnnnngtgactgcccggtcagatnnnnnnnnnnnnnnnnnnnnnnnnnnnnnnnnnnnnnnnnnnntctgcatggaccctagggctatggggacttgagggacagtaatcaagtaatcaagtaacccccttttccagaatgcattaacccactcccctgacctnnnnnnnnnnnnnnnccccaagtgtgcaagctcagtattcatggtggtgggggataga

SEQ ID NO: 17919 - DNA, 751 bp, Macaca Fascicularis
  misc_feature (1)...(751): n = A,T,C or G
gctgtatatacagattaaatnannntatactagttcaaatgtgatatcacattatgtaanattactttttnnccttagatgttcagatttctccacttgcttgagtttatattannnntttttcaattatactattatttctgagaatgaaatggacaattacacttagaaaatgagtactagtatttaataagtcagtgattatgctcaaataagtgttacatatcactagatactgagctttgatagaataattttcttttgattattcatgatgtgtcatctctgaccttgtttcagcaaagtaaacagcactccctaccccgccccctttttttactcatcttggaaaaagttagtctttcagtacatgttgctggtaagtagtttccaagttatatgttgtccctgggttgaagtatatttgttgaattgtgtgtgtgtgcgtgtgtgtgtaaccataaactatattcgtatctgtttcatttggaggattttcttctttgtaatgtaaagaaattcaaagttatcaaagtaccttaaatgtgttagcttagattctttatgtgcnnnnnnnnaaagatatgttttctttaattttactgatggacctgtaatatccacattgtgaagctatgtatgaaattcaactataatatgaataaatttgaatcatgagaattatgggttaaaaagccacaaagaagcacannnnnnnnnnnnnnnnnaatgaaatcctgaactttgtgta

SEQ ID NO: 17920 - DNA, 627 bp, Macaca Fascicularis
  misc_feature (1)...(627): n = A,T,C or G
aggttgaagaacgccctgggccctctgtcatggcagggtcccccgtctctctgcagaggctgggaagggtccccgggctggagccacgggggctcctctgggctgtgcctccagggccaacactggcctcttggggctgcccggggaccctgccctggctggagcgcaccccaccggagcccacatgggcttggcagctggagggatggctccccggtgacactgggagaaacgccaattggatgggggcatttattttcgttttgttctgctttgtgttgtcaccaatttggaaacagtgagggtggggtgaggacttttatagaatattctcaggtgtgtacccgagaggcagagagagggacgtggccggctgctctgtgcgtggccttgtcctgagcacttgtgcccgcccctgagccctgccccgggggagcggaagccagcactcgcactttggccaggggtgcgtggaaggtggcggcaggcactggcctggacggcttccaggcctggctggccacggccatggcccgtcaggccacgccgcactgagccacagccccgggggccactcccgggccctcttnnncactgaggcacnnnnactggctctccccgagagac

SEQ ID NO: 17921 - DNA, 770 bp, Macaca Fascicularis
  misc_feature (1)...(770): n = A,T,C or G
acagtgcgnnagtcnnnnnnnnnnnnngnnnnnnnnnnnnnnnngcgccggagttcactgcggagnnngtgagtcggaacccggagcccggcacgcgcgtgcggctgcggtgcctggcgcccctggagggcgcgcgcttcgccctggtgcgcgaggacgggggcgggcaccgcgtgcaccgtttgcagagccccgctgggactgaggcactcttcgagctgcacaacatttcggtggccgactccgccaactacagctgcgtctacgtggacctgaagccgccttttgggggctccgcgcccagcgagcgcttggagctgcgtgtggacggaccccctcccaggcctcagctccgggcagcgtggagtggggcggtgctggcgggccgagacgccgtcctgcgctgcgagggccccatccccgacgtcaccttcgagctgctgcgcgagggcgagacgaaggccgtggacacggtccacacccccgagnnnnnnnnnnnnnnnnnncaggtgacttttgtggggccccagcacgctggcagctacaggtgccgctaccgctcctgggggcccaacaccttcgagtcggagctcagcgaccccgtggagctcctgggggcagaaaactgatgcagtcgcgggccagggtnnnnnnnnnnnnnnnnnnngtgcgggggattctggactggctcccacccgtcctgttgcagcagaaggctgggctccctggggggctggagggcgctccctcattcctgctaggaataataa

SEQ ID NO: 17922 - DNA, 838 bp, Macaca Fascicularis
  misc_feature (1)...(838): n = A,T,C or G
gtattgtacaatatagatgctcagcactgcnnnnnnctctgattgcttatgaaaaacaaaatgatgtgcattactgtgaatttttataccactcatttttaaaagggctgtctttttattttagttttccatactgtggtggtgtacacaggatagnnnnnnnnntttaaaatacagtcttnnnnnntgctcattatatgttgatgagttgtttaagtctaacagattcatcaagactgcattgctttattatacnnnnnnnnnnnnnnnnnnnnnnnnnnnnnnatcacctgaattcagtctgtttggtgtctgcacagactggtattcaatctatcaagtttgttttattctnnnnnnnnnnnnnnntcccacctaatatatatatatatatatattttaatttatgagaattttggacaattggaaaggtagaaaagaaaagccaagatcatactaaggactggaaataatttgttctatggaatcaaannnnnnnnnnnnnnnnntgatactatttaaatttggaggacaacttatcttcacnnnnnnnnnnnnnnnngagaaagtaatctccttgcaatcatgtggacaccaatcacaaaagtaaagccctggtgttgtgttttcatgtcttttttcagccctctcagatccaaatgttattatgcactttttaatgtttgtaaacttttactaataattagtgtgaattgcattctgatacaataatgattatcattagaagctaacaaaattctcattaatactgtgtttgatggcctctgctgtgttttaacatcgtgcttcttatatggaaagtttttgtgagctgtgt

SEQ ID NO: 17923 - DNA, 915 bp, Macaca Fascicularis
  misc_feature (1)...(915): n = A,T,C or G
gnnncagtcatgcccccctaaaggttaaggagtagttggcacctccttattaatatgccggcctagatccccgctggtggaggggcaaatggttgaatccttgtgagatatttttttctttgcttgtttatttatttattcatttatttaattgtatttattcatttactaattttatnnnnnnnnnnnnnnntttgtttacccattcctttatccatccctcccctccttttcagataaggagacaggaggagtaggaggaggcagggcctctccatgccagcctctgtggtcctttcccaaacccatcagcgcaatacttgaaccttctcccaggtaggggcaggaggagccacatgagagagggagaaggactgtgtttacctttagagttttgttttgtttttttccttctgagtttgctgttggtgcaggagtaagggaaaggcccaaggtatccaagcctgggaagggcaggccagccagcacctctgccttctcagggacaagagcagtcctttaccacactcactcactctgtctgtcccctctgctactctacagcattagagactgtggggccaggaccccaagtctcctttccttctgggtggggagttctggggttgttggtgtgtgggagaagttttataattgcttccaaacagctgggtttaaatataaaatagacacactcatttttggctcttggtttgtgtgtgggaacaaagtgagtgggaaggaatttctgggtgcagaaggaagcagccagggatttgaccaagcaaggtatcnnnngggcatgagagcagccaggacagtggtctacaagcccagcacagaggtgangnnagtgacnnnntcagctgcccagccctcccttctcccagcatccannnacccagtttcccaagc

SEQ ID NO: 17924 - DNA, 213 bp, Macaca Fascicularis
cactggtacacgggcgagggcacagacgagatggagttctcagagaccgagagcaacacgaacgacctggtgtgtgagtaccagcactatcacgacgccacggccgacgaacacggggagtttgaggaggaggagggcgaggacgaggcttaagaacttttgaaatcaatcttgcatctctagtgaacttttattgtcttcaagcatggtctt

SEQ ID NO: 17925 - DNA, 777 bp, Macaca Fascicularis
  misc_feature (1)...(777): n = A,T,C or G
acacagagaannnntaaaagaganntggcntttaagacagnnnnnnnnnntagctttcacaagtctcctagacactccccacgggaaactcaaggaggtgnnnnnnnnnnnnnnnnnnnnnnnnnctgtgcttctcttctttattgcactaggaattctttgcattccttacttgcactgttactcttaattttaaagnnnnnnnnnnnnnnnnnnnnnnnnncgtactccactggtctgtctttggataataggaattcaatttggcaaaacaaaatgtaatgtcagactttgctgcattttacacatgtgctgatgtttacaatgatgccgaacattaggaattgtttatacacaactttgcaaattatttattacttgtgcacttggtagtttttacaaaactgcttcgtgcatatgttaaagcttatttttatgtggtcttatgattttattaccgaaatgtttttaacactatactctaaaatggacattttcttttattatcagttaaattcacattttaagtgcttcacatttgtatgtgtgtagactgtaactttttttcagttcatatgcagaacgtatttagccattacccacgtgacaccaccgaatatattactgatttagaagcaaagatttcagtagaattttagtcctgaacgctacggggaaaatgcattttcttcagaattatccattatgtgcatttaaactnnnnnnnnnaaaaataactattttgttttaatctactttttgtatttagtagttatt

SEQ ID NO: 17926 - DNA, 687 bp, Macaca Fascicularis
  misc_feature (1)...(687): n = A,T,C or G
gacacagcaaagcagatcaaaaccaaggtcaataagcatgcgttttctggagggagagacaccatcgaggagcacaggcagtttgggggcaactgtgatgtggacgtgtctttcatgtacctgaccttcttcctcgaggacgacgacaagctcgagcagatcaggaaggnnnnnnnnnnnnnnnacatgctcaccggtgagctcaagaaggtactcatagaggttcnnnnnnnnnnnnnnnnnnnnnnnnnngcccggcgcaaggaggtcacggacgagatagcaaaagagttcatgactccccgggagctgtccttcgactttcagtagcactcgttttacatatgcttataaaagaagtgatgtatcaataatcccagcccnnnnnnnnnnnnnccacccgtaggcttctgtctcataattattattgggcctggtctctgtaagcctgtgtatgttatcaatactgtttcttcctgtgagttccatcgtttctgtctcttacgggcaaagcattgtgggtgatcggtgctggctaacattgcatggtcagatnnnnnnnnnnnnnnnngagtctctccccagagcagccccaaggagtggagcctttggctggaagtccatgggccaccctgttctggtccgtggaggactccgagggttccaagtatactcnnngacccactc

SEQ ID NO: 17927 - DNA, 724 bp, Macaca Fascicularis
  misc_feature (1)...(724): n = A,T,C or G
tgtatatttgtaaanctatttatgncnccncggcacnnncgttcccacagcccaacannnnnagnnnnnnnnnnnnnnnnnnnnngagagttttaatttttaacttattaacagccgagaaggtttatcctgcctgtagagggacagccaagaatgtacatccagcctgccccggagctggaggattccctccaagcctaaaaggtcgttaatagttggaggtgattccaatgagtaaggatattttatttcnnnnnnnnnnnnnnnnnnnnnnnnnnnnnnnnnnnnnggacttttctttaggagatttatattttggacttcaaagcaagctggtattttcatacaaattcttctaattgctgtgtgtcccaggcggggagatggtttccagggaggggccggccctgcgtgcaggttcagatgttactagatgttacaagtttatatatatctatatatataatttattgagtttttacaagatgtatttgctgtagacttaacacttcttacgcaatgcttctagagttttatagcctggactgctacctttcaaagcttggagggaagctgtgaattcagttggttggttctgtactgttactgggcactgagtctgggcagctgtcccttgcttgcctgcagggcatggctcagggtggtctcttcttgagacccagtgcatggtggccagagnnnnnnnnncnnnacctnnnnggtg

SEQ ID NO: 17928 - DNA, 775 bp, Macaca Fascicularis
  misc_feature (1)...(775): n = A,T,C or G
tgtagcttggtaaagatgannnngagtnncctataatatagcatgactgcannnnnnnnnnnnnnnnnnnnnnnnnnnnnnnnnnaagttggtgttagtaggtattgtcaannnnnnnnnnnnnnnnnnnnctagtgggaccgctgatctgtctgtaaatgagcatgacaggaactaagcaaaagtgattaaatgtatgacaaatagggagaaactgatttctggatgatctttatactaattgcagctttcaggctactactaggtgnnnnnnnnnnnnnnnnnnnnnnnnnnnnnnnnnnnnnnnnnnnnnaatggtctttcatttctttgctttctacattagttataaccagttttataccaaaaaaatgcatgtttgaggaattgtctgaaatagggacaaaacaccatgtaaaccagctttgcaannnnnnnnnnnnnnnatactactcctgtattcaaatggattgtcttattctgagcaaagacctggtaatcttcaagctaggttttgcagttcccaaccaccaacattcnnnnnnnnnnnnnnnnnnnnnnnnnnnnnnnnnnnnnnnnnnnnnnnnnnnnnnnnnnnnnnnnnnnnnnnntgtaaatctcagctatatttagcaacannnnnnnnnnnnnnnnnttttttggtagcatctggtagaccttagaatgttacagccagtaggttctttattcagattttaaatatattaagaatagtagggcagtaacagttacttttgagagttttctggtcaag

SEQ ID NO: 17929 - DNA, 676 bp, Macaca Fascicularis
  misc_feature (1)...(676): n = A,T,C or G
tattaagggtgagatcttttttcttttttcttttttcatatttgagacagagtctgcatnnnnnnnnnnnnnnnnnnnnnnnnnnnnnnnnnnnnnnnnnnnnnnnnnnnnnnnnnnnnnnnnnnnnnnnnnnnnnnnnnnnnnnnnnnnnnnnnnnnnnnnnnnnnnnnnnnnnnnnnnnnnnnnnnnnnnnnnnnnnnnnnnnnnnnnnnnnnnnnnnnnnnnngtctcttacgcctgaactcactattctgttctactgagctatgtgtctgttcctttaccaataccacccattaatacctctgcaattaatgtagctttacaataagtcttaaaatcaggtagtatggctcctccaattttattcttccttttgaaaattgttttagccattctagttcctttacctttccatataaattttataatcagcttgcctctattgactaaattttgattggcagtgtattgcatttatagatcaaattagcagaaattgatatcttaatatgttgagtctttcaatccatgaacattgtatgtgcctctatttatttaggtctatttaaatatgttcattggaattttgtagattttgggataaagatcctttatatgttttattagctttacatataagctatataattttcttgaacgcaattgtaaatgg

SEQ ID NO: 17930 - DNA, 964 bp, Macaca Fascicularis
  misc_feature (1)...(964): n = A,T,C or G
ttgattctcgtggcaaacgtgaatttgataggcatagtggaagtgatagatctggcctgaagcacgaggacaaacgtggaggtagcggatctcacaactggggaactgtcaaagatgaattaacagagtcccccaaatacattcagaaacaaatatcttataattacagtgacttggatcaatcaaatgtgactgaggaaacacctgaaggtgaagannnnnnnnnnnnnncagacactgaaaataaggagaatgaagttgaagaggtaaaagaggagggtccaaaagagatgactttggatgagtggaaggctattcaaaataaggaccgggcaaaagtagaatttaatatccgaaaaccaaatgaaggtgctgatgggcagtggaagaagggatttgttcttcataaatcaaagagtgaagaggctcatgctgaagattcggttatggaccatcatttccggaagccagcaaatgatataacgtctcagctggagatcaattttggagaccttggccgcccaggacgtggtggcaggggaggacgaggtggacgtgggcgtggtgggcgcccaaaccgtggcagcaggaccgacaagtcaagtgcttctgctcctgatgtggatgnnnnnnnnnnnnnnncagctctggcttaactggatgccataagacaaccctggttcctttgtgaaccattctgttcaaagcttttgcatgcttaaggattccaaacgactaagaaattaaaaaaaaaaaaaaagactgtcattcataccattcacacctaaagactgaattttatctgttttaaaaatgaacttctctcgctacacagaagtaacaaatatggtagtcagttttgtatttagaaatgtattggtagcagggatgttttcataatnnnnnnnnnnnnnnnnnnnnnnnnnnnnactttnnnnnnnnnnnnnnnnaatacgcatttcca

SEQ ID NO: 17931 - DNA, 749 bp, Macaca Fascicularis
  misc_feature (1)...(749): n = A,T,C or G
agatcacacatcacacnctgggacacaggaaccatgccnnntcnnnaggcttccagcaagtnncaagaacgcagctgtccaggccttgacttaagaatgacagccggtgtcttggaaagcccccagcagctgccccagggacatgggaagaccacgggacctctttcactacccccgatgacctctgagggtatcccaggcaaaagagacagagggcaaatgagatcacctcctgcagcccaccactccagcacctgcgccgaggtctgcgtcagttatgtcttgtaaaggacaagaagcttcagatgggtactccaagaaggatgtgagaggtgggcgctttggaggtttcctcctcaaccaccagctgccccatccctgaggcagcactccgtgggggtatggttttgtcactgcccagacctagcagtgacatctcattgtccccagcccagtgagcattggaggtgccaggggagtcggttgtagccaaggcgtcccagcacggggagggttgggaagggggtgcaggaagggcaccagccctgcattgcaggttggcaccttacttccctgagatccccaaagttggtccaaggagggagagtgggctctcaatacggtaccaaagatataatcacctaggtttacaaatatttttaggactcacgttaactcacatttatacagcagaagtgctattttgtatgctgttaagtttttctatctgtgtactttttaagggaaag

SEQ ID NO: 17932 - DNA, 1185 bp, Macaca Fascicularis
  misc_feature (1)...(1185): n = A,T,C or G
ggtcaagagggtttggtnnnnnnnnnttcaaagatgcagccagtgtggagaaggtcctagaccagaaggagcacaggctggatggccgtgtcattgaccctaaaaaggccatggctatgaagaaggacccagtnnnnnnnnnnnnnnntgggggtnnnnnnnnnnnnnnnnnnnnngnnnnnnnnnnnnnnnnnnnnnnnnnnnnnnnnnnnnnnnnnnnnnnnnnnnnnnnnntggatccaaagttgaacaaaagacgaggttttgtgtttannnnnnnnnnnnnnnnagaaccnnnnnnnnnnnnnnnnnnnnnnnnnnnnnnnnnnnnnnnnngaagcaagtgtgaaatcaaggtggcccagcccaaagaagtctatcagcagcagcagtatggctctgggggccgtggaaaccgcaaccgagggaaccgaggcagcggaggtggcggtggaggtggaggtcagagtcagagttggaatcagggctacggcaactactggaaccagggctacggctaccagcagggctacgggcctggctatggcggctacgactactcgccctatggctattacggctacggccccggctacgactacagtcagggtagtacaaactacggcaagagccagcgacgtggtggccatcagaataactacaagccatactgaggcggcagcaggagcgaccaactgannnnnnnnnnnnnntgtttggatatggagtgaacacaattatgtaccaaatttaacttggcaaactttctatggcctgtcccatgtgcatcttatttaaaatctcccccatggaaatcactctcctatttactatttccagagctctagttgtttaggcagcatgtggtgtctgagaggccagagcgccattatgggctgatttttattaccaggtcccccagaaccaggcgggaggctctgcttcctgctgccactctgcagcctggacctgtggaccctggttgtaaagagtaaattgtatcttaggaaaccagtgtcacctttttttcaccttttaattttatattatttgtgtcatacannnnnnnnnnnnnnnntgttaattttactgtactttttggtaccttttgggaatctaatgtattgtaaggtattttacacgtgtcctgattttgccacaacctggatatgacgctatccaagc

SEQ ID NO: 17933 - DNA, 722 bp, Macaca Fascicularis
  misc_feature (1)...(722): n = A,T,C or G
gggaaaccataagaacagaacaaacatgacctatgagaaaatgtccagagccctgcgccactactacaaactaaacattatcaggaaggagccagnnnnnnnnnnnnnnntcaggtttatgaaaaccccagatgaaatcatgagtggccgaacagaccgtttggagcacctagagtcccaggagctggatgaacaaatataccaagaagatgaatgctgaaggaaccaacagtccacctcagcgggccagcagcccagggagcccctgcccaccaggatccctggaggtgtgacggagcagtcgggctgaggagagtggaaaaggaagcgacccagaaatggcagggacactttttttgcagaagaagagggaccccggagcaccttggacaaaccacccaaaggcggggctggaattttggcagagggcatgagcctgggactcgcatgtcacgtttccttttcatttggaatctccatttgtaattcctcaccctcacccttccaccgttgttagtttcatggtgtttttgtttttattttaagaacatgcagtttgactcttcatcattcatataggggaagacatccgatgttgttttcctatggaaatatatatctattatatatatattttttgcaaacctcacaaagtgcggcaagcccagctggtcaggaaagagaatacttgcagagcggttcaggttcctcttttcctgcca

SEQ ID NO: 17934 - DNA, 681 bp, Macaca Fascicularis
  misc_feature (1)...(681): n = A,T,C or G
tccagactctctgtgaaccctcggagagcgcatctgggcctggccatttccttagcacagcagggccgctggtttgagtgagggtttctgagctgctctgaattagtccttgcttggctgcttggccttgggcttcattcaagtctatgnnnnnnnnnnnnnnnnnnnncgggatatatattctctcccctccttgaggccccagccttcttaccttgcctctctgtttgtaannnnnnnnnnnnnnnngaagaaaagattgggtctaggatatatggtgggtggacaggggccccgggacttggagggttggtcctcttgcctcctggaaaaaaaaaaaactgcagtgaaagacaagatgcaaatagccatgtgatgcgtgtctgtggaatatggagtgaggggtaaaagctgatttggtttgactccgctgggaggtggggccaggagcaggccttgagatgttgcgtaaaaggaagtgatatgggaaggccttgctcccaaccacacatgctcctccctctgaggaagtaggactagcagccaggggcagatgaccatggaagattgggagcccaaggtttaaacttctctaaagggaggtggggatgagaagagggattcttttgtactttgtacaaagactacacatttgtgtaannnngtgtttggaaaaaaaaa

SEQ ID NO: 17935 - DNA, 745 bp, Macaca Fascicularis
ctgtcagtatcaccactggtcaagcagctccctcgcaagtgagcggagtaatgaaggagagagtgctgcagcggagtgtcgagctttcctggcaggaaccagagcatcccaatggagtcatcacagaatatgaaatcaagtattacgagaaagatcaaagggaacggacctactcaacagtaaaaaccaagtctacttcagcctccattaataatctgaaaccaggaacagtgtatgttttccagattcgggcttttactgctgctggttatggaaactacagtcccagacttgatgttgctacactagaggaagctacagctacagctgtctccagtgaacagaatcctgtcattatcattgctgtggttgctgtggctgggaccatcattttggtgttcatggtctttggcttcatcattgggagaaggcactgtggttatagcaaagctgaccaagaaggggatgaagagctttactttcattctttagtaacaaatgagcatctgtcagttttataaactgcaacaataattgtttaagacaatcaattttggataaacaatcaactacagcagaataaatcaagatttttaaatcccattttcctttatacattttgcttctttttgttatgtgtttatttttaaaatataattttaatgtgatgacataagcacagttaggctgcagtgtaatatataaagaagtatattgttctccaaatagtaagatttgagaaaag

SEQ ID NO: 17936 - DNA, 680 bp, Macaca Fascicularis
  misc_feature (1)...(680): n = A,T,C or G
tatccaaatgatgatgtgcaatgtcatgttttaacttgggaaactgaaagtgttcccatgtagcttcaaatacaaaaacaaatgtattattcggatacttttatggttactaactagtactttcctgattgggaaagtggtgcttaagtttgcaaattaaattggagagggcaataacaaaatgaggccccgtatcataaccagtgtgtgtataaggaaaaccatgtataaaatgggcctatcacccttgtcagagatataaattaccacatttaccttcccttcatcagctaacacttatcactcacactaccaataacttgttaaatcaggatttgacttcatacaatgaattttcagtattttatctcaagtagctatagacactaaccttgatagtggtacgttagagggttcctattctctcattgtacaataatgtctttaatatgaaatgctacattatttataattggtatagttaatgtatctttttatagttgtaagtacacagagttggtatatttaaaccttctgtaatatactgtatttagaaatggaaatatatatagtgttaggtttcacttcttttaaggtttaccnnctgtggtgtgatttaaaaatcctataggcctgggaagtctgatcctaactgcagataaaggactcacagtacgttt

SEQ ID NO: 17937 - DNA, 746 bp, Macaca Fascicularis
  misc_feature (1)...(746): n = A,T,C or G
cagagaagaggtatgcaccaaaaaggtggaatcccaaatgtgaaggtgctgcnnnnnnnnnnnnnnnnnngtggacaggtgcctcattagcttactattgccatacccctacatcttggactcctcctccatattttaatgagagtattgtggtagacatgaaaagggacttcaatnnnnnnnnnnnnnnnnagaacaatgcacagagcataaaagccatcaagggtcctcatttggccagtagcattcttttccagtcttnnnnnnnnnnnnntggaataatagaagaaaaggacatacatgaagaattgccaaaacggaaagaaaggaagcaggaggaggaggaggatgacaaagacagtgatcaggaaattattgatgaagaagttgatgaaaagnnnnnnnnnnnnnnnnnnncagaagagacaggggaggcactgtctgaggagtctacagcaggtgaacagtctacaaggtcttttatcttggataaaatgattgaagacgatgatgcttatgacttcagtacagattatgtgtaacagaaccatgtctttttttatgagttttttttttaacattctaagcagactgctaaacttctatgtataatgtgtgtaagttatggtatgcatgagctgtgtaaattttgtgaatatgtattgtattaaaaccaggcaatttggaatccctaaattctataaaaagacaattcacctcattgtgacacnnnnttatacatagaa

SEQ ID NO: 17938 - DNA, 784 bp, Macaca Fascicularis
  misc_feature (1)...(784): n = A,T,C or G
aaaagatgannnnnnnnnnnnntcagtatcagacaggcctgcttgggcaggctcagaaagagactacacatacgaggagctgctgaatcgagtatcaacatcatgagggaaaagaatccagatatggttgctggggagaaaaggaaatttgtcatgaaacctccacaggtcgtccgagtaggaaccaagaaaacttcttttgtcaactttaccaaattttgttggctgaattgggtacaagtggttctatagatggtaataaccaacttgtaatcaaaggaagattccaacagaaacagatagaaaatgtcttgagaagatatatcaaggaatatgtcacttgtcacacatgccgatcaccggacacaatcctacagaaggacacacgactctatttcctacagtgcgaaacttgtcattctagnnnnnnnnnnnnnnnnnnnnnnnnnnnnnnnnnnnnngtcacgggcaagcgagcacagctccgtgccaaagctaactaatttgctaatcactgattttgcaaagcgtgttgtggagatgtgnnnnnncaggtttgccatcagagtggatataccgttgtattaaaaacaagataaaaaagctgccgagatttttggcgagtggttggttggtctgaagtccttgcaagacgctnnnnnnnnnnnnnnnnnnnnnnnnnnnnnnnnnntttaacacctgtcagagaaacgtgataatggggtaaggaggtgcttttttaaaatcgttcatanacttctgtaaaatgcaagataaattaaag

SEQ ID NO: 17939 - DNA, 544 bp, Macaca Fascicularis
  misc_feature (1)...(544): n = A,T,C or G
ctccttcccaacatggcgcagtctattaannnnnnnnagctgaatctgccgcagctagaaatgctcaagaannnnnnnnnnnnnnnnnnnnnnnnnnnnnccacgtccattgcccagctcannnnnnnnnnnnnnnagtatgtggaagccaaggactgnnnnnnnnnnnnnnnnaagagcaacgaggggaaagaattacttgtcccactnnnnnnnnnnnnnnnngtccctnnnnnnnnnnnnnnnnnnnnnnnnnnnnnnnnnnnnnnnnnnnnnnnnnnntatgtagagaagacagctgaggatgccaaggactttttcaagaggaagatagattttctaaccaaacagatggagaaaatccannnnnnnnnnnnnnnnnnnnnnnnnnnnnnnnnnnnnnnnnnnnnnnnnnnnnnnnnnnnnnnnnnnnnnnnnnnnnnnnnnnnnnnnnnnnnnnnnnnnnntaaggcctgagagtttttgcacaaatggggcagagggacacggttttgggcatggcttcctggtgctgggaagggtc

SEQ ID NO: 17940 - DNA, 744 bp, Macaca Fascicularis
  misc_feature (1)...(744): n = A,T,C or G
gagnnnnnnnnnnnnnnnnacgaaactctgnnnnnactaaaaatacaaaaaaaaaattgnccaggcgtggtagtgnnnnnnnntagtcccagctacttgggaggctgaggcaggagaatttgcttgaacccaggaggtggaggttgcagtgagccaagatcacacactgcactccagcgtgggcaacagagcgagactccatctcaaaaaaaaatagttgtgttgcctcgtacaaaatnnnnnnnnnnnnnnnnnnnnnnnnnnnnnnnnnnnnnnnnnnnnnnnnnnnnnntatacagggaaaggattttattatccttaggagtgtcatccaagacatagagcttgaatgtgacattatttaaaaataacaacaaagaaggcagagccaggatataactagaaaaaggatgtcttttttattactccccctctaaacactgctgctgccttaattttagaaagcagcttactagtttacccttgtgaagtattataaattgttgtgaatttgaaaagtccatctactatattattgctaaatatgttgtttgtactaagggacaattattttaagaccatggattaaaaaaaaaaaaaacactctttctgcaggggatgatattggtgagttgccaaagaagcnnnnnnnnnnnnnnnnttttgccttctgttatcttacctgcagatattaagaatgtatgcattatgtaaaatgctcaattatatatttttgttgagttt

SEQ ID NO: 17941 - DNA, 1182 bp, Macaca Fascicularis
  misc_feature (1)...(1182): n = A,T,C or G
tttcctgtacactgctttttatgttaccctccccactcccaaaacaccctgcataatagtattttcttcccaccctcaacccatctgcccacctcccacccaaaatgaaaannnnnnnntgaaggtgattgaacacaatgtatttggactgtactttgagtttccagtnnnnnnnttgataggaaggttcaccaaacattccatgtatcagactttaaaaaaaaaaaaccactaaggacaaaaatgttagttgaaagagttgcagaagtttccaaatgtttgcaatagcagaatgaaaacttaagcagtcattttctatttgtttttggccttattcaagtactatgagtttgccccaggttagatagagaaatatttaattatctatagatggccttattgtctcacttttttttttcttttttctggctcaagggctttaatcaataagatatgaaaagtatgtccccaaacagacttttcagataggtctgtcgctgtattgctgtattaggaaaatgatcatgtaagtcagctgttaaaaatattctttaacaaattttnnnnnnnnnnnnnnncttcagaaaaagaacaggacatttatagctttttcccctgatagctgtgtgtaggaagtgtgccttaagaaaatgaaatgcctgttttgaattttagaattcaagcctagtgctacatagggctcatttttattggaaagatggagtctagctcttggtgactagcattagannnnnnnnnnnnnnnnnnnnnnnnnnnnnnnnnnnnnnnnnnnntcaattccatttattgaattggtacagaaattaacttaggcacattaagaaattacatgtgttagtacagatttttggcttaaaaaattagtatctttgctttttgatnnnnnnnnnnnnnnttctcagagnnnnnnnnnnnnnnnnnnnnnnnnnnnnnnnnnnnnnnnnnaaaggtgattgaaatccctgtcatgctacagaaatgaatataaacgatttcaaactagttcttggtttctagatgggtatggtatcatagtcttccttagctttcccttttccagacagattaattatttttctggttcttaatggtcattttcctctaatcttaaaaatagaaaaaaatggagnnnntngtggtggtgannnggnnnaaccccac

SEQ ID NO: 17942 - DNA, 771 bp, Macaca Fascicularis
  misc_feature (1)...(771): n = A,T,C or G
ggccacagagatacaattcaagttctcgctgnnnnntttnnnnnnnnnnnnnnnnngccaatcgaagctccacgcccaggctctcagctctcaggccagtgctctgctctgtccagggtaggtaacaccgagaggctcctgtcttttaccctcccctagttccagaccagcctcatggtggcaacatggttcttgaacaattaaagaaacatgactttttgtaatagccctgtctaggggaaactgtggcgtgcaggagacactacccttccgtgccccagacctctgtcttgcacgtgacagctgacagtctggactaccccaagatggcttctggctacctaaggtaaacatgtcactagagtatttttatcagagagaaacattataaaaatctgacggcaaaagcaaaacgaaatgggggaaagtaggggaggtggatgtgataacaacttccaaattgacnnnnnnnnnnnnnnnggaagggaagaacttggaaaataggttttgctttgggggtaggggcttcttagattctcccagcacccgcctttccctttagccannnnnnnntcgnnnaacccagaagtgatggagagaaaccaaccagagatctcgaaccctgtctagaaggaatgtatttgttgctaaattttgtagcactgtttacagttttcctccatgttatttatgaattttatattccgtgaatgtatattgtcttgtaatgttgcataatgttcactttttatagtgtgtcctttattctaa

SEQ ID NO: 17943 - DNA, 711 bp, Macaca Fascicularis
  misc_feature (1)...(711): n = A,T,C or G
catctgtttacctagaagataggttaaggaaatatattattattcctgtttgatgtgggtgaaggcagagatctaacctggcttgtttagggccataccactaattagaaaatctgtactagaacctgtgtcttattactactataagttatgtgttcagactgaaactggagaaattatgactatttatagcgatagttaaatctgaatgtgtatggacaaaaatatttaattgctcagtaaactgcttaacttcaaaggtagttattaaccttataaataaatgtttcagaattttgattctaaagtctaagtctgagcatagaaattnnnnnnnnnnnnnnnnnntttgatctctgttttgactatactagaggaataacgattggttgtgtttattcttttctaagcagaacggtttaactttgtactctttgaaaaatcatgctgatttataaatctctgcctataacagaatggaaaccttatgaatgaattgtttttctctgtcctgagctggagaagggaatgagcaggctgacacatcgcacagccccaggtggcgccattctctcacgcaaggatggggctgcagtgtgagcagcgtgggctgcagtgtgnnnnnnnnnnnnnnnagtgtgtcagtcccaggagagagggagtggcgagcaccacagattaccatgtatgtgtggaagacatttgtatcct

SEQ ID NO: 17944 - DNA, 723 bp, Macaca Fascicularis
  misc_feature (1)...(723): n = A,T,C or G
tgggactctcgnnnnngcactgccagcccctnnncctctccccagggcctagccccacctcctggtcttgtaatcgcaggggccatttctgtaggtaactggaccaagcatgagaaaaataatgaattctcagttccctgattacacttgccaccttggaatcaaggactcacacttctgaccctgcctgtctttttgtgtnnnnnnnnnnnnnnnnnnnnnnnnnnnnnnnnnnnnnnnnnnnnnnnnnnnnnnnnnnnnnnnnnnnnnnnnnnnnnnnnnnnnnnnnnnnnnnnnnnnnnnnnnnnnnnnnnnnnnnnnnnnnnnnnnnnnnnnnnnnnnnnnnnnnnnnnnnnnnnnnnnnnnnnnnnnnnnnnnnnnnnnnnnnnnnnnnnnnnnnnnnnnnnnnnnnnnnnnnnnnnnnnnnnnnnnnnnnnnnnnnnnnnnnnnnnnnnnnnnnnnnnnnnnnnnnnnnnnnnntatgcccggcccctgcctgtctgtcttgatgtgtgagcagcaactgtggtcattaaaccattagtttacccctctagaagtggggtctgcaaactcccacctgcagccaaatctggcccaccccctttttaatgtaaggcctgtgagctacagtggtttttacatttttttaattattaaaaaaatcaaaataatattctgtgacagaaagacagatgaaatttatatgtaacagggaaaatt

SEQ ID NO: 17945 - DNA, 731 bp, Macaca Fascicularis
  misc_feature (1)...(731): n = A,T,C or G
tggggttgcccttggtgaggcttgtaccattgttttgcgtggtgccactcacnaaattttagatgannnnnnnnnnnnnnngcatgacgctctttgtgttcttgcgcaannnnnnnnggactctagaacagtttatggaggaggnnnnnnnnnnnnnnnnnnnnnnnnnnnnnnnnnnnnnnnnnnnnnnnnnnnnnnnnnnnnnnnnnnnnnnnnnnnnnnnnnnnnnnnnnnnncactgagaatgttgccaaccatcatagctgacaatgcaggctatgacagtgcagacctggtggcccagctcagggctgctcacagtgaaggcaataccactgctggactggatatgagggaaggcaccattggcgatatggctatcctgggtataacagaaagttttcaagtgaagcgacaggttcttctgagtgcagctgaagcagcagaggtgattctgcgtgtggacaacatcatcaaagcagcacccaggaaacgtgtccctgatcaccacccctgttaagcattcccacgtgccgttgatctttggaccagtttctagcaaagttgtgtttgaaaggtagtctcttaaagaagactgtggaatctgtttattggtgcccattttgtatccttaagtttggctatttagctgaccttctctttaacataggtctaatttatttgccgtgtcattttccatacannnnnnttgattaaannnnnnnntcata

SEQ ID NO: 17946 - DNA, 759 bp, Macaca Fascicularis
  misc_feature (1)...(759): n = A,T,C or G
tagcaaagaagaactatattgccagttaccaagagatactaaaattgaagactttggcacagtnnnnnnnnnnnnnnnnnnnnnnntagcgctattgannntagctgatgaggatgaccgggaaatttatgatattatttccatggtgtcagtgattcatattcctgataggacttataaactaccctgcagaatattgtatcaatatttactcttggctcaaggtcaatttcatgatcttaagcaacttttcatgtctgcaaataataatttcactccctccaacaattcctcttcagaagaaaaaaacacagacagaagtttgttggaaaaggtgggactctctgaaagtgaagttgagccatcggaggagaacagcaaggactgtgttgtttgccagaatgggactgtgaactgggtgctcttaccnnnnnnnnnnnnnnnnnnnnnnnnnggctgcgtgaagtnnnnnnnnnnnnnnnnnnnnnnnnnnnnnnnnnnnnnnnnnnnnnnnnnnnnnnnnnnnnaaaaagagcaagataaagacaaaccgaaggttctttgaagacattgtaacactgaaaagtacactttctactaaagatgcagatattgatgatcttggaattcattataacatggaatctacagtatgggccatcaatgaaannnctattttaacttcatatttgtatggtacatggatgacaaaaattggttattcctttctgcttagtgaatgaatactgaaattcatct

SEQ ID NO: 17947 - DNA, 770 bp, Macaca Fascicularis
  misc_feature (1)...(770): n = A,T,C or G
tcagaaggaagctacatggacaatgtcaaacatcacagctggccgncaggaccagatacagcaagttgtgaatcatggattagtcccattccttgtcagtgttctctctaaggcagattnnnngacacaaaaggaagctgtatgggccgtgannnnnnnnnnnnnnnnnnnnnnnnnnnnnnnnnnngtgtaccttgttcactgtggcatnnnnnnnnnnnnnnnnnnnnnnnnnnnnnnnaaagataccaagattattctggttatcttggatgccatttcaaatatctttcaggctgctgaaaaactaggtgaaactgagaaacttagtataatgattgaagaatgtggcggcttagacaaaattgaagctctacaaaaccatgaaaatgagtctgtgtataaggcttcgttaagcttaattgagaagtatttctctgtagaggaagaggaagatcaaaacgttgtgccggaaactacctctgaaggctacaccttccaagttcaggatggggctcctgggacctttaccttttagatcacgtagctgaggcatacatttgttgtgtaccatgtttggtattttgtcttattgtttctctactaagaactctttttaaatgtggtttgttattgtagcactttttacactgaaactatacttgaacagttccaactgtacatactgtatgaagcttgtcctctgactaggtttcttatttctatgtggaatttcatatcttgcagcatcctgtaaataaacataaaag

SEQ ID NO: 17948 - DNA, 723 bp, Macaca Fascicularis
  misc_feature (1)...(723): n = A,T,C or G
aagcccggcagcagcgggcacaggcagtccaggcnnnnnnnnnnnnnnnnnnnnnnnnnnnnnnngcactgagtgcccaagagggatttgagagaataaaacaaaagtatgctgagttgaaggacaggttgggtcagattaccacgctgggtgaacagggtgcccggatccagagtgtgaagacagaggcagaggagatatttggggagaccatggagatgatggacaggatgaaagacatggagttggagctgctgcggggcagccaggccatcatgctgcgctcggcggacctgacaggactggagaagcgtgtggagcagattcgtgacnnnnnnnnnnngagggnnnnnnnnnnnnnnncgtgcaagtgatgttnnnnnnnnnnnnnnntttccctactcatctgccccctttgcttttagttgggggcagattgggttggagtgctttccatctccaggagtctttcatgcagccaaagcacagcctggaccatccctggtgtgcagctagtaagattaccctgagctgcagctgagcctgagtcaatgggacagttacacttgacagacagagatggtggagattggcatgccattgaaactaggagctctcaagtcaaggaagctgggctgggcagtatcccccgcctttagttctccactggggaagaatcctggaccaaacacaaaaacttaacaaaagtgatataaaaagaaa

SEQ ID NO: 17949 - DNA, 747 bp, Macaca Fascicularis
  misc_feature (1)...(747): n = A,T,C or G
aacaatcagctgccactnnggttgccaacaggctcacagagaagtgttgtgtggaaacaaaaatgaagatgctctttctggctaacctggagnnnnnnnnnnnnnnnnnnnnnnnnnnnnnnnnnnnnnnnnnnnnnnnnnnnntgtgatgtccctgcatggagctnnngaattactaaaagaacttggcatccgctgtgtcgtgatggtctgtgaatggtgagggtgggagtcaggagacaagatggcgcagagagggctggttagccagaaaaagcttcaggcttgacaaatggaagaacttgagtcagagttcagtctgcagtcctgtgctcacagacatctgaaaagtgaatggccaagctggtctagtagatgaagccgaactgaggagggagaggcctgcatccacatagannnnnnnnnnnnnnnnnnnggctgtcagtggcagagtttggctgtgnnnnnnnnnnnnnnnnnnnnnnnctcgtttgaaggaggnnnnnnnnnnnnnnnnnnnnnnnnnnnnnnnnnnnnnnnnnnnnnnnnnnnnnnnnnnnnnnnnnnnnnnnnnnnnnnnnnnnnnnnnnnnnnnnnnnnnnnnngcctgggcctctgtattcccaagctgtgtgttctggacnnnnnnnnnnnttaatctcacatagcgaaagtgactgatgagcagtaagtgtggggatttacacttgagggcttccctcctgaccagcctctcttacaggaact

SEQ ID NO: 17950 - DNA, 658 bp, Macaca Fascicularis
  misc_feature (1)...(658): n = A,T,C or G
gcccgcctccccgnngnngcccaccggcgccggcggggtcatggagccgcacgccgtctattcgggctcggcggcggcttggccgccctcggcctccgcggcactcaacagcggcgcctcttacatcaagcagcagcccctgtccccctgtaaccccgcggccaaccccctgtccggcagcctctccacgcattccctggagcagccgtannnnnnnnnnnnnnnnnnnnnnnnnnnnnnnnnnnnnnnnnnnnnnnnnnnnnnnnnnnnnnnnnnnnnnnnnntgtgtgatcgaaaggagtttgtcttctctttcaacgccatggcgtcctcttccatgcactcggccggcgggggttcctactatcaccagcagnnnnnnnnnnnnnnnnnnnnnnnnnnnnnnnnntgaggctgccgccgccggccctcctggtgcaggcaggcgggtcacagggacnnnnnnnnnnnnnnnnnnnnnnnnttattctcgaggtataaccgtcggcagaaaaaaagggttccacccctccgcaacaggagtatttggcaagnnnnnnnnnnnnnnnnnnnnnnnnnnnnnnnnnggcacctccttcctcactccctcaaaattgttaagaaatggtagtggtgggtctgatccgactgcagccgt

SEQ ID NO: 17951 - DNA, 165 bp, Macaca Fascicularis
agaggaaggaagtggaagagatttatgagatggatcaagtagaaatggtggacttagatgcaaatcaggaaagagggcgccattacaatggagaagcatatgaggatgatgaacatcatcccagaggtggtgttcagggtcatacctcttaatgggccagtgaat

SEQ ID NO: 17952 - DNA, 736 bp, Macaca Fascicularis
  misc_feature (1)...(736): n = A,T,C or G
cagnnnnnnnnnnaattgtgctaaagagctaaagaggcaaagttctttgggtatttttcacctcctggtggccgtggatggaatcaatgctctttggggaagaaccaccctgaaaagagaagataaaagcccgattgccccagannnnttagcacttattcacaacttgaggaaaatnnnnnnnnnnnnnnnnnnnnnnnnnnnnnnnnngtcgactttgagccagactgggtctctctttaagccccggaaagnnnnnnnnnnnnnnnnnnnnctgggaaaggaannnnnnnnnnnnnnnnnnccctttattcccatcctggtttccaactataacccaaaggaatttgaaagttgtattcagtannnnnnnnnnnnnnnnnnnnnnnnnnnnnngaaagctcctacagaagaagggaannnnnnnnnnnnnnnnnnnnnnnacgcgaacccctcgctgctggagcggcactgtgcctacctctaaaccacgatcacaacatgtgaggaagacagtggacatctgcttttgtctggacctagtgagatgaggaagtcgggcagtacacaggaagaggagccaggcccttgtacctaggggattggacaggactgcagttggctctagacctacattaaaatgggtttcannngtgaannntgtgannnatannnatgtnnnttcctgaaacttctattggtttattggatgtggtttttcacatttaagataact

SEQ ID NO: 17953 - DNA, 734 bp, Macaca Fascicularis
caagggtctgtatatacatttcataaggcctgccctctcccatgttgcatgcctattgtactctacagccaaagtgtagcccttcctggagcctctgccctgcctccctttatggcagggtggggtaggggtgactgaatttgggcctcttgtacagttcactctcccaggtggattttgtggaggtgggaaaaagggcattgagactcttaaagcagtagacaatccccaaataccatctgtagagttggaactgcattcttttaaagttttatatgcatatattttagggctgtagacttactttcctattttgttttccatggcttattctcgagcacaaaatggtaatcaattattacatttatacatcacctttttgacttttccaagcccttttacagctgttggcattttcctcgcccaggcctgtgaggtaactgggatcgcaccttttataccagacctgaggcagatgaaatttatttccatctaggactagaaaaacttgggtctcttaccgcgagactgagaggcagaagtcagctcgaatgcctgtcagtttcatggaggggaaacgcaaaacctgcagttcctgagtaccttctacaggcccggcccagcctgggcccctcttttggccttgtggataagggacagttgaccgttttcatcctggactccttttgctgttgtttggatgtttccacgggtctcacttataccaaagggaa

SEQ ID NO: 17954 - DNA, 771 bp, Macaca Fascicularis
  misc_feature (1)...(771): n = A,T,C or G
gagaagaggagcgctcatgtctttttgcaccccaagttggctggagcatcggccaccccaagattcatctgtcacctccaggcagcagtctctgctccagaatctctggacagagctgctggcagcttctgcgagaagagagagnnnnnnnnnnnnnnnnnnnnnnnnnnnnnnnnnnnnnnncttgaacttgaatggagactgtagactcccggactttcccctaggactgggggccctgtaggctgctgttggagaannnnnnnnnnnnnnnnnnnnnnnnnnnnnnnnnnnnnnnctccacacaagggcagagagtctgtctagatttcttgctgtcctgccagttccgcccnnnnnnnnnnnngtcctgcccctcacgggcaccctagctgctgacagtcctttgtggccgccgtccccatcccctgccctcagcacacacgtccgcacacacagctttctttgttctcacctgtacctgtcattccaacatccctgcctcttgccacaaactgccccagcaagaatttgaggttctgacacagtacccatcccccacagtaccccttcagctcagtttctagaaagctcccttttctttgaaatctgcatgttaaattgaactttgtgattttattttttgtttcaaaaaagtttaagaaaatggaaatgggcaagtgagtgaagacatattttagcactgaatagaatatttttaaaattaaactatttgaaatatgaaaaaaaaaaaaaaaaaaaaaaaaaagg

SEQ ID NO: 17955 - DNA, 770 bp, Macaca Fascicularis
  misc_feature (1)...(770): n = A,T,C or G
agaaagctgacagnnnngtaacacgtgaatggcaaagatggannnnnnnnnnnnnctggtgacagtgcctcctgggcccagcttggctgatgctctcatcagttctccgattttggctggcgaaggtgnnnnnnnnnnnnnnnnnnnnnnnnnnnnnnnnnnntttggagtagatcccagtgctgatcctgnnnnnnnnnnnnnnnnnnnnnnnnnnnnnnnnnnnnnnnngcagcggcaggaggaggaggcccgnnnnnnnnnnnnnnnnnnnnnnnnnnnggccgggattgctacgactgggactgaagactcagatgatgccctgctgaagannnnnnnnnnnnnnnaagagtttggccgcactgggcttcctgacctaagcagtaggaagaagcannnnnnnnnnnnnnnnnnnnnnnnnnnnnnnnncagagtttgnnnnnnnnnaatcagcagacattgatgccagatcaaccatggacacatatgagccaaccaaggaggaggatgattacgacgtgatgcaggacccaaagttcattaagagtgtcctagagaacctcccaggtgtggatcccaacaatgaagccattagaaatgctatgggctccctggcctcccaggccaccaaggacggcaagaaggacaagaaagaggaagacaagaagtgagactggagggaaagggtagctgagcctgctcaggggactgcatgggnnngcacggaatatagggttagatgtgtgttatctgtaaccattacagcc

SEQ ID NO: 17956 - DNA, 726 bp, Macaca Fascicularis
  misc_feature (1)...(726): n = A,T,C or G
cgccacatccaatgagaggagagggcactgggtcgctgtgccccacggcaggcccctgcaggaaaactgacatccttgggcacctcgacttgtgaacaagttgttggctgctccatccacaacttctgtagcagactgtccctgttgtacctgcccagggcatgttttgcccgccaaatcaccatggcccacatagaggcccacctgcctctgtctcactgaactagaagctgagcctagaaactaacacagccatcaagggaatgacttgggcggccttgggaaatcgatgagaaattgcagttcagggaaggtggtcattgcctnnnnnnnnnnnnnnnntgaacagagcttccttaggttgatgctggaggcaggatcccggctgtcaaggggtgttcagttaaggggagcagcagaggacatgaaaaattgcgatgactagagcagggacaatttgctgccaaatacccatgcacagctgtatggctgggggctcctcgcatgcttgggacccccagaatgaatatgctcagctaccctgtgggccgagcaatccannnnnnnnnnnnnnnnnnnnnnnnnnnnnnnnnnnnnnnnnnnnnnnnnggtgctagggaaggcggggaccttggcttgagtaatgctcatctgtgtgttttaaagagtttcatcacctgttgtctgtgtttgctgaggagagtggaacagaaggggtggagtttt

SEQ ID NO: 17957 - DNA, 726 bp, Macaca Fascicularis
  misc_feature (1)...(726): n = A,T,C or G
gggacatgttcatnnnnnnnnnnnnnnnnaatggggattcttaccaagggtcccaagtcggagccnnnnnnnnnnnnnnngtggataccnnccgtcatgttatcaatcagacgggaggctacagtgatggccttggaggaaattcactgtacagtccacataatttaaatgctaatggaggctggcaggacgcaacaactccatcttctgtgacttctcctacagaaggcccaggaagtgtgcactcggatacctctaactaatctctggccacacttttccctgagctgacatgccttgataagtgcattcagagcaataggaggaaaaggaaagcgtttttgtagcccaccatctacagctttactgtaaaaccttgtcttattagagaacttggtaaatctgttttttaaggaatcataatcatttgtatttatacttaaaaacacacaatgttaaaaaataaaaaaaagcactttatnnnnnnnnnnnnnnnnnnnnnnnnnnnnnnnnnnnnnnagctattttatcataatttattaccaatattttacattaannnnnnnnnnnnnnnnnnnnnnttggccttaagggtaaaaagtacaatatacactaaacctcaatcgttaaagcagatgcaaaaattcacctcacctaaattgaacttcttgcatatttnnnnnnnnnnnnnnnnnnnnntnactttcatatcactaatggagtgga

SEQ ID NO: 17958 - DNA, 743 bp, Macaca Fascicularis
  misc_feature (1)...(743): n = A,T,C or G
gatgaaggagagagaagtgcagagttcgattctgtacaagggggcagcggcagaaggccggccgggcgggtcactgggcgtccacccggaaggacagcagcttctcggaatgcatgttgttcagggtccgcaggtccggcagcttgagcagcagcttggtgaagcgggaagtctccnnnnnnnnnnnnnnnnnnnnnnnagcccgaagagcccgcagcagcgtctcctggagctgctccaccgaagcggaattctccatgcccgagcggtctgtggggaagacgacagcagtgaggcggactccccgagctcctctgacgaggaaccggaggtctgcgaggacctggcaggcaatgcagcctctccctgaagccccccccccgagggccgatgggtaaggagaaggnnnnnnnnnnnnnnnnnnnnnnnnnnnnnnnnnnnnnnnnnnnnnnnnagctgggagcgtgggctcagcagggctggtcacctcccatnnnnnnnnnccaccttcccttcctcaacaggccgaacgtggccaggctcccttgctttttgctgtgtagttccctctgcctgggatgcccttccccctttctctgcctggcaacatcttacttgtcctttgaggccccaactcaagtgtcacctccttccccagctcccccaggcagaaatagttgtctgtgcttccttggttcatgcttctactgtgacacttatctcactgnnnnnnnnnngtcggc

SEQ ID NO: 17959 - DNA, 721 bp, Macaca Fascicularis
  misc_feature (1)...(721): n = A,T,C or G
gcccgcgcacccggaaagtcaaaagcatgtccccacaannnnnnnnnnnnnnnnnnatggcagctccgagagcagaggctctatttgacttnnnnnnnnnnnnnnnnnnnnagctgaatttcaaagccnnnnnnnnnnnnnnnnnnctcannnnnnnnnnnaaagactggctggagggcactgtccggggnnnnnnnnnnnnnnnnnctctctccttcgtgaagatcctcaaagacttccctgaggaggacgaccccaccaactggctgcgctgctactactacgacgacaccgnnnnnnnnnncaaagacatcgcggtggaggaagatcttagcagcactcccctattcannnnnnnnnnnnnnntcacgaggcgggagttccagagggagnnnnnnnnnnnnnnnnnnnnnnnnnnnnnnngggatctggttcggctgctgtcagatgaggacgtggtgcttatggtacggaaggctcgcggcctcccctcccagaagcgtctctttccctggaagctgcacatcacgcagaaggacaactacagggtctacaacacgacgccatgagctgacagtgtccctggagcagttaggggacaccagcaagaaccttcagctctcagaggagattaggaccaggaaaacctgggggaatgggcagacttcccgtctctgaggccggtggacccatggggtttgtaatcnnnnnnnnnctactc

SEQ ID NO: 17960 - DNA, 748 bp, Macaca Fascicularis
  misc_feature (1)...(748): n = A,T,C or G
cgcgccctggtngacggctgtgcnnncaagaaannnnaccagaagacggtnnnggagatcgacacccccaaagtggagcaggtgcccatcgtggacatcatgttcaatgacttcggtgaagcgtcacagaaatttggatttgaagtggggccagcttgcttcatgggctaggagccgcccagcccgggctcccgagagcaacctcgtgacctcagcatgccgttcgttcgtgagtgtcccgtgcacgtcctgatcctggacagtgaaggcttctccctcccctcccgcctgacttcatctgcgcctcggcaccgcggggcgtgggaccccagcccggagagaacagagggaaggagccgcgcccccacccggagccgaatcacatgacctagctgcaccacagcgcctgggcccgccccacgctctgtccacacccacgcgccccgggagcgggggccaggcctccggccccccagctcgcctgaccaatcctgttcgtgaatagctcgcaggggttgggggagggactgccagatgtggacgctgtatttttttttctaaattcaacttgaagatgcgtatttcccctgaccttcaaaaaatgttgcgaggtaagccttgtaaaggtcatcccaccgtcaccaaagcctccgtttttaacaacccccaacacgatccattcagaggccaaatgtcattctgcaggtgccttcccgaatggattaaaggtgcttatgtttttgtgagt

SEQ ID NO: 17961 - DNA, 828 bp, Macaca Fascicularis
  misc_feature (1)...(828): n = A,T,C or G
agacctgggagaagcttctgctggcggctcgtgccattgttgccattgaaaaccctgctgatgtcagtgttatatcctccaggaatactggccagagggccgtgctgaagtttgctgctgccactggagccactccaattgctggccgcttcactcctggaaccttcactaaccagatccaggcagccttccgggagccacggcttcttgtggttactgaccccagggctgaccaccagcctctcacggaggcatcttatgttaacctacctaccattgctctgtgtaacacagattctcctctgcgctatgtggacattgccatcccatgcaacaacaagggagctcactcagtgggtttgatgtggtggatgctggctcgggaagttctgcgcatgcgtggcaccatttcccgtgaacacccgtgggaggtcatgcctgatctctacttctacagagatcctgaagagattgaaaaagannnnnnnnnnnnnnnnnnnnaggcagtgaccaaggaggaatttcagggtgaatggactgctccagctcctgagttcactgctactcagcctgaggttgcagactggtctgaaggtgtgcaggtgccctctgtgcctattcagcagttccctactgaagactggagtgctcagcctgccacggaagactggtctgcagctcccactgctcaggccactgaatgggtaggagcaaccactgaatggtcttaagctgttcttgcacgggctcttaagcaacaggaaaaatggttgatagaaaaaaaacatcagtttctaaaagttgtgtttatttagtttggttttttac

SEQ ID NO: 17962 - DNA, 772 bp, Macaca Fascicularis
  misc_feature (1)...(772): n = A,T,C or G
caattgacttaactgcatgatttctgttttatctacctctaaagcaaatctgcagtgttccaaagactttggtattgattaaagcactgtccagtaatgaaatctcaaaacagagctcagctgcaaaaaagcatattttctgtgtttctggactgcattgttgtccttgccctcacatagacactcagacaccttcacaaacacagtagtctatagttaggattaaaataggatctgaacattcaaaagaaagctttgaaaaaaannnnnnnnnnnnnnnaaaaacctaaatatatggtgaagattgtaggactgtcttcccaagccccatgttcatggtggggcaatggttatttggttattttcctcaattggttattctcatttgaaatgagggagggacatacagaataggaacaggtgtttgctctcctaagagccttcatgcgcacgcctgaaccacgaggaaacagtacagtcactaaccaagtggattttaaagtaaagtatattcataacataacagttattctgttgttataaaactatacccactgcaaaagtagtagtcaagtgtctaggtctttgatattgctcttttggttaacactaagcttaagtagactatacagttgtatgaatttgtaaaagtattatatgaacagctagtgagatttcaaactcttgtaattgtggttaaatagtcgttgtattttcttgtgaactgtgtttaatgattttacctcaaatcagaaaacaaaatgatatgctt

SEQ ID NO: 17963 - DNA, 784 bp, Macaca Fascicularis
  misc_feature (1)...(784): n = A,T,C or G
atgatgatcaatatagttntgagctttatgataacagatnnncttgtataagatcttacatnntaagggtcaaaagctctagaatctgtaattcaaaagttttaagagtctaaagatggagtttctaaggtccagtgttctaagatgtgatagtctaagacttactctaagatcttagattctctgtgtctaagattctagatcannnnnnnnnnnattctagacgattaaataagatcctaatggtttgttctgtttcaaggcactttagattccattggtccaagattctggatcctaagtatctaagttataagactctcacactcagttgtgactaactagacaccaagttctaatcatttctannnnnnnnnnnnnnnnnnntctttgctgcattctgcctctctaggaccatggttaagcatccaagaatccacatttctaaaatcttatagttctaagcactgtaattctaaggctcaaatgttctaagtttctaagagtctaaaggtccacaggtctagactattaagtgcaattccaaggttctaaccctatactgtagtattctnnnnnnnnnnnnnnnnntttttagccaccattgcttcctcctcccctcctgtgggggtgtgcccccttcaagcctgtgcaatgcattagggatgcctcctttcccgcaggggatggacgatctcccgccttccgggttatgttgcccccctgagccaatccttcatcttctgagtatacagtgtggactctgnnncttcagaggggctca

SEQ ID NO: 17964 - DNA, 735 bp, Macaca Fascicularis
  misc_feature (1)...(735): n = A,T,C or G
gaggatgaggaagaggaaggaactatgaaaagaagggatgagaccatgcagcctgcaaaaccatctnnnnttgaatattttgaacaaaaagaaaaggaaaaccagatcaacagctttggcaagagtgtacctggtccactgaaaaattcttcagattggaaaataccacaggatggagactacgagtttcttaagagttggacagtggaggaccttcagaagaggctcttggccctggaccccatgatggagcnnnnnnnnnnnnnnnnnnngcagaagtaccagtccaagcggcagcccatcctggatgccattgaggctaagaagagacggcaacaaaacttttgagcaaggccaggctgtgagggccccagctccacccaggctttgggtgaattctggatggcttgcctcacatctnnnnnnnnnnnnnnntactctgtcgtctctccacagcacctttgtgaactcaggaatgtgcnnnnnnnnnnngggctctcttgacagccagcgtgccatcttgatgtgtgtatgtacattggtcaggtatattatttcaaaggatttatattggcgcttttaactcagagtttcaaaccccaggaacagagactcctagttgagtgatagctgggaaagttttacatcgtctgtttgtttttcttctcccaatagctttcaattgttctttctggaagacttttaaaatatatataaatatgcatatatatataa

SEQ ID NO: 17965 - DNA, 750 bp, Macaca Fascicularis
  misc_feature (1)...(750): n = A,T,C or G
aaagatacgccaacgacgacaagcnnnccagnnggctgaagnnnnnnnnnnnnnnnnnnnnntttgagcgagagctctacagtgagatcctggacaagaagttcacggtgaccgtgaccatgcggaccctggaccnnnnnnnnnnnnnnnnngggttcgacttttacatcctcaagaccccgaaggaggacctgtgctccaagttcgggatggacctgaagcgagggatgctgctgcggcttgcccggcaggacccccagctgcaccccgaggaccccgagcggcgggcggccatctacgacaaatacaaggaatttgccatcccagaggaggaggcagagtgggtgggcctcacactggaggaggccattgagaagcagagacttctggaggaaaaggaccctgtacccctgttcaagatctacgnnnnnnnnnnnnnnnnnnnnnnnnnnnnnnnnnnnctgtcagagccggtggtggtgcagaagagagccagtggccagtgaccacacagctcctccgtgcctgaccaccaggcccagccttccctgccaggccctttgcaccgaggacacagatcctggggagctgtgagggccannnnnnnnnnnnnnnnnnnnnnnnnntttgtgtgctgcccatgtaccttccagcctggggccagcttggcagggatccccaggaggcctggggccacccagttccnnnnnnnnnngggcccccatgctcggggnnnnnnnnnntgtgccc

SEQ ID NO: 17966 - DNA, 731 bp, Macaca Fascicularis
  misc_feature (1)...(731): n = A,T,C or G
aaagaggaaaagttaaataaattacagaagttacttattcttttaagaggtctgcctggttctgggaaaacaacattgtctcgaattctgcttggtcagaatcgggatggcattnnnnnnnnnnnnnnngactattttcaccatcaagatgggtacagnnnnnnnnnnnnnnnnnnnnnnnnnnnnnntgactggaaccagaacagagcgaaacaagctatnnnnnnnnnnnnnnnnccagttataatagataacactaatatacaagcttgggaaatgaagccatatgtggaagtggccataggaaaaggatacagagtagagtttcatgaacctgaaacttggtggaaatttgatcctgaagaattagaaaagaggaataaacatggtgtgtctcgaaagaagattgctcagatgttggatcgttatgaatatcaaatgtccatttctattgtaatgaattcagtggaaccatcacacaaaagcacacaaagacctcctcctccacaggggagacagaggtggggaggctctcttgactcacataatcatgtctgtgtcacaaataataattaaattagctattttcagctaacacatttgttgttgnnnnnnnnnnnnnnnnnnnnnnnnnnntggagtttaaatagtttcaaataaaaaaaggctacattgcctcacaaaggattttcccagcaagtgnttnnnttcccagcaannnnaaagtgtaa

SEQ ID NO: 17967 - DNA, 664 bp, Macaca Fascicularis
tttcagatcccctccgtgggggccttcttctgacagagagaattctttgaggtccgcagtagtgcttttgtcggcaaagactgctaatctgcatcttgctgcgttatgtttactgaggttgggctcattcatttaacatgtaccaaccgttacctagaggcaccatggagagttagtcatggaataaagtactggccttgcagatgaaaaactgtctccagagcagacttctgacaggaaaggtttaggtgctggagagttgaagaggtataagaagagatcatgccctcatttttcacttatttttttggttattcatttataataaaaggttggcattgatgtggtccagcctgcaaattacttgcagttctgagtttcagataaaacattaaattcaatacatactgctcctttgaaatttgggtaaaaaattatacaaccgtatatatagtcatttttgtattttttctatgttgtgaaaaccaaaattgtaattttataagtctttgattcactaaaattatataatttaaatgtattttttgtatatttagaaataaggagtccagagacatatgcttaactttctatgcatgcatttgaaagctgtttttacctgataatgttaatgtggtaataagttgtattcataaaatactga

SEQ ID NO: 17968 - DNA, 655 bp, Macaca Fascicularis
  misc_feature (1)...(655): n = A,T,C or G
tcaanctacactgtnnntcaaactcattagatctggagacaaggaccgtatgcaccacaaaaatttctccaagtgtggtctgtgggccagtggcataagcatcactaaagagcttgttaggggtgcagaatctcaggctccactcagacctactgaatcagagtctgcattttaacaccatctctgaatggtaagcacatgaaagtctgacaagtgctgcctctagggtttccttacattcgttcatcttcaaaagttcctaaaggccggcctcttgtctgagatttccagctgaaagcatttccctgcttctcttctcatctctaatgaatatttaccttttctactaacactccaagttttgcaatgtttaaactcttaagtttattatcttttgtttttctttcagtatggatgacccatattaaatcgccctcggtgaaagaaaagtcttggaatactgaaaatcatgggatcctttaaatccttccatgaaacgttttgcatggtggcacctcctacatcaaacatgaagtgtgtttccttcagcacatctggaaagatttctacctgaccaacagctccttctgcttccattctgcccctcatttatccctcaacccccagcccacaggtgtttatatggctcagcttt

SEQ ID NO: 17969 - DNA, 1078 bp, Macaca Fascicularis
  misc_feature (1)...(1078): n = A,T,C or G
cannnntaaatgatctgnnnctaaaagcgttggatgtagcattatgcaattaggtttttccttatttgcttcattgtactacctgtgtatatagttttaccttttatgtagcacataaactttggggaagggagggcagggtggggctgagtaactgacatggagggggatatgaagagcttgctttgatttgcagcaagtagataaatatttgactttcatgaagagaagcaattttgggaaaggttttgaattgttttctttaaagatgtaatgtccctttcagtgacggctgatacttcatttgaaaaatcacaaaaatttgaacactggctaaagataattgctattgtttattctcatttgggagatctggtgatctcccaagtttgttaaatagctgcatatggcttttttaaaaaagcaacaaaaacctatcctcagtgccctccccaatctctcttaaagttggaatttaccannnnnnnnnnnnnnnnnnaatcactccaggtagtttggnnnnnnnnnnnnnnnngcttgggagttttcaatgttaagaattgaccatctgcttttattaaatttgttgacaaaatttcttcattttcttttcactttgggctgtgtaaacacagtccaaataattctaaatccatcgatatttttaaagatctgtaagtaacttcacattaaaaaatgaaatatttttaatttaaagcttctttgtccatttatccaaaggaaggtgttatttttaaaggaaggttcatgtagagaaaagcacacttgtaggataagtgaaatggatactacatctttaannnnnnnnnnnnnnnntgtgtatggagaaccttttgaagtgtacctgtgtacataactctgtaaaaacactgaaaaattatactaacttatttatgttaaaagattttttttaatctagacaatatacaagccaaagtggcatgttttgtgcatttgtaaatgctgtattgggtagaataggtttttcccctcttttgttaaataatatggctatgcttaaaagattgcatactgagccaagtataattttttgtaa

SEQ ID NO: 17970 - DNA, 681 bp, Macaca Fascicularis
  misc_feature (1)...(681): n = A,T,C or G
tgatgtggtagcttgtgacnnnnnnnntgatgnnnnnnnnnnnnnnnnnnnnnnnnnnnnnnnnnnnnnnnatatgtgggatnnnnnnnnnnnnnnnnnnctaatggaatttgggcacctgtttcccccannnnctccaatannngctggaggagcaaatgaccggtgggtacgatctgtatcttttagccatgatggactgcatattgcaagccttgctgatgataaaatggtgaggtnntggagaattgatgaggattatccagtgcaagttgcacctttgagcaatggtctttgctgtgccttctctactgatggcagtgttttagctgctgggacacatgacggaagtgtgtatttttgggccactccacggcaggtccctagcctgcaacatttatgtcgcatgtcaatccgaagagtgatgcccacccaagaagtcctaggagctgcnnngttccnnnnnnnnnnngagtttctctcctatcgtannnnnnnnnnnnnnncttccttagtagtagggactgacagaatacacttaacacaaacctcaagctttactgacttcaattatctgtttttaaagacatagaagatttatttaatttgatatgttcttgtannnnnnnnnnnnnnnttgagcttttaaaatattatttatagataatagaaatatttctg

SEQ ID NO: 17971 - DNA, 784 bp, Macaca Fascicularis
  misc_feature (1)...(784): n = A,T,C or G
ttttgttgtaattacccagtctcaggtagttctttacagcaatgcaagaacaaactaatacaagttccaaacagtttcagtaaatatgtaaatattgctggacattttgggtttttccctcattataagtaacaattatggctgggtgtggtggctcacgcctgtaatcctagcactttgggaggccgaggcgggtggatcaccttagatcaggagtttgagactggcctggccaacatggtnnnnnnnnnnnnnnnnnnnnnnnnnnnnnnnnnnnnnnnnnnnnnnnnnnnnnnnnnnnnnnnnnnnnnnnnnnnnnnnnnnnnnnnnnnnnnnnnnnnnnnnnnnnnnnnnnnnnnnnnnnnnnnnnnnnnnnnnnnnnnnnnnnnnnnnnnnnnnnnnnnnnnnnnnnnnnnnnnnnnnnnnnnnnnnctcaaaacaaaaaggaaccagtaactgaacatctttataccaaataaatgaaatctttgcagacaaaatatatatgcatacatttatatagtacacatatatcttaagtgatcaacaagcatgcagtgtgtgtggagatacaggagatacaggaaaatatagatgatgtaaaatacagctttattagaattctctgaaaatgtttgataatatacaagcagtctgactcccagtgctttgtgtcattataaaaataagaaaataacttgctttaattctaatgcagcattttttaatctgccaaataaactaaatttctgtttctgaaancctgtgcatatgtctcattgaa

SEQ ID NO: 17972 - DNA, 797 bp, Macaca Fascicularis
  misc_feature (1)...(797): n = A,T,C or G
gccaacatacaatgtgnatgaaagctagtacatgagtgcagctgctaaaantttcagcacagggctcttgctgactctgctcatgagacggcatcagccacccgatgactggcgtatcttggtcctgtgtctttcttcttatgctgtgttaatgtgtttactttccatttggcagagagacaagagannnnnnnnnaacttcgacaaagagttcaccagacagcctgtggaactgacccccactgacaaactcttcatcatgaacttggaccaaaatgaatttgctggcttctcttacactaacccagagtttgtcattaatgtgtaggtgaatgcaaactccatcattgagcctgggnnnnnnnnnnnnnnnnnnnnnntnnnnnncaattatagtcnnnnnnnnnnnnnnnnnnnnnnnnnnnnnnnnnnnnnnnnnnnnnnnngtcttagagggcttttctttgtatgtgtagcttgctagtttgttttctacatctgaaaatgtttagtttagaataagcgcattatccaattatagagatacaattttccaaacttccagaaactcatcaaatgaacagacaatgtcaaaactactgtgtctgataccaaaatgcttcagtatttgtaatttttcaagtcagaagctnnnnnnnnnnnnnnnnnnntttacagttattctataataccttctttgaatgctaagcatgaccaatatttttaaaaattgtgagtaagctttgcagttactgtgaactattgtctcttggaggaaatttttnnnnaagaattga

SEQ ID NO: 17973 - DNA, 787 bp, Macaca Fascicularis
  misc_feature (1)...(787): n = A,T,C or G
cagcagcactgaaatgaatgccgnattggtacacatgtgtnnnnnacctcaaggtaacaagagtatgtggcaaaacatataccacccatagtgcttcacaaaatgcacttctatttagccagcgtttattgtagtaaactattcttaataaaactcattcactgtttataaatgttctgatatgcattctttatagtgaagtgttaatacatcacatcttatttattttagcaaatcagtatattttctgtatttaattataaaaattaacttagtttttaaaatttatttgcaaatacactttttccatttggcactatggtttgttgcctacctagctgaatctataatgtcagcttatcctaaggctgtccacgtacttaatttacttaagtgttcattttaagtaacgtgctcactgtgtataggaatttgtattttggaggtgcttgatctatctacaaagaaaaattaattaggaattactttattataaaatgctcctagaagtcttaattgtgtttattttttaaaaaaaacgaatgttagacttgtgtgcatggaagtaattaaggtacatcattattgtagtttaaaagttgtacatgataagacattttgtttttactgtatgtttttactgaatgatctattccccatcccaaggcaagcatgaataaaattaggttaaacgtagcatgtggcatcgcagtctcttagaatttgtttcatctattttattttattgaatactgtctgtatctttggttatcctgttgaagaaaaa

SEQ ID NO: 17974 - DNA, 1113 bp, Macaca Fascicularis
  misc_feature (1)...(1113): n = A,T,C or G
caannnnnnnnnnnnnnnnnnnnnnnnnnnnnnatgttggactgggtgcggtggctcatgtctgtaatcccagtactttgggagnnngaggcaggcagatcacttgannnnnnnnnnnnnnnnnnnnnntggccaannnnnnnnnnnnnnnnnnnnnctaaaaacacaaaannnnnnnnnnnnnnnnngtgggcacctgtgatcccagctacnnnnnnnnntgaggcaagagaatctcttgaatctgggaggcagaggctgcggcgagccaagatcacacaactgcnnnnnnnnnnnnnnnnnnnggcgagaccttgtttaaaaaaaaaaaaaaatcaatgttggggtttcaggtgccattgacagaacacccaattcaaattgactgaagcaaagannnnnnnnnnnnnnnnntttcacatggaaacccaggagtggataacactggcttcaggcaaagcttgaatcaggactcaatctannnnnnnnnnnnnnnnnnnnnnnnnnatgtcctcagggttggcaactgcagtgtagactgcagtggacagtccccaccttgtcactactactacactttgctcctctggcctgagggatgaggagagaggctgtgtcagagactgaagctgttctcaggatcactgggctcttcttggcagaggggatgtctggcttgcctgaagggagtggctctgtaaggacgtcttgatgctttcttcattaagattttgaatatttttatgtacttgagttttttttttttttttcaatttctagaggaacttttctttgttaattcctggaactgtattttgaacccttgaaggtgagccctcatagggagatccaaagtcctgtggttaacgcctttgtttatagacgaggcagctaagtcctggggatgtgaacaacctgctggcagacctcatttactggattttccttcagccaggtgaactggaatggcttggggcgtggaagggcattaggagcgtttcatctgatatgtgaatgctcataaaaaaatgtcgagaaatgaagaaaaacaattctcnnnnnnnnnnnnnnnnnnnnnnnnnnnngtgaaagtcaaattcatgtacagtacat

SEQ ID NO: 17975 - DNA, 759 bp, Macaca Fascicularis
cagtttgtaggaagaattattttcatggtgctactaatcctgctgtatcccaggtttttaatataaaggtgttaagcctattttgctttgtaagtaaaggatgtgtatattgtgaacagccttttagctcaaaatgttgagtcatttacatatgacatagcatgaatcaccttttacagaaaatgtaggaaaccttagaatacagacagcaatattttatattcatgtttatcgaagtgagagaatttatattcctacatcaagttactactgagagtaaatttattttgagttttatcccctaagttctgttttgatttttttaaaaaacaaacccttttagtcactttaatcagaattttaaatgttcatgttacataccaaattataatatctaatggaggaatttgtcttttgctatattctccaagattatctcttaagaccatatgccccctgttttaatgtttcttacatcttgtttttactcatttctgactggacaaagttcttccaaacaattctgagaaacaaagcacacacatagaattaacaattctcttccctgtgctgcttatgtaagaatcttcctgtggtctctgcttgtacaaaactgggaaacaacacttggttagtctcttttaagttacaaaaagccaattgatgtttcttattctttttaaattttaaatactttattataaatattcacaggataccttatttccctagctgtcgtcttctcacttaatgttttta

SEQ ID NO: 17976 - DNA, 652 bp, Macaca Fascicularis
  misc_feature (1)...(652): n = A,T,C or G
gcacaggtgagcgaggggcaggtggcaggcccatggagacagagctctgnnnaaggcctccgaccctgctccccctccagacttcctgctgtgcgtcggcagctcgggtgctgtgcttcccgtgaggacccaggaccccttcctgccatacccaccaaggtcctgcctacagggccaggctgcctctagccccactactcgagaccctgctcagaggtaacggaggcagggtgggggaactctggccaccttgcctgccatgccctgagtcacgtccctccccctgcagggtggtgctggtgttgcgggaacgctggcatttctgccgggatggcagggtgctgctgggctcgagggccctgagggagcggcacttgggcctgatgggctaccagctcctgccggtgagtggccctggccttccccgtggcgcatccttactgccggcctgcgggtaacctgctgccctatcctctccccatagctacccttcgaggaactggagtcccagagaggcctgccccagctcaagagctacctgaggcagaagctccaggccctgggcctgcgctgggggcctgaagggggctgaggggatgatgtggggttcaggatggcccccccatggggggtggatgatttgcactttggt

SEQ ID NO: 17977 - DNA, 745 bp, Macaca Fascicularis
  misc_feature (1)...(745): n = A,T,C or G
tgctgctgcgaggggagaanctnnnnncaatgacagtagagggacctcctcccaaagatactggtattgctcgagtgccgcttgctggagctgctgggggcccagggatcggcagggctgctggnnnnnnnnnnnnnnnnggggttcccatgcctcaggctcctgcaggacttgctgggccagtccgtggggttggcgggccatcccaacaggtgatgaccccacaaggaagaggtactgttgcannnnnnnnnnnnnnnnnnnnnnnnnnnnnnnnnngggccccgacccagtacccacctggccgtgggggtcctcccccaccaatgggccgaggggcaccccctccaggcatgatgggcccacctcctggtatgaggcctcctatgggtcccccaatggggatcccccctggaagagggactccaatgggcatgccccctccgggaatgcggcctcctccccctgggatgcgaggccttctttgacccttggccagagtatggaaatagctccgcagaggcgtgggctcgattcctcagggccacgttaccacagacctgtttgtttcttatgctgttgttcgcggagtctcacgggattgtctggtttcccttacagggccccctcccccgggaatgcgcccaccaaggccctagactcatcttggccctcctcagctccctgcctgtttcccgtaaggctgtacatagtccttttatttccttgtggcctatgaaactgg

SEQ ID NO: 17978 - DNA, 648 bp, Macaca Fascicularis
  misc_feature (1)...(648): n = A,T,C or G
cagccagacccctctcctgacnngagagccaacacctcccccgagagcannnnnnnnnnnnnnnnnnntggtgttcnnnnngcatcaccgtcctcctcaccctcccagtgtccccccaaggacccccctggattccccatggctcctcccaatttcttccttccttccccatatccacatgccttcctgccctttgccggggtcctctgaggccctggccggccggtgccctcctccccagctccaggaggcagatgagggggatgggggggcagatcttggactcatgaggaggggccccctgccctgtggggtcaacccttctggaaactgtgaagatctcactctgccccccccccatcttcgggaccaggatttgcacagaagcacatgcacctacccatacagcccctcttctgagcacagttcccccatctcgctccctgcccagaactctgaccccagtattctcaggcaccagtccctgtccggaatgccacccacatcttccatttccgtgtcccctcccagagctggtggacccagggaacagccactcccctccacactctaccagacaactgaggaggggagaggtgggctgtaacggacacggatcacganntaaattattaagcattttggttg

SEQ ID NO: 17979 - DNA, 700 bp, Macaca Fascicularis
  misc_feature (1)...(700): n = A,T,C or G
attatcatgaagagtgggagcttgcaggtaaggcttctgtggttgtttgaaaagcagaaagcaataaatgcaacaaaatgtttgtgtaatgtatttctgctttgtctctttcttcactcagagttgaaataggtnnnnnnnnnnnnnnnnnngaaaaaaagaaaacaaatgttcaaaactgtgtgtttgtgggtggaatttcctttgcttatagtagttttagtagtaactatatatttttttcctttctttttcacaggcacagaaaactgaatctgtagataacgaaggagaatgaattgtcatgaaaaattggggttgattttatgtatctcttgggacaacttttaaaagctatttttaccaagtattttgtaaatgctaattttttaggactctactagttggcatacaaaaatatataaggatggacattttatcgtctcatagtcatgctttttggaaatttacatcatcctcaagtaaaataaatatcagttaaatattggaaagctgtgtgtaagattgattcagcattccatgcacttgctttaaaatttagtcctgtgcatactgtggtgtttttactgtgcatatttgaatttttcatgcagtttttctagagcaataatcactggtgcttttgtacctaggttttatgtgattttaatgaaacatggatagttgtggccacctgctg

SEQ ID NO: 17980 - DNA, 562 bp, Macaca Fascicularis
  misc_feature (1)...(562): n = A,T,C or G
cccaaagtgtaccattttttttttttttttttcatgtttaacaatnnnnnnnnnnnnnnnnnnnnnnnnntacaagccatttattgggcttgaaatttgttggtcttttaaaaacaagaaatggggaaatgcaacaaaatgatctttccacttttcaaaagctttcaagtaaaggatagatcatagggccataaaagatccatttaatcaaacccactttcacctcctaccaattgtcttacacccattccacaatcttnnnnnnnnnnnnnnnnnnnnnnnnnnnnnnnnnnnnnnnnnnnnntaaccatttaaaaaatacttagcaccagcgtgcttcctatatgccaaacaaatcatgaaactacttcaatatgcatttcttctttttaannnnnnnnnnnnnnnnnnnnnnnnnnaagcaatacttagcctccagataaatttcccagaaatggcatatgccattcaaaggcctagacactctcatgctttcaatgtggaatacctagcctaatgtgcatagaagcatgaatggcaaagttgaagatcaatattataa

SEQ ID NO: 17981 - DNA, 765 bp, Macaca Fascicularis
  misc_feature (1)...(765): n = A,T,C or G
gacgaatagcacaaaaacagtgcagccgccaccagccccaaagggacgcttcctcctgccgccctggagcctcaaaccaccgtcatccataacccagtggacgggattaaggagtcttctgacagtgccaacaccaccatagaggatgaagacgctaaagcccggaagcaggagatcattaagaccacggagcagctcatcgaggnnnnnnnnnnnnnnnnnnnnnnnnnnnnnncgaaaatctgtgacccagggctgacctcatnnnnnnnnnnnnnnnnnnnnnnnnnnnnnnnnnnnnnnnnnnnnnnnnnnnnnnnnnnnnnnnnnnnnnnnnnnnnnnnnnnnnnnnnnntccacacgaccatcctgaacccgcnnnnnnnnnnnnnnnnagaggacgccgcctgcattgcttacatccggctcacgcagtacattgacgggcagggccggccccgcaccagccagtctgaggagacccgtgtgtggcaccgccgcgacggcaagnnnnnnnnnnnnnnnnnnnnnnnnnnnnnnnnnnnnnnnnnnnnnnnnnnnnnnnnnnnnnnnnnnnnnnnnnnnnnnnnnnnnnnnnnnnnnnnnnnnnnnnnnnnnnnnnnnnnnnnnnnnnnnnnncgcatgtttgtgtctgcctcgttccctcccctggtgcctgtgtctgcagaaaaacaagaccagattnnatttgttaaaaacaaaacaaaacaaaaaaacaagatgacgacgacaaccacaaaaaaa

SEQ ID NO: 17982 - DNA, 749 bp, Macaca Fascicularis
  misc_feature (1)...(749): n = A,T,C or G
acgcnnnnnnnnnnnnnnnnngattactggtaccctcagganntgcaggcccgtgcccgtgtggatgagtacctggcatggcagcacacgactctgcggagaagctgcctccgggccttgtggcataaggtgatgttcccnnnnnnnnnnnnnnnnnnngtatctccccagannnnnnnnnnnnnnnnnnnnnnnnnnnntgtgaacctgcagttgctcgaggacaagttcctccagaacaaggccttccttactgggcctcacatctccttagctgacctggtagcnnnnnnnnnnnnnnnnnnnnnnnnnnnnnnnnnnnnnnnnnnnttcgaaagccgacccaagctggccacatggcggcagcgcgtggaggcagcagtgggggaggacctcttccgggaggcccatgaggtcattctgaaggccaaggacttcccacctgnnnnnnnnnnnnnnnnnnnnnnnnnnnnnnnnnnnnnnnnnnnnnnnnnnnnnnnagctggaaagctttacccctgcactgccctcaacagtccacaaagcactttcatttctaatgacccatgggagccaggcccagaaagcaggnnnnnnnnnnnnnnnannnnnnnnnntcccagagcgcctcagctcccgaggccaccatccctaccctgtcttccacagccgcctgaaagccatcatgagaatgatgcacactgagaccctgtgtcctttaatcactgcatttcattttcatttgaata

SEQ ID NO: 17983 - DNA, 766 bp, Macaca Fascicularis
  misc_feature (1)...(766): n = A,T,C or G
gtacnnnnnnnnnnnnnnnnaatcnnnnnntcaacatgcaaaaagctggaggagtctttgacagttgagatatgtggnnnnnnnnnnnnnnnagcaacctgtccctagaaggcatcgcagtgctaaacatccctagcatgcatggtggctccaacctctggggtgataccaggaaaccccatggggatatctatgggnnncanncaggccttaggtgctacagctaaagtcatcaccgaccctgatatcctgaaaacctgtgtaccagacctaagtgacaagagactggaagtagtcgggctggagggtgcaattgagatgggccaaatctataccaagctcaagaatgcgggacgtcggctggccaagtgctctgagatcaccttccacaccacaaaaacccttcccatgcaaattgatggagaaccctggatgcagacgccctgtacaatcaagatcacccacaagaaccagatgcccatgctcatgggcccacccccacgctctaccaatttctttggcttcttgagctaaaggggacacccttggcctccaagccagccgtgaacccacctccctattcctggactctactcccgaggctctgtacattgctgccacacgctcctgccagcttgggggagtgttccttcacccttacagtatttattatcctgcaccacctcactgttccccctgcgcacacacatacacacaccccaaaacacatacattgaaagtgcctcatctgaataaaatgactggt

SEQ ID NO: 17984 - DNA, 744 bp, Macaca Fascicularis
  misc_feature (1)...(744): n = A,T,C or G
atggtgacccctgaaagaggcctnncntgggcattgttcagnnnatgctccagggcatcatggatcgnnnctgcaagtctaattctgagcagccaaacagaggactagatgattctacttgaaannnnnnacnnnnntttttcactctctagttctttccttccccctcaccttttggccatggggagaatttnnnnnnnnnnnnnnnnnnnnnacactcccaagagaactggtgcttgctgggaaacttgaaaccnnnnnnnnnnnnnnnnnnnnnnnnnnagtgaagagttgaannnnnnnnnnnnnnnnnnnnnnnnnnnnnnnnnnnnnnnnttcctttagcaaaaaagtgtctaagatgtgtaaaagctgagnnnnnnnnnnnnnnnnnntcacaaatgaaaaagaggcagatgttaccattgtctattcactgtatatgcttccaagacaaccagcaggacactgcagtggcaatagtgttaaaaagtctcattctcatgatttttcgctctagctaggaatagtttagtcaggactcagaaaatttgaacttagttctgggattatgaaaacatggggacaaaaacagtaacttgtagatnnnnnnnnnnnnnnnnnnnnnnnnnnnnnnnnnnnnnnnnnnnnnnnnnnagtcccagtgagggagctagaaacagagctatctgttcctcatagtgccagtgtgtttacatttataggaccacatatccctggttt

SEQ ID NO: 17985 - DNA, 415 bp, Macaca Fascicularis
tgggggagggaaggccaggattcccgtgaattggggctttatgcaaaataagcataaaagatcaccttgtgttgtttttaccttgtaaaagccattattatgatgttagaagaagaagaagaaattcaggtacagaaaacatgtttaaatagcctaatatgatggtgcttggtgagtcttggttttaaaggtaccaaacaaggaagccaaagttttcaaactgcggcatactttgacaaggaaaatttatatttgtgttccgatctacatttatgacctaagtcaggtaatacacctggtttacttctttagcatttttatgcagacagtttgttatgcactgtggtttcagatgtgcaataatttgtacaatggtttattcccaagtatgccttaagcagaacaaatgtgtttt

SEQ ID NO: 17986 - DNA, 243 bp, Macaca Fascicularis
gacagcgcccaggcaggagctgttttccggtgaggccacccaccgcaagtagtattccactactcacggtgatctgctatctggccagcgtgaggctgcccgcctcatcgagatgtaccgagacctcttccagcaggggacgtgagggctgtcctcgctaccgagaagagccattaacttgtgacctccagcccgcccctagttgccatgtgctcaagccttcctgatcatcagtagaaagga

SEQ ID NO: 17987 - DNA, 737 bp, Macaca Fascicularis
  misc_feature (1)...(737): n = A,T,C or G
cttatggctctggttnnnnagcaagtttcttttcatttcgagtgtcccaggatgcttctccaggctctcccctggacaagttagtgtccagtacatcagacctgccaaagcgcctagcctcccgaaagtgtatgtctcctgaggagttcacagaaataatgaaccaaagagagcaattctaccataaggcgaatttctccccacctggtgacacaaacagccttttcccaggtacttggtannnnnnnnnnnnnnnngagctgcatcgcagaaagtatgcccggcgtcccatctaaaggtgttctatagatccgtggagagcttcctgggaaacgtatgctagcagagcttctgcccgtgaatcatattttgaagatcccactcttagctggtaaatgaatttgaatcgacatagtagccccataagcatcagccctgtagagtgaggagccatccctagcagccccttcattcctctccatgctgtaatcactgtcctgggcttgtggtgctaaggactaggggtcctttgtgaaagagcaagatggagcaatggagcaaagatctcttcatgaatcactggcctccagaaatgtgcatgcggatccgctgttgccttcaagatccagataaactttcctgtcctgtgttataactttattattatgaatattgttaaacttcggtgccattcctgtgaatctccaaattttgtatcttntnnagctaatatatgc

SEQ ID NO: 17988 - DNA, 785 bp, Macaca Fascicularis
  misc_feature (1)...(785): n = A,T,C or G
ctcnnnnnnnnnnnnnnnnnnntaccgcgcggccctgcgctcctgcagcnnnntgctggagcaccagccagataacatcaaggctctcttccgcaagggcaaggtgctggcccagcagggggagtacagtgaggccatccccatcctgagggcggccctgaagctggaaccttccaacaagacgatccacgcagaactctcgaagctggtgaagaagcatgcagcacagcggagcacagagaccgccttgtaccggaaaatgctgggcaaccccagccggctgcctgccaagtgccctggcaagggtgcctggtccatcccatggaagtggctgtttggggcaactgctgttgccttggggggtgtggcactctctgtggtcatcgctgccaggaactgaccgcccaggtggccgccactccctctgcacaccatggaccctgccctgcgcttcctaactcccccaggctccctgtccactgccctccctggtctagccccctcctccgggttaggggagcagggattgggggtcgtgcagcccagccagcaggagggactaaggccctctaggaggaaagcccagagggagggggccctcattccttcagacccagttttcccccaccctccttagtctgctgggctaggtctccgccagggccggcctcagtttctcctcaacaggcctgggggcagcccttcccctgcctagtccccgcctgagtgccagcccccctgccccgcctgccgccccctgtccaggctccctccccgccacagga

SEQ ID NO: 17989 - DNA, 774 bp, Macaca Fascicularis
  misc_feature (1)...(774): n = A,T,C or G
caaaagttttgtgaacaagtactttccttttttacatgttacatgtcctcatgttttctgnnnnnnnnnnnnnnnnnnnnnnnnnnnnnnnnnnnnnnnnaaacctcatttcgtggcccagtggttcacagtccagcgtgnnnnnnnnnnnnnnngggagccgcccagggatgttttccctccttgcttgtgccttaaaggcaaagaagcgaggcgggcgcccnnnnnnnnnnnnnnnnnncacccaagctcatgtggggccaggccgggagcccatgcagcagggcagaaggcagcggaggccagttctgtcccggctgaagaacagtgtccatgcacagtcctgcctggggtcgggnnnnnnnnnnnnnnnnnnnnnnnnnnnnnnnnnnnnnnnggacaggctgccccacgctagggtggctgatggccatnnnnnnnnnnnnnnnnnnnnggctgtggcacctggatcacccaggtccccgcagacatggccgcctgaagtcagtgtgcctcctctgtgttgtatggagctcgccgcctcatgtgtgaacacccgtgtctgggttgcctgggtggatcctcccgcatggggctgtctctgggaagcataacttgctgctgccacggacagccccagcccccgtccgtccgtccaggctcacccacagtagtgacgcagacatggcgtgggtgaagggagctgagctctgtggctgggttctgacaatggtaacggtttggtcgagcttaggccccttggaggaagaatca

SEQ ID NO: 17990 - DNA, 777 bp, Macaca Fascicularis
  misc_feature (1)...(777): n = A,T,C or G
catgggaatgcatttggcaacccannnaaccatttgcttaaacctggaacatctcacttttttaaatcntaaaaaacactggcagttatattttaaattagtttttatttttatggtggttttatcaaaagacttttattattagattaggacccccttaaaacctaaaaatcaagttattaccttttataatacttttcttctccacggaatgaatggaatcaatttgtgagttttttcctttaatgataactaaaatccctctaatttctcatttatgcttttgtcttttttatgaaatatttcttttaaaagccccagtctcacctacgaaatatgaagagcaaacattgattttgcttacttgttaaactgtttggagagctctgtagagtatggttccagtgaggccaagattgaaatttgatactaaaaaggccacctagctttttgcagataacaaacaagaaagctattccaagactcagatggtgccagctgtctctcacgtgtgtattatgcttcaccagggggaactggcaagagtgtgtgtggggagggaaagggagtgtgagtggttctgggcaaataactacagggtgcccattaccattcaagaagacacttcacgtattctggtatcaaattcagtcatcttaaacaatttgtgtagaagtccacannncatctttcaannnttttaggnnngcatannngattgtcagcatatgatgaattaaagactttttttttttaatcatttagatgcactttttt

SEQ ID NO: 17991 - DNA, 831 bp, Macaca Fascicularis
  misc_feature (1)...(831): n = A,T,C or G
cgcctggggcggggaggccgaccgagatttgggggcgagggattgaggnnnnnccttaatgtatgtacaccttatacacactgtttaattttacgataggtaacgagtcagaactttgggtaggaatgactggaaaagaactgaaggcacaattccacagaacattcacagttgtgtgctagagacagagaggagcgggaaagtgttttagaagcatttgcggtggacaatggaaggcccggcttcatcgtattcctgtttgctgatccacatctgctggaaggtggacagagaggccaggatggagccaccgatccagacagagtatttgcgctccggaggggcaatgatcttgatcttcatggtgctgggcgctagggccgtgatctccttctgcattcggtcggcaatgccagggtacatagtggtgcctcctgatatgacattgttagcatacaggtccttcctgatgtcaatatcacacttcatgatgctgttgtaggtggtttcatggatgcctgcagactccatcccaatgaaggatggctggaacagggtctctgggcagcggaagcgttcatttcnnnnnnnnnnnnnnnngcccatcaggcagctcgtaactcttctcaagggaggaggaggatgcggcagtggccatctcattttcaaagtccagagctacataacacagtttctccttgatgtcccggactatctcacgctcagcggtagtaacgaaggaatagccacgctcagtcaggatcttcatgaggtagtcagtgagatctcggccagccagatnnnnnnnnnngatggnnnggggcaggcata

SEQ ID NO: 17992 - DNA, 775 bp, Macaca Fascicularis
  misc_feature (1)...(775): n = A,T,C or G
agctcaattacagagctctgannnnntnnnanntcnttnntgtttggcctggctcttaatttgtgtttgttttgcccagtatagactcggaagtaacagttatagctagtggtcttnnnnnnnnnnnnnnnatatttaatcacaaattaaacttgttctgagtccattcaagtgtgtttttttaaacgtagattgaaatctttgtatttgaagcatacatgttgaatatataccttatcagtttttaagtacagggttttatagtgtaatatatacagagtaagtgtttgtttttgtttttcaactgaggnnnnnnnnnnnnnnnaatgattttgcatatgggatgagaaaatgcttggatccttaaggagtttacgaaatctgctgttttatcgaagtgaaaaaaaatgcttatcactcttcattttacactaaagcttaatgtcactaagtttcatgtctgtacagattatttaatcatggaaatgaaaaaatgttctctgcttgctaccaaaggacaaactcttggaaatgaacactttctgctttccttcctccaaagaattattaataggcaacagtgggagaaaaaaaaggcataatggcaaatcnnnnnnnnnnggataaaagtcgatcttcaaacattaacttaagcagaccaaaaattctgatgaccgcatctagattatttttttataaaaatgattttcactatagctatgttagttacgctaagctactgtccaatctcttgtgatgtgtaactcaagagctc

SEQ ID NO: 17993 - DNA, 773 bp, Macaca Fascicularis
  misc_feature (1)...(773): n = A,T,C or G
caggagaatggcgccagcgtgatcnttcgtgacattgcgagagccagagagaacatccagaaatccctggccggaacctcaggccccggggcctccagcggccccagcggagaccgggtagagcttgtccctggcccctgccgtctggaagtggagaaccataaccccacaggggtggtacnnnnnnnnnnnnnnnnnnnnnnnaagctggaggcccgnnnnnnnnnnnnnnnnnnnnnnncgcctggccaccgggccacggccccacagacccagcacgtgtctcccatgcgccaagtggagcccccggccaagaagccagccacaccagcagaggatgacgaggatgatgacattgnnnnnnnnnnnnnnnnnnnngaggaggaggacaaggaggcggnnnnnnnnnnnnnnnnnnnnnnnnggcagtacgcggagaagaaggccaagaagcctgcactggtggccaagtcctccatcctgctggatgtcaagccttgggacgatgagacggacatggcccagctggaggcctgtgtgcgatctatccnnntggacgggctggtctggggggcctccaagctggtgcccgtgggctacggtatccggaagctacagattcagtgtgtggtggaggacgacaaggtggggacagacttgctggaggaggagatcaccaagtttgaggagcacgtgcagagtgtcgatatcgcagctttcaacaagatctgaagcctgagtgtgtgcgcgcgcgtgcctgaggccctgccacg

SEQ ID NO: 17994 - DNA, 781 bp, Macaca Fascicularis
  misc_feature (1)...(781): n = A,T,C or G
gtgagtagtgtganntgggggccccnggctgagccccggcctggccccgccagccgcccccnnnnnnnnnnnnnnnnncagcttgtctccctcgatccaaaggccgttttctcgaggggagggcaggcccggcctggagggtgctgtggggctgtcttgcccaggccctcctgggaggggagaggcattgctgccaggggtgaggccgtgcctcaggcctccctgaaaccaaaggggaaggcaggggtgggcccgcggcggaagccggctccccaaccaaaatgnngcaccaaagctcgggtgccgcgggcacggccactgcagcctctgcccagcctggccctggcgaggggcgggcgggcgctgccaggctggtgcttctcaacgcacttgcttccggaggctgtgccccggcgcctggaacctgaggtgggaggaccagctggtgtcgccctgctcggccctgggccctgttgcgtggggcgggtgggcacagggcttcctgcctctgtgctccgccacccggcaagcagtcggagacaaaacgcnnnnnnnnnnnnnnnnnnnnccgcgggtgtatgtgcaggggcctggggcggccctggactgacgggcggtcccccagcggggtgccctggaggctgctgggcagagtgaagcagcttggggccgtgcctagggcggtggctgtgagtctagtttttgctttaccaagtacagaaaangcgtttacgtttctctgatgctcccttgaagccatagaatttaggggctttttaaa

SEQ ID NO: 17995 - DNA, 736 bp, Macaca Fascicularis
  misc_feature (1)...(736): n = A,T,C or G
gaaggaaaagatgaccatttgtatatggcatttnnngggtgcnnnnnnnnnnnnnnnnnnnnnttcatatagttgataagtacgtttaatatttaacagttacaaagttagctttagttaagtaaagttagcttttccagaatattttcttgaacttttatattggagtcaggttttagtttaagccactgtgtattatttcaaaagtgtgactacagtggtannnnnnnnnnnnnnnntgcaattctagtatgaatcgtatnnnnnnnnnnccaagtgtatttttaatataattgaatttgagtgagtgtgtttcattagttgtagtgatttaaaagttaactgtttatgttgggtgaactagatatgtttgctaataaacatccttccttttttaagggtggagagattcaaccggttagcgtgaaagttggagataaagttcttctgccagagtatggaggcaccaaagtagttctagatgacaaggtgtgtaaacttaacaattctaaaaagaagtcaaatatttgcgattaggtgtcttaactaacggtttattcacttgcaggattatttcctatttagagatggtgacattcttggaaagtacctagactgaaataaatcactattgaaatggcatcaacatgaagctgcccattccactgaagttctgaaatctttcatcatgtaaataatttccatagttctcttttataataaactaatgacatcc

SEQ ID NO: 17996 - DNA, 756 bp, Macaca Fascicularis
  misc_feature (1)...(756): n = A,T,C or G
ctctcgggttgtgtatatgctctgccacttcctacatnnnnnnnnnnnnnnnnnnnnnnnnnnnnnncttagccagatttgagtctaatggctgattcatcggcatagttcttggcgttaacatctcagtgctctcttttgttctcttcgagaggattcatgtcattgagggcctttgtgcctcctgttgtctcggtgtgaggaagagctttggtgtgagggcagagnnnnnnnnnnnnnnnnnnnnnnnnnggattagttcatatggtccccacaccatctatctacttttggagaaaggggactttgagtgggtgggtatggattgatgttcctcaaggaaaccctnnnnnnnnnnnnnnnnnnnnnntgtgtactactgtgattatctctgtaagctccccatgtggccaaggaccctcctcctacctgggcacttcctgctgccttgttgcactggtctcagccattcagcccnnnnnnnnnnnnnnnnnnnnnnnnnnnntaggatagggaaggggttctgttgattgctaaatgttgcctaattttatttccctcttccacatttcacgcaagagagtggacctaacacatgacttgcgttctnnnnnnnnnnnnnnnnnnnnnnnnnnnngccacgtgtatgtatgagtgaccgatggaacttggaattctttatctatatgatctatccgaaaatgagatcttttgtactggaatttgnnnnnnnnnnnnnnattcagagccaaacgc

SEQ ID NO: 17997 - DNA, 831 bp, Macaca Fascicularis
  misc_feature (1)...(831): n = A,T,C or G
tatgcctgccccnnnccatcnnnnnnnnnnatctggctggccgagatctcactgactacctcatgaagatcctgactgagcgtggctattccttcgttactaccgctgagcgtgagatagtccgggacatcaaggagaaactgtgttatgtagctctggactttgaaaatgagatggccactgccgcatcctcctcctcccttgagaagagttacgagctgcctgatgggcnnnnnnnnnnnnnnnngaaatgaacgcttccgctgcccagagaccctgttccagccatccttcattgggatggagtctgcaggcatccatgaaaccacctacaacagcatcatgaagtgtgatattgacatcaggaaggacctgtatgctaacaatgtcatatcaggaggcaccactatgtaccctggcattgccgaccgaatgcagaaggagatcacggccctagcgcccagcaccatgaagatcaagatcattgcccctccggagcgcaaatactctgtctggatcggtggctccatcctggcctctctgtccaccttccagcagatgtggatcagcaaacaggaatacgatgaagccgggccttccattgtccaccgcaaatgcttctaaaacactttcccgctcctctctgtctctagcacacaactgtgaatgttctgtggaattgtgccttcagttcttttccagtcattcctacccaaagttctgactcgttacctatcgtaaaattaaacagtgtgtataaggtgtacatacattaaggnnnnncctcaatccctcgcccccaaatctcggtcggcctccccgccccaggcg

SEQ ID NO: 17998 - DNA, 671 bp, Macaca Fascicularis
  misc_feature (1)...(671): n = A,T,C or G
gccggtgcccagcacnnnngaaagttctaaggggnnnaggacatcagtgaagcagcagtgaaaccaggggctctgcaggtcacttgggatggacgccaccagacttgtctccaaaaatcaccacctttaatgctccccggcctgcacacgcccagccttgctgggctccaccctcacttactgcccgccgtgatggccttgaggctgcctgcccgcgccaggatgtttggtacaaagagcagccccgaggcccgctcaatgctctcgatgggcaccaggaagcgctccagtgggatggcctcgtccacaggtgcgttgggcatcacgtaggagcggagctcaatttgcccgcctgcggcctccaggatcagcaccttgaagaagtgtgtgggcactgccacgtggtttttgccgatgacctggtacttcacataggatttcccatcagcctctgtcctgtaggcagacccaggcacaagtgggcaggaggcctggatgaacccaaggccacctcttcaaggaagccttccctgatctgtcctttaacttctgtcagcctgcaggacgactccctcactgtgagacttctgtagcccgcctggctcctccttgaggctggaactctgtccagggtggaggttaactctccctctgttttccttatgcccaac

SEQ ID NO: 17999 - DNA, 472 bp, Macaca Fascicularis
  misc_feature (1)...(472): n = A,T,C or G
caggtcgccgctgcgagacgagccgccgccatgtctgcgcatatgcaatggatggtcgtgcggaactgctccagtttcctgatcaagaggaataagcagacctacagtactgannnnnnnnnnttgaaggcccgcaattccttccggtacaacgggctgattcaccgcaagaccgtgggcgtggagccggcagccgacggcaaaggtgtcgtggtggtcattaagcggagatccggccagcggaagcctgccacctcctatgtgcggaccaccatcaacaagaatgctcgcgccannnnnnnnnnnnnnnnnnnnnnnnnnnnnnngaacaagtaccgccccgacctgcgcatggcagccatccgcagggccagcgccatcctgcgcagccagaagcctgtgatggtgaagaggaagcggacccgccccaccaagagctcctgagccccctgcccccaaagcaaaaagatca

SEQ ID NO: 18000 - DNA, 730 bp, Macaca Fascicularis
  misc_feature (1)...(730): n = A,T,C or G
aggactgagccagagggannnnccgagacgnnnncggacacccccgagatgtcgctgtcagctgagacacttagctcctccacaccctccgatgtcaacnnnnnnnnnnnnnnnnnnnnngcagaggaagaggctgaggccaaaaataagctgagccccatggacagaggcctgggnnnnnnnnnnnnnnnnnnnnnnngtttccacccacgacgnnnnnnnnnnngtgcaacacagatgcccctctactcctcgcctgtagtcaagaaccccttcnnnnnnnnnnnnnnnngcacccgacagcatgctcaagagcctgccacctgtgcacatcgtggcgtgcgcgctggaccccatgctggacgactcggtcnnnnnnnnnnnnngactgcgcaacctgggccagccggtgacgctgcgcgtggtggaagacctgccacacggcnnnnnnnnnnnnnnggcgctatgccgcgagacgcgccaggccgcggagctgtgcgtggagcgcatccgccttgtcctcactccgcctgccgcgggctgtgccttacttaagtcgggggtggcaagggggcggggcgggggcccgaaagcagagacccccgccacggtgagggggacgcgcacacacaccggnnnnnnnnnnnnnnngacctgcacaccaccgcnnnnnnnnnnnnnnnnnnnnnnnnccgcagggacggggactggccctcccttgcaggtcggt

SEQ ID NO: 18001 - DNA, 761 bp, Macaca Fascicularis
  misc_feature (1)...(761): n = A,T,C or G
gggaggcagccggcacccacaagtgccactgcccgagctggtgcattacagagaggagaaacacgtcttccctagagggttcctgtagacctagggaggaccttatctgtgcgtgaaacacaccaggctgtgggcctcaaggacttgaaagcatccatgtgtggactcaagtccttacctcttccggagatgtagcaaaacgcatggagtgtgtattgttcccagtgacacttcagagagctggtagttagtagcatgttgagccaggcctgggtctgtgtctcttttctctttctccttagtcttctcatagcattaactaatctattgggnnnnnnnnnnnnnnnnnnnnnnnnnnnnnnnnnnnnnnnnnntatctagtgnnnnnnnnnntaacaataactactnnnnnnnnnnnnnnnnnnnnttctgattagaaatgaccaatattaaactaagaaaagatatgactttattttctggtagatagaaataaatagctatatccatgtactnnnnnnnnnnnnnnnnnnnaatgttcattgtaatgttactgatcatgcattgttgaggtggtctgaatgttctgacattaacagttttccnnnnnnnnnnnttattgtgtttttaatttatttattaagatggattctcagatatttatatttttattttatttttttctaccttgaggtcttttgacatgtggaaagtgaatttgaatgaaaaatttaagcattgtttgcttattgtccaagaca

SEQ ID NO: 18002 - DNA, 745 bp, Macaca Fascicularis
  misc_feature (1)...(745): n = A,T,C or G
cannnnnnnnnnnnnnnnncaccacctggtgaacgtggtgctcggagcccacaacgtgcgcacgcaggagcccggccagcagcacttctnnnnnnnnnnnnnnnnnnnnaacaactacgacgctgagaacaaactcaacgacgttctcctcatccagctgaaccgtccggccaacctcagtgcctccgtggccacagtccagctgccacggcaggaccagccagtgccccacggcacccagtgcctggccatgggctggggccgagtgggcacccacgaccccccagcccaggtcctgcaggagctcaatgtcaccgtggtcaccttactgtgccggacacacaacgtgtgcactttcgtccctcaccgtagtgccggcatctgctttggagactcaggtgggcccctgatctgtgnnnnnnnnnnnnnnnnngtagactcctttgtgatccgggaatgtgccaccggccagttccccgacttcttcgcgcgggtagccctctacgtggactggatccgttccatactgcgccgcgtgggggctgagggccgcccctnnnnnnnnnnnnnnnnnnnnnnnnnnnnnnnnnnnnnnnnnnnnnnnnnnnnnnnngatctttggacagaagcagctcttctccgaacactgcctcctccacccgggtccgggacggccccacccgtcccaccacactgcctccctcggggctccgggagacaggccggccctgcacctctccccgcc

SEQ ID NO: 18003 - DNA, 800 bp, Macaca Fascicularis
  misc_feature (1)...(800): n = A,T,C or G
tggagtgttgatgtgggannnnnnnnnnnnnnnnnnnnnnnnnnatcgagggatgaaaggaagtgaagtcaccgctatgttagaaaaaggagagcggatggggtgccctgcaggatgtccaagagagatgtacgnnnnnnnnnnnnnnnnnnnnnnnnnnnnnnnnnnnnnnnnnnnnnnnnnnnnnnnnnnnnnnnnnnnnnnnnnnnnnnnnnnnnnnnnnnnnnnnnnnnnnnnnnnnnnnnnnctgtcggtggctgtctttgatcacagaaacaatcacaggaaaatgaatccagaggaactgnnnnnnnnncacctccctctgccagttgggagagccagccttggatggaacacgcccgtgacgcgtcacccaaagcctgtcccaggactcaccctccacaaagcaaaggcaatgctgggagagaagacggatggcaggatcccaggggctagatggatttgtttgttttcttgtctgtgtgattttcatgcaggttatttttacgatctgtttccaaatccctttcatgtctttcctgttctctgggtcctggagtgcatttgttactgactgcgcccaggggcattgcagagtggcctagagcactcacaccccaagcggccttttccgaatgcccaaggatgccttagcatgtgactcctgaagggagggcaaaggcagaggaatttggctgcttctacggcatggctgtgatagcccatgagactgatccctagtcactgaaaagctttcatgacaataaaaatgttttgaggctttaaaaagaaaatca

SEQ ID NO: 18004 - DNA, 713 bp, Macaca Fascicularis
  misc_feature (1)...(713): n = A,T,C or G
tgcacagtggcgagcggccgttcgnnngtgccgagtgcggccagagcttccggcagcgctccaacctcacgcagcacaggcgcatccacaccggggagcgacccttcgcctgcgccgagtgtggcaaggccttccgccagcggcccacgctcacgcagcacctccgcgtacacacaggcgagaaaccctttgcctgccccgagtgtggccagcgcttcagccagcgcnnnnnnnnnnnnnnncatcagaggacacacacgggcgagaagccctaccactgcggcgagtgnnnnnnnnnnnnnnnnnnnntctcgcggctcacagagcaccagcgcatccacacgggcgaacggcccttcgcctgccccgagtgcggccannnnnnnnnnnagcacgccaacctcacccaacaccggcgcatccacacgggcgaacggccctatgcatgccctgagtgtggcaaggccttccgccagcggcccacactcacgcagcatctgcgcacccaccgacgagagaagcccttcgcctgccaggactgtggccgccgcttccaccagagcaccaagctcattcagcaccagcgcatccacagcgccgagtagctccagtcgggacgcagtctctgccctggtcagaacacctacctcacctggttgttgtgaggctagcgattacataagtataagcaggtccgccccagggcttggcca

SEQ ID NO: 18005 - DNA, 763 bp, Macaca Fascicularis
  misc_feature (1)...(763): n = A,T,C or G
aagctccagatccaagnnnnnnnnnnnnnnnnnnnnnnnacgttcagagatgactattaattttctgtttagttttacactaggaaacatgttgtatctacagtaatgatatgttggctaagtggacttgtgtcataaactttctccatttaagacacattgactcctttccaatagaaagaagctaaacagaaaactcccaatacaaagatgactggtccctcacagccctcagatatttatatattggaagtggctgaggcccccaagttttttaatttagcagaaacagaccgtattagcaaggattctctcatcnnnnnnnnnnnnaaactgaggcccaaaacacttgcttacatcctctgatggctgtttcaaatgtgcattttgtagaattttgagaaaaaaagagcaaaatcaannnnnnnnnnnnnnnnnnnnnnnnnnnnnnatgggagtttggaattactgtagacacgcccaagacttatccttgggccataattatgaaaactcatgatcaagatctatgtgtatacatacgtgnnnnnnnnnnnnnnnnctacaaggtaggctgcaaaattaaatctagacattcttttaatgccaccacacgtgttccacttctctcttttaaagtatttataaaaatataaattgtacattttgtaaaatattacgtttagtttctctacttgtcagatatcactaaataannnnnnnnnnnnnnnnnngcagctccattactttggcgcataaaagt

SEQ ID NO: 18006 - DNA, 733 bp, Macaca Fascicularis
  misc_feature (1)...(733): n = A,T,C or G
aagctgcacaatattaacagacccctgaccatgaagaaggaaggcatccagaccagaaaccgaaaaatgtctagcaaatccaaaaagtgcaaaaaagtgcatgactcactggaggacttccccaagaacagctcgtttaacccggccgccctctccagacacatgtcctccctgagccacatctcgcccttcagccactcnnnnnnnnnnnnnnnnnnnnnnnnnccgatgcacccgccatccagcctgtcctttggaccgcatcacccctccagcatggtcactgctatgggttagagccctgctcgaggctggcagggcccccagcgagcgtccctgcagcccccttcgannnnnnnnnnnnnnnnnnnnncatcatgaagcctaaacgcgatggatatatgtttttgaaggcannnnnnnnnnnnnnnnnnnnnnnnnnnnnnnnnngctcactgtggtgtctgtgttccaaccactgaatctggaccccatctgtgaataagccattctgactcatatcccctatttaacagggtctctagtgctgtgaaaaaaaatgctgaacattgcatataacttatattgtaagaaatactgtannnnnnnnnnnnnnnnnnnnnnnnnnnnnnnnnnnnnnnnnnnnnnnnnnnnnnnaaggaatatgggagaaatagagtgtggaaattaagaagaaactaggtctgatattcaaaaggacaaactgccagtt

SEQ ID NO: 18007 - DNA, 788 bp, Macaca Fascicularis
  misc_feature (1)...(788): n = A,T,C or G
ggcccagcaggacactatgaggtnnnngagaaggacttggtggataaggctcgtcagatcaannnnnnnnnnnnnnnngnnnnnnnnnnnnnnnnnnnnnnnnnnnnnnnnnnnnnnnnnnncgacctgaaaaggannnnnnnnnnnnnnnnnttctgaggtcctgcgccatccacaaagatttggtttgaggcagtcagactgagtgatcaatgccctctgtgctttatgggcacannnnnnnnnnnnnnnnnnnncttggggtgctagggtcagggcttgtagcagnnnnnnnnnnnnnnnntggcatgactgttcgtttctccaagcctgctttgtgcttctcaccttctgggtgggattccttgccagtgtttcttactnnnnnnnnnnnnnnnttgccacctccgagtgctttgtctccactcagtaccttggatcataggtgtgagttcaggatgcctgcgcatggtttaggtgttagcctccttacgtggatgtcaggagagctgctgccctcttggtgtgagtttcgtattcaggctgcttctgcaacctttggccagagagctggttgaagatgtttgtaatcttttcagtctcctgcaggtttctgtgtccctctggtggaagannnnnnnnnnnnnnnnnnnnnncagcctgggctcctaagtnnnnnnnnnnnnnnnnnnnnnnnnnnnnnnnnnnnnncattaccagctgccattnnngcctgtttccccactctcttattcgtgcattaagtttggtttctgtagttttaattt

SEQ ID NO: 18008 - DNA, 739 bp, Macaca Fascicularis
  misc_feature (1)...(739): n = A,T,C or G
acccatggtacccatcctcagtgctccctccagatccnatctggcagctcggcatccactctgcacagcatcactgaatcacggagcctttgcgnnnnnnnnnnnnnnnnnnnnnggagctgagttcctcttccctttttatctgctggtgcggatcacacctgggcctggccagaggaagagagagggacagtcattttgtagtttaccaagagagacgtctccagcnnnnnnnnnnnnnnnnnnnnnnnnnnnnnnnnnnnnnnnnnnnnnnnnnnntacttgtctctcctccccatcgtccccatcgtcctccttgtccctgacttgcggcacttccaccctgacccagccagtccagctctgccttgacggctctccagagtagacatagtgtgtggggttggagctctggcacccggggaggtagcgtttcnnnnnnnnnnntacagatgttcctgccttagaatcatctctagttcctcaccccaatcccggcatccagccttcagtctcgcccacgtgctagctccgtgggcccaccgtgcggccttagaggtttccctccttcctttccactgtaaagcacttggccttgggtgacaaattcctctttgatgaannnnnnnnnnnnnnnnnnnnnnnnctgacagattatttttatttnnnnnnnnnnnnnnnnnnnatatttattttttataccaaaatgaatacttttttttttaagaaaaaaagataa

SEQ ID NO: 18009 - DNA, 692 bp, Macaca Fascicularis
  misc_feature (1)...(692): n = A,T,C or G
caatgtctagcacgtncatatataacattaatcctcacaactactctgtgaattagctattcttattgtcctcattgtacagatgaagaaatagaggcacagagtggccaagtaacctgaagtcacacacacaagctcaacttttaagtatttaaatatacttcgaatataattctaaaggagtctttaacagaaaaaagtactgactccgtgtactttgccgctgcttttgtgatccctgttgaagtgacttcaagaagtgacagtgatgccaggcatttggttaagtatgatgtggtgagttaaccttaaaatagaaaatttggtcaataagcatttttattttggagccagagagctattttagggacctgctgcctgggaaggccttgggacagcagatcccttagttcctaatgaatagctgcatcaccaacacagcttctcctgaccatggtagggccatctgcagggtaactgagcccagcttattaacccttctgttttctttccagctagccacagtgcagcctggccagaatttccacatgttcacaaaggaagaacttgaagaggttatcaaggacatttaaggaagcctgattctcagaacttctctgggacaatttcagttcttaataatgtccgtaaattttatttccaactcctgatccttggaaaatctcctattg

SEQ ID NO: 18010 - DNA, 827 bp, Macaca Fascicularis
  misc_feature (1)...(827): n = A,T,C or G
agaaatacagcaacaattcctgnnnatacctcagcaaccggctgctggcgcccagcgannnnncggagtggttgtcttttgatgtcaccggagttgtgcggcagtggttgagccgcggaggggaaattgagggctttcgccttagcgcccactgctcctgtgacagcaaagataacacactgcaagtggacatcaacgggttcactaccggccgccgaggtgacctggccaccattcatggcatgaaccggcctttcctgcttctcatggccaccccgctggagagggcnnnnnnnnnnnnnnnntcccggcaccgccgagccctggacaccaactactgcttcagctccacggagaagaactgctgcgtgcggcagctgtatattgacttccgcaaggacctcggctggaagtggatccacgagcccaagggctaccatgccaacttctgcctgggaccctgcccctacatttggagcctggacacgcagtacagcaaggtcctggccctgtacaaccagcataacccgggcgcctcggcggcgccgtgctgcgtgccgcaggcgctggagccgctgcccatcgtgtactacgtgggccgcaagcccaaggtggagcagctgtccaacatgatcgtgcgctcctgcaaatgcagctgaggccccgtcccgccccgccccaccccggcaggcccggccccgccccgccccgcccccgctgccttgcccttgggggctgtatttaaggacacccgtgccccaagcccacctgggcccccattaaagatggagagaggaaaaaaaaaaaaaaaaaaaaaaaaaaaaagg

SEQ ID NO: 18011 - DNA, 839 bp, Macaca Fascicularis
  misc_feature (1)...(839): n = A,T,C or G
ccagtgacagtgatggtactgaaagcaacagcaccannnnnntatgagtcccnnnnacatggaaaagcacaatgttnnnatgctacagtggccagtaagactcagnnnnnnnnnnnnnnnnnnnnnnnnnnnnnnnnnnnnnnnnnnntcataaggaagannnnnnnnaccatatctgattactctgaatgtaaaggagtaatggaaataaaggaagcatcatctgtgtctgacttnnnnnnnnnnnnnnaggtcccaaacagaattatcgaaatagcaaataaaactcccaagatcagtcaactttacaagcaagcatctggaacaatggtgtatgggttgtttatggtacaaaagaaaagcatacacaagaagaacacaatctatgaaataaaagataatacaggatccatggatgtagtggggaatggaaaatggcacaatatcaagtgtgagaaaggagataaacttcgacnnnnnnnnnnnnnnnnnnnaacagttaaccgcaagctgaaactggtgtgcggaannnnnnnnnnnnnnnnnnnnnnnnaggccaagaaaaacaaggaaggatcaatgaatgttaattgaaatatgcaagctgaaatgcaacaaataatttctgcttaaaaaattannnnnnnnnnnnnnnnnnnnnnnnnnnnnnnnnnnnnnnnnnnaaataatggattcagtagatacactgtagcatattaagagcttttatatatgagttatagattaggttgctttctggaataaaattttcttcttatactcttcccatatttttttagatattacattttgcatttatgactttcataaggtaaaaa

SEQ ID NO: 18012 - DNA, 466 bp, Macaca Fascicularis
  misc_feature (1)...(466): n = A,T,C or G
ttcgtaattggctttctcttacaagtgaannnnttcagaaagcacagatggatagctcccagtnnatcctctgtcgggagcttgtggcacatcacctttgtactgtgcagttttccccgtctttaaattccgtttatgtctactgtcccctcaagcacaccctggtgacgtgagacaaaggagtgttcagattacatccctcttttctcccaggcccagatttctacaaggactacagcaagccagaagtgccagtcagagatacagcagccttttaccatcatctcccagctgccagtgggtgcaagcagacttctgaaaaacgcaatgtagaggaaacagaagtggatcacttctatgagggaatcaaacggctctataacgaagataatgtctcagaaaatgggggttctgtgtgtggcactgatttatcaagacaagagggacatgtttccccttgtccacc

SEQ ID NO: 18013 - DNA, 783 bp, Macaca Fascicularis
  misc_feature (1)...(783): n = A,T,C or G
cgannnnnnnnnngacatgaacacagaggactaccctttccaagtgatccnnnnnnnnnnnnnnnnnatcccccggttcctgtccgtcaaagcctcccatgttttaaaaggatttttaaataaggaccccaaagagaggctcggctgccggccacagactggattttcagacatcaagtcccacgcgttcttccgcagcatagactgggacnnnnnnnngaagaagcaggcgctccctccattccagnnnnnnnnnnnnnnnnnnnnnnnnnnnnnnnnngttgacacacagttcaccagtnnnnncgtgcagctgaccccagacgatgaggatgccataaagaggatcgaccagtcggagttcgaaggcttcgagtacatcaacccattactgctgtccaccgaggagtcggtgtgaggnnnnnnnnnnnnnnnnnnnnnnnnnnnnnnnnnnnnctttaactgtatccttaaccaccgcatatgcatgccaggctgggcacggctccgagggcagccagggacagacgcttgcgccgagaccacggagggaagtgtcggcaggcgctgctggnnnnnnnnnnnnnnnnnnnnnnnnnnnnnnnnnnnnnnnnnnnnnnnnnnnnnnnnnnnnnnnnnnngcctgtgtcgcggtggccgcggggaccctgctgaggggctgtcatgcagtttccaaggtgcacatttnnnnnnnnnnnnnnnnncgatgcactgacctgccccgccaggaaagggagcgtgtagcgtcctgaggaataaaag

SEQ ID NO: 18014 - DNA, 904 bp, Macaca Fascicularis
  misc_feature (1)...(904): n = A,T,C or G
cnnnnnnnnnnnnnnnnnnnnnnnnnnctcttnnnnntccaggacccagaagccccgtgctcacccccatggagccctgccggtccctggccctgcttgtgggcttcctggnnnnnnngnnnnnnnnnnnnnnnnnnnnnnnnnnnnnctggtttgaggctgtgggtcccaaccactcagctcactcgggcctctggccaacggggcatggggacatcatagcnngcatggggacatcatagcagannnncagcnnnntgnctntcctgtggggcctggtgtgcgtgagcttcctggtcctgtcctgcatcccctcactgtccaccccaggccacggcccccttgtctcaaccatcacagcctttgctgcagccctctccatggcagtggccatggcggtgtacaccagcgagcggtgggaccagcctccacacccccagatccaggcctccttctcctggtccttctacctgggctggctctcagctatcctcttgctctgcacaggtgccctgagcctgggtgctcactgcagcagcccccggcctggctatgaaaccttgtgagcagaaggcaagagcggcaagatgagttttgagcgttgtgttccaaaggcctcatctggagcctccggaaagtctggtcctacatccgccccaccctttcagcccttccccagcccctccgcttgtttcttcattcattcaacaaaatttggctggaatctggctattctgagattaattctgccaagacctaagccaaccgtctgccagctccatggtaggagctgagcaccaagagaaggtgacagcccacgaggccgaccagcctgcagggcgctcctgcccagcgcaactgcctggcctgtgtggatacaggctccaacctgggtctatctctc

SEQ ID NO: 18015 - DNA, 728 bp, Macaca Fascicularis
  misc_feature (1)...(728): n = A,T,C or G
tggcatttttatgaaaaactattttccaagaaataattagaaagtggcactggtcttacaattctgcaaatctttaacgtctggcttaacagaagagagctgggttctgacggttgcttctgcagtcaatgttctgtggatgnnnnnnnnnnnnnnnnnnnnnnnnnnnnnnnnnnagttggaaataaaagctcaagacctcacagaccnnnnnnnnnnnnnnnnnnnntccctggggtgagtcctcaaactgcctgggagaacagctataagggtaatgactgtacatggactggacttacctgggctcagtgtataccctcacccaccaggctctggtgggggcagttcaaaagcctaatgtttggctttgcagcattggcttatggcctaatttaatactctgagtcccaccagcccaaagcacaaagggaagctggaacaagaacaatctctctgctctcnnnnnnnnnnnnnnnnnnnnnnnnnnnnnnnnnnnnnnnnnnnnnnnnnnnnnnnnatgttgcaagcaaccatggaggaacaaataggcccactattnnnnnnnnnnnattttggacttggccaaattggattgttggtttgactcttagaaccccttctaatatgtgagagtgaccagcatctagcaatccagctggtttcatcagggttaagccagtnnnnnnnnnnnnnnnnnnnnnnnnnatcctgatgctgtccctcct

SEQ ID NO: 18016 - DNA, 732 bp, Macaca Fascicularis
  misc_feature (1)...(732): n = A,T,C or G
ttattcccgctcnctgcttaatgcatcctagcaggggctgggaacatggtggtgggtatggctggagctcataccacaaagctcttggggcctgatcacttctggtgacactttgcttgtcccgttggttgacatctgggtgggtctattacnnnnnnnnnnnnnnnnnnnnnnnnnnnnnnnngtgttgatccattnnnnnnnnnnnnnnnnnncatggatacattttggtggcccactggatactgtgaggactgctacattgatgttattggctgatccactgcatggtttgatagccaccatcttggttggccctttgggtgtgatggtgatagcatttccgtgacatcttttttggccccccattaggtgctgtgctcacttatattttggtgtacttcttggcacagtaggtgccaagttggccaccattctgtgtaacaccttttgtggcccattgggtgctttgatggacatcatactgagtaggtgnnnnnnnnnnnnnnnnnnnnnnnnnnnnnnnngctgctgcaggcccgtgttggccatgtcgtcaccattctctttggcatgggttgggtaggggatggcggtgagaatactccttggttttctctgaagcccaccctttcccccaactctggtccaggagaaaccggaaaaggctggttagggtatggggaatttctactgaagtctgattcttgcccgggaagcggggtactggct

SEQ ID NO: 18017 - DNA, 768 bp, Macaca Fascicularis
  misc_feature (1)...(768): n = A,T,C or G
gcnnnnnnnnnnnnnnnnnnnnnnnnnnnnnnnnnnnnnnnnnnnnnnnnnnnnnnnnnnnnnnnnnnnnnnnnnnnnnnnnnnactttgccaaatactttcttcaccaatctcatgaggaaagggaacatgcnnnnnnnnnnnngaagctgcagaaccaacgaggtggccgaatcttccttcaggatattannnnnnnnnnnnnnnnnnnnnnnnnnnnnnnnnnnnnnnnnnnngagtgtgctttannnnnnnnnnnnnnnnnnnnnnnnnnnnnnnnnnnnnnnnncaaactggccactgacaaaaatgacccccatgtgagtagagtgtgctttacatttggaaaaaaatgtgaatcagtcattactggaactgcacaaactggccactgacaaaaatgaccccacacatgtgcgacttcactgagacacattacctgaatgagcaggtgaaagccatcaaagaattgggtgaccacgtgaccaacttgcgcaagatgggagcacccgaatctggcttggcagagtatctctttgacaagcacaccctgggagacagtgataatgaaagctaagcctcaggctaatttccctatagccatggggtgacttccctggtcaccaaggcagtgcatgcatgttggggtttcctttaccttttctataagttgtaccaaaacatccacttaagttctttgatttgtaccattccttcaaataaagacatttggtacccaggaaaaaaaaaaaaaaaaaaaaaaaaagg

SEQ ID NO: 18018 - DNA, 769 bp, Macaca Fascicularis
gctgcccgcaccctggagaagtgggtgaccggcgctcctgcaacgactgccagcagatgattgtcaaactgggtggtggcactgctattgccgcctcctgaccaccaggctcagcccaccctccacttctctctcggttcctctctcccccagcatcctcccgctgagagaggtggggaggagccttgtcatcttagctgtcacctgccgaggcttctgggccacctcaggccagcaggcccctgggcagagccccttaaagctgctgtcactagatgcccatggtccagggcctggtgggcataagaggaaaggtagcagggcagaaactgggcagctctgacttgatagcagcagggggagctcccaagctgccaagcccctgcctccagccttcctgagtttctctctcctgaaccctactctctcctttttgcttcctcagtttttatcaggcttcctctgggggacagcagtctctgagcaccagggagcagttgccctcaggcccgtgcccggcatgccctcccccctttttataccaatgttttctaccagtgtgcttgggtttgccatgacgcgaggctgagttgctgtagcgtcttgattctctccctgggtctacgttccctcccctgtggctggctgagcctgctcattgtttttccttttattacacaggacagccaggggaggagggggcccagccctgggaggctggtgggaggcagggggtaggcctgcagatggatgaaataatgtcagcatt

SEQ ID NO: 18019 - DNA, 775 bp, Macaca Fascicularis
  misc_feature (1)...(775): n = A,T,C or G
atgactgccgagtgagcgttcatgagannnnnagtggcactccaaaaaattggcaaagcggaatgcggcggccaaaatgctgcttcgagtacacacggtgcctctgnnnnnnnnggatggcaatgaggtggagcctgatgatgaccacttctccattggtgtgggctcccgcctggatggtcttcgaaaccggggcccaggttgcacctgggattctctacgaaattcagtgggagagaagatcctgtccctccgcagttgctccctgggctccctgggtgccctgggccctgcctgctgccgtgtcctcagtgagctctctgaggagcaggccttccatgtcagctacctggatatnnnnnnnnnnnnnnnnnnnnnnnnnnnnnnnnnnnnnntggaactgtccacccagccggccactgtgtgtcatggctctgcaaccaccagggaggcagcccgtggtgaggctgcccgccgtgccctgcagtannncaagatcatggcaggcagcaagtgaagccccagctggactcatggatgtgcaccctttgctccctgctctttctgcctctgggctcatgtatctgcgcagctctggtaccctctgtgggtaccatctctacctctgacacagactgcctgccttgaggctgagaaggcacagggcaaggagccaaggaccacagggcctcagccagcccaggattcgtcctcattttattggtgatgatgaatgggaatgaaatcggggctgtctactagagcctggaataaa

SEQ ID NO: 18020 - DNA, 554 bp, Macaca Fascicularis
  misc_feature (1)...(554): n = A,T,C or G
agaagtctgcagttaagttgaggtttaaactaaaaaatgtttccttgggtcagtggttttgaggtccaatagttaggcttttctcttttgtccttcctcttttggagtgaaaacagttcaattttccttccnctgtgactggtgccatagacacaggtttatagttttaacttacagtattgtttgaactctacctgtttttcttgtcaaacctgagcactccacttgctgaagtttcttatttaattccagagtactgtcctctactctaaggcattacttttaagtgtattatgaaggcaattttcaaaggatataaccggttggggtaattcaaaataaaaaggaaaagattttttnncaagtaactggtgtctctaagaggaatttttagatgtcagttaggaggctctttcccccccnnnnnnnnnnnnnnnnatattgtaaatttgtcaggtanntggagctttaatacagtgaactccagcaagggaggcactgccttttgtttctagaatgttgtgttcctcgaggtccgttattttgtattcttt

SEQ ID NO: 18021 - DNA, 792 bp, Macaca Fascicularis
  misc_feature (1)...(792): n = A,T,C or G
ctactaagcactagatacagtttttcagttccagaactcacagtctaacggacttcagggctattttgctgactgagggataaacgttgactatggctgggggagggataaaacctttgacctccaggtgctctgaggatggagctggagcaggtactagtgtgttgggagtctaggagtatttggaaacgtaagaaatgtcttctgtatcagcatggccttctgtgtttgacgattgaaccaaggttgggttgtaggggaacctgggtgtccccagatagtcannnnnnnnnatnnnnnnnnnnnnnnnnnnncatatgggaattagcatagctgaaaagccaaatatgcagaatggatggtatgactaggcatgtgtgaagctcctaatggaaggttttnnnnnnnnnnnnnnnnnnnnnnnnnnnnnnnnnnnnngggagcttagagggccagatgcgttagtggtaggtaaggcaaagggaaataagttgggtccaaatggcgggtcatctccctcaagtgcatgggtggtggtcaaggccctgtcaatgcctgtcctgttttcagagttatgagaaatatttgcctggaagaatttaagcctcaggagatgctgccagtcctacttgtgacccacagtcttttcagaatgggtctagagactccaagcttacccctggcataatcccaacctacacagtacnnnnnnnnncaacnnnntcacactgcacttacnnnttncaagtattttcagctcatgtaccantnnntgctnnnnacctgtgagga

SEQ ID NO: 18022 - DNA, 867 bp, Macaca Fascicularis
  misc_feature (1)...(867): n = A,T,C or G
cggtcagggtcaagtcgtgttctgatcactactgacttgttggctcgcgggattgatgtgcaacaagtgtctttggttataaattatgatctacctaccaatcgtgaaaactatattcacagaattggcagagggggtcgatttgggaggaaaggtgtggctataaactttgttactgaagaagacaagaggattcttcgtgacattgagactttctacaatactacagtggaggagatgcccatgaatgtggctgaccttatttaattcctgggatgagagttttggatgcagtgctcgctgttgctgaataggcgatcacaacgtgcattgtgcttctttctttgggaatatttgaatcttgtctcaatgctcataacggatcagaaatacagattttgatagcaaagcgacattagtcgtgagctcttgtgaggaaagtcattggctttatcctctttagagttagactgttggggtgggtataaaagatggggtctgtaaaatctttctttcttagaaatttatttcctagttctgtagaaatggttgtattagatgttctctatcatttaataatatacttgtggactaaaagatataagtgctgtataaaatcagccaattatgttaaactagcatatctgcctttattgtgtttgtcattagcctgagtagaaaggcctttaaaatttttttagaaagcatttgaatgcattttgtttggtattgtatttattcaataaagtatttaattagtgctaagtgtgaactggaccctgttgctaagccccagcaagcaatcatcctaggtagggtttaatccccagtaaaattgccatattgcannntgtcttatgaagttga

SEQ ID NO: 18023 - DNA, 1041 bp, Macaca Fascicularis
  misc_feature (1)...(1041): n = A,T,C or G
acacactttggtacctatgaacctagaactgangnnnactcccacttatcacgtacatttttatgtctgacatcaaacacgtcttagactttccaggatggaatttaaagatgttcagtgttgggtagcagactgccctaagcattgccgcattttatctctagtcactgctgattgtctgtgtctttgctctgtactactgggggatgggagagccacagtgtttcctttgcacacttcacaactgacttcttgtcctggggttaaaagttgaagatatttctgcactcgggccctcctctgggagctgcacccacgtgactgcccagcctctcaccagtctgttccggggccccctcggccaggtgggaatgatggacacgtactcnnnnnnnnnnnngattaactnnnnnnnnnnnnnnnnnnnnnnnccannnnnnnnnnnnnnnnnnntgattctgaaggacaggcagtggagttttaggtttcaggggcaagagcagttttcagaagtctttgagtccagnnnnnnnnnnnnnnnaagnnnnnnnnnnnnnnnnnnnncactcgtgggtgagtccatctcgggtctcgacaattagcagttgtgtgacagtcattctggttccttctgcctgaccctgggagacatatcagaaatggatgtacaaaagcaggtctgttttacgttgtagtataatttaagatgaattgtattgaaaaaatgctgaagaatgaatgtgtcaaaatgggttaactgtgtatattgacgttcatgtcgtcatccatnnnnnnnnnnnnnnnnnnnnnnnnnnnnnnnnnnnnnnnnnnnnnnnnnnnnnnnnnnnnnnnnnnnnnnnnnnnnnnnnnnnnnnnntgccccgtgaagtctgttttctcccactgcctccaggccccactgatacccccaaatagatgctgggttatgagaaccagcaaagtcccccatgtcatcagtcttaaaaaaaataattttccaagtccacgtatttgtccctattcttggagtagttttagtgt

SEQ ID NO: 18024 - DNA, 749 bp, Macaca Fascicularis
  misc_feature (1)...(749): n = A,T,C or G
tcaggtatagtnnnnnaattttgtggtaaaacttttgtagtcatttcagtagctgtctttcccaaaggcactttagtgtccactctatttccttattcattgttctcactgtaccgtcttgtaatttattcatttcttgtaatctgtccattcccttttaataagtttgggtcagcctcttagaaccatttctgttttgtggggtggggtagggggagttaaagcttgcttnnnnnnnnctgagttcctaaaaaaaaaaaaaactggttgagaaatcaggtgcatgtgattgcatgtctaattctnnnnnnnnnnnnnnnnnnnnnnnnnnnnnnnngccatcannnnnnnnnnnnnnnnnnnnnnnnnnnnnnnnnnnnnnnnnnnnnnnnnnnnnnnnnnnnnnnnnnnnnnnngtattggtagagcagtctatcnnnnnnnnnnnnnnnnnnnnnnnnnnnnggaagagacttcaccacaaaaacgaggcagatttacttgtttgccattttctatgttaacatgcttaattatgttggaaactgaatctttctttccagtaccacttccgctgtcacggtaaagtccgccatcagaagactgaaggagttgaaagaccagtagacgctcttctactctttgagacatcactggcctataataaatgggttaatttatgtaacaaaattgccttggcttgttaactttattagacattctgatgtttgcattgtgtaaatactgtg

SEQ ID NO: 18025 - DNA, 772 bp, Macaca Fascicularis
  misc_feature (1)...(772): n = A,T,C or G
agatnnnnnnnnnnnnnnnnnnnnnntaaggcttnttgacaagcataagantnnnnnnnctgtgattgtgatnnnnnnagaaagatcaagccaaagaatgcgaagcaaccagannnnnnnnnnnagcgggttttgggtctggtgttgctgcgtggggagaacttggtatccatgactgtggaggggccaccccccaaagatannngcattgntcgggtaccacttgctggagctgctggaggccctggggttggtagggcagctggtagaggagtaccagctggtgtgccaattccccaggcccctgctggannnnnnnnnnnnnnnnnnnnnnnnnnnnnnnnnnnnnnnnnnnnnnnnnnnnnnnnnnnnnnnnnnnnnnnnnnnnnnnnnnnnnnnnnnnnnnnnnnnnnnnnnnnnnnagccccaacacagtacccaccaggacgggggactccgcccccacatgttggcagagcaaccccacctccaggcattatggctcctccacctggtatgagaccacccatgggcccaccaattgggcttccccctgctcgagggacgccaataggcatgccccctccgggaatgagaccccctccaccaggaattagaggtccacctcccccaggaatgcgtccaccaagaccctagcatactgttgatccatctcagtcacttttccccctgcaatgcgtcttgtgaaattgtgtagagtgtttgtgagctttttgtcccctcattctgcattaataatagctaataataa

SEQ ID NO: 18026 - DNA, 681 bp, Macaca Fascicularis
  misc_feature (1)...(681): n = A,T,C or G
gcgacctccagagcnncctggccacgatgaatgtaccggctgggccatcgggtggccagcaagtggacctggccagtgtgctgacgccagagatcatggctcccatcctcgccaacgcggacgtccaggagcgcctgcttccctacttgcnnnnnnnnnnnnnnnnnnnncagaccgcggaagagatccagaacaccctgacctcgccccagttccagcaggccctgggcatgttcagcgcagccttggcctcggggcagctgggccccctcatgtgccagttcggtctgcctgcggaggccgtggaggccgccaacaagggcggtaagtggctgtgcctgcacctccgggcccgagccagaggcagggtccattcctgtccccctggatttgcgaagtggggctgagggggcgaaggtcacagcccttctgcccttgatcccactnnnnnnnnnnnnnnnnnnnnnnnnnggttagacgccaccttgtgtctttaacgtgttctagatgtgnnnnnnnnnnnnnnnnnnnnnnnnnnnnnnnnnnnnnnnnnnnnnnnnnnnnncgacacaaaggacaagaaggacgaagaggaggacatgagcctggactgagccacgcgccatcctccgagggactgacggcgcttgcagtgcgttgcacagcctcacnncccaccca

SEQ ID NO: 18027 - DNA, 639 bp, Macaca Fascicularis
  misc_feature (1)...(639): n = A,T,C or G
gaannnnnnnnnnnnnnnnnnnnnnnnnnnnnnnnctttgagccagccaaccagatggtgaaatgtgaccctcgccatggtaaatacatggcttgctgcctgttgtaccgtggtgatgtggtnnnnnnnnnnnnnngcggccgcatgaagccactcagtcaagaccaagcgcagcatccagtttgttcattgccgcgccccactggtggccttcaggctggtcggtgccagtcctcccactgtggtgcctggtggagacctggctaaggttcagagagctgtgtgcatgctgagcaacaccacagccattgctgaggcctgggctcgcctggaccacaagtttgacttgatgtatgccaagcgtgcctttgttcactggtatgtgggtgaggggatggaggaaggcgagttttcagaggcnnnnnnnnnnnnnnntgcccttgagaaggattatgaggaggttggtgtggattctgttgaaggagagggtgaggaagaaggagaggaatactaattatccattcctttnnnnnnnnnnnnnnnnnnnnntcccaggatttcagcttcagcttagctgacagacattaaagctttctggttagattgttttcacttggtgatcatgtcttttccatgtgt

SEQ ID NO: 18028 - DNA, 1358 bp, Macaca Fascicularis
  misc_feature (1)...(1358): n = A,T,C or G
gagaanngannnnnnnnnnnnnnnnnnnnnnnnntcttgtagcagagagtgctgtcgcgggaagtgcagaggcaaatgcgtttagtgttcttcagcatgtcctcggtgctgggccacatgtcaagaggnnnnnnnnnnnnnnnnnnnatttgcaccaggctgttgccaaggcgactcagcagccatttgatgtttccgcatttannnnnnnntactcagattctggacttttcgggatttatactatttcccaggccacagctgctggagatgtaatcaaggctgcatataatcaagtcaaaacaatagctcaaggaaacctttccaacacagatgtccaagctgccaagaacaagctgaaagctggatacctaatgtcagtggagtcttctgaacgtttcctggaagaagtcgggtcgcaggctctagttgctggttcttacgtgccaccatccacagtccttcagcagattgattcagtggctaacgctgatannnnnnnnnnnnnnnagaagtttgtttctggccagaagtcgatggcagcaagtggaaatttgggacatacaccttttgttgatgagctgtaatactgacgcacacattacaggagagagctgaacattctctcagcccagagcagcaaacacatgaaagtcagaaatctctaatataacatttgtcttttttccagtgaggtaaaataaggcataaatgcaggtaattattctcagctgacctaaagtcaataaaacattctgcttaggtgtttttcttacgtttttctcaatgagttaatcaacaagtatttattatgtgctgatatttttgttttagatgctttaaaggagacaggaatataattattgagcatagaagcattagaaactattaaaattaaggctaagtggctatcagtataaatagtgccaggttactattggtggcttttcagatgaaagcaagttcaaaatttgtcattttgggtatcaatagctaaatggtctggtttttacccctgttttgccttttgcaannnnnnnttatttccgaaaaacataaatttcctatcaatcatatcctatattcccattaattcatttttttatgtctgagttatcttcactgacagagttttgtttttcactcatctgctgtctctcccttatctgttactatcctgtctcttccaagtaattaactctcaattcaacatttacagtaaaagaagggctgaaaagggaaaaacaaagaattctaatgtgaaaaactagccaaggaatatgtctcttagttattttaattatagtacaagaagtttaccaacaaaaagagagaaactaaatattaaagaaaagtgt

SEQ ID NO: 18029 - DNA, 742 bp, Macaca Fascicularis
  misc_feature (1)...(742): n = A,T,C or G
atgctgnnnnnnnnnnnnnnnnnnnnnnnnnnnnnnnnnnnnnnnnnnnnnnnnnnnnnnnnnacaaggcnnnnnnnnnnnnngcagccaaggctacagaggatcaaatgcgactcctacggnnnnnnnnnnnnnnnnaagacgagctggggggccagttcctagacctgtctctacatgacacggttaccaccctcattcttggcggtcacaacaagcgtgcagagcagctggcacgtgacttccgcatccctgacaagaggctctggtggttgaagctgactgccctggcagatttggaagactgggaagagctagagaagttttccaagagcaagaaatcacccattggctacctgccttttgtggagatctgcatgaaacaacacaacaaatacgaagccaagaagtatgcttcccgtgtgggtcccgagcagaaggtcaaggctttgcttcttgttggcgatgtggctcaggctgcagatgtggccatcgaacaccggaatgaggctgagctgagcctcgtattatcccactgcacgggagccacagatggggccacagctgacaagattcaacgggccagggcacaagcccagaagaagtgaggagtccatcctgtacatctcgagcaaggggttcctcccctagcacctgggcttggcagaagggccatagttcatccagctcctcccctagagcaatgctgaggaggtggggcatggtagcagggctctctggt

SEQ ID NO: 18030 - DNA, 558 bp, Macaca Fascicularis
tccacgagcgccctatcatctttgccgtgagcaaccccaccagcaaggccgagtgcacggttgagaagtgctaccgggtcaccgagggccgggggatttttgccagtggaagtccttttaagagtgtgactctggaagatggcaagaccttcattcctgggcagggaaacaatgcttacgtgttccctggggcggcactgggagtcatcgccggcgggatccggcacatcccagatgagatcttcctcctgacagcagagcaaattgcccaggaagtctctgagcagcatctgtcccaagggagactgtacccaccactgagcaccatccgagacgtgtctttgagaattgccatcaaagttctcgactacgcgtacaaacacaacctggcttcctactacccagagcctaaggacaaggaggcttttgtaagatccctggtctacactccagactatgactcctttacactggacagctatacttggcccaaggaagccatgaatgttcagacggtctgatgcagtctcagagcctggtatggggctagatgaagcc

SEQ ID NO: 18031 - DNA, 602 bp, Macaca Fascicularis
  misc_feature (1)...(602): n = A,T,C or G
ccgatggcccaagcagcgcccagcctgccctgccgaaggctggagccatggttcccaaacccagcagccggggcgagtatgtggtggccaagctggatgacctcgtcaactgggcccgccggagttctctgnnnnnnnnnnnnnnnnnnnnnnnnnnnnnnnnnnnnnnnnnnnnnnnnnnnnnnnnnnnnnnnnnnnnnnnnnnnnnnnnnnnnnnnnnnnnnnnnnnnnnnnnnnnnnnnnnnnnnnnnnnnnnnnnnnnnnnnnnnnnnnnnnnnnnnnnnnnnnnnnnnnnnnnnnnnnnnnnnnnnnnnnnnnnnnnnnnnnnnnnnnnnnnnnnnnnnnnnnnnnnnnnnnnnnnnnnnnnnnnnnnnnnnnnnnnnnnnnnnnnnnnnnnnnnnnnnnnnnnnnnnnnnnnnnnnnnnnnnnnnnnnnnnnnnnnnnnnnnnnnnnnnnnggccctgctgtannnnnnnnnnnnnnnnnnnnnnnnnnnnnnnnnnnnnnnnnnnnnnnnnnnnnnnnnnnnnnnnnnnnnnnnnnnnngccaccggagcctgtcgccgtcctgtccccggcctgctttgtcccgtgaggtgtca

SEQ ID NO: 18032 - DNA, 722 bp, Macaca Fascicularis
  misc_feature (1)...(722): n = A,T,C or G
tgaattcatctctacaggctcaaaactcttctttgatatcagacctgatgttatcttccctctttggagggcatttgtttggttaagaaggcttgttcagactttggaatttcaaaccagattttaccttgcagacgaaatgacaagcaaaaagtgttgtgggaatcaaatttgttcctttcgtcatgcacaaaacataaaggatagtgacgagtttataagctgtggatgggtttccatagtcttcctttctgtacattgctagctatatcttcagtcctttggagcaagcggacccaacaagttgagcaaagtgaatatttgtatccacgttcctcttgtgaccctgagtcttcatgcaannnnnnnnnnnnnnnaatgaaaatcttcagcagaaatagaaatggccatggattgtaatacacactgaaattctgactttctgaatttaaatgcagaataaattttgccaacctagagtactgtatgagtattttcagtagagggagtaaactcaaaattatatttgttttgcagaaacctagtcatttgaaatgagccctcttgtgtctccgttatgttccagagacagtatatgcagtgcgataatttctttattccaattatgttttgaaagccagcggcatcagatgtgtgaattgagctattcctcctggcagagctgtccaatctaaaaatcagcatttaccagcccatgttgt

SEQ ID NO: 18033 - DNA, 750 bp, Macaca Fascicularis
  misc_feature (1)...(750): n = A,T,C or G
ataagatgatgattggattcgnnnnnnnnnnnntcacagagctgcagggtggattgttacagcttcgttggaaannnctggaggtcatctcggctgttnnngagaaataaaaagcctcatttcaaacnnnnnnnnggaccctactgggtttttaaaatattgtcagtttttcatcgtcgtccctagcctgccaacagccatctgcccagatagccgcagtgaggacgagcatcctagcagcgacgcagttgtctgggcgctcaccagagccacgaaccccagacctatttgtatcatcccagctccttccgggtagaaacaactgaaaatgcacttcagacccacttatttctgccacatctgagtcggcctcagacttttcctctaaacttggagaatatcacagtggtttttgttagcagaaaatgcactccagcctctactcatctaagctgcttatttttgatatttgtaccagnnnnnnnnnnnnnnnnnnnnnnnaataacttgcttataaattgactttgtagagaagctggaaaaaatggttttgtcttcagctcnnnnnnnnnnnnnnnnnnnnngtggatcttggcttgtcagcctgtgctgggggcggggctgagcgggagccacccctctcagcccgcctgctatggcttttccttaaaggccattcttaaannnnnnnnnnnnnnnnnnnnnnnnnnnnaaagcttcctcaacnnnnnnnnnnnnnnnngtaggccc

SEQ ID NO: 18034 - DNA, 799 bp, Macaca Fascicularis
  misc_feature (1)...(799): n = A,T,C or G
aatgaaagttcaggtcaagctggatactggaaagactttccaggttgtcatgaggttcgacactgatgtggagctcacttatttcctcaatgggggcatcctcaactannnnnnnnnnnnnnnngccaagtaggagacctgcacttggtgctgcgcccagggaggaagtcacaccaccagccagcccaggccctggtggagaggcctccccggctgcctctgggaggggtgctgccttgtagatggagcaagtgagcaccagggttttggtgccaatcctgcaggcacaaaaccagaagtttctacattctctatttttgttaatcttctctttttccagaatttggaagctagaatggtgggaatgtcagtagtgtcagaaagaaccaagcttgtctttaaagttactgatcacaggacgttgatttttcactatttcctattaatcttcagctgaacacaagcaaaccttctcaggaggtgtctcctaccctcttattgttcctcttaccctctgctcaatgaaacctttctcttgaaggtcattttcctttctatattataccagtgttaactgacatggatagatacgaacttttcacacttcaaatcagagcagtgattctctcttctctccccttttccttcagagtgaatcatccagactcctcatggacagatcaggtgttgaagtttttttgattatgtaccttctgatagatccacataaaaagaaatctgaagttttcttttactatcttttcatttatcaagcagagacctttgttgggaggcggtt

SEQ ID NO: 18035 - DNA, 258 bp, Macaca Fascicularis
ggctcctggagggctgcctgggggaggcagacatgggagtgccaaggtggccagatggttccaggaccacaatgtctttatttttaactgtttgccactgctgccctcacccctgtctggctctggagtaccatctgccccagacaagcaggagtgaaatgggggtggggggaagcactgattcccagttagggggtacctaactgagcagtagggatagaaggtgtgaacctgggagtgctattataaattattttc

SEQ ID NO: 18036 - DNA, 714 bp, Macaca Fascicularis
  misc_feature (1)...(714): n = A,T,C or G
caggtgaagaagaagctctacgaggagattgaccagaatgtggnnnnnagccgcacaccaaccatcagtgaccgtaaccgtctcctcctgctggaggccaccatccgnnnnnnnnnnnncatcaggcccgtggcccctatgctcatcccccacaaggccaacgttgactnnnnnnnnnnnnnnnnnnntgtggacaagggcacacacgttatcatcaatctgtgggcgctgcatcacaatgagaaggagtggcaccagccggaccagttcatgcctgagcgtttcttgaatccagcggggacccagcttatctcaccatcattaagctacttgnnnnnnnnnnnnnnacctcgctcctgtataggtgagatcctggcccgccaggagctcttcctcatcatggcctggctgctgcagaggttcgacctggaggtaccagatgatgggcagctgccctccctggaaggcaacccaaaggtggtctttctgatcgactctttcaaagtgaagatcaaggtgcgccaggcctggagggaagcccaggctgagggtagcacctaaaggctgtaactcacagcccctgtccaccctgtgtggccccacaacaccgatttagagatgcaaccccccacccgttctccgccattcttccctgctcccagcccactccgccttctttttcagcctgtggcaatgccangtgatgtgcataaa

SEQ ID NO: 18037 - DNA, 792 bp, Macaca Fascicularis
  misc_feature (1)...(792): n = A,T,C or G
tcctcacaggtnnnnagcannnantggtacatgagctgaaaatacttgnaannngtaagtgcagtgtgannnngttgnnnnnnnnngtactgtgtaggttgggattatgccaggggtaagcttggagtctctagacccattctgaaaagactgtgggtcacaagtaggactggcagcatctcctgaggcttaaattcttccaggcaaatatttctcataactctgaaaacaggacaggcattgacagggccttgaccaccacccatgcacttgagggagatgacccgccatttggacccaacttatttccctttgccttacctaccactaacgcatctggccctctaagctcccnnnnnnnnnnnnnnnnnnnnnnnnnnnnnnnnnnnnnaaaaccttccattaggagcttcacacatgcctagtcataccatccattctgcatatttggcttttcagctatgctaattcccatatgnnnnnnnnnnnnnnnnnnnatnnnnnnnnntgactatctggggacacccaggttcccctacaacccaaccttggttcaatcgtcaaacacagaaggccatgctgatacagaagacatttcttacgtttccaaatactcctagactcccaacacactagtacctgctccagctccatcctcagagcacctggaggtcaaaggttttatccctcccccagccatagtcaacgtttatccctcagtcagcaaaatagccctgaagtccgttagactgtgagttctggaactgaaaaactgtatctagtgcttagtag

SEQ ID NO: 18038 - DNA, 772 bp, Macaca Fascicularis
agttcaatgcctcacagctgatcacccagcgggcccaggtatccctgttgatccgccgggagctgacagagagggccaaggacttcagcctcatcctggatgacgtggccatcacagagctgagctttagccgagagtacacagctgctgtagaagccaaacaagtggcccagcaggaggcccagcgggcccaattcttggtagaaaaagcgaagcaggaacagcggcagaagattgtgcaggccgagggtgaggccgaggctgccaagatgcttggagaagcactgagcaagaaccctggctacatcaaacttcgcaagatccgagcagcccagaatatctccaagacgatcgccacatcacagaatcgcatttatctcacggctgacaacctcgtgctgaacctacaggatgaaagtttcaccagaggaagtgacagcctcatcaagggtaagaaatgagcctagtcaccaagaactccacccccagaggaagtggatctgcttctccagtttttgaggagccagccaggggtccagcacagccctaccccgccccagtatcatgcgatggtcccccacaccgatcccctgaacccctcttggattaaggaagactgaagaccagccccttttctggggaattactttcctcctccctgtgttaactggggctgttgggacattgtgtgatttctcagtgatttcctacagtgttgttccctccctcaaggctgggaggagacaaccaccaacccaggaactctcaataa

SEQ ID NO: 18039 - DNA, 881 bp, Macaca Fascicularis
  misc_feature (1)...(881): n = A,T,C or G
tgactatagtaaaatgtagtagttacacagaaccagggttggctttatgtaaaagctagtgacctaaattgaaaacgaactttaagagaagttgttagtacagtggggaatgcttattacttacttcaaactgtttcccaaaataagtgcatttattttgacaataaaacttaaggctcttcatgaaaaggccttgaaaagttactctagaggaagaatgtctaaaggaaaaaaaaaattcaaaaagtttacattaattattcagtgttgtgagtaaataaaaatgtgtgctctttactgtttttcatttttaaaggatactctcttattatggaagcacgatttatttaaataggtacattgagattttgtgtgtgtgtttttttaaatgttctgatacattaggatgaagttaaatcttaaatctcattagttgaattgttataaggacagtgatgtctggtaacaagatgtgactttttggtagcactgttttggttcagtcttttcaaatctatttttgtttgtttaaaaacaatacaacttttaaaaaacaaagcattaaaaaaaaaagcctatcagtgttatgggcaatatgtaaataagtaaatataatatttcatcctttatttttcaggtaaaaggtcatgctgttacaagtgtagtttgtgtgcataaataatacttctgaattaaattatttaatatttgactgatttcaataactgtgaaaaataaaaaaggtgttgtattgcttgtgagaacttgaactgtactagttaattgaagaaaaaaaaagtgtaacactaaggtgaacttgcttcccttttcaccaattttnnnnannnttgtaatgcattgttagcatataactgaacaca

SEQ ID NO: 18040 - DNA, 826 bp, Macaca Fascicularis
  misc_feature (1)...(826): n = A,T,C or G
aannnnnnnnnnnnnnnnnnnnnncatgaaaaataaagcaagcacctaaacaatgtgtggannntaactaaaacccacagcccaaccaaaccttgagaatgcggaacattccagaggcagtagcctccaaagcacacagagcccctggccccgccgtggctctcactgtcaggggaggttgtacaggtgagtgagccggggggctcacgttcctgcctgcagaacatttctgtactagtgaaaagagggnnnnnnnnnnnnnnntcagcaaagccggaattctgtgttgagcagatgtctgtctctccctagtgtgtgactcacactgtgtggctgccttcagagtgccacctcctgatcagatgggggacacaacccctggatatgtttccttgtcagattttgtgcttgattttaagaatggaattgtgggttgttttggtttcttttttttttttttttttttaatgtatcttaactgttgcctgtcagtgtttacaaactagtgtgttgacggcaccatgtccaggtttttagaacccttgttagccagaccaatgtgtcctggtcaccgtttcaccatcatgctttgatgttcccctgtctttctctcctgctctcaggagcaaaggttaatttaaggacaaagatgaagtcactgtaaactaatctgtcatcgtttttaccttccttttctttttcagtgcagaaattaaaagtaagtataaagcaccgtgattgggagtgtttttgcgtgtgtcggaatcactggtaaatgttggctgagaacaatccctccccttgcacttgtgaaaacactgagcgc

SEQ ID NO: 18041 - DNA, 1107 bp, Macaca Fascicularis
  misc_feature (1)...(1107): n = A,T,C or G
cccgagcgccgctccggctgcaccgcgctcgctccgagtttcgggctcctgnnaagctagcgccgnnntcgtctcccttcagtcgccnnnnnnnnnnnnnnnngggacctcatcagccacgatgagatgttctccgacatctacaagatccgggagatcgcggacgggctgtgcctggaggtggaggggaagatggtcagtaggacagaaggtaacattgatgactcgctcattggtggaaatgcctccgctgaaggcccagagggcgaagtagccctaatnnnnnnnnnnnnnnnnnnnnnnnnnnnnnnnnnnnnnnnnnnnngcaggaaacaagnnnnnnnaaagaagcctacaagaagtacatcaaagattacatgaaatcaatcaaaggcaaacttgaagaacagagaccagaaagagtaaaaccttttatgacagtggctgcagaacaaatcaagcacatccttgctaatttcaaaaactaccagttctttattggtgaaaacatgaatccagatggcatggttgctctattggacaaccgtgaggatggtgtgaccccatatatgattttctttaaggatggtttagaaatggaaaaatgttaacaaannnnnnnnnnnnnnnnnnnnnnnnnnnnnnnnnnnnnnnnnncttctgcttgtcatccacacaacaccaggacttaaaagacaaatgggactgatgtcatcttgagctcttcatttattttgcccgtgatttatttggagtggaggcattgtttttaagaaaaacatgtcatgtaggttgtctaaaaataaaatgcatttaaactcaaatctttgagagaatgccttttagtttaatgcatagttaaattcatcctgtagtgttcctggaggagctagagcctggttgtaggctactactcatcaattaacttctacagtggagactacttctgggactggaatataaaaaagaatcaaaggttttgattgtgagttgcaataaagggaaagaccatgctcatagcagtgccaacatctgaagtgtggagccttacccatttcatcacctacaacggaagtagttaactgaagagataccaagaaaataaaa

SEQ ID NO: 18042 - DNA, 704 bp, Macaca Fascicularis
  misc_feature (1)...(704): n = A,T,C or G
gcccacagcctctgcacccagccattggcagcatnnattcagcaaggtcactaagctctgccagagtggcagagcatgtctcggaacctgtcnnnagtggggacagcgtccccccaccgctgccccagagctggggaggcgctgggaaaggttcaacctccacatactacaatcattgtagctcccggagcgagcttggggaacgaatgtggaagacgcctatattctgagagagaggacagtttcccaggaagatgggcagagacttgagtggcgattctgtctagcacagagacatgccaggcgctgttggcacccggggcaagatgctgcccttctttgcatgaaccccggccnnnnncttggcgtgacaaccctgtcatcttcttcccaaaactcatttatgagccaccagaggctcctaccccaaagattttcacagaaactggaggccaggtgccgtggctcacacctataatcccaacactttgggaggccgaggcgggaggatcacttgagcccaggagttcaagaccagtctgagcaacatagtgagactcctgtcnnnacaaaaattaaagatttaaaaaaattagccaggcatggtggcacacacttgtagccccagctactagggaggctgaggagggaagatctcttgtgcccagaagttgaggctgcagtgaactgtgattacaccactg

SEQ ID NO: 18043 - DNA, 748 bp, Macaca Fascicularis
  misc_feature (1)...(748): n = A,T,C or G
aagaagcagcnnnnnnnnnnnnnnnnnnnnnaaattggattatgatgaagatgctagtgcaatnnnnnnnnnnnnnnnnnnnnnnnnannnnnnnnnnnnnnnnnncggagaaagtatgagcgaaaacgtgaagannnnnnnnnnnnnnaaagaatagaacgagttaaaaaggctcgagaagagcatgagagagcccagagggaggaagaagccagacgacagtcaggagctcagtatggctcttttccaggtggcttnnnnnnnnnnnnnnnnggtagttttcccggaggaatgcctggaatgggaggggccatgcctggaatggctggaatgcctggactcaatgaaattcttagtgatccagaggttcttgcagccatgcagnnnnnnnaagttnnnnnnnnnnnnnnnnnnnnnnnnnnnaacccagcaaatatgtcaaaataccagagcaacccaaaggttatgaatctcatcagtaaattgtcagccaaatttggannnnnnnnnnnnnnnnnntnnnnnnnnnnnnnnnnttgctgaaggaaaagcaacctagatcaccttatggatgtcgcaataatacaaaccagtgtacctctgaccttctcatcaagagagtnnnnnnnnnnnnnnnnnnnnnnnnnnncctctcccccaannnnnnnnnaagcattttacagtgnnnnnnnnnnnnnnnnnnnnnnnnnntaatgttttcctactaggaattacaaactttaaaca

SEQ ID NO: 18044 - DNA, 779 bp, Macaca Fascicularis
  misc_feature (1)...(779): n = A,T,C or G
aaaaaaaagaaatgatgtgaggcacagcatgnnnnnnnnntcgaacggagacgcgtttctgaaggggctgcaggtgaggccggcccctctnctcagctgagcttcaggctgcgctggccatggagccgacgacccccnnnnnnnnnnnnnnnnnnnnnnnnnnnnnnnnnnnnnccaggaccccaaatcctggacgaccccagcgcccacctcctgggtcctgacggcctgccgaagccagctgcctgaccgcctcagcaggaccgcacgccacgtggagaaggggtggcctcgccagagctagggagcgggtgtggtgggctccggactactgggacatgtgggtggtggcttgtcccagggcccatggacagcttgctgtggggccgtgcagggagccctgcagctgcccaggtgtcaggagagctccctgccgagtgcttcagctgccccagggctttgccaagatgggatggggtgggtatgagannnnnnnnnnnnnnnnnnnnnnagggctgaagggctcgctcaccccagctccagctgctcccagttctctgagacgggagctcagcggggaggtggtgtccctccatcggactagggaaggggtcactgtgctgggagcagcctcctcgggcctcaggaaaccaccaagtgccttagatggtggctgcccacagcacttctgctgagaccctgccccaggcctaggtgtggctggaatggtggtaggagtgggcacnnngtgtggnnnntggtggnnnntgggggaataa

SEQ ID NO: 18045 - DNA, 734 bp, Macaca Fascicularis
  misc_feature (1)...(734): n = A,T,C or G
tcatctgtaaatatttnnnnnnnnnnnnnnnnnnnnnnnnnnnnnnngagggcaggccctgtgttcatagcnnnacaatggagagatgccagtgacctcataatagagactgtgaactgnnnggtgcggtgtccacatgacaagggggcaggtagcaccctctctnnnnnnnnnnnnnnnnnaaatggtttctagcgtatgtataatgctgtagttaaaacactatttttcaaaatcatacagattagtacatttaacggctacctgtaaagcttattactaatttttgtattatttttgtaaatagccaatagaaaagtgtgcttgacgtggtgcttttctttcacttagaggcaaaactgctttttgagactgtaagaacctcttagctttgtgcgttcctgcctaatttttaaatcttctaagcaaagtgccttagaatagcttgggatgagatgtgtgtgaaagtatgtacaagagaaaacggaagacagaggaaatgaggtggggtgagaggaaactcatggggacagattcccattcttagcctaacattcgtcattgcctcgtcacatcaatgcaaaaggtcctgattttgttccagcaaaacacagtgcaatgttctcagagtgactttagaaataaattgggcccaagagctttaactcggtcttaaaatatgcccaaatttttactttttttttcttttagtaannntgggccnnnntgtggaa

SEQ ID NO: 18046 - DNA, 750 bp, Macaca Fascicularis
  misc_feature (1)...(750): n = A,T,C or G
aatatttgggatgagacaccactgtatttgctccaagcagnnncnntganctaacttccaggcaggattcttaatgaaaaaagaggtacaggatgaggagaaaaacaagaaatttggcctttctgtgggccatcacttgggcaagtccatcccaacggacaaccagatcaaagccagaaaatgagattcctaagactggatttccttctaacatgttatcaaatctgggtgtctttccaggcttccctgacttgctttagtttttaagatttgggtttttctttttccacaaggaataaataggagagggaatcgactgtattcatgcattttgggatcattttattattcaatgtaactgattcttatgattactatcatggcatataaccaaaatccaactgggctcaagaggccacttagggaagatgtagaaagatgctagaaaatgttctttaaaggcatctacacaatttaattcctctttttagggctaaaattttagggtgaagtctagctaggtatcattcaattctccgatgttctattaatcacctctctgtagtttatggcagaaaggaattgctctgagaaagaaaagactgaatctacctgccctaagggacttaacttgttagtaatctaacacttgcttatgatatttcttgctttcaattacaatgcggtgactaatatgcctagcacgagtatcactgttcttcaactttcattgtttctatacagtacaca

SEQ ID NO: 18047 - DNA, 741 bp, Macaca Fascicularis
  misc_feature (1)...(741): n = A,T,C or G
actggatgtaaaagccatgggnnnnnntgttctgactgaagttctttttaatgagaagattagagaacagattaagaaatacagacgccatttcctacgattttgtcacaacaacaaaaaagctcaacggtaccttcttcatggtttggagtgtgtggtagcaatgcatcaagnnctncntatctccaagattccacatatcnnnaaggagatgtacgatgcagaccttttagaagaagaggtcatcatcagctggtcggaaaaggcctctaagaaatatgtctccaaagaacttgccaaagagattcgtgtcaaagcagaaccgtttataaaatggttgaaggaagcagaggaagaatcttctggtggtgaagaagatgatgaagacgagaacattgaggtggtgtnnnnnnnnnnnnnnngtgtaccgaaagtggaaaccgtgaagtcggacaacaaggannnnnnnnnnnnnattgatgccatttaaagggatggatgcaacctagcttaacagtataatgctgcaaattttcnnnnnnnnnnnnnnnnagtgcaacatgtatgtgcaaaagctaaaatggcttaacatcatgctacactttacactaaaaatctattactgtgagtggtctgtaattaagcccaatgagacatctagggagtccatacacatcagtgagcagatgtagtttgcttatttatagcacgtttctttttgaaaannntggtggtggacac

SEQ ID NO: 18048 - DNA, 727 bp, Macaca Fascicularis
  misc_feature (1)...(727): n = A,T,C or G
gctcaagccatcatcgttgtnntcnacctgaatgatgtggcatnnctggaacataccaagcagtggctggctgatgccctgaaggagaatgacccttccagtgtgctgcttttcctcgtaggttccaagaagnnnnnnnnnnnnnnnnctcagtatgcgctgatggagaaagatgccctccaggtggcccaggagatgaaggctgagtactgggcagtctcatctctcactggtgagaatgtccgagaattcttcttccgcgtggcagcactgacttttgaggccaatgtgctggctgagctggagaaatcgggggcccgacgcattggggatgttgtccgcatcaacagtgatgacagcaacctctacctaactgccagcaagaagaagcccacatgttgcccatgaggggtgaggagactgttcagggactgccagccctgnnnnnnnnnnnnnnnnnnnnnnnnnnnnnnnnnnnnnnnnnnnnnnnnnnnnngactgtatccagacnnnnnnnnnnnnnnnnngtggcagtattcccacagaggggtagctgggaccatgctagtcacttcctgctccaggcactgtgccaaagactggacgccccctactcttcaggggactgtccagggtgcccagcggtagtggggaagagtgtctctgttcttttgctcagcctgctgggccctttgtgtgtgaggatgcttgattccagcctctcact

SEQ ID NO: 18049 - DNA, 744 bp, Macaca Fascicularis
  misc_feature (1)...(744): n = A,T,C or G
aaaagtggatcatccaggtgcccatcctggtgctnnnattgtgctgcgggagaccaacgctggccggtgtgacacgcggcagcagtaccggaagctgctcaaatccacgctggtgctcatgcccctctttggcgtccactacatcgtcttcatggccacaccatacaccgaggtctcagggacgctctggcaagtccagatgcactatgagatgctcttcaactccttccagggattttttgtcgccatcatatactgtttctgcaatggcgaggtacaagctgagatcaagaaatcttggagccgctggacactggcactggacttcaagcgcaaggcacgcagcgggagcagcagctatagctatggccccatggtgtcccacacaagtgtgaccaacgtcggcccgcgtgtgggactcggcctgcccctcagcccccgcctactgcccactgccaccaccaatggccaccctcagctgcctggccatgccaagccaggggccccagccctggagaccctcgagaccacaccacctgccgtggctgctcccaaggatgatgggttcctcaacggctcctgctcgggcctggacgaggaggcctctgggcctgagcggccacccgccctgctacaggaagagtgggagacagtcatgtgaccaggcgctgggggctggacctgctgacatggtagatggacagatggaccaaagatgggtggtgaatggttgcccactcagag

SEQ ID NO: 18050 - DNA, 760 bp, Macaca Fascicularis
  misc_feature (1)...(760): n = A,T,C or G
gaaagacagatnnnatgtcacccggcaactcagaaacatcaggtccaagagtctgaaggaaggcctgacggtgcaagnnnnnnnnnnnnnnnttgaatccagggacttgaagaaagactagctgtgtcccatccaagttgagcacgcgccttccccagcttgcagcagcacaccccgagcgctgcttttcacctgtacctttgttttattattattattgctgttgttgtcatcgttaannnnnnnnnnnnaatgtgtgaggctggcttctgggttgtccacaccgtgttactctgctgtgttgacttcctgttgtcttcatcaaagctcttttccgtggtattctaaaattaggccagcagtgggggctgggagggcatctgtgttagtcccttcttggctgtgacccgctgcactcactgtcagtattaaggcccagcagcctgttgataagctaccctgtctcacnnnnnnnnnnnnnnnnnnnagggcccagccagcacgcctnnnnnnnnnnnnnnnnnnnnnnnnnnnnnnnnnnnnnnnnnnnnnnnnnnnnnnnnnnnnnnnnnnnnnnnnnnnnnactcctcacccgctagtctggctgttaagaggagaaggtgcgctgccttccggcctgggaggaagacagcattttgtatctgttccactgatgcagcttagaaccacacacccctgagaatcgtggcaaacctttcacaacctggaaaatgtgaaagcaaccattcctatttttgt

SEQ ID NO: 18051 - DNA, 728 bp, Macaca Fascicularis
  misc_feature (1)...(728): n = A,T,C or G
taacataaacgtagnctgaagtttatggaataagatgtattctcactctcttgatctcaagggcataactctggaagcacagcttgactacatgtcatttttaccaannnnnnnnnnnnnnnnctgagctaagtcattaaactgggtcttgtttataaaagtaaaaggccaacatttagttatttnnnnnnnnnnnntaagagcttaagatgtaatttttcctgcagttgtaaatcttttatgtctcctgaggacttcccttaaaattnnnnnnnnnnnnnnnnnnnaatgagacaaaagacatcttcaaatccatatttcaagcctggtagaattggcttttctagcagaacctttcaaaaagttttatattgagattcataccaacaccaagaattgattttgtaaccaacattcattcaatactattatatcaggagtaggagagaggaaacatttgacttatctggaaaagcaaaatgtacttaagaacaagaataacatggtccatttacctttatgttataggtatgtctttgtgcaaatcatttgttttgagttttcaaagaatagctcattgttcattcttgtactgtacaatgacccctgttattgttacttcgacttttcagagcacacccttcctctggtttttgtatatttattgatggatcaataataatgaggaaagcatgatatgtatattgctgagttgaaagcacttatgg

SEQ ID NO: 18052 - DNA, 623 bp, Macaca Fascicularis
  misc_feature (1)...(623): n = A,T,C or G
tgtgagcacggtnntgatgcaatagtnnngtgtcatcactgctgcggtcctcaggagctgccaggaccagttgctacagagtgtctgagtatgtggtgtaggaggaaggttccctcgtgaaataaggctgggtgggagcagggagggactagatcagaagagatcaagaggtgtgttcntgaacgttggtgggaggacagagccaccgggaagggggtgtggtgagtgcggcagtccctcctcctcttagaagtacctgtgaatgggaagagagctaactcttctagaaagttggttcagaaatagcgatcatgccagatttctagcaaaaaggttcagtgttaccataagcctctgctgtacttcttgaaatgtttttaggggagagcatcggaaaatccccttcccccatcttatctcctgaaggagaagattgaaggaagatgagggagcagcttggattcttctcaattgtcccctgcagggggagatacactaacccccggaaatgactgctaagcctcttgcctcgtcttcagtagctaatgatcagagagatttttttttttaaaactaccatggtcccacagattccatcctgaaatttatttttctttgtatga

SEQ ID NO: 18053 - DNA, 683 bp, Macaca Fascicularis
gcaaacaaggtccctctggagcaagtggtgaacgtggtccccctggtcccatgggcccccctggattggccggaccccctggtgaatctggacgtgagggagctcctggtgccgaaggttcccctggacgagatggttctcctggccccaagggtgaccgtggtgagactggccccgctggacctcctggtgctcctggtgctcctggtgcccctggccccgttggccctgctggcaagagtggtgatcgtggtgagactggtcctgccggtcccgctggtcctgtcggccctgttggcgcccgtggccccgctggaccccaaggcccccgtggtgacaagggtgagacaggcgaacaaggcgacagaggcataaagggtcaccgtggcttctctggcctccagggtccccctggccctcctggctctcctggcgaacaaggtccctctggagcctctggtcctgctggtccccgaggtccccctggctctgctggtactcctggcaaagatggactcaacggcctccctggccccattgggccccctggtcctcgcggtcgcactggtgatgctggtcctgttggtccccctggccctcctggccctcccggtccccctggtcctcccagcggtggtttcgacttcagcttcctgccccagccacctcaagagaaggctcac

SEQ ID NO: 18054 - DNA, 670 bp, Macaca Fascicularis
  misc_feature (1)...(670): n = A,T,C or G
cagaagcctgactnnngttgcaaaatgcacacattttgaccacagtgtttcagctcttttcttttgttcaatttaggtggcttcccacacttctgactcaggtgttccttccggtgtcactgaggtggtcgtgaagctctttgactctgatcccatcactgtgacggtccctgtannnnnnnnnnnnnnnaaccctaaatttatggagactgtggtggagaannnnnnnnnnnnnnnnnnnnnnnnnnnnnnnnnnnnnnnnnnnnnnnnnnnnnnnnnnnnnnnnnnnnnnngagtctctgggagccaaaaaaacaaaaacaaaaaaccagacgaagtgcagactccatagcctggtgggaatgactccacctggagccagagcccaagaacaaagccaggaagttactgggaattttatttttcctttggaggatgttttatttggtggataactctttaaaatcaaagggagaagtgagatgtaaatgttgcttttggacctacgggggcanntgagtccagctcccccgagatgagctgcagccccccagagagagctctgcatgtcaccaagtgaccaggccccagcctccaggcccccaacttcgcccagccactccccgctctggatcctgcacgataacactcgaatctgctgctcatggga

SEQ ID NO: 18055 - DNA, 710 bp, Macaca Fascicularis
  misc_feature (1)...(710): n = A,T,C or G
gagtcaccatggttcatggaaatcttaccgctggtcatggtctcctggtgnagttgataatcacatttcagttggtgtttactatctttgccagctgtgattccaaacggactgatgtcactggctcaatagctttagcaattggattttctgttgcaattggacatttatttgcaatcaattatactggtgccagcatgaatcccgcccgatcctttggacctgcagttatcatgggaaattgggaaaaccactggatatattgggttgggcccatcataggagctgtcctcgctggtggcctttatgagtatgtcttctgtccagatgttgaactcaaacgtcgttttaaagaagccttcagcaaagctgcccagcaaacaaaaggaagctacatggaggtggaggacaacaggagtcaggtagagacggatgacctgattctaaaacctggagtggtgcacgtgattgacattgaccggggagaggagaaaaaggggaaagaccagtccggagaggtattgtcttcagtatgactagaagatcgcactgaaagcagacaagactccttagaactgtcctcagatttccttccacccattaaggaaacagatttattataaattagacatgtgcaggtttgttgtttcatgtcatattagtcagtctaaacaataaatatttcataaattagcaaggaggaaaggaag

SEQ ID NO: 18056 - DNA, 756 bp, Macaca Fascicularis
  misc_feature (1)...(756): n = A,T,C or G
aacaatagctttacnnncagnnnnnnnnnnnnnnnnnggccgcccagaccnnnntggccaggatggaggggtggtcctgactcaagatgttactgaccagcaacttgtctttttctggactgaagcctgcaggagttaaaaaaggcagggcatctcctgtgcatgggtgaagggagagccagctcccctgatggtgggcattcataaggcnnnnnnnnnnnnnnngaatnnnnnnnnnnnnnnnnnnnnnnnnnnntgaggcctcttgagggcgnnnnnnnnnnnnnnnnnnnnnnnnnnnnnnnnnnnnnnnnnnnnnnnnnnnnnnnnnnnnnnnnnacattccatgaatgtatcaggaaatatatatgtgtgtgtatgtttgcacacttgtgtgtgcgctgtgagtgtaagtgtgagtaagagctggtatctgattgcaagtctagatatttccttaaattgtgtggactgtgatgccacatagagtggtctgtctggagaggttataggtcactcctggggcctcttgggtcccccacatgatagtgcctgggaatgtattattctgcagtatgacctgtgaccagcactgtctcagtttcactttcacatagatgtccctttcttggccagttatcccttccttttagcctcgttcatccaatcctcactgggtggggtgaggaccactcctgtacactgaatatttatatttcactatttttatttatatttttgtcggaaaaatcacat

SEQ ID NO: 18057 - DNA, 165 bp, Macaca Fascicularis
aagggaacccccaaatttaattaaagcattcagcacacttaattaaaagagaaaggtaattgtacaagcagtcaatcactcaccctagggcaggcttaacaaagcaacctttcctttccttcaagcgattgagtgaaacccccttttcctttcagttagcttaga

SEQ ID NO: 18058 - DNA, 270 bp, Macaca Fascicularis
attacacagtgtagtgtataatcatgtagtttgtattaatacaataatatattttagtatgaaaatttggaaagttgataagatttaaagtagagatgcaattggttctcttgcattgagatctgatttaacagtgttatgttaacatttataatcgccttggaccgtagaacagaagtgaaatgggaatgtattagttttacaactacaatcaagtcattttacctttacccagtttttattataaaatttaaattctgaaattcacat

SEQ ID NO: 18059 - DNA, 675 bp, Macaca Fascicularis
  misc_feature (1)...(675): n = A,T,C or G
agnnnnnnnnnnnnnnnnnnagccacaacctcacagccatccacgaggcgctggagnnnnnnnnnnnnnnnnnnnnnnnnnnnnnnnnnnnnnnnnnnnnnnnnnnnnnnnnnnnngccatcgtgctcaatgcgcgtggtggggcccggaggaacgcggagctgtccttcgtgttcctcaccgannnnnnnnnnnnnnacgacagcctgcacgagtccgcgcactccatgcgcaagcagaacgtggtgcccaccgtggtggccgtgggcggcgacgtggacatggatgtgctcaccacgctcannnnnnncgaccgcgccgccgtgttccgcgagaaggactacgacagcctggcgcaacccggcttctttgaccgcttcatccgctggatctgctagcacagcgacccggccccgcagtcgagggtcgtgagcccaccccgtccatggtgctaagcgggcccgggtcccgcacagccagcaccgctgctcactcggaggacgccccgggcccgcacccctccagctcctcccacgggatccccgtagccccagaccccacccagccccaggtgtccccaggccccaggcaggctgcctggcctccctccccctgcagccctcccaggctcctgacctgcctggcccctgagctcgggagcaagccctgacccca

SEQ ID NO: 18060 - DNA, 641 bp, Macaca Fascicularis
  misc_feature (1)...(641): n = A,T,C or G
gcccctnnnnnnnntgcccacannnnntcccaacaaagcaggctgtttgactgctcacttcttcaaaaggagaaatgaaaacccaaatctgcccaagtgacacttgaaaaggttttggctggggttcctggtggatttcttactacctaacgcccaagagaaccaactaaggactctcaaaccatacctgttggaggttctttgctcaacctcttcttccctaggtcaaagccactnnnnnnnnatgtgttagggatgggttctgattggcagaaattaatcagctcccaatgggagcccagggaactaagtagggtcccaagaaaaaaaatgggagctatttcacagagctgagcttctgccgaatttnnnnnnnnnnnnnnnnnnnnnnnnnnggttggcgtttctaaaatgtttatgggatttgagttgcaggtgtccacttaactgactagctttgataaacaatgtcagattttaactatgaaaacgacattaccttgtgcatttttatattctgattcctatttttttttaagattaaagtttaaatgttttccactagtcatttcacttctaacttggtataggaagcttagctctctatataccnnnnnnnnnnnnnntatcacagaagatca

SEQ ID NO: 18061 - DNA, 788 bp, Macaca Fascicularis
gaaggtgatgtgaggaagaggatggagatgaagatgaggaagctgagtcagctacgggcaagcgggcagctgaagatgatgaggatgacgatgttgataccaagaagcagaagactgacgaggatgactagacagcaaaaaaggaaaagttaaactaaaaaaaaaaggccgccgtgacctattcaccctccacttcccgtctcagaatctaaacgtggtcaccttcgagtagagaggcccgcccgcccgcccaccgtgggcagtgccacccgcagatgacacgcgctctccaccaccccacccaaaccatgagaatttgcaacaggggaggaaaaaagaaccaaaacttccaaggccctgctttttttcttaaaagtactttaaaaaggaaatttgtttgtattttttatttacattttatatttttgtacatattgttagggtcagccatttttaatgatctcggatgaccaaaccagccttcggagcgttctctgtcctacttctgactttacttgtggtgtgaccatgttcattataatctcaaaggagaaaaaaaaccttgtaaaaaaagcaaaaacgacaacagaaaaacaatcttattccgagcattccagtaacttttttgtgtatgtacttagctgtactataagtagttggtttgtatgagatggttaaaaaggccaaagataaaaggtttcttttttttccttttttgtctatgaagttgctgtttattttttttggcctgtttgatgtatgtgtgaaacaatgttgtccaacaataa

SEQ ID NO: 18062 - DNA, 746 bp, Macaca Fascicularis
  misc_feature (1)...(746): n = A,T,C or G
acaggagatagtggtgagtccaggagtgaggactctnnnnncctctcnnnnnnnnnnnnnnnnnnnnngtcagcagcacagtgggaggctggttatggtctgggtcaggaggggtggacagtggccttactgggcgtcggggggccctgaagttctggggctcaccggaacccctcnnncctccaccagcaggagggccaggcaagtggcacgccctcctcagtccgggaagtagtctcggagttcagcttcacactgacactgtgattgggtttctttctccctccagactgctgttgatgtttttagaaggataattttggaggcagaaaaaatggatggggcagcttcacaaggcaagtcttcatgctcggtgatgtgattctgctgcgaagcccgaggacnnnnnnnnnnnnnnnnnnnnnnnnnnnnaaactgcccgttctccttgaagatcaactatgcttcttttttcttctgttaacctgaaagatatcatttgggtcagagctcccctcccttcagattatgttaactctgagtctgtccaaatgagttcacttccattttcaaattttaagcaatcatattttcaatttatatattgtatttcttaatattatgaccaagaattttatcggnnnnnnnnnnnnnnnnnnnnnnnttgtttaaaataatgtaatcatcaaaatgatgcatattgttacactactattaactaggcttcaatatatcagtgtttattt

SEQ ID NO: 18063 - DNA, 472 bp, Macaca Fascicularis
  misc_feature (1)...(472): n = A,T,C or G
caaccagagccgaatactggatatgtatagtcacagccttgtacagcattnnncataagttatatggtaaacggcctggatgatnnnnnnnccaagtgctctcatttggaaatgaggcagggcttttctcagaaangcaaagtaagaaaccacttgaaataagttgnnataccaccnntgnnnccatgcccgccccacccnnnnngtatatacgtaagataaacccgggcggggnnggcctccccccctcatctcatttaaaccccaccctatcttccctgaaggaacattccttagtctcaagggctagcatccccgaggagccggactgggctgaatcccctccccgtcaaagctgtcacttcgagtgccctcgctgcttctgtgtgtggtgagcagaagtggagctggggggcgtggagagcccagcgcccctgccacctccctgacccatctaatatataaatataga

SEQ ID NO: 18064 - DNA, 710 bp, Macaca Fascicularis
  misc_feature (1)...(710): n = A,T,C or G
ccatattcacacctcacgctctggacattattnnngcaagcagggacaccccccgccccccacctttgggatcagnnnccgccattccaagtcagcactcttcttgagcagactgtgatttggaagagaggcaactgctggaaaccacacttcttgaaacagcctgggtgacggtcctttaggcagcctgccgccgtctccgtctgggttcaccttgccgagagaggcgcgtctgccccaccctcgaaccctgtggggcctgatggtgctcacgactcttcctgcaaagggaactgaagacctccacattaagtggctttttaacaagaaaaacacggcagctgtagctcccgagctactctcttgccagcattttcacattttgcctttctcgtggtagaagccagtacagagaaattctgtcgtgggaacattcgaggcatcaccccatagagctgtggtgaggtgtggataaggcttaggtgccaggctgtaagcattctgagctgggcttgttgtttttaagtcctgtatatgtatgtagtagtttgggtgtgtatatatagtagcatttcaaaatggacgtactggtttaacctcctatcctcggagagcagctggctctccaccttgttacacgtatgttagagaggtagcgagctgctctgctatatgccttnnnnnnnnnnnnnnnnnnnnnnnnattattt

SEQ ID NO: 18065 - DNA, 730 bp, Macaca Fascicularis
  misc_feature (1)...(730): n = A,T,C or G
ggcctccatcannnnngagcatcnnnctggactcagagggaacaaggtgggagagattgagacagttccgtgcggagagcttaccccctggaggcagcacgaggtggatatgatgtgtcggggagtgaacactgggatgggagctggatcctggtttccgatttgggttctgctgtgtgactctgggcaagtcactctccctctctgggcgcttctgctacaaatggacaagattatttcagaggtcactgaagactgtgattatatgcacctgccctagaaggtgggattttcttcccagggacctcctgtcatcctaccctgcttcttgaggtccctggaaccccaggtgggctgaggggcagggagctggctgtgcccagtgtgcctcctggaccctccagttctgccacaggtctgccaatgccctgtccactgcctacatgtgacagacaagtgaccccctcatgggggatggggacctacctgactcctcagccagcacccagcttaacccctgccatcccatgctgggccctctaggccaagagtctcagctggccgagagtccaggccttgcctcccccgaccgccatggagggggcagccaggcacagttgctgggagcccttgtgtgtctggtcacactttttaggcgccaagccaaaggccagcctcccagccccaacacccatttggaagcccctgtggccgtgtggatgtcggtaac

SEQ ID NO: 18066 - DNA, 701 bp, Macaca Fascicularis
  misc_feature (1)...(701): n = A,T,C or G
tggtgagtgacccattcaggtgcatctgaggctctttagatgtgagcttgtttgacatacacaagctcctgaatgaccatcacctagactggtagaaagaggcagtgaaaatccccgcacccaggcccagctctgcttgggcaggtgtccctgccgatgagtcccctgcctggccccctgggcccctgtgggcatgaggagtgaggcaggaccagagagacacgggtggacagtggcatcaggctctgtgaggagacttcgcgtccagctctgtttctgccccttttcctaccaggatgaccggaaagaagggatgactgcgtttgtggaaaagagaaaggccaacttcaaagaccagtgagactcagccgcccctccctcacacctttgcttggagagggcaaatgcagcctgctgtcagttttagaagcaagtaaatcatcctcttttcgagannnnnnnnnnnnnnnnnnnnnnnnnnnnnnactgctgcgtggtcacggcccgagctctcacggcatgactgccttcttcacccagcctgtgagggtccgtgttcacgtcctgattggagcaccttcttctcaatcttaagattctgctgaggagcccctgctggtccctctgggcatgctgtgcttgggcggaaagcagggcctgcaggtccttgtgtccctgccgctggagaggggctgctctga

SEQ ID NO: 18067 - DNA, 750 bp, Macaca Fascicularis
  misc_feature (1)...(750): n = A,T,C or G
tggcatttgcanntacctcacagagtgcgttgtgagggttaatgaaataatgtacatctggccttgaaaccaccttttattacatggggtctagaacttgacccccttgagggtgctcgttccctctccctgttggtcggtgggttggtagtttctacagctgggcagctgttaggtagagggagttgccaagtccctgttggcccggccaaacccttgtctgagaacctgttggtgaaccttagcacctaaaaggaaatctcaccccatcccacaccctggaggatttcatctcttgtctatgatgatctggatccaccaagacttgttttatgctcagggtcaatttcttttcttttttttttttttctttgagactgggtctcactctgttgcccaggctgaagtggagtggcgtgatcttggctcactgcagcctttgcctccccggctcaagcagtcctgcctcagcctccggagtagctgggaccacaggttcatgccaccatggccagccaatttttgcatgtttggtagagatggggtctcacaatgttgcccaggctggtctcaaactcctgggctcaggtgatccacctgcctcagcctcccagagttctgggattacaagtgtgagccactacgtccagccggaagggtcaacctcttttacattctgcaagcacgtctgcattttcaccccacccttcccctcctccctttttatatccaatttnnaccgatctctat

SEQ ID NO: 18068 - DNA, 849 bp, Macaca Fascicularis
  misc_feature (1)...(849): n = A,T,C or G
tgggttttttaaagttttcantnntgccataaaaatctgtggtggaatacattttgttttcattactnnnnnnnnnnnnnnnnttcagagtaattttagaacttgaaggtaaaaatttactttgtcaacgctgaagtctgctgtagtctttatacatcttnnnccagagaacatgacagtgtcaagtagatatatatttttataataggtnnnnnnnnnnnnnngaaatattcttaatctctgcatgtgttacaattcagttatttctgtagtttgtaaactctaaagtgacgttactattaagagatgtgtaagttgtaattttgatttttgtggaaccattatttgttaatgttgggattctctnnnnnnnnnnnnnnnnnnnnnnnnnnnnnnnnnnnnnnntacttaaagttttctatttcagacgtctctatgtggaagttgagactaagaataatcctagggatgccatgaatttaggcaatgtttctcatttggaaaatgaaatgagaaataatttccttctttaaagcaaatatatatagtatgagaaannnnnnnnnnnnnnnnnnnnnnntttcttagcaannnnnnnnnnnnnnnnnnnnnnnnnnntttatattagagattctgcagctctttgctcttaagagaaaatcgcaacaggattcttaatgtgtgacttctttgttcatataataatatgaatgtattattttatttgcttcgtaataaagtttataaggaacagcatctcatacatatcattatcttggaacacattgaatgtatgtgattgtgtgtggcctttttagggctggaaaatgtagaattcttcaactgtct

SEQ ID NO: 18069 - DNA, 1019 bp, Macaca Fascicularis
  misc_feature (1)...(1019): n = A,T,C or G
tcttttcaacagaagccataattcaggagttttcagatcctctggacctnnnnnnnnnnnnnnnnnnnnnnnnnnnnnnnnnnnnnnnnnnnnnnnnnnnnnnnnnnnnncgaggcggagaccatcaccagccactacttgtttgcgctgggcgtttaccgcacgctctatctcttcaannnnnnnnnnnnnnnnnnnnnnnnnngcttcttcgacctcnnnnnnnnnnnnnnnggcctggtccagacagtcctctactgcgatttcttctacctctatatcaccaaagtcctaaaggggaagaagttgagtttgccggcatagccccggtcctctccatctctctccccggcagcggcgggaggcagaggaaggcggcagaagatgaagaactttcccatccaggggtgacttttttaagagcccacctctcgcgctccccatcccgcctcctgccgggtttcagggggacagtggaggatccaggtcttggggagctcaggacttgggctgtttgtagttttttgccttttagagaagaaaaaaaaaaaaaatctttccactctttagtttttgattctgatgactcgtttttcttctactctgtggccccaatttttataaagtgtttttgagtgtcctgggggccggggcagggtccaagatcttttccttccccaggcccctcggctccctcccagatcccacccccagccccactggttgccaaacactaaatctgccgacacccatctgccccacctcctgccatggccatgaaccgcaaccccccctaaatttctaggttggggatagggagaaagggaggcccaggaaggtctcccctgattttttttcatagtaattttttcccccagagtttgagttttttggtcttctcatggttttttggcaaattaggggggcccggggctcaagtgcaggaagggggctgggccgagggtcccatggctctcacaccatgtttttgtacagaactgatggttgatcctttgtcc

SEQ ID NO: 18070 - DNA, 742 bp, Macaca Fascicularis
  misc_feature (1)...(742): n = A,T,C or G
acccaaaaattggnnnanttttncttaaaaaaaaaaaaagtctaccaaaggaatttgcannncagcagcagcacttagannngccagcactgtcatcgagcgggtgcaagcactcgggacccctgcagggcaagccctgcccatagaaagccaggagcaacactggcccccgttacccctgctagatgtaccgcctggaggcacagctaaccacttcgcacacacccatgtaaccactgcactttcaaatgccacagacaactcacattgttcaactcacttctcggggtgggatagacgagacaacagcacacaggcagccagccgtggccaggggctcgaggggctcaggggctcaggcacccgtccccacatgagggccctgtgggtgggcctggccctgctttctacaccaatgttatgccagctctatgttctcccaaataccgttgatgtgaattatcttcaaggcaaaactgtgctctttattgtaaaaaacactgataatcacatagcggtcggttattcttttgccacatccctatagaccattgggtttggccaaactcaggcggaagtggagacctttctaggcgtcattgtcagccctgctacttgaaggtacaccccatagggtcggaggtgctgtccccactgccccacgttgtccctgagatctaaccctccactgctgggggtgagctgtgctcttctgactacccctcctgtnnncgactacaaa

SEQ ID NO: 18071 - DNA, 821 bp, Macaca Fascicularis
  misc_feature (1)...(821): n = A,T,C or G
agagcctggctgagacgnnannnccggtgaacttgccatgaatgttggcaaggcccgagnnnnnntcaagaaggaagatgtggtcattgtgctgaccggatggcgccctggctccggcttcaccaacaccatgcgtgttgttcctgtgccgtgatgaacctgagagcccttcctccagcccctgtcccacccccttcccccaacccatccattaggccagcaacgattgttagaactcactctgggctgtaatgtggcactggtgggctgggacaccagggaagaagattagtgcctcgctgaaacatggctgtgtttgcagcctgctctagtgggacagcccagagcctggctgcccatcatgcggccccacccaatcaagggaagaaggaggaatgctggactggaggcccctggagccagatggcaagagggtgacagctttctttcctgtgtatactccgtccagttccttgagaaaaaatggatgcccagaggactcccaaccctggcctggggtcaggaaacagctagagagttaggggccttagggcaaggggctgttgttcccttgaagctgactctggccctggcccttacttgcttccccagccccctgggcctccccagttcgcacctgtccccgccctccactcagttgtcctgcagcaaacactccaccctccaccctccaccttccattttcccccactactgcagcgactactgcagcgcctccaggcctgttgctatagagcctacctgtatgtcaataaacaacagctgaagcaaaaaaaaaaaaaaaaaaaaaaaaaaaaagg

SEQ ID NO: 18072 - DNA, 982 bp, Macaca Fascicularis
  misc_feature (1)...(982): n = A,T,C or G
gagaaacattannnnnnnnnnnnnnnnnnnnnnnnnnnnnngagnnnnnnnnnnnnnnnnntttgannnnnnnnnnnnnnnnnnnnnnnnnnnnnnnnnnnnnnnnnnnnnnnnatatgaaagggattctaactaccacttgctcatgtctgttcaagagagtttagaaagaaaatttgnnnnnnnnnnnnnnnnnnnnnnnnntgtacccacggcagagttccaagacaggatatcgggnnnnnnngagaaagacatcgtgcattctggcttggnnnnnnnnnnnnnnnnnnnngccaggcaannnnnnngcacagccatgaagtataacctgggattggacctgagaacagctgcctatgtcaatgccattgagaaagtctnnnnnnnnnnnnnnnnnnnnnnnnnnnnnnnnnnnnnnnnnnnnnnnnnnnnacttcctcactaccctcttcacctgtaacttctgcagacctatcacaagtttacatgtaaccacagaaatccctttctctcctgactcagtaataatggataccattctcaacaagtcaatccaaatcagcccctgaaggagaaagaaattaaggttaggggaatcacctacaagctgagtgtgaannnnnnnnnnnnctacaccagagagccatttgggtattttgcctttaaataaaaagtctcnnnnnnnnnnnnnnnnnnnnttgctctgtggcttttcccaacacaatcagtgctattgctggggaagggacaggcaagagcagtcagttgcttgcttattttgcnnnnnnnnagtctgggacacgctgtaactttaacacatttaagaagtaggtgtgtggccttttgagaaggtggcatggtcctcaagtgagttcttagtattttatatcagcaaaatnnnnnnnnnnnnnnnnnnnnnnnnnnnnnnnnnnnnnnnnnnngtttatgaattctattcttttagaataaaataagtaca

SEQ ID NO: 18073 - DNA, 676 bp, Macaca Fascicularis
tgagtgagaagaattatttcccctcctcactacctggacacagggcagaagaatggaacataaccagccgctgagtacatcgtctacttacctaaagatagcaatcactgaatggaactcacgttgcacatgtacttgcggataaaatatttaagacctcgtcaattcaacttcagctcttttcccagcaatctctgaagttgtgagtacctactgagacctctgggctgagtctaagtgacttgagttctggaatgtgacttcaggacattcttttcttgacaatggggcactcaggcagatgacatgtcacagcatctgtgtggacatggtatggtgtgtgcagcatcaagattaaccatggattgtgctggctcccatatgagcagaagagtaaggtttttttaaggagtcccttaggctgttaaggccatgagaaagtaaactttggagtccaacagacctggctaggcaagatggcaagcaacagtatgacaaagctatacagcatatgctcagtctcaggaatggactattgaattcctattgctaaggatgcagtcattctgggatcacatgtatacaacttcttactctacacatttgttaatcgcttactatgtaccagacactttgctagggatacagattgatttgcatacaacatactctttat

SEQ ID NO: 18074 - DNA, 943 bp, Macaca Fascicularis
  misc_feature (1)...(943): n = A,T,C or G
gaacagtatgagggnggtatgccaccccgtgagggcagagggatgccaccaccactccgcggaggtccaggaggcccaggaggtcctgggggacccatgggtcgcatgggaggccgtggaggagatagaggaggctttcctccaagaggaccccggggttcccgagggaacccctccggaggaggaaacgtccagcaccgagctggagactggcagtgtcccaatccgggttgtggaaaccagaacttcgcctggagaacagagtgcaaccagtgtaaggccccaaagcctgaaggcttcctcccgccacccttcccgcccccgggtggtgatcgtggcagaggtggccctggtggcatgcggggaggaagaggtggcctcatggatcgtggtggtcccggtggaatgttcagaggtggccgtggtggagacagaggtggcttccgtggtggccggggcatggaccgaggtggctttggtggaggaagacgaggtggccctggagggccccctggacctttgatggaacagatgggaggaagaagaggaggacgtggaggacctggaaaannnnnnnnnnnnnnnnnncgtcaggagcgcagagatcggccctactagatgcagagaccccgcagagctgcattgactaccagatttattttttaaaccagaaaatgttttaaatttataattccatatttataatgttggccacaacattatgattattccttgtctgtactttagtatttttcaccatttgtgaagaaacattaaaacaagttaaatggtagtgtgcggagtttttttttccttcttttaaaaatggttgtttaactaagactttaacaatgggaaccccttgtgnnnnnnnnnnnnnnnnntgtggagaaccaagagggcctctaactgtaacaatgttcatggttgtgatgtttttttt

SEQ ID NO: 18075 - DNA, 693 bp, Macaca Fascicularis
ccacttgggaccaggatcacgacctccgcagggacaagaactgcgccaagagcctctctggaggctggtggtttggcacctgcagccattccaacctcaatggccagtacttccgctccatcccacagcagcggcaggagcttaagaaaggaatcttctggaagacttggcggggccgctactacccgctgcaggccaccaccatgttgatccagcccacggcggcagaggcagcctcctagcctcctggttgggcctggtcccaggcccacgaaggacggtgactcttggctctgcccgaggatgtggccactccctgcccgggcaggggctccgagcaggggccatctggaagcttgtggacggagaagaagaccatggctggagaagccccctttctgagtgcaggggggctacatgcattgcctcctgagatcgaggctacaggatatgctcagactctggaggcgtggaccaaggggcatggagcttcactccttgctggctggggagctggggactcagagggactacttgaggccggccaggctggcctcagtggcggactcagtcacattgactgactgggggaccagggctcacgtgagtcaagaacgccctcctggtgcgggtgctgttgtgtgtaggtcccctggggacacaagtaggcaccagtcgtgtctggcggagctc

SEQ ID NO: 18076 - DNA, 772 bp, Macaca Fascicularis
  misc_feature (1)...(772): n = A,T,C or G
tttaaaaaantnnnannnnnnaagnnnnntgtatgattgtgaccttaacaaaatgcaaagttgtacgctgtaaaggtactcagctaaattctctccaaatctgatttatatgaatttcttagactgaatagagtactttcaactataccttcctttggaacataccttttaaaaaatgttccctttaaatcctgttattctaatatgtaactctgctcccaacaaacaggtctcctcattgttcctggtatttgacaacttatcccaacttcgaatctcattgcttcctttgctggcagcctccacctttccccgaatcagttggcctaatccaaaccttgaaagcctggcttaagtcctactatcagtgatggtcccctctaaaacatgattttatatttggctgagtgttaaaattcacaagatgagcctttttttcccagatggagaatgcttcaactcagtctagattttgtttgttttaaggaagctctannnnnnnnnnnnnnnctttttgtaccagtaatccataaactggttgttctaannnnnnnnnnnnnnnnnnnnnnnnnnnnngtttttgttttttttttaactgcctatactattaaatcctttaatttatnnnnnnnnnnnnnnngttaaattagtnnnnnnnnnnnnnnnnnngtgggtgattaatttggtatggatttgtcagttttgtgtggagtttaagaaatacaacagccataaactctgcatttcaaannnnnngnatattgaaaataaa

SEQ ID NO: 18077 - DNA, 858 bp, Macaca Fascicularis
  misc_feature (1)...(858): n = A,T,C or G
cagaccaaatgcttgtttctttttcttggaatactttaattcggatcctttgggtttggannnnnnnnnnnnnnnnnnnnnnnnnnnnnncaacaggtttcagtgatgaggaggacaacactgcctttcaaacattttactgatctgttagattttaagaactcttgaattgtgtggtatctaataaaagggaaggtaagatggataatcactttctgatttgggttctgcattggagactcggtttttatgagatacatcttttatgccatgtatagatcctcccctgttatttttggtttatttttatttttatacattctttctttgactcctcttctgcctgcttttggggataggttttttgtttgtttatttgcttcctctgttttgttttaagcatcattttcttaggtgggggaggcagaggtatgagggaaagagagtctgagaattaaagattttagtataagcaattnnnnnnnnnnnnnnnnnnnnnnnnnnnnnnnnnnnnaatttgacaatttgtaattcttnnnnnnnnnnnnnnnnnnnnnnnnnnnnnnnnnnnnnnnnnnnnnnnnnnnnnnnnnnnnnnnnnnnncagtgaatgtatgatgactatttgggaggatacatttatatacccagaggcccccactaataactggtactatggttacttccttgtgtacatttctcttaaaagtgatattatatctgtttgtatgagaaacccaataaccaataaaatgaccgcatattcctgactaaacatagtaaggaaaatgcacactttgtttttacttttccgtttcattctaaaggtagttaagatgaaatttatatgaaagcatt

SEQ ID NO: 18078 - DNA, 1090 bp, Macaca Fascicularis
  misc_feature (1)...(1090): n = A,T,C or G
aggatggtgccgaaaccagtnncgccctggagaagtaccaggaggcctgcgagaatggacgcggggccatcctgctgtcagtggcccggggcaaagtgtctgagggaatcgacttcggcacccggcgggagcataccctctctctcccactcagacacagcatcctggggcgtgtgaggctgtccctgtcccaccagccacacttgtaactcccctcgacccccctcctctgcccaccagtgcaccactacgggcgggccgtcatcatgtttggcgtcccctacgtctacacacagagtcgcattctcaaggcacggctggaatacctgcgggaccagttccagattcgtgagaatgactttctcaccnnnnatgccatgcgccatgcggcccagtgtgtgggtcgggccatccggggcaagacggactacggcctcatggtctttgccgacaagcggtttgcccgtggggacaagcgggggaaactgccccgctggatccaggagcacctcacagatgccaacctcaacctgactgtggatgagggtgtccaggtggccaagtacttcctgcggcagatggcacagcccttccaccgggaggatcagctgggcctgtccttgctcagcctggagcagctggaatcagaggagacgctgcagannnnnnnnnnnnnnnntcagcagctctgagcgggatgggcagggccataaatgattcctggtgactcctgagtcttgcctggccctgggtcccagcagctctgaggccgtagcgggggtggtgctggaaggtcttataaactcaggtgacattcctcactgtcacatccacggcctttaatcgcagaagagggcagggggcacctaagagatgatagaccccccccgtcccccaccagctgaggccaacacaggtcactggatattagcggggactcaggtcctgggtgctggtgctgagtgtccgaggggccttgtccaggtgccagctggggaactggagacaggcacaggggatggttggaggggagggacaggtgctgcgtccagcctggcagccaaccgtctacccatctcacctctacccc

SEQ ID NO: 18079 - DNA, 692 bp, Macaca Fascicularis
  misc_feature (1)...(692): n = A,T,C or G
ttatcccagtggctcaaccactttttttcncttcccctnnnnnnngtgaattcccagcttgataactcttccatggtgggggcagggggaggcagagcccagactcttggaacgggtgtttcccctggggattctgnnnnnnnnnnnntggaggcttctcaagtcnnnnnnnnnnnnnnnnnnnnnnnnnntacattccnnnnnnnnnnnnnnnnnnnnnnnnnnnnnnnnnnnnnnnnnnnnnnnnnnnnnnnnnnnnnnnnctgagagtgctacccttctcttacaaccttgcagccaacacccctgcccggcccctgagcnnnnnnnnnnnnnccatgctctttcaggccctgcacagagtacgcattcgttaattcttggtaaaggaatgactcagtgaatgactggctatgcatggacctctgggcagggagacatgggtcttctctggctgagaggggaaggctaaggcatggctgagactcaagnnnnnnnnnnnnnnnnnnnnnnnnnnnnnnnnnnnnngtcacccctgcaccctcctgtgttctgnnnnnnnnnnnnnnngcacagccttccatgccctgatccccaccccaagcttttccacggggcctctgccaggatctaagcccacgagcacagggactggctatcccaagacctggcagacgtggctgctcaataaa

SEQ ID NO: 18080 - DNA, 881 bp, Macaca Fascicularis
  misc_feature (1)...(881): n = A,T,C or G
gatgacctgatcaggaaagttgtagaagtcnnnaagccaggaaaatttgtgaccaccttgtttgttaatnnnnnnnctaaatgtcgcacagtgcttgcttcgcctcagaagattgaaggttttaagcgtcttgattgccagannnnnnnnnnnnnngattacaattttgtttttaccagttttgctaagaagcagcaacaacagcagagttgattaagaaaaatgaagaaaaaacgcaaaaagagaacacatgtagaaggtggtggatgctttctagatgtcgatgctgggggcagtgctnnnnnnnnnnnnnnnnnnnnnnnnncagaaagccctagatgtaatgatagtgtaatcattttgaattgtatgcattattatatcaaggagttagatnnnnnnnnnnnnngctctcttctgtgtttaggtattctctgccactcttgctgtgaaattgaagtgcatgtagaaaaaaccttttactatatgaaactttacaacacttgtgaaagcaactcaatttggtttnnnnnnnnnntaatatttctccaagtatcatccaaaattccccacagacaaggctttcgtcctcattaggtgttggcctcagcctaaccctctgggactgttctannnnnnnnnnnnnnnnnnnnnnnatccagttacctccactttctagaacatattctttactaatgttattgaaaccaatttctacttcatactgatgttttttgaaacagcaattaaagtttttcttctatgggttgagtccttaagaaaatgattccagttactcattttgcatatttactattttaacattattggaccctgcatttatagtcctttgatttcttccctctccctggtgtctcccc

SEQ ID NO: 18081 - DNA, 746 bp, Macaca Fascicularis
  misc_feature (1)...(746): n = A,T,C or G
ttgctgccacaccctgtggnnnntgatgtgtcccttgatgggtgctgccctcnnnnnnnnnnnnctgacaagtgtcaannnnnnnnnnnnnnnttatgccctgggccaaaaccaatgctaatgaccttatctgcttcctgtttcttcccatacttgcatacaccactgcaaannnnnnnnnnnnnnnnnnnnnnnnnnnnnnnnnnnnnnnnnnnnnnnnnnnnnnnnnnnnnnnnnnnnnnnnnnntgtgcccattcctaatattttcttctgacaaattaatgtataaattgaggtgaaattcagttataaaatcaaggnnnnnnnnnnnnnnnnatatatttctatgtgtatgcaagtacaagtatataatatgtcatctggcacattcattttctcagctggagaaaatttgaaaatgtccttatgcttttagagttnnnnnnnnnnnnnnnntatatttgctaggnnnnnnnnnnnnnnnnnnnnnntgtcaacttaaaaaaaaaaaatnnnnnnnnnnnnnnnnaccaaactctagcaagatgcaannnnnnnnnnnnnnnnnnnngtctccagttggttatccgaatagtgttgccaattccaccaagacagtgctgagattggaaaagggcacgtatttggattgccttacttctcttgccttaaatatatcccaaactcaaaaagggcttgaggggaatttcattaaatggaataataagatgccacttgcagctaa

SEQ ID NO: 18082 - DNA, 720 bp, Macaca Fascicularis
  misc_feature (1)...(720): n = A,T,C or G
gccgggcaccccggtnnnnacaggaagcgtcccgtcgccgtcgggctcagtgccaggagccgccgctccttttagaccgctgtttaacgactttggaccgccttccatgggctacgtgcnnnnnnnnnnnnnnnncggcgcccagggctcccagagcacctacacggacctgctgtcagtcatagaggagatgggcaaagagatccggcccacannnnnnnnnngcaagagcgccatggagnnnnnnnnnnnnnnnnnnnnnnntgctcgggccctagtcagagagtgcctggcagagnnnnnnnnnnnnnnnnnnnnnnnnnnnnnnnnnnnnnnnnnnnnnnnnnnnnnnnnnnnccggccacnnnnnnnnnnnnnnnnnnnnnnnnnnnnnnnnnnnnnnnnnnctaaccatcctgggcttcctgtcctgtgtcccttggtgggtcccctccaggaaccaaggagcggctctccaggtggcagcactaaggacatccccccacaacaagagttagcagcgaggtccccatgagtcccacccatgacctgccaacagtgttgcccaccggaactttctgtggtccccaccgctcagcccttcccagcccttctcccactttgtcccgagcctccttctcccccagcaggggctcaggcctggcacctcactgccttgtgtcctgagccatagtgactcttttatctgtgtgtcttttg

SEQ ID NO: 18083 - DNA, 567 bp, Macaca Fascicularis
  misc_feature (1)...(567): n = A,T,C or G
tgcatgctacgaatgcgggaannnnnnnnnnnagcactcacacctnnnnnnnnnnnnnnnnnnnnncactggggagaaaccctatgtgtgtggtgaatgtgggcacgccttcagtgcacgccggtctctgatccagcatgagagaatccacacgggtgaaaagcccttccagtgcacagaatgtggcaaagccttcagcctaaaagcaactctgattgtgcacctgaggacccacacnnnnnnnnnnnnntatgagtgcaatagctgtgggaaggccttcagccagtactcnnnnnnnnnnnnnnnccagcgaatccacacaggcgagaagccctacgagtgcggggagtgtggnnnnnnnnnnnnnnnnnnnnnnnnnntaatccagcaccagaaagtgcacagaaagttgtgacccatggctgacacaagaatccattctcacagaaactgcacgtggaaccacaagcagccttcagcccaagagaagtttctgttaactctataggaagcctttctttggtgattcagtgtcacaaaataactcaaaaaagaagcacttagcat

SEQ ID NO: 18084 - DNA, 721 bp, Macaca Fascicularis
  misc_feature (1)...(721): n = A,T,C or G
tcgagcccatgaagnnnaagatgcagggtaccgcatgtacaggaaaagccaaacaacagggttcccttctctaattacaattttttcagcaccaaattacttagatgtatacaataacaaagctgcagtattgaagtatgagaacaatgttatgaatatcaggcaattcaactgttctcctcatccatactggcttccaaatttcatggatgtttttacttggtccctgccttttgttggggaaaaagtgactgagannnnnnnnnnnnnnntcaacatctgctctgatgatgaactagggtcagaagaagatggatttgatggnnnnnnnnnnnnnnnccggaaggaggtgataaggaacaagatccgagcaataggcaaaatggccagagtgttctcagtgctcagagaagagagtgagagtgtgctgacgctgaaaggcttgaccccgactggcatgctccccagcggagtactttctggagggaagcaaaccctacaaagcgctactgttgaggctattgagnnnnnnnnagctnnnnnnnnnnnnnnnnnnnnnnntaagatcactannnnnnnnnnnnnnnnnnnnnnnnnccgaattaatgagaggatgccgcctcgcagagatgccatgccctctgacgccaaccttaactccatcaacaaggctctcacctcagagactaacggcacggacagcaatggcnnnnatagcagc

SEQ ID NO: 18085 - DNA, 703 bp, Macaca Fascicularis
  misc_feature (1)...(703): n = A,T,C or G
tccatgagcattggatattgaaaagaaaaccgaaacaaaaccagacccagccctacactttggtttgtcatggtgtcagcgcagcagcctacaactaagttcctnnnnnnnnnnnnnnnnnnnnnnnnnnnnnnnnnnnnnnnnnnnnntttactcgatggtgaaattggttgctcttgtattttatgaaaaaaatgatttttttaaccttcatacatagaagcaaaaatactttaactgctgtaaaccttcaaaagttaatagaagtgagatcatactggtttgtttcttattttgattggagaaaaattaaatnnnnnnnnnnnnnnnnnnnnnnnnnacatggcattctcagcttagactgcataagaagaaatatatgtggtgaaatgttggaaccatttctctcttggtctctgtttaatgttgaaagggtgagctaataggaggcactttcaacttctctccctcacgctaccccgtcccctccagactggcagtttcaaggatgcaaattgcattgcaaaatcaaactgactcatgaagcatttgggccagtgcactgtttacttccatctgtttgcagacacatttgtgcccggcgtttgggagccctttgtatcagtgttctgacgggggtccctataaccttaacctactcgaaaccagtttgggatggatatgatggggcttctgtgctatg

SEQ ID NO: 18086 - DNA, 774 bp, Macaca Fascicularis
  misc_feature (1)...(774): n = A,T,C or G
cgagtnnnnnnnnnngtataaagannnnnnnnnnnnnnnnnnnnnnnnnnntagcannnnnnnnnnnnnnnnnnnnnnnnnnnnnnnnnnnnnnnnnnnnnnnnnnnnntttgtattaaagcgcatgctgcttttcttgcactgtttccctttcgcaggaacatgttggtgtttgctattgaattggcnnnnnnnnnnnnnnnnnnnnnnnnnntctcttcgaaggctgctttgcagtttgtatttacactacagattggtgaatttgccaatgtcctcactgtgattatgtgtatattgctgtttaaattttgtatatgtgtataaaaggaaaaaccttcacctagagattatttctgaaaaatgtattgtaaaaataattttgtggcatttctagtcccttttttgaatgaaccaattatactttatttggtctcctatgtagcatatcagaaaacacgacaaaactgttaccatgaacaaannnnnnnnnnnnnnnncttactatttaagaggccaacttctggaaggaggaaatatagagatgacgttttcaccnnnnnnnnnnnnnnntattgaatgactaattcagtccctaaagttctgtgaaaacacaaaagtctaatgatttgagtgagnnnnnnnnnnnnnnnnnnnnnnnnnnnnnnnnnnnnnnnnnnnnnnnnnnnnnnntgatgattggaaaaggtttgggttatttggaagtctggctaaaaattcttttgggtgacatgtgatccnnnaatggcataa

SEQ ID NO: 18087 - DNA, 724 bp, Macaca Fascicularis
  misc_feature (1)...(724): n = A,T,C or G
gtgacttcannntcagaaccagctgaaacacatgtctgtnnntcaatcaagcaagctgtggattttntgagcaatgaggggcacatctattctactgtggatgatgaccattttaaatccacagatgcagaataactggatctaattgggtacctgagatattttacagctggacctagtttcaaaatctattgtctccggctctgcatatgtttggccacgtggcttctaggaagtaggtttcatctatctaaaggtctcctctgacatccttttgaaacttactgctcttctgttttgttttgttttgtttgaagctcagagggagatgggcaattgacagggatgcaatccagggtgggatttcttgaggaagttacaaataagcttgttaccacagcaagataggtggaattggaaggatgctaccaggagagtacttacatagtgctcgggagtttctcttcttaaaatgtttnnnnnnnnnnnnnnnnnnngaccagggccttgtaggcagagccctagctgagannnnnnnnnnnctctgcctgtttttgtttcccactttggttgtgtggcattannnnnnnnnnnnnnntttcctgcttgtcatgactgcttgacacacttgtcatgacgtgtgtttctgtgaacatgaagttctgcggtggtggcctccaggggcagaggaaaggaagaagtgttactgcattttgtacaaaat

SEQ ID NO: 18088 - DNA, 1074 bp, Macaca Fascicularis
  misc_feature (1)...(1074): n = A,T,C or G
caaattgactnannnncgatcactgctggatgggccactggaagtcagactgccccganntaaggacggtcgctgcgnnnccacgtgacaacnnnnctccaggtattggaggcnnnnnnnnnnnnnnnnacaccgatgaagattgaagaggcccagactcggggacccctcgcactctcactgagcccagggttatgctccaggtatcagctccctgtgtcctccacttcatccaggaccacatgaaagaagtctccnnnnnnnnnnnnnnncagatgctgctccacccctatacccgagttccgacctccgaaaaaccccacgatgacccataccagcaggaagcagccagatgaacacgtcgcctcactttcttattagaaagaggtcggaatgttaggcaggaatctagannnnnnnnnnnnnnnttacccggtgtagcaggccttttgttaaagactcccttcacccttgtacacacccgcagacttacatgcgtcagagttccggctgggcagtcacactcccccatgacctgcagctcacctgcattccacaagttcgtaaacagcaatttcggttaacagtttccaaagaccccttcctcatgacccttactcaactcctgccctagtagtttcaagagccccccaggccctgcttgcacaaccagcttccctacctctcaggctataaaaagcccctaccctcctccctcagcgtgacttcctcggcccgcacctttggaccgaggaacctcgcctgcgagtcctagtaaaggctattctcactgccatttgccttgtgtcttcgttcccggtttggctccagcctcagtttacctttacaaagacaaataaagacaactaagtagaannnnnnnnnnnnnnnnnnnnnnnnnnagacagggttcatctgtgtgccatgacttaaaaaatataattatgggtaacaaagtctgtttgacacaggtagtctataatgatactattacagtcttatcctttaccaccactgttttaaagagattccactatatttttaaattcnnnnnnnnnnnnnaaagctttaaaa

SEQ ID NO: 18089 - DNA, 782 bp, Macaca Fascicularis
  misc_feature (1)...(782): n = A,T,C or G
cagagcagtgnnnnnnnnnnnnnnnnnnnnnnnnnnnnngcaccgcacttcctgtctggatcatctggnnctctccagcttctcttctgctgagggaagatggggcttcntnnnagacttgggggtgggacaggtctgccaggagctcacactggggcctggcaactcctgcagatttctcctggggccttttcaggcctggggcccggactccagagcctgcacctgcagaagaaccagcttcgggccctgcctgccctgcccagcctcagccagctggagctcatcgacctcagcagcaatcccttccnnnnnnnnnnnnnnnnnnnnncactgcacaggtggggaaggacaggggtcgtgtctgagcacggagcaggctggtcctgcctcgacccagcccggtggctcttactctcgccaggaacgggctccgacgagatcttcttggcgccctgagggtcgtcctccagcaggggcttcttggacccctgtctgaggggtcgcgtcttggtgggcgggattcttttccctttgaataaaaatggattcaaacccagcattagggttgtatttaggtgaaggctttacggaccacgtctcacccagcggtcaggcagcgtggcagagggaaaacgtgccaagcctggggacagaaagcnntggactccaagtctgacacctcttacaggctgtgtgccatgagctcagattctctccaatgggaagtaataccaccacctccctcaaaccaagccccaggcagtcgtggttgtagctgc

SEQ ID NO: 18090 - DNA, 794 bp, Macaca Fascicularis
  misc_feature (1)...(794): n = A,T,C or G
gaaatgaactgnnnnctgggcatgnngctcacgcctgtatnnnnnnnnnnnnnnnnnnnnnnnnnnnnnnnnnnnnnnnnnnnnnngagtcaaaaccagcctggccaacatgtgaaaccccatctctaccaaaaatacaaaaattagccaggcatggtggtggacacctgtaatcccagctactcgggtggctgaagcaggagaatcgcttgagcccgggaggtggagtggttacaatgagccaaaatcataacacagcactccagcctgagtgacacagtgagactgtggctccaaaaaaaaagaaaggaaaatgaaactagaagagatttctaaaagtctgaggtatatttgctagatttctaaagaatgtgttctaaaacagnnnnnnnnnnnnnnnnnnnnnnnnnnnnnnnnnnngttctaattcctcattagtaataagtaaaatgtttattgttgtagctctggtatataacccattcctcttaaaatataagnnnnnnnnnnnnnnnnnnnnnnnncnnnnnnnnnnnnnnnnnnnnnnnnnnggaagctgttgctttctttgaggtaatttttttccctttgctccctatnnnnnnnnnnnnnnnnttcataaataattttgcttgccaaaggaagaaaaagtgtttttcataaactcattatccagaactgtttatagctgttggaaggactaggtcttccctagccgcccccccgtgtgcaagggcagtgaagacttgattgtacaaaatacctgttgtaaatattgtgctgtaacactgcaa

SEQ ID NO: 18091 - DNA, 700 bp, Macaca Fascicularis
  misc_feature (1)...(700): n = A,T,C or G
gcagaataccagttgcgaatttgtgtcccaaccaaattacgaggtctccagattgtaacagtgaagaacctgacgaggactcaggccttcacggtgtgcacctggagtcaggagcgcgcttgtggattcnnnnnnnnnnnncatgtggaagaatggcattcagtgagctgnnnnnnnnnnnnnnnnnaagaaaatgnnnnnnnnnnnnnnnnnnnnnnnnnnnnnnnnnnnnnnnnnnnnnnaaaagatgtaactgaactgcagatccttggtgaaatatctttcaacaaatctctatatgagggactgaannnnnnnnnnnnnnnnnnnnnnnnnnnnnnnnnnnnnnnnnnnnnnnnnnnnnnnnnnnnnnnnnnnnnnntcattaaaggcagcattggtggacttctggtgttgattgtgattctggtcatcctgttnnnnnnnggcttttttaaaagaaaatatcnnnnnnnnaacttggagaacannnnnnnnnnnnnnnnnnnnnnnnngactctgctcgannnnnnnnnnnnnnnnnnnnnnnnnnnnnggagaggnnnnnnnnnnnnnnnnggacttnnnnnnnnnnnnnnnnnnnnnnnnnnnnnnnnnnnnnnnnnnnnnnnnnnnnnnnnnnnnnnnnnnnnnnnnnncagtttttaaccacgcattgtccccaaagcgtctgtgcatt

SEQ ID NO: 18092 - DNA, 824 bp, Macaca Fascicularis
  misc_feature (1)...(824): n = A,T,C or G
gcaccnnnnnnnnnnnnnnnnnnnnnggggnnnngctgggctgcctctaccttgcgttgctttcctggcnnnnnnnacannnnnnnnnnngtgacaaccatgagtggaaaaagctgattatggttcagcactggcttgagacagtatgcgagaaaattcaaaacgactgnnnnnnnnnnnnnnnnnactggacaatacatggactatggnntgataaaagtgaaggatgtaatagatcgtggcccttcaatttagaagagattnnnnnnnnnnnnnnnnnaatgaaggcatactggcctgatgtaattcactcgtttcccaatcgcagnnnnnnnnnnnnnnnnnnnnnnnnnnngcatgggacctgtgccgcccaggtggacgcgctcaactcccagaagaagtactttggcagaagcctggaactctacagggagctggacctcaacagtgtgctcctaaaannnnnnnnnnnnnnntccatcaattactaccaagttgcagattttaaagatgccctcgccagagtatatggagtgatacccaaaatccagtgccttccgccaagccaggatgaagaagtacnnnnnnnnnnnnnnnnngaactgtgcctcactaagcaagaccagcagctgcannnnnnnnnnnnnnnnnnnnnnnnnnnnnnnnnnnnnnnnnnnnnnnnnnnnnnnnatggggacactgagagccggggtctgagggtctgtgaagatggcccagtcttctatcccccacctaaaaagataaagcactgatgcncacgtttggaaatattctgttttaaaaagcaagagaaatcacaa

SEQ ID NO: 18093 - DNA, 800 bp, Macaca Fascicularis
  misc_feature (1)...(800): n = A,T,C or G
cctgaggatgcagaggaagaggctgaggccaaaaataagctgagccccatggacagaggcctgggcgtcaatgccgccttccccgagggtttccacccacgacgttccagccagggtgcaacacagatgcccctctactcctcgcctgtagtcaagaaccccttcatgtcagccanngttggcacccgacagcatgctcaagagcctgccacctgtgcacatcgtggcgtgcgcgctggaccccatgctggacgactcggtcatgttcgcgcggcgactgcgcaacctgggccagccggtgacgctgcgcgtggtggaagacctgccacacggcttcctgaccctggcggcgctatgccgcgagacgcgccaggccgcggagctgtgcgtggagcgcatccgccttgtcctcactccgcctgccgcgcccgcgcccgcgcccgcgcccgccccacctctggtctgagccgcccgccggatccgggctgcgcggggagacgggggctgcggggggcgacactaaaagcctgctgttcccatctgcgccggcctccgtcatgaatgcgctccgggccgggcgggtgggggcgcgggctgtgccttacttaagtcgggggtggcaagggggcggggcgggggcccgaaagcagagacccccgccacggtgagggggacgcgcacacacaccggtcaccgagacnnnnngacctgcacaccaccgctaccttctgctggtgctgtgaccgccgcagggacggggactggccctcccttgcaggtcggtttgtctgtctgttaaa

SEQ ID NO: 18094 - DNA, 287 bp, Macaca Fascicularis
tgtgcccccccgcaatgccaccacaaggatcttacccaaatatgtgattaagatttcggaagagaggccaaacaccgctgccaccccctctgttcccctatgggtgcttgtcactgagtgacactcacggcagaggcaagggtgttgcacccccccctgtctgtgcacattccctcccgctctccagagagtgcctccaccaccccacagaggagggatcttcactgagttttcttgggctctaggtcttggagaaagttgtgaggggtgtatattttttaaatagg

SEQ ID NO: 18095 - DNA, 669 bp, Macaca Fascicularis
  misc_feature (1)...(669): n = A,T,C or G
ctactatgaggacctgctgngagaccaagccttcttatctcaactctggaaagagtatgccaaaggagacagccgatacatcctggctgacaacttcacagtgtgcatggaaaccatcacagcttgcttgtggggaccactcagcctgtgggtggtgatcgcctttctccgccagcatcctctccgcttcgttctacagcttgtggtctctgtgggccagatctatggggatgtgctctacttcctgacggagcaccgtgacggattccagcacggggagctgggccaccctctctacttctggttttactttgtcttcatgaatgccctgtggctggtgctgcctggagtccttgtgcttgatgctgtgaagcacctcactcatgcccagagcatgctggatgccaaggccacaaaagccaagagcaagaagaactgaggagtggtggaccgggctcgaacactggccgaggaggagctctccgcctgccagaagagtctagtcctgctcccacagtttggagggacaaagttaattgatctttcacactcaggctcatgggtgggcacaagaaggggaataaaggggctgtttgaaggcactgctgggagccattaggacacagatacaagagaagccaggaggtctatgatggtgacaatttaaat

SEQ ID NO: 18096 - DNA, 742 bp, Macaca Fascicularis
ttcatatattaagatggggaagaatctattgaggatttctaaaaggaggtcaaaatttcctaattctggtaaatatgccactacagcccggaactcctttattgtacttatcatttttactatatgttttgttccctatcatgcctttcgattcatctacatttcttcacagctaaatgtatcgtcttgctactggaaagaaattgttcacaaaaccaatgagatcatgctggttctctcatctttcaatagttgcttagatccagtcatgtatttcctgatgtccagtaacattcgcaaaataatgtgccaacttctttttagacgatttcaaggtgaaccaagtaggagtgaaagcacttcagaatttaaaccaggatactccctgcatgatacatctgtggcagcaaaaatacactctagttctaaaagtacctgaggtaaacatactaaaatgaattatataatacagcctcttaattctttgaagaactaaaaaaattaggaaacaaagttctagcatttacaaaagtcagatctcaaagctgtgcttgtaactgtgatatttcatttgcttaactgtaaaccatttcaaggtactatcttttaaatctctatgtaaaatcttttcaaaatacatttttaagctaatactcttaacatagattatgaagttagtgaaatttatgactttaacagcaaaataattaaagtgccatcgtttctcagctcactaaagtag

SEQ ID NO: 18097 - DNA, 736 bp, Macaca Fascicularis
  misc_feature (1)...(736): n = A,T,C or G
tcnnnnnnnnnngtctatgnnnnnnnagtatnnncagatatcgagctgttgcttcttggagtagaattaaaggaattggggttccaaaatggacagcagtagaaattgttttgatttgggtggtctctgtggttctggctgtcccnnnnnnnnnnnnnnnnnnnnnnnnnnnnnnnnnnnnnnnnnnnnnnnnnnnnnnnnnntgcttgcttcatcctgttcagaagacagctttcatgcagttttacaagacagcaaaagattggtggctattcagtttctatttctgcttgccattggccatcactgcatttttttnnnnnnnnnnnnnnnnnnaaatgttgagaaagaaaagtggcatgcagattgctttaaatgatcacctaaagcagagacgggaagtggccaaaaccgtcttttgcctggtccttgtatttgccctctgctggcttccccttcacctcagcaggattctgaagctcactctttataatcagaatgatcccaatagatgtgaacttttgagctnnnnnnnnnnnnnnnnnnnnnnnnnnnnnnnnnnnnnnnnnnnnnnnnnnnnnnntaacccaattgctctgtatttggtgagcaaaagattcaaaaactgctttaagtcatgcttatgcnnnnnnnnnnnnnnnnnnnnagaaaaacagtccttggaggaaaagcagtcgtgcttaaagttcaaagctaatgatcacggatatgacaa

SEQ ID NO: 18098 - DNA, 700 bp, Macaca Fascicularis
  misc_feature (1)...(700): n = A,T,C or G
ggagagtcccattgataaaattcagctacttagataaatttggaatgggttgagacacctgcctgtttgtgttggtgcacagagattgacttgattcaaagagacaattcactccatccctatggcagaggaatgggttagccctagtgtagaatgtcattgtttttaaaactgttttatatcttaagagtgccttattaaagtatagatgtatgtcttaaaatgtgggtgataggaattttaaagatttatataatgcatcaaaagcctcagaatgagaaaaggttttctttaaattggtttatctgtatatctgaactcttgaaacttatagctaaaacactaggatttatctgcagtgttgcagagataattctgccttaaattgtctaaaacaaaaacaaaaccagccaacctatgttacacgtgagattaaaaccaatttttctcccattttttctccttttttcttttgctgcccacattgtgccattattttatgagccccagttttctgggcttagttttttaaaaaaatcaagtctaaacattgaatttaggaagcttttgttcttagataaaaagtcatatactttaaaaaaaaaaaaaaaactttttccaggaaaatatattgaaatcatgctgctgagcctctattttctctgacgtaatgcancntttagacttgatttttttaaaa

SEQ ID NO: 18099 - DNA, 707 bp, Macaca Fascicularis
  misc_feature (1)...(707): n = A,T,C or G
agctgctgcgcctggggcccaagagctccatgttgatagcccagcagactgacacgtctgaccccgagaagcgcggtctctgcctacctaaaggtgccatggcacagctcaaggacgaagctacagtcagcacgccactgctaggatgcactacagatgccctgatgaagaaggctttcagctcctcgtccttcaactccagcgccttcctcaccaggctnnncgcacacatgggtctactcaagagtgaagataaggtcaaggccattgccaacctgtacggacccctgatggcactgaaccacatggtgcagcaggactatttccccaaggcccttgcacccctgctgctggcattcataaccaagcccaacagcgccttggaatcctgctcctttgcccgccacagtctgctgcagacactctacaaggtctagactcaaagcctctcccatcccttggcctggaccagtgagctggggagggactcggagcaactgaggcacaacccacgccgttgccttgnnnnnnnnnnnnnnnnnnnnnnnnnnnnnnnnnnnnnnnnnnnnnnnnnnnnnnnnnnnnnatatgtgtgtaggtgtggtacgnnnnnnnnnnngtgcctcctgtcgggatttgggtttgaacctctctctgctggcctggctctgctctgttgtggggagttggcccccaggggaaaggac

SEQ ID NO: 18100 - DNA, 727 bp, Macaca Fascicularis
atgagccccagcacctggccctacctttctactttataattctgtatgtgattattttatgaatatgaagaaactttagtaaatgtacttgtttacacagttatgtgaatggattaggtaaacaaaaatgaggagacgtacaatgggggaagaagaaaaagtcctctgtaagatgtcacggtctgggttccagttctccctcagctgtactttggtttcaatgactggcaacttctaaaggggccagccttttgaactggacaaccttacaagtatatgagtattatttataggtagttgtttacatgtgagtcgggaccgaagagaactggatccatgtgaagtcctgtgtgtgactggtccctacctgggcagtctcatttgcacctgtagcccctatctatggacaggctgggactgaggcagacgggttagatcacatacagcaaatagggtctatgtcatatcccatttccagtgaatgtagtgaacttgagccctgtttaggttcaagagagagaggacaaaatctgtctcccacgtctgccatggcatcaagggggaagaatagatggtgcttgggagttgtatgaaatggttgccatctcaggagtagatggcccagctcacttctggtgatctgtcaccctgagccactgagttgcattttagggtacagattccctacttgaggagcttggcccgtctgtaagcatctgactcatct

SEQ ID NO: 18101 - DNA, 751 bp, Macaca Fascicularis
  misc_feature (1)...(751): n = A,T,C or G
taaagaggcaaggatctactgtcatttgtatacaatttcctgttaccttgaaaaaataaaaatgttaacaggaatgcagtgtgctcattctccctaaatagtaaatcccactgtatacaaaactgttctcttgttctgccttttaaaatgttcatgtagaaaattaatgaactataggaatagctctaggagaacaaatgtgctttctgtaaaaaggcagaccagggatgtaatgtttttactgtttcagaagcctaactttttacacagcagttacatttcacatttcacnnnnnnnnnnnnnnnnnnnnnnnnnnnnnnnnnnnnnnnnnnnnnnnnnnnntgtatggaaatacaagacagctaaagggctgtttggtagcatctcattttgcattctgattaattgccaagaaagggagatttcaaaattacaatatttcttgatggtatcttttcaattaatgtatctgtaaaagtttctttgtaannnnnnnnnnnnnnnnnnnnnnnnnnnnnnnnnnnnnnnnnnnnnnnnnnnnnnnnnnnnnnnnnnnnnnnagagtctggtaagcaaagcagtctgagaaagaaataggaaatgcagaaataggttttgtctggttgcatataatctttgctctttttaagctctgtgagctctgaaatatatttttgggttacttcagtgtgtttgacaagacagcttgatatttctatcaaacaaatgactttcatattgcaacaatct

SEQ ID NO: 18102 - DNA, 1489 bp, Macaca Fascicularis
  misc_feature (1)...(1489): n = A,T,C or G
tccggcnnnatgacatcatcntacagaatctggtggaattgctccagcttcctggtttagaggaagannnnnnnnnnnnnaaagagataggcctcaagactctnnnnnnnnnnnnnnnnnnnngttttttcattgctcagtcctatgtgctggtgaagaagtggagcgaagcccttgtcctgtatgatagagtcctgaaatatgcaaacgaagtaaattctgatgctggcgccttcaagaacagcctaaaggacctacctgacgtgcaagagctcatcactcaagtgcggtcagagaagtgctccctgcaggccgcggccatccttgatggaaacgatgctcnnnnnnnnnnnnnnnnnnnnnnccaagtcaaggacaataagcctctggttgaacggtttgagacattctgcctggacccttcccttgtcaccaagcaagccaaccttgtgcacttcccaccaggcttccagcccatcccttgcaagcctttgttctttgacctggccctcaaccatgtggctttcccaccccttgaggacaagttggaacagaagaccaagagtggcctcactggatacatcaagggcatctnnnnnnnnnnnnnnnaaccaggctcttcctcaggggtgggggagattctgactcttaatctgtattgtgagaaaatcccagcaagttccatgatattaaatccaggtctgcgttggcccggggcaagagtttaacatcttcggccctgcattcctacatctgtgtttgtacacattcttaagccgtctgttaggagagcaccctgtcgtcttccggtaaatgtgtgcggggtcatcctgtctcctaggcctcctgggagagggccgctgctgtctggcgccctgtgagctgtgattgcctttggtcagtgatgtgttcaggaggccacaccaggcacagatggggccttgaaacgctttgtcatgcttcttcactaccatggatttgaaatgaactcatccttgctgtgagcatccaggatcccttgaaaagtttatctatgactatgaaactggcaacgtcaccccagaattacggtcagccttattccccttcacctcccagtgaacgctaagaagtttcagacaagcagagagctctatttttagaagaaatatgttacactcagaaatgatgaaaccaaatcttatattaaaaggcaaagatgatggagactgtgcccatttcttatgtgctctccctcatatccagtccctgttctctcctcgggagcctggctgtgtgaacccagtgaggtcaagtgtaacctgacttaccagcagcataggtgtggctgatgccagatacagatgttagagggtactatttttcaggagttcccaatgtgtaattttttgatgccattacattttaatccccttctatactcccctttttttcttagtcatcccttttcacttctattataacatcaataatagaagtcacaaaaaca

SEQ ID NO: 18103 - DNA, 752 bp, Macaca Fascicularis
  misc_feature (1)...(752): n = A,T,C or G
tgattcagggagctaaaagacactttaagttatactggannnnnnnnnnnnnnnnnaaagccagatttatagtattccatctttaatatgtgggactaacagcagtgtagattgttaccttaatattttttgctgggaccatctacctgccttatactatacttaggaaaaagtattacatatggtttattttgaaacttcaagtattattgccttaatgtctcttaaccctgttacacgctgcttgtagacatgttaatatagtaatacttttatgatatattgagtttaaggactactctttttctgttttatcatgtatgcattattttgtatatgtacagggcaagtaggtatataatttgataaagttgcaatcgaaatattattaacagaagatgtaagaaatttctgcatggtctaaatctttgtgtactttatttgtaaattatttgccctggagttttagaaaatagtttctgaattttannnnnnntggattcatgcagccagctttgcaggttatcagagatcaaagattgtaataataatacattttgtaaattgtaagcaaagttatttttatattatatacggtctaattgttcatcctaattgttcttgttttcatctagtcagagattcagtaagtgccttggaacaatattgaattctcttagcttgtgtgtgtttctttaatatttgaactcaactgggattagaagactatcaaaatacatgtatgtttcagg

SEQ ID NO: 18104 - DNA, 711 bp, Macaca Fascicularis
  misc_feature (1)...(711): n = A,T,C or G
acagctgtgcagannttnnnnnnncgcgctgctgttgccgctgctgctccccgtgctgttgccccctacaaatacgnnnccagtgtccgcagccctcatcctgccatacagcctctgcaggcaccccagnnngcggtccatgtgcaggggcaggagccactgactgcctccatgctggctgcagcacccccccaggaacagaagcagatgctgggagaacgcttgttcccactcatccaaacaatgcattcaaatttannngggaagatcacaggaatgatgaaggagatagacatctctganntgctgcacatgttagagtcccccgagtctctccgctccaaggtagatgaagctgtagcagttnnacaggctcatcatgccaagaaagaagctgcccagaaggtgggcgctgttgctgctgctacctcttagacaaggaaaaaccgattcaaaagccaaataaccccttacggaattcagctcaaggtttgaagacttctagcttgtcctatggacctcaacaccaacgattacaaattgcaaatttaataggtcattttgtatcaaaaggtcaattatgaaacacctagnnnnnnnnnnnnnnnnnnnnnnnnnnnnnnnnnnnnnnnnnnnnnnnnnnnnnnnnnnnnnnnnnnnnnnnnnnattgtggnnnnnnatttttccccnnagaaacnnngttttatttg

SEQ ID NO: 18105 - DNA, 746 bp, Macaca Fascicularis
  misc_feature (1)...(746): n = A,T,C or G
cagttgaaaaatttttacaccttttttnttcacattttacataaataataatgctttgccagcagtacgtggtagccacaattgcacaatatattttcttaannnnnnnnnnnnnnnnnncatggaatatattctgcatttataaaactagtttttaagaagaaattttttttggcctatgaaattgttaaacctggaacatgacattgttaatcatgtaatgattcttaaatgctgtatggtttattatttaaatgggtaaagccatttacatgatatagaaagatatgcatatatctagaaggtatgtggcatttatttggataaaattctcaattcagagaaatcatctgatgtttctatagtcactttgccagctcaaaagaaaacaataccctatgtagttgtggaagtttatgctaatattgtgtaactgatattaaacctaaatgttctgcctaccctgttggtatagatattttgagcagactgtaaacaagaaaaaaaaaatcatgcattcttagcaaaattgcctagtatattaatttgctcaaaatacaatgtttgattttatgcactttgtcgctattaacatcctttttttatgtagatttcaataattgaataattttagaagcattattttaggaatatatagttgtcacagtaaatatcttgttttttctatgtacattgtacaaatttttcattccttttgctctttgtggttggatctaacactaact

SEQ ID NO: 18106 - DNA, 1162 bp, Macaca Fascicularis
  misc_feature (1)...(1162): n = A,T,C or G
acatcccagtgcccaccccgggacctggagaagccnnnnntgctgcctgtagagggggtgttctccgtccctggccgtnnncactgtgtgacaggtacgctagagcgtggcattttaaagaagnnngacgagtgtgagctnnnaggacacagcaagaacatccgcactgtggtgacaggcattgagatgttccacaagaacctggagagggccgaggccggagataacctcggggccctggttcgaggcttgaagcgggaggacttgcggcggggcctggtcatggtcaagccgggttccatcaagccccaccagaaggtggaggcccaggtttacatcctcagcaaggaggaaggtggccgccacaagccctttgtgtcccacttcatgcctatcatgttctccctgacttgggacatggcctgtcgggttatcctgcccccagagaaggagcttgccatgcccggggaggacctgaagttcaacctaatcttgcggcagccaatgatcttggagaaaggccagagtttcaccctgagagatggcaaccggactatcggcaccggtctagtcaccgacacgctggccatgactgaggaggagaagaacatcaagtggggttgagtgcagacctctgctcagcttcccttgcgtgtaaggcctgttctagctagggctccctcctgcttccagtgccnnnnnnnnnnnnnnnnnnnnnnnnnnnagagggcagctaggtggacatttctctggttnggaagggtcggcctgcctgactgnnnnnnnnnnnnnnnnnnnnnnnnnnnnnnnnnnnnnnnnnnnnnnnnnctttgtgtgaattggagaggataggagaggacaaaaagggtgttgaaccccagacagatggggagcttgtgagatcccagagcaattttaatggagaaatcaagtccagtgagcttagggattgcctagacacagtaggatactgttgaatannnnnnnnnnnnnnnnnnggaaannnnnnnnnnnnnnnnnnnnnnnnnnnnggcctcagctcaggtgccaaacccaccttgtttccttggaatactaagtgaatgtctagcgtccattcacgttctgtgggaatggggaccggacaggcatatctcagatgctctaggttgcnccaaaccac

SEQ ID NO: 18107 - DNA, 758 bp, Macaca Fascicularis
  misc_feature (1)...(758): n = A,T,C or G
gactcaacnnntggataccctaagcaaattctctcatgatnnnnntccagaagtttcctataactccatttnggccatgggcatggtgggcagtggtaccaataatgcccgtctgggaganntctgnnnnnctgggttaggcaatcatgccaaggacccaaacaacctcttcatggtgcgtttttttcannnnntgacacatttagggaagggtacccttaccctctgcnnnnnnnnnnnnnnnnnnnnnnnnnnnnnnnnnnnnnnnnnnnnnnnnnngctcactgtgctnnnnnnnnnnnnnnnnnnnnnnnncattattctaggcaaatcacactatgtattgtatgggctggtggctgccatgcagccccgaatgctggttacgtttgatgaggagctgcggccattgccagtgtctgtccgtgtgggccaggcagtggatgtggtgggccaggctggcaagccgaagaccatcacagggttccagacacatacaaccccagtgttgttggcccacggggaacgggcagaattggccactgaggagtttcttcctgttacccccattctggaaggttttgttatccttcggaagaaccccaattatgatctctaagtgaccaccaggggctataaaaagcagatgatgtatngcaaggccatgcatcctgctgtcaagggtggacacggctgcagacttctgggggaattgttgccgtctgctcttttgttactgagtgagataaggttgtcaa

SEQ ID NO: 18108 - DNA, 386 bp, Macaca Fascicularis
aaagatatgggagtatatgaaactagtgagaatttacaccaaacccaaaggccaattaccagattacacatctccagtggtacttctttactccaggaccacagtggaggatttttgcatgaagattcacaaaaatattatcaaagaatttaaatatgctctggtgtggggtgtgtgtgtgaaacacaatcttctgaaagtgggtaaagaccatatgttggaggaggaggatgtcattcaaattgtgaagaagagaaacttttctccttttccatatgccgggggaaccacaacagcgttttccatgatcaagcaccctaccccagttctttttggttttggcagtcactggatctggatacaggggagggagatggaggcaccca

SEQ ID NO: 18109 - DNA, 743 bp, Macaca Fascicularis
  misc_feature (1)...(743): n = A,T,C or G
ggcaaggattactctgtggaaggtatgagtgattctctgtnnncnnnnnnnnnnnnnnncgtgagtttgggcttgttttccagaggaagaggaaatctcggcgttactaccccacgcgcctggccatcaatctctcgtcaggtgtctctggagctgggggcactgtgcatcagccaggcttcattgtggtggaaaccaattaccgactgtatgcctacacggagtcggagctgcagattgccctcattgccctcttctctgagatgctctatcggttccccaacatggtggtggcgcaggtgacccgggagagtgtgcagcaggcaatcgccagtggcatcacagcccagcagataatccatttcctaaggacaagggcccacccagtgatgctcaaacagacacctgtgctgccccccaccatcacagaccagatccggctctgggagctggaaagggacagactccggttcactgagggtgtcctgtataaccagttcctgtcgcaagtggactttgagctgctgctggcccacgcgcgggagctgggcgtgctcgtgttcgagaactcggccaagcggctcatggtggtgaccccggccgggcacagcgacgtcaagcgcttttggaagcggcagaaacacagctcctgagagcgcgagacttggacctcggcgggcgggaccgggcggggcggggcctcagaactcaggtgttttttatttacgcgtcagggctttctg

SEQ ID NO: 18110 - DNA, 699 bp, Macaca Fascicularis
  misc_feature (1)...(699): n = A,T,C or G
acagtgtctnnnnnnnnnnnnnnnnngtctgtnnnnnggggtnnnnnnctgggagatagtgagccnnngaggtacaccctactgtgggatgacctgtgccgagctnnnnnaaagatgccccagggctaaccgcatggagcagcctcgaaactgtgacgatgaagtgtacgannnnnnnnnnnnnnnnnnnnnngaccgtccctatgagcgacccccctttnnnnnnnnnnnnnnnnnnnnnnnnnnnnnnnnnnnnnncaggaaggcctatgtgaacatgtcgctgtttgagaacttcacttnnnnnnnnnnnnnnnnnnnnnnnnnggaggcctgagctgccatccagccagaacctggctctgctggccggagcaaactctgctgtctaacctgtgaccagtctgacccttacagcctctgacttaagctgcctcaatgaatttttttaacttaagggagaaaaaaagggatctggggatggggtgggcttaggggaactgggtcctcatgctttgtaggtgtctcatagctatcctgggcatccttccttctagttcagctgccccacaggtgtgcttcccatcccactccttccccaacacaaacccccactccagctcctctgcttaagccagcactcataccactaacatgccctgttcagctactcccactcccggccttcatcagaaaaaa

SEQ ID NO: 18111 - DNA, 754 bp, Macaca Fascicularis
  misc_feature (1)...(754): n = A,T,C or G
gcgcatcgagatcgcgcacgccnnnnnnnnnnnnnnnnnnnnnnnnnnnntatggnnnnnnnnnnnnnnnatgaagtggaaaaaggagagcaaactgctcagcgnnnnnnnnnnnnnnnnnnnnnnnnnggaagaaaaaccggccgagtgaaggtgctggaaagggagggaggacgcgaggggaaaggcctgtggggagccgagagggtcggagagacccgggaaggaaggctctcgggtgggggagccaggagacctgctctccagcgcacgacaggcgaggcccagctctctcctggacgcccccgcccgcacagctcccggtgggtgctctgaggcctcactactcgagcccacccagcaccctgcgcgcccttccttcccgaggaactcgcctcagcctgatcaggcttcctggtgagaactgnnnnnnnnnnncacttgatgtttcctggaagcagagcaaaatgctcttgtccctgtcgcgtctcatttcgtccatgtcccccatgcacggttcaatggtagattcgctgtcccctcagcggaggccttgaagactccctgatcccagacctgtcgtctctcccaccccctccccaaagccactggaaggagcacatactacctagaagtaagaagaggagcctcagaagaaaacaaagttctattttattaattttctatgtgttgtgtttgtagtcttgtcttagctcgggacgtgaaatacttcgatgatgatgataataataat

SEQ ID NO: 18112 - DNA, 1302 bp, Macaca Fascicularis
  misc_feature (1)...(1302): n = A,T,C or G
gacgatacnntaaatactcttctnnnnnnnnnnnnnnnacctcgtagaggcgagccccatgttactcgtcgcaccccagactacttcctgtaatgaaattttaaacttgtacagtattgccatgaaccatatatcgacctaatggaaatgggaagagcaacagtaactccaaagtgtcagaaaatagttaacattcaaaaaacttnnnnnnnnnnnnnnnaaaagatgtgccatataaaaatacaaagcctcttgtcatcaacagccgtgaccactttagaatgaaccagttcattgcatggagaagcgannnnnnnnnnnnnnnnnnnnnnnnnnnncatagcgctatttgtagttacttttgctttctctgagagactgcagataataagatgtaaacattaacacctcgtgaatacaatttaacttccatttagctatagctttactcagcatgactgtagataaggatagcagcaaacaatcatcggagcttaatgaacatttttaaaaataagtaccaaggcctcccttctacttgtgagttttgaaatcgttctttnnnnnnnnnnnnnnnncgtttaatttaattatatgatttgtctgcactcagtttattccctactcaaatctcagccccatgttgttctttgttattgtcagaacctggtgagttgttttgaacagaaatgtttttttctcccttcctgtaagatgatgtgactgcacaagagcactgcagtgtttttcataataaacttgtgaactaagaactgagaaggtcaaattttaattgtatcaatgggcaagactggtgctgtttattaaaaaagttaaatcaattgagtaaattttagaatttgtagacttgtagataaaataaaaatcaagggcactacataacctctggtaactccttgacattcttcannnnnnnnnnnnnnnnnatttgtatttcacatattacagtttgtcacattgttggtgtgcactttgtgggttcttcctgcatattaacttgtttgtaagaaaggaaatctgtgctgcttcagtaagacttaattgtaaaaccatataacttgagatttaagtctttgggttttgttttaataaaacagcatgttttcaggtagagcttaacaaactaaatgatgtgtttacttagtgcagtttctggttatgaatattatattgctatgtatattatatggactctttaaaatgattgacagattggcaaattcttaaatctttgtacattgttgagtcatatgttcttagagttaaatttgtctccgataa

SEQ ID NO: 18113 - DNA, 741 bp, Macaca Fascicularis
  misc_feature (1)...(741): n = A,T,C or G
atgctgaaaacgaggagccnntgtgcccgctgccttcaccccctannnntgatagcgactcggacactgaagggcctgagaaggacacccgaagcagcttccggggccacacgcctcttgacctcacttgcagcaccaaggtgaagaccttgctgataaatgccgctcagaataccatggagccacccctgaccccgcccagccctgcagggccgggactgtcacttggtgatacagctctgcagaacctggagcagctgctagacgggccagaagcccagggcagctgggcagagctggcagagcgtctggggctgagcagcctggtggacacgtaccgacagacggcctcgcccagcggcagcctcctgcgcagctatgagctggctggcggagacatggcaggtctgctggaggccctgtctgatatgggcctagaggagggagtgaggctgctgaggggtccagagacccgagacaagctgcccagcacagaggtgaaggaagacagtgcatacgggagccagtcagtggagcaggaggcagagaagctgggcccaccccctgagccgccaggagggctctgccacgggcacccccagcctcaggtgcactgacttgctgcccgccaccaccccccttcctgcaccccctgtacagtgtccccacctatttcaaatcttatttaacaccccacacccacccctcagttgggacaaataaaggatctcatggaagggg

SEQ ID NO: 18114 - DNA, 687 bp, Macaca Fascicularis
  misc_feature (1)...(687): n = A,T,C or G
gtgtagagaaggctctgtgtgttaactggtggagagactgtttgtttataaatgtgtacagttttgttttcttgtaaggggagcattataggattaccttataccagttgtaacattttcattgtttttggttgttcctttttcttttttnnnnnnnnnnnnnnnnnnnnnnnnnnactgttaaattgcctttttttaaaaaaagatattttcttgaattatttagaacatgtaagcctggtatttttaatcaaacaaaatatttatgaaatgggttttctcttaattctggattcatcatggctttctgataccaattgtaatatttacaatattcaccagaacttagaattttgcaaatactggaattctgccagtgtttctttgataagccttnnnnnnnnnnnnnnnnnnnttaacattggcacccagaacctacatggaatgtatgtctggagtatttcaaactttacgttgaaacataatttccttggaaaacaaaccataagcctgaggaggtttttaattttatcnnnnnnnnnnnnnnntattagtttgtttttcactgtacattcctcattttacattcatttaacctgccgattatttaattttttttattgtaaagtagtttttagcatttgcttttatttttttactttgatgccttttcagacgtggcatgtc

SEQ ID NO: 18115 - DNA, 718 bp, Macaca Fascicularis
  misc_feature (1)...(718): n = A,T,C or G
aaaccttgtaattgannnnagctatgtacgtggacaagcttagactgaaatgctaggtatatgtgttggcnnnnnnnnnnnnnnnntcattgttaagctatgaaagtaaaactctgtatttaactggcaatgaggaaaaaaaaaatttgtagagaagtgttggtctgtatagttctttgtattaagtgggattcattgtaatgcctttgcatttattctattgcctcaactgttacttgaagatggcgtaatatataatttatcctgtggtatcagtgataaaaatgatacctttctgtaggaggggtttatcataatatgctnnnnnnnnnnnnnnnncacttccagaattgtgtttccttctgctgtgccattcatatatatatatatatatatccatatatatcttgaccagtcctggccatttgcccccccccccttgtctgtggaccataagcccgagtagtgacttcagagctgggtaacgtagaaattaaagtgaaaagatctttacgtggagaagtaatttgcatgcataataataggaaggtgttctttaggtatgnnnnnnnnnnnnnnnnnnnnnnnnnnnnnnnnnnnnnnnnnnnnnnnnntagtatagcaaattatgatgaatagctttaattgtatgtttaaaagtctcatatgttcacnnnnnnnnnnnnnnnnnngaatttaagcaattcttgaaatgtat

SEQ ID NO: 18116 - DNA, 741 bp, Macaca Fascicularis
  misc_feature (1)...(741): n = A,T,C or G
aaaaagcagaactcatctggtttcagcnnnnnnnnnnnnnnnggatgcaggtggtcaggccccgactggctttgtctttggccctgggcagggttaggatttcacttgcttnnnnnnnnnnnnnnnnnnnnnnttcccctaaaagtaggaagcaagagacttaactatgagggacattaggtgaatcctaagtctcaccagtccttgcattagtacattaaatttggatattttggaagcaaattcataggaccgtgactgatttctccaaagaaaaaaaccttgtccagcctcaccnnnnnnnnnnnnnnnnnnnnnnnnnnnnnnnnnnnnnnnnnnnnnnnnnnnnnnnnnnnnnnnnnnnnnnnnnnnnnnnnnnnnnnnnnnnnnnnnnnnnnnnnnnnnnnnnnnnnnnnnnnnnnnnnnnnnnnnnnnnnnnnnnnnnnnnnnnnnnnnnnnnnnnnnnnnnnnnnnnnnngcatctcaaaaaaaaaaaaccttgacgccattcccaatccccatcgtaggacatcacatttataaatctaggctttagtcttctgagctccaccaggctctgccccaccatattcctttgtcactacctctaaggttttttctccacttgaggatttggagttaaacgaactcaaaatatcttgtcattgtatatattcttgcccctgcttgaaaagaaggcaatgggaactctgtttataccctgttttaatgtttctgttt

SEQ ID NO: 18117 - DNA, 717 bp, Macaca Fascicularis
  misc_feature (1)...(717): n = A,T,C or G
tgtacattttcccatggttgtctacagaaagctaatggggaaaaaaggaacttttcgtgacttgggagactctcacccnnnnnnnnnnnnnnnnnnnnnnnnnnnnnnggagtatgaagggaatgtggaagacgacatgatgatcactttccagatatcacagacagatctttttggtaacccaatgatgtatgatctaaaggaaaatggtgataaaattccaattacaaatgaaaacaggaaggaatttgtcaatctttattctgactacattctcaataaatcagtagaaaaacagttcaaggcttttcggagaggttttcatnnnnnnnnnnatgaatctcccttaaagtacttattcagaccagaagaaattgaattgcttatatgtggaannnnnnnnnnagatttccaagcattagaagaaactacagaatatnnnnnnnnnnnnnnnnnnnnnnnnnnnnnnnnnnnnnnnttctgggaaatcgttcattcatttacagatgaacagaaaagactcttcttgcagtttacaacgggcacagacagagcacctgtgggaggactaggaaaattaaagatgattatagccaaaaatggcccagacacagaaaggttacctacatctcatacttgctttaatgtgcttttacttcnnnnnnnnnnnnnnnaagaaaaacttaaagagagattgttgaaggccatcacgtatgc

SEQ ID NO: 18118 - DNA, 736 bp, Macaca Fascicularis
  misc_feature (1)...(736): n = A,T,C or G
gacggatgagccagtggccgaggagcccttcnnnnncgccatggagctggatgacctacctaaggagcggctgaaggagctcannttccaggagacagcacgcttccagcctggggcgctagaggccccctaacccagacagacatccctgcaccctggggcctggacctgcctcctgcctgcccctctcccgccggactgttagaaaatggacactgtgccgagcccagaccttggcagaccagaccagggtggagcatgggcctggccacctctctcctttgctgaggcctccagctttaggcaggccaaggcctcctccccagccgcccttcccacaggacctcgggggctcaggtggccccagttcaatctcccactggtgctgctgcacccttaccttccccagtgtcccagtctctggcagttctagaatggaggggctctggctgccctgacctgctgaggggcaggggtggagggtggggggcgctgagtagggactcagggccaggcctgcccccctcatctcatttaaaccccaccctatcttccctgaaggaacattccttagtctcaagggctagcatccccgaggagccggactgggctgaatcccctccccgtcaaagctgtcacttcgagtgccctcgctgcttctgtgtgtggtgagcagaagtggagctggggggcgtggagagcccagcgcccctgccacctccctgacccatctaat

SEQ ID NO: 18119 - DNA, 670 bp, Macaca Fascicularis
  misc_feature (1)...(670): n = A,T,C or G
cattccagagtgnngaggccagggctgatggtcttaaatgcttgnnnnnnggtttggcatggtgagtgttggggctgacatttagaacttcaagtctcactcattatctggaatattgtgattctannngttcttccagaatgctgaattccttgttagcccatcagattgttaggagtagttctcatttggtctgccagaatactgggttattagttgacaacatagaatgtcagatttatggttgatttgtaacacaggcattgtagaatgtggagatactgatgaaatatgctagaaagttaaggggttnnnnnnnnnnnnnnnnnnaatcttgactttcatgattggtgattcaaagtgttgtgttcctggcnnnnnnnnnnnnnnnnnnggcttgtatcccaaatctgtcagcatttgagtttctagaatgtggatttgattcattttcctnnnnnnnnngatatcatagagcgggagatcataaggtccaacaagaatgcattccctgaatctgtgcttgcactgagggggcaaggaggtggggtgttcttcctgggacccccactaagaccttggtgtgaggatgtagagagaacntggtgggctttattcatgcctttggttggaagctaccagggctctatccccatccaggtcttgactc

SEQ ID NO: 18120 - DNA, 702 bp, Macaca Fascicularis
  misc_feature (1)...(702): n = A,T,C or G
gagacgaagtnnnnnnnnntggggttgcagcagnnntacgtgaannnnaannacaacgagaagaaccggaagctctttgaccttctggatgtccttgagttcaaccaggtggtgatctttgtgaagtctgtgcagcggtgcattgccttggcccagatactggtggagcagaacttnnnnnnnnnnnnnnnnnnnnnnnnnatgccccaggaggagaggctttctcggtatcagcagtttaaannnnnnnnnnnnnnnnnnnnnnnnnnnnnnnncctatttggccgaggcatggacatcgagcgggtgaacattgcttttaattatgacatgcctgaggattctgacacctacctacatcgggtggccagagcaggccggtttggcaccaagggcttggctatcacatttgtgtccgatgagannnnnnncaagatcctcaatgatgtgcaggatcgctttgaggtcaatattagtgagctgcctgatgagatagacatctcctcctacattgaacagacnnnnnnnnnnnnnnnnnnnnnnnnnaatgtgaccgtctgtccttcaggagaggacaccagggtgggggtgaaggagacactactgcccccacccctgacagcccccaccccatggcttccatcttttgcatcaccaccactcctgaacccccatttctgatttgtcagaattttttttaac

SEQ ID NO: 18121 - DNA, 765 bp, Macaca Fascicularis
  misc_feature (1)...(765): n = A,T,C or G
gccagatgggcgnnnnnnnnnnnnnnnnnnnnnnnnnnnnnnnnnnnnnnnnnnnnnnccccgtctctactaaaaatacaaacattnnnnnnnnnnnnnnnnnnnnnnnnnnnnnnnnnnnnnnnnnnnnnnttgaggcgggcgnnnnnnnnnnacctgggaggcggaggtnnnnnnnnnnnnnnnnnnnnnnnnnnnnnnnnnnnnnnnnnnnnnncatctcaaaaaaaaaaaagttccnnnnnnnnnnnnnnnnnnnnnnnnnnnnnnnnnttagtaggaaataatgtgttttgaagcttcaggagaagcttcaaaattgtcacaattgctgaaaacagaatgaatcatgaacattatctcaatagtaatagacaagaccacagtgttttggttccctgacctgtttttgtgtttatgttaggatctgaatcatgttctgggtaaggggacgaggagctaacactgcgctaagatttggtttgccaaatcagattctttggtcaagagtcagtctggggccagacgnnnnnnnnnnnnnnnnnnnnnnnnnnnnnnnnnnnnnnnnnnnnnnnnnnnnnnnnnnnnnnnnnnnnnnnnnnnnnnnnnnnnnnnnnnnnnnnnnnnnnnnnnnnnnnnnnnnnnnnnnnnnnnnnnntggcacccacctgtaatgccagctacttgggaggctggggcaggagaatcacttgagcccaggaggtgnnnnnnnnnnnnnnntgagatcacaccacagcactccag

SEQ ID NO: 18122 - DNA, 790 bp, Macaca Fascicularis
  misc_feature (1)...(790): n = A,T,C or G
gcacacccagcagcagcgcacgnnnnngaannnngcggccctcanctgaaggagggcgtcgccggaaacccagggaacctttctgaagtgacacctcgcccccacacaccgtccattcacccccgtctcttccttctgcttttcggtttttggaaagggatccatctccaggcagcccaccccggtggggcttgtttcttgaaaccgtgatgtacttatgggtcnnnnnnnnnnnnnnnnnnnnnnnttcagagtctcgctgcctccctcctgcgggaggtttctgctctctttgaaannnnnnnnnnnnnnnnnnnnnnnnnnnnnnnnnnnnnnnnnnnnnnnnnnnnnnnnnnnnnnnnnnnnnnnnnnnnnnnnnnnnnnnnnnnnnnnnnnnnnnnnnnnnnnnnnnnnnnnnnncnnnnnnnnnnnnnnnntgttgccatgactgatcatggctcttgcattttttgggtaaatggagactggaaaaacatnnnnnnnnatgggccatgccaggaggaagggctggtggctgccagccctggagcccagcacaggcctaggccttccccttccctcaagccagggctccgcatcctgtcgtgggctcattgcttgtgaccactggcctctctacagcatggctcgtggcctgcttgaggcagaaccaggacccttgactcccaggcggggaggtggccaaggatgctggagctgaatcagacgttgacagttcttgaggcatttctaattcacaatctggaatgaacacatggacaaataaagt

SEQ ID NO: 18123 - DNA, 994 bp, Macaca Fascicularis
  misc_feature (1)...(994): n = A,T,C or G
tgtgtgtgtgcccaccagtgaganngtgnntgggcacgcgggaaggcnnnnngnctggagccgagtgcaagcaaaccatgaagacccagagatgtaagatcccctgcaactggaagaagcaatttggagcggagtgcaaataccagttccaggcctggggagaatgtgacctgaacacggccctgaagaccagaactggaagtcnnnnnnnnnnnngnnnnnnnnnnnnngccagaagacggtcaccatctccaagccctgtggcaaactgaccaagcccaaacctcaagcagaatctaagaagaagaaaaaggaaggcaagaaacaggagaagatgctggatnnnnnnnnnnnnnnnnnnnnatataaaaaggacatcagcaaacaggatcagttaactattgcatttatatgtaccgtaggctttttattcaaaaattatctatagctaagtacacaataagcaaaaacaaaaagaaaagaaaatttttgtagtagtgttttttaaatgtatactatagtaccactaggggcttataataaaggactgtaatcttatttaggaagttgacttatagtacatgataaatgatagacaattggggtaagttttttgaagttatgtgacattttacattaaaatttttttttacagtttttgggcaaaatttaaatgttatgactatgtaaactacttctcttgttaggtaatttttttcacctagacttttttcccaattgagaaaaatatatactaaacaaaatagcaataaaacataatcactctatttgaagaaactatcttgttttttgccaatagattttttaaaatgtagtcagcacaatgggggtggggaagcagagcatgccctagttcaatgtcaacttttttttttttttttaaagaaaagcattaaaacataaaattctttcactttggcagaagaatttgttttcttgatgaaattattttccatcnncggaaaaaaatact

SEQ ID NO: 18124 - DNA, 772 bp, Macaca Fascicularis
  misc_feature (1)...(772): n = A,T,C or G
tgtgggtacagagagtcaagcccaggaggactgccccgtgcagactggaagggatgctggtagagatggtggaggaggcaattgggatggcgctaggcatccaagtaggggttgtgggtgaccagttgcacttggcctctgggttgtgggaattaaggaagtgacttatcctcttgaagatgctgaaaaaggagagaaaggggatgtatccatgggggcagggcatgactttgttccagttctaaaggcctcttccttgctgtgtcatcccaggccaccccagcctctgagcccctgggactgctgcttcttgaccccagtaagccactgccacacgtctgaccctctccaccccatagtgagcggctgctttcccctaagccaagggcctcttgcggtcccttcttactcacacacaaaatgtacccagtattttaggtagtgccatattttacaatttgtaaaacaagcacgagcaaaatgaagacactgnnnnnnnnnnnnnnnnnnnnnnnnnngggtgctnnnnnnnnnnnnnnnnaccccagtgcacccactctgctttttaactgggcagactggtaagcagactggtgggatctgtgcccagaaatgggactgggagggcccacttcagggttctcctctcccctctaaggctgaagaagggtccttccccctccccaagacttggtgtcctttccctccactccttcctgccacctgctgctgctaatcttcagggcactgctgctgcctttagtcgctttag

SEQ ID NO: 18125 - DNA, 805 bp, Macaca Fascicularis
  misc_feature (1)...(805): n = A,T,C or G
aggcaagcaggacctggcatnctggtggatatggtgcagnnnnnnnnnnnnnnnnnnnncccctcaacagccaactgtgaccccactgccaagtggcgatagggcctccccccttgggtcattggcctctcagggcctggcaggccagttgtctgggtttttcttgtggggtaaagctggtcctgcctcctgggaacatgaggttctgagaccggtgtgtcaggtcagggacttggactggagtcagtgtctggctttttcctctgagcccagctgcctggagnnnnnnnnnnnnnnnnnnnnnnncccctaggggaacagactagtgaccccagaaaagcataacaccaatccnnnnnnnnnnnnnnnnnnnnnnnacaattgcactaaatgaatcttgttcccaaagaaccacccccttttcagctgagccctggggactgttccaaagccagtgaaatgtgaaggaaagtggggtccttcggggagatgctccttcagcctcagaggagctctaccctgctgcctactttggctgaggggcttgggaaaaaaacttggcactttttcttgtggatcttgccacatttctgatcagaggtgtacactaacgtttcccccgagttcttggcctttgcatttatttatacagtgccttgctcggcgcccaccaccccctcaagccccagcagctctcaacaggcccagggagggaaatgtgagcgctttggtttgacttaaaattggaatgtcatctaaccattaagtcatgtgtgaacacataagaacatgtgtaaatatgtac

SEQ ID NO: 18126 - DNA, 679 bp, Macaca Fascicularis
  misc_feature (1)...(679): n = A,T,C or G
gctccaggacatagagaannnnnnnnnnncagatgaaaggggagaggcgagaattcaaagaagaataagcatcaagaaagcacttgacacaaagattggacggtacaaannnnnnnnnnnnnnnnnnnnnnnnnnnnnnnnnnnnnnnaaaggaaaaaactatactgaagaagaagatcgttttctgatttgtatgcttcacaaacttggatttgacaaagaaaatgtttatgatgaattacgacagtgtattcgcaactctcctcagttcagatttgactggtttcttaagtccagaactgcaatggagctccagaggagatgtaataccttaattactttgattgaaagagaaaacatggaactagaagaaaaggagaaggcagagaaaaagaaacgnnnnnnnnnnnnnnnnacacagnnnnnnnnnnnnnnnnnnnnnnctgacggtcgaggaagaaaaaannnnnnnnnnnnnnnnntatgtttttgtttcataatcactaactttaaaccagtagttctttaatttacgggtcttcataagatgtactgtacaatgctcaattgttatgtcatttaaagacatcaggttcatctgtttactgagctagaaacatagtatgtagtttcacnnnnnnnnnnnnnnnngctgtgctgaaatttttttatcattaac

SEQ ID NO: 18127 - DNA, 736 bp, Macaca Fascicularis
  misc_feature (1)...(736): n = A,T,C or G
gctttgtcggtgtttgagtctgctttcttggtctttaaaacctgattttaagttatagaaatagttannnnnnnnnnnnnnnnnnnnnnnnnnnnnntattaaccatccactgtgctaaaactagagcagtttgatttaaaagtgtcactcttcttcctttcctactttcagtaaatatgagatagagcataattctctgttttatcttagttttatacataatttaccatcagagagannnnnnnnnnnnnnnnnnnnnnnnnnnnnnnnnnnnnnnnnatgtgctaagtttttctttaagcaatgagaaattgctcacgttcttcatcttctcaaatcatcagaggctgaaggaaaacactttgactgtgtctataacttgacacagtcaatagaatgaagaaaattagactagttaggtgattatttcagctcttgacctgtcccctctggctgcctctgagtctgaatctcccaaagagagannnnnnnnnnnnnnngcactggattgcagaagacttggggacaacatttgctccaagatcttaaatgttatattgataaccatgctcagcaatgagctattagatttattttgggaaatctccataatttcaatttgtaaactttgttaagacctgtctacattgttacatgtgtgtgacttgagtaatgttatcagtgtttttgtaaatatttactatgtttttctattagctaaatcncaacaatttg

SEQ ID NO: 18128 - DNA, 143 bp, Macaca Fascicularis
aggaaaacatgttcattcccctaacattgcagtatatactagctattagctttctttttacaaattttttttctctataagcacttttaaaaggcataccccaaagaggtgcttatatcaccatcccccccaaaatatagttt

SEQ ID NO: 18129 - DNA, 757 bp, Macaca Fascicularis
  misc_feature (1)...(757): n = A,T,C or G
atcatagctacttatatatcttttcacattnnnnnnntagttgtaggcactcttaggtcttaatacggatttatgtgtttgtgtgtgtagtttctcctcttgctactcatctttatctagagattgactaatacctcattctgtttgtaaaaccagccagtaatttctgtgcaaccttattatgtgcaatatttttaaatcgtgagaaatgtgtgcttttgttttcagatagacttatttctttagttctgcacttttccatattatactccatatgagtnnnnnnnnnnnnnnnncatattaaaacaaatgtctcatacaacattgtttgtgagagaaatataaatatttacaacctgatattcattgttttattgtttaacgtttattatgcaactctggaggtatagagggcatataagctatgggacatatgctgatcgcaggctatattcatgaagttacttttgactaacctgaaaactctgataggattttgtttgtcatttggtaatttctactgcattcttctgtcacaagttttgatagcttgaagatatttttaattataattttgttgtgtttgtttgctaggagcaagcgttcctgctcccagttctttcttctttaggcctggttgagagaaagcagaaacttcacatnnnnnnnnnnnnnnnnnnnnnntttaatttgaaacttaagaaaatgaagttattctgttatatttatgtaacttatttcctggaagttatatcta

SEQ ID NO: 18130 - DNA, 720 bp, Macaca Fascicularis
  misc_feature (1)...(720): n = A,T,C or G
agtgtccagattcatgacgtgnntgcagaccnnnnganntatgacaggactgatgaggctgatgcagaggagaggggtcctgaggagaactatagcaggccagaggcacctaatgagttctatgatggagaccatgacaatgacaaggaaagtgatgtggagatttaagagtggcttgggatgctgtgtcccaaggaatttcttttcacctcttggttggactggagggaaaaggagtggctcctagagtcctggagtggtcaccccagggcttttgctgactctgggaaagagtctggagaccacatttggttctcgaaccatctaccccctttcttctctctcctaaggcctgacagtggtacctattagggatgagatatggacaaggatagctatatgggacattattggcagtgggccctggaggccagtccttagccccccttgtcccttatttcttccctgcttccctccaacccagagactttgagggacgaatgggtagacaaggannnnnnnnnnnnnnnnnnnnctcctctcctgagttctgatttcctcctccccttgcttccagggaagatgaagagagagggatttggcaggggctctggctccctaacacctgaatcccagatgatgggaagtatgttttcaagtgttgggaagatatnnnnnnnnnnnnnnnncacttttggctttatgtccattttaccactg

SEQ ID NO: 18131 - DNA, 774 bp, Macaca Fascicularis
  misc_feature (1)...(774): n = A,T,C or G
ccgggaagagcgtgatgatcgatgcatgcacgacgtgccgctgcatcgtgcaggtgnnnnnnnnnnntggattcaagctggagtgcaggaagaccatctnnnnnnnnnnnnnnnnnnnnnacaaggaagaaaataacacaggtgaatgttgtgggagatgttnnnnnnnnnnnnnnnnnnntcggctaagaggaggacagatcatgacactgaagcgtnnnnnnnnnnnnnnnnnnnnnnnnnnnnnncacttctgcaaggtcaatgagagaggagagtacttctgggagaagagggtcacgggctgcccgccctttgatgaacacaagtgtctggctgagggaggtaaaattaagaaaattccgggcacctgctgtgacacatgtgaggagcccgagtnnnnnnnnnnnnnnnnnnnnntacagtatgtcaaggtgggaagctgtaagtccgaagtagaggtggatatccactactgccagggcaaatgtgccagcaaagccatgtactccattgannnnnnnnnnnnnnnnnnnnnnnnntcctgctgctctccaacacagacggagcccatgcannnnnnnnnnnnnnnnnnnnnnnnntctgttgtgtaccacgaggttctcaatgccatgcagtgcgaatgttcccccaggaagtgcagcaagtgagnnnnnnnnnnnnnnncnnggtgactgctgctgcctgccttggcctgacaggccagagtgctgccagtcctctgcatgttctgctcttgtgcctttctggccc

SEQ ID NO: 18132 - DNA, 769 bp, Macaca Fascicularis
  misc_feature (1)...(769): n = A,T,C or G
ctggaagtccatgggccaccctgtnnnnntccgtnnnnnnnnnngagggnnccaagtatactcttaagacccactctgtttaaaaatatatattctatgtatgcatatatggaattgaaatgtcattattgtaacctagaaagtgcnnngaaacatcgatgtggggaggtttattgagcacaagttgtatttcagcccacaccccctcccaaaagaaattggtaagtaaaagctttgctatacatttgactaagaaatcacccagctttaaagctgcttttaacaatgaagattgaacagagttgggcaattttgattaattgagacttgggggtgaaactgtccagtttactgaactcnnnnnnnnnnnnnnnnnnnnnnnnnnnnnnnnnnncgcttcccttggcataccagtattctcccgccaaatgaccctagaccccctgtcctgcagaatcagggtcgcttttcccctgactgtgtccaatgccaaggagtcctggcctttgcagatgcttcgttttgacccttggctgcagtggaagtcagcacagagcagtgccctggctgtgtccctggacgggtggacttagctagggagaaagttgaggcagcagccctcgaggccctcacgggtgtctaggcaggcctcatttcatcacgcaccatgagcaggtctggaagagcaaagccaaatctcagggaagcccttggttgatgtgtctgggtctcctctggagcactctgccctcctgtcacccagtagaga

SEQ ID NO: 18133 - DNA, 654 bp, Macaca Fascicularis
  misc_feature (1)...(654): n = A,T,C or G
tgcttagagttggaagtgcaacaggcaggtgatcatgctgcaagttctttttggannnctggcaaagggagtggtcagtgaaggccatctcgttaccttgggatctgccaggctggggtgttttcggtatctgctgtccacagctctccactgtaatccgaatactttgccagtgcactaatctctttggagataaaattcattagtgtgttactaaatgttaattttcttttgcagaaagtacagtaccgtgtctgaattaattattaatatttaaaatatttcattccttaactctccctcatttgcccacagcctactcagttcctttgtttggcaggattctgcaaaatgtgtctcacccactactgagattgttcagccccgcccttttttttttttttttttttctggtggtagcttgtcctgaaatgtgtgtagaaagcaagtatgttctgataaaattgttgtgtagtgcatgctgtgtggagttcagaggaaacccagattcagtgattaacaatgccaaaaaatgcgagtaactagccatggttcagatggcagtggtgatgtttatcttttgtggccttttagacttttgttgccctaaaattccattttattaggaacccattttccacctggtctttcttg

SEQ ID NO: 18134 - DNA, 689 bp, Macaca Fascicularis
  misc_feature (1)...(689): n = A,T,C or G
gccctggcaggganncaaagcagccaccaagcgccagaagtatgagcggatcagcgagaagaagatgtcaacacccattgaggtnnnctgcaaaggctatccnncngaattctcaacatacctcaacttctgccgctccctgcggtttgacgacaagcccgactactcttacctacgnnnnnnnnnnnnnnncctcttccaccggcagggcttctcctatgactacgtcttcgactggaacatgctgaaattcgccaggagcacctctccatccactgctgctgctctnnnnnnnnnnnnnnngtccctcttgagtcaggccctgaagttagaagctgggcagaggtgcccacagccttatcctttgccnnnnnnnnnnnnnnnnnnnnnnnnnnnnnnnnnnnntgaaccacnnnnnnnnnnnnnnnnnnnnnnnnnnnnnnaaaacatgcgatgggaactttcaccctgaggccgggcccttcccatgccagcccgacagtagacaggacaccctgtggtgctctgcaccggggtgctgggatctgtggatccctggagcctggaagccactcgcagcacatacagtcactgtgttccgaggtccagtcagccggccgggaaggaattcaacacagccaaggacagaagtccatatgatgacaggtggatgctcgtgtgactttgct

SEQ ID NO: 18135 - DNA, 734 bp, Macaca Fascicularis
  misc_feature (1)...(734): n = A,T,C or G
aggcctgtgggtgcaggtgcttgtgaacgaggctccctganaaaggtagacaagcgttgagccactaagcagaggaccttgggctcccaatacaaaaatacttactgccgagagggctgccgaccatttggtnnnnnnnnnnnnnnnctttatatccaaaataaactcccttttcttggggttgtctgagtcttgggtctgtgccttgaaaagagcttaattatgggacagtctcacctcctgccatagggtcctgaatgtttcagaccccaaggggctccacacctttgctgtgtgttctgtgccagtatggcctgggcgtcatctctcatcatctggaaacagccttgagaagcaggtgctttattccccattttgccaattaggaaacaggcccagggaggtggagaaacacagctgatggttggtagcaccaggattcaaactcaggtacatactaaacctctctgcaagtcagtttccttatccccccaaatggaaattgtatttgcctgctccactttgggaggctcccacttcttgggagggttatatttttttaagtcttaatcatttgtgatatatgtatgtatacatccgtatctttcaatggtctgtgtgtaccatctttgtgattattttcttaatattttttctttaagtcaattcatttttgttgaaatacatttatttaaagaagaatcttcatgttactctgtaannnaaaaaaagat

SEQ ID NO: 18136 - DNA, 708 bp, Macaca Fascicularis
  misc_feature (1)...(708): n = A,T,C or G
tagcnnnnnnnnnnnnnnnnnnnnnnnnnnnnnntctctnnnctgacataatcaatggaagaatatttagatttatttaaagttcttaatgccnnnnnnnnnnnnnnnnnnnnnnnnnnnnnnnnnnnnnnnnnnnnnnnnnnnnnnnnnnnnnnnnnnnnnnnnnnnnnnnnnnnnnnnnnnnnnnnnnnnnnnnggctctgtcaattgcagttccttgtgtagcttgtattttgatttagtttgtattctgcttattatgtatactgtgttcttatatatgagaaagcacaaatgggaaagaggtcatgtctgctcaaagtctagcaaaggaagtagtctgcattggtnnnnnnnnnnnnnnnnnnnnnnntgaaagcctcagttctgaatgttgatataagtagttaaaaggaaatggggccattttatgtgtttatctgtgtcaagtctttctggtattaagaagcacttaatttacacatattttaatcctgtgaaagagtccacatagagaaaagaaagatacctaaccttcaacaaatgttatttttggaaacacaatttttgtcattaaatgttatattatttcacatatataaaacagatgttatgtaagaatgttgtatattttaacataaatcatttagagaaattatctagattcattaattttcatagtgcctttttcacatgagtcagctggaa

SEQ ID NO: 18137 - DNA, 697 bp, Macaca Fascicularis
  misc_feature (1)...(697): n = A,T,C or G
gncggaaccgagacannnnnnnnnnnnnnnnnatgggctctgctttatatggccctctacccagaaatccaagaaaaagtacaagctgagattgacnnnnnnnnnnnnnnnnnnnnnnnnncgagcacagccgcccgggagtccatgccctacaccaatgccgtcatccatgaggtgcagaggatgggcaacatcgtccccctgaacgttcccagggaagcgacagttgatactactttggctgggtaccacctgcccaaggggaccatgatcctgaccaatttgannnnnnnnnnnnnggaccccacagagtgggccacccctgacacgttcaatccagagcattttctggagaatggacagtttaagaaaagagaagcctttctacccttctcaataggaaagcgggcatgcctcnnnnnnnnnntggccaggactgagctgtttattttcttcacttcccttgtgcaaaaatttaccttcaggcccccaaacaatgagaagctgagcctgaagtttagaatgggcatcactatttccccagtcagtcaccacctctgcgctgttcctcgggtgtgattttgctaagaaagaaaggggctttttaatgattgccattctaactggtgtgagatggtatctcattgtggttttgatttgcatttctctgatggcaagtgataatgagcattttttc

SEQ ID NO: 18138 - DNA, 730 bp, Macaca Fascicularis
  misc_feature (1)...(730): n = A,T,C or G
aggccatacccgatacnnnnagannnacntnnttactccctcnnnnnnnnnnngtgactgcccgggcctcatcttcccatctcttctgcctaggcagttgcaggttctggcagggatctaccccatcgcccagatccaggagccctatactgctgtgggctacctggcctcccgaattcccgtgcaggccctgctccacttgcgccacccagaggctgaggacccctcagcggaacacccctggtgtgcctgggacatctgtgaannnnnnnnnnnnnnnngtggttacaagacagccaaggcagctcggaatgatgnnnnnnnagcagccaacagtctcttgcggctggcagtggacggccgcctcagcctgtgttttcatcccccaggctacagtgaacagaaaggcacctgggagtcccatccagagaccacggagctggtggttttgcagggcagggtggggccagcaggtgacgaggaggaggaggaagaggaagagctgagcagctcctgtgaggaggagggagaggaggaccgggatgcggatgaggagggagaaggggatgaggacaccccaacctcagctccagggtccagtttggttggccgannacccttatgccctgctgggtgaggatgtgtnntgagttcctcgcccagtgccatcttcccacccaatgtctttgcttttggactgacctgggggtatctcccctctgccacccca

SEQ ID NO: 18139 - DNA, 769 bp, Macaca Fascicularis
  misc_feature (1)...(769): n = A,T,C or G
acctagccgcgcgcaacgtgnnnnnnnnnnnnnnnnnnnnnnnnnnnnnnnnnnactttggcctagccaaggccgtgcccgaaggccacgagtactaccgcgtgcgcgaggatggggacagccccgtgttctggtatgccccagagtgcctgaaagagtataagttctactatgcgtccgatgtctggtccttcggggtgaccctgtatgagctgctgacgcactgtgactccagccagagcccccccacgaaattccttgagctcataggcatcacccagggtcagatgacagttctgagactnnccgagttgcaggaacgaggggagaggctgccacgacctgacaaatgtccctgtgaggtctatcatctcatgaagaactgctgggagacagaggcgtccttccgcccaaccttcgagaacctcatacccatcctgaagacagtccatgagaagtaccaaggccaggccccttccgtgtnnnnnnnnnnntgaggcnnnnnnnnnnnnnnnnntgggaagattgaaccaggcagtggctgcagacggggccttctgcttcctgccccaggatgaaaccaagagggagacgtcaacctcacctacaccctgtgccttactcctgtctggagaccccacctttgtgaacttactttnnnnnnnnnnnnnnnnnnnnnaccatgattttgaaggacccacgatgtgtagggtcactaatccggcccttgaacccccagcttccaaacttgaggcccaccattccacca

SEQ ID NO: 18140 - DNA, 888 bp, Macaca Fascicularis
  misc_feature (1)...(888): n = A,T,C or G
tggaaacacccccaacgccatgacnatcctcctggctgtggtcggcagcatcctcctggttgggctcnnnnnnnnnnnnnnnnnnnagctgctcgtcaccatccacgaccggagggagtttgcaaagttccagagcgagcgatccagggcccgctatgaaatggcttcaaacccattgtacagaaagcccatctccacgcacactgtggacttnactntcaacaagttcaataaatcctacaatggcactgtggactgatgtttccttctccgagcgtctggaggggggaactaatgaaaaggtcagactgaaacgccttgcacggctgctcggcttgatcacagctccctaggtaggcaccacagagaagaccttctagtgagcctgggccaggcgcccacattgcctgcgcaggaaggtgcctggccatgtcacctggctgctaggccagagccatgccaggctgcatctctccgagcttgggataaagcaaggggaccttggcgctctcagctttccctgccacatccagcttgttgtcccaatgaaatactgagatgctgggctgtctctcccttccaggagtgctgggccccgagcctggccagacaagaggactgtcaggaagggtcagagtgtgtaaaaccagcatacagtttggcttttttcacattgatcatttttatatgaaataaaaagatcctgcatttatggtgtagttctgagtccggagacttttctgcctgatggctatgccttgcatacaggtgttggtgatggggctgttgagatgcctgtcgaaggtccatcgtttgcaaatgtcagtttcctctcctgtccgtgtttgtttagtacttttgtaatgaaaagaaacaagactgttggga

SEQ ID NO: 18141 - DNA, 757 bp, Macaca Fascicularis
  misc_feature (1)...(757): n = A,T,C or G
acatgcatatagcagatggacaggaaggccaacatgcagagacacttcctgtgtggatccgccctcagtaaaaaatgctcatatagtgtcgagacagatgagtaaatatgcatctggtgagagagtacgttatgaatgtaggagcccttatgaaatgtttggggatgaagaagtgatgtgcgtaaacggaaactggacagannnnnnnnnnnnnnnnnnnnntacaggaaaatgtgggccccctccacctattgacaatggagacactacttcattcccattgtcagtatatgctccnnnnnnnnnnnnnnnnnnnnnnnnnnnggacttgtatcaacttgagggtaacaagcgaataacatgtagaaacggacaatggtcagatccaccaaaatgcttacatgcatgtgttatatccccagaaattatggaaaaatataacataacattgaaatggaaagccgaagagaaactttattcgagaannnnnnnnnnnnnnnnnnnnaggtgtagatctggatattatctttcatcaaactctcannnnnnnnnnnnnnnnnnnnnnnnnnngaaacnnnnnnnnncaacttgtgtaaaaagacgtcattgatcataaaatgcacacctttattcagaactttagtattaaatcagttctcaatttcattttttaagtattgttttactcctttttattcattagtacattttcgggttaatttgtgtaaatgtaattataatctgagaccggtggctc

SEQ ID NO: 18142 - DNA, 724 bp, Macaca Fascicularis
  misc_feature (1)...(724): n = A,T,C or G
tatagcagagnnnnnnnaaggtnnnntttttgccaggagattcagaccncgatcagctaacaagaatatttgaaactttgggcacaccaactgaggaacagtggccggacatgtgtagtcttccagattatgtgacatttaagagtttccctggaatcccgttgcatcacatcttcagtgcagcaggagacgnnnnnnnnnatctcatacaaggcttattcttatttaatccatgtgctcgaattacggcnnnnnnnnnnnnacggggtttcaccgtggtctcgatcttctgaccttgtgatccgcccgcctcggcctcccaaagtgctgggattacaggcgtgagccaccgcgcccggcctagaatgaagtttttaaggcactgaaaatgaagtatttcagnnnnnnnnnnnnnnnnnnnnnnnnnnnnnnnnngccaagaccaaactgtccagtggaaaccttaaaggnnnnnnnnnnnnnnnnnnnngcgacaaaaaggaaaagaacagaggccttagaacaaggaggannnnnnnnnaaactaattttttaaagagaacnnnnnnnnnnnnnnnnntactgaaggaaatagccaaaaaaggcaaatagtggaaaaatagtaaacattaagtaaatgctgtagaagtgagtttgtaaatattctacacatgtaaaatatgtaaaactatggggtttttttattaaatgtatttaaaataaa

SEQ ID NO: 18143 - DNA, 772 bp, Macaca Fascicularis
  misc_feature (1)...(772): n = A,T,C or G
gattggtagagtttagtttttaggtttgacaagtcaggatcacctgtcatcttagtctagacttcactggttcccattaggttctacactatttatctttaatactttgcaaagtcatttgttccatttttcacataattctcaaagggtaccctgataaagacnnnnnnnnnnnnnnnnnnnnnnnnnnnnnnnnnntacaggcttaggcagttgtccagttgacctagcatctaggaagactctaggaagatgttgccannnnnnnnnnnnnnnnnnnnnnnnaaactggatggttgtggtgctggtttgaggggtaaagtatgggggcctannnnnnnnnnntgctggatatgaagaaggnnnnnnnnnnnnnnnnnnnnnnnnnnnnnnnnnntccaggccctgaggtggcaggcagcttgatagtgaacagaacccttgtgnnnnnnnnnnnnnnnnnnnnntttggcctgcccagtactggaagctgataagtcagggcacaaattaaaggtctaggaggcaagaccagctgataaacagtgggtgtaatgcttcctggggatatcccacctctagggaaagcttttggctattnnnnnnnnnnnnnnnnnnngcaagttgtggaggaaaatgattaagtaaaaggccacacccccaaccccttcagctataggggcatctggatggccnnnnncnnnnnnnnnnncaggnnntgctnnnntccacacaggaagtgannnngcactaggcatccggagctgctggc

SEQ ID NO: 18144 - DNA, 744 bp, Macaca Fascicularis
  misc_feature (1)...(744): n = A,T,C or G
cagcggggctgaggncncnnngggtgactacgaanagcctgcagtgtggatggaaccccgccccggctggacatcctggacactgcgggccaggaggagttcggggccatgagagagcagtacatgcgtgccggccacggcttcctgctggtgtttgccattaacgaccggcagagtttcaacgaggtgggcaagctcttcacgcagattctccgggtcaaggaccgcgatgacttccccgtcgtgttggtcgggaacaaggcggatctggaggcacagcgccaggtcccccgatcagaagcatctgccttcggcgcctcccaccacgtggcctactttgaggcctcggccaaactgcgtctcaacgtggacgaggcttttgagcagctnnnnnnnnnnnnnnnnnnnnnnnnggaacaagagctcccacccagcccttccagtgcccccaggaagaagggcgggggctgcccctgcgtcctcctgtagcccaggcaagagagaagcaaccagcacaagctctcgggaccagctgccttcacaccttgctgtgtgacctgaggccctcactgagcctcagtttcctcatctgggtctcccaggacacatcacatgcccacccttacttcctggcctcttctgggctactgccactgtgtgccttccgccaacacctcctgtccccacctaagcctggtgggggcgaggggctccgggtcactgctgtatataactccctccccc

SEQ ID NO: 18145 - DNA, 723 bp, Macaca Fascicularis
  misc_feature (1)...(723): n = A,T,C or G
cagatttcattcatttgtgcttttgcattaaactgnnaatgtccaacacctgcctccacttctcccctcaagaaattttcaacgccaggaatcatgaagagacttctgcttttcaacccccaccctcctcaagaagtaataatttgtttacttgtaaattgatgggagaaatgaggaaaagaaaatcttttttaaaatgatttcaaggtttgtgctgagctcctnnnnnnnnnnnnnnncagaattaccccagcctcttgagctgaagtaatgtgtgggccgcatgcataannnnnnnnnnnnnnnnnnnnnnnnnnnnnnnnnnnnnnnnnnnnnnttttcnnnnnnnnnnnnnnnnttatgtaaaactgttaagagacataccctctaaaaagaactttagtatggtattgaaggaattagaaatgaatttggagtgctttctatgtatgttctcttcttcaatactgannnnnnnnnnnnnnnnnnnnnnnnnnnnnnnnnctaatacagctcttccataggacagttgttgcttcttaattcagttctgtatgtgttcaacatttttgaatacattaaaagaagtaaccaactgaacgaaaaagcatggtatttgaattttaaatcaaagtaaataaaagtacaaagcatattttagttagtactaaatccttagtaaaatgctgatcagtaaaccaatcccttgagttatataacaag

SEQ ID NO: 18146 - DNA, 712 bp, Macaca Fascicularis
  misc_feature (1)...(712): n = A,T,C or G
cactagaagtttcacgtacttctcnnnctgactctgtcttgtccaactnncnggagannnntccacgattgctcatgcctgtcagtatcagtgcttccatcgttccatctttgattcacttctctttcctttctgtttactcccaaaatggagtcattcatcctgatgtcctcaattgctgnnnnnnnnnnnnnnnnnnnnnnnnnnntagctccaaccccaacttcccccagactttagatctgtattggtattacctactggnnnnnnnnnnnnnnngnnnnnnnnnnnnnnnnnnnnnnnnnnnnnccaagtatgttcctcctgaattcctatcctggttaccttcatcgcaatctacataggctcaccagctagaaacatttatgagcttacattccttcttccaatatcttactcatcagcatatcatgttcatttcactccaacaatctgtcttgaatgtggccttccctctcccctctctctttactttaattcattggagcatgggatttggagtcaggtggttttgggtttgaattccagctctactatttttggttgtgtgataggagagttatttaacctctctgagcctcagttccctcgtatgtaaaatgatgataataatacnnnnnnnnnnnnnnnnnnnnnaggatttaaattagatattgtacgaaaagtgcctagcacagtgcctnnnnnnnag

SEQ ID NO: 18147 - DNA, 759 bp, Macaca Fascicularis
  misc_feature (1)...(759): n = A,T,C or G
caggctatcctgacaagacttgacctaaacttngttttattnnnnnataacagtccaattatattcttggccaattttgtccaacggacaagaaaaaagcaaagtcaacgacaccattatcttgtcaagatcaaatggttttactnnnnnnnnnnnnnnnagaaaactttgtttattgaaaaaaaaaagaaaaagaaagcaagaaaaaaagatactatggggtcaagtgtaactccatggaaatgccacgtctgctcttcagtgaagaagctggtttagagtctcacagaaaacttttgactgtatttatttattgttgcaaaaaagacgcttttttattgctgccctcatttgtcagctaattattttttcttataaaatccagccccggttacatataatcatctgtatcttatcatgattcctgtaggtaaaagtacaagacgacctctagatgtcttttctttctatgaaaggagctgctatgtacacatgtgcacacacacacaactgggaatcaacaatgagtttattgttcatggtagattaaaatgaagcttgcataaaggttgggctaagtggtcctggactacagactctgttgccttgaatataaacagtacaatttgtcaattactccgcannnnnnnnnaatgagtaaaatctatttgaaggtatcttgtttgtaaacatttgtcagattctaatttttttctttcgtattaaaattcaactactggatgtatagnaacaaaataa

SEQ ID NO: 18148 - DNA, 876 bp, Macaca Fascicularis
  misc_feature (1)...(876): n = A,T,C or G
aaagagaccatagataataattctgtgagtnnnccacttcagtnnnntcaacagagaacatggctcattcactggtctctgtttgttttcttcaatcaccccaaaggtcgcgataatattattgatctcttcctttatcagccacaatatcttaatgcaattcagacaatgtgtccacacattcttcgctatttgactacagcagtcataacaaacaaggatgttcggaaacgtcggcaggttctaaaagacctagttaaagttattcagcaggagtcttacacatataaagacccaattacagaatttgttgaatgtttatatgttaactttgacttcgatggggctcagaaaaagctgagggaatgtgaatcagtgcttgtgaatgacttcttcttggtggcttgtcttgaggatttcattgaaaatgcccgtctcttcatatttgagactttctgtcgcatccaccagtgtatcagcattaacatgttggcagataaattgaacatgactccagaagaagctgaaaggtggattgtaaatttgattagaaatgcaagactggatgccaagattgattctaaattaggtcatgtggttatgggtaacaatgcagtctcaccctatcagcaagtgattgaaaagaccaaaagcctttcttttagaagccagatgttggccatgaatattgagaagaaacttaatcagaatagcaggtcagaggctcctaattgggcaactcaagattctggcttctactgaagaaccataaagaaaagatgaaaaaagaaaagaaaagaaagatgaaataataaaactattatataaagggtgacttacatttggaaacaacatattgagtatacatttgaagaa

SEQ ID NO: 18149 - DNA, 1194 bp, Macaca Fascicularis
  misc_feature (1)...(1194): n = A,T,C or G
agatatatatataatgtctctagataggggtgaaaatgagcctgtatcctcagctgacacataatttgaacggtgcagaaaaaaaaaataccataattttattattagattctccaaatgattttcatcaatttaaaatcattcaatatctgacagttactattcagttttaggcttacctcagtcatgcttcagttgtacttccagtacgtctcttttgttcctagctttgacatgaaaagatacgtttgagttcaaattttgcattgtgtgagcttctacagattttagagaaggactgtttttactaagtaaaagggtggagaagttcctggggtagattcctaagcagtgctactannnnnnnnnnnnnnnnnagccacatggagcaccatgagggttgttatttgctgtttttaacaactaatcaagagtgagtgaacaattatttataaactagatctcctatttttcagaatgctcttctatgtaaaaatatgaaatgataaagatgtcaaatatctcagaggctatcgctgggaaccagactgtgaaaatgtgtgatatgtgaacacatactagaaagctctgcatgtgtgctgtccttcagcataatttggaagggaaaacagtcgatcaagggatgtattggaacatgctggagtagaaattgttcctgatgtgccagaactttgaccctttctctgagagagatgaccgtgcctataaatagtaggaccaatgttgtgattaaatcatcagnncnnggaatgaattctctctaaaaataaaatnnnnnnnnnnnnnnnnnnnnnnnnnnnnnnnnnnnnnnnnnnnnnnnnnnnnnnnnnnnnnnnnnnnnnnnnnntgcattaacttaaaagattcactaaagcagcacatagcaccgggaactctggctctgaaaaactttgctatttatatcaaggatgctttggctttacattttatttattagctgtaaatacatgtgtggatgtgtaaacggagcttgtacatattggaaaggtccttgtggcgatctgcatttataaacgntgtggtgctaactttgtacgtgtctttatcagtgatgctctcacagagccaacttactcttatgaaatgggctttaacaaaacaaggaagaaacgtacttaactgtgtgaagaaatggaatcagcttttaataaa

SEQ ID NO: 18150 - DNA, 762 bp, Macaca Fascicularis
  misc_feature (1)...(762): n = A,T,C or G
ttgccatctggcatngnagccgcttatgaaattaaagccagaaatcaagtttttctttttaaagatgacaaatactggttaattagcaacttaagaccacagccagattatcccaagagcatacattcttttggttttcctgactttgtgaaaaaaattgatgccnnnnnnnnnnnnnnnnntttttataggacctacttnnnnnnnnnnnnnnnatattggaggtatgatgaaaggagacagatgatggaccctggttatcccaaactgattacnnnnnnnnnnnnnnnnnnnnnnnnnnnnattgatgcagtcttctactctaaaaataaatactactatttcttccaaggatctaatcaatttgaatatgacttcctactccaacgtatcaccaaaacactgaaaagcaatagctggtttgagtgttagaaagagtgtaattaatggtttttgttagttcacttcagtttaataagtatttattgcatatttgctatgtcttcagtgtaccactatatagagatatgtatcataaaaataaaatctgtaaaccatagataatgattatataatgtataatatttttcaattttgaaaactctaattgtcaattcttgcttgactctactgttaagtttgaaaatagataccttcaaaggccaagagaattctttttggagcatgctctgtaagtcggttcctaacatccttggactgagaaattataattacttttggtataactaaaattaagtatat

SEQ ID NO: 18151 - DNA, 785 bp, Macaca Fascicularis
  misc_feature (1)...(785): n = A,T,C or G
gggtgtgtacaccaanntcnncnnctacctagactgattcaagacaacatgcaaccgtgaccaggaacaaccgactcctcaaaagcaaatgagaccctgcctcttcctctttagaagacactgcaaaggcagagtgcttctctatacagacatctccagacccaccacaccgcagaagcgggaggagaccctataggagagggaagagtgcattttcccagatacttcccattttggaagttttcaggagttggtctgattgcaggatgctctgtcagatgggaagacatgaatgcacactagcctctccaggaatgcctcctcccagggcagaaagtggccatgccaccctgttttcagctaaagctcaacctcctgacctgtcaccgtgagcagctttggaaacaggaccacaaagataaaagtatgtctcaatagtaaaacataacaagatctttcaggaaagacggattgcattagaaacagacagtatatttatagtcacaagagcccagcagggcctcaacgttgggnnnnnnnnnnnnnnnngtcatgttcctcaaaagcacccttgacatcaagtctccttcccctttacccactccccggctctcggaaggtattccttttgtgtacagtgtaaagtgtaaatcctttttctttataaactttagagtagcatgaaagaattgtatcatttgaacaactaggctttaccatatttatagcaatccatgttagtttttactgttgccacaaccctgttttatactatacttaataaa

SEQ ID NO: 18152 - DNA, 759 bp, Macaca Fascicularis
  misc_feature (1)...(759): n = A,T,C or G
agatgcagaagatgcagtacgaggactggatnnnaaagtgannngtggctcccgagtgagggttgaactatcgacaggcatgcctcggagatcacgttttgatagaccacctgcccgacgtccctttgatccaaatgatagatgctatgagtgtggcgaaaaggnnnnnnnnnnnnnnnnnnnnnnnnnnnnnnnnnngcgaagaagaagcaggtcacggtctagatcacattctcgatccagaggaaggcgatactctcgctcacgcagcaggagcagggnnnnnnnnnnnnnnnnnnnnnntcctcgacgatcaagatctatctctcttcgtagatcaagatcagcttcactcagaagatctaggtctggttctataaaaggatcgaggtatttccaatccccgtcgaggtcaagatcaagatccaggtctatttcaagaccaagaagcagccgatcaaagtccagatctccatctccaaaaagaagtcgttccccatcaggaagtcctcgcagaagtgcaagtcctgaaagaatggactgaagctctcaagttcaccctttagggaaaagttattttgtttacattattataagggatttgtgatgtctgtaaagtgtaacctaggaaagataattcaaccatctaatcannnnnnnnnnnnnnnnntactctgtaaattcacagcagtaagataatataaatttttgttgaatgtattaacatcctatggtctgaaaatgtgggtttttatttgg

SEQ ID NO: 18153 - DNA, 587 bp, Macaca Fascicularis
ccccagagggctttttccttcctggaagtgcccaaataccaggcaacccattgcaaaatcccttcctggagccgtgaagttcctggaaaaccctatttttggtcccaaatctctccagcacacctatttcccatcagaattttccaaatcctcaagaaacccgtactgttgagcctcttcccatggatcttccatccctctgaagatccacatcttcaaatgccacccaacaccagccccctcaacctcattcaataccttgggagctcctcccacttccaggacccctccgttcccccagggactccctccccagtttcctgcctgtgacagctgtctttaaatatgcaaattccactcatcttcccagaatcctttgcacacggaaggccagtggtctccgcttccccacctttgccgtgatgtctgtgtctgtgactgacgtggcctcctcttgtgccgtgcttggcatatgtggtcctcgttcatcgtgccgcctgtggtgatgcgtgcagtgacgctgtttatgtggtccgcacctccccgtgacctccactcctcgcctggactcatcccacccctcagcg

SEQ ID NO: 18154 - DNA, 751 bp, Macaca Fascicularis
  misc_feature (1)...(751): n = A,T,C or G
tgggtcactgctgagccttcagggtaggcccnnnctggcacttactggtccttaccagagacgcccagtcccatccctgtcctcatgacccctcgtccaccccacacacacactacaaggctgagggctgccagcagccgtctgcccacccttcccggccgtggaccacagtcaggatgtcagcagacacagacgggcagcccagagctgcgggagccagggcccaccccagcctcacctggcacccccactcccgcctcagggccaggcccaggcctcaccacctgacactgtgtgagacattgacaccagaaagccctcttggggcactgctccccgccccagggccctggtcagccgggagtttggctctcctctggctagagtgggaagagggagctggccacggggccctcccagcacctcagcatttccttccaatccatccaaacactgaggcagcctcggggaaccccgagctgtggggtcggcagcccgctgcaccatctcagggttttggggtcctgggctggggcnnnnnnnnnnnnnnnnngaagtcccacaacnnnnnnnatttattcctctgtcctaaaccgtcccctcctgccctcacccccagcacagggggattctgagcagtgcctctcgtctgagggacatatcggtgacctcgacgttgcctttagactacagttgnnnnnnnnnntggcgtatcggctnnttcagagtcatttagagcagaaaaaaaaaa

SEQ ID NO: 18155 - DNA, 771 bp, Macaca Fascicularis
  misc_feature (1)...(771): n = A,T,C or G
agttatgagtgnannnctnnnatgcaagaaactnnctgatggtgttctaaaattttgttagttgggtttggatgggatggtgtaaatagagactagttgcctaggcttatctataaaaaccataatgttgctgatgtaagtaatgcagttactgaatcataagaaaatgccatctcttttnnnnnnnnnnnnnnnnctggaagtaggtgccattggtcattctgcagtgcactgcaaccattgtttcccctagtgccctcttttccctagggcgttgctctcctattcccacgccttaacacagctctatacctagaagcagccagcccaggcatgcagtcacatttaatcacatcccctnnnnnnnnnnnnnnnnnnnnnnnnnnnnnnnnnnnnnnnnnnnnnnnnnnnnnnnnnnnnnnnnnnnnnnnnnnnnnnnnnnnnnnnnnnnnnnnnnnnnnnnnntttgccaggcatttaagagtatggcaaagaacatgaaagatggtgtcactagattttggtcaccaataagtaccccaccccttgccatgattaagagagaatgctttctattggagtttcaagaaatataatttgagaatactttaaagggaagtggaagtataagtgaatatttttcttttacatgtaaacaatgaagttaattcaaagtaagttttaaaatacatgaagtaatgtctgccgtacatgtttatattctacattcttgcttccttaaattaatgtttgtgtgtatatatgtgcctc

SEQ ID NO: 18156 - DNA, 719 bp, Macaca Fascicularis
  misc_feature (1)...(719): n = A,T,C or G
caggaagagtccaaagctgccctgggtgagnnnnnnnnnnnnnnnnnnnnnggcatcagcagagaggcctnnncggacgtcacgctggcgagccacatccttactgcactgagggagaagccggctccagagctgagcttatctagtcaggatttggaggnnnnnnnnnnnnnnnnncactgagctacagggaaggacatgccctgggatgtagtattaccgtgcagagatgtgtggacccttttgttcacctctgcggactgtgaatcctagctgccaatttgcctattctatgccccggcatttgcaaaaatctcattagtctaaatcaaagtagctttaaagaaaaatgcatacacttttcagatcatccgacagactctggtcccaggttggtaatgaaatgactgttcctgacagggaggaatagcggggcccaaccttctgagatggcttctggttctttccatggttaaagaagatctatagtccatcctgaggtctgtcaatgtcacaggaaaaggcaaacttgagggatcgtcgcctgctggctaagaacagggaactaaaagcttgaggaaggggacctgccagggtgggtgctacttctgattctttgtccttgtccctgtcacaagtacctccctattgtagatagaagggaaggagactgttgacttgagctcggttaaatttcctgaaggtggaggaccttagag

SEQ ID NO: 18157 - DNA, 764 bp, Macaca Fascicularis
  misc_feature (1)...(764): n = A,T,C or G
agcagatattgaagtgctgttatggttatgaggcattgatgctgtaaagaagccctaagagcaggtttgaatgttctacagaaaacatgcccattaagattaatctaatagctcctccnnnnnnnnnnnnnnnnnnnnnnnncctggagagaacagaaggcctttctgtcctcagtcaagctatggctgttatcaaagaaaagattgaggaaaagaggggtgtgttcaatgttcaaatggagcccaaagtggtcacagatacagatgagannnnnnnnnnnaggcagatggagaggcttgaaagagaaannnnnnnnnnnnnnnnnnnnnnnnnnnnnnnnnnnnnnnnnnnnnnnnnnnnnnnnnnnnnnnnnnnnnnnnngagtccaatttaaggaacacagagcagcccttcctggctgtaaatcctagacttgaaagttttccagtattgaaaacttcaaagctgaatattttttatttctaagtatttaaannnnnnnnnnnnnnnnnnnnngaaatgccctcctaaatnnnnnnnnnnnnnnnnnnnnngctccaacactttgagcatttttaagggagtggcctcatttcactagagacaaatctttaacaatagttctaaaattgggcttgtgatttccannnnnnnnnnnnnnnnnnnnnnncccctttctagttcaatgcctcacgagatttaccaggggcatccaaagcaaacaatcccaatctttctatataaaatgtatcaaacaaacatc

SEQ ID NO: 18158 - DNA, 634 bp, Macaca Fascicularis
  misc_feature (1)...(634): n = A,T,C or G
gtaatatggggaagtaggaatgtggaaaacatcctgacttcagtgtctcgcagatgtgggtcccctctcttgaccctgctgcttnnnnnnnnnnnnnnnaggacaagctacttaacttggtagcctcgatgtcctcctctgtgaaactgggatgataataatgcctaccttctgagggttgcttcaatgatttggaatcattctgtaaagtctagcacagttcctcccatgtagtagcagtgattcaataattagcaaccctatgatactattaccaccacctgctcaccggccaaaacctacactgctgtttcctcacttccatcagtggctctctaattccacttgttcattctgtgaccctagttattttctgaataattggtttttctcttttcccagagaccttctgatctccaaaaagaggagatgactacatttagcccctcgcttacaattccaggtagataactgcattttgtaggctgtctttgtttttcttatgctgatctttctctttattggattttcctcctttcctatttccccagagacttatcagatgctcattgttttccaagatctaaaatgatactgtgttccctcatnnnnnnncccttccttcctacatcct

SEQ ID NO: 18159 - DNA, 604 bp, Macaca Fascicularis
aaaaatactgcggaccctacaaaccacttggtatcttaaagcaggatattcctatccataaagaaacagaagataatcgtggtcatgacactattggcatggttgtaatccataagacaggacgtatcgctgctggtacatctacaaatggtataaaattcaaaatacatggccgtgtaggagactcaccagtacctggagctggagcctatgctgacgatactgcaggggccgccgccgccactggggatggcgatatattgatgcgcttcctaccaagctaccaagctgtagaatacatgagaggaggagaagatccaaccatagcttgccaaaaagtgatttcaagaatccagaagtattttccagaattctttggggctgttatatgtgccaatgtgactggaagttatggtgctgcttgtaataaactttcaacatttactcagtttagtttcatggtttttaattctgaaaaaaatcagccaactgaggaaaaagtggactgcatctagtccatcttttctgtcagcatctgtatttaaagaagaaagaaacaaaggctgaacaggctgctcactagcatcatctagtgttcctcatg

SEQ ID NO: 18160 - DNA, 731 bp, Macaca Fascicularis
  misc_feature (1)...(731): n = A,T,C or G
agaaggacaggtggagggaagcgccccagacaaggaagctggcaaccagccccagagcagcgatgggaccgcctcatcttgagtctgaccttgtccaagaaggctggacgagagaccttctgtcccctcccagagggggaaccctggcactggcccagcagcctcttctctgagccccatgtcccagataaaccaggccagactgagaaggctccccagaggcctctgtggcctccactccgggaaagccctccgcccacacccacaggctccacattcccaccaccttctcaccgtnnnnnnnnnnnnnnnnnnnnnnnnnnnnnnnnnnnnnnnnnnnnnnnnnnnnnnnnnnnggacttgggcggggccctgccctacagtaagcagcccacgcaggaacgctcctcttgcgagcagcccgagcaggatccctgtcccaacaccaacacctcctctccagcccaatcgtccgggtcaagacctgcgtgtcccttttttagaaaacacttttaaactttttaaaaattttaaacgttttttcagcagagacggagagagctgacaatcaattcacattttttaagccattttagctaaactctcattgtgcactctgaggttccctcatggagctccacagatccatttttagggaagggattttggctcaaaatgatctgaccacctctaccctttccaccaggataagtgacacctagacccagaaa

SEQ ID NO: 18161 - DNA, 754 bp, Macaca Fascicularis
  misc_feature (1)...(754): n = A,T,C or G
ttttaaggacaagatcaggatagcnnnntgaagatagggtcatattaatatgatgataatgtgcaaccaaattatactttctgcagggagctatggggtacattcctnnnnnnnnnnnnnngttttccagtaggaaagtaataatggcaatagttctcaaatgggctaggccttttttatatcgaagcaataattccatttttaccctttgaaattttgtttaattttttgatttttgatgtttggtacaaatagaactatatatatttaggtaaaatagatctatcgtgtttaaaaccaaagaaatcagtggaatccttgcacaaaaaagtatgataaatattttttaaaaaaaacttaatacaaatgtaacttgttaatattgttttatgttttatnnnnnnnnnnnnnnnnnnnnnnnnntcaaactgtaataagctcatcaatttcatttctatgaaaatgtgctctattgtcacaggatgtttctgttgattttattcatttcctgggaattggnnnnnnnnnnnnnnnnnatgataacccagtagcaaaaacatttgtactgagtggtannnnnnnnngggactgaaaaaaatttaaaaaaaaaaaagattaaaaccattaaaaagaaattcatttttacgccgaatgaacatttgtatgattgcattgggaccagtcatttcctaagctacatatggccatcttgacagtgttttttcttttgtgtgtttaattattgtatgtaaat

SEQ ID NO: 18162 - DNA, 680 bp, Macaca Fascicularis
  misc_feature (1)...(680): n = A,T,C or G
aagaataatagaaaggagtaagtcgttaacttagtgtaagaagggtcttagagaacatctaaccttctagaatttcccaattctatgatagagtaatgacgccagtttccctgtcatgacaggcctctgttatggttcatatggaaatggttgaatcttgaaaaatctaaaattgttgcaaaacatattttgtataattttgttataagagttcttctctttttactttttgcgttgtgtagtcaaaaattaaggggctggtcaatacaaaaacttgtacacaaatatttatagcagaattattcataatggccaaaagttggatacaacccaaatgtctattaactaatgaatagataaatctggtatatccatacaatggactattattcagtcataaaaagaaataaaggaccaggcacannnnnnnnnnnnnnnnnnnnnnnnnnnnnnnnnnnnnnnnnnnnnnnnnnnnnnnnnnnnnnnnnnnnnnnnnnnnnnnnnnnnnnnnnnnnnnnnnnnnnnnnnnnnnnnnnnnacttcctgtacattagtggttgcctaaagctagaattagggatgatggatggggagtacaggattcatctaataggtacaggatttctctatggttcatgaaaatggtctaaacttattgtggtaatggtcacataacaata

SEQ ID NO: 18163 - DNA, 846 bp, Macaca Fascicularis
  misc_feature (1)...(846): n = A,T,C or G
agcatggaccaannnggccctggggattacagcattctcgaagnngctataggactcgannnnncagaaagccacagaggtgcaacttgaggctctactgctagcaagccaccagtgaggctgtgggtaaannnnnnnnnnnnncgggagattggagnctactttgtcatttatccaccaacagtgacaaaggaaaagnnnnnnnnnnnnnnnnnnnnnttaattcataaacatattactnnnnnnnnnnnnnnnnnnnnnnnnnnnnnncttcattgggtactcctgaactcagacatgttcctgtagaaagaattttaagttaggctttctatgcacctaccaagaatcaagagaatagattgnnnnnnnnnnnnnnnnggaaatccttcagcaattctaatccactttgggttttcagctgtttttacatctaaagcaatagactagaactgaattatcttctacactgtaaaatcacaattgtggaattacaggaattctggtgatattaaggtgaaataaaacatgcaaaaggccctattttaacagttgatgtgacagtaaattttaatagaacctgtaacttcattttggaagtgctcctccaccaaataagggctttcccccctattgtttaaggagccagatggattgaaagatgtggaaataggcagctgtagaacttgatcttccaagtaccccatgtatctttattgagcttaattataatactgtcaaattgccacgatctcactaaaggatttctatttgctgnnnnnnnnnnataaagccctaaatacatttttattctttctactgagtgcattgtctgtttcttgaaag

SEQ ID NO: 18164 - DNA, 732 bp, Macaca Fascicularis
  misc_feature (1)...(732): n = A,T,C or G
gattcaggaccggcctgaccgagacaatgacctacggttggcccagcacatcacctatgtgcaccagcacagccggcagcccccctcccagttcgaacctctggacatgaagctcatgaggcgttacatagccatgtgccgcgagaagcagcccacagtgccagagnnnnnnnnnnnnnnnatcacggcancgtatgtggagatgaggcgagaggcttgggctagtaaggatgccacctacacttccgctcggnnnnnnnnnnnnnnnctgcgcctttccactgctctggcgcgtctgcgaatggtggacgtggtggagaaggaagatgtgaatgaagccatcaggctaatggagatgtcaaaggactctcttctgggagacaaggggcagacagctagggctcagagaccagcagatgtggtatnnnnnnnnnnnnnnnnnnnnntctcaggggnnnnnnnnnnnnnnnnctctgaggcagagcagcgctgcatatctcgcggctttacacccgcccagttccaggtggctctggatgaatacgaggagctcnnnnnnnnnnnnnncaatgcttcccggacacggatcacttttgtctgattccagcgtgcttgcaagcctggggtcctcttgttccctgctggcccgccccttgggaaggggcagtgatgcccttgaggggaaggaggagcccctctttctcctatgctgcacttatccttctgctaata

SEQ ID NO: 18165 - DNA, 680 bp, Macaca Fascicularis
  misc_feature (1)...(680): n = A,T,C or G
ggctagagtgcagtggcatgatcccagctcactgcaacctctacctcccaggttcaaatgattctcctgcctcatactcccaagtagctgggattacaggcacgtgccaccacgcctggctaattttgtatatttagtagagatgggatttcaccatgttggccatgctggtcgtgaactcctgacctcaggtgttcagcctcccaaagtgttggggttacaggtgtgagccatcgtgcccggccaggacctttgtttcttatctacatattggaagatttggtcctaatgtcctttgaggcttctttagctctagattctctgacgtttcannctatatcagagctaacttcctcagtctcatctattacttatgctccagcccctgccaatttgcctcaagatgggggtttgaaaataactttacctgactcaaggagtgtctggagcacctcctagtctaagtctccgagctccaattcttacctaaannnnnnnnnnnnnnnnnccttgggctcagacagctctgggccttttgaccacaagccagcccctcggtcctctctgtggcatagtctactgtgccctaggaccgcaaggcggtttcctctaagtcttctaagatcaaaagaaatttggctccatccaagaagcctccagctnnnctactggcccctggc

SEQ ID NO: 18166 - DNA, 143 bp, Macaca Fascicularis
tttaaaggaagtggggcaaaaaaggtgcatttgataggaaggggacctgatatagtcagctgccttttaagaggtcttatctgttcagtgttaagtgatttaaaaaaataataacctgttttctgactagtttaaagatggat

SEQ ID NO: 18167 - DNA, 792 bp, Macaca Fascicularis
  misc_feature (1)...(792): n = A,T,C or G
accatggaatgatagtgagaagaaaactatttgcacacgacagatttctagatactttttgctgctagttttatgtaatatttattgaacattttgacaaatatttatttttgtaagcctaaaagtgattnnnnnnnnnnttaaagaaacttgaccaaaagacagtacaaaaacactggcacnnnnnnnnnnnnnnnnnnnnnnnnnnnnnaattatatatttcggggtagtgtgagcttttaatgttaagtcatattaaactcttaagtcaaattaagcagacccggcgttggcagtgtagccataactttctgatgttagtaaaaacaaaattggcgacttgaaattaaatcatgccaaggttttgatacacttgtcttaagatattaatgaaacacttcannnnnnnnnnnnnnnnnnnnnnnnnnnnnnnnnnnttgttgtgtgaattttgtttagttgtgtgttttttttttgtttgttttttttnnnnnnnnntgtctgnnnnnnnnnnntcctcaaacatgtggttatctttnnnnnnnnnnnnnnnnnagnnnnnnnnnnnnnnnnnnnnnnnnnnnnnnnnnnnnnnnnnnnnnnnnnnnnnnnnnnnnnnnnnnnnnnnnnnnnnnnnnnnnnnnnnnnnnnnnnnnnnnnnnnnnnnnnnnnnnnnnnagtcactgtagctttagtaattgcttattgtattagtttagatgctagcactgcatgtgctgtgcatattctgattttattaaaataaaaagttgaactgcacagtctccttt

SEQ ID NO: 18168 - DNA, 753 bp, Macaca Fascicularis
  misc_feature (1)...(753): n = A,T,C or G
cgtgtgcatnnnnnannnnnnnntgctgaaggatcagaggaagtgcttcagcatcgacaaccccggctatgagcccgaagttgtggcagtgcaccccgcggggacacggtggcggtnnnnnnnnnnnnnnnnnnnnnnnnnnnnnnnnnccatcctgggcaccacactgaaggatgagggcaagctcctggaggcgaagggccccgtgaccgatgtggcgtnnnnnnnnnnnnnnnnnnnnnnnnnnnnnnnnnnnnnnnnnnnnnnnntcacagtgttcagcgttgctgacggctactcggagaacaatnnnnnnnnnnnnnnnnnnnnnnaaatcgtctgcctggcnnnnnnnnnagacaatgaacactttgcctccggtggcatggacatgatggtgtatgtttggaccttgagtgatccgnnnnnnnnnnnnnnnnnnnnnnnnnnnnnnnnnnnnnnnnnnntcagcagcctggcctggctggacgagcacacactggtcacaacctcccatgacgcctctgtcaaggagtggacaatcacctactgaggagccccacccccgcctctggatggaccgaatcagggactagcgtttaactgcagcggaacatgtcctttctctatttctgtgacgcgcccccatgcccccgccccactgcaagaggcaggagggccccgtcatgaccctcgtctctgcagggtgtctgtacacgttcttctgaaagctttagacaggaacagttgcac

SEQ ID NO: 18169 - DNA, 720 bp, Macaca Fascicularis
  misc_feature (1)...(720): n = A,T,C or G
agaccgacgctggccccgcggcgaccgagggcgccgagcagcccccggacctgcactgcgtgctggtgacgannnnnnnnnnnnnnnnnnnnnnnnnnnnnnnnnnaagtcaacttatttgtttttgccgggaaagtcgctacatggnnnnnnnnnnnnnnnnnnttannnnnnnnnnnnnnnnnnngcatctgaatgaaaataactgaaccaaattgcactgaagtttttgaaatacctttgtagttactcaagcagttactccctacactgatgcaaggattacagaaactgatgtcaaggggctgagtgagttcaactacatgttctgggggcccggagatagatgannnnnnnnnnggaaagaggtgaaaatgaagaaggaagctgtgttgaaacagaaaaataagtcaaaaggaacaaaaattacaaagaaccatgcaggaaggaaaactatgtattaatttagaatggttgagttacattaaaataaaccaaatctgttaaagtttaaaagtatagccatagtttgggtatttttggtttatatgccctcaagtaaaagaaaagcctaaagggttaatcatatttgaaaaccatattttattgtattttgatgagatattaaattctcaaagttttattataaattctactaagttattttatgacatgaaaagttatttatgctataaattttttgaaacacaatacctacaa

SEQ ID NO: 18170 - DNA, 689 bp, Macaca Fascicularis
  misc_feature (1)...(689): n = A,T,C or G
agtgtgcaacaccaccaaatgcaacgagggcccaatcctggagcttgaaaatctgccacagaatggccaccagtgttacnnnnnnnnggggaacagcacccatggatgctcctctgaagagactttcctcnnnnnnnnnnnnnnnnnnnnnnnnnaatgtctggtagccaccggcacttacgaaccgaaaaaccaaagctatatggtaagaggctgtgtaactgcctcaatgtgccaacgtgcnnnnnnnnnnnnnnnnnnnnnnnnnnnnnnnnnnnnnnnnnnnnnnnnnnnnnnnnnnnnnnntaaccacccagacctggatatccagtaccgcaagggggctgctccccagcctggccctgcccatctcagcctcaccatcactctgttaatgactgccagactgtggnnnnnnnnnnnnnnnnnnnnnnnnnnnnnnnnnncccctctctgccctggctggatccaggggaccccnnnnnnnnnnnnnnnnnnnnnnnnnnnnnnnnnnnnnnnnnnnnnnnnnncagtgtnnnnnnnnnnnnnnnnnnnnnnnnnnnnnnnnnnnnnnnnnnnnnnnnnnnnnnnnnnnnnnnnnnnnnnnnnnnnnnnnnnnnnnnnnnnnngccaatgggagagctcttgttattattaatattgttgccgctgttgtgttgtccttgtta

SEQ ID NO: 18171 - DNA, 681 bp, Macaca Fascicularis
  misc_feature (1)...(681): n = A,T,C or G
cgcccacctgnnnnntctccctggggagctggtcccactgggacacacaaacacccaaacagaaaaatacaaatacacgtaccccaggaaggggtccctcaagtctctgctatttacagaagtttcttcagtaggcagatgaagagggtgtcggggcagaggggctcggctggaggcatttcccataagactgagccctcgcataggggttttgagtttgtagtgctgagcctgcatctgtgccgccagccccctgcactgagggagcaagttgcccannnnnnnnnnnnnnnnnnnnnnaagcagatggcatgctcagtgccaggctggtagctgggcctgccggggtccccaggggctgtggctgctgtcacggcacctcactccctcagttcgtgccagcttctctgacactaggggtgggggcccttccaggaggaagcccccttgggtcccccacacagggctctccatgatgggaaccagaggttagtggcttcagaggcccagctgacacccttcacagcctaagggctgtcttaaagtgcctccccctatatccccctcccagggcagcccctgcccagcacaaaaccccacgaccctggctctgcacgcctggggcagggacttctgagtttaggatctgtattttctaagtccccaagttctcctgactct

SEQ ID NO: 18172 - DNA, 747 bp, Macaca Fascicularis
  misc_feature (1)...(747): n = A,T,C or G
gaagtgtccaccaagccatggtggacgtgaatgaggagggcactgaagcagccgctggnnnnnnnnnnnnnnnnnnngggagaaccggtcatggaggcccacagtnnnnnncagatcatccttttcttttccttattatgcataaaataaccaagtgcattttattttttggcaaattttcctcaccctaaaaccaaaacgtgctatttctgcaaaagatttttgtagatgagctgtgtgcctcagaattgctatttcaaattgccaaaaatttagagatgttttctacgtatnnnnnnnnnnnnnnnnnnnttctgctacacactaaataaaaacatggaaataattagacaattgtctattataacatgacaaccccattaatcatttggtcttctaaaatgggatgaagcccttttagattttccttactctcagttatttttataacattaacttttactttgttatttattattttatataatggtgagtttttaaattattgctcactgtctattgaacgtagctaataaagttatagaagcagatgatcagttaatttcctatctaaannnnnnnnnnnnnnnnnnnnnnnnnnnnnnnnaagtaggtatccctccatgtctttctatagaataaatatctagaaaaaacattaaacaataggcaaatatatgttatatgcatttctagcaatacataccacatacatatgtcctgtatcttatattcaattgcaagtat

SEQ ID NO: 18173 - DNA, 720 bp, Macaca Fascicularis
  misc_feature (1)...(720): n = A,T,C or G
gaggtagatgcagcctccgtttacacgttgcctgctggagctgacttccttatgtgtacttccgttgcagaaggatattattctcaccgggaaactgtgaacggctcatggtacattcaggatttgtgtgagatgttgggaaaatatggctcctccttagagttcacagaactcctcacactggtgaacaggaaagtttctcagcgccgagtggacttttgcaaagacccaagtgcgattggaaagaagcaggttccctgctttgcctcaatgctaactaaaaagctgcatttctttccaaaatctaattaacaggggctatcttattttacaatttaatctattgaaaatgtctttctcggccaggcgtggtagcgcacannnnnnnnnnnnnnnnnnnnnnnnnnnnnnnnnnnnnnnnnnnnnnnnnnnnnnnnnnnnnnnnnnnnnnnnnnnnnnnnnnnnnnnnnnnnnnnnnnnnnnnnnnnnnnnnnnnnnnnnnnnnnnnnnnnnnnnnnnnnnnnnnnnnnncagctacttgggaggctgaggcaggagaatcacttgaacccaggagggggaggttgtggtgagccgagattgcaccattgcgctccagcctgggcaataagagtgagtgaaactccgtctcaaaaaaaagaaaatgtctttctcttctttttatataaatatcgttaggctgaagcattatggtccaat

SEQ ID NO: 18174 - DNA, 700 bp, Macaca Fascicularis
  misc_feature (1)...(700): n = A,T,C or G
tgcccctacagctgtcacttccaaatgttcctatagcataaatggtgttacagacacgggggtgcattcttggtttctgagcagagtgttcatactggtntcctggtctctagggtactggggatgtactttgaaatcaccgaacaggcttgcaattaagatcaataagactgcagcaccatttcaatttactttccatcttacacagtagtttttgtgtttttaaattcgtttgggtggttatgtttgcatgcttatgcacacatttgaaaattaattatagctgtactacctgatgtttttccttggggatgacggccttgttactttttaaattctcatgcttgaattatgttttctaatgatctttcacatctccctttaagttttttgctgcagcaatttgagagaatacttttgattaaatgattctgatggtgggcaccaatctacaactgtgtcattaactgaagatacatgttttaatcttgttgggaataagctcacccactttctccttggtaaagcatttacttaacaaaataataccctgagaatgtaaggtctctaagtcattactaacaaagagcaaaaataatatctgcagtattgtttttcctattgattttaaaagtcagtttagagtacaaactgtatattagaatttgcttgtaaaatgaattctaaaaaacagatgtaa

SEQ ID NO: 18175 - DNA, 724 bp, Macaca Fascicularis
  misc_feature (1)...(724): n = A,T,C or G
ccagtcctttgaatntncacgggaaacactgnnngnnnnnnnnnnnnnnnnagaagaaacacatttggtttggagagtccatggatggtggnnntcagtttagctatggcaatccnnnnnnnnnnnnnnnnnnnnnnnnnnnnnnnnnnnnnnnnnntcgacttctctccnnnnnnnnnnnnnagaacatcacgtatcactgcaaaaatagcattgcgtacatggatcaagccagtggaaatgtaaagaaggccctgaagctgatggggtcaaatgaaggtgaattcaaggctgaaggaaatagcaaattcacctacacagttgtggaggatggttgcacgaaacacactggggaatggagcaaaacagtctttgaatatcgaacacgcaaggctgtgagactacctattgtagatattgcaccctatgacattggtggtcctgatcaagaatttggtgtggacgttggccctgtttgcttttttataaaccaaactgtatctgaaatcccaacaaaaaaaaattaactccatatgtgttctctcttgttttaatcttgtcaaccagtacaagtgaccaaccaaaattccnnnttattttattttccaaaatgtttgggaaggagtataatttgacaaagaaaatctgatactttttttttttttttttgctgttccannnnaatacaattcaaatgctatatgacctatgagacaccaagaca

SEQ ID NO: 18176 - DNA, 523 bp, Macaca Fascicularis
  misc_feature (1)...(523): n = A,T,C or G
atgatctgcagtgctcatgnnnnnncaaatatagttatgcttggaaagaacttaaagagcagctgggcgaggagattgattccaaagtgaagggaatggtttttctcaaaggaaaactgggtgtttgctttgatgtacctaccgcatcagtaacagaaatacaggagannnnnnnnnnnnnnnnnnnnnngcagctctctgtggccacagagcaaccagagctggaaggaccacgggaaggatatggaggcttcaggggtcaacgggaaggcagtcgagnnnnnnnnnnnnnnngggatggaaacagaagattcagaggacagcgggaaggcagtagaggcccgagaggacagcgatcaggaggtggcaacaaaagtaacagatcccaaaacaaaggccagaagcggagtttcannnnnnnnnnnnnnnnnnnnnnnnnnnnnnnnnnnnnnnnnnnnnnnntgtttggcaatatannnnnnnnnnnnnnntttcttacaaagttaaaagcacattgtgggcc

SEQ ID NO: 18177 - DNA, 741 bp, Macaca Fascicularis
  misc_feature (1)...(741): n = A,T,C or G
ccatgaaacgggtgcatttgcacatgccagaaggggaacgtcaactggtataataagcaaaatcacatccaaatttgttcgcagggatccaagtgaaggcgaagccagtggcagaaccgacacctcaagaagtacatcaggggaaccaaaagaaagagacaaggaagagggtaaagattctaagccgcgttctttgcggttcacatggagtatgaagaccactagttcaatggaccctaatgacatgatgagagaaatccgaaaagtgttagatgcgaataactgtgattatgagcaaaaagagagatttttgcttttctgtgtccatggagatgctagacaggatagcctcgtgcagtgggagatggaagtctgcaagttgccacgactgtcacttaatggggtccgcttcaagcgaatatccgggacatctattgcctttaagaacattgcatcaaaaatagcaaatgagcttaagctgtaaagaactccaaatttacaggttcagggaagatacatacatatatgaggtacagtttttgaatgtactggtaatgcctaatgtggtctgcctgtgaatctccccatgtagaatttgcccttaatgcaataaggttatacatagttatgaactgtaaaattaaagtcagtatgaactataataaatatctgtagcttaaaaagtaggttcacatgtacaggtaagtatattgtgtatttctgttcanttcgtcaagagtg

SEQ ID NO: 18178 - DNA, 756 bp, Macaca Fascicularis
  misc_feature (1)...(756): n = A,T,C or G
tttatnnctcacacttcacaccagtgcattacactaacttgttcactggattgtctgggatgacttgggctcatatccacaatacttggtataaggtagtagannnnnnnnnnnnnnnnnnnnnnnnnnnnnnnnnnnnnnnnnnnnnnnnnnnnnnnnnnnnnnnnnnnnnnnnnnnnnnnnnnnnnnnnnncacagtgtgtaaaatatatnnnnnnnnnnnnnnnnnnnnnnnnnntctttatttcttctgtaaaacagtaggtaacttttcttaggtttcactctttttagtgtactagatccagaaacttagtgtaatgccctgctttatatttctttgacttaacannnnnnnnnnnnnnnnnnnnnnnnnnnnnnnnnnnnnnnnnnntgtttcatagcaacactggataatggctttgtgaaattaaaagaatttttgtagcgactgtaaacagaaatgccaaattatcaaaggttaattgttgctgcttcaaaaataagtataaaattaatgtgtaaggaagcccattctttcatgttaaatacttggggtgggggggagaaagggaaccttttcttaaaatgaaaataattactgctattttaaaatttcttgatcattgaatgtgagacccttctaacatgatttgagaagctgtacaagtataggcagagttattttcctgtttacatttttttttgtttgttttggggaaaaattnngtaggtgtctaattactgttacttcat

SEQ ID NO: 18179 - DNA, 710 bp, Macaca Fascicularis
  misc_feature (1)...(710): n = A,T,C or G
cccatggaacaagggcattttgccagcccggaccagaattcaatgcttnnncagcttnnnagcaatccaggcatggcaaacctccatggtgcaagcgccacagacctgggactcagcaccgataactcagacttgaattcaaacctctcacagagtacactagacatacactagagacaccttgtagtattttgggagcaaaaattattttctcttaagactttttgtactgaaaacaatttttttgaatctttcatagcctaaaagacaattttccttggaacatataagaactgtgcagtagccgtttgtggtttaaagcaaacatgcaagatgaaccttagggatgatagaatacaaagaatatatttttgttatggctggttaccaccagccttttttttccccttgtgtgtgtggttcaagtgtgcacagggaggaggctgaggcctgtgaagccaaacaatatgctcctgccttgcacctccaataggttttattattttttttaaattaatgaaaatatgtaatattaatagttatcattaccctacccccactgacacannatctacacacacacacacacacacactttatataaaactcgaaaatagagagcaaaaaccctcaagtgttgtaaatcatgcaattaaagttgattacttataaatatgaactttggatcactgtatagacatgttaaattt

SEQ ID NO: 18180 - DNA, 753 bp, Macaca Fascicularis
  misc_feature (1)...(753): n = A,T,C or G
gtcaatcccaacaaagacatactccaatgaggtggtgacactgtggtaccggccccctgacatcctgctcgggtccacggactactccactcagattgacatgtggggtgtgggctgcatcttctatgagatggccacaggccggcccctcttcccgggctccacggtggaggaacagctacacttcatcttccgcatcttaggaaccccaactgaggagacgtggccaggcatcctgtccaacgaggagttcaagacatacaactaccccaagtaccgagccgaggcccttttgagccatgcaccccgacttgatagcgatggggccgacctcctcaccannnnnnnnnnnnnnnnnggtcgaaatcggatctccgcagaagatgccatgaaacatccattcttccttagtttgggggagcggatccacaaacttcctgacactacttccatatttgcactaaaggagattcagctacaaaaggaggccagccttcggtcttcgtcgatgcctgactcaggcaggccagctttccgcgtggtggacaccgaattctaagccacagaccgaggccccagcaggcagcggctggagggatgccacacccctcacagggcagcccccaactacatcttccctgcttactctgcctacctgcctgagccatgttcacctgcccacttgtcccttgctgcctgtccaaacacccgaccattggcctgtcaacccacccattggcctgtctgctgggt

SEQ ID NO: 18181 - DNA, 1190 bp, Macaca Fascicularis
  misc_feature (1)...(1190): n = A,T,C or G
agnnnnnnnnnnnnnnnnnacaccaactggttcatactggnnnnnagccnnttcagtgcacgttcgaaggctgtgggaaacgcttttcactggacttcaatttgcgcacacatgtgcgaatccataccggagacaggccctatgtgtgccccttcgatggttgtaataagaagtttgctcagtcaactaacctgaaatctcacatcttaacacatgctaaggccaaaaacaaccagtgaaaagaagagagaagacccttctcgaccacgggaagcatcttccagaagtgtgattgggaataaatatgcctctcctttgtatattatttctaggaagaattttaaaaatgaatcctacacacctaagggacatgttttgataaagtagtaaaaattaaaaaaaaaaaaaactttactaagatgacattgctaagatgctctatcttgctctgtaatctcgtttcaaaaacacagtgtttttgtaaagtgtggtcccaacaggaggacaattcatgaacttcgcatcaaaagacaattctttatacaacagtgctaaaaatgggacttcttttcacattcttataaatatgaagctcacctgttgcttacaatttttttaattttgtattttccaagtgtgcatattgtacacttttttggggatatgcttagtaatgctatgtgtgatttttctggaggttgataactttgcttgcagtagattttctttaaaagaatgggcagttacatgcatacttcaaaagtattttcctgtaaaaaaaaaaaaaagttatataggttttgtttgctatcttaattttggttgtattctttgatgttaacacattttgtataattgtatcgtatagctgtattgaatcatgtagtatcaaatattagatgtgatttaatagtgttaatcaatttaaacccattttagtcactttttttttccaaaaaatactgccagatgctgatgttcagtgtaatttctttgnnnnnnnnnnnnnnnnnagtggtgctcagttgtagaatgtattgtaccttttaacacctgatgtgtacatcccatgtaacagaaagggcaacaataaaatagcaatcctaaagcaagaatatggcagaacaagatctgtaagcacagtcttattttcttttgttgtccagaatacttataattcttgagcctcc

SEQ ID NO: 18182 - DNA, 716 bp, Macaca Fascicularis
  misc_feature (1)...(716): n = A,T,C or G
gctgctttaaaagacagacggatggaaaacctagttgcatatgctcggaaagtcgaaggagacatgtatgaatctgcaaacaatcgagcggagtactaccaccttctagctgagaaaatctataagatccagaaggaactagaagaaaaacgaaggactagactacagaaacagaacatgctaccaaannnnnnnnnnnnnnntccagtttccatgaatccagggcctaacatgggacagccgcaaccaggaatgacttctaatggtcctctgcctgacccaactatgatccgtggcagtgtgccaaaccagatgatgcctcggataactccacaatctggtttgaatcaatttggccagatgagcatggcccagccccctatcgtaccccggcaaaccgctcctcttcaacaccatggacnnnnnnnnnnnnnnnnagcgctcaacctgcctatgggctatgggcctcgtatgcaacagccttccaaccagagccagttccttcctcagactcagttcccatcacagggaatgaatgtaacaaatatgcctttggctccgtccagtggtcaagctccagtgtctcaagcacaaatgtctagttcttcctgcccggtgaactctcctataatgcctccagggtctcaggggagccacattcactgtccccagctnnnnnnnnnnnnnntgcatcagaattcacccccacctcaaac

SEQ ID NO: 18183 - DNA, 717 bp, Macaca Fascicularis
  misc_feature (1)...(717): n = A,T,C or G
ctcccacagggatgaccnnnnnnnngttattgggagatgccnnncggacccttacaaacactcgttgccatcccnnnnnnnnnnnnnnnnntatcttcggtcgtccttgaggnnnnnnnnnnnnnnnnnnnnnnnnnnnnntcggggccacaannnnnnnnnnnnnnnnnnnnnnnnnnnnnnnnatgctgcaaataagaataatatgtactctacccccagggttttaaattcctgcagcaatagnnnnnnnnnnnagaaaatgcctagtatggaatctgatgtttaaaaatcttccattaatgttttatctatagggaaacatacgtaatggccaacgttctggagggtaaatgttggacgtccaatagtgccctgctaagagaaagaagatgtagggaggtatttttttgttgttgttggctcttttgcacatggcttcatgccataattttccactcaaggaatcttgtgaggtgtgnnnnnnnnnnnnnnnnnnnnnnnccaaaaataactaactacataagggcaagtctccgggacatgcctactgggtatgatggcaataatgatgcattggatgctaatggtgatgttatgatttcctatattccaaattccattaaggtcagtccaccatgtaattttctcatcagaaatgcctaatggtttctctaattcagaataagcaatatggtatgcatgtaaacctgacac

SEQ ID NO: 18184 - DNA, 746 bp, Macaca Fascicularis
  misc_feature (1)...(746): n = A,T,C or G
tnaatccgagtcagtagtgtnntcagccacaatatttcacttaccaaaatatncctgttacctcaaggtatccttgtnnnnnnnnnnngaaaactaaattttaagtataaagtctagaccatagagtgctttggtgggagtattttgattatatacctcctgcctatcagaagcaggcagctaatattgtgaactgagtatttttgtcaaaagtcgcagggaagagactacagaagaatgagaaaggtcaaatggacctagtgtggctgaccacatggatcttgtctcttggaggtctgttgtagaagagaaaacacatagaggtnnnnnnnnnnnnnnnnnnnnnnnnnnnnnnnnnnnnnnnnnaagcaacatctattaagaccaatgcaataccttttcatcttcaacaaatgttgtttcgtctgtttttgatccttggcattgtcaaaaacttagnnnnnnnnccagtgtatatttttccttatttttcccttttagctatctgctaaaatgagtaaatgccacaactgtacttttccaaagaaacagaactattgacaatttatagcctgtcatnnnnnnnnnnnnnnnnnnnnnnnnnnnnnttttcaacagctatgggaaaaactaatgtaaaacagaaacattgtacaatattagtgttttttaaaagaaactgttagtgcattattgagtatactaaatatctgtgaaagattaaatgtattagttctaatcttact

SEQ ID NO: 18185 - DNA, 732 bp, Macaca Fascicularis
  misc_feature (1)...(732): n = A,T,C or G
ggtagcacaggcctgggcagcaagcgcagcctggaggaagagggtgctgcccacagtgggaagagactgcgggccgtgtctccctttcttaaggaggcagatgccaagaaatgtggggccaaacctgcggggtccggcctggtctcctgccttctgggcccagccctggggcctgtgcccccagaggcctacaggggcaccatgnnnnnnnnnnnnnnnnacttcactggcaccccaggccccttgaagggccaggctgcactccccttcagccccctnnnnnnnnnnnnnnnnnnnnnnnnnnnnnnnnnnnnnnnnnnnnnnnnnnnnnnnnccgctggcttgatgcacttcccgcccacgtccttcgacagtgctctccgccacagactttgcccggcctcatctgcctggcatgcaccaccagtcacaacctatgcagcgccccacttcttccacctcaacaccaagctgtaggccagcccatgtggagtcgaccggggccgacagcgggcaggtgctgctgctagagggctctggactagtgcctgttacccaggacacccaggccatgcccctggttgggcagcctggcacaagtgaaggaggtggtgggaaaactgggtgtatctcaagnnnnnnnnnngagcccagagcagaggacccagttgttacaaggccctgggagagggtgggcagctcccactgccccagagcagcgctcagagcacc

SEQ ID NO: 18186 - DNA, 740 bp, Macaca Fascicularis
  misc_feature (1)...(740): n = A,T,C or G
atggtgttgtcacaaactgtggtaaatccaatcaatttaaatgtttactatagaccaaaaggagagattattaaatcgtttaatgtttatacagagtcattataggaagttcttttttgtacagtatttttcagatataaatactgacaatgtattttggaagacatatattatatatagaaaagaggagaggaaaactattccatgttttaaaattatatagcaaagatatatattcaccaatgttgtacagagaagaagcgcttgggggtttttgaagtctttaatattttaagccctatcactgacacatcagcacattttctgctttaaattaaaattgtatgacagtatcgaggcttgtgatgacgaatcctgctctcaaatacacaaggagctttcttgtttcttattaggcctcagaaagaagtcagttaacgtcacccaaaagcacaaaatggattttagtcaaatatttattggatgatacagtgttttttaggaaaagcatctgccacaaaaatgttcacttcgaaattctgagttcctgnnnnnnnnnnnnnnnnnnnnnnnnnnnnacagttctgttctaccctgcgggcccgcacgnnnnnnnnnnnnnnnnnnnnnnnnnnntgtttggtttataatttgatagatgtttgactttaaagacgattgttcttttgtttcattaagttgtaaaatgtcaagaaattctgctgttacgacaaagaaac

SEQ ID NO: 18187 - DNA, 708 bp, Macaca Fascicularis
  misc_feature (1)...(708): n = A,T,C or G
tttggggacnttgaaaaaagaattcctcgtgaagagatgttacaaatgcaagatattgtactaaatgaagttaaaaaagtggattctgaatacattgnnnnnnnnnnnnnnnnnnnnnnnnnnnnnnnngagtccagtggtgacatggatgttctcctgacccatcccagcttcacttcggaatcaaccaaacagccaaaactgttannnnnnnnnnnngagcagttacagaaggttcgttttatcacagataccctgtcgaagggtgagacaaagttcatgggtgtttgccagcttcccagtaaaaatgatgaaaaagaatatccacacagaagaattgatatcaggnnnnnnnnnnnnnnnnnnnnnnnnnnnnnnnnnnnnnnnnnnnnnnnnnnnnnnnnnnncaataagaatatgagggctcatgccctagaaaagggtttcacaatcaatgagtacaccatccgtcccttgggagtcactggagttgctggagaacccctgccagtggatagtgagaaagannnnnnnnnnnnnnnnnnnnggaaataccgagaacccaaggaccggagtgaatgaggcctgtgtcctcctctggcagacacagcacaataggagtcttaatttatttcttaacctttgctatgtaagggtctttagtgtttttaaatgattgtttcttcttcatgctttcgcttgcaatgt

SEQ ID NO: 18188 - DNA, 705 bp, Macaca Fascicularis
cccgcgaagaggagtgccacttctacgcgggtggacaagtgtacccgggagaggcatcccgggtatcggtcgccgaccactccctgcacctaagcaaagccaagatttccaagccagcgccctactgggaaggaacagctgtgatcgatggagaatttaaggagctgaagttaactgattatcgtgggaaatacttggtttttttcttctacccacttgatttcacatttgtgtgtccaactgaaattatcgcttttggtgatagacttgaagaattcagatctataaatactgaagtggtagcatgctctgttgattcacagtttacccatttggcctggattaatacccctcgaagacaaggaggacttgggccaataaggattccacttctttcagatttgacccatcagatctcaaaggactatggtgtatacctagaggactcaggccacactcttagaggtctcttcattattgatgacaaaggaatcctaagacaaattactctgaatgatcttcctgtgggtagatcagtggatgagacactacgtttggttcaagcattccagtacactgacaaacatggagaagtctgccctgctggctggaaacctggtagtgaaactataatcccagatccagctggaaagctgaagtatttcgataaactgaattgagaaatacttcttcacagttatgatg

SEQ ID NO: 18189 - DNA, 944 bp, Macaca Fascicularis
  misc_feature (1)...(944): n = A,T,C or G
agaagcagncnatgacagctccccttcctgggattcaccctcgtcctcttcctgctccccttcctggggtgtagcctaaaaggacctgatgtcctcacaccattgaaaccactagttctgtccccccaggagacctggttgtgtgtgtgtgagtggttgaccttcctccatcccctggtccttcccttcccttcccgaggcacagagagacagggcaggatccacgtgcccactgtggaggcagagaaaagaaagtgttttatatacggtacttatttaatatccctttttaattagaaattaaaacagttaatttaattaaagagtagggtttttttcagtattcttggttaatatttaatttcaactatttatgagatgtatcttttgctctctctcgctctcttatttgtaccggtttttgtatataaaattcatgtttccaatctctctctccctgatcggtgacagtcactagcttatcttgaacagatatttaattttgctaacacttagctctgccctccccgttcccctggctccccagcacacattcctttgaaataaggtttcaatatacatctacatactatatatatatttggcaacttgtatttgtgtgtatatatatatatatatgtttatgtatatatgtgattctgataaaatagacattgctattctgttttttatatgtaaaaacaaaacaagaaaaaatagagaattctacatactaaatctctctccttttttaattttaatatttgttatcatttatttattggtgctactgtttatccgtaataattgtggggaaaagatattaacatcacgtctttgtctctagtgcagttttttgagatattccgtagtacatatttatttttaaacaacaacaaagaaatacagatatatcttaaaaaaaaaaggattttgtataaaga

SEQ ID NO: 18190 - DNA, 755 bp, Macaca Fascicularis
  misc_feature (1)...(755): n = A,T,C or G
gagatgtgtagaaagaagctaaaaaagcaagcaaannnnnnnnnnnnnnnnnnnnnnnnnnnnnnnnnnnnnaggaagctctgnngnnncagaaaaggnnnaggtcgcagcagagaaggcaattcaacaagcagatgaagacattcaaggaacccagaacctgctaacttcgattgagtctgaaactgcagcttctgaggaaaccttgttcaacgcgtcccagcgnnnnnnnnngttagagaggaatgtggaggaacttaagcggaaagctgcccaaaactctggggaggcagaatatattgaaaaagtagtatatactgtgaagcaaagcgcagaagatgttaagaagactttagatggtgaacttgatgaaaaatataaaaaagtagaaaatttaattgccaaaaaaactgaggagtcagctgatgccagaaggaaagctgaaatgctacaaaatgannnnnnnnnnnnnnnnnnnnnnncaaacagcaagctgcaactgctcaaagatttagaaagaaaatatgaagacaatcaaaaatacttagaagataaagctcaagaattannnnnnnnngaagnnnnnnnnnnnnnnnnnnnnnnnnnnnnnnnnnnnnnnnnnnnnnnttatagcacnnnnnnnnnnnnnaggagaatataaaacggctgaggtgaccaaggtaaaacagctacattttaaaaactgacttaatgatcttcaaaataaaactcatcacctatttaattttttaatc

SEQ ID NO: 18191 - DNA, 763 bp, Macaca Fascicularis
gagagtttaccaaggcacaggagacatcaggagaggacatttccaaattttacctgccaaactgcaacaagaatggattttatcacagcagacagtgtgagacatccctggctggagaggagaggctctgctggtgcgtctatccttggaatgggaagaggatcccagggtctccagagatcaggggagaccccaactgccagacgtattttaatgtacaaaactgaaaacagatgaaataatgttctgtcacgcgaaatatttaagtatatagtatatttatactgtagaacacacacacttatatatatgtatatgtatatatatataactactttttatactccatatataacttgatatataaagctgttagtttatttattcactgtaagtttattttttctacacagtaaaaacttgtactatgttaataacttgtactatgtcaacttgtatatcatgaaacacttctcatcatatcgtatgtaagtaattgcatttctgttcttccaaagctcctgcgtctgtttttaaagatcatggaaaaatactgcctagaaaatgcaaaatgaaataagagggagtagtttttcaggtagtttaaaggaggacagttaacttgtatattccatcattcacatttgatatacatgtgtaggaaaagttaaagtgttgattatgtaatcaaagctacctgtggtgatgttgccaccggttaaaatgtacactgggtatgttgttaaacacgtgtctataatga

SEQ ID NO: 18192 - DNA, 989 bp, Macaca Fascicularis
  misc_feature (1)...(989): n = A,T,C or G
gcacgggggccagcagaagnnnnnnnacnnnncannntaccagtnnnaccagggccagcagcagtcttacaaccagagcccnnnnnnnnnnnnnnnnnnnnnncagggcaagcagaaaggctataaccatggacaaggcagctactcttactcgaactcttacaactctcccgggggcgggggcggatctgactacaactacgagagcaaattcaactacagtggtagtggaggccgaagcagcgggaacagctacggctcaggcggggcatcctacaacccagggtcacacgggggctacggcggaggttctgggggcggctcctcataccaaggcaaacaaggaggctactcacagtcgaactacaactccccggggtccggccagaactacagtggccctcccagctcctaccagtcctcacaaggcggctatggcagaaacgcagaccacagcatgaactaccagtacagataagcccccgcggggcggagatttctaccttctgcacttactccccatcagaagatcgagttttatgcatcacagttaacatgtcagctggccctccaggcccccgcccccaccccgtccacgttgctgtgtcgtgaggtgcagcgggtcaccctgtggcccgtcctgtgacccatatttagccgtgtttgggactccgtgtcttcaatggtttgttagttgccattacaactttgtctgggtagaatttttgagttcttgcagttcagtatccctctgtctattcacacttggtgttagtggtaactcagtttgtctttaaatagttacggaagggggatacgtcatttgttaatgcttttgtgaagtgagttaaacgagctttctgtattttaatgctttagtgtttcagttttataagtgaagattttattttaaaaaccagtgggaaagagtggggggtttctttttatgtctgggtcattcaggcagtacatctgaattaagctgaatg

SEQ ID NO: 18193 - DNA, 769 bp, Macaca Fascicularis
  misc_feature (1)...(769): n = A,T,C or G
tgagcagcnncagnngtgcagtntnnnggcatacgctggaagannnnnccaatgaagannnnnnnnnnnnnnngaggttngtnnnnnnnnnnnnnnnnctaccnnnnnnnnnnnnnnnnnnnnnnnnnnnnnnnnnaatcatgaaggttgataggccttacgacagtctgcctacctcacagacctgcttcttccagctgaggctgcccccgtactccannnnnnnnnnnnnnnccgagcgcctgcgctatgnnnnnnnnnnnnnccgctcgatcgacatggacaactacatgctctcaagaaacgtggacaacgccgagggctccgacactgactactgaccgcgcgggtgctctcaccctcccctctgtccctcaataatgctcacttctgatttgatgttgatatacttttatggtaactacgtagatgttttaggaacataaaccaacattataaacagtggccacatttagttattctaaatgtaacaaagaaattagatgtttttatttttctgtgattgtacaaaaacaacaaaaacaaagtgctctcagtcaggtttttccctccatatttttggtcacttttgataagtttgcatgaaaccattttggtgcatttttagttgggaatggtacctttttgtaaacccacccagtgaacatgaaattgtacattgtgtataattgttcattagaaaggacagttttacatgaatattcatatatttattttgttttaatttgaattgcctgttcagggttcc

SEQ ID NO: 18194 - DNA, 768 bp, Macaca Fascicularis
  misc_feature (1)...(768): n = A,T,C or G
gcaggaaggccaatgaaagttggtcatgttacnnnnnnnnnnnnnnnttcgagtgctagttcatttttggacagtnnnnnnnnnnnnnnnnntggaattgatttnnnnnnnnnnnnnnntcttcagttaatgnnnnnnnnnnnnnnnggtnnnnnnnnnnnnnnnnnnnnnnnnnnnnngcaagctctacagatgagtggctctttggcatttggtgctgtggcagaattctcttttgttatagatttgcaaacaagactttcccagnnnnnnnnnnnnnnnnnnnnnnnnncagctgcctctgttcagccacttgcaacacaatgttttcaactctctaacatgtttaaccctcaaacagaagaagaagttggatgggatacagagattaaggatgatgtgattgaagaatgtaataaacatggaggagttattcatatttatgttgacaaaaattcagctcagnnnnnnnnnnnngtgaagtgcccatcaattgctgcagctattgctgctgtcaatgcattgcatggcaggtggtttgctggtaaaatgataacagcagcgtatgtacctcttccaacttaccacaacctgtttcctgattctatgacagcaacacaactactggttccaagtagacgatgaaggaagatatagtcccttatgtatatagctttttttctttcttgagaattcatcttgagttatcttttatttagataaaaataaagaggcaaggatctactgtcatttgtatacaatttacct

SEQ ID NO: 18195 - DNA, 357 bp, Macaca Fascicularis
  misc_feature (1)...(357): n = A,T,C or G
ccaggtcattagccggnnagtggcatggtgtggcagggcaagtnnacgcagccatggctggccgcatgtacgtctcaggcatggcaccccacccctccttggccaagaagcaaaagtttaggcgtcgcaaccgcaaaggctaccgttcagaccgaggccacagccgtggccgcaaccagaactcccgccggccatcccgccccacgtggcggctgtccttgttctccagtgaggagagtaacttgggagccaacaactatgatgactccacccccgcgtccaccatgcccctcttcgccacgctgacccgtgttcccttcccatttatctttcactgttccagggaggtggggnctg

SEQ ID NO: 18196 - DNA, 779 bp, Macaca Fascicularis
  misc_feature (1)...(779): n = A,T,C or G
ctcggggccggagannggcnnnnnnnnngccagcgctgagcagaatgagtagctaggtgggggcaggtgggtgatctnnaagctgcaaaaactgtgctgtccttgtgaggtcactgcctggacctggtgccctggctgccttcctgtgcccagaaaggaaggggctattgcctcctcccagccacgttccctttcctcctctccctcctgtggatnnnnnnnnnnnnnnnnnnnnnnnnnnnnnnnnnnaagatggtcccttacagcttcccaagttaggttagtgatgtgaaatgctcctgtccctagccctacctccttccctgtccccacccctgcataaggcagttgttggttttcttccccaattcttttccaagtaggttttgtttatcctactgcccannnnnnnnnnnnnnnnnnngggtgcttatactcccaaaccttnnnnnnnnnnncttccccctgttgtttttagtctcttgtgctgtgcctagtggcacctgggctggggaggacactgccccgtctaggtttttataaatgtcttactcaagttcaaacctccagcttgtgaatcaactgtgtctcttttttgacttggtaagcaagtattaggctttggggtggggggaggtctgtaatgtgaaacaacttcttgttgtctttttttctcccattgttgtaaataacttttaatggccaaaccccagatttgtactttttttttttttctaactgctaaaaccattctcttccacctggttttactgtaacat

SEQ ID NO: 18197 - DNA, 759 bp, Macaca Fascicularis
  misc_feature (1)...(759): n = A,T,C or G
gagtggaggtagccnnncagcatnnntgctggtaagacattgtttactgtaaattattgaaagaactcagcaaaatgcatactgtttggtatgaaaggggcattaaaataatgagattaaatagaccctaacactgtaattcaagtaagaaacaattttgcagttttaatttccacctaaagcaaactccatgtattttcttccttcctttccccgtcacatgcctgcctgggcatgtgtgcgcacgtatgtgcatgcccatgatgtggcccgggttggtgtatccttcagctctgtgtttcctccctcacaagtgtggttttggggagaagtggttgaacattgcagaggagggagctgctgacctttgtgcccgtaaacnnnnnnnnnnnnnnnnnnnnnnnnnnnnnnnnnngttcaaggagagctttgccgagatgaacaggcgctcaaatgagtggaagacggttgtgggcactgccatgttcttcatcggcatcaccgcgctcgttgtcatgtgggagaagctctatgtgtacggccccctcccgcaaacctttgacaaagagtgggtggccatgcagaccaagagnnnnnnnnnnnnnnnnnnnnnnnncatccagggcttagcctccaagtgggactacgaaaagaacgagtggaagaagtgagtgaagctggcctgcgcctgcctctgtcacctnnnagcaactccatgcctatttactggaannnntgttatgccaaacagtactactg

SEQ ID NO: 18198 - DNA, 778 bp, Macaca Fascicularis
  misc_feature (1)...(778): n = A,T,C or G
tcaatggcaaggctaaagaaatnnntgacaataatggatagtatgaatgatcaagaactagatannnnnnnnnnnnnnnnnnnntttagtaaacaacccggaagaatccaaagagtagcaagaggatcaggtnnnnnnnnnnnnnnnnnnnnnnaacttttgacacnnnnnnnnnnnnnngcacagatggtgaaaaagatgggaggtatcaaaggacttttcaaaggtggtgacatgtctaagaatgtgagccagtcacagatggcaaaattgaaccaacaaatggccaaaatgatggatcctagagttctacatcacatgggtggtatggcaggacttcagtcaatgatgaggcagnnnnnnnnnnnnnnnnnnnnnnnnnnnnnnnnnnnnnnnnnnntcaataatatgtaaagaaaatgccttaatataaactgactcagttgagtacctaattnnnnnnnnnnnnnnnnnnnnnnnnnnntttgcaaattggggggaaagtgtatttttcttgcttatcatgcactctttctttttcttctcgcccccttttcccctccttttcttcttccttctttctttcctccctttaatgtaagggggaaatacatggtttttgtggaaatcattgtatgtttgctttagattttcttctgttttcaccatcataacacttaagttaaatcatgatgtaaaattttagtacttaaaggtttttaatcgtctcgaaggccaagcatcacatttgtaaacagtcctggtcagtagttaaata

SEQ ID NO: 18199 - DNA, 919 bp, Macaca Fascicularis
  misc_feature (1)...(919): n = A,T,C or G
tggccagagggcactccnnnnngaggagctgannnnnnnnnnnnnnnnnnnnnnnnnnnnnnnnnnnnnnnnnnnnnnnnnnnnnnnnnnnnnnnnnnnnnnnnnnnnnnnnnnnnnnnnnnnnnnnnnnnnnttagttcgagccctcatgacggctgtctgctattctgcaattattttgagactncnntgcgagtggacgttgcagtgctgaaagcgcgannnnnnnnnnnnnnnnnnnnnnnntgcgatnnnnnnnnnnnnnnnnnnnnnnnctacgccctccaggcccttgtagtgaccttagaacagcctcccannnnnnnnnggatgttctttgatgcgctctatgacgaggacgtggtaaaggaggatgccttctacagttgggagagtagcaaggaccccgcagagcagcagggcnnnnnnnnnnnnnnnaaatctgtcacagccttcttcaagtggctccgtgaggcagaggaggagtctgaccacaactgagggctggtggggccggggacctggagccccatggacacacagatggcccggctagccgcctggactgcaggggggcggcagcagcggcggtggcagtgggtgcctgtagtgtgatgtgtctgaactaataaagtggctgaagaggcaggatggcttggggctgcctggggcccccctccaggatgccaccaggtgtccctctcctccccctggggcacagagatatattatatataaagtcttgaaatttggtgtgtcttggggtggggaggggcaccaacgcctgcccctggggtccttttttttattttctgaaaatcactctcgggactgccgtcctcgctgctgggggcatatgccccagcccctgtaccacccctgctgctgcctgggcagggggaagggggggcacggtgcc

SEQ ID NO: 18200 - DNA, 764 bp, Macaca Fascicularis
  misc_feature (1)...(764): n = A,T,C or G
atacagctttaggattnntcatcnnnnnctggaaggtgtnnnnnnnnnggctttctcttcttgaagtccatctcccagacttgtgactatagcttttcattcttcaattcatgagttccgaactttatttcctgtaggcacagctttctccctctgtgcctcctgcttcctttcctctgcctctcctctgtcccccatcccactttctcctctccctccttttctcacttctgtcagtctggaagctttgattacctgcttaatactccaaagtgtgagtttctctgatctcttgtttccttagttctaatctcatgttttgttttgttttgtttttaagaaatggggtctctctgtggcccaggctggagtgcagtggtatgatcatagctcattgcatccttgaaatcctggactcaagtgatcctcccacctgagccttctgagtatctggagctacagatgctgccaccaagcctggctaattttgtctcatgtcttctaaaaattattttgtgaagcccctctgaaccttaagggaaatctgatggtgctcaggaatctaactgtccctaaaccatcctctttaactgcttctaaaatatctctgttggcctttcttagtttttttctgtttccattcagtgctccaagcactttttgtttctctctaagttgagcgcttggggtttgacaggtagtgacgtagtttgacactgttaacnnnttaaatgcaatgctgaaaagtttgtgagtgaagaatg

SEQ ID NO: 18201 - DNA, 778 bp, Macaca Fascicularis
  misc_feature (1)...(778): n = A,T,C or G
aatgatggaatnnngcagactttatgcttgacatgtttagtggagccagactataaggaataaaaggaaaaactttctccctctctctccaagaggatatgggaagcttctgagggtacataggataggctggagtcattcttagctgtttcccctcctccgtccatatgctggatcacctcaacatactctggggtgtggctctaagggtaaatcagggacagagccaaggagaaaaccaccaannnnnnnnnnnnnnnnnnnnnnnnnnncagtttgagaaagttcagtgaatataaaaaagccatttaaaaatctatatatatatatattttttttttgacattnnnnnnnnnnnnnnnnnnnnnnnnnnnnnnnnnnnnnnnnnnnnnnnnnnnnnnnnnnnnnnnnnnnnnnnnnnnnnnnnnnnnnnnnnnnnnnnnnnnnnnnnnnnnnnnnnnnnnnnnnnnnnnnnnnnnnnnnnnnnnnnnnnnnnnnnnnnnnnnnnnnnnnnnnnnnnnnnnnnnnnnnnnnnnnnnnnnnnnnnnnnnnnnnnnnnnnnnnnnnnnnnnnnnnnnnnnnnnnnnnnnnnnnnnnnnnnnnnnnnnnnncgtgccccgccctaaaatccatattcaaagaagcaatttctgttcctttctaagctttgtcagtcaaggggctccactgacttgctaggccctgtaacttaaccagtctttaaggttttgcaggaaagtcccttcttccaagtggttattccnnnatctgcacacat

SEQ ID NO: 18202 - DNA, 728 bp, Macaca Fascicularis
  misc_feature (1)...(728): n = A,T,C or G
aggagggacagcatcaggatnnnnnnnnnnnnnnnnnnnnnnnnnactggcttaaccctgatgaaaccagctggattgctagatgctggtcactctcacatattagaaggggttctaagagtcaaaccaacaatccaatttggccaagtccaaaatnnnnnnnnnnnaatagtgggcctatttgttcctccatggttgcttgcaacatnnnnnnnnnnnnnnnnnnnnnnnnnnnnnnnnnnnnnnnnnnnnnnnnnnnnnnnngagagcagagagattgttcttgttccagcttccctttgtgctttgggctggtgggactcagagtattaaattaggccataagccaatgctgcaaagccaaacattaggcttttgaactgcccccaccagagcctggtgggtgagggtatacactgagcccaggtaagtccagtccatgtacagtcattacccttatagctgttctcccaggcagtttgaggactcaccccagggannnnnnnnnnnnnnnnnnnnggtctgtgaggtcttgagcttttatttccaactnnnnnnnnnnnnnnnnnnnnnnnnnnnnnnnnnncatccacagaacattgactgcagaagcaaccgtcagaacccagctctcttctgttaagccagacgttaaagatttgcagaattgtaagaccagtgccactttctaattatttcttggaaaatagtttttcataaaaatgcca

SEQ ID NO: 18203 - DNA, 1161 bp, Macaca Fascicularis
  misc_feature (1)...(1161): n = A,T,C or G
aagcnctgacgaatgtaaagnnntgatccaaggaccagatcnatgacatatccaaaagctcaacagcnnnnnnnnggtagttttgctgtcagctacaatgccttctgatgtgcttgaggtgaccaagaagttcatgagggaccccattcggattcttgtcaagaaggaagagttgaccctggagggtatccgccaattctacatcaacgtggaacgagaggagtggaagctggacacactatgtgacttgtatgaaacgctgaccatcacccaggcagtcatcttcatcaacacccggaggaaggtggactggctcaccgagaagatgcatgcttgagatttcactgtctctgccatgcatggagatatggaccaaaaggaacgagacgtgatcatgagggagtttcgttctggctctagcagagttttgattaccactgccttgactggcagaggcattgatgtgcagcaggtttctttagtcatcaactatgaccttcccaccaacagggaaaactatatccacagaatcggtcgaggtggacggtttggtcgtaaaggtgtggctattaacatggtgacagaagaagacaagaggactcttcgagacatcgagaccttctataacacctccattgaggaaatgcccctcaatgttgccgacctcatctgaggggttgtcctgccacccagccccagccagggctcaatctcggggggctgaggagcagcaggaggggggagggaagggagccaagggatggacatcttgtcattttttttctttgaataaatgtcactttttgaggcaaaaaaagaaggaaccgtgaacattttagacacccttttctttggggtaggctcttgccccaggcgccggctcttctcccaaaaaaacactaatccatttccctaacctagtaacctccagatcccagaggctctcctcacctcagctgagctcctttgaaagtgattcaggggactacgtcactcagcctcatttgatggaccaaatctggagggagaacccctaaaacccctgagtgaggttgcccagggggttgtccccaggtggggggaagcaggggagagaaaatggtagccatttttacattgttttgtatagtatttattgattcaggaaacaaacacaaaatt

SEQ ID NO: 18204 - DNA, 711 bp, Macaca Fascicularis
  misc_feature (1)...(711): n = A,T,C or G
aggcagaaaagaaaaagtaacgtctgatttcccccaatcaaccaaccaacnnnnnnnnnnnnnnnnnnnnnnnnnaattcattcaggacaagcgctggggtcaaaacccccggtgatcctcaccctcctccagaaattccacttcccaaaatgaaacaaagagcgttagacaggggtcatcccttcctgtggctcccaacctggggcagcccctcccgctggnnnnnnnnnnnnnnnnnnnagtggaggggaggccagtgtggatctactcacagaatgttcttttgatttccagcgaggattgctacagtcgtgattggaggagttgtggctgtggnnnnnnnnnnnnnngtgctcggtgtcatgggcttcactgcgacgggaatcacctcgtcctccatagcagccaagatgatgtnnnnnnnnnnnnnnnccaatgggggtggagttgccccgggcagccttgtggctactctgcagtcactgggagcaactggactctccgggttgaccagattcatcctgggctccactgggtctgccnnnnnnnnnnnnnnnnnnnnnnnnnnnnnnnnncctgcccctcgccctgcagagaagagaaccgtgccagggggagaaggcacccagccatcctgacccagcgaagagccaactatcccaaatatacctggggtgaaatataccagattccgcacgcccagaggaaaa

SEQ ID NO: 18205 - DNA, 787 bp, Macaca Fascicularis
  misc_feature (1)...(787): n = A,T,C or G
cnnnnnnnnnnnnnnnnnnnnnnnnnnnnnnnnnnnnnnnnnnnnnnnnnnnnncaggctgatgaggaagcaaaggaaagcaaagcagcagcccaactttcagaagcagtcccagcacccacagagccccaggcttcacagttccnnnanttgctagatctnnnnnnnggggcttctggnnnnnnnnnnnnnnntccccctctggacccctcccctggaggtgccctggtatacctgctggaccttccctgtgcacctccacccccagctcccatcccagatctcaaagtgtttgagcgtgagggagtacagctgaatctgtctttcattcgaccccctgaaaaccctgctttgcnnnnnnnnnnnnnnnnnnnnnnnnnnnnnnnnnnnnnnnnnnnnnnnnnnnnnnnnnnnnnngctgctgtgcccaagagtctccagctccaaatgcaggcccccagtgggaacacagttccagctcggggtggccttcctatcacccagctcttcagaatcctcaatcctaacaaggcccctgtgcggctaaagctgcgcctcacctacaaccactttcaccagtcagtgcaggagatctttgaggtgaacaacttgcctgtggaatnnnnnnnnnnnnnnnnnnnnnnnnnnnctgaaattctcctgtgtcccaaaccccagcgggccccagccgcttgaaacctacacctgannnnnnnnnnnnnnnnnnnnnnnnnnnnnnnnnnnnnnnnnnnnnngaccagcccccttctcccacaaataaagccca

SEQ ID NO: 18206 - DNA, 783 bp, Macaca Fascicularis
  misc_feature (1)...(783): n = A,T,C or G
cccaaagcacaagtgnnnnnnnnnnnnnnnnnntcatgaagcccaaagacaagctgcgaagtgcttcgagctaaaaaagggatggttgcagaggagtacaatgcctttttctactcactggtatcccaggacacacaggaaatggcttactcaaccaagcggcagagattcttggtagatcaaggttatagcttcaaggtgatcacgaagcttgctggcatggaggaggaagacttggcattttcgacaaaagannnnnnnnnnnnnnnnnnacagaaggtcctggcagccactgacctggatgccgaggaggaggtggtggctggggagtttggctccagatccagccaggcatctcggcgctttggcaccatgagctctatgtccggggccgacgacactgtgtacatggagtaccactcatcacggagcaaggcgcccagcaaacatgtgcaccctctcttcannnnnnnnnnnnnnngatgctgaggcggggtacttcgttcaagaccggcgcttggcaccctcgttggaaagggattttcagcgtaacgttttccttcgacctccttgaccttccctccagcgttggccaaactgtgctgaggaaactgcctcaagggcttggctctgccttcatgggtcatctagggtttattgtctcctcttgcctttatcatctaggaggagacaatattttttcaaactttttggggagtggggtcatttccgtatataaaaaattttaatatttaaggtgtatttnnnnntctataacagaaa

SEQ ID NO: 18207 - DNA, 685 bp, Macaca Fascicularis
  misc_feature (1)...(685): n = A,T,C or G
gaggagggagccccagnctggagcagcatgaggcccagcaagaagggcttggggtctgaggaagcagacatttcatgctgtgaggccttgcaccaggnnngggccacagcaccagcagcatctttactgggcagggcccagccctccactgcagaagcatctggaagcaccaccttgtctccacagagcagcttgggcacagcagactggcttggccctgaggctggggagtggctccaacagcctcctgccacacacacaccactctccctagactctcctagggttcaggagctgctgggcccagaggtgacatttgacttttttccaggaaaaatgtaagtgtgaggaaaccctttttattttattacctttcactccctggctgctgggtctgctgtcggtcctgctgctaaacctggcaccagagcctctgcccgggagcctcagacagtcctctcccgctgtcacggctgccatccacttctcagtcccagggccatctcttggagtnnnnnnnnnnnnnnnnnnnnnnnnnnnnnnnnnnnnnnnnnnnnnnnnnnnnnnnnnnnggccccaggggagaggttggggctggcaggccactggcatgtactgagtagcacagagctacccggtgagaggccttgtctaactgcctttccttctaaagggaatgtttttt

SEQ ID NO: 18208 - DNA, 728 bp, Macaca Fascicularis
  misc_feature (1)...(728): n = A,T,C or G
atagaaataaaaggggaggggtgggaaacaacaacaaccctcaaagaatgtttaaagtaaaaggtaagagcctctactgaaaaatcacatccttatgcagccgggcgcggtggctcgctgtgatcccagcactttaggaggccgaggcannnnnnnnnnnnnnnnnnnnnnnnnnnnnnnnnnnnnnnnnnnnnnnnnnnnnnnnnnnnnnnnnnnnnnnnnnnnnnnnnnnnnatactccatctcaaaaaaaattatactaataaataaagagcaacttgttctacttttataaataacttaaaacactcagccaggtcgggtacggtggctcacatccataatcccagaactttgggaggccgaagtgggcagatcacctgaggtcaggagttgannnnnnnnnnnnnnnnnnnnnnnnnnnnnnnnnnnnnnnnnnnnnnnnnnnnnnnnnnnnnnnnnnnnnnnnnnnnnnnnnnnnnnnnnnnnnnnnnnnnnnnnnnnnnnnnnnnnnnnnnnnnnnnnnnnnnnnnnnnnnnnnnnnnnnnnnnnnnnnnnnnnnnnnnnnnnnnnnnnnnnnnnnnnnnnnnnntctctcaaaaaaaaaaaaaaattcagccttttattgaaggacaatcttgtctttgtccataatgtaaacatgaaatattttttgccttttttgctcttttactttgaaaaangatgccccactgttctgctttcct

SEQ ID NO: 18209 - DNA, 570 bp, Macaca Fascicularis
  misc_feature (1)...(570): n = A,T,C or G
gagaaaaaaggatgaaaccgtgggtnnnnntctcaaagctaaannnnnnnnnnnnnnaagccagctggcttatcctggtnnncagctgttcaaaaaaaaaaaaaagnnnnnnnnnnnnnnnnnnnnnnnnnnnnnnnnnccctgttccattcccttcttccttctatctccttccccggcaatannnnnnnnnnnnnnnnnnnnnnnnnnnnnnnnnnnnnnnnnnnnnnnnngggtttcttttacttcaaatctttcttcagggagcaagacatgaactgactaattggtatccactacttgtacagcttacataaatgaattgatgatatttaaccagtttttataaacttcatctaggtctctaaatacagaccttttaaattgcagctgtaaatatgaagtggtcnnnnnnnnnnnnnnnnnnnnnnnnnnnnnnnnnnnnnnnnnnnnnnnnnnctggttgtaatttgtacccattttctatttgtgcaaactctgtaaatatgtgtttaaacaaatgtaatattttgtacaagatacactggagaacaaagggaactcaagatt

SEQ ID NO: 18210 - DNA, 753 bp, Macaca Fascicularis
  misc_feature (1)...(753): n = A,T,C or G
ccagacaaaggagctnnnnnngaaacttcacacagattttagtcaatgaagaattaatctctgtttttaagaagaagtaatacgattatttttggcaaaaatttcacaagacttattttaatgacaatgtagcttgaaagcgatgaagaatgtctctagaagaaaannnnnnnnnnnnnnnnnnnnnnnnngaggacannnnnnnnnnnnnnnnnnnnnnnnnnnnnnnnnnnnnnnnnnngtgttggggcaaaggtgtcccatgtagcactcggagaagtatacagcgacaatcctgttttctacaagaatcctgtccagtaaataggaccatttattgggcnnnnnnnnnnnnnnntctctgtcctatttagtgagtgttttcagcacctgctcctaaaccagtcctcctgccaccatcacatcgccgtctctgattgtaccaggcaccagcaggccgttgcggggctcacctgaaggctcgaaggccctgcacacttgtatattgtcattgaggaactgttagttggtcgtcagtgaacagtaactttattatatgagttcttgtagcatcttaagaattatacatatgtttgaaatattgaaactaaactacagtaccagtaattagatatagaatcttgtttgtaggctgaattttaatctgtatttattgtcttttgtatctcagaaattagcaacttgctagacttaatcgtaatatttgtcaagatcctagctgacttaaaaaca

SEQ ID NO: 18211 - DNA, 1297 bp, Macaca Fascicularis
  misc_feature (1)...(1297): n = A,T,C or G
attttattttgcttgggtnnnccttgttaaaagggaggtggatgtgttttccttgtgttggatggcatgagattatgtgaatgttttgatttattaaaatgaactgcaaggtttttcacaggaacgacagacatgtatgactgcatgtaattataaactcctgacctcctggtggggttggagcatctttttcaaatgtgggacttccaagcacctctcacatgagaaatgaggggcgggtgggaagggatgggacacagcttctggcaccatggatttaagaccatgttggatccaaaagttggcctgaaaccctgaagcttatgcgtcacagctgggctgtaagtcagacttgaacccagctgacatgcagggtcatggcgtgcccgaggtggtgacagttnnnnnnnnnnnnnnnnnnnnnnnnngtggtagcaatggaaaaaagtataccaaannnnnnnnnnnnnaccaaaggttttaaaagtcaattggtatcacctccacactgactatagggtagtggggtgcatttggttttcaaattgggtacttttaacactttagtgcctgactgctgttctttactgacttgattcagtcactcgtagctttatnnnctgaaccagctccttgttcccaggttacagacctgcctatcgttccaataatcctgtttcacttgaatgaagggagtatgtcttaaatgtaaagtttctggttctcacactgtactctgaggtccaaatactgtctgtcaatgtgtaacctgatgtctcaacccccagtgagaagagtccattatttggtgttcaccagcgtgggagacttcaccggaacaggcttttttgctttgggctctgctatttgtttgcagaacacccaagagcgagcaaacatgctctcttcacagcagtacctgagggtttnnnnnnnnnnnnnnngtctgatgtgataggacaagaccagagaaattggatgtaaatttacatttttgaatatgcttgttgtttcacatgatacatttagggtatgcagctccttttgtagtttttatttttgctatttaagtttggaaatgatgccaaatttttgtatttctttaatcagtgtgttctcttcggtgatatatattgcattatatattgatgtgtgtatcaatatatactgatatgtattacacttacacatacaaacacataaataagagggggtgaannnnnnnnnnnnnnnattctctatagcctctgcagagagatcctaagcagcaaaatnnnngtgttgtgatgtacagaaa

SEQ ID NO: 18212 - DNA, 825 bp, Macaca Fascicularis
  misc_feature (1)...(825): n = A,T,C or G
ggaagagaacannntnntccnngactgggtggaaggctggccaggcaccaagcatgtgtgtgcacttatacctggtggtttctctnnnnnnnnnnnnnnnnnnnnnnatgaattatttttgccttactttcttaagaaacattaataagaaacattaattttatgtatagtgggtgtattttgcatgttttaannnnnnnnnnnnnnnnnnnnnnagaaagtgtacttgaagcaatcnnnnnnnnnnnnnnnnnnnnnaatccctgttgtcctccagggtaagctgacagacctacttaactggttttccacaggcactnnnnnnnnnnnnnnnnnnnnggactgttttggatttaaccatgtaatccatgggaccaatnnnnnnnnnnnnnnnnnnnnnnnnnncaaagtattctcagacacctttaatatctttatggaaacttagtttttggccttttaccagtatgtcataacagcactctgaagtcagacattgttaaattgagctattaaactaatgggttttatgtaagttatatggtcttaatttggtacttgtaaatagcactagttagattctttagaatactccaagagttagggcagcagagcagagcgatttagaaagaacattttaaaacaatcagttaatttaccatgtaaaattgttgtaaatgataatgtgtacagatttgctgttcaaatattcaattgtaaacttcttaagactgttttgtttctattgcttttgtatgggatattgcaaaaataaaaagaaaagacccttcaaaaaaaaaaaaaaaaaaaaaaaaaaaaaaaagg

SEQ ID NO: 18213 - DNA, 718 bp, Macaca Fascicularis
cagtagtcaagtgcctttggagcctcctcttctctttctgctggaggaatacaaaaattacctggatgctgcaaacatgtccatgagggtccggcgccactctgaccctgcccgccgaggggagctgagcgtgtgtgacagtattagcgagtgggtaacggcggcagacaaaaagactgcagtggacatgtcgggcgggacggtcacagtccttgaaaaggtccctgtatcgaaaggccaactgaagcaatacttctacgagaccaagtgcaatcccatgggttacacaaaagaaggctgcaggggcatagacaaaaggcattggaactcccagtgccgaactacccagtcgtatgtgcgggcccttaccatggatagcaaaaagagaattggctggcgattcataaggatagacacttcttgtgtatgtacattgaccattaaaaggggaagatagtggatttatgttgtatagattatattgagacaaaaattatctatttgtatatatacataacagggtaaattattcagttaagaaaaaaataattttatgaactgcatgtataaatgaagtttatacagtacagtggttctacaatctatttattggacatgtccatgaccagaagggaaacagtcatttgcgcacaactttaaaaagtctgcattacattccttgataatgttgtggtttgttgccgttgccaagaatgaa

SEQ ID NO: 18214 - DNA, 986 bp, Macaca Fascicularis
  misc_feature (1)...(986): n = A,T,C or G
aatgcgtatgacnnngaagtcatcgatatcnttaagatagagcgtgaaggcgaatgccagcgctacaagccctttaagcagcttcataaccgaagattgctgtggcacgggtccaggaccaccaactttgccgggatcctgtcccagggtcttcggatagccccgcctgaagnnnnnnnnnnnnnnnnnnnnnnnnnnaaagggatctatttcgctgacatggtctccaagnnnnnnnactacnnnnnnnnnnnnnnnnnngacccaataggcttaatcgtgtgggagaagttgcccttggaaacatgtatgaactgaagcacgcttcacatatcagcaagttacccaaggggaagcacagtgtcaaaggtttgggcaaaactacccctgacccttcagctagtattagtctggatggtgtagaggttcctcttgggaccgggatttcatctggtgtgaatgacacctgtctactatataacgagtacattgtctacgatattgctcaggtaaatctgaagtatctgctgaaactgaaattcaattttaagacctccctgtggtaattgggagaggtggccgactcacacccggtggctctggtatgaattcacctgaagcgcttctgcaccaactcacctggccaactaagttgcgcatggatagtgcctgtactaaaccacctcagaaaggattttacagaaacgcgttaaaggttttctccaacttttcaagtcccttgttttgtgttgtgtttgtggggaggggttgtttgggggttgtttttgttttttcttgccaggtagataaaactgacatagagaaaaggctggagagagattctgtttgcatagactagtcctgtggaaaaaaccaagcttcgttagaacgtctgccttactggtttccccagggaaggaaaaatacgtttccactctcttttctaagtgttcgtctttagtttcgatttggaaagatgttaagca

SEQ ID NO: 18215 - DNA, 576 bp, Macaca Fascicularis
  misc_feature (1)...(576): n = A,T,C or G
cccctctcccctcctagggggtgtcagnnnnnnnnnnngtgtgtccagactctgggcacagtgctgccnnnnnnnnnnnnnnnnnnnnnnnnngagtgtagggggccttgcggaagccatagggggctgcaggggatgtgtgggaggcagaagcctatctcagggagggaaggggatggaggccacagtctcccagtgggtgatgcttttgctgctgcttaatcctaccccctcttcagagcagagtgggacttggagagcaaaggcccataccccttcgctcctcctctcannnnnnnnnnnnnnnnntagtgcccccccttgaagcaataactccaagcaggctccagcccctggacccctggggtggccagagcttccccatcagctcnnnnnnnnnnnnnnnnnngggtaggagagcactgcctctatgccctgcagagcaataacactatatttatttttgggtnnnnnnnnggaggcgcagggacatggggcaagccagggcccagagcccttggctgtacagagactctattttaatgtatatttgcnnnnnagagaaaccgctttnnt

SEQ ID NO: 18216 - DNA, 1192 bp, Macaca Fascicularis
  misc_feature (1)...(1192): n = A,T,C or G
gtcccacnnnnnnnnnnntgatcaggagctcgtggcccaatcaattatcttcatttttgctggctatgaaaccaccagcagtgttctttccttcattatatatgaactggccactcaccctgatgtccagcagaaactgcagaaggagatnnnnnnnnnnnnnnnnnnnnnnnnnnnnnnnnnnnnnnnnnnnnnnnnnnnnnnnnnnnnnnnnnnnnnnnnnntgaatgaaacactcagattattcnnnnnnnctattagacttgagagggcctgcaagaaagatgttgaaatcaatggggtgttcattcccaaaggggcaatnnnnnnnnnnnnnacctatgctcttcaccatgacccaaagtactggccagagcctgagaagttcctccctgaaaggttcagcaagaagaacaatgacaacatagatccttacatatacacgccctttggaagtggacccagaaactgcattggcatgaggtttgctctcatgaacatgaaacttgctataatcagagtccttcagaacttctccttcaaaccttgtaaagaaacacagatcccactgaaattacgcttaggaggacttcttcaaacagaaaaacccattgttctaaagattgagtcaagggatgggaccgtaagtggagcctgaattttactaaggacttctgctttgctcttcaagaaagctgtgccccagaacacgagagacctcaaattactttgtgaatagaaccctgaaatgaagacgggcttcatccaatgtactgcataaataaccagggattctgtacatgcattgagctctctcactgtctgtgtagactgttatacttgggaatataaaggagatgaccaaattagtgcaggggaggtagatttggctcctctgcttctcataggactatctccagcctggttcaagcacccctagttagcaccattaactcctcctgagctctgacaagagaatcaacatttctcaataatttcatccacaattattaatgaaaacaagaattattttgatggctctaacagtgacatttatatctcatgttttacctggagtattctataataagttttatataaaatcaataaagaccactttacaaaagtattatcagatgctttcctgcatattaacgagaaatctatagaactgaatgagaaccaacaagta

SEQ ID NO: 18217 - DNA, 729 bp, Macaca Fascicularis
  misc_feature (1)...(729): n = A,T,C or G
gcagatcatgacatcctnnnnnnnnnnnnnnagcacttccccgtggannngcgctnnnnnnnnnnnnnnnnnnnnntcctccacagcaacggctcccaaaggacctgctgccctgtcaactgggtggagcaccaaggcagctgctactggttctctcgctccgggaaggcctgggccgaggcggagaagtactgccagctggagaactcacacctggtggtcatcaactcctgggaggagcagaaattcattgtacaacacacgaaccccttcaatacctggataggtctcacggacagtgatggctcctggaaatgggtggacggcacagactataggcacaactacaagaactgggctgtcactcagccagatgattggcacgggcatgagctgggcggaagtgaagactgtgttgaagtccggccggatggccgctggaacgatgatttctgcctgcaggtgcaccgctgggtgtgtgagaagaggcggaatgccaccggcgaggcagcctgaccccagcacacctctgtctaacccataccccacacctgcccagctctggcttctctgttgaggattttgaggaaaggaagaaacattaagacaggggtatggagaagagctgagtaaagagagaaaggaggtagtttaagagtccctgaccctggagggctgagatcccacctccttctgtaattcattgtaattattataattgtcagcctc

SEQ ID NO: 18218 - DNA, 1079 bp, Macaca Fascicularis
  misc_feature (1)...(1079): n = A,T,C or G
acagcagagggnnnnnagcnaaaactacatggaaaatagagaacaggaaatgagaatgggtgatatgggtccccgtggagcaataaacatgggagatgcgtttagcnnnnnnnnnnnnnnnnnncaaggtcctcctccaatgatgggtatgaatatgaacaacagagcaactatacctggcccaccaatgggtcctggtcctgccatgggaccagaaggagccgcaaatatgggaactccaatgatgccagataatggannnnnnnnnnnnnncagatttcctcaaggaccaccatctcagatgggttcacctatggggagtagaacaggttctgaaacccctcaagcaccaatgagtggtgtaggtcctgtgagtggtggtcctggtggctttggtagaggaagtcaagggggcaactttgaaggccctaatnnnnnnnnnnnnnnnnaaacattcgttcattcctggctatctagaaaaaaaagtcagtggtatgcctttatacttttacctnnnnnnnnnnnnnnntggttttattgttaatgtatgtagacttaaaagtttttttttttttttgtaacacttgaggttttgtaattttctttattcatgagctttgtagattagaatggtaatgatgctcatcattttgaatgttgaaatgtgtttgtgactttagctaaatataagtattccatagtactgtgaaatctatgtagttacttaatctcaataaagaaatcattttggataatttaaaaccgttattagcggtatttttctatggtcttgctaaactttgctgtaacagtaatgctttggttgctttaactaatcctagtcgttaaaaatgaaaatgattttgctttttaatttgtccaagtagcactgaagatagaagcttaattaatgaaagctaatgttaataagcggtagatagagtagtatatgtgggggtgggagggtatgggagtttaatttgtataaacactgatgttctgtgaaattggaatttccacctacatttcannnatattccgaatattcaggtattctgcgacagcttattaaggatatc

SEQ ID NO: 18219 - DNA, 731 bp, Macaca Fascicularis
  misc_feature (1)...(731): n = A,T,C or G
tatacataggtgtattttttnnngnntnnnnntccatttaccacttcatgtattagaggaagtgatccatatattttctgaccattagatagaatgatttaaagcttaatttctgaatatagcttatgtttttccatgttctctatgaagctttnnnnnnnnnnnnnnnnnnnnnnnnnnnnnnnnnnnncatatgttctctcccacttagatttcttgtgattaattataatgcatgttacattgcttactcttgacattacatacccaccaatttctttcaatatttatctgctcccactgtggtatcctgtcttcctaactgatttactgttcactttgtatcttccacagcttagccaataaaagacactcggtaataattgttgaaaagtaaaaacctattggcagtagaaaataagtgagaaatcattaaaaactaaatttcagtttatgttgaccactgatcctttggttaaaatnnnnnnnnnnnnnnnntgtctctttttaaatagtatgcttcaagacttttataaggaatacaattttttgaaattgaattctgagtgtgcagcagcagacttttaaaatggatatttctagagagagtaannnnnnnnnnnnnnnnnnnnnnnnnnagtggtagctatnnnnnnnnnnnnnnnntctctgccttcaacttacatcatgccacaggccatcattgtatttctcctggcttctaatcttca

SEQ ID NO: 18220 - DNA, 1329 bp, Macaca Fascicularis
  misc_feature (1)...(1329): n = A,T,C or G
gagcaagaccctgnctcccaaacaaaaaatactgtcataaaagtacttacacgaatcctctctcaggaccctaaggttgcaggttagtaggtcttcaaggacaaatctgtaagtttcttatttctgtagnnnnnnnnnnnnnnnnnnnnnnnnntttaaactatagagagatccctttctgaannnnnnnnnnnnnctgaagtgaggnnnnnnnnnncctctcgcagacaaagaggcgttggatattaggactttggggtttgagagcttcacggggnnngacagttggtggatggtctggacacgaagcgagtaagccactgcaattggtcgtactaaaggggatggatggcaaaaggatcccctgagcaagtcagaagtactctcatcagtcgtccacggnnnnnnnnnnnnnnnnnnnnnngagtggacaaggctgaagaagaggcctgcggaacgcagtgttacctgctggacggggcagggcaggcagggctatgccctggagctcctgactgcagagacgcgtccccacactcaaaaagactcagctcactcaatgacagaatgtaatttacnnnnnnnnnnnnnnnnnnnnnctttgttgataatttgttctattaaggctgtctaaagtatnnnnnnnnnnnnnnnnnnnnnnnagtgtcgagaattcataactagcccagtttaggaaaaagctgcttaaaactggctctaagagagtaatcataaaataccttagataaaattgcattatggaattttcattgagtatgtttaaattactggcttgtctaccaatacatatctgcttcaaaatgaacatctttcataaaattggcatcaattttaatgacgttcctggtgtggaacctcagatgttccctattggagataatccttgggttataaattctccccaactataaatccttttatgtctttatcatagatggtggtttgtcaactttttttggtcatgctttctcattttaaaatnnnnnnnnnnnnngattttctcaaacctcatggttctgctgtgtgtgttgggggtggtggttagtagctgtagtaaataggtttttccaatggcgtcctcttaccctcagttgctgatctagaacaactgtaagcatattcgtagaacgctaatcccacaagattttacacacaaaaatgatcctgccgcaggtcctgtataccactggcttgtaaagcacatcagcaaactaaaggacacaggtccttcggaacctctgaagtgctagtatgtgcagttcccagacttccttgaccgtggagccgtttaccttaacacctgttaac

SEQ ID NO: 18221 - DNA, 1512 bp, Macaca Fascicularis
  misc_feature (1)...(1512): n = A,T,C or G
ggcatgtcaaagcanctgannnnnnnnctgaagaggctatcatggagctgaacctgccgactggtattcccannntctatgaattggacaagaacttgaagcctatcaagcccatgcagttcctgggggnnnnnnnnnnnnnnnnnnnngccannnnnnnnnnnnnnnnccagggcaaggccaagaagtgaaggccagcggggaggatactgtccccaggagcaccctccctgcccgtcttgtccctctgcccctcccacctgcacatgtcacacnnnnnnnnnnnnnngacatcttgagttgtatctgcagatggggactggtggctcccaatttcatttagccattttgtcttctgcacccactcccttcgtacaatctagtcagaatagcacttctagagcacaggttctcagtccaagctgtggaaaagctccccttatccaacagagtttaaaggtagtaacttgggtttttgcgagttgtttactaaggacttgtggggaggaatcatgataagccatgaccaatgaggagaagcaacagagcctctctgtcctcaggagccagtcctctgctgttctgcagtcaggccactgcctgggggctctagtcattccagtggaagatgatgtaacctgcatggtgatgtgacaactgtttcctccttgaccctagaggacctggctctagaagtttgggatcaatcctgaatttagttatgtgttacatttacttttattaaaaaagtatagtatatataaataatacaaaacagtaacccttctggggtttcttgtggcggttgaaatagtcccacatgtggtcatcagaaaataagccattcctcataccagtatgggatcagttccttgacctctgaggggcaggagtgcttcttgctgtgtgtgtgagaatcccttcctgcctcgtttcatggcagtgaaacgccccttggtcctgtccaagtgtgtctttcattgatttccaaatcatgttctagttgctgggctgtccacacatgggtccagtattcacctgagcataactgtactaaatcccttttccagatcagtataataaaggagtgatgtgcaatagtttcttgtgtgatgtggaagagcttatctgaggaaactttagcatttaacttgaaatgtctcccactaccctagtccttgtgtggcagtttgttttgggacacccagtcacaactnnnnnnnnnnnnnnnnnnaatgacacatctccctgggctttnnnnnnnnnnnnnnnnnnnnnnnnnngcggtgggaggccctcctggccaagccctccattcatgttgccccctgcagctcttgcttggtgcccccctgactggaaannnnnnnnnnctccattgtatcctctttagagtaaataaagtctgctgtttttttttttctctttttgagacagtcgcgctctgccgcccaaacttcagtgcagtggcacaatctcagctcactgcagcctctgcctccagggttcaag

SEQ ID NO: 18222 - DNA, 739 bp, Macaca Fascicularis
  misc_feature (1)...(739): n = A,T,C or G
acgggacttacgcctggcactcactacnnnnnnnnnnnnnnnnnnnnnnnnnnnnnnnnnntgggcccagcctcgccccctgcacacgtgcttctgccccccagtgggcctccagccccccgacacctccacgcccaggctctctcagactccgagatcnnnnnnnnnnnnnnnnnnnnnnnnnnnnnnnnnnnnnnnnnnnncaagtacgttgtggaggtgcaggtggctgggggnnnnnnnnnnnnnnnnnnnatagacgtggacaggcctgaggagacaagcaccatcatccgtggcctcaacgccagcacgcgctacctcttccgcgtgcgggccggcattcaggggctcggggactggagcaacacagtagaagagtccaccctgggcaacgggctgcaggctgagggcccagtccaagagagccgggcagcagaagagggcctggatnnnnnnnnnnnnnnnnnnntggtgggctccgtgtctgccacctgcctcaccatcctggcagcccttttaaccctggtgtgcatccgcagnnnnnnnnnnnnnnngagacgcaccttcacctacnnnnnnnnntcggtcagtgacccgccccgcccccgggtgcatgctcacagcccgtgtatgtgtttctacctgagtacacacaagaccttgtacaccttgtgtgtgtgtgcgtgtgtttgtgtagcaggtaaaagattacactcaacaatgtaaagggtacaaa

SEQ ID NO: 18223 - DNA, 756 bp, Macaca Fascicularis
  misc_feature (1)...(756): n = A,T,C or G
actgctgcnnnnnnnnnnnnnngagatgacggagcagagtcagcagcggctcatcgatgaccacttnctgtttgataagccagtgtcccctttattaacatgtgctgggatggcccgtgactggccagatgccaggggaatctggcatannnnnnnnnnnnnnnnnnnnnnnnnnnnnnnnnnnnnnnnnnnnnnnnnnntaatctcaatggaaaaaggaggcaatatgaaacgagtatttgagcgattctgtcgtggactaaaagaagtagaacggttaatccaagaacgaggctgggagttcatgtggaatgagcgcctaggatacattttgacctgtccttcgaaccttggaacaggactacgagctggtgtccacgttaggatcccaaagctcagcaaggacccacgcttttctaagatcctggaaaacctaagactccagaagcgtggcacaggtggtgtggacactgccgcagtcgcagatgtgtacgacatttccnnnnnnnnnnnnnnnnnnnnnnnnnnnnnnnnnnnnnnnnnnnnnnnnnnnnnnngagtcaattacctggtggattgtgaaaagaagttggagagaggccaagatattaaggtgccaccccctctgcctcagtttgnnnnnnnnnnnnnnnnnnnnnnnnnagtttataaataatctgtctgctggtatgacagacataaagaaatctctactctgagagtttttgtacacttggaaaaatgtaaaattgtaga

SEQ ID NO: 18224 - DNA, 741 bp, Macaca Fascicularis
  misc_feature (1)...(741): n = A,T,C or G
acatgtactnntncnttggcatagtgcaactttatgannnnngaaattcaatggttctatnnnnnnnnnnnnnnnnnnnnnnnnnnnnnnnnnnnnnnnnnnnnnnnnnnnnnnnnnnnnnnnnngctcaagntaacagtgttcttgtgattttaccaattttttttcttttcttttttgtggtattctggtcaagttattgtgctgtactttgtgcgtagaaattgagttgtattgnnnnnnnnnnnnnnnaaagatatcttcaaaaaattatcctcaagtgtagatttctcttaattccatttgtgtatcatgttaaactattgttgtggcttcttgtgtaaagacaggaactgtggaactgtgatgctgtcttttgtgttgttaaaacaagaaatgtcttacctgtatatgtatgagtcctcctgtcattgtatttggcatatgaatattgtgtacaaggaattgttaagactggttttccctcaacaacatatattatacttgctactggaaaagtgtttaagacttagctaggtttccatttagatcttcatatctgttgcatggaagaaagttgggttcttggcatagagttgcatgatatgtaagatttgtgcattaataattgttaaaaatctgtgttccaaaagtggacatagcatgtacaggcagttttctgtcctgtgcacaaaaagtttaaaaaagttgtttaatatttgttgttgtatacccaaatac

SEQ ID NO: 18225 - DNA, 764 bp, Macaca Fascicularis
  misc_feature (1)...(764): n = A,T,C or G
gcaccagccctccatgctgctggagctgggggcctactgtggctactcagctgtgcgcatggcccgcctgctgtcaccggntgnnnnnnnnnnnnnnnnnnnnnnnnnnnnnnntacgccgccatcaccccagcggatggtggatttcgctggcatgcaggacaaggtcaccgttgtggttggggcgtcccaggacatcatcccccagctgaagaagaagtatgatgtggacacgctggacatggtcttcctcgaccactggaaggaccggtacctgccagacacgcnnnnnnnnnnnnnnnntggcctgctgaggaagnnnnnnnnnnnnnnnnnnnnnnnnnnnnnnnnnnnnggtgcaccagacttcctggcacacgtgcgcaggagcaaccgctttgagtgcacacactaccagtcattcctggaatacaggaaggtggtggacggcctggagaaggccatctataagggcccaggcagtgaagcacagccctgactgcccccctggccccgcactcaggctccctcacccagcctggttctgagggtgccacagacgtgctcctgctgaccttctgcggctctgggttgtatcctaaatgcaaagcacacctcggccgaggcctgcgctctgccatgctgacctctctggactgcagcactggattgctctccttttttaagactcaatcgtgacctctttactaacacccgctagctatattatctcacatactaatacatgtttaaaaaatataaaa

SEQ ID NO: 18226 - DNA, 750 bp, Macaca Fascicularis
  misc_feature (1)...(750): n = A,T,C or G
ggtttaaaactgcaagtctcctgnnnngagattccgttcacttccacacaaactagggtgatggtcacggtggcacccaggtgtgggctgggctagccgggcaccttcatgtgttcttcatgcccctccctgcactgaggccttgtggacccccgggctggctgtgctcaccccggcagcaggtcaggtgtctgctcctgtgccacccctgagactcccaccgttacccccaggagagcctggactgcctgactcccctccccagacttgctggggagcctgggccccgtggcagattcaagggaaaccgcgaggccagctcaaggcctgggatctgcccccagtccaggccaggtggagtggaggggctgcctgccactcccccttctctgtggttccccctgcgccctggggattcggtctcttagggaacctgcctctgtctccctcttgttttgatcccggccctgcccctaggtctgggtgggcagtggnnnnnnnnnnnnnnnnnnnnnnnntctgcatagaatttaaacgagattcacctggcgccaggagggagaaacagcagtgtcggnnnnnnnnnnnnnnnnngggggggtgtnnnnnnnnnnnnnnnnnnnngttttcaaaaaaatttttttaaagaaaataattttatacnnnnnnnnnnnnnnngctggattattgggacttttaaacgatcctctttaaagtggattcagagacctgtcctgtatataacagcac

SEQ ID NO: 18227 - DNA, 705 bp, Macaca Fascicularis
tgaggtgatgggtgcaggaaaggttcacaaatgtggagtgcccgcgtcccacacacgcgtgtgctctcgttcctccgtcgtgtgaaacgtggagtgcccgcgtcccacacacgcgtgtgctctcgttcctccgtcgtgtgtgccttgggtctcagctgctgacaggcagcctgctccggagcctacaggtgagatcccgggagactgacacgaagccagccgagatcagaggggattccgaccacagcctgctctctggatgtctgtcggcagtaccggctgagggtgggaggcaaacacgtcttgcccctgcttttcccagctcagcttggcaggagaaagtcattcgtacggctcgcgactcttgtgtaaatttggttttggtgcccacaggtgctttcctcccggggacaggtgtttctttcctgtttgtcttgtacctcgagagcctggctttgtgactagtgagaactctccccctagtttccgccagcccgagcatcactgcccaaggcgccagctcttagggggtttgtaacaagaggttccccatccacgaggggcttttcccgcctccacctttgttgctgggtcagtgctggaaagcacttctgactcctgcctgagaaggacccttctctgctgtctgtggggcggttccgggctggggggctgcctcctttgcacctgcttttgaaggtgtct

SEQ ID NO: 18228 - DNA, 782 bp, Macaca Fascicularis
  misc_feature (1)...(782): n = A,T,C or G
ggaannnnnnnnnttgtgaacaaaggannnnncagaaacnccagaccagtttatgacagctgatgagacaaggaacctgcagaacgtggacatgaagattggggtgtaacnnnnnnnnnnnnnnnnnnnnnnnnnncaacnnnnnnnnnnnnnnnnnnnnnnnnnnnnnnggacnnnnnnnnnnnnnnnnnnnnnnctgattgtttcattggaaatcttttttagcagaaaattttctactctttttgttttttgtgttttgttctttaaagtcaggtccaatttgtnnnnnnnnnnnnnnnnnnnnnnnnnnnnnnnnnnnnnnnnnnnnnnnngaatttgattgttccagttcccacgtggaagactttcatccctcaggtgtgctgtggatgacttctaacaaaaactacacatacatattcccgattgccaacatttcccccaccagctaaggacattccccagggataatagggcctggtccctgggaggaaatttgaatgggtccattttgcccttccagtatcctaatccttgggcattgatttccagtgaggttgggggttgtggtgtactagttacacatctcctttaacagacccccctagaaatttttcagatgattcggggagacacacaaagggtgaagctatttatctgtagtaaacnatttatcnnngttttcaaaatattaaaccctggaggtcctttgatcagtataattttttaaagttactttgtcagaagcacaaaagggtttaaactgatcataataaaca

SEQ ID NO: 18229 - DNA, 758 bp, Macaca Fascicularis
  misc_feature (1)...(758): n = A,T,C or G
catcgatggcaanannntctgtgtgcacgggggtctctccccctccatccannnnnnnnatcagattcggacaattgaccgaaagcaagaggtgcctcatgatgggcccatgtgtgacctcctctggtctgacccagaagacaccacaggctggggcgtgagcccccgaggggctggctacctatttggcagtgacgtgnnnnnnnnnnnnnnnncagccaacgacattgacatgatctgccgtgcccaccaactggtgatggaaggttacaagtggcacttcaatgagaccgtgctcactgtgtggtcggcacccaactactgctaccgctgtggaaatgtggcagccatcttggagctggacgagcatctccagaaagatttcatcatctttgaggccgctccccaagagacacggggcatcccctccaagaagcccgtgnnnnnnatacttcctgtgacccccccggcccctgcccctacagcccttctggccctcggaccactgtgactctgccttcttcctcagacggaggctgggcgttgtggggggagctgtcccggctctgctcttccccaagagggtgcttcgnnnnnnnnnnnnnnnntggagaggcctggagacccagctccatgttcctcctctcctctctccccacttgaaccatgaagtttccaataatttttttttctttttttccttcttttttctgtttgtttttagataaaaattctgagaaaaaaaaataatttttctt

SEQ ID NO: 18230 - DNA, 753 bp, Macaca Fascicularis
  misc_feature (1)...(753): n = A,T,C or G
aaaggaagtgctgtatattctaaactgnttcncccttnnnnnctttgctgctgcttcctgtcccactactgtagaaagatcgtttaaaaacaaaggaataaaaccatcctgtttgaaagcctctgcgtctttttactcaccaccttagagcaacctctgtattagtttttgatcaagaatgcaatatcttatagaaattttttgnnnnnnnnnnnnnagttggacttgttttaactttctgctgcttgagttgcctgatgctcagagctttttggtttggattaccattgcaaaagggaacttggtctggcattaagagtgtcctcttggagaaaataacaagagttttaacacttctagatcttagttctagatggagaaagtaacacaaacatcattttactcttatgatcaattgttaattgtaattgcatgacaaaccttatggaaaaggggtgaccttctagtagagtgtaacggggaagggaggattcttttctggttttcctttgtgcagtgaaactttgtgttgctgttgctttggctgtctgtgctgtagtggagtatttgtcagtctggggtggggaagatattgatgtatctgctactgctttatgagttcatttgttacgttatcttttaagaatagcatccatttaaacagttgacttacagtttgttaatgttgagatgnnnnnnnnnnnnnnnnnnnnnttcctgcttctgattttattgtgagggaaatatacaatt

SEQ ID NO: 18231 - DNA, 454 bp, Macaca Fascicularis
gtgtcctggtggagccataaggtggacaatgcatactggctgtggactttccagggccgcgttctgcagaagaacaacaaggaccgcttctgccagctgctgtggcggccccggcctcccacactcctgagccaggagcagatcaagcaaattaaaaaggatctgaagaaatactcgaagatctttgaacagaaggatcgtttgagccagtccaaagcctcaaaggaattggtggagagaaggcgcaccatgatggaagacttccggaagtaccgaaaaatggcccaggagctctatatggagcagaaaaacgagcgcctggagttgcgaggaggtgtggacactgacgagctggacagcaacgtggacgactgggaagaggagaccatagagttcttcgtcactgaggaaatcatccctcttgggaaccaggagtgacctgggagcgctgtgt

SEQ ID NO: 18232 - DNA, 914 bp, Macaca Fascicularis
  misc_feature (1)...(914): n = A,T,C or G
tnnnnnnnnnnnntaaatgaatggaaggtgatgatnnnaaaagggccaaagccatgaaaacaaaagagccggttaaaaaaatttttgttggtggccttctccagatacacntgaagagaaaataagagagtactttggtggttttggtgaggtggaatccatagagctccccatggacaacaagaccaataagaggcgtggattctgctttattacttttaaggaagaagaaccagtgaagaagataatggaaaagaaataccacaatgttggtcttagtaaatgtgaaataaaagtannnnnnnnnnaggaacaatatcagcaacagcaacagtggggatctagaggaggatttgcaggaagagctcgtggaagaggtggtggccccagtcaaaactggaaccagggatatagtaactattggaatcaagnnnnnnnnnnnnnnnnntataacagccaaggttacggtggttatggaggatatgactacnnnnnnnnnnnnnnnnnnnnnnnnnnnnnnnnnnnnnnnnnnnnnnngagtggttatgggaaggtatccaggcgaggtggtcatcaaaatagctacaaaccatactannnnnnnnnnnnnnnnnnnnnnnnnnnnnnnnnnnnnnnnnnnnnnnntccaatttgaagattcatttgaaggtggctcctgccacctgctaatagcagttcaaactaaattttttgtatcaagtccctgaatggaagtatgacgttgggtccctctgaagtttaattctgagttctcattaaaagaaatttgctttcattgttttatttcttaattgctatgcttcagaatcaatttgtgttttatgccctttcccccagtattgtagagcaagtcttgtgttaaaagcccagtgtgacagtgtcatgatgtagta

SEQ ID NO: 18233 - DNA, 747 bp, Macaca Fascicularis
  misc_feature (1)...(747): n = A,T,C or G
caacccaggaagctgannngcaggagnnnnnacaaatgggccctgtaagagctaggcaacagttggcttgtgatgagacacctcgaccgaggctttgggtggacggtgtcctacatgagttgataggatggggtgcttggtggatgggccgtggaggtccgtgagcgggaactgggcacacaccatcccagagggctcaggatgcaccaggagggaaagaagggcaacagactacacgactggacatgtgtggttggctgggatgaagttggagggagggccgggggattggtactgattccagggaggaagtattggggcttgatgaactatgatgaaaggaggcctctgagccataacaaggggcacatccaggatttccgccaccctggatttagtagagccagtaggccctggttgtcactctgggcagggatgctgtcagccctgagggttgccacccacctgtttgttgccctctgtactggcagggaaacatacaccccttgtgtcaccacaaactttgcttgtgtagtcagtagggctgaccctgccccaaggactcactgcatgtacccggacccctaggcctggccttnnnnnnnnnnntggcagcttctggattccagctgcagctgtgagccccatgctggctnnnnnnnnnnnnnnnnnnnnnnnnctggatacaatgttgggcaacaannnnnnnnnnnnnnnngcaggctcagaggctcactctaacccatc

SEQ ID NO: 18234 - DNA, 701 bp, Macaca Fascicularis
  misc_feature (1)...(701): n = A,T,C or G
gccggaggtcagtggccgtgcagtgttttgggnnagctgtgttgcgggggaagctgtgcggaaggagaagccggtggccacagcggagtcctgctctggtgacgcctgcttcatttacaagcctcaagatggctctgcgtagggcnnnnnnnnnnnnnnnnnnnnnnnnnnnnnnnnnnnnnnnngccagcatgggggtggggcttgccagggctnnnnnnnnnnnnnnnnnnnnnnnnnnnnnnnnnnnnngaacactgtgggggtgggagggggtctctgtacctcaggggatgccctgctgtggtcaaccagagaatcacccttcctggtctacagatggcagctgcaggttggtgactttgcaaatgcacttcctacagacgaactattaaaagacctgcaacattgtaaaaactcatttttccatcaagaccttggccaggtaaccttaggctcctgccaagaacaggaagtgatggccgtcnnnnnnnnnnnnnnnngctgctcctccagctctggggagtctaggccgtggggactgtccctggggaggcccctgctgtctccgtgacatctgtggcaggagtctctgagagcgggagctgcctagctacagtgttttcttgccaaggctaagtgttttgtgacnnnnnnnnnnnnnnnnntgcatcttcacgtatttatgcatgtggcaatcg

SEQ ID NO: 18235 - DNA, 614 bp, Macaca Fascicularis
tttttttttttaagattacagtgtttaatgtttatcaagatacatttctacagctagcaggataacagatgagttaatgggcctcagactacatccaagggaatgtttattgggcgatcccaattacaccacaagccagacgacctccagcgtttcctgtctttttactttcttcatttccacctttgcccaagtcatctgctttttcatggaccaccaatgtgcggccaatgatggaatggtctcctgagagcgagatcacagaatcttcgaaagacaccttggccacaccatctttgccagcagtcacattgcccaggtctccaacatgcctctcttcatcctttggcccaccgtgttgtctggatagaggattaaagtgaggacctgcactggtacagccttgtgtattatctccaaactgatgaacatggaatccatgcaggccttcagtcaatcctgtaatgcttccccacaccttcactggtccattactttcctgggttcatgcatggattctcaaaggccagggagaaggaattccacagaggcgtcttaagactagtactggtggccgggcgcggtggctcacgcctgtaatcccaccactctgg

SEQ ID NO: 18236 - DNA, 791 bp, Macaca Fascicularis
  misc_feature (1)...(791): n = A,T,C or G
agagagtagnnnnnnnnnnnncctgcccagggctgtgccttncnnnnnnnnnnnnnnnnaggtcaaatgtcaataaatatgaacctcctctagaaagttnnnnnnnnnnngacacctgccttgcctccctcttccattctctnnnnnnnnnnnnnagcttattttgccctataagaagcttcccagagcagcagaggcccttctactcccttttgactgtctcagcctcnnngattgcagcctttctagtgtgcttccttnnnnnnnnnnnnnnnnnnnnntcnnnnnnnnnnnnnnnnnnnnnnnnnnnnnnnnnntggtgtctcgcggatgtgnnnnnnnnnnnnnnnnnnnnnnnnnnnnnnnnnnnnnnnnnnnnnnnnnnnnnnnntgtagtgctccttgaccatgtttaataattcttccctcccctgctcttcctataccttnnnnnnnnnnnnnnnnnnnnnnnnnnncccttgggccttgggcgaccactgggtcctagtctgccttgtttgtgtccctgtaggaggtaggtccttttctcctctggcctagtaggggaccttgggtaacatcccannnnnnnnnnnnngtgagttacttgttttaggataaaaaatttaccacgaattctcatttatttaaatttccacagaaatccccattttgatttccctaagttccttgttctccctctaaaaagagaatgattacactcggcctgtttacctcaggattgttgtgattgtagaaacgaggctatgtgaaaattatataagtatata

SEQ ID NO: 18237 - DNA, 777 bp, Macaca Fascicularis
  misc_feature (1)...(777): n = A,T,C or G
gggcgtgccccagatcgaggtgacctncgacnnnnannnnnnnnnnnnnnnnnnnntcacggccacggacaagagcaccggcaaggccaacaagatcaccatcaccaacgacaagggccgcctgagcaaggaggagatcgagcgcatggtgcaggaggcagagaagtacaaagcggaagacgaggtgcagcgcgagagggtgtcagccaagaacgccctggagtcgtacgccttcaacatgaagagcgccgtggaggatgaggggctcaagggcaagatcagcgaggccgacaagaagaaggtgctggacaagtgtcaagaggtcatctcgtggctggatgccaacactctggccgagaaggacgagtttgagcacaagaggaaggagctggagcaggtgtgtaaccccatcatcagcggactgtaccagggtgcaggtggtcctgggcctggcagcttcggggctcagggtcccaagggagggtctgggtcaggccccaccattgaggaggtagattaggagccttcccaagattactgtttttgttttggcgcttcaagactttgtatttcctaatatttctgtttgtcatttcttagtttcctgtgtttgcaatgttcaagttttttggtgaagtactgaatgtaacttttttggtgaaatactgaacttgctttttttccggtctctacgtgtagagatgaatttatactgccatcttatgaccatttcttctttgtaatacactgaactcaggccattttttaagttagtac

SEQ ID NO: 18238 - DNA, 698 bp, Macaca Fascicularis
  misc_feature (1)...(698): n = A,T,C or G
tcattgatcccaagaaccctctatgcaaatttcacagagnnncagttttatttgcaaatgaaaaatataagtctgctttacaagaacttgaagaattgaaacaaattgttcccaaagaatccctcgtttacttcttaataggaaaggtttacaagaagttaggtcaaacgcaccnnnnnnnnnnnnnnnnntcttgggctatggatttagatcctaaaggagccaataaccagattaaagaggcaattgataagcgctatcttccagatgatgaggagccaataacccaagaagaacagatcatgggaacagatgaatcccaggagagcagcannnnnnnnnnnnnnnnnnnnnnnnnnnnnnnnnntgaaagtgatgaattttaacttctggaaatcggacttttacaactggatgtgtgactagtgctgacatgtttcttgtccctccatatactgagtctttactcttgagccggnnnnnnnnnnnnnnnnnnnnnataccatgagtgtgccactttcattggaccctgactgtatacggaatgaaaggcagtgcaatatttagctgctaacaagactggctcttttaccagtatgaatgacaatttatggggggtagggtggggactttcttttctgtttttctttaatctccctttgttggaaagtatcatgaaaggaagagttatttttatc

SEQ ID NO: 18239 - DNA, 764 bp, Macaca Fascicularis
  misc_feature (1)...(764): n = A,T,C or G
agactgtttttgtttnnnnantttnaacttttttttctcaattaagctgaactaaagtcaggcctggccattacgctccccacgtgcagccannnnnnnnnnnnnnnnnnnnnnnnnnnnnnnnnnnnnnnnnnnnnnnnnnnnnnnnnggagaccagtgaatgcccccgccttttggattttttgctcatcaattgtcttttccagacctcttaagtcacactcttaactagctnnnnnnnnnnnnnnnnnnnnncattagtttttttctagagcccacattggcccacgtagccccatcccatgcgggtagctggctctggctgcgcccccaaggcgcagacccgccctgggcacgctggcctgtgacggagcctgaggtcacagccccgtgactagcctgagaccttcctaggggctgtggctgtttccggggaggccgggaggggcagctgtgagccccgtggaggacgctgggagtaacgctgctttgctttggcaggttgaaggggcccggccaggactcggggaagggtggcctgagagcagcgatgacctctggggtcactgtcccaggagggacttcacctgcaacaagagctggaggcagccgcttgccccggaggcttgtcccctgaggcgcttcccgagcgaggtgcgggctcagggcctcaagtctcttctggaggacgggctgcggtgcgctggcggcttgcggggcggccagtccttgcccacaacgatgtggagccctgtgaaagtcg

SEQ ID NO: 18240 - DNA, 788 bp, Macaca Fascicularis
  misc_feature (1)...(788): n = A,T,C or G
atgatgctttgatttcatgagctttctcgggtcagatttggcaaattttaaagccatgaannncgattggtttgcagaaaactacatgggtagaaaaaccaaggttggattgcctcctttggagaagtttaatnnnnnnnnnnnnnnnctgtccctgggacacccatttggagccactggctgcaggttggtcatggcagctgccaacagattacggaaagaaggaggccagtatggcttagtggctgcctgcgcannnnnnnnnnnnnnnnnngctatgatagtggannnnnnnnnaaaataannnnnnnnnnnnnnnngacccgaagtttctgtgcaacactcacactaggcaatgccatttcaatgcattactaaatgacatttatagttcctagctcctcttaggaaaacaattcttgtggccttctgttaaatactttgcacttaagctttgccagtgttctgagcttttcaataatcagtttactgctctttcagggatttttaagccaccagaatctcacacacagatgtgtggggggttgtttttggtctctgttgtcactaaagactaaatgagtatttgcagttgggnnnnnnnnnnnnnnnnnnnnnnnnnnnnnnnnnnnaatatttgcaaaattatacttgttcttatctgtgtnnnnnnnnnnnnnnnnnnnnnnnnnnnnnnnnnnnnnnngcctaattgtggaaaaataattcagaatctaaataccactgaaaacttataaaaaatgtttagatacataaatatggtggtc

SEQ ID NO: 18241 - DNA, 706 bp, Macaca Fascicularis
  misc_feature (1)...(706): n = A,T,C or G
ggccacgtctcctnnnnnnnnnnnnnnnnnnnnnnnnnnnnnnnccggccagggagccgccgtcggagcccttgcacgcctgctctcttgtannnnnnnnnnnnnnnnnnnnnnnnnnnnnnnnnnnnnnnnnnnnnnnnnnnnnnnnnnnnnnnnnnnnnnnnnnnnnnnnnnnnnnnnnnnnnnnnnnnnnnnnnnnnnnnnnnnnnnnnnnnnnnnnnnnnnnnnnnnnnnnnnnnnnnnnnnnnnnaaaagaatggggacattctcaccctaaaaacacacagcaccttcaagaacacagagatcaacttcaagctgggggtggagtttgatgagacaacagcagatgacaggaaggtcaagtccattgtgacactggatggagggaaactcattcacctgcagaaatgggacgggcaagagacgacacttgtgcgggagctaattgatggaaaactcatactgacactcacccacggcactgcagtttgcactcgcacttatgagaaagaggcatgacccgactgcactgttgctgactactctgccaatcggctacccctcgannnnnnnnnnnnnnnnctcatttcttcctctgcattttgtacaaatccacgaattcttctgaggtcaggtgccactggccgggatccagttcccattgtgtatgtgtgtgttttttttttttaactgcactcacagg

SEQ ID NO: 18242 - DNA, 788 bp, Macaca Fascicularis
  misc_feature (1)...(788): n = A,T,C or G
agagcatgacgaggcggagcagcagcagnncancgacgaccactnnnnntcgacaagcccgtgtcacctctgctgctggcctcgggcatggcccgcgactggcccgacgcccgcggtatctggcacaatgacaataagaccttcctggtgtgggtcaacgaggaggaccacctgcgggtcatctccatgcagaaggggggcaacatgaaggaggtgttcacccgcttctgcaccggcctcacccagattgaaactctcttcaagtctaagaactatgagttcatgtggaaccctcacctgggctacatcctcacctgcccatccaacctgggcacagggctgcgggcaggagtgcacatcaagctgccccacctgggcaagcatgagaagttctcggaggtgcttaagcggctacgacttcagaagcgaggcacaggcggtgtggacacggctgcagtgggcggggtcttcgacgtctccaacgctgaccgcctgggcttctcggaggtggagctggtgcagatggtggtggacggagtgaagctgctcatcgagatggagcagcggctggagcagggccaggccatcgacgacctcatgcctgcccagaagtgaagcccggcacacacccgacaccagccctgctgcttcctaacttattgcctgggcagtgcccaccatgcacccctgatgttcgccgcctggcgagcccttagccttgctgtagagacttcgtcacccttggtagagtttatttttttgatggctaagatactgctgatgctgaa

SEQ ID NO: 18243 - DNA, 1185 bp, Macaca Fascicularis
  misc_feature (1)...(1185): n = A,T,C or G
atccagatcacaggagccctggaggaccannnnnnnnnnnnnaagcagtacgagcacaacatcatcaactannnnnnnnnnnnnnnnnnnnnnnngggagaccatcagctcannnnnnnnnnnnnngtctttgacaacaagcnnnnnnnnnnnnnnnnnnnncacatacgtgttggannnnnnnnnnnnnnnnnnnnnnnnnnnnnaaccannnnnnnnnnnnnnnnnnnnnnnnnnacgagnnnnnnnnnnnnnnnnnnccaggagcagatgaatgagttcnnnnnnnnnnnnnnnnnnnnnnnnnnnnnnnnnnnnnnnnnnattgatcatgaggatttcagannnngnnngatttccatgggttatgacctgggtgaagccgaatttgcccgcatcatgaccctggtagatcccaatgggcaaggtactgtcaccttccaatccttcatcgacttcatgactagagagacagccgacacggataccgccgagcaggtcatcgcctccttccggatcctggcttctgataagccatatatcctggcggaggagctgcgtcgggagctgcccccggatcaggcccagtactgcatcaagaggatgcccgcctactcgggcccaggcagtgtgcctggcgccctggattacaccgcgttctcctccgcgctctatggagagagcgatctgtgacgctgaggttctgtaatcactgatcccatcagaacgcaataaaagcagcagtcacagttggtttcctggaaactttgacaggctttattaagttgggagagagaggggggaaaaaagcctcttgtagttnnnnnnnnnnnnnnnatataacacggctaaaatgaagtttctacagtatatgacatagtgtgcttcataaataggtttatttctgagtttttagctaaatgtaatgaaatatcaggttgatttctttgattaaacggaacaaattacttgagtagtaggaaattaggaggatctagggacagaaggaaagtgaaaaatgtgaaaatacaaaatacccaagatttaagacgggggggggggaatccacaaactggtaaataaaggtttgctatttgtaaaaaatttcatttatctctaatatgcttatgtgattgcccctaggggagtatatttgggattctaatgttttattttcatgctcat

SEQ ID NO: 18244 - DNA, 711 bp, Macaca Fascicularis
  misc_feature (1)...(711): n = A,T,C or G
gaggggtggtgcctatttccactgtaagaatcttggtggatttgtgtctcaaatcggataagagaagtctatttaaagagcagatgcnnnnnnnnnnnnnnnnnnnggagcnnnnnnnnnnnnnnnnnnnnnnnnnnnnnttgaaaaataaaattaatttgttatcaggttgtttcagttgtattggatgccctatctgctaaagcaaaaagtactnnnnnnnnnnnnnnnnnnnnnnnnnagaagagagttgcatttgtattaataagaaatttgtatacccacgcttcagctactatctaatcacccgaagatttaagaaacaccaaatttcagtttgtttctaacattgttcatctttagtgtactttgttttatataataaagtatgcctgttatattaaataataaaaatatggcaattagtgatatagcataccaaaacaaagatgttttagatagagtctggcaaagactatccnnnnnnnnttttaaagaattcagacattttttcctgtggatatttctccatcctaaaaaaagtggcaaccaaggaaaatatttagatgcaacttactagaatgatgtgaaagaaatggtgattctggtatcatggtgtttattttctttcttataactgcagagaaaatatcctgactaaacaaaaattcattttttggattcctttcttttacaaattgtgctgaggca

SEQ ID NO: 18245 - DNA, 722 bp, Macaca Fascicularis
  misc_feature (1)...(722): n = A,T,C or G
aagtacgtggtcctnntttnctaccctctggacttcacttttgtgtnnnnnnnnnngatcatcgcgttcagcaaccgtgccgaggacttccgcaanntgggctgcgaagtgnngggcgtctcggtggactctcagttcacccacctggcttggatcaacaccccccggaaggaaggaggcttgggccccctgaacatccccctgcttgctgacgtgaccagacgcttgtctgaggattacggcgtgctgaaaacagnnnnnnnnnnnnnnnnnnggggcctatttatcatcgatggcaagnnnnnnnnnnnnnnnnnnnntgttaatgatttgcctgtgggacgctccgtggatgaggctctgcggctggtccaggccttccagtacacagacgagcatnnnnnnnnnnnnnnnnnnnnnnnnnnnnnnnnnnnnnnnnnnnnnnnnnnnnnnnnnnntgacagcaannnnnnnnnnnnnnnacacaattagnnnnnnnnnnnnnnnnnnnnnnnnnnnnnntacctgggtgcctgtgctgggtgtccacctgtgcccccacctgggtgccctgtgctgacccaagaaaggccagacctgcccctccaaaccctacagtctgggaccctggagggctaggccaaggccttctcatgcctccacctaggagctgaatagtgacgccctcccccgagcccacctagccgcacacaggcctagag

SEQ ID NO: 18246 - DNA, 616 bp, Macaca Fascicularis
  misc_feature (1)...(616): n = A,T,C or G
acatggagacnnncaannntggggatttagaggctgtcccatgnnnctgcctgggtggccctcccacaaaaagaggatagtgaggggagcggttgagacctggatttgtccttttctttatggctccttgtgggggggccagctgatctcatcccccaggctcttgaaccccctgctgtgcaggacggagaggcacagggccacagcctcccgcnnnnnnnnnnntcttnnnnnnnnnnnnnnnaggtctacgtgcccactggcttctctgccttcccttctgagctaatgcacacnnnnnnnnnnnnnnngaggttcaagtacccgaagctcatctcctannnnnnnnnnnnnnntgggggccactttgcagcctttgaggaaccagagctgctcgcccaggacatccgcaagttcctgtcagtgctggagcagcagtgaccaccccacaccgccccctgcctccctccacaagtgccctccaggcttttctttgggaagataccccttttctgaggaatgagtttgcctccgtcccctgcccatgctgggagcccacacttaccccctcacccctccaagctcactccccaatccccaactctgtgcgaaagca

SEQ ID NO: 18247 - DNA, 750 bp, Macaca Fascicularis
  misc_feature (1)...(750): n = A,T,C or G
agtgcacgcgtgcgtgactacgtagagtatatatagatctctnnnnnntagcaaaggtgaataccagatgtaaatggtgcctctgggcaatggaggcttgtattttgcacattttataaaaacttgagagaatgagatttctgcttgtatatttctaaagaggaaggagcccaaaccatcctctccttaccactcccatccctgtgagccccaccttacccctctgcccctagccaaggagtgtgaatttatagatctaactttcataggcaaaacaaaagctttgagctgttgcgtgtgtgagtctgttgtgtggatgtgcgtgtgtagtccccagccccagactggattggaaaagtgcatggtgggggtcttggggctgtccccacgctgtccctttgcccacaagtctgtggggcaagagactgcagttctccgtcctgggtgtctgggctgctcacctggcctgttcaggcttcccaccccatgccctgggctgggcatgccccccggaagggaccccggacacggctcccacgtccaggcttaaggtggatgcacttcccgcacctccagtcttctgtgtagcagctttaacccacgtacgtctgtcacatccagtcccaagacggctgagtgacccaagaaaagcttccccgacacccagacagaggctggagggctggggctgggtgagggtggcgggcctgcagggacattcttactgtgctaaaaaagccaactgcaaac

SEQ ID NO: 18248 - DNA, 638 bp, Macaca Fascicularis
  misc_feature (1)...(638): n = A,T,C or G
ctctcgggcaggggtaggggcagnngtacnnnnngattcatgcgattctcctacctnnnnnnnnnnnnnagctgggattacaggcacacannnnnnnnnnnnnnnnnnntaatttttgtatttttagtagagatgggattttgccactttggccaggctggtcttgaactcctggcctcaagtgatcctcccacctcannnnnnnnnnnnnnnnnnnnnncagatgtgnnnnnnnnnnnnnnnnnnnnccactgtttcctaatcccgcttctccaccaggctatcgcaggtgatccctcctgagccccagtccccccaccccacttttccctatatgatgactcctctccggggtccccaagccctaggactggtccccactgcagcacgtcccctcctcagcctcccaggctgaccctcccctccgcttccctcccnnnnnnnnnnnnnnntgggaagccctgttggcccggcgcctgccgccgccttttgtgcccacgctgnnnnnnnnnnnnnnnnnnnnnnnnnnnnnnnnnnnnnnnnnnnnngaggcccccacactgagcccgccccgtgacgcgcggcccctcacagccgcggagcaggcggccttcctggacttcgacttcgtggcgggg

SEQ ID NO: 18249 - DNA, 754 bp, Macaca Fascicularis
  misc_feature (1)...(754): n = A,T,C or G
gggatannnnnnnnnnnnnnnnnnnnnnnctnnnttcatagaagtgatggcaattcttcacgtgtaaacaataccagtgcacagaacctttatatattttttgaaaccagtactgtgctcttcatataacaaagctgcttcaaggatgtgacctttttctaaaggtatgtaatgtgagaagccggcctgccttattttcttttttctttttaatcattaaaaatggtttgtggccaggcccagtggctcaggcctataattctagcactttgggaggccaaggcaggaggatcacttgagcccacttgtttgaggccagcatgcacagcatagcaagactgcatctctacagaaagtaaaaaaattacccgagtgtggtggtgtgcacctgtagtcccagctacttgggaggctgaggtgagaggatcacttgagcttgggtgaggtgaggctacagtgagtcctaatcatgccactgcactcaatcttggacaacagagcaagaccctgtctcaaaaaaaaaaaaagtatgcattatttttatgagatgaagtgcatcaaacttgggaaagatttgaggaggctgggaccctcctgggaaaacccaccttgaaaacagatacgagagatttagaagtgattcctactttcagaaggaggtggattcaaatacttcaaaagtcccttcctctgctcagtgtttatagttcaatgaataatttcagtatttgtatgtgttcttgtcattctattt

SEQ ID NO: 18250 - DNA, 716 bp, Macaca Fascicularis
  misc_feature (1)...(716): n = A,T,C or G
tatgagactcacagttccacgtggccaggggagcctcacaatcatggtggaaggcaaggaggagcaagtcacatcttacgtggatattggcaggcaaaaagagcttgtgtagggaaactcccatttttaannnnnnnnnnnnnnnnnnnnnnnnntcaccatcacgagagcagcacgggaaagacctgtccccgtgactcagttacctcctacctggtccctcccacaatatgtgggagttcaagatgagatttgggtggggacacagacaaaccatatcacgnnnnnnnnnnnnnnnnnnnnnctgaagtgcgcattcctgagcactgtagtttcgtgtgtgtgtgtgtgtatatctnnnnnnnnnnnnnnnnnnnnnnnnnnctccagacatctctctttcttgctgaagacatnnnnnnnnnnnnnnnnngagctccccgtggtccagactttgctaattgtgtccccgtagtgtggtctacatgtttccctgatttctctgtttcctgtaaattggtagttgggtctggggacagaatcagtttcagtgtgatattttttgggggcacaggaagacctcatagctggtgggggcannnnnnnnnnnnnnnnnncnntttgggatgtgggcgaccatcacgggcagggcctgggtccattcattccttnnngctgcgaagtgccgagactcattcaagcgtcccttcattttt

SEQ ID NO: 18251 - DNA, 427 bp, Macaca Fascicularis
ccacctccccaaccagagatagctttagctttgaggacttcctggacctcctcagtgtgttcagtgacacagccacgctcggacatcaagtcccattatgccttccgcattttagactttgatgatgatggaaccttgaacagagaagacctgagccggctggtgaactgcctcacgggagagggggaggacacacggcttagtgcatttgagatgaagcagttcatcgacaatatcctggaggagtctgacattgacagggatggaaccatcaacctctgtgagttccagcacgtcatctcccgttctccagaatttgccagttcctttaagattttcttttgacagcagccccagtgtgtttcctggcaccctgtccaagaacctttatactggtgaggtgtggccaagatcaagcctgtgttgc

SEQ ID NO: 18252 - DNA, 719 bp, Macaca Fascicularis
  misc_feature (1)...(719): n = A,T,C or G
tcatagtaatgaaactttgnnnnnnnnnnnnntatattggtaattgttaggtggactacttttctccagggactttttgcactcttgtgactaatttctataacttatggttcagcatttgttactatttacannnnnnnnnnnnnnnnnnnnnnnnnnnnnngtgagagacaacagttgcctccttttgacaaatactggatattagcagtttatttatgaaaatagcatattatcacttgtcaaatcattgaaattcatttggggtcaaagacttgagtgacccagtattgagccatgaaataatttcgtgtaacctgcattacaagtacgttcatgaattctgtatcttctttggtttcctgtgtctttttaatcaagtctagaaactgtgttcatcaatcactnnnnnnnnnnnnnngggagttagattttaagatagaattatgactgttagcttttctccttatggaaaatagcatcttagtcttagaaatcagtggtttgtaatannnnnnnnnnnnnnnnnnnnnnnnnnnnnnnnngacagttttgaatctaggttaataacactttatttataaagnnnnnnnnnnnnnnnnnnnnnnnnnnnnnattttaaatgtgttaatgctgtgcctttgatttgttagctttaaagttagtttaagacttttacactgccagtattccagatttggtgaaaataatacttttaa

SEQ ID NO: 18253 - DNA, 387 bp, Macaca Fascicularis
  misc_feature (1)...(387): n = A,T,C or G
cgacgcgagtgggagcaccaggatcccgggctcggaacccgactacacggattgttttaagaaaatggcagacaaaccagacatgggggaaannnnnnnnnnnnnnnaggccaagctgaagaaaacggagacgcaggagaagaacaccctgccgaccaaagagaccattgagcaggagaagcggagtgaaatttcctaaaatcctggaggatttcctacccccgtcattttcgagaccccagtcgtgatgtggaggaagagccacctgcaagatggacacgagccacaagctgcactgtgaacctgggcactccgcgccgatgccaccggcctgtgggtctctgaagggacccccccaatcggactgccaannnnnnnnnnnnnncc

SEQ ID NO: 18254 - DNA, 778 bp, Macaca Fascicularis
  misc_feature (1)...(778): n = A,T,C or G
caagtatgcctataacataattccaaaggaggtgatgcaggtactgagccacgtggtcctggagttccccctgcaacagatggattccccgcttgactcaagccgctactgtgccctgctgcttcctctgctcaaggcctggagccctgtttttaggaactacataaagcgtgcagccgaccacttggaannnnnnnnnnnnnnnnnnnacttcttcctagagcatgaagctcttggtatttccatggccaaggtactgatggctttctaccagctggagatcctggctgaggaaacaattctgagctggttcagccaaagagatacaactgacaagggccggcagttgcgcaagaatcaacagctgcagaggttcatccagtggctaaaagaggcagaagaggagtcatctgaagatgactgaagtcacactgcctgcccctgtgggtgtgattgagtaccctcctggctcctgggctgggacaagtaaggaactagctgcagagggatgaatgaccaccatccaggctgagactgaaaggagcagaggctggaactacagtattctctcccctgctagcaaccatgtgcctcccatcctgactgtggaattgggatgtgggaagtgtggctggaacaaagcttctgcctagggaggagctaagcaggccctgcagttggaggaaggccagaggaacagctttgtgctccggctttccctcagggaacagcagagagcagctggctctctctgctgcttgtatatgttaatataaaa

SEQ ID NO: 18255 - DNA, 730 bp, Macaca Fascicularis
  misc_feature (1)...(730): n = A,T,C or G
tagctttatggnatctgcgtaacttaaaattaaaactccnnnnnnaatacatctccaaaattatctattactaggtccactggtctcnncataannnnnnnncacccacttcaagtggtaaatacngntgctctaaagactttatttaaataaatattggggaagaacaatcagcagaagatgcagaagatgttcttctcagaactcctgtttattcatggaggacacactgctaagatttcagattttagctggaacccnnnnnnnnnttgggtcatttgctcagtgnnnnnnnnnnnnnnnnnncagatatggcaaatggctgaaaatatttacaacgatgaagagtcannnnnnnnnnnnnnnnnnnnnnnnnnncaaggatcttaaacccaaagtacgagagatgtttctgttgaatgtaatgctacatgaatgcttgatttgtcaagcgccaaaaaggcattgtatagtaggaaatgtaagtgggttggcttatggcttctttattctctgattctagcactttnnnnnnnnnnnnnnnnnnnnnnnnnnnnnnnnagctattagggaagagaagaatgttacttaagaaagaacatcattgattttaaatacaagtnnnnnnnnnnnnnctttgattcaactgttttaagtcctcattttctcaaactaagtgcttgctgttcccaaatatgcaagaataacttttacactttttccttccaac

SEQ ID NO: 18256 - DNA, 766 bp, Macaca Fascicularis
  misc_feature (1)...(766): n = A,T,C or G
acagatgnnnnnnnnnnnnnnnnnnnnnnnnnnnnnnnnnnnnnnnnnnnnnnnnnnnnnnnnnnnnnnnnnnnnnnnccaggcaggtcccattgccacctcctgctcactcagtcccgggctctgccaagtggtcctgggaatggcggtgggcccgtccagcgtgggccaccactggggccgggggccgcatgccgggcgggccctccagagaaggacacaaannnnnnnnnnnnnnncaggcaccaatgggaatggaccaaagannnnnnnnnnnnnnnnngtatattccagagttagatctaagctccaggcacgcctgaagatgtgttgctactctgacgccccgagtttctgtccacacattgcatgcacagtgccccacacattggatactgttgttccacgataatttctcccattttccagagcatttaacatagcttggaggcgtaagatggctctgttttttnnnnncacagaaacatttgagcattgtatttctcgcatcccttctcgtgagcgcttagacctttttctattttagtcgcattttgttttggaattttgcttttgtatgaacactcagcagaaaagtacttacttcttgccagttatctattaaccaaaacctttgatttgtagttttaaagattaaccctcaaagttctcttcataactgccttgacattttgggttgttctgttctgttaattttcttttgcttttttgtgttttttgtttgtttttacttttgcattaagac

SEQ ID NO: 18257 - DNA, 704 bp, Macaca Fascicularis
  misc_feature (1)...(704): n = A,T,C or G
ggagcacagcggcatctttggcttcagcgtgtcccataccacaaggaacccgaggcctggcgaggagaatggcaaagattactactttgtaaccagggaggtgatgcagcgtgacatagcannnnnnnnnnnnnntgagcatgccgagttctcagggaacctgtatggcacgagcaaggcggcggtgcaggccgtgcaggccatgaaccgcatctgcgtgctggacgtggacctgcagggtgtgcggaacatcaaggccaccgatctgcggcccatctacatctctgtgcagccgccctcactgcatgtgctggagcagcggctgcggcagcgcaacactgaaacggaggagagcctggcgaagcggctggctgctgcccgggccgacatggagagcagcaaggagcccggcctttttgatgtggtcatcatcaacgacagtctggaccaggcctacgcggagctgaaggaggcgctctctgaggaaatcaagaaagctcaaaggaccggcgcctgaggcttgctctctgttctcggcaccccaggcccatacaggaccagnnnnnnnnnnnnnnnnnnnnnnnnnnnnnnnnnnnnnnnnnnnnnnnnnnnncttggccagcacatggagtggaggggatgctgcccctgtggttggaacatcctggggtgacccccgacccagccccaccgggctgtcccct

SEQ ID NO: 18258 - DNA, 659 bp, Macaca Fascicularis
  misc_feature (1)...(659): n = A,T,C or G
cagtgaggcannnctgacccaggacgggccaggcagtcccagtggctctgaggacaagggcaacccggctccagagctgagggcctcctttctgccacgtaccttgtctctgcggaactcnnnnnnnnnnnnnnnnnnggaggcaggcagtgggaccctggaggatgagtggcaggccatctcggagatcgcctccacttgcaacaccattctggagtcgctgtcccgagagggacagcccatcccagagagcggagaccctaagggaactccaaagtctgatgctgagccagagcctgggaacctctcagagaaggtctctcacttggagtccatgctcaggaagctgcaggaggacctgcagaaggagaaggcggacagggcagccctggaggaggaggtgcggagcctgagacacaacaaccgacggctgcaggcagagtctgagagcgcagccacacgcctgctcctggcctccaagcagctgggctctcccaccgctgacctggcctgagccacctgggaccacctgggcccctgagggcaccgtggtcacactgggcccttctcaggaactctccctgcgcagaggcgcgtcttagcactgcccccgtccccagccctttatttggtggcctccaccccttccctgtttgtaa

SEQ ID NO: 18259 - DNA, 682 bp, Macaca Fascicularis
  misc_feature (1)...(682): n = A,T,C or G
tggcctgggnnnnnnnnnnnnnnnnnnnnnnnnnnnnnnnncccccacccagctcaccagtctgaatggagttgccttaaataggcaggtggtagcgtgctcactgcccttggagctgtgaccggctcctgcctgtccaccccttccccaggtggcttctgcttatcttatcatcctggggctcnnnnnnnnnnnnnnnggtcagggtcctggggacagcacccagatatgcagagtcaccctgacgctggtaccgggctgacctcagctcccggagggtcgcacagcctccccatccctccttccccgcccttgtggctcgtgtccacctgatcccaataccagctttcccgagcccctgccaccccagagggcagccacgacagggagaggtatagatgccaccatctgaggtagaggaatgtnnnnnnnnnnnnnnnnnnnnnnntgagacacttgcctcggggggccgggagcctggggggccagggcccctgaagaaggctcccctctgtatcccccnnnnnnnntcaacactggactgatcctgaatggcacaggccaaggggaggctagcctcacctttctacccagggcccctgccctgcccacctcaggcccccaccctccactcctccccacggtactgtgaacatcctgtgactcagcgcagagacggata

SEQ ID NO: 18260 - DNA, 757 bp, Macaca Fascicularis
  misc_feature (1)...(757): n = A,T,C or G
cggagcggttgcagggcacacattactcggtgcagtcggacatctggagcatgggcctgtccctggtggagctggccatcggaaggtaccccatccccccgcccgacgccaaggagctggaggccatctttggccggccagtggtcgacggggaagaaggagagcctcacagcatctcgcctcggccgagaccccccgggcgccccatcagcggtcacgggatggatagccggcccgccatggccatcttcgaactgctggactatattgtgaatgagccgcctcctaagctgcccaacggtgtgttcacccccgacttccaggagtttgtcaataaatgcctcccggtcctgcccagcggagcgggcggacctgaagatgctcacgaaccacaccttcatcaagcggtccgaggtggaagaagtggattttgccgggtggttgtgtaaaacccnnnnnnnnnnnnnnnnnnnnnnnnnnnnnnnnnccgccgtgtgacagcggctgggctccccgcgtcccgctggtgacctgcccaccgtccctgtccacgccccgcccttccagctgaggacaggctggcgcctccacccaccctcctgcctcacccctgcggagagcaccatggcggggcaactgcgcacgcagggacgggggtctcctctcctgcccgtcccggccgaggtgcctccggggacgggcgacgctgctgtgtgtggtctcagagcctctgcttccttaggtacaaaacgaaaca

SEQ ID NO: 18261 - DNA, 785 bp, Macaca Fascicularis
  misc_feature (1)...(785): n = A,T,C or G
tannnnnnnnnnnnnnnnnnnnnnnnaagatgcaaaagatgccaaagaatgtgttcaagagtgtgtgagtgagttcatcagctttnnnnnnnnngaggcaagcgaaaggtgccatcaagagaaacggaaaacaatcaatggagaagatattctctttgctatnnnnnnnnnnnnnnnnnnnngttatgtggaacctctgaaattataccttcagaaattcagagaggctatgaaaggagaaaagggaattggtggnnnnnnnnnnnnnnnnnnnnnnnnnnnnnnnnnnnnnnnnnnnnnnnnnnnnnnnnnnnagttaccagcnnnnnnnnnnnnnacagacggtcaacaacaaaatgttatggtttacacaacatcatatcaacagatttnnnnnnnnnnnnnnnnnnnnntttcatgatctgaagaaatgatggaatggggagtgtagagaaatgagagtctgtatgattctggaacagagacatcagaaggaaagactggtgaaaagatgtatctttgtatattnnnnnnnnnnnnnnnnnttcctgatgcttgactannnnnnnnnnnnnnnntgacttgagaatctttttcatgaatgattttaaagaaaaatttggattttaaaggtattaaaatatttttgttttgtacgagtttgttgctctgtatgactcctgtatgcattgtatattgcaatttattactgtcagagatttgtagacagtttcttattttcatattgaatcatgnnnnnnnnnnnnnnnnnnnnngcagctggg

SEQ ID NO: 18262 - DNA, 744 bp, Macaca Fascicularis
cccatggaagatgagcctacctccaaaaaactgaagacagaagacagcctcatgccagaggaggagttcctgcgcagaaacaagggtccagtgtctatcaaagtccaggtgcccaacatgcaggataagacagaatggaaactgaatgggcaggtgctggtcttcactctcccgctcacggaccaggtctctgtcattaaggtgaagattcatgaagccacaggcatgcctgcagggaaacagaagctacagtatgagggtatcttcatcaaagattccaactcactggcctactacaacatggccaatggcgcagtcatccacctggccctcaaggagagaggcgggaggaagaagtagacaagaggaacctgctgtcaagtccctgccattttgcctctcctgtctcccaccccctgtcccagacccaggagcccccctgaggccttgccctgcctgcatatttgtttccctcttaattcagtttgggaattcaaattgttctgcagaggttcattcccctgaccctttccccaccttggtaagagtagctgggctttctaagccactctctggaatctctttgtgttagggtcttgatttgaggacattcatttcttcaagcagccaattagcaactgagagcccagggatgtcctacaggatagtttcatagtgacaagtggcacttggctaatagaatatggctgttattgtcattaatcattttgtacctgacatggg

SEQ ID NO: 18263 - DNA, 745 bp, Macaca Fascicularis
  misc_feature (1)...(745): n = A,T,C or G
tatgcaaaagnnnngacttgactttagnnngcaaaatgaggaatgtatatgttttgtgggaacagatgtttcttttgtatgtaaatgtgcattcttttaaaagacaagacttcagtatgttatcaaagagagggctttaatttttttaaccaaaggtgaaggaatatatggcagagttgtaaatatataaatatatatatatataaaataaatatatataaacctaaaaaagatatattaaaaatataaaactgcgtcaaaggctcgattttgtatctgcaggcagacacggatctgagaatctttattgagaaagagcacttaagagaatattttaagtattgcatctgtataagtaagaaaatattttgtctaaaatgcctcagtgtatttgtatttttttgcaagtgaaggtttacaatttacaaagtgtgtattaaaaaaaaaaacaaaaagaacaaaaaaatctgcagaaggaaaaacgtgtaattttgttctagttttcagtttgtatatacccgtacaacgtgtcctcnnnnnnnnnnnnnnnncggaagtgttcaatgacgggcgagcgtgtgccatcccgttttgaagtgtaggcagacacagggacttgaagttgttactaactaaactctctttgggaatgtgtgtctcatcccattctgcgtcatgcttgtgttgttactactccggagacagggtttggctgtgtctaaactgcatcaccgcgttgtaaaat

SEQ ID NO: 18264 - DNA, 1186 bp, Macaca Fascicularis
  misc_feature (1)...(1186): n = A,T,C or G
tttggtccagcgtaacgtgaacatctttaaattcatcgttcctaatgttgtaaaatacagcccaaactgcaagttgcttattgtttcaaatccagtggatatcttgacctacgtggcttggaagataagtggttttcccaaaaaccgtgttattggaagnnnnnnnnnnnnnnnnnnnnnnnnnnnnnnnnnnnnnnnnatgggggaaagactgggagttcacccattaagctgtcatgggtgggtccttggggaacatggagattccagtgtgcctgtatggagtggaatgaatgttgctggtgtctccctgaagactctgcacccagatttagggactgataaagataaggaacagtggaaagaggttcacaagcaggtggttgagagtgcttatgaggtgatcaaactcaaaggctacacnnnnnnnnnnnnnnnnactctctgtagcagatttggcagagagtataatgaagaatcttaggcgagtgcacccagtttccaccatgattaagggtctctatggaataaannnnnnnnnnnnnnntcagtgttccttgcattttgggacagaatggaatctcagaccttgtgaaggtgactctgactcctgaggaagaggcccgtttgaagaagagtgcagatacactttgggggatccaaaaagagctgcaattttaaagtcttctgatgtcatagcatttcactgtctaggctacaacaggattctagttggaggttgtgcatgttgtcctttttatatgatctgtgattaaaacagtaatatcataagacggagtgggaaaagcattaactccggaagttagaaataggaatggttcgtgaaatccacagctatatcatgatgttaganggctattaatcttgtgtagtcatnnnnnaaccggttagtgtgaaatnnnnnnnatccaccattgccaattctgtannnnnnnnnnnnnnnccatgagccaggaacaccccacccctgcgtccaccatgaccctcttccccacgctgacctgtgttccctccccatttatctttcctgttccggggaggtggggctgggatgtctctatctctgtctcaacttcatggtgcactgagctgtatcttcttccttccctattacaattagaacctgagtataaatttactttttcaaattattatcatgagaggt

SEQ ID NO: 18265 - DNA, 785 bp, Macaca Fascicularis
  misc_feature (1)...(785): n = A,T,C or G
ggcaaggtcagtgaggggccagtagacccctggagaagcagtaccgacaatgacgaagatacccagatcccttcccaacccnnnnnnnnnnnnnccatcaaggggcagggtcgggagaggaggggggatgggggagcagacccctgagatttgggcataggnnnnnnnnnnnnnnnnnnnnnnnnnnnnnnnnnnnncatcccagccccgaagccagggccatgccagcaggccccaccatggagatccaaacaccacaccagccagcagaatggacgctctgacatcgccagcnnnnnnnnnnnnnnnnggtgcagcaccaaccgcgtgcctgtgtggcgggactggagggcacagttgaggaaggagggtggttaagaaatacagtggggccctcttgctgtcccttgcctagggcacttgcattccagccttgctgcatttgctccctcgattcccctttcctcctcactgcctcccaagcccaccctactccaaaataatgtgtcacttgatttggaactattcaagcagtaaaaggaaatgaatcccacctttactaaaacactttctctgaatcccccttgcccctcactgatcttgcttttccctggtctcacgnnnnnnnnnnnnnnnnnnnnnnnnnnnnnnnnnnnnnnnnnnnnnnnnnnnnnnnnnnnnnnnnnnnncnnnngctagnnnnnnnnnnnnnnnnngacagggaccacctctacaaaaaataaaaaaaagtacctcccctgtctcgcacagtgtcccaggacccc

SEQ ID NO: 18266 - DNA, 713 bp, Macaca Fascicularis
  misc_feature (1)...(713): n = A,T,C or G
cgcagcctaccactgtactgctgccctcttttacctcagcgcctcggtcctggaggccctgnnnnnnnnnnnnnnncaagacggcttcacctacaggcactaccnnnnnnnnnnnnnnnnnnnnnnnnnntcctacgtagccactctgctctacgtggtccatgccgtgttctctctaatcannnnnnnnnnnnnnnnnnnnnnnnnnnnnnnnnnnnnnnnnnnnnnnnnnnnnnnnnnnngccgctccaccttccggtataactttttagagaacagaaatgccctggatggtggaaaaaagaaaacaacccctcaccccccacccccaacaacaacaacaaaagccctgccctattgcttgtgggtgctgcgtttactctcccgtgtgccttcgcgtccggggcgggagctcgctgtgtctaacctctgactgctgcgctgtctgctagggtcacctcctgtctgtgaaaggggaacttcttgttttgggggtgggaggtggggacctgacctgagaaggaaacacagatcccctgctgacccctggaccagctctcgagaactacctnnnnnnnnnnnnnnnnggctctcctgagcgtcccctcctgtggcatgttttaagtcttcacggacgttctgtgtgtcatggggactaaaactcaccccacagatctttccagaggtccaaggtggaagatggaaccctgtga

SEQ ID NO: 18267 - DNA, 330 bp, Macaca Fascicularis
agagaacatactttgtatgacttaaatccttctaaattattgaaacttgttttatagcccagaatataatcaatcttgataaacgttccatgtgcacttggaaataatgtgttttctgttgttgggtggagtgttttataaatgtcaatgaaatcaagtggattgttcaagtcttttgtgtccttactgattttcagtatatttgttttacccattatagagacagaggtattgaaatccccctgctataattgcatatgtgtgtttttctcactttagattcgtcagtttcgttcatgtatttcgaaagtgttaaagggttcatacaca

SEQ ID NO: 18268 - DNA, 708 bp, Macaca Fascicularis
  misc_feature (1)...(708): n = A,T,C or G
caaaaattcctntncnnaaaggaaaaggnctttcccaataagcctcagctttctacgatctaacaagatagccaccaagatccttttcaaaacttattttaggcaaatatgagttttattgtccgtttacttgtttcagagtttgtattgtgattatcaatcaccacactatctcccatgaagaaagggaacagtgaagtattaagcactagaggaagcagccaagtcggttagtggaggcatgattggtgctcaattagcctctgcaggacatggaaacctctttccagaggaggttcagtgaattctgtaggagaggttgtctgtggccagaatttaaacctatactcactttctcaaattgtatcactgctcacactgctgatgatttagagtgctgtccagtggagatcccacccgaacgtcttatctaatcatgaaactccctagttccttccatgtaacttccccgaaaaatataagtgtttcataaatttgagagtctgtgacccatttaccttgcatctcacaggtacacagtatataactaataaccaaggaccacatattatcactaacacacacatgttataatcatttatctcatatatacatacacacatatactctcaaagcaaataatttttaacttcaaaacagtattgacttgtataccttgtaattngaaatatgttctttgtaaaatag

SEQ ID NO: 18269 - DNA, 554 bp, Macaca Fascicularis
  misc_feature (1)...(554): n = A,T,C or G
cttcccctcactccccatcagaacccnnnnnnnnnnnnnnnnnnnntggggaaggttccagtcccttggagaatatccagggcctcaaactattgaagtcactcctccagtgtctggtacttgccagctcagcccattaggatgagggtgctgagaggaaacaggaaatagaactcnnnnnnnnnnnnnnnnnnngggagcagggagcagcgtttggcttgcacgtccccacgtccccgtgcagccagaggctggggccactttccttccgtccgccgttcgctggtgaatgcagagttccccccccccaccacagggctcctgtgagtatgggggtcacctctttctggcctgtgcacctctctggcttataagggcgcatggcctgtgccagcccctccttgctgcgcctcgccatggagaccaggtgagccggctgtcccacagcctcagcaccatcagcacttacggatccagagcctcccggccttccccggtgccctgtaccaactcttctatttaagagaatctcagacgatgtaccttagcctcag

SEQ ID NO: 18270 - DNA, 749 bp, Macaca Fascicularis
  misc_feature (1)...(749): n = A,T,C or G
cnnnnnnnnnnnntatgtagctcgaaatgccaaagactgtatggtttnnnactaccatttccaaaggatgaaccacatgcttcctgaccctggtacctgggaagaatattttgnnnnnnnnnnnnnnnnaaaagtggtttggggttcctggtttgaccatgtgaaaggatggtgggagatgaaagacagacaccagattctcttcctcttctatgaggacataaagagggacccaaagcatgaaattcggannnnnnnnnnnnnnntgggaaagaacttggatgannnnnnnnnnnnnnnnnnnnnnnnnnnnnnnnnnnnnnnnnnaatgaaagaaaatcccatgacaaatcgttctacagtttccaaatctatnnnnnnnnnnnnnnnnnnnnnnnnnnnnnnnaaaggaactgtgggggattggaaaaaccacttcactgttgcccagaatgagaggtnnnnnnnnnnnnnnnnnnnnnnnnnggaaggaacctccataaacttctgcatggaactctgagcaagatgtaaacacaattaaaagatggatggcaagagtgcaaatactatcttcaatccttcnnnnnnnnnnnnnnnnnnnnnnnnnnnnnnnnnnnnnnnnnnnnnnnnnnnnnnnnnnnnntctctgtgatgattaacagtatgacactacttcatttttaaaaagggatcatgtctaatgcccattttccaaactattctttccaaagtaagatataagatag

SEQ ID NO: 18271 - DNA, 712 bp, Macaca Fascicularis
  misc_feature (1)...(712): n = A,T,C or G
gcaacctcattnnnagcaccagggcgtagtttactgcagggcggaggccgggggcagatctcagatctccgtcaagtaccagctgctctacgtggcagttcccagtggccctccctcaacaaccatcttggcctcttcaaacaaagtgaaaagtggggacgacgtcagtgtgctctgcactgtcctgggagagcccgacnnnnnnnnnnnnnnnnnnnnnnnnttcccagggcagaaggatgaaaggcctgtgacgatccaagacacttggaggctgatccacagaggactgggacacaccacgagactctcccagagcgtcattacagtggaagactttgagaccattgatgcaggatattacatttgcactgctcagnnnnnnnnnnnnnnnnnnnnnnnnnnnnnnnnnnnnnnnnnnnnnnnnnnnnnnnnnnnnagcgtaatgaacttatggaaagcccatttgtgtacacagtnnnnnnnnnggttctttttattagtgctttgccnnnnnnnnnnnnnnnnnnnnaaaccccaaccccagcatcttgagtccgaccctgacatccaaactaaaaggaagtcatccagtctattcacagaagtgttaacttttctaacagaaagcatgtattttgattgcttaccaacatacgtgttcctagtctttatacatgtgtaaacaattttatatactcatttctattaa

SEQ ID NO: 18272 - DNA, 731 bp, Macaca Fascicularis
  misc_feature (1)...(731): n = A,T,C or G
accacaagatcattttgtgannncacagatgagtggagaagcacacacgaggccnatgtcaccagcctagaaggattcagcgggannnnnnnnnnnnnnnnnnnnnnnnnnaatttctggctggacnnnnnnnnnnnnnnnnnnnnnnnngagtttgagattgttggttttaccaaccacattaatgtgatcgtgaaatttccatctattgttgaggaagaattacagtttgatttatcacttgtcattgaagagcagtcagaggggattgttaagaagcataaacccacaataaaaggaaacatgagtggaaatttcacctatatcattgacaagttaattccaaacacaaactactgtgtatctgtttatttcgatcataacgatgagcaggcagtcataaagtctcctttaaaatgcaccctcnnnnnnnnnnnnnnnnnnnnnnnntcagcagaatctgccaaagtaggaggaataattactgtgtttttgatagtgttggtcttgataagcaccatagtgacactgaaatggattggttatatatgcttaagaaacagcctccccaaagtcttgaggcaaagtcttgctaagggctggagtgcagtggctattcacaggcgcgatcataatgcactacagtctgaaactcctgagctcaaacagtcgttctgcctaagcttccccagtagctggaattacaagcgtgcatccctgagccccagtga

SEQ ID NO: 18273 - DNA, 785 bp, Macaca Fascicularis
  misc_feature (1)...(785): n = A,T,C or G
tnnnnnnnnngnnnnnnnnnnnnnnnngggcaggagcctgtgctgtnntccggttctgtgaggaacaannnnnnnnnnnnnntgcagagctgcgaagatgataaggtgatggcggctgcccaggctgcnnnnnnnnnnnnnnnnnnnnnngaaatggagcatggaatatacacagatgtaggggagaaggggagccagctggctgcgggacagaaacaacgtctggccattgcccgggcccttgtgcgagacccacgagtcctcatcctggatgaggccactagtgccctggatgtgcagtgcgagcaggctctgcaggactggaattcccgtggggatcgcacggtgctggtgatcgctcacaggctgcagacagttcagagcgcccaccagatcctcgttctccaggagggcgagctgcagaagcttgcccagctccaagaggggcaggacttctattcccgcctggtacagcagcggctgatggactgaggccccagggatactgggccgtcttctcaggggcgtctccaggacgcagagctgttcctgctttgagtttcccagagctgtgtggccagatagttattcctgagttgcaggcacgatggagatttggaccctgtgtgcttttggtgggatggaagggtgaggtgggtttgggtgggggctgtctatgtccaggaaacttaattccttggtgactagagctttgcctggtgatgaggagtattttgtggcataataaatatattttaaaatattttccttcttacatgaactgt

SEQ ID NO: 18274 - DNA, 774 bp, Macaca Fascicularis
  misc_feature (1)...(774): n = A,T,C or G
ctacagtgaccgaagctcgggcgggtcctatagagacagttacgacagttacgctacacacaacgagtaaaaacccttcctgctcaagatcgtccttccaatggctgtgtgtttaaagattgtgggagcttcnntgaacgttaatacgtgtagtaaacgcacctccttgtattcccactttcgtagtcatttcggttctgatcttgtcaaacccagcctgaccgcttctgacgccaggatggcctcgttactagactttttttttttaaggaagtgctgtttttaagggttttcaaaacattttgaaaagcacttcagatttacttttttgaccacgagccatgagttttcaaaaaaatcgggggttgtgtgggtttttggttttttagtttttggttgtgttgcctttttttcttttggtggggttggccccatgaagtgggtgccccactcactcctctgagatcgaacggactgtgaatccgctctttgtcggaagctgagcaagctgtggctttttnnnnnnnnnnnnnnngtttctgagtgtagtgtggtaggaccccggcgggtgtggcagcaactgccctggagccctggcccctgcgcccatctgtgctgtgcgccccacagtagacgtgcagacgtccctgagaggttcttgaagatgtttatttatattgtccttttttactggaagacgtacgcatactccatcgatgttgtatttgcagtggctgaggaattcttgtatgcagttttcttggcttaacgaag

SEQ ID NO: 18275 - DNA, 556 bp, Macaca Fascicularis
  misc_feature (1)...(556): n = A,T,C or G
tgggtggccaggacaagattcggcccctctggagacactacttccagaacacccaagggttgannnnnnnnnnnnnnnnnnnnnnnnnnnnnnnnnnnnnnnnnnnnnnnnnnnnnnnnnnnnnnnnnnnnnnnnaggacgagctccgggatgctgtactccttgtctttgcaaacaaacaggatctgcctaatgctatgaatgctgctgagatcacagacaagctgggcctgcattcccttcgtcaccgtnnnnnnnnnnnnnnnnnnnnnnnnnnnaccagcggggacgggcnnnnnnnnnnnnnnnactggctggccaatcagctcaaaaacaagaagtgagagccagacagccctaaccaagcaccccacccacccctgacatacctgctgtcaccctgccccagtcctaccccttcctctccactgcaagtgtggccagggccctgggtatcatgtccgcatgcccagcaagagccttgcctcccctgcctcccctcctttttcctgtccacctatatgaccaatccctaattactgtcctgatgatgagt

SEQ ID NO: 18276 - DNA, 800 bp, Macaca Fascicularis
  misc_feature (1)...(800): n = A,T,C or G
tacaagtggatgaannnnnnnnnnnnnnnnnnnnnnnnnnnnnnnnnnnnnnnnnngaggaagctgtgaggatcattactggtggggccccngagctagctgtagaaggcaacggccctgtggaaagtaatgcagtactcaccaaggccgtcaaaaggcccaacgaggattcagatgaagatgaagaaaagggagccgttgtcccccctgttcatgacatttacagagcacggcagcagaagcggattcggtagggcttaaacgcctctgcagaaaactcctgtccaggattccttttgcctcaagtcgtatgtttaaaagagacaacgctttgttacaaggttcttggaaacaaagttgtattgtcattggtgcctctatcatatggttcttgagaaaaacaaaccaacctgtgtgaattttagaatatggaacagacctatgctctaagcaaaattaggttttcaaaaatgtgagaacaatacaaaatggcagaaccacattttgttccctcttcaagggtgtcttgtatgtgccgcttgaagatttgtgagtttttcaacagttttattttaaaaactggatggcttatgattgtaaagcattttatcacattttctgaaaacaattgttcttggtttgcttatgtagagtcctgccttattgtttgtttttatttatggcagaatgtatgaaatccgttttgtagtttgaaattttaaaagtcctttgaaaaataaaaggattcagaaacatcatgcttcctctgctcctttcagattttatttacaataactact

SEQ ID NO: 18277 - DNA, 764 bp, Macaca Fascicularis
  misc_feature (1)...(764): n = A,T,C or G
cacagcagcagagaagctgcacaaggttgtgagctccatcctggcatncnnnnagaaggaatggcagaggctgcagtcaaaccccccnacctgaaagagggggctgtgacgtccgtgaacctgactaagctagagggtggcgtggcctataacgtggtacctgccaccatgagcgccagctttgacttccgtgtggcaccggatgtggacttcaaggcttttgaggagcagctgcagagctggtgccaggcagctggcgagggggtcaccttagagtttgctcagaagtggatgcacccccaagtgacacctactgatgactcaaacccctggtgggcagcttttagccgggtctgcaaggacatgaacctctctctggagcttgagatcatgcctgctgccactgacagccgctttatccgtgcggtgagccacttgcatggagtgcctgggcagtggactgggcctgaggctgcctttcccttaatggctcctcctcgcctctgcaggtgggggtcccagctctaggcttctacacccttgaaccgcagcacctgtgatactgcacgacacnacgatgaacggctgcatgaggctgtgttcctnccgtggggtggacatatatacacgcctgctgcctgcccttgccagtgtgcctgccctgcccagtgagagatgagccctgcaactcctcaacccatgcccctggggcttccatcacaaccagtgccaaggacctcctcttcccccttccaaataataaa

SEQ ID NO: 18278 - DNA, 706 bp, Macaca Fascicularis
  misc_feature (1)...(706): n = A,T,C or G
gctccacttatattaatgatactgataggttagataagaggatccattttttggggagggggcggggcagacagaagaattaatgtgttgggctgtcagagatgtatttgcattttacacagatgggtctcaccaccaggatactagatttaactaacactcctcaacaatcagatgcatttaagactcattaaaccagnnnnnnnnnnnnnnnnnnnnnnnnnnnnnnnnnnnnnnnnnnnnncctgggagcattaggcgtnnnnnnnnnnnnnnnnnnnnnnnnnnnnnnnnnnnnnaaactccatgggtggggcccagatttgttttaataatccctcctggtgatnnnnnnnngtgctaaagtttcagagaaccccctcattgagctaacagttacaccgtcttcacaacagaactgtggtgaaagaagtctaattcatttatttatagttttgctttctccctctcactttagctataaggtacaacaagtaatatctataatttttggctgctcattannnnnnnnnnnnnnnatacatttaccacttattccttacatttaatccattacaaccctgtgaactggtcagcctaattatctagatgaggaaaaaaggtnnnnnnnnnnnnnnnnnnnnnnnnnnnnnnnnnnnnnnnnnnnnnnnnnnncattacaggtcnnnnnnnnnnnnnnnnnatt

SEQ ID NO: 18279 - DNA, 758 bp, Macaca Fascicularis
  misc_feature (1)...(758): n = A,T,C or G
caaaacatcttggtccattttgcctactgatttannnnnnnnnnnnnntataattttatcttgcnnnnnnnnnnnnnnnnaacatcattcagcgtaaatgtcctgttattgttgatgtcacataataaacacattaatcaaccattctattaataactattcctcattcttcaaaactgcattttagtcaaacacaccttttttgaaagtaaatatatttcattaaatgttttcatttcatgaaaagtaatatatttcattaaaaatttaatctcaatttttttcagatatattcagtaaaaatacactttggatcagactgaatattaaatgatatatatacacacatatacacattaacaatttaaagaaaaattagggannnnnnnnnnnnnnnntgtagtgatacacttctcaagtcctatgcagcatatgatttttattgtaggaacagtcactatgtgatttattaatgaaatagcttaattagaagcacaatagcannnnnnnnnnnnnnnnnnnnnnnnnnnnnnnnnnnnnnnnnnnnnnnntgtactagagcctcagaggagaaaaaaagattattnnnnnnnnnnnnnnnnnntctggcatattcaaataataattagtaaaatacttgtgacatgatttgcattttattagtgggagaggggcatgaaataatctttggtttatgccttttaaaaattattcttaaaatgatattataatctgatattagatcttttacatatagt

SEQ ID NO: 18280 - DNA, 772 bp, Macaca Fascicularis
  misc_feature (1)...(772): n = A,T,C or G
gccagcagctccggatgcctagtgcnnnntcacttcctgtgtggannnnagcannncctgnnnnnnnnnnngnnnnnggccatccagatgcccctatagctgaaggggttgggggtgtggccttttacttaatcattttcctccacaacttgcnnnnnnnnnnnnnnnnnnnaatagccaaaagctttccctagaggtgggatatccccaggaagcattacacccactgtttatcagctggtcttgcctcctagacctttaatttgtgccctgacttatcagcttccagtactgggcaggccaaannnnnnnnnnnnnnnnnnnnncacaagggttctgttcactatcaagctgcctgccacctcagggcctggannnnnnnnnnnnnnnnnnnnnnnnnnnnnnnnnnccttcttcatatccagcannnnnnnnnnntaggcccccatactttacccctcaaaccagcaccacaaccatccagtttnnnnnnnnnnnnnnnnnnnnnnnntggcaacatcttcctagagtcttcctagatgctaggtcaactggacaactgcctaagcctgtannnnnnnnnnnnnnnnnnnnnnnnnnnnnnnnnngtctttatcagggtaccctttgagaattatgtgaaaaatggaacaaatgactttgcaaagtattaaagataaatagtgtagaacctaatgggaaccagtgaagtctagactaagatgacaggtgatcctgacttgtcaaacctaaaaactaaactctaccaatc

SEQ ID NO: 18281 - DNA, 880 bp, Macaca Fascicularis
  misc_feature (1)...(880): n = A,T,C or G
tcgcanccnnagagcgcaagtactcagtgtggatcggtggctccatcttggcctcactgtccaccttccagcagatgtgattagcaagcaggagtacgacgagtcgggcccctccatcgtccatcgcaaatgcttctaaatggactgagcagatgcgtagcatttgctgcatgggttaattcagaagtataaatttgcccttggcaaatgcatacacctcatgctagcctcacgaaactggaataagcctttgaaaagaaattgtccttgaagcttgtatctgatatcagcactggattgtagaacttgttgctgattttgaccgtgtattcaagttaactgttccccttggtgtttgtttaataccctgtacatatctttgagttcaacctttagtacatgtggcttggtcgtttcgtggctgaggtcagaacgtgcttgtggaagacaagtctggcttggtgagtctgcgtggccagcagtctccgatctgtgcagggtattcatgtgtcagggcttgagtgttctgggatttctctagaggctggcaagggctcttgaaccagtttttgccctgccagtctgtcagggttggaaagtccaagccataggacccagttttcttagctgacgttttctgccagaacaccgtgggctgttacttgccttgagttggaagcggtttgcatttacacctgtaaatgtattcatccttttaatttatgtaaggtttttttgtacgcaattctcaattctttaaagagatgacaacaaattttggttttctactgttatgtgagaacattaggccccagcaacacgtcattgttaagcaaaaaaaaaagtgctgccgtaaaaaaaaaaaaaaaaaaaaaaaaag

SEQ ID NO: 18282 - DNA, 759 bp, Macaca Fascicularis
  misc_feature (1)...(759): n = A,T,C or G
agagagccatgannnnncatgagaactcttcaaggatgtgaccaaacgtcnnnnnnnnnttagggcccagtggaagcaaggcaagatgacttttgtaagcagaattccaaagcatcatcagattgttgcatggctttacttcaggatatatttggccctttagaagaagatgtcaaagcagggacattttctaaaccaggaggttaccgtctctttattcagaagcagcaggagctgaagaagaagtactaccaggtgccaaggaaggggatacaggccgaagaggtgctgaaaaaatacttggagtccaaggaggatgtggctgacgcacttctacagacggaccagtcactctcagaaaaggaaaaagcgattgaagtggaacgtataaaggctgaatctgcagaagctgcaaagaaaatgttggaggaaatacaaaagaagaatgagnnnnnnnnnnnnnagaaagagaannnnnnnnnnnnnnnngtgaaacaattgactgagaagatggagagggacagggcccagttaannnnnnnnnnnnngaagaccctcgctctnnnnnnnnnnnnnnnnnnnnnccttctcaaggagggattcaagaatgagagccagaggcttcagaaagagatannnnnnnnnnnnnnnagaagcaaatcacagcaaccaatgtgtcacatactctaaaagtacaaggaacaaannnnnnnnnnnnnnnnncctctccccaagaaacaagtgaatgagcaactcaga

SEQ ID NO: 18283 - DNA, 734 bp, Macaca Fascicularis
  misc_feature (1)...(734): n = A,T,C or G
acnnnnnnnnnnnnnnnnnnnnnnnnnnnnnnggaccagtacatgcgcacgggggaaggcttnntgtgtgnnnnnnnnnnnnnnnncaccaagtcctttgaggacatccaccagtacagggagcagatcaagcgggtgaagganncagacgacgtgcccatggtnnnggtggggaacaagtgtgacctggctgcacgcaccgtggagtctcggcaggctcaggacctcgcccgaagctatggtatcccctacattgagacctcggccaagacgcgacagggcagccgctctggctctggctccagctccgggaccctctgggaccccccgggacccatgtgacccagcggcccctcgcgctggagtagaggatgccttctacacattggtgcgtgagattcggcagcataagctgcggaagctgaaccctcctgatgagagtggccccggctgcatgagctgcaagtgtgtgctctcctgacgcagcacaagctcaggacatggaggtgccggatgcagggaggaggtgcagacagaaggaggaggaaggacggacggaagcaaggaaggaaggaagggctgctggagcccagccacccagggaccatgggccgaagtgaccgcagaccctcccagggatgctttgcacagactgtcttgagcatcccagatgctaccagaaccccagcccttagctcccctcccaggcctctgtgggcccttgtcaggcgcag

SEQ ID NO: 18284 - DNA, 647 bp, Macaca Fascicularis
  misc_feature (1)...(647): n = A,T,C or G
ttttctgtcctattttgagaaatatnnntacatagaaatggtgcnnnnnaacatttntntgtacatgtataaannnnnnnnnnnnnnnttcatatgtagcacgaattgtttaagggtaagccacaacatctagaaatcactcatagataattgaacaataaaggagaatggtaccgaggcaggaggaagcaagcgtgtcttcccctgcggcacacagtgacatgcgttgagaaggaggaggaaacgattacnnnnnnnnnnnnnntccttacttgggagattgccacagcctgnnnnnnnnnnnagttaccagacatcctccatgtgagaannnnnnnnnnnnnnntctcagggatggcccacaactgggtccacatgtaacgagccctgtttaataacgaaggggttggggagagcagtccgtctacaacctggaatcagatttgcaaaggtttcccgcactgctgtctgacactgtcctgttgatgccccttctgactgtgttctctgttttctctgtctgctgtctaaccctgtgccttgcctgggataaggacaatgatgaggttactggtttggatcgtaagtagaggacttttattaattggtttagaggttcannnnnnnnnnnnnnnnnnnnnnnnnaa

SEQ ID NO: 18285 - DNA, 708 bp, Macaca Fascicularis
  misc_feature (1)...(708): n = A,T,C or G
taggaacactagagaccaaaaagggggcaaaggagaagggctgagcccacctttttgcccctacccttggtgcctaatgctgtgtgatgcacctgcagggtgtgtgctagcctctgtgccccgtccttgtgccaggtcaaggtgggggcaggctgggccctgcatttctggggcaggaacagagggtgaaagggacagatagatgcaggtccattctgcacctcttggctcgggtgcagagttcaccctgtgccctccgttacaagtccctcccccagccctgtcatgtgccttgggctcctcctgccctccatctcagccatcagggcagggaccctcctacactacagaggggccaggggatccctctctccctagtgccttccaccctttaccccccagagcagcttggcccagggaggggggatgctgcttagctgatcctgccctgacccagaggaagcctctatttatttattagcttttgtttacaccctggaattgaccctttcctccaggggtcttgggtgggggagcccagggcccctgtgacccctcccttcttcctccaatccccagtttnnnnnnnnnnnnnnnataagattcccattggctccctgtgttctcttggggggtcagggtactgtcccctcccctctgtttacatctccccctgtaccccgctgtattgcatattgctgagttttc

SEQ ID NO: 18286 - DNA, 693 bp, Macaca Fascicularis
  misc_feature (1)...(693): n = A,T,C or G
tgggactccaaagtcnttcttaaaatgtttagagcaagtatagctcttacctttattaccgaatttgaatcttcttttatttctagactgtacagtctgatgcatgatttttttataaatatttcatactcttgtgaatttggatctttttactttgagcatatattttagaatatgtgtatgttaaaggatctccacaatgtctgcagcgtgaaggcaggttcattgtggaatagtttgttaacagtcaggaaagctaaactggtcagtattaatgtgtagccctaccaaaaatagccagtagtatctgaaaatgaaaaataaatgaagtatctccaggaaacagtctggcttaactatttttgaaaatataactgtttcccctctctgctgctttagatgttgctttacatagaaccagaaaatggaatttctcagctaaagcatgtgtgcctgtttcatctaatcaagcagagctaaaatgttcatatcaaataaatttatattaataaattactaaactaagagtatcaggttatttatatatttgcaagcaaaggacagtaagaagttgactggcaaaaagagcagtgctgaaggaggagatccaggtttaaatctggcttattaactcaagccaattgtaaggattttctgtacagattattcatgtcagaccaagaatttaaatta

SEQ ID NO: 18287 - DNA, 215 bp, Macaca Fascicularis
cctagccccacagggtttgtagggacatgatcagcatcctgatttgaaccctgaaatgttttgtagataccctcttgggtccagtgaggcagttggttgaagtagcaagatgttggcttttctggattttttttttttttttttttgccgtgggttcttcactgaccttggactttggcgtgattactactcgtaacagaacgtgtttcattcca

SEQ ID NO: 18288 - DNA, 767 bp, Macaca Fascicularis
  misc_feature (1)...(767): n = A,T,C or G
gatgcaccatgatgggaccaaggacgaaaacagcgactacactctcttcaatctaattcccgtgggcctgcgtgtagtggccatccaaggagtgaaggctagcctctatgtggccatgaatggtgaaggctacctctacagttcagatgttttcactccagaatgcaaatttaaggaatctgtgtttgaaaactactatgtgatctattcttccacactgtaccgccagcaagaatcaggccgagcttggtttctgggactcaataaagaaggtcaaattatgaaggggaacagagtgaagaaaaccaagccctcatcacattttgtaccgaaacctattgaagtgtgtatgtacagagaaccatcactacatgaaattggagaaaaacaagggcgttcaaggaaannnnnnnnnnnnnnnaccatgaatggaggcaaagttgtgaatcaagattcaacatagctgagaactctcccctgcttccctctctcatcccttccccttctcttccctcccatttacccatttccttccagtaaatccacccaaggagaggaaaataaaatgacaacgcaagacctagtggctaagattctgcactcaaaatcttcctttgtgtaggacaagaaaannnnnnnnnnnnnnnnnnnnnncaatgtggtagaaaattcacatgcacaaagtttaacacacttaaaagcaaaggaaacaataaaatcagaactccacaaacattaaattaaactgtattgttatgcgtagaagg

SEQ ID NO: 18289 - DNA, 786 bp, Macaca Fascicularis
  misc_feature (1)...(786): n = A,T,C or G
cggatgtggacgnnnnnnnnnnncgtactgtaggagatgtgcgtcgtgccgagcagttattgcaggatgcacggcgggcaaggagccgggctgagggtgagaaacagaaggcggagacagtacaggcagcactggaggaggcccagcgggcacagggtgttgcccagggtgccatccggggggcagtggctgacacacgggacacagagcagaccctatnnnnnnnnnnnnnnnngatgacnnnnnnnnnnnnnnnnnnnnnnnnnnnnnnnnnnnnnnnnnnnnagttggatgctctcctggaggctctgaagttgaaatgggcgggnnnnnnnnnnnnnnnntctacagcagaagaaacggcaggcagtgcccagggtcgtgcccaggaggctgagcagctgctacggggtcctctgggtgatcagtaccagacggtgaaggccctggctgagcgcaaggcccagggtgtgctagctgcacaggcaagggcagagcaactgcgggannnnnnnnnnnnnnnnttgcaggctgctcaggacaagctgcagcggctacaggaactnnnnnnnnnnnnnnnnnngaatgagcgggcactggagggtaaggcagcccagctggacgggctggaggccnnnnnnnnnnnnnnnnnnnnnnnnnncaacttgcaggtgcagatctacaacacctgccagtgacccctgcctaaggcctaccccagttcctggcaccgccccacatgcatatctgcctatgcactgaagagctctgncccggcaggccccc

SEQ ID NO: 18290 - DNA, 840 bp, Macaca Fascicularis
  misc_feature (1)...(840): n = A,T,C or G
cctcccacccctccccacccatcactaaacagtaaaatgtgatgcgaattttcccgaccaacctgattcgctagattttttttttttttaaagaaaagcttgaaagccaggacacaacgctgctgcctgctttgtgcagggcccgccggggctcagccctaagttggcgtcacctgggctccccgccccgggccctcctgcccgccctccctcctgcagctccttccctaggcacctctgtgcagcataccagcctgagccagacgccctctcgggacccgtgctgcacacacctccctctcctttgtccccatagccggcttttcccaccaatcctcacctaacagttactttacaattaaagtcaaagcaagcttttctcctcagcttgaggcagccattggagtctgtctcgttnnnnnnnnnnnnnnncagaaggccgctgtagacataaatctcggcgacttggccctgtctcctgagtgtcctgctggtgaccggcctggacctcggccccacagccctaggggctnnnnntgaccagcactgaccccgacctcagcgtgtactcgcaggggtgctggctgcactcaagaccctcgagattaaaggtgctaaccccatccgctcctccctcccgcagagactggggcctggactggacatgagagccccttggtgccacagagggctgtgtcttactagaaacaatgcaaaactctccttcctcagaacagtgacgtgttcgacgtgttatcaaaggcgccctttctatgttcgtgttagttttgctccttctgtgtttttctctgaaccatatccacgtcgccaactttccca

SEQ ID NO: 18291 - DNA, 727 bp, Macaca Fascicularis
  misc_feature (1)...(727): n = A,T,C or G
tagaccagagccaggctgtgaagtttgctttggacatggcaaggggcatggccttcctacacacactagagcccctcatcccaagacatgcgctcaatagccgtagtgtaatgattgatgaggacatgactgcccgaattagcatggctgatgtcnnnnnnnnnnnnnnatgtcctggtcgcatgtatgcacctgcctgggtagcccctgaagctctgcagaagaagcctgaagacacaaacagacgctcagcagacatgtggagttttgcagtgcttctgtgggaactggtgacacgggaggtaccctttggggatctttccaatatggagattggaatgaaggtggcattggaaggccttcggcctaccatcccaccaggtatttcccctcatgtgtgtaagctcatgaagannnnnnnnnnnnnnnnnnntgcaaaacgacccaaatttgacatgattgtgcctatcctggagaagatgcaggacaagtaggaccggaaggtccttgcctgaactccagaggtgtcaggacatggttgggggaatgtacctccccaaagcagcagacctctggttgcctcccctgcctccagtcatggtactaccccagccatggggtccatccccttcccccatccctaccactgtggccccaaaaggggcgggctcagagctttgtcacttgccacatggtgtctcccaacatgggagggatcagccccgcc

SEQ ID NO: 18292 - DNA, 698 bp, Macaca Fascicularis
  misc_feature (1)...(698): n = A,T,C or G
aatgcaatgtcaaagattccagcatgttgatctctcttacntacgatgtgatcctggtgatcttatgcactgtgtatgccttcaaaacgcggaagtgcccagaaaatttcaacgaagctaagttcataggttttaccatgtataccacgtgcatcatctggttggccttcctccctatattttatgtgacatcaagtgactacagagtgcagacgacaaccatgtgcatctctgtcagcctgagtggctttgtggtcttgggctgtttgtttgcacccaaggttcacatcatcctgtttcaaccccagaagaatgttgtcacacacagactgcacctcaataggttcagtgtcagtggaactgggaccacatactctcagtcctctgcaagcatgtatgtgccaacggtgtgcaatgggcgggaagtcctcgactccaccacttcatctctgtgattgtgaattgcagttcagttcttgtgtttttagactgttagacaaaagtgctcatgtgcagctccagaatatggaaacagagcaagagaacaaccctagtacctttttttagaaacagtacgataaattatttttgaggactgtatatagtgatgtgctagaactttctaggctgattctagtgcccctattattaacaattcccccagaacatggaaataaccatgtttacagagctgagca

SEQ ID NO: 18293 - DNA, 710 bp, Macaca Fascicularis
  misc_feature (1)...(710): n = A,T,C or G
tagcagaaactgaacggaatgccagatnntagctgccttgttggttttgaaggatttccatctttttacaagatgagaagttacagttcatctcccctgttcagatgaaacccttgttttcaaaatggttacagtttgttttttcctcccatggttcacttggctctgaacctacagtctcaaagattgagaaaagattttgctgttaattaggatttgcattttaagtagttaggaactgcccaggtttttttgtttttttagcattgatttaaaagatgcacgtaaagttatcttacagcaaactgtagtttgcctccaagacaccattgtctccctttaatcttctcttttgaatgcatttgttacccacggtgttctttgttccttttcataagctaacaccgctctagggattttgtttttaatgcatattgacagcaccctttacttagtagctggctcccatttgccatacagtgtaggttctgcttaatgtaacttcttttttgcttaagcatttgcatgactattagtgcttcaaagtcaatttttaaaaatgcacaagttataaatacagaagaaagagcaacccaccaaacctaacaaggacccccgaacattttcatactaagactgtaagtagatctcagttccgcgtttattgtaagttgataaaaacatctggaagaaaatgactaaaactgttg

SEQ ID NO: 18294 - DNA, 752 bp, Macaca Fascicularis
  misc_feature (1)...(752): n = A,T,C or G
gagcacatcaaacgttgcacagacaagggcgtggagagtgttttcgacatcatggagatggaggatgaagaacggaacgcattgcttcagctgaccgacagccagattgcagatgtggctcgcttttgtaaccgctacccnnnnnnnnnnnnnnnnnnnnnnnnnntggataaggacagcatccgcagtggcgggccagttgtggnnnnnnnnnnnctggagcgagaggaggaagtcacaggccctgtcattgcgcccctcttcccgcagaagcgtgaagagggctggtgggtggtgattggagacgccaagtccaatagtctcatctccatcaagaggctgaccctccagcagaaggccaaggtgaagttggactttgtggccccagccactggcgcccacaactacactctgtacttcatgagtgacgcttacatgggnnnnnnnnnnnnnnnnnnnttcagcgtggatgtgaaagaagctgagacggnnnnnnnnnnnnattgagtcttgaggcatttactcttgggtaaaggagagtcgagcctgannnnnnnnnnngtaccttgtagggatcctggttgtggggaccaggtctgtgggcctgaggtctggccagccagggctggtgctgtccctgcccacctccacttccttttcccttgctcactctggatccagtgacagcaggtgtcacgggtgaagcataaatcatatatagcattttcaggcatgttcctggtagttctttg

SEQ ID NO: 18295 - DNA, 756 bp, Macaca Fascicularis
  misc_feature (1)...(756): n = A,T,C or G
gatacacgggcgcgggtttaagtggacgccaggtgcaccgaacgcaggctgtgtttaaccacactgaggactatgtgttgctgcccgacgagaggacgatcagtctttgctgctgggactcgagaacagctgagcggagaaacctgctctcactggggcacaacaacattgnnnnnnnnnnnnnnnactcccccacccaaccccggcttcatgacgtgcagcgatgacttcagagcgnnnnnnnnnnnnnggagatcgaccaccgattgagccgccctctccgtagggttctttctcgaggactctgcccaccccccacgtcctgtctcagctgcagtcgtaagtcagtgcaccatccttggcagttttgctgccacctctgtccacatctttcttggatttgtataaaagaatctttttttaccttgatgtacaatcatggtggaaaaagctggaaacacagatctgtgcagttctacattcactgattattgcagtgtgattttcatcagttttgtaaatacaggacttgccgtttctttcgatctcttgattgaagaaggatagggtattaaagtgcttttgtcatgaggaattttcatttggttcttttgtcaactttcttgcttgttctgctaaaccctctgtgtatttccattccagatatatttgaacagataagtaggcatgcagctctgagactccagagttttatgccatatcaaaagcattttcaagaatccctcaattctatcc

SEQ ID NO: 18296 - DNA, 471 bp, Macaca Fascicularis
  misc_feature (1)...(471): n = A,T,C or G
gcttgccccaaatctcaactactcagatgttccatacctccaaatgccaatttcagcacccaactgagatccaaggagctcctgggtgcaaggcagcagtcgagagccaaaggtccctccccagacatctggacactgggcatagatttctcaacaaggtagactcccctgcctccccaggacctccgctctcctggaagacaaagcaataataaaacggaagtgtttataatcccagcactttgggaggcnnaccacacacatacacacacacattctcatccactcacccacacactacacagactgcttccttatagctggacttttattttttaaaaaaaaaaaaaaaaaaggaagaaaaccctaaacattcaccttgaccttatttatgactttacgtgcaaatgttttgaccatattgatcatatatttgacaaaannnnnnnnnnncacattacacagactgct

SEQ ID NO: 18297 - DNA, 760 bp, Macaca Fascicularis
  misc_feature (1)...(760): n = A,T,C or G
ttgactgtgagnnnnnntcattggagccaggtcnagangnaacccccatcagcttcaggaaaacaagacttctgtgcacctcacttccggctcaccacagcccttgtccttcacctccacacaggaccggctcctcacttccggctcaccacagcccttgtccttcgcctccacacaggaccggctcctcacttccggctcaccacagcccttgtccttcgcctccacacaggaccggctcctcacttccggctcaccacagcccttgtccttcgcctccacacaggaccggctcctcacttccggctcaccacagcccttgtccttcgcctccacacaggaccggctcctcacttccggctcaccacagcccttgtccttcgcctccacacaggaccggctcctcacttccggctcaccacagcccttgtccttcgcctccacacaggaccggctcctcacttccggctcaccacagcccttgtccttcgcctccacacaggaccggctcctcacttccggctcaccacagcccttgtccttcgcctccacacaggaccggctggaagcagagagaagaaaggccaattcacagggcaccaaacaagtatgaaatgtaaataggaattcagacaccccaggcgagagcctcacaggagggaggggccccacgggctccccaggaggctcacatctttggcccagagccagccttagtttgtccctgtcatctactgtccgaggccatcgctgctacact

SEQ ID NO: 18298 - DNA, 722 bp, Macaca Fascicularis
  misc_feature (1)...(722): n = A,T,C or G
agaggtgtagagggnannnttgagaatgnnnatcataggagaacacaggaaatgtgagggctggtggcaggaacacccgttgcaaggagtaacggtgggtggcagagcagaagtgtggaaataattgtctcaaggctctgacagagctttggtttaggtggtttctgccctaagaatgttgagatcacaactgtctgtgcgtggggactgggagattatatgtactgatgggcgtatacatataaaatatatatggaccatgtatccattgggcctctgctcataagagagaggacaggagggctgtgcattaccttctccctccacctgcttcctctcctcctaagccttttgtggagatctgcatgaaacaacacaacaaatacgaagccaagaagtatgcttcccgtgtgggtcccgagcagaaggtcaaggctttgcttcttgttggcgatgtggctcaggctgcagatgtggccatcgaacaccggaatgaggctgagctgagcctcgtattatcccactgcacgggagccacagatggggccacagctgacaagattcaacgggccagggcacaagcccagaagaagtgaggagtccatcctgtacatctcgagcaaggggttcctcccctagcacctgggcttggcagaagggccatagttcatccagctcctcccctagagcaatgctgaggaggtggggcatggtagcagggc

SEQ ID NO: 18299 - DNA, 1457 bp, Macaca Fascicularis
  misc_feature (1)...(1457): n = A,T,C or G
gtcctgactgcttgggccatgcaggacttgtgtatgagtatacattgggagaagagaagttcacctttattgagaaatgtaacaaccctcgttctgtcacattattgatcaaaggaccaaacaaacacacactcnnnncagatcaaagatgcagtgagggagggctgagggctgtcaaannnnnnnnnnnnnnnngctgtgtggttccaggnnnnnnnnnnnnnnnngtggcaatggcagaagccctgagatnnatnnagnnnagtgtaaagggcagggcacagcttggannnnnnnnnnnnnnnnatgcgttgctcattattcccaaggttcttgctcagaactctggttttgaccttcaggaaacattagttaaaattcaagcagaacattcagaatcaggtcagcttgtgggtgtggacctgaacacaggtgnnnnnatggtagcagcagaagtaggtgtgtgggataactattgtgnnnnnnnnnnnnttcttcactcctgcactgtgattgccaccaacattctcttggttgatnnnnnnnnnnnnnnnnnnnnnnnnnnnnnnnnaggttgaattgaagcttcctctgtatctgagtcttgaagactgcaaagtgatcctgagagaatannnnnnnnnnnnnnnnnnnnnagcttcaaatgatttccaaaggaattttcccatatgaaaaaaggagagaacactggcatctgtgaaatttggaagttctgaaattacagtattttttaaaattgcactgaagcgtatacacataaagcagctcttttacccagtaaacagganntttnnnnnnnnnnnnnngtgacataaaattccatgttagataagcatatgttacttgttattaaatattccttgaaaagcaaattttaatggcttaattttatgtagacgtatgttaaattatccaacagtaccctattgttaaacatttggttttaaaatttttatgctaatataaacaagtaatttaaaattttgaaagcatccttgttagtataaatttctgagtaaatgcattgggtcagttggactttgaatgcttttnnnnnnnntttgctaaaatgctccccccctccacaaagttaagttgtaggaaatgggaagaggagtaaactagaggcgagggagttgagagagctgcaagtgtaaagaggcaaaaacaggcagaggtaaaaagatgatacaaggcgtggtgactaagggttacggttattgggtgaaatttgagatttgtaggccgactgtgttttcaagcttctgaacttttgcttatgcaaaatatcccaaagcctctagtgtcatatttttctcacccnnnnnnnnnnnnnnnacgagattatatagttggtctatctcagcagcccttgaaggtgaagttgtgtgttactaggctgtgttttggggggtcagcagtggcctgaagtgagt

SEQ ID NO: 18300 - DNA, 716 bp, Macaca Fascicularis
  misc_feature (1)...(716): n = A,T,C or G
ggagaacggaatcaataggatcggaaacntgctggtgcccaatgacaattannnnnnnnnnnnnnnctggctgatgcccattctggaccagatggtgctggagcagaacacagagggtgtaaagtggacgccttctaagatgatcgcccggctgggcaaggagatcaacaacccagagtccgtgtattactgggcccagaagaaccacatccctgtgtttagtcccgcacttacagacggctcgctgggcgacatgatcttcttccattcctacaagaacccgggcctggtcctggacatcgttgaggacctgaggctcatcaacacgcaggccatctttgccaagggcactgggatgatcattctgggcgggggcgtggtcaagcaccacatcgccaatgccaacctcatgcggaacggggccgactatgctgtctacatcaacacagcccaggagtttgatggctccgactcgggtgcccgaccagacgaggctgtctcctggggcaagatccgggtggatgcacagcccgtcaaggtctatgccgacgcttccctggtcttccccctgctcgtggctgaaacctttgcccagaagatagatgccttcatgcatgagaagaacgaggactgagcagctgctgtcccaaggtcttaccccctcctctatttattaatttgcagacccagcccctcccctactttttggtcagcca

SEQ ID NO: 18301 - DNA, 606 bp, Macaca Fascicularis
  misc_feature (1)...(606): n = A,T,C or G
caccctccccacaggggtgtcctgcccctggcaccaaagggcagaggtggagccctcgtccgctgccaggcggcagagcagagcaggcaggtctgtgccnnnnnnnnnnnnnnnccccggccacagcccaaaacgcaggtgccctggggccaccaactaactgccctatcttgtctcccctactgcctcccggtcctgcctcttggaacccccagcctcatcaagaacccagcggagcgggcggacctgaagatgctcacgaaccacaccttcatcaagcggtccgaggtggaagaagtggattttgccgggtggttgtgtaaaacccnnnnnnnnnnnnnnnnnnnnnnnnnnnnnnnnnccgccgtgtgacagcggctgggcttcccgcgtcccgctggtgacctgcccaccgtccctgtccacgccccgcccttccagctgaggacaggctggcgcctccacccaccctcctgcctcacccctgcggagagcaccatggcggggcaactgcgcacgcagggacgggggtctcctctcctgcccgtcccggccgaggtgcctccggggacgggcgacgctgctgtgtgtggtctcagagcctct

SEQ ID NO: 18302 - DNA, 763 bp, Macaca Fascicularis
  misc_feature (1)...(763): n = A,T,C or G
tcagtaaatgactccgacannnnagccctctcgaggaaggttgccatccaaaacgaaaaaagagtttatctgcaagttttgcggcagacactttaccaaatcctacaatttgctcatccatgagaggacccacacggacgagaggccgtacacgtgtgacatctgccacaaggccttccggaggcaagatcacctacgggatcacaggtatatccattccaaagaaaaacccttcaaatgtcaggagtgtgggaaaggattttgtcagtctagaactctagcagttcacaaaactttacacatgcagacatcaagccctacagctgcgagcagtgcggcaaagtgttcaggcgaaactgtgatctgcggcggcacagcctgactcacaccccgcggcaggacttctagagaagcccaggatctgtcccgtgccgccgctgctcccctcccccgacacctctccacgtctccttcccggggggtcgcacccctagccattcactgaccccagctcttcccttgctgcaaccacacctgcagctccagggagttaactcttcttctgggggactgagaactgtagaaagccacacactacatcccttcacaaagagtatatgctagttttttgtagatattcacagctcattttagagctctgtacataatgttgtgggtctttgttttgttgttttgtttgtttttggatcttgttggatgcgctctagatatggaaaatggaagccaaattttatctttaaag

SEQ ID NO: 18303 - DNA, 724 bp, Macaca Fascicularis
  misc_feature (1)...(724): n = A,T,C or G
actgaccagtgtgtgctaagaagcatgtaatgagaggtcctacctcagtgtcgttttgaatttttaaactacagcccacagtaagaannnnnnnnnnnnnnnnnnncccttcgcccatttgcgtgtatgtatgagtagtgtatccgtgtcctattgctgctgttacacatagcacaaacgcnnnnnnnnnnnnnnnnnnnnnnnnnnnnnnnnacagtcctggaggccaggagttccaaatgcatgtggctgggctggaggcgaggtgttgnnnnnnnnnnnnnnnnnnnngaggctccagcacatgcagtcctctcctggcccgttgccagcttnnnnnnnnnnnnnnnnnnnnnnnnnnnnnnnnctctcagtcttcaaagcnnnnnnnnnnnnnnnctccgctgtagcctgtatccctcctggatggtgactctggtcccttacttggggaagcttgtggagggtagggctcaggactgcttggaccctgggaccctgacatcttctgtccttggcccatggaggcctcaggcgttgtgtggcccatggctcagtgagtgaatcatgaatggctaaggaagtgcgtgccnnnnnnnnnnnnnnnttctgcccattaaagagctgtcacaagtccttgtgtccccagccccagctgtcacagctttgatcannnnnnnnnnnnnnngtttggctccctctctatcactggactgggaaccct

SEQ ID NO: 18304 - DNA, 771 bp, Macaca Fascicularis
  misc_feature (1)...(771): n = A,T,C or G
agtaccctttcgacctggagaacatcnnnntcaggatggtggatgtnnncngccagcggtcggagcggaggaagtggatccactgctttgagaacgtgacatccatcatgtttctcgtcgccctcagcgaatacgaccaagtcctggtggagtcggacaatgagaaccggatggaggagagcaaagccctgttccggaccatcatcacctacccctggttccagaactcctccgtcnnnnnnnnnnnnnnnnngaaggacctgctggaggacaagatcctgtactcgcacctggtggactacttccccgagtttgacgggccccagcgggacgctcaggcggcgcgggagttcatcctgaagatgttcgtggacctgaaccccgacagcgacaagatcatctactcacacttcacnnnnnnnnnnnnnnnnnnnnnnnnnnnnnnnnnnttcgcggccgtgaaggacaccatcctgcagctcaacctcaaggagtacaacctggnnnnnnnnnncaggcccggggagacaggacggagacacggggcaggacctgccttccacggcgcccgcggctgcnnnnnnnnnnnnnnnnnnnnnnnnnggccggggcctctgcccgcgggaggagtttctttcttttttttttcatatttttaacaaatggtttttatttcacagttgtcaggggatgtacatctctccctccgcacacgtcgcacaccttctcaccttctgtcagcggcaaagcagccttttctggcctgactac

SEQ ID NO: 18305 - DNA, 667 bp, Macaca Fascicularis
  misc_feature (1)...(667): n = A,T,C or G
tgcttttcccatcntagagcatgacagcatcgatctcatgaggagaaacctgggcagctccggccaggcctcataggaaaaggccccgcccgaggttccggcgtcaacggccactgtgtgtggctgctctgagtgaggaaaaaattaaaaagaaaaactggttccatgtactgtgaacttgaaaacatgcagactcaggggggtccctgatgcagtgcttcagatgaagaatgtggacttgaaaatacagactgggctagtccagtgtctatatttaaacttgttcttttcttttaataaagtttaggtaacatctcctgaaaagcttgtagcacaaaggctcagctggggatggtgtttgacttcggaggaaaaaagttnnnnnnnnnnnnnnnnnncactagagttagtgttttatccctaaataatttcaatttttaaaaacatgcagcttccctctccccttttttatttttgaaagaatacatttggtcataaagtgaaacccgtattagcaagtacgtggcaatgttcattccaatcagatgcagctttctcctccgtctggtctcctgtctgcaattgcttccctcatctcagtagggaaaaaattgagtgggagtactgagatgtgtgggggtttgccattggacaaagaatgaggtta

SEQ ID NO: 18306 - DNA, 731 bp, Macaca Fascicularis
catcatgattatgggattcctgggatgctgcggtgctataaaagaaagtcgctgcatgcttctgttgtttttcataggcttgcttctgatcctgctcctgcaggtggcggcaggtatcctaggagctgttttaaaatctgagtctgatcgcattatcaatgaaactctccgtaacaccacagagcttttgagcaccacaggggaaagtgcaaaacaattccagcaagccatggctgagtttcaaaaagagtttaaatgctgtggtttgatcaatggagctgctgattggggaaataattttcaacaacattccaaattatgtgaatgtctagatacgcagagaccatgcaccacctataatggtacagaagtttacaaagagccctgtatttctaccataaaagacttattggcaaaaagtttcataatagttattggaatagcatttggactggcagttattgagatactgggtttggtgttttctatggtcctgtattgccagatcgggagcaaatgaatctgtggatgtgtcaagctatcaccagtaaaacccctttaaaatgttgctttggctttgtaaatttaaatatgtaagtgctatgtaagtcaggagcagctgtctttttaaaatgtctcagctagctagaccacagataccttctagacatattgaacatatttaaggtttgagatcccttaaatataaatataaaaatgatatgaatgta

SEQ ID NO: 18307 - DNA, 721 bp, Macaca Fascicularis
  misc_feature (1)...(721): n = A,T,C or G
agcaggctcacgcggaacagttggccaacatgagaattcaggatctgaaagtcagcctcaaaccnnngcactcagtgaacaaccccattctgcggaagaggaaagtaacttggcaccaagccaaaggacagtgtctatatccacgaccatgagaatggagccgaggattccaatgttgccttggaaaaactccgagatgtgattgctcagtgtattctcccccaggctggagagaatgaagatgagaagctgaatgaagtaatgcaggaggcttggaagtataaccgagaatgcaaactcctaagagatactctgcagagcttcagctggaatggtcgtggattcacagataaagtannnnnnnnnnnnnnnnnnnnnnnnnnnnnnnnnnnnntagaagagcaaaccacgtcccatgaatcccaataatgacagcttcaaactttgtggttttttaaataatttgaaaaattattcttaaatgtataaagtaattttatgtaaattaataaatcataatttcatttccacgttgattaaagttgctgtatagatttagggtgcaggacttaataatagtatagttattgtttgtttttaagaaaagctcacgtctagagatacactattactttaggactgtgtagttgtatatttgtaagatgacagatgatgctgtcaagcaatattattttatttgtaataaaatatacaaaaatca

SEQ ID NO: 18308 - DNA, 740 bp, Macaca Fascicularis
  misc_feature (1)...(740): n = A,T,C or G
tgcaaagtagatganttcantgtancnagtcctcagtttgnnngannnnntcgggagagtcctcttggacaggagaaggcacttgaacagatactggaatatgaactacttcttatacagcaacttaatttccaccttattgtccacaatccttacagaccatttgagggcttcctcatcgacttaaagacccgctaccccatattggagaatccagagattttgaggaaaacagctgatgactttcttaatagaattgcattgacggatgcctaccttttatacacaccttcccaaattgccctgactgccattttatctagtgcctccagggctggaattactatggaaagttatttatcagagagtctgatgctgagagagaacagaacttgcctgtcacagttactagatataatgaaaagcatgagaaacttagtaaaaaagtatgagccacccagatctgaagaagttgctgttctgaaacagaagttggagcgatgtcattttgctgagcttgcacttaatgtaatcacgaagaagaggaaaggctatgaagatgatgattacgtctcaaagaagtccaaacatgaggaggaagaatggactgacgacnnnnnnnnnnnnnnnctctaaccatttgaagttgatttctcaatgctaactaatcaagagaagtaggaagcatatcaagcgtttaactttatttaaaaagtgtaatgtgaaaacaaaatatatta

SEQ ID NO: 18309 - DNA, 782 bp, Macaca Fascicularis
  misc_feature (1)...(782): n = A,T,C or G
ctggagatgaccaacaagttcannnnnnnnnnnaatccgcatcttggtgaaaagtgatgaattgactctggaaggcatcaagcaattttttgtggcagtggagagggaagagtggaaatttgacactctgtgtgacctctacgacacactgaccatcactcaggcggtcatcttctgcaacaccaaaagaaaggtggactggctgacagaaaaaatgagagaagccaacttcactgtgtcctcnnnnnnnnnnnnnnnnncccagaaagagcgggagtccatcatgaaggagttccggtcgggcgccagccgagtgtttatttctacagacgtttgggccagggggttggatgtccctcaggtgtccctcatcatcaactatnnnntccccaataacagagaattgtacatacacagaatcgggagatcaggtcgatacggccggaagggggttgccattaactttgtgaagaaggatgacatcagcatcgtcagagatatcgagcagtactattccactcagatcgatgannnnnnnnnnnnnnnnnnnnnntctgatctgaagcagatcgaggggatgagtgaagactgttcacctgttctgtactcctgtttggaagtnnnnnnnnnnnnnnnnnatttaatggggtttatatggactctcttctcataaacggcnnncctgtctccctccgaagaggatgtggggattctgctcttttcttatttacatgtaaataatacattgttctaagtctttttcattaaaaatttaaaacttt

SEQ ID NO: 18310 - DNA, 590 bp, Macaca Fascicularis
ctgtcccttccctgttccatagagatatacagatatatacccacaggtggatggacggacggacggacaagacaggcagagatctataaacagacaggctctatgcggtggcctcccatgtgtttcctctgtcccagggtagtacggtggatgggggtgcagtgaggaggagcccagggcacagaagggctgggctgcagtggcctcctgggggaaggcggacgcttgcagctagccccatgcctgcccaactccgcaggaccagagaccggggtgggcaccctggccctgcaggtctctcgttgtcagaccaccaggaaccccattcccaaggtgtttgcactcagggacaggggatgcagggcaggcacactgtcttcctgccatagccagtgccctcctatgtaggcacaggcaacagaagcctgtcccatagcttcagggttttccactcagcctggtggaggaagggaagggggcctggggtgggcagtggagcaggctttgcttctttatctggcagcaacagcttgttcttgagctccattggccaacaggtggggacaggcacaggagcctatgtgggatgg

SEQ ID NO: 18311 - DNA, 771 bp, Macaca Fascicularis
  misc_feature (1)...(771): n = A,T,C or G
gggacgcaggattcacaaggaaaaannnnntatcgaagtgtacatgcggcctctgtccaacaaggccagcgcttagtcntcttcagctgcaggaccgatatgccttatcactaccactcctcccttggcnnnnnnnnnnnnnnnnnnnnnnnnnnnnacgaggcccaggacgtctactcaggtgacatcatcagtggcctccgagttgaaaccaacttcacagtgatcatcaacccttcgggggtagtgatgtggtacctgtatcccatcaagaacctggagatgtcccagcagtgaggagctgggacataggacaggctgtgatggcaccactgagcctagaccatggatccttggcatgcccagggcaagtgggcaggttctctgctccccaggcctgcttggtgactgaccccatcatacccaaagtgcaatctcagggccaggttctatgccctgcccaagcgtaaaccttcttggaaacttttggggcaattttcctgtggccttcctggcctctacttcgtgtgcgcagccccacagacgttgctgagcaactcgccagcctcccaagccccatgcccatcaggactctannnnnnnnnnnnnnnnnnnnntctgaaatcaggatttggaatttttcaaattaggagtagagagatctgacctcttgtcaggaatgcccatgaatcgtgtgattggcttttctacccatagagggccttgcaggctgataccacctgggagtgagggtcacaaaggagaccttgg

SEQ ID NO: 18312 - DNA, 770 bp, Macaca Fascicularis
gattgcttcgatgcatgccagacaatgtggacgcagccctggccctccctgcccatagctacagtggcagggagcgggtctacttcttcaaggggaaacagtactgggagtaccagttccagcaccagcccagtcaggaggagtgtgaaggcagctcccggtcggctgtgtttgagcactttgccgtgatgcagcgggacagctgggaggacatcttcgagcttcttttctggggcagaacctctgctggtatgagacagccccagctcattagccgggactggcatggtgtgccagggcaagtggacgcagccatggctggccgcatctacgtctcaggcatggcaccccacccctccttggccaagaagcaaaagtttaggcgtcgcaaccgcaaaggctaccgttcagaccgaggccacagccgtggccgcaaccagaactcccgccggccatcccgccccacgtggcggctgtccttgttctccagtgaggagagtaacttgggagccaacaactatgatgactacaggatggactggcttgtgcctgccacctgtgaacccatccagagtgtcttcttcttctctggagacaagtactaccgagtcaaccttcgcacacggcgagtggacgctgtggaccctccctacccacgctccatcgcccagtactggctgggctgcccagctcctggccatctgtaggaggcagagcccacaaggctgggcccgctgtagctccctcctccaatctcctcccccagccca

SEQ ID NO: 18313 - DNA, 800 bp, Macaca Fascicularis
  misc_feature (1)...(800): n = A,T,C or G
gggacatgagagctgtatgggggctgtggnnnnngagnnnnnnntnctnnnnnnnnnnnattgttttactgtggacgacaagnnnnnnnnnnnnnaggtcagcgtnnngnngaagcggnnnnnnnnnnnnnnnnnnnnnnnnnnnnnnnnnnnnnnnnnnnnnnnnnngaaaaaagannnnnnnnnnnnnnnattttatgactatgacgttgccctgatcaagctcaagaaaaagttgaattatgacccgactnnnnnnnccatttgtctcccctgtaccgagggaacaactcgagctttgaggcttcctccaactaccacttgccagcaacagaaggaagagctgctccctgcacaggatatcaaagctctgtttgtgtctgaggaggagaagaagctgactcggaaggaggtctacatcaagaatggggataagaaaggcagctgtgagagagatgctcaatatgccccaggctatgacaaagtcaaggacatctcggaggtggtcacccctcggttcctttgtactggaggagtgagtccctatgctnnnnnnnnnnnnnnnnnnnnnnnnnnnnnnnnnnnnnnnnnnnnnnnnnnnnnnnnnnnnnnnnnnnnnnnnnnnnnnnnnnnnnnnnnngtagtggatgtctgcaaaaaccagaagcggcaaaagcaggtacnnnnnnnnnnnnnngactttcacgtcaacctcttccaagtgctgccctggctgaaggagaaactccaagatgaggatttgggttttctctaaggggtttcctgctggacagggcgcg

SEQ ID NO: 18314 - DNA, 1262 bp, Macaca Fascicularis
  misc_feature (1)...(1262): n = A,T,C or G
tacacagacacagggtgggttggggaggggcggtgttaactttttctgctcctnnnnnnnnnnnnnnnctgaaggggagctcttggatatcatcggccnnnnnnnnnnnnnnnnnnggagccactgggccccaacactggcttggagatttagggtcaaagggtagagtgaactggaaagggtcacgtggccccatgttgcagcagccccaacgtcacgcatgtcattcactgccttgccactccatctccctctgtgctccagcctcccctgagctgaggctcccattgtctccatcagagcctgcatgtgaatgccatcctccctgggttcggtgtttgtgttccccacccttcacagacttcctgagctcttctgtaagctggggtagggtgctggcagtgctccgggaactgggcctgcagccttcctcttctgggactgctgtgaggcagaggaatgatggaggatctagtgcagcagcctccaggcaggattcagcacaacactggggagtcacccttccctcgggcctctgcctaccaataactgggcttatcactgggaaaacacaaaaaattacacaacccagcaacaacaaaaaaaactagtcctcttagaatttcttgcgctttgatttttttagggcttgtgccctctttcacttatagggtctagaatgcttgtgttgagtaaaaaggagatgccccaatatcaaagctgctaannnnnnnnnnnnnnnnnnaagactccgtgtaactgtgtgaagatttgggatttttctcctctgtcccgaggtcgtcgtctgctttcttttttgggtttctttttagaagattgagaagtgcatgtgacgggctgagagcacacccccctaaacacacaagctctcagccacaggcagcttctccctccacnnnnnnnnnnnnnnntaggctcctggagggctgcctgggggaggcagacatgggagtgccaaggtggccagatggttccaggaccacaatgtctttatnnnnnnnnnnnnnnnnnnnnnnnnntcacccctgtctggctctggagtaccatctgccccagacaagcaggagtgaaatgggggtggggggaagcactgattcccagttagggggtacctaactgagcagtagggatagaaggtgtgaacctgggagtgcttttataaattattttccttgtagattttatttttaatttatctctgtgacctgccagggagaggggagagagagatgtttaggggg

SEQ ID NO: 18315 - DNA, 715 bp, Macaca Fascicularis
  misc_feature (1)...(715): n = A,T,C or G
gggaagtaaggaccagagacaaaaagggagtaactattcccagtcagaggcgctatgtgtattattatagctacctgttaaagaatcacctggattatagaccagtggcactgttgtttcacaagatgatgtttgaaactattccaatgttcagtggcggaacttgcaatcctcagtttgtggtctgccagctaaaggtgaagatatattcctccaattcaggccccacacgacgggaagacaagttcatgtactttgagttccctcagccgttacctgtgtgtggtgatatcaaagtagagttcttccataaacagaacaagatgctaaaaaaggacaaaatgtttcactttnnnnnnnnnnnnnnnnnnnnnnnnnnnccagaggaaacctcagaaaaagtagaaaatggaagtctatgtgatcaagaaannnnnnnnnnnnnnnnnnnngagcgtgcagataatgacaaggaatatctagtacttactttaacaaaaaatgatcttgacaaagcaaataaagacaaagccaaccgatacttttctccaaattttaaggtcagttaaattaaacattttgtgggggttggtgacttgtatgtgtgtgatgtgtgtttaattctaggagtacagctgatgaagaacttgcttgacaagtttttaaattatgtattatttagaagnntgtgtttacatagcagtaacatgaaagt

SEQ ID NO: 18316 - DNA, 728 bp, Macaca Fascicularis
  misc_feature (1)...(728): n = A,T,C or G
atctcgatgctgtttggtttccaacaattcagcattagtgggaaaaagtgggccctcatacacaagcatgtcaggttgtcagtgtttggtgcatattgaggaagaatttactttggaaagtagaaaagcccagctctttctgggacatcttctgttattgttgatgttttttttaccttnnnnnnnnnnnnnnnnnnnnnnnnnnnnnnnnnnnnnnnnnnnnnnnaaattccagataccaagcatgtggatatgtttagctaggtttactcacagccagcgaactgacattaaaataactaacaaacagattcttttatgtgatgctggaactcttgacagctataattattattcagaaatgactttttggaagtaaaagcagcataaagaatttgtcacgggaaggctgtctcagataaattacggtaaaattttgtaagggagcagacttttaaagacttgcacaaatacggatcctgcactgactctggaaaaggcatatatgtactagtggcatggagaatgcaccgtactcatgcatgcaaattagacaacaaagtatgaatctatttgtgggtgtgctatagctttagccgtgtcgcgggcatcattctctaatatccacttgtccatgtgaaatgtgttgccaaaatggtggcctggcttnnnnnnnnnnnnnnnnnnnnnaatgcgttttggtcctggaggctcaaatttgagtatcc

SEQ ID NO: 18317 - DNA, 671 bp, Macaca Fascicularis
  misc_feature (1)...(671): n = A,T,C or G
gcccaaatggagccacgagaggacgtctttggggatgtatctcctagaaaagtctgggcagtcttcattaccctggattcctgtgacttggtttccatgggggctttctaagctcagggaccccaagcctccatcaaatctaatgacccgccctgtctctgaacacatctgtgttgttcctgagccccttaccaaccccctccgcaaccccgcccacacatttcccatactgaagcgtccagcccttagnnnnnnnnnnnnnnnnncttcacccctgctttgtccctacctggtggggagctgtcccttctgggccctagtgtggcacttcacacacgaatgtgtcccgtgggtggtatctggggcctccccctgcagtgagggggatgaccaatgcacagagctcactgggcctgggtatgggcttgggtggcacagaacacagagaaagtgctctgtaaaggtgagcttcgatgtccccgctagggaggaggtgggcaagctcttccctgggggaggaagagctctcaatccagaggnnnnnnnnnnnnnnnnnnnncccccctccacccaggaagcccctgcagacagtatgtgttttacgcttcgctggccaaatggtctctgccacgactgctcagctctgccattgnnnnnnnnnngtggccata

SEQ ID NO: 18318 - DNA, 668 bp, Macaca Fascicularis
  misc_feature (1)...(668): n = A,T,C or G
gtgattaggtgaagnngtgggggaagattttacgcacagcctagttatcaagggnnnnnnnnnnnnnnnnnnnnnngaaccccctaacctctaaccctcattgctgtcttgccccagtttggggtgccaagatggaagtcacctttctgggctttttcttggagatagatggggcttatgggtggctttcaaggctggggcatggcaaatcaggggccagagagcaggggagcttgggactcnngtctgtaaaagcccagccccttttctctgctcttgtttcactccaccaccactcactcactccctactcccccacccatgggaggagacctttgatgaattcttcctctccttcccacaaaagacagaccccgtgagtgaatcaggcaaagtgcttataatgtgtgttgtgtgagcgtggccttgggaggacatacgtgtgtcagggatgagttgaggtggcatttttatgtgcagcgacccttggtgtttcccttcctcggtggctctggggtatgtgtgtgtgtgtgtgtgcctgagtgtgtgtgcgtgaatatgagtgtgtatgtcagtggtttctacttcccctgggatgctgacccacgaatagtggacatggtcacagtcctatgtacagagctttcttttgtataaaaaaaatactc

SEQ ID NO: 18319 - DNA, 776 bp, Macaca Fascicularis
  misc_feature (1)...(776): n = A,T,C or G
ctgggcaaggggcctggtggggatgcaaaaggctctgnnnnntccgatgccaaagggtggtggnnntcagaaaacgacccaaggccccatcgctggccgctgtgtgatagaagtggttggtggcccagcaccgctcagacgactgcagtgaaccccggaggagcaggtgcatcctggacacgcggtctcaggggagggcctgtgtttgtcacatttgatgatggccgaggccctcaaccagaccccaaattcactccaactgaagaagaggaggtggaccctgacccccgcagaccccggggtgggaacagccaagggcacggaggcacagacagcagaggacggcatgtggaggctgccgttaccatttcatgtttttaatatgagtcagcagcacgtttacaaaactcatgctctctcaagtacacacacgaaacacaagccatggggtgtggcgctgttcgcagagctcggggctgggtgcgggactgggacacagacatcccgaccgcttgctcaggccccagcgttactcggggctctaatgaccctaaatgactggggtgatgcgggcatccctgccgagggcgacacttggtatctggggagaggcttggtgtgagtcgcgtctataaagtttaatttttataatcatatgacttagtttaacaagcaggagaaaaatccattgtattacttcttttgttaaaataattaattatagcacagcacctagcttaatagctaaattgattgaatcatgtaacaacaaaatc

SEQ ID NO: 18320 - DNA, 805 bp, Macaca Fascicularis
  misc_feature (1)...(805): n = A,T,C or G
gcaggaagcacgtcatgnnncccacatgcactgggnnnnnnnnnnnnggttccagannnnnnnnnnnnnnnnnnatgggtgccaggtggccagtgagggcccgaggaccacacagcagagtcccccacgggcctgatcctgagagcttagagggttnnngcttggcctcagaactgtgtgtgcaggacagggtggctggcacgagatgtgtgggactgggacgcttcctttggggaccagaggaacattagggccagtcagacgtgtagggggcagcgaggcaatgnnnnnnnnnnnnnnnngcaggctgcagatggtgggccttgggctggccaggggttactgggtggccccttccccatgcgcctccacaagcactcagaccactggcacgtcaggccagtcagaaggtccacatagcagagctgcctggaacacctgtggctccaggaggcccttgggggcatgaggagagctggactcgctcatctatccttgcaccgccatccagaatgccnnnnnnnnnnnnnnnnnnncagcccccagtctgaccagcaagtcccggggctacccttgccgaaccttgtgctccaggggtcctcctaccccaggaccaccttgccacagtttctcggagaccaggtgtcctctgacctgccatgtggaggtgggatttgatactgtacattgtcttgatgcctgttttttttttatgttttcctttcattaagggtttttagtttctggttgggttgacactaacttttcttaagatgctgtgagaaccattcatccaaatgccaat

SEQ ID NO: 18321 - DNA, 685 bp, Macaca Fascicularis
  misc_feature (1)...(685): n = A,T,C or G
gannnnnnnnnnnnnnnnnnnncatcagtgtttgattcatgggaagatactctnnnnnnnnnnnnnnnnnnnnnnnnnnntgttaaaagcaacaagagtccccggcacnnnnnnnnnnnnnnnnnnnnnnnnnncnnnnnnnnnnnnnnnnnnnnnnnnnnnnnnnnnnnnnnnngcagagtcactcccaaatgggtctccttagaacttnnnnnnnnnnnnnnnnnnnnnnnnnnngctaggagtctctctctccccaaccagtccagggccctcctttcctataagttcatattttgctttgggccagctttttaggctcatacccgcacacgtggaagccatgttgcctctcgtnnnnnnnnnnnnnnnnnnnnnnnnnnnnnnnggtggtgcccagggggctgctgctgggccgctgggtctctctttgtggccttgtgcctggagcaggaggacctccagtccgtcccggcatccctggcagcacgcagttaggtgcaccggggtttgctgatgctgtcttgtgctgttccactcttggctccagcagagccactgtcccagaaacacctgagcctgtagtttgtgtaggatgccacatctgcgtccnnnnnnnnnnnnnnnnnntccatttgggannnnnnnnnnnnnnnnnnnnnnnnnnnnncaggggtgaggggag

SEQ ID NO: 18322 - DNA, 699 bp, Macaca Fascicularis
  misc_feature (1)...(699): n = A,T,C or G
gcacatccctatgtgtgcgcctattttaatacacctctctgaaacacatacctttttgttcacaaccatnnnnnnnnnnnnnnnnnnagtcttcaggcaaggcgagggaggaaaacatcccattagaattttttcaggaaagaccgaaaaagatatccctctcccacctccttttatccccatgaggtacagtttcccactgtaatatgcatttgtgagttctgatatgtgattcatttatgtgatggcaaagataagtctgtcttgcatgcaggtactagagttgtctgggcagggtcatctgaaactcaagcaactaagaggaatatacaaggggcttggggaagaaaacggtgctcccggagcaagtgttggatccattgtgcaaaccttcatgttagcagagaaagctagagtttgtttaaacaaaaatagggctgatttcatttgggggactcagcagcaacatggtttgtaggcagtcccctcatcccagctgcagggccatgccacagctctggggacttcacacacctaggctagaactagaggtgtctaccacatcaccctttaggatttctttattaactatttaataatgccatacatttttataaggttagattgtttgtttgaaacatttgtttacattccatattccaataaaatcttattggtattggtagcaggtcctatctc

SEQ ID NO: 18323 - DNA, 717 bp, Macaca Fascicularis
tgtaagcatcctgattttaggtaggaatttttttttggcagaccaagtgaagactcaagaatggtgtacattataaatgacacacgtttccactcatgtagatatttttaagttctttggctaagtcttctcctaactgctcgtcctctggttaggcccctccctctccactagtggcgaatgcatgtgtctttctgatcagcgtcactgcacacggaggtctattgagcctcttgctaagtgtctcacacacactcttcccaaagaagcgatgaattaaagttgtattctgaaatcatgaagccagagcctgtgccagaccttctgctacctctcatagaattgctctgtaattccaaatttaaaattagaagtggagagagataagccattgccccattgcctctgagaattggctgctgtttctaatctaattattttctaagatagccagatagttagaaaaagattttcattgatgagatatttttaaacttgcttgtatcagtattttaaattgagcaaactgtaagattttcatcaggaaaggagcactgtggtaaaaagcccagtattcacattttttcccagttttcagaagtgacatttcatatataggtgccaaaagtgaattggggtgcggagagcgggaaccttttgaatttacgattatcacagagattgtagaaattatgatcggactggaaaacgatcctg

SEQ ID NO: 18324 - DNA, 806 bp, Macaca Fascicularis
  misc_feature (1)...(806): n = A,T,C or G
cgagacttaccaggttcatgactacctccgcagcnnnnnnnnntccctctatgaaaatgactgcatttttgataaatttgagtgtgtgtggaatgggtcagnnnnnnnnnnnnnnnnnngctcctacaacaacttctttaggatgttcgacagaannnnnnnnnnnnnnntgacccttgaggcttcgagggaaaacagcaagccccgggctatcctcaaacccagaaaagtgtgtgtggggggcaagcggagaaannnnnnnnnnnnnnnnnnnnnnnnnnnnnnnnnnnnnnnnnnnttgcatacagcttggcatccttcagaaaatattatagcagtggcggctacaaataacctatatatattccaggacaaggttaactaggtggacaagttattacttaataatctcacatactgaatactagtcaaacaagtttttaaatgtttctttgggtcttcatttgatgcattgactttaatttccctatgcaggaaatgattggaatagaattaaaaggagtccaacattcccagctccccagttctaagaaacttttgtcaaacccaataggtttgggacacttctgtttagaattgaaagctgccagctaacagtaattcttccatagttgacttgaacttctgatgcttttattgcccagttttctctggtgggtccagtgttttgttcctaggtgtctgctgcgataaaatgaggttgtctgtagtatttaaggagaaaagaaataagttttttttaattaagcaattccattnntgaaaaaaaaacaacaaaaaataaa

SEQ ID NO: 18325 - DNA, 644 bp, Macaca Fascicularis
tcacagatgtggacgagccccccatcttccagcagcctttctaccacttccagctgaaagaaaaccagaagaagcctctgattggcacagtgctggccatggaccccgacgcggctaggcatagcattgggtaagggcattgggtaagcattgtcgatgaggatgatgaggacaatccggcctggatgtgcctatgcctgctggtctgcggccaggactcacagaggggaactggcttctcctggcacttacggggaaagtgacagaggcaagataagaagcccaagctcttgcacttggcagcctggcatcttgacctgcgcaggctcccccacctagcatggtcctgggcatccagaggtacttgtcctctgtcccgccttgaaggcttgttctctgcaccacagctctcaccagtcctatgtggtaagatctgacagtcaagagagcaaccaatcagatgacacaccagagacattaaaactgtattcttgaatctatctcccccaaaccacaaaagtaagaagtgttcatttcatacggtgaaacaacacaaagatctaccaagaaaacattgataacccccactgtcagataactcatgttcgtggcctgacctggtcctattgctcctttcttttcat

SEQ ID NO: 18326 - DNA, 763 bp, Macaca Fascicularis
  misc_feature (1)...(763): n = A,T,C or G
cacggggancaggaggagcggcaggactnnnnnnnnnnggatgagagtgaggccgcagcgtttgacgacgagtggcggcgggagacgtcccgattccggcagcagcgccccctggagtttcggcggcttgagtcctcaggggcggggggacgaagggcggaggggcctccccgcttggccatccagggacctgaggactccccttcccgacagtcccgccgctatgactggtgagggccccgggccctcagcctctcttgtacaggctgagaggctgagaaatcatcccctgaataactttttcctctctgattcccatccccaatttaatattaaattaacaggcaagccggcccccacctctccctgggggtctcagggagaacctttccctactttttccttctttaatccccttaccatgatgacttcgcctctgcatctactaacttgatttttcattctgctgctccatcttcaaaccccctcacctttcccattctactcctgccatgcattgaagggtcttttggggtgagctctgggtttaggggcctcctccatccctcagctaccctggatctttgcccacctcttcctcagagcccccactgaggggccgtagccctgtctagggctgtggaaggagcagactggttctcaactctttctccctactcctgcccacacacatcaccagaatcttccctaaacccttccctgcctttattttttgatttgtgcaacttgtaactaggtgtta

SEQ ID NO: 18327 - DNA, 742 bp, Macaca Fascicularis
  misc_feature (1)...(742): n = A,T,C or G
tatgcactcgctggccgccgccgccgcctccagagggggccgggtcctggaggtgggctttggcatggccatcgcagcgtcgaagnnnnnnnnnnnnnnnnnnnnnnnnnnnnnnnnnatcgagtgtaatgacggcgtcttccagcggctccaggactgggccccgcggcagacacacaaggtcgtccccttnnnnnnnnnntgggaggatgtggcgcccaccctgcctgacggtcactttgatgggatcctgtacgacacataccnnnnnnnnnnnnnaacctggcacacannnnnnnnnnnnnnnnnnaagaaccacgcctttcgcctgctaaagccggggggtgtcctcacctactgcaacctcacctcctggggggagctgatgaagtccaagtactcagacatcannnnnnnnnnnnnnnnnnnacaggtgcctgcgctgctggaggccggcttccggagggagaacatccataccgaggtgatggcgctggtcccaccggccgactgccgctactacgccttcccgcagatgatcacgcccctggtcaccaagggatgagcccccaccccggcctgggcacaccagtgccctcctccgtgccttcctggccgggagtctaggctctcccgcnnnnnnnnnnnnnnnnnnnnnnnnnnnnnnnnnngctttctcagcttctctgtgaggggtcacactgcccgctgccgggtctctgaggtgaagtaaacaccggcg

SEQ ID NO: 18328 - DNA, 797 bp, Macaca Fascicularis
  misc_feature (1)...(797): n = A,T,C or G
cagtatgcactcaactgaccactcncnctagaaatagtcaagatacgaactaagaaattttaatgcaaatacatacattcctgaaagatggggaattaaataactattttttttaaatgatgacagtgggtcccagaacttggaaaagttgtagggatttctaaactcaaacagattcgnnnnnnnnnngcgnnnnnnnnnnnnnnnnaccagggtcaaccaatcagaaggcaacttactgtataaattatgcagagttattttcctatatctcacagtattaaaaataaataattaaaaattaagaataaataaacgagttgacctcggtcacaaaagcagttttactatcgaatcagtcgctgttattttttttaaatgtaatttgtacatcttttatcaatctgtacatttgggctgtttgtacgtttttatnnnnnnnnnnnnnnnnnnnnnnnnnnnnnnnnnnnnnnaaggaaacagggctgtttaagtcannnnnnnnnnnnnnngcaaagcactggtacagttatttaacaggcatacacaagcaaggaaagataatccatttagatctttaatgctttggaaatgtgtgtaacagtactgcaataatcacagctctgggaaaaacaacaaaactttcccttgtgcagaggagggattttcctgctctatatatgcaacatatttttagacattaaaatatatataattttgcaggtannnnnnnnnnnnnttaactatatgaagtgttaagctgacaactgtcaatgaagaccatgttgtaaaataat

SEQ ID NO: 18329 - DNA, 627 bp, Macaca Fascicularis
  misc_feature (1)...(627): n = A,T,C or G
gtctctcggggagagccagtnnnngtgcctcagtgnnnaagagggcccgggagtggcccccggggctgtggctcagtgcggcgtggcctgacgggccatggccgtggccagccaggcctggaagccgtccaggccagtgcctgccgccaccttccacgcacccctggccaaagtgcgagtgctggcttccgctcccccggggcagggctcaggggcgggcacaagtgctcaggacaaggccacgcacagagcagccggccacgtccctctctctgcctctcgggtacacacctgagaatattctataaaagtcctcaccccaccctcactgtttccaaattggtgacaacacaaagcagaacaaaacgaaaataaatgcccccatccaattggcgtttctcccagtgtcaccggggagccatccctccagctgccaagcccatgtgggctccggtggggtgcgctccagccagggcagggtccccgggcagccccaagaggccagtgttggccctggaggcacagcccagaggagcccccgtggctccagcccggggacccttcccagcctctgcagagagacgggggaccctgccatgacagagggcccagggcgttcttcaacct

SEQ ID NO: 18330 - DNA, 711 bp, Macaca Fascicularis
  misc_feature (1)...(711): n = A,T,C or G
acggtgtgatggagtgttaaaaaaacaccacaagccccactggaatgatggggccattctaggttttgtaaacaagcaacaggcccacgacctactcatcaacaagccagatgggaccttcttgttgcgctttagtgactcagaaattggcggcatcaccattgcttggaagtttgattcccaggaaagaaacctttggaacctgaaaccatttaccaccagnnnnnnnnccatcaggtccctagccgaccgcctgggagacctgaactacctcatctatgtgtttcctgaccgccccaaagatgaggtcttctccaaatactacactccannnnnnnnnnnnnnnnnnnnnngatacgtgaagccacagatcaagcaagtggtccctgagtttgtgaacgcatctgcannnnnnnnnnnnnnnnnnnnnnnnnnnnnnnnnnnnnnnnnnnnnnnnnntgtgtgcccccaggctcactataacatgtacccacagaaccctgacccagtccttgaccaggatggagaannnnnnnnnnaggacacaatggacgtggcaaggcacgtggaggagctcctgggccggccaatggacagtcagtggatcccacacgcacagtcgtgaccccgcgacctctccgtcttcagcttcttcatcctcaccagaggaatcactcttgtggatgttttaattnnnntgaatcgcttctc

SEQ ID NO: 18331 - DNA, 712 bp, Macaca Fascicularis
  misc_feature (1)...(712): n = A,T,C or G
attcagaccccagatcaactgagattctcatacatggctataatagaaggagcaaaatgtataaagggagattctagtatacagaaacgatggaaagaactttctaaaggaagacttatctcctgcctttgatcattcaccaaacaaaataatgactgaaaaatacaatgggaacagaataggtctagaagaagaaaaactgacaggtgaccgatgtacaggacttccctctaaaatgcaagacacaatggaggagaacagtgagagtgctctacggaaacgtatccgagaggacagaaaggccaccacagctcagaaggtgcagcagatgaaacagaggctaaatgagaatgaacgaaaaagaaaaaggccaagattgacagacacctaatattcatgannnnnnnnnnnnnnnnnnctataaattttgaaccattgatgtgcaaagcaagacctgaagcccactccggaaactgaagtgaggctcgctaaccctatagattgcctcacagttgtttgtttacaaagtaaactttacatccaggggatgaagagcacccaccagcagaagactttgcagaacctttaattggatgtgttaagtgtttttaatgcgtgtatgaaatgtagaaagatgtacaagaaataaattaggagagattactttgtattgtactgccattcctactgtatttttatacttttggcagca

SEQ ID NO: 18332 - DNA, 721 bp, Macaca Fascicularis
  misc_feature (1)...(721): n = A,T,C or G
aacactggcgtttaattggttggggtcagataagaagaggagtgacaatcaagccaacagtagatgatgactgaagaataccggttaaataatacattcggatggagttggaagttggaatttctcttaacaaccaaggggtttattttcaaagcaatattgnnnnnnnnnnnnnnnnnntcgttaccttagtaggtaactgtaaggttattctcttttttttttggttatgaaaatttagggactacagtgaatataaaaattggcataatattggattgaatctacattttggcagaagtcaagcgttcccacataatgtcaaaattatacatcatgcagttttggtttttttgtttgttttattttcttttgtttttnnnnnnnnnnnnnnnnnnnnnnnnnnnnnnnnnnnnnnnnnnnnnnnnnnnnnnnnnnnnnnnnnnnnnnnnnnnnnnnnnnnnnnnnnnnnnnnnnnnnnnnnnnnnnnnnnnnnnnnnnnnnnnnnnnnnnnnnnnnnnnnnnnnnnnnnnnnnnnnnnnnnggcatgttggccaggccagtctctcctgacctcagggtgatcagcccacctcggcctcacaaagtgctggggtnnnnnnnntgacgccaccttgcccagcccacatcatacagtttgaaatgaaactttgccacaaccagcctttgctgtagtacacacatatatcactgaacctgc

SEQ ID NO: 18333 - DNA, 790 bp, Macaca Fascicularis
agcagccccagcaaacagtgattgctgaccactcgctgagcgccagccacatggagaccaccatgaaacttctgaagaccagggtgcagtcccgcctggccctccacaaacagtttgcatccctagaacatggcattgtgccagttaccagtgattgccagtacctcttccctgccaaggttgtctctcgcctggtgaaatgggtgacagttgcccatgaggattacatggagctgcatttcaccaaagacattgtggatgcgggactggctggggacaccaatctctactacatggcactcatcgaaaggggcacagccaaactgcaggccgctgtggtgttgaatcctggctactcctccatcccacctgttttccagctctgtttgaactggaaaggggagaaaaccaacagcaatgatgacaacattcgggccatggagggtgaagtcaatgtgtgctacaaggagctgtgtggcccttggcccagccaccagctgttgaccaaccagctgcagcggctgtgtgtgctgctggatgtttacctggagaccgagagccatgacgacagtgtggaggggcccaaggaatttccccaggagaagatgtgtctgcggcttttcaggggtcccagcaggatgaagccatttaaatacaaccatcctcagggattcttcagccatcgctgacctctcgcccagcctgttgtttcccccaaggcctcaccctgagtcctgggcttctgctttctgctgtggcccacatgtgactcttgatattctctaaagac

SEQ ID NO: 18334 - DNA, 162 bp, Macaca Fascicularis
aatgggaatataacagaatctggatgcaaagaatgtgaggaactagaggaaaaaaatattaaagaatttttgcagagttttgtacatattgtccaaatgttcatcaacacttcttgatggcaactgattctttataaagtgtttatgatgctaacggacatc

SEQ ID NO: 18335 - DNA, 769 bp, Macaca Fascicularis
  misc_feature (1)...(769): n = A,T,C or G
cccagcaactgtgaatggcaccgtggagggcggcagtggggccgggcgcctggacctaccnnnnnnnnnnnnnnnnnnnnnnnnnnnnnnnnnnnnnnacacggccnnnnnnnnnnnnnnnnnnnnnnnnnnnnnnnnnnnnnnnnnnctggtgatccccttccaaaaccctgaggagcaggatgaaggctggctcatgggcgtgaaggagagcgactggaaccagcacaaggagctggagaagtgccgcggggtcttccccgagaacttcaccgagagggtcccgtgacggtggggcccaggcagcctctgggcgtgtgaagaacacctcctcccgaaaaatgtgtggttctttttttctgttttgtttttgtttttaatcttttgaagagcaaagggaaatcaagaggagacccccaggcagaggggcgttctcccaaagattaggtcgttttccaaagagccgcgtcccggcaagtccggcggaattcaccagtgttcctgaagctgctgtgtcccctagttcagttcctggcgcccctgcccgtgcccgcatgtgtgcctggccgcagggcggggctgggggctgccgagccaccatgcttgcctgaagctttggccgtgccacccgggcaagggtcctcttttcctggcagctgctgtgggtggggcccagacaccagcgtagcctggccctgccccgcagatggtctgtgtgctgtttgaaaataaatcttagtgttcaaaacaaaagaaaccaaaaaacccg

SEQ ID NO: 18336 - DNA, 707 bp, Macaca Fascicularis
  misc_feature (1)...(707): n = A,T,C or G
tcctggccctcnnnaagcanngtgtgtccnnnnagcannanntactaggagaggggggccaaggtcctgcccaactctccccctgctcccattcctccctccgaccatactgcctttgcagttggactctcagggattctgggcttggggtgtggggtggggtggagtcgcagaccagagctgtctgaacttaggtgtcagaagcctccaagcctgcctctcnnnnnnnnnncagttctctcccttcctctcgccttatagacacttgtcccaacccattcactacaggtgaaggacctcacccccatccctgggggccttggttgagtggcctgctaaggcccctccttgcccagactacagggcttaggacttggtttgttatttcagggaaaaggagtagggagttcatctagagggttttaagtgggaggactatcaacaccactaggaatcccagaggtgggatcctccctcatggctctggcacagtgtaatccaggggtgtagatgggagaactgtgaatacttgaactctgtcccctcaccctccatgctcctcacctgtttaggtctctcctcagggtgggggttannnnnnnnnnnnnnntgggcacagcctagggtcttgtgggagaggggggagaagttcttgattcagccaaatgcagggaggggggggcagatggagcccataggccaccccc

SEQ ID NO: 18337 - DNA, 769 bp, Macaca Fascicularis
  misc_feature (1)...(769): n = A,T,C or G
cagatgaaaataaagtagatgggatgaatgtcccaaaaggccaaactgggacctctagccgtggaccaggagacggagggaacaaagaccactggaaggagtcagataggtatgcttgttctctttctcattatcatctttcctctnnnnnnnnnnnnnnnnnaattaagaaattaagttcttggttctcaaagcactgtcagatctctcattgtgannnnnnnnnnnnnnnncaacatgacagttaagattctgaaaatctagaagtaatacatcatccagacaacaaggactgttggctagaggtgccctgttcagtgctttgaaactgcatgcatgcacatatttgtattaggcgagtcctttcctaaagatgtggttttatgcttacgtctctgcaggaaagatggcaaaaaggatcaagactccagatctgcacctgagccaaagaaacctgaggaaaatccagcttcggtaagtgttgaaggctgctcccaatttttcgtagaatactttttgctgttggacttctttccatttggaatacaaagtgtttggaaataagacattggtctttatctgaaatagcacaagaagtttagctttttcctggtttctgccttcctttgttctcatcccttctgcaaggtgtagaggtggtatgggactacagtaagatcacatgtgcctctgaccctcttccctagctcctctccagtggacaatgttgatgacnnngcaagnnnntgtcatctgactgtcatcccca

SEQ ID NO: 18338 - DNA, 757 bp, Macaca Fascicularis
tttgacatcacagggatgaaggagctgcttgagggtctggactatagtgtggatgtagaagagaatctgacagccagggatatggagtcagcgctgagggcatttgctgcccgaccagagcacaagtcctctgatagcacattcctggtgctcatgtctcatggcatcctggagggaatctgcggaactgcacatgatgagaaaaacccagatgtgctgctttatgacaccatcttccagatattcaacaaccgaaactgcctcagtctaaaggacaaacccaaggtcatcattgtccaggcctgcagaggcgcaaaccatggggaactgtgggtcagagactctccagcatccttggaagtggcctcttcacagtcacctgagaacctggaggaagacgctgtttacaagacccatgtggagaaggacttcattgctttctgctcgtcaaccccacataacgtgtcctggagagatagcacaatgggctccgtcttcatcacacagctcatcacgtgcttccagaaatattcttggtgctgccacctagaggaagtatttaggaaggtacagcaatcatttgaaactccaagggctaaagcccaaatgcccaccatagaacgactgtccatgacaagatatttctacctctttccgggcaattgaaaatggaagccacaagcagcccagtcctcctttatcaacttcaaggagcaccttcattagtacagcttgcatatttaacattttgtatttc

SEQ ID NO: 18339 - DNA, 570 bp, Macaca Fascicularis
  misc_feature (1)...(570): n = A,T,C or G
catctctacaaaatattttaannnnnnnnnnnnnnnnnnnnnnnnnnnnnnnnnnnnnnnnnnnnnnnnnnnnnnnnnnnnnnnnnnnnnnnnnnnnnnnnnnnnnnnnnnnnnnnnnnnnnnnnnnnnnnnnnnnnnnnnnnnnnnnnnnnnnnnnnnnnnnnncatgtctcaaaaaaactaaaatttaagttaaagaaaaaaagcagttctatgttataacctgcaagtttgtcccctagagattgtttaagcctcttaggtaccatatcaacaacaaaggataatgccttgggtagaagacaggtcaaactagactctggctcacatcagactcagggcaatgacaacatacactattacagttgcattttcaaaaataaaattgataatcgtttaattaccagttaccacaagagccactttgtaaacatttatttggattcatagttttacaaaggggattccctcctatcttgtgggaaaagnggtaacacagtcacatccagattgttatatagctcaggctttttaaggggtatatttaaacatagagtatataactttaaa

SEQ ID NO: 18340 - DNA, 724 bp, Macaca Fascicularis
  misc_feature (1)...(724): n = A,T,C or G
agcaaaagacttgtaggagaaaacacaaatcgtgctacattaaattatactacgagagacttttacaatgaaaagctagaggaaataaaggaaaagaagaaattctgtaaaacgtatatagaagaccttgtgaaggaagccacagaaatcaacatgaaaaatnnnnnnnnnnnnnnnnnnnnnnnnnnnnngttcattgagcttgttagggatgcagttatagaaattcgcaataaaaattcctatttgaagctctgcctacagcagataacagaccaaaaataaagatggccnnnnnnnnnnnnnnnnnnnnnnnnnnnnnnnttttgaaagttgaaaatttgcaggttatacatgttaaaacaacaacactatcctataaactagaaagactagtattaaagcattattgcccactgttctcatagctaaaagttaagaaggaaaggagaaaggaaggattaatttcctgtatgtgatgaccaaacaacctctgnnnnnnnnnnnnnnnnnnnnnnnnnnnnnnnnnnnnnnnnnnnnntcttgctttgattggtgccctgctacagcccaaagcannnnnnnnnnnnnnnnnnnnnnnnnnnnnnnnnnnnnnnntacttttagctgataattttcagttatttccctttttattttatgtcannnnnnnnnnnnnnaacatatgttctttttatgagtgaagaataaacttactaataaa

SEQ ID NO: 18341 - DNA, 717 bp, Macaca Fascicularis
  misc_feature (1)...(717): n = A,T,C or G
tgcacaacantgtgantacttaatgccactgcaactgtatatttaaaaatagttaaaatgataaattttatattatgtatattttactgcaattgaaaaaaannnnnnnnnnnnnnnnnnnnnnnnnnnnnnnnnnnnnnnnnnnnnnnnnnnnnnnnnnnnnnnnnnnnnnnnnnnnnaaattatcactatctacatttttcatatgtgttcaaagacagagcctattacaagtctcataaattttagtaaacaatcggaaattattttggcacactttcatgtaggttctcttcactgctgaaaaattctaaataaaatggtttagagttttactgtaactctatgaataattatgctataattatagtatcctnnnnnnnnnnnnnnnnnnnnnnnnnnnnnnagtgtcaagttactgttcaccaactataaacacttgaaaggcctgtagagacatttgcttacaaactggaagacagaaggtagctttgtggaatttttaaattatggaattgtattcacagaagacggtgattcttgcccttaattcataattgaaaatatacagtaacaagcataaaattcacatcttaatgaagatgtatctaccagtgtcattcaattagcagatgtatatgtatgcataattaatttggaaaatgttattttatggaatatctgctatatgcttttggtaataatgctatatataaa

SEQ ID NO: 18342 - DNA, 759 bp, Macaca Fascicularis
  misc_feature (1)...(759): n = A,T,C or G
gcatggtttgttctaatgcttcttgttggcagctgccacctgtccggcgattctgtccagatctctctgtccctgaggtgtcagtttgcggcccccatcttggtccttttccaccattttcagcccctccagggcttggaggacccgacgagccacactcttggagcctcggctgaagtggctgggcatgacgccgtttctctgacgtcccccatagatcttggtcatggagccaaccccagcgccaccccggaggtacaggtgccgcgctgtggaagcagctcgtgtgtagaaccagttctcatcgtagggagcaagctctttgtgcttggctagcttgacggtgtcgacccattcggggactttcagcttcccggactttttgaggaaggctgccagagctctgacgaactcctgctggttcacgtcttttacagtaactccaggcatcatgcggcctcgcgctgccagtcaggggaaagggaactttcttctctcttatgggttgaccctcctctacattctgttcgcttattgtgaccttctaggtgcatgagccatgcggtttgtcacatttgcagactggctgccatacttagatttatcatgccttgcaaatggaccatttaaaatattttatcacagaaaaccacactttttccatggatctgtgcaagctgcagatcagaaggtcccccatgtgagcccatgcnnnnnnnnnnnnnnnnnnnnnnnnnnnnnnnnncagattctcagtga

SEQ ID NO: 18343 - DNA, 689 bp, Macaca Fascicularis
  misc_feature (1)...(689): n = A,T,C or G
gagattaaggatcnnntgccagaaatgaaggcatactggnnngatgtaattcactcgtttcccaatcgcannnnnnnnnnnnnnnnnnnnnnnnnnnnnnnnnngacctgtgccgcccaggtggacgcgctcaactcccagaagaagtactttggcagaagcctggaactctacagggagctggacctcaacannnnnnnnnnnnnnnnnnctgtgggtctttgtcacagagctcttggaacaagcaggcaggaaagagatgttggccagggctctttaaaccccagaaatgatccaaacctgcgtgaatcgtccctgcctgccctcacctcagttctcaagaannnnnnnnnnnnnnnnnnnnnnnnnccagtgaacttgtaaaacaaagtgcctcccgagggccacgcccagcccactcactgtccaaatctggtcgctagagatacagggtgtgcccttacctctccgtctggacgtttcagtatgtcagtgtcttagctgttctcactgaccttcatcataagaggtcataataaaccagtgaagtgctnnnnnnnnnnnnnnnnnnnnnnnnnnnnnnnnnnnnnnctgcttttgcaatttacgcagcttgttttagagcaattctccttcaaatcagaataataccaggagcctttgctaatcagctgtatttaaggtttctg

SEQ ID NO: 18344 - DNA, 914 bp, Macaca Fascicularis
  misc_feature (1)...(914): n = A,T,C or G
agaagactgctatcatggcagagaaacccaagctccactacttcaatgcacggggcagaatggagtccacccggtggctcctggctgcagctggagtagagtttgaagagaaatttctaaaatctgcagaagatttggacaagttaagaaatgatgggagtttgatgttccagcannnnnnnnnnnnngagattgatgggatgaagctggtgcagactagagccattctcaactacattgccagcaaatacaacctctacgggaaagacataaaggagagagccctaattgatatgtatacagaaggtatagcagatttggatgaaatgatcctccttctgcccatatgtccacctgaggaaaaagatgccaagattgccttgatcaaagaaaaaacaaaaaatcgctacttctctgcctttgaaaaagtcttaaagagccatggacaagactaccttgttggcaacaagctgagccgggctgacattnnnntggtggaacttctctactatgtggaagagcttgactccagccttatctccagcttcccantggtgaaggccctgaaaaccagaatcagcaacctgcccacggtgaagaagtttctgcagcctggcagccccaggaaacctcccacagatgcaaaatctttagaagaagcaaggaagattttcaggttttagtaaagcagccatggaggccaagaacttgcaagaccagtattctaaagtttgcaacaataaagtgctttacctaagtgttgattgtgcctattgtgaagctaatgaactctttccaattacatgctgattaaataatacaactcctattcgcccacttagttaaaattgatttgctttcattaggatctgatgtgaattcagatttccaatctcctcctaacctaccacttc

SEQ ID NO: 18345 - DNA, 713 bp, Macaca Fascicularis
  misc_feature (1)...(713): n = A,T,C or G
agagtctggcctggaactaaaatgcctggaaaaatgggaaacatatataggacagcgtatggactgaaagtgtggagaataaacacaaagcacaacataatctatgtaaatggctctgtacctggacataaaaattgcttagtaaaggtcagagattctaaactgcctgcatataaggatcttggtaaaaatctaccattccctacatattttcctgatggagatgaagaggaactgccagaagatttgtatgatgaaaacgtgtgtcagcctggtgcaccttctattacatttgcctaacatctttggatgtggcagaaccttacacattctgtgagctttgatgagccagagtgatataatcaccaccagaaatcatattcttctttcttagtcacaacaaaatcaaacatgtcatctttgtcaagggcataaatatatcattcatacgcccattaaattttgttagaaaatttgccacattaaggccgggcgcggtggctcacacctgtaatcccagcactttgggaggccaagacgggcgaatcacgaggtcagnnnnnnnnnnnnnnnnnnnnnnnnnnnnnnnnnnnnnnnnnnnnnnnnnnnnnnnnnnnnnnnnnnnnnnnnnnnnnnnnnnnnnnnnnnnnnnnnnnnnnnnnnnnnnnnnnnnnnnnnnnnnnnnnnnnngaggcggagcttgtagtgagccg

SEQ ID NO: 18346 - DNA, 788 bp, Macaca Fascicularis
  misc_feature (1)...(788): n = A,T,C or G
aggattggaactgggctgaagagagggacaggcactccaaacctgtcttggggccactttcagagcccccatccctgggaaccactcccaccacaggcacaagctgtcacctagcagcctcaaaacgggtcagtattnnnnnnnnnnnnnnnnnnnaggccaaccagcccagcagtgtcatccccaccttcacctcggagggatggagaagtaagtggagacagtcttttnnnnnnnnnnnnnnnnnnnnnnnnnnnnnnnaagctgtgcagacatggtcccttaaggcacagtgggagctgannnnnnnnnnnncacgtggatgggcaaagcttggcaaagatgcccccttcagaagacagccaggatgcccagatgaactgactaaaggaaaagcaagaaacagtttcttgcttgggagccaggtacaggagaggcagcatgcttgggctgacccagcatctcccagcaagacctcatctgtggagctgccacagagaagtttgtagccaggtactgcattctctcccatcctggggcagcactccccagagctgtgccagcaggggggctgtgccaacctgttcttagagtgtagctgtaagggcagtgcccatgtgtacattctgcctagagtgtagcctaaagggcagggcccacgtgtacagtatctgtatataagttgctgtgtgtctgtcnnnnnnnnnnnnnnnnnngtttttttatacaatgttctttgtctcaaaataaagcaatgtgtttttcggacatgctttctgccactccat

SEQ ID NO: 18347 - DNA, 755 bp, Macaca Fascicularis
  misc_feature (1)...(755): n = A,T,C or G
cggccgcagcannncnggnnncttccgtggnnnnngctcctgcgtggaagccggcaaagcctgcgaccccgcagccaggcagttcaacaccctcatcccctggtgcctgccccacaccgggaaccggcacaaccactgggctggcctctatggaaggctcgagtgggacggcttcttcagcacaaccgtcaccaaccccgagcccatgggcaagcagggccgcgtgctccaccccgagcagcaccgcgtggtgagcgtgcgggagtgcgcccgctcccagggcttccccgacacctaccggctcttcggcaacatcctggacaagcaccggcaggtgggcaatgctgtgccgccgcccctggccaaagccattggcttggagatcaagctctgtatgttggccaaagcccgagagagtgcctcagctaaaataaaggaggaggaagctgctaaggactagttctgccctcccgtcacccctgtttctggcaccaggaatccccaacatgcactgatgttgtgtttttaacatgtcaatctgtccgttcacatgtgtggtacatggtgtttgtggccttggctgtcatgaagctgttgtgtgaggttcgcttatcaactaatgatttagtgatcaaattgtgcagtactttgtgcattctggattttaaaagttttttattatgcattatatcaaatctaccactgtatgagtggaaattaagactttatgtagtttttatatgttgtaatatttc

SEQ ID NO: 18348 - DNA, 717 bp, Macaca Fascicularis
  misc_feature (1)...(717): n = A,T,C or G
gtacaagcaacttggatntnnatttgtacaaattacttgtttttcttaatgatggcaatttttaaactttaattttattgtgatctcttaaagcagaagttagactttacctttctaaagaaattgttgactggatttataagaagttaatttttgaaaattacatgatatttttgtgtgataggaagaatggagcaagttgtgcctatttcctcaagtcagataaggtttctaaaataaatgaatttctagcatgtaaagggtagagataaaccctgcaaatcttatgtctggaattatattaatgtttgtccttgccaaaattgctagaaattaatttccttcaatagcatcctaatattctatttttatttggggcagagtaatttcatttatgttgcctgtaggtgtaccatgtgttcacttgaacaaagaacaaatggctaagatggagtaatgactaaagtatgttctcannnnnnnnnnnnnnnntaattgataacttttaagccatactaccattttaaagacaatttgcacaaatacatttgtatctgttttgtccaatatagatttggcaattatttaaagagggataatcttgaaaaaaattaatcaaggtgatttcttatatgtagatgcttgattttggaatttgaaatagtagatgtacctctttaaccttttttacttggataaaaacctatgatgattttg

SEQ ID NO: 18349 - DNA, 737 bp, Macaca Fascicularis
  misc_feature (1)...(737): n = A,T,C or G
tgaagccatgaggctctgcgnngactgggagaccagcagcagagatgaagacttggaaaactgctctcacgacctctgaaactcggggaaaccagcccagctacgtccggagtgaaggagcctatctgctttagctaaagatgactgagaagaggtgcaaggaggtgggctccaggagcaagcccaccaggcctctcagacgtcccagnnnnnnnnnnnnnnnngcggggtcggcgcttcctgcacggggaagcaggttctccgcattcccatgggcaccacctgcctgcctcggatccaggacccagcttcccaggagagaccaaaggcttctgggcaagggttttattttattacagtgtgagctgcctggaatacttgtggtaatgaaataaaacccctgccccgaaccttccgtccctcatcctgacttgcagttcacagagaaaagtgacaaacctgaagctctctgtcaactacaaggctcctcctggcgtgggaggtgtctccagggaagacaccagcgttggggcttctaaccaccctgtctccagctgctctgcacacacagacagggacccgggaaaggtgggagagatgctgagccaagcgaatcctctccatcaaaggattcgcaaagaagaaacctcaactcagtgccattttacatatatatgtgtttatatttatacttccttgtctattatagctacacattatatatgatttgtattttg

SEQ ID NO: 18350 - DNA, 704 bp, Macaca Fascicularis
  misc_feature (1)...(704): n = A,T,C or G
tacctttagataatcagtatgaaaagttcccattataaatggaaatgaaaattcttaactatacatgtgatatgtatttctagaaaagaataaaaacccaagtcagttattagatttaaatcaccttctgaaatgctgctnnnnnnnnnnnnnnnnnnnnnnnnnnnnnnnnnnnnnnnnnnnnnnnnnnnnnatttttaaagtatgctgtagcatttcttaataacatcgttgtgatgttctnnnnnnnnnnnnnnnttcataacaaggaaattaatggcaatttctctcctgtggaaatcccaattgcctgaattactgatattttagaaatagactttttaaaatgccatatgtaattttatgcaagttgactatatatcttgttcttaataaattataggctcattttgttctctgctagtttaaagtaatttgtttaataatagatgtgtttttagaggaaatgctgttacttggaattttccagttatacagtcttctataacttactaataatatgctatatatactttatgtaatttccctaaaaagaatgaactaccactacactatggtgttaaaccaaaatatggggaaaataaacactaactgctgcttatggataatgttgcaactacttgttatgcatataaatattttactttttcatatgtatagattgcatttcttaggtgtttaat

SEQ ID NO: 18351 - DNA, 1474 bp, Macaca Fascicularis
  misc_feature (1)...(1474): n = A,T,C or G
acaaaaattgatggactgaaaaagaactatcttagaactcagaagaataaagaaagaatcaaattcataggataagtcaataccttaattgtggtggagcctttacctgtagcttgaaaggggaaagattggaggtagaagagaaaatgaaagatagaacacctctggatccttctatccagttttaagcactagtcttactcagctatccattatagttttacccttaagaagtatgattagcttatgaaaaaattacttggggacaggagtnnnatatcttccttggttttttttttttttttttggcagccctcaaatcctatcttcnnnnnnnnnnnnnnnnnnnnnnnnnnnnnnnnnnccttttctttagtgatttaactttcaacttgatgaataacttataggtgatagtgataattcctgattccaagaatgccatctgataaaaaagaatagaaatggaaagtgggactgagagggagtcaacgggaatgctgcggtggccgccactccctctgccactatccccagggaaggaaagactctgccatttgggaaagtggtttctatgtcactggacaccagttctgagcattagtttgagaactcattcctgaatgtgctttcctccctctcccctgcccacctcaccttaagtttaataaatatggttgtacttttcttatgataaaataaatgtctgtaactgctgtacactgctgtaaacttgttagagaaaaaaataacctgcatgtgggctcctcagttattgagttattgtgatcctatctcagtatgtggggggaacattctccagaggtgaaatacataaagcctttttttcttgatcttttcccgagattcaaatctccgattcccatttgagggtaagtttttttcttcaccttcaacatgaaaattcagcgaacttgaaagaaaaatcatctgtgagttccttcaggttctcactcacagtcatgatcgttcagagggaatatgcattggtgagtttaaaggactatgatatttgatagtcccaaagtacggcagctgcaaaaagtagtggaaggaaattgtctttctacgttttgggaaaattagttaggaatttggatgggtaaaaggtacccttgccttactccgtcttatttttttagccccttttgagtgttttaactggtttcatgtccnnnnnnnnnnnnnnnnnnnnnnnnnnntcctctgccctcccaggaagtcagtgattgtctttttgggcttcccctccaaaagaccttctgcagtggaagcgccacatccagtttttatttggttgctgctgtgtttagataattgaagagatctttgtgccacacgggattttttttttttttttaagaaaaacctatagatgaaaaattactaatgaaactctgtgtacgtgtctgtgcgtgcaacataaatacagtagcacctaaggagcttgaat

SEQ ID NO: 18352 - DNA, 780 bp, Macaca Fascicularis
  misc_feature (1)...(780): n = A,T,C or G
agagcnnnnnnnnnnnnnnnacatnnnnntctgtattacctcannnaagacgggcggcgcttccgcagggcctgccgnnnnnnnnnnnnnnnnnnnnnnnnnnnnnnnnaggagcggcgccgcaccctccccactcaaggtattgatgatttcctcaaggacaaannnnnnnnnnnnnnnnnnnnnnnnnnnnnnnnnnnnnnnnnnnnnnnnnnnnnnnnnnnnnnnnnnnnnnnnnnnnnnnnnnnnnnnnnnnnnnnnnnnnnnnnnnnnnnnnnnnnnnnnnnnnnnnnggccagtggtctctcctggatcctgtacaaccttgcgagnnnnnnnnnnnnnnnnnnnnnnnnnnccgacaggaggtgcaagagctcctgaaggatcgcgatcctaaagagattgaatggcattatctgcgtcatcaatattacaggtgtccatcacaacccaaccgtgtggccggatcctgaggtctatgacccctaccgcttcgacccagagaacagcaaggagaggtcacctctggcttttattcccttctccgcagggcccaggaactgtatcgnnnnnnnnnnnnnnnnnnnnnnnnngaaggtggtcctggcgctcacgctgctgcgcttccgcgtcctgccggaccacaccgagccccgcaggaagccggagctggtcctgcgcgccgagggcgggctttggctgcaggtggagcccctgagctgagttctgcagtgactctgtgatccatcaaaatgacccctgcttcatcaaaagtga

SEQ ID NO: 18353 - DNA, 746 bp, Macaca Fascicularis
  misc_feature (1)...(746): n = A,T,C or G
agccaagtgagtgatgggcagctgccatctgctggcccggaggtccaaggcagaagagttgggccttcccatccttggnnnnnnnaggtcctatgcagtggttggggtcccacctgacatcnnnnnnanannacctgnntacgccatccctatagctttgcaaaaagcagggctgacagtgagtgacgtggacatctttgagatcaatgaggcctttgcaagccaggctgcctactgtgtggagaagctacgactcccctctgagaaggtgaaccctctgggcggtgcagtggccttagggcacccattgggctgcactggggcatgacaggtcatnnnnnnnnnnnnnnnnnnnnnnnnnngtgggaagagggcatacggagtggtgtccatgtgcatcggaactggaatgggagccgctgctgtctttgaataccctgggaactgagtgaggtcccaggctggaggtgctacgcagacagtcccgctgctgtagcagcaaggcagcaacactacagaagcaaaaccacatgagaaaactcagcactggtggtggtggcagtgggcagatcaaggcacttcaactcatttggaaaatgtgaacactgatgacatggtataggagtgggtagggtgttgagccacgcatcagaccctctttagctgtgcaagacaaaagcagcctgggtcatccaggccacaaggccatggttaattcttagggcaaggcaaattcatggatgaga

SEQ ID NO: 18354 - DNA, 671 bp, Macaca Fascicularis
  misc_feature (1)...(671): n = A,T,C or G
cagtgattttggnncnntcccacttctgtagttcctcatcctcccttcccatatccttcaaaagaaccacactagggtctccacccacttatacaatgcggatgcccnnnnnnnnnnnnnnnnnnnnnnagcnnnnnnnnnnnnnnnnngtgagtgtcctccaagagcccccctgagctccgccctctgtctggagggctccagactcctgagccctgcttggaggcgagcattttcattgctaggannnnnnnnnnnnnnnaggacacccccaccccaaatttcagttcttatgtgattttaacnnnnnnnnnnnnnnnnnnnnttttaattctctaattattattattattgttattattttttaggaccagttgtagtgaattgctactgaaagctatcccaggtgatacagagctctttgtaaaccgcagtcacacattagggttagtattaaactttgtttagatgtaccataattaacttggctagttgattgtttgaagtctannnnnnnnnnnnnnnnnnnnaaaattttaannnnnnnnnnnnnnntcagnnnnnnnnnnnnnnnnnnnnnnnnngggagccaggaaggtgggacagccagcaggtagggacattgtgtacctcagttgtgtcacatgtgagcaagcccaggttgaccttgt

SEQ ID NO: 18355 - DNA, 694 bp, Macaca Fascicularis
  misc_feature (1)...(694): n = A,T,C or G
cctgcaagccccgctgtacaagaaaatagttaagaaacttttggagagttagttactagctgtctaagtgtgtgcanntgctatgtaatatacttttttttttccannnnnnnnnnnnnnnnnaaagaacctctgatatttgtgttatccttatgattttaaataaacaaattaaatcaagttgtagtatagtcaaaatacttcttaataatagtgcaaaaattgtattgacacataatttcatggaagaaaaaaattccggtattttaagcaaaaagtattttgaaggaaggtttgaatactggttttgcttggtattacatgttggctgatacatattcatgcatttacatgattgcagtactttatagctacaatttacctggacgattattattacctttgccaataaatattagtagcacttatgtattactacatggcttttaaaaaaattatgtaggccgggcgcggcnnnnnnnnnnnnnnnnnnnnnnnnnnnnnnnnnnnnnnnnnnnnnnnnnnnnnnnnnnnnnnnnnnnnnnnnnnnnnnnnnnnnnnnnnnnnnnnnnnnnnnnnnnnnnnnnnnnnnnnnnnnnnnnnnnnnnnnnnnnnnnnnnnnnnnnnnnnnnnnnnnnnnnnnnnnnnnnnnnnnnnnnnnnnnnnnnnnnnnnnnnnnnnnnnnnnnnnnntg

SEQ ID NO: 18356 - DNA, 753 bp, Macaca Fascicularis
  misc_feature (1)...(753): n = A,T,C or G
caaaggaaacttcaaccacagcactgcaggnnnctgttgccagaccagagctggaggtaaatgctggcatagtctctggacaaagcagtgagcccaaagagatagttgaaaagtccaaaatcccgagccgaagaaactcccgaactgaagagccaactgtggcttctgaaagtgtggaaaatggacnnnnnnnnnnnnnnnnnnnacctgcgtcagcctccagctctactaaagacataaccagtgcggtgcaatccaagcgaagaaaatccaagtaaacaagcaggannnnnnnnnnnnnnnnnnnnnnnngtgtgacttttacaaagagcaattttgagctgtgacttttttaaatcaatttctgtacagttagtaattttannnnnnnnnnncttttcctagtccctgcaacctgtttcataaagtgcaatggggaaagcaggattgttgagcccttttggtgttgcaagttgaagttcaaggtttctaaaatgttgtcttgtattgaaaggagctaatgccattataaatgttattagttttcacannnnnnnnnnnnnctagagtacagggtgagcatttttagnnnnnnnnnnnnnnnnnnnnnnnnnnnnnnnnntgtgtgtgaatagcagtagtgggggcaaaagcaatcttctcatttggaaatgttgtaaataattttattatatagtgttttggatgtatttgttgtagaaatggaccagtgaataaagagaatctaaggat

SEQ ID NO: 18357 - DNA, 780 bp, Macaca Fascicularis
  misc_feature (1)...(780): n = A,T,C or G
tagctagtgatttacacagatttagtgattaatgaggcattacaaataatattactctttgatgatgcttccacccacacaactgcaagacacaggtgccttggggaaatttggagaacattcaatctcgccctcactcttcatcaatgaagattagcactgagatccagagaggctggatgacttgctcaagttcaccagcctgtcagtggcaaagagaggtccagagnnnnnnnncttgatgcccagctcagtgccacaaagctcagtaggagggttgttccagtggatgannnnnnnnnnnnnnnnnnnnnnnnnnnnnnnnnnnnnncctatcagcaacaacaactnnnnnnnnnnnnnnnnngggaaaaatgttggaatgggagtctgaaatggggctactgttttggtcccaacctgctgtgtgacattggggcaacacttcccctctctggacctcagtttccttctgtatacaaggatcagattcttgctgtgatccaagaactcctgaaatcatatagaaaggctggggtgtgccctgtcaatcatggttgatttcaatacactcaagtaccattcatcctttaagaaaaacatctggatatcaaggtggaaatggcccatttaatgattgattatatcatcttgtggatatagttataaccttatgggcctggctgggagtggaagaagggaagcctgttgcgaatagtagagtatcaattgcaggtgccaatgactaactttttgaattttatgttggcataacaataa

SEQ ID NO: 18358 - DNA, 719 bp, Macaca Fascicularis
  misc_feature (1)...(719): n = A,T,C or G
tggaaatgaaagccaagagctacaagatggctgnnctgaggcctttgagaagaggacatcccataaaggagaatctccactcactgactgctatggacctatctcaggacagctaattgccaccatgaaagaagcatgtcgctatgcactgcaagtgaaacctcagcgcctcatggcagccatgtacacatgtgaaatcatggccaccagtgatgttctcggtcgagtctatgctgtcttgtcaaagagagaaggtcgagtacttcaagaagaaatgaaagaaggaacagacatgttcatcatcaaggctgtgctgcctgttgctgaaagctttggttttgctgatgaaatcaggaagaggacaagtggcctggccagcccgcaactggtattcagccattgggagatcattcccagtgaccccttctgggtgccaactactgaggaggagtacttgcactttggggagaaggctgactctgagaaccaggcccggaagtacatgaatgcggtacgaaagcggaaggggctctatgtggaagaaaagattgtggagcatgcagaaaagcagaggacactcagcaaaaataagtaactatctactgttggtggattcttttccttatagtgaattaaaaagtatcatcaagggtttaatattgggaaaatttctttttgccacattatctctgtttattcactttcaataaagtgatcca

SEQ ID NO: 18359 - DNA, 765 bp, Macaca Fascicularis
  misc_feature (1)...(765): n = A,T,C or G
gacagcagcctgaanntcggcaggacccctnnnntgttgcaggtgactagccgcctgnnngcgaaacccagcgttcttcaggagatgatgtgatggaacacacacacatacacagacactcacgcacacttacaaatgcagacacacaacatcaagaaagcagcaagggagggaatccaagcctaaaattaaatcaatctttcagcctgcttcttccccagagttctgtattgcagctgagctcaaatgtatatttaacttctagttgctcttgctttggtcttcttccaatgatgcttactacagaaagcaaatcagacacaattagagaagccttttccataaagtgtaattttaatnnnnnnnnnnnnnnnnncctgtaactgcccttttaaatggcatgacaaggtgtgcagtggccccatccagcatgtgtgtgtctcnnnnnnnnnnnnnnnnnnnnnnnnnnnnnnnnnnnnnnnnnnnnnnnnngatccgcatgtgtctgtattcatacagcactacttacttagagatgctactgtcagtgtcctcagggctctaccaagacannnnnnnctggggtaccacatggtccatttcatgtgatctattactctgacataaacccatctgtaatatattgccagtatataagctgtttagtttgttaattaattaaactgtatgtcttataagaaaacatgtaaagggggaataaatggggggagcgagctctctcagacccttgaagatgtagcttcc

SEQ ID NO: 18360 - DNA, 1115 bp, Macaca Fascicularis
  misc_feature (1)...(1115): n = A,T,C or G
annnnnnnnngtnnntcaaatgcnnnnncccagannnngccagcctggaggagctcccagaggtctacnnnnnnnnnnnnnnnnnnnnnnnnnnnnnnnnnnntctgtcagtggggacgtcatcagccnnnnnnnnnnnnnnnaatgaactaattcgttttgaccacatatataccaagcccctggtcttagagataccctctgagacagagagccaagctaatgtggtagtgaaaatcgaggaagcacctctcagcccctcagagaatgatcaccctgaattcattgnnnnnnnnnnnnnnnnnnnnnnnnnnnnnnnnnnnnnnnnnnnnnnnnnnnnnnnnnnnnnnnnnnnatccagccactgcccgaaaccatcttcctgcctactggatgcttacagtgactgtggatatgggggctccctttcccccttcagtgacatgtcctctccgcttggtgtaaaccattcttgggaggacacttttgccaatgaactttttccccagctgattagtgtctaaggaatgatccagtactgttgcccttttccttgactattacnnnnnnnnnnnnnnnnnagggaagcctgcctgtgcttcattcaaaaagccaaaatagagagtacacagtcttagagaattcctttcaagtatttgttcagatcnnnnnnnnnnnnnnnaggtactgtcttttgacatccagcagtccaaagtattgagacatattactgtaattaagaaatattactataattgagaactacagcttttaagattgtacttttatcttaaaagggtggtagtttgccctaaaatacttattatgtaagggtcattagacaaatgtcttgaagtagaatttatgaatggttctttatcatttctcttccccctttttggcatcctggcttgcctccagttttaggtcccttagtttgcttctgtaagcaaagagaacacctgctgagggggctctttccctcacgtatacttcaagtaagatcaagaatcttttgtgaaactatagaaatttactatgtaaatgcttgatggaattttttcctgctagtnntagcttctgaaaggtgctttccatttattaaaactacccag

SEQ ID NO: 18361 - DNA, 767 bp, Macaca Fascicularis
  misc_feature (1)...(767): n = A,T,C or G
aacatagagacaagctggagaaagagatgacactatcccacctgaatacagacatctcctggatgataagggacaggacaaaccagtgaagccacctacaaagaaatcagaggaatcaaagaaatctgcagatnnnnnnnnnnnnnnnnnnnnnntctcaggagatctggacagctgtccctccactacagaaacctcacagaacacagcaaaggataagcgcaagaagaccgcttccagctccaaggcacctaagaatggaggtaaagcaaaggattcagcaaagacaacagaggaaacttccaagccaaaagatgatgaaagaaatacaagttaaagtatctgaaagaaaatgaatttgactggttcacctgtgttattgtattgggtattgataaactttgaatttttttaattgccttcaattgggagagaaagaaagctttatatttgtaataaatatatttgataaagtttcttaaagcaacaccaaaaaaacaaaagaaaatctaagcgaatttttgcacattctacacacagtgcctgtaaatctcatttgtatttttagtttgcacttaatttttttgttagtgtttggaaaacaatgctttaaacatttttcaatgttctgatttcttattaccccctttcctcttgggcttttgaactgtatttgatgttgctttgggataatgtttataagtcaaacataagatattgtacattgggcacatatctcctcttgggctgctaataataaattaata

SEQ ID NO: 18362 - DNA, 751 bp, Macaca Fascicularis
  misc_feature (1)...(751): n = A,T,C or G
tgatgcttggaannnattaaagcaattgggaacgaggtaacagttgacaaatgggaacctttgttgaacaacttggggcatgtctgcagaaaacttaaaaannnnnnnnnnnnnnnnnnnnnncaccgccaggcactggtgttgattcctcagaacgcatccacctactctgctattggatatatccacagtctgatgggcaactttgaaaatgctgtggactacttccacacagcccttggtcttaggcgagatgatacattttctgttacaatgcttggtcattgcatcgaaatgtacattggtgattccgaagcttatatcggagcagacattaaagacaaattaaaatgttatgactttgatgtgcatacaatgaagacactaaaaaacattatttcacctccgtgnnnnnnnnnnnnntttgaagtagaaaaacagactgcagaagaaacggggcttacgccattggaaacctcaaggaaaactccagattccagaccttccttnnnnnnnnnnnnnnnaattgaaatgaatgaaagtgacatgatgttagagacgnnnnnnnnnnnnnnnagcacgtgactccagtcagtggtcctggtcccgctgtaggaacagagacccgccttaagagactggatcnnnnnnnnttgcaacagatgtgttctgattctctgaacctacaaaatagttatacatagtggaataaagaaggtaaaccatctgttatgtcnnttttttatttttc

SEQ ID NO: 18363 - DNA, 734 bp, Macaca Fascicularis
  misc_feature (1)...(734): n = A,T,C or G
ccccaaatgtgactatccgttagatggagagaagattttacacatccttggatcaannnnnnnnnnnnnnnnnnnnnnnnnntttgaacaagataatgaagagaaatcagttgccactttaatattggattcccttatacagtgtccaatagacaccaggaagcaactagcagagaatttggtagtcatagggggcacttctatgttgccaggatttctccacagnnnnnnnnnnnnnnnnnnnnnnnnnnnnnnnnnaccnnnnnnnnnnnnnnnnnnnngcactaagacatttcgaattcatactccacctgcaaaagctaattgtgtggcctggttgggaggggctatttttggagcattacaagatatacttgggagccgttctgtttcaaaggaatatnnnnnnnnnnnnnnnnnnnnnnnnnnnnnnnnnnnnctcaataacccacctttggaaatgatgtttgatgttgggaaaactcannnnnnnnnnnnnnnnnnnnnnnnnnnnactgagaaatagaagtttgattaaaaaatcaaccttgcttcatattaaatatttaaccaattataagcaaattgtacaaagtatgtaggatgttttgttacagaggagtatagtggaagtgaaagcattctgtgtttactctttgcattaatatataattcttttgactttgtttctcttgtgtactggtaacatggtagctggtgcttactgaaatctg

SEQ ID NO: 18364 - DNA, 320 bp, Macaca Fascicularis
cacattcacccctgcccagagattcccccttcccctctccccaactggaggcaaaggaaggggagggtggatgggggggcagggctccccctcggtactgcggttgcacagagtatttcgcctaaaccaagaaattttttattaccaaaaagaaaaaaagaaaaaaaaaaatcccagcggccacctttcctccctgccccattgggacagtcgagactggatctgtggggtttcccgggagggtggctcagggctggaacactctcaggcaagagtggtggagctccggtcaggccctccgccaggcccactgtgggctt

SEQ ID NO: 18365 - DNA, 756 bp, Macaca Fascicularis
  misc_feature (1)...(756): n = A,T,C or G
gnnnnnnnnncaagaacctaaagctatttnnnctggctgagagtttgggaggattcgaaagtcttgttgagcttccggcaatcatgactcatgcatcagttcctaagaatgacagagatgtccttggaattagtgacacactgattcgactctctgtgggcttagaggatgagaaagacctactggaagatctagatcaagctttgaaggcagcacaccctccaagtggaagtcacaactagtattccagagctgctattagaagctgcttcctgtgaagatcaaatcttcctgagtaattaaacggaccaacaatgagcctttgcaaatttttcaagtggaaattttaaggcacctcattatctttcataactgtaatcttcttagggatcatctctgttaaaaagttttctgtatgtcatattataattacaggtcaattctgttaatatctctttgttaattttgctctatgtttgcctctgaaggaggtgagatttttgctgctttgggggatcatgttcttttttcatgtctgagatttattttgatcatgtttacaatataatggtcattcattttttatgttttgtgaagaacttaaatttaagcgaatgttcttaaatcaagtgtgattttttttgcatatcattgaaaagaacattaaaagcaatggtttacacttagttaccataagccaaaaatcaaatacttgaaaagtttactgtgaaattctactgatttaagaccatgctt

SEQ ID NO: 18366 - DNA, 500 bp, Macaca Fascicularis
  misc_feature (1)...(500): n = A,T,C or G
agaacagagtggcctacannnnnnnnnnnnnnnnnnnnnnnnnnnnngcaatggtcnnccagggctccaatnnnnnnnnnnnnnnngccgagggcaacagtcggttcacgtacagagtcactgtagatggctgcacgagtcacaccggagcctggggcaagacagtgatcgaatacaaaaccaccaagacctcccgcctgcccatcatcgatgtggcccccttggacgttggtgccccagaccaggaattcggcttggacgttggccctgtctgcttcctgtaaactccctccatcccaacctggctccctcccacccaaccaactttccccccaacccggaaacagacaagcaacccaaactgaacccctcaaaagccaaaaaatgggagacannnnnnnnnnnnnnnnnnnaaatattttttttcctttgcattcatctctcaaacttagtttttatctnnnaccaaccgaacatgaccaaaaaccaaaagtgcattc

SEQ ID NO: 18367 - DNA, 894 bp, Macaca Fascicularis
  misc_feature (1)...(894): n = A,T,C or G
cacattgagnnnaagnnnntgactcttgcctttccacctgcttnnncctgggtccactttgcccgttttaaggaccagtgctgttcgggaactgctgttccaacagacagggcctggcttgcatttggcacacagactgcagccggaagcccatgggtcagggatgtcacgtcccgaaaagcctattagaagttttacaaatttaattttgcagattattttagtctgtcatctagaaaatgtgtgagcacccatagtgccaagaaagcaagccaatttggaaactcaggttagtgacaaaattggccagagagtgggggtgacgaggaccaagaatgacaagtagcatggcagctggaatttgaggaaggacaagaatcagtggataagcctgggtggaggaggatccaaacagaaaagtgcagagttattccctatcttccaagggttggattctggaggaagaagacacattcctagttccccgtgaacttcctttgacttattgtccccccactaaaacaaaacaaaaaacgtttaataccttccactttaattagattttcttgcagtttttaatggtattattaaaaagatgccctaagttaagtgttgaagannnnnnnnnnnnnnnnnnaaaatatttaattaccggttgttaaaactggtttagcacaatttatattttccctctcttgcctttcttatttgcaataaaagaaaaggtattgagccatttttttaactgacatttttgataaattatgtttgtactagcttatgatgaaggagttttttaaacctgtttatataattttgcagcagaagccaaatttttgtatattaaaacaccaaattcgtgtacagcatgcatcacggatcaatagactgtac

SEQ ID NO: 18368 - DNA, 725 bp, Macaca Fascicularis
  misc_feature (1)...(725): n = A,T,C or G
agcacgatnnnnntacacattccagacattttccttnnngagccgnnnnnaagtacagctgtagcccttccctgagaaactcttacaggccaggaagccagtacagatctttgagaggtctgtgtacagtgacaggtatatctttgcaaagaatctttttgaaaatggttccctcagtgacatcgagtggcatatctatcaggactggcattcttttctcctgtgggagtttgccagccggctcacattacatggcttcatctacctccaggcttctccccaggtttgtttgaagagactgtaccggagggccagggaggaagagaaaggaattgagctggcctatctagagcagctgcatggccaacacgaagcctggcttcttcacaagaccacgaagctccactttgaggctctgatgaacattccagtgctggtgttggatgtcaatgatgatttttctgaggaagtaaccaaacaagaagacctcatgagagaggtaaacacctttataaagaatctgtaactgataccatgatgttcaggctgtgatctgggctccctgactttctgaagctagaaaaatgttgtgtctctcaaccacctttccattcccagcccctctcatccctggagcactctgctgctcaagggctggtttgttaattattgttagactttaccattgttttcttttgtatctgancnattntaaaataaagtta

SEQ ID NO: 18369 - DNA, 724 bp, Macaca Fascicularis
  misc_feature (1)...(724): n = A,T,C or G
agnnnnnnnnagngaggcactgccatttggagacattccatttcagagttgtcaaccagccataggccacattccagtaagaactcaatttgtctcccaaatttgcagaaacaaaacgtgatttaaaagctgagctttttatcagaaagcttttttgatgttttaagtgttatgtgacttgttgaactttttaaaaagtgctacttttaaaatcccagatactctgaattttagaaaacaaactaattctgattgtgtcgtgcccaagtaccctttttttttttttttaaacgaatagggaccaatgccacattgctttttatatttctttcttttttaatgttgccaaaaccaaaagtagctttgttttcctttgtattttgctactttgcagtatttgtgtgtggttttttttccttaatttgaaagggacagcactgtgtatgtttataaactaaatgaagataagatattattttgtataaacattcatctgagaacaatcaaagcagtagccacatggtgctggctcctttgcagcacaaacctggtcannnnnnnnnnnnnnnnnnaggaagccttgaaaaatcacgtggattaatattaccaccgctgtcatttnntggagtcttctgatcaaaaaaactcacatcgtatttcttcctttcctttctcttttctagaaatcgggtgtttgtaccagaatggaattttgcttcttggt

SEQ ID NO: 18370 - DNA, 746 bp, Macaca Fascicularis
  misc_feature (1)...(746): n = A,T,C or G
agaggatgacaaactggtgatcgaatgcatcatgaaaggcgtcacttccaccagagtttatgagagagcataagccaagaggcgttgacctggactgaagtttgcattgaactctacaacattctgttggatatattgttcaaaaagatgttgttgttttccatgatttagcaagcaactaatttgctcccaagctgattttatnnnnnnnnnnnnnnctagttaaataaactttttgtagatttagaaggtgatataatgatgtattcattgtgcttatgatatattcttagtcataattgagtgaaggaaatgggaaatttgcattattgttttgttctgatataaataataaaatctttcataataattcaaggtaaagggggatatctatgaatttccctaggtaggagataacaagtatgtaccattactaaatattaaatctttctttatcatagctatagttaagtaggtgtatctcagaaacctatggtagttttacatgtagtgaaattgtccacagccagctggcccaagtgctcacgttttatacctgctctgtcttagtgcattgcaagagaggagtatatacagtagttcccccttnnnnnnnnnnnnnnnttccaagacccccagtgggtgactgaaaccacagatagtaccaaatcctatatatactatgttttttttctatacatatatacctacaataaagtttaatttttaaattaggcaccataact

SEQ ID NO: 18371 - DNA, 943 bp, Macaca Fascicularis
  misc_feature (1)...(943): n = A,T,C or G
gtgnnggnngtatttattttttctnnnnnacacctattttagacannnnnaagggaaaaagccttgacaatagaacattgattgctgtgtcnnnnnnnnnnnnnnnnnnttctcttaaactcaggactccagcccattggtagacgtgtgtttctagagcctgctggctctcccagggctactcgctcaagttcaaggaccaacaagggcagtggaggtgctgcattgcctgcggtcacggccagcaaggtggagtggatgcctcagaatggacgagataatgtgaactagctggaattttttattcttgtgaatatgtacataggcagcactagcgacattgcagtctgcttctgcaccttatcttaaagcacttacagataggccttcttgtgatcttgctctatttcacagcacactcagcacccccttctctgcccattccccagcctctcttcctatcccatcccgacccatcccatcccactcttttcctacttttccttccctcaaagcttccattccacatccggaggagaagaaggaaatgaatttctctacagatgtcccattttaagactgctttaaaaaaaatccttctaatctgctatgcttgaatgccacgcggtacaaaggaaaaactatcatggaaatattatgcaaattcccagatttgaagacaaaaatactctaattctaaccagagcaagcttttttattttttatannnggggaatattttattcnnnggtaaaattctaaatatataattgttttttatcttttctacagcaaatttataattttaagattccttttcttgtttatcagcagttgttattacatccttgtggcacattttttttttttttaattttgtaaaggtgagaaaagcttttatgagctcatgtagcaatcagattatcctgtggattgataataa

SEQ ID NO: 18372 - DNA, 763 bp, Macaca Fascicularis
  misc_feature (1)...(763): n = A,T,C or G
ctgggtgggctgnnnnnnnngactggacccggcctggccagcttactggggagcagcgggcctccagggagcagctcctcctccagctcccggagccagtcggcagcagtcaccccgtcatccaccacctcttccacccgtgccaccccagccccttctgctccagcagctgcctcagcaactagcccgagccctgcgcccagttccgggaacggagccagcacagcagccagcccgacccagcccatccagctgagcgacctccagagcatcctggccacgatgaatgtaccggctgggccagcgggtggccagcaagtggacctggccagtgtgctgacgccagagatcatggctcccatcctcgccaacgcggacgtccaggagcgcctgcttccctacttgcnnnnnnnnnnnnnnnnnnnncagaccgcggaagagatccagaacaccctgacctcgccccagttccagcaggccctgggcatgttcagcgcagccttggcctcggggcagctgggccccctcatgtgccagttcggtctgcctgcggaggnnngtggaggccgccaacaagggcgatgtgnnnnnnnnnnnnnnnnnnnnnnnnnnnnnnnnnnnnnnnnnnnnnnnnnnnncgacacaaaggacaagaaggacgaagaggaggacatgagcctggactgagccacgcgccatcctccgagggactgacggcgcttgcagtgcgttgcacagcctcacctcccacccactgataata

SEQ ID NO: 18373 - DNA, 798 bp, Macaca Fascicularis
  misc_feature (1)...(798): n = A,T,C or G
ccaggccagcttcannnnnaaccctgtgagggnnnnnnacgggggccagtacagatgctacggtgcacacaatgtctcctccaagtggtcggcnnnnagcgaccccctggacatcctgatcgcaggacagatccctgacagaccctccctctcagtgcagctgggccccacggtggcctcaggagagaaggtgaccctgttgtgtcagtcatggggtccgatgttcactttccttctggccaaggagggggcagcccatcccccgctgcgtctaagatccacttacagagctcagcagtaccaggctgaattccccatgagtcctgtgacctcggcccacgcggggacctacaggtgctacggctcacgcagctccgacccctacctgctgtctcactccagtgannnnnnnnnnnnnnnnnnnnnnnnnnnnnnnnnnnnnnnnnntccagcacaaaataagtcagattccaagactgccccacacctccaggattacacagtggagaatctcatccgnnnnnnnnnnnnnngcttggtcctggtgttccttgggattctgttatttgaggctcagcagagccagagaagccccacaaggtgcagccaggaggtgaacagcagagaagacaatgcacccttcagagtggtggagccctgggaacagatctgatgatcccaggaggttctgcaagactggggcagcagttggggaagtgtctgctgagaatannnnnnnnnnnnnnnnnnnnnnnnnnnnnnnnnnnnnnnnnngtgtctgtagaagatgctcctcca

SEQ ID NO: 18374 - DNA, 694 bp, Macaca Fascicularis
  misc_feature (1)...(694): n = A,T,C or G
caggaagatggcaaggcttggcacctggcggagacagagcactgtggtgccacgccctctaacaggggcccaaggagccaatttatcacctatgactgatggcgtctgagaaaaggcagaagattggaggcacaagggcaccttctcccttgaggccaccctgcccatgtggtattcacagggggcctgagtagggcccggggaggcagagccctaagggacgaaagctcagacacccccgagagcaggtgggcactggctgggtacgatgccctccacaggactctccctactgcctgagcaaacctgaggcctcctggcagacccgcccacccactggggctgctcagcctcgggcacggacagggcacatgataccaactgctgcccactatggcacgccgcaccggagcacggcaccgagggagccgccacatggtcacctccaaggacgtcaccgggccctctaaaggattcgtggtgcttatccccaagcttcagaggccctttggggttcnnnnnnnnnnnnnnnnnnaggtagaccctgcatgaggatgaaattatagggaggacgctccttccctcccctcctagaggagaggaaagggagtcattaacaactaggggttgggtaggattcctaggtgtggggaagagttttggaaggggaggaaaatggcgagtgtatttatat

SEQ ID NO: 18375 - DNA, 746 bp, Macaca Fascicularis
  misc_feature (1)...(746): n = A,T,C or G
cagtcagtgaanancgtannnnnnnnnnnnnnnnnnggcgacagagcgagannnnnnnncaaaaaaaaaaaaaaaaatgtttcttaagtgtgttgtggggaggaggttgtgagagcctcagttcaaggtctgggcagagttctctttttctcctnnnnnnnnnnnnnnncaaggagttgatcaagtccatcaatgaaaagtttgctgggtctactggctgggaaggcacagaatcgctgaagaaaccagaagacaaaaagcagctgggagattnnnnnnnnnnnnnnnnnnnnnnngcagagtgcnnnnnnnnnnnnnnnnnnnnnnnnnnnntggacagtgatgaggaggtggattatagcaaaatggaccagggtaacaagaaggggcccttaggccgttgggactttgannnnnnnnnnnnnnnnnnnnnnnntatgaacaacaaagaggctttgcccaaggctgcattccagtatggtatcaaaatgtctgaagggcggaaaaccaggcgcttcaaggaaaccaatgacaannnnnnnnnnnnnnnnnnnnggaagaagattagtgcaatcattgagaagaggaagaagatggaagctgatggggttgaagtcaaaagaccaaaatactaatcaccagttacaaccggagaccctccacaaggatatgcttcccactgttttctttatacaatttccaaaggttgcaagatgttttttggtggatgaatataaaattttatt

SEQ ID NO: 18376 - DNA, 706 bp, Macaca Fascicularis
  misc_feature (1)...(706): n = A,T,C or G
cacaggacgcatatccctgttagcattccccgggacctttagccaagaggggctgcagggaccatggccannnnnnnnnnnnnnnnnnnnnnnnnnnnnnnnnnnnnnnnnnnaaagagaggctgttnnnnnnnnnnnnnnnnnncttggtctggattcccagaaacagagcttagatgggaccacagtgggcaattttgacctgtcctgcccttcttagcttgaagggaaaccccagagactcttctgtcagggaaaactagggactctcttctagagccatatagttcctnnnnnnnnnnnnnnnnnnnnnnnnnnnnnnnnnnnnnnnnnnnnnnnnnnnccatttcgttttttaaaaaacaagggaaataaatgtaattgccatttttcaaagattaagtaggaggagaggggtttcttgctctccagagcccaaaggnnnnnnnnnnnnnnnnnnntaggccaaggaaggagcggaagtagggcaactcggtcctgcgattattaatcccactccccacttattctagggcacacatacactattttacttttttaaaatcataaaacggcagaacagatttggttagtttagaagaaaagaaagctctataaatataaatctatattcctgtatttttatttaataatttataaataccaagttcatttgacttttatttttgtgtaatatgtaatggtc

SEQ ID NO: 18377 - DNA, 752 bp, Macaca Fascicularis
  misc_feature (1)...(752): n = A,T,C or G
gcatgggccatatgaataacatgatgtgctcttaaaatagccataaaggagagggacttatcatttccatttannnnnctnnnntgactatnnnnntgnatctcccttctcttcaagttgggtcatatatttgtggattctaacgnnnnnnnnnnnnnnnttagtaacaggcaaaaggaaccagagttggtttcccctctgtttgttcttcatataagccttctggttttatgggtcagagttctgactgccannnnnnnnnnnnnagcaaaaaaatgacnngnngtgtaagnnnacagtatttgtagatgatgggggttgggcggaaagtgtctactaggaagatgcctgcccctgcaggagggtggggtgagattctgtgctgatgtaggagtccgagagggccctcaactcaaaggagcttatttatccaaaatgttctggatgcgtcatctctaaccaaggaccccctatttatcatgcctttgttcttttttccctcagatgtatatttctttaaaaatcattttcctaataacaaaacttatttctaaaacagcttaaaaatacaaagaaaaagtcccaaacacacattnnnnnnnnnnnnnnnnnnnnnnnnnnnnnnnnnnnnnnnnncacttttgggtgtattttcttttagtttgttttttgttcagtgcatatttatgataataacaaagatggacttcaattgtacccactgctctgttgttggttttaattagcagcaa

SEQ ID NO: 18378 - DNA, 1791 bp, Macaca Fascicularis
  misc_feature (1)...(1791): n = A,T,C or G
taaccaaatcggcagcagccannncgaccgcccacacattcctggccaatcagctcagctgtttatttaccaaatgtcttcacaacaactacagcagcagccttcggctaacaaaaaagcaggaaaaatccacaacacccccttcgccaaccaactaaatccaacgcaacatctggcaaaaccttttcagcaaattcttcctggccgtcagtccggcagcctcacctcaccatttctannnnnnnnnnnnnnnaaactaatctccacgaaggagaagcttctctcgcagccgaagcaggtccctttctagagataggagaagagagagatctctgtctcgggagagaaatcacaagccgtcccgatccttctctaggtctcgtagccgatctaggtcaaatgaaaggaaatagaagacagtttgcaagagaagtggtgtacaggaaattacttcatttgacgggagtatgtacaggaaattcaagttttgtttgagacttcataagcttggtgcatttttaagatgttttagctgttcaaaatctgtttgtctcttgaaacagtgacacaaaggtgtgattctctatggtttgaaatggatcatatgaggcatgtaataccaagaattgttactttacaatgttcccttaagcaaaattgaatttgctttgaactttagttatgcatagactgataataaacctctaaacctgcccagcagaagtctgattttttttttttaaatacagaaacaactggcaaaaaaactaagatttactttttttccatagctgggatataggatgcagctatagttgaataagcagtctttaaaaactgctgtgaaacacaagccatcaggtaaaaagaaacgctgaactattaaattagaggtttttgaaaaatccaactttcatcctgggcagaggttgcctagttggtatagaatctgttattcaagaaagtttacctttgctttaggtcgtaagttccttatttgattgctgtatatggatacatggctgttcgtgacattctttatgtgcaaatttgagatttcaaaaaatgtcctgcagtttaagggtacattgtagagccgaactttgagttactgtgcgagatttttttttcatgctgtcatttgtaatatgttttgtgagaatccttgggattaaagttttggttacaaattattgtttaactnnnnnnnnnnnnnnnnnnnnnnaactcaaatctgtgagcttggtaccaagtccaggtataacattcctattggaagccatacccatatattaaaataaagtaatctagaattaataaaatattagcataatggtgtaatagtcagttgaacccactgttaaccattgttcttatcccatgggaagcagttggttacacgattcttattttataagaaacacagctgagaggcactatggnnnnnnnnnnnnnagcgaagggaatatagatgtcacctaagtgatagttaacacttttttttttttttttttaaggagtagaagccagttnnnnnnnnnnnttatttagtgaccaacattttaaagtacagcagcaacgtggtagttaaacacaaagtaaattgcccattaacaatcgttattatctttagcatgaaaactttccacaggtctaaaaattgcttccattttttaatttgaggtgttgcatgggaattctaagctgatccatcatgatgtaaagttcacaatatggttcaaatgtaacagtgcagaattgaatatggaggcatgcataaccttcctcgta

SEQ ID NO: 18379 - DNA, 754 bp, Macaca Fascicularis
tgcatccaacctccgggcagaaaactatgacattcctcctgcagaccggcacaagagcaagctgatgcggggaagatcatcccagccatgccacgaccacagcagccgtggttggccttgtgtgtctggagctgtacaaggttgtgcaggggcaccgacagcttgactcctacaagaatggtttcctcaacttggccctgcctttcttcggtttctctgaaccccttgccgcaccacgtcaccagtattataaccaagagtggacattgtgggatcgctttgaggtacaagggctgcagcctaatggtgacgagatgaccctcaaacagttcctcgactactttaagacagagcacaaattagagatcaccatgctgtcccagggcgtgtccatgctctattccttcttcatgccagctgccaagctcaaggaacggttggatcagccgatgacagagattgtgagccgtgtgtcgaagcgaaaactgggccgccacgtgcgggcgctggtgcttgagctgtgctgtaacgacgagagcggcgaggatgtcgaggttccctatgtccgatacaccatccgctgacccccgtctgctcctctaggccggcccctgtccatccctctccacgccccttccagcccagggttcccatttggcttctggcagtggcccagctagccaagtctggtgttccctcatcatccccctacctgaactcctcttgccactgccttctaccttgttgaaacctg

SEQ ID NO: 18380 - DNA, 386 bp, Macaca Fascicularis
cgggacagcttccctctaagcaaagccaggtttgttttagattaactctggcctgaaaaaaaaaaaagtgccttttgctgctttaaagaattggggtatatggtatgaagcagccatgtacttgtattttcctggtctttcctgggcactgatctctcttggcaggtgttttcttaaagtgaacacagcagaagcactccaccccaccatatccagacctccatgccctccttgcatgcctgttgtgtgcagggtggagggtgtcccacatgccaggcagctggcgagccagagcagctgggagccctgtccactgagttacactaagcactttatttttatttattttattattattttcttttttctgagatggagtctctgtg

SEQ ID NO: 18381 - DNA, 498 bp, Macaca Fascicularis
  misc_feature (1)...(498): n = A,T,C or G
cccccacctcctccccccccagaagattacgaagaggaggaagctgctgtggttgagtatagtgatccttatgctgaagaggacccgccgtgggctccacgttcttacttggaaaaggttgtggcaatttatgactatacaaaagacaaggaagatgagctgtcctttcaggaaggagccattatttatgtcatcaagaagaatgacgatggttggtatgagggagttatgaatggagtgactgggctttttcctgggaattatgttgagtctatcatgcattattctgagtaaagctcggcagggctgtgcttgcctcacagaaatagtcaggtcttcccagattatctgaaggccctggggattccactccagtaaagtagaatgaaggatacaaatgataaaaattacactttcttttggtttatcccccnnntattaaaaacaaaaaaagcaannngagtctgaacaaacggatctttctgccatcattgtaca

SEQ ID NO: 18382 - DNA, 802 bp, Macaca Fascicularis
  misc_feature (1)...(802): n = A,T,C or G
tgcaaatttgatgaatacttcagtcaaagctgtgcccctggggctgacccgagatctaatctctgtgctctgtgtatggcaatgagcagggtgaggataagtgcgtgcccaacaacaatgagagatactacggctacactggggctttccggtgcctggctgagaatgctggagacgttgcgtttgtgaaagatgtcactgtcttgcagaacactgatggaaagaacactgacgcatgggctaaggatttgaagnngaacgactttgagctgctgtgcctcgatggcacgcggaagcctgtgactgaggctaggagctgccatctcgccatggccccgaatcatgccgtggtgtctcggacagataaggtggaacgcctgaaacaggtgctgttcgaccaacaggctaaatttgggaaaaatggatctgactgcccgggcacattttgcttattccagtctaaaaccaaaaaccttctgttcaatgacaacactgagtgtctggccagactccatggcaaaacaacatatgaaaaatatttgggaccacagtatgtcacagccattactaatctgaaaaagtgctcaagctcccccctcctggaagcctgtgcattcctccagaagtaaaacccaagaagatggcccagcctccccaaggaagcctcagccattcactgcctccagcccttctccccgggtgtgctggggccttggcctccctggctgaaggtggggattgcccatccatctgctcacaattccctgctgtcgtcttagcaagaaataaaatgagaaatatg

SEQ ID NO: 18383 - DNA, 664 bp, Macaca Fascicularis
  misc_feature (1)...(664): n = A,T,C or G
agcagcacatgctagtactgtgggaacacagaagaatggaagacagagcctctgcccgctgtgctcctatctagaagtggctgcatcacaaggttggagcatgagctgcagtctctaccccataccccgtgactcgccgggccctattccctggagattctgagattgannnnnnnnnnnnnnnntttcggactctggggaccccagatgaggtggtgtggccaggagttacttctatgcctgattacaagccaagtttccccaagtgggcccggcaagattttagtaaagttgtacctcccctggatgaannnnnnnnnnnnnnnnnnnnnnnnnnnnnnnnnnnnnnnnntaacaagcggatttcggccaaggcagccctggctcacccttnnnnnnnngatgtgaccaagccagtaccccatcttcgactctgatagccttctcgaagcccccagccctaatctcaccctctgctccagtgtgggcttgacctggcttggccttgggctatttggactcaggtgggccctctgatcttgccttaaacactcaccttctagtcttggccagccaactctgggaatacaggggtgaaagggaggaaccagtgaaaatgaaaggaagtttcagtattagatgcacttaagttagcctnnnncca

SEQ ID NO: 18384 - DNA, 743 bp, Macaca Fascicularis
  misc_feature (1)...(743): n = A,T,C or G
gggtaggcatggaaaattccacaaggagttgtannnnnnannnggggcgacaagannnnnnnnnnnnnnnnnnnnnnnnnnccagggaggctctgcagccctgctggagggccctaactagagttccagattctgttcctcagtagtccttttagacgcttgctatacttggtctgcttcaaggaggtcgaccttctaatgtatgaagaatgggatgcatttgagctcaagaccaaagacagatgtcagcgggactgctctggccctggtgtgcacggctgtggcagctggtgatgccagtgtcctgtaactcaagctatccttgtgattaaacacttttactatctccttcgggaataagcacttataggactaagctctaaggtgtttgttcttttaccatcgagctatttcccgtaaaaaccacattgagtccaacacccttcacccacctcccacgcgcaaggggatgtggataacttggcccaaagtaactggtggtagcaatcttacaaacaagaccacttatactgtatgaggcagaagataacagcagcatctcaaccaacctctgccttaaaggaaatctttattaatcatgtgtggttcacagataattctttttttaaaaaacccaacctcctagagaagcacaactgtcaagcgtggcttcagctttgcatcacgagtcttgtattccaagaaaatcaaagtggtacaatttgtttgtttacactatgata

SEQ ID NO: 18385 - DNA, 902 bp, Macaca Fascicularis
  misc_feature (1)...(902): n = A,T,C or G
tagctagccgcaaannnnnnagccatgnnnnntgattttggctggagagcactgctggagagattcctgttgnnnnnnnnnnnannnnnnnnnnnnnnnnnnnnnnnnnnnnnnnnnnnnnnnnnnnnnnnnggaaggctctggagaggtttctgcaggattactttnnnnnnnnnctgaagagatacctgaagtctgaacctatcccagagagcaatgatgggcctgtaaaggtagtggtagcagagaattttgatgaaatagtgaataatgaaaataaagatgtactgattgaattttatgctccttggtgtggtcactgtaagaatctggagcccaagtataaagaacttggagagaagctcnnnnnnnnnnnnnnnnnnnnnnnnnnnnngatggatgccacagccaatgatgtgccttctccatatgaagttagaggttttcctaccatatacttctctccagccaacaagaagctaaatccaaagaaatatgaaggtggccgtgaattaagtgattttattagctatctacaacgagaagctacaaacccccctgtaattcaagaagaaaaacccaagaagaagaagaaggcacaggaggatctctaaagcagtannnnnnnnnnnnnnngtnnnnnnnnnnnnnnnnnnnnnnngggaaaaccattagggaggactgggacccatatgggaattattacctctcagggctgagaggacagaatggatataatctgaatcctgttaaattttctctaaactgtttcttagctgcanntnttatggaaataccaggaccagtttatgtttgtggttttgggaaaaattatttgtgttggggggaatgttttgggggtggggttgagttgggggtattttctaattttttttgtacat

SEQ ID NO: 18386 - DNA, 737 bp, Macaca Fascicularis
  misc_feature (1)...(737): n = A,T,C or G
gatgagcaatcnnnnngttatgaagagcattgagnannnntaccggttgcnnnntcctgtggactgccctgcgnnnctgtatnnnnnnnnnnnnnnnnnnnnngcatatgaccgtgccnnnnnnnnnnnnnnnnnnnnnnnnnnnnnnnnnnnnnnnnnagtgcttgccaacccccactccatgcggaccattgccaactttgaccccagggtgactcttctactgcccagcctgagcggatcagatgggatcccgtatcgaagcgtctctgagtggctcgagtccatacnnnnnnnnnnnnnnntcatgcacttccactcggctgggctggacaccatggagtgtgtgctggagctgaccggtgaggacatgacgcagatgggaatcacactgcccgggcaccagaagcgcattctttgcagtattcagggattcaaggaatgagccctcctctcaccccacacccaatcagggagcaaggagcgaggacggggccaaggtcggtnnnnnnnnnnnnnngcgccccttcccacaacctnnnnnnnnnnnnnctcggtgctgctcctgcccactgtcaggagaaccctgctctgcaccccagaaaacctatttgttttaaaagggaggtgggggtagaagtaaaaggatgatcatgggagggaggtgaggggttaatatatatacatacatacacatatatttttgtaaataaacagggaannngattttctgcctc

SEQ ID NO: 18387 - DNA, 700 bp, Macaca Fascicularis
agaatgattacggtgttattgaagactgacaagagtctttttatttgggagccagatgagggaagtgttacttgtgctataattgcttttgtgctaaatatgaattgtctcaaaattagctatgtaaaatagccagggttccactggctcctgctgaggtcccctttccttctgggctgtgaattcctgtacatatttctctactttttgtatcaggcttcaattccattatgttttaatgttgtctctgaagatgacttgtgattttttttttttttttaagcaaccatgcagagccatttgacagagtatgctctgcttcgttggtttcaccagcttctgccctaacatgcacagggatttaacaacaaaaaatatataactaaaacttcccttgtagtctcttatataagtagagtcattggtactctgccctcctgtcagtagtggcaggatctattggcatatgtgggagcttcttagagggatgaggttctttgaacacagtgaaaatttaaattagtaacttttttgcaagcagttcattgacttactgctaagaagaagtaagaaggaaaagccttttggcaatcttggttatttctttaagatttctggcagtgtgggatggatgaatgaagtggaatgtgaactttggtcaagttaaatgggacagccttccatgttcatctgtctacct

SEQ ID NO: 18388 - DNA, 715 bp, Macaca Fascicularis
  misc_feature (1)...(715): n = A,T,C or G
atagtaagcannnntagactagttgaacatctcactttgccccaattacaaaaatagtagaacaagcaacataaaacataaggaaaacctcacttgaaggcccaggtcagcatctaagcccgctgagacttagatagtcaagtctacctcttcagtaggttcgtgtggatgnnnnnnnggggggcaggtgccctctgctccctgtgctacctctctcttgcctagggccttttatggattgacagtagccctctccataggagctcacagtctagattagaagtgttttaatttatacacacccatagtgcacacttgtatattgaaaagatagggaagagagaaacatttatggaaacagtcgttagcaccttcaatacttcatgatttttgttgagtttacttcatgaggaggtcagctcatttgctcccatctgaaccactttgcctctgaaacttatatccagaaagaaggacgcttgtatgctagtctaactatggtcagttgaggaatatgacactttttatatgcacatgtaacccaaatgtccaatataaattggcttatttttaaaaataattttaaaagttgggaaacgcttnnnnnnnnnnnnnnnntaaatattaagtattcttcatcagcatttaataaatgtataggcagatataggtaatttctgtgtnnnnnnnnnnnnnnnnaatcatgaatattcaa

SEQ ID NO: 18389 - DNA, 671 bp, Macaca Fascicularis
atgaagaaattttgaaagcattggatgctgctttttataaaacatttaagacagttgaaccaactggaaaacgtttcttactagctgttgatgtcagtgcttctatgaaccaaagagttttgggtagtatactcaacgctagtacagttgctgcagcaatgtgcatggttgtcacaagaacagaaaaagattcttacgtagttgctttttccgatgaaatggtaccatgtccggtgactacagatatgaccttacaacaggttttaatggctatgagtcagatcccagcaggtggaactgattgctctcttccaatgatctgggctcagaagacaaacacacctgctgatgtcttcattgtattcactgataatgagacctttgctggaggtgtccatcctgctgttgctctgagggagtatcgaaagaaaatggatattccagctaaactgattgtttgtggaatgacatcaaatggttttaccattgcagacccagatgatagagctgtaaggtatggaaaagcagaagaaacggaaatcaatatccaagacaacatgaaatcccagaggcttcccctgctccctaaattcttggctgggtacaggtaggaatcttggaaaaccctgatgggtccacaagaaaacacacacatacctgagccattgtga

SEQ ID NO: 18390 - DNA, 475 bp, Macaca Fascicularis
  misc_feature (1)...(475): n = A,T,C or G
gcgcgtgagtttgtgcttctgcgcgggtgtccgggttcttctgccatcatgccgatgttcatcgtaaacaccaacgtgccccgcgcctccgtgccggacgggttcctctccgagctcacccagcagctggcgcaggccaccggcaagcccccccagtacatcgcggtgcacgtggtcccggaccagctcatggccttcggaggctccagcgagccttgcgcgctnnnnnnnnnnnnnnnnnnnnnnnnnntcggcggnnnnnnnnnnnnnnnnnnnnnnnnnnnnnnnnnnnnnnnnnnnnnnnnnnnnnnnnnnnnnnnnnnnnncagggtctacatcaactattacgacatgaacgcggccaacgtgggctggaacaactccaccttcgcctaagagccgccgggccccacgcggtccgcgctggctggacccgggaacccgccgcacgcagtgttctaggctcgcccacccc

SEQ ID NO: 18391 - DNA, 740 bp, Macaca Fascicularis
  misc_feature (1)...(740): n = A,T,C or G
agtgaggccctgcagagagtatcccaggccaagattcccactcagcctgctccctctgcatgtgggtagagggtgtactggggcttnnnnnnnnnnnnnccatctggcacagcctctgagggtcctgnnnnnnnnnnnnnnnnnnnnnnacagccagtggggcacactgactgtcctccccaggggaactgcagtgccctcctccccactgctccctgcagcccctgggatattttgctcactctccctccccacttctgcttccctgatatgtgctctgagcttccctgaaccaggatctgccgattcctgctgtgccccacggtgggctccttccctgcgtgacccactgttgcagaatgaagtcacctcgcccccctcttcctttaatcttcagacctcactggcctgtcctgctcagcttgggccagtgacaatctgcaaggctgaacaacagcccctggggttgaggcccctgtggctcctggtcaggctgcccattgtggggaggggcagtgctagagcagggctggtcataccctctggagttcagaggaaggaggaccagtgcttttttgtttcttttgttatttttggatgggtggttgggaaggtctttttaacatggggcaggccacacccccattctgtgcctcagtttccccatctgtaaactgtagatatgactactgacctacctcgcagggggctgtggggaggcataagctgatgtttgtaaa

SEQ ID NO: 18392 - DNA, 758 bp, Macaca Fascicularis
  misc_feature (1)...(758): n = A,T,C or G
cggcagtcatggttttgctttagattccaaagtccgnnncagtcccttcctaggtctgaagaaattctgcagtggtgagcagttccccacttgccaaagatcccttttaaccaacactagcccttnnnnnnnnnnnnnnnnnnnnnncttcatcggcctggggagtcttaccaaaatgtttaaagtgacctcagggggcccatggattagcgccctcatcccaaggcctgtcccttgacttaacactccacacccaccccagccagcttcatggctcactttttctggaaaataatgatctgtacagacaggaaagaatgaaactcctnnnnnnnnnnnnnnnnnnnnnnnnnaatggtgggggagaggaagggcagcagcttattggtggtcttttcaccatttagcagaaacagtgagagctgtgtggtgcagannnnnnnnnnnnnnnnnnnnnnnnnnnnnnnnnccttttgcagacctnnnnnnnnnnnnnnatgaggttaaagcgtcagggacattgcctgagcccaaatgtgtagtgtggtctgggcaggcagacctttagggtttgctgcttagtcctgaggaagtggccactgttgtggcaggtgtagcatatggggcgagtgttgggggtaaaagcccaccctacagaaactggnnnngcccgaagnnnnnnnnnnnnnnaccacgggtatgtaagctgggacatggaagccaaactggaatcaaacaccgactgtaaattgtatctt

SEQ ID NO: 18393 - DNA, 713 bp, Macaca Fascicularis
  misc_feature (1)...(713): n = A,T,C or G
caggctcgtgcccgtgttcatgagtacctgggttggcnnnnnnnnngcatcnnnnnnnnnnnnnnnnnacccatgtgggtccannngttggggccactcattggggtccaggtgcccgaagagaaggtggaacgcaacaggactgccatagaccaggccctgcaatggctggagaacaagttcctgggggacaggctcttccttgctnnnnnnnnnnnnnnnnnnnntgatctcatggcgctggaggagctgatgcagccggtggctgtcggctacgaactattcaagggacggccacgnnnnnnnnnnnnnnnnnnnnnnnnnnnnnnnnnnnnnnnnnntgagctgtgccaggaggcccacagcctcatcttgagcatcctggaacaggcggcccagaaaaccctcccaacacccccaccagaggtctatccgactatgctacttcgnnnnnnnnngatcccctgaagggtctgggatggggcccaggagattcgccatgaggattcattctgttacttacttgcccctgtttatctttccatcttgccccagtcccnnnnnnnnnnnnnnnnnnnnnnnnnnnnnnaggcaagactgtgtccttggcagnnnnnnnnnnnnnnnnnnnnnnnnnnnnnnnnnagtaagagactaaatctgcaatacataaaaaactcctacannnnnnnnnnnnaattggtaaatgtcat

SEQ ID NO: 18394 - DNA, 710 bp, Macaca Fascicularis
  misc_feature (1)...(710): n = A,T,C or G
aaagctgtgtttgtacagaagaaagtaaggtgcttggaggttacctggcttatttagtatgtttataatctagttaaagaaaggaaaggaaacaaaaaacgaataaaaataactgaatttggaggctggagaaataagattactgctttaatcagaaagcctcattgnnnnnnnnnnnnnnnnnnnnnnnnnnnnnnnnnnnnnnnnnnnnnnnnnnnnnnnnnnnnaggttattgcaatagttaaagtagaatgtttattaaatgcttcatttgtatgtcaaagctttgactctgtaagaaaattgcttttttccaaaacaaaaagatgtctcaggtttgttttgtgaattttctaaaagctttcatgtcccagaacttagcctttacctgtgaagtgttactacagccttaatatttttctagtagatctatattagatcaaatagttgcatagcagtatgtgttaatttgtgtgtttttagctgcgacacaactgtgtgattaaaaggtatactttagtagacatttataactcaaggataccttcttatttaatcttttcttatttttgtactttatcatgaatgcttttagtatgtgcataatagctatgatgcatagttgtaaccaaaatatattctggggaaacaacatttatatatagcttttactgtttgatataccaaattaaacaaaaaattgtatctc

SEQ ID NO: 18395 - DNA, 758 bp, Macaca Fascicularis
  misc_feature (1)...(758): n = A,T,C or G
acaggaccccaacacaggnnnctcagtgaacggngcagctaatggcanacaagccaggannnntgggcagcatgacggcacgtannncgggcggctgggaatcgcaaaccctgccacggcctttcagttggaagtgactcctcagaacattacgctgaaccccggctcttgtgggcctgtgttttcctggagggaccaggctgtgctgcggcaggatggggtggtggtgaccatcaacaagaagaggaacctggtggtgtctgtggacgacggtggcacctttgaggttgttctgcaccgagtgtggaaggggagttccatccaccaggacttcctgggcttctatgtgctggacagtcatcggatgtcagcccggacgcatgggctgctggggcaatttttccaccccattggttttgaagtgtctgacatccgcccaggctccgaccccacaaagctagatgccacgatggtggtgaagaaccgccggctcacggtcaccaggggtttgcaaaaggactacagcaaggacccgcggcatggggccgaggtgtcctgctggttcattcacaacaatggggctggactcatcgatggtgcctacactgactatatcatctccgacatcttctgagccccctggccagcatgcctgtcctcccctgtggccaaggcagaggaggagaatgacatcctgacctgctgctgaggctgcacctccttaactaagctnnnnnnnnnnnnnaaggacctcatga

SEQ ID NO: 18396 - DNA, 741 bp, Macaca Fascicularis
  misc_feature (1)...(741): n = A,T,C or G
tgaaaaagtacnncctggccctttggaatgaagggtacatcatgggctttatcagtaaggagcgggagcgggccatcttgagcaccaagcctccaggcacctttctgctaagattcagtgaaagcagcaaannnnnnnnnnnnnnnnnnnnnnnngtggagaaggacatcagtggtaagacccagatccagtccgtggaaccatacaccaagcagcagttgaacaacatnnnnnnnnnnnnnnnnnnnnnnnnnnnnnnnnnnnnggatgctaccaatattctnnnnnnnnnnnnnnnnnnnnnnnnnnnnnnnnnnnnnnnnnnnnnnnnnnnnnnnnnnnnnnnnnnnnnnnnnnnnnnnnnnnnnnnnnnnnnngacccaggtagcgccgccccatacctgaagaccaagtttatctgtgtgacaccaacgacctgcagcaataccattgacctgccgatgtccccccgcactttagattcatnnnnnnnnnnnnnnnnnnatggtgaaggtgctgaaccctcagcaggagggcagtttgagtccctcacctttgacatggagttgacctcggagtgtgctacctcccccatgtgaggagctgagaacggaagctgcaaaagatacgactgaggcgcctacctgtgttccgccacccctcacacagccaaaccccagatcatctgaaactactaactttgtggttccagattttttttaatctcctacttctgctatc

SEQ ID NO: 18397 - DNA, 736 bp, Macaca Fascicularis
  misc_feature (1)...(736): n = A,T,C or G
tagtttatttggttggtctggactcacttgtggcctttgattaaattnnnaaggggcctgaagaagacatttctactgcagagggttagaggcacttgagcaaggcccccacaccccaactctgggagttgtggtnnnnnnnnnnnnnnnnnnnnnnnnggaccagacaagataacaggagctcacaaggaagcagaagctgtgacaagtttagtagtctcaaaatgggttatgtcccttcccccttcacatcagaatcttgtgaaatgggaaaacaacagaaggaggggatcaaagaaagctgatctcacatgcttcccaggcagggcagaggtgggagtcaaacttgggtgacaggtgggtggagagccctgtttgaggttgtggttgatccctctctggtattagcttttcccctgggagcaggaagccctaggaagaggggactgtagggtccccaggggatctttcctccctcccctgcatgaggcagaggcaagctgcctgccaaccccctccctcaaggaatggcnnnnnnnnnnnnnnnnnnncacacataccctctttttttctagtcaaactctgtttattccttggcttgcctccctccttcctcccctctcaacctttacttctgatttctatttcatggaatttgggattgaagttaaactnnnnnnnnnnnnnnnnnnnnnnnnnnnnaggaaaaaaatacaaagaaattaacaaaaaaaaa

SEQ ID NO: 18398 - DNA, 721 bp, Macaca Fascicularis
  misc_feature (1)...(721): n = A,T,C or G
cgccaagaccggcgagatccgcaaggtcaagcgcaagctcacctnnnnnnncgatagcgcgctgcttcctgcagcccgccgggcctgagcacacccgaggctcccacctgtggagctgctgggggacctcacgtcccagccaggatccccctggaagaaaaagggcgtccccacaccctacccgatatgacttatgcatccctaccttttgggggtagggggagtgctgccctgccataatccccaagcccagcccgggcctgtctgggattccccacttgtatctggggtccctctgggatttctttgtcatgtacagactccccaggatcctcaggtttggggtgacaggacctatggaccactatactaggggaggcagggtnnnnnnnnnnnnnnnnnnccaagagcttctctgggattttcttgtgatacccgattccccagtgaggcctgggacctttttaagatccccgtgnnnnnnnnnnnnnnnnnnnnnnnnnnnnnnnggggccccgctggcaaccctgaacccggtccagggggccctcttgtcggatatgagatctcctccttatgtctggggccctctgggagctgttgtcatctcagatctctttgcccatctatggctgtgttgccacatctgtctcctcatcttnnnnnnnnnnnaattctctggaaccactctgctgtccctttttatggtctggagtcccca

SEQ ID NO: 18399 - DNA, 784 bp, Macaca Fascicularis
  misc_feature (1)...(784): n = A,T,C or G
gaaactgctgcctcatatccggggggaatgtgggctttgtgttcaccaaggaggatctcactgagatcagggacatgttgctggccaataaggtgccagctgctgcccgtgctggtgccattgctnccatgtgaagtcactgtgccagcccagaacactggactcgggcccgagaagacctcctttttccaggctttaggtatcaccactaaaatctccaggggcaccattgaaatcctgngnnnnnnnnagctgatcaagactggagacaaagtgggagccagcgaagccacgctgctgaacatgctcaacatctcccccttctcctttgggctggtcatccagcaggtgtttgacaatggcagcatctacaatcctgaagtgcttgacatcacagaggaaactctgcattctcgcttcctggagggtgtccgcaatgttgccagtgtctgtctgcagatcggctacccaactgttgcatcagtaccccattctatcatcaacgggtacaaacgagtcctggccttgtctgtggagacggattacaccttcccacttgctgaaaaggtcaaggccttcttggctgatccatctgcctttgtggctgctgcccctgtggctgctgccaccacagctgctcctgctgctgctgctgcagccccagctaaggttgaagccaaggaagagtcggaggagtcggacgaggatatgggatttggtctctttgactaatcaccaaaaagcaaccaacttagccagctttattgcaaaacaaggaaataaa

SEQ ID NO: 18400 - DNA, 785 bp, Macaca Fascicularis
  misc_feature (1)...(785): n = A,T,C or G
gacacatgacaccaaggaccagagnnnnncacaggcaccagggcttcgccagcgggccagcaacaaagcgcaagactctgcccccgtggagactcccagagggaagccccagctcaacacccgctcccaggctccgcttctccgatggatccttacgttcannnnnnnnnnnnnnnnagttgccgtaggnnnnnatgccatgtgnnnnnnnnnnnnnnnnctcccagggccatgaactttgtccagtggaaggctttctttctagagagggaaatctcttagctggcttccttatcgtgggcactggaggctttcagggcctccatccctctcaccgtgtccctctctggaaagcaggaaggagcctatggcatcttccccaacgaaaagcacatccagccaatggcctaaacttcagagtgggccacaggatccagccctgcccttcagcatcctcagttcctgcagcagagcctagaagacaccctagatgtggcagctgtctcaaacctccaaaagtcctgagtttgaagtatccttgttgacacggccatgaccactttccccgtgggccatggcaatttttacataaaactgaaaagatgttgtgtcttgtgtttttgtcttatttttgttggagccactctgttcctggctcagcctcaaatgcagtatttttgttgtgttctattgtttttatagcagggttggggtggtttttgagccatgcgtgggtggggagggaggtgtttaacggcactgtggccttggtctaactttgcggc

SEQ ID NO: 18401 - DNA, 708 bp, Macaca Fascicularis
  misc_feature (1)...(708): n = A,T,C or G
gataatcaggaaaaatgaggaatccaaaagacaaaaatcaaagaacagatggggtctgtgactggatcttctatcattccaattctaaatccgacttgaatattcctggacttacaaaatgccaagggggtgactggaagttgtggatatcagggtataaattatatccgtgagttgtgggagggaagaccagaattnnnnnnnnnnntgtattgatgcaatataagcataaaagatcaccttgtattctctttaccttctaaaannnnnnnnnnnnnnnnnnnnnnaagaggaagaaattcaggtacagaaannnnnnnnnnnnnnnnnnnnnnnnnnnnnnnngtgagtcttggttctaaaggtaccaaacaaggaagccaaagttttcaaactgctgcatactttgacaaggaaaatctatatttgtcttccgatnnacctttatgacctaagtcaggtaatacacctggtttacttctttagcatttttatgcagacagtctgttatgcactgtggtttcagatgtgcaataatttgtacaatggtttattcccaagtatgccttaagcagaacaaatgtgtttttctatatagttccttgccttaataaatatgtaatataaatttaagcaaacgtctattttgtatatttgtaaactacaaagtaaaatgaacattttgtggagtttgtattttgcatactc

SEQ ID NO: 18402 - DNA, 797 bp, Macaca Fascicularis
  misc_feature (1)...(797): n = A,T,C or G
gatgatgaggatgagtcgagtgnncagacctttatgtattatgtgaatgatggcgtctatggatcatttaattgcatactgtatgatcacgcacatgtaaagccccttctgcaaaagagacctaaaccagatgagaagtattattcatccagcatatggggaccaacatgtgaatggcctcgatcggattgttgnnnnnnnnnnnnnnnnnnnnnnnnnnnnnnnnnnntnnnnnnnnnnnnnnnnnnnnnnnnnnnnnnnnnnnnnnnnnnnnnnnnnnnnnnnnnnnnnnnnnnnnnnnnnnnnnnnnnnnnnnnnnnnnnnnnnnnnnnnnnnnnnnnnnnnnnnnnnccagaaccccgactttccacccgaagtagaggaacaggacgccagcaccctgcctgtgtcttgtgcctgggagagtgggatgaaacgnnnnnnnnnnnnnnnnnnnnnnnnnnnnnnnaatgtgtnnnnnnnnnnnnnnnagctgttaactgcaagtttagcttgaattaagggatttggggggaccatgtaacttaattactgctagttttgaaatgtctttgtaagagtagggtnnnnnnnnnnnnnnnnnnnnnnnnnnnnngatatgggtcacacttatctgtgttcctatggaaactatttgaatatttgttttatatggatttttattcactcctcagacatgctactcaagagtgcccctnnnnnnnnnnnnnnnnnntttgtagcttgtacaatggcagaatgggccaaaagcttagtgttgtgacctgttttaaaat

SEQ ID NO: 18403 - DNA, 776 bp, Macaca Fascicularis
  misc_feature (1)...(776): n = A,T,C or G
cagcaggtgatccaggtggacagggacacagtnnnagtcagctttgaacgctgtgtgaggattgtcaacatgcagggcgagcccacggccacactggcgnnngagctgacctttgacttccccattgagactgtggtgtgnnngcaggnnnnnnngctggccttctggagccatgggatgcaaggccgcagcctggataccaacgagtgcttcccacccatcttcccaggtgacccaggagatcacagatgaaacaaggatcttccgagtgcttggggcccacagagacatcatcctggagagcatccccactgacaacccacaggcgcacagcaacctctacatcctcacgggccaccagagcacctactgagagtggcgggcctggccaggggctccccaccccaccccatgccttagctgcaggcccttttgggcaaaggggcccatcccagaccagaggagcccaggccttggcnnnnnnnnnnnnnnngggcagaagtaatcctgagaaatgtttcaggcctggggagggaggggagcctcccacgcctctgcaataactggactgggggagctgnnnnnnnnnnnnnnnnnnnnnnnnnnncgagtccctagtgcccaaggcagggtccctnnnnnnnnnnnnnnnnnnnnnnnnnnnnnnnnnnnnnnnnnnnnnnnnnnnnnnnnngagcctgcccctgcatttgttctgggaaacacggtatttaagagagaactatattggtattaaagctggtttgttttactcc

SEQ ID NO: 18404 - DNA, 555 bp, Macaca Fascicularis
  misc_feature (1)...(555): n = A,T,C or G
agggcaccttccagttnncgtccnngcacaaggaggcgctggcgcaccgctggggaatccagaagggcaaccgcaagaagatgannnnnnnnnnnnnnnnnnnnncgctgcgcaactacggcaagacgggagaggtcaagaaggtgaagaagaagcnnnnnnnnnnnnnnnnnnnnnnnnnnnnnnnnnnnnnnnncctggccgagcggcgccacccgccccactgagcccgcagccccagccgggccccgccaggcctcccggctggccatagcattaagccctcgcccggcccggacacagggaggacgctcccggggcccagaggcaggactgtggcgggccgggcctcgcctcacccgcccattccccccactccagcccccctccacatcccgcttcgcctccctccaggactccgccccggccccgggaggccacctgggcgtcagatcccaccggggcaaccttgctgaggacgacccggggtacttccttgggagtctcaagtccatgtgtaaatcagatctcccctctcacccctcccacccataa

SEQ ID NO: 18405 - DNA, 725 bp, Macaca Fascicularis
  misc_feature (1)...(725): n = A,T,C or G
agaaaaaattgatgacattctgcaaactttactagatgctacatacaaggatgggcgtcctttgactgacgatgaagtagcagggatgcttattggactactcttggcagggcagcatacatcctcaactactagtgctggatgggcttctttttggccagagacaaaacacttcaagaaaaatgttatttagaacagaaaacagtctgtggagagaatctgcctcctttaacttatgaccagctcaaggatctaaatttacttgatcgctgtataaaagaaacattaagacttagacctcctataatgatcatgatgagaatggccagaactcctcagaccgtgnnnnnnnnnnnnnnncctccaggacatcaggtgtgtgtttctcccactgtcaatcaaagacttaaagactcatgggtagaacgcctggactttaatcctgatcgctacttacaggataacccagcatcaggggaaaagtttgcctatgtgccatttggagctgggcgtcatcgttgtattggggaaaattttgcctatgttcaaattaagacaatttggtccactatgnnnnnnnnntatgaatttgatctcattgatggatactttcccaccgtgaattatacaactatgattcacaccnnnnnnnnnnnnnnnattcgttacaaacgaagatcaaaatgaaaagactgccaggagctaatatatgtgatcgtcannna

SEQ ID NO: 18406 - DNA, 771 bp, Macaca Fascicularis
  misc_feature (1)...(771): n = A,T,C or G
tgccaaaatgcaaagatacaaggctccatttcatcagttgcgcattcaatatnnnaccagcaaaggaaagaactatactgaggaagaagatagattcttgatttgtatgttacacaaaatgggctttgatagagaaaatgtatatgaagaattaagacagtgtgtacgaaatgctccccagtttagatttgactggtttatcaagtctaggactgccatggaattccagagannnnnnnnnnnnnnnnnttcattgattgagaaagaaaatatggaaattgaggaaagagagagagcagaaaagaagaaacgggcaactaaaactccaatgtcacagaaaagaaaagcagagtcagctactgagagcnnnnnnnnnnnnnnnntcnnnnnnnnnnnnnnnnaaagcctagaaataaagttttaaatgggaaactgctattttcttgttcccatcttcaaatgctaattgccagttccagtgtattcatggtactcttaagaaaaatctctttggttttgatttcttgcatattttatatattttacaatgctttctacctgaaatgtgtagctttatattttatggcattctagtattttgtgtactgtattttgtgcatttcatgtcttcatcaggatcctctcagtccttgttcttttgaagcttgtgctgaggttttagcttttctatgttttatatgccgctgctttgaaagagaacctagattctatagttgtattattgttgtttcatactttaaatttatatgg

SEQ ID NO: 18407 - DNA, 440 bp, Macaca Fascicularis
cgcacggctgagctggcccaagctgaagagttgctggaacagcagctggagctataccaggccctcctggaaggacaggagggagcctgggaggcccaagccctggtgctcaagatccagaagctgaaggaacagatgaggaggcaccgagagagcctgggaggaggcgcctaagcttcccctagtgcccacagcaccctctggcactgaaaatccatgtgccacccaccagcggccttgggatcagagacaccccagccgctcccagaccagagaaagtggaagagacccccacaaatcgcgggcaattggcaggtagtgggggagccagggctctgcagtcttagtcccattcccctttaatctcacagcaggcagggcacccaggccttacaggaatttaccctggaccatgccctaaaaaacctcaccccaaaaca

SEQ ID NO: 18408 - DNA, 749 bp, Macaca Fascicularis
  misc_feature (1)...(749): n = A,T,C or G
annnnnnnnnnnnnnnnnnntannnnnnnagaagggacannntttgaagatggtacttttaaactagtaatagaattttctgaagaatatccaaataaaccaccaactgttaggtttttatccaaaatgtttcatccaaatgtgtatgctgatggtagcatatgtttagatatccttcagaatcgatggagtccaacatacgatgtatcttctatcttaacatcaattcagtctctgctggatgaaccgaatcctaacagtccagccaatagccaggcagcacagctttatcaggaaaacaaacgagaatatgagaaaagagtttcggccattgttgaacaaagctggaatgattcataatagacaactggtctgttaatctttttcatcattgttgtgtataatttacctctcagtagaaaggctaacaaattttaagtgccacaggttttaaggattatgcagaaaaaaaagaaaaaagtccttcagtttagaacctacaaaagcttgtgtatcttgattaatgtactttttattgcatggtgtgaactaagttattgctgcagaaatttgtaatatatcctgtttgtatttttttccaagtgtataatgttggtgtggagttttcatgacagaatatacacattttgtaaatctgtacttttttcaaatattgaatgccttatttttgaattctttagatttttaaattggagaaaagcacttaaagttttttatatatgaatatt

SEQ ID NO: 18409 - DNA, 860 bp, Macaca Fascicularis
  misc_feature (1)...(860): n = A,T,C or G
taagagaacacatcgaagagctnnngcgaaacatcagaacacaagtgcttataaaatnnnnnnnnnnntacacaagaatacatattccttttatttctaaggagttaaacatagatgtagctgatgtggagagcttgctggtgcagtgcatattggataacactattcannnnngaattgatcaagtcaaccaactccttgaactggnnnnnnnnnnnnnnnnnnnnnnnnnnnnnnnnnnnnnnnataaatggaccaaccaactaaattctctcaaccaggctgtagtcagtaaactggcttaacagagaacaagcttttacagacgtccttaaggnnnnnnnnnnnnnnngtaatccttaaaagaactgggaatggcaaaacnnnnnnnnnnnnnnntgtcctgaaaatnnnnnnnnnnnnnnnnnnnnnnnnnttttgatcaactggtttgtgttttgctgctgcatttatcccaagaaaaacagctttaatctccagaagaaaaccaaaataccatgggatttatgctgtattgacatcttgccctaaacatacaacatcatagtaatttnnnnnnnnnnnnnnnnnnnnnnngaagatttttgtcatgattttaaatacactgacacgctactgttggttaaatttaaacatgttttacctgcagaaattctctcacaaataacctgcaataacttgaaatgcatacccttttgaacacttccttttctcatgtataaattaaaatgtttgctgcattttgcaaaatgtcaattctctaaaaatgtgtccgtatatttctgnnnnnnnnnnnnnnnnnnnnnttagacgaaaccccataattatagtggcatact

SEQ ID NO: 18410 - DNA, 631 bp, Macaca Fascicularis
  misc_feature (1)...(631): n = A,T,C or G
gaggggtgggcactggtttggaacacctccctccnnnnnnnnnnnnnnnnnnnnnaggaagaggcctgccaggcaggggcagcagaggccacctttcttcttcctccttggcccccgccctgtgctgcccgggnnnnnnngagaccacaccannnnnnnnnnnnnnacgctttcgattctgacgtccgatcccggaggaaggggagttccccgcacgcctctccagccctcctgctgcccatggcccaagcccaagcccaggcccaagcccaagcctgnnnnnnnnnnnnnnnnnnnnnnnnnnnggcagggacagctgtgtgtgatgctgctggagatgccagatgccatgtgccctgcgaggacggctggcggggccgcgggagggggactgccaatcatggtgaaaggggacattttcactgggtcctcctggttcgtgtcctgcatacttggggggcannnnnnnnnnnnnnnccctttgtctgccggagacagtgcaggcagggagacaggtttagggctctgacaaggggcacggggactccgaactgagggatgtcagggcggctctgtgcgtctgaggcctttgctcttgctttgcgggtctgttcacgtccaaagcacttta

SEQ ID NO: 18411 - DNA, 359 bp, Macaca Fascicularis
gagaggagagtatttttgggagaagagagtcacggggtgcccgccctttgatgaacacaagtgtgtgggtgagggaggtaaaaatatgaaaattctgggcacacgttgtgacacatatgaggagcccgagtgcagagacatcactgccagggtacactatgtcaaggtgggaagatgtaagtctgaagtagaggtggatatacactattgccagggcaaatgtgccagcaaaaccatgtattccatagacataaaagatgtgcaggaccagtgttctcgttgctctccaacacagagggagaccacgcaggtgcccctgcactgcaccaaagggtctgttgtgtaccacgaggttttca

SEQ ID NO: 18412 - DNA, 732 bp, Macaca Fascicularis
  misc_feature (1)...(732): n = A,T,C or G
tcatgagagaaagcaaaactggaaagattaagaaagggagatgtaagattcttgatttgcacagatgtagctgctagaggaattgatatccatggtgttccttatgttataaatgtcactctgcccgatgaaaagcaaaactacgtacatcgaattggcagagtaggaagagctgaaaggatgggtnnnnnnnnnnnnnnngtggcaacagaaaaagaaaaggtttggtaccacgtatgtagcagccgtggaaaagggtgttataacacaagactcaaggaagatggaggctgtaccatatggtacaatgagatgcaattactatctgagatagaagaacacctgaactgtaccatttctcaggttgagccggatataaaggtaccagtggatgaatttgatgggaaagttacctacggtcaaaaaagggctgctggtggtggaagctataaaggccatgtggatattttggcacctactgtnnnnnnnnnnnnnncccttgaaaaggaggcgcagacatctttcctgcatcttggctaccttcctaaccagctgttcagaaccttctgatttttacatttactgaataagatttgagtaatgaaagtctgtagtcttaaaactctaaaacagttgtactgcttccaagcagcagtatttatagtaacgtaagctattaatgctaactcttgcatgtcaggaaacattagtcttaggaattcttcaaaaaat

SEQ ID NO: 18413 - DNA, 743 bp, Macaca Fascicularis
  misc_feature (1)...(743): n = A,T,C or G
ggannnnnnnnnnnnnnnnnnagcgccagctctttgggaagtcgacagttaaaatggtacagannnnnnacggcatagttcccgacgtctatgagaaggagtcccgacacctgatgccttactgggggatnnnnnnnnnnnnnnnnnnnnnnnnnnnnnnnnnnnnnnnnnnnnnnnnnnnnnnnnnnnnnnnntccctctccannnnnnnnnnnnnnnnnnnnnnnnnngttctccctgaagtgttttttacactgggtgttcaaatttattttaagagagagggagggaggggacataaagggaatgcatacattgctagtcacatttttaaaattaacattttggaatagtgtttatgaaaatctttagcttttaatcatttttatcaatttgaacagtttaataaactgtttggttctgctctctnnnnnnnnnnnnncctttggcaccttggtaggtgcaggaggagctcagtgcaaaaatcactttggggcctcattaaccctttagagacaagcttcgccccaggctgctgaccagacagatgcttagggaaggttgataccagcttcagtctctactggattagccctactctttcctttcccctctattatttagtgactctgtaagttaaatacacccttattatttagctgttaagtaactataatgnnnnnnnnnnnnnnnnnnnntggaatccatgtgcccagggattatattannnnnnnntttaataa

SEQ ID NO: 18414 - DNA, 634 bp, Macaca Fascicularis
tgttggatttagaagtgaatgtgtttggaatatggcttacagagaatagaaacaaatccatgtaaacaattttgaaagaggaatgggagctaaaaatcctgtgatactaagatctcagtcatatgaattacaagatagtatttactggcaaggagaatgttgaaggactcagctaaaggagtacagcaattgtagtaactgacacatcctctctttgcaagctactgacagggcacactcatgctaagtttcagaatattggtcttctgggtttttgctttttaaaagaggtgtgggagcagaggaatggaaacatgcatgagtttttgagctagggaaagttggagatactttaatctttttaaaggatcagtgctgccctagatgaataaactcaattgtccatctttattttagagttttaatgaattcaaggaagggaacacagcatatctgtggccaactgttttccactcaaatcctgagttattgctgcatgctttaatttcttccctttcagcatctgagaaccttaaagccaacgtctgcaatctgtttttcgatatttatacttttagatatatagtacctttaagtagcagtatgggacaaggcttgtaaatgttttgtctaa

SEQ ID NO: 18415 - DNA, 776 bp, Macaca Fascicularis
  misc_feature (1)...(776): n = A,T,C or G
cagcacccgcccacngaattcatacgagaaggtgacgacgaccggactgtgtgccgggagatccgccacaactccacgggctgcctgcggatgaaggaccagtgtgacaaatgccgggagatcttgtctgtggactgttcggccaacaaccccgcccaggctcagctgcggcgggagctcagtgagtccctacaggtcgctgagaggttgaccaggaaatacaacgagctggtgcagtcctaccagtggaagatgctcaacacctcctccttgcnnnnnnnnnnnnnnnnnnnnnnnaactgggtgtcccagctggcaaacctcacgcaaggcgaagaccagtactatctgcgggtcaccacggtggcttcccacacttctgactcaggtgttccttccggtgtcactgaggtggtcgtgaagctctttgactctgatcccatcactgtgacggtccctgtagaggtttccaggaagaaccctaaatttatggagactgtggtggagaaagngaagcaggaataccgcaaaannnnnnnnnnnnnnnnnnntgtaaatgttgcttttggacctacgggggcatctgnnnnnnnnnnncccgagatgagctgcagccccccagagagagctctgcatgtcaccaagtgaccaggccccagcctccaggcccccaacttcgcccagccactccccgctctggatcctgcacgataacactcgaatctgctgctcatgggaagaacagaactgctcctgcatgcaactaaatcaataaa

SEQ ID NO: 18416 - DNA, 715 bp, Macaca Fascicularis
  misc_feature (1)...(715): n = A,T,C or G
gccctgtgtacttcccgggccaggactgcccctaacctctgtaggaaccgtggtatgtctgccatgttgcccctttctcttttcctctttcctgtcccaccatacaagcacctccagcctgaacagaagctcttactctttcctatttcagtgttacctgtgtgcttggtctgtttgactttatacccatctcaggacatttccgtagactgtttaggttcccctgtcaaatatcagttacccacnnnnnnnnnnnnnnnttgccccagaaagggatgttattatccttgggggctcccagggcaagggctaaggcctgannnnnnnnnnnnnnnnnnnnnnnnnnnnnnnnnnnnnnnnccctggggcctgactggtcagaacttgctgctgtcttgttgcggatggatgnnnnnnnnnnnnnnnnnnnnnnnnnnnnnnnnnnnnnnnnnnnnnnnnnnnnnnnnnnnnnnnnnnnnnnntggaagcattttggtgagcatgacagcctgcagcaggaatatatgtgtgtctatttgtgtggacagaaatatttacacttagggtttggatctattcaagaggaactattcaagtcagaagcagctaaaccaaggactcagcaccctctggattctgaatctcaagatgggggcagggctgtgcttnnnnnnnnnnnnnagtcatctgttagggccttggtcaataaagcact

SEQ ID NO: 18417 - DNA, 719 bp, Macaca Fascicularis
  misc_feature (1)...(719): n = A,T,C or G
ccnnnagcccacccgcccacncccaccgcgacttccagcccgtgctccacctggttgcgctcaacagcccgctgccaggcggcatgcggggcatccgcggggccgacnnnnnnnnnnnnnnncaggcacgggccgtggggctggtgggcaccttccgtgccttcctgtcctcacggctgcaggacctgtacagcatcgtgcgccgtgccgaccgcgcagccgtgcccatcgtcaaccnnnnnnnnnnnnnnnnnnttcccagctgggaggctttgttcgcaggctctgagggtccgctgaagcccggggcacgcatcttctcctttgacggcaaggacgtcctgaggcaccccacctggccccagaagagcgtgtggcatggctcggaccccagcgggcgcaggctgactgagagctactgcgagacgtggcggacagagtctccctcggtcacaggtcaggcctcctccctgctggggggcaggctcctagggcagaatgccgcaagctgccaccacgcctatatcgtcctctgcatcgagaacagcttcatgactgcctccaagtagccgccgcctggatgcagatggccggagaggacgggcggctcggaggaagcacccactgtaggcagggagcggccggccagcccccggccccaggacctggcggccatactttcctgtatagttcacgtgtcatgtaatcctcaagaaana

SEQ ID NO: 18418 - DNA, 742 bp, Macaca Fascicularis
  misc_feature (1)...(742): n = A,T,C or G
cgcgtgcagttcgaggaggaccccagaaagccaggagctgtgatcacagtagctgtaggttaccagacggcagcattagaaagggattgtaaataacatgcaacatgagtgtaacatatttgttcagttataagatgattgtttcacagaagccttaccactctctgcttcatctaagaaaaccaataccaaaaacgacgctttaatgaacgctcagccccgcgtagtgttttcagatgnnnnnnnnnnnnnnnnnnnnnnnnnnnnnnntttgctgtggcactttgtacaattaactgcttattacgtatgattactcgcagtgatctattgttccatataacccaaaagcatggtttattcattaaaacacggttgacctgaactcgtgccttaggaattaatgccccctcatggaacctgctnnnnnnnnnnnnncgggtggaggctccggctgtgaacgccactgatggagaaagggctcctgcaggaggaacggcctgtaacgtgcactccgcacgatcgcgtctcttgtgtctccctcacagaaagaaacaacctgaaggccatcccgtcagtcnnnnnnnnnnnnnnnnnnnnnnnnnncgcgtcctgnnnnnnnnnnnnnnnnnnnnnnnnnnnnnnnnnnnnnnnnnntgcagcctttctcaggggactgccatcgaaaaggaaacgtttgatgtttgtgtcannntgtagttaggaaatagatccaataaag

SEQ ID NO: 18419 - DNA, 815 bp, Macaca Fascicularis
  misc_feature (1)...(815): n = A,T,C or G
aagctgaagaagtttattgnnnannnnnnnnnnnnnnnnnnnnnnnnnnnnncagcagaagctgcagagaaactgaagaaccgnnnnnnnnnnnnnnnnnnnngggcccgtcagcatgagagggacagtgaccgccgctccagcatcccnnnnnnnnnnnnnnnnnnngaggccattgtgcgcatcgcggaatcgctcnnnnnnnnnnnnnnnnagcccttcgccacagaggcagatgtggaggaggccctgcggctcttnnnnnnnnnnnnnnnnnnnnnnnnnnnnnnnnnnnnnnnnnnnnnnnnnnnnnnnnnnnnnnnnnnnnnngnnnnnnnnnnnnnnnnnnnnnnnnnnaagnnnnnnnnnnnnnnnnnnnnnnnnnnntcccaggtgtctgagcacagcatcatcaaagacttcaccaagcagaaatacccggagcacgccatccacannnnnnnnnnnnnnntgctgcggcgcggcgagatccagcatcgcatgcagcgcaaggttctctaccgcctcaagtgagtcgcgccgcctccctggaatcatggactcgcccacgcctttcgcccctcctgccgctgcctgccattgannnnnnnnnnnggacctctacctccccactgcagtcctcgaacttcccaggcaccctcctttctgccccagaggaagnnnnnnnnnnnnnnnnnnnnctctgggcgaccgcctctagcgcagttctggcaagtntgcttttggcatctgttaataataaagccacgatgtgttcgggtaaaaaaaaaaaaaaaaaaaaaaaaaaaaaaagg

SEQ ID NO: 18420 - DNA, 778 bp, Macaca Fascicularis
  misc_feature (1)...(778): n = A,T,C or G
ggcagcagaaaagtannnnnnnnnnnaagacactgaggcaaannncctttgtccatttacctagaaaccagaatgatnnngacatactggagagctgcagttgtgaaagcaccatcatcatagaggatgatgtaattaagaaaatggtcagtgtgcaaagannnnnnnnnnnnnnnnnnnnnnnnnnnnnnnnnntaattgtcaaaaaccagaattaggtcaagttcatagcttctgtaattggcttttgaatcaaagaatagggagacaatctaaaaaatatcttacgttggagatgacagaaatatgattgatttgaagtggaaaaagaaattctattaacattaattaaagtaaaattattccctgaattgtnnnnnnnnnnnnnnnnnnnnatatgtattacttttctgcaatgttattattggcttgcactttgtgagtattctatgtaaaaatatatatgtatataaaatatatattgcataggacagatttaggagttttgtttagagcagttaacatctgaacatctgaagtgtctaatgcattaacttttgtaaggtactgaatacttaatatgtgggaagcccttttgcgtggtccttaggcttacaatgtgcactgaattgttttgtataagaatccaaagtggacaccnnnnnnnnnnnnnnnaaatatgcatgtaatttatattttctatatttgtaactttgcatgttcttgttttgttgtataaaaaatttataaatgtttaatatctgactgaaataaacag

SEQ ID NO: 18421 - DNA, 733 bp, Macaca Fascicularis
  misc_feature (1)...(733): n = A,T,C or G
tgccaaagcnncngacaaacctattcaggtggtttatgtgnnnncacatctgtttcatatgctatttgagttgttcaagaactcaatgagagcgacagtcgaactctatgaagacagaaaagagggctaccccgctgttaaaaccctcgttactttgggtaaagaagnnnnnnnnnnnnnnnnnnnnnnnnnnnnnnnnnnnntcccacttcgaaaaatagatcgtctttttaactacatgtattcgactgctcctagacccagcctggagcctaccagagctgcccctttggctggatttggttatggtttgccaatttcccgtctgtatgctagatattttcaaggagatctgaaactgtattccatggaaggagtgggtactgatgctgtcatttatttgaaggctctttcaagtgagtcatttgagagacttccagtttttaataagtccgcatggcgccattacaagaccacgcctgaagccgacgattggagcaatcccagcagtgaacccagggatgcttcaaaatacaaagcgaaacaggacaagatcaagactaatagaactttctagaggactgaatgctctggtcctctctgtgaagaaagattgccttctgcaagtcaaccagagagaactgctttctcccacctgctnnnnnnnnnnnnnnntagttattcctagtgcttgaatgtgtattttctctgtaccacctggactttcccaagg

SEQ ID NO: 18422 - DNA, 701 bp, Macaca Fascicularis
taaagtttgtaagaaaatgttcattttaagtgctagatagtggagaaaatttatcacctaaaatatacccatcagtataaggcaagcaagtcttaacatggcagccattctgcctttgccgtggccctgtcctgtttagttcttagtgggtttatttttgtacttttgcagaagaaacttcagcaagctagaactggaaggtactttaatttttcatatatacttgtttttttttttttaaatgaaggctcatttacttgaaatgtaaaaactttcactcaatacaaataggaaaaaaagtgatatgttttatatcatattgctttttgtccatctttgtggtttagtttatttactcacttcgtgtttttcacctataaaattgtcaagctagcaacaaaactcttgtttgtttaattggtagagaagagacctgccagattatcaaaactcttcatgtgttaaaagaccactcctgtaaaaccgacctagtggacaagctgatttgaaatagactgtgaagtaagctgtaacttgtcattttaattttgtttaacatggttactgacttagatgatgtgttgaataccaagataaagaaaaatgcacctaaaatctaattagaattatctgggtcaccaagtcaaggtggtattgatctgtgttaatctgagtaacttattgcctagcctataaataaa

SEQ ID NO: 18423 - DNA, 762 bp, Macaca Fascicularis
  misc_feature (1)...(762): n = A,T,C or G
gcaaagccnnnnngagcccccgaagcgtgggcgtcatctccccgtaccggaaacnnnnnnnnnnnnnnnnnnnnnncatcaccaaacttgacagggagcttcgaggactggatgacatcaaggacttgaaggtgggttcagtggaagaattccaaggccaagaacgaagcgtcatcctcatctccactgtgcgaagcagccagagttttgtgcagctggatctggactttaatctgggtttccttaagaaccccaagaggttcaatgtagctgtgacccgggccaaggccctgctcatcgtcgtggggaacccccttctcctgggccatgatccnnnnnnnnnnnnnnnnnnngagttctgtaaagaaaacggagggtataccgggtgtcccttccctgccaaactggacnnnnnnnnnnnnnnnnnnnnnnnncaaggtctgagcaagctcagcccctctacctcagggtcccatggtcatgactgcctcccccaggagcaggagggtgaagggggcnnnnnnnnnnnnnnnnnnnnnnagtggaggaatgagctctgaagacacagcacccagccttctcgcaccagccaannnnnnnnnnnnnnnnnnnnnnnnnnnnnnnnnnnagctgagctgccccttcaagggacaggaaggctgggggagggannnnnnnnnnnnnnnnnttccaccccctcccctgctggnnnnnnnnnnnnnnnnnnnnnnnnnnnnnngggggaagggggaggaagaaaac

SEQ ID NO: 18424 - DNA, 788 bp, Macaca Fascicularis
  misc_feature (1)...(788): n = A,T,C or G
taatcatannnnnnnntgttataagaaannnnntnnnnnnnnnnnnnnnnnnctgtgagacatgctatggaagctgaatgtcggacactagcacagtttgctatttccctttctaattggcttatgttactctcacnnnnnnnnnnnnnnnttttagatgtagagaagacagacagtttgaatatttgtaaacttgtttttctttggtgtgtttaggacttagtggtcctctgttgctgttgtcttctgtaagtggggtttcatgactcaccgcttaacaaataactatctactctgatattctggacatttcaggaaatggtaatttgccttgttacacagtaagggggctattaagacaacattttttctaacctcagataagtgcagtgtctttgcaatgccaacataagggagatttggccaacgtgaaataaaattactcattcaaaactcttcctaaggtgattttgtagttcttaacagttctccaaagcatcttaaacaggaatattaagataaatgtaaatttnnnnnnnnnnnaaagagttgtgagcttttttattcatgataaaaccttatatgaatagtaaaaaaaaaaaaaaatccctgtggaaagctcntagtacattggtcagtgctgggtgatatagattctgataaaaacataaatgtattagttcatctccgtgtagtaaaaagtatacttatacaatgttttgtacttgtatttcatgatattannnnnnnnnnnnnnnnnnctaaaaaaaaaaaaaaaaaaaaaaagg

SEQ ID NO: 18425 - DNA, 757 bp, Macaca Fascicularis
  misc_feature (1)...(757): n = A,T,C or G
cccgaggagaggcaagggggtgggtgtggctcnctgggtggacggcatctnnnnnntgtcctttctcctncnngcggaaggtctcagatgtcaggctgccgtgccccacttgtctgtgtggcctttgtctgtggtggggaacctgccnnnnnnnnnnnagggacagtgagacaagctgccaaggctgagccttggggacggccccacctgagggtcccgagttgccgagcacaggtgtccgtcggtccttgggcttcgtggcgtgggcttccatcgcacccccccaggcccaggctgactcggccgttcatgaactttgcaaaggcacgccccgcaccccgacccccaccctgctcgcacccaggcttggcgactgtgatatgagtgacannnnnnnnnnnnnnnnnnnnnnnnnnnnnnnnnnnnnnnnnnnnnnnnnnnnnnnnnnnctcagcaacaactgcctgggggacgcgnnnnnnnnnnnnnnnnnnnnnnnnnnnnnnnnnnnnnnnnnnnnnnnnnnnnnnnnnnnnnnnnnnnnnnnnnnnnnnnnnnnnnnnnnnnnnnnnnnnnnnnnnnnnnnnnnnnnnnnnnnnnnnnnnnnnnnnnnnnnnnnnnnnngcgcttcctgccgctgctctccctggacgaccggcttcgaggcacccctggggctgaccagcccctgccacgtcctcgccctgcatatcctaggtttgaagagaaacgctcagatccgcttatttttgccagt

SEQ ID NO: 18426 - DNA, 728 bp, Macaca Fascicularis
  misc_feature (1)...(728): n = A,T,C or G
tagaaaagaagcagtnnnnnannnntgccgctaacctgnnnaagacgactcagcagaacaccgcctttcattctattgggcaattccnnnnnnnnnnnaggtcaattttttttctgaacaaaagcaggtttttatatgtaaannnnnnnnnnnnnnnnnnnnnnnnnnnnnnnnnnnnnnnnggaaacttggaaatattcatttttataaactacagaaattttttgnnnnnnnnnnnnnnnnnnnnatttattttgtaatnnnnnnnnnnnnnnnnnnnnnnnnnnnnnnnnnnnnnagttcttannnnnnnnnnnnnnnnaaaaggatatcatcttgagtatagcaatatcaaaaggaattcagtagttactgctgtttaggaatataaggttaagatatcatatgggtcaggtcattttttttctnnnnnnnnnnnnnnnnnnnagcaagcaccaaaaaactaaagcagtttttaaaccgatatttacataaagaaaatcataaaatccaatgcttctgcatactgtgttatgttacagtccagttttgtgtgctttactacacagtttggttacaggacttctgtgcattgtaaacataaacagcatggaaaaggttaaatacctgtgttcagattgtaagatctagtnnnnnnnnnnnnnnnnnnnnnnnacgttaaatgaaaaaagaaccccccctttnnnnnnnnnnnnnnnnntcttatg

SEQ ID NO: 18427 - DNA, 689 bp, Macaca Fascicularis
  misc_feature (1)...(689): n = A,T,C or G
taatgagacacatatagatactgagacctgtgtgtacagtaggaccatgcactcatacccatctggatagggagcccctggtataccaagggagccagttgtgttcaaacacacacatcacaagcttgactcactaactcaggcctttccagagctccacagcttcccaccccctccccaccaaactggggttctggagttaaggatggaggagggtattatactgcctcagtctgactcctcnnnnnnnnnnnnnnnnnnnnnnnnnnnnnnnnnnnnnnnnnnccttttggaggcccccttcacctgcagctatgatgcccttccccttctcccctgtcctcaccatatgccttatccccattctactcccctgctatgcaagtgcccctgtggcttgtccccaaccccctcggcaaccaagctcacctnnnnnnnnnnnnnnnnnnnnnnnntgcttgaannnnnnnncttccattccagaaaggcccccattcttcctttggggatannnnnnnnnnnnnnnnnncagcccaggacccgccactgaggaggggatctaggcaggtgggcctgattccaaggggnnnnnnnnnnnnnnnnnnnnnnnnnttacacacacacaacacacacacacacatcacagttttcagacagcccctgctgcattctctgtccatctttctgtt

SEQ ID NO: 18428 - DNA, 1107 bp, Macaca Fascicularis
  misc_feature (1)...(1107): n = A,T,C or G
ctataaaaatactttatcaagaactctagacaaaggtattatttaaaaaatcatggtgatgtatttattagagtgnnnnttataaatctgtttactttttatattgagaattaaactatacctaaaaaaactctgactagtcccatttgtcagtttagcattacatgtcttgagcaccagaaaataaaatccatatattaataaacacctatcttgaaaaactagtggagtgtatttacatggagaaagagattttgggtggagtcctcagccaaattctaccagaatcaccttgataaaagaagtattgaaatcaagcacagcaggttggaatatggggaatttgacatcatatttcttcaagtctgattttactttcttcctgagcatgaccatttgaccttgttatnnnnngggcttgctcaaagacccaggagagtagatgtttatgaacattcctttaaatgaaagcgcctaggttatagttatggctttgtctggagtggtgatgtcaactgtgagtgtaggtctgatacagaaagaattcaactttccagatctaaaaagatgctaccttgcatagatttgctcattaaacataaattgcaaaaataaaaatatcacagagaacacctgtactttgcttattgatagatttgctcactaaagaaggaaagttgtcatttacctgtgtaacaaatctgtgcatcctgcacatgttccccagaatgtaaaataaaaataaaaattttttaaataaaaaaggaaagttgtcctttattgttaacatgatacattacatgaatataaaataaataattatcttttgtaataaatttctgttgtgttagatcagagagcaatcttttggaaagtatagatatattactgtagaagttacaaactcattgtaatacaatgtatttaatttttagaataagatcatctgaatggtattgtcatgattattgttcnnnnnnnnnnnnnnnnnnnnnnnnnntcaagtccaatgatatattcactatgccattgtattgacttttccttgtaaagcaatgcataccaatttaataagtatttgatttctgtgatnnntcagttgtctgc

SEQ ID NO: 18429 - DNA, 734 bp, Macaca Fascicularis
  misc_feature (1)...(734): n = A,T,C or G
gactcactgactatatcagcaaagtgaaggaannnnntnncatacttnnnnnnnnnnnnnnnnnnnnnnnnnnnnnnnnnnnnnnnnnnnnnnnnnnctactttctgcttgtgtttttgaaataggagatgcacgtaccacccaattatctatggcagcatgcatgtataggctgaactattatcagctctgatgtttcagagagaaggcctcagaaactgaaagaaaaccaccaccctcctattgtatctgaagtttcacgtgtgtttatgaaatctaatgggaaatggatcacacgatttctttaaggaaataaaaaaaattatggcttttacagcaacaatactgttacaggaataaaaaaattgttaagtatcaagaccatacaagtaaatgaaaaggctgttaaagtagatgacatcatgtgttagcctgttcctaatcccctagaattgcaatgtgtgggatatagattagtttttattattctcctttaaaaatcaaagatgatctctatcactttgccacctgtttgatgtgcagtggaaactggttaagccagttgtttatacttcgtttacaaatataaagatagctgtttaggatattttgttacatttttgtaaatttttgaaatgctagtaacgtgttttcacnnngctggtaactgttgcaaacttaatgtcattttccttaagatggttacagctatgtaacctgtattattttggaca

SEQ ID NO: 18430 - DNA, 813 bp, Macaca Fascicularis
  misc_feature (1)...(813): n = A,T,C or G
tagcaattactgtatnnnnnnnnnnnnnnnnnnnnnnnnnnnccacaactatgatttctgcctgtgtctcaagatgcgtgcaaaaggctctgaagaaagctgataagcaagttttggagcctctgatgannnnnnnnnnnnnnnnnnnnnnnnnnnnnnnnnnnnnnnnnnnnnnnnnnnnnnnnnnnnnnnnaggnnnnnnnnnnnnnnnnnnnnnnngccaggacaacaaagttgttattggatttgttcccttagcagatattatgggttattcaactgtgcttcgaacgctaannnnnnnnnnnnnnnnnnntgccttagaactatctacttatcaagccatgaattctcaagatcaaaatacactgctcaaccggagaagtggtttgacctaaatgttttagtttttgagagaaattcaggagcacctagctacttcattttcagtaagaacaatttttattgcacaaataaagtactgtttcagtacattcagagaactagataaaagatataacttaagctttgatagtggcgctggagccacccgttttaatttaatgagaaatatgctttgatgtttaaagccactgtacctgaatcatgctgttcatctatgaagttattactattagtagcaaacactcaactcttcggaagagtgctatcacgaagttgtgtttgtgtctttaagcttatctcaagaaagatgccaggcctctatatgtaataagaaataagagggtcaaaggtccaatcaataaaaatattttattcaaanaaagtcttaatatcttgttgatttacatg

SEQ ID NO: 18431 - DNA, 779 bp, Macaca Fascicularis
  misc_feature (1)...(779): n = A,T,C or G
caaagtcagcaaggggcatgaaatgagtgctcaggtggccaccctgattgaccgcgttgtggtgggaaggggccagctagacaaagacaccgcagacacgctgactgccttctgccccgggtgcctgtgctccctcagccccgagcnnnnnnnnnnnnnnnnnnnnnnnnnnnnnngggcggtcaggccccaggacctggacacgtgtggcccaaggcagctggacgtcctctatcccaaggcccgccttgctttccagaacatgagcgggtccgaatacttcgtgaagatccggcccttcctgggtggggcccccacggaggatttgaannnnnnnnnnnnnnnnnnnnngagcatggacttgnnnnnnnncatgaagctgcggagggaagcggtgctgccgttgagtgtggctgaggtgcagaaacttctgggaccccacgtggagggcctgaaggtagaggagcagcacagccccgtgcgggactggatcctaaagcagcggcaggacgacctggacacactggggctggggctacagggcggcatccccaacggctacctgatcctagacctcagtgtgcgagaggccctctcggggacgccctgcctcctaggacctggacctgtactcaccgtcctggctttgctcctggcctccaccctggcctgaggaccctactcccttgctggccccagccctgctggggatccccgcctggccaggagcaggcatgggtggtccctgttccaccccaggagaactgcgctcagtaacg

SEQ ID NO: 18432 - DNA, 784 bp, Macaca Fascicularis
  misc_feature (1)...(784): n = A,T,C or G
aaggtgcccatgatgagttgcagcacgtgactacaccttacttccgggacgaggagctgtnntgcaccgtagtggagctgaagtacataggcaatgctagcgcactcttcatcctccctgatcaagacaagatggaggaagtggaagccatgctgctcccagagannntgaagcggtggaaagactcactggagttcagacatatagatgagctctacctgccaaagttttccctctcgagggacnnnnnnnnnnnnnnnnnnnncgccccnnnnnnnnnnnnnnnnnnnnnnnccagcgaggctgacttgtcagggatcacaggggccaggaacctagcagtctcccaggtggtccacaaggctgtgcttgatgtgtttgaggagggcacagaagcannnnnnnnnncaggagtcaaaatcaccctcctttctgcattcgtggacccaaagatcactgtgcgtttcaacaggcccnnnnnnnnnatgatcgtccctatggacacccagaacatcttcttcataagcaaagttatcaatcccaagcaagcctagnnnnnnnnnnnnnnnnnnnnnnnnnnnnnnnnnggagcctggaatggaagctggatgctcgggtctctgggcacagcctgacccctnnnnnnnnnnnnnnnnnnnnnnntctggccctgtctgctcatccttggaaggtgacagcaactgcctgtgtagctcccacatgcacaggggcccgtggactcttcactccggagggtcctgggtcttccgagagcaataaacag

SEQ ID NO: 18433 - DNA, 1076 bp, Macaca Fascicularis
  misc_feature (1)...(1076): n = A,T,C or G
gtttagcnnngcnnnncagcaaataatattnnnaatgtggatatctaattctgaagtctgttccannnnnnnnnnnnnnnacatctttctatactttctatacttttctttatatacttttctccaataatacatgtttactttaaaaattgctgcagtaaagaaaaacctttaactttagcgtgttaattttccattggctatgatggaattaatattgtattttaaaaatgcatattgatcactgtaattctaaaacaattttttaaatannnnnnnnnnnngctgaaagaaggctttttatcttaaagttattttaatatgtggtatagcaggaatttcaaatttaagagttgctttnnnnnnnnnnnnnnnnnnnnnnnnnnnnnnctatgtctggaagtagaagctatttattataagcttctacaggtatttttaaatagagcaagcatgttgaatttaaaatatgaataaccccacccaacaattttcaatttgttttttgctttggtcgaacttggtgtgtgttcatcacccatcagttatttgtgagggtgtttattctatatgaatattgtttcatgtttgtatgggaaaattgtagctaaacatttcattgtccccagtctgcaaaagaagcacaattctattgctttgtcttgcttatagtcattaaatcattacttttacatatattgctgttacttctgctttctttaaagatatagtaaaggatgttttatgaagtcacaaaatacatatatttttattttgacctaaatttgtacagtcccattgtaagtgttgtttctaattatagatgtaaaatgaaatttcatttgtaattggaaaaaatccaataaaaaggatattcatttagaaaatagctaagatctttaataaaaatttgatatgaaaagcacaatgtgcagaagttttggaaaccctatagaggattacaacaggtaaacattaaagagagtacattgctgtcttatagtgatgttgctaagaagtacgtgctttgttgtaaaactgcttgaaagcccanttgaaannntgtatctgtttat

SEQ ID NO: 18434 - DNA, 723 bp, Macaca Fascicularis
  misc_feature (1)...(723): n = A,T,C or G
tctgaataaaatgacttggaactgcctgtttgggcttctcatttcttacctccccttccctctcccacctgctactgggtgcatctctgctccccccttcgccagcagatagttacctttgggctgtgttgctttcttgtcaccatctaagagttcccagacactggaaagccatgttctcggctctgagaacggtgatgctgactggagtgctgcccctctgtaaaaggctgggtgtggatgatcacaagcccctcacgtgcctcagccaagaggaagtacaggggtcagccccgaggtccaggggaaaggggagtggagacactgatttccctaccactgagggaggggcctgggtctcagctgttcccatagccacctgccacaactgccaagcaagttttgctgagtttcacacatggatccctatggatcaactgccctaggactccctttcatgtacccatgtgaccctgttgactttgccctgatgaagcaggggccaacagtgccctaccttaattacaaaaactaatgactaagagagagatggctagagctgaggcccctgagtcaggctgtgggtgggatcatctccagtacaggaagtgagactttcatttcctcctttccaagagagggctgagggagtagagctgagcaactggtgcagacagcctcgctggactcggggtgagntagttcagccatgnnnctggctgt

SEQ ID NO: 18435 - DNA, 638 bp, Macaca Fascicularis
cggggccggctcaggtcggctgcacaagctcccatcctcgtcgccgccaccaccgccgccgctgccgccttcctcccggtcggggaccacacgacttcgccaaagtcgccgcaccagccccgagcgtttggacctgaacatacgatatcctttggcgccaggggtgggggggaggcggtctccggttaccgggggtccgttccctcagcgaggcgccggctgcgcgggtcgcagccccacatgaagctccgccgcggagcgccgtgcagaccgtgcacagcctgtcgtcgaaggggcgccgcagggcgacaacatgagggagctcgccgaggcgggacggccgggaacacgcgcacgccgagccgcagtccgcgcgcggccagcggctacatggaccgcagcgtcggggctgctcaacaactccagtccccgcgctttaagggggctgcaggcggcgcaccgccagaaagaccccacatgggccggcgagccttcaaaagttgcgcggctggtccatgagcacaaagcgctcgcgcgaacccccaaatgtgtttggaaagccctccctttcccctgccttattttaaaccaaagcgcttaactacatgggcttttcctgcaggatccgaaaggcaggc

SEQ ID NO: 18436 - DNA, 741 bp, Macaca Fascicularis
  misc_feature (1)...(741): n = A,T,C or G
cagcatgccgcggtaggtaagnnngccggaccgcgtagagagccgggccccggacggacgttggttctgcactaaaacccnnnnnnnnnnnnngtgtgtctcacccctcatccttttactttttgccccttccactttgagtaccaaatccacaagccattttttgaggagagtgaaagagtaccatgctggcggcgcagagggagggggcnnnnnnnnnnnnnnnngctcgccccacccagggctccctcctggagcatcccaggcaggtggtacaccaacagcccccttgactcgcagggagcaactctccactccatatttatttaaacaatttttccccaaaggtgtccatagtgcactagcattttcttgaaccaataatgtattaaaaatttttgatgtcagcctnnnnnnnnnnnnnnnnnnaaaaagtacaataataaatcctcaggtagtactgggaatggaagactttgccatgggcctgctgcgtcagaccagtactgggaaggaggacggttgtaaggcagtcgttatttagtgatattgtgggtaacgtgagaagatagaacaatgctataatatataatgaacacgtgggtatttaataagaaacatgatgtgagattactttgtcccgcttattctcctccctgttatctgctagatctagttctcaatcactgctcccccgtgtgtactagaatgcatgtaaggtcttcttgtgtcctgagaaaa

SEQ ID NO: 18437 - DNA, 684 bp, Macaca Fascicularis
  misc_feature (1)...(684): n = A,T,C or G
agtgcaaaagtgaaacatacaaaataagactgatttttaagagtaactcagtaatttcaaaatacagatttgnnnnnnnnnnnnnnnnnnntaannnnnnnnnnnnggaaaaattgaatctgataaaatgaagatctggtgtatatgttttaaaatactctcatatagtcacaccttaatcttatannnnnnncctctattttcaggatataattcttaactatcattatttacctgattttaatcatcaaatttgaagttnnnnnnnnnnnnnnnnatgttcaaattcaaaccattttaaaatgtgacnnnnnnnnnnnnnnnnnnnnnnnnnnnnnnnnnnnnctaaaaattgtggttgtttttttnnnnnnnnnnnnnnnnnnnnnnnnnnnnnnnnnnnnnnnnnnnnnnnnnnnnnnnnnnnnnnnnntcattatttcctcttgtcaacaacttgtgacacgagatttttttaagggctttatgtgaactatgatattgtaatttttctgagcatattcaaaagggtaacaaaattatgtttatgtactaaatctaatcaggaaagtaagccaggaaaagttgatggtattcattaggttttaactgaatggagcagttccttatgtaataacaattgcatagtagggataaaacactaacttaatgtgtattcatttt

SEQ ID NO: 18438 - DNA, 605 bp, Macaca Fascicularis
  misc_feature (1)...(605): n = A,T,C or G
aatgtcactgagctnngnnngtggtccatccagggnntgnnntccccagggacatcgtgtggctcaggagccacagcagaggaagctgagcagggtggctccctgggaggtcgcacctgtgccccaggggnnnnnnnnnnnntggggacatggctcaagagggaggccagatatccccctaacaaagacagcaggggctggagtcatgaatgtggacactgaaagaggagnnnnnnnnnnnnnnnnctgagtgtgtgcgccagtccttgaggacattacattttacattacatttgtaatcagaaaagtagactttcaaaagaagacatcatctaagttacttgttaggagtcacagattcatctacccggagctggtggcagtagggaggcatttgaaaaggtgcctggacagcacaggccctaagggaggacaggtcctccatgcccagaatgcaactggctggccaaggtgcctttgagcttccccaggccgcctgtgtagagaaagcagcagcgtggccggacgcgnnnnnnnnnnnnnnnnnnnnnnnnnnnnnnnnnnnnnnnnnnnnnnnnnncacaaggtcaggagatcgagaccac

SEQ ID NO: 18439 - DNA, 723 bp, Macaca Fascicularis
  misc_feature (1)...(723): n = A,T,C or G
acctggtgctcgggaagggaggggaaggggccggggagggggcacggcaggcgtgtggcagccacacgcaggcggccggggcggccagggacccaaagcaggacgaccacgcacctccacgccactgcctcccccaaatgcatttggaaccaaagtctaaactgagctcgcagcccccgcgcccgccctccgcctcccatcccgcttagcgctctggacagacggacgcaggccctgtccagcccccagtgcgctcgttctggtccccacaggctgccccagccaacgagattgctggaaaccaagtcaggccaggtgggcggacaaaagggccaggtgcggcctggggcgaacggatgctcggaggactggactgtttttttcacacannnnnnnnnnnnnngtgggaaggaaaggcagatgtaaatgatgtattggtttacagggtatatttttgataccttcaatgaattaattcagatgttttacgcaaggaaggacttacccagtnnnnnnnnnnnnnnnnttttgatctctgcttaccgttcaagaggcgtgtgcaggccgacagtcggtgaccccatcactcgcaggaccaagggggcggggactgctggctcacgccccgctgtgtcctccctccctcccttccttgggcagaatgaattcgatgcgtattctgtggccgccatctgcacagggtggtggtattctgtcatttac

SEQ ID NO: 18440 - DNA, 859 bp, Macaca Fascicularis
  misc_feature (1)...(859): n = A,T,C or G
tgattacagganntatgttcatggaagnnggnntcnnnnnnnnnnnnnnnnnnnnnnnnnnnnnncgacagctagaagctccattgcctcctatgatggctcctttacctaaaaagactcttctggcagatagaagcatggaactgaaaaacagcctcagactggatggacttggatcaggaaggggcatcctaacaaaccgttagcaacagcccagtggatactgaagtttttttaatggtannnnnnnnnnnnnnnnnnnnnngtttttattattttcttgtatagagtcacacacttgaaaaaaattaatgtttgaaaacaaaaatattnnnnnnnnnnnnnnnnnnnnnnnnnnnnnnnnntccagannnnnnnnnnnnnnnnnnnnnnnnnntgnnnnnnnnnnnnnnnnnnttctatttcctacaaactttaaatgctgtttttatagatgtggtaagaggcaacacaagcacagatagttgtatagactttatttaatttatacatatcaagaaaagtgcaatttcatgctgaatgaagcgtaggaacttgacaagcccataggtagctatcgttcttagtatagggaattacgttcatatgaatttcctgattctcaggtgactaaaaagctagcattctatgtattaaccttacaacaaactctggaagtttgagttttaaaaaccaaactttgacataaccttattttcttgtatttgcccccttttttaaataaaaggtgaataaaaagaaagaatnnnnnnnnnnnnnnnnnnnnnnnnnnnnnnnnnnnnnnncgttctcaacccctaagactagttttctttgctctctgtaattacagccttga

SEQ ID NO: 18441 - DNA, 792 bp, Macaca Fascicularis
  misc_feature (1)...(792): n = A,T,C or G
agcaggcgggaangncnctgtgaaagctgcccgagaagggctcacatgccaatatgatctgtctaagtgaaaggctgttcaaggctacaagcccccggggagagccccaggatggactctactgcatccggaactcctctaccaagtcggggaaggtcctggttgtatgggatgaagcctccaacaaagtgaggaactatcgcatttttgagaaggactctaagttctacctggagggcgaggtcctgtttgtgagtgtgggcagcatggtggagcactaccacacccacgtgctgcccagccaccagagcctgctgctgcggcacccctacggctacaccaggcctaggtgatgcctgcccgtgtggctgccaggccaaggcagtcacaggggccctgaccccaggccacacagatggacacgggcccacgtgggactgtgagcaggagcaaggtcctgcttgcctagggcctctgtgatggacatctnnnnnnnnnnnnnnnnnnnnnnnnnnnnnnnnnnntnnnnnnnnnnnaccaggctccaggctccagaggacaaggggactctgttgccccacactaacttgccctgtcccaaccccagaaacccaggaccaagtcgtgcctgggctccgaggacaagaacagtggtccccccannnnnnnnnnnnnnnnnnnnnnnnnnnnnnnggcagggccagggcagctgggtggggccggggctggccctgggaccccgaggaacgctaagacacaggctccagtaggggctgtgcctccaaaaagcag

SEQ ID NO: 18442 - DNA, 732 bp, Macaca Fascicularis
  misc_feature (1)...(732): n = A,T,C or G
acgtgnnnnnnnnnnnnnnnnnnnnnnaggccattgtggacctgacagggctctaactgcccctgctggtgtctgggggttgggggcagccaggcacagccggctcactgaggggccaccacactgggccagggcctcagtgtacaagtgggcaggggccgcgcttgggcgcttgggagggtgtcggcctgcagccaagttcactgtaatgggggaaggagccaccagccagtcctcagatttcagagactgtggaggggcctggaagacaggcttagcccagggctgtggtgggattggctgagggttttcaggtgcttcccagcacaagctgcccttgctgtcttgtgcagtgaagggagatgccctgggtggggacacgtggtgtgggagcacatcccagcagtgcccgtgcagcaggagcgcagtggatgaccttgcgtccctcgggcatgacaaaggaggagggctgctccaggagaagggcctcctgctggccagagcgaggagggccgagtggcttggttctcccctctggcccctggagagaagggagtgttcttagacccctgggtgcttgtctgcacagagctctggtctgtgccaccttggccaggccggctgtgggagagggtctggtcccacgctgcctctgctcagaccactgtgtggggggtgcacagcacagcctgcgggtgaaatgtgagagctcgccatcgngctcacgagaca

SEQ ID NO: 18443 - DNA, 697 bp, Macaca Fascicularis
  misc_feature (1)...(697): n = A,T,C or G
ggtccatgtttggctgnnctgagactcatctcttcctaaccctgagagtccacctnnnctgggaagcttccctgattgattccacctggcttccatctccctattgactggggcttttcttagcacttgctttgccatctgctctgggggtgctgccgagccagcaagggaagtgggaagaggctgggcccagtggcaggcaccagggcggcgggggagcctccaccaacctcttgcttctccaggctgtaccttcacagtcctagtgcacacaagannnnnnnnnnnnnnnnnnnnnnnnnnnntccaggtcatcaaggatttcccctggatcnnnnnnnnngagcaggatgtccacatgcatgacccnnnnnnnnnnnnnnnaaaaaccatgacgtcggacattttaaagatgcagctttacgtggaagagcgtgctcacaaaggcagctgagggggcatctgccacctcactgatgcnnnnnnnnnnnnnnnnnnnnggatccccgcctagggcagtgctgcatggctgccctgattccaagtgctcttatcgcctgtgtgtgtggatcgcccgccccagcccggggccgctcaggtctgcttggaggatgcctcccccaggaggcagtgaaggatgccgcaacctcgacttctcagcctcctggggttccgccggcaaacactgtctgtctca

SEQ ID NO: 18444 - DNA, 634 bp, Macaca Fascicularis
cagaacttgaagactattttctaatttctatttttttttctatttcaatgtatttaaactctagagacggtttttatcttggattaacttagataacttttatagtaggagttatattgcttataatttaatgtacagtattgaaactggtgagttctgattattaaatattctctgtaaatcagtaaacatgtataaagtgtttgtaatgtcataattggtcataatttatttacgaagacagcaaaaaactttgatttcatgatggggaaaactattagccaaagtttaatttcttacactgtggttgtcaaaaatactgatttgctataatgatatatacatacaagatatttaacttaatatcttagacaagagttctggatacaattttgggatctagttccctggaaaagctgctgtatttttaatttttaatggaatgtagcttttaaaatcctgttactggcatcaacaaaaggaattatgccatgagaccttacagttgtacttaaaagccattcagttcagctattgggagttcacgatgaattagcatatgccagaaaggttgctaaccttaacatctgagagcagtaacactgattttatctgctgtatgagactttgtgca

SEQ ID NO: 18445 - DNA, 739 bp, Macaca Fascicularis
  misc_feature (1)...(739): n = A,T,C or G
cannnnnnnnnnnnnngtggtccatgtcatcaccaatgtnntgcagcctnnggccaacagacctcaggaannnnnnnnnnnnatnnnnnnnnnnnnnnnnnnnnnnnnnnnnnnnnnatcagcgttttccagggcnnnncagnnntctgtgcggctagcccctgtctatcagaggttattagagaggatgaagcattagcatgaaggactacaggaggaatgcaccacggcagctccccgccaatttctctcagatttccacagagactgtttgaatgttttcaaaaccaagtatcacacttcaatgtacatgggccgcaccataatgagatgtgagccttgtgcaggtgggggaggagggagagagatgtactttttaaattgtgttcctctaaacatggctgttaacccactgcatgcagaaacttggatgtcactgcctgacattcgcttccagaaaggacctatcccaaatgtggaatttattgcctatgccaagtccctggaaaaggagcttcagtattatgnnnnnnnnnnnnnnnnnnnnnnnnnnnnnnnnnnnnnnnnnnnnnnnnnnnnnnnnnnnnnnnnnnncttgcacagctggagaaatggcatcattataagctatgagttgaactgttctgtcaaatgtgtctcgcatctacacatggcttggacgcttttatggggccctgtccaggtagaaaagaaatggtacgtagagcatgtagagctc

SEQ ID NO: 18446 - DNA, 1090 bp, Macaca Fascicularis
  misc_feature (1)...(1090): n = A,T,C or G
ggggtagaggtgagatgggtagacggttggctgccaggctggacgcagcacctgtccctcccctccaaccatcccctgtgcctgtctccagttccccagctggcacctggacaaggcccctcggacactcagcaccagcacccaggacctgagtccccgctaatatccagtgacctgtgttggcctcagctggtgggggacggggggggtctatcatctcttaggtgccccctgccctcttctgcgattaaaggccgtggatgtgacagtgaggaatgtcacctgagtttataagaccttccagcaccacccccgctacggcctcagagctgctgggacccagggccaggcaagactcaggagtcaccaggaatcatttatggccctgcccatcccgctcagagctgctgannnnnnnnnnnnnnnntctgcagcgtctcctctgattccagctgctccaggctgagcaaggacaggcccagctgatcctcccggtggaagggctgtgccatctgccgcaggaagtacttggccacctggacaccctcatccacagtcaggttgaggttggcatctgtgaggtgctcctggatccagcggggcagtttcccccgcttgtccccacgggcaaaccgcttgtcggcaaagaccatgaggccgtagtccgtcttgccccggatggcccgacccacacactgggccgcatggcgcatggcatnnnnggtgagaaagtcattctcacgaatctggaactggtcccgcaggtattccagccgtgccttgagaatgcgactctgtgtgtagacgtaggggacgccaaacatgatgacggcccgcccgtagtggtgcactggtgggcagaggaggggggtcgaggggagttacaagtgtggctggtgggacagggacagcctcacacgccccaggatgctgtgtctgagtgggagagagagggtatgctcccgccgggtgccgaagtcgattccctcagacactttgccccgggccactgacagcaggatggccccgcgtccattctcgcaggcctcctggtacttctccagggcgnnactggtttcggcaccatcct

SEQ ID NO: 18447 - DNA, 651 bp, Macaca Fascicularis
accaccagcgcatgcaggaatgccagcgggagctccagagcctgctgagggaggagcgcctggccggagccaccctcctcatctttgccaacaagcaggacctgcctggagcactgtcctctaacgccatccgcgaggctaacagtagccagcacaaacagagtgctttcagtatgctctgctccttgcatggattaactcatttcattctcacaacaacctcatgaggccctggagctggactccatccgcagccaccactggtgcatccagggctgcagcgccgtcaccggggagaacctgctgccaggcatcgactggctcctggatgacatttccagccgcatcttcacagctgactgagccactccagatgtccctccacctagcagtccaggtcccccaaccctcaccaaacactatccatgggggcatgggagtcagccagccaaactaacactccccctcctccaccccaacctgctgctgctactgctgcccgctgctgctctgtggccacccagctcctgtggcgggagggctgtgccctggctgtttccctggctcctggcctggcctttggctaccataccaagaaaagaggactgggcggggaggagctgctactgctgctaccgaggctgtgggcct

SEQ ID NO: 18448 - DNA, 629 bp, Macaca Fascicularis
  misc_feature (1)...(629): n = A,T,C or G
agagaagccacacggagactcaaattcacannnnntctatccacatcgtgaccaaaggaacccccccgccccccggtgtctgatcagggctgtggcatcacgaaacattggatcatgacatgtcaggcgatgcttggaaaagcccagcatgtatgtatgcacacattgtgtgtgtgggaaggacaaagccactcgcacaagaaagtgcaccaggactgttctccaaggaactgcacctgtccagatagtactctgaggtcattggagagaacttctgcatgggcaagcctgagagggagaggaaacaaaagctgtgnnnnnnnnnnnnnnnnnggtttgcagatgggtgccctgaatggaactactttaaccaatccatagggacctctggtatgatttcctctctttttaaaggaacttcgtgacactaaacattagcccaaaggacttcttagccttcaaatgggagatacctttggcctgctcccacaccaaagccatgtgggtggaagtcagatggcccccctgattctgcagagggccagaagaatgagaggaaggctgctggcagggaaatcaaggggacgagcctagaacagcaccagcttccctgatgtctgcagtcacgg

SEQ ID NO: 18449 - DNA, 768 bp, Macaca Fascicularis
  misc_feature (1)...(768): n = A,T,C or G
gcagggccacatccctgtgttttgtgtaccctcttgattttgcccgtacccgtnnnnnnnnngatgtgggtaaagctggagnnnanagggaattccgaggcctcggtgactgcctggttaagatctacaaatctgatgggattaagggcctgtaccaaggctttaacgtgtctgtgcagggtattnnnnnnnnnnnnnccgcctacttcggtatctatgacactgcaaannnnnnnnnnnnngatcccaaaaacactnnnnnnnnnnnnnnntggatgatcgcacagactgtnnnnnnnnnnnnnnnnnnnnnnnnnnnnnnnnnnnnnnnnnnnnnnnnnnnnnnnnnnnnnnnnnnnnnnnnnnnnnnnnnnnnnnnnnnnnnnnnnnnnnnnnnnnnnnnnnnnnnnnnnnnnnnnnnnnnnnaaggaggcaaagcttttttcaagggtgcatggtccaatgttctcaggggcatgggtggtgcttttgtgcttgtcttgtatgatgaaatcaagaagtacacataagttatttcctaggatttttccccctgtgaacaggcatgttgtattatataacatatcttgaacattcctgacagactcctggctgtcagtttctcagtggcaactatttactggttgaaaatgggaagcaataatattcatctgaccagttttctcttaaagccatttccnntgatgatgatgggactcaattgtattttttatttcagtcactcctgataaataacaaattgagaaa

SEQ ID NO: 18450 - DNA, 161 bp, Macaca Fascicularis
  misc_feature (1)...(161): n = A,T,C or G
caggtcagtgcatcgagttctgtttccgtggaaaatgtgcaccttggaaactgcatgacagcccctcagcagggtccccgcggccaccgcgacacaggctcagcagcaagttcctccagcacgaagctggcctgcccgggcccaggtgtgaggnancgttc

SEQ ID NO: 18451 - DNA, 745 bp, Macaca Fascicularis
  misc_feature (1)...(745): n = A,T,C or G
attacaaactctatatctgtaatgtaaagtgtttgagttttaaattgggctgttatgatgagtagtttattttgaaaaagctctatgagctctaagtaactgcatggttttttgtttcatgtaatataggacacccttcacattctcaaggaatatattccaaaacatttttgtgaatatctaagttnnnnnnnnnnnnnnagcatgatacagtaaggtgtaattacagaatttacaaaatgtaaatggcctctagagagttttatggaatnnnnnnnnnnnnnnnaggcagnnnnnnnnnnnnnnnnnnnnnnnnnnnnnnnnnnnnnnnnnnnnnnnnnntaccagccctcccacttctgaagttnnnnnnnnnnnnnnngaaatgtagaatttattatttgtcatgttttatttttnnnnnnnnnnnnnnnnnnnnnnnnnnnnnnnnnnnnnnnnnnnnnnnnnnnnnnnntgctctagcatcagtaagtatttagcagaaactaactccgtaatgaatnnnnnnnnnnnnnnnnnnnnnnttgttcaagcacacttaataagtagcctattttttaaatgtctttttaaaatgtaaatatttggatgaagtttttctttgttttgatatattcatttgctacacnnnnnnnnttttcagaattcatcttttgaacaacttggtttcagaatatgtaaaatgactttaaggatcttgtgtatcaaacctgtccccagatgt

SEQ ID NO: 18452 - DNA, 739 bp, Macaca Fascicularis
  misc_feature (1)...(739): n = A,T,C or G
gatgaggtggtgtggccaggagnnacttctatgcctgattacaagccaagtttccccaagtgggcccggcaagatnntagtaaagttgtacctcccctggatggagatggacggagcttgttatcggtgnnnnnnnnnnnnnnnnnnnnnnnnnnnnnntctcccagggaagggcttttccaggatgaaggaaggatgagaccctgaaatctgggcctcagtattttgtttccctggttcctgctctccctgttggcacactgattcagctatgggaggatggaagtaagaattccgccttgggtagaaggagttctggtttcctgnnnnnnnnnnnnnnnnnnnnnnnnnnnngtccactatcacatnnnnnnnnnnnnnnnacatctctccctctagcaaatgctgcactacgatcctaacaagcggatttcggccaaggcagccctggctcaccctttcttccnnnnnnnnnnnnnnnnnnnnnnnnnnnntcgactctgatagccttctcgaagcccccagccctaatctcaccctctgctccagtgtgggcttgacctggcttggccttgggctatttggactcaggtgggccctctgatcttgccttaaacactcaccttctagtcttggccagccaactctgggaatacaggggtgaaagggaggaaccagtgaaaatgaaaggaagtttcagtattagatgcacttaagttagcctccaccacccttcccc

SEQ ID NO: 18453 - DNA, 745 bp, Macaca Fascicularis
  misc_feature (1)...(745): n = A,T,C or G
taagcagaagcattactaggatgtaaaaggagntcgcgccnnnnnnnnnnnnngttaaacctggggggatttttgtgtgttctttccctttctttttcagagctgttgcgcagccattggtacctgtattggggaaacatagcatacaagcaagaagcttacagcctcagtggcgaaaattttttcatgtcagagaccgagaactcttgcagtcgtttatgtcatcccttcttctccagacagaagataccaaaannnnnnnnnnnaagatctcttcatcttattgataaagccactaataagccaaaatgtctgtcaatgtcaaccgcagcgtgtcagaccagttctatcgctacaagatgccccgtctgattgccaaggtcgagggcaaaggaaatggaatcaagacagttatagtcaacatggttgacgttgcaaaggcgcttaatcggcctccaacgtatcccaccaaatattttggnnnnnnnnnnnnnnnnnnnnnnnnnnntgatgttaagaatgaccgttacattgtcaatggatctcatgaggcgaataagctgcaagacatgttggatggattcattaaaaaatttgttctctgtcctgaatgtgagaatcctgaaacagatttgcatgtcaatccaaagaagcaaacaataggtaattcttgtaaannnctgtggctatcgaggcatgcttgacacacatcataaactctgcacattcattctcaaaaacccac

SEQ ID NO: 18454 - DNA, 747 bp, Macaca Fascicularis
  misc_feature (1)...(747): n = A,T,C or G
ctactacctgaagatgngatcactcacaccaaagccttgacccctcccggcctgtgacctttgtaaccaactccaactatgcagcagacaagggggctccgtatgtgnnngtgatctgtttgaacagctactactcttggtatcacgactatgggcacctggagttgattcagcagcagcttaccacccagtttgagagctggtataagacgtatcagaagcccattattcagagcgnnnnnnnnnnnnnnnngattgttgggtttcaccaggacccgcctctgatgttcactgaagagtaccagaagagtctgctagagcagtaccatgtggttctggatcaaaaacgcagaaagtacgtggttggagagctcatctggaattttgccgatttcatgactgaacagtcaccgacgagagtgctggggaataaaaagggggtcttcactcggcnnnnnnnnnnnnnnnnnnnnnnnnnncttttgcgagagagatactggaagattgccaatgaaaccaggtatccctactcaatagccaagtcacagtgtttggaaaacagcccgtttacttgagcaagactgacaccacctgtgtgcccttcctcccagagtcagggcgacttccacagcagcagaacaagttcatggcagaccagaacgtttctggcctgggttttatgctcatctgtgctagcagggaccactagaggggaaatagaagattttctagtaggaaataaagagt

SEQ ID NO: 18455 - DNA, 680 bp, Macaca Fascicularis
  misc_feature (1)...(680): n = A,T,C or G
gccaggggccagtagnnnagctggaggcttcttggatggagccaaatttcttttgatcttagaagacttagaggaaaccgccttgcggtcctagggcacagtagactatgccacagagaggaccgaggggctggcttgtggtcaaaaggcccagagctgtctgagcccaaggnnnnnnnnnnnnnnnnntttaggtaagaattggagctcggagacttagactaggaggtgctccagacactccttgagtcaggtaaagttattttcaaacccccatcttgaggcaaattggcaggggctggagcataagtaatagatgagactgaggaagttagctctgatatagnntgaaacgtcagagaatctagagctaaagaagcctcaaaggacattaggaccaaatcttccaatatgtagataagaaacaaaggtcctggccgggcacgatggctcacacctgtaaccccaacactttgggaggctgaacacctgaggtcaggagttcacgaccagcatggccaacatggtgaaatcccatctctactaaatatacaaaattagccaggcgtggtggcacgtgcctgtaatcccagctacttgggagtatgaggcaggagaatcatttgaacctgggaggtagaggttgcagtgagctgggatcatgccactgcactctagcc

SEQ ID NO: 18456 - DNA, 1142 bp, Macaca Fascicularis
  misc_feature (1)...(1142): n = A,T,C or G
gattttttttttcannnnccccatcacactcacacgcacgctcacactttttatttgccataatgaaccgtccagcccctgtggagatctcctatgannnnnnnnnnnnnnnnnnaactcacaaccctaccaatgctactctcaacaagttcacagaggaacttaagaagtatggagtgacgactttggttcgagtttgtgatgctacatatgataaagctccagttgaaaaagaaggaatccacgttctagattggccatttgatgatggagctccaccccctaatcagatagtagatgattggttaaacctgttaaaaaccaaannnnnnnnnnnnnnnnnnnnnnnnnnngcagtgcattgtgttgcgggattgggaagggcacctgtgctggttgcacttgctttgattgaatgtggaatgaagtacgaagatgcggttcagtttataagacaaaaaagaaggggagcgttcaattccaaacagctgcnnnnnnnnnnnnnnnnnngacctaagatgcgattacgcttcagagataccaatgggcattgctgtgttcagtagaaagacatgtaaacgaaggcttacttgattgtggcatttagagggaactcttggtacctggaaatgtgaatctggaatctctaccnnnnnnnnnnagtagtgatggattcagtactcctcaaccannnnnnnnnnnnnnnnnnnnnnnnnnaacaaaaaagaaatctctctataaaatgaataaaatgtttaagaaaagagaaagagaaaaggaattaattcagtgaaggatgattttgctcctagttttggagtttgaatttctgccaggattgaattattttgaagtctcctgtctttttaaactttttcaaaataggtctctaaggaaaaccagcagaacattagcctnnnnnnnnnnatctttttggggagcacactcttccattatgcttggcactagatctccctgtggtgggatttttttccctttttttgtgggggaggggtggtggtatatttttcccctcttttttcctttctctcctacacctcccttttccccctgatccaagttgtagatggaatagaagcccttgttgctgtagatgtgcgtgcagtctggcagccttaagc

SEQ ID NO: 18457 - DNA, 666 bp, Macaca Fascicularis
  misc_feature (1)...(666): n = A,T,C or G
tctcatctcagcggtcagagacaaactgagatggcggatgaaggaggaaatggatcgtgcccaggcagagctcaatgccctgaaacgaacagaagaagacnngaaaaagggtcaccaaaaactggaagagatggttacccgtttagatcaagaagtagccgagggtgataaaaacatagaacttttgaaaaagaaggatgaagaactcagttctgctctggagaaaatggaaaatcagtctgaaaacaatgatatcgatgaagttatcattcccacagctcccttatacaaacagatctcgaatttgtatgcagaagaaaacgctatagaagacactatcttttacttgggagaagccccgagaaggggagtgatagacctggatgtcttcccgaagcacgtacgtcttctgtcccgtaaacagttccagctgagggcactaatgcaaaaagcaagaaagactgccggtctcagtgacctctactgacttctctgataccagctggaagttgagctcttcttaaagtattcttttcttctcttcctttctcttatcagtaggtgcccagaataagatattgcagtttatcattcaagtgtaaaatattttgaatcaataatatatattctgttttcttttggtaaagactggcttttattaatgca

SEQ ID NO: 18458 - DNA, 789 bp, Macaca Fascicularis
  misc_feature (1)...(789): n = A,T,C or G
tccagtaagccaatannnnnnnnngattctttatctgcatcgttgctgtttgttactatgaattaaatgaacctcatggaaaggttgaagtatatacttttgtgattttctaatgagttttccatggtgctacaaataatccagactactaggtctggtagatactaaagctgggtactaagaaatgccatttgcatcctctcagtcactcctgaatattctgatttcatacatacccagggagcatgctgttttgtcaatcaatataaaatatttaggaggtctcccccacccccaggaggttatatgattgctcttctctatgagagaaacaaattcttgttaatcttaacatgctttttagctgtggctgtgatggattttatttttccttaagtctaggtcaagctgtgtaaaagtcatttatgttatttaaatgatatactgtactgctgtttacatggacgttttgtgcgggtgctttgaagtgccttgcatcagggattaggagcaattaaattattttttcacgggactgtgtaaagcatgtaactaggtattgctttggtatataactattgtagctttacaatagattgttttatttgagtggggaaaataccatttaaattatgacagacatccactagagatgggtttgaggattttccaagcatataataatgatgtttttcctaacatgacagatgagtagtaaatgttgatatatcctgtacatgacagtatgagactttttcattaaataatattgaaagattttaaaattca

SEQ ID NO: 18459 - DNA, 751 bp, Macaca Fascicularis
  misc_feature (1)...(751): n = A,T,C or G
gtacgcaggccccatggaacgggcaggggcagaaagcatccttgccaaccgnncngacgggactttcttggtgcggcagagggtgaaggatgcagcagaattaccgtctggttccagatataacgtnnnnnnnnnnnnnnnnaaaatcatgacagcagagggactgtaccggatcacagagaagaaggctttccgggggcttacggnnnnnnnnnnnnnnnnnnagcagaactccctaaaggattgcttcaagtctctggacaccaccttgcagttccccttcaaggagcctgagaagaggaccatcagcaagccagcagtgggaagcacaaagtattttggcacagccnnnnnnnnnnnnnnnttctgcgcccgggaccgatcagagnnnnnnnnnnnnnnnnnnnnnnnnnnnnnnnnnnnnnnnnnnnnnggacagcaaggctggtggcgaggggagatctatggccgggttgnnnnnnnnnnnnnnnnnnnnnnnnnnnnnnnntattctgaatactgctgagccctggtgcattggcagagagatgagagactccaggctctgagcccggcgtgggcaggcagcagggccaggggctgtgacagctcccggcgggtggagactttgggatggactggaggaggccagcgtccggctggcggtgctcccgggatgtgccctgtcacggttaatttataacaccccgatttcctcttgggtcccctcaagcagatgggctcaaggggg

SEQ ID NO: 18460 - DNA, 728 bp, Macaca Fascicularis
  misc_feature (1)...(728): n = A,T,C or G
ctgcgggctgaccgcatgangggcatcctcacccgcnnnntgccnnnnnnncagctgcttttcctcannnnnnnnnnnnnnnnnnnnnnngagaaggaactcagtgctgcttggccccgctgattcctctttgggatggtgcttctgagggcaagcagagggtggacacacagccagatgaagcttggcatctactgcctgctcctagttctgatgtactgctgtaccaggacaagtgggcgacacaagcctgcagaaagggggcagagggtggaggaggtcctgcctatcctcannnnnnnnnnnnnnnagaatatcctgagcctagagctgctgtgtaacttagaccattgcagtgcggcagccacgcttgtccttgaccccaccttcctccatccctgccagccctagtgctagggtaaggagctgactggaactcagcccactcttttccttccaaacccacagtccaggccgggcgtggtggctcacgcctgtggtcccagcactttgggaggccgaggtgggtggatcacctcaggtcgggagttcgagaccagcctggccggcatagtgaaaccnnnnnnnnnnnnnaaatacaaaannnnnnnnnngtgtatggcacccacctgtaatcccagctactcaggagggtgagacacgagaatcacttgaacctgggaggcagaggttgcagtgagctgagagtgtgccactcactccagcct

SEQ ID NO: 18461 - DNA, 772 bp, Macaca Fascicularis
  misc_feature (1)...(772): n = A,T,C or G
acgcaagatgggactgcgtnntggggtgagacatcccctcnnnggagatctaaggaaacttctcacctacgagtttgtaaagcaaaaatacctggactacagacgagtgcccaacagcaaccccccagagtatgagttcctctggggcctccgttcctaccatgagactagcaagatgaaagtgctgagattcattgcagnnnnnnnnnnnnnnnnnnnnnnnnnnnnnnnnnnnnnnntcatggaggctgcagatgaggcctnnnnnnnnnnnnnnnnnnnnnnngctgaggccgaagcccgggctgaagcaagaacccgcatgggaattggagatgaggctgtgtctgggccctggagctgggatgatattgagtttgagnnnnnnnnnnnnnnnnnnnnnnnnnnnnntggagatccctggtccagaattccatttaccttctgggccagataccaccagaacgcccgctccagatttcctcagacctttgctggtcccattattggtcctggtggtacagccggtgccaactttgctgccaactttggtgccattggtttcttctgggttgagtgagatgttggatattgctatcaatcgcaatagtctttcccctgtgtgaggctgaagcctcagattccttctaaacacagctatctagagagccacatcgtgttgactgaaagtggcatgccagataaatttatttgctgttccttgtctactgctttttttcccnnttgtgtgctgtcaagttttggtatcaga

SEQ ID NO: 18462 - DNA, 729 bp, Macaca Fascicularis
  misc_feature (1)...(729): n = A,T,C or G
aaacagtatctgggactcgtttgggcagaatattattttgttgccaattattgtttaccaagtataatgttgctatttagcaattgtgcttggttttaaagaaattctccttgggaaaaaagtatcctttttaaattttacttcccataagtgtannnnnnnnnacatagctattgtgaaacctttaaataaattggtttgagtgctttttaagccccagataaataatgttttaaagttatccccttgctactttactgatacctttatcattcctgagacagtctgctaatttaaaaatgtagcattccatttgtatttatttctctctcttgccaaaaagattttctaatactgcttgtaccagccacagaaagatccaaaacactactcagctctcttgcactgaggaaattttttcccccnnnnnnnnnnnnnnnnnnnnnnnnnnnnnnnnnnnnnnnnnnnnnnnnnnnnnnntgatagctaattagttctgtgctggctgcaaagaattgagatttagatggttttaaatactcagcagattgtcttcctttatattgtgtcttttttatgttgcatgttgcttttgttatcagcctgattttttgctcagtatatgagagttctgctgatgttttgtttattgagcagacatatcttcattaagagtttttggaaaactcatcaaatttgatgaatacattttctgcataacccattgga

SEQ ID NO: 18463 - DNA, 733 bp, Macaca Fascicularis
  misc_feature (1)...(733): n = A,T,C or G
gactggnnnnnnnnnnnnnnnnnnnnccgtgccatgagaagcgaaaaggacgcacctgtggaccatctgggggtcgagcactgctatgactccagtgcccccccaaaggtgcnnnnnnnnnnnnnnnnnnnnnnnnnnntgctctccagccagaccannnnnnnnnnnnnnnnnnnnnnnnnnnnnnnnnnnnnnnnnnnnnnnnnnnnnnnnnnnngcatcctgcagacagatgatgccacgctgggcaagctcatcnnnnnnnnnnnnnnnnnnnnnnnnaaggtgaaatacatcaagcagaccagcaccatcctgcagcagcgttatggaggggacatcccagcctccgtggccgagctggtggcgctgccgggcgttgggcccaagatggcacacctggctatggctgtggcctggggcactgtgtcagnnnnnnnnnnnnnnncgcacgtgcacagaatcgccaaccggctgaggtggaccaagaaggcaaccaagtccccagaggagacccgcgccgccctggaggagtggctgcccagggagctgtggcacgagatcaacggactcatggtgggcttcggccagcagacctgtctgcctgtgcgccctcgctgccaggcctgcctcaaccaagccctgtgcccggctgcccagggtctctgatggccgagcagctcccgcctcggtgctgctgtcgccacagtctgtgaagtggctttacgcttca

SEQ ID NO: 18464 - DNA, 1024 bp, Macaca Fascicularis
  misc_feature (1)...(1024): n = A,T,C or G
aatgtaaagacannnnnnnnnnntgagcnnnnnccacacacaacaaaacctgatttgggagagtcgccactgagtacctgctgggctgcctgtgggctccgctcttccctacaagtgaaactgnnnnnnnnnnnnnnnnnnnnnnnnnnnnnngaggacggcatagtcagcacctgctgtgagtggctctcccaggactgggccctcaggatccaccaggcagcggagacgtgtggaattagagtattttgagatgtcctttctttacaaaatgatggggtcttgggcatttcgcatcactccatttctcctcagactttcggaatcacacaggccctttccgtggatttcatttggggaaaaaacaacgtagttttgtttttgttttcagcctannnnnnnnnnnncttttgtctgtcttgttaaagttcannnnnnnnnnnnttggcatctgcacatttccgtgttannnnnnnnnnnnnnnnnnnnnnnnnnnnnnnnntttcnnnnnnnnnnnnnnntggacaggtggnnnnnnnnnnnnnnnnnnnnnnnncctgagaacccagggatgagctggtgccgggaaggaactgccgggactcaccgagctgcacttaactgttctctttctggcgactttttgttgtttgtttctttgtgttgactttgtccctggcaaaattttccactctaagtaaaataagtctcctaagtattgtgtatgtttaaaacgacagaaccatttctacttaatttggaaaaaaagattcagtcttttggccgggcgcggtggctcccgcctgtgatcccagcactttgggaggccgagacgggcggatcactaggtcagnnnnnnnnnnnnnnnnnnnnnnnnnnnnnnnnnnnnnnnnnnnnnnnnnnnnnnnnnnnnnnnnnnnnnnnnnnnnnnnnnnnnnnnnnnnnnnnnnnnnnnnnnnnnnnnnnnnnnnnnnnnnnnnnnnnnnnnnnnnnnnnnnnnnnnnnnnnnnnnnnnnnccggcca

SEQ ID NO: 18465 - DNA, 716 bp, Macaca Fascicularis
  misc_feature (1)...(716): n = A,T,C or G
cagacaggattgtgtgagcagcttaaagtagcaaaaaagaactcagtgtaagagaaggcacatacatagttaagaatactaaagtatttttaaaaatcaaggaagcaataaatgttctataatttgcattggaataaatagatctatttagtcctacaaatcaggagtggtgtagagacatccaaatttaaagaaaaaaaccacacaaaacagaatgttaaaaaatgtatgcagatttatggatattaccaatgagaagacatagcatgtaacttctcctatatctctactgtccggcatgtattgttccaaatacgactccctaaatatatacactttgcagaagctctaggcccnnnnnnnnnnnnnnnnnnnnnnttgccgtatttccaggtcaacatagtttccctcactttacacaatcattattcttcaatagtggatcatatccttcaccaagtatcctatttatgttatctagaggttagcagaaaatgaaatgaaggaatttacctaagcagttgggaagaacaaatgttatgcatctaggcaaagattttgaagatacatttgtaagagatatttgtttaaccaaaatatttggaaagtaacaaagaaagacatttaaattttctaaaaatagacttgctcttcgaggaaaagaatacccttgggggaaaaaatataactctagctgtatttcttcttgtcactct

SEQ ID NO: 18466 - DNA, 710 bp, Macaca Fascicularis
  misc_feature (1)...(710): n = A,T,C or G
tagttcagttaacacnnnnctcccaacntgcttcatcattgctgttgnctcacagtggcaggccgctccttggatttgaaagaattcaactttgggaccacacactttgaattcaaaatggaaaacccattccctggacttnnnnnnnnnnnnnnnnnnnnnatgatgatgcttctttgtacgtccttgcttcttttttcagtgatgtaaatttttttaacttaatatgaaaactatccaagtcttcatcatcagccaggattttgccacagcaatttcattctcttatcggaacctgtatgtgtcaaagtatacttcagagtgcaaacattaagcaagtaatatattttacctacagatacttatgaagacattctttagctacctattgtgactaaaagtatataaggctgtatctaactgaaaatgcttgaaataaggctgtaatagaaatattttttcattttttaaaaaaggacctaaattgtttatattgtagtttgtaactcacaaagtagtgagtatttgatattgtatttttattactgtatcattgtcattatgtattgtgtaatactcaggtttnnnnnnnnnnnnnattttgataaattttcagctgatgctccacatggaatttctcttgcaaactgcataagagtactcccgcaaatgagttaccacattgtggatcagactgtacctgatgttca

SEQ ID NO: 18467 - DNA, 1155 bp, Macaca Fascicularis
  misc_feature (1)...(1155): n = A,T,C or G
cagaaggtgcagcagatgaaacagaggctaaatgagaatgaacgaaaaagaaaaaggtggttatattggcaacctattctcactaagatggggtttgtgtcagtcattttggttggcgcttttgttggctggacactgtnnnnnnnnnnnnnnnncctataaataaacaattaattttgcccagcaagcttctgcactagtagctnnnnnnnnnnnnnnnnnnnnaggggtttgtctgcagcaaacgcctcatatcccagaaacggtgcagtagaatagacatcaaccagataagtgatatnnnnnnnnnnnnnnnnnnnnnnnnnggactcttcactgcaggtccctctgaaacccaaactgtaaatggctgtctaaaataaagacattcatgtttgttaaaaactggtaaattttgcaactgtattcatacatgtcaaacgcagtatttcnnnngaccaacatnnngaaatcctttatcacaggatttgcttttggaggctatctggattttaacctgcacttgatacaagcaataaatattgtggttttatctacgttattaatggaaagaaaatgacatttaaataatgtttgtgatgtataatgtactgttgacatgggcagcaacactttatattcttaaacatttcagggtaaatatattttataaatatctatttaatcttttgtagttaactgtactttttaagagctcaatttgaaaaatgttacataaaaaaataaattgtgtgttgattcaattgtactggatacattttccatttttctaaagagaagtttgatatgaggagttagaagtcggaataagcaatttctactatacattgcacttcttttatgttttacagtttcccccattttaaaaagaaaagcaaacaaagaaacaaaagtttttcctaaaaatatctttgaaggaaaattctccttactggcatagtcaggtaacaattggtcaagacttttgtaaagaaattggtttctgtaaatcccattattaatatgttcatttttcatgaaaatttcaatgtagttggggtaaattatttaggaagcaaaagtaagaagcagcattttatgattcatgattttagtttactagactgaagtttgaagtaaacattttcaggtctt

SEQ ID NO: 18468 - DNA, 1049 bp, Macaca Fascicularis
  misc_feature (1)...(1049): n = A,T,C or G
gtatgaaatgcgaagactgncnnagctaaaagtggacannnnnnnnnnntgagatgaacacttnnngagaaacttgacgagtatctctccattttaccattctgaaaacttatcattcaaaaaaacagttttgatgccttctccttttgagggaaaaagggtgctttttattgtataaagcagcgtcttatgtattttgatataccattgtttgaacttccgtctttagctgatagattctcaaatatccttgattttggatgttcagtatgtttgtgagagaggtttctgggaagactctcttttcgccctagggaaaaagcaaaatatcaatgtttggttgactgtgtaaagctcagtgtgtaagaacatctttttgtctaggttttctttctgctctttattgaagacaaacactcaccaaaaagaaaaataaaagaaaccaattttctttggcaagagtattacttaatattctggcctcctaaaggttccctagttagtacttggactcctgtgctaattgtcagcttacatatcattgtatagagactgtttattctgtaccaaactgatttcaaaagtattacattgaaaataaaccggtgactgtttttcttcataaagttctgcgtttggcatcttcactctttccagaatgtatctgtacatcagaaatgtcactattccaagtgtctttttagtgtggctttagtatggcttccttttaatattgtacatacattgtatctttgttttatggtaataagtaataaaaatgtagacttcatattttgtacaaaatgtcctatgtacagaataaaaaaattcatagaaacagcaaatataggtaagtggcacaattatttttctttagaaaatacctgtaactttatgcattagtgaaatgttaagtaccgacatattttctaacattttgtnnnnnnnnnnnntttgttttgaccttgtttatgnnnnnnnnnnnnnnnnnnnnnnnnnnnnntatgctcttttatctaattttcaaaaactaagagacggtgtatcat

SEQ ID NO: 18469 - DNA, 672 bp, Macaca Fascicularis
  misc_feature (1)...(672): n = A,T,C or G
tgccgcacccggnnnnngnnnnntggnnnatggctttcccgtaccagtacccgccacccccgcacccctacaacccgcacccaggcttcccggagctgggctacagctacggcgggggcagcgccagcagtcagcacagcgaaggcagtcggagcagtggctccaaccgtagcggcagcgatcggaggaaggagaaagacccgaaggccggggactccaagtcggggggnnnnnnnnnnnnnnnnnaccacacgacacgcagcagcctgcgggggccgcgggagcgggcgcccagcgagcgctcaggcccggcggccagcgagcacagccaccgcagccaccattcactggccagcagccttcgcagccaccacacacacccgagctacggtcctcccggagtgccccctctctacggcccccctatgctgatgatgcccccgccgcccgcggccatggggcccccaggagcccctccgggccgcgacctggcctcagtgcccccggaactgaccgccagcagacagtccttccgcatggccatgggaaaccccagtgagttctttgtggatgtgatgtgagcagggcccctccctcacctccattccgctcccaccccagccggctgcgttcctctctccatccgtccgtcttttttactttgtctggtac

SEQ ID NO: 18470 - DNA, 800 bp, Macaca Fascicularis
  misc_feature (1)...(800): n = A,T,C or G
caaacagtggtgtgttnctaaatattaatgggggggcttgattcagcaaagccacaaacttaacgttgaaattttcttcaggaattttctagtaacccaggtctaaagtagctacagaagggggaatattatgtgtgattatttttcttcttatgctatatatccccaagtttttcagactcatttaagtaaaagctagagtgagtaaggaatagagccaaatgaggtaggtgtctgagccatgaagtataaatactgaaagatgtcacnnnnnnnnnnnnnnnnnnnnnnnnnnnnnnnnnnnnnnnnnnnnnnnnnnnnncttgacaccnnnnnnnnnnggatgcacattttcatatgtagaccagtttcctcttggtttcctcagttaagtcaaaactacatgttcctctttccccatatattcatatatttttgctcgttagtgtatttcttcagctgttttcatgttgtttctttcctgtctgtgaaatggtgtgttttttgttgttgttttttttaacttgggaccaccaagttgtaaagatgtatgtttttacctgacagttacaccacatgcagactgtcaagttgagaagagtgaatcaataacttgtatttgttttaaaaattaaattaatccttgataagagttacttttttttaggagttagtccttgaccactagtttgatgccatctccattttgggtgacctgtttcaccagcaggcctnnttactctccatgactaactgtgtaagtgcataaaatggaataaattgcttttctacataacccc

SEQ ID NO: 18471 - DNA, 590 bp, Macaca Fascicularis
ccatcccacataggctcctgtgcctgtccccacctgttggccaatggagctcaagaacaagctgttgctgccagataaagaagcaaagcctgctccactgcccaccccaggcccccttcccttcctccaccaggctgagtggaaaaccctgaagctatgggacaggcttctgttgcctgtgcctacataggagggcactggctatggcaggaagacagtgtgcctgccctgcatcccctgtccctgagtgcaaacaccttgggaatggggttcctggtggtctgacaacgagagacctgcagggccagggtgcccaccccggtctctggtcctgcggagttgggcaggcatggggctagctgcaagcgtccgccttcccccaggaggccactgcagcccagcccttctgtgccctgggctcctcctcactgcacccccatccaccgtactaccctgggacagaggaaacacatgggaggccaccgcatagagcctgtctgtttatagatctctgcctgtcttgtccgtccgtccgtccatccacctgtgggtatatatctgtatatctctatggaacagggaagggacag

SEQ ID NO: 18472 - DNA, 745 bp, Macaca Fascicularis
  misc_feature (1)...(745): n = A,T,C or G
actttccaggatcattttatgtaaagtcacnnnnnnnnnnnnctcaggtnnnnnccagagctgtcgaggttacagtagcnnnnnnnnnnnnnnnnnnnnnnnnnnnnnnnntatattcactnnnnnnnnnnnnnnnnnnnnnnnnnnnnnntgccatgggtctcaaattgatcaaaaagaagacttagaagtctgtagttaagttgaggtttaaactaaaaaatgtttccttgggtcagtggttttgaggtccaatagttaggcttttctcttttgtccttcctcttttggagtgaaaacagttcaattttccttcctctgtgactggtgccatagacacaggtttatagttttaacttacagtattgtttgaactctacctgtttttcttgtcaaacctgagcactccacttgctgaagtttcttatttaattccagagtactgtcctctactctaaggcattacttttaagtgtattatgaaggcaattttcaaaggatataaccggttggggtaattcaaaataaaaaggaaaagatttttttgcaagtaactggtgtctctaagaggaatttttagatgtcagtttnnnnnnnnnnnnnnnnnnnnnnnagagctcttgttattnnnnnnnnnnnnnnnnnnnnnnnnnnnnnnnnataggagacaaagttaggaaacattgatacaagctttgtacagagatttgtacatttgtgtaataggccttttcatgctttatgt

SEQ ID NO: 18473 - DNA, 638 bp, Macaca Fascicularis
  misc_feature (1)...(638): n = A,T,C or G
gctggtacgccggcctgcagaagccctcgtggcacccgnnnnnctgggtgctgggccctgnctggggcacgctctactcagccatggggtatggctcctacctggnnnnnnnagagctgggaggcttcacggaggaggctgtggttcccctgggccnnnnnnnnnnnnnnnnnnnnnnnnnnnnngcgtggccccnnnnnnnnnnnnnnnnnnnnnnnnnnnnnnnnnnnctggtggatctcctgttggtcagtggggcggcggcagccactaccgtggcctggtaccaggtgagcccgctggctgcccgcctgctctacccctacctggcctggctggccttcgcgaccacactcaactacnnnnnnnnnnnnnnnnnnnnnnnnnnnnnnnngggccggcggctgccagagtgagtgcccggcccaccagggactgcagctgcacaagcaggtgccatcagtgannnnnnnnnnnnnnnnnnnnnnnnnnnnnnnnnnnnnnnnnnnnnnnnnnnnnnnnnnnnnnnnnnnnnnnnnnnnnnnnnnnnnnnnnnnnnnnnnnnnnnnnnnnnnnnnnnnnnnnnnnnnnnnnnnnnnnnnnnnnnnnnnnncagagcatgttctcggaacatggaa

SEQ ID NO: 18474 - DNA, 877 bp, Macaca Fascicularis
  misc_feature (1)...(877): n = A,T,C or G
gcccagctggcatttgttnnnnntcattgngggnctagatntaggcactgtgggcactgaaaaacagtcgggaaatctttggagctgtggaaatccagacaaggactgataattcctggcaggggtatgtgcgtgacctactgcagcctcaacctcctgnnnnnnnnnnnnnnnnnnnnnnnnncctcctgagtagctgagaccacaggcgtgtgccaccatgcctagctaattttttnnnnnnnnnnnnnnnnnnnnnnnnntgttttttcccaggctggtcttgnnnnnnnnnnnnnnnnnnntccttccaccttgccctcccaaagtgttgggattataggcgtgagccaccacgcctggccagaggacaaaattttaataaaggtcttagcttaagtagtaatcctacttcattaaccttcctggggcggggtacgcactnnnnnnnnnnnnnnncccagtacatactaagtatgctcagnnnnnnnnnnnnnnnnnnnaccaaattaagtcattcttatcacacccaattaaaagtcaagaagccagggataaaagcaccccaggcacataactttaatctagtaatgtaattctctnnnnnnnnnnnnnnnnnnnnnnnnnnnnnnnnnnnnnnnnnnnnnnnnnnnnnnnnnnnnnnnnnnnnnttgctgaagctctaggaataatttcgcctgcccggttgctcaccagttgtagcttgccagctccnnnnnnnnnnnnnnnnnncaataaactttctcaaagagctatactgacatttcttttgataaaacctccagccttctgtgttgttccgacataccgaggaccacctggtctacatggatgccctgaactgcnnnnnnctccc

SEQ ID NO: 18475 - DNA, 727 bp, Macaca Fascicularis
  misc_feature (1)...(727): n = A,T,C or G
tgtccatatatggcagattgcccaacgtgactacagctggcaccctaccacgtcccaggcgaagggaccaagcccccagagcaacaaggaactgggaaactttttccggagcctgtggggaccttatnnnnnnnnnnnnnnnnnnnnnnnnnnnnnnnnnnnnnntnnnnnnnnnnnnnnnnnnnnnnnnnnnnnnnnnnnnnnnnnnnnnnnnnnnnnnnnnnnnnnnnnnnnnnnnncccaggtggccctaaaggactctccagccacccctgtcccaaccccagtggactctcattgccttcggccctgttccccaaggactcttccacctcccagcactgtcactagtcccaccagccctgaccccaatgtaccctccaccccacaccgactccaccctcatacaggtgctgttcannnnnnnnnnnnnnnnnnnccaccgtgctcaggagccaccagcaaagcgcagaaagggttccaaagggctggaagtctagatggggcaccctggacaaaggaattcccccaagccccttcccctccattccccacttctctctccccatccccacccagtctcatgttggggaggggcctccctgtgaccacctcaagggccaggcacccccaaatcaagcagtcaatttgcacaacaaggtgggctgggggctattgggggagacagnnnnnnnnnnnnnnntatcttcttccctttatacaagaa

SEQ ID NO: 18476 - DNA, 714 bp, Macaca Fascicularis
  misc_feature (1)...(714): n = A,T,C or G
caannnnnnnnnnnnnnnnnnnnnnnnnnnnnntagcctaagtggggggtcgaagtacctaaaacctggtatgacaggcgccgtagggtggggggtgccttctacgtgggatttgtgnnnnnnnnnnnnnnnnnnnatagttttggaacagttgtacagttccttgctattttnnnnnnnnnnnnnnnnnntttcatttacagaggagttgggtgcaaagtctcctttgaaaaatttatgtgagcaaggaaaaggggagaggatctcaaagactgagttacctnnnnnnnnnnnnnnngggtgcgcgacggcccacttgggcagggggcccagatgtgggagcagctggctcagggcctcgctggcatttctcggnnnnnnnnnnnnnnnnnnntctgttcggtgagcaggaagcaaggcagcgaagacaacctccagggcaccgacccgccccccgtgggggaggaggaagtgctcttgtnnnnnnnnnnnnnnnnnnggaaagatgccgggcccccgcccccggctcccccgcacgcatgcatccaccgcggcaggaggaggcgatggagcccgagtagctgcctggatcgctcgacctcgcatgcgcgccgcatcgcctcttgggggctgctgcaccgcgtttccatagcagcatgtcctacggaaacccagcnnnnnnnnnnnnnnnnnnnnnnnnnnnnnggttatctg

SEQ ID NO: 18477 - DNA, 771 bp, Macaca Fascicularis
  misc_feature (1)...(771): n = A,T,C or G
atggcataggcgaggaggagcatgatcaggaaggccgggtgattgtggctgaatttgactcgtttgtgctggtaacaacgtatgtacctaatgcaggccggggtctggtacgactggnnnnnnggcagcgctgggatgaagcctttcgcaagttcctnnnnnnnnnnnnntcccgaaagcccnnnnnnnnnnnnnnnnnnnnnnnnnnnnnnnnnnnnnnnnnnnnnnnnnnnnnnnnnnnnnnnnnnnnnnnnnnnnnnnnnnncacgccacaagagcgccaaggctttggggaattactgcaggctgtgccactggctgacagctttaggcacctctaccccaacacaccctatgcctacaccttttggacttacatgatgaatgctcgatccaagaatgttggttggcgccttgattactttttgttgtcccactctctgttacctgcattgtgtgatagcaagatccgttccaaggccctcggcagtgatcactgtcctatcaccctatacctagcactgtgacaccacccctaaatcactttgagcctgggaaataagccccctcaactaccattccttctttaaacatttttttatgtanactgcattgtatttctcatctataaaaataagaatcctacannnnnnnnnnnnnnncagatttagagttcttttaagcccaagagtttttatttgagggttttttcttttttaagaaaaactgaacaaagactactaatgactttgtgtgaatatccacacaaaa

SEQ ID NO: 18478 - DNA, 1182 bp, Macaca Fascicularis
  misc_feature (1)...(1182): n = A,T,C or G
gtggggttnnnccnnntcaccaccacnannnnctccatttttttctatttttaagattagaggaaaatgaccattaagaaccagaaaaataattaatctgtctggaaaagggaaagctaaggaagactatgataccatacccatctagaaaccaagaactagtttgaaatcgtttatattcatttctgtagcatgacagggatttcaatcacctttnnnnnnnnnnnnnnnnnnnnnnnnnnnnnnnnnnnnnnnnnctctgagaannnnnnnnnnnnnnatcaaaaagcaaagatactaattttttaagccaaaaatctgtactaacacatgtaatttcttaatgtgcctaagttaatttctgtaccaattcaataaatggaattgannnnnnnnnnnnnnnnnnnnnnnnnnnnnnnnnnnnnnnnnnnntctaatgctagtcaccaagagctagactccatctttccaataaaaatgagccctatgtagcactaggcttgaattctaaaattcaaaacaggcatttcattttcttaaggcacacttcctacacacagctatcaggggaaaaagctataaatgtcctgttctttttctgaagnnnnnnnnnnnnnnnaaaatttgttaaagaatatttttaacagctgacttacatgatcattttcctaatacagcaatacagcgacagacctatctgaaaagtctgtttggggacatacttttcatatcttattgattaaagcccttgagccagaaaaaagaaaaaaaaaagtgagacaataaggccatctatagataattaaatatttctctatctaacctggggcaaactcatagtacttgaataaggccaaaaacaaatagaaaatgactgcttaagttttcattctgctattgcaaacatttggaaacttctgcaactctttcaactaacatttttgtccttagtggttttttttttttaaagtctgatacatggaatgtttggtgaaccttcctatcaannnnnnnactggaaactcaaagtacagtccaaatacattgtgttcaatcaccttcannnnnnnnttttcattttgggtgggaggtgggcagatgggttgagggtgggaagaaaatactattatgcagggtgttttgggagtggggagggtaacataaaaagcagtgtacaggaaa

SEQ ID NO: 18479 - DNA, 779 bp, Macaca Fascicularis
  misc_feature (1)...(779): n = A,T,C or G
gggccggccggtggtagccaacatcgaaccactctttgaccggttgctcatnnnctggtctgaccggcggaacccccacgaggtgaagccagcctatgccaccaggtacgccatcactgtctggtattttgatgccaaggagcgggcagcagccaaagacaagtatcagctagcatcaggacagaaaggtgtccaagtacctgtatcacagccgcctacgcccacctagtggccagtcccagagccgcatggcagacagcttgccctgacttcaggagagccctgggcctgtattggctgctccttccctgccaccgctgctgcttctgactttgcctctgtcctgcctggcgtggagggctctgtctgttgctgaggaccaagaaggagaagagacctttgctgccccatgatgggggctggggttgtgacctggacagggggcagccttggaggcaaccgttaccaactgaagctggggcctgggtcctaccctgtctggtcatgaccccattaggtgtggagagctgggaggaggcattgtcacttcccaccaggatgcaggacttggggttgaggtgagtcacggcctcttgctggcaatggggtgggaggagtacccccaaaccttctcactcctccagcctggaatgtgaagtgactccccaaccactttggccatggcaggcaccttttgggactgggctgccactgcgtgggcagagtaaaaggtgccaggaggagcatgggtgtggaagtcctgtcagccaagaaataaa

SEQ ID NO: 18480 - DNA, 785 bp, Macaca Fascicularis
  misc_feature (1)...(785): n = A,T,C or G
tgaccaactgaagtatagacttnntgctggacaatctgcatgggcatcaccccctcccccgcatgtaacccgaaagaggtgtccagagccaaggcttctaccttcattgtccctctctgtgctcaaggagttccattccaggaggaagaggtctataccctaagcagatagcaaagaagataatggaggagcgattggtgatggccttggtttccctcagaacaacgctgcagatttatctgcacaaacatctccacttttgggggaaaggtgggtagattccagttccctggactaccttcaggaggcacgagagctaggagaagaggcaaagctacaggtttacttgggagccagctgagaagagagcagactcaaaggtgctggtgcttggatttagccaggctcctccgagcagctcatgcatgtcccagcccctgggccctagccctttcctgccctgcagtctgcagtgccagcacgcagatcccttcaccacagggtttcgttttgctggcttgaagacaaatggtcttagaattcattgagacccatagcttcatatggctgctccagccccacttcttagcattcttactcctcttctggggctaatgtcagcatctatagacaatagactattaaaaaatcaccttttaaacaagaaatggaaggcatttgatgcagaatttttgcatgacaacatagaaataatttaaaaatagtgtttgttctgaatgttggtagacccttcatagctttgtacaatgaaacctgaacgaaga

SEQ ID NO: 18481 - DNA, 521 bp, Macaca Fascicularis
  misc_feature (1)...(521): n = A,T,C or G
gtgtattcgtnnnnnacggaagtggcaccaacagacatatcgagctcatataccttgccaacagagctatcacccgtagcctagccctcacgagcgtccgtgtatgtccagggtccgncnatcctgcagggagnnncctccccagccctaccagcgcccgctgggctgagccgccaccccacaccaggccgtcctcccggaccctcccttggaaacctgccctacccgagggcccctatgccgagcttgggcccctctgcccagcttgggcccagctgggctctgccacccctacctgtccagtgtcctgggcccattgtggatgaggccagtggaggcctgaggatgagctggaaggagtgaggggataaaactcaccttctggagcctgcatggtggtcctgggactgagcccttcnnnggggcatgcattggcctggaggtggggctgggaccgggggctggcctcagccttcctctgcagctgactctgtcctcccnntgggcgaccgagagcccca

SEQ ID NO: 18482 - DNA, 658 bp, Macaca Fascicularis
  misc_feature (1)...(658): n = A,T,C or G
aaattttcatttannnaatggaaacttgcctattttcacatgtctgcttatttattttatatttttaaaagaagacagtattcacctatgtattttgcataacgattatatcaagtctaggagcttcgtgtcattaaaatcagttaagcaatctttcctgtttctatattatttagaatatttgttgttgcaattttcacataagaaaatttaacagttgtgtcatgttgtttctgtctgattttaattgctgtctaatgatggggaaagcacgacaaaaagatgtacagtcctgcatccttgcttatttcacaactaaagctttgtcacggacttcaaaatatatatgtatatattttatttaaatatgttacatattatatttaaacatacatatttaacgtattttttacatacctattaatatcagagatttgagtaaaagagtgggtaatgtttaaacatgtgccctttatacaaacagggcagaaccacagaaaaacatcttagaaaccgagagatgtgcagaaagaaatgtttagtgttttttttttgttgtttaattttagatttttggtgctttgtaattaattggggtttatattgatagagatgtggaagttaaacagnnngtgtacttaaaagtaagacttatttc

SEQ ID NO: 18483 - DNA, 1279 bp, Macaca Fascicularis
  misc_feature (1)...(1279): n = A,T,C or G
aattaatannacaaacatgaaagtgcctgctcattccagtactgtcttgaaagcaaaactaatatttattttctagattatccctgtgaataattgataacttttggagtcaagtatgaataaacgtttggcagaatataataatctgcactgttttctataggataattggtgagttataaaatcttaggtttgcttatgcccagtggcttctggggaggcttaataataggcagttttgaatttgttcaaacctgtaatgacttgtaaacaaagatgaccatcaaccctttctcacatctatagtgacaataaagcgggaagtataagatttaataggaggggttaaggttcatgagaaccatagaaagatgtggtctgagatgggtgctgcgaagatcataataaagtctttttcatagtcagtctaaacaaaatgggtggggatgtcatgttttttgcccgattcaacttttgttctgcttaaacattaatgacaaatctagaactcttcgaatcctacaactttgcaattttttttttctacaaatgtctaacatccaaaatgtgagagttgggaaaaggactttgctcctgtagattttttcatattacttctctatatcatatattctaaatagctatcacttcagcagtcttttgcctattggttatgttagtatcacattacttctagcctttcaattactccatgttttatttaatatccattaaagtctatgaattctctgttctggtggcacagctgttcattacctatattctagagtagacaatctggactatgtaataaatagtctgctgattttaagttctctctctctctctctctctctctctctgcatgtgtgtgtgcatgtgtgtgtgtttgggagaaacagaaacacttcactttaagtagaactgctaaatttaagtaaacttctgattaagaaatgagttattttgagaaaaaagagggtagggtaaggaagcatgtaggataacaagtataaaaagatttctaggccgggcgtggtggctgacgcctgtaatcccagcacttcgggannnnnnnnnnnnnnnnnnnnnnnnnnnnnagatagagttcatcctggctaacacggtgaaatnnnnnnnnnnnnnnnnnnnnnnnnnnnnnnnnnnnnnnnnnnnnnnnnnnnnnnnnnnnnnnnnnnnnnnnnnnnnnnnnnnnnnnnnnnnnnnnnnnnnnnnnnnnnnnnnnnnnnnnnnnnnnnnnnnnnnaannncaagccgc

SEQ ID NO: 18484 - DNA, 697 bp, Macaca Fascicularis
  misc_feature (1)...(697): n = A,T,C or G
aagggnnnnnnnnnnnnnnatccggctggagagggagttccagcgctgctgccgccaggggaacaatcacacctgtacatggaaagcctgggaggatacccttgacaaatactgtgaccgggagtatgccgtgaagacccaccaccactcatgttgccgccaccctcccagccctattcgggatgagtgctttgcccgtcgggctccgtaccccaactatgaccgggacatcttggcnnnnnnnnnnnnccgagtcacccccaacctcatggnnnnnttctgtggaaaccaaagagttctcaccaagcataaacatattcctgggctgattcacaacatgaccgcccgctgctgtgacctgccatttccagaacaggcctgctgtgcagaggannnnnnnnnnnnnnnnnnnnnnnnnnnnnnnnnnnnnnnnnnnnnnnnnnnnnnnnnncctgccctctgctgttacctgagtcctggggatgaacaggtcaactgcttcaacatcaattatctgaggaatgtggctctagtggctggagacactgagaacaccaagggccagggggagcagggctcaattggaggaacaaatatcagctccacctctgagcccaaggaagaatgagtcaccccagagccctggagggtcaaatggggggaaccccaccctaccccaccccttgaacactcatac

SEQ ID NO: 18485 - DNA, 765 bp, Macaca Fascicularis
  misc_feature (1)...(765): n = A,T,C or G
aagtgtgacaaacacacatnngatattctcctatatgttatagtaatgtaacgtataaactcaatactttttattctttgtgattaaatcctgttttaaaatgtcacaaaacaggaaccagcattctaattagatttactatatcaagatatggttcaaataggactactagagttcgttgaacactaaaactatgaaacaattactttttatattaaaaagaccatggatttaacttatgaaaatccaaatgcaggatagtaatttttgtttacttttttaaccaaactgaatttttgaaagactattgcaggtgtttaaaacgaaagaaaagctgttttatctaatactgtaagtagttgtcatattctggaaaatttaatagttttagagttaagatatctcctctccttggttagggaagaagaaagcccttcaccattgtggaatgatgccctggctttaaggtttagctccacatcatgcttcttttgagaattctatttggtagttataattacagaaactgattagttcgtcagtttgcagatagatttagcacagtactcatcactctggatagattgagatgttctttcacaacagatgatctgtaacactgtaagatactgatctttacaactgtttaatcagttttatttttgtacagtattagtgacctaagttattttgctgtcccgtttttgtaaatcaaatgaaattataaaagaggattctgacagtaggtattttgtacatatgtat

SEQ ID NO: 18486 - DNA, 745 bp, Macaca Fascicularis
  misc_feature (1)...(745): n = A,T,C or G
tgnnnnnngagtcttggccaaggaagaatcacacccttggaatagaaatttccacctccccagcctttctctcagacagcttatcctttttcaaccaactttggccagggaggaatgtcccttttcttcttnnnnnnnnnnnnnnnncattcctttgtctgccaacctccctggggtcctgcctgtttcctcccaatggagggtttttttgcggggtggtccccgtctggggggcccctccagccagttctccaggtctccctgtctctcccccgctgccattttgatagtataatctatttttaaatggggcttttcaataggggagagggaatcatctcttcctatatttggtggggtgggtgggaaggaagggatttgggggggaatcttcctgccgcctcccccctccaagtgtttatttttgataccaaacgtgtattttcagttccctccctcccagccccccaatttcctgcgggcgggtacaaaggaccctttcaatgtccctggagttgggagggaggaatggggnnnnnnnnnnnnnnnctgtctctattctaggcaagagagagtgggttcaaaagactcccgggctcacctgttagcgctggcccagcccaggcctcgggacctgggggttggtgatttgggggacggtgctacactcgtctccactgtttgttttacttccccaaaatggaccttttttttttctaaagagtcccagagactggggaatgtc

SEQ ID NO: 18487 - DNA, 807 bp, Macaca Fascicularis
  misc_feature (1)...(807): n = A,T,C or G
agcagacacacggagctgaannnnnagctgcgcagcatcaaccagggcctggagcgcctgcgcagggtcagccaccagggctacagcacggaggccgagttcgaggagcccaggtgatngacctgtgnnncctggcgcagtctgccaacctcactgacaaggagctggaggcgctccgggaggagctcaagcacttcgaagccaaaatcgagaagcacaaccactaccagaagcnnnnnnnnnnnnnnnacgagaagctgaggcacgcagagagcgtgggtgacggcgagcgtgtgagccgcagccgtgagaagcnnnnnnnnnnnnnnnngcggaccaaggagctgggctacacggtgaagaagcatctccaggacctgtccagcgggatctccagagctcggcacaacgaactctgaaggcgtcggggaacctggcccggcagggaagaggccagcgtgaaggacctgggctcttggccatggcatttccgtggacagcctgctgtgagggtaactggggccggcacaggtgtcgcagcaggaaggattgtttctggtgactgcagccgctgctgtcacgacacaggacttggtggtggtcgcgtctgggtctgagatgggcccagctctgactgagggggttgtcttccactcagcnnnnnnnnnnnnnnnnnnnnnnnnnnnnnnnnnnnnnnnnnnnnctgctgtcgggtctgacggtcttcttgttaaacaacacgatttacataaaaaaatcttacacatctgtccctggaaatactatgtacaaagtcctaaaaaatat

SEQ ID NO: 18488 - DNA, 764 bp, Macaca Fascicularis
  misc_feature (1)...(764): n = A,T,C or G
actgtagagagtaagcattaccatagttgggcttagtatnnaaataaacatgagacanntnnncagacatatactttaatgtttaaaggtgctctatttttttggatgtacagtagttttatttccnnnnnnnnnnnnnnnnnnnnnnnnnnaaggaggcatagtacatagttggaaaagctttgcgggggggattaaagaaaaaaagcactgttgtgtttaacactagttcagatgcagttaccttagggacttatttatttnnnnnnnnnnnnnnnnnnnnnnnnnnaacagtgttctgattaaaaacaaaaaaaaagatacatatgccttgtaaannnnnnnnnnnnnnnnnnntagtcacttcaactcnnnnnnnnnnnnnnnntagttgctctgctggaaaaaaatgaaagtgaatctgcttaactcactagaacnnnnnnnnnnnnnnnnnnnnnnnnnnnnnnnnnnnnnnnnnnnnnnnnnntttatctttgtacagaagctttgatgaagtgtcttgtatttaacacccttatttaagcttatttaaccttaaattgttaattttataaaatttggtttggcctgcactacgatgagggttggaggtagctgcaggctcagaagagactgagcttgcacagatcagaccgagaagcagggtgagagattctaacgactggatnnnnnnnnnnnnnnnnnnnttgtattgctttaccatttttaactgttagatttgagatgaacatacattttgc

SEQ ID NO: 18489 - DNA, 704 bp, Macaca Fascicularis
  misc_feature (1)...(704): n = A,T,C or G
acaannnnnnnnnnnnnnnnnnnnnnnnnnnnnnnnnnnnnnnnnnnnnnnnnnnnnnnnnnnnnnnnnnnnnnnnnnnnnnnnnnnnnnnnnnnnnnnnnnnnnnnnnnnnnnnnnnnnnnnnnnnnnnnnnnnnnnnnnnnnnnnnnnnngtctcaagaaacaacaaaaacaaaaacaaaacttcccccagtgctgttgcttgtgtggatcaagacttggtgattcttgggggaccatggatannnnnnnnnnnnnnnnnnnnnnnnnnnnnnnnnnnnnnnnnnnnaagtttcagggcgacattttccttgatcatttctgtttgtaatttttctgagagtcatttcnnnnnnnnnnnnnnntcacgtgtcttcttttaggtggtattcccacnnnnnnnnnnnnnnnnactgggttggagagggaggtcatgctggctgcaaggaagggactggacccatacaatatactgcccccaaagggagcttcaggcaccaaggaagaccctaatttagttccctccatcaccaacaagagaatagtgggctgcatctgtgaagaagacaacaccagcgtcatctggttttggnnnnnnnnnnnnnnnnnnnnnnnnnnnnnnnnnnnnnnnnnnnnnnnnnnnnnnnnnnnnnnnnggctggcacactgagcgcctgtactaagttactcaaaatgtgctgtaa

SEQ ID NO: 18490 - DNA, 640 bp, Macaca Fascicularis
  misc_feature (1)...(640): n = A,T,C or G
ggccccagggttgaaaagttatgagggtcgggggagtatgtcnnngcctatttattggggatcagcattccccgctgcccaatcatttgcaatgccctaattagggcatcctgcccttcgccttttaggctcaggtcggaaggtcagttgccatggttaccgaggaccctggttactctggtgctgtccttttactggactccgcctcccagccccaggggtacctgtgggggcccatttgggtacgtctgggcccccactttcaccagtgtttctgcagccttccaccgggcctgaaccacaggggaggcgcttcgctaagacctccccacccccgctgagggtgggggcgggtgtccgtccggaaatgaaggaagagcccgaggaccgggctggggtttatttaaactgttctgtgtgggttggggagggagggcaccttaatattattggggttagttggggtggggcaggatctcagccataaagtgccagtttgcttagttctgtctccttgtccgtgctgccctgcgctgcggatgcatggcggcgggcttggggagggaggttcctcgcaggtctcagcccgggacaaggtcttacaggcagtctcctgggcagtcggaagggttgcggcgtg

SEQ ID NO: 18491 - DNA, 687 bp, Macaca Fascicularis
  misc_feature (1)...(687): n = A,T,C or G
gtcaatacaaaaacttgtatacaaatattaatagcagaattattcataatggccaaaagttggatacaacccaaatgtctattaactaatgaatagataaatctggtatatccatacaatggactattattcagtcataaaaagaaataaaggaccaggcacannnnnnnnnnnnnnnnnnnnnnnnnnnnnnnnnnnnnnnnnnnnnnnnnnnnnnnnnnnnnnnnnnnnnnnnnnnnnnnnnnnnnnnnnnnnnnnnnnnnnnnnnnnnnnnnnnnacttcctgtacattagtggttgcctaaagctagaattagggatgatggatggggagtacaggattcatctaataggtacaggatttctctatggttcatgaaaatggtctaaacttattgtggtaatggtcacataacaatatattaaaaactattgagttatatattttaaatgggtgaattatatggtatgtgaattgtatctcaataaagttgttagtaaataaatggggctgaagatgttatccttcattgtggtggaaatgaactttcacaatattttcacctgtgaacccaaacaaaatgaaagttctgatggaaaaatcttgaatgaatagagtataagttttccgttgttaaagagcaaacaaaaaaccaacaaaaaatccaagtgtgccttgaattgtac

SEQ ID NO: 18492 - DNA, 757 bp, Macaca Fascicularis
  misc_feature (1)...(757): n = A,T,C or G
gnnnnnnnnnnnnnnnnnnnnnnnnnnnnnnnnnnnnnnggcttcaggatgcccgagagcagcggctacgagtactaacaaagaacatccaattcgcacatgccaataagcccaaaggccgacaagcaaagatggcctttgtcaactctgtggccaagccacctcgtgacgtccggaggaggcaggaaaagtttggaactggaggaacagctgtccctgagaaaatcaagattaagccagccccgtaccccacnnnnnnnnnnnnnnnnnnnnnnnnnnnnnnnagctttaaccccagccctgaggagccggcctatgatggcccaagcaccagcagtgcccacttggnnnnnnnnnnnnnnnnnnnnnnnnnctatgatcctaggaaacccactgtgaagaaaattgccccaatgatggccaagacaattaaagctttcaagaacagattctcccgacgataaactgaggacttgccttggaaatgaaatctgggaaggcaagaatacaaggaaagtgggggttggggaatggaattctacaggaaactggagtcttgctttgatgatcattttggtctccgagtcctgcagtctgcaggtgctgcccctgggaacctgcgtgccacagccccgcctccctgcctggagcacacttcagaattctgaagaagatgtnnnnnnnnnnnnnnnnnnnnnnnnnnaaaggtcaattatacttttgttgttcattagcatctttgtaaactataagacat

SEQ ID NO: 18493 - DNA, 847 bp, Macaca Fascicularis
  misc_feature (1)...(847): n = A,T,C or G
gcacaggaaacataggctacacaccatanncatccaaacctgtgaccatcactgtccaagtgcccagcatgggcagctcttcaccgatagggatcattgtggctgtggtcactgggattgctgtagcggccattgttgctgctgtagtggccttgatctactgcaggaaaaagcggatttcagccctcccaggaaaccctgagtgcagggaaatgggagagaccctccctgagaaaccagccaatcccactaatcctnnnnnnnnnnnnnnnnnnnnnnnnnnnnnnnnnnnnncctattcacttctcatgcatccggacgctctggaagagcctgatgaccaaaaccgtgtttagtctccattgtcttgccttgggatttgagaagaaaatcagagaaggaaagatctgatagttcctggcctaaattccccttggggaggagaaggagatgctgcagttccaaaaaagaaggtctcttccagagtcatctacctgagtcctgaagctccctgtcctgaaaaccacggacaatatggccccaaatgaccgactgcaccttctgtgcttcagcccttcttgacatcaagactcttcattccacatccacacagccaatacaattaatcaaaccactgttattaatagatcatagcaacttgggaaatgcttatgttacaggttacatgagaacaatcatgtaaatctatatgatttcagaaaatgttaaaatagactaacctctactagcacataaaaagtgattgtttctgggtgataaaattattgatgattttaattttctttatttttctataaagatcatatattacttttatgataaaaca

SEQ ID NO: 18494 - DNA, 503 bp, Macaca Fascicularis
  misc_feature (1)...(503): n = A,T,C or G
cccgggttctctgggggtttcaccgtctccttgtccccacctgagagtcgcggggtacacgttctgagcccctgctctgccacctggggaatgtgccacctgtgcaaccttctgtctctgcttgctcgtttcagtgctacagggggagctgtctnnnnnnnnnnnnnnnnnnnnnncccaagggctaccgtgtacagaaaggtgccaagggcaacatgtgtgagacgggagagactgtgcagaaaggaaaacagggagacccacgcatctaaggcgccattggattcccaggacccaagggcgttcctggcttctaaggagagaagggtgaatttggagcccacagtcgcaagggggcccctggcctgtctggcgagaatgggacccatagacacaaaggcaagctggggcgcatctgacctcctggttgcaagggagacacnngaaaccggggccccgatggttacccacgggaaacacnnagtcccggggagcgaggagac

SEQ ID NO: 18495 - DNA, 699 bp, Macaca Fascicularis
  misc_feature (1)...(699): n = A,T,C or G
gatgnnnnngaggaggaaaaggagaagnannnanatcccggctcccatgaggaagatgatgaaagttcagagcagggagcgaaaggcacccaccatggcagcccggaccaggaagatgaggaggatgaggaggaaggtcatggcctcagcctgaatcaggaagaggaagaaaaggaaaacaaggaggaggaggaggaagaagaggaggagaggagagaagagagggctgaagttggggccccactgagtcgagaccacagcgaggaggaagaggaggggctggaggaagatgagccccacttcaccatcatccccaacccactggacgggagagaggagnnnnnnnnnnnnnnnnnnnnggaggaaagcggtgaggacacaggtccacaggacgctcaggagtacgggaactaccagccagggtccctgtgtggctactgctccttctgcaatcgatgcactgaatgtgagaactgtcactgtgatgaggagaacatgggtgannnnnnnnnnnnnnnccagcactgtcagttctgctatctctgcccgctggtctgcgaaacggtctgcactccaggaagctacgtggactatttctcctcctccctatatcaagccctggcggacatgctggaaacgccggaaccctgacccagccgctcgactgcgacacaggtgtacctccccttgccttccaac

SEQ ID NO: 18496 - DNA, 719 bp, Macaca Fascicularis
  misc_feature (1)...(719): n = A,T,C or G
ataaatttttagcattaaaaattcagtgatgtacattaagccaataaactgctttaatgaataacaaactatgtggtgtgtccctattacaaatgcatttggagaagtatttttatgggactctactcaggtccatggttacagcccacagggagacgtggagtgcctggaaggnnnnnnnnnnnnnnnnaccttgttttttgttatattttggaagacaggttttttaaataaacattttcctcagattaaaagataatgctgttaacaactagcattgcctcaaaaactgggnnnnnnnnnnnnnnnnnnnnnnnnnntccttaaannnnnnnnnnnatcccaaaggccacatccaagacaggcaatcatgagcagagtttagagctcctttaataaaatgcgtcagttacttgtaaggattatagttccctcaacatgactgctaatgcagaatagtgtaaaannnnnnnnnnnnnnnttgatggtgatgatgatatagaactgtggctttagtagcatcgaagatgccccaacaaactcatggtgttgaaaccacgcagttctcattactgttatttattagctgtagcattccctgtctcctccctctcctcctttgaccttctcctcaaccagccatcatgacatttaccatgaatttacttcctcccaagagtttggaccgcccnnnnnnnnnnnnnnncacacagttgcct

SEQ ID NO: 18497 - DNA, 165 bp, Macaca Fascicularis
agatcaagatcattgaccctccggagggcaaatactctatctcaatcggtggctccatcctggcatctctgtcctccttccagcagatgtggatcagcaaacaggaatccgatgaagccgggccttccattgtccaccgcaaagggttttaaaacactttcccga

SEQ ID NO: 18498 - DNA, 762 bp, Macaca Fascicularis
  misc_feature (1)...(762): n = A,T,C or G
caccatcatttgnnngaaacagatagataaagttccaagtaaaacnnnnnnnnnnnnaaagggaaaaccgtcttcagatacagcccctaagcccaagagagcccccaaacagaagaaagtagtagaggctgtaaactctgactcagattcagaatttggcattccaaagaagactacaacaccaaaaggtaaaggccgaggggcaaagaaaaggaaagcnnnnnnnnnnnnnnnngaaggcgactataaccnnnnnnnnnnnnnnnncaaaacagcaagcaagaaaccgaagaaaacatcctttgatcaggattcagatgtggacatcttcccctcagacttcccttctgagccaccttctctgccacgaaccggtcgggctaggaaagaagtaaaatattttgcagagtctgatgaagaagaagaagatgttgattttgcaatgtttaannnnnnnnnnnnnnnncacaaacaaacatttttcaacaaataccttgtgttgtccttttgtcttttctgtctnnnnnnnnnnnnnnnnnnnnnnnnnnnnnnntgatgatgtaattgatgatggatttttattattgtggtaggccttttaacattttgttcttacacatacagttttatgctcttttttactcattgaaatgtcacgtactgtctgtctgnnnnnnnnnnnnnnnnnnnnnnnnntgccgtgcattannnnnnnnnnnnnnngtcatggttacaaactacagacctgcttttgaaatgaaa

SEQ ID NO: 18499 - DNA, 746 bp, Macaca Fascicularis
agaaaagctagatgatgattacccaaggtcatacagctagcaagtgctggagtcgggactaacccaggtcccttgtcccaagttccactgctgcctcttgaatgcagggacaaatgccacacggctgtcaccagtggctagtggtgggtactcagggtgtactgttgggttcgcaggagcacagcacccatgggaagggcccatcttagagaatttataagcagggatgaaggcctccctgtctaaaattcctccttcatcccccgctggtggcagaatctgttaccagaggacaaagcctttggctcttctgatcagagtgcaggctgggagcacaggccctgtggcagacaatgcccagtgaccagccactcaccctgtgcagaacctcctggaagtgagttttgctgggagaagggatagctagcctgagagggaaccctctaagggacctcaaaggtgattgtgccaggctctgcgcctgccccacaccctcccttaccctcctccagaccagtcaggacacagggaaatcagggttacaaatcatcttcttcttgacccatttctgtcaggatcccctctcttcctacccttcctcaccacttccctcagtcccaactccttttccctctttcgtctcctcctatctttacagcctgcctcttccaggaagaccaccctattgctgctggggctccccatttgcttactttgcatttgtgcccactctccagccctgctcc

SEQ ID NO: 18500 - DNA, 740 bp, Macaca Fascicularis
  misc_feature (1)...(740): n = A,T,C or G
gaaagaaaaaggccagactcgggctnnnancttcaaaagacaccaagtaccagtcggtgtacgtcatatctgaggagaaggatgagtgcgtcatagcaactgaggtgtaaaatggaagtgagatggcaagattcctgtttctcttaaaataagtaaaattccaaggnnnnnnnnnnnnnnnnnnnnnnctgaagaggagggaggccttgtggactgctgctgagaaacnnnnnnnnnnnnnnnnaggttctcctcctgaggtcctcgacgcctgccgacagcctgccacggcccggccgcctgcggctctgccttccgtgacgtcgccgttgcactatggacagttgctcttaaaagaatatatatttaaatgggtgaactgaattacgcataagaagnnnnnnnnnnnnnnngtgtatattttggattcttatgagccagtcttttcttgaattagaaacacaaacactgcctttattgtcctttttgatacgaaaatgtgctttttctagatggaaaagatgtgtgttattttttggatttgtaaaaatatttttcatgatatctgtaaagcttgagtattttgtgatgttcattttttataatttaaattttggtaaatatgtacaaaggcacttcgggtctatgtgactatattttttgtatataaatgtatttatggaatattgtgcaaatgttannngggttttttactgttttgttaatgaagaaattccttt

SEQ ID NO: 18501 - DNA, 703 bp, Macaca Fascicularis
  misc_feature (1)...(703): n = A,T,C or G
aggactgtgagctnnnnnnnnnnnnnncnnnnnnnnnnnnnncggcnnnnnnnnnntctccacctgggccctgatggctgtccccacccacctgccttccagcccggctccctggcggagccagagcccagggagttgcccgcgtgctgtccttcccctctgtgttgtgactgggctgtttcctgtcctgcctgcggctgcttctcgtcaccaagccctggtcctgcagcagctgtcctccctaccatcnnnnnnnnnnnnnnnnnngctcagcctgaagagcagagaataccatgggtgggactgtgggggtgggatcatggggctgctggcagagggcaaccctgggnnnnnnnnnnnnnnnnnnnnnnnnnnnnnnnnnnnnnnnnnnnnnnnnnnnnnnnnnnnnnnnnngccccggacctagcggaccctctcctggctgctgagatgttgtctgtgactggcctgggggccaagctggagggggtgtgttgacaacccaaagctgttgtccagtctgtggagggaggggcagggtccccagtgtcnnnnnnnnnnnnnnnnnnnnctcttgaaggacctcctggtgcaggggagcagtggggtctggactgggcagatgctgnnnnnnntccctgcgtgcccgtgactgccnnnntgctttcccctttgtgttctgtgtgtgtctgggctgtgcccg

SEQ ID NO: 18502 - DNA, 627 bp, Macaca Fascicularis
  misc_feature (1)...(627): n = A,T,C or G
catccccagctcaatggactggaaggggaagggacacacaagaagggcacctagnnnnnnnncaggcagctcaagcagcgactccgctcctcttttagctctggggtgagggtcccgtgtggtggcacaggcccccttgagtggggttatctctgtgttaggggtgtatgccgtcatacaccccatgggagtagatcgttctaggagggagacactggcccctcaaatcgtccagcgaccttcctcatccaccccatccctccccagttcattgcactttgattagcagctgaacaaggagtcagacattttaaggtggtggcagtagaggctgtagacagggcatgtcacgtgggctcccatggggctgggagtggttgtctttcctggcactaacgttgagcccctggaggcactgaagtgcttagtgcacttggggtgttggggtctgaccccaaacaccttccagctcctgtatcatactggcctggactgttttctctcaattccccatgtgtcctggttcccctgtctctccacctagactgtaaacctctcgagggcagggaccacaccctgtactgttctgtgtctttcacagctcctcccnnnngtgctgaatataca

SEQ ID NO: 18503 - DNA, 751 bp, Macaca Fascicularis
  misc_feature (1)...(751): n = A,T,C or G
catatgcatatattttaaaatcagtaaaagcannactataagtatagacttannccatgagacaataatccagattgtaaatgctcatttatggttaatgacattgaaaggtacatttattgtaccaaaccattttatgagttttctgttagcttgctttaaaaattattactgtaagaaatagttttataaaaaattatatttttattcagtaatttaattttgtaaatgccaaatgaaaaacgttttttgctgctatggtcttagcctgtagacatgctgctagtatcagaggggcagtagagcttggacggaaagaaaagaaacttggtgttaggtaattgactatgcactagtatttcagactttttaattttatatatatatacattttttttccttttgtaatacatttgaaaacttgtttgggagactctgcattttttattgtggttttttttgttattgttggtttataaaagcatgcattgcacttctttttgggagatctgtgttgttgatgttctatgttttgttttgagtgtagcccgactgttttataatttgggagttctgcatttgatctgcatcccctgtggtttctaagtgtatggtctcagaactgttgcatggatcctgtgtttgcaactggggagacagaaaactgtggttgatagccagtcactgccttaagaacatttgatgcaagatggccagcactgaacttttgagatatgnnnggtgtacttac

SEQ ID NO: 18504 - DNA, 760 bp, Macaca Fascicularis
  misc_feature (1)...(760): n = A,T,C or G
cagttgggcctgannncaccaagcnnnnnnnnnnnnnnnnnacctggactacatcatccgcagccacgaggtcaaggccgagggctannnnnnnnnnnnnnnnnnnnnnnnnnnnnnnnncttctctgcccccaactactgcgaccagatggggaacaaagcctcctacatccacctccagggctccgacctacggcctcagttccaccagttcacagcagtgcctcatcccaacgtcaagcccatggcctannnnnnnnnnnnnnnnnnnnnnnnnnnnnnnnnnggcgacgggcggggcggcctgcaccccagggcccctccactcccaccggaccctggccctgggccaggggcagagcaggccctgccccagggcaacgttggacccccttttactttgtaaagtttgtatttattcccctttaggtttgcagagggggtaggggcagagtcaggggctggccagagggtctgctccctggacagagaggaaggaggtggagcagctggggctgggggcacagcccgggcattctgtggggaggccgtcctcggggtggggtggggctgagtggctgccctgcccccctcgtttgcatggctcctcccccactcaagcaatagggccctgccataggaagacccccagagagagggtcagcaggggggcctcgcctgcgcctcccctcctgtagccccatggtggggctaggctggggctcacccccctccccagctattttagnctgtaataaat

SEQ ID NO: 18505 - DNA, 782 bp, Macaca Fascicularis
  misc_feature (1)...(782): n = A,T,C or G
ctccannntgttnngnnnctgnnnnnnnnnnnctggaatcacataactcannngantcaganttcccccaaataataaaggtgaaataaaaacagaaggacaagagctcataacagtaataaaagcccccacctcctttggttatgataaaccgcatgtgctggtggatctacttgtggatgatggccgtaaagagtccttgattggnnnnnnnnnnacagaaggttccaaagaannnnnnnnnnnnnnnnnnnnnnnnnnnnnnnnnnnnnnnnnattttcctggacagttttctgctttaatttcatgaaaagataatgatctcagannnnnnnnnnnnnnnnnnnnnnnnnnnngggagtgacttagtttagataaaagtgtaaagaggnnnnnnnnnnnnnnnnnntttggcctgaaaactacaaagactttttttttttttaaacaaaaaaaagtaatttatgaccctttacatccagataggttagcagtaacaaggaacagtatccagtactccttattcctaggtgagcaggtgatgccccagggacctttgtagccacttcactttttttcttttctctgccttgatatagcatatgtttttgtaagttttatgcatacagtaattttaagtgnnnnnnnnnnnnnnnnnnnnnnnnnnnttttcaaaattggacttaaaatctaattcaaactaatagaattaatggaatatgtaaatagaaacatgtatatattttttatgaaacattacagttagagattttaaataaag

SEQ ID NO: 18506 - DNA, 755 bp, Macaca Fascicularis
  misc_feature (1)...(755): n = A,T,C or G
gaaggcaaagactggggcagcagggaagtttaaaaggggaaaataaatgtttccccattatacctccttgaccccagaatatttgccctcttgtacccttaagagctgcaactagagaaaccttcacaggagtggagagaggattctaaggcttttctagtgtgacccttttcagtagtgctagtcccttttttacttgatcttaatggcaagaaggccacagaggtacttttccttttttagctnnnnnnnnnnnnnnnngctcaaaccacttctcaggcagtttaatggacactaagtccattgttacatgaaagtgatagatagcaacaagttttgcagaagaaaggagataaaagggggagacaaaagatgtacagaaatgatttcctggctggccaactggtggccagtgggaggtgatggtggacctagactgtgcttttctgtcttgttcagccttgacttaccttgagagagagccatcaggaaggtgcttcttagcagatgggaggaactgctgagagaagataggcagagagctggagcccctggagttgactgtgtctgtgtttgtgactgattattggctatgtcttgggtgggcagaaactcgaacttgctatgtaatttgtgtctggttattcagaggagtaagatggtgatgttcatctggcaatcagctgagttgagactgggataagacactggttttcatgcgctgtttttgttttaaagttagaagaaaaaaggtc

SEQ ID NO: 18507 - DNA, 764 bp, Macaca Fascicularis
  misc_feature (1)...(764): n = A,T,C or G
tttatgctcccggcctgcacacgcccagccttgctgggctccaccctcacttactgcccgccgtgatggccttgaggctgcctgcccgcgccaggatgtttggtacaaagagcagccccgaggcccgctcaatgctctcgatgggcaccaggaagcgctccagtgggatggcctcgtccacaggtgcgttgggcatcacgtaggagcggagctcaatttgcccgcctgcggcctccaggatcagcaccttgaagaagtgtgtgggcactgccacgtggtttttgccgatgacctggtacttcacataggatttcccatcagcctctgtcctgggcaggaagagtggccctgtgcagacatagacgttttggtagctgcgggtcaagctgcggctgtatttctccaggttgttccaggcattctggttgaggtggggtacctggggcgcgacgttgctcaggtagaacgtgtcgtccatggccttctggctccagcggtggttggcggctgcggccaggtggccgcggtcgaagccgctgccgcggtagtcggcgttggtggcacggtggtacgcgtgcaccgagtcgtcctcgtggaagtcgcatgttcgtcggtcgccgtcgccgcggagacgctcgggtcgcagctgctccaccacccagagcgcgccgcgggtgcgcgggtcgtagcacagcacgtacgactcgcggctcttgagctgcgccagccccggcagnnngtacttggccagctcgcccggggcg

SEQ ID NO: 18508 - DNA, 1131 bp, Macaca Fascicularis
  misc_feature (1)...(1131): n = A,T,C or G
cagnnnnnncagcaagttgcccttggaaccatgatnnnnnnnnnnagcctaaaggatcagctctctacatacagtaaaggcttcttaaattcctctgagctttctggacttccagatgggnnngacagagatggctcactcaaggatcagttggctttagcaattggaaaactgggagaaaacatgactcttaaacgannnnnnnnnnnnnnggtgccatctgggttctnnnnnnnnnnnnnnnnccacggagcaatgcagagtccctcacttcacaacctggtgctggggaagtatggggccctggtcatctgtgagacgtctgaacagaaaacaaaccttgaagacattggccgccgccttgggcagcatgtggtgggcatggcccccctctgtgttggctccctggatgatgagcctgggggggaggcagagactaagatgttgtcccagccatacttgctggatccctccattaccttggggcagtatgtgcagcctcagggggtgtcggtagtagactttgtgcggtttgaatgtggagaaggtgaagaggcagcagaaactgaataggttctagagactttcggcccaggaggaatatttatttttagctctggacatcattacaaaaaggagtatttcccaagcctcttcagactgagaatgtatttttcatttgagttataacgagattatagacttcatgggtaaaattattaaatagttatataataaaaataattttttccttgtttgcataatactgggtttagcttttctgtgcctctcaaaaataacgggcgggcctnnnnnnnnnnnnnnnnagtgtcttggagaacaggcatcaacaatactgctgctcccttcaacatagatttattatggtgtttctgaaatttctaacttacatgttctgtcttccaccttttatgacatagaattcttttctgtttttgctttgcgatactgtggaccatgcttctgcctcggaacctccctnnnnnnnnnnnnnnnnatggaattctttgggattactgattcaaacctagagttgtctggaaactatgggttctcttctttgtgattgtctgtagcatgctttgaaggtgctctgcagtggtaggcaca

SEQ ID NO: 18509 - DNA, 828 bp, Macaca Fascicularis
  misc_feature (1)...(828): n = A,T,C or G
ctagtattannnnnnnnnnnnnnnnnnattgcttgttgctagtggattagagagattcttttcttactgtggcttccatgttgggagcagaagcttttcatcctggtcacatgaagacagatagtattattgcctggagttgaattatttttatatcttgtctgacacagtatggaaattactgaaataagaccttgtataatggaattaacaaacccaaaataagtagaacactgaagatttgaatttgatatttaagtaaaatgggactgggtgcagtggctcaggcctgtaatcccagccctttggaaggtaaagatgggaggatcacttgaggccaggagttcaagaccagcctgggcaacatagtgagaactcatctctacaaaaaataaaaaaattagctgggcatagtacttgcggccaggaggnnnnnnnnnnnnnnnnnnntgtttgtgccattgcactccagtnnnnnnnnnnnnnnnnnnnnntgtctgaaaaataaattaaataaaatgtcttcatatataaattaagctaatttaaaatgtttttccctgtgtttatttaatattttctaatctgaacctatatacagctgactgattcattcttagaaatgtgttatctataatctttcctaaacagagtagcccacaagaatcatgcacttttaaaaattatttctaagaagccataacaaagctgtgtactaataaagactgcagcaagcacttgtattatttaaattatgtaagtagattgtcatttgtcaggctcctgtacatttacatagcatgttatattaataataaatgtaaagta

SEQ ID NO: 18510 - DNA, 630 bp, Macaca Fascicularis
  misc_feature (1)...(630): n = A,T,C or G
agttcatgtacttganttnnnnncagccgttacctgtgtgtggtgatatcaaagtagagttcttccataaacagaacaagatgctaaaaaaggacaaaatgtttcactttnnnnnnnnnnnnnnnnnnnnnnnnnnnccagaggaaacctcagaaaaagtagaaaatggaagtctatgtgatcaagaaannnnnnnnnnnnnnnnnnnngagcgtgcagataatgacaaggaatatctagtacttactttaacaaaaaatgatcttgacaaagcaaataaagacaaagccaaccgatacttttctccaaattttaaggtgaagctgtacttcacaaaaacagtagaggnnnnnnnnnnnnnnnnggctagcagttcaacttctgtaacaccagatgttagtgacaatgaacctgatcattatagatattctgacaccactgactctgatccagagaatgaaccttnnnnnnnnnnnnnnnntacacaaattacaaaagtctgaattttttttttatcaagagggataaaataccatgaaaacaaacttgaataaactgaaaatggacctttttttttttaatggcaataggacattgtgtcagattaccagttataggaacaattctctt

SEQ ID NO: 18511 - DNA, 676 bp, Macaca Fascicularis
  misc_feature (1)...(676): n = A,T,C or G
gtccccagcgggcnnnaccacnnncacccagtcctcacaagctttaactgagactccgaccagctcagactggcagtcgaccgatgccacacctaccctcactaactcctcctgagggccccaccaaccacccttccacttccatctgggagcccnnnnnnnnnnnnnnnnnnnnnnnnnnnnnnnnnnnngctcctgccctggctgggcccctagattagagggcagagnnnnnnnnnnnnnnnnnnnnncctccagtccctccctcaccagcctcacccctgtggtgggctttttaagaggattttaactggttgtggggagggaagagaaggacagggtgttggggggatgaggacctcctacccccttggccccctcccctcccccaggcctccacctccttcaaaccccctcccctcctgtgttnnnnnnnnnnnnnnnnnnnnnngtccctgnnnnnnnnnnnnnnnnnnnnnnnnnnnnnnnnnnnnnnnnnnnntaatttttttcttaaagaaaacgtcgnnnnnnnnnnnnnnnnctggccccgcccctcctacagctgtaactcccctcctgtcctctgcccccaaggtctactccctcctcaccccaccctggagggccaggggagtggagagagctcctgatgtcttagtttccacagtaaggt

SEQ ID NO: 18512 - DNA, 739 bp, Macaca Fascicularis
  misc_feature (1)...(739): n = A,T,C or G
gtaagactgggatagagggcaatggattttnnnacaatgcacttttcctaaccctatgagaaacaaaccaaagacatttttggagaaagttgctttctggagcagctttggttttatttttgtatttaaggctgaaggacagtttcaataaacatgtcttctccccagagggatttcaaagatcatttttgcacgtcatataggggagaatgaggacgtgagacaccaagaaggtgaagttttcaggagcagaggagaaacattacaccaagatgtctgaacttcattgactcactacctggagccattttttagctgttaagaaacagaaaaaggagcctggggcttctgactgtttcaccaggcttaggggagtgagaggagggtttagacacgggtagggcctcttggccggttggtgcagccccattgagccatctcctcctttggctgggtgactcctttctgctgccttgacaactcctggaggagaggagaaacagatggggcctctgggctcctcccagccctgtagggtggggctcctgccctctctcttgaagtttacctgttgccgccacaagttctgcttccttcgtctttcctttgaatcctgggtggtgcaggaactagccttgttcagtggacttggggagaactggaggggaaattcactgtgttttctgttaagccagcactgaccccaacaactcccctcactagtccagcttcccaaaag

SEQ ID NO: 18513 - DNA, 716 bp, Macaca Fascicularis
  misc_feature (1)...(716): n = A,T,C or G
ttagcagccttactacttgtgatccatctaatatttatgatctaatcaagaccctaaaggcagctaaaattagagtatctgttattggattgtctgcagaggttcgcgtttgcactgtacttgctcgtgaaactggtggcacataccatgttattttagatgaaagccattacaaagagttgctcacacatcatgttagtcctcctcctgctagctcaagttctgaatgctcccttattcgtatgggnnnnnnnnagcacaccattgcttctttatctgaccaggatgcaaaaccnnnnnnnnnnnnnnnnnnnnnnnnnnnnnnnnntgagccaggacttacattaggaggctatttctgtccnnnnnnnnnnnnnnnnnnnnntgagctacctgttgaatgtaaaatctgtggtcttactttggtgtctgctccccacttggcacggtcttaccatcatttgtttcctttggatgcttttcaagaaattcccctagaagaatataatggagaaagattttgttatnnnnnnnnnnnggaattgaaagaccaacatgtttatgtttgtgctgtgtgccagaatgttttctgtgtggactgtgatgtttttgttcatgattctctnnnnnnnnnccctggctgtattcataagattccagctccttcaggtgnnnnnnnnnnnnnnnnnnnnnnnnnnnnnngngtgaaaagaaat

SEQ ID NO: 18514 - DNA, 765 bp, Macaca Fascicularis
  misc_feature (1)...(765): n = A,T,C or G
aggcccaacgccatcctgaaactcactgactttgcnttgccaaggaaacnnccagccacaactctttgaccactccttgttatacgccatactatgtggctccagaagtgctgggtccagagaagtatgacaagtcctgtgacatgtggtccctgggtgtnnnnnnntacatcctgctgtgtgggtatccccccttctactccaaccacggccttgccatctctccgggcatgaagactcgcatccgaatgggccagtatgaatttcccaannnnnnnnnnnnnnnnnnnnnnnnnnnnnnnnnnnnnnnnnnnncctcaaaccccactgcacaccagccgggtcctgaaggaggacaaggagcggtgggaggatgtcaaggagnnnnnnnnnnnnnnnnnnnnnnnnnnnngcgtagactacgagcagatcaagataaaaaagattgaggatgcatccaaccctctgctgctgaagaggcggaagaaagctcgggccctggaggctgcggccctggcccactgagccaccgcgccctcctgcccgcgggaggacaagcaataactctctacaggaatatattttttnnnnnnnnnnnnnnnnnnnnnnnnnnnnnnnnnnnnnnnnnnnnnnnnnnnnnnnnnnnnnnnnnnnnnnnnnnnnnnnnnctgccttggctctggccaccccagagtgggagaggttgggaggttgggaggctatggagagaagtgagcaaggtgctctgaacctgtgctcattgca

SEQ ID NO: 18515 - DNA, 745 bp, Macaca Fascicularis
  misc_feature (1)...(745): n = A,T,C or G
gggtgatgcctacntcccccagagcactggcttgcaggggattgaagccctcccagagcacttacggattctggtggggtgtgttccagctgcccccaactttggtgatgtcttccttggagggggaaggcatattttattcttttattggcagtacctgtatctatctctctttttggaggtgcttannnnnnnnnnnnnnnnnnnnnnnaaagggggaagctggggaaactcaaactcttcccctgtccnnnnnnnnnnnnnncttctctgtatggaactatggggtcccccatccccatcctgcagcttctagtactctcctagagagagaagcaggctagaggtaannnnnnnnnnnnnnnnnnnnnnnnnnnnnnnnnnnnnnnnnnnnnggattcattacaccttgaaataacgccccagnnnnnnnnnnnnnnnnnnnnnnnnnnnnnnnnnnnnnnnnnnnnnnnnnnnnnnnggggctggccttcgtgccccacagaggtcnnnnnnnnnnnnnnnnnnnnnnnnnnnnnnnnnnnnnnnnnnnnnnnnnnnncgctnnnnnnnnnnnnnnnccagagggggtttggtctgggacttccctgctctccctcttctcaagtgccttaattgagggcaagttgttaaagagagtcggggagagcaggctggcagctctccagtcaggaggcatagttttcaccgaagaatcaaagcacttggactcttgctctnnnct

SEQ ID NO: 18516 - DNA, 662 bp, Macaca Fascicularis
  misc_feature (1)...(662): n = A,T,C or G
acactataggcacntatcagctggccaaggccatgaccacgccggtgatcatagccatccagaccttctgctaccagaaaaccttctccaccagaatccagctcacgttgattcctataactttaggtgtaatcctaaattcttattacgatgtgaagtttaatttccttggaatggtgtttgctgctcttggtgttttagttacatccctttatcaagtgtgggtaggagccaaacagcatgaattacaagtgaactcaatgcagctgctgtactaccaggctccgatgtcatctgccatgttgctggtcgctgtgcccttctttgagccggtgtttggagaaggaggaatatttggtccctggtcagtttctgctttgcttatggtgctgctatctggagtaatagctttcatggtgaacttatcaatttattggatcattgggaacacttcacctgtcacctataacatgtttggacacttcaagttctgcattactttatttggaggatacgttttatttaaggatccactgtccattaatcaggctcttggcattttatgtacattatttggcattctcgcctatacccactttaagctcagtgaacaggaaggaagtaagagtaaactggcacaacgtccttaattgggtttttgt

SEQ ID NO: 18517 - DNA, 752 bp, Macaca Fascicularis
  misc_feature (1)...(752): n = A,T,C or G
tcannnnangagtacactcgagatgaagatcacattgcattgatcatagaacttctggggaaggtgcctcgcannnnnnnnnnnnnnnnnnnntattccaaggaatttttcaccaaaaaaggtgaccttaaacatatcacgaagctgaaaccttggggcctttttgaggttctagtggagaagtatgagtggtctcaggaagaggcagctggcttcacagatttcttactgnnnnnnnnnnnnnnnnnnnncgagaagagagnnnnnnnnnnnnnnnnnnnnnnnnnnnnnnnnnnnnnnnnnnnnnnncctgcccaccaccacagcagagatcacacactgaccctccgcccttcccctccaannnnnnnnnnnnnnnnnnnnnnnnnnnnnnnnnnnnnntcaagagtttctagatcttggttttttttaatccaacatgttcatttgggtttgcttacttgaccctgtggagatccnnnnnnnnnnnnnnnnnnnnaggtnnnnnnnnnnnnnnnngggnnnnnnnnaagactaatggactaaaatnnnnnnnnnnnnnnnnncctgtacctttccttcccattaggacatcctttaaattataagcatcctttttgaaaagagctatgaaggtgtatgagcccatccttttattcattgactctaagagtcaaattttctagtgcatatcctnnnnnnnnnnnnnnnntgaggaggggaaagggtgttaattctgtgtacagcagaga

SEQ ID NO: 18518 - DNA, 155 bp, Macaca Fascicularis
aggtgccggtaccgtagctcttgggggcccagcacctgcgagtcggagctcagagaccccgtggagctactgatggcagaaagctgaagcagtcgcgggccagggtgctgctggtgtcctcagaagtgcgggggattctggactggatcccaccc

SEQ ID NO: 18519 - DNA, 748 bp, Macaca Fascicularis
  misc_feature (1)...(748): n = A,T,C or G
aannnngcaagcctccagtggtccaaaccagccgtcaattcgccgtggataccggcgtccctacaattaccggcgtcgcccgcgtcttcctaacgctccttcacaagatggcaaaagaggccaaggcaggtgaagcaccaactgagaacccgctccacccacccagcagagcagtgctgagtaacaccaggctccccaggcaccttcaccatgggcagggtgacctaaagaattagtgaccattcagaaataaagcaaaaagcaggccacaaccttaccaacaccaaagaaacattcaagcaataaagtggaagacaaagcaagatttggacattggaatgtttactgttattctttaagaaacaactacaaaaagaaaatgtcaacaaatttttccagcaaggtgagaacctgcctgcacagaagacaagagagcagcctccccagtttcagcgaccgctaggtttatattttttttcctggtttttactgttttggtaatatatatattgaagaaatattaataccgcatggggagaaccccaaccaaagaaatctgaaatatatagtaaatgcttttttttccgtttttgttcattttggatgctggtgctaaacctccaagtgtcatgatttaaaaaaaaaaaaaatttatgtccttcttatttatttctaggatgaggggaggataacannnnnnntttcttatgtgactctctttgaaaatgtgcagtaagaagtcctcaaa

SEQ ID NO: 18520 - DNA, 736 bp, Macaca Fascicularis
  misc_feature (1)...(736): n = A,T,C or G
ctancnngagctgtatgtnnngaagggggatacaaaggagttctttatgaaatgccagtcttactgtgagccccctagctaccggcccatgcaccatgaggactttaaagaagacctgaagannnnnnnnnnnnnnnnnnngacctgggcaggggagaagagcaagagggagatgtacagtcgtctgaagaagctctgagggcggcaggaccacccagcagcagcctgagcttccctccgtccccctttaccctctttgctgcagagaaacttaagcaaaggggccagctgtgtgacatttggagagggggcctgggacttccatgccttaaacctacctcccacactcccaaggttggagcccagggaatcctgctggctacgcctcttctgtccctgttagacgtcctccgtccatatcagaactgtgccacaatgcagttctgagcaccgcgtcaagctgctctgagccacggtgggatgaagcagccggggccttttcgggctccagccatctcatgaggggagaggagatggaggggagtagagaagttacacagacagaaatgctgctggccaaatagcaaagacaacctgggaaggaaaggtctttgtgggataatccatacctttaatttattcaacttcatcaatcactttattttattttttttctaactcctggagacttattttactgcttcattaggttgaaatactgccattctaggtaggg

SEQ ID NO: 18521 - DNA, 758 bp, Macaca Fascicularis
  misc_feature (1)...(758): n = A,T,C or G
atgtagttatagacatctgcatttttagaagcattttacccatttattttttaaacattcaagaactgctgacgtactgtggatgtagagtataaaactnnnnnnnnnnnnnnnnnnnnnnnnnnnnnnnnnnnnnnnnnnttaatactttatggcaggattgtactataagcaaatgaattaaacagctatgtaaatcataaacaaaaactaaaaatgaaccaaagtgaaaaggataacttccaggcagtatcnnnnnnnnnnnnnnnnnnnnnnnnnnnnnnnnnnnnnnnnnnnnnnnnnnnnnnnnnnnnnnnnnnnnnnaattactcttcctcagtcctgcctgccaagaactcaagtgtaactgtgataaaataacctttcccaggtatattggcaggtatgtgtgtaatctcagaatacacaggtgacatagatatgatatgacaactggtaatggtggattcatttacattgtttacacttctatgaccaggccttaagggaaggtcagttttttaaaaaaccaagtagtgtcttcctacctatctccagatacatgtcaaaaaagaaaggtgtttgtgcttctgttttgtttctgctcagtaatacagtcaagnnnnnnnnnnnnnnnnnntgacccattgagctgtgtatgcatttttgtttatttcaaataaaatatatttgtattatttgtcattcatactatccatccataccacactatcttctgtatcaggtagtctaataga

SEQ ID NO: 18522 - DNA, 456 bp, Macaca Fascicularis
  misc_feature (1)...(456): n = A,T,C or G
gggtaccttttcgaattttgnnnnnnnnnnnnnnnnnngcagctaagtcacccttacctctttgtggaaactggttgtggtaaatgcagtctcggaagttttagattgcaggaaagcgtacgtgcctagctcccttcatttcccacagcttgtttagcaagacctccggagaggattagtgtgtnnnnnnnnnnnnnnnnnnnnnnnnnnnnnnnnnnnnnnnnnnnnnnnnnnnnnnaggtttgagacgtttctgaaatgtctcttgtcatttaacgatcgcggaatggaggtttgcggtgggttgcggtggcttctgcatacttaagtagcgagtttcttcgtggaagttgtacttgnnnnnnnnnnnnnnnnnnnnnnncgtcttgcatgtatcctatgcttgtggctccgtttgtttagacaaagaaacaaaaagcttttacttttatgaag

SEQ ID NO: 18523 - DNA, 618 bp, Macaca Fascicularis
  misc_feature (1)...(618): n = A,T,C or G
aagcctggaaagatcaaccnnnnnnnnnnnnnnnnnnnnnnnnnnnnnnnnnnntncaagacagagaagtgaagctataccaaatctgtggatatttaaaaatgaacacattctatccaataaaaagtatgtatcatttacccacatgaaaggagctnnnnnnnnnnnnnnnnnnnagtatatgtgttgtgttagttatttaagaaataatcttgagaatttatcatcccctatgagagatttttgcacaatttaattaaggaccttatagtgtgctgtaggatgataaagcttttccccaaaaaacaggtgaatacttaaattaattcaaagagagaagaaagcttctcgaaaggtcatttaattgacttttgctttccaggtgtcaaatcagacactgagcttgttcttcacggttctgcaagatgtcccagtaagagatcnaaaccagccatatgtgaaagtttatgattatatacgagagaggatgatgtttgcaattgctgaatacaatgctccttgcagcaaatgatcttggaaatgcttgaagaccacaaggctgaaaactgctttgctggagtcctgttttcagagctccacagaagacacatgtttttg

SEQ ID NO: 18524 - DNA, 731 bp, Macaca Fascicularis
  misc_feature (1)...(731): n = A,T,C or G
tgaagattagaagccaggagaaatacaatgatggcctgtggcatgatgtaagttgaaggcagagannnnnnnnnnnnnnnnatagctaccactnnnnnnnnnnnnnnnnnnnnnnnnnnttactctctctagaaatatccattttaaaagtctgctgctgcacactcagaattcaatttcaaaaaattgtattccttataaaagtcttgaagcatactatttaaaaagagacannnnnnnnnnnnnnnnattttaaccaaaggatcagtggtcaacataaactgaaatttagtttttaatgatttctcacttattttctactgccaataggtttttacttttcaacaattattaccgagtgtcttttattggctaagctgtggaagatacaaagtgaacagtaaatcagttaggaagacaggataccacagtgggagcagataaatattgaaagaaattggtgggtatgtaatgtcaagagtaagcaatgtaacatgcattataattaatcacaagaaatctaagtgggagagaacatatgnnnnnnnnnnnnnnnnnnnnnnnnnnnnnnnnnnnnaaagcttcatagagaacatggaaaaacataagctatattcagaaattaagctttaaatcattctatctaatggtcagaaaatatatggatcacttcctctaatacatgaagtggtaaatggannnnnanncnnnaaaaaatacacctatgtata

SEQ ID NO: 18525 - DNA, 519 bp, Macaca Fascicularis
  misc_feature (1)...(519): n = A,T,C or G
acattgaggatttgcagttcaatgtggagcaccnnnnnnnnnnnnnnnnnnnnnncatccataggggccttgtgctcagggtggggcaccttctccatttgatagaaactttggaaccaaaatctctgccagagctatggagtggannnnnnnnnnnntcaaggaggcccagggcagaggaaaaacattgaccaccgatgatcccgtttgtgtgctgggaatcagcaaaannnnnnnnnnnnnnnnnnnnnnnnnnnnnnnnnnnnnnnnnnnnnnnnnnnnnnnnnnnnnaggattcccaaagaacggtggtggctcaagctgcggcccctcatgaagatcctggccaagtacaaggccagctacaacgtgtgagactcaggccannnacagcacgnncacaccccaccctacccctcctccatggaccctgcaggaggggagacccacctcgaagtgggggacacagtagnnnnnnnnnnnnnnntttggggctggagggagacgtgggtccaccag

SEQ ID NO: 18526 - DNA, 753 bp, Macaca Fascicularis
  misc_feature (1)...(753): n = A,T,C or G
ctaggagcatgcagtgctnnnnnggccgctgacaccaggctactatattttagcttgctaagtgaggatcagctagacctgcttttttttctcctcagtcttgcatttccctcaatacaagctatagcctctttcctcttgtttctagtctcagaatgaaggagagggaagccattttcctgtagggactctccagtctcatttagacaatagtccctttttttctgcctccatcttagagatggagctccttttcctgtttcttaatttttgttttctcctcattcctgcttccctatctctccctattgccagttccaccagctagcatgaaagacttcctagccattaaatctattctgtagccaccaggtggcagcatcttgtcatacgtgtcaggacttaggactgcggggtttaggttagatgtcacagaaagagctagttctgtggtcaggcagcaccaatgagaacggaatgcagaccctccagatgtatccttgggagaagcagtaaaccaactaatatttattgaagacctactttgtcctctacatagggtagcttctgtcagggaatcttggttcttccccaaaaacactgattttctttcagggagacttcatgtgttcatttatttccaccagagcagatttaaagaaattataatatgtaatgtttggtatctataaagagtatatctaatgtgaataaattatgaagcatactaatgagtacctatgacccacaaca

SEQ ID NO: 18527 - DNA, 895 bp, Macaca Fascicularis
  misc_feature (1)...(895): n = A,T,C or G
tattaaaatggtactatgatccaaacaccaaaagctgtgcaagattctggtatggaggttgtggtggaaacgaaaacaaatttgnnnnnnnnnnnnnnnnnnaaaaggtttgcgctcctgtgctcgccaaacccggagtcatcaatgtgatgggaacttaagcgtggctggccaacatcatatacctcttgaagaagaaggagtcagccgttgccaactcgtctctgcagaagctccgggtgtagattcccttgcactgtatcatttcatgctttgatttacactcgaactggnnnnnnnnnnnnnnnnnnnnnnnnnnnnnnnnnnnnnnnnnnnnnnnnnnnnnnnnctcgctctccgtctccaggcagttctctcgaatactttgaatgttgtgtaacagttagccactnnnnnnnnnnnnnnnnnnnnnnnnnnnnnnnnnnnnnnnnnnnnnnnnntcatgtnnnnnnnnnnnnnnnnnaatgtaaagtctagaaaataacgcagatgtcacggctactctatatacttttgcttggttcatttttttcccttttagttaagcatgactttagatgggaagcctgtgtatcgtggagaaacaagagaccaactttttcattccctgcccccaatttcctggattagatttcaagctaattttctttttctaaagcctctaacaaatgatctagttcagaaggaagcaaaatcccttaatctatgtgcaccgttgggaccaatgcctcaattaaagaattaaaaaaagttgtaatagagaatantttttggcattcctctaattgttgtgtgtgtggttttttttttttgtgcaggggggaggggatttaattttaattttaaaatttttaggaaatttatacaaagaaac

SEQ ID NO: 18528 - DNA, 761 bp, Macaca Fascicularis
  misc_feature (1)...(761): n = A,T,C or G
ggcagcactaaagaccacgnnngnntctctcccagagaaacccggtgttacccctnnnnnnnnnnnnnnnnnnnnnnnattccggtttctctcnnnnnnnnnnnnnnnnnnntgtgtgcgatgccttccgtgtgatggaaacacactacactgtcggacttcgaatttctatgtggatgtgcatgaagctcttgttttcgatgtgtgtttataaagggaaaattagtactctgctcaactcttggtaacatgaaattctgaatgttactttatcatgattgcactgcaactttttccttaaaataactgcttttgtaagaatggtgatattggagtgattagcgtaaattgaagggaatttgagaagcaacggtagtgggatgatttagagtcatcgatatcacgagaggggtctttttgtaaacctcctttttaatgtcaaagcacnnnnnnnnnnnnnnnnnnngatgtagaggttatgtgcaacggatctgtccagtttgtgtatgaaatggatttgataaagtttttgctagttatttactacattttgggattaataagtgatttatatgcatatttttctgtaaatctacattttttgtacaagatattctacaagttatgaagctaagggaagaaaatgccaaagatacctctagttacgttgaacaacgcagtttcaacaggccaaggaagacctgcttcagtaaaaggaatgaagtgaaaacacttattaagaaaatgnnctcaacaataaa

SEQ ID NO: 18529 - DNA, 749 bp, Macaca Fascicularis
  misc_feature (1)...(749): n = A,T,C or G
ccacagcatgagaagcacgaccttcatgttaccccgcagcagggcagcagtgaaccagttgtccaagacctggcnnaggttgttgaagaggccataggggttccacagtcttttcagaaactcatatttaagggnnnnnnnnnnnnnnnnnnnnnnnnnnnnnnnnnnncacttggaatacaagatggttgccgggtcatgttaattggaaaaaagaacagtccagaggaagaggttgaactaaagaagttgaaacatttggagaagtctgtggagannnnnnnnnnnnnnnnnnaagagttgaataaagagcttactggaatacagcagggttttctgcccaaggatttacaagctgaagctctctgcaaacttgataggagagtaaaagccacaatagagcagtttatgaagatcttggaggagattgacacactgatcctgccagaaaatttcaaagacagtagattgaaaaggaaaggcttggtaaaaaaggttcaggcattcctagctgagtgtgacgcagtggagcagaacatctgccaggagacagagcggctgcagtctacaaactttgccctggccgagtgaggtgtggcagaaagaggctatgctgccctgaagaatggcaccaccagctctgccgtctctggagcagaatttacctgatttcttcagggctgctaggggcaactggccatnnnnnnnnnttcctactctcacccggttctcaatgaaaaacagtgtct

SEQ ID NO: 18530 - DNA, 768 bp, Macaca Fascicularis
  misc_feature (1)...(768): n = A,T,C or G
agcatggacttcgtggcttaccgacacctggtgggcgtgtgctacacggaggatgaagctaaggcgctggctgcggaggtggaggttcaagatggccccgatgaaaatggggagatgttcatgcggccagggaaactgtcgactatttcccaaaaccataccccaacactgaggctgctcgagctgccaacaacggagcattgccccctgacctcagctacatcgtgctagctaggcatggtggtgaggactacatcttctccctgctcacgggctactgcgagccacccaccggggtgtcactgcgggaaggtctctacttcaacccctactttcctggccaggccatttccatggcccctcccatctacacagatgtcctggagtttgacgatggcaccccagctaccatgtctcagatagcgaaggacgtgtgcaccttcctgcgctgggcatctgagccagcgcacgaccatcgaaaacgcatggggnnnnnnnnnnnnnnnatggcggctctgctagtgcccctgatcttcatcatgaagcggcacaagtggtcagtcctaaagagtcggaagctggcgtatcggccgcccaagtgaccctgtccagtgtctgcttgccatcctgccagaacaggccgtcaagcccaagagccatnnnnnnnnnnnnnnnnnnnnnnnggctaacccctgtttgtctggaaaaagaggcaaggggacaggagaccaggccctagctctgggccctccttcagcccccttcatg

SEQ ID NO: 18531 - DNA, 761 bp, Macaca Fascicularis
  misc_feature (1)...(761): n = A,T,C or G
gtgatggacagggtggnnnnnnnnnnnnnnnnnnnnnnnnnnnnnnnnnnnnnnnnnnnnnnnnnnnnnnnnnnnngagccaccaacagaccagatctcctggaccctgcccttctgcggcctgnnnnnnnnnnnnnnnnnnnnnntgtgggggcaaacgaggaccgggcctcccagctgcgtgttctgagtgccatcacacgcaaattcaagctagagccatctgtgagcctggtaaacgtgctagattgctgccctccccagctgacaggtgcggacctctactctctctgctctgatgccatgacagctgccctcaaacgcagggttcatgacctggaggaagggctggagccagggagctcagcactgatgcttaccatggaggacctgctgcaggctgccgcccggctgcaaccatcagtcagtgaacaggagctgctccggtacaagcgcatccagcacaagtttgctgcctgctaggagccccccagggcctgggaccccactcagcatggctgcaggtacctcgatagcccacagagagatctgggagggaagggctcctcctcaggctgctgccaacacacctggaggccacctccctccaggagatcccggggtgcaaagtggcattgggacagcagcaagagctcaagagatatctcctgcctacttgcccctccttccaggctggctttaagaggaaggcccatctgctcaggaggagggccaggtccttgggttctggggattgggcc

SEQ ID NO: 18532 - DNA, 762 bp, Macaca Fascicularis
aaggaactgcccgatgagatcagtattctccttctcggtgtggcgtacttcaaggggcagtgggtaacaaagtttgaccccagaaagacttccctcgaggacttccacttggatgaagagaggaccgtgagggtccccatgatgtcagaccctaaggctattttacgctatggcttggattcggatctcagctgcaagattgcccagctgcttttgaccggaagcatgagtatcatcttcttcctgcccctcaaagtgacccagaatttgaccctgatagaggagagcctcacctccgagttcattcacgacatagaccgggaactgaagacggtgcaggcggtgctgaccctccccaagctgaagctgagttacgaaggcgaagtcaccaagtcgctgcaggagacgaagctgcagtctttgtttgattcaccagactttagcaagatcacaggcaaacccatcaagctgactcaagtggaacaccgggccggcttcgagtggaacgaggatggggcgggagccacccccagcccggggctgcagcctgcgcacctcaccttcctgctggactatcaccttaaccagcctttcatcttcgtcctgagggacacggacacaggggcccttctcttcattggcaagattctggaccccagaggcacctaataccccagtttaacattccagtgccctagaagggaaccccagagggatagcagattccacaggacacaaagctgctcccgtaaggttcaatgc

SEQ ID NO: 18533 - DNA, 161 bp, Macaca Fascicularis
  misc_feature (1)...(161): n = A,T,C or G
gaacgntncctcacacctgggcccgggcaggccagcttcgtgctggaggaacttgctgctgagcctgtgtcgcggtggccgcggggaccctgctgaggggctgtcatgcagtttccaaggtgcacattttccacggaaacagaactcgatgcactgacctg

SEQ ID NO: 18534 - DNA, 1236 bp, Macaca Fascicularis
  misc_feature (1)...(1236): n = A,T,C or G
gcagtgagagaactnnnnnnnnnnnnnnnncagtgatcagaatggcaaagaaaacagcactantnntgatcagagaactccagtcgcttcaacacacagtattagcagtgcagccaccccggatcgaatccgcttcccaagaggcactgccagtcgtagcactttccacggccagccccgggaacggcgaaccgcgacatacaatggccctcctgcctctcccagcctgtcccatgaagccacaccattgtcccagactcgaagccgaggctccactaatctctttagtaaattaacttcaaaactcacaaggagtcgcaatgtatctgctgagcaaaaggatgaaaacaaagaagcaaagcctcgatccctacgcttcacctggagcatgaaaaccactagttcaatggatcccggggacatgatgcgggaaatccgcaaagtgtnnnnnnnnnnnnnnnnnnnnnntgagcagagggagcgcttcttgctcttctgtgtccacggtgatgggcacgcagagaacctcgtgcagtgggaaatggaagtatgcaagctgccaagactgtctctgaatggggtccggtttaagcggatatcggggacatccatagccttcaaaaatattgcttccaaaattgccaatgagctaaagctgtaacccagtaattatgatgtaaattaagtagcaattaaagtgttttcctgaacactgatggaaatgtatagaataatatttaggcaataacgtctgcatcttctaaatcatgatattaaagtctgaggacgagagcacgcctgggagcgaaagctggccttttttctacgaatgcactacattaaagatgtgcaacctatgcgccccctgccctacttccattgccctgagagtcagcgtgtggccccatctccatgtgcctcccgcctgggtgggtgtgagagtggacagtatgtgtgtgaagtggtgtgtatgaaagcatctccctgcactgcagccagtcattactggtgcctctgcgggagatcatgtggtgctaaaacattacacttgccagggaggagaatactgagttactgccaagaattaaccgtaagactagttcatagttaatacaggtttacagttcatgcctgtggttttgtgtttgttgttttgtgtttttttagtgcaaaaggttaaaatttaaagatctgaacaatgctacttagaaaaacacacacaagcaatgtcacaac

SEQ ID NO: 18535 - DNA, 766 bp, Macaca Fascicularis
  misc_feature (1)...(766): n = A,T,C or G
ggaggtgctgcnnnngagacaggnnncnggnncnntgaccagcaannnnnnnnnnnnnnnnnnnnnnnnnnnnnnnnnnnnnnnnnnnnnnnnnnnnnnnnnnnnnnnnncgctagttcctgccctggatggctgcctgcgccggnnnnnnnnnnnnnnnaaacaggccgagatctcagcatctgcccccagtagcctcagaagctgtgatgtagaatcaaatcccgggatatttctccctccannnnnnnnnnnnnnnnnnnntctccaagacattccccagcctcatgcagagccctgggccttctctttggacctgggactcaagcaggcagtaggctcaggccaccttctttctcttnnnnnnnnnnnnnnnnnnnnnnnnnnnnnnnnnnnnnnnnnnnntcaaaaggtggtgctgtcttctgggttgggcccagggatggatctgcccctggtcttgggactccctcttcagctgaagctgagtatgtccagggtggtcttgagccaaggaccaaagatggaggtccttgccctgcctcccttaggcttggcttccctccttaacctctgggccaagcctcaagggcgtctcttcctgggggctttaccaggagaagactcgtccacctctttttgcctgcatggcctttgggcacaaggtcagaggctggatgtggaccgggccctgaacagaagccatgnnnnnnnnnnnnnnnnnnnnnnccagagcccaggcaatggcactgacgctccccataaa

SEQ ID NO: 18536 - DNA, 1194 bp, Macaca Fascicularis
  misc_feature (1)...(1194): n = A,T,C or G
atnnnnnnnnnnnnnnnnnnnnnnnnnnnnnnnnnnnnnnnnnnnnnnnnnnnnnnnnnnnnnnnnnnnnntttcaagnnnnnnnnnnnnnnnnnnnntttctgcttcctccagagcnnnnnnnnnnnnnnnnnnncaccttcatctacaacgggcgtgtggtgggcgaggcccaggtgcaaagcctggattgccgccttgtggctgagccctcaggctctgagagcagcatggagcaggtgctgttccccaagcctggcccactggagccnnnnnnnnnnnnnnngagccagcttgagaggggcatcctggtggccagcaacccccgaggcctcttcgtgcagcgcctttgccccatccccatctcctggaatgcaccccaggctccacctgggccaggcccacatctgctgcccagcaacgagtgtgtggagctcttcagaaccgcctgcttccgcagagacttggccaagtacttccagggcctaggccccccaccgaagttccaagtaacactgaatttctgggaagagagccgtggccccagccatactccacagaatcttatcacagtgaagatggagcaggcctttgcccgatacttgctggaggagactccagagcagcaggcagccattctgtccctggtgtagagcgcggggtacccatcttccacctcacctctttgttcttcctgtctcctttgaaatagactcattcttcacacgattgacctgtcctctttgtgataagtctcaatagttgtctgtgataattgtatcctgaaaatcctcgcacacactggctggtggagcactcaaggctaattttttttcctttttttttttttaattttgacatatacaccctctttcatctgtaagggactgggaaattccaaatggtgtgaacccagggggcctctccctcttccctgacctcccaactctaaagacaagcactgccgggcgcggtggctcacgcctgtaatcccagcactttgggaggccgagatgggcggatcacgagatcagnnnnnnnnnnnnnnnnnnnnnnnnnnnnnnnnnnnnnnnnnnnnnnnnnnnnnnnnnnnnnnnnnnnnnnnnnnnnnnnnnnnnnnnnnnnnnnnnnnnnnnnnnnnnnnnnnnnnnnnnnnnnnnnnnnnnnnnnnnnnnnnnnnnnnnnnnnnnnntg

SEQ ID NO: 18537 - DNA, 724 bp, Macaca Fascicularis
  misc_feature (1)...(724): n = A,T,C or G
ttggagacaggtgagagacnnncaggagctcattttccagcngnnnntcagagtggaagggctggctggatcgggtaggtaagaatagctggatttttttttttttaagaaatggacgcagtctaaagaattaactcacgcagtactttattctaagaagggtctggcatccatatgaggaaaaatgctgaactccaggaaagatggggagttcaagtggattaatgatgtcacgcataattttaagagacaagggagaaaacacaatgtatagccagagaaggagaagctgccatccaaatcctcctaggaaaagagtgggctgcagatgaatctatgactcatgtttcccggtttcaaagggattctggggaaggaggggaacatgcttgcagtacctctccctgtctgtctgctcacataagcattccgtccatctgagctcatcgtgctagtggtatgtgtatgtgcagttacacgactttctgtatcatagattccagtgtgtttatacaaggagacatctgtggtttccccaacaattccaaaaggctatttcaannnnnnnnnnnnnnnnnnnnnnnatgaatgtaacactgtggatattgacttcccgcataaggcaggtgaccccctgaactccagatgtctgcacagcatcttatgttcttatgtattgttttctgttgtgaagaatgtgattggaatgtttggggagcaccag

SEQ ID NO: 18538 - DNA, 915 bp, Macaca Fascicularis
  misc_feature (1)...(915): n = A,T,C or G
gcttgggaaactgggtnnntggatgctgggagaagggagggctgggcagctgannnngtcactnncntcacctctgtgctgggcttgtagaccactgtcctggctgctctcatgcccnnnngataccttgcttggtcaaatccctggctgcttccttctgcacccagaaattccttcccactcactttgttcccacacacaaaccaagagccaaaaatgagtgtgtctattttatatttaaacccagctgtttggaagcaattataaaacttctcccacacaccaacaaccccagaactccccacccagaaggaaaggagacttggggtcctggccccacagtctctaatgctgtagagtagcagaggggacagacagagtgagtgagtgtggtaaaggactgctcttgtccctgagaaggcagaggtgctggctggcctgcccttcccaggcttggataccttgggcctttcccttactcctgcaccaacagcaaactcagaaggaaaaaaacaaaacaaaactctaaaggtaaacacagtccttctccctctctcatgtggctcctcctgcccctacctgggagaaggttcaagtattgcgctgatgggtttgggaaaggaccacagaggctggcatggagaggccctgcctcctcctactcctcctgtctccttatctgaaaaggaggggagggatggataaaggaatgggtaaacaaannnnnnnnnnnnnnnataaaattagtaaatgaataaatacaattaaataaatgaataaataaataaacaagcaaagaaaaaaatatctcacaaggattcaaccatttgcccctccaccagcggggatctaggccggcatattaataaggaggtgccaactactccttaacctttaggggggcatgactgnnnc

SEQ ID NO: 18539 - DNA, 770 bp, Macaca Fascicularis
  misc_feature (1)...(770): n = A,T,C or G
atgcatttaaaaaactgactatatgtatgtatgatgatgtgatnntgaatgagacagataattgtattgctgtccaacaggggttgggaggggcattttgtagggtttgtataatttctagagttctaaaggggtaatataaaaatgtgttcgtgtgtttagcatacgtttgtttcatgtctccattaccagtcgcaactgtgtatctaagacctccaagcttgtttttaaaacaaaacaaaaaacctttctctattctctcagaaatataaatactgttatttttaatattaagaaattcaatataacttttaacacacactgtggaacattaaaccatataaaaatgtagttataactatttttaattccaaggtgttgtttgctcttttcttttaaatattttcttaatattttgtcagattaactagatgaataaattagtattaaccgcattatgaattaaataattttgatttaataaaagggataatatgatttccagtgtttactgtagtgtatcttgtacagataacatgtatttttaaaggaaaaaaaacggaattgaagctattttttcttgcatttctaattgacctgagggacattccgtttgaaatgtactgaagttacagtttctggttttttctccttatttttcttataatgcttgaaatgtctaactattaaaaaagacaattggaaaatgttatgcatgtggtttttaagaaaaaaagtnnntctttttatttgactgacaattcatttta

SEQ ID NO: 18540 - DNA, 1286 bp, Macaca Fascicularis
  misc_feature (1)...(1286): n = A,T,C or G
taagtggaatgaactgaagatacaaannnnnnnnnnnnnnnnnnnnncataagctgaaaaaagacagagagcaatcatgttcaatgtcaccatcctaccaccccccgcccgtaaaatatacattatcacctagtctcagcatctcacttttgacactaaaacttaaaataattttatttaataggagaatttatattatagttttatttaaaaaaaaaaaccaaacacaacagaaaccctacaactggttgcaaactcaggctttccccagtgaccaacaattttaattccaagaggtgaggatnnnnnnnnnnnnnnntcacccaccgggaagctagggaaaggggaccaagctgtctccacacccaggagaggtgtccctccagccgaggcaggacgctgcagctctccctcctgtgcccaggcccgtgactacactctcatctgccatctgagccaagccaggaaggcagttaaaaggaaggcccccaaacatgaagcagagaaaagnnnnnnnnnnnnnnnnnnnnnnnnnntgatagggaagagagggtgctgacggtgttcagaatttcaaattttaattaaaatgaaaaaaaaaaatgtcaacttggaatgtcatgattttcttcaaacaagcaacgacaacaaaatagaagagattaaactattggcatatttaacagcattgaacagaattctgtgtcctgtaaaaaaattagcttatgtccccatgtgggtatatgcaaatgtgtatacaaacatatccccctaggtgagctaaacactattctggaaatagtatcctctacccaaatctacttggctatatctgtggatagtgtaagatgtgtgtatttcaccaatttacataaaagcaagctcccggccaaatctaccaaagagttttccaggaggaaatctggtgggaggaagggagaggaaagacattcatctcagtctttcacctgagcttttgtannnnnnnnnnnnnnnnnctcctgacctcaggcagatgtttaagtcttcaccaactaagaaagctctgttattctggcctgggtgcttgctccagactcaggaacatctggtcaatgcaagcatcactgggctggggaactgcgtgtgtgctgcgtcatctccgactctcttgtagttccttccttccctccctcactcttacatgcagacacagacagacagtctggnnnnnnnnnnnnnnnnnnnctcctggtgtgtnnnatctttncnncacctnnagtctatctgcttgctgcctttgactg

SEQ ID NO: 18541 - DNA, 638 bp, Macaca Fascicularis
  misc_feature (1)...(638): n = A,T,C or G
ccccgccacgaagtcgaagtccaggaaggccgcctgctccgcggctgtgaggggccgcgcgtcacggggcgggctcagtgtgggggcctcnnnnnnnnnnnnnnnnnnnnnnnnnnnnnnnnnnnnnnnnnnnnncagcgtgggcacaaaaggcggcggcaggcgccgggccaacagggcttcccannnnnnnnnnnnnnngggagggaagcggaggggagggtcagcctgggaggctgaggaggggacgtgctgcagtggggaccagtcctagggcttggggaccccggagaggagtcatcatatagggaaaagtggggtggggggactggggctcaggagggatcacctgcgatagcctggtggagaagcgggattaggaaacagtggnnnnnnnnnnnnnnnnnnnncacatctgnnnnnnnnnnnnnnnnnnnnnntgaggtgggaggatcacttgaggccaggagttcaagaccagcctggccaaagtggcaaaatcccatctctactaaaaatacaaaaattannnnnnnnnnnnnnnnnnntgtgtgcctgtaatcccagctnnnnnnnnnnnnnaggtaggagaatcgcatgaatcnnnnngtacnnctgcccctacccctgcccgagag

SEQ ID NO: 18542 - DNA, 753 bp, Macaca Fascicularis
  misc_feature (1)...(753): n = A,T,C or G
gcctcaaggagcagggccaggcgcccatcacaccgcagcagggccaggcactnnnnnngcagatccacgctgtgcgctacctcgaatgctcagccctgcannnnnnnngtgtcaaggaagtgttcgccgaggctgtccgggctgtgctcaaccccactccgatcaagcggggacggtcctgcgtcctcttgtgaccctggcactcggcttggaggctgcccctgccctcccccaccagttgtgccttgnnnnnnnnnnnnnnnnnnctgtgccttaaggactaattctggcacccctttccagggggctccctgaatgcctttttctctgagtgccnnnnnnnnnnnnnnnnggcctgcagagaaaggggctttgggctctgccccgctctgcttgggaacaccgggtattctcatgannnnnnnnnnnnnnnnnnnggacccctccccaagaggccaaccagtgccccctcccattttccgcnnnnnnnnnnnncatctagcnnnnnnnnnnnnnnnnnnnnnntattgtggtgcctcctcaggttaggggctctcagccatctctaacctctgcccttgctgttcttggaattgcacccccaagatgctctctcccttctccagtgagggagccannnnnnnnnnnnnnngtgaatgtgccctaacctgctcctctgtgcccaggccttacgcatttgctgactgactcagcccccatgcttctgggggccttccacccccatcagcatca

SEQ ID NO: 18543 - DNA, 193 bp, Macaca Fascicularis
gaattaaagaaaaaaaaaaaaaattgcagttgatcaacttaattccttttttttatcttccctccctcaattccgttttctcctaccctcttttccaagctgtttcgctttgcaatatgttactggtaatgagttgcaggataatgcaatcttaacttgttttctcctaagtattgagttcaaaactcctgta

SEQ ID NO: 18544 - DNA, 1088 bp, Macaca Fascicularis
  misc_feature (1)...(1088): n = A,T,C or G
ccgagtctagnnctccaaaagcccagttcnnnnnnnnnnnnnnnncccaacagaaacattctgggttgggaaccagggaggcgccctggttggttttccccagttgtatcatagtgccaannnnnnnnnnnnnnnnnnnnnnttctnnnnnnnnnnnnnnnnnnntgctgggagcaggactgattaaattacggaaaatgcctgtaaagtctgagtaagaaacttcatgctggcctgtgtgatacgagagtcagcatcgttaaaggaaaccgcggcttccatctgtgccatacttgttctgtatttgaaatgagctcaaattggtttttgtttttaatttctatgaaggatccatctttgtatatttacatgctttgaggggtgaaaatttttttgggaaattgagtttgaagcactttggcacacacacacaatgattccctccttccgtcactccacgcagctggcagagagcagtgatcaccagcgtgagtggtgtatgtaggacgcttggataaattttttttaggttttttttaggttttttttaggtttttttgcttaacagaatacattgttgtacttatacaccttattaatgatcagctatatagtatttatatacaagtgataatacagatttgtaacattagttttaaaaagggaaagttttgttctgtatattttgttaccttttacagaataaaagaattacatatgaaaaaccctctaaccatggcacttgatgtgatgtggcaggagggcagtggtgaagctggttacctgcctgctgcagtcacgtgtaaacaggatttttattgttagtgttttatgcatataatggactatgcacatttttaattttgtcaaatacacacatgccagtatgacctttcagactccagccatggagagactgtttgcttgtgtttgtttgtagtctctnnnnnnnnnnnnnnnnnnnnnnnnnnnnnnnnttgtggaggccattggttctgcccactcgttccttctcgtgcactgcttactccttcgcagctaagatgccatgtgcaggtggattccatgctgcagacatgaaataaaag

SEQ ID NO: 18545 - DNA, 715 bp, Macaca Fascicularis
  misc_feature (1)...(715): n = A,T,C or G
aagtattcagctggcatttagagagctacagtnntcattttagtgctttacacattcgggcctgaaaacaaatatgaccttttttacttgaagccaatgaattttaatctatagannnnnnnnnnnnnnnnnnnnnnnnnatctttgggtcttactatttttacccataaaagtgaccaggtagaccctttttaattacattcactacttctaccacttgtgtatctctagtcaatgtgcttgcaagtgtacagatctgtgtagtggaatgtgtgtatatttacctctttgtttgctgaaacatgagtgggtatttttttgttttttgtttttgaggccgcatctcaccctgttgcccaggctagagtgcattggcgtgttctctgctcactgcagcatccgcttcccaggttgaagcgattctcttgcctcagcctcccaaatagctgggattacaggcgtgagccaccacgcccagccatgagtgtattttgttaagaactttgaggttagggtaagaagaatgaaaatnnnnnnnnnnnnnnnnagcaagtccacatggagatttgtaggacactggttaaagaatttctttctttttggagtatactatgttcatnnnnnnnnnnnnnnnnnnnnannnnnnnnnnnnnnnnnnnnnnnnnnnnngggcactcccaagggcgttggggtcataaggagacagcactctagc

SEQ ID NO: 18546 - DNA, 800 bp, Macaca Fascicularis
  misc_feature (1)...(800): n = A,T,C or G
agtagttattgtaaataaaatctgaaaggagcagaggaagcatgatgtttctgaatccttttatttttcaaaggacttttaaaatttcaaactacaaaacggatttcatacattctgccataaataaaaacaaacaataaggcaggactctacataagcaaaccaagaacaattgttttcagaaaatgtgataaaatgctttacaatcataagccatccagtttttaaaataaaactgttgaaaaactcacaaatcttcaagcggcacatacaagacacccttgaagagggaacaaaatgtggttctgccattttgtattgttctcacatttttgaaaacctaattttgcttagagcataggtctgttccatattctaaaattcacacaggttggtttgtttttctcaagaaccatatgatagaggcaccaatgacaatacaactttgtttccaagaaccttgtaacaaagcgttgtctcttttaaacatacgacttgaggcaaaaggaatcctggacaggagttttctgcagaggcgtttaagccctaccgaatccgcttctgctgccgtgctctgtaaatgtcatgaacaggggggacaacggctcccttttcttcatcttcatctgaatcctcgttgggccttttgacggccttggtgagtactgcattactttccacagggccgttgccttctacagctagctcnggggccccaccagtaatgatcctcacagcttcctcnnnnnnnnnnnnnnnnnnnnnnnnnnnnnnnnnnnnnnnnnnttcatccacttgta

SEQ ID NO: 18547 - DNA, 680 bp, Macaca Fascicularis
  misc_feature (1)...(680): n = A,T,C or G
gacacaccgcattatccccgctggatcaccaaggagtccaaggacatcctggagaagctctttgaaagggaaccgacgaagaggctgggagtgaccggaaacatcaaaatccaccccttcttcaagaccataaactggactctgctggaaaagcggaggttggagccacccttcaggcccaaagtgaagtcccccagagactacagnnnnnnnnnnnnnnnnttcctgaacgnnnnnnnnnnnnnnncctacagcgacaagaaccttatcgactccatnnnnnnnnnnnnnnnnnnnnnnttctcctttgtgaaccccaaattcgagcacctcctggaagactgaggttcctggacagagcaggctagccccgccctccacccacatctgcccgctccccacgataagcaccagagggactgtggtgacttctgctgctggccccgcccctgcccccagagcggccttggctcctgtctggccaggctctcatggtacttcctctgtgaactgtgtgtgaatctgcttttcctctgccctcggagggaaattgtaaatcctgtgtttcattacttgaatgtagttatctattgaaaatatatattatatatatagacatatatatataaaataggctgtatatattgctcagtagagaaaaaccatgggggactggtgac

SEQ ID NO: 18548 - DNA, 742 bp, Macaca Fascicularis
  misc_feature (1)...(742): n = A,T,C or G
agccacatcacannnacacagggtttcaacatcaaaagtgtacaatcacaaggttttaanntgannnnnnnnnnnnnnnnnnnnnnnnnnnnnnnnnnnnnnnnnnnnnnnnnnnnnnnnnnnaatactgatattcttatatatgtaatcgacagtgcagacagaaaaaggtttgaagagacgggtcaggaactagcggaattattggaggaagaaaaactaagttgtgtgccagtgctcatctttgctaataagcaggatttgctcacagcagctcctgcctctgaaattgcagaaggactgaacctgcataccatccgcgaccgagtctggcagatccagtcttgctcagctctcacaggannnnnnnnnnnnnnnnnnnnnnnnnnnnnnnnnnnnnntgtcaatgcaaagaagaaataaaatctagacgaatggagacgcaggagctgcgggagccgaattcggtcatgaaaaacactaatttgctgctttctgaccaaatgattttccatatgtgtacagccacatctgtttgaagagagggaacaacacagtttagaaagaatccccattacagcagtagatttaactgatctcttgaggttcagtatcatttttcaaataaaggaactatattattctcctctgcataattgaaatagtattaaatgtctcaaagcacangattagaaacatgagatctttnnnnnnnnnnnnnnnnnnnnnnncagtttagaca

SEQ ID NO: 18549 - DNA, 762 bp, Macaca Fascicularis
  misc_feature (1)...(762): n = A,T,C or G
agcatgtttaannnnnnnnnctgtgagannnnnnnnnnnnnnnnnnnnnnnnnnnnnnnnnnnnnnaatgccaccgcnnnnntcttcctgcctgatgaggggaaactgcagcacctggaaaatgaactcacccatgatatcnnnnnnnnnnnnnnnnaaaatgaaaacagcaggtgattccccaacctgagggtgaccaagaagctgcccacnnnnnnnnnnnnnnnnnnnnnnnnnnnnnnnnnnnnnggagagggtgaacactacatccctgggtcannnnnnnnnnnnnnnnnnnnnnnnnnnnnnnnnnggccaccactgagttcaggtggcaccggccatgctccatgagcaggacagtacccaggggtgaggaggtctgccaacttacannnnnnnnnnnnnnnnnnnactggaacctnnnnnnnnnnnnnnnnnnnnnnnnncctgggtatcactaaggtcttcagcaatggggctgacctctcggggatcacggaggaggcacccctgaagctctccaaggccgtgcataagnnnnnnnnnnnnnnnnnnnngaaagggactnnnnnnnntggggccatgtttttagaggccatacccatgtctattccccccgagatcaagttcaacaaaccctttgtcttcttaatgattgaacaaaataccaagtctcccctcttcatgggaaaagtggtgaatcccacccagaaataactgcctgtcactcctcagcccctcccctccatccctggcccc

SEQ ID NO: 18550 - DNA, 580 bp, Macaca Fascicularis
  misc_feature (1)...(580): n = A,T,C or G
caggtaccagcacgacnnnnatatgttgcgccttcaggaggatgcnnnnnnnnnnnnnnnnnnnnnnnnnnnnnnnnnnnnnnnngtgtgcctgccaagcggcgccgcgcgaccctccgagcccgcgctttgccaggtggctggctggggccaccagttcgagggggcggaggaatattccagcttcctgcaggaggcgcaggtacccttcctctccctggagagctgctcagcaccggaggtgcacggagcctccatcctccccggcatgctctgcgcagggttcctcgagggcggcaccgatgcatgccagggtgattccggaggcccgctggtgtgtgaggaccaagccgcagagcgccggctcaccnnnnnnnnnnnnnnnnnnnnnnnnnnnnnnnnnnnnnnnnnnnnnnnnnnnnnnnnnnnnnnnnnnnnnnnctactacctggcctggatccgggagcacaccgcttcctgattgctcagggactcatctttccctcctcggtgattccgcagtgggagactggctggggcatggaaggcaaaattgtgtcccattcccccaatgctgcca

SEQ ID NO: 18551 - DNA, 723 bp, Macaca Fascicularis
  misc_feature (1)...(723): n = A,T,C or G
acagccagnnncatggctgaactanctcaccccgagtccagcgaggctgtctgcaccagttgctcagctctactccctcagccctctcttggaaaggaggaaatgaaagtctcacttcctgtactggagatgatcccacccacagcctgactcaggggcctcagctctagccatctctctcttagtcattagtttttgtaattaaggtagggcactgttggcccctgcttcatcagggcaaagtcaacagggtcacatgggtacatgaaagggagtcctagggcagttgatccatagggatccatgtgtgaaactcagcaaaacttgcttggcagttgtggcaggtggctatgggaacagctgagacccaggcccctccctcagtggtagggaaatcagtgtctccactcccctttcccctggacctcggggctgacccctgtacttcctcttggctgaggcacgtgaggggcttgtgatcatccacacccagccttttacagaggggcagcactccagtcagcatcaccgttctcagagccgagaacatggctttccagtgtctgggaactcttagatggtgacaagaaagcaacacagcccaaaggtaactatctgctggcgaaggggggagcagagatgcacccagtagcaggtgggagagggaaggggaggtaagaaatgagaagcccaaacaggcagttccaagtcattttattcaga

SEQ ID NO: 18552 - DNA, 1035 bp, Macaca Fascicularis
  misc_feature (1)...(1035): n = A,T,C or G
aggctgtagatatatgctannnatagtatannnnnnnnnnnnnnnnnngcagttttccattgaaaaaaacgtaaaaaatgtgtgcaactgtctgtgggtgttgcagaagctattataatgtgaaagagtgttttatgcttataccattttccggtacaagtgtccagtggtgctatattctttatcaggtaggcttcctgatttttggctaccctaaatccattatgcaaatagggctgctgttctgctaattggcacatcttcccactaaggtatgctctgttgtatctttcaggcttattcaaacctactgagagctaacatggatgggctgaagaagagagacaaaaagaacaaaactaagaagaccaaagnnnnnnnnnnnnnnnnnnnnnnnnnnnnnnnnnnnnnnnnnnnnnnnnnnnnnnnnncaacaccagcaacaccagcaacaccagcagcaacagcagcaacagcagcacagtaaagggcacaaatttcctgctttcaccaattaaccactgaattgctattttttccttttggccacatagctaggtttctggttcccccatagtaggtgttttcacataagattagggtcctgttggaaagaacagttgcagtgtttatagggtagttgtggtaagaatctagtttattttgcatttggctaattggtctgtgttgcatggttatattctcctggattatagattaagtctctgtagacatctctgtgaagaacaagctatcattaaacatgtctgtttatcagcactgtctctttattcttttcccatctcattttaacagttctggcaataactgttaattctagaatgatgtgattaatgaataggctttagctctgtaatatcttctaggttattagaattgaaacctgacagttttataaaaagtcatgttatctcatgagctgcttcctacctggctgtataattttatcatcatggttcctcaagtgccaatgagttctcatagtcaaatgagagtttgtttaaccaccttagg

SEQ ID NO: 18553 - DNA, 710 bp, Macaca Fascicularis
  misc_feature (1)...(710): n = A,T,C or G
catgtgaaaacgttnnnaacgtggggaattgtgnnnnnnnnnnnnnnngcttctcccgnnncttgtaatgnnctggtgggttcttgtttgggaatgcaatgttttgtggctggtttagctagagagtgaactctcaaaggtatcacaactgtgcttccattattagtgcaagaaacagacaggctttaaggggtagatgacgtgaaattttgcaagtcttaattacagctgcagatgcatgggattctggatttttttgtttttagtttattgggacttttaaaagtaatcaaggagaaagaaccgcgatgttccctgcttcttcagtaaagggctggtttttccttgggcagaggtggtgctgctgcatgtgcagctgccacagactccaaaggcatagaagtttctgtctacaaacacacacagagtcattctggctctttactgaggctccctgttttctggcaggtgtcctccttggaaactggttttggctctgatcagcggttattttttgcagcaannnctgcgtctgtattgacttgcaagattttannnnnnnnnnnnnnnnnnnnnnnnnnnnnngttactacgtgatttgttcccagaggtttgaaacattcagtgaaactttttaaaactttgattgcatgatgtattttttttttagaaagttatctgtttgagaataatgtctttttataccagga

SEQ ID NO: 18554 - DNA, 688 bp, Macaca Fascicularis
  misc_feature (1)...(688): n = A,T,C or G
ggaaggcttctcnnngcaccagangnncngtgtccagcactgnnntgcaggctttgccccccaagtcctcgatacacactatagcaccgagaatgacgtggagaccatccgggccagcgtctgcgccccctgccacgcctcatgtgccacatgccaggggccggccccgacagactgcctcagctgccccagccatgcctccttggaccctgtggagcagacttgctcccgnnnnnnnnnnnnnnnnnnnnnnnccccgccacagcagcagccaccccggctgcccccagagatggaggcggggccgcggctgcgggcagggctgctgccctcacacctgcctgaggtggtggctggcctcagctgcgccttcatcgtgctggtcttcgtcactgtcttcctggtcctgcagctgcgctctggctttagcttccggggggtgaaggtgtacaccatggaccgtggcctcatctcctacaaggggctgccccctgaagcctggcannnnnnnnnnnnnnnnnnnnnnnnnnaggatgagggccggggcgagaggaccgcctttatcaaagaccagagcgccctctgatgagcccactgcccaccccctcaagccaatcccctccttgggcactttttaattcaccanaagtatttttttatcttgggactgggtttggaccccagctgg

SEQ ID NO: 18555 - DNA, 562 bp, Macaca Fascicularis
tcctccctcagcctccccttcttcccgccccacctcccatttctgttgctggaggggccgtcctccttcctgggaccccctcaccagcttggctcgatgtttgccatgagtattagcttacccaatgggaccgtgccccgcctccccacacacaggccttctgtggggctgggcactgtgtcctcctctaaagaagcagttggggccctcttgctagcctccttgctgaccccaggtcagccctgtgtctgccacaggctgggtcaaaagagccctgcccctgcccctcagggggccagctggggagacaggggcttcttccctcacactgctgccctctgccccttcagttcctgagtagctgggcctgtgcactgggcaggctcctggggctgcctgccctgccttgccgctccccttggacctccaggggatcctgggttggagggaaccaccagcgttcccttctcccccttgtcttcccccctctcctcccagctgctttacttaaagttgattttgaactttttatttgaggagacgaaggaaaacaaatctataa

SEQ ID NO: 18556 - DNA, 661 bp, Macaca Fascicularis
  misc_feature (1)...(661): n = A,T,C or G
gaccaggtggcagccgagtgtgcccgccagaccctgtacannngcctggacgttggcctgcggctgctctcgcccttcatgcccttcgtgacggaggagctgttccagaggctgccccggaggatgccgcaagctccccctagcctnnnnnnnnnnnnnnnnnnnnnnncctcagagtgctcctggaaggaccctgaggcagnnnnnnnnctcgagctggcgctaagcatcacgcgagctgtgcgctccctgcgggcggactacaacctcacccggatccggcctgactgcnnnnnnnnnnnggcggatgaggccacgggcgccctggcatcggctgtgtcggnnnnnnnnnnnnnnnnnnnnnnnnnnnntgtggtggctgttctggccctgggggctcccgccccgcagggttgcgctgtggctctggcctctgatcgctgctccatccacctgcagctgcaggggctggtggaccctgtgnnnnnnnnnnnnnnnnnnnnnnnnnnnnnnnnnnnnnnnnnnnnnnnnnnnnnnnnnnnnnnggaacgccgtgccgcctcaggctaccctgtcnnnnnnnnnnnnnnnntccaggannnnnnnnnnnnnnnnnnnnnnnnnnnnnnnnnnnnnnnnnnnnnnnnnnnnnnnnnnnnng

SEQ ID NO: 18557 - DNA, 767 bp, Macaca Fascicularis
agcccaggaggcagaggttgcagtgagccaaggtcacgccactgtactccagcctgggcaacaaagtgagaccaaaaaaaaaaaaaaggattgaaaatcaaaggaggcaaaattttgacagggaaggaagtaactgcaaaacactaggctttagtaggtacttatctaaaatctagtccagttttctcattttaaaaaatgaagacactgaagtacagacttaaatagctcagatagctaattaggaagtttcaagttggccagtaatagcattctctctgacatttaaaaataatttctattcaaaatacttgcataattgattttacacctcattactggtggataatttatgtgatatgcattgctggtgtccagcatgacccataaacaggtcagaagaatgatcgaatgttttagaataaactcctgcttatagtatactacacagttcaaaagatgtttaaaatgctttgtatttactgccatgtaattgaaatatatagattattgtaacctttcaccctgaaaatcaagcagtatgacagtttagttatttgtatgtgtcactagtgtctaatgaagcttttaaaatctacattttcttctttaaaaatatttattaatgtgaatggaatataacaattcagcttaattccccaaccctattctgtgtgtagacattgtattccacaattttgaatggctgtgttttacctctaaataaatgaattcagagaaaaaaaaaaaaaaaaaaaaaaaaaagg

SEQ ID NO: 18558 - DNA, 609 bp, Macaca Fascicularis
  misc_feature (1)...(609): n = A,T,C or G
gccggcagcacccacatcagcagcagagagggggttnncnnggcgtccggagccgaggaggacgcccctgccagcagcgagcaggcgagtgcgcagagcgagccgagcccggcgccgcccgcccaaccccagatctacccctggatgcgcaagctgcacataagtcatgacaacataggcggcccggaaggaaaaagggcccggacggcctacacgcgctaccagnnnnnnnnnnnnnnnaaggagttcnnnnnnnnnnnnnnnnnnnnnnnnnnaagaaggattgaaatagcacatgctctttgcctctccgagagacaaattaaaatctggttccaaaaccggagaatgaagtggaaaaaagataataagctgaaaagcatgagcatggccgcggcaggaggggccttccgtccctgagtatctgagcgtttaaagtactgagcagtattagcggatcccgcgtagtgtcagtactaaggtgactttctgaaactcccttgtgttccttctgtgaagaagccctgttctctttgccctaattcatcttttaatcatgagcctgtttattgccattatagcgcctgtataagtagatctgctttctgt

SEQ ID NO: 18559 - DNA, 724 bp, Macaca Fascicularis
aggagctgggcacgtgtcccaagcctgtcagtggctctccctgatgcactgtcgtgaaacccctgcttgggaagggaagccgtcgggtgggctaggactgacccttggtgtttttttgggtggtggctggaaacagcccctctcccacgtggcagaggctcagcctggctccctgccccagagtggcagggcgtgacagccacagggtctgcccgctgcacgttcggccaggggggtggagggggaaggtaggggtgtgggggccgtcttcctcctgtctctttcctttcaccctagcctgactggaagcagaaaatgaccaaatcagtattttttttaatgaaatattattgctggaggcgtcccaggcaagcctggttgtagtagtgagtgatctggggggggtctcagcaccctccccagggggtgcatctcagccccctctttccatccttcctgtccagtcccgggcatgggctgtggacgcctgggccagagcccccgctgtgataggtgctccctgggcctcctggggggatgaagccaggtgtcgcccccctcggggagccctggggtgagccaccggggcccccctgctgccagcctcccccctcccgacatgcatctcactctgggtgtcttggtcttttattttttgtaagtgtcatttgtataactctaaacgcccatgatagtagcttcaaactggaaatagcgaaataaa

SEQ ID NO: 18560 - DNA, 711 bp, Macaca Fascicularis
  misc_feature (1)...(711): n = A,T,C or G
cagaacagacatgtcnaggataagaacatcatagaannggttcatcaggtttccatnnncatgaagtanntggaggagtgcaattttgtgcacagagannnnnnnnnnngaaatgtgttgctagttactcaacattatgccaagatcagtgatttcnnnnnnnnnnnnnnnnnnnnnnnnnnnnnnnnnnnnnnnnnnnnnnnnnnnnnnnnnnnnnnncctgtcaagtggtannnnnnnnnnnnnnnnnnnnactacaagttctccagcaaaagcgatgtctggagctttggagtgttgatgtgggannnnnnnnnnnnnnnnnnnnnnnnnnnnnnnnnnnnnnnnnnnnnnnnnnnnnnnnnnnnnttagaaaaaggagagcggatggggtgccctgcaggatgtccaagagagatgtacgnnnnnnnnnnnnnnnnnnnnnngnnnnnnnnnnnnnnnnnntcctgtactgggcagtagtcgcccctgcagtaggtgaaggaggatgctgaggtcaaggnnnnnnnnnnnnnnnnnnnnnnnnnnnnnnnnnnnnngtcacagaagctgcctgcgtgggagaccgcttgtgcactcctgtgccgatcaggggctggaacccaattcttgccccacggcaggtgtgtgaggaggcagacctacagnnnnnnnnnnnnnnnnnnnnnnnnattcgtttcatttaactgg

SEQ ID NO: 18561 - DNA, 768 bp, Macaca Fascicularis
cagtggcatgagagcagcaacgtggaggtgctgcacgtgaacaagcccgacaagtaccagttgcacctgcacgagagctgcgtgctgtccctgaaatttgcttactgtggtaaatggtttgtaagtactggaaaagataacctcctcaatgcttggcggaccccctatggagccagcatattccagtccaaagagtcctcgtcagtgcttagctgtgacatctctgtggatgataagtacatagtcactggctcaggggacaagaaggctacagtctatgaagtcatctactgaaaacatgatgtggtttaacgttgatagttgaattgggccaaaatgtttcgaatttgtagaaatagaaaagttgtaactttaaaagagaaaaaaacatacaaacacctgtttccaaaccttgacacgaaactactttgagtctacaaagaggaggcgacaagtccatcagcagaaagtcacctgtccacatagaccaaatggagcaccaaggccaagcagacagaggggccatgggttgtgggattgaggaacggaattggccgactcacgtgacagcccattctttctttctgggtgatctggggatcacgccttgcccaagtgtgagattacctttcctattccttgcagttcacctcactttctgtcgtttgtagagcagtggtgtctccaatgaacttgtttcctggttttgcatcttgtgaaatgtttttttgtatttttgttgaaggttaaacatttgtataaatgtaa

SEQ ID NO: 18562 - DNA, 486 bp, Macaca Fascicularis
  misc_feature (1)...(486): n = A,T,C or G
acagcagttaactagagtcctaactgatgggatccagcagggccatttctcttgaaggccagtatcctattaggagactcttggaattcttaggttctactcagagtggaaggaccaatcacctctaatattctgtggaaggttttggggccaaattctgccctctgcattctgtgcaacttgtataaaagtcaagttagtattacatgagtttggggtagggttagtgctttgaaaaatgttgaactggctgggcggtannnnnnnnnnnnnnnnnnnnnnnnnnnnnnnnnnnnnnnnnnnnnnnnnnnnnnnnnnnnnnnnnnnnnnnnnnnnnnnnnnnnnnnnnnnnnnnnnnnnnnnnnnnnnnnnnnnnnnnnnnnnnnnnnnnnnnnnnnnnnnnnnnnnnnnnnnnnnnnnnnnnnnnnnnnnnnnnnnnnnnnnnnnnnnnnnnnnnnnnnnnnnnnnnnnnnnnnnnnnnagcac

SEQ ID NO: 18563 - DNA, 651 bp, Macaca Fascicularis
  misc_feature (1)...(651): n = A,T,C or G
ccaaaccccccaaagcagagagagggctgatcccatggggtggaggtnnnnnnnnnnnnngcaaacagccccttctcccgctttgggtcttttttgggtcttttttgtttctttctcaaagccactttagtgagaagcaggtaccaagcctcagggtgaagggggtccattgagggagctgcagtgcctgggccagagctgatgggcaggagccggctcgggcagcgagaggataggcacagtggacggggcaggtgtccaccagcagctcaacccctgcagtcatctcagagccccttcccgggcctctgccccgaggctccctgcccctcctcatgcccctctgtcctctgcgttttctctgtgtaatctattttttaagaagagtttgtattattttttcatacggctgcagcagcagctgccaggggcttggggttttatttttgtggcgggcgggggtgggagggccattttgtcactttgcctcagttgagcatctagaagtattaaaactgtgaagctttctcagtgcactttgaacctggaaaacaatcccgacaggcccgtgggaccatgacttagggaggtgggacccacccacccccatccaggaaccgtgacgtccaaggaaccaaacccagacgcaga

SEQ ID NO: 18564 - DNA, 701 bp, Macaca Fascicularis
  misc_feature (1)...(701): n = A,T,C or G
atgccanannnnncctgatctannnnannnnnaaggcaacctacgatggaaatcacgatacttnnnnngtggagtttctggtggtccctgtgggaggcctctcctttttagtcaatcatgatttctctcctcttgagatcctctggaccttctccatctacctggagtccgtggctatccttccnnnnnnnnnnnnnnnnnnnnagactggggaggccgagaccatcaccacgcactacttgttcttccttggcctctatcgtgctttgtatcttgtcaactggatctggcgcttttactttgagggcttctttgacctcattgctgtggtggccggcgtagtccagaccatcctatactgtgacttcttctacttgtacattacaaaagtactcaagggaaagaagctcagtttnnnnnnnnnnnnnnnnnnnnnnnnnnnnnnnnnntgtcattcagggtgctcggacagaattcttaccacagcaaaggcataagatgcttgatacggaaaatcagaaacttaactcttttgttgcagatagnnnnnnnnnnnnnnnnnngaacgcagaggaaaannnnnnnnnnnnnnnnnnttaatgcatcttgccttatctttttttattactgtgtacaaagatttttttacacaaagaaacttaatgctgtattaataaattcagtngtagcttcaattggga

SEQ ID NO: 18565 - DNA, 615 bp, Macaca Fascicularis
  misc_feature (1)...(615): n = A,T,C or G
gcaaggannncgccgaacgnnnggggtgtcgtggcggcagtgcacgcgaggtgaaggagcaccccctctttaagaagctgaacttcaagcggctgggagccggcatgctggagccgcccttcaagcctgacccccnnnnnnnnnnnnncaaggatgttctgnnnnnnnnnnnnnnnnnnnnnnnnnnnnnnnnggagctggagcctaccgaccaggacttctaccagnnnnnnnnnnnnnnnnnnnnnnnnnnnnnnnnnnnnnnnnnnnnngtggagaccgagtgcttccaggagctgaatgtctttgggctggatggctcagtccccccagacctggactggaggggccagccacctgcaccccctaaaaagggactgctgcagagactcttcagtcgccaaaggatnnnnnnnnnnnnnnnnncgacagcgaggaagagctccccacccgcctctagcccccagtccgaggcccccaccggcagttggcggtagcagctactccgagcgccgtttacagttttgcacagtggtcttccccattgtccactcaagtcgtggcctggggaacacagacggagctgtccccagtgtcctccacccctcagcccct

SEQ ID NO: 18566 - DNA, 420 bp, Macaca Fascicularis
  misc_feature (1)...(420): n = A,T,C or G
ggagcgggcggcggcggcggcatcggctctctgtgcagcaatggccaagatcaaggctcgagatcttcgcgggaagaagaaggaggagctgctgaaacannnnnnnnnnnnnnnnnnnnnnnnnnnnnnnctgcgcgtcgccaaagtgacaggcggtgcggcctccaagctctctaagatacgagtcgtccgcaaatccatcgcccgtgttctcacagtcattaaccagactcagaaagaaaacctcaggaaattctacaagggcaagaagtacaagcccctggacctgcggcctaagaagacacgcgccatgcgccgccggctcaacaagcacgaggagaacttgaagaccaagaagcagcagcggaaggagcggctgtacccgctgcggaagtacgcggtcaaggcctgagtggcgcg

SEQ ID NO: 18567 - DNA, 837 bp, Macaca Fascicularis
  misc_feature (1)...(837): n = A,T,C or G
gaggagacgcgggcacggctgtccaaggagctgcaggcggcgcaggcccggctgggtgccgacatggaggacgtgcgcagccgcctggtgcnnnaccgcagcgaggtgcaggccatgctgggccagagtaccgaggagctgcgggcgcgcctcgcctcccacctgcgcaagctgcgcaagcggctcctccgcgatgatgatgacctgcagaagcgcctggcagtgtatcaggccggggcccgcgagggcgccgagcgcggggtcagcgccatccgcgagcgcctgggacccctggtggagcagggccgcgtgcgggccgccactgtgggctccctggccagccagccgattcaggagcgggcccaggccttgggtgagcggcttcgcgcacggatggaggagatgggcagccggacccgcgaccgcctggacgaggtgaaggagcaggtggcggaggtgcgcgccaagctggaggaacaggcccagcagataagcctgcaggccgaggccttccaggcccgcctcaagagctggttcgagcccctctgcgaagatatgcagcagcagtgaggctgggctggtggagaaggtgcaggctgccgtgggcgccagcaccgcccctgtgcccagcgacaatcactgaacgcccaggcctacagccatgcgacccgactccaccccatgcctcctctctccgctcagcctgcagcgggagaccctgtccccgccccagccgtcctccaggggtgggcccnnngtttaataaagactccaccccatgcctcctctctccgctcagcctgcagcgggagaccctgtccccgccccagccgtcct

SEQ ID NO: 18568 - DNA, 992 bp, Macaca Fascicularis
  misc_feature (1)...(992): n = A,T,C or G
taaatagagctgactgctgaactggtatgcaaattnnnnnnnnaatatatataactcagtnnnnnnnnnnnnnnnnnnnnnnnnnnnnnntatagaaacaaaggcattctttatcctagctttcataggcttctgtataaattaggaagaagataaacataaggctatactgaacaagcaagatcgagagtcaacaatagacatattacttagaacagtgtaagatgacttaccaaaggggttattcagagagtatctgaggtttttgttggtagagcagggtgtgggtggtacatgccacagcctnnnnnnnnnnnnnnnnnnnnnnnnnnnnnnnnnnnnnnnnnnnnnnnnnnnnnnnnnnnnnncaatttactgttgttcttttggtttgcactaggatgcaaaagaaaaatccctgcgctttctgtctgtctttgtggcggcccagattgaattggggaatacatctatagcctagaaatataggctatgttaatggtaatgtaatttttgcaatccaacatatgaaaaacattaatgatagtttataattttaaaaatgttaacaaannnnnnnnnnnnnnnnnnnnnnnnnnnnnnnatcataactggcttctgcttgtcatccacacaacaccaggacttaaaagacaaatgggactgatgtcatcttgagctnnnnnnnnnnnnnnnnnntgatttatttggagtggaggcattgtttctaagaaaaacatgtcatgtaggttgtctaaaaataaaatgcatttaaactcaaatatnnnnnnnnnnnnnncttttagtttaatgcatagttaaattcatcctgtagtgttcctggaggagctagagcctggtcagtaggctactactcatcaattaacttctacagtggagactactaatgggactggaatataannnnnnnntcaaacggttttgattgtnanctgcaataaagggaaagaccatgctcatagcagtgccaa

SEQ ID NO: 18569 - DNA, 706 bp, Macaca Fascicularis
  misc_feature (1)...(706): n = A,T,C or G
aatnnnnnnnnnnnnnnnnngacctgtaatgnnnnnnnnnnnnnnnnnnnnnnnnnnnnnnnnnnnnnnnnnnnnnnnnnnnaccttttttcctcatctagataattaggctgaccagttcacagggttgtaatggattaaatgtaaggaataagtggtaaatgtatnnnnnnnnnnnnnnntaatgagcagccaaaaattatagatattacttgttgtaccttatagctaaagtgagagggagaaagcaaaactataaataaatgaattagacttctttcaccacagttctgttgtgaagacggtgtaactgttagctcaatgagggggttctctgaaactttagcacnnnnnnnnatcaccaggagggattattaaaacaaatctgggccccacccatggagtttnnnnnnnnnnnnnnnnnnnnnnnnnnnnnnnnnnnnnacgcctaatgctcccaggnnnnnnnnnnnnnnnnnnnnnnnnnnnnnnnnnnnnnnnnnnnnnctggtttaatgagtcttaaatgcatctgattgttgaggagtgttagttaaatctagtatcctggtggtgagacccatctgtgtaaaatgcaaatacatctctgacagcccaacacattaattcttctgtctgccccgccccctccccaaaaaatggatcctcttatctaacctatcagtatcattaatataagtggagc

SEQ ID NO: 18570 - DNA, 747 bp, Macaca Fascicularis
  misc_feature (1)...(747): n = A,T,C or G
catgttttccttnnnnnnnnnnnnnnnnnnnnnnnnnnnnnnnnnnnnnnnnnnnnnnnnnnnnnnnnnnnnnnnnngattatgnnnnnnnnnnnnnnnnnnnnnnnnnnnnnnnnnnnnnnnnnntagctttgtcctaccaacttctggaatttatctaattattgtttttaaaagtttctttccnnnnnnnnnnnnnnnnnnnnnnnnnnnnnnnnnnnnnnnnnnnnnnnnnnnnnnnnnnnnnnnnnnnnnnnnnnnnnnnnnnnnnnnnnncaggctcaggtgtacaggttattctgggttaattttatctnnnnnnnnnnnntcctttttgtacataaagatgtcacttaaacctatgcttacaaactaaagagactaatcgctcaatatgaaaacatgaaaaaatttttgcttaaagtattaagatggaagtagttaaatatgggttattttgtccttttactttttaaaaaaaatgttacttattgtatgcactgtgcnnnnnnnagaattctacattttaatgaattataaaattattctgcatctcatcacgtcacagtatttctgtactatttattcatatatatatataaaaatatatatgggcttaatcnnnnnnnnnnnnnnnnnnnnnnnnntttcctacctgtaggcaatagattgctatgtttttaacaaattgtggcaaattctaaacagcaattcttttgtacgtaataggacattcatcctagaaaa

SEQ ID NO: 18571 - DNA, 700 bp, Macaca Fascicularis
caatccaaggttccattaagtgaatttgacttttcctggtctaaaatttctgacattcagtctcagcttgagaaattgatcgaaaagaactactttcttcataagtcagcccaggaagcatataagtcatacatacgagcctatgattcccattctctgaaacagatctttaatgttaataacttaaacttgcctcaagttgctctgtcatttggtttcaaggtgcctcccttcgttgatctgaacgtcaacagcaacgaaggcaagcagagaaagcgaggaggtggtggtggatttggctaccagaaaaccaagaaagttgagaagtccaaaatctttaaacacattagcaagaaatcatctgacagcaggcagttctgtcactgaacacatgcctttctttcatcttgagtaactttgtcctaaaatgaattttttttttcccttgatttgacaggatttttgtagactttagaatttggacttaacaagagtataaattgacttgggttgcaagcactgagcactgttacttcgatcgagtctctcttttagttttgggacataaaacaggctttaattttcttggttgcccaagggcagagcaaggaatatctggtcttgtgattatataatattttaattttaaatatccctccctcatacacacaaatgtatgttactattttaatataatctt

SEQ ID NO: 18572 - DNA, 723 bp, Macaca Fascicularis
  misc_feature (1)...(723): n = A,T,C or G
gtgatgagcnnnnnnnnnnnnnnnnnnnnnnnnnnnnnnnnnnnnnnnnnnnnnnnnnnnnnnnnnnnnnnnnnnnnnnnnnnnnnnnnnnnnngcatctgggttactcaccannnnnnnnnnnnnnnnnnnnnnnnnnnnnnnnnnnnnnnnnncaaannnnnnnnnnnnnnnnnnnnnagtttatcaaggaaattggatacactcacatgaaaatagcagaaggagtgaactccctttnnnnnnnggcaggcctcctggccaggctgtgtcagaagacaatggccccggtggccagttnnnnnnnnnnnnnnnnnnnnnnnnnnncaggagccnnnnnnnnnnnnnnnnnnnnngtggctttctgatgggggaaaatgctgccttaggctggagccagcatgactgccgttnnnnnnnnnnnnnnnnnnnaggcgcgnnnnnnnnnnnnnnnnnnnnnnnnnnnnnnnnnnnnnnnnnnnnnnnnnnnnnnnnnnnnnnnnnnnnnnnnnnnnnnnnnnnnnnnnnnnnnnnnnnnnnnnnnnnnnnnnnnnnnnnnnnnnnnnnnnnnnnnnnnncaggcannnnnnnnnnnnnnnnnnnnnnnnnnnnnnnnnnnnnnnnnnnnnnnnnnnnnnnnnnnnnnnnnnnnnnnnnnnnnnnnnnnnnnnnnnnnnnnnnnnnnnnnnnnnnnnnnnnnnnggggtaaaaaaaattaaataa

SEQ ID NO: 18573 - DNA, 764 bp, Macaca Fascicularis
  misc_feature (1)...(764): n = A,T,C or G
gcagagaagaattctgaagtagnnnngagccaagggcacgtgaagttgttgactggaggaagtatgaacaagaacaggagaaaggtaaagaggatgtgaaaataatagaagaaaagcgaaaggaacaccaagaagcatatcagaaagcccgtgagaagtatagcaatgtgcagtggaagnnnnnnnnnnnnnnnnnnnnnnnagaaataaaagaacaaacatccttaaagcgaaaagaggaaatggaaagagattcaaatgtacttcctgtgattattaaaggtgttatatatggctttaatgtgaatgtaggcaaagttatccaagagtcagctgcaaaaaaaggtgtaaaaatgaaacttcacaaaataatttaccgtcttgttgaagatttgcaagaggaactgagcagcagattaccctgtgctgtggaagagcacccagtaggtgaggcatctatactagctaccttctctataacagaagggaagaaaaaagttcctgtggctggctgcagagtccaaaagggacagttagaaaaacaaaaaaaatnnnnnnnnnnnnnnnnnnnnnnnnnnnnnnnnnnnnnnnnnnnnnnnncactgaaacaccataaagatgacatttcaattgtcaaaacgggaatggattgtggtctcagtttagatgaagaaaatatggaatttaaagtgggagatagaattgtttgttacgaagaaaaacaaattcaagccaagacttcttgggatccaggatttaaaata

SEQ ID NO: 18574 - DNA, 759 bp, Macaca Fascicularis
  misc_feature (1)...(759): n = A,T,C or G
cccagcccggnaganatcccctccnnctnnncctgtagttcagcccaggccttccccgacgccgggccttgcacacagcccctatccagccccgtgtctgggagcnnnnnnnnnnngaggaggtccaattnnnnntagagccagaaggtggagcagtagctcctggtggaaccgtaaccctgacctgtgaagtccctgcccagccctctcctcaaatccactggatgaaggatggtgtgcccttacccctttcccccagccctgtgctgatcctccctgagatagggcctcaggaccagggaacctacaggtgtgtggccacccatcccagccacaggccccaggaaagccgtgctgtcagcatcagcatcatcgaaccaggcgaggaggggccaactgcaggctctgnnnnaggannnnnnnnnnnaactctagccctggccctggggatcctgggaggcctggggacagccgctctgctcattggggtcatcttgtggcaaaggcggcgacgccaaggagaggagaggaaggcctcagaaaaccaggaggaagaggaggagcgtgctnnnnnnnnnnnnnnngaggaacctgaggcaggcgagagtggtactggagggccttgaggggcccacagagagatcccatccaccagctcccttttctttttcccttgaactgttctggccccagaccaactctctcctgtataaccccaccttgccaaactttcttctacaaccagagccccccacaatg

SEQ ID NO: 18575 - DNA, 780 bp, Macaca Fascicularis
  misc_feature (1)...(780): n = A,T,C or G
gagcactcccagcgccccaggtccgctggtgttcactgcnnngagcccagactcgctgnnnnnnngctgggagcggccacggaggcccaatggggatnnnnnnnnnnnnnnnnnnnnnnnnnngatggcccaaggaggagggccagccactacattccgggnnnnnnnnnnnnnccccgagagccggctgaccgtgccgggcctcagcgagaacgtgccctacaagttcaaggtgcaggccaggaccactgaggnnnnnnnnnnnnnnnnnnnnnnnnnnnnnnnnnnnnnnnnnnnggatggaggccccnnnnnnnnnnnnnnnnnnnnnnnnnnnnnnnnnnnnnnnnnnnnnnnnnnnnnnnnnnnnnnnntcaccaccacccgccgggctcttccagcacccactgcaaaatgggctgaccctgggggcccagcacctggaggcaggcggctccctcacccggcatgtgacccaggagtttgtgagccggacgnnnnnnnnnnnnnnnnncctcagcacccaggtggaccaacagttcttccaaacctgatcccaccctgcctcacccccgccatgtcccactaggcatccttccaactcctctcccagagcctcctcagctactccatccttgcacccctggccgcccagcccacccacatgcacagagcaggggctaggtgtctcctgggaggcatgaagggggcaaggaccccctctnnnnnnnnnnacctatttgtaaccaaaaagctgggagcagcacaaggacccagcct

SEQ ID NO: 18576 - DNA, 702 bp, Macaca Fascicularis
  misc_feature (1)...(702): n = A,T,C or G
atgcnnnnnnnnnnnnnnncttncgcnnnacannnnnnnnnnnnnnnatcagattctgctggaaagacacaggttgatccacatgtgacctcttctgccttcactgggctgggtgatccttggtgcctnnnnnnnnnnnnnnnnnnnnnnnnnnagctgccttgccaaagacatttaatcagcacacagctgcnnnnnnnnncccacnnnnnnnnnnatgcacatgaacaacagtaacggctccagccttcaagccagggccccatgcccagtgcatcagtgggcctggggctccaggctacatcaagcacggatggtnnnnnnnnnnnnnnnnnnnnnnnnnnnnnnnnnnnnnnnnnnnnnnnnnnnnnactaccttcacagatcatgcattcnnnnnnnnnnnnnnnnnnnnnnnnnnnnnnnnnnnnnnnnnnaccccagttccacataagcacttttggaagaaaacaaccaaagttggcctaaaattggcgctggaatttgggctggggaaaattttgtggttatttcctttaaaaaggaacaaaactttagtatttaataagttgatttatttaatgtaatttcaaacaattatgaataatgcaatgtacggtagaatcacatcctgattttatttagtaacactgaccaagtttaactccatatgaagtgtaaagcttgataccatttatgtct

SEQ ID NO: 18577 - DNA, 738 bp, Macaca Fascicularis
  misc_feature (1)...(738): n = A,T,C or G
gccattacaccaatgcttcnnnnnnnnnnnnnnnnnnnnnnnnnnnnnnntgccagacccagaagccccagaagccatggtgggaggacgagtgggaggttcccagnnnnnnnnnnnnnnnnnnnnnnnnnnnnnnnnnnnnnnnnntcggggaggtgtggatggggtactacaacgggcacacaaaggtggcagtgaagagcttgaagcagggtagcatgtccccggacgccttcctggccgaggccaacnnnnnnnnnnagctgcaannnnnnnnnnnnnnncggctctacgctgnnnnnnnnnnnnnnnnnnnctacatcatcactgaatacatggagaatggtgggtgccgcccgagtcggctgccgggggacactgctctccccgctgtccctgccggagggtgaaagtacacctttttttctggcccaaagctcaagcaaggannnnnnnnnnnnnnnnnnnnnnnnnnnnnnnnnnnnnnnnnnnnnnnnnnnnnnnnnnnnnnnnnnnnnnnnnnnnnnnnnnnnnnnnnnnnnnnnnnnnnnnnnnnnnnnnnnnnnnnnnnnnnnnnnnnnnnnnnnnnnnnnnnnnnnnnnnnnnnnnnnnnnnnnnnnnnnnnnnnnnnnnnnnnnnnnnnnnnnnnnnnnnnnnnnnnnnnnnnnnnnnnnnnnnnnnnnnnnnnnnnnnnnnnnnnnnnnnnnnnnnnnnnnnnnnnnnnnngatcatgctact

SEQ ID NO: 18578 - DNA, 755 bp, Macaca Fascicularis
gaagagtataatggtatgttaatatagccagtcccgttttttttaaatggggtaaaaatcaaatgcaatcccatcttgttttaagaatttgagaactaataaatgcaccttaatggatagtgttcctttcaaacatgtgagttctttaacaaaaatgaaataaaccaggtgtctgatttccgattaatcactgctggccattacataggttttgttgtttggggcagggagggggcttttgttcccttttgacataatatagtcaatgcactaacaattatgtatattcaaacttgattattttaaattcgatcttcagctgtactgtaaatagggtactgcattgtagtctccatatctgtattacttttctgtaatatttaagagttgcttaaaagtatacaaaatgtacagttactaaaatagctaattatttctctctcccccttggacaagaaggggcttcagttgttcctccatggctagaactataataaacaatgtacccgtaatttgtaacataaagtattgcaatatgttagtaacaatcttgcagccttcttttccaaagttcattttattttgatcagttcagtatattgcactaattattttaggtattttcattatatgaaagctaccatgtgtcagagatgatttagtctatttaagtgttggactgctaggagaacttgtacatttacaataatgcagaattaggaaaacggttcaccagtgtttagttttatattgag

SEQ ID NO: 18579 - DNA, 763 bp, Macaca Fascicularis
  misc_feature (1)...(763): n = A,T,C or G
actagggtcattgaaagcttcagtnnctgagcatgaccnnnagtctgtggactccatttaaaaataggcatgaataagatgactaagaatgtaatggggaagaattgccctgcctgcccatcccagagccataatgtcaactttgctagagctatttttacctatctatttatcgttcttgatcataagccacttatttatatcatgtatctctaaggacctaaaagcactttatgtagtttttaatattaatcttaagatctagttacggtaactaaaacagcctgtctcccaaatccagtggaaacaagtgcatagatgtgaattggtttttaggtgccccacttcccaattcattaggtatgactggaaatacagacaaggatcttagttgatattttgggcttagggcaccccaagtggtttgggaaaggaggaggggagtggtgggtttatagggagaggacgaggcaggtggtctgagtgctgactgtcagctacatagttcaggcaaatcctccaaaagggaaagggaggggctgcttagaaggatggcgctctcagtgactactttttgacttctgtttgtcttatgcttctctcagggaaaaacatgcagtcctctagtgttcatgtgcattctgtgggggtgaacaccttggttctggctaaacagctagtacttttgatagctgtgccaggaaaaggaccaactacaaattaatgttggttgtaaaatgtagtgtgtttccctaacttcctg

SEQ ID NO: 18580 - DNA, 1004 bp, Macaca Fascicularis
  misc_feature (1)...(1004): n = A,T,C or G
gtagagagtagaaagagcagtagatgnnnnnanngatagannnnnnnnnnnaaatagaatgaagatagttcgagagaagaagattctagaagttcatattgacaaaggcatgaaagatggccagaagataacattccatggtgaaggagaccaagaaccaggattggagccaggcgatattatcattgtgttagatcagaaggaccatgctgtttttactcgacgaggagaagaccttttcatgtgtatggacatacagctggttgaagcattgtgtggcttccagaagccgatatccactcttgacaaccgaaccatagtcatcacctctcatccaggtcagattgtcaagcatggagatatcaagtgtgtactaaatgaaggcatgccaatttatcgtagannnnnnnnnnnnnnnnnnnnnnnnnnnnnnnnnnnnnnnnnnnnnnnnnnnnnnngctttctctctcctgataaactgnnnnnnnnnnnnnnnnnnnnnnnnnnnnnnnnnnnnnnnnnnnnnnnnnnnnnnnnnnnnnnnnnnnnnnnnnnnnnnnnnnnnnnnnnnnnnnnnnnnnnnnnnnnttacaatggagaagcatatgagnnnnnnnnnnnnnnnnnnnnnnnnnnnnttcagtgtcagacctcttaatgggccagtgaataacactcactgctggcatttaatgtgcattagtggataagtgaaggactgtaatcataatatgctcactacttgctcttgtttttgttttaatattcaactatagtagtgtttaaaaagtaaatgaagaataaacgcaaatataannnnnnnnnnnnnnnnnnntatgtatgatgacttcagtgtccaagatgaagtttaatacctgtaaaaactacgaagaagttcccctagcatttctaggccaaaccttgtaattgacttcagctatgtacgtggacaagcttagactgaaatgctaggtatatgtgttggcttcnnntgtatgaccctt

SEQ ID NO: 18581 - DNA, 758 bp, Macaca Fascicularis
  misc_feature (1)...(758): n = A,T,C or G
agctggatgcatttnnnaggagccagctctcaatgaagccannnngagcaatctgaaggccccgttggacatcccagtgcctgatccagtcaaggagaaagagaaagaggaacggaagaaacagcaggagaaggaagacaaggatgaaaagaagaagggggaggatgaagacaaaggtcctccctgtggcccagtgaactgcaatgaaaagatcttggtccttctgcagcgcttgaagcctgagatnnnnnnnnnnnnnnnnnnnnnnnnnnnnnnnnnnnnnnnnttgcagctgcagatacctcggattgaggatggtaacaattttggagtggctgtccaggagaaggtgtttgagctgatgaccagcctccacaccaagctagaaggcttccacacccaaatctcnaagtattnnnnnnnnnnnnnnnnnnnnnnnnctaaagcagccaagcagccccatgtnnnnnnnnnnnnnnngctggtgcacgagctggatgaggcagagtnnnnnnnnnnnnnnnnnnnnnncatggagatccgcaatgcttatgctgtgttatnnnnnnnnnnnnnnnnnnacttcgagaagctcaagaagcccaggggagaaacaaagggaatgatctattgagagccctctctcccattctgggatgggtacagcagagaccttcctactttttactggnnnnnnnnnnnnnnnnncaaacttgtttctgttgagatttttccctcatcttgcctcccaggcacaa

SEQ ID NO: 18582 - DNA, 711 bp, Macaca Fascicularis
  misc_feature (1)...(711): n = A,T,C or G
tgaagatgcaggnncaaagatgagtggtgaaaaaatatgacttttctttttggtaatatttttgtgatctttgatggtttttactnnnnaagtgtaatgtatgcatttatataaccgttttgttatttgaatcttggaaaactagttttattatattcagatagccttgttttttaaaaaggcctttgcatacacctttatgagatagtgtaaaattgactatttatattaatgaaattatatgtcatttcacattgtatgccagaaattaggataccaattatgaattacagtcagtagttaatactagataggattagaaattttgattagagagattacactatattatggaaaaacttgttaatgtagaattatactgcttcatattattttacctattagtacactcatagttagctttgtaataaatttatgttttctttaataattttagttcttcaaagaatggctgatgctggcctgtaatttttctttcaaggataataatttgtgtgttgtttgatttgtttatattttacatctctgtagttttatttttagaagttgtgagatactggatgtgtggctatttttcctttctctgtattctttatgaaacataacttttgaaaaacctatgtattattcatacagctttggtttgtatattctgtatagcctaactacacacgatcaaaatgtatgtca

SEQ ID NO: 18583 - DNA, 1071 bp, Macaca Fascicularis
  misc_feature (1)...(1071): n = A,T,C or G
agtataatagagcacatgcctcctgnatcagtgaccaaatataggaaacannnnntcattctgctattccagagacttcagaattccaaaacaaccaagtttatcaagagttttttagtctttattaatttgtattgcataaaatatggggcactagcactacaagaaatatttgatggtatacaaccaaaaatgtttggaatggttttggaaaaaattattattcctgaaattcagnnnnnnnnnnnnaacgtagagaaaaagatctgtgcgnnnnnnnnnnnnnnnttactaacagaatgtcccccaatgatggacactgagtataccaagctgtggactccattattacagtctttgattggcctttttgagttacccgaagatgataccattcctgatgaggaacattttattgacatagaagatacaccaggatatcagactgccttctcacagttggcatttgctgggaaaaaagagcatgatcctgtaggtcaaatggtgaacaaccccaaaattcacctggcacagtcacttcacaagttgtctaccgcctgtccaggaagggttccgtcnnnnnnnnnnnnnnnnnnnnnnnnnnnnnnnnnncagtatctccaagggtaccttcannnnnnnnnnnnnnnnnnnctttaaaatgcatttttctaattggctaaacccagatgggtttcccaggaaatcacagacatctgagcacagctgcattaaaacaaagcaagttttccttttgaacttgtcacaaattccatcttgtaaaggatattaaatgttgctttaacctgaaccttgagcaaattagttggtttgtgtgatcatacatttatgtgggtggcttctagtttgcaacttcaagggacaagtattaatagttcagtgtnnnnnnnnnnnntgcgttgaatatttgcacggtttggataatcttaaattttgacggacactgtggagactttctgttactaaatccttttgttttgaagctgttgctatttgtatttctcttgtcctttatattttttgtctgtttctttacgcttttatggaaat

SEQ ID NO: 18584 - DNA, 708 bp, Macaca Fascicularis
  misc_feature (1)...(708): n = A,T,C or G
gtactcagggttaatgttaattaagaaaaccacatnnnagccttcagtttccaatcccagtttaaaggaatgtgcgtagtgagatggtgggctgcctcagtgtccttattagaagggtgtaccatggtttgctcttcttctagaaccactggttcacctacaatgagacaatgacagtggagagtgtgacccaagctgtgtccaatctggctctccagtttggagaagaagatgcagatccaggtgccatgtctcgtccctttggagtagcattgttatttggaggagttgatgagaaaggacctcagctgtnnnnnnnnnnnnnnnctgggacctttgtacagtgtgatgctcgtgcaattggctctgcttcagagggtgcccaaagctccttgcaagaagtttatcacaagtctatgactttgaaagaagccatcaagtcttcactcatcatcctcaaacaagtaatggaggagaagctgaatgcaacaaacattgagctagccacagtgcagcctggccagaatttccacatgttcacaaaggaagaacttgaagaggttatcaaggacatttaaggaagcctgattctcagaacttctctgggacaatttcagttcttaataatgtccgtaaattttatttccaactcctgatccttnnnnnnnnnnnnnnnnnnatgtgcatttttttaatgatgtctgtaca

SEQ ID NO: 18585 - DNA, 182 bp, Macaca Fascicularis
tgaaggacgtccttccccaggagccgactggccaatcacaggcaggaagatgaaggttctgtgggctgcgttgctggtcacattcctggcaggatgccaggccaaggtggagcaaccggtggagccagagacggaacccgagcttcgccagcaggctgaggggcagagcggccagccctggg

SEQ ID NO: 18586 - DNA, 749 bp, Macaca Fascicularis
  misc_feature (1)...(749): n = A,T,C or G
aggaggccctcgtcatggagaagtgtgatgacgaggcagtggccnnnnnnnnnnnnnnnnnnnnnnnnnnnttcacagggaaccccaacattccaaaacctcggcgaatcctgcgctcggcctggggcagcaacccctnnnnnnnnnnnnnctattcatacacgcaggtgggctccagtggggcggatgtggagaagctggccaagcccctgccgtacacggagagctcgaagacagcgcnnnnnnnnnnnnnnnagcagcagcctggtcaccttttctcttccaagtgcccnnnnnnnnnnnnnnnngctaacaggggcgccgtaaagcccatgcaggtgctgttttccggtgaggccacccaccgcaagtactattccactactcacggtgctctgctctctggccagcgcgaggctnnnnnnnnnnnnnnnnnnnnnnnnnnnnnnnnnnnnnnnnnnnnnnnnnggctgtcctcgctgccgagaagagccactaacttgtgacctccagcccgccccttgctgccatgtgctcctgccttcctgatcctctgtagaaaggatttttatcttctttagagctagctgccctgactgccttcagacccggccctgtagcttttctttttctccaggctgggccatgagcaggtgggttgttgggttacctctgtgctggatcctgtgccccccttgcctaccctctgtcccgccttgttattgtaagtgccttcaatactttgcatt

SEQ ID NO: 18587 - DNA, 748 bp, Macaca Fascicularis
  misc_feature (1)...(748): n = A,T,C or G
attaacatgcttgtgtatannnnnnnnnnatatataatattatggtaatagcagaagttttgttatcttaatagcgggaggggggtatatttgtgcagttgcacatttgagtaactattttctttctgttttcttttactctgcatacattttataagtttaaggtcagctgtcaaaaggataacctgtggggttagaacatatcacattgcaacaccctaaattgtttttaatacattaacaatctattgggtcaactgacatccattgtatatactagtttctttcatgctatttttattnnnnnnnnnnnnnnnnnnnnnnnnnnnnnnnnnnnnnnnnnnnnnnnnnnnnnnnnnnnnnnnnnnnnnnnnnnnnnnnnnnnnnnnnnnnnnnnnnnnnnnnnnnnnnnnnnnnnnnnntttcagcctagaatttgatacgctttttagaaatatgcccagaatagagaagctatgttggggcacatgtcctgcaaatatggccctagaaacaagtgatatggaatttacttggtgaataagttataaattcccacagaagaaaaatgtgaaagactgggtgctagacaagaaggaagcaggtaaagggatagttgctttgtcatccgtttttaattattttaactgacccttgacaatcttgtcagcaatataggactgttgaacaatccnnngtgtgtcaggacccccaaatgtcacttctgcataaannnntgtatgtcatc

SEQ ID NO: 18588 - DNA, 730 bp, Macaca Fascicularis
  misc_feature (1)...(730): n = A,T,C or G
cgttcagatgnnaagccgtgtccaccttttaagattgnnnnnnnnnnnnnnnnnnnnnnnnnnnnnnnnnnnnnnnnnnnnnnnnnnnnnnnnnnnnnnnnnnnnnnnnnnnnnnnnnnnnnnnnnnnnnnnnnnnnnnnnnnnnnnnnnnnnnnnnnnnnnnnnnnnnnnnnnnnnnnnnnnnnnnnnnnnnnnnnnnctctgtcagataaaattcaacagcagcgatnnnnnnnnnnnnnnnnnnnnnnnnnnnncaaaattagtgatgagggaatagcttatcttgttaaagtgtcagaaggagacttaagaaaagccattacatttcttcaaagcgctactcgattaacaggtggaaaggagatcacagagagagtgatcacagacattgctggggtaataccagctgagaaaattgatnnnnnnnnnnnnnnnnnnnnnnnnnnnnnnnnnnnnnnnnnnnnnnnnnnnnnnnnnnnnnnaatagatgagggtcatgcagcaactcagttcgtcagtcaactccatgatgtggttgtagagaataatttatctgataaacagaagtccattattacagaaaaacnnnnnnnnnnnnnnnnnnnnnnnnnnnnnnnnnnnnnnnnnnnnnngcaactcatcagcctttgtgcaactnnnnnnnnnnnnnnatctcagaattgttaaaaagtgaatatattttgatgtggggttttgtaaataaggg

SEQ ID NO: 18589 - DNA, 743 bp, Macaca Fascicularis
  misc_feature (1)...(743): n = A,T,C or G
gccgacnnnnnnnnnncagtgagataagtgtcacagtagaagcatgaaccaaggaagcacagacaactatttctgcctgggggagctggggaaggaggtgacacttgagttggggcctcaaaggacaagtaagatgttgccaggcagagaaagggggaagggcatcccaggcagagggaactacacagcaaaaagcaagggagcctggccacgttcggcctgttgaggaagggaaggtggnnnnnnnnnatgggaggtgaccagccctgctgagcccacgctcccagctnnnnnnnnnnnnnnnnnnnnnnnnnnnnnnnnnnnnnnnnnnnnnnnnccttctccttacccatcggccctcggggggggggcttcagggagaggctgcattgcctgccaggtcctcgcagacctccggttcctcgtcagaggagctcggggagtccgcctcactgctgtcgtcttccccacagaccgctcgggcatggagaattccgcttcggtggagcagctccaggagacgctgctgcgggctcttcgggctnnnnnnnnnnnnnnnnnnnnnnnggagacttcccgcttcaccaagctgctgctcaagctgccggacctgcggaccctgaacaacatgcattccgagaagctgctgtccttccgggtggacgcccagtgacccgcccggccggccttctgccgctgcccccttgtacagaatcgaactctgcacttctctctccttcatc

SEQ ID NO: 18590 - DNA, 731 bp, Macaca Fascicularis
  misc_feature (1)...(731): n = A,T,C or G
ccaagccgaaaccatagctcttgagaaggaacagaagttacagaatgacnnngcagaaaaagagagaaagctgcaggagacacagatgtccaccacctcaaagctggaggnnnnnnnnnnnnnnnnnnnnnnnnnnnnnacagccctggaaaaaactcgaacagaattatttgacctgaaaaccaaatacgatgaagaaactactgnnnnnnnnnnnnnnnnnnnnatgatcatgacgnnnnnnnnnagggcaaaccagagggcagaggtggctcagagagaggcggagaccttaagggaacagctctcatccgccaatcactccctccagctggcctcacagatccagaaggcaccagacgtggagcaggccatagaggtgctgacgcgctccagcctagaagttgagttggccgccaaggagcgggagatcgcacagctggtggaggacgtgcagagactccaggccagcctcaccaagctgcgggannnnnnnnncagccagatctcccannnnnnnnnnnnnnnnngcgccaagaacagcacgctcaaacaactggaagaaaaactcaaannnnnnnnnnnnnnngaagaggtgaagaaagagctgaaagttccgctcttattgcccaggctggagtgcnnngntgctatctgagctcaccgcaacctctgcctcnnnnnnnnnnnnnnnnnnnnnnnnnnnnnnnnnnnnnnnnnnnnnattacgt

SEQ ID NO: 18591 - DNA, 745 bp, Macaca Fascicularis
  misc_feature (1)...(745): n = A,T,C or G
tccatnnnttttcaggggttatttaaaaatctgccttagattctctagtgaagacaagcatttcaagaaagagttacctggatcagccatgctcagctatgacgcctgaataactgtctactttatcttcactgaaccactcactctgtgtactggccaacagatttttaatgtggttttcatatcaaaagatcatgttgggactaacttgcctttttccccaaaaaataaactctcaggcaagcatttctttaaagatattaagggagtaaatatacttgggtacttattgaaatggacagtaataagtaaatgttcttataatgctacctgatttctgtgaaatgtgtttgagaagccaaaattctaggatgtagaaatctggaaagttcatttcctgggattaacttctccagggatttttttaagttaatttgggaannnnnnnnnnnnnnnnnttcttgtgagtctttgccacatttgacnnnnnnnnnnnnnnnnnnnnnnnnnnnnnnnnnnnnnnnnnnnnnnnnnnnnngtacatgtattatatacaagcacaacagggcttgcnnnnnnnnnnnnnnnnnntaataacactatttggtagcctaacttcatatatgtattcttaattgcacaaaaagtcaataatttgtcaccttggggttttgaatgtttgctttaagtgttggctctttctatgttttataaaccaaaacagaattccaaaaacaatgaagaa

SEQ ID NO: 18592 - DNA, 871 bp, Macaca Fascicularis
  misc_feature (1)...(871): n = A,T,C or G
aaggtgagggatccaggggaggtctgaggannnnnnnnnnnnnnnnnnnnnnnnnnnnnnnnnnnnnnnnnnnnnnnnnnnnnnnctcaccccctctcccctaccgttctcatggtgttggcctcgtgtttgctaccaactggtagaacctcctttcctaatattcttctcttaatggaagtggactgactttatgcctgtgaagtccccaggagctacactgctactgagaaaaccaggctccttggggctagacagactggcaaagagttgagctcttcctctccgagaggcgcagcaagagcagcagatgctcacagactacactcagctcaggccccttggagcaggatggctcctctaagaatctcacaggacctcttagtctctgccctacaagccttcttcactccacagccctacccctcctaccccagcactggtactgctgtgatgagccaagtggcagctaaaagttgggggtgttctgcccagtcccctgtcattctgggctagaaggcaggggaccttggcatgtggctggccacaccaagcaggaagcacaaactcccccaagctgactcatcctaactaacagtcacgccgcgggatgtctctgcccacattaaactaacagcattaatgcagtcagcctctggttctttgtgccatatgagcgcctgcaaattccctggaacttctttccctcccgccttcacatgcagtgacgagctcatgtctgtggcgcttgaccacaatgtgcacggaattgactcctgcttcaccaaaaccagataatttaataaactttattcttgttgggggaagagagaaggagggggaaaaaaagccacctactccactcctctca

SEQ ID NO: 18593 - DNA, 730 bp, Macaca Fascicularis
  misc_feature (1)...(730): n = A,T,C or G
ctcccaattgattgtcacttaaatgaaaatttaaaaatgaataaaaatacgtacttctcagctgcaaatattacagggaattagggcacccacaagaatgaagagagaaagcagctccctaacttcaaaactattttggtacctgacaacaagagcatttcagagtaattaataaagtaaattnnnnnnnnnnnnnnnngttaaattatattcatttgaattgatggtcaagagattttcctttttttttttaacagactgttcagtgtttgtcaagctttctggcataaatatgtacnnnnnnnncatttccacttacaatatatagaaacnnnnnnnnnnnnnnncttacagcagtgcctatatagtgactgatttttaactttcaatgtccatctttcaaaggagataacaccaagtacaatgttgaaagaatattcacttcacctagcagggaaaaaatacacaaaaactgagaatacttcatatagcccattttaacatgtataaactgtgtgacttgtggcgtcttataaataatgcactgtaaagattactgatagttgtgttatgttaatgtgcctaatttcatgtatcttgtaatcatgattgagcctcagaatcatttggagaaactatattttaaagaacaagacatacttcaatgtattatacagataaagtattaaatgtgtttgattataaaannngcggacatnnntaaaatcaa

SEQ ID NO: 18594 - DNA, 672 bp, Macaca Fascicularis
  misc_feature (1)...(672): n = A,T,C or G
ctnnnnntgnnnnnnnnnnnnnnnnnnnnnnnnnnnnnnnnnnnnnnnnnnnngggacaggtcttagtctggcgacttcttaatggcacagaactctgaggccgcatcgtggagagtgaggcatacctggggccagaggatgaagctgcccactcaaggggtggccggcagaccccccgcaaccgaggcatgttcatgaagccggggaccctgtacgtgtacatcatnnnnnnnnnnnnnnnnnnnnnnnnnnnnnnnnnnnnnggggacggggcttgcgtcttgctgcgagcactggagcccctggaaggtctggagaccatgcgtcagcttcgcagcaccctctggaaaggcaccgccagccgtgtcttcaaggaccgtgagctctgcagtggcccctccaagctgtgccaggccctggccatcaacaagagctttgaccagagggacctggcacaggatgaagctatatggctggagcgtggtcccttggagcccagtgagccagctgtagtgacagcagcccgggtgggcattggctatgcaggggagtgggcccggaaacccctctgcttttatgtccggggcagcccctgggtcagtgtggtcgacagagtggctgagcaggacacacaggtctaagcaaaggnnnnnnnnnnnnnnnnnnnnntt

SEQ ID NO: 18595 - DNA, 442 bp, Macaca Fascicularis
cataaacctggctagcttcatcgaacaagtagcagtgtccatgacgtagaccctgcccttcctctttgaattcttcagggggaaggggtgactgaactgggaatctagggagggagctgaggagcccccggcctccccctgctcccctcccaagacccagctgcctccattgaggggtgagtccttgctgtgggatgtgccagcgtccccaccaccaccaggaatttagaccttttccctgcaccactctcttcgtcctgggggctctgttacactaatttgaataagttctcccctttcttttcaactccccagcaacaatgattttcttgccaggctgtgtctccctaattcttttcccaggaagctgtgatacagggtcaaataaagtcttgtcttagaaaccaggaccctaaaccccacactatgtaacagaaacaca

SEQ ID NO: 18596 - DNA, 716 bp, Macaca Fascicularis
  misc_feature (1)...(716): n = A,T,C or G
tcccaagacccaagagcccgcgcccttgcagacggccatggagccacaaaccactgtggtacacaacgctacagatgggatcaagggctccacagagagctgcaataccaccacagaagatgaggacctcaaagtgagaaaacaggagatcattaagattacagaannnnnnnnnnnnnnnnnnnnnnnnnnggactttgaggcctacacgaagatttgtgatccaggcctcacttcctttgagcctgaggcccttggtaacctcgtggaggggatggatttccataagttttactttgagaatctcctgtccaagaacagcaagcctatccataccaccatcctaaacccacacgtccacgtgattggggaggacgcagcgtgcatcgcctacatccgcctcacccagtacatcgacgggcagggtcggcctcgnnnnnnnnnnnnnnnnnnnnnnnnnnnnnnnnnnnnnnnnnnnnnnnngtggctcaatgtccactatcactgctcaggggcctctgccgcaccgctgcagtgagctcagccacaggggcattaggagattccagccagaggtcgannnnnnnnnnccagtggctctggagggcctgagtgacannnggcagtcctgtttgtttgaggtttaaaacaattcaattacaaaagcggcagcagccaatgcacgcccctgcatgcagccctcccgcccacccttc

SEQ ID NO: 18597 - DNA, 651 bp, Macaca Fascicularis
  misc_feature (1)...(651): n = A,T,C or G
tgatcagggtttgtcttctgacagctctagctctcttggagaaaaagaacttnnnnnnnnnnnnnnnatcccagatgcagcttttattcaggcagcccgcagaaaacgtgaattggccagagcccaagatgactatatttctttggatgtagaacatacctctaccgtctctggtatgaagagagagagtgaaagatgaccctgagagtgagcctgatgaccatgaaaagagaataccatttaccctannnnnnnnnnnnnnnnnnnnnnnnnnnnnnnnnnnnncaagtatgtgtataccaatatatgaagattaggatatttttcattagaatataatattatgagaaaatctccataaaaatgtaatgtgctgtctcacattgtagagtgttgataacggtttttaacattgatttggtccatgatattatgacctctaaaagatgtatctgtatcgaaatgttattatcaaggagtatatgtaataatgtttattaatatctgaccccccttgatcttttttaacaggttaaaaaaaatatgcggtatcttatttttaaaacattgaaaacaatcgtcacctttataaatgtattttttcannnntggaagcatctacagagattttcgatgtcatgtataaaatgt

SEQ ID NO: 18598 - DNA, 632 bp, Macaca Fascicularis
  misc_feature (1)...(632): n = A,T,C or G
aaagttcaaaaacaagaggaagatgtcaatattagaaaaaggccaaggatggatatagaaacaaatgatactttcagtgatgaagcagtaccagaaagtagcaaaatatctcaagaaaatgaaattgggaagaaacgtgaactcaaggaaggatcactatggtcaactaaagaagaaatatctaacaatgacaaacttcaggatgatagtgagatgcttccaagaaagttgttattgactgannnnnnnnnnnnnnnnnnnnnnnnnnnnnnntccagaaatccatctggcataaatgattatggtcaacttaacaatttcaagaaattcaaaaaggtcacatatcctggagcaggaaaacttccacacatcattggaggatcagatctaatacctcatcatgctcgaaagaatacagaactagaagagtggctaaggcaggaaatggaggtacaaaatcaacatgcaaaagaagagtctcttgctgatgatctttttagatacaatccttatttaaaaaggagaagataactgaggattttaaaaagaagccatggaaaaacttcctagtaaacatctacttcaggccaacaaggttatatgaatatatatagtatatagaagagatttaa

SEQ ID NO: 18599 - DNA, 727 bp, Macaca Mulatta
  misc_feature (1)...(727): n = A,T,C or G
gggggccttgactttgagattccagaccctcagatcctctcttcctctgctcactgcaggccctggtgctacccaccatctctcattcctcccaactcccacctttcccagctttttacttcaaggaggtgtcttgtttcttttcccttccttcactttctgtttctgtttctgtttactttaaggggtgtgtgtttctattcccttcctacactttctgtttctatttctgtttatttcaagggggtgtctgtttttttcccttcctccctctccccagccctccaaggcttggccttgactttgagattccagaccctcagatcctctcttcctctgctcactgcaggccctggtgctgcccagcccccgcccttatgtgcggatagatggtgccgtgactcctgaccactggctggaccccagcgccgtgtgggaggtgaagtgtgccgacctctccctctcccccatctaccctgctgcgcggggcctggtggatagtgacaaggggatctcccttcgcttccctcggtttattcgagtccgtgaagacaagcagccggagcaggccaccaccagtgcacaggtggcctgtttgtaccggaagcaaagtcagattcagaaccaacaaggcgaggactcaggctctngaccctgaagaatacctactaaagtccttgcccctcctaggggcctggggtacaggggcatgaagtttggaccggat

SEQ ID NO: 18600 - DNA, 2379 bp, Macaca Mulatta
  misc_feature (1)...(2379): n = A,T,C or G
ttaaagcagcagggtagaagcggtattaaagtgattgattttggctccagttgttacgagcatcagcgtgtctacacgtacatccagtcgcgtttttaccgggctccagaagtgatccttggggccaggtatggcatgcccattgacatgtggagcctgggctgcattttagcagagctcctgacgggttaccccctcttgcctggggaggatgaaggggaccagctggcctgtatgattgaactgttgggcatgccctcgcagaaactgctggatgcgtccaaacgagccaaaaattttgtgagctccaagggttacccccgttactgcactgtcacgactctctcagatggctctgtggtcctcaacggaggccgttcccggagggggaaactgaggggcccaccggagagcagagagtgggggaacgcgctgaaggggtgtgacgatccccttttccttgacttcttaaaacagtgtttagagtgggatcctgcagtgcgcatgaccccaggccaggctttgcggcacccctggctgaggaggcgattgccaaagcctcccaccggggagaaaacgtcagtgaaaaggataactgagagcaccggtgctatcacatctatatccaagttacctccaccttccagctcagcttccaaactgagnnnnnnnnnnnnnnnnnnnnnnnnnnnnnnnnnnnnnnnnnnnnnnnnnnnnnnnnnnnnnnnnnnnnnnnnnnnnnnnnnnnnnnnnnnnnnnnnnnnnnnnnnnnnnnnnnnnnnnnnnnnnnnnnnnnnnnnnnnnnnnnnnnnnnnnnnnnnnnnnnnnnnnnnnnnnnnnnnnnnnnnnnnnnnnnnnnnnnnnnnnnnnnnnnnnnnnnnnnnnnnnnnnnnnnnnnnnnnnnnnnnnnnnnnnnnnnnnnnnnnnnnnnnnnnnnnnnnnnnnnnnnnnnnnnnnnnnnnnnnnnnnnnnnnnnnnnnnnnnnnnnnnnnnnnnnnnnnnnnnnnnnnnnnnnnnnnnnnnnnnnnnnnnnnnnnnnnnnnnnnnnnnnnnnnnnnnnnnnnnnnnnnnnnnnnnnnnnnnnnnnnnnnnnnnnnnnnnnnnnnnnnnnnnnnnnnnnnnnnnnnnnnnnnnnnnnnnnnnnnnnnnnnnnnnnnnnnnnnnnnnnnnnnnnnnnnnnnnnnnnnnnnnnnnnnnnnnnnnnnnnnnnnnnnnnnnnnnnnnnnnnnnnnnnnnnnnnnnnnnnnnnnnnnnnnnnnnnnnnnnnnnnnnnnnnnnnnnnnnnnnnnnnnnnnnnnnnnnnnnnnnnnnnnnnnnnnnnnnnnnnnnnnnnnnnnnnnnnnnnnnnnnnnnnnnnnnnnnnnnnnnnnnnnnnnnnnnnnnnnnnnnnnnnnnnnnnnnnnnnnnnnnnnnnnnnnnnnnnnnnnnnnnnnnnnnnnnnnnnnnnnnnnnnnnnnnnnnnnnnnnnnnnnnnnnnnnnnnnnnnnnnnnnnnnnnnnnnnnnnnnnnnnnnnnnnnnnnnnnnnnnnnnnnnnnnnnnnnnnnnnnnnnnnnnnnnnnnnnnnnnnnnnnnnnnnnnnnnnnnnnnnnnnnnnnnnnnnnnnnnnnnnnnnnnnnnnnnnnnnnnnnnnnnnnnnnnnnnnnnnnnnnnnnnnnnnnnnnnnnnnnnnnnnnnnnnnnnnnnnnnnnnnnnnnnnnnnnnnnnnnnnnnnnnnnnnnnnnnnnnnnnnnnnnnnnnnnnnnnnnnnnnnnnnnnnnnnnnnnnnnnnnnnnnnnnnnnnnnnnnnnnnnnnnnnnnnnnnnnnnnnnnnnnnnnnnnnnnnnnnnnnnnnnnnnnnnnnnnnnnnnnnnnnnnnnnnnnnnnnnnnnnnnnnnnnatgttaacaacatgtgtagaggaggaaaagttcaacctcaagttaaatggtttgacttattcttcatatcattagaagagccccagagatagcattcctctattttattttactttcttttggattgcagtgattatttttgtgggaatgacactttatctggcaaagtaactgagagtttggtaaaagaatattttcttctctgaataataattattttcacagtgaaaatttcagtattttatcactaatgtatgagcaatgatgtatatgaatttcaaggcacgtgaaacaaattttttagtatgtgcaatttagaaagatttctgcctgtttggacgataggttttgggttgtacaaattaggataagtaagcttatatatgcacagagattattgtattacctgtaaattgacttacaagtacttaaaagcatggtccccagtgaggccaagaaagtttccggttaagttctttaataataatcctacagtttatct

SEQ ID NO: 18601 - DNA, 699 bp, Macaca Mulatta
  misc_feature (1)...(699): n = A,T,C or G
gatgattccaccacgggtaagctcttactccttttggttgaacaagcagcggccctgggagagcctcagctctgctatatcctggatgccatcctgtttctgtatggaattgtcctcaccctcctctactgtcgactgaagatccaagtgcgaaaggcagctatagccagctatgagaaatcagatggtgtttacacgggcctgagcaccaggaaccaggaaacttatgagactctgaagcatgagaaaccaccacagtagctttagaatagatgcggtcatattcttcttcggcttctggttcttccagccctcatggttggcatcacatatgcttgcatgccattaacatcagctggtcctacccctataatgatcctgtgccctaaattaatatacaccagtgattcctcctccccgttaaagactaatgctcagatgctattcacggatgtttatattctagtctccctctcttgtcccacccttcttcttttccccatccccaactccagctaaaatatgggaagggagaacccccaataaagctgccatggactgnnnnnnnnnnnnnnnnnnnnnnntcgatnnnnnnnnnnnnnnnnnnnnnnnnnnnnnnnnnnnnnnnnnnnnnnnnnnnnnnnnnnnnnnnnnnnnnnnnnnnnnnnnnnnnnnntggcgttaccaattaatcgcttg

SEQ ID NO: 18602 - DNA, 4253 bp, Macaca Mulatta
  misc_feature (1)...(4253): n = A,T,C or G
ggaaaatcaagcctccagaaaagggcaacttattcagaaggaaagcatggacaccattaaacacgcaagtcagcttgtagagcaagcccatgacatgagggataanatccaagnnnnnnnnnnnnnnnnnnnnnnnnnnnnnnnnnnnnnnnnnnnnnnnnnnnnnnnnnnnnnnnnnnnnnnnnnnnnnnnnnnnnnnnnnnnnnnnnnnnnnnnnnnnnnnnnnnnnnnnnnnnnnnnnnnnnnnnnnnnnnnnnnnnnnnnnnnnnnnnnnnnnnnnnnnnnnnnnnnnnnnnnnnnnnnnnnnnnnnnnnnnnnnnnnnnnnnnnnnnnnnnnnnnnnnnnnnnnnnnnnnnnnnnnnnnnnnnnnnnnnnnnnnnnnnnnnnnnnnnnnnnnnnnnnnnnnnnnnnnnnnnnnnnnnnnnnnnnnnnnnnnnnnnnnnnnnnnnnnnnnnnnnnnnnnnnnnnnnnnnnnnnnnnnnnnnnnnnnnnnnnnnnnnnnnnnnnnnnnnnnnnnnnnnnnnnnnnnnnnnnnnnnnnnnnnnnnnnnnnnnnnnnnnnnnnnnnnnnnnnnnnnnnnnnnnnnnnnnnnnnnnnnnnnnnnnnnnnnnnnnnnnnnnnnnnnnnnnnnnnnnnnnnnnnnnnnnnnnnnnnnnnnnnnnnnnnnnnnnnnnnnnnnnnnnnnnnnnnnnnnnnnnnnnnnnnnnnnnnnnnnnnnnnnnnnnnnnnnnnnnnnnnnnnnnnnnnnnnnnnnnnnnnnnnnnnnnnnnnnnnnnnnnnnnnnnnnnnnnnnnnnnnnnnnnnnnnnnnnnnnnnnnnnnnnnnnnnnnnnnnnnnnnnnnnnnnnnnnnnnnnnnnnnnnnnnnnnnnnnnnnnnnnnnnnnnnnnnnnnnnnnnnnnnnnnnnnnnnnnnnnnnnnnnnnnnnnnnnnnnnnnnnnnnnnnnnnnnnnnnnnnnnnnnnnnnnnnnnnnnnnnnnnnnnnnnnnnnnnnnnnnnnnnnnnnnnnnnnnnnnnnnnnnnnnnnnnnnnnnnnnnnnnnnnnnnnnnnnnnnnnnnnnnnnnnnnnnnnnnnnnnnnnnnnnnnnnnnnnnnnnnnnnnnnnnnnnnnnnnnnnnnnnnnnnnnnnnnnnnnnnnnnnnnnnnnnnnnnnnnnnnnnnnnnnnnnnnnnnnnnnnnnnnnnnnnnnnnnnnnnnnnnnnnnnnnnnnnnnnnnnnnnnnnnnnnnnnnnnnnnnnnnnnnnnnnnnnnnnnnnnnnnnnnnnnnnnnnnnnnnnnnnnnnnnnnnnnnnnnnnnnnnnnnnnnnnnnnnnnnnnnnnnnnnnnnnnnnnnnnnnnnnnnnnnnnnnnnnnnnnnnnnnnnnnnnnnnnnnnnnnnnnnnnnnnnnnnnnnnnnnnnnnnnnnnnnnnnnnnnnnnnnnnnnnnnnnnnnnnnnnnnnnnnnnnnnnnnnnnnnnnnnnnnnnnnnnnnnnnnnnnnnnnnnnnnnnnnnnnnnnnnnnnnnnnnnnnnnnnnnnnnnnnnnnnnnnnnnnnnnnnnnnnnnnnnnnnnnnnnnnnnnnnnnnnnnnnnnnnnnnnnnnnnnnnnnnnnnnnnnnnnnnnnnnnnnnnnnnnnnnnnnnnnnnnnnnnnnnnnnnnnnnnnnnnnnnnnnnnnnnnnnnnnnnnnnnnnnnnnnnnnnnnnnnnnnnnnnnnnnnnnnnnnnnnnnnnnnnnnnnnnnnnnnnnnnnnnnnnnnnnnnnnnnnnnnnnnnnnnnnnnnnnnnnnnnnnnnnnnnnnnnnnnnnnnnnnnnnnnnnnnnnnnnnnnnnnnnnnnnnnnnnnnnnnnnnnnnnnnnnnnnnnnnnnnnnnnnnnnnnnnnnnnnnnnnnnnnnnnnnnnnnnnnnnnnnnnnnnnnnnnnnnnnnnnnnnnnnnnnnnnnnnnnnnnnnnnnnnnnnnnnnnnnnnnnnnnnnnnnnnnnnnnnnnnnnnnnnnnnnnnnnnnnnnnnnnnnnnnnnnnnnnnnnnnnnnnnnnnnnnnnnnnnnnnnnnnnnnnnnnnnnnnnnnnnnnnnnnnnnnnnnnnnnnnnnnnnnnnnnnnnnnnnnnnnnnnnnnnnnnnnnnnnnnnnnnnnnnnnnnnnnnnnnnnnnnnnnnnnnnnnnnnnnnnnnnnnnnnnnnnnnnnnnnnnnnnnnnnnnnnnnnnnnnnnnnnnnnnnnnnnnnnnnnnnnnnnnnnnnnnnnnnnnnnnnnnnnnnnnnnnnnnnnnnnnnnnnnnnnnnnnnnnnnnnnnnnnnnnnnnnnnnnnnnnnnnnnnnnnnnnnnnnnnnnnnnnnnnnnnnnnnnnnnnnnnnnnnnnnnnnnnnnnnnnnnnnnnnnnnnnnnnnnnnnnnnnnnnnnnnnnnnnnnnnnnnnnnnnnnnnnnnnnnnnnnnnnnnnnnnnnnnnnnnnnnnnnnnnnnnnnnnnnnnnnnnnnnnnnnnnnnnnnnnnnnnnnnnnnnnnnnnnnnnnnnnnnnnnnnnnnnnnnnnnnnnnnnnnnnnnnnnnnnnnnnnnnnnnnnnnnnnnnnnnnnnnnnnnnnnnnnnnnnnnnnnnnnnnnnnnnnnnnnnnnnnnnnnnnnnnnnnnnnnnnnnnnnnnnnnnnnnnnnnnnnnnnnnnnnnnnnnnnnnnnnnnnnnnnnnnnnnnnnnnnnnnnnnnnnnnnnnnnnnnnnnnnnnnnnnnnnnnnnnnnnnnnnnnnnnnnnnnnnnnnnnnnnnnnnnnnnnnnnnnnnnnnnnnnnnnnnnnnnnnnnnnnnnnnnnnnnnnnnnnnnnnnnnnnnnnnnnnnnnnnnnnnnnnnnnnnnnnnnnnnnnnnnnnnnnnnnnnnnnnnnnnnnnnnnnnnnnnnnnnnnnnnnnnnnnnnnnnnnnnnnnnnnnnnnnnnnnnnnnnnnnnnnnnnnnnnnnnnnnnnnnnnnnnnnnnnnnnnnnnnnnnnnnnnnnnnnnnnnnnnnnnnnnnnnnnnnnnnnnnnnnnnnnnnnnnnnnnnnnnnnnnnnnnnnnnnnnnnnnnnnnnnnnnnnnnnnnnnnnnnnnnnnnnnnnnnnnnnnnnnnnnnnnnnnnnnnnnnnnnnnnnnnnnnnnnnnnnnnnnnnnnnnnnnnnnnnnnnnnnnnnnnnnnnnnnnnnnnnnnnnnnnnnnnnnnnnnnnnnnnnnnnnnnnnnnnnnnnnnnnnnnnnnnnnnnnnnnnnnnnnnnnnnnnnnnnnnnnnnnnnnnnnnnnnnnnnnnnnnnnnnnnnnnnnnnnnnnnnnnnnnnnnnnnnnnnnnnnnnnnnnnnnnnnnnnnnnnnnnnnnnnnnnnnnnnnnnnnnnnnnnnnnnnnnnnnnnnnnnnnnnnnnnnnnnnnnnnnnnnnnnnnnnnnnnnnnnnnnnnnnnnnnnnnnnnnnnnnnnnnnnnnnnnnnnnnnnnnnnnnnnnnnnnnnnnnnnnnnnnnnnnnnnnnnnnnnnnnnnnnnnnnnnnnnnnnnnnnnnnnnnnnnnnnnnnnnnnnnnnnnnnnnnnnnnnnnnnnnnnnnnnnnnnnnnnnnnnnnnnnnnnnnnnnnnnnnnnnnnnnnnnnnnnnnnnnnnnnnnnnnnnnnnnnnnnnnnnnnnnnnnnnnnnnnnnnnnnnnnnnnnnnnnnnnnnnnnnnnnnnnnnnnnnnnnnnnnnnnnnnnnnnnnnnnnnnnnnnnnnnnnnnnnnnnnnnnnnnnnnnnnnnnnnnnnnnnnnnnnnnnnnnnnnnnnnnnnnnnnnnnnnnnnnnnnnnnnnnnnnnnnnnnnnnnnnnnnnnnnnnnnnnnnnnnnnnnnnnnnnnnnnnnnnnnnnnnnnnnnnnnnnnnnnnnnnnnnnnnnnnnnnnnnnnnnnnnnnnnnnnnnnnnnnnnnnnnnnnnnnnnnnnnnnnnnnnnnnnnnnnnnnnnnnnnnnnnnnnnnnnnnnnnnnnnnnnnnnnnnnnnnnnnnnnnnnnnnnnnnnnnnnnnnnnnnnnnnnnnnnnnnnnnnnnnnnnnnnnnnnnnnnnnnnnnnnnnnnnnnnnnnnnnnaggtcatagtgaaagtcaataatggcatcagagatttttccacctcagtatcacccaagcagagtctctgtgatggcagatggcacagaattacagncagttattagagattctaatgtggttcagttggatgtggactctgaagtgaaccacgtggttggacccctgaatccaaaaccaattgatcacagggagcctgtgtttgttggaggtgttccag

SEQ ID NO: 18603 - DNA, 767 bp, Macaca Mulatta
  misc_feature (1)...(767): n = A,T,C or G
gggcttttcgaggaagacgcggtcgtaggacttgcggatctttggttcgcacgctcctgctcctgactcaccgctgttcgctctcgccgaggaacaagtcggtcaggaagccgcgcagcaggcatggcttttaaggatactggaaaaacacccgtggagccggaagtggcaattcaccgaattcgaatcaccctaacgagccgcaacgttaaatccttggaaaaagtgtgtgctgacttgatcagaggcgcgaaagaaaagaacctgaaagtgaaaagaccagttcgaaatgcctaccagacttttgaggaatccccacaagaaaaaactccctgggggggaaggtttctaaaaaaatggggatcgttttccccgaagaaaaatcccaccaagcgaaattcattgaactttggcaaagtccttttcggaaaaattgtttaagcccaaaattaccttcccctccattatttggaccccggaaaattttaagggggggaaaatccccccctttgccaaaaaagccttaaaatccaaacnnnnnnnnnnnnnnnnnnnnnnnttaaccccaggttggcccacnnnnnnnnnnnnntnaaaaatattatatataggaaataaaanannnaaaaaatttttttggggcccccccctttggggcccccnnnnnnnnnnnnnnnnnnnnnnnnnnnnnnnaatttccttttttggggggccccgggggggcccccccccnntggggggaaaagggtgaaaaactgggtgttttt

SEQ ID NO: 18604 - DNA, 298 bp, Macaca Mulatta
gcctggatcctgcttttactgtctgttatgagatggaagacttacatgtttgtgataaaaggagaccgtttgaatgaattggcttggcttactttccccccaaaatcctctctcctgcagactgtcttgacgacctggtgactggtaaataaagccctgcatggaggctgcagagcaggggcaagaggcccagtccccggcgtctcactgagaacagcttcgggctgccttcccctgaacgtccacaccttcctctcctccacagagagggtgctgccagaatcccctgttgctttct

SEQ ID NO: 18605 - DNA, 193 bp, Macaca Mulatta
ctgaaaacatttattaaaacaaaacgtcagagctatgtgacagtaagtttccacaagctggtagggttgaaccggggcaggagtcgttggtacagggacttcactgcccaccccatgctcagctcctgcatggaggaacctctggctgacccggatacagtaaaggcagctgtcagaaaatctggagaacagc

SEQ ID NO: 18606 - DNA, 838 bp, Macaca Mulatta
ggatccatagtgagaacagacaccttgtcagccctgaggccctagatcttctggacaaacttctgcgatatgaccatcaacagagactgactgccaaagaggccatggagcacccatacttctaccctgtggtgaaggagcagtcccagccttgtgcagacaatgctgtgctttccagtggtctcacggcagcacgatgaagactggaaagcgacgggtctgttgcggttctcccacttttccataagcagaacaagaaccaaatcaaacgtcttaacgcgtatagagagatcacgttccgtgagcagacacaaaacggtggcaggtttggcgagcacgaactagaccaagcgaagggcagcccaccaccgtatatcaaacctcacttccgaatgtaaaaggctcacttgcctttggcttcctgttgacttcttcccgacccagaaagcatgggggaatgtgaaagggatgcagaatgttggtggttactgttgcctccagaaccccctcaacctcgtcccgggggcgccttgttttttccagaaaatcacgcctaactaactggaccaccgaactcccccgtggggggggaccgggggcaaccatgagggcctggccggcgcccttccccactcattccctctccgcccccgcccttgttttggccccggaggggtcttctagcttcgcacgcgcggccgccgcgccgcagcgcgtattgatggtacgtcccgccagtctccgtcgcccttgcctccactctcggcgtcgcaccccgtattgtgcggtattaagcctcttcacgtttctgtgcccagttaacgactatagtgtactg

SEQ ID NO: 18607 - DNA, 857 bp, Macaca Mulatta
gggataaagtcagccatggagcactgggggtgtgccagtttgagctctggaaggtgagttcctctgtttttgactgtttgggagaagggcgggactgtgtagtgagaggtgggtagaatggagtggagaaagttagtaggtagtgttgtcattagcagtcattactagctgggcagtacagaggaacttcagataaagcttctggcatccgctgaggcggggagggacagattagaaatttgttctgagagttatggtctagtagacctggaatccaaaatgtaaaagttggccaactcctggccatatatcctaaaaaagagctggcatgttattgggaggataaagtgggggagatctggcttactgggcactatagtaatgttgtctatgtatgtgtgctctctcaaaaacaggtaaagtccttcctggggtggatgctctcagcaatatttagtactttcctgccttttagttcctgtgcacagcccctaagtcaacttagcattttctgcaactccacttggcattagctaaaaccttccatgtcaaggttcagctagtggccaagagatgcagtgccaggaacccttaaacagttgcacagcatctcagctcatctttactgcaccctggatttgcctacattcttcaagatcccatttgaatttcttagtgactaaacattgtgcattctagagtgcatatatttatattttgcctgttaaaaccaagtgagctgtgttagcttagttctcttttgatgtaggctattatgattagctttgtcactgtttcactactcagcatggaaacaagatgaaattccatttgtaggtagggagacaaaattgatg

SEQ ID NO: 18608 - DNA, 3583 bp, Macaca Mulatta
  misc_feature (1)...(3583): n = A,T,C or G
agaacaaacagtcccaattagaagccatcttatggagttaggtctaacagcagcaaaatttgctagaaaacgagggaatgtgtcccttgcaacaagactgctggcacagtgcagtgaagttcagctaagaaagaccaccactgcacaagatttagtccaacattttaaaaannnnnnnnnnnnnnnnnnnnnnnnnnnnnnnnnnnnnnnnnnnnnnnnnnnnnnnnnnnnnnnnnnnnnnnnnnnnnnnnnnnnnnnnnnnnnnnnnnnnnnnnnnnnnnnnnnnnnnnnnnnnnnnnnnnnnnnnnnnnnnnnnnnnnnnnnnnnnnnnnnnnnnnnnnnnnnnnnnnnnnnnnnnnnnnnnnnnnnnnnnnnnnnnnnnnnnnnnnnnnnnnnnnnnnnnnnnnnnnnnnnnnnnnnnnnnnnnnnnnnnnnnnnnnnnnnnnnnnnnnnnnnnnnnnnnnnnnnnnnnnnnnnnnnnnnnnnnnnnnnnnnnnnnnnnnnnnnnnnnnnnnnnnnnnnnnnnnnnnnnnnnnnnnnnnnnnnnnnnnnnnnnnnnnnnnnnnnnnnnnnnnnnnnnnnnnnnnnnnnnnnnnnnnnnnnnnnnnnnnnnnnnnnnnnnnnnnnnnnnnnnnnnnnnnnnnnnnnnnnnnnnnnnnnnnnnnnnnnnnnnnnnnnnnnnnnnnnnnnnnnnnnnnnnnnnnnnnnnnnnnnnnnnnnnnnnnnnnnnnnnnnnnnnnnnnnnnnnnnnnnnnnnnnnnnnnnnnnnnnnnnnnnnnnnnnnnnnnnnnnnnnnnnnnnnnnnnnnnnnnnnnnnnnnnnnnnnnnnnnnnnnnnnnnnnnnnnnnnnnnnnnnnnnnnnnnnnnnnnnnnnnnnnnnnnnnnnnnnnnnnnnnnnnnnnnnnnnnnnnnnnnnnnnnnnnnnnnnnnnnnnnnnnnnnnnnnnnnnnnnnnnnnnnnnnnnnnnnnnnnnnnnnnnnnnnnnnnnnnnnnnnnnnnnnnnnnnnnnnnnnnnnnnnnnnnnnnnnnnnnnnnnnnnnnnnnnnnnnnnnnnnnnnnnnnnnnnnnnnnnnnnnnnnnnnnnnnnnnnnnnnnnnnnnnnnnnnnnnnnnnnnnnnnnnnnnnnnnnnnnnnnnnnnnnnnnnnnnnnnnnnnnnnnnnnnnnnnnnnnnnnnnnnnnnnnnnnnnnnnnnnnnnnnnnnnnnnnnnnnnnnnnnnnnnnnnnnnnnnnnnnnnnnnnnnnnnnnnnnnnnnnnnnnnnnnnnnnnnnnnnnnnnnnnnnnnnnnnnnnnnnnnnnnnnnnnnnnnnnnnnnnnnnnnnnnnnnnnnnnnnnnnnnnnnnnnnnnnnnnnnnnnnnnnnnnnnnnnnnnnnnnnnnnnnnnnnnnnnnnnnnnnnnnnnnnnnnnnnnnnnnnnnnnnnnnnnnnnnnnnnnnnnnnnnnnnnnnnnnnnnnnnnnnnnnnnnnnnnnnnnnnnnnnnnnnnnnnnnnnnnnnnnnnnnnnnnnnnnnnnnnnnnnnnnnnnnnnnnnnnnnnnnnnnnnnnnnnnnnnnnnnnnnnnnnnnnnnnnnnnnnnnnnnnnnnnnnnnnnnnnnnnnnnnnnnnnnnnnnnnnnnnnnnnnnnnnnnnnnnnnnnnnnnnnnnnnnnnnnnnnnnnnnnnnnnnnnnnnnnnnnnnnnnnnnnnnnnnnnnnnnnnnnnnnnnnnnnnnnnnnnnnnnnnnnnnnnnnnnnnnnnnnnnnnnnnnnnnnnnnnnnnnnnnnnnnnnnnnnnnnnnnnnnnnnnnnnnnnnnnnnnnnnnnnnnnnnnnnnnnnnnnnnnnnnnnnnnnnnnnnnnnnnnnnnnnnnnnnnnnnnnnnnnnnnnnnnnnnnnnnnnnnnnnnnnnnnnnnnnnnnnnnnnnnnnnnnnnnnnnnnnnnnnnnnnnnnnnnnnnnnnnnnnnnnnnnnnnnnnnnnnnnnnnnnnnnnnnnnnnnnnnnnnnnnnnnnnnnnnnnnnnnnnnnnnnnnnnnnnnnnnnnnnnnnnnnnnnnnnnnnnnnnnnnnnnnnnnnnnnnnnnnnnnnnnnnnnnnnnnnnnnnnnnnnnnnnnnnnnnnnnnnnnnnnnnnnnnnnnnnnnnnnnnnnnnnnnnnnnnnnnnnnnnnnnnnnnnnnnnnnnnnnnnnnnnnnnnnnnnnnnnnnnnnnnnnnnnnnnnnnnnnnnnnnnnnnnnnnnnnnnnnnnnnnnnnnnnnnnnnnnnnnnnnnnnnnnnnnnnnnnnnnnnnnnnnnnnnnnnnnnnnnnnnnnnnnnnnnnnnnnnnnnnnnnnnnnnnnnnnnnnnnnnnnnnnnnnnnnnnnnnnnnnnnnnnnnnnnnnnnnnnnnnnnnnnnnnnnnnnnnnnnnnnnnnnnnnnnnnnnnnnnnnnnnnnnnnnnnnnnnnnnnnnnnnnnnnnnnnnnnnnnnnnnnnnnnnnnnnnnnnnnnnnnnnnnnnnnnnnnnnnnnnnnnnnnnnnnnnnnnnnnnnnnnnnnnnnnnnnnnnnnnnnnnnnnnnnnnnnnnnnnnnnnnnnnnnnnnnnnnnnnnnnnnnnnnnnnnnnnnnnnnnnnnnnnnnnnnnnnnnnnnnnnnnnnnnnnnnnnnnnnnnnnnnnnnnnnnnnnnnnnnnnnnnnnnnnnnnnnnnnnnnnnnnnnnnnnnnnnnnnnnnnnnnnnnnnnnnnnnnnnnnnnnnnnnnnnnnnnnnnnnnnnnnnnnnnnnnnnnnnnnnnnnnnnnnnnnnnnnnnnnnnnnnnnnnnnnnnnnnnnnnnnnnnnnnnnnnnnnnnnnnnnnnnnnnnnnnnnnnnnnnnnnnnnnnnnnnnnnnnnnnnnnnnnnnnnnnnnnnnnnnnnnnnnnnnnnnnnnnnnnnnnnnnnnnnnnnnnnnnnnnnnnnnnnnnnnnnnnnnnnnnnnnnnnnnnnnnnnnnnnnnnnnnnnnnnnnnnnnnnnnnnnnnnnnnnnnnnnnnnnnnnnnnnnnnnnnnnnnnaggttttacctttatccggcgtggcagagaaaccctgctgacgctgctggaggcctttgtgtacgaccctctggtagactggacggcaggaggcgaggcgggctttgctggtgctgtctatggtggaggcggccagcaggtcgagagtaagcnnnnnnnnnnnnnnnnnnnnnnnnnnnnnnnnnnnnnnnnnnnnnnnnnnnnnnnnnnnnnnnnnnnnnnnnnnnnnnnnnnnnnnnnnnnnnnnnnnnnnnnnnnnnnnnnnnnnnnnnnnnnnnnnnnnnnnnnnnnnnnnnnnnnnnnnnnnnnnnnnnnnnnnnnnnnnnnnnnnnnnnnnnnnnnnnnnnnnnnnnnnnnnnnnnnnnnnnnnnnnnnnnnnnnnnnnnnnnnnnnnnnnnnnnnnnnnnnnaggtattctgaacacacccaactacagactcagcaaagagctgttcaggaagcaatccaggtgaagctgaatgaatttgaacagtggataacacattatcaggctgcattcaataattgagaagaaacacagcttgcaagcttacttcaagagataagcacacaaatggaccttggt

SEQ ID NO: 18609 - DNA, 679 bp, Macaca Mulatta
gccctgggccagacctcctcccggctctcgcccaccataccaagtgttacaagccccagaatgctgcccggcctgccctgctaggcggactgtctgtgtgtctgtctctctggcgttccacctccaagcctataccagctgtgtacagcgccatctctctgccttctgttgcccctcactcaccaaacacgtgtatttatagcaaagattggagttctgtgtctcctgaccttggctgggcccaggcagggccacattcattgggcgcctctggggtgagggtctgcaggggccttgctgtctgacccccaagggtctgctgcaggcctggggctgcaggtgggccctcgtggatagcctggggcacagaggatcaccgcagtcatgtgggacccagaactgtcctgggaagctgacatagccgtaccaaacctttcacaagaccactggtgacagccccccaaggcagtggaggtcagggtggggctgcccgggaacctcctcagaattgaggccactcacaggtgtaagtcaggtcccatccaggtgctccagggaaaatacaggaaggggtagcagggctagttttttgggcctttttaagcacaccaggagcttaacactggcctggtgactatgccctgaccccactcgaggtgttcaggcttgggttcaaatt

SEQ ID NO: 18610 - DNA, 205 bp, Macaca Mulatta
cgggggtcacagctcttatggctgcagctagcgtgaccccccctggctccttggagttgctacagcctggcttctccaagaccctcctggggaccaagctggaagccaagtacctgtgctccgcctgcggaaacgtcctgcgcaggcccttccaggcgcagtgtggccaccggtactgctccttctgcctggccagcatcctcag

SEQ ID NO: 18611 - DNA, 2268 bp, Macaca Mulatta
  misc_feature (1)...(2268): n = A,T,C or G
ggtggccgccggtcacccgcggcgaaggcggctcgggctcgggctccggtaagnnnnnnnnnnnnnnnnnnnnnnnnnnnnnnnnnnnnnnnnnnnnnnnnnnnnnnnnnnnnnnnnnnnnnnnnnnnnnnnnnnnnnnnnnnnnnnatcgtgatgtcaggtcatgagaccatccgagtgctggaagtcggagtggatgcccagctccctgctgaggaagagagcaaaggactggagggtgtggccgccaagggctcccagagcggagaccctgctgaagccagtcaagctgctggtaaagctgggccagacaacctgggctcctctgcagaggcaactggtannnnnnnnnnnnnnnnnnnnnnnnnnnnnnnnnnnnnnnnnnnnnnnnnnnnnnnnnnnnnnnnnnnnnnnnnnnnnnnnnnnnnnnnnnnnnnnnnnnnnnnnnnnnnnnnnnnnnnnnnnnnnnnnnnnnnnnnnnnnnnnnnnnnnnnnnnnnnnnnnnnnnnnnnnnnnnnnnnnnnnnnnnnnnnnnnnnnnnnnnnnnnnnnnnnnnnnnnnnnnnnnnnnnnnnnnnnnnnnnnnnnnnnnnnnnnnnnnnnnnnnnnnnnnnnnnnnnnnnnnnnnnnnnnnnnnnnnnnnnnnnnnnnnnnnnnnnnnnnnnnnnnnnnnnnnnnnnnnnnnnnnnnnnnnnnnnnnnnnnnnnnnnnnnnnnnnnnnnnnnnnnnnnnnnnnnnnnnnnnnnnnnnnnnnnnnnnnnnnnnnnnnnnnnnnnnnnnnnnnnnnnnnnnnnnnnnnnnnnnnnnnnnnnnnnnnnnnnnnnnnnnnnnnnnnnnnnnnnnnnnnnnnnnnnnnnnnnnnnnnnnnnnnnnnnnnnnnnnnnnnnnnnnnnnnnnnnnnnnnnnnnnnnnnnnnnnnnnnnnnnnnnnnnnnnnnnnnnnnnnnnnnnnnnnnnnnnnnnnnnnnnnnnnnnnnnnnnnnnnnnnnnnnnnnnnnnnnnnnnnnnnnnnnnnnnnnnnnnnnnnnnnnnnnnnnnnnnnnnnnnnnnnnnnnnnnnnnnnnnnnnnnnnnnnnnnnnnnnnnnnnnnnnnnnnnnnnnnnnnnnnnnnnnnnnnnnnnnnnnnnnnnnnnnnnnnnnnnnnnnnnnnnnnnnnnnnnnnnnnnnnnnnnnnnnnnnnnnnnnnnnnnnnnnnnnnnnnnnnnnnnnnnnnnnnnnnnnnnnnnnnnnnnnnnnnnnnnnnnnnnnnnnnnnnnnnnnnnnnnnnnnnnnnnnnnnnnnnnnnnnnnnnnnnnnnnnnnnnnnnnnnnnnnnnnnnnnnnnnnnnnnnnnnnnnnagccacatactccaactctggatgaggatgggatcaacttagaagagatccgggagtttgccaagaactttaagatccggcggctctccctgggccttacacagacccaggtgggtcaggctctgactgcaacggaaggtccagcctacagccagtcagccatctgccggnnnnnnnnnnnnnnnnnnnnnnnnnnnnnnnnngaagctgaagccggtgctggaaaagtggctgaacgcatttgagctgcggaaccaggaaggccagcagaacctgatggagtttgtgggaggcgagccctccaagaaacgccaacgccgcacctccttcaccccccaggccatagaggctctcaatgcctattttgagaagaacccactgcccacaggccaggagatcactgaaattgctaaagagctcaactatgaccgggaggtcgtgcgggtctggttctgcaatcggcgccagacgctcaagaacaccagcaagctgaatgtctttcagatcccttagggctcagcccctggccctgtgttctagcactttgtccgtttcccttggcacccggctgcagccactgccatgacagcacctgtcattttgccacgtgcagctgtgctcaccccaggtcatgagactccaccgtgtgcatgtgcatcaatgtccctcttctcccacacatctcacaacaaggggaggccagagggggtcacacgagagctccaggctctgggctggtcgctctgaagaagaagatttgtgatgtcacttagagaagcaccttgccagcatggtttctgaagggtgaattctggtggggaaccagaaactccgtctttggggcagggctgtagcagctcctaaggaccactggccattagcacttgcttttgatggcgttctctttccaccttctcttctcctttgctcctc

SEQ ID NO: 18612 - DNA, 764 bp, Macaca Mulatta
aatcaatctctaattacaggtttgtataattttactcaccttctaaaacagaacaattgtatcaaattttatgtgtcattctcttgtgaaagttctagtaagtaatgaaatggttaaaaagacatgtggaagactaataaaataacaagggaaaacttcacattggggtggtttgagaagtatgaataaaaccaaactcattggagttacatggatggattggggctgatcttgtgtgtttgaaatagttttcaatttatgacatcatgtgatgtgtgttttgttttccagctgtaaaactaccatagaagctatccatggattgatgtctcaggttattaaggataaactgtttaatcaaattaacatctcttaaacggtctctgagaagtactttacctgaaagacagtatgagaaaaatattcaagtaacactttaaaaccagttacccaaaatctgattagaagtataaggtgctctgaagtgtcctaaatattaacatcctgtaataaaactctttaaaatgaaattgtcctttcatttttttgtgggaagattcacaatatttttctagtatccattatggttcctgaatatgagagaaaagaatttattagaactttctatttttaagagtttagactaactaaattagtcaaagaatttcagcatttcacttgccatactgtcagaaccactttcatttgtccctttctttgactgtctatagtaaaatataatttacaggtaattattttaatat

SEQ ID NO: 18613 - DNA, 352 bp, Macaca Mulatta
gtgttcagcaaacgaatccccctaagaaacttattattggcttctgtttcatatggacccagagagccccaccaaagctacttcaagcttaacaatgcttaacccatgagctccaggtgccttttggatctttgcaacactgaagatttggaagaagctattaaactattttgtgatggtgtttatcattttatattttgaaaggattattttgtaaggagtaacttttaatactatagtttcacctgtattctagtaaatgttgagacaccgttttgcttttaagtatccctatttcttaagttaagttactaagatgaatacctttcacgtcttgatctttaattgacta

SEQ ID NO: 18614 - DNA, 416 bp, Macaca Mulatta
ggccttccttcctgccagagggcttgtgaacagaccggagaggacagtgggttttttatacttcagtgtacatagtgtaatgtagcgtgtttacatgtgtagcctatgttgtggtccatcagcccctcacattcctaggggtttgagatgctataggtggtatgtgacaccaaagccacctctgtcatttgttgtgatgtcttttcttggcaaaagccttgtgtatatttgtatattacacatttgtacagaattttggaagattttcagtctagttgccaaatctggctcctttacaaaagaaataccttgagaaatgggtgtcctgtgtctctttattcttgggtggataggtgggtcaagcatgtctgagccagtcaagcctggtgatgaaatcagtttatttcttgccccca

SEQ ID NO: 18615 - DNA, 805 bp, Macaca Mulatta
gtcccggcagttccttgactgcctgccagggtgcctccatcaataccctgcacccgtcaggtaacgggcacctccatgtggggtggggcttcaagggccagaacatgaagggacaggctcagcacccctgggggaatgttctcttccctctttccactcaaagcctgtcttgtgctgctctaggcagcagctccgaactgggtgcggcgcagggccaggtgtccctgtgcaggccaggtaccccaccctgacgctccaccctatccccacaggccccattgagcagctcccagactacaaccggatccgtagcggcatgttctggctgcgcttctaggcgggaagcctgtgtaaacaagagagctgggctggggctcgtggtccccccaccacaaacacagcactccggctcctctaacctgtgccgcaggtgaccaccaataaaatcttctgctgagaaatgtgtcgtccctcttttggcattgacatggagtccatggggcagtagatggggagcaaggacttccctctagttctgcagctcctggatcctcctgccttcccacaggctgatgtgtcctcagccaggggcaagcatgggggctgcagcagaggccggaagtctttgatgcctgcagggagctgagcccagatgtttccactcagccacttaggggatgttcctcagccagccggtcccaagagtgggctatgggagtccataggaagtgtaaacccagcctttgcccctgtaggagtcagcctggaatccctgggggctcaggtgggaaacccctcactgtgg

SEQ ID NO: 18616 - DNA, 292 bp, Macaca Mulatta
  misc_feature (1)...(292): n = A,T,C or G
aggtgcctattcactttccatccgcgattgggatgatatgaaaggagaccacgtcaaacattataaaattcgcaaacttgacaacggtggatactacattaccacccgggcccagtttgaaacccttcagcagcttgtacaacattactcannntcagagagagctgcaggtctctgctgccgcctagtagttccctgtcacaaagggatgccaaggcttaccgatctgtctgtcaaaaccaaagatgtctgggaaatccctcgagaatccatgcagttgatcaagagactg

SEQ ID NO: 18617 - DNA, 1667 bp, Macaca Mulatta
  misc_feature (1)...(1667): n = A,T,C or G
ttggtgggtgttgggtcggaggaaagcaggaagacccatcggagcgtgtggatttgagccgctgcatttcttaaccctagatctcgaaatgcatcgtgattcctgtccattggactgtaaggtttatgtaggcaatcttggaaacaatggcaacaagaccgaattggaacgggcttttggctactatggaccactccgaagtgtgtgggttgctagaaacccacccggctttgcttttgttgaatttgaagatccccgagatgcagctgatgcggtccgagagctagatggaannnnnnnnnnnnnnnnnnnnnnnnnnnnnnnnnnnnnnnnnnnnnnnnnnnnnnnnnnnnnnnnnnnnnnnnnnnnnnnnnnnnnnnnnnnnnnnnnnnnnnnnnnnnnnnnnnnnnnnnnnnnnnnnnnnnngatctccacgaaggagaagcttctctcgcagccgaagcaggtnnnnnnnnnnnnnnnnnnnnnnnnnnnnnnnnnnnnnnnnnnnnnnnnnnnnnnnnnnnnnnnnnnnnnnnnnnnnnnnnnnnnnnnnnnnnnnnnnnnnnnnnnnnnnnnnnnnnnnnnnnnnnnnnnnnnnnnnnnnnnnnnnnnnnnnnnnnnnnnnnnnnnnnnnnnnnnnnnnnnnnnnnnnnnnnnnnnnnnnnnnnnnnnnnnnnnnnnnnnnnnnnnnnnnnnnnnnnnnnnnnnnnnnnnnnnnnnnnnnnnnnnnnnnnnnnnnnnnnnnnnnnnnnnnnnnnnnnnnnnnnnnnnnnnnnnnnnnnnnnnnnnnnnnnnnnnnnnnnnnnnnnnnnnnnnnnnnnnnnnnnnnnnnnnnnnnnnnnnnnnnnnnnnnnnnnnnnnnnnnnnnnnnnnnnnnnnnnnnnnnnnnnnnnnnnnnnnnnnnnnnnnnnnnnnnnnnnnnnnnnnnnnnnnnnnnnnnnnnnnnnnnnnnnnnnnnnnnnnnnnnnnnnnnnnnnnnnnnnnnnnnnnnnnnnnnnnnnnnnnnnnnnnnnnnnnnacacaagccatcaggtaaaaagaaacgctgaactattaaattagaggtttttgaaaaatccaactttcatcctgggcagaggttgcctagttggtatagaatctgttattcaagaaagtttatctttgctttaggtcgtaagttccttatttgattgctgtatatggatacatggctgttcgtgacattctttatgtgcaaatttgagatttcaaaaaatgtcctgcagtttaagggtacattgtagagccgaactttgagttactgtgcgagatttttttttcatgctgtcatttgtaatatgttttgtgagaatccttgggattaaagttttggttacaaattattgtttaacttgaaagcctgtttttccttgcaaactcaaatctgtgagcttggtaccaagtccaggtataacattcctattggaagccatacttatattttcttgtaaagtgcttttgaattaataaaatattagcataatggtgtaatagtcagttgaacccactgttaaccattgttcttatcccatgggaagcagttggttacacgattcttattttataagaaacacagctgagaggcactatggattagtcttctgaagtgaagggaatatagatgtcacctaagtgatagttaa

SEQ ID NO: 18618 - DNA, 174 bp, Macaca Mulatta
ctgctgtgcccaccggcctgcactccaagatggaccagctggaagggcagctgctggcccaggtgctggcactggagaaggagcgtgcagccctcagccacagcagccgccggcagaggcaggaagtggaaaaggagttggacgtcctgcagggtcgtgtggctgagctggagc

SEQ ID NO: 18619 - DNA, 138 bp, Macaca Mulatta
tgtgtagtccgcaggagtccggcatgaactccttgagcgccaggatgctgacgcggaaccggagcctgggacccagggctggaccgcgggggtgtggggaggagcccgcgcctccccggaggggagaagctgcagcag

SEQ ID NO: 18620 - DNA, 1230 bp, Macaca Mulatta
  misc_feature (1)...(1230): n = A,T,C or G
atggccctgtccactgagcatcctcccgccacacagaaacccgcccagccggggccaccgaccccaccccctgcctggaaacttaaaggaggctggagctgatcagggagctcaaagctgagatccnnnnnnnnnnnnnnnnnnnnnnnnnnnnnnnnnnnnnnnnnnnnnnnnnnnnnnnnnnnnnnnnnnnnnnnnnnnnnnnnnnnnnnnnnnnnnnnnnnnnnnnnnnnnnnnnnnnnnnnnnnnnnnnnnnnnnnnnnnnnnnnnnnnnnnnnnaggaaatccacgcccgatttagaagaggagccagatcttaccaagnnnnnnnnnnnnnnnnnnnnnnnnnnnnnnnnnnnnnnnnnnnnnnnnnnnnnnnnnnnnnnnnnnnnnnnnnnnnnnnnnnnnnnnnnnnnnnnnnnnnnnnnnnnnnnnnnnnnnnnnnnnnnnnnnnnnnnnnnnttgcagcgagccaaggtgtttcaatggcggcacctgccagcaggccctgtacttctcagatttcgtgtgccagtgccctgaaggatttgctgggaagcactgtgaaatagnnnnnnnnnnnnnnnnnnnnnnnnnnnnnnnnnnnnnnnnnnnnnnnnnnnnnnnnnnnnnnnnnnnnnnnnnnnnnnnnnnnnnnnnnnnnnnnnnnnnnnnnnnnnnnnnnnnnnnnnnnnnnnnnnnnnnnnnnnnnnnnnnnnnnnnnnnnnnnnnnnnnnnnnnnnnagaaacccagaccgagactcaaagccctggtgctacgtctttaaggcggggaagtacagttcagagttctgcagcacccccgcctgctctgagggnggaaacagtgactgctaccttgggaatgggttagcctaccgtggcacccacagcctcaccgcatcgggtgcctcctgcctcccgtggaattccatgatgctgataggcaaggtaacacagcacagaaccccaatgcccaggaactgggnnnnnnnnnnnnnnnnnnnnnnnnnnnnnnnnnnnnnnnnnnnnnnnnnnnnnnnnnnnnnnnnnnnnnnnnnnnnnnnnnnnnnnnnnnnnnnnnnnnnnnnnnnnnnnnnnnnnagactgtacccatccagacgctgcacatcacaacacttacttaacagaacggtccccgacaacatgctgtgtgctggagacactcggagcggcgggccccaggcgaacctgcacgacgcctgccag

SEQ ID NO: 18621 - DNA, 4066 bp, Macaca Mulatta
  misc_feature (1)...(4066): n = A,T,C or G
tacacagcttctcctagcatgaccttgatctgatcagcaaacaagaacatttgtctcccgtagttctggggcctattcaccatctacaaccacagagctgtcatggctgccatctctacttccatccctgtaatttcacagccccagnnnnnnnnnnnnnnnnnnnnnnnnnnnnnnnnnnnnnnnnnnnnnnnnnnnnnnnnnnnnnnnnnnnnnnnnnnnnnnnnnnnnnnnnnnnnnnnnnnnnnnnnnnnnnnnnnnnnnnnnnnnnnnnnnnnnnnnnnnnnnnnnnnnnnnnnnnnnnnnnnnnnnnnnnnnnnnnnnnnnnnnnnnnnnnnnnnnnnnnnnnnnnnnnnnnnnnnnnnnnnnnnnnnnnnnnnnnnnnnnnnnnnnnnnnnnnnnnnnnnnnnnnnnnnnnnnnnnnnnnnnnnnnnnnnnnnnnnnnnnnnnnnnnnnnnnnnnnnnnnnnnnnnnnnnnnnnnnnnnnnnnnnnnnnnnnnnnnnnnnnnnnnnnnnnnnnnnnnnnnnnnnnnnnnnnnnnnnnnnnnnnnnnnnnnnnnnnnnnnnnnnnnnnnnnnnnnnnnnnnnnnnnnnnnnnnnnnnnnnnnnnnnnnnnnnnnnnnnnnnnnnnnnnnnnnnnnnnnnnnnnnnnnnnnnnnnnnnnnnnnnnnnnnnnnnnnnnnnnnnnnnnnnnnnnnnnnnnnnnnnnnnnnnnnnnnnnnnnnnnnnnnnnnnnnnnnnnnnnnnnnnnnnnnnnnnnnnnnnnnnnnnnnnnnnnnnnnnnnnnnnnnnnnnnnnnnnnnnnnnnnnnnnnnnnnnnnnnnnnnnnnnnnnnnnnnnnnnnnnnnnnnnnnnnnnnnnnnnnnnnnnnnnnnnnnnnnnnnnnnnnnnnnnnnnnnnnnnnnnnnnnnnnnnnnnnnnnnnnnnnnnnnnnnnnnnnnnnnnnnnnnnnnnnnnnnnnnnnnnnnnnnnnnnnnnnnnnnnnnnnnnnnnnnnnnnnnnnnnnnnnnnnnnnnnnnnnnnnnnnnnnnnnnnnnnnnnnnnnnnnnnnnnnnnnnnnnnnnnnnnnnnnnnnnnnnnnnnnnnnnnnnnnnnnnnnnnnnnnnnnnnnnnnnnnnnnnnnnnnnnnnnnnnnnnnnnnnnnnnnnnnnnnnnnnnnnnnnnnnnnnnnnnnnnnnnnnnnnnnnnnnnnnnnnnnnnnnnnnnnnnnnnnnnnnnnnnnnnnnnnnnnnnnnnnnnnnnnnnnnnnnnnnnnnnnnnnnnnnnnnnnnnnnnnnnnnnnnnnnnnnnnnnnnnnnnnnnnnnnnnnnnnnnnnnnnnnnnnnnnnnnnnnnnnnnnnnnnnnnnnnnnnnnnnnnnnnnnnnnnnnnnnnnnnnnnnnnnnnnnnnnnnnnnnnnnnnnnnnnnnnnnnnnnnnnnnnnnnnnnnnnnnnnnnnnnnnnnnnnnnnnnnnnnnnnnnnnnnnnnnnnnnnnnnnnnnnnnnnnnnnnnnnnnnnnnnnnnnnnnnnnnnnnnnnnnnnnnnnnnnnnnnnnnnnnnnnnnnnnnnnnnnnnnnnnnnnnnnnnnnnnnnnnnnnnnnnnnnnnnnnnnnnnaaaggatacgtttcacttaataaacatgtttatgcctatcagcatgtttgtgatggatgagactatggactgtttttaaactaccataattccatttttttccttacataggaaaactgtaagctggaattatcttttgtttagaaagcatgcatgtaatgtatgtatgcagtatgccttacttaaaaagattaaaaggatactaattttaaatcttctaggaaatagaacctagacttcaaagccagtatttgtttaggttatgaagcaaacaatgctctaatgacaatattaactgtttaattaaaatgttgtaacaagtttaaaacagggaatgtaaatttttgccaaagtgatatgtattccaaaaaagtcatagaagatgaagcactgtaatattgttcccacatatttaaaatacccaagtacattctaattaccagtgtatcagaggaaagttttcgtagtctttgtaaaataatatactcatcatnnnnnnnnnnnnnnnnnnnnnnnnnnnnnnnnnnnnnnnnnnnnttactgataatatcacaacccagaaggaaccacctttcaaaagcaacccccatatatgcctatgtatgtattgtataccttttttacataattggaatcatactgtaaacagttttataagtagatctttttcattgcaaaattgccacattttcttatggtattaaaaattttacaaaaacaattttaatggctatattatattccattgaatggatgcaactcagttttaattaaccattccccatgttgttagctgtttaggttattcttaattttcattttgcagaaattttgtgtgcataaactttgtccatataattgattattaggacatattcccatgaaggattcnnnnnnnnnnnnnntgtgcaatgtcatcttttacttatacctttcataaaaagggatttcctgcgtttgcactgaatgggtggcagttgtgaggaaaagccagtcaaatgacctttttagaaaagaaatgcagtggtcagtttagttgagagtgactttttaatataacaagatcaactagaagcattcaactgtctcaagaatcaaggtatcccaatatatctcgcaattccaaactttgtttgagtgactcgttatccagctcttggtagccacacctgcaatgtaaaattgaagaaaattcaaagaaaccaaatgtgctgagtgaataaaggattgtcatatcaattagtttgggtccatctgtagcaaatgggttgagtgtgtcagtatgtgattggttactgtgtattctccaggaatcaccccaataggctgctgccctattaggtgatacctgtttaatacgttgtccaggtagagtagtagttgcatcagtttgctgtaacaagtgaccagtgaagtaacacagtggtgaagcaggtcagggcaggtcaggaggatgtctgagagaaagaagtctgggagatgaatgactgtctaggaaggaggacatcagtgcacggttactgtttgagcagagggcagacttgtaaagtacccgtagtgaaaagaatgtggggactcaattagcagaaaggtgtttgcacatactttttacaaaatacagaatactttatattggaagtgaaagaaatgaacttggacttttacgcatgtgcatatttttctggaggctgtatggattatttgaaatgaaaagcatactaattgnnnnnnnnnnnnnnnnnnnnnnnnnnnnnnnnnnnnnnnnnnnnnnnnnnnnnnnnnnnnnnnnnnnnnnnnnnnnnnnnnnnnnnnnnnnnnnnnnnnnnnnnnnnnnnnnnnnnnnnnnnnnnnnnnnnnnnnnnnnnnnnnnnnnnnnnnnnnnnnnnnnnnnnnnnnnnnnnnnnnnnnnnnnnnnnnnnnnnnnnnnnnnnnnnnnnnnnnnnnnnnnnnnnnnnnnnnnnnnnnnnnnnnnnnnnnnnnnnnnnnnnnnnnnnnnnnnnnnnnnnnnnnnnnnnnnnnnnnnnnnnnnnnnnnnnnnnnnnnnnnnnnnnnnnnnnnnnnnnnnnnnnnnnnnnnnnnnnnnnnnnnnnnnnnnnnnnnnnnnnnnnnnnnnnnnnnnnnnnnnnnnnnnnnnnnnnnnnnnnnnnnnnnnnnnnnnnnnnnnnnnnnnnnnnnnnnnnnnnnnnnnnnnnnnnnnnnnnnnnnnnnnnnnnnnnnnnnnnnnnnnnnnnnnnnnnnnnnnnnnnnnnnnnnnnnnnnnnnnnnnnnnnnnnnnnnnnnnnnnnnnnnnnnnnnnnnnnnnnnnnnnnnnnnnnnnnnnnnnnnnntactttttacaaaatacagaatacttttattggaagtgaaagaaatgacttgggatttaacgcatgtgcatattttctggaggctgtatggattatttgaaatgaaaagcatactaattggactttaataaatcattttcaatca

SEQ ID NO: 18622 - DNA, 3372 bp, Macaca Mulatta
  misc_feature (1)...(3372): n = A,T,C or G
ctggctgcggaggcaaccgggtagacacctccctgcttagaaaacaaacactgaaccagaccgatcccagttggagggttcgaaaatgttccagacagcctgtcgggaggggttgctgttgttgttgttggactaaatagctattccggattggtcgtgtatagggttttttaaggcgggtggggggaggagggggtagagggaaggctccaaacacctgcaggttgggggcggaaagctgtttgcgattccctggactggttggtcggggacaggaggtaattcccagctattgacccccattnnnnnnnnnnnnnnnnnnnnnnnnnnnnnnnnnnnnnncacccctatcttttcctggaaactcgctttgggcgcggcagatcgcccaggactacaccgcagcgtaactgcaggcctctcagcgcaaaagggggaaagcaaagacccgggtctgcatcctctacctcggcttccgcccctctccggcggagtggagatcctattcagaggggccggtctctctaaatatgccccaggncaggatgaccgagcggccgccgaccgaggcggctcacagtgacccccagctagagggacgggacgcggccgaggcccgcatggcccccccgcacctggtcctgctgaacggcgtcgccaaggagacgagccgcgcggcccccgcggagcccccagtcatcgagctgggcgcgcgcggaggcccggggggcggccctgccagtgggggcggtgccgcgagagacttaaagggccgcgacgcgccggcggccgaagcgcgccatcgggtccccaccaccgagctgtgcagacctcccgggcccgccccagcccccgcgcccgcctcggccccagcggagctgcccggcgacggccgcatggtgcagctgagtcctcccgcgctggctgcccccgccgcccccggccgcgcgctgctctacagtctcagccagccgctggcctcgcttggcagnnnnnncagcgggttttttggggagccggatgccttccctatgttcaccaccaacaaccgagtgaagaggagaccttccccctatgagatggagattactgatggtnggtccccacaccaaagttgtgcggcgtatcttcaccaacagccgggagcgatggcggcagcagaatgtgaacggggcctttgccgagctccgcaagctgatccccacacatcccccggacaagaagctcagcaagaatgagatcctccgcctggccatgaagtatatcaacttcttggccaagctgctcaatgaccaggaggaggagggcacccagcgggccaagcctggcaaggaccctnnnnnnnnnnnnnnnnnnnnnnnnnnnnnnnnnnnnnncggcgcgcccccagatgacctcctgcaggacgtgctttcccccaactccagctgtggcagctccctggacggggcagcgagcccggacagctacacagaggagcctgcgcccaagcacacggcccgcagccttcatcctgccatgctgcccgccgccgatggagccggccctcggtgatgggtctgggccagcaggatcagccaggagggcgtccttaggctgctgggatggtgggcttcagggcaggtgggatgagaactgggccgttctgaagcaaggcggtggacttgaactttcctggatgtctgaactttgggaagcctttactgaccctggggctggttttctgtttcctgtaccagtaggagatcagaaaaatggagcaaagtggtaggtactttttgtgaagacggcacggtcttccctcttccctcagtccctaatccttcccaagtaagaggctggagttgtcactgcttttggcctggagtttgggatccctgtctttcctgagatgtggggttgtcagctctcatctgaggcatccaacagtctctgccttgcctttagcccctcccaagctggctggggtggcctgtgtggccacttccgtccatatttataggtacccaatagctgcccatttcgtgagccccatcttcacccaggcctatgttgatccatccagcttgccagatgctgcagagtcacaagcctcgaggtgccttcttcagggcctggttgaagatgatcagtggacagtctgctctagatgagctgggccagagggtcaggaaacccagtcgcccttacttcttgccctgggcatcaaagttctgctttctccccactgagacttgccttcctaagcctggggctgtggagaccgtgtctgcagccctgagagagccctgttgggctttgtgtgaaggcagagaaagggacaatgatattagagtgatatggagcaagagatattttgggcatgtggacttcaactcctccacatcactgttcatgctggcgagtgaatgccagtgtgctgatgggcgtatgcgggtgctgagtagatgcgcagccccatctgtgcattctcctagatgcttagagggatttctttgctgtaagatgtctgtttgctgatgttctggtctgtgttccgaattgagcacaaactctgtcctatgaatgctttgcatttggaatttttgcttgacttcagttattggtggaatctttagctctcaataggaccaggatccagcctcacttctagggtatgggaaatccagtcagagaccaggccctggctaagacccacacatatgcacattcacttagcagaaccttaaacacccctcagttgtgcagctgtcatcaagggtgtgtctgggaggttggtttaatgcaatagaagtgctcccctctgaaagttgtacatgaaatttttgtaaatcacatccttattcttcatcttttaaagaaataaccactgcaagtcctcttgtaaagtgaagaatccttttgtagaatgaaccactgccccttcattgatttcctgtgtcaatccagatggtgggatgtggttttcttaaggtgaggcctgtctgtgacctgcatctaagcccaggggacaaactgcacagaagtcctcctctatgtctgtcattgtacccttaagtcaccccagccctctccctctaggctctgccttcgaggtcagaggaaagataggctatggtcccatcctgtcatgcaataactcattactgtggctgtctggaaagcccctcttatagtttgggcttcaacccagtggcttgccctcaccatgatggggccctaattcagccatgtgcagacagataatatgtctgctcccctccccttccttttaaggaaggtccaattcttgagcttggggcaacattgttcacctttgtagcactctggctccccatttaatttcaggctccccagatcatgttttggtga

SEQ ID NO: 18623 - DNA, 1328 bp, Macaca Mulatta
  misc_feature (1)...(1328): n = A,T,C or G
gatacaacttaattttatccaggacaggttggtggacactcgagttgaaccttccggggccaggacaggcaccactcaggggtcctgtggacagcccgcctagctgcaatggctgcaggctcccggacatccctgctcctggtttttgccctcctctgcctgccttggcttcaagaggctggtagggtcccaagcgtacccttatccaggctttttgacaacgctatgatccaagcccatcgcctgcaccaactggcctttgacacctaccaggagtttgaagaagcctatatcccaaaggaaaagaagcattcgctcatggggaacccccaggcctccttctgcttctcagagtctattcccacaccctccaacatggaggaaacgcagcagaaatccaacctagagctgctccgcatctccctgcttctcatccagtcgtggctggagcccgtgcagttcctcaggagtgtgtttgccaacaacctggtgtatggcacctcggacagcgacgtctatgacctcctaaagaacctagaggaaggcatccaaacgttgatgcggaggctggaagatggcagcccccggactgggcagatcttcaagcagacctacagcacgtttgacacagactcacagaacgatgactcactgctcaagaactacgggctgctccactgcttcaggaaggacatggatatggtcgagacattcctgcgcatggtgcagtgccgcactgtggagggcagctgtggcttctaggtgcccgtgtggcatcctgtgacccctccccagtgcctctcctggccccggaaggtgccactccagtgcccaccagccttgtcctaataaaattaagttgtatcatcaacaaaaaaacaaagaaactcgccagggggaggtaannnngagacatccaattgtgaggatagtcacaattcactggccgacgttttacaacggtcgtgactggaaaccctggagcgttaccaacttaatcnnnnnnnnnnnnnnnnnnnnnnnnnnnnnnnnnnnnnnnnnnnnnnnnnnnnnnnnnnnnnnnnnnnnnnnnnnnnnnnntnnnnnnnnnnnnnnnnnnnnnnnnnnnnnnnnnnnnnnnnnnnnnnnnnnnnnnnnnnnnnnnnnnnnnnnnnnnnnnnnnnnnnnnnnntcggaaatccttnnnnnnnnnnnnnnnnnnnnntnnnnnnnnnnnnnnnnnnnnnnnnnnnnnnnnnnnnnnnnnnnnnnnnnnnnnnnnnnnnnnnnnnnnnnnnnnnnnnnnnnnnnnnnnnnnnnnnnnnnnnnnnnnnnnnnnnnnnntnnnt

SEQ ID NO: 18624 - DNA, 283 bp, Macaca Mulatta
  misc_feature (1)...(283): n = A,T,C or G
tggctgcccccagttggcgcggagctgggcttgttcaagaggtgttaagggtctggcaggtgggccctcatgtcgcgagggagcgggtgatccctttttcctcacccttaagcttccaacggaggtgcgtgtcctgcgttgcggggtccgctttctctggtccccgcttagcttcggcttctcggaattatggccagggctctgccctggaccacttcctcggattctctcagcgcgacagttcggtgacttcttgcgtccccgcggtgtccatgcacagagn

SEQ ID NO: 18625 - DNA, 222 bp, Macaca Mulatta
aggagtcataggaaagcagtgggagttgaagtcatgtccaagtgcttgcgatcttttacaagaaaatctcactgaatgatagtcattttaaattggtgaagtagcaagaccaattattaaaggtgacagtacacaggaaacattacagttgaacaatgactcagctatatatttacatcagattattgggagcctatctcttcatcatttctcatgttcaag

SEQ ID NO: 18626 - DNA, 813 bp, Macaca Mulatta
  misc_feature (1)...(813): n = A,T,C or G
gggagcagacagcggaactgagaaaagaagaggcctgtggacagaacaaccatgtctgactccctggtggtgtgcgaggtagacccagagctaacagaaaagctgaggaaattccgcttccggaaagagacagacaatgcagccatcataatgaaggtggacaaagaccggcagatggtggtactggaggaagaatttcagaacatttccccagaggagctcaaaatggaattgcctgagagacagcccaggttcgtggtttacagctacaagtacgtgcatgacgatggccgagtgtcctaccctttgtgtttcatcttctccagtcctgtgggctgcaagccggaacaacagatgatgtatgcagggagtaagaacaggctggtgcagacagcagagctcacaaaggtgtttgaaatccgcaccaccgatgacctcaccgaggcctggctccaagaaaagttgtctttctttcgttgagttctgggctggggcctgaattcctgatgtctgagtcctcaaggtgattggggacttggaccccttaagacctgaacaaccaagacttttaattaatttttaaaatggcatagctatatggtccatactttttagaagtcgtattcgcaacatgtaatgtgttcttgttcggactaaacaccccattatannnnnnnnnnnnnnnnnnnncctaaaagttcttactacatagctactttcattgttttttacatctattgtaataagagataatgattttttgtgtcgcctgtccaagcttcttaaaaataatttctttatacaccgttgttg

SEQ ID NO: 18627 - DNA, 1746 bp, Macaca Mulatta
  misc_feature (1)...(1746): n = A,T,C or G
ggggggctttccgcgctacctacagaagggtccatacggcgttgttctggattcccgtcgtaacttaaagggaaactttcacaatgtccggagcccttgatgtcctgcaaatgaaggaggaggatgtccttaagttccttgcagcaggaacccacttaggtggcaccaatcttgacttccagatggaacagtacatctataaaaggaaaagtgatggcatctacatcataaatctgaagaggacctgggagaagcttctgctggcggctcgtgccattgttgccattgaaaaccctgctgatgtcagcgttatatcctccaggaatactggccagagggccgtgctgaagtttgctgctgccactggagccactccaattgctggccgcttcactcctggaaccttcactaaccagatccaggcagccttccgggagccacggcttcttgtggttactgaccccagggctgaccaccagcctctcacggaggcatcttatgttaacctacctaccattgctctgtgtaacacagattctcctctgcgctatgtggacattgccatcccatgcaacaacaagggagctcactcagtgggtttgatgtggtggatgctggctcgggaagttctgcgcatgcgtggcacccatttcccgtgaacaccccgtggggaaggtcatgccctgattctctaacttcctacagaaaatccctggaagaagattggataaagaagagcagggcttgcttgcttgaaaaagggcccttgaccccaaggaagggaaatttcagggggtgaaaatggactgctccagctcctgagttcactgcttctcaacatgaggtagctgactggtctgaacgtgtgcaagagccctactgtaccctattaagcaattacattatatgaaaactgggagtgactcaagtactgcccttggaaagtaattagtgttctggcaagccaccttatcttgcctccatggaccacttctgaaaaggggggtgatcgaaagctaaaccaccaccagagaaattggacccctttacaagactaaaatattccatttggacgaattagaaagacatatattttttacacgatatctgttaattgttgcggggcggaacgataagaacataatggggaacgacgctcttgaaaatatgaacggggcagtaatancacaaatatttctcctagcatgttctcattgtaaccataaatcttttaaaaacaactttaactaattatttttaaacgaaaggggcgtcaaaagtgccgtcaacctataatgaatgctatataatttaaaacgaccaaactaatacctaaaagtttagattcaaacgcgttataggccacaccttaggcttgacatatatgatagagggagcgcaggcgcagatattactcatggaaaacccacaccactctgcgctgaaaaaataatgaaaagacaccgcgataatttttactaaacataaagaatcctagatatattttctaacgctatcatgtggtgttggctcttaatggaaccctaaggtgaacccacacataataagattagaaaacgaaatacagtgttgtgtaataaagaatgatgaaggatggaataaagtaaacatcgtatgatatttattctcctacagtcgatatgtagatcttgcactatatgtgacggatgtgatcaattaaatgttggggacatttaagacaatcctccggtgttgttacagtga

SEQ ID NO: 18628 - DNA, 1548 bp, Macaca Mulatta
  misc_feature (1)...(1548): n = A,T,C or G
ggcacgagggcagagcggagcggcgccggagatgcctgacgcatcggtctgaggagcggtcagtgacgcgatggagcgagcaagggatcgcttacacctgagacgaactacagaacagcacgtaccagaggtggaagtccaagtcaaacgcagaaggactgcctcactgagcaaccaagagtgagtacaaatgtgtcagttgtacccgaggcgttcccagcagcagcaagtacctgtggtggatttccaggctgaactgaggcaggcattcttagctgagacaccaagaggtggttaaagccatattggaatagagaggaatctgattccaagcaaaaaccaggctccgtctactctttgaagcttctgcccagcttgcattgtttttaggagaacctgcatcatacctttatctatagccttcccctaggtcttcagaaacaccaagttttaactgtggacattggatttggtggaacagcaatcatgactgtgggcaagagtagcaagatgctgcagcacattgactatagaatgagatgtatcctacaagatggccgaatcttcattggcacctttaaggcttttgacaagcatatgaatttgatcctctgtgattgtgatgagttcagaaagatcaagccaaagaatgcgaagcaaccagagcgtgaagaaaagcgggttttgggtctggtgttgctgcgtggggagaacttggtatccatgactgtggaggggccaccccccaaagatactggcattgctcgggtaccacttgctggagctgctggaggccctggggttggtagggcagctggtacaggagtaccacctggtgtgccaattccccaggcccctgctggattggcatgccctgtccgacgacttgggggaccgctcctacaatgtatcgaatctacaagccacaacgtcctccacaccgctgcaaccccccacatgccaaagcccgctctccctgggatacactccacgtcaggcccgccctcggccattgtcgtgcccacagctaactgtttaccccgcttttgcgggatgattcacaccccgtttggacacccccgcgtccattttccctctcggcccgcggcctgtccgtgtgcccgctgtgtctccaccccttacagcatcagaacacaccctcccgctcagctagcccctccatgcgtccgtgtctccgccccggacctgcgtctacgtccgcgtaaacggttacttccacgcatgtcacttgagtgatactaccggcagttcttcgtccctgaccacccccgaccgcttgcacacctttctcgagtcgtgggtcacccgctgccctgcacccatgcctacacatgtcccccatcacgcaccttacaccacggtctatcgcgccaccgcgcgtccgccgctntgcctcatccccctgtccttgacgacccgtcgcttccttcttcgctatttgcctccgcgttcctgcctcgttaccagtactaatanagcacgcccctaaccatccgtggtctgcttcgggcgtgcgcacctccttgc

SEQ ID NO: 18629 - DNA, 554 bp, Macaca Mulatta
ttttttttttgagattcatagactttaatggatattaaataaaacatggagtaattgaaaggctggaagtaatgtgatactaacataaccaataggcaaaagactgctgaagtgatagctatttagaatatatgatatagagaagtaatatgaaaaaatctacaggagcaaagtccttttcccaactctcacgttttggatgttagacatttgtagaaaaaaaaattgcaaagttgtaggattcgaagagttctagatttgccattaatgtttaagcagaacaaaagttgaatcgggcaaaaaacatgacatccccaaccattttgtttagactgactattaaaaagactttattatgatcttcgcagcaaccatctcagaacacatctttccatgggtctcatgaaccttaaaccctcctattaaatcttatacttcccgctttattggcactatagatgtgagaaagggttgatggtcatctttgtttacaaagtcattacaggtttgaacaaattccaaactggctattattaagccttcccagaagccac

SEQ ID NO: 18630 - DNA, 967 bp, Macaca Mulatta
  misc_feature (1)...(967): n = A,T,C or G
tgggctgcgaggagaaggaaacagggatttgagaggttcctcatccctccgaggtcatcccttactccaggnnnnnnnnnnnnnnnnnnnnnnnnnnnnnnnnnnnnnnnnnnnnnnnnnnnnnnnnnnnnnnnnnnnnnnnnnnnnnnnnnnnnnnngtgccaacatcgcctctggtgaggatttttttttcaagctggagtgtgtgaagactatgcgccgccagctgcacattgagagcaagttctacaatatgatgcannnnnnnnnnnnnnnnnnnnnnnnnnnnnnnnnnnnnnnnnnnnnnnnnnnnnnnnnnnnnnnnnnnnnnnnnnnnnnnnnnnnnnnnnnnnnnnnnnnnnnnnnnnnnnnnnnnnnnnnnnnnnnnnnnnnnnnnnnnnnnnnnnnnnnnnnnnnnnnnnnnnnnnnnnnnnnnnnnnnnnnnnnnnnnnnnnnnnnnnnnnnnnnnnnnnnnnnnnnnnnnnnnnnnnnnnnnnnnnnnnnnnnnnnnnnnnnnnnnnnnnnnnnnnnnnnnnnnnnnnnnnnnnnnnnnnnnnnnnnnnnnnnnnnnnnnnnnnnnnnnnnnnnnnnnnnnnnnnnnnnnnnnnnnnnnnnnnnnnnnnnnnnnnnnnnnnnnnnnnnnnnnnnnnnnnnnnnnnnnnnnnnnnnnnnnnnnnnnnnnnnnnnnnnnnnnnnnnnnnnnnnnnnnnnnnnnnnnnnnnnnnnnnnnnnnnnnnnnnnnnnnnnnnnnnnnnnnnnnnnnnnnnnnnnnnnnnnnnnnnnnnnnnnnnnnnnnnnnnnnnnnnnnnnnnnnnnnncgaattctcaacatacctcaacttctgccgctccctgcggtttgacgacaagcccgactactcttacctacgtcagctcttccgcaacctcttccaccggcagggcttctcctatgactacgtcttcgactggaacatgctgaaattcg

SEQ ID NO: 18631 - DNA, 1517 bp, Macaca Mulatta
  misc_feature (1)...(1517): n = A,T,C or G
gagaaaaaccgtttcagtgcacttttgaagggtgcggaaagcgcttctccctggacttcaatttgcgtacacatgtacgcatccacacgggggagaaacggttcgtgtgtccctttgaaggctgtaacaggaggtttactcagtcaaataacctgaaagcccacatcctaacgcatgcaaatacgaacaagaatgaacaagacggagagtggtcctccaacaggatnnnnnnnnnnnnnnnnnngtgatcagtgacaaatcggcctcttgattattgtttctaggacggaatttttaaatcaatattgcagccccaaaagcggttataatttggtgtttctaagatgctcccacactttgtgataccgttttgagaacatggtgnnnnnnnnnnnnnnnnnnnnnnnnnnnnnnnnnnnnnnnnnnnnnnnnnntttagaactttgtattcttaaaatgtgcttccaacaggaaggtcagtgataaattgacttcaaaagcatgacctttaatatagtatctgttggattattagatataagacttattttcatgtactataaatatgaaaataactttgagttttaattgtgtagttttcatttcttagtttttgccttttaaataaatacttcagccaggcatagtgactgacgcctgtaatccnnnnnnnnnnnnnnnnnnnnnnnnnnnnnnnnnnnnnnnnnnnnnnnnnnnnnnnnnnnnnnnnnnnnnnnnnnnnnnnnnnnnnnnnnnnnnnnnnnnnnnnnnnnnnnnnnnnnnnnnnnnnnnnnnnnnnnnnnnnnnnnnnnnnnnnnnnnnnnnnnnnnnnnnnnnnnnnnnnnnnnnnnnnnnnnnnnnnnnnnnnnnnnnnnnnnnnnnnnnnnnnnnnnnnnnnnnnnnnnnnnnnnnnnnnnnnnnnnnnnnnnnnnnnnnnnnnnnnnnnnnnnnnnnnnnnnnnnnnnnnnnnnnnnnnnnnnnnnnnnnnnnnnnnnnnnnnnnnnnnnnnnnnnnnnnnnnnnnnnnnnnnnnnnnnnnnnnnnnnnnnnnnnnnnnnnnnnnnnnnnnnnnnnnnnnnnnnnnnnnnnnnnnnnnnnnnnnnnnnnnnnnnnnnnnnnnnnnnnnnnnnnnnnnnnnnnnnnnnnnnnnnnnnnnnnnnnnnnnnnnnnnnnnnnnnnnnnnnnnagtttgaggctacagtaagctgtgattgcaccactggaccccagactggataacagcaagagcccatctttnnnnnnnnnnnnnnnnnnnnnnnnncttcatggtacatgtcattgtcctagagaatgaaaaatttgcagtagatagtcaataaatgaannnnnnnnnnnnnnnnnnnnnnnnnnnnnnnnnnnnnnnnnnnnnnnnnnnnnnnnnnnnnnnnntgtatcaaactatatggaactcatacggttagatgtgagcgattatttgatagcgttagtccatttgaatccattttagatattttacaactaaagaatacgaaactt

SEQ ID NO: 18632 - DNA, 629 bp, Macaca Mulatta
aataataatttctttatatactacaaaacaagatagaaaaaggtgctattatttaacttcaaaacatgtttcctagtattaagaactttaatatagcaacagacaaaattattgttaacatgaatgttacagctcagaagatttataaaagattttaacctattttctcccttattatccactgctaatgtggatgtatgttcaaacacctttgagtattgatagcttacatatggccaaaggaatacagtttatagcgaaacatgggtatactgtagctaactttataaaactgtaatataacaatgtaaaaaattatatacctggggggattttttggttgcttaaagtggctatagtcactgatttttttattatgtaagcaaaaccaataaactttaggttgtgtttcattaacaactagcttatttttcattgtacaggcactaattcattaaatactaattgactgtttaaaggaaatatcaatgtgacaagtggacactatttatgttaacatatacaatcatcaaggaagtatgaagttattcaattaaaatgccacatttctggtcgaaaaaagcaaacacagggggggcccggttacccaatgcgcgctatagtgagtc

SEQ ID NO: 18633 - DNA, 694 bp, Macaca Mulatta
atataaggtgaggggcagcgctagtgccttgccttctccacagcagacagcttggggaatgcgctcatgtgagtacggttctacaaggacttgctgacactctgaagacctctatgtctctatgggatcccttcctgaagacagcatgggggagtctatctaaatcaaagctcgacagtcttcctggggcaatcttgcagcaaaatctgaactttaccctccactactgaccagattcccagtagcttccattaatctgtcttcctaggcactatcagtcaagggtgaacttctaaagaattctctgaggccagaagctcttagcaacaggccgtgccaacccttcctgggaggcatcctgttggcttctctcacaaacacagccttcgtgacccgcaggctgaccctgcctgctctcgcatctccacattgttggtgttgagaggcaggctggattgcactttcaggtagacagaagggagggcttctctgctgacccctcttccttgagagctgatgcagccttcctccttctgaggagtgaggtaggcagagcccaccggagacagtaaaagggatgtgctcatacttaatggtgcttttcagaggaaaccggagaagcagtaaagcaggcagaggccttgctgcacaccaggccttcttagtccacaacttcataaataagggccctggg

SEQ ID NO: 18634 - DNA, 792 bp, Macaca Mulatta
ggggtcaggtttgaggttggactccacgagtgtggcagtagcatgcaggtgactgacgatgccctggtgtacagcaccttcctgctccacaacccccgccctgtgggaaacctgtccatcgtgaggactaaccgtgcagagattcccattgagtgccgctaccccaggcagggcaatgtgagcagccaggccatcctgcccacctggttgcccttcaggaccacggtattctcggaggagaagctgactttctctctgcgtctgatggaggagaactggaacgctgagaagaggtcccctaccttccacctgggagatgcagcccacctccaggcagaaatccacactggcagccacgtgccactgcggttgtttgtggaccactgcgtggccacaccaacaccagaccagaatgcctccccttatcacaccatccggggacttccatggctgtcttgtcgatggtctcactgatgcctcttctgcgttcaaagttcctcgaccccggccaaataccctcccgtttcccgcggaatgcctccccctttgccattgacttcccgaaccttgaccttccttccctgccaccccgaaggccattcccatctggaccccggaatccgcaccaaagccctatcccaggcctggttccctttcagcaaattccttccccacaggcggcggcccccactggggaaagggccccatcttgaacaactcgtgccggtggtgtgataaaaaacttcttttcctaacccccccggggggccctttttttggggcgggcgcgaa

SEQ ID NO: 18635 - DNA, 1253 bp, Macaca Mulatta
  misc_feature (1)...(1253): n = A,T,C or G
agtattcccactttcctgtgcggtgcagcagtatgcctgggggaagatgggttacaacagcgaagtggcgcggctgttggccagcagtgacccactggcccagatcgcagaggacaagccctatgcagannnnnnnnnnnnnnnnnnnnnnnnnnnnnnnnaagatctttgacaaccgcatctcacagaagaccctaggccagtggattgctgagaaccaggacagcttgggctcaaaggtcaaggacacctttaatggcaatctgcccttcctcttcaaagtgctctcagttgaaacacccctgtccatccaggcacaccctaacaaggnnnnnnnnnnnnnnnnnnnnnnnnnnnnnnnnnnnnnnnnnnnnnnnnnnnnnnnnnnnnnnnnnnnnnnnnnnnnnnnnnnnnnnnnnnnnnnnnnnnnnnnnnnnnnnnnnnnnnnnnnnnnnnnnnnnnnnnnnnnnnnnnnnnnnnnnnnnnnnnnnnnnnnnnnnnnnnnnnnnnnnnnnnnnnnnnnnnnnnnnnnnnnnnnnnnnnnnnnggctgtggcctctgctctgcagagctgtttctcccacctgatgaagagtgagaagaaggtggtggcggaacagctcaacctgttggtgaagcggatctcccagcaannnnnnnnnnnnnnnnnnnnnnnnnnnnnnnnnnnnnnnnnnnnnnnnnnnnnnnnnnnnnnnnnnnnnnnnnnnnnnnnnnnnnnnnnnnnnnnnnnnnnnnnnnnnnnnnnnnnnnnnnnnnnnnnnnnnnnnnnnnnnnnnnnnnnnnnnnnnnnnnnnnnnnnnnnnnnnnnnnnnnnnnnnnnnnnnnnnnnnnnnnnnnnnnnnnnnnnnnnnnnnnnnnnnnnnnnnnnnnnnnnnnnnnnnnnnnnnnnnnnnnnnnnnnnnnnnnnnnnnnnnnnnnnnnnnnnnnnnnnnnnnnnnnnnnnnnnnnnnnnnnnnnnnnnnnnnnnnnnnnnnnnnnnnnnnnnnnnnnnnnnnnnnnnnnnnnnnnnnnnnaggtccctggctctgtcactgaatacaaggtcttggcactggactctgccagcatcctcctggtggtacaggggacagtgatagccagcacacccacaacccagacaccaatccctctgcagcgtggtggcgtgctcttcattggggccaatgagagtgtctcactgaagcttactgagccgaaggacctgctgatattccgtgcctgctgtctgctgt

SEQ ID NO: 18636 - DNA, 630 bp, Macaca Mulatta
aacttgaaagtcagcactaaaggatggtcagaggttcaacccacacctccactttgcttctgaaagcccattattagaccacttgtaaagattactccaacccagtttttacatctttggttcaaaacagcatgtctctccaacaatttaagtgcctgatacaaagtccaaagtataaacatgctcctttcctctcttgctgctactcttacttatggaagttaccacagggtctgcaaaaacctgttgtgtaactgtagacactctctaatcgttctcaaaggaggaaatgtagccttcagtctccttatttgtcccttgagaaagtccacatttgttcacagtcacagcctgcggttttacagtgggaaatggtggtggatggtgtggacatatgtagcccagtggcattgtactttctgctgacagctgcacacattacagctgtctccaaacccacagtgatgcttagggaaagaccctgctcaggacccagcaggtcagcaccccagagcagactgataggtcagtgggacccatgttaaagcagaaaatttgggcttagcacattttactgttagtagagggccaggaaaggttttctgggttggggattttgtggggttttta

SEQ ID NO: 18637 - DNA, 280 bp, Macaca Mulatta
ttctagctctccaatcaggacttcattatgcctctcgttttatgacctggtaaggagaagccagagttatcgtaggaaaggactgattctcagcagcagtggaggtgagttctttctctgcggaagctttacgtatgttttgggtagtaggaataactagatgttttagctagtgtgcagtgtgtgttcagccctgggattcgagagtgtatcctaacaagtcccatgtctggttctgtgtctaaaggcctgctccatgacacaggatgctacatgcact

SEQ ID NO: 18638 - DNA, 145 bp, Macaca Mulatta
tctgtgtgtcacagcctcagaagaccagcgagatggctgccaacaagagtaaggaccagagctccttggccctccacaaggtgatcatggttggcagcggaggcgttggcaagtcggccttgacgcttcagttcatgtatgacga

SEQ ID NO: 18639 - DNA, 480 bp, Macaca Mulatta
  misc_feature (1)...(480): n = A,T,C or G
agatctaaaatctcattttctgtgtgacttgtgtgtttggggcaggggtaactaattcttgactactccatatgctgcatagaacctggaaaggatttctcaaagtaaatgaatcccgaaagctggattgcagagcaaacgaatgcagtcacttcagccaggggcttgcaagagggagaaagagagaaagactgtggaatggaaagtttcccaactcaagcctttcccaaggggtagccattctctgttctacagtttagggcttgcatgtgcttttttctggagtggaaaaatacataagttataaggaatttaacagacagaaaggcgcacagaggaatttaaagggtaggctggggggcgaggcggtgggcgggaggcgaacgggnnnnnnnnnnnnnnnnnnnnnnnnnnnnnnnnnnnnnnnnnnnnnnnnnnnnnnnnaacactgttttccaagctaagccgccgcaaataaaa

SEQ ID NO: 18640 - DNA, 817 bp, Macaca Mulatta
  misc_feature (1)...(817): n = A,T,C or G
gcgaggantcggcacgaggcaggcgattaatgacatcccattcattaaatcgttaatcaataggcaccacctttaaccagactgtcctgacttgcacaggagacacactcctcacctcagcaacctcaagccctcccttctcacgtctccatgcaaagacccgggcaggtcaaagcagggctgtcccccctgatgagcccctcgaagcacctggctggccatggctgtcattttgagggcagaaaataactggatttctggttaattggtgacatcctcgagagctgttgcaagccatgtctcggccgcgtgacggggcagacgtggtgggcccgatggccttgtcttcaccaagtgctcctaactctcagcaaacttggggttcatgaccgtcgtggtggcactcttgaaaaggggattatcgttgttccactgagacttgagcttctccttctcaaaacgcctgtactcccggaggtcgctcaggtgggtcagggccttccagatgaccagcaggaggacgccgatcagcacgatgcctgccacagtgcccccgacgatggcagcgatgttggggcccgccacgcactctcggctctcatccacatagatgatgtagtgatcccacccgtcctgctgctccagcatgtacgtcacccagcagccctctgagtccctctccttgcaggtcctgcccttcacggggttgttcgacagctgcaggcgcccacacgccgcgctgcagttcttcccgaaagggcctttgtcgaacttcaggcactcagcacaggagacgtgctcgccgcagggcgagggc

SEQ ID NO: 18641 - DNA, 1840 bp, Macaca Mulatta
  misc_feature (1)...(1840): n = A,T,C or G
ccagatggcagacgatcagggctgtgttgaagagcagggggttgggaattcagcaaatgaagattcagtggatgctaagccagaccggtcctcgcttataccatccctctnnnnnnnnnnnnnnnnnnnnnnnnnnnnnnnnnnnnnnnnnnnnnnnnnnnnnnnnnnnnnnnnnnnnnnnnnnnnnnnnnnnnnnnnnnnnnnnnnnnnnnnnnnnnnnnnnnnnnnnnnnnnnnnnnnnnnnnnnnnnnnnnnnnnnnnnnnnnnnnnnnnnnnnnnnnnnnnnnnnnnnnnnnnnnnnnnnnnnnnnnnnnnnnnnnnnnnnnnnnnnnnnnnnnnnnnnnnnnnnnnnnnnnnnnnnnnnnnnnnnnnnnnnngcttctgaagaggaccatacaaatgctgcctgcttcgcctgcatcctcttaagccacggagaagaaaatnnnnnnnnnnnnnnnnnnnnnnnnnnnnnnnnnnnnnnnnnnnnnnnnnnnnnnnnnnnnnnnnnnnnnnnnnnnnnnnnnnnnnnnnnnnnnnnnnnnnnnnnnnnnnnnnnnnnnnnnnnnnnnnnnnnnnnnnnnnnnnnnnnnnnnnnnnnnnnnnnnnnnnnnnnnnnnnnnnnnnnnnnnnnnnnnnnnnnnnnnnnnnnnnnnnnnnnnnnnnnnnnnnnnnnnnnnnnnnnnnnnnnnnnnnnnnnnnnnnnnnnnnnnnnnnnnnnnnnnnnnnnnnnnnnnnnnnnnnnnnnnnnnnnnnnnnnnnnnnnnnnnnnnnnnnnnnnnnnnnnnnnnnnnnnnnnnnnnnnnnnnnnnnnnnnnnnnnnnnnnnnnnnnnnnnnnnnnnnnnnnnnnnnnnnnnnnnnnnnnnnnnnnnnnnnnnnnnnnnnnnnnnnnnnnnnnnnnnnnnnnnnnnnnnnnnnnnnnnnnnnnnnnnnnnnnnnnnnnnnnnnnnnnnnnnnnnnnnnnnnnnnnnnnnnnnnnnnnnnnnnnnnnnnnnnnnnnnnnnnnnnnnnnnnnnnnnnnnnnnnnnnnnnnnnnnnnnnnnnnnnnnnnnnnnnnnnnnnnnnnnnnnnnnnnnnnnnnnnnnnnnnnnnnnnnnnnnnnnnnnnnnnnnnnnnnnnnnnnnnnnnnnnnnnnnnnnnnnnnnnnnnnnnnnnnnnnnnnnnnnnnnnnnnnnnnnnnnnnnnnnnnnnnnnnnnnnnnnnnnnnnnnnnnnnnnnnnnnnnnnnnnnnnnnnnnnnnnnnnnnnnnnnnnnnnttgacaaaacacagccaaggggatatttactgacctttattgcagaatgtgggtattgagtgtgatttgaatgatttttcactggcttagggcagattttcatgcaaaaatttccagataagaggagaaaaagctaaatgattctgatatgtatccatcaggatcccgtctggaaaacagaaaccattctaggtgtttcaacagagggaatttaatacaggaaattgacttacatagatgataaaagagaagccaaatagcaagaagctgttaacacacccagggctgtgacgataatgggaagaggtttggtttcctgagtctagtagtaggatcatccagaggagctggaaccatggtgggggctgcctagtgggaggtaggaccactaatggattgtggaaagtggagccatgacaaggacaaagccactgcctgagatggattgaactgagtcagatacagagaataccttggtctcacctctcctgccctcacatcttccaccagcaccttaccgcccaggcctacctggaagccaccttaccaagggccttggaagagcaagggacagtgaggcagg

SEQ ID NO: 18642 - DNA, 6476 bp, Macaca Mulatta
  misc_feature (1)...(6476): n = A,T,C or G
aaatgcagaccttccaactgcgccctttgcttcttccattggaagccacaatatgacattacgatggaaatctgccaacttctctggcgtaaaatacatcattcagtggaaatatgcacaacttctgggaagctggacttatactaagnnnnnnnnnnnnnnnnnnnnnnnnnnnnnnnnnnnnnnnnnnnnnnnnnnnnnnnnnnnnnnnnnnnnnnnnnnnnnnnnnnnnnnnnnnnnnnnnnnnnnnnnnnnnnnnnnnnnnnnnnnnnnnnnnnnnnnnnnnnnnnnnnnnnnnnnnnnnnnnnnnnnnnnnnnnnnnnnnnnnnnnnnnnnnnnnnnnnnnnnnnnnnnnnnnnnnnnnnnnnnnnnnnnnnnnnnnnnnnnnnnnnnnnnnnnnnnnnnnnnnnnnnnnnnnnnnnnnnnnnnnnnnnnnnnnnnnnnnnnnnnnnnnnnnnnnnnnnnnnnnnnnnnnnnnnnnnnnnnnaggttttttactgcagcagtaaatgaagtggtgaggggccagaagcagaatctagtattaccacttcatcttcagcagncagtccaagaagaggagcagtggctctttttatccagaaaaacttctctaagaaagagatctttaaaacatttggtagatgaagcacattgccttcggctggatgctatataccataatattacaggnaggaatatcagttgatgtccaccagcaaattgtttatttctctgaaggaactctcatatgggnnnnnnnnnnnnnnnnnnnnnnnnnnnnnnnnnnnnnnnnnnnnnnnnnnnnnnnnnnnnnnnnnnnnnnnnnnnnnnnnnnnnnnnnnnnnnnnnnnnnnnnnnnnnnnnnnnnnnnnnnnnnnnnnnnnnnnnnnnnnnnnnnnnnnnnnnnnnnnnnnnnnnnnnnnnnnnnnnnnnnnnnnnnnnnnnnnnnnnnnnnnnnnnnnnnnnnnnnnnnnnnnnnnnnnnnnnnnnnnnnnnnnnnnnnnnnnnnnnnnnnnnnnnnnnnnnnnnnnnnnnnnnnnnnnnnnnnnnnnnnnnnnnnnnnnnnnnnnnnnnnnnnnnnnnnnnnnnnnnnnnnnnnnnnnnnnnnnnnnnnnnnnnnnnnnnnnnnnnnnnnnnnnnnnnnnnnnnnnnnnnnnnnnnnnnnnnnnnnnnnnnnnnnnnnnnnnnnnnnnnnnnnnnnnnnnnnnnnnnnnnnnnnnnnnnnnnnnnnnnnnnnnnnnnnnnnnnnnnnnnnnnnnnnnnnnnnnnnnnnnnnnnnnnnnnnnnnnnnnnnnnnnnnnnnnnnnnnnnnnnnnnnnnnnnnnnnnnnnnnnnnnnnnnnnnnnnnnnnnnnnnnnnnnnnnnnnnnnnnnnnnnnnnnnnnnnnnnnnnnnnnnnnnnnnnnnnnnnnnnnnnnnnnnnnnnnnnnnnnnnnnnnnnnnnnnnnnnnnnnnnnnnnnnnnnnnnnnnnnnatgtcatcctgaccagtgatattattgaactctttgaattaggcccttctgcctggcagaactggacctatgaggtgaaagtatccacccaagaccctcctgaagtcactcgtattttctcgaacataagtggaaccaggctgaatgtacctgagctgcagagtgctatgaaatacaaggtttctgtgagagcaagttctccaaagaggccaggcccctggacagagccctcagtgggtactaccctggtgccagncagctagtgaaccaccatttatcatggctgtgaaagaagatgggctttggagtaaaccattaaatagctttggcccaggagagttcttatcctctgatataggaaatgtgtcagnagacatggattggtataacaacagcctctactacagtgacacgaaaggtgacgtttttgtgtggcagctgaatgggatggatatctcagagaattatcacctacccggcattgcaggagcaggggctttagcttttgagtggctgggtcactttctctactgggctggaaagacgtatgtgngatacaaaggcagtctgtgttgacaggacacacagatattgttacccacgtgaagctattggtgaatgacatggtggtggattcagttggtggatatctctactggaccacactctattcagtggaaagcaccagactaaatggggaaagttcccttatactacaggcacagccttggttttctgggaaaaaggtnaggtgattgctctaactttagacctcagtgatgggctcctgtattggttggttcaagacagtcaatgtattcacctgtacacagctgttcttcggggtcagagnnnnggggataccaccatcacagagtttgcagcctggagtacttctgaaatttcccagaatgcactgatgtactatagcggtcggctgttctggatcaatggctttaggattatcacaactcaggaaataggtcagagaaccagtgtctctgttttggaaccagccaaatttaatcagttcacaattattcagacatcccttaagcctctgccaggnagggaacttttcctttacccctaaggttattccagattctgttcaagagtcttcatttaggattgaaggaaatgcttcaagttttcaaatcctgtggaatggtccccctgcggtagactggggtgtagttttctacagcgtagaatttagtgctcattctaagnnnnnnnnnnnnnnnnnnnnnnnnnnnnnnnnnnnnnnnnnnnnnnnnnnnnnnnnnnnnnnnnnnnnnnnnnnnnnnnnnnnnnnnnnnnnnnnnnnnnnnnnnnnnnnnnnnnnnnnnnnnnnnnnnnnnnnnnnnnnnnnnnnnnnnnnnnnnnnnnnnnnnnnnnnnnnnnnnnnnnnnnnnnnnnnnnnnnnnnnnnnnnnnnnnnnnnnnnnnnnnnnnnnnnnnnnnnnnnnnnnnnnnnnnnnnnnnnnnnnnnnnnnnnnnnnnnnnnnnnnnnnnnnnnnnnnnnnnnnnnnnnnnnnnnnnnnnnnnnnnnnnnnnnnnnnnnnnnnnnnnnnnnnnnnnnnnnnnnnnnnnnnnnnnnnnnnnnnnnnnnnnnnnnnnnnnnnnnnnnnnnnnnnnnnnnnnnnnnnnnnnnnnnnnnnnnnnnnnnnnnnnnnnnnnnnnnnnnnnnnnnnnnnnnnnnnnnnnnnnnnnnnnnnnnnnnnnnnnnnnnnnnnnnnnnnnnnnnnnnnnnnnnnnnnnntggatcaaaatcaagttgtgtggacgttttcagcagaaagagttatcagtgctatttgctacacagcggataatgagctgggatattatgctgaaggggactcactctttcttttgaacttgcacaatcgttctagctctgagnagcttttccgagattcactggtttttgatatcacagttattacaattgactggatttcaaggcacctctactttgcactcaaagaatcacaaaatggaatgcaaatatttgatgttgatcttgaacacaagtgaaataccccagagaggtgaagattcacaatagaaattcaacaatattttctttttttgtatttcctcttttnnnnnnnnnnnnnnnnnnnnnnnnnnnnnnnnnnnnnnnnnnnnnnnnnnnnnnnnnnnnnnnnnnnnnnnnnnnnnnnnnnnnnnnnnnnnnnnnnnnnnnnnnnnnnnnnnnnnnnnnnnnnnnnnnnnnnnnnnnnnnnnnnnnnnnnnnnnnnnnnnnnnnnnnnnnnnnnnnnnnnnnnnnnnnnnnnnnnnnnnnnnnnnnnnnnnnnnnnnnnnnnnnnnnnnnnnnnnnnnnnnnnnnnnnnnnnnnnnnnnnnnnnnnnnnnnnnnnnnnnnnnnnnnncgcaggaaaaacccttgctagcttaactgtggatggagattttatatattggatcatcgcagcaaaggacagcacacggatttatcaagcaaagaaaggaaatggggccatcgtctcccaggtgaaggccctaaggagtaggcatatcttggcttacagttcagttatgcagccttttccagnnnnnnnnnnnnnnnnnnnnnnnnnnnnnnnnnnnnnnnnnnnnnnnnnnnnnnnnnnnnnnnnnnnnnnnnnnnnnnnnnnnnnnnnnnnnnnnnnnnnnnnnnnnnnnnnnnnnnnnnnnnnnnnnnnnnnnnnnnnnnnnnnnnnnnnnnnnnnnnnnnnnnnnnnnnnnnnnnnnnnnnnnnnnnnnnnnnnnnnnnnnnnnnnnnnnnnnnnnnnnnnnnnnnnnnnnnnnnnnnnnnnnnnnnnnnnnnnnnnnnnnnnnnnnnnnnnnnnnnnnnnnnnnnnnnnnnnnnnnnnnnnnnnnnnnnnnnnnnnnnnnnnnnnnnnnnnnnnnnnnnnnnnnnnnnnnnnnnnnnnnnnnnnnnnnnnnnnnnnnnnnnnnnnnnnnnnnnnnnnnnnnnnnnnnnnnnnnnnnnnnnnnnnnnnnnnnnnnnnnnnnnnnnnnnnnnnnnnnnnnnnnnnnnnnnnnnnnnnnnnnnnnnnnnnnnnnnnnnnnnnnnnnnnnnnnnnnnnnnnnnnnnnnnnnnnnnnnnnnnnnnnnnnnnnnnnnnnnnnnnnnnnnnnnnnnnnnnnnnnnnnnnnnnnnnnnnnnnnnnnnnnnnnnnnnnnnnnnnnnnnnnnnnnnnnnnnnnnnnnnnnnnnnnnnnnnnnnnnnnnnnnnnnnnnnnnnnnnnnnnnnnnnnnnnnnnnnnnnnnnnnnnnnnnnnnnnnnnnnnnnnnnnnnnnnnnnnnnnnnnnnnnnnnnnnnnnnnagtggaaatacaatgagttttaccatgttaaaacttcatgcagccaaggtcctgcttatgtctgtaatatcacaaatctacaacctcatacttcatataatgtcagagtagtggtggtttataagacaggagaaaatagtacctcacttccagaaagctttaagacaaaagnnnnnnnnnnnnnnnnnnnnnnnnnnnnnnnnnnnnnnnnnnnnnnnnnnnnnnnnnnnnnnnnnnnnnnnnnnnnnnnnnnnnnnnnnnnnnnnnnnnnnnnnnnnnnnnnnnnnnnnnnnnnnnnnnnnnnnnnnnnnnnnnnnnnnnnnnnnnnnnnnnnnnnnnnnnnnnnnnnnnnnnnnnnnnnnnnnnnnnnnnnnnnnnnnnnnnnnnnnnnnnnnnnnnnnnnnnnnnnnnnnnnnnnnnnnnnnnnnnnnnnnnnnnnnnnnnnnnnnnnnnnnnnnnnnnnnnnnnnnnnnnnnnnnnnnnnnnnnnnnnnnnnnnnnnnnnnnnnnnnnnnnnnnnnnnnnnnnnnnnnnnnnnnnnnnnnnnnnnnnnnnnnnnnnnnnnnnnnnnnnnnnnnnnnnnnnnnnnnnnnnnnnnnnnnnnnnnnnnnnnnnnnnnnnnnnnnnnnnnnnnnnnnnnnnnnnnnnnnnnnnnnnnnnnnnnnnnnnnnnnnnnnnnnnnnnnnnnnnnnnnnnnnnnnnnnnnnnnnnnnnnnnnnnnnnnnnnnnnnnnnnnnnnnnnnnnnnnnnnnnnnnnnnnnnnnnnnnnnnnnnnnnnnnnnnnnnnnnnnnnnnnnnnnnnnnnnnnnnnnnnnnnnnnnnnnnnnnnnnnnnnnnnnnnnnnnnnnnnnnnnnnnnnnnnagactttgaagaagggttccaccgaccaggagaagattgaattcctgaaggaggcacatctgatgagnagcaaatttaatcatcccaacattctgaaacagcttggagtttgtctgctgaatgaacccccagtatattatcctggaactgatggaaggaggagaccttctnnnnnnnnnnnnnnnnnnnnnnnnnnnnnnnnnnnnnnnnnnnnnnnnnnnnnnnnnnnnnnnnnnnnnnnnnnnnnnnnnnnnnnnnnnnnnnnnnnnnnnnnnnnnnnnnnnnnnnnnnnnnnnnnnnnnnnnnnnnnnnnnnnnnnnnnnnnnnnnnnnnnnnnnnnnnnnnnnnnnnnnnnnnnnnnnnnnnnnnnnnnnnnnnnnnnnnnnnnnnnnnnnnnnnnnnnnnnnnnnnnnnnnnnnnnnnnnnnnnnnnnnnnnnnnnnnnnnnnnnnnnnnnnnnnnnnnnnnnnnnnnnnnnnnnnnnnnnnnnnnnnnnnnnnnnnnnnnnnnnnnnnnnnnnnnnnnnnnnnnnnnnnnnnnnnnnnnnnnnnnnnnnnnnnnnnnnnnnnnnnnnnnnnnnnnnnnnnnnnnnnnnnnnnnnnnnnnnnnnnnnnnnnnnnnnnnnnnnnnnnnnnngtggaatttaatgacccaatgctgggctcaagaacctgaccaaaggcctacttttcatagaattcaggaccaacttcagttattcagaaattttttcttgaatagcatttatcagtgcagagatgaagcaaacaccagtggagtcataaatgaaaactttgaaggt

SEQ ID NO: 18643 - DNA, 1377 bp, Macaca Mulatta
  misc_feature (1)...(1377): n = A,T,C or G
ggtatggcagatcccagaaaatggactcacgctttccctgactgaacctgtggtgattttggaaggccactcaaagagagtcggcatcgtggcttggcatccgacagcccgcaatgtgcttcttagtgcaggnnnnnnnnnnnnnnnnnnnnnnnnnnnnnnnnnnnnnnnnnnnnnnnnnnnnnnnnnnnnnnnnnnnnnnnnnnnnnnnnnnnnnnnnnnnnnnnnnnnnnnnnnnnnnnnnnnnnnnnnnnnnnnnnnnnnnnnnnnnnnnnnnnnnnnnnnnnnnnnnnnnnnnnnnnnnnnnnnnnnnnnnnnnnnnnnnnnnnnnnnnnnnnnnnnnnnnnnnnnnnnnnnnnnnnnnnnnnnnnnnnnnnnnnnnnnnnnnnnnnnnnnnnnnnnnnnnnnnnnnnnnnnnnnnnnnnnnnnnnngaaaaatatgcaggaaccaattgctcttcatgagatggacactagcaatggggtgttgctgcctttctatgaccctgacaccagcatcatttacttatgtggaaaggnnnnnnnnnnnnnnnnnnnnnnnnnnnnnnnnnnnnnnnnnnnnnnnnnnnnnnnnnnnnnnnnnnnnnnnnnnnnnnnnnnnnnnnnnnnnnnnnnnnnnnnnnnnnnnnnnnnnnnnnnnnnnnnnnnnnnnnnnnnnnnngattcttcaaacttcatgagagaaagtgtgaacctattatcatgactgttcccaggaagnagtctgaccttttccaagatgacctgtatcctgacacagcggggccagaggccgcgctggaggcnnnnnnnnnnnnnnnnnnnnnnnnnnnnnnnnnnnnnnnnnnnnnnnnnnnnnnnnnnnnnnnnnnnnnnnnnnnnnnnnnnnnnnnnnnnnnnnnnnnnnnnnnnnnnnnnnnnnnnnnnnnnnnnnnnnnnnnnnnnnnnnnnnnnnnnnnnnnnnnnnnnnnnnnnnnnnnnnnnnnnnngcaaaatgaagccaagttggatgagattttaaaagagatcaaatctataaaagacacaatctgcaatcaagatgagcgtatttccaagttagaacagcagatggcgaagatagcagcctgaaggtcccacccccacccctacaaaaaaatgggagcaagaacttgtgcttgggagctggttgttggtgtggtcttagggagggcggaaagggaggcactgccatttggagacattccatttcagagttgtcaaccagccataggccacattccagtaagaactcaatttgtctcccaaatttgcagaaacaaaacgtgatttaaaagctgagcttaatatcagaaagcttttttgatgttttaagtgttatgtgacttgttgaacttt

SEQ ID NO: 18644 - DNA, 155 bp, Macaca Mulatta
gttatttgaaattacagtgcctctctctcaaggccccaaaccagtaacaatcagttttgccaatcacacttcctgccgatgcatgtccaaactggatgtttacagacaagttcattccattattagacgttccctgccagcaacactaccacagt

SEQ ID NO: 18645 - DNA, 186 bp, Macaca Mulatta
  misc_feature (1)...(186): n = A,T,C or G
gggatggagttggcaggcatccatgaaacccacttacaacagcatcatgaaggtgtgatatgaccatcaggaaaggacttctacgctaacaatgtcctatcaggaggcanccactatgtaccctggcattgccgaccgaatgcagaaggagatcacggccctagcgcccagcaccatgaagatcaa

SEQ ID NO: 18646 - DNA, 803 bp, Macaca Mulatta
  misc_feature (1)...(803): n = A,T,C or G
agttggaccctgaatgttttttacacatggggacccaggcaagccaaagcattgctgctcacctagataaccaagttccagttgagagtcccagagctatttcccgcaccattgagaatgacccggnnnnnnnnnnnnnnnnnnnnnnnnnnnnnnnnnnnnnnnnnnnnnnnnnnnnnnnnnnnnnnnnnnnnnnnnnnnnnnnnnnnnnnnnnnnnnnnnnncaggtgaagacactcagtgaagcttgcctgatggtaaggaaaccagccctagaacttctgcattacctgaaaaacaccaattttgcttatccggctgtacgatatcttctgnnnnnnnnnnnnnnnnnnnnnnnnnnnnnnnnnnnnnnnnnnnnnnnnnnnnnnnnnnnnnnnnnnnnnnnnnnnnnnnnnnnnnnnnnnnnnnnnnnnnnnnnnnnnnnnnnnnnnnnnnnnnnnnnnnnnnnnnnnnnnnnnnnnnnnnnnnnnnnnnnnnnnnnnnnnnnnnnnnnnnnnnnnnnnnnnnnnnnnnnnnnnnnnnnnnnnnnnnnnnnnnnnnnnnnnnnnnnnnnagtatgtctggaataagagagaaagcactgagaaaggcagtcctctgggagaagtggttgaacaggnagggcatcacgcgggtgaggaatgccacagatgcagttggaattgtgctgaaagagctaaagaggcaaagttctttgggtatttttcacctcctggtggccgtggatggaatcaatgctctttggggaagaaccaccctgaaaagagaagataaaagcccgn

SEQ ID NO: 18647 - DNA, 1072 bp, Macaca Mulatta
gagctgaaaccaaaggcctcttcaaaaagcagagtggactgcatttaaatttgatttccatctaaatgttactaagatataagagaagtctcagttcgcctttgtctcgtacttctgtgttcattttcttgttttttttctttttggctaaagtttccactatcccaatcaaagaattacagtacacatccccagaatccataaatgtgttcctggcccactctgtaatacttcagtagaattaccattaattacatacagattttacctctccacaatagtcaaaaaacaacttggcattactatactttacaggaaagaaaattctgttgttccattgtatgcaggagcatattttgctggtttgaaagattatgatgcatacagttttctagcaattttctattgtattttacagcattgtctatgctgtactacctatccacaatagtcaaaagacaacttggcattactgtactttacaggaaagaaaattctgttgttccattgtatgcaggagcatattttgctggtttgaaagattatgatgcatacagttttctagcaattttctttgtttctttttacagcgttgtctttgctgtactcttgctgatggctgctagattttaatttatttgtttcccctacttgataatattagtgattctgaattcagtttttccttttggtttgcttttgttttttttcctcatgtaacattgggggaaggattcaggaatatgacacaaaggtgggaataaacattaaattttgtgcattcctttgggaaatttttttgggttttttggaacttaccaaagcttttgctatcaaatttaatgcattttcattccaaatacaaggagaccaagggtttgggggggattttccctaaaacataaattggggggattataaaaaaaatgggaaccttcctatattaccgttccctaaactttgacgattagtaagggcccgggtttttggaaaaccctttaagcgccgaaattttaaaacacatctggaaatatacactaaggggtatattttcgcgccttgggataaaaaa

SEQ ID NO: 18648 - DNA, 180 bp, Macaca Mulatta
gctagctctcagcatctaggccctatgcaaatgactcagctcagttcaccctcaaagggctccattctagtggtggggacttgaaaactgatccttagtgcacagtggcatgggttacacggggggagtgacagagtgcggtgggacacggtgaagagactttggaaaaaactaacccct

SEQ ID NO: 18649 - DNA, 851 bp, Macaca Mulatta
cgcacctcctacacctgcagagcaactggcacaaaggctggaactggacctcaggtgagggctggggtgggcaggaacggagggatttggaaatggaggtatgtgggtgtggaacagggatgtgacaatttggggttgtagggctggcagaccccaagatagttctgggccctgtggataaaggtcttccttcttctctacagggtttaacaagtgcccagtgggagctgcctgccaacctttccatttctacttccccacacccactgttctgtgcaatgaaatctggacttactcctacaaggtcagcaactacagccgagggagtggccgctgcatccagatgtggttcgacccagcccagggcaaccccaatgaggaggtggcgaggttctatgctgcagccatgagtggggctgggccctgggcggcctggcctctcctacttagcctggccctaacgctgctctggctgctaagctgacctccttttaccttctgatacctggaaatctctgccctctttagccccatagctcccagctatttggttcctgctccttggttgagcctctgacagccacttcgaataaaccggacaccgcacatgtgtcttgagaattatttgggtatgaatgggaacgtgactgttttgttttccaattcccgttgattgaaaccagtgagactgggccaattcctagctctgacagttgctatgaactaacctgatacttaactattcttctaacttaggagacattcgtagctctcaatttcatttttcactatagctccaatctagagccaagcccaggaattttttgtttgttttgagacagggtctcact

SEQ ID NO: 18650 - DNA, 822 bp, Macaca Mulatta
gggctttccgcgctacctacagaagggtccatacggcgttgttctggattcccgtcgtaacttaaagggaaactttcacaatgtccggagcccttgatgtcctgcaaatgaaggaggaggatgtccttaagttccttgcagcaggaacccacttaggtggcaccaatcttgacttccagatggaacagtacatctataaaaggaaaagtgatggcatctacatcataaatctgaagaggacctgggagaagcttctgctggcggctcgtgccattgttgccattgaaaaccctgctgatgtcagtgttatatcctccaggaatactggccagagggccgtgctgaagtttgctgctgccactggagccactccaattgctggccgcttcactcctggaaccttcactaaccagatccaggcagccttccgggagccacggcttcttgtggttactgacccccgggctgaccaccaacctctcagggaggcatcttatgttaacctacctacccttgctctgtgtaacacagattctccccctgcgctatgtggacattgccatcccatggccacaacaagggagctcacttcaccggggtttgaagcgggcgggagcctggcctcgggaaaattctgcgcacgccgtgggcaccattttgcccgggaaacacccggggggaggcgcaggcttggaatccctactctctaccggggattcccctaacgaaaatgaaaggaggaaccattgcggccgtccggctttaaccaaggcctgttcccccacgaaacgccatttttctcgaggtacccgtacgtttcct

SEQ ID NO: 18651 - DNA, 496 bp, Macaca Mulatta
tataagctggtggaacttgaacccaagagcaacacttatatcctcatcaacaccctggagccggtggaggaggatgccgaggtgaggggtgaccaaggcacgcccactacgggcctcctgatgatcgtcctggggctcatctttatgaagggcaacaccgtcaaggagactgaagtctgggactttctgcggcgcttaggggtctaccccaccaagaagcatttcattttcggagatccaaagaaactcattaccgaggactttgtgcgacaacgttacctggaataccggcggataccccacaccgaccccgtggactacgagttccagtggggcccgcgaaccaccctggaaaccagcaagatgaaagttcttaaaaagtggccaaagtccataatcaagaccccaaggactggccagcgcagtactgtgaggcgttggcagatgaggagaacagggccagacctcagcccagtggctcagccccatcctcttg

SEQ ID NO: 18652 - DNA, 879 bp, Macaca Mulatta
  misc_feature (1)...(879): n = A,T,C or G
aggtgcctattcactttccatccgcgattgggatgatatgaaaggagaccacgtcaaacattataaaattcgcaaacttgacaacggtggatactacattaccacccgggcccagtttgaaacccttcagcagcttgtacaacattactcaggtnnnnnnnnnnnnnnnnnnnnnnnnnnnnnnnnnnnnnnnnnnnnnnnnnnnnnnnnnnnnnnnnnnnnnnnnnnnnnnnnnnnnnnnnnnnnnnnnnnnnnnnnnnnnnnnnnnnnnnnnnnnnnnnnnnnnnnnnnnnnnnnnnnnnnnnnnnnnnnnnnnnnnnnnnnnnnnnnnnnnnnnnnnnnnnnnnnnnnnnnnnnnnnnnnnnnnnnnnnnnnnnnnnnnnnnnnnnnnnnnnnnnnnnnnnnnnnnnnnnnnnnnnnnnnnnnnnnnnnnnnnnnnnnnnnnnnnnnnnnnnnnnnnnnnnnnnnnnnnnnnnnnnnnnnnnnnnnnnnnnnnnnnnnnnnnnnnnnnnnnnnnnnnnnnnnnnnnnnnnnnnnnnnnnnnnnnnnnnnnnnnnnnnnnnnnnnnnnnnnnnnnnnnnnnnnnnnnnnnnnnnnnnnnnnnnnnnnnnnnnnnnnnnnnnnnnnnnnnnnnnnnnnnnnnnnnnnnnnnnnnnnnnnnnnnnnnnnnnnnnnnnnnnnnnnnnnnnnncaggcatgaacaaccgggaggtgctggagcaggtggagcgaggctacaggatgccctgcccgcaggactgccccatctctctgcacgagctcatgatccactgctggaagaaggaccctgaagaacgccctacttttgagtacttgcagagcttcctggaagactactttaccgccacagagccccag

SEQ ID NO: 18653 - DNA, 772 bp, Macaca Mulatta
ggggacccggtggccgccgccatgcatccccccagccttctgctgctgtgaggccattgtggacacaggcacctccctcatggtgggccctgtggatgaggtgcgtgagctgcagaaagctatcggggccgtgccgctgattcagggcgagtacatgataccctgtgagaaggtgtccaccctgcccacgatcacactgaagctgggaggcaaaggctacaagctgtccccagaggactacacgctcaaggtgtcgcaggccgggaagaccctctgcctgagcggcttcatgggcatggacatcccgccacccagcgggccactctggatcctgggcgacgtcttcatcggccgctactacactgtgtttgaccgcgacaacaacagggtgggcttcgccgaggctgcccgcctctagttcccaagccgtcggcgtgccagcacagaaacagaggacagtcccggaggaggaggcccccggccccccggcgcctcccacacgtagtcacacacactcacacacttgcctgcccactgccctgggcgccctggaagccggcggcccaagccagacctgctgttttgttctgtggttttcccctccctgggttcaaaaaacgcacctacctgtccgcctgtctcttcacctgtccatctgtccgcctgtccgttccgtctgtctgtttggtggggggtagaactgatcctggaacacaaaatctgtttccttacactttggaagaacccccgcccccagctttgggcattgtgc

SEQ ID NO: 18654 - DNA, 554 bp, Macaca Mulatta
aggttacaggtaatttgaaatacaacagtttgtctttctgttacattatcagacttagagagccagtgtcattttatacaaagttaccattttcttcaaagtgtgacagtaccttgtgactttggttcttctgttctgaatcgtcatgtttacccatttacatgagtgtcttcctgatccaagaagaaataataaagtgactcaaccatcagaaaacgctcttgctaccactcatgttcttcatttctttattcagaaatgcttgactatatcatcaaccagttttctgctaattatctagctctttgtcatgaagcctttatatatgaaaaagttattacttctatttggatcaataatgcaagtttatgatatgatgcttcctccccacttgcaagcacatcagttaacaccttctagaatctattaatgtatgtgaagttattatatatggtagagctagaatgcccttctctctggtggaattttacttgttcaaggaatattctttatatctttctcttcatggactaaacacaattcagttccttgtg

SEQ ID NO: 18655 - DNA, 129 bp, Macaca Mulatta
  misc_feature (1)...(129): n = A,T,C or G
nccgcagtaagacctatggcaacgtgctggtgttggacggtgtcatccagtgcacggagagggacgagttctcctaccaggagatgatcgccaacctgcctctctgcagccaccccaacccgcgaaagg

SEQ ID NO: 18656 - DNA, 715 bp, Macaca Mulatta
tttggcagcaccagctccttctatttctgcagccaaggcatcaagatcaatgtcatccttggcactgtcttcgttcttgtttttctgtttcttccccattgcttgtcaacggcgctcgtggccccagctcctctatccgttctctcacagacccactgtctcccagctgactttggtctccgctcagctcctttccccccggactgccgccgctcgcacccgaggaaacacagcagaaaatccaacctagaaagctgctccacatctccctgcttctcatccagtcgtggctggagcccgtgcagttactcgaggagtgtgtttaccaacaacctggtgtatggcacctcgaacttcaacgtctatctctacctaaagaacctagaggaaggcatccaaacgctgatgtggaggctggaagacggcagcccccggactgggcagatcttcaagcagacctacagcaagtttgacacaaactcgcacaacgatgacacactgctcaagaactacaggctgctctactgcttcaggaaggacatgaacaaggtcgagacattcctgcgcaccgtgcggtgccgcgctgtggagggcagctgtggcttctagatgcctgggtggcatcccttgtgacccctcccaattgccactcctggccatggaaggtgccactccagtgtccaacagccttgtcctaataaaattaagttgcatc

SEQ ID NO: 18657 - DNA, 1533 bp, Macaca Mulatta
  misc_feature (1)...(1533): n = A,T,C or G
ggggagtgcgttacttacctcgactcttagcttgtcggggacggtaaccgggacccggtgtctgctccttccgccttcgcctcctaatccctaaccactatgcgtgagtgcatctccatccacgttggccaggctggtgtccagattggcaatgcctgctgggagctctactgcctggaacacggcatccagcccgatggtcagatgccaagtgacaagaccattgggggaggagatgattccttcaacaccttcttcagtgagacgggcgctggcaagcatgtgccccgggccgtgtttgtagacttggaacccacggtcattgatgaagttcgcactggcacctaccgccagctcttccaccctgagcagctcatcacaggcaaggaagatgctgccaataactatgcccgagggcactacaccattggcaaggagatcattgaccttgtgttggaccgaattcgcaagctggctgaccagtgtaccggtcttcagggcttcttggttttccacagctttggtgggggaactggttctgggttcacctccctgctcatggaacgtctctcagttgattatggcaagaagtccaagctggagttctccatttacccagcgccccaggtttccacagctgtagttgagcccttacaactccatcctcaccacccaaaccaaccctgggagcactctggattgtgcccttcatgggtaaaacaatgaaggccatctatgaacatctgtcgtagaaacctcgatattgagcgcccaacctatactaaccttaaccggttaattggtcagattgtgtcctccatcactgcttccctgagatttgatggagccctgaatgttgacctgacagaattccagaccaacctggtgccctacccccgcatccacttccctctggccacatacgcccctgtcatctctgctgagaaagcctaccatgaacagctttctgtagcagagatcaccaatgcttgctttgagccagccaaccagatggtgaaatgtgaccctcgccatggtaaatacatggcttgctgcctgttgtaccgtggtaatgtggttccaaagatgtcaatgctgccattgccaccatcaagaccaagcacagatccggtttatggattggtgcccactggcttcaaggattagaataactccggctccactgtggtgcctggtggagacctggccaaggttcagagagctgtgtgcatgctgagcaacaccacagccattgctgaggcctgggctcgcctggaccacaagtttgacctgatgtatgccaagcgtgcctttgttcactggtatgtgggtgaggggatggaggaaggcgagttttcagaggcccgtgaagacatggctgcccttgagaaggattatgaggaggttggtgtggattctgttgaaggagagggtgaggaagaaggagaggaatactaaagttaaaatgtcacaaaggtgctgcttttacagggaagcttattctgttttaaacnttgaaaaanttgtggtctg

SEQ ID NO: 18658 - DNA, 2007 bp, Macaca Mulatta
  misc_feature (1)...(2007): n = A,T,C or G
gccacgaacccactattatgccgtggctgtggtgaagaagggcggccgctttcagctgaacgaactgcaaggtctgaagtcctgccacacaggccttaacaggaccgctgggtggattgtccctatagggatgcttcgtccattcttgaactggacgggtccacctgaggccattgaggcagnnnnnnnnnnnnnnnnnnnnnnnnnnnnnnnnnnnnnnnnnnnnnnnnnnnnnnnnnnnnnnnnnnnnnnnnnnnnnnnnnnnnnnnnnnnnnnnnnnnnnnnnnnnnnnnnnnnnnnnnnnnnnnnnnnnnnnnnnnnnnnnnnnnnnnnnnnnnnnnnnnnnnnnnnnnnnnnnnnnnnnnnnnnnnnnnnnnnnnnnnnnaggacctgtcagacccggctgaaagggacaattatgagctgctctgcccagacaatactcggaagccagtggacaagttcaaggagtgccacctggcgcgggtcccttctcatgccgttgtggcacgaagtgtgaacggcaaggaggacgccatctgggagcttctccgccaggcacaggnnnnnnnnnnnnnnnnnnnnnnnnnnnnnnnnnnnnnnnnnnnnnnnnnnnnnnnnnnnnnnnnnnnnnnnnnnnnnnnnnnnnnnnnnnnnnnnnnnnnnnnnnnnnnnnnnnnnnnnnnnnnnnnnnnnnnnnnnnnnnnnnnnnnnnnnnnnnnnnnnnnnnnnnnnnnnngtgaggaggaggtggctgcccggcgtgcgcgagtcgagtggtgtgcagtgggccagcaggagctggaaaagtgtgaccagtggagtgccctgagcgaaggcnnnnnnnnnnnnnnnnnnnnnnnnnnnnnnnnnnnnnnnnnnnnnnnnnnnnnnnnnnnnnnnnnnnnnnnnnnnnnnnnnnnnnnnnnnnnnnnnnnnnnnnnnnnnnnnnnnnnnnnnnnnnnnnnnnnnnnnnnnnnnnnnnnnnnnnnnnnnnnnnnnnnnnnnnnnnnnnnnnnnnnnnnnnnnnnnnnnnggatatcttgccgtggcggtggttaggaattcagacgctggccttacgtggaactctctgaaaggcaagaagtcctgccacaccgctgtggacaggactgcaggctggaacatccccataggcctgctcttcaaccagacgggctcctgcaaatttgatgaatacttcagtcaaagctgtgcccctggggctgacccgagatctaatctctgtgctctgtgtattggcaatgagcagggtgaggataagtgcgtgcccaacaacaatgagagatactacggctacactggggctttccggtgnnnnnnnnnnnnnnnnnnnnnnnnnnnnnnnnnnnnnnnnnnnnnnnnnnnnnnnnnnnnnnnnnnnnnnnnnnnnnnnnnnnnnnnnnnnnnnnnnnnnnnnnnnnnnnnnnnnnnnnnnnnnnnnnnnnnnnnnnnnnnnnnnnnnnnnnnnnnnnnnnnnnnnnnnnnnnnnnnnnnnnnnnnnnnnnnnnnnnnnnnnnnnnnnnnnnnnnnnnnnnnnnnnnnnnnnnnnnnnnnnnnnnnnnnnnnnnnnnnnnnnnnnnnnnnnnnnnnnnnnnnnnnnnnnnnnnnnnnnnnnnnnnnnnnnnnnnnnnnnnnnnnnnnnnnnnnnnnnnnnnnnnnnnnnnnnnnnnnnnnnnnnnnnnnnnnnnnnnnnnnnnnnnnnnnnnnnnnnnnnnnnnnnnnnnnnnnnnnnnnnnnnnnnnnnnnnnnnnnnnccctcctggaagcctgtgcattcctccagaagtaaaacccaagaagatggcccagcctccccaaggaagcctcagccattcactgcctccagcccttctccccgggtgtgctggggccttggcctccctggctgaaggtggggattgcccatccatctgctcacaattccctgctgtcgtcttagcaagaaataaaatgagaaatattgttgatattctctccttataa

SEQ ID NO: 18659 - DNA, 575 bp, Macaca Mulatta
  misc_feature (1)...(575): n = A,T,C or G
ggcgccatgtcagaacaggctggcagtgtccgtccgaacccatgcggcagcaaggcctgccgccgcctcttcggcccagtggacagcgagcagctgagccgcgactgtgatgcgctaatggcgggctgtatccaggaggcccgtgagcgatggaacttcgactttgtcaccgagacaccactggnnnnnnnnnnnnnnnnnnnnnnnnnnnnnnnnnnnnnnnnnnnnnnnnnnnnnnnnnnnnnnnnnnnnnnnnnnnnnnnnnnnnnnnnnnnnnnnnnnnnnnnnnnnnnnnnnnnnnnnnnnnnnnnnnnnnnnnnnnnnnnnnnnnnnnnnnnnnnnnnnnnnnnnnnnnnnnnnnnnnnnnnnnnnnnnnnnnnnnnnnnnnnnnnnnnnnnnnnnnnnnnnnnnnnnnnnnnnnnnnnnnnnnnnnnnnnnnnnnnnnnnncagatttctaccactccaaacgccggctgatcttctccaagaggaagccctaatcagcccacaggaggcctgcagtcctggaagcgcgaggacctcaaaggccctgtctacatcttctgccttagtc

SEQ ID NO: 18660 - DNA, 617 bp, Macaca Mulatta
  misc_feature (1)...(617): n = A,T,C or G
tgctcctgnttcactaccgaataacagactacaagagaaaaagcaaagagccaagagtttgagggagaaatagtcagtgaagaaactatccgtaaaggcccgattccaccaaatgtgctttgagaaggataggccttcattaacaaaatgtatgtctggttccccactaaagctctactgcctcaacccaaggtgatttttatgtctggggcagaaacactcaagttgattagaaagaccagcccaatgtcggggtacctggggccaaacacaactgctagtgtgaattaaaatacnnnnnnnnnnnnnnnnnnggaggcggaacagtaacattcatagtctttggagaaatgcttagaaatgcagcatttgacccttcctgtgaattaagcccaattaattcctgtttgtccacatatgatctgtctgtggcaaaagttaaatcagaggaaattctttcccagtctgtcaatttatgcctcagccacttgcctatactacaattcgttgtattacctgtagattcaagtaatacaaactaatttagtaatagcctgggttaagtattattaggaccctgtgtctgctgtagaaaaaaaaattcgcataatgcactt

SEQ ID NO: 18661 - DNA, 1126 bp, Macaca Mulatta
  misc_feature (1)...(1126): n = A,T,C or G
gcggcgtccgtggtctgccgggctgctacctccggggcacaagtgctattgcgcgcccgccgctcgngccgaccctgctgcggacgccagccttgcggagtacggcaaccttcgctcaggcgctccagttcgtgccggagacgcaggttagcctgctggacaacggcctgcgtgtggcctccgagcagtcctctcagcccacttgcacggtgnnnnnnnnnnnnnnnnnnnnnnnnnnnnnnnnnnnnnnnnnnnnnnnnnnnnnnnnnnnnnnnnnnnnnnnnnnnnnnnnnnnnnnnnnnnnnnnnnnnnnnnnnnnnnnnnnnnnnnnnnnnnnnnnnnnnnnnnnnnnnnnnnnnnnnnnnnnnnnnnnnnnnnnnnnnnnnnnnnnnnnnnnnnnnnnnnnnnnnnnnnnnnnnnnnnnnnnnnnnnnnnnnnnnnnnnnnnnnnnnnnnnnnnnnnnnnnnnnnnnnnnnnnnnnnnnnnnnnnnnnnnnnnnnnnnnnnnnnnnnnnnnnnnnnnnnnnnnnnnnnnnnnnnnnnnnnnnnnnnnnnnnnnnnnnnnnnnnnnnnnnnnnnnnnnnnnnnnnnnnnnnnnnnnnnnnnnnnnnnnnnnnnnnnnnnnnnnnnnnnnnnnnnnnnnnnnnnnnnnnnnnnnnnnnnnnnnnnnnnnnnnnnnnnnnnnnnnnnnnnnnnnnnnnnnnggagtggagcaccagcaactgttagaccttgcccagaagcaccttggtgacatccnnnnnnnnnnnnnnnnnnnnnnnnnnnnnnnnnnnnnnnnnnnnnnnnnnnnnnnnnnnnnnnnnnnnnnnnnnnnnnnnnnnnnnnnnnnnnnnnnnnnnnnnnnnnnnnnnnnnnnnnnnnnnnnnnnnnnnnnnnnnnnnnnnnnnnnnnnnnnnnnnnnnnnnnnnnnnnnnnnnnnnnnnnnnnnnnnnnnnnnnnnnnnnnnnnnnnnnnagcccactggcttcaggtgccgtggccaacaagctatgccagagtttccagaccttcagcatctgctatgcagacacgggtttgctgggtgcacactttgtctgtgaccgaatgaaaatcgatgacatgatgttcgtcctgcaagggcagtg

SEQ ID NO: 18662 - DNA, 636 bp, Macaca Mulatta
ggggaatttcaacaaaatataaaatggactgtgatagtgataggtttgttgaagggactgttaggtgattatttctgcctgacatgtatctatattcaaattatcgatgttgttttgttcattaaaacattcagagtatacaccagtaaacttggaatttttttttttaggctgctgaaaaactaggtgaaactgagaaacttagtataatgattgaagaatgtggcggcttagacaaaattgaagctctacaaaaccatgaaaatgagtctgtgtataaggcttcgttaagcttaattgagaagtatttctctgtagaggaagaggaagatcaaaacgttgtgcccggaaactacctctgaaagctacaccttcaagttcaggatggggctcctgggacctttaccttttaaatacgtagctgagggtaacatttgttgtggaaccaggtttgggattttggcctaattgtttcccaccaaaaactcttttaaatggggtttgtttttggtacccttttttccctgaaactttcttgaaaatttccatcgtaaaaaagtttaaaacttggcccccaaagggttttattttttggggaattctatctttgccctcccgaaaataaattaaaccccc

SEQ ID NO: 18663 - DNA, 556 bp, Macaca Mulatta
agagaggtctgaagaatgtgtttgatgaggctatcctagctgccctcgagcctccggaaactcaacccaaaaggaagtgctgtatattctaaactgttttctccttcccttctttgctgctgcttcctgtcccactactgtagaaagatcgtttaaaaacaaaggaataaaaccatcctgtttgaaagcctctgcgtctttttactcaccaccttagagcaacctctgtattagtttttgatcaagaatgcaatatcttatagaaattttttgtgatcagtagtcaagttggacttgttttaactttctgctgcttgagttgcctgatgctcagagctttttggtttggattaccattgcaaaagggaacttggtctggcattacgagtgtcctcttggagaaaataacaagagttttaacacttctagatcttagttctagatggagaaagtaacacaaacatcattttactcttatgatcaattgttaattgtaattgcatgacaaaccttatggaaaaggggtgaccttctagtagagtgtaacggggaaggg

SEQ ID NO: 18664 - DNA, 115 bp, Macaca Mulatta
agtgaacctctgatacatttcctgtagcaagagaaggcagccaacatgaaggaaaatgtgatatctgcaactgttttcactctgctactttttctcaacacctgccttctgaatg

SEQ ID NO: 18665 - DNA, 1941 bp, Macaca Mulatta
  misc_feature (1)...(1941): n = A,T,C or G
gggtctggccgccatccatctcacagcaccactcctgctggccctggagatgaggtggctcggggcattgctggagaaaagtttgacatcgtcaagaaatggggcatcaacacctataagnagtgcacaaagcaactgttatcagaacgatttggtcgaggctcacggactgtgnnnnnnnnnnnnnnnnnnnnnnnnnnnnnnnnnnnnnnnnnnnnnnnnnnnnnnnnnnnnnnnnnnnnnnnnnnnnnnnnnnnnnnnnnnnnnnnnnnnnnnnnnnnnnnnnnnnnnnnnnnnnnnnnnnnnnnnnnnnnnnnnnnnnnnnnnnnnnnnnnnnnnnnnnnnnnnnnnnnnnnnnnnnnnnnnnnnnnnnnnnnnnnnnnnnnnnnnnnnnnnnnnnnnnnnnnnnnnnnnnnnnnnnnnnnnnnnnnnnnnnnnnnnnnnnnnnnnnnnnnnnnnnnnnnnnnnnnnnnnnnnnnnnnnnnnnnnnnnnnnnnnnnnnnnnnnnnnnnnnnnnnnnnnnnnnnnnnnnnnnnnnnnnnnnnnnnnnnnnnnnnnnnnnnnnnnnnnnnnnnnnnnnnnnnnnnnnnnnnnnnnnnnnnnnnnnnnnnnnnnnnnnnnnnnnnnnnnnnnnnnnnnnnnnnnnnnnnnnnnnnnnnnnnnnnnnnnnnnnnnnagatcaaggtgatgcacaagcagctgctgctcttccacaatgccgtgtcaaaatactttgctgggaaccagaaacagctggagcagaccctgcagcagttcaacatcaagcttcggcctccaggagctgagaaaccctcctggctagaggagcagtgagctgctcccagcccaccttggctatcaagaaggacattgggaagggcagccccagggtgtaggagattggacatgggacatcccttgtcacttgaaatctggcttgggctcctttttctggctggggcctgacnnnnnnnnnnnnnnnnnnnnnnnnnnnnnnnnnnnnnnnnnnnnnnnnnnnnnnnnnnnnnnnnnnnnnnnnnnnnnnnnnnnnnnnnnnnnnnnnnnnnnnnnnnnnnnnnnnnnnnnnnnnnnnnnnnnnnnnnnnnnnnnnnnnnnnnnnnnnnnnnnnnnnnnnnnnnnnnnnnnnnnnnnnnnnnnnnnnnnnnnnnnnnnnnnnnnnnnnnnnnnnnnnnnnnnnnnnnnnnnnnnnnnnnnnnnnnatgttgcgtctaataccctttgtctctcctctatgcgtggccattgcagagaaggggactgggaccaaaggggtggggataatggggagccccattgctggccttgcatctgaataggcctaccctcacccacccacccagtttaattgtgcttagagcccaagaagattgggatctagcactaggaataaacctttcataaaagcaggcccagcgaggtcaatttgtgggggactccaggagggtggcctgggtggaaacatgctcagtctaatcatacaccagaaccctatcaagagctggggccaggcagctgaagtcacaggtttcagagatggtttgaaggcccagtcgtctctcccagccccagttggagccaaagttttatttgtcctttagccagcaccaagatagctatggatcttaagagcacaaaatccagagggggttgggtttgctgaccataatgcattgattcatacagcaaatatttaccgagtgctttcatttgccaggcactgcgttagaccctggggagacatcagtgaataaaacacggtccctgcccaagtgcctagggcctattgggggaaagagacaagtaaccaggcaactacaaaacagtgataagcattaggatacagaagtacaggaagatatgggagcaccaaggaggagcatctggcatagactggggtggaaatgaggatgtcagtttgaa

SEQ ID NO: 18666 - DNA, 300 bp, Macaca Mulatta
tctgtgatggacatttatttagtaaatcccttcagtatttatcccttctcttcccacagcaactttctttcctgtcaactagaaaggagcaggatgtaataaatacatgttggtgtgactaggccacaccaactcttaatcatctcccattttccttaaacatttaaattcccaggcaggtaccctctgtgtactcagaaatttgaagaagttatttggtttcccaaaatgcacactgctggttattgatttgttctttacaactattgttctcatatttctcacactaaataaatctct

SEQ ID NO: 18667 - DNA, 2826 bp, Macaca Mulatta
  misc_feature (1)...(2826): n = A,T,C or G
aggtacttttaaattcaatacagatgctgctgaattcattcctcaggagaaaaaaaactctggtcctaattgtgcgactcaaaggagattagactctaataggattggtagaagaaattacagttcaccacctccctgtcacctttccaggcaggtcccttatgatgaaatctctgctgttcatcagcatagttatcatccttcaggaagcaaacctaagagtcaactgacgtctttccagtcctctccttataataaatcgcccaagagccatggccttcagagtcaaccttggcagaaattgaggaatgagaagcaccatatcagagtcaagaaagcacagagtcttgctgagcagacctcagatacagctggattagagagctcgaccagatcagagagtgggacagacctcagagagcatagcccttctgagagtgagaaggaagttgtgggtgcagatcccaggggagcaaaacccaaaaaagcaacacaatttgtatacagctatggtagaggaccaaaagtcaaggggaaactcaaatgtgaatggagtaaccgagcaactccaaaacccgaggatnnnnnnnnnnnnnnnnnnnnnnnnnnnnnnnnnnnnnnnnnnnnnnnnnnnnnnnnnnnnnnnnnnnnnnnnnnnnnnnnnnnnnnnnnnnnnnnnnnnnnnnnnnnnnnnnnnnnnnnnnnnnnnnnnnnnnnnnnnnnnnnnnnnnnnnnnnnnnnnnnnnnnnnnnnnnnnnnnnnnnnnnnnnnnnnnnnnnnnnnnnnnnnnnnnnnnnnnnnnnnnnnnnnnnnnnnnnnnnnnnnnnnnnnnnnnnnnnnnnnnnnnnnnnnnnnnnnnnnnnnnnnnnnnnnnnnnnnnnnnnnnnnnnnnnnnnnnnnnnnnnnnnnnnnnnnnnnnnnnnnnnnnnnnnnnnnnnnnnnnnnnnnnnnnnnnnnnnnnnnnnnnnnnnnnnnnnnnnnnnnnnnnnnnnnnnnnnnnnnnnnacaggttctctgattgaacaactaactacagaaaaatatgagtgcatggtgtgctgtgaattggttcgcgtcacggctccagtgtggagatgtcaaagcnnnnnnnnnnnnnnnnnnnnnnnnnnnnnnnnnnnnnnnnnnnnnnnnnnnnnnnnnnnnnnnnnnnnnnnnnnnnnnnnnnnnnnnnnnnnnnnnnnnnnnnnnnnnnnnnnnnnnnnnnnnnnnnnnnnnnnnnnnnnnnnnnnnnnnnnnnnnnnnnnnnnnnnnnnnnnnnnnnnnnnnnnnnnnnnnnnnnnnnnnnnnnnnnnnnnnnnnnnnnnnnnnnnnnnnnnnnnnnnnnnnnnnnnnnnnnnnnnnnnnnnnnnnnnnnnnnnnnnnnnnnnnnnnnnnnnnnnnnnnnnnnnnnnnnnnnnnnnnnnnnnnnnnnnnnnnnnnnnnnnnnnnnnnnnnnnnnnnnnnnnnnnnnnnnnnnnnnnnnnnnnnnnnnnnnnnnnnnnnnnnnnnnnnnnnnnnnnnnnnnnnnnnnnnnnnnnnnnnnnnnnnnnnnnnnnnnnnnnnnnnnnnnnnnnnnnnnnnnnnnnnnnnnnnnnnnnnnnnnnnnnnnnnnnnnnnnnnnnnnnnnnnnnnnnnnnnnnnnnnnnnnnnnnnnnnnnnnnnnnnnnnnnnnnnnnnnnnnnnnnnnnnnnnnnnnnnnnnnnnnnnnnnnnnnnnnnnnnnnnnnnnnnnnnnnnnnnnnnnnnnnnnnnnnnnnnnnnnnnnnnnnnnnnnnnnnnnnnnnnnnnnnnnnnnnnnnnnnnnnnnnnnnnnnnnnnnnnnnnnnnnnnnnnnnnnnnnnnnnnnnnnnnnnnnnnnnnnnnnnnnnnnnnnnnnnnnnnnnnnnnnnnnnnnnnnnnnnnnnnnnnnnnnnnnnnnnnnnnnnnnnnnnnnnnnnnnnnnnnnnnnnnnnnnnnnnnnnnnnnnnnnnnnnnnnnnnnnnnnnnnnnnnnnnnnnnnnnnnnnnnnnnnnnnnnnnnnnnnnnnnnnnagatgctacatttatgtgtgacaagcnggtgtaacaagaaacggtggtgtggacggcataaatgtaatgagatatgctgtgtgnnnnnnnnnnnnnnnnnnnnnnnnnnnnnnnnnnnnnnnnnnnnnnnnnnnnnnnnnnnnnnnnnnnnnnnnnnnnnnnnnnnnnnnnnnnnnnnnnnnnnnnnnnnnnnnnnnnnnnnnnnnnnnnnnnnnnnnnnnnnnnnnnnnnnnnnnnnnnnnnnnnnnnnnnnnnnnnnnnnnnnnnnnnnnnnnnnnnnnnnnnnnnnnnnnnnnnnnnnnnnnnnnagtatatcattcttgtcatagtgaggagaagtgtcccccttgcactttcctaactcagaagtggtgcatgggcaagcatgagnnnnnnnnnnnnnnnnnnnnnnnnnnnnnnnnnnnnnnnnnnnnnnnnnnnnnnnnnnnnnnnnnnnnnnnnnnnnnnnnnnnnnnnnnnnnnnnnnnnnnnnnnnnnnnnnnnnnnnnnnnnnnnnnnnnnnnnnnnnnnnnnnnnnnnnnnnnnnnnnnnnnnnnnnnnnnnnnnnnnnnnnnnnnnnnnnnnnnnnnnnnnnnnnnnnnnnnnnnnnnnnnnnnnnnnnnnnnnnnnnnnnnnnnnnnnnnnnnnnnnnnnnnnnnnnnnnnnnnnnnnnnnnnnnnnnnnnnnnnnnnngaatagctgcaatttccatggcctctaagataacagacatgcaacttggaggttcagtggagatcagcaagttaattaccaaaaaggaagttcatcaagccagg

SEQ ID NO: 18668 - DNA, 985 bp, Macaca Mulatta
ggggttgttggtctttggtactgtggcggtgtgggtgagtttggcgccggtggagtcgtgttggtcctcagaatccccgcgtagccgctgcctcctcctgccctcgccatgtttctcacccggtctgagtacgacaggggcgtgaatactttttctcccgaaggaagattatttcaagtggagtatgccattgaggctatcaagcttggttctacagccattgggatccagacatcagagggtgtgtgcctagctgtggagaagagaattacttccccactgatggagcccagcagcattgagaaaattgtagagattgatgctcacataggttgtgccatgagtgggctaattgctgatgctaagactttaattgataaagccagagtggagacacagaaccactggttcacctacaatgagacaatgacagtggagagtgtgacccaagctgtgtccaatctggctctccagtttggagaagaagatgcagatccaggtgccatgtctcgtccctttggagtagcattgttatttggaggagttgatgagaaaggacctcagctgtttcatatggatccatctgggacctttgtacagtgtgatgctcgtgccattggctctgcttcagagggtgcccaaagctccttgcaagaagtttaccacaagtctatgactttgaaagaaagcaatcaagtcttcactcatcatcctcaaacaagtaatggaggagaaactgaatgcaacaaacattgagctagccacagtgcagcctggccagaatttccacatgttcacaaaggaagaacttgaagaggttatcaaggacatttaaggaagcctgattctcagaacttctctgggacaatttcagttcttaataatgtccgtaaattttatttccaactcctgatccttggaaaatctccattgtatgtgcatttttttaatgatgtctgtacataaaggcagttctgaaataaag

SEQ ID NO: 18669 - DNA, 3315 bp, Macaca Mulatta
  misc_feature (1)...(3315): n = A,T,C or G
gcttcgatggacgaaatggagaaaagggcgaaacaggtgctcctggattaaaggnnnnnnnnnnnnnnnnnnnnnnnnnnnnnnnnnnnnnnnnnnnnnnnnnnnnnnnnnnnnnnnnnnnnnnnnnnnnnnnnnnnnnnnnnnnnnnnnnnnnnnnnnnnnnnnnnnnnnnnnnnnnnnnnnnnnnnnnnnnnnnnnnnnnnnnnnnnnnnnnnnnnnnnnnnnnnnnnnnnnnnnnnnnnnnnnnnnnnnnnnnnnnnnnnnnnnnnnnnnnnnnnnnnnnnnnnnnnnnnnnnnnnnnnnnnnnnnnnnnnnnnnnnnnnnnnnnnnnnnnnnnnnnnnnnnnnnnnnnnnnnnnnnnnnnnnnnnnnnnnnnnnnnnnnnnnnnnnnnnnnnnnnnnnnnnnnnnnnnnnnnnnnnnnnnnnnnnnnnnnnnnnnnnnnnnnnnnnnnnnnnnnnnnnnnnnnnnnnnnnnnnnnnnnnnnnnnnnnnnnnnnnnnnnnnnnnnnnnnnnnnnnnnnnnnnnnnnnnnnnnnnnnnnnnnnnnnnnnnnnnnnnnnnnnnnnnnnnnnnnnnnnnnnnnnnnnnnnnnnnnnnnnnnnnnnnnnnnnnnnnnnnnnnnnnnnnnnnnnnnnnnnnnnnnnnnnnnnnnnnnnnnnnnnnnnnnnnnnnnnnnnnnnnnnnnnnnnnnnnnnnnnnnnnnnnnnnnnnnnnnnnnnnnnnnnnnnnnnnnnnnnnnnnnnnnnnnnnnnnnnnnnnnnnnnnnnnnnnnnnnnnnnnnnnnnnnnnnnnnnnnnnnnnnnnnnnnnnnnnnnnnnnnnnnnnnnnnnnnnnnnnnnnnnnnnnnnnnnnnnnnnnnnnnnnnnnnnnnnnnnnnnnnnnnnnnnnnnnnnnnnnnnnnnnnnnnnnnnnnnnnnnnnnnnnnnnnnnnnnnnnnnnnnnnnnnnnnnnnnnnnnnnnnnnnnnnnnnnnnnnnnnnngcttgcctggtacaggtggtcctccaggagaaaatggaaaacctggggaaccagnnnnnnnnnnnnnnnnnnnnnnnnnnnnnnnnnnnnnnnnnnnnnnnnnnnnnnnnnnnnnnnnnnnnnnnnnnnnnnnnnnnnnnnnnnnnnnnnnnnnnnnnnnnnnnnnnnnnnnnnnnnnnnnnnnnnnnnnnnnnnnnnnnnnnnnnnnnnnnnnnnnnnnnnnnnnnnnnnnnnnnnnnnnnnnnnnnnnnnnnnnnnnnnnnnnnnnnnnnnnnnnnnnnnnnnnnnnnnnnnnnnnnnnnnagggtgaaccaggcggtccaggtgctgatggtgtcccagggaaagatggtccaaggnggtcctactggtcctattggtcctcctggcccagctggccagcctggagataaggnnagggtgaaggtggtgctcctggacttccaggtatagctggacctcgtggtggccctnnnnnnnnnnnnnnnnnnnnnnnnnnnnnnnnnnnnnnnnnnnnnnnnnnnnnnnnnnnnnnnnnnnnnnnnnnnnnnnnnnnnnnnnnnnnnnnnnnnnnnnnnnnnnnnnnnnnnnnnnnnnnnnnnnnnnnnnnnnnnnnnnnnnnnnnnnnnnnnnngtcctcctggtcctcaaggtgtcaaaggtgaacgtggcagtcctggtggaccnnnnnnnnnnnnnnnnnnnnnnnnnnnnnnnnnnnnnnnnnnnnnnnnnnnnnnnnnnnnnnnnnnnnnnnnnnnnnnnnnnnnnnnnnnnnnnnnnnnnnnnnnnnnnnnnnnnnnnnnnnnnnnnnnnnnnnnnnnnnnnnnnnnnnnnnnnnnnnnnnnnnnnnnnnnnnnnnnnnnnnnnnnnnnnnnnnnnnnnnnnnnnnnnnnnnnnnnnnnnnnnnnnnnnnnnnnnnnnnnnnnnnnnnnnnnnnnnnnnnnnnnnnnnnnnnnnnnnnnnnnnnnnnnnnnnnnnnnnnnnnnnnnnnnnnnnnnnnnnnnnnnnnnnnnnnnnnnnnnnnnnnnnnnnnnnnnnnnnnnnnnnnnnnnnnnnnnnnnnnnnnnnnnnngtcttcctggtctggctggtgcagctggtgaacctggaagagatnnnnnnnnnnnnnnnnnnnnnnnnnnnnnnnnnnnnnnnnnnnnnnnnnnnnnnnnnnnnnnnnnnnnnnnnnnnnnnnnnnnnnnnnnnnnnnnnnnnnnnnnnnnnnnnnnnnnnnnnnnnnnnnnnnnnnnnnnnnnnnnnnnnnnnnnnnnnnnnnnnnnnnnnnnnnnnnnnnnnnnnnnnnnnnnnnnnnnnnnnnnnnnnnnnnnnnnnnnnnnnnnnnnnnnnnnnnnnnnnnnnnnnnnnnnnnnnnnnnnnnnnnnnnnnnnnnnnnnnnnnnnnnnnnnnnnnnnnnnnnnnnnnnnnnnnnnnnnnnnnnnnnnnnnnnnnnnnnnnnnnnnnnnnnnnnnnnnnnnnnnnnnnnnnnnnnnnnnggacctgttggacccagtggacctcctggcaaagatggaaccagtggacatccaggtcccattggaccaccagggcctcgaggtaacagaggtgaaagaggatctgagnngggctccccaggccacccagggcaaccaggtcctcctggacctcctggtgcccctggtccttgctgcggtggtgttggagccgctgccattgctggggttggaggtgaaaaagctggcggttttgccccatattatggagatgaaccaatggatttcataatcaacaccgatgagattatgacttcactcaagtctgttaacggacaaatagaaaagctcattagtcctgatgggactcgtaaaaaccctgcctagaactggagagacctgaaattctgccatcctgaactcaagagtggnnnnnnnnnnnnnnnnnnnnnnnnnnnnnnnnnnnnnnnnnnnnnnnnnnnnnnnnnnnnnnnnnnnnnnnnnnnnnnnnnnnnnnnnnnnnnnnnnnnnnnnnnnnnnnnnnnnnnnnnnnnnnnnnnnnnnnnnnnnnnnnnnnnnnnnnnnnnnnnnnnnnnnnnnnnnnnnnnnnnntttcagtttagctatggcaatcctgaactgcctgaagatgtccttgacgtgcagctggccttccttcgacttctctccagccgagcttcccagaacatcacgtatcactgcaaaaatagcattgcgtacatggatcaagccagtggaaatgtaaagaaggccctgaagctgatggggtcaaatgaaggtgaattcaaggctgaaggaaatagcaaattcacctacacagttctggaggatggttgcac

SEQ ID NO: 18670 - DNA, 354 bp, Macaca Mulatta
atggagggagaaaattccttggatgattttgaagacaaagtattttaccggactgagtttcagaatcgtgaattcaaagccacaatgtgcaacctactggcctatctaaagcacctcaaaggccaaaacgaggaagccctggaatgcttatgtaaagctgaagagttaatccagcaagagcatgctgaccaagcagaaatcagaagtctagtcacctggggaaactatgcctgggtctactatcacttgggccgactctcagacgctcagatttatgtagacaaggtgaagcacatctgtgagaagttttccagtccctacagaagtgagagtccagagcttgacttgaggaag

SEQ ID NO: 18671 - DNA, 1760 bp, Macaca Mulatta
  misc_feature (1)...(1760): n = A,T,C or G
cagtttcattaggctctgaagccattacaattgttgcttaacttctaactatttgatcactgaggaaaatccagaaagctacacaacactggaggggtaaaataaaagtctagcgatccagtgaaagaaaagagaagtgacagaaacaactttacctgcactgaagagaaaagcacagnnnnnnnnnnnnnnnnnnnnnnnnnnnnnnnnnnnnnnnnnnnnnnnnnnnnnnnnnnnnnnnnnnnnnnnnnnnnnnnnnnnnnnnnnnnnnnnnnnnnnnnnnnnnnnnnnnnnnnnnnnnnnnnnnnnnnnnnnnnnnnnnnnnnnnnnnnnnnnnnnnnnnnnnnnnnnnnnnnnnnnnnnnnnnnnnnnnnnnnnnnnnnnnnnnggcttctctctgggctccacagtggaatctcacaccaaaggaatcaagatgtggtgtgtgcctcaccccaagaagccagaacacaccctagtcctgcttgacactgagggcctgggagatgtaaagaagnnnnnnnnnnnnnnnnnnnnnnnnnnnnnnnnnnnnnnnnnnnnnnnnnnnnnnnnnnnnnnnnnnnnnnnnnnnnnnnnnnnnnnnnnnnnnnnnnnnnnnnnnnnnnnnnnnnnnnnnnnnnnnnnnnnnnnnnnnnnnnnnnnnnnnnnnnnnnnnnnnnnnnnnnnnnnnnnnnnnnnnnnnnnnnnnnnnnnnnnnnnnnnnnnnnnnnnnnnnnnnnnnnnnnnnnnnnnnnnnnnnnnnnnnnnnnnnnnnnnnnnnnnnnnnnnnnnnnnnnnnnnnnnnnnnnnnnnnnnnnnnnnnnnnnnnnnnnnnnnnnnnnnnnnnnnnnnnnnnnnnnnnnnnnnnnnnnnnnnnnnnnnnnnnnnnnnnnnnnnnnnnnnnnnnnnnnnnnnnnnnnnnnnnnnnnnnnnnnnnnnnnnnnnnnnnnnnnnnnnnnnnnnnnnnnnnnnnnnnnnnnnnnnnnnnnnnnnnnnnnnnnnnnnnnnnnnnnnnnnnnnnnnnnnnnnnnnnnnnnnnnnnnnnnnnnnnnnnnnnnnnnnnnnnnnnnnnnnnnnnnnnnnnnnnnnnnnnnnnnnnnnnnnnnnnnnnnnnnnnnnnnnnnnnnnnnnnnnnnnnnnnnnnnnnnnnnnnnnnnnnnnnnnnnnnnnnnnnnnnnnnnnnnnnnnnnnnnnnnnnnnnnnnnnnnnnnnnnnnnnnnnnnnnnnnnnnnnnnnnnnnnnnnnnnnnnnnnnnnnnnnnnnnnnnnnnnnnnnnnnnnnnnnnnnnnnnnnnnnnnnnnnnnnnnnnnnnnnnnnnnnnnnnnnnnnnnnnnnnnnnnnnnnnnnnnnnnnnnnnnnnnnnnnnnnnnnnnnnnnnnnnnnnnnnnnnnnnnnnnnnnnnnnnnnnnnnnnnnnnnnnnnnnnnnnnnnnnnnnnnnnnnnnnnnnnnnnnnnnnnnnnnaggctgaagagattctgcagacatacttgaaatccaaggagtctgtgactgatgcaattctacagacagacaagattctcacaaaaaaggaaaaggagattgaannnnnnnnnnaaaagctgaatctgcacaggcttcagcaaaaatggtggaggaaatgcaaataaagtatcagcagatgatggaagagaaagagaagagttatcaggaacatgtgaaacaattgactgagaagatagagagggagagggcccagttgctggaagagcaagagaggaccctcactagtaaacttcag

SEQ ID NO: 18672 - DNA, 1351 bp, Macaca Mulatta
gggagaggagactcgggggggattttgtgaagagacgaagactgagcggttgtggccgcgctgccgacctcgacctgcagtcggtttcttcacgccgaatccgggagtaggagactcagaatcgaatctcttctccctcccccctcctgtgagatttttttgatcttcagctacattttcagctttgtgagaaaccttatcatcaaacacaatggccagcaacgttaccaacaagacagatcctcgctccatgaactcccgtgtgttcattgggaatctcaacactcttgtggtcaagaaatctgatgtggaggcaatcttttcgaagtatggcaaaattgtgggctgctctgttcataagggctttgccttcgttcaatatgttaatgagagaaatgcccgggctgctgtagcaggagaggatggcagaatgattgctggccaggttttagatattaacctggctgcagagccaaaagtgaaccgaggaaaagcaggtgtgaaacgatctgcagcggagatgtacggctcctcttttgacttggactatgactttcaacgggactattatgataggatgtacagttacccagcacgtgtacctcctcctcctcctattgctcgggctgtagtgccctcgaaacgtcagcgtgtatcaggaaacacctcacgaaggggcaaaagtggcttccaattctaagagtggacagcgggggatcttccaagtctgggaaagtttgaaaggagatgaccttcaggccattaagaaggagttgacccagataaaacaaaaagtggattctctcctggaaaacctggaaaaaattgaaaaggaacagagcaaacaagcagtagagatgaagaacgataagtcagaagaggagcagagcagcagctccgtgaagaaagatgagactaatgtgaagatggagtctgaggggggtgcagatgactctgctgaggagggggacctactggatgatgatgataatgaagatcggggggatgaccagctggagttgatcaaggatgatgaaaaagaggctgaggaaggagaggatgacagagacagcgccaatggcgaggatgactcttaagcacatagtggggtttagaaatcttatcccattatttctttacctaggcgcttgtctaagatcaaatttttcaccagatcctctcccctagtatcttcagcacatgctcactgttctccccatccttgtccttcccatgttcattaattcatattgccccgcgcctagtcccattttcacttcctttgacgctcctagtagttttgttaagtcttaccctgtaatttttgcgtttaattttgatacctctttat

SEQ ID NO: 18673 - DNA, 466 bp, Macaca Mulatta
ttttattgtttaaaaacaaataaatgttttatttctagaaaattgcgctttagccagagctcttctaggtgatcagcatgtgtctggagccagctcttcctccaggacacgagggctgggggccctgagtacgtagtgccagacccagtgtggatgctggggagaatcatcagtgtgggagcagagagcccccgagggtggggtcctgcacagtgggccatgcctccaccagcaagatgtgcacaggtgacagggctgctccagcctagcaggggagctcaggccctcgcgccccagatggtcaggaccaggtcacagcttccctatgagcctgtttgtggcttccatggactgtggtgagggctgggccaggaaaggctcatggcagcctgggaggaagaagtgcatggcagacagaggtggtgctagggacagggccacagggcacttcacaaatggaaggctg

SEQ ID NO: 18674 - DNA, 688 bp, Macaca Mulatta
atgaagtaatgctaaaatgctggcaccctaaagcagaaatgcgcccatccttttctgaactggtgtcccggatatcagcgatcttctctactttcattggggagcactacgtccatgtaaacgctacttatgtgaacgtaaaatgtgtcgctccatatccttctctgttgtcatcagaagataacgctgatgacgaggtggacacatgaccagcctccttctgggagacatcatagcgctagtaatatgtcaaagcaacagtccacactttgtccaatggttttttcactgcctgacctttaaaaggccatcgatattctttgctcttgccaaaattgcactattataggacttgcattgttatttaaattactggattctaaggaatttcttatctgacagagcatcagaaccagaggcttggtcccacaggccaccgaccaacggcccgcagccgtgacaacactcctgtcatattggagtcccaaaacttgaattctgggttgaattctttaaaaatcaggtgccacttgacttcatacaggaatctgaagcagtgaattttgagggcttctcgatcacagaaaactcagaagagatagcaatgttcagaacaggcgtggcagccccagaacaggccactcatttagaattctactgtttcaaaaaacttttgtgtgttgtatgg

SEQ ID NO: 18675 - DNA, 879 bp, Macaca Mulatta
  misc_feature (1)...(879): n = A,T,C or G
taaggagagaagtttgtcatgcaggaggagttctcgcgtggtgggaaggctctggagaggtttctgcaggattactttgatggcaatctgaagagatacctgaagtctgaacctatcccagagagcaatgatgggcctgtaaaggtagtggtagcagagaattttgatgaaatagtgaataatgaaaataaagatgtactgattgaattttatgctccttggtgtggtcactgtaagaatctggagcccaagtataaagaacttggagagaagctcagcaaagacccaaatatcgtcatagccaagatggatgccacagccaatgatgtgccttctccatatgaagtcagaggttttcctaccatatacttctctccagccaacaagaagctaaatccaaagaaatatgaaggtggccgtgaattaagtgattttattagctatctacaacgagaagctacaaacccccctgtaattcaagaagaaaaacccaagaagaagaagaaggcacaggagggatctctaaagcagtagccaaacgccactttgtaaaaggactcttccaccagagatggggaaaaccattaagggaggactggggacccatatggggaattattaccctctccgggcttaaaaggacagaaatgcgatataatccggaaatcctggttaaattttctcctaaactggtttccttagctgccctggtttttggaaattaccagaaccagttttatggtttgggggnnnnnnnnnnnnnnnnnnnnncttgttgggggggaaataggttttgggggggtgggggagccggcccagctccggttatccggatcccggcgaaatgcccttcgggccatacgacccctccctcgccga

SEQ ID NO: 18676 - DNA, 2517 bp, Macaca Mulatta
  misc_feature (1)...(2517): n = A,T,C or G
cagctcttgggaccagaactgagtacaaggagttgacttcacgggagacatttggtaaggaagantccccagggatctgagccagtagaagcctgtgaccacatcaggaaggcagaggggagcctggaaaagctggagcagagaggccccagggcagtcacactgaccaacggggagagcagcagggggtctgggggaagcctcaggttggtgtcacgacctgttcccgatcagagccctcacaaatgtgatatatgcgagcaaagttttgaacagagatcttatctcaacaaccataagcgcatacacaggtcaaaaaaaacaaagacagttcgtgactctggggaaatcttgagtgcaaacttagttgttaaagaagatcagaaaattcctactgggaaaaaattgcattattgcagttactgtgggaaaacattcaggtacagtgccaaccttgtcaagcatcagcggcttcacagtgaagagaagccctacaaatgtgatgagtgtgggaaagccttcagccagagctgcgagttcatcaaccaccgaaggatgcactcaggagagattccctaccggtgtgacgagtgtggtaagacattcacccggaggcccaacctcatgaagcaccagaggattcacactggggagaaaccctacaagtgtggtgagtgtgggaaacactttagcgcctactcttccccttatttatcaccgagaggatccacactggagagaaaccctataaatgtaatgactgtgggaaagccttcagtgatggctcaatccttatccgccatcgtcggactcacactggagagaagccatttgagtgcaaggaatgtggcaagggctttacccaaagttctaaccttatccagcatcagagaattcacactggagagaaaccctataaatgtaatgaatgtgagaaagctttcattcaaaaaaccaaacttgtggaacatcagagaagccacactggagagaagccctatgaatgcaatgactgtggcaaagttttcagccagagcacacacctcatccagcatcagagaattcacacaggagaaaagccctacaagtgcagtgagtgtgggaaggccttccacaacagttccagactcattcaccaccagaggttgcaccacggagagaaaccctacaaatgcagtgattgcaagaaagccttcagccagagcacttacttgattcagcaccggaggatccacaccggggagaagccctacaagtgcagtgagtgtgggaaggccttccggcacagttccaacatgtgtcagcatcagcggatcacctccgnnnnnnnnnnnnnnnnnnnnnnnnnnnnnnnnnnnnnnnnnnnnnnnnnncctaccggtgtgacgagtgtggtaaggacattcacccggaggcccaacctcatgaagcaccagaggattcacactgggggagaaaccctacaagtgtggtgagtgtgggaaacactttagcgcctactcttcccttatttatcaccagaggatccacactggagagaaaccctataaatgtaatgactgtgggaaagccttcagtgatggctcaatccttatccgccatcgtcggactcacactggagagaagccatttgagtgcaaggaatgtggcaagggctttacccaaagttctaaccttatccagcatcagagaattcacactggagagaaaccctataaatgtaatgaatgtgagaaagctttcattcaaaaaaccaaacttgtggaacatcagagaagccacactggagagaagccctatgaatgcaatgactgtggcaaagttttcagccagagcacacacctcatccagcatcagagaattcacacaggagaaaagccctacaagtgcagcgagtgtgggaaggccttccacaacagttccagactcattcaccaccagaggttgcaccacggagagaaaccctacaaatgcagtgattgcaagaaagccttcagccagagcacttacttgattcagcaccggaggatccacaccggggagaagccctacaagtgcagtgagtgtgggaaggccttccggcacagttccaacatgtgtcagcatcagcggattcacctccgggaggacttctccgtgtaacagtggagaagtgtctgagggcagagtccagctgagcacttcctgcatgcgcccccggcacctgactctgccctttatttattatccacacgatgttttcatagggtgaaaggacatttctcattaaacctcttttctttaatcaaatgcagtgcatgttcattttagaaaattgaagagagaaaagtgagcaaaaagaagctcctgtaatctcccccacttagaaaaataattcattgctgctgatttaggaaagttttctttgagacatactggagagcattttaaaaagaaaatagtgcaatacttgtcattgcagcacctaggatcttcacttttgctatttcctcaatatcggaaaattcacactgaaga

SEQ ID NO: 18677 - DNA, 419 bp, Macaca Mulatta
  misc_feature (1)...(419): n = A,T,C or G
tcgctccgacggctaccgctggtgcgccaccaccgccaactacgaccaggacaagctctacggcttctgcccgacccgagnngactcgaccgtgatcgggggcaactcggcgggggagctgtgcgttttccccttcaccttcctgggtaaggagtactcgacctgtaccagcgagggccgcggagatgggcgcctctggtgcgctaccacctcgaactttgacagagacaagaagtggggcttctgcccggaccaaggnaggatacagtctgttcctcgtggcagctcacgaattcggccacgcgctgggcttagatcatacctcagtgccggaggcgctcatgtaccctatgtaccgattcactgaggagccccccttgcataaggacgacgtgaatggcatccagtatctctatggt

SEQ ID NO: 18678 - DNA, 1563 bp, Macaca Mulatta
  misc_feature (1)...(1563): n = A,T,C or G
agatacttgcttctggttctgatggatgctgaaagagcctggagctacgctatgcagctgaaacaggaagccaacactgaaccccgaaaacggtttcacttattatctcgcctacgcaaagccgtgaagcatgcagaggaattggaacgtttgtgtgagagcaatcgcgtggacgctaagaccaagttagaggctcaggnnnnnnnnnnnnnnnnnnnnnnnnnnnnnnnnnnnnnnnnnnnnnnnnnnnnnnnnnnnnnnnnnnnnnnnnnnnnnnnnnnnnnnnnnnnnnnnnnnnnnnnnnnnnnnnnnnnnnnnnnnnnnnnnnnnnnnnnnnnnnnnnnnnnnnnnnnnnnnnnnnnnnnnnnnnnnnnnnnnnnnnnnnnnnnnnnnnnnnnnnnnnnnnnnnnnnnnnnnnnnnnnnnnnnnnnnnnnnnnnnnnnnnnnnnnnnnnnnnnnnnnnnnnnnnnnnaggctttgatcactcagactcgagccaaacaggcagctaccatgagtgaagtggagtggagagggagaacggttccagtgaagattgacaaagtgcgcattttcttattgggactggctgataatgaagctgctattgtccagnnnnnnnnnnnnnnnnnnnnnnnnnnnnnnnnnnnnnnnnnnnnnnnnnnnnnnnnnnnnnnnnnnnnnnnnnnnnnnnnnnnnnnnnnnnnnnnnnnnnnnnnnnnnnnnnnnnnnnnnnnnnnnnnnnnnnnnnnnnnnnnnnnnnnnnnnnnnnnnnnnnnnnnnnnnnnnnnnnnnnnnnnnnnnnnnnnnnnnnnnnnnnnnnnnnnnnnnnnnnnnnnnnnnnnnnnnnnnnnnnnnnnnnnnnnnnnnnnnnnnnnnnnnnnnnnnnnnnnnnnnnnnnnnnnnnnnnnnnnnnnnnnnnnnnnnnnnnnnnnnnnnnnnnnnnnnnnnnnnnnnnnnnnnnnnnnnnnnnnnnnnnnnnnnnnnnnnnnnnnnnnnnnnnnnnnnnnnnnnnnnnnnnnnnnnnnnnnnnnnnnnnnnnnnnnnnnnnnnnnnnnnnnnnnnnnnnnnnnnnnnnnnnnnnnnnnnnnnnnnnnnnnnnnnnnnnnnnnnnnnnnnnnnnnnnnnnnnnnnnnnnnnnnnnnnnnnnnnnnnnnnnnnnnnnnnnnnnnnnnnnnnnnnnnnnnnnnnnnnnnnnnnnnnnnnnnnnnnnnnnnnnnnnnnnnnnnnnnnnnnnnnnnnnnnnnnnnnnnnnnnnnnnnnnnnnnnnnnnnnnnnnnnnnnnnnnnnagcctcgggttgaacggtatgagacattctgcctggacccttcccttgtcaccaagcaagccaaccttgtgcacttcccaccaggattccagcccatccctcgcaagcctttgttcttctgacctggccctcaaccatgtggctttcccacccctcgaggacaagttggaacagaagaccaagagtggcctcactggatacatcaagggcatctttggattcaggagctaaccaggctcttcctcaggggtgggggagattctgactattaat

SEQ ID NO: 18679 - DNA, 151 bp, Macaca Mulatta
catttggatataggaatctactcctctgaggaatggaacacaagtagttacctgtcactttcatttataattccaaaagatgactacaaccatgtccatgctcagattcaaacagttttccatatcacttttgggtggtaagatgatttac

SEQ ID NO: 18680 - DNA, 671 bp, Macaca Mulatta
gagccctaccacctgcaccctgaggaaacacaagactaatcggaagccgcgcacaccctttaccacgtcccagctcctcgccctggagcgcaagttccgccagaaacagtacctctccattgcagagcgtgcagagttctccagctctctgaacctcacagagacccaggtcaaaatctggttccagaaccgaagggctaaggcgaaaagactgcaggaggcggaactggaaaagctgaaaatggctgcaaaacctatgctgccctccagcttcagtctccctttccccatcagctcgcccctgcaggcagcgtccatatatggagcatcctacccgttccatagacctgtgcttcccatcccgcccgtgggactgtatgccacgccagtgggatatggcatgtaccacctgtcctaaggaagaccagatcaatagactccatgatggatgcttgtttcaaagggcttcttctccctctccaagaaggcagtaccagccaatactcctgctctgctaaccctgcgtgcaccaccctaagcggctaggccgacagggccacatgacatagctgaaatttgttctttaggtggaggcaccaagccctgttttcttggtgtaatcttccaaatgtccccttctcctttcacaaagattggctctgatggttttt

SEQ ID NO: 18681 - DNA, 2292 bp, Macaca Mulatta
atgaggccggcggacttgctgcagctggtgctgctgctcgtcctgcccagggacctgggcggaaaggggtgttcgtctccaccctgcgagtgtcaacaggaggaggacttcagagtcacctgcaaggatattcaacgcatccccagcttaccgcccagtacgcagactctgaagcttattgagactcgcctgagaaccattccaagtcacgcattttctagtctgcccaatatttccagaatctatttgtctatagatgcaactctgcagcagctcgaaacacactccttctacaatttgaataaagtgactcacatagaaattcggaataccaggagcttaacttacatagaccctgatgccctcaaagagctccccctcctaaagttccttggcattttcaacactggacttaaaatgttccctgacctgaccaaagtttattccactgatatattctttatacttgaaattacagacaacccttacatgacgtcaatccctgtgaatgcttttcagggactatgcaatgaaaccttgacactgaagctgtacaacaatggctttacttcaatccaaggatacgctttcaatgggacaaagctggatgctgtttacctaaacaagaacaaatacctgacagttattgacaaagatgcatttggaggagtatacagtggaccaagtttgctggacgtgtctcacaccagtgttactgcccttccatccaagggcctggagcacctgaaggaactgatagcaagaaacacctggactcttaagaaacttccgctttccttgagtttccttcacctcacccgggctgacctttcttacccaagccactgctgtgcttttaagaatcagaagaaaatcagaggaatccctgagtccttgatgtgtaatgagagcagtatgcagagcttgcgccagagaaaatctgtgaatgccttgaatagccccctccaccaggaatatgaagagaatctggatgacggcattgttgggtacaaggaaaagtccaagttccaggatgctcataacaatgctcattattacgtcttctttgaagaacaagaggatgagatcattggttttggccaggagctcaaaaacccccaggaagagactctacaagcttttgacagccattatgactacaccgtgtgtggggacaatgaagacatggtgtgtacccccaagtctgatgagttcaacccgtgtgaagacataatgggctacaagttcctgagaattgtggtgtggttcgttagtctgctggctctcctgggcaacgtctttgtcctgcttattcttctcaccagccactacaaactgaacgtcccccgctttctcatgtgcaacctggcctttgcggatttctgcatggggatgtacctgctcctcattgcctctgtagacctctacactcactctgagtactacaaccatgccatcgactggcagacaggccctgggtgcaacacggctggtttcttcactgtctttgcaagcgagttgtcggtgtatacactgacggtcatcaccctggagcgctggtatgccatcaccttcgccatgcgcctggaccggaagatccgcctcaggcacgcatgtgccatcatggttgggggctgggtttgctgcttccttcttgccctgctccctttggtgggaataagtagctatgccaaagtcagcatctgcctgcccatggacaccgagacccctcttgctctggcatatattgtttttgttctgacgctcaacatagttgccttcgtcatcgtctgctgctgttatgtgaagatctacatcacagtccgaaatccacagtacaacccaggggacaaagataccaaaatcgccaagaggatggctgtgttgatcttcaccgacttcatatgcatggccccaatctcattctatgctctgtcagcaattctgaacaagcctctcatcactgttagcaattccaaaatcttgctggtactcttctatccacttaactcctgtgccaatccattcctctatgctattttcaccaaggccttccagagggatgtgttcatcctactcagcaagtttggcatctgtaaacgccaggctcaggcataccgggggcagagggttcctccaaagaacagcactgatattcaggttcaaaaggttacccacgagatgaggcaggatctccacaacatgcaagatgtctatgaactacttgaaaactcccatctaaccccaaagaagcaaggccaaatctcagaagagtatacgcaaacagttttg

SEQ ID NO: 18682 - DNA, 110 bp, Macaca Mulatta
gtacaatggcttggtgactggcacaagggctaagggcatcattgccatctgctgggtgctgtcgtttgccatcggcctgactcccatgctgggttggaacaactgcggtc

SEQ ID NO: 18683 - DNA, 655 bp, Macaca Mulatta
  misc_feature (1)...(655): n = A,T,C or G
gcccactgaggtgctgtcggtttattgcggcatgtgaattctctcagggngtctaggaggggcatttctgagactgcctgacaccacccccatcccctgccccccgctctcagaaaagggtagaagatgaaatgaaagctatgggactcttggaggatacccagtgtctattctgggttagagaagtgcttactaaggggttttctaataaaaacaaatnnnnnnnnnnnnnnnnnnnnnnnnnnnnnnnnnnnnnnnnnnnnnnnnnnnnnnnnnnnnnnnnnnnnnnnnnnnnnnnnnnnnnnnnnnnnnnnnnnnnnnnnnnnnnnnnnnnnnnnnnnnnnnnnnnnnnnnnnnnnnnnnnnnnnnnnnnnnnnnnnnnnnnnnnnnnnnnnnnnnnnnnnnnnnnnnnnnnnnnnnnnnnnnnnnnnnnnnnnnnnnnnnnnnnnnnnnnnnnnnnnnnnnnnnnnnnnnnnnnnnnnnnnnnnnnnnnnnnnnnnnnnnnnnnnnnnnnnnnnnnnnnnnnnnnnnnnnnnnnnnnnnnnnnnnnnnnnnnnnnnnnnnnnnnnnnnnnnnnnnnnnnnnnnnnnnnnnnnnnnnnnnnnnnnnnnnnnnnnnnnnnnnnnnnnnnnnnnnnnnnnnnnnnnnnnnnnnn

SEQ ID NO: 18684 - DNA, 691 bp, Macaca Mulatta
  misc_feature (1)...(691): n = A,T,C or G
atgctggcctcagggctgctcctggtggccttgctggcctgcctgactgtgatggtcttgatgtctgtctggcagcagaggaacagcaagggaaagctgcctccgggacccaccccattgcccttcattggaaactacctgcagctgaacacagagcagatgtgcaactccctcatgaaggtgtcccaaggcagggagatgggnnnnnnnnnnnnnnnnnnnnnnnnnnnnnnnnnnnnnnnnnnnnnnnnnnnnnnnnnnnnnnnnnnnnnnnnnnnnnnnnnnnnnnnnnnnnnnnnnnnnnnnnnnnnnnnnnnnnnnnnnnnnnnnnnnnnnnnnnnnnnnnnnnnnnnnnnnnnnnnnnnnnnnnnnnnnnnnnnnnnnnnnnnnnnnnnnnnnnnnnnnnnnnnnnnnnnnnnnnnnnnnnnnnnnnnnnnnnnnnnnnnnnnnnnnnnnnnnnnnnnnnnnnnnnnnnnnnnnnnnnnnnnnnnnnnnnnnnnnnnnnnnnnncagctctatgagatgttctcttcagtgatgaaacacctgccaggaccacagcaacaggcctttaaggagctgcaagggctggaggacttcatagccaagaaggtggagcacaaccagcgcacactggatcccaactccccacgggacttcatcgactcctttctcatccgcatgcaggagg

SEQ ID NO: 18685 - DNA, 80 bp, Macaca Mulatta
tgtggaatccatagcatgttccctttacatttagctgccctaaatgctcactctgactgctgcagaaagttgttatcatc

SEQ ID NO: 18686 - DNA, 5071 bp, Macaca Mulatta
  misc_feature (1)...(5071): n = A,T,C or G
gggggagcctcatgacgtggcccccaacgggccatcagcggggggcctggccgtcccccagnnnnnnnnnnnnnnnnnnggcctcccacccgagcccgaggtgcccccagccctggagtgctgggcccccacgcctcnnnnnnnnnnnnnnnnnnnnnnnnnnnnnnnnnnnnnnnnnnnnnnnnnnnnnnnnnnnnnnnnnnnnctcgccacagcgggagccgcagcgagtatcccatgagcagttccgggctgccctgcagctggtggtggacccaggtgacccccgctcctacctggacaacttcatcaagattggcgagggctccacgggcattgtgtgcatcgccaccgtgcgcagctcgggcaagcttgtggccgtcaagaagatggacctgcgcaagcagcagaggcgcgagctgctcttcaacgaggtgnnnnnnnnnnnnnnnnnnnnnnnnnnnnnnnnnnnnnnnnnnnnnnnnnnnnnnnnnnnnnnnnnnnnnnnnnnnnnnnnnnnnnnnnnnnnnnnnnnnnnnnnnnnnnnnnnnnnnnnnnnnnnnnnnnnnnnnnnnnnnnnnnnnnnnnnnnnnnnnnnnnnnnnnnnnnnnnnnnnnnnnnnnnnnnnnnnnnnnnnnnnnnnnnnnnnnnnnnnnnnnnnnnnnnnnnnnnnnnnnnnnnnnnnnnnnnnnnnnnnnnnnnnnnnnnnnnnnnnnnnnnnnnnnnnnnnnnnnnnnnnnnnnnnnnnnnnnnnnnnnnnnnnnnnnnnnnnnnnnnnnnnnnnnnnnnnnnnnnnnnnnnnnnnnnnnnnnnnnnnnnnnnnnnnnnnnnnnnnnnnnnnnnnnnnnnnnnnnnnnnnnnnnnnnnnnnnnnnnnnnnnnnnnnnnnnnnnnnnnnnnnnnnnnnnnnnnnnnnnnnnnnnnnnnnnnnnnnnnnnnnnnnnnnnnnnnnnnnnnnnnnnnnnnnnnnnnnnnnnnnnnnnnnnnnnnnnnnnnnnnnnnnnnnnnnnnnnnnnnnnnnnnnnnnnnnnnnnnnnnnnnnnnnnnnnnnnnnnnnnnnnnnnnnnnnnnnnnnnnnnnnnnnnnnnnnnnnnnnnnnnnnnnnnnnnnnnnnnnnnnnnnnnnnnnnnnnnnnnnnnnnnnnnnnnnnnnnnnnnnnnnnnnnnnnnnnnnnnnnnnnnnnnnnnnnnnnnnnnnnnnnnnnnnnnnnnnnnnnnnnnnnnnnnnnnnnnnnnnnnnnnnnnnnnnnnnnnnnnnnnnnnnnnnnnnnnnnnnnnnnnnnnnnnnnnnnnnnnnnnnnnnnnnnnnnnnnnnnnnnnnnnnnnnnnnnnnnnnnnnnnnnnnnnnnnnnnnnnnnnnnnnnnnnnnnnnnnnnnnnnnnnnnnnnnnnnnnnnnnnnnnnnnnnnnnnnnnnnnnnnnnnnnnnnnnnnnnnnnnnnnnnnnnnnnnnnnnnnnnnnnnnnnnnnnnnnnnnnnnnnnnnnnnnnnnnnnnnnnnnnnnnnnnnnnnnnnnnnnnnnnnnnnnnnnnnnnnnnnnnnnnnnnnnnnnnnnnnnnnnnnnnnnnnnnnnnnnnnnnnnnnnnnnnnnnnnnnnnnnnnnnnnnnnnnnnnnnnnnnnnnnnnnnnnnnnnnnnnnnnnnnnnnnnnnnnnnnnnnnnnnnnnnnnnnnnnnnnnnnnnnnnnnnnnnnnnnnnnnnnnnnnnnnnnnnnnnnnnnnnnnnnnnnnnnnnnnnnnnnnnnnnnnnnnnnnnnnnnnnnnnnnnnnnnnnnnnnnnnnnnnnnnnnnnnnnnnnnnnnnnnnnnnnnnnnnnnnnnnnnnnnnnnnnnnnnnnnnnnnnnnnnnnnnnnnnnnnnnnnnnnnnnnnnnnnnnnnnnnnnnnnnnnnnnnnnnnnnnnnnnnnnnnnnnnnnnnnnnnnnnnnnnnnnnnnnnnnnnnnnnnnnnnnnnnnnnnnnnnnnnnnnnnnnnnnnnnnnnnnnnnnnnnnnnnnnnnnnnnnnnnnnnnnnnnnnnnnnnnnnnnnnnnnnnnnnnnnnnnnnnnnnnnnnnnnnnnnnnnnnnnnnnnnnnnnnnnnnnnnnnnnnnnnnnnnnnnnnnnnnnnnnnnnnnnnnnnnnnnnnnnnnnnnnnnnnnnnnnnnnnnnnnnnnnnnnnnnnnnnnnnnnnnnnnnnnnnnnnnnnnnnnnnnnnnnnnnnnnnnnnnnnnnnnnnnnnnnnnnnnnnnnnnnnnnnnnnnnnnnnnnnnnnnnnnnnnnnnnnnnnnnnnnnnnnnnnnnnnnnnnnnnnnnnnnnnnnnnnnnnnnnnnnnnnnnnnnnnnnnnnnnnnnnnnnnnnnnnnnnnnnnnnnnnnnnnnnnnnnnnnnnnnnnnnnnnnnnnnnnnnnnnnnnnnnnnnnnnnnnnnnnnnnnnnnnnnnnnnnnnnnnnnnnnnnnnnnnnnnnnnnnnnnnnnnnnnnnnnnnnnnnnnnnnnnnnnnnnnnnnnnnnnnnnnnnnnnnnnnnnnnnnnnnnnnnnnnnnnnnnnnnnnnnnnnnnnnnnnnnnnnnnnnnnnnnnnnnnnnnnnnnnnnnnnnnnnnnnnnnnnnnnnnnnnnnnnnnnnnnnnnnnnnnnnnnnnnnnnnnnnnnnnnnnnnnnnnnnnnnnnnnnnnnnnnnnnnnnnnnnnnnnnnnnnnnnnnnnnnnnnnnnnnnnnnnnnnnnnnnnnnnnnnnnnnnnnnnnnnnnnnnnnnnnnnnnnnnnnnnnnnnnnnnnnnnnnnnnnnnnnagatgggtcatcacagagtgaaacccagtggtgcaagcagctgtgctctnnnnnnnnnnnnnaggcttaggtgaggtggatgcctttctggnnnnnnnnnnnngctaacattggcaaaagaagaaatagaaaacaagaccaaaataactgtctcctcactgcacacacactccagaataaataaaacacttcgggctcgaatgcgctttcaaatgagannnnnnnnnnnnnnnnnnnnnnnnnnntcgctctgttgcncaggctggagtgccatgacacgatctcagctcaccgcaacctctgcctcctgggttcaagcgattctcctgcctcagcctcttgaatagctgggattacaggctcctgccaccgcgcccggctaattttttgtatttttagtagagactgggttttgccatcttagccaggctggtttcgaactcctggcctcaagtgatccacccgccttggcctcccaaagtgctgggattacaggcgtgagccactgtgcctggcctcaaatgagatttaccagactttgaaagagcaggtaattccttctacctcgtgaacaagttgttccagaannnnnnnnnnnnnnnnnnnnnnnnnnnnnnnnnnnnnnnnnnnnnnnnnnnnnnnnnnnnnnnnnnnnnnnnnnnnnnnnnnnnnnnnnnnnnnnnnnnnnnnnnnnnnnnnnnnnnnnnnnnnnnnnnnnnnnnnnnnnnnnnnnnnnnnnnnnnnnnnnnnnnnnnnnnnnnnnnnnnnnnnnnnnnnnnnnnnnnnnnnnnnnnnnnnnnnnnnnnnnnnnnnnnnnnnnnnnnnnnnnnnnnnnnnnnnnnnnnnnnnnnnnnnnnnnnnnnnnnnnnnnnnnnnnnnnnnnnnnnnnnnnnnnnnnnnnnnnnnnnnnnnnnnnnnnnnnnnnnnnnnnnnnnnnnnnnnnnnnnnnnnnnnnnnnnnnnnnnnnnnnnnnnnnnnnnnnnnnnnnnnnnnnnnnnnnnnnnnnnnnnnnnnnnnnnnnnnnnnnnnnnnnnnnnnnnnnnnnnnnnnnnnnnnnnnnnnnnnnnnnnnnnnnnnnnnnnnnnnnnnnnnnnnnnnnnnnnnnnnnnnnnnnnnnnnnnnnnnnnnnnnnnnnnnnnnnnnnnnnnnnnnnnnnnnnnnnnnnnnnnnnnnnnnnnnnnnnnnnnnnnnnnnnnnnnnnnnnnnnnnnnnnnnnnnnnnnnnnnnnnnnnnnnnnnnnnnnnnnnnnnnnnnnnnnnnnnnnnnnnnnnnnnnnnnnnnnnnnnnnnnnnnnnnnnnnnnnnnnnnnnnnnnnnnnnnnnnnnnnnnnnnnnnnnnnnnnnnnnnnnnnnnnnnnnnnnnnnnnnnnnnnnnnnnnnnnnnnnnnnnnnnnnnnnnnnnnnnnnnnnnnnnnnnnnnnnnnnnnnnnnnnnnnnnnnnnnnnnnnnnnnnnnnnnnnnnnnnnnnnnnnnnnnnnnnnnnnnnnnnnnnnnnnnnnnnnnnnnnnnnnnnnnnnnnnnnnnnnnnnnnnnnnnnnnnnnnnnnnnnnnnnnnnnnnnnnnnnnnnnnnnnnnnnnnnnnnnnnnnnnnnnnnnnnnnnnnnnnnnnnnnnnnnnnnnnnnnnnnnnnnnnnnnnnnnnnnnnnnncccaaaataaacgatgcagccaggtcagaccagctgttctcacagttggtttcccagaccagcagcatcactgggaacttactagacacgcaaataaatccgtgtgcgccaccccaggtgcatcagatgctggtgaggcccagtgatctgtatttaacacaccttccgggggatgctggtgcccgctcacgtttgggaacccctgccatccacgactgctcttccatgtaaaaggcctacttctgtgggactccgagtnnnnnnnnnnnnnnggtccttccatctttttccttcctcctgggacacctgcctctcccatgtggtattagaggattccttatgctctgaagggggcacagagagaggagggcactcctcttgaaggactgacccagaggttttgccattgcttcattggccagagcttagtcacgcagccgcacccagaggcaagggaggttgggaaatgtagtgtttgtgtgtgtgtctgacacaaattctattaccatgcagtcaggattctccacccttgttgttcattagatttgctgggcttcaccctggtaattctgatttagtgacagcacagagaacccagaggcagacccaggtgtgaacaggagcttcatatacgacaaggagatttaataagcatgctgggggccg

SEQ ID NO: 18687 - DNA, 1659 bp, Macaca Mulatta
  misc_feature (1)...(1659): n = A,T,C or G
ggacgtcagcaagaggctctctctgcccatggatatccgcctgccccaggaattcctacagaagctacagatggagagcccagatctgcccaagccgcccagccgcatgtcccgccgggcctccctgnnnnnnnnnnnnnnnnnnnnnnnnnnnnnnnnnnnnnnnnnnnnnnnnnnnnnnnnnnnnnnnnnnnnnnnnnnnnnnnnnnnnnnnnnnnnnnnnnnnnnnnnnnnnnnnnnnnnnnnnnnnnnnnnnnnnnnnnnnnnnnnnnnnnnnnnnnnnnnnnnnnnnnnnnnnnnnnnnnnnnnnnnnnnnnnnnnnnnnnnnnnnnnnnnnnnnnnnnnnnnnnnnnnnnnnnnnnnnnnnnnnnnnnnnnnnnnnnnnnnnnnnnnnnnnnnnnnnnnnnnnnnnnnnnnnnnnnnnnnnnnnnnnnnnnnnnnnnnnnnnnnnnnnnnnnnnnnnnnnnnnnnnnnnnnnnnnnnnnnnnnnnnnnnnnnnnnnnnnnnnnnnnnnnnnnnnnnnnnnnnnnnnnnnnnnnnnnnnnnnnnnnnnnnnnnnnnnnnnnnnnnnnnnnnnnnnnnnnnnnnnnnnnnnnnnnnnnnnnnnnnnnnnnnnnnnnnnnnnnnnnnnnnnnnnnnnnnnnnnnnnnnnnnnnnnnnnnnnnnnnnnnnnnnnnnnnnnnnnnnnnnnnnnnnnnnnnnnnnnnnnnnnnnnnnnnnnnnnnnnnnnnnnnnnnnnnnnnnnnnnnnnnnnnnnnnnnnnnnnnnnnnnnnnnnnnnnnnnnnnnnnnnnnnnnnnnnnnnnnnnnnnnnnnnnnnnnnnnnnnnnnnnnnnnnnnnnnnnnnnnnnnnnnnnnnnnnnnnnnnnnnnnnnnnnnnnnnnnnnnnnnnnnnnnnnnnnnnnnnnnnnnnnnnnnnnnnnnnnnnnnnnnnnnnnnnnnnnnnnnnnnnnnnnnnnnnnnnnnnnnnnnnnnnnnnnnnnnnnnnnnnnnnnnnnnnnnnnnnnnnnnnnnnnnnnnnnnnnnnnnnnnnnnnnnnnnnnnnnnnnnnnnnnnnnnnnnnnnnnnnnnnnnnnnnnnnnnnnnnnnnnnnnnnnnnnnnnnnnnnnnnnnnnccaggacgagggaagaacaggcggcagagcatcttctgagctgcgcccaccctgccgtggcccaaaggacaagagatcacatggaccacaaattcgggtaggatggaacctgtgtggccctcggaagactgaagaacgagggctgacagccagcccagaagaccgtttggcagccctgctggccacggctgtttcttctctgtgcttcccacgtgcctccccagtagtcctcacctgcataccaacccctccattacccatgttggggctggcatgagctgcttccctgagaagacatgagagggaggggggaccttgtaccctctcccaccctgaagtgtttgggcacctgcgtgggatgcacatgggcgagagaattaaggcgccaggatgggcactgtgccctggatacaggctttaccctcctcccccaggggcctgcctagggccagtttggtagtccccttttctggtcccttggagcccacagatgtttcatctttttcccttctgagagcaagaagagacatggcatgctctctggg

SEQ ID NO: 18688 - DNA, 400 bp, Macaca Mulatta
cagaagaaaacaaactgtcacaagctgttatgtccaaagctcccgttctatgatcattgtagtttgtttcagcatccagtgtctttgtttctgatcacgcttctaaggagtccaagaattaccataaggcaatatttctgatgattactatataggcagatatatcagaaaataaccaagtagtggcagcagggatcaggtagaagaactgataaaagaaaccaccataaatagatttgttcaatgaaaaatgaaaactggaagaaaggataacaaagacagtcttcaccattttgcaggaatctacactctgcctgtgtgaacacatttctttgtaaagaaagaatttgattgcatttactggcagattttcagaatagtcaggaattcatgttatttc

SEQ ID NO: 18689 - DNA, 954 bp, Macaca Mulatta
gggcacttttgcttgtgtttattactgcttgaggttgagccttttgagtatttaaaaaaatatataccaacagaactactctcccaagaaaaatattgccaccatttgtagaccatgtaaccttcaagtatgtgctacttttttgtccctgtatctaactcaaatcaggaactgtatttttttttaatgatttgcttttgaaacttgaagtctttgaaacagtgtgatgcaattactgctgttctagcccccaaagagttttctgtgcaaaatcttgagaatcaataaagatggaagggagaaattggaatgttttaactgcagccctcagaactttagtaacagcacaacaaattaaaaaaacaactcatgccacacgtatgttgtcttcatgtgtcttgcaatgaactgtttcagtagccaatcctctttcttagtatatgaaaggacagggatttttgttcttgttgttcttgttattttaagtttactggggaaagtgcatttggccaaatgaaatggtagtcaagcctatttgcaacaagtttaggaagttttttgtttattataaacaaaaagcatgtgaaagtgcacttaagatagagtttttattaattacttattacctagattttaaatagacaatccaaagtctccccttcgtgttgccatcatcttgttgaatcagccattttatcgaggcacgtgatcagtgttgcaacataatgaaaaagatggctactgtgccttgtgttacttaatcatacagtaagctgacctggaaatgaatgaaactattactcctaagaattacattgtatagccccacaggttaaatttaattcaaaacatgttaaacattactttcatgtactatggaaaagtacaagtaggtttacattactggattttcggaagtaagtagtttcccctttcctagtcttctgtgtatgt

SEQ ID NO: 18690 - DNA, 1424 bp, Macaca Mulatta
  misc_feature (1)...(1424): n = A,T,C or G
tgcccaacagcgagccctgtgcctctccgctggagctgttcaacagcatcgccacacaaggggagctcgtgaggtccctcaaagcgggaaatgcgtcaaaggnaggatgaaattgattctgcagtaaagatgttgctgtcgttaaaaatgagctacaaagctgccatgggggaggattacaaggctgactgtcctccagggaacccagcacctaccagtaatcatggcccagatgccgcagaagctgaagaggattttgtggacccatggacagtacagacgagcagtgcaaaaggcatagactatgataagctcattgnnnnnnnnnnnnnnnnnnnnnnnnnnnnnnnnnnnnnnnnnnnnnnnnnnnnnnnnnnnnnnnnnnnnnnnnnnnnnnnnnnnnnnnnnnnnnnnnnnnnnnnnnnngagacatgaatcaggttctcgatgcctatgaaaataagaagccgttttatctgtacacgggccggggcccctcttctgaagccatgcatgtgggtcacctcattccgtttattttcacaaagtnnnnnnnnnnnnnnnnnnnnnnnnnnnnnnnnnnnnnnnnnnnnnnnnnnnnnnnnnnnnnnnnnnnnnnnnnnnnnnnnnnnnnnnnnnnnnnnnnnnnnnnnnnnnnnnnnnnnnnnnnnnnnnnnnnnnnnnnnnnnnnnnnnnnnnnnnnnnnnnnnnnnnnnnnnnnnnnnnnnngatgagctcaggtttctacaaaaatgtggtgaagattcaaaagcatgttaccttcaaccaagtgaaaggcattttcggcttcactgacagcgacagcatnnnnnnnnnnnnnnnnnnnnnnnnnnnnnnnnnnnnnnnnnnnnnnnnnnnnnnnnnnnnnnnnnnnnnnnnnnnnnnnnnnnnnnnnnnnnnnnnnnnnnnnnnnnnnnnnnnnnnnnnnnnnnnnnnnnnnnnnnnnnnnnnnnnnnnnnnnnnnnnnnnnnnnnnnnnnnnnnnnnnnnnnnnnnnnnnnnnnnnnnnnnnnnnnnnnnnnnnnnnnnnnnnnnnnnnnnnnnnnnnnnnnnnnnnnnnnnnnnnnnnnnnnnnnnnnnnnnnnnnnnnnnnnnaggtcaataagcatgcgttttctggagggagagacaccatcgaggagcacaggcagtttgggggcaactgtgatgtggacgtgtctttcatgtacctgaccttcttcctcgaggacgacgacaagctcgagcagatcaggaaggnaggattacaccagcggaaacatgctcaccggtgagctcaagaaggtactcatagaggttctccagcccttgatcgcagagcaccaggcccggcgcaaggaggtcacggacgagatagcaaaacagttcatgactccccgggagctgtccttcgactttcagtag

SEQ ID NO: 18691 - DNA, 421 bp, Macaca Mulatta
  misc_feature (1)...(421): n = A,T,C or G
gtgggtcattgacagcggtgctgtttctgactggaacgtgggccggtccccagacccaagagctgtgagctgcctaagaaatcatggcattcacacagcccataaagcaagacagnntaccaaagaagattttgccccgttgattatatacaatgtatggatgaannnnnnnnnagagatttgaatagaaaaagtaatcaagttaaaacctgcaaagctaaaattgaactacttgggagctatgatccacaaaaacaacttattattgaagatccctattatgngggaatgactctgactttgagacggtgtaccagcaatgtgtcaggtgctgcagagcgttcttggagaaggccgactgaggcaggttcatgccctgctgtggccagcctgactagaccccaccctgaggtcctgcatt

SEQ ID NO: 18692 - DNA, 1281 bp, Macaca Mulatta
  misc_feature (1)...(1281): n = A,T,C or G
atgcatcttatcgactacctgctcctcctgctgattggactactggccctttctcatggccagctgcacgttgagcatgatggtgnnnnnnnnnnnnnnnnnnnnnnnnnnnnnnnnnnnnnnnnnnnnnnnnnnnnnnnnnnnnnnnnnnnnnnnnnnnnnnnnnnnnnnnnnnnnnnnnnnnnnnnnnnnnnnnnnnnnnnnnnnnnnnnnnnnnnnnnnnnnnnnnnnnnnnnnnnnnnnnnnnnnnnnnnnnnnnnnnnnnnnnnnnnnnnnnnnnnnnnnnnnnnnnnnnnnnnnnnnnnnnnnnnnnnnnnnnnnnnnnnnnnnnnnnnnnnnnnnnnnnnnnnnnnnnnnnnnnnnnnnnnnnnnnnnnnnnnnnnnnnnnnnnnnnnnnnnnnnnnnnnnnnnnnnnnnnnnnnnnnnnnnnnnnnnnnnnnnnnnnnnnnnnnnnnnnnnnnnnnnnnnnnnnnnnnnnnnnnnnnnnnnnnnnnnnnnnnnnnnnnnnnnnnnnnnnnnnnnnnnnnnnnnnnnnnnnnnnnnnnnnnnnnnnnnnnnnnnnnnnnnnnnnnnnnnnnnnnnnnnnnnnnnnnnnnnnnnnnnnnnnnnnnnnnnnnnnnnnnnnnnnnnnnnnnnnnnnnnnnnngccctgtgggagaaaccattcatttcctcgaggaccactcccaaagacttctatgttgatgagaatacaacagnnnnnnnnnnnnnnnnnnnnnnnnnnnnnnnnnnnnnnnnnnnnnnnnnnnnnnnnnnnnnnnnnnnnnnnnnnnnnnnnnnnnnnnnnnnnnnnnnnnnnnnnnnnnnnnnnnnnnnnnnnnnnnnnnnnnnnnnnnnnnnnnnnnnnnnnnnnnnnnnnnnnnnnnnnnnnnnnnnnnnnnnnnnnnnnnnnnnnnnnnnnnnnnnnnnnnnnnnnnnnnnnnnnnnnnnnnnnnnnnnnnnnnnnnnnnnnnnnnnnnnnnnnnnnnnnnnnnnnnnnnnnnnnnnnnnnnnnnnnnnnnnnnnnnnnnnnnnnnnnnnnnnnnnnnnnnnnnnnnnnnnnnnnnnnnnnnnnnnnnnnagtttccacaaggccaccttggatgtggatgaggctggcaccgaggctgcagcagccaccggctttgcggtcaaattcttctctgcccagaccaatcgccatgtcctgcggttcaaccggcccttccttgtggtgatcttttccaccagcacccagagtgtcctctttctgggcaaggtcgtcgaccccacaaaaccata

SEQ ID NO: 18693 - DNA, 272 bp, Macaca Mulatta
  misc_feature (1)...(272): n = A,T,C or G
gggtctctgttcactactgcaatagaggaaacctatctccctatcttgggtccttgaactacagcctgctgtcttacaccagcagagctaccctttaaatgtacaaattatttgtacgctaatgtaatatggtgaaattaaaataaatcacactgnnnnnnnnnnnnnnnnnnnnnnnnnnnnnnnnnnnnnnnnnnnnnnnnnnnnnnnnnnnnnnnnnnnnnnnnnnnnnnnnnnnnnnnnnnnnnnnnnnnnnnnnnnnnnnnnnnnnc

SEQ ID NO: 18694 - DNA, 968 bp, Macaca Mulatta
ggggcactgatggtgcggtggatgagtaatgcatccaggaagcctggaggcctgtggtttccgcacccgctgccacccccgcccctagcgtggacatttatcctctagcgctcaggccctgccgccatcgccgcagatccagtgcccagagagacacgagagaacccaccatggccccctttgagcccctggcttccggcatcctgttgttgctgtggctgatagccccctgcagggcctgcacctgtgtcctaccccacccacaaacagccttctgcaattccgacctcgtcatcaaggccaagttcgtggggacaccacaagtcaaccaaaccacctttaaccagcgattatgagatctaaaaggaccaaaattgtataaatggttccaaagccttaaggggatgccgccagaattccgggttctatctacatcccacgccaatggagagtgtacagccggataaccttacaacagggttcccaataaacgcaatcgaggagattttcccaaatggctggaaaaacttgcaaagaacagtaatccttggcccaatcaccacccttgcagattttctgttggcctcaccatcgaaacagatcctgaaaactttatacttccaacggcacgggggactattctcacttataaaccttcaaaacatggtatggatactagcatcaccaaaatggtcatattggagtattcaccatggtttttattatcactctcccccattggggtaaactgacagatatacgaggcaatcgcccattcttgctatgtatgatgaataaggtaccactgactcctcacaccccagagagctttcacagcaaattaggcgggctatttccaattttatccacttatttatttcatagcaacagtattctctggccttcactgatcatacacacaaggatgggtatatgatagcacctagagagtgtataattctccaaat

SEQ ID NO: 18695 - DNA, 2612 bp, Macaca Mulatta
  misc_feature (1)...(2612): n = A,T,C or G
gtataagcaggtggagcagtacatgtccttccacaagctgccagcagacacgcggcagcgcatccacgagtactatgagcaccgctaccagggcaagatgttcgacgaggaaagcatcctgggcgagctgagcgagccgcttcgggaggnnnnnnnnnnnnnnnnnnnnnnnnnnnnnnnnnnnnnnnnnnnnnnnnnnnnnnnnnnnnnnnnnnnnnnnnnnnnnnnnnnnnnnnnnnnnnnnnnnnnnnnnnnnnnnnnnnnnnnnnnnnnnnnnnnnnnnnnnnnnnnnnnnnnnnnnnnnnnnnnnnnnnnnnnnnnnnnnnnnnnnnnnnnnnnnnnnnnnnnnnnnnnnnnnnnnnnnnnnnnnnnnnnnnnnnnnnnnnnnagatctgcctgctaactaggggccggcgcacagccagtgttcgggctgacacctactgccgcctctactcactcagtgtggaccatttcaacgctgtgctcgaggagttccccatgatgcgccgggcctttgagaccgtggccatggatcggctgcgccgcatcggnnnnnnnnnnnnnnnnnnnnnnnnnnnnnnnnnnnnnnnnnnnnnnnnnnnnnnnnnnnnnnnnnnnnnnnnnnnnnnnnnnnnnnnnnnnnnnnnnnnnnnnnnnnnnnnnnnnnnnnnnnnnnnnnnnnnnnnnnnnnnnnnnnnnnnnnnnnnnnnnnnnnnnnnnnnnnnnnnnnnnnnnnnnnnnnnnnnnnnnnnnnnnnnnnnnnnnnnnnnnnnnnnnnnnnnnnnnnnnnnnnnnnnnnnnnnnnnnnnnnnnnnnnnnnnnnnnnnnnnnnnnnnnnnnnnnnnnnnnnnnnnnnnnnnnnnnnnnnnnnnnnnnnnnnnnnnnnnnnnnnnnnnnnnnnnnnnnnnnnnnnnnnnnnnnnnnnnnnnnnnnnnnnnnnnnnnnnnnnnnnnnnnnnnnnnnnnnnnnnnnnnnnnnnnnnnnnnnnnnnnnnnnnnnnnnnnnnnnnnnnnnnnnnnnnnnnnnnnnnnnnnnnnnnnnnnnnnnnnnnnnnnnnnnnnnnnnnnnnnnnnnnnnnnnnnnnnnnnnnnnnnnnnnnnnnnnnnnnnnnnnnnnnnnnnnnnnnnnnnnnnnnnnnnnnnnnnnnnnnnnnnnnnnnnnnnnnnnnnnnnnnnnnnnnnnnnnnnnnnnnnnnnnnnnnnnnnnnnnnnnnnnnnnnnnnnnnnnnnnnnnnnnnnnnnnnnnnnnnnnnnnnnnnnnnnnnnnnnnnnnnnnnnnnnnnnnnnnnnnnnnnnnnnnnnnnnnnnnnnnnnnnnnnnnnnnnnnnnnnnnnnnnnnnnnnnnnnnnnnnnnnnnnnnnnnnnnnnnnnnnnnnnnnnnnnnnnnnnnnnnnnnnnnnnnnnnnnnnnnnnnnnnnnnnnnnnnnnnnnnnnnnnnnnnnnnnnnnnnnnnnnnnnnnnnnnnnnnnnnnnnnnnnnnnnnnnnnnnnnnnnnnnnnnnnnnnnnnnnnnnnnnnnnnnnnnnnnnnnnnnnnnnnnnnnnnnnnnnnnnnnnnnnnnnnnnnnnnnnnnnnnnnnnnnnnnnnnnnnnnnnnnnnnnnnnnnnnnnnnnnnnnnnnnnnnnnnnnnnnnnnnnnnnnnnnnnnnnnnnnnnnnnnnnnnnnnnnnnnnnnnnnnnnnnnnnnnnnnnnnnnnnnnnnnnnnnnnnnnnnnnnnnnnnnnnnnnnnnnnnnnnnnnnnnnnnnnnnnnnnnnnnnnnnnnnnnnnnnnnnnnnnnnnnnnnnnnnnnnnnnnnnnnnnnnnnnnnnnnnnnnnnnnnnnnnnnnnnnnnnnnnnnnnnnnnnnnnnnnnnnnnnnnnnnnnnnnnnnnnnnnnnnnnnnnnnnnnnnnnnnnnnnnnnnnnnnnnnnnnnnnnnccctgtaccctctgccccagtcatgcccccctaaaggttaaggagtagttggcacctccttattaatatgccagcctagatccccgctggtggaggggcaaatggctgaatccttgtnnnnnnnnnnnnnnnnnnnnnnnnnnnnnnnnnnnnnnnnnnnnnnnnnnnnnnnnnnnnnnnnnnnntgtgttaccaattcattttgtttacccattcctttatccatccctcccctccttttcagataaggagacaggaggagtaggaggaggcagggcctctccatgccagcctctgtggtcctttcccaaacccatcagcgcaatacttgaaccttctcccaggtaggggcaggaggagccacatgagagaggaaaaaggactgtgtttacctttagannnnnnnnnnnnnnnnccttctgagttttctgttggtgcaggagtaagggaaaggcccaaggtatccaagcctgggaagggcaggccagccagcacctctgccttctcagggacaagagcagtcctttaccacactcactcactctgtctgtcccctctgctactctacagcattagagactgtggggccaggaccccaagtctcctttccttctgggtggggagttctggggttgttggtgtgtgggagaagttttataattgcttccaaacagctgggtttaaatataaaata

SEQ ID NO: 18696 - DNA, 724 bp, Macaca Mulatta
  misc_feature (1)...(724): n = A,T,C or G
agactcagtttctgattcaggagtgtgcgttgctgattacaaagccaaattttatctcgacgctgtcctatgccattgataatccattgcactatcagaannnnnnnnnnnnnnnnnnnnnnnnnnnnnnnnnnnnnnnnnnnnnnnnnnnnnnnnnnnnnnnnnnnnnnnnnnnnnnnnnnnnnnnnnnnnnnnnnnnnnnnnnnnnnnnnnnnnnnnnnnnnnnnnnnnnnnnnnnnnnnnnnnnnnnnnnnnnnnnnnnnnnnnnnnnnnnnnnnnnnnnnnnnnnnnnnnnnnnnnnnnnnnnnnnnnnnnnnnnnnnnnnnnnnnnnnnnnnnnnnnnnnnnnnnnnnnnnnnnnnnnnnnnnnnnnnnnnnnnnnnnnnnnnnnnnnnnnnnnnnnnnnnnnnnnnnnnnnnnnnnnnnnnnnnnnnnnnnnnnnnnnnnnnnnnnnnnnnnnnnnnnnnnnnnnnnnnnnnnnnnnnnnnnnnnnnnnnnnnnnnnnnnnnnnnnnnnnnnnnnnnnnnnnnnnnnnnnnnnnnnnnnnnnnnnnnnnnnnnnnnnnnnnnnnnnnnnnnnnnnnnnnnnnnnnnnnnnagtattgaagaatgtcgcaatataatcatgcagtttggtgttcgggaggtcacagctgcccaggttgcaagggttttgggaatgatggctcgaactcattcaggattaacagatggcattccattaca

SEQ ID NO: 18697 - DNA, 913 bp, Macaca Mulatta
aaaagaggaacattggggctgatattctctcaaatgaaaggagcacaaagaaaaaaatgggttctctatccacgtatatttccacttctatgaataagtgacttgattgatgtcagagaatctcacaccagattataacaataagacttttacatgttcaggatgtttatgtttcaagcattagactgataggaaatcttatctatttcttgtatgactagatgtagtcactgcagtggaaaccaacatacgaaagagcaggcggcacattttcatcctgacccctcagatcacgcacagcgaggagtttgcctacgagcaggaagttgccctgcatagtgccctcatccagaacgactccaaggtgattcttattgagatggaggctctgagcgagctggacatgctgcaggctgaagcgcttcaggactctctcaggcatctcatggaagtgcagggcaccatcaagtggagggaggaccacgttgccaataaacggtccctgaattccaaattctggaagcacgtgaggtaccaaatgcctgtgccaagcaaaatgcccagaaaggcctccagtttgacttccttggcagcccagaagcaatagtgcctgctgtgatgtgcaaaggcatctgagtttgaagctctcctaacttctcctagctggcccatgcccctgcactgaagtgtgaggagtaggaatgtcaaagggctccggcctcaggttttatctggtaactttgcttccatttccctgattctgggtggatgcaaaatgcccagaattttttctcctcaatcctcccccattctccagccaccattcccttccctttccctttttgcttgactctcttcactgtggtgtgggatgttttcactactctcttttcctctctctctgtcttgcttt

SEQ ID NO: 18698 - DNA, 192 bp, Macaca Mulatta
ctaacaggtactttggaagttcgtcttatgggctgccaagatatcctagagaatgtccctggacggtcaaaagcaacatcagttgcactgcctggttggagtccaagtgaaaccagatcatctttcatgagcagaacgagtaaaagtaaaagcggaagtagtcgaaatcttctaaaaaccgatgacttgtcc

SEQ ID NO: 18699 - DNA, 2416 bp, Macaca Mulatta
  misc_feature (1)...(2416): n = A,T,C or G
ggaaaaactactctgactgactgtcttatatctagcaatggaatcatctccagccgcctagcaggcaannnnnnnnnnnnnnnnnnnnnnnnnnnnnnnnnnnnnnnnnnnnnnnnnnnnnnnnnnnnnnnnnnnnnnnnnnnnnnnnnnnnnnnnnnnnnnnnnnnnnnnnnnnnnnnnnnnnnnnnnnnnnnnnnnnnnnnnnnnnnnnnnnnnnnnnnnnnnnnnnnnnnnnnnnnnnnnnnnnnnnnnnnnnnnnnnnnnnnnnnnnnnnnnnnnnnnnnnnnnnnnnnnnnnnnnnnnnnnnnnnnnnnnnnnnnnnnnnnnnnnnnnnnnnnnnnnnnnnnnnnnnnnnnnnnnnnnnnnnnnnnnnnnnnnnnnnnnnnnnnnnnnnnnnnnnnnnnnnnnnnnnnnnnnnnnnnnnnnnnnnnnnnnnnnnnnnnnnnnnnnnnnnnnnnnnnnnnnnnnnnnnnnnnnnnnnnnnnnnnnnnnnnnnnnnnnnnnnnnnnnnnnnnnnnnnnnnnnnnnnnnnnnnnnnnnnnnnnnnnnnnnnnnnnnnnnnnnnnnnnnnnnnnnnnnnnnnnnnnnnnnnnnnnnnnnnnnnnnnnnnnnnnnnnnnnnnnnnnnnnnnnnnnnnnnnnnnnnnnnnnnnnnnnnnnnnnnnnnnnnnnnnnnnnnnnnnnnnnnnnnnnnnnnnnnnnnnnnnnnnnnnnnnnnnnnnnnnnnnnnnnnnnnnnnnnnnnnnnnnnnnnnnnnnnnnnnnnnnnnnnnnnnnnnnnnnnnnnnnnnnnnnnnnnnnnnnnnnnnnnnnnnnnnnnnnnnnnnnnnnnnnnnnnnnnnnnnnnnnnnnnnnnnnnnnnnnnnnnnnnnnnnnnnnnnnnnnnnnnnnnnnnnnnnnnnnnnnnnnnnnnnnnnnnnnnnnnnnnnnnnnnnnnnnnnnnnnnnnnnnnnnnnnnnnnnnnnnnnnnnnnnnnnnnnnnnnnnnnnnnnnnnnnnnnnnnnnnnnnnnnnnnnnnnnnnnnnnnnnnnnnnnnnnnnnnnnnnnnnnnnnnnnnnnnnnnnnnnnnnnnnnnnnnnnnnnnnnnnnnnnnnnnnnnnnnnnnnnnnnnnnnnnnnnnnnnnnnnnnnnnnnnnnnnnnnnnnnnnnnnnnnnnnnnnnnnnnnnnnnnnnnnnnnnnnnnnnnnnnnnnnnnnnnnnnnnnnnnnnnnnnnnnnnnnnnnnnnnnnnnnnnnnnnnnnnnnnnnnnnnnnnnnnnnnnnnnnnnnnnnnnnnnnnnnnnnnnnnnnnnnnnnnnnnnnnnnnnnnnnnnnnnnnnnnnnnnnnnnnnnnnnnnnnnnnnnnnnnnnnnnnnnnnnnnnnnnnnnnnnnnnnnnnnnnnnnnnnnnnnnnnnnnnnnnnnnnnnnnnnnnnnnnnnnnnnnnnnnnnnnnnnnnnnnnnnnnnnnnnnnnnnnnnnnnnnnnnnnnnnnnnnnnnnnnnnnnnnnnnnnnnnnnnnnnnnnnnnnnnnnnnnnnnnnnnnnnnnnnnnnnnnnnnnnnnnnnnnnnnnnnnnnnnnnnnnnnnnnnnnnnnnnnnnnnnnnnnnnnnnnnnnnnnnnnnnnnnnnnnnnnnnnnnnnnnnnnnnnnnnnnnnnnnnnnnnnnnnnnnnnnnnnnnnnnnnnnnnnnnnnnnnnnnnnnnnnnnnnnnnnnnnnnnnnnnnnnnnnnnnnnnnnnnnnnnnnnnnnnnnnnnnnnnnnnnnnnnnnnnnnnnnnnnnnnnnnnnnnnnnnnnnnnnnnnnnnnnnnnnnnnnnnnnnnnnnnnnnnnnnnnnnnnnnnnnnnnnnnnnnnnnnnnnnnnnnnnnnnnnnnnnnnnnnnnnnnnnnnnnnnnnnnnnnnnnnnnnnnnnnnnnnnnnnnnnnnnnnnnnnnnnnnnnnnnnnnnnnnnnnnnnnnnnnnnnnnnnnnnnnnnnnnnnnnnnnnnnnnnnnnnnnnnnnnnnnnnnnnnnnnnnnnnnnnnnnnnnnnnnnnnnnnnnnnnnnnnnnnnnnnnnnnnnnnnnnnnnnnnnnnnnnnnnnnnnnnnnnnnnnnnnnnnnnnnnnnnnnnnnnnnnnnnnnnnnnnnnnnnnnnnnnnnnnnnnnnnnnnnnnnnnnnnnnnnnnnnnnnnnnnnnnnnnnnnnnnnnnnnnnnnnnnnnnnnnnnnnnnnnnnnnnnnnnnnnnnnaggtcgagtctatgctgtcttgtcaaagagagaaggtcgagtacttcaagaagaaatgaaagaaggaacagacatgttcatcatcaaggctgtgctgcctgttgctgaaagctttggttttgctgatgaaatcaggaagaggacaagtggcctggccagcccgcaactggtattcagccattgggaggtaaaaatccaagttcccattcattcc

SEQ ID NO: 18700 - DNA, 125 bp, Macaca Mulatta
caggcacaggagcagagaagacgggcgtgtgccccaagctccaggcggaccagaactgcacgcaggagtgcgtctcggacagcgaatgcgcggacaacctcaagtgctgcagcgcgggctgcgcc

SEQ ID NO: 18701 - DNA, 853 bp, Macaca Mulatta
gggctcctttccgcgctacctacagaagggtccatacggcgttgttctggattcccgtcgtaacttaaagggaaactttcacaatgtccggagcccttgatgtcctgcaaatgaaggaggaggatgtccttaagttccttgcagcaggaacccacttaggtggcaccaatcttgacttccagatggaacagtacatctataaaaggaaaagtgatggcatctacatcataaatctgaagaggacctgggagaagcttctgctggcggctcgtgccattgttgccattgaaaaccctgctgatgtcagtgttatatcctccaggaatactggccagagggccgtgctgaagtttgctgctgccactggagccactccaattgctggccgcttcactcctggaaacttcgctaaccagatccaggcagccttccgggagccacggacttcttgtggattactggacccccagggctgaacaccaagccctcttcacgggaaggcatactttaagtttaaccctaccctaaccaattggcttcttgatgtaaactacagtaaatcctccccttctggcaccctaaagtgggcaaaatttgcccaatcccacatggcaatacaataaaggggaaaccttctactcccaattggggttttagaaatatggagcgggaatgacctgtgattcggggaaaagtttattgacatcattgaaatggggaaaaccattttttctccctttgagaaacaacattctttgtgggaaaagatccaatggcacactgaaatctctataactcttctctaaccagaaaaagatacaccctagacaaaaataaaatatgtataaaaaac

SEQ ID NO: 18702 - DNA, 1392 bp, Macaca Mulatta
  misc_feature (1)...(1392): n = A,T,C or G
tactacagatcaacaaagatgacgtaactgccctgcattgtaaagtggtatgccttatccagaatggaagtttcaaggaagctttgaatgtcatcaatactcacaccaaagtgttagccannnnnnnnnnnnnnnnnnnnnnnnnnnnnnnnnnnnnnnnnnnnnnnnnnnnnnnnnnnnnnnnnnnnnnnnnnnnnnnnnnnnnnnnnnnnnnnnnnnnnnnnnnnnnnnnnnnnnnnnnnnnnnnnnnnnnnnnnnnnnnnnnnnnnnnnnnnnnnnnnnnnnnnnnnnnnnnnnnnnnnnnnnnnnnnnnnnnnnnnnnnnnnnnnnnnnnnnnnnnnnnnnnnnnnnnnnnnnnnnnnnnnnnnnnnnnnnnnnnnnnnnnnnnnnnnnnnnnnnnnnnnnnnnnnnnnnnnnnnnnnnnnnnnnnnnnnnnnnnnnnnnnnnnnnnnnnnnnnnnnnnnnnnnnnnnnnnnnnnnnnnnnnnnnnnnnnnnnnnnnnnnnnnnnnnnnnnnnnnnnnnnnnnnnnnnatgggactgaggaagacccacaggcagaactggccatcattcatggtcagatggcctatattctgcagcttcagggtcgaacagaggaggctttgcaactttacaatcaaataataaaactaaanaccaacagatgtgggattactagctgtaattgcaaataacatcattaccattaacaaggnnnnnnnnnnnnnnnnnnnnnnnnnnnnnnnnnnnnnnnnnnnnnnnnnnnnnnnnnnnnnnnnnnnnnnnnnnnnnnnnnnnnnnnnnnnnnnnnnnnnnnnnnnnnnnnnnnnnnnnnnnnnnnnnnggctgaacaatgccgcaaaatatctgccagtttacagtcccaaagtcccgagcatctcttacctgtgttaatccaagctgcccagctctgccgtgaaaagcagcacacaaaagcaatagagctgcttcaggnnnnnnnnnnnnnnnnnnnnnnnnnnnnnnnnnnnnnnnnnnnnnnnnnnnnnnnnnnnnnnnnnnnnnnnnnnnnnnnnnnnnnnnnnnnnnnnnnnnnnnnnnnnnnnnnnnnnnnnnnnnnnnnnnnnnnnnnnnnnnnnnnnnnnnnnnnnnnnnnnnnnnnnnnnnnnnnnnnnnnnnnnnnnnnnnnnnnnnnnnnnnnnnnnnnnnnnnnnnnnnnnnnnnnnnngcccaaatctcctgctcatttgtccttgataagagaagctgcaaacttcaaactcaaatatgggcggaagaaggaggcaattagtgacctacaacagctatggaanacaaaatccgaaagatattcacaccctggcacagctaatttctgcttactcacttgtagatccagagaaagccaaagc

SEQ ID NO: 18703 - DNA, 828 bp, Macaca Mulatta
  misc_feature (1)...(828): n = A,T,C or G
actggttttcgcatttgtcgattttcctttcagcctctgcctgtgagtttctggatattgtagagctgctgctccagtctggtgctgaccccactctccgagaccaggatggctgcctgccggaggaggtgacaggctgcaaaacagtttctttggtgctgcagcggcacacaactggcaaggcttaatcaaaagactggaaaaccacagtctgtaatagcataaggcttccattatgaaagaaaactacaaaaataatacttctttttctgcccatctttggtatgtattggctaataaaatcagttctgtggaactgggattttgaagcctcagcaattcattcttcttgcatacattctaggcagtacagttttggtgatgaacatgtgtactgtgcataatataatccaattctgctgagcatgctctgaaatttatcactgctttagagggtgggcagaataggagacagatcatatttcacaatattaaacatggctgcttttctaaaaaacatacagaagcaaatgtaaccattagggaaagtttcatgagatcccaacatggtagagatcaaatgatcttttgtagcattttgtacacctggtctgaataggcagctaaaatgtctattcttttggcagacaaaattgggaagataagaaagaagaggggtgttaagaaagagaaagcaaaggagaaagcagagttttgtcacataaggggtgtaanagtcagaacaaccagatttactgaaaatctcanaaccctggggcattttagaataatactttgttttcactctaggaattgaacagattctgg

SEQ ID NO: 18704 - DNA, 768 bp, Macaca Mulatta
gggggcacgggatgtgtgctccccatgccactggccggcactttgccactgtgtggcagttacctgtgccttagtcttttccactctgcaccccacctcgtgggcagatggtaacatgttttggatgctgtcagtgatgaatggtgagatggcagattgtcagagtcaattgatgacacctcatttatacttgtagtgtcattttatatgactagtttacaaaattggacattgagtttccaagtattgagataagggaatgtaaatagtattatatgtatcaggaaatttctcatcttgtttttgtttcatgggttttttaaagttttcatttctgccataaaaatctgtggtggaatacattttgttttcattaattcagtgacgttgactcttcagagtaattttagaatgcagcttgaaggtaaaaatttactttgtcaacgctgaagtctgctgtagtctttatacatctttctccagagaacatgatagtgtcaagtagatatatatttttataataggtatttagaagcacttgaaatattcttaatctctgcatgtgttacaattcagttatttctgtagtttgtaaactctaaagtgacgttactattaagagatgtgtaagttgtaattttgatttttgtggaaccattatttgttaatgttgggattctctgccctttttgatgtgaaagcttatatccctgaatgctgatacttaaagttttctatttcagacatcttctatgtggaaagttgaaa

SEQ ID NO: 18705 - DNA, 303 bp, Macaca Mulatta
  misc_feature (1)...(303): n = A,T,C or G
gctccgctttgctatatgaaatatgggagacgacagaccgtttgtgtgcaatgccccgggctgtggacagnnnnnnnnnnnnnnnnnnnnnnnnnnnnnnnnnnnnnnnnnnnnnnnnnnnnnnnnnnnnnnnnnnnnnnnnnnnnnnnnnnnnnnnnnnnnnncagatcaaactcctactccaactagattcctgaagaactgtgaggaggtgggactcttcaatgaactagctagctcctttgaacatgaaatcaagaaaagctgcagatgaggatgagaaaaaggcaagaagcaggactg

SEQ ID NO: 18706 - DNA, 1266 bp, Macaca Mulatta
  misc_feature (1)...(1266): n = A,T,C or G
ggtggctgaacctcgcaggtggcagagaggctcccctggggctgtggggctctgcgtggatccaatggggccgctggtgacctgggtggtccccctcctcctcctcttcctgcgatccaggcaggnnnnnnnnnnnnnnnnnnnnnnnnnnnnnnnnnnnnnnnnnnnnnnnnnnnnnnnnnnnnnnnnnnnnnnnnnnnnnnnnnnnnnnnnnnnnnnnnnnnnnnnnnnnnnnnnnnnnnnnnnnnnnnnnnnnnnnnnnnnnnnnnnnnnnnnnnnnnnnnnnnnnnnnnnnnnnnnnccttagctctgggcgctgttgctacttcgccacaggctcagccaccaggctgcagttctccgaccaggccggggtgtctgtgctgcacaccgtcacgctctgggtggaatcctgggccaggaaccggacagagaaatctcctgaggtgaccctgcagctctacaagtcagnnnnnnnnnnnnnnnnnnnnnnnnnnnnnnnnnnnnnnnnnnnnnnnnnnnnnnnnnnnnnnnnnnnnnnnnnnnnnnnnnnnnnnnnnnnnnnnnnnnnnnnnnnnnnnnnnnnnnnnnnnnnnnnnnnnnnnnnnnnnnnnnnnnnnnnnnnnnnnnnnnnnnnnnnngagtcctgcctctgtcccctggagatgaatgtggcccaggaatttcagctccgacgacggcggctggggagccaggggagttcctggagcaagtggagcagccctgtgtgtgttcccnnnnnnnnnnnnnnnnnnnnnnnnnnnnnnnnnnnnnnnnnnnnnnnnnnnnnnnnnnnnnnnnnnnnnnnnnnnnnnnnnnncagccaacccagctggagcttccagaaggctgtcaagggccggcgcctggagcggaggtcacctaccaactgcagctccacatgctgtcctgcccgtgtaaggccaaggccaccaggaccctgcccctggagaaaatgccctatctctcgggtgctgcctacaatgtggctgtcatctcctcgaaccgatttggtcctggcccaaaccagacgtggcacattcctgctgacacccacacannnnnnnnnnnnnnnnnnnnnnnnnnnnnnnnnnnnnnnnnnnnnnnnnnnnnnnnnnnnnnnnnnnnnnnnnnnnnnnnnnnnnnnnnnnnnnnnnnnnnnnnnnnnnnnnnnnnnnatttttagcagagatggggtttcaccacgttggccaggctggtcttgaactcctgacctcaggtgat

SEQ ID NO: 18707 - DNA, 506 bp, Macaca Mulatta
aaggacgtgattctgcaggatgatgatgtggaatgcaccatgaccgagaaaaggatcctgtctctggcccgcaatcacccctttctcactcagttgttctgctgctttcagacccctgatcgtctgttttttgtgatggagtttgtgaatgggggtgacttgatgttccacattcagaagtctcgtcgttttgatgaagcacgagctcgcttctatgctgcagaaatcatttcggctctcatgttcctccatgataaaggaatcatctatagagatctgaaactggacaacgtcctgttggaccacgagggtcactgtaaactggcagacttcggaatgtgcaaggaggggatttgcaatggcgtcaccacggccacattctgtggcacgccagactatatcgctccagagattctccaggaaatgctgtacgggcctgcagtagactggtgggcaatgggcgtgttgctctatgagatgctctgcggtcacgcgccctttgaggc

SEQ ID NO: 18708 - DNA, 760 bp, Macaca Mulatta
  misc_feature (1)...(760): n = A,T,C or G
gggagtgccccaggagccatgacaagcaaaggaacatacttgcctggagatagcctttgcgatatttaaatgtatgggttaattttttatccactttaataaccgttttattcctccttctacttctttgctttctctttccactctgaagccgtgggtacagaatctctgcaggcaagttgctccagagcacattgcaggacaaacctgtaacgaatagttacattcacggcatctggattcctaatccttttccgaaatggcaggtgtgagtggctgtataaaatattctatgtttaccttcaacttcttgttctggctatgtggtatcttgatcctagcattatcaatatgggtacgagtaggcagtgactctcaagggattttaaattctacaaatgtgagctctagctcccatgttgctgcggacatattgattgctgtaggtgccatcatcatgattatgggattcctgggatgctgcggtgctataaaagaaagtcgctgcatgcttctgttgtttttcataggcttgcttctgatcctgctcctgcaggtggcggcaggtatcctangagctgttttcaaatctgagtctgatcgcattatcaattgaaactctccatgacaacccaaagctttttgagcaccaccaggggaaaaatgccaaacaaattccagcaagcccttggcctgagtttcaaaaagaaagtttaaagtgctggtgggttttgaatcaaagggaaacctgcctgaattt

SEQ ID NO: 18709 - DNA, 418 bp, Macaca Mulatta
gagatgaattcctatggctccgaacttgttgccggttaactgtggcttgtgcccaggaagagccattcactcctgcccctgcccacacggcagttagcagggggagtgctggccacacccctgtgtgatgtgtgatgcccttggcaaagaatctaccggaatagattccaaggagcaggagtgctcaataaaatgttggtttccaacagactctggtcctctctgggggttggcagtacctgcacaggcttcctcttgccccagggaggcgcaccgtgttggtggggagggcagggcctgtgtgttcctaatcagatccttccctgcagccggggaccacaaatgccgtcttggtttggcccgacggtttgccttctcccttgtcctggtctgtggaataaaatccactgttaggggt

SEQ ID NO: 18710 - DNA, 728 bp, Macaca Mulatta
  misc_feature (1)...(728): n = A,T,C or G
ggatggttcctatcacgaagatgttggttaccttgttagtgagggcctcaagtccaaggccttatctctggagaaggcaaggaaggaggcggtgacagatgggctgaagcgagccctcaggnnnnnnnnnnnnnnnnnnnnnnnnnnnnnnnnnnnnnnnnnnnnnnnnnnnnnnnnnnnnnnnnnnnnnnnnnnnnnnnnnnnnnnnnnnnnnnnnnnnnnnnnnnnnnnnnnnnnnnnnnnnnnnnnnnnnnnnnnnnnnnnnnnnnnnnnnnnnnnnnnnnnnnnnnnnnnnnnnnnnnnnnnnnnnnnnnnnnnnnnnnnnnnnnnnnnnnnnnnnnnnnnnnnnnnnnnnnnnnnnnnnnnnnnnnnnnnnnnnnnnnnnnnnnnnnnnnnnnnnnnnnnnnnnnnacgtaccagcggaagctccggcaaaagcagctgcagcagcagttccgggagcggatggagaagcatcacgttcacgtctccaggccgtccgctgagaagagtgaggnnnnnnnnnnnnnnnnnnnnnnnnnnnnnnnnnnnnnnnnnnnnnnnnnnnnnnnnnnnnnnnnnnnnnnnnnnnnnnnnnnnnnnnnnnnnnnnnnnnnnnagactcttgaagacaactctgaaaagtgggctgtgactccagatgccggggatggtgtggccaagccctcgtctagagcagacccagcccaggccgctgacacactagc

SEQ ID NO: 18711 - DNA, 327 bp, Macaca Mulatta
tgttaaacttgttcttatctgtttatatgtgaagataatggatatttggggagggatagtgtctgaattccatctatatagtctgaaaaggacagtacttctgaagagttacacgtgtaggagttagggctacacatatttttgttagggctttattgtgggccttaagaggaattgcaggtgcccgtcttgattagagtggggcttgtttcagggaaaagtagggatggcagcttcaaaagggtgttggaggggtggttgaggtgggttaactggagcaaggagggaggggtggtgctgagaggggatcatggttgttttctctcc

SEQ ID NO: 18712 - DNA, 612 bp, Macaca Mulatta
  misc_feature (1)...(612): n = A,T,C or G
cacagtgagggtgggcgtagggaaggcgctggcagggtgggatgaggtcttgccttttactcataactgaggggctggctgcgcacagcacgggctcaaggcttactgatgggcccacgaatgtgtcttgcgagcctgtgaagaagcagcaggcaggtctggccggggcgggagggccagcgcccatcggggttgctccctttcagatctgcctgaagtgccgaggggtgaaggagaccagcatgcctgtgtattgcagctgcgcagggggcttcgccctcaccatccacacccaggtgggctttccttcatctgcctcggttcagcctggcctccttggcctcctctctgagtggactggggtctcactgtgcctgtttattcctgcaggtcttcatggaacagatcggaatcttccggaacattgcccagcactacggcatgtcgtacctcctggaaaccctggagtggctgctgcagaagaacccacagcggggccgttagccagccccgggccctgggcacctctgcgtccgtgccaggcctcctgatgccaaggccnacatcccgtgctttcagtgaccagaccactgaccaccctgactgtccaaa

SEQ ID NO: 18713 - DNA, 593 bp, Macaca Mulatta
acacatgtggaatgtaaagttccttaacccaatgtgttcaacttgttgataacgtttagatctattgttacttcttggcactttagcagagaaagttatatgctgaggagaatgaaatacagaaagctggtcacttgattaatttagaatgtagggaggatggaagagatcaccctgtccttctaatgtcttccaaatcttttctgttaggtctgtcagctgctgctggaatcggtgttgatgaccttcgtcgcttatgcatactcaggatgagttttgtgaaaggctggggaccagattacccaagacagagcatcaaagaaacaccttgctggattgaaattcacttacaccgggccctccagctcctagacgaagtacttcacaccatgccgattgcagacccacaacctttagactgaggtcttttactgttggggcccttaaccttatcaggatggtggactacaaaatacaatcctgtttataatctgaagatatatttcacttttgttctgctttatcttttcataaagggttgaaaatgtgtttgctgccttgctcctagcagacagaaactggattaaaacaat

SEQ ID NO: 18714 - DNA, 946 bp, Macaca Mulatta
atgagcataagaaagtgggagcttatggagggaggctgacctcagctggaaggactttttaccagaaggagaagatgtacataattttcttttggagcagaagttggacttcatagagtctgacagtccctgttcctctgaagcactttcaaagaaagaattgtctgccgaagagctgtataagcgactcgagaaactcattattgaggacaaagcgaatgatgaacagatctttgattgggtagaggctaatctagacgaaagccagatgagttcacctacattccttagagctttaatgactgctgtttgtaaagcagctattatagccgaatcttctaacttcagagtggacactgctgttatcaagcagagagtgccgatcttactcaagtacctagactcagatacagagaaggaactgcaagcactttatgcactacaagcatcgatagtaaaactcgatcaacctgccaatttgctgcgaatgttttttgattgcctgtatgatgaggaggtgatctccgaggatgccttctacaaatgggagagcagcaaggaccctgcagagcagaatgggaagggcgtggccctgaaatctgtcacggcattcttcacgtggctgcgggaagcagaagaggagtctgaggataactaaaacttcaaatacacaaaaggaaacaaacaatttaagtatttttttaaaaagtttcacgtcttcgccaatcacagtgcagcaaggccaattctcgcagaaacccccacgtgtgcacgagtgggagaggggaaagagaaaaaaaggtgatcatggaggaaataggtactggaaaaaagtaaacttcaaaccttagggcgggagcactaaaaccaaaatacatgtattatttatacgaaatactttctgtttaatcttttctttttaaaccaggacaaaaaaaatgtttac

SEQ ID NO: 18715 - DNA, 188 bp, Macaca Mulatta
agaacacacatctggctttttgttagaagtattcatggaaagagtggtacgtggtgggatgagcatctttctgaagaaaatgtcccattcattaagcagttggtctctgatgaagataaagcccaattagcaagtaaactatgtcctctgaaagatgaaccatggcctatacatccttgggaaccagg

SEQ ID NO: 18716 - DNA, 380 bp, Macaca Mulatta
  misc_feature (1)...(380): n = A,T,C or G
ggcttcccctcgcttggcggctgcggcggcttctttgtttcgtgaggagaagcgagacgcccannnnnnnnnnnnnnnnnnnnnnnnnnnnnnnnnnnnnnnnnnnnnnnnnnnnnnnnnnnnnnnnnnnggaggccactgtctgcagctcccgtgaagatgtccactccagacccacccctgggcggaactcctcggccgggtccttccccgggccctggcccttcccctggagccatgctgggccctagcccgggtccctcaccgggctccgcccacagcatgatggggcccagcccggggccgccctcagcaggacaccccatccccacccaggggcctggagggtaccctcaggacaacatgcaccagatgcacaa

SEQ ID NO: 18717 - DNA, 2270 bp, Macaca Mulatta
  misc_feature (1)...(2270): n = A,T,C or G
ggtgctgctcctacgtgggtcgccgcggcgggggcccccaggccatctccatcggcaagaactgtgacaagttcggcatcgtggtccacgagctgggccacgtcgtcggcttctggcacgaacacactcggccagaccgggaccgccacgtttccatcgttcgtgagaacatccagccagnnnnnnnnnnnnnnnnnnnnnnnnnnnnnnnnnnnnnnnnnnnnnnnnnnnnnnnnnnnnnnnnnnnnnnnnnnnnnnnnnnnnnnnnnnnnnnnnnnnnnnnnnnnnnnnnnnnnnnnnnnnnnnnnnnnnnnnnnnnnnnnnnnnnnnnnnnnnnnnnnnnnnnnnnnnnnnnnnnnnnnnnnnnnnnnnnnnnnnnnnnnnnnnnnnnnnnnnnnnnnnnnnnnnnnnnnnnnnnnnnnnnnnnnnnnnnnnnnnnnnnnnnnnnnnnnnnnnnnnnnnnnnnnnnnnnnnnnnnnnnnnnnnnnnnnnnnnnnnnnnnnnnnnnnnnnnnnnnnnnnnnnnnnnnnnnnnnnnnnnnnnnnnnnnnnnnnnnnnnnnnnnnnnnnnnnnnnnnnnnnnnnnnnnnnnnnnnnnnnnnnnnnnnnnnnnnnnnnnnnnnnnnnnnnnnnnnnnnnnnnnnnnnnnnnnnnnnnnnnnnnnnnnnnnnnnnnnnnnnnnnnnnnnnnnnnnnnnnnnnnnnnnnnnnnnnnnnnnnnnnnnnnnnnnnnnnnnnnnnnnnnnnagccatctgcgggggtgatgtgaaaaaggactatggccacattcaatcacccaactacccagatgattaccggcccagcaaagtctgcatctggcggatccaggtgtctgagggtttccacgtgggcctcacattccagtcctttgannnnnnnnnnnnnnnnnnnnnnnnnnnnnnnnnnnnnnnnnnnnnnnnnnnnnnnnnnnnnnnnnnnnnnnnnnnnnnnnnnnnnnnnnnnnnnnnnnnnnnnnnnnnnnnnnnnnnnnnnnnnnnnnnnnnnnnnnnnnnnnnnnnnnnnnnnnnnnnnnnnnnnnnnnnnnnnnnnnnnnnnnnnnnnnnnnnnnnnnnnnnnnnnnnnnnnnnnnnnnnnnnnnnnnnnnnnnnnnnnnnnnnnnnnnnnnnnnnnnnnnnnnnnnnnnnnnnnnnnnnnnnnnnnnnnnnnnnnnnnnnnnnnnnnnnnnnnnnnnnnnnnnnnnnnnnnnnnnnnnnnnnnnnnnnnnnnnnnnnnnnnnnnnnnnnnnnnnnnnnnnnnnnnnnnnnnnnnnnnnnnnnnnnnnnnnnnnnnnnnnnnnnnnnnnnnnnnnnnnnnnnnnnnnnnnnnnnnnnnnnnnnnnnnnnnnnnnnnnnnnnnnnnnnnnnnnnnnnnnnnnnnnnnnnnnnnnnnnnnnnnnnnnnnnnnnnnnnnnnnnnnnnnnnnnnnnnnnnnnnnnnnnnnnnnnnnnnnnnnnnnnnnnnnnnnnnnnnnnnnnnnnnnnnnnnnnnnnnnnnnnnnnnnnnnnnnnnnnnnnnnnnnnnnnnnnnnnnnnnnagtcttggagggggcaggggaccgacactcacatctgtcaggcctggagttactgttctgcccccatgccccggtcgacactatgcccgccccaccctcagcccnnnnnnnnnnnnnnnnnnnnnnnnnnnnnnnnnnnnnnnnnnnnnntgccccatcgcacaagaaacctgcagaggacccccactgggggcatcgaggctcagccctcagggcctggggcatctgactctggcccccgagaaggggggctatttggacttttgggacacccaccgaggagaccctaagccaagaaggagaagaaagagcctgaagaccttcagtctgacccctgccaccttccggggcatttgggcactgtaggnnnnnnnnnnnnnnnnnnnnnnnnnnnnnnnnnnnnnnnnnnnnnnnnnnnnnnnnnnnnnnnnnnnnnnnnnnnnnnnnnnnnnnnnnntgccaggcctcccggaccccttgttactcaggaacctcaccttggacggaatgggatgggggcttcggtgcccacccaccccccgcctccactctgccattccggcccacctccctctggccggacagaactggtgctctcttctccccactgtgcccgtccacggaccggggacccttccccgtgccctaccccctcccattttaatggtgtctgtgacatttcctgttgtgaagtaaaagagggacccctgcgtcctg

SEQ ID NO: 18718 - DNA, 78 bp, Macaca Mulatta
agtgtcgagctttcctggcaggaaccagagcatcccaatggagtcatcacagaatatgaaatcaagtattacgagaaa

SEQ ID NO: 18719 - DNA, 157 bp, Macaca Mulatta
  misc_feature (1)...(157): n = A,T,C or G
ngtacggaagaccttcttcagcctggcattctgtgacttctgccttaagtttctgttccatggcttccgttgccaaacctgtggctacaagttccaccagcattgttcctccaaggtccccacagtctgtgttgacatgagtaccaaccgccaacag

SEQ ID NO: 18720 - DNA, 1846 bp, Macaca Mulatta
  misc_feature (1)...(1846): n = A,T,C or G
gaactcagaagaacacagctgtgcgcgcccagaggctcggggggcgggagaggataagtcggaaggaggaggcgggacctacacctcaggaaagccggaggattggggcacgaagcggggctttgatgacccgcaaagggcgaggcatgcaggaggtggaggaattaagtgaaacgaggaaggtcgttaatcaggaccctgtgggctaggccttaaggggcatggtccttgtctgggcggggtctttgggcgccgactaggcctggttctgggtgggcggggctgctgtgggcggctcctgctgtggaaatgccggcccgcgcgcttctgaacaggcgcatggggcatcgtactctagcctccgctcctgccctgtgggcctctatcccgtgccctcgctctaaagtgcgcctggacctggttctgccttctggacagtccttccggtgnggtggagggagcaaagtcctgcacactggagtggtgtactagcggatcaagtatggacactgactcagactgaggagcagctccactgcactgtgtaccgaggagacaagagccagcctggcaggcccacaccagacgagctggaggccgtgcgcaagtacttccagctagatgtcaccctggctcaactgtatcaccactggggttctgtggactcccacttccaagaggtggctcagaaattccaaggtgnnnnnnnnnnnnnnnnnnnnnnnnnnnnnnnnnnnnnnnnnnnnnnnnnnnnnnnnnnnnnnnnnnnnnnnnnnnnnnnnnnnnnnnnnnnnnnnnnnnnnnnnnnnnnnnnnnnnnnnnnnnnnnnnnnnnnnnnnnnnnnnnnnnnnnnnnnnnnnnnnnnnnnnnnnnnnnnngggccagaggtggaggctcatctcaggaagctgggcctgggctaccgtgcccgctacgtgagtgccagtgcccgagccatcctggaagaacagggcgggctaccctggctgcagcagctacgggaggcctcctatgaggaggcccacaaggccctctgtaccctgccgggagtgggcaccaaggtnnnnnnnnnnnnnnnnnnnnnnnnnnnnnnnnnnnnnnnnnnnnnnnnnnnnnnnnnnnnnnnnnnnnnnnnnnnnnnnnnnnnnnnnnnnnnnnnnnnnnnnnnnnnnnnnnnnnnnnnnnnnnnnnnnnnnnnnnnnnnnnnnnnnnnnnnnnnnnnnnnnnnnnnnnnnnnnnnnnnnnnnnnnnnnnnnnnnnggccttcttggcaatgcatttgatggccaccagcttctgcgtccttttatcttctgccaggatcacctccgagaaggcccccctatggggagaggggattcataaggtgaagaactggaaccccagcttccctccagcctctcctccattccctatgggttctgtgaccactgctggaccagggatgtggatgaccctctcctagtcactcatctatcccctggctccagagatggtcacatgacccaggcctggccaaagtagtctctcccctggtaacagtaattggtcatgtgatgcaagccagattcctagctctttaagaatgaggctgctgctgagctggtaggatgtaagcctggagctaatgatgatcatctttgtcaccacttggggacagcctgcttgggaatgaaattaacacaaaggaagtccaacctgagaaatggccaaagtcatttcatgataacattatgtggccctctggatccagccatgcctgaagtctacctctgagctttttgattttgtgtgcagttggttcatccctttttctgctaatttgagtcatggctaatttaacacc

SEQ ID NO: 18721 - DNA, 559 bp, Macaca Mulatta
cttaaggatttaccgtggctttgagtaatgagaatttcgaaaccacatttgagaagtgtttccatccagtgctacttgtgtttacttctaaacagtcattttctaactgaagctggcattcatgtcttcattttgggctgtttcagtgcagggctccctaaaacagaagccaactgggtgaatgtaataagtgatttgaaaaaaattgaagatcttattcaatctatgcatattgatgctactttatatacagaaagtgatgttcaccccagttgcaaggtaacagcaatgaagtgctttctcttggagttgcaagttatttcacatgagtccggagatacagatattcatgatacagtagaaaatcttatcatcctagcaaacaacatcttgtcttctaatgggaatataacagaatctggatgcaaagaatgtgaggaactagaggaaaaaaatattaaagaatttttgcagagttttgtacatattgtccaaatgttcatcaacacttcttgattgcaactgattctttctaaagtgtttctgttactaacgaaca

SEQ ID NO: 18722 - DNA, 122 bp, Macaca Mulatta
ggcatggaacattgtgagaaatttgaaatctcagaaactagtgtgaacagagggccagaaaaaatcagaccagaatgttttgagctacttcgggtacttggtaaagggggctatggaaaggt

SEQ ID NO: 18723 - DNA, 1965 bp, Macaca Mulatta
  misc_feature (1)...(1965): n = A,T,C or G
ttgacccggacttgggactttgcgaaaggatcgcggggcccggagaggnnnnnnnnnnnnnnnnnnnnnnnnnnnnnnnnnnnnnnnnnnnnnnnnnnnnnnnnnnnnnnnnnnnnnnnnnnnnnnnnnnnnnnnnnnnnnnnnnnnnnnnnnnnnnnnnnnnnnnnnnnnnnnnnnnnnnnnnnnnnnnnnnnnnnnnnnnnnnnnnnnnnnnnnnnnnnnnnnnnnnnnnnnnnnnnnnnnnnnnnnnnnnnnnnnnnnnnnnnnnnnnnnnnnnnnnnnnnnnnnnnnnnnnnnnnnnnnnnnnnnnnnnnnnnnnnnnnnnnnnnnnnnnnnnnnnnnnnnnnnnnnnnnnnnnnnnnnnnnnnnnnnnnnnnnnnnnnnnnnnnnnnnnnnnnnnnnnnnnnnnnnnnnnnnnnnnnnnnnnnnnnnnnnnnnnnnnnnnnnnnnnnnnnnnnnnnnnnnnnnnnnnnnnnnnnnnnnnnnnnnnnnnnnnnnnnnnnnnnnnnnnnnnnnnnnnnnnnnnnnnnnnnnnnnnnnnnnnnnnnnnnnnnnnnnnnnnnnnnnnnnnnnnnnnnnnnnnnnnnnnnnnnnnnnnnnnnnnnnnnnnnnnnnnnnnnnnnnnnnnnnnnnnnnnnnnnnnnnnnnnnnnnnnnnnnnnnnnnnnnnnnnnnnnnnnnnnnnnnnnnnnnnnnnnnnnnnnnnnnnnnnnnnnnnnnnnnnnnnnnnnnnnnnnnnnnnnnnnnnnnnnnnnnnnnnnnnnnnnnnnnnnnnnnnnnnnnnnnnnnnnnnnnnnnnnnnnnnnnnnnnnnnnnnnnnnnnnnnnnnnnnnnnnnnnnnnnnnnnnnnnnnnnnnnnnnnnnnnnnnnnnnnnnnnnnnnnnnnnnnnnnnnnnnnnnnnnnnnnnnnnnnnnnnnnnnnnnnnnnnnnnnnnnnnnnnnnnnnnnnnnnnnnnnnnnnnnnnnnnnnnnnnnnnnnnnnnnnnnnnnnnnnnnnnnnnnnnnnnnnnnnnnnnnnnnnnnnnnnnnnnnnnnnnnnnnnnnnnnnnnnnnnnnnnnnnnnnnnnnnnnnnnnnnnnnnnnnnnnnnnnnnnnnnnnnnnnnnnnnnnnnnnnnnnnnnagaaatgtcacgaaaacagcgagcaggggaggagcgagatgcatgcccagaatcccatggaatcttccctgccccagctttctctcatggatgtaaaatgtgaaacgcccaactgtcccttcttcatgtctgtgaacacccagcctttatgccatgagtgctcagagaggcggcaaaagaatcaaaacaaactcccaaagctgaactccaagccgggccccgaggggctccctggcatggcgctcggggcctctcggggagaagcctatgagcccttggcgtggaaccccgaggagcccactggggggcctcattctgctccaccgacagcacccagcccttttctgttcagtgagaccactgccatgaagtgcaggagccccggctgccccttcacactgaatgtgcagcacaacggattttgtgaacgttgccacaacgcccggcaacttcacgccagccacgccgcagaccacacaaggcacttggatcccgggaagtgccaagcctgcctccaggatgtcaccaggacatttaatgggatctgcagtacttgcttcaaaaggactacagcagaggcctcctccagcctcagcaccagcctccctccctcctgtcaccagcgttccaagtcagatccctcacagctcgtccggagcccctccccgcattcttgccacagagctggaaatgacgcccccgctggctgcctgtctcaagctgcacggactccgggggacaggacggggaccagcaagtgcagaaaagctggctgcatgtattttgggactccagaaaacaagggcttttgcacactgtgtttcatcgagtacagagaaaacaaa

SEQ ID NO: 18724 - DNA, 591 bp, Macaca Mulatta
  misc_feature (1)...(591): n = A,T,C or G
ttgaacaatccggtgtgtcaggacccccaaatgtcacttctgcataaagcatgtatgtcatctattttttcttcaataaagagatttaatagccatttcaagaaatcccataaagaacctctctatgtcnnnnnnnnnnnnnnnnnnnnnnnnactcttgtctaatattcgtctataagggattaattttcagaccctttaataagtgagtgccataagaaagtcaatatatattgtttaaaagatatttcagtctaggaaagattttccttctcttggaatgtgaagatctgtcgattcatctccaatcatatgcattgacatacacagcaaagaagatataggcagtaatatcaacactgctatatcatgtgtaggacatttcttatccattttttctcttttacttgcatagttgctatgtgtttctcattgtaaaaggctgccgctgggtggcagaagccaagagaccttattaactaggctatatttttcttaacttgatctgaaatccacaattagaccacaatgcacctttggttgtatccataaaggatgctagcctggcttgtactaatgtgttatatacta

SEQ ID NO: 18725 - DNA, 679 bp, Macaca Mulatta
  misc_feature (1)...(679): n = A,T,C or G
agatgctgaaggacgaggttcacaccctcacatagcaactccatgtttcacaaccggcacctcttcaaggacaaggtggtgctggatgtgggctcaggcacgggcatcctctgcacgttcgctgccgaggccnnnnnnnnnnnnnnnnnnnnnnnnnnnnnnnnnnnnnnnnnnnnnnnnnnnnnnnnnnnnnnnnnnnnnnnnnnnnnnnnnnnnnnnnnnnnnnnnnnnnnnnnnnnnnnnnnnnnnnnnnnnnnnnnnnnnnnnnnnnnnnnnnnnnnnnnnnnnnnnnnnnnnnnnnnnnnnnnnnnnnnnnnnnnnnnnnnnnnnnnnnnnnnnnnnnnnnnnnnnnnnnnnnnnnnnnnnnnnnnnnnnnnnnnnnnnnnnnnnnnnnnnnnnnnnnnnnnnnnnnnnnnnnnnnnnnnnnnnnnnnnnnnnnnnnnnnnnnnnnnnnnnnnnnnnnnnnnnnnnnnnnnnnnnnnnnnnnnnnnnnnnnnnnnnnnnnnnnnnnnnnnnnnnnnnnnnnnnnnnnnnnnnnnnnnnnnnnnnnnnnnnnnnnnnnaggaggtggacatctacactgtcaaggtgggagaccggacgttcacctcccgcttctgcctgcaggtgaagcagaatgactatgtgcacgccctggtggcctacttcaatatccagt

SEQ ID NO: 18726 - DNA, 1202 bp, Macaca Mulatta
aactggtggagtttctccagcagtctgctgtggccatgtacatgctctatgagaagcagaagcagcagtacgtgccccactgcatgctggtgagcaaccgcgtctcctggtgggggagcacgctggccatgctgcagcgcctcaaggagcagcagttcgtcatcgccggggtcctggtggaggacagcaacaaccaccacctgatgctggaggccagcgagtgggccaccatcgaggggctggtcgagctcctgcagcccttcaagcaggtggccgagatgctgtcagcctccaggtaccccaccatcagcatggtgaagccgctgctgcacatgctcctcaacaccacgctcaacatcaaggagaccgactccaaggagctcagcatggccaaggaggtcatcgccaaggagctctccaagacctaccaggagacgcctgagattgacatgtttctcaacgtcgccaccttcctggacccccgctacaagaggctgcccttcctctctgccttcgagcggcagcaggtggagaaccgcgtagtggaagaggccaagggcctgctggacaaggtcaaagacggcggctaccggccggccgaggacaagatcttcccggtgcccgaggaacctcccgtaaagaagctcatgcggacgtccacgcctccgcccaccagcgtcatcaacaacatgctggccgagatcttctgccagacgggcggcgtggaggaccaggaagaatggcacgcccaggtggtggaggagctgagcaacttcaaatcccagaaggtgctcggcctcaacgaagaccccctcaagtggtggtcggaccgcctggccctcttccccctgctgcccaaggtgcttcagaagtactggtgcgtgacagccacgcgcgtcgcgcctgagcgtctctttggttccgccgccaacgtggtcagcgccaagaggaaccggctggcccccgcgcacgtggacgagcaggtgtttctgtatgagaacgcccggagtggggcagaggcagaacccgaggaccaggatgagggggagtggggcctggaccaggaacaggtgttctccttgggggacggcgtcagcggcggtttctttggcatcagggacagcagcttcctgtagcgaggaagcgtcttgtcttacaggtcatccccgcagcagcccattggatgctttgctgtaaatact

SEQ ID NO: 18727 - DNA, 113 bp, Macaca Mulatta
aggtgggaaactacctccgtatgttccgaggttctctgtacaagagatacccctcactctggaggcgactagccactgtggaagagaggaagaaaatagttgcatcgtcacat

SEQ ID NO: 18728 - DNA, 745 bp, Macaca Mulatta
gggactgaccacagattccctggatagtgtagtggtagatttttccacaagatagcgcaattggcaaaccatgcttggttgcgttaggacaaaatcctagtttttctttctttaccttttctatcttgatgaaaatgttgcacattctatagttgcaaaacacataaaaggggacttaacatttcacgttgtatcttaccttgcagtgaatgcaagggttacttttctctggggacctcccccattacccaggttcctactctggactcccaattcccatggctcccaaaccatgctgcatggtttggttaatgaaatccagtagctaaccccactgtacttccacatgcctggcctacaaagggtgatatacaggtcttatatccctatacggaatttgtccatcaatcacataaaaacaaacagtgccttctgccctctgcccagatatttccagcatgttcccaaggtttccaagttagccttccctaaggactctgggagcctctcagtttatgatctggccaaggtccccattttcttctgtcccctatgtttaagtcgggatttttacagagggagctgtctccagacagctccatcaggaaccaagcaaaggccagatagcctgacagaatagctagtggtattgtgtatacgggaagggacgtgtgtgtcattggttatttgagttatgctgtttgtttaaggggaaaataacagttaattattaaataaccattat

SEQ ID NO: 18729 - DNA, 119 bp, Macaca Mulatta
caaacattacaaatacaaagagggttgtagtataccattacgtgtatcacagatcttattgtacacattttgtactaaagaaaaccctgaagcagttgctcaaatattgttcaacatca

SEQ ID NO: 18730 - DNA, 1629 bp, Macaca Mulatta
  misc_feature (1)...(1629): n = A,T,C or G
agaagctgcgggcgtcgggcgcgggcaaggccatcggcgtcctgaccagcggcggcgacgcgcaagnnnnnnnnnnnnnnnnnnnnnnnnnnnnnnnnnnnnnnnnnnnnnnnnnnnnnnnnnnnnnnnnnnnnnnnnnnnnnnnnnnnnnnnnnnnnnnnnnnnnnnnnnnnnnnnnnnnnnnnnnnnnnnnnnnnnnnnnnnnnnnnnnnnnnnnnnnnnnnnnnnnnnnnnnnnnnnnnnnnnnnnnnnnnnnnnnnnnnnnnnnnnnnnnnnnnnnnnnnnnnnnnnnnnnnnnnnnnnnnnnnnnnnnnnnnnnnnnnnnnnnnnnnnnnnnnnnnnnnnnnnnnnnnnnnnnnnnnnnnnnnnnnnnnnnnnnnnnnnnnnnnnnnnnnnnnnnnnnnnnnnnnnnnnnnnnnnnnnnnnnnnnnnnnnnnnnnnnnnnnnnnnnnnnnnnnnnnnnnnnnnnnnnnnnnnnnnnnnnnnnnnnnnnnnnnnnnnnnnnnnnnnnnnnnnnnnnnnnnnnnnnnnnnnnnnnnnnnnnnnnnnnnnnnnnnnnnnnnnnnnnnnnnnnnnnnnnnnnnnnnnnnnnnnnnnnnnnnnnnnnnnnnnnnnnnnnnnnnnnnnnnnnnnnnnnnnnnnnnnnnnnnnnnnnnnnnnnnnnnnnnnnnnnnnnnnnnnnnnnnnnnnnnnnnnnnnnnnnnnnnnnnnnnnnnnnnnnnnnnnagactcggagccgcgggtcccgactgaacatcatcattatcgctgagggtgccatcgaccgcaacgggaagcccatctcgtccagctacgtgaaggannnnnnnnnnnnnnnnnnnnnnnnnnnnnnnnnnnnnnnnnnnnnnnnnnnnnnnnnnnnnnnnnnnnnnnnnnnnnnnnnnnnnnnnnnnnnnnnnnnnnnnnnnnnnnnnnnnnnnnnnnnnnnnnnnnnnnnnnnnnnnnnnnnnnnnnnnnnnnnnnnnnnnnnnnnnnnnnnnnnnnnnnnnnnnnnnnnnnnnnnnnnnnnnnnnnnnnnnnnnnnnnnnnnnnnnnnnnnnnnnnnnnnnnnnnnnnnnnnnnnnnnnnnnnnnnnnnnnnnnnnnnnnnnnnnnnnnnnnnnnnnnnnnnnnnnnnnnnnnnnnnnnnnnnnnnnnnnnnnnnnnnnnnnnnnnnnnnnnnnnnnnnnnnnnnnnnnnnnnnnnnnnnnnnnnnnnnnnnnnnnnnnnnnnnnnnnnnnnnnnnnnnnnnnnnnnnnnnnnnnnnnnnnnnnnnnnnnnnnnnnnnnnnnnnnnnnnnnnnnnnnnnnnnnnnnnnnnnnnnnnnnnnnnnnnnnnnnnnnnnnnnnnnnnnnnnnnnnnnnnnnnnnnnnnnnnnnnnnnnnnnnnnnnnnnnnnnnnnnnnnnnnnnnnnnnnnnnnnnnnnnnnnnnnnnnnnnnnnnnnnnnnnnnnnnnnnnnnnnnnnnnnnnnnnnnaggcctatgaaggggtgctgcagctggtggaggctcgagggcgttacgaggagctctgcatcgtcatgtgcgtcatcccagccaccatcagcaacaacgtccctggcaccgacttcagcctgggctctgacactgctgtaaacgctgccatgga

SEQ ID NO: 18731 - DNA, 426 bp, Macaca Mulatta
tcacatagctggcctcactatagtgcagacgatgtttcaatatttcatggcgcaagagtttatctctggagagtgattagtatcaacgtaatcattgcgttcagagaaggaagttaggctaccagcatatttgaatcccagcagaaatcaaaataatccatactatctagaagactttactgataccaagtccagcgatgacatcgtgtaggatgttcagtaaatattaactgagccatgtcaatatagagcttctcagtttcgtatagcgtttcatactaaagattcagcagatggaaaatgctattaatttggttggtgaccacatagataaaatcagtcccacgttggctcagttcaaattgttgttccctgatacaaagagaacttgattaccttaaagctgaaaagccaaacacagctagc

SEQ ID NO: 18732 - DNA, 1346 bp, Macaca Mulatta
  misc_feature (1)...(1346): n = A,T,C or G
tggnnnnnnnnnnnnnnnnnnnnnnnnnnnnnnnnnnnnnnnnnnnnnnnnnnnnnnnnnnnnnnnnnnnnnnnnnnnnnnnnnnnnnnnnnnnnnnnnnnnnnnnnnnnnnnnnnnnnnnnnnnnnnnnnnnnnnnnnnnnnnnnnnnnnnnnnnnnnnnnnnnctgtgaagtcacattgttttattaatacatcataaatataaaacctgactcataccttgatttctctacatgcagcactctcactatgaatttataagaaaagaaactgttaatagaatccagaaaatgtactactagttgaggctttgagtactcgaaagcctatttaaatacaacaacattttaaaataagacgtatttaacatttgcaagaaaaattcagtttattgagactcatattgaacatttggccatgactggaagctggtgagtcaataccatgtctcttgatatggaaagtcttcatctatcacagaaaaattcattttcgggtagctgtctctcttacacaaaagcagaccggttacaaatataactaatattaatatgaaaccaaatggtaacaagaaaagtagcaaagttttcttcaatagttcttcaacttcccaacattgtttatcactccactcactccaaattccatcatctgagcaataaatattcactttgcttcttactacaaagcataactgtcgggtttcatttgttattttcaaggtgtacgtttcattttcaactgtggtagtcaccaaggtagtatcatcttctctgatctcaatttcataaacaaaacaccttgctggaataggtcccaaaggtatgctccatttcagcctcgtgccgaattcggcacgagggtttgtctgaatccagcaccatgacggaactggagacagccatgggcatgatcatagacgtcttttcccgatattcaggcagcgagggcagcacgcagaccctgaccaagggggagctcaaggtgctgatggagaaggagctacccggcttcctgcagagtggaaaggacaaggatgccgtggataaactgctcaaggacctggatgctaatggagacgctcaggtggacttcagcgagttcatcgtgtccgtggctgcaatcacttctgcctgtcacaagtactttgagaaggcaggactcaaatgatgccctggagaggcagattcctggcagagccatggccccaggcttcccaaaagtgtttgttggcaattattcccctagactgagcctgctcatctacctcagatgaataaatgctcatgaaatgnnnnnnnnnnnnnnnnnnnnnngtgccgnnnnnnnnnnnnnnnnnnnnnna

SEQ ID NO: 18733 - DNA, 281 bp, Macaca Mulatta
  misc_feature (1)...(281): n = A,T,C or G
ggggagatttacttactttgaacttgttccaacccaaaagtaagcactaagtctcattttatgagaccaccatttcttaatatcacatccagtgcacctttgtctttctgccatatctgaaatagaactactgttaattcacgtagataaacataagactaaagaagtatatttacattatctgaagagttttgttgcagctatgagtttgtgtggcaaattcgataataaagtattatttnnnnnnnnnnnnnnnnnnnnnnnnnnnnnnnnnnnnnnnn

SEQ ID NO: 18734 - DNA, 627 bp, Macaca Mulatta
ctccgccgccagctccggcctttgctccccctcccagagtcccctccccggagcggagcgcacctagggtccctctccctttcccccagcccagcctcccgttcagaccagcagcctcggggggcagccccccgccagcctgcctccctcccactcagccctgccagggccccccagccatgaatctcttccgattcctgggagacctctcccacctcctcgccatcatcttgctactgctcaaaatctggaagtcccgctcgtgtgccggaatttcagggaagagccaggtcctgtttgctgtggtgttcactgcccgatatctggacctcttcaccaactacatctcactctacaacacgtgtatgaaggtggtctacatagcctgctccttcaccacggtctggttgatttatagcaagttcaaagccacttacgatgggaaccatgacacattcagagtggagttcctggtcgttcccacagccattctggcattcctggtcaatcatgacttcacccctctggagatcctctggaccttctccatctacctggagtcggtggccatcttgccgcagctgttcatggtgagcaagactggcgaggcggagaccatcaccagcc

SEQ ID NO: 18735 - DNA, 1055 bp, Macaca Mulatta
gggagtcgcgagcgaacgagcaagagggtgttcgactgctagagccgagtgaagcgatgcctaaatcaaaggaacttgtttcttcaagctcttctggcagtgattctgacagtgaggttgacaaaaagaggaaaaagcaagttgctccagaaaaacctgtaaaaaagcaaaagacaggtgaaacttcgagagctctgtcatcttctaagcagagtagcagcagcagagatgataacatgtttcagattgggaaaatgaggtacgttagcgttcgagattttaaaggcaaagtgctaattgatattagagaatactggatggatcctgaaggtgaaatgaaaccaggaagaaaaggtatttctttaaatccagaacaatggagccagctgaaggaacagatttctgacattgatgatgcagtaagaaaactgtaaaattcgagccatataaataaaacctgtactgttctagttgttttaatctgtctttttacattggcttttgttttctaaatgttttccaagctattgtatgtttggattgcagaagaatttgtaagatgaatacttttttttaatgtgcattattaaaaatgttgagtgaagctaattgtcaactttattaaggattgctttgtgcccaccacctagtgtaaaataaaatcaagtaatacaatcttaactgttgtggccttttttgatcataagaattggtactgtttaaggccaaaaataacagtttttatagatcttttagtttcaactcaatttttacaataaaaaggattcgtattgcattgagcttataaacttacggtttgagaactccatatttgatctattctcttccaatcaaatgtctaggcttgtttgactttcaccccaatgatttttcactcttttttataattgtttacttcagttttcctttaataaactttaatctcccttccctgttcaggttttttaccttccacctcttttatttcccttttcctttggaagaattgtttattgcctcttatttttgggaaaaaagttcaagtgggtaaaacc

SEQ ID NO: 18736 - DNA, 290 bp, Macaca Mulatta
aacattaaatttggtttgttttgctatgtacagtctgactaataactgctaatttgtgatccaacatgtacagtatgtatatagtgacatagcttactagtagacctttaatggagacatgcatttgctaactcatggaactgcagatggaaaacactccatgccaaaacagccattgcctttttaaaagatttatcctaggacctgatttaaagtgaatttcagatgacctgatttatttcctattcttctaatagagatgaaaatggggatcctgtatgaccttttgt

SEQ ID NO: 18737 - DNA, 918 bp, Macaca Mulatta
  misc_feature (1)...(918): n = A,T,C or G
gggatccaaccatagaaaacacttttacaaagttgatcacagtaaatggacaagaatatcatcttcaacttgtagacacagctgggcaagatgaatattctatctttcctcagacctactccatagatattaatggctatattcttgtgtattctgttacatcaatcaaaagttttgaagtgattaaagttatccatgggaaatttatggatatggtggggaaaagtacaatacctattatngtgggttggggataagaaaagacctgcatatggaaaaggggtgatcagttaatgaaagaagggaaaagctttgggcagaaatcttgggaaaggcagcctttttttggaaatcttcctgcttaaagaaaaatccaaactggccgggtgaaggttttttaaaaagggaaaattttttgggagggccaaaaaaaaagggttggggggcaacctttcccaaggggaaaggctttccggggcccccggggaaaggggaaattctggcgggcgaaaaacccccggagaaacacnnnnnnnnnnnnnnnnnnnnnnnccctnnnnnnnnnnnnnnnnnnnnnggccccctttttctctctnnnnnnnnnnnnnnnnnnnnnnnnngtctccttttttttccccccccgcgggaacaccccnnnnnnnnnnnnnnnnnncatttggggggagaaaagnnnnnnnnnnnnnnnnnnnnncttaacaaaaaaagtgtgtataaccccggcggagagcggggtccccccaaaaggagagnnnnnnnnnnnnnnnnnnnnnnncaaaacatttttaggggcgcccccccccagatttttctccaacaaataataaaagggggggggggttgtcttcccccccaaaaaagggaggcgccgcgccaaacaaattttttttttccccgcgg

SEQ ID NO: 18738 - DNA, 105 bp, Macaca Mulatta
ggagggaaatgaactgccctccttcaccacccaaagtgtgggattaaagtactgttttctttccacttaaactgatgagtcccctgggtctgtcataatgagaat

SEQ ID NO: 18739 - DNA, 264 bp, Macaca Mulatta
tgagcccacccccaccccattgtctaatctgtagaagttaataaataatcatccctccttgcctaacataatagagaatgctatttttaacggtgatgtgctgtagaaatgtgactagattttctcattggttctgccctcaagcactgggttcatctgaaactcttggtttcccctggaggccatggttcctgggcactttgacctgggcaatcccaagtgtggtctgaaccccctttcccttggggactgttcaggcgtcct

SEQ ID NO: 18740 - DNA, 1616 bp, Macaca Mulatta
  misc_feature (1)...(1616): n = A,T,C or G
cggagatccgcctccgccatgtcgtgtcctgcagcagccaggactcgnnnnnnnnnnnnnnnnnnnnnnnnnnnnnnnnnnnnnnnnnnnnnnnnnnnnnnnnnnnnnnnnnnnnnnnnnnnnnnnnnnnnnnnnnnnnnnnnnnnnnnnnnnnnnnnnnnnnnnnnnnnnnnnnnnnnnnnnnnnnnnnnnnnnnnnnnnnnnnnnnnnnnnnnnnnnnnnnnnnnnnnnnnnnnnnnnnnnnnnnnnnnnnnnnnnnnnnnnnnnnnnnnnnnnnnnnnnnnnnnnnnnnnnnnnnnnnnnnnnnnnnnnnnnnnnnnnnnnnnnnnnnnnnnnnnnnnnnnnnnnnnnnnnnnnnnnnnnnnnnnnnnnnnnnnnnnnnnnnnnnnnnnnnnnnnnnnnnnnnnnnnnnnnnnnnnnnnnnnnnnnnnnnnnnnnnnnnnnnnnnnnnnnnnnnnnnnnnnnnnnnnnnnnnnnnnnnnnnnnnnnnnnnnnnnnnnnnnnnnnnnnnnnnnnnnnnnnnnnnnnnnnnnnnnnnnnnnnnnnnnnnnnnnnnnnnnnnnnnnnnnnnnnnnnnnnnnnnnnnnnnnnnnnnnnnnnnnnnnnnnnnnnnnnnnnnnnnnnnnnnnnnnnnnnnnnnnnnnnnnnnnnnnnnnnnnnnnnnnnnnnnnnnnnnnnnnnnnnnnnnnnnnnnnnnnnnnnnnnnnnnnnnnnnnnnnnnnnnnnnnnnnnnnnnnnnnnnnnnnnnnnnnnnnnnnnnnnnnnnnnnnnnnnnnnnnnnnnnnnnnnnnnnnnnnnnnnnnnnnnnnnnnnnnnnnnnnnnnnnnnnnnnnnnnnnnnnnnnnnnnnnnnnnnnnnnnnnnnnnnnnnnnnnnnnnnnnnnnnnnnnnnnnnnnnnnnnnnnnnnnnnnnnnnnnnnnnnnnnnnnnnnnnnnnnnnnnnnnnnnnnnnnnnnnnnnnnnnnnnnnnnnnnnnnnnnnnnnnnnnnnnnnnnnnnnnnnnnnnnnnnnnnnnnnnnnnnnnnnnnnnnnnnnnnnnnnnnnnnnnnnnnnnnnnnnnnnnnnnnnnnnnnnnnnnnnnnnnnnnnnnnnnnnnnnnnnnnnnnnnnnnnnnnnnnnnnnnnnnnnnnnnnnnnnnnnnnnnnnnnnnnnnnnnnnnnnnnnnnnnnnnnnnnnnnnnnnnnnnnnnnnnnnnnnnnnnnnnnnnnnnnnnnnnnnnnnnnnnnnnnnnnnnnnnnnnnnnnnnnnnnnnnnnnnnnnnnnnnnnnnnnnnnnnnnnnnnnnnnnnnnnnnnnnnnnnnnnnnnnnnnnnnnnnnnnnnnnnnnnnnnnnnnnnnnnnnnnnnnnnnnnnnnnnnnnnnnnnnnnnnnnnnnnnnnnnnnnnnnnnnnnnnnnnnnnnnnnnnnnnnnnnnnnnnnnnnnnnnnnnnnnnnnnnnnnnnnnnnnnnnnnnnnnnnnnnnnnnnnnnnnnnnnnnnnnnnnnnnnnnnnnnnnnaacacagaccaccccctggccaggaggagaacggggaagacccatatgcaggctccacggatgagaacacggacgatgaggaacaccaggagccacatgatctgccagtccctgagctccca

SEQ ID NO: 18741 - DNA, 899 bp, Macaca Mulatta
acatctcctcctacagtgagtactgatctcatgaaaccctttaggtcctccctgttccttagtgtgtttgtcctaaatcccatcacttagatcattggcacctgatgcataatggacacttggctggttcatgccccctgatctttgatgctgtgctgggatgctttcctgacctttatgtggggtctctgtcttctctcatcgtattacatcccttccctcactcccacatctgttctctgaacccacacagtacaccagcatctgcatgtgtgctgtgtgttcctgccttgctttccccttttcatgccttattctgaccatgctatgttttctccttagttgaacagacacggtagaagactcgcccattctggaatgtgaccgtctgtccttcaggagaggacaccagggtgggggtgaaggagacactactgcccccacccctgacagcccccaccccatggcttccatcttttgcatcaccaccactcctgaacccccatttctgatttgtcagaattttttttaacaaaactaaaaatgaaacacatgtgtctgtggtatctataagtgcttcgtccctttattgtatttggggtgaggtattttagggcatggtccagcgtaaattcctgtaaggcctgggtgccctgcctgctgtgagattaaaggggaatgggactaagactgcagagccctggctcccccactacctgccaattgcccgcgatttgtgggggtctcttccactttctctggtctgggagcggctggggtgtctctgatcccaaggccgctggtgggtggcacatggattttcagtgccagagggtgctgtgggcactaggggaagcttaggcgcctcctcccaggctctctcggtgcctcctcatctg

SEQ ID NO: 18742 - DNA, 691 bp, Macaca Mulatta
tgagcagaacagactattggacctggctatggaagtgacggaggtgagcgccaacatgcactgctgtgtcaacccagtgatttacgccttcgccggtgagaggttccggaagtacctacggcagttgttccacaggcgtgtggccgtgcacctggttaaatggctccccttcctctccggggacaggctggagagggtcagctccacgtctccctccacaggggagcatgaactctctgctggactctgactcagactacaggaggccaacccagaaccagcaggagtgacctgccaggcacattgagccagcagcctggttctcccagccaggttctgacacttggcacagcatggagtcacagccacttgggatagagagggaaagtaatggtggcctggggcttctggggcttcagtctcttccatgaacttccctggtagaaaggagatgaatgagcaaaaccaaatattccagacactgggactaagcgtaccggagaagggcttggactcaagcaagatttcagatttgtgaccattagcatttgtcaacaaagtcacccatttcccactattgcttgcacaaaccaattaaacctagtagtggtgaatgtgggctccattcaaagtgagctcgtgagccatgggagacactgatgcatgaggaatttctgttctgccatcaccc

SEQ ID NO: 18743 - DNA, 787 bp, Macaca Mulatta
tgatccagcgggaggaccaggagacggctgtgtagcgggctgcccacgggtagcaggagggacaatgcggccaggggacgagcgccctccttgcccacctcactgccacattccagtgggacggccacggggggacccaggccccagggaaagaaccccgtgccgcgccctaaggagccgcccaaacctagggctggattcaggagctgggggcctcacctgtccccctgaggcccccaacggacccggaggctcacaggggaacaggacacggctgggttggacatgcctttggcggggggattctgggtcagggcgctccctggccgcagcacatgccctccgaggagtggaggggctggagaaagagggaggccttcggaaagaggcctcctgggccccctggtcttcggccgggcccccagcctccgctcttgccccaccccacctcccccgggcttcctcccggacacccagcgcctgctgcacttgcccgccctgccctgcttggcacccgctccggcgaccttccctgctccccccgtcatttcatcgcggactgtgcggcctgggggtggggggcgggactctcacggtgacatgtttacagctgggtgtgactcagtaaagtggatttttttcttttctgcaattcttcttttgcggaggaggtctaacaaaaagcgggggctgcggggttgtcctcggggtggggaactggatacggtcgacagcaccttctcgggtccccggctcccgtttgggggtgggtcccagggcctgcccg

SEQ ID NO: 18744 - DNA, 2625 bp, Macaca Mulatta
  misc_feature (1)...(2625): n = A,T,C or G
aggtggccaaagtggagaagttcanacacactcagagcaccaaggacagcctgcacgccaagtacaacaccgccacctgcggcacggtggtggacgatgaccagtgnggccacctccaggtggatgccacctctctcttcctcctgttcctggcccagatgacccnnnnnnnnnnnnnnnnnnnnnnnnnnnnnnnnnnnnnnnnnnnnnnnnnnnnnnnnnnnnnnnnnnnnnnnnnnnnnnnnnnnnnnnnnnnnnnnnnnnnnnnnnnnnnnnnnnnnnnnnnnnnnnnnnnnnnnnnnnnnnnnnnnnnnnnnnnnnnnnnnnnnnnnnnnnnnnnnnnnnnnnnnnnnnnnnnnnnnnnnnnnnnnnnnnnnnnnnnnnnnnnnnnnnnnnnnnnnnnnnnnnnnnnnnnnnnnnnnnnnnnnnnnnnnnnnnnnnnnnnnnnnnnnnnnnnnnnnnnnnnnnnnnnnnnnnnnnnnnnnnnnnnnnnnnnnnnnnnnnnnnnnnnnnnnnnnnnnnnnnnnnnnnnnnnnnnnnnnnnnnnnnnnnnnnnnnnnnnnnnnnnnnnnnnnnnnnnnnnnnnnnnnnnnnnnnnnnnnnnnnnnnnnnnnnnnnnnnnnnnnnnnnnnnnnnnnnnnnnnnnnnnnnnnnnnnnnnnnnnnnnnnnnnnnnnnnnnnnnnnnnnnnnnnnnnnnnnnnnnnnnnnnnnnnnnnnnnnnnnnnnnnnnnnnnnnnnnnnnnnnnnnnnnnnnnnnnnnnnnnnnnnnnnnnnnnnnnnnnnnnnnnnnnnnnnnnnnnnnnnnnnnnnnnnnnnnnnnnnnnnnnnnnnnnnnnnnnnnnnnnnnnnnnnnnnnnnnnnnnnnnnnnnnnnnnnnnnnnnnnnnnnnnnnnnnnnnnnnnnnnnnnnnnnnnnnnnnnnnnnnnnnnnnnnnnnnnnnnnnnnnnnnnnnnnnnnnnnnnnnnnnnnnnnnnnnnnnnnnnnnnnnnnnnnnnnnnnnnnnnnnnnnnnnnnnnnnnnnnnnnnnnnnnnnnnnnnnnnnnnnnnnnnnnnnnnnnnnnnnnnnnnnnnnnnnnnnnnnnnnnnnnnnnnnnnnnnnnnnnnnnnnnnnnnnnnnnnnnnnnnnnnnnnnnnnnnnnnnnnnnnnnnnnnnnnnnnnnnnnnnnnnnnnnnnnnnnnnnnnnnnnnnnnnnnnnnnnnnnnnnnnnnnnnnnnnnnnnnnnnnnnnnnnnnnnnnnnnnnnnnnnnnnnnnnnnnnnnnnnnnnnnnnnnnnnnnnnnnnnnnnnnnnnnnnnnnnnnnnnnnnnnnnnnnnnnnnnnnnnnnnnnnnnnnnnnnnnnnnnnnnnnnnnnnnnnnnnnnnnnnnnnnnnnnnnnnnnnnnnnnnnnnnnnnnnnnnnnnnnnnnnnnnnnnnnnnnnnnnnnnnnnnnnnnnnnnnnnnnnnnnnnnnnnnnnnnnnnnnnnnnnnnnnnnnnnnnnnnnnnnnnnnnnnnnnnnnnnnnnnnnnnnnnnnnnnnnnnnnnnnnnnnnnnnnnnnnnnnnnnnnnnnnnnnnnnnnnnnnnnnnnnnnnnnnnnnnnnnnnnnnnnnnnnnnnnnnnnnnnnnnnnnnnnnnnnnnnnnnnnnnnnnnnnnnnnnnnnnnnnnnnnnnnnnnnnnnnnnnnnnnnnnnnnnnnnnnnnnnnnnnnnnnnnnnnnnnnnnnnnnnnnnnnnnnnnnnnnnnnnnnnnnnnnnnnnnnnnnnnnnnnnnnnnnnnnnnnnnnnnnnnnnnnnnnnnnnnnnnnnnnnnnnnnnnnnnnnnnnnnnnnnnnnnnnnnnnnnnnnnnnnnnnnnnnnnnnnnnnnnnnnnnnnnnnnnnnnnnnnnnnnnnnnnnnnnnnnnnnnnnnnnnnnnnnnnnnnnnnnnnnnnnnnnnnnnnnnnnnnnnnnnnnnnnnnnnnnnnnnnnnnnnnnnnnnnnnnnnnnnnnnnnnnnnnnnnnnnnnnnnnnnnnnnnnnnnnnnnnnnnnnnnnnnnnnnnnnnnnnnnnnnnnnnnnnnnnnnnnnnnnnnnnnnnnnnnnnnnnnnnnnnnnnnnnnnnnnnnnnnnnnnnnnnnnnnnnnnnnnnnnnnnnnnnnnnnnnnnnnnnnnnnnnnnnnnnnnnnnnnnnnnnnnnnnnnnnnnnnnnnnnnnnnnnnnnnnnnnnnnnnnnnnnnnnnnnnnnnnnnnnnnnnnnnnnnnnnnnnnnnnnnnnnnnnnnnnnnnnnnnnnnnnnnnnnnnnnnnnnnnnnnnnnnnnnnnnnnnnnnnnnnnnnnnnnnnnnnnnnnnnnnnnnnnnnnnnnnnnnnnnnnnnnnnnnnnnnnnnnnnnnnnnnnnnnnnnnnnnnnnnnnnnnnnnnnnnnnnnnnnnnnnnnnnnnnnnnnnnnnnnnnnnnnnnnnnnnnnnnnnnnnnnnnnnnnnnnnnnnnnnnnnnnnnnnnnnnnnnnnnnnnnnnnnnnnnnnnnnnnnnnnnnnnnnnnnnnnnnnnnnnnnnnnnnnnnnnnnaggagaagaggcttctgaaagtttaatgaacctcagccctttcgatatgaaaaatctcctgcaccatatcctaagtgggaaagagtttggcgttgaaagaagt

SEQ ID NO: 18745 - DNA, 967 bp, Macaca Mulatta
  misc_feature (1)...(967): n = A,T,C or G
gtctgcgcctgcgcgcacaggaggcgtggccagcgctgggcatggcggagccagacctagagtcggagcagatccgtctgaagtgtattcgtaaagagggcttcttcacggtgcctccggaacacagnnnnnnnnnnnnnnnnnnnnnnnnnnnnnnnnnnnnnnnnnnnnnnnnnnnnnnnnnnnnnnnnnnnnnnnnnnnnnnnnnnnnnnnnnnnnnnnnnnnnnnnnnnnnnnnnnnnnnnnnnnnnnnnnnnnnnnnnnnnnnnnnnnnnnnnnnnnnnnnnnnnnnnnnnnnnnnnnnnnnnnnnnnnnnnnnnnnnnnnnnnnnnnnnnnnnnnnnnnnnnnnnnnnnnnnnnnnnnnnnnnnnnnnnnnnnnnnnnnnnnnnnnnnnnnnnnnnnnnnnnnnnnnnnnnnnnnnnnnnnnnnnnnnnnnnnnnnnnnnnnnnnnnnnnnnnnnnnnnnnnnnnnnnnnnnnnnnnnnnnnnnnnnnnnnnnnnnnnnnnnnnnnnnnnnnnnnnnnnnnnnnnnnnnnnnnnnnnnnnnnnnnnnnnnnnnnnnnnnnnnnnnnnnnnnnnnnnnnnnnnnnnnnnnnnnnnnnnnnnnnnnnnnnnnnnnnnnnnnnnnnnnnnnnnnnnnnnnnnnnnnnnnnnnnnnnnnnnnnnnnnnnnnnnnnnnnnnnnnnnnnnnnnnnnnnnnnnnnnnnnnnnnnnnnatcgacttgatcgtgcagctgctggggaccccttatgagaacatctggccggngggcttttccaagctgccgctggtcggccagtacagtctccggaagcagccctacaacaacctgaagcacaagttcccgtggctctcggaggccggtctgcgcctgctgcacttcctgttcatgtacgacccgaagaaaaggnagggcgacggccggggactgcctggagagctcctacttcaaggagaagcccctac

SEQ ID NO: 18746 - DNA, 2219 bp, Macaca Mulatta
  misc_feature (1)...(2219): n = A,T,C or G
gatactactaccaaaggggaattcttgcaaaggttgaaggacagaggcttgtatatcagttcaaggatatgcccaaaaagatagtggtcatagatgatgacaaaagtgaaacctgtaatgaagatttagcaggagctactgatgaaaaatcattagaacgagtgtcactgtctgcagaaagtctcctgaaagcagcatcgtctgttcgcagtggaaaaaattcatcccctataaactgctccagagcagagaagggtgtcgctagagttgtgaatatcacttcccctgggcacgatgcttcatccaggtctcctactaccaatgcatctgtgtcagcaacagcannnnnnnnnnnnnnnnnnnnnnnnnnnnnnnnnnnnnnnnnnnnnnnnnnnnnnnnnnnnnnnnnnnnnnnnnnnnnnnnnnnnnnnnnnnnnnnnnnnnnnnnnnnnnnnnnnnnnnnnnnnnnnnnnnnnnnnnnnnnnnnnnnnnnnnnnnnnnnnnnnnnnnnnnnnnnnnnnnnnnnnnnnnnnnnnnnnnnnnnnnnnnnnnnnnnnnnnnnnnnnnnnnnnnnnnnnnnnnnnnnnnnnnnnnnnnnnnnnnnnnnnnnnnnnnnnnnnnnnnnnnnnnnnnnnnnnnnnnnnnnnnnnnnnnnnnnnnnnnnnnnnnnnnnnnnnnnnnnnnnnnnnnnnnnnnnnnnnnnnnnnnnnnnnnnnnnnnnnnnnnnnnnnnnnnnnnnnnnnnnnnnnnnnnnnnnnnnnnnnnnnnnnnnnnnnnnnnnnnnnnnnnnnnnnnnnnnnnnnnnnnnnnnnnnnnnnnnnnnnnnnnnnnnnnnnnnnnnnnnnnnnnnnnagtagaagaaaaaccggcacatggaaataagacagtgacccacgtagtggttgtcagtgcactttcagctattgcccttcctgtaactatgaaaacagaaggactagtgacatgtgagaaataaaatagcagctccaccgtggacttcatgctgttagtggcagtactgacataaacatttgcaagggaagtcatcaagaaaagtcaaagaagactttaaaacatttttaatgcatatacgaaaacaatcagacttactggaaataaattacctatcccatgtttcagtgggaaatgaactacatattgagatgctgacagaaaactgcctcttacagtaggaaacaactgaacccatcaataagaaaaaggattgaaagggaccaagcagctcactacgatatcaagttacactaagacttggaacactaacattctgtaagaggttatatagttttcagtgggaggggttgggatnnnnnnnnnnnnnnnnnnnnnnnnnnnnnnnnnnnnnnnnnnnnnnnnnnnnnnnnnnnnnnnnnnnnnnnnnnnnnnnnnnnnnnnnnnnnnnnnnnnnnnnnnnnnnnnnnnnnnnnnnnnnnnnnnnnnnnnnnnnnnnnnnnnnnnnnnnnnnnnnnnnnnnnnnnnnnnnnnnnnnnnnnnnnnnnnnnnnnnnnnnnnnnnnnnnnnnnnnnnnnnnnnnnnnnnnnnnnnnnnnnnnnnnnnnnnnnnnnnnnnnnnnnnnnnnnnnnnnnnnnnnnnnnnnnnnnnnnnnnaaataagctaatggcttgtttgtgtaaagcttttttattaaaagaaaaattttaaaaatcttgtacctagcacagtattgttatagaatttacatgtaacattttatatggtagtttaagtctgtcagtttcttaattgtggacagattaacagttggctctggccttttgctgtaacatgcctgtgtcactcagccctggcatttgtgcagacatatcattttcagttctgctgtcacttggaagttcaggctcagcatgaatttttgtcaggtagctctaatacctggannnnnnnnnnnnnnnnnnnnnnnnnnnagttgaagtttatgagggaaataccagtgttcagatttgaactataatagtttgtatattcaacatttgaagtatattctattttgttgtactcttgtttcaaagtgtattcaagtaggttttctgaaatatagaaatgaaatttatcttctgttttggtctctggtgatatttttaacaatatttaaaagccagcatagacatgttttagttaagaagtgataaaatatctctatttctccttcccaactactgcatgaagaaattctactt

SEQ ID NO: 18747 - DNA, 755 bp, Macaca Mulatta
  misc_feature (1)...(755): n = A,T,C or G
aggctaaagaaatcctgacaaaagaatccaacgtgcaagaggttcgatgtccagtcactgtctgtggagatgtgcatgggcaatttcatgatctcatggaactgtttagaattggtggcaaatcaccagatacaaattacttgtttatgggagattatgttgacagaggatattattcanttgannnnnnnnnnnnnnnnnnnnnnnnnnnnnnnnnnnnnnnnnnnnnnnnnnnnnnnnnnnnnnnnnnnnnnnnnnnnnnnnnnnnnnnnnnnnnnnnnnnnnnnnnnnnnnnnnnnnnnnnnnnnnnnnnnnnnnnnnnnnnnnnnnnnnnnnnnnnnnnnnnnnnnnnnnnnnnnnnnnnnnnnnnnnnnnnnnnnnnnnnnnnnnnnnnnnnnnnnnnnnnnnnnnnnnnnnnnnnnnnnnnnnnnnnnnnnnnnnnnnnnnnnnnnnnnnnnnnnnnnnnnnnnnnnnnnnnnnnnnnnnnnnnnnnnnnnnnnnnnnnnnnnnnnnnnnnnnnnnnnnnnnnnnnnnnnnnnnnnnnnnnnnnnnnnnnnnnnnnnnnnnnnnnnnnnnnnnnnnnnnnnnnnnnnnnnnnnnnnnnnnnnnnnnnnnnnnnnnnnnnnnnnnnnnnnagggatataactggtgccatgaccgaaatgtagtaacaattttcagtgctccaaactattgttatcgttgtggtaaccaagctgcaatcatggaacttgacgatactctaaaatactctt

SEQ ID NO: 18748 - DNA, 711 bp, Macaca Mulatta
  misc_feature (1)...(711): n = A,T,C or G
gtgtatgaataacagcaagggaaaagcattcttacataagaggtatgcatcttcccctgaaccttgagaacctgtctcaacacaggggcggggatggggcggctgctggttctttctaacccgcttcaggtcagagaacaaatttgccccaaacttctacaggcggcactctaccctctgggccagagctgggcacagtggcaaaatcagattagaatttctagagttctaactgggattcccaaccatttcctcaacttgcttctatttcccacaccccaaggcagggaaatccctgctgcctcccctcatcgtctaactcagctgtaaggcggtttaggagctgctggcagaatcaatggcatcgaccaagggaggggggtggcaagggattttcctgtgcttaactactgatcacggctaagtggaaatcctataaacacgagcggaaatcaatggaggctgcttagcggccaggggagaggggcggcccacagattgcatctgacggatgagggaagaagcagcagccagggagggctcaaggaagagtagcttagagtagggggaagaaacaggcagaactagagagagaggagtcactgtcagaagggacgctgaggggagaggcacagtgngccaggagtggattccattagacccagagttcccttcccattctaggaagtgacacccctagcccaggcagtt

SEQ ID NO: 18749 - DNA, 160 bp, Macaca Mulatta
ttcttacctatttatttttaaaactacttatgctattttgcaccagcctttactagcaaatagtaaaaaactagtttttttaagtgacaaattttgtttgttcttcatagattataaactgacgagggagaatttttaaattatgttttttggctatacg

SEQ ID NO: 18750 - DNA, 625 bp, Macaca Mulatta
tgaataaaaaagattctaacaaggtgctgtgtgatttgagcttgggtgtcagaatgggggacaggcactgtgacttgcctcctttatcatggcttgggagcaggaaggttgaggtactacaaggtgcaagaatttgagcttctggccaggtggccctgcccctccacagtggcatttccaggcctaagtcctcagtgtgctggttaaattggtggataatggaatagagccatctggaccagagaatgggtgcaggcctgcaggcaaggcagggctagttgagtcatccttgtgggtggggctccccctgagtcatagcaaatgcctgctggggctgtccccatgactataggttagtgtctcagcattctcttgctccttatggctaaaggggtgattcccccaaagggttaagttcacctaaaaattatctcacccttccttagtccacaaaaaacaattttattagcccaagaagtgaagacccagtccctttgcttgccccagccccaccccaatgcccctcaaaaggataggtgtgggtaagggagcagcttaggatggaatgtcccctatccctcaacttagaagactggagggaagaagacggtctgtgcaaataggt

SEQ ID NO: 18751 - DNA, 2731 bp, Macaca Mulatta
  misc_feature (1)...(2731): n = A,T,C or G
gatccggcctatagccgagcagactgggatctgtaaggtgcggccgccgccggnnnnnnnnnnnnnnnnnnnnnnnnnnnnnnnnnnnnnnnnnnnnnnnnnnnnnnnnnnnnnnnnnnnnnnnnnnnnnnnnnnnnnnnnnnnnnnnnnnnnnnnnnnnnnnnnnnnnnnnnnnnnnnnnnnnnnnnnnnnnnnnnnnnnnnnnnnnnnnnnnnnnnnnnnnnnnnnnnnnnnnnnnnnnnnnnnnnnnnnnnnnnnnnnnnnnnnnnnnnnnnnnnnnnnnnnnnnnnnnnnnnnnnnnnnnnnnnnnnnnnnnnnnnnnnnnnnnnnnnnnnnnnnnnnnnnnnnnnnnnnnnnnnnnnnnnnnnnnnnnnnnnnnnnnnnnnnnnnnnnnnnnnnnnnnnnnnnnnnnnnnnnnnnnnnnnnnnnnnnnnnnnnnnnnnnnnnnnnnnnnnnnnnnnnnnnnnnnnnnnnnnnnnnnnnnnnnnnnnnnnnnnnnnnnnnnnnnnnnnnnnnnnnnnnnnnnnnnnnnnnnnnnnnnnnnnnnnnnnnnnnnnnnnnnnnnnnnnnnnnnnnnnnnnnnnnnnnnnnnnnnnnnnnnnnnnnnnnnnnnnnnnnnnnnnnnnnnnnnnnnnnnnnnnnnnnnnnnnnnnnnnnnnnnnnnnnnnnnnnnnnnnnnnnnnnnnnnnnnnnnnnnnnnnnnnnnnnnnnnnnnnnnnnnnnnnnnnnnnnnnnnnnnnnnnnnnnnnnnnnnnnnnnnnnnnnnnnnnnnnnnnnnnnnnnnnnnnnnnnnnnnnnnnnnnnnnnnnnnnnnnnnnnnnnnnnnnnnnnnnnnnnnnnnnnnnnnnnnnnnnnnnnnnnnnnnnnnnnnnnnnnnnnnnnnnnnnnnnnnnnnnnnnnnnnnnnnnnnnnnnnnnnnnnnnnnnnnnnnnnnnnnnnnnnnnnnnnnnnnnnnnnnnnnnnnnnnnnnnnnnnnnnnnnnnnnnnnnnnnnnnnnnnnnnnnnnnnnnnnnnnnnnnnnnnnnnnnnnnnnnnnnnnnnnnnnnnnnnnnnnnnnnnnnnnnnnnnnnnnnnnnnnnnnnnnnnnnnnnnnnnnnnnnnnnnnnnnnnnnnnnnnnnnnnnnnnnnnnnnnnnnnnnnnnnnnnnnnnnnnnnnnnnnnnnnnnnnnnnnnnnnnnnnnnnnnnnnnnnnnnnnnnnnnnnnnnnnnnnnnnnnnnnnnnnnnnnnnnnnnnnnnnnnnnnnnnnnnnnnnnnnnnnnnnnnnnnnnnnnnnnnnnnnnnnnnnnnnnnnnnnnnnnnnnnnnnnnnnnnnnnnnnnnnnnnnnnnnnnnnnnnnnnnnnnnnnnnnnnnnnnnnnnnnnnnnnnnnnnnnnnnnnnnnnnnnnnnnnnnnnnnnnnnnnnnnnnnnnnnnnnnnnnnnnnnnnnnnnnnnnnnnnnnnnnnnnnnnnnnnnnnnnnnnnnnnnnnnnnnnnnnnnnnnnnnnnnnnnnnnnnnnnnnnnnnnnnnnnnnnnnnnnnnnnnnnnnnnnnnnnnnnnnnnnnnnnnnnnnnnnnnnnnnnnnnnnnnnnnnnnnnnnnnnnnnnnnnnnnnnnnnnnnnnnnnnnnnnnnnnnnnnnnnnnnnnnnnnnnnnnnnnnnnnnnnnnnnnnnnnnnnnnnnnnnnnnnnnnnnnnnnnnnnnnnnnnnnnnnnnnnnnnnnnnnnnnnnnnnnnnnnnnnnnnnnnnnnnnnnnnnnnnnnnnnnnnnnnnnnnnnnnnnnnnnnnnnnnnnnnnnnnnnnnnnnnnnnnnnnnnnnnnnnnnnnnnnnnnnnnnnnnnnnnnnnnnnnnnnnnnnnnnnnnnnnnnnnnnnnnnnnnnnnnnnnnnnnnnnnnnnnnnnnnnnnnnnnnnnnnnnnnnnnnnnnnnnnnnnnnnnnnnnnnnnnnnnnnnnnnnnnnnnnnnnnnnnnnnnnnnnnnnnnnnnnnnnnnnnnnnnnnnnnnnnnnnnnnnnnnnnnnnnnnnnnnnnnnnnnnnnnnnnnnnnnnnnnnnnnnnnnnnnnnnnnnnnnnnnnnnnnnnnnnnnnnnnnnnnnnnnnnnnnnnnnnnnnnnnnnnnnnnnnnnnnnnnnnnnnnnnnnnnnnnnnnnnnnnnnnnnnnnnnnnnnnnnnnnnnnnnnnnnnnnnnnnnnnnnnnnnnnnnnnnnnnnnnnnnnnnnnnnnnnnnnnnnnnnnnnnnnnnnnnnnnnnnnnnnnnnnnnnnnnnnnnnnnnnnnnnnnnnnnnnnnnnnnnnnnnnnnnnnnnnnnnnnnnnnnnnnnnnnnnnnnnnnnnnnnnnnnnnnnnnnnnnnnnnnnnnnnnnnnnnnnnnnnnnnnnnnnnnnnnnnnnnnnnnnnnnnnnnnnnnnnnnnnnnnnnnnnnnnnnnnnnnnnnnnnnnnnnnnnnnnnnnnnnnnnnnnnnnnnnnnnnnnnnnnnnnnnnnnnnnnnnnnnnnnnnnnnnnnnnnnnnnnnnnnnnnnnnnnnnnnnnnnnnnnnnnnnnnnnnnnnnnnnnnnnnnnnnnnnnnnggatctcttgaatcgtgtagaagattttcaacagcatagtcagaaactactgtctgaggaaatgcctagtgctgcggagctgcaggacttgctagatgtcagctttgaatttgatgttgaacttccacagcttgctgagatgcgtatcctttttggaacaggtccgttggctggaagaggtgcagcaa

SEQ ID NO: 18752 - DNA, 751 bp, Macaca Mulatta
ggggttttatgtgtgtttctgaatgttttagttagccttttggtggagccgccagctgacaggacatgttacaagagaatttgcacatctctggaagcttagcaatcttattgcacactgttcgctggaagctttttgaagagcacatcctcctcagtgagctcatgaggttttcatttttattcttccttccaacgtggtgctatctctgaaacgagcattagagcgccgccttagacagaggcaggagtttcgttagaaggcggacgctgttctaagaaaggtctcctgcaggtctctctaggctgtgatgatgaatattatgaaatgtgccttttttgaagagattgtgttagctccaaagcttttcctattgcagagtgtttcagttctttattttcccttgtggatatgctgtgtgaacagttgtgtgagtgtggtatgcctgatcacagatggattttgttataagcatcaatgtgacacttgcaggacactacaacgtgggacattgtttgtttcttccatatttggaagatgaatttatgtgtagacttttttgtaagatatggttaataattaaaatttattgaaatggtcttgcaatgactcattcagatgcttaaagaaagcattgctgctacaaatatttctatttttagaaagggtttttatggaccaatgccccagttgtcagtcagagccgttggtgtttttccatggtttaaatgtcacctgtaaatgggcatta

SEQ ID NO: 18753 - DNA, 587 bp, Macaca Mulatta
aacgggcaactaaaactccaatggtaaaattttcagcattttcctaacttttaggtagatcccatttttttttacataattaaaatgcctatattatgtttaatgccacagtgatacctataaataaaagctggttttatgaaatgctaatttgttttggacagaaaaagagttacatcactaccatgtttcttatttgtttgtagaacatatggttaggaactccctagtaactaggctcagtattttaaaaaattcctcatgaatctaaacagaagtataatggaagcgaaatcttctgaattgagactagagctatcatgggggtagcagaggggtaagggtgggatgggattgggctaaagttgaaactaggagttctgatttgatcaagtaagttttctgatgtttgtggaactatgagtacaaatgggaactctgagcagacaacaaagcattgcttggtaataagtgaactgttgaattgataggataactagattttaatccagtcaggttgctttgtatagctgtaatttaaaatattctttaatagatcgtattatttgagaatggttaagtaaact

SEQ ID NO: 18754 - DNA, 1231 bp, Macaca Mulatta
  misc_feature (1)...(1231): n = A,T,C or G
tgcnnnnnnnnnnnnnnnnnnnnnnnnnnnnnnnnnnnnnnnnnnnnnnnnnnnnnnnnnnnnnnngtcnnnnnnnnnnnnnnnnnnnnnnnnnnnnnnnnnnnnnntcnnnnnnagtnnnnnnnnnnnnnnnnnnnnnnnnnnnnnnnnnnnnnnnnnnnnnnnnnnnnnnnnnnnnnnnnnnnnnnnnnnnnnnnnnnnnnnnnnnnnnnnnnnnnnnnnnnnnnnnnnnnnnnnnnnnnnnnnnnnnnnnnnnnnnnnnnnnnnnnnnntnnnnnnnnnnnnnnnnnnnnnnnnnnnnnnnnnnnnnnnnnnnnnnnnnnnnnnnnnnnnnnnnnnnnnnnnnnnnnnnnnnnnnnnnnnnnnnnnnnnnnnnnnnnnnnnnnnnnnnnnnntnnnnnnnnnnnnnnacgtnntncacggnnnnnnnncnnnnnnnnnnnnnnnnnnnnnnnnnnnnnnnnntnnnngnnnnnnnnnnngnnnnnngnnnnnnnnnnttaaatgatacaacttaattttattaggacaaggctggtgggcactggagtggcaccttccggggccaggagaggcactggggaggggtcacaggatgccacgcgggcacctagaagccacagctgccctccacagtgcggcactgcaccatgcgcaggaatgtctcgaccatatccatgtccttcctgaagcagtggagcagcccgtagttcttgagcagtgagtcatcgttctgtgagtttgtgtcaaacgtgctgtaggtctgcttgaagatctgcccagtcccgggggctgccatcttccagcctccccatcaacgtttggatgccttcctctaggttctttaggaggtcatagacgtcgctgtccgaggtgccatacaccaggttgttggcaaacacactcccgaggaactgcacgggctccagccacgactggatgagcagcagggagatgtggagcagctctaggttggatttctgctgtgtttcctccttgttggagggtgtcggaatagactctgagaagcagagggaggtctgggggttgcgcaggaatgaatacttctgttcctttgggatataggctttttcctaggcgaaggaccacccaccaaggactgctggtctctatgctggagaccagctcccattgttacttctctgagaaccttgctcagtgtatggtcatctgcctcgcattttcgcttcaagaaaacaanccgtgagct

SEQ ID NO: 18755 - DNA, 3436 bp, Macaca Mulatta
  misc_feature (1)...(3436): n = A,T,C or G
ggtattcctggtgcagccggcggctggtggaagagcgttactcttggaccagccagctgtcgccggctgacctcatccccctggaggtccctgctggtgccagccccacccagagagattggcaggagcagttagtggtggggcacaatgtttcctttgaccgagctcatatcagggagcagtacctgatccagnnnnnnnnnnnnnnnnnnnnnnnnnnnnnnnnnnnnnnnnnnnnnnnnnnnnnnnnnnnnnnnnnnnnnnnnnnnnnnnnnnnnnnnnnnnnnnnnnnnnnnnnnnnnnnnnnnnnnnnnnnnnnnnnnnnnnnnnnnnnnnnnnnnnnnnnnnnnnnnnnnnnnnnnnnnnnnnnnnnnnnnnnnnnnnnnnnnnnnnnnnnnnnnnnnnnnnnnnnnnnnnnnnnnnnnnnnnnnnnnnnnnnnnnnnnnnnnnnnnnnnnnnnnnnnnnnnnnnnnnnnnnnnnnnnnnnnnnnnnnnnnnnnnnnnnnnnnnnnnnnnnnnnnnnnnnnnnnnnnnnnnnnnnnnnnnnnnnnnnnnnnnnnnnnnnnnnnnnnnnnnnnnnnnnnnnnnnnnnnnnnnnnnnnnnnnnnnnnnnnnnnnnnnnnnnnnnnnnnnnnnnnnnnnnnnnnnnnnnnnnnnnnnnnnnnnnnnnnnnnnnnnnnnnnnnnnnnnnnnnnnnnnnnnnnnnnnnnnnnnnnnnnnnngtacaaagaagacccctggctctgggacctgaagtgggacctgcgagaatttaatcagaagaaagctaagaaggtgaagaaggagccagccacagccagcaagttgcccatcgatggggctggggcccctggtgatcccatggatcaggaagnnnnnnnnnnnnnnnnnnnnnnnnnnnnnnnnnnnnnnnnnnnnnnnnnnnnnnnnnnnnnnnnnnnnnnnnnnnnnnnnnnnnnnnnnnnnnnnnnnnnnnnnnnnnnnnnnnnnnnnnnnnnnngatggtaccggaagctctgtccccggctagacgaccccgcatggaccccaggccccagccttctcagcctgcagatgcgggtcacacctaaactcatggcactgacctgggatggcttccctctgccctactcagagcgtcatggctggggctacctggtgcgtgggcggcgggacaccctgaccaagctcccgacaggttccaccctggaatcagctgggctggtctgcccctacanncagagccatcgagtccctgtacaggaagcactgtctcgaacaggggaagcagcagctaacgcctcaggaggccggcctggctgaggagttcctgctcactgacaatagtgccatatggcaaacggnnggtagaagaactggattacttagaagtggaggctgaggccaagatggagaacttgcgagctgcagtgccaggtcaaccactagctctctgcccctggcggccccaaggacagccagccctactatcatcatggcaatggaccttacaacgatgtggacatccctggctgctggtttttcaagctgcctcacaaggnnnnnnnnnnnnnnnnnnnnnnnnnnnnnnnnnnnnnnnnnnnnnnnnnnnnnnnnnnnnnnnnnnnnnnnnnnnnnnnnnnnnnnnnnnnnnnnnnnnnnnnnnnnnnnnnnnnnnnnnnnnnnnnnnnnnnnnnnnnnnnnnnnnnnnnnnnnnnnnnnnnnnnnnnnnnnnnnnnnnnnnnnnnnnnnnnnnnnnnnnnnnnnnnnnnnnnnnnnnnnnnnnnnnnnnnnnnnnnnnnnnnnnnnnnnnnnnnnnnnnnnnnnnnnnnnnnnnnnnnnnnnnnnnnnnnnnnnnnnnnnnnnnnnnnnnnnnnnnnnnnnnnnnnnnnnnnnnnnnnnnnnnnnnnnnnnnnnnnnnnnnnnnnnnnnnnnnnnnnnnnnnnnnnnnnnnnnnnnnnnnnnnnnnnnnnnnnnnnnnnnnnnnnnnnnnnnnnnnnnnnnnnnnnnnnnnnnnnnnnnnnnnnnnnnnnnnnnnnnnnnnnnnnnnnnnnnnnnnnnnnnnnnnnnnnnnnnnnnnnnnnnnnnnnnnnnnnnnnnnnnnnnnnnnnnnnnnnnnnnnnnnnnnnnnnnnnnnnnnnnnnnnnnnnnnnnnnnnnnnnnnnnnnnnnnnnnnnnnnnnnnnnnnnnnnnnnnnnnnnnnnnnnnnnnnnnnnnnnnnnnnnnnnnnnnnnnnnnnnnnnnnnnnnnnnnnnnnnnnnnnnnnnnnnnnnnnggtatcggctgtcggatgagggcgagtggctggtgagggagttgcacctcccagtggacaggactgagggtggctggatttccctgcaggatctgcgcaaggtccagagagaagctgcaagaaagnnnnnnnggaagaagtgggaggtgattgctgaacgggcatggaaggggggcacagagtcagaaatgttcaataagcttgagagcattgctacgtctgacataccacgtaccccggtgctgggctgccgcatcagccgagccctggagccctcggctgtccagggagannnnnnnnnnnnnnnnnnnnnnnnnnnnnnnnnnnnnnnnnnnnnnnnnnnnnnnnnnnnnnnnnnnnnnnnnnnnnnnnnnnnnnnnnnnnnnnnnnnnnnnnnnnnnnnnnnnnnnnnnnnnnnnnnnnnnnnnnnnnnnnnnnnnnnnnnnnnnnnnnnnnnnnnnnnnnnnnnnnnnnnnnnnnnnnnnnnnnnnnnnnnnncaggtgcatgtttgcctacaagctgggtctgaatgacttgccccagtcagtcgcctttttcagtgcagttgatattgaccggtgcctcaggaaggaagtgaccatggattgtaaaaccccttcccaacccaactgggatggaaaggagatacgggattccccagggtgnnnnnnnnnnnnnnnnnnnnnnnnnnnnnnnnnnnnnnnnnnnnnnnnnnnnnnnnnnnnnnnnnnnnnnnnnnnnnnnnnnnnnnnnnnnnnnnnnnnnnnnnnnnnnnnnnnnnnnnnnnnnnnnnnnnnnnnnnnnnnnnnnnnnnnnnnnnnnnnnnnnnnnnnnnnnnnnnnnnnnnnnnnntttttcagtagcaggacctgcccaagaagattccttctaactgaaggtgcagttgaattcagtgggttcagaactaagatgccaacatcggtgtgggctgtaggacaaggggcattgttgcttgttgggtaaaaacgaagcagaagccccaaagttcacattaactcaggcatttcatttattttttccttttcttcttggctggttctttgttctgttcaccatgctctgatgcagtgccctagaagggaaaagaagtaatgctctaacgtgataaacctgctccaaagcagtggaaataaaaagaa

SEQ ID NO: 18756 - DNA, 357 bp, Macaca Mulatta
aaagaaaatgatacagcagagctaggtggaaaagcctgggtttggtgtatggtttttgagctattaaagcccagtcaaaaagctaataccagtcactcgataataaagtattcgcattatagttttttttaaactgtcttctttttacgaagaggggcaggtaaggcttcagcggatttgtgacccatcgtgtacgctgaaacttgacttgagttttcatgttttattggataaagatagaacggattgaaaagggaggaaagtcacatttactcttaagtaaaccagagaaggttctgttgttccttcttgcccatggctatggtgtgtccattggatagggatggtggtgaggaa

SEQ ID NO: 18757 - DNA, 3301 bp, Macaca Mulatta
  misc_feature (1)...(3301): n = A,T,C or G
ggggctcgcccagaacgtcttcctgtgtttgatgaggagtgctggcagttgatggaagcctgttgggatggtgaccccttgaagaggcctctcttgggcattgttcagcccatgctccagggcatcatggatcggctctgcaagtctaattctgagcagccaaacagaggactagatgattctacttgaaagcaaagacttttctttttcactctctagttctttccttccccctcaccttttggccatggggagaatttgacatttattcactataggacacactcccaagagaactggtgcttgctgggaaacttgaaaccttcccaggcagggatgactcctggacagtgaagagttgaatgaatgagcatattcagcagctcactgaagcgccaagctattcctttagcaaaaaagtgtctaagatgtgtaaaagctgaggaatgtgatgttctggcctcacaaatgaaaaagaggcagatgttaccattgtctattcactgtatatgcttccaagacaaccagcaggacgctacagtggcaatagnnnnnnnnnnnnnnnnnnnnnnnnnnnnnnnnnnnnnnnnnnnnnnnnnnnnnnnnnnnnnnnnnnnnnnnnnnnnnnnnnnnnnnnnnnnnnnnnnnnnnnnnnnnnnnnnnnnnnnnnnnnnnnnnnnnnnnnnnnnnnnnnnnnnnnnnnnnnnnnnnnnnnnnnnnnnnnnnnnnnnnnnnnnnnnnnnnnnnnnnnnnnnnnnnnnnnnnnnnnnnnnnnnnnnnnnnnnnnnnnnnnnnnnnnnnnnnnnnnnnnnnnnnnnnnnnnnnnnnnnnnnnnnnnnnnnnnnnnnnnnnnnnnnnnnnnnnnnnnnnnnnnnnnnnnnnnnnnnnnnnnnnnnnnnnnnnnnnnnnnnnnnnnnnnnnnnnnnnnnnnnnnnnnnnnnnnnnnnnnnnnnnnnnnnnnnnnnnnnnnnnnnnnnnnnnnnnnnnnnnnnnnnnnnnnnnnnnnnnnnnnnnnnnnnnnnnnnnnnnnnnnnnnnnnnnnnnnnnnnnnnnnnnnnnnnnnnnnnnnnnnnnnnnnnnnnnnnnnnnnnnnnnnnnnnnnnnnnnnnnnnnnnnnnnnnnnnnnnnnnnnnnnnnnnnnnnnnnnnnnnnnnnnnnnnnnnnnnnnnnnnnnnnnnnnnnnnnnnnnnnnnnnnnnnnnnnnnnnnnnnnnnnnnnnnnnnnnnnnnnnnnnnnnnnnnnnnnnnnnnnnnnnnnnnnnnnnnnnnnnnnnnnnnnnnnnnnnnnnnnnnnnnnnnnnnnnnnnnnnnnnnnnnnnnnnnnnnnnnnnnnnnnnnnnnnnnnnnnnnnnnnnnnnnnnnnnnnnnnnnnnnnnnnnnnnnnnnnnnnnnnnnnnnnnnnnnnnnnnnnnnnnnnnnnnnnnnnnnnnnnnnnnnnnnnnnnnnnnnnnnnnnnnnnnnnnnnnnnnnnnnnnnnnnnnnnnnnnnnnnnnnnnnnnnnnnnnnnnnnnnnnnnnnnnnnnnnnnnnnnnnnnnnnnnnnnnnnnnnnnnnnnnnnnnnnnnnnnnnnnnnnnnnnnnnnnnnnnnnnnnnnnnnnnnnnnnnnnnnnnnnnnnnnnnnnnnnnnnnnnnnnnnnnnnnnnnnnnnnnnnnnnnnnnnnnnnnnnnnnnnnnnnnnnnnnnnnnnnnnnnnnnnnnnnnnnnnnnnnnnnnnnnnnnnnnnnnnnnnnnnnnnnnnnnnnnnnnnnnnnnnnnnnnnnnnnnnnnnnnnnnnnnnnnnnnnnnnnnnnnnnnnnnnnnnnnnnnnnnnnnnnnnnnnnnnnnnnnnnnnnnnnnnnnnnnnnnnnnnnnnnnnnnnnnnnnnnnnnnnnnnnnnnnnnnnnnnnnnnnnnnnnnnnnnnnnnnnnnnnnnnnnnnnnnnnnnnnnnnnnnnnnnnnnnnnnnnnnnnnnnnnnnnnnnnnnnnnnnnnnnnnnnnnnnnnnnnnnnnnnnnnnnnnnnnnnnnnnnnnnnnnnnnnnnnnnnnnnnnnnnnnnnnnnnnnnnnnnnnnnnnnnnnnnnnnnnnnnnnnnnnnnnnnnnnnnnnnnnnnnnnnnnnnnnnnnnnnnnnnnnnnnnnnnnnnnnnnnnnnnnnnnnnnnnnnnnnnnnnnnnnnnnnnnnnnnnnnnnnnnnnnnnnnnnnnnnnnnnnnnnnnnnnnnnnnnnnnnnnnnnnnnnnnnnnnnnnnnnnnnnnnnnnnnnnnnnnnnnnnnnnnnnnnnnnnnnnnnnnnnnnnnnnnnnnnnnnnnnnnnnnnnnnnnnnnnnnnnnnnnnnnnnnnnnnnnnnnnnnnnnnnnnnnnnnnnnnnnnnnnnnnnnnnnnnnnnnnnnnnnnnnnnnnnnnnnnnnnnnnnnnnnnnnnnnnnnnnnnnnnnnnnnnnnnnnnnnnnnnnnnnnnnnnnnnnnnnnnnnnnnnnnnnnnnnnnnnnnnnnnnnnnnnnnnnnnnnnnnnnnnnnnnnnnnnnnnnnnnnnnnnnnnnnnnnnnnnnnnnnnnnnnnnnnnnatttttaccacctatttagctatacttcaagtactctattctctgcactaactcacttgtccttctgggaactatgatgggcttcaagggagtcaggtgtcaagagaggaggggtaagtactctctacttgctggaaaatcattgtctaagtctgttgtgtatgaaattttaggaaaagtcttatatagttccctttccagactgtcttcttttgactctagctataatcataagtctgtgcttccattatgaagatcacattcctagcattctttggaagtcttagctcatactcccattcacatatgggaggttagatttttttcgtctacccagagtccctttttagtttaccccacggcttagtctgcaatcagatgccagttctctagcagattccccaacagttttttccccaatggggagggtggaagggaggaactaatgtaagtaaggagatgagtagttgtgttacagttcattttcttaaaaaaagtattttgagaaaaggtgcaaaatattcttgaaagtctctaggccagccaaaatccatatatggatatttggggatgttatttaaatactcagcaggctgagtgcaggtatacgtgtgtatagtgtgtgtatactttgcttttgttttataacattgtcagctaattttggcttctttgttccttggcatccattcttatgataagtgatggaatgccatgaaacgtactgtattgtatattacttgggaggacactaggttttc

SEQ ID NO: 18758 - DNA, 808 bp, Macaca Mulatta
  misc_feature (1)...(808): n = A,T,C or G
ggggttaattctaccacatttaatgttggtgagagagcgatctatcctaataacacattactaaagtttcctagccatgaagcctgctactgatttagacaaggtattatggtcattactttctacccctatccttccaagcacttctggtacttcagtggtttttactgatccaccaacacctaaagaggctatgctacaatctctagctaaatggaagacacattcatccttctccctctgactgctttgatcatcatttactgcatctcataactgtaattttccaaagtttggattgggacttttcaggtcctttttggagggcaaaggaagtgccagcttctctggggaacttgtttttaaatccaaagacttgaaccacattccctgcacatgaacatgttgcttttatcccttctctcattgtctccctcccatcttagtaccattgtagttatagacatctgcctttttagaagcattttacccatttatttttttaaacattcaagaactgctgacgtactgtggatgtagagtataaaactttgaaaaatgcagatgttgaaggaataataggtgtcttggggctttatactttatgggcgggatggtactattaaccaattgaatttaaacagctattgtaatccttaacccaaaaccttaaaaatggatccccaaggggaaaaaggtaaaccttcccggcgcggaattcttttcctttgggaccccttgcttttcttagggggaattccctaangggattttcctctcctaaaccaagggcatggtctacaaaatt

SEQ ID NO: 18759 - DNA, 3329 bp, Macaca Mulatta
  misc_feature (1)...(3329): n = A,T,C or G
tataggatcatcggcggaaactctcagttcacgatcaacccatccacaggacaaatcatcacaagtgcattgttagatagggaaacaaaagataattatactttggtggtagtctgcagtgatgcgggatacccagagcctctttccagttccaccagtgtgcttgttactgtgactgatgtcaatgacaatccaccaagatttcagcatcacccatatgtcactcacatcccatctcctactcttccaggtnnnnnnnnnnnnnnnnnnnnnnnnnnnnnnnnnnnnnnnnnnnnnnnnnnnnnnnnnnnnnnnnnnnnnnnnnnnnnnnnnnnnnnnnnnnnnnnnnnnnnnnnnnnnnnnnnnnnnnnnnnnnnnnnnnnnnnnnnnnnnnnnnnnnnnnnnnnnnnnnnnnnnnnnnnnnnnnnnnnnnnnnnnnnnnnnnnnnnnnnnnnnnnnnnnnnnnnnnnnnnnnnnnnnnnnnnnnnnnnnnnnnnnnnnnnnnnnnnnnnnnnnnnnnnnnnnnnnnnnnnnnnnnnnnnnnnnnnnnnnnnnnnnnnnnnnnnnnnnnnnnnnnnnnnnnnnnnnnnnnnnnnnnnnnnnnnnnnnnnnnnnnnnnnnnnnnnnnnnnnnnnnnnnnnnnnnnnnnnnnnnnnnnnnnnnnnnnnnnnnnnnnnnnnnnnnnnnnnnnnnnnnnnnnnnnnnnnnnnnnnnnnnnnnnnnnnnnnnnnnnnnnnnnnnnnnnnnnnnnnnnnnnnnnnnnnnnnnnnnnnnnnnnnnnnnnnnnnnnnnnnnnnnnnnnnnnnnnnnnnnnnnnnnnnnnnnnnnnnnnnnnnnnnnnnnnnnnnnnnnnnnnnnnnnnnnnnnnnnnnnnnnnnnnnnnnnnnnnnnnnnnnnnnnnnnnnnnnnnnnnnnnnnnnnnnnnnnnnnnnnnnnnnnnnnnnnnnnnnnnnnnnnnnnnnnnnnnnnnnnnnnnnnnnnnnnnnnnnnnnnnnnnnnnnnnnnnnnnnnnnnnnnnnnnnnnnnnnnnnnnnnnnnnnnnnnnnnnnnnnnnnnnnnnnnnnnnnnnnnnnnnnnnnnnnnnnnnnnnnnnnnnnnnnnnnnnnnnnnnnnnnnnnnnnnnnnnnnnnnnnnnnnnnnnnnnnnnnnnnnnnnnnnnnnnnnnnnnnnnnnnnnnnnnnnnnnnnnnnnnnnnnnnnnnnnnnnnnnnnnnnnnnnnnnnnnnnnnnnnnnnnnnnnnnnnnnnnnnnnnnnnnnnnnnnnnnnnnnnnnnnnnnnnnnnnnnnnnnnnnnnnnnnnnnnnnnnnnnnnnnnnnnnnnnnnnnnnnnnnnnnnnnnnnnnnnnnnnnnnnnnnnnnnnnnnnnnnnnnnnnnnnnnnnnnnnnnnnnnnnnnnnnnnnnnnnnnnnnnnnnnnnnnnnnnnnnnnnnnnnnnnnnnnnnnnnnnnnnnnnnnnnnnnnnnnnnnnnnnnnnnnnnnnnnnnnnnnnnnnnnnnnnnnnnnnnnnnnnnnnnnnnnnnnnnnnnnnnnnnnnnnnnnnnnnnnnnnnnnnnnnnnnnnnnnnnnnnnnnnnnnnnnnnnnnnnnnnnnnnnnnnnnnnnnnnnnnnnnnnnnnnnnnnnnnnnnnnnnnnnnnnnnnnnnnnnnnnnnnnnnnnnnnnnnnnnnnnnnnnnnnnnnnnnnnnnnnnnnnnnnnnnnnnnnnnnnnnnnnnnnnnnnnnnnnnnnnnnnnnnnnnnnnnnnnnnnnnnnnnnnnnnnnnnnnnnnnnnnnnnnnnnnnnnnnnnnnnnnnnnnnnnnnnnnnnnnnnnnnnnnnnnnnnnnnnnnnnnnnnnnnnnnnnnnnnnnnnnnnnnnnnnnnnnnnnnnnnnnnnnnnnnnnnnnnnnnnnnnnnnnnnnnnnnnnnnnnnnnnnnnnnnnnnnnnnnnnnnnnnnnnnnnnnnnnnnnnnnnnnnnnnnnnnnnnnnnnnnnnnnnnnnnnnnnnnnnnnnnnnnnnnnnnnnnnnnnnnnnnnnnnnnnnnnnnnnnnnnnnnnnnnnnnnnnnnnnnnnnnnnnnnnnnnnnnnnnnnnnnnnnnnnnnnnnnnnnnnnnnnnnnnnnnnnnnnnnnnnnnnnnnnnnnnnnnnnnnnnnnnnnnnnnnnnnnnnnnnnnnnnnnnnnnnnnnnnnnnnnnnnnnnnnnnnnnnnnnnnnnnnnnnnnnnnnnnnnnnnnnnnnnnnnnnnnnnnnnnnnnnnnnnnnnnnnnnnnnnnnnnnnnnnnnnnnnnnnnnnnnnnnnnnnnnnnnnnnnnnnnnnnnnnnnnnnnnnnnnnnnnnnnnnnnnnnnnnnnnnnnnnnnnnnnnnnnnnnnnnnnnnnnnnnnnnnnnnnnnnnnnnnnnnnnnnnnnnnnnnnnnnnnnnnnnnnnnnnnnnnnnnnnnnnnnnnnnnnnnnnnnnnnnnnnnnnnnnnnnnnnnnnnnnnnnnnnnnnnnnnnnnnnnnnnnnnnnnnnnnnnnnnnnnnnnnnnnnnnnnnnnnnnnnnnnnnnnnnnnnnnnnnnnnnnnnnnnnnnnnnnnnnnnnnnnnnnnnnnnnnnnnnnnnnnnnnnnnnnnnnnnnnnnnnnnnnnnnnnnnnnnnnnnnnnnnnnnnnnnnnnnnnnnnnnnnnnnnnnnnnnnnnnnnnnnnnnnnnnnnnnnnnnnnnnnnnnnnnnnnnnnnnnnnnnnnnnnnnnnnnnnnnnnnnnnnnnnnnnnnnnnnnnnnnnnnnnnnnnnnnnnnnnnnnnnnnnnnnnnnnnnnnnnnnnnnnnnnnnnnnnnctgatggggaggtacattatttgatttttggtaatagtcgaaagaagggtttccagattaataagaagactggacaaatttatgtttctggaattcttgatcgagaaaaagaagaaagggtatctttgaagatattggccaagaactttggcagcattagaggtgcagatatagatgaggtcactgtaaatgtcaccgtgcttgatgcaaatgacccacccgtttttactctaaacatctacagtgtgcagatcagtgaaggggtcccaataggaactcatgtgacctttgtcagtgcctttgactcagactccatccccagctggagcaggttttcttacttcatcggatcagggaatgaaaatggtgccttttctattaatccacagacaggacagatcaccattactgcagaattagatcgagaaacccttcccatctataacctctcagttttggctgttgattcagggaccccctcagctacaggtagtgcctctttattagtcaccctggaagatatagaaaataacgggcc

SEQ ID NO: 18760 - DNA, 2470 bp, Macaca Mulatta
  misc_feature (1)...(2470): n = A,T,C or G
ggaaaaactactctgactgactgtcttatatctagcaatggaatcatctccagccgcctagcaggcaannnnnnnnnnnnnnnnnnnnnnnnnnnnnnnnnnnnnnnnnnnnnnnnnnnnnnnnnnnnnnnnnnnnnnnnnnnnnnnnnnnnnnnnnnnnnnnnnnnnnnnnnnnnnnnnnnnnnnnnnnnnnnnnnnnnnnnnnnnnnnnnnnnnnnnnnnnnnnnnnnnnnnnnnnnnnnnnnnnnnnnnnnnnnnnnnnnnnnnnnnnnnnnnnnnnnnnnnnnnnnnnnnnnnnnnnnnnnnnnnnnnnnnnnnnnnnnnnnnnnnnnnnnnnnnnnnnnnnnnnnnnnnnnnnnnnnnnnnnnnnnnnnnnnnnnnnnnnnnnnnnnnnnnnnnnnnnnnnnnnnnnnnnnnnnnnnnnnnnnnnnnnnnnnnnnnnnnnnnnnnnnnnnnnnnnnnnnnnnnnnnnnnnnnnnnnnnnnnnnnnnnnnnnnnnnnnnnnnnnnnnnnnnnnnnnnnnnnnnnnnnnnnnnnnnnnnnnnnnnnnnnnnnnnnnnnnnnnnnnnnnnnnnnnnnnnnnnnnnnnnnnnnnnnnnnnnnnnnnnnnnnnnnnnnnnnnnnnnnnnnnnnnnnnnnnnnnnnnnnnnnnnnnnnnnnnnnnnnnnnnnnnnnnnnnnnnnnnnnnnnnnnnnnnnnnnnnnnnnnnnnnnnnnnnnnnnnnnnnnnnnnnnnnnnnnnnnnnnnnnnnnnnnnnnnnnnnnnnnnnnnnnnnnnnnnnnnnnnnnnnnnnnnnnnnnnnnnnnnnnnnnnnnnnnnnnnnnnnnnnnnnnnnnnnnnnnnnnnnnnnnnnnnnnnnnnnnnnnnnnnnnnnnnnnnnnnnnnnnnnnnnnnnnnnnnnnnnnnnnnnnnnnnnnnnnnnnnnnnnnnnnnnnnnnnnnnnnnnnnnnnnnnnnnnnnnnnnnnnnnnnnnnnnnnnnnnnnnnnnnnnnnnnnnnnnnnnnnnnnnnnnnnnnnnnnnnnnnnnnnnnnnnnnnnnnnnnnnnnnnnnnnnnnnnnnnnnnnnnnnnnnnnnnnnnnnnnnnnnnnnnnnnnnnnnnnnnnnnnnnnnnnnnnnnnnnnnnnnnnnnnnnnnnnnnnnnnnnnnnnnnnnnnnnnnnnnnnnnnnnnnnnnnnnnnnnnnnnnnnnnnnnnnnnnnnnnnnnnnnnnnnnnnnnnnnnnnnnnnnnnnnnnnnnnnnnnnnnnnnnnnnnnnnnnnnnnnnnnnnnnnnnnnnnnnnnnnnnnnnnnnnnnnnnnnnnnnnnnnnnnnnnnnnnnnnnnnnnnnnnnnnnnnnnnnnnnnnnnnnnnnnnnnnnnnnnnnnnnnnnnnnnnnnnnnnnnnnnnnnnnnnnnnnnnnnnnnnnnnnnnnnnnnnnnnnnnnnnnnnnnnnnnnnnnnnnnnnnnnnnnnnnnnnnnnnnnnnnnnnnnnnnnnnnnnnnnnnnnnnnnnnnnnnnnnnnnnnnnnnnnnnnnnnnnnnnnnnnnnnnnnnnnnnnnnnnnnnnnnnnnnnnnnnnnnnnnnnnnnnnnnnnnnnnnnnnnnnnnnnnnnnnnnnnnnnnnnnnnnnnnnnnnnnnnnnnnnnnnnnnnnnnnnnnnnnnnnnnnnnnnnnnnnnnnnnnnnnnnnnnnnnnnnnnnnnnnnnnnnnnnnnnnnnnnnnnnnnnnnnnnnnnnnnnnnnnnnnnnnnnnnnnnnnnnnnnnnnnnnnnnnnnnnnnnnnnnnnnnnnnnnnnnnnnnnnnnnnnnnnnnnnnnnnnnnnnnnnnnnnnnnnnnnnnnnnnnnnnnnnnnnnnnnnnnnnnnnnnnnnnnnnnnnnnnnnnnnnnnnnnnnnnnnnnnnnnnnnnnnnnnnnnnnnnnnnnnnnnnnnnnnnnnnnnnnnnnnnnnnnnnnnnnnnnnnnnnnnnnnnnnnnnnnnnnnnnnnnnnnnnnnnnnnnnnnnnnnnnnnnnnnnnnnnnnnnnnnnnnnnnnnnnnnnnnnnnnnnnnnnnnnnnnnnnnnnnnnnnnnnnnnnnnnnnnnnnnnnnnnnnnnnnnnnnnnnnnnnnnnnnnnnnnnnnnnnnnnnnnnnnnnnnnnnnnnnnnnnnnnnnnnnnnnnnnnnnnnnnnnnnnnnnnnnnnnnnnnnnnnnnnnnnnnnnnnnnnnnnnnnnnnnnnnnnnnnnnnnnnnnnnnnnnnnnnnnnnnnnnnnnnnnnnnnnnnnnnnnnnnnnnnnnnnnnnnnnnnnnnnnnnnnnnnnnnnnnngtcgagtctatgctgtcttgtcaaagagagaaggtcgagtacttcaagaagaaatgaaagaaggaacagacatgttcatcatcaaggctgtgctgcctgttgctgaaagctttggttttgctgatgaaatcaggaagaggacaagtggcctggccagcccgcaactggtattcagccattgggaggta

SEQ ID NO: 18761 - DNA, 641 bp, Macaca Mulatta
tgacacgcacagtcaccaccatctgttacctgaacctggccctggctgacttttctttcacggccacattaccattcctcattgtctctatggccatgggagaaaaatggccttttggctggttcctgtgtaagttaattcacatcgtggtggacatcaacctctttggaagtgtcttcttgattggtttcattgcactggaccgctgcatttgtgtcctgcacccagtctgggcccagaaccaccgcaccgtgagtctggccatgaaggtgatcatcggaccttggattcttgccctagtccttaccttgccagttttcctctttttgactacagtaactattccaaatggggacacgtactgtactttcaactttgcatcctggggtgacacccctgagaagaggaagaatgtagccattaccatgctgacagccagagggattatccggtttgtcattggctttagcatgccgatgtccattgttgccatctgctatgggctcattgcagccaagatccacaaaaagggcatgattaaatccagccgtcccttacgggtcctcactgctgtggtggcttctttcttcatttgttggttcccctttcaactggttgcccttctgagcaccgtttggctc

SEQ ID NO: 18762 - DNA, 983 bp, Macaca Mulatta
  misc_feature (1)...(983): n = A,T,C or G
ttcnnnnnnnnnnnnnnnnnnnnnnnnnnnnnnnnnnnnnnnnnnnnnnnnnnnnnnnnnnnnnnnnnnnnnnnnnnnnnnnnnnnnnnnnnnnnnnnnnnnnnnnnnnnnnnnnnnnnnnnnnnnnnnnnnnnnnnnnnnnnnnnnnnnnnnnnnnnnnnnnnnnnnnnnnnnnnnnnnnnnnnnnnnnnnnnnnnnnnnnnnnnnnnnnnnnnnnnnnnnnnnnnnnnnnnnnnnnnnnnnnnnnnnnnnnnnnnnnnnnnnnnnnnnnnnnnnnnnnnnnnnnngnnnnnnnnnnnnnnnttgtaatactacggccagtgaattggaatactgactcattataggcnnnnnntnnnnnnnnnnnnnnngtcnnnnnnnnnnnnnnnnnnngtttgatgcaacttaattttattaggacaaggctgttggacactggagtggcaccttccatggccaggagtggcaattgggaggggtcacaagggatgccacccaggcatctagaagccacagctgccctccacagcgcggcaccgcacggtgcgcaggaatgtctcgaccttgttcatgtccttcctgaagcagtagagcagcctgtagttcttgagcagtgtgtcatcgttgtgcgagtttgtgtcatacttgctgtaggtctccttgaagatctgcccagtccgggggctgccgtcttccagcctccccatcagcgtttggatgccttcctctagtttctttaggtagagatagatgtcgaagttcgagttggtatgcaccaggtggttggcaaacacactcctgagtaactgcacgggctccagccacgactggatgagcagcagggagatgtggagcacaggcaagaaggtggctgagggccacaaggccagtttctgcctggaggacagcacctgtgacttcggcaacctcaagcgctatgcatgcacctctcatacccagggcctgagcccaggatgctatga

SEQ ID NO: 18763 - DNA, 219 bp, Macaca Mulatta
  misc_feature (1)...(219): n = A,T,C or G
ggcaatagtctgaccttgattgacctnnnnnnnnnnnnnnnnnnnnnnnnnnnnnnnnnnnnnnnnnnnnnnnnnnnnnccagggctattgtgtttgttgtggatagtgcagcattccagcgagaggtgaaagatgtggctgagtttttgtatcaagtcctcattgacagtatgggtctgaagaacacaccatcattcttgatagcctgcaataagcaa

SEQ ID NO: 18764 - DNA, 1463 bp, Macaca Mulatta
  misc_feature (1)...(1463): n = A,T,C or G
aggcagtgatggtttcagaaaattttgatatagaggcccctaactatttgtccaaggaatctgaagttctcatttatgccagacaagattcacagtgcgttgactgttttcaagcctttttgcctgtgcactaccgctatcatcggccacacagtcacgatggagaaacctcgattgtggtcaatcacccagatttgttgatgttttgtgaccaagnnnnnnnnnnnnnnnnnnnnnnnnnnnnnnnnnnnnnnnnnnnnnnnnnnnnnnnnnnnnnnnnnnnnnnnnnnnnnnnnnnnnnnnnnnnnnnnnnnnnngtatataagaatgtgactctacaggttccagtgggactgactatacatacctctttagtatgttctgtgactctgttcgttacaatcctgtgctctacgttgatcctagtagcagttttcaaatatggctatttttccctataagttttatgtagttaaatgcttcctagaaacctaaataagacctattaatttctgacgagaagtgttcttctagaatttagttaattacttttatcttttgtcttcatttgtggccaaaattatgtttactagaggaaatttgggataattctcaactaattccaaaatttagtgctctattgcatagatccttggtaatcctcaagcatcaaaggccataagaggaaacttaattctgctaaattaatgtttattttgtgagaagtgactttatcttcatttgagagagaaaaattatttctttnnnnnnnnnnnnnnnnnnnnnnnnnnnnnnnnnnnnnnnnnnnnnnnnnnnnnnnnnnnnnnnnnnnnnnnnnnnnnnnnnnnnnnnnnnnnnnnnnnnnnnnnnnnnnnnnnnnnnnnnnnnnnnnnnnnnnnnnnnnnnnnnnnnnnnnnnnnnnnnnnnnnnnnnnnnnnnnnnnnnnnnnnnnnnnnnnnnnnntaaaaatacaaaaattagctaagggtggttgtgggcgtctgtagtcccacctaattgggagggtgaggcgggaggatctcttgaacctgggaggcggaggttccagagagccaagatcgcaccaccgcactccagcctgggtgacagaatgagaccctgtctccaaaggnnnnnnnnnnnnnaagaataaaataatttggatgaaaatcatgtttatttaaatattaatgttatgagactattaaagacatttgccagagtttcaatgaaaatcattaaagtaggacagctaagaaattaatattaatatcaaaattattggtaatcttaaattattgattattccttaacgtactccattctccttttacattttataatgtttcttttggatatatgatttagcaaaggacttgatgaaactgaatactaagatttagtacagtgtcaggaagacaactcagattgccattttgaataaagttgtacatgaacaataa

SEQ ID NO: 18765 - DNA, 508 bp, Macaca Mulatta
  misc_feature (1)...(508): n = A,T,C or G
gtggctgatggtattcgaaaatggtattacaatgctgcaggattcaataaactggggttattgcgagatgatacaatgtacgaggatgaagacgtaaaagaagccataagaaggcttcctgagaacctttataatggcagggtgtttcgaattaagagggcactggacctgaacctgaagcatcagatcttgcctaaagagcagtggaccaaatatgaagaggaaaatttctaccttgaaccgtatctgaaagaggttattcggnnnnnnnnnnnnnnnnnnnnatgggcaaagaagtaatcatgtagttgaagtctgtgaatgcagctgttatgaagatggttatacttgaaacacacaattttaacaatagtttggtctgcagatgttttactttaaataaatgtctattgtaatggctggagtttttgaattccaaaccttacactgaataatctagnnnnnnnnnnnnnnnnnnnannnnnnnnnnnnnnnnnnnnnnnnnnnn

SEQ ID NO: 18766 - DNA, 313 bp, Macaca Mulatta
caaaggacttcttagccttcaaatgggagatacctttggactgctcccacaccaaagccatgtgggtggaagtcacatggcccccctgattctgcagagggccagaagaatgagaaggaaggctgctggcaggtaaatcaaggggacgaggctagaacagcaccagcttccctgatggctgccgccatggctttgcattgcaacagagcttctctgagatgctgggattcttgtctgtatgaatgcatcaactattcatttattgcctgaataggcattgcattaagtcctgtgtaaggtgctaggcaagcca

SEQ ID NO: 18767 - DNA, 567 bp, Macaca Mulatta
agccttcctaggggctctactctactgggatcagagagctagatatgtcctctgggagcctggaccatcatccattgctcctgtttgtggacagggctaagcatgttgtgttcccccacctcctccatttacacatgtatacacacagcctctgtggtttcctctgtcacttttaatttaagacacaagtgagtaagcagcctctacaggctgtattcccaggcccccgcccaccctgacctttggcccagaagctactgcttcagcgtgtggggtggaggagggagactgggtccacagtgacattattgctgacctcttctgtgagaaaaaaagccacgagacccttgtggggccagccctgagtgctcctctcccaagtttaaggcagggagtgggaagtaactgtacagcccttttagcccccagctctggagtggcagacagcaatgaggccacatccctggagctggctgggggaagtgggtgaggaaccaaagccgtggtccctgtagagcagctgtgcggaggggagggccagtcccctgctcagtcctggccacataa

SEQ ID NO: 18768 - DNA, 1080 bp, Macaca Mulatta
  misc_feature (1)...(1080): n = A,T,C or G
accatatggcccatggaaaagattttgcatctagaggaattgaannnnnnnnnnnnnnnnnnnnnnnnnnnnnnnnnnnnnnnnnnnnnnnnnnnnnnnnnnnnnnnnnnnnnnnnnnnnnnnnnnnnnnnnnnnnnnnnnnnnnnnnnnnnnnnnnnnnnnnnnnnnnnnnnnnnnnnnnnnnnnnnnnnnnnnnnnnnnnnnnnnnnnnnnnnnnnnnnnnnnnnnnnnnnnnnnnnnnnnnnnnnnnnnnnnnnnnnnnnnnnnnnnnnnnnnnnnnnnnnnnnnnnnnnnnnnnnnnnnnnnnnnnnnnnnnnnnnnnnnnnnnnnnnnnnnnnnnnnnnnnnnnnnnnnnnnnnnnnnnnnnnnnnnnnnnnnnnnnnnnnnnnnnnnnnnnnnnnnnnnnnnnnnnnnnnnnnnnnnnnnnnnnnnnnnnnnnnnnnnnnnnnnnnnnnnnnnnnnnnnnnnnnnnnnnnnnnnnnnnnnnnnnnnnnnnnnnnnnnnnnnnnnnnnnnnnnnnnnnnnnnnnnnnnnnnnnnnnnnnnnnnnnnnnnnnnnnnnnnnnnnnnnnnnnnnnnnnnntattgaagctgcttctggtggtaaagctgaagttatcacttgtgatgtactcttggtttgcattggccgacgaccctttactaagaatttgggactagaagagctgggaattgaactagatcccagaggtagaattccagttaataccagatttcaaactaaaattccaannnnnnnnnnnnnnnnnnnnnnnnnnnnnnnnnnnnnnnnnnnnnnnnnnnnnnnnnnnnnnnnnnnnnnnnnnnnnnnnnnnnnnnnnnnnnnnnnnnnnnnnnnnnnnnnnnnnnnnnnnnnnnnnnnnnnnnnnnnnnnnnnnnnnnnnnnnnnnnnnnnnnnnnnnnnnnnnnnnnnnnnnnnnagggtattgagtacaaagttgggaaattcccatttgctgctaacagcagagctaagacaaatgctgacacagatggcatggtgaagatccttgggcagaaatcgacagacagagtactgggagcacatattcttggacca

SEQ ID NO: 18769 - DNA, 281 bp, Macaca Mulatta
attataaaagctagttattctgtaaaaccaaaggactccattcatttgactcactgtactaaaatgtaaacatagtggtttggtgccagagcaaaatacatttgtgctaatatatgaattcttgatatagttggtgccaaagtttttatagaagaattacatctcagataatgtgtgcaggcagatctgtatattatccataagtggcctcatttagaaataaaggtttttataaggcttctgtaaattttacatcacatggaaatttagtacaagtgaag

SEQ ID NO: 18770 - DNA, 833 bp, Macaca Mulatta
  misc_feature (1)...(833): n = A,T,C or G
agccagcaaatatcctcttggatgaacacggacacgcaaggatctccgatcttggtcttgcctgcgatttttccaaaaagaagcctcatgcgannnnnnnnnnnnnnnnnnnnnnnnnnnnnnnnnnnnnnnnnnnnnnnnnnnnnnnnnnnnnnnnnnnnnnnnnnnnnnnnnnnnnnnnnnnnnnnnnnnnnnnnnnnnnnnnnnnnnnnnnnnnnnnnnnnnnnnnnnnnnnnnnnnnnnnnnnnnnnnnnnnnnnnnnnnnnnnnngaatgtggaacttccagacaccttctctcctgaactgaaatcccttttggagggcttgcttcagcgagacgttagcaagcggctgggctgtcacggaggcgnnnnnnnnnnnnnnnnnnnnnnnnnnnnnnnnnnnnnnnnnnnnnnnnnnnnnnnnnnnnnnnnnnnnnnnnnnnnnnnnnnnnnnnnnnnnnnnnnnnnnnnnnnnnnnnnnnnnnnnnnnnnnnnnnnnnnnnnnnnnnnnnnnnnnnnnnnnnnnnnnnnnnnnnnnnnnnnnnnnnnnnnnnnnnnnnnnnnnnnnnnnnnnnnnnnnnnnnnnnnnnnnnnnnnnnnnnnnnnnnnnnnnnnnnnnnnnnnnnnnnnnnnnnnnnnnnnnnnnnnnnnnnnnnnnnnnnnnnnnnnnnnnnnnnnnnnnnnnnnnnnnngattacgctctggggaaggactgtattatgcacgggtacatgctgaaactgggaaacccatttctgactcagtggcagcgtcgctatttttacctctttccaaatagacttgaatggagaggagagggagagtcccgg

SEQ ID NO: 18771 - DNA, 822 bp, Macaca Mulatta
gcgattgctccaccacacctgggcccgggacaccagccctcagtcactgggagaagaacctctcgtaccctcggtgctccagtccccagctcactcggccactcacaccatgtgtgaagaggagaccaccgcactcgtgtgtgacaatggctctggcctatgcaaggcaggcttcgcaggagatgatgccccccgggctgtcttcccctccatcgtgggccgccctcgacaccagggtgtgatggtgggaatgggccagaaagacagctatgtgggggatgaagctcagagcaagcgaggaatcctgactctcaaataccccattgaacacggcatcatcaccaactgggatgacatggagaagatctggcaccactccttctacaatgagctgcgtgtagcacctgaagagcaccccaccctgctcacagaggctcccctaaatcccaaggccaacagggagaagatgacccagatcatgtttgaaaccttcaatgtccctgccatgtacgtcgccattcaagctgtgctctccctctatgcctctggccgcacgacaggcattgtcctggattcaggtgatggcgtcacccacaacgtccccttctatgaaggctatgccctgccccatgccatcatgcgcctggacctggctggccgtgacctctggacttccctcctggaagattccttcacagagagaggctattccttttgtgaccacagcctgaagagagaaaattgtgccgaagacatccaggaggaagctgtggctatgttgggccctgggatttttgagaattgaagatgggccacagccac

SEQ ID NO: 18772 - DNA, 668 bp, Macaca Mulatta
  misc_feature (1)...(668): n = A,T,C or G
aatcgaaagtagacttttctgaagcatttcctgggatcagcctgaccacactccaccctgggagaggcttctgggtcaaaggaacagtctgcagagggctcttgtggctggaannnnnnnnnnnnnnnnnnnnnnnnnnnnnnnnnnnnnnnnnnnnnnnnnnnnnnnnnnnnnnnnnnnnnnnnnnnnnnnnnnnnnnnnnnnnnnnnnnnnnnnnnnnnnnnnnaggcatgaacgatggtgacatgcggctggccgatgggggcgccaccaaccagggccgcgtggagatcttctacagaggccagtggggcactgtgtgtgacaacctgtgggacctgactgatgccagcgtcgtctgccgggccctgggctttgagaacgccacccaggctctgggcagagctgcctttgggcaagnnnnnnnnnnnnnnnnnnnnnnnnnnnnnnnnnnnnnnnnnnnnnnnnnnnnnnnnnnnnnnnnnnnnnnnnnnnnnnnnnnnnnnnnnnnnnnnnnnnnnnnnnnnnnnnnnnnnnnnnnnnnnnnnnnaaaccaggagcacccacaccctggacctctccagggagctctcggaagtccttggccagatttttgacagccagcagggctgcgacctgtccatcagtgtgagtgtgcagggcgagga

SEQ ID NO: 18773 - DNA, 3824 bp, Macaca Mulatta
  misc_feature (1)...(3824): n = A,T,C or G
aggtcgccaggctccggcgctgacgggtgtggaccgcggacgtcgctgggacagcccaaacaagatgctcggcggcggcacctggcccggccgctcctcgctgcgcttcgcctccgcctccttggactcggactcgggtttaaatcgcgcctctcttcatcccagtcccgggcgagcagcgttgggtttatgtctttatttgacgaaaacnnnnnnnnnnnnnnnnnnnnnnnnnnnnnnnnnnnnnnnnnnnnnnnnnnnnnnnnnnnnnnnnnnnnnnnnnnnnnnnnnnnnnnnnnnnnnnnnnnnnnnnnnnnnnnnnnnnnnnnnnnnnnnnnnnnnnnnnnnnnnnnnnnnnnnnnnnnnnnnnnnnnnnnnnnnnnnnnnnnnnnnnnnnnnnnnnnnnnnnnnnnnnnnnnnnnnnnnnnnnnnnnnnnnnnnnnnnnnnnnnnnnnnnnnnnnnnnnnnnnnnnnnnnnnnnnnnnnnnnnnnnnnnnnnnnnnnnnnnnnnnnnnnnnnnnnnnnnnnnnnnnnnnnnnnnnnnnnnnnnnnnnnnnnnnnnnnnnnnnnnnnnnnnnnnnnnnnnnnnnnnnnnnnnnnnnnnnnnnnnnnnnnnnnnnnnnnnnnnnnnnnnnnnnnnnnnnnnnnnnnnnnnnnnnnnnnnnnnnnnnnnnnnnnnnnnnnnnnnnnnnnnnnnnnnnnnnnnnnnnnnnnnnnnnnnnnnnnnnnnnnnnnnnnnnnnnnnnnnnnnnnnnnnnnnnnnnnnnnnnnnnnnnnnnnnnnnnnnnnnnnnnnnnnnnnnnnnnnnnnnnnnnnnnnnnnnnnnnnnnnnnnnnnnnnnnnnnnnnnnnnnnnnnnnnnnnnnnnnnnnnnnnnnnnnnnnnnnnnnnnnnnnnnnnnnnnnnnnnnnggcaaagacaaggaaaatggctccgtatccagcagtgagnnnnnnnnnnnnnnnnnnnnnnnnnnnnnnnnnnnnnnnnnnnnnnnnnnnnnnnnnnnnnnnnnnnnnnnnnnnnnnnnnnnnnnnnnnnnnnnnnnnnnnnnnnnnnnnnnnnnnnnnnnnnnnnnnnnnnnnnnnnnnnnnnnnnnnnnnnnnnnnnnnnnnnnnnnnnnnnnnnnnnnnnnnnnnnnnnnnnnnnnnnnnnnnnnnnnnnnnnnnnnnnnnnnnnnnnnnnnnnnnnnnnnnnnnnnnnnnnnnnnnnnnnnnnnnnnnnnnnnnnnnnnnnnnnnnnnnnnnnnnnnnnnnnnnnnnnnnnnnnnnnnnnnnnnnnnnnnnnnnnnnnnnnnnnnnnnnnnnnnnnnnnnnnnnnnnnnnnnnnnnnnnnnnnnnnnnnnnnnnnnnnnnnnnnnnnnnnnnnnnnnnnnnnnnnnnnnnnnnnnnnnnnnnnnnnnnnnnnnnnnnnnnnnnnnnnnnnnnnnnnnnnnnnnnnnnnnnnnnnnnnnnnnnnnnnnnnnnnnnnnnnnnnnnnnnnnnnnnnnnnnnnnnnnnnnnnnnnnnnnnnnnnnnnnnnnnnnnnnnnnnnnnnnnnnnnnnnnnnnnnnnnnnnnnnnnnnnnnnnnnnnnnnnnnnnnnnnnnnnnnnnnnnnnnnnnnnnnnnnnnnnnnnnnnnnnnnnnnnnnnnnnnnnnnnnnnnnnnnnnnnnnnnnnnnnnnnnnnnnnnnnnnnnnnnnnnnnnnnnnnnnnnnnnnnnnnnnnnnnnnnnnnnnnnnnnnnnnnnnnnnnnnnnnnnnnnnnnnnnnnnnnnnnnnnnnnnnnnnnnnnnnnnnnnnnnnnnnnnnnnnnnnnnnnnnnnnnnnnnnnnnnnnnnnnnnnnnnnnnnnnnnnnnnnnnnnnnnnnnnnnnnnnnnnnnnnnnnnnnnnnnnnnnnnnnnnnnnnnnnnnnnnnnnnnnnnnnnnnnnnnnnnnnnnnnnnnnnnnnnnnnnnnnnnnnnnnnnnnnnnnnnnnnnnnnnnnnnnnnnnnnnnnnnnnnnnnnnnnnnnnnnnnnnnnnnnnnnnnnnnnnnnnnnnnnnnnnnnnnnnnnnnnnnnnnnnnnnnnnnnnnnnnnnnnnnnnnnnnnnnnnnnnnnnnnnnnnnnnnnnnnnnnnnnnnnnnnnnnnnnnnnnnnnnnnnnnnnnnnnnnnnnnnnnnnnnnnnnnnnnnnnnnnnnnnnnnnnnnnnnnnnnnnnnnnnnnnnnnnnnnnnnnnnnnnnnnnnnnnnnnnnnnnnnnnnnnnnnnnnnnnnnnnnnnnnnnnnnnnnnnnnnnnnnnnnnnnnnnnnnnnnnnnnnnnnnnnnnnnnnnnnnnnnnnnnnnnnnnnnnnnnnnnnnnnnnnnnnnnnnnnnnnnnnnnnnnnnnnnnnnnnnnnnnnnttggagagctgttttctcatttcatgtacacttaccccctattgtagtctttgaagttgtgtgcattgcacgttggatgagccagggaaattattacattaacaagcattttgtgtgtacgtagtagttactttgtactgagagaacttgctttggggtgcaattaaacaaactgattttatttgggagaaacagggaagggtgcacttactagcaacctaagcatgatttttaagcttttgcccttagggtttaaattacaattccaaaatgttagacatactgtgtcttttcagtgtggctttaatttctgccccctgtggttctttaataccttttacatttggacacatagtttatgcttttcagattttggttgctatcttgccaaaataagtgttaactgtgtttcaaacttgannnnnnnnnnnnnnnnnnnnnnnnnnnnnnnnnnnnnnnnnnnnnnnnnnnnnnnnnnnnnnnnnnnnnnnnnnnnnnnnnnnnnnnnnnnnnnnnnnnnnnnnnnnnnnnnnnnnnnnnnnnnnnnnnnnnnnnnnnnnnnnnnnnnnnnnnnnnnnnnnnnnnnnnnnnnnnnnnnnnnnnnnnnnnnnnnnnnnnnnnnnnnnnnnnnnnnnnnnnnnnnnnnnnnnnnnnnnnnnnnnnnnnnnnnnnnnnnnnnnnnnnnnnnnnnnnnnnnnnnnnnnnnnnnnnnnnnnnnnnnnnnnnnnnnnnnnnnnnnnnnnnnnnnnnnnnnnnnnnnnnnnnnnnnnnnnnnnnnnnnnnnnnnnnnnnnnnnnnnnnnnnnnnnnnnnnnnnnnnnnnnnnnnnnnnnnnnnnnnnnnnnnnnnnnnnnnnnnnnnnnnnnnnnnnnnnnnnnnnnnnnnnnnnnnnnnnnnnnnnnnnnnnnnnnnnnnnnnnnnnnnnnnnnnnnnnnnnnnnnnnnnnnnnnnnnnnnnnnnnnnnnnnnnnnnnnnnnnnnnnnnnnnnnnnnnnnnnnnnnnnnnnnnnnnnnnnnnnnnnnnnnnnnnnnnnnnnnnnnnnnnnnnnnnnnnnnnnnnnnnnnnnnnnnnnnnnnnnnnnnnnnnnnnnnnnnnnnnnnnnnnnnnnnnnnnnnnnnnnnnnnnnnnnnnnnnnnnnnnnnnnnnnnnnnnnnnnnnnnnnnnnnnnnnnnnnnnnnnnnnnnntgcactcagcatactcagagtcaagctaacgaggttctattataaagcttctaattttaatctgagggaaaacatgttcagggcttctagaacactaaaaattttggcttagaccagtgttcagtctggtgccaaacttccagtggaattcaaattcaataatctgaactttgttcacaggttatcctaatagagtaattcttcactttgctctattgaactgtcttaaggatttgtttaaacagctaagttacttgattaaaataatgataaaattgta

SEQ ID NO: 18774 - DNA, 635 bp, Macaca Mulatta
ggggtgagtcagtagtaaacaaatcgtcccaaatcaatgcactttggatttggctaggagagggaataattcacagtaatttgtattaggcctttctgaatatggccggatcacactggtgttaacatgaacccctgagccgacaagcatagagaattagtttctaaaatcgcggtgagggcgagcccagaccgcgtccagggctgccatgaaggagctggggggattcccaacaggagctccgagcttcactttctcgtcttctccccgcgcccctcccgtcctgccaaccccaggtgtcctgtataaccagttcctgtcgcaagtggactttgagctgctgctggcccacgcgcgggagctgggcgtgctcgtgttcgagaactcggccaagcggctcatggtggtgaccccggccgggcacagcgacgtcaagcgcttttggaagcggcagaaacacagctcctgagagcgcgggacttggacctcggcgggcgggaccgggcggggcggggcctcagaactcaggtgttttttatttacgcgtcagggcttttcttgtctaataaagttgtgatagctagcagtgcggtcccgggcgcctcccggtggggtttgcattcgcggcggactcg

SEQ ID NO: 18775 - DNA, 146 bp, Macaca Mulatta
ctacagcaaaagaacttctgaaacacaaattcattgtaaaaaattcaaagaagacttcttatctgactgaactgatagatcgttttaagagatggaaggcagaaggacacagtgatgatgaatctgattccgagggctctgattcg

SEQ ID NO: 18776 - DNA, 481 bp, Macaca Mulatta
cccgaaagcagagacccccgccacggggagggggacgcgcacacacaccggtcaccgagacggctggacctgcacaccaccgctaccttctgctgctgctgtgaccgccgcagggacggggactggccctcccttgcaggtcggtttgtctgtctgttgtaaataaaaagtatttaattagtttggcctctctcaaatacggtggggtatttgcccaccagggggcagcatcggactcaagcggctgggaaccaagaaacctgggatgaggaaggagtgtgggggcctggatttttgggaccagaagggagtggacttcctggtaacccagacccacctcccctcggacttcatccaggtatactgccaggagatgctgggtcctcagatcccccccttgaagaccttcggttagctggactcgctctggtcccagggagaccaggctcagcatacatcgggggaaataaaagttaaaaat

SEQ ID NO: 18777 - DNA, 243 bp, Macaca Mulatta
agcgctacttgagatcgtactactatcctacaaatctcgcgggaattctgaaggagaatgcagcaagctccatgactgacaggctccgagaaatgcagtcttttttcggcttagaggtgactggaaaacttgacgataacaccttagatgtcatgaaaaaaccaagatgcggggttcctgatgtgggtgaatacaacgttttccctcgaactctcaaatggtccaaaatgaatttaacctaca

SEQ ID NO: 18778 - DNA, 670 bp, Macaca Mulatta
cacgagggctgggatgcaacagaatcagatggagcatgaatggtactgtaccggttcatctggactgaccgagaaaaataacttcaagccaacatcctatcagcaacaaggttattctgcacaccaagctcagcacagaagacaggaacactggtggaggatggaaaggctcgcttaatcaaaaaaattctgagactattaataaataggactgtagtatagacactgagtaattccatgcacctaaaccttttggaaaatctgccgtgggccctccagatagctcatttcattaagtttttccctccaaggtagaatttgcaagagtgatagtggattgcatttcttttggggaagctttcttttggtgattttgtttattataccttcttaagttttcaaccaaggtttgcttttgttttgagttactggggttctttttgttttaaataaaagtaagtatacaataagtgtttttgtattgaaaacctttgttatcaagattttcatacttttaccttccatggctctttttaagattgatacttttaaggggtggctgatttcctgcaacactgtacacacaaaaatagatggtaaggatgctttacgcggttaaggtaaagtaagtctccagttggccaccatttagctataatggcactttgtt

SEQ ID NO: 18779 - DNA, 199 bp, Macaca Mulatta
tgtccactgggcacagaacttatgttgttctctatggagaactaaaagtatgagcgttaggacactattttaattatttttaatttattaatatttaaatatgtgaagctgagttaatttatgtaagtgatatttatatttttatgaagtaccacttgaaatattttatgtattagttttgaaataataatggaaagtg

SEQ ID NO: 18780 - DNA, 375 bp, Macaca Mulatta
ttttcttccctatgatgtaaggctttgcccctatggtgagtttgggtccgctcctctgtgacctcatgctctgctccactttcaggtaatacatctttctttatttctagctagtgcattttctgatgtgtattactgggactatcttttcagctcataacatggaatttgcttttgataattaaatccatgtgcaaaaatcagatttgcatttgcaaaatttaagttcaaagtgatgccctaccacctgtcactctccatctgttgtttctctagaaatacagtcactaggaatcaaaagagaggtgtctgatggaaaagcctgctgttgtgcccatagactggcttcctgaacgacaacaaaaacgttttcta

SEQ ID NO: 18781 - DNA, 434 bp, Macaca Mulatta
  misc_feature (1)...(434): n = A,T,C or G
gccaaggtcatccatgacaactttggtnnnnnnnnnnnnnnnnnnnnnncagtccacgccatcactgccacccagaagactgtggatggcccctccgggaaactgtggcgtgatggccgcggagctctccagaacatcatccctgcctctactggcgctgccaaggctgtgggcaaggtcatccctgagctgaacgggaagctcactggcatggccttccgtgtccnnnnnnnnnnnnnnncagtggtggacctgacctgccgtctggaaaaacctgccaagtacgatgacatcaagaaggtagtgaagcaggcgtcggagggccccatcaagggcatcctgggttacaatgaccaccaggtggtcaactccgacttcaacaatgacaacgaatttgcctcnnnnnnnnnnnnnnnnnnnnnnnnnnnncacag

SEQ ID NO: 18782 - DNA, 1099 bp, Macaca Mulatta
  misc_feature (1)...(1099): n = A,T,C or G
gatacttagaaagattttatggccttgagatgaacaaatttcgagtgacaaaaatgaaatacagtggaaacttaatgaaggaaaaaatccaggaaatgcagcacttcttggggctgaaagtgactgggcaactggacacatctactctggagatgatgcacgcacctcgatgtggagtccccgacgtccatcatttcagggcaatgccaagggggcagatatggaggaaacattatatcacctacagnnnnnnnnnnnnnnnnnnnnnnnnnnnnnnnnnnnnnnnnnnnnnnnnnnnnnnnnnnnnnnnnnnnnnnnnnnnnnnnnnnnnnnnnnnnnnnnnnnnnnnnnnnnnnnnnnnnnnnnnnnnnnnnnnnnnnnnnnnnnnnnnnnnnnnnnnnnnnnnnnnnnnnnnnnnnnnnnnnnnnnnnnnnnnnnnnnnnnnnnnnnnnnnnnnnnnnnnnnnnnnnnnnnnnnnnnnnnnnnnnnnnnnnnnnnnnnnnnnnnnnnnnnnnnnnnnnnnnnnnnnnnnnnnnnnnnnnnnnnnnnnnnnnnnnnnnnnnnnnnnnnnnnnnnnnnnnnnnnnnnnnnnnnnnnnnnnnnnnnnnnnnnnnnnnnnnnnnnnnnnnnnnnnnnnnnnnnnnnnnnnnnnnnnnnnnnnnnnnnnnnnnnnnnnnnnnnnnnnnnnnnnnnnnnnnnnnnnnnnnnnnnnnnnnnnnnnnnnnnnnnnnnnnnnnnnnnnnnnnnnnnnnnnnnnnnnnnnnnnnnnnnnnnnnnnnnnnnnnnnnnnnnnnnnnnnnnnaggttcttcttgctgaagctttctgagagaccagggaccagtgttgatttaatttcttccttatggccaaccttgccatctggcattgaagccgcttatgaaattaaagccagaaatcaagtttttctttttaaagnagatgacaaatactggttaattagcaacttaagaccacagtcagattatcccaagagcatacattcttttggttttcctgactttgtgaaaaaaattgatgccgctgtttttaacccacatttttataggacctacttcttcgtagacaaccaatattgg

SEQ ID NO: 18783 - DNA, 856 bp, Macaca Mulatta
  misc_feature (1)...(856): n = A,T,C or G
tcaaacaaagttcatgtaaatgttaccactgggcctcccataaagcacccgattaaggaaagctaaagaataagatggttgtannnnnnnnnnnnnnnnnnnnnnnnnnnnttaaattttcctaaggcaggttttgtttgaatgaggtgtcttgattagataactacatgccactgaaggagaacagtacttttaaggagctatttttgtttccgcagtagagttgaaaccagctgattaatccaatgaagttaaacagcagagacagatctcgtacataaaagtatcagctaaagtcatgactacaccaagtctttacacaattaagacatctttgcaactgttcaatttaagtactacggttattagataatcgagaaaaacatagttgtaccttaacatctgttgaggtctggccaaaactattgagaaaatacaaataaatatgatgatgataaatggccactgataactcagtagccatctgaatagtcatgcagtttaagaatacatccttgtataatctgacatacaaatttgtcatctcctgcacatgcacaccatnnnnnnnnnnnnnnnnnnnnnnnnncaataatagtgtctcgatcagtcaggagcacggcctctgattcccctgtaatttagttaagctaaattaatacctcataccaaatggctccaggaaaactgtcctgcaggtcagaagggagcccaagaagaaaagcacttggccaacatcgaagcaactctgaccacagcaggagagaacttgaaccaatgctaccactgcatcagtaacacaaggataggtactaggcagaagccatccttcccagtggagggagtgtgagctgcc

SEQ ID NO: 18784 - DNA, 487 bp, Macaca Mulatta
cctcccgctaaccacatgccttgcttccttgcaggggcttacagaaagactacagaacggatctcgtgtttggaacggatgttacctgctggtttgtgcacaacagtggaaaaggattcattgacgggcattacaaggattacttcgtgcctcagctctacagctttctcaaacggccttaagggtttatagtttgggaaattatatatattaatacacatctttcccctgccacttttgcagatattctttggtttgaataattaaaatgaaccagatatcagggtggttaattaaaatgaaccagatatcagggtgttttataaagccatgtaaatacacctgaagaaaataaacatcttacaaatgagcttttaggattttgttgcatttttagacgccaaagtgtgtgaatcaaggtggtgctgagacaagccagcatctggacagagccttaaatgtggtgtttactgtgatcatttattaa

SEQ ID NO: 18785 - DNA, 187 bp, Macaca Mulatta
ccccgggtctgcagctccaggtactatcacgcgcacagcccggcggcccgaccggcctggtgcccgctcccgccagcccccgcctcaaggactgatactgcagtgactgccgtcagctccaactgccgctgagaagggttgatcctgcatctgggtttgtttacagcaatttgtggactcgggggta

SEQ ID NO: 18786 - DNA, 930 bp, Macaca Mulatta
tgtcattctgtgcaaggttgtgggaacactattttatatgaacatgtacattagcattattttgcttggattcatcagtttggatcgctatataaaaattaatcggtctatacagcaacggaaggcaataacaaccaaacaaagtatttatgtctgttgtatagtatggatgcttgctcttggtggattcctaactatgattattttaacacttaagaaaggggggcataattccacaatgtgtttccattatagagataagcataatgcaaaaggagaagccatttttaacttcattcttgtggtaatgttctggctaattttcttactaataatcctttcatatattaagattgggaagaatctattgaggatttctaaaaggaggtcaaaatttcctaattctggtaaatatgccactacagcccggaactcctttattgtacttatcatttttactatatgttttgttccctatcatgcctttcgattcatctacatttcttcacagctaaatgtatcgtcttgctactggaaagaaattgttcacaaaaccaatgagatcatgctggttctctcatctttcaatagttgcttagatccagtcatgtatttcctgatgtccagtaacattcgcaaaataatgtgccaacttctttttagacgatttcaaggtgaaccaagtaggagtgaaagcacttcagaatttaaaccaggatactccctgcatgatacatctgtggcagcaaaaatacactctagttctaaaagtacctgaggtaaacatactaaaatgaattatataatacagcctcttaattctttgaagaactaaaaaaattaggaaacaaagttctagcatttacaaaagtcagatctcaaagctgtgcttgtaactgtgatatttcatttgcttaactgtaaaccatt
